United States Patent Application Publication US 2005/0228172 A9 - sequence listing, part 62

SEQ ID NO: 265851 - DNA, 534 bp, Homo sapiens
cggaattttgctttatttgtttttcaaataaatgttgttccctgtgatttcatagaattaaaaataattttaagactaatctttttagaagaaactactatgataagcctcatgaatatagtaagtaatggggttcctgtccagagaagggagaaaggcttcttcttccattggtcaggataagagttaaatattttaaagaagattggaaaacagaatcatatcttgtcttctcttaacctacagggagctgagcggaaaatcagggatgaagaacgaaagcaaagcaaaagaaaaggcaagtgtcctgaccccagctcccaggtgaatgcctgtaagtagaaatgttcccggcaagcttcagaccttttccattgagaatggtggctggagtttgcacgcagaagacagtgggtgttcttcctgttctgcagtgtggcactgcctcttcctcagatcagcagcagatgccagctcagcgggaggggttttcctggggamtacaggatagatccctgggttttcccgacctca

SEQ ID NO: 265852 - DNA, 622 bp, Homo sapiens
tcggggttggagctccttcgaaggcttaatcctgagaactgtcgttatttcgccgtctggcggttccctggagaaccctacttgcaagcctgccctcatttgacctgcctgggagctccccccgtaagaaaagcctttttctcaaggggatttgtcaaaaatgatgtggaagaaattgcctaatttcatggctgaggaggcacatggccgttggagcagacactgggctcaccaaaaggcttaggaggaaaaactgggcggtgaaaagtgcagaggtgygttcagaggctccaacgtgttcccgggctcctaggaggccgtgcacgttcccaggcacccgggaggctgtgcacattcctgggctgtggaagtgctcagcaaggacctggggcagctgagatctcacctctgggtgaccttgacgctctgagcagcagaaagtgcaggctagggcagagatgctgctggtctggctgagtgtttaaggtacccccatcaccccacagagcccttggcaaggactgggaagctctggcgtcgaaggccatctctgtccaatcattagccacccaccgcactgctgaatggagtttgcagggtccacacacaacacagaaagcag

SEQ ID NO: 265853 - DNA, 622 bp, Homo sapiens
tcggggttggagctccttcgaaggcttaatcctgagaactgtcgttatttcgccgtctggcggttccctggagaaccctacttgcaagcctgccctcatttgacctgcctgggagctccccccgtaagaaaagcctttttctcaaggggatttgtcaaaaatgatgtggaagaaattgcctaatttcatggctgaggaggcacatggccgttggagcagacactgggctcaccaaaaggcttaggaggaaaaactgggcggtgaaaagtgcagaggtgcgttcagaggctccaacgtgttcccgggctcctaggaggccgtgcacgttcccaggcacccgggaggctgtgcacattcctgggctgtggaagtgctcagcaaggacctggggcagctgagatctcacctctgggtgaccttgacgctctgagcagcagraagtgcaggctagggcagagatgctgctggtctggctgagtgtttaaggtacccccatcaccccacagagcccttggcaaggactgggaagctctggcgtcgaaggccatctctgtccaatcattagccacccaccgcactgctgaatggagtttgcagggtccacacacaacacagaaagcag

SEQ ID NO: 265854 - DNA, 549 bp, Homo sapiens
atataaaatttaattcctttggtttaaaatacatcttcaatgatacaattaaaaataacacgcaagacaaaatcaacttcataaaaaatayaaaagttatatgacccatatcccatatcttatcttagaaaaccagcaatttagttcccatacttcattagaatactttaacctaagactgtaactaccagtccatttacacgaatgacctagtctagttccctgaacctaaagatacccgtgactttgttataaaattacatattttagtatttttatatacttaaatgtgtacaaaatgttcccctgccatagtaacatatttttgtgaattcatgaatgttttctagaattgttaacatacaagataatcaaagcacgaaggctctgatgcgtgataaaataatcatttctcaaaacaggaagatgagaactgcatttcgagttgtatcacttggtacgcaatacttgcaatctgtgtgctgtaattacagtgtttcttcactctaagtgcatctgactgatactagcataacaaaagacgtgatt

SEQ ID NO: 265855 - DNA, 549 bp, Homo sapiens
atataaaatttaattcctttggtttaaaatacatcttcaatgatacaattaaaaataacacgcaagacaaaatcaacttcataaaaaatacaaaagttatatgacccatatcccatatcttatcttagaaaaccagcaatttagttcccatacttcattagaatactttaacctaagactgtaactaccagtccatttacacgaatgacctagtctagttccctgaacctaaagatacccgtgactttgttataaaattacatattttagtatttttatatacttaaatgtgtacaaaatgttcccctgccatagtaacrtatttttgtgaattcatgaatgttttctagaattgttaacatacaagataatcaaagcacgaaggctctgatgcgtgataaaataatcatttctcaaaacaggaagatgagaactgcatttcgagttgtatcacttggtacgcaatacttgcaatctgtgtgctgtaattacagtgtttcttcactctaagtgcatctgactgatactagcataacaaaagacgtgatt

SEQ ID NO: 265856 - DNA, 568 bp, Homo sapiens
tgccggtaggcgcggtccctgccgccggggccgggctcctccgggaggtagtgcatgtgggccagggctgtctgcagcaggagctgcggcgcacgaccctggcactgctcttccggaatgaaagacctgaaaggcgggatccgtggggggaaggggcctgcgattaggaggacgcgcggtgggatgtagggctagagggccccagtggtgggagaggtaaggattcggggggaacctcacatggccccagatcagagaaaccaacacacaccaccaccccgggcatctgccgtcgcacctggcgacggtggcggtgaccccgagcgcggtcatggcggtgagcacgtgctccacggctagcacgtcctcgtcgtagacggtgagcacaagcagcgcggcgaagagtgcrcccgcgaagaaaacgagctggcgggccagcagcgtgcgcaggggcgcggggggcgcagcggtgcgcaggaaggcggcggcggggcggtaggcgcgggccaggcgcgcgcgcagctcgtgcggcagctcgttgaagtggcgcagctgcaagcgcgccagg

SEQ ID NO: 265857 - DNA, 528 bp, Homo sapiens
aaattgcacataaaaatttgctattgactaaaaattgaaagaagcaaatctttttttttttttcctgagacaggcgctcgctctgtcacccagactggaatgcagtagagtaatcatagctcaccgcagccttgaactcctggtctcaagtgatcctcctgcctcagcctcccaagtagctgggccataggcgcacaccaccatggctggctaacttttttatttttattttttttacttttttgcagwgttggggtcctactatgttgcccaggctggtctcaaacttctggactcaagcaaacctcccacctcggcttcccaaagtgctgggattacaggtgtgagccaccatggctggcaagaagcaaatcttgttgataaaatttctatttgcaaaatttgatttagaataactggacttggtagatacaatgttcataaaagtaaatttctggctgggcatggtggttcatgcctgtaatcccagcactttgggagactgaggtgggtggatcacctgaggtc

SEQ ID NO: 265858 - DNA, 528 bp, Homo sapiens
aaattgcacataaaaatttgctattgactaaaaattgaaagaagcaaatctttttttttttttcctgagacaggcgctcgctctgtcacccagactggaatgcagtagagtaatcatagctcaccgcagccttgaactcctggtctcaagtgatcctcctgcctcagcctcccaagtagctgggccataggcgcacaccaccatggctggctaacttttttatttttattttttttacttttttgcagtgttggggtcctactatgttgcccaggctggtctcaaacttctggactcaagcaaacctcccacctcggcttcccaaagtgctgggattacaggtgtgagccaccatggctggcaagaagcaaatcttgttgataaaatttctatttgcaaaatttgatttaraataactggacttggtagatacaatgttcataaaagtaaatttctggctgggcatggtggttcatgcctgtaatcccagcactttgggagactgaggtgggtggatcacctgaggtc

SEQ ID NO: 265859 - DNA, 581 bp, Homo sapiens
catgtgcttgtgccttctcttacctctagctaaatgaagaaagctgtcttaaggagagaatgaggtgaagacagagagaggagccaggttgggagcaaaaaagaaagacctcacaacactacttacatttctgaatccactcaggtattttgcagttacaagaagcaataaatccccgttttagctgagagctgagccactatcactaccaacccgaagagttctgactaartacgatgctgtaaccagaagagacaatggtcacatgactccagggaaagtaaacctctccacctcactcccacaactctcccatccacgctaatgtttccatattacctaaaattattcatagtaataccacataagattccaccagtttgaaattcatctggactttaaaaaatctcaacccacctgagtgtgaattagtttaatccagtggctttgattttaacatcaaattgaaatgaaacatatgagggaacagaaattttttgataaagaaacaagaagagtttttttgtttttgtttttgttttttttttaatggagagaaagggagaacaggccctagtgag

SEQ ID NO: 265860 - DNA, 576 bp, Homo sapiens
gtttaggtgctgtgaaaactaggatttcttatgcctgaagggaataaaaaatcagcgactgaaaagcagcagtgattcatgtatttattttttwaaaaggctggcaacaaatgacttgtagatttacaaaaaccctataatctagcttggaagtcactgtccctattgtaagaactcagtcacaggtacttaatgaaaaaccgcagccatgaaaatgatccacacactcattccaccagtgcgaccaaaccaaatagggttcatttgcccccacacaaaggaaagcccaacatcacagcaccagtctcttgcagagaaaggtttactgcaaagcaaccgaatgaggagacaggaggctaactcaaatctatctcccatgccagcctaaaagcagtatactgaggggagaaattttgggaggaggatttcgggattggcgagtgatttggtggaggaaagggggaagtttgtaaaatccctagggtgtatgcagttgtctcttcatgcctcttcatgagtcacatgtgcaaatgcagggggagttggtctgaaacatatggtggaaattccagctat

SEQ ID NO: 265861 - DNA, 576 bp, Homo sapiens
gtttaggtgctgtgaaaactaggatttcttatgcctgaagggaataaaaaatcagcgactgaaaagcagcagtgattcatgtatttattttttaaaaaggctggcaacaaatgacttgtagatttacaaaaaccctataatctagcttggaagtcactgtccctattgtaagaactcagtcacargtacttaatgaaaaaccgcagccatgaaaatgatccacacactcattccaccagtgcgaccaaaccaaatagggttcatttgcccccacacaaaggaaagcccaacatcacagcaccagtctcttgcagagaaaggtttactgcaaagcaaccgaatgaggagacaggaggctaactcaaatctatctcccatgccagcctaaaagcagtatactgaggggagaaattttgggaggaggatttcgggattggcgagtgatttggtggaggaaagggggaagtttgtaaaatccctagggtgtatgcagttgtctcttcatgcctcttcatgagtcacatgtgcaaatgcagggggagttggtctgaaacatatggtggaaattccagctat

SEQ ID NO: 265862 - DNA, 439 bp, Homo sapiens
actgatacatagcagggacacagtgaagagaactgcaggcaaatagaggcggaggccctggattaaggcagccctgaagcttgttctaattctgcactgtgagctaataccattcttcaccatttaacatgttactttccaccaagagcatccttactgattcagaatgcttggwaaactgaatacagaagaaggtactataaccatgtagcaatcaagcctgaagctttgaggtttgcacaggccccaatccaaatcctggttttcctacttatagctataggcctacgggcaagttattgacctccttaaacttcagtttcctcataggaaaaatgtgtccattacacattgcataatgacataatacaagtgaagcacctgcccagtagtaaataatcaacaaatgttgttatgctgcagaaaggtgaggtgtaat

SEQ ID NO: 265863 - DNA, 573 bp, Homo sapiens
ctccaatgctcctgtaaatatctttaataaaattttcatcagttgctaaattgatagatctgaatttccccatgcttcctggtttttatatgtttcttgacaaataaagctgatttaaatctcttcctgcggcattgtaccccaagttattttctttactctcttccctcatgtgtcttatcaaggcagatgttatccaggcaggtgaaattaagartagaggcagttgtccatgtaattcaccaaacctgatgtgaagtaaaagagatttaaagagacagaaccacccataatagccacctgtgtctatcagattcaccaaataattgtttaacttttcacttcattttggcatgacagctagagatggagtgaacctatgggcatgagtagattgttgtacagaagcaaagataatcttttaggattgatatgttataccttctgtaagggaaaatcatgactcactaatttgggtatgtgatctgggaatgtaatgagtctgtgaacaaaggagaatgcgtaaagagcatttgtttaggtttaaaatgccttgcatacgcacaagcccag

SEQ ID NO: 265864 - DNA, 606 bp, Homo sapiens
agtactgtgtacaagtgtagccattgtttttcaagagaggcatattagcatagcaagacgtgaagcagttatgtgaagacttcaagatttttcagtctggagtgacaagagtatagcgataattataaaaacttgcaaaaatctagaagtgtttggaaaattgcataacatattctggaatactagaccaataaccattcccaaaactttagaagaggccatttcagtattagtgacaagaagaagcacatgaaggagttttttttcagaggctataacagctgtatatgaaaataawttcaagaaagacttctataaaggcatggtctgtgtgggcatttggaatacatttctaaccatttccaatttgtatccttaaactacatcctaccacagtaatttacatgatgctactgtcagacaaagaatattggagtcactggataccaacttagcctgagatgccacttcttttatattggtttaaataacttcttcatttgtactaaggaatttcatggtccatttttttttcttttttaattgtttgtcatattaatttcctacattttaaaaatattcatcccctatgcaactcattcccta

SEQ ID NO: 265865 - DNA, 553 bp, Homo sapiens
gggagcccaggaaccaagctagaattccagggccagcaccaatttcagaggaaaagctgggcaccttgcctggaagccatggggccatgctgtgaggcttctgctcacgtggctgcctgaatggctatgaactgagcagagcccactttggggtttacttgtgcttctgcggggaatcagtatagcttggtggctaagagcattgtctttgtagttaggcctagattcaagtccaggctttcatttacagcatatgaccttggacaagttgcttaacctcttttagctgtgattcctcatttctaaatggcaataatagttcttgccttataggtatgtgaggatgaagaaatgatacaaagaaagcagaactcctaatagctgtaataagcaccaaacttttgatgacgcrtcttctcaaaagaaaaagcgcccctaacgtcctgccctgctgagccctctttgattcagggataggtggtcctgaggatgctggggtaaattattagggcaggcagcctggggtacatagggtctgacacatctcagctgc

SEQ ID NO: 265866 - DNA, 541 bp, Homo sapiens
gaatatcattaatatcactgtcatgatattgacaaaacctggcatcatcctcaggtggaaggccaaggcagctatggctgcaacagctcctaggcatcaagcagcattttccatcccttcattagtctctggggcaacacttcctaacagaatttaccagccattactgctgcccccgtcctttctgttcttgcctccaccctagaccttgcttcctgtatcacataagaatgtttttggctgcaagtagcagggacataaaccataaaggcatttcttgtttatgtaacaagatagtctacataggtgatcttggggttgctcctacagcccagtgatgtcatcaaaaactcaaaatttctccatttttcttcttacttccctaagcatgttggctttttgtcctcaggtttcttgcctcttgatcacaagatgatcactgtattcaggttcaagggaagggatggcaccaaagagcttgtgtcttaagctttgccttttaatgagaacgcaaaagmgtttccaaagtccccccagaaat

SEQ ID NO: 265867 - DNA, 496 bp, Homo sapiens
atcatgttcatggtgacaaatataagggtgctttgggttaagtgcttagatgttctcagttcattccatctggaagtcgttatgccaccaaggactctctcttccctacatttgggtgaatttgtatgcaagaaactgattaagaatctttgggccccactgtgttaatcttaccatttgagaacaataatcagaaggacatcaaggttagaaatgcaacagcacagcttcataaatcattgagggggcactgttaatactgagataataagtcataaatatctgttccctcaatcccccatggcaaactggagaacaaagacaccagctaagggaaagcaagtgactgcgcagaaaccttcctcsctcagaaagttataaatgagcaaagaaatccaagtctaatgcaagactagagtaaaaccaacaattggcatcatacattatgggttggttgtttgcttgctataattaagttgacatcagtggttaacag

SEQ ID NO: 265868 - DNA, 496 bp, Homo sapiens
atcatgttcatggtgacaaatataagggtgctttgggttaagtgcttagatgttctcagttcattccatctggaagtcgttatgccaccaaggactctctcttccctacatttgggtgaatttgtatgcaagaaactgattaagaatctttgggccccactgtgttaatcttaccatttgagaacaataatcagaaggacatcaaggttagaaatgcaacagcacagcttcataaatcattgagggggcactgttaatactgagataataagtcataaatatctgttccctcaatcccccatggcaaactggagaacaaagacaccagctaagggaaagcaagtgactgcgcagaaaccttcctccctcagaaagttataaaygagcaaagaaatccaagtctaatgcaagactagagtaaaaccaacaattggcatcatacattatgggttggttgtttgcttgctataattaagttgacatcagtggttaacag

SEQ ID NO: 265869 - DNA, 536 bp, Homo sapiens
gggcccctttcagctctcgaacgttctccattcattattgartaagtatttgttgaaagcttcctctgagccagttttccagcagtgagtaaatggacaaagatcccttccagatagtaaacaatagatatcataaacaagtaaatgtatatagttcgttcatgggagatgagtgctacagaaaagacaaagtcaggcagagaaggggagagtgagagtgctggcagttggaggagaagttgaaattgaagtggaatagtcagaaggagcctcaccaagaaagcgacttttgagcagagagagctgaagcaggagagtgagtgagccaggaagggcactcccagtagagggaatggccaatgtggtagacttgaggcagagcaagctctggagcccaggagtagcaggaggctcgcatgttgctgcagagagagcaacctgatggatgaggccaaatgagaaggggccagaaccctagaaccctgtatgcctttctgaggactaaccactcctctgagagggaatttggatgactt

SEQ ID NO: 265870 - DNA, 536 bp, Homo sapiens
gggcccctttcagctctcgaacgttctccattcattattgagtaagtatttgttgaaagcttcctctgagccagttttccagcagtgagtaaatggacaaagatcccttccagatagtaaacmatagatatcataaacaagtaaatgtatatagttcgttcatgggagatgagtgctacagaaaagacaaagtcaggcagagaaggggagagtgagagtgctggcagttggaggagaagttgaaattgaagtggaatagtcagaaggagcctcaccaagaaagcgacttttgagcagagagagctgaagcaggagagtgagtgagccaggaagggcactcccagtagagggaatggccaatgtggtagacttgaggcagagcaagctctggagcccaggagtagcaggaggctcgcatgttgctgcagagagagcaacctgatggatgaggccaaatgagaaggggccagaaccctagaaccctgtatgcctttctgaggactaaccactcctctgagagggaatttggatgactt

SEQ ID NO: 265871 - DNA, 522 bp, Homo sapiens
tacaatcaacttggataaagaatatataattttaaattcctttagaattactcagttttactcgtaggaacattttaggaatgagacatcaaaaatatggtaagatttgttttaaaatcagcaatcagaatggcaaagccagagctccatatgctctctctccggcagctctgattacaaagacagagccataagcccttgaacacaatcaagaagaaaatttactgattgtttaatatctttagcattggtccttttgatcactcctctttgacatgtcacttctggcccttgatttttcttcacytactcagttcaacttctccttcttggttctttgcaaataattttttttctgttcattcaactcttacgttgcagcatcctttattattagcctttttaaacaacagtctaaaattatacaacttatgtattttcctatttgattattgcttttcttcttctagtagaatgtcatcttcccagggtggggacttggtctctttttctactgttgta

SEQ ID NO: 265872 - DNA, 610 bp, Homo sapiens
ttatgatgctgcagaatctcacctttgacctggctggtatcagacatttgagtgcatagcacgaggattttcatagagtttacattgacaccgtgtttgggagtccttgaagaagcaggaaccaggtggcttcagtccccacctcatataaatgtctctataatcaacaccaatccccattcattactcatttaaccaagagctgggcaggcacccaggccatatctgaatgatttagctgggccatcacrcctatctaagaaggagagcaaagataccagaaaaagtttggctgtccatcaatggtcacaagttaacatgtgaccctaaggagaccaaaaacacagatatgaaataaaaatttaccttgaaaagaacataaagtcaaatcagcaatataaaggtaaaattgatgaggaaaaagaaaaacatgaaaatgagagaataaattgtcacttcagaagataatttgtgaagatctagcttaagaactaacaatactagatagagcaaagtcagtagccaatgtacagtagcaaaaattttttaattaaagagaaaatgttgaggtgatgagaatgagattcatacaggcaaatgtacagtgtgt

SEQ ID NO: 265873 - DNA, 566 bp, Homo sapiens
ctttctttagctttagagtgttgtgcatttaatatgagagacttcactttaggaaatgtccatcttgagccagaacactggtttcttcactggtaataattaccaaatactggagaagttttttataaaattgacatgctggatgttttgtcttcctaggaatgcatcacagaatcatagatgaatcacttctttgaatgcttctgatgcaaccgttgcgtccacctctgatttggaatcaattattgtaattgagttgcagatatttcttattttactctcattgatgtggaacactgtttgtataactaactttggtgcatacacggagtcattcagacttattttgggggctctaacrttcctgcaaaatcttacatttgtgtttttgcatgtttgatagtctaaaaggttaatcttcttaatgtctcttcatgaaatacaaccatatattttcagtgcctgagtttgcatttatatttaggatccatattaaagaaaggtcaaatgatatcacagaattttgttgtagaattgaaggtttgtaacaattcatgtaatgaaga

SEQ ID NO: 265874 - DNA, 438 bp, Homo sapiens
tgtgcttgctaggagttaaaaaggaagccttgaataaaaagggccacagaaatttacaccacaaggtaaaatttactgtactttaattattttttaattttaaaaatgaaaagccctattatatctaaagtaggaagagttataaaatagagtaatcattatattttaattttaatttatattaatgaactgtctttttaatgcctataatgtctaagtcatagttcatttccaaacgaaattattatgagtctagaatcagaagtgtggtttaaaatagtattttacacttcctgttaagtcrtcatcaattcaattaggttgctgatctagatattcattttcacactggtctttcaactaatgttcctcactcctatatggtgcctttatttcctctagtctttttacccagcaccctaatcctgctacagggta

SEQ ID NO: 265875 - DNA, 438 bp, Homo sapiens
tgtgcttgctaggagttaaaaaggaagccttgaataaaaagggccacagaaatttacaccacaaggtaaaatttactgtactttaattattttttaattttaaaaatgaaaagccctattatatctaaagtaggaagagttataaaatagagtaatcattatattttaattttaatttatattaatgaactgtctttttaatgcctataatgtctaagtcatagttcatttccaaacgaaattattatgagtctagaatcagaagtgtggtttaaaatagtattttacacttcctgttaagtcatcatcaattcaattaggttgctgatctagatattcattttcmcactggtctttcaactaatgttcctcactcctatatggtgcctttatttcctctagtctttttacccagcaccctaatcctgctacagggta

SEQ ID NO: 265876 - DNA, 554 bp, Homo sapiens
caactaatgttcctcactcctatatggtgcctttatttcctctagtctttttacccagcaccctaatcctgctacagggtataggctctttctagtggatgtgtgtgagattcttccagctctccatgaagagtgagacaggaaagaaaaccccatccagtcacttcagccttaaagggccttctttgtttttccaatgagyataaaaatgtatgaatactacatagaacaaaagttatctctaaatgtaatacaagtgaagactctgaggaattctcctctaaagaaaactcttttttcttttttttgtcccagagctccccataatttttttttttactttgtaatcttttcttcagttttatttcataggactctgtggcatacagtatggaaaatgcctaagctgtgtttttttcacaggttatgagtgtaaaggtaaaaaccaccaagtgggagaaaaacagagccggaaacttgtctcctagatagaaatagcaatttttcccctttgttctgggtacaagtccaggaaaaaagggaagacaagtgaa

SEQ ID NO: 265877 - DNA, 554 bp, Homo sapiens
caactaatgttcctcactcctatatggtgcctttatttcctctagtctttttacccagcaccctaatcctgctacagggtataggctctttctagtggatgtgtgtgagattcttccagctctccatgaagagtgagacaggaaagaaaaccccatccagtcacttcagccttaaagggccttctttgtttttccaatgagcataaaaatgtatgaatactacatagaacaaaagttatctctaaatgtaatacaagtgaagactctgaggaattctcctctaaagaaaactcttttttcttttttttgtcccagagctccccataatttttttttttactttgtaatcttttcttcarttttatttcataggactctgtggcatacagtatggaaaatgcctaagctgtgtttttttcacaggttatgagtgtaaaggtaaaaaccaccaagtgggagaaaaacagagccggaaacttgtctcctagatagaaatagcaatttttcccctttgttctgggtacaagtccaggaaaaaagggaagacaagtgaa

SEQ ID NO: 265878 - DNA, 494 bp, Homo sapiens
attattcccagaaatgcaaagttggcttaatatctgaaatcaatcaatgtaacccaccatatcaatagttaaaaagcaaaaatcacaacatcattgcaataaaagcagaaaaaaccacttaatcaaatcaaatgctctgtcattataagaaccatcaacaaactatgattgggaaaaactttttaaacttcacaaggggcatagacaaaaactccagggttaagcctctaaaatgaggaacaagacaaggataactgctctttccattgttatttaacatcatactggaaattctaacmaagacaaagaggcaaaagtaagaaagtaagtagaaagaaaaacaggagggaaggggaggggaggggagagaagggaagggaaaaaggaaggaagaaaatgcctccagattgaaaaggagacagtgaaattatctctatttactagtgacataatctggtatataaaaatattggccgactgtgcctgtaatccca

SEQ ID NO: 265879 - DNA, 621 bp, Homo sapiens
atatgcagatagaatttaatctgggggtaattatgaaagttatggtgtccttgtacctaagggtttttttttaattgctccgaggcagcggttaagataaaggtgccaatcaaggtccaaaggaatggacagcaaacagaagcttgttgcgaagaaaatgaaatgatcagaatcagactttgaccagataaactactgtggagaccatrcttgctaattttttgcatgcaaaagatcaaagcctactaactttttaagggagctgtactgccaaagatattccaggcctggctcaaaacagtctttaactgctcaaacacaggacatctccagtccctcagatttgcacctactgggactggactacaaacgtcacaccatctctagaaaggacacactcttccatgtccattttcaatgcggtcatgaaagaaaatagacagagatccatcctaccagtggaactaagtactgccaatttggctaaccaaggatctcatttctctttcaggtatattcttgtccaagaggatgtggtatctacatataggaggaaagatatacgtgtacatgtggtggctgaaccatttgattgtggtgaatattgctgaatacttacta

SEQ ID NO: 265880 - DNA, 661 bp, Homo sapiens
ccagtttttgatactgtgcttagtatagaaacacaggtacttttcacttgcctcctttgtaaacattagtccactgagtggaaacaaaacataccaagttattaaagaactagcaaacaaagtaacatttttttacagcaaaattttaagagagatgagtacaattaataaaatgtgcattttagaagagcaactagtgtctttgaaaagcagcttgcctccttgactataatccagtttgcagataaagactgacttcctctgaagaatttcatttctagaggcttctgtctttagttgactggacctttaaaaatacwtgatacaataaagagccaatagaagatcttatggacccctgtaaaatgtattccggatatattctctgtgtctccctccctcagagctcttaacacctgcctaaccctaggctgagtggtgtgaggcattccaagaaagtagaaagaagtaaaagacactctctttgacctcagcttacagtctagttgaggagaacaggcatttgcatgaggtcctatttcacagtggcaagtaacaagatctttggagacagctttagatgtgagtacaggctctagttcttaggaggatcatgtccttgtgtacaatttaaatctgttttttcatctataaaatgaaa

SEQ ID NO: 265881 - DNA, 621 bp, Homo sapiens
atatgcagatagaatttaatctgggggtaattatgaaagttatggtgtccttgtacctaagggtttttttttaattgctccgaggcagcggttaagataaaggtgccaatcaaggtccaaaggaatggacagcaaacagaagcttgttgcgaagaaaatgaaatgatcagaatcagactttgaccagataaactactgtggagaccatgcttgctaattttttgcatgcaaaagatcaaagcctactaactttttaagggagctgtactgccaaagatattccaggcctggctcaaaacagtctttaactgctcaaacacaggacatctccagtccctcagatttgcacctrctgggactggactacaaacgtcacaccatctctagaaaggacacactcttccatgtccattttcaatgcggtcatgaaagaaaatagacagagatccatcctaccagtggaactaagtactgccaatttggctaaccaaggatctcatttctctttcaggtatattcttgtccaagaggatgtggtatctacatataggaggaaagatatacgtgtacatgtggtggctgaaccatttgattgtggtgaatattgctgaatacttacta

SEQ ID NO: 265882 - DNA, 569 bp, Homo sapiens
cagcctcctgagtagctgagactacaggcgtgygccaccacactgggctaatttttgtatttttggtagttacagggtttcaccatattggccaggctggtctcaaactctggacctcaagtgatccacctgccttggccttccaaagtgctgtgattacaggcatgagccaccgcgcccagctggtttgggaaatttttgaatgaatagtgtgtagttgcaataaatcagttgagttgtaggttaagtctagagaagtcagtccataatctcttgagctgaaagacaaaccacaaaatgactattttggcttgggaagccatgaacatggctttcttttcttttcttttgtaagtgaagcaattgaaacaaacttttcttggtaaagggaatgggaagatttctggggtctagaaggtaactataccagttcctagtctaggtgccacttcagaggccttctgtagcatagaagataggtaagacaaatttgtgtaactgataaaggcagtttttgaaaataagctttttatgaaagtgcagggacatagctatattaggttttagtg

SEQ ID NO: 265883 - DNA, 602 bp, Homo sapiens
aggtagtttcctgggctaataaaagcttagtttaaaactgaacatgcccacaagtgttcttaagtcaacactgaacatgatatctttttacagattgattctgccatttagtgatgcaaaaatgactgcatatctcattattaactataatttaatcagctattattttatatcaataatgccatcttagtaaacttctggtctgataacacgcctaataggtaccaaaattcaggttttacaaaagtattcattatttgtcactctatctgtttatatgcattagtttaaagcttttatgacatasagtagtgctgtaaagattcaatgaaagatccattatgaatccttccctaaagggacgtgcagtgtaatagggaagataacaaatgtaaaatatttattgtatgtggtagaagggcctcagttccttatagagtgcctgatactcagaaaaccaattttctgtttggtcaatcaggattggcttacttgggacatgaaagatgacaaggatttggacacagtgaaatgagatagtatagggaaagtctttctacacccttttaaagtaagtatgagcccaaacctacatgcacaaa

SEQ ID NO: 265884 - DNA, 407 bp, Homo sapiens
ggatatacacctaaagggatacaaatcattctaccataaagatacattcacatgtatgttcactgcagccctactcatgaaagcacagacatggaatcaaactaaatgcccaccaatgacagactggataaagaaattgtggtacatacgtaccacgtaatactacacagccataaaaatgaaggagatcaygtcctctgcagcagcatggattgagctggaggtcattaccctaagcgagcaaacacaggaacagaaaaccaaataccacatgttctcacttaaaagtggtagttaaacattgaatacacatggacacaaagaaaagaacaacagatacaggagcctacttgagggtggagggtggaaggggggtgaggactgaaaaactaccttttgagtactat

SEQ ID NO: 265885 - DNA, 532 bp, Homo sapiens
ttgtgggctaacctgcacagcttgaactatactttgcacaaagttactcatgtggaaatcagaactgaatcaaatatcactagtcttaaagttactttttcctgaacaaaaatggggtacaatttaacacatgttaaataagctagtatcctgttctaatatgtactatacatttttctgaaatacataaataaaagtaaacctgaagtataaattaygttctctaaataataccaagatgtcatgtgttttcagggtctggggaagtactgaacaaagaatatgtctaagaatatgtctaaaaatatttctgaaagatattttaaaagctattattctctaggaaatagacccacaattgaaaagataaagaattgatacttgaaaagtacaaataaatatttggatatttcatatgttcacatttaatcaacaacatttaggaagggcctaactctctactatatgctgcagatgacagaaaataaatgaaaaactgaatttatgtcttaatgagtttataacctggtgg

SEQ ID NO: 265886 - DNA, 640 bp, Homo sapiens
taccattttctttgcccttcattcacatatgttgatgcatatttcaatctaatgtcatttttcttcatcataaaatatatatttgaatactgtttttgtaatgggcaagatattattgattttttcaccttttgtatgtctgggaaaatgctttatgtttcctttattttttaaattattttttgctgagtataaaagtttacattgatttttctttcagcattttaaaaatgtaattccactgatttctctcttgtattattttatttttatttatttattgagacagagtctcaccctrtcacccaggctagagtgcagtggtgtgaacatagctctttgcagccttgaactcatgggatccaactatcctcctgcctcagcccctcagccttctgagcagctcagagtacaggcatgtaccaccacacacagctagtttattattattattattatcatcattatttgtagagatggtgtcttacaatgttgcccaagctgctcacaaactcctggcctcaagccatcctccgaccacagcctcccaaagtgctgtgattacagacataagccaccatgcctagccttatattgctttaaatgagaaatatactgtttccatatcttttttacactg

SEQ ID NO: 265887 - DNA, 640 bp, Homo sapiens
taccattttctttgcccttcattcacatatgttgatgcatatttcaatctaatgtcatttttcttcatcataaaatatatatttgaatactgtttttgtaatgggcaagatattattgattttttcaccttttgtatgtctgggaaaatgctttatgtttcctttattttttaaattattttttgctgagtataaaagtttacattgatttttctttcagcattttaaaaatgtaattccactgatttctctcttgtattattttatttttatttatttattgagacagagtctcaccctgwcacccaggctagagtgcagtggtgtgaacatagctctttgcagccttgaactcatgggatccaactatcctcctgcctcagcccctcagccttctgagcagctcagagtacaggcatgtaccaccacacacagctagtttattattattattattatcatcattatttgtagagatggtgtcttacaatgttgcccaagctgctcacaaactcctggcctcaagccatcctccgaccacagcctcccaaagtgctgtgattacagacataagccaccatgcctagccttatattgctttaaatgagaaatatactgtttccatatcttttttacactg

SEQ ID NO: 265888 - DNA, 607 bp, Homo sapiens
ggaagtgacatctttactatattgatttctctcatcccaaacattttataaattccttatttatttagctgttactttatgtctttcaataaggtttcacgattttttcatgaagktcttatgaaacttttgctagctctattcagaggtttacagtctttgattctttgtttcaagtacagaggggtgctgttgtgttttatatgttggcctaatatccagaaacctttctctttcattatattagctctaatatcttgtttgtactttaaacaattttaagaacactgctatcatttaataatggtaacagttttgactttttgcttctaattcttataattttcttttccacgtatcactatcatgtgcagaatatcaagtacagtgatgagtacaataagttgataatgggtatcattttctcctgattttaaagaaaagattccttgcctttataactgtatttatttgctgtaaatgtttagtcaattccttgtgatacctactgttttagagttttttttttaaatcatgaatgggtaaactgaattttatcaagtactttatatgggcagttaacaagatgatcacgttatttcaaacc

SEQ ID NO: 265889 - DNA, 607 bp, Homo sapiens
ggaagtgacatctttactatattgatttctctcatcccaaacattttataaattccttatttatttagctgttactttatgtctttcaataaggtttcacgattttttcatgaaggtcttatgaaacttttgctagctctattcagaggtttacagtctttgattctttgtttcaagtacagaggggtgctgttgtgttttatatgttggcctaatatccagaaacctttctctttcattatattagctctaatatcttgtttgtactttaaacaattttaagaacactgctatcatttaataatggtaacagttttgactttttgcttctaattcttataattttcttttccacgtatcactatcatgtgcagaatatcaagtacagtgatgagtacaataagttgataatgggyatcattttctcctgattttaaagaaaagattccttgcctttataactgtatttatttgctgtaaatgtttagtcaattccttgtgatacctactgttttagagttttttttttaaatcatgaatgggtaaactgaattttatcaagtactttatatgggcagttaacaagatgatcacgttatttcaaacc

SEQ ID NO: 265890 - DNA, 607 bp, Homo sapiens
ggaagtgacatctttactatattgatttctctcatcccaaacattttataaattccttatttatttagctgttactttatgtctttcaataaggtttcacgattttttcatgaaggtcttatgaaacttttgctagctctattcagaggtttacagtctttgattctttgtttcaagtacagaggggtgctgttgtgttttatatgttggcctaatatccagaaacctttctctttcattatattagctctaatatcttgtttgtactttaaacaattttaagaacactgctatcatttaataatggtaacagttttgactttttgcttctaattcttataattttcttttccacgtatcactatcatgtgcagaatatcaagtacagtgatgagtacaataagttgataatgggtatcattttctcctgattttaaagaaaagattccttgcctttataactgtatttatttgctgtaaatgtttagtcaattccttgtgatacctactgttttwgagttttttttttaaatcatgaatgggtaaactgaattttatcaagtactttatatgggcagttaacaagatgatcacgttatttcaaacc

SEQ ID NO: 265891 - DNA, 653 bp, Homo sapiens
acaaggctgacagagctcacagtaataaataagaagggagggcagagttttaggaggtgacactcttgacagaaagtaatcagaagaatgcaacactcttgacagtttgatagtacttgaagatgtactacaccacagagaagaggagaagccggtgatgtgctgaggcctacgagtgttcagcacccggtgcagacagcagagagaaaggaggagtacaggatgccacagaggccaacaaccccttcaggggttccatttccctccatgggtyggtttcagactaacatcgacacttttgttcttcacagagttttaggtcacaaatgcccttaaactcacaattttctgagtcttttttaggttcatctaccaggaatgcttacccttcccactctttctccaagcgtggttgtgactcagagtgaccagcctgaatgagtgctaagagaacacaatgctgagctcacaccccggaaacagcacccagggatgagctagcactcttggaaagcgggcagcaaatggatactgaagggacctgcaatgtagaccagaggcaggaggagaaaattgctcctaagggatgttggccatgttgtccgggggagggagggaggggctggagcagaggaagccagcatggagtgcag

SEQ ID NO: 265892 - DNA, 590 bp, Homo sapiens
tgtactacctaatctctatactgactcaattatctctcctgtttcctccaagccatctataaatgctcactcactgaaaggacgttwgccttatgctataaaaaaaattttttccaggaaaaaaatcgacattcatttctgcatattatcttcatactccttcctgcaataacacaactttggaaatgatattcctgctctcttcccagaagatgagatagtaagacagtgaatacctaaagaaaatggaaaatatatgtgaaggaggtgtccagccaagaaactgcctaatgtactggagatctaaagtgaccttttaaggttaagcacagagcctcctaatgaggtcctcatgcagtttattacctgccatccaggctgttccctctaaagcagagctacatagactgtcaaggacattgagtttcaaatacagtcaccagctgggtgacctcatctgaaaagggagcatgagccctacctagctgggtttctctcagggttgcaaaccacactttatgtaaaagtgcttacccaatactcagctcacaataaatgaccagtacatttgaatctaaattgagtggact

SEQ ID NO: 265893 - DNA, 590 bp, Homo sapiens
tgtactacctaatctctatactgactcaattatctctcctgtttcctccaagccatctataaatgctcactcactgaaaggacgtttgccttatgctataaaaaaawttttttccaggaaaaaaatcgacattcatttctgcatattatcttcatactccttcctgcaataacacaactttggaaatgatattcctgctctcttcccagaagatgagatagtaagacagtgaatacctaaagaaaatggaaaatatatgtgaaggaggtgtccagccaagaaactgcctaatgtactggagatctaaagtgaccttttaaggttaagcacagagcctcctaatgaggtcctcatgcagtttattacctgccatccaggctgttccctctaaagcagagctacatagactgtcaaggacattgagtttcaaatacagtcaccagctgggtgacctcatctgaaaagggagcatgagccctacctagctgggtttctctcagggttgcaaaccacactttatgtaaaagtgcttacccaatactcagctcacaataaatgaccagtacatttgaatctaaattgagtggact

SEQ ID NO: 265894 - DNA, 560 bp, Homo sapiens
acggaacgaagggggatgaacgtagaaatgaaaacttaaaacaaaagaaactgttttaaaggggccaggggaagaaaaagggctccctactcctagtaagcaaagacagcccccaccccragcttcttcagcccttagtatttattgggtagaataagcagggaggaggaggtaacgattggtcagctgcttaactgatcacaggttcatattattactaacaggcttcaggtgtgccctgtagataatcacaagaaacacttgtgcctgggtcgtgactgccctcagcattccttctgggcggcagacgcagtttgtcagtttgccaacattctgcttttatgagaacagtttgctgtttgctcatatagcctccagtggtatactgagctgatcacgaccctcactctttcggcctgcatcagtcacccttgagacagcccacagggtctggaatttatgagtggtttgccattgttggggcatggagcttggattccatcctaagggaagtggggaaagttttaagcaagagaggatcttgatcatatttgacttcc

SEQ ID NO: 265895 - DNA, 560 bp, Homo sapiens
acggaacgaagggggatgaacgtagaaatgaaaacttaaaacaaaagaaactgttttaaaggggccaggggaagaaaaagggctccctactcctagtaagcaaagacagcccccaccccaagcttcttcagcccttagtatttattgggtagaataagcagggaggaggaggtaacgattggtcagctgcttaactgatcacaggttcatattattactaacaggcttcaggtgtgccctgtagataatcacaagaaacacttgtgcctgggtcgtgactgccctcagcattcyttctgggcggcagacgcagtttgtcagtttgccaacattctgcttttatgagaacagtttgctgtttgctcatatagcctccagtggtatactgagctgatcacgaccctcactctttcggcctgcatcagtcacccttgagacagcccacagggtctggaatttatgagtggtttgccattgttggggcatggagcttggattccatcctaagggaagtggggaaagttttaagcaagagaggatcttgatcatatttgacttcc

SEQ ID NO: 265896 - DNA, 550 bp, Homo sapiens
tgttattaggcgcaaacaattttaaaatctttttatcgatataaagtgacctctttatcttaagtacttttttttgccttaatgtctacctccctcttttataatattatagataccacaacaattttcttttggtccatgtttacacaaagtcccctttcatacacctttattttcagctttaccttctgtttcagacaaatctcttgamatcagtatatggctggtttttaagatcctgtctggcaattgttgtcctttaactggaatatttactatttacatttaatttaatttctgatattatcaaaatttaaatctactattttaccatgtaatactttctaattgtcccttgtcctatagttctttctcttttcctgctcattttcgactgattagttctagttgttccactttccccccctattagtttagaaattacacattccattttagtcttgttagtggtcactttagagactacaacatgcaccctaacttatcagtttactaatgtacattcatacacatttgcaaaggcctatga

SEQ ID NO: 265897 - DNA, 491 bp, Homo sapiens
agcatcagacttaaactgcactatgtatcaaactcacctaacagacatttacagaaaatttcatctaacagctacagaatatacaccctttcatcagcacatgggacattctctaggatttacagtatgtttggtcataaacgaagtcataagaaatttttataaatcaaagtcaggtattatctcagaacacaatagaataaaactaaaaatcaataacaactttggaaattgtataaatatatgcaaattaaacaasttgctcttgaatgaacaatgagtcaatgaagaaattaagaaggaaataaaaaatctgaaacaacataaaaatggaaacacagtataccaaaaactgtgggatacatcaaaagcagtgctaagagggatgtttatagcaataaatgcccacatcaaaaaagtagaaagatcaagatgctagaaaagtgagaacaaaccaaacccaaaattagtagaaagaaataataaagacc

SEQ ID NO: 265898 - DNA, 472 bp, Homo sapiens
ctagattgatcaacacgttcatagatgcagctaattaactctcctattacagaattttacagaaatagcctcttccaggctgcagagctcagtcagagagattgttttcttcaaacttccatatgatcatcatagtgctaggaaagtcaaggaatgctaagatcaattaagacagttctctgaaggagttgcaatctaagaaaggtaaaaaaataaacatacaaataatttaaaaataacacagacatgataagtgcagaaagagaaaaagtgcaatgggagttgagaagaggaaaggatgagatttttttttttttttttttttgaggtggagtctcactctgtcacccaggctggagtgcagtggtacarcctcagctcactgcaacctctgcctcctgggttcaagcgattctcctgactcagtctcccaagtagctgggattacaggtgcttgccaccaggcccggct

SEQ ID NO: 265899 - DNA, 488 bp, Homo sapiens
tgcagccgactcaattgcctcctttatgtccttctcactttcatctagacacagcccgcctccccccttcttctcctctttttttttttcctcccttgcctgaggctcacattagtgaaatttctgcaacctccccccatttttttcttattttaaagaaagcccttaacacaaaagcggtgactaatcaataraaactgccccttcatcatctcctcctcctcctccacccctccttctccccctccagcagggtgacgcttttcctgtttgtgagttttgggaaacatttttgctttgtgcagtaatggaattagaggacagttgaggactgtaaatggacacgcgactgcaagactctcgcttaaatatttagatgcaaagttacaattactgacttgttgtagcagctttgaagtggcagctccggagcgcagggggagagaggccagattgccaaattgatgttttgattggggactggcgat

SEQ ID NO: 265900 - DNA, 488 bp, Homo sapiens
tgcagccgactcaattgcctcctttatgtccttctcactttcatctagacacagcccgcctccccccttcttctcctctttttttttttcctcccttgcctgaggctcacattagtgaaatttctgcaacctccccccatttttttcttattttaaagaaagcccttaacacaaaagcggtgactaatcaatagaaactgccccttcatcatctcctcctcctcctccacccctccttctccccctccagcagggtgacgcttttcctgtttgtgagttttgggaaacatttttgctttgtgcagtaatggaattagaggacagttgaggactgtaaatggacacscgactgcaagactctcgcttaaatatttagatgcaaagttacaattactgacttgttgtagcagctttgaagtggcagctccggagcgcagggggagagaggccagattgccaaattgatgttttgattggggactggcgat

SEQ ID NO: 265901 - DNA, 334 bp, Homo sapiens
ccagtcttcggtagagcaagacacaactcagcttttagctctaccctacagtgttgggaaatactgagctccaatagcattgtgagcttttactggaagcagaacacctctcctttaggaaggctttyttcaaattatctaagctgagatcatgctccaaaatgaagagaatatgtatatttccaagttttagttggaatatgcacagttatcaaaatgcctgtttaacatcataaaacatcaattcacgagagaagaattagaaagttcaccattgtcaaagggagatatgaaaatcatgaaatatagttattgaagactgttgaggaataat

SEQ ID NO: 265902 - DNA, 555 bp, Homo sapiens
cttggatctgacaggcattccccttcaagggccaggcagatagccacaaagcagaaataataatgtactaattgtaaagctaaggaagcagaagtttagagagattgtgtagcagctgttaaggggcagagctgggctcagaatccaggtttgcgcaaatctagaacctgcaattttaactgccacactatgtgattggcttgtgccttctgggaagacaggtggtattaagaaataactgaggagggggctactttcagggagtgggtctagtgactctgcagctgstagctctataaagtggggccaataatagtatttgccttataaaattgtgataaagactatatgaatatacaggggtgccaagttcttctcaataagcatcaggtattgttcttgttaatcttatttgtagggcctggcccagagggggctttcctaggaagctaacagagcctaaactttgggactcttgcacatatgaattcctgagtgtgctgagggtttgttgagtgctgtagtgttctaagtgaggaggggaaaccaggatgc

SEQ ID NO: 265903 - DNA, 561 bp, Homo sapiens
tgggaaagaacagagcctgatgcactgaagtggaaagtcctttggaatttaacaacttaactcttcctttgtgctttgttcaaggaggtaatctaagcatggagttacaaattattttttttctagtttctttctttttatgattttaaatttattttttgaaattatcatggtaaaatagacttttttggattactttgtgtgggggtgaaacttgcgtaacacaaaattaactgttttaaagtgaacaattcaatggcatttggtattttcacaacatattgcagtcaccagatctatctagttctaaaacattttaatcacccaaaaagaaaacctgggacccattaagcaattgcttcccaatcccccatccgtctcctggcaatcatcaatctgcattttatctctatggatttaactattctggttatttcacaaaaatagactcctacagtatgtgatcttttgtgtctggcttctttcacttagcattatgtcttagaggttcayacatattgtagcatgcatcagtatttcattactttttatggctgaata

SEQ ID NO: 265904 - DNA, 568 bp, Homo sapiens
tgtcaattttttattttatcagttgtgcttttaagcatcacatctaaaaactatttgactagccttggtcctgaaaatattctgaaaatatagactttacatttagttctatgacccattttcagttaatttttgtatgtggtggtgttaggtttagggcaaggtttattaatgtattttttgcatctgtatgtctaactgtttcaacactgttggttgaaaagtcgttcctttctccattcagttgcatttgcacctttgtcaaaaattgactgtccatatttttgtggttgtttctgaattgtctgttctgttccatatatatatctgtgtctttccttataccacaatgtcttgattactgtgrcttcagaataattcttaaaatcaaaaaatgtgattcctctaactttattcttctttttaaaattgtttttagctattctagtcctctgtttgtccacataaatttgttaattagtttgtctgtatctacaaaaaaaaaaaccttctgagaacaatttactttcaaaagttgttttatattggttttaaagagttttagaaa

SEQ ID NO: 265905 - DNA, 549 bp, Homo sapiens
tgatgtatacacgaggtgaaatagtatcagtagatcactgagttccagaatctcttaggagccccagatcctgcagccctctacaacattccaaggccctgacatgggtaggaattggtagtttccatggcagtagcaagcagactctgcagagaggtgggtggggctttggtgatctagtgactgtgaagcgaaggtaggaagcagctcaggtttcagtcctagagcctctctttccatgtctgccagtttctggctgtctagccctcttcaaacaacaaataacagaaataaggaatttgttgacaagtgagttgtctggagagctacgggtgacagtgsagggtttttctccctttccatggcaactctcatcatcttggaaaagcttgattcaatcctgtacacatcttcagctcatgagtgagaactatcagtagagtcactacaagaagccagatctggtctggtctgcgtacctgcttaaaaactcccagtctccatgggctggattttgcctgggttctgaggcctcatgttagagttatc

SEQ ID NO: 265906 - DNA, 597 bp, Homo sapiens
aacttgctctcattcaggtctccaagggtctaatattacctacccagacaggtctaataggtgaattttgggttccctgagctacccaaaagcaggaaaaaccttacagtggctggaaccaggcaccagagagctatctttcaggggytgtttgctcaccttggacttatccatatggctgctttatttttctctcatttccacatgacagagttatctgctccacagtgcggtctccagtttttaaattttcttctctttagtgcagcagatactgattgggatctctgaatccaaattcccaaagagggagcatgtgatgagcccagatttggccaggtgtccagcccagggccaattagttctggccagggcctgggtcatctggctcaaacatggtggccaatctcctctccccattccttcctcctcccatgggtagattatgggtagaagaggaaagaagttctctcataaaagcattgtgagatggtagatggtgggcctcacaaaatgtatctaatacattttgtagcttggggagaaatcactccacatctccaagcctcagttttcttttccataaaatggagatta

SEQ ID NO: 265907 - DNA, 600 bp, Homo sapiens
gagggatctctggaggctgaatttcctagtcataatttatttactataagatggcctcataccaaacccgatggtcttttcgtcagttttaatctttctgagctagatttgtgagcacttttactcccagctgtgtttcactgaaaaaagaacaagataaaaataagaatccttcctgagagctccatgaagcctttttatactgcgagtctgatcacttaarggtatttcacaagtatattccagaaggtctttaacaggtcaacttgaagtttgatgaacctacttggctaattgcagaaggtctcctgcgcttgtgagttttgccattcaacgtgaagggtacaatgggacaactaactgttttctgatctgaagtagcccttttacgctgagaaagatgtgaatgacctctctcgtgtttactcgggtgaaagtcaggaggagtgaagcaagactgatattcctttgcagacccagagtaaatgacaaatgacattttccctttgtgatctttgggatttttgttgacttatttggaggcttttgttggatcccaagaaatggcctgtggctgaggcctattctaccgatttccac

SEQ ID NO: 265908 - DNA, 415 bp, Homo sapiens
gacaaagacaaagtactttgccttcatccttattttccactatcaaatatttttgctgttgtgtgcatatgttgtttaaaagtcaacaaataaacaaaggttcaatatgtaaaggagataacaagttagttatacagagagcctcttggagcaggtagaaaacaaaagaattctcctgtcacccttaytaggacaaaactaccgaaagatacacaaaacctaaacagctttatccacaaggaaactttgccaagattagcatgacacgagatgtttggacaataaaaaaaaggcaggttttagaagaaagttaaatactacactttttgtgccaaaagcctatgcaaagaagtaagaagacaaatgagtagagaattgaaaatgccaagacaaagcatttacaaaattgcagaat

SEQ ID NO: 265909 - DNA, 561 bp, Homo sapiens
tgttatttactaagaaacagaggcatagattctgtgatctttagtataaagatcaaaataatacataaatgcttttaacgacacttcccatatggcatttcaagattgtttctttgcttcccatcttctcttgggttctataaaaaagaaaaagggtagcacaggaagcttgttttgaaaatccaaatcttatctgggtcaattattgcttgttggaagattgaaagaggtaataactgaacataggagaaaactcttttcctggaggcaacagagaaggctgagcttaatccttgctggcaaaggaattagcagcaacatcaaggtcatcatcagaaatcatgcttgggatacctactgtgcaagaagtacttccctagaggccrtgaagaggggataatgaatgagaagagagtgtgattcctccccttcatcgtgcaaaagtataagtctcctgtctacaaggtggtccttcagattagtgtcacatccaaccaatggacctaggggaggaattggcaaaccagtcaaaatgactaaatagatgatgtaaatgattta

SEQ ID NO: 265910 - DNA, 524 bp, Homo sapiens
ctctggtgaagccagtcttcaagtgaaagacactttccttctatgtctgcccttcctgctaatgacacagtataaaatatccctaaataacagtaacgacagccctcccctgatccccaaatagcaggaacaatcaagtcaatcaatattcatgcttataagctacctagagtctttgataggagaatagggtttctttcccaattccrcttgaaatcaacctaccttgacttatgagtaaatggagacatataggtcatggatagttcagagaacctcatgaataaaactgtggttttattttttgctttatgtcctacccttaaagaaatgtcttgagaacctggactttatcacaggtagggggatcttatgagcgtgattgcacccttcccatcactctgtttcctccatgtgcatgtctttacactcactaagcctcagaacacagctgaaatagtttgtgaaattctattatgaatgtatcttctgtagtgaatatgtattacttttgtgcaatggaa

SEQ ID NO: 265911 - DNA, 616 bp, Homo sapiens
acacatgaaaattacacacaattttagtgttgataaagtctattagaatacagccatgctcatccattcctatattttctatggccgcatgctacaacagcagagctgagtagtgttaacagaggccagtggccccaaaaagccaaaaatattcactatatggaccttgacagaagatatttgcctagtctatatgatagccaacattttataggtgcttactatgcaccaggtgccatgccaagcatctttacttgctttccctcatccaattttcaaatcaacattattattataccccattttacagattgaaaaaaygaggctcagagaggttatatactaatagctagtctgtagtgaaggtagaattaacattcaatctctctcatgcagaagcttgtgtttatgaattttgtgacaaacttcatccccacattccgttaccaccaaagcccatcatcactatcaccatctaagactcaaaactcccattatccacagcataatgcaagtcccaatccctctgccatgtggatggagggatgccttgccctatctcgtgttattctcctatgttcagatgttaatgaatccagagttgtgtggaactttt

SEQ ID NO: 265912 - DNA, 667 bp, Homo sapiens
tgttagcacctaccttgaggatgagctttgttttgtaccaaaccctgatcttcgaaaccttagagtcatgggctcctttcttcctctgctatttggaaygtgccagaatcaattacattccaaggaggtaaactggccataaggcagatccttgtaagggttttcagaatttgcaggaagattttctctgtttacaaaaaaccgttcttccctccagccagcccggcagacagtgctcaccatcctctggacgacgccttgataggagcaggacgtcctctcatcccaataatgccatccctccctctcagagacccctgccgtccttccttgatcccttgggctcacactgaggcaggcacttcctgatccttccctctccctctccactcccactgagacaatccctcaggcacaaagaccccctaacctcctccaagtccctcggccccagagactcggaaactgctctttgatttctctactgcaaggaattaacttttcattaccagcagtctggaagtctcattttctcatgaatgcaaaattaaatactgtatataacagcatttttaaaactaatactcttttattttctcttcctaaacatcataaagtgaataatgcagtatttttcatgttatgcttcaatgacacaatttgtttt

SEQ ID NO: 265913 - DNA, 667 bp, Homo sapiens
tgttagcacctaccttgaggatgagctttgttttgtaccaaaccctgatcttcgaaaccttagagtcatgggctcctttcttcctctgctatttggaacgtgccagaatcaattacattccaaggaggtaaactgrccataaggcagatccttgtaagggttttcagaatttgcaggaagattttctctgtttacaaaaaaccgttcttccctccagccagcccggcagacagtgctcaccatcctctggacgacgccttgataggagcaggacgtcctctcatcccaataatgccatccctccctctcagagacccctgccgtccttccttgatcccttgggctcacactgaggcaggcacttcctgatccttccctctccctctccactcccactgagacaatccctcaggcacaaagaccccctaacctcctccaagtccctcggccccagagactcggaaactgctctttgatttctctactgcaaggaattaacttttcattaccagcagtctggaagtctcattttctcatgaatgcaaaattaaatactgtatataacagcatttttaaaactaatactcttttattttctcttcctaaacatcataaagtgaataatgcagtatttttcatgttatgcttcaatgacacaatttgtttt

SEQ ID NO: 265914 - DNA, 667 bp, Homo sapiens
tgttagcacctaccttgaggatgagctttgttttgtaccaaaccctgatcttcgaaaccttagagtcatgggctcctttcttcctctgctatttggaacgtgccagaatcaattacattccaaggaggtaaactggccrtaaggcagatccttgtaagggttttcagaatttgcaggaagattttctctgtttacaaaaaaccgttcttccctccagccagcccggcagacagtgctcaccatcctctggacgacgccttgataggagcaggacgtcctctcatcccaataatgccatccctccctctcagagacccctgccgtccttccttgatcccttgggctcacactgaggcaggcacttcctgatccttccctctccctctccactcccactgagacaatccctcaggcacaaagaccccctaacctcctccaagtccctcggccccagagactcggaaactgctctttgatttctctactgcaaggaattaacttttcattaccagcagtctggaagtctcattttctcatgaatgcaaaattaaatactgtatataacagcatttttaaaactaatactcttttattttctcttcctaaacatcataaagtgaataatgcagtatttttcatgttatgcttcaatgacacaatttgtttt

SEQ ID NO: 265915 - DNA, 667 bp, Homo sapiens
tgttagcacctaccttgaggatgagctttgttttgtaccaaaccctgatcttcgaaaccttagagtcatgggctcctttcttcctctgctatttggaacgtgccagaatcaattacattccaaggaggtaaactggccataaggcagatccttgtaagggttttcagaatttgcaggaagattttctctgtttacaaaaaaccrttcttccctccagccagcccggcagacagtgctcaccatcctctggacgacgccttgataggagcaggacgtcctctcatcccaataatgccatccctccctctcagagacccctgccgtccttccttgatcccttgggctcacactgaggcaggcacttcctgatccttccctctccctctccactcccactgagacaatccctcaggcacaaagaccccctaacctcctccaagtccctcggccccagagactcggaaactgctctttgatttctctactgcaaggaattaacttttcattaccagcagtctggaagtctcattttctcatgaatgcaaaattaaatactgtatataacagcatttttaaaactaatactcttttattttctcttcctaaacatcataaagtgaataatgcagtatttttcatgttatgcttcaatgacacaatttgtttt

SEQ ID NO: 265916 - DNA, 685 bp, Homo sapiens
atttgttttagagaaagtaacctgacatcatctcagaaagcagtcattgcctttgaagaactcgctttccattttgaaattcgacagactggcccaaaacttattctacctctaaaaagacagatagggccacctactactaaactctaaactttgcttccattgtatcattgaaatggaccctgtacttgtgagatagttttgyacaataaagctaatttgagacaataaatataatcaatacgtaggtaaaatctgggaaatagtcacagaatgggcacacacagacacaccacaccatgggctcttttatggtaaggaaaaatagtagttggggacaaagataatttcaacacagatatatattttacaatgtctatgctttgcttaaatgtctccaggtgccttgctcttagcagggacacagtaaacatccgctgcataaatggctcagcattttttttttttgaccttcagataagtttctgttccttcacactcacttactattgaaatttaccattatgtttttatgctgtaacaattcaagatgtatgttgttttcatgtcttttaactcatagagccaaatatgaagggccaattaataatgtacttttatgttttaagcatagtactatgctagaatgattatttttctaccccagcagctacaaaaaatttga

SEQ ID NO: 265917 - DNA, 685 bp, Homo sapiens
atttgttttagagaaagtaacctgacatcatctcagaaagcagtcattgcctttgaagaactcgctttccattttgaaattcgacagactggcccaaaacttattctacctctaaaaagacagatagggccacctactactaaactctaaactttgcttccattgtatcattgaaatggaccctgtacttgtgagatagttttgtacaataaagctaatttgagacaataaatataatcaatacgtaggtaaaatctgggaaatagtcacagaatgggcacacacagacacaccacaccatgggctcttttatggtaaggraaaatagtagttggggacaaagataatttcaacacagatatatattttacaatgtctatgctttgcttaaatgtctccaggtgccttgctcttagcagggacacagtaaacatccgctgcataaatggctcagcattttttttttttgaccttcagataagtttctgttccttcacactcacttactattgaaatttaccattatgtttttatgctgtaacaattcaagatgtatgttgttttcatgtcttttaactcatagagccaaatatgaagggccaattaataatgtacttttatgttttaagcatagtactatgctagaatgattatttttctaccccagcagctacaaaaaatttga

SEQ ID NO: 265918 - DNA, 643 bp, Homo sapiens
tcttgtcgatttggcatgttcctaagcagaggtatgttatacacaaacacaaaccagaaatcctttgtcgaaaatgaccttctgttaaagccagaactgtgtcagttrtaaccttgacaccagagactttacagtgaaaatcattgtgggggctgggaaaaagagagagacagagagaatcccaaccaaatacaggaggggtacagaatgtctggacaatttagggagaaataaaataaaagaagtaattgaaagtgaggcatttaccaacaagaaatagtccaagtgaaacaccacccatgtaagcatcctggaattcatgctttcctcaatcaaaaatctgtctccaactctaatgagccaatgctttttgggtactgtagtgacttgtttcttatactgttgtgcatttttactgattttgttatcattggctcgacattatggacaaaaggagagaaaaagaaaagcaaattactgaagtgagcttggaaatgcatatggtcatatcaagatgacatttgaaacactggtccaagttttcccttgaattccacagttaagatcacagaacaatatgggaaatgagccagattacatggtacattaaaataaactagagttatttcctcaacctcataaa

SEQ ID NO: 265919 - DNA, 647 bp, Homo sapiens
ttggaaaagataaaaaacatgtagaagacatggagagttttagcagagagatgtaggtctacatcagacccacaaagaaaagctataaataaaaaatgcgataccagaaataacaaattcatttgatgagtttaatggaaggctggacctatcagaggaaaatattaatgaacctaaatacaggtcaatagaacatacccaaactgacacataagactgagagaggagaaaaagacagaacagagcatctgacaataccattcagtctaatacatatgaaatttgattcccagaaatagaagacagagagaatggggcaaaaaaaagtgtgaagagatcatgtcaagaacattttaaaaacaatacgtaatatcaacccatagatcctagaaactcaactagtccaaagcaagctaaatgcagagaaaaccacatcttggcatatcataattmaactgcaaatcaaagaaggtggcaaatcttaaaggcagccagagaaaaagacacattatatacagggacacattacaaataatggataaaatcaccagacaaaatggaggccaaaggacgataaaataatatcttcaaaatgttgaaggataactccaaggttgaatcttgactgccaaaatagtgttgtcatc

SEQ ID NO: 265920 - DNA, 573 bp, Homo sapiens
atggaagatgcttaacataataatatatttggaagaaaagaaagacggaaagagtcargaaaagagataaccaacctattgaacaatacctggtgagacatcttgacaggaatgcacaaagaaagatattcttttgataaaataatagctggaccctgcaaagaggtagtatgatgtagcatttaagcatatgggctccagagtccaaatccctagatgtgagtcctggctccaccatttcctgtgttagctgctttgtgcctcagtttctctaaaatctatgaaatagggagaaatagctgtacctacttcacggggtgttgtcaaggttaactaagctaatacatggcaaatgcttagttagcacatgcctattatatagggaacatcccataaatgcttttgtcatcaccattttggtttggattaatagaaatcctcccagtgacgagaaactcaaattccattgtttttgctgtaaacagaccaattaactgacaaataagaaacaaaatggaaacagattagtgctatagctaaggagaaagaaaagaagataaaatgaatgggttt

SEQ ID NO: 265921 - DNA, 573 bp, Homo sapiens
atggaagatgcttaacataataatatatttggaagaaaagaaagacggaaagagtcaagaaaagagataaccaacctattgaacaatacctggtgagacatcttgacaggaatgcacaaagaaagatattcttttgataaaataatagctggaccctgcaaagaggtagtatgatgtagcatttaagcatatgggctccagagtccaaatccctagatgtgagtcctggctccaccatttcctgtgttagctgctttgtgcctcagtttctctaaaatctatgaaatagggagaaatagctgtacctacttcacggggtgttgtcaaggttaactaagctaatacatggcaaatgcttagttagcacatgcctattatatagggaacatcccataaatgcttttgtcatcaccattttggtttggattaatagaaatcctcccagtgaygagaaactcaaattccattgtttttgctgtaaacagaccaattaactgacaaataagaaacaaaatggaaacagattagtgctatagctaaggagaaagaaaagaagataaaatgaatgggttt

SEQ ID NO: 265922 - DNA, 596 bp, Homo sapiens
tacaatgtataatgatctaatcagggtaattggaatatccatcacctcaaatatttatcttctctttatgttgggaacattctcattcttttcttctagctattttgaaatacaccataaattattgctaactatagtcagtctactatactatcaaagaccagattttattccttttaactgtatgtttgtaccccatattcaacctctcttcaccccacccaccttcccacttttcctagcctctagtaaccagcaatctactctctatctccatgagatccacgtttttagcccctatttgtgagtgagaacatgcaatatttggttttttatgcctggtttatttaacataacataatgacctccagttccacccatgtggttgtaaatgacagggtttcattattttttatggctgaatactattttcttgtgtatgtataccacattttctttatgcattcatccactaatgggcayttaggttgattctgtatttcggctattgtgaatagtgctataataaacatgggagtgtggatatctccataataatggatttacttttttagggatatatacccagcagtggg

SEQ ID NO: 265923 - DNA, 575 bp, Homo sapiens
agtatttgagccaccaagcccagctaatttttgtaatttttgtagacggggtctcactatgttacccaggctggtctcgaactcctgggctccagtgatccacctgcctcagcctcccaaagtgttgtgattgcaggcatgagcctgacaacctgtatattctttggcccatatatgatgttagtccagctgccaattacactacaagctacttaaataggatttatcatcacatatgcaatcaaactttcaaatgaaaagtggcacatacccagcaggtgtctcttaaatatgggggaatgggaatactatgagataatacagtcaakattgaagactatactaaatcttggccatcactgagaatcagaaaaaatgtggcttgcaagaatttctattatgaaaaagacggagaatagaattaacaacacctgcaggttaatgccctgagtggctagaatgaacactgtcagtgatgtttgtggttgtttactttataaataaatccttgtttactatatttactttgtctagaaatatttactgggaatagtgcattatagcaaaaggatgag

SEQ ID NO: 265924 - DNA, 575 bp, Homo sapiens
agtatttgagccaccaagcccagctaatttttgtaatttttgtagacggggtctcactatgttacccaggctggtctcgaactcctgggctccagtgatccacctgcctcagcctcccaaagtgttgtgattgcaggcatgagcctgacaacctgtatattctttggcccatatatgatgttagtccagctgccaattacactacaagctacttaaataggatttatcatcacatatgcaatcaaactttcaaatgaaaagtggcacatacccagcaggtgtctcttaaatatgggggaatgggaatactatgagataatacagtcaagattgaagactatactaaatcttggccatcactgagaatcagaaaaaatgtggcttgcaagaatttctattatgaaaaagacggagaatagaattaacaacacctgcrggttaatgccctgagtggctagaatgaacactgtcagtgatgtttgtggttgtttactttataaataaatccttgtttactatatttactttgtctagaaatatttactgggaatagtgcattatagcaaaaggatgag

SEQ ID NO: 265925 - DNA, 478 bp, Homo sapiens
tctgacccccaagttcaagccattctcctgcctcagcctcctgagtagctgggattacgggcacgtgccaccatgcccagataattttttgtatttttagtagagatggggtttcatcatttggccaggctggtctcgaactcctgaccgcaggtgttccaccagtctcggcctcccaaagtgcagggatgacaggygtgagccaccgcgcctggctgagggtatctttttgaactttaaagttcaatagttatggcctctccaaaaaaacaagaagcagtcagaagtcaactcaatagaatagtatgtgtagaaaaaatatgtgcttcatgggaagttgtgatgatggttttttctcttgcttttatttttcttaaccccagtaacctgaaattggccacacttacacacaaaagaatatatcttaataaaaaattaacttctgacctatagtaaaaagtggcagaaattaaaagaa

SEQ ID NO: 265926 - DNA, 478 bp, Homo sapiens
tctgacccccaagttcaagccattctcctgcctcagcctcctgagtagctgggattacgggcacgtgccaccatgcccagataattttttgtatttttagtagagatggggtttcatcatttggccaggctggtctcgaactcctgaccgcaggtgttccaccagtctcggcctcccaaagtgcagggatgacaggcgtgagccaccgcgcctggctgagggtatctttttgaactttaaagttcaatagttatggcctctccaaaaaaacaagaagcagtcagaagtcaactcaatagaatagtatgtgtagaaaaaatatgtrcttcatgggaagttgtgatgatggttttttctcttgcttttatttttcttaaccccagtaacctgaaattggccacacttacacacaaaagaatatatcttaataaaaaattaacttctgacctatagtaaaaagtggcagaaattaaaagaa

SEQ ID NO: 265927 - DNA, 547 bp, Homo sapiens
cttgaataatcaggagagctctcccaggacttcaaatcttgatagatgaaaaaataatgtttgaacctcatccattacagcagtgagattctgcaaagacaattgacttgttcctgccatgtggaagcccaaagctatctggttcctgcatttccaacccttttcctccacattttctagcatttctttgagctattaagtatgcttgctgtaaattactttcctgacaaagttagccagagtatctgatgcttgcaactagaaataataytgaacaacctgactccagcttccactgtgtattgagcaatgttatggttccctaagggataagggactaactgaagataagcttgcaaagctcagcatctaattggagaaaaagttcaaagcacttataaatatgatagaagggttggcaacagaccaatgtgttcaaatttatatagtataatatatgtttatgggtatatattacaatagaacatatactaaggaaaacccagagaatcgaatgttaaggcattatcaaaaagaatgtgagtga

SEQ ID NO: 265928 - DNA, 228 bp, Homo sapiens
caattggtgcgcataatcattttgcttgggattcagataatgtcaacacatagacaacatgcaagcygtcaaagcagtcaactttttgaaaatcccaacgtgttttgacattttaaacatcacagggaaccaaattggtcattggtcaagctttgctaaaaattttgaagaaatcctgtgacaccaaagagtgctatttttagttctagtggttttcacattttatgt

SEQ ID NO: 265929 - DNA, 528 bp, Homo sapiens
atagtatcagaagtactcgaacattttggctggttattgtccaaaaaagcagctcagcttctcattgcacaagggctcagatagttgcatttggcacattatatccaatttcccataaacaagcttgcccataaagtaatttcaytcataagtgcacttaagagtgcacttcatggaaaactcatcctagtgggcctattccaacgacgcagctaaatttaaagtcagaagtttcacggagattattctaagatccttctttggtgagtgaagcgtttggccggtaatgtgtgccctcaatgttttcataataaataatacagacctttgagcctaaaccatatacatttgccaatgatttttacatctgcagtattttttcttttaacagaaatgtttctgtctctggtttgactaatacatggcccacgtgccagcactgcttttccccaaccatccgtcaccaaccatctctgccaagttcacgtgcaacctcagacctatctcagcccagaggaagacagcctc

SEQ ID NO: 265930 - DNA, 528 bp, Homo sapiens
atagtatcagaagtactcgaacattttggctggttattgtccaaaaaagcagctcagcttctcattgcacaagggctcagatagttgcatttggcacattatatccaatttcccataaacaagcttgcccataaagtaatttcattcataagtgcacttaaragtgcacttcatggaaaactcatcctagtgggcctattccaacgacgcagctaaatttaaagtcagaagtttcacggagattattctaagatccttctttggtgagtgaagcgtttggccggtaatgtgtgccctcaatgttttcataataaataatacagacctttgagcctaaaccatatacatttgccaatgatttttacatctgcagtattttttcttttaacagaaatgtttctgtctctggtttgactaatacatggcccacgtgccagcactgcttttccccaaccatccgtcaccaaccatctctgccaagttcacgtgcaacctcagacctatctcagcccagaggaagacagcctc

SEQ ID NO: 265931 - DNA, 614 bp, Homo sapiens
  misc_feature (1)...(614): n = A,T,C or G
gagcattgaactaggggatgtcacagaaaccagatgaaaagaagcttctggactcctcagaatgatctctggaacagagctgcccagcatcctggcacattcacccaggactgttccaagatacagtagacaacttctatggttttttaagccactgaattattattgaatctctttatgagaacagtttcatcttaccctgactaatacaatgagggaatagtcttgatgagtttctcctctaaagacgatcagtgaaaaactttgaggaaagtataaggaaaagtgccaatggccgtncagtctttcacctctgacagtgtatttgaaaaatattattataaatgtgtttttttaattgtataacccaatgtcaggcagggtcccatacccctttcagacctggttgcaattgacccaaacctcaattccaagacttaatggaagcccaggccttctttttagctttagcaaatgcctagaatttcctctcgccgtttccctcagcctctgagattttgtattgccacacactgcattagttttcacccatatcaatctagctgtgaacyccaactcctttcctgattaccaacaacaatccgcccttcccc

SEQ ID NO: 265932 - DNA, 588 bp, Homo sapiens
aaagttctccaaatcccctacccaattagctagacacagagagctgactggtgcatttacaaacctttagctagatacagactgctgattggtgcatttacaatcctttaactagagagaaaagttctccaagtcccctacccaattagctagacacagagagctgactggtgcatttacaaacctttagctagatacagactgctgattggtgcatttacaatcctttaactagagagaaaagttctccaagtcccctacccaattagctaaacacagagagctgactggtgcatttacaaacctttagctagacacagagtgctgattggtgcatttacaatcctttagctagacagaaaagttctccaagtccccacccaacccagaagcccagctgggttcacctctcaataggcatgtaagaaacctgcccttgtaccaccgaaatctatgaaaataaaacaattttaaagatttaaaaaaataaacttaataaataaaatgtttagtcatcttttttaaaaagtaaaataaaattgtttgggsggagatgcagcaaagatgtatgaggaacacagccactgc

SEQ ID NO: 265933 - DNA, 551 bp, Homo sapiens
tcccaaagtgactatacaattttgtattcccactagtagtgaatgagagtttctgtttttccacatcctgccagcatttgatgttttcagtgttttgaattttgactatcctaataggtatgctgtggtatctcattgttttaatttgcaattccctaatgacatgtgattttttttatgtgcttatttatcatctgtatatcttctttggtgaggtgtctgttcagtatcttctgcccattttaaaatcaagttttttgttttcttattattgagttttaagagttatttgcttatttaggatgacaattctttgtcagttatgttctgtagtaatttagtagtaagaagtgggaggaggggaatatttctatagtcctgttcttagttctgagtcttctggtgggcttgtgcctctggactgtgaacttcaccagtgtttctcagtccccagcactsctacctttaggaggggcagaatgactagagaggcctggaattgggtattttccttcccccatgtggaaggacagatgaaactggagttgagt

SEQ ID NO: 265934 - DNA, 565 bp, Homo sapiens
cacagttttgagttttttgtgacatgctcaatacagtggctctttgatctgcaagaagtattgaaagaataactttaaagacataagctcacaatgtattcaggcttttgttgtaaaaatgtgcatcattactgggtgactaaagaagaagctaactaataaaggtatagatttttttttcytttcaaaatggtaacaaatgtgatagttaaaattttataatggtttctttatttttgaaactatgctagggaagactgtcatagacactgtgaatagttcagggaataatgtcagactcatgtgccaacttggaatgaggactactaaaataaaattataatttctgtttcttcatgtttgatgtagtgttagcctatttcaattaaatcatttccttactcattaattaaaaaacactgaaacttgcatttaacaaaaattaatattacatcacatgcatttttatagttcatttaaactcatctattatgtcattaaatactttatttatttataatgaaatggcttattaaatagttaagagcataaatattttataata

SEQ ID NO: 265935 - DNA, 593 bp, Homo sapiens
ggtcatgtgatttgcttggccatgcattttgcttggccagtggaatgtggataaaagcatagtatgttgaattttagttgagatatcagtagacatcaattgtttgtactcaccttctttgcttctctgattaccgcaaacattgcgtgctctagatggctgctatgccatcagtctgggtttgaggatgtgagacaaatrgagtaaacctggacccaccaaagcctggagtccagcctgtcccaactgagatcagtctagattattggaacttcagataacctgcagaattcatggcctgaaaaatagatgttagtttatgccattgagatattgatatttttacatagaaataacgaatatacaccttttggttcttaaatccaaacctataaaagtaataatgaaatgttttatatatgcatattatttttaacccaaagagggacaaataatttatgctttgtaatgctttgattattctcattatgtactcactgttctcactacactcactataaaagatgtctctgttatacgaaagtgacagagtatttaatgtggctggtttagcctatgcctaatccactgaa

SEQ ID NO: 265936 - DNA, 501 bp, Homo sapiens
aggaaaataaagaataactctatgcagattaaagaagcattattatttgtgttacacagatttttagtagagactatgggcatcaagaatcatctgctcgagccaaaattcctggtggaaggtgtctgctttatgrcatcaactacttctgagaaatatctaggtatcctcatctggaggtaacccaagagtttagattggcatatggaattgaacatgttaaattgtagaccatggacccaagtgtcaacacactgaagtctgattactgtatgtatacttaacagtacccaataaaattgtttccaacaaggttcaagggcagcctttctttgttaactttttcaaaacaccaaaaattcaggttgaagattttgtaatggctgaacacagggatattgtggagagatagttttaattcttgatgatgagacagtatcatgaattagccttttataatatttaactaagcttaaagaagattcagggctaaaataggtg

SEQ ID NO: 265937 - DNA, 563 bp, Homo sapiens
gttttcttttacaatttttgttttaattctagtgggtatatagtagtatcgcattgtggctttagtttgcattttctaaaggcctrtcatggcaaatatcttatatgttcctaattggcatttatatttcattttataaagtggctgtttagttctttgttcatttttgttgggttgtaagagctttttaaaatctatattctatatgagcttttaaaaatctatattctagattaagtttttaaagcaggtatatcttttacaaatattttatattagtctatgactagtcttttcgtttccttaacagtgtctttcaaagaacataaatgtttagctttgataaagtacaaattatttttttcatttacttgttttatttgtatcccacttaagaaacgtttttctaccctatgactgagaatttctactgcatttactttgagacattttatagctttgacttttacatgtaggtatagattaattttgagttaattttcatagacgaggaaaagttcaaggttcatttcacccctgtatatacccagttgtttcatcac

SEQ ID NO: 265938 - DNA, 563 bp, Homo sapiens
gttttcttttacaatttttgttttaattctagtgggtatatagtagtatcgcattgtggctttagtttgcattttctaaaggcctatcatggcaaatatcttatatgttcctaattggcatttatatttcattttataaagtggctgtttagttctttgttcatttttgttgggttgtaagagctttttaaaatctatattctatatgagcttttaaaaatctatattctagattaagtttttaaagcaggtatatsttttacaaatattttatattagtctatgactagtcttttcgtttccttaacagtgtctttcaaagaacataaatgtttagctttgataaagtacaaattatttttttcatttacttgttttatttgtatcccacttaagaaacgtttttctaccctatgactgagaatttctactgcatttactttgagacattttatagctttgacttttacatgtaggtatagattaattttgagttaattttcatagacgaggaaaagttcaaggttcatttcacccctgtatatacccagttgtttcatcac

SEQ ID NO: 265939 - DNA, 509 bp, Homo sapiens
aaactccaacttagaaaactttggaaaatttcctaaaatcataactgccagggaatgtagaaagctgtacttgaattgaggatttttgattccaaagccaagcttataaccagatgacarctaggaagttgtcatctctctctttcagaggacacagtttcataacaaatttaattgtttcccttttctcccttaagaatacagataaacccagattgatttttccaataaatgtaattattcaatatttgcagtaagagagaatgtggtagcatttctatcaaatgcatgtatatattttccccaatactctctagattttgagttttcccaaaaatataatgcacaagcgtttattgcagaggccaacatagcagaaatagatgatatcctatttcctttgttgtatcaaattttctttttatacatttacatctggcaacttaatgggagcagacacatgaaagtgtttaaattttgtgtctccagaagtttcagaaatttttgtt

SEQ ID NO: 265940 - DNA, 455 bp, Homo sapiens
aggacattttgaggaatgggttctggtggagactgatattatgtgctaactggcacataatgggaaacctagaaactgtgcatcttatataaaacaagatctctacattagtttcccagggatgctttaacaaaaaaatgcaaactgggtgccttaaaataacggaaatgcattctcttcagggttctgggaactacatataagatgtcatcagggccatgcttcctsggaaggcattggggaagcattcttctttgcctcttcttagcttggtggatactgataattgtcagcatttcttggcttgtaaatgcattactcctgtctttgtctctgttgccacatggccttcttccctgtgtgtctatgtgtcttcatctggcctttttctttttttctctcaatttaaaaaaatatattttttaaattgacaaataaaaattgtatatacttac

SEQ ID NO: 265941 - DNA, 603 bp, Homo sapiens
ttcagagtcaactgaatatgaaatattagagattgaatgatacaaaaagaactacttgctgaacttttgaaggatgctgtggtggggtagtagtagtggtagcaggagtaaagaagacactattgtgtaggagaaagttggggggcacacatgttatcctcaaattataagctatttggttcttttcatttattttaagatttataaatccattcatttacttactcaacaaaaccattcaacaattggtatattccagatactgtgtgtgtgtgtgtgtgtgtgtgtgtgtgtgtgtgtgtgtgtgtatggaggggggtggtgcagagagaggtgaatcagatgtaagattggttttcaagacccttgaaggctaatagaggggaatagacgttgcacaacatgacacaaaaggaaaaatgatcagaaggacatagcagaattatatccagtgcagactctcagctcaaactgcctatattctaattgttcctctgtcacttactaacatgcagccttaagaaagttaacttaaccttcatgtgcccgagtttactcatttgaaaaatgaagacaactrtactacatacattattacattgt

SEQ ID NO: 265942 - DNA, 521 bp, Homo sapiens
aaatgaaaaataaaatgcccaacaattgtatttttgaattgggttctttatatatgatatatggattgtttattcacaacagaaagaggataaatgtgagcagtaagacagtaagacattgacatttattaatctacataaaatgccaatcaagataaaatttcactgggtatttttaaatatttattttttatttgtcaaactatatggcccaatttcattggataattgaaaattcttaggtttgggctgagtagacccaatgtaagtaccttaaaaaaatttgcaaatgggtattgctttactaayatctcttattgattttttccatatagtatttaaactctttgtgttgaattttttaggtgattttatacttctcctttgctctagtaccatgagcaatgctgagtggctggttttatttttatagttgcacattgtctgagagacattattatctatgaaatcacattttacttttccaaattagttgaatattctagaatattaattatgtg

SEQ ID NO: 265943 - DNA, 551 bp, Homo sapiens
agatttcatgttgtgtttgaaacatactcagacacaacaaaactatcaaaaaataaaaacagaggcacacggaaacactgaaatgtagttaatgtgtctagtactttgtgggggtgattttataggtgtatgcatataaaaactcatcaaattgcatacattamatttgtgcaattatttttgtatacaaatcatacctcaataaaactgttaaaaaaaagaaaagagaaagtaaaaaacaaatgactaccaccaacaacaaaaatgtccaagaacagtaaatagagtttgtatatatacatgatgtattttttatcgccattgcttctcatgtatgaaaagaatttttgttaaattgtcacctttgttgagttatttgtttttgtaatatgatttgtagcttgagtttaacataattgtgaaatcctaactttgctgttttcaaaggtaacattttgtgaaagaatgaaagcaaaaagttattctatcctcagaatattgtctgtcacatgccaatcaacataattaaaggcaatagaaattgccaaatt

SEQ ID NO: 265944 - DNA, 551 bp, Homo sapiens
agatttcatgttgtgtttgaaacatactcagacacaacaaaactatcaaaaaataaaaacagaggcacacggaaacactgaaatgtagttaatgtgtctagtactttgtgggggtgattttataggtgtatgcatataaaaactcatcaaattgcatacattaaatttgtgcaattatttttgtatacaaatcatacctcaataaaactgttaaaaaaaagaaaagagaaagtaaaaaacaaatgactrccaccaacaacaaaaatgtccaagaacagtaaatagagtttgtatatatacatgatgtattttttatcgccattgcttctcatgtatgaaaagaatttttgttaaattgtcacctttgttgagttatttgtttttgtaatatgatttgtagcttgagtttaacataattgtgaaatcctaactttgctgttttcaaaggtaacattttgtgaaagaatgaaagcaaaaagttattctatcctcagaatattgtctgtcacatgccaatcaacataattaaaggcaatagaaattgccaaatt

SEQ ID NO: 265945 - DNA, 551 bp, Homo sapiens
agatttcatgttgtgtttgaaacatactcagacacaacaaaactatcaaaaaataaaaacagaggcacacggaaacactgaaatgtagttaatgtgtctagtactttgtgggggtgattttataggtgtatgcatataaaaactcatcaaattgcatacattaaatttgtgcaattatttttgtatacaaatcatacctcaataaaactgttaaaaaaaagaaaagagaaagtaaaaaacaaatgactaccaccaacaacaaaaatgtccaagaacagtaaatagagtttgtatatatacatgatgtattttttatcgccattgcttctcatgtatgaaaagaatttttgttaaattgtcmcctttgttgagttatttgtttttgtaatatgatttgtagcttgagtttaacataattgtgaaatcctaactttgctgttttcaaaggtaacattttgtgaaagaatgaaagcaaaaagttattctatcctcagaatattgtctgtcacatgccaatcaacataattaaaggcaatagaaattgccaaatt

SEQ ID NO: 265946 - DNA, 600 bp, Homo sapiens
atagtaatttagggtttcaagaaaattgaagactatctaacccaattttccaaattgtagagtcaggaaaaagaatttttctctgatctcccaagaggaagttatcttttctatgtgctctcatttttccgcactgtagcatttatggcaagatgattattatggcctakttacttctttatatctctccttaagtaataagtgttttgagcacaacactgtactatgggccctgtgttcttagagcatagcactatacccaaaacgtagagaatcttatcaaataaattatgatcaataattctcttccatagtaaatggccaccaatgtatatttgaagacattagggctatgaaactaaaaaagaaaaagaaacttccatcacttctatttttagggattttacttctcttgacataaggtttgtgtgtctttgtaaataccactaattctgtgtgaataattactaataatactactaatactgttacttgagtaattctattagcttggaatcacaaagaacaggtctatgttcacatctaattataatcactcaaatctttaaaagtagctatcatacccctactcatgtccat

SEQ ID NO: 265947 - DNA, 600 bp, Homo sapiens
atagtaatttagggtttcaagaaaattgaagactatctaacccaattttccaaattgtagagtcaggaaaaagaatttttctctgatctcccaagaggaagttatcttttctatgtgctctcatttttccgcactgtagcatttatggcaagatgattattatggcctatttacttctttatatctctccttaagtaataagtgttttgagcacaacactgtactatgggccctgtgttcttagagcatagcactatacccaaaaygtagagaatcttatcaaataaattatgatcaataattctcttccatagtaaatggccaccaatgtatatttgaagacattagggctatgaaactaaaaaagaaaaagaaacttccatcacttctatttttagggattttacttctcttgacataaggtttgtgtgtctttgtaaataccactaattctgtgtgaataattactaataatactactaatactgttacttgagtaattctattagcttggaatcacaaagaacaggtctatgttcacatctaattataatcactcaaatctttaaaagtagctatcatacccctactcatgtccat

SEQ ID NO: 265948 - DNA, 583 bp, Homo sapiens
aatcctagtagagacttatatatattttatttctttataaaactttttctttaaagtttgaatctgtgaactggtactctgctgcagtgacaggagaaagttaatgaaaaatgttttcttttgttcaccatgaacttttctttcaattgagcttcctaaatctggtgttctggaccacagctgagtgtcagttagaaatggaacaggggcaaaaaacaaggtagctacatcttcccatgaaaacaattaatttggggcacacccacgtgaatatgcctcccyaagtattatacagcagttttgctgttttatgacttcttcggagcatttagtatcactgactactttttcctcttcccctctgcttttctttacaccaccctgtcctgattttcctgattttcttattatttcctgtgaaatatgatgtttaactaaacaagtatgattcttcttttgctacccattggaatcacttggtaacttttcttctttctttttattaaaaataatacccagaatctcactcacaaagattgtgacttaatagatctttgtctgtgtgtgttgcgtggagtcgggt

SEQ ID NO: 265949 - DNA, 583 bp, Homo sapiens
aatcctagtagagacttatatatattttatttctttataaaactttttctttaaagtttgaatctgtgaactggtactctgctgcagtgacaggagaaagttaatgaaaaatgttttcttttgttcaccatgaacttttctttcaattgagcttcctaaatctggtgttctggaccacagctgagtgtcagttagaaatggaacaggggcaaaaaacaaggtagctacatcttcccatgaaaacaattaatttggggcacacccacgtgaatatgcctccctaagtattatacagcagttttgctgttttatgacttcttcggagcatttagtatcactgactactttttcctcttyccctctgcttttctttacaccaccctgtcctgattttcctgattttcttattatttcctgtgaaatatgatgtttaactaaacaagtatgattcttcttttgctacccattggaatcacttggtaacttttcttctttctttttattaaaaataatacccagaatctcactcacaaagattgtgacttaatagatctttgtctgtgtgtgttgcgtggagtcgggt

SEQ ID NO: 265950 - DNA, 569 bp, Homo sapiens
agcactatctcctttgatgactacatttcaaagggatggctcccagctccccgagaaagaccttcctaggttgtaaaactggcaagaggctgggagaggatttatatctgaatgcggcagaggaagaatttacagtggaaagtttcctaaaataaatgctgtaagaaaagagaggtcagggacctataaccaggaagaaatctgtcttaagttgagtcaaggtgatagaaatgttaaggctatcttgktcaatagttattaagtctctgtgcaaaccctgggaattttcctcttaacagatggaagttggacagcaaagctaaagcagtgatcaaacatcttggtggaccaggcctcaactgtgatcgcccagacaaggctggttcaggtttgctgaaattaggataggttgtaaggagaagtgtttcatgaaaaccccaatttagagaagcaagagccccagtgcattttaagggctaacctgaatgtataggctgcaaaggactatccctttagaaatgagatgatttagcgtgtcttcttcaggtgtaatagcttagcatgaaccc

SEQ ID NO: 265951 - DNA, 487 bp, Homo sapiens
ctgcaaaatgcttttctgacttgaacttctcctcttcctcacctctttcatatgcttcaatcctgagcactatggacttgggagagaagtataaattawtttgatggatgttctggctgctttatcagcttaaaaacaaggtaattgaaaggtttcatccagttagttgagaccttcatgtctctgaatttcacattcccaaaggagcctatctggtatcattctaattagaattacaagtataagtagatataatatgattattgactagggacagctcaatatctattctttctctactgtactcaatgtctaaaactctcagcactgcttccatttaccaaagaccatgtagaaagcctgaggaggtacctacagaatctctgaaaaagactaatattggagtacaaagggtcaggatgatcctactgtacatcctgatttgttctgaaactttctggggccctaggatagttcagaagattga

SEQ ID NO: 265952 - DNA, 532 bp, Homo sapiens
agaaaacaagttatcataacgaagggtagaatatgagcatatgtttaaagatgggccattgtatcccaaaacgtgaatgagacaaggactcttgttcattcttggtgggaaagcaaatgttacagccactttgggcagtttgatggtttcttacacaattaaacatattcttactatatgatccagctatactgctccttggtattttcccaaatgagttgaaaacttgggtccacacaaaaacctgcatataaacatttatagcaactctttccataaattgccaaaacttggaaacaaccaagatgttatttaataggtgaagggataaataaactgcagtccatgcaggcartggaatattattcagcaatatgaaataagctatcaagtcataaaaataaataaagctcaaatgcatatttctaagtagaagaagctagtctggaagtgttgcatactatgtgtttccagtcatataatatcctggaatttaaaactatggagacagtataaagatcagtgatggcta

SEQ ID NO: 265953 - DNA, 566 bp, Homo sapiens
gagcagttgtacctgtttggagttgaggttcaggaaagtattcccagagttgctgaacctggagccaggtctttatagctaaataagaaaataaatgtgarttgactaatagatgattctagggggtagagataattaaagttatgtaccttggattctgtactcgatatggaataaaatcaatctatagagctttagactatatcaaaagaaatagctcttgaaatctggttgaagttttgggttgaattctttccgtgtttcacatttgcagcctgagatagctaaaaaaaaattatggctgtaatcaccactatatgctttcctctatactttcaatgtgatacttcagatatctatcctatgataagaccaaaaagagccatgggagaggtatacttagaggagtgccagtaaactgtgttggagcttaagaggtcaagcatttacgaggttagtttacttaatgggccataaacatgaagacagggaagataggaagctaatgagccagggacccaaattctaggcaaataaggaagcgtacgcaggaggtcagtaaacgg

SEQ ID NO: 265954 - DNA, 566 bp, Homo sapiens
gagcagttgtacctgtttggagttgaggttcaggaaagtattcccagagttgctgaacctggagccaggtctttatagctaaataagaaaataaatgtgagttgactaatagatgattctagggggtagagataattaaagttatgtaccttggattctgtactcgatatggaataaaatcaatctatagagctttagactatatcaaaagaaatagctcttgaaatctggttgaagttttgggttgaattctttccgtgtttcacatttgcagcctgagatagctaaaaaaaaattatggctgtaatcaccactatatgctttcmtctatactttcaatgtgatacttcagatatctatcctatgataagaccaaaaagagccatgggagaggtatacttagaggagtgccagtaaactgtgttggagcttaagaggtcaagcatttacgaggttagtttacttaatgggccataaacatgaagacagggaagataggaagctaatgagccagggacccaaattctaggcaaataaggaagcgtacgcaggaggtcagtaaacgg

SEQ ID NO: 265955 - DNA, 566 bp, Homo sapiens
gagcagttgtacctgtttggagttgaggttcaggaaagtattcccagagttgctgaacctggagccaggtctttatagctaaataagaaaataaatgtgagttgactaatagatgattctagggggtagagataattaaagttatgtaccttggattctgtactcgatatggaataaaatcaatctatagagctttagactatatcaaaagaaatagctcttgaaatctggttgaagttttgggttgaattctttccgtgtttcacatttgcagcctgagatagctaaaaaaaaattatggctgtaatcaccactatatgctttcctctatactttcartgtgatacttcagatatctatcctatgataagaccaaaaagagccatgggagaggtatacttagaggagtgccagtaaactgtgttggagcttaagaggtcaagcatttacgaggttagtttacttaatgggccataaacatgaagacagggaagataggaagctaatgagccagggacccaaattctaggcaaataaggaagcgtacgcaggaggtcagtaaacgg

SEQ ID NO: 265956 - DNA, 566 bp, Homo sapiens
gagcagttgtacctgtttggagttgaggttcaggaaagtattcccagagttgctgaacctggagccaggtctttatagctaaataagaaaataaatgtgagttgactaatagatgattctagggggtagagataattaaagttatgtaccttggattctgtactcgatatggaataaaatcaatctatagagctttagactatatcaaaagaaatagctcttgaaatctggttgaagttttgggttgaattctttccgtgtttcacatttgcagcctgagatagctaaaaaaaaattatggctgtaatcaccactatatgctttcctctatactttcaatgtgatacttcagatatctatcctatgataagaccaaraagagccatgggagaggtatacttagaggagtgccagtaaactgtgttggagcttaagaggtcaagcatttacgaggttagtttacttaatgggccataaacatgaagacagggaagataggaagctaatgagccagggacccaaattctaggcaaataaggaagcgtacgcaggaggtcagtaaacgg

SEQ ID NO: 265957 - DNA, 506 bp, Homo sapiens
gcctgcagggcctagtattttgtccaataactgggaaagatagagatgagaggtacaggaaccggtagtgtttgatttctggtatttctgtaagaaatcagtccatcaagcaagtggttctaattctcaaaagagtattagcagcctgaaatatagagactcaaagktatataaggtgcactaaagcaatcacccttgatgattgttctctccagatagaaaaggttttcctttattgtggttggagatctgggctgatttttgtgtgttccaatttagaaatttgaggtagttaggaatcccgtagctctgttaagggaaattgttaccaatttttactcacaaatgaactactctactatagccagccttgaggggtacaaactgatactggtgaaaccccaggccctgggtattgagtaaggcattgacagtttgagtactgacatgtgattgggagataagtaggaactggtgggaggaaaacagccagaaattggcattca

SEQ ID NO: 265958 - DNA, 506 bp, Homo sapiens
gcctgcagggcctagtattttgtccaataactgggaaagatagagatgagaggtacaggaaccggtagtgtttgatttctggtatttctgtaagaaatcagtccatcaagcaagtggttctaattctcaaaagagtattagcagcctgaaatatagagactcaaaggtatataaggtgcactaaagcaatcacccttgatgattgttctctccagatagaaaaggttttcctttattgtggttggagatctgggctgatttttgtgtgttccaatttagaartttgaggtagttaggaatcccgtagctctgttaagggaaattgttaccaatttttactcacaaatgaactactctactatagccagccttgaggggtacaaactgatactggtgaaaccccaggccctgggtattgagtaaggcattgacagtttgagtactgacatgtgattgggagataagtaggaactggtgggaggaaaacagccagaaattggcattca

SEQ ID NO: 265959 - DNA, 532 bp, Homo sapiens
tcccgtagctctgttaagggaaattgttaccaatttttactcacaaatgaactactctactatagccagccttgaggggtacaaactgatactggtgaaaccccaggccctgggtattgagtaaggcattgacagtttgagtactgacatgtgattgggagataagtaggaactggtgggaggaaaacagccagaaattggcattcataggatataaagaaaggggaaacagtgaggattaaaacagacacaggagttaaggctaacttcagaggggcaagcagtgggagagtcttcttggatgtttttacagaactagtttctgaaagaaacctatttaggcttaaagaaacagaagcttacttaatgaaacagttattatttttacattttcatgacaattaaaatttatttatataaatttcactgggctgaaaaagtgtcattatgtaaacacacacaaygatgtatttcttatacttaatcactcgggggatgtcagcaattttcttttggaagcagtatgtttcca

SEQ ID NO: 265960 - DNA, 558 bp, Homo sapiens
tcattatgtaaacacacacaacgatgtatttcttatacttaatcactcgggggatgtcagcaattttcttttggaagcagtatgtttccagaagtagtttttctttattgtaaaggatattctgtttgagatagtatggattttaaagaaacaacttgtcctagaaagagmaaattatgaagaattataaaacatatgcttaagaaaaattaggttaaaaatggcagctgaactattggaagatgctggtcatgtaatgtgagcaaaagcatagcaatagaggggtgggattgcttcagataaagagccagggaggctcaagggacatgtctctatggcttctgaccactctgaacccagtactgttttccattaggacttaccaaaaagcccaaaggagccaagaattccaggtttctaaagataacatatattcgcctccatggcttacttattgggcttggctacttaacttcttatttcacctattggggatttagtttcctcagttatagcctgctctaaaaggtgtttgtgagaaatacatcaaataatgct

SEQ ID NO: 265961 - DNA, 673 bp, Homo sapiens
ctactttgttttccacttatcatcagaaaaatatttcttaaaaataacagttcattatgacatgtccctgaacttctacaatacctttcatctctagtgcttctctgacaattttatatcacattttattttgagttttctatttaagtggataggctttatacctgcrattaaatttgaagcttcagtcctattcaagcagacattatatgtctttgtattctctagtggtgaattgatatttattcaatgattgagcatagtgtctttggtcaaattgccatgttcatggtctttatatcttggatagcccaataagttgggttgaatgaatttagtcacactatagatattgacttgttttatgctttggccatatgaagtgtatcacttagatttaattacaacttatattgttgatcattttgttagaaaatacatttcaaaggatctaatattactattccctctggttccattcaaaagcttcaaaatgattggcaaataacatataaacatcttcatgtgtttatttccttgtggtttacccatatctgccttcttaaaaacagacccattaagtagtattggtgatctaaaactacttgaagatactaatagtgcagggttaataggaatgtccaataattaattcagaagaaggtacaaggtg

SEQ ID NO: 265962 - DNA, 673 bp, Homo sapiens
ctactttgttttccacttatcatcagaaaaatatttcttaaaaataacagttcattatgacatgtccctgaacttctacaatacctttcatctctagtgcttctctgacaattttatatcacattttattttgagttttctatttaagtggataggctttatacctgcgattaaatttgaagcttcagtcctattcaagcagacattatatgtctttgtattctctrgtggtgaattgatatttattcaatgattgagcatagtgtctttggtcaaattgccatgttcatggtctttatatcttggatagcccaataagttgggttgaatgaatttagtcacactatagatattgacttgttttatgctttggccatatgaagtgtatcacttagatttaattacaacttatattgttgatcattttgttagaaaatacatttcaaaggatctaatattactattccctctggttccattcaaaagcttcaaaatgattggcaaataacatataaacatcttcatgtgtttatttccttgtggtttacccatatctgccttcttaaaaacagacccattaagtagtattggtgatctaaaactacttgaagatactaatagtgcagggttaataggaatgtccaataattaattcagaagaaggtacaaggtg

SEQ ID NO: 265963 - DNA, 521 bp, Homo sapiens
ctatttaagtggataggctttatacctgcgattaaatttgaagcttcagtcctattcaagcagacattatatgtctttgtattctctagtggtgaattgatatttattcaatgattgagcatagtgtctttggtcaaattgccatgttcatggtctttatatcttggatagcccaataagttgggttgaatgaatttagtcacactatagatattgacttgttttatgctttggccatatgaagtgtatcacttagatttaattacaacttatattgttgatcattttgttagaaaatacatttcaaaggatctaatattactattccctctggttccattcaaaagcttcaaaatgattggcaaataacatataaacawcttcatgtgtttatttccttgtggtttacccatatctgccttcttaaaaacagacccattaagtagtattggtgatctaaaactacttgaagatactaatagtgcagggttaataggaatgtccaataattaattcagaag

SEQ ID NO: 265964 - DNA, 500 bp, Homo sapiens
agtctttaatccatcttgagttaatttttgtatatggagacagataggagtccagtttcattcttctacatatggctagtcaattttcccagcaccatttatcaaatatggtgttttttcaccattgtttatttttgttgactttgtcaatgatcaattggttgyaggcatgtggctttatatttgggttctctattatgtttcattgatgatatatcttttttcacccctttactttgagtctgtagtgtctttagccaataggtagatctcttgtaggcagtaggtggttgggtcttgttttcttaaaatccagtttgccacgttatatcgttttagtggcacatttaggccatttatcttcaaggttattgatatgtgaggtttggttcctgtcatagtgttgtgtgttaacttggggttgtaattgtgtaactgctttataggatctgtgggccttgtattcatgtgcccttttatgatgttgagtatcatcattt

SEQ ID NO: 265965 - DNA, 500 bp, Homo sapiens
agtctttaatccatcttgagttaatttttgtatatggagacagataggagtccagtttcattcttctacatatggctagtcaattttcccagcaccatttatcaaatatggtgttttttcaccattgtttatttttgttgactttgtcaatgatcaattggttgcaggcatgtggctttatatttgggttctctattatgtttcattgatgatatatcttttttcacccctttactttgagtctgtagtgtctttagccaataggtaratctcttgtaggcagtaggtggttgggtcttgttttcttaaaatccagtttgccacgttatatcgttttagtggcacatttaggccatttatcttcaaggttattgatatgtgaggtttggttcctgtcatagtgttgtgtgttaacttggggttgtaattgtgtaactgctttataggatctgtgggccttgtattcatgtgcccttttatgatgttgagtatcatcattt

SEQ ID NO: 265966 - DNA, 482 bp, Homo sapiens
tgtaggtttggttgctttacatgattccatatttctcaaaagctttgtttattataaaaaaaccttttttatttatttttgtctgagtaggttaatctggaagactggtcttcaaactctaaaattctttattctgcttcgtgtaatctattgttaaagctttcagctgtattttgaagttcttcaagtgaatttttcatttccagaagttctgttttgttttttaagatacccctcttttccttcatctcctggattgtgtttgtgctttgtttgtgttagtttctaatcttctctgggatctcattgagcttccttgmaatccatactttgaattctttatctgtcatttccaaattttcatttttgttagggtccattgctatagagctagtgtgatcctttgaaggtatcgtaaccttcagatttttcatggtgccgtaattcttatgctggtttctattcatctggagaagctgaca

SEQ ID NO: 265967 - DNA, 466 bp, Homo sapiens
caccaaaaggattttataattcactatcttatttgggagcaatgagtgttgagagagcacacacctggataatcctaagatgtctcctcttgagctccagaaaacaatgggctggtcatttcttcaaaactcagcaggtgccagacactgtgcctaccacccttgaggagtttctggtctgatgacagaaggtctttgagtaacactttcttctccttggttgcacatttctcatcaagtatccatatcttcatgccagaatggtcctcccagagccatacttcttggtctgtacatttttctgttttytttttcttttttattacttcatcaaaactgcccttttaggctcaggtgtctgagaatatattattgtttacttctcctggctgagatgatgagatactgtagagacctaacatagtcacctcaatcctagtaaatctttttcactttaacaagtacc

SEQ ID NO: 265968 - DNA, 595 bp, Homo sapiens
ccaattcctgctgccattttataatacaaattataatttaattgtatacagtcagattactcttatgaacatatcagttaaaatcttcaaaatgttgatattctcttaatatgactctggtttagttaaatgaaagggtggtttggaaagctataatctcagatgcgggatctgtaacaggggataatatctcatccgatcacggcagctggatgtttcacaccatttgcctgagaactgttgacaggcaaatgagaggctccgtgaaagcaggagaatctggaataccactttacmttttgtctaaaatttttcacatcgaaacaaaagacacatacacataacacacacacggtattttgatggaatattttattgggctgttggttttttaaacgctatcatacatgaggtttgtatcaacctttagcacctattcgccactcaatcttttttggaccccactcaaagcaaaattacatatgccatagcaatagcattcacagtatttatcttcatgataattaagaaaaaaataattacaggactttccaatatcctacttataaagttattttaatgtgtggggcatttg

SEQ ID NO: 265969 - DNA, 595 bp, Homo sapiens
ccaattcctgctgccattttataatacaaattataatttaattgtatacagtcagattactcttatgaacatatcagttaaaatcttcaaaatgttgatattctcttaatatgactctggtttagttaaatgaaagggtggtttggaaagctataatctcagatgcgggatctgtaacaggggataatatctcatccgatcacggcagctggatgtttcacaccatttgcctgagaactgttgacaggcaaatgagaggctccgtgaaagcaggagaatctggaataccactttacattttgtctaaaatttttcacatcgaaacaaaagacacatacacataacacacacacggtattttgatggaatattttattgggctgttggttttttaaacgctatcatacatgaggtttgtatmaacctttagcacctattcgccactcaatcttttttggaccccactcaaagcaaaattacatatgccatagcaatagcattcacagtatttatcttcatgataattaagaaaaaaataattacaggactttccaatatcctacttataaagttattttaatgtgtggggcatttg

SEQ ID NO: 265970 - DNA, 536 bp, Homo sapiens
aaatatgtatgtgtttttccctttcccagccacccttgcagctaggtttaagacacgtgactgggtgttggaaaaagcgttcccttttcctctgccgtggcaggtttggaaggcacaagttctaaataattcatctgtaaaatggagaaggccaatcacagtggatgctgtagtatgtccccaagattcccttgttagtgttggtgatagctttcagctgagttgctccctcagcatttctcttagcagaacagagctgctttcccaagtattactcttccccarggttagcaaacatccaacaactggtcaaagtaaaggtatacaagcctagacccttttttcctgaagtcagataacccatatcatatggaaggaagagacttaatcctttacctcgtttacagtgaaaattccaaccagtcactaagcttaggtgattggtactctaatctctctctctctctctctctctccagcaccccctctgtgtgtgtgtgtgtgtgtgtgtgtgtgtgtgtgtgtgtgtgtgtgtt

SEQ ID NO: 265971 - DNA, 569 bp, Homo sapiens
tggcatttttgcagaaattgacaagcttatatgaacatttatgtggaaattcaagagacccataatagccaattaaatcttgaaagagaggaacaaatttgrctgacacatacttcctaatttcaaaatgtactaccaagctacagtacccaagattccgtggtactggaataaggatgaatatagaccagtggaagagaactgagagtccagaattaagtctttacatttattttcaaaaagagtgccaagataatgaaatgggaaaagaatagttttttcaacaaattatgtctggacaatcgagtatgtacatgcaaaaccaagagatcattcactattgctgaatgtgctgatattaatgacgcaaccgttatttttggaccaaaagtttactagaagtccttgacacgccaaaatagtggcatgccgggatttctgcactcctctgtacagtgaaagacattctgatgtgctcacaatcaggccttcttccctaatgtgggtgctctccactctggttttctaagaccctgctggatatgtatggatgccagatcagtagttca

SEQ ID NO: 265972 - DNA, 642 bp, Homo sapiens
ctcaacagcattttatctgcaatataaccactcatatgtggtggcttgttagccgctatggtcataaatcttagcgtccaagagactcagaagagatgatatactgccagaagctatctatctatacacaaatacatgatattttaatctatgaactgtaatcactycttggaattgatgacttgaaagtctggtccaaggcaattcacttatgcataattttacactgttccttaggtaataatttcactttttgtctgagagacttttacagcactgagtgttctccttcagtttacagacaccaaatcctcactgtttccctgcctttccacagtcacacaggtaaccctagcaccactaactgacacctgaaatctaagccctcctccctgttctcaaagccaaccctgagttctgaaaggaggaataatccaattctggcactggattccaaagcccattttcatgaggtctcccacatcagtttttcactccaaggagttgccccttgatctgctaattaggctcctcctgctttgccctcaagtgccaatatcctttcctctttttctggactcttccagtttacatcaatagacctaagttttatttattatccctagtgcaactttagcaact

SEQ ID NO: 265973 - DNA, 635 bp, Homo sapiens
tggtcggcactactaccgttttgccaacccataaggaaaacctctttttaactcaatcccatctcttctaaaattctgtcactattttcttttctcaaaagctaagttttttttttcttttttcttttggatytctgctcttgccatctctcatctgtaacatagcaagcctcttctctgactacatatctctggctctgtaccactcctgtcagtcctcaaattcaggatggaagttttcttatcaacccataacttctctctccgcactcaaattttgttttctgagcaggctctgtcaataaactgaaattctgagaacttgctcactatcctctcatgggtatagtgataactggatcacatatgagttgactgtttttatgaggccatttgttgtagataaagtggatggttatattactctataactaaatgttaaaataaaattttcaaaaataatttaagactcaataacattgttttctgtgagaactggaaataaaaatattctaatgagagcaaaagttgttttgtattgttatgcaattttaaaagagaatgagccctattttaaaatatttttatttcatcttttatttttaaaaatgtgtaattttttgtatttttaccta

SEQ ID NO: 265974 - DNA, 579 bp, Homo sapiens
ctcatactaaaatcatcttactattctttcatggtttatgtggtcaataacagaaacatttggaattgagaattagcaattagcttgcctatctctcctgccatgatggatgagaaaatgttacccatgattttagtaataatagctaacatttactgaatgattggcatgtagttattagcagtctcatttcatgaatacataaactgagcctttagagaagtcaaatcacttgatcaaggttatggaactagaaagtggctgacccaaaatcccatgttttaaatcattatgcaagctgcctcccctctgtgataayagcatttgattaccatcctattttatacaagatacacatgtgtgaagtttccattgagatataaagcatcaacttatgaaaacctattacatccttcaaaagtaatggcccataatccagagtgatccaataaaaatcacaatgaatattgttctatttttaggaaaataaaatatattcatataaattgttctttagaattatctctacaaattacccagcatttttcaatcaagtaatttcttgattaatacgtatac

SEQ ID NO: 265975 - DNA, 512 bp, Homo sapiens
atattaaatcctgctgaaaagtcaaatcataaaattcactgatggagtgaaagaggtcartgataaagtaatgggggtctgaaaacaaattggtgtaggctgagcagtgagtaggtgtttagggaaatgatacagcaagtactcttttagggaaaattgtttggtgtgaaacagtaagaaaagaagggtagcctaaagtagaaaggatttattagaatttatgttgtctaatgcaccatgtcaacttttaacaggttagatacacagttgtgaaagctattataaaatgtgtgggcagtttatgatttgggcattactgacatatggttggttatttatttgtatgtgtatgtgcagtctgttcttaaggaagaacgttccatattcttagtaaatatctgataatattaaggtcagtgaatgctgcacgataaatggctcataatacaatgcaattaatcttcctaaaatactataaatttctgtctatgtatatctcatttgggagaaag

SEQ ID NO: 265976 - DNA, 574 bp, Homo sapiens
acaaaacatttgtgtatttcacagatgactcttgttttgccataacgctacaaagtttatggaaactagtcaactgaaggatttttctgttgtgtgatatgtaaaggtctgaatagtaaaatcatctttgcattcctgaagtgttaaaaaataataatcaacatgtcagattgttgggcttttcttagcagatgttttctaattcaaagtttttggttgtgtttttgttttttagttcaaagttaatttgtttgcctcttgaagattaatttgtctmagctttctaggaactgccaaacagtgatattctcaaaaggattcaataaactagttcaaaaaatgttcctatcttctattgccttaaatctaatcatgttctgtgaactgcagtcctagtgtgtagcacggcgtgatttatcacccagagttctccactgtatttcaaagttgatttacctcaggaaaactgagggtttattgagtaactcaaatttttccagagaaactggtttgaagtatccagtgcaacttgccaagctctgtctttgtttataaactcacttactggtgacat

SEQ ID NO: 265977 - DNA, 629 bp, Homo sapiens
tgttctgtgaactgcagtcctagtgtgtagcacggcgtgatttatcacccagagttctccactgtatttcaaagttgatttacctcaggaaaactgagggtttattgagtaactcaaatttttccagagaaactggtttgaagtatccagtgcaacttgccaagctctgtctttgtttataaactcacttactggtgacatcattcagggtagtccctctctaaaaaccttgaattttgtctggtcttctcggatgaggaattctgaacctggtacaatctcattctaactcttctcttatgtactaagtacttatattatatacctttctgtaacttaacaggaaaaggctgaccatttttggtattttttcagtgacacatttttcagtgtctaagctcacactcatttgtaattaactacatgatttttaatayaatttctactactttgggttttatttcccaggtatagacattgtccttttaatgttttcttaaggaattattcagagtagattattaacaacttaaggtcctaaacagatatacatgggacatggttgttgtaaaaagaaacaaatctgtaagacactaggaaattcaaaatgctttcaagctttctttgaa

SEQ ID NO: 265978 - DNA, 629 bp, Homo sapiens
tgttctgtgaactgcagtcctagtgtgtagcacggcgtgatttatcacccagagttctccactgtatttcaaagttgatttacctcaggaaaactgagggtttattgagtaactcaaatttttccagagaaactggtttgaagtatccagtgcaacttgccaagctctgtctttgtttataaactcacttactggtgacatcattcagggtagtccctctctaaaaaccttgaattttgtctggtcttctcggatgaggaattctgaacctggtacaatctcattctaactcttctcttatgtactaagtacttatattatatacctttctgtaacttaacaggaaaaggctgaccatttttggtattttttcagtgacacatttttcagtgtctaagctcacactcatttgtaattaactacatgatttttaatataatttctactactttgggttttatttcccaggtatagacattgtcctyttaatgttttcttaaggaattattcagagtagattattaacaacttaaggtcctaaacagatatacatgggacatggttgttgtaaaaagaaacaaatctgtaagacactaggaaattcaaaatgctttcaagctttctttgaa

SEQ ID NO: 265979 - DNA, 647 bp, Homo sapiens
ctagtccttatttttactagtctagggctaaataaattacccagagtttcccaaacacaccacagctttcatggatttgcaagcgtgattctttctgccttcattgtcctttgctctcctctccctggagaattcatgttgggttgcaattatgttttaaatgtctgtctccaccacttgatttggctacatgatttttgtctttacactctttgcacttctcatgcacttaagacataataagggctccattaagtgtctgtaagattaattaaaaagatgggcaacatggaaatctgaatcataatataaactctctctacaagatacttggcctggygcagtggctcatgcctaatcccagcactttgggaggccaaggctggtggatcatgaggtcaggagttcaagaccagccccgccaagatggtgaaaccccgtctctactaaaaataaaaaaattagccgggtgtgctcgtaggcgcctataatcccagctacttgggaggctgaggcagaaaattgtttgaacctgggagacagaggttgcagtgagctgagattgcaccactgcactccagtttaaaaaacaaacaaacaaacaaaaaaaccaaccatttagatcaatgctgtctggttaaatattc

SEQ ID NO: 265980 - DNA, 589 bp, Homo sapiens
caggtctaactattttttttctcttgactatgtaacttttgaatttgtttttgaagtctttccattattactctggytaaataagtgaccattatctctcaaggatatgtaattctactttaattaaatatttttaggctttttgaatccaaacaaatgacaaacttccccagaatcaaattcaaatttaactctttttcacctaaaattgactaagggattttctagttgggatcctgggaagtctcaaaagatttgtctcccattaggcttgtttgaccagctcccaaaatcttctctagtgtctgtgagctttctttcaaaacaatatgtagcatttccctcgctagtaaacccccaatcttctctttgtccttcacacatatagaagaccaccgtggttttcagttttgttcagaactacaattctgtgattcccaaataaattgcatactttagagattcatctttattttgacttcagtagtggtgataaactctgatacaatattcaagaatatgttttataacaatactaagtaaatttagaaatgcattttactgcgatataaaatccttaacttttctc

SEQ ID NO: 265981 - DNA, 589 bp, Homo sapiens
caggtctaactattttttttctcttgactatgtaacttttgaatttgtttttgaagtctttccattattactctggctaaataagtgaccattatctctcaaggatatgtaattctactttaattaaatatttttaggctttttgaatccaaacaaatgacaaacttccccagaatcaaattcaaatttaactctttttcacctaaaattgactaagggattttctagttgggatcctgggaagtctcaaaagatttgtctcccattaggcttgtttgaccagctcccaaawtcttctctagtgtctgtgagctttctttcaaaacaatatgtagcatttccctcgctagtaaacccccaatcttctctttgtccttcacacatatagaagaccaccgtggttttcagttttgttcagaactacaattctgtgattcccaaataaattgcatactttagagattcatctttattttgacttcagtagtggtgataaactctgatacaatattcaagaatatgttttataacaatactaagtaaatttagaaatgcattttactgcgatataaaatccttaacttttctc

SEQ ID NO: 265982 - DNA, 589 bp, Homo sapiens
caggtctaactattttttttctcttgactatgtaacttttgaatttgtttttgaagtctttccattattactctggctaaataagtgaccattatctctcaaggatatgtaattctactttaattaaatatttttaggctttttgaatccaaacaaatgacaaacttccccagaatcaaattcaaatttaactctttttcacctaaaattgactaagggattttctagttgggatcctgggaagtctcaaaagatttgtctcccattaggcttgtttgaccagctcccaaaatcttctctagtgtctgtgagctttctttcaaaacaatatgtagcatttccctygctagtaaacccccaatcttctctttgtccttcacacatatagaagaccaccgtggttttcagttttgttcagaactacaattctgtgattcccaaataaattgcatactttagagattcatctttattttgacttcagtagtggtgataaactctgatacaatattcaagaatatgttttataacaatactaagtaaatttagaaatgcattttactgcgatataaaatccttaacttttctc

SEQ ID NO: 265983 - DNA, 589 bp, Homo sapiens
caggtctaactattttttttctcttgactatgtaacttttgaatttgtttttgaagtctttccattattactctggctaaataagtgaccattatctctcaaggatatgtaattctactttaattaaatatttttaggctttttgaatccaaacaaatgacaaacttccccagaatcaaattcaaatttaactctttttcacctaaaattgactaagggattttctagttgggatcctgggaagtctcaaaagatttgtctcccattaggcttgtttgaccagctcccaaaatcttctctagtgtctgtgagctttctttcaaaacaatatgtagcatttccctcgctagtaaacccccaatcttctctttgtccttcacacatatagaagaccaccgtggttttcagttttgttcagaactacaattctgtgattcccaaataaattgcatactttagagattcatctttattttgacttcagtagtggtgataaactctgatacaatawtcaagaatatgttttataacaatactaagtaaatttagaaatgcattttactgcgatataaaatccttaacttttctc

SEQ ID NO: 265984 - DNA, 520 bp, Homo sapiens
accacacggggcctcatgtaccagttagataatccaagtcagcctttattgcattggactctacattttggctctgcagaactgagasaagaaatgtatgaataggatagtgatattgcctttgtctatgggaattcttgagtctaataaaaaaaactgggaaaaatctaacttcatgattacacttgggcacataggtgattaatacgaatgaagtaacaaccataaatacaatcataaccacaagaacaacagtaattcaaattttctcacttcatagatgttcttagaatgctttattggtatcttgtaggtgctctccccaagcctcaggtgttcttccataatctcagttgatgcagaggcaaacaccacactctcctctgttcaatgtctgccattcctgtctttttggcctctgactcttccctatactactgtccatgcacttgagatcttcactgacatagctgggctctgtatttattgataagaatatctcttttctcttagactaggc

SEQ ID NO: 265985 - DNA, 591 bp, Homo sapiens
cataggtgattaatacgaatgaagtaacaaccataaatacaatcataaccacaagaacaacagtaattcaaattttctcacttcatagatgttcttagaatgctttattggtatcttgtaggtgctctccccaagcctcaggtgttcttccataatctcagttgatgcagaggcaaacaccacactctcctctgttcaatgtctgccattcctgtctttttggcctctgactcttccctatactactgtccatgcacttgagatcttcactgacatagctgggctctgtatttattgataagaatatstcttttctcttagactaggcatgaccaaaaggttaatctgggttcaaagattaatgacaatgaccactcagtttttattcaagatcaattttatttgttgtaaaaacaaacatgggttatgttccagacaaacagatataagtgagtagacttatgccctggtgcctccttggctcttcacaggatgcaaaaacaaatcctgccagcaggaggtggcaggttgcagaggtggctggttgctctttcagccagcttggccttgtctggcatgcacaggtcccag

SEQ ID NO: 265986 - DNA, 591 bp, Homo sapiens
cataggtgattaatacgaatgaagtaacaaccataaatacaatcataaccacaagaacaacagtaattcaaattttctcacttcatagatgttcttagaatgctttattggtatcttgtaggtgctctccccaagcctcaggtgttcttccataatctcagttgatgcagaggcaaacaccacactctcctctgttcaatgtctgccattcctgtctttttggcctctgactcttccctatactactgtccatgcacttgagatcttcactgacatagctgggctctgtatttattgataagaatatctcttttctcttagactaggcatgaccaaaaggttaatctgggttcaaagattaatgacaaygaccactcagtttttattcaagatcaattttatttgttgtaaaaacaaacatgggttatgttccagacaaacagatataagtgagtagacttatgccctggtgcctccttggctcttcacaggatgcaaaaacaaatcctgccagcaggaggtggcaggttgcagaggtggctggttgctctttcagccagcttggccttgtctggcatgcacaggtcccag

SEQ ID NO: 265987 - DNA, 591 bp, Homo sapiens
cataggtgattaatacgaatgaagtaacaaccataaatacaatcataaccacaagaacaacagtaattcaaattttctcacttcatagatgttcttagaatgctttattggtatcttgtaggtgctctccccaagcctcaggtgttcttccataatctcagttgatgcagaggcaaacaccacactctcctctgttcaatgtctgccattcctgtctttttggcctctgactcttccctatactactgtccatgcacttgagatcttcactgacatagctgggctctgtatttattgataagaatatctcttttctcttagactaggcatgaccaaaaggttaatctgggttcaaagattaatgacaatgaccactcastttttattcaagatcaattttatttgttgtaaaaacaaacatgggttatgttccagacaaacagatataagtgagtagacttatgccctggtgcctccttggctcttcacaggatgcaaaaacaaatcctgccagcaggaggtggcaggttgcagaggtggctggttgctctttcagccagcttggccttgtctggcatgcacaggtcccag

SEQ ID NO: 265988 - DNA, 170 bp, Homo sapiens
gaccactcagtttttattcaagatcaattttatttgttgtaaaaacaaacawgggttatgttccagacaaacagatataagtgagtagacttatgccctggtgcctccttggctcttcacaggatgcaaaaacaaatcctgccagcaggaggtggcaggttgcagaggtg

SEQ ID NO: 265989 - DNA, 170 bp, Homo sapiens
gaccactcagtttttattcaagatcaattttatttgttgtaaaaacaaacatgsgttatgttccagacaaacagatataagtgagtagacttatgccctggtgcctccttggctcttcacaggatgcaaaaacaaatcctgccagcaggaggtggcaggttgcagaggtg

SEQ ID NO: 265990 - DNA, 628 bp, Homo sapiens
ccatacatgtaatgacataatcatgtcacagtgtgccctcagagcactattctagctgagtatactaagggcttctatctagatcagttcattgtgtctgtgtctcctctaaaaccctccttcatcatgcctaccttgaggaattcagcaagtgatcattcacgcaagctaaaggattttagctttctctgccataaagattattgctaaaatacataccatacaacaaaccaacccatttcccacaaatcttactgtctgacttctcacagaatacataatgacttttattgtgtctcttccttctctttcctaactgaactttgttctttatccatgccttcttccaatcctgacatattttaaaacctttagcatttctgcctataatatttgrgttttcttcttttcctatctttatttgataagtcccgtacaaatattttccccataatcacaatgttttcttttcactttgctcaagaactgagttatgagctccaaatttggacaaactctacattggctaagttttagtcatttgcactgctaagaaagatgacaattcagcatgctgaagatgacttcctcccttataaaggggctaacacagagggcaatactgttc

SEQ ID NO: 265991 - DNA, 466 bp, Homo sapiens
tcctatgtcacacagctgggtggtgacagccgctttagcatcagcacactgcgttccctctgatttcttcattcatctctaagtagcagtaaakccggtcttgaatactgactttgacactcagctttctccacatccttcctgtcacttcctttgagactacttcagattcttccctgagcttctatttctccatttgtaaaattgggttgatgagggtatcttccttcggtagctgtgacaataaaaatgggatcatcacgcatcctccttagccccacgagtaagctcccagtaagtgaggttgtcatcattactggatatttaagattctctacctatttgaaaaaccctagtgacagcgtctcagttggttttctttttgtgtgaatgatcacttgctgaattcatcaagcaggcgctttaacatttaccttcctttattatgctggagtatttttaatgt

SEQ ID NO: 265992 - DNA, 466 bp, Homo sapiens
tcctatgtcacacagctgggtggtgacagccgctttagcatcagcacactgcgttccctctgatttcttcattcatctctaagtagcagtaaatccggtcytgaatactgactttgacactcagctttctccacatccttcctgtcacttcctttgagactacttcagattcttccctgagcttctatttctccatttgtaaaattgggttgatgagggtatcttccttcggtagctgtgacaataaaaatgggatcatcacgcatcctccttagccccacgagtaagctcccagtaagtgaggttgtcatcattactggatatttaagattctctacctatttgaaaaaccctagtgacagcgtctcagttggttttctttttgtgtgaatgatcacttgctgaattcatcaagcaggcgctttaacatttaccttcctttattatgctggagtatttttaatgt

SEQ ID NO: 265993 - DNA, 634 bp, Homo sapiens
tctcactatgactgctttgtttgttcaaaacttacacagattgagtatcctttatctgaaatgcttgggtcagaagtgtgttgggtttcaactgttttcagattttggaatatttgcttcaatgcaatgaggtatcttgggaatgggacccatrtctaaacacaaaattcacttacatttcatacacacttagccacatacacataacctgaaggtaatcttatacaatattttaaataattttatgcatgaaacaaagttttgaatgtgttttgactgtgacccatcacatgaggtaagatgtgtggaattttccacttgtggcatcatgtcagcactcaaaactttttggattttggagaatttcagattttggattttcagagtaggtgtgttcaatctgtatatatgggtcagattcagttgtctcctttaatctttggctgaaggaagccctaaagactttggggcctcaatctcccatatgcagtgacattctcaaggccattgactcagcttctcacctgggtttccttccaatgagccacagatagaagtcacagataatggcaggggcctgctggctgatggcattccagtactgggttgtgaagttgcttgtggtgaaatcagc

SEQ ID NO: 265994 - DNA, 634 bp, Homo sapiens
tctcactatgactgctttgtttgttcaaaacttacacagattgagtatcctttatctgaaatgcttgggtcagaagtgtgttgggtttcaactgttttcagattttggaatatttgcttcaatgcaatgaggtatcttgggaatgggacccatgtctaaacacaaaattcacttacatttcatacacacttagccacatacacataacctgaaggtaatcttatacaatattttaaataattttatgcatgaaacaaagttttgaatgtgttttgactgtgacccatcacatgaggtaagatgtgtggaattttccacttgtggcatcatgtcagcactcaaaactttttggattttggagaatttcagattttggattttcagagtaggtgtgttcaatctgtatatatgggtcagattcagttgtctcctttaatctttggctgaaggaagccctaaagactttggggcctcaatctcccatatgcagtgacattctcaargccattgactcagcttctcacctgggtttccttccaatgagccacagatagaagtcacagataatggcaggggcctgctggctgatggcattccagtactgggttgtgaagttgcttgtggtgaaatcagc

SEQ ID NO: 265995 - DNA, 608 bp, Homo sapiens
gggggtactcttcagaaaaacataaatccacatttaattctaaggttayctagtctattctgaaagcctcaagacacaggctagaaactttatttccctggctggaccattactttcagaaccatttagaaagtttcttaatgttttatttgaatctttattaaaagtttaacttaaaaattctaaaggcaagattttcttgtgttagcttactttaaatatttctctgggaatatgtcagactcagttgtccactctggtatccagggttttattcataatagtgtttttctttttatattaatacttagattaagcttaattaagaactttttatgtacatttgtgaattcagtagttcttttgaaaagatactcatttgaattcaattttatttaaggtatgtaggtttctgcaaagcatatgcctaagctcattattcaattatgatgtcagttattatagtaatacgattattgccctacttaaaaaaatgccagctaaaaatctatctgaaaaatataactcctcttcagagaagattcttaagaatcatctgttccatagggatttatactttaaaaagatggtggtaaataaaaaagtta

SEQ ID NO: 265996 - DNA, 608 bp, Homo sapiens
gggggtactcttcagaaaaacataaatccacatttaattctaaggttacctagtctattctgaaagccycaagacacaggctagaaactttatttccctggctggaccattactttcagaaccatttagaaagtttcttaatgttttatttgaatctttattaaaagtttaacttaaaaattctaaaggcaagattttcttgtgttagcttactttaaatatttctctgggaatatgtcagactcagttgtccactctggtatccagggttttattcataatagtgtttttctttttatattaatacttagattaagcttaattaagaactttttatgtacatttgtgaattcagtagttcttttgaaaagatactcatttgaattcaattttatttaaggtatgtaggtttctgcaaagcatatgcctaagctcattattcaattatgatgtcagttattatagtaatacgattattgccctacttaaaaaaatgccagctaaaaatctatctgaaaaatataactcctcttcagagaagattcttaagaatcatctgttccatagggatttatactttaaaaagatggtggtaaataaaaaagtta

SEQ ID NO: 265997 - DNA, 608 bp, Homo sapiens
gggggtactcttcagaaaaacataaatccacatttaattctaaggttacctagtctattctgaaagcctcaagacacaggctagaaactttatttccctggctggaccattactttcagaaccatttagaaagtttcttaatgttttatttgaatctttattaaaagtttaacttaaaaattctaaaggcaagattttcttgtgttagcttactttaaatatttctctgggaatatgtcagactcagttgtccactctggtatccagggttttattcataatagtgtttttctttttatattaatacttagattaagcttaattaagaactttttatgtacatttgtgaattcagtagttcttttgaaaagatactcatttgaattcaattttatttaaggtatgtaggtttytgcaaagcatatgcctaagctcattattcaattatgatgtcagttattatagtaatacgattattgccctacttaaaaaaatgccagctaaaaatctatctgaaaaatataactcctcttcagagaagattcttaagaatcatctgttccatagggatttatactttaaaaagatggtggtaaataaaaaagtta

SEQ ID NO: 265998 - DNA, 547 bp, Homo sapiens
tgatacacccactgctaaccacccccctcccaatacatacacaaacttgctatttcaccagtcttctacctctaaccaaatgctaattcaatttgtttagtagttcagccaaaaactttggggttatccttgattcttctctctctttaacaacccacacacaattgaacaaaatctatcagctccctgtttgaaaaatacccagaatcataatttccacctgctatctctctgatccaaaccactactgtagcctggaatgttgcaatactgtcctaagtggtctctgccactacccctgtaaccctagttggacctccatgtagcagccagagggattcttgtaaaatgtaactcagagtgtattacaggaacgtccccattcagagcccttcaayggaatctcttctcatttagaggcaaagccatggtctgcaagggcttgcactctctgcatcctcactctctctgcccaccactctgacttcacctcttaccgctctccctctcggtgcttctgctgcagccatactggcctccttgctgt

SEQ ID NO: 265999 - DNA, 561 bp, Homo sapiens
acctaggccctaggtataaatctgataaaagatgcttaagacctgtatgcaggagatcaaaaactcttcttaagggacactaaaggagacaattccatggagagayagcccatgttcacccacccagctgtctatcactccttgtaatatcacctgagactatatatgctcaacctcctgttaacatggctactgctcccagtaggcagcatttttatccctcctaagagtcccagataggaaacaccaatgagtttaatttgaatgcaacatcaaattaatagtaatagcttccagaaatgctgttagaagggaatctagaacagagccttggcacagggataaccaatgtcttatcagcccacagtgtttgctataggtgtgagagaggtagaggaaacaggcatgccaggcatttttcattcctggaaagcattttccaattcaaagtcacaatatataaatgagccacagtgtctagctgccctgcaatagaactttcagtgcggtaccatgacttatcattggaatatgaagagctagtggtacctatgtaacagg

SEQ ID NO: 266000 - DNA, 561 bp, Homo sapiens
acctaggccctaggtataaatctgataaaagatgcttaagacctgtatgcaggagatcaaaaactcttcttaagggacactaaaggagacaattccatggagagacagcccatgttcacccacycagctgtctatcactccttgtaatatcacctgagactatatatgctcaacctcctgttaacatggctactgctcccagtaggcagcatttttatccctcctaagagtcccagataggaaacaccaatgagtttaatttgaatgcaacatcaaattaatagtaatagcttccagaaatgctgttagaagggaatctagaacagagccttggcacagggataaccaatgtcttatcagcccacagtgtttgctataggtgtgagagaggtagaggaaacaggcatgccaggcatttttcattcctggaaagcattttccaattcaaagtcacaatatataaatgagccacagtgtctagctgccctgcaatagaactttcagtgcggtaccatgacttatcattggaatatgaagagctagtggtacctatgtaacagg

SEQ ID NO: 266001 - DNA, 561 bp, Homo sapiens
acctaggccctaggtataaatctgataaaagatgcttaagacctgtatgcaggagatcaaaaactcttcttaagggacactaaaggagacaattccatggagagacagcccatgttcacccacccagctgtctatcactccttgtaatatcacctgagactatatatgctcaacctcctgttaacatggctactgctcccagtaggcagcatttttatccctcctaagagtcccagataggaaacaccaatgagtttaatttgaatgcracatcaaattaatagtaatagcttccagaaatgctgttagaagggaatctagaacagagccttggcacagggataaccaatgtcttatcagcccacagtgtttgctataggtgtgagagaggtagaggaaacaggcatgccaggcatttttcattcctggaaagcattttccaattcaaagtcacaatatataaatgagccacagtgtctagctgccctgcaatagaactttcagtgcggtaccatgacttatcattggaatatgaagagctagtggtacctatgtaacagg

SEQ ID NO: 266002 - DNA, 599 bp, Homo sapiens
aaaagatgcttaagacctgtatgcaggagatcaaaaactcttcttaagggacactaaaggagacaattccatggagagacagcccatgttcacccacccagctgtctatcactccttgtaatatcacctgagactatatatgctcaacctcctgttaacatggctactgctcccagtaggcagcatttttatccctcctaagagtcccagataggaaacaccaatgagtttaatttgaatgcaacatcaaattaatagtaatagcttccagaaatgctgttagaagggaatctagaacagagccttggcacagggataaccaatgtcttatyagcccacagtgtttgctataggtgtgagagaggtagaggaaacaggcatgccaggcatttttcattcctggaaagcattttccaattcaaagtcacaatatataaatgagccacagtgtctagctgccctgcaatagaactttcagtgcggtaccatgacttatcattggaatatgaagagctagtggtacctatgtaacagggatagaaggggtgcgttagttagtaggtactaagtaatcctacagaatagcaaaactccctact

SEQ ID NO: 266003 - DNA, 599 bp, Homo sapiens
aaaagatgcttaagacctgtatgcaggagatcaaaaactcttcttaagggacactaaaggagacaattccatggagagacagcccatgttcacccacccagctgtctatcactccttgtaatatcacctgagactatatatgctcaacctcctgttaacatggctactgctcccagtaggcagcatttttatccctcctaagagtcccagataggaaacaccaatgagtttaatttgaatgcaacatcaaattaatagtaatagcttccagaaatgctgttagaagggaatctagaacagagccttggcacagggataaccaatgtcttatcagcccacagtgtttgctataggtgtgagagaggtagaggaaacaggcatgccaggcatttttcattcctggaaagcattttccaattcaaagtcacaatatataaatsagccacagtgtctagctgccctgcaatagaactttcagtgcggtaccatgacttatcattggaatatgaagagctagtggtacctatgtaacagggatagaaggggtgcgttagttagtaggtactaagtaatcctacagaatagcaaaactccctact

SEQ ID NO: 266004 - DNA, 604 bp, Homo sapiens
atactagtgcaataagtgaaaacagctaacatcgatccactgcttaccaggttcccacactaagtctgacttcgtcagcctatcctagcttcccagccaagcgcatcttcagcattttcttgaactactcgtgttcctcacgttcctttagggaataaaattcctcatatttgtgagagattaataaacttaattaccaaacaccaagaataaaccttcayattttaaaaattaactcataagacacgttaagaattaagattacataaatttcccattaatgtttgttttccatttccttaatgattttgttttctgctagggtttactaacctacaagcaatagtaggcagtaaaagtttaagaaagttttatttgaaaaaaaattaattggtgaaattccacaactaatgacaaaaacttttttggcttagaaaaatggccttattatttactttttcttcagaatctcatttcacctcacagatcactgatgttatatagatacaagagtttggaattatttatgttaataatttgttgagtttatgaaattcattctttctgctttgcatgtttcccgctttaatttgaaatgattagc

SEQ ID NO: 266005 - DNA, 604 bp, Homo sapiens
atactagtgcaataagtgaaaacagctaacatcgatccactgcttaccaggttcccacactaagtctgacttcgtcagcctatcctagcttcccagccaagcgcatcttcagcattttcttgaactactcgtgttcctcacgttcctttagggaataaaattcctcatatttgtgagagattaataaacttaattaccaaacaccaagaataaaccttcacattttaaaaattaactcataagacacgttaagaattaagattacataaatttcccattaatgtttgttttccatttccttaatgattttgttttctgctagggyttactaacctacaagcaatagtaggcagtaaaagtttaagaaagttttatttgaaaaaaaattaattggtgaaattccacaactaatgacaaaaacttttttggcttagaaaaatggccttattatttactttttcttcagaatctcatttcacctcacagatcactgatgttatatagatacaagagtttggaattatttatgttaataatttgttgagtttatgaaattcattctttctgctttgcatgtttcccgctttaatttgaaatgattagc

SEQ ID NO: 266006 - DNA, 516 bp, Homo sapiens
tttgtaaccctggcagttagttgcaatactaccaatttggccatcaagaacattctgatatgtttaagctacagtgggaaagccaagatatgaaaacatcacccatgggaattttgagactagagtagttagaagctaatttaagatctccatccaactctaagatagggtaactgccagaagagccgcatgatcccaaagtggaattttgccctagtataatgggttaatatttgattggctgcacttarctataaatcctgaggagaagaagaagaagaaagacatcagaaaataattgggctagaagaaccttagtttgaaagcaaaacacagaatccaggtaagtgggcttaccaggaaaagctggtgccacgttgctccgcacaatgcagggccttaggatggcaatggttaggttcctgctctcctgctgcaccaccatttctcccaaggccttgctataggtctaagtattgggacaatctccaatccgcttgggagtgatctcgtcaa

SEQ ID NO: 266007 - DNA, 516 bp, Homo sapiens
tttgtaaccctggcagttagttgcaatactaccaatttggccatcaagaacattctgatatgtttaagctacagtgggaaagccaagatatgaaaacatcacccatgggaattttgagactagagtagttagaagctaatttaagatctccatccaactctaagatagggtaactgccagaagagccgcatgatcccaaagtggaattttgccctagtataatgggttaatatttgattggctgcacttaactataaatcctgaggagaagaagaagaagaaagacatcagaaaataattgggctagaagaaccttagtttgaaagcaaaacacagaatccaggtaagtgggcttaccaggaaaagctggtgccacgttgctccrcacaatgcagggccttaggatggcaatggttaggttcctgctctcctgctgcaccaccatttctcccaaggccttgctataggtctaagtattgggacaatctccaatccgcttgggagtgatctcgtcaa

SEQ ID NO: 266008 - DNA, 516 bp, Homo sapiens
tttgtaaccctggcagttagttgcaatactaccaatttggccatcaagaacattctgatatgtttaagctacagtgggaaagccaagatatgaaaacatcacccatgggaattttgagactagagtagttagaagctaatttaagatctccatccaactctaagatagggtaactgccagaagagccgcatgatcccaaagtggaattttgccctagtataatgggttaatatttgattggctgcacttaactataaatcctgaggagaagaagaagaagaaagacatcagaaaataattgggctagaagaaccttagtttgaaagcaaaacacagaatccaggtaagtgggcttaccaggaaaagctggtgccacgttgctccgcacaatgsagggccttaggatggcaatggttaggttcctgctctcctgctgcaccaccatttctcccaaggccttgctataggtctaagtattgggacaatctccaatccgcttgggagtgatctcgtcaa

SEQ ID NO: 266009 - DNA, 597 bp, Homo sapiens
aaaatgtgagacacagtcaaacaaaacttccaccttttagccttggttctggaattcagaacagtcacatgataccaagtttgagcgcgtacctgtccaaagcatgcatgagctcttttgtcttcactgctaagcccaatcttacagtcaaatcctatgccctcccatccagacaggtaggtaggtagacggatagaatcaatagcgatgccactttattactactactagtatagggctattagtactactttagygctactattactttgtcagtactgattactactttatctgtagtagtattaatttgaggtaattacatacaacctctttacttcctttccaacaagctcgtaagtacattcattgcacatatttttgagtcccaatcattctcccagtagtgtgctggaagctgtgttcagggagtttgaggctctcctccaaggtgtttcagtggcagccctgttcagtgttgtcctatagaaacccagtgcagtgatcctgaagagtttagctttacattttaaaattttcattcaatgcaaatcaaaccaaggtgattacttttggcagactgacaatctgttttac

SEQ ID NO: 266010 - DNA, 597 bp, Homo sapiens
aaaatgtgagacacagtcaaacaaaacttccaccttttagccttggttctggaattcagaacagtcacatgataccaagtttgagcgcgtacctgtccaaagcatgcatgagctcttttgtcttcactgctaagcccaatcttacagtcaaatcctatgccctcccatccagacaggtaggtaggtagacggatagaatcaatagcgatgccactttattactactactagtatagggctattagtactactttagtgctactattactttgtcagtactgattactactttatctgtagtagtattaatttgaggtaattacatacaacctctttacttcctttccaacaagctcgtaagtacattcattgcacatatttttgagtcccaatcattctcccagtagtgtgctggaagctgtgttcagggagtttgaggctctcctccaaggtgtttcagtggcagccctgttcagtgttgtcctatagaaacccagtgcagtgatcctgaagagtttagctttacattttaaaattttcmttcaatgcaaatcaaaccaaggtgattacttttggcagactgacaatctgttttac

SEQ ID NO: 266011 - DNA, 560 bp, Homo sapiens
gaggggggcagcggtgaggggcagcagcctaagctctatggtgtcctccacgtggttctgactcaggtctgagaacccaggtccagggctgtccactggtcagaggagtccrgacaacaatggaacctgtggccaggggttgtgtattttcactggacctcccccctcgccaggggattagcactttaagccttcagagaagagcgaattaacttttgctaagcacctgtgaggtttaatttctcacgtactctccatggcaaccccaccaggcggtcattcctctcgaatgttaaagatacgtgtttagagcagatgatcatgattacacaactggtgtgcagcacagccaggtgcccagatccgaatcccacaccctcctcccaccaccatgggcctcagggacatgcttctagcacagtcatggaccctgagtgacataaaggctgtgacaggggacgcaggatcttcagatggccccacagtgcctcctctgagtatctatctcccaagcttctcgcctggcctggttgctgtgagggcctggggagaggcagaga

SEQ ID NO: 266012 - DNA, 434 bp, Homo sapiens
tctcgctctgttgaccaggctagagtgcagtggcaccatcttggctcactgcaacctccgcctcccaggttcaagcaattctgcctcagcctcccaaatagctgggactataggcgyatgccaccacacctcgctaattttttttttttttttgtattttaatagagacagggtttcaccatgttgcccaggctggtctcgaactcctgagctcaggcaatcgcctcggcctcccaaagtgacaggattacaggcatgagccaccacgcccggctgattatgataatttctatgtttcatttttgagaaactgctaagctgatttccacagtggctgcaccattttaccttcccaacaggaatgaacaagcgttcctatcttcccatatccttgccaacaattattttccattttttattccaacagtcatcct

SEQ ID NO: 266013 - DNA, 434 bp, Homo sapiens
tctcgctctgttgaccaggctagagtgcagtggcaccatcttggctcactgcaacctccgcctcccaggttcaagcaattctgcctcagcctcccaaatagctgggactataggcgtatgccaccacacctcgctaattttttttttttttttgtattttaatagagacagggtttcaccatgttgcccaggctggtctcgaactcctgagctcaggcaatcgcctcggcctcccaaagtgacaggattacaggcatgagccaccrcgcccggctgattatgataatttctatgtttcatttttgagaaactgctaagctgatttccacagtggctgcaccattttaccttcccaacaggaatgaacaagcgttcctatcttcccatatccttgccaacaattattttccattttttattccaacagtcatcct

SEQ ID NO: 266014 - DNA, 611 bp, Homo sapiens
ccagcactacccctccactgtcctacctcagaagtatgtcaactctacaaccctatgttataawttagattgcagggatctcaatttcttttccctcctgcaagatagcacactggtctatcatgacactgatgacctagtgctgactggaccataagtgagaaatagcaactactcttaacttactggtgagatatttgtgtgtcagaggctgagagagaactctaactgaaattcagggatcttctacctcagtgaaatttctgggggtccagaaaatgttgaaaatatcctttttctcttttttaaaactatctggagatatgaaatatcctttctaaggtgaagaaagaatacatgattgcatgtggcccctcttacaaactagaaaaagacacaattactagcgggcctacttggattttggaggcaacatattcctcatttgggtgtgttactacagcccatttattgagtgacctgaaaagcggctagttctgagtggggcccagaacaggagaaggcgctgcaacaggtccaagctgctgtgcaggctgctttgccacttgagccatgtgacccagcagatctagtggtgctcaaggtggcag

SEQ ID NO: 266015 - DNA, 611 bp, Homo sapiens
ccagcactacccctccactgtcctacctcagaagtatgtcaactctacaaccctatgttataaattagattgcagggatctcaatttcttttccctcctgcaagatagcacactggtctatcatgacactgatgacctagtgctgactggaccataagtgagaaatagcaactactcttaacttactggtgagatatttgtgtgtcagaggctgagagagaactctaactgaaattcagggatcttctacctcagtgaaatttctgggggtccagaaaatgttgaaaatatcctttytctcttttttaaaactatctggagatatgaaatatcctttctaaggtgaagaaagaatacatgattgcatgtggcccctcttacaaactagaaaaagacacaattactagcgggcctacttggattttggaggcaacatattcctcatttgggtgtgttactacagcccatttattgagtgacctgaaaagcggctagttctgagtggggcccagaacaggagaaggcgctgcaacaggtccaagctgctgtgcaggctgctttgccacttgagccatgtgacccagcagatctagtggtgctcaaggtggcag

SEQ ID NO: 266016 - DNA, 524 bp, Homo sapiens
agcctggccctgggaggaactgggctctcttggttggggcacagggaatccactcccctatagctcccagaattatccccatttctagacaagccccgccccccaactgacacacacgtgagaccctgctgaaagcatgcactgccacacccatattttatgtaacacactcgtcacatgtgcagcrcatatgcggccactgtcttacgcatggaccgagagctgcatttaaaactcaactcaaactattgcaagaaaagtaaggctttggtggaaactgaatgtgatggtgcctgacagacagccccagtttgcactagcccccacctgcaaaagaactgggctgggctctgggttgggaaagaggagtaaagcagaagagagccaggaggaggtggcaggaggcacacgcttcccccacgtcgcacttgggagaggagtgctctggcgcctctgggaagaaactcctcggtgctccccagggaagcctcccctgggtcgagagtgccctggggaggaggatg

SEQ ID NO: 266017 - DNA, 596 bp, Homo sapiens
aactgacacacacgtgagaccctgctgaaagcatgcactgccacacccatattttatgtaacacactcgtcacatgtgcagcgcatatgcggccactgtcttacgcatggaccgagagctgcatttaaaactcaactcaaactattgcaagaaaartaaggctttggtggaaactgaatgtgatggtgcctgacagacagccccagtttgcactagcccccacctgcaaaagaactgggctgggctctgggttgggaaagaggagtaaagcagaagagagccaggaggaggtggcaggaggcacacgcttcccccacgtcgcacttgggagaggagtgctctggcgcctctgggaagaaactcctcggtgctccccagggaagcctcccctgggtcgagagtgccctggggaggaggatgggcctccccagggtgttctctgcctgttccccgctctcccagcacattcccaagatccacacacccacctctcttctctgcaccctgaggatgcactgatagccacagcgagcctgtttctagtgggaacagagagctgaaggtggaaaagaaagagaagcataacccagccttcc

SEQ ID NO: 266018 - DNA, 596 bp, Homo sapiens
aactgacacacacgtgagaccctgctgaaagcatgcactgccacacccatattttatgtaacacactcgtcacatgtgcagcgcatatgcggccactgtcttacgcatggaccgagagctgcatttaaaactcaactcaaactattgcaagaaaagtaaggctttggtggaaactgaatgtgatggtgcctgacagacagccccagtttgcactagcccccacctgcaaaagaactgggctgggctctgggttgggaaagaggagtaaagcagaagagagccaggaggaggtggcaggaggcacacgcttcccccacgtcgcacttgggagaggagtgctctggcgcctctgggaagaaactcctcggtgctccccagggaagcctcccctgggtcgagagtgccctggggaggaggatgggcctccccagggtgttctctgcctgttccccgctctcccagcacattcccaagatccacacacccacctctcttctctgcaccctgaggatgcactgatagccacagygagcctgtttctagtgggaacagagagctgaaggtggaaaagaaagagaagcataacccagccttcc

SEQ ID NO: 266019 - DNA, 598 bp, Homo sapiens
actttcagatattagaacagtaatcattagaaactctacttacaaccatgacacagaaaacagtggtaagatttgtattgattatgaccccaggcaataatcatctatcattatcagcttaaggtagaccaaaaatgtgaaraggaggcttgagaactaaagtgaacgtgattgtttcttactgagataaaagatactgggaccaaacttgtctgtcctgggttaaaccgttttaggactgaaactcattgtgatgcatagttttgggtgagagaagaagagactgacatatgtaagaactaaaactgatatggacaggaggcaaggaagtactgggtagaagagggaagtttcccggcaaaggcccactctcaagcctggaaacctgcaggcctaaatgggaacaggcattcctgtttttgtgcccaaatgttgccttttccaagatcactttggcccaccacacccctatcctgtgcctatttaaaccccaagctccacaaacaaaggaacagaagagcagcagagcagaagaatggcagagtggcacagcagagaaggagcatatgaacattgagaggcattcagctggggacag

SEQ ID NO: 266020 - DNA, 598 bp, Homo sapiens
actttcagatattagaacagtaatcattagaaactctacttacaaccatgacacagaaaacagtggtaagatttgtattgattatgaccccaggcaataatcatctatcattatcagcttaaggtagaccaaaaatgtgaaaaggaggcttgagaactaaagtgaacgtgattgtttcttactgagataaaagatactgggaccaaacttgtctgtcctggkttaaaccgttttaggactgaaactcattgtgatgcatagttttgggtgagagaagaagagactgacatatgtaagaactaaaactgatatggacaggaggcaaggaagtactgggtagaagagggaagtttcccggcaaaggcccactctcaagcctggaaacctgcaggcctaaatgggaacaggcattcctgtttttgtgcccaaatgttgccttttccaagatcactttggcccaccacacccctatcctgtgcctatttaaaccccaagctccacaaacaaaggaacagaagagcagcagagcagaagaatggcagagtggcacagcagagaaggagcatatgaacattgagaggcattcagctggggacag

SEQ ID NO: 266021 - DNA, 594 bp, Homo sapiens
ggtagttctttacagcaattcaaaaacaaactaatacagaaagttccacaagaaggttattcttccttatttacatgaacatatttctagaccttgatgcttatccaggatttaaagatctagggacaaatacaaagaaacttttagggctaatttaaagtcctaaggaggggattaagagcctattatctgaaggtatctcttttatcctgttggtacatattccctattgcattttgcagaccagggaaacattaaatatctaaaatcctaaccctggtaggcaagaacctatttcattgtagagggtagagctgagatccatgttgtaattaactgagggttttcayagaatctcagaggcacaagttgatacttagtaaatagtccatgtagagtttgtgtatccttttactaggtaaaggatttgtaatattctctgcaatttttatttttttccccaagccattcatttgctgagagcaataatctttgtgtggcttgatttaactctgtatattctattgtcagtagcttgaggtatttgggtacattcttttagatgcacacatttgcatgaaaattgtattaacc

SEQ ID NO: 266022 - DNA, 646 bp, Homo sapiens
gtgtccccatccaactctcaccttgaattgtaataatccccatgtgtcatgggagggacttcatgggaggtaactgagtaatgggggtgggtttttcccatgctgttctcatgacagtgaataagtgtcatgagytctgatggttttataaatgggagttcccctgcacaaactctcttgcctgttgccatgtaagatgtgcctttgctgttctttcaccttccaccatgattgtgaggcctccccagccatgtggaactgtgaatccattaaacctctttttctttataaattacccagtctcaggtatgtctttattagcagtgtgagaatgaactaatacaaactactatacaagtacaagatacttgcccaacaggtaaaaaattttgtttgtttaggaatttccatatttctattatcattccaattcaacttaaaactttgtctcagagtttttccattatcacacagatgtttaacaatgaatcacaagaagaactgaatcaattaaggatgttattctaagttatgctcttgactaactgaacacatctcagtccattagagataaaaatgcaatacatatattaggcttctgaattctacagggtatagctctatatttagattaggccaaaatata

SEQ ID NO: 266023 - DNA, 646 bp, Homo sapiens
gtgtccccatccaactctcaccttgaattgtaataatccccatgtgtcatgggagggacttcatgggaggtaactgagtaatgggggtgggtttttcccatgctgttctcatgacagtgaataagtgtcatgagctctgatggttttataaatgggagttcccctgcacaaactctcttgcctgttgccatgtaagatgtgcctttgctgttctttcaccttccaccatgattgtgaggcctccccagccatgtggaactgtgaatccattaaacctctttttctttataaattacccagtctcaggtatgtctttattagcagtgtgagaatgaactaatacaaactactatacaagyacaagatacttgcccaacaggtaaaaaattttgtttgtttaggaatttccatatttctattatcattccaattcaacttaaaactttgtctcagagtttttccattatcacacagatgtttaacaatgaatcacaagaagaactgaatcaattaaggatgttattctaagttatgctcttgactaactgaacacatctcagtccattagagataaaaatgcaatacatatattaggcttctgaattctacagggtatagctctatatttagattaggccaaaatata

SEQ ID NO: 266024 - DNA, 638 bp, Homo sapiens
ggtttcacaatgttggccaggctggttttgaacttctgacctcaggtgatccacctgccttggcctcccaaagtgctgggattataggtgtgagccaccgtacctggccatgaccacttctaaaacatataaaagtgagtttatccaaaaatccagaaatgatttcttcaagttttgctaaagtcacatatctatttgttcaagttcttcccttcctgccttcctttcttccttctttactttattttcttcttttttctctctccccctttcttcaaccctcttcttctccctcccttcttcttctttccttcctttcctctcttctcttccttctttcsttccttccattttggcttccttatataggtaattaagtgaattacatagggtgttgatatgtaaaatttactctgctaatactttcatacctttaaagaaatcctttttaccataattgcaacaaattcgatgacataaaaaagtcattgcaactgctgaaagacaaaggcaggggccaaggacatggaatggaaatctagactgcttgtttgtgttcactgaataacttgaaacagttttaaaataagtgtgaagttgccttttgtggaatcaaatgataatattcaaatacatcc

SEQ ID NO: 266025 - DNA, 638 bp, Homo sapiens
ggtttcacaatgttggccaggctggttttgaacttctgacctcaggtgatccacctgccttggcctcccaaagtgctgggattataggtgtgagccaccgtacctggccatgaccacttctaaaacatataaaagtgagtttatccaaaaatccagaaatgatttcttcaagttttgctaaagtcacatatctatttgttcaagttcttcccttcctgccttcctttcttccttctttactttattttcttcttttttctctctccccctttcttcaaccctcttcttctccctcccttcttcttctttccttcctttcctctcttctcttccttctttccttccttccattttggcttccttatataggtaattaagtgaattacatagggtgttgatatgtaaaatttactctgctaatastttcatacctttaaagaaatcctttttaccataattgcaacaaattcgatgacataaaaaagtcattgcaactgctgaaagacaaaggcaggggccaaggacatggaatggaaatctagactgcttgtttgtgttcactgaataacttgaaacagttttaaaataagtgtgaagttgccttttgtggaatcaaatgataatattcaaatacatcc

SEQ ID NO: 266026 - DNA, 615 bp, Homo sapiens
aatgttttttagaaaatttgtatttttaaaaacaaagaacaaatgaacacgagtagattttattttcctccttttcagtctttcatttaagctagtttccctttgacacttgctccatcagctaataatctgtagaaataaattacaataaagaaatcaatcattaggactttgaggctaaattatagtaggtcaccaaaactgttatagaagccagttcagggtagggtgtcacaaaccattagagaaaccaaactgtktggacatccattcacttgatgagacagagaatttctgagccctcagaataagaatggaaaatgcccaagtgatgaaaactatatatcaaaatttctcagatgttgagagagctgatttttttcaatataacagtctatcaggtacagcagcacactacaaatgttaatacctaagtgatcaataatataaactcataatttaggtgttggagtgataattaaagactcactgggtaattttctagtgtgttgtgaaacttaatagctgatttgcctataccaaagtccgttctacaaaatgatataatctgccttctttgcttaatttatgtctttcttactttatttatttaaa

SEQ ID NO: 266027 - DNA, 615 bp, Homo sapiens
aatgttttttagaaaatttgtatttttaaaaacaaagaacaaatgaacacgagtagattttattttcctccttttcagtctttcatttaagctagtttccctttgacacttgctccatcagctaataatctgtagaaataaattacaataaagaaatcaatcattaggactttgaggctaaattatagtaggtcaccaaaactgttatagaagccagttcagggtagggtgtcacaaaccattagagaaaccaaactgtgtggacatccattcacttgatgagacagagaatttctgrgccctcagaataagaatggaaaatgcccaagtgatgaaaactatatatcaaaatttctcagatgttgagagagctgatttttttcaatataacagtctatcaggtacagcagcacactacaaatgttaatacctaagtgatcaataatataaactcataatttaggtgttggagtgataattaaagactcactgggtaattttctagtgtgttgtgaaacttaatagctgatttgcctataccaaagtccgttctacaaaatgatataatctgccttctttgcttaatttatgtctttcttactttatttatttaaa

SEQ ID NO: 266028 - DNA, 615 bp, Homo sapiens
aatgttttttagaaaatttgtatttttaaaaacaaagaacaaatgaacacgagtagattttattttcctccttttcagtctttcatttaagctagtttccctttgacacttgctccatcagctaataatctgtagaaataaattacaataaagaaatcaatcattaggactttgaggctaaattatagtaggtcaccaaaactgttatagaagccagttcagggtagggtgtcacaaaccattagagaaaccaaactgtgtggacatccattcacttgatgagacagagaatttctgagccctcagaataaraatggaaaatgcccaagtgatgaaaactatatatcaaaatttctcagatgttgagagagctgatttttttcaatataacagtctatcaggtacagcagcacactacaaatgttaatacctaagtgatcaataatataaactcataatttaggtgttggagtgataattaaagactcactgggtaattttctagtgtgttgtgaaacttaatagctgatttgcctataccaaagtccgttctacaaaatgatataatctgccttctttgcttaatttatgtctttcttactttatttatttaaa

SEQ ID NO: 266029 - DNA, 615 bp, Homo sapiens
aatgttttttagaaaatttgtatttttaaaaacaaagaacaaatgaacacgagtagattttattttcctccttttcagtctttcatttaagctagtttccctttgacacttgctccatcagctaataatctgtagaaataaattacaataaagaaatcaatcattaggactttgaggctaaattatagtaggtcaccaaaactgttatagaagccagttcagggtagggtgtcacaaaccattagagaaaccaaactgtgtggacatccattcacttgatgagacagagaatttctgagccctcagaataagaatggaaaatgcccaagtgatgaaaactatatatcaaaatttctcagatgttgagagagctgatttttttcaatataacagtctatcaggtacagcagcacactacaaatgytaatacctaagtgatcaataatataaactcataatttaggtgttggagtgataattaaagactcactgggtaattttctagtgtgttgtgaaacttaatagctgatttgcctataccaaagtccgttctacaaaatgatataatctgccttctttgcttaatttatgtctttcttactttatttatttaaa

SEQ ID NO: 266030 - DNA, 581 bp, Homo sapiens
tgaaaagtaccttatacaatttaataggctacaaatataagaaayatttctaatgccctacgtgattttaaattgctttctgaaatagaggacaaaattatattcagctgagctttaatattcagggaattttattgaattataattcttggaaattgcttttatattgtaactttctttaaaatgtattacccattttacattttatcagaataccaggtttcctaccacactatataatcaaaaattatttatcagaagttttttatacactgtgtgtgtacgcgtgtgtctgtgcgtgtatgtgtgtgtctgtgcatgtgtgtatgtgtgtgtgtgtctgtctttgggttggggatgttcaagttatctcattagcattttcaattgcgagaaactttacttagaagcttgttattgcgtctctaaatatatacaaatttttatgataccattattatttaaatgtcctctcttatcctccaattgaaaattactgcccttcgcatagttactttgtgcttgatagtcataattaacctgtctgtggccttgcagctatgtctgtagaagacattcat

SEQ ID NO: 266031 - DNA, 581 bp, Homo sapiens
tgaaaagtaccttatacaatttaataggctacaaatataagaaacatttctaatgccctacgtgattttaaattgctttctgaaatagaggacaaaattatattcagctgagctttaatattcagggaattttattgaattataattcttggaaattgcttttatattgtaactttctttaaaatgtattacccattttacattttatcagaataccaggtttcctaccacactatataatcaaaaattatttatcagaagtttttyatacactgtgtgtgtacgcgtgtgtctgtgcgtgtatgtgtgtgtctgtgcatgtgtgtatgtgtgtgtgtgtctgtctttgggttggggatgttcaagttatctcattagcattttcaattgcgagaaactttacttagaagcttgttattgcgtctctaaatatatacaaatttttatgataccattattatttaaatgtcctctcttatcctccaattgaaaattactgcccttcgcatagttactttgtgcttgatagtcataattaacctgtctgtggccttgcagctatgtctgtagaagacattcat

SEQ ID NO: 266032 - DNA, 581 bp, Homo sapiens
tgaaaagtaccttatacaatttaataggctacaaatataagaaacatttctaatgccctacgtgattttaaattgctttctgaaatagaggacaaaattatattcagctgagctttaatattcagggaattttattgaattataattcttggaaattgcttttatattgtaactttctttaaaatgtattacccattttacattttatcagaataccaggtttcctaccacactatataatcaaaaattatttatcagaagttttttatacactgtgtgtgtacgcgtgtgtctgtgcgtgtatgtgtgtgtctgtgcatgtgtgtatgtgtgtgtgtgtctgtctttgggttggggatgttcaagttatctcattagcattttcaattgcgagaaactttacttagaagcttgttattgcgtctctaaatatatacaartttttatgataccattattatttaaatgtcctctcttatcctccaattgaaaattactgcccttcgcatagttactttgtgcttgatagtcataattaacctgtctgtggccttgcagctatgtctgtagaagacattcat

SEQ ID NO: 266033 - DNA, 509 bp, Homo sapiens
cttcttccaatatggaagattgatttgaacaatgggatttaagtaattccatttggatcagttgaaataactgcacagcgctgaaaacaagttacacacccacacaaatgaatttgagatctgagggatctgcagttttcagtaaagaagratctagattttttaaaagaaaagcctcttttaaaaaaaaaatcacttatggaagatctcctataatgaaattccatggtcgcatgcaaaacttagcataccttaaaactaagttcttcttttcatattatataaatctttactaataaattttaagactttcttccctgggcttttttttactgcacatggcatggtataatttagagaaacaaatgcattcattaacttagataccagataaccccagtttctaccttaaactgaaaatagataaattgggaatactaataattaattagaccaatctcaatggatacttttttgtaattggacagtatgacagtggcagtctatac

SEQ ID NO: 266034 - DNA, 569 bp, Homo sapiens
attttttaaaagaaaagcctcttttaaaaaaaaaatcacttatggaagatctcctataatgaaattccatggtcgcatgcaaaacttagcataccttaaaactaagttcttcttttcatattatataaatctttactaataaattttaagactttcttccctgggcttttttttactgcacatggcatggtataatttagagaaacaaatgcrttcattaacttagataccagataaccccagtttctaccttaaactgaaaatagataaattgggaatactaataattaattagaccaatctcaatggatacttttttgtaattggacagtatgacagtggcagtctatactatctacatggaattttctaattattcactgatttttcactctgaacttaacatcttattatggtagttggaatgatcaactttcacacactttggaacattttatgaaacaatattcggaaacagattcaaaataataacataaaataccacaaattagcaataaacagatgaaaatatataactttagtatcactgatattccatagatttcaaa

SEQ ID NO: 266035 - DNA, 610 bp, Homo sapiens
gacagagttgaggaaacagtagtagttcgtgaacagagtgattggcaaccctaaggaaggagaaagatattctcacagaaaagagttatgataagctggacagaactgccaaaatatatctacagcacagaaatgtcaatgagaatcagactggtcaatcgcaaaacttacagaaaatagccatgcaaaatcctcattaagaaggaaaaatataacaacccaaaaacttcacactggatccttattactttatctattctcactacagtccagtgtaaaccttctgctcaacctcatattttgacttmgattcttgcttgctttaatatttctattttccccacattcctttgtactcatctatacacattttctgtcatttagtattaatctaaagctactatatttccctgaaggcttccaaaaattacaatctgtattgcactttgtcgattatatattgtgttatttttttcttctgtaaaagtcttgcttctcctattttcttgagagcagagattataatctatacattattttcttccctcaaatgctcaaatatagtgaacactccttataaaaatgattttcccaaattgaggcaaattag

SEQ ID NO: 266036 - DNA, 567 bp, Homo sapiens
gaacactccttataaaaatgattttcccaaattgaggcaaattagcttccagaaatatttattaaactttcttatatgtaagaatatatgataaacctcatgaaaatcaggccccagaaagtgtctaaagtgtccctcccccagattattatacctcctactttagatatctatctgtataagggaatgacaatgtaacataaagtaaaactcactaactcactttccaaagtcgatttgattaaaagctacacttggacaattaaacagaggtcataatttacaaagaggaaaatgcaaatttaaaatcctaccttgaaattatttccttcatccaaaaactcaggcatcacactttgaattaggcacgattcatttttttttctctttgtacaaagttcaaatataaagtcattcctaattttagttaataatttatgcatccacatatttcaagaattttwaaaagattaattccaggacaataaaggaaattggagatttaatgttaaaccttaccagctcagacttttaaatgaggggagaaaatatgctgatgacatttgc

SEQ ID NO: 266037 - DNA, 567 bp, Homo sapiens
gaacactccttataaaaatgattttcccaaattgaggcaaattagcttccagaaatatttattaaactttcttatatgtaagaatatatgataaacctcatgaaaatcaggccccagaaagtgtctaaagtgtccctcccccagattattatacctcctactttagatatctatctgtataagggaatgacaatgtaacataaagtaaaactcactaactcactttccaaagtcgatttgattaaaagctacacttggacaattaaacagaggtcataatttacaaagaggaaaatgcaaatttaaaatcctaccttgaaattatttccttcatccaaaaactcaggcatcacactttgaattaggcacgattcatttttttttctctttgtacaaagttcaaatataaagtcattcctaattttagttaataatttatgcatccacatatttcaagaatttttaaaagattaattccaggacaataaaggaaattggagatttaatgttaaaycttaccagctcagacttttaaatgaggggagaaaatatgctgatgacatttgc

SEQ ID NO: 266038 - DNA, 562 bp, Homo sapiens
tgggcagagtaaacatacaatacgttttgtcctacctcctcaacttcccacccattcctrctcagctcagtcaggaccacagatcagccagcccacactgccaccatcttccttggacaccaatactgcacctctatttgtacactagaacatcaataccgatacatctcttgccatcaaaatattttttcccttgggcattctttatatcattgcccctaaatgaaaattccaggtttggtttttctgtgtcctaatttcaagagaggctatagaagtatctgcattttcttattttatatggagaggtaggtaaagtttactgacaagattaattctcatccaaatacagcaaatatctctgacttggaagacatacaccacacaaagacatattccttgcaatcactttctgatcctagactatttgatttttttaaaaattcaagagcccctgtattacttgagtttgtaaggcagaaattctaactgtagttggggtgtgttctcataaggaattttagtgtggggttggccttttaatctatttacttgaaagaac

SEQ ID NO: 266039 - DNA, 377 bp, Homo sapiens
tgtcctacctcctcaacttcccacccattcctactcagctcagtcaggaccacagatcagccagcccacactgccaccatcttccttggacaccaatactgcacctctatttgtacactagaacatcaataccgatacatctcttgccatcaaaatattttttcccttgggcattctttatatcattgcccctaaatgaaaattccaggtttggtttttctgtgtcctaatttcaagagaggctatagaagtatctgcattttcttattttatatggagaggtaggtaaagtttactgacaagattaattctcatccaaatacagcaaatatctctgayttggaagacatacaccacacaaagacatattccttgca

SEQ ID NO: 266040 - DNA, 562 bp, Homo sapiens
tgggcagagtaaacatacaatacgttttgtcctacctcctcaacttcccacccattcctactcagctcagtcaggaccacagatcagccagcccacactgccaccatcttccttggacaccaatactgcacctctatttgtacactagaacatcaataccgatacatctcttgccatcaaaatattttttcccttgggcattctttatatcattgcccctaaatgaaaattccaggtttggtttttctgtgtcctaatttcaagagaggctatagaagtatctgcattttcttattttatatggagaggtaggtaaagtttactgacaagattaattctcatccaaatacagcaaatatctctgacttggaagacayacaccacacaaagacatattccttgcaatcactttctgatcctagactatttgatttttttaaaaattcaagagcccctgtattacttgagtttgtaaggcagaaattctaactgtagttggggtgtgttctcataaggaattttagtgtggggttggccttttaatctatttacttgaaagaac

SEQ ID NO: 266041 - DNA, 545 bp, Homo sapiens
aatggtattaaatcttggctaaatactctttagccaactaattagtgaatgattcatatttctaacagaatgttagatagttgatcatggcctattccctcccatgttccacacctcaggtcaactgtctaacaattgtctctgagttttatctcagctcacatgttttaggattaagagtccgagtstatagtctcatacttaaaagcaatataagaacatttggtgtgtgtaaaaactacttgaaattgtataggcttttgaattatgtagactaggattcaaatcccagctcagcctcttactagctgtatccaataattgtgttaggatgacatgaaatagcgcatgtaaagcctgtctctttctctctttgtctcatacacacaagataggatattagccagaggctcaaacctgcacagttcatctagagtttcagagttacaactgaaaaaggtttgtttaccattgtctagatatttgaaaaaacttgaaccatagtatgatttagatgagaaccactggccattcaacaataatca

SEQ ID NO: 266042 - DNA, 523 bp, Homo sapiens
cagcaaaatggaaagtttcttaggtcacttgctagtcaacaatctagttttctttacatacctaagatgccaacatacacttgctgaaaccacaagtttacaactacttatatatggtaacgtggaggacagatattttgcattctttgagagcatcatttgtcaactatattaaaataatattaagataattaagaagaccaataatattcaaagctagtggaattgaaccagtagttgtagagactccttaccctggacaggtttttaatgctcttcagggcgcactgtaaaggatttaatcaatctakcctatacatgtggatagcttttcataagaaaaaaatggggtttcataagaaaatgggtttttcataagaaaaatggagtttcataaaaaatggtttttttcacacacacacaaaaaagctataagggctggccattaattataaaactgttgcttttatctgcaaagagtcattgtgacaattagacaagataatacataggaaaaacagtt

SEQ ID NO: 266043 - DNA, 573 bp, Homo sapiens
ggaagactgttctaattaatggcaataggatggccaaaggccccaaactagagataacatgtttgtgtgattgaagaccattaagaaccatgagagcacacatagacataaacgtgagaaaaatagatactgcagactactagatggggaagggaaggagggagaygtgggtaaaaaactaccctttgggtactaaacccactacctgggtgactagatccataccccaaacctgggcattatacaatatatctacataaaaaatctgcacatgtattgaaattaagaaaaaaaaaacactcacgaagctagagctgaatgagaaagagacagaggagtagagtatgaggtcactgagttactggataggcaatgtctgtgatattttataggtcatggtggatttgcattttattaattgtataggaagccattgagaatctttgagcagataattgatttgattttaattatttttggaataactctgagttgtatgtaaagaaactaatgggcacaagaatagagggcgttgtgatagtccaggggagagataaatgccacaacccagag

SEQ ID NO: 266044 - DNA, 425 bp, Homo sapiens
gtggggaataatgcttcagatcaccactgacttctcatctgaaagtgttgaaactagaagatagtgcataaattaaatgcaatgaggaaaataagttgccraatcaaactttgaaattcagtgtaaatattatctgagaagaaaaaaatgcctttaaaacaaagaaaaatgatataactgttatcgaataaacctgccctataagatatgccaaagaaaaattttccaaaatgaaaacatgatacttagtcacaaaaggataatgagctttaaaataaataatttagtaaataagaaagctaactctaaatattcaatttctttatttagattcaaagttgatggagtactgccaatgcaataagacaagaaaaaaagaacagaaaaataattctatttgaatatgatatgactgggttgtagaa

SEQ ID NO: 266045 - DNA, 495 bp, Homo sapiens
tgatgccgcttatctcagactatcctaggtagtcaagttaaaaaaaatctttttcaaacagacacaattatattatatattattgcttttgtataattctgggaatcctgcatagtcaaccttttggttttctgtctgtgaaacattccctgaaaacagcaccaacatatttacagagctctcttcaaaacagaaaaacatttctaaacaggttatatcwaaaataataaaaagaaaaacaaaaggaatcaaacaaaaataactagacagaaaaattaataataatgatgatttgatgaatctatgtggaagagaatctaaatgcctcagaattctatgaaaagaggcaagttttaaactgaaatgtgattcaagaggttgagacacccattttgactatgaaacagagtaactaacaattttctgcttctcttcctccatggccattctctgtccacagttgaagggttgttaaagacttctttcagcatcact

SEQ ID NO: 266046 - DNA, 425 bp, Homo sapiens
gtggggaataatgcttcagatcaccactgacttctcatctgaaagtgttgaaactagaagatagtgcataaattaaatgcaatgaggaaaataagttgccgaatcaaactttgaaattcagtgtaaatrttatctgagaagaaaaaaatgcctttaaaacaaagaaaaatgatataactgttatcgaataaacctgccctataagatatgccaaagaaaaattttccaaaatgaaaacatgatacttagtcacaaaaggataatgagctttaaaataaataatttagtaaataagaaagctaactctaaatattcaatttctttatttagattcaaagttgatggagtactgccaatgcaataagacaagaaaaaaagaacagaaaaataattctatttgaatatgatatgactgggttgtagaa

SEQ ID NO: 266047 - DNA, 618 bp, Homo sapiens
caaatatgtctgtatactcatacactgacatacacartgtatgtttccaacacaatgaattaaagcaaattttaaatttacagaaaagattagagttaggttagttataaccagtggtgctcacattttcttgtgtcctttttaataaatctcataacttctattttttctttcgttcttaaataatgatacactttctaggttctctcttactttgctcacagtgttattatcaggggtcaaataataaaacatatttctcaattcttcagagactgaaatatgttctatacatattattatgaactccatatgaaagattctccatactaattgcaaatggcattctaaatgcaacttgattgaaatttctttctccccccaggcaattttatgctattactttgcaaaacatacatgctcctggtttgcttccagttgacaatagcgtgttcctagtttgcaattccactttggacttgcttcttccttgaagattaaactgcttttgatttagccatcagcttctaaggaatacattaatagtttggtatttccagtagtcttttacacaagctggttgcttaatatcagctgttcttttttgtatatgcagta

SEQ ID NO: 266048 - DNA, 618 bp, Homo sapiens
caaatatgtctgtatactcatacactgacatacacagtgtatgtttccaacacaatgaattaaagcaaattttaaatttacagaaaagattagagttaggttagttataaccagtggtgctcacattttcttgtgtcctttttaataaatctcataacttctattttttctttcrttcttaaataatgatacactttctaggttctctcttactttgctcacagtgttattatcaggggtcaaataataaaacatatttctcaattcttcagagactgaaatatgttctatacatattattatgaactccatatgaaagattctccatactaattgcaaatggcattctaaatgcaacttgattgaaatttctttctccccccaggcaattttatgctattactttgcaaaacatacatgctcctggtttgcttccagttgacaatagcgtgttcctagtttgcaattccactttggacttgcttcttccttgaagattaaactgcttttgatttagccatcagcttctaaggaatacattaatagtttggtatttccagtagtcttttacacaagctggttgcttaatatcagctgttcttttttgtatatgcagta

SEQ ID NO: 266049 - DNA, 496 bp, Homo sapiens
aatgagttcaatacattttaagaactcttgaacattttagaaaagcatgtgtttacaagaaacataccataactgcaagttgtcacaggtagcaactgaggttggtgtcatgggtggtaaatgtatttaccaagatagtcattagtaaagaaaggtgaatttattagagatggtatgaaaatatgttgcaaakatcaatggacagaacagcagagacaggcctgtctacaaagaggcaggggctggagcgaaattttatagtctcatgctggagggaactacatgaagaacaaggtcttgctgctggagccaccatggaatgaggtcattgtgcccccaggttgtttgtgattagctgtctctcagaacaattgttcatttttctccccacttgggatcttcctcatcctggagccccttcctcattgttgctttctcgtaaggactctgcagtaccctaatatagaacaatggcaaatctttggtattggggcac

SEQ ID NO: 266050 - DNA, 474 bp, Homo sapiens
ttgaactgaaatacaagataagtgtaaaacacataccaaatttcaaagatttagcatgatcaaaatggaatgaaattagaagtcaatttgatgaaatgtcccaaactaataactatctaccttgaaaaagtagaaaactttttaaaagtataaatttaacccaagccatgtggaaggaagaaaatgataatggttgagcataaaaacaatttaaataggaaatataaaataatagaaaaccatgtttgctatttgaaagattaacaaaacttataaaatctctagtaagaataaccagaaaagagaaaaaagtctcaaattactaaaattagaaattaaataacatatattactattgacatagamataaagatgattataagtactataaagaattgtcaacaaattagatttaaaataaaattgagacatttctaaaaagctacaatttactaaaactgactcaagaaatat

SEQ ID NO: 266051 - DNA, 613 bp, Homo sapiens
gaaataacaggaagctgactggagtcaatgaatattcttccaaaagaagtactacaggtttagtcattgttcacttacatttttattcaaggttatgttgtaacgatgactggatttttctgtcattctggtgtattcatttctcccacctcccaaatatctgactgttgccctttctcagggaatgtcaggttacatataacattcatcaaaattattttttcctgaaattgtttatttattgtctgcttcctccgttatttgtacgttccatatggttggtgcctatcaggtttactccagaaccggcagtgtctagtgcatggtagatactcaagacaaatttggacaatatactgtgagccatagtaatgtgtgtaactgagggaccactgaattttcatagagacttcaggttgtgtttgtacatttcttcacaccttgaatttgttagaagtcttattgatttcatatcactttaacattaaatgttrtatagaatcacatttcacaattcatgtgctgtagtggaaaagtggaggccaaaaatactgtattgaaatacagacaaaataaaatggtcatgtttgataaagtaaaaagaactgaattc

SEQ ID NO: 266052 - DNA, 400 bp, Homo sapiens
cacgcaagtgactaagtaaggccttcattacaaatacctgttattgtggcttgttcaaaggttgaagatgatttaaacttcctccatttagctcttttctcttaatcccacacactttaaaaaaatttacagacagatcaaactttttttgattctagacacaatttgtgacccatgtagctaaaattttgactatagctaatgaaaacacattctatggtaggtgaccagctaccagctgtaagctttgcttttgstttacgtgataatgctgtctatataaagaaacacttgggaattcacttttagctggagtaggacattgcactgagctgtaaatatattattgggggaacattaactgtccatgtttgaatatcaggatgtctgtttactttct

SEQ ID NO: 266053 - DNA, 572 bp, Homo sapiens
tgtggtatgctgggtgctgtgaccaagttatgcccaggaggatatggaaacttaaagaaaaggcttcacagcagagaaaaggaagacttccctggtagggtgtgtgggtgtgtgttggcggggagagttgtagagaggcaatcagacagctctttgaggtgaatgttaaagagagaaaagcctggtgaggaggtgaggrtgagcaaaagaaagagcattctatatagaaggaaatggcttatatgaaggtccaaatttgcacaacagcctcaagcttttaagtggtggttcccatgtccctaaactcttgcttattgactcacttgttcactcactcactcattggttgtgcaacacatttattcatgagttcatttaaactttattaagtcccagccatacgaacactcagtactggggatataagatcacacgagacatgattcttgtaacgggttagggaagagggtgcctggaaaacagacacttaaacctacaaataagaaaaaacatgttatgtgctataataagaatacacaatgtaatgtgaggagacttgggaaggaaagagt

SEQ ID NO: 266054 - DNA, 472 bp, Homo sapiens
ttccttgctcaaaacatcttcagtgactaacaaataagactcggtgttcagagtcctctcgcttcctggctcaaggcttctttctagcctccttcctcactgctggccagtaaccattctctgcatcctcaaaaggagtagtttcctgccctgtaaacacatccagagagtttctccctttgcgtcttcgctgatattgatcctgcctgcctcttcctctcttgtgattccycttctcacaaatgaagggctcctcccagataaacctactcattcttcacaacatcccaaattttacattcccctggagccttcctaggtattttctatattatctcccgtcctcattccttcctggatataatctgtctttccttacgcattcttcattactggccttgtgatgtttactttatcagccttgtgttctgcacagtgaaattgtcttctctgagtccttactaaactatga

SEQ ID NO: 266055 - DNA, 472 bp, Homo sapiens
ttccttgctcaaaacatcttcagtgactaacaaataagactcggtgttcagagtcctctcgcttcctggctcaaggcttctttctagcctccttcctcactgctggccagtaaccattctctgcatcctcaaaaggagtagtttcctgccctgtaaacacatccagagagtttctccctttgcgtcttcgctgatattgatcctgcctgcctcttcctctcttgtgattcctcttctcacaaatgaagggctcctcccagataaacctactcattcttcacaacatcccaaattttacattcccctggagccttcctaggtattttctrtattatctcccgtcctcattccttcctggatataatctgtctttccttacgcattcttcattactggccttgtgatgtttactttatcagccttgtgttctgcacagtgaaattgtcttctctgagtccttactaaactatga

SEQ ID NO: 266056 - DNA, 585 bp, Homo sapiens
acctagtagagttgaccaaatttggtggtttgcatttctaaaccatgaaagaggagagactggtgaaaagtgagcatgcaaattcaaatatcaagagggaaatctggactggagagggtgacttgcatcccaggagcagatgaaatccttcagggtgaacgtgttgagttagatgaggaaagagctactctccaacctggtgaacaatagatatggtttttttctrtattcggtggtacttcagattcatttatttaaaaaaattgatgtctccacttactttttcagtggtatagcatttaagtactagtagccttggctacaataggggtaagtggatgttttctaactgcatgtcactttgaagagaacctaatgtgagcaccgttctcccttgtccttgtcatgttccatagacagatatgtgacttcaaccagatgataatgcatcagaatacagcaaggaaccagttttgcaatgcttagaaatatgttttcttacatgtggaagataattctctacaattcaaatgcttgatttgatgaggaaagacgagaagcaatgtgaactaaactgttaggctg

SEQ ID NO: 266057 - DNA, 585 bp, Homo sapiens
acctagtagagttgaccaaatttggtggtttgcatttctaaaccatgaaagaggagagactggtgaaaagtgagcatgcaaattcaaatatcaagagggaaatctggactggagagggtgacttgcatcccaggagcagatgaaatccttcagggtgaacgtgttgagttagatgaggaaagagctactctccaacctggtgaacaatagatatggtttttttctgtattcggtggtacttcagattcatttatttaaaaaaattgatgtctccacttactttttcagtggtatagcatttaagtactagtagccttggctacaataggggtaagtggatgttttctaactgcatgtcactttgaagagaacctaatgtgagcaccgttctcccttgtccttgtcatgttccatagacagatatgtgacttcaaccagatgataatgcatcagaatacagcaaggaaccagttttrcaatgcttagaaatatgttttcttacatgtggaagataattctctacaattcaaatgcttgatttgatgaggaaagacgagaagcaatgtgaactaaactgttaggctg

SEQ ID NO: 266058 - DNA, 585 bp, Homo sapiens
acctagtagagttgaccaaatttggtggtttgcatttctaaaccatgaaagaggagagactggtgaaaagtgagcatgcaaattcaaatatcaagagggaaatctggactggagagggtgacttgcatcccaggagcagatgaaatccttcagggtgaacgtgttgagttagatgaggaaagagctactctccaacctggtgaacaatagatatggtttttttctgtattcggtggtacttcagattcatttatttaaaaaaattgatgtctccacttactttttcagtggtatagcatttaagtactagtagccttggctacaataggggtaagtggatgttttctaactgcatgtcactttgaagagaacctaatgtgagcaccgttctcccttgtccttgtcatgttccatagacagatatgtgacttcaaccagatgataatgcatcagaatacagcaaggaaccagttttgmaatgcttagaaatatgttttcttacatgtggaagataattctctacaattcaaatgcttgatttgatgaggaaagacgagaagcaatgtgaactaaactgttaggctg

SEQ ID NO: 266059 - DNA, 593 bp, Homo sapiens
gatgattttccttgttctgaaatctgatttatttgaaattaacaaatctactccaactttctcttgcttagtattattatggtagacatttctctatcactttacttttaacctatttgtgcttttatattttaaatgggttttttttgtaaacaatatatagttaggtctcctttatctattctgacagtctctgtcttttaatttacatattcaaaccattcacattttaatatgattatggatatagttggtttaataactaccatgtttgtaactgttttctattaattgtattttttattttttccctctttttctgccttctctagttgtagaacattttatgtcattttatatttcttctctcagtacaacagttaccacaatttaaaaaaattttaatagytgctctagaatttgcaatgtataactttatgttcacctttaaataagactatgccactttacattcaattcaagtaccttataacatagtatttccagttcattcctgccatcctttgtagtattggtgttattcatttcattcatccatatgctataactgcttgatatattgttaatataat

SEQ ID NO: 266060 - DNA, 593 bp, Homo sapiens
gatgattttccttgttctgaaatctgatttatttgaaattaacaaatctactccaactttctcttgcttagtattattatggtagacatttctctatcactttacttttaacctatttgtgcttttatattttaaatgggttttttttgtaaacaatatatagttaggtctcctttatctattctgacagtctctgtcttttaatttacatattcaaaccattcacattttaatatgattatggatatagttggtttaataactaccatgtttgtaactgttttctattaattgtattttttattttttccctctttttctgccttctctagttgtagaacattttatgtcattttatatttcttctctcagtacaacagttaccacaatttaaaaaaattttaatagttgctctagaatttgcaatgtataactttatgttcacctttaaataagactatgccactttacattcaattcaagtaccttataacatagtatttccagttcattcctgccatcctttrtagtattggtgttattcatttcattcatccatatgctataactgcttgatatattgttaatataat

SEQ ID NO: 266061 - DNA, 593 bp, Homo sapiens
gatgattttccttgttctgaaatctgatttatttgaaattaacaaatctactccaactttctcttgcttagtattattatggtagacatttctctatcactttacttttaacctatttgtgcttttatattttaaatgggttttttttgtaaacaatatatagttaggtctcctttatctattctgacagtctctgtcttttaatttacatattcaaaccattcacattttaatatgattatggatatagttggtttaataactaccatgtttgtaactgttttctattaattgtattttttattttttccctctttttctgccttctctagttgtagaacattttatgtcattttatatttcttctctcagtacaacagttaccacaatttaaaaaaattttaatagttgctctagaatttgcaatgtataactttatgttcacctttaaataagactatgccactttacattcaattcaagtaccttataacatagtatttccagttcattcctgccatcctttgtagtattggtgttattcatttcattcatycatatgctataactgcttgatatattgttaatataat

SEQ ID NO: 266062 - DNA, 584 bp, Homo sapiens
tattttgttttctgttcctgtgttagttcacttaggataatgacccccagctccatccatgttgccacaaaggacatgtcattctttttgtgactgcatagtattccatagtgtatacataccacattttctttatccagtctacrttaatgagcatttaggttgattctatgtctttgctactatgaatagtgtgctacaatgaacatatgcatgcatgcatctttatggtagaatgatttatattcctttgggtatatacacaataatgggattgctgagtcaaatggtaattctgctttgaattatttgagaaattgcaaaactgctttccatagtggctgaactaatttgcattttcactagcagtttgtaagcactcccctttctctgcaaccttaccagcatctgttgttttgactttttaataatagccattctgactggtatgagatgatatctcattgtggttttgatttgcatgtctctaacaattagtgatgttgaacattttttcatatgatttttggccatgtgtacatctcttttgagaagtgtctgttcatgccctttgtccatttttt

SEQ ID NO: 266063 - DNA, 599 bp, Homo sapiens
gcagtatgatcattttcacaatattgattctacccatccatgagcatgagatgtgtttccaattgtttgtgttgcctgtgatttctttcagcagtgttgtgttttccttgtagaggtctttcaactccttaagtatattcctaagtattttattaattttttaattttttgcagctattgtaaaaatggttgagttcttgattttattctcagcttggtcacagttggtgcatagcmgggctactgatttgtgtacattaattttgtaacctgaaacttttgctgaattaatttaccagttctaagagctttttggatgagtctttagggttttctagatatacactcgtgtcattagcaaaagcaatagtttgacttcctctttaccaatttggatgccctttgtttctttctcttgtctgatcgttctggctaggacttccagtactatgttgaatagaagtggtaagagtgggcatccttgtcttgttctgtttctcagagggaatgcttccaactttttcccattcagtataatgttggccgtgggtttgtcatagatggcttttattaccttaaggtatgtcccttctatgctg

SEQ ID NO: 266064 - DNA, 400 bp, Homo sapiens
tggtgtatcacagttattgacttgcatatgttaaactctcactggtgtgaaacccactcgatcatggtggattatcttttttatatgctgttgtatttggttagctagtgttttgttgatgattttttgcatctatgttcatcagggatattggtctgtagttttctctctctctttttttttttaagttatgtccttttctgggtttgttattagggtgattctggcttcatagaatgatttatggaggatttcctctttctctatctttcggaatagcgtcaatggkattggtaccaatttttctttgaacgtctgacagaattcagctgtaaatctgtctggccctggactatttttccttggttactttttaattaccatttcaatcttgctgctt

SEQ ID NO: 266065 - DNA, 520 bp, Homo sapiens
aatatgatacacctgggttttaattttttggtattaatatttatcctctttggctttccgtgagcttcctggatctgtggtttggtatctgtgattaatttttgaaaactctcatccattgttatttcaagtatttcttttcctatatttgctctcttctatttctagaattcaaattaaatatatcctcttctatttctagaattcaaattaaatacatcctcttctatttctagaattccaattaaatatatcctcttctatttctagaattccaattaaatrtatacttttttttgtaattgtctcacaattcttgaacattctgttctttttattatcattattttattttgtctttgcatttcagtttgtgacattgctactgatgtatcttcaagctcactaattcttgtctcagctgtgtccagtctcctggtgagcctataaaaagcattctttagttctattacagtaagtcctcacttaacatcattgataggttcttgaacactgcaac

SEQ ID NO: 266066 - DNA, 591 bp, Homo sapiens
aggtatagtagaggaaacggttctacaatctcatgtttaaatctgttttttttttagtgtgcctgagtctctaagcttcagaagtgtttctttgcctttatttttattttttgttcatctaggtgaaacaggaatgctacagaggtctagagttggctcagtgctttcaccccaggtagatacaactttggtaaagttgtttctctatcctgggccacaaacatattctcctacttttttcagtttaactttagtttcacctttcacaataaartctttaacttaactttgtatgtaaaattaatatttacacacaattccaagccccctacatgatccaatcacctcctaccagggccccatctccaccattgggaattacatttcaacatgagatttgggtggggacatagcaccaaaccctatcagacattaaccttggtcatgcagctgaggtaatgtttgtcaggtttcttcactatataatcattctcatcatgtattgagctaggtttatatttcttatgtagtgaagcaggtttctcagtgctatctaccaattagttagatgtgtatttgtaatggaaaaaa

SEQ ID NO: 266067 - DNA, 599 bp, Homo sapiens
tttattaatttgtacctctgttgatgtaccgataaggtatagtagaggaaacggttctacaatctcatgtttaaatctgttttttttttagtgtgcctgagtctctaagcttcagaagtgtttctttgcctttatttttattttttgttcatctaggtgaaacaggaatgctacagaggtctagagttggctcagtgctttcaccccaggtagatacaactttggtaaagttgtttctctatcctgggccacaaacatattctcctacttttttcagtttaactttagtttcacctttcacaataaagtctttaacttaactttgtatgtaaaattaatatttacrcacaattccaagccccctacatgatccaatcacctcctaccagggccccatctccaccattgggaattacatttcaacatgagatttgggtggggacatagcaccaaaccctatcagacattaaccttggtcatgcagctgaggtaatgtttgtcaggtttcttcactatataatcattctcatcatgtattgagctaggtttatatttcttatgtagtgaagcaggtttctcagtgctatctaccaattagt

SEQ ID NO: 266068 - DNA, 599 bp, Homo sapiens
tttattaatttgtacctctgttgatgtaccgataaggtatagtagaggaaacggttctacaatctcatgtttaaatctgttttttttttagtgtgcctgagtctctaagcttcagaagtgtttctttgcctttatttttattttttgttcatctaggtgaaacaggaatgctacagaggtctagagttggctcagtgctttcaccccaggtagatacaactttggtaaagttgtttctctatcctgggccacaaacatattctcctacttttttcagtttaactttagtttcacctttcacaataaagtctttaacttaactttgtatgtaaaattaatatttacayacaattccaagccccctacatgatccaatcacctcctaccagggccccatctccaccattgggaattacatttcaacatgagatttgggtggggacatagcaccaaaccctatcagacattaaccttggtcatgcagctgaggtaatgtttgtcaggtttcttcactatataatcattctcatcatgtattgagctaggtttatatttcttatgtagtgaagcaggtttctcagtgctatctaccaattagt

SEQ ID NO: 266069 - DNA, 592 bp, Homo sapiens
tgatcttaacagttttgaggactactagtcaggtattttgtagaaattggtattggaatttgtctggtgtttttctcatgattaaactgacataatacatttttggaggaagaccacagatgtacataatcattctcatcatatcatatcaagagtacatatgatcaatgagacttatcactttcatgttgtattactctgttcttayactgctataacgaaatacctaaaactgggtaacttacatagaaaagaggttttaataggctcacagttctgtggactgtacaagcttctgcttctggggagaccttgggaaagttacaatcatggtggaaggcaaaggggaagcaagtacatattcacatggctggcaggagagggagaatgaaaaaggaggtgctacacacttttcaaacaaccaggtctcctgagaactctattataagacagcattagggggatggtgttaaaccattagaaaccacccaaatgttccaattacctcccaccaggcctcacctccaacattgggaattacagtacaacatgagatttgcgtggggacacagagccaaactatatcagatat

SEQ ID NO: 266070 - DNA, 592 bp, Homo sapiens
tgatcttaacagttttgaggactactagtcaggtattttgtagaaattggtattggaatttgtctggtgtttttctcatgattaaactgacataatacatttttggaggaagaccacagatgtacataatcattctcatcatatcatatcaagagtacatatgatcaatgagacttatcactttcatgttgtattactctgttcttatactgctataacgaaatacctaaaactgggtaacttacatagaaaagaggttttaataggctcacagttctgtggactgtacaagcttctgcttctggggagaccttgggaaagttrcaatcatggtggaaggcaaaggggaagcaagtacatattcacatggctggcaggagagggagaatgaaaaaggaggtgctacacacttttcaaacaaccaggtctcctgagaactctattataagacagcattagggggatggtgttaaaccattagaaaccacccaaatgttccaattacctcccaccaggcctcacctccaacattgggaattacagtacaacatgagatttgcgtggggacacagagccaaactatatcagatat

SEQ ID NO: 266071 - DNA, 549 bp, Homo sapiens
tccatgtatattagctcatttaaccaacaaaaccaacccaatgagataggtgcaagtataatataatctccattttacactgaggacactgaaactgagagaagccccaaatcatacaaataataagagatagaccattgtacttgggagggtcctctctaacacccactttggagatggacaaatacgaaaatgaacagtgaagaacttcccaaagatcaagactaggggcctcctagaacagtgagttatagagatcatcccatagagcagaatcayggactaactaaggaagttatcttatttatctaagagcacaagagatagaaactcttcaccacaatgctctatcacttcttgaggccaaagataatttctatgttacttggaaactagaacaacagcagagataataatataatcctagaatattgggaaggtccctggcaatcttggtgaggaaagcacatgcagtattggagacatgagctagtgtgcaagggactggggtgttcacaggtggacatccacaagctgcatgcattggtg

SEQ ID NO: 266072 - DNA, 549 bp, Homo sapiens
tccatgtatattagctcatttaaccaacaaaaccaacccaatgagataggtgcaagtataatataatctccattttacactgaggacactgaaactgagagaagccccaaatcatacaaataataagagatagaccattgtacttgggagggtcctctctaacacccactttggagatggacaaatacgaaaatgaacagtgaagaacttcccaaagatcaagactaggggcctcctagaacagtgagttatagagatcatcccatagagcagaatcatggactaactaaggaagttatcttatttatctaagagcacaagagatagaaactcttcaccacaatgctctatcacttcttgaggccaaagataatttctatgttacttggaaactagaacaacagcagagataataatataatcctagaatattgggaaggtccctggcaaycttggtgaggaaagcacatgcagtattggagacatgagctagtgtgcaagggactggggtgttcacaggtggacatccacaagctgcatgcattggtg

SEQ ID NO: 266073 - DNA, 588 bp, Homo sapiens
tacagaaaatgccaatattctttacttgaaaatgggacaaggaaagcaacagagtttgagggcctaaatcccacttatgccagccctgagtacttcctatatgcttgtggtcaagcccagcctcatctctcccagcttctcttcacacactggaagcctcacccaatccaaaccctgccaccctaccctttctcacttctgtgagcagctaggtggccgagtggtgagcgtgtcctaaatattcatccagagccgagtttgaattctggctctgcaatttattgtcactagtataacctcrggcacgtctataataatacctacctatgaggattgtcatgaggtttcaatgaaatcatgtatatgatgtgtttaacatagtgcctggcccataatacgcacttaaagtaaaaaaaaaaaaaaacttttgatgtgtgaaattccagtattttcagcttcaaacaacatctcctagatagctgctcacacccataagtgggagacagattctctgcagaccatgtattctgatttagggtgttgaaaagagagtcaatacatagcaattggagtccacaggaaagagga

SEQ ID NO: 266074 - DNA, 470 bp, Homo sapiens
ggacagccatcagagttgggctgcttttattttttttgcaagtgctttctaaaatttacctttttaaaaaatttttagataattgaagattcacaygcaattgtaggaaataatacagagagctctctggtaactttgactcagtttccctgatggtaatatcttgcaaaattacagtcaatgttacaaccagaatattaacatcgatacagcccactgatcttattcagatagttttacttgtattcatttgtgtatgtacttaattctatggaattttaccatgcgtgtaggtttgtatctctacaaccacattcaagatacagaacagttctctcaacacaataatttctcatattgctattttacaaacatatccaccttcatcccatgcctcctccctcatccttaacccttggcaactactaataatacacgatttctataattttgtcatttcaagattgcta

SEQ ID NO: 266075 - DNA, 641 bp, Homo sapiens
taaaacttcatagttacagcgagaaatactgggaaacaaaaaatacgctcttaaaatttcaataacttcatatattcattctacttagctgttacgggagagaaatcaaatatcttactgttgattttcattttccaagggactttgaactatgtgtgtaggtggcagtaaataccttcgttatagctgctgggagctgcagactctgcacacacaggtgaaggtggttagacttgtgtttcctgggaagcaagggcaagtaaggagtgtctaccatgggccagctatatgcctttsgtattccattcaacaccctcctccctgtgttagaggaaacatttctcctcctgcattcttcccagcctgtaacaggactttctgtcctctgggggattgggaagttatttcctgccccttcctcttttacttcttcccaagggaaagaatgacttctcttcttagggaggttggagaagggtcctaaacagcgggctctcttgtttaggctgactgtgagacaattttttcattgcttctgctttcctatggggagaacggttgaatcctagcctgggatctggaggttgatgtctctcttcttgctctccagaattcattgatttgaggcatgcatctgacct

SEQ ID NO: 266076 - DNA, 641 bp, Homo sapiens
taaaacttcatagttacagcgagaaatactgggaaacaaaaaatacgctcttaaaatttcaataacttcatatattcattctacttagctgttacgggagagaaatcaaatatcttactgttgattttcattttccaagggactttgaactatgtgtgtaggtggcagtaaataccttcgttatagctgctgggagctgcagactctgcacacacaggtgaaggtggttagacttgtgtttcctgggaagcaagggcaagtaaggagtgtctaccatgggccagctatatgcctttggtattccattcaacaccctcctccctgtgttagagraaacatttctcctcctgcattcttcccagcctgtaacaggactttctgtcctctgggggattgggaagttatttcctgccccttcctcttttacttcttcccaagggaaagaatgacttctcttcttagggaggttggagaagggtcctaaacagcgggctctcttgtttaggctgactgtgagacaattttttcattgcttctgctttcctatggggagaacggttgaatcctagcctgggatctggaggttgatgtctctcttcttgctctccagaattcattgatttgaggcatgcatctgacct

SEQ ID NO: 266077 - DNA, 641 bp, Homo sapiens
taaaacttcatagttacagcgagaaatactgggaaacaaaaaatacgctcttaaaatttcaataacttcatatattcattctacttagctgttacgggagagaaatcaaatatcttactgttgattttcattttccaagggactttgaactatgtgtgtaggtggcagtaaataccttcgttatagctgctgggagctgcagactctgcacacacaggtgaaggtggttagacttgtgtttcctgggaagcaagggcaagtaaggagtgtctaccatgggccagctatatgcctttggtattccattcaacaccctcctccctgtgttagaggaaacatttctcctcctgcattcttcccagcctgtaacaggactttctgtcctctgggggattgggaagttatttcctgccccttcctcttttacttcttcccaagggaaagaatgacttctcttcttagggaggttggagaagggtcctaaacagcgggctctcttgtttaggctgactgtgagacaattttttcattgcttctgctttcctatggggagaacsgttgaatcctagcctgggatctggaggttgatgtctctcttcttgctctccagaattcattgatttgaggcatgcatctgacct

SEQ ID NO: 266078 - DNA, 582 bp, Homo sapiens
atgtgcattgcccaaggtggcttgattgcctggtctggcagctggaggagtgggccctgcacctgacctcactgtgtcttggctttgtccaagtagaccccttgccttcgattgttttgtgcctaatgttttcactcatttagaaacacctgcatctttcttcccctggcagtgctctgaacccttttttttgccgggggcactgtcaccagtgtcttgagatatgttcctgttctgtatctgaccccagtggaccggaacctgcacgtaggtctgctgcctccctgcctagcgctctttctgctcccaccagggtgcatacctctgtgaattacatggctggacttctcttaacatcagactctattaactagaacaatagttttatctcatcctgtgattcaaagacggttgctagggaaaccagtggggatatgtttaatctgtaaatcctgtaattgccctaaagtagcaacaattcatgtgcttgcttcaaaaggatttggactgaactgactgggaakcaggtgagtgaagaagaacaatcacaggttggctccccttgtgatctgttcacattcc

SEQ ID NO: 266079 - DNA, 540 bp, Homo sapiens
tacaatttgggacatgcatacagactggttgatcttcagtcttttttgtgtggaggcaaaaaaaggttggagtttccacaagaaggagaaatgttttatattgttttgaaagaaagttcattggcactagtaacattttttagggagctggcaagtactgattggtgagtgatggttgtggataaacctagtctagcatctcagcaagatgtttcagtagctattagataaaactggcttcaggctacaactggcagtttcataagccaagatttcagaaaattatattcttggagcaatgttatatgttctgagtgattttccccttcgatcccttgaatatgatttagttgagkatgacaaaattgacccaactggtatgatcaacttcccattttcttcttttgatcaagatctttctctgaaagcatcactgatcaatcatcttgaatttggcttaattgttcctcagtgctggggtaagcctgtcctggttgtctctgtcccatgtcggaaagaaggcatgagggtctatgtcag

SEQ ID NO: 266080 - DNA, 615 bp, Homo sapiens
ggaaagaattagtgaagtggaaaatagagttgaagaaattaaacagaatatagcacaggaaaaaaagattataaataagaaagaaggatcaataatcattataggttccaagtaaagataatatattgaacacatacagctcattttactmccttctccaaacttattaaaactacagcaaagggattttaaacaatcatataaacccacaagaatgggcaaaatatgagatgagataccagcaacaaacttctggaaaatggaatataaatgaagaattgataacaatgttaccagagctaagaaaaccaaatcctaaactgatggtggggaaatcattgaatcaactgaatttgcactggaacacaacacaaaaagtaaaaaaaaaaaaaaaaaaaaaaaaaaaaatacagtaagaggcataaattagtaggaattaaagataaaatagaagaactaccaaatcaaaaattctttaaaaagactattagattaatctttagtaagattgagaaaagtgaaggtataaatatgtatgaacaaaggaatatatctacagataggcaaaattaaattttaaaaagatttttaaaaaatttaatttaaaattaagtt

SEQ ID NO: 266081 - DNA, 615 bp, Homo sapiens
ggaaagaattagtgaagtggaaaatagagttgaagaaattaaacagaatatagcacaggaaaaaaagattataaataagaaagaaggatcaataatcattataggttccaagtaaagataatatattgaacacatacagctcattttactaccttctccaaacttattaaaactacagcaaagggattttaaacaatcatataaacccacaagaatgggcaaaatatgagatgagataccagcaacaaacttctggaaaatggaatataaatgaagaattgataacaatgttaccagagctaagaaaaccaaatcctaaactgrtggtggggaaatcattgaatcaactgaatttgcactggaacacaacacaaaaagtaaaaaaaaaaaaaaaaaaaaaaaaaaaaatacagtaagaggcataaattagtaggaattaaagataaaatagaagaactaccaaatcaaaaattctttaaaaagactattagattaatctttagtaagattgagaaaagtgaaggtataaatatgtatgaacaaaggaatatatctacagataggcaaaattaaattttaaaaagatttttaaaaaatttaatttaaaattaagtt

SEQ ID NO: 266082 - DNA, 615 bp, Homo sapiens
ggaaagaattagtgaagtggaaaatagagttgaagaaattaaacagaatatagcacaggaaaaaaagattataaataagaaagaaggatcaataatcattataggttccaagtaaagataatatattgaacacatacagctcattttactaccttctccaaacttattaaaactacagcaaagggattttaaacaatcatataaacccacaagaatgggcaaaatatgagatgagataccagcaacaaacttctggaaaatggaatataaatgaagaattgataacaatgttaccagagctaagaaaaccaaatcctaaactgatggtggggaaatcattgaatcaactgaatttgcaytggaacacaacacaaaaagtaaaaaaaaaaaaaaaaaaaaaaaaaaaaatacagtaagaggcataaattagtaggaattaaagataaaatagaagaactaccaaatcaaaaattctttaaaaagactattagattaatctttagtaagattgagaaaagtgaaggtataaatatgtatgaacaaaggaatatatctacagataggcaaaattaaattttaaaaagatttttaaaaaatttaatttaaaattaagtt

SEQ ID NO: 266083 - DNA, 614 bp, Homo sapiens
cctcccgccttcctttaccacaccaatatacttcacaatgatagggatattgtttactgatctgccccaaatgcttacaatagcacctggcccggctggttgtggtggctcacgcctgtaatcccaacactttgggaagccaagacgggcaaatcacaaggtcaggagttcgagaccagcctggccaacatggtgaaaccccatctctactaaaaatacaaaaaattagctgggcgtggtggcagatgcctgtaatmccaggctactcaggaggctaaggcaggagaatcactttgaacccaggaggtggagattgtagtgagccgagatcacgccactgcattccagcctgggtgacgagcaagactctgtctcaaaaaaaaaaaaaaaaaaaaaaaaaaagcacctggcccaatattagatgttcaacatatgcttattgaatgaataattgatctttaacccagtagttcttaggaattgatactaaggcaacaatcagtgatgtacaaaaaagatttatatccaaggatgctcatttcaacatatattgtaatagtcaaactttgcaaaccactgaaatgtccagtaaaaattatgaaccatccttttta

SEQ ID NO: 266084 - DNA, 614 bp, Homo sapiens
cctcccgccttcctttaccacaccaatatacttcacaatgatagggatattgtttactgatctgccccaaatgcttacaatagcacctggcccggctggttgtggtggctcacgcctgtaatcccaacactttgggaagccaagacgggcaaatcacaaggtcaggagttcgagaccagcctggccaacatggtgaaaccccatctctactaaaaatacaaaaaattagctgggcgtggtggcagatgcctgtaatcccaggctrctcaggaggctaaggcaggagaatcactttgaacccaggaggtggagattgtagtgagccgagatcacgccactgcattccagcctgggtgacgagcaagactctgtctcaaaaaaaaaaaaaaaaaaaaaaaaaaagcacctggcccaatattagatgttcaacatatgcttattgaatgaataattgatctttaacccagtagttcttaggaattgatactaaggcaacaatcagtgatgtacaaaaaagatttatatccaaggatgctcatttcaacatatattgtaatagtcaaactttgcaaaccactgaaatgtccagtaaaaattatgaaccatccttttta

SEQ ID NO: 266085 - DNA, 570 bp, Homo sapiens
catgttatagaagacaacacaataacatagaaagatttcctagatatattttgaaaagggcaggttatataactgtccagaaatttattttctatgtataatacaatcttaatgtatataaatctacacatatatgcatggaaaaacttgtrtaagaacatactgacattttaacagtatttatctttggatagagtaattgtaaaatgtttacatgtttttctttactctttcatgtatttttgcagagtttctgtgataggaccattttgtttttgagactggattaaaaacaatgtagcagaggccatgggtgcctcacccatattcctcaagctggccctagttccaagtagctaagagcctggcggtggccctctacctacaaaggatgggagtggagtggctctctctcacagcttcctcagccccaggggacaactctgcagcatgttcctcacagcttgacagaggccctggccgtgcaccttggtggctgttctttgcattcccttcttctcagccttgcttctccatgccacctcagtgcttcctggaatcacctttcaa

SEQ ID NO: 266086 - DNA, 562 bp, Homo sapiens
ccactgggataaccaacataaaactgattttgttttcagtttgatatagcaattrcattttatttgtttgttgtaagtattggtaaactttcttattttttaaaaacagacatctgtaaaattatatacttttttcctataatatcctttaaagctgcttgaaaaatgtttattatgacaatgtataaaactggtatacatggccaataataaattttttctctaggttgatggtccttactaaaagcattttctcacctcttgagtttccacttctctttccactgattgaaatgggttgcatccaacctgcattcttgaaatggagacttctttagtgaaactccaacacccactacacatcggtggagaaggcagaacagccaggggacatactgcaacccctctcctctggacctcaagtttctcctccactgtctatttgttatttctctcctgtctcaggatgaaagtgtcttttcactccttcgatgctaactcatcaacttgtactcttggtcccaaaactctgatttggcttgtggcttacattagctcctca

SEQ ID NO: 266087 - DNA, 562 bp, Homo sapiens
ccactgggataaccaacataaaactgattttgttttcagtttgatatagcaattgcattttatttgtttgttgtaagtattggtaaactttcttattttttaaaaacagacatctgtaaaattatatacttttttcctataatatyctttaaagctgcttgaaaaatgtttattatgacaatgtataaaactggtatacatggccaataataaattttttctctaggttgatggtccttactaaaagcattttctcacctcttgagtttccacttctctttccactgattgaaatgggttgcatccaacctgcattcttgaaatggagacttctttagtgaaactccaacacccactacacatcggtggagaaggcagaacagccaggggacatactgcaacccctctcctctggacctcaagtttctcctccactgtctatttgttatttctctcctgtctcaggatgaaagtgtcttttcactccttcgatgctaactcatcaacttgtactcttggtcccaaaactctgatttggcttgtggcttacattagctcctca

SEQ ID NO: 266088 - DNA, 359 bp, Homo sapiens
ggtttcatttctggaagattttacagagccgaggctcagattccaattcctgtactatgtgttctaactctgggggacttgtgttgggctccaacttcgttttctggctcctcaaagttagaaacccactgcagtgggattgagggggtggtggtggtcaaggtgctcccagactccgagaccactggtcactacattccagtgcrtggtgtctatagagtccagccccacagagtcggtgggtttctccccatgtgcagagatgagagagcgtacaaataaagacaaaagacaaagagataaaagaaaagacaactaggcccgggggaccactaccaccaagatgcagagaccggtag

SEQ ID NO: 266089 - DNA, 512 bp, Homo sapiens
tgaattgctctttcatctgattgttctttcagtacaacctgtctagacttctattcgaactttcccttttcctgttacagtgagaaacatttccttgagctaatagtgttatgtgtggctttgtgaggttttcaggttccctgcctgaaacccagatygagacttcaggccttcccttcctacatgacattttacaatgatttgaccttaaaatgtttaaatccatataaactgcagaaatatttcttaccttatattcctcataaaggtgtttctatggagatttagaattttgaatttgttgaaattatataaaggtccttaaaactcctgtgtgctacttgcctgatttgcaaaatatctattagggtgtaccgtgtgctcaggatggggctacatgccgacacggggttggtaaagaggagacatggagcttgagtaaactaggggagctgtgggtagaaaagagcccctcgtcatctaagtttacaacaaaagatttcctaggatgt

SEQ ID NO: 266090 - DNA, 626 bp, Homo sapiens
aggctacttgcagcatccatgtctcagtgttctgtgattataagatatacaaaggcagcagcacataccagcactaaaggacaggaagattctggggacaggagaatagctattggtttagacatacatcgaaaaatcaccttgaagaaaaatgagcagaagaaaaatgaagcctattccatcttcagctctcagggcccagactccctccacctgatatcttaggattctgcttctcaaatgggaagaataaacatggcatagtttccaacagtcaattgtgctcaaaaatgtaaagaagaaaatttgactcttgttctaaaatcaagacatattttagacttagcatgcaatattctcaatgtattttagagatttaaaaatgaggacttaaagaaagatctggcttgtgtgggctttttgtcttatgggtgagtcccctgggtgctcattcaccgtctcccagtgtgaggagtatacttggagggaaaatttcactgggcatctcagagctttagccatttaaatcttgtaaagacagaagcctatttatcctgayttaagctgttctaaagagacagaaactcaccattggactggtcttctccatagtttttatgggatgg

SEQ ID NO: 266091 - DNA, 570 bp, Homo sapiens
agtttagcagtaggaagaagtctctctctctgctctcacactgctctcctggaagggcagcaggacttgagaggtctggttttcatgattgagccataatggaatttaaaaacagtccactctgctgtgaagcccatgtgcctgacgtgaagaccaagttccagctggcatatcatcttagccacaatgtgatgatgacaccattcttatttttaaccatggtaccttcaatccctcttgaaatatgatttggtgtctgtgcaaactgaggagaccgggaaggtctgtatttcagagtaataggggttactaggccacctggacacattgccagctggaaagagccaggcccacattctctgatggttaayctgtattcctggggacaggacaagcagggcagaagccagcagacaagaaactcaagctcaagggcaagaaataatactaatcattagaatgtgtgtgtttatcttaagttactcacattctgtcatttaattctcatgaaaaccccatgcagtaggtctttacatcccattttatagatgagggacccgagattcagag

SEQ ID NO: 266092 - DNA, 602 bp, Homo sapiens
gctataccaacctttctatggaagtgaacctgacctccttaatgcctcasactttactttggtaccactgcagatggcagtcttcctataatgtttgtgtccccttgccttctcacccaggcctcagtgagtacaactgtcctctttcacctattcaggttatcattcatctgatcattaagaacactcattattattgtgatatcctcagcaactatgaattatataagcatatttgtttcaataatacatgactccaaacacatttgaaatgtaaattctcttgactgcttgtttagcttttattttactcttcccctgtcacactaagaactgccaattctctactaaaatataattcttaagtcactgatttattcatacttttttccatccccttgaaacacatatgttaattaagcacagatcatgtaccaggtattgtgttagcactatggaatcctaaatgaacaggacctgttttttcactcacgggagatacagttagtagaggagccagataaagagacaactgaatagattaggatcaggaacatcatagagttttaaagcatagagggctgctaccaggacttctgact

SEQ ID NO: 266093 - DNA, 602 bp, Homo sapiens
gctataccaacctttctatggaagtgaacctgacctccttaatgcctcagactttactttggtaccactgcagatggcagtcttcctataatgtttgtgtccccttgccttctcacccaggcctcagtgagtacaaytgtcctctttcacctattcaggttatcattcatctgatcattaagaacactcattattattgtgatatcctcagcaactatgaattatataagcatatttgtttcaataatacatgactccaaacacatttgaaatgtaaattctcttgactgcttgtttagcttttattttactcttcccctgtcacactaagaactgccaattctctactaaaatataattcttaagtcactgatttattcatacttttttccatccccttgaaacacatatgttaattaagcacagatcatgtaccaggtattgtgttagcactatggaatcctaaatgaacaggacctgttttttcactcacgggagatacagttagtagaggagccagataaagagacaactgaatagattaggatcaggaacatcatagagttttaaagcatagagggctgctaccaggacttctgact

SEQ ID NO: 266094 - DNA, 566 bp, Homo sapiens
ctaagatgctgggaatataactgtgaacaagaaaagcaaggattgtgctcttgtgatgcttkcatagagatggaatgagagagggagtacaagaaaaagataataaatgaagaatgagcatcatgaaaaaaaaagctaggcaagagagtggagagcaatggggatgtgattttacgtaaggtggacagacgaagagatcagcaggtgtgaaggccctggggtgtgggtttgagcacaataaagggggctggtgggtggtggagaggacaagtgacaagatcagaggtggaaggcacccaatcatcaaggggcttataggtcagggcaaaggagatgaaaagccagtggagagctttgagcagaggggtgacaggatctgattaacacttgaaagggggcactcctggctatcctgtgaataggctgcagggaggcacgtgatggaagcaaggaaaggggttgcaaggctgttcccactgatccaggtgagaagcgatggtgggttagttagattagggtggcagcagtggaattggtgagatttcctggtgaggttgatgagaagt

SEQ ID NO: 266095 - DNA, 566 bp, Homo sapiens
ctaagatgctgggaatataactgtgaacaagaaaagcaaggattgtgctcttgtgatgctttcatagagatggaatgagagagggagtacaagaaaaagataataaatgaagaatgagcatcatgaaaaaaaaagctaggcaagagagtggagagcaatggggatgtgattttacgtaaggtggacagacgaagagatcagcaggtgtgaaggccctggggtgtgggtttgagcacaataaagggggctggtgggtggtggagaggacaagtgacaagatcagaggtggaaggcacccaatcatcaaggggcttataggtcagggcaaaggagatgaaaagccagtggagagctttgagcagaggggtgacaggatctgattaacacttgaaagggggcactcctggctatcctgtgaataggctgcagggaggcacgtgatggaagcaaggaaaggggttgcraggctgttcccactgatccaggtgagaagcgatggtgggttagttagattagggtggcagcagtggaattggtgagatttcctggtgaggttgatgagaagt

SEQ ID NO: 266096 - DNA, 331 bp, Homo sapiens
attcatagcaggtactgccctcatacacccttggactctcctcagarataatagaaatacatattaaaagagccctgtgctatggacctgagaccagtgaaataaagagggcatcccattcacaataacggctttcatgttctggggtctgaaagaagaacatggggctttggggcagggtcactatttccaagagacttcgaattatcttaccttggactcatcccactgatattaaaatgctaatacctaaagatacactttagaggtacggattaatagggcaggtatggattaatagggcatacagggtgtatgatatctacccagc

SEQ ID NO: 266097 - DNA, 538 bp, Homo sapiens
tctttctgctcctggcccttcccaaatctcatctttctcacatttcaaaacataactatgctttctcaacagtttcccaaagtcttaactcatttcagcattaactcaaatgtctaagttcaaagtttcatctgagacaaggcaagtcccttctgcctatgaacctgtaaaatggaaagcaagttagtttcttcctagatacaatgggagtacaggcgttgggtaattatacttattccaaatgaaataaatttgccaaaacaaaggggctataggccccatgcaagtccaaattcccatagggcagtcattaaaccttaaagttcaaaatgatctcttttgactccaggtatcacatccaggttgtgctgatgtaataggtgggttcccatggtcttgggcagctccacccccgtggctttgcagggtacatcccccctcctrcctgctttaacaggctggctggtgttgagtgtctgtgtcttctccaggtgcatggtgcaagctgcttatcaatctaccattctgggatctggag

SEQ ID NO: 266098 - DNA, 585 bp, Homo sapiens
tggctggggaagcctcaggaaacttataatcatggtggaagggggaagcaaacatgcccttcttcacttgatggcaggaaggagaagtgccaagcaaagagggaaaagcctgttataaaaccatgagatcttgtgagaaytcactcactattccaagagcagcagcatgggagtaactgcccccatgattcacttacctccaaccaggtccctgccatgacacatggggattatgggaactataattcaagatgagatttgggtagggatacacagccagaccatattaacaatattaacatattcatgtgtataccaatgcagttataaaatataattatatatgtgtatatgtttatacaggttgagtattccttatttgaaatgattggggccaaaagttttgggtttcaattttttttattttggaatatttgcattatataattaccagttgagcattgcaaatccaaaaatctgaaatctgaaatgctccaatgaacctttcttttgaatatcttgttgatgtgccaaaagtttcagattttgaagctttttggattttgggttttcagatttgggatg

SEQ ID NO: 266099 - DNA, 412 bp, Homo sapiens
tttttttattttggaatatttgcattatataattaccagttgagcattgcaaatccaaaaatctgaaatctgaaatgctccaatgaacctttcttttgaatatcttgttgatgtgccaaaagtttcagattttgaagctttttggattttggrttttcagatttgggatgctcaaattgtatgcatatatatacatgtatgcatgtacatatatatgtatttgtgcatatatacatacatatatggaaggggtcacaaaagcaaaagtgtccaatgacccatgaaagtcatatgtgaccctgtttgcccataatttcatgacaactgccttggaaagcctaattgctaatggatatatcatcattctaacagaaattcctctcttctttcactcagtaggagggaaattccc

SEQ ID NO: 266100 - DNA, 493 bp, Homo sapiens
ccacttgtcaaatgtcttttgggcagctttttacattgtggtgcacattaaacagaggtcagggtaacagcttctgttcttgtggaattagcatggccttcctcttgaagaccttctaggagtgggatttgaagctacctgtggggcagggagaccagtgttccaggaagatccatgtaattaactaggacaccaagcacatattcctcagggcatctaagccccttttgtgccatggagcagaatcttgggctcctctcagcagggtcaccacttatttactggaaatcaacatgtggttcattttgtggtatttcttaagctgctgcttttatatgaacgttacactcagtccttttccttcttttctcactttgtcacagggycatgcaacccacagtgaggtcaaatttttcagtgtgagtgtcctatggattcatactcaagtttttgtccccaacctagtgttcataggtagaggccatagagtgac

SEQ ID NO: 266101 - DNA, 599 bp, Homo sapiens
aggagtaaatcttgactgtcctaggcaaactaggatatgtggccatccaccaagaagaggacagcagaaaatcaaacgaaaacagcatcctcctctgtttctctggtattctgtccactcaccactcatctgcctgcctggctgctatatccacccccttatataggaaggacaaggcttrttatctctaactggagggtaagcaagctgagaagcagaatgggaagccaagcacccctctgcccctggtctcctgatttatacctcagggtcctttcatctgaagtcaggtctatcctccccaactgcagcagaagagagataggcagcaaggagccaatacttcatggtgccagatttgtgagcccatgcctatttccttaaggggtttaacaagcctgttatgtgcattaagtactggctgcttaaaagaatctgcgacaccatcttaatactaaccaggagagaagctggttagcattaagtgcccagagggtcgtgagccaggacagatggccatcttttcttcattaatgctcaacttcctatagcatcactagatagcaaaccacattcatctttatgggaagtttagggag

SEQ ID NO: 266102 - DNA, 554 bp, Homo sapiens
cattaagaacaactgaaagttttgaggtagtatgttataaataaatatactttaacctcaaagsctttcttaaatggtccactactaagccctaatttgtgaggagagacagcttttcaatgatagatgattctggagaaactcatctcagcagtttgggcacaaaccttttctctagcacagaaaatgttagaagcttcactgctgattctagattacaaatgctgcaaaatttctccactgaattatatatctatcaatcaacaatgtgatttctcataccttctccaacactgcatgttgtcaaataaatacttaaatctttttcttaatgatgagtagaaaaggggtatgttgttttaatctctaatgagtggatttgcatctctctaatgagtgatactgagcatcatctatatatagatcagccatttgtagcctgttgtcgctctctgcgtatttttataatcggatcctttgccctttgtatccacgttacccggctgtttgtttattcacaaaattagggtttgtttctaaaagcagattttaaa

SEQ ID NO: 266103 - DNA, 554 bp, Homo sapiens
cattaagaacaactgaaagttttgaggtagtatgttataaataaatatactttaacctcaaagcctttcttaaatggtccactactaagccctaatttgtgaggagagacagcttttcaatgatagatgattctggagaaactcatctcagcagtttgggcacaaaccttttctctagcacagaaaatgttagaagcttcactgctgattctagattacaaatgctgcaaaatttctccactgaattatatatctatcaatcaacaatgtgatttctcataccttctccaacactgcatgttgtcaaataaatacttaaatctttttcttaatgatgagtagaaaaggggtatgttgttttaatctytaatgagtggatttgcatctctctaatgagtgatactgagcatcatctatatatagatcagccatttgtagcctgttgtcgctctctgcgtatttttataatcggatcctttgccctttgtatccacgttacccggctgtttgtttattcacaaaattagggtttgtttctaaaagcagattttaaa

SEQ ID NO: 266104 - DNA, 554 bp, Homo sapiens
cattaagaacaactgaaagttttgaggtagtatgttataaataaatatactttaacctcaaagcctttcttaaatggtccactactaagccctaatttgtgaggagagacagcttttcaatgatagatgattctggagaaactcatctcagcagtttgggcacaaaccttttctctagcacagaaaatgttagaagcttcactgctgattctagattacaaatgctgcaaaatttctccactgaattatatatctatcaatcaacaatgtgatttctcataccttctccaacactgcatgttgtcaaataaatacttaaatctttttcttaatgatgagtagaaaaggggtatgttgttttaatctctaatgagtggatttgcatytctctaatgagtgatactgagcatcatctatatatagatcagccatttgtagcctgttgtcgctctctgcgtatttttataatcggatcctttgccctttgtatccacgttacccggctgtttgtttattcacaaaattagggtttgtttctaaaagcagattttaaa

SEQ ID NO: 266105 - DNA, 596 bp, Homo sapiens
gcacatttgatgaggaatactgatattctgcactagtctatctctcaaattctaacatgactgatgcctgtctccactgacacaaagtagcacaagtgagtttgtgactatggcatatttgctttttttttttttttttttgcatatgctcttctcatttcataagacttgcttgtatcaccacaactgactctcttgcatcttgaaaacatcacacaagagctagaatgaatgatccgttctgactttatgattagaaatgcaagaatttattaggtgttaccaacaattcaactttgaaacagatatttcctactacttttcttgcaagcttctggstaaatttagttgaacagaaatccaagttgtaagacaagttgttttaaaacaaaactgttgccatttccaactacttagctagatgaatgagtattttctaaatattgtgctactaagtgaaaataacataatactttggatgctgaggataatatgtttgtaattattcaaagtttttacattaatcaaatcagtcttagagccagcagtgatatattttatattatacgtagcatatttgaactcatgaagtaaat

SEQ ID NO: 266106 - DNA, 596 bp, Homo sapiens
gcacatttgatgaggaatactgatattctgcactagtctatctctcaaattctaacatgactgatgcctgtctccactgacacaaagtagcacaagtgagtttgtgactatggcatatttgctttttttttttttttttttgcatatgctcttctcatttcataagacttgcttgtatcaccacaactgactctcttgcatcttgaaaacatcacacaagagctagaatgaatgatccgttctgactttatgattagaaatgcaagaatttattaggtgttaccaacaattcaactttgaaacagatatttcctactacttttcttgcaagcttctgggtaaatttagttgaacagaaatccaagttgtaagacaagttgwtttaaaacaaaactgttgccatttccaactacttagctagatgaatgagtattttctaaatattgtgctactaagtgaaaataacataatactttggatgctgaggataatatgtttgtaattattcaaagtttttacattaatcaaatcagtcttagagccagcagtgatatattttatattatacgtagcatatttgaactcatgaagtaaat

SEQ ID NO: 266107 - DNA, 520 bp, Homo sapiens
aaatacaataatctttttgttaagagtaagccagatcatcttacttccatgctaaaaactctttaatgttttcccrctgtgcttgggatgaagcccagacccctgaccatggcttgaagaatgtctgacctctacccttctctgcagcatcatctcacacctgtctacccctctgtcactacactccagccacactggcccttggatacttccttaaaatggcttagttctcacccatcttcagggcctctgcctggacagttatctcaatctgaaatcctctttcttgattctcagcctagctggcttcttctcatccctcaggtttcagctcaaatgtcccactgtcacagagaaccttctcatcaccctatctaacatattcctgtccaccttgtttttctctattacagcatcctgtttactactcttatggcacaacagtccataattatcttgtttgtttacttgtctgtatctgctgagtcagtgaaaatgtacaacccatgaaggtaggcat

SEQ ID NO: 266108 - DNA, 510 bp, Homo sapiens
ggccataactcaggggagtgagcaaatctggcatgcagactccacaggcagggaaagaaccaagcccttttctctggcagctgggaggtggaaagcctggggcaggttttcaatcccctcatgccctccacctggaaacagaccggggctgtttgcggggagcacagtgggagtgagaccacccctttgttttgcatgggagctgggtgaggcctgtgactgccagcttttccccatttcctagacaacctgcgtgactcagcagacagccataaccctcctaggtacacaactccagtgacctgggaacatcacccccatctgccacagcagccacagcaagacccacccaaggacaaaggagaatctgagttcagacatgcctagccctgccctgacctgatggtccttccctatctaccctggtagcrgaagaccaagggcatataatcttaggagttctagggccccatccaccgtcagtccctctctatactactaaaactgatg

SEQ ID NO: 266109 - DNA, 568 bp, Homo sapiens
ctatttgcagcagggcaatgtggccaagtggaatgttttgtagcaatatttgcagtgattactgttgctgtttgactgaagacaaagtctttgagtctcaagatctatatctgcaaaataaggtgataagatctattgtcaacttccctctagtttctctgggaatatgttagatgtaaatcaaactctctgaacttttcctggaagaaaaaaaaaagtagcawagatataaaataagcctaataagtgagccatcttgttgtcaagttcttatctatttaattaagctaaaaggtgatatattttagcttcagcatggtggccttctctaagaacgtaacttgattgttattcccagtccacagaaaccagagctccaaaaagtcaataaaacaggagagagagaggtggagagaaagagagagaaaaaaaatctcagtttagactatggcctcatagaaatgtaggggtagttcccagccaagagtcagattgaaagtgtggattcagtttcttgttccggctgagtcagctcttcatggtgtattcttgcggttttacgtcattt

SEQ ID NO: 266110 - DNA, 545 bp, Homo sapiens
gcctacatctggttttcttgatatctgaggacaagaagcacattttttttttgtttaaatcactgaaattaagtcatcaaatactcgtagcccaaatgattgctaactgatacaatgaccatattatgtaagagtagagaagtagttttataarcagaaatggcatcctggatcaataggaattaagggcccttaagggactccctgcttccaggacaaggtatccctaaataatctctaatctgtaccacttaatccctatccctcatggtttatatatagcataccaaattgttttcttagatcctgaatccttggctctgaagcctcactgtttcccactagccaattccctcaactgttccacatccaccctttgttactttccatccattaatcacttgcattgtccaggtttgcaattttccaaactctgcccatttcaattagattccagggtcccagacataacccggcagtctccacctgtgcctgactaacatcggaggcggctggattcctgcaggctctatttccatgtgtgc

SEQ ID NO: 266111 - DNA, 486 bp, Homo sapiens
agtttttctattctctgtatccatatagtgcaaattcatagtcagattgaaaaccccatgatattataaaaatacctattattaaagaaatgtataattatcttcataataccataattactgagacatgaaagtcaacagaaaaggttttaaacgtagattaaaacaagaagattttatgtaaccacgaaccaaaaaggttawttactcagcacagccccagctccttattaattttgttaattgggtgtaccggttttgggaccccctcccaaaacatatgtacaccagaaactgtgaatgtgactttagttggaaaaaaaggatctttgaataagtaattaagttaaacatcttgagatgagatcaccctagattatccagatggaccttaaatttagtggcaagtgtccttgataagaagagtagacacagagacagaagataaggtcatgcaaagaggaaagtagggattggagatataca

SEQ ID NO: 266112 - DNA, 592 bp, Homo sapiens
gatagaaaggttataaaggcaattttgatatgtggaaaatatattgtcactaaagaaccacaaragtgtttgcagacattcagttcaaatgtagagtttatcaaaccctaaagaaggcaaatgttttctacatcacctattcattacaaatgaaaagagcaccatgtagaaacccaaagacctgaacccttttccaagtaactatcctaaggagatatttttatccaaactattaaaaaagaagaaaaaacaaagtaaaagtgtcgctgagtcctctgttttttttcctacattttccagatgatatttcgcattatgatgtgtcatcccatgttgtatcaatcgcattacaatatgtcacttaatgtaacataaagcaatatgattgacaccatctactagggcttgtcacaacagtgcatgtcaaccaggacatttttatggcttttgcaaataaaaaaaatcaacatatttcacataacatcacatccaaggtacagggaggaggaaagaaaggctttcttgaagatttttgcaacattccttttggaggaactgataaacatctgctaagtaaatggagtcaaatgtg

SEQ ID NO: 266113 - DNA, 558 bp, Homo sapiens
gtttgcagacattcagttcaaatgtagagtttatcaaaccctaaagaaggcaaatgttttctacatcacctattcattacaaatgaaaagagcascatgtagaaacccaaagacctgaacccttttccaagtaactatcctaaggagatatttttatccaaactattaaaaaagaagaaaaaacaaagtaaaagtgtcgctgagtcctctgttttttttcctacattttccagatgatatttcgcattatgatgtgtcatcccatgttgtatcaatcgcattacaatatgtcacttaatgtaacataaagcaatatgattgacaccatctactagggcttgtcacaacagtgcatgtcaaccaggacatttttatggcttttgcaaataaaaaaaatcaacatatttcacataacatcacatccaaggtacagggaggaggaaagaaaggctttcttgaagatttttgcaacattccttttggaggaactgataaacatctgctaagtaaatggagtcaaatgtgttccctatacttatatcaaatggacccaataaa

SEQ ID NO: 266114 - DNA, 602 bp, Homo sapiens
acctgggtgtagctgttgagcaaatcaagcttgatgtgttgagacttgaaagcctccttacactgagctgaggattatcttgggcatagcagcatgcctcacctgcaggtgtttacggagacggggttgtgtactgctttagattgagtatgggtcttgagagggtctgaattctattcctgcctttactcttgcttgccatgtgatcttargcaggcattttatcctctacttgcctctattttttcatctgcaaaatgggaatatttttaccttcttcatgagacagttgtggtaattaaatgagatgactgatgaaagaatgtaacaaaatgactcaaacacaatgagtgctcaataatgtcagctgttttgagtgtctaagcattttctaacttcttagttgaaaaaggctgtggcagaggaacttgaagctaaagatttaggatcctttgtccaccgcaaaaatggtgacagatctacattaagatgctaagcccttgcttctcttggcaactatgtacctgattgactttctaggagaatctgggatggatttcctgctactgtgttgaaatataagagaaagagaacaaatccta

SEQ ID NO: 266115 - DNA, 484 bp, Homo sapiens
tgtcctgctttgctccatccggaatgttgacattctctaagtagaaagatgcaaatctgcaggtgatatttatgaatttaggttgaccttaagaattcagattcacgatcttagagaaggaaaaaaaaatcaaggctggtattgacaggaagccaaaagtgaccctttctgccctttttatggccatcagctaatataatcagttggacacaagccgtaaccattgagtaacagacgggccacctttggattagctgtgctgcattcaacacctctttgaacaataattataatctkttgggtggaaatatcaatttaaaggtcaagtgctttcataaaaaaggtgattattcagtatttcatactttgaaccaaagcacacaccagaattcactgtatcactgtcttctgtacagcgcatatatgctgagaaatggattgcttaattatatgattatctgtctttagggaggatatgtgaatg

SEQ ID NO: 266116 - DNA, 601 bp, Homo sapiens
atgatttgactcattttacacatgggaaagccgagacttatggaggtaaagaattttgcacaaggttacacaatttgcaattcatcctggagtttaaacttgacgccagctccagattatctgcctgaccactcgccactatgcaagcctgcctctcacacttttgggcagaccatataaggactacaacagaccatcaaatgaacacaaaagtgtattggatttgatcagaaaagcaggttgccagtgaacacagatgctatactgtgacagagagaatttattagaagtttatggaraaagaaagggattttatttgtggtctgctagtactgagactgaacagccagccagggcaccttaggggaagtgtgaacttcatctgaaagttgggtcagaagcccatgaaattccactttgcttccacagacagttaaggaggccttctacctgggctaccagattcccagagggttggtgccctgtcccatctttgattcatgatctttccccacaatttggttatgtcaacaacttgacaagcaagtcaatttggctgtcctggcacagcacacagtgctgtctacattgttaaccagct

SEQ ID NO: 266117 - DNA, 588 bp, Homo sapiens
tttgcttccacagacagttaaggaggccttctacctgggctaccagattcccagagggttggtgccctgtcccatctttgattcatgatctttccccacaatttggttatgtcaacaacttgacaagcaagtcaatttggctgtcctggcacagcacacagtgctgtctacattgttaaccagctgtaaatccccattgattttaatggacactggttcagttcccccatctgtaaaatgaaaaatctgtatgaatgagaaatagatcattgtgctttaaaattctaaaattatatcatcctgtggtccagtctttctcttayagaatagaaaagtttaacaaatttcctcaaatcaaagcaaaatattattttatacaggaaacaacctaaagtcaaatacctgtcttctttcaactgctctgagtgagacttattttgatacaggaattatgtacacagactctgggtgcttctcatttataaactgtgtgtgctgggcaagttatttaagcttagtgtctcagtttagtcatctgtaaaatgaatataataataatacctacttcataagattggtatgaactat

SEQ ID NO: 266118 - DNA, 492 bp, Homo sapiens
aaaccctgtcttctagcctagttcagttcagcctgtaccttagcagttactatatgccacaggataggggtaaaataaagtagtctcttgactgggatagctcaaattccatttcctctctggtatccactcttccccattgtatcacaaacttccccattaggaagactatgtctgctaccaccttttagaaacccaggagccaaagtcctatgatgcattcaatagctgtcccaatacattttagaaggaagaactgagatgtgctgttactgtttcatatcatcatgctccagatgaagaaaatcattttcccaagtaaagcagggacmacgctatactcttgccttatcctctagggcaccattctcttcttggcttcagtccagccccacaaaagtaatagtaaaagaatcagacctggggcttccaggtctctcatcatgccatctcctctgtttctctccactgatctagaaaaatgcagtagat

SEQ ID NO: 266119 - DNA, 392 bp, Homo sapiens
ggattggtcccagctggctcctaatagttcacaaatctctgatgctctgcttaacccagagtctgtcatkttttttcactcccaggcttttctgcagacgccaaactctaggagaatctcttttctcgcactgctccacagccttgctaacccatgacatcattcccacagccttctatggctccctaaagctgctcctgtaatctgctaaccccaccgttccagaacagtggcacatcaataaaacccagcagttctgttatttgggtttcatcaagcttttcaggaaaaccttttgtggtggacagttagtaaaggaaacagaacaaagaaataaagcaccagctcattagacctgaatcagagcctagaaccaaactctactcacttgg

SEQ ID NO: 266120 - DNA, 585 bp, Homo sapiens
catcttctgcatcaatcatgctgggagctgcagactggagctgttcctattcagccatcttggaacagaacccgaggtgggaggatttcttgagcctaaaagttcaaggccagcctggacaacatagcaagaccccatctcttttttgaaaaaaaaaaaaaaagagagagagagggaaccatcacaggctgaggctgagggtagggagagcagatgaggaaggctggcagactcagtagtgaccagwgttctagtgaggaggtaaatgggccacctaagtgtggggtaagagattttaaatggccatggtgccttcctgcagaagatctcaaagctttacacagacactgttgactgtatgatatcccagttcttatgcccctactctgaatcagactgttggtacagcctgtggactccggtccaggaattagatgatacagtgaggaacatcattgtaagtgccactgggtcctagccactccaatcatctgggtggctgggtgtgatttacatgtctaatgtgtctactcccttccctgccaaaacttgaacattttaaccctgattacccaaaagccaggc

SEQ ID NO: 266121 - DNA, 538 bp, Homo sapiens
tcacccatcttctgcatcaatcatgctgggagctgcagactggagctgttcctattcagccatcttggaacagaacccgaggtgggaggatttcttgagcctaaaagttcaaggccagcctggacaacatagcaagaccccatctcttttttgaaaaaaaaaaaaaaagagagagagagggaaccatcacaggctgaggctgagggtagggagagcagatgaggaaggctggcagactcagtagtgaccagagttctagtgaggaggtaaatgggccacctaagtgtggggtaagagattttaaatggccatggkgccttcctgcagaagatctcaaagctttacacagacactgttgactgtatgatatcccagttcttatgcccctactctgaatcagactgttggtacagcctgtggactccggtccaggaattagatgatacagtgaggaacatcattgtaagtgccactgggtcctagccactccaatcatctgggtggctgggtgtgatttacatgtctaatgtgtctactc

SEQ ID NO: 266122 - DNA, 601 bp, Homo sapiens
tgtgaggattagacattatggatgagtaacacctggcccatattaagtgcaccgtaaaaggtagctattactttggaaactcctattctagggataaattggataactaaaacttaagcatgtctatatcctatggttgttgatgaactgatgacatcagtgacaatatttcaaattgggcttttagtttgctcttgcctttgatgtctgtttctagtgggccaatttccaatttctctttagattgctgtgtatccaacagcaaactagtgagtattctgagcttcatctgttttatagatgatccagttcttagggagttaaagccttcaggatgggagctgtgacaggcaggtttgcactcaggaaatacttcacaatggccactggaactcctcctgctgtggcagacagctggtwacccagtcaacatgcattctcctgtattccttggtgaaagaatccagttgtagatgcccagctgctaaaatatgtctttgcaggtcaggatggccaacgatacacaaatggaaattgttgaagcagatttccaggaaacctccttgagggaggcacagacagctggcatctcctcctgtca

SEQ ID NO: 266123 - DNA, 599 bp, Homo sapiens
agtgacaatatttcaaattgggcttttagtttgctcttgcctttgatgtctgtttctagtgggccaatttccaatttctctttagattgctgtgtatccaacagcaaactagtgagtattctgagcttcatctgttttatagatgatccagttcttagggagttaaagccttcaggatgggagctgtgacaggcaggtttgcactcaggaaatacttcacaatggccactggaactcctcctgctgtggcagacagctggtaacccagtcaacatgcattctcctgtattccttggtgaaagaatccagttgtagatgcccagctgctaaaatatgtctttgcaggtcaggatggccaacgatacacaaayggaaattgttgaagcagatttccaggaaacctccttgagggaggcacagacagctggcatctcctcctgtcaccctttcctcttccctgtactccattcctgagtatagaagtggtattggaaacccaacaatcagatggaaccataaggcagccctggggatgaaagccatgtgctgaggatgaagggacaggaagatggaaagaacctgggaccctgatgacacca

SEQ ID NO: 266124 - DNA, 514 bp, Homo sapiens
ttaattagcacttaattacactgtcaaagggggaaattttaccacggacagaccaatccccacccctcaggccctcgcttctaagagaagcagacctttgctgggagccagctcattcctccacgaaacatttgtaatgattacttgacaaggagtgcagatacaaaattgcgcaacagagagccatcactcaccacagcccgcyggaattctcatgctggagcaacagtgccccccaaagcaagcggccagaagcaccctgcaagcaaacactgggctgcccaaacttctattttctgctttataagctgaggagctattttaagagctgctggccaaaagcaggctctattacaaccagaccagcattccaaccaagctggggagcctcggctggaaacagaatgtttccacctattttaaatcagacgccaggaattctctaaggaagagatgggaggtggggaaggagagacatggtagaaaattggaaaattttagaagtttgccaaac

SEQ ID NO: 266125 - DNA, 514 bp, Homo sapiens
ttaattagcacttaattacactgtcaaagggggaaattttaccacggacagaccaatccccacccctcaggccctcgcttctaagagaagcagacctttgctgggagccagctcattcctccacgaaacatttgtaatgattacttgacaaggagtgcagatacaaaattgcgcaacagagagccatcactcaccacagcccgctggaattctcatgctggagcaacagtgccccccaaagcaagcggccagaagcaccctgcaagcaaacactgggctgcccaaacttctattttctgctttataagctgaggagctattttaagagctgctggccaaaagcaggctctattacaaccagaccagcattccaaccaagctggggagcctcggctggaaacagaatgtttccacctattttaaaycagacgccaggaattctctaaggaagagatgggaggtggggaaggagagacatggtagaaaattggaaaattttagaagtttgccaaac

SEQ ID NO: 266126 - DNA, 411 bp, Homo sapiens
agaagtcatgtttattctgctatgtaattactggatcaaataattttatcaaccaatttaggaggctttatgttaaggccctataaaaagtaaaactggtatgtcagtgtttcakatataaggatttattagaagagaaactggcaagactaagggaggtgacagtacaatgagaagagcatgcaagaaggaaggtgagagttctagtctcttactaattaatcttagctgttgtgaccgtggtcaagtcactataccatctggactttgttccctcaactgtgaagtgagaaaaatggattaaaacaaaattaatgattaaatcagaaattgattgtgtaaataaagataaagaattttaaatatttatatttatattatatagtgatattatataatatatttaatatt

SEQ ID NO: 266127 - DNA, 411 bp, Homo sapiens
agaagtcatgtttattctgctatgtaattactggatcaaataattttatcaaccaatttaggaggctttatgttaaggccctataaaaagtaaaactggtatgtcagtgtttcatatataaggatttattagaagagaaactggcaagactaagggaggtgacagtacaatgagaagagcatgcaagaaggaaggtgagagttctaktctcttactaattaatcttagctgttgtgaccgtggtcaagtcactataccatctggactttgttccctcaactgtgaagtgagaaaaatggattaaaacaaaattaatgattaaatcagaaattgattgtgtaaataaagataaagaattttaaatatttatatttatattatatagtgatattatataatatatttaatatt

SEQ ID NO: 266128 - DNA, 411 bp, Homo sapiens
agaagtcatgtttattctgctatgtaattactggatcaaataattttatcaaccaatttaggaggctttatgttaaggccctataaaaagtaaaactggtatgtcagtgtttcatatataaggatttattagaagagaaactggcaagactaagggaggtgacagtacaatgagaagagcatgcaagaaggaaggtgagagttctagtctcttactaattaatcttagctgttgtgaccgtggtcaagtcactataccatctggactttgttccctcaacwgtgaagtgagaaaaatggattaaaacaaaattaatgattaaatcagaaattgattgtgtaaataaagataaagaattttaaatatttatatttatattatatagtgatattatataatatatttaatatt

SEQ ID NO: 266129 - DNA, 411 bp, Homo sapiens
agaagtcatgtttattctgctatgtaattactggatcaaataattttatcaaccaatttaggaggctttatgttaaggccctataaaaagtaaaactggtatgtcagtgtttcatatataaggatttattagaagagaaactggcaagactaagggaggtgacagtacaatgagaagagcatgcaagaaggaaggtgagagttctagtctcttactaattaatcttagctgttgtgaccgtggtcaagtcactataccatctggactttgttccctcaactgtgaagtgagaaaaatggattaaawcaaaattaatgattaaatcagaaattgattgtgtaaataaagataaagaattttaaatatttatatttatattatatagtgatattatataatatatttaatatt

SEQ ID NO: 266130 - DNA, 604 bp, Homo sapiens
gcctggttatcttgctagttaygctgaaccaaatgctacttttcaaaccaaacaagtctaaaccagagctcttttcttgctttggtcttgggttagtgttttctctgcaaatagtctccctatctctttttaaaaatctgtactagtggccttacaaaaacaatattcaaagaataattctccactactcctgtctcttctaataggaattgtatgacatattgccatgtaaattagatttggctccttgttttatttatacaataaaactgagcaaagatatcaaccacaggataaattaattacaaggcagagaatcctgccagatatttcctttgggggacaaaccaaacaagaaaaccactccccaaaacttgttcttatctatttcattacgtgctttggcaagtctcaatgacctgcttatttaactaacctaatgggtttgtttttgttttgtaatctactcctttgcaaaagttaatgtctttttgctttagtattaaaaattctcccttcctctgttccagtcttccttatggaccttcctcccctgcattccttagatgagaaattgcaaaagtcactgaaattaatgaaaaac

SEQ ID NO: 266131 - DNA, 525 bp, Homo sapiens
ctcctgtctcttctaataggaattgtatgacatattgccatgtaaattagatttggctccttgttttatttatacaataaaactgagcaaagatatcaaccacaggataaattaattacaaggcagagaatcctgccagatatttcctttgggggacaaaccaaacaagaaaaccactccccaaaacttgttcttatctatttcattacgtgctttggcaagtctcaatgacctgcttatttaactaacctaatgggtttgtttttgttttgtaatctactcctttgcaaaasttaatgtctttttgctttagtattaaaaattctcccttcctctgttccagtcttccttatggaccttcctcccctgcattccttagatgagaaattgcaaaagtcactgaaattaatgaaaaacacacagtcctaacaacaggaaaccagagacccaatttggccttcaaggggctctgcttaggtgtatcatattgcgttagatgatgtaaaaacttcacgtgggttaatc

SEQ ID NO: 266132 - DNA, 613 bp, Homo sapiens
gcttatttaactaacctaatgggtttgtttttgttttgtaatctactcctttgcaaaagttaatgtctttttgctttagtattaaaaattctcccttcctctgttccagtcttccttatggaccttcctcccctgcattccttagatgagaaattgcaaargtcactgaaattaatgaaaaacacacagtcctaacaacaggaaaccagagacccaatttggccttcaaggggctctgcttaggtgtatcatattgcgttagatgatgtaaaaacttcacgtgggttaatcagaatgcaacctcaacccttactcaagacacctgttggactgctgtttgcccaagaggttgagtctgccttagtctcctgggtctataatgcatttagctcattatcaacccttactttttttttgttgggggtatcttctatttttcaaagctctttcacctctgttgtttcatttgatccttactcagtcctgggaaacattttatttccattttaacagatgaggaaacccagaagaaacagacttgctcatggtcacacaactgatctctctctctccctctctcaactattctaagtaactcactaaagtttaagca

SEQ ID NO: 266133 - DNA, 613 bp, Homo sapiens
gcttatttaactaacctaatgggtttgtttttgttttgtaatctactcctttgcaaaagttaatgtctttttgctttagtattaaaaattctcccttcctctgttccagtcttccttatggaccttcctcccctgcattccttagatgagaaattgcaaaagtcactgaaattaatgaaaaacacacagtcctaacaacaggaaaccagagacccaatttggccttcaaggggctctgcttaggtgtatcatattgcgttagatgatgtaaaaacttcacgtgggttaatcagaatgcaacctcaacccttactcaagacacctgttggactgctgtttgcccaagaggttgagtctgccttagtctcctgggtctataatgcatttagctcatwatcaacccttactttttttttgttgggggtatcttctatttttcaaagctctttcacctctgttgtttcatttgatccttactcagtcctgggaaacattttatttccattttaacagatgaggaaacccagaagaaacagacttgctcatggtcacacaactgatctctctctctccctctctcaactattctaagtaactcactaaagtttaagca

SEQ ID NO: 266134 - DNA, 613 bp, Homo sapiens
gcttatttaactaacctaatgggtttgtttttgttttgtaatctactcctttgcaaaagttaatgtctttttgctttagtattaaaaattctcccttcctctgttccagtcttccttatggaccttcctcccctgcattccttagatgagaaattgcaaaagtcactgaaattaatgaaaaacacacagtcctaacaacaggaaaccagagacccaatttggccttcaaggggctctgcttaggtgtatcatattgcgttagatgatgtaaaaacttcacgtgggttaatcagaatgcaacctcaacccttactcaagacacctgttggactgctgtttgcccaagaggttgagtctgccttagtctcctgggtctataatgcatttagctcattatcaacccttactttttttttgttgggggtatcttctatttttcaaagctctttcacctctgttgtttcatttgatccttactcartcctgggaaacattttatttccattttaacagatgaggaaacccagaagaaacagacttgctcatggtcacacaactgatctctctctctccctctctcaactattctaagtaactcactaaagtttaagca

SEQ ID NO: 266135 - DNA, 624 bp, Homo sapiens
gggtgggtaaattacggcctacagacccaatccagccaagaaaggttttcaatggttaagaaaaaaatcaaaagaagaaattttataacacrggaaaattacatgaaatgtaaatttctatgtctataaataaagttttctggaaacacagtcacattcatttgtctacatattgtctgtggctgctttcctgctacaatggtagaattgagtatagaagctgcaataaagattgtatggcctgtgaagcctaaaatattgactatcttgactctttacagagatgtgccaaatcttgttttagattactcctgtcctaatttgtattccaagagttatgataaatgtatacagtgtcaaccaagtataagctaagtaataataggaaatgcttaatattttcatttaagatcttgtaagtatgcttgaggaaattctgtgtgaagaaatgttttcttaccttccggaatgaatttccagtgccccacacttgtgttgcttattctccgtcactatggaagcatcacaggtacaacagaaaagggtctatgacccaccatgctatttgaatctcaaagctgaagcttcactattagagaaaactttgttgtgaaatttaaataa

SEQ ID NO: 266136 - DNA, 661 bp, Homo sapiens
cattcattcatgtattaatacttatcaggtaaataattatcaacacaagctatgttgagatctatgggagttataagtttaaataatgttattttatttactctgtagtaataatccacaaaataggcacattctctccctcctttctttcctcccttcctcccttcctcccttcttcccttcttcccttctccctccctcttctactcctcctccctcttcttctcttcctccttgtttttcttttttgtttttggataaggtagtcacaaaactgatcatctatatggtatggaccataatagctataggatttcaatagcttaccatctattatcaaggtaagcacaggcgcgtttgaacctagaagagaaatgccagaccccggccaggagggtcagaatggcttcctgaaaagataatacctgggmtgaaacctgaagcttcacttagagttttttccatgaagaatacaaaacaagactataatccttagtgaagaacgccctgcagatgaagactaaggggtgagcaaaccctgattatctgggcatccacacggaggtgaatatggctggaggacaagatgtaaggtgggtctggtactgaggaaagtggctagaggagagtaggaactgtcttatcagtgggtttgtgtatc

SEQ ID NO: 266137 - DNA, 661 bp, Homo sapiens
cattcattcatgtattaatacttatcaggtaaataattatcaacacaagctatgttgagatctatgggagttataagtttaaataatgttattttatttactctgtagtaataatccacaaaataggcacattctctccctcctttctttcctcccttcctcccttcctcccttcttcccttcttcccttctccctccctcttctactcctcctccctcttcttctcttcctccttgtttttcttttttgtttttggataaggtagtcacaaaactgatcatctatatggtatggaccataatagctataggatttcaatagcttaccatctattatcaaggtaagcacaggcgcgtttgaacctagaagagaaatgccagaccccggccaggagggtcagaatggcttcctgaaaagataatacctgggatgaaacctgaagcttcacttagagttttttccatgaagaatacaaaacaagactataatccttagtgaagaacgccctgcagatgaagactaaggggtgagcaaaccctgaktatctgggcatccacacggaggtgaatatggctggaggacaagatgtaaggtgggtctggtactgaggaaagtggctagaggagagtaggaactgtcttatcagtgggtttgtgtatc

SEQ ID NO: 266138 - DNA, 661 bp, Homo sapiens
cattcattcatgtattaatacttatcaggtaaataattatcaacacaagctatgttgagatctatgggagttataagtttaaataatgttattttatttactctgtagtaataatccacaaaataggcacattctctccctcctttctttcctcccttcctcccttcctcccttcttcccttcttcccttctccctccctcttctactcctcctccctcttcttctcttcctccttgtttttcttttttgtttttggataaggtagtcacaaaactgatcatctatatggtatggaccataatagctataggatttcaatagcttaccatctattatcaaggtaagcacaggcgcgtttgaacctagaagagaaatgccagaccccggccaggagggtcagaatggcttcctgaaaagataatacctgggatgaaacctgaagcttcacttagagttttttccatgaagaatacaaaacaagactataatccttagtgaagaacgccctgcagatgaagactaaggggtgagcaaaccctgattatctgggcatccacacggaggtgaatatggctggaggacaagatgtaaggtgggkctggtactgaggaaagtggctagaggagagtaggaactgtcttatcagtgggtttgtgtatc

SEQ ID NO: 266139 - DNA, 628 bp, Homo sapiens
acatcacacaccggggcctgttgtggggtggrgggaggggggaaggatagcatttggagatatacctaacattaaatgacgagttactgggagtggatcttatctgaccctccagactcagagctatagcagaaacttaaagattctcacagaaaaggcatatttatcttttttgatatcttgagccactgtgaataaatactttggtcctttgtgaaatgcatgaaagacttctttttgatttccaatagtcctaaaacagcatttccatttccatggagctaaggatctgatttaaaaaaagaaaaatcccagccttagagcttctctagtgtgggctaatatgtttggttctggggtagatgtaatttgtcttggggttaatgttttaactctcacctcataggctatttcaaaaattataaatcaggatatacctgacatgaaaaagtggagttgggctgtgagacaagaaacttggggtctagttctagtactgttatgaaccagcaatgtctccttcaatgagtcccttaatgacactaggccttggtcttcttagctacctaatgaggtagtaaactaggcaatttgggagattttcctcatgtgcctgcattgtatgact

SEQ ID NO: 266140 - DNA, 589 bp, Homo sapiens
acttaacaaacttgctgaagtcttgctcttacatacacagacaggctttaacatatagctgaaaatcagttacagtttctcaggacagtgatgaaagaaaacatgcaaatgtaacccatatgttaactttgatatttgtcccttagccctgtcaggttaacatttcacacttggaaaatgasaacttctcttgttatattgcttaaagaaaaccaaagttttgcttacctaaatgaaaataaggttgtttctaccttatgatgtccaaatgggacttagtctcttccctaaaccttttactcctcataattttcactttttcctgaagaaaaaactgaaattcaactttctgaaccaaatcagtcactaattgaaataaatgctcagaggagagcatataagcatttttaattcaaacaacaaataccatgtgattaataaagtgtcattcaactttctgctaaactatctaagccttgatcttttcagttgtatgttgattatatgattccatttcaaaaggtctgcatgagaataattctgcttacaggaaaactagcaaacacaaacttcttatttggtccaccta

SEQ ID NO: 266141 - DNA, 596 bp, Homo sapiens
agaactcaggaaccattgaaaaaatgttttctgctataaaaaaagttttctggcaaataggaagaatgactctacaatatggcagaggaaaatggagcagatacactggaaaaaatcaaacagatgcacagaaagaagaaaaatctggttccccacatgattccagttcttgttctaaatggttctgagactaaatgcatctatcctcgtattccctgagatattccaatatcctttcaacacttgttgtttgtggcttaagccattacaagtagggatctgtcatttgcaactgagaaagccctaatgaaaacatgctttagagaaggtctcctgttgctgaggcaggcctttctggttcaactgcaatgatagatggaaggtagtggtgggctcagatcaaaatatgccatggagartgccgctccttcttgtttatcaatagtctcatgactactagcttgaagggtgttcacaagatactccatccatccatccaatcatcatctaatcatctatccatctatcctctatccatctcagaaagatttcctgatctcctctgttggctagactctatgctaatggctactctg

SEQ ID NO: 266142 - DNA, 487 bp, Homo sapiens
gcattagtgatattaaaaccagacaagaacataacaaaaaagaaaaccacaggtcaatatcacacctgatactcatcatctgatgatcatagatgcaaamatgtagactatagttatcctattgatctatcaaacactaggtcttactttgtccatcaaaccatatattccatcaaaccaaatttgactagcaaaccaaattcaacaatacattgaaaagatcactcaccatgatcaaactggactcatcccagggatgcaagaatggttcaacatatgcaaatcaataataatgatacatcacattaacagaaccaagaacaaaaaccatatgatcttctcaatagacatgaaaaaagcatttaataaaattaaacatccctttatgattaaaaaaaaacctcatgaaactggttataaaagaacatacctcaaaatagtaaaggccatatctgacaaaccctgaacagggaaatattgaagttta

SEQ ID NO: 266143 - DNA, 560 bp, Homo sapiens
atatttcaccgtgaggaagccaaatccttctttgttctgccccagatgtctccttagaggtgcagcacagaaacctggcttargccagaaggtaccttaacaaaaactcactgatgtgtcctagcatatttatactttctaagactttaattttccattcttattttcccaaaactaaagggtaaaaatataagaataaattagattttggttagctttgggccagtttgtgccaacagaattttattcatctttatagggaaagtacggatggtttgcaagctcttccctaaaagatcccataattctgctatggtttttcctgcagtgtttgttttggtgatggtgtggcactgtcccatttaggtttggtgcaatttagtatattttgacctaaacattattgttttgattgtcctggtagaaacaacctggaaatggttctgggccagcgtggagatggcatggagattaggtgagagactgcatccatgctttcattggaactattttattcggatgagtctgacgaggttgaattggccagtgttctactgaga

SEQ ID NO: 266144 - DNA, 559 bp, Homo sapiens
acctgtccatttcaactctgtttctcaccatgcataacacagagatatgtacagagaaaaaaaaaatgtcaatcctgaacaaacaaaatgtggtacacatacaccatggaatactacgcagccataaaaaggaatgagatcatgtcctttgcagggacatgaatgaaactagaatccatcatcctcagaaaactaacacaggaacagaaaaccaaacactgcatgttcttactcataagtggacattgaacattgagaacacagacacagggaggggaacaacacataccagggcctgwtgggggttgggaggtgaggggaggggacttagaggacgagtcaacaggtgcagcaaaccaccatggcacacaaatacctatgtaacaaacctaaatgttctgcacatgtgtcccagaacttaaagtaaaataataataataataataataaagaatgtcaatcaacgtttgtcaaatggtaccctctgttaaagcaggcagatcatacacaaagatttctaaaattaaaatttatttgccatacatatgaaattaaccca

SEQ ID NO: 266145 - DNA, 535 bp, Homo sapiens
agacctttgggtgtgactactgttgtgcaactgcttttgaattatggtttataaaattcttatataaaataaacctctacgaagaaatgacaatccaggaatactttaagaagtaaaattgatttaattttttaaaagaattttaaaactggctttgaatgtatgcattccacctgactcaaaatatgcttttgatagatataagtaaagcagccaacagaaaaacagagagagaattttaaagtatatccaaggctttcacagcattgcacaagcttcattgacacacacaaagaagcagcttcaaactacagaacaggaacaatgaaaatcaaaggcaaaggaaaatgaacaaacaggataaagctaggtgttatttcttcctcaggaatatttttagtttattatttgttgttaaagtttactgtgtgccattataatcctgtacataagttmtttacgatatttgaattgccctgtttctgtaaagtttttcaggaggagattattgtcattattatatgcatttagcaga

SEQ ID NO: 266146 - DNA, 594 bp, Homo sapiens
tttttgcaatatagataggccaaaaattttctaaatatttaagttctagttccttcttgcttaataactctgtcttcaggttattaccctctccttgtattttactacaagctatgaggaggaattcagttactccttcaacaccagtttagaaacctactcaaccaactatctaatttcatcactcacaagttctacctttcacaagacactggaacataaataraattgggcaaagttatttgccatgttacaacaagaatttcttgttctctattgttcagttatacaatcctcatttccactggagacctcatcagaatggccttttaaaagtttcttcataacagtctcagcttattctagcatgcacctcaaaactcttccagtctcagtacattacctcatttcaaagccacttacacatttgtaggcactgttacagcggcaccccacttcttggtaccaatttctgtctcagtcacaaacatctagtccatagcaaggtggagtccaggagaagagtaatgactgagcacacagtattagtttaacccctggggattttagagtgtggtcaggaaacaactcgac

SEQ ID NO: 266147 - DNA, 594 bp, Homo sapiens
tttttgcaatatagataggccaaaaattttctaaatatttaagttctagttccttcttgcttaataactctgtcttcaggttattaccctctccttgtattttactacaagctatgaggaggaattcagttactccttcaacaccagtttagaaacctactcaaccaactatctaatttcatcactcacaagttctacctttcacaagacactggaacataaataaaattgggcaaagttatttgccatgttacaacaagaatttcttgttctctattgttcagttatacaatcctcatttccactggagacctcatcagaatggccttttaaaagtttcttcataacagtctcagcttattctagcatgcacctcaaaactcttccagtctcagtacattacctcatttcaaagccacttacacatttgtagrcactgttacagcggcaccccacttcttggtaccaatttctgtctcagtcacaaacatctagtccatagcaaggtggagtccaggagaagagtaatgactgagcacacagtattagtttaacccctggggattttagagtgtggtcaggaaacaactcgac

SEQ ID NO: 266148 - DNA, 617 bp, Homo sapiens
gttgctcaggctggtctcgaactcctggactcaagtaatccacccgccttggcctcccaaagtgttgggattacagacataaacctgcatgcctgaccaggatttctgcctttttaaggctgaataatattctattgtatgcattattacattttctttattggttkatctgttgatggacacttaggttgattccttatcttggctattgtgaacaatgctgcaatgaacatgggggtgctgatatttcttcaacattctgattttatttcctttgatggtatacttagaagtgggattgctggatcatatggtagttctattattaattttttgaagaagttccatattgttttccctagtggttgcaccattttacattcccaccaaaaattaacaacgtacaagtgttctcttttccccacatatttgccaacacttaccttttgttttttgataatagccatcgtaatagatgtgaggttcttattgtggttttgatttgcatttccctgatgattagtgatgtcgatttttttaaaatgtgcttgtggttcacatgtatgtcttctgtggagaaatgtctgttcaatcctttacttattttttaattggat

SEQ ID NO: 266149 - DNA, 617 bp, Homo sapiens
gttgctcaggctggtctcgaactcctggactcaagtaatccacccgccttggcctcccaaagtgttgggattacagacataaacctgcatgcctgaccaggatttctgcctttttaaggctgaataatattctattgtatgcattattacattttctttattggtttatctgttgatgracacttaggttgattccttatcttggctattgtgaacaatgctgcaatgaacatgggggtgctgatatttcttcaacattctgattttatttcctttgatggtatacttagaagtgggattgctggatcatatggtagttctattattaattttttgaagaagttccatattgttttccctagtggttgcaccattttacattcccaccaaaaattaacaacgtacaagtgttctcttttccccacatatttgccaacacttaccttttgttttttgataatagccatcgtaatagatgtgaggttcttattgtggttttgatttgcatttccctgatgattagtgatgtcgatttttttaaaatgtgcttgtggttcacatgtatgtcttctgtggagaaatgtctgttcaatcctttacttattttttaattggat

SEQ ID NO: 266150 - DNA, 617 bp, Homo sapiens
gttgctcaggctggtctcgaactcctggactcaagtaatccacccgccttggcctcccaaagtgttgggattacagacataaacctgcatgcctgaccaggatttctgcctttttaaggctgaataatattctattgtatgcattattacattttctttattggtttatctgttgatggacacttaggttgattccttatcttggctattgtgaacaatgctgcaatgaacatgggggtgctgatatttcttcaacattctgattttatttcctttgatggtatacttagaagtgggattgctggatcatatggtagttctattattaattttttgaagaagttccatattgttttccctagtggttgcaccattttacattcccaccaaaaattaacarcgtacaagtgttctcttttccccacatatttgccaacacttaccttttgttttttgataatagccatcgtaatagatgtgaggttcttattgtggttttgatttgcatttccctgatgattagtgatgtcgatttttttaaaatgtgcttgtggttcacatgtatgtcttctgtggagaaatgtctgttcaatcctttacttattttttaattggat

SEQ ID NO: 266151 - DNA, 617 bp, Homo sapiens
gttgctcaggctggtctcgaactcctggactcaagtaatccacccgccttggcctcccaaagtgttgggattacagacataaacctgcatgcctgaccaggatttctgcctttttaaggctgaataatattctattgtatgcattattacattttctttattggtttatctgttgatggacacttaggttgattccttatcttggctattgtgaacaatgctgcaatgaacatgggggtgctgatatttcttcaacattctgattttatttcctttgatggtatacttagaagtgggattgctggatcatatggtagttctattattaattttttgaagaagttccatattgttttccctagtggttgcaccattttacattcccaccaaaaattaacaaygtacaagtgttctcttttccccacatatttgccaacacttaccttttgttttttgataatagccatcgtaatagatgtgaggttcttattgtggttttgatttgcatttccctgatgattagtgatgtcgatttttttaaaatgtgcttgtggttcacatgtatgtcttctgtggagaaatgtctgttcaatcctttacttattttttaattggat

SEQ ID NO: 266152 - DNA, 570 bp, Homo sapiens
gtcacattactctgtgatttaatgtctcatcctctaagtgttgtgggttcccagagcaggatttctagtgtctagtgtcctaagacagccctcaatgtgaatcttcctcaccccaaggtgctaataaaaggaaaaactgagcttttgaaaagctctcctaaggcacagctccaaaattcaggacagagtccaaactcttgttttaatagctttggccaaattcatgttcagcatttgatttagagcttgcagtgttaatattttgtgcattgggccaactctccagtgattttaatatttcgtttatcgactgatttaacttttaatagtatccaaagccatctcattagattacagtgctgaaagagtgccactgtaatagctatcccgttgttcaagtaaattcaatttggacagatgtagctcaaggcgaaagggaatcgtaatctctgaaatagtttgccatcctatattccaaacaagtcttagctcctctgcrtgcgtgccttggacatgatctttaaagatcttgaaggaccaggggagaaatacgatctggacatgtttgat

SEQ ID NO: 266153 - DNA, 639 bp, Homo sapiens
gcaaacaaatggttcccatgaacacactgacatggtgtctttctggattgtcaccactcacagagctggaaaggagccagagaacagccttctggagtatgctattggggtcctgggcraagccagctgtttgcaatgttactcccgcttgatgaatttctctcaggggcaggactgggatgcagaaactgtggattagtaccccaaccaccatgtatgtgccctgtgaccttgatgacatcagctcaaatgggcttcatttctaccaacacacaggagcattttaatgaaatcacatgcatttatgcagataacagctaccatttaaaactaccacttatcagatagtcactatgtgccaagcattagattaggacatttacatatttgatttaatttaatcttcatgatagctttgaaaattagttattatgcagcttgcccagagtcatgaagctaataagaaaaccccaaacctgggatgcaggttgaactccagagccttgttcttttcctcataccaggctgcatctcagtcaacaccttagttgcagttacatccgaatgtatgtgtgtgtgcacacacaggtgagcacgtgcatgtatggaaaagacttacgtttataccaagagcgtgag

SEQ ID NO: 266154 - DNA, 639 bp, Homo sapiens
gcaaacaaatggttcccatgaacacactgacatggtgtctttctggattgtcaccactcacagagctggaaaggagccagagaacagccttctggagtatgctattggggtcctgggcgaagccagytgtttgcaatgttactcccgcttgatgaatttctctcaggggcaggactgggatgcagaaactgtggattagtaccccaaccaccatgtatgtgccctgtgaccttgatgacatcagctcaaatgggcttcatttctaccaacacacaggagcattttaatgaaatcacatgcatttatgcagataacagctaccatttaaaactaccacttatcagatagtcactatgtgccaagcattagattaggacatttacatatttgatttaatttaatcttcatgatagctttgaaaattagttattatgcagcttgcccagagtcatgaagctaataagaaaaccccaaacctgggatgcaggttgaactccagagccttgttcttttcctcataccaggctgcatctcagtcaacaccttagttgcagttacatccgaatgtatgtgtgtgtgcacacacaggtgagcacgtgcatgtatggaaaagacttacgtttataccaagagcgtgag

SEQ ID NO: 266155 - DNA, 321 bp, Homo sapiens
aacagagagcctttgagacatggaggttcaaaggccagtggggaagacagaacattgctcaaacagatgggctagaagcagatactgaagctggtgtttgtagcaaggcctctgggaatagaaattttaaagagcaagaaggtcagaaggaaacctaagggatttggccttggaggtcggctttaatctatctcctggcatgtagtgcacargtcaacaaatagtcagctaaagggtggaacagataacaatttgaggacattcgccacattacagaggagggaaagtggagattcccggccagttgtgaaagttgtaagc

SEQ ID NO: 266156 - DNA, 569 bp, Homo sapiens
gccttccaaagaggagagcatgtgacacatctgatcagttggcccgatctggaggttctttagaaggaggagtgcaagtgtgtttctatgttggtctgaaggatacagagatgctgatggtgaacattcccaacatctgttcccttcaattgggtacagtgcacataaaccataacgttatggagtttgagtccaggttacagcacttattctgcatacacaagttatttaggtgcccagagtctcagtttcctcaactggaaagcgggcatgagaaraatcctacacaaaatggtggctgtgagaatgaaagctatgtaaagtgggcagttgtgatcaccttctccttcttcagtgccctcccaagccacactagtagatagtggtagaactttgcttaaactcaagtctactccctcttaggtttcagaaaccagcagatgtggcctcagcattgactttgtattactagctgattagcctttggcttcttacctaacctctctgcacatggctttccttacctatgaaatgggtagtaatacctatctcaagttgctgaaatgatg

SEQ ID NO: 266157 - DNA, 569 bp, Homo sapiens
gccttccaaagaggagagcatgtgacacatctgatcagttggcccgatctggaggttctttagaaggaggagtgcaagtgtgtttctatgttggtctgaaggatacagagatgctgatggtgaacattcccaacatctgttcccttcaattgggtacagtgcacataaaccataacgttatggagtttgagtccaggttacagcacttattctgcatacacaagttatttaggtgcccagagtctcagtttcctcaactggaaagcgggcatgagaagaatcctacacaaaatggtggctgtgagaatgaaagctaygtaaagtgggcagttgtgatcaccttctccttcttcagtgccctcccaagccacactagtagatagtggtagaactttgcttaaactcaagtctactccctcttaggtttcagaaaccagcagatgtggcctcagcattgactttgtattactagctgattagcctttggcttcttacctaacctctctgcacatggctttccttacctatgaaatgggtagtaatacctatctcaagttgctgaaatgatg

SEQ ID NO: 266158 - DNA, 373 bp, Homo sapiens
tgcctggcctagcagtcagaagtcccaccagcaggcccgtggtgtcttgctgctcccctgatgatgttgactggaccagttataggtcttcctggagcccttttgctgtgattctgtgcctctgcctctcttctccatgctgcctctctgaaaccgayccttgaaggcacagtattcacctggggaacatttactaagaccaggcccccatcttagagttagtcattaattaaattcatgcccattcaccaggttccagactctagttagtatgcagttggccagaataactctttttccccgctgcctgcaactgactcaactttcttcttctgtacaactaattaaaagtgaactaaaaataaaaccactc

SEQ ID NO: 266159 - DNA, 373 bp, Homo sapiens
tgcctggcctagcagtcagaagtcccaccagcaggcccgtggtgtcttgctgctcccctgatgatgttgactggaccagttataggtcttcctggagcccttttgctgtgattctgtgcctctgcctctcttctccatgctgcctctctgaaaccgacccttgaaggcacagtattcacctggggaacatttactaagrccaggcccccatcttagagttagtcattaattaaattcatgcccattcaccaggttccagactctagttagtatgcagttggccagaataactctttttccccgctgcctgcaactgactcaactttcttcttctgtacaactaattaaaagtgaactaaaaataaaaccactc

SEQ ID NO: 266160 - DNA, 595 bp, Homo sapiens
aacaacctaagtgtttgttgacatatgaattgattaaaaaatgtgatgtatatatacaatgggactggatgtatatatatgtatatgtatacaccacatttttttaaattaaaaaaacaaaacaaaacaatcaaatgaaaaaagttgggaaagacattttgggtggcaaaatgggaagcacttctgcatgctctctgataacaaaatgaaacactgcaaggccactccaactgcaccatgggcagccatgttactggtggtttggaaagttactgcccaaacatgtgcaaagaatggcttctatctctgtgcttcctcagcattttgctcagatctcagcgtcagctcctctcccactgttctggaatacttattctcttcactgtcgccctgttggactgtgagctcaggatcatgtcgcattgtatttttagatcccagcacagtgcctcacatggcgttggtggtcaacaatrgctccctggattgatttgtctgatttgcaggcttcagaaatgttgggaaatacatgacagagattttgatatttattttgggaggaaatcatatttagaaattgatcagtctttgctaa

SEQ ID NO: 266161 - DNA, 576 bp, Homo sapiens
catttacatattgtctgtggctgctctcgtataaaaaaacagagttaaatagtgatgacacagatcctgggatccacaaagcctaaaatattcattacttgactgcagtggactgaatgttggtgtccccctcacacacacatatatatatacacacacacacacatatatacacacacatatatctatatcaagattttaggtcggggaccatggctcacgcctgtaatcccagcactttgggaggctgcggcaggcctcccraagtcaggagtttgagaccagcctggccaacatggtgaaacaccatctctactaaaaatacaaaaattagccaggcatgatggtgcatgcctgttgtcccagctactcagaaggctgaggcaggagaatggcttgaatgcaaaggttgcagtgagcctagattgctccactgcactccagcctgggcgacagagcaagactctgtctcctcccccccgacccccaaaaaaaagttttaggtgaccatttctgagaggatatgattacagattatttttatatttatatgcttctctctacctttcaaatatc

SEQ ID NO: 266162 - DNA, 576 bp, Homo sapiens
catttacatattgtctgtggctgctctcgtataaaaaaacagagttaaatagtgatgacacagatcctgggatccacaaagcctaaaatattcattacttgactgcagtggactgaatgttggtgtccccctcacacacacatatatatatacacacacacacacatatatacacacacatatatctatatcaagattttaggtcggggaccatggctcacgcctgtaatcccagcactttgggaggctgcggcaggcctcccgaagtcaggagtttgagaccagcctggccaacatggtgaaacaccatctctactaaaaatacaaaaattagccaggcatgatggtgcatgcctgttgtcccagctactcagaaggctgaggcaggagaatggcttgaatgcaaaggttgcagtgagcctagattgctccactgcactccagcctgggcracagagcaagactctgtctcctcccccccgacccccaaaaaaaagttttaggtgaccatttctgagaggatatgattacagattatttttatatttatatgcttctctctacctttcaaatatc

SEQ ID NO: 266163 - DNA, 576 bp, Homo sapiens
catttacatattgtctgtggctgctctcgtataaaaaaacagagttaaatagtgatgacacagatcctgggatccacaaagcctaaaatattcattacttgactgcagtggactgaatgttggtgtccccctcacacacacatatatatatacacacacacacacatatatacacacacatatatctatatcaagattttaggtcggggaccatggctcacgcctgtaatcccagcactttgggaggctgcggcaggcctcccgaagtcaggagtttgagaccagcctggccaacatggtgaaacaccatctctactaaaaatacaaaaattagccaggcatgatggtgcatgcctgttgtcccagctactcagaaggctgaggcaggagaatggcttgaatgcaaaggttgcagtgagcctagattgctccactgcactccagcctgggcgacagagcaagactctgtctcctccccsccgacccccaaaaaaaagttttaggtgaccatttctgagaggatatgattacagattatttttatatttatatgcttctctctacctttcaaatatc

SEQ ID NO: 266164 - DNA, 336 bp, Homo sapiens
atcactgggacctatttgaagttaatttttgtatacagtgaaaggatgtgtggattgaacttcatttgttttggtttatggatatccattttttccagcaccgtttactaataagactaacctttctccactgcatttaaaaaaaataacttacaggctgggcaaggtggctcacgcctrtaatcccagcactttgggaggccgaggcaggcggatcacctgcggtcaggagtttgagaccagcctggccaacatggtgaaaccccgtctctactaaaaataaaaaaattagccgcgtatggtggtgtgtgcctataatcccagctacccaggagg

SEQ ID NO: 266165 - DNA, 443 bp, Homo sapiens
aaagccggcagagcccttggaagcaaggtggctaacgtttctcacagtgcagatggtgcagaggcccagatgctatggaaacmagcactggacagctgccgggtagagtggcggaagatttcttcacttgttcagtatctgtttgctttttcaactggtgtacaaagagtacttactgctgtcctgagataattcccagcactggatagcctgccccacatctgagccacaggaccatttgtctgtccctggctgacttttcctgccggccctccccaggcatttggcctggtttgtttccctttcagttgccactctcccccttggggactcctccacatgctacagaatgggatcctgccacttcatccttcaggcactcccaccctgcagctgtttctcttgtaatggtttttctggaaaaagacacaaatgtagagaac

SEQ ID NO: 266166 - DNA, 443 bp, Homo sapiens
aaagccggcagagcccttggaagcaaggtggctaacgtttctcacagtgcagatggtgcagaggcccagatgctatggaaacaagcactggacagctgccgggtrgagtggcggaagatttcttcacttgttcagtatctgtttgctttttcaactggtgtacaaagagtacttactgctgtcctgagataattcccagcactggatagcctgccccacatctgagccacaggaccatttgtctgtccctggctgacttttcctgccggccctccccaggcatttggcctggtttgtttccctttcagttgccactctcccccttggggactcctccacatgctacagaatgggatcctgccacttcatccttcaggcactcccaccctgcagctgtttctcttgtaatggtttttctggaaaaagacacaaatgtagagaac

SEQ ID NO: 266167 - DNA, 562 bp, Homo sapiens
ctagtattataaatttccttttaagtactgctttatcagtataccacacacttttatattatgtgttatttcatttcattctgaatactttctcacttcccttttgatttattctttgattatatggtattcagaagtgtgttgtttagttttccaaataygtggcaatattgaaagagattcttccgttgctaatttctaatttaatttcatttggctggacaacatactttgtgtgacttaaatccttttaattttattgagtttttttatggctcaaaatgtattctatcctgaccagtgtgtcctgtgtacttaaaatgtgcatattgtgccattgtccataaatgtcaattaatcaggttgtgtggtgttattttcaagccatctatattcttcctatattctatatccttttctgcttacttgttttatccattattaacagaaaagtatcaaaacatccaactaaaactgtgggtttgtctatttgtcctttagttctatcaatcaattttccctcatgtattttgattatttattattaagtgtataaactttt

SEQ ID NO: 266168 - DNA, 662 bp, Homo sapiens
cctcaaacacaacaatatacagcaggaaatgctgtttttggcaatggattagaaggaaggccaggtcttgttcattgactatgaaacaatggtgactcatcttggatccctaagaacacagggaagacatttggcacaaagtggtcatttggtgaatacatactgaataaaacaactcggcatttagacctaccttatttttttcctcaaaactgacaaaaggctaaagagctcaattagaattggactcataaatgttttatttattcaacatgagagtcaaggtaatgtagtgtggaggcatgggctctcttgccagagtgtctttgttttaaagcagacttcttcacacacactctgggcattagatttctcatcatcaaagtggggataattataaaacctgtctcacagcgatattgtgagaattagaagacttaatgcacagaaggtgtttaggayaatgcctggcaaatagaacacactctacaaatgaagctattattcatccaatgaacatttctggattgagtgccactgtgtctcataaactgggctgtgtgctagggaatatggagataaacacatagtttcaagccataaagcatttagggccttctatgggaagttgagaagtagatagcagtgaggagtatggatga

SEQ ID NO: 266169 - DNA, 550 bp, Homo sapiens
gaaaaggagcaagcatgtacaaagtcctggaatcatggaagatcaaagtatcttgacagaatttcaaatagttcaatgtgaccgatgtataagaattgtcacagcaagtggttaactaatgtttagaaatggtggatggagggcaggtaatggagggtcttatgtgtgttcttaaggagcataaaatgtattctagatatgttgggaaggactgtaagaaagagagagccttgatcrcagttgcaatttggaaagattgctctggtccacaatggatcaaaattgcaaaatatgaagcagttgggcaatggttaaggtaagggatgatgaaatctagagaaggcagatgccatggagactggtggtacattgttaggcctgatgcctccagagggttaatacgatgattcttctgttgtaaggtagtgtgcatgtgtatagcatgtctcaatgtacctggtgcattatgggctttacctgcacctggtaaagctcagtatgagcagataggaattgcatctctctttgcagatgagggaacagtttcatt

SEQ ID NO: 266170 - DNA, 570 bp, Homo sapiens
ttttttgtcacttgtgctttggtgtcatatctaagaaatgattgcctaaaccaaggtctctttctctctccttctttctttccttgtctcctttttttttttttttttttttttttttttttttggagattcattcttgttgtccaggctggagtgcaatggcacaatctgggctcactgcaacctccgcctcccgggttcaagcaattcttctgtctcagcctcccaagtagctgcgattataggcatgcaccaccgtgcccagctattttttttttgtatttttagtagagacagggtttccccatrttggacaggctggtctcgaactcctgacatcaggcgatccacttgctttggcctcccaaagtgctgggattacaggcatcagccaccgtgctcggcctctttctgatttaaaaacataaagatgaggcatggagtaatatcttttccatgagtgaggttgcaacttaagctaacactgaatttagtaataacatttctaacaactactgaaagcttcccttatgaggttggtaaaattattactgtcactttactaatgag

SEQ ID NO: 266171 - DNA, 598 bp, Homo sapiens
catatctaaataattcatcttctaaaggcaaatatataattgtaatgtttagaatttagaatgcctagtaaacgcccctttagggaaaaataaacctttgtaaaaagaatattaatacattttaaaattcaaatttggactttagtgacatcaacagtgtttacatttagctattagtcttccttggactagagtgaatggcagccatgaagtatacagcctgtacagcctaatacagtgaacttatataaatgcttctccagttctasaaagatcatgaattagtaaaattaagcttgtttttgttcttgttgactcatatacctgggttaaaaaaagtttcaaaatgacagcaatgacaaaaaaaataaggttaggctgcattgcttagtaaagataagtaggaaaaccagaagtgaacatttcaacctttgtctattgttgagcaaaatacgaaaccttaatttggccagtttattttgagagattgttcttgcagataatgcttaagagtcactcttcaaagggccctttaaaatggatttattgcaaaattttatttcaaattattttcttagtctaaaattcaaaactaaca

SEQ ID NO: 266172 - DNA, 511 bp, Homo sapiens
tttctttcatcactttgtccactgaacttaggagcaaccaaccagcttcattatgttccttggttctccacatatggtcaaaagtattatgtatatggtcacctcactctgcctgtcatgagcagtgaatcaggagtgtcaaatggatttattttgtataactctctaaacagttgccgctaagcactatcagtgttctctatactattagtagtagagtccctagcatttttgggtctaatcatattaagcagccaactccagaaaccccaaaaccaatgaaagaactccatycttaatattctgttcctctagaaccactgctgctaccaaaatctgtattagtcagggttattttacagggacagaactaataggatatatctatatctatatctatatctatatctatatctatagctatagctatatctatctatacaaaggggagtttattaagtattagcttacatgatcacaaggtcccacaataggctgcctgcaagctgag

SEQ ID NO: 266173 - DNA, 593 bp, Homo sapiens
gatttctgcataaactacttcaagatttgcttatctgaatgaaaagttatcttccctgagaccagatccagaccaccttttgatgatttacttacctgaccatgtcgttcccttgagtttcttgttattatgattataataaagggagtacaagcaatctggtcattttaacctactaccagatggattagatcactgcgggatattggcttatttaccctacaatgactcatcacagtttaggaggaagaagaccagcttagaggtcaggagatttacttttgtagtttttggttaattactttactacctgtctctgatattayaggttaatggcttctggggggattaatgagattagaaacagagagatgcccaatccttatttattttacaattttgcctaggagtaccgttccctaatcttaataaattatagtataaatacctccttgatgctaaggaatatgccaggtctgaggagatcaggttgaactgaacaaggttctagcccttcaagagcacaggattagtgttggataggtaaataactgcaaacacgatgtgatgaaagccaccataggagtatgaat

SEQ ID NO: 266174 - DNA, 506 bp, Homo sapiens
ggaagagaagacagcagacaatgttgatccttgaatgcataatataaaactagactcttccctgctctgaataaccctagtatacaagcagaggaatgttgacattactggcctcacatctagaaaaagaaacagatgatcttcataaaatgaaagaaacatggctcattcatttttaacatctaagcatttactatgtgtctgctcaaatatgtagactgcctgagtgaaagggcgtctggttaacccagtgatcagctgtggccacctccacagaagtatatacataaatgaaaataactaggttgttttccagctatttaaagctaataactagtttttmaatggggacttttttacatataaatacctaaaagaatatgatctgcaaaaaatatgcaagttgattggctacctattcatagcaaaatgttagattacctctagatggtgaggcattatgcgtagactggattttactggattcatttctctccaaaaattcc

SEQ ID NO: 266175 - DNA, 594 bp, Homo sapiens
ttgctatttcccagtattaaagcatattaaaaagttacaattattaaaattgtgtggtactatttactaatacagaaacttagagaagccaaatcagtttgagaattccccaaacagatcaaagcacatgtaaaagtaatgcataagaaagaccacatttcatgttgatggagaaagtaatgactattcaaaaagcacaacaacaataattagttaatgttaggaaaacatgtaaatttggatattttatttatacaatatacaaatacttgtcagattgataaaagcagaacaatgacagagacataactggaggaaaatagattggcaaataatttcataatcttgtctaacatgacatcaaaggcaaaaatcataattggagattgatagacttgattgtagatatattaaaacttctatacatataaaacagagaagagactcaaatagcatgaacctaataaatgtttgaaaattgctttttcttgattttttgaggggaaatgraattaatgaatcaataaattctgactaacattccaatatattactgtttgatggcttagtaaagcagaaatttttctgggatag

SEQ ID NO: 266176 - DNA, 585 bp, Homo sapiens
ggcattttatttcagtagaaattatttgcaacctccttgagtaatctctgaattaaaataacatgttaaaataagttatcactaataaaaatgaaataattcaatttctgtcttgaataatgcagtagataatygcagaggagtgacacaatgataaaatttggagagaaatgtttcctgttttatggaagttgatgatacaagaaagtttatttgcttccttccagagtactgctgctccttcaatgctggggactcagaggaagtatgaaaggaaaatgtattataattaatgaccaataatttttttaaagttttaatttagggaaaatattcaaggttgtaccagcctgtactataacaatcaactaacactaacaaagtagcaattttctgtcccaggccatattagcataattactagactctgaggaccaaatatctcatgggaaagagtaaccagtgtacccgtgaactttctagtctttctgttcacatccagcccctatccatgattctggccaatgcgttgactcctgttcactgctgttcctccagagagcactcactctgcttcatgtcctc

SEQ ID NO: 266177 - DNA, 593 bp, Homo sapiens
taccttgtaaatagcatagaaattttaactatagtctttaaaaaatcaaatttcattggtagggaagtgtaaatgtatggtttttttaaaacacaacattaaaaggttgaggttataactttcataaagatgaaatcactatttaaaagctgcacatagactgattattattgtttgtttgtcttagaagatgtatctttaaattgctggaagacatcatgaatattttcattgctaattattggtaaagtctttagtatatgtcagttctgtttgtgtgggtatggttgctgtagtgcggcttaaaaaaaaacagtgcttcatatcagtgaaagctcttctttggtttaatctgggttgtggttatattgttttttcatatcgtgtgagctgattgcaaggggttaacccaaaatgagccacttcacttaaaattattctatatgttagtttgtgaattckgttgttggtatttaaacgtacatcatagtttaatcatatcacataaagttgtgatttcaggaatactttatatttcttttgctgtttttgcttgtgacaattgactggtccaccacatagaatttcttagt

SEQ ID NO: 266178 - DNA, 596 bp, Homo sapiens
ctcacaatctatatgcaattttatcagtcaggcttccaccagagaaacagatgaaaaacagagaaacagaaccagtaggagatatacattaagaaacttattgtgaggaatgggcttaaggaatccacacactcgcagaagagtagggtggaaactctggggcaagagttcgagcttcagtccacaggtagaatttctttttcctcaggaaaaacctcagttctgctgttaagccctttcagatgattgaatctggaccactaagatrttgaggataatcttcttcacttaaagtcaattgattgcagatattagtcacatttataaaattccttcacacaaacacctaggtgagtgtccgattgattaactggggactatagactagtcaggttgacgcatgaagctgatcaccacatcacagtccacactttgcaactttagactcatgcacatttcctgaaaccatatttaatctcaaaataaagaacatagcaaagtcattcttccacctaatgcaatacagctatcttgaagcatgttttccagcccaaaacatggtaaccctttccctagaagaggatgcaatgtcattc

SEQ ID NO: 266179 - DNA, 555 bp, Homo sapiens
tccctgggtaggcactggttgtagctaaagcaggtgggtagatgtaatacccaatggtgggcagacgtcccagccttgttgaaggtggctgggaagccctcaattagatgtacagaggttttatcaggttgaaaggtgggagcacctcagctaccctgccaggccagcagggaaggcatctacttcccagcttcatttctatcccagtgttctggctattcaggttagacaggctcctcttttcatctgtaagaatgttgatattctaagtaaagaggagttgtgactctgcctctcatgaaagcctgacctggaaagtgctcttcctgtggggatgcaatcaccctgacttgttctaggaaagctgtctgtaggtgcatccatgttgcattcctgtgggagaagccccagctgtgtctkcagtggtgtactcatgggaataaggacaccgtctccaagacccttaatgatcagagaggttgcctccctgttgggatagaggttcagagcagcactgtaattgtgtctctgctgtaagaaacttcccattagtgg

SEQ ID NO: 266180 - DNA, 557 bp, Homo sapiens
gggcttatgtttaggcagacaacggagcagatgggtcttaaacagatttgggaagctagaatctggagaacataagaaacaactccaagaactctctcagtactgggcactgcatttccaggaaattacagctttagggccacagaaaatatattaagcaactgttataacaaatttccctctgcctccacctgggtggggtggtaggagggagcgataacttcactccagtatataatgtttgcagagaagggtaccaagcagcctctttattaaataaaacaaactaaataagcaatgtggttttttttttattrtactttaagttttagggtatatgtgcacaatgtgcaggtttgttacatatgtgtacatgtgccatattggtgtgctgcacccatgaactcttcatttagcattaggtagatctcctaatgctatccctcccccgtcctcccactccacaataggccccggtatgtgatgttccccttcctgtgtccatgtgttctcattgttcaattcccacctatgagtgagaacatgcggtgtttggt

SEQ ID NO: 266181 - DNA, 592 bp, Homo sapiens
tgtatttatttattatttttatttttttgagacaaaatctcactctgttgcccaggctggagtgcagtggcatgatcatggctcactgcagcctcaacttgctgggcttaagcaatcgtccctcttcagccacctagtagctggaattacaggaattacatgagtgtgtcactgtgcctggctagtttttttttttttttaatcatccatatataaggttttaaaaaacaaagtgaactatttggttattaatgtcctcaactgggattcaacacrtggtattgaaaatgctaacttgctatgtagtctcttttcccttttttttttttaaccttagtttccttttcctgaacttaatgaagattctaacttaatggtcaatttcagtaaacacagctgaggtggttggtacacctatttgattcccctttacattaaaaaataaatctaattaaataattgtatttcatatatgtaatcttttagaataataaatttattttggaagctggcagggcatcatttacatagaggataaataatgaattctaaaaatttttgcaaattacttcctgtaaaatgcaaaggagat

SEQ ID NO: 266182 - DNA, 600 bp, Homo sapiens
gttaaacagtagccacatctccttatccctctcttacattatttcacttgctttttttgtggcaaataggagaaaataagggaagtccacagtggtatgactaagttctgcttggtgaagaatagctactaaattctgagacattccagccctgcttaagaatgacctggatgattttaggactttaacttttttctattaggatataactgttaccatgttagttccataaagatgacaaaaaataagcaactacaaagtcctcatctatcatcaagaagtgcaaatgtttttcaagcaactgctatgtacatcacgttatatggctcatagtggtaaaagaccatctctgcagtataaatttgtaagagaacataaacacttaaaaaattaaaatgatgtcatatcccacacctacactcattgctcaccttccattsagaccacacttgcccatagagatagaaagctagaaaaaaactttacatttgtaatggatagaaagatggcagtatcatcatagctcaatcttcatggctcaatcagtgaatgttgactcggtagtcagaaacatctggcacaattaaagatttttaatgg

SEQ ID NO: 266183 - DNA, 606 bp, Homo sapiens
aagaatgacctggatgattttaggactttaacttttttctattaggatataactgttaccatgttagttccataaagatgacaaaaaataagcaactacaaagtcctcatctatcatcaagaagtgcaaatgtttttcaagcaactgctatgtacatcacgttatatggctcatagtggtaaaagaccatctctgcagtataaatttgtaagagaacataaacacttaaaaaattaaaatgatgtcatatcccacacctacactcattgctcaccttccattgagaccacacttgcccatagagatagaaagctagaaaaaaactttacatttgtaatggatagaaagatggcagtatcatcatagctcaatcttcatggctcaatcagtgaatgttgactcggtagtcagaracatctggcacaattaaagatttttaatggtccctgcccacaaaggagattaagacatcataaggaagaaaaacagaaaaaaaaatacaataaatgcaaatgcacctaggtaaatcacagaattaaaagaacaaagcacgttaaaaggaggattatgtttgtgtaagagaaaatgaattaattttaaaccttt

SEQ ID NO: 266184 - DNA, 564 bp, Homo sapiens
ttttaatcaattgattaatatatattttttccataagttattgggtacaggtggtatttggttacatgagtaagttctttagcggtgatttgtgagattttggtgcacccatcaccagagcagtatacattgcaccatatttgtagtcttttatcccttgcttccctcccactttttcccacaagtccccaaagtccattgtatcattcttacgcctttgcgccctcacagcttagctcccacatatcagtgagaacatatgatgtttatttttccattcctgagttacttcacttagaataatagtctccaaactcatccaggtcactgcaaatgctgttaattcattcctttttatggctgcatagtattccatcatatatatatgacaaaggactgatatccagaatcaacaaygaactcaaacaaatcagtaagaaaaaaacaaacagtccccaaaaagtgggctaaggacatgaatagacaattctcaaaagaagatatacaaatggccaacaaatatatacataaaatagatacataattatatatataatatatata

SEQ ID NO: 266185 - DNA, 563 bp, Homo sapiens
cagctgtgtgtctcagtgcctgttctggtggaggtggcagggggtgcaatggactccatgagagttcttagctttagtggtttaatgctctatttttgtgctggttggcctactgtcaggtggtggcgctttccagaaagcatcagctgtaggagtatagagagggactggtggtgggtggggccctagatctcccaagattaataccctttgtcttctgctascagggagggtagggaaggaacatcaggcgggggcaggactaggcatgtctgagctcaggctctccttgggtgggtcttgctgcggctgctgtaggggataggagtgagattcccaggtcactggagttgtgtacctaggaagattatgcctgcctctgctgagccatgcaggttgtcagggaagtgggggaaagccagcagtcacaggcctcacccagctcccatgcaaaccgaagggtcagtctcactcccactgttccccgcgacaacagccccaagtctgtttccaggcagaggggaagacaggcttgaaatctcccgcctcccagctgtgagaga

SEQ ID NO: 266186 - DNA, 490 bp, Homo sapiens
tagtcagtgacaccgccaagactagaactcacatctcagcaaggcattcggtattgctaagttccctgaccatttcgtataataactattacaaatcttcaccactgctttcatgaacctcataatactgcctccctatcactctggcccctgcttcacagaaaattggaagctaccaagcatgaactccagtttccacttttaaacttcctcatatctcatctcaaaagaagaatatcagaatattattacccttcagggtaatcytgccatttgtcatctgtgtcacactgtctcttttttttttttttttttttttgagatgtggtcttgttctgtcacgcaggctgaatcgcagtgatgtgaacatggctcactgcagcctcaacttcctgggctcaaacaattctcttgcctcagcctcctttgcagttgggaccacaagtgcgcgccactacacctggctaatttttttattttttgtagagac

SEQ ID NO: 266187 - DNA, 495 bp, Homo sapiens
ctcctcttttctctttcctcaccagtcttccgtttccatctaatgactagtgtcccacattggacaagataaaatggttgaccagttagagacataggaaaaagtggaatattgaatttgcattgaaagggctgaacttgtgaccttatgttatcttccrtataattctaatttctacaatataaggttttaatttactcagttcagaaaatctaattgtttgacagtaaagtttggacctatttatataaagtttggaggaaatatgatcttatcaatatgcactatggaaaatgtcctttttagtctgtgaatttagagctatacctactgcttgaatgaagatggtctaaagatttaaaagacatttagggttaataagttttcatggcaaaacatttaacatttttaaactaaattcagatgagttactcattttttgtgtaccttaattccttccaaatactcttctgtcagaactacaaagttaaatct

SEQ ID NO: 266188 - DNA, 495 bp, Homo sapiens
ctcctcttttctctttcctcaccagtcttccgtttccatctaatgactagtgtcccacattggacaagataaaatggttgaccagttagagacataggaaaaagtggaatattgaatttgcattgaaagggctgaacttgtgaccttatgttatcttccatataattctaattkctacaatataaggttttaatttactcagttcagaaaatctaattgtttgacagtaaagtttggacctatttatataaagtttggaggaaatatgatcttatcaatatgcactatggaaaatgtcctttttagtctgtgaatttagagctatacctactgcttgaatgaagatggtctaaagatttaaaagacatttagggttaataagttttcatggcaaaacatttaacatttttaaactaaattcagatgagttactcattttttgtgtaccttaattccttccaaatactcttctgtcagaactacaaagttaaatct

SEQ ID NO: 266189 - DNA, 616 bp, Homo sapiens
ttctagaaagagagaaaccaataagccttgaatttgaatttgagattataggtattttgaagttgagaagcgtatctatgtccctagtttttctaaatatagttttcattgtccatgttcagaagtcaatgattggagcacaagtggtgacctatgcttagtagctctaaaagactaaaattaggagttgtctcaataggcaaagacatgatggtgattgtgttgtgtgtgcaagatgaagagatggggtgggagttgttgggggtatagttacctgttccacrtgccccatgagaaaacaaacacttcttgcacatcttactgtccagaaaattgagaacacaaaggaataaccaaatacgctttacaaaaaataaaaagcctccgtgtttcctccctaggcgagtgcccttaaaatcatactcaatcacaatgtttacattatttactatataaagtctattaaaacaaatattatccacctaacacatatatcttcatattcataaacctgagattttctgtgtagtgacatctacctatgttgattgactataattaattgactccttctgtattttttgacacaatacagagtactgaactagcaaaagac

SEQ ID NO: 266190 - DNA, 611 bp, Homo sapiens
ttcagaagtattttactcgttgccttttactatcaatgtagtgaccatgtgttttgaacagattagtattatttaattcctttggttagacataggaattaaacttcttttattctcaaagtctcacatacttgtaatctcctgatgggctcttcttacccactgcacagataaacccaattcactgagacagtgttattgcagtaaagaaagagtttaatgcagggctggccaaacagaaggacaagagtttattattactcaaatcagcctccctgggaactcagagggaggctaaggtttttaatgggtaatrtggtggccaggaggatagggaattatcctgttgctgattggttgaggatgaaattataggggtacggaaaaacggtcttcatgtgctgagtccacccacctctgggtggaggccacaggaccggtttgagtcatgagtcacgggtcccagtggagtcagtctgttgtcagaatgaaaaattttgaaaaacatctcaaaagaccagccttaggttctcaatagtgatgttatctataggagcaattggggatgtcacaaatcttgtgacctctggccacatgactccctagaagca

SEQ ID NO: 266191 - DNA, 588 bp, Homo sapiens
tattatttctgtagtaacttgtcttctaaaktaagaataatgtttgtattctcaaaaggaatagggtgcaaatatttccacatagttttagaaatcagatgctgctctctctatatttttctgcctcttacctttatttttaagtgttgtgggctactcctgttttcagaatgttggctcctgtcaagtgattgctaagggctagatgtggccttgtggaacttggataaacattttcttctctgcatttggttgaagtgtttatcagtgatctccctgtcttctttgtggccaggagcttggctaaaaggattgtttagcttgaggtttggggggtcagatcaatcttctgaggctttctgacctggcttatcgctgtggttggatattagacagtatcattaagctaataatcagaccctataactcagaatttagacatgaagaaattcagcttcttttacttatttaaaagaggataatattctccggttctgggtaatatggagtgaacacacagcactctttctttagaattgaatttaattataaaatctggacagaatacatggtcaccagctgcaggca

SEQ ID NO: 266192 - DNA, 568 bp, Homo sapiens
gaggaagttatgtttaaacagaggtctagataaatgaggtagaaagccaagcaaatattggggttgggggggttggggagaagattctgggcagaagtaagagcaagtgccaaggctctgcagccagagacagtttggtgagtctgaattagtagaaaggaggccaatgtgaatgctgtgcagtaagccagaaaaacagttagaaataaggctggagatggggtgatgagtatgtgcatgcttggcatttacttttaacataatttgaaasttctctaagttttgtatgcactaaagtgtcctgcattcttcctgtgtctccaccagacactacatttcatttcattcagagacaccactttttttcctcttggtctagcagtaagtgtttatttctgtttttctctcaccctcttctactgatctataactattggttcaaatgtttcttctgtgcagatccttatctttaatgtcacctttttttcccccaacttgtatatttgcctctttatctcatcaacgtatctaactggacgtcctgccatctttaggtttcgacaggtct

SEQ ID NO: 266193 - DNA, 487 bp, Homo sapiens
cttctgaaagtcattgagctacagccatattcagaaaccacgctcgcacatctgacagccagccaattcctaaactttttggacctacaaattctccacctccagaactccttgatttctaaaaccccatataagataaccattatgagagacaacatgctttgaaattacttggcaagaaatgttatgttttctttctttttgttgttgttattgagtggtatctgttattttggtagttgctatgaagaactaatagaagccagaaagaggtcccaaggaaaagatgaaagataaacctggagaatcaccggcagccagataataaaagaccatctaggctatgttttataacttttagctatgtatcaagattaatgagaagccattgaaggattgccaggtgrtgtggcagggactgttatgataaaatttacatttatataatcttattttagcttcagagtagatatagaattgtgaacat

SEQ ID NO: 266194 - DNA, 605 bp, Homo sapiens
gggttggtttctggtgtggtttctcttcctggcttggcgatggctgcattctcactgtgtactcaggaggcctttcctctgtatgtacacagtgggagagagacctcaggtgtctatycctcttatacacacactattaggccctaatcctaatactggattagggccccacccatgtgacctcatgtaaccataattacctccctaaagcttctttctgcaaacacagtcacacagggagtgaggccttcaatatatgaatttgatggacacaattcaagccataatgatttcctaagatagttttctctatctttagtctctcattactaacttttctttggcctaaaaattgtccaagtttccttaactaaaaaaaaaaaaaaaaaaaaaaatttaaagataatgttttctttcattagccctttccttgaaacgccctctgtactgcttaattgtcatttcttagaagtgaagtcaaactttcctcatgtcatattcataattcccttgctataacaatgcatctgctcccacaactctactgaagtggctccttttatgttgatttgctttgttcatcaaatcaaaaagtttcttttcca

SEQ ID NO: 266195 - DNA, 557 bp, Homo sapiens
cacacactattaggccctaatcctaatactggattagggccccacccatgtgacctcatgtaaccataattacctccctaaagcttctttctgcaaacacagtcacacagggagtgaggccttcaatatatgaatttgatggacacaattcaagccataatgatttcctaagatagttttctctatctttagtctctcattactaacttttctttggcctaaaaattgtccaagtttccttaactaaaaaaaaaaaaaaaaaaaaaaatttaaagataatgttttctttcattagccctttccttgaaacgccctctgtactgcttaattgtcatttcttagaagtgaagtcaaactttcctcatgtcatattcataattcccttgctataacaatgcatctgctcccacaactctactgaagtggctccttttatgttgatttgctttgttcatcaaatmaaaaagtttcttttccatttgtgtaacccttttggaaacaactgaatctattgatatttatttttaaattacatttctatacatctcatggtaatg

SEQ ID NO: 266196 - DNA, 529 bp, Homo sapiens
ttgaaatttcacaaacatatcatgtttttgtttaactttccatttttgtatagattgtattactctgcctagaacatgtataataatgtttgtcacatggcagtgtagttgcttacatgattaacatgaatactagataggacagcttgagtggaaaaygattcatatttacctttctaacacctgaacataacacaatgtccagtgaatagtcggtgcctgatacatgtttatagatcatggtttattttccatcattatgagattcaggaaggtcatgtgattaactaaatacttcatagattaaaagatcaatattaaaacacagttcttatcattcttagtttgaaattctttgagtatacctgtttcccaaacaccaacagggcagaagaatgtctcagaaattaatgcataaagaaccagcagtagattctctgaactttctcaaactcaagccatttgtcactaaggatcagatagaggggaggattgaataagtaaaataatcaacttcatggctgtttgt

SEQ ID NO: 266197 - DNA, 575 bp, Homo sapiens
agggctttaagggacatatagataagatgttccaacagtcatataggaaataaatacaaagaacaatatggcatatctacaataatgacagatgaaaatcttttgtgtttgggtcgcatttcatcaataattgtgttttgaacctagttacctttacccrtgtcttacccaatattgcatacctttctcaatgttcaagaagtttgggttttgttgttgttgtttgagacaaagtctcactctgtcgcccaggctggagtgcagtggcgtgatctcggctcactgcaacctccccacctggcttcaagcgattctcctgcctcagcctcccaagtagctggacttacaggtgccctctaccacgcccggctaatttttgtatttttagtagaggcggagttttgtcatattggccaggctggtctcgatctcctgagctagggtgatccacctgccccagcctcccaaagtgctgggattacaggagtgagccaccgcgcccaacctgaattttgttttttgttttgttttgttttgtttttgttttagaccatgaaaaaataaactctatcagc

SEQ ID NO: 266198 - DNA, 594 bp, Homo sapiens
agaatttttaaaaatgtttttgttattcttgccattcactagagtatgtagtataggagtcgttaaacctacaacaatcaatcaattcttacaataacaggtagttaatctgtgaaaaagaaggctgaaatctacatgatacaaattatatgttttactctatagaaaggaagtttagtttgggcgtggaactgtggttagtgggtagcacttttacaacaaacttgagttcaaatcctggaaccacaagattccagctggtgactttggcaaatcacttaattcctctgaactttagttttccccactttaaatttagaattgtagctatctatatcccagagttattggaagcttgatggctcacaatgaatacaaagcacttaatgcagtgattaaggaattattattatatcaaaatattaccrgtacaaaatcatgaattaactattgtagagagaagagtataatattgtattaaagtggtatgaaaatcaaacacctttctaagattttactattttttaattttttctaattataaagaatgtagatccttaaatagaatgaaatatttttaggaaaaggctttag

SEQ ID NO: 266199 - DNA, 595 bp, Homo sapiens
cagattgagatacttgaataaccatctcatggtaaatagtttttcttgaatgaccaccctattccttttaatttttctaagctgaaattctaagttattcaaatggtaaaattatgtttagagaaatatgtaattatatagttggttgggataattcactttgaaaattgacagggatgatatatatgctacaggctcaaatctaaccagtcttctaacagtgtttgcaacatacatattcmttcccactcttccttcctcttttccttctgcttttcaagtgtctgtgatccagaaggacttgtccatatcctcttgagggagcatgtcgagaaaagcaaagctatggcagataattggagacaagttatttttaaaagcctaatgaaccttatttttatctactgatggagccctttcaaaaatacacacacgcacacacacactctctctctctctctgtgtgtctgagagagagagagagagaaatatttgccaatataatatgtaacacagagggaaattttaacaggtttcattttatactatattactgatcaaaaatgtccagacttttatctttcttccataatta

SEQ ID NO: 266200 - DNA, 644 bp, Homo sapiens
tatattactgatcaaaaatgtccagacttttatctttcttccataattatgcttcttttgtactgtttccacattttccccacattccttctttttctttacttaaggtaattctccaccaacattataacattttatttttgttcatcattctccatttcttcaacagggtagatcaattagggagaatttataatatacatgatacggtttggcgttgtccccacccaaatctcatcttgaattatagctcccatgattcccatatttcatgggaaggagccagtgagaagtaatttaattatgaggtaggttttctcatgctgttgtcatgatagtgaataagtctcacaagatttgatggttttataaagggcagttcctctgaacacactctcttgcctgatgccatgtaaggcatgctttactccttcttcaccttcctccatgattatgaggcctcttcagtcatgtgaaactgtgagtccattaaacctctttttctttataaattgcccagtcgggtattttcttcatagcagtatgaaaatggactaatacagtaaaytggtactggtatagtggggtactgtgatcaagataccccaaaatgtggaagcagctttggaactggttaacaggca

SEQ ID NO: 266201 - DNA, 650 bp, Homo sapiens
tatttttcaaatgtgtacattcagttattaaattggtttataccctacaaaatattttgcatattattttcacttaaaaagttattttgatgcctatacttgttagaaaatatgcatgaacgtacatttttttctagtcctgagctatctcagtgcaccataatttatgtaataaatactctgcagatgggcatttagactacaaccaatgaatttccattataaacaatgttgcagcagcaacatatttttggaaatctctcttgatcatgggaatattcttatatgataaatttccaaactaaaattgctgtgtcaaatagtcatgctgattttgcttctaaaacattatactcatttatatccttaacattataatgtgtaagatmactatcattataatttcaccatccacaacttacaaagtaatatttaggttttagtttctgatttttgtttatccctagtaaatctggacctatgtttccacatttatttttgatttttacaaattttctctgaaatgccaacattttttgtctaatttttaaatattttttatcacttcccattgctttatattacatgaataaagtttattttaaaacttttctaaagtatagtttatcccagatgataatattagcata

SEQ ID NO: 266202 - DNA, 634 bp, Homo sapiens
atgagaatgtactctgtgtcatatacattcaacacaggtgagtcacattacatggactgttgatctccaacctgctacatctcctgggtaaagtaagagttaccccagaactaactttgaaataactcaagattttactcccaagaaaaattttctagtccttcaaaaggaaaaaataatatcagaataagttatacatgacaactaagcctaacaattaccaacataacagttaatatgaaggtttttgaaaacacaaaagctacgtakgttcatcatgtacatacacacacacacacacacacacacacacacacacacacatccaaagaacacagtgcattcaatactttatgattcattggtagaggaagatcccatttataaattgatttcagtagactatgcattttataaactatataacatatcattgccaaatcactagttatgtatacagttgtgttattaggagtaagaggctgatataaaaaacagagataggccaaacagaaaaggggtatggatcagagaagatatacagaagtaagcaaacaagttattgtgtacccatttgatgtccctaaggcctggaagagtgtaagaatgaaggaataagcgttcttgtacatat

SEQ ID NO: 266203 - DNA, 516 bp, Homo sapiens
tgcatcacatgcctactcacaaagcaatcattggcaaaaaaaaaaaaaaaaaaaagaagaagaaaagaaaaaataaaggtattctctctcttcagcacaacagggcccatctctagaccttggatttgcttagcttgaagtcccatcaaacctgtaatgagaactgtaccaattttctaactctgggatgtttaaaaggtaaatttcattctccaatacaggaaatacagttatatttgaggatatctragtagcatattttgtaatgaagctctttctattgtaagaggaaaaaaacatgcttttaaacaacattttcttctcttataatgcactttattttttttattacaggaatggtactgcttcctttagaaaactaaatattcagaaaaataaaaagaagataataaaagttatatgcaatttctcaccaccgttaacattctgaaaagctcttgctactttgttttctgtgtatatttgtttatcacatattcaattggttgctaatga

SEQ ID NO: 266204 - DNA, 631 bp, Homo sapiens
ttaatctcctgccccagatggctgtcctcaagatccattaccatctgaggaatcctgggacagcctgtaaccaggtatttctttcacctcctcagttgtaattgggagactttgctcttttcacatgcctttcctgttatgcctgaaagtcccacacccttattggggrgtgacatattagccaaagctggagctattatctatatgaatatggggaacaagttaccatttgttgtcccctacatgaggagggaatcaaccctgaagtctgggcattggaaggacaattcagaagggcaaaaaatgcccacccagttcaaatcagcctaaaagaccccacctcttttccttatcaaaggcaatattcctttaggcctgaagctcgtaaaggattacaggatattgttagacatttaaaagctcaagacttagtgagaaaattcagcagtccctgcaacaccccaattctaggacgacaaaaactgaatggtgagtggagattagtgcaagatcttagactcatcaatgaggcagtaattcctctatatccagttgtacctaaccactataccctgctctctcaaatacccgaggaagaagaatggttcactattctggacctgaaggatgc

SEQ ID NO: 266205 - DNA, 631 bp, Homo sapiens
ttaatctcctgccccagatggctgtcctcaagatccattaccatctgaggaatcctgggacagcctgtaaccaggtatttctttcacctcctcagttgtaattgggagactttgctcttttcacatgcctttcctgttatgcctgaaagtcccacacccttattggggagtgacatattagccaaagctggagctattatctatatgaatatggggaacaagttaccatttgttgtcccctacatgaggagggaatcaaccctgaagtctgggcattggaaggacaattcagaagggcaaaaaatgcccacccagttcaaatcagcctaaaagaccccacctcttttccttatcaaaggcaatattcctttaggcctgaagctcrtaaaggattacaggatattgttagacatttaaaagctcaagacttagtgagaaaattcagcagtccctgcaacaccccaattctaggacgacaaaaactgaatggtgagtggagattagtgcaagatcttagactcatcaatgaggcagtaattcctctatatccagttgtacctaaccactataccctgctctctcaaatacccgaggaagaagaatggttcactattctggacctgaaggatgc

SEQ ID NO: 266206 - DNA, 573 bp, Homo sapiens
agccatcaaaaaggtgaaggagaaaaggcagaaggaaaccgttgggcagacgctgaggccaaaattgctgccaggtggaacctcctattagaaatacgtatggaagsacccttggtatggaacaaccctttccaagagattaagccccagtattccctggccaaaacagaatggggactttcatggggacatagtttcctcccctctgggtggttaacaacagaagagggaaaggtactcatgccggaagccagccagtggaaaatacttaagacccttcaccaaactttccatatgggtattgagaacactcatcagatggccaaatccctatttgcaggaccaaatctcctctggaccatccagcaagtggtcaaagcatgtgaggtgtgccaaagaaataatcccttggtccatcataaggctcctctgggggaacaaagaatagggcactatcctggagatgactagctgttagacttcacccatatgcctaagttaaggggatttcaatacttgttggtctgtgctgatacttttacaaattggatagaagccttcccctgcaagaca

SEQ ID NO: 266207 - DNA, 526 bp, Homo sapiens
ggttaggaatggccactgctacaggaactggaatagcaggtttatctacttcattatcctactaccacacactctcaaaggatttctcagacagtttgcaagaaataacaatatctatccttactctataatcccaaatagactctttggcagcagtgactctccaaaactgctgaggcctagacatcctcactgctgagaaaggaggaccttgcaccttcttaggggaagaatgttgcttttacactaaccagtcagggatagtacaagaygctgcctgggatttataggaaaaaggcttctgaaatcagacaatgtctttcaaattcttataccaacctctggagttgggcgacatggcttctcctttttctaggtcctgtgacagccatcttgctattactcaccttcaggccctgtattttttcacctccttgtcaaatttatttcctccaggatcgaggccatcaaactacagatggtcttacaaatggaaccccaaatgagctcaactcacaacttctac

SEQ ID NO: 266208 - DNA, 612 bp, Homo sapiens
ttacatatggagccttcagattcatagccatccaaggacctttcattatgtgtcggtttcctaaatgcaggggagcaaagctcctcctggtcttgcttcacacatcaccagaagcagtgaacacatgcccctctgcctggcaccctaatcagctcagcttaggaggcactgtaatctgcctttgatggaatggaggatcacacaagaagagaaacctatgttgaagcacgttctcaagatatggacatacatttcaagctacaagctaagcaatagcctattatttcccctttgctagcagtaktttagcagaacagccaacatacaggcttttcaaatagaccgctagagattcctagatcagctcttggtgtgggaactactgattgcttcttgcaacatttcatgctgtgtgagtttgaatactaagggaaagagcttatcctgcattctgaattatctgtgcaatatctgtaccagcatgtttgtggtgtagaattatatgagaaaaaaaaacatataactgcaaaaaatgtatctctcctcattaggctattagctccttgacatcagggacaatgtcttattcatcattctatttccaaggaaact

SEQ ID NO: 266209 - DNA, 495 bp, Homo sapiens
gttatactttctgaccttctagggctgcataatattgagggtctacagtttcaagtaacccaagtttattgacaccacagaaaagttggatatgacagaaatatagattcttaaccatgtagagttgagaagcctttggagatgatgtaatccaacctttctcaccatgctggcctccccctgcatcaacctccttagaaagctttctgggaggaggagcatggagactcaccagggaacactctccatggctgtgcaattttgctaagagaacttcctttatacactgagctgcaacttgccccaccagaatatccatccattcattgatcccctctctgycttctggagctgaacagccagctgttcagccgtgtgcctagcaccatggctctcttcacctgtcagaacatacccagagctgcttataagtttgtgagacaaatagcctgacagcagttggagggagtagacagaagggcctgatgaagaaag

SEQ ID NO: 266210 - DNA, 567 bp, Homo sapiens
ctgccttctggagctgaacagccagctgttcagccgtgtgcctagcaccatggctctcttcacctgtcagaacatacccagagctgcttataagtttgtgagacaaatagcctgacagcagttggagggagtagacagaagggcctgatgaagaaagagtggatggggcacatattggttttggaagtgagtgttcatcagtttcacataatgttaaagcacaaaagagtttttatttattttgcaggagtaawctagctttagatgaccaaaaaataatgtctggtcttactgagatataataatttctaaaggaaaagatcaaagtacatattaggtaatggatgtattccatgtccagatataggaaaagaaatttcttggtaccctccactaactctattccaaatctagagtgtggggcctttttagacatgaccctacttggtaataagacttctatggtgttctaacaactctgtgctcttggatagggcctggagttgaactgccttacagagaagatgatgatggtgagagtataaaatgctatcacccaaattacct

SEQ ID NO: 266211 - DNA, 335 bp, Homo sapiens
gagatctaccctcctaacaaactttaagtgcacaatatagttaactataagtacaatattgtacagcagattttatagaagcttctcaaaaagcaatgtcttttttcttccacagcttatatattggtctattgaacatgaggggcccattgcgtgtttctggagcagccagttgctcccaggccctcctgtctttcctctgtaggtgaagtcatcctggaagggtgaaggtcacaatgactagagtggctcttgggwataatgcttaatcgacaacagccacttacctcatattaaattccagccacaattctatgtgctatctggccatgacc

SEQ ID NO: 266212 - DNA, 611 bp, Homo sapiens
tggctcaggaggacagactaatcattaaaaattaaaggtaaatccatctttggtgacgtaccccttaaccatataagaaattttaagaatttaagtagtttaaggtataagatacacaaggtttattcaattttgttcaccagaaggcagctaagggagtctgtgggtcytaaaaggaacaaattcatcaatcatttagaagaaagaattagtttataatctcatctcactccctacaatagagcaaattctagatatatggaagagataaatacaaagttaaatatagaaaaacagatgcaattattcatcaaacatttaggcaaaaaatgtctaaatgtggaagcaattggagaaattacagaataaaaggttgtaaatatatatatttgtggtacgtaaaaactttaaatgtccctgattaataaatacaatagtaattaaaagtcaaacaatgtattggagaaaattgtttgctatattggaaaggattaccattttttatagaagggtagttaacttactttaaaaagaaaacactaaggcctgataagacagtaggccaaagacaagaacactcttaactaaccaaagagaaaacatgaccagtt

SEQ ID NO: 266213 - DNA, 573 bp, Homo sapiens
ctgataagacagtaggccaaagacaagaacactcttaactaaccaaagagaaaacatgaccagttgataaaaatatagaaaatgcttctatgtcttttttgttctcagctgtattccttgcacctctcatcccctgcacctagcatctttactaagaacgaaataaatatgtattcactgattttaacaaatcagtcaataaatagctgrctgggggaggagccaagatggccgagaagagacagctccggtctgcagctccccacgagaggaatgcaaaagacgaatgatttctgcatttccaactgaggtaccctgtttatctcactgggactgacgaggtggttggtgtgacccacagagagcaaggaaaagcagggtggggtgatggttcacccagaagctgcacaaggcaaagggacctccttcccccagccaagagaggcagcaagaaactgtcctacccacccagggtactgtgcttttcccacagatttttgcaatccgtggatcaggagattcccttgggagcctacaccaccagggccttgggtctcaagcacaaaactgggc

SEQ ID NO: 266214 - DNA, 620 bp, Homo sapiens
atgatatggagcaagtattggaaatctacaatgatctatataatggcattaaaactatgtgatacatttgatatgccaaaaaatattcctgagtgaaaattttagtagaagcggtgtctggataagcaaccatggtaatgatgtttttgttcttaataattcactttcttaataactgtaagaaggttatactttcctgtgcagtgggtcctgggcttagccrtgtgacttgctttggccagtggaatgtgaatagatgtgctgtgtgctttagccccatagaagctttaaaggcaattacatgattggatttagtctcttgcacttttcctctcttccatgagaacagtacatcccagataggggctattccttatgcctggagctcagaaagagaagacagcaggtcaacctgcagaccacctataatgggatagggaaacgaatctgttgttacaagtccctggggcttttagctgtttattgcttcagcaaagtctgactaatacaaaaacactgtgtgtttaatatttcaaagtatgatatttccagaaatgtcttcataagcattaagcatttaataattttcaaagtttcaaatataaacaagtgcctctctc

SEQ ID NO: 266215 - DNA, 607 bp, Homo sapiens
ttattttcaagcaagatggaggacgatgtctaggtgtcatgggaaattatcatgacttgtcctgaggaacttaaggtatctcagttaaattaaataaaatttttttactcgtcaacttagcctactttttacttttcttattgaaaatcagggagaaagccatttgggaccaagcattgggaacaactaatgaagatctcgattgaggaacaatttctatccctgtaaattgcattctttcccttactagctcattcttattctgtccaattaatgtgctcttcattacctcagaataataagaatcagctctgttaccattattctagtgatgagttcagtggctttgtctgttggcaggggtaacagcaaagaccccctaatatttaaagtacagaatgaaaccgtaatagatagcaggaaataacattcaaaatgttatttggagacaatgtttttcttattccagaaatgagaataagaatctctctctaaactcactgstgccaataatatatctaaagtattacataggagattttatcttgtggggggggaacctaagagccatactttggcactggtttgaggtacagcaataagaagt

SEQ ID NO: 266216 - DNA, 628 bp, Homo sapiens
ctctgttaccattattctagtgatgagttcagtggctttgtctgttggcaggggtaacagcaaagaccccctaatatttaaagtacagaatgaaaccgtaatagatagcaggaaataacattcaaaatgttatttggagacaatgtttttcttattccagaaatgagaataagaatctctctctaaactcactggtgccaataatatatctaaagtattacrtaggagattttatcttgtggggggggaacctaagagccatactttggcactggtttgaggtacagcaataagaagtagactactaagttctctggcaagtattaaaatgtacagtcagtttataataatttgatactaatgtatattggaatatatgcatttatttaaccagatgttatttagcatctactgaacctcttgcattctactaggtaccaggaatacgatggtgaatgagatcgacatagcttctgcctttgcagattcttctgagaatgatgtgacctcagccctcattaaccatgtagtccagtgggaaagacatttaagtagctaggaaataaaagattgctatggaggacagcaagagcaactcaactagacaaagagtgaaccaaggaaagga

SEQ ID NO: 266217 - DNA, 607 bp, Homo sapiens
ttattttcaagcaagatggaggacgatgtctaggtgtcatgggaaattatcatgacttgtcctgaggaacttaaggtatctcagttaaattaaataaaatttttttactcgtcaacttagcctactttttacttttcttattgaaaatcagggagaaagccatttgggaccaagcattgggaacaactaatgaagatctcgattgaggaacaatttctatccctgtaaattgcattctttcccttactagctcattcttattctgtccaattaatgtgctcttcattacctcagaataataagaatcagctctgttaccattattctagtgatgagttcagtggctttgtctgttggcaggggtaacagcaaagaccccctaatatttaaagtacagaatgaaaccgtaatagatagcaggaaataacattcaaaatgttatttggagacaatgtttttcttattccagaaatgagaataagaatctctctctaaactcactggtgccaataatatatctaaagtattacataggagattttatcttgtggsgggggaacctaagagccatactttggcactggtttgaggtacagcaataagaagt

SEQ ID NO: 266218 - DNA, 574 bp, Homo sapiens
aactcactggtgccaataatatatctaaagtattacataggagattttatcttgtggggggggaacctaagagccatactttggcactggtttgaggtacagcaataagaagtagactactaagttctctggcaagtattaaaatgtacagtcagtttataataatttgatactaatgtatattggaatatatgcatttatttaaccagmtgttatttagcatctactgaacctcttgcattctactaggtaccaggaatacgatggtgaatgagatcgacatagcttctgcctttgcagattcttctgagaatgatgtgacctcagccctcattaaccatgtagtccagtgggaaagacatttaagtagctaggaaataaaagattgctatggaggacagcaagagcaactcaactagacaaagagtgaaccaaggaaaggaagacttctagagtaagtgaggataagcttatttccaaaggatcaataaaagttatccagtacaatagagggatgaggacactgtggtcaagaaaagtccaggaataccatgttaaaagtgagatgggacat

SEQ ID NO: 266219 - DNA, 427 bp, Homo sapiens
tggttgctgcaccctttctcaaccaaatatatttgaagagatgtttcaacttgctcgctcctcattcctaygtatccttttctccctttggcatgattccccactcctcctccacttccagtttcaccttatatgtccctcagagaggccatctctgatcatgctgccaaaaataggctttcctcttttagtctctttctcaaagcatttgctcagttcccccagatgaattactatgacacattttttttctgtttgattttctaaatggtatgctgattgtttgctctctcaccagaatataaacttcatgcagacaagaaccatgcccaacctccccactattttattgtctctgatcagcatagaccctctcatgtaggagaggctcaatgtactatgtgatgactgactgagcatatgaatg

SEQ ID NO: 266220 - DNA, 612 bp, Homo sapiens
tttctgtttaaatatcttttgcttcagttaataaatacagaaggtatttgaagtaaacaagataattcttcttaatgcccagtgctgtttgctaattattgtttcaatattaggattatagtgacagtcatagaagacaaggctggggtggtagttttaaatcttgcacacaattttttggacaattttttacttgaaaggtcagtcctcctccctttgagtgacagctacttaatggcttgcttctaatatggccaaagagaccrtgtatgaattccaagactaggccataagatgaattgtgtcttcctgcctggtcttgcagttagagcccacgttctaggggaaggcagctgccacatcttgaagactcttaaacaaccatgtggagaagtccacatggcgaggaactgaggcctcctgccaacaaccaggtgaacaagctgctgtggaagcagatcttgtacctctaatcaagcttgcaacaggggtcaatgaactatagtgcataggccaaatccctctggtggcctgtttttgtatagtcctaaagcctagaatgattttacatttttaaaagcaggtgaacaaaaagaagatgatatgacaaag

SEQ ID NO: 266221 - DNA, 623 bp, Homo sapiens
ttccataaatacctccattatggttgatttcaaactaccagtgtgatgtcactgaatgcagcattaggaagagatgcacacagtctgttcttccaagtgtacatgtgtgggctccagcaatcccctgtcttcaactcaacttggagagggcactgttttgttttaatcatgtaagtcccttccactcatttgacttctcaattctgtaatcagattaacaatctaaataaggtttaattatgcttcacatgtataccaccctactacacctctagcatcaccactcagaatcattaagtagctttcttgcaagggtctacataatttggcctttcctaactcttcagaatcatgtcagacacactattccttttccaaacccccaactttcattccagctatctttttggcttatcttttgggtctcagcttaatcaattctacaggaaagtcttcctgagcttttgtccaactccagtacacagaatatttctttgttatattttttcacacaaacaggtttctttctcaaagtactttcccatcactcaattttaagagtaattattgggttaatatstattgtcccatagcatgtaaaatctgctgcatcagggactgca

SEQ ID NO: 266222 - DNA, 586 bp, Homo sapiens
caatgctacagacaattcaaggaagctggggactaagaaaagacctctgaatttggttaccaaatggactctccaagatagttttctaaatgcagttcttgtcaattgctaaggacagaagccggactctaaagaggtgttagaagctacaagtgaagggactgtatgaagatgacttcagaaggtttgggagatgtcaaggtgaaatcacacaccttagcctcatcacctaacaattgtgcatgccctccataaaagccaaaaaatatgtgctgtgcttgctggacagtgtttcctgtgctgattgtactaaaaagctactgtgatagattaaagtctattgcatctgtgaataaaaaaagagtaagcaactaggaaactgactacaatatggtcagaaagatatgctgttatcacctaagcccactgagattttaagaagaggggagaacggaatgtgtcatgaagtggtttctaaggctgtgttaacttcctaggactgctggaacaaagcagtgtaaagtggyggcttaaaacaacagaaatttatggtcttacagttctggaggctggaagtatgaaatca

SEQ ID NO: 266223 - DNA, 447 bp, Homo sapiens
gttccatgtctctctccccgcttctggtggttgcctacaacccttggcatttcttaayttgtagatgcttcactccagtctctgcctccatcatcaaatggcagtctccctcactgtgtgtcagcttcttgtaaggaaaccagttataccggattagatccaccccaatggcctcgtctcaacttgattacatctgcaaaaatcctatttccaaataaggtcacattcacaggtaccagaggttaggacttcaacatcttttgggaagacacaactcagcacataacaacagtcaagggattggagcagaatctctgggtaaatttttcattgaaagctcacaatttaaattggtctcataactgtcaattgtatatgtggtacaataatgaaaacaaagtcattggttataggtggttactaacctattagcttagtatatggtcc

SEQ ID NO: 266224 - DNA, 538 bp, Homo sapiens
ggtaggttggccaagttggctgacaagtacaaaaaaatgtgctctggrtgagatcatgattctacagctgtgctgctctcggtggatccctcaaagactagcaggcctgagtattatgtgaaacccaaaatgtatcactaaacagaagtgcagcgatctcaatacagaagttagaggagcacttggaaagtaagcccagcacagatgaagacagctcaagcacagcttactaaagataaaaagaggagtcttgtttttccaaaatagattaagggtactgtctcccactcagcagtgtgcaaatgcaaaaagccaaagataaaagaaagattaaaatataacgacagaaaattaaaaacaagagcaaataagacagaaaggctcaaccaacatcatctcttctgcgagtgacgctataaagcccccacagccagtagagtatagagatgttactctttactgctttagaaacaccaaccttggtgattgtaaaggtatagtcagtggcctactgctgctagggtctctggaacaggct

SEQ ID NO: 266225 - DNA, 629 bp, Homo sapiens
cttgtttgtttttttgttttggcagagatcaactgaaaaccatcaatttacctgatggaaacttgataggaagtgtaatctgaccttgttaatcattctgtaaccagctcccagggagatctatttcttacccagttcttaatcccaagattagtatgctttttttctttgttgttcatactgagtttttctgactgtctcgccctagtctggtttgtwttttaaatattttttccatctgctggtatttaacactgctatcaccatgattttttccagagcatctcatttttaaaggttatttaggaaatgaactatgtatcatatttatcttttgatgtctttaacactttttggttgtgagagagaatgaatgtttactcaacatattcacagagcttactttaccttattttcaaactgatagtatatgctagcagatggcaggattttccaacatttagacactattatttaaaacattcatgaaagcatgagcctaaattatgaaattatatttaagtaaattataataaagcaaaatgtatatgaatttaaagcaaaagttccatattgttaggcaagaaaatttaaagaaaaagtggtgtgggtgtatgtgtgtataatac

SEQ ID NO: 266226 - DNA, 534 bp, Homo sapiens
tgtacaccgtggctcttgcttttggccatcaatcccctggagaagagatattaatggggagggtgggcccaccttggggaatgacaggaccacatacaggagaaggaaggcggctcttggatgtaatgggccaataatagacaagtcacatttattacttccattcctgagcatcctgcgaaacactggaaattatattggtggtgaataggtgattaaaaacatgcaggctttatccagactacctgattgaatgccagcttcatcgtctacagttcaatagtttagggcaagttagcaagcctttctgtgcctcagtttcctcctctgtaaaatgggagtaataggcatactgatygtataaggttgttgaggattaaattacttaaatatttgtaacttattatgagtgcctagtatttaaaaaatgatatgtgtattatcaaaaaacagtacaataactaaaaattaatcctttcctcgtcatttcttctcttctcagagtaaaatacaaggtccatccaatggcctgtc

SEQ ID NO: 266227 - DNA, 534 bp, Homo sapiens
tgtacaccgtggctcttgcttttggccatcaatcccctggagaagagatattaatggggagggtgggcccaccttggggaatgacaggaccacatacaggagaaggaaggcggctcttggatgtaatgggccaataatagacaagtcacatttattacttccattcctgagcatcctgcgaaacactggaaattatattggtggtgaataggtgattaaaaacatgcaggctttatccagactacctgattgaatgccagcttcatcgtctacagttcaatagtttagggcaagttagcaagcctttctgtgcctcagtttcctcctctgtaaaatgggagtaataggcatactgattgtataaggttgttgaggattaaattacttaaatatttgtamcttattatgagtgcctagtatttaaaaaatgatatgtgtattatcaaaaaacagtacaataactaaaaattaatcctttcctcgtcatttcttctcttctcagagtaaaatacaaggtccatccaatggcctgtc

SEQ ID NO: 266228 - DNA, 534 bp, Homo sapiens
tgtacaccgtggctcttgcttttggccatcaatcccctggagaagagatattaatggggagggtgggcccaccttggggaatgacaggaccacatacaggagaaggaaggcggctcttggatgtaatgggccaataatagacaagtcacatttattacttccattcctgagcatcctgcgaaacactggaaattatattggtggtgaataggtgattaaaaacatgcaggctttatccagactacctgattgaatgccagcttcatcgtctacagttcaatagtttagggcaagttagcaagcctttctgtgcctcagtttcctcctctgtaaaatgggagtaataggcatactgattgtataaggttgttgaggattaaattacttaaatatttgtaacttattatgagtgcctagtatttaaaaaatgataygtgtattatcaaaaaacagtacaataactaaaaattaatcctttcctcgtcatttcttctcttctcagagtaaaatacaaggtccatccaatggcctgtc

SEQ ID NO: 266229 - DNA, 670 bp, Homo sapiens
tctccatccatgacctcaaggagcttgcaggccagtaatgatggtagagatgagtaaacaagagaatgtaattcaaatgccttcacatgatgtgaaaaagaaaagtgcagagtatcctaacttaggttgggcttgtcagagactgttgaggtcaggcactcagtagtcgagatgacagcgggtatggtgcactaggggaactgcagacagtccacagtggccggttgttgttggagagggagtgaaggaaatgttacaaagtgggcagagacagggtggggctaggattctgtgtattgccaaggagtttgmaccccattttgaacataaggagacttataaagctgtaagcagaggagtaacactatcaaatgtgcccttcagaaagttcaatcttctatagcaaggtggagcaatttaaaatgattaaaagatgaacagaaacaaaaacaggagactgagagacctattttgacaggctttacttgaagaggttcaatgatggtggtagtccaaaaagtcaactagtggcgaagacaatgcaggaaaatagaatatggtctctatgtgtgaaatgatgcggccattcagcaaggcagggaatgttggaagagttaatgaagtcagtctgggagactttaaaaattggaattattggtaggtcaactga

SEQ ID NO: 266230 - DNA, 612 bp, Homo sapiens
tttttaactctttccctctccctccctccccactttttagagtcctcagtgtcttctattcccatctttacatccatgtgtacccaatgtgtagctcccacttgtaagtgagaacatgcagtatttggttttctgtttctgtgttaattcttttacgatgatagcctccaactgtgtccatgttgctgcaaaggacatgattttgttctttttatggctgcatagtattccatgttgtatatgtaccacattttctttatccaatttcactactgataggcacctrgattgattccatgtcttcggtattgtgaatagtgctatgaaaaggatacaactgcatgtgtctttttgtagaacaatttattttcctttgtgtatatgctcagtaatgggatcactcggtcaaatggcaattctgtttttagttatttgagaagtctccagactgcttttcacacgggctgaactaatttacaatcccaccaacggctgatgagcattctcttttctttgcaactttgccaacatctgttatttttaggctttttagcaattgccattctgactggtgtgagatggtacctcattgtggttttgatttgggtttct

SEQ ID NO: 266231 - DNA, 583 bp, Homo sapiens
acatctgtttggtgttcactcagcttcctggatctgtggcataatgtctgactttagtttgggaaaattgttaatcatcactgcttaaaatattacttttgttcttttctgtctttttttctccttgtattctattacatatatgttagatcttctgtagttgtctcacagttcttggatattctgttcaaattttttcaattcttttttctctttattttcagttttggwgtttctactgacatattctgaagcacagagatgatttcctcgaccgtgtgcagagtactaatgagaccatcaaagctgtttgttatttctgttacagtatttttgattgtagcagttcttttttgttcctttttagactatccattcttttttagaatatccgtatctctgcttatgttatctatctgttcttgcatgttgtctactttttccattagctgttagtgcccttagtatgtgaatcatacttcttttaaattcacaggctaataattctatcatccctgctgtgttggagtgtggttctgatattttttcagtctcataaaattctgtgttttgccttttagta

SEQ ID NO: 266232 - DNA, 596 bp, Homo sapiens
aatatgtatatgttacagagatgtttctatctgagcttggaacttgataatagccatatatgtgtataaatcacatagaagtatgttttttgttatagtaaatgtcacatctctatgctatatcaatgtcattcagtatgaaaaaaatgcataaggcaagaatatttaagaaaagtaggtggttcagtgtaattattttgagatttcttaaatacatctatgtctacattaatggtggttgtgtctgcatcttagagaaaattataaaacatagagctatcactaaaaattatcatttaaaacattcaaatattttatggctttttgttcattatccatatttttgtacatttttaaatatttaaaaatactctaaatcatggctcactagttttttttcttcattgtataggacttaatccatgtgctgtcctattctggcttgtttttatccttttagatcaaatacttacattgaaggataccttactcttttttctttccccaaatgtataataacagcaattagcattcctgagtttttttaaatttaggaaatcagagaagaacacatayaaacaataatcaaaacagtt

SEQ ID NO: 266233 - DNA, 624 bp, Homo sapiens
ccattttaaataaacgcagaaaagagagactatttaataaacagtacaagggcaattagctttccacatagagtcaaagtaaaattagaaccatwgtttagagcaaaataaattccaggtagatagatcataatataagacataaaactttgtaacttttctaagaaaacaattgaaaatttagtcttttacagcataatcaaggatttattgaaccagttataagatctcaagccctaaaaaataaagtgtgataaatttgactacagcaaaactaaaaatcttctacatgataaagacaccacaaaaaatatctacaaacaataagacatggacttggagaagttattagcaagattttgtcagttttcaactaacaactactatgtgttagtctacgcaggggtaaacatttctacaaattaataaacactaaaagtccaagtcaaaaaatagcaaaggcatgaacaggaaagtcataagagagaaaggaaaacctcagaagtcaataagttcataaagagataattattcacagtaataaatatgaattaaaatgtaataagggaatatgaataaattattctcaggaacaaatgcaaatatagtaaatgaaatttctat

SEQ ID NO: 266234 - DNA, 624 bp, Homo sapiens
ccattttaaataaacgcagaaaagagagactatttaataaacagtacaagggcaattagctttccacatagagtcaaagtaaaattagaaccatagtttagagcaaaataaattccaggtagatagatcataatataagacataaaactttgtaacttttctaagaaaacaattgaaaatttagtcttttacagcataatcaaggatttattgaaccagttataagatctcaagccctaaaaaataaagtgtgataaatttgactacagcaaaactaaaaatcttctacatgataaagacaccacaaaaaatatctacraacaataagacatggacttggagaagttattagcaagattttgtcagttttcaactaacaactactatgtgttagtctacgcaggggtaaacatttctacaaattaataaacactaaaagtccaagtcaaaaaatagcaaaggcatgaacaggaaagtcataagagagaaaggaaaacctcagaagtcaataagttcataaagagataattattcacagtaataaatatgaattaaaatgtaataagggaatatgaataaattattctcaggaacaaatgcaaatatagtaaatgaaatttctat

SEQ ID NO: 266235 - DNA, 532 bp, Homo sapiens
attaaacaaacacaagggaacctcaataagattacagataatttcatatgagaagtaatggagtccaaaaggcaatgtaatggcatattcaaagtgttcaaagtgaaaaaaaaaaatcaaacaaaaaaaatcctctcaaccaagaatcttatagccagaaaaagggctattattcaaaaatgaaggcaaaataaaagctttccagataaacaaaacctgagagaatttgttgctagcagatatcccttatgagaaatactaaagttctcatacaggtaattaggtatgtaattayaaaaaacagtttaattgcatattttttctcatttcttctcttaactgattttaaaagtaattgcataaacgcaaatatatatctatgtatttctgtatgtgtatacatatatagattttagttgtgttgttgggcttagaaaatacagaattttgtaatacatgtgacaaaaatagcatagtggaggcagatagacacaaagctgcattaaaataatgtaaggataacaaatggtaa

SEQ ID NO: 266236 - DNA, 532 bp, Homo sapiens
attaaacaaacacaagggaacctcaataagattacagataatttcatatgagaagtaatggagtccaaaaggcaatgtaatggcatattcaaagtgttcaaagtgaaaaaaaaaaatcaaacaaaaaaaatcctctcaaccaagaatcttatagccagaaaaagggctattattcaaaaatgaaggcaaaataaaagctttccagataaacaaaacctgagagaatttgttgctagcagatatcccttatgagaaatactaaagttctcatacaggtaattaggtatgtaattacaaaaaacagtttaattgcatattttttctcatttcttctcttaactgattttaaaagtaattgcataaaygcaaatatatatctatgtatttctgtatgtgtatacatatatagattttagttgtgttgttgggcttagaaaatacagaattttgtaatacatgtgacaaaaatagcatagtggaggcagatagacacaaagctgcattaaaataatgtaaggataacaaatggtaa

SEQ ID NO: 266237 - DNA, 590 bp, Homo sapiens
cctaaccttttaccttaagggattatcctgtactatccagcgataattctgtgtttccctaatttgtgtgtttccttgttctcaactctatttggaaacttccccacttgacccaaaacttttttccmtagcaactcctactcactctaggcctcctactcctaggagaaaatagaaacattggaagatatggcaagcagggcatggtgagatggaccccagtgaccaccactgcctgctatgcatattgtggctcattcactgacattcactccacccaggtgtggactgacctgaggccatcattgcagatccataccctagtggaggccccataccttgagcaaggtcttgtgatttgcttctcccaatagaatatggcaaaggtaatggatgccacttccacgagtaggttacacaccactctgaccctgctgaccacttgtgcatcttgctgggaggctgcatttctttctgagccaccacactttgataaatcaaactgcctgcaataggcagaatttctaacctgccctaccccaagatgttgtactcgaatccccagaacctacggacctgataagatatca

SEQ ID NO: 266238 - DNA, 590 bp, Homo sapiens
cctaaccttttaccttaagggattatcctgtactatccagcgataattctgtgtttccctaatttgtgtgtttccttgttctcaactctatttggaaacttccccacttgacccaaaacttttttccctagcaactcctactcactctaggcctcctactcctaggagaaaatagaaacattggaagatatggcaagcagggcatggtgagatggaccccagtgaccaccactgcctgctatgcatattgtggctcattcactgacattcactccacccaggtgtggactgacctgaggccatcattgcagatccataccctagtggaggccccataccttgagcaaggtcttgtgatttgcttctcccaatagaatatggcaaaggtaatggatgccacttccacgagtaggttacacaccactctgaccctgctgaccacttgtgcatcttgctgggaggctgcatttctttctgagccaccacactttgataaatcaaactgcctrcaataggcagaatttctaacctgccctaccccaagatgttgtactcgaatccccagaacctacggacctgataagatatca

SEQ ID NO: 266239 - DNA, 622 bp, Homo sapiens
acttggggaaggaacaagtctaaaagtcattttaaggggagcatggtctgcagcataaccttatgaatctcattaaaatgtttggtgtgcttggagttatgatgtaaactgatagaaaggcaagttctgtgtgtctattgacatggctgattttctcagctctgacagaggaggacactgcagaagactgagctacataagcaaataaacagctgctaacttaggaaatgagtcccttggaaatgtcttctttcctgggccttaktttggtggatgtttaaagatgatcaatagtgatttcctgcctcttttggtactaagccattttttcaatgagacaattaataaatttggtggatttcttaggtcagttcacaggcaaacaaactcataagaggatgggtaacagtctgttcactggctttttctaaatagatatggtgagtcatctcttccccttgggttaccatctgctatggtttagaaatcagttccaatttaaataatctactttccacctctttttcttccttcctttgatactcttgcacatgagaagtattgacctaggactcttacattcatttctttttctgcataataaaccatattttctgaaagt

SEQ ID NO: 266240 - DNA, 571 bp, Homo sapiens
ttttaccataaataaatatggtcattctgagaagataaacttgttgacaactaatatacagagagtccaatgatggcaacacatttatggagaattcctcaatggtttaaagagtttctactgatcttattggtagttaatggtttgccatattgtcatcttggagaagatctttagagacaaaaaagataattcatgtatttagcraagcaactgcttgggatcaaagagacacagagaggtataaatcctgttttttatgctggttagatggatccagttctaactgacagcacccttgtctgctggcctctcatggggccccagtctggctgcacatgtttgcagcacagtcttggatgctcaatcaaggtgcttcctggaggctcacatcatagctccttcaccagcagactgcacctgagcatcagagagctctatcagtgcagcctccactgacacgcaacagcccacccacaccctctcccactgcagcctcctccatgcctgcattgccaggatgcactaacccatggccacacccccactgctttgccagcatggacacagg

SEQ ID NO: 266241 - DNA, 597 bp, Homo sapiens
acccacacagctcaaaggaaaggagaaagatctaccaagaaaatagaaaacagaaaaaagcaagagttgctcttctaatttcagacaaaacagactttaaaccaacaataataaaaaagaaaaagaagagcattacataatggtaaagggttcaattcaacaagaagacctaactatgctaaatatatatggacccagcaggaacactcagatttctaaaacaagtttttacagatctataaagagacatagataaccacacaataacagtggaatactttaacactccactgacagtgtttatttgatagatctctgaggcaaaacactaacaagatatttgggcccttgactcgacacttgaccaaatagacctaacagacatttacagaactttccacccaataacaagataatatgtattcatttcatcttcacattggacatactctaaaatcaacaacacaatcagccrtaaaacaatccccagcaaattaaacatatactcacacaaccaaccacattctcagactacagcaaaataaaaacaaaaatcaatactaagaaaatcactcaaaatcaaacagttgcatggaa

SEQ ID NO: 266242 - DNA, 405 bp, Homo sapiens
attggctcacagttccgcaggctgtacaggcttctgcttctggggggggccttaggaaatttacaatcatggtgaagggcaaaggggaagcaagcacatctttatatggctggtaggagggtggggsgaggttctgcacattttcaaacaactagatctcacgataactctatcatgagacagcactagggggatggtgccaaaccattagaaaccacctctatgatccaatcacctccctccaagcccttcctccaatattagggattacaatttacatgggatttgagtggggacacagagctaaaccatgtcaagtacacatggacacaaacaggggaacaactgacagcagggcctactggaaggtggagggtgggaagagggcaaggatccaaaaactac

SEQ ID NO: 266243 - DNA, 606 bp, Homo sapiens
cagtggtcagcagggttagctaagctttcaaggcacatgactcacagtaaacttgagctctcaagattaatgtgtttggtgcataaggtaaactaatagtgttcatgatagcaaatccatatgggtctgcagcaacctcarttcttgcctcctcagaagaaaaaaattgcctgaggggcatgaggcagagtgagagactgaggcaagttttagagcagaagtgaaagtttattaaaaagctttcgagcagaaatgaaaagaagtaaagtacacttggaagaggaccaagtgggtgacttgagagattcaagtgctctttataaactttaacttggggttttatacattggcatgcttccaggatcttctgtttcttctcctctgatttttcaatggggtgggttgtccacatgcacagtggcctgtcagcacttgaaagggccacattcacagtgtgtttattggagttgtatgcatgttcaatcaagacctttgctagtctagtgcttacactccacaattttgcctctttgcgtgcatgcttgagccccttggcccaactcctgagatcttattgagaagcttctgctcaccagcttcaggttt

SEQ ID NO: 266244 - DNA, 606 bp, Homo sapiens
cagtggtcagcagggttagctaagctttcaaggcacatgactcacagtaaacttgagctctcaagattaatgtgtttggtgcataaggtaaactaatagtgttcatgatagcaaatccatatgggtctgcagcaacctcaattctygcctcctcagaagaaaaaaattgcctgaggggcatgaggcagagtgagagactgaggcaagttttagagcagaagtgaaagtttattaaaaagctttcgagcagaaatgaaaagaagtaaagtacacttggaagaggaccaagtgggtgacttgagagattcaagtgctctttataaactttaacttggggttttatacattggcatgcttccaggatcttctgtttcttctcctctgatttttcaatggggtgggttgtccacatgcacagtggcctgtcagcacttgaaagggccacattcacagtgtgtttattggagttgtatgcatgttcaatcaagacctttgctagtctagtgcttacactccacaattttgcctctttgcgtgcatgcttgagccccttggcccaactcctgagatcttattgagaagcttctgctcaccagcttcaggttt

SEQ ID NO: 266245 - DNA, 510 bp, Homo sapiens
acagcccttgagtggtcacaagatctgcagtagttcaaccatttaaacatctgggacagaaatagtggcttttcctcaaacatcatcataagaattggcgcagtgctttcccaaggcccacactcattccactgcactgtttcccaatatctcagagaaaaactgggtgatggatgrgcatttcgtgaaagatgcttccaactcagttttgttattatggagatagattctctctttaattcatgaccatgaacttcaagtgggccctgcaggcaaaatgagacaaagaaagaggagcgtctagagagatctacaagaagctattgcccaccttattgaagtctttcctggccaggaatgccagcagccaggaagaccagctagacacaaagtagaggagagcaagagcaagctgcatgaatttatccccacatctcagagcaaccacttcctgagggtaatgaccatcatcttctccttttgatgaattctaacctagaagtgaacaga

SEQ ID NO: 266246 - DNA, 535 bp, Homo sapiens
taggttagtgtctccctcctgacagggctccacttttccttggagccacatatttaatgtaaggtgctcagtcatcaagcacatacatcagcggctctacagactggctattatcaacccaattcctggaggctgagcccagcaaatcagaattctacatttaaaataggtgttttcaaagcaaccttcttatcttaaaatgtggttaagtttccttcattggttaaaacatgttctgctgtttgccagcttcataggtacggacattttaatctaagcagtttggaatgggagggtgtgaagagtgaccaagctaaaatgtcaagttcagactgcaaatatataatttaagagatatgtgtctaagaaagcaatccatgtgtctataagctcacttcaactatgctccagaagtcccctgaaactctgaacctgatcagaattcaagatggaakcttctttgaccctagcagaactaggcaatacttctcattgcttctctttgctggtctgttattaccattcaaggaaacag

SEQ ID NO: 266247 - DNA, 544 bp, Homo sapiens
gagctccaggtccactctgattttgagtggcatgatcaggtaggtgagctcgcagagggtgcccaggggcttgtggtggggctggagaatggcaatctgtggagatcccctgcacccctctcgccctgtgaaacatcccaaatyaaaatagggggttgctgccgtataaaaaattattctcttgaaaatctctggtttaggtgagatctctctttgaagtgcaagatgatttttaagaaccttcccagctctcatggttctctcataagaaatgaaagaactgaattccaggctctttgtaattgaccaggaaaattaggataaatgggttaaaggagtcagaggcctttgggccaccacgtctgctcgcggtctgaatgggagccccctgggacccagcgggctctctggtgggtccttgatctcctagaaatggaagcaagtggtgagaccctgccccttaggggcagctcctggtttccttcacagaacagcaaagaaagagttgccccgcctgcctgaaaatcatttttcttgccgctgg

SEQ ID NO: 266248 - DNA, 582 bp, Homo sapiens
tggttgagtgagttgtcagggaccttgatggtatgagaggaactaagtgtaatctgcacagcaaatagcactgatgctttcgagtgagagtgtttgtgttcccttcacacaggccaaccagaccttcgtaagagcttctcatcccctgttcaggtcattctgatgctttttacatgctaggsgctatgggggctacagaaggatgagtgtggtatctactgaaacagaaataaattaaccctgttacaaagcaaagtagaagactgcaatgaagacccaaccgggtgctctgggagtgtgaatggtggctcctaaaacaggcctctttgtgactatggggatggtttattctgcctgcttcaagctatatcatgaaaatcattctatgtccccagcaactatcagtagccaccagaaagttgccggttcattcaaattattcacccctcccctcatcatgcacctatgctactgagtacttaccgtatttcatgcccgtgcatgctctggagccacagaaataaataagttggtcttggtttttggtgcacgtcctttaactttgtctatcacagacaacag

SEQ ID NO: 266249 - DNA, 582 bp, Homo sapiens
tggttgagtgagttgtcagggaccttgatggtatgagaggaactaagtgtaatctgcacagcaaatagcactgatgctttcgagtgagagtgtttgtgttcccttcacacaggccaaccagaccttcgtaagagcttctcatcccctgttcaggtcattctgatgctttttacatgctaggcrctatgggggctacagaaggatgagtgtggtatctactgaaacagaaataaattaaccctgttacaaagcaaagtagaagactgcaatgaagacccaaccgggtgctctgggagtgtgaatggtggctcctaaaacaggcctctttgtgactatggggatggtttattctgcctgcttcaagctatatcatgaaaatcattctatgtccccagcaactatcagtagccaccagaaagttgccggttcattcaaattattcacccctcccctcatcatgcacctatgctactgagtacttaccgtatttcatgcccgtgcatgctctggagccacagaaataaataagttggtcttggtttttggtgcacgtcctttaactttgtctatcacagacaacag

SEQ ID NO: 266250 - DNA, 542 bp, Homo sapiens
ttgccctctcctggcaggggtggtgatggcttctcaccattgctggaccccagagctgcaccatccatggtgttccctacaccctgcccatgtccgtgcaaatagtctctttcttaaacttccttcttacccagtttgagtgggccatctgtttcctgcctgtaccctatagacacaaaactccagaaaagcagcatgaaagataaatttgaaaggaagggtgtggtcggcacagtgatcctgctagatatcttccaaagggccgttgcgccgactctcctgtttctgcagatttctgttacgccaaatcctgcaaataaatgattttactacaccccccagcaacaaggatgttacaacaaatacaattttctttttttttattataaggagttttctttgacactctgaaagaaataagtatatacggcaaattacaatttgcagtatgataattcagtatgaaaaaaaatcarttcatttggcttatcttgttcagaacttgctgtgctccctaaaactgaggattgatgcatttcacc

SEQ ID NO: 266251 - DNA, 637 bp, Homo sapiens
cccgcgggggctggatgcccgggaggacacctgattccyccgggcacggggtgggggcgcctggcgcggtggtggggaggaagtgggggctctgcccgctcgcaggaaggagtcccctagcctaggagactgagagggaaagccagtccctccttggctgtcaggtctacttggagtggggtatctgagcaaattagttattaattgggccgttccgaagctggtaaaggtgtgcgtgccctctcttagccctcccgcggggcgcggggccgaagttcccgggcagccttgcaggggccccgccttctcccagctgagcctaaaggcaagattggggcccccgaaataactgtatcctgccctcccagacccaaacggacacacactctaggttttctcttggaagggttgtgaagatggtgtgtgtgtgcgcgcgtgcatgtgtgtgtgcgcgcgcgcgcgtgggggcggggaacaacaccctggttttttcctgcaaagggtgggactggggataacctgatcctcggatgtggattttctggtgcctagagatagaccagggccccgtgttattcatccagaggaaataaaaccagccgcgcgagctggctggaggtgggaattgggagcggtg

SEQ ID NO: 266252 - DNA, 464 bp, Homo sapiens
tgtgtttgccatcactatcctctttcctaagttctgcctaaaattagaactgctaaagggacttcttgaattccatggaaatctttttgtggttcgaagccatgtcgtgatattttccctcycatatcataggatggagaatgtgggtagtgggtccaacactggatagtgatttcaggattttttttttacccctcactgctttgttttggggttcccatcagaagagagatacacttccttgctgtttatggagggcaattgtgtagaaggccttttgctaggctctgcccttggagagctccttgtcctgtgggctgtaaacaggtaatatgaatccaatatggtggtcatgaaggaagggctgtggttcagcctagagaagagcatcagtctctgcaggagttcccttggaggcctcaaaaaaaaagttttctccaggacagcactgaaaacccaaccaa

SEQ ID NO: 266253 - DNA, 464 bp, Homo sapiens
tgtgtttgccatcactatcctctttcctaagttctgcctaaaattagaactgctaaagggacttcttgaattccatggaaatctttttgtggttcgaagccatgtcgtgatattttccctcccatatcataggatggagaatgtgggtagtgggtccaacactggatagtgatttcaggattttttttttacccctcactgctttgttttggggttcccatcagaagagagatacacttccttgctgtttatggagggcaattgtgtagaaggccttttgctaggctctgcccttggagagctccttgtcctgtgggctgtaaacaggtaatatgaatccaatatggtggtcatgaaggaagggctgtggttcagcctagagaagagcatcagtctctgcaggagttcccttggaggcctcaaaaaaaragttttctccaggacagcactgaaaacccaaccaa

SEQ ID NO: 266254 - DNA, 508 bp, Homo sapiens
tgaaacattgcttgtgaaggttttcacacattgcctggcgaacgtccactcaaatgttagaagcagttactattctgtcttgtagatttgggaatgaggtattttgaagtcttaraatcagtggagtaattatctccaccacttcttaggcagacactgccccacccttatggagctgtatttagagcttgcagtgaagttgcaggaaatggagaagttgagtttttttcttgctaagtaaatcgcccctgagttcattacaaaggtcagctggcccagcaggacctatttgcattctgtatttgcaaaccctactgtttgtttattagggaaggagagggtggggtccttggctaggacatttgtaagtcagatacattgaggcctgggggagggaaagttgctttattagggtcatcttttcccatctacatcctttgagtttcctcctttttctggggcaaccaccaaaagtggccatcctgtgcctctagtctgccctgtggca

SEQ ID NO: 266255 - DNA, 485 bp, Homo sapiens
ttgataatgcagtagagacaagtgcagtgcttttcaacattcaacatataagtaatttgagaggacacagtacatgtattcgtcaaatacgatggcatgtctactgcatgtcaggtgctgctggggggtggaggaacacctgtggacagtatagacagtcattgccctgaagtgctcagtctaggagacaggcaggcaggtaattagagttcagtgtaatccacaccaccatagagatcagcccaagattgtgtgggggctctggggagggcctctgattcccatttarggtgggagtacagagtccaggaaggcttttgatctgggtgacaccctcgctcggaactgagttttattttgcttattttaaaagcatttatatgcaaaccaggcactatgctaagtgcttgacacaaacttatttaatcttccaaccacccagcgaggtagtcttagtaactagtataattcccattttacagatg

SEQ ID NO: 266256 - DNA, 485 bp, Homo sapiens
ttgataatgcagtagagacaagtgcagtgcttttcaacattcaacatataagtaatttgagaggacacagtacatgtattcgtcaaatacgatggcatgtctactgcatgtcaggtgctgctggggggtggaggaacacctgtggacagtatagacagtcattgccctgaagtgctcagtctaggagacaggcaggcaggtaattagagttcagtgtaatccacaccaccatagagatcagcccaagattgtgtgggggctctggggagggcctctgattcccatttagggtgggagtacagagtccaggaaggcttttgatytgggtgacaccctcgctcggaactgagttttattttgcttattttaaaagcatttatatgcaaaccaggcactatgctaagtgcttgacacaaacttatttaatcttccaaccacccagcgaggtagtcttagtaactagtataattcccattttacagatg

SEQ ID NO: 266257 - DNA, 485 bp, Homo sapiens
ttgataatgcagtagagacaagtgcagtgcttttcaacattcaacatataagtaatttgagaggacacagtacatgtattcgtcaaatacgatggcatgtctactgcatgtcaggtgctgctggggggtggaggaacacctgtggacagtatagacagtcattgccctgaagtgctcagtctaggagacaggcaggcaggtaattagagttcagtgtaatccacaccaccatagagatcagcccaagattgtgtgggggctctggggagggcctctgattcccatttagggtgggagtacagagtccaggaaggcttttgatctgggtgacacyctcgctcggaactgagttttattttgcttattttaaaagcatttatatgcaaaccaggcactatgctaagtgcttgacacaaacttatttaatcttccaaccacccagcgaggtagtcttagtaactagtataattcccattttacagatg

SEQ ID NO: 266258 - DNA, 485 bp, Homo sapiens
ttgataatgcagtagagacaagtgcagtgcttttcaacattcaacatataagtaatttgagaggacacagtacatgtattcgtcaaatacgatggcatgtctactgcatgtcaggtgctgctggggggtggaggaacacctgtggacagtatagacagtcattgccctgaagtgctcagtctaggagacaggcaggcaggtaattagagttcagtgtaatccacaccaccatagagatcagcccaagattgtgtgggggctctggggagggcctctgattcccatttagggtgggagtacagagtccaggaaggcttttgatctgggtgacaccctcgctcggaactgagttttattttgcttattttaaaagcatttatatgcaaaccaggcactatgctaagtgcttgacacaaacttatttaatcttccaaccacccagcgaggtagtcttagtaactaktataattcccattttacagatg

SEQ ID NO: 266259 - DNA, 553 bp, Homo sapiens
atattggtcatttgcctctgttgttacttaataaatgacctctgatcatattcaaattcaagatttggggttttaaaaattgtttctacttatttttttttcatataagaatcacttttagttcaataagaaagacaaaattagataagagtattctgagtctaaaaagaattaataactcaggagagcctaaactaagggaatattaaatcagaagtatattggattgtgtttacttcaaatgtattagacaattagaatacgacactgagcacaattgcatatgtgaaatgggactgtgattggcagtgctcaaaaaaggaagggggtagggatagyatgacacatttagaggaagcttagcaagtttagttaaaataaacttaataaagaaagcggaacatttgcttcaacctcacaggaaattgtgtgctcttattgaagcttgacagtttgtttcctcttcaaaaagagtttggacccttcttgatgataatcaagttaagttggtaggtgtggggattggtgttaaactaaaaaggaaaaaaaaaaa

SEQ ID NO: 266260 - DNA, 543 bp, Homo sapiens
aaaaaaatagcaatctggtatcctaatgagataatgaatgcacaagtactttgaaagaggtacagcacttcagtgcttttcagatatgaggttttgtcatgctcttgaaagaaatgcataggctttactgacatgggggctggggctgggkctggggccctggcagaaatggggaagcacaggctgtggcaaggggggtttctccagaaggctgactcatttcttggctgtcccaagcttagagagccagatttcttagggttgtttaccaccttagtaaggaactggtggagggtttttttctggagttaagcactgcaggaagagctgcccacagtatgggggtgggtcatctgcttctggactgcccaggccaactgtggttaccccagttaactgtggtgaactgtccacataaccagccttctggatctgcctttcaaggagtcccactgtgcttctccctgctgaggccgctgaaagggcataggcaattgctagaggtgaagaaaaactctgtagctaagctataaaaacaggcat

SEQ ID NO: 266261 - DNA, 619 bp, Homo sapiens
gcattagattctcacaggagtgcgaaccctattgtgaactgcacatgccaggctccttatgagaatctaatgcctgatgatctgtcactgtctcccatcacccccagatgggactgtctagttgcaggaaaacaaacttagggctcccactgattccacattatggtgagttgtacgattatttcattacatattaatattacgatgtaataataatagcaataaagtgcataataaatgtaatgcgcttgaatcatcctgaaaccatcccccactccctggtctgtggaaaaattgtcttccatgaaaccagtccctggtgccaaaaatgttggggaccactggtatagaactctagaacttattccttctatctagctgtaattttgtatcatttaataaacatctctctaactcccacttccctctgcccttcaagcctctagtatcctctgttttactttttacttttatgaagtcaacttttcttagcttccacaaaggagtgagaacatgcagtatttaactttctgttcctggcttaattcacttaacataaygtgctccaattctatccgcattacttcaaataactggatttcattctttttttaatagc

SEQ ID NO: 266262 - DNA, 619 bp, Homo sapiens
gcattagattctcacaggagtgcgaaccctattgtgaactgcacatgccaggctccttatgagaatctaatgcctgatgatctgtcactgtctcccatcacccccagatgggactgtctagttgcaggaaaacaaacttagggctcccactgattccacattatggtgagttgtacgattatttcattacatattaatattacgatgtaataataatagcaataaagtgcataataaatgtaatgcgcttgaatcatcctgaaaccatcccccactccctggtctgtggaaaaattgtcttccatgaaaccagtccctggtgccaaaaatgttggggaccactggtatagaactctagaacttattccttctatctagctgtaattttgtatcatttaataaacatctctctaactcccacttccctctgcccttcaagcctctagtatcctctgttttactttttacttttatgaagtcaacttttcttagcttccacaaaggagtgagaacatgcagtatttaactttctgttcctggcttaattcacttaacataatgtgctccaattctatccrcattacttcaaataactggatttcattctttttttaatagc

SEQ ID NO: 266263 - DNA, 623 bp, Homo sapiens
tctaaaacctcactgctgtttcccagcttattaccccagaaacagacttgggccagcatggatgacagaaaatgttatttgctcagctctctgattcctatacttgccagcagcaatcacgaccgccagcaccaaaaggacagagggagtctgggtcagccctgctttatgcaaaacaaggtatggaaatccagatatttttcccaaaatgatacatttgggaggagcrtatgtatttatttgcttatttcatttaaatttttctttccaaaaacatctctgaagggtttctttagcttttacatggttctatttttttaagttatctttggtataaaattatatcatcactttaccaaaaaatttgggaaagaattgaaaaaagaaaataatcacgcatgacttcattgtcaatacatctgtcacttgctagcatttggaatatttctttcctatcttttctcctatacacattttttcttataaacattaaagattcactttgttttaaaaaaaattttaagtagttcatgcacataataaaaagtataaaaagtgacagtccctctcctccacccttatccccagtgaccactttaagtcttgtacatctttccagaaaa

SEQ ID NO: 266264 - DNA, 547 bp, Homo sapiens
ttagcaacctgaacttcagcagcttggtatataggccatcatcctcatttacactatgaaatgtttgatatttgttcaatatccctgtgtctgtgccttactagcagaaactagagcatgcaggtactggcattttcttggtttgcatatatgcagtagctcattaatactctctggcagcaactgaaactggtaagttatcaaagatatccagcgagaagagaaraaacctgatatgtgagccaagggacgtttgtttagttgttgttgagggtggagggaatttagagaagatttgaaattaatttccaaatcaaatttgagagcaccttgtggtaaatggtagtctatagcatctcccttagtccaacatcctgtaacaaagagatcttcacatgtagccattctgatattttgaactctttgtagttgttttagctttattactaaatttttttccaagatatgtatgcttttcaaatgggaagcatgtgattctatccaaaaagtagcccagtgttaatacagtaatttaagaaactgtcca

SEQ ID NO: 266265 - DNA, 547 bp, Homo sapiens
ttagcaacctgaacttcagcagcttggtatataggccatcatcctcatttacactatgaaatgtttgatatttgttcaatatccctgtgtctgtgccttactagcagaaactagagcatgcaggtactggcattttcttggtttgcatatatgcagtagctcattaatactctctggcagcaactgaaactggtaagttatcaaagatatccagcgagaagagaaaaaacctgatatgtgagccaagggacgtttgtttagttgttgttgagkgtggagggaatttagagaagatttgaaattaatttccaaatcaaatttgagagcaccttgtggtaaatggtagtctatagcatctcccttagtccaacatcctgtaacaaagagatcttcacatgtagccattctgatattttgaactctttgtagttgttttagctttattactaaatttttttccaagatatgtatgcttttcaaatgggaagcatgtgattctatccaaaaagtagcccagtgttaatacagtaatttaagaaactgtcca

SEQ ID NO: 266266 - DNA, 585 bp, Homo sapiens
gtttcaatctttagggctcttttacactttaattttgttttaaaattgtgcaagatatgtatattgtcccaaagtcaaagagacaaaacaagatatattcagaagtccagcttccagtttctcccccacacggttccctccattactctgtagataaccaactattgttgtttttaaagttttattttatcctttctaatttcttaaatattagcactgccacctctttctttgataaatgatatatactatactcacttgtctgtaccttgctttttttcaatgaagatcaccccatagcagtataaagagatattcctcattcctttttacaggtgtagatacagtaaaagttattcaacaaatcctgtactaaccaacatttggattgtttctaccttttgctatttcaaacagtgctgtgataaacagcctagtgtgtgtttgtgtctattcttatttttgctggtgtaacactgagccaaatccctcgaagtagagctgctgggccaaagggtraacataaatgtaatttttctaaatagtgccaaattctcttccctagtatttacaccatttagcatt

SEQ ID NO: 266267 - DNA, 560 bp, Homo sapiens
tgaagtaagtgaactctgacttgacttcccccaccagcaaatgtctcatttcatggygctcattttcaggaaactccttgagagagttgtctctttttgatgactacaattcctttcctactgttttatttttcatttgctcaggtatattgcagtataattagcatgcaataaagttcacccttttaaagaatacattttcgtaagttttgaaaaatatattggtcatgtagccactgctataatcaaaatatataacatacatatcacctcaaaaagtttccttggactctggttccaaaatgatggcataaaagcaagccggcttcactcctccccaactccccaaagaaaacctaaaacaaatatagagttcaaagattatcaccagcaatataccagaacttaaatgtaagaatgagacagttcctgcagccacagaagattgaaaaaaaaatccaagcagatggtaagaaaatcagacttccatgtccatgatgcccgttttctcaatctgctcagcaccaagcatgcaggaaatttttcctagatttatggtt

SEQ ID NO: 266268 - DNA, 560 bp, Homo sapiens
tgaagtaagtgaactctgacttgacttcccccaccagcaaatgtctcatttcatggcgctcattttcaggaaactccttgagagagttgtctctttttgatgactacaattcctttcctactgttttatttttcatttgctcaggtatattgcagtataattagcatgcaataaagttcacccttttaaagaayacattttcgtaagttttgaaaaatatattggtcatgtagccactgctataatcaaaatatataacatacatatcacctcaaaaagtttccttggactctggttccaaaatgatggcataaaagcaagccggcttcactcctccccaactccccaaagaaaacctaaaacaaatatagagttcaaagattatcaccagcaatataccagaacttaaatgtaagaatgagacagttcctgcagccacagaagattgaaaaaaaaatccaagcagatggtaagaaaatcagacttccatgtccatgatgcccgttttctcaatctgctcagcaccaagcatgcaggaaatttttcctagatttatggtt

SEQ ID NO: 266269 - DNA, 560 bp, Homo sapiens
tgaagtaagtgaactctgacttgacttcccccaccagcaaatgtctcatttcatggcgctcattttcaggaaactccttgagagagttgtctctttttgatgactacaattcctttcctactgttttatttttcatttgctcaggtatattgcagtataattagcatgcaataaagttcacccttttaaagaatacattttcgtaagttttgaaaaatatattggtcatgtagccactgctataatcaaaatatataacatacatatcacctcaaaaagtttccttggactctggttccaaaatgatggcataaaagcaagccggcttcactcctccccaactccccaaagaaaacctaaaacaaatatagagtkcaaagattatcaccagcaatataccagaacttaaatgtaagaatgagacagttcctgcagccacagaagattgaaaaaaaaatccaagcagatggtaagaaaatcagacttccatgtccatgatgcccgttttctcaatctgctcagcaccaagcatgcaggaaatttttcctagatttatggtt

SEQ ID NO: 266270 - DNA, 646 bp, Homo sapiens
tttcagttactctagccttgtactataatttaaagtcaggtaatatgatgcttccagttttgttttttctgcttaggattgctttggctatctgagctcttttttggttctatatgaattttagtattgtttttcctaattatgtgaaaattgcattggtaatttgataggtattgcattgaatctgtagatttccttgggaagtatggtcattttaacattaattcttccagtccatgcttatgagatgtttttccacttgggtctatcatgtgtgatttctttcatcagtgttatatagttttccttgtagatatcttttacctctttggttaaacatattcctaagtattttttatggctatggaaatgggattgagttatggattttattctcatcttgcacattattgattcatagaagtgatactgatttttgcacattcatttcatatsctgcaaccttaccgaggtcatttatcaagtctaggattcttttggcagcatctttagggttttctagaataaagagcatgtcattaatgaacaggaataattttacttactcttttccaatttgaatgacttttatttctttctcttgcctgatagctctggctaagacttccagtaatatgttgaatag

SEQ ID NO: 266271 - DNA, 585 bp, Homo sapiens
atcttgtgcttaaagggttatctgtttgtcattgatcgtgatggtttaggaagctgcaggccattgtgtacatacgtacaaccacatagactcttggactagaaagagacgcctctgatggagatcatggagtccatctccctggctggtgcccatactggtgggctcagtatgtaatgagtactcagtagtttggtccaacccattacattgttgagacttcactcctttttgcctagaggtagaaagctccaaagagacaagtgatagaacttatgagaagaataagaatttgagttttttgtgatcactcttgactcaccatagcttacaaattctctcacctgctctgatgcgccctaaagatggagatgtctggtaggtgattrtaaggccctttaggcccctttcctgggaaccctctgggagatgaggccttgacctcgttgacttgacccaccttggcccatgtgggtgagctactgtggctggtggggatgggagtgctaaggcagcaggggcctgcagggaacatgtgttggctagggatgaaggctctggttttcctcttgttctactatactt

SEQ ID NO: 266272 - DNA, 589 bp, Homo sapiens
caacaagtcaatctaccatgtctgcagtctggcaggcaatgcaggaacccgcagggcaactctgaacagcattctagagaccaaattaagccagctgggctgactacagcaaatgatgattggtgcctatcctaattaggctgacaggacttctactgtgtggatgtcccacttgctgcattcacagatgtgatgaatcagtcatgttcaattaytcaatcactttcatttgagaacctgctacatgcagagcgttatcaagatctctttgtaatatgggcaagagtttggccatgagttgtaatcagcccaggtacagtttgcatatagagagattcttcaggctggccttctcagtggtggccaatggagtgggaatgatctttttacgaaagccaagagcccttgtaactgtgcctttctattatagttttcaaaaggaaaaggaaaattggtctccatggtccctcttggctctgaagtgttcttttaaaataatatttattgcatacctttttgagattacaaaagcaatacatgttcattgttgaaaatgcagaaaattacaaggaagataaaaagtagtcat

SEQ ID NO: 266273 - DNA, 522 bp, Homo sapiens
tggccagttcctactcatctttgaagcttctgcttaagtcatctgttctgggatctcttcctgccaccacctcctaccaacccccatcctggtctgaaggagagtctctcctycctcctcagtgctgccatagcctctgcagattcccatgtcacagcacgtatcatcacactgtattgtgcttgcctgaatcctgaacagcctgtgtgcttcttgagacagatgccttgttttattcatcttttgcacccctttcactgttgcatggcaaattcatggtgtatatttgatggctggctggctgtgtggctggatgaatgaatgaatgaatgaatgccagttgggaccacatcctctgaatatctctgccttcattgaaaaccttttttggctgtgggaacctatctgattatacaactgcttctggcaccaccacatcacttcaccttgctttcagcacacctatagcatttgattcaatgaccctaggcttgttaccaaagcctaaaggcagaggagaga

SEQ ID NO: 266274 - DNA, 585 bp, Homo sapiens
acacaacatctgcccttctattatcctcagagcatctcgggctgcaattgggtaggagagcttccaggaagctagctgtgaacccaggatgtttgggggtgataaggagtttctgaaggaaagtccctcttccactcctgcttctgacactcctaaaaatattcccagtgatctgggccactgggttttyaaactcattttaaaggtctggagcacattttccaaaagaaatcacatgcagtccctgacatatgaaacaaaagggagacagtgtttggccactgtcgcatttctgactgttgcattacaagttgattgggctgttcggccaccagccatatcaagtatgtggggatttggtacggaagaggagttccttctcagcaaatctataaaatatttcttcttcctcttatagatgtgctcactcagctgtttgggaatcctgctgtctgtcatccatgcttcccagggaactcaacctgcttaagctcctctttaggggagaggcaggaagtctgggaaacacggcctggcagcgtgggccaggtgcgtcatagaaattcagtggtactgttcccatta

SEQ ID NO: 266275 - DNA, 467 bp, Homo sapiens
gtttagctgggtgtagatggaaagaaggtggagagttatattttactagggttgtgttttcaccaggtaaatagcatggaaagagagcagaacatggatttgaaggtgtaagtaagagagaaataataatgaaactggaaactaaagtccataaggaaggaaggagggtcatgaggagagtraggggcagagaaaaggtcatggataagtaaattatagatgctggtggggtcaaggacacattggattaaaataacagaggggataagctggaaaggtaggagagtggattacttcaccttgatattatgcatggtgtcgctatgacagcagggggctggtgtggttggagcaggtcaagaaagggataagatgcagaagagttgagagatcagagtgtgactatgtagatggagaaaaataagaataatcacaggaatgatactgggaaaagtgacagtgaatca

SEQ ID NO: 266276 - DNA, 506 bp, Homo sapiens
gacggccacggtcgcctagcaacgagcggggatgcgcggggcgcctgggtgggcgaggggtgctcgccgccgccgccgcgcgccctcgggcccccgggaccgcgggaaaacttcgcggctcctcggcgctggggcgtcggcgccaggcccggcagacagagcaatgcgccccgcgggctgagggcagaggatgcggccgcggcccagcgccccggccgggggagccgcggggtggcacgcggggaaagttggcgcgcgcctgaccgcgcctggaagccgcgcggtgccagggccgagttgycccccaagtttctgcggcgatttgtcactccctggggatctggcggtctgaatcccgcggggcctccggctcagggattctgagcgctaggagagagaagcccgcgcttttcccggggacctgcgcttgagctggtgcttggcgggttcgtcctgaatggtagcgattcgagttgttttctgcttttcttctcccccagacagtg

SEQ ID NO: 266277 - DNA, 506 bp, Homo sapiens
gacggccacggtcgcctagcaacgagcggggatgcgcggggcgcctgggtgggcgaggggtgctcgccgccgccgccgcgcgccctcgggcccccgggaccgcgggaaaacttcgcggctcctcggcgctggggcgtcggcgccaggcccggcagacagagcaatgcgccccgcgggctgagggcagaggatgcggccgcggcccagcgccccggccgggggagccgcggggtggcacgcggggaaagttggcgcgcgcctgaccgcgcctggaagccgcgcggtgccagggccgagttgtcccccaagtttctgcggcgatttgtcactccctggggatctggcggtctgaatcccgcggggcctccggctcagggattctgagcgctrggagagagaagcccgcgcttttcccggggacctgcgcttgagctggtgcttggcgggttcgtcctgaatggtagcgattcgagttgttttctgcttttcttctcccccagacagtg

SEQ ID NO: 266278 - DNA, 573 bp, Homo sapiens
catggtggttttttggtgcttttcttagacacacagcaggaaaaatgccttttacagcagttgatgagcttgtcaagcagccattctttcgggagcacagatgagcacaggttcactcctggccggaatataagaagaagcagagcaaagttaaaagaaaattatttctctactcacaatacttcttctttttttttttttttttttttttgkgacggtgtctcgctctgtcgcccagatgggagtgcaatggcatgatctcggcttactgcaacctctgtctcctgggttcaacctattctcctgcctcagcctcccaactagctgggattacaggtgcccgccaccatgcccagctaatttttggaaatttagtagagacagggttttgccatgttagccaggctggtctcgaactcctgacctctggtgatctgccctcttctgtcggcctcccaaagtgctaggattacaggcgtgagccactgtgcctggcctgtactcacaatacttctgacacccaatgtgtgggttttccacaccaagtaattcttaaatattttgcagccacca

SEQ ID NO: 266279 - DNA, 573 bp, Homo sapiens
catggtggttttttggtgcttttcttagacacacagcaggaaaaatgccttttacagcagttgatgagcttgtcaagcagccattctttcgggagcacagatgagcacaggttcactcctggccggaatataagaagaagcagagcaaagttaaaagaaaattatttctctactcacaatacttcttctttttttttttttttttttttttgtgacggkgtctcgctctgtcgcccagatgggagtgcaatggcatgatctcggcttactgcaacctctgtctcctgggttcaacctattctcctgcctcagcctcccaactagctgggattacaggtgcccgccaccatgcccagctaatttttggaaatttagtagagacagggttttgccatgttagccaggctggtctcgaactcctgacctctggtgatctgccctcttctgtcggcctcccaaagtgctaggattacaggcgtgagccactgtgcctggcctgtactcacaatacttctgacacccaatgtgtgggttttccacaccaagtaattcttaaatattttgcagccacca

SEQ ID NO: 266280 - DNA, 548 bp, Homo sapiens
ccattaactcgtcatttacattatgacacaatgctatccctcccccatcccccatacattatgacattatgacataatgctatccctcccccatccccccaccccacgacaggacccagtgtgtgatgttccccactctgtgtccaagtgttctaattgaattccaaccttttaataatatggttggttcttcccacaaccagcccccaacctgaagctaaggactttcagccaccagttatctcattagcataaactcaggtatggttaaaaggtatttattatgaataaaaaaaagatgctcctatcacctctatcactcaggaaatttcaagggttttaggagctctgtgctgagaaccagggatgaaaaccaaatatatgtatattttttattatgttgtgtcatcacagaagtcctaaaaatttagtttgaattctcttgcagtttcttgtgaccttgggcaggtgattaarctgctttaagcctcagttatttaatcaactcaactgggaccttgcgtggatatggtaaatggtgtatgtaa

SEQ ID NO: 266281 - DNA, 388 bp, Homo sapiens
ggctcatggaaggcgacggccagcccaagagcagtgaggacaggagcagatgccagttcccaggccctggcatggtcacccccaacctcagcctgccttctccctagcccagcacagggtccttccgggactgctccttctcgctgctgagtcacagtcactgtctgcaaaaactgcctcagaactgaccccgtgaagcttaaatttcttaatttgttctaactccgacttctcatcccccctatatccttaggaaaataatccatttatctgaaagtcatctctcaaggtcatggagaacaaaaacaaaacaagacagataggagacactaaagttctcaggacaacccaaacagacaactcawagtgcacctgggagggctccagt

SEQ ID NO: 266282 - DNA, 530 bp, Homo sapiens
ttaaatttcttaatttgttctaactccgacttctcatcccccctatatccttaggaaaataatccatttatctgaaagtcatctctcaaggtcatggagaacaaaaacaaaacaagacagataggagacactaaagttctcaggacaacccaaacagacaactcaaagtgcacctgggagggctccagttccacggatctcctccagaacataactgaaggggtarggctcagggtgacctctggaaagcaggcatcattttccatgtgacgctgtatttcattaatcgtccctgaattttccccactcttatcctagtttcttgggccaactgaatgcaaacaacaatgctcaggcttcctggatttagtcccaaacattccacaccaggcactgtgagctccctggtgtttgtgagccatgaggagggggatgaggtggagtccacctggaagaggagcaggatcactagggatgaagccgaaccgagatactgaggtctgcccccagctgaacccctgactgaccat

SEQ ID NO: 266283 - DNA, 469 bp, Homo sapiens
tcctaacccacttctggtcaaaactaatctcttggattctttcattagtaactaaagggggtggggtgcggaataaaaggatggggacatgaaggaaagcctcagagatggttctcttctattgctgaacttgtgcggaaatgcctcaccttttggttagagggacactattttttaagagatgggaaaaaaactgcckcttttttttttaagctttcttgaggtaaacgttattggttagcgccctaggcaggggacatttttacagcactgtagagaaaccttggaataaagaagaaacaacacaaaagcataacatcaatgctcagaacatttaaaaagcacatctatgtcttgatttattcccctttcctctcattcagcctactccttctactaacatgtggaacagaacagaaagatgaatgatttcccatatcacactgggcatcccttatcccatccccac

SEQ ID NO: 266284 - DNA, 450 bp, Homo sapiens
ctgacgaaccagaaaaggagaggaggcagtgaaggactgcagagtggatattaaatggcattttaatttttattagcatacttgccggccttgaaatactcctgcctaggtttctccttccaggcagggagccacgtcccacgtgggaatggggaatctgtatctgtggcaggaagatctgaacatggtgtgggggatacaggggcacagcgttctctccagccattgtccttcctgactttaggtctgggytgtacaagggaggtcaactggccatgctggtgtgaacttcaggctcccaagacttactttccactgtccaagctgatggtgacaagatagggagacctggggccaggatcaaaatggctccctgtgctgggacctttcttcccaaacctggaccaatgcttctctcaatgacaagaggctgcttattgggtggggtgg

SEQ ID NO: 266285 - DNA, 587 bp, Homo sapiens
ttcataaaggggtggcagaagggtgtaacctccatcaccccaggctgtcccccgccccaggactaaccccttttcatcctaaagatgtgatggggactatgtttgatttttgtttttaataattgaatttcttcttcgtgttatttagtccattttggcatgtagtgtacctttgtgccaactgcagtgtaattcatgagttagaggagagatatagaaaatgctgcgggaaaacaccatcagrtgtgttcattcagccattcgttccacaagcttcagtggtgaaggctctgtgctaggggctgggaatacaggtgtgaaaagacatggtcccagtcctcaagagctcaccatttagctaactgtgtcactaaagttggaaaaacaaagcctgtgcctcctttggatagtcacaattttatgtatccaaattcaaaaggacgctctcagccttaagagggttttcaagccaaggaatgctcatttggtgtccaagggcagtgaaacctctgtgcgtggatgcacgggtgtgaaagctcggagtttagaagaagcttgtgcccgagtacatttttatcctcacagtg

SEQ ID NO: 266286 - DNA, 600 bp, Homo sapiens
tgtggcagtggccacgagtgaggctcctctgcctttggaaaggggaaggaagaaaggagaaggactgaattttgtggtttgagtggcacaatactcagctgcaatacaataaaataccaggtagagttctaagatttttgcctctagttcctagctgccagacagtacctctggacacacccatggcttggggaagctcrccaacctgaagggaaggacacaggcctggctgactttgccacctgctgattgtaaaaccccagggccttgagtgatcataggccatagccaaggagtggttactgcaggccttggcaagacctagtgctgtgctggcttcagatctgacacagtacagtactaatggtggtagccacaggagtgcttgtgtcacaccacccccagctccaggtgactcagaacagagagagggtcctttcattggggtgaaaataagggaagagaacaagagtccctgcctgataatccagaaaattcttccagatctagtccaagaccatcaaggtggcacctctatgaagatgcaagaaccacaatattactgggcttggagtacaccctaaagcaggtagagcttag

SEQ ID NO: 266287 - DNA, 600 bp, Homo sapiens
tgtggcagtggccacgagtgaggctcctctgcctttggaaaggggaaggaagaaaggagaaggactgaattttgtggtttgagtggcacaatactcagctgcaatacaataaaataccaggtagagttctaagatttttgcctctagttcctagctgccagacagtacctctggacacacccatggcttggggaagctcaccaacctgaagggaaggacacaggcctggctgactttgccacctgctgattgtaaaaccccagggccttgagtgatcataggccatagccaaggagtggttactgcaggccttggcaagacctagtgctgtgctggcttcagatctgacacagtacagtactartggtggtagccacaggagtgcttgtgtcacaccacccccagctccaggtgactcagaacagagagagggtcctttcattggggtgaaaataagggaagagaacaagagtccctgcctgataatccagaaaattcttccagatctagtccaagaccatcaaggtggcacctctatgaagatgcaagaaccacaatattactgggcttggagtacaccctaaagcaggtagagcttag

SEQ ID NO: 266288 - DNA, 547 bp, Homo sapiens
actttatcacagctcttgaattagcagtacgttttgggaaaacccttattatacaagagatggatggtgtagaacctgttctttatccattattgagacgagatctggttgctcaaggtaaataattgacactttccagagtgtaaatatttttaaaatttccaaagtaagtaattaaaccaggtgcaagctttcaagagtcctcttccagtggagtcacacatgatgggcttacttccttcagcaatatgtgtaaagttgtgacaatatgtgtaaaatgttgtttatcaggaaagctcagtagagacctagtacccatagtttactgggggttgattacgtaagcacactctccctagcacattacaaaattctagacyccctgaaggaaagcaggtgtagcataaaccatattgtttgtacaaacagtttaggcacagtgagccacttttttgagttctgaggatggtgagaactctcccaaaagctaagttcccaggtgctggttatgggccaactttacaagtagccctttctaaagagtctc

SEQ ID NO: 266289 - DNA, 547 bp, Homo sapiens
actttatcacagctcttgaattagcagtacgttttgggaaaacccttattatacaagagatggatggtgtagaacctgttctttatccattattgagacgagatctggttgctcaaggtaaataattgacactttccagagtgtaaatatttttaaaatttccaaagtaagtaattaaaccaggtgcaagctttcaagagtcctcttccagtggagtcacacatgatgggcttacttccttcagcaatatgtgtaaagttgtgacaatatgtgtaaaatgttgtttatcaggaaagctcagtagagacctagtacccatagtttactgggggttgattacgtaagcacactctccctagcacattacaaaattctagaccccctgaaggaaagcaggtgtagcataaaccatattgtttgtacaaacagtttaggcacagtgagccacttttttgagttctgaggatggtgagaactctcccaaaakctaagttcccaggtgctggttatgggccaactttacaagtagccctttctaaagagtctc

SEQ ID NO: 266290 - DNA, 659 bp, Homo sapiens
attgctgggtcatatggtagttctgtttttaatttctttaggaaccttcctaccatttttcataatggctgccctggtcttcattcccaccaacaattcccttttctccgtatcttcatcaacatttgttatctcttgtctttttgataatacccatcctaacaggtgtgagttgatatctaatagtggttttgatttgcatttcctcatgataagtgatgttgagcatcgtttcatatagctgttggccatatttgtatcttctttggagaaatgtctattcaggtcctttgcctgctttttaatcaggttatttatctttctgctattgaattgtatgagttttttctttatacattttggatattaaccccttatctgatatatggtttataaataactccaagtttttaggttrttctttcattttgttgataatgtgtatttttcagttactcatgtgataatctgtttttttaaccatcattctgttttcaaatactgtatcttaaatactagtgcaataaacacttttaaaatgatgaatttagaagtaaagaaaaaatataattgaggatttctatttttgtcatctataatcagccatttcagagcaatctggaatatgaaacatattaatgttaaaaccatactgaatg

SEQ ID NO: 266291 - DNA, 659 bp, Homo sapiens
attgctgggtcatatggtagttctgtttttaatttctttaggaaccttcctaccatttttcataatggctgccctggtcttcattcccaccaacaattcccttttctccgtatcttcatcaacatttgttatctcttgtctttttgataatacccatcctaacaggtgtgagttgatatctaatagtggttttgatttgcatttcctcatgataagtgatgttgagcatcgtttcatatagctgttggccatatttgtatcttctttggagaaatgtctattcaggtcctttgcctgctttttaatcaggttatttatctttctgctattgaattgtatgagttttttctttatacattttggatattaaccccttatctgatatatggtttataaataactccaagtttttaggttattctttcattttgttgataatgtgtatttttcagttactcatgtgataatctgtttttttaaccatcattctgttttcaaatactgtatcttaaatactagtgcaataaacacttttaaaatgatgaatttagaagtaaagaaaaaatataattgaggatttctatttttgtcatctataatcagccatttcagagcaatytggaatatgaaacatattaatgttaaaaccatactgaatg

SEQ ID NO: 266292 - DNA, 619 bp, Homo sapiens
aatattctattttaatgatttgggggcctcaaaaatatacttaggcaatattctcatcaccccttaatagtttcatgctccctgtgcatgcttggccatgtacaatgatgatgttcaactgtgtcaccaaacacatcaagatgtatcaaaccatataaaatttccctgcatacataagaatccatatccccccaaaactacataccaacatgttaaaatgagacaggagaatatgcagtggtttatctttctaatgttaacatatgcaggataaagggggaggcgggaaaacttttctttgtatttctcatgtctctaaaatatatttatgccagtcacacacaagaccaaattgtaatttatgttggtgatttgtgagatgagatttcactcaagatcaaaagtgaaatgtacaggcacccctaccatgttaagaactcacatcatcatttttcaaggtaatatgacattaaaagcctggaaataaatctcagaggatctgctagttagtgcaattttaacataagcaaattgagaatgaacctgtcaccgaagtrtatttattataaattcatactcacacagtgaatctatcagttttcaaatactgagctatatt

SEQ ID NO: 266293 - DNA, 592 bp, Homo sapiens
tgagcctggaggatctcataagtctttgtaatgaatgcatttattccgaattagatggggagtgamtggaggaaaaacgactatttctgttactgtctatacaatacgaaaatgtctatcctattattagaatattttgtttcatggatagagttgcactggtttaagactatgaggaagtcagcccagagactcagtcttatttgcctctatctaaaatctctacagaaagatttcgtgtttatgtaaatgttgattcaaatgactcttaaaacatttttctgagtcacatagggtactgacaagatgcaccaaagtcaaaagggtctgcaccaaagtttcacagtgtttatctcaaattgctctagagattcactgactcctaaaagtgatggagtagttttgctgaagactgttctaagaactgtactttatcatttccctgaatttattaattccataaatcacaggtagaaattgttgaagtgtatagtcttaaataagatatgcaataatatgacacttctcttatagccatgaaaccaaatcacaaactcaatataggaaaagcactttttggggagatttgttt

SEQ ID NO: 266294 - DNA, 657 bp, Homo sapiens
gctgtcagtttatatttgttagccaaatgactctatgcaaatcattaaaatgcactgtgcctcagtttcctcaattgcaaaacaaggataaagcaatccacaggtactctggaagcaaaataagtataataattgtaacaaattctatttattcatcacctactgaatactaagcattatactgggtagtttatttaartgatatataaaccatacaatgctcctgagaaacaaatatcactatattaattttataggtaagaaaactaatactcaaagaaattgattatcttgccaaagggcacccagctgccaccattaactatatttaaacaattcatctgtgatttttctgctctgtagcccttcacaaactataaagtcctattcagataagagattataattttgctattatatttaaatctcttctgctaaaacttgaaagtttccattattaatatatttcataaaggccaaactgaaaaggctcatgtcaattaataatttaaaatatacttgtttgaattgagctaaaatgagtgttacacaggagtttaaaaataaacgaaaaattaggagaatgtaactgaatgagtacatgggcaagaaaggcttccatatattctcaaaaatagaagtgaatagacaagactg

SEQ ID NO: 266295 - DNA, 657 bp, Homo sapiens
gctgtcagtttatatttgttagccaaatgactctatgcaaatcattaaaatgcactgtgcctcagtttcctcaattgcaaaacaaggataaagcaatccacaggtactctggaagcaaaataagtataataattgtaacaaattctatttattcatcacctactgaatactaagcattatactgggtagtttatttaaatgatatataaaccatacaatgctcctgagaaacaaatatcactatattaattttataggtaagaaaactaatactcaaagaaattgattatcttgccaaagggcacccagctgccaccattaactatatttaaacaattcatctgtgatttttctgctctgtagcccttcacaaactataaagtcctattcagataagagattataattttgctattatatttaaatctcttctgctaaaacttgaaagtttccattattaatatatttcataaaggccaaactgaaaaggctcatgtcaattaataatttaaaatatacttgtttgaattgagctaaaatgagtgttacacaggagtttaaaaataaacgaaaaattaggagaatgtaactgaatgagtacatgggcaagaarggcttccatatattctcaaaaatagaagtgaatagacaagactg

SEQ ID NO: 266296 - DNA, 504 bp, Homo sapiens
  misc_feature (1)...(504): n = A,T,C or G
ctaataacaggtgaaatttactccaagagccacttaaaattgatgaattgcttttagaggcatattttatanattttctttttaactaagtttaaattgctaacaactattcaattgttagcaatttaaatttagcaataaagaattcttacatacttgcaatgcagtaagaaatatttccattgattcaagcattcagttatttattcattaactcaataaacatctaggccaattaaatatattgtctgatttaataaagtgtatcaaaagtcttaaaaatgtacatggccttgatcagtaattaaaattagaataacttaagaaacaattcaggatatggaygcagaagcatgtacaagggcttttcattgtagctgttgatattagctaaaaactggtagaaagaaactgagtttctaacaggagtctgagtaatttctgatagccatacattaaaactgaagttacaaacatgttgaggtaaaagataatttacagaaa

SEQ ID NO: 266297 - DNA, 564 bp, Homo sapiens
ttgtagttaaataatgatgagctggagaagctagtaagatgaatattttataaattaatgaatctttaaaatgattataataacatatagtttaaggtaaagaaatacataattatcgataaagataaataagacaataaatgtattaattcaaaaacrttatcatttaatgatattgttcaatacttataatttaatgatatagcaaattcttttcatttgttttgatgtttgtttttacagacatggtctcactctgttgcccaggctggggtgcagtagtgtgatcatagcttactacagcctcaaactcctggactcaagtgatccttccaccttgaccatgcaaagtgctgagattacatgtatgagtcaccatgcctggcctagttaattctttatgacagatatatatatctgtgacacacacagatatatatatatgtgtgtgtatatatatatatacacacacacacaaacaaatgtacacacagtactactacatttattttagccatttcttcacttgtactgaggaagaacaatgtagtctctaggttcaag

SEQ ID NO: 266298 - DNA, 627 bp, Homo sapiens
cttttaacctgtgtttatgatgatgataatgatttttatacttcttgtgctccctgtaataggttttatggtaaacattttatgtgaattatctcacttaactctcagaataagagaggttactgtcaaactcattctatacgtgaggatattgaggcccagggaggtttttatttttcccaagatcacatctttagaaagttactaaactagaacttaaatgtgttactgaatactggttcatgcctgtatgacacactcagagagcaagggtaaataacttgtgttatgagattcagtcgcttttctccataaaggtttcacttaccacataaccttcttatatggggaaagaaaaaagatctcttgctaggcaaaagtaattggcaaagtattcttctcttgttttgtattttttatggctacatagtagttgtacatatttatagggtacatataatatttgttaaaagcatacactgtgtaatgatcaaatcaggagaattgcagtatccatcrcctcaaacatttgtcacttttttgcattgagaacattccaaatctacttctctagttattttgaaatatacgataaattattattaactatagtttccctgttgtgcc

SEQ ID NO: 266299 - DNA, 627 bp, Homo sapiens
cttttaacctgtgtttatgatgatgataatgatttttatacttcttgtgctccctgtaataggttttatggtaaacattttatgtgaattatctcacttaactctcagaataagagaggttactgtcaaactcattctatacgtgaggatattgaggcccagggaggtttttatttttcccaagatcacatctttagaaagttactaaactagaacttaaatgtgttactgaatactggttcatgcctgtatgacacactcagagagcaagggtaaataacttgtgttatgagattcagtcgcttttctccataaaggtttcacttaccacataaccttcttatatggggaaagaaaaaagatctcttgctaggcaaaagtaattggcaaagtattcttctcttgttttgtattttttatggctacatagtagttgtacatatttatagggtacatataatatttgttaaaagcatacactgtgtaatgatcaaatcaggagaattgcagtatccatcgcctcaaacatttgtcacttttttgcattgagaacattccaaatctacttctctagttattttgaaatataygataaattattattaactatagtttccctgttgtgcc

SEQ ID NO: 266300 - DNA, 615 bp, Homo sapiens
gtaatatagccttcagtgcttttattaagatttttaaaaggagaggccgggcatggtggttcacgtctgtaatcccagcactttgggaggctgaggcgggcagatcatgaggtcaggagatggagaccatcctggctaacatggtgaaaccccgtccctactaaaaatacaaaaaaattagctgggcgtggtggtgggtacctgtggtctcagctactcgggaggctgaggcaggagaatggcrtgaacgcgggaggcagagcttgcagtgagccaagattgcgccactgcactccagcctggacaatagagcgagactccatctcaaaaaaaaaaaaataaagatttaaaaggagaaagaattaccaaactaaccacccaaatcaagaagcaaaacattagagaaaaaaaccaataaaggacgtgcaaatgaaaaggcatattctattatgtaggaggtattatctctcagcatgtatgtttgtgaagctggggctaactctgcaaactgaagttcttctttacagatgatgtcctattaggttctgccagtggaatttctatacaagaacgtgaagcaggaatagaggaaaaggaacttccttcttcctgttc

SEQ ID NO: 266301 - DNA, 615 bp, Homo sapiens
gtaatatagccttcagtgcttttattaagatttttaaaaggagaggccgggcatggtggttcacgtctgtaatcccagcactttgggaggctgaggcgggcagatcatgaggtcaggagatggagaccatcctggctaacatggtgaaaccccgtccctactaaaaatacaaaaaaattagctgggcgtggtggtgggtacctgtggtctcagctactcgggaggctgaggcaggagaatggcgtgaacscgggaggcagagcttgcagtgagccaagattgcgccactgcactccagcctggacaatagagcgagactccatctcaaaaaaaaaaaaataaagatttaaaaggagaaagaattaccaaactaaccacccaaatcaagaagcaaaacattagagaaaaaaaccaataaaggacgtgcaaatgaaaaggcatattctattatgtaggaggtattatctctcagcatgtatgtttgtgaagctggggctaactctgcaaactgaagttcttctttacagatgatgtcctattaggttctgccagtggaatttctatacaagaacgtgaagcaggaatagaggaaaaggaacttccttcttcctgttc

SEQ ID NO: 266302 - DNA, 615 bp, Homo sapiens
gtaatatagccttcagtgcttttattaagatttttaaaaggagaggccgggcatggtggttcacgtctgtaatcccagcactttgggaggctgaggcgggcagatcatgaggtcaggagatggagaccatcctggctaacatggtgaaaccccgtccctactaaaaatacaaaaaaattagctgggcgtggtggtgggtacctgtggtctcagctactcgggaggctgaggcaggagaatggcgtgaacgcgggaggcagagcttgcagtgagccaagattgcgccactgcactccagcctggacaayagagcgagactccatctcaaaaaaaaaaaaataaagatttaaaaggagaaagaattaccaaactaaccacccaaatcaagaagcaaaacattagagaaaaaaaccaataaaggacgtgcaaatgaaaaggcatattctattatgtaggaggtattatctctcagcatgtatgtttgtgaagctggggctaactctgcaaactgaagttcttctttacagatgatgtcctattaggttctgccagtggaatttctatacaagaacgtgaagcaggaatagaggaaaaggaacttccttcttcctgttc

SEQ ID NO: 266303 - DNA, 615 bp, Homo sapiens
gtaatatagccttcagtgcttttattaagatttttaaaaggagaggccgggcatggtggttcacgtctgtaatcccagcactttgggaggctgaggcgggcagatcatgaggtcaggagatggagaccatcctggctaacatggtgaaaccccgtccctactaaaaatacaaaaaaattagctgggcgtggtggtgggtacctgtggtctcagctactcgggaggctgaggcaggagaatggcgtgaacgcgggaggcagagcttgcagtgagccaagattgcgccactgcactccagcctggacaatagagcgagactccatctcaaaaaaaaawaaataaagatttaaaaggagaaagaattaccaaactaaccacccaaatcaagaagcaaaacattagagaaaaaaaccaataaaggacgtgcaaatgaaaaggcatattctattatgtaggaggtattatctctcagcatgtatgtttgtgaagctggggctaactctgcaaactgaagttcttctttacagatgatgtcctattaggttctgccagtggaatttctatacaagaacgtgaagcaggaatagaggaaaaggaacttccttcttcctgttc

SEQ ID NO: 266304 - DNA, 361 bp, Homo sapiens
gtaaattggttagaatgtcagtaattctcaatagttatcaccatcaacaggtattaaaaattgctgggtggtagctggtacgtaataaaaattttaaaacaagaactgacctttcagaggcatacatgtagaatactaaagaagattagattctttgggtgytatacttttcagtattttgcttttcaaattattgttttcaaacgtactgaatttttcagaataccaggaaaaattacacaaaaataagatgttaaaatgtgtatttgaacagtttacacaataatgagttaaccattaacacaaagtaatgttaaaagttatatacttaaatatatattttaccaaaaaatatagtcac

SEQ ID NO: 266305 - DNA, 361 bp, Homo sapiens
gtaaattggttagaatgtcagtaattctcaatagttatcaccatcaacaggtattaaaaattgctgggtggtagctggtacgtaataaaaattttaaaacaagaactgacctttcagaggcatacatgtagaatactaaagaagattagattctttgggtgttatacttttcagtawtttgcttttcaaattattgttttcaaacgtactgaatttttcagaataccaggaaaaattacacaaaaataagatgttaaaatgtgtatttgaacagtttacacaataatgagttaaccattaacacaaagtaatgttaaaagttatatacttaaatatatattttaccaaaaaatatagtcac

SEQ ID NO: 266306 - DNA, 570 bp, Homo sapiens
aactatctcccacttccaaatcttgtgtttgacaaaataaaaggatactgaacacagaagatggcacaacaggaatgggaaacatctggcagaaagaaagtgttggggcactttaagcrggaggagagaacatggtaactgccatggctggggcaaaccagactagggagagattttggctgcaaacttttcttttcacattgtcttgattgcatcattatccactgtgtcactatttcagagctaaaaaagagcaatatcaacaactagccataggcagcagcgaacctaatataccatagcatgcaatccagctggtttgagttaccaggaataggtggaaaggttggctttagagcatcaaacagaatagatgcaaacaaaaaaacatacacttaaacatattatcgtggaacttaatatcagagacaaagaatactctgaaggaaagaaatagtcactttcaaagaaataagaatcagattaattttttcaataaaagaccaatgagtaatattttctaagagttgtagaaaaagaattggaaagctaaaaattgatctgcagcta

SEQ ID NO: 266307 - DNA, 570 bp, Homo sapiens
aactatctcccacttccaaatcttgtgtttgacaaaataaaaggatactgaacacagaagatggcacaacaggaatgggaaacatctggcagaaagaaagtgttggggcactttaagcaggaggagagaacatggtaactgccatggctggggcaaaccagactagggagagattttggctgcaaacttttcttttcacattgtcttgattgcatcattatccactgtgtcactatttcagagctaaaaaagagcaatatcaacaactagccataggcagcagcgaacctaatataccatagcatgcaatccagctggtttgagttaccaggaataggtggaaaggttggctttagagcatcaaacagaatagatgcaaacaaaaaaacatacacttaaacatattatcgtggaacttaatatcagagacaaagaatactcygaaggaaagaaatagtcactttcaaagaaataagaatcagattaattttttcaataaaagaccaatgagtaatattttctaagagttgtagaaaaagaattggaaagctaaaaattgatctgcagcta

SEQ ID NO: 266308 - DNA, 570 bp, Homo sapiens
aactatctcccacttccaaatcttgtgtttgacaaaataaaaggatactgaacacagaagatggcacaacaggaatgggaaacatctggcagaaagaaagtgttggggcactttaagcaggaggagagaacatggtaactgccatggctggggcaaaccagactagggagagattttggctgcaaacttttcttttcacattgtcttgattgcatcattatccactgtgtcactatttcagagctaaaaaagagcaatatcaacaactagccataggcagcagcgaacctaatataccatagcatgcaatccagctggtttgagttaccaggaataggtggaaaggttggctttagagcatcaaacagaatagatgcaaacaaaaaaacatacacttaaacatattatcgtggaacttaatatcagagacaaagaatactctgaaggaaagaaatagtcactttcaaagaaataaraatcagattaattttttcaataaaagaccaatgagtaatattttctaagagttgtagaaaaagaattggaaagctaaaaattgatctgcagcta

SEQ ID NO: 266309 - DNA, 431 bp, Homo sapiens
agtctttacctattaataaccttaaatattaatgggttaaattctctgtattagtctgttctcacattgctataaggaattacctgagactgggtaatttacaaagagaagagttttaattgactcacatctctgcctggctggggaggcctcaggaaayttacaatcatggccgaaggcacctcttcacaggacagcaggagagagaatgagtgccagcaggggaaatgccagacgcttataaaaccatcagatcatatgagaactcactcactatcatcagaacagcatggggaaaactgcccccattattcaattgcctccaactgggtccctcaaataacaggtggggattatggggattacaaatcaagatgagatttgtgtaaagacactgccaaaccatatcattctgtccccggcccctccaa

SEQ ID NO: 266310 - DNA, 431 bp, Homo sapiens
agtctttacctattaataaccttaaatattaatgggttaaattctctgtattagtctgttctcacattgctataaggaattacctgagactgggtaatttacaaagagaagagttttaattgactcacatctctgcctggctggggaggcctcaggaaatttacaatcatggccgaaggcacctcttcacaggacagcaggagagagaatgagtgccagcaggggaaatgccagacgcttataaaaccatcagatcatatgagaactcactcactatcatcagaacagcatggggaaaactgcccccattattcaattgcctccaactgggtccctcaaataacasgtggggattatggggattacaaatcaagatgagatttgtgtaaagacactgccaaaccatatcattctgtccccggcccctccaa

SEQ ID NO: 266311 - DNA, 604 bp, Homo sapiens
tgcacacagcaagggggccttagacctggcccaagaaaccatttttctctcctaggcccctggcctgtgaagggaggggctgccatgaaggtctctctgacatgccctcgagatattttccccattgtcttggcaattagtgtttggctcttcattatacaaatttctatagctggtttgaatttctcccagaaaatgggtttttgttttctactgcatcgtcagactgcaaatgttccaaacttttatgctctgcttcctcttgaatgctttgctgtttagaaatttctcctgccagataccctaaatcatctctctcaagttcaaagttccacagttctctagggcagggtcaaaaagctctctactaaagcatagccagagtgacctttacttcagttcccaacaagtttttcatctccatctgagaccacctcagcctggacttcattgcccatatcactatcagcattttggtcaaagccrttcaacaagtctgtaagaaggtccaaactttcccacaccttcctgtcttctgagtcctccaaactgttccaacctctgcccattacccagtttcaaagttgctttccacgttcttggg

SEQ ID NO: 266312 - DNA, 603 bp, Homo sapiens
agacactgaaatatagtaatagtaggggattccaagaccccactttcaacaatggacagatcatctagacaaaaaataaaaaaccattggactaagattgcaccatagaccaagtggacctaacagacatttatagaacattccatccaacagctacagaatacacattcttctcaactgcacatgcaacattctcaaggatatgttaggccacaaaataagttttaagagawttaggaagagagagatcatatcaagtaacttgtatggccacaatcatataaaactagaaatcaataagaaaaatttgggaaattgtaaaaatacatggaaacaaaacaacatgcccctaataaccagtgggtcaatgaaaatcaacaagcatttttagttagactaagaaaaaaagaagactcaaaatcagagtcaaaaaagaggacattactactgatatcacagaaatacaaagtatcataagagacttttatgagcaactatatgccaacacactgatagcagaaaaaagtggataaattcctagacacatacaatctaccaagataaattatcaattaaaaaatggggtcaggcatggtcactcat

SEQ ID NO: 266313 - DNA, 603 bp, Homo sapiens
agacactgaaatatagtaatagtaggggattccaagaccccactttcaacaatggacagatcatctagacaaaaaataaaaaaccattggactaagattgcaccatagaccaagtggacctaacagacatttatagaacattccatccaacagctacagaatacacattcttctcaactgcacatgcaacattctcaaggatatgttaggccacaaaataagttttaagagatttaggaagagagagatcatatcaagtaacttgtatggccacaatcatataaaactagaaatcaataagaaaaatttgggaaattgtaaaaatacatggaaacaaaacaacatgcycctaataaccagtgggtcaatgaaaatcaacaagcatttttagttagactaagaaaaaaagaagactcaaaatcagagtcaaaaaagaggacattactactgatatcacagaaatacaaagtatcataagagacttttatgagcaactatatgccaacacactgatagcagaaaaaagtggataaattcctagacacatacaatctaccaagataaattatcaattaaaaaatggggtcaggcatggtcactcat

SEQ ID NO: 266314 - DNA, 603 bp, Homo sapiens
agacactgaaatatagtaatagtaggggattccaagaccccactttcaacaatggacagatcatctagacaaaaaataaaaaaccattggactaagattgcaccatagaccaagtggacctaacagacatttatagaacattccatccaacagctacagaatacacattcttctcaactgcacatgcaacattctcaaggatatgttaggccacaaaataagttttaagagatttaggaagagagagatcatatcaagtaacttgtatggccacaatcatataaaactagaaatcaataagaaaaatttgggaaattgtaaaaatacatggaaacaaaacaacatgcccctaataaccagtgggtcaatgaaaatcaacaagcatttttagttagactaagaaaaaaagaagactcaaaatcagagtcaaaaaagaggacattactactgatatcacagaaatacaaagtatcataagagacttttatgagcaactatatgccaacamactgatagcagaaaaaagtggataaattcctagacacatacaatctaccaagataaattatcaattaaaaaatggggtcaggcatggtcactcat

SEQ ID NO: 266315 - DNA, 617 bp, Homo sapiens
gagggtaaaaagtggggaggattttgtcttgcatcttggataccagctcagccacaacaggatagggaaccagtcaaagttgtgagccctttttctaggccctagctcccgggcaacattcgtagacactcactgcatcagaaagcaacctgctgccttgaagggaagkacccaatcctggcaagattcatcacctgctaactgaagatcccttgtgccctgcataaccagcagcaatacccacgtgtactacattgagggccttgggtgaggttctgaggcttactggcttcaggtgagactcagcacattcccagctgtggtggttgtggagaaagactccttccacttgagaaaagcagagagaaatgcaaaggggacattgtcttgcacattaggtagaagcttggctacagagataggacaccaaagaggctcttggagccccaatttcaggacttggctcttagacggcattgctggacctgccctgggccagaggtgagcccactgccctgaagggtgagtcccaggtcaggcagcattcactacaagtggactgaagaacctttgggccttaagggaatatcagtggtagttttagaggctccttatga

SEQ ID NO: 266316 - DNA, 617 bp, Homo sapiens
gagggtaaaaagtggggaggattttgtcttgcatcttggataccagctcagccacaacaggatagggaaccagtcaaagttgtgagccctttttctaggccctagctcccgggcaacattcgtagacactcactgcatcagaaagcaacctgctgccttgaagggaagtacccaatcctggcaagattcatcacctgctaactgaagatcccttgtgccctgcataaccagcagcaatacccacgtgtactacattgagggccttgggtgaggttctgaggcttactggcttcaggtgagactcagcacattcccagctgtggtggttgtggagmaagactccttccacttgagaaaagcagagagaaatgcaaaggggacattgtcttgcacattaggtagaagcttggctacagagataggacaccaaagaggctcttggagccccaatttcaggacttggctcttagacggcattgctggacctgccctgggccagaggtgagcccactgccctgaagggtgagtcccaggtcaggcagcattcactacaagtggactgaagaacctttgggccttaagggaatatcagtggtagttttagaggctccttatga

SEQ ID NO: 266317 - DNA, 495 bp, Homo sapiens
gggaatggcagaggaagctagaattctctcttccctgtcctctgagtggctcccctggtctctcggaacattaccagtgctgtcaacggcggcatagcactttacagttaaactgcacagccagcttgcctcacgggatcttctcacacacacccacccccaaccatcgcccctcacagcacaggaaccatctcagtgtcctcgtctccccggtacacatacacacgtgcacacacatacaagtggtgcacamttgcaagaaccagcatgcctcaaagagctccctgatgggggttgggggcagctgctgtccatgaagcccagggacatctgttgctcctgcagggccccccttcccccaacaacagggctcagcttaccagatgaaaggccgaatttttccaggcccctctcgaagcccgagccttggaaagtgcccaggaggcgggatggtttggggaggcgggatggtttggggaggcaggctggggctgc

SEQ ID NO: 266318 - DNA, 537 bp, Homo sapiens
gatctggtcctgggagtcctgggagtcctgggtctcagtgtcctrtaggcggggaagatcttccagaaatcgaacatgaaaatataaagctatactttagcttttaggatggcaatgagaaagtagcgtctactttttaatgatgaaatcccttagactaatcataatttacaaaagatgcagcccactcagtccccacagctattgcgtgagcatgatataactacggtccccacttgcagatgggaaaactgaggggcagaatggctcagtgagttgctcatggtcacaaagccaataagtatcggaggttgcttctgttgtcggtttatatctggccatggggcaaggctttgcccttttgaagactcaactcacatggtagggggttgtccccccaacccatccccactatgggaagtggagcactttttcctggccctttctcacctggaatactcatgatgaatagtcatatccttctcctttttcaaagctagtagaaattttgccgcctctgggaaatcttccctgttt

SEQ ID NO: 266319 - DNA, 537 bp, Homo sapiens
gatctggtcctgggagtcctgggagtcctgggtctcagtgtcctgtaggcggggaagatcttccagaaatcgaacatgaaaatataaagctatactttagcttttaggatggcaatgagaaagtagcgtctactttttaatgatgaaatcccttagactaatcataatttacaaaagatgcagcccactcagtccccacagctattgcgtgagcatgatataactacggtccccacttgcagatgggaaaactgaggggcagartggctcagtgagttgctcatggtcacaaagccaataagtatcggaggttgcttctgttgtcggtttatatctggccatggggcaaggctttgcccttttgaagactcaactcacatggtagggggttgtccccccaacccatccccactatgggaagtggagcactttttcctggccctttctcacctggaatactcatgatgaatagtcatatccttctcctttttcaaagctagtagaaattttgccgcctctgggaaatcttccctgttt

SEQ ID NO: 266320 - DNA, 537 bp, Homo sapiens
gatctggtcctgggagtcctgggagtcctgggtctcagtgtcctgtaggcggggaagatcttccagaaatcgaacatgaaaatataaagctatactttagcttttaggatggcaatgagaaagtagcgtctactttttaatgatgaaatcccttagactaatcataatttacaaaagatgcagcccactcagtccccacagctattgcgtgagcatgatataactacggtccccacttgcagatgggaaaactgaggggcagaatggctcagtgagttgctcatggtcacaaagccaataagtwtcggaggttgcttctgttgtcggtttatatctggccatggggcaaggctttgcccttttgaagactcaactcacatggtagggggttgtccccccaacccatccccactatgggaagtggagcactttttcctggccctttctcacctggaatactcatgatgaatagtcatatccttctcctttttcaaagctagtagaaattttgccgcctctgggaaatcttccctgttt

SEQ ID NO: 266321 - DNA, 593 bp, Homo sapiens
aacacaagtacaatcctctagcagtatgtagcaaaagccttaaatagcacatagcctctgacctaacagttctactttgaggacatttttctaaagaaataataaaaagataggctgggcacagtagctcatgcctgtaatcacagcactttgcgaggttgaggcaagtggatcgcctgaggtcaggagtttgagaccagcctgggcaatatggtgaaaccccatctctactaaaaaaatacaaaaattagccgggagtggtggcacacacctgtaatcccagctactctggaggctgaggcaggaggatcacttgaacccaggaggcagagggtrcagttagctgagatcgtgccattgcactccagcctgggtgcctgagcaagacttggtctcaagaaaaaaaaagatatatgtataaaaatgttcatctcagtcttatcaataaagggcaaaaattggacacaacttaagtatccagtaggggatttttggttaaatataatactttgcctcagtacacaggatatttgtagtgattaaaatgaggaagtagatctgtatttcattagcaccaaaagaggttcataaga

SEQ ID NO: 266322 - DNA, 593 bp, Homo sapiens
aacacaagtacaatcctctagcagtatgtagcaaaagccttaaatagcacatagcctctgacctaacagttctactttgaggacatttttctaaagaaataataaaaagataggctgggcacagtagctcatgcctgtaatcacagcactttgcgaggttgaggcaagtggatcgcctgaggtcaggagtttgagaccagcctgggcaatatggtgaaaccccatctctactaaaaaaatacaaaaattagccgggagtggtggcacacacctgtaatcccagctactctggaggctgaggcaggaggatcacttgaacccaggaggcagagggtacagttagctgagatcgtgccattgcactccagcctgggtgcctgagcaagacttggtctcaagaaaaaaaaagatatatgtataaaaatgttcatctcagtcttatcaataaagggcaaaaattggacacaacytaagtatccagtaggggatttttggttaaatataatactttgcctcagtacacaggatatttgtagtgattaaaatgaggaagtagatctgtatttcattagcaccaaaagaggttcataaga

SEQ ID NO: 266323 - DNA, 593 bp, Homo sapiens
aacacaagtacaatcctctagcagtatgtagcaaaagccttaaatagcacatagcctctgacctaacagttctactttgaggacatttttctaaagaaataataaaaagataggctgggcacagtagctcatgcctgtaatcacagcactttgcgaggttgaggcaagtggatcgcctgaggtcaggagtttgagaccagcctgggcaatatggtgaaaccccatctctactaaaaaaatacaaaaattagccgggagtggtggcacacacctgtaatcccagctactctggaggctgaggcaggaggatcacttgaacccaggaggcagagggtacagttagctgagatcgtgccattgcactccagcctgggtgcctgagcaagacttggtctcaagaaaaaaaaagatatatgtataaaaatgttcatctcagtcttatcaataaagggcaaaaattggacacaacttaagtatccagtaggggatttttggttaaatataatactttgyctcagtacacaggatatttgtagtgattaaaatgaggaagtagatctgtatttcattagcaccaaaagaggttcataaga

SEQ ID NO: 266324 - DNA, 561 bp, Homo sapiens
acaggaaaggcaaaaaaaaaacaaaacaaaacatgtttttattgtttgattaacaaactggttgggggaagggcaagaataagacatgcggggaaataccagctttgattagtcagaaactcctgttatctgtacaaaaaaatgaatgttacaaaaatcacgtaaaaaaactaggctcaaggaagcagccgcccttgcaagagggctcaaggcacctgggaggctgagaagaggccaacctggccatgggcgtggctgcatggacagctcttccctcctgcccttccccagatgcccttccctcctgccccgaggggcacactccctctccccaattacaggtgctacaaaactgccttgaataccaccgccaaggcactgccagagatgaaatgggccctgagcagagcctcaggctctccctccccygtagcccaggcctggagaaaggagggccttgttccccaggccccaggtgggcacagattccagagctgcctcggggaaagcctcttaggggaggcccaggctctgctccctggggaggcagaggccgtggga

SEQ ID NO: 266325 - DNA, 627 bp, Homo sapiens
ttgggctctttcttctggggcttctgaactgatagactgttagtttgaagcggtcagagactgccatagaaaaggatcttgactgagaatgaagctaacacagaggaaaataagaggcctggtaataatatttacattacaaagcttaatctacctttgaatttttaagatacatgaactactacatgtccttatttgcttaagtctccgggtaggttcctatcccttgtaatggcttagcatataatagctgagagtcttcatattttgatgtagacttcctttcttgcttgtcttccttttgtttgttaaatttccctgaatcatcaccaaaacacattgtaactttgaaaaactctttcccttgggaaccgtcatttgatccatatagtggctatgtgatggtggttcaagtgatactgggcaccaagtaattgaacaagaatttcctaaatgtgtttggtggaatactaaagtgagacttctttttcaaaattttgtttttattttctatttttaacatttttgtgggtacatagtaggtgtatacatttatggggtacatgaagtgttttgatacagacmtgtaatgtgaaataagcacattatagggaatggagtatcccc

SEQ ID NO: 266326 - DNA, 633 bp, Homo sapiens
ttaaccaaactgaaattctgtatttggctaacagtatcttgtattgagaaaaaaaatggctgttccatcttctgtttgtttttaaaagccagcaacaagctcttggcatcaatattcgtagtgggttttcaaacactcggcaaaaaacatcaatagcatctgctcacaccccatcaccctatcccacattcatttggtggatagctctaactagctggatggttaaattctgcacctttctgcatttaaacttagcactgtggactaactccaacatagttagaaagttgcttcaaaacagttgmattttggcttccacctttctcactcatgaggcccaggccacttgactaaatagctgagccagaaactgtggactccagtcctagccccactcttcgattgaccataacaatccttggatacagaggcaaaagaccaagatttaaatcatggttgtatattggctagctttgagcttttggtcaagttccctaattttagtcttaattttccttatttataaagatggggatcatatttctgttcatcccatcccacaaggtaaccagcccaatttgggaggatctttcattgttacttataatattatatttaaataagtgtatactt

SEQ ID NO: 266327 - DNA, 633 bp, Homo sapiens
ttaaccaaactgaaattctgtatttggctaacagtatcttgtattgagaaaaaaaatggctgttccatcttctgtttgtttttaaaagccagcaacaagctcttggcatcaatattcgtagtgggttttcaaacactcggcaaaaaacatcaatagcatctgctcacaccccatcaccctatcccacattcatttggtggatagctctaactagctggatggttaaattctgcacctttctgcatttaaacttagcactgtggactaactccaacatagttagaaagttgcttcaaaacagttgcattttggcttccacctttctcactcatgaggcccaggccacttgactaaatagctgagccagaaactgtggactccagtcctagccccactcttcgattgaccataacaatccttggatacagaggcaaaagaccaagatttaaatcatggttgtatattggctmgctttgagcttttggtcaagttccctaattttagtcttaattttccttatttataaagatggggatcatatttctgttcatcccatcccacaaggtaaccagcccaatttgggaggatctttcattgttacttataatattatatttaaataagtgtatactt

SEQ ID NO: 266328 - DNA, 633 bp, Homo sapiens
ttaaccaaactgaaattctgtatttggctaacagtatcttgtattgagaaaaaaaatggctgttccatcttctgtttgtttttaaaagccagcaacaagctcttggcatcaatattcgtagtgggttttcaaacactcggcaaaaaacatcaatagcatctgctcacaccccatcaccctatcccacattcatttggtggatagctctaactagctggatggttaaattctgcacctttctgcatttaaacttagcactgtggactaactccaacatagttagaaagttgcttcaaaacagttgcattttggcttccacctttctcactcatgaggcccaggccacttgactaaatagctgagccagaaactgtggactccagtcctagccccactcttcgattgaccataacaatccttggatacagaggcaaaagaccaagatttaaatcatggttgtatattggctagctttgagcttttggtcaagttccctaattttagtcttaattttccttatttataaagatggggatcatatttctgttcatcccatcccacaaggtaaccagcccaatttgggaggatctttcattgttayttataatattatatttaaataagtgtatactt

SEQ ID NO: 266329 - DNA, 549 bp, Homo sapiens
ggtcttatatgtgtgcttaatatgtccttattctggagatctcagaatgcagtcctaagattgccttagctatttttggtagctagatctactaatctcatattgaaattttagtccacaaaacccatagttctcttttacatcaacttcacaggccttcatatctgccttcctgtatttaataatagtgatgtgacagcttttatcaagcacttacaatatgcaaggcattatgctgaatgatttgcatacattaactgtttatctcttaaaattaagttttagtgcaaattttattattttctctaatttacagatgagaaaactgaggcttacagaaaaagaaatatgattttcttgtgtagagcttgtatrgtgcaatcctgctaagttcacttattaattatagaaactttttattttttattttttaaaaaagtttcttggaattttctatatagacaattatgttgttggtgaatgggatacttttatctctttctttccaaactgtatacctttaatttctttttcttaccttattgcatt

SEQ ID NO: 266330 - DNA, 582 bp, Homo sapiens
gtttctgccatttcttgtggtctgctgaacttccactgggatgtggttagccagcaacggttgtatctgggtgcctgcagttgtggcttattgcaaattaacccctggccactggatgccactcttatgtcagaattttggtttgcccatctcctgttgttaaactcctaccagcaaatgtttatttggaaggttgggatagaagaaaatgtgaggccttgaaatcagactgtagtggattatytgaatagctccaattcttcatccctttgccataggactttgcagttctcccactaagagaggtggaatatattcccctgcccctgaagtttgtctgtgtagctttctttggccaattgaatgttagcataaatgatgtgaccaagaatttcaaagacgcttgcacaattggagttgctcttctgggcctctgccttggccttgaggacaacatgcctgagatagcctgatgctcccagaaagaagagagacagctgaagcagagtcaccctgagtcaagcccagcttagaccaagtgtccctgggctgagctgcagatctctgaaaataaatgaatgt

SEQ ID NO: 266331 - DNA, 584 bp, Homo sapiens
gacagtgagcaagacaacctcccagggaactttttttctgtcttccaaatcatgcagcctgaagctgcatctccactttggcacatagggatgtaagggtggaggcaggtggggtagtgaggaggaatggggcaggcattagagagtcaacaggtgtattctttttaataattatagatataacctagttaccatagaaccaaatttgaagaattgtccctcttgggtctcagtttaagggacctttagatatcatacttgtgcccagtgaagacacatagtaggtgctcaatttataattttttaaatgagcgaatagatacagagcagacccattgagtggatcatgacaagaactgatttataaaggagttccaaataactggccaaccttgcacaatgatggggaaaataaytactacccttgattatgaaggcatattagttaaggtaccatcagctgctataccagacaaaggtagcattaaccactattacagacaaacccccaaatctcaatggcccaatcccacgtgaatgtggccaaaacccacagattcaggggttttgggttctctagtttg

SEQ ID NO: 266332 - DNA, 560 bp, Homo sapiens
gccatggtatctcagactcaaagcaggaggaggcaccggagttctgtttggaatggaggggtgctttcgtttggaaattgccttggacctaagtgggtaatgcttttaaataagttcacaatctctacgatgatcagtagagtggtaatcagaataaactgttaatatattcctagaaaccaaatcacctgtgtgccgaggactggcctttcyttaatcatacatatacatatatatacattaataaatttatttatatataaatatatatgacatatacttatggaatatatatttatatctatatttatatatactaatatgtaatatatattatggactatatattttatatgtttatgtaaatatatataaatatataggaacttatatatatttatatatataaactcaatgaaacacatgatacacaagctgcctttatgtcacaatcccatgtgatttattgatacagtagtccccctgcatccatagaggatacattccaagactcccagtggatgcctgaaactgcaaatagtactgaatcctatatgtac

SEQ ID NO: 266333 - DNA, 544 bp, Homo sapiens
gaaaaataaagtggtccatcagcagggacagtttgggacacattgctttagatcagtgtcttaatgtctacaaggtgggttgttgtgagaatgaagtggtaattatatcygatactataaattgctctacaaatggcatttttgccattggtgtgttcatcgcactgatacactcccaggaagactctgccttttttgcctctccagaatgtttgagaaaaaggtagagcaggaggatgcacaccagagtgtgtttttcagaaccgcgatttcctgtcccaaagggtttggcctgtgttctgatccatctgtggtccagaagtttactggctgtttagccttgccataggcagtaacggtaggtggtccctgaaggatgtcctcctcactgccctcctgtttccaactctcttgttttatttgtctttaatatccccatgtggaatgtttttgaccaaaatgatcaaagtgatatttcagaaactcagtctgcatgcatgtacaagatgaattggattagggaaagcacaaggaactcccagga

SEQ ID NO: 266334 - DNA, 544 bp, Homo sapiens
gaaaaataaagtggtccatcagcagggacagtttgggacacattgctttagatcagtgtcttaatgtctacaaggtgggttgttgtgagaatgaagtggtaattatatccgatactataaattgctctacaaatggcatttttgccattggtgtgttcatcgcactgatacactcccaggaagactctgccttttttgcctctccagaatgtttgagaaaaaggtagagcaggaggatgcacaccagagtgtgtttttcagaaccgcgatttcctgtcccaaagggtttggcctgtgttctgatccatctgtggtccagaagtttactggctgtttagccttgccataggcagtaayggtaggtggtccctgaaggatgtcctcctcactgccctcctgtttccaactctcttgttttatttgtctttaatatccccatgtggaatgtttttgaccaaaatgatcaaagtgatatttcagaaactcagtctgcatgcatgtacaagatgaattggattagggaaagcacaaggaactcccagga

SEQ ID NO: 266335 - DNA, 670 bp, Homo sapiens
ggaaacaattaagggttttaggaaatacagagataaccaagaattatatgggacacataaatatcttgagggtgatactttctattgttgatgtttaatacaggcttgctgcattaaattgaatagtattgaactagtatttaaaaagaggcatatattaggtagcagaaatgagctaagcatcagaagactggggttgttgtctcaacgttgttttcattattgctgaaaccactggccagttacatactcggtctgggcctcagtcttcttgtctataaaatgatagctaatgagaaaatctctagctgcaattttcttggagcacatgaaagcctrttaagaatggcctgtccctgaaaatgtctaaatggggttgcttgtgttacaatgtaggggctcttccttagaaattccagcctaagaacccccaatctatgagaactccaagctcatacattgagaaaaccacattctctcccaaggaagataaaacaatcaccttcaaatattagtttacctcaactaatgacatactttgttcacagtgcctctagaagcaaaccatcagtttggtccagagcttacctaatatgagccaaagaaacttttttaactgaacatatcaaagatcctcatcctcaagctatacctaagttccgaagagcta

SEQ ID NO: 266336 - DNA, 670 bp, Homo sapiens
ggaaacaattaagggttttaggaaatacagagataaccaagaattatatgggacacataaatatcttgagggtgatactttctattgttgatgtttaatacaggcttgctgcattaaattgaatagtattgaactagtatttaaaaagaggcatatattaggtagcagaaatgagctaagcatcagaagactggggttgttgtctcaacgttgttttcattattgctgaaaccactggccagttacatactcggtctgggcctcagtcttcttgtctataaaatgatagctaatgagaaaatctctagctgcaattttcttggagcacatgaaagcctgttaagaatggcctgtccctgaaaatgtctaaatggggttgcttgtgttacaatgtaggggctcttccttagaaattccarcctaagaacccccaatctatgagaactccaagctcatacattgagaaaaccacattctctcccaaggaagataaaacaatcaccttcaaatattagtttacctcaactaatgacatactttgttcacagtgcctctagaagcaaaccatcagtttggtccagagcttacctaatatgagccaaagaaacttttttaactgaacatatcaaagatcctcatcctcaagctatacctaagttccgaagagcta

SEQ ID NO: 266337 - DNA, 595 bp, Homo sapiens
aatggttttccatgaaaaagcaactaattcaactcacaagtcaaacaatgcccaattactttatattgagacaaccatcatactttgatatgcagcagaagtatgcccagaagtaygcaattcaattattaatttctactgctttatcaaagacatttgtaaataaaatgattattgtctgtaagtgcatggcagtgaagaatataatcactactagtacttttggtgccactgccttgatttgtgctgaggaaccagcaatttcacctgtcattgttcttgtaccattgttgcaaatgtcaatacactgaaaaacacaaataaaatctagatattgtgaagatagtttgatctgaggaacatctgaaagagtctcagagactcataagggcccagggatctcacgttgagaattgctgctctaactaatgtaacccccagggcctaaagcaggtgagaaactggatgtggactgcttcaggaaaaggaccacaaagtgacaagtgagtcagtgtgactgttaatgccctaaaccatgacctcagggccagaccaggccaatccctagtgacaggtgacagcgtgctggcagccc

SEQ ID NO: 266338 - DNA, 595 bp, Homo sapiens
aatggttttccatgaaaaagcaactaattcaactcacaagtcaaacaatgcccaattactttatattgagacaaccatcatactttgatatgcagcagaagtatgcccagaagtacgcaattcaattattaatttctactgctttatcaaagacatttgtaaataaaatgattattgtctgtaagtgcatggcagtgaagaatataatcactactagtacttttggtgccactgccttgatttgtgctraggaaccagcaatttcacctgtcattgttcttgtaccattgttgcaaatgtcaatacactgaaaaacacaaataaaatctagatattgtgaagatagtttgatctgaggaacatctgaaagagtctcagagactcataagggcccagggatctcacgttgagaattgctgctctaactaatgtaacccccagggcctaaagcaggtgagaaactggatgtggactgcttcaggaaaaggaccacaaagtgacaagtgagtcagtgtgactgttaatgccctaaaccatgacctcagggccagaccaggccaatccctagtgacaggtgacagcgtgctggcagccc

SEQ ID NO: 266339 - DNA, 595 bp, Homo sapiens
aatggttttccatgaaaaagcaactaattcaactcacaagtcaaacaatgcccaattactttatattgagacaaccatcatactttgatatgcagcagaagtatgcccagaagtacgcaattcaattattaatttctactgctttatcaaagacatttgtaaataaaatgattattgtctgtaagtgcatggcagtgaagaatataatcactactagtacttttggtgccactgccttgatttgtgctgaggaaccagcaatttcacctgtcattgttcttgtaccattgttgcaaatgtcaatacactgaaaaacacaaataaaatctagatattgtgaagatagtttgatctgaggaacatctgaaagagtctcagagactcataagggcccagggatctcacrttgagaattgctgctctaactaatgtaacccccagggcctaaagcaggtgagaaactggatgtggactgcttcaggaaaaggaccacaaagtgacaagtgagtcagtgtgactgttaatgccctaaaccatgacctcagggccagaccaggccaatccctagtgacaggtgacagcgtgctggcagccc

SEQ ID NO: 266340 - DNA, 452 bp, Homo sapiens
gttattttaaacgaccaaagccatttcagaagggtaagagcatgtcaacatgtccacagggtcagaactgctcgctcttaaagacttgaaacgcaccagaagcgctggtgatacaattctctccctttcacaatgaatggaaatgagaaaaggtatcttcctccgaaacatgctaaaaatatagcaattacccgatacagatgtggtgttataaactcctattccaaagcattctgtttcagccatgatttccattgcagaaaactgtgytaatagaaacatccctattaatctgaatttgagatatttcatacaatgtatattacctttctgctgcctgcaaccttctgccaggttttttttttctttttaggaggtgctttgaggggaccataccatgagaacaatacacagctgctgctgtatacagatatctaattgtcaatattgtg

SEQ ID NO: 266341 - DNA, 568 bp, Homo sapiens
actgtttgtttctccatagcatctattaccatctgacatacttatttatgtactttattgtctatctcctgcacaatagcatttaaacttcataagcacagattcttatccagtttgttcactgcagagtaggcagtcaataagcatttgtcgaatgaataaattatatcatctagccctcagcatccctgaaaaataagtgttactagttctactttagagatgaggaaactragatgaagagaatttaagtaactcgccctaaatctagagttgccagacctagcaaataaaaatacaatatgctcaactaaatttgaacatcagatgaacaataaataaaaatttttagtataagtatgttcgatacaatattttagacataacttacactaaaaaaatgcattgtttatctaaaatttaaatttaacctgccaatcctataatttatctgtagctctacttaaatcacactataagcaagagacagagctgagaatctcacccacgtttctacgaccccaaattcctgccacagtctctcattctgaaaaaaaaaaaaagtcac

SEQ ID NO: 266342 - DNA, 568 bp, Homo sapiens
actgtttgtttctccatagcatctattaccatctgacatacttatttatgtactttattgtctatctcctgcacaatagcatttaaacttcataagcacagattcttatccagtttgttcactgcagagtaggcagtcaataagcatttgtcgaatgaataaattatatcatctagccctcagcatccctgaaaaataagtgttactagttctactttagagatgaggaaactgagatgaagagaatttaagtaactcgccctaaatctagagytgccagacctagcaaataaaaatacaatatgctcaactaaatttgaacatcagatgaacaataaataaaaatttttagtataagtatgttcgatacaatattttagacataacttacactaaaaaaatgcattgtttatctaaaatttaaatttaacctgccaatcctataatttatctgtagctctacttaaatcacactataagcaagagacagagctgagaatctcacccacgtttctacgaccccaaattcctgccacagtctctcattctgaaaaaaaaaaaaagtcac

SEQ ID NO: 266343 - DNA, 467 bp, Homo sapiens
ctcattatcttcctatcatattttcctcgacttctaaaagcatgcatgygcacagacacacacacacacacaccccacatggttacatgcaaaactcatattaacccatctaagcttttatccccctggtagggtgattattcagggatgggcatgtgactagggatggaccaatcaaagcctttccctggggtaattctaattgacactactgagggaggcctcttgcctcttaggtctcagagctagaaggatatgaacccaaggctaatgataatcataatttttgccatataaagacagctatctgccatagaagagagtgaaaccaagcaaaggcaacctggacagagaaagagagtgcatggcagaaccgggtcccctgggcaagtcccaggctccaaagttgcccagttcctactcaagctctggattcaggctctgttagctgatcctgcatccttcca

SEQ ID NO: 266344 - DNA, 458 bp, Homo sapiens
catctttgtgctgtggaccatgatgggacccccaagatggaatcaaaagttaaaaacataaaaaggcaaaactgttgaactctccaataggagactatatgygggatgacttgttccttcaatacacctgcaacaaagcaaacaagtttccacagtctcattaaaactgcagtggagagtctgcaagttttctattaagcaaggatggtgaatggaaattgattttgcactaataatgtaaggtgtgtaaaatgctatacataaggtcaaagtataatttttatagttgaaaacatgactctcatacaaacataaaatgaacacctgtcaaagatttattaactcattaatgagggaggcagtatgaaaaatctacttcagatagcattttgaggaatggggtatttataggcatttaaaaagaaacgttagaattatattgctagattggatacaaa

SEQ ID NO: 266345 - DNA, 590 bp, Homo sapiens
aggacaaatcagcctataaggaatgggctttagggtaaggcaaagattgctacaatcagcatttagcccagaagatactttcttctgctacctcaaacaactgagatctgtaaaatcccaaccaccacacttagggaaggatcctaaaagagagctgcaatggagaactgattctcctggggttttatttttgtttttctgtcataaaagaatttgctctataaagaacaaaaactgtaatagaatctgtgtgtatgttatactatttcaaggtttatttaagaatttgaggtggattaaagtaaaagataatccccaaaaaggtatttttaatagaaataagtggtgtcaaaaagtgaagaagatgtggtcctgtactggaaacctagcactaagcatcctggtagccaaagctagaaggaaaattttacaacttacccaaaccttattttctaataaggaaacataccagaagagagaaatgtttcactagcaytgaattatatgaagaatttattttacaaacccttatataaggacactagataggtcaaagcctttaacacgggtgttacaaaacttgaatttat

SEQ ID NO: 266346 - DNA, 503 bp, Homo sapiens
gtgtgctttggctgaggagcccaggaagccttgcttctgttaacctcagcccagctccctccccaaaagctcgactcacaccactggaatggttgtgtattgaggataaggatgttgacaatagggtttaagctgcataaataactgcaaattgctgttcggcccagcaactgscagaaaaaaaaaaaatgagagagagaaaagagatgatagaaggagcataagttgtggggagggagggccgggaagtaagtaatgtggaatctggcaactggctctgagtgtaaaggcactctgacaaggtgatcacaggccacccacaattgttacacagctataagaagttattttgacaggacatgtggcacacttcaaatagaggactcaaacccccaaatgattagtaatatgttgcagtaaagttctggtttaaagaacaagctattataactgagggggtagaacatatataatctccaaatattctttttataatttccatt

SEQ ID NO: 266347 - DNA, 628 bp, Homo sapiens
ctgcattccttctccgggtcatcttgaatttgtttcctcaaaacatcttttttgaattatctgaaaggtcacatgtctctgtctctatagattgttccctggtgacttatttagttcattttgtgaggttatattttcctagatgatcttgatgcttgtggatgttcatctgtgtctgggcattgaagagttagatatttatggtagtcttcacagtctgggcttgtttgtacccatccttgttaggaaggctttccaggtatttgaagggagtttggtgttgtgatctttttggycactgcagccatatcctcattaggggactccccaagtccagtaatgctgtatttgttgcagtcttgtagaggcaccaccttggtgatcttggataagatccagaagaattctctggattactaggcagagactcttattctcttccctaagtttttcccaaataaccagagtctctctttctgtgctgagcttcttggagctagggggaggggtgacacaagcacccctgtggccaccaccactgcaactctgctaggtcagacctgaagccaacatagcactggatctcactaaaggccgttgtagccactatatggctactgcttatgtt

SEQ ID NO: 266348 - DNA, 603 bp, Homo sapiens
tatactaatacagaatattactgctacaagtgattgaagcccaatttaagttggctgaaagaaataaacaaataaaatatatttttggcttagataaaagagaaggacaggggtggggttgaacttcaggtcttgtgaatctaagaaatcaaattacctgtctcaacttgttccattgagtctcagcttcattctttcctactgcaaatagatctcttctgctttttggaagacatgacacaggttcttttagacttaataccatctttccttgtcaattgtttgtacttggggcatacggtcacatgttgattttatgttgagtctcgctaatgtccaatgctgatgtgagtttgcagagagacgatgcccagttaaatttgaatttcgaatgaacagcagatttgtttgtttgagacaaggcctcastttgttgcccaggctgcagtgcagtggtgcaattatggctcactgcaaagtcaacctcctgggctcaagtgattctcctgccttagctgcccccaagtagctgggactacagggtaagccaccacacccagcaaatttttgtatttttagtagagacagatttctccatattgc

SEQ ID NO: 266349 - DNA, 545 bp, Homo sapiens
ccagtttccccaactcttttttccccttaaatgttagatacctcatttgtccccactatttgtctcttgtctttagcattttcagtctgcagtctggcaygatttcactgcactttttctcctacaggtgacacatattacatattcagagaggtcacattggatttccattctccaagcctgaggtaagaagcagacactctctacctctacccttaggagaagaaattctcagcaaagaaacacctccttccatgaaagtgtcttcaaattctttccatctccaaaccaaatccttctattctctatactcctttgatttttttttttttttttgaaatttgcattgtgttgggaagctcactttggtgcattttatcgtttctatcttggtgctttcaacacaattcctagcttaatatcctgtccatatgaaataacacataggaatacataatctctaaattgtcttctttcactgcttttctacattatctgggacagctttctgctgttctgttctgagtgatttttgtccccctaaa

SEQ ID NO: 266350 - DNA, 606 bp, Homo sapiens
catgcttctgctaatgtgccagtagccaaactatttggggaaattctattttgaaattcagagccacttcagagccatacaagaaagcaatgttagtcttagatagctttttgttattggagagaaaataaaatatactaaaataaaaaaaaaaatcaagtccacctagaaggtaagaattgaaaacctttaagaagattcaagtaggcattaaacaagaattatrtgaaaaggaggaaacagcagagatgaatgtattcctttaaagacagcaccccacattatatactggactactgataatgtttttccgatgaaaagtgcaatctttgtttctacagttatagagtactgatttaattttgttttctacattttttgagtaatgtttgagaatatcttaaaaggttacgtccattttctactaagtattataggatccgagtccatcttaatatattaccatttgcttcttgttgaaataataaaatcaactataaattttttataaaacttaaaaatattgtattcttgtttggtaatctcaatatatgagagagattgaacatacaaatggaataataaccagaccacatacaaaactag

SEQ ID NO: 266351 - DNA, 612 bp, Homo sapiens
cttcaatttttctgagtcattactgaaggagttaggatacatgaatatgctatgattgaatttataggtggtatcaaaaggatacctgatcttgcaaaaatgacaaactatgtgttgaattttgaggagtaaaaaataaaccactagatgtgaagtttttcctttactgattgtgaatcagctagagtcaggagtcggtggacttctcacttcaaagttatggaatttgtgaagcttgtctttggtatcccttcctgatttcttttctcctgttactctttctgttttttcacatgtacaatgacctaatttctcttctctttctccttaaaaactcaaaagaaaccaataacagttattcaaatagcagtcattataaatcactagtttccaacactcaaggacctttacattttcaacattatatataggagtagaaagattgatccctaattgaagggaattgagccattttcaagtacagcaagaaaatacttagagtaaaacagaagccctttcccaaattcctgaaataaaccaccagtaataatcatatttgayttttcttttataaaaaccactgatctttgaatctgtcccattgaaaagatt

SEQ ID NO: 266352 - DNA, 587 bp, Homo sapiens
tcaggacataggaatagctcttccatcttttcacttgaaaataagtaaaaagatagtaagcttgtgtttttctgcaataatattatttatttrgtaatttatgtagtaaaattacacagtaacaataattgctttaatgacccactttcattgttttgacacacagaaatcaattgtgttcaatacaaagaaatgtattacatagaactcagtatttccagatgagctcatttaaataaatttgcttacaatatttagaactacacacacacacatcccacatcagtttttgtccaggataaagtttgtatgactgaaatgataaaccctgaaatatgattgaattggatttcctagttgatttaaggccttactgttggtttaagtacagtctttttctttgattggaattgtgcttatatggacatatctggtgcatatgcttttaggtatgcacgcaagtcttaaaaaactaatttatatttgaaaaatgcagaagtacttttatttataaatgtatgtgtgtagcaataaggcaaagtttcttaaatagataattagcctaggaagtggatatgtaagaatga

SEQ ID NO: 266353 - DNA, 634 bp, Homo sapiens
ctgtggctgccttgaacaagaatgtacaatacagaggagacctcaggagacacttggccrtgtttcaagcagagagagaacagagaaagaccagtaatttgggggcttgcagggctgaagaacttgactttttatagaccccaaataataagacatggagttttaaatggtattagcaacaaaggattagttatatttctcaagtgaatattgagggtcttagaacaaaggtaaaattaaagacgtgtgatcctcactcaaggctaatataccctcaaggtggtcaccattatgctaagagaaatacatgtagtcaacaaatcaaagatataaagccaatcttggaactatgtttaaaaaaaaagtcgcaaactgaatccagcagtgcatcacaaagctaatccactacaatcaagtaggccttattcctgagatgcaagtttgattccacatatgcaagtcagtaaatatgattcattacataaacagaactacaaacaaaagcatattatcatctcaatagctgcagaaaaggcatttgataaaattcaacatcccttcatgttaaaagccctcaacaaactaggcactgaaggaacatacttcaaaataataacagctgtctatggcaaac

SEQ ID NO: 266354 - DNA, 560 bp, Homo sapiens
attggttgaccatgtggagaagactgaagctgtacccctttcttttaccatatacaaaaatgaactcaagatggaataaagatttaaatgtacaacctaacactatgaaaacactggwaggtaatctaggaaataccattgtggacataggggctggtaaaaatttcatgacaaagatggcaaaaacaatcataacaaaaacaagaattcacaaatgggacctatttacactaaagaactttcacacagcaaaagaaactatcaacagagtaaacagataaactacagaatgggagaaaataattgcaaactgcacgtctgacaaaggtttaatatccagaatctatagggaacttaaacaaatcaacaagaaaaaatctcattaaaaagtggccaatgaacatgaatagacacttttcaaacaaagatatacacacagccaacaagcatatgaaagaatgctcaacatcactaattattaaagaaatgcaaatccaaacgacattgagataccatttcagcagtcagaatggccataattaaaaagtcaaaagataaca

SEQ ID NO: 266355 - DNA, 578 bp, Homo sapiens
aggttagctgttaccctagcatcagtcatttttttccatcagtgtaggcttaagagacaaaatgatgctttcagtttaaaatagtttgactcggccacccctttgggatgtctagagtccaatatgtaggtctattagaaattgcaggagtagacgacattacccaggaattgagtatgcggtgagaagaaaagggagccatgggtcttacccctgaggaactctgtcatttacagatggtctgaaaagggttgtcactaaaggaagctactaagagttgatcatggatatagaatgaaatttaggagcctgtattgtcactaaaatacagaaagcaggtgcttcaaagaggaagcagttcaccatgcaatactgtgcagagacataaaaaaagataagggttgaaacatacccattggagtctcattgatgattttcaaaaccagcagttttataggagtagtgagtgtggctgcagatttcagtgggctggagcctgagttgaaagtaaagaagaaaaaktgtgtaagtgatttccaagaatcttggatgaaggtgaagaataagataataatgta

SEQ ID NO: 266356 - DNA, 545 bp, Homo sapiens
ggattcgaattcagtttctttacttcccagtccaaggattttgcactattcaagctcaatacatgcatttttgacatttgtctctcaaatatttggctgcatacacctagtctgtttttgtgtctaccttcttttccctgggttctttgatctttggtatgtttgaaatgaaggataattatttcatctaaatttaaatgackgtttaacacacacatccatcaaacctatatttgttagatggtttatagatcatgaagatttgaggactagttccatttgagaagcccattcaggctgccagaaacccttttcatcttaccgggctggcacttaaggtcttggctctgtatccaatcttagggtattcagggaacaacaatatacttgctcaaattctgcagatcttaataatgttgctcagtgggtaggtagaaacgagttagtagggtaaggatattatctgtgcccttgtaataaattgatgctgtttgttatccataactgtctataagtgaccacagtagaaaactgataccagtaaa

SEQ ID NO: 266357 - DNA, 545 bp, Homo sapiens
ggattcgaattcagtttctttacttcccagtccaaggattttgcactattcaagctcaatacatgcatttttgacatttgtctctcaaatatttggctgcatacacctagtctgtttttgtgtctaccttcttttccctgggttctttgatctttggtatgtttgaaatgaaggataattatttcatctaaatttaaatgacggtttaacacacacatccatcaaacctatatttgttagatggtttatagatcatgaagatttgaggactagttccatttgagaagcccattcaggctgccagaaacccttttcatcttacygggctggcacttaaggtcttggctctgtatccaatcttagggtattcagggaacaacaatatacttgctcaaattctgcagatcttaataatgttgctcagtgggtaggtagaaacgagttagtagggtaaggatattatctgtgcccttgtaataaattgatgctgtttgttatccataactgtctataagtgaccacagtagaaaactgataccagtaaa

SEQ ID NO: 266358 - DNA, 557 bp, Homo sapiens
caacaatatacttgctcaaattctgcagatcttaataatgttgctcagtgggtaggtagaaacgagttagtagggtaaggatattatctgtgcccttgtaataaattgatgctgtttgttatccataactgtctataagtgaccacagtagaaaactgataccagtaaaagcagtggatcaggaatgaaaatcacttcaaactacaaaaaattttaatgtttcaagattatctcaaaaatacatttagtttaaaaaatkgcagctcatgctactagctgaagttataacatggtaactccactgtgattatcttagcaatggtcaatccgcattttaattgtctctttgtcaaattgcagttaatgacctttccttctcatgaaggtggaataaaatatgcctttggaaacagaagggaacatagtctaatgagaaattcaaatgagtgatacggagctgccgagcttgcacctagtactgtactctgaatggcatgttcttagtaatcagatatttttgaaaattattttaaaattatggaaaaagataattagtt

SEQ ID NO: 266359 - DNA, 557 bp, Homo sapiens
caacaatatacttgctcaaattctgcagatcttaataatgttgctcagtgggtaggtagaaacgagttagtagggtaaggatattatctgtgcccttgtaataaattgatgctgtttgttatccataactgtctataagtgaccacagtagaaaactgataccagtaaaagcagtggatcaggaatgaaaatcacttcaaactacaaaaaattttaatgtttcaagattatctcaaaaatacatttagtttaaaaaattgcagctcatgctactagctgaagttataacatggtaactccactgtgattatcttagcaatggtcaatccgcattttaattgtctctttgtcaaattgcagttaatgacctttccttctcatgaaggtggaataaaatatgcctttggaaacagaagggaasatagtctaatgagaaattcaaatgagtgatacggagctgccgagcttgcacctagtactgtactctgaatggcatgttcttagtaatcagatatttttgaaaattattttaaaattatggaaaaagataattagtt

SEQ ID NO: 266360 - DNA, 595 bp, Homo sapiens
tctatgtagaaacaaaattacaataactaagaacacccaggattggtaattgttttgtattcaaatctattaagacgtttattatctcatctttgcayagaactttgtaaaatatttagtgattaataaaaaacttcagacaaaaaggtttgccgtaaaggagaaaaatgtagtttctctcattttttgcaataatgccaatttgtgtgtgtgtgtgtgtgtgtgtgtgtatgtgtgtgtgtgtgtatgtgtgtagttttgaatagcactaaagtttagggtgtcattgtactttctaagtgttgatttgtgttttaaatcctccagctggtctagcataaagcagcaatttagttatatttttattcagtcactcccccacacttgctcacacttgctcttcctagggctatgagcctttattaaggttataaaatgctttgaccgtcatcaaaggcacagtgacttcccttgaggtccaaagcattaatgatgaggtgaaatgcaaaatcattattggagggctgcatctctcctacctcagtagctattcaaatcatccaattgaaaggtaaacctatccaaaagctaataa

SEQ ID NO: 266361 - DNA, 595 bp, Homo sapiens
tctatgtagaaacaaaattacaataactaagaacacccaggattggtaattgttttgtattcaaatctattaagacgtttattatctcatctttgcatagaactttgtaaaatrtttagtgattaataaaaaacttcagacaaaaaggtttgccgtaaaggagaaaaatgtagtttctctcattttttgcaataatgccaatttgtgtgtgtgtgtgtgtgtgtgtgtgtatgtgtgtgtgtgtgtatgtgtgtagttttgaatagcactaaagtttagggtgtcattgtactttctaagtgttgatttgtgttttaaatcctccagctggtctagcataaagcagcaatttagttatatttttattcagtcactcccccacacttgctcacacttgctcttcctagggctatgagcctttattaaggttataaaatgctttgaccgtcatcaaaggcacagtgacttcccttgaggtccaaagcattaatgatgaggtgaaatgcaaaatcattattggagggctgcatctctcctacctcagtagctattcaaatcatccaattgaaaggtaaacctatccaaaagctaataa

SEQ ID NO: 266362 - DNA, 595 bp, Homo sapiens
tctatgtagaaacaaaattacaataactaagaacacccaggattggtaattgttttgtattcaaatctattaagacgtttattatctcatctttgcatagaactttgtaaaatatttagtgattaataaaaaacttcagacaaaaaggtttgccgtaaaggagaaaaatgtagtttctctcattttttgcaataatgccaatttgtgtgtgtgtgtgtgtgtgtgtgtgtatgtgtgtgtgtgtgtatgtgtgtagttttgaatagcactaaagtttagggtgtcattgtactttctaagtgttgatttgtgttttaaatcctccagctggtctagcataaagcagcaatttagttatatttttattcagtcactcccccacacttgctcacacttgctcttcctagggctatgagcctttattaaggttataaaatgctttgaccgtcatcaaaggcacagtgacttcccttgaggtccaaagcattaatgatgaggtgaaatgcaaaatcattatyggagggctgcatctctcctacctcagtagctattcaaatcatccaattgaaaggtaaacctatccaaaagctaataa

SEQ ID NO: 266363 - DNA, 588 bp, Homo sapiens
taagttgataattgttgtcaacacatcataatacttttttgaaataatatatttactgatagatataaagatcaaattatttgcttttgactgtttgttttgacacaaayaaagagaaacaaggcggaagctgtgattgggctaaaggagctgaaaacaagaatcagaaagattagttccactctaaatctgaacattaaaaatgtatcctgttaggtcagagcatacctaaaagtaaagtgacttgtggaaagtatataaaatctgaactttttgttaagtttagagaactaaatttaacccctaatgtttgtgtaggtcttggtactgccaaagcatttcctcatataaactgggcgttagcacgtaatacacagagcactggactgggaatcagaagacctggtttctcagaatgactcagacaatatccataacaaacttaaatagttattctatttgccaaggtccttaattttttatgataccagataatctttaaggcttcttctaggttcaaacttcatgatgcatgtatgttcattaccgttaaatgtgtattgtacacaagaaatccattaggctagt

SEQ ID NO: 266364 - DNA, 588 bp, Homo sapiens
taagttgataattgttgtcaacacatcataatacttttttgaaataatatatttactgatagatataaagatcaaattatttgcttttgactgtttgttttgacacaaataaagagaaacaaggcggaagctgtgattgggctaaaggagctgaaaacaagaatcagmaagattagttccactctaaatctgaacattaaaaatgtatcctgttaggtcagagcatacctaaaagtaaagtgacttgtggaaagtatataaaatctgaactttttgttaagtttagagaactaaatttaacccctaatgtttgtgtaggtcttggtactgccaaagcatttcctcatataaactgggcgttagcacgtaatacacagagcactggactgggaatcagaagacctggtttctcagaatgactcagacaatatccataacaaacttaaatagttattctatttgccaaggtccttaattttttatgataccagataatctttaaggcttcttctaggttcaaacttcatgatgcatgtatgttcattaccgttaaatgtgtattgtacacaagaaatccattaggctagt

SEQ ID NO: 266365 - DNA, 576 bp, Homo sapiens
tttatttaggatgtaccagttataaaattgagtttcatatttttctgcaatgcctaataaggattatccttccttattagatttgattctctttcctcatcaattttatttagtagccctatcacctactcccgtctaaaaagaaaatgaaagacactattccctgggtggaagagggagggttaaactttcttctagcatttctttctgttttccaagagaaggtatctaactaactggtggatcgaatcccagagcactgactgggccatgcacacccaagtgttaggtttctgtgtgtaagaaggccattcatattgtgatggtcaattttatgtggcaacttgactaagccatggtgcctagttgcttggtcaaacaatggtctacttcttattgtgactattttttggctttaataacatttaaatcagtaggctttgagtaaagtagattactcttgataatgtgaaygggtctcagtcaatcagctgaaggcctttaagagcaaagactgagattttcaaaagaaggaattctagctcaagactgtaacttcaattcttagttcaatct

SEQ ID NO: 266366 - DNA, 599 bp, Homo sapiens
gaataattgttaggtgtcttaatacaacagaataccttagtctatcccttatatttttagttagtttaattaacatataacattttacgatatgaaaatatagtaccctaaaatatttcattggtgaacttattgtgataattaaataaatatatttatgcatgatgaaaattaactgtccagtgaataaattggggaaaaaagattacatcaaattggttgaaggtcaatatgtttaaaaaaaaattaattggtaatatttgactgttttttcctttccagtgtattttaaaagcaatatgtagattcaatgccatatcaggtgtgtgctcagtctatatatgcaggagtacttttatttctttgctgctcttcattatagctatgtcctaagcttatctcaagcaaattatattttcaaactcattaataacaaaaaatgaagacagtatctccaccatttgcttgttcatttaattcatatcattgacttctctgwtgtcttttaatatggcagacttttattacagatgttgggtgaagtctcactgaaaattgggcaatgggatggatgaattctcataagcatttcaaacttc

SEQ ID NO: 266367 - DNA, 413 bp, Homo sapiens
acaagcattttaaggccactttcaacacaagtatttttttttttactaatcacttctgtggttccgctgccccagacaagaaaaaaaaagagaaatggaaagggaaagctacgttcagggcacgtaaaggttttatctagctttaagggttaaaagaattggcacaaagtttaaaaaagttaagccacttgtctaaaaaaaaattraataaaatcatgtcttttgcagaaacatggatgctgcaaaatggaggccattgtcctaagtgaaataactcagagacagaaagtcaaatatttcatgttcttatttataagtcagagctaaatattgggtatacatggacacacagaatggaataatagacattggacactataaaagttgggagggtggaagagagatgaggtttg

SEQ ID NO: 266368 - DNA, 482 bp, Homo sapiens
tgtattatgaaatttctcctggtcagacaaggacttcatcacttgtgtagtagaagattgaaraagggaaagtttactattcactgatgttgatctgctaatttaagtctaactctggatcatgtttggcttggagacgtgaatgaaagaagaagggctgatcatggcaaagctctctatgtaattatcatttttaacagttacattgaagcataattgtcatacaacaaactactcccatttaaaaggtgcactttagtgagtacattttgacgtgtctatacacctgtgaaacagcatctcaattaagatagcatctcaattaagaaattcaaaaaatttcttagtgctctattgcagtctcttcatttagtgcttctcatatccctaggcaatcacaggttttttactatagattagattgcatcttcaagatatttatatcaataaattgcccggtatatatagtatatactcttgtg

SEQ ID NO: 266369 - DNA, 506 bp, Homo sapiens
gaacaaagaatagtcatcttgaattttgagtagatacacatttagttgcacttgtagattacctacaggcaatgtgtctctaattctttccccttataaattttaatttgtcctcctgggatttaaatataaaaggattaatgaacattttcagggaaaaagaccagacatacccacttagcatctttctttgacatctcacataacctctcagcatctttctcatatttcctgtttaatttaacctggtaatttttattaaggacaaaacccactagagaaaaatgtaaataaaaggtcagagctctatctactttgttataaagccatttttatgatttattgtttttttgagggcattctattctctcgaaatttagtgtttaagttttgtctgtctccaaagaggagtatcttgcattcatctctacaaatgtttattaagtgcctatgtgtaccagayatgtacaaaattctgcaaatattaagaaaaataagacgtaatt

SEQ ID NO: 266370 - DNA, 526 bp, Homo sapiens
atgagtaataaacttgaatgtaaaagacrgcttcagagacagtgagctgacattttacagtttgccctaggaaggtaccctaagtttgatttatccatattttgaaaatacagccagcacagccttgacagatgctatagagcaagtacagtggtaatccaaagtcagcctcaattctaggctgaaacatttttttttcttcacacatctttgcacctacataacttgatacaactttagaaaatttattatctggacattatcagttttgctctgagaagaagtttactatgagtttttgagagaaggagatatcgctattgatgacaaatgactaagagaagattttaatctactttatttgttttttatatatcatttggagatggttagagaagtcaaactgcaggtgagcaaacataattttttggtgttcctttagttttattgatttttaaagaaacagacaagaaaggaaaacatggctagctaatgaattctttgtttcttaggtatacttctatat

SEQ ID NO: 266371 - DNA, 526 bp, Homo sapiens
atgagtaataaacttgaatgtaaaagacagcttcagagacagtgagctgacattttacagtttgccctaggaaggtaccctaagtttgatttatccatattttgaaaatacagccagcacagccttgacagatgctatagagcaagtacagtggtaatccaaagtcagcctcaattctaggctgaaacatttttttttcttcacacatctttgcacctacataacttgatacaactttagaaaatttattatctggacattatcagttttgctctgagaagaagtttactatgagtttttgagagaaggagatatckctattgatgacaaatgactaagagaagattttaatctactttatttgttttttatatatcatttggagatggttagagaagtcaaactgcaggtgagcaaacataattttttggtgttcctttagttttattgatttttaaagaaacagacaagaaaggaaaacatggctagctaatgaattctttgtttcttaggtatacttctatat

SEQ ID NO: 266372 - DNA, 548 bp, Homo sapiens
gtataagcgttttattagctcttattagctcggagacacaaagtaggcatataacctgtttgttaggcatgatgaaatctcagatctggttctctgtgagatccaatggcccttattaagaaaagtgaacttagagtaaatgtgacaacacattaggggcaagtttcagctaaccacaatygttaccaacagccagctactaaacacaagatcaattaggaatcaaacctagggagtggttgtaagtcatgaacaacgaagaactcagtagattcttacactctatgcaggcaacaatacagactgtatcagtgttttagatagtatgtaaccaccattaatttcaccaagaaacttactagtacaaagatatttctaggattcattattctaactaacttgaggtacaacaaatatacattttagctaaaatgccaaacgactaagtgttaagatatatttaccaaaagccaaaagtgaagttgtatcattatctgtggtcaaaaattaaatcaattgaccacattgctatataagatcaaaattga

SEQ ID NO: 266373 - DNA, 548 bp, Homo sapiens
gtataagcgttttattagctcttattagctcggagacacaaagtaggcatataacctgtttgttaggcatgatgaaatctcagatctggttctctgtgagatccaatggcccttattaagaaaagtgaacttagagtaaatgtgacaacacattaggggcaagtttcagctaaccacaattgttaccaacagccagctactaaacacaagatcaattaggaatcaaacctagggagtggttgtaagtcatgaacaaygaagaactcagtagattcttacactctatgcaggcaacaatacagactgtatcagtgttttagatagtatgtaaccaccattaatttcaccaagaaacttactagtacaaagatatttctaggattcattattctaactaacttgaggtacaacaaatatacattttagctaaaatgccaaacgactaagtgttaagatatatttaccaaaagccaaaagtgaagttgtatcattatctgtggtcaaaaattaaatcaattgaccacattgctatataagatcaaaattga

SEQ ID NO: 266374 - DNA, 577 bp, Homo sapiens
agcatgtaatgcccttctttgtctctttttactgttgttggtttaaagtctrtttaatctgaaataaaaatagtgatgccttctttttttgtttgtttgttttgttttctgtttatgttgtaaatccttctccatccctttatcttgaacctataggtgtcatgtgtgagatgggtctcttgaagactatagacagatgggtcttgtttttttcattcaacttgccactctgtaccttttaaggggggcacttagactatttacattcaaagttgatatatgaggctttgattcaattgtgaagttgttggctggttgctttgtagtttctgttatatggttcccttatagggtctttgggccatgcacttaagtgtgcttttgtggtaacaggtattgttctttagtttatatatttaaaactctcttaaggatctctttaatgctagtctagtggtaatgaattttcccttagtgcttgattgtctggaaaatattttatttctcattcacttatgaagcttagtttggcaggatatgaaattattgattagaattccttttctttaagaatgtt

SEQ ID NO: 266375 - DNA, 577 bp, Homo sapiens
agcatgtaatgcccttctttgtctctttttactgttgttggtttaaagtctatttaatctgaaataaaaatagtgatgccttctttttttgtttgtttgttttgttttctgtttatgttgtaaatccttctccatccctttatcttgaacctataggtgtcatgtgtgagatgggtctcttgaagactatagacagatgggtcttgtttttttcattcaacttgccactctgtaccttttaaggggggcacttagactatttacattcaaagttgatatatgaggctttgattcaattgtgaagttgttggctggttgctttgtagtttctgttatatggttcccttatagggtctttgggccatgcacttaagygtgcttttgtggtaacaggtattgttctttagtttatatatttaaaactctcttaaggatctctttaatgctagtctagtggtaatgaattttcccttagtgcttgattgtctggaaaatattttatttctcattcacttatgaagcttagtttggcaggatatgaaattattgattagaattccttttctttaagaatgtt

SEQ ID NO: 266376 - DNA, 554 bp, Homo sapiens
tgttttcctttttacttagttcaaaaatatttttaaagttctcttgagagttctttgacccaagtgttatttacacatatgttgcttaatttccatgaatttggggaattttccagttatttttctgtttttaatttctagtttaattccatagtggtctgctagtagccacgatgttcttttaagtttattaaggtgtgctttatgacccagaatgtggtctatctttgtcagtgttccatgtgaacttgagaagaatttgaattcagctgtcattatatgaaatagtatacagatctcaattttatcccagttgattgatggtgttgttaaattcaactgtgtctytacagattttctgcctgatgcttgtgttcatttctaatagaaggatgttgatgtctccaactataatagtagattcattctatttcttctttcagttccatcagtttttgcttcacatattttgacacccacttattaagtatatacatgttaaagattgttatgttttcttggagaattgattcctttcttattatgtaatacca

SEQ ID NO: 266377 - DNA, 512 bp, Homo sapiens
tggttgattttgcaaaaatctcatgaattttggagctttctttttcttttgttttccacgcttgggttaatactcaacaagtcaggaagaagatttttcttttgtctcgctctgttgccaggctgcagtgcagtagtgtgatctcggctcactacaacatccgcctcccaggttcaagctattttcctgcttcagcctctagagtagctgggattacagatatgcaccaccacacccagacaatttttgtatttttagtagagacagggattcaccatgttggcaaggatggttttgatctcttgacctcatgatccacccacmttggcctcctaaagtgctggaattacaggtgtgagccaccatgctcagcccaggaagaagatttttacagcagcaaggccaagcttgctgtaaaaagatgccctcatatgaaaatgcctaacaattgtttgttctcatctgtcaaaacctggttcattttcaaaataaaccctactcaattgaaatag

SEQ ID NO: 266378 - DNA, 615 bp, Homo sapiens
tggtcttggctcgctgtaatctccacctccttgggttcaagcagttctcctgcctcagcctcctgagtagctgggattataggcaygtaccaccacacccagctaatttttgtatttttaggagagatggggttttaccacattggccggtatggtctctatctcctgaccctgtgatctgcccgcctcagcctcccaaagtgccgggattacaagcgtgagccacagcagcgaccatgcatttttaatcatccagagccagtgacctatcctcatttttccatacatggtatatcagccgatggcacctaaactgccacatgctagtcctatgatttcttattgatcactgctttcccattcccaggactctaaaaagttataagttcttcaagtgcaaatgttttcacattatctttttatgtcttttaagctactgacaaccacctcataacaccaagctgaatgtcattccacatctttgtatttcaaatgagcaccactgtgaacagaaacccaatctaggacttatgtacaagttctgctgtgtttatacattgctgtgggacctttgataaatcattttccaacttcgagtttcaattacattatctg

SEQ ID NO: 266379 - DNA, 589 bp, Homo sapiens
ggcgctcaagaaataggctttttaaaaattacttatttgatgggttcctaacaaatttcatacagatctgaataaattagacatctaaactcactaattgcctctgattgtgctcttattcacttcttctcccttgtgctctggtctaaaccatattaactactgatgatcccacaaaagcaccatgatcacttctgccttaggcctttcttagtccctttaccgagactccttcctattcccccagcatcccacctcccctcaccaacctaaataattactacttgccattcaggtctaagattaaggctcyctgtctcaggaagctgagaaccactaagacagggctgggcattacttgtaaatgccaccacagtgctgtaccctgtgctagccactgtctttgatctgagatttccttttaatttgtctatttgtctaaatcgacaaccaactcctctgtttattgtagcctcagctgtattctcatggcctgggttccagtgatgtcatccacaaataatgagccctcttaagtgccagtcactttgctggagatcaggtagagagatgaacaaaacagacacat

SEQ ID NO: 266380 - DNA, 591 bp, Homo sapiens
agttgaggggcactgtggtataatgatatctgcatcaattgcttcttacccctaaaataatctccctgcaacatttcttccccacccccacccctggtgtgtttctgcatttatttaaaatttaacttttcatgtaaatgcaatataaaatattgtgtgccatttgtttactatttaagaattattttaagttgtaaaacctcacatcagaacaatcaactaaatatgtacagaatcctagcacaggagactggaaaggtttccccatgagagacagcaagaaagaagggaagcggtgcttaatggaagatagtagaacktgatggatattttacttaattagatgtgtgaccttgagccatttcttaaccactgcttaacctttctgagcctgaaagtcctcatttgaaaaataagaaaatttaattccattctaccattgtgcttctttcttaggagttactatataaagtagatgaatattgatgaatattcaatatttaattttacttaaaatttaattttacttaaaattcagatagacaagatatcttatgctaaaagaatatgttaattaccttagttctcaat

SEQ ID NO: 266381 - DNA, 591 bp, Homo sapiens
agttgaggggcactgtggtataatgatatctgcatcaattgcttcttacccctaaaataatctccctgcaacatttcttccccacccccacccctggtgtgtttctgcatttatttaaaatttaacttttcatgtaaatgcaatataaaatattgtgtgccatttgtttactatttaagaattattttaagttgtaaaacctcacatcagaacaatcaactaaatatgtacagaatcctagcacaggagactggaaaggtttccccatgagagacagcaagaaagaagggaagcggtgcttaatggaagatagtagaacttgatggatattttacttaattagatgtgtgaccttgagccatttcttaaccactgcttaacctttctgagcctgaaagtcctcatttgaaaaataagaaaatttaattccwttctaccattgtgcttctttcttaggagttactatataaagtagatgaatattgatgaatattcaatatttaattttacttaaaatttaattttacttaaaattcagatagacaagatatcttatgctaaaagaatatgttaattaccttagttctcaat

SEQ ID NO: 266382 - DNA, 531 bp, Homo sapiens
ctatactgactcctaacactaaacaatagtttttctgtttttaaactctcgaaaaatgtaattgtgtaatgtgttaawgtaaaaatagagagaactggatgtggggtaaatgggaattatatgttgccatattctgtaaatagaaaactatactaaaattaaaaatttactaacaatgttccttaggtctgatttctttcactcagcattgttatgtttgtaagatttatctaagttgtatataatactatgtcatttatttacattgaacagcatcacattgtattaatatatagcaaattagttatcaagtctcctggtaataaggtttgtgttgctttcagtgtttttgtttgctcgtttttgctattgtgaataatgttactgtaaacaatttgcatgtctttgttgcatacatctacacatattcatcaaagaaggcttctggtcatagagacttaattatgggaaaggttttaatcacgaatttaattttttgtctaatgtttaggacaatatagaatttctatt

SEQ ID NO: 266383 - DNA, 531 bp, Homo sapiens
ctatactgactcctaacactaaacaatagtttttctgtttttaaactctcgaaaaatgtaattgtgtaatgtgttaaagtaaaaatagagagaactggatgtggggtaaatgggaattatatgttgccatattctgtaaatagaaaactatactaaaattaaaaatttactaacaatgttccttaggtctgatttctttcactcagcattgttatgtttgtaagatttatctaagttgtatataatastatgtcatttatttacattgaacagcatcacattgtattaatatatagcaaattagttatcaagtctcctggtaataaggtttgtgttgctttcagtgtttttgtttgctcgtttttgctattgtgaataatgttactgtaaacaatttgcatgtctttgttgcatacatctacacatattcatcaaagaaggcttctggtcatagagacttaattatgggaaaggttttaatcacgaatttaattttttgtctaatgtttaggacaatatagaatttctatt

SEQ ID NO: 266384 - DNA, 489 bp, Homo sapiens
tggcatccttgtcatgttcatgttctcaggggaaatgctttcaacttttccccattcagtgctacatcggctgtgagtttgtaatagatagcttttattacagtaagrcaggtcccttctatgccaatttttctgagggttttaatcacaaagggatgctggattttgtcaaatgctttttctgcatctattgagattatcatgttatttttgttttaaattctgtttttgttatgtcctttcctggatttggtattagggttatactggcttcaaataatgatttagacaggattccctctttctgtctcttgtgtactagtgtcaataggattgttaccagttctttcaattgctgagagagacacattaaaatatctcactaaacttttggattttattttgtcaacttttaaaatttaaactgagactgtatttttagtacataagaattaattagtataatgtcttcctttattattataaaat

SEQ ID NO: 266385 - DNA, 489 bp, Homo sapiens
tggcatccttgtcatgttcatgttctcaggggaaatgctttcaacttttccccattcagtgctacatcggctgtgagtttgtaatagatagcttttattacagtaaggcaggtcccttctatgccaatttttctgagggttttaatcacaaagggatgctggattttgtcaaatgctttttctgcatctattgagattatcatgttatttttgttttaaattctgtttttgttatgtcctttcctggatttggtattagggttatactggcttcaaataatgatttagacaggattycctctttctgtctcttgtgtactagtgtcaataggattgttaccagttctttcaattgctgagagagacacattaaaatatctcactaaacttttggattttattttgtcaacttttaaaatttaaactgagactgtatttttagtacataagaattaattagtataatgtcttcctttattattataaaat

SEQ ID NO: 266386 - DNA, 589 bp, Homo sapiens
aaattattcttttaaaattctgtgttttctctccactcttgccatgcttcaatgtgagttgagcatatgtcctgcctcattgactttaggtttctccatgtgtcatttgggatatagataaaataattcctgcctcctgtgcatctgctctatattatgggaatatcatttcccagataagaagggctctcttagcctgagtcccaaaataagaggataagaggaatacaccagaacccacctgacagcctggagcagagctgccaaaaatctactccttagctgctaaaaagcagtctagcaacaaaacaaagcaaaacaaaacaaaaaatatttgcaagccacaagggcctttaggctgtattaatataagtgtaacctaatgaaagccaataaatatagaaaatagttccagaactgttgtattgctatacaaaatgtaaaatatgagtcattagcttctgggtggggaaaattcttacaggtgactgaaaaataaatggtaacccackttatacagtgtcataccatttggtaagattaccacttgtgataacttgaaaatcagggaagttacttaataaacata

SEQ ID NO: 266387 - DNA, 387 bp, Homo sapiens
attttgttgatcattctttaaactcttctaatacttctaatggtgatgtaggcaccaggagctgtagtagaaactaaaggaatgataagtgagacagacacggtccctggcctcagtcagtttatgatttctagagatccattacaacagcatgaaccacagcatgggtaactgccaccaaagacttatggagtgtcamacctgctctggaatacttggctagagggagacttatttacccataatggtggtgtttgcttttcattttcttttgatagattattattttttaattttatgacaactccatctcttcaacttattcttcagtgaaagctctggactataataacaactaacatttatagagctttaaacatgtgccca

SEQ ID NO: 266388 - DNA, 565 bp, Homo sapiens
tcagttaaggcggggcagggcattttcacttcttttgtgattcttcagttacttcaggccatctgggcgtatacctgcaagtcacaggggatacgatggcttggcttgggctcagaggcctgacacasagctctagtagagaacgtatttttaattgaagagtctttctctttctgtctttttaatattatttgttttttccttaggtttctacagaagaaggcttgagtcttgcccaagaatataattgtggtttttttgagacctctgcagccctcagattctgtattgatgatgcttttcatggcttagtgagggaaattcgcaagaaggagtccatgccatccttgatggaaaagaaactgaagagaaaagacagcctgtggaagaagctcaaaggttctttgaagaagaagagagaaaatatgacatgatatctttgcttttgagttcctcacgctctctgaattttattagttggacaattccatatgtagcattctgcttcaatattatctctctatgtgtctctctctctttaaatatctgcctgtaggtaaaagca

SEQ ID NO: 266389 - DNA, 619 bp, Homo sapiens
atgttacagtactgatgagtaacaaggtcttgatctttgttgaattattttatatttctagatgagttatggggaatccactaaaattattaaggaggtctttttgtgaatatcctgaataaaaagataattagtgttagagtatccttgggcagaagtacactaaatattactgtctacaaaataattgtataattattgtaaacctaacaagtgaatataatcctactttattaacaacagggataaattgcagacttagaccaggaaataggctgaaaaggcaaaactccaaagaatattaatgcagaattacatattcctggagacaagttgcaatccaagcagtgttgcaagggcaagatgttattgaaaggtttcctgtaggtgtgtttctctattcatttgtgagtttatttggaaaaaaactattctaatggatcttttggatctgcactggttctctggaatggagttggtctagaaaatgagasactaatatgcgtttcataattctataaaaagctgtcatcactgtagcagggtgacaggtcagtggactcagctgtagcataaccttggagtgggctaaagaaagtatagtgaagtaagggagatt

SEQ ID NO: 266390 - DNA, 382 bp, Homo sapiens
gcttccagcacaggccttggctggggcttgtgggcacagatgctgtcccctgaaagggcttagaaacataaaatgaaggtgggccaaaataagaggctcctggctcggcacatatgatgagcyggatggaggtggaaaattagacataattgcctccatgtcatccaaactaaatgccatttaaaaaactgcatatggattttgtttcccttttgattgttacggtttttagagacatctgtgagcacttgtggatatggaaagcaggatgccaagggtatagttttgtaaaggttttatctttcagaagagaaagcactgagtttggagtctggattaccaagggcttaaatgttgggttagagtgccatttctacttagg

SEQ ID NO: 266391 - DNA, 598 bp, Homo sapiens
ttgagtacataaatattgtctataataggagaatttgacctagttgaggaggtcagggcttccctgaagataggaggattcagttgccatgtaaagaatgaacaccagttatccagaccaagaggaaagggaaggtattaaggggtttctggcagtaagamcagcatgggcatcatccctgtggcaattgggtgaaaggtaagtaatggagagcaatattacaggaaacgaaagaaaaaaaaaaagatctgtgaaatgatgagacaggaaggaaaatttgggaataataccatgtgtgtccacttgaggggggttgagagaaaccagaggctgctaaaggaatttaaacagtgggatgaaataacaattatttgccttttaaaatggtaattcttgctctggagaattgattggaaggagaaaagagtatgccatgattgtattttatttatgagcaattatgtaatctaatacctatactcagggctgaataaaaatttaaaagaattggtcactccttagagaaatgtgatgctatcatttttcacagcaatgacaacctattctttctttctacttacaacaaattttacaaagc

SEQ ID NO: 266392 - DNA, 633 bp, Homo sapiens
ttcagttcattgtttttagtaataattgaaacattgagttgaatagtttaaagacctgaatgaatcatcagattcaaaatcaggatctgaacggcaactatttacaattggaacaaccytaagcttcaaaatttctatcttgactgggtaaaccagggcaagtaaaaagttgaaggagtgataaagctattgggagtaaaatatttagaaatctgagagatattctttgaaacacagacctttatttcatgggtagatagagagatatgtcaaggatattgctgtttgggaagaaaagaaatttcccttgaagtacaagaaggactgatttatattaatcatcttattatattgaagggcttaacagccacagcactggatcagtacatctatgattgagttttgatgataatgctattatctgtgtaagatcagaaaaaaaatgacttatcttcatttttcttgtttttacaatggggttaatagtagcacatgatggtctattcctggaaagtttttgggaggatgaaatgagataatgcttgtggttcctgaaaaacactaacggttcagtgatggttagctcttcgtattactggtagtatttgtaaaatatgtcttaagcgattcttc

SEQ ID NO: 266393 - DNA, 633 bp, Homo sapiens
ttcagttcattgtttttagtaataattgaaacattgagttgaatagtttaaagacctgaatgaatcatcagattcaaaatcaggatctgaacggcaactatttacaattggaacaaccctaagcttcaaaatttctatcttgactgggtaaaccagggcaagtaaaaagttgaaggagtgataaagctattgggagtaaaatatttagaaatctgagagatattctttgaaacacagacctttatttcatgggtagatagagagatatgtcaaggatattgctgtttgggaagaaaagaaatttcccttgaagtacaagaaggactratttatattaatcatcttattatattgaagggcttaacagccacagcactggatcagtacatctatgattgagttttgatgataatgctattatctgtgtaagatcagaaaaaaaatgacttatcttcatttttcttgtttttacaatggggttaatagtagcacatgatggtctattcctggaaagtttttgggaggatgaaatgagataatgcttgtggttcctgaaaaacactaacggttcagtgatggttagctcttcgtattactggtagtatttgtaaaatatgtcttaagcgattcttc

SEQ ID NO: 266394 - DNA, 612 bp, Homo sapiens
tataaatattaaatgagatgatgcatatgaaatgtttagcatggtgcctcatctattccaagtagtcaatatawgtaagctattattatcttaagatgaaaactttaataattttgcctttttggactaatgcatctattagtctattggcacagaaaatcaaaacattcgtattcattaatggtatgaattgatcatttatgtttttattatctggtcaatttaattaaactcacaatgtcattttatatgctaatcaatgaattatatagtcagtcaatatttgtttttgaaaacttactgtatgtcccctgtcttagccattgtagaggatacattatttatatctcccaaaggttattctttagctaaaaactgaaagcatggctagtgtttgggtgttttgtgatgaacttgtacctcttagttatttcaattctctttaatttaacaaatagacatgctctactttcacagagggaatatacagattatacagttaatgaggaatatacagattataaggctcagactgtatccttaagaatcagtctagtgggtaaaacaaatcatcatagtatagggttatattcagcacaataagtatgcata

SEQ ID NO: 266395 - DNA, 469 bp, Homo sapiens
aataaagagagaagaaaagtctttttttgcctttccagtctagaaaaaaagttaaaaagcatcgttctcccactaagacttcagcctacaggaaagaaccactgctaaaacctcatggtcagaaaaaggagaataaagtatttgaagataataagttacawcctagtccactgaaagtcaggtcattgtctcgtgtgtctcatttcttaatcaagtcaatgaacttcaagtaatcaaagtcttcatggaaaaggatttttcccactgctattatcacatctgtatgcttattgaatgccttataattcaactaatattcaacaacacaattttataatttcccaaatatagaacagctaacaagtttgaaaccaaatgttcatgtgatacagacaattatatttcaatttatcaaagaaatgaagtctagaaagtctttgattaacactgcttaaatgtttaagcaggc

SEQ ID NO: 266396 - DNA, 642 bp, Homo sapiens
tgggttttctcacaccctgctaatgggagtgttaattgccacacctattttaaaagctgttctatattatttattaaagttataaagactctcctgagtttacaccccacaacatatatcccatgagacaggtactagaatgctcacaacagattaattcataatatcccaacatgaaaacaacacaatattttatccaaaatagtactgattattaattttatatatcaaattacagaatacaataattagtatggtaggggtacgcaaacttttttttaagagagaataagggagtagtgataaagaagaaacattgttcagaaggtattggtgctctgcttttttccctggatgatgattatccagttgtttgctttgcgattattcattgaaccattcacacattttgtatacttttctgaaatatatttttatttcacagtaaaaataaacagaatcaaccaaatttgataaagaattcttatactasaaatagaagaggaatattgtggggtaaaatctaaaaaaagaaaaacgtagctccaatactaatcagagtctttggttaaattaacatggcattttcacagtgccttatataaatcattatagcgtcctgatgaaataacaagtcaaatt

SEQ ID NO: 266397 - DNA, 522 bp, Homo sapiens
cacttgatcatttaaactcctgtttcttcttacttagcatgagcactgtaaattaacatggatatggatgtggtaaacatgaagtttgaaaataatgattttataataaaagcagagagagataggaaagagacaagaaacgactggggagaaaaatagccagaaaggcatgtgaataaataatgaaacaagtgaagagatatttaaaaaggagcttgcttagagatgcaatggaatgaagaacactgaagaagtgttgctcactagagtagctacaggaaatgagaagagaagcgagtgttagaaaggatagggatagtttgtggaagggtaatacgtasagcaaacatttaaagatgaataaattgttgtaatataaagccaggttcaatatctattaagagcaaataatatgcttttgtcctgaaattccttggatatgggacccagaagtaaatggcaacgagtcatcaaatactagatcaaagcatcatctcattgtatgatgtgtgttaataaact

SEQ ID NO: 266398 - DNA, 577 bp, Homo sapiens
agttgaaaacttatgtccacacaaaaacctgcacgcgaatgcttatagcagctttattcataaatgcccaaactcggatatgaccaagatgtccttcagtaagtgaatgtgtgaaaaaactgtggtacatccagacaatggaaaatttttagcgctagaaagatatgagccctcaagccatgaaagggcagaaaggaaacctacaatgtatattattaagtgaaagacgccaatctgcaaaggctctatactgtatgattccaactatatgacagtctggaaaaggcataactatggagacagtgaaaagrtcagtgtttgccaggggttggtggggagggaggaatgaatagatggatctcagaggatttttagggcagtggaactactcggtatgatactataatggtggatacatgtcagtagacattggtcatacccatagtatgtacaggagtgaaccataagtaaatcacagattttgggtgataatgatgtgtcagtgcagcatcaccaattgcaacaacgtaccactctgactggggatgttgataataggggaagctatgtgtagggg

SEQ ID NO: 266399 - DNA, 562 bp, Homo sapiens
agtaataatcaaccagttagcttttttaagatgaaatgtcttaatattgtttctttgcttgagattttcaaaattatcaagacctacggagaaaatccttaacctctttcatattaaggcactgtgagtgacctctgtgtcatgtgacagctttggattactttctttttttatctttttattggttgttattgttgtggggtgggaggtgtgatagggggagagactacatttaccagagttgtctgcaaagctaatggcaggacaaacatacaactagttgctctggatagaaacctgctatctttaacatctcctttgctcttccaaatattcaccatgtttgtcaattctaactcagaaacatattcagaatatgattctctctaattctttctgctatggctctcattagcttcgttgagcatggcaaatgcctccattaccamaacacttcgattcattctttactttacttgagaactgagcactaacaccaattttctgcttaaatatcttcagtggctcccttctgcttacgaggtaaaatgcagacttcagc

SEQ ID NO: 266400 - DNA, 514 bp, Homo sapiens
aggaacagcttccatcttgaccagtccaaagtccaatacttttacattagattacctgacctccaaggagcatcaatgtctccttcctgaaatactctatttgcatagcttccttgccacagcagtgcccttatatttttttcccttatctggctgttcaggaaatgaggtattgagtcggtcaattaaggtaacatgccaaagtgaaagtaacaatccagtctttatttgcttattgtgacagtgcaagcaaggagcaaatgagggaggcaccaactcccattgttacattttttttycccaatggaattgcactgtgtgaagatctggtggattcagcacaaacagggaaaattgctttactgtgaaaaagtcctgaacagaaggccttttagtggacctgtggggcagagggagaaagttaggaaagagctaggagtagaaaaataccaagtaaagaggaagaaaagtacaagactctgataaagggtttttggcagaggcacctgagaag

SEQ ID NO: 266401 - DNA, 501 bp, Homo sapiens
acaagataaaacccactggtttgaaattcagccagccccgagtagcatcattgcacctccctgagwtggagttccctgggggagggggtaagccactgtatttgctgtttggctgacttagctgtctcagccttcaaacgttggagagtctaagctgacctggggctagagtgggccctatcctagcacagctgctgtatgaaaaagtcaccagactgctttttaaagcatgttcccaatcttatttctcctcctgggtgaaacctcccaagtagagtctccagctaccctcaccggtggtctctagccaacagaggtttcaaaccaccctgggatggaagtcccagagaaaggggcaggctgctatctttgctgtttgggggacttagccattctggcctttgggcattggagtgtccaaggtgaccaggggctgaagtgaaccctcagcacagcacaactgctctatgagaacacagctacagtgctttttaaagcagg

SEQ ID NO: 266402 - DNA, 620 bp, Homo sapiens
tgggtaagctttcctggtttytaatactgtcatacattatggctgagaggagttaacattgtctatgaatccatggaaagcggacattgggatgctctatgtttggacttctcttgaactctgacctacccatctcttctttggactgattttgatctgtatttttcccaggaataaactgtaactatggatattacagttttcagtgagttctgtgagtattcctagcatatcatcaaacctaagggtagtttgtaagtggtgtccgaagtaaaggtagccttgtgtagactgtgttgcgccttgaacttcacagtcgactaactcagacccatccaatttattcatctataatttatctcacattgttttcctaatagattttactgaagtgcagaagatggtaaaagaaaatcactgtacagtaaggaactgtctttttcatttatttgttgattattatctctgatcctagtcccaaaatctcctgccatgaacctgggttagacctttttatatatatttttcctgaccaaggaattcctaaggccaatttttgataaacaaaagtatattaagaagtcttaccatataaaataatgtctgttcccctagaaata

SEQ ID NO: 266403 - DNA, 550 bp, Homo sapiens
tataccatgtagcctaggtgtattgttggctataccatctaggtttgtgtaagtacaatctatattgtgcacacaatggtgaagttttctaacaacacatttctcagaacatatctctatcataaagtgatgcatgactgtgtaatagagttgaaaagtttttttcccaagtgatgtagctttcattatgccttagagcaacatagagtaattcctataaaaatgtatcaatccaaccatcaattattacttcataaaatgtcatggtaactagyctgtgctataagtattattattcagaaataattcaaacctatttatatatatatacttcaagaattaagtatgagaaaaatgtcaacttaagaaacctaaactaatttttgataaaatatcttaaaattttttctttaattctaatttatgaatatacctgttgtatatttttaaatatcattttttgggtagaaacaaatgtaaaagctgaactcttttgctccttccatattaattgtggtttatatcttttcatagtcataatgagatcaca

SEQ ID NO: 266404 - DNA, 438 bp, Homo sapiens
taattcttaggctccgaggtcctttgctggttagccttctgtccaccttttcaaaatctttataaatttgttttaatatgtaattccagggcttttagaagcccatagctggaataattgagaaaaggatgtctactttaccttcctggaagcagaagtctgacatcttttcagaatactaatgcctagctttgcacatctttaagagaaagattaatcagagtaataagtctgccacatctcccctgtgcttccatatcactgagatctargccatcaatgtctactttggcaagtctgattttattttcctgcttagggccatattattgctgagagctcatttgaattatttgcttcctattggcagctctccacctgacttcacagcctcttttctctgcagcttaaaaattgacacgtggagccaaaacaaaa

SEQ ID NO: 266405 - DNA, 489 bp, Homo sapiens
actattatgagcatctctatgcacacaaactggaaaacaacagaggaagtggacaaaacatamaattgaacaaggaaaaagtagaaatcctgaaaacactagcaatgaatggtgaaattaaatcagtcataccaaatttaccaacaaaaataagcccaggaccacacaaattcatagtctgtcagatgtccagagaagaattggtgccaatcctactgaaaatgttccagagaaattgaaaaggtgggattcatccctaacacattttatgaagccagtatcaccctggtgagggtgatgtcatactaaagctaagtaagaacacaacagatgaagaaagctacaggctaatatcactaataaacatagattcaaaaatcctcaagaacctactagccaaacaaatccaacaacacatcaaaaaagtaatatactgtgatcaagggagcttattccagggatgcaaagatggtttaatatacacaaatc

SEQ ID NO: 266406 - DNA, 453 bp, Homo sapiens
ggagctaaataatgtgtacacaaggatgtagagagtggaatgagagatgatggagacttggaaaagtaatggggtgggaaggacttggtggatgaaaaagcacttaataagttcagtatacatcatttgggtgacggatatcttaaaagccttgacttcactactatgcaatccatgaatgtaggaaaactgaacttgaatcccattaaatgtatacaaagtaaaaaatcaatttacatgaatgaaaatgtagaaaacatatacaaatcaatgtgatctggtaaaaatatacaaataaaaatctgtgtgaggtgtgttgggttattacaaagtaatatataagattagttttggctttttctaccagaatacatgmataaaaggaaattgaacaaattctggaaagcataaggatcagattttggccaaagttttatttaaacagtcaaattc

SEQ ID NO: 266407 - DNA, 406 bp, Homo sapiens
ctttctaccctttttgagtcattaactgtgcaaggataaatgctatccttatgtgtaactctatgaacttattttgactgtgtttgtttatatagatgaagtcatgcaatatgtactcttccatgtcttactttttttattcaatatttctgataggtactctagaaataatttttagttaattagatgggagacggggctaacaaatarataaatgtggttgtttctttgtcaatagggatggacatcaaattcttccattttctccttaccacctacagataaaacagcaatatctaccaaaatttataaatgtaagcacataattttacacagcaactaaattatttctaaaaagaaaaaaatatgtaacgataaaatccagccacctaagagaatgaacaaa

SEQ ID NO: 266408 - DNA, 406 bp, Homo sapiens
ctttctaccctttttgagtcattaactgtgcaaggataaatgctatccttatgtgtaactctatgaacttattttgactgtgtttgtttatatagatgaagtcatgcaatatgtactcttccatgtcttactttttttattcaatatttctgataggtactctagaaataatttttagttaattagatgggagacggggctaacaaatagataaatgtggttgtttctttgtcaatagggatggacatcaaattcttccrttttctccttaccacctacagataaaacagcaatatctaccaaaatttataaatgtaagcacataattttacacagcaactaaattatttctaaaaagaaaaaaatatgtaacgataaaatccagccacctaagagaatgaacaaa

SEQ ID NO: 266409 - DNA, 406 bp, Homo sapiens
ctttctaccctttttgagtcattaactgtgcaaggataaatgctatccttatgtgtaactctatgaacttattttgactgtgtttgtttatatagatgaagtcatgcaatatgtactcttccatgtcttactttttttattcaatatttctgataggtactctagaaataatttttagttaattagatgggagacggggctaacaaatagataaatgtggttgtttctttgtcaatagggatggacatcaaattcttccattttctccttaccacctacagataaaacagcaatatctaccaaaatttataaatgtaagcacataattttacacagcaactaaattatttctaaaaagaaaaaaatatgtaacrataaaatccagccacctaagagaatgaacaaa

SEQ ID NO: 266410 - DNA, 520 bp, Homo sapiens
attgtctctgaccaagtgattcactgtgtggccaaaaagatgtgaaaattggtacgtgacaatgggaagtactggttataccacttactgaactatctaaaatttgctaatcttgcagtccaggaaactagtcccgtaatacctcatataaagtgtcaatttggtgagaaatcctgtgaagttgktgtactgtccattaggatgcagtgtgtattatagacgaatgatattttgtgctcaaagggaaaaacgcatgtatccagaaattactggtgagtgaacacagcagtgggccactcaccgtcactcccagtgtttgtgctttctacttttgaaactcaaagttctatcagtccagagatcttcattccagtgagggaagtttccactcaagttatagtaggcatttcactaaacttaagctcctctgctgctaggttattttgtttttctcatgtcaggaaggaagtagggaaagaggaactatcttgctcatagggtaattaaccttgttcatcat

SEQ ID NO: 266411 - DNA, 452 bp, Homo sapiens
atggtactctgatttgtgcagaactatggtatcagctagttgatgatggtgattctagaagtaaactagatagaaaaatctacaaaattctaacttgatttgtataagcagaaaagtttgaggcaaagtaaataatactcaaatctgaatcataaaaacagagttacagcctctcaatcaatccccagacttaagccagtttatagatgtagaactacttgaataaaggggaggctggatctctttgaggaagaaaaatagtacactaccaaaaatttatattgttaatatttctctcgggcttccccaaaggaaactatagtcttttatcaggataattgtgcattggggaaaaggaaataaycagatcttccaggaaccactagacacttgctctgataaaacactaatttcaggaaatccaaaattttattgtggtccatcaataagtg

SEQ ID NO: 266412 - DNA, 524 bp, Homo sapiens
tataaaacataaacaacttttttgtttagacttgggttccgtccccaagatatctcatatatatatatatatatatatatayacacacacacacacacacacacatatatattcaaatattccaaaataaaaaaaaatgaaatccaaaacacttctgatatcaatcatttcagacaggagatgttcaatctgtagaaaataaatactcaaaaccctttattaaggtagaatactaattgtaaaatcagtaagtgcaaaaaccagtgggtgaaaggtgagatgagaaagcatattttcatagtttcaaaatagattccttgatattagttatcaattataaaggggcaaataattttactacaatgggaaaacattgagaatacaactttaatcacatgactaatgttagcattatctataataggataaacaaaatcacattctttcaatgatgcactaagaaacccaattttatgtttgccaaagcatgtataacctaaatttaagcataaagaaatatgaga

SEQ ID NO: 266413 - DNA, 524 bp, Homo sapiens
tataaaacataaacaacttttttgtttagacttgggttccgtccccaagatatctcatatatatatatatatatatatatatacacacacacacacacacacacatatatattcaaatattccaaaataaaaaaaaatgaaatccaaaacacttytgatatcaatcatttcagacaggagatgttcaatctgtagaaaataaatactcaaaaccctttattaaggtagaatactaattgtaaaatcagtaagtgcaaaaaccagtgggtgaaaggtgagatgagaaagcatattttcatagtttcaaaatagattccttgatattagttatcaattataaaggggcaaataattttactacaatgggaaaacattgagaatacaactttaatcacatgactaatgttagcattatctataataggataaacaaaatcacattctttcaatgatgcactaagaaacccaattttatgtttgccaaagcatgtataacctaaatttaagcataaagaaatatgaga

SEQ ID NO: 266414 - DNA, 512 bp, Homo sapiens
ggccattaaaatcctcatgcaccctcataaaaattttaaattccttatgaggaattccttattaaaattttaaattcctcctcatgaggaatttaaattgyttatgaggaatttaaaatttttatgatgggtaatagatttccaagtcatatttccaaggtttatgaggttttattttggaaaatgaaaattaaaaattaaaaagaatgatagcgttttagataaaactatctggaatattaaaaaatggaagtctaatagtaaatatatatttcattaaaacagaacaaggattaaaattaatattgggaagaaatcaaaagaaatattaaacaagatattctaaaagctatgatgattttttgcccactaagatagcctctgatttaaggatgtatggacggtttttaaaaggttatagtacttaataataggtttcagggatatgtagtagcataaattgtgatttcttaatattttgatatattaaactgagagggtgtgaatttatt

SEQ ID NO: 266415 - DNA, 620 bp, Homo sapiens
ctaaccacctgctacagcagatgagtgcctcttcctctttgaaaggagaatgcctcaatctgtgctttggatctctttgaactattttctatcccagtgcttattatctattctttctctcaacatgcaatcagrttctctcaatttgattcttctcatttttaaaagcatcttctcagttctccttatttcaaaaatcaataacagtagcagcagcaacaaaacttctgaatcctatttcttccttttgtcaacctatactaagctttccttcatgactgacactctcaaaacgtgtgcctattcttattgtttttattttgtcaccaacatgtctggcaattcattggaactggcttctgtctctattaataacctaagcagctcccactactaaacaaagccatagcctctgtgttactaagtccaaatctcattctacccagagtgttaatccccccacccattcatttatttctatgtactttgttttttcttttacaatattctcatgcattttttctacctcactgaccacccattcagtctcctgtgcaaatccggtttcaataataaaaccacggtaaattgagtttctccaggtcagacctagaaaacct

SEQ ID NO: 266416 - DNA, 590 bp, Homo sapiens
  misc_feature (1)...(590): n = A,T,C or G
nnnnnnnnnnnnnnnnnngacaaataaccactagccactttacggctatttaaatttaaattattaaagataaataaaattttaaattcaattcctcagtcatattacaaacattgcaagtgctcagtaactgcatatgactattggctaccatactggataacacagagcacagaacatttccataatctcatgaagttccattaaacagcactgttctaaaacctggaaatggaaagctgcatctttattgaccacaacatttcatattacaccttgaacatggttttgcaatgaatatttgttgcattaaatcaactctcatatctctgtataagttgtattagaaatggaaaccatctctttaattttgtaaaattagaatttaaaaattgatagatcatgcttatttttcaagtcctttattctttgttgatgtataagaaaataagactgttactcatggcctagagtcaattaaaccttaattaaggatcagtataagtaacagcatggtaaccaacattaattcattctcracaatgactctataatgaaaaatgtcattctgttttatttaaaattaaaag

SEQ ID NO: 266417 - DNA, 566 bp, Homo sapiens
tatattttagtgtataatataaagaggtaagccaaagattatttatttacataatatacatgaaaacttttcaaacatttcaagttctgcatggcaaacttacctggtaggattcaggtatgttctgagagttgctatgatacatggagtgaaggctttggaacaataaaaaaaacttttaaaagtagaaattggaataaatggtttggctagtagtatggtagaatgccacacaattatcacttcgctgtgctgttaccatttcctttgagagayagacctaaagcaacatgtttactttctaataacttatagcagtagttcttaaaactcttctgggacatggacccttttcaaaaactaataatagctctactagaaaaactcacacacacatctacaaaatttttttcataggccgtaaggatatttataatcagtcaccaccattgggtaagaaattgtcaatggaattccatttactgaacttactattttggaccatgtggtctagtaagcaaaaattacttttctagcagggaaggaaggttgccatatttttagac

SEQ ID NO: 266418 - DNA, 533 bp, Homo sapiens
atcataaatgcataaacaacagaaccccaaaatgcatgaagcaaaaatgacagaactgcaagaacagaccattcaataagttggaggtatcaatatcccattcttaataattgatagaatgactacacagaaaaccagcaaggatataagagacttgaacattttccaccaactacacctaactggcatttataaaacactccatccaacaactgcaaaatacacatttttttcaagcacggatggaacattctccagaacagaccatatgctaggccacaaaacaagtttcartaaatttgaaaggattaaagcctcataaactatgttctctatgaacacagaataaaattagagatcaacaacacaaggactggagcccaacttcaaatcatcttaatccttacaaatggaaaggacaattccagattgcttgacagctgtatatgaaaatcctccctggaagaacacatcactctaggactcaaaatgctgccacaaaaataatggaaaatagagaagaaaggataaga

SEQ ID NO: 266419 - DNA, 605 bp, Homo sapiens
atacattatcagggacctataaaagtagagattattatcctcattttacagttgaaagccccatcacatcctaaatgagcctgtgtaatcttgctcaccaggccatctcagagctatgtgagtggtggagttgggatttgaatcaagtttgagtgactccagtgcctgctcactgtttatgtagagatgaacaccttgaggggtcatttttctgactactacagtatccaaggacctgagcaatgtgtgatgcataaaaatgctcccaaaataggagctattattatgattcaggcaggggctggytggagaggatgggaagggggtggaatgggtggagagagtttatgggtgactaggaggagagttgccaaacacaccaattacaaaacccaccactacttatatttagataagcagagactgatcattgtctttgttctgcttagcaaaactaatttcactgcttggtgatggcaaattattttcaagcaggtggtaaaatttatcaagaatctgagcctctgccaaaagtaaaactacccaatgagtcagtagtaatcagctggatgatatttgaatctgacctgataaatccaccatca

SEQ ID NO: 266420 - DNA, 446 bp, Homo sapiens
gaggtttagagaagctaaatatattgtgtaaggtctcacagacattagatgatagaatcagtattcaaactctaatttacctgctacaaagcctcagtccttaattgtgctactttaaatatatcagaaagcctaatccagtagaacattggctctacaaaagcctgtgcattctaaagaaagaaagctggagttatatcacccactctactgacaatgatttgcttggactgattagaagcttgtcttgattattccacatatacttgaatgtagttaaamaaatcaaatcatcactgattatatgcagttagcttggcagaaaaattcttcagaacatagattctatggggtaaaataattttaaaaacccttttattcatactagaacagttggtgcctctcttcttaagtgtaacatatttcagcctgaaaagtcttaaatt

SEQ ID NO: 266421 - DNA, 562 bp, Homo sapiens
acaaggaatgtgtgaatgatgcatgttgtacctggaagaaaatccctaatcttgaacacacccgtgggttttcaatattatctgtgtccctgaaaataagaggcatacaataccagacttgatcgacctattatactcttttctttagtagactaagagagaaagggagaagggggaatgtaatccatgtcctcttgccctccacttcgggcataaactgaagttcacctttagtgaatgaattagcaattatgtatacagcaacatacatcaaatatgcaaaatttcaatctaattttactctaaaatattcaaaaatggttacccttgcaatgagttggtcatacagagataatttgtattgggaactaaattsaccgattcgacagacattactgagaagctactatatattaagggctgtgctctgtgctctgggagcatatatgaatattacaagatcctagtctcaagttttgcatattggcatcaggtacacaagcatatcaacagagaataatatgtataatggcagctgctacaacagaggtatgaacaaaca

SEQ ID NO: 266422 - DNA, 580 bp, Homo sapiens
ttgatcgacctattatactcttttctttagtagactaagagagaaagggagaagggggaatgtaatccatgtcctcttgccctccacttcgggcataaactgaagttcacctttagtgaatgaattagcaattatgtatacagcaacatacatcaaatatgcaaaatttcaatctaattttactctaaaatattcaaaaatggttacccttgcaatgagttggtcatacagagataatttgtattgggaactaaattgaccgattcgacagacattactgagaagctactatatattaagggctgtgctctgtgctctgggagcatatatgaatattacaagatcctagtctcaagttttgcatattggcatcaggtacacaagcatatcaacagagaataatatgtataatggcagctgctacaacagaggtatgaacaaacaactacagggataaagaggaggcaacaaatgatgctgggtacattcagcttcagacttaagcttctcagtgtsgtggtttgccagacagtaaacatgagtactaaccctagctttgtaagaatctagttatgtgata

SEQ ID NO: 266423 - DNA, 592 bp, Homo sapiens
ttctatgatttaactatctgttttgactttaggtaatttttttcagtagtgtagagtttagcttttttatcttttcagagcaaaaattatgagtttgcctgcatcaagaggtgaaatgtactgatcatagttcttagcacataataattgctcaataaatgttaactataattattaatattaaattaagataaaaagcttatagtggacttgaataagcttcttctgaatgaaattcaacataaatagataygaataagagaaaaatgtacacatgtatatagatatacacatatctacatacaaatatgtagtaattaatgttatgttgggaatactttctcccaactcttaagcaaaaatctcaagacaatgcataggaaagggacctcggaatcacatgaatgaccctaaatataaacaaaaaaatccgttataggtcatgacatatttatgattcattgccaaaactgacagaatattccaggttgaacactgttggcccttggaaagtcatagtatgtagaacattaagtcgtactatgtagactatcacagtaaatttaattcaaataataaaccgtcacacact

SEQ ID NO: 266424 - DNA, 592 bp, Homo sapiens
ttctatgatttaactatctgttttgactttaggtaatttttttcagtagtgtagagtttagcttttttatcttttcagagcaaaaattatgagtttgcctgcatcaagaggtgaaatgtactgatcatagttcttagcacataataattgctcaataaatgttaactataattattaatattaaattaagataaaaagcttatagtggacttgaataagcttcttctgaatgaaattcaacataaatagatatgaataagagaaaaatgtacacatgtatatagatatacacatatctacatacaaatatrtagtaattaatgttatgttgggaatactttctcccaactcttaagcaaaaatctcaagacaatgcataggaaagggacctcggaatcacatgaatgaccctaaatataaacaaaaaaatccgttataggtcatgacatatttatgattcattgccaaaactgacagaatattccaggttgaacactgttggcccttggaaagtcatagtatgtagaacattaagtcgtactatgtagactatcacagtaaatttaattcaaataataaaccgtcacacact

SEQ ID NO: 266425 - DNA, 514 bp, Homo sapiens
agtaccctgtaagattttcaacaataaaatcaaaaattggtttatgttgtgtagcacaggtaataaagtgagttcctttgaaagttttcatttagcagggagaattgttccagctttgggtatgacatccctgacaaagagtattagctggtggcttcctggagtaaaagagttgacagaaagaaaaacagtaacatgcagagaagaactgagttcccttcttccttctccactgccagcactgagtcagagcagctacggaagcataacacacaaatgagacaacgctaagtattcttttttttttaatttttatttttattatactttaagttttagggtacatgtgcacaaygtgcaggtttgttacatatatgcatgtgccatgttggtgtgctgcacccagtaactcatcatttaacgttaggtatatctcccaatgctatccatccccacccgccccccaccccacaacaggccccggtgtgtgatgttccccttcctgtgtccatgt

SEQ ID NO: 266426 - DNA, 562 bp, Homo sapiens
acatcccttgtgtgcagcattcactgtcagccacaaggtggcaagctaagcatccttaaatctaaagctcaactctggtctgggtgaacttgactattcttagaaagtttataaagcaagaacttattccccagtagtgaattcttatgggtatagcacacatgcttctttcctaaaaattgtggcatctttgcaatgtatgtctccttgtataaggaaacaagcagaaacctttttttcttaaataaaactctaaaccaatcagggctctgctagcatccttttggctccctttaatcacagcacacattctagactcctaatcctgccatccaagaccctctacaaactgccttaaatcttcgcttctaacttcaccttcctttactttctttatacttcaaatacctaccgctscccagctccctatacacacaccactttttattcctctgcctaaacattccagctctcagggcatagtccacctacgccaaattccgttcagatgtgtataactcatagttcacatttccatgacttggtgaaggctattgattcc

SEQ ID NO: 266427 - DNA, 564 bp, Homo sapiens
ttgcttgaataacacaatgccttaggcatttgatgatgctggtgggtgtkgggggaaataaagtgaaccagctgttttctactagggtcagagtgagtaaaagtgacctgtggttctcagtgactgttaatgcagtaaatatccttaggaatatcgtatttcaaattccactgttttccattcagagtgggggaagaaagggacttgtctcttcacagagttggttatctaagcaggttgctgtctaacataaagtgcggctcttgcagtcttgcatatttcctccgttttcagctatattatggtcaaaggagaacctggctgagttttacttgtttcaccatttcagattttttatttttaaagtaaccgtatactttactaagaaggtttacgtgataattttcttttggttgaacaagatttttctcctgtttctgtttattctgtgtgtttgtttttaaggcaaacatgatctctctaattacctttcattgtaacgaaggtttctctttcctgtagccccagtgttgttctagtgaaatgagtttcatctgctgagtg

SEQ ID NO: 266428 - DNA, 610 bp, Homo sapiens
tctctctttggaccaagttatttaaaacaaaaattttttaacttacataaactctgtttttctttcattgtttactctaaaggtcttgatgtctacaaaaattgtatggacaagttctttgttttaaacaatttaaagatgaactaccatgtcattgtgagctgagtctattctccaaggaccacatcactcatagcctttgatgttcccatttgacatggttttaatagccttgccagcctatttacccctctctggaagcaccccaatctgctgccattctctctgaaatatggtcctcagatcctaatgatacattctagcatagtgtagaattgtcatctctttgttcttggcatgcaactccattaatgtagcctaaaattacattggttgtttggaagtcccacatactgacaactccttgaactaaatgtrtgctgacattcccctctgcgcccccacccaccacccaaccctcactgcccagctcctttttctttatcatgtgtttctcttacttttccattgaccattctagaaagtgggaatgagaaaaagagggtggaatggaaaatagggactagggaaatagaagttgaggtggagg

SEQ ID NO: 266429 - DNA, 578 bp, Homo sapiens
taacttcttcccagtgtcccattattgttatcatcaatggttaattttttcatatacatatatatataaaacttctaggacatcagctctcagactgactcatagtggaaaagtaacaagaaccactccagggatggtaattcaatctgttgttcactcttcctcagaagcagattatcaatacttacacttatactttctggggcaaggtaggctttcttcaatgtcccaagtaatatctctctcaacaaaaataacaatgccataactgcagtttccaaagaactctcacaaacttgttccattgcaatcattcttggccattttacctatgagaaaactaacactccaagaagttaaggtacttgtcaagagtcaccttaactgacgggcataagcgccaagaccctatcsagatcattgcagtctgaatcctctttcagttatcatcagcctctcctctaccccataaagagatgaagtccaagtctgaaaactgaattggctgcttagtagaaaaaaaaaaatcactgagaatacacgacacaatgaggttagaacatttctgtgaactgcaa

SEQ ID NO: 266430 - DNA, 608 bp, Homo sapiens
gagaaagagcacttagtcttctaagttagttaggactcaaaggtctttagaggacaactttatcttcaggaaataaaatttttaggaaatattcttacaccctgactaagaatcaaccctaacattctgggtaattctgagtcaaacttttcattccaaggcttgtctggtaggtactaatgtcattctgggcacctttgaggatttctctattgcctacaaaatgagggccattggcagaagscctctgtattgcagtctgtgctttcttctttttctctcctcagcttggtctgttgaaggggacttgagtaaaagaaactttgtaattctgtgaggaaagtcatcggtagcttgatggggatggcactgaatctataaattaccttgggcagtatggccattttcacgatattgattcttcctaaccatgagcatggaaggtacgttaaagttcatttggaaccaaagaggagcccacattgccaagacaatcctaagccaaaagaacaaagctggaggcatcatgctacctaacttcaaactatactacaaggctacagtaaccaaaacagcatggtaggtatagaccaatggaacagaacaga

SEQ ID NO: 266431 - DNA, 517 bp, Homo sapiens
actcatgacatgagaattctaatttgtattatgtgagccatgcagaggacaaataagcttataattttgcttgaattaatatttcagaggtttcygcagggatctcctttggaggtaacagtatgttcccaggagagtctaatggccttatgaatctctaatcctcatcccctatctctcttagaaaaaagattgtctttctgattggatagtgggatatatactcacatttaggatgcttcaagtagagtcccaactctgggactatagggtccatagggtacagttgtagtagcaataatctaatattgggagagctcagaacaagctccagctctcctacttacttagctaagtgacttcaggcaaattatttaatgtcttaacaacctcagatttcatataataaaattgaatatctaaattcctctgaaatcccataacaatttatttgtatctctcctatgggaagagggaggaagggacactaatattaattgaacatcttatatgtgca

SEQ ID NO: 266432 - DNA, 541 bp, Homo sapiens
atagaatactggctatttggttttgttatgcaataacaataagtaatccctttatataatgcgaaaatgtctcattgaaaacatataatcaaggaattataaataatctctatacactgagaggatataatgtatacaatatagctatgtactgctaaattagtttgtatacaggaacacattcatacagttttttaatccttggagacattttaraatcacttatgacagtaaataaacattggatatctattaactgtcaaagactgtgaaatgtggactttacatataaaatctgtgactttctctatttgtaaggagtttatcatcttatgggccccttcacatatttatttagataatttttcacatgaattgatacaaaattgtttgaaatgcttgttccctggtgccataaagaaatagtatttgaacataaatttaatttcttcagcaaggccatttttatactttttgcagaaacggcgcactcgccagcagttttgccaggagagtacaccaaacaaaggagacagggtca

SEQ ID NO: 266433 - DNA, 448 bp, Homo sapiens
ctgcactgctacactccgggcctgggcaacagaacaagactccatctcaaaaaaataaaaagtatcttttagtccatcattatcacttttgaattaacaatttgtcagtaagttatgattagcttttcttttttwaaaaaaaactattattaattgtaaaaagcaaaacaagacaaaacaaagtcatatttctttctgccaaactaaatctgtatattagctctaacacttacagattttggaagatttcttgtattctctgattgctcatctggaaaatgggtctatgtatatcttatacattggagtattatgtttgaaataatgtttgaaaattgtttatccaaccaccatctatacctagtgatttggaagccttttatgacttatcacctaatagatagagactgcccagtaaagaggaatcacatttgatgtgcaaatatat

SEQ ID NO: 266434 - DNA, 602 bp, Homo sapiens
ccactgcactacagcctgggcaacagagcgagactgtctcaaaaaaataaaaataaaaaaacaaaaacaaacaagcaaaaaaacctgtggctgagtaatttatgaagcaaagagttatattggctcatggtttttcaggctttacaggaagtgtggtgctggcatctgcttttggtgagggcccaggaaacttccaatcatgggggcaggtgaaagaggagcagccatctcacatggcaagagcgggagcaatggcaggggaggtgccaaacacccttaaagagccagatctcacgagaactcactcactattgtgaggagaataccaagctatgaggcatccayttccatgactaaaacacctcccaccagtccccacctccaacactgggaattacatttcaacctgaggtttggaggggatgaatatccaaaccatatcaatagcacttggcttttagagtagtggtttatttgaaaagcagtttactgggagtttaggatgtttttccaatccaactgtgcttcaagtaacaacaggtaacttaatataaatttagctgggttcaggaatcagtggtcaatagtacaaccagagtagt

SEQ ID NO: 266435 - DNA, 524 bp, Homo sapiens
tggaatggtgtggtgaaggaactctatgttggatttgttttacgtattctgaaacagcttttccacacaggaagtaactacaatatttctaacttgcccacagaaacttagataaattggttgaatgtaacaaagtgcttccccgtgaaggtgtgaacatgtccatttgagctccagatttgtgatccgtgagacaagaggtggtggcagtggagagtgttctagatccagagtatcaggcaatagtggattcaatgagatattaatggaagtgtaggagccatttagcaaagctttatttgccaccaaatccagggaaaaaagaactggcatgattagcaactcctctctgcaatcaaccacaggaggaagaataaaaagagatctgatctccccaattgagagattaaaggacacagccctggggacaatgaattaggattgcgtrtgtaggtatacacaggtattatctgtgtattgaggtaagttaacatctggatacatataactctagctgcccaata

SEQ ID NO: 266436 - DNA, 673 bp, Homo sapiens
atagagtttagtaaaaatttttattcagtcagtatatatcctatggtagaaacatggtaatatagaaagccagccctactttagagcagtaattgcaaccatattctagttttccgggagtggcactctcagataattcgagrcaccaaaagagggagtctatttacaccagtaaaaatattgacattgcttattggccacctgtgactaatcagtcttaatgttgtttatgtgaaataatattgttctctaatatgggaggcatacctctcattccagaaccctatgttaaattgcacaaaagaaacactgtacctggatgaacaggtccaggaataacactgcagctaagtatcaaaatcaaggcattcacacatccccttttgcaatgaagggaacagctcacatagtggtaaaattccataaggatagctaatacactgtgggggtctgaacagctcaccatttcaccaggaattgatggaaagtgtaaaatatatttccaagcccagagacccttgctggctcctatccctctgaaagaactactccactccgtctcacttgcatatgcctctagaaacctggaaccaagtgaatgggcaccaatacttctaataacttggtcatacctaatagactgaaagaattttcctctcatggcaggtaccac

SEQ ID NO: 266437 - DNA, 673 bp, Homo sapiens
atagagtttagtaaaaatttttattcagtcagtatatatcctatggtagaaacatggtaatatagaaagccagccctactttagagcagtaattgcaaccatattctagttttccgggagtggcactctcagataattcgaggcaccaaaagagggagtctatttacaccagtaaaaatattgacattgcttattggccacctgtgactaatcagtcttaatgttgtttatgtgaaataatattgttctctaatatgggaggcatacctctcattccagaaccctatgttaaattgcacaaaagaaacactgtacctggatgaacaggtccaggartaacactgcagctaagtatcaaaatcaaggcattcacacatccccttttgcaatgaagggaacagctcacatagtggtaaaattccataaggatagctaatacactgtgggggtctgaacagctcaccatttcaccaggaattgatggaaagtgtaaaatatatttccaagcccagagacccttgctggctcctatccctctgaaagaactactccactccgtctcacttgcatatgcctctagaaacctggaaccaagtgaatgggcaccaatacttctaataacttggtcatacctaatagactgaaagaattttcctctcatggcaggtaccac

SEQ ID NO: 266438 - DNA, 628 bp, Homo sapiens
gactctgtctcaaaaaataaaatataaataaataataaatttttaaaaagacgtagcaaaagaaaattaggtgcttttattctggaatttctatatagaatacattactttcagcccaacagtaaccagttctagaaaagtgacctttcaaatagaagttttggctcctaattctttattatgtacatgaattgtttagtatgtacatgaattatgtgtgtctattcaaaatactctgcttttataaacggcatttcattcagatttatgtcagctttttgagaacatgctataaaagcatttatgtgtatttcaattagatctcaccatgagcttataggcatttctttctcataaggcacaaagcaartttggccctgcactgaatatcccctgagagctgacttcccaatagcattagttcaacaggcattttatgctaactacatagtttcttattaatttttttcaaataacatgactagaatatacataaaatagtactttcttatcattatattgttacctaatcatagtaaattttcccactcgctttcttattaagaaatgccaagtagtttttcctacattatcttgacatattcatttaacaatcttttgggatgct

SEQ ID NO: 266439 - DNA, 638 bp, Homo sapiens
taaacgtaaatatataactatataactacatgctaattaaaaacatacaaagaagaagtgcctaaagaattacaacagaaagtggcatagtgattattagagttaatataatataaataaggccaggcatggtggctcatgcctataatcccagcacttttggaggtcaagttgcagggatcacttgaggacaggrgatagagacaagcctagccaacatggtgaaacccatctctactaaaaatacagaaattagctgggtgtggtgatgggcgctggtaatcccagctactcaagaaactgaagcaggagaattgcttgaacccggaagctggggctgcagtgagccaagatcgcgcactgcactccagactgggtgacagagaaagacccggtctcaaaaaattaaaaaatagtataaataatatttcaaaacacaagtctgttaagataaaaggtacagaggaatggtgagatgacttttttatttgtgtgataagggactgttttctgtgattgtgagaaagaccaggagttaagaaaaagtggccatcaataaatcagccacttatggggaagaaccataaaccactctcagatgaaatacaaatgcagtcattatttaatattattggaat

SEQ ID NO: 266440 - DNA, 485 bp, Homo sapiens
gtattcatacaaagtgcccccatcattgtaagagtcactgaaaaaatactaatgagcaaaattagttcctccaaaatgattgtctgtaatattcatttttaaatggaatttaacttgctctgaagttatctttttgagaattaagctgtgacacagctctttctctctcctctcagtcytttgaatagcacattcttgaaattagtactgaaatgaagtagccaacataattggataaaatccagggcagtaacagcagatagcaagatatctctctgagtgttacctctttttcaaataaagtccaatattacttgaccaaagaatagatgattctgctgtttgtgatgtctggttgcagggctacagtatccccatttacttggcagttagtacaattagccaagttaactggtaaatgggtctccattcaactattactcaaggttttatgtagtttgaaaacactgaccatcattagcaga

SEQ ID NO: 266441 - DNA, 485 bp, Homo sapiens
gtattcatacaaagtgcccccatcattgtaagagtcactgaaaaaatactaatgagcaaaattagttcctccaaaatgattgtctgtaatattcatttttaaatggaatttaacttgctctgaagttatctttttgagaattaagctgtgacacagctctttctctctcctctcagtcctttgaatagcacattcttgaaattagtactgaaatgaagtagccaacataattggataaaatccagggcagtaacagcagatagcaagatatctctctgagtgttacctctttttcaaataaagtccaatattacttgaccaaagaatagatgattctgctgtttgtgatgtctggttgcagggctacagtatccccatttacttggcagttagtacaattagccaagttaactggtaaatgggtctccattcaactatyactcaaggttttatgtagtttgaaaacactgaccatcattagcaga

SEQ ID NO: 266442 - DNA, 626 bp, Homo sapiens
caataagaagtgctctgtgtatatgtgtgtttatagacgcattttttaaacactggagaatttctgaaagtagtacaaaccttgtaatgtcaagtagatgtgggaaaaagggagtttacaacattctctcctgacattgctctcctttggcatctgcatttttaaaatgttaaaaatgtttaaaaacgtgtgcttaacacttaatttggtgatagttgctgttaccaaggcaactctgtaactccacccagataaaaataaatcttgaagatgagtttctgtgtctctgagcaaatatttttgtgaatagtagaagcagagaaagttaaagatacctgagcttttgatctttacyagttttatagatatgtttatagttatacatttttattcatacattttagataaataactttgtaaagcaattgattcttcttgtaaaaatcaagtatattcttaatagactgataaactttctttttttgagacagagtcttgctctattgcccaggctggaatacagtgccatgatcttggctcactgcaacctacctctgcctcctgggttcaagcaattctcctgcctcagcctcttgagtagctgagattacaggtgcatggtacca

SEQ ID NO: 266443 - DNA, 587 bp, Homo sapiens
ctggggcaaaatgccttaatttttatgtgcctcaagttctcatgtgagatgagaataaaaattacccctatttcataagatttgataaagtgtttagcataatacctcataacaattgcaattcagtggtggttattattataaagaaaagatgattaactttatcttaaygtttaacttgttctgatagttattgatctatagctttgatatggaggtttgagaatgacctggaaagaattggccacaatgattgaagatagtgatacaagaataaaagatgactgcaaaatgtaaacctgcaataacagaaagaatgaagtcactggtctcatgggaactgatatgggagaaaaaaacagatcaaaaggctattcatgttttgggcctctttgtcaaaatggaaatgagaaactggggaataaaaattaaagcaattctagcatctggttttaacataattcttatccctaaaaagaatctataagaaactcccaaaatgacaggcagccgtgggtagcattgcatttcaagtaatcttttaattgttaaaatttaagtttccaacatgaacataaaattttcaa

SEQ ID NO: 266444 - DNA, 587 bp, Homo sapiens
ctggggcaaaatgccttaatttttatgtgcctcaagttctcatgtgagatgagaataaaaattacccctatttcataagatttgataaagtgtttagcataatacctcataacaattgcaattcagtggtggttattattataaagaaaagatgattaactttatcttaatgtttaacttgttctgatagttattgatctatagctttgatatggaggtttgagaatgacctggaaagaattggccacaatgattgaagatagtgatacaagaataaaagatgactgcaaaatgtaaacctgcaataacagaaagaatgaagtcactggtctcatgggaactgatatgggagaaaaaaacagatcaaaaggctattcatgttttgggcctctttgtcaaaatggaaatgagaaaytggggaataaaaattaaagcaattctagcatctggttttaacataattcttatccctaaaaagaatctataagaaactcccaaaatgacaggcagccgtgggtagcattgcatttcaagtaatcttttaattgttaaaatttaagtttccaacatgaacataaaattttcaa

SEQ ID NO: 266445 - DNA, 284 bp, Homo sapiens
tcttagatagagtacagctagacacgaaccatagtggaaatcaggtagacaaaatttaaaaggagtcttaattgaaggtcattttattgtcctcagtattaatcttayttaaaacaaacctgtcactgagcagaactcaaaacaccagagccctttgccaaatgtgattttttacaacaggagcgctggcagttgagaggagtattctgtcacacttgagaagaattcgagtccctgaagatttatatgaatgcttagctattatcgaaccatctcttcacaga

SEQ ID NO: 266446 - DNA, 576 bp, Homo sapiens
gatgacatctaatataaatgtgtcctttcaagtcaagctttctctgttcattagtagaaatattgtatatcaagtgtgcaaaaattttcttcaacagggagctttgtttccctccttttattataacaatctgagctttgtggtcccagggtctcctagtgcctgtctttaggtctgtttattcacatgaagaaagcatgtcatatagtattatctaagactcaggctgcttatgcatgatgacagaagggttcccaggcacaaacattcatccatgcattcatccatccacctattcatccatygatttggctgataattattgactactgttgagttgccctcagatttagtttctgtccttctgccatggggaaatatggggttaagccacaacatactcttctcttctttttctgcaccttcttagtatatttagttccattttgtctagccctgcctctgacttctttgttgtacttcaggttttttatcattgaaagttatttctggatcatagatcattctcttggtcactttgcttgttcacttataaaattaattcagaaaaaatga

SEQ ID NO: 266447 - DNA, 576 bp, Homo sapiens
gatgacatctaatataaatgtgtcctttcaagtcaagctttctctgttcattagtagaaatattgtatatcaagtgtgcaaaaattttcttcaacagggagctttgtttccctccttttattataacaatctgagctttgtggtcccagggtctcctagtgcctgtctttaggtctgtttattcacatgaagaaagcatgtcatatagtattatctaagactcaggctgcttatgcatgatgacagaagggttcccaggcacaaacattcatccatgcattcatccatccacctattcatccattgatttggctgataattattgactactrttgagttgccctcagatttagtttctgtccttctgccatggggaaatatggggttaagccacaacatactcttctcttctttttctgcaccttcttagtatatttagttccattttgtctagccctgcctctgacttctttgttgtacttcaggttttttatcattgaaagttatttctggatcatagatcattctcttggtcactttgcttgttcacttataaaattaattcagaaaaaatga

SEQ ID NO: 266448 - DNA, 619 bp, Homo sapiens
ccaggtgttctttgtgcttcttatatttggatatctagatctctagcaagactaggaagtttttcttgattattccctcaaataagtccttaatgaccccactatataacatgaaatatctgttattggtactgaggtgctggccacaaacaattctgtgtgtcctgaaaactcttcagaatattcgtcatctttagcacttgttatcttagtgtttgggcttggcttagagtgatacatctcataacagggcaacagaaagaaccaggaaccaagatttatataacataagtcagtaaaactagaggcaccagaggtttacatttacattaggttacattttctaacaggtagcaaagcacatgaatgaagttcagtggaaggccttcctcaggaatccagtaaaaaccaaacatacacacacacacacggacatccgtgaggcaggaagggakgtccactatagtacagacaagcatcctggaaggccatcaaggagtaggtgggtttcagttgcctcaggaatgtggcatggacccaaactaagtgagtacagatacttgtcattgaggagaagattcaaaatagcatcctaggtgtaaaaactgaggcacctggg

SEQ ID NO: 266449 - DNA, 582 bp, Homo sapiens
ccaaaaaggaatgcaaccatgctggcaccttggttttagcccagtgacaccatggtgcatttctgatctacagaactacaagataataaattactgttgtttaagccactawagttgagacaatttgttgtggtagaaatagaaaactaatacagctactatttcagatagtacaaatatagaacatttctgtctctgcaggaagttctattggacagcaccaatttataagattttaaataattgaaggtatagtaaatggagtcctcattcacttttggtaatctctcttttatatatgttcactttctggaatgatctcatctaggctcataactttgaatagacaacaataaaagctgttgattcctaaatttatatctctagtttggacttctgactccagatgcatatatacacaactgatcatttaaacgttccaattaggtagttaatgggcatcttaaacacagcatgtacaaaactgaacccctaatctctcccagcatagacttgctttatttacattattttcatcttagttaataataattatgccattttcaatttctcaggaaaaac

SEQ ID NO: 266450 - DNA, 591 bp, Homo sapiens
ccctggtaccattattttagcatttactctaaatgtttaatacatcaaatttaaactcaaatatcaagagcaagttcttcagggtttcaaccttccttccaaacaatacagtgaaatttcaatcactttatctccaattattttgtatcttacttgtatgctgtctttattttgtattttagttttatcttagcttttaattccagaaataktattataataatttttatagagtcttatttttattgaaatatcaccaaatatataacattttgcttgcattttagttcttcctgtatttaggatcttctaggtgggataattttattttttgcctgaagtgcattctttactattttaattgagtaattctattgatgacaaaatatttgtctttttctgaaatgttcttaatttgtcttcttcatgtatgatattttcactgagtgtagaattccaggctgacttttattttattgcaggagacagaagattgtgttccatcattttctggcttccactgttgctcttgagaagttagctgtcagtaaaactgttgcttatttaaagatgatgtattttcctggctag

SEQ ID NO: 266451 - DNA, 591 bp, Homo sapiens
ccctggtaccattattttagcatttactctaaatgtttaatacatcaaatttaaactcaaatatcaagagcaagttcttcagggtttcaaccttccttccaaacaatacagtgaaatttcaatcactttatctccaattattttgtatcttacttgtatgctgtctttattttgtattttagttttatcttagcttttaattccagaaatagtattataataatttttatagagtcttatttttattgaaatatcaccaaatatataacattttgcttgcattttagttcttcctgtatttaggrtcttctaggtgggataattttattttttgcctgaagtgcattctttactattttaattgagtaattctattgatgacaaaatatttgtctttttctgaaatgttcttaatttgtcttcttcatgtatgatattttcactgagtgtagaattccaggctgacttttattttattgcaggagacagaagattgtgttccatcattttctggcttccactgttgctcttgagaagttagctgtcagtaaaactgttgcttatttaaagatgatgtattttcctggctag

SEQ ID NO: 266452 - DNA, 589 bp, Homo sapiens
gctgctgctgctgctgatgatgatgatgatgatgattttgatatcacatggaaagatttaaaaatatgctttcctaaattgtatccaacatggcatattagtctgtcctcacattgctattaaaaatacttgaggctgggtactttataaagaaaagaggtttgattggctcatggctctgcaggcagcataggaagcatgatgctggcatctatttggcttctggggaggcctcatgaaacttacaatcatggcagaaggtgaagggggagcaggcacaccccatggctggagcacacaatagagtgagcagagaggttttacatatttttaaacaaccagatcgcagaacaactcactcmctatcacgaggacagaaccaagggtgatgatgctaagccattaatgagaaatctgcccccatgattccatcatgtcccaccaggcctcacctctaacactgaggtttatatttcaacatgagatttggaggggacacacatccaaactatatcaattggtaagtggtttcggttaaataatcacttaatataccttgtcagccaaagtgctggtatcaaaaactatc

SEQ ID NO: 266453 - DNA, 616 bp, Homo sapiens
agcatgatgctggcatctatttggcttctggggaggcctcatgaaacttacaatcatggcagaaggtgaagggggagcaggcacaccccatggctggagcacacaatagagtgagcagagaggttttacatatttttaaacaaccagatcgcagaacaactcactccctatcacgaggacagaaccaagggtgatgatgctaagccattaatgagaaatctgcccccatgattccatcatgtcccaccaggcctcacctctaacactgaggtttatatttcaacatgagatttggaggggacacacatccaaactatatcaattggtaagtggtttcggttaaataatcacttaatataccttgtcagccaaagtgctggtatcaaaaactatcatgttattcttagatttttgtcattttttttgtattaggtatgtcttttgtaaagagcatagagttaagtttactcttattgaatctgagatttcatgtcttctaattgtgtggtctgtcttctgttatcttattacacactttctgatctttaaaattttttacttggcttaatctttraaagcttcatggagaagttatatcttaagctgagttgtgatg

SEQ ID NO: 266454 - DNA, 616 bp, Homo sapiens
agcatgatgctggcatctatttggcttctggggaggcctcatgaaacttacaatcatggcagaaggtgaagggggagcaggcacaccccatggctggagcacacaatagagtgagcagagaggttttacatatttttaaacaaccagatcgcagaacaactcactccctatcacgaggacagaaccaagggtgatgatgctaagccattaatgagaaatctgcccccatgattccatcatgtcccaccaggcctcacctctaacactgaggtttatatttcaacatgagatttggaggggacacacatccaaactatatcaattggtaagtggtttcggttaaataatcacttaatataccttgtcagccaaagtgctggtatcaaaaactatcatgttattcttagatttttgtcattttttttgtattaggtatgtcttttgtaaagagcatagagttaagtttactcttattgaatctgagatttcatgtcttctaattgtgtggtctgtcttctgttatcttattacacactttctgatctttaaaattttttacttggcttaatctttaaaagcttcatggagaagttayatcttaagctgagttgtgatg

SEQ ID NO: 266455 - DNA, 537 bp, Homo sapiens
ttttcttcaactggctaaaggtttgtaaatttcttttaacttttcaaaaaaacaactttttgtttccttgatattttttatttcctttatttcaaatttatttatttctgttctgatctttattatttcttttcttctactaattttgggtttggtttgctcwtgttttctagttattcaaaatgcatcattagattatttaaagtttttttctcttttttgatctaggcacttatagctatcaacttccctcttagtactacttttgctatatctcataggttttggtatgttgtgttttcatcatcacttgttttaagaaaatgttttatttccttcttaatatctttattgacccactggtcattcgggagcatattgtttaatttccatgtatttgcatcattttctaaattcctcctgttattaatttctagttttattcagttgtggtaagagaggatgcttgatattatttccattttttggtatgttttgactcattttgtgacttaatgtatagtcagtccttaagaa

SEQ ID NO: 266456 - DNA, 537 bp, Homo sapiens
ttttcttcaactggctaaaggtttgtaaatttcttttaacttttcaaaaaaacaactttttgtttccttgatattttttatttcctttatttcaaatttatttatttctgttctgatctttattatttcttttcttctactaattttgggtttggtttgctcttgttttctagttattcaaaatgcatcattagattatttaaagtttttttctcttttttgatctaggcacttatagctatcaacttccctcttagtactrcttttgctatatctcataggttttggtatgttgtgttttcatcatcacttgttttaagaaaatgttttatttccttcttaatatctttattgacccactggtcattcgggagcatattgtttaatttccatgtatttgcatcattttctaaattcctcctgttattaatttctagttttattcagttgtggtaagagaggatgcttgatattatttccattttttggtatgttttgactcattttgtgacttaatgtatagtcagtccttaagaa

SEQ ID NO: 266457 - DNA, 651 bp, Homo sapiens
tagtcagtccttaagaatgatccacgtgctgaggaaaagaatgtgtattctgcagttcttggatgaaatgttctgtaaatatctattagatccatttagtctatagtgcagattaaatctgatatttctctgttgattttctacctggaagatccggtcagtgcagaaagtgggttgttgaagttgccagctattaatgtattgggccctatctctctctttagctctaataatacttcctttatgtatctgggtgctccagtgttgggtgcatgtatattgaaaattgttagattatcttsctgagttggacactttgtcattatatagtgacctctttttgtctcttcttacagttttgtcttgaagtctgttttgtctaagtgtagcgactcctgctctcttttggtttccattggcatagaatatctgtatctatcccttgattttcagctttgtgtgagttaagttctatttgataatattttatttatgattttttataactgaatatatcaggttgatctgtagtttttttaatagtgcagtttaatcaaatttagttatctgttatatattcacttcataaaaataatgtataagtgatcttttatgtgttatcaggaacaatttaaatactattggcattat

SEQ ID NO: 266458 - DNA, 651 bp, Homo sapiens
tagtcagtccttaagaatgatccacgtgctgaggaaaagaatgtgtattctgcagttcttggatgaaatgttctgtaaatatctattagatccatttagtctatagtgcagattaaatctgatatttctctgttgattttctacctggaagatccggtcagtgcagaaagtgggttgttgaagttgccagctattaatgtattgggccctatctctctctttagctctaataatacttcctttatgtatctgggtgctccagtgttgggtgcatgtatattgaaaattgttagattatcttgctgagttggacactttgtcattatatagtgacctytttttgtctcttcttacagttttgtcttgaagtctgttttgtctaagtgtagcgactcctgctctcttttggtttccattggcatagaatatctgtatctatcccttgattttcagctttgtgtgagttaagttctatttgataatattttatttatgattttttataactgaatatatcaggttgatctgtagtttttttaatagtgcagtttaatcaaatttagttatctgttatatattcacttcataaaaataatgtataagtgatcttttatgtgttatcaggaacaatttaaatactattggcattat

SEQ ID NO: 266459 - DNA, 651 bp, Homo sapiens
tagtcagtccttaagaatgatccacgtgctgaggaaaagaatgtgtattctgcagttcttggatgaaatgttctgtaaatatctattagatccatttagtctatagtgcagattaaatctgatatttctctgttgattttctacctggaagatccggtcagtgcagaaagtgggttgttgaagttgccagctattaatgtattgggccctatctctctctttagctctaataatacttcctttatgtatctgggtgctccagtgttgggtgcatgtatattgaaaattgttagattatcttgctgagttggacactttgtcattatatagtgacctctttttgtctcttcttacagttttgycttgaagtctgttttgtctaagtgtagcgactcctgctctcttttggtttccattggcatagaatatctgtatctatcccttgattttcagctttgtgtgagttaagttctatttgataatattttatttatgattttttataactgaatatatcaggttgatctgtagtttttttaatagtgcagtttaatcaaatttagttatctgttatatattcacttcataaaaataatgtataagtgatcttttatgtgttatcaggaacaatttaaatactattggcattat

SEQ ID NO: 266460 - DNA, 595 bp, Homo sapiens
atctgtattctatcattaataaaaatcacttcactgatctcactcatgtgttttttaatttacctctgaatagatttataactatcagtgctgatttttgttgttgttttgagatggagtcttgctctgtcacccaggctggagtgcagtggtggatctcggctcactgcaacctccacctcccaggttgaggtaattctccggcctcagcctcctgagtagctgagattacaggtgcccaccatcatgcccacctaatttttgtatttttaggagagatggagtttctccacattggccaggctagtcttgaactcctgacckcaagtgatctgcctgccttggcctcccaaagtgctgggattacagatgtgagccaccgtgcccagcttcaatgttgattttaagtgtttatttacatgttcattacatgttattgaatgttttataattatctcacaattgtgctatggaatatgggtagttttattttatattcttattgatctttattcattggaaagagattcaggtttaagtacttactagaaatgcagaatttacagcccaattcagatctaatgaagccaaatcc

SEQ ID NO: 266461 - DNA, 595 bp, Homo sapiens
atctgtattctatcattaataaaaatcacttcactgatctcactcatgtgttttttaatttacctctgaatagatttataactatcagtgctgatttttgttgttgttttgagatggagtcttgctctgtcacccaggctggagtgcagtggtggatctcggctcactgcaacctccacctcccaggttgaggtaattctccggcctcagcctcctgagtagctgagattacaggtgcccaccatcatgcccacctaatttttgtatttttaggagagatggagtttctccacattggccaggctagtcttgaactcctgaccgcaagtgatctgcctgccttggcctcccaaagtgctgggattacagatgtgagccaccgtgcccagcttcaatgttgattttaagtgtttatttacatgttcattacatgttattgaatgttttataattatctcacaattgtgctatggaatatgggtagttktattttatattcttattgatctttattcattggaaagagattcaggtttaagtacttactagaaatgcagaatttacagcccaattcagatctaatgaagccaaatcc

SEQ ID NO: 266462 - DNA, 623 bp, Homo sapiens
tacaaataattgtattataaagacacatgtatgtgcatgttcattgaagcactattcacaatagcaaagaaatgaaatcaacctaaatgcccttcaatgataggctggataaagaaaatgtggtacaaatacaccatgaaatactatgcagccatagaaaaaaaatgagatcatgtattttgcagggacatggatggagctagaggccattacccttagcaaagtaacacaggaacagaaaaccaaatgctgcatgttctcacttataagtaggagctaaatgatgagaacacatggacacacagtgggaaagaacatacactgggggcttttgaagggtggcgggtgagaagagggagaggatcaggaaaaacaactaatgggtactaagcttaatatcagggtgataaaataatctgtacaataaacccccatgatataagtttgcttatgtaacaaacctgcacttgtacctctgaacttaaaaaaaaaagtctgacgaaggcttttaatagtattaattttcctcttaatactgcttttgstgcatcccctaagaggttttggtatgttgtgtccctattttcattaatttcaaaacattatttgatcattacaatgtc

SEQ ID NO: 266463 - DNA, 579 bp, Homo sapiens
ccaatgtcattcttcacagaattagaaaaaaagtattctgaaattgacatggaaccaaagaggagtccaaakagccaaaataattctaggcaaatctggaagcatcacactacctgactttaaactatactataaggctagagtaaacaaaacagcatggtactgctacagaagcagacatgtagaccaatggaacagaatagaaaactcagaaataaaggagtataactgcatctgatgatcttcaacaaggccaacaaaaacaagcaatgagaagaggactccttattcaataaatggtgctgagataactggctagccatatgcagaagaatgaaactggatccttaccttttgccatatataaaaattaactcaaatggattaaagatttaaatgtaagacctcaaactataaaaatgttagaagaaacctaggaaatacccttttttacattggccttggcaaagaatttttggccaactccccaaaaacaaatgcaaaaaaaaccaaaaattgataaatggtcctaattaaactaaagagctcctgcacggcaatgaaactatcaatagacag

SEQ ID NO: 266464 - DNA, 593 bp, Homo sapiens
agaggactccttattcaataaatggtgctgagataactggctagccatatgcagaagaatgaaactggatccttaccttttgccatatataaaaattaactcaaatggattaaagatttaaatgtaagacctcaaactataaaaatgttagaagaaacctaggaaatacccttttttacattggccttggcaaagaatttttggccaactccccaaaaacaaatgcaaaaaaaaccaaaaattgataaatggtcctaattaaactaaagagctcctgcacggcaatgaaactatcaatagacagtcttcaaaatgggagaaaatattcttaaactatgcatccaataaaggtctaatatccagaatctataaggaacttgaacaaatcaacaagcaaaaaacaagtaaccacattaaaaaatgggtaaaccatatgaacagacacttctcaaaagaagacatatgagcagcctaaaaacatatgaaaaaatgcttattatcactaatcatcagagacatgcaaataaaaccacaatgaaataccatctcamaccagtcagaatggtcattactaaaaagtaaaaaaataacag

SEQ ID NO: 266465 - DNA, 501 bp, Homo sapiens
caaataacatgaatgaaactaatagtaacataattaaaaactaatgaagactagtaattaaatgctctcatcaataatacctttatcagtcaaggcattcatgaatataatgattgctggaaaattgcagcatttcaactatatttatgttgatttttctgcattaatktttgtttttagcatagaattggagacctcaataaattctagtaataaagcagttattagtatcattttttaagtcccaataactcacttaactaatatcatgtataaaaataaaagcatatagaatttcagtaaagactcaaaaaatgatttataattttagattaattcaaaacccagtaagagtaaactctaaggtgtccaacaagctagggaccatatgtgaagtgtcattggcttatctttgtagaactttattgctggtctgtataatcttcctggtctgttttagttagaaattcccttattttatagatcatgaaagtgagacta

SEQ ID NO: 266466 - DNA, 501 bp, Homo sapiens
caaataacatgaatgaaactaatagtaacataattaaaaactaatgaagactagtaattaaatgctctcatcaataatacctttatcagtcaaggcattcatgaatataatgattgctggaaaattgcagcatttcaactatatttatgttgatttttctgcattaatttttgtttttagcatagaattggagacctcaataaattctagtaataaagcagttattagtatcattttttaagtcccaataactcacttaactaatatcatgtrtaaaaataaaagcatatagaatttcagtaaagactcaaaaaatgatttataattttagattaattcaaaacccagtaagagtaaactctaaggtgtccaacaagctagggaccatatgtgaagtgtcattggcttatctttgtagaactttattgctggtctgtataatcttcctggtctgttttagttagaaattcccttattttatagatcatgaaagtgagacta

SEQ ID NO: 266467 - DNA, 534 bp, Homo sapiens
atttcccgagtgtttgcaatgaaacaaacacacaacaataacaacagagaaacaacaataaaaacaattgcttcttgatactaaaagtacaaaaaggggtaccatgatttcaagagacatgcccaggtggctagctcagtaatgtgtcctctgccctaaaaagtctgaacctgttgcttcaagactgaaggagaaagacttcctatcatgcaaatataaaaggatttcatatgaagatgaaactcaacagtcaaaagttggacattctcagatagtctctctaaaaatttttcctttgggaaagtattctttttagaccagtgcaaataactaacatttattggcatcacttatggcagaaaaaacttcctacaccagatgaacatgacccagttgttaaatagaacattttgaaggtgaacacacaccctaacccaggttttttacccactttttaagatggccaattcttctgcccccyacctgaagacatgtgagcaactgctaatgaaaagccgtaaacagccacttggg

SEQ ID NO: 266468 - DNA, 567 bp, Homo sapiens
gagttttaattgccctgctcgctgacttggcatttgaaggagtgctagaaatggcccttaatggaaaattataagaaaacactcagaatttctgagcccatgttcaatctgagtattctgaagggcttcacagtgttagaaataattgccatttacaataatttataggtttactagattttcyaatttgagatttaaagagtcaaaaaaagatggggaaagtgacatgcaaaacaagctgtctgccatcaaggctgaatagacctatgttgatgaaaatagttataaataatataattcctatcattacatgaaacaattgtgactagtcacttttaaaggctatgctttatttttattactaaaaacgttgtattgatttctctttatttacctacaactgggatccgtgttgtcaagtgctcaagcagaacataagcagcagcaaatattgcagctgccagttgcccttgccaggcttccatagattcagtcagtgaggagacaacacacccgaatgatgtagctgtttattactcacagcacagcagacagcatgagcttcaa

SEQ ID NO: 266469 - DNA, 567 bp, Homo sapiens
gagttttaattgccctgctcgctgacttggcatttgaaggagtgctagaaatggcccttaatggaaaattataagaaaacactcagaatttctgagcccatgttcaatctgagtattctgaagggcttcacagtgttagaaataattgccatttacaataatttataggtttactagattttccaatttgagatttaaagagtcaaaaaaagatggggaaagtgacatgcaaaacaagctgtctgccatcaaggctgaatagacctatgttgrtgaaaatagttataaataatataattcctatcattacatgaaacaattgtgactagtcacttttaaaggctatgctttatttttattactaaaaacgttgtattgatttctctttatttacctacaactgggatccgtgttgtcaagtgctcaagcagaacataagcagcagcaaatattgcagctgccagttgcccttgccaggcttccatagattcagtcagtgaggagacaacacacccgaatgatgtagctgtttattactcacagcacagcagacagcatgagcttcaa

SEQ ID NO: 266470 - DNA, 567 bp, Homo sapiens
gagttttaattgccctgctcgctgacttggcatttgaaggagtgctagaaatggcccttaatggaaaattataagaaaacactcagaatttctgagcccatgttcaatctgagtattctgaagggcttcacagtgttagaaataattgccatttacaataatttataggtttactagattttccaatttgagatttaaagagtcaaaaaaagatggggaaagtgacatgcaaaacaagctgtctgccatcaaggctgaatagacctatgttgatgaaaatagttataaataatataattcctatcattacatgaaacaattgtgactagtcacttttaaaggctatgctttatttttattactaaaaacgttgtattgatttctctttatttacctacaactgggatccgtgttgtcaagtgctcaagcagaacataagcagcagcaaatattgcagctgccagttgyccttgccaggcttccatagattcagtcagtgaggagacaacacacccgaatgatgtagctgtttattactcacagcacagcagacagcatgagcttcaa

SEQ ID NO: 266471 - DNA, 463 bp, Homo sapiens
tcttgaacatagttaatataacttattatgccttagtgtgtgctaaaaattagacatacatagtgtacaaatataatgcgcttgtgtgtgtatacatatatatgattgtgtgtgtcttgtgtatatgatacaaaaagatacacaagaccatgaaagccttaaaaagaaaatttttacctaatttgggagctaacattgaagggagagtgggagttaattagtsaaaggaggccaatgtatttaggcagaggacgtgttcacacaaatgttttgtggagggagaaggttggtgggtatgaggagctaaagaaggcttaggtggctaaagtgggagaggcaatggggaccccacactgtgggagcttgcaagacctactaagattttgttttcatcctatgagcagtgggactccagtaaaataggattttaaataaggaaatgagatgatgagaattttacttt

SEQ ID NO: 266472 - DNA, 503 bp, Homo sapiens
aaacagtaccatcagtactcagtgatttaatctaggaacttgagctccttagatctgatggaaagtacagacccaattataattgtttctctgttacatcattaattaaaattgttaagggaggtaaggaaacctcacatacattatatccatcttgcactctttcctgcaaccagcctgacttttccatattcctgcagagagcccagatctttactggacacataattttgctcctgcactttctccttgtgtttatgtatccctcagtcaggcctctgtttaagagtcacctctgtccagaggcttttctgtctactctggmtgtatcaaggttgagcaggtggatagttaggcatctccaaactaaagttacttggtacaaagactttacccctttcctaacaagacagtacacagtagttgacaccactaggtccaaagttacaaacaagatgatgtaacttgattatattgaagttatttgaatttagatatatgta

SEQ ID NO: 266473 - DNA, 557 bp, Homo sapiens
atatttcagtgacattctgtctaggacggattgtcaaattgttgtacctcaggttcatgatggtggaattactgtctctctcagaccaaagcagatgcagtgcttcttgtgatctgacacatgcagaagtacacttttagccacattctttctctgtctctgtctttctttgtctctctgtgtgtgtgtgtgtgtgtgtgtgtstctctttcatacacacactgagattgagagagagagagatgagagagagaaatctgcatgcatgtttgcatggcattttacctgaaattatgaaaggtgtaaccctttgttttccctgggtttgggaccatccatttttcttcttaagtatgtcacttactgctatcaatattaaagtttgcttttgtttaactcatatccagtaagtctgcattctccattaaaaaacctaccttgttagaggaaaaagaacttgtccttagttttatcttaaaagcagaaaaaaaaaaatctatattgagtctctgaaagagtagatgacattgacttcattccacaataatctcctttgt

SEQ ID NO: 266474 - DNA, 592 bp, Homo sapiens
gaaaatttaattagttggaacccaggggcaaacaaagaaataattaagtttagttaatttttctattaataaagcaaagtcatttcttggattagattaattactgatgaagaaaaatatttaaagtttcattatcctgagcctcatgatagaacacagagctcatactctgtgtttttaccaatttgaaaaataaaggagttatctatggcctacagctgtctcattccttgagaaaaccatgtgagagcagggctctactggagtctttgttactgcagggaaaattcctgactttacaaacataataacatttccatcgttctctgttgtctgcaaaggtcaatatgtactataacccaagaatactttaactattaaattttaaatacatctgattacaatgaccaaatttactgatgtaaataatccgggaaagtaggatatttttaccttaaccaatagcatgaaaacaaatatarctggagtacaaatgtagaattagaactattaggaaaaaaaatttaaaaacctatagagcaatcacctttcactcttatttactagagatgataatttgtcaatgtttcag

SEQ ID NO: 266475 - DNA, 559 bp, Homo sapiens
gtcctgcagttgcaatatgaataagaatgataaaatccttgcccttatgaaatgtttatgttctaatggaaatgggggacgatagaaaataaacaaataaacatgtacctacatatatacatacataaaggattgtgatttcaggtggtgatacttggtgtaagtgaaatcaaaccatgggaaccagagtgatgtagaggagattactttagctaagatggtatcataattatyctgaatttttaaaatatatattgtatttcatcatttcttactttctgctgtcccatatttccagataattagaaatgaggactaagctccgattttttatcttacccaaattcctacctaaggggtctagggagtcatgctctataaaccaggaattctcatcagatgggttttatttgatcctatatattgtgacatacttttcaatctgactctggcataacattatgaaacaaggaaaaaaatatttaaccccaaaatacatttccttgacataccttgaaattgccctgcaaagtctcttgggggaaaagtccatattcta

SEQ ID NO: 266476 - DNA, 633 bp, Homo sapiens
taatttaataatttaataaagaaagtccacccacatgggaaaagcaattyggccaactttgattaaaaatggattaactttttacaaattagcatttatgaataaatgacacttttatgcaaaagcattctccatacacaaaatactgctgattttatacatcatacaaacaaccaaaactaaaaattgaaaagaaaaattcatcacagattaaaaagctatctcttcttgtgcatttaaaatataatttgattttttaaatctaaatttatgcttttaaaacaaatatgctattaacaaaagtcataaaaaacaacatgtatgatatatacatatataacaatgtatacaaagtatgatacactaaaatattaatgacttttctttgaagtcttaagtttactgttaatgacagattcagaaatagctttctaaactataaacagccagagaagtgtcattgctctattaacctgttctatattgtcttttctgccactcaagagctagcctaaatgtaaactgggtacattgcacatattttgggttatatatgtgaaatatttttaaacaaatattctttcaaaagacaataaaattgtttacatgtacttctgtgtgttttatgaagta

SEQ ID NO: 266477 - DNA, 633 bp, Homo sapiens
taatttaataatttaataaagaaagtccacccacatgggaaaagcaatttggccaactttgattaaaaatggattaactttttacaaattagcatttatgaataaatgacacttttatgcaaaagcattctccatacacaaaatactgctgattttatacatcatacaaacaaccaaaactaaaaattraaaagaaaaattcatcacagattaaaaagctatctcttcttgtgcatttaaaatataatttgattttttaaatctaaatttatgcttttaaaacaaatatgctattaacaaaagtcataaaaaacaacatgtatgatatatacatatataacaatgtatacaaagtatgatacactaaaatattaatgacttttctttgaagtcttaagtttactgttaatgacagattcagaaatagctttctaaactataaacagccagagaagtgtcattgctctattaacctgttctatattgtcttttctgccactcaagagctagcctaaatgtaaactgggtacattgcacatattttgggttatatatgtgaaatatttttaaacaaatattctttcaaaagacaataaaattgtttacatgtacttctgtgtgttttatgaagta

SEQ ID NO: 266478 - DNA, 633 bp, Homo sapiens
taatttaataatttaataaagaaagtccacccacatgggaaaagcaatttggccaactttgattaaaaatggattaactttttacaaattagcatttatgaataaatgacacttttatgcaaaagcattctccatacacaaaatactgctgattttatacatcatacaaacaaccaaaactaaaaattgaaaagaaaaattcatcacagattaaaaagctatctcttcttgtgcatttaaaatataatttgattttttaaatctaaatttatgcttttaaaacaaatatgctattaacaaaagtcakaaaaaacaacatgtatgatatatacatatataacaatgtatacaaagtatgatacactaaaatattaatgacttttctttgaagtcttaagtttactgttaatgacagattcagaaatagctttctaaactataaacagccagagaagtgtcattgctctattaacctgttctatattgtcttttctgccactcaagagctagcctaaatgtaaactgggtacattgcacatattttgggttatatatgtgaaatatttttaaacaaatattctttcaaaagacaataaaattgtttacatgtacttctgtgtgttttatgaagta

SEQ ID NO: 266479 - DNA, 584 bp, Homo sapiens
aagattttgatgcagcaaaatatatgttctctagtcttggttctctacacacttaacagttcttgttagggctatggatttaggaatttctattaaaagatttttttcaaagcaagtcgaataccacatgttctcacttacaagtgggagctaaataatgtatacattgacatagaggatggaataatagatgtggagacttggtggggggaagggatgagaaattacttaatgggtataatacccaytaataatacactattcaggtggtggttacagacttcaccactatacaatgtattcatgtaacaaaactgaacttgtaccccttaaattgatgcaataaatttttaaagagatttttgtgtaaagcaaatcttagtatccacaagatactaagagctcccctctgtttctcctcatcttactttctccctcaaaatgattttcatctttcagttgtgatacaaagtagcatatattagtggtaataaatcataattttcgggggaagtatctacttctgtaatgaaaaactatcaaaagacttaatggactgtttcaatcagctttaggtcattaaa

SEQ ID NO: 266480 - DNA, 542 bp, Homo sapiens
tgaaaataatgcatattgctctgtgttcaaaaactgttccttacatcttgtttattactttgcatattgtattagtttcctagggctacaataacaaaacaccacaaactgagtagattagaacaacagaaacatgctgttttgcagttctggaagcttgaaatcaagatgtcagcagggccacgctcgctctgaaacctgtaggggagtcctactttgtctctgtctagcatctgggtaattcttgacttggatctgtgyaagtccagtctctgccttcatcccggtgtggtgctctccttgtgtgtgtttgtgtgttcccatgatcatcttctcaaaaagacaccagtatactggattaggagcccactctattccactatgacctcatcttaactaattacaaagttccaaatagggacacattctgaggtacttggagttatgattacaacatatatttttcttttgtgagggagggattacaagtcaacccaaaatacacatgaaaaaacaactgcaacaacagcaactccaatggc

SEQ ID NO: 266481 - DNA, 445 bp, Homo sapiens
tctattgctgctactacaaattattgcatacattgtcttaaaacaattcacatttattttcttagagttctggascccaaagtggatctccttgggctcaaatcaaatgtcagcatcatgttctttctggaggctctaggaagaatctatctcctttccttttccagttttgaaaggtccttgactgtgattttctttcatcttccaagccagcaatggccagtcgagactttctcacatcacagcactccaccactgacacttttgccctcctattcccattcaaggacacttgtgattactttgggcccactcagatggtccaggataccagctgattaacaaccataattctatttgctaccctaattctcctttgctatgtaacatatttctagattctggacattagtacgtgaacatctttcggagacaattatttgtc

SEQ ID NO: 266482 - DNA, 445 bp, Homo sapiens
tctattgctgctactacaaattattgcatacattgtcttaaaacaattcacatttattttcttagagttctggagcccaaagtggatctccttgggctcaaatcaaatgtcagcatcatgttctttctggaggctctaggaagaatctatctcctttccttttccagttttgaaaggtccttgactgtgattttctttcatyttccaagccagcaatggccagtcgagactttctcacatcacagcactccaccactgacacttttgccctcctattcccattcaaggacacttgtgattactttgggcccactcagatggtccaggataccagctgattaacaaccataattctatttgctaccctaattctcctttgctatgtaacatatttctagattctggacattagtacgtgaacatctttcggagacaattatttgtc

SEQ ID NO: 266483 - DNA, 598 bp, Homo sapiens
catctaagctgggatacttttcagagggaaaggagaaaccagatgtgatggtgggacagctggtgtgaatgtagaccatcccaggcaaatcagaatatgtagtcactctacaaaaaatgcacattgaatcttttcccacatccccaagtagccagtttttaaaatgatcccagtctttgttgtatatacgttcyggtaaaattctaggtaaggatccttttaaattcctgaatatctcaaatctcttggggtgggggtgttgctctgcacaacttttgcagggtactttaatagtgattttatttaaggcctgtatgtatcacttatttgtcacatttaacattgtgtcatgacagaaaactcttttcttaatttaaacttttattttagatatagggggtatatgtttaggttcactgcatgggtatattgcacccagatagggagtatagtacctgaaaaatagtttttcaatcaacacccttctccctttctccccactttagtagtccacagtgtctgttgttcccatgttaatgtcaatgtatgctccatgtttagctcccatttaaaaattagaacatgcagtatttggttt

SEQ ID NO: 266484 - DNA, 598 bp, Homo sapiens
catctaagctgggatacttttcagagggaaaggagaaaccagatgtgatggtgggacagctggtgtgaatgtagaccatcccaggcaaatcagaatatgtagtcactctacaaaaaatgcacattgaatcttttcccacatccccaagtagccagtttttaaaatgatcccagtctttgttgtatatacgttctggtaaaattctaggtaaggatccttttaaattcctgaatatctcaaatctcttggggtgggggtgttgctctgcacaacttttgcagggtactttaatagtgattttatttaaggcctgtatgtatcacttatttgtcacatttaacattgtgtcatgacagaaaactcttttcttaatttaaacttttattttagatatagggggtatatgtttaggttcactgcatgggtatattgcacccagatagggagtatagtacctgaaaratagtttttcaatcaacacccttctccctttctccccactttagtagtccacagtgtctgttgttcccatgttaatgtcaatgtatgctccatgtttagctcccatttaaaaattagaacatgcagtatttggttt

SEQ ID NO: 266485 - DNA, 552 bp, Homo sapiens
taaaccaaaaatattagttttatgaggctttgcaagcaaaatgaattgcaaagatttagcccaacttaaatttgcttttacctaaaatgagattttcagcactttaaaaaacatgcacttaagggaaatgttttattttcttcactatataaagtgccataatgaaactaaagataaaaattaaggttctgaatactcagatagaagaaaattattttctccaacacaataacacaaagtagtaataataccaagtcatattatgttctcaacaatagcacattcccttattggcatttcatttgccaaatactcactgacattaaggmacagactggagaaataatatgtaatttaagagtttttgtgcattataaataaagcatggttatcgcaaataaaacccttaagtacttaaagagaagtctcaagggcaaatattgataatcattgtaatggtttttcacaatatgtgtgcaacaattgtgtagcggaattttactatcttggtgcataaaaataatttatattatgactatgtattctgtacta

SEQ ID NO: 266486 - DNA, 590 bp, Homo sapiens
atttgaacaccaggaataaaacaccagaactaarggcagagagagatcctgaagaaaaggtgaaggctgttgtctccaggaaacacatttgattgaagtgagttaaagaaatcaccccatttcaaacagggcaaccttgagaattactgttgaacgagaagctaggagaatctctggcctcaatctgcacttgttctgaaattttagaaggtaatttaactggtacccaaatggactgtgaaagaaataaggtcacaccaaatgtcaatctggtggcaaatatcagctcttaataaaatgggaaattttaacacctctctctctgtcattgacagatcctgtggattaaaaattaaaaaataaaatacagaaagtgttgaatgatatcttcttgatttaataattatgcatcagcttatgtattccataacacatgcacatcatttttaatattgttaaatattcgaaacatagttaaggtcatttaaaaacctttttatagtgaaaaattacaaacatatgtaaaaatagggacaacaggggataattttcaccaagttttatatatatatatatatatatataaaatg

SEQ ID NO: 266487 - DNA, 558 bp, Homo sapiens
aagtgcatttacaagtatctccaaagactgagagttatctaatatgattgtaatataaaaacctgacaaatattacacaaatataaagatagtttaagaatatgaaaccaaatattcaaagcaaacttcaggaaaattgaattcagaaacatgactaggtgttgtttgccactggattgcaaatttaaaaaacacaatgattaatctattggatgcttatcaaaaaatatacyttcagttcaaagaaaagaacaactgtgatcatctgactgctaaaagtaatttaatagtatttaaatatttctgagaaacactctaatttaaatagaaatataagaacacatctttacattacaaaagataactgtatcataacaataaaaataccatccaaaaacccattaacagtaaacaaaccaaaagcaatcccattaaagtctcaagttgcccattatcatcactaattgttaacaatgcttaacaatggcctaagcattttagttgatacaacaaaatgctaaccacaaataatacctacagttgttagacgggagaaaa

SEQ ID NO: 266488 - DNA, 558 bp, Homo sapiens
aagtgcatttacaagtatctccaaagactgagagttatctaatatgattgtaatataaaaacctgacaaatattacacaaatataaagatagtttaagaatatgaaaccaaatattcaaagcaaacttcaggaaaattgaattcagaaacatgactaggtgttgtttgccactggattgcaaatttaaaaaacacaatgattaatctattggatgcttatcaaaaaatataccttcagttcaaagaaaagaacaactgtgatcatctgactgctaaaagtaatttaatagtatttaaatatttctgagaaacactctaatttaaatagaaatataagaacacatctttacattacaaaagataactgtatcataacaataaaaataccatccaaaaacccattaacagtaaacaaaccaaaagcaatcccattaaagtctcaagttgcccattatcatcactaattgttaacaatgcttaacaatggcytaagcattttagttgatacaacaaaatgctaaccacaaataatacctacagttgttagacgggagaaaa

SEQ ID NO: 266489 - DNA, 605 bp, Homo sapiens
ccttttgttttttaacctccctggctatwctttctaacaatagaatggcacttataaaattgggaaacatgttttaagaatcggaaaggaaaggaattgtgtgttagtctgctcttgccatgctctaaagaaatacctgaggctgagtaatctataaagcaaagaggtttattttggctcacgattctgcaggctgtacagaaagtgtggctctggcatcttctagtgaggacctcaggaagcttccactcaggtcagaaggcaaagtgggagcagacatgtcacatggcaagagagggagcaagagaaaggggaggacatgcaaggttcatttaaacaaccggctctcacatgatcttataaatcaagaactcatacattactgtgaggatggtgccaagccatttatgagtcatttacccccatgacccaaacacctcccaccaggccccacctctaacactgaagattacatttcaacatgggatttggaggggaaacacatccaaacaatattgaattgcgtctgccattattattttaatctaacaatttgtctgatttgctattgtaaaagtaatctgtacttatgacattcagtacaa

SEQ ID NO: 266490 - DNA, 605 bp, Homo sapiens
ccttttgttttttaacctccctggctattctttctaacaatagaatggcacttataaaattgggaaacatgttttaagaatcggaaaggaaaggaattgtgtgttagtctgctcttkccatgctctaaagaaatacctgaggctgagtaatctataaagcaaagaggtttattttggctcacgattctgcaggctgtacagaaagtgtggctctggcatcttctagtgaggacctcaggaagcttccactcaggtcagaaggcaaagtgggagcagacatgtcacatggcaagagagggagcaagagaaaggggaggacatgcaaggttcatttaaacaaccggctctcacatgatcttataaatcaagaactcatacattactgtgaggatggtgccaagccatttatgagtcatttacccccatgacccaaacacctcccaccaggccccacctctaacactgaagattacatttcaacatgggatttggaggggaaacacatccaaacaatattgaattgcgtctgccattattattttaatctaacaatttgtctgatttgctattgtaaaagtaatctgtacttatgacattcagtacaa

SEQ ID NO: 266491 - DNA, 576 bp, Homo sapiens
tggtgagccatgaagaatacccttattatctttgaaatttcttattttaattcagaaggaagtattgactagtgttttctaatggacacgttttagaaagtttgttgaccttatagtgtgagacgatttctacagagtaattaccttttgttttttaacctccctggctattctttctaacaatagaatggcacttataaaattgggaaacatgttttaagaatcggaaaggaaaggaattgtgtgttagtctgctcttgccatgctctaaagaaatacctgaggctgagtaatctataaagcaaagaggtttattttggctcacgattctgcaggctgtacagaaagtgtggctctggcatcttctagtgaggacctcaggaagcttccactcaggtcagaaggcaaagtgggagcagacatgtcacatggcaagagagggagcaagagaaaggggaggacrtgcaaggttcatttaaacaaccggctctcacatgatcttataaatcaagaactcatacattactgtgaggatggtgccaagccatttatgagtcatttacccccatgacccaa

SEQ ID NO: 266492 - DNA, 478 bp, Homo sapiens
gaaaaaataatgtattcctacttttttcttttaatggtgcaataactttgattttaaaarttttaactattatttgagaatcattactataatcttctaatcacttatttcacttaatattacgtagtatgataaacatttgataattcaatggcaccaagccatacactttcaaatcaagtgggtagacataaacaaatatgtattatattactactctatattattcttgttaatgttgcttaattatatagtcatttttccaagttaacagtaacttatagtaatggaaacactcaagctcatgaataatcacatgctctttgtatcacttatgatgatggaatttacaagtttttcagtattcacactgaaaaggaattattggaataaataataaaataaagatgttcataaaaggacaaaagtactattaagtgcaaatacatgcataagacatttttctggtagtctatac

SEQ ID NO: 266493 - DNA, 626 bp, Homo sapiens
cagtatactgaggaccttgatgataagttttattttttagtttattattccttaaaagtgtacttaaattcatttaaggcttggtactctagtaatttgtgtgccttccttaataacctttggaaaaaataatgtattcctacttttttcttttaatggtgcaataactttgattttaaaagttttaactattatttgagaatcattactataatcttctaatcacttatttcacttaatattacrtagtatgataaacatttgataattcaatggcaccaagccatacactttcaaatcaagtgggtagacataaacaaatatgtattatattactactctatattattcttgttaatgttgcttaattatatagtcatttttccaagttaacagtaacttatagtaatggaaacactcaagctcatgaataatcacatgctctttgtatcacttatgatgatggaatttacaagtttttcagtattcacactgaaaaggaattattggaataaataataaaataaagatgttcataaaaggacaaaagtactattaagtgcaaatacatgcataagacatttttctggtagtctatacttagcattcaattaattgcaatattt

SEQ ID NO: 266494 - DNA, 508 bp, Homo sapiens
gggtcttcttccaatagaaagctgttccatgtacattaaatatctgttgtttagtgtagccactttcatcaattatcttagctacatctgaatagcttgctgcagcttctccatcaacacttgaagctycaccttgtacttttatgttatgaagatggtgtcttttcttaaataccatggctcaacctctgcaagcatcaaactgcttaaattcatatggaaatatttaaattgaggtatcctaaatgggaaaatttgtaagtaaatttagtctcaagtagctctatttgtcatctgcaaacattatatcatctacccctatgaagtgggcctagcccctatttctctcaacttcaacaaaagtaaaagagacattttcattgtgcttgaattttttagcatttttatattccaaatattattcttgaagtttcaaatagcacttgtgcattctatatacgagtatagtcagataaactgtgttatagcaaatattttttcaaaacat

SEQ ID NO: 266495 - DNA, 556 bp, Homo sapiens
gtctatgtgtttgtgtgtgtgtgtgtgtgtgtgtgtgtattccacataaaagtgagatcatgcaagatttctatttctgtgtctggcttgcttcacttagygtaatgttctgcaggtccatcattgatgtggcaaatagcataacattttattgtgtgtgtgtatacacagactgtatatatatgtacacacacagatatatgacattaaaattttttccagatcttggctattgtgaatatgctttaatgaatatgagagtgcagatatatttacaaggtggtgattgcatctcctttggacatatacacagaaaaattattactgggttgtatggtagctctgtttttaattaatggctgtaccaatcttacattcctaccaacaatacactaaggttctgttttctccacacccacaccaacatttgctatctcttatcttttttataacagctgttcttacaggtgtgaggtgatatctcatagtggttttaacttgtatttccttggttattagtcacgttcagtacattttcattttcatatacacgttg

SEQ ID NO: 266496 - DNA, 556 bp, Homo sapiens
gtctatgtgtttgtgtgtgtgtgtgtgtgtgtgtgtgtattccacataaaagtgagatcatgcaagatttctatttctgtgtctggcttgcttcacttagcgtaatgttctgcaggtccatcattgatgtggcaaatagcataacattttattgtgtgtgtgtatacacagactgtatatatatgtacacacacagatatatgacattaaaattttttccagatcttggctattgtgaatatgctttaatgaatatgagagtgcagatatatttacaaggtggtgattgcatctcctttggacatatacacagaaaaattattactgggttgtatggtagctctgtttttaattaatggctgtaccaatcttacattcctaccaacaatacactaaggttctgttttctccacacccacaccaacatttgctatctcttatcttttttataacagctgtycttacaggtgtgaggtgatatctcatagtggttttaacttgtatttccttggttattagtcacgttcagtacattttcattttcatatacacgttg

SEQ ID NO: 266497 - DNA, 508 bp, Homo sapiens
gggtcttcttccaatagaaagctgttccatgtacattaaatatctgttgtttagtgtagccactttcatcaattatcttagctacatctgaatagcttgctgcagcttctccatcaacacttgaagctccaccttgtacttttatgttatgaagatggtgtcttttcttaaataccatggctcaacctctgcaagcatcaaactgcttaaattcatatggaaatatttaaattgaggtatcctaaatgggaaaatttgtaagtaaatttagtctcaagtagctctatttgtcatctgcaaacattatatcatctacccctatgaagtgggcctagcccctatttctctcaacttcaacaaaagtaaaagagacattttcattgtgcttgaattttttagcrtttttatattccaaatattattcttgaagtttcaaatagcacttgtgcattctatatacgagtatagtcagataaactgtgttatagcaaatattttttcaaaacat

SEQ ID NO: 266498 - DNA, 573 bp, Homo sapiens
ggctatgtttatgtcttctttggagaaatggctgttcagatcctttgcccatttttcaatcagtttggttttttgctatcgagttgtaaaagtactttataaattttaaatattaaccccttaccagatgtttgttttacaaatatgttttccgagtacctagattggcttttcattttttgagtatttcctttgctgtacaaaagctttttagtttgacgtagttccatttatttatttttgcttttgtagcctgagcttttaatgtgacatccagaaaatcattgtcaaggccaatgtcaagaagcwcttctatgttctcttctaggagtttaataatttcagtcttatatttatgtcttttatcaattttgcattgatttttgtgtggtataagctaagggttctattttattcttttgcaggtggaaattcagttttctaagaccctttattgaagagattattggtccccactatgtcctcctggtgacattattgaaaattaattgcccttatatgtttgaatctatttctagactttttattctgttctattggccttggggtctt

SEQ ID NO: 266499 - DNA, 624 bp, Homo sapiens
taactagcttcacacttcatttggactttgatggaattttattagactgaacaaggtcactgaacatgcctatatatttatcatctcatgcatgaaatagggatgccagtggaaaagrcatgaagaaacaaaaggagcacttcaaaggcaagaatcctgattaggctgatggaattctatccccaggttgatttttgataggcataaagttatttgaatttcttatcccaaattccagtgggagtgtgtcttgttaaaagctgagtctatcagtctcttcctggcataaattaatttttaaaagttttctgaaaatgagttgctacatcatttgctgagcatattcagcctctatacttttatatgagattaaagcaaacatgaaatgaaaaaaagcaactgaaatggcatttcactcctctttcattttgctctccactgtccacaattacttttggtgacccactgactacttgttgtatcggagtaggaaaggcaagagaaagaagataattaacagggagaaacacagcagcttaaattataatcttaaaaaatgatggaagcagaatttaaggtcatcagcaagttcaatgcacatcctctcaatgcccaccccagtat

SEQ ID NO: 266500 - DNA, 633 bp, Homo sapiens
agatataatattgtctctgggtcagagcttttactagaaaaatgggcagaaccacagctcaaagattctatctctcttattcacagaaccattgggctatctgacatgcgctctttaaacttatgggtatctgatccccttctgtaggtaattttctgccttctccacattgcactgacataggtgaatccaattcttgctgaagttgagcttcttttycttatgctgattattttatgattctagatgctttcctctagtggttgaatgggtcagggagagaaggaattgaggagggtcttacttggcccattgttgttttcttatttcattttattttataaaaccaccatgatagatttacctatacatgaggctaataacttccggatatgtatgtatgtggagttgttattcaaactcatgttcatatgcgttcaaagccttgattgttgtcacaatccatgaaggttctctaccaccaaattaaagagtcattgaaacactattttcttccaccaccataatggcacatactcaaaacaaattatttgcatagacattgtaacatgtacaactcaccaattacagtcacctaattgtgaacattcagcatttctttgttatgtagct

SEQ ID NO: 266501 - DNA, 633 bp, Homo sapiens
agatataatattgtctctgggtcagagcttttactagaaaaatgggcagaaccacagctcaaagattctatctctcttattcacagaaccattgggctatctgacatgcgctctttaaacttatgggtatctgatccccttctgtaggtaattttctgccttctccacattgcactgacataggtgaatccaattcttgctgaagttgagcttctttttcttatgctgattattttatgattctagatgctttcctctagtggttgaatgggtcagggagagaaggaattgaggagggtcttacttggcccattgttgttttcttatttcattttattttataaaaccaccatgatagatttacctatacatgaggctaataacttccggatatgtatgtatgtggagttgttattcaaactcatgttcatatgygttcaaagccttgattgttgtcacaatccatgaaggttctctaccaccaaattaaagagtcattgaaacactattttcttccaccaccataatggcacatactcaaaacaaattatttgcatagacattgtaacatgtacaactcaccaattacagtcacctaattgtgaacattcagcatttctttgttatgtagct

SEQ ID NO: 266502 - DNA, 633 bp, Homo sapiens
agatataatattgtctctgggtcagagcttttactagaaaaatgggcagaaccacagctcaaagattctatctctcttattcacagaaccattgggctatctgacatgcgctctttaaacttatgggtatctgatccccttctgtaggtaattttctgccttctccacattgcactgacataggtgaatccaattcttgctgaagttgagcttctttttcttatgctgattattttatgattctagatgctttcctctagtggttgaatgggtcagggagagaaggaattgaggagggtcttacttggcccattgttgttttcttatttcattttattttataaaaccaccatgatagatttacctatacatgaggctaataacttccggatatgtatgtatgtggagttgttattcaaactcatgttcatatgcgttcaaagccttgattgttgtcacaatccatgaaggttctctaccaccaaattaaagagtcattgaaacactattttcttmcaccaccataatggcacatactcaaaacaaattatttgcatagacattgtaacatgtacaactcaccaattacagtcacctaattgtgaacattcagcatttctttgttatgtagct

SEQ ID NO: 266503 - DNA, 633 bp, Homo sapiens
agatataatattgtctctgggtcagagcttttactagaaaaatgggcagaaccacagctcaaagattctatctctcttattcacagaaccattgggctatctgacatgcgctctttaaacttatgggtatctgatccccttctgtaggtaattttctgccttctccacattgcactgacataggtgaatccaattcttgctgaagttgagcttctttttcttatgctgattattttatgattctagatgctttcctctagtggttgaatgggtcagggagagaaggaattgaggagggtcttacttggcccattgttgttttcttatttcattttattttataaaaccaccatgatagatttacctatacatgaggctaataacttccggatatgtatgtatgtggagttgttattcaaactcatgttcatatgcgttcaaagccttgattgttgtcacaatccatgaaggttctctaccaccaaattaaagagtcattgaaacactattttcttccaccaccataatggcacatactcaaaacaaawtatttgcatagacattgtaacatgtacaactcaccaattacagtcacctaattgtgaacattcagcatttctttgttatgtagct

SEQ ID NO: 266504 - DNA, 565 bp, Homo sapiens
gtaggtttcaagttattttttggactactttatcagtattctctagaagaagaaaaaaggaagaacaaaactcaaagagaattaaaaaaagaaaggataaataataccaaagtcagtgtatatttgatttctaaccttattgtatttatatttcaatgaattctaaaatgcttctcacatatttctctttcaatgctgttttttcttcttttactgccatgagtaccttgattcttcaaatgactttataaaaatggctatattaattaagaatatgcataaagatgtcttagayatatccctccattctggaatttacagttgtttggaagaaatgttggctacaactaatcatacagaaaaattttacttcattatataagcaaagacaacgtggtttgttattagttttaaggatcttaaatcagtattactccaaatcttgtccatcttgagctaccttgctcatctgcatttgctttgggatgctttaaaaccagcatgtccaggtaacctgacttatcatccagaatgcagaggcaataggaaagagaacacattggct

SEQ ID NO: 266505 - DNA, 581 bp, Homo sapiens
gggattttggtttttttttgtttttttgaaacagggtcttgctctgtcgtccagaccgagtgcagtggcacaataatggctcactgcagtctcgaccttcgggctcaagcggtccatcctcccacctcacttcctgagtcgctacgattaaaagtgcatgccaccacacccagctaagttttgtattttttcgtagtgatgggggtctcactaagttgcccagactgatctcaaatgcctgggctcaagcagtcctctctcagtgcagcctctgaaagtrcggggattacagatgtgagccaacacgatcccccaggatttttttttaacaatttttttcaaattagcctagaaatattggaaactaatataatgaatccacaagatacatttatttatttatttaatttatttcgtggttcagccatcctatcaattaagggaaatattgatagggtggctaaaccatgaaataaataaatgtattgtgtggattcattatatacttgccaaaatttttcggtgtaattaattatgcaaatattttgtctagtcttaacaaacattaaaacttgctcacc

SEQ ID NO: 266506 - DNA, 581 bp, Homo sapiens
gggattttggtttttttttgtttttttgaaacagggtcttgctctgtcgtccagaccgagtgcagtggcacaataatggctcactgcagtctcgaccttcgggctcaagcggtccatcctcccacctcacttcctgagtcgctacgattaaaagtgcatgccaccacacccagctaagttttgtattttttcgtagtgatgggggtctcactaagttgcccagactgatctcaaatgcctgggctcaagcagtcctctctcagtgcagcctctgaaagtgcggggattacagatgtgagccaacacgatcccccaggatttttttttaacaatttttttcaaattagcctagaaatattggaaactaatataatgaatccacaagatacatttatttatttatttaatttatttcgtggttcagccatcctatcaattaagggaaatattgatagggtggctaaaccatgaaataaataaatgtattgtgtggattcattatatayttgccaaaatttttcggtgtaattaattatgcaaatattttgtctagtcttaacaaacattaaaacttgctcacc

SEQ ID NO: 266507 - DNA, 593 bp, Homo sapiens
tcctgtggtctgtggctgtgagcctttttttcagattgaggcagcatagcaagcagttttgaagggggactccagtgcagactgcatgcatctgatgtgtggtggcgccatgtaggagctcagcagccttggcaagttagttaatccactgtgcstcacttccccattttaaaattgagataaaaatagtatgtacttcataggactattgagaagagtattaacttgaagcatatgcaattataattttcatagtccaaaaatggtcacatattagcatttttatatggtgaaacctaataaatgagataattgatatagcatatttagaatggaggtatacagtcagtacttagtattagctgtaatgatagcagtggtgatgacaatgatggtgtctctttgtatatgttaagtctcaggctttctctggcctaaacagccaggaatagaattgctgggtcacaggatctatccaaattcaacctttacctccagaatgttctccagagttttctatccaagatatgttttatttttctacatatttgtgtcttaatatttttcaataacgttttataatattgttcata

SEQ ID NO: 266508 - DNA, 610 bp, Homo sapiens
agtatttttacatacaaatattgtatttctgcatacataagtttaaatcaaggaaagaaactttgttctctcatgtggaaatttacgtttagaatcacagagtactagatgtgcaattactgtagagatcatccagttcaatggcctcattgcaatgatgaataaatggaatcattttacagcctcccattaacatataacacaatgtacacagtaaacatgcaacaagcacttctgaataaatggagttcagctgctcatttaactgctctcattaccttgacatggttggcagcatttattaagtgcccacctctatgcgcgacagtgctagaagctaagcaaatggaatggaagtgaggccatcacagtgtgaggcagataacccagaagcagacaactctattaaagtcataagcctagtggggcggtgggaagggatcgggggcggctgcggcatgcctgcaatgaagtggttcctgaagacgaaatttctagtgggatggggygcaagtttcaaggaatctgccagtcctctgcaaactagtaaaataccaatttaattcaaagggtaagagtttggaagttgaataatagtcctgaagcagcc

SEQ ID NO: 266509 - DNA, 577 bp, Homo sapiens
acttatgagggtaaaattgcacagtggcatggagtagagttgaccagctacagggtctcagcatgacagsgcagtcctgttgaacagaggaagtggagattatcagataattgttgggtcaattaactagaggttgattaagtaagcttattctttgcaattttgtcagcagtgtgttcttagtgaacctctaagacagtaactaatttcaagttcatgtaatatatatgaggtattttgatcctgtgcagtttccaaaaataaagtttcttttgcctttaaataattgagacatttcaattattgtagctgagaactaataattatcattattgggcactcacaacagatactgtgttaagtgtttttaataattgttgtatttcatccttttaataacactttgagtttggtgctgttactatcagcatgagcaggtgtggaagctgagcctcagagctgtaaggtaacttatcacggggtctcacaggtaacaggcaagtatcatgaatcaaaatttaggtctctctcactctaaagtcttagctgttcatcagtatgctatttctcactattg

SEQ ID NO: 266510 - DNA, 618 bp, Homo sapiens
aggaatgttacgcccaccgattcaataaacctcaaaatatactgtgcagaatgttgtcagtacaagtgccctggaatgtgatatcccgaaggtcagggcagcattttcttcgtaagtgtatcctagccgctagccatattggctatttaaatttagattaattaaaattaagtagttaaaattcattttctcagttgcactagccgcatttaaagtgacaaacagcttcaaatgtctcaatagctcaagtgtggctactgccaactgtagggatastgcaggtatgaaatgccactgacctcatagaaagttctatgagacagtgctggtgcggagtaataaaaatagaaactattttaggaagatagcggtggaagagacagaggaagaaaggtgatggatagacgatagattagataggtagatagatgatagatatgatacgatatgatagaaaaaggaaggaaggaaaggaggaagggagggagaaaggcaggaatgaaagatgagaggaagggaggaagaaagagtttttttaaaaaagtagaggaagggagagaactacctgatattctgagtatttttagacgtgttctgctgctgggaaactgtagaatt

SEQ ID NO: 266511 - DNA, 573 bp, Homo sapiens
ttttaattatttcttacaactaaatttttgatgagtttagtagcagagagtttcatatcttctgagaagaacctagaaccccttggcctatgctattgagtaaaagaaaattcacatactaaacaattctctaagcagaaaatagrcctgggatccctttatcaaaattagaaggcctagaccacatcacatgctggggaagacatggagcaaccagaattctcacatgttgttgttgggaatataaaatgatacaatcactttgaaaaagtcaggcagttgcttaaaaatgaagtatggctgagcatagtggcttatacatgtaatcccagcactttgggaggccaaggtaggaggactacttgaggccaggagtttgagaccagcctgggcaatacagcacgacccttatctctacaaaaattaaaattaaaaaattagccaggcttggtggcatgcacctgtagtcttagctatttgggaggctaaggtgggaggattgcttgagcccaggagtttgagtttgcagtaagctattatcccaccactgcactccagcctgggtaatagaac

SEQ ID NO: 266512 - DNA, 569 bp, Homo sapiens
atggctacagcataacctggtacaaaatgtaactgggttgaattgcatttcagcaacagctactggatttgctgagattcgactctgttacacacacaacaaaccacagtaaaaatgggtcataaacacagcttgcattacagasgcaaccagattttgggcacggcaccaggatctttcttttcctccccactttatctttggccaggcttcacgtagcacaaccagacctttgttctgccgcccaccctgtaaagtcagtagggcttcttattcttgtgttcttcctccatctatacaaaaggggctcccctcctaccctctaaatcaagatccatgcttgaacttgaaggatgaaagagaaaatagaattgagttgccttttgggggttaattaaaattaatcctggatggaattaatggcttgaatgtcacagtattcccctctcactttccttccccagtgctctccttccccacgccctactcatattgctgtgacacctggtttcctgatgtgctgttgtagcactagcttctcaatagcctttgctcagtgcatccattct

SEQ ID NO: 266513 - DNA, 605 bp, Homo sapiens
ctgccgcccaccctgtaaagtcagtagggcttcttattcttgtgttcttcctccatctatacaaaaggggctcccctcctaccctctaaatcaagatccatgcttgaacttgaaggatgaaagagaaaatagaattgagttgccttttgggggttaattaaaattaatcctggatggaattaatggcttgaatgtcacagtattcccctctcactttccttccccagtgctctccttccccacgccctactcatattgctgtgacacctggtttcctgatgtgctgttgtagcactagcttctcaatagcctttgctcagtgcatccattctttccagtctgtacttcccaactcagttggtcatttgttcatcagtttaacacatttattgatcttttgccatgggccaggcatcgtgcttgggatgcaaagatccwctcatgcaatcaatcagtcaattaattatcaatattttttgagcaactattatgtgttctaggcctcagtttatagcagagaacaaaacagcctttagagtgcttataatccacagggagagtggtggaaacaaatgaataaattatatacctaaattatatactat

SEQ ID NO: 266514 - DNA, 631 bp, Homo sapiens
ttacactaaaaatctgtgctctgcaattctcttacatgatagtaatttatttggcaggcatttactaagcacctactatgcgccaagcactagactaggttctgggaatgcaaaagtgatttagaatgaagtaycttctctgatgccaagacacttaacaagagcatgatgtgattggcagatggctagttattcctcaatctcccttctctcattcttcataatagtggagttttctcagtccctttggacatctgtggcagatagtgagagaaggatgagaccttgagagaccaggagaaaagagcaaggatagggcatgggagtaggagtggggacagttgccaggagtagagaggaaggaatctttgcagcaacatgtgacctacacttcaggtctgcagggcctgccctttagacccactccataaatgttgatttcagtttcttttacaattccagattttatgcttatgaaaagtcatatggcaaggttgcttgctcaaatactcacgagaatgacccatagaccgaatttgttccagctgcagcccagctggtgtttatgacagacttgttagcagctttgaaatagagaaatagaagttgcaaaaaaattccagttccatcc

SEQ ID NO: 266515 - DNA, 630 bp, Homo sapiens
tacaaatgcttttgctaacaagctttgtagagctaagctgccattattagcatcttggggaagtacttccagtgtgcccaccatatgttcctctggagtgttttctggttttgtttctgcacaagttgtgttctcagagcatcctgcaagagatgatatagagaatcccaagacgatagaaatgtagagataggctaagatgccccaaaataaatctttgcctgttctgtttgcccagtacatggtgaaaggctgtgagattgagatggaatggtagacagagctcagttaataggaaaagttctggagtatgctggcagaagtgtaattcagctcaaaatgcacctccctctcccttcattcacgggcyctacaccagtgaagcagcttgaggttcttatcattctgactggaagctcatagaataacagagggaagggtgttagcagcttaaataaagaattagctgtagatccaagacagtaggaaaccagaaaataagaagtatactgggacatcaggatgggcacctggagccgggcgtcatatgtttaaagcctagttgcttccttaccttgcctgaacaggtggtgggagcaagaatgctcatgtgttggttaccaagacaaa

SEQ ID NO: 266516 - DNA, 629 bp, Homo sapiens
tgtggtgtctgccctactctcttggatcacttactctggggaaagccagtcgcgtgtcaagaggaaactagagtcctctggaggggcccagttagggaggaactggggctgttcaccaacagctaacactaaccaaccatgtgactgagtcatcttagaaacaaattttttggccccagtcaagtcttcggatgatatagccatagcctatatcctgactgcaagcctcatgagagaacctacacaagaactgaccagttaagctgctcctaagttcctcacccacagaaaccatgaaaaaaatgattgttgcttttttcagccactcagttttgggataccttgtcatgcagcaatagataacgaatacaagtatcactgtcactgccatgcctggaatgttcaaagccagaccctaggccaagcatagtatgatgaaaaaaatcactggtcttccttcccaaactctccaagctcgttcctgcctaaaggtgtttgtacttgctgttttctctgcctggaaaacatttcctccaraactttccatggctgcctgatcatttaggcctcagcccttgtgtcacatcctcagagaggccttccctcaatactacatggaaaaaaagtgt

SEQ ID NO: 266517 - DNA, 541 bp, Homo sapiens
aagcatagtatgatgaaaaaaatcactggtcttccttcccaaactctccaagctcgttcctgcctaaaggtgtttgtacttgctgttttctctgcctggaaaacatttcctccaaaactttccatggctgcctgatcatttaggcctcagcccttgtgtcacatcctcagagaggccttccctcaatactacatggaaaaaaagtgtcccctctcccagtcacactctatcacatagccttatttgtctccctagaacttggcacattatgcaattatcttgtttatggatttgtttacttgttattatgtgccctcctccagcagaccataagtttcacaagagtagcagctgtgtctgaatggttcaccacagtattcccratgcctagaacatggtcagtaactgctttttcaatgaaaaatatttgagttccactctttgctcatgggtgaccttgtcaagtcatgccctccctgcccaaggttgttgtaaaggtgaaatggaatcacatatgtgaaattacctcatacacttcccg

SEQ ID NO: 266518 - DNA, 612 bp, Homo sapiens
ataggctgccatttctagcttgtcatacccatactctcataagagacttatccacaagactctcctgggaagagaggtccaggtctgctctgctcctgctcctgaatattaccaaacctactcaggatttttaacatgcataccctgaccctgggtctcaacccaggaggaccctttgcagagttgtatacgagtttctaaccccattactcttctctcggacttatctctcttttccagcaatcattagaactcttcacgtattttatctcttgtttatatttataaatatatatgttttgctcttgagttctttaggtatggtttctgaggctcaaagcctggtacttgtaatttcatatttttttgtctccaagatatgctcattaccaaatgttttgatagtttattttaaaactcagttgacacttttttcttttctcagcacatttgctgagtcttttttcccatgaggcaaaacttccatttggtctcttacattgcccagcacttgcagttaggcagggccacttgaccagttctggccatgaaatatgggtraaaataatgactgccacatacctacatccatgtacaattttatgtgctttc

SEQ ID NO: 266519 - DNA, 596 bp, Homo sapiens
aacaatattaaatgttaaaggggagatagacttcaatacgataatagttgcagatgtcaacacttcagtctcagcattagacagatcatctagtcagaaaattaacaaagaaatattggatttaaattggacattagaccaaatggacctaagagatatttacagaatrtttaatttaacagctacataatacacatttttctaattagcacttgagaattctccaggatagaccataggttaggacacaaaacaattctcaacaaattgaaaagaaatcaaaatcatatcaagtatcttctcagaccacaatggaataaaactaaaaactgataacaagagaaacttgggagactgtacacaatcatggatattaaatagcatagtcccaaatgatcactgggtcaagacagaaattaagcaggaaatcaaaaaatttctggaaacaactgaaaatctaaacaaaacataaaatctatgggattaaaaaaaaaaaaaaccgatgtctctaaaagaaaagcaacaaatgcttacatcaaaaaggtagaaatattccaaatagcaatataaaaattcacctcaagaaacaagaaaag

SEQ ID NO: 266520 - DNA, 596 bp, Homo sapiens
aacaatattaaatgttaaaggggagatagacttcaatacgataatagttgcagatgtcaacacttcagtctcagcattagacagatcatctagtcagaaaattaacaaagaaatattggatttaaattggacattagaccaaatggacctaagagatatttacagaatgtttaatttaacagctacataatacacatttttctaattagcacttgagaattctccaggatagaccataggttaggacacaaaacaattctcaacaaattgaaaagaaatcaaaatcatatcaagtatcttctcagaccacaatggaataaaactaaaaactgataacaagagaaacttgggagactgtacacaatcatggatattaaatagcatagtcccaaatgatcactgggtcaagacagaaattaagcaggaaatcaaaaaatttctggaaasaactgaaaatctaaacaaaacataaaatctatgggattaaaaaaaaaaaaaaccgatgtctctaaaagaaaagcaacaaatgcttacatcaaaaaggtagaaatattccaaatagcaatataaaaattcacctcaagaaacaagaaaag

SEQ ID NO: 266521 - DNA, 549 bp, Homo sapiens
cagcatatcaaaaagttgatacaccatgatcaagttggattcctcctaggaatgcaagggtggttcaacatatacagatcaataaatgtgacamgtcatatcaatggtatgaaggacaaaaaccatatgatcatttcaatagatgtagaaaaagcacttacaaaattcaaaatttctttaagataaaaattctcaacaaactaggcattgaaggaacatatctcagtgtaataaaggccatatatgacaaacccacagttaacataatgctgaatggggaaaagctgaaagccttccctctaataattgaaataggacaaggatttctactttcatcaatcctattcaacgtaagaatcctctggaggtcctacctagagcaatcagccaagagaaggaaataaaagccatctaaattcaaaaagaggaagtcaagttatctctctttgcagatgatattctcttatatctaggagaacataaagactccaccaaaaagctcttagatctgataaataaattcagtaaattgcaggataaaagtaaaca

SEQ ID NO: 266522 - DNA, 673 bp, Homo sapiens
ggaatactattcaaccataaaaggaatgacattatgtcatttgcagcgacatggatggagctggtggtcattgtgttaagtgaaataaggcacagaaagacaaatactatatggtctcactcatgtgtgggagcttaattagttgttctcatggaggtagaaagtagactgatacataccagaggctaagaaaggtatatggattagtgaggagagtgtttgtaaagagtgggtggtaatggattaatgagtacaaacatacgttagatagaaaataaattctaatgtttgatagcagagtgagtatagtcaacaacaatgaattgtgtatttcaaaatagctatgagagagcacttgaaatgttccacaaatatagaaattatataaatagtcaaggtgatggacaayccaaataccctgacttcattgttacacagtctataaataatgtcacatgaacccgataagtatgtacaaatattctgcatcagtaaaaaagcaaaaaaatacaaagagatggcttccccttgcaaatgagataaggcaagaaataaaaagatattcatagtaaaaaagatgaaatataactatctgtatcttcaagcataatttggaatatagaaattccttcaaatccattaaaaagctactaacactaatacagagtgttta

SEQ ID NO: 266523 - DNA, 607 bp, Homo sapiens
ttatagatatgactgacatacacaaaatagttggagcatttattttttaaaagtataaatgagttctgaattcaagtagtctgactactctcatagtgaaattcatcagcttgactgascactgtgtatcatctttcatgatcttgcttctataggcaaaatatatgaggaatatatatttagttcataaaatgcttgagttttcttagtgtactgtttctgattttaatccctaaatttaggaaagaaaaaatatttaaatataagaagtgttttttttaataaaagccatgacacttgctgctatgtagagatataacatatttttctataaattttattaaaaagtgattaaagtaatttgccttatcctagagggataagataataaggattcaaacacacacacacactcacatgttcattcaaatcaattcagcctatctcttgtaccatttttttttataatttagttgaatctgattgtaataaaaatgagagaaacacctacaattttacatagttggaagatagatcattatagttttcattcctagtcataagggatctgattccattccaatacactgattaaaattgaagggtc

SEQ ID NO: 266524 - DNA, 607 bp, Homo sapiens
ttatagatatgactgacatacacaaaatagttggagcatttattttttaaaagtataaatgagttctgaattcaagtagtctgactactctcatagtgaaattcatcagcttgactgaccactgtgtatcatctttcatgatcttgcttctataggcaaaatatatgaggaatatatatttagttcataaaatgcttgagttttcttagtgtactgtttctgattttaatccctaaatttaggaaagaaaaaatatttaaatataagaagtgttttttttaataaaagccatgacacttgctgctatgtagagatataacatatttttctataaattttattaaaaagtgattaaagtaatttgccttatcctagagggataagataataaggattcaaacacacacacacactcacatgttcattcaaatcaattcagcctatctcttgtacyatttttttttataatttagttgaatctgattgtaataaaaatgagagaaacacctacaattttacatagttggaagatagatcattatagttttcattcctagtcataagggatctgattccattccaatacactgattaaaattgaagggtc

SEQ ID NO: 266525 - DNA, 611 bp, Homo sapiens
aatataataaagattcaattataagagttatgaacaataagtgagcctctaaatggcaaagttgaaagtggcctttgattgtaagttaacattttcatggttttgaacttaaatcactgtgttttcagtggaaaaaaatagtgtgtttatctatatggaatatataattttctataaacctatagagtaatagcatttgaagaaaattactttgcagtttaatttaatgaacgctatttacacttccatttcagtttctagtaaccaaacgaatgctttaacagctttactggtttcaaaggacccatgcctcatgcccgtctcagctttagtttacatgaaggaaactgaaaatgcagatgtcacataggcttcggtgagtgataagatgataaatactacatttcatgagcagragtgtagggcatggagaaattcctaaaaattttagaaattcataagtctcttattactttaaaaattttaccgttcttattaatgtaatctaataatcaattcttaaattgccctttaataatttcactgaccagcaaaatccttcaaacatcatatcaaatatcattacctctttgaaggcattctcactctca

SEQ ID NO: 266526 - DNA, 586 bp, Homo sapiens
caagcaaaggtttcaatagttgtgaggtgctacagtagcagtggttagagttcaagctccacactgaaaaacattccagatcctcaacaggaacctcagaaataccgtcaacactaaaccagaaatattgacgactgatttcccaacagaaacaatgaaaagaagaaaatagtggaatggcatattagagtccttaacaaaagaaacaaaactrtcaacctccagtttccatacccggtgaaaatattcttcaaggtgaaggtaaagaaaaagtgcaaacaagtcaaatgtcaactgagcaatgaatagataaaattgagtatatccatgcaatggaatattatttgggaacaaaaaaagaatgaagttttgatacatgctgcaacatacatgctgtaaatcttaaagtaactgcaaaagaatattaaacaacaaatcaactgataatggaaaaaaatgaaataaaaagattgatacaagaagaattgaaaagctgaggaatcctacaccaatgaaagaaaaatgaacctggttttagaatgtttcccatacaggaaaatccaggccttgatgattttaatagtga

SEQ ID NO: 266527 - DNA, 498 bp, Homo sapiens
taataattaagtttttgaagagtcaaaaacttttggagagtcgaggttatacatggatttttgacagcatggggtgttggcattcctaacccccacattgttcaaggcccatgtacataaacattgtaagtcaaatggaaaaaataatcaatggagtaattgaaattggactgaatctacataagatccttgaaagaactcaaagatgaaataatggaaatgactaaagtatattmtatgttatcataagtgttctttattttgacgtattggctgattgactatttaactccctgtagaggctttaaaagatgacctgtaagccaaatcatctctatttcatagttggcaaatttcctaggattacattcaacaatagggttcttcactgcataaacaactcaacctattggtatgttatgaagtttatgtcaaaagaagtcaatattttctggaactatttaaaggaagaaagtatgtacataaaaagaggctaat

SEQ ID NO: 266528 - DNA, 606 bp, Homo sapiens
caatttgcctttactctgaataagatgagaagccattggagtacattgaacataatgataaaatcgtgagatggagtctcactctgtcaccaagcaacagtgcagtgatgcgatctcagcaaactgcaacttccacctcctgggttcaagctattctcctgcctcagcctcccgaatagctgggactacaggcacacaccaccacacccatctagtttttgtatttttaatagagacggggtttcaccatgttggccagatgatctcgatcccttgaccttgtgatctgcccacctcagcctcccaaagtgctgggattacaggtgtgaaccaccgcgactggcccttatttatatttttaaacgatcactctggtagttgtgttacgaacagatagttcaggggcaaggatgagagctgggagaacagtaagaaatctactgcagttactcatttaagagagaatgatggtgagaagtggttggactctgcatatattacaaaagtgaagtaagaagactgcrgctaatggaatgtaaggtataaaggaaagagcaggattaagaactaggtctagagttttggcttaacaactagaaggatgat

SEQ ID NO: 266529 - DNA, 585 bp, Homo sapiens
gcatgactgagaccattttttaaaactggaatcattggctaggcgcggtggctcatgcctgtaatcccagcactttggraggctaaggcaggtagatcatgaggtcaagagattgagaccatcctggccagcatggtgaaaccctgtctctactaaaaatacaaaaaattagctgagcatggtggtgtgcgcctgtagtcccagctactcgggagactgaggcaggaggatcgcttgaacctgggagtcggaggttgcagtgaaccgagatcacaccactgcactccagcctggcaacagagtgagactccatctcaaaaaaaaaaaaaaaaaaaaaagcagaaaacaaaaaacaaaacaaaacaaaacaaaacaaacaaaaaacacgaatcatcactttcatttttttgtaaatagctatattaatatttttgaataagaatcccttgaattgaattgcctttaataattacaattgtatattgaggttgaaaattacattacagtaatgggtcaattaaatactgctagttgtgccctaggtaacattagcagcaaacaaaacttaaataatatgaattaaca

SEQ ID NO: 266530 - DNA, 607 bp, Homo sapiens
tacctactttcctcccactgacacccttccttaacctctgacaaccactcatctgttctccattttacaattttgtcatttcaatagtatgatataaataaaatcataaaatatttaatcttttggaatggaattttcactcataaacctttagaaatgttgccaggttatagttcaatcctttttattgctgattaatattccatgttatgaataccacagtttttttgttttgttttttttttgagatggagtctcactctgtcacccaggctggagtgcagtggcacgatctcggttcactgcaagctccgcctcctgggttcacaccattctcctgcctcagcctcccgagaagctgggactacaggcgaccgccaccttgcctgactaatgttttgtatttttagtagagacggggttttaccrtgttagccaggatggtctcaatctcctgaccccgtgatccactcgcctcagcctcccaaagtgctgggattacaggtgtgacccaccatgcctggccgaataccacaaatttttaaacatttacctgatgaaaaacatctttgttattccctttttttgctattaccaataaagccac

SEQ ID NO: 266531 - DNA, 464 bp, Homo sapiens
aaaaacaaatatctagaataataaaattttttcctgccaccatttaaaaaatacatatttttgcagtactaatcacaacatttcttgctgtatttctttgcttattaaaattcattttagaaatgaattcctaaaatgtgactggaacatatgtttaaaaaagcattgagatttagatttttggaaaaataagtgagttgaattttattttatgattgattaataaaattggtttagagcaattgtcttctgatagttcaaggcaagttgaagtgtatattattcaagaaactckttcacattaaacatttggatgttgaatttaactctaggtgttatcttcacagatcagtaaaagatgacagagttctctctaaaatgtgctcagtttaaattaaaccaacattcttggtttcccaaaatagcacaacttttatttgacacttctataaaaattatactct

SEQ ID NO: 266532 - DNA, 636 bp, Homo sapiens
gtgtgtgtgtgtgtgtgtgtgtgtgtgtgtgtgtgttttgctcaagtcttatatatttatatgcctaagatttttttattgacttttggttctggtgtataaaatattattgaaaaagtataaggctcaggatcatcttatcttgtcctagaaataatacactttttattttgtcagttggttcaaggccatattccctaaatctaattatggatagagatgactcaaagttgtgttttttacttgttaggacaagtccattcaccatttacagaccccagactccaatttttgtttattctaccaccataagattgctgaatataacctcagttcctcaatctctttaccacaacttttactttttatctgagaggtaaaattagtgacacacactgagtttaactcgctagaccattttttcccctatattgtgacccctcaaattatgaattcacagacacattttacaattgtgcatctttacttratgtacagctggatggttagttgaagatcactatgtctaccatttccagaaataaatcactttgctcatgcattgtggaaactcctggcaacagattattaaaaacctgaactcattgtcccaagatttcctactctgtttcttct

SEQ ID NO: 266533 - DNA, 599 bp, Homo sapiens
gccagcagtggcaacccgctcgggtccctttccacactgtggaagctttgttcttttgctctttgcaataaatcttgctactgctcactctytgggtccacgctgcttttatgagctgtaacactcactgcgaagatctgcagcttcactcctgagcccagcaagaccacgagcccatcaggaggaacgaacaactccagacgtgctgccttaagagctgtaacactcactgcgaaggtctgcagcttcactcccgagccagcgagaccacgaacccaccagaaagaagaaactctgaacacatctgaacatcagaaaggacagactccagacgcaccatcttaagagctgtaacactcaccgcgagggtctgcagcttcattcttgaagtcagtgagaccaagaacccaccaatttcggacacaaagtcacccttattacatgtgtttcagacacattttaagtagtttattaatttcaactcttttaactaagctatgcagaataagtcttaagtaggcattatcattcccttttccaaatgagaaaattgaggcacagaaaggtagataatttgctgcaagttacacagaacagga

SEQ ID NO: 266534 - DNA, 599 bp, Homo sapiens
gccagcagtggcaacccgctcgggtccctttccacactgtggaagctttgttcttttgctctttgcaataaatcttgctactgctcactctctgggtccacgctgcttttatgagctgtaacactcactgcgaagatctgcagcttcactcctgagcccagcaagaccacgagcccatcrggaggaacgaacaactccagacgtgctgccttaagagctgtaacactcactgcgaaggtctgcagcttcactcccgagccagcgagaccacgaacccaccagaaagaagaaactctgaacacatctgaacatcagaaaggacagactccagacgcaccatcttaagagctgtaacactcaccgcgagggtctgcagcttcattcttgaagtcagtgagaccaagaacccaccaatttcggacacaaagtcacccttattacatgtgtttcagacacattttaagtagtttattaatttcaactcttttaactaagctatgcagaataagtcttaagtaggcattatcattcccttttccaaatgagaaaattgaggcacagaaaggtagataatttgctgcaagttacacagaacagga

SEQ ID NO: 266535 - DNA, 667 bp, Homo sapiens
  misc_feature (1)...(667): n = A,T,C or G
nnnnnnnnnnnnnnnnnnnnnnnnnnnnnnnnnnnnnnnnnnaaagagctctggtgaatgcaaagatgaagactattatttgccctcttcttacagtgtctcaccaaggtatttagaaagcctggtgagtctgttatccaaacactttgtagtcccagctcagcgggctttcaccccctctgtgccaggttgccctgcctctcctgtggctacactgtttttcgactgtcatttttattgaaaaataaaagctaaattggagtttcagaataccttccatttaactcctttaataaaacgggaaagataaaagcaacctagtcacaagagaagtgtttttgaaagctatgccttggatatcagagatgcagaaataaaaggctgcttcaaaaatagagcccactggcctagcgctggccctctgcagctcttctcctgtgctagaccggcttttagctttaattttttattcaagaagttaaatgggagacgtgaaatagtttggatcaaatatcccaacaaatggaaaacgggcagcagatgactcttttaaatgcattattcttatgcacctgagccagacaacttcgtcargcaattttgcacatgcctgatagaaaagagaatattattcatatttctgtacacagagaactcttttttccac

SEQ ID NO: 266536 - DNA, 428 bp, Homo sapiens
attaatttaaaatatccagaaccacaaaaggaaagtatttcttttactcattcctgttccagataaaagcaatcagaaagggactaataacaaggatacatagcatgaagaatcagtcrtagtcctagtaagaattacaacataaaggtaagcatagatttatcacaatactcaaaatgaatgattcatgaattttttttaatatgaatgtccttcaggaaagccacattcatcttattgatgcttagaagaaatgtacacaatcataagagatttgagtctttaattctaaattcatgcatcataatttttgggtaatttgtgtttaagaataatttatacaataaatttaaatatttcattccaagtcatcagactaaggaaacagataaaaatagtatctgttatcaaatgatcaagaagggtgg

SEQ ID NO: 266537 - DNA, 720 bp, Homo sapiens
aattataatttaaaatatacttctatccattcctatcttttgtgttcttataattaattttccttccttctctttcacttcactattcatgccaccacattgaaacatttcctattgttgttagtaggagttatgtgcatagttcacaagatgaaatgttttaatagcattgcttctcttttaaaggcaagtttgggcttggctagatttaggagttgctttgaaaatgtggcttagtgtattgtttctaaatgacaatatgggaattagaacaagggaaggaacagatcacacaatttacgcacgtttattttatagtggaatttttctgttatctaaatttcaaagtgcctttttaatcccttggtactctctaccaacattggttttttaaattttgtttttccttgttttcaatgtatatctttcatattcacatttgcatgaataccttccataattatttcaaatgggaccttaatgaatacaaactctttctgatttcttttaattgaaaatttattgagtaaattatagattcatatgcagttttacatgcagagtttctgtgaaccctttgccaatttcccccagtgctaatatcttgcaaaattatagtacagtattataccctaggtatttactcaatccaccaaacagttagatttcattagttttccatgtatttatttgtatgtawatatgtgtgtgtgtgtttag

SEQ ID NO: 266538 - DNA, 527 bp, Homo sapiens
tcacttgctcattacctgtagatcctttgccttaggactcaagcttaagcccatgaagcctgggatagaagacaattggaggtatgttttatcttctctagcatctgggacaactggccttgaaccaaacatgtgcacctcgtttttcttttcccttcttcctctgagatttcttttcccakaggctcttatttcatgcaatgatccactagccctggaaacaggaacataaacactcgaaccctagaatgaacataatttagtcttaactacattagatattttagtttgaaagaaatcactcacatttcataatcctgaaacatataaatttatacttagttatctgtgcaaaaattgaatcatgataattattaaagaattactatgcaagtgtaaatagctttggtattaaccaagagtggtttcagtgtgcttttgtaaaaaaaaaaatactagagttcaaaaattcaggtctatatttgaagctctgtcaataattcatatacctcatatcaaaaagctta

SEQ ID NO: 266539 - DNA, 439 bp, Homo sapiens
ctcctgcttcagcctcccaaagtactgggattataggcacgatcctgcacctgccccaattctgtatttttatttgttcttagttgtagcttgtaattatttccaaatgtgaatcataatcagattgattcaataccaagttttagaagaattgtgtatcaactagtccactttgaagaggaaaaccacatagtaggttaaactagtgagtttaatttaaaaatattattaaagtatgacaaaagagtaacttctctctaagatatagagaaacctaagtggtaccctgaagctaaaggagtgtaaccaaagaatgacaaacttggaagaggatcagatcttaaagagaaggtgtaattcatctcactggasagcagagaagttttcgagtttggctgagcatccagagatggcccatagtcatggggcaagctggcgg

SEQ ID NO: 266540 - DNA, 579 bp, Homo sapiens
gtttgctgctgtcctcgccatagtgaatgagttctcctgagagatctggttacttaagtgtgtggtgcctcacctccaattttctctctcttgcttctgcttccatcatgtgacttacctgctcttgcttcatctcctgccatgagtaaaagctcccggagaccttcctacgagctgagcagatgccagcaccatacctgtccagcctgcagaactgtgagccaattaaacctctttgcttataaattactcagtctcaggtatttacagcaatgcaagaatggcctaacacaacatgcaaatcaaggaagtcaccccatcatgcactgagtagcatgttgatttcttgttctcatcggatgtatcattttatgaaattactgtatttatgtattattaatacatttgttgtctgtctgtgtttacttcattcttctactgaccagaatgtaaattccagraaagcaagaactctacctgccttgtccacttctttatcttcactctggtcttagaacagctgacaaattctagttgttcaagaaaaatttttaaatactagaaaaaacattacttaag

SEQ ID NO: 266541 - DNA, 572 bp, Homo sapiens
gagttgtgacatatgtgaataatttccatggtttcttactccctggacaaagacacaaattgttttatactattcaattaggtggttgtctagtgacctaaaatattaacacgcttatctaagtcactgtttctaacagactctaatccaccatgtttatattcaagtactgaatattgtaacttcaattgataagaatcccacaaggctatctccataaaccatagaagaaaaaaatgaattttttttggtcacaggtcaaaaggtaccaaccacatctctgcagcaccctgcagcttctgaattaatttagcttatttatgactcattggactcttcttgtcactgttcaagtgactttccaccactgttagggttttgatgtcttaactttttttttagacttctataatactgtttaggatactgctacgctcatttaaaaaaggataagttttaaaaattattttctaattgaaaaacacttaatccattatgttacrttaacttttacatacagtgggataagtacaagcattaagactaatttttatatacttatttggtgaaaa

SEQ ID NO: 266542 - DNA, 572 bp, Homo sapiens
gagttgtgacatatgtgaataatttccatggtttcttactccctggacaaagacacaaattgttttatactattcaattaggtggttgtctagtgacctaaaatattaacacgcttatctaagtcactgtttctaacagactctaatccaccatgtttatattcaagtactgaatattgtaacttcaattgataagaatcccacaaggctatctccataaaccatagaagaaaaaaatgaattttttttggtcacaggtcaaaaggtaccaaccacatctctgcagcaccctgcagcttctgaattaatttagcttatttatgactcattggactcttcttgtcactgttcaagtgactttccaccactgttagggttttgatgtcttaactttttttttagacttctataatactgtttaggatactgctacgctcatttaaaaaaggataagttttaaaaattattttctaattgaaaaacacttaatccattatgttacgttaacttttacatasagtgggataagtacaagcattaagactaatttttatatacttatttggtgaaaa

SEQ ID NO: 266543 - DNA, 404 bp, Homo sapiens
cacactccaccttccaaaataccatagctttttgttkgtttttactttctgagccagaagaatagacttgatatggacacagatagagccttactttccaatgcaacatttgtctacttgcttgaaaaactgtgttttacaaaaggtagcactttattttcacagtgaagtagatagcttgtagagaaaaagaacaccttttagctctctaggtcttgaatttggtttactttgtgcatctatctgctataattgcactttctaaactgaaaaaaatatgagaatttttacatttttacttttgatcaaggaatttgttagttcattctattagtgcacagagaaataaagacttcaagttttaaacccacgttttacctattattattaattcacactgattc

SEQ ID NO: 266544 - DNA, 404 bp, Homo sapiens
cacactccaccttccaaaataccatagctttttgtttgtttttactttctgagccagaagaatagacttgatatggacacagatagagccttactttccaatgcaacatttgtctacttgcttgaaaaactgtgttttacaaaaggtagcactttattttcacagtgaagtagayagcttgtagagaaaaagaacaccttttagctctctaggtcttgaatttggtttactttgtgcatctatctgctataattgcactttctaaactgaaaaaaatatgagaatttttacatttttacttttgatcaaggaatttgttagttcattctattagtgcacagagaaataaagacttcaagttttaaacccacgttttacctattattattaattcacactgattc

SEQ ID NO: 266545 - DNA, 569 bp, Homo sapiens
tgcaagataaaaagctttgaaaaatcgaattccaaagggcttatactcaatagatccatggagaactaatttggtatatccaaatattgactcatctctctttacccctaatttttccmtattgtgtgttctctctctagtaaggaaacaactgtcttcctagacaccaaagttagacattcacagactgcttctattcctcttccccatgtcagaatatgacctcaccattcatcgaggtactgaagccaaaaatcatgattcaactgcaatatatttttttataaaacctggcaatgggccaggcatggtggttcatgcctttaatcccagtgctttaggaggctgaggagggaagattgcttgaggctgggagtttgagagcagcctgggtaacacagtgaggctccatttctcaagtaataataataataataataaaattaaccagtcacggtggcataggcctacagtcctagttactaaagaggctgaggtaggaggaccacttgagctcaggagtttgaggctgcagggagctatgattgtaccactacactccaacctca

SEQ ID NO: 266546 - DNA, 569 bp, Homo sapiens
tgcaagataaaaagctttgaaaaatcgaattccaaagggcttatactcaatagatccatggagaactaatttggtatatccaaatattgactcatctctctttacccctaatttttccatattgtgtgttctctctctagtaaggaaacaactgtcttcctagacaccaaagttagacattcacagactgcttctaytcctcttccccatgtcagaatatgacctcaccattcatcgaggtactgaagccaaaaatcatgattcaactgcaatatatttttttataaaacctggcaatgggccaggcatggtggttcatgcctttaatcccagtgctttaggaggctgaggagggaagattgcttgaggctgggagtttgagagcagcctgggtaacacagtgaggctccatttctcaagtaataataataataataataaaattaaccagtcacggtggcataggcctacagtcctagttactaaagaggctgaggtaggaggaccacttgagctcaggagtttgaggctgcagggagctatgattgtaccactacactccaacctca

SEQ ID NO: 266547 - DNA, 569 bp, Homo sapiens
tgcaagataaaaagctttgaaaaatcgaattccaaagggcttatactcaatagatccatggagaactaatttggtatatccaaatattgactcatctctctttacccctaatttttccatattgtgtgttctctctctagtaaggaaacaactgtcttcctagacaccaaagttagacattcacagactgcttctattcctcttccccatgtcagaatatgacctcaccattcatcgaggtactgaagccaaaaatcatgattcaactgcaatatatttttttataaaacctggcaatgggccaggcatggtggttcatgcctttaatcccagtgctttaggaggctgaggagggaagattgcttgaggctgggagtttgagagcagcctgggtaacacagtgaggctccatttctcaagtaataataataataataataaaattaaccagtcacggtggcayaggcctacagtcctagttactaaagaggctgaggtaggaggaccacttgagctcaggagtttgaggctgcagggagctatgattgtaccactacactccaacctca

SEQ ID NO: 266548 - DNA, 569 bp, Homo sapiens
tgcaagataaaaagctttgaaaaatcgaattccaaagggcttatactcaatagatccatggagaactaatttggtatatccaaatattgactcatctctctttacccctaatttttccatattgtgtgttctctctctagtaaggaaacaactgtcttcctagacaccaaagttagacattcacagactgcttctattcctcttccccatgtcagaatatgacctcaccattcatcgaggtactgaagccaaaaatcatgattcaactgcaatatatttttttataaaacctggcaatgggccaggcatggtggttcatgcctttaatcccagtgctttaggaggctgaggagggaagattgcttgaggctgggagtttgagagcagcctgggtaacacagtgaggctccatttctcaagtaataataataataataataaaattaaccagtcacggtggcataggcctacagtcctagttactaargaggctgaggtaggaggaccacttgagctcaggagtttgaggctgcagggagctatgattgtaccactacactccaacctca

SEQ ID NO: 266549 - DNA, 557 bp, Homo sapiens
tgctgctctcttcagaggctgcaggcaggaacgtttaagtctgctgaagctgcgcccgcagccaccccttcccccaggtgctctgtcccagggaaataggagttttatctataagtccctgactggggctgctgcctttctttcagagatgccctacacagaggggaggaatctagagaggcaggcagtctggctacagtggttttgtggcgctgcagttggcttcacccagttcggacttcccagcagctttgtttaygctgtaaagggaaaatcgcctactcaagcctcagtaatggcagatgcccctcccccaaccaagctcaagtgtcccatgtcgacttcagactgctgtactggcagcaagaatttcaagccattggatcttagcttgctgggctctgtagacatgggatccactgagctagaccacttggctccctggcttcagcccctctttccaggggcgtgaacggttttgtctcggtggcattccaggcaccactggggtatgaaaaaaaactcctgcagctagctcaatgtctgcccaaacggcc

SEQ ID NO: 266550 - DNA, 582 bp, Homo sapiens
tcataggcatttttgttttacatagtaatatcagacaatgatagggaacttagtaacttttctttcaattttggggaaaaagataaagtccttgaaaaattctttttaaactgttccttggaagaataaaagcatttgaaatccccatgtgcaacaagatcagcagatcttcaattctcaactttaagaactgcaagcccagaaatttgtgggtttcttaaacccctatttttagctatttgtaaaagtcatatctctaccttcattgtctcttgcttcagagaagacatggttagtcctgtaatagtccagcattagtgctttcaagggaaggagaatgattgcataactggttacatttaaaatgagtaagaatgaagattcttgagtgttgctcacaggtatwtaggaaaaggagctactgttatgactgtggaatctccattgcattttattagatacaagaaaagcacgaatgccagaccagactcaagaagagaacaatttgactctgctttcaaatggagtggcaaaatcacattgaaggaaagctggtgggatgtagtattcttatacccatgg

SEQ ID NO: 266551 - DNA, 641 bp, Homo sapiens
atattgttcacaaaaatgaattaactgtgaatttctcagttattttgacatcatgtagccatgcagttgctaggtcattacaaggcaataaaaagyagatgtatttcctaaagaaatactgtaagatctggccaagtcagtggatttgctacataacaaaggcacaatcagagtttctgctaattcagtcctagatgagagtaaattgtgaaattagaacaatcatataggcttttgagataacagactttaaaaaaacatttttctacttttataaatgaagaagctgaggtccagagaggttaaaggattcccttgttgtgaatcacattaccttttacaaagaattttgaatattctagtaaatatgctcttccaggaatgttacattttattctaattttattccttttaatatagcattcctgttaggtttttcaatttgtgtttgattgtacagttatgtaaattctttttgacagatttgttattaagggaagaaagatgagtatgaattctaacagctcattaattttaaagaaatgtgtcatgaattaatgctttgagtgctatatttttctctttacattatgtttttctggttgaatagaattctatcaaaataaataggttatttaaaa

SEQ ID NO: 266552 - DNA, 560 bp, Homo sapiens
tacaaggcaataaaaagtagatgtatttcctaaagaaatactgtaagatctggccaagtcagtggatttgctacataacaaaggcacaatcagagtttctgctaattcagtcctagatgagagtaaattgtgaaattagaacaatcatataggcttttgagataacagactttaaaaaaacatttttctacttttataaatgaagaagctgaggtccagagaggttaaaggattcccttgttgtgaatcacattaccttttacaaagaattttgaatattctagtaaatatgctcttccaggaatgttacattttattctawttttattccttttaatatagcattcctgttaggtttttcaatttgtgtttgattgtacagttatgtaaattctttttgacagatttgttattaagggaagaaagatgagtatgaattctaacagctcattaattttaaagaaatgtgtcatgaattaatgctttgagtgctatatttttctctttacattatgtttttctggttgaatagaattctatcaaaataaataggttattta

SEQ ID NO: 266553 - DNA, 571 bp, Homo sapiens
ctctgtctgctatccagatgtaggagagaagtcttttgcaatgctgccaaggaagcactctcacactttgcatgaaaatatgcaagtctaaaataacatacaaataataaaatgtgagtaaaaactaaaaacactgaygtttatcatttgcacagacataataaaaaggaattcatatgctttatgttataaattatatattaaaaatataagttgttaaaacactcgaatagaaacatggggctaagtaatgtgttagctttgattattcttcagcaaatattatttccccctttccttctaacctccatagaaagagtatctttcacgatgaatttggtattgagcttgaccagtgaatttctgtagtcaataagatgttagcaaatgagacaaaatgagacatgagcagagactttcaatgtgcttccctctagtgttccttccttttatcataagaagaacatgccttaggtagctgctgattcaacaaggataaaagacacatgaggataactttgacccaatcagcagtttaaagcaaagcccagccaaatgattacctgaacat

SEQ ID NO: 266554 - DNA, 571 bp, Homo sapiens
ctctgtctgctatccagatgtaggagagaagtcttttgcaatgctgccaaggaagcactctcacactttgcatgaaaatatgcaagtctaaaataacatacaaataataaaatgtgagtaaaaactaaaaacactgatgtttatcatttgcacagacataataaaaaggaattcatatgctttatgttataaattayatattaaaaatataagttgttaaaacactcgaatagaaacatggggctaagtaatgtgttagctttgattattcttcagcaaatattatttccccctttccttctaacctccatagaaagagtatctttcacgatgaatttggtattgagcttgaccagtgaatttctgtagtcaataagatgttagcaaatgagacaaaatgagacatgagcagagactttcaatgtgcttccctctagtgttccttccttttatcataagaagaacatgccttaggtagctgctgattcaacaaggataaaagacacatgaggataactttgacccaatcagcagtttaaagcaaagcccagccaaatgattacctgaacat

SEQ ID NO: 266555 - DNA, 556 bp, Homo sapiens
aagaaatattccataaaaatgaacttgatgggatcatgacagagatggcagatctacaaattttaagaattggagactatctcatagactttgttaagatcacaatcagttctcaacttcaatgtggtacatttacaagcattgcaaacagtgtgagatcccagcacagatgtcaaaccagaaattatgtgacttgaatggcttggaataatggcccatttggggcatccagcacttccactgttgggtaagtactgttgtcaacagtcacactgtccaagtggatgatgcacccttgacattcaagtcctataaaaataactccagtattctgttacaattttttcagttgcaaaaatcttcttaatgctggtactaatttgcttgatatttttcctgcatcttttakagctttaaagtggggaattgattttggtaacacaaacagatatttcattttattgaataaaagaaagacattgcaaatatagctgccaattcttttagagactactttcaaattcaacaaagttgaatagtcagttacaaaatattc

SEQ ID NO: 266556 - DNA, 632 bp, Homo sapiens
atgtataattttcatacatatgttatatatatgtatatatgtatatatatatacacatgtatatatgtatatatatatgtatgtatgtatatatatayacacatgtatatatgtatatatatacacatatatatatatcaaggtgaagggaagtcaggcatcatatatttgagcagacagaaataatatgtcacagtaactttattttctgcccaaaattcatagaattctatataaattgaagggaaagggatttctgagtacagactaaaagagcattttcactaaaaattaatttagtcattcaagtacagctaacaatgactggtagcaatttaacacagtacagaaccaaaagggagacaaggtcttctttctcactttaccatagctctctttcatcctgctgctgaatttcatctatgctgctaaaatgtattattaaactaacgtaccaagtatcagaataatgcacagacattccatatatgtttctgtgcaacatgctcacatgtgcataaataaattatgtacttacataattataggtctggaatgatgtataccagggctcagcaaactattgcctactacccaaagccagcccactgcctgttttaataaagttttct

SEQ ID NO: 266557 - DNA, 511 bp, Homo sapiens
ttcaagtacagctaacaatgactggtagcaatttaacacagtacagaaccaaaagggagacaaggtcttctttctcactttaccatagctctctttcatcctgctgctgaatttcatctatgctgcyaaaatgtattattaaactaacgtaccaagtatcagaataatgcacagacattccatatatgtttctgtgcaacatgctcacatgtgcataaataaattatgtacttacataattataggtctggaatgatgtataccagggctcagcaaactattgcctactacccaaagccagcccactgcctgttttaataaagttttcttggaacaaaccagctaatctgaaatataaggaaagctaggagcttccaagaaaaggcaggacaagatggcttgcttacatgagtattatattcctgggctgctgtaacaattagcacaacatgttgaactaaaagagcagcaatgcattctctcacggtttttcaggccagaagtctgaaat

SEQ ID NO: 266558 - DNA, 621 bp, Homo sapiens
ttgaggcataagcctatgccttggctgtgtttccctctgctggaattgtttacccttccttccactcagaaaaatcttactcctttaaagcctcagctgaactgtaacctcttccaaatcaacaaggaaagtccatttccacctccactggaatcccttggcattttaattatactgttcatatagctgttcatgacrtggctgactttgtcatggtccccatgagagctccattcacgcaggcatcagcataacataattcctgggcctgttgtccatttttgtgcctttcccatttttgttaaaagtttaattttaaaagcctcatcattatttccaattgctgtttctccattttctcctcctaaacaacatacaactcttcttgacaaagttatttactaacattactataagtaactgatactattggagttgtccaaaatgtaaacaatacataagtggtacccataagatattacaaaagaaaaatttctgactgaaagtaactgtgtatgctaagtcaacagaattttagacatcatcaactttaattacattagctgccccaaacaatcacaactcagattaaattagatggtctaacaacatgaacagttt

SEQ ID NO: 266559 - DNA, 582 bp, Homo sapiens
aagcggaaacctctgatgaatccatcagatctcgtgacacttattcactactgtgagagcagtatgggggaaactgcccccaggattcaaattatttcccaccgggtccctcctacaacacatgggaattataggagtacaattcaagatgtgatttgggtggggacacagaaccaaaccttattaggggactactgcatgtgtgttggcaaacaaacatctacacacacatacacatatatttacacatatataaatacgtatgtgtgtatccatacatattcatatattttctgagtgtaaatatgtatctagacatgtatatatgtatacacgtatacatgtataaatatatgaatattatcagtatagaaaagaattatttttactaccatttccaccttgtttttaacgagcacctacttcatttaattaattttctaaaagaaaaaaatagactttttatttttttcagaataatcccccrtatatatggactcataatagtgtgtttaaaaaaatactttagatgtgaaattttaaaaatgcacttaccagaaacttgtatttgtttcatagttt

SEQ ID NO: 266560 - DNA, 610 bp, Homo sapiens
ccaaatgtagtatgactacctcactttcagtgtgaggtactttcagatattgtagaatttactatacggcaaagatatgtgaaagaaaatttttatcacatgccaaacaatgtaccatataactcctttcaaaaatatctgttctttattgcaagggttctcatttaatgccagccacttgactccatgtctatttccatttttcacctctaaaatcaccattattaatccacaatttttatcttttataaagccttaaagcccaggaattagctacttcctttcctcccagggacatcccaaaggctatctattattactgaagaatatgctggctgaatctcattgtctgcccccatctctgcaactccaagaaacttattatcatattcaaaaggaaacagatcatggtaatgaggaaggacagaaaagaacagtgaagatatcagtcactaggaagataaaacctattccacrtaataacacttgtttttgtacctgtctaaactccaatgtgtccatcaacctgaaatatgcaacctctttcaaccctctttcactatctttaggtaacataaatgtacctaagtaaatgagggaatatagccct

SEQ ID NO: 266561 - DNA, 487 bp, Homo sapiens
atgctgtctctataatctctgataagtataattgtcttatcaattatagagaaagtataatctcctttctctagttttaaaatatttgaaatacttttaacattgtatgttaaattttaaggacatttacaaattctatttggaaaaacttttaaaatataataaaaagtttcatgggaagkggaaatttgggcatattgtcagttttggcacagaagggagattttgaaatatctattgtttgaagcacaaatctgacaagtgaagtttcagaggcctagatctacgctgactactaaaagggtctcttccaatatatttagaaaatggtttaattgctgtaattttcaatacatatttgactgtgagacattaacattcttaatattcagtgacttaaaaacttaaatctatgaaagtatcctaagaagtcctataaggcaatctccaattattgatagcatgctcttcatacatatccccaata

SEQ ID NO: 266562 - DNA, 582 bp, Homo sapiens
cacctcaagatcctgtgtatattgatcatgagaaaaatttgttaaaactattgctatgtgagatgactgaatgagcaagaagtgtttycagaggagatctaggcttcatttagagaaaagggataagcaaacattcagagaagaagtaagggtatgggaaaatttttgtacatattactaggtctgacaggcacaataagaggcatttaccagaggaggggacagcttggtgagtgactgaatcagatcagcagataaaagagaaatatgggaataagtgagtactggatgtctaggggaatggggattctgcagggcctaaggtaagcaggaaaataacatatgatgaaattcttcttgactgtcacttaggataaagtctaaaaattttgctctctaggagctacactcctaaagagtatagaacttgagcaaaatatgatctcaaaaggaatatacggagttcggtgggcctggcttaaattttcctaacattagaacccaaatcttaataggtgttaataatagcaacctattttttgctaaattatcaacaacagtagaaaataattaaaaatagac

SEQ ID NO: 266563 - DNA, 571 bp, Homo sapiens
tagccggcagttacacatttgttttactttttacagtgtagaattgacgttgtaaagcagctacacaaacttggactacatttcccagatgcccttgcatctagctgggccatgtggatagttcccatgaatggaatatgaacaagtcatgtgtcattcctttaccaaagtagttaataagctagtgtgctttagcaatttttgctttcctcccctctagctaactgagactctaaacatagtggagagaagccacaagatgaaaagagcttggattccttaattaccatgtgataaaagctacctgcagactaacagctgtgatgaattgyttggtgaatgaaaaaaaagttctaaattttggagccacttacatttgaggttaacttaaacccactttcattattctaactaaaacaataattaaaataaaatgtcacacattaaaatatatcagttgattagttaattgcattaacaaatattaaaatcctaaattttttctgattatccaaagaagatatgttaaatttgttagatatgtagttaaaatggtaattccctgtagaga

SEQ ID NO: 266564 - DNA, 514 bp, Homo sapiens
tctgttaattagttatttatgctgagacaacacacataaccaggactgtcctgcacaaactggagcatatggttctctatacagaaatrtacttacgatataattaacaaaagcaagaatgctgtgaaataattatgctaatgataacaaatacttttgtatttaaaagtataaataacttaaaattatgtactgagatccatggaagcttaatttcttcttcttgttactccttaactattaccttgttagcatctgcttacaagaattatcttacatattttcatggcagcagaggagagcaatttgctcctcggctgctctgtgggctttaggtggttcacatcagtgtggcttctctcatctcatccttgctttcctattcaggcatttgctacactttctctgacctggccacatgaggctttgggtatctcatagtatgtttaaaccaaaagttaaattaatgtaaatcttatatttacatgttttaaaaaccctcagacgttaaata

SEQ ID NO: 266565 - DNA, 514 bp, Homo sapiens
tctgttaattagttatttatgctgagacaacacacataaccaggactgtcctgcacaaactggagcatatggttctctatacagaaatatacttacgatataattaacaaaagcaagaatgctgtgaaataattatgctaatgayaacaaatacttttgtatttaaaagtataaataacttaaaattatgtactgagatccatggaagcttaatttcttcttcttgttactccttaactattaccttgttagcatctgcttacaagaattatcttacatattttcatggcagcagaggagagcaatttgctcctcggctgctctgtgggctttaggtggttcacatcagtgtggcttctctcatctcatccttgctttcctattcaggcatttgctacactttctctgacctggccacatgaggctttgggtatctcatagtatgtttaaaccaaaagttaaattaatgtaaatcttatatttacatgttttaaaaaccctcagacgttaaata

SEQ ID NO: 266566 - DNA, 514 bp, Homo sapiens
tctgttaattagttatttatgctgagacaacacacataaccaggactgtcctgcacaaactggagcatatggttctctatacagaaatatacttacgatataattaacaaaagcaagaatgctgtgaaataattatgctaatgataacaaatacttttgtatttaaaagtataaataacttaaaattatgtactgagatccatggaagcttartttcttcttcttgttactccttaactattaccttgttagcatctgcttacaagaattatcttacatattttcatggcagcagaggagagcaatttgctcctcggctgctctgtgggctttaggtggttcacatcagtgtggcttctctcatctcatccttgctttcctattcaggcatttgctacactttctctgacctggccacatgaggctttgggtatctcatagtatgtttaaaccaaaagttaaattaatgtaaatcttatatttacatgttttaaaaaccctcagacgttaaata

SEQ ID NO: 266567 - DNA, 514 bp, Homo sapiens
tctgttaattagttatttatgctgagacaacacacataaccaggactgtcctgcacaaactggagcatatggttctctatacagaaatatacttacgatataattaacaaaagcaagaatgctgtgaaataattatgctaatgataacaaatacttttgtatttaaaagtataaataacttaaaattatgtactgagatccatggaagcttaatttcttcttcttgttactccttaactattaccttgttagcatctgcttacaagawttatcttacatattttcatggcagcagaggagagcaatttgctcctcggctgctctgtgggctttaggtggttcacatcagtgtggcttctctcatctcatccttgctttcctattcaggcatttgctacactttctctgacctggccacatgaggctttgggtatctcatagtatgtttaaaccaaaagttaaattaatgtaaatcttatatttacatgttttaaaaaccctcagacgttaaata

SEQ ID NO: 266568 - DNA, 651 bp, Homo sapiens
tttgtgaataaaactaagtaaaactgtgatctgttcagtctctggtaagcttccaagatgaatgattcagagatacctccagaattaaacactcgccagtgaatttcctctttggaggtattaaaaatggagatattcttttgaatataaaatggccttagttagctgggttaaaaaagtaaatcttttgaaaatcaaaattatgcagtagtattttctgaattaggatcaggttttacaactcaaacattaaatattttattctatttcaatgcacagttagacagattccaatagtgaagaatgtcattttcagcactagcaagaagatacttagcacatgttaatttcccaaagtaaaggttccttattttctcagctcattgacagaatgtgtatttaaactcccatgcctctgagtctcrtattgtgacgttttcctcaaaactgtcaagaagagccatcttgtgagaaacaaaagtttgttgctctatatttctggtaactttccacaaagtcacagtttctgcaaacagcttttttcatgtatcataattatctgttaacattcacacttcaaagtgctcatctctactagctgaaacagaggtggggtttttaacatttttctgtattacagaaacagaaaga

SEQ ID NO: 266569 - DNA, 541 bp, Homo sapiens
acttacattcatggcactaagggaagcaaacatgtccttttttacaagtcagcaatagagagaagaatgagaggtgagtcaaggggtaagccccttataaaaccatcaggtctcatgagaacttactcactatcccaagaacagcatgagggaaaccaaccccatgatttaattacctcccaccaggtccctmccatgacgcgtgaggataatgggaactacaattcaagatgagatttgggtggggacacagccaaatcgtatcacagagattcataaaaaataaaataaaaatacaactccacacatgataagagaattcttctgtattgtggtatatagtgttgccctgtaaacctagatacataatttgtggatagggtgtggcatctcataagcagacacacttctctgatcacgtctttaggctgcttctgacatataccaattgtttctaagttcctccaaactacaatccgtgcacaaaataaacttttctactaggctaggagtttgaagtaacaatccaacaaggccacat

SEQ ID NO: 266570 - DNA, 574 bp, Homo sapiens
aactaatttacactcccacaaacagaacataaacatcctttttttctccacaacctgtctagtatctgttattttttgactttttaataacaatcattctgagtggtgtaagatgatagctcatcatggttttgatttgcatttctctaataataagtgatgttgagctttttttcatatgattgttggctgcatgtatgtcttatttggaaaattgtatgttcacgacctttgcccactttttaatgggatctttttttctttakattttactcaaaaatcattcatgagcagatgtaattgtatggttttgagagatctccttggtattgacttctattaatatttttactgtactgtagtccaagagtatagttggcatgattctgtgttttccaaatttgttgagttttgctttatggatgaggatggggtcaattttggaatatgtgccatttgccaatgataagaatgtatattctattgttgttttcttcaagttctgcagttggtatggtaggtccatttggtcaactgtcaatttaggtcccaaatatcttgattaattttctgc

SEQ ID NO: 266571 - DNA, 568 bp, Homo sapiens
atctaacagtcaacacaggccaatgccacctacagaaacatagtgagttttgtggaatgtgtattgctggccatgttccacggtagccattcatgccccaaacccactggactctgtgcaggctgaagtcctctccctgccaacgctccaagcagctctctctgccaggttaaatgtccttggtggtcctggtgtctccttcatctcggattctgaagttctgttatgagagtgggtcactccatgcctgtgtaactcactccttcctcaggaaccactgggggccgggatcgagtccttgagctcggcaactccatggatcattcccaccttcttccgtctttagcccaaggtctgcatcmtttctccgttcactcagaatgcctttctttggaagatctgctcaaagtgtgctggttttcttaatggtttgatctgtcagtgggagaagctcttcctggctgcctctagtcagccatcttggcttttctcaaagcagatattaattttactgttgcgatttttttaaaacattttttatttttgtcattttgtacattttatcctc

SEQ ID NO: 266572 - DNA, 633 bp, Homo sapiens
aaatatttaattatatttaagtttaccgttttaattaatatattgttacttaaaattttaaggtgttttctagaacagaaaaccaaacaccacatgttctcactcataagtgggagttgaacaaggagaacacttggatacagggagggggacatcacaaatcgtgacctgttggagggtcgggggcttggggagggatagcattaggagaaataactaatgtagatgacaggttgatgggtacagcaaaccaccatgacacatgtatacctatgtaacaaacctgcacgttctgcacatgtatcwcagaacctaaagtataataaaaaattaaagtgttttatattattcataagatttacttcagtaaaaattgataaacttttaccagattatattctgaggaaaatgcttttattttattctctgaatcaaataaaaggattttatcatcatgaactacatatgtggatggtcatttattatctcattacagacttcaaatttatgtgcagtaaggaagaatattctgcatcacaattataaaccaaagtaaattatacagatgaaagtatacttagcagaaggtttatacacagagctaactctatgtaaaaacgaatacaagcactc

SEQ ID NO: 266573 - DNA, 577 bp, Homo sapiens
cttaaaattaccttttaaataagaaatatctgtaatcaggagtaaatacacaaacatcttactcgtctactgaatattgacaattttgaacctctatatctcagcattttaattctatctttttatagttccttgtaaaaccattatcctgtcattatctaatcgcctgaacaattttactgttgttcattttgagttataggcacataagatacacatcagataacagtgcaggtgctctaaacgtaaatatggaaagacccttaaatgtaaagttaacacagcagactataaatgctttttaatacaacctttcttcaaggtaatcagtcctttctatgccacatgctatggcaataaaaaacttaactggtatccctygtctagaatcttaagaaaacgtcagctgttcatcaagagcattttagtttttaccagagctgcagctgtaactcacataattcatgtggtacattggagctgtccatctggtgggtgctgaatttacggttgactaatcatctgtaatagaattcctgtctagttgttcgtgcataatactatattctaatgactc

SEQ ID NO: 266574 - DNA, 573 bp, Homo sapiens
ttttggaaacaacatcttactttgttgagggacacgactccttcagttttctgtctacatgatgcaaaagtaaacacttatttcttcaatwtcaggaataaacatgtaaactatacctggcctatcagaagattctatcctcttgtcagcgattagttcagaagtgtaaaccaagtgaagccaataaggcacactttttagatggttttgacctcaaaatgaaaggaacgttcactttttctttgtgccagaaacagaaagaatactaagctggatctgccatagttattaatactaagagatctgtccagaatagcaggcaacacagaagaaagcggtgagaaaaataataacaaagaggttcgatctgggcagtattatggaaagatggaatcagttgtactttaaaccatctctggccctggagttttagttataatagtaaaaaatattattttctctaaactagttttatctgatactcaactcttgcaaccctaaatcctgaaaattacaaaatacacaaagccaaggctcagagaataaaaaaagacactgaatcttacacacttg

SEQ ID NO: 266575 - DNA, 573 bp, Homo sapiens
ttttggaaacaacatcttactttgttgagggacacgactccttcagttttctgtctacatgatgcaaaagtaaacacttatttcttcaatatcaggaataaacatgtaaactatacctggcctatcagaagattctatcctcttgtcagcgattagttcagaagtgtaaaccaagygaagccaataaggcacactttttagatggttttgacctcaaaatgaaaggaacgttcactttttctttgtgccagaaacagaaagaatactaagctggatctgccatagttattaatactaagagatctgtccagaatagcaggcaacacagaagaaagcggtgagaaaaataataacaaagaggttcgatctgggcagtattatggaaagatggaatcagttgtactttaaaccatctctggccctggagttttagttataatagtaaaaaatattattttctctaaactagttttatctgatactcaactcttgcaaccctaaatcctgaaaattacaaaatacacaaagccaaggctcagagaataaaaaaagacactgaatcttacacacttg

SEQ ID NO: 266576 - DNA, 597 bp, Homo sapiens
ttaaggagtgttaaactcacatgatcacaagatcccacaataggccatctgcaagctgaggatgaaggaagccagcctgagtcccaaagctgaagaacttgaagcccgatgttcaagggcaggaagcattcagcaycagagaaagatgtaggctgggagggtaagccagtctaacttttcatgtttttctgcctgctttatatcctggctgagctggcagctgattagatggtacccacccagattaaggctaagtctgcctctcccagcccactaactcaaatgttaatcttctttggcaatatcctcacagacacacccaggatcaatactttgcattcttcaatccaatcaagttgatgctcagtattaaccatcacagtaacagagaagaaatataagttcagggtctttactcaacttgtgatactacatgctttaattatcttagtgatgcagcagaattggtttttctaagcaataactcatgtctaactgttttagactgtgagtatttcaagtagtcattattcatagaatttaaaatatcatcgatataaaatagccactctggatagtacataaataaaattgctg

SEQ ID NO: 266577 - DNA, 403 bp, Homo sapiens
gtcatgctaaggacaaaaatgaggaagctactcaggctgatgatgratgttttataaatgaagaaagtcctctagagacagtttttagagaaagtgcattggagatagactcctcaaaagtgactgcatttgtgtatagataaaaatgagtagttgatatcagtgaaaatacagaagtaatcacagaaaaaaagagaacacagcattagggaagctaagagaagagagagctccaggaagtagattatggtcaacagatatgaaagttgcagaaaggccaatgcatcagagattttttttaaaaaaggcactttggttatatagcgaatttgggcaacatagagtacacattttttcatttattcaaaacataccactgaaggttcatgagagtggagcaaca

SEQ ID NO: 266578 - DNA, 593 bp, Homo sapiens
gccaatgtaaaaaaagagtgacttcactgcctagagtagtaaagaagcagcaatttcccagaaacaaacaaggctacttgatgtgtttaaaagttggggccccagatagtgttagggagattctctgtgccctgcatgacacagagtagcagaatgatttctgagtgtttaagaatagaacagatgtactcagagctactaggcctaaaaggaccaagtagtcagggtcctgaagcacctctaatgtaacctgtctgggcagacaacacagaagatacgcctacctgaaatagtttagcctgcatgtaagtaatatcaatttatgtatttcaacttgatcttttccttcgagttgcaaacagcttcagttctttcaattttgactctacatgtgttcttgaaagcatttcaaaatcaggatcatgaattcccaataattttggttgctatatttactttttttttttaaccactgcatgttacttaatattagaaacaacaagaaagtctctcagcataagggatatttcagcacaacacaaccggacrgctaactaagattatgttttgacctattgaaaagaaacaatgga

SEQ ID NO: 266579 - DNA, 603 bp, Homo sapiens
ggatagtacataaataaaattgctgactctttagtaatggagggattcttaacgcttcatttgacagtaagcacttgtaaaatgcagcactgtaaaatgccattcctcaaagagaatcttatgacagttctccccaaatctacttgtacattattaaaacatgaaggtcttatcagaaatacagattcccgagtttcattacaaacctgacgaaactgaatctacaagtttaagaactaagagtctgtatttttagtaagctcttcacgtggccgcaagccagacagccctgcactgatccttttattgatttgagagaaaccagtgctctagtgtttaacaaaatgtggtctccagaacagcacartcaacattgtctagaaacttgggctataatctataacttctgaattaaaaagcttggggtggagaccagcaatatctatttcaacaagctttcatgtgattctgacacaggctaagttaagtttgacagccattgtactgaccagtgcttctcaaatattaatgcgaatatgggtcacatgaagatgttgttaaaaatgtagattttgatactgtaggtcttggctggagcccaag

SEQ ID NO: 266580 - DNA, 557 bp, Homo sapiens
ctgtagtcaagacctttaaaaatggtgtatgtgttaacttaaattgtctttgatagaccataattcccccatcctttttgaggggaaaacttttatggaagttgttactgcacagctgttatttcctctcactaataattagctcattgtaaagttcaatctgttgatactttaagccagctattttactaggtsagttacataatgccaaaatcatcaagtaacttatttattcatgtttatttttgaaggtagtgtgaaatatgtttttcctgctatcagtacaatttatttttatctttaatgactggtatttacccgcatgtttcctcacccaaactcttgttcttatgttatatcacacttattcagtacttcctagctttctgttagttgtgtgcttgtaagtattaaatgccttttttataccttagctcattctcctctattaatatggtgtacaaccttgcctataggcaaaactaggcatttgagagaggtggctgggcaggacagaataaaaagtgtacagttcatgcaggtgcaaaaatgtctga

SEQ ID NO: 266581 - DNA, 486 bp, Homo sapiens
attcacatgtgaactcaaatgttctcttctcaaagagagtctttgttcaccttatttaataatgatccctttcctctcaaagactctrcagcattattgtgttttagattcttaaatgcatttgttataatgaaaatgatctactttctttgttcgcttctttattcttcggttccctccattggaatgtaaactatatgagagcagtgacaaataaagtcttagccacactatccccagcatttagaacagtgcctgttacatagtagatggttaataaatatttgttgaaaaaaatgcatcagtgagtaaaattaaatatattcaggacatttcaatttattcagtactttacaaactactctacaaatatctgctgaggacctaagtgccaaactggtctagatactgaggatgtaacagtgcagaaatcaaaggtcttcgttcatggtacttacacttagattatagtgtgtgtaggttgag

SEQ ID NO: 266582 - DNA, 497 bp, Homo sapiens
tggaaccttgagttatctccctctggaatcatagaggggaaagaaaataaggaaaactagcgggagtggaggaaaaccaggccaagtgtaaatgaaatctacaccctggcctcccagctgggtgggtcagttcctagtcttgctctaagtggaagctgacacagggtttccttccctcaagacccatgtgacatttgagaggacaaacaaagggctccatcaggaagaggcttaaccctgttaatggctacaaatcaccagccctggagagctgggattcagagaagtgttttgccttctttttattttagacgaatcaagcttcaaagagwctgactacccaggcccccagaatttcctgatggtctgggaggaaagaagatatcttcctaaagggaaaagatagctcaaggccaaaggagaattgacacctatataagaaagcagtatgaagtggtctcagttgaagtgtgtgtgtatttgtgcgtgtgtgtgtg

SEQ ID NO: 266583 - DNA, 594 bp, Homo sapiens
gaagagattgcaacaagaaactgaaaagctgtcaggacctggccagttctcaccacattctggctttattctctcctgcttgcagattggttttctctactagttggttcaccttgtaggtacaagatgggtcaccccattattttccaggtttatatttctcttratacagtaggccagactgaaccaggatctaacttttagtcttacttctaaattctaattgccccagatatatcaggtatctcttcctgatctaataactgtggccctgaagtaagaacagggtgatagagcctgcacatggctgttgaggcctccttcctgtgtgaggggtgcaataaagaggtaagtcttaactgagaagccacattcaaaattttgtgctataactaaagtgccacaggtcagggagcactgactctcagttcctgtttgcatttcctttgtgaaggccttcccattcttcctgagagatgccgattccttatataagtctcactttacttaagctagagtgagtttctatttcttacaacaaaagagccttcactaagatttcggtagtcagagaagagatgaaagagggcattc

SEQ ID NO: 266584 - DNA, 566 bp, Homo sapiens
tatgttaggagctgtcagctctttgctgatagctrtcagcggttttgaagtcactgcatttccatcaaaatgagctgataataaatctcacgcatacagaggaaaaggctgcagtgagtttcaggtagataggaaagctgatattagatggcccgagaaggcctttgtctatggacaggcaggagaacctggaagggtattttcaggctgaaagtgagaagacttcctggtctctttctttggtttgtggagaaggctctgtgatcatggaataacacacctatcacatttgcagccttgcaagggaatgtaactgaagttctcattggggagaaacaccacacatgcaacatagctctgcaccccacatctcgtaccacttccttaccttactattggtttatatagccttcaccttgtttcagaaaagagtgaggcaatgtatatacatggatacatagtaaaactaaaaataagggggactgctcaggtgtgtatcaatgctgactctttaaaagtatctcatgctttttgacttaacaaagatattcctagaaatttatccc

SEQ ID NO: 266585 - DNA, 566 bp, Homo sapiens
tatgttaggagctgtcagctctttgctgatagctatcagcggttttgaagtcactgcatttccatcaaaatgagctgataataaatctcacgcatacagaggaaaaggctgcagtgagtttcaggtagataggaaagctgatattagatggcccgagaaggcctttgtctatggacaggcaggagaacctggaagggtattttcaggctgaaagtgagaagacttcctggtctctttctttggtttgtggagaaggctctgtgatcatggaataacacaccyatcacatttgcagccttgcaagggaatgtaactgaagttctcattggggagaaacaccacacatgcaacatagctctgcaccccacatctcgtaccacttccttaccttactattggtttatatagccttcaccttgtttcagaaaagagtgaggcaatgtatatacatggatacatagtaaaactaaaaataagggggactgctcaggtgtgtatcaatgctgactctttaaaagtatctcatgctttttgacttaacaaagatattcctagaaatttatccc

SEQ ID NO: 266586 - DNA, 559 bp, Homo sapiens
aaagaagactaatgaagcaaatacttgtggatccagcactcaggttaagataaagaacactgatagtattttagaagtgctctttgggccgttctgcaatcacatctcactactaccctcctgccaaatctctaatacatatgcaataatattaaaattatcaccttgtgataatttcattgcttttctttataatctcaccacttgtaagtatagctcaaaataataatttcacttttgcctttttaaaaatttctgtgattcacttcttattcttaatattatgttgagattttaaaatattggtgcatataactaaactttatccattttctctattctacagtatttgaatatttgaaaataccrtaatttatttatccagtctattgatagatgtttggagttgtttccagtttttgctattacatgcaatacagctattattgtacctatacaatattatacatttatgagagataatctagggtataatctagggtataatcaatcttaggaatgattgctgggctatacagcacgtggtcaactttacaag

SEQ ID NO: 266587 - DNA, 527 bp, Homo sapiens
ccacctgttcttgtcaccaccttaggatgttttccaatggagattttctttcttttcttttcccttcccttctctttccttcttcctttccttcctcctctcctttcctttttctttcctttctcccctcccctccttccctccctccctctctcccttccttccttccttctttttgtaatgttttgtgcatggagtagcaggcwtttttctcttgcagccaccgttgttcccctcccatccagacacacatgactgcatcatgaggctgatttcatttttatcagcattctctttctctctctctctttaaaccattttacaaagcataagcagaaagacttcagaaagtcagatttcaaaagtggtgcactgcctaaaaagttctctacacttcttatgctctttccttgctaggacaatattcaaagagctctataagcattcaatgagtctgtgaacaagtatttattgagcatctaggaggaatagggctatacagaatgctatgaggactacaaaaggta

SEQ ID NO: 266588 - DNA, 426 bp, Homo sapiens
tttttttttttttttttttttttgtagtctagttttgcggcttcacaaatgaggatctcaatgaccttgatctggatcatgagcatgaatgaaaatgcttttggtggtcatggtaggggctgtgtgggattttttagcttctagaatgttatttaagactcagtgattcccataccgagctgaatctcagaattacctgggccagtatagaaatraaattttcagattcttctaggcctctctgattcactagatctgggtcttgtaggtggaacctaagaatcttgtttttaatcagtttctcaagcaacctctgtatgcaaccagactcaggagccatactggcttcttctagttgctcctggtattcagtgcttggttcatgtgctataagcttctaaactcatgatgtgaaggggtcctttc

SEQ ID NO: 266589 - DNA, 681 bp, Homo sapiens
agtgggcaaatgatctgaatagacatttcccaaaagacatacaaatggccaactggtacgtgaaaaggtgctcaacatcactgatcatcagataaatacaaatcaaaactacaatgagatatcatctcaccccagttatgactttcatccaaaggatgggcaataacaaatgctggcaaggatgtggagaaaagggaaccttcatataatcttggtgggaatgtaaattagtacaaccaccatgcaaaacagtttagaggttccccaaaatctgaaaatagaacaatcatataatccggcagtcctactgctaggtatatacccaaaagaaaggaaatcagtatattgaaaaaatgtctgtactttcatatttattgcaatactattcacaatggccaagatttggaaacatcctaagtgtccatcgacagaagaatggataaagtaaaggtggtacacatatataatggagtactattsagccataaaaaggaatgagatcttgtcatttgcaacaacatggatagaactggaggtcattatgttaggtgaaataacccaggcacggcaatacaaactttgcatgttctcatttatttgtgggatcaaaattaaaacgattgaactcatcgagatggtagaatgatggttactggaggctgggatgaggtagggagagtg

SEQ ID NO: 266590 - DNA, 566 bp, Homo sapiens
acaaactttgcatgttctcatttatttgtgggatcaaaattaaaacgattgaactcatcgagatggtagaatgatggttactggaggctgggatgaggtagggagagtgggactggttaatgggtataaaagtatggttagatagaattaagatctagtatttgacagcacaatggggtaaatatagtcaacactttattgtacatttaaaaataactaagagtacaaatggatcataacacaaagaaaggataaatgcttgaggtgatggataccatatttatcctagtgtgatgattatgcattgtatgcctgtatcaaaatatttatgtaccccataaatatatacacttactatgtacctgcaaaaaaatttctaaacaaagaatcaaggatatattttaagcattagcaaaatgatcaaagagtaattttcagcctgaaagtggcaggacaggaaatctgacacaatgatgctcagggttttcggctccaccaggtgcytatatctttgccaccactgtcttggttatcactgagagatacttattaaggacttatttgtg

SEQ ID NO: 266591 - DNA, 568 bp, Homo sapiens
accacttattaactatcgtgacctagggctggtgacttgttgtctctgtgcctcagtttcctcatttgtaaaatggaggtaatagtacttaactcatggagcggttgtgaggattgaactaaacaactcatgtaaagtgctcagtagcgtccaggtgcatggtcagctttcagtaaagagtgatcattattgctattattgtgataaacccttgcttttggaaaagcttgtatatgagaaaaaggccctggggtgacaattcggttgaaggcatatgctaccccaatagacctttcctaattcttttttctccagcttacctcctyttaaatgtagaatcttttgaatatgatgaaagtccacacactaacaaagccactgctgccagcaaggtcacccaaggagaagcagccttgtcctctgggcgtgcagaattgcatgcatttatgcagacactctagaggcttgtacggctgtgctgaacctccatgtaggtttgtctcactgcctcattccaatccaggcagagggagtctgttaaattcacaactcagcttagaagggtcat

SEQ ID NO: 266592 - DNA, 545 bp, Homo sapiens
caatgagctgcttaggtctacaaacacagggactcacacttgtatttcaatgcttcatggttatcccagggtagggatgagcttggtagagggcaggaacatcagtgggacttaagggtgacagccagccacctatccctgaccttctttattacgacaattctctttgatatacaccattcatactaccaggtagctcatattgtaagttttaatttcacttttatttgtgtgattcttgattactgtctatatcttccaatccatgtctgcttttactcatcattgattcccagtacctcatacactgcctgccacctatagtgggtattcaaataagtattttttaattgattaattaatgaatgaaaagaagttctggaagtgtgagaaattgaaaaagtgcttcggaagtagttgagtgctgcctttcctgactctgctgattaagtatgtgacagataccayaattatcagcattccagataagaatccagagaatgctatctttggcagtgtcagaaatgcaagctttgttcctcttc

SEQ ID NO: 266593 - DNA, 592 bp, Homo sapiens
gagtgggctgccactgcctgtggtatagtgtggaagacaaagaatggacatggattgaaaagacctggattcaactctgcctttgtgaccctttgacaagccacctcagttctccaggcctcatttcctctttagtaaaatgagaggattagactagatgagctctrtggacacttccaaatcaaatattctgatattgtgtctcctgctcccatcccctgtcctttgtcctcacgtgggctggaatgtgaggtacaaatgctgccagtcactggataaggactcttaaaagtcatctgctcactttcttccaccaggaagaattataataaaaattagcctgtttgcttaagttttatggatttgttttatagatcctagagattttcctaatgtaggtctctaactaaaatgcctccagttggatttaatgcccattttctcttgccctgttgattatatggctgtctggatgttcataggaaaacttgagacaaaatcacaattgcaataggatgaagaacatttcccaaaggaatgggatccagattgctcactgtctatttatgagttcactttttttttttttttg

SEQ ID NO: 266594 - DNA, 529 bp, Homo sapiens
tccatatccatctggagattctcctttcatagctgacccttaaaagcttggactttgattagaagaggcaatcgttccctaacacagtaagtctgtacccctcttctgcatcctagtaggtaattgtgacttttcagacatagcttttttttttttttttttttgagacagagtttcactcttgttgcccaggctggagtgcaatggcatgatctgggctcaccacaacctccgactcctgggttcaagcgattttcctgcctcagccgcccgagtagctgggattacaagtgtgtgccaccatgcccggctaattttgtattttcagtagagacagggtttccaccatgttggccaggctggtcttgaactcccgacctcaggtgatctgcctgcctcaacctcccawagtgctgggattacaggcgtgagccaccgtgcccggcccagacatagcatttttaagcttagcttttatgaagacacaggtgcactaaagtcatccttttctgacatcatcaaccaccat

SEQ ID NO: 266595 - DNA, 566 bp, Homo sapiens
atactcccactcctagtgtcctgttcagacaagatggtccttggaaaaactgttagaactccctgtgctacacctttataaagcacagttctttccattcaygttcatagagccatttctctcaaagcgggcacatagcaacagcaagtgctaggctgggaaggatttcaccctcaactgcctactaagcctagcactttcttccaacccttcactttcttaaatgcaaaaattagtttggaagaaaatgtgtatcaaattgtactactataacagacactgtgatatggcatccatgtcctccctcaggaatgaaggacttactactgcttattatccctgtttggattgccttggctgaaaagagccacctcactcaagccgatgcacccttgctggcacagagcccatttaatgactagtagtagtggtagtagtggggtataaagtcccagctttcccaccgtaactccagaccactctaaagggttaccccaacttcaaaactttccgtaatgtatctgctctgcaaaggcttcatcacagcccagcttctgcctctgacc

SEQ ID NO: 266596 - DNA, 424 bp, Homo sapiens
ttctctcaaagcgggcacatagcaacagcaagtgctaggctgggaaggatttcaccctcaactgcctactaagcctarcactttcttccaacccttcactttcttaaatgcaaaaattagtttggaagaaaatgtgtatcaaattgtactactataacagacactgtgatatggcatccatgtcctccctcaggaatgaaggacttactactgcttattatccctgtttggattgccttggctgaaaagagccacctcactcaagccgatgcacccttgctggcacagagcccatttaatgactagtagtagtggtagtagtggggtataaagtcccagctttcccaccgtaactccagaccactctaaagggttaccccaacttcaaaactttccgtaatgtatctgctctgcaaaggcttca

SEQ ID NO: 266597 - DNA, 640 bp, Homo sapiens
cctgtaattctagccctgctctttttcctgggttctcttaaatgggctttagaatgtgccgcgtaaacctatgaactattctcttcctcttgacacctccatgttctccatggtatctgtcgtgcacatcatggcactcaggagkctgctctgaagatcagactcccaggtaaggatgcggctccagttgctctatattcccaatcattgtgccaaagttcagagaaatcaccttcagtcagggagctgccttatattctctattttgtcatattttccaaaaattttccacaaactatagaagttaggtttaaataggagagaggatttctttatgttcagttggtattctttggttcattacagagcctcctacctgctataccacaaaatgaattcaccagacactggacgaaaagacatatgaagtgacacaggcctcatactgaaaacacattttttgaaatcgtctttatatataaaaccttaggaaatttttagatataatttttagtttaccacattcacattgtttatttagttagctttcatttttgtcattaatttctagttttatcacaccatattcaaagaacatagtctagatgaagctgagcctttgaattaaacttcctctttt

SEQ ID NO: 266598 - DNA, 458 bp, Homo sapiens
tctgaacactctgtggtttcccttttcttaagtgactcagacctaattaggccaagcctaaaggagtttctttgctcttctctgactcttccctctgcctaagttaatccttaatcttaccagagtggaaaggaaagccccaaataaggggcaagtacaacctgggcagagaaagacagatggcaatggagtctgcctagtgaaaagcaggcacgsgctaggacagctgtcctgggcccttagagaggaccccagagagggtcagctcaccactcctagtacctggagaaataaacaaagtgaagtgaagcccaccccaatatactccccgcatacaacccaaatggcatcctgggtctgacttcctatcacaaaggctgaaacaggtaaaggtgtagaatagtgacacctgtgtttcctatgccgtgcagctcaaaaactgtatattgaacaccaac

SEQ ID NO: 266599 - DNA, 458 bp, Homo sapiens
tctgaacactctgtggtttcccttttcttaagtgactcagacctaattaggccaagcctaaaggagtttctttgctcttctctgactcttccctctgcctaagttaatccttaatcttaccagagtggaaaggaaagccccaaataaggggcaagtacaacctgggcagagaaagacagatggcaatggagtctgcctagtgaaaagcaggcacgggctaggacagctgtcctgggcccttagagaggaccccagagagggtcagctcaccactcctagtacctggagaaataaacaaagtgaagtgaagcccaccccmatatactccccgcatacaacccaaatggcatcctgggtctgacttcctatcacaaaggctgaaacaggtaaaggtgtagaatagtgacacctgtgtttcctatgccgtgcagctcaaaaactgtatattgaacaccaac

SEQ ID NO: 266600 - DNA, 634 bp, Homo sapiens
ttcagaaattggaaggcaatttaaacatttctacagttttactaaagtttgaaaaattccagtaaaagaataagattttctttatctctgcatatctgacattttccctgtactctcagggactagaaggccctagataagaggatatttaaggaaaagtgagcagttatcaacaagtaaggaaamgaatctattaaagaaatactcacgtgatttcttcagccccttcaggttccatgccaaaagacccaaggaaactagaactgtgtaggaaaataccagcatacaaaatctggtctagccctggataaatcaccaggctgggttaattgacaaacacagaagtcacattcaacctataaaggccaaatacattgtaccaatctcaaagccaagctaccttccattggggtcgatgccatcacaagctaaaggcactgttcacaatgaacttaagtcttttttgataagcccccttccccattcctagaatcataaacattgacagtgacccctattttgcaaaccgtataatggttactcctccttcccatgctgaaatgtgtaattctccccaaccattgtatctcatagaaatcactaactaaacctccatcatcagatttaaaaccaa

SEQ ID NO: 266601 - DNA, 634 bp, Homo sapiens
ttcagaaattggaaggcaatttaaacatttctacagttttactaaagtttgaaaaattccagtaaaagaataagattttctttatctctgcatatctgacattttccctgtactctcagggactagaaggccctagataagaggatatttaaggaaaagtgagcagttatcaacaagtaaggaaacgaatctattaaagaaatactcacgtgatttcttcagccccttcaggttccatgccaaaagacccaaggaaactagaactgtgtaggaaaataccagcatacaaaatctggtctagccctggataaatcaccaggctgggttaattgacaaacacagaagtcacattcaacctataaaggccaaatacattgtaccaatctcaaagccaagctaccttccattggggtcgatgccatcacaagctaaaggcactgttcacaatgaacttaagtcttttttgataagcccccttccccattcctagaatcataaacattgacagtgrcccctattttgcaaaccgtataatggttactcctccttcccatgctgaaatgtgtaattctccccaaccattgtatctcatagaaatcactaactaaacctccatcatcagatttaaaaccaa

SEQ ID NO: 266602 - DNA, 562 bp, Homo sapiens
tgccctgggtgcactcatttcatcttgggaaaaaattgaaatcagatattgctaaactatcaccttggtcataagttrgttattaaaaaatctctaggtacctaaatgagttactgtaccagataattgactacagtgtgttctagtcaaataataatattcaaactaacacatttgagtttactatgtgctgcactaagtatgccacacatattaacttgtttaactctcagaacaatcacatgaggcagatactattaccatccccattttatagatgagtcatacgattagtaagtggtagaactgggactcaaacccatgtggactggctcccaagtgtaaatgttagtgagatgcctacccaaaacagtgactttcttttcaaatagttcacctgtatgtagcccttctttgtggcagtaaccttatagttggccactgtattacaaataatgaaataatatgatttgaatgtgtttctccttctgtattccatgacaaggcacatattaatccctgttaagagtggtaccaatacacaaagtaaaaactggtggca

SEQ ID NO: 266603 - DNA, 562 bp, Homo sapiens
tgccctgggtgcactcatttcatcttgggaaaaaattgaaatcagatattgctaaactatcaccttggtcataagttagttattaaaaaatctctaggtacctaaatgagttactgtaccagataattgactacagtgtgttctagtcaaataataatattcaaactaacacatttgartttactatgtgctgcactaagtatgccacacatattaacttgtttaactctcagaacaatcacatgaggcagatactattaccatccccattttatagatgagtcatacgattagtaagtggtagaactgggactcaaacccatgtggactggctcccaagtgtaaatgttagtgagatgcctacccaaaacagtgactttcttttcaaatagttcacctgtatgtagcccttctttgtggcagtaaccttatagttggccactgtattacaaataatgaaataatatgatttgaatgtgtttctccttctgtattccatgacaaggcacatattaatccctgttaagagtggtaccaatacacaaagtaaaaactggtggca

SEQ ID NO: 266604 - DNA, 562 bp, Homo sapiens
tgccctgggtgcactcatttcatcttgggaaaaaattgaaatcagatattgctaaactatcaccttggtcataagttagttattaaaaaatctctaggtacctaaatgagttactgtaccagataattgactacagtgtgttctagtcaaataataatattcaaactaacacatttgagtttactrtgtgctgcactaagtatgccacacatattaacttgtttaactctcagaacaatcacatgaggcagatactattaccatccccattttatagatgagtcatacgattagtaagtggtagaactgggactcaaacccatgtggactggctcccaagtgtaaatgttagtgagatgcctacccaaaacagtgactttcttttcaaatagttcacctgtatgtagcccttctttgtggcagtaaccttatagttggccactgtattacaaataatgaaataatatgatttgaatgtgtttctccttctgtattccatgacaaggcacatattaatccctgttaagagtggtaccaatacacaaagtaaaaactggtggca

SEQ ID NO: 266605 - DNA, 562 bp, Homo sapiens
tgccctgggtgcactcatttcatcttgggaaaaaattgaaatcagatattgctaaactatcaccttggtcataagttagttattaaaaaatctctaggtacctaaatgagttactgtaccagataattgactacagtgtgttctagtcaaataataatattcaaactaacacatttgagtttactatgtgctgcactaagtatgccacacatattaacttgtttaactctcagaacaatcacatgaggcagatactattaccatccccattttatagatgagtcatacgattagtaagtggtagaactgggactcaaacccatgtggactggctcccaagtgtaaatgttagtgagatgcctacccaaaacagtgactttcttttcaaatagttcacctgtatgtagcccttctttgtggcagkaaccttatagttggccactgtattacaaataatgaaataatatgatttgaatgtgtttctccttctgtattccatgacaaggcacatattaatccctgttaagagtggtaccaatacacaaagtaaaaactggtggca

SEQ ID NO: 266606 - DNA, 542 bp, Homo sapiens
tacatgttttcaagcacacaaatcaacaccagaaaccactcatccaataaaggctattggaatggattcaagaccttcctgcaaggtgagataaccatgccttacactcacagtttcctgaaggctttaaaatacatgacttcggttgatcgttattataatggtatgagacacatgtggcctgtagaattattactactaycatatcaccattcttattttacagatgagaaagctaaggtgtagagaaagcaaatgacttacccaaggccatgtgctgaagctggaatttggttctcatagaccctctcctctgtgagcaaaatgctgtctgatttgttctgtgcttttgagggcagatttaaaatggttgatacaccctgcagaaagtgggcaatgaatagctttgttatactttgtttataacaattacatgaaggaaactgtttcaacaacttctactccaattttggactctagctaagtttgtattatatatttagtcccacttctatttgcaagcagacttaaattggcataag

SEQ ID NO: 266607 - DNA, 523 bp, Homo sapiens
gaataaataaatactcaaggcccacagctttccagccattttgcttctcacatatatgctctggctcttttctaactctcaaggaaagcagaaccctgcaaagagatctaggatgtaaactcagagaccaacctcattctccttaatcccacacccatctcctgccagtccacagtcctggggcctgttacccaagaggacagagcttccgtgctttggcaggggaatgtgatctcagtccctttttggaggctacccctggggtggatggtggggtgatgtgaaaaggcatggagggcaactcaggaacaaccgctgctgttgtcctcccagcccaagctggcccatgcgtagcctggggccrtggcccagaatcagccttgctgcctggtttctcagggtcacttctattcaggaagaatttcccccagctccttccaggtggtcgtgccagtgccggtcacttcaggggaacagagatgcaagacacggaaaagggctataaaagatgatggggtaagtg

SEQ ID NO: 266608 - DNA, 515 bp, Homo sapiens
atgacagtttttttctcttttggtttcctccagatcaagcttgcctcagtttccctatgtcactcccacactctactattcaataaatctaattccttcttttaaactgaaaggagtgaaaggtgaatgcaggtcatctaagaatctgccagactttctacttaattcagacagaacacttttggtgaggatcccaaagggctaaggtagaggctagaaatatagtttgtgatccttgctttctggagttcacaatctaactggggaaataatcttcccctcgtgtgaggagctgaaaacaggggagttaataccaatcccagatgacacaaagcaggttgtagataaatgtctagtgaaaggcatagagattgcacattatacagttcagaagagccagytcagaaggagagagttttccatggagaccatgtgaattttgacatagatggcatccagttatgctcctgtggtcagaatgaaaccaccttctatttgcatggtaccgtaaagca

SEQ ID NO: 266609 - DNA, 594 bp, Homo sapiens
catgggcttgtagagaaccctttttcccctaaagcaagggtcctttgccttccatctggaaatgaaatcaaaagcctattagcagggataaaaggggaatgatgttgcataagcagtagatggtgtctgccatgtaattaggtttttaagtttatgtggtggatatttggatatttttgtagttatttactattttttaaggatagggataatgtaattcagtttacatcatggaacacccaatgatgactctgtggctttaaacttgggtgactgggaagtcatttactgagatagagactgtcaatgtgagatgcggagcaagatttacgagggaaagtcaggacttacagtttgcttatgttaagttagaaatgctctgggacatcaaattgagaaaccagtagattgttcagattatagatctgtagctaaagagatttagtggattcraaactgagactagactcctttggcgtggttagaacagtaagactggatgagtctaaactaggagagcaggaaattcagatgacaccctggggaaatccacacatttcaaagtgtgggtaaatacatagaaatgaaacagtt

SEQ ID NO: 266610 - DNA, 563 bp, Homo sapiens
agcaaagctgctctttaaaggaagtccctatttcaatattactaataaaatcaaactcaccaaccattgtagaagaattmatttcatgacttggttctgtagactatgaaaactgtctaaagtctgtcccaaaagagtgtctcttagagagaagccaaagggaaacccacctgttcaggaagtttgggaaataaaaatcctatcaaaggctggatgtggtggctcatgcctaaaatcctgtcaaaggctgggtatggtggcttatgcctataatcccagcactttgggaggccaaggtgggcgatcatttgaggctgagagctcgagaccagcctggcaaacatggcaaaaccctgtctctactaaaaatacaaaaattagctgggcttggtggtatgtgcctgtaatctcaactacttgggaggctgaggcatgagacttgcttgaacccaggagtcagaggttgcagtgagccaagatcatgccactgcactccagcctgggtgacagagtaagactctgtcttaaaaagtcatataaaacagatgaaataaagattctgt

SEQ ID NO: 266611 - DNA, 559 bp, Homo sapiens
tgaactcatatggaattagagctctgataagagctacaagaagagatgatagatataatgaaaagatataatagatgattttttttaaggagggaagtcgagaaatcttgattagtgattcaaaaatggcaaaggggagggtgagggtggattagattagttttgcgggcagagggaaatatttgtgcaatgcccatggcaagttggaagaggggaagatctgcgcagctggagtgaagagagaaagggataaaaggcactaactgagggtgaagagacagagctggtcagatatacggggcctccttctgaaaagaatttcattgctcagtttgagarcaaagaaaagcagctgaatgtttatgtagggatacatggaaaacacacacacacatgattaagatttgtaaaagatcactctggttgcagtacagaggaggaattgaggctctagtcttataagttttcctctgagaagggaagtgtctggaaactaggggttttgatggttgattccagactttccataacagagtaatgtagatcccatagtctacat

SEQ ID NO: 266612 - DNA, 617 bp, Homo sapiens
agagcctgtgcccatctagagcctctatcctcttttacagacttctccatatgcagcttggacctaagaactcgctgcatttctggccccaagctgacttccaggtcctgggctgtcttctttccttgagtttgtcctacgaaaagctgatgctgaatgtgctatgtccacatctaggcctaagaaatggcaagaggaaagctgtttgcagggatggtgaacaagagaggcaggacaaaaagtaagggtctctatttatgctcttacaaaaggcctcataatcaggtaggctcatgtaagaagagtatgaacggcatcacttgggactggagttgactatagcttactgtcttggatccatcctatcctcggtttgttcattcagattacaagtattataatacctataattttccagaagacttaaagatttaaaattatgtagcagctgttctctgattttagtaggtttgcaatctagtaggagagatgacatatcttacagggactgrgagtcaattaaagaattttgagcaagaatatgacaagaagtaaaggcagcgatctatagggcagattggaacagccatagtttagaaggtgaggtttcaggccag

SEQ ID NO: 266613 - DNA, 567 bp, Homo sapiens
agaacagaagaagggtggttttacatacaaaatatccttaggtgctgccagcagtgtgaacaatcagacagccgaaatacagaagaaatgatgccaagctctaggagaagcaacaatgttatatacagaataaagaaaccatgcctataatttgagtggcccatttatgagatattcaagagaatttggctttataagaggaatttgaatctctgattactaaagccatggcaagaaagtagaccaattatctattggatgcaaggaattcaaattaacttttccttctataggaaaagaaaatgtgaaactctatcaatgtctctaccatttmtgttttcatgtattttttaagtggtgatgtcagaataaccctttgaacaataggatagaaagagaatgactgaaaagtcaaagcagtactctgtgaatagacattttataggttgggaagatgtaatgtagaacatttttatgtatcctcaacactgagttaatactcataggaaattacaattaggcatttgtggaacaaaatcgaagttcctgttgcatgggctattacca

SEQ ID NO: 266614 - DNA, 595 bp, Homo sapiens
gtagcgcataaatttataccagcaatttggaaaccaagtgcagaaagttcacacctctggacactttgatctggggagtcccagtcatagcaccgcacagccacaacattgtacagaatcatctttggggttatgagcccctgggtaccagttcatacttagccctaattaactctgaggctttgggcaaattactttcctctatttgcttaactgtaaatgaggaatttagactcaatgatcttctactaggattctactaagtaccagaatgaattctatattagatgttcctgttcttgactgcatattagaaatgggatctttcaaaaaatattcatgcctaggccacaattaaaaycaggattaagagacactgttttatattacggaaagtttttagcaacacttaacatatttttggttattaattttgtagactggctagatcttgtgattccactgttttccctaatttaaaatgaaagcattttatttgtcctgtttgccccaagagaaagaaaagaaaagtagaagtaaataaataaataggagctaatctattttatatttattagaattatttgggagaaaa

SEQ ID NO: 266615 - DNA, 480 bp, Homo sapiens
tttcatcttcgacctaaccaatcagcactgttgacttactggctgcccaccacccaccaagttatcctgaaaaacccctatccctgaatgcttggagagactgatctgagtaataataaaactctgttctcctacacagctggctctgcattaattattctttctctgttgcaattcccctgtcttgataaataggctctgtctaggcagtgggcactgtgaaccagttgtgtggttacatttgcacaacagtatgactgcatttactgccactgaactctacacttaaaaatagttgaaattgtaaatgtcatatatattttataataaaaatgtttatgtagttattgatttgagttgcagggttggtgtaaatgactatgaagcagtaacacagatcttaaacaytgatgctttttaaaagtacagatcttctcaacttcaacactaattgcaaaatagtatcctggactttgaatt

SEQ ID NO: 266616 - DNA, 519 bp, Homo sapiens
taggttccataacctaatagatgtgaacagcagagcataagacatgagaacacatagggagaacgtgctctggaatcagagagatctcagttccaatcctatcatgatcttgaaccactacttaacctgtttgttcatctataaggaggagatatttgtaggactgattatgaaaatcaaacgagacaatgagtctgtgcatttaaaaccattagcagaattcctgccacttggaagggcctcaaaatgtatacctattaatattttactttctctaaaacactgagtttattcctgctcccaggaatgcttgtgttcctgttgaagcatggaagtcaatagcccaaaatacagcactgtgacatgctggcctaaagaagcagtctcgaggtctctctcacctccccscctcactcctcctttctctcaatcccctctctctttgaaagcacagaattgagttgttatctgaagtttccttactgcctaaagcccagacctaccaaagaagaaaacaat

SEQ ID NO: 266617 - DNA, 600 bp, Homo sapiens
agcacatgatttaacatttactgtcaacataacatgatacatataatacagaaatatagaatgatatgtgcaggctactaaaataaaaaagaatcattttattaaaaacatactgatttttacaytgcaactatctgggtgaattgttactcttgggctccagctaaagcctctatttcacctataatagcatgatcacaataaactatagctgcctctatgcctctgtgtttcctcccctggaatgcttactccatgccagccctgcctgtctttatcccctgtagatacccactgtctatccaagggcctggagtacagcaggaactttaaaatatgtgttgaatgaatggcctcaaaatatgaggcacatggaatccctagtgggtcttataatgccatgagttgactaacccttgcccgtccttccaacttcatcttttgtgcctttcttccaggttcactctgttccagccacctctggcttccttcctattcctaactgccaagcatgctgtaatctcagaccttgtactaactcttccctctgtctggaatgtgcttcccccagcgatgtacatggcttgcttcattacttct

SEQ ID NO: 266618 - DNA, 631 bp, Homo sapiens
catttccaaggctcacacctgatatgcaagtatttatcatgcctctgtttgcttcatatttgctaatttcccattggccaagcaaatcatatggccaaagccagagtggacgtggaagagactatactaggataccagaaggtgaaattcactaggggtcactaaagtagctgtcacaggtttcttctattttctaaaataaaccattattatctgttaaatgtgagttgggaaagaaatatgaaaagtaagacccgttatgggaattggaaaatcataatattttgggccagtgctgtgtgactgcatgggctgtagtcatatctataatggataatagcctgagtcttctattactttaattttctgtaatattattcagctgctctccattgcacacaggaaactagaacatcactaaataaaaatttcctcttattttcaccacccaataaaactcaaaccaaaatttacagccggttcttcattttcccttctttggttgcattggaaaaagctccaatctcatcaaaggcyctgatgggctttatttcttattatttgacagcttatcaggggctttcctcctttggttatctcctctctcactcatcagtgtttctttcttctc

SEQ ID NO: 266619 - DNA, 631 bp, Homo sapiens
catttccaaggctcacacctgatatgcaagtatttatcatgcctctgtttgcttcatatttgctaatttcccattggccaagcaaatcatatggccaaagccagagtggacgtggaagagactatactaggataccagaaggtgaaattcactaggggtcactaaagtagctgtcacaggtttcttctattttctaaaataaaccattattatctgttaaatgtgagttgggaaagaaatatgaaaagtaagacccgttatgggaattggaaaatcataatattttgggccagtgctgtgtgactgcatgggctgtagtcatatctataatggataatagcctgagtcttctattactttaattttctgtaatattattcagctgctctccattgcacacaggaaactagaacatcactaaataaaaatttcctcttattttcaccacccaataaaactcaaaccaaaatttacagccggttcttcattttcccttctttggttgcattggaaaaagctccaatctcatcaaaggccctgatgggctttatttcttattatttgacagcttatcaggggcwttcctcctttggttatctcctctctcactcatcagtgtttctttcttctc

SEQ ID NO: 266620 - DNA, 567 bp, Homo sapiens
ccccaggccactgacctcaagcttgaccataagattggttttagtcagtggagagtgatggaaagattataagccacatctgagcagaagccaggagagacatataagttagttggtgtttttccttctctgccaggagaaaaagtcccaatggggctacatcctggggtgaagaatatatgtgaaacagagccacagttgatgtgcattcatacaagcaagaaacaaacctatatcattaaaaaacattagggattggggattgtttgttactgcaggataacctaataagatttggctaataggttgtatgttttctcattcgtgatattttgcttagtatttacctcttcctgattgcttctaattgatatatctactcattaatggccctaactattgttcttaatatttctgggggggttctggattagctacatyagaaacatctggatatagttttaaaaacacaaattcatcttctacacccacagagattctgattcaacaggtatgattcaatcattgcccttcatatggagtctgggaatctgtatatttaaaaaa

SEQ ID NO: 266621 - DNA, 571 bp, Homo sapiens
ttttgttatggtagcctgagcaaactaaaacactcaccaaggaaaactcaccaagggtctcaacggttgtgtaagctccccaatgccagtcagaggtgggtgacaggaggaaccaggacatgaatgcaagtctatctaaacaaacagcctttccagagagggttcactttgttttctttttgttttgttttgttttgttcgggttattttaaggaggattacttatgttattaaaaacaacagaattttcttttcagaaaatgtgaagactatataaacaggaagagtggtataatgagatgtggaaatggaaatctaggtagtacatcttatacacaactcatctcctgagacacttcaatagacagtcataaagaagcctgtagtagttttcagctgggacacatactagatcagtactcctgcacagtagtggkttatccaaaccacagttactaagatatatttattggtaacattgaaacaagacagaaaacaaagaatgtgacttttctaaaactggcttcagcagtttactctgaaatttttttggattgattttttataaaag

SEQ ID NO: 266622 - DNA, 549 bp, Homo sapiens
aatctcgagtagttctttgtagcagagtgaaaatggactgatatgagggttaaacatttcttttaaaaaatatttcttgtttgagggaataaataaagttttctacttttaaaatttggtttggttattaatttctatgattcatggcacctgatttattaaaatgaaatggcccatttgtgacctacatcttctaaaaaatcaaatcaaaatcataatgaatatatcaaaaaatgcaaaagaaagatgaaaatgataggtagtaaattattttcatttaagtctccaaagttcatcacaaaaatatttgtacctgacctgcttaccatttacacaaamatttttagcaatagcatatgagttgatcacttcttacatgcctcatgtcattcacctctctgcacaaaatttttaaaaaatattaataatgaccaactaaaaaaagtactagagctacagactatcaggtgtcctaatttaatcatagataaacataacaatgtcccatcaaccaggaaaaaacacttcctataacaatgaatgtgaagg

SEQ ID NO: 266623 - DNA, 551 bp, Homo sapiens
ggaggtgtgagcagccaaaataaatataggctagggtgggaggagaaaaacaagcgttttgttttttatgttttaaaaatatattctgtgcacctgagttgggtttttgctttatttcatttttcttccctttttcaaattacatataggtaggggcaaatttgggctaatcaataaacaactttcttttccctctcctaagactgttttttttagagttgccatcacaaccgaagattctatgttgttaaaatctcttagtgatagtctcaggttaatacattagaaggtaatgactgcttatagaaacaacagagcagcaaatccataacatgtttgatttttacccctcaccagtacctccagatgtgtgacccatccatctagttwtcaatggtaaatgtgcaactaacagatctggtccctgtgccaaccaatgcctaagtaggctttcctgaacacacagaagggggatcactgccttgtcagcctgtctaagcccgattagctctcctcctcttcttctgcccagtaaaaacaagagtccaact

SEQ ID NO: 266624 - DNA, 582 bp, Homo sapiens
cctctctttaggccatgacacttcaagaagtagaagagtcttatgtatagaaatgaggaatgttttaattttagattccaaagtaccgtagataataacatatgttaatcttaaaagcacttgtcatgttttaagtaaaaataagtctcttaaagatgttccatagaatttattctggccttaataagcattatatttctgtcctgcctctttagaaactcagaaatgaagaaaaggaactttgatagaggttaaaaaaatctctctacttccctctgtaacctccttcctttattataattaagcatcacattaatgggcagcaatattaacctcaaactcttggcaatagcacttcgtgataaataagttgtgtgcttgtttttcaagcataactmcctagccatgattaccctaagctctaacattcataaaaatcttaaattatcatggtgtttgatagagatgaccataaaatccattcaatagatttgtgcaactctataattatgtccactgataattatagctttttttttcttgactttttctttttatttactgtctggatttggaagtata

SEQ ID NO: 266625 - DNA, 554 bp, Homo sapiens
cttgtgctgcctactgaacatccccctggcccatcctaccagaaggatccctgctccagcagaatggccttttctaggtatcaggaccagctaggctgagctgtgctcatggaaattggccatctagagagccactagtaacacctcttcctgtttgacaaggaatatgcctcaactcaaagtcagacttttaagagagaggcataattagttacatctgctttgacttttggcaggtgtaacttgtcatacaattcatcatattcacacgctctccccagccccattggccttgagtacaaatggctggtcacattcacttacccccagattcatgaaagcaggcattctatctccttgctcaccattctagtcactaacacacatttgttttacaaaggaaaaatgagtaatggaagtaagtccactttggagatagcctaataraaggattagttaaaaaaaattgtggacatatttcacttttgcttcccagggatgcattctcctttatctttgcaatggaaattcctgtagggaatcttttttttttc

SEQ ID NO: 266626 - DNA, 517 bp, Homo sapiens
ccaaactgttcaggtatatcaactactaaattccattttgttaaagccaattatatttgggtttcctgacaaatgtattgagaaaagtcctaaatgaaccagtataataatctgcagacagtagttactaaataagagttattggctracttttatcagaaaatgcatctggtgtcagggatagactcaggatgatacaacacaggaaacaaatgcatgcagctttattatttgaagaaatccctcctatttaacactatgaataaaaataattaactgctttatatatttgccccatatatagtttttaaatcaggcagtatacttggatatgaaaacttggcttcagtaaaattaaactgtgttcatattttcttcaaattgtttactcaccattacccttaatgtcttccctgagccacacatgctcattcaaaaccataatttgtggatttcttgccttaggctcaaacactcattttcaccacttcatatcctcaatgatatctattttcta

SEQ ID NO: 266627 - DNA, 517 bp, Homo sapiens
ccaaactgttcaggtatatcaactactaaattccattttgttaaagccaattatatttgggtttcctgacaaatgtattgagaaaagtcctaaatgaaccagtataataatctgcagacagtagttactaaataagagttattggctgacttttatcagaaaatgcatctggtgtcagggatagactcaggatgatacaacacaggaaacaaatgcatgcmgctttattatttgaagaaatccctcctatttaacactatgaataaaaataattaactgctttatatatttgccccatatatagtttttaaatcaggcagtatacttggatatgaaaacttggcttcagtaaaattaaactgtgttcatattttcttcaaattgtttactcaccattacccttaatgtcttccctgagccacacatgctcattcaaaaccataatttgtggatttcttgccttaggctcaaacactcattttcaccacttcatatcctcaatgatatctattttcta

SEQ ID NO: 266628 - DNA, 622 bp, Homo sapiens
tatttccaaataaaactcatttttccaggcaaattacttgttttttatggcctattaataacaagtggtaattgtggaaacatttatggcttaagaaaagacaattttgacaacagcaactaactcatgttctccagttattgagggctattggtttatgcttgctatgcatggcccatctgcagggaaacattggagaggtgggtatgagccagggatgggattagagccagaagcaaacagtaataagctattatcctgggtgaagcaggcatgcagttattcatcccatcccttcaattctcactgaggactctattagatactgagtaccaatrtgaaagatgtagtctttagtctaaagcttgtgatccaacgggggcaacaagatatataaacaacaactgtgacaagtcacatcagagcacaagacatgtgccatggaaggcatagggtggcccatcaatgacacaacgttttaatgtaattttttttttgcttaagttgcatatatggggggcggctctatatctcataggtacccccagcagctaccatatacacagctaccgtaccaagggcttatgactgctggaattaaaaccaaggcacccacatgtca

SEQ ID NO: 266629 - DNA, 333 bp, Homo sapiens
ttgccttaacacaaagaagaaaagtgaaggcaagaatagagccatgatgttggttagggaaaagtgtggaaaagtattatatgcttctgtttcctgtcctaatcccaagactgctaagttgtgggcactctctgtgctagggatgacatagattagacgattgccaagtgtcttcctggtgaacctgtaagaagggtaatctatgtcactaaaaagaacagtaggagaaaaaataattcttagcattgctrtgtaaggaactttaaatgcattatctcatttaatcttcacagggacacaataatagcaattattatctttgtttacaaatat

SEQ ID NO: 266630 - DNA, 590 bp, Homo sapiens
tctgtgatccaaatacctcctatgaggccacacattcaacactgggaattacatctcaacatgagatttagaggggagattcaaactaaatcaatgtatcctggcagaggaatgtgtgctctgctgacataatatcttttatagcaacttttttttttttttagacagggtctcactgtgtcacccaggctggagcgcagtgacaccatctcagctcactgcagccttacctcccagtttcaaggatcctcctgccacagccccaacaaatagctgggactacaggtgtgtgctacaccacctggctaatttttgtatttgttgtaaagataggggtcttgccatgttgcccaggctggtctcaaactcctragcttaagagatctgcctacctctgcctcccaaagtgctaggattataagtgtgagctaccacacctggcacatagcaacttttatgtttttttaaaaagtctgtttaaaatgcattgccaaagcctacgttagtgaatagtgatgttgccattcactgcctcagcaagaagcatggctgatacaggatcatgaactggagctttgcttagtcatgtt

SEQ ID NO: 266631 - DNA, 590 bp, Homo sapiens
tctgtgatccaaatacctcctatgaggccacacattcaacactgggaattacatctcaacatgagatttagaggggagattcaaactaaatcaatgtatcctggcagaggaatgtgtgctctgctgacataatatcttttatagcaacttttttttttttttagacagggtctcactgtgtcacccaggctggagcgcagtgacaccatctcagctcactgcagccttacctcccagtttcaaggatcctcctgccacagccccaacaaatagctgggactacaggtgtgtgctacaccacctggctaatttttgtatttgttgtaaagataggggtcttgccatgttgcccaggctggtctcaaactcctaagcttaagagatctgcctacctctgcctcccaaagtgctaggattataagtgtgagctaccacacctggcayatagcaacttttatgtttttttaaaaagtctgtttaaaatgcattgccaaagcctacgttagtgaatagtgatgttgccattcactgcctcagcaagaagcatggctgatacaggatcatgaactggagctttgcttagtcatgtt

SEQ ID NO: 266632 - DNA, 568 bp, Homo sapiens
acaattttctacttggtatacatgtatgtatgggtcagatcagggactgatcccaacacgctcatgtgtggctgattcccccacccctgactctactgtrtaaagaaagtgcatcctgaatgggccctttatgatttggagaagctatagatatctcaattccttcttatagagaaagggaaaatggagacacaggagtggggagagtttgagaagatggtagagaggagtgtttgggtgaagggagatggattcgtctactgatgcaactggtgagttgatttgaaaaataactgacatattggggacttttattaattttgttctgcatggttgatgaagtaatttcatcttcactaaaccttctattaaatctactttattcactagtgctttcatagctaaactttctgtttttaggagatgcagttaaatgctgagccgcctcccaaagtgagtgggggggacaaaacaggttcctgaaattgtctagatgtgtttagtctgcatctagacacaaatatatgtactatcttttattcacgtatacttgatatcagaaagcaaa

SEQ ID NO: 266633 - DNA, 630 bp, Homo sapiens
atgcacttgattctaccaaatgagccaattaagatggaaattcaatttatttagctyggtatgggtaaattagaatcataaaaaatgctaagtaaattaatgttatgaatgctcataaaagagccagcactgggaaaatgcaagcaaacaaacatctcataaagcaaacaaacaaataaaagtctttgtccttgcagatgtgctgtttagatgggaacaaataatcctggagaactcagtgtgtgccagttaaaggtcaagctgagtacacaaggtctttctttcttgccctaaaggacccttccatatatctaagggtaaaagtctccccagggaagacacagctgcctggtcccacccaggttggatctaaccccttagctcctctcaagagcctgagaagctttggagttgctgtgaggcccaagggagtgggcctgatgcactgcaggtgggtaaactgcaagatcagcaaacctctttgatgcgtgtcgctccagggcttggcatccttcagggagttatttgctctgttattatttggaatgacgagtgaacaactggctcgagtttaaagtgagtcagatcaaatttgggtttgaccaccacattcccgatcgcagaggagga

SEQ ID NO: 266634 - DNA, 630 bp, Homo sapiens
atgcacttgattctaccaaatgagccaattaagatggaaattcaatttatttagctcggtatgggtaaattagaatcataaaaaatgctaagtaaattaatgttatgaatgctcataaaagagccagcactgggaaaatgcaagcaaacaaacatctcataaagcaaacaaacaaataaaagtctttgtccttgcagatgtgctgtttagatgggaacaaataatcctggagaactcagtgtgtgccagttaaaggtcaagctgagtacacaaggtctttctttcttgccctaaaggacccttccatatatctaagggtaaaagtctccccagggaagacacagctgcctggtcccacccaggttggatctaaccccttagctcctctcaagagcctgagaagctttggagttgctgtgaggcccaagggagtgggcctgatgcactgcaggtgggtaaactgcaagatcagcaaacctctttgatgcgtgtcgctccagggcttggcatccttcagggagttatttgctctgttaktatttggaatgacgagtgaacaactggctcgagtttaaagtgagtcagatcaaatttgggtttgaccaccacattcccgatcgcagaggagga

SEQ ID NO: 266635 - DNA, 630 bp, Homo sapiens
atgcacttgattctaccaaatgagccaattaagatggaaattcaatttatttagctcggtatgggtaaattagaatcataaaaaatgctaagtaaattaatgttatgaatgctcataaaagagccagcactgggaaaatgcaagcaaacaaacatctcataaagcaaacaaacaaataaaagtctttgtccttgcagatgtgctgtttagatgggaacaaataatcctggagaactcagtgtgtgccagttaaaggtcaagctgagtacacaaggtctttctttcttgccctaaaggacccttccatatatctaagggtaaaagtctccccagggaagacacagctgcctggtcccacccaggttggatctaaccccttagctcctctcaagagcctgagaagctttggagttgctgtgaggcccaagggagtgggcctgatgcactgcaggtgggtaaactgcaagatcagcaaacctctttgatgcgtgtcgctccagggcttggcatccttcagggagttatttgctctgttattwtttggaatgacgagtgaacaactggctcgagtttaaagtgagtcagatcaaatttgggtttgaccaccacattcccgatcgcagaggagga

SEQ ID NO: 266636 - DNA, 630 bp, Homo sapiens
atgcacttgattctaccaaatgagccaattaagatggaaattcaatttatttagctcggtatgggtaaattagaatcataaaaaatgctaagtaaattaatgttatgaatgctcataaaagagccagcactgggaaaatgcaagcaaacaaacatctcataaagcaaacaaacaaataaaagtctttgtccttgcagatgtgctgtttagatgggaacaaataatcctggagaactcagtgtgtgccagttaaaggtcaagctgagtacacaaggtctttctttcttgccctaaaggacccttccatatatctaagggtaaaagtctccccagggaagacacagctgcctggtcccacccaggttggatctaaccccttagctcctctcaagagcctgagaagctttggagttgctgtgaggcccaagggagtgggcctgatgcactgcaggtgggtaaactgcaagatcagcaaacctctttgatgcgtgtcgctccagggcttggcatccttcagggagttatttgctctgttattatttggaatgackagtgaacaactggctcgagtttaaagtgagtcagatcaaatttgggtttgaccaccacattcccgatcgcagaggagga

SEQ ID NO: 266637 - DNA, 582 bp, Homo sapiens
aggttctccacaacagagaagaaaagaattggtaaaagtaaggcataaaaatatcatttttaaagaagtaacagatcagaggtggagagaatcagttaggtttgaaaacgtaatgctttgtgtaccaacccttaccctaccccttgatccttttacattctggaaatcctgtgcatacttcaatggtttgcttraataccgtcacgtccgtgaaaattttacctttattcccctagttaaaatgattacttacccctttctctgtttcacaactttctatggtttccttttatagtcattcattcattcattcattcattcatgtgttcatttaaaaatatgcaatgcacacaatgagctgggctctatgttaagtatcaggaatacagagatgaatatgacacagtccctgtttttgaataggacagtctaattggggggagcaggcaggcacatgaatagctaatcagtgaaatttcagtgcaatgaactagatatgcacttgtaaaagcccattggagagacattttagtcagctgagggtggattcaggggaggcttccaggaggtagtgtctcctaa

SEQ ID NO: 266638 - DNA, 620 bp, Homo sapiens
tggggggagcaggcaggcacatgaatagctaatcagtgaaatttcagtgcaatgaactagatatgcacttgtaaaagcccattggagagacattttagtcagctgagggtggattcaggggaggcttccaggaggtagtgtctcctaacttgtgtttaaagatggaaaaatataargaagaaagtgtgagttctggtggaagcaacggtgtgaatgcttactcattcttatatgacagttactttaaatgactatctctccccacttcactatagatctcttagccaatacttcatacaataacagatgaatgaataaataaatgaattgctgatgccttggtgtaagtaggtagttaagacagattctttctggacatgccgtgaggtaaaataaaggctatctgtaatctagacattataatgggaggtgagtacatgaagggtgagtaaacaatgagatgttgacattgatcaatttgggagaattctagtgccattgatagaaaggggaaatgtaggggaagagctgatttggggtaagagagtgttgcaagcctgaaggaattgtggagagacaggattatcctaagaactgagcatgaactacgtgcaggcttc

SEQ ID NO: 266639 - DNA, 568 bp, Homo sapiens
cagctttgcacagagggtgataatgcagccttttaagacggtttagactttgataagtaaacctagaatggaaagcatttccaatggaagaaatagaataatctaaagtttcaggtgagaaatcaagagaccagtgtgaagtatataggtcagtttagtaataaaagaagaaagtatggtatagatgagctgaagccccagaattatcattagtatcagcaactatttcgtagaccacctactatatgaaagataatrtcccaagttatgagggagatacagatgggaattacatgtgatattagaaaccctacaagattacaggctcattaagaggattcagccaataagattatataccacatctttgtgcgagacataaaaatgctgtaactaaaagcaaagtgtttatgataatattcttgccaaaatctcttgtgggaaattaaaaggacacttctcaacttttggcagtaaatctttttttaaaaaaaaaaattgtattggcaaactgaattaggttctgaaggcaagactctctagtattggcaagttgcaaataaatgcc

SEQ ID NO: 266640 - DNA, 603 bp, Homo sapiens
gaaatgtctctctggagacacgtggggagtgagggctgccaggagggctcagtttcagcaagatgaatgagaggggggaacgagaaggaagataaaggaatctactttatctaggtacttgtaggaagtacctagaagtattttgtaacaawaccacatataaataacacctggcagagtacataaaatattaaatatcaccatataaaattattttacagttttcattatatttagtcttttttctttttcatttgattatcacaagaatactgtgtggcaggtaaagagtagtaaattagtttgaattagttttaatatcacctaattcattcactacccaatatatatgttttatacatttgtcgtatgggtagttgttttaaactggagtgtaactttattgaaaatttaagagttttcaatttttttattttaaaaattggcgttttctagcctttttcttacttttttgtctatttttggaccaggtgttgaaaatctctccagtggttaatagcttcacatttttcaataaatatgagagaggggtggaggaatggtaaagaaaaaaaattaaatggcaacaattttccaaaagat

SEQ ID NO: 266641 - DNA, 529 bp, Homo sapiens
ggaagttctcctgtgggtaaaatgttatcaaacaccatcacatgagacagagaaatcattcatgaaagagtgaattgatgtgacaaacttcattgttgtcttattttaagaaattgccacagccaccccagacttcagcaaccaactgccctgatcactcagcagccatcaacatctaggcaagaccctctgctagcaaaatgatcatgtctcattgaaggctcagatgctcattagcatatattagcaatacaatattttaaaattgagataaatacytttttaagacatactgctattgcacacttaataggctacagtgtagtgtaaacataaattttgtatgcactggggaaccaaaaaaattgtatgacttgctttattgtggtgttcactttaattgcagtggtctggaacccaatgtgcagtatctccaaggtatggccgtacatcagtttcctcggccattccaatcctccaggtcacagagaaattgtatctaaccctcactctttactgtgctctagga

SEQ ID NO: 266642 - DNA, 613 bp, Homo sapiens
cctgtctttcttattttttctttcagtcccaacatcaaatggtcatttgaactggtagaataagtgaacctgttaggtttagaggtaacttaattttcatctgggcccgtcaggggtcaaaatgtcagtgtcagacaatttagggaaaccaagtaagtttagggttatctgattgattcaaatcttcctgtccctgcttaatatttacaatccctagaatagtgtttatgccccagggaacttactgagagccagtgtgctgtggggagatggagacrtgaagactggatcaggagcatctcgtccttggtcatcatctgcctgccataaaggcttaatcctcaccacctctcaggatatagactgtgattattaccagatcaccctaccctgatattaatatctgtcacaaaaattcaccttaccaagctctgaaccccaacacccaatagcagcctggcagaatctaccacgaaaaagaaagaaagtagatggataatcccttgagcagtttcaaaaggttttagtcatccaaattgagaaactagtcaccactgtagtttgtatatatgtatgtacgtacatttgtatttctgtgacatagtgatgttaa

SEQ ID NO: 266643 - DNA, 613 bp, Homo sapiens
cctgtctttcttattttttctttcagtcccaacatcaaatggtcatttgaactggtagaataagtgaacctgttaggtttagaggtaacttaattttcatctgggcccgtcaggggtcaaaatgtcagtgtcagacaatttagggaaaccaagtaagtttagggttatctgattgattcaaatcttcctgtccctgcttaatatttacaatccctagaatagtgtttatgccccagggaacttactgagagccagtgtgctgtggggagatggagacgtgaagactggatcaggagcatctcgtccttggtcatcatctgcctgccataaaggcttaatcctcaccacctctcaggatatagactgtgattattaccagatcaccctaccctgatattaatatctgtcacaaaaattcaccttaccaagctctgaaccccaacacccaatagcagcctggcagaatctaccacgaaaaagaaagaaagtagatggataatcccttgagcagtttcaaaaggttttagtcatccaaattgagaaactagtcaccaytgtagtttgtatatatgtatgtacgtacatttgtatttctgtgacatagtgatgttaa

SEQ ID NO: 266644 - DNA, 533 bp, Homo sapiens
aattgctcagccatgcttggtaaaatacagactagctgcatgagtagtctaaataatacggccgctataactttctctctgctatgtaaaataatttcctttagatgagtgttggactttatgggagtccttagttcccaactcttagcaaatgccttttttctgtcagctcccaaacagcgccaccaggatgcttaaagaagacaagctcagaggttctgtggcttttccttttgcttctcctctaggtgcatgcctttgttttaagaagatgtaaaacaggtagtaggcattcatttttgaaactattaaccccttayatataattcagtttggagagatgtgctatgctgcttttcatcttctgagtttttatttttgagaacttgcagcttgcattccacgtgaacttccttacttctctccatttctttccttggcattccttcttttttgccctccctgttttttagttctcttttcaggcaataaagctttcttcttcatctcctgcttattgatgaatgagtttc

SEQ ID NO: 266645 - DNA, 533 bp, Homo sapiens
aattgctcagccatgcttggtaaaatacagactagctgcatgagtagtctaaataatacggccgctataactttctctctgctatgtaaaataatttcctttagatgagtgttggactttatgggagtccttagttcccaactcttagcaaatgccttttttctgtcagctcccaaacagcgccaccaggatgcttaaagaagacaagctcagaggttctgtggcttttccttttgcttctcctctaggtgcatgcctttgttttaagaagatgtaaaacaggtagtaggcattcatttttgaaactattaaccccttatatataattcagtttggagagatgtgctatgctgcttttcatcttctgagtttttatttttgagaacttgcagcttgcattccacgtgaacttccttacttctctccatttctttccttggcattccttcttttttgccctccctgttttttagttctcttttyaggcaataaagctttcttcttcatctcctgcttattgatgaatgagtttc

SEQ ID NO: 266646 - DNA, 615 bp, Homo sapiens
gtcctctcctaggatgtataccagtgcacagagaacttgcttcacaattattgcttttaacagaaaaaaaaaaatcacaaaaaatatttactcagtaaagtttgattgtgtctgaaaagctgtascagttttctcagtttgatacttagaaatatcagagccttaatgaaatagtattctatttacaatccaatggaatcactcaaaaaaactaccagaattgataagtgagtttagtaatgggttacaggattcaaggtgagtacacatatataaattatacaactatatgtttacaaaatatgtatctgtcaaatgaattttatctacaacacataaagaatatttacaagtcaatggtaataagaacacttaataaaaatcatgggcaaaaaaactggacactttatcaaagaagacacacagatggcaaatgagcatgtgaaaagacgcccagtgctattaggaaaactcttcaatatgatatcactatgtagcccactcaactaaccaaaattcacagactgaccaaaccaagtgttggcaaaaatgtggaactttaactctcacactttactggtaggactataaaatcattgcaaccactattgaaca

SEQ ID NO: 266647 - DNA, 492 bp, Homo sapiens
gattagcaatctgtgacttttaaagcatcttttccagagatgggtgagggtataatggattttaattgagatctcctttaaatacatttctaataaagaatttcacaagttcacaccacgtaccaaacacaaagtattagatattgtgaaaccatagagatagacaccatgttctatttcttaaacatgctacattgtccagcacaatgtagtattaggcatccaacatacgtacaataaatattgttaaattggctggccayaggagcaagaaaaattgtattgttggagtaggaccccgagacgatgtgatggacatgagtaactccagctgcgcctctacattgatgttgggaaactgagaagagaatgaggtcaacattgcagtgatgaaaatgttgcctgacccttaggcagggtcttgaatcaaaaaaaaaaaaaaaaaatgggggaaaaatgccattgaatcagtagagagggcactggtgttga

SEQ ID NO: 266648 - DNA, 335 bp, Homo sapiens
taacatatacaaatgtaacatacagctagctaccagttaggtgaacaatgctggcttgattgaggtgttctctatagggctgataaagtaagcatgagattcccatgatttctactcaattacatatgttacaccaaaaatatcaccctttattcagatgggtatatactaaaattgtatacatcagtgattatcaattgggagcagttttgccctccaggaaaagggaataatgtctggagrtagtcttggttgtcgcaacttggtggaaggggttgctctggatctagtgggtagaagccggggatgctgtaaaacatcatacaatgcatagg

SEQ ID NO: 266649 - DNA, 593 bp, Homo sapiens
tggttccaggagccctgtggaaaccaaaatccatgaatgttcaagtccctgatataaaccagtgtagtatttgcatataacccacacacatcatctgcatactttaatcatttctagattatttataatactgataggatttggctctgtgtccccacacaaatctcaccttgaattgtagtaattcccatgtcacgggagggacctggtgggaggtaagtgaatcatggggragggtttttcctgtactgttctcatggtagtgaataagtctcatgagatctgatagttttataaaggagagttcccctgaatacaccctcttgcctgccaccatgtaagacgtccctttgctcttccttcgtcttctgccataattgtgaggcctctccagccatgtggaactgtgagtccattaaacctctttcctttataaattacccagtctcaggtaagtctttattagcagcatgagaacagactaatacaaatgcctcatacaatgtgaatgccatgtaaatggctgctatactgtattgtttagggaataatgacaagaacaaaagtctgtacatgttcagtacagatgcaac

SEQ ID NO: 266650 - DNA, 593 bp, Homo sapiens
tggttccaggagccctgtggaaaccaaaatccatgaatgttcaagtccctgatataaaccagtgtagtatttgcatataacccacacacatcatctgcatactttaatcatttctagattatttataatactgataggatttggctctgtgtccccacacaaatctcaccttgaattgtagtaattcccatgtcacgggagggacctggtgggaggtaagtgaatcatggggaagggtttttcctgtactgttctcayggtagtgaataagtctcatgagatctgatagttttataaaggagagttcccctgaatacaccctcttgcctgccaccatgtaagacgtccctttgctcttccttcgtcttctgccataattgtgaggcctctccagccatgtggaactgtgagtccattaaacctctttcctttataaattacccagtctcaggtaagtctttattagcagcatgagaacagactaatacaaatgcctcatacaatgtgaatgccatgtaaatggctgctatactgtattgtttagggaataatgacaagaacaaaagtctgtacatgttcagtacagatgcaac

SEQ ID NO: 266651 - DNA, 593 bp, Homo sapiens
tggttccaggagccctgtggaaaccaaaatccatgaatgttcaagtccctgatataaaccagtgtagtatttgcatataacccacacacatcatctgcatactttaatcatttctagattatttataatactgataggatttggctctgtgtccccacacaaatctcaccttgaattgtagtaattcccatgtcacgggagggacctggtgggaggtaagtgaatcatggggaagggtttttcctgtactgttctcatggtagtgaataagtctcatgagatctgatagttttataarggagagttcccctgaatacaccctcttgcctgccaccatgtaagacgtccctttgctcttccttcgtcttctgccataattgtgaggcctctccagccatgtggaactgtgagtccattaaacctctttcctttataaattacccagtctcaggtaagtctttattagcagcatgagaacagactaatacaaatgcctcatacaatgtgaatgccatgtaaatggctgctatactgtattgtttagggaataatgacaagaacaaaagtctgtacatgttcagtacagatgcaac

SEQ ID NO: 266652 - DNA, 622 bp, Homo sapiens
agcaacaaaaaaagatttaccacctttggatctgaggtggaaactagaaggggtcattgtcagaatctacagagagaaggagagagcagcctgaggaacaacctctaaatacacacaacaacaacaacaaaacaggcaatgagggagagaaataaatagcccaggcgcattcttatccaacactttgaattcccgacagttcctccattggycaaagcaaagcagaaggcagacggcaaacgaatctattgatttttccatgaaggtcagcctcctgatagagcagaataaaggaggtaggagagtagagctggaggtgcaaatagaagatatccagaagagctgataagttagatcaagaagatatccaaggggctagaagctttccaaagtgggcaggaatggggaatgtttccaggtgtcgtttaccgtctgcactcactaaccctgtcacaagcttgttccacatctaactcttattgttcacgtgtcagaaatagctcactctgcaagaacagagaccagaagctgtcctactgagttccaacataaagtacctgggtcaaggattaaggagcaagaattgataaaatatagatccacacgcaactttaagagcctg

SEQ ID NO: 266653 - DNA, 622 bp, Homo sapiens
agcaacaaaaaaagatttaccacctttggatctgaggtggaaactagaaggggtcattgtcagaatctacagagagaaggagagagcagcctgaggaacaacctctaaatacacacaacaacaacaacaaaacaggcaatgagggagagaaataaatagcccaggcgcattcttatccaacactttgaattcccgacagttcctccattggccaaagcaaagcagaaggcagacggcaaacgaatctattgatttttccatgaaggtcagcctcctgatagagcagaataaaggaggtaggagagtagagctggaggtgcaaatagaagatatccagaagagctgataagttagatcaagaagatatccaaggggctagaagctttccaaagtgggcaggaatggggaatgtttccaggtgtcgtttacygtctgcactcactaaccctgtcacaagcttgttccacatctaactcttattgttcacgtgtcagaaatagctcactctgcaagaacagagaccagaagctgtcctactgagttccaacataaagtacctgggtcaaggattaaggagcaagaattgataaaatatagatccacacgcaactttaagagcctg

SEQ ID NO: 266654 - DNA, 609 bp, Homo sapiens
cttgatctgctgttgagttgttttctgactttggataaatcactaatggctcttgactttcattttcttatctctaaaatatgacaagactggcaatatttaaaattcctgctgttctgagtatgaaactagacactttattacaattttaggaacttagaagcccttaaagatacagtcgcaggaacacaccccgttaaatattgacatcttcaagtactacaacaacactgccttctctgaataacgtaaattttgcagtctttcacatayattttatcatttaatgcacatcatgagccctgtaaggttagatatcagtattcctactacatagctgaagaagctgaagtttaatcctctaatgaagagggtgacaacttttcatcagggcatttacgcaggatctaagggttcttctctccctctttcccgctacctctcagctggttccagaaaatgggagtattttgtacctggaattagctgatttctcactaatggcaattctgtaatataatgaaaaggagcaaggttatctacctatattcaatttagaccttatttaaagcattaatatttctatttttatataaattgatttttaag

SEQ ID NO: 266655 - DNA, 588 bp, Homo sapiens
atttcttaccttttactttattgtttttctctaaagcccttgagtagctagctgagtattgggtaaccaagaaaggctgttccttcactggggaaacattggatctgatttccattagagatgctgaattatttagtggtaattgagtgccccaatcagttgctttctgagtggttacctttcagtgtccattcacattcagtttgtattgaggctttcttctcctgaaaacagagcatgcacaatttgcaacttgtttattttaattctgaatagtttgaaaaaagctttccaagaattgaggtgaatatagtacatatccagtatgcaatgtgaggcttagtatattgaaaattaaaagtattgtaaatacctcatttaattacaacctgttctcatgtctaaatcttgtcataatatattctrgcatataattttcagatttttgcatttttttcaaactgcaaatgaataataattgttataagaagctacattcttagcgctcacattaccttactgactaattggtttatattgaatggattgacatcttcaactgacacagatggagattacagtggaaat

SEQ ID NO: 266656 - DNA, 398 bp, Homo sapiens
aagtgagccccaaaattggggcttagcctgagagggttcttggcttcacccaggaaaaaaactcaggggctagccagtggtgagagaaagccactcttattgaaccagtgctgctccttgtggagcagggacataggcagtgtgcccagagtctacagcatgtgggccattggtggctctatttatacccactttattttattgkactttattttattttattattttatattatttcattttattttattttatttggttcaggatacatgtgcaggacatgcaggtttgttacataggtaagtgtgtgccatggtggtttgtcacacctatcaacccatcacctaggtattaagccccacatgcattagctatttatcttgatgctccccctcctc

SEQ ID NO: 266657 - DNA, 574 bp, Homo sapiens
aatacctaacataggctattccattttagttgtaattgatcctcaggaaatccttctttccaggtttttattgggactagatctcctggttgagcaggggagctaatcttttcctttgtggtaaagggcaactcaatttccatactcttggaaggccttttgaacttggcctaaattccaatggaaggcatagttaggaatgtccaaccctgtttcttgccatagcctgaattaatttttcaggtttcttatagccaattaaatgttttaggccagacaggaatggaggcaggcaggcactaatttacccttaaaayggctttaagcaatataagtaaaaaaccaacagccaaaactaaagttacacattatgaaaaaacaagagtatagaatcaagttatactggaggaaaactttgcttttatagacctccaagacaaaatattttagcatcaggacataacaaccattagaactggagaagaataaattagaaagactgatgaaaaagctgaagacagttgttttaagccttcacaaaaggaaaaaaatgctaaaaatagtgagacacgac

SEQ ID NO: 266658 - DNA, 574 bp, Homo sapiens
aatacctaacataggctattccattttagttgtaattgatcctcaggaaatccttctttccaggtttttattgggactagatctcctggttgagcaggggagctaatcttttcctttgtggtaaagggcaactcaatttccatactcttggaaggccttttgaacttggcctaaattccaatggaaggcatagttaggaatgtccaaccctgtttcttgccatagcctgaattaatttttcaggtttcttatagccaattaaatgttttaggccagacaggaatggaggcaggcaggcactaatttacccttaaaacggctttaagcaatataagtaaaaaaccaacagccaaaactaaagttacacattatgaaaaaacaagagtatagaatcaagttatactggaggaaaactttgcttttatagacctccaagacaaaatattttagcatcaggacataacaaccattagaactggagaagaataaattasaaagactgatgaaaaagctgaagacagttgttttaagccttcacaaaaggaaaaaaatgctaaaaatagtgagacacgac

SEQ ID NO: 266659 - DNA, 516 bp, Homo sapiens
agtggtgcattagtctgttttcaggctgctaatgaagacatatctaagactgagtaatttataaagaaaaggaggtttaaaggactcacagttccacatggctggggaggcctcacaatcatggtggaaggtaaaggaggagtgaaggcacatcttacatggtggcaggcaagagaggaatgaaagctaagcaaaaggggaaaccccttataaaaccatcagatcttatgagaactcactcactatcttgagaacagtatgtgggaaaccacccccatgattcaattatctccacctggtctcgcccttgacacatggggattattataattcaaggtgaaattttggtggggacaaagagcaaaccatatcaccttctaatttaaatttgctccagttgtctataaggcaccstagtggtgggtccttcaggatgttcactgttgtttcttggtctgacaagcatctctactagacacagaagttttttaagtctaataagaggaaaaataaatg

SEQ ID NO: 266660 - DNA, 571 bp, Homo sapiens
ttgaaaactactcagaaaaaaatgtggcactaatgggagttttgtcaagaaagagaaaattagtacatttaagaagcaaataaaggcttcctagaaaactggaaaaaaatactatttgatataaagaaaatgactataaaaattgaacatttattttgcaattaattcaaggtatataataacaacagggtacaatcatcgtaatctcccaggcatgggggttagcaatttaaaaatatcacatgtaattctcacaataatcctatgatgtaaatgactctgattattactaactttcagttgaggtcaaacagccagaagcagtcaagctggagtttgagcccaatagacccagaatgtactccagttctttttagttatcttcccaattttttwattacatgttggccacatcatataacattttgatctgtgggaaataaatcatcgtgtttatttgccttttgaaacagaaaaaagtcatgaaggaattcagatgataagtttcattttaaaatgtgacctccacttttagaaatagttagaaatgctttcagcttcaaatcaaaga

SEQ ID NO: 266661 - DNA, 530 bp, Homo sapiens
tgattttatgcatcttttcaactacagggatttggataatgatgacttcagtaactagaatattactggttagctacgttaatagtaaatttgataaaatatgtcataaactgtttttttaacctyaaagctatatcacaagaaaggacatagaatataaaataacttttagtactttaacctcaaatttgtgatttttttgaccccccacagttagaggtttttcaggctgacatacctgggatttagaaactcacaaataacccctgtggtccctccttcccaagagtctaaagtagctctccattaggagcctgaaactccttcaagtcattaagtgattgattttctatcaaaacagaatgaaggagtgaggaaggaaggaagataaacagggaagaaaggagggtagaggagagagaaagataaagggagaagaaaaaacataagctggaatctaagtgctctgaaaaaaatgagactgcagctccctaagtcatcatcaagacttgaagcagaacccttgaatc

SEQ ID NO: 266662 - DNA, 608 bp, Homo sapiens
atgaaacgttttattgttcacactaaagagaatgttgaaacacctaaactaatctagtactacctctggaaaaaaaattatcagcctatgatcataggacattacaaccatttttatgtgaagtataacacaccactaacacagcagatggagctcaataactgccaggcaagttgctgcagccatgatatggtgtagccattgggaagtgggtcrtcctggagcttggactgagactttctcaagggtgttttggccaagtgaccatattgacactaggctgtcacaggtggcttcaagttctaggagagtctttctaatgatatcttgggatttttgattcacatcaaatgtgagcatttcctattatgagtgagtgtaaagacttcaccatatcctaagattagaggatttttagcacatgcgaatttatcattgtgtttgatatgtatcacaggtgtgctagctctacttctgggattcactctttgttagatcaataaataatggaataataagatgatagtgatgattatgacaatgattttaaaaagatcagagatgttggttgttgtgtatgcgtctaaatagaaacagtaaacatatac

SEQ ID NO: 266663 - DNA, 608 bp, Homo sapiens
atgaaacgttttattgttcacactaaagagaatgttgaaacacctaaactaatctagtactacctctggaaaaaaaattatcagcctatgatcataggacattacaaccatttttatgtgaagtataacacaccactaacacagcagatggagctcaataactgccaggcaagttgctgcagccatgatatggtgtagccattgggaagtgggtcatcctggagcttggactgaractttctcaagggtgttttggccaagtgaccatattgacactaggctgtcacaggtggcttcaagttctaggagagtctttctaatgatatcttgggatttttgattcacatcaaatgtgagcatttcctattatgagtgagtgtaaagacttcaccatatcctaagattagaggatttttagcacatgcgaatttatcattgtgtttgatatgtatcacaggtgtgctagctctacttctgggattcactctttgttagatcaataaataatggaataataagatgatagtgatgattatgacaatgattttaaaaagatcagagatgttggttgttgtgtatgcgtctaaatagaaacagtaaacatatac

SEQ ID NO: 266664 - DNA, 593 bp, Homo sapiens
attaagagtttttacaagtaagtatttttaattattggccatgaaatctaagctgtataaccatagcaatgagaattacaggaatgtagttgctatagaaaacagttgtaaagaattaaaggtttcaatgaaggcaaagaattgctagagtaggagaacaagactaagtaagctaactgtaggaggggggcagtgaaagtcaaaagattgaaataaaaattctggtggtgtttaagtttcatataattataatgtggaaagaccatgttattgttaaatgagatggggtgaaatttttaaaaaatactggtgaggtcaaggaattaagaaagcaaggtatttggtagatcatccaagcagacatagaatcrgcaggaacagttccagagtgagtatgctgaggaaggcagggaacaaccactgaagtcaccatgaatgaaaggggtgtggcctggaggctgacaggtgaaactcagaaggagggtggcagttgataaagcttgctggcacaaatttcaaagagcctgctgtattggaatgagaaggatggagaatgcgtggaaacagccccaggaatggcagaagacacgcct

SEQ ID NO: 266665 - DNA, 477 bp, Homo sapiens
accaatagctagcaaggattgttgacttcaaatttagctatatgtattttttttgtgattggtgatattttattgcaccttatttttaattttcaaagttcataataattgaatatttagacaatttccttgcaactttcaaaggactgctgctaattttattagcagttgttccagagatatatatgtctgttaaggttccaacaggttataggaggtatgtattaagtgtgtagtagaaaatatatcaatgatagtatttatcagacgaatggagagcaattaaaattagaggtcggaaaagacatacatggaaattaagtaaaagataaaagactaggaaaagatggaattccatccttcttacctgctccaacytagactgtttcactgtctttaccccctcgttccttcctgtatcatcaagtgtacagacagcagaaattatgccaagtaagtgaagcccagagttgaagg

SEQ ID NO: 266666 - DNA, 597 bp, Homo sapiens
tggacattgctgctggggagggcactatgtcagcacaatttaaagtaagccaccccctctccagctttaagttgatcaagcagagtacacacgctctttargttctgggtaagggacagtgcattccatgtgaaagtagggaggtttttgaaactttatattagaggacacttatacatccatgattgcctcagttgcaaatttttagccctgactgccttcctagcccctctacttatcactggaatgtgttcaggcaggataactgtaatgaatattcattactctgaagaaataataactagtaactgcgtcttctgttaaaatacaaaacaaaaatcatgccacccaatcaaaggtcatatttgtgatttctagattattgctttgctggattatctttatttctgcttctctccactggcatgtatcccaaagaatttatcattactgataagttatacatgcaatctgttagaaataaggatggcctgttttaatagtagtgtggaatcagtaacatcctagtcttccttccttggaaatggtagattccaaataaagtgtatttcatctatatcactgcacttgaaaatt

SEQ ID NO: 266667 - DNA, 629 bp, Homo sapiens
ttaaacgatattctcatttacataaactattcaaaggcctctaataaacatgaccttggaacttccctcatcagaggaagcaaaacaaaaagagagcttttaaacgatggaatcaaatgaatgcaattacagagtccattcacatatttcattcgatagcatattttattctaaaataaccccatggcaagtgtaagaaaaacaagccaatacaatatagcgtttaagagtctgagttctttagtgaggctgatcttagtttaagcctaggatctgccacttttgatttgtgtgaacttggtcaagttatgggaacaataawagtacccactcaaaatcgtcattggaagatttgaatgagattgtgtatgtagggaatgtagtgctgtggctgtcacatagtaagagttattatctattagcttgtggttgttttttataccatctctctttgtcagtgactatgacccacaagatataacacaaaattaaagttaactaaatgcagaatttaatctatttttctctataaaccatctctcacaatagtcccttcttaaaaagaataatagtacccttcctaatgtctgggtgactttggaagaatcagtctgtaatctaattttaag

SEQ ID NO: 266668 - DNA, 539 bp, Homo sapiens
aagataagaacaaagtccattaacttcaacacaaatgaatgtattccacaggaaatattttgacctaaagtggctaagtacttttgcctcagctaccagagtaatttartatagttacagattacatttagagcacttgggataattatagaaatagtactaatttatgataaatgaccagggaattgagaaaagaaaaacatagatgatgaaattttctttatgagaaagtttatataatagagaattgaaaaactattgttatatataaagtactaacttatgctatatgaacacatataaaataaatgtttaaggtcctattctttgaaaaattcccccaacctttccaacttcatggcccttaattaaataaataaaacatgaaaaagagtcacaaatgagttggttttgacaaagcattatctgtgcatgaggtgaaaaaaatctttctctttcacattttacctctccattcatcatttttgagtcttagaatacagtattttattttgggacttttagcatttgactcaaca

SEQ ID NO: 266669 - DNA, 506 bp, Homo sapiens
atcaaaggtcatatttgtgatttctagattattgctttgctggattatctttatttctgcttctctccactggcatgtatcccaaagaatttatcattactgataagttatacatgcaatctgttagaaataaggatggcctgttttaatagtagtgtggaatcartaacatcctagtcttccttccttggaaatggtagattccaaataaagtgtatttcatctatatcactgcacttgaaaatttttcgtcttttttgaagtcatttgttattcttaggcagtgtttcaattattttagaaattttcagaaaaaaatagatttttgtctttcatttccaactcttatacttgcttttatttgtaatagtcacatgcatggtagttcttttatattaacacacagctaatctctttttttacccagaaaacaagaaaatctgtatttcagtcacattcaaaaataacaatatactctttgttttgtctctgagctgcctgaatct

SEQ ID NO: 266670 - DNA, 537 bp, Homo sapiens
aatatatgtcagattaaccttatttaaaccctgtaagataaaaagtaaggaggtcaaccacagaaattcaaatgaaatttaactagctgcggtattattattcactttcatttgcatatattagcagttaatgactagagcttgaaatttgtctcaatgatatagatttttcaatgtgtcttttataccagggtacattgattttatgtatatatgctatagttgtagaatggatcaatgtgaccacatttgcagttaagaaatgggttagatgakgtgcatatttctagaatgttgtgtgttaaatagcatgaaatattttagaaagaagattattagaaataaattgctcttgcttagttgttcagtgatgctatcggctttttgagtgaatagatatttgtgtgactttaatatctagttaaacaagaagtgtgttttttcttgtgcatatggtgtgtgttgtaaaagatccctatgtaatcattaaagttagaaatatttgatgcttatcattattttagtttctctgtcatt

SEQ ID NO: 266671 - DNA, 537 bp, Homo sapiens
aatatatgtcagattaaccttatttaaaccctgtaagataaaaagtaaggaggtcaaccacagaaattcaaatgaaatttaactagctgcggtattattattcactttcatttgcatatattagcagttaatgactagagcttgaaatttgtctcaatgatatagatttttcaatgtgtcttttataccagggtacattgattttatgtatatatgctatagttgtagaatggatcaatgtgaccacatttgcagttaagaaatgggttagatgaggtgcatatttctagaatgttgtgtgttaaatagcatgaaatattttagaaagaagattattagaaataaattgctcttgcttagttgttcagtgatgctatcggctttttgagtgaatagatatttgtgtgactttaatatctagttaaacaagaagtgtgttttttcttgtgcatatggtgtgtgttgtaaaagatccctatgtaatcattaaagttagaaatatttgatgcttatcrttattttagtttctctgtcatt

SEQ ID NO: 266672 - DNA, 662 bp, Homo sapiens
taatttgtgatccaaagttgcttttaggtaaaattccaaattggggccttaacatactggtttttgyccttcttttcttcctttcaatcatcctgggcacctggcaactcctttctgtctttcttattcccctgcaacatttatttccaggaaagaaggtccttacattcacttgcaccatttgaaccatatacgtttgttccatcgtagtatccgaactttaactagagatgatgccttaatgacacctaagcttttatcattttcacctgggcctgcacagtagcttcttgagaaaactttcctttcttccagcctctgctatctataactccacttgttttctaccctcagcaaaacttgtcattgttttgctcctttgcttaggggcctttattggcattatattttcaattggttaaacccaggttttttttcatgaagcaaaaatagccgtttgaaatccttactttctttgtgcaattaaaaaaaaaaaccctctactatcgtttcgtgaaactcctcccttttcctatggacaggcctctctgcttttatttgttgttttctgtctaactggtattctgtgccacagccttctgtagctgacaaactcctttgtatcctcaaatatcctctactcctggaagccctttgcaatc

SEQ ID NO: 266673 - DNA, 645 bp, Homo sapiens
gcttttaggtaaaattccaaattggggccttaacatactggtttttgcccttcttttcttcctttcaatcatcctgggcacctggcaactcctttctgtctttcttattcccctgcaacatttatttccaggaaagaaggtccttacattcacttgcaccatttgaaccatatacgtttgttccatcgtagtatccgaactttaactagagatgatgccttaatgacacctaagcttttatcattttcacctgggcctgcacagtagcttcttgagaaaactttcctttcttccagcctctgctatctataactccacttgttttctaccctcagcaaaacttgtcattgttttgctcctttgcttaggggcctttattggcattatattttcaattggttaaacccaggttttttttcatgaagcaaaaatagccgtttgaaatccttactttctttgtgcaattaaaaaaaaaaaccctctactatygtttcgtgaaactcctcccttttcctatggacaggcctctctgcttttatttgttgttttctgtctaactggtattctgtgccacagccttctgtagctgacaaactcctttgtatcctcaaatatcctctactcctggaagccctttgcaatcca

SEQ ID NO: 266674 - DNA, 587 bp, Homo sapiens
ctactcctggaagccctttgcaatccactaagcaatactatcttttcttctccattgtcaatagatctttatacctctcactttcatagcattttcttgtattatgatatatatttattctttgatgttcttttcccccaacaaatgtatgggtttctyagaagtggttttagtattttattgaacttactatcttcagcatctcttttgctctcagcattgtgcctgggaaacttcagacattctgtgaattttctttgaatgatggactaaatgaatggatgaatctcaaggtcaaggttttaggcattatggtatggatccaagagtttttcaacatccctgaaatttttccagttgggcagtccccaaaggctctcctgtaacatccgattccttcttgccatatatttattacgagatcaatcagaagtcgaaagattattgtttcttaagttgtaagatctcgaaaatctagccacaatggatcaaagcaattgtatctttctagactgtttcttatagcctataaatcaagaaagaatccaagtctacaaggcaatgtttcaaattctgttcatgtaaat

SEQ ID NO: 266675 - DNA, 587 bp, Homo sapiens
ctactcctggaagccctttgcaatccactaagcaatactatcttttcttctccattgtcaatagatctttatacctctcactttcatagcattttcttgtattatgatatatatttattctttgatgttcttttcccccaacaaatgtatgggtttctcagaagtggttttagtattttattgaacttactatcttcagcatctcttttgctctcagcattgtgcctgggaaacttcagacattctgtgaattttctttgaatgatggactaaatgaatggatgaatctcaaggtcaaggttttaggcattatggtatggatccaagagtttttcaacatccctgaaatttttccagttgggcagtccccaaaggctctcctgtaacatccgattccttcttgccatatatttattacgagatcaatcagaagtcgaaagattattgtttcttaagttgtaagatctygaaaatctagccacaatggatcaaagcaattgtatctttctagactgtttcttatagcctataaatcaagaaagaatccaagtctacaaggcaatgtttcaaattctgttcatgtaaat

SEQ ID NO: 266676 - DNA, 573 bp, Homo sapiens
tctggtagcctaagagctttaagctttaaggggaaatggtacttgaaaggactcttacaggaaaagtcagagagggattaggaggtgagagaggatagaacaagagttttccatatttaggaagaatgccatgagtcaaatgacaaggtaggacttgtgtgtcttgcttggcagccatttggtcgattaacctgaaaaaattgtagctaataattattggttattatatgtcaagcattctttaggttttttacaggtattaattctttgtatccccacaacactctatgaggttggtactgtaggtattaatggtgtcccattttacagatgagaagactgaggcacagagagatcaactaatttgccaaggccacacagtaagagctcctgtatctgtgccttcaaccattgcttaatmctacctattattaagaattatataagtgattcatggtagataatctatgaaaagtccgttgaagccagactttgaagaaattaggggaaggccttgcatgtttgtctaaggagtttgctttttatggtatagacaacaaggagtcagtgata

SEQ ID NO: 266677 - DNA, 564 bp, Homo sapiens
cagagagatcaactaatttgccaaggccacacagtaagagctcctgtatctgtgccttcaaccattgcttaatactacctattattaagaattatataagtgattcatggtagataatctatgaaaagtccgttgaagccagactttgaagaaattaggggaaggccttgcatgtttgtctaaggagtttgctttttatggtatagacaacaaggagtcagtgataaggtttgaacagtggaatgacacargcaaagcaatgactgaaagattaaatcccaaagtaaatttcactggggtatatacctaacttgaaaagtgaaagaacttgagatgggatgctaatggttgggtatcacagttgtccatatatgaagtagtaagggcttgtagcaaataaatgcaatagaaaagtaccagaagtatcttgaacattttcccttgtcttcactttccaacagtatgctcatcatcatctcatatcaagaatgtagtccactaccacagaggttatgtatcctttcttttattctcttcattgcagaatgtgtcatggtgtttagt

SEQ ID NO: 266678 - DNA, 636 bp, Homo sapiens
tcatataaacttcccacagagcactgccttccccaccaaaatggaaaaggacttggaatgtacaagtcagatagcagaaggccaaaaggctgtggaaatgaattcattcactgaactgaaacttttgagggaggccagttttcaaaagcagccttccaagtctttctaccattcaggctgctccctctgcataatgaacctattaaaagaattaagtcaatttttaaaaagcagtgatcttyctttcatctgatttgtggcataattcaagtaaaagcctcttttccttttgtctgttatatgactctgtactcctctcctagttcattgctttacttcattttcacttcagttgataccttgtcccttggtcaggggaaggcaggataaagaagacagggcacatgagagaggttctcagagtgttaaagaaatacatcaagggctgacaaatgcaattctgtttcagagcaggcctgatcactgactatgaacattttaaaggtgaaaacgttcattctgtactattaatctgctatagcaaatttacttctgatttgcatctcatattcttgtgcttttgtttcaaaaaaaatttaatgtctaggaaaatgctcattatataaaaattttatc

SEQ ID NO: 266679 - DNA, 636 bp, Homo sapiens
tcatataaacttcccacagagcactgccttccccaccaaaatggaaaaggacttggaatgtacaagtcagatagcagaaggccaaaaggctgtggaaatgaattcattcactgaactgaaacttttgagggaggccagttttcaaaagcagccttccaagtctttctaccattcaggctgctccctctgcataatgaacctattaaaagaattaagtcaatttttaaaaagcagtgatctttctttcrtctgatttgtggcataattcaagtaaaagcctcttttccttttgtctgttatatgactctgtactcctctcctagttcattgctttacttcattttcacttcagttgataccttgtcccttggtcaggggaaggcaggataaagaagacagggcacatgagagaggttctcagagtgttaaagaaatacatcaagggctgacaaatgcaattctgtttcagagcaggcctgatcactgactatgaacattttaaaggtgaaaacgttcattctgtactattaatctgctatagcaaatttacttctgatttgcatctcatattcttgtgcttttgtttcaaaaaaaatttaatgtctaggaaaatgctcattatataaaaattttatc

SEQ ID NO: 266680 - DNA, 636 bp, Homo sapiens
tcatataaacttcccacagagcactgccttccccaccaaaatggaaaaggacttggaatgtacaagtcagatagcagaaggccaaaaggctgtggaaatgaattcattcactgaactgaaacttttgagggaggccagttttcaaaagcagccttccaagtctttctaccattcaggctgctccctctgcataatgaacctattaaaagaattaagtcaatttttaaaaagcagtgatctttctttcatctgatttgtggcataattcaagtaaaagcctcttttccttttgtctgttatatgactctgtactcctctcctagttcattgctttacttcattttcacttcagttgataccttgtccmttggtcaggggaaggcaggataaagaagacagggcacatgagagaggttctcagagtgttaaagaaatacatcaagggctgacaaatgcaattctgtttcagagcaggcctgatcactgactatgaacattttaaaggtgaaaacgttcattctgtactattaatctgctatagcaaatttacttctgatttgcatctcatattcttgtgcttttgtttcaaaaaaaatttaatgtctaggaaaatgctcattatataaaaattttatc

SEQ ID NO: 266681 - DNA, 598 bp, Homo sapiens
ggagcatgatctctgacctgaattttgatgattgagtaggagttcagtcaagattagaggtgagaatggtagggagaagaaaactgcatagtcttaaacytcagattatatttactgcaaatattatctttttgtaaatattttattattaaaaatggagatgaaggagaaagaataatctagtaataatgctctagaagttgaaatgagacacttctaacagtgggagtaagcttcacttctttgctaatcaattgcagccttggtaatgttcttaataatctgaattttaaacagcacaaatacttgaaagaaatatgtgaggtgaggtattaaagctgcctcccgagaaacatgagcttgccttgaagaggcacaaagtttactgttagataacacagagtaatacttcacgaagtgtatgaagaagcaaccttgatatgatatgagctgtgggtatttgctggttttgcagaaaactgaatctttttctttaaatgcatatctcaaagctgtgttatgcattccacaaattttattaggaattccatttattcagcaacaattttaagctgctgtagcttctgctactgatata

SEQ ID NO: 266682 - DNA, 621 bp, Homo sapiens
gaagtgggtgtgctattgtaacccaaatatattgcatcaacttatatgaggcacatggggaagagaaagctgataaccaaggctgaagcaatgttaatccatatccttacaggcaacacatttggtagagcattatatggaagctagacaatatatcaacagctctaaggaaaaaggttgaaaaacagaaccttattagtgtgggtttttttttattacctgtgtttggcaaaatgtcacaaaaaggaaatgaactcaggaaagaactggctagtttatgagcagaactgataaggaatttttaaaagtgtagtaatttaaggcttttcaggctttgaaaagccaactgcttctagatcgcaagcagttagcggtcaaattayggtgactcaggagaaaaaatctgattaagggtgtgtgtggccttccttttcaagtcttatagacttatttgtcctcaagaaagttaagtggtgagaaggaggcaacggacaagaaaggagagaaaactgggcccctaactttcctggcacaactgacagcttttaaagatccagtcccctacaggggatactcatcgagacatatttgtaccttggccaagaaaaaaatactagacaa

SEQ ID NO: 266683 - DNA, 515 bp, Homo sapiens
aaatagaaactcaagaccattggtcagaaaagttatcttagaaaagttcaaatgtatttttcagagcttcaaaacagagaaatctagaacctaggctgagggtatgggtgtattccatttataaaaagggacttccataatcacaatgtgaaacaatttttgtggaaaatataagattttcatgttatcactgatagagatatctaactagaaagacagactgtttaatgatggtttctggattcctgggataagagtttttagtcacatttgagcacataggaagcttttgcggttcatctaaatgtacatattagtcatgtatgggatggaataatcacatgcataaaaaccctaaaggacaacgttttcttytctcagttgctcttcagtagttatataaatgtgtcctttaaaagttggttggatgagagctgtattttctagctcattgaatctcctgaaattggagatggttacttaaccctacgacagatggagacagcctgtctcag

SEQ ID NO: 266684 - DNA, 515 bp, Homo sapiens
aaatagaaactcaagaccattggtcagaaaagttatcttagaaaagttcaaatgtatttttcagagcttcaaaacagagaaatctagaacctaggctgagggtatgggtgtattccatttataaaaagggacttccataatcacaatgtgaaacaatttttgtggaaaatataagattttcatgttatcactgatagagatatctaactagaaagacagactgtttaatgatggtttctggattcctgggataagagtttttagtcacatttgagcacataggaagcttttgcggttcatctaaatgtacatattagtcatgtatgggatggaataatcacatgcataaaaaccctaaaggacaacgttttcttttctcagttgctcttcagtrgttatataaatgtgtcctttaaaagttggttggatgagagctgtattttctagctcattgaatctcctgaaattggagatggttacttaaccctacgacagatggagacagcctgtctcag

SEQ ID NO: 266685 - DNA, 555 bp, Homo sapiens
atagtgaattaaaaagatagatgtgtgacatttagggaatgagaactttgttcagtcaagtggtgttcagaagtaattctgattaagtttgaggtttgttctgtttatcttaaatcaaagaactaaaatccccagtgattttgaataaccccattgcttctctatattttatcagggccaatatagaatttgcaaatgacctaaccagttgcaaactgagacatcaggctgggtgcagtggctcacacctgtaattccagcactttggaaagccgaggtgggaggatcacttgagcccaggagttcaaaaccagcctgggcaacatggcaaaaccccatctctacccaaaatacaaaaattatccaggtgtggtggcacatacctgtagtcccagctacttggatggctgaggtgggaggatggtttgagcccaggaggtggaggttgcagtgtgttaagatcatgcctttgcactccakccttgacaacagagccagaccctctctcaacaataacaacaacaacaacaaacattaagacattgatgctaccag

SEQ ID NO: 266686 - DNA, 560 bp, Homo sapiens
aagaaccctaacactgactgagaaaaacatgattttagcagcaggatcaacctaagctttcctctcactcagctgcctggtagctataaaaagtactatgccaaatcactggcagcgatgaacgttgttttkaaaaagaaaaaagtttttttcaagtcagatatttttatatgtactaagtttaaaagaaattgcaataactttttataaagctaagcattcttttgtaataggtgtaataattttctaacatgttttcttttaaaagtcacacgatacctatcaagtctctgtcaaatgcacacatttttacacctgatataaatgtatttctgtttctacagagcatcaataactcatacagcaagtaaaacagtcaatgattcatacatatttttaaatttgaatataatcaactgaagtttgacattgtatgaagacattttgtgttctgtaagagtaggcagaaatttgggaagtcaagtccctgaagtactaaagacataatttctaatttcatcacaatggttcctgatatttcagtcttaacattattgaat

SEQ ID NO: 266687 - DNA, 635 bp, Homo sapiens
gtagggctttttggaggtaattaggtttagatgaggtcctgtggatggagtgaccatggtggggttagtgcccttgtaagaagatgaagagacctctctccctcactacctttgccatataggacccacctacaaggcagcccacacaagataccaaatcttctggcaatttgatcttggatttccctacctccagcattgtgagaaatacacatcagttgttcaatctacggtattttattatagtcactcgagttgattgacataaataactaacacttaatagtacttattgcatgtttggcactgttctaagtgttttartccacttgttttcccaagtcttcccaagttttctcactgtttctggtttactaatggcatccatccaggtttccaatgatgcagtagatttgttgtatgtgtgtaagttcaacagtattttagcaggagggaaaagagtgaaacgtgttggctttcctcagccactttgaataggaagcaaaacacccgaatgatttttctaacacaaaactgataatgtcacccctctactgcaagtctgttctcgcagtttatgtcatgagcccaatacctcccagtctctcctctcctaacttctttgcagactccaa

SEQ ID NO: 266688 - DNA, 557 bp, Homo sapiens
aaaggataccagggattaagatctggagctatgatatactgtgtttggttgttaattttgttgtgcatctagatttttggatttgttaaaaggggttaggcaaattaatccaaaaagacagtaaagtcaaactgacttaaaaatcaatccttaagcgaaagagcgtgggcttttgttaccagattggcttggcctgaccctttgttctaccacatactggcccagtagttatgggtgttacttatctcctctgaatctcagttccctcatctataaaatggggataataacaaatacattgsaatattgttgtgagaattaaataatacagtaaatattgaaacacttaatatagtgcaaggtctataataggaattacacacacagacatttttttttcctttataaaccattggtgatttgaccttgtgtttcttaagataatattaaaagtgtttattagtattcatggttttattatgatcactgaacgctttcctgggaccagcctagattgtttatagtgtcagccactcttaagatttcacaactccata

SEQ ID NO: 266689 - DNA, 595 bp, Homo sapiens
caccattcccttgctattgcagtttattttcaacctcaattatttaagaagcataacgatggatttatcatcatccaagagtgctttgctgatgacttactggggcctgaagtattatgcagccttcctttgatttgaagactttacactttgacattttctgttgacttactctgcactaaatttcaactgtagaagctagtaggaaggtaaagaagcagagtgcattcgcattcataggtatagagtttggatttggcaactgaagcctttccttcatttatagtgaggggttatgtgtgtatgtttaaatttccccatgaagttttatgggaaatcaatctaatttacgcacacttttctccaggaagcatagtcgtgagatagaaatctcaattaaggggacaattcttttagactgatcctttgtagatttgtctagatggtacagacaactatggagaaaatgggtatggtaacttgcatacttgtttgctcttgacttaggtgttcagayatatcattgtaaatgcattacaaaagtgtcttctgaccactccagactctcaaagtattatttttttgtaactagtct

SEQ ID NO: 266690 - DNA, 524 bp, Homo sapiens
tatttagtgttgtttgaataagatatatgtaaaagcctgttgcaaattagaaagtagaccactatacccatgctcatttatgtaataaatattttaccatttcctatgtgccagaaattatgctgagtatgggagacaagacagatcctctgcagtcccaagtctgaagatgcaggcagtaaaacaaagaaattaaaatgctgtgcaatgagtgagtcacagtgctgtaagaccacattgcctaggcagccatgcccttggaagtggtgatgtctaagtgagaactgatagattagtaagaggttgctctggccaggcacagtagctcatgcctgtaattccaacattttgggaagcaggaggatcacttaaggccaagagttctagactagcctagrcaacacagggagacccagtatctacaaaaaataaaaaataaaaaaaattagccaggcatgctggtgcagctacctgggaggctgaagtgggaggattgcttgagccaaggacattgaggctgagct

SEQ ID NO: 266691 - DNA, 623 bp, Homo sapiens
gctggtgcagctacctgggaggctgaagtgggaggattgcttgagccaaggacattgaggctgagctgtagtcacacaactgccctccagcataaagaaaagaaaagaaagagaaaaagaaaagaaaacgaaagagttggctccctgggtgtggaaaggggactaattgatgcaggagtgatttatggggaaatctaggggacagagtttagtgagacaggtgtagtggggccagagtatagagtgcacagtggggaagtggtgagggagaaggcgcaagygatcaacagggcagccagatcatgcaggtcctttaggtaagacaggtatgtttgtcacacaaaccagaatatgtaaagattaatatagagttcgataattaagccaagacaacagatctaaactggggctgttcatggcctgctggtgaatccataaaccttaacagaaagttttgttttttttgttttttttgttttgttttgttttgtttttggtaagggtagtaggaataattggagagttttaagtagggaagtaaaattattagattacattctaccttctgtcatgtctaccaacatgccttgaggaggatgttgagggaacctgtttttattaca

SEQ ID NO: 266692 - DNA, 619 bp, Homo sapiens
tcagttggaggttagactttcgttccagcagtaactctagattagtgtcagcacagctggggatcactgattagtccagctagtctggtctacagagtcaatcatccacccacctggaccaggtgagctatcaccacagtgagcgtaaggtgagaaagagattgggataagaaggccggccmtctgtttatagacatcatatctgcactggtgcataaactgagttcacaacgctcagaatgaaagcggactctttcctcagtgggaaattcgcctctgcagtgcctgtgagctaacaaatccacccagaactcacgcccgttttattttcagcaacggccttgtagttaggggcagcaggattttatatcgttggccctataaattaactaaaactacgtgaaaaatgaaaaggcttcatttgatgggaagcagggttttagtacccaagttcagatgcttgcgtactctgccatctgctggttcatgtatggaatgtttaaaattcctgtgcacgctcattactgttttttgtctgttttgcattttcattgttctgctgaatttatgaaactgatttttaaagttgcaatttacaacaacatactcaatttgttgc

SEQ ID NO: 266693 - DNA, 619 bp, Homo sapiens
tcagttggaggttagactttcgttccagcagtaactctagattagtgtcagcacagctggggatcactgattagtccagctagtctggtctacagagtcaatcatccacccacctggaccaggtgagctatcaccacagtgagcgtaaggtgagaaagagattgggataagaaggccggccatctgtttatagacatcatayctgcactggtgcataaactgagttcacaacgctcagaatgaaagcggactctttcctcagtgggaaattcgcctctgcagtgcctgtgagctaacaaatccacccagaactcacgcccgttttattttcagcaacggccttgtagttaggggcagcaggattttatatcgttggccctataaattaactaaaactacgtgaaaaatgaaaaggcttcatttgatgggaagcagggttttagtacccaagttcagatgcttgcgtactctgccatctgctggttcatgtatggaatgtttaaaattcctgtgcacgctcattactgttttttgtctgttttgcattttcattgttctgctgaatttatgaaactgatttttaaagttgcaatttacaacaacatactcaatttgttgc

SEQ ID NO: 266694 - DNA, 620 bp, Homo sapiens
acgtgaaattaaagtcaaatccaggtttatatgactactaactcagtccactttaccacaatgacccattagaatttattcaaaaaaccagagagagacagacaaagcaaaagagagaggtagggggagagacatttcatcttatatggmatttaattgactttatagaaatattttagcaatatcgtgtgtgtgtatcagaatgcttattatggtttaaaacctggtgttgactttatttcttccccaaggataacccacaggtctgtgcatagcaagtctttattattacatccttaaactttccatcttgtgctttatttaaagtttggcttttcatctttctttggaatacctcaagaaacaacacagtctgatacagtggaaaacttcaaaatatggcatatagagtcttgaaccctgggcaggctgtgttagaaacatggagaaactgacgccaggcctggccatgtctttatgccctgtaatattaaggctctcaaattgctgaaagaatttgaaaattattttctacaaaaagtctgttttgaacaatttatttagtttagatcagaagtgttgttttctctcccttttttttccttgtaattgggaatgca

SEQ ID NO: 266695 - DNA, 620 bp, Homo sapiens
acgtgaaattaaagtcaaatccaggtttatatgactactaactcagtccactttaccacaatgacccattagaatttattcaaaaaaccagagagagacagacaaagcaaaagagagaggtagggggagagacatttcatcttatatggcatttaattgactttatagaaatattttagcaatatcgtgtgtgtgtatcagaatgcttattatggtttaaaacctggtgttgactttatttcttccccaaggataacccacaggtctgtgcatagcaagtctttattattacatccttaaactttccatcttgtgctttatttaaagtttggcttttcatctttctttggaatacctcaagaaacaacacagtctkatacagtggaaaacttcaaaatatggcatatagagtcttgaaccctgggcaggctgtgttagaaacatggagaaactgacgccaggcctggccatgtctttatgccctgtaatattaaggctctcaaattgctgaaagaatttgaaaattattttctacaaaaagtctgttttgaacaatttatttagtttagatcagaagtgttgttttctctcccttttttttccttgtaattgggaatgca

SEQ ID NO: 266696 - DNA, 620 bp, Homo sapiens
acgtgaaattaaagtcaaatccaggtttatatgactactaactcagtccactttaccacaatgacccattagaatttattcaaaaaaccagagagagacagacaaagcaaaagagagaggtagggggagagacatttcatcttatatggcatttaattgactttatagaaatattttagcaatatcgtgtgtgtgtatcagaatgcttattatggtttaaaacctggtgttgactttatttcttccccaaggataacccacaggtctgtgcatagcaagtctttattattacatccttaaactttccatcttgtgctttatttaaagtttggcttttcatctttctttggaatacctcaagaaacaacacagtctgatacagtggaaaacttcaaaatatggcatatagagtcttgaacyctgggcaggctgtgttagaaacatggagaaactgacgccaggcctggccatgtctttatgccctgtaatattaaggctctcaaattgctgaaagaatttgaaaattattttctacaaaaagtctgttttgaacaatttatttagtttagatcagaagtgttgttttctctcccttttttttccttgtaattgggaatgca

SEQ ID NO: 266697 - DNA, 551 bp, Homo sapiens
gtctaatttcataactatttttacctaaaagtttctgccaagattcacttaactaagctttgccacagagagatgcagaattaagatgatttctaggtaaaatgcagagtgactcaaataatccaagagaaaactttgtagagaagaaagaagagaagggagaggaaagaggggaggcagaaagggagaataaggtcacattttctgcctgtttgacatacatcttcccttacaagcccttcatctcataggtatggcaatttatagagtagtagaaatcatggttatatctgtccttatccattccctcaggaaaccatcttttctgtctccaagggctcctggtagaactgtaaattatgatgccctacccattcccaaagatatgtatamgagcatccttaacctgaagttctacacacctcaggatactgtgatttatacagaagcatatatgtgtcctagcctgaaagcatcagagtctttctaaagactatgagaaaggtctcaactctctttggactatgagatataagaattcaggttggagg

SEQ ID NO: 266698 - DNA, 644 bp, Homo sapiens
gacttcgtaatgatttatactttaataaagagctgctgcagcatatactgaaaatatgcacccaacccatatcttctttcaaaggcattcatgttggttcaaccaaatccctagttctctaaaatgaagttttgacaatcttatatcttctaaagcactgagaagcctttttccttgttttctttaaagaggcttgagaagaaccaagcctttttttggttcaaataaaatatttacaataggaggaaaaaacattcagataaacttcaccttgcccgcctggtggtctctcaatacacagaagaaatgcaactagggcactaggaaatctaaaaaaaaaaaaaaaaaaaggaaagaaaaaaagtatagagctaaagttcacttcaggacaacgcaaactaagaaaaactacatttcccaaaggaaatagagcactatgtctacaaagtaactcattttttctttaatgttcaatgytgtctattccagggaaaaaatggtacaattaaccaaaacttatttctacccaacatctctgcaaaggaatgttgctgctgcagatccacccccaacatgggaaggcccaaggcaagtgagcaaatagaggcccatgtaccataagtcaaaacatttaaagttacaaa

SEQ ID NO: 266699 - DNA, 590 bp, Homo sapiens
ctggtattgatactgaatcaggcccattctacttattgttcagtgtgccaatcactaacatgacaagttttgtagcaaagaaaggatttattcacccggaagctaagtaaggagataagagaacagatctcaaatccactgcccaaagacgagttttaaggatgtttattgcataggggagcaaagtggcccaaggcatggagaaaggtgattggaggtaaagaaaaattagtcaagtgggggttatctgcactactgtggtcaagctttattggtcttcacaggactcatgttcacacaatggtgtggttagcatgattggaagatggagttatttgccctctgaagtcaaaaggtcacctattaaacatataggccagttgaagggtcaatggtctcagctgatttgaactggacaagaactgaccccaagtccctgaaaaacaagcaattgttacggtgttgacccatacgttggagatgttatctataaggaagctagtgggagtttagatatatattgtttaactatgtgacttttagctatacgagtttygaaatcgactaaaagcaagtgattaaaaacaaat

SEQ ID NO: 266700 - DNA, 588 bp, Homo sapiens
tcagtatgaaactcttaattgtgagaaagcagaagcatatccaggtaaggaattctgtccacatttcctgccttctgagattctcactcacttttgtctggaatgctactacatcatcttttcagcagaaaggagtttgacttactgtgttacaatttcctttacccactgagggatcagctgattccaatgtaggcttgcaactttagtcaaggcttttctttcttacaactgcatctcctcatatgaaaaagtgcagatgttagactacatcagaagacacaaacatccctacagaggccaggaggtactaattgtgagtgaagatggcaaagactcagcaaaagggaggagtggagactgtaaaaaccagagagcccacattctgtcccaaacaggtagcacctgctccatattcaccaatcaatgccacatacaggtttgrtattgccagatatttttacttctccagaaagatcaattaccttctttttttaatgttcaatcttacactttcgaatgttggaaatgaatttttgaaaattaaaaactgcatgagacaaacacatatctacaggccagtttatg

SEQ ID NO: 266701 - DNA, 545 bp, Homo sapiens
ttttgaacaaatgtaagtaagagacagtcttctggagccagtataaaaaaatgatttttggtgataaaagcagcagggtacctgaagagcgctttcttgacattttggctgccctctgctttttgcccttggaaacagtcacacraagttatgtcagaaatggtggcagctgcctcgtcatcccaaggaagggccaggacaatgacagagacacgtgttttctaccctaccatggtgcagctgatgactgagtgccagaagggtctacctccaactttcttgttatataaaaattaatatccttgaattgtaggcctccttagttgtattttggtttcttttacctaagagcattctaactaatgttgtttataacaaacatttttcttcttcactgggtcatcttctcttagtggaatattttcccaggaactttttgaagtaatataatattaaaacttgaaagcatttctaactgggtgactaatggtgtcatgtgtatacacacacacacacacaaacacacacacacacacacatttcta

SEQ ID NO: 266702 - DNA, 604 bp, Homo sapiens
tttaagttcttctagggaatttttaaaaatgcacgaaatgattttcatcaaaagagctttggaaataaggawggtctaaatgaagatgtgctttttaattaagttattcatttaggatttaaacaattctttatctcaaagtactgaggcagcttaatggaaaatgcagaaactaacacaaaatctggtaagaacagatttttaaaagatagtgactattagagaatctgaaaaatcagcccctgaaatgaaccatttgcctcaactaagcatgggatttggtccgaatatcaatgttctgtgagagcagaattttcactgataaatttctccgtggaggcttttgcttcagtttttcaaaatatgctgcggggttcttgtgcatgcctggtacctgaaaggtttttcaattacagttttattaaacatgtgaaaatattggtcaaaacagatgatttccatattttctctggaaaagggccagagtactaccatatttgggaaaggcatccctttaaaaaagtaatataacgaggtccaaggcgcttggtttctaacaaccaaataacttgggcacagactgagaagctaaagcagaaattgc

SEQ ID NO: 266703 - DNA, 554 bp, Homo sapiens
attatgtggactttacttttttgacaagtgttttccacttccctcgtcctatgtaacttttcccttttcatctttctgtcattggtaattaaaaaagaaagttgtagtacacttttgtcttttattgtgtcacctcaaagagtttgtaaaagtgtgtgagctctaaataaggcactagcttttatcgatatttatttctctgttgatattaagttcatcaaaacatatctttatgacaattattgctattggtgtcccccaaaactaaaatatctttttcctatgtacatgtcaaatgttaatttaatttttcgtttatcttaagaattttattgaaaaaaattttaattatataaatttgaaaagtattcagaatatagtcaactgaaaatagaacatgacagcaaataagtagcaacaaggtagctgaggtaaaatacctttgggattcaaggtggattttaggtgggttaagtggaactcaygtaaaataaaaaggagtgagcctttttcttttataaaaatatgcagctttctctctcccaaggttcaac

SEQ ID NO: 266704 - DNA, 598 bp, Homo sapiens
aataacatttatataaagctagtagtagaaaagcagaagtatagcttagctttctatgatggcaagtgaaatagtttctgctaatcaaagtgattcttttttttttttcctttgagayggagtcttgctctgtcgccaggctggagtgcagtggcacgatctcagctcactgcaacctccgcctcccaggttcaagtgattcccttgcctcagcctcccgaatagctgggactagaggcacgtgccaccacgcccagttaatttttgtatttttagtagagacggggtttcaccatgttggccaggatggtctcaatctcttaacctcgtgatctgccctcctcggcctcccaaagatccgggattacaggtgtgagccaccgtgcctggccatcaaagtgattcttagccattttctttgaaaatgtcagtcatagaggtaggctctgttgctcttcaatgtataccttcttttatataaaagcaatttgactaaatattagatgtctgtgtgagtcgtgttctgctactcaaaacacttcttgttctgttcttctctatattttgtttatttgtttgttttttgagatggaatctt

SEQ ID NO: 266705 - DNA, 612 bp, Homo sapiens
tctccctccttctgcaagttcttttcaacagagcagatatactgatcttattaaaagcatgccctgtaacaaattactaatctgctgcccaaagccttccagtggctttcaattttgcttaaagtaatagatatatttttwaaaaatcctcacattaaatggcctctattatccttctggtattatctcctactgtttcctctccattacttctcccactgtaaacagactggctttctttccagaatgctcacacagttggcatcccaggaaataacctcagattgattccttattgtataagtctctttaactgtagaaagttgagagttaactgtataaatatgtaagaaataaaataaaatctatcaattattttttaaacaatctgtgaatatatagactttaagtatttgtcatgtttgttatgtttaagaaaatataaaccattgaaatcatagtttaagcttagaattctacttacaatatataattctgtaacttaattatattgtccattttaagtcaaatttaatttttgattaaatatatacatatataagttaagaagcaccatattaaaaagtttaatttatataatttataacaatt

SEQ ID NO: 266706 - DNA, 575 bp, Homo sapiens
cattttttttctagttgagacaaaagagattgcaagaaccaataaaaatatctgaatcacggccggacgtggtgactcatgcctgtaataccagcactttgggtggccgaggcgggtggatcacctgaggccaggagttcaaaaccagcctggccaacaggtgaaaccctgtctctactaaaaatacaaaaaatcagctgggcgttgkggccggagcctgtaatccaagctacttgggaggctgaggcaggagaatttcttgaatctgggaggtggaggttgcagtaagccgagatcatgccattgcactccagcctgtgcaacaagagcaaaactccacctcaaaaacaaacaaaaaaacttgaatcacgttatcataaacagatatttgtttctggaagaaaatatctgtatctgtagccaggctctctgggttctcttaattactatgtgtgagtttgggaaaatttccttaaaccctattcttcagttcgttcagctgtaatatgggtttgtaaattgtatctgtcatggagaatttgtgaagattaatgtaaatcacccagaagaggggc

SEQ ID NO: 266707 - DNA, 596 bp, Homo sapiens
tttgttaaagagaaaacacttcaagtgcaatctaagaaataaaacagaatatatcagtttatttggaattgatatacacatcagaaaagttaatttgcttttatcgcgctagaatgcataaatacataagtcataaattattttattgataggaaaataaagaactactgtggttttcacattaattatatatktacagtttaccaatatataataaagcatcagagaatgagaaaataaggtatcgttatgcaataaaagtcaagacatattaattaacagtggctttactgatcataaaaaatacaaaaaagtggaaatataaatgtgaatttacttgtgtgttttaatttactgaagtaataatgatcctgtgtcaaacgtgtgtacagaagacaatggagcattcagtggaggcagaataatcttacaataggttcggggtttggaatcatattgcctgtgttaaactactagctccatcacttaatagctgtgtgaccttggttagattactgaaacctctcctattccaggttcctcatctataaaatggagataataaaagaacctatttcatatggttcattacccca

SEQ ID NO: 266708 - DNA, 540 bp, Homo sapiens
ctatttcatatggttcattaccccaccaaatgagctaaccaatgagaggaacttaagaaaactcctaacacatggtgagtacttaaatgttagctattattaacatcacctgtctatctagtactatctgcaataaaatgcataagatcctcagttaaccaaagtttatrtaatacagttgtcttgatttttcactcaattgttatgaacaggcaataaaagagaagaaaatatattatttatcaatatgcctatactaaatttgaatcactgaatgaaaatgttttctaaccaatggtgaatcctttaaattatgtacttaaaatatttgctttcaaaaaagatattcaactacaaactcacagtcgttaaaataggaaataggttgctgaatgattttttcctgccttttgtgcctaagttctagaaacatataatttcttctaattagagctttgctagtttggaaaacttgctttatgccaaaagaacagaatatttttaaagtgagatattaaatatctcaggattattttatta

SEQ ID NO: 266709 - DNA, 572 bp, Homo sapiens
aaaaaacctaacaccgcatattctcactcataggtgggaattgagcaatgagagcacatggacacaggaaggggaacatcacgctccagggactgttgtggggttggrggaggggagagggatagcatttggagatgtacctaatgctaaatgatgagttaatgggtgcagcacaccaacatgacacatgtatacatatgtaacaaacctgcacattgtgcacatgtaccctaaaacttaaagcataattaaaaaaagaaaaaagtataataataataaaataaaataaaaaaagaaatacctgaaaaaaaagaaataataggtgcattttaaaaatatgttaaccagaaaaaacaataaaagataaaatatcaagaaaacacaggcatctattcttatcaacaagaggacacaggggaatctattaaaatatagaatgccagaagctaatacattcaaagaaaatgagctctctccagatagcctgaagggtattcatttataatatttgatattgaaatcacatttgagaggtagaaattattacctcctgacataaatcaaaagacttt

SEQ ID NO: 266710 - DNA, 572 bp, Homo sapiens
aaaaaacctaacaccgcatattctcactcataggtgggaattgagcaatgagagcacatggacacaggaaggggaacatcacgctccagggactgttgtggggttgggggaggggagagggatagcatttggagatgtacctaatgctaaatgaygagttaatgggtgcagcacaccaacatgacacatgtatacatatgtaacaaacctgcacattgtgcacatgtaccctaaaacttaaagcataattaaaaaaagaaaaaagtataataataataaaataaaataaaaaaagaaatacctgaaaaaaaagaaataataggtgcattttaaaaatatgttaaccagaaaaaacaataaaagataaaatatcaagaaaacacaggcatctattcttatcaacaagaggacacaggggaatctattaaaatatagaatgccagaagctaatacattcaaagaaaatgagctctctccagatagcctgaagggtattcatttataatatttgatattgaaatcacatttgagaggtagaaattattacctcctgacataaatcaaaagacttt

SEQ ID NO: 266711 - DNA, 572 bp, Homo sapiens
aaaaaacctaacaccgcatattctcactcataggtgggaattgagcaatgagagcacatggacacaggaaggggaacatcacgctccagggactgttgtggggttgggggaggggagagggatagcatttggagatgtacctaatgctaaatgatgagttaatgggtgcagcacaccaacatgacacatgtatacatatgtaacaaacctgcacattgtgcacatgtaccctaaaacttaaagcataattaaaaaaagaaaaaagtataataataataaaataaaataaaaaaagaaatacctgaaaaaaaagaaataataggtgcattttaaaaatatgttaaccagaaaaaacaataaaagataaaatatcaagaaaacacaggcatctattcttatcaacaagaggacacaggggaatctattaaaatataraatgccagaagctaatacattcaaagaaaatgagctctctccagatagcctgaagggtattcatttataatatttgatattgaaatcacatttgagaggtagaaattattacctcctgacataaatcaaaagacttt

SEQ ID NO: 266712 - DNA, 564 bp, Homo sapiens
agtgctgcaatgaacatggtagtgctatattttcaatactctatttttaattattttggttaaatactcaagagtgggattgttcagtcatatggaaatcctatttttaattttttgagaaatttccatattgttttctacagtggctggaacattttgcattcccaatagtgtggaagggttttcatttctccacatccttctgaatatttgtagtcttttgtgtgtgtgtgtgtgtgtttcagaataataaccattctgataggcatgaggtgatatctcattgtggttttcatttacatttccttcaggattaaaggcattgaacatttttcatataaactggttcatcatttgtatttcttttgagaaatatctattcaagttattagttcctctttaaaaattggagtaactaggttttcyggttttttttttttttttttttttttctgctatttaattgtaaaagttcttatataatttgaagagtaatagaaaattatagtattggtgtaatgacagttatatagaccaatggaacagaataatgagaccagaaat

SEQ ID NO: 266713 - DNA, 564 bp, Homo sapiens
agtgctgcaatgaacatggtagtgctatattttcaatactctatttttaattattttggttaaatactcaagagtgggattgttcagtcatatggaaatcctatttttaattttttgagaaatttccatattgttttctacagtggctggaacattttgcattcccaatagtgtggaagggttttcatttctccacatccttctgaatatttgtagtcttttgtgtgtgtgtgtgtgtgtttcagaataataaccattctgataggcatgaggtgatatctcattgtggttttcatttacatttccttcaggattaaaggcattgaacatttttcatataaactggttcatcatttgtatttcttttgagaaatatctattcaagttattagttcctctttaaaaattggagtaactaggttttccgkttttttttttttttttttttttttctgctatttaattgtaaaagttcttatataatttgaagagtaatagaaaattatagtattggtgtaatgacagttatatagaccaatggaacagaataatgagaccagaaat

SEQ ID NO: 266714 - DNA, 570 bp, Homo sapiens
agaaaatgtattattctgtatctcacttggaccccactgaacaagtataacaaagaacatcrtgaaagaatatttgcaaaagcatccctatttgcaaaaatctcaaagaaaattaacatacctatatttttgtgaaccttattagatcaatacctgtaaacatagcttctgacttgtgagttaactatattatttatttacaaatgagagacaaatagaaagaattccttgtgttgtcttccctaggcaaaacagaaaacccgtccagaagcagtaatctctataaacaaagagacaaataaaaataccaggtggaatatgcccttgatttgtgaaaatatcccaagcaatattgccataaaagtaaatgtatttttcatccaaaatgaaaaatcatattctttctagttaccctagccttagggacccacatacattgcatcattcttcatcttttattggtatgaaaaataggtagcacttaagttttacaatttttagtcgtgtctttttttatatcaacatatgtggtttgttttaggtaatacaaatacatcagtgagaaacaag

SEQ ID NO: 266715 - DNA, 570 bp, Homo sapiens
agaaaatgtattattctgtatctcacttggaccccactgaacaagtataacaaagaacatcgtgaaagaatatttgcaaaagcatccctatttgcaaaaatctcaaagaaaattaacatacctatatttttgtgaaccttattagatcaatacctgtaaacatagcttctgacttgtgagttaactatattatttatttacaaatgagagacaaatagaaagaattccttgtgttgtcttccctaggcaaaacagaaaacccgtccagaagcagtaatctctataaacaaagagacaaataaaaataccaggtggaatatgcccttgatttgtgaaaatatcccaagcaatattgccataaaagtaaatgtatttttcatccaaaatgaaaaatcatattctttctagttaccctagccttagggrcccacatacattgcatcattcttcatcttttattggtatgaaaaataggtagcacttaagttttacaatttttagtcgtgtctttttttatatcaacatatgtggtttgttttaggtaatacaaatacatcagtgagaaacaag

SEQ ID NO: 266716 - DNA, 622 bp, Homo sapiens
taaaataactaatggcaaagtaaacaacataaaaaaacagatggggaaggtaaayagacaggtgaatattctaagaaaaatatcaaaaagaagtactagcaaccaaaacactgcaacagaaatgaaatgaagaaatacctttgatgggttcagcagtaggcttaatatggctgaagagagaatcagtgaggttcaaatagaaaattcccaaaattaattaaatagaaaattcccaaaattaaaaatcatagcggggagagggaaagaatggaacctccaagaactattgagcagttccaaaaggtgtaactggaatgtcagaaagagaacagaaaataaatcagaattaatgtttgattcataatggctaaaagctttccaaatttaatgatggatacagaaagctgtctctaaaacaagcaggataaacagcaaaatgaacgtgaaacgtcaaaacttggtgtatgtattagtttggagggctggcataacaaactaccacagactgtggggcttaaacaacataaatttgttttctcagagttctggaaataaaggcaagattggttccttctgatgaccatgatggaaggatctgttccaggcctttcttttgggctta

SEQ ID NO: 266717 - DNA, 622 bp, Homo sapiens
taaaataactaatggcaaagtaaacaacataaaaaaacagatggggaaggtaaatagacaggtgaatattctaagaaaaatatcaaaaagaagtactagcaaccaaaacactgcaacagaaatgaaatgaagaaatacctttgatgggttcagcagtaggcttaatatggctgaagagagaatcagtgaggttcaaatagaaaattcccaaaattaattaaatagaaaatycccaaaattaaaaatcatagcggggagagggaaagaatggaacctccaagaactattgagcagttccaaaaggtgtaactggaatgtcagaaagagaacagaaaataaatcagaattaatgtttgattcataatggctaaaagctttccaaatttaatgatggatacagaaagctgtctctaaaacaagcaggataaacagcaaaatgaacgtgaaacgtcaaaacttggtgtatgtattagtttggagggctggcataacaaactaccacagactgtggggcttaaacaacataaatttgttttctcagagttctggaaataaaggcaagattggttccttctgatgaccatgatggaaggatctgttccaggcctttcttttgggctta

SEQ ID NO: 266718 - DNA, 622 bp, Homo sapiens
taaaataactaatggcaaagtaaacaacataaaaaaacagatggggaaggtaaatagacaggtgaatattctaagaaaaatatcaaaaagaagtactagcaaccaaaacactgcaacagaaatgaaatgaagaaatacctttgatgggttcagcagtaggcttaatatggctgaagagagaatcagtgaggttcaaatagaaaattcccaaaattaattaaatagaaaattcccaaaattaaaaatyatagcggggagagggaaagaatggaacctccaagaactattgagcagttccaaaaggtgtaactggaatgtcagaaagagaacagaaaataaatcagaattaatgtttgattcataatggctaaaagctttccaaatttaatgatggatacagaaagctgtctctaaaacaagcaggataaacagcaaaatgaacgtgaaacgtcaaaacttggtgtatgtattagtttggagggctggcataacaaactaccacagactgtggggcttaaacaacataaatttgttttctcagagttctggaaataaaggcaagattggttccttctgatgaccatgatggaaggatctgttccaggcctttcttttgggctta

SEQ ID NO: 266719 - DNA, 565 bp, Homo sapiens
ttgataaaattgtctagttgaaacaagtatatattattactattaccttttttatgtaaacactttagaaactagtatcccaagataaaattattaaattcacatgtgtatatatatatgtgtatatatatatgtgtatatatatgtgtatatatatatgtgtatatatatgtgtatatatatatgtgtatatatgtgtgtgtgtgtgtgtgtgtatatatatatatatatatttgatgaattaaaattctgttaattctttcatcctgcaaaatagattagtagagaagaaggcagtattagttttcagacatgacacatttacagttgtgcagcctgagtcaagttacttgacttatctaagccagataattcttatgtatcaatggyggtcctcatattacctaccccattgtctattgtaagagttagatgaaatatataatacaaaacaaatatttagaaatatttgtacaatgtgagagacaaataaacactacaaactattactattgctgccatggatttttttgtgtatgtagttacatgtagttttattgtttaa

SEQ ID NO: 266720 - DNA, 516 bp, Homo sapiens
aaggggatgagggttgaaaaattgcctgttgggtacaatattcactatttgagtgaatgatacactagaagctcaaaccccaccactatgcaatatatcagtgtcataaacctgcacaagtaccccctgaattcttgaaataaaaatataaagaaaaaagataaaaatggtcaagacgagaaaagtataatcatctataaaggatttgaaaatactgttatcctatcaattaaaataaccgctaattgttttaaaaatgagtggcattctaataagtagatctgataagtaggggaaccacactgaaatttgtaccaaataaagaggaaaagcttcccactccctttcttctgcaaaatgttatctttaatttcttcttctgctcacacaccagacaaataacagtcatcatttcttctctactataaataaatatttctagttatggtmagattaatgtattttgatttaaacccctctttttattaactaaattttagcttatagataaaacta

SEQ ID NO: 266721 - DNA, 635 bp, Homo sapiens
gtatgccaagtacataaatgtcaacagcaatttagaacaagagtggattgtgagaatgtttccagttcaatattttactccgaaggcaaatcattggtatgatatttttgcaacagggagyccaaagaaaatacactgaggagataaacaaataagtatactcaatggaaaggttttaaaataagagattccattggttatttgattcacagacaattcccatagagctataagaattttgtgttttcctagaaagtcacatatttgatgaagctttgttgttttctgtgtccttaacaaatgacattcagtaatgtggattcctcttaggtgttctgtaactctctatcactatatatgaatttcattttaaaacttaggcaggatatctattggatactgctctacacttgaccactattttctaggtatggaatttccaaggtaagtaccacacacaaaagttgaaattcaagatcactgatgagaggtataatcatcattatattctcaaaacctaccagtatgctttacaaatagatagtatctgttaatatctgttgaattaatagagctgtaccagacaatattcacttgagttgtaaatgtatttgaaaagccagttcaaagcgtta

SEQ ID NO: 266722 - DNA, 553 bp, Homo sapiens
aataagtatactcaatggaaaggttttaaaataagagattccattggttatttgattcacagacaattcccatagagctataagaattttgtgttttcctagaaagtcacatatttgatgaagctttgttgttttctgtgtccttaacaaatgacattcagtaatgtggattcctcttaggtgttctgtaactctctatcactatatatgaatttcattttaaaacttaggcaggatatctattggatactgctctacacttgaccactattttctaggtatggaatttccaaggtaagtaccacacacaaaagttgaaattcaagatcactgatgrgaggtataatcatcattatattctcaaaacctaccagtatgctttacaaatagatagtatctgttaatatctgttgaattaatagagctgtaccagacaatattcacttgagttgtaaatgtatttgaaaagccagttcaaagcgttattgtaatgaaaggctgagaatagctcttttgtgaaactattccatatacaaaaatgagtaattcagga

SEQ ID NO: 266723 - DNA, 604 bp, Homo sapiens
taggtgataacaatagaattacaacacaacaatcattgctggaggcttagcattatcatatattatttggttgcagccccttcactggatttttttaacaaaatataataaaacatattttagtgaccaaatcttaggatagtatgcattataactgaaatggtatagaaattcattttttccttaaaaaatcataaattatttcatttttattcttattttgctataaggctatctttaatgcatattagacaaattaaataaatttttatatttttaagattctatatttaagcttttcggttaaaagtttagaacaaatacagtggttaccaacacaatgaagtcagatgttgggtgttagtttragtgtttattgttgcttagtgaggggcaatacccaggtacagttttctgtgatttttttaaatgaaaaatatttatgttttccttgggaaccttaaaataatatcttataaaccatggaatgcctgattctgattgtaactctattaattacccattgctgccgttacattgttgctataacaaatttagtgctttaaaacctcacaaatttgttatcttacaataaaaaaggtca

SEQ ID NO: 266724 - DNA, 576 bp, Homo sapiens
cactgaaacaaattccaaggtgttcagaaaaataataaccattgttttatttcagcactgatgagagtattgtggagaaattggtgtcagatttttcttctctgaatgttgggtgaaattgcatagaaatacatgatgcaagaatatgttcatttcaaaaaagaataattaataataaaaatatcatcagaaaagtacatttaaagacgtgagtaaaatggttctatatattagatgaaattgttgtagagatttgctgtatggcatagtgccaagagttgacaagctagaatggtccacttcaaarattaagagggtagatctcatgtcttgttcttaccacaaaaataaataaataaataaaacaaacaaataaaaacatgatgatcatgatgacggtacacatgatgatatgatggtgtttgcatacgttcagacttatcatattgtaagttattgcagttctttcttctatgtgtaacaagtataccacaataaagctattaaaaaatgaagaaccagaacagacagtaaataaacattagcaagggatattagatacattttttgaagggt

SEQ ID NO: 266725 - DNA, 576 bp, Homo sapiens
cactgaaacaaattccaaggtgttcagaaaaataataaccattgttttatttcagcactgatgagagtattgtggagaaattggtgtcagatttttcttctctgaatgttgggtgaaattgcatagaaatacatgatgcaagaatatgttcatttcaaaaaagaataattaataataaaaatatcatcagaaaagtacatttaaagacgtgagtaaaatggttctatatattagatgaaattgttgtagagatttgctgtatggcatagtgccaagagttgacaagctagaatggtccacttcaaaaattaagagggtagatctcatgtcttgttcttaccacaaaaataaataaataaataaaacaaacaaataaaaacatgatgatcatgatgacggtacacatgatgatatgatggtgtttgcatacgttcagacttatcatattgtaagttattgcagttctttcttctatgtgtaacaagtataccacaataaagctattaaaaaatgaagaaccagaacagasagtaaataaacattagcaagggatattagatacattttttgaagggt

SEQ ID NO: 266726 - DNA, 569 bp, Homo sapiens
agggcctgcagagattccccctggagcttccaagcacagattcagtagccagtaatttctactttcccagataatgtgcaaggaccatggtgctgattagcccttaaatcacactctcccaggaaaagtaaagcctttaattttgttaacgggcagagatgtgtcctggcttttttctttttcaccttcaacacttctttggcagtttaaagacatggtgtgagaatgcatgtctgtgtatctgtgtgtcagtcgatgcaaaaaccagagttgaagattttgctcctttgagatgtacactaagaatcctcactaaattagtaagaaaagtttctccattaaagccaacttggaatcagcatctgagtttgaattatgggaaggactgtgtgtgggtttttttcccattattatctaaaaccaatcttatgaatcctgctgatatttacgttctctggtacctggatggcaakgaagacagagaaagagacggtggaaataaagtcagttagtcatatgactatctttgttaaattaactgggagtctctcgaaagaaagctgatgccc

SEQ ID NO: 266727 - DNA, 484 bp, Homo sapiens
ttaaaaaaagaataaaacaactagtcatttcacgaagcagcagctaactccttaagttttcataaaataatgtttaataacaatttgataaagctatgaaatgtgaaacctggagttgaagataaactgctttattatcatcttgtatttattgcgaatatacaaggtttctcttatagtattacaactatgggtttaagttagctatttttgtctatgattcatctttttaaagttttrttacctgcaatttttgtcttttaagagcccagaattgtgaatttaaaaaaaaaataaaggaattctttattcaaagccttcttactcagatgtcaaccacgcaaaaacatgaatataaagctcttttgcttgaacaagagatggtcccaagaaccctgtttggctcccagtctcctctaagaacgctgggagtaatattaccaaatttaaaaatggctgctgtaagtcatgcaagggctacaca

SEQ ID NO: 266728 - DNA, 571 bp, Homo sapiens
caagtgtgaataaatagatgaggcaatatggaaaatacacagagaacagaagacatgtattctgtcttcaataatttttccaaaaaatgaaaacaagaggagttctaaacactgtgatatagatgggtgaaaaggccattctgcagaagctagcatgaggatrcatactccagagagtacctgcaggtttcacaaagaatgtgtcatgttctgaatgttcgtgtccccccaaatttcatatgatgagatcctaaccctcgaagtgatggtattaggaggcagggaatttgggagtttattaggtcatgagggtggagctctcaggaattggacagtagccttacaaaagatactcaaaagagacctcactaacccctttcactgtgtgagaacacagcaagaagacattgtttattaagtcagaaagcaggccttcaccagacattgaatctgtcttgatcttggacttcccagccataagaactatgaaaaataaatttataagctatccaatttatagtattttgttatagaagcctgaacagactaaaataggacaggtcttggaata

SEQ ID NO: 266729 - DNA, 324 bp, Homo sapiens
tttctcctgttccacctccactgtgctgcaaacttgtcttatcaaaatccactgtctttgtcttattcatcagggtttccttggcctttggagtaaatattytcacttcagtggaaaacttgtgatgaatcatttaaatctatctaactgtgactttacataaagaaaagcttaaatatatagaatacataaaggacaaacaaaaacaacatacattaaagctacatacaaattcttacatgtgtatatttattatacatgtttatataacctttattttgattgcatgaaaaatggaaagatcataggagacaggataactat

SEQ ID NO: 266730 - DNA, 631 bp, Homo sapiens
tcctacattatatattcttacatcctacattcaattatttataagaattttctttgacattttttacctaaaacaataaagttatcacaatagatatgtctgtccacattgtatagattttttttaaagcaagactgaaagtttaagtgatgtacccaaattatggtgcttgcaaatagtgcaggtactttttttaatgaaaagatttcataaattgaatttctgaggctgtatggattaagtcactgcaagatatgaaatccagtgtgatcrcctctaacttaaactcttcaaaactgtgacaattatagtagagaagggaaatgctcttaagccaataagcccttttaaaatgtacctaacacaaagtacttatatttattactttggagaagatatgattatgtcacacaagactaaggaaaacataaagcaaagcaaaatgtctccttcataatagttatgataaatgtgcatttagatgatttgagattttccactttcttgcggagttacttataaacattatgatgcactataaaagattacttttcaatttctctgtgacacctgtgatcatattgtacttacatttctgctgctattctgaaaactcgcattttctgagata

SEQ ID NO: 266731 - DNA, 443 bp, Homo sapiens
cacatggcttgggaggccactcaatcatggcagaaggtgaaaggcatgtcttccatggtgccaggcaagagagaaagcatgagcaggggaactcccctttataaaaccatcagatctcgtgacattttttcactatcatgagaacagcacaggaaagacctacccacccccccccatgattcaattacctcccaccggatctctctaatgacacgtgggaattatgggagctctaatttgaggtttgggtgggcacagccaagccgtatcactccttgaggtaccactttccctgtattctattttttttttttgagasagtttcactctgtcacccaggctggagtgtagtggcacaatctcagctcattgtaacctccgcctccttggttcaagtgattctcctgcctcagcctcctgagtagcggggattacaggagtgt

SEQ ID NO: 266732 - DNA, 443 bp, Homo sapiens
cacatggcttgggaggccactcaatcatggcagaaggtgaaaggcatgtcttccatggtgccaggcaagagagaaagcatgagcaggggaactcccctttataaaaccatcagatctcgtgacattttttcactatcatgagaacagcacaggaaagacctacccacccccccccatgattcaattacctcccaccggatctctctaatgacacgtgggaattatgggagctctaatttgaggtttgggtgggcacagccaagccgtatcactccttgaggtaccactttccctgtattctattttttttttttgagacagtttcactctgtcacccaggctggagtgtagtggcacaatctcagctcattgtaacctccgcctccytggttcaagtgattctcctgcctcagcctcctgagtagcggggattacaggagtgt

SEQ ID NO: 266733 - DNA, 587 bp, Homo sapiens
atttttctatttttagtagagatggagttttaccatgttggccaggctggtctcaaactctgacctcaaagtgatccaccccttcttggcctcccaaaaagctgggattacaggcrtgagccactgcgctccgccctttttttttttttataatggcacttagtagtatagattttcctctaagtactgctttagtggtgtttttatatccaatattggcatctagtgccaatttccttgtaaatcctactcttctgttataatgtgaaagcagccacagacactatctaagtgaatgaacttagacactatttaagtgattgctgggtcaaatggtagttctgtttttagctctttgagaaactgccacactactttccacaatggttgaactagtttacaccccccagcaacagtgtataagagttcccttttctctgcaaccttgatagtatctgttattttttgactttttaataatagttattctgactggtgtgagatggtatctcatcgtggttttaatttgcatttctctaatgatcagtgatgttgaacttttttacatatgcttgttggccgcatgt

SEQ ID NO: 266734 - DNA, 587 bp, Homo sapiens
atttttctatttttagtagagatggagttttaccatgttggccaggctggtctcaaactctgacctcaaagtgatccaccccttcttggcctcccaaaaagctgggattacaggcgtgagccactgcgctccgccctttttttttttttataatggcacttagtagtatagattttcctctaagtactgctttagtggtgtttttatatccaatattggcatctagtgccaatttccttgtaaatcctactcttctgttataatgtgaaagcagccacagacactatctaagtgaatgaacttagacactatttaagtgattgctgggtcaaatggtagttctgtttttagctctttgagaaactgccacactactttccacaatggttgaactagtttacaccccccagmaacagtgtataagagttcccttttctctgcaaccttgatagtatctgttattttttgactttttaataatagttattctgactggtgtgagatggtatctcatcgtggttttaatttgcatttctctaatgatcagtgatgttgaacttttttacatatgcttgttggccgcatgt

SEQ ID NO: 266735 - DNA, 608 bp, Homo sapiens
taaattacattcaggatataaattgtattaatctcatctaacttagatatgcattcaagttcaaaagagcttctttcctgtcacaattctgggacaactgattttaggaacacaactgtggataaagttttttcaaacaggtgggcctataaactgccataattctatatgaagatgaatatagtttccaaaattgttctgaggaaaaaccacaaaaaaaaaccagaccaaatacaactaaaagcaacaatgacattaaattgtaaagccaaaatatacagttcaaagttattttgtaatgcatgtatacctccgttttccaaaaggtgttaagatatgcaaagtcytacttctctaatacttgtttccttttcccattaaaattaataattacatttgttaatacttacttcacttaactagtaagaacaaaatcaagaacatagagtctagtatacagcagaacctcaattaaaatttgatggaaaaagtacgtatcttcaatatttgtccaaatatttatatttatttaatctagaagcagcttaattaatttctcaatttatcctaataacacacttttatgagcactgcactaaataccaaat

SEQ ID NO: 266736 - DNA, 589 bp, Homo sapiens
tcttttgctttactgctttactggctagatccttccttttctgtatcccggatcctatgctttgcttaatccattgcttggcataagcatatcctccaaaagcttcctgaggcagatggtgttgaagggatatttctcaatatcttgtgtgactgaaaataacttcattaytccctcgtgattaattaaaagtttggctaagtagactgaaaataattttctttaataatatgaaggcattgctccataaatataaatcacagtgcactatttggtgttttggtatctagagttttattaagaagtatagtgcttttctcaatattgattttaaatataaaatgtgattttatattattttatattacatttataatataaatattaaccacctcagaaagagcaaagcaaagagatatcacaggatgactgctgtattagacctgaagaaatataagttcagattggagaaagagaaaagaggccggagaagagagaccttcagaaaaataaatgtaatatatattatgttatattgtattattgctttgataatatactctcctacactaactttatcctgctttga

SEQ ID NO: 266737 - DNA, 589 bp, Homo sapiens
tcttttgctttactgctttactggctagatccttccttttctgtatcccggatcctatgctttgcttaatccattgcttggcataagcatatcctccaaaagcttcctgaggcagatggtgttgaagggatatttctcaatatcttgtgtgactgaaaataacttcattattccctcgtgattaattaaaagtttggctaagtagactgaaaataattttctttaataatatgaaggcattgctccataaatataaatcacagtgcactatttggtgttttggtatctagagttttattaagaagtatagtgcttttctcaatattgattttaaatataaaatgtgattttatattattttatattacatttataatataaatattaaccacctcagaaagagcaaagcaaagagatatcacaggatgactgctgtattagacctgaagaaatataagttcagattggagaaagagaaaagaggccggagaagagagaccttcagaaaaataaatrtaatatatattatgttatattgtattattgctttgataatatactctcctacactaactttatcctgctttga

SEQ ID NO: 266738 - DNA, 628 bp, Homo sapiens
cctgacctgtggagtgtgggctattccggtggcaaaggccaagtagaattacgtctacctagggatacaataaaacaaaagccagagcacattcctaaagggattgcagagatcagtgcccccattcaaggacttgaaagacgtagaggtggtgattcccaccacatcaccattcaacttatctatttggcctgtgcagaggacagatggacctttcaaaatgacagtggattattgtaagcytcaccaggtggttactccaattgcaactgctataccagatgtggtttaatttcttgagcaaatgaacacatcccctggtacttgatctgaaaagtgctttttccttcatacctgtcaataaagaccatttgaagcagtttgcttttagctgccaaagccagaaatatatcttcatgatcctacctctcgggtctctcagctctccagccatatgtcataattttgttcacagacattttattgtcttgcccttttataagggatcacactggtccatgatagtatgttaattggacctagtggccaagaagtagccaccaccctagatgtattggtaagacatttgtatgtcagagaaataaatcggacacaaattgaaggccca

SEQ ID NO: 266739 - DNA, 628 bp, Homo sapiens
cctgacctgtggagtgtgggctattccggtggcaaaggccaagtagaattacgtctacctagggatacaataaaacaaaagccagagcacattcctaaagggattgcagagatcagtgcccccattcaaggacttgaaagacgtagaggtggtgattcccaccacatcaccattcaacttatctatttggcctgtgcagaggacagatggacctttcaaaatgacagtggattattgtaagcctcaccaggtggttactccarttgcaactgctataccagatgtggtttaatttcttgagcaaatgaacacatcccctggtacttgatctgaaaagtgctttttccttcatacctgtcaataaagaccatttgaagcagtttgcttttagctgccaaagccagaaatatatcttcatgatcctacctctcgggtctctcagctctccagccatatgtcataattttgttcacagacattttattgtcttgcccttttataagggatcacactggtccatgatagtatgttaattggacctagtggccaagaagtagccaccaccctagatgtattggtaagacatttgtatgtcagagaaataaatcggacacaaattgaaggccca

SEQ ID NO: 266740 - DNA, 526 bp, Homo sapiens
cctcaccaggtggttactccaattgcaactgctataccagatgtggtttaatttcttgagcaaatgaacacatcccctggtacttgatctgaaaagtgctttttccttcatacctgtcaataaagaccatttgaagcagtttgcttttagctgccaaagccagaaatatatcttcatgatcctacctctcgggtctctcagctctccagccatatgtcataattttgttcacagacattttattgtcttgcccttttataagggatcacactggtccatgatagtatgttaattggacctagtggccaagaagtagccaccaccctagatgtattggtaagacatttgtatgtcagagaaataaatcggacacaaattgaaggcccataaagtcaagaaaacaaaagacaaacaaaataggggaaaaatagtgatcttccacctcaatgacattcctcagggtctattggtgtggaayatgccaagatattccttctaagatggaggataagttgttgcttatggc

SEQ ID NO: 266741 - DNA, 598 bp, Homo sapiens
aaagcacacaaggcttcttgaggaccatactcagaactggtatagtgttttytctgctgccttctattcatcaaagcaagttataaggctagtccaggttcaagggatggggaaaaatacctctttatggaaggagctgccaacatatgataacaaacatgaatacagggaagagaatactttaggctatttttgcagtcagcgtaacttaaggtcattcttccaattatcagatcattattctaagatcattattaactcatgcatttgattgtatgatgtatttgtcaattgcggttattatcttcattgatattcaagttgtccatatttggagagtggggtcctgtgtttacttgagaatttcctgacacatcttctgtggctggaaactatatttcccagaattaccttccctatgtggctttaagtcagaagtaacttacgcaaaatttggaagttggaagtggaagcagatattcagtggcttcacagacctctccatgagctaccattttgcctgtgggaggaagactaaaagcttctcacactcttctcaaattcttgcctttcaagccacttgacgcttcaagctgaa

SEQ ID NO: 266742 - DNA, 593 bp, Homo sapiens
aggctctctcaaggaaagatctaatacacctccgtgactgtcacatttcctattcaaattatagtggcccttgaagttttctttccccataatgataacatagcttttgaatgccaaatgtaatatatactatcttagcaatatgtcatgtggacaatttgatcttgcacttactgtgaaagtaaattatatacaagaaaagtttccaagaaaatgcaacaagaccatatacaatgcagaaagaattaaaatggcataaggcttctcaatagcaacagcagaagcaaggggaaaacaaatcagtrttttttaagtgctgaagaaactttaaattaggattttatgtctagataatcatttaaatgtaaggtaagttgaagatgttctcaagcatacgaagtctcagaaattttatcacactaaaactaaaaccattattgaaaacacttttggaaataataacactttttatttaaccactatcaaaaatagaaaaaaaaaacaataaaaacagaaagaaatgaaaacaatgcatcaataagtgaaatgggagagttctctaaccctcctcacaggacacgtgacaaggatgt

SEQ ID NO: 266743 - DNA, 573 bp, Homo sapiens
acatgatttggtatactgggaatatagctggtactcaagtaatacttttgaaggaatgaagagcccacatatacaattatagcataccatttttatttaaatagccttcattgaactcttctgtctggaatagtaatgggaaagttcaggagacaggagatagggcctggaaggtagtgcagatggggctgagtgtgagttttgtctataaaaggcctctggctgagtatgggtggggaggttttatatgtccttgaacatgagactaggtgacttttagaacagttgtagatcagatgtaaacatgcatatgcatgcattcatgttatttcrtaggctattgagattttattgcaattagtttcactttcagtttctcagagtgaaagggtctagtttggcagtgttgccttaacgggcactgcagccttactggcatcagctgttcaatttagctccctttaaacctatttaacaaaggactagcatcctataccaaacttttacaaccttttaccaaacctttttctgatctgtgccgatcagaagcttttgctaattctgcatgtttaa

SEQ ID NO: 266744 - DNA, 599 bp, Homo sapiens
tctatcccaattcaactgattaaaaaatagatatagaatttctcccaattccaacatgttatcaaccatggaagcagaaatatatggggggaaatggcctgtttagaataggagtttggctgggcaagatggctcacattcctaatatcagcattttgggagacggaggcgggaggctcactcaargccaggaattcaagagcagcctgggcaacatagtaagacctagtattagttcattttcacactgctaaaaagaacttccctgagactggctaatttataaaggaaagaggttttattgtctcacagttccacttggctgggaaggcctcaggaaacttacaatcatgcagaaggggaagcaggcatcttcttcacaaggcagcaggagacagagaagtggaggaagaacttccaaacacttataaaaccaacagatctcgtaagaactcactcactgtcatgagaacagcataaggaaaccacccccgtgatccaatcaccttttccctccacacatgggtattacaggtcctttcctagagatgtggggattacaattagagatgagattgggtggggacacagagccaaac

SEQ ID NO: 266745 - DNA, 599 bp, Homo sapiens
tctatcccaattcaactgattaaaaaatagatatagaatttctcccaattccaacatgttatcaaccatggaagcagaaatatatggggggaaatggcctgtttagaataggagtttggctgggcaagatggctcacattcctaatatcagcattttgggagacggaggcgggaggctcactcaaagccaggaattcaagagcagcctgggcaacatagtaagacctagtattagttcattttcacactgctaaaaagaasttccctgagactggctaatttataaaggaaagaggttttattgtctcacagttccacttggctgggaaggcctcaggaaacttacaatcatgcagaaggggaagcaggcatcttcttcacaaggcagcaggagacagagaagtggaggaagaacttccaaacacttataaaaccaacagatctcgtaagaactcactcactgtcatgagaacagcataaggaaaccacccccgtgatccaatcaccttttccctccacacatgggtattacaggtcctttcctagagatgtggggattacaattagagatgagattgggtggggacacagagccaaac

SEQ ID NO: 266746 - DNA, 622 bp, Homo sapiens
aactaccatgctattggtttgcttactttttattatttcatgtaaaatctaagacaaaatacattaaatgcttattgacatatgtatttattcttcaccaggctgataatatctgcctaattttaaactttcttccattttgtaggtttcaacttattctattgtaagatactgttaaatctaatagaggcattgtcacttttacgtataattttattttatttcatatatttcctattggytttttacatttaaattatggagcacttcatcatataaaaaacttcaattatatttaaacagtaagtctttggatttttttgccttttaatttccatattacataataatgagataaacattaatgttttcagggtactttaaattttagataattactcattgtattcatgtgaaatttgtttttactgcatgtgtgggttggaggacggttttcacttctgattcatctttactcttatctcatcagagctcatacctcttgtagttgggggattgcagtttataattccaataaatggggcaaattcaataataacataatacaaatgagtttgaatgcaggacaggtcttcaaagcatacacaacatgggcctacat

SEQ ID NO: 266747 - DNA, 622 bp, Homo sapiens
aactaccatgctattggtttgcttactttttattatttcatgtaaaatctaagacaaaatacattaaatgcttattgacatatgtatttattcttcaccaggctgataatatctgcctaattttaaactttcttccattttgtaggtttcaacttattctattgtaagatactgttaaatctaatagaggcattgtcacttttacgtataattttattttatttcatatatttcctattggttttttacatttaaattatggagcacttcatcatataaaaaacttcaattatatttaaacagtaagtctttggatttttttgccttktaatttccatattacataataatgagataaacattaatgttttcagggtactttaaattttagataattactcattgtattcatgtgaaatttgtttttactgcatgtgtgggttggaggacggttttcacttctgattcatctttactcttatctcatcagagctcatacctcttgtagttgggggattgcagtttataattccaataaatggggcaaattcaataataacataatacaaatgagtttgaatgcaggacaggtcttcaaagcatacacaacatgggcctacat

SEQ ID NO: 266748 - DNA, 542 bp, Homo sapiens
taaacagtaagtctttggatttttttgccttttaatttccatattacataataatgagataaacattaatgttttcagggtactttaaattttagataattactcattgtattcatgtgaaatttgtttttactgcatgtgtgggttggaggackgttttcacttctgattcatctttactcttatctcatcagagctcatacctcttgtagttgggggattgcagtttataattccaataaatggggcaaattcaataataacataatacaaatgagtttgaatgcaggacaggtcttcaaagcatacacaacatgggcctacatatgtacaacaataataatttataagttactgtttggatggaaagtaaaagtacagaaaatttgttaaaggaaattaaaatggagatcatgtctcaataatctctgagcagacaaaattagttaggtctcataagtgatctcaacctcgcttgatttgcaaatacaaacaaaacttacattatttcttgtagctgcatattgaaaaaagagaaatga

SEQ ID NO: 266749 - DNA, 542 bp, Homo sapiens
taaacagtaagtctttggatttttttgccttttaatttccatattacataataatgagataaacattaatgttttcagggtactttaaattttagataattactcattgtattcatgtgaaatttgtttttactgcatgtgtgggttggaggacggttttcacttctgattcatctttactcttatctcatcagagctcatacctcttgtagttgggggattgcartttataattccaataaatggggcaaattcaataataacataatacaaatgagtttgaatgcaggacaggtcttcaaagcatacacaacatgggcctacatatgtacaacaataataatttataagttactgtttggatggaaagtaaaagtacagaaaatttgttaaaggaaattaaaatggagatcatgtctcaataatctctgagcagacaaaattagttaggtctcataagtgatctcaacctcgcttgatttgcaaatacaaacaaaacttacattatttcttgtagctgcatattgaaaaaagagaaatga

SEQ ID NO: 266750 - DNA, 586 bp, Homo sapiens
gatcactgaaactaaaaattcagaaataaaccaaagtgtctaagaaagtgtcatagtgcatcttggctgctataacaaaataccttagactgggtaaaggataaataagagaaatgtatttttcacagttatggagtctggaaagtgcaagatcaaggcagcagcaaatttcgtatatggtgagagccctattccccatagatggtaccatctcgcacatgggacaagggcattcccttcaacttcctttgaaagagcactgattccattcatgaagatgaagaactcttggcttcaccactttcccaaaggcctcacgcctaaaattatacacatgaatttgaaaggggacataaacattcaggccatagcaataaaaactacatgggtgrtggcatcatttatacatgaggtgtaaaaatgtgatgttcttatcacaaaggaaataaatgatttattcttcatggcatatatcaaaatgaaggtccaatgaaaatatttttatgaagataaatctatatggcaaaaaattaagtattgataagtttaaccctacaggttgcatcaggattttcaaggtttccag

SEQ ID NO: 266751 - DNA, 579 bp, Homo sapiens
aggaagagcacagacacatccacacaagtatggtgttcctcaaatagaggacttctccttgtgctggagccacctatgttgcactcgatcagaggctttcccaggatagcatttctctgcagccctaccwcagtcttaaccctgaaaatcccactcagaaggcgacggatgaacacccaccctagcattctaatctaatggatcctctcttaacaatcccttccagggatctgggatctttcctggattcgtcggccacacacacctaggctcaaaaatttggacagaaactttgatcctcattggccctcctgccctgtcctaccagcttctctagaagtatgcttctctagaagtatgcttctctaattgctccttagagacactatctaagggtatcaacctgtgccaatataattgatctcataaagtgagaagggaaataggcaagagtccagctagcctagaagcagtgtctagggttccttacctgatttatgtctctgatttacctaaatattgacaaatacagattcacctctaggcagtagaaaaacagaaggagaaatcccagttcgt

SEQ ID NO: 266752 - DNA, 579 bp, Homo sapiens
aggaagagcacagacacatccacacaagtatggtgttcctcaaatagaggacttctccttgtgctggagccacctatgttgcactcgatcagaggctttcccaggatagcatttctctgcagccctacctcagtcttaaccctgaaaatcccactcagaaggcgacggatgaacacccaccctagcattctaatctaatggatcctctcttaacaatcccttccagggatctgggatctttcctggattcgtcggccacacacasctaggctcaaaaatttggacagaaactttgatcctcattggccctcctgccctgtcctaccagcttctctagaagtatgcttctctagaagtatgcttctctaattgctccttagagacactatctaagggtatcaacctgtgccaatataattgatctcataaagtgagaagggaaataggcaagagtccagctagcctagaagcagtgtctagggttccttacctgatttatgtctctgatttacctaaatattgacaaatacagattcacctctaggcagtagaaaaacagaaggagaaatcccagttcgt

SEQ ID NO: 266753 - DNA, 579 bp, Homo sapiens
aggaagagcacagacacatccacacaagtatggtgttcctcaaatagaggacttctccttgtgctggagccacctatgttgcactcgatcagaggctttcccaggatagcatttctctgcagccctacctcagtcttaaccctgaaaatcccactcagaaggcgacggatgaacacccaccctagcattctaatctaatggatcctctcttaacaatcccttccagggatctgggatctttcctggattcgtcggccacacacacctaggctcaaaaatttggacagaaactttgatcctcattggccctcctgccctgtcctaccagcttctctagaagtatgcttctctagaagtatgcttctctaattgctcctkagagacactatctaagggtatcaacctgtgccaatataattgatctcataaagtgagaagggaaataggcaagagtccagctagcctagaagcagtgtctagggttccttacctgatttatgtctctgatttacctaaatattgacaaatacagattcacctctaggcagtagaaaaacagaaggagaaatcccagttcgt

SEQ ID NO: 266754 - DNA, 581 bp, Homo sapiens
gggacacatggtatggatggtgtcrgcatactgttatgctgaagatgtcaagagtggtgactgatatctcaagaagtgggccaaaagtccacttctggttactctgcttggtatggtctaggaattcttcaaccatgagacaaataggtcaactttcaccagcaaccccaagtctggtttgcagtattagactctgcgttagacacagatttaggttcaatctgcagcttgattgttgtcactctctagaaaacaaacccttaccatggacttctagatgagtgatccagttagatcagcatctgagattgtctccagtttgcagcccaaaagacattcagacagtctacagtttccattgtagataaccaaacagatagaatatgtgccattatcccaaaccctgagttctgacctttgagaggagcaaccactcatgtcaggttctgtatggctggcacaggttaaacagccacagcggcccagtggacatcatgaggtttcaccttccctgactcatctatgaaccaggaccagtcatataggaaacactcagtaaattgggggccccacagagacag

SEQ ID NO: 266755 - DNA, 620 bp, Homo sapiens
ggtctcaaaagcctaaaagatggcacagattagcttcacgggacacatggtatggatggtgtcagcatactgttatgctgaagatgtcaagagtggtgactgatatctcaagaagtgggccaaaagtccacttctggttactctgcttggtatggtctaggaattcttcaaccatgagacaaataggtcaactttcaccagcaaccccaagtctggtttgcagtattagactctgsgttagacacagatttaggttcaatctgcagcttgattgttgtcactctctagaaaacaaacccttaccatggacttctagatgagtgatccagttagatcagcatctgagattgtctccagtttgcagcccaaaagacattcagacagtctacagtttccattgtagataaccaaacagatagaatatgtgccattatcccaaaccctgagttctgacctttgagaggagcaaccactcatgtcaggttctgtatggctggcacaggttaaacagccacagcggcccagtggacatcatgaggtttcaccttccctgactcatctatgaaccaggaccagtcatataggaaacactcagtaaattgggggccccacagagacag

SEQ ID NO: 266756 - DNA, 620 bp, Homo sapiens
ggtctcaaaagcctaaaagatggcacagattagcttcacgggacacatggtatggatggtgtcagcatactgttatgctgaagatgtcaagagtggtgactgatatctcaagaagtgggccaaaagtccacttctggttactctgcttggtatggtctaggaattcttcaaccatgagacaaataggtcaactttcaccagcaaccccaagtctggtttgcagtattagactctgcgttrgacacagatttaggttcaatctgcagcttgattgttgtcactctctagaaaacaaacccttaccatggacttctagatgagtgatccagttagatcagcatctgagattgtctccagtttgcagcccaaaagacattcagacagtctacagtttccattgtagataaccaaacagatagaatatgtgccattatcccaaaccctgagttctgacctttgagaggagcaaccactcatgtcaggttctgtatggctggcacaggttaaacagccacagcggcccagtggacatcatgaggtttcaccttccctgactcatctatgaaccaggaccagtcatataggaaacactcagtaaattgggggccccacagagacag

SEQ ID NO: 266757 - DNA, 501 bp, Homo sapiens
ttttaactctcactaaacataaatatctgattttttcacctgagatctatgtatgtgtgttggagcatgcctttacyaatcagcataaagttacatctctccttgcgcctctactttctacttgtgcagagtttaaaatgcagaggtgagagcttagggttttctgggtcttttgctaagcatgtacctgaccttgagcatccccaattccccatttccttcttgatcccaaagaccgttatcacagtcttaattcccagcagcttttcctcctagagctttttgacatgattattcttagacccaactgatatccttcgttcctggtagactgcgtagctcatttccatttaaatgcttttagaaatattaaactatggatttaagatttatctgctttttaaattaagtaatgctgctcttagccttccacaggacttgagggttataaaaaaaaaggaagaaaataattattttataccaatagtatgaaaaagagac

SEQ ID NO: 266758 - DNA, 501 bp, Homo sapiens
ttttaactctcactaaacataaatatctgattttttcacctgagatctatgtatgtgtgttggagcatgcctttaccaatcagcataaagttacatctstccttgcgcctctactttctacttgtgcagagtttaaaatgcagaggtgagagcttagggttttctgggtcttttgctaagcatgtacctgaccttgagcatccccaattccccatttccttcttgatcccaaagaccgttatcacagtcttaattcccagcagcttttcctcctagagctttttgacatgattattcttagacccaactgatatccttcgttcctggtagactgcgtagctcatttccatttaaatgcttttagaaatattaaactatggatttaagatttatctgctttttaaattaagtaatgctgctcttagccttccacaggacttgagggttataaaaaaaaaggaagaaaataattattttataccaatagtatgaaaaagagac

SEQ ID NO: 266759 - DNA, 212 bp, Homo sapiens
gagataaatgcaatggagattatacaaaccacagaattccaaaaaaccaaaagttcattctcacttcttcaaaaaattaacaattggcaaactttcagctacacacacaaaaaattaacagcrtattcacatactaaaatgagaaatgaaagtgggacattactactaattcaaagaattaaaatgtttaaaaaactgtactgtgaactatg

SEQ ID NO: 266760 - DNA, 626 bp, Homo sapiens
actagtacaaaaagaaaaaaaaaacagaaaatcacaagtgttggtgaggaagtggagcagttagaacccttgtacacttggtggaaatgtaaaatgctgcagctgctataaaacaacaccatagtaacgaaataatttacactcaaaatcaccgtatgatccagcaatttcacatcttggtatgttgcaaaagatgtgaaagcgaagacacaaaataatacacgtacacctaagctcatagcagcatgactcacttcactcaaaakgtttttgaattacctgtgttgtttgaattatcgtcaatgaataaatagataaaatgtgatttatacatacagtgggatattattcagttatgaaaaataaggaaattctgacacatggtaagtcatgcatgaaccttaaggacattgtgcaaagtgacatgagccagtcataaaaggacaaatactgtatcattccacttatgagatacttagagtagttaaattctggaaacccacgtagaagagtggttcctaggagctggagggggagtaacagggagctgttatttaatgtgtattgaattttggtttggaagttgaaaaaagatccttatgaatgggaataatagttgcaaaaca

SEQ ID NO: 266761 - DNA, 626 bp, Homo sapiens
actagtacaaaaagaaaaaaaaaacagaaaatcacaagtgttggtgaggaagtggagcagttagaacccttgtacacttggtggaaatgtaaaatgctgcagctgctataaaacaacaccatagtaacgaaataatttacactcaaaatcaccgtatgatccagcaatttcacatcttggtatgttgcaaaagatgtgaaagcgaagacacaaaataatacacgtacacctaagctcatagcagcatgactcacttcactcaaaatgtttttgaattacctgtgttgtttgaattatcrtcaatgaataaatagataaaatgtgatttatacatacagtgggatattattcagttatgaaaaataaggaaattctgacacatggtaagtcatgcatgaaccttaaggacattgtgcaaagtgacatgagccagtcataaaaggacaaatactgtatcattccacttatgagatacttagagtagttaaattctggaaacccacgtagaagagtggttcctaggagctggagggggagtaacagggagctgttatttaatgtgtattgaattttggtttggaagttgaaaaaagatccttatgaatgggaataatagttgcaaaaca

SEQ ID NO: 266762 - DNA, 626 bp, Homo sapiens
actagtacaaaaagaaaaaaaaaacagaaaatcacaagtgttggtgaggaagtggagcagttagaacccttgtacacttggtggaaatgtaaaatgctgcagctgctataaaacaacaccatagtaacgaaataatttacactcaaaatcaccgtatgatccagcaatttcacatcttggtatgttgcaaaagatgtgaaagcgaagacacaaaataatacacgtacacctaagctcatagcagcatgactcacttcactcaaaatgtttttgaattacctgtgttgtttgaattatcgtcaatgaataaatagataaawtgtgatttatacatacagtgggatattattcagttatgaaaaataaggaaattctgacacatggtaagtcatgcatgaaccttaaggacattgtgcaaagtgacatgagccagtcataaaaggacaaatactgtatcattccacttatgagatacttagagtagttaaattctggaaacccacgtagaagagtggttcctaggagctggagggggagtaacagggagctgttatttaatgtgtattgaattttggtttggaagttgaaaaaagatccttatgaatgggaataatagttgcaaaaca

SEQ ID NO: 266763 - DNA, 626 bp, Homo sapiens
actagtacaaaaagaaaaaaaaaacagaaaatcacaagtgttggtgaggaagtggagcagttagaacccttgtacacttggtggaaatgtaaaatgctgcagctgctataaaacaacaccatagtaacgaaataatttacactcaaaatcaccgtatgatccagcaatttcacatcttggtatgttgcaaaagatgtgaaagcgaagacacaaaataatacacgtacacctaagctcatagcagcatgactcacttcactcaaaatgtttttgaattacctgtgttgtttgaattatcgtcaatgaataaatagataaaatgtgatttatacatacagtgggatattattcagttatgaaaaataaggaaattctgacacatggtamgtcatgcatgaaccttaaggacattgtgcaaagtgacatgagccagtcataaaaggacaaatactgtatcattccacttatgagatacttagagtagttaaattctggaaacccacgtagaagagtggttcctaggagctggagggggagtaacagggagctgttatttaatgtgtattgaattttggtttggaagttgaaaaaagatccttatgaatgggaataatagttgcaaaaca

SEQ ID NO: 266764 - DNA, 600 bp, Homo sapiens
actgtacatttcatgcgcgtccgtgtgaagagaccaccaaacaggctgtgtgtgagcaacatggctgtttatttcacctgggtgcacgcgggctgcgtccgaaaagagagtcagcgaagggagataagggtggagccgttttataggatttgggtaggtaaaggaaaattacagtcaaagggggtttgttctctggcgggcaggagtgggggtcgcaagatgctcagtgggggtgctttttgagccaggatgagccaggaaaaggactctcacaagataatgtcatcagttaaggcaaggaccggccatttacacttcttttrtggtggaatgtcatcagttaaggtggggcagggcatattcacttattttgtgattcttcagttacttcaggccatctgggcgtatacgtgcaagtcacgggggatgcgatggcttggcttggtctcagaggcctgacatacactcccagtcttttggtcacagggctgtgggactgaggagggaaattaaagaaaaataaaattaaaaagaaagagaaataaattttcttgtattgggctgacttgtcccagaggcttcaacaggcacagcccagaa

SEQ ID NO: 266765 - DNA, 621 bp, Homo sapiens
ttaactgctctcagcctgtttgtcggtaggcttcagaactataatcacagcatgtaccgggacccggggtgcatagccctggagggaggggcagagcggtgtggacttcccggtgtccaaagcactgctgagttcttatgctatgccgactctttgccaaggagaatgagtacataggtggacctagaggacaggtctgcgctgagcattgaggagggtattaccctacataggcaccttacctttgcccaaatcgggcgggttgtcctcaactgattggccctatccttctcaagttcctctttcagctgcacccagggttcttyccagagcattgcgccttctgcagcccagggcgctaccttctttcctaaactgctgtggaaactgtcctgatgtctgagacactgtccattgtgccgcagccctcttttttctctagccaagcctcatgctcaacagcttttgagagaaatcttccacgtggcctgcttatgaacagcttcagaattctgtagggggtgacaaggtctgtggcttcctggaaatgtcactctcaatggcgcctttttcacgaatgtgaaagttgaggcatcaggaaggttaattattgggttgcac

SEQ ID NO: 266766 - DNA, 621 bp, Homo sapiens
ttaactgctctcagcctgtttgtcggtaggcttcagaactataatcacagcatgtaccgggacccggggtgcatagccctggagggaggggcagagcggtgtggacttcccggtgtccaaagcactgctgagttcttatgctatgccgactctttgccaaggagaatgagtacataggtggacctagaggacaggtctgcgctgagcattgaggagggtattaccctacataggcaccttacctttgcccaaatcgggcgggttgtcctcaactgattggccctatccttctcaagttcctctttcagctgcacccagggttctttccagagcattgcgccttctgcagcccagggcgctrccttctttcctaaactgctgtggaaactgtcctgatgtctgagacactgtccattgtgccgcagccctcttttttctctagccaagcctcatgctcaacagcttttgagagaaatcttccacgtggcctgcttatgaacagcttcagaattctgtagggggtgacaaggtctgtggcttcctggaaatgtcactctcaatggcgcctttttcacgaatgtgaaagttgaggcatcaggaaggttaattattgggttgcac

SEQ ID NO: 266767 - DNA, 621 bp, Homo sapiens
ttaactgctctcagcctgtttgtcggtaggcttcagaactataatcacagcatgtaccgggacccggggtgcatagccctggagggaggggcagagcggtgtggacttcccggtgtccaaagcactgctgagttcttatgctatgccgactctttgccaaggagaatgagtacataggtggacctagaggacaggtctgcgctgagcattgaggagggtattaccctacataggcaccttacctttgcccaaatcgggcgggttgtcctcaactgattggccctatccttctcaagttcctctttcagctgcacccagggttctttccagagcattgcgccttctgcagcccagggcgctaccttctttcctaaactgctgtggaaactgtcctgatgtctgagacactgtccattgtgccgcagccctcttttttctctagccaagcctcatgctcaacagcttttgagagaaatcttccacgtggcctgcttatgaacagcttcagaattctgtagggggtgacaaggtctgtggcttcctggaaatgtcactstcaatggcgcctttttcacgaatgtgaaagttgaggcatcaggaaggttaattattgggttgcac

SEQ ID NO: 266768 - DNA, 494 bp, Homo sapiens
tcactgcagcctcaatctcttaggctccagtgatgctttcacctcagcctctcaagtagctgtatggcaaaaagcctcctactttttacttaaaacctgggactttaagccaggttgggcctgggaatagtggcagcaaaagcagcagccaaatgtatacacttcagatgtctacactcatgggcacaggcatattccacacttgctggarcacgagatgcctgagaggcacctgtttcccagctactaactgatgtccacacaccccattcacgtgtcttcatttaggtttctgcatcgtatatttgctcagccagtgcaaacacatcttctagggggcaacattaattgcagcacctgccccacttgttctgggagggagtcaagaggaatctggtcagctcctaatcccccaggacaaaggtgatgccctcttttcaggacttacatccagcagcgtcatctcgggatgggtttttcaaacacaagcagca

SEQ ID NO: 266769 - DNA, 494 bp, Homo sapiens
tcactgcagcctcaatctcttaggctccagtgatgctttcacctcagcctctcaagtagctgtatggcaaaaagcctcctactttttacttaaaacctgggactttaagccaggttgggcctgggaatagtggcagcaaaagcagcagccaaatgtatacacttcagatgtctacactcatgggcacaggcatattccacacttgctggaacacgagakgcctgagaggcacctgtttcccagctactaactgatgtccacacaccccattcacgtgtcttcatttaggtttctgcatcgtatatttgctcagccagtgcaaacacatcttctagggggcaacattaattgcagcacctgccccacttgttctgggagggagtcaagaggaatctggtcagctcctaatcccccaggacaaaggtgatgccctcttttcaggacttacatccagcagcgtcatctcgggatgggtttttcaaacacaagcagca

SEQ ID NO: 266770 - DNA, 575 bp, Homo sapiens
gaaacatatatcttggccagctcacaggtgtaataatgactctcatacctcaaacctgccactaagagaaatgctgtttttcatagggaggctttggaaaaccggtaggtcttaactcttccttttgtatgaaggacttagaggaatacaactctctcatattatataaagctcttaaatggtacaaagagtgttatcacagggatatgttgcataacctaggggaggggcccagttatatgtcacaattagcccaggggggcagggcacaggcatgagaagaatctcacctcatatgtgctggcctaagtgatayatcatcatccccactgtggacaggtcgcagtaagaacaggagagtcacatcattctaataatggtctcagatatacatcacaatgactcccctgggcagaaacaagggataaggttcacatcacctgtgggctaggcccagagatgtcactcttacttctgtgggcatgtctcaggctggagaggagaatcacattacctaagcactggatcaagaaatacttcacaatctttctcatgggcaaagcccaggtaagaga

SEQ ID NO: 266771 - DNA, 575 bp, Homo sapiens
gaaacatatatcttggccagctcacaggtgtaataatgactctcatacctcaaacctgccactaagagaaatgctgtttttcatagggaggctttggaaaaccggtaggtcttaactcttccttttgtatgaaggacttagaggaatacaactctctcatattatataaagctcttaaatggtacaaagagtgttatcacagggatatgttgcataacctaggggaggggcccagttatatgtcacaattagcccaggggggcagggcacaggcatgagaagaatctcacctcatatgtgctggcctaagtgatacatcatcatccccactgtggacaggtcgcagtaagaacaggagagtcacatcattctaataatggtctcagakatacatcacaatgactcccctgggcagaaacaagggataaggttcacatcacctgtgggctaggcccagagatgtcactcttacttctgtgggcatgtctcaggctggagaggagaatcacattacctaagcactggatcaagaaatacttcacaatctttctcatgggcaaagcccaggtaagaga

SEQ ID NO: 266772 - DNA, 494 bp, Homo sapiens
tcactgcagcctcaatctcttaggctccagtgatgctttcacctcagcctctcaagtagctgtatggcaaaaagcctcctactttttacttaaaacctgggactttaagccaggttgggcctgggaatagtggcagcaaaagcagcagccaaatgtatacacttcagatgtctacactcatgggcacaggcatattccacacttgctggaacacgagatgcctgagaggcacctgtttcccagctactaactgatgtccacacaccccattcacgtgtcttcatttaggtytctgcatcgtatatttgctcagccagtgcaaacacatcttctagggggcaacattaattgcagcacctgccccacttgttctgggagggagtcaagaggaatctggtcagctcctaatcccccaggacaaaggtgatgccctcttttcaggacttacatccagcagcgtcatctcgggatgggtttttcaaacacaagcagca

SEQ ID NO: 266773 - DNA, 645 bp, Homo sapiens
atcaatatgaaaaacagcaataatagtaatgtgcatcaggattcaggtatcttcctagtattgttttctccaaacctctttattcattattcactatttgtttcattgccattcgggcaactaggtagtaagaccattttctgctgaccaacagtcggtatacaagcaacaaattgctctggcctcctcctgaatagttcggaggatggcttctagttcagccagctggctgctcacacccctcccttcatcagaaacgcttatgtttttaacaggattataagccacggcctcccagcatcaggtcccatcaatgtatttggtggaacyatcagtaaccaagcgtgtttctgatcctctgggcttagttctttaaaggatttgccccattgggcaggggaggtttccttccctatatgcaggacttgccctgtggtttcctgagttggcaagttttgcacatcttcaagtaaaaatgataccgcttttagttctggcttatcctggtcttgtatgtaccatttccattttatgatactacattcttgagtgtaccctatccaatgggttttgagggagctcatgacccaagtcataataggaatttggggcctcataaaaacatcatgattaaaacaaaggtgt

SEQ ID NO: 266774 - DNA, 533 bp, Homo sapiens
aactaggtagtaagaccattttctgctgaccaacagtcggtatacaagcaacaaattgctctggcctcctcctgaatagttcggaggatggcttctagttcagccagctggctgctcacacccctcccttcatcagaaacgcttatgtttttaacaggattataagccacggcctcccagcatcaggtcccatcaatgtatttggtggaactatcagtaaccaagcgtgtttctgatcctctgggcttagttctttaaagratttgccccattgggcaggggaggtttccttccctatatgcaggacttgccctgtggtttcctgagttggcaagttttgcacatcttcaagtaaaaatgataccgcttttagttctggcttatcctggtcttgtatgtaccatttccattttatgatactacattcttgagtgtaccctatccaatgggttttgagggagctcatgacccaagtcataataggaatttggggcctcataaaaacatcatgattaaaacaaaggtgttctgct

SEQ ID NO: 266775 - DNA, 645 bp, Homo sapiens
atcaatatgaaaaacagcaataatagtaatgtgcatcaggattcaggtatcttcctagtattgttttctccaaacctctttattcattattcactatttgtttcattgccattcgggcaactaggtagtaagaccattttctgctgaccaacagtcggtatacaagcaacaaattgctctggcctcctcctgaatagttcggaggatggcttctagttcagccagctggctgctcacacccctcccttcatcagaaacgcttatgtttttaacaggattataagccacggcctcccagcatcaggtcccatcaatgtatttggtggaactatcagtaaccaagcgtgtttctgatcctctgggcttagttctttaaaggatttgccccattgggcaggggaggtttccttccctatawgcaggacttgccctgtggtttcctgagttggcaagttttgcacatcttcaagtaaaaatgataccgcttttagttctggcttatcctggtcttgtatgtaccatttccattttatgatactacattcttgagtgtaccctatccaatgggttttgagggagctcatgacccaagtcataataggaatttggggcctcataaaaacatcatgattaaaacaaaggtgt

SEQ ID NO: 266776 - DNA, 645 bp, Homo sapiens
atcaatatgaaaaacagcaataatagtaatgtgcatcaggattcaggtatcttcctagtattgttttctccaaacctctttattcattattcactatttgtttcattgccattcgggcaactaggtagtaagaccattttctgctgaccaacagtcggtatacaagcaacaaattgctctggcctcctcctgaatagttcggaggatggcttctagttcagccagctggctgctcacacccctcccttcatcagaaacgcttatgtttttaacaggattataagccacggcctcccagcatcaggtcccatcaatgtatttggtggaactatcagtaaccaagcgtgtttctgatcctctgggcttagttctttaaaggatttgccccattgggcaggggaggtttccttccctatatgcaggacttgccctgtggtttcctgagttggcaagttttgcacatcttcawgtaaaaatgataccgcttttagttctggcttatcctggtcttgtatgtaccatttccattttatgatactacattcttgagtgtaccctatccaatgggttttgagggagctcatgacccaagtcataataggaatttggggcctcataaaaacatcatgattaaaacaaaggtgt

SEQ ID NO: 266777 - DNA, 561 bp, Homo sapiens
acagacacacatatatatgaacctcacatgaagattttaaaataaatcaataatattttgtcagaacataaacaaaaaactgcaatatactgagaacaatattttaatacaccagttctgtaattaataataaagccagagagaatgttaaraagaaaacagaggacatgaaaatactgtaaaacagttagatgtaacagatgcatagagatcactctacacaacaacaaaactcacagtcttgtcaaaagctcataaaacattgtcctaaaaataaatataaggaaaaaaattttttaacagaattaaaaaaaattgaatgttacagaaaacacttcaaaaaatcaatcaacccaggagccggttttttgaaaagattaacaaaatagatagaccactagtaagacaaataaaggagaaaagagagaagaatcaaagagacgcaataaaaaacgacaaaggggatatcaccacgaaacccacagaaatacaaactaccatcagagaatactataaacacctctacggaaataaagtggaaaacctagaagaaattgataa

SEQ ID NO: 266778 - DNA, 563 bp, Homo sapiens
caagcaaatgaacagagaattatgttggcaatagacgtgtggttgattcatatttgactgattcatattcaactgtacacagttgaatatagtcatacaaaattataatatataggcagaatctaaaaacacaattaaataatgtaaggcagcctatcctaacaaggaaatacaagaatatataatattagaaaataaaattaaataaacattagcctgtgaaataccgaataaacaaagcatgcaacggaagaagactctttcyagataactagcatgttcaaccataactgggctcccataaagagcagattttgaattcttagcatatggttagagtaacaaaattgcacaacaaatacattataatctcccataaagagcatttagaagaaaattttaataaagatttcaatgatattagagacactttttattatgttcttaatatattactcctctttttatacaaatggaaaggctataatttatttattttttttaattttttgagatggagtctcgctttgtcacccaagctggagtgtagtggcgagacctcg

SEQ ID NO: 266779 - DNA, 563 bp, Homo sapiens
caagcaaatgaacagagaattatgttggcaatagacgtgtggttgattcatatttgactgattcatattcaactgtacacagttgaatatagtcatacaaaattataatatataggcagaatctaaaaacacaattaaataatgtaaggcagcctatcctaacaaggaaatacaagaatatataatattagaaaataaaattaaataaacattagcctgtgaaataccgaataaacaaagcatgcaacggaagaagactctttccagataactagcatgttcaaccataactgggctcccataaagagcagattttgaattcttagcatatggttagagtaacaaaattgcacaacaaatacattataatctcccataaagagcatttagaagaaaattttaataaagatttcaatgatattagagacactttttattatgttcttaatrtattactcctctttttatacaaatggaaaggctataatttatttattttttttaattttttgagatggagtctcgctttgtcacccaagctggagtgtagtggcgagacctcg

SEQ ID NO: 266780 - DNA, 563 bp, Homo sapiens
caagcaaatgaacagagaattatgttggcaatagacgtgtggttgattcatatttgactgattcatattcaactgtacacagttgaatatagtcatacaaaattataatatataggcagaatctaaaaacacaattaaataatgtaaggcagcctatcctaacaaggaaatacaagaatatataatattagaaaataaaattaaataaacattagcctgtgaaataccgaataaacaaagcatgcaacggaagaagactctttccagataactagcatgttcaaccataactgggctcccataaagagcagattttgaattcttagcatatggttagagtaacaaaattgcacaacaaatacattataatctcccataaagagcatttagaagaaaattttaataaagatttcaatgatattagagacactttttattatgttcttaatatattactcctctttttatacaaatggaaaggctataatttatttattttttttaattttttgagatggagtctcgctttgtcacccargctggagtgtagtggcgagacctcg

SEQ ID NO: 266781 - DNA, 660 bp, Homo sapiens
tattttttctgaatattagtacttggagcttcactgttaataatgccaataggctacacaaattttctcttcagtaaaatggcaaaacagaaggcattcaatttttaaatatacgatgcaattttattaccgtttttctatataaaagacacaaaatttagaccaataaaaacagaatttcttccatgaaatttcaagagctgagctgagctgggaagagctaacctgcttaatatcagagttttaaattaaagcaagaggcccacatcaaagaaatagttacgcctttttgtcttcctttctgtgattgtgttaaacaacaggcaacattagatcaagcaccgactcctaattgttccattttttcctcatggaaaagcaccaggaaagggtcagatggatcagcacaaacatggggcactgtctcactgccgaggtggcaccctcataaaaaacaggcccgcaattttgtggaaaagggggyaggagagcgtagaggagaatgtatgagcaagattaaagagaattgaatattaataggaatgtatgaaaattattatcaaagttccatttcttctccagaaacagggatctgaacaaaagtttctgaagaaggcctcaaccaaaagcccctcagttaggtgcccctgaatctagatg

SEQ ID NO: 266782 - DNA, 589 bp, Homo sapiens
tgtgatatatccatgtgaagcatatttatggaagcataaaagaaaatgttatcccaagggttatattaaataaaagagtaaatttggtaatagatgartaacttattttatatcagtataatgtgtatttaagaggtttttgtcactaaattattaaatattgagtgcaaatcctatatactgtttgaacaatactattattttctcagcaaagatcagcactgaaagactgattcctgcatagccactgaccacagcttctggaacaacaaaagcattgaatcattaatcctgaatgtggccaatgagcaagagatgaggaaatctacccagttcatgaccacaaagcaactcaccagcagctggatggcctgggtagcttatttctctggagagactcttagacagtgactcctgatacagagatgctgagactgcattttgtgcctggaggagagaattaccacgtgtgatttgagagcatcagtgttcctccagaagagacatttctaaatgctgctagtgtgaaaaatgagcttatgttcacgtagcccctgggggaagaaaaacagtaatatttaacagtaca

SEQ ID NO: 266783 - DNA, 589 bp, Homo sapiens
tgtgatatatccatgtgaagcatatttatggaagcataaaagaaaatgttatcccaagggttatattaaataaaagagtaaatttggtaatagatgaataacttattttatatcagtataatgtrtatttaagaggtttttgtcactaaattattaaatattgagtgcaaatcctatatactgtttgaacaatactattattttctcagcaaagatcagcactgaaagactgattcctgcatagccactgaccacagcttctggaacaacaaaagcattgaatcattaatcctgaatgtggccaatgagcaagagatgaggaaatctacccagttcatgaccacaaagcaactcaccagcagctggatggcctgggtagcttatttctctggagagactcttagacagtgactcctgatacagagatgctgagactgcattttgtgcctggaggagagaattaccacgtgtgatttgagagcatcagtgttcctccagaagagacatttctaaatgctgctagtgtgaaaaatgagcttatgttcacgtagcccctgggggaagaaaaacagtaatatttaacagtaca

SEQ ID NO: 266784 - DNA, 589 bp, Homo sapiens
tgtgatatatccatgtgaagcatatttatggaagcataaaagaaaatgttatcccaagggttatattaaataaaagagtaaatttggtaatagatgaataacttattttatatcagtataatgtgtatttaagaggtttttgtcactaaattattaaatattgagtgcaaatcctatatactgtttgaacaatactattattttctcagcaaagatcagcactgaaagactgaytcctgcatagccactgaccacagcttctggaacaacaaaagcattgaatcattaatcctgaatgtggccaatgagcaagagatgaggaaatctacccagttcatgaccacaaagcaactcaccagcagctggatggcctgggtagcttatttctctggagagactcttagacagtgactcctgatacagagatgctgagactgcattttgtgcctggaggagagaattaccacgtgtgatttgagagcatcagtgttcctccagaagagacatttctaaatgctgctagtgtgaaaaatgagcttatgttcacgtagcccctgggggaagaaaaacagtaatatttaacagtaca

SEQ ID NO: 266785 - DNA, 589 bp, Homo sapiens
tgtgatatatccatgtgaagcatatttatggaagcataaaagaaaatgttatcccaagggttatattaaataaaagagtaaatttggtaatagatgaataacttattttatatcagtataatgtgtatttaagaggtttttgtcactaaattattaaatattgagtgcaaatcctatatactgtttgaacaatactattattttctcagcaaagatcagcactgaaagactgattcctgcatagccactgaccacagcttctggaacaacaaaagcattgaatcattaatcctgaatgtggccaatgagcawgagatgaggaaatctacccagttcatgaccacaaagcaactcaccagcagctggatggcctgggtagcttatttctctggagagactcttagacagtgactcctgatacagagatgctgagactgcattttgtgcctggaggagagaattaccacgtgtgatttgagagcatcagtgttcctccagaagagacatttctaaatgctgctagtgtgaaaaatgagcttatgttcacgtagcccctgggggaagaaaaacagtaatatttaacagtaca

SEQ ID NO: 266786 - DNA, 553 bp, Homo sapiens
aactcaccagcagctggatggcctgggtagcttatttctctggagagactcttagacagtgactcctgatacagagatgctgagactgcattttgtgcctggaggagagaattaccacgtgtgatttgagagcatcagtgttcctccagaagagacatttctaaatgctgctagtgtgaaaaatgagcttatgttcacgtagcccctgggggaagaaaaacagtaatatttaacagtacattttaagaaccaataaaattatttttaaaatcaaagcaattttaaagcttttacttcattagactccctggcaagaaagtcctgggaagacagaaagtttggaggatgtcagagggaagtttgggaaaagtagaggaatgtacggcccactcagcctgagtcaccttygctactgacctcatcttgtctcgactgagtgctcctttcaggaagctggtgtctggaaaacttctcaattttagtatcaattattattcagaggttgaaaggcaagcctccacctaaagtgccagtcctggggccttggtgagac

SEQ ID NO: 266787 - DNA, 561 bp, Homo sapiens
gcatctttgtttattaagtgatgggatttagcttaataatctagataaaaagcttttgccagatcaatatatgacaaatgttgatttccactttgttcttgcctttcagctctcctgaagctttttttttttatgaagagaaggttttaattctaataaagtccaatttgtcatatttttgtcttgataatttatgcattttgtgtcccaagaaatcttggcctgtgccaaagtcatggacatacttatctatgttatctactagaaatattgttttcaattttcaccttaaaatttaaaatccacttgtctcgaaatttgttaacaatataagataggttyatttctttctcacataaataaccagatgacccaaggctaattaccgagatgctgtcttctctccactgctcttctgtgcctgttttgtaatatacaaaatgtctaaatgtgtgagtctgagttggactctcgagtttttctagttttctttgtgcctattttttcattactaccatagatagcttttattactatagctttaatctaagtctgaatata

SEQ ID NO: 266788 - DNA, 596 bp, Homo sapiens
tttttttttttatgaagagaaggttttaattctaataaagtccaatttgtcatatttttgtcttgataatttatgcattttgtgtcccaagaaatcttggcctgtgccaaagtcatggacatacttatctatgttatctactagaaatattgttttcaattttcaccttaaaatttaaaatccacttgtctcgaaatttgttaacaatataagataggttcatttctttctcacataaataaccagatgacccaaggctaattaccgagatgctgtcttctctccactgctcttctgtgcctgttttgtaatatacaaaatgtctaaatgtgtgagtctgagttggactctcgagtttttctagttttctttgtgcctatttttkcattactaccatagatagcttttattactatagctttaatctaagtctgaatatatggcattgtaagctcacaaactttgtcattcttcaggacagtttttacagttctttgattttttaatatgtatttaaaattttaaactgattagacagtttccacaagatttctgccaaaatattgtattgtgaaaatggaaatcaataaatcaat

SEQ ID NO: 266789 - DNA, 596 bp, Homo sapiens
tttttttttttatgaagagaaggttttaattctaataaagtccaatttgtcatatttttgtcttgataatttatgcattttgtgtcccaagaaatcttggcctgtgccaaagtcatggacatacttatctatgttatctactagaaatattgttttcaattttcaccttaaaatttaaaatccacttgtctcgaaatttgttaacaatataagataggttcatttctttctcacataaataaccagatgacccaaggctaattaccgagatgctgtcttctctccactgctcttctgtgcctgttttgtaatatacaaaatgtctaaatgtgtgagtctgagttggactctcgagtttttctagttttctttgtgcctattttttcattactaccatagatagcttttattactatagctttaatctaagtctgaatatatggcattgkaagctcacaaactttgtcattcttcaggacagtttttacagttctttgattttttaatatgtatttaaaattttaaactgattagacagtttccacaagatttctgccaaaatattgtattgtgaaaatggaaatcaataaatcaat

SEQ ID NO: 266790 - DNA, 466 bp, Homo sapiens
ggcattgtaagctcacaaactttgtcattcttcaggacagtttttacagttctttgattttttaatatgtatttaaawttttaaactgattagacagtttccacaagatttctgccaaaatattgtattgtgaaaatggaaatcaataaatcaatttggggagaaacactaataacatctaaaccaaacttaaagagaacaccacaataagaaaagaaattgcaaaattggaataaatattttcaacacatgaaattacaaaggggctcatgtttccatgaagagcactctctctctccctctctctctctctctcttttttttttttttttacagagactcactctgtcacccagtctggagtgcagtcgtgcaatctcggctcactgcaacctccgcctcccaagtttcagcaattcttctgtctcagcctcctgagtagctggggctacaggcttgggccacc

SEQ ID NO: 266791 - DNA, 579 bp, Homo sapiens
actaggctgtatttattcatgttwctacagtttgtatggttttaatttttcccccctggtatcacctgtagcaggcagcttcatggcactgccagaccttccccaagacttcaaagccaccactatcactaatactctagaaaaatagggaagagtttacatgaaaagggggttatattgttccctgcatttgtctgcaacgtgtcatctcagagaacacatccctctagcccatcagggcagaagtggtgccctcacatctctttgtaatgttctataatgggggtcacttcccagagtggtttagcctttcagtgactattatttctgatcaaaatggaataaaactagaaatgaataacagatgaaaacaaaaatagcaacatatatatggaaattaaacaactcacttttgagcatgctcatgtttaagggttgtaagacttgatattatgaagaatgctcatgatgcctaaagcgagttacagattcaatgcaatcccttttaaattagcaatgtttttgaaatagaagaaggaaccaacaaattatatggaatgtcaagcgaccataaagagc

SEQ ID NO: 266792 - DNA, 579 bp, Homo sapiens
actaggctgtatttattcatgttactacagtttgtatggttttaatttttcccccctggtatcacctgtagcaggcagsttcatggcactgccagaccttccccaagacttcaaagccaccactatcactaatactctagaaaaatagggaagagtttacatgaaaagggggttatattgttccctgcatttgtctgcaacgtgtcatctcagagaacacatccctctagcccatcagggcagaagtggtgccctcacatctctttgtaatgttctataatgggggtcacttcccagagtggtttagcctttcagtgactattatttctgatcaaaatggaataaaactagaaatgaataacagatgaaaacaaaaatagcaacatatatatggaaattaaacaactcacttttgagcatgctcatgtttaagggttgtaagacttgatattatgaagaatgctcatgatgcctaaagcgagttacagattcaatgcaatcccttttaaattagcaatgtttttgaaatagaagaaggaaccaacaaattatatggaatgtcaagcgaccataaagagc

SEQ ID NO: 266793 - DNA, 579 bp, Homo sapiens
actaggctgtatttattcatgttactacagtttgtatggttttaatttttcccccctggtatcacctgtagcaggcagcttcayggcactgccagaccttccccaagacttcaaagccaccactatcactaatactctagaaaaatagggaagagtttacatgaaaagggggttatattgttccctgcatttgtctgcaacgtgtcatctcagagaacacatccctctagcccatcagggcagaagtggtgccctcacatctctttgtaatgttctataatgggggtcacttcccagagtggtttagcctttcagtgactattatttctgatcaaaatggaataaaactagaaatgaataacagatgaaaacaaaaatagcaacatatatatggaaattaaacaactcacttttgagcatgctcatgtttaagggttgtaagacttgatattatgaagaatgctcatgatgcctaaagcgagttacagattcaatgcaatcccttttaaattagcaatgtttttgaaatagaagaaggaaccaacaaattatatggaatgtcaagcgaccataaagagc

SEQ ID NO: 266794 - DNA, 550 bp, Homo sapiens
tattgttccctgcatttgtctgcaacgtgtcatctcagagaacacatccctctagcccatcagggcagaagtggtgccctcacatctctttgtaatgttctataatgggggtcacttcccagagtggtttagcctttcagtgactattatttctgatcaaaatggaataaaactagaaatgaataacagawgaaaacaaaaatagcaacatatatatggaaattaaacaactcacttttgagcatgctcatgtttaagggttgtaagacttgatattatgaagaatgctcatgatgcctaaagcgagttacagattcaatgcaatcccttttaaattagcaatgtttttgaaatagaagaaggaaccaacaaattatatggaatgtcaagcgaccataaagagcccaaaaatgttttaaaaaaaaacaatgttagcggcctcaacttttctgatttcaaagcacattacaaagcaacagcaatgaaaacagtttgtttctagcataaagacagacaatttttccaataaaacagaaggtagcacacatgt

SEQ ID NO: 266795 - DNA, 550 bp, Homo sapiens
tattgttccctgcatttgtctgcaacgtgtcatctcagagaacacatccctctagcccatcagggcagaagtggtgccctcacatctctttgtaatgttctataatgggggtcacttcccagagtggtttagcctttcagtgactattatttctgatcaaaatggaataaaactagaaatgaataacagatgaaaacaaaaatagcaacatatatatggaaattaaacaactcacttttgagcatgctcatgtttaagggttgtaagacttgatattatgaagaatgctcatgatgcctaaagcgagttacagattcaatgcaatcccttttaaattagcaatgtttttgaaatagaaraaggaaccaacaaattatatggaatgtcaagcgaccataaagagcccaaaaatgttttaaaaaaaaacaatgttagcggcctcaacttttctgatttcaaagcacattacaaagcaacagcaatgaaaacagtttgtttctagcataaagacagacaatttttccaataaaacagaaggtagcacacatgt

SEQ ID NO: 266796 - DNA, 582 bp, Homo sapiens
tggctcatgcctgtaatctcagcactctgggaggctgaggcatgcagattacttgaggccatgagttcaagaccagcctggccaacatggtgaaaccccagctctatgaaaaacacaaaaattaaccaggcgtggtagtgcacacttttaatgccagctactcaagaggcagcagctggagaattgctttaacctgggaggtggaggtkgcagtgagccaagattgtgccactgcactttggcgacagggtgagagtctgtcaaaaaataaataaataagtaaagacacctgaagagagagagttacaaagtttttgaaaaattatcttcaaatcgcataagtctttctttcacactaggataatataaacaatagatgttgaaattaagacaatttccatgattactcacttagacagaatcaattattgtccatcaaacaagaagaaaataacacaagtcataaacaaaataggggcaatatttatacaagcaaacaaacaattaaatcattatattaacaaaagaccatagggatggttcatattttttgcctcacactgtcttaagctgtacagattt

SEQ ID NO: 266797 - DNA, 552 bp, Homo sapiens
cccgaattcttacttgaataatgtaattcaaaatcataataaataggtagaaagtaaaaacacaattaactgctgtgagacagcctactctaaaaaatacagaaacataaattctaaaacataattaagagaaactttgatctataaaatcctgaataaacatagtgtccaactgaaaaagaatcctaggtaactacaattttcaactcttcctttgaatycataaaaagtataaattttgaattatttggatacaattagggcaacaacatttcaaagaaaccatattataattattaaaaagagatgtgatgagaaagttttaaggaataaaaatttaagtaatactagagaaagttttaaattatgctactgatgcattgcttctttccttacacaaaagggtaaggctgtaatctagcctttaatagaaaggtcttacatttttacatatggtaacaatataaatattgtaaatacagtataaaacattgacagataaaataaaaactggaaataaattgtactattagtcaaataaaagttgggaaa

SEQ ID NO: 266798 - DNA, 552 bp, Homo sapiens
cccgaattcttacttgaataatgtaattcaaaatcataataaataggtagaaagtaaaaacacaattaactgctgtgagacagcctactctaaaaaatacagaaacataaattctaaaacataattaagagaaactttgatctataaaatcctgaataaacatagtgtccaactgaaaaagaatcctaggtaactacaattttcaactcttcctttgaatccataaaaagtataaattttgaattatttggatacaattagggcaacaacatttcaaagaaaccatattatamttattaaaaagagatgtgatgagaaagttttaaggaataaaaatttaagtaatactagagaaagttttaaattatgctactgatgcattgcttctttccttacacaaaagggtaaggctgtaatctagcctttaatagaaaggtcttacatttttacatatggtaacaatataaatattgtaaatacagtataaaacattgacagataaaataaaaactggaaataaattgtactattagtcaaataaaagttgggaaa

SEQ ID NO: 266799 - DNA, 601 bp, Homo sapiens
catacaagccaaatattttaataattaattatataattgatacataacatatacatttgagcatgctgttttacaacttctcaaactgaaattacagaaaaatgtgacaacatgatcattcagaaagtgaaaacacagtcatagtaatcttcatattaaagaaaacagaatcataaaataataagtgagaaataaggtaataattgtgaattcaatatatgttgaacaatattctaatttcycttacggaaaaagtttttgtaagaaatctgtaaaatgagtacttacaataaaccatcctacagtagaggctgttggcatacagtgtttaaatttctatgattaggtcctactaaagaaaagaaaattttaaaataaaataattagattttcctatttaataagataatttttgcctataaagtttttcagtctaatttttttgtagaattaggttttagccttcataaaacttgacattatgaagcagaaaacaggtgtcatctgtctctgttgttcctggaatttctaacccaaatgccaattcctccacaactcccctcacacacttctgaattgaagcacaacagatttattaaaa

SEQ ID NO: 266800 - DNA, 601 bp, Homo sapiens
catacaagccaaatattttaataattaattatataattgatacataacatatacatttgagcatgctgttttacaacttctcaaactgaaattacagaaaaatgtgacaacatgatcattcagaaagtgaaaacacagtcatagtaatcttcatattaaagaaaacagaatcataaaataataagtgagaaataaggtaataattgtgaattcaatatatgttgaacaatattctaatttcccttacggaaaaagtttttgtaagaaatctgtaaaatgagtacttacaataaaccatcctacagtagaggctgttggcatacagtgtttaaatttctatgattaggtcctactaargaaaagaaaattttaaaataaaataattagattttcctatttaataagataatttttgcctataaagtttttcagtctaatttttttgtagaattaggttttagccttcataaaacttgacattatgaagcagaaaacaggtgtcatctgtctctgttgttcctggaatttctaacccaaatgccaattcctccacaactcccctcacacacttctgaattgaagcacaacagatttattaaaa

SEQ ID NO: 266801 - DNA, 476 bp, Homo sapiens
ctccttgcctcaaatgatcctcccacatcagtctcccaaacatttcaacctacaggcacaggcaaccatgcctggtgtatttattaaaatgtagctactagaatatttaaaattcacatgtgcctcacatattatttcttagagaattgcctcatttttgaaatctcaggctgcctgctctaaaacctggatgtgccaggaagtaaaaaatctgaaattttaaaataattgtcattatattgcttccatgtatgaataacacatatatatttttcataaatacaaataatcttacacacaaatgaaaatgcaagtattttacaggsagggccagtgtccagtgcatgaaggaagccctgccagaaaaggatccaggaaaaacctataattcttgctttattcaatccagtgtcaaatcacatatgtcactcatggcctgagggggcttggtggggaattgaactatatccagtcac

SEQ ID NO: 266802 - DNA, 564 bp, Homo sapiens
agttctttcctgacacttaccaacactaactaaccttgtgtaactcacaacattatcaactgttctttattgtacattttagacayagtattttaattctgcattttttcaaaaagcagtggatggcacttaaaaaaatatttttcatttgtaaacattttacaggacatgaaagcagataataatcccctgacaatccacagtaaaaaaaaaaagaaaagaaaagaaaagaaaatatttgtgcccctttctttaatcttgccttggcacagacaccccatcagaatgtctttgggttgaggtttcatttcagaaacctcacagggcaatacatcctcagccatcctgtgttattttcttggttttgggtttcaaaactgcttgagaatccccaagataccaacactggccatgactcttgaagtgtctagtaaatagcatcccttgtgtcatctcctctcagggaacagcccaaggtatgggaatgcagcctctttttggagtggttggatgcactatacctggaaggaatctccacgtatacctttgcgttaaaagcaaacc

SEQ ID NO: 266803 - DNA, 368 bp, Homo sapiens
ataaatttatcacataagttattctttttttcaaaagagagaacttgtgaaagtgaataactctattccatatgctgccatctgggtgtttgagggtaatgttaagttttaggagctgggactttgcgcctcytggaagtgttcacatatgattaattgtttactaaatgatttgttatgaacataattaaattacatgtttattttctgaaagggatagatactttggcttttcttgatgaattataagatataagccccttataatgtttttattttattttattctgttattttttagatgtagtttcactcttgttgcccagactggagtacaatggcaagacatctgctcactgtaacctcca

SEQ ID NO: 266804 - DNA, 368 bp, Homo sapiens
ataaatttatcacataagttattctttttttcaaaagagagaacttgtgaaagtgaataactctattccatatgctgccatctgggtgtttgagggtaatgttaagttttaggagctgggactttgcgcctcctggaagtgttcacatatgattaattgtttactaaatgatttgttatgaacataattaaattacatgtttattttctgaaagggatagatactttggcttttcttgatgaattataagatataagccccttataatgtttttattttattttattctgttattttttagatgtagtttcactcttgttgcccagrctggagtacaatggcaagacatctgctcactgtaacctcca

SEQ ID NO: 266805 - DNA, 368 bp, Homo sapiens
ataaatttatcacataagttattctttttttcaaaagagagaacttgtgaaagtgaataactctattccatatgctgccatctgggtgtttgagggtaatgttaagttttaggagctgggactttgcgcctcctggaagtgttcacatatgattaattgtttactaaatgatttgttatgaacataattaaattacatgtttattttctgaaagggatagatactttggcttttcttgatgaattataagatataagccccttataatgtttttattttattttattctgttattttttagatgtagtttcactcttgttgcccagactggagtrcaatggcaagacatctgctcactgtaacctcca

SEQ ID NO: 266806 - DNA, 519 bp, Homo sapiens
gaagtattttttgaattgaaaactaactgaatgactaactggyaagtagaagtcttagaccatcgactaaaagctaaggcccaccttgacccagcaaaagaggaccactgaaggctcagttgattattcctgggtgtctgccctgcaggtgtccaagcctactcacaccaatcatggaaggagcctttgtcactgccagaagatatagagccttggtaagctggaagttcacaggcagatgcagttgaggtagagatagaagaaatgttgggagattctttttagaatggaattgttattgtcctcagactgtttctagacttggtctaagaagttacctaagaagtattgcaacaaagaaaaagtacaaatgattagatctttgagtatctctaaggttaggtggaaaaaggccttatttcatagggaggagaaaacaagtttacaaagaaggttggaaaggaagcacaggatggagggtagcaaaatgagatcccagataagataatgtttcacctt

SEQ ID NO: 266807 - DNA, 519 bp, Homo sapiens
gaagtattttttgaattgaaaactaactgaatgactaactggtaagtagaagtcttagaccatcgactaaaagctaaggcccaccttgacccagcaaaagaggaccactgaaggcycagttgattattcctgggtgtctgccctgcaggtgtccaagcctactcacaccaatcatggaaggagcctttgtcactgccagaagatatagagccttggtaagctggaagttcacaggcagatgcagttgaggtagagatagaagaaatgttgggagattctttttagaatggaattgttattgtcctcagactgtttctagacttggtctaagaagttacctaagaagtattgcaacaaagaaaaagtacaaatgattagatctttgagtatctctaaggttaggtggaaaaaggccttatttcatagggaggagaaaacaagtttacaaagaaggttggaaaggaagcacaggatggagggtagcaaaatgagatcccagataagataatgtttcacctt

SEQ ID NO: 266808 - DNA, 519 bp, Homo sapiens
gaagtattttttgaattgaaaactaactgaatgactaactggtaagtagaagtcttagaccatcgactaaaagctaaggcccaccttgacccagcaaaagaggaccactgaaggctcagttgattattcctgggtgtctgccctgcaggtgtccaagcctactcacaccaatcatggaaggagcctttgtcactgccagaagatatagarccttggtaagctggaagttcacaggcagatgcagttgaggtagagatagaagaaatgttgggagattctttttagaatggaattgttattgtcctcagactgtttctagacttggtctaagaagttacctaagaagtattgcaacaaagaaaaagtacaaatgattagatctttgagtatctctaaggttaggtggaaaaaggccttatttcatagggaggagaaaacaagtttacaaagaaggttggaaaggaagcacaggatggagggtagcaaaatgagatcccagataagataatgtttcacctt

SEQ ID NO: 266809 - DNA, 519 bp, Homo sapiens
gaagtattttttgaattgaaaactaactgaatgactaactggtaagtagaagtcttagaccatcgactaaaagctaaggcccaccttgacccagcaaaagaggaccactgaaggctcagttgattattcctgggtgtctgccctgcaggtgtccaagcctactcacaccaatcatggaaggagcctttgtcactgccagaagatatagagccttggtaagctggaagttcacaggcagatgcagttgaggtagagatagaagaaatgttgggagattctttttagaatggaattgttattgtcctcagactgtttctagacttggtctaagaagttacctaagaagtattgcaacaaagaaaaagtacaaatgattagatctttgagtatctctaaggttaggtggaaaarggccttatttcatagggaggagaaaacaagtttacaaagaaggttggaaaggaagcacaggatggagggtagcaaaatgagatcccagataagataatgtttcacctt

SEQ ID NO: 266810 - DNA, 615 bp, Homo sapiens
tagctatttccaggattaccttcacccacaactgttccttgccctagacatctcttccatttggctgtttctgagttatatttttataataaagtagtaaatataattacagttatttgttgaggttttctttttagtaattctatcaaattatttaacttgaaaaggggtttatgctagtctcagatttataggaggtagctcagaagtgtagatgggyttcagggatgtgtaactctcctctacagtgagagaggtgatgtgggactgagccctgaatttgtggggtctgtgcgaactctaagttgtgtcagaattaaattttggggcaacaaatgggtgttggagaatcagtgggttttcagggaactttccacatttaggatcaaaaacataaaaagaaagacaatgtgggggcctctgctggagagagactccaggtgtctcggggaaggtaggctctgctctgcacacaggctgctacaccatgaactgccctgtggttccaggcatcctcccatggtaagaaggaccgacgactctgagggaagaagttctgagaacagatgccttctaccctcctgccaacctgaggccaccacatgtttttcaccc

SEQ ID NO: 266811 - DNA, 615 bp, Homo sapiens
tagctatttccaggattaccttcacccacaactgttccttgccctagacatctcttccatttggctgtttctgagttatatttttataataaagtagtaaatataattacagttatttgttgaggttttctttttagtaattctatcaaattatttaacttgaaaaggggtttatgctagtctcagatttataggaggtagctcagaagtgtagatgggtttcagggatgtgtaactctcctctacagtgagagaggtgatgtgggactgagccctgaatttgtggggtctgtgcgaactctaagttgtgtcagaattaaattttgrggcaacaaatgggtgttggagaatcagtgggttttcagggaactttccacatttaggatcaaaaacataaaaagaaagacaatgtgggggcctctgctggagagagactccaggtgtctcggggaaggtaggctctgctctgcacacaggctgctacaccatgaactgccctgtggttccaggcatcctcccatggtaagaaggaccgacgactctgagggaagaagttctgagaacagatgccttctaccctcctgccaacctgaggccaccacatgtttttcaccc

SEQ ID NO: 266812 - DNA, 622 bp, Homo sapiens
ttagtaattctatcaaattatttaacttgaaaaggggtttatgctagtctcagatttataggaggtagctcagaagtgtagatgggtttcagggatgtgtaactctcctctacagtgagagaggtgatgtgggactgagccctgaatttgtggggtctgtgcgaactctaagttgtgtcagaattaaattttggggcaacaaatgggtgttggagaatcagtgggttttcagggaactttccacatttaggatcaaaaacataaaaagaaagacaatgtgggggcctctgctggagagagactccaggtgtctcggggaaggtaggctctgctctgcacacaggctgctacaccatgmactgccctgtggttccaggcatcctcccatggtaagaaggaccgacgactctgagggaagaagttctgagaacagatgccttctaccctcctgccaacctgaggccaccacatgtttttcacccactgaacatacacactgcatgttgacgtggtcaagcccctcccagcacagggcttcggcataaagattgtggcccatgctacctatcctcatagactttcccaccaaaaacccacacacgtgcctacaagacccctggca

SEQ ID NO: 266813 - DNA, 507 bp, Homo sapiens
cactcttaattgggtgagcaccatctaatgagctgacagtgaatataaagcaggcagaaaaacgtgaaaaagagagactggcctaagctcccagactacatctttctcctgtgctggacacttgcagccctcaaacatcagactccaagttcttcagctttgggacatggaccrcctctccttgctcctcaaacttgcagacaaccaacctattgtgggatctcatgatctctctagggaagcccaactaatacacctagcaacaaacttaactaaaaaggtaaaagatctctactctgaaaacgacaaaacatggataaaaaatataaaatacaaatgaataaataaaaaatattgtgtttatacactggaagaatactgttgatatagctacccaaagtgatctacagacttaatgtgatttttatcaaaataccaatgacattttttcacagaaataaaaaaatttaaatttatatggatccacaaaaaactctgaatagacaa

SEQ ID NO: 266814 - DNA, 622 bp, Homo sapiens
ttagtaattctatcaaattatttaacttgaaaaggggtttatgctagtctcagatttataggaggtagctcagaagtgtagatgggtttcagggatgtgtaactctcctctacagtgagagaggtgatgtgggactgagccctgaatttgtggggtctgtgcgaactctaagttgtgtcagaattaaattttggggcaacaaatgggtgttggagaatcagtgggttttcagggaactttccacatttaggatcaaaaacataaaaagaaagacaatgtgggggcctctgctggagagagactccaggtgtctcggggaaggtaggctctgctctgcacacaggctgctacaccatgaactgccctgtggttccaggcatcctcccatggtaagaaggaccgacgactctgagggaagaagttctgagaacagatgccttctaccctcctgccaacctgaggccaccacatgtttttcacccactgaacatacacactgcatgttgacgtggtcaagcccctcccagcacagggcttyggcataaagattgtggcccatgctacctatcctcatagactttcccaccaaaaacccacacacgtgcctacaagacccctggca

SEQ ID NO: 266815 - DNA, 622 bp, Homo sapiens
ttagtaattctatcaaattatttaacttgaaaaggggtttatgctagtctcagatttataggaggtagctcagaagtgtagatgggtttcagggatgtgtaactctcctctacagtgagagaggtgatgtgggactgagccctgaatttgtggggtctgtgcgaactctaagttgtgtcagaattaaattttggggcaacaaatgggtgttggagaatcagtgggttttcagggaactttccacatttaggatcaaaaacataaaaagaaagacaatgtgggggcctctgctggagagagactccaggtgtctcggggaaggtaggctctgctctgcacacaggctgctacaccatgaactgccctgtggttccaggcatcctcccatggtaagaaggaccgacgactctgagggaagaagttctgagaacagatgccttctaccctcctgccaacctgaggccaccacatgtttttcacccactgaacatacacactgcatgttgacgtggtcaagcccctcccagcacagggcttcggcataaagattgtggcccatgctaccyatcctcatagactttcccaccaaaaacccacacacgtgcctacaagacccctggca

SEQ ID NO: 266816 - DNA, 507 bp, Homo sapiens
cactcttaattgggtgagcaccatctaatgagctgacagtgaatataaagcaggcagaaaaacgtgaaaaagagagactggcctaagctcccagactacatctttctcctgtgctggacacttgcagccctcaaacatcagactccaagttcttcagctttgggacatggaccgcctctccttgctcctcaaacttgcagacaaccaacctattgtgggatctcatgatctctctagggaagcccaactaatacacctagcaacaaacttaactaaaaaggtaaaagatctctactctgaaaacgacaaaacatggataaaaaatataaaatacaaatgaataaataaaaaatattgtgtttatacactggaagaatactgttgatatagctacccaaagtgatctacagacttaatgtgatttttatcaaaataccaatgacattttttsacagaaataaaaaaatttaaatttatatggatccacaaaaaactctgaatagacaa

SEQ ID NO: 266817 - DNA, 550 bp, Homo sapiens
gaagctcctcatcaatctgaatgcagctttgtaaatgtgcctagaaaccacgcaaagaaaagtctgtgttctgccttgctttgaccgtatgtgacacctccattagaaattctgcttttctctgcactccagcctgggtaacagagtgagacttcatgataaataaaaaagaaagagagagagaaggaaagaaagaaagaaagagagagatggaaagaaagaaagagaaagaaaaaaaagaaagaaagaagaaagaaagaaagaaaagaaaagagaaaagaagaaaggaaaaaagaaaaaagaaaataaaagaaattctgctcttcagatwaggcacataaggagaatctgtataaatctccatgaaggaaggaaaccagaggacaagttaaagtcttggaattcacatctgagtacacagactcattctccaaccctcttctttttattctgccagctatggcctaggtatgaacatgacaggtacacaagagttccaacacccgacaatctacttcagtccaagaagagtgccctccctcttgctccc

SEQ ID NO: 266818 - DNA, 566 bp, Homo sapiens
gtatgaacatgacaggtacacaagagttccaacacccgacaatctacttcagtccaagaagagtgccctccctcttgctccccatccaactcatkgtactaagaagtggtgtgggactgcccagatgagttgacaagagaggctggcttggaggggcctgtcctgggctgccctgtgttatttgtaggtgcacccggccaatagccagggacatcagtgatgagggctcagttgacatctgtgttatcagataagacttttacattgagcctttgtaaggctgaaactcagaaatttcagggcacaatgaaagagcatctcactctcttgagcaactctcacaaacagaggtggatacagagctgtctcaagaatgtggattcctggtttcttaactgctgttgggttctgacaccaagaaagtgtgttaaactcttcaaggttccatctactgggccctatgtttctgtaagacataccgaaaggccccactatgctactgattgctcagtctcctcttccatgtcaactctttatttgtacacaattatgcaaacacaacttcc

SEQ ID NO: 266819 - DNA, 566 bp, Homo sapiens
gtatgaacatgacaggtacacaagagttccaacacccgacaatctacttcagtccaagaagagtgccctccctcttgctccccatccaactcatggtactaagaagtggtgtggractgcccagatgagttgacaagagaggctggcttggaggggcctgtcctgggctgccctgtgttatttgtaggtgcacccggccaatagccagggacatcagtgatgagggctcagttgacatctgtgttatcagataagacttttacattgagcctttgtaaggctgaaactcagaaatttcagggcacaatgaaagagcatctcactctcttgagcaactctcacaaacagaggtggatacagagctgtctcaagaatgtggattcctggtttcttaactgctgttgggttctgacaccaagaaagtgtgttaaactcttcaaggttccatctactgggccctatgtttctgtaagacataccgaaaggccccactatgctactgattgctcagtctcctcttccatgtcaactctttatttgtacacaattatgcaaacacaacttcc

SEQ ID NO: 266820 - DNA, 566 bp, Homo sapiens
gtatgaacatgacaggtacacaagagttccaacacccgacaatctacttcagtccaagaagagtgccctccctcttgctccccatccaactcatggtactaagaagtggtgtgggactgcccagatgagttgacaagagaggmtggcttggaggggcctgtcctgggctgccctgtgttatttgtaggtgcacccggccaatagccagggacatcagtgatgagggctcagttgacatctgtgttatcagataagacttttacattgagcctttgtaaggctgaaactcagaaatttcagggcacaatgaaagagcatctcactctcttgagcaactctcacaaacagaggtggatacagagctgtctcaagaatgtggattcctggtttcttaactgctgttgggttctgacaccaagaaagtgtgttaaactcttcaaggttccatctactgggccctatgtttctgtaagacataccgaaaggccccactatgctactgattgctcagtctcctcttccatgtcaactctttatttgtacacaattatgcaaacacaacttcc

SEQ ID NO: 266821 - DNA, 566 bp, Homo sapiens
gtatgaacatgacaggtacacaagagttccaacacccgacaatctacttcagtccaagaagagtgccctccctcttgctccccatccaactcatggtactaagaagtggtgtgggactgcccagatgagttgacaagagaggctggcttggaggggcctgtcctgggctgccctgtgttatttgtaggtgcacccggccaatagccagggacatcagtgatgagggctcagttgacatctgtgttatcagataagacttttacattgagcctttgtaaggctgaaactcagaaatttcagggcacaatgaaasagcatctcactctcttgagcaactctcacaaacagaggtggatacagagctgtctcaagaatgtggattcctggtttcttaactgctgttgggttctgacaccaagaaagtgtgttaaactcttcaaggttccatctactgggccctatgtttctgtaagacataccgaaaggccccactatgctactgattgctcagtctcctcttccatgtcaactctttatttgtacacaattatgcaaacacaacttcc

SEQ ID NO: 266822 - DNA, 393 bp, Homo sapiens
atgaataaataaaaaatattgtgtttatacactggaagaatactgttgatatagctacccaaagtgatctacagacttaatgtgatttttatcaaaataccaatgacattttttcacagaaataaaaaaatttaaatttatatggatccacaaaaaactctgaatagacaaagcaactttgagcaaaataagcaaagctgaaggcatcacttcatcaaacttcaaaacttgctataaagctacagtaaccaaaacagcactgtactggcataaaaacaaacacatagactaatrtgcccaataagcccggaagttaatttatgcacctaaagccaacagattgtcaacaaaattaccaagaacacactttagagaaaagctaatctctttaat

SEQ ID NO: 266823 - DNA, 605 bp, Homo sapiens
tttataacattggacggtgaaaggattattaaaataagatttcaaaacatgggcaacaaaatcaagaataaacaaacaacattatgtcaaactaaaatgctttttcatattaaaaaaacaactaaaagtttgaagagacagcttaggcgatgacagaaaatgttttcatatacatgtgacaaaaggctaatattcagaatatataagaaactttaaaatctcaaaataaaatacacttataatctaatttaaaaaatrcaaaagatcttaatagatgtttgtcaaaaagagatacaaaaatggctaactggaacacaaaaagatgctctacattactaatcaccaaggaaatgcaaatccaaactgcaatgaagtaccacctcattcccattagaatggctataataaaaataaataaataaataaatcaagaactaatgaggatataaaaaagagtggatgtataccttgttggtggaattgtaaattagtatggccattatagaaaatagtatggaggtttctgaaagaaattaaaaatatatctattatatgatccagcaattttacttctgggtgtatatccaaaagaaaggatattactg

SEQ ID NO: 266824 - DNA, 583 bp, Homo sapiens
aaataggtagtggtttcttaattgatcaaaaccttaacaaaactacagtaagtaaaagcwaccaggaaatataacttaatcaaaggagaaaaatatatattcaagtgaacctaaagaagtggagatctaggaattatttttttaacttaaaatctttttatttttctttactttttcattttatgcagaggatcttactttatctcctgggacagagtacactggtggaatcacagctcactgtaacctcaaatttcggaagtcaagcagtcatgccacctatgtctcctgagtaaatatgaccacagttgtgcacattacccctcctgtatagtttctttaaaaaaatttgtacaaacagtatgttgctgtgttgcctcggctggtctcaaactcctggtctcaggcaatccgactgcttcagtctgaaagtgctggcacaagctaccatacctggaattgtttctcttttaagaaaaaatagctttaaatcattaatagtaaaataaaacaaagaaaggtattgcgtaacgataaagggttcaattcaacaagaagacttaactatcgtaaatgtagatgc

SEQ ID NO: 266825 - DNA, 583 bp, Homo sapiens
aaataggtagtggtttcttaattgatcaaaaccttaacaaaactacagtaagtaaaagcaaccaggaaatataacytaatcaaaggagaaaaatatatattcaagtgaacctaaagaagtggagatctaggaattatttttttaacttaaaatctttttatttttctttactttttcattttatgcagaggatcttactttatctcctgggacagagtacactggtggaatcacagctcactgtaacctcaaatttcggaagtcaagcagtcatgccacctatgtctcctgagtaaatatgaccacagttgtgcacattacccctcctgtatagtttctttaaaaaaatttgtacaaacagtatgttgctgtgttgcctcggctggtctcaaactcctggtctcaggcaatccgactgcttcagtctgaaagtgctggcacaagctaccatacctggaattgtttctcttttaagaaaaaatagctttaaatcattaatagtaaaataaaacaaagaaaggtattgcgtaacgataaagggttcaattcaacaagaagacttaactatcgtaaatgtagatgc

SEQ ID NO: 266826 - DNA, 583 bp, Homo sapiens
aaataggtagtggtttcttaattgatcaaaaccttaacaaaactacagtaagtaaaagcaaccaggaaatataactyaatcaaaggagaaaaatatatattcaagtgaacctaaagaagtggagatctaggaattatttttttaacttaaaatctttttatttttctttactttttcattttatgcagaggatcttactttatctcctgggacagagtacactggtggaatcacagctcactgtaacctcaaatttcggaagtcaagcagtcatgccacctatgtctcctgagtaaatatgaccacagttgtgcacattacccctcctgtatagtttctttaaaaaaatttgtacaaacagtatgttgctgtgttgcctcggctggtctcaaactcctggtctcaggcaatccgactgcttcagtctgaaagtgctggcacaagctaccatacctggaattgtttctcttttaagaaaaaatagctttaaatcattaatagtaaaataaaacaaagaaaggtattgcgtaacgataaagggttcaattcaacaagaagacttaactatcgtaaatgtagatgc

SEQ ID NO: 266827 - DNA, 570 bp, Homo sapiens
atgttgctgtgttgcctcggctggtctcaaactcctggtctcaggcaatccgactgcttcagtctgaaagtgctggcacaagctaccatacctggaattgtttctcttttaagaaaaaatagctttaaatcattaatagtaaaataaaacaaagaaaggtattgcgtaacgataaagggttcaattcaacaagaagacttaactatcgtaaatgtagatgcacccaactttggggaacatagagttatacaacaattactgctagacckacaataagactcaagtagacacacaataatagtaggggaatgtaactccccactaagtgtttgacagattatctaggcagaaacttaacaaagaaattctggagtttaattcgacacttgatcaaatgaaactaatagacatttatagtatatgcaacacatcatctaaagaaagtaaattcttctcatctgctcacagaatatgacaggccacaatggaacaaagataaaaatcaataccaagaaaatctcacaaaatcacagaatgatattgaaattaaacaacttgctcctgaatgaa

SEQ ID NO: 266828 - DNA, 570 bp, Homo sapiens
atgttgctgtgttgcctcggctggtctcaaactcctggtctcaggcaatccgactgcttcagtctgaaagtgctggcacaagctaccatacctggaattgtttctcttttaagaaaaaatagctttaaatcattaatagtaaaataaaacaaagaaaggtattgcgtaacgataaagggttcaattcaacaagaagacttaactatcgtaaatgtagatgcacccaactttggggaacatagagttatacaacaattactgctagaccgacaataagactcaagtagacacacaataatagtaggggaatgyaactccccactaagtgtttgacagattatctaggcagaaacttaacaaagaaattctggagtttaattcgacacttgatcaaatgaaactaatagacatttatagtatatgcaacacatcatctaaagaaagtaaattcttctcatctgctcacagaatatgacaggccacaatggaacaaagataaaaatcaataccaagaaaatctcacaaaatcacagaatgatattgaaattaaacaacttgctcctgaatgaa

SEQ ID NO: 266829 - DNA, 570 bp, Homo sapiens
atgttgctgtgttgcctcggctggtctcaaactcctggtctcaggcaatccgactgcttcagtctgaaagtgctggcacaagctaccatacctggaattgtttctcttttaagaaaaaatagctttaaatcattaatagtaaaataaaacaaagaaaggtattgcgtaacgataaagggttcaattcaacaagaagacttaactatcgtaaatgtagatgcacccaactttggggaacatagagttatacaacaattactgctagaccgacaataagactcaagtagacacacaataatagtaggggaatgtaactccccactaagtgtttgacagattatctaggcagaaacttaacaaagaaattctggagtttrattcgacacttgatcaaatgaaactaatagacatttatagtatatgcaacacatcatctaaagaaagtaaattcttctcatctgctcacagaatatgacaggccacaatggaacaaagataaaaatcaataccaagaaaatctcacaaaatcacagaatgatattgaaattaaacaacttgctcctgaatgaa

SEQ ID NO: 266830 - DNA, 570 bp, Homo sapiens
atgttgctgtgttgcctcggctggtctcaaactcctggtctcaggcaatccgactgcttcagtctgaaagtgctggcacaagctaccatacctggaattgtttctcttttaagaaaaaatagctttaaatcattaatagtaaaataaaacaaagaaaggtattgcgtaacgataaagggttcaattcaacaagaagacttaactatcgtaaatgtagatgcacccaactttggggaacatagagttatacaacaattactgctagaccgacaataagactcaagtagacacacaataatagtaggggaatgtaactccccactaagtgtttgacagattatctaggcagaaacttaacaaagaaattctggagtttaattcgacacttgatcaawtgaaactaatagacatttatagtatatgcaacacatcatctaaagaaagtaaattcttctcatctgctcacagaatatgacaggccacaatggaacaaagataaaaatcaataccaagaaaatctcacaaaatcacagaatgatattgaaattaaacaacttgctcctgaatgaa

SEQ ID NO: 266831 - DNA, 560 bp, Homo sapiens
gtcttaaaaaatgctaaatagtcattcacattaaaaaatgaaataatgatgagagcaacacaaaattatgtaaaatatgacattttctaatagagaaaattatgtacacaatcataatattctttgtaattataatgaagatgcacagaatactttaattctgytatatatttgagacaacaaagacttaaaaatgactataaatctgtgccaacagattcacaacacaaaatgatataatttgtgacatcaataaaacacatagggagccataaagaggcagggttttatatgtaatagtagttattcttggtaatatctatagtaacaacaaagaaaatacctacagttcttaggattttgagactagtctgggtaacatggaaaaaccctgtctctatgcaaaataacaactgttagccaggagtagtggtgcacatctgtggtcccaggtactcagaaggctgtggtgggaggattgtttgagttgagcctgagaggcagagcttgagtaagcagagattgtgccactgcactccagcctgggtgacagagcaaga

SEQ ID NO: 266832 - DNA, 489 bp, Homo sapiens
tgatctggaacacatataacctgtacatgaaagaataataaaaaatattaaatgcaaaatcaaatactgtcatggtagacaaaatacatattatatcaaaaacttcctcaagagacaagaggaaaaggacaataaaaacaacaacaataaaagcaacaacaataaagcaacatacaacaataaaagcaaaaacattaaaacaacatacaacaataaaagcaacaacagtaacgyatgtgccttacatcacagttcccaaacatatgaagcaacattttacagaattgaaacatgaagtagccagcacctgataacagtaaatgacttttatatctgacttttagtaatgtaaattaaaaaacaaacataagatggataagtaaacagaggatttcaacaacacgataggacaattagacctaacagtcacatttatatttctccactcaacagtagaatctgcaatacttttaatcacacatgccacaa

SEQ ID NO: 266833 - DNA, 489 bp, Homo sapiens
tgatctggaacacatataacctgtacatgaaagaataataaaaaatattaaatgcaaaatcaaatactgtcatggtagacaaaatacatattatatcaaaaacttcctcaagagacaagaggaaaaggacaataaaaacaacaacaataaaagcaacaacaataaagcaacatacaacaataaaagcaaaaacattaaaacaacatacaacaataaaagcaacaacagtaacgcatgtgccttacatcacagttcccaaacatatgaagcaacattttacagaattgaaacatgaagtagccagcacctgataacagtaaatgacttttatatctgacttttagtaatgtaaattaaaaaacaaacataagatggataagtaaacagaggatttcaacaacacgatagracaattagacctaacagtcacatttatatttctccactcaacagtagaatctgcaatacttttaatcacacatgccacaa

SEQ ID NO: 266834 - DNA, 489 bp, Homo sapiens
tgatctggaacacatataacctgtacatgaaagaataataaaaaatattaaatgcaaaatcaaatactgtcatggtagacaaaatacatattatatcaaaaacttcctcaagagacaagaggaaaaggacaataaaaacaacaacaataaaagcaacaacaataaagcaacatacaacaataaaagcaaaaacattaaaacaacatacaacaataaaagcaacaacagtaacgcatgtgccttacatcacagttcccaaacatatgaagcaacattttacagaattgaaacatgaagtagccagcacctgataacagtaaatgacttttatatctgacttttagtaatgtaaattaaaaaacaaacataagatggataagtaaacagaggatttcaacaacacgataggacaattagacytaacagtcacatttatatttctccactcaacagtagaatctgcaatacttttaatcacacatgccacaa

SEQ ID NO: 266835 - DNA, 457 bp, Homo sapiens
atgggtgtgctggaccagtgtgaggtgttctggggttgcctagcccatgagtyacgtttgttccaccagggctgctatgtcaatgacctcagccatctggggagggacctgaggaaaactctcatcctggacaactcgcctgcttcttacgtcttccacacagagaatgcagtgcctgtgcagtcctggtttgataacattccagacagcagctgctgcacctgatatcagtctttgaggacatgagtggagcatagggcatctatactagccttgggcagcagtgggcccttagcctttcctgcttcccagcaatggccatcacagtaggggattttcccacactgtgcctttatgatcagcctgaaagaatgaagcctggaacacctacccacatgggcctggaaacagtgagaagtgattgaaaaaaagctttaggacagcttagattcccagt

SEQ ID NO: 266836 - DNA, 569 bp, Homo sapiens
aactctggggccttgctcatcaccagaaaccttgaaaatcctgatgcaacctgtagggttaaccttatcaacacttagttttttaccatatagatttatcttcataaaaaatattttctttggacctttattttgttatatgccatgaagaataaatcatttatttcctttgcgataagaacatcacatttttacacctcaagtattaatgatgccatyccccatgtagtttttgttgcgatggcctgaatgtttatgtccctttgcaaattcctatgtggataattttaggcgtgtggcctttggggaagtggtgaggccaagagttcttcatcttcatgaatggaatcagtgctctttcaagggaagttgaaggcaatgcccttgtcccgtgtgcaagatggtaccatctatggggaacagggctctcaacatatactaaattttctgctgccttgatcttgcactttccagactccataactgtgaaaaatacatttctgttgtttatcctttacccagtctgaggtattttgttatagcagcctggatgcactatgacactttct

SEQ ID NO: 266837 - DNA, 567 bp, Homo sapiens
cgtgtggcctttggggaagtggtgaggccaagagttcttcatcttcatgaatggaatcagtgctctttcaagggaagttgaaggcaatgcccttgtcccgtgtgcaagatggtaccatctatggggaacagggctctcaacatatactaaattttctgctgccttgatcttgcactttccagactccataactgtgaaaaatacatttctgttgtttatcctttacccagtctgaggtattttgttatagcagcctggatgmactatgacactttcttaggcactttggtctatttctgaatttttagtttcagtgacatatgagtttttaatcaatcaagatttttcacagagcttgccagtcttgttttttgcttttttttcagagttttcttgtctattcttatgtgtgttttcatctatataatattttatagtaacgtgtacttccaatatttaatggtatctgtataggaacaaaattgaatttataaataaacttaaggacaattgatgttgataatattgagatttgctgcctaagaatatgatacaaattgtctattt

SEQ ID NO: 266838 - DNA, 547 bp, Homo sapiens
atttcccaaaaatactgacattgtctttttcagacccmatctcccaaagagaatcagagagatggtctggaagccatttagaatctccagcctccaatttagtaacaatggacttggatacaaagaggcaacctactgacctcaaagacaccagcccagattctgggcattgaattcctgcctccccatgaaagatctcatctgagtcacatcaaagcccacactcttcttcaacgttcaccttccagacacgctccaaaacagcccctcagaattgtcttgagatgaaacaaaaggtgatgaagctccaggtttggaatgcctgcctcattcctcactcctgaaaagtctacacctgctggttagaactctcataccttagggagcccgggctctcagagtgcatcctctaacaggacctcctggccttttcctccttggaggagagtgcccaagaataagagggaatacatggcctccactctcacttgacttgattgactgattaactgatgtctgaggaggaaacatatgtagggaacagcct

SEQ ID NO: 266839 - DNA, 544 bp, Homo sapiens
agtcacaggaaatctgttggggtttacacccctgctacttaccaagctcatgagagtgtggcactggtgaccatcacctgacattggtgacagaagagaaaaggycgaagtgaaggccaggtaggagagaggtgccaggctgtggggccaggccctgcgcatgctgggcctgttaggtcactgaacatctaactacccgggaaccagctcttttcacatcatttgaggtaagacgatgggggagcactctccagaagtcacactgcgctgggagaatggaggagagtctacataccgccatcttagggtaggttttagattgagctgaactgtcttggagagctaatgagatgggaggaagacagtcccccaggtgcacctaacagccagagcctatgaagttatgggggttgtgtgggggtggcctttccctataagaggaggagcttaaagctcttaaagctggtggctgctgctctgccatccctctacagagcagtcaagtcctcagctgcaagaatatctgaatgtcttttggagtgtt

SEQ ID NO: 266840 - DNA, 544 bp, Homo sapiens
agtcacaggaaatctgttggggtttacacccctgctacttaccaagctcatgagagtgtggcactggtgaccatcacctgacattggtgacagaagagaaaaggccgaagtgaaggccaggtaggagagaggtgccaggctgtggggccaggccctgcgcatgctgggcctgttaggtcactgaacatctaactacccgggaaccagctcttttcacatcatttgaggtaagacgatgggggagcactctccagaagtcacactgcgctgggagaatggaggagagtctacataccgccatcttagggtaggttttagattgagctgaactgtcttggagagctaatgagatgggaggaagacagtcccccaggtgcacctaacagccagagcctatgaagttakgggggttgtgtgggggtggcctttccctataagaggaggagcttaaagctcttaaagctggtggctgctgctctgccatccctctacagagcagtcaagtcctcagctgcaagaatatctgaatgtcttttggagtgtt

SEQ ID NO: 266841 - DNA, 571 bp, Homo sapiens
tagttgtgttgtactaaatattctttcctctggccttgtccagtgaacacggttcacatggctaacaccacttcttgagatgcgagcaccatgcaaagctgagaacggattgggttttgtgaccattgtgcctcctcctcacctgagaggcccatttttcctggttgattcattaagtgtattggtgctgtcagtcgcctctggacaattcaaatgacaagtggctgttgattcataaagaaaatgaaggctttagatgtgaaaccctcgttttctcttgtccttctcttaggtgaaagattttatttttttcaaaaggctacatactggtatcccagcaggtgtagtgtgagaactggcatatgttaggctatggtgtcagtgtggatgggcaattcttcaagatggaaaaccaagtctcactgagttgctggagccacagtgacctttctccacatcccccaccrtgggctttcacttttatcctgtgcttgaatttttttcacatacaaattctttatacacacacacagacacacacacacatatctcactctgtcaatgcagtggc

SEQ ID NO: 266842 - DNA, 597 bp, Homo sapiens
cttgcttatttattcccagcccccactgcccgcctgattcctaatggctaccctacaatgtggtcagcagtgggatgtagcgtggtgagagaggggctcagggacgggatgaaggtctttcctgcattatcaaaatgcaggttaaaaagttgttaaaaagatgtccaaatgttctaattcctactgttaaatagctgctaagatgcattatacaacagacccaggtaagggaaggagcatgtgcatttcaagtctcagctcacttcttaattagctgtgatactctgggcaggtgaccccaactatacgagcctgtgtgcctgtcaacccaaaacaatcctaagcaaaaacaccwaagcttggggcatcttgctacccgacttcaaactatactacaaggctgcagtaaccaaaacagcacagtactaataccaaaacagatatatagaccaatggaacagaacagaggcctcagtaataacatcacacatctacaaccatctgatctctaacaaacctgacaaaaacaagcaatggagaaagatttactacttaccaaatggtgctgaaagaactggctagccacattcagaaaac

SEQ ID NO: 266843 - DNA, 587 bp, Homo sapiens
tattcccagcccccactgcccgcctgattcctaatggctaccctacaatgtggtcagcagtgggatgtagcgtggtgagagaggggctcagggacgggatgaaggtctttcctgcattatcaaaatgcaggttaaaaagttgttaaaaagatgtccaaatgttctaattcctactgttaaatagctgctaagatgcattatacaacagacccaggtaagggaaggagcatgtgcatttcaagtctcagctcacttcttaattagctgtgatactctgggcaggtgaccccaactatacgagcctgtgtgcctgtcaacccaaaacaatcctaagcaaaaacaccaaagcttggggcatcttgctacccgacttcaaactatactacaaggctgcagtaaccaaaacagcacagtactaataccaaaacagatatatagaccaatggaacagaacagaggcctcagwaataacatcacacatctacaaccatctgatctctaacaaacctgacaaaaacaagcaatggagaaagatttactacttaccaaatggtgctgaaagaactggctagccacattcagaaaac

SEQ ID NO: 266844 - DNA, 614 bp, Homo sapiens
ttatacatttcattaaagttttctattattggatttctttctacttctccctacagttctgcccatatttgctttttatatttagaagcctcccttttgggtgcataaatatatatagctatattcacttgacaaattaacctctattattattgtatggtaaactcatttcatgcttgtgagagacattgctagaaagtctattttgtctaatttaagcataactaccattgaactcctttggctattatttgcatggaatatcattttctatcctttcacttttagcctatgctcttaattcataattgagtctcttgtaagcagcatattacgaggtttaaaagtttcatttatccactctgtctgctttagtctcttttggctgttataacagaatatcacagactggtaattaataaagaacagaattttatttgactcatgattctggaggctgggaaggtaaaagaacatgttrctggtatctgttgaaggtctagttgctggataataacatggccaaagatgtgagggagagacagcttttttttttttaatatataacagatccattcttgttaaaattagcccattcccataataagaacatt

SEQ ID NO: 266845 - DNA, 563 bp, Homo sapiens
cattcttgttaaaattagcccattcccataataagaacattaatccattcatgagggcagagtgcttatagcttaattaatttttaaaggttccacctcttaattctttcacattggccattttatcctaaattttggagatgacattcagtctacagaagtatctgtttagtagataatttaatctttttatttgtaaggtagtgataagtaagcagttactattgtacatttgtagttttctgtccattttaagtttgcttcttttttttctggttctgtctttcctgtggtattgttcatttttgttgagacaaagttatgctttcttgctcagactgaagttcagtggcatatcacagctcactgtagcctcaatctcctgggctcaagcaatcctccccccttagccacccaagtagcttggactacttggacacgtaccacaacacccaaggagcttatgattcttccaccttggcctccmaaagtgttggaattataagcaggagccactgtatccaatgtgtaatttttgttgtttgtgtatgctttaattactt

SEQ ID NO: 266846 - DNA, 516 bp, Homo sapiens
aaatctagaagaaatagacaatttccttgcaaaataaaccctccacaagactgaaccctgaatagatcaataatgtgttctgaaactgaggcagtaaaaactagcctaccaagcaagctgaatttgagcagaggtacaaagaggagatggtaccttttctcctaaaaccatccaaaaaaaattgaagacaaagaagttctctctaactcattctatcaggccagcatcatccagataccaaaacctaasatagatactacaacaacaacaacaacaacaacacatcatgccaatgtctttggtaaacactgtgcaaaaatcctcaataaaatactggcaaaacaaatccagcagcacattaaaaagttcatccgcaacaatggagttggctttgtccccaggatgcaaggttgattcaacatatgcaaatcaataaatgtgactcatcacataaagagaactaaatacaaaaaccacatgattatctcaataaatgcagaaaaagcatccaataaa

SEQ ID NO: 266847 - DNA, 516 bp, Homo sapiens
aaatctagaagaaatagacaatttccttgcaaaataaaccctccacaagactgaaccctgaatagatcaataatgtgttctgaaactgaggcagtaaaaactagcctaccaagcaagctgaatttgagcagaggtacaaagaggagatggtaccttttctcctaaaaccatccaaaaaaaattgaagacaaagaagttctctctaactcattctatcaggccagcatcatccagataccaaaacctaacatagatactacaacaacaacaacaacaacaacacatcatgccaatgtctttggtaaacactgtgcaaaaatcctcaataaaatactggcaaamcaaatccagcagcacattaaaaagttcatccgcaacaatggagttggctttgtccccaggatgcaaggttgattcaacatatgcaaatcaataaatgtgactcatcacataaagagaactaaatacaaaaaccacatgattatctcaataaatgcagaaaaagcatccaataaa

SEQ ID NO: 266848 - DNA, 516 bp, Homo sapiens
aaatctagaagaaatagacaatttccttgcaaaataaaccctccacaagactgaaccctgaatagatcaataatgtgttctgaaactgaggcagtaaaaactagcctaccaagcaagctgaatttgagcagaggtacaaagaggagatggtaccttttctcctaaaaccatccaaaaaaaattgaagacaaagaagttctctctaactcattctatcaggccagcatcatccagataccaaaacctaacatagatactacaacaacaacaacaacaacaacacatcatgccaatgtctttggtaaacactgtgcaaaaatcctcaataaaatactggcaaaacaaatccagcagcacattaaaaagttcatccgcaacaatggagttggctttgtccccaggatgcaaggttgattcaacatatgcaaatcaataaatgtgactcatcacrtaaagagaactaaatacaaaaaccacatgattatctcaataaatgcagaaaaagcatccaataaa

SEQ ID NO: 266849 - DNA, 604 bp, Homo sapiens
tggataaaggaaatgtggtacacatacaccatggaacactatgaagccataaaatgtaatgagatgatgtcccttgcagggacatggttggaatttgaagccattactcccagcaaactaatgcaggaacagaaaaccaaacaccrcctattattattctaacttattagcagaagcagatcaatgagaacacatggacacatcaggaagaacaacacacactggacacctgtttcatggcatgggggaggggaaggagagcgtgaggaagaatagctgcggatgctgggcttggtacctgggtgatgagatgatctgtgcagtaaaccacagtggtacgcatttatgtatgtaagagacctgcatactctgcacatggacccctaaacttaaaataaaagttgaaaaataaactttatcacatatggacccctgaacttaaaataaaacttgaaaaaaaatgtgtttctggtggattctctatgttagacccaaactgaggatcttgaagctctcgctgggggaatcggggatgggggcacactggggagccgctgccaaggccaaccaccctccctacaagccacctcccttcccggccagt

SEQ ID NO: 266850 - DNA, 604 bp, Homo sapiens
tggataaaggaaatgtggtacacatacaccatggaacactatgaagccataaaatgtaatgagatgatgtcccttgcagggacatggttggaatttgaagccattactcccagcaaactaatgcaggaacagaaaaccaaacaccgcctattattattctaacttattagcagaagcagatcaatgagaacayatggacacatcaggaagaacaacacacactggacacctgtttcatggcatgggggaggggaaggagagcgtgaggaagaatagctgcggatgctgggcttggtacctgggtgatgagatgatctgtgcagtaaaccacagtggtacgcatttatgtatgtaagagacctgcatactctgcacatggacccctaaacttaaaataaaagttgaaaaataaactttatcacatatggacccctgaacttaaaataaaacttgaaaaaaaatgtgtttctggtggattctctatgttagacccaaactgaggatcttgaagctctcgctgggggaatcggggatgggggcacactggggagccgctgccaaggccaaccaccctccctacaagccacctcccttcccggccagt

SEQ ID NO: 266851 - DNA, 364 bp, Homo sapiens
ggcccagtgatacatcacaatagctaaattatgtggggcccaaggcaaagagaagagttgcatcacctaagtgatgaacaaaaagatacttcatagtacccatggggaaatggcccatgcaggtgagtcacmttacctacgtgttggacccagtgatatgtcacaatacacaataaatgtaggatgcagccaagagcggatagtcaaatagctcaggtgctgggcccggtgatacattgtaatctctctttggtcagagccctacagtagaagaaactcagttcacctcggtgctgaggtcatccatatgtcacaatacccctgagaaatgagcccaggcaaagagtgagaggcccacagatat

SEQ ID NO: 266852 - DNA, 531 bp, Homo sapiens
atgcttgttcatatgttgcatgtctcgttagcatcttatatttccacccaggagtgtatttctgtgtgtttgtttgtttgtttgagacagagtctcgccgtgttgcccaagctgsggtgcagtggtgtgatctctgctcactgcaacctctgcctcctgagttcaacccatgctcgtgcctctgcctcctgagtatctgggattacaggcatgcaccatcataccctgctaatttttgtatttttaatttagacggggcttctctatgttggccagtttagtctcgagcttctagtttgaagtgatccatcttcctcagcctcccaaagtgctgagagtagaggtataagccaccgtgcctggctagggggtgcattgtttgctattaaaataagcaaaatttaagtttgagggcaggtaaaatcaaaatacacatgctctctagaacagaaagtccttaatgaggatagctttgctcgaataagccaaattacaatgcgaatgctaaggcttattgttttggctgtacag

SEQ ID NO: 266853 - DNA, 531 bp, Homo sapiens
atgcttgttcatatgttgcatgtctcgttagcatcttatatttccacccaggagtgtatttctgtgtgtttgtttgtttgtttgagacagagtctcgccgtgttgcccaagctgcggtgcagtggtgtgatctctgctcactgcaacctctgcctcctgagttcaasccatgctcgtgcctctgcctcctgagtatctgggattacaggcatgcaccatcataccctgctaatttttgtatttttaatttagacggggcttctctatgttggccagtttagtctcgagcttctagtttgaagtgatccatcttcctcagcctcccaaagtgctgagagtagaggtataagccaccgtgcctggctagggggtgcattgtttgctattaaaataagcaaaatttaagtttgagggcaggtaaaatcaaaatacacatgctctctagaacagaaagtccttaatgaggatagctttgctcgaataagccaaattacaatgcgaatgctaaggcttattgttttggctgtacag

SEQ ID NO: 266854 - DNA, 531 bp, Homo sapiens
atgcttgttcatatgttgcatgtctcgttagcatcttatatttccacccaggagtgtatttctgtgtgtttgtttgtttgtttgagacagagtctcgccgtgttgcccaagctgcggtgcagtggtgtgatctctgctcactgcaacctctgcctcctgagttcaacccatgctcgtgcctctgcctcctgagtatctgggattacaggcatgcaccatcataccctgctaatttttgtatttttaatttagacggggyttctctatgttggccagtttagtctcgagcttctagtttgaagtgatccatcttcctcagcctcccaaagtgctgagagtagaggtataagccaccgtgcctggctagggggtgcattgtttgctattaaaataagcaaaatttaagtttgagggcaggtaaaatcaaaatacacatgctctctagaacagaaagtccttaatgaggatagctttgctcgaataagccaaattacaatgcgaatgctaaggcttattgttttggctgtacag

SEQ ID NO: 266855 - DNA, 484 bp, Homo sapiens
attctctggccctgcatggtgtgaagctccactgtgagtaactgcagctggactggtctctattgtaactggcaaaggctgatagaggagcataaggaggagatgaaacaagcttagattctacagaagactctgatagtgtggggaygctggggattctaaagcaggtgtaggcctctgagggcccctatctggagctggtattaggctgtggggtctggggtcacttgcccataaaacaaatgatcttctaatggatctgaggggctttgtggcttactaggctttagcccacaggtgctgcatggagctgggttttgttgtcgggccagaaagtcttgcacataggatacttcagaccattttccctgattactacagaaaagatctagctgtatgatggtgttaaatttcacagtctcattctccagccatgttttgtcagctaatctgtatgcaggctaaatagttttacaaaagaaga

SEQ ID NO: 266856 - DNA, 484 bp, Homo sapiens
attctctggccctgcatggtgtgaagctccactgtgagtaactgcagctggactggtctctattgtaactggcaaaggctgatagaggagcataaggaggagatgaaacaagcttagattctacagaagactctgatagtgtggggacgctggggattctaaagcaggtgtaggcctctgagggcccctatctggagctggtattaggctgtggggtctggggtcacttgcccataaaacaaatgatcttctaatggwtctgaggggctttgtggcttactaggctttagcccacaggtgctgcatggagctgggttttgttgtcgggccagaaagtcttgcacataggatacttcagaccattttccctgattactacagaaaagatctagctgtatgatggtgttaaatttcacagtctcattctccagccatgttttgtcagctaatctgtatgcaggctaaatagttttacaaaagaaga

SEQ ID NO: 266857 - DNA, 484 bp, Homo sapiens
attctctggccctgcatggtgtgaagctccactgtgagtaactgcagctggactggtctctattgtaactggcaaaggctgatagaggagcataaggaggagatgaaacaagcttagattctacagaagactctgatagtgtggggacgctggggattctaaagcaggtgtaggcctctgagggcccctatctggagctggtattaggctgtggggtctggggtcacttgcccataaaacaaatgatcttctaatggatctgaggggctttgtggcttactasgctttagcccacaggtgctgcatggagctgggttttgttgtcgggccagaaagtcttgcacataggatacttcagaccattttccctgattactacagaaaagatctagctgtatgatggtgttaaatttcacagtctcattctccagccatgttttgtcagctaatctgtatgcaggctaaatagttttacaaaagaaga

SEQ ID NO: 266858 - DNA, 484 bp, Homo sapiens
attctctggccctgcatggtgtgaagctccactgtgagtaactgcagctggactggtctctattgtaactggcaaaggctgatagaggagcataaggaggagatgaaacaagcttagattctacagaagactctgatagtgtggggacgctggggattctaaagcaggtgtaggcctctgagggcccctatctggagctggtattaggctgtggggtctggggtcacttgcccataaaacaaatgatcttctaatggatctgaggggctttgtggcttactaggctttagcccacaggtgctgcatrgagctgggttttgttgtcgggccagaaagtcttgcacataggatacttcagaccattttccctgattactacagaaaagatctagctgtatgatggtgttaaatttcacagtctcattctccagccatgttttgtcagctaatctgtatgcaggctaaatagttttacaaaagaaga

SEQ ID NO: 266859 - DNA, 566 bp, Homo sapiens
tttggtagtagtgacattttaacaatattaagtctataacctcttgaacaagagtgtgtttgagaatttgttgtttaatttttacttattctttgacatgttagtgtttttaacttcttgttttattgtatcatagttaggaataatttgtgtaattccatctgctgaaatttgctaagatgtgttttttaacttaacaggtggtctatctggaatattgtggcatgtgtgattaaaagtattgcatattctactgttgagtggagagagataaatgtgactgttaggtctaattgttctattgtgttgttgaaatcttctgttaactaattcatcttaggttggtttttaatttacattactaaaagtctgataaaaaagtcatctactgttatgtgctggctacttcatgtttcaattctgtaaaatgytgcttcatattttgggaactgtgatgtaaggcacatacattactgttgcttttattgttgcatgttgttttattgttgttgcttttattgatatatgttgttttttgttgcttttattgttgttgttgttattgt

SEQ ID NO: 266860 - DNA, 566 bp, Homo sapiens
tttggtagtagtgacattttaacaatattaagtctataacctcttgaacaagagtgtgtttgagaatttgttgtttaatttttacttattctttgacatgttagtgtttttaacttcttgttttattgtatcatagttaggaataatttgtgtaattccatctgctgaaatttgctaagatgtgttttttaacttaacaggtggtctatctggaatattgtggcatgtgtgattaaaagtattgcatattctactgttgagtggagagagataaatgtgactgttaggtctaattgttctattgtgttgttgaaatcttctgttaactaattcatcttaggttggtttttaatttacattactaaaagtctgataaaaaagtcatctactgttatgtgctggctacttcatgtttcaattctgtaaaatgttgcttcatattttgggaactgtgatgtaaggcacayacattactgttgcttttattgttgcatgttgttttattgttgttgcttttattgatatatgttgttttttgttgcttttattgttgttgttgttattgt

SEQ ID NO: 266861 - DNA, 541 bp, Homo sapiens
gtcctgtagctattatttcctgtttttctctcttgttctctttcttagcrtattattgatttttatagtgacatgttttacttcttttctcactactctctctgtgtgtatgtctttgtgtgtgtgtactataggtatttccttttttttttttttttttgacagggtcttgctctgtcgcccaggctggagggcagtggcacaatatctgcttattgcaagctctgcctctcaggctcaactcaaacaatcctcccaccacagccttctgagtacctgggaccacagatgtgcaccagtactcctggctaatttttgttatttttcatagagacagggttttgccatgttgcccagactagtctcaaaatcctaagtactataggtattttctttgttgttactatagatattaccaaaaataactactatagcatataaaaccctgcctctttatggctgcctatgtgttttattgatgtcgcgaattacatcattttgtattgtgaatctattggcacagttatatagtcatttttaa

SEQ ID NO: 266862 - DNA, 541 bp, Homo sapiens
gtcctgtagctattatttcctgtttttctctcttgttctctttcttagcatattattgatttttatagtgacatgttttacttcttttctcactactctctctgtgtgtatgtctttgtgtgtgtgtactataggtatttccttttttttttttttttttgacagggtctwgctctgtcgcccaggctggagggcagtggcacaatatctgcttattgcaagctctgcctctcaggctcaactcaaacaatcctcccaccacagccttctgagtacctgggaccacagatgtgcaccagtactcctggctaatttttgttatttttcatagagacagggttttgccatgttgcccagactagtctcaaaatcctaagtactataggtattttctttgttgttactatagatattaccaaaaataactactatagcatataaaaccctgcctctttatggctgcctatgtgttttattgatgtcgcgaattacatcattttgtattgtgaatctattggcacagttatatagtcatttttaa

SEQ ID NO: 266863 - DNA, 541 bp, Homo sapiens
gtcctgtagctattatttcctgtttttctctcttgttctctttcttagcatattattgatttttatagtgacatgttttacttcttttctcactactctctctgtgtgtatgtctttgtgtgtgtgtactataggtatttccttttttttttttttttttgacagggtcttgctctgtcgcccaggctggagggcagtggcacaatatctgcttattgcragctctgcctctcaggctcaactcaaacaatcctcccaccacagccttctgagtacctgggaccacagatgtgcaccagtactcctggctaatttttgttatttttcatagagacagggttttgccatgttgcccagactagtctcaaaatcctaagtactataggtattttctttgttgttactatagatattaccaaaaataactactatagcatataaaaccctgcctctttatggctgcctatgtgttttattgatgtcgcgaattacatcattttgtattgtgaatctattggcacagttatatagtcatttttaa

SEQ ID NO: 266864 - DNA, 541 bp, Homo sapiens
gtcctgtagctattatttcctgtttttctctcttgttctctttcttagcatattattgatttttatagtgacatgttttacttcttttctcactactctctctgtgtgtatgtctttgtgtgtgtgtactataggtatttccttttttttttttttttttgacagggtcttgctctgtcgcccaggctggagggcagtggcacaatatctgcttattgcaagctctgcctctcaggctcaactcaaacaatcctcccaccacagccttctgagtacctgggaccacagatgtgcaccagtactcctggctaatttttgttatttttcatagagacagggttttgccatgttgcccagactagtctcaaaatcctaagtactataggtattttctttgttgttactatagatattaccaaaaataactactatagcatataaaaccctgcctstttatggctgcctatgtgttttattgatgtcgcgaattacatcattttgtattgtgaatctattggcacagttatatagtcatttttaa

SEQ ID NO: 266865 - DNA, 612 bp, Homo sapiens
atcattattttattttttaatgtsaatgactagcatttttttatacaggcctaccgtgcataaattaatacagttttcgttgatcttgaatattctttatttttattttttaattcatttgaaatgatagctttggcagacatagtgttcttggttggtacttgccatttttttcagcactttgagtatgtcatcctacaacctcttgcctgcatgctattggctgagacatctgctggtcatcctataggggtaacattgtacatgctaagtcattttttcttgctgacttcaagattctcggtgttttaacatttgaatctctgattaaaatgtgtcttgtcatgggtctccctgtgttgctactagttggtaaagtttcattaaattttaggccattttctccctcaaattttgagagttctcagccactgtttgtttcttgaaataactttgctgctctcttttctctctttttattttagaattcccattagaagtatattggccatcttaatggtatcccataagtcccttaggctttcttaatttttaaaattatttttaccctcctcaccatataatttcaaaagacttcttatgaagcttgct

SEQ ID NO: 266866 - DNA, 612 bp, Homo sapiens
atcattattttattttttaatgtcaatgactagcattttttwatacaggcctaccgtgcataaattaatacagttttcgttgatcttgaatattctttatttttattttttaattcatttgaaatgatagctttggcagacatagtgttcttggttggtacttgccatttttttcagcactttgagtatgtcatcctacaacctcttgcctgcatgctattggctgagacatctgctggtcatcctataggggtaacattgtacatgctaagtcattttttcttgctgacttcaagattctcggtgttttaacatttgaatctctgattaaaatgtgtcttgtcatgggtctccctgtgttgctactagttggtaaagtttcattaaattttaggccattttctccctcaaattttgagagttctcagccactgtttgtttcttgaaataactttgctgctctcttttctctctttttattttagaattcccattagaagtatattggccatcttaatggtatcccataagtcccttaggctttcttaatttttaaaattatttttaccctcctcaccatataatttcaaaagacttcttatgaagcttgct

SEQ ID NO: 266867 - DNA, 612 bp, Homo sapiens
atcattattttattttttaatgtcaatgactagcatttttttatacaggcctaccgtgcataaattaatacagttttcgttgatcttgaatattctttatttttattttttaattcatttgaaatgatagctttggcagacatagtgttcttggttggtayttgccatttttttcagcactttgagtatgtcatcctacaacctcttgcctgcatgctattggctgagacatctgctggtcatcctataggggtaacattgtacatgctaagtcattttttcttgctgacttcaagattctcggtgttttaacatttgaatctctgattaaaatgtgtcttgtcatgggtctccctgtgttgctactagttggtaaagtttcattaaattttaggccattttctccctcaaattttgagagttctcagccactgtttgtttcttgaaataactttgctgctctcttttctctctttttattttagaattcccattagaagtatattggccatcttaatggtatcccataagtcccttaggctttcttaatttttaaaattatttttaccctcctcaccatataatttcaaaagacttcttatgaagcttgct

SEQ ID NO: 266868 - DNA, 612 bp, Homo sapiens
atcattattttattttttaatgtcaatgactagcatttttttatacaggcctaccgtgcataaattaatacagttttcgttgatcttgaatattctttatttttattttttaattcatttgaaatgatagctttggcagacatagtgttcttggttggtacttgccatttttttcagcactttgagtatgtcatcctacaacctcttgcctgcatgctattggctgagacatctgctggtcatcctataggggtaacattgtacatgctaagtcattttttcttgctgacttcaagattctcggtgttttaacatttgaatctctgattaaaatgtgtcttgtcatgggtctccctgtgttgctactagttggtaaagtttcattaaattttaggccattttctccctcaaattttgagagttctcagccactgtttgtttcttgaaataactttgctgctctcttttctctctttttattttagaattcccattagaagtatattggccatcttaatggtatcccataagtcccttaggctttcttaatttttaaaattatttttascctcctcaccatataatttcaaaagacttcttatgaagcttgct

SEQ ID NO: 266869 - DNA, 584 bp, Homo sapiens
aatagtttattctcttctgggtatacacccagcggtgaaattctgcgttgaatcatagttcaactctcagttatttggaaaatctccaagctgctctccacagtggctgaactaatttatattcctataaacagtgtataagtggttttttccctctaaaaccccaccaatatctactatcattttactttttaacaaaagccattctaactggtgtacgatggtgtcttactgtggtttttatttacatttccttgatggttagtgataagcttttttcatgttgtttggccacttgtatgtattcttttgaacattgtctgttattgcccactttttcatggggtaattttttgcttgtgaattctttaagtttcttatagattctgagtattagattttgtcaggtttataggttgtgaatatttttgccattctgccagctttggggttagtttgtttttgtttttctagtttctctaagtgtgatgttaaattgttagtttgagatcattctaacttcttgatgcagrtatttagcactctcaactttcctcttaacagagcttttcctacaacccaga

SEQ ID NO: 266870 - DNA, 587 bp, Homo sapiens
gattcttttaaagaaactatacaggtgtggtagtgtgcccaactgtggtcatatttactcaggagacataggaggcatgactgctttacttcagaaatttgaggttacagtgagctgtgattgcaccactgcaatctgtcccaggagatagagtaagatcctgtgtataaaatgaaaaaataaagaaaaataaaatgattttaagttaaaaaataattcatagatctccacttctttagggtcacttgaatatatatttttctcgtttcattaggctatatttcctggttgcttttawgtactgtggttttgttaaggttttggtcaattaagaaaccactacctattttatcctttatgaaaaagctttgtacatgggaaaattgacaatattcagccacactagtcattccgggagcttctccaatctgttgtcaaaatgtgtcttctttgtactgtatgtattttcttgttaataaggtttacctctctttcctcttaggagcctttagtctcttctctttgtcactgttgcaggcactacagtctctttgttgtaagaaatatttatctttattctcagtcga

SEQ ID NO: 266871 - DNA, 635 bp, Homo sapiens
gaattttatctaactgcactgttctktagtgcagaaatgtaaccaaattttctttcttctaaatgtggttatggttggcttttttctcatgaggggtgctacaaactcaactggctttgctcacccaattgcagttaagttcatacatccattgagagaaacaggatctcaggttcttcttcaactatcattgtgttctcagctggcctcattttgttcattagatttataaaatatatttaccttaatttcatcaccgaattttttaaaaaattattattttccagctcttttagcattatatccaacaagacccagacaaaacagtacataggagcttcttttcaaaaagtaatattgggaagatatgggagctctggccttgaaaatttacactgaaggagagtgggaaattgaaggataagtgtaaagggtacaaaggatgctatgatgaatataccagatatagagcaactacctacagcaaaaatgtcactgctagaagagctcaaaaccataaagtattttggaaaaagcataattaatgttgattcttttttctgaactatatatttgtataattacatatcaataacaatttttgaaacatcatgtttttgaaacaaaatttagaa

SEQ ID NO: 266872 - DNA, 635 bp, Homo sapiens
gaattttatctaactgcactgttctttagtgcasaaatgtaaccaaattttctttcttctaaatgtggttatggttggcttttttctcatgaggggtgctacaaactcaactggctttgctcacccaattgcagttaagttcatacatccattgagagaaacaggatctcaggttcttcttcaactatcattgtgttctcagctggcctcattttgttcattagatttataaaatatatttaccttaatttcatcaccgaattttttaaaaaattattattttccagctcttttagcattatatccaacaagacccagacaaaacagtacataggagcttcttttcaaaaagtaatattgggaagatatgggagctctggccttgaaaatttacactgaaggagagtgggaaattgaaggataagtgtaaagggtacaaaggatgctatgatgaatataccagatatagagcaactacctacagcaaaaatgtcactgctagaagagctcaaaaccataaagtattttggaaaaagcataattaatgttgattcttttttctgaactatatatttgtataattacatatcaataacaatttttgaaacatcatgtttttgaaacaaaatttagaa

SEQ ID NO: 266873 - DNA, 635 bp, Homo sapiens
gaattttatctaactgcactgttctttagtgcagaaatgtaaccaaattttctttcttctaaatgtggttatggttggcttttttctcatgwggggtgctacaaactcaactggctttgctcacccaattgcagttaagttcatacatccattgagagaaacaggatctcaggttcttcttcaactatcattgtgttctcagctggcctcattttgttcattagatttataaaatatatttaccttaatttcatcaccgaattttttaaaaaattattattttccagctcttttagcattatatccaacaagacccagacaaaacagtacataggagcttcttttcaaaaagtaatattgggaagatatgggagctctggccttgaaaatttacactgaaggagagtgggaaattgaaggataagtgtaaagggtacaaaggatgctatgatgaatataccagatatagagcaactacctacagcaaaaatgtcactgctagaagagctcaaaaccataaagtattttggaaaaagcataattaatgttgattcttttttctgaactatatatttgtataattacatatcaataacaatttttgaaacatcatgtttttgaaacaaaatttagaa

SEQ ID NO: 266874 - DNA, 636 bp, Homo sapiens
ttgctcacccaattgcagttaagttcatacatccattgagagaaacaggatctcaggttcttcttcaactatcattgtgttctcagctggcctcattttgttcattagatttataaaatatatttaccttaatttcatcaccgaattttttaaaaaattattattttccagctcttttagcattatatccaacaagacccrgacaaaacagtacataggagcttcttttcaaaaagtaatattgggaagatatgggagctctggccttgaaaatttacactgaaggagagtgggaaattgaaggataagtgtaaagggtacaaaggatgctatgatgaatataccagatatagagcaactacctacagcaaaaatgtcactgctagaagagctcaaaaccataaagtattttggaaaaagcataattaatgttgattcttttttctgaactatatatttgtataattacatatcaataacaatttttgaaacatcatgtttttgaaacaaaatttagaaaatcgcaatagtggcctaggccaggaatatatcttctaatgctatccctcccatagtcccccacttcctgacaggctccagtgtgtggtgttccccttcctgtgtccctgtgttctc

SEQ ID NO: 266875 - DNA, 635 bp, Homo sapiens
gaattttatctaactgcactgttctttagtgcagaaatgtaaccaaattttctttcttctaaatgtggttatggttggcttttttctcatgaggggtgctacaaactcaactggctttgctcacccaattgcagttaagttcatacatccattgagagaaacaggatctcaggttcttcttcaactatcattgtgttctcagctggcctcattttgttcattagatttataaaatatatttaccttaatttcatcaccgaattttttaaaaaattattattttccagctcttttagcattatatccaacaagacccagasaaaacagtacataggagcttcttttcaaaaagtaatattgggaagatatgggagctctggccttgaaaatttacactgaaggagagtgggaaattgaaggataagtgtaaagggtacaaaggatgctatgatgaatataccagatatagagcaactacctacagcaaaaatgtcactgctagaagagctcaaaaccataaagtattttggaaaaagcataattaatgttgattcttttttctgaactatatatttgtataattacatatcaataacaatttttgaaacatcatgtttttgaaacaaaatttagaa

SEQ ID NO: 266876 - DNA, 636 bp, Homo sapiens
ttgctcacccaattgcagttaagttcatacatccattgagagaaacaggatctcaggttcttcttcaactatcattgtgttctcagctggcctcattttgttcattagatttataaaatatatttaccttaatttcatcaccgaattttttaaaaaattattattttccagctcttttagcattatatccaacaagacccagacaaaacagtacataggagcttcttttcaaaaagtaatattgggaagatatgggagctctggccttgaaaatttacactgaaggagagtgggaaattgaaggataagtgtaaagggtacaaaggatgctatgatgaatataccagatatagagcaactacctacagcaaaaatgtcactgctagaagagctcaaaaccataaagtattttggaaaaagcataattaatgttgattcttttttctgaactatatrtttgtataattacatatcaataacaatttttgaaacatcatgtttttgaaacaaaatttagaaaatcgcaatagtggcctaggccaggaatatatcttctaatgctatccctcccatagtcccccacttcctgacaggctccagtgtgtggtgttccccttcctgtgtccctgtgttctc

SEQ ID NO: 266877 - DNA, 612 bp, Homo sapiens
tatttttctcttgagaattaatgcattttgtgtcccragaaatctgggcctgtgccagtcatggacatatttatctatgttatctactagaaatattgttttcagctttgaccttaaaatttaaaatccacttttcattggaatttgttaataatataagataggagtgttttttctcacataaataactggttgactcaaggctatttaccgagaagactgtcttcactcctcttctgtgccttttttgtaatatacagaatgtccaaatgtgtgagtctgagttggactctcgagtttttctagttttctttgtgcctatttttgcattactaccatagatagcttttattactatagctttaatctaagtctgaatatatgtcattttaagctcacaaactttgttattcttcaggacagtttttacatttcttcgattttttatatgtatttaaattttttaaactgattagacagtttccacaagatttctgccaaaatattgtattgtgaaaatggaaatctatgaatcaatttagggagaagttacatagaaacaaagcaaaacaaaacactaataacatccaaaacaaacttaaagagaacacc

SEQ ID NO: 266878 - DNA, 612 bp, Homo sapiens
tatttttctcttgagaattaatgcattttgtgtcccgagaaatctgggcctgtgccagtcatggacatatttatctatgttatctactagaaatattgttttcagctttgaccttaaaatttaaaatccacttttcattggaatttgttaataatataagataggagtgttttttctcacataaataactggttgactcaaggctatttaccgagaagactgtcttcactcctcttctgtgccttttttgtaatatacaraatgtccaaatgtgtgagtctgagttggactctcgagtttttctagttttctttgtgcctatttttgcattactaccatagatagcttttattactatagctttaatctaagtctgaatatatgtcattttaagctcacaaactttgttattcttcaggacagtttttacatttcttcgattttttatatgtatttaaattttttaaactgattagacagtttccacaagatttctgccaaaatattgtattgtgaaaatggaaatctatgaatcaatttagggagaagttacatagaaacaaagcaaaacaaaacactaataacatccaaaacaaacttaaagagaacacc

SEQ ID NO: 266879 - DNA, 346 bp, Homo sapiens
tctggggttcggagaatctgactagtgtgagtttcccaaggtaaaggtaatgccttaataattttcactttaattgctgtttgcgcagtgttttgcacaaaatttaacacaataattgctcccagagtaaatgtataaatctttgcaatgtctgatttgactcccttagagtttggatcttttcccctacaaccatccagagtcctgtctaaccaaagtgaaaatgcggaactccctctttctggctggcatccctgcagagaayggaaataaatgctgtctatgccaactccctagaacaagtataggtttcatctagactagttttcaaaatgaggaaacagga

SEQ ID NO: 266880 - DNA, 523 bp, Homo sapiens
gagaggagggtgagcaatcagcagcccagcagggactttgcrtagatttatggaggaaaagggctcaggggataaaaccttgaagaagttaacagacttcccttgtgacaaaacctaacagaatttagaactttgggaaccagaaacccacattctagagacagccctgtatctagctaacttcttgggagatgcttgagagggcactgtgttctcattgtgttatattcccaagctgttgcctgagaaaggctcaaagtgagagccttttctgacagtatacatactggctcagcctacatccttgataccactggccattcgacaagaggcacccacaggtaacacagtttagcccagggcaggtccgtccatgccaggccacctgtgtcatctaatctgggcaacccgaccctgcctaccattaccctgtgttgcaaggggagcaggaaaggagggggcttttcctcacaggggcaggttttaagacacaggaaccctggtgggtctgtcatgttcatac

SEQ ID NO: 266881 - DNA, 488 bp, Homo sapiens
gaaagtaaaaacacaattaactgatgtgagacagcctactctaaaaaatacagaaacataaaattataaaacataattaagagaaactttaatccataaaatcctgaataaacatagtgtccaaatgaaaaagaatcccaggtaactacaatttttaactcttcctgtgaatctatgaaaagtatgaattttgaattatttggatacagttagggcaacaacatttcagagaaaacacattataattawtacaaagagctgtgatgagaaagttttaaggaataagcatttaagtaatactagagaaagttttaaattatgctactgatgcattgctgcttttcttacacaaaacgataaggctgtaatctagcttttaattgaaaagtcttacatttctaaatatggtaacaatataaatattgtaaatacagtataaaacattgacatataaaataaaaattggaaataaattgtactattagtca

SEQ ID NO: 266882 - DNA, 560 bp, Homo sapiens
ttaatacaaagagctgtgatgagaaagttttaaggaataagcatttaagtaatactagagaaagttttaaattatgctactgatgcattgctgcttttcttacacaaaacgataaggctgtaatctagcttttaattgaaaagtcttacatttctaaatatggtaacaatataaatattgtaaatacagtataaaacattgacatataaaataaaaattggaaataaattgtactattagtcaaataaaagttgggaaaactggaagaagatgctaatagtaacattgtgcctagagtcaattaaacatacaagccaaatattttaataaattataaattatataatttatacataatatatacatttgagcatgctattttacaacttctgaaaggaaattacagacaaatgtgacacatgataattcagaaaktgaaaacacagtcatagtaatcttcatattaaagaagacagaatcataaaatactaagtgagaaataaagtaataattgtgaattcaatatatgttgaacaatattctaatttcccttacggaaa

SEQ ID NO: 266883 - DNA, 560 bp, Homo sapiens
cggcctcagcccctcaaacagtgggaaatggaagaatggcttggaaatgggccctgtcgacagtgtgtcacctgagcacattctcccaggggcccaagaggggccatcgtgtctctagaaccagaactggaaggtgaaactgccagggggaacaaggaagagggtcctcagttgggtggagggtctcacagcaagaygcctggcttaatcaagcttggccattcctgaagcacgttcagtgactaaaagtgcctaccatgagcagctggaacacactctctgagagctgcaagatgcatggggacctcaagtacctgtttgtaattacagccaaggaccagcaggcagcattgctgcatccacatgggcttttgctggaaccagtaagtctctgccagcccctcccaggctcctgggatgccacttgttctgggtctgtggacagataaccaggacacttactcagtgaagcccatcgctcaaccccagccccaccataccctgtctcctatgccattcctcatcccagaaggaaaggcaatgcctttgtcccacagccc

SEQ ID NO: 266884 - DNA, 574 bp, Homo sapiens
tctgtttatgggtttaaaaaatcctaatatttcatttatagtagtttcagcttgcatgtgtttatttgtataaattttattagaataaagagagcttaagacaacagcattttaaggtcttaatgaggcatagactttcatgtcacaacagctattgttgacctctgtttgctacctttatgtaatgtatacacataaagtacagccagaggtgactagagctgagctgcttgggcttgcttgctggcctacagtcaggtggactctggctgtgaggcggtgcccaccctggatctacatcccccaccctctctccttagtccctgagtaaccaacaaggccgtgctaatgagcrggcaagtgatgggcatagggtaccccaatactatctgggaagatttgaatgccatctgggctggagctgttgggattagggtctgtggctgccttggcttgtcatggtgccacccacagatgtgcctgccctgtgctgcttctccagcaaccggctgcccatggccctgagcctgtcacaccattcttgctacctcatactgcttgtgtttgaaaaacc

SEQ ID NO: 266885 - DNA, 567 bp, Homo sapiens
tagttgtgttgtactaaatattctttcctctggccttgtccagtgaacacggttcacatggctaacaccacttcttgagatgcgagcaccatgcaaagctgagaatggattgggttttgtgacsattgtgcctcctcctcacctgagaggcccatttttcctggttgattcattaagtgtattggtgctgtcagtcgcctctggacaattcaaatgacaactggctgttgattcataaagaaaatgaaggctttagatgtgaaaccctcgttttctcttgtccttctcttaggtgaaagattttatttttttcaaaaggctacatactggtatcccagcaggtgtagtgtgagaactggcatatgttaggctatggtttcagtgtggatgggcaattcttcaagatggaaaaccaagtctcactgaggtgctggagccacactgacccttctccacatcccccaccatgggctttcacttttattctgtgcttgaatttttttcacatacaaattctttatacacacacacagacacacacacacatatctcactctgtcaatgcag

SEQ ID NO: 266886 - DNA, 567 bp, Homo sapiens
tagttgtgttgtactaaatattctttcctctggccttgtccagtgaacacggttcacatggctaacaccacttcttgagatgcgagcaccatgcaaagctgagaatggattgggttttgtgacgattgtgcctcctcctcacctgagaggcccatttttcctggttgattcattaagtgtattggtgctgtcagtcgcctctggacaattcaaatgacaastggctgttgattcataaagaaaatgaaggctttagatgtgaaaccctcgttttctcttgtccttctcttaggtgaaagattttatttttttcaaaaggctacatactggtatcccagcaggtgtagtgtgagaactggcatatgttaggctatggtttcagtgtggatgggcaattcttcaagatggaaaaccaagtctcactgaggtgctggagccacactgacccttctccacatcccccaccatgggctttcacttttattctgtgcttgaatttttttcacatacaaattctttatacacacacacagacacacacacacatatctcactctgtcaatgcag

SEQ ID NO: 266887 - DNA, 529 bp, Homo sapiens
gaaaccctcgttttctcttgtccttctcttaggtgaaagattttatttttttcaaaaggctacatactggtatcccagcaggtgtagtgtgagaactggcatatgttaggctatggtttcagtgtggatgggcaattcttcaagatggaaaaccaagtctcactgaggtgctggagccacactgaccyttctccacatcccccaccatgggctttcacttttattctgtgcttgaatttttttcacatacaaattctttatacacacacacagacacacacacacatatctcactctgtcaatgcagtggctgaatcatgggtcactgcatcttcaaattcttaggctccagtgatgctttcaaatcagcctctcaagtagctgggactacaggcatgcaaagctacacccagacaattttttaatttttttctagagactgagcctacttatgttgctcagactcatcttgaactcctgggatcaagcgataatcccaccttggccacctaaagtgtttacattacag

SEQ ID NO: 266888 - DNA, 529 bp, Homo sapiens
gaaaccctcgttttctcttgtccttctcttaggtgaaagattttatttttttcaaaaggctacatactggtatcccagcaggtgtagtgtgagaactggcatatgttaggctatggtttcagtgtggatgggcaattcttcaagatggaaaaccaagtctcactgaggtgctggagccacactgacccttctccacatcccccaccatgggctttcacttttatyctgtgcttgaatttttttcacatacaaattctttatacacacacacagacacacacacacatatctcactctgtcaatgcagtggctgaatcatgggtcactgcatcttcaaattcttaggctccagtgatgctttcaaatcagcctctcaagtagctgggactacaggcatgcaaagctacacccagacaattttttaatttttttctagagactgagcctacttatgttgctcagactcatcttgaactcctgggatcaagcgataatcccaccttggccacctaaagtgtttacattacag

SEQ ID NO: 266889 - DNA, 529 bp, Homo sapiens
gaaaccctcgttttctcttgtccttctcttaggtgaaagattttatttttttcaaaaggctacatactggtatcccagcaggtgtagtgtgagaactggcatatgttaggctatggtttcagtgtggatgggcaattcttcaagatggaaaaccaagtctcactgaggtgctggagccacactgacccttctccacatcccccaccatgggctttcacttttattctgtgcttgaatttttttcacatacaaattctttatacacacacacagacacacacacacatatctcaytctgtcaatgcagtggctgaatcatgggtcactgcatcttcaaattcttaggctccagtgatgctttcaaatcagcctctcaagtagctgggactacaggcatgcaaagctacacccagacaattttttaatttttttctagagactgagcctacttatgttgctcagactcatcttgaactcctgggatcaagcgataatcccaccttggccacctaaagtgtttacattacag

SEQ ID NO: 266890 - DNA, 329 bp, Homo sapiens
ttttcacatacaaattctttatacacacacacagacacacacacacatatctcactctgtcaatgcagtggctgaatcatgggtcactgcatcttcaaattcttaggctccagtgatgctttcaaatcagcctctcaagtagctgggactacaggcatgcaaagctacacccagacaatttttwaatttttttctagagactgagcctacttatgttgctcagactcatcttgaactcctgggatcaagcgataatcccaccttggccacctaaagtgtttacattacaggtgtgagctagcactctcagcaaaaatatattttaaaga

SEQ ID NO: 266891 - DNA, 329 bp, Homo sapiens
ttttcacatacaaattctttatacacacacacagacacacacacacatatctcactctgtcaatgcagtggctgaatcatgggtcactgcatcttcaaattcttaggctccagtgatgctttcaaatcagcctctcaagtagctgggactacaggcatgcaaagctacacccagacaattttttaatwtttttctagagactgagcctacttatgttgctcagactcatcttgaactcctgggatcaagcgataatcccaccttggccacctaaagtgtttacattacaggtgtgagctagcactctcagcaaaaatatattttaaaga

SEQ ID NO: 266892 - DNA, 580 bp, Homo sapiens
aacagcattgaatctataaattacttagggcaatatgctcatattcgtggtactgattctttctctccgtgagcatggaatgtttctccatttgttttgtgtccactctgattcctctgagtagttgtttgtagttctccttgaagatatccttcactttccttcttagctgtattccttggtayttttttctctttatagcaaatgtgaatgaaagttcattcatgatttgtctccctgcttgcctgttgcttgtgtatgggaatgctagctacttttgcagattgattttatatcctgagattttgctactgctgcttatcaccttaagaagctttggggctgagacgaagaggctttctagatatagggtcaggtcatctgtaaacaaagataatttgactttctctctttctatttgaatactgtttatttcttcctctggcctgattttcctggacaagttttccgaatgggagttgtaatgcgagtggtgagagagagcatacttttcttgtgccggttttcagggggaatgtttccagcttttgcacattcagtatgatattggctgtgggtt

SEQ ID NO: 266893 - DNA, 571 bp, Homo sapiens
gtcctttattatacatttcattaaagttttctattatttggtttctttctacttctccctacagttctggcaatatttgctttttatatttagaagcctcccttttgggtgcataaatatataaagctatattctcttgagaaattaacctctattattattstatggtaaactcatttcatgcttgtgagagacattgctagaaagtctattttgtctaatttaagcattaccgttgcactcctttggttattgtttgcatggaatatcattttctatcctttcacttttagcctatgctcttaattcataattgagtctcttgtaagcagcatattacgaggtttaaaagattaatttatccactctgtctgctttagtctcttttggctgctataactgaatatcacacactggtaattaataaagaatcgaattttatttgacttatgattctggaggctgggaagccaaaacaacatgatactggtatatgttgaaggtctagttgctggataataacatagacaaagatgtgagggagagagagctttttttttttaatatataa

SEQ ID NO: 266894 - DNA, 536 bp, Homo sapiens
ctcttaattcataattgagtctcttgtaagcagcatattacgaggtttaaaagattaatttatccactctgtctgctttagtctcttttggctgctataactgaatatcacacactggtaattaataaagaatmgaattttatttgacttatgattctggaggctgggaagccaaaacaacatgatactggtatatgttgaaggtctagttgctggataataacatagacaaagatgtgagggagagagagctttttttttttaatatataacagatccattcttgttaaaattagcccattcccataataagaacattaatccattcatgagggcagagttcttagagcttaattaatttttaaaggttccacctcttaattctaacatgttggctattaaattttatcctaaattttggagatgacattcagtgtacagcagtatctgtttagtagatactttaatctttttatttgtaaggtagtgataggtaaggagttactattgtaaatttgtagttttctgtccatttt

SEQ ID NO: 266895 - DNA, 536 bp, Homo sapiens
ctcttaattcataattgagtctcttgtaagcagcatattacgaggtttaaaagattaatttatccactctgtctgctttagtctcttttggctgctataactgaatatcacacactggtaattaataaagaatcgaattttatttgacttatgattctggaggctgggaagccaaaacaacatgatactggtatatgttgaaggtctagttgctggataataacatagacaaagatgtgagggagagagagctttttttttttaatatataacagatccattcttgttawaattagcccattcccataataagaacattaatccattcatgagggcagagttcttagagcttaattaatttttaaaggttccacctcttaattctaacatgttggctattaaattttatcctaaattttggagatgacattcagtgtacagcagtatctgtttagtagatactttaatctttttatttgtaaggtagtgataggtaaggagttactattgtaaatttgtagttttctgtccatttt

SEQ ID NO: 266896 - DNA, 580 bp, Homo sapiens
aacagcattgaatctataaattacttagggcaatatgctcatattcgtggtactgattctttctctccgtgagcatggaatgtttctccatttgttttgtgtccactctgattcctctgagtagttgtttgtagttctccttgaagatatccttcactttccttcttagctgtattccttggtatttttttctctttatagcaaatgtgaatgaaagttcattcatgatttgtctccctgcttgcctgttgcttgtgtatgggaatgctwgctacttttgcagattgattttatatcctgagattttgctactgctgcttatcaccttaagaagctttggggctgagacgaagaggctttctagatatagggtcaggtcatctgtaaacaaagataatttgactttctctctttctatttgaatactgtttatttcttcctctggcctgattttcctggacaagttttccgaatgggagttgtaatgcgagtggtgagagagagcatacttttcttgtgccggttttcagggggaatgtttccagcttttgcacattcagtatgatattggctgtgggtt

SEQ ID NO: 266897 - DNA, 580 bp, Homo sapiens
aacagcattgaatctataaattacttagggcaatatgctcatattcgtggtactgattctttctctccgtgagcatggaatgtttctccatttgttttgtgtccactctgattcctctgagtagttgtttgtagttctccttgaagatatccttcactttccttcttagctgtattccttggtatttttttctctttatagcaaatgtgaatgaaagttcattcatgatttgtctccctgcttgcctgttgcttgtgtatgggaatgctagctacttttgcasattgattttatatcctgagattttgctactgctgcttatcaccttaagaagctttggggctgagacgaagaggctttctagatatagggtcaggtcatctgtaaacaaagataatttgactttctctctttctatttgaatactgtttatttcttcctctggcctgattttcctggacaagttttccgaatgggagttgtaatgcgagtggtgagagagagcatacttttcttgtgccggttttcagggggaatgtttccagcttttgcacattcagtatgatattggctgtgggtt

SEQ ID NO: 266898 - DNA, 539 bp, Homo sapiens
taaggagttactattgtaaatttgtagttttctgtccattttaagtttgcttcttttttttctggttctgtctttcctgtggtattgttcatttttgttgagacaaagttatgctttcttgctcagactgaagtgyagtggcatatcacagctcactgtagcttcaacctcctgggctcaaataatcctcccaccttagccacccaagtagcttggactacagacacgtaccgcaacacccaaggagatttcatccttccaccttggcctcccaaagtgttggaattataagcaggagacaccatatccaatgtgtaatttttgttgtttgtgtatgctttaattactttctctttttctttactgcagtttttttttcctagtggttatcatgagacttaggtaaaacatcttgtattttaatagtctagtttaagatgataacaatttatagtattctgaaattcagtatgtatttaccattttagtgacatttatactttagtatttttcatattgttagttagcatttcatcata

SEQ ID NO: 266899 - DNA, 545 bp, Homo sapiens
tcttgttaaaattagcccattcccataataagaacattaatccattcatgagggcagagttcttagagcttaattaatttttaaaggttccacctcttaattctaacatgttggctattaaattttatcctaaattttggagatgacattcagtgtacagcagtatctgtttagtagatactttaatctttttatttgtaaggtagtgataggtaaggagttactattgtaaatttgtagttttctgtccattttaagtttgcttcttttttttctggttctgtctttcctgtggtattgttcatttttgttgagacaaagttatgctttcttgctcagactgaagtgtagtggcatatcacagctcactgtagcttcaacctcctgggctcaaataatcctcccaccttagccacccaagtagcttggactacagacacgtaccrcaacacccaaggagatttcatccttccaccttggcctcccaaagtgttggaattataagcaggagacaccatatccaatgtgtaatttttgttgtttgt

SEQ ID NO: 266900 - DNA, 580 bp, Homo sapiens
aacagcattgaatctataaattacttagggcaatatgctcatattcgtggtactgattctttctctccgtgagcatggaatgtttctccatttgttttgtgtccactctgattcctctgagtagttgtttgtagttctccttgaagatatccttcactttccttcttagctgtattccttggtatttttttctctttatagcaaatgtgaatgaaagttcattcatgatttgtctccctgcttgcctgttgcttgtgtatgggaatgctagctacttttgcagattgattttatatcctgagattttgctactgctgcttatcaccttaagaagctttggggctgagacgaagaggctttctagatatagggtcaggtcatctgtaaacaaagataatttgactttctctctttctatttgaatactgtttatttcttcctctggcctgattttcctggacaagktttccgaatgggagttgtaatgcgagtggtgagagagagcatacttttcttgtgccggttttcagggggaatgtttccagcttttgcacattcagtatgatattggctgtgggtt

SEQ ID NO: 266901 - DNA, 579 bp, Homo sapiens
ttttagttattttaacactccaaaagggaactagttttctcatgcattttccaaatgtgtggcaggcagagactcaaatctaactccctgttgccccagcctaactctggcttgcaatcagattttaaatttccagttctttcctgacactcaccaacactaactaaccttccataattcacaacattatcaactgttctttattgtayatttcagacacagtatttcaattcttctttttgtcaaaaagcagtggatgtcatttaaaaaaattttttctcatttgtaaacattttacaggagatgaaagcagagaataatcccctgacaccccactgtaaaaaaaataaataaaaagcggaaaacctttgtgcccctttgtttaaacttctcttggcacagacaccccatcagaaagcctttgggttcaggtttcattttggaaacttcacagggcaatacatcctcagccatcctgttattttcttggttttgaatttcaaaactgtttgaggattccccaagatgccaacagtggccatgactcttgaagtgtctagtaaatagcatcccttgtgt

SEQ ID NO: 266902 - DNA, 499 bp, Homo sapiens
agctatttccaggattaccttcacccacaactgttccttttcctagacatctctttcatttgtcagyttctgagttgtatttttataataaagtggtaaatataattagacttatttgttgagtttttttgagtaactctatcaaattatttaacttgaaaaggggtttatgggagtctcagatttataggcagtagctcagaagtatagatgggcttatgggacatgtgactaacctctgcagtgagaggggtgatgtgggacttagccctgaatttgtgggatctgtgcgaactctaagttgtgtcagaattaaattttggggcaagaaatgggtgttggagaagcagtgggttttcagggaactttacacatttaggatcaaaagtgttgtaaggagaaagacaatgtgggggcctttgctggagagagactccaggtgtctcggggaaggtaggctctgctctgcacacaggctgctacgccatgcactgccctg

SEQ ID NO: 266903 - DNA, 499 bp, Homo sapiens
agctatttccaggattaccttcacccacaactgttccttttcctagacatctctttcatttgtcagtttctgagttgtatttttataataaagtggtaaatataattagacttatttgttgagtttttttgagtaaytctatcaaattatttaacttgaaaaggggtttatgggagtctcagatttataggcagtagctcagaagtatagatgggcttatgggacatgtgactaacctctgcagtgagaggggtgatgtgggacttagccctgaatttgtgggatctgtgcgaactctaagttgtgtcagaattaaattttggggcaagaaatgggtgttggagaagcagtgggttttcagggaactttacacatttaggatcaaaagtgttgtaaggagaaagacaatgtgggggcctttgctggagagagactccaggtgtctcggggaaggtaggctctgctctgcacacaggctgctacgccatgcactgccctg

SEQ ID NO: 266904 - DNA, 499 bp, Homo sapiens
agctatttccaggattaccttcacccacaactgttccttttcctagacatctctttcatttgtcagtttctgagttgtatttttataataaagtggtaaatataattagacttatttgttgagtttttttgagtaactctatcaaattatttaacttgaaaaggggtttatgggagtctcagatttataggcagtagctcagaagtatagatgggcttmtgggacatgtgactaacctctgcagtgagaggggtgatgtgggacttagccctgaatttgtgggatctgtgcgaactctaagttgtgtcagaattaaattttggggcaagaaatgggtgttggagaagcagtgggttttcagggaactttacacatttaggatcaaaagtgttgtaaggagaaagacaatgtgggggcctttgctggagagagactccaggtgtctcggggaaggtaggctctgctctgcacacaggctgctacgccatgcactgccctg

SEQ ID NO: 266905 - DNA, 551 bp, Homo sapiens
taattttttgaggcagaatcttactcttttacttagcctgaagtgcaacggcataatcatagctcacggtaaccttaacctcttgggtttgagcagtcctcctgcatcaaccgcttaattacctaggactataggcatgaaccaccatgcctggctagctttatttatttttgtttttattttttttcaagacagtgtcttgctctgtgggctaggctggagtgtagtgccatgatcttgtctcaatgcaacctccacctcccagrttcaagcaattctcctgtctcagccttttgagtagctgggattacaggcgcacaccaccatgtctggctaattttttgttattattatttttagtagagaatgggttttaccattttggccaggctggtctccaccccctgacctcattatccacctgcctcagactcccaaagtgctgggattacaggtgtgagccaacatgcccagccatatttattttatttttttgtagtgacagaatttcaccatattgcctgtactggactcaaacatttggcttgaag

SEQ ID NO: 266906 - DNA, 587 bp, Homo sapiens
cagtgattagaaaaggcctaagaggtgggttctgtaagggattgctggaaggaaagtaggaatatggaaagtcatgagacatatactgtcatctcttcttgcttcctctcaagtcacatgcaaattcagggagagttagtatgaaacacacaatggaaatttgggctctaacatatgcaatctgattcttcatggacttcatttggccatatcagttccaacaatttcagccaatgtttaaaaatcttataagcagataamattttagtgtttcaacaagccatttcctatctttcattctgaaaatccattttaagtcatttttttaacagcataggggtacaaattcagcttctgtccaatgaaatacagaaaaggatatcacttttgtattagttcaggctgctatgccaaagaaccatagataagcagcttatagacaacaggacttaatttctcatacttctataggttcgaaatttgagatcaggttgtcagcacggttgagctctggtgatgactcgcttctgaatttcagactgcagacttcaagttttaccatcattttgcagaaggaggaagagagc

SEQ ID NO: 266907 - DNA, 587 bp, Homo sapiens
cagtgattagaaaaggcctaagaggtgggttctgtaagggattgctggaaggaaagtaggaatatggaaagtcatgagacatatactgtcatctcttcttgcttcctctcaagtcacatgcaaattcagggagagttagtatgaaacacacaatggaaatttgggctctaacatatgcaatctgattcttcatggacttcatttggccatatcagttccaacaatttcagccaatgtttaaaaatcttataagcagataacattttagtgtttcaacaagccatttcctatctttcattctgaaaatccattttaagtcatttttttaacagcataggggtacaaattcagcttctgtccaatgaaatacagaaaaggatatcacttttgtattagttcaggctgctatgccaaagaaccatagataagcagcttatagacaacaggacttaatttctcatacttctataggttcgaaatttgagatcaggttgtcagcacggttgagctctggtgatgactcgcttctgaatttcagactgcagacttcaagttttaccmtcattttgcagaaggaggaagagagc

SEQ ID NO: 266908 - DNA, 534 bp, Homo sapiens
tttctgcacagtctcagagcaagaatcagggctggaagacacttatgagtatgtgaaatcgtcgaggtcacccagttcaaacagccctatttatgaggaagaaaacaggctttcctgcaggcattctctacattasgctgaggtggagcatagctcattttacttccaggtgccctcagagctggatgcaaaaccccagtcctgtcatcttgaaattgacatggagaggtccccatgtgaacagaaccctggatctgctcattctctgtgcccctgaatgtgaagctacaggctctaacttccaaagcaaacctgataggtgggatggagccaaggcctaggaagctggagctctctctaatgctctggagcctgcccacctcctgagatctggatcagtccctgcctcttttggggcctcattttcccaattgtaatgtaatgagaaattaaatgtaaaattgcataagcatatgctctgtgagaatttggtgtcagagtcctcaatactggatgatatattttggtgggagg

SEQ ID NO: 266909 - DNA, 544 bp, Homo sapiens
gatgacaacctccattatagtgagrgagtccaagaaactagacttgtggacctggagaaaagaaaaaaacacttttctatttctctcaaactgtagaatctgttgtcaaatatttaattttgattccatctgagcttgataatacgttcatgtgttaagagctgcttaaatttattttttctgtggtgtgggataatgtcttttcccatattttaaatcaacttctaaaagctctctttaaagtggagatgtgaacatctttgtgatataaactgcacatatttgttgcgagattgttctttttctctttgttaaaatgttttgttttattctggtttggatgtccttcagggttttgttttgtggctatttattactacaatgcaacttctcccctaattgactgacaggtttgtacattctcaataaaatcttttggtaaagtctttgtaaaaactgtgtaaacaattttacagttttcataaacataaaacagtcaagactgtcatgatgaaaaagaaagattgagggcttaaaaattaaa

SEQ ID NO: 266910 - DNA, 544 bp, Homo sapiens
gatgacaacctccattatagtgagagagtccaagaaactagacttgtggacctggagaaaagaaaaaaacacttttctatttctctcaaactgtagaatctgttgtcaaatatttaattttgattccatctgagcttgataatacgttcatgtgttaagagctgcttaaatttattttttctgtggtgtgggataatgtcttttcccatattttaaatcaacttctaaaagctctctttaaagtrgagatgtgaacatctttgtgatataaactgcacatatttgttgcgagattgttctttttctctttgttaaaatgttttgttttattctggtttggatgtccttcagggttttgttttgtggctatttattactacaatgcaacttctcccctaattgactgacaggtttgtacattctcaataaaatcttttggtaaagtctttgtaaaaactgtgtaaacaattttacagttttcataaacataaaacagtcaagactgtcatgatgaaaaagaaagattgagggcttaaaaattaaa

SEQ ID NO: 266911 - DNA, 544 bp, Homo sapiens
gatgacaacctccattatagtgagagagtccaagaaactagacttgtggacctggagaaaagaaaaaaacacttttctatttctctcaaactgtagaatctgttgtcaaatatttaattttgattccatctgagcttgataatacgttcatgtgttaagagctgcttaaatttattttttctgtggtgtgggataatgtcttttcccatattttaaatcaacttctaaaagctctctttaaagtggagatgtgaacatctttgtgatataaactgcacatatttgttgcgagattgttctttttctctttgttaaaatgttttgttttattctggtttggatgtccttcagggttttgttttgtggctatttattactacaatgcaacttcwcccctaattgactgacaggtttgtacattctcaataaaatcttttggtaaagtctttgtaaaaactgtgtaaacaattttacagttttcataaacataaaacagtcaagactgtcatgatgaaaaagaaagattgagggcttaaaaattaaa

SEQ ID NO: 266912 - DNA, 544 bp, Homo sapiens
gatgacaacctccattatagtgagagagtccaagaaactagacttgtggacctggagaaaagaaaaaaacacttttctatttctctcaaactgtagaatctgttgtcaaatatttaattttgattccatctgagcttgataatacgttcatgtgttaagagctgcttaaatttattttttctgtggtgtgggataatgtcttttcccatattttaaatcaacttctaaaagctctctttaaagtggagatgtgaacatctttgtgatataaactgcacatatttgttgcgagattgttctttttctctttgttaaaatgttttgttttattctggtttggatgtccttcagggttttgttttgtggctatttattactacaatgcaacttctcccctaattgactgacaggtttgtacattctcaataaaatmttttggtaaagtctttgtaaaaactgtgtaaacaattttacagttttcataaacataaaacagtcaagactgtcatgatgaaaaagaaagattgagggcttaaaaattaaa

SEQ ID NO: 266913 - DNA, 415 bp, Homo sapiens
ggcatgtctgttgtgaaaagtggtatagtgttttatcatccagaaaatagcactggctattaaatcggaattcatgtcattggatcacggagccagtcatattgagaaaagagcttgacagcctcctccaattcatcagcatgtgtgaccctcaaattactaccctctccaaagatagcaaattctggagcattcctaaattggcagtccagacagggagggtactcaaagcagaactgaaagggtttatggcttctcaagctagttcaaagaaagatctgaggggaatgttctcgtctggkaaaacctattttatatctgaaaagtcaggaattgccagggcttccttggctccagcttccccaacaattgttttagtctgacctcaaatctcacagtttgtcttgaaacataa

SEQ ID NO: 266914 - DNA, 597 bp, Homo sapiens
ctttttagtgtgaataaaaattgtgatgaagaaatatgggagttttgcatggtaacttccatgttcccttttcattctgttttgcagtagaccaaatgacattcctgtttgtctttctgaacaaaatagttatgcaaaygggcagtttaaaattttagttttataagaccatttaatgtacttacctttaggaaacaaaaccaagcactgaacctaactgttgaagacatcactgaatatgttccctgacctgtgtgatgctttgagaaattcataattccttaaaaataaaaaggaagaaaaagtaacgacttctgctatgctcctaatactgttattttttccaagatgacctttaatgtttttctgcagtttgtagtataaaatagaaataattgggcttcagcacaaatgattgcctcatgttctaatgctgtaactccagagcaaaaaggaaacaatagtttatctttagaaattcccaggctctgggctctgcacctctccttgccacatctgtgttgtgcatccttctctatctatctcctagagttcttgcctcaagcctgaaaactccaggcctcagagaagtggtaa

SEQ ID NO: 266915 - DNA, 597 bp, Homo sapiens
ctttttagtgtgaataaaaattgtgatgaagaaatatgggagttttgcatggtaacttccatgttcccttttcattctgttttgcagtagaccaaatgacattcctgtttgtctttctgaacaaaatagttatgcaaatgggcagtttaaaattttagttttataagaccatttaatgtacttacctttaggaaacaaaaccaagcactgaacctaactgttgaagacatcactgaatatgttccctgacctgtgtgatgctttgagaaattcataattccttaaaaataaaaaggaagaaaaagtaacgacttctgctatgctcctaatactgttattttttccaagatgacctttaatgtttttctgcagtttgtagtataaaatagaaataattgggcttyagcacaaatgattgcctcatgttctaatgctgtaactccagagcaaaaaggaaacaatagtttatctttagaaattcccaggctctgggctctgcacctctccttgccacatctgtgttgtgcatccttctctatctatctcctagagttcttgcctcaagcctgaaaactccaggcctcagagaagtggtaa

SEQ ID NO: 266916 - DNA, 532 bp, Homo sapiens
gtaatattatgtgaaatgatactagcatcagaaaacacgtttagataggttctctctcaccctccctctctccatccctccttttgtttgtttgtttcttccttcctagtaaacattttattgaggtaagacacatatgaaaaagtacattatttataattgtgctgctctataaattttccaagatgagtacacccttgttactaccaccagatcaaaaaagagcacattattagcactccagggaccctcctcatttgtcctttgattgytatagaatgcatcctctagaatgcatcctcctgtggtaatcactgtcctgacttctagtagtataggttgtttttgtctaatttcaaactttatattaatggaatttcacaatatgtattcttttgtgtatatcttctcttgctcagtattgttgttgcatcacccatggttttgcgtgtaatagtaattcattcattctcatcagtgtacagattccactgtctcaatataccataatttattcattttgctgttgatg

SEQ ID NO: 266917 - DNA, 548 bp, Homo sapiens
ttcagcaaataaatagaaggtataaacaagaaccacatgaaaattttagaactcatgaagacaatagccaaaataaaaaactcactggatacactcaatagcaaaatggaaaggtcagacaaaataatgagtaaacttaaaaatagcaagaaaataaattacccaatgtgaacaacagaggtaaaggaggctgaagtgaatagacactcagtgaataacaaaggatctaacattcatatggtcagagttccagaaagagaggagaaagaaggtggagatgaaaaagtattcaaatacataatggtggaaaatctcttaaatctggcaaagggcctaagtccaaaaattcaagaagctgaataaaatggggcaaagttttcaggccaggaggagtaacctgaaagcactagaggcttccaccccagtccagcactgatatgctttggctgtgtcctcaccgtaaatctcatcttgamtccccataatgcccacttgtcaagagtgggaccaggtggaggtaattgggtcttgggggcagtttctcccct

SEQ ID NO: 266918 - DNA, 585 bp, Homo sapiens
tttttataggtatctgggatttcctctgcttgcactcactccgtcgtcttgccttgtgaagaaggtkcctgcttcttctttgccttccatgactgtaagtttcttgaggcccccctagccatgttgaactgcgagcgaattaaacctctttcctttataaattccccagtcttgggcagttcattatagtagtatgaaaacaagcactctgttcttgaaagatatagtagcctacttctctggtctcactcccagagaagtacactactatatttctccctagctctggagcagtaatgtaggggttttgcccaggggcaagggcaagccataagaacagagagcttaagcacctccccaggtgaattgactttatttggaacagagtgtgaaaaaaaaatgtagactgtggcagtaactaagagagtgctggtagctctatgagagcaataaactaaactgtaaaacatttagaagtttattagagcgaaccaggtaaagagatagctgagaacactcctggagtcagaaaacccctcaaagcctgacctcaaagatgactgcaacaaagggacaaagatttaa

SEQ ID NO: 266919 - DNA, 585 bp, Homo sapiens
tttttataggtatctgggatttcctctgcttgcactcactccgtcgtcttgccttgtgaagaaggttcctgcttcttctttgccttccatgactgtaagtttcttgaggcccccctagccatgttgaactgcgagygaattaaacctctttcctttataaattccccagtcttgggcagttcattatagtagtatgaaaacaagcactctgttcttgaaagatatagtagcctacttctctggtctcactcccagagaagtacactactatatttctccctagctctggagcagtaatgtaggggttttgcccaggggcaagggcaagccataagaacagagagcttaagcacctccccaggtgaattgactttatttggaacagagtgtgaaaaaaaaatgtagactgtggcagtaactaagagagtgctggtagctctatgagagcaataaactaaactgtaaaacatttagaagtttattagagcgaaccaggtaaagagatagctgagaacactcctggagtcagaaaacccctcaaagcctgacctcaaagatgactgcaacaaagggacaaagatttaa

SEQ ID NO: 266920 - DNA, 615 bp, Homo sapiens
tgattaggatagtgggaagagttgaaatgaaaaacaaatccactcataaataagcatcccctccctcacaaaaaagttgacaaaaattgaagttaatctttatttccctagaagaaggcaggatatatgagaaacgtattaacctgtaaagttcattctattcaataattatccacctgttgcaatgaatgataaatgcttcctagagttctgcatcttccagaaatgtggcagattgatacatctgagggggagcaagcaggcgtgaagattaaaaaatagtaagtgtcagggatttgcattgcatttcttttaataagtagaaaaaacttggatgtagagggggaactgaacctcataaccagactgaatggtttatcaagaagtccaggagtatatayaagagagaggtgcctaatgcatgttcccaaccccaaaaagatgagtatgaaaggagctccagctttttacattttcatttttcaaggacgagccaacaaagttaaagttcaacttgctcttggattttaacctagctagcatataagcaatatttgttgtactttgccttcacctaaaagaatataatgatgtgttttaggattatcaggcaca

SEQ ID NO: 266921 - DNA, 609 bp, Homo sapiens
aaagggtagttatatttgaattctttctctaccttttcccagctgaccttggttaaaatagacttcacttctctgaaattttatttcatcttccataacttgtgcatcaaaataaaacccacagtggaatgatgatgaaagattacataagagatcattgaaacagcctggtattaataaatgccaaaattatgctcatttttctctcttacttcatcttctctctgtccaggatatgaaacaccaaagtctacaggattttcattatgctctttcacttacttcacacacaattactgagtttctacaacatgccagccactcagcaagatttgggaatacactgatgaataaaatacagtcgttgccctgaaggagatcctaaaccaaaggacccgattatactctatgtacatataaggattttacccaggaagaagcaataacatccagccttttagaggtcttacaatgtgtatgattcataaactatgcagtaatacaatatcctgtgaattacctcactgctcacattaatacaggaccatgatgttatcataccagcctaacagtctgtytccatcggtggacccaaaggcctccagttat

SEQ ID NO: 266922 - DNA, 552 bp, Homo sapiens
ttatagcaaagcaacatgaattcataaagcttccattgtaaaccatgaagccttaaaatatgggagagaagatgtttcctgaattacaaaaatggaaaaaaaaaaaagtcttttcaaatcaacaaggattgatttgttagacacacccactattgtggtccagaacttgagaacatgcattttaaatgccactattaggacacagaacagctgccccttccttcagctattgcacagggcagcactgcttctgcctgtcaccagaacagaagcagatccaagtgggcagtggcagggatagcacacattttctactgtaggcctgccatactccataagagcatcaagacttcatttactccaaagagacttccagaaatgcaacttttgggtttctaakattagcgtcaaaatcatggagttacccaacctctaagaaaacccctacatatttagtgataagtaggtaggaaatctaactgtcaaagtcaagtcaagccgacctcccctacactttacataccaaaagagcatgcctcagatcatgaataa

SEQ ID NO: 266923 - DNA, 389 bp, Homo sapiens
ggctggtttttgtatcagaagtgtttctgccaactttcagccagcgaggttgaaatgaagaaaaaaatgaacattcaaacaaactgtcgtcaattactcatcgcaaattagaagcagcatgcaagtctacacagcctggcactttgctgcttacttttgccaaaataaattgaaatccaaagctatttaaatatcgagttcacttgtatgtgtctagacaatttaatgaacaaacatgaaaaggtggyacaaaatcttgcctctttagtagtcaacgaagaattatagtacacaagataatcagaaatcagaaaagaggtgtctaaatttgatcattttctatcacgtggtttgccagaagtctcctcgagataaattcttctttgggt

SEQ ID NO: 266924 - DNA, 572 bp, Homo sapiens
aaggccttattgttaggatttaatgcagtacagtaattatcatagtagcaatatgtagaaaatatttgtttattctgaaagccctattttttggggcatttaaaaaaagcctatttcccccaaaggatgaagaaaacaaatggctgttcagatgtttcaagactgagaaatttattcaaatgcrcagaagataccacattttctagtggcatttctgtttgtttacaaattattaggtatctttttccctgaggaataaagttctgagataatttgctcctaaagaaattgaaaaatcagtcaggtatctagtcaattaatttcttttagccataaatcttgaattatcttactttaactttcataatggggtaatagcaaaagagaaaaaacaaaatttgcaataaaagtttgtaaccaaagatacatatcacaatccatatgtttccttagaagttctgatacaataatgtgaatgtacttaatacaacttaactgtacacttaaaatggataaaatgttaaatcttatgttatgcacattttaccacaattaaaacagttgaaatacac

SEQ ID NO: 266925 - DNA, 587 bp, Homo sapiens
tctaacactaaagccatgttcttaaccagtaccacagttttaaacactttactaaattgtgttaatgacatgcatgcatttatctattcatacactaacttggcatataccacagtatacagtaatttttaccttcccctctcccaagtttgatagcaccgtgtgggaagtaggtctgagaagagaggtgctcaaaaaccgtagaattaatccattaacatttgctgaacccaggcccttctttaggtgctggggacaaataagaaagatgagaaacctggaaagaatatttaataatcatctcatccaaaactgaagccatccctaatattagagaaagtggtgtagtgttgtgaattgtatgggctctgagatagacatactcccattccaatcttcatttacatttaacttctctgagccttagttttcttagctgtcagtgtggttaatagtgactaagtcatgttgtgaacacttgtggtgtgctgctacataggtttacgttcatgtaaacattcatgccttcaacacatggtagctagaaataatattttagtgcyaccgtatttttaatgcagccgcag

SEQ ID NO: 266926 - DNA, 561 bp, Homo sapiens
cacccctgtcctctatcatttattattgcctgagagttctaggctctaccatattatgtaacactattttatgctggctgaggttgtttggtatcattgcatgcaggtgagatttaagggcagtaattgtcttgtatttcttaagtgtagtcatgcytgagtcttatttcaatctcaacaccaatctcacacttgcttatcttaacttgtgtatatagtatccttccagtggatacaggagtggttccagatcttcattttgtcgtcgtcttcattttgtcgtcgtcttcattttgtcatcccctactccctactatatatggccaagctgcaaaacttctcctctagaaagtattaagcagttctgagtcaagatgctgagagcttcaggggtcttcttggccaaaggtcagggtattgccatgtccctgtcaggacctaagttagtaaatacgttttctttatgaagcagcaagtgaaagatttagaaactcaagggacaaaactcaggaaaaatgaaccttatttaataaagtcacttttattttatgtttaagataa

SEQ ID NO: 266927 - DNA, 556 bp, Homo sapiens
gcatctcctcatcactgatatgaaacaattctgaatataattgctgaaattaaatttcctattttttcatttgaaataatataagaaatcaaaacttaccctaatgtttggcccccaggatcaataaactgagttatttaaaagaatacagaaataacctttttaaaaggagttatttcccacagacttaccatatattgttcaaatcttcaaattaattttgtaaacataaagaatgtcaggtrtggtctaacatcaagtggaatttattagaatctaacaaacagttttatacttcaatactaaatatctttaacccttttacaagtggggagatacgatcctttttggcatctgactctgcatatgaacagcatgagcagcagagagatttgccaaagtcagaaaaatcatcatggagtccgtgagattgatcagtccaggagaaaaatattcaaaggtgttgctcctccagcctaccaatcaattcattcaaaacaaactattagcttattaacatattccaagaagacatcagtgtcttttggcaagctag

SEQ ID NO: 266928 - DNA, 615 bp, Homo sapiens
tttacttaatgagacatactactctcaagctgtaggtataaatactcttttattgtcttgtccatgaagtccttaccacctcctgcctcctaggattgacaaagattttaaaaatcacttccttgtcccagtttagctctgagcctcacatgaaattctaagaggatttatgatkctttatagtcatttggaataaccagttgggttctgtgataagcaaacaaattagctgaccttcttttaatcactctgtctccctgacactgctgaaggcagatatgttgaggtaatctgcccaccacatgcacattttactctggccaattagtggttggaaatgtccagaagagtatcccatttaattaggcatggccaaacaatgactgcatgtgtctcatattatctttgaatgttcaagtttccttaaatggttcaagaattagttttcaacattttttagaactgatgtatcctaacagtggcgaataaaaatattaaggcttccccgagaataacagtgatttttttttttaaaggagagagcccagttctttttattgttgtagtcttgttttcgtatgctctgctttttatttgctttcctttttcttggtt

SEQ ID NO: 266929 - DNA, 461 bp, Homo sapiens
atataatgaactgccatatgtctaccagctcacttctacaaattcaacgttttggcaatcctcttccttcttttttttctggatcattttaatgcaaacttccagattatttttctggatcattttaatgcaaactctaccattattacttgatgayatagtgctgtgctctgggcattaaatcttgtttagaaaaattcagttgaatgcacagataactacaaattgactgttttatctgattccaaagagagctgatgctgtgcaatcagagactgcctctaagagctggtatatgatattgccttattatgaatcatctactaaactgcaagctcatgagagcagcatgagcttatatgcttaatatttagactgtggttttcaatttagagattagaataaaattagaaatcaaatgcatctttgttctttcattcccaactatagtacctaatcta

SEQ ID NO: 266930 - DNA, 622 bp, Homo sapiens
tgtactcagaaatgtttataacagaattatgatgtatataataccattctatcagttccctgattaccaaaatggtagagactcgttcaaggtcaaataattatatgtggttgaattagaactggactcctgactcctgagtcttgggctaggacattggctactatctcttagtgccttctgtaatccagtaggagctttgagattacctaacctatcttaagatcacccagcttggaagtaaagattaggatgataatgatataaatgataatgatgaaaataataataactaacactaattgtagttatgtgccggccactcttcctctagcactgttcattctttcttttgtatgtaataagtgttcactgaattcccactaagtaccagccactcttctaggtgctagaatgtaacaataagcaaaaccccaaatctctgttcttaggcatcttatcttataatagtattttatatagatcatcccattctttaaatttacrtaataactttatggatagttactctcattattcgcattttattgttaggaaaattgattgacagagagcttaagtatcttaaacccaagatcatacagataagatgggacaccca

SEQ ID NO: 266931 - DNA, 497 bp, Homo sapiens
atgaccagtgatgatgagcttttttcatgtttgttggccacataaatgtcttctcttgagcaatgtctgttcatatccttggcccactttttatcttttgccactttttaatttgagtgtttgttttcttgttattgaattgcaagagttccttatatattgtttataagtcatttgtcagatatattgtgaacattttttccaggctgtggcttgctttttgttttattagtagtgttatgtgatgagcagaagcttttaattttgaggaaatctagtttataacttttttgttagtatrttttgagtcctagctaagaaatctgaatctgtcaacctcagtggtgtgatgatattgtcctatgtttcttctaaaagttttatagtcttagcttttatgttcgtccactgtattgctattattttttcctagcaactaataagcaacttgtgagagatatttttaggtcatgcaaatatcctgttttttaaaaatc

SEQ ID NO: 266932 - DNA, 490 bp, Homo sapiens
attaagtaaaataatacttatgaaatgcttaaaatcatggttggcataaaataagcttttaataaatattcaccattagtataggaagagggggtggacggaaacttcaacaacacaaagaaatatataaaagaaagagtgctgtgttgttagattttcaaaatattccggatcctactgactgtctcggtttggatcatttacatctgtggttgaattaagctcatttttttcatatttatttatgtatctatatgttatattctgacatacaatgatatttttgattaataygaaaatggtacatgaataaaatgagtaatttatcaggagtcaggaaatataagtgctaatcctattatatcattagctatgtgactttggagaagcatgttataattctatcctttagttttctaaacttattttgttaaagcaaaattacagcattggatgcagtcaaaatatattatacaaatgcaaactatct

SEQ ID NO: 266933 - DNA, 575 bp, Homo sapiens
atccaaatatctggaatttttttctgtgattactaattgctacttctgactccacaagtacagagaaaaggatgggtggatattgttgctttacctccccatgttgttgcaagcccttttccttttggctgaagttacttccggaaaatgttaaagctggaacccttttctctgtccctttatttttttctstttctcttcgtgttgccagacattaaagactaggacattaaaaggcaactgcatatacgtggaagattagaaagtaactacgcttgcccaggaaaagatacaggctcagaaaagacttgagaggaacttaagtttacattccagactgattcttgacaccgagacagaaaaacaaaacaaaacaaaacaaaaaaacaaaacaaccacccaataacaaacaacagcaaatcctggggaacagagagtttgatttccagagtcaccacattattagattcaaatgttcaattttcttttttaaaaaataattttactttactttaagttccggatacatgtgcagaatgtccaggtttgttacacaggtatacatgtgccgtggt

SEQ ID NO: 266934 - DNA, 572 bp, Homo sapiens
agggtgccaggtagaaagaataaagaaaagcagaagtggaaaacagcaggaaggaaggaagcaagaccacgtacagtascaatgccaagaatatggacctacttatttgtgcactgacccaacaattgaacatttgtttctactgtgaactgaaaggagcactgagagagagaaattgtctagcaacacttttgtaacttctattctatgaatacttattgagaaacttcctctgtgcagggtaccattcacatttcttactgtaccaaatagaacctccgggcatgggtagtgaagaaaccttgggatacagcaaaataaaaaatcccatatatatttttggaggtagacttgacaggatttggtgaattattgaatgtcaaatgcaaaggaggacaagtcatcaagaatgacaggtttctgacataggcaacacggtagataataatgcatttacatggataaggttttctgaaaaataatccactttccaaaagaaaaaacaaaacactggacttacctaccagatattcaacaaatggaaacactcagaggatatagaaacaaagatt

SEQ ID NO: 266935 - DNA, 595 bp, Homo sapiens
cgtacagtaccaatgccaagaatatggacctacttatttgtgcactgacccaacaattgaacatttgtttctactgtgaactgaaaggagcactgagagagagaaattgtctagcaacacttttgtaacttctattctatgaatacttattgagaaacttcctctgtgcagggtaccattcacatttcttactgtaccaaatagaacctccgggcatgggtagtgaagaaaccttgggatacagcaaaataaaaaatcccatatatatttttggaggtagacttgacaggatttggtgaattattgaatgtcaaatgcaaaggaggacaagtcatcaagaatgacaggtttctgacataggcaacacggtagataataatgcatttacatggataaggttttctgaaaaataatccactttccaaaagaaaaaacaaaacactggacttacctaccagatatycaacaaatggaaacactcagaggatatagaaacaaagattacccatatggattcattctgtttaatgttggaaagggcagttttcaaatttcaccattcagaacaaatgttatactcataatctcaaaatta

SEQ ID NO: 266936 - DNA, 595 bp, Homo sapiens
cgtacagtaccaatgccaagaatatggacctacttatttgtgcactgacccaacaattgaacatttgtttctactgtgaactgaaaggagcactgagagagagaaattgtctagcaacacttttgtaacttctattctatgaatacttattgagaaacttcctctgtgcagggtaccattcacatttcttactgtaccaaatagaacctccgggcatgggtagtgaagaaaccttgggatacagcaaaataaaaaatcccatatatatttttggaggtagacttgacaggatttggtgaattattgaatgtcaaatgcaaaggaggacaagtcatcaagaatgacaggtttctgacataggcaacacggtagataataatgcatttacatggataaggttttctgaaaaataatccactttccaaaagaaaaaacaaaacactggacttacctaccagatattcaacaaatggaaacactcagaggatatagaaacaaagattacccatatggattcattctgtttaatgttggaaagggcagttttcaaatttcaycattcagaacaaatgttatactcataatctcaaaatta

SEQ ID NO: 266937 - DNA, 521 bp, Homo sapiens
atactaaagttgagatccgtaatttcatgtagacaactgttagacaaaatgtatcagtatgatacatttccagagggaaaactctgacattactatgcaaagtttgaagtaaatatttgtgcagtaataaagtatgtttaagtayacgttgggtaatatttgattttaaataaaattttatggagatgtcttaaattgaagcaagaaatgttactttgttaaaaaaaataaaggctaagctgttgtgattttatttaacagcttgaaaatgatacaaacatttcttcatcaatacatttatatagttgtaaaacaatctaatctttatctttgccctgctggcccctggttctcgtaaaagtgccagtggaactcttacctagagattaagctctcctttacctactctgggagaatcctttccctggttatgtaaaaacgtaagccaacctgggacaatttctcagattgttcaacttcaaatcaaatcatctactttgatttgggtcccagctcttgta

SEQ ID NO: 266938 - DNA, 408 bp, Homo sapiens
aaactattccaaaataattactctattaaaattgagattaaagccaattaataaaatattttaaaagatttttatttcaagcaatgttaacagattttccctcaattatgcaacatggaaagaaaccgcccagtgatcattctaatgtaactaacttgccattttcctgggagaccaggaagtagttcagaatatgccattgtccatcagaacaatagttattaggaaaaagttcctaggtaacaatagataaaatttctaatctgctttaataaatattcatgttctaraaatgaaaaggtttgttgatcctttaatcaagaatatgtcagactagtcaatagtcattgtcaaaaagagaccttgaattacttttttatgcacaataagaatctaaataattgctcc

SEQ ID NO: 266939 - DNA, 628 bp, Homo sapiens
ataataacaatattggcaaggatgtgaaaaaaatggaatcttcacacaactggctggtgggaacgtaaaagtggcttgtgggaatgtaaattgatgttgcctctttgaaaaatagtttagcagttcctcaaaaggttaaaaatagaattaagtatgacccagcagttccttcccaaagtatatacctaaggtaactgaaaacatatatctacatataaacttatttacaaatgttcatagcagcattattcacacaatagccagaaaaagtgaaaacagtccaaatgcccactatctgatgaatgggtaaacaaaatgtagtatatccatacaatggaatattaatttagccatcaaaaggaatgaagtactgatacattctacaatatggatgaaccttgaaaaattatctcatctgaaagccactcatgaaagaccacatagtgtataattccatttatgtaaaatgtacataataggcaaatatacaaagacagaaagtagatgagagattgcctctgatgggttgagggagggaytggaagatgagaggtgaatgctagagaatttcttttaggggtgacaaaatgttagaaaattaatgtggtgatggttgtgtaactttaaa

SEQ ID NO: 266940 - DNA, 581 bp, Homo sapiens
gctttatttctccaaatgatcaaaggatcacttgggcacagtcccttggaagagaggagatttcactgggagactagctcactgattttctgcttaactgtrttatcaaaactgcaaaagggaggagacgaaaggacaggaaaacaattctttaacatatctgtcagaaattgaatgagacaaaccattccataagatcttctaattttgccaaaattatatctactgtcaactattggaatgttgaagcagtagtaacattgaaagtgctggaggaatcctcaggttgtgcttgcatttggcaagcaaatgtggtgagtgtgcagaataataaggatcctccttctccagctgggaccacaggcgtgtgccaccatgcctgactaatttttgtatttttagtagagatgaggtttcaccatgttggccaggttggtcttgaactcctgacctcaggtgatcctcccgccttggcctcccaaagtgctgagattataggcgtgagctatcgtgcctggccctgtttgtagtaatttggaaagaggcacacaatattaatcttagagaaattaaaatgtatt

SEQ ID NO: 266941 - DNA, 536 bp, Homo sapiens
ataagatgaagtactttggataaatctgcagagttaaaatctacataggttagggccctaaaacataattttaaaaagataacaatgggtaccaatgtgccatatggtatcgaggggctaattacattttcagcatcatgaagtacaaagtaaaactgtaagaagtagggagccctttgtttccaaattctgccttctaaacatattagggtaaaacctcccagtatatgaatcccaggaagcaaattgacatttgtatctttaaacaattttccaaaaccgtcattttaatgttgagatctgtccaaactctaggattaaaatcttacaactaatcatayataattaggtttttagaaagattttgaatactctattcttcctatatgaaaatatttggcacttttccccctcccccaaaaacaaagaataacaaaaattgactaggaattccttactatagttaaaatattcagaccaccatcttcaaagcatctttcaaatcccctcctatgtttgaacaaaagcattcttgg

SEQ ID NO: 266942 - DNA, 642 bp, Homo sapiens
catcaccagaatcaaccactgtcaactagtttgatgtaagagaagaaaaacattttctgttctgctaaaagtactggcaatagtttcacactatttagtaactaatctgcagcttgagaagcyagctttatttttatatttatttctcaaatatacctagataggggctgtttctatgttctgttacatttatctgtccattccaatgccagatagtactatgctgattctaaatcaggctttatagtaaacgtttttattatccttttccaaaatttcttgggattcttttacatttattcttccatataaatttctttttccaccccagaaaatccttaatcatttaaaatttactctgattagaattgtctaaaattattcattgatttggaaataactaatgtaataatgatcagttttttcatccaggaacatatgtaacttgctatttactcatgtcttttatagtttttagtaaaatgttgtattttttatgatatacatttgtttacatcttgttaaatttagtcctagatattatattttaggttgctttataaatgcctttcttttcaatgtttaaactaattattgctactataaagaaaagctatgtttttgaaacatacaaccttatta

SEQ ID NO: 266943 - DNA, 573 bp, Homo sapiens
tataatatttttttaaaaaactgcctaattccacaaaacgccctcttcaatctattgctataattatatgatgccccattaaattataccttaattagatgatgggcttttaagatgtactgaatgtacactctccttttgtaacagaaatggatacatctgttccctaaatgtagacaacaaagctttaccatcatgaacaaggagaagtttcataaaaccaatggtctgagtatttcatattactgtcagaaagaactgcagtcatggccaggtgcagtggctcatgcctgtaatctcagcactctgggaggctgaggcaggcagmtcacctgaggtcaggagttcaagaggcaggcagatcacctgaggtcaggagttcaagaccagcctggcccacgtggtgaaaccctgtctctactaaaaatacaaaaattagccaagcatggtggtggatgcctgtaatcatagctactcaggaggctgaggcaggagaatcacttgaacccgagaggtgaaagttgcagtgagccgagatcacaccattgcactccagccttggtgacagagcca

SEQ ID NO: 266944 - DNA, 568 bp, Homo sapiens
ccattcataatatatggcctcatcatcatgataactaygccaggagattgttcataatccatgatagccaatttatgcccactcacttcttaatacaaaggcagaaataacaattttccttttatgctacctgagtgatttttctctaacatagatgaccttatggattaggaaagtggttactactggaatgaactataaaacatcaatttagaaaatttgctgtggaagatatataatatgactattacttgcttggagtctgcaactgaaatttgctgctcagaagtacatgaaacattttacaagtatctctaagatgctgcttgcacatatgaagcacagaggaatagtagagtagttattgagttaatttgaaaccaaagagcacattttgcctgaaatatttaaattaatgaagcctgatatggtttggttgtgttcccacccaaatctcatcttgaattgtaggtgtcacaattcctacgtgttgtgggaggtacccgttgggaggtaattaactcacaggggcggtctttcctgtgctattatcgtgataatgagtaag

SEQ ID NO: 266945 - DNA, 558 bp, Homo sapiens
atcccagcttcttgggaggttcgagtggaagaatcgcttgagctttggaggtcaaggctgcagtgagccaagatcacaccattgcactccattctgcgtggcagactgagaccctgtctcagaaaaaaaaaaaaaaaaaaaggaaagaataaaggggaaatgggagtacacaaaggaggaggggtgagatggggtggggcgggagtgagagtgctgagtgactaaaggcaccacaaacagcttcaaatagtagtcgtaaaacaaaagtcctcaagtccaggtaataataaccagccctgaaataagatacttattttkttccatgcaaataactgggctaaatgctgtattcaaatcactgcagcaaatgtaaaaaggagagttcttcaggccaggtcttctaatgaaactatgttcttttctacctctagtgaaatcacaggatgtacagcgagtaagtcattaagtctgaaatctgtgctcctggttaaagtctgatcatttctgttctgaaatttgagctgaccttgtgagtaaaaaataattcgtgtaatgcat

SEQ ID NO: 266946 - DNA, 558 bp, Homo sapiens
atcccagcttcttgggaggttcgagtggaagaatcgcttgagctttggaggtcaaggctgcagtgagccaagatcacaccattgcactccattctgcgtggcagactgagaccctgtctcagaaaaaaaaaaaaaaaaaaaggaaagaataaaggggaaatgggagtacacaaaggaggaggggtgagatggggtggggcgggagtgagagtgctgagtgactaaaggcaccacaaacagcttcaaatagtagtcgtaaaacaaaagtcctcaagtccaggtaataataaccagccctgaaataagatacttattttgttccatgcaaataactgggctaaatgctgtattcaaatcactgcagcaaatgtaaaaaggagagttcttcaggccaggtcttctaatgaaactatgttcytttctacctctagtgaaatcacaggatgtacagcgagtaagtcattaagtctgaaatctgtgctcctggttaaagtctgatcatttctgttctgaaatttgagctgaccttgtgagtaaaaaataattcgtgtaatgcat

SEQ ID NO: 266947 - DNA, 552 bp, Homo sapiens
ctacagttatcttcacaatgcttaagccaagttgagaaggcaagaggaactacagaagtcacaggaggsaggggtttcctttaacaatctgcaaatagcactgtttctgtttagctgacttgcagggctcagagttatgcagtaatgagtagatcattctcttggcgatcaccatcaggctctgaagcaggggggtaagttatacaacataatgcatccagagaggcctaatgatgcagttaccttccaacacagatatcttcagctacagcaaagaatgcctcccatttcatgtggtttaaaatgattgctttttctccttatccttaattttgggagatcaaagcaattctatatggaaatttctcacttcagagtgttaggactcaaaatttagggacccaaagctttccaacattagccaagaaacttttggtgcaagtcatttataccttattttatgatttaaacatttacacaaatacattaaaatgagatgaatatttaaggaaatctttttaaaaatagagcaaactagcaggttgaatgttc

SEQ ID NO: 266948 - DNA, 545 bp, Homo sapiens
gtaaaagatttttattatataagtacagttgatcctcattatttacagattctgtagttgcaaagttgcctgcctgcttgctaaaatttatttgcaactcaaatmaatacccttggtgctttgtggttatgcttagagcagagtaaaatttgagttgccaaatgtccacgttcccagctgaggttgaagaaagagatgctctgtcttcttgttttagccctcatactgtaaacaagcaccctttttgaggtccatttggtgccatgttttttgtatttctgtgcttttggttggtgatttttctgtttaaaatgatcccagagtggagtgctgaagcactgtccagtgttcctaagagcaagaaggctgcgatctgccttatttctcgcattaaagttcaaagttaaagagttgacaatactgtcatattaaataaggtatcattaaatagaaacacacataaaacaaggttgggtacccatcagttgacaaaaatattgtaaccagaggcttgaaggaacctaaacctatatttcccctaggag

SEQ ID NO: 266949 - DNA, 641 bp, Homo sapiens
attgccaggtctaaagtaagtgcaaaaaatatgttaacaaatagtagttaagagtggtgcttaatttatcacacttaaagaatagtggaaacaaagtaaaggatctcagtgcgatagtattttgaatatattctaccaacttaatcagatcaattgtatgtaactagattcctctgaaattagtaaaagatttttattatataagtacagttgatcctcattatttacagattctgtagttgcaaagttgcctgcctgcttgctaaaatttatttgcaactcaaataaatacccttggtgctttgtggttatgcttagagcagrgtaaaatttgagttgccaaatgtccacgttcccagctgaggttgaagaaagagatgctctgtcttcttgttttagccctcatactgtaaacaagcaccctttttgaggtccatttggtgccatgttttttgtatttctgtgcttttggttggtgatttttctgtttaaaatgatcccagagtggagtgctgaagcactgtccagtgttcctaagagcaagaaggctgcgatctgccttatttctcgcattaaagttcaaagttaaagagttgacaatactgtcatattaaataaggtatcattaaatagaaacacac

SEQ ID NO: 266950 - DNA, 479 bp, Homo sapiens
aggggagttcccctacacacgttcccttgcctgctgccatgtaagacatgtctttgcttctttgcactctgccatgattgtgaggtttctcagctatgtggaactatgagtccattaaacctctttttctttataaattacccagtctcaagtatgtctttaattagcagtgtgagaacagactaatccactatagctccctccgatttgcaccttccaaatattagttgacatctctcatgcaatatagccttattctctattgttttrtggctttataccatttagaatattttactgtcattttagcagtgtatgcaaaggagaggtgataatgcattcaatcaatcaaaggaaatgtgtatttttgttaaaaccagacaaataagaatgctgtcagattataagaatgaatttaatttgtctctaagtggcaatcgctaacacttcttgcttctctgctttcttcacacttacgt

SEQ ID NO: 266951 - DNA, 646 bp, Homo sapiens
ctctgccatgattgtgaggtttctcagctatgtggaactatgagtccattaaacctctttttctttataaattacccagtctcaagtatgtctttaattagcagtgtgagaacagactaatccactatagctccctccgatttgcaccttccaaatattagttgacatctctcatgcaatatagccttattctctattgttttatggctttataccatttagaatattttactgtcattttagcagtgtatgcaaaggagaggtgataatgcattcaatcaatcaaaggaaatgtgtatttttgttaaaaccagacaaataagaatgctgtcagattataagaaygaatttaatttgtctctaagtggcaatcgctaacacttcttgcttctctgctttcttcacacttacgtttgggttacttctttgaccctgtcccattgtcctttctttcttcaatgttttaatttacatctattattttacagagtatcaaagttagctggctgcctcctccatcaggaacacaaaatggatttattaccggctataaaattcgacacagaaagacgacccgcaggggtgagatggaaacactggagccaaacaacctctggtacctattcacaggtcagtgttcacatgg

SEQ ID NO: 266952 - DNA, 646 bp, Homo sapiens
ctctgccatgattgtgaggtttctcagctatgtggaactatgagtccattaaacctctttttctttataaattacccagtctcaagtatgtctttaattagcagtgtgagaacagactaatccactatagctccctccgatttgcaccttccaaatattagttgacatctctcatgcaatatagccttattctctattgttttatggctttataccatttagaatattttactgtcattttagcagtgtatgcaaaggagaggtgataatgcattcaatcaatcaaaggaaatgtgtatttttgttaaaaccagacaaataagaatgctgtcagattataagaatgaatttaatttgtctctaagtggcaatcgctaacacttcttgcttctctgctttcttcacacttacgtttgggttacttctttgaccctgtcccattgtcctttctttcttcaatgttttaatttacayctattattttacagagtatcaaagttagctggctgcctcctccatcaggaacacaaaatggatttattaccggctataaaattcgacacagaaagacgacccgcaggggtgagatggaaacactggagccaaacaacctctggtacctattcacaggtcagtgttcacatgg

SEQ ID NO: 266953 - DNA, 493 bp, Homo sapiens
cattgtcctttctttcttcaatgttttaatttacatctattattttacagagtatcaaagttagctggctgcctcctccatcaggaacacaaaatggatttattaccggctataaaattcgacacagaaagacgacccgcaggggtgagatggaaacactggagccaaacaacctctggtacctattcacaggtcagtgttcacrtggtgtagtcttgcaaggttttgatgaattaaatgctttaggaataaaatatagtctcactccaaaggaacattgattttcttcctggcatccaggcaggtgacatctattggctggaacaagaacaacctttatatttttaactttacattctctataatgttttcactatatatttctctctggatcatcgtcttaatacatgtatcataaaatttttattcatactagtttctcagcattgctgattcaacaaaagcatctgttatctaaaaacttaacatttta

SEQ ID NO: 266954 - DNA, 542 bp, Homo sapiens
ttggcatttttccatgataagttgatttctggaactatatgccatgtaagcatctttacatttttcattccccaataatattgaaaggtcaaggaaayaggtcaaacttgattagggtaagattcagaaaactaacagggaaacagaaaataaaaatggtctccaaattctcaagacattattctctatagcagagaaaacctcttttgctgtcaatcatcacatttgtttaaggcttgataatgatcagtccacattttgtaggttttctttatacatggagtgtttctccaatgcatagtacacttttatgatagaaactcatcacctagaaattatttatgacatgcaaaaaagtttaccttttctcctctaatgtcttagaggctgtcacctctattagtaatattgagccaggttatagctaagaaagcttagtgctgtaatactgaaccaggttacagctaagagagcttagtgctgatgaggccaaggacctggttctcattagctagcatttgggaagaaaagaacacattatt

SEQ ID NO: 266955 - DNA, 542 bp, Homo sapiens
ttggcatttttccatgataagttgatttctggaactatatgccatgtaagcatctttacatttttcattccccaataatattgaaaggtcaaggaaacaggtcaaacttgattagggtaagattcagaaaactaacagggaaacrgaaaataaaaatggtctccaaattctcaagacattattctctatagcagagaaaacctcttttgctgtcaatcatcacatttgtttaaggcttgataatgatcagtccacattttgtaggttttctttatacatggagtgtttctccaatgcatagtacacttttatgatagaaactcatcacctagaaattatttatgacatgcaaaaaagtttaccttttctcctctaatgtcttagaggctgtcacctctattagtaatattgagccaggttatagctaagaaagcttagtgctgtaatactgaaccaggttacagctaagagagcttagtgctgatgaggccaaggacctggttctcattagctagcatttgggaagaaaagaacacattatt

SEQ ID NO: 266956 - DNA, 542 bp, Homo sapiens
ttggcatttttccatgataagttgatttctggaactatatgccatgtaagcatctttacatttttcattccccaataatattgaaaggtcaaggaaacaggtcaaacttgattagggtaagattcagaaaactaacagggaaacagaaaataaaaatggtctccaaattctcaagacattattctctatagcagagaaaacctcttttgctgtcaatcatcacatttgtttaaggcttgataatgatcagtccacattttgtaggttttctttatacatggagtgtttctccaatgcatagtacacttttatgatagaaactcatcacctagaaattatttatgacatgcaaaaaagtttaccttttctcctctaatgtcttasaggctgtcacctctattagtaatattgagccaggttatagctaagaaagcttagtgctgtaatactgaaccaggttacagctaagagagcttagtgctgatgaggccaaggacctggttctcattagctagcatttgggaagaaaagaacacattatt

SEQ ID NO: 266957 - DNA, 577 bp, Homo sapiens
agtgttggagagaatgtggagcaactgggatacttacatattgctggtgggaatgtaaaatggtttaagccatttggaaacagtttggaagtttcttataaagttaaacgtaccctaccaatgaattccactcctaggaattactaaagatatataaaaatatatctttgtacaaaygcctttttccacttagagataattctacaaaagtcaaagctgtagtggcagagatcagctcagtgcttgccagaggctgggaatggggtgaatgtgggatgagattaactacttggtacatgagagaatttttagatgtgatgatgaaaagcaaagtgataaaccggggaaatatttgcacaataaatatgcaatacagtgttattatctgtaataaataaagcacttctgtaaatcaaagagcaaaatagaaacaatccaattgaaaaatcaatggatttatgaataagatttcacagaacatatagaagtgatagaattgggtcaaagaagctcagtgttcaaaatctgatatcaggaaaaattctctaaccaaagcaaaccatcagaatcctcaatc

SEQ ID NO: 266958 - DNA, 577 bp, Homo sapiens
agtgttggagagaatgtggagcaactgggatacttacatattgctggtgggaatgtaaaatggtttaagccatttggaaacagtttggaagtttcttataaagttaaacgtaccctaccaatgaattccactcctaggaattactaaagatatataaaaatatatctttgtacaaacgcctttttccacttagagataattctacaaaagtcaaagctrtagtggcagagatcagctcagtgcttgccagaggctgggaatggggtgaatgtgggatgagattaactacttggtacatgagagaatttttagatgtgatgatgaaaagcaaagtgataaaccggggaaatatttgcacaataaatatgcaatacagtgttattatctgtaataaataaagcacttctgtaaatcaaagagcaaaatagaaacaatccaattgaaaaatcaatggatttatgaataagatttcacagaacatatagaagtgatagaattgggtcaaagaagctcagtgttcaaaatctgatatcaggaaaaattctctaaccaaagcaaaccatcagaatcctcaatc

SEQ ID NO: 266959 - DNA, 581 bp, Homo sapiens
ctggagagtatgttaatatttatggttactaagcctaggagattttggttcagcaggcctggaggcatccaggaatctgaatttttgaacaagtattctagaaaattatggggcacactttagcaaacagtgcattaaaggatatgccttttttcttaattaaaaatgccatttccctttctttcaatttcttaatttttgaaaaaaattattgagtgtcctttatgttcaagaaatgcaaagataattcacatgtggtttttattatatagtaggggaaaaatgtcttaataataataataaagagtataaaaggatgccagccttataagaagttcggatagagtactggagtgtttgggggaaaagtgccaattgctgaatagtggatatcctggaaatcktcaaagacaaagtaaatatggacatctggagatgatataaaaggaaatttcaggaaaaggtaacaatattagcagaaacactgaggaggaaagtgcgggttgtggagaatgtgagcattcctgtgatggcactagggggcaactggaatgagatgcgtagcttggtagagtggccag

SEQ ID NO: 266960 - DNA, 462 bp, Homo sapiens
tggtagagtggccagagctggagactgtgcagacatatcttgtttttctttgagatggagtttcattctcactgcccaggctggagtgcaatggcgcgatcttggctccctgcaacctctgcctcccgggttcaaggattctccagcctcagcctcccaattagctgcgattacaagtatgtgccaccaygcctggctaattttttgtatttttagtagagacagggtttcaccatgtgggccaggctggtcttgaactcctggcctcaagtgatctgcccgcctcagcctcccaaagtgctgggattacaggcatgagccactgcgcctggccatgtgcagacatatctttagttgggtgagattcccaagagaaggtgtaaagacagaggaaaagaaaactgaaatatcaatgccatgtaacttacttaaggcttataatagagaattcagtgaaatcat

SEQ ID NO: 266961 - DNA, 519 bp, Homo sapiens
ttataatagagaattcagtgaaatcatgtttggatagtaaayattttttgttaattatatatgatttcagtgagtactgtgatactaatatgtaaatttatttctgtctgctccatgatattaacttctattatttgagatgaacaaaataaaactcttgaatgggaagagaaagaccaatatcagagctattaaaatgaaaatcaaaccctgtccacttaaagtatttctaaaatataaattcatagaagtgatcagatatttatatgcattatgtccatgtcacttatatagtatagtaagtacatactatagtgacatggacagtaataaatataaataaagtaaatgtaagtgacatagacagtaataaatataaataaggtaaattctagaaaatcacaaaaatattatgtagtattctctttccctagaaaccaaaccaaccaaaccagaccaagcctgaaacccctaagggttaaataatttcactaaagaaaacaaaagcaaggtaagctg

SEQ ID NO: 266962 - DNA, 617 bp, Homo sapiens
acataattataaaaattcagaatgtttgccccagtatcagctgatataccattagtactgtatgtagtatattttgcaaaatactcatttagctctttctctgtcattttgcctatgaggacgttgagacccagacaggttaagtgacttgcccattactacagggctttttgtggccagatggaaactagaccagaatgtggctttataaccctgtgtactataccattcttcataagactgatgaagccaaaggtcatcatggcttcatccctcctagtgttcacgattccaacttaacttagtttctcaaccagatcagagaagacaatggaaattcagtttcagaaaaaaagagatgatgtgctsgtgtaaggattgccttcaaggaacaaatatctataactaaagtgaaatattaataaatgcacacacaattatctgagaaacgtcattgatgctgtgtatccttatctccaaaaaaggacacatcttatttaataaaagttatcagcaatattgagatttattcccccccttaaatcactgactttaacaactgtctttcagtttttgtagactgaaattatagctttatttatactatatggtgcaga

SEQ ID NO: 266963 - DNA, 617 bp, Homo sapiens
acataattataaaaattcagaatgtttgccccagtatcagctgatataccattagtactgtatgtagtatattttgcaaaatactcatttagctctttctctgtcattttgcctatgaggacgttgagacccagacaggttaagtgacttgcccattactacagggctttttgtggccagatggaaactagaccagaatgtggctttataaccctgtgtactataccattcttcataagactgatgaagccaaaggtcatcatggcttcatccctcctagtgttcacgattccaacttaacttagtttctcaaccagatcagagaagacaatggaaattcagtttcagaaaaaaagagatgatgtgctggtgtaaggattgccttcaaggaacaaatatctataactaaagtgaaatattaataaatgcacacacaattatctgagaaacgtcattsatgctgtgtatccttatctccaaaaaaggacacatcttatttaataaaagttatcagcaatattgagatttattcccccccttaaatcactgactttaacaactgtctttcagtttttgtagactgaaattatagctttatttatactatatggtgcaga

SEQ ID NO: 266964 - DNA, 563 bp, Homo sapiens
atgctcattctgtactaatgtgctctgaacacgaggatgaacctcatcctcgtgtgcctasgtctagttaatcaagactcaagccaagtactcactacctacacagtcttttgctaagtgcagtaattgcagaaaagaaattgaaggcatgctgtgaaaagaagtaatctaattgtgaatccacgctgaagactgaaacaaaaaattagaggtgaatatgaacacgtacaaggtttcttactgccactaattggcatgatgatttttggcacttttctagaactctctgagctcagtgagataggggtagatatagtatctacatcctggggctatttgtgagggtcaaaggaaattgctgcatgggaagggattatcacacagctccatgattgtgaactattcctactgtggtatttgttaatatgagattaaaaagcaactactgtatgtatttattcggaaataatgcaaaacaaatataggttgtctgtctctgagtcctcctcttcctccagtccaattaacttgtttccacatgtttatttctcctttatttattt

SEQ ID NO: 266965 - DNA, 568 bp, Homo sapiens
atctattcctttttttttcttctatgaatgagcattgaaatttcctttctctccccagtctcttcctatgtggagagttatgtgagacatggactgtaataagtgaagaaagtcttacaaatcatttatgtacgattaaagtctaccttggttccagaaaactatatttcagaatgggtcaatgaattctgagctttctgtgagatgcagtttgtagcactgacatattttcaatgtagactaatgctgaaaagattcaaatcaagtataaggaaggttaagtagtaacattagcaataagccacatttttgtttgtaaacatagatgggaggataattaactaggaagtatgaaaacgttagtgtccagactgaattgcttcaatactaattttttctagaaaacccattaaataatttgaacattcaacataaaagcatagactttatagacatagcatggttaactgaaatttacatataactttagaagttagatgagattgytttgctaactaaacattttacaaaacatatcttcaaaattatttatcaaaagctgggtaga

SEQ ID NO: 266966 - DNA, 652 bp, Homo sapiens
aatgattacagattctgagggagtatgatatctacacacaaaaacaactttttcctttgacaaaaacatctgggatcgttctttgttaagcaattaactgagatccaggtaaacagaagaataactattgatttacccacatgaggctactgaaattcttttgggaaaaaagaattaaaattgtttgctgtataaagcaaccacaaagcttttataaaaatagcaatgatattggttgtttgagacatgtaagctaaagggagtcattttctggaagatcctattgctgaggagcagatttcagtccggttggtcagaagaacttgtccatgatcatcatgagaccaaacagcacagtctcaactgtttattaagggcttgagaatccaagcagtatctgtgggctacaaatgccmgtgtcattaattctggaaaaatatacatgattcaacaatggacaaaggcaggcttagacaaaggcacaggtcttaacgtgtgtatcactgtctgacaggacttggatgtggggtaaggagccctaaggggtggtcaaaggttaaaggtgaaaggtgaattctattctgggaaggttctgctttgtttttcctgtactggccacttccttccttgaggagctacttccttctaaaca

SEQ ID NO: 266967 - DNA, 457 bp, Homo sapiens
ccacgttagttaaccaccaagggcagaactaaaaaaattgtagaaagttggaagcttctgtaggaattttctaggcaattatggaagatgagctcttcacttaggggctcagtcatttttttctttgctaggttttcagtgagttttcctatctctaccaggaaatgacaggccagcctgaagaattcttgaagatcccagccacttaatttcaactcattagaggatgtttgatagggcagaaatgtctgttccctccttgcctcagtgccattttaaatagaaagctgataggcttgtgtaaaagtgggtgtgctgccttttaaaaaaattatacttctttttaaaagtgattcttgacagagaacaagtttcmgtgggattgctgaagtggccccaaaacactttcaaaaggcttcattctttaggcactcaaaattgtgtaatcaacacattt

SEQ ID NO: 266968 - DNA, 494 bp, Homo sapiens
taattctttattaaaaaatatatatacagtgcatgtgtaagtgtacagcccgataaatttttagggttagggttaaatgaacatacctctttaactaaaacccgcatcaagaaacaaaacattaccaaccaactctgcagacgatcccttcctgccccaccccccacctcccagtcactaccactacctcccaccaaggctcctgatttctaacagaagagattcgttctgctttcacataaatacagtcatacagtgcacactattttgcatctgtattccctcactgttatactcatgaaattcttcawattattttgcaaagttgaagcatgtctgttttcatcattctgtagcattctattgcattgctctactacaatttatttatctgttctattgttgatgggcatttgtatcattttcagtctgaagctattatagataatgctgaaatgagcatttcaatacatgtcttttggtgaacaaatcga

SEQ ID NO: 266969 - DNA, 665 bp, Homo sapiens
tttagttctctatagttcctggaattacaaaaacaatgaaaaatttcatttctgaaagtaaatagatgacatagaaaactaatgacatatcattaatatctagctttttctataaaaattgacactttttagcacaatagaaaagatataaaatacattatgaagtttcacaagacccaagaaaccccccaaaaattgttcctaaaacaaaactttgtctctcatctttcagagacagtagactcaatggctggtatatcattgtcccataatatttggttctgttctgacaatcaactataaacaattaaaattttaaaaattatgggagagttaagaaatgtaaacacttggttatattattataagaaacctatgattagatagtttagattagattcaagatggcagcagggctgtatcccttcctggaggctctaggagagaactgtctccttgctgttcccagctcctggaagccgcccaccatccttagctcacctccatcttcaaasccagcaacagccagttcttctcatattgctttactctgaccttgtcgtctatctcatttgttcacatgtaaggactcttgtgattacattgggcccacctagataatccaggacaatctccatatttgaaggtcagcagattagcaaatt

SEQ ID NO: 266970 - DNA, 665 bp, Homo sapiens
tttagttctctatagttcctggaattacaaaaacaatgaaaaatttcatttctgaaagtaaatagatgacatagaaaactaatgacatatcattaatatctagctttttctataaaaattgacactttttagcacaatagaaaagatataaaatacattatgaagtttcacaagacccaagaaaccccccaaaaattgttcctaaaacaaaactttgtctctcatctttcagagacagtagactcaatggctggtatatcattgtcccataatatttggttctgttctgacaatcaactataaacaattaaaattttaaaaattatgggagagttaagaaatgtaaacacttggttatattattataagaaacctatgattagatagtttagattagattcaagatggcagcagggctgtatcccttcctggaggctctaggagagaactgtctccttgctgttcccagctcctggaagccgcccaccatccttagctcacctccatcttcaaacccagcaacagccagttcttctcatattgctttactctgaccttgtcrtctatctcatttgttcacatgtaaggactcttgtgattacattgggcccacctagataatccaggacaatctccatatttgaaggtcagcagattagcaaatt

SEQ ID NO: 266971 - DNA, 567 bp, Homo sapiens
gaacagtatgcagccttaagaaagaaagaaatcacatcctttgcagcaacatggatgatgcagctggaggccattatcctaagccaattaatgcaggaacagaaaaccaaataccacagtccccactcataagtgggccctaaacrttgggtacatgtggacgtaaaggaaaaacagacactggggactataatagggggaagagtgaaggagggaaacaagggctgagaaatgacctattggatactatgttcactacctgggtgatgagatcgttcataccccaaacctcagcatcatgcaatatacccaggtaacaaatctgcacacgtacctcccaaatctaaaataaaatatgagatttaaaaaataaaaaatggactaattatgatttaatatttggtagatacatgggccaggtaaattagtaaaagatccaaaaattcattccaactctcaaaccattcgaaatctgtagttttatatgtagttctaattcaagcaactaaatagctttatccttaatttagtagcggaaaaaagggagcagaacaggccgggcgcggt

SEQ ID NO: 266972 - DNA, 567 bp, Homo sapiens
gaacagtatgcagccttaagaaagaaagaaatcacatcctttgcagcaacatggatgatgcagctggaggccattatcctaagccaattaatgcaggaacagaaaaccaaataccacagtccccactcataagtgggccctaaacattgggtacatgtggacgtaaaggaamaacagacactggggactataatagggggaagagtgaaggagggaaacaagggctgagaaatgacctattggatactatgttcactacctgggtgatgagatcgttcataccccaaacctcagcatcatgcaatatacccaggtaacaaatctgcacacgtacctcccaaatctaaaataaaatatgagatttaaaaaataaaaaatggactaattatgatttaatatttggtagatacatgggccaggtaaattagtaaaagatccaaaaattcattccaactctcaaaccattcgaaatctgtagttttatatgtagttctaattcaagcaactaaatagctttatccttaatttagtagcggaaaaaagggagcagaacaggccgggcgcggt

SEQ ID NO: 266973 - DNA, 567 bp, Homo sapiens
gaacagtatgcagccttaagaaagaaagaaatcacatcctttgcagcaacatggatgatgcagctggaggccattatcctaagccaattaatgcaggaacagaaaaccaaataccacagtccccactcataagtgggccctaaacattgggtacatgtggacgtaaaggaaaaacagacactggggactataatagggggaagagtgaaggagggaaacaagggctgagaaatgacctattggatactatgttcactacctgggtgatgagatcgttcataccccaaacctcagcatcatgcaatatacccaggtaacaaatctgcacacgtacctcccaaatctaaaataaaatatgagatttaaaaaataaaaaatggactaattatgatttaatatttggtagatacatgggccaggtaaattagtaaaagatccaaaaattcattccaactctcaaaccattcsaaatctgtagttttatatgtagttctaattcaagcaactaaatagctttatccttaatttagtagcggaaaaaagggagcagaacaggccgggcgcggt

SEQ ID NO: 266974 - DNA, 548 bp, Homo sapiens
ctgttcaccaaattcatgtcaacatctattttttttaactttttgattatggccattcttgcaggagtaaggcagtatcaccttgtgattttgatttacatttctctgatcattaatgatgttgagcattttttgcatatgtttgttggccatttgtatatcttcttttgagaattgtcacgtcatgttattaacccactttttgacggggttatttgtttttttttgttgttgttgttgttgttaatttgtttgaaagaaatcatagacaacacaaacaaatgaaaacacatcccatgctcatgaatgagtagaatcaatattgtgaaaataaccatactgccaaaagcaaactacaaattcaatgcaattcccatcaaaataccactaccattcttcacagaactagaaaaaaaaatcctaaaattcatatgaatccaaaaaagaccccrcatagccaaagcaagactaagcaaaaagaacaaatctggaggcatcacattacctgatttcaagctatactataaggtcatagtccccaaaacagc

SEQ ID NO: 266975 - DNA, 489 bp, Homo sapiens
cctgcaacttctaagaatgttactaacacatttactatctgcctctttcagtagggagtatctgtagatgtagaatttctggggacaagtgtatacattgtaaaattatttttgtatatgttatcaattgccttctaaaagattgacattttgctatctcaaaattaatccatgaatgtagccttttgggacgtatttttattttcataataaatattattaaatgtacactgtgtaaataatttaaaagcagtcatctcattatacttctaaatyatatttatcttactacaatgatttaaataattttcacatttttttgtgaattgcttttacatactccctttctttacttatttcaaggagtactttatgtaagaatctttacaaccatttattatatatacatatatataagtatatatgttcctagcctattatatatattttagtttagtttatgatctgctttaggataatttttttcat

SEQ ID NO: 266976 - DNA, 609 bp, Homo sapiens
agtctgctaccaatgtactcttaaaaagttctattgcactagtttttaatcattatacattattttatttcatatccttgcctgctttagctattttccatcattttcattttagccattatagtatgtgtagagaagtatctcattggtgttttaatttgcatcttgaaaattaaaaaaattgaccactttttcctatatatattgtctatttgtatatatatttttgtaaaatgtctttctaattttttgccaatattttcatttctcccatccttcttcatgttttccttagccttaggaatgtactctgagacaagtttttttttgtcagatatgtatattacaaatgttttctcccrctctatgattatagtttctggagtttttattttttttcttctttgatgaacggaagtttttaaatattaatctgtacaacgtatcatttttaatagatactgttttttgtttatttgtagtctttgcttactccaaagtcaagaatatgtatatttttgttaaaaatattatttcaatctgtctgaaattgagctttgttaatggtgtggggcagaaattaagatttattttatttacaattgatcc

SEQ ID NO: 266977 - DNA, 535 bp, Homo sapiens
tgactaccagccttacacaatttcttaacatttttactcactttgagcaacttagtgtgtactttgggatraggtcatatccttggcataaaaaatggtattggtggcagaaaattctaatgtctgtgtaacaatattaatacctgcctcaggctaaaaccttacttttataaaccaatgagagtaattggctgtgaagaataaagtgagatttagtcaagctgtcctcattcaaatactaaaactgaactgtgatctcaattttgatttatcaaatgatcttttcagtttatatcactgtttttataggtgacaattttataaaatgtgctacaggctcacagtttaatgatatacttgtagaaataaaaaaagatgaagtaaaatacatttcaagagtaataatactaatgtaatttttgaatgtgcagtactgtattattgttttatttaaatcatgaattgtagggttctctgacctgaaaatttgctatccaatatatttttaagattagagaagaaagtaaaggattat

SEQ ID NO: 266978 - DNA, 628 bp, Homo sapiens
gtttataaaatactataaaatatagcactctatatgagaaatatcttatattaaaagcaaatatctgtaatgcctaagcatatattcatttgtgagcatcatgtttcttataaaatatgctttaaagagaaacaccaaattagctaagcaacttaataacacaaattatagatacctaaactacctaaatgaaaaactattgtaatgaacatgacccaaagtatccatattgttttccaagggaaaatttccataygaagggaccataattggagagaatacataatattaacaaaatagtttgaatatctatgtttaaatatcactcaggctgcttaaatctttgaaaatctttgtctacatgaaatgcagaaattttaggtttgaaacaaaattttttaattaatccattcaagatttaaaagtatttggagtttggtttttttttttaaatcttagttaatctttgttgctataacagaataccacaggcagggtaatttataaggaaaagaaatttatatcttacagttctggaagctgagaagtcctaagtcaagggccacatctggtgaaggctttcttgttgaatcgtaacatggtggagaacatcacatggcaaaagggc

SEQ ID NO: 266979 - DNA, 482 bp, Homo sapiens
atatgcccagtaatgggattgctgggtcatttggtagttctgctttaaattccttgagaaatctccaaactgcttttcacagtggctgaactaatttacattctcaccaacactgtataatcttcccctttctctgcaaccttaccaggatctgttattttttgacttttcaataataaccattctgactggtgtgagatggtatctcattgtggttttgattttcatttatccaatgattagtgatgtggagcttttttttatatgtttgttgaccacttgtatgtcttcatttgagaaatgttcgttaaggtcttttgtctactttttaatgttttttgttgttgttgttgcttcttgaattgtttaagttcctcagatattctgaatagtagacctttgtcraatacatagtttgaaaatattttcttccattctgcatgctgtctgtgtaatctgttggtattaataatttattttgc

SEQ ID NO: 266980 - DNA, 614 bp, Homo sapiens
gaataagatgtgacataattaaactaaggagtttctacacagaaaaagaaatcaacagaataaacagaaaacctacagaatgggagaacacattcacaaactatgcatttgacatgggtctataatctagaatctgtcagaaacttaattcaacaacaaaataataacaataataaccctattaaaaatggtataaggaaggtgtccagcttcagtcttttgcatatggctagccagttatcttagcatcaattattaaattacatattttactcattacttgcttttgtcagctttgtggaagatcagatggtcrtaggtgtgcagccttatctggggccctttattctgttccattgctctatgtgcccgtttttgtaccagtaccatactgttttggttattgtagccctgtaatatagtttgaggtcaggtagcatgatgcctccagctctgttctttatgcttaggattgccttggttatttgggctcttttttgattccatatgaattttaaaatagcattttttctacttctgtgaatgcacttgatagtttaatagaaagaacactgaatctctaaattgctttgggcagtatgaatattttaatg

SEQ ID NO: 266981 - DNA, 576 bp, Homo sapiens
taacagcaattagacataggttgacattgttctataatatttactaaatatctagtaatatttctttgtctagatactttagttgtgtctcttgtcaaatccarttatctgcttacaagagaaacacctaaaactcacctggatgaagaaacattagtagaaagatatgccaagcaagtactacctagaggaaaattggtaaaactgatgcaagtgaatcccaaaactggggctaggcccaggagggtagacagccaacaaagtaaagtgaaagcaaagcaaatttattagagcaacagagcagaagaacatggctgctccatagacagagcagggttaccccataagtagagtagcactcatggattgctggctggctatatttatactaactccttcctttatggtaaataaggggtgagttattcattgatattctagaaaagaggggctaattctcagaaccaagatttccttcccatttaaaccacataaggtaagttctgggcattgccttggcatttgtaatctgtcatgggactggtaggagtgtctttagcaagctaattcattata

SEQ ID NO: 266982 - DNA, 576 bp, Homo sapiens
taacagcaattagacataggttgacattgttctataatatttactaaatatctagtaatatttctttgtctagatactttagttgtgtctcttgtcaaatccaattatctgcttacaagagaaacacctaaaactcacctggatgaagaaacattagtagaaagatatgccaagcaagtactacctagaggaaaattggtaaaactgatgcaagtgaatcccaaaactggggctaggcccaggagggtagacagccaacaaagtaaagtgaaagcaaagcaaatttattagagcaacagagcagaagaacatggctgctccatagacagagcagggttaccccataagtagagtagcactcatggattgctggctggctatatttatactaactccttcctttatggtaaataaggggtgagttattcaytgatattctagaaaagaggggctaattctcagaaccaagatttccttcccatttaaaccacataaggtaagttctgggcattgccttggcatttgtaatctgtcatgggactggtaggagtgtctttagcaagctaattcattata

SEQ ID NO: 266983 - DNA, 442 bp, Homo sapiens
tttcctttttcagtaacacaatgtgagacttttattgccattgtatatcagacatttaatacaggataccagcatatgtagctttactcaatttctgtatcttttctcccactgtagaagctatttgtgctcatggaagggaatattttttcaatccaatttattaagatatataaaacaattgttctcatttctttatgttaattaaataaaattatgtcattcatatggtttttagttcctttttcctcttataaatagaagaaaaggaaaactaatggtaaatcatccttttttgaagcttatcaaagtttttatattgaagcaagaaattatttaaaaattaaaaartaatgttaatttagaactaatttagtcattaatggttatcagtaagtcaggtggatatctgaggatttaaaattaaaatattacaaaacat

SEQ ID NO: 266984 - DNA, 584 bp, Homo sapiens
cttgaaacacatttaaaatgcaattattagttttatacaaattattagtttattttttaaaatcttttttttattatttttaaaaggtttctgagtacacagtaggtgttatgtttatggggtacataagatgttttgatacaggtgtgcaatgtgaaataagcacatcatggagaatggggtgcccatcccctcaagmatttaccctttgacttataaataaacaaattacactttttaaagttatttaataaatcatttcaaaatcttagcataatcttctatacatagcatttttgtatacaatattaaaataaattcaaattactgtcattttgtcctattgggaaaatattcaggatagattatttattctctagcattgtatttgccttcttttcagttttctgcctgtggaaaaatgaatgtttttataggaaaaaaagactgccttcaaatatttatttgtacacacataactaaagtttagaattaaatcttcattttataactttgattttcaaaagtagcattgtaaatactaataaatatcaaaatggaacattttaataagcctaaatgta

SEQ ID NO: 266985 - DNA, 584 bp, Homo sapiens
cttgaaacacatttaaaatgcaattattagttttatacaaattattagtttattttttaaaatcttttttttattatttttaaaaggtttctgagtacacagtaggtgttatgtttatggggtacataagatgttttgatacaggtgtgcaatgtgaaataagcacatcatggagaatggggtgcccatcccctcaagaatttaccctttgacttataaataaacmaattacactttttaaagttatttaataaatcatttcaaaatcttagcataatcttctatacatagcatttttgtatacaatattaaaataaattcaaattactgtcattttgtcctattgggaaaatattcaggatagattatttattctctagcattgtatttgccttcttttcagttttctgcctgtggaaaaatgaatgtttttataggaaaaaaagactgccttcaaatatttatttgtacacacataactaaagtttagaattaaatcttcattttataactttgattttcaaaagtagcattgtaaatactaataaatatcaaaatggaacattttaataagcctaaatgta

SEQ ID NO: 266986 - DNA, 674 bp, Homo sapiens
taacacatagtttctttgccttgagagtgtgtgttaagacccactcttctttacatctattcaaatcattccctgatctcctgaatcatagcttcaaccatgaccatctttcttgcccactcctcacattttgctatggtctacaatcacataagtttttgatatccaatattattcagaaaaaacaaagtcatattccctatgtaaaattaatgaattttcacatacaagatcgactgattctgcagaattcaacatataatatcacaaaaatgatggtggcatcacacgttatcatttcttgctttatggtatttttgcccacatggaattagcttaaatagaatatatagtaaacacaagagtctggaaataaaaccatcatagtatggtaaaataagagcatcctgcagtcccaaacrtttctaaggtgataaatgtgcaatgaaatacatgaacataatgttagttgctgcctgtgtttcaatcatttgaatcattgaaactatgtttaaatcattgtgataagaaaaatacaaatcaaacaagtgcttattatccttaggacttttaaaatgtaatataaaacaattatctcattttctttttgcttagtgttgttacctatctcagactgaatttgtttctttcttctgaatgatccagtttgttca

SEQ ID NO: 266987 - DNA, 585 bp, Homo sapiens
agttctttttgagtgtagtgcacctcctcataggtcacatgttcagcctcacctctaggggcctgccacagctttaatctggttataggtctagaagcaaacaggggtgttgggggtggctcttgaagagaatcaacatgacttgcctggcaactttctcaagggaggccatcactgttgcctcaggaagcaaaaggtttatctcctcagacaaaggaggaaaggctgatggcagcatggttcagggaggagatgcctccactattggggatagggaagctgtttcttctggcaaaaaaatgttcatcagagtttacaaactcagtgtccccagcttcatcaggttcctcccacacatccctattacaaggtgcagggtctcattcttctccaatcagtgccctcattttaatagtagacacctggcaaggctgtgcatgtaccttttgttgcaggtcagccactcacacgataagagmttgtgtctgtttttccacaattttagctctttcgcttcagtagataagactctcattaaccttagcagatttgaggctcagtatctgcttctgaagccaggagtta

SEQ ID NO: 266988 - DNA, 583 bp, Homo sapiens
ggcatggtttgaatcaatagtggtcaccttgatgtattatattaggaacgcattttgaaatgtgtagataaatgacaggagccatttattaagtcacgtgctgtttgtcatatttaataacattataaatttattaagctgtatacgataaacaacagtttgagatttttatgacttatcccatcttttactaagaattgattttaatgggatttatgagtaaaaattaaaagccagaatttttggtgttctaccaggcatattcccaaaaaccttcattttatttagtcttcgtagcactgtttcrtttacagagaagctcaaataaattcttaaacccccaatggtttcttcctttatgattaatgtttagttatttttgaagattttccccatccactagtttgaaagctgtacttacatgtggcttgctttctgacacatttgtcttttcttttctctctcagtctaaacacccaggagcaaagtaccctcagaaatctttggaagttgctgaagagttcactcaacgtgttgtatgctcaagatagctaaaatcaaatatcttttatttttatcagcc

SEQ ID NO: 266989 - DNA, 541 bp, Homo sapiens
aatctctctcaggagtttcttaaacaggcctggcaactcctgggctgtggcagaaaggggctgcagcctagtgagactgcccctttaggatcagctttgaaatagaagctggcaaggttttgcagttggcacaaaaagatgcgtctcctagcagttttgtgtataggcaggatagcttggtggctgtgagagaggggctggatccaagacagggcccttccgaatccctctgtgggatggagaatgacaagcctttcacaaatgctcagataggcaagtctccctttggatccttgsgtgagtaatactaagcacaacagctagagcgactggagcccagttacagggtaacttttgtattttattttttatctctacactttttagggtacaagtggtttttggttacatggatgacttgtatagtggtgaagtctgggtttttagggtacccatcagctgaatagtgtacattgtatccaacataatttttcaactctcactttccttcccaacctttccccttttgagtctccaatgt

SEQ ID NO: 266990 - DNA, 610 bp, Homo sapiens
agtactcaacagttaatgttttcaaatcttgactcccttcgtccttctcccctctagtagtacttctagtagcctagtgtctcttattgccatctttatgttcaggagtacccaatgtttagatctcacttataagtgagaacatgtggtaattgcttttctgttcctgtgttaaataacttaggataatggcctccagctgcatccatgttgctgcaaaggatgtgatttcattcttatttatggttgtgtagtatctcatggtgtatawgtaccacattctctttacccagtccactgttgatgggaatattggttgattccatgtcttcgctactctgaatagtgctgcaatgaatatataagtgtctgtgtctttttggtagaacacatatttttgtttgttttttagatgcatacccagtaatgggattgctggtttgaatggtagttgtgttttaagttccttgagaaaactataaactgctttccacagtggctgaactaatttctatttccaccaacagtgtgtaagcatttctctttctctgcagccttgccaacatctgttgtttctttgacattttaacagtcattctgactggtgtga

SEQ ID NO: 266991 - DNA, 573 bp, Homo sapiens
aaattttaatgtcaaatagctcagtcagtaataacaaggaattcattgaaataaagtttgtaaatttggatggaacacattgatgatttgttcattgaactggttcataagtttttgtcatatatgggagagacctgtttcatgacctatttggagggagtggaagtggggcaggatagttaaatacttaatacattgattagggatctctagctaaatctaatactgtaattctgaaaccaacatgaatgacttgtggacactttgactgtgttaataaatgatatcaagacaaatgttgataagataaacaaggtggcttgattctaaagcttgaggacaagagagctctttatatacatatatatatatacacacayatacacacacataccatggttagcatccccttggaaacattgtgatggttaatttcacgtgtcagcttgaccggggcaatggataatcagatagctggttaaacatagtttctgaatgtgcctgtgagagtgtttccaaagacaatgaatagtacaaagaaggatggaggaattccttctctgcctgaccagc

SEQ ID NO: 266992 - DNA, 573 bp, Homo sapiens
aaattttaatgtcaaatagctcagtcagtaataacaaggaattcattgaaataaagtttgtaaatttggatggaacacattgatgatttgttcattgaactggttcataagtttttgtcatatatgggagagacctgtttcatgacctatttggagggagtggaagtggggcaggatagttaaatacttaatacattgattagggatctctagctaaatctaatactgtaattctgaaaccaacatgaatgacttgtggacactttgactgtgttaataaatgatatcaagacaaatgttgataagataaacaaggtggcttgattctaaagcttgaggacaagagagctctttatatacatatatatatatacacacacayacacacacataccatggttagcatccccttggaaacattgtgatggttaatttcacgtgtcagcttgaccggggcaatggataatcagatagctggttaaacatagtttctgaatgtgcctgtgagagtgtttccaaagacaatgaatagtacaaagaaggatggaggaattccttctctgcctgaccagc

SEQ ID NO: 266993 - DNA, 564 bp, Homo sapiens
aatttctagcaccctaattcataatagctgcacactgtgagcaactcaaatgttcatcaacagattaataaagatcaaattgttacatatcctgcaatggartactatccagaaatacaaatgagttattgatacaggcaaaaaaatgaacaaatcttaaaaacattatattgagataaaggagctaccactgagagtggtacttcagattgactggtaagaggaatgatgaaacattttgggtgatggaaatattctatattttgtgttggttggtagctatttggaggaatacagttgtcaaacctcgtgaatgtgaacacttaagttctgtgcattttacattatataaattatacctcaactaaaaattacaacaaaaagcttttcaatgctactttcaaattggtttatacaaagtgtaaaatattcatttatatgtattaaaatgttttaaggttaatcatacctctacaattttggtcataaagtaattcttctctgaaaatgtaaaactgttatgttagaaaatattttttaattagcatgtctgctttaaacaaa

SEQ ID NO: 266994 - DNA, 591 bp, Homo sapiens
aattttgtttgccatatccctgttacaaatctcttttgatttaaaaaattaagcctgctttcagattaatgtttctattaaaaacaaaatgtgtcccttggatgtgcttcaattagataatgtagatttgattgaattttgccacagaagatcatttttctttccacagaagataataaatacatctacaacccttatctcctccragtcataaagcttggcagcagctgttggtcaaatctccttctgtttaccctcctcctctccactgcagagtaagttaatcatataatctcagtaagccttgtgctttcatggtgataattaacagtaatatttatatgatacttattctgagtctagtactaagatctttacacatattaaccaatttattcttgtaacaatcctaggcttaagtcaatattattatcagagatgctgagtgacctgcccaagtttacccagttagtaagcaatgatacaggtttccaacccagcctaattggctccagtcactgcattcttagcctctacaccatgctgtctcccttgcctggtggaaggaaagtagtgcatgtaacaaatgaa

SEQ ID NO: 266995 - DNA, 593 bp, Homo sapiens
aaggcgttttcacctgtattattcctttggtattgagagtaaatctgtgaagtaggcaaggcaggaattatcactatcttgcttataaggcaagaaaagagggaaagcaagcgaaaaacttaggtgttctgaatcaaaatccaatattcttttcatttcattatgtattattttgcctgtatagatttaagaggaaggccaaaatgaatcttattgagacaaaatatgatatagtgagggaagaagtaccatgtaaagtatgaattgsaagactttggtttgagatctcgttctgcctcttactgattgaatggatttgggaaaattaaaatcttttgaaatctgttctctacccataaagcaaggctctcctaagtctttgctgcactaaatttaatgattatcaatggcaatgtgaaacagggtagatgaaaatcaaactttttacccaatggtttcaatctgctttaattctattggttccttcagtattcttttaatagagctgctaacaggaagcaaaattacatggagctccttcatctctcttttcctcttttccaatattcagatgctagtgctaataagcagaa

SEQ ID NO: 266996 - DNA, 397 bp, Homo sapiens
agaggggcagtttaaggtggttggtgtcaggggtttggttgatatcgatggtggagccagtctttccaaaggtctggtttatttaacccctaggaaaaaatgcctaatggcagttagcgagggaggaggtataatgaggcttgtctgacctcccatcccatcatggccaggaactcrtattctgaggtttctctgcagttcctcttgaccaagagggtgtcccttcagtccattagggagcttaaaattttatttttatttttcattcagtttcaggcttgctccaaggaggcagggggaaaagttgatgattacttaactctgccccaatcactgtctattgtcattgcctgagaaacacaatggaaagatttgggtagatgaaatggttcaagca

SEQ ID NO: 266997 - DNA, 593 bp, Homo sapiens
aaggcgttttcacctgtattattcctttggtattgagagtaaatctgtgaagtaggcaaggcaggaattatcactatcttgcttataaggcaagaaaagagggaaagcaagcgaaaaacttaggtgttctgaatcaaaatccaatattcttttcatttcattatgtattattttgcctgtatagatttaagaggaaggccaaaatgaatcttattgagacaaaatatgatatagtgagggaagaagtaccatgtaaagtatgaattggaagactttggtttgagatctcgttctgcctcttactgattgaatggatttgggaaaattaaaatcttttgaaatctgttctctacccataaagcaaggctctcctaagtctttgctgcactaaatttaatgattatcaatggcaatgtgaaacagggtagatgaaaatcaaactttttacccaatggtttcaatctgctttaattctattgkttccttcagtattcttttaatagagctgctaacaggaagcaaaattacatggagctccttcatctctcttttcctcttttccaatattcagatgctagtgctaataagcagaa

SEQ ID NO: 266998 - DNA, 551 bp, Homo sapiens
acctgtgaaattcaaatctgcattttaccagaatcttcagtgatcttcgtgcaaagtttgaagagtgctgctcaaagccacatctgaataaagaaaagactttaagagccaataccagcagagttccacccatgatttttcactgcttatatatgaacaactatacttattttaatacatgtgcaggatcaaacaaatcctttctgtcaagggcttatagtaaatattttaagttttgcagctacacagtctctgatgaaactttaactctgctgttatagtacagaagcagccacagacaataactaaaaaaatgggtatggctatgttacaataaaactgtatttatgtacactgaattttaaattttacataattttcatatgacgcaaaatatacwtctgatttctgctcacccttgtaaaaatgtaaaaattattctcagctcatgggctatacaaaagcagatgatgggtcagatgtggcctgtggaccgtagtttgcaaactcctaaaacatattgagatgtgtttaatttttattctgtgttg

SEQ ID NO: 266999 - DNA, 570 bp, Homo sapiens
tgcctgtcaacctgaagagtaaacctctctagccctttgaaggcttctcctctgaataccacaatagttagaggtttttcttctcaactgctctcaaaggcatcatcatctactgtgcccatgctgcctggtcattgggaagaatgctaatgactttctggccataagccctttaactattgaattgaagagtcaaaatttggaaatcccatgctagatttttccaacatattttcaagagaaggaaaagagaaacagtatggatggaatatgtaagatagctttctggagtgataagtcctttgtgtcttttttcagtttaagagaacattattcagataaatgtgatgtgacttattaatgcaaaatttacccaactcagattggcagcaataaaagacaagctatgccattgttttrcttgttgttattgttttaatctagaggaacagtttctattctgaattttaaaattggttgaaatttcaactgacatatagaaaaatatacataacttgcagtctgttcatctatacagaacatcgaagtgaatgacaatgaggtgaggat

SEQ ID NO: 267000 - DNA, 553 bp, Homo sapiens
tttatagactacacagcacttagaacagtgtgtggtacattttaagcacaaatgttagcttttattatgttaggaaaaaagaaagccaaattttatgctaagccatattgcttacatcttgtttttctacaaagctttggagtttacaaagattgttcacatatttaaatcatttgatagccaatacaggcatatgatttagatataatcataacaattttacattaaaaaaacaacccaaccaattgggaagcaggatatcttgcattaaattgaattttaatttaatggaaagcctgatgctagagacctgggctcgaaaaatagctttgaaaactcttagagactttggaaaagtcacttaacttctctgaccctggcttatttatctataaaatggtgatacattcattgtaacrttgttataagttttgttctactactcaatcaatatttatggtgtgcctcctatgtaccaggcactgtgctaagaaccagacatactggcacagcattacaaatgcctggtatttcaacaaatcaataaatatgc

SEQ ID NO: 267001 - DNA, 563 bp, Homo sapiens
ttttgttctactactcaatcaatatttatggtgtgcctcctatgtaccaggcactgtgctaagaaccagacatactggcacagcattacaaatgcctggtatttcaacaaatcaataaatatgcactgttttcattgcttttatcatcagctgctattctcccagggagaggccagsaaaatcaggtcttgaatcagagcttgctctttgtaataatttaatgaaatttcctaaaattctcctgatgggtaaatggtcagcagtgtcttagggaggcaatagtctgcctgtagacagacggcttgaccactgaagatttcagtgggaattgacttcaaacatgcattagttttgcttttttgtttttattttaaattaacattattgaggtttaatttacatacaacaaaatgcacccatctaaagcgtagtttgatgcattttcacaagcgggtacatctctgtaatcactctcacagtcaagatataaaattttttatcacctcaaaaagtttccttatgcccctttgcagtcaatagccccaaccctgttttgagacaac

SEQ ID NO: 267002 - DNA, 545 bp, Homo sapiens
tttgacgaattaacagaaggaggcttcagaaggtggktaatcacaaactcctctgagctaaaggagcatattctaacccaatgcaaggaagctaagaaccttgaaaaaagttagaggaattgctaactagaataactttagagaagaatataaatgacctgatggagctgaaaaacacagcaggagaacttcatgaagcatgcacaagtatcaatagccaaatcaatcaagtgaaagaaaggatatcagagtttgaagatcaacttaatgaaataaagtgtgaagatgtgattagagaaaaaagaatgaaaaggagtgaacaaatcctccaagaaatatgggactatgtgaaaagatcaaatctatgtttgattggtgtacctgaaagtgacggggagaatggaaccaagttggaaaacactcttcaggatattatccgggaaaacttccccaacctagcaaaacaggccaacattccaattcaggaaatacagtgaacaatacaaacagcaacttcatcaagaagagcaaccctaagacccata

SEQ ID NO: 267003 - DNA, 564 bp, Homo sapiens
gttatgaggaataaatgagattgtggctatgaaatggtaggcacaktgcctggaataaactggttaacttccattaactgttattattattattattattattattattattattattctccatcccatggtggtgataggacaatcacacatgtcaatttagcccttgataacagattcttgatcgtactctcaacttctcctttcttgatgatctaaaaaggcttttacaaagacatcaatttctgagtatagccaaataatatataaacctaccataagtgattatgtattcttaagcatttctctggttgggcagattcttttattattttttaaattattctacccatccctcatgaaaatagcattaagtttcctgacccaaaacatcttaaatcccaatgaatgattttcaaagtatcatttgctctttttctttcattattattcagcctacaaacagtgtttccatttcataaaaacatggcagcacaagaatcaaacacaaattatggtgcaaaattagtcaataaacttttattatattagttcttaatgctg

SEQ ID NO: 267004 - DNA, 564 bp, Homo sapiens
gttatgaggaataaatgagattgtggctatgaaatggtaggcacagtgcctggaataaactggttaacttccattaactgttattattattattattattattattattattattattctccatcccatggtggtgataggacaatcacacatgtcaatttagcccttgataacagattcttgatcgtactctcaacttctcctttsttgatgatctaaaaaggcttttacaaagacatcaatttctgagtatagccaaataatatataaacctaccataagtgattatgtattcttaagcatttctctggttgggcagattcttttattattttttaaattattctacccatccctcatgaaaatagcattaagtttcctgacccaaaacatcttaaatcccaatgaatgattttcaaagtatcatttgctctttttctttcattattattcagcctacaaacagtgtttccatttcataaaaacatggcagcacaagaatcaaacacaaattatggtgcaaaattagtcaataaacttttattatattagttcttaatgctg

SEQ ID NO: 267005 - DNA, 627 bp, Homo sapiens
gattctattatcttcacgactttactgggaaggaatccgagccgcagagaggtaaataaatgtacccgaggtttctggctagcctgggagtttaagaattctggctccagagcccatttgcttcacctatatactacactaggtgaatgaccaatctaaaaattaacttcagatgctccaaattctaaagcagcccattgagttttaataaaatgacacagaaccttaaatctctaatttggcttgaacttctgattcacatggagaytattcttttaaaattagcctaaatggagcacctttcatggcttaaaacataggattcttcaaaaatgtaaatttaccaaaagtctgattgaagtgaaactattgactctcatccggcaatatcaccctggttctcacctagtaacaataatcctcacaatacttagtggaatatcttcataattcacagcttatcttctccctgcctgatctcagtcacccccaactgccttcagcataacctcaactcagagctaaaacagtgaaaacatcaagaacataaatggaaaaagggacagaaaatttaatatgcacatattttaatgtgggactcatatgtgcttatgtagagatttactt

SEQ ID NO: 267006 - DNA, 559 bp, Homo sapiens
tggcttgaacttctgattcacatggagattattcttttaaaattagcctaaatggagcacctttcatggcttaaaacataggattcttcaaaaatgtaaatttaccaaaagtctgattgaagtgaaactattgactctcatccggcaatatcaccctggttctcacctagtaacaataatcctcacaatacttagtggaatatcttcataattcacagcttatcttctccctgcctgatctcagtcacccccaactgccttcagcataacctcaactcagagctaaaacagtgaaaacatcaagaacataaatggaaaaagggacagaaaatttaatatgcacatattttaatgtgggactcatatgtgcttatgtagagatttacttggtaggttaatgacaaatatgtatttccttccckttctagtcctttcctcctagaaattatgaaaagaaccatctgagttgtccattcagtatttctcactgtcctacatatttcagttcgatggatttacaatagctcaaggatctttcagcgtatatattcaatagaaa

SEQ ID NO: 267007 - DNA, 607 bp, Homo sapiens
ttaatgacaaatatgtatttccttccctttctagtcctttcctcctagaaattatgaaaagaaccatctgagttgtccattcagtatttctcactgtcctacatatttcagttcgatggatttacaatagctcaaggatctttcagcgtatatattcaatagaaaaacttactattggacacacaccctaatttgtaagctttagtaattgctgcggctatgtgagcaaaacaacttcagaacaataggatataaaagccctgaatgttgtgttcatttcttctacatcaattacagctggactataaacctcttctgagaggaagcyatgtccatttaatcaagctttgcatactaccctgcatgagtccagagacacacctgatattagttgctgcaatgctacagatatagttcccttatcaactctgacatcctctggtgtcagatattttggcagcaggtagaaaaatagaggggaccgactaatggattctatttaaggacatttgatgaaaatgttgactggcccatgaccgattttattcttagcgcttaaatgttagtcaatttgaatgttaattagccataatgacaaggagtgtct

SEQ ID NO: 267008 - DNA, 561 bp, Homo sapiens
attttggacaaaaggggaatttaagagttaataactatgcaatgaagcatcaactttacccaaagataagtctggcctttgcctttggctacatagaggagaccccctgtgcccctagaatgttctacctgattggagtatatttgtttggktgctttggcaccaggactgtctaacaatgtgacttaagatgagagcttgagccatgctctagccctagccgttccaagctctggaggaactggagactaaaggtattagcccagcctctgcaaggagagagactgcaggtcagccacataggcagtatgcaatcaagccccaatgcaaactccatacaaggactggatgagcttccctggttgggaatactttacacctgttatcacacatcatggcagtgaggaagtaatgccaaccaggattccacaggaagaaaaggagcagaatctctgcatttcaactcctcctggactctgtcctatgcatctctttctttgcctagctctaatttgaattctttccctgtaataaattatcactgagtgtaataactttcag

SEQ ID NO: 267009 - DNA, 561 bp, Homo sapiens
attttggacaaaaggggaatttaagagttaataactatgcaatgaagcatcaactttacccaaagataagtctggcctttgcctttggctacatagaggagaccccctgtgcccctagaatgttctacctgattggagtatatttgtttggttgctttggcaccaggactgtctaacaatgtgacttaagatgagagcttgagccatgctctagccctagccgttccaagctctggaggaactggagactaaaggtattagcccagcctctgcaaggagagagactgcaggtcagccacataggcagtatgcaatcaagccccaatgcaaactccatacaaggactggatgagcttccctggttgggaatactttacacctgttatcacacatcatggcagtgaggaagtaatgccaaccaggattccacaggaagaaaaggagcagaatctctgcatttcaaytcctcctggactctgtcctatgcatctctttctttgcctagctctaatttgaattctttccctgtaataaattatcactgagtgtaataactttcag

SEQ ID NO: 267010 - DNA, 566 bp, Homo sapiens
cttttcctctgttacctttgtctttgtccaaggggctcttgaccttgttatccccacaatctccacctgaatcttcaattttctttgcctggttctctgatctggattctcactctggtgcctgctctccctggactcctggccactggcctgcctagtgtaccttctcctcagatctgctaaaagacttagatttcatctctgacacatagaactttctaaaaccctcatccaatacagccaagctcccagtcctggcctttagagcaagccttctrtgattcccatgccctccaccatgctaagccattactattctgtccctgctcatgccccagcatgtcaaggtgatttctctgcccatgagagcagagcttctaagtgttgaaagggtgccaagacttcttccgggggaaagtaattaatcacattataagaggcacacactctagaagaaaattgcacataaaaagtcagactagagaatttcaagcaaaatatcaccaaccttttcctaaggatatgttgattaaaccacaaggagttaattaggtgagggtcaatga

SEQ ID NO: 267011 - DNA, 598 bp, Homo sapiens
atattgtcttacttaatcatcactatagcccaacaaatgtaggtgttctatgcaatttctagataagaaaagttgagcacacaggcgttcagttttgagtgcagtttaaacagctggtgttacagagccaggaactcaagtctatcccacattactttgctgtagatatttaagggagttagaatgtaagaaccttracatgttcttgcagggcagattcttgtatattatttagtcccagtcattcaaatgataaggaaactgagaccaaagaggtaagtgagttatccacaattacatagctagttcaacatggaactggcataagaaattgtctagatattgaaaacacacacacacacatccatgcccaaggttatatgactagcttgtgggagagctaacttcaaatcctttgttcattttggtctatcaggtcttcccaaccttggatagagatataaatagagtcttagccccatcagctgcttggttctgaaattcatcttgctgactcagatcttcatatccagggtgcctgggagaagccatggcgcagccttgcccagatttctgctattcttgcccgggatgaatg

SEQ ID NO: 267012 - DNA, 618 bp, Homo sapiens
ctatgctactgggctttaaagaaagtgcctatgcctggccgggcgcggtggctcatgcctgtaatcccagcactttgggaggccgaggcaggcagatcacgaggtcaggagattgagaccatcctggctaacacagtgaaaccccgtctctattaaaaaataccaaaaaaaaaattagccagctgtggtggtgggtacctgtagtcccagctacttgggagggtgagacaggagaatggcatgaacctgggaggcggagcttgcaagtgagccaagatcacaccagcctgggcaacagagygagactctatctcaaaaaaacaaaaaagcaaaaaaacaacaacaaaaaagaaagtgcctatgcctaagattggttaaggggaaaagtggcactcatacgtaacgaaattcctaagggaacagtggaaatagtacaatggctaatacattttaagagatgtactcagtaaaatgagaacatttaagaaaataaaatagatttgttttctaattataaaaatgatacatgatacagccaagataataggtgtttcaaaaataagacttaatataaggaattagtacaaatctaatacaaggttcgcgcaagtggtagaa

SEQ ID NO: 267013 - DNA, 588 bp, Homo sapiens
cttctaaaatgttttactgtaggtcagataggaaggtaaagtwtgtgtactactcattgaaggtatgatttttgttgaacttgtgcgcataacaatcacttagcatttttaattccctttttctccttttagtcatcatttactgtcttgaaagaattactgaagacatactggggagccttgttttatgtctgggcattctccaacaggctaaggtttaataagcatggggtctgtggatccttccaagctggatttatgatcgtgggactcttggatcatgtgggggaatgattccctttcccatgattcgctggtccacatttggcttctgaaatgcacattccctgtatgcctatgggtgtgagttttgcagtgctcacccacaaagctagggcagaggaccaggactcctctgcaggagggagaaggagcgacaggaagaagcagcgcagaccagcaaaggcagagggcaactggctgtcacatggtcagctcccagcaggcgtttctgtctctttctttctttccctgtctctatctctgtttctcaatctctctctttctgtaactcatcaaggcattgca

SEQ ID NO: 267014 - DNA, 588 bp, Homo sapiens
cttctaaaatgttttactgtaggtcagataggaaggtaaagtatgtgtactactcattgaaggtatgatttttgttgaacttgtgcgcataacaatcacttagcatttttaattccctttttctccttttagtcatcatttactgtcttgaaagaattactgaagmcatactggggagccttgttttatgtctgggcattctccaacaggctaaggtttaataagcatggggtctgtggatccttccaagctggatttatgatcgtgggactcttggatcatgtgggggaatgattccctttcccatgattcgctggtccacatttggcttctgaaatgcacattccctgtatgcctatgggtgtgagttttgcagtgctcacccacaaagctagggcagaggaccaggactcctctgcaggagggagaaggagcgacaggaagaagcagcgcagaccagcaaaggcagagggcaactggctgtcacatggtcagctcccagcaggcgtttctgtctctttctttctttccctgtctctatctctgtttctcaatctctctctttctgtaactcatcaaggcattgca

SEQ ID NO: 267015 - DNA, 486 bp, Homo sapiens
aggagcttaaacttgcaatcatgtttaattcctgagtttcattcgtcacattttaatttagattgctttgctattttgtactgtttgaaacagagcagaattattggtggatggaaatttttgcttcatttggtttttagaaaaatttaagaattttgagacatgaagcagaggttgagtgtttggatgaaaatgtcaatctgggttctggttctaccctgtttatccatctctgtgtcaagatgctctaaggggagatgggcaaaagggtttttaatcttcctttgcattactttccttatatttaaaaatggggaaaattgttattctgattcagaaggggtctgaggaactacaatttttcctcactttctcctgccctcactgggraaaaagtaggggtggaggtctcagccattttgaatgtgaagatattctcctagacaaaaaaacaaaaaatgaacattataggaatagtttaatctc

SEQ ID NO: 267016 - DNA, 563 bp, Homo sapiens
taaatgatgcatagtgctggggctggattctgggagtgtgttcccaagggcttcctcacatacaccccattcccaccatcgcctgcatacacagaaggcrtcaggagcttgaggactccatttgccttcctcagacattgccattttgaataaatattactatttattatccccaaatttagagttattaattatatcagcataaacctaatttatgccatcataaacagtgataataaatgctgccaaattctaatacccagctcttgacaactgtgcctgtagttgatgggtttcccccactcacttcccagaagcattaaattaaaaatgattcagtgttgcagaatcattgatcaagttggggctgaggctcctcaggaaatgcacttgttttgttcaatgctttgctctttcattggccgggcagcttctgatgtctgtctgcattccaatgtttctcctttccttccctcccctcctctgatcctcctataggaggaagaaatccgtgcagggatgcagggatagagggaggtagatgagcatctattatttcattc

SEQ ID NO: 267017 - DNA, 563 bp, Homo sapiens
taaatgatgcatagtgctggggctggattctgggagtgtgttcccaagggcttcctcacatacaccccattcccaccatcgcctgcatacacagaaggcatcaggagcttgaggactccatttgccttcctcagacattgccattttgaataaatattactatttattatccccaaatttagagttattaattatatcagcataaacctaatttatgccatcataaacagtgataataaatgctgccaaattctaatacccagctcttgmcaactgtgcctgtagttgatgggtttcccccactcacttcccagaagcattaaattaaaaatgattcagtgttgcagaatcattgatcaagttggggctgaggctcctcaggaaatgcacttgttttgttcaatgctttgctctttcattggccgggcagcttctgatgtctgtctgcattccaatgtttctcctttccttccctcccctcctctgatcctcctataggaggaagaaatccgtgcagggatgcagggatagagggaggtagatgagcatctattatttcattc

SEQ ID NO: 267018 - DNA, 563 bp, Homo sapiens
taaatgatgcatagtgctggggctggattctgggagtgtgttcccaagggcttcctcacatacaccccattcccaccatcgcctgcatacacagaaggcatcaggagcttgaggactccatttgccttcctcagacattgccattttgaataaatattactatttattatccccaaatttagagttattaattatatcagcataaacctaatttatgccatcataaacagtgataataaatgctgccaaattctaatacccagctcttgacaactgtgcctgtagttgatgggtttcccccmctcacttcccagaagcattaaattaaaaatgattcagtgttgcagaatcattgatcaagttggggctgaggctcctcaggaaatgcacttgttttgttcaatgctttgctctttcattggccgggcagcttctgatgtctgtctgcattccaatgtttctcctttccttccctcccctcctctgatcctcctataggaggaagaaatccgtgcagggatgcagggatagagggaggtagatgagcatctattatttcattc

SEQ ID NO: 267019 - DNA, 563 bp, Homo sapiens
taaatgatgcatagtgctggggctggattctgggagtgtgttcccaagggcttcctcacatacaccccattcccaccatcgcctgcatacacagaaggcatcaggagcttgaggactccatttgccttcctcagacattgccattttgaataaatattactatttattatccccaaatttagagttattaattatatcagcataaacctaatttatgccatcataaacagtgataataaatgctgccaaattctaatacccagctcttgacaactgtgcctgtagttgatgggtttcccccactcacttcccagaagcattaaattaaaaatgattcagtgttgcagaatcattgatcaagttggggctgaggctcctcaggaaatgcacttgttttgttcaatgctttgctctttcattggccgggcagcttctgatgtctgtcygcattccaatgtttctcctttccttccctcccctcctctgatcctcctataggaggaagaaatccgtgcagggatgcagggatagagggaggtagatgagcatctattatttcattc

SEQ ID NO: 267020 - DNA, 570 bp, Homo sapiens
gggacatagcagggtagtgattacagcaggattttaaaattttaatttactagtgccagtctctgttactctgttcataccctgcttaggagattgtgtctaattagggattggttgttattggtctttaaagcacccactcctagctgacttatccctaggtctttaaaggagacatttggcccaaggaatcccttgaaaaatctctttgtcagcagctcaatgttggaaaatagcagcatttagcatgttaagtttcatcatcatcaaagcttgggaattgcaaataattacttggcawttttccctctgtagataacattctcttaactagtctatacagacatgcattcaccctaacatccgtggatcaccaagtcgaggacacagtacacccttttgtagaatacactggtgctgaccaatcttagagttagaccatttttctttatagccaatctaattttatccaaaagcaatttatgtcctttgtttccacagaggaagtgtggaatgtttatttttcttcattaatcatgactattatcctatttctgatagtcatctttc

SEQ ID NO: 267021 - DNA, 560 bp, Homo sapiens
agcatgttaagtttcatcatcatcaaagcttgggaattgcaaataattacttggcaattttccctctgtagataacattctcttaactagtctatacagacatgcattcaccctaacatccgtggatcaccaagtcgaggacacagtacacccttttgtagaatacactggtgctgaccaatcttagagttagaccatttttctttatagccaatctaattttatccaaaagcaatttatgtcctttgtttccacagaggaagtgtggaatgtttatttttcttcattaatcatgactattatcctatttctgatagtcatctttccaagtccttttggtatttgagttgcttctctttctttttgaacctaaatcttgtatgttcagtgtttagtcctgatacacagtgttttractataattgtcagtgtttggtttccttaaccttctccaagttgctcttgagtgtggaagcatgaggtgcagcatagtggctttcccatgcatcttagcatctttctacaacaccatccctaaacttcaagtgcatttattaatt

SEQ ID NO: 267022 - DNA, 560 bp, Homo sapiens
agcatgttaagtttcatcatcatcaaagcttgggaattgcaaataattacttggcaattttccctctgtagataacattctcttaactagtctatacagacatgcattcaccctaacatccgtggatcaccaagtcgaggacacagtacacccttttgtagaatacactggtgctgaccaatcttagagttagaccatttttctttatagccaatctaattttatccaaaagcaatttatgtcctttgtttccacagaggaagtgtggaatgtttatttttcttcattaatcatgactattatcctatttctgatagtcatctttccaagtccttttggtatttgagttgcttctctttctttttgaacctaaatcttgtatgttcagtgtttagtcctgatacacagtgttttaactataattgtcagtgtttggtttccttaaccttctccaagttgctcttgagtgtggaagsatgaggtgcagcatagtggctttcccatgcatcttagcatctttctacaacaccatccctaaacttcaagtgcatttattaatt

SEQ ID NO: 267023 - DNA, 561 bp, Homo sapiens
tttccacatctctccatgtttcttccaccaagattgtgcaagaacttgacagcttttaacagtctttaggtacctggaaacttgtcttctcattttcagaaatagaaatgtgtgtttttgttttctgttgtatgtgttctttctacatgttttccaagacaaggaaaaaaacttttatcgaaatttccagattattgaactttcttatactccttatttttttaatgttttctgttgattctcttaaagtttccaggaaaataatcctaacccctgcaaataataaagtattttcttctcttcaaaagctatatcrgttattaccgatacatttctaatttctcaaaattttctcaatactgcaaaataaaaagaatcctttaaattcatgccatgttattacaactggtagatatatgacatagtaacaaataattctgactagctctgttcaaatgtgtgggattgtatgtaaacacattcatggcatttttatagcaccttgcagcagagaaggcgttttcacctgtattattcctttggtattgagagtaaatctgt

SEQ ID NO: 267024 - DNA, 488 bp, Homo sapiens
atttttatcgctaaaataaataaataaataaataccagatggctttcaagaggaactgtttaaaacatgaaaaaaagcaatccaactaaggaaaacaaatggagatatcagtgcaatactataagataaagtcctacctttcactttatttcaattttacctcacagtttgcctctgaaaattttaaattcttcctaccttatgatgaaaattattatttcttggtacactaccacagtgtatttcttttgataaagaaaaataatcttataattttcacagacaattttggtaatcamaacatatttctataaaataagccaatcatctagggaagaataaatccaaaatctggaaaactagaagatgcagttagttttattattactattattattattgcaggaacacttaacatcagatctaccagctcttaaaaagttttaagtgtacaataccatattgttaactctaggcaagatgatgta

SEQ ID NO: 267025 - DNA, 622 bp, Homo sapiens
tattgtggtcctacaaataatctttatataacttttaaaggtttatttgcatatgaatcttttcactttcatatttttatttccttgttttaagctctcttagagatattatattgagccatcacgcttgttgaatactttacatatgctttcttttgatttagccaaactattttttctaaattattaaatagtatttaaaagtagaatagcgaaacataaatctattttgtaatcttttgctagtaatattcacaataagcaagagttcaaagacataacttgamtattcaaaatcaactttgatatttgtcattggctaaagtttcctttttatgtgagtgtttcattatatttttttacatcttgtgttgaggagagagagagagagatcaatacatagggcttctgaagcccagggatccgggcagtgccctccatgattggatctaagagtgcaattcacaagtagtggagttgcttcttggtggccccataggcagcccagagtaatgctttataataacttctctgtgcattttatcatttacggtacctggatttttttccactgtttgggtctttcttacctattgtccttcatgatcatatttaaagtggg

SEQ ID NO: 267026 - DNA, 473 bp, Homo sapiens
gatgattatatgccttgaggatggtcattttatatagtatcttgcggatgttctctgaatttcttctgttgggatgttaacctgtctagcaaggttagggatgttttactgacttatttcctcaaatatgttttccaaattgcttactattttttcttctcattcaggaacaccaataaaccatagagttggtcattttatataatcccatattcctccaagtcttgtttattttttattttttattttttaatttttctgatggagttaatttgtaagagtggtcttcaagctctgaaattcattctttttggtccagcctattgttaaagcttccagctctattttgaaaaaaatttaaggaagtgttcaatatcagaatttctatttttttggtcaaatatagctatcttgtccttcacattctgaatcacttttcttgtttctttrtgttagatttcaactttatgttg

SEQ ID NO: 267027 - DNA, 535 bp, Homo sapiens
caattcagaacacatgtgaacagcagtccttgtcagcagctatccagaaggggatgcacttacacactgcaggccagcaagacatctgagctccttgctccactgcagagaayagcaccattccaaaagacaagatcctcctcagaacaattctataacaaatagccagctggaattctaaggatctttcatatactttaagatgttatgtttgtttttaaagagattcaaagagactagcctggatacaataacaaagacagtcataggagtttctgatctctagaaaactaaatgtgtctcagggtgatgagacagcagccattcagaagcccttacatgttctagtagagatgctgtatatatatatgttcctcctcagaaatggcttttggattcagatttaattcattctttaagaaatgaaaaagtttaattacttcacttcaaattgagaatacaattaatattaaatggtcatttaaatcttactagtgaaaactttgctgcaggtctctctgctcctcacagctgc

SEQ ID NO: 267028 - DNA, 558 bp, Homo sapiens
taactgctcgttctgacagggggcgatgttttagggaaacagcagtcagagatccatcctgggcctagttaagggttcccagcagatggggccatcatcagaggatctggttgcatgattgtttggagtttgacgggttgaaggcaagaacagacaaaatgggctattagaaaacacgtatcaaaataaaacaaggggaagggtaaggaaatctcaaaaattccaaggcctttcaccagtttgcacaggaaggccaaaagcttgattggtaagaaactctacccttttgccggcatgttgggaatatgggttccmttcccatgagcccaatcataagtcaaccattttaaggtttgaataattaactctttccaatttggaggatgcatctgagaggagtgtcctgtagtacagagacacaattacctattagggaagagagaaccgaagaagagagaagaaaaaagaaagccttttttaaaggatttccaggggttcaggatgcatttgaaaggggtacaggctgaagatgattggctacccatctataaagatggg

SEQ ID NO: 267029 - DNA, 558 bp, Homo sapiens
taactgctcgttctgacagggggcgatgttttagggaaacagcagtcagagatccatcctgggcctagttaagggttcccagcagatggggccatcatcagaggatctggttgcatgattgtttggagtttgacgggttgaaggcaagaacagacaaaatgggctattagaaaacacgtatcaaaataaaacaaggggaagggtaaggaaatctcaaaaattccaaggcctttcaccagtttgcacaggaaggccaaaagcttgattggtaagaaactctacccttttgccggcatgttgggaatatgggttccattcccmtgagcccaatcataagtcaaccattttaaggtttgaataattaactctttccaatttggaggatgcatctgagaggagtgtcctgtagtacagagacacaattacctattagggaagagagaaccgaagaagagagaagaaaaaagaaagccttttttaaaggatttccaggggttcaggatgcatttgaaaggggtacaggctgaagatgattggctacccatctataaagatggg

SEQ ID NO: 267030 - DNA, 558 bp, Homo sapiens
taactgctcgttctgacagggggcgatgttttagggaaacagcagtcagagatccatcctgggcctagttaagggttcccagcagatggggccatcatcagaggatctggttgcatgattgtttggagtttgacgggttgaaggcaagaacagacaaaatgggctattagaaaacacgtatcaaaataaaacaaggggaagggtaaggaaatctcaaaaattccaaggcctttcaccagtttgcacaggaaggccaaaagcttgattggtaagaaactctacccttttgccggcatgttgggaatatgggttccattcccatgagcccaatcmtaagtcaaccattttaaggtttgaataattaactctttccaatttggaggatgcatctgagaggagtgtcctgtagtacagagacacaattacctattagggaagagagaaccgaagaagagagaagaaaaaagaaagccttttttaaaggatttccaggggttcaggatgcatttgaaaggggtacaggctgaagatgattggctacccatctataaagatggg

SEQ ID NO: 267031 - DNA, 558 bp, Homo sapiens
taactgctcgttctgacagggggcgatgttttagggaaacagcagtcagagatccatcctgggcctagttaagggttcccagcagatggggccatcatcagaggatctggttgcatgattgtttggagtttgacgggttgaaggcaagaacagacaaaatgggctattagaaaacacgtatcaaaataaaacaaggggaagggtaaggaaatctcaaaaattccaaggcctttcaccagtttgcacaggaaggccaaaagcttgattggtaagaaactctacccttttgccggcatgttgggaatatgggttccattcccatgagcccaatcataagtcaaccattttaaggtttgaataattaactctttccaatttggaggatgcatctgagaggagtgtcctgtagtacagagacacaattacctattagggaagagagaaccgaagaagagagaagaaaaaagaaagccttttttaaaggakttccaggggttcaggatgcatttgaaaggggtacaggctgaagatgattggctacccatctataaagatggg

SEQ ID NO: 267032 - DNA, 605 bp, Homo sapiens
agtcagctgggctgcccctaacagcagtcttataagggttctaggcccatgttctactctacagtacccctctttatgacagaacaacacggaaagacaaagacaaaaacaacaacaagctatttctgcaaggaaaggggtcaaacaatatgaatattcacatcacaaagtaccagaagcatattagggtctctatactctaagactagtcacataaatccttttttcccattatttataaccttgaagcaaaagagtgatttttattatgtaatcaacattattgcacagagatttgagmctggcagcctaactggtaagaagttcttatgccttttcttggttgtcagtttcctggttgctcttcactgtggtttagagaaaagcagagtggctttggggatcccgctcactttgccaaaactgtgggtcagggctcttggctctctaagcgtttgctgaaaatcactgacatgaggcagactgactaacaggagaaaaggcatacaaatatatttaatatatatatacgagagccttcagaatgaagacccaacttcccagtgagttacaggagcttatatactaccttgaggttactgaaa

SEQ ID NO: 267033 - DNA, 511 bp, Homo sapiens
tatgccttttcttggttgtcagtttcctggttgctcttcactgtggtttagagaaaagcagagtggctttggggatcccgctcactttgccaaaactgtgggtcagggctcttggctctctaagcgtttgctgaaaatcactgacatgaggcagactgactaacaggagaaaaggcatacaaatatatttaatatatatatacgagagccttcagaatgaagacccaacttcccrgtgagttacaggagcttatatactaccttgaggttactgaaataatggggacttggttcctggtaaaatagggagggggagaagaggacttctattgagaggcaacacatgactgctggggagaatgactggaacagggaacttgtaaatagtctctttggaatttacataatgcattatttatataatttaaacaatgagaaggtaattatcttaaaaaaattatctgttgaggtgtggttacatttttggtcttacatggagaataagaaaact

SEQ ID NO: 267034 - DNA, 511 bp, Homo sapiens
tatgccttttcttggttgtcagtttcctggttgctcttcactgtggtttagagaaaagcagagtggctttggggatcccgctcactttgccaaaactgtgggtcagggctcttggctctctaagcgtttgctgaaaatcactgacatgaggcagactgactaacaggagaaaaggcatacaaatatatttaatatatatatacgagagccttcagaatgaagacccaacttcccagtgagttacaggagcttatatactaccttgaggttactgaaataatggggacttggttcctggtaaaatagggagggggagaagaggacttctattgagaggcaacacatgactgctggggagaatgactggaacagggaacttgtaaatagtctctttggaatttacataatgcattatttatataattkaaacaatgagaaggtaattatcttaaaaaaattatctgttgaggtgtggttacatttttggtcttacatggagaataagaaaact

SEQ ID NO: 267035 - DNA, 553 bp, Homo sapiens
ggtttgctaaatagactttagtcttataattgacctgattatgtgcataaagtgcagcaagaatacttatttttacataggccttttggattggctttgatggaactctgttccccaaggaatctcagataaaaccttttaaatccaagcccacccatggttttatcctcaaacacctatgagttgggtgatcctttcctcttaaggtcccaagataaacttggagctcctggacctgttagaaagtgacattctttactgaacacaggttaggaaccctgtacagggactgcatagacaagggtatgacgccaacctccccacagggcttttatcagctctgcaagtcaagatcgactcyttaaagggaagcatacgcttgcagtcaaagccttggtaaaatacctagtttttccaattgtgtcctgttgcaaaagaaaaaaatgaattcttattgcactgatgcaaacaactgtattgccataagttaagaatacccacagatagtttccaaactctagaggaaccaagcagagagaaataatcttgctcc

SEQ ID NO: 267036 - DNA, 492 bp, Homo sapiens
acatcagtcacataccatatttgggtaatgtggccaacttcaccaggtaattatttctaaaaataaatttgtgcatgtttgttgcatgtgtatgttgcataatggtgaggattaggcttctagtgaactcatcaaccaaatactgaacattgtattcaataggtaatttttcaacttttctcaccctctctccttttggattacccagtgtctattatttccatctttatgttcatgtgaagtcactgttcagctctcacttagaagtgagaacatgcaatatttcattttctgtttctggtttagtacacctacaataatggcctccagctctatccatgttgctgcaatcaaaattgtgatttgattcamttctatggtgtatatgcaccatattttctttatccaatgaaccattgatggacacttagtttggttccatgactgaatcttaaataaataaaagaaaaataaataagtagaaataaatat

SEQ ID NO: 267037 - DNA, 548 bp, Homo sapiens
tacacaattttaaagtaatgctatcacatagcaatattaaaaatattaaagtttttcctaatcaaactgcatctctcaaagtaaaatatttggttatattctcaagtatttatatgtaatttttcttctaaaatacatttatcactggcagtaattttccttcaccatatctgatctatcaaatataaaatgcagtaaaacttgaaattgtttcttgtcaaaccatggaatacacaacatttcagtgcatattgtttatttttaaaagtattcttttcacgcctgtaatcccagcactttgggaggccaaggtgggtggatcatgaggtcaggagttcgagaccatcctgaccaacatggtgaaamcccatctctactaaaaatacaaaaattagctgggcatggtggcacgttctcaaatcccagctatttgagaggctgaggcaggagaatcatttgaacctgagaggcggaggttgcagtgagcggagatcatgccactgcacttcagcctgggtgacagagtgagattccatctcaaaaaaaaa

SEQ ID NO: 267038 - DNA, 608 bp, Homo sapiens
taatgggttgtatctgtttggtggtacagaaggattaggaggagattattttcattgcaagcttttagggttttacctgtgatgaatgttacatcacagtaacattcatgttgaatacttactcaataataaaactgttttctttctctatagaggttgtggagaggttttctgaggtagaagactttgtttttagttttattttccctcaaaaagcaatgcatgtttatgttcacatacatacatatttcaaagactatcaagaacaaaagtgagtatgcatctccattaccttacaaatggcttatctgttgtatttaactgttacatacatagagaacccattgcccatgggtaattaaataatagtatgcctttatttaaatgaatgtataaaataaaaattctcattatttttaacacaggataataagataatgtatatgccaaataaaatattgcccaatattgcagctattattatctacattttaaatagtaacataacttataactgtttatataaaaagaaatatactatccaatatattgaagagatacagataggggytctattaaatagagatcctggaaactatgatattctt

SEQ ID NO: 267039 - DNA, 518 bp, Homo sapiens
aaaaccaaaactgcatgtgcaacctataaaggggaaccaaacaatgggtacmcatggacatgcagagtggaataatagacactggagactccaaaaggtgagaggtggaagggaaataagggatgaaatattacctactgggtacaatgtacacaatttggttaaaggtacattaaaaggccatacttcactactgcaaaatatattcacgaaacacaattgcacttttacccctaaatgtaaaataaaataaaataaaataaaataaattctgagtcaggaaacaaaaattttggtataattgtatagtgtaatatgtgataatgctcaaatcagtgttttgagagagtctaccttctgggttctttgactttctctaatatttaacttgaaattttaaaattagtagtaagccagtggtttgcctcaccacataagggggaatgtgccactatgcaggctggtaacttcgaaactgtctacttggcaggctgatctgacataaaaattataccata

SEQ ID NO: 267040 - DNA, 519 bp, Homo sapiens
aatgctcaaatcagtgttttgagagagtctaccttctgggttctttgactttctctaatatttaacttgaaattttaaaattagtagtaagccagtggtttgcctcaccacataagggggaatgtgccactatgcaggctggtaacttcgaaactstctacttggcaggctgatctgacataaaaattataccatattccatactgaaatatgtgttcctggagagtcatcacccttcaaaaaagaatagcatgattggtctggaaaggccaatatacattatgctgacccaccttaaatggtttgtaccttgtaaaacctaattgagcagtcattctaatctttattgatatctgagagataatcagcaccttgttaaactgtgctatagcataattataaagtatataattttaaaatagataaatgcaaatgaaagtctttataaatataagaatattatgttgtgccttataatcttttatctttttccttagcaagttaactaaaagtagaata

SEQ ID NO: 267041 - DNA, 488 bp, Homo sapiens
gaactttctgtatactgagctctaatactattttcttgtggggttacatattctggacttagaaatctgtgctatgccctctttagtggttccttagggtagattgaaatagttaatcgtgctcactttttcctggtaaagtcaacgatatgctttgacagttatgctttagtgatttacctttttttcacaagttcatgattaggaccttctgaaccttaaatttccttgaaactctacttgtatcccatatgtagatgaccacttgttatattctaaaaatgagttgagctctcttagtcatttatgttcttacagttttaactcagaaaggacttaaagttagaaggaaagttacaattttctcraaacagattgtgtgacttagatcaagatttattcaagagtaaataccccacttaggacagaggaaaagccattcaacagttttccaggccaaagctacacaccatgatatacacctgtag

SEQ ID NO: 267042 - DNA, 596 bp, Homo sapiens
ggattgctccagtgaatagcaactgtactccagcctgggcaaaaaaccaagatcccatctctaaaacaaaaacaaacacaaacaaacttttctgggccagttattcagagtcaattaagaggattccaactgtcctaaaatcatcatgactctatctgatttaaacaagttttaaataatcaaaactcttccttgggagcctagatatgagccagcattttatgatttaaaatgagatttttaacatcttcatatgctgagtcatcttaagtattttaaaccactttacctatttgcatataagcaatgatggacaagcccttagtattctgactcagctttatagcatttatcagagacttgctacagctttcctcttgacccaatggcaaaagtgcaccttcyttgtctcagggcaatagcaactcagctaaattagtgaaggctactgctaactcactcgtagggtctcccttagactcaatggaccctcatcatgtacaatagttgcatgctaaaaattcactatatttctttctttttttactttattcaatctgtagagattgtcaaaattttccgatgccaactgtatt

SEQ ID NO: 267043 - DNA, 457 bp, Homo sapiens
gcagtggcgctatctcggctcactgcaagctccaccttccaggttcactccattctcctgcctcagcctcctgagtagctggaactacaggtgcccgccatcatgcctggctaatattttgtatttttagtagagatggggtttcaccatattagccaggatggtctcgatctcctgacctygtgattcgcctgcctcagcctcccaaagtgctgggattacaggcatgagccactgtgcccagccatcagtgatgtttcaaacaaacaaacaaacaaaaagccctaaaaagttatttcagtcctccattcattcagtccatgtgcccaaagccttaggatcccacaccttgcatcactgtggccaggatgtgagacatggaatcaagggagattattttggagatttaaaatttaatcactgccctgctgggtttcagacttgcatggggcctata

SEQ ID NO: 267044 - DNA, 537 bp, Homo sapiens
gggatttttatagcaggggagaaatgtaactgtgtaggggaaaacaggaactcaggaggggtaagaaagaaatcttgatgaatgagggcttaatgtctcgtctggatgctgtgacttggtgagtttcattctttgatactttttgagaggtctacggttccttttttgaggaaggaactcagataaaacaaatgtaagtttcaagatttaaaactaaaagtgtcaatttctatgtttattttgaaaaactgtctatgtgactactgggtctgtttcartgtcagcagggctgcattccttctggaggctctaggaaagaatccatctccttgctttttgcagcttctagaggccacctgcagtccttggctcatttccccattcctctatcttcaaagccaacaaagttgggccaagttcttctcacactgctatctttctggttcactatcttctgcctccctcttcaatttacaaggactctagtgattacattcagctgtaacttcccctccatcttctgaaggttcacagaaa

SEQ ID NO: 267045 - DNA, 582 bp, Homo sapiens
ttatataaccctgtatcataattattaattattatccttcttattaattattatccttcagctttctccacaagactatgcattcctagagggtgggagcctgttttcctcctcttctatatcctcaatattttttaatcttttaaatgaatgaacaaatatcctacaattatgttgctaaaaagtcagcattaatattttgttagtttattgtcactttcacaaactcaaaccctaattaatttgtaacttgggaaagaggaggttatcrtattgtaaatagtctcaaactgtgtgtatttgtgtgctctagtaattgtcaaaggattcttgggccatgtatcacctccatacacctgccccaaactcataatgcattttggcaactaggagggactctactgtcaatatcactggctgactttcagagcagaggtaacacaatgttcctcttcctccttctccttagaaataactccatcttttccctgttctgttctccttttcctcctgcctcactgaggacactgtggcatagttcctcagcttgccttcttaatgtttgagttccccaaggttttg

SEQ ID NO: 267046 - DNA, 516 bp, Homo sapiens
tttggcaactaggagggactctactgtcaatatcactggctgactttcagagcagaggtaacacaatgttcctcttcctccttctccttagaaataactccatcttttccctgttctgttctccttttcctcctgcctcactgaggayactgtggcatagttcctcagcttgccttcttaatgtttgagttccccaaggttttgtcctcaaggcaccaccctttctctcagtcttcattctttgtgatattctccattcctgtacatgctcatgttacccaaatctaatctcctgcctccgcatacatgtaaatgcctgcctaccagatggatccccccaaaagccttatagccatctaacttcaaaaagaccaaagtcaaactcattctctttctttcaaaacacaaaacaacaacaaaaaccttcctcctgcttttgcaccttccagtttcatttaatagtattgccatccatgtgtttgcccaagccagggagctgacttcttatatttttta

SEQ ID NO: 267047 - DNA, 516 bp, Homo sapiens
tttggcaactaggagggactctactgtcaatatcactggctgactttcagagcagaggtaacacaatgttcctcttcctccttctccttagaaataactccatcttttccctgttctgttctccttttcctcctgcctcactgaggacactgtggcatagttcctcagcttgccttcttaatgtttgagttccccaaggttttgtcctcaaggcaccaccctttctctcagtcttcattctttgtgatattctccattcctgtacatgctcatgttacccaaatctaatctcctgcctccgcatacatgtaaatgcctgcctaccagatggatccccccaaaagccttatagccatctaacttcaaaaagaycaaagtcaaactcattctctttctttcaaaacacaaaacaacaacaaaaaccttcctcctgcttttgcaccttccagtttcatttaatagtattgccatccatgtgtttgcccaagccagggagctgacttcttatatttttta

SEQ ID NO: 267048 - DNA, 443 bp, Homo sapiens
tctaaattcacctactctaaattcaatctcatatgttccctctggggcccaggaatatgctgctagacaactcttagaatgataataaattattagagcaaagggacaatgattatcccatgtagaactagcatgttaactcagaatgggagacataaaaagaagcactccacaaataaggtggaagaaatgggycctaacatttagctcccaactcaagagattctaataacttgagtatataaaagtcaggcccaaatgattgctgagccattggagaaaaggagaggagaaacaggtttcttcaacattgttcagaatatgcaagacaagaaattaagcattacccaagtcatgaagagcaagaataaggatgggaagcccagggtcccaaaggtgccactgccactctatccctcaacccagccatgagcaaggaaggt

SEQ ID NO: 267049 - DNA, 559 bp, Homo sapiens
cccccttctggtaacagaatgatgtattttcttttggatatatatccagtaatgggaytcctgaatcaaatggtagttctgttttaagttctttgagaaacctccaaactgctttccacaggaactgaactaatttacattcccaccaacagtttataagcattctctttttgccagagcttggccaacatctgttgttttttgacttttcactaatagccattctgactggtgtggcatggtatctcactgtggttttgatttgcatttctctgatgattagtgatgtggagcattttttcatatatttgttggccgctagtatgtcattttgagaagtgtctgttcgtgtctcttgcccactttttaatagacttatttgcttatgtttcttatagcttatggatattaaatctttgcagaatgcatagtttgcaaatagtttctcccattctgttagttgtctgtttactctgttaatagtttcttttgctatgcagaagctttttagtttaattagctcccatctgtcaatttttgttttcattgcaactgtttt

SEQ ID NO: 267050 - DNA, 597 bp, Homo sapiens
ttggtcttaaaaacttaagatgaagataaggtaatgtacttaaatattatatactactctttaaacagatagacagcagaaaaattactgtgttcactatcaaattaccctaaaacatagcaacttaaaacaacaaacgttttttatctcacacagtttctgaattaggaagtaaggaatctggaagtagcttagctgtaattctaaattatttttggtaaaattatgccacttagaaagataagtctatagattagggttatagtggaataaacgttagctcgttagcaggaaccctgcagaattatagtggggaactttttataagaatactgggatttgatatatttgataagaatagtgtatttgacagacatcttacaacaaaaagtgagcaaagtccaaktgtctgctttctttggggaggggaatgaagaggcttccaaaagaagtaactggagacgtcagggatagtctttttaataacttcagatagctttcaagagtagatactgaaacatacatgacccttaagctttcctcactttttgtgaacagccttaagccagaaatagggcttaacactgccttccccat

SEQ ID NO: 267051 - DNA, 597 bp, Homo sapiens
ttggtcttaaaaacttaagatgaagataaggtaatgtacttaaatattatatactactctttaaacagatagacagcagaaaaattactgtgttcactatcaaattaccctaaaacatagcaacttaaaacaacaaacgttttttatctcacacagtttctgaattaggaagtaaggaatctggaagtagcttagctgtaattctaaattatttttggtaaaattatgccacttagaaagataagtctatagattagggttatagtggaataaacgttagctcgttagcaggaaccctgcagaattatagtggggaactttttataagaatactgggatttgatatatttgataagaatagtgtatttgacagacatcttacaacaaaaagtgagcaaagtccaattgtctgctttctttggggaggggaatgaagagkcttccaaaagaagtaactggagacgtcagggatagtctttttaataacttcagatagctttcaagagtagatactgaaacatacatgacccttaagctttcctcactttttgtgaacagccttaagccagaaatagggcttaacactgccttccccat

SEQ ID NO: 267052 - DNA, 612 bp, Homo sapiens
cactatcaacatgactttgtcccttcttgctgtctcccttttayccctccaaatgctcaatcgaaatacctgaactacccgaaagttaaatgcaccactgcatctattcaggttcaagaacagtatttcacattacctgtgaagccctcaatgaaggctgactgctgtacatccccgctaatcgtcaagacaagaattttgtattggcggcctggtgttagggaagtaaatcgatactcggttgcggtatttacaaggtgaaaaggaggaaatactttcatgtcattgaagagcagctggatctcatattggtcgacatccccattagctcctgaccaagtcacatgcaagtcctcagtgctcctgttgcgcaatgttagatccttaacaggctctggaactagggagaaaaatgagaagacatttcaggaaaggaactgatcagagtttacctacataataatttatgaatcacattcaaggaactggcaacatctcccttccccaaataaaccactagcactacttcatgcataattaaacaagaaaaattggaagcaactattaacattgtggttttttcctgacataaatgttacatgatcagcattg

SEQ ID NO: 267053 - DNA, 612 bp, Homo sapiens
cactatcaacatgactttgtcccttcttgctgtctcccttttatccctccaaatgctcaatcgaaatacctgaactacccraaagttaaatgcaccactgcatctattcaggttcaagaacagtatttcacattacctgtgaagccctcaatgaaggctgactgctgtacatccccgctaatcgtcaagacaagaattttgtattggcggcctggtgttagggaagtaaatcgatactcggttgcggtatttacaaggtgaaaaggaggaaatactttcatgtcattgaagagcagctggatctcatattggtcgacatccccattagctcctgaccaagtcacatgcaagtcctcagtgctcctgttgcgcaatgttagatccttaacaggctctggaactagggagaaaaatgagaagacatttcaggaaaggaactgatcagagtttacctacataataatttatgaatcacattcaaggaactggcaacatctcccttccccaaataaaccactagcactacttcatgcataattaaacaagaaaaattggaagcaactattaacattgtggttttttcctgacataaatgttacatgatcagcattg

SEQ ID NO: 267054 - DNA, 593 bp, Homo sapiens
aaatttcagtattttggcatggaagctccattttctcacacctgcaagttgcattagcatcctttgttgccttgtgtttactgattagtgtttggaatatagctcaccacagatatggagcaaggacagatatgctttctccaagatatttacctaaaaccaattacagtgttgttagaatacagtcatcacagagttaaggaraggaaattatgaagtggcattttatgcatgggctaagaaaggtcaatgatccaggcaatttgctaaaggcaaagcaactattacaggaagaaaaacctggctgaatatcacgttaagtcaataaggagctctccaggtggaacggggtaatttgtggagacctgccttgctacacagtgagatgatgtgatacagaattagaaatattggtattttcacccaaaatgtagaacaagagcatcagaaatggaaaagggcattaagataatcagccaaaatcatcaagagaacaactcagacatgaccctccagttaaactgatttgtcaggggcaatgatttgcctccattagtcgtgtaccaagtccaagttcatgccggtcaaggagt

SEQ ID NO: 267055 - DNA, 515 bp, Homo sapiens
tgttatggggtggtattgggaattcccttcagtctgttgattatggtctagcaaactgattagttctatactggcacattcttaaaggggctgttattatacatgaacatgtgataataatataaattataatatatatattaaaaaataatgataataacaacaactactgaaggcctactatgtgccagttatgagctatatgtctcataaaggttacattatttgacacccattcagaactctataaagttgactttattattccatttattaacaaggaaaccaaggatcataaaatgtaagtaatttagcctatatcacagtgctaacaaatagccaacctggaactgaaagctagatttatctaacccctaagcctgtgtcyttttcctaattaacaacatttatttcttccaacttatcatttaacaaatcttatacacagatcttgaagttggcacttggtcaacatacattcttctttgtgcctctttcctgaattacaataatca

SEQ ID NO: 267056 - DNA, 592 bp, Homo sapiens
cctttctggcagtatgataggctagataccatgaaaatccttctaataaacacaactatacatattggataaaatatgaaaatgtaaatgaatgacttgtcaggaatgtaagagattctcaaaggscaaaaagtaaaggatagagaggtaattggatcataaagcgaactgttgtgttgagagcacctttcaaatgcaaatgtaagctttgattttatagcactgcaggatattggagaaaggaggtaaagtgtagatttttccaggctgaagaaactcatagctgaccttgcataacattggaaaggctacattctaagtataagtgaaataaatagtctctctttactccccatacaacttcagccttcttaatactggatggagaaaacgatttcctctgagaactcataaccttaagatagtttcaatgtgtttgcaacctgaatttataaaacccaggtgatcaaagaacctaaagttgacaatttagattaaagtaggtctggtttgatagcagtcttgtgcacctgaaagaatcaaatgaaaattctttctgaaactcaccttcaaacatggccttaaataattt

SEQ ID NO: 267057 - DNA, 595 bp, Homo sapiens
cggcatattgagacctaaagactggagtagcccactgtagccagggaaagagtgaggaacaggaaagccttcataaaggaggtggcccatttcaactgtacaaataaaaagaaccatttcagtaagaaaaatgcctccctaagatacactcacacttgttttggccacagcatctttgattctgcatttatttgagccctcttctactgagttagatctacttgtactttgaaaattagttttgaagtcttagttgtaagattgtgcatctcaaattcattgaatttgcctttgaagcgaaaatgccaatgctcttctatccctcagttaatgcatatatttggttgcttgacaacggaacatttctgtactgcctgtgtcatctcagactggaaacttcttggaaggggaatccctttgtttttataaacagcctggtaagctttgaaagcttatttcaggaggtgcatggtgggaggtgagggattagaaagtatttgggctgcaaagctcwcttcagaatatcttcctcctagctccaaactgcctcagactctcagtcacattttttacctgttgcgagccagggatgttc

SEQ ID NO: 267058 - DNA, 481 bp, Homo sapiens
gaggccccaccctgagatgtaaaatgtgtcagggtcccacttaaagaagcmgtctgtccacattttggtagaaccactgtgctgtgcttggggttccttttatctgccatcagctttgtttggactctcctaaacctacagactggaatggctaagtcatccaaacaacagatatcgaccctgcctctgccttcaggagctctgtcccatcccaggtaggtgcaatactattactaggggttggctggaattccaagccagtgggtcttatcctataaggtgccatggtattggggcccacagactgatgctgctcagccacatgattcagcttcctttctagcggtgtttatggaggtccaacttcctgccttgtctgagttgcagtcacctttgctggagatcctggagccagagtgtgtaaagctcctgagattctctttgtgtctgagcagttgctctgccaagaccacacagctct

SEQ ID NO: 267059 - DNA, 481 bp, Homo sapiens
gaggccccaccctgagatgtaaaatgtgtcagggtcccacttaaagaagcagtctgtccacattttggtagaaccactgtgctgtgcttggggttccttttatctgccatcagctttgtttggactctcctaaacctacagactggaatggctaagtcatccaaacaacagatatsgaccctgcctctgccttcaggagctctgtcccatcccaggtaggtgcaatactattactaggggttggctggaattccaagccagtgggtcttatcctataaggtgccatggtattggggcccacagactgatgctgctcagccacatgattcagcttcctttctagcggtgtttatggaggtccaacttcctgccttgtctgagttgcagtcacctttgctggagatcctggagccagagtgtgtaaagctcctgagattctctttgtgtctgagcagttgctctgccaagaccacacagctct

SEQ ID NO: 267060 - DNA, 588 bp, Homo sapiens
cctttccatgacagccacatatggtagctgcttccaatcagccatcctggcacccttctctgctacaatatttccatagatggtttttaccctgtaggttgtctcatgacccaagatgtctacaggaacaccagcctgtaccagcaaccatgtgcmtttcaaagagcaggaaggaggaaagatgcaaggccgaagtggctcacacagctgagtcagctccatctgaggagtctccctgaagtcccatcaatacttctggttacacccaattgtcttgaacatcttctagtcattgttagcttcaataggggtcagaaactataatttttgtgcttggtaagttgctgtttgaataaaactgaatctctgtttttaagaatgaaagcaaagtaaaaattgtggcaatgatgagttctctttttctacactaaattcaaagataaacaggagaaggtggagttttttctcaggtgaaatgggcacttattttccaaacaaagcctcttttggtgtatatttattttcagaccagatgggaaaaagtcttggttctgacaagcactccctttatgaccaaaggttagtcag

SEQ ID NO: 267061 - DNA, 192 bp, Homo sapiens
tattgtattatctattatctctcatctctgatactatttcttgttctgaactctgttgtgtctaatatcaatgtagtcyttccacagctttattttagtgtttccatgatatggcattctccatatcttgatgataacctatttatatctctatatatttggagcaagatgtaaaatttagacttgattttt

SEQ ID NO: 267062 - DNA, 527 bp, Homo sapiens
gaacacagttgatagttgaacttgtaatctatgataatcagcttggatgcwatactgacaggaagatggtgaactcacaatgtctaattaagataaaattaaaaaatatattgactcatgtccaaagatttaaaaaacctaagcggcagtgtcacaatttcttctttttagttcacatggtttcttaaacgcctacaattattttaaagtaagacttgagtctaggaaaaattgagacatatggaataaattactaacccatttctccttgaaatccattagatgcttgatgatttttcacatacatttctgaattgaaaagctacttgtgaattatttttataagcatatccttatgtaatattttgtttttaacagtgaattgaaggtttaaagattaaattattctatccagagaataaaaagcaattatttcacaaggagaacatgtgtatgttgacacgacattttaaaatctagattttaaaataggtcccatatacttttgagtcagttagaatatgttt

SEQ ID NO: 267063 - DNA, 527 bp, Homo sapiens
gaacacagttgatagttgaacttgtaatctatgataatcagcttggatgctatactgacaggaagatggtgaactcacaatgtctaattaagataaaattaaaaaatatattgamtcatgtccaaagatttaaaaaacctaagcggcagtgtcacaatttcttctttttagttcacatggtttcttaaacgcctacaattattttaaagtaagacttgagtctaggaaaaattgagacatatggaataaattactaacccatttctccttgaaatccattagatgcttgatgatttttcacatacatttctgaattgaaaagctacttgtgaattatttttataagcatatccttatgtaatattttgtttttaacagtgaattgaaggtttaaagattaaattattctatccagagaataaaaagcaattatttcacaaggagaacatgtgtatgttgacacgacattttaaaatctagattttaaaataggtcccatatacttttgagtcagttagaatatgttt

SEQ ID NO: 267064 - DNA, 527 bp, Homo sapiens
gaacacagttgatagttgaacttgtaatctatgataatcagcttggatgctatactgacaggaagatggtgaactcacaatgtctaattaagataaaattaaaaaatatattgactcatgtccaaagatttaaaaaacctaagcggcagtgtcacaatttcttctttttagttcacatggtttcttaaacgcctacaattattttaaagtaagacttgagtctaggaaaaattgagacatatggaataaattactaacccatttctccttgaaatccattagatgcttgatgatttttcacatacatttctgaattgaaaagctacttgtgaattatttttataagcatatccttatgtaatattttgtttttaacagtgaattgaaggtttaaagattaaattattctatccagagaataaaaagcaattatttcacaaggaraacatgtgtatgttgacacgacattttaaaatctagattttaaaataggtcccatatacttttgagtcagttagaatatgttt

SEQ ID NO: 267065 - DNA, 527 bp, Homo sapiens
gaacacagttgatagttgaacttgtaatctatgataatcagcttggatgctatactgacaggaagatggtgaactcacaatgtctaattaagataaaattaaaaaatatattgactcatgtccaaagatttaaaaaacctaagcggcagtgtcacaatttcttctttttagttcacatggtttcttaaacgcctacaattattttaaagtaagacttgagtctaggaaaaattgagacatatggaataaattactaacccatttctccttgaaatccattagatgcttgatgatttttcacatacatttctgaattgaaaagctacttgtgaattatttttataagcatatccttatgtaatattttgtttttaacagtgaattgaaggtttaaagattaaattattctatccagagaataaaaagcaattatttcacaaggagamcatgtgtatgttgacacgacattttaaaatctagattttaaaataggtcccatatacttttgagtcagttagaatatgttt

SEQ ID NO: 267066 - DNA, 504 bp, Homo sapiens
tagtggcataataacacttcatcgaatacactagtcttagcatgctaaaaaaaatgtttaattacaaaattaagttcacacacaatctaaatgttttaaagtactgcattttattacataaaagcacaatcaacaaaatgataattaattttaaaatgtttttttctcactatactgcaaaagaatgttagtctgaacatgtacstcaagtagcacttaatattctaagttaatcacaaagagcatctctacattttcctcatgcatcttgtattttaattttcttactcttccacagaaaggggcataaataatgcccacctataaaaaagaatctctcatatctctgattcagcaacaacagatcacttgctttcacatgtgaatataataggaatgaagaaaaacatgaatttgagagttaaattacatcaattgcttttcaaaaaatctgtaatttttttcaagaaaaaagtatactttgaatgtaattataaatctcca

SEQ ID NO: 267067 - DNA, 286 bp, Homo sapiens
acctcaccgagcaggagatacggaccctggaggtaaggggtttggggacccgggctgggctcgagcagcggcccggacacctcccttggggccccagttcactcctggccgagttgcatccttgagcccgcgtcgcgcccttggaggcttcccctccctcctgcactcgctgatgcggcagccgagrgacccgggaccagccctcaccttgggcaggatttgtggggcgggtgcttggtgggaactgggatggaggcgctagggtcccgtggggcggggagggtga

SEQ ID NO: 267068 - DNA, 640 bp, Homo sapiens
agttagagtcattcaagtagaaatcctttcaatgtaccatatgttatacatacaactttatgcaaataaatttcagatcctatagagtacaaaactgaaaattttgaatgwttcttactttaaggattactttttaaaactgcctattcaggtaaagatatatcattaatttactcctctaaaacatctttctcttccccactcccacctagagttcgttgtagatcctctgtaaatgccaaatgaaaggatctgatgaatgattagactgttctgaattttaaaacattcataacccaaaagaaagttttaaaatatgaattcagaaataaaatcagtaacagctggcttgtttaactctaatatgcacaagagtggaaatactccaatcatccattactatatctcatgaaaatgcttcacacaggtttcagcaagtactcccataaatactggtcacaggactaaagctatcactggatcagtgtccagtacagtcagaaacaaagcattcagccaacagtctcaccaagagtggcagggctgggggcactcaaaggggaagtgtccaaaaagaatcacagattttcctgctgtgacacgtatacaaatttttatagatacttacacacacatatag

SEQ ID NO: 267069 - DNA, 585 bp, Homo sapiens
ctaattttttaagcctcattcctgacctgataaatggtcacacagtacttacaagtaatggttgctgcaaaaactcttgagataatatatgagaaatgtaagtgaaaggtaatttttaaaaagcgtatccctctatgctcattatttataaattcttaaatatcttaagaattttttttcatgtctcagagttctccgggttaaagcactggtagatcatcaataaaagaatggaggatttcctgctaactcctacattctattgtggacaaagaaggtggcagtttgtcctgagccaaagcattttttttttttttygaagaggggcacagaatgttcagaattctgttcagaactctacagaaacaaatgcatttttgaccatgtggtcattaaagctcctaacccaagatattcctaagaaaaagaataaaagtcatcagcttcctggacaatttctagtatgcttaattttaacttaattaaaatccatgcacattcaaacaaatataggactcgcctccacttcctatccaaaactcacgtctagcatcatcattttatgaaataccagctgctctatgt

SEQ ID NO: 267070 - DNA, 585 bp, Homo sapiens
ctaattttttaagcctcattcctgacctgataaatggtcacacagtacttacaagtaatggttgctgcaaaaactcttgagataatatatgagaaatgtaagtgaaaggtaatttttaaaaagcgtatccctctatgctcattatttataaattcttaaatatcttaagaattttttttcatgtctcagagttctccgggttaaagcactggtagatcatcaataaaagaatggaggatttcctgctaactcctacattctattgtggacaaagaaggtggcagtttgtcctgagccaaagcatttttttttttttttgaagaggggcacagaatgttcagaattctgttcagaactctrcagaaacaaatgcatttttgaccatgtggtcattaaagctcctaacccaagatattcctaagaaaaagaataaaagtcatcagcttcctggacaatttctagtatgcttaattttaacttaattaaaatccatgcacattcaaacaaatataggactcgcctccacttcctatccaaaactcacgtctagcatcatcattttatgaaataccagctgctctatgt

SEQ ID NO: 267071 - DNA, 613 bp, Homo sapiens
gcttcaaattctcaaccaggaaatgtcacggcatccttaagacataatcttgtttttttagtctttgacatttgttgtttawctgaaatattctatgtcttatcacaaccttacctactgcacaggcccaactccgccatccatgttgcaaaatgccctggtatgtctagtgagcagccgtggttgagaggcactgatttaaataatttggtctgaagaatgcttgggttgtgtgagagtgtgtgagtgtgtgtgtgtgtgtgtgtgtgtgtgtgtttaatgccacagattttataaccattaggagtagcaaaagaaaaagaggattccctggaaaatttccaattataagttgaaatctgtattaattatttcaagagcaaaatgataattaatgaggaagtaaccttgtaccaggcccagggaaaggtgaggggacacaatgtaaaatgggatgcttgtaaatatcactcagcttgcatctagataagattgtgagaagatattatgggatagtgggaagagcaaatctttattccaaatattttctattccaatgacaaagatccagaatgggaaaagacattgctaccattgcatctccaagttactt

SEQ ID NO: 267072 - DNA, 613 bp, Homo sapiens
gcttcaaattctcaaccaggaaatgtcacggcatccttaagacataatcttgtttttttagtctttgacatttgttgtttatctgaaatattctatgtcttatcacaaccttacctactgcacaggcccaactccgccatccatgttgcaaaatgccctggtaygtctagtgagcagccgtggttgagaggcactgatttaaataatttggtctgaagaatgcttgggttgtgtgagagtgtgtgagtgtgtgtgtgtgtgtgtgtgtgtgtgtgtttaatgccacagattttataaccattaggagtagcaaaagaaaaagaggattccctggaaaatttccaattataagttgaaatctgtattaattatttcaagagcaaaatgataattaatgaggaagtaaccttgtaccaggcccagggaaaggtgaggggacacaatgtaaaatgggatgcttgtaaatatcactcagcttgcatctagataagattgtgagaagatattatgggatagtgggaagagcaaatctttattccaaatattttctattccaatgacaaagatccagaatgggaaaagacattgctaccattgcatctccaagttactt

SEQ ID NO: 267073 - DNA, 618 bp, Homo sapiens
gaggcttttcagcaacaactgtgtcatttaggcaagctaaatggttcgggctatttctgagagggatttcatccagtaacaatctaaaaacacagctcacggtccctcaccatgccaagcataatagccaaccctctggtgctttcattgacaagtccttctgtcttttccaaataagttctcctcattaaatagtaaacttctccatttagttaccctactcttctctgccaaccataaataatcctttaaatgactgatggatgtgacctatgcaagtttgctaccccggatctggagttaagactccgatgtttgttcctcataagccgggatgaagatggagaggagtgacaccttgagagagagccataggaccacaattctgccacagcccttcatgaccattggaaacaaagatgtatggatgagaattccacaagcatacagggtgataaaggcagctttgggaaaggtggctgagaccatataaaacatctccygtagggacttttcaaagcagttttttaaattttctttttctttttttttttttcagcatggcctcctattaccctttctttcaattctacaattttgaaaaaaataaatggtttt

SEQ ID NO: 267074 - DNA, 617 bp, Homo sapiens
tggtcttggccaagtgactggttttaaccaatgggatacttgggaatgacacaggccacacttcagtagcctctgtaacactcattcagccttttttttgttcctccctatgactcaggaagagcatatcctagatctgggctagtctttaaacctgaatcccattaaaaacaaaaacaataataataacaacaaagattggagctggtttgagcttaggtatgctacttctaaaccacactcaaatgcaatgcaagagagaaataaacatttgctgttgmaagccactgatttaggattttttgttctacagaacatattggtggaacttggcttttacagtgccatcagtaaaagatctgataaactgaagaatgagaccaacattagagaacattattgagatctactgaagagtagatcagactttttccttcagttgcacagagtttggatgcagaggcaggaagggtgaccagcctcttgctggaagccaggcaaaccccttttatggtctaaggcagagataagcaaacttttcctgtaaagggccagagagtaaatattttaggctttgcatgctaagaggcaaaactgaggatattatataggtactt

SEQ ID NO: 267075 - DNA, 617 bp, Homo sapiens
tggtcttggccaagtgactggttttaaccaatgggatacttgggaatgacacaggccacacttcagtagcctctgtaacactcattcagccttttttttgttcctccctatgactcaggaagagcatatcctagatctgggctagtctttaaacctgaatcccattaaaaacaaaaacaataataataacaacaaagattggagctggtttgagcttaggtatgctacttctaaaccacactcaaatgcaatgcaagagagaaataaacatttgctgttgcaagccactgatttaggattttttgttctacagaacatattggtggaacttggcttttacagtgccatcagtaaaagatctgataaactgaagaatgagaccaacattagagaacattattgagatctactgaagagtagatcagactttttccttcagttgcayagagtttggatgcagaggcaggaagggtgaccagcctcttgctggaagccaggcaaaccccttttatggtctaaggcagagataagcaaacttttcctgtaaagggccagagagtaaatattttaggctttgcatgctaagaggcaaaactgaggatattatataggtactt

SEQ ID NO: 267076 - DNA, 591 bp, Homo sapiens
atacgatgcctcaaaatctttgaaaccacatggtatgttcaggtaagccatatttccttctatcagcataagtatcaagtaacataaacttaattccaaaattccaaacacaatatatataactttgctgcctattgacaccaaatgaacacacaaacacggctgttttagttggggtgggctgctataacaacatactgtagattgagcagcttaaaaaacagaaatctatttctcacagttctggaggctgagaaggccaagatcaaggtgccagccacattcttgtgccagtcacattcctatgccctcattcaactttaattaccttcttagaggttccacctccaaatgaagtcacatatgaatttacaggaggacacagtaagtccacagctgtaggcaatccaattatgtaccataatttgcacataattttcctgctgcttcttttattgttcctcctgtctccaaactagtgaagtctcttgccattgaagacagagtccttaagtctttataatccygctctgaagctgtattacacaagtaataaacagaaaaaaatattgacaagcatacttttctata

SEQ ID NO: 267077 - DNA, 579 bp, Homo sapiens
tgaaaacatttgttaaacaccgacaatgcacaagcattgtgaatgaatacgatacgatcctcatttagaagaagttatagtctattgcatacatataaaaattatactcaatttttaagtattaattgcatttactattttagcaaaagcgtaatcctaacagagtgtatataaaactgacttggaaatatacaaaagcaaaggtaaaaataattttctaattttatgatatctctctctctctctttctccctccactctcttctggggaaatagagcaatttggataactgttggaataatggttagaaatattcacgtagctaacaaaggttacgctggacaaccactaaggtccctttaatgaagagaatctttgatgtcacagatctaaggaactctaataacattaaggaaacagaaaaaaaatacactaaatgcacttttctattattggctgagtgagataaatcccatttcgcatcctgcacaggtgcacctcattttgttgtgstgttgcagacattgcatttttcacaaattgaagcatagtttttccaacacgttcacacttcactt

SEQ ID NO: 267078 - DNA, 565 bp, Homo sapiens
gtcttcaggtcttacagttcacgttacatgcaagttccaagctataatctgcctgttctcattctgtacattaaacaagggaaccctcttctgttctattttgtgaaggtctsctttgattgccaagtttaagagcaaatagtgacggttcacattcatgtagtttcctttattcttaaggactctaacttgctcagaaaactcactaaaccaagtaaacacacttgcgaaacttttggaatgaagtgtgatttcagtttgagaaatttaatagtctcctaatttaaaaagttctgcttgaatacttaaagaattagtactcttaagtctttacaattaagaacacataggaaacaattaattctggatttctaaagggcaatcttcttcaccataggtgatttatgaatcaattagaaggatgttataattttatcagcctactagtagaggctgagaaacttgatctttgaagactgaaatagtttgttgtctctcttagtgtcaactaagtgtgaaatctcagtggtcatgggaagctgatcagccatacattctttaaaag

SEQ ID NO: 267079 - DNA, 632 bp, Homo sapiens
ataaatgttcatagtgctgaggtcaagaaacctccatctagaggcttggcttccctatgccttcctgagttaggagcagcagtgcccagcaaaaccatggagaagtcaacacatcttcaaagctatgtggaattaggcaagtcattcaatgttccagtgctgcagtttcttacttggtaaaatgagagtaaaaatgcattaccacactgttaatattgtgatgtaatatacatgaaagttcttagggccgagtgcggtggytcacgcttgtaatcccagcactttgggaggccaaggtggacagatcacgaggtcaggagtttgagaccagcctgaccaatacagtgaaaccccatctctactaaaaatacaaaaattagctgggtgtggtgacagacgcctgtaatcccaggtacttgggaggctgaggcaggagaattgcttgaacctgggaggcggaagctgcagtgagctgagattctgccattgctttgtagaccaaaaacaagttatttgaagtataaggggttacaaatagtgtgggtaatctctacaaagtcctactgtgttgtgctcttacccaaccatgctcacatgactttagtagttattccaattcacttctagaaaat

SEQ ID NO: 267080 - DNA, 604 bp, Homo sapiens
agccaattgctcttgctttcagttcagggaattaaaatccagtgttggtggatagagctatttctgtggcgytctcttgcctttggatttcagtttccttggtgattagccaagcatgagcctgacacccttcagttaggaagaaaatccatgtggtttggcactttgtaacttttgttctctttgtggagccaggaaactcagtgtcttgatgaattttgagtcacagacatggtgaaagttttataccccttttttcatatatagatgacataatttatcttttaattgtatttattgcagtgctggagtgttacagcaagtacttccaaaaaagccgcatactgtcactgctctcaagtttatattgcacccctcatttggcatccacactggagcatttaaatgaggatcgctaactgccgcagcataagcaaaatgctaagttttcttttgagttattttattgaacagaatcattccaaaggaaattttgaatacatgacaatttccttaaagatccatattgagtcgcatgaatataaatttctctattacatgcatgagagacgctgccatgtactgcatgaatcctgtcttccaa

SEQ ID NO: 267081 - DNA, 631 bp, Homo sapiens
ccattccactgctcatcccacagccagggaagaatgactggaggcttagtggagaggtagagcctttatcttcacccagaaataatgaggattcattcttcttgcatatcagaggaggctgggtagggacctagacatctactctgacaaggcagtagtgaggctgtgccttccttctcttgccaagtgctggaaggagccagctagacagaaagtgatgctggaaacttcaacaccctcctctcaacaattggtaaaacaatgacataggcaatcggcaagggtgcaggagaactgaacaacaccatcaccaataggatctagtcaatatttataaacacatccaccagcaaaagcagaactcatattcttttcgagtacccatgggacatgtgtccagatggactatctgctcggccgtaaagcaaaactaagcaaactcaaaagaattgaaattatacagagtaggtttgcctaccacaatggaatcaacccagaaatcaataacgggaagaaaacagccaaatctctgtatacttggaaacttaacagtgcccttccaaataatccatggataaaaggggraatcgtgacagaattaaaaataatatgctgaacctaatgaaaatga

SEQ ID NO: 267082 - DNA, 587 bp, Homo sapiens
ggaaaagataacctgaacttgataaagagtttctacaaaaatcctacagccaatattatatttaagggtgaaatctggatgttttacttctgtgatcagaaacaagacaaggatgtctgctctcaccacycttaacataggctgctggaagttctagcaagtgtaataaagcaagaaaggacataaaaggcaaacagattggaaaggaggaaataaacctgtgcttatttaattgcctttgtgtaaaatcccaagaaatctaccataaaaaaagaaaggaaagactcaaagaactaataagtgagtttagcaaggtcacaagacacaagataaacattcaaaaaatcaattgtatttctgtatactagcaatgggcattgaagtgaaccatacaattacatttacaattgctcataaaaatgcaatacttaggtgtaaatctaacaaaatatgtagggaacttgtgtggcgaaaaccacaaaattctgataaaataaattaaagatctagataaaaagaaagacatttcatgtttatagatttgaagacaatatagtgtcaatttaatagtaatcatcatagtaatc

SEQ ID NO: 267083 - DNA, 609 bp, Homo sapiens
cgacttaccatctcctgctccacagccccatttcttggctatcagttatttaaacttgctacattcgaaggcaagctaggagacaccataaaatgtacaaagctcgcccttactctgggcgagctcacacactttgaggagaggtcagagtttgtaacacagaatagaatttatgtcttgtccggagaaacgcaaacaggcagctctgagggagggtagagcgttgcttgttaggtgacttgccaagggcatcatagcaaactggttacaaagtgagacctaaatctcagttttcagattcccaattcagtttctttcccatttgaacacattgtacagttatatcacttgtcaccttttaaccactcagacattatsaaacctaacccatgtttgttcataagaggtactgatgtcagctgggcacagtggctcacacctgtaatcccagcactttgggaggccaaggcgggtggatcacctgaggtcagcagttcgagactagcctggccaacatgtgaaaccctgtctctactaaaaatacagaaattagttgggcgtggtggcgggcaccattaatcccatctactcaggaggctgaggcaggaa

SEQ ID NO: 267084 - DNA, 584 bp, Homo sapiens
aaggagaagaactggaatcaagtgaagagtctcaggaagcatttgatgtcaattctaattctgagggttaagacctagatgtgactcaggccatccagaggaaaggacaggggtgggggcaactcataggcggtgctggtggaaatgcatgtcaaaggagcatcgctgcaccttcgcagctagagcaaaggcagtttgaaaacagtttattaggctattccgcagatccacacagtttacagtataccgagttttgctcacgtgccaattctcagcgagacattccctggctactagattttaaattctcactatcctcgaccttcgtactgcatcttctcatcctcttctctgctttgttctcctccatggtgcctgggaccttctgttacgcttcagattgcagtccttaacatgctgttcaccacctttcctccatagcgtgggaactccatcacgagggctttgtgtctgcagcttactgckgcatccccagcatagaagccagagaaagacacaggacagacactctgtgcctggatgctgggccaagaaatgagtttctgtaaataagaaactaccaa

SEQ ID NO: 267085 - DNA, 590 bp, Homo sapiens
cttctgtgtagttatttgaatgctatattcattttaaagccatctggagggatgacgaatgaagaaacaaatctgtcagagtcggtccatgtgataccaggggtgctgcttcggaacacaggcactcacacagcaccgggagagtcgagaggggcactgcaccgatgtggctctgtgcagaaaggctttcccagtggtacttttcactgatagttcaagaagatgtcgagaacttcggggtgaaagaagttttgtgggtaggcaaagaagagtggcctgtgtgtcccgtttgaggcaggaacttgtgatacctgtttctggaaattgtggaaggagaagttgagatcttaaccttagagataacatatcgtctatgattttaaggatgaggagtcagacacacagwtccttctggtggcttactcaagattataatacagacaggaagaaagaaacaaaattagaacaccaacttcatcccaagtaccggcatgatacgatacttactctagtgtgtgtgcatgcgtgtatgtaaaagagacagagagagaggctctgaaagaaataacaaagggtactcaacaaaaaac

SEQ ID NO: 267086 - DNA, 564 bp, Homo sapiens
acctaatgctgccactgatttgacaggagctggagctcaggcggtgagatgccagtgacggggagtggctgtcaatacagatgaagctttgctccctcacctgctgctcaccccctgctgtgaagcctttttcctcacaggccgtggaccagtactggtctgtgccccaggggttggggacccctggtttagaygactattgaataacttcttccctagtgctgtttatcttttctttctattatgtcccctaggaaagtttagtttttgttgacatttcaaatctacctttcacaataaggtaatttatgaaacttcttcacattaatccctaatatatcttaatcgttctcactgtgcttttaaatgtgtagatactctgataataattcttctcaggaagtaaagagacatatattgacccctattgtgaattcagtttgtattttgacctgaggttaccaaaccataccactacaggcaactcaaaatgttatttatttggctaataaaggccatttctttgtgtcttaaatattttaattgttttaggcctttcagagt

SEQ ID NO: 267087 - DNA, 597 bp, Homo sapiens
aaatatatatatatatatataatattatatgtaatatatataatagagagcagccctagaagaaaacggtctatgtgagaagcttgccaaggactggttccatctgtgatgttttcaaaatcaaacaattctttatttcaactaatagcaagctatttactgaagagtaagtaaagtgttgatattacaatattatccatcattgcttcatctattgatctgtgagcatcaggtcaccacacttctgtaaatgctgttacaggttcacatacaaacttacacaagacacacagcagaaggacaaatgagccattgcaaggttgtctgcaagtctgtttctgtttcaagggcagtgacagacctcttctctggggtgaaaatattcacttgtttggtaaagctgtcaatggatattgcagtaactcaaagacagggccccaaatcagtataaargagatagacattcagagagctaactgattctgctccaaaaatcaagatgatattctccatggataaggtggttgattactagcaacattttttaagcattattatttgtattgtcttcaaattaaaaacaaaatcttgtgtgtt

SEQ ID NO: 267088 - DNA, 517 bp, Homo sapiens
tgtgggagcagtgtttcctccaaatacagcttaattctatgctgttggttttcctcaatgggtaatctcattttggcttttggtttttgattcttaagttgcttagaaggaattttggggctagtgggtacctgctcaactccattcccttcggcccatggatcttgatttttgttttgtattacctctttttgtcatggtgtgctagaggcagcatcaatggccatgttttattttgtcctatgctgatgacaaggtcatgkgctgcctgccctgggtccataatgtccctcagtgggacccccatggctggggcatttggagccaggggacttgtagccagttggatgttctggcctggatcagagcggaagtgggtggacacttattggcccttgaacccctttttagcagtgtgggagccagagactaggagccaggaaatgtatttataaaaattacttgtctgtggacaagtttagctgctgtggtcttagcttatagtaattagctatac

SEQ ID NO: 267089 - DNA, 600 bp, Homo sapiens
ttacatcataatgtgagcctggttgaaagatgagaattactaaactttttggtctgagaatttatcacggtaacctctactgcacccttcctttagccatttccggcctcgtcatgtaatacagaaaccaattgtgtttgcctctgagatttcttgttgatgctaaagtcttcaaaaatgtaatccacagaagaatacattgtaacattttattcttaaatgaattttccaaactctttaattttaaaactcagcgtatagttcatatttataaaaatttctactgccttcagatgggttagttggaattcagaccatcttgagatgatggagatgggctaactggaaagcctagtagctgtaaaagtagatttcagttgagccatttgttagaagaccaataacttgccttttaccacagtatgtgggaaattgtttttttgtactagcatttactcacttgctctcaaacacttctatgcacattgctccagcatttgaatattgactcaatatggtatttgtgyatataagcatggattttgaatattcaatggttaaaggcaacctctaggttgactgctaaagaaacacattatg

SEQ ID NO: 267090 - DNA, 584 bp, Homo sapiens
cattggctatacctaaaatctccttttcctggaaaaccactaacattgaaactgatctcttttctctttcaactgaaaatatttattatcaagacatatcttttgtcaagtgatacatttaattacaaaacaagtctatattaattaattaytatgttaggaacaattctagatgctatggtaaatgtaagtaatacatttctaagtattctataagtcaaagaaaaaagtgggattttggagatctaatgaacaaatgtatgataaaatttatatgcttttagaaacattcatcagaaaagaaaaaaggcggaataaaagatagctaagaagtcaatattttttaattcataaaattaaacccaaggaaagtagaaggaagagaaataaatgaaagagccaaagctatttatttagaaatcaagtagtacaacaggaaaagtcaaaatattattatcaataaaatacaataaaaattatgaatgcttatgaaaatatattaagaaaaaacagagaaggtacaaaatatcaatatcagaaataaaaagggatcatcactacagattctatagataataagcaaa

SEQ ID NO: 267091 - DNA, 584 bp, Homo sapiens
cattggctatacctaaaatctccttttcctggaaaaccactaacattgaaactgatctcttttctctttcaactgaaaatatttattatcaagacatatcttttgtcaagtgatacatttaattacaaaacaagtctatattaattaattactatgttaggaacaattctagatgctatggtaaatgtaagtaatacatttctaagtattctataagtcaaagaaaaaagtgggattttggagatctaatgaacaaatgtatgataaaatttatatgcttttagaaacattcatcagaaaagaaaaaaggcggaataaaagayagctaagaagtcaatattttttaattcataaaattaaacccaaggaaagtagaaggaagagaaataaatgaaagagccaaagctatttatttagaaatcaagtagtacaacaggaaaagtcaaaatattattatcaataaaatacaataaaaattatgaatgcttatgaaaatatattaagaaaaaacagagaaggtacaaaatatcaatatcagaaataaaaagggatcatcactacagattctatagataataagcaaa

SEQ ID NO: 267092 - DNA, 526 bp, Homo sapiens
agcaaaataaagagcatagcattcattggtatttaccctataatatcttgtgttatgtaagatttatctacaggtgtgatctgtgaggttcatacatatttatttgcttttagtttaacatctcccttgcttcacagtcacatggtttgctctattttggggtcataattgggtaaaataataggttactttcctggaaatayagggaatttttttctaaccagtgcatattcaaatttttggatatctgtttttttcaacagatataattaaaggtgaaattcacctcctttttttccctccctccctccttccttcttcccttcttaattacactgtctttttacaaagatcaggaccagttaccttatagacatttttgattggtctaattatttcttcacaatatggtttaaaatgttctatacatcctgtatttgatgaaactgaaagctaaatctggcttagctaaatttcagttggataccttggaaataatactttagagatgatactgtatatgcta

SEQ ID NO: 267093 - DNA, 556 bp, Homo sapiens
tgctttgtacctggcaccattcgaagtacttcacgtgtagtgtttaattttcacagcaatcctgtttgcattaacgtgaaaatggaagcactgagagttacttgcccaggtcacacaattgcctgatgtggatccagaactggtgtctggcagtctgattttagacctatgtcctcagccaccacgttttccagaccccctcatactgaaaytcacctatggttgaccagagataacactgctaatgttcctttatatattttacaggagtaggttttgtgacccgcttttaaatataacaacttcccatgtcattaaatattgaatactactccaggagtgtgtgagagagttattcattttctattaatgctcagactgcttagttttaccagctcaacgtaggaaactatataatacgattcatgatttaaagactggcttgaaaaaaaatagaaacctctgtgattatactgtatatgttaattataatcctaatgactattagtagtttgtgtagataatacaacatagataatatagacagaccacttat

SEQ ID NO: 267094 - DNA, 558 bp, Homo sapiens
atcggaagtagtgtgtaaaagtctatgacattctttattatataaaattctgcagttaaacaaattagtttttaaaattataactacagaaaatgagacactgctagactaaaacccaaataaagctggtagcattatcccttatacatagtttatgctcagtaggtattccaactatgaagtcagttttttctgctgtttggagggaggaaaactgtaatgtacctggactcttccattaatcaaaagaagactctataccaagaacagataattataaagcctaggaaagttggttagataaaaggatagactggaaacatgaaaatatagtcaactatcttattgattagggttgtgctatgagtattacttgaatagtttaaaaaaggtatgaatttattctatactggtgtttttagaatgcagaatttctggacaaaagacattgtcctaggacaataagagaacaagatactttatgtcacrattgtctatattattatattaaatttaggtaaaattgatttattttataaaattgatactaacggaaat

SEQ ID NO: 267095 - DNA, 569 bp, Homo sapiens
tggactgcaagataatttgtcattagtttccactatcttatgcaaaaaataaaggatgtatatattttgaggggtcaaggttttataatgctgggtcaaattttagctgctgaattaataaacatgaatttaactcctgatctgtggaaaagccattcaacttttctatatttagttttcttacctaagaaartaagaacggtcggccaggcacggtggctcacacctgtaatcctagcactttgggaggccgaggcaggtgaatcacgaggtcagcagttcgagaccagcctgaccaacatggtgaaaccctgactttactgaaaatagaaaaaaattagctgggcgcagtggcggacgcctgtaatcccggctactcaggaggctgaggcaggagaattgcctgaactccggaggcggaggttgcagtgagccaagatcgtgccactgcacgccagcctgggcgacggagtgagacaccatttcaaaaagaaataaaagaaaataagaacagtctaagttccttgtaatattgatgaagtagcaagagacagctttaaagctgtttt

SEQ ID NO: 267096 - DNA, 569 bp, Homo sapiens
tggactgcaagataatttgtcattagtttccactatcttatgcaaaaaataaaggatgtatatattttgaggggtcaaggttttataatgctgggtcaaattttagctgctgaattaataaacatgaatttaactcctgatctgtggaaaagccattcaacttttctatatttagttttcttacctaagaaaataagaacggtcggccaggcacggtggctcacacctgtaatcctagcactttgggaggccgaggcaggtgaatcacgaggtcagcagttcgagaccagcctgaccaacatggtgaaaccctgactttactgaaaatagaaaaaaattagctgggcgcagtggcggacgcctgtaatcccggctactcaggaggctgaggcaggagaattgcctgaactccggaggyggaggttgcagtgagccaagatcgtgccactgcacgccagcctgggcgacggagtgagacaccatttcaaaaagaaataaaagaaaataagaacagtctaagttccttgtaatattgatgaagtagcaagagacagctttaaagctgtttt

SEQ ID NO: 267097 - DNA, 600 bp, Homo sapiens
caagttggggacacgtcattgctgaggagctaatccagactacagcaaaatgattttgtggtctgcagctccattccaggcagctttaggcggaatcaggaggtgatgagaagctgcctcttgacatcctcctgggagagatagggagccatgtgggaggtggtctcacagcaggtctttacragcctcccgtctttctgtgttctgggagaatcacaaagcatcctaccaaaacttaaattaactgtggttcaaaactttacctgcatggcctgtatggatatgtgcaaagttgccaggacatcatggtgagctgttatctgatattctcacccagttcttcctttatcatcttcatctgtaccaagtcattctctattttacatatacaatgtggcatcttgcctttgttcttgctgttatcctaacagagcttatcctttttccttctatgaacattcatacattttcctgtctctgagaagttggtctgatactaccaattaaaaatactttcctgcatgtataatcttccatttgtatctctctactattatttatttcttgccaccttgtacttcatgttacttgtgtttattt

SEQ ID NO: 267098 - DNA, 565 bp, Homo sapiens
tgacaaaatacaataaattgcttgaaattattatctatttttttcagtgtgtgattacaatgcagcaacttagcagtaactagctgtagttcaaaaattaaaaccatcaatttgaataatttatgaagtgaactcattcttttcacactattttatagactttgaggaaaatgcatttgcctgtatataaaaaaatgagatccttggataaytaaaaatggagagcaagatgattgatttgtaaatgaatattctgtgttgggagaagtatgaataacaaacaataaaattctataattcatggaatatatttggattatatcagaaaaatggcacagtattatattttccttttctcagatcttatttttctttagcttccaatattatacacacaatctttaaacaattaagataaccttacaattattttggaaagagataagcagatttgtaattactgttgaccttattatttcttgtcattaacagttccaagtgacaaacaagtaaaagcaagtatgttgaacaaaatttttaaagaagagcatatttgggcagctta

SEQ ID NO: 267099 - DNA, 485 bp, Homo sapiens
agcatattttgcaggaaattagcaaattagcttgcyaaatcatcttaaacacaatataagtttcataagagttaatattctactccctatatggttgagagatttgcacttgacatggccattatccttcaacacaaaaattaatttgatataattcacaaactgcttaaattatctgataacaaggtgaccagccattttcccaactaaaaatgtattttggcattgaagtcatacagcaggagaatttttactcagctgctacatacagcaggctacttataaagttaatgcctaaaatgaaaattacatatcattatagataccattgaaaagcctttaaattatccatatagtatggtgcacatagttttctgtatataacctgcacatttgagatatgattttacagtatgttaagttgtgaggtcaaatgagaatgatagagatagataatttaacataaactatgtatttatgtgatg

SEQ ID NO: 267100 - DNA, 548 bp, Homo sapiens
tatgcttttaaaaaaactgtgatacaccaacaacagaaaatataggaataaggaaagcagggctggagtgtggagaggtgagaagagctgtctgtattgacaaaagcagaaccttagaaacaactttcagaagctcctcattaaatgaaacattgttattttcttatgtcccaaatattagccaacttgaggtgaaataaagagaagtgacagactttagtctctgagcgtacatcaaatgcattgtcttgtaggaacaactcttttacttcagttacaccaccatgctctttaaattctctgttatccagtgaaactttctacttaggatatttgatcagttgattcatacccagtgtgaaatgcttgagaagtttaatttcatgtagtatcagggcaataatctctttactttgacccaaacatctttgwctatgaaaaatcactgagaacaaaggacatcccacaaaggcatcaactttgttcttccccagcttcacactgtaagaaatttgggttctccacctattcctgggttcccagggagg

SEQ ID NO: 267101 - DNA, 645 bp, Homo sapiens
gtacatctcatttgtttcccatcactaaagtatcactgttctttgttgtctgatgttcaatatctttaaaaccattgttttatgtattttgtctgttttccttaatttccagtatgaggagtaattagacccctgttatgttatctttgctaaaagaaaaagttactaggatagttttgaaattaaaagaaggcagtattaatatttatctcattacagtagagcatacatattatgtttacctttcccaaaagccaagtgaacaggaacttaaaaagaaagggaaagtgatcaatatggtcaaatatgttcaytagtcttggaaagtaatgggaaattggtgaccagagagactaatccatagaatggtggagctagaaactagattacagtgaattaatgatgaagtgggagtgagaagtagaaaaaacaagtaaagatgatattccttaaaaagttgagttgaacagtgacagacaggtactagatggcatttgtaagaaaacagaatcagagaaaagtgttgactattcaaatatttgttgatgcaaaaaagagagaaaattaaaactgactatgaatagagcagaggctgacaaaatggcccacagactggccactagtttttataaagttttattggaa

SEQ ID NO: 267102 - DNA, 615 bp, Homo sapiens
ggaatgctgtgtccttacagggcaaagccaaaaggggaagacagcaggctagctgaacactgcacggagcctcttttataatggccttgttcccattcacaaaagaggagctcttatggcctaatcacctcttcaaggctccagctgtcaatactatttattacacaggtaacacataaattttgagaaaacacattcaaatcatatagatatatattattgtaagtagaagtagaatgttgctagaaatatgagttttaaagatgaggtctcaagaaaatgaggaacatgttattggccactaaaggaaaggtaatattttttataaagtggcaaaaaacttagcttaattgtgttcttctgttaggtggaagatggaaatagtaagtgaatacttaaaaatttagctaagaacattttcaagcaaagtatggaaggtgcaaactgatttctccttgttgtttataataaaatgtgaaaagaaagatacacataaattgaagaagatacygttaatcgaataagaactggcacttactgatttgaaaattctcagcctatctagacagtgtgccatggagatagagccaaggttgtggttggacaaacttttgc

SEQ ID NO: 267103 - DNA, 615 bp, Homo sapiens
ggaatgctgtgtccttacagggcaaagccaaaaggggaagacagcaggctagctgaacactgcacggagcctcttttataatggccttgttcccattcacaaaagaggagctcttatggcctaatcacctcttcaaggctccagctgtcaatactatttattacacaggtaacacataaattttgagaaaacacattcaaatcatatagatatatattattgtaagtagaagtagaatgttgctagaaatatgagttttaaagatgaggtctcaagaaaatgaggaacatgttattggccactaaaggaaaggtaatattttttataaagtggcaaaaaacttagcttaattgtgttcttctgttaggtggaagatggaaatagtaagtgaatacttaaaaatttagctaagaacattttcaagcaaagtatggaaggtgcaaactgatttctccttgttgtttataataaaatgtgaaaagaaagatacacataaattgaagaagataccgttaatcraataagaactggcacttactgatttgaaaattctcagcctatctagacagtgtgccatggagatagagccaaggttgtggttggacaaacttttgc

SEQ ID NO: 267104 - DNA, 603 bp, Homo sapiens
tccttcctctacatctttctgtcttcattggccttttacacacagaaaactgcctgtgcatgtggtatatatcataaagtcaagaaacatgtcaaaaacagattttaaaaaaattattaaccaatgatttcctttccataaagataatgttgttggacctactgtggctatagtggcttttgaaatatttttttctgccttagatattaaagacataactcacagaacagataatataggagctaagacacaaggttagaataaatctatgcaacaaacgacatgaataccacatgatacattagaagaaaacatgtgcaaacagaccaaggataaagacatgtttaccgctagaaagtcatgggcaggtgggatagtttgttgatgarattcgaggttagatgaataaataggatgttttcagtgagggactgagtgaaaggggaagattcaaaagacattgagaagagaaaaattcacagaactggtaatggtttttaaatgtctgtgtgggcttctggtgatggttgtggtggattaaacaagtagaaactatggaaataaatatgttgagggcagtatgacaatgaatgacagtaacct

SEQ ID NO: 267105 - DNA, 609 bp, Homo sapiens
ctatctcaataccctgggcttcaagactgaacagactcctggctgttttataccttccaggtaaagactttagatcaatggctcttaaacttaagcatgcatcaggttcacgctggagggctattgaaacagatgctgagcgcaaaaggtctgattcagtatgtcggaggcatattctgagaacctgcatttctaaccagttcccaggggatgcttaggctcctgatttggaccgcactttggaaactgataaccaaatttcccctatgaatcagtcaagactattcctactgtgagtccccctccctacttacctcagttactaccatgagtttcagccttctagcagaaaacagagtccatatggctctgtatttctcctagaagctgacatacttccaaatcccttcctctgtgtcctctgtccatcagcagcattcactcctgtatcttcagcctcttctcagaatgttcattttactttcttcctttaatcaaatcctagctcactaaggccactgtatcccctcctratggtagtcttctaaaatggagaatgcttgtttttccatcctccacataccaaggtgtatagaagtaatgcatatt

SEQ ID NO: 267106 - DNA, 421 bp, Homo sapiens
catctctcaatacttccaacacattttatgtcctggagctctcctttatctaatgcaggtcttcttgccttccttgaacatataagaaatcttatttattggctacaaacaaaatcaacttccaccattttaccaatatgagaaatctatctccataaagatttgttaattatttgtttgtgtagcttttatataatagaggctytgcttatgaatatttacataattctgtatctctgtaattgagattgtgcctacatcatttccaaataaatttctaatgtattttatactgtttctgtctccatatccatattgctatgatgatattcagaaaaaccaatgttttttgtttaggtttctggttacctacttatctaacaaacattagtcattttaaaacctttgtatagcatgataa

SEQ ID NO: 267107 - DNA, 443 bp, Homo sapiens
tctggaggataaggctagtgaacaaaacagaacattcaatgtccatatggaaattacagacaaaatataattgaataaataaaaaataaaatattaatttagattaaaagttgcyttaaagaaaaatgaatcaagaaaaagagatgcagacagacgaagaaactatttacatatgatgtaacataaatcctttctgagaagataataatttaataatggcctgaatgaaataatagtaagaataggagagacagagagagagacagacagacagacagacagagacagagagagtgcaaaggcccaaagttaggaaaattcttgttttaggaaaggcaaggacattctattacaactggggaggaatgacagaacagaaagtgattaaaaaagaaaaaaaaaaaaagcactagcaaagtgctacaccataaaactatagtgaa

SEQ ID NO: 267108 - DNA, 518 bp, Homo sapiens
ttggctgaacgaccaaacaaatagaccaatgaaacagaaacaagtagatgtctacacataaattasctttatataagtagacgggtgggggtggggggaaactgtatgttataatgccacctgtggccataggagaaccattctgaagaaagatcaaggaaataagaatgaattacagaatgtgagtggagatgatgggggtgggagacttgtggccagagaagaaaaggctgctttaaaaagagggacagaggaatactgggagcaatctaaaaaacaaactcacaatggaaggtataaaaataaaataaaaggaagcttttccattattttgagtcccacaagaaacacgcaaaacaacgacttgctgtcagaatgaaactctgagtgttcccatcagaactaagttacattaaacaggagcagctctcatggtattatgctgctgtcatttcttggtaaatccatgtcattagcattgatttcttgaggagagattaaaagaggtttagttagga

SEQ ID NO: 267109 - DNA, 444 bp, Homo sapiens
ggaggagggaaagggtaaaaaggggaggtgggcgttgagcagggraaatgaggtgaggttgggtctcaattgcagagacaaacattgaaaagggaaaaacaaactggtttgtcaaatgtgacctccatgatggttttgcccttttaaaaaagagcaggaaatgaaatatcactagatgtaattcctactggtctcttacaccagccagtgctcagattaaacagggcttgctcctgtctgtgccatttgctttgatttgagtaagtagttcctagcaaatatgctacacctttttttgtgtgtgtttgtttgtttttggtcactgttgctcttggatattagaaataaggagaattactttggaaaaaaacaaacttcaatcaaagcaaattagttgacaagaaaatttgctttggtgatccagagagcagtttcttagaaaag

SEQ ID NO: 267110 - DNA, 592 bp, Homo sapiens
aactggtttgtcaaatgtgacctccatgatggttttgcccttttaaaaaagagcaggaaatgaaatatcactagatgtaattcctactggtctcttacaccagccagtgctcagattaaacagggcttgctcctgtctgtgccatttgctttgatttgagtaagtagttcctagcaaatatgctacacctttttttgtgtgtgtttgtttgtttttggtcactgttgctcttggatattagaaawaaggagaattactttggaaaaaaacaaacttcaatcaaagcaaattagttgacaagaaaatttgctttggtgatccagagagcagtttcttagaaaagtcagccctggcaaccctaaatcactttcaactaatattaattgaacatctatgtaaaaaaaaaatctgtactggacatgtgtctaaacgctggaggatgtgtgtatgggaggagtgttataaacaaatttcagaaaaagctctcttttagtattttacattgagtttttaatataagttaaatttaaataaaaacagtacttgctgttaccaatagttttcttcctagatattgaagagaagtttgatt

SEQ ID NO: 267111 - DNA, 615 bp, Homo sapiens
ctggtgcagcttctgcagctgtactaatgaacctattctctaagtacagagccattggcatagagcagccacgtgtttctatacagcacagattaattttccagggttattgaatggcccaactctaaattgtttactttcaatggtctcagatgctgggctctgttgttcagctccttcttaataaaacccaagagttccaggcttcaaactgcatctgcctttttgttttgttttgttttttcatatatttccctttaagtatctacagctttacaaggagacctggcaagagtggaggatttttcatcagtcaaagttatttcttttcaatagaccttgagattgcgtttaattatttttcacccrtgtgtttttattttatttatttattttgcctctgttgggaagcagaggaggattagaaaagaggatgaatctgcttgtacttggatgtgtccttacataaccatcaggtgtactggcaaaggaagatactgaatttgaagaaatgctggaaagcagtatccagaagataataaattagagattaaaaaatgtctggttttttgagtcaaacacctttgactttcatgaagatcataatgaatacaa

SEQ ID NO: 267112 - DNA, 449 bp, Homo sapiens
tccaaactttaatatcctcatctgttaaacaaaaatgacaacaaagaataattcaatcatgtttartgtaacttctgtgggtgatactgtattttcaaaatggcagcttctcagagaaataagaaaagaggagtgtgttataaagtttaaaaataatacagaaatgtaaacattgcagttagaaatttttagcatcatagaggttacctgtccacaggggaaggttagctttgcaaaacatccccatcttcattaacattaacatgattgagaatttcttttaaactcaagcaatatagaattttacctgtaaatgttccatgtcaaaatgagagctttaagcaggagaagatttgagagagcatgggagctttgggtgagttttgcaggacttatattaatagccttatttatttgtttcattagtgtctgcaagattatttgttggg

SEQ ID NO: 267113 - DNA, 585 bp, Homo sapiens
tgctgctcccaaatttctaacctacggattgtgagataacaaaatcttactattgttttaggctgttctctggccacatctcagttacttttgtgtatcttctttgtcttcaccttaatgttggtgtttcccagctcatcattgtggcccttttttcttctccaactgtaaaatgycttggagacatctcttccactcccatgatttcaattaccaccattatgttggtgtttcctaaatctgtattttcatccaaaatgtgtactctgaattatagatcatatatccaggttccttctggatagggccaattgggtacctcaaattcatgtctaaaattaatttcaataacaacttttcttgccaaacatatttcccaaatgggtattcacgattttgggtgatcactttatcattcaatctatcatcaaaattagaaattggcaattaaactcaacttccacgacatatataatgaatgtcagccccttctggtatttcttgcttaatatctttttcaattattttatgtttttcgttcacaaattaccaagatgtttaaaaattttataattttactcagaa

SEQ ID NO: 267114 - DNA, 606 bp, Homo sapiens
tgcaatcatatgatgctattaagcatttttttctaaaggcctgtggttaacactgtcaagacaatttctaaactaaggaattcctgacctgattttttggaagctgatgagtcacatatttatagacttagaggctttactggtgtaagtcatttgtaatgctcagtgcttgcagtttaaattagcatggcttttacagatcccttaatgtgcataatctgagccaatagtgagatggtttttagaaagatagagagttaagggaaaaatatatatgaagtgatttttgaagatttcccaagtgctggcagactaatttgaaggaccttaaccgaattctgatcagaacctctccaaatctctctgtcacacctaaatgtggccacctggccactccattgtagtattttcaaatatgactcagcaatggggatgttgaatttgggctcaaacccgactttaccctgtaaaagagaaatsgacagtgatagaaaaaagaacaagtttgattggcatttcctagcagagaatcagtgaacacatcaatcacgtgattttatgtgtatgtgaagaaataatgcttttattccaaataactgtttagca

SEQ ID NO: 267115 - DNA, 543 bp, Homo sapiens
tattttctgtgtcttgtcagggcacactgaagggaggttatagctaactgctggcagtcttctttcatgtctcccttgaacacaatacttcaagccaaaccattttgacattgctttatctgttcaggcttgactacatagagcattaagacctcagccacatgaacagggaagggaaaagatagaggttkaatcaggcaggaggatggatagaaaaattagactaactgtaaagcagcatctttaaagtagtcaactactgtgcaaactttgtaaattctgcttgattagattaagaattaatgtctgagaatgtccaatgcagagtgaggtccaaccagtaaattatgctcaaactcaaatcagtgggatgctacacgttttattatgagtggaaacaatggcttaggttagagagcaggggatgataaaatacaactagaggataaaaaatgagtacaatgtcaaaactctaccctttgaatagagcaataaatgaggatgatagctgaatcaaaataactgggccacatgacagaggag

SEQ ID NO: 267116 - DNA, 619 bp, Homo sapiens
atttccttcaccccaccctatatcatctttgcccttctcttacatagggtttcatgggactcaccttctgccggttaatgtactctatctttgtggtcctccatggcatcttaccttcaagcacaacacatgccattgggtattgttttactcaaggatggtcaggtgtgttcctctaatggctcrtggggaaaaacaatctctctgtttaatcaagggtgtcattaccaaccagatggttgaatatctagaattaatcagttattgggtacctgtagaatttaaaaaacagaaggctgccaagttaagacagccttgacaatttgtgtataccttgaaattttgtatacacattggcagaagtaatacaaactttacatcatttccatcttattatagagttgatactaattggatctcaataagccttgactctcgttaaacgatgcaaatataacctaccttttctttcccttgccaaggtttttttttttctgctgttgttgctgtttgttttgatgtgttttatgttattttgtattatttggatttgccataccatggttacaaacagaagaggttaaaatattcttgaaaatgcatcaataaataatttatg

SEQ ID NO: 267117 - DNA, 619 bp, Homo sapiens
atttccttcaccccaccctatatcatctttgcccttctcttacatagggtttcatgggactcaccttctgccggttaatgtactctatctttgtggtcctccatggcatcttaccttcaagcacaacacatgccattgggtattgttttactcaaggatggtcaggtgtgttcctctaatggctcgtggggaaaaacaatctctctgtttaatcaagggtgtcattaccaaccagatggttgaatatctagaattaatcagttattgggtacctgtagaatttaaaaaacagaaggctgccaagttaagacagccttgacaatttgtgtataccttgaaattttgtatacacattggcagaagtaatacaaactttacatcatttccatcttattatagagttgatactaattggatctcaataagccttgactctcgttaaacgatgcaaatataacctaccttttctttcccttgccaaggtttttttttttctgctgttgttgytgtttgttttgatgtgttttatgttattttgtattatttggatttgccataccatggttacaaacagaagaggttaaaatattcttgaaaatgcatcaataaataatttatg

SEQ ID NO: 267118 - DNA, 619 bp, Homo sapiens
atttccttcaccccaccctatatcatctttgcccttctcttacatagggtttcatgggactcaccttctgccggttaatgtactctatctttgtggtcctccatggcatcttaccttcaagcacaacacatgccattgggtattgttttactcaaggatggtcaggtgtgttcctctaatggctcgtggggaaaaacaatctctctgtttaatcaagggtgtcattaccaaccagatggttgaatatctagaattaatcagttattgggtacctgtagaatttaaaaaacagaaggctgccaagttaagacagccttgacaatttgtgtataccttgaaattttgtatacacattggcagaagtaatacaaactttacatcatttccatcttattatagagttgatactaattggatctcaataagccttgactctcgttaaacgatgcaaatataacctaccttttctttcccttgccaaggtttttttttttctgctgttgttgctgtttgttttgatgtgttttatgttattttgtattatttggwtttgccataccatggttacaaacagaagaggttaaaatattcttgaaaatgcatcaataaataatttatg

SEQ ID NO: 267119 - DNA, 596 bp, Homo sapiens
tattatatggtaaaaggaaaccatctacctttgtgaaaagttgtgtatttttatttcaacaatctatcacactaactacaaaaccctggaagacaagacaaatccaagcctctggccagcagggttatggatatgggcatgtggaatttgggtccaacttcaggaaaatggcaaaatcaaaggtaaatgcaggaaaattaaacagatcttgaagaaggcatttagaagcacatcatgattaagtcgtggatcaccagtgatcttcatactaactagaaaagtttaggcaaacagaaacgataacatctcttaaaagaatcatggctagaggcaaagacaagcwtatctctcaggctggaaaggtccagcctaaacagagtgaacttggtctctacacttatttgcaactagaagctttgaataccctgagtattcaaacacagcacaccaggacagaatcagcccagtacaaaggccttccttctgaccacatcaaacctctccctaaatgccaagttacagatgaacagaagacatttgtctctaaagttttagagccaaacatacaaaacacaaacaaacaaacaaaaaacaaa

SEQ ID NO: 267120 - DNA, 595 bp, Homo sapiens
gagtgaaaacagattttgttaaagtattccaatcatatggtattaacctattatcaagagccacattttttaacaaagtttgcacaaaaggagagtttggcccatgttgactaatggcctgcttgaattcctttaacaacttaaatgaaaaggtggcccaattagctatattctgtcctmcttgctggattatagtaactggaaattgccatacttcaaggtctccgtcggctccagccttttgaatagagttttgtatggcaccaccaattgctccacgttttaatgttgcaactacaggaacggtaagttttgcagctaattcatcttctcacccattaaggggagagggaggaagtggtcattcacttatttcagcaggtggagctgacgggctagtaaaacatactttttctgtttccctttttctttaatttcctccagtttctgttcttcacatttagaatctgaagttagttttttacactcgtcctccccttcctcatgtgaatctgcctcatcatctgtttgaaatggctcaagagctgcctttattggtgcccacattgaccacatggaaactggaatttttgcc

SEQ ID NO: 267121 - DNA, 595 bp, Homo sapiens
gagtgaaaacagattttgttaaagtattccaatcatatggtattaacctattatcaagagccacattttttaacaaagtttgcacaaaaggagagtttggcccatgttgactaatggcctgcttgaattcctttaacaacttaaatgaaaaggtggcccaattagctatattctgtcctccttgctggattatagtaactggaaattgccatacttcaaggtctccgtcggctccagccttttgaatagagttttgtatggcaccaccaattgctccacgttttaatgttgcarctacaggaacggtaagttttgcagctaattcatcttctcacccattaaggggagagggaggaagtggtcattcacttatttcagcaggtggagctgacgggctagtaaaacatactttttctgtttccctttttctttaatttcctccagtttctgttcttcacatttagaatctgaagttagttttttacactcgtcctccccttcctcatgtgaatctgcctcatcatctgtttgaaatggctcaagagctgcctttattggtgcccacattgaccacatggaaactggaatttttgcc

SEQ ID NO: 267122 - DNA, 476 bp, Homo sapiens
gggacatacttgagaaccgctgactaaaacaagctaggtccacctgtgatggactagcaggtaaaagatgagacgcactttgtgtcataggtgaaacctactctcaattcacaagatctcagawtgaatgaattagaaagcacaaatgaaataaaaaatatttttgttgctttgaacaaattcatctttatttctaggcctggatttctatttaacaccattattagtctatgtgataacaacacagggtggcaatgtataagtattatgaattaactaacacaattaaggaggctgtattttatatactctcacttgactaaatagtctcatgacagcaaaatctgtaggctattctcccaggcatgcatgtagtgctagctctctctactcagaactctaaaggtggtgcttcctatgaagccaattaacaacacagaggcaggtaatatgggctcctctgattagattcagat

SEQ ID NO: 267123 - DNA, 502 bp, Homo sapiens
cgccaccacgcccggctaattttgttgtatttttgtagagacggggtttcacagtgttagccagaatggtcttgatctcctgacctcgtgagccgcccgtctcggcctcccaaagcgctgggattacaggcgtgagccaccacgcccagctaggaggttgttctgaagtacctctcaagcaagatgattagaagttgtggcatttgcccaaataacttggcttttgctgcttcactgaaaacaacgcaggctaaattggcttgcagaaaatcagatatattcattcaattgttagaagcccattctccagcaatggcttcagtattctttcaagattctgaaacttgacccaatgacatctcsaacagatgccaatactatcaagataaccatggcaactttatctccaaaaatgtacttaagatataatttgtgtagtatctgaatgtctagtatgcctaagacactgtcaacagattaaaatgctgagttagaatgttaa

SEQ ID NO: 267124 - DNA, 590 bp, Homo sapiens
ccacaaataaatgagatttacagtattgtcttactgtgcttgccttatttcatttaatacccagtgaccactttgagaatctcatgggaactatggaccttcactctcctttccatttgcacatgtgtttgcatgtgcaatgttatagttgattttggggggaaggctcatgaacccaggttaaattcctgtcttgttccctttcatataacacttacaatctttctggtgttcacattatttgtaaataagatgttttcttctagatgatgatgatgatgattattattttttgagacagagtcctactctgtcgcccaggctggagtgcagtggtgcgatctcggctcactgtaacccctacctcccaggttcaagcgattctcctgcctcagcctcccgagtagctgggattacaggcatgcaccaccatgcccagctaatttttgcattttcagtagagacggggtttcaccatgttggtcagrctgatctcgaactcctgacctcaggtgatccgcccacctcggcctcccaaagtgctgggattacaggtgggagccaccgcacccatccttcttctggattat

SEQ ID NO: 267125 - DNA, 616 bp, Homo sapiens
aaagggcccttatcctaaattcagatttgggctgtttgctgaagccttactactgagcagaccaggaggttatctgttcgttctttgcctgagactgtactaattactayagactcctcaagtcttcagactcttggccttcttgtatgcaaagtacagacctggcaaaccctggctggcccttggggttcccagaccaacaccttgcactttctcccaatcaagtctcttgtctatctagtcccgtatttctttgctgcccacaggacaaaagggcaatgaggaacaataaaaataaaggctttattaaggctgagaaaaacaaaggagaggcaacctcaatacctttttaggagtttaatttatataacgttaacaaatcgcaaccatacattgatgaatttttgtacaaccaccctcactttttcattcaaaaatgagatcacagtctataaggaagctacagattatactcttcaattttataaaaggcatgtaattagagactagaaagtaaaaaagctccaagaaaacgaaaatacacaaattcagtttagtgtcccatagcacgtatggcatggtaacagataataactgacacatttaatcagaagta

SEQ ID NO: 267126 - DNA, 537 bp, Homo sapiens
tcaagtcacactggaaaagttagctacaaccttgaatgtaggtatctgcaggctttgcctaggacagagctgtactstgttcatttaatctggcagtgatgttttaactgaattggggtgtggaggtgataggaagccaagagactagttaagaggccatcagacgggttcaaggcagacagagtaaaggcctgaataaaggatggctgctagggcttgggaaggaggagacattgttgagggatgacgcagggttagaattgttgggagactgaagacagacagagccaaaaatgtgaccagggacctaacagcgtctttctgcaatttattctcatggacttttcaatacttgtaagtgtttttgtgtcattcacaaacattacaattttaccatatttactatgaaattttactataaaatcaaaatgaattattgtaatgtcaccaacgattgttctagaactagcttagtcaagtcacttaaactctttgtaactgtttcctcatctgtaaaattggtatcacactattact

SEQ ID NO: 267127 - DNA, 537 bp, Homo sapiens
tcaagtcacactggaaaagttagctacaaccttgaatgtaggtatctgcaggctttgcctaggacagagctgtactgtgttcatttaatctggcagtgatgttttaactgaattggggtgtggaggtgataggaagccaagagactagttaagaggccatcagacgggttcaaggcagacagagtaaaggcctgaataaaggatggctgctagggcttgggaaggaggagacattgttgagggatgacgcagggttagaattgttgggagactgaagacagacagagccaaaaatgtgaccagggacctaacagygtctttctgcaatttattctcatggacttttcaatacttgtaagtgtttttgtgtcattcacaaacattacaattttaccatatttactatgaaattttactataaaatcaaaatgaattattgtaatgtcaccaacgattgttctagaactagcttagtcaagtcacttaaactctttgtaactgtttcctcatctgtaaaattggtatcacactattact

SEQ ID NO: 267128 - DNA, 522 bp, Homo sapiens
caatgtcatgataaaagggcaaataaatattaaaatttattgagaaaacaaatttaaagcaaaacggcatgcgcttctcaagaaagaataaggctctaagcaataaattttcaaaattaamattttttaatgacagatttcacttagaactagtggcatttgattctagcagagactcaatctacagacagaaattagtgcaaacactcaagactaagaagcataaagaagagcacttgcctggtgtttcactggtttaggcgattcctgctgttcattacaaacagacaaatgcaaatgttagcaagtttgagtctttgcctagcagtaagccatttccaaagcaccaagccaatgtgcagttgagaactgtggaagctgggttggctggcgttctctcaggctgtattaactaccacttctgcatgtctaaaaattaaggagaactgacatttctattcttgccctttttctgtcatcacttcttcccatatctctaccctcccctcaagctgctgtggg

SEQ ID NO: 267129 - DNA, 656 bp, Homo sapiens
agcataatgagacccacatctacaaaaaaaacacaacaaatcagctgggtgtggtaactcccacctgtagtcccagctactcaggaggctgaggtgggaagatctctcgagcctaggaagttgaggctgcagtgagctgtgattgtgccactgcaccccagcctgggcaacagagmaagaccctgtctaaaaaaaaaaaaaaattgtactatttgaagtgtccaaaacttaaattttttggtagtttactgaaaaattactggttgcattatcttcttaactctgcacccagataaccacaaactcaaccgcagggaagactgggtgaaggaaccctagtgaccaactgtttgcctcagtaaagaaattttcttctctgggcctcagtatcccaaatctgtaaaatgcaggcattggattagatcctttctagctccaagagctgacaattctagatataacccacttaatggtttataagactatttcctatgtgaagcttattaaccacccctcatgttatcgtaacattagttcccttctgatttgccacccacaagtgtttgaatcttaggtactccaatctaccaaacttttattttaaggtttctgcccactattcatgctaaaagaggcctttctggcaaccaagatta

SEQ ID NO: 267130 - DNA, 390 bp, Homo sapiens
gctacctgttcagttttccttcatgctccagcaattcaaagcrttgtctctgcgggacatacctggtaaaataactgaccactgggtatttccaccttggagtcctccctgcacccccacactcaatgtgccccaaacccatatgaaattggctcttctccctccttattttcttgtttctcttgtgattggaggttattttgtgatattgatatatctcccttcccttctctgtatttttctctttcttccccctccatcatattttgttcttgctacagggaagaaaagcagaagtttgggtcttttgctgtgggaaagggaagactattttatgtagggtgaccaaggaagggtcccctgagtgaagaactttgaaggataaatctg

SEQ ID NO: 267131 - DNA, 631 bp, Homo sapiens
tatgtaagtttgcagcttagttgacaatatgtgaattgaagaaaataccttttcctgactcttgccttttyctgactctgtagaaaggctctagcaaggtgttcagaaccactctttctatcagaatgggaagttcttgcatgtatagcagtgaaagagggatcccaacttagatattagatacactcccatacgagcattggagatgtaaacagaagaacccaagttcacaaaaaggaaggaactgtgaatgaggaaaggaaaggtgcaatccagagggtctgagggatgctattaaatgatgttgtatctggggacctaaggatatccctccctccaaatctatacatctatctatctatatctataaattgttatataatcattagggtttggtccaagcctcaatgtaataatctgataagctggtttgggaagcatgactagtaatggggattcttatttccctaagtatcaaataatctcagcctaaagtagactatgaggcctgctctgtataatcccccttctcccaattccccacaatactgccccaatacaaccacatattctagagctaactttaaatgtcagtgccagagaattccagaaggttttgtttaaaaaccat

SEQ ID NO: 267132 - DNA, 631 bp, Homo sapiens
tatgtaagtttgcagcttagttgacaatatgtgaattgaagaaaataccttttcctgactcttgccttttcctgactctgtagaaaggctctagcaaggtgttcagaaccactctttctatcagaatgggaagttcttgcatgtatagcagtgaaagagggatcccaacttagatattagatacactcccatacgagcattggagatgtaaacagaagaacccaagttcacaaaaaggaaggaactgtgaatgaggaaaggaaaggtgcaatccagagggtctgagggatgctattaaatgatgttgtatctggggacctaaggatatccctccctccaaayctatacatctatctatctatatctataaattgttatataatcattagggtttggtccaagcctcaatgtaataatctgataagctggtttgggaagcatgactagtaatggggattcttatttccctaagtatcaaataatctcagcctaaagtagactatgaggcctgctctgtataatcccccttctcccaattccccacaatactgccccaatacaaccacatattctagagctaactttaaatgtcagtgccagagaattccagaaggttttgtttaaaaaccat

SEQ ID NO: 267133 - DNA, 455 bp, Homo sapiens
agatatgctaattaccctgatctgatcactatacatgtatgcaacatgactatgtaccctataaatatgtamaatgtatgtcaattaaaattttttaaaaagcactcataaatgtataggtaataagacaggattttggtggaggtggccatgttaaactttgtgaatcttacaacgttccctgggataaaaaggaaattatttgccctaagaagttgaagggatgtttttggactgagactaataattattcaaaaaagtgaggttaacttgacagattcctgtctgctgaacagggagcctgcccttttctcacctccagagaagtcatttttcatcagaggagaaacctgtcacacctttgggctgccaagccataaatcttctttccaccaacttgctaatagtttttcttgccacctttcctgataatccagagtaattgttatgaaata

SEQ ID NO: 267134 - DNA, 527 bp, Homo sapiens
tcctggaaaagagccatcaacagttgtgaatgccactcagaggcccagaagggtgaagatgctttggattgagaggcctggcggttattagtgactttctagacagctatgtggtagggtagtgtgggagagtacaccaggccagyagaacatgatggaatggaggcagaaaaatgttataactctttttaaaagcttggtagagaagaatctggaatagggcagtaactagcagggaaagaaacatggttcattttgcctttgacagaaaatgctaaaagagtacttatggctattggtaagaattaagtgaagtatgaaagtaatgatttatgttccaagttcaattatactttattaattttgcctgcaccttttgtgtatagactgagcaaatgttgaaagttttactaagcacagggtagcagaagaacatgaactacgtcctggacctgtcatgtatagattaagttatttaatagctttaagcttcagtttcctcatcctacttttcaggattattgcaa

SEQ ID NO: 267135 - DNA, 611 bp, Homo sapiens
cctgtctttcatttcttagaattttacatctgacagcttcttaaagatgacattatctttggctgttttgctagaggtaaagtgttcattatacggggacttttgctctcttgtgtgtgattcagcctccaccaagaatgtcacatcaaagaaggacagtgaccaaatgaaatacgtacagagggagagtgctaggggaaaaaaagggtgggggagaggtctgaatatgggaatattcagggttggtaggttggacagttgtctccgcatagttatagaaaaatatttagagttagtccatgtgacccagagaataaagggatcattaacattggttatatgaaaatattttagcaatcagtatagcagaaacaagaatcaattagaaaggatattggctgtaggtccaatgtagagccctaggagggcctccttgctgtactagacgtgaagcctttggtttctggatcatgrcaaagttagacattcctcaggaaggtgctggggttttagggtagcaggggttgctggggggaggtagtttgggcagtggttatctaacactagtacagaggtgctttataactgacaaacattcactagcacctgct

SEQ ID NO: 267136 - DNA, 573 bp, Homo sapiens
tccttttttctctagtcttgtctgtatgccttatttcagcaaggtggtctttaaaactctgatatcctttcttctgcttggtcgatttggctattgatacttgtrtatgcttcacaaagtacttgtgctgtttttcagctccatcaggtcatttatgttcctctctaaaatggttactgtagttagcagttcctctaaccttttatcaaggttcttagcttctttgcattgggttagaacatgctcctttagctcagcatggttttgtattactcatcttctgaagcctacttctgtcaattcatccatctcattctccatccagttctgtgctcttgctggagagagatcgtgatcatttagaggagaaaaggcactctggccttttgagttttcagcatttttttcttatcttcatgagtttgtttagtttcgatctttgaggctgctgacccttggatagagatttgtgggtgattttgttgttgttgatgatgctgttgttgttgctttctgtttacttttctttcaatggccaggtccctcttctgtagggctgctgcagtttgttgg

SEQ ID NO: 267137 - DNA, 600 bp, Homo sapiens
ttaccaattaagctgttactcctcattctgtcttcccttcagtccctggtgaccaccaatttgatttctgtttctgtggatttacctattttggatattttatgtgaacagaatcatacaatatgtatttgtgtctgatctgtttcacttagcataatgtttgtaagtttcatccacttccagcacgtatcagtagtccgttccttttrtggctgaatgagatcatggtatgcaaatatcatgatttgtgtatctatccattgatgagtatttgggttgtttccaccttttggagattgtgttacttgagcatttgtgtataaagatttgtttcagaggttgttttcaattcgtttgggtatatacctaggagtagaatttctgggtcatatggtaattctgtgtttccctttttgaggaactgtcaaactattttcttggtaggaggtttttgaaccctgggaaatcacttgctcaatttggatcattctcttcttcagtttttcccttgagtagcttcctctctggataaaatatgcagggattttagtggcatgtgagaagaggcactgactagacaggctacagtttcctctcatc

SEQ ID NO: 267138 - DNA, 600 bp, Homo sapiens
ttaccaattaagctgttactcctcattctgtcttcccttcagtccctggtgaccaccaatttgatttctgtttctgtggatttacctattttggatattttatgtgaacagaatcatacaatatgtatttgtgtctgatctgtttcacttagcataatgtttgtaagtttcatccacttccagcacgtatcagtagtccgttccttttatggctgaatgagatcatggtatgcaaatatcatgatttgtgtatctatccattgatgagtatttgggttgtttccaccttktggagattgtgttacttgagcatttgtgtataaagatttgtttcagaggttgttttcaattcgtttgggtatatacctaggagtagaatttctgggtcatatggtaattctgtgtttccctttttgaggaactgtcaaactattttcttggtaggaggtttttgaaccctgggaaatcacttgctcaatttggatcattctcttcttcagtttttcccttgagtagcttcctctctggataaaatatgcagggattttagtggcatgtgagaagaggcactgactagacaggctacagtttcctctcatc

SEQ ID NO: 267139 - DNA, 600 bp, Homo sapiens
ttaccaattaagctgttactcctcattctgtcttcccttcagtccctggtgaccaccaatttgatttctgtttctgtggatttacctattttggatattttatgtgaacagaatcatacaatatgtatttgtgtctgatctgtttcacttagcataatgtttgtaagtttcatccacttccagcacgtatcagtagtccgttccttttatggctgaatgagatcatggtatgcaaatatcatgatttgtgtatctatccattgatgagtatttgggttgtttccaccttttggagattgtgttayttgagcatttgtgtataaagatttgtttcagaggttgttttcaattcgtttgggtatatacctaggagtagaatttctgggtcatatggtaattctgtgtttccctttttgaggaactgtcaaactattttcttggtaggaggtttttgaaccctgggaaatcacttgctcaatttggatcattctcttcttcagtttttcccttgagtagcttcctctctggataaaatatgcagggattttagtggcatgtgagaagaggcactgactagacaggctacagtttcctctcatc

SEQ ID NO: 267140 - DNA, 600 bp, Homo sapiens
gggagaatgagtcttcagatgatctctcattatttttcaattaaattttgttttaaaattatataaggaataaatttttcaaactcaacagtcttccacatggttataacygttttgtttgttttctgcatggttattactgttttatttggcatgcatccttccatttacctgtatagattattaacatatataatttcattgtgtgagagtaacaattttatatgattggtatatactggatgtgatattctccaacttgcttcttctgtgtgttttgttttgaagaatttggcatgtcagtacttacagatctgcttcattcactttaacatctgcttactatcccatttcatggataacatgctgaagtccctgcaattgttcatcaatacaagcaatgtcaccgcagacatccctgactgtggcccctcaaatacaaatcacagtgattctccaaggtaataacaagaagagtaactgctgagacaaatggcacaatatatttccattgaaattttaatagaactatattagttttctattgctgctgtaataaattaccacaaacttagtagcttaaaacaatacaaaacctat

SEQ ID NO: 267141 - DNA, 600 bp, Homo sapiens
gggagaatgagtcttcagatgatctctcattatttttcaattaaattttgttttaaaattatataaggaataaatttttcaaactcaacagtcttccacatggttataactgttttgtttgttttctgcatggttattactgttttatttggcatgcatccttccatttacctgtatagattattaacatatataatttcattgtgtgagagtaacaattttatatgattggtatatactggatgtgatattctccaacttgcttcttctgtgtgttttgttttgaagaatttggcatgtcagtacttacagatctgcttcattcactttaacatctgcttactatcccatttcatggataacatgctgaagtccctgcaattgttcatcaatacaagcaatgtcaccgcagacatccctgactgtggcccctcaaatacaaatcacagtgattctccaaggtaataacaagaagagtaactgctgagacaaatggcacaayatatttccattgaaattttaatagaactatattagttttctattgctgctgtaataaattaccacaaacttagtagcttaaaacaatacaaaacctat

SEQ ID NO: 267142 - DNA, 571 bp, Homo sapiens
caatagtaatatactagctattgtgtttactattattatggttaacaattgtagagcccaatgtttattttccaggcaccgtgccaaagattasacatgcactgcctcattacaatagtcctaagaaaatgacaacattagagttccattttacggatgagaatgttgagatacacagaaggtgtgtaacttgtccatggttccacagtacatgtccagatattcaatcaaagcttgtacagtctgacttcaccagcttgttttctacacagcatgtaacaggctaaataggggccctttccattcttttatcttgctaacttttaacataattagtgctgcctcattaaagaagtcagcctggggctccttttcattgtgcatgcagttctgagcttaaacggtctcattttctttcattttttgggttctgtacagttctcaatgactatattttgtttcatctgaaggtttattacccaaaaatcctaaagataaggctaggtccacctcactcccaaccttggaaaagcagcggaaatcagcattggcatgtgattttctacccacc

SEQ ID NO: 267143 - DNA, 571 bp, Homo sapiens
caatagtaatatactagctattgtgtttactattattatggttaacaattgtagagcccaatgtttattttccaggcaccgtgccaaagattacacatgcactgcctcattacaatagtcctaagaaaatgacaacattagagttccattttayggatgagaatgttgagatacacagaaggtgtgtaacttgtccatggttccacagtacatgtccagatattcaatcaaagcttgtacagtctgacttcaccagcttgttttctacacagcatgtaacaggctaaataggggccctttccattcttttatcttgctaacttttaacataattagtgctgcctcattaaagaagtcagcctggggctccttttcattgtgcatgcagttctgagcttaaacggtctcattttctttcattttttgggttctgtacagttctcaatgactatattttgtttcatctgaaggtttattacccaaaaatcctaaagataaggctaggtccacctcactcccaaccttggaaaagcagcggaaatcagcattggcatgtgattttctacccacc

SEQ ID NO: 267144 - DNA, 571 bp, Homo sapiens
caatagtaatatactagctattgtgtttactattattatggttaacaattgtagagcccaatgtttattttccaggcaccgtgccaaagattacacatgcactgcctcattacaatagtcctaagaaaatgacaacattagagttccattttacggatgagaatgttgagatacacagaaggtgtgtaacttgtccatggttccacagtacatgtccagatattcaatcaaagcttgtacagtctgacttcaccagcttgttttctacacagcatgtaacaggctaaataggggccctttccattcttttatcttgctaacttttaacataattagtrctgcctcattaaagaagtcagcctggggctccttttcattgtgcatgcagttctgagcttaaacggtctcattttctttcattttttgggttctgtacagttctcaatgactatattttgtttcatctgaaggtttattacccaaaaatcctaaagataaggctaggtccacctcactcccaaccttggaaaagcagcggaaatcagcattggcatgtgattttctacccacc

SEQ ID NO: 267145 - DNA, 504 bp, Homo sapiens
aaaagcaagtatgtcattttcatgtgggagcatttcattgccggtgttctgttcaacctttccttttttttcagccattctgattgttctgattatggcagtgcatgtgtaaatcagtgattctcaaccaggggtgatttttgcttcccatgggacattggaaatttctgcagatagttkgggttgtcaccacgggggaggtggtactactggcagctggtcggtagaggtcagagatgctgctaaacatcctgcaatgcacaggacttccctcacaacaaagaattatctggccccaaaatgttaatagtgctgaggtggagaaccatttgtctcgatggaggctccatccacccatgtccctgagtaaccataatgggcaaatcccttctgctaacctgcagtgaacataagtttgaatgaaaaacaaaccttggttgtatcgagccactgataaatgtgagatgcctgttactctgacataagctcattctgactgataaa

SEQ ID NO: 267146 - DNA, 531 bp, Homo sapiens
cactgaattgttccataaagccgagtatttcacacgtgcctcggaggtgtgcaggggtagctagcagactcccgtgatcaagtgcacatcattctggattactctttgcattccacctcgtcctctgcctgtcctctcagcccacacagattgtgttccatacagaaccagtcactcatcaatccctccaaatccatgctccttgactattgtttccactgcttggagagggtttccacattcagtgcgcctggtaaaagcctagttctttttaaagatgctacccaggttcatctmcctgtgtgagaccttctcacccattaccatccaggcaaagttgctgcatatttccctctgtacacccattatatgctctattcttaaactatttgtcattctccatgaaaatgaccaatttccatatttctcttccccacaaaactgtgacatgcttgggagcaaagatcacctctcactcatctttgattctcaatacccagcccctggctgaaggaggctttgcaaagcata

SEQ ID NO: 267147 - DNA, 534 bp, Homo sapiens
tggaatgccttgtgctttgcaaaggcaagtatattttttgagaaatgtttcccaggtgagtgtatgtgtatacaatctacatattaaaacgggttgcaatraagtttaaatgacatcaggtcacatgatttctaaatttcctttcaactccagcttttttattccatgaatgagccaagaagaagacagagacatcctcagaaccagaaccagaggatatcaatggcttgctctgctcatagtcctattttatattggagccacatcagagaatatttataattactgggcatgccacaaacagccaatctatttcctttgccaagaatatccctcctttcctccccatcttactctgaccgcttggtacctggtgaagtcccacagatccctgaagagccagttcaaatatcactttgtcaatttccccaaggccccaggcagaatgaactgctgcttcctggatgggccctgcaactctgtacataaccctctaccaacactttttgttttatttgaggcagctgtttatgt

SEQ ID NO: 267148 - DNA, 534 bp, Homo sapiens
tggaatgccttgtgctttgcaaaggcaagtatattttttgagaaatgtttcccaggtgagtgtatgtgtatacaatctacatattaaaacgggttgcaatgaagtttaaatgacatcaggtcacatgatttctaaatttcctttcaactccagcttttttattccatgaatgagccaagaagaagacagagacatcctcagaaccagaaccagaggatatcaatggcttkctctgctcatagtcctattttatattggagccacatcagagaatatttataattactgggcatgccacaaacagccaatctatttcctttgccaagaatatccctcctttcctccccatcttactctgaccgcttggtacctggtgaagtcccacagatccctgaagagccagttcaaatatcactttgtcaatttccccaaggccccaggcagaatgaactgctgcttcctggatgggccctgcaactctgtacataaccctctaccaacactttttgttttatttgaggcagctgtttatgt

SEQ ID NO: 267149 - DNA, 576 bp, Homo sapiens
ggcactagttataagatacacattcctgagccctaccaccaaactaaggactcagtatccacattttaaataatttttttatgtagatcccatgaaaataaaatgtgaaaaccatgtattttaaaaatactggcaaccagtggtattgttactgaaactttaaacataccctgtattagtccattttcactctgctgataaagacatacctgacactgggtaatttataaagaaaaagaggcttgatggactcacagtttcacatgactggggaggcctcacaatcatggcagaaggcaaaagtcacatcttacatggcagcaggcaagagagaatgagagccaagtgaaaggggaaaccccttataaaaccatcagatcttgagagacttactcactatcatgagaacagtatgggggaaaccacccccatgattcaattatctcccactgggtccctcccacaacatgtgggaattatgggagctaggagctgcacttcagatgatatttgggtggggacagagcgaaaccataycattctggccctggcccctctcaaatctcatgtcctcac

SEQ ID NO: 267150 - DNA, 591 bp, Homo sapiens
tattgtatttcttagtatatctgagtaaagtacaaataaatctacaaacttgactttctataacattacttcagtctgtatggccagtaaacaagttgtaaaatcattttgcttacagcttatccataatgataaaatcaaaataaattttaaaacttcagatcaraaacattcatagaatatggtagatattgttttgttttgttcacccatgatttctttctattatcataactgaaatcttcagtaatgattctagaattcaagtgggtaaaaacactctaagtcaaatgaaaatccttttaaaaaacattcttaagtataaggaaagtgcacaaatcacaagtatacatatcaatgatcttttcacatattgaatgtataatgcaacaaccatcctggtcaaatggtcaaaaatagaactttatgagaattctaatagcccaattccatacccttccccaatcactatgcttcttttccacccagtcttagttcatttgtgttgcttgaaaggagtacctgaaatggggcaatttataaagaaaagaggtttatttggctcacagttctgcaggctgtgcaagaagc

SEQ ID NO: 267151 - DNA, 617 bp, Homo sapiens
gcaaaaaaagactatttaatttgttattcccctgactctatacatttattatatttactattattttcaatggcaaaaaccacaattacttttgcaccagtatgatgcctttttagctgtgcaggacttccagtatagtattaaataaagtagttgacattattttcttgcttgacttctcggaaataaactttttgtcatatcttcattaagtatatattagttcatcatatatattactgatcagtttaaagatgtatcctttgttactaagctgttaaaagtttttctcattagtggatgttgaattttactgaatgctctgcctctactaaawttattatatgtttatttttttccttattcttttatgtctggtttctttaacacttggtgaatttactcatctttttgttacatgtaatcaccagtttgttcttttttattgacaagtagtataacggtaggtatgcaaagttctttgttcattctcttattgatgaacatttgagctgtttccagtttggatctgttaagaataaagcatttgtagacattgtgaaggctttttgtgaatatgtgccttcatttttcttatataaatgcgtagaagtgga

SEQ ID NO: 267152 - DNA, 617 bp, Homo sapiens
gcaaaaaaagactatttaatttgttattcccctgactctatacatttattatatttactattattttcaatggcaaaaaccacaattacttttgcaccagtatgatgcctttttagctgtgcaggacttccagtatagtattaaataaagtagttgacattattttcttgcttgacttctcggaaataaactttttgtcatatcttcattaagtatatattagttcatcatatatattactgatcagtttaaagatgtatcctttgttactaagctgttaaaagtttttctcattagtggatgttgaattttactgaatgctctgcctctactaaaattattatatgtttatttttttccttattcttttatgtctggtttctttaacacttggtgaatttactcatctttttgttacatgtaatcaccagtttgttcttttttattgacaagtagtataacggtaggtatgcaaagttctttgttcattctcttattgatgaacatttgagctgtttccagtttggatctgttaagaataaagcatttgtagacattgtgaaggctttttgtgaatatrtgccttcatttttcttatataaatgcgtagaagtgga

SEQ ID NO: 267153 - DNA, 654 bp, Homo sapiens
taacataaattagtactactttccagacagtacaggaactttaaatatattagcccttataccctagtcctttccaacttacataattttattgccatatgttttgattcaatgtatgtttaaaattatgtaatatgtgttattattgtcttatacagttaattttccctcatgtatttgccttttctattgttctttctaattttggcatttttgttcctctatctggaatcatattccttctctctgaagaactttactatttcctttagtggggtctgctgatggccaattttaggcatttactttcttttaactcatggcacatatcgctctatggttgtcaagcttgtggtttttgttttctgttgaatgagctgccaattttacttttattcctttgaaggtaatatttatttttttctctggtttttaatattttccttctgtttttagtttccaatagttttactatagtaggtctagatttattttctttatatttattctgyttgggcttcatagtacttacatctgtggcttgatatttttgtcaattccgtatatattagccgctatctctttaaacatcgcttcttccttattttcttctgtccttctttttaggatttcatttacgttagacctttacat

SEQ ID NO: 267154 - DNA, 661 bp, Homo sapiens
attttatttgctaaagcaagttatatggctatgccttcaggagccagagagatataattatcccaagttttcagaggagaaataggaacacatttatgagcagtaatgacttcacgttttccatgctattttataaagacgggcataaatgggaatactaagaatggaaattagctagccatctgctatggtctgaatgtttgtctcccctaaatttgtgtgttgaaattctaacccccaaggtgtaggtattaagaggtgagaccttttgggaggtatttagctcataagagtggagccatcacaaattggattagtgcctttataaaagagactcaagggagctcatctgcccctgccacgacgtaaggacatagagagaaagtgccatccacggattaggaaatagaccctcatcagacatccaatctgccagcatcttgatttgggkcttcccaaccccagaactgtgagaaataaatttctcttgtttataagctactccatgtattttgttatagcagcctgtgatggtttattttatgtgtcagctttactgagtgaaggaacacccagatagctggtgaaacattatttctgggtgtgtctgtgagggggtttctgaaagagactggaatttgaatcagtggactgagtaaag

SEQ ID NO: 267155 - DNA, 532 bp, Homo sapiens
gcaacttgcctgaagttggtggaactgagatttgaactagaaagaacgattctaacacctggtttcttaactactctgttagggcatcagtattttaaaaagcacttcctgggttgaatctgaagttcagccagaggtgaaaccccatgtgactcagttattccacttcctgtgcctcagtttcttcctctgaaagtgagagaagtgaggtttagaactgtgggggatatgtgagaagataaattgagatgcctattagcatttggtgggcaactttgagggatgctaaacatcaagggatgctgakgacttactgcctgaggaagaattttctcgcccaaattgccaataacatcccactgattacaagacaccctatggctctcaaaatctgtgcatgggtgattataaattctactgagtgctaaaggaggtggaactctttccttcaatactgaatggactattctactttaaacatttaaccagtaagctgtagaagagacaggcaagtctgcaggttgaccttctg

SEQ ID NO: 267156 - DNA, 422 bp, Homo sapiens
gctgcctttccctagaagccaaaatttctaggaaataaatgaactgcaatgacaaagcagcacattttcccatgttctttgctcttgatccctacctactcttttcccggaaatagacaataaagccaccaggatacctgagacagccttggtcatctttgtaccgtagccagcaccatggatttttgcctagttactttcccatcagattttaacagaaagaacactgtatttgccagctcagtacagcatatctctggctctgttttctccccagcaggaatccgagggtctgtctctgtatgtgttatcatcagactggtaaagagttacatgtgtcagcacagaagaaaagagctttgatgtgagttcagcatgtaagaaagccttcaytgctgtcatgctttcaacaggttccccac

SEQ ID NO: 267157 - DNA, 594 bp, Homo sapiens
ataacaatgtaagaaacatagatggtgttgtgaaaggtcagagaactcatgactgattgttgggattgtatcactaggagtttctttaagtatagcagagcaagagaggtagaaggacacatgactttcatcccccttccaacaacaatgttctgagaccataggcttaatctagtcaagtctgcttgactttctatagagtgggtttctgaaggttttgatgatctcaccatgggatgggaaggaaaggacagctacttttagctagtttgtgtactgccagtgttaaggcaagaaagagaaagtaaaaatctactagtaactaacaaaggtgcttttggctatagaattttcaaatttggtgtcactgaagccaaatgagcacatgaaaggatgcttgacgtcactggtcagagaastatgaataaaccacagtgagatactactacatgtctgttagaatggctaaaattaaagattaagactggccatagcaagtgttaacgagaacatggagcaactgaaattctcatgtattttcaatgggaatgtaaaatggtacagcagtttggcagtttattataaagctaatgt

SEQ ID NO: 267158 - DNA, 511 bp, Homo sapiens
actcactagctaatggattcactcccatacactaaccttgctgtccacaggattcaaatttatgcctcagcaaaaatcactgtgtggaatggatcctcagtcactaattccatgactgccaactttacagatgtcaaggctgccaaatgtcaaggctctgttatagttcaaggtagcaggttttaatctcagctgcatcttaattcattgtgagattaaaagtaatatttttttaaaatgtacccacargtgcaaataattcccattaaaaataagtaagagtgagggtggttgactaaagattatccctacaataacatgattttcttactcaaattatgattttttttggaaggaaaaaatagtgctgtctaaatataattgccaaagacccacagcctcacttacctaagaccaaatatacaacaagtgatcattatgacgttatcattagcagttgggtattttcagtattattggttaaaacttcctgagaagcttttgaggtttc

SEQ ID NO: 267159 - DNA, 326 bp, Homo sapiens
aattttgctttttgttgtattgaacaagggtgctacaaatgagcactgatggagctgcactgtgttggttattcaaayaccatgagccaccttgttgtcagcaacatggttttccaaatggtgaacaatgcacagtaaaccttccaaagcaaagaacaattttacctgaaattatacagtagctgtagtcttaggaaattcaacgtatactaaaattgaattaaagcaatttttatatgtgcaaccagttttgtttccaggctcaaataattataaacaggtgtttcacctatatgactacccaaagggattgttgaaaatgcagg

SEQ ID NO: 267160 - DNA, 342 bp, Homo sapiens
atttatgtaaatgaatgtccatcacactgctactttaaagtgtcactgaataactgcaaatggtgtatattcccaatataaggaaaatagtaaaagaaattatggtataattatgtcattattataaamatttctacaaatcatgatactgaaaatactgaataacactaaaaaatgaacaatactgagtaagaaaggggatagaaaaatatacattatgacttggtattaatgacccaagtcttagaacccaaacatacacttgccattcacaccctcacaatttcccccaaattttatcccacagtcaatggaaagaacaccaaaagaaaagcccagagt

SEQ ID NO: 267161 - DNA, 483 bp, Homo sapiens
tggctggttttctattggttttatttagcttgtcagaagaccaaagaaaaagaaggcatcttctcaataattastcagaaggtgcacataaaatgtaatcatactaccaaaagcaaccatgactaataatttagcatttttcctcctactcttttttcaccaagaaataatatactacgtatgtatacacatacatacatattaaaaacagatgattatgtaagtttatagcctaactttttacagaaaaaataacgtttaaacttttgatagacaacctgttttatgaaggtagtatcccacaaaagaaatgtaccatatcccacaaaggaaagtaccaatgtacttggccttttctatattattaagcatccagaagtttttctgagcttttgctttttataagtaatgtagcattgaacttttttattctatgcctgttctaccaataacaggaaatcagtggcagagaaggtaacagga

SEQ ID NO: 267162 - DNA, 387 bp, Homo sapiens
gaattatcataaggaaaaaaacctctcagacttaagaaatgtgcatagactctttgtaaccccaactctaatttctggtgttttctagccacatgcttcgtcagaacaaaactatacaatatgcttccttggtgggtactctggcgttctaaataaatggctgattttgaacctrgaaattccgtgaaggtaaacagcatgagcagatagctaatagcagatagtgcttccagcaatatttttgtgcatatcatgatttttgcttgggcctgcctttcaactaccatgaagattattataattgaaagtgcatcaattcagttgaaacactcaatattgatttgtccttgccctgaagagacaggttttctctaaattattgcagga

SEQ ID NO: 267163 - DNA, 606 bp, Homo sapiens
ctttgtaaccccaactctaatttctggtgttttctagccacatgcttcgtcagaacaaaactatacaatatgcttccttggtgggtactctggcgttctaaataaatggctgattttgaacctggaaattccgtgaaggtaaacagcatgagcagatagctaatagcagatagtgcttccagcaatatttttgtgcatatcatgatttttgcttgggcctgcctttcaactaccatgaagattattataattgaaagtgcatcaattcarttgaaacactcaatattgatttgtccttgccctgaagagacaggttttctctaaattattgcaggacctattttttcatcatttaatgtaaattcaaaattaaataaaatccactatttgtaataaaagtcctttccattcttcagccagcattgagactcctaaacacatgtgctctgaacttaacaatgtaccatgacagacataacacaagcatttctgggaacaatgtttggctattcctagagtaactaaatagttttcccttaatggcactaaagcctataataaaacaaaaagtccataaaaagatgtggactatctcataccactgag

SEQ ID NO: 267164 - DNA, 526 bp, Homo sapiens
attgtgtcagccaggcccacgtggtggcttacacctgtaatcccagcactttgggagactgagacaggtcaatcacttcaggccaggggttcaagaccagactggtgaacatggcgaaaccccatctctacttaaaaacagaaaaattacaaaaattagccaggtgtgatggcacatgtctgtagttacagctacttgggaggctggggcatgagaattgctggggcttgggaggtggaggttgcagtgagctgagatcacaccactgcactccagcctaggtgacagagcaagactcggtctcaaaaaaaaaaaaaagtcaattataaactcttaccaagcaagattctgagtccacagggatgaggacctggtaaattcccaaaggtcatgctccttakggaggtaaggcatatgagctcaggcagtttgttcaaggcaacaggtgaacagaaatcaagaataggtgcctgagtcagtaaatgtttggttccttttacacctcagtacctttcttttaacatcc

SEQ ID NO: 267165 - DNA, 547 bp, Homo sapiens
tctccttaaaaattggaggagtttttctacagatagaacttttgcttgatagcctttccttcagcactttgaatatgtcatgccactgtcttctaacctccatggtctctgaagagaaatcagctgtcagccttattgagactcttttaagtgagataagtcacttttgccactttcaagattatctctcttgttgtttaacttctgtacttccttactcccctatgtttaaatatgtaaactttgctttgggttactatagccctttgcagttaattgctttgttttggttttatttttaaagaaacaataagggaaccgacagtttttagtattatcagtgttcaaatggtccttgttgatttttacaataatacctgagtaagaggtgtacrtcaggggatttgttatatctttgctagggcaaaaatgtaaacaaaatattagctgcttggctaacattttttgccagattgcactaataagcagcaaatcactatgttaaaatgaattgaaagagagattttcatttagttgtatgatttta

SEQ ID NO: 267166 - DNA, 536 bp, Homo sapiens
tatcttctaagaaaatcttttaacagcctcaccatatagggtgttgcagaaggtcrgctcggcggccagcaaaatatcttccagtaccttaacaaatcagcaaaatattttgagaaatgctttacttttatgaacaaataccctgctagttattggatttgtcatagcatctaaggtttctctcataaccatactgaccttcatgtgctattgtattacaaaaccaactctttatgtaatcaaacctaaggaagaatgcttaattagctatacatgaccctgtgttatgatacaggcatacaaaagttattttcttcagcactatctagctattgtacaaagaaacttctttataaagtaagacatgggatatttgatgtctcaggagtaaagtaatattgggatttttttttttcctctgcaagctgtttgagagctttcagcagggggataccgtatttaaaggtagcctaagatctcataactccatgtgtcacaaaaactgtgtaggttatgaaagacttttctcgtgagca

SEQ ID NO: 267167 - DNA, 427 bp, Homo sapiens
aaagggagcaactaacaggaaggaagggaggattcattcgcaggagtcactataggaaggtcctccactgtgaggtcgtcaggatgaactaaaattggagagttcatctgaaacaactgggcattcttgatgcttgggagttacaagtttgttgtctttaaaaaaaaaaaaaaaaaaaaaaaaaaccctatgtgctgccctctagaggctacaaagaataatggcgccacctattaaaaactgaaaggaaaaagtacaggcaggaaraatttgtctttgccaaatgtatgacctaacgtgttacatttagtgtcatacttcaaattagagaagtaaattaatatcatgtacgggaaattctgaatttgatgcaaataatgattctgtctgaagacccaattctggatcttcctttttttctttttta

SEQ ID NO: 267168 - DNA, 550 bp, Homo sapiens
ctgagtaccattgtggttatacatatggtgggatgacgtggccagttgaggtatatgtattaacatgctgaagaaaagagagtagtggcacttgcttcgtgagccaaaaaactgcaatcacttttaaatatatgccacaaggctgtgctgggatatgaaggaaggtaagatagagcctaggtctgtctagggattgggctgcttctgttatataaccacagcaagtcagttcagggattttagcaaacctttgggaatagcagggactgagctttagatgatggctctgaactgctggtttccaaccactagggtgctctacctgtgtcagattttcctggatcccatgcatttccccagtccatggtaarggaatcactgggtatctgcttgtcattccccaatacacagcattctaccacattctgacttagaatttccttaccactattttccccccactagcctctgaggggctttctgaacatatagcccaactccttgtatatgtaaggcatttgttacactttgatggagaaatgaaattgtg

SEQ ID NO: 267169 - DNA, 603 bp, Homo sapiens
ttgaaaaatgaaacattcagtaattttgaagtaattgaaatgtttcataataagcagccaataatttatgatatccagtggctgggcacagtggctcacgcttgtaatcccagcattttgggaggctgaggtgggtggattgcttgagtccaggagttcaagaccagcctggccaacatggcaaaaccccatctctactaaaaatacaaaaatttgccaggtctsgtggcacatgcctgtaatcccagctactcaggaggctgagacagaagaattacttgaaacccagaggtggaggttgcagtgagccgagatcgcaccactgcactccagcctgggtgacagagtgagactttgtctcaaaaaaacaaaacaaaacagacaaacaaaaaatgtatgatacccaaacgatgtcataaaaattatgttgtataagattataccattatagtgccatgaaaaatgttaacactgtattaactgattaaaatgagaatcataaataatatgtaaaatatagtcttgaatttgtttttaaagtctgttttataagttaatgttcccatatttatgtgagattacctgtgatttttgttttctttg

SEQ ID NO: 267170 - DNA, 513 bp, Homo sapiens
attccccttctcaggcccttgtgtgtggtgccctgtgcttgttcccttcctgtcttctgtgactggactccctgcaccctcaggtctcttgcccccacgccacctcctcagtgcctggcgattgcctttccacattgacaagtcaaagcccctctctgcagcagcctccctctgcccactgagctctcaccagtgccatgctgtttaatttctgcataacactttttgtcatttgatgccattttgttgcagacttagctggttaaggtggccgtcttctccatcaataagctccccgaaggccaggggctatttgccacattcacttctctctccctagcacccaaatgcctggatacagtygaggctcaacaagtgttggatgaaggaacccctctttctaaccacatctctttcccaggctccaccaaaacaaactgactcactgtgcctggcaccttctctcacatgcggcctttcctgcatgacccggccacccctccacacaggctg

SEQ ID NO: 267171 - DNA, 453 bp, Homo sapiens
gcaaggatagaagggaggcgaccactccgggagcaattacaaccatcccagcacaagatactggtgactcacgctaaggcggaggtgggagggtgatgagaagcaggttccgggtctcttttgatgtatgtgccaacaggatttgctgactcagcagatgtgggctgagggtggtgagagaaagagaggagctaaggatgacrctgaggcgttcagccagagtggctaggagcactgagttgttataatctgagatgggaaacaggttttgggaaagagttgctcaatgttgaacatactacaatggggaagtctgcagatacacagagtgggcagatggctattcaagtccagggcagagatgcaggccagatataaatttgagagtcgttagcatttgatggtatttaaagccctgggacaggaggagatccctgtgggagtgagtgcaga

SEQ ID NO: 267172 - DNA, 539 bp, Homo sapiens
gctcaccttaatgcatttcctttctccctgaggtcttgacccatctagtgttgccttgcttggttgctctaagagaacttcaaacaagtgtgttttttagttaattcagtattttttttagtgggaatgttagtttgatacatcatgaccagaagcttaagtctttgaagtatagtgtgttttatcattttcatttggaaatctttttaatgaatcccgacaaatgttgacatttgattcagtartgaaatggcatagtcctggaaacaagatcgggacccaatgttgatccatttccaggatggaggagagtggtttctttagaaaaacattacctatggactgattgctctataaaatctgttggattttcagtgttgcctgctgaaatgaagacaaaagttcaccctttttagatacctgagacgggtttcttttttgaagagaagggcaaatttgagaaagccaggatgggagaacactatattatagtttgggcagaagaaaaccaaagccttttatccctgtgcccagccaca

SEQ ID NO: 267173 - DNA, 566 bp, Homo sapiens
atctttagagttcatctccatccccgaagggagttgtagaagcttcctgtatcatgggccccacttgcctgtcccacactgtgagaggaaacccatttacatctcatgtccaaagccatttttttcctacaaatagttttgtgtgtgtgtgtgtattgaggggttataaaggaaagcagaatattttatcatggtttttgcttcagtggctttaggacaaattagaactcaactctggtgctagaaaagaaaaatctccacttaaaacccatgttcaaatatctgtaatgttcatttggagaagagaggaaggatttgggctttttaatactaattgtacctgaaggtttccctgcggaagcagtttattaaatgggactgaaagccgcgctgctaaaggcaattaacatctgatacattctcaaagctcagaaatctttggygagaggaatgtttctgcctgtgtaagagcaggccagggagttaccttctgcttatggaaggaattcgtcctgggggggcttttatgattgttggattttgtcatctgtgtcacctgatcactc

SEQ ID NO: 267174 - DNA, 560 bp, Homo sapiens
atccaggataatatgtagaactctttcaaaactcaatgagaaaacaaaatcacccagttaaagaaactggcaaaacaggagtttgagaacagcatgarcaatatagcaagaccctcatctctaaacacacacacacacacacacacacacacacacacacacacacacacacacacacacacgcagtggggcatagtggcatgcgcctggagtcccagctgctcaggaagctgaggtgggaagatcccttgagctcaggaggtggaggctgcagtgagccatgattgtgccattgcattccccgtttgaacagacatttcaccaaagaagatatctggatggcaaatagtaaaaatgttcaacatcattagtttctgggaaatacaacataaagctatgagatatcatgacattagaatggctataataggacaggcatggtcccgtaattccagcactttggaaggctgaggtgggaggcttgcttgaggccaggagtccaagatcagcctgggcaacatagagagaccccatctctacaaaaaataaaattagccagg

SEQ ID NO: 267175 - DNA, 560 bp, Homo sapiens
atccaggataatatgtagaactctttcaaaactcaatgagaaaacaaaatcacccagttaaagaaactggcaaaacaggagtttgagaacagcatgagcaatatagcaagaccctcatctctaaacacacacacacacacacacacacacacacacacacacacacacacacacacacacacgcagtggggcatagtggcatgcgcctggagtcccagctgctcaggaagctgaggtgggargatcccttgagctcaggaggtggaggctgcagtgagccatgattgtgccattgcattccccgtttgaacagacatttcaccaaagaagatatctggatggcaaatagtaaaaatgttcaacatcattagtttctgggaaatacaacataaagctatgagatatcatgacattagaatggctataataggacaggcatggtcccgtaattccagcactttggaaggctgaggtgggaggcttgcttgaggccaggagtccaagatcagcctgggcaacatagagagaccccatctctacaaaaaataaaattagccagg

SEQ ID NO: 267176 - DNA, 560 bp, Homo sapiens
atccaggataatatgtagaactctttcaaaactcaatgagaaaacaaaatcacccagttaaagaaactggcaaaacaggagtttgagaacagcatgagcaatatagcaagaccctcatctctaaacacacacacacacacacacacacacacacacacacacacacacacacacacacacacgcagtggggcatagtggcatgcgcctggagtcccagctgctcaggaagctgaggtgggaagatcccttgagctcaggaggtggaggctgcagtgagccatgattgtgccattgcattccccgtttgaacagacatttcaccaaagaagatatctggatggcaaatagtaaaaatgttcaacatcattagtttctgggaaatacaacataaagctatgagatatcatgacattagaatggctataataggacwggcatggtcccgtaattccagcactttggaaggctgaggtgggaggcttgcttgaggccaggagtccaagatcagcctgggcaacatagagagaccccatctctacaaaaaataaaattagccagg

SEQ ID NO: 267177 - DNA, 573 bp, Homo sapiens
gaacttacagaatatctcatccattgccatggtagcccacacaatacggcttccaacaagaaatacatattatgagaaggaagtgcaataatggtcttacccccatggattcactagtctgactatgtaccacatcacccaaaagaagttgccttgttagagtgatggaatggcttttggaagactcagttgtagctcctcgtgaaaataacatctgggagattggggtgctgatctactggatttactatgtcttaatctggtgaccaatgtaggaaacaagggtgagggggaagtggccactctcattacaacaaatcctctcctgaacacaatttttgttcttatcctcaagactttcagttcaatgggtttgaatgtcccagtgccccagggaggaatgctttgaggagggaacaatcatagttccattaaattagaatgtgwggctgtttcttaacagtctgtactgcttaaccagtaggcaggaaaggttagtatacagtgtgattgatcttgattaccaaggagaaaataggtttctgttacaaaatgggggcaatagagaactgt

SEQ ID NO: 267178 - DNA, 601 bp, Homo sapiens
ggttcttctcattgaagaccagttacaaggctttttaaaataccactagatctaatgtaattggcacacagaggtaaaagcaagcatcaagaaaaagcttttccctaagaaactttcatgaggacatttttgccttttacactgagaccctgctttactttctgcttscctccgctcctcaccttccttgtttgcggctatcattaaatcagccaagtcctactcttgcttctagtcttagtgttttagctcagaaagtgagctaaacaggttgttaacctgacccattgatgtgaaaatatgtaaaactccaagtttctgatatgtgtttaattcttattctcaatttggaatgttgtttcagggggtacctagttatctattttaatgaatatattaataagaattcagagtggaaggctcatgtgcttttattcacttcttactagaagtcttaacaaacatttattgagcatcttctgtgtcctaggcagtgtgcaaaaattttgactgacaaacacgtggttcctgctttcaaatagctaataatgtagttagggaaatagacatataaccaaatatctataatatatgagaaatt

SEQ ID NO: 267179 - DNA, 255 bp, Homo sapiens
aagtatgttgttactcattcttcctaaatgaaagcttcatcaaagaagtgacattagaactgtgtgacaaaggcagaggaaatggatattctggctatcatggtcacagcatgagatatccggagaatggaaactagtccattttagttagatgtagagtgcatgaaagtaaatgtcagaaaatgattcaggaatagtacattggggycagtttattaaggagcttgaatgtcatggcagataattaaactttat

SEQ ID NO: 267180 - DNA, 587 bp, Homo sapiens
agtacattggggccagtttattaaggagcttgaatgtcatggcagataattaaactttattcttcagatagaaccatcagattattttaaacagcagagtgacaggattaaccctaaatttcgggaaaatatttagttgcaatgtgacatattgagtgacatgcaatttgatgacttttgacatatatacacccaagaaacaccacaaaaataatgaacatattaatcacccccaaattttccttgccctctatccctaagcaatcacagatttgtttgctgtcattattgattagattgccatgtgtagaattatayatagatgaaactatatagcatgtactctttttttctctggcttctttcagtcagcataatgattctgagatccatacatgtgtttgtgtgcatcgatagtttgctcctttttattgttcagtagtattccaccatacagatatgaaactatttatacattcacctcttaatagacatttggattgtttttagtttttggctgttataaataaagatgctgatatggttgaaatgtttgtcccctccatatctcatgttgaaatgtgttt

SEQ ID NO: 267181 - DNA, 582 bp, Homo sapiens
tgaaaagttttcaacaaccaaattagaaagcctgatataagagaattttgcacccaatagataggaatacttttaagagatatttttaaagcacaaaaccaacacttttaaaaacaaatgaatataacatatttaaaagggagtatacagaaactatacattctttccaaagtcatatggaacacaaggattcacaacaattctcaaaattttatcacacaggtaaagttctataaccactatgcaagtaatttagaaattaacaataaaagatggagaaaaccaatatatttgggaaaaaaactcccaaataatctgtgtgttaagaaggcaatgatgagagaaactatgaaatctttagaactaaatgactataagaatacatatatatcaagatgtttgataatcggttcaaatggcacatagggataagtttatagttttaaatgcatctattaawagacaagaagacattgtggcactgtcagatccaggcttgtttaaatttgtgctttctatttctttaggtgtcttaacaaaatggataacggcatataccaattcaccccaaacttctccctg

SEQ ID NO: 267182 - DNA, 613 bp, Homo sapiens
tattttgtgtggtgtgaggtatcaaaaggaaaaaagccagcattataacatcaaaatatgaatgtttatgtctacatttacttaatatgccatgaatttacaaaggtgaggttaaaatatcatatctggccaaaaaatataatgaaagaatcccgttataatagcatcaaaaaagagaatggtatagaccaatctatttctgcatcacatctacagctatgcattctgatggtgtgactttttgcacaaagattcacaacagttacattttcattattccaggmacatatttgtcttgttggacacattttctttattggattccaccttgcttgatagccaacagctaacatttactgagttcacattatgttctaggcatggttccaaaccgtgcattacaatacacaaagtagaaaaagcagaaagagggagagtcatgaatgatgggaagatgtatacgtctatttctcattcagttgacaaaggattaaagcaagcatttctttcacagtgtaaagacactaagggtagaggtgtcgagggtggaagaaacctgaaggatcatttaaactctttgaagcttttatagatgaagaaagctcagaggagt

SEQ ID NO: 267183 - DNA, 615 bp, Homo sapiens
gtgggcctatttctggactgcctattctgctccatggaactttatgcttatccttttgccaataaaggtggcttgtcttgattactgtagctttgtagtaagctttcagattgaataatgtgattttcccaactttattcttctttttcaaaactattttagtagatctatttcgtttgtcttctcttaaaaattctagaatcagctttggtagaatatctaccaaaaaattcctgctgagattttgattagaattgtgttacatccmtagaccaattagggtaacattcatacctttactaggttgagcttcccaatctatgatcatggtatgtctctctgttctttttattagcattttaaggtgtccagcatatagacaatatacatattttgttaaatgtatacacatatagatatataaatattttatatataatgttttttaaatattgtaagtaattttaaaatgttggtgagatggtttgtctctgtgtccccacccaaatttcatgtcaaattgtaattcttacatttcaggggagggagttggtgagaggtgattggatcatggggtaaatttcccccatgctgttctcatgaaagtgagtgagt

SEQ ID NO: 267184 - DNA, 425 bp, Homo sapiens
ttatcaatataaatatcataggctattatacattaatttggaaaacaaaagcaaagcactcaaaggatccagtatctccagggaaaaaggaagttgtattttttagggtaggctaagctactttagcaagagacccagtgataaagaatataaatatagaagtttctctcccaaccagtggttccaaggtcagcattgcaggctagcagcccttgttcaaacagttattcagggactttggctgargatggtgctgccattttaaatcatggctttcaagtcactctagttattcttctaatttgcagaaaaagaacatggaagtgtacatatgcaaggtgttatgggctgtgcctggaaatggctcatatatcttctcatattccagtggtgtggagacttagttacatctagatacaagagga

SEQ ID NO: 267185 - DNA, 425 bp, Homo sapiens
ttatcaatataaatatcataggctattatacattaatttggaaaacaaaagcaaagcactcaaaggatccagtatctccagggaaaaaggaagttgtattttttagggtaggctaagctactttagcaagagacccagtgataaagaatataaatatagaagtttctctcccaaccagtggttccaaggtcagcattgcaggctagcagcccttgttcaaacagttattcagggactttggctgaggatggtgctgccattttaaatcatggctttcaagtcactctagttattcttctaatttgcagaaaaagaacatggaagtgtacatatgcaargtgttatgggctgtgcctggaaatggctcatatatcttctcatattccagtggtgtggagacttagttacatctagatacaagagga

SEQ ID NO: 267186 - DNA, 464 bp, Homo sapiens
tgttgacacctcctctatttgagagactctagagatgcaacaaagggaacttagtgaaggtgaacytaactgacaaataagaaaaatggttgtggtgaaattatgtcacataggagatgatgctgctgaaaaacttcacataaaggaactctcagagatatttcatgacattgaaaacacaaatgataaaatgctggaactgatccaaacttagaaaggagtataacaatttgctgaagccatagataagacatttgctcagtattgtaagttctgtgataagaaaaaggcagggaccatttaaattactcttgataaaatttttaaaagaaatcaaatcattaatactcaataattttaatgttttaaattacagtgtaataaattagcttaacaatatttttcatttttctatgtatttatagttgacagagagtaatgttttaacatacgtttaaaggtca

SEQ ID NO: 267187 - DNA, 506 bp, Homo sapiens
tggggttggaatagcatattgtgctagagcgaatatgggttttagacctagaaaagtctctgtgccaattttgcttgttttacttcctaacttcaaggaagtaatttattttttctgatctttaatttcctcatctgtaaaactggaatagtaacttaaatacttggggggaaagaactgttcaaaatacatgctggaattcttcccaggctctgtacattagtggaaargtttttggtcatttattttggtgggagcataagtggaggagtgaaggggatgaaagtcttactggctgccctctgattttatgatatatcaaatgaaaagatttttaaaaaacgaattctaatatgttccttggggaatagaaaatactggcgtagaaaaaaaaagaatggagagtttggttgtttgctttgtggtaaaagttagtaacataatatctaaatttttaaatgaatttgtgtaactttaaactacaagatcttgtgcggcaatttagt

SEQ ID NO: 267188 - DNA, 506 bp, Homo sapiens
tggggttggaatagcatattgtgctagagcgaatatgggttttagacctagaaaagtctctgtgccaattttgcttgttttacttcctaacttcaaggaagtaatttattttttctgatctttaatttcctcatctgtaaaactggaatagtaacttaaatacttggggggaaagaactgttcaaaatacatgctggaattcttcccaggctctgtacattagtggaaaagtttttggtcatttattttggtgggagcataagtggaggagtgaaggggatgaaagtcttactggctgycctctgattttatgatatatcaaatgaaaagatttttaaaaaacgaattctaatatgttccttggggaatagaaaatactggcgtagaaaaaaaaagaatggagagtttggttgtttgctttgtggtaaaagttagtaacataatatctaaatttttaaatgaatttgtgtaactttaaactacaagatcttgtgcggcaatttagt

SEQ ID NO: 267189 - DNA, 506 bp, Homo sapiens
tggggttggaatagcatattgtgctagagcgaatatgggttttagacctagaaaagtctctgtgccaattttgcttgttttacttcctaacttcaaggaagtaatttattttttctgatctttaatttcctcatctgtaaaactggaatagtaacttaaatacttggggggaaagaactgttcaaaatacatgctggaattcttcccaggctctgtacattagtggaaaagtttttggtcatttattttggtgggagcataagtggaggagtgaaggggatgaaagtcttactggctgccctctgattttatgatatatcaaatgaaaagatttttaaaaaacgaattctaatatgttccttggggaatagaaaatactggcgtagaaaaaaaaagaatggagagtttggttgtttgctttgtgktaaaagttagtaacataatatctaaatttttaaatgaatttgtgtaactttaaactacaagatcttgtgcggcaatttagt

SEQ ID NO: 267190 - DNA, 420 bp, Homo sapiens
ccataaatgtatacaattaaaaaatgtttacagcttaccagaagagtctagttaaatttacaaaataatccccatcagtatcaaccagcaaaaggaaggcaacagaaacagagagaaggtggaggtggggacaaacagacctttggaaatagacgatccctcagtgaatcccagccctcagattttactacctgtgtaaayttgggtaataatgttcaggtcaaatgtcatttcactttgagatgagactcaagcggatgccttcttgaaatctgtttttgtgaagattttccttttattggtgaccttccatatcatttttcccaatctcagattgaaagtctccaacatgctgccctcctatactttcgctacctattaaaccctgtgcatagatggtaacagaaatgataacaggtg

SEQ ID NO: 267191 - DNA, 420 bp, Homo sapiens
ccataaatgtatacaattaaaaaatgtttacagcttaccagaagagtctagttaaatttacaaaataatccccatcagtatcaaccagcaaaaggaaggcaacagaaacagagagaaggtggaggtggggacaaacagacctttggaaatagacgatccctcagtgaatcccagccctcagattttactacctgtgtaaacttgggtaataatgttcaggtcaaatgtcatttcactttgagatgagactcaagcggatgccttcttgaaatctgtttttgtgaagattttccttttattggtgaccttccatatcatttttcccaatctcagwttgaaagtctccaacatgctgccctcctatactttcgctacctattaaaccctgtgcatagatggtaacagaaatgataacaggtg

SEQ ID NO: 267192 - DNA, 580 bp, Homo sapiens
tttattttagaatataattatttaggttcactggtgcaagtgccactctccctcaggattgagtgacttataaaacatcgtactatcatcrcacagacaagtttataaaaagttactgtataagtaaaaggaaaactttgccaacaatgacttagttttagccatacagtaccttttatttgagactcgaggtaatttgctaatacattgcctgaatccctacaaatttgtatttttcatctgagcatgcaaagaggtttacattgtgtgacatacaagtcagtttatgatattaatggcatattcatgtatgttttccaaaaagttttggtcctgaaaatatgtgtttacagattatatgtaacataacatgcaataaagtattttgtagggctatacggtttttgttcattatgaaaaaaagtggggaaataaactttcttctccttcaagaaaaaaaaagttcctgcccttgtctttcccattgacttccagaaacttccaacacccactctcatcctgttgcatccatccccttatggatacatgaccacttagggcctgttcctggaaagggaat

SEQ ID NO: 267193 - DNA, 588 bp, Homo sapiens
tggtgggcacacaactgtctgttgcattctgcttgaacttttttcatttttaattattccagaagttgcaatgaatattaagaataattaaatgatagtgatatacacattataattcataaaactgaggagttttagtccagcttcattgtccagcagatctaatttctgttcttgtttgaaaacttgtactaacactgtttcactcctccccaagtccaacatagacttagactctcatgtgacaaaatgtttttcaactctctattttgtaaatgagaatttcattagatgttcaacagacacaagagacagcctggattatgcatccatctgtgtgtacatgggattcatttctctaacattttttcgttttcatttttttgagacagggtctcrctcagctgcccaggctggagtgcagtggcccaagtacagatcactgcagactccaccccctggggtcaagcgatcctcctgccttagcctcccaagtagctaggactacaggtggctagggttttcaatttaaaaaccctaggccacagctggctagggtttttaaattttatttatttaaatctattt

SEQ ID NO: 267194 - DNA, 588 bp, Homo sapiens
tggtgggcacacaactgtctgttgcattctgcttgaacttttttcatttttaattattccagaagttgcaatgaatattaagaataattaaatgatagtgatatacacattataattcataaaactgaggagttttagtccagcttcattgtccagcagatctaatttctgttcttgtttgaaaacttgtactaacactgtttcactcctccccaagtccaacatagacttagactctcatgtgacaaaatgtttttcaactctctattttgtaaatgagaatttcattagatgttcaacagacacaagagacagcctggattatgcatccatctgtgtgtacatgggattcatttctctaacattttttcgttttcatttttttgagacagggtctcactcagctgcccaggctggagtgcagtggcccaagtacagatcactgcagactccaccccctggggtcaagcgatcctcctgccttarcctcccaagtagctaggactacaggtggctagggttttcaatttaaaaaccctaggccacagctggctagggtttttaaattttatttatttaaatctattt

SEQ ID NO: 267195 - DNA, 644 bp, Homo sapiens
gccaaagagttagaacaattaaaatggtttatcaatgtatataccaaagaatacttgtttacagtgatgagttaaacataattttattttataaaaaccctctgatttaaaaacaatcttactatatcagttattaaatcaatttcatgtgccatgagaccaaataatattttaaacacattccaagattttagctaaactgatagtgaagtttccagtgattatcattatggctgactttcctgaaatagaaaatactgatatatgtttctttctctcataagcataaaactaatcatttattgttgtgtgtgttatctcctaaaaataactttcctgttgcattgaaaatatcaaatggattgacatcattttcaaggtctgaaaaagggacacaaagtgtgattaataagaatgacaaataacaacttacattcraattcatgttaaatttactgaagaataagtgttcatttaactcataagataatgcttattttccagagtttctctttgccagcatatggatatacaaacacaggtgttatgtatataacttaggtatgcttacatattcattcattttcaaatatctgaaatatttgttcggaatctactgactgtggggcttggaatatataata

SEQ ID NO: 267196 - DNA, 498 bp, Homo sapiens
taaattcatggattagaagacttaatattgttaacacaatctctataaaaataccagatgactttttgcaaaaattgataggccaatatttaaaatcacataacaattcaaggacccagaatccctaaaataattatgtgaaaaaagaacaaagttggagaactcacacaaccctatttcaaaacttacttaaaatctatagtaactaagacattgtgatactggcataggatggaaatatatcaacagaatagarctgagaatccaaaaagaaccccttacatttctggttaactgatttttgcaaagaatgccaagatgattctatgggaaagaatagccttttacaataaacagtactgagacaactggatattcacatgcaaaataatgagttggacctgaactttatgtcatacataaaaattaactcaaaatggatcattgacctaatgtaagagctaaaactataaaactctctttaaaaaatgtaaatct

SEQ ID NO: 267197 - DNA, 452 bp, Homo sapiens
ggccttccgctgggtgcttttaaactgattataaccatatggagaaaatcttattttctaagcagctggaaagaacatctaatatcaggaaagaccagctttggttgggtgaatactctgatgaggttgtgtgggggctgagtckccagagtttctgagtcatctgtgacctgggatagagaagaaatgccactttcctagggatgagaaaagactatgaggaggggacctaagcagggctgagggccacaggaaaagggactgcttggagttgatcccagggtggcctcagccaagtggctcttggggaggagaaataccccatggggatttttgaatgaaataatatataaggcaatgtgccccttttgaccttaataaaaggataagactcacaatagatttgggaaagctctgaaaaatcacaacctactcatctgacaaagggctaa

SEQ ID NO: 267198 - DNA, 452 bp, Homo sapiens
ggccttccgctgggtgcttttaaactgattataaccatatggagaaaatcttattttctaagcagctggaaagaacatctaatatcaggaaagaccagctttggttgggtgaatactctgatgaggttgtgtgggggctgagtctccagagtttctgagtcatctgtgacctgggatagagaagaaatgccactttcctagggatgagaaaagactatgaggaggggacctaagcagggctgagggccacaggaaaagggactgcttggagttgatcccagggtggcctcagccaagtggctcttggggaggagaaataccccatggggatttttgaatgaaataatatataaggcartgtgccccttttgaccttaataaaaggataagactcacaatagatttgggaaagctctgaaaaatcacaacctactcatctgacaaagggctaa

SEQ ID NO: 267199 - DNA, 549 bp, Homo sapiens
ccctaatactactatagtgtcagtactttaaaaacaaacataccacaagttaacagtttttttcccatcacaagatacaatatagtatgacaaactgtgtcatactataaaaaatattatgttaaagtttggctaatactcaaaactttacctctagatccatagaagcatccaaataagagtcattttttaacgtttcattcaattattcaaagctgacttttgtctcactgttaattcttgttaactctacaatcaactgttaccataaacataagccagaaataatattatcaatagtaactttaaatwgggtgcgtttctctctctctttcccctcccaccccttggtgcatacagaattaaaaaattagaggcatgaaatgccaaactaatctaggtatctgagggcaaataatcttctgacaccaatgcaataaaaacagatgtagtctcctttaccctatagctgtaatgaagcagctagtatcagtcaaattctcctaaccatgaacaattacaaagactggataaaatacaaatcaagca

SEQ ID NO: 267200 - DNA, 625 bp, Homo sapiens
tttgtatgctatgcaatatttatattatacgtcaatacacatattcacagaaatattaattaggactcacaaagtgaaagatacagaactgagctttttctcaaaaccatttaataaccacatgtcagattaatttcagtccttggatgaaactcctgaaatgatcatgggtgattcccttgccctagcgtctcatgctcacayacacccttagattgcacagggtgaggttggcataggattgggaggaatgaggagggtaggcaggtttcaacacagctttaaagtaaccatggcactgactttttaatttaatttaattttactttattctatttagagacgggatctcaatctgtctcccaggctggagtgcagtaatacaatcacagctccctgtagcttcaacttcttgggcccaagtgatcctcctgcctcagcctcctgagtagctgtaaccacaggcacacaccaccacagctggctaattgtttttgttttgttttgttttgttttgttttgttttttgcagagatgggtctctcattatgttgcccaggatggtctcaaactcctggcctcaagtgatccaccagccttggtcctccaaagtgctagaattaca

SEQ ID NO: 267201 - DNA, 574 bp, Homo sapiens
aaaatcaaataagaaaactaagcaaaacaaaagaggtactcgtttctgaacacacacacacacacacacacacacaaatttacacacactactctttgcagttaagcatggccaattaaacawatctgacccagatttaaaatagagttggattacgcagaagccctgcctagccaacaatgacagggaaacaattcccagttcacagagactaacatggccatgtagtgcatggaatgcagagatggaatgcagtgaccaaggaccagagcctgggccaagagttggaatgagatgagctacaatatccaggtttggctgtggtggtgataatgtccttccctgaattgactctgtggcaccaatttgcctgacctctctgattcctgcctgttttctcagtatgttcaccaccagagttctcagtaattttgtgagctaatcaatattctttcaacaaatttcttttctgtcaagttaattttgctaataacttgacacattcccattgatggtggtaaaaaagaaaaagaattatcaatgtaacaactattattttatgtcattattgaag

SEQ ID NO: 267202 - DNA, 479 bp, Homo sapiens
tgggcagttaaacaagtctctgagaattcaactgttgctgatgaagaattaatgaytaccagaattatgcaacttttgtaaacgtttagaaatccagaacaagtatataaactgtttttattgcatgaaaaaaataggcagcacaaaactgtgatttctgagagaaagaaaacaatatataccctttattgtgccagcatacttactgaaagtgatttccagcctccagcatggtatgagacaatctgagagagaatatcatgatttgctgaatttaagagcaagatatcaaagtttatggaggccaaggtgactagaatcatcaaggcagactgacagagagaagagggctgcacagagagagaactgtggagatttacatagaggttctctggagtccttgagtgagaactgaactgtgcctacataaaggaaaactccatgagatagaaaaatgagtcttcattagcagtgggcca

SEQ ID NO: 267203 - DNA, 479 bp, Homo sapiens
tgggcagttaaacaagtctctgagaattcaactgttgctgatgaagaattaatgactaccagaattatgcaacttttgtaaacgtttagaaatccagaacaagtatataaactgtttttattgcatgaaaaaaataggcagcacaaaactgtgatttctgagagaaagaaaacaatatataccctttatwgtgccagcatacttactgaaagtgatttccagcctccagcatggtatgagacaatctgagagagaatatcatgatttgctgaatttaagagcaagatatcaaagtttatggaggccaaggtgactagaatcatcaaggcagactgacagagagaagagggctgcacagagagagaactgtggagatttacatagaggttctctggagtccttgagtgagaactgaactgtgcctacataaaggaaaactccatgagatagaaaaatgagtcttcattagcagtgggcca

SEQ ID NO: 267204 - DNA, 558 bp, Homo sapiens
tgcatataaacaaaaaaagatccaaaacaagacaaaaaattaatagaaacagaccaagaaaagacaaattatggaattagaaaatattaagcagcttaacaacacacataattgaaatcccaggaaatggggggagggcaaaaactatttataaaggtagtggttgagatatttttaaaacttggtaaaactataaaccaacaggtaacagaagtgcagtggactcaaatcaaaatgaataaaaggattaagttgaagaaagctatttttaaaaagaaaacttaaaaacagttggagaaaaagagatgtattattgacaatggaaccaatgtaataactactttttatgataagcatgtatatcagaagaccatagcrcaacattctattacttaaagcaagagaaacaagtcaacctggaaattcattcaagtgaaaattctaaaaaaatcaagaaatttacaaaaatgaaagcaaataaagctattttgacaataagtagctgatagattttatcaacagcatactgggactgaaagaaatggtagacaaaaagaa

SEQ ID NO: 267205 - DNA, 300 bp, Homo sapiens
tgctatgtgctcagtaatgacggaggtatggagattgtctcaaaataactttacaaagagatggggatgctggaatccccatctcttattgcttaaggattgccttagaatcattaactctccacccctaactccttcttcgttcctatgtgtggttgagaarcactggttaccctcaagaagcttgcaggaggcccaaaaatcagaaagacaggcatgatgtggggagctctcagttagctggaaacaggtgaatttcaggtgaacacattgagtccaggacatagaagacaagtcatc

SEQ ID NO: 267206 - DNA, 300 bp, Homo sapiens
tgctatgtgctcagtaatgacggaggtatggagattgtctcaaaataactttacaaagagatggggatgctggaatccccatctcttattgcttaaggattgccttagaatcattaactctccacccctaactccttcttcgttcctatgtgtggttgagaaacactggttascctcaagaagcttgcaggaggcccaaaaatcagaaagacaggcatgatgtggggagctctcagttagctggaaacaggtgaatttcaggtgaacacattgagtccaggacatagaagacaagtcatc

SEQ ID NO: 267207 - DNA, 550 bp, Homo sapiens
acaattcactgttcatgtataaactatagtcagggtatttacttgcctgtgtgtacttgtctggtttttgtatcaggataacgctgacctcagagaataagctagaaagaattttctcctcttcagttttttgtaatagtttgagtataattggtattgatttttatacrtttggtagaatttgacagtgaagccatctgcttggggcttttctttcttgggagactttttattactgattcaatcttgctacttgttattggtctgttcagcttttctatttcttcttgaatcaatctgagtaggttgtgtatgtactggaatttatccatttgctctgggttgttcagtcttttttaacacgtagttattcgtaacagtctccagtgatcttttgcatttctgtggtatcagttgtaatgtcccggttagtatttctgattttgtttatttgggtcttatatcttttttgattggttagtctagctagcagttcattgattttatctcttttaaaagtcaactttttattgcactgatcttttgtatt

SEQ ID NO: 267208 - DNA, 550 bp, Homo sapiens
acaattcactgttcatgtataaactatagtcagggtatttacttgcctgtgtgtacttgtctggtttttgtatcaggataacgctgacctcagagaataagctagaaagaattttctcctcttcagttttttgtaatagtttgagtataattggtattgatttttatacgtttggtagaatttgacagtgaagccatctgcttggggcttttctttcttgggagactttttattactgattcaatcttgctacttgttattggtctgttcagcttttctatttcttcttgaatcaatctgagtaggttgtgtatgtactggaatttatccatttgctctgggttgttcagtcttttttaacacgtagttattcrtaacagtctccagtgatcttttgcatttctgtggtatcagttgtaatgtcccggttagtatttctgattttgtttatttgggtcttatatcttttttgattggttagtctagctagcagttcattgattttatctcttttaaaagtcaactttttattgcactgatcttttgtatt

SEQ ID NO: 267209 - DNA, 489 bp, Homo sapiens
atgattaacacttcctgtaataggtttataattatgtaaacctatttaaatcaatcatttgcacaacaaaatgaatgaattaatttgttgcagctgtgtttactgaggcacacatgtaaagcaattttaaatgytgtcaagtaacaatgatttcgtttcatgactcacactaagtgagaaattctgatttttttaagacaaagtttaaaaaatcaaaaacttaaaactcctggaactaaaagcatagaagaaaagcttcatgacataggacatgacaatgtgttctcacatatgacaccaaagcacagggaaagaaagcaaaagtagaaaagggactatatcaaactcaaaaacttttgtgcattgaaggacacacctaacagcctgaaaaggcaacctatggagtaggagaaaatatttgcaaatcatatatatctatacatatatatggatatgatagtaaattgttatacagaaaatataaaaaga

SEQ ID NO: 267210 - DNA, 611 bp, Homo sapiens
ttactgaaattaaaaagactactaagtccataggatatggaagagtaaagaattctagatcattttggggtccctgttagttttttatatgcagacaaatattagaaacaacaaaaaatagtagtgcatgtgagactacaaagatggacaggacaagttaggagagctttacattttaacattagaaattgagagagaatatcttctttattatgaaataatttggaaataacaattttagtgagcaaagtatttacaagaaggatagtttatgagccaattatcattgagaaagggaagtataacatcaattcaacagctactggagccatggagtctacacaggaggcaaaagagctgcagcaaaggcctcagagcaaaatagaaacagtctctcaaatggatgaaaacaatctagcaaattttcacaagggtaatcagtagatgctccttgccaagagaagggatctttaccatgatgcagaagctctgctgtactgcacatgataacccagcatcagttttactaaatttgwttgttcctggactcaatagaagctgaagaatcatgagtcaccaagtcagtggtagaaatggaggtagcaggatag

SEQ ID NO: 267211 - DNA, 438 bp, Homo sapiens
gaagtctggaacacagagtctatacagaaaaaaatttcactgaagcagctgggtttcaatgcttggtactaaatttccctagtcttacaatactgttgaacataaatttgggcctctccaatattggcaaaagcacatttcatgakgggtgtagacctgtagatgtgggaggatggtatttacctatatcgcctttccatcaagtacattgaatgttggagaccatttaataatttggcaagttagagtcgaggacaagtaaaaagacagcaccagaagtctttgcatattgttatgactaaacaatatgatacttttcttaccttttccttcaaagctacgcatataaataaaagcaatttctgcattaataagccagcccacaataactggaaataccaatagaaaaattgtacacatgctataaaattgaagaag

SEQ ID NO: 267212 - DNA, 438 bp, Homo sapiens
gaagtctggaacacagagtctatacagaaaaaaatttcactgaagcagctgggtttcaatgcttggtactaaatttccctagtcttacaatactgttgaacataaatttgggcctctccaatattggcaaaagcacatttcatgatgggtgtagacctgtagatgtgggaggatggtatttacctatatcgcctttccatcaagtacattgaatgttggagaccatttaataatttggcaagttagagtcgaggacaagtaaaaagacagcaccagaagtctttgcatattgttatgactaaacaatatgatacttttcttaccttttccttcaaagctacgcatrtaaataaaagcaatttctgcattaataagccagcccacaataactggaaataccaatagaaaaattgtacacatgctataaaattgaagaag

SEQ ID NO: 267213 - DNA, 471 bp, Homo sapiens
cgaaagaaacaataactggtccacaytgacatcacttctgtcttttacagtggctttaaatgtatgtatgaatgtcaacattcttgatataattttatctttttcttagacatggaaaccagagtcttaaattgcgttacaaagttcttcaaccactattactattactttaaaaaaaatatgccataggaaacttgaggtcaggtgagacagttaatcattaagatttgatttgggactcttaaaagtctttattgaaaggcctgggtgttcataatatatcaaaaatttggagaagcaagatctgaagttagaacatcagaaaaccagaattagaatcatgagaaaacctccatgaaatttttccttcattgtcttgagaattttagcacttgtcgttgtggaaatgccacactttggcaggtcaaggtgggcgaatcacttgagcccaggagtttgagactagcctgg

SEQ ID NO: 267214 - DNA, 471 bp, Homo sapiens
cgaaagaaacaataactggtccacattgacatcacttctgtcttttayagtggctttaaatgtatgtatgaatgtcaacattcttgatataattttatctttttcttagacatggaaaccagagtcttaaattgcgttacaaagttcttcaaccactattactattactttaaaaaaaatatgccataggaaacttgaggtcaggtgagacagttaatcattaagatttgatttgggactcttaaaagtctttattgaaaggcctgggtgttcataatatatcaaaaatttggagaagcaagatctgaagttagaacatcagaaaaccagaattagaatcatgagaaaacctccatgaaatttttccttcattgtcttgagaattttagcacttgtcgttgtggaaatgccacactttggcaggtcaaggtgggcgaatcacttgagcccaggagtttgagactagcctgg

SEQ ID NO: 267215 - DNA, 471 bp, Homo sapiens
cgaaagaaacaataactggtccacattgacatcacttctgtcttttacagtggctttaaatgtatgtatgaatgtcaacattcttgatataattttatctttttcttagacatggaaaccagagtcttaaattgcgttacaaagttcttcaaccactattactattactttaaaaaaaatatgccataggaaacttgaggtcaggtgagacagttaatcattaagatttgatttgggactcttaaaagtctttattgaaaggcctggrtgttcataatatatcaaaaatttggagaagcaagatctgaagttagaacatcagaaaaccagaattagaatcatgagaaaacctccatgaaatttttccttcattgtcttgagaattttagcacttgtcgttgtggaaatgccacactttggcaggtcaaggtgggcgaatcacttgagcccaggagtttgagactagcctgg

SEQ ID NO: 267216 - DNA, 584 bp, Homo sapiens
ttatgtaaaatcaagcggtatgtaggatataaatggattttgacattgacagcattgaaaataagaagcaattcaatgaatgttaggattaaaaggaatacacatttttcagccctcattctttaatttacatataaagaaataggccctcaaaatgtggccaatttccagtcatgtagacagacacagagaaaaatgaaatgaatattcagatgtaaaccctccttcatctgcacccattctgttctcatctccttcctctatctgtacactgaacctatcctttctctaggtcgtacgtgtcttgatwtttccccctcctttaccttgtacaagattcttttccatcagcatttgaatatatccaagtctctgtatctaaaacgaaaatgaaatggtctctctgtccaacacacacacactctcttccaggcactgccctaccttcctgacctctttgctgccaagtatcttgaaaaaaaagtcccacgtgctagtcttgatggtttcacctcctacctgcctcattataataaaatatgtacccttccgcatggcttctccctagagctcaccaatgactg

SEQ ID NO: 267217 - DNA, 547 bp, Homo sapiens
aagatcagaatatagtatcccagtactttgggaggccaaggcaggtggatcacctgaggtcaggagttcgagaacagcctggccaacatgatgaaaccctgtctctactaaaaataataataataaaaaatagcctcatgtggtggcaggcacctgtaatctcagctactcagggggctgaggcaggagagtcacttgaacctgagagtcggaggttgcagtgagctgaggtcatgccattgcactccagcctgggcaacaggagcgagactccatctctctctctctctctctctctctctctmtatatatatatatatatacacacacacacacacacacatatcttatctctctatgtgtatatatatatatctgactgaatttttatatatatatcttatatctctctctctctctatatatatatatctatgtttgtatagatatatcttttcttacaggtaagactgattgggaaaataaacatgattctgtaggcaaaactggaatttcaaatacccaactccttgactgttacttaccc

SEQ ID NO: 267218 - DNA, 539 bp, Homo sapiens
atataatgtgtttcaatgtataggttgtgggtgcctagagtcccagggtcctcgtatcgaggtcgtattggtttgcaatgctgtgtgacaaatcaccaaaaacttaaaagcttaaaacaattcccagtatccatggggcaaaaatccagatatagcttatctggattctctattcagaatctcacaggctgcaatcaaggtgtcagatggtgagcaggtcttatttgaggttctgggtyctcttttaggcttacatggttgttggcagaatttgttttttgtgattgtaggactgaaagccctcagctcctaggtcttctgccattccctaccatgaagcttcatgatcaatgacagtttgcttcttcaaaagtagatgacagtctccaacttgttcctaatctctgtatcctcttttaataggctcaactatgtcagatttgtccatacccttttgatcaaggtaccgtcaacttgatatctgcaaaaatctgttcatgcttgccacataaaataacatgatgacagaagttatatac

SEQ ID NO: 267219 - DNA, 539 bp, Homo sapiens
atataatgtgtttcaatgtataggttgtgggtgcctagagtcccagggtcctcgtatcgaggtcgtattggtttgcaatgctgtgtgacaaatcaccaaaaacttaaaagcttaaaacaattcccagtatccatggggcaaaaatccagatatagcttatctggattctctattcagaatctcacaggctgcaatcaaggtgtcagatggtgagcaggtcttatttgaggttctgggttctcttttaggcttacatggttgttggcagaatttgttttttgtgattgtaggactgaaagccctcagctcctaggtcttctgccattccctaccatgaagcttcmtgatcaatgacagtttgcttcttcaaaagtagatgacagtctccaacttgttcctaatctctgtatcctcttttaataggctcaactatgtcagatttgtccatacccttttgatcaaggtaccgtcaacttgatatctgcaaaaatctgttcatgcttgccacataaaataacatgatgacagaagttatatac

SEQ ID NO: 267220 - DNA, 620 bp, Homo sapiens
aagcttggaagttacatgtcatgtctgtatagctatattccttagcatgaataaggtgctacttctacaatgacattaaaaatagttttgcaggccgggcacagtggctcatacctgtaatcccagcactttgggaggccgagactggtggatcacttgaggtcaggagttcgagaccagcctggccacattggtgaaaccccctctctactaaaaatacaaaaattaaccgtgcatggtggcgggtgcctgtaatcccagctaccagggaagctaaggcttsagaattgcttgaattcgggaggcggagattgcagtgagacaagatggcaccactgcactccagtctgggtgagagagtgagactcagtctcaaataataataataataataaataaataataaataaaatacaaataattttgcagaatgaactttctattgatagaaaattccagagttgagaattatattgtaacaaatataacaagtcattttaatcttttgattaatgttaggagatacttttcttaaacatagctattacaatctatagtaaagatcttgttcagttaagtaaatgttcaaaacaattagttaatattgatgagtttattgt

SEQ ID NO: 267221 - DNA, 553 bp, Homo sapiens
catacattaatcatcttgtataaccatctctccccaaaagatagtgtattacatattgtattcatattccagggatgctgtcacaaagtatcacaaatgatgtggccaaaacaacagaaatttattatctcacatttctgtaggctaaaagtctgaaatcaaaatatctgaagagctggttccttctgaaggctgtgagaatcttttccatgcttctcaccagcttagcttccagtggcttgctggcaatctttagcatcttggcttttgctgtatcaccctgatctctgccttcaccttcacatggtgttctccctgtgtttatgtgcctgtgtccaagtcttccttttccaggacatcagttatgttggactagagacccaccctactacagtatgatttcatcttaactaattgcatctgcaamgactattttcaaataaggtcacattctgaagtaatgggagttaggacttcagcatacaaattttaagagggatacaattcaacccccagcacatacattggattctcattttttaaaattaatggc

SEQ ID NO: 267222 - DNA, 553 bp, Homo sapiens
catacattaatcatcttgtataaccatctctccccaaaagatagtgtattacatattgtattcatattccagggatgctgtcacaaagtatcacaaatgatgtggccaaaacaacagaaatttattatctcacatttctgtaggctaaaagtctgaaatcaaaatatctgaagagctggttccttctgaaggctgtgagaatcttttccatgcttctcaccagcttagcttccagtggcttgctggcaatctttagcatcttggcttttgctgtatcaccctgatctctgccttcaccttcacatggtgttctccctgtgtttatgtgcctgtgtccaagtcttccttttccaggacatcagttatgttggactagagacccaccctactacagtatgatttcatcttaactaattgcatctgcaacgactattttcaaataaggtcacattctgaagtaatgggagttaggacttcarcatacaaattttaagagggatacaattcaacccccagcacatacattggattctcattttttaaaattaatggc

SEQ ID NO: 267223 - DNA, 513 bp, Homo sapiens
taactggtttaggattggacaaacaatctcagctgcttcaatcagactcactgtaagtagtgaaatggaaaactctttcctcttccgggcactgttaaagatttttttttttcatgtaaactatgcaactacttcagttattttacttggagaaaacttaagctgagaacaaattctacttgacaaggtgagaaatactgagagagaaattgggaaaccaaacagaagccctgatcaagccttccttgaagtacaacttaactgaaatttccagtcaaagtattttcttcataaggtcaattactttgaattagattttattcatttaaaacttgcaacgttttaacctattcacttttctgtgctgtctctaccatttatttccactgacttcttgtctttayatgttataattataatatattcttttatctaagtaaaaacagatgatagtcatttcctaaatctaaacatttcctatgaaaaatctttgggataaaattgcacatttcc

SEQ ID NO: 267224 - DNA, 581 bp, Homo sapiens
gtgagggaacattggccaaaatggccaaaatcaactgttttagaacacttaactagaggcttatactagctgaggaatattcattcaagcaaaatggttaaaatttggtaagaacaattttgtttgtttgtttgtttgttttttaacatgctttatttccattctccactcaccagctttgttgttgtcttaaaaaccaacagcttttaaatcatggtagttgtgaagaactgcaacttaacagctatgagggtaggtatagtaggaatggagtttgtcaaaaagccccatcatcaggtaattgtcactattttacctggcaactccccgaagagttccattcacagggtttgtgattatttcacttagtgatgacaagagctcattcaatattaaaagaactcattcagtagaaatagggggaaaaaaagctcattcaatggagttcatccaatawgaaaatccctgtccctgggtgattgctgaaaacaattagcagcaattgtttaacaatatagatgcctggggaataataccagatgggaataaaaaggttgaccaaaaaccttgaaagaaaagga

SEQ ID NO: 267225 - DNA, 597 bp, Homo sapiens
agactctgtctcaaaaattaaataagtaaataaataaatacatttcatccttaagatcacattacagttgatattttctggaagacttaagcatcttgaatttgatcacaactaaaatttttacttgagcaaatggattttctattatatatggatagaataaatacagatatcttacccctgaaattttgtttgcgctattaattgggtagtctgtttttctttttaagacagggtctcactgtgttgcccaggctagagtgcaggggtatgatcaatcatggctcactagattctcaaccctctgggctcaaaggattctcttgcctcaaccctcagagtagctcagactacaagtgtgcaccaccrtgccccgctaattaaaaaaaattttttttgtagagataaattctcatcctagctcttatctagataatactaattatgagtaagttagctctaaaaaatgggttttattgtatatctaaaaatgtaacctgatttccaccacctacagcctcatgttgggttagaaattaatggaatagaatagtctgtcaccatgaattggcttggtcatgaagataactgccacat

SEQ ID NO: 267226 - DNA, 597 bp, Homo sapiens
agactctgtctcaaaaattaaataagtaaataaataaatacatttcatccttaagatcacattacagttgatattttctggaagacttaagcatcttgaatttgatcacaactaaaatttttacttgagcaaatggattttctattatatatggatagaataaatacagatatcttacccctgaaattttgtttgcgctattaattgggtagtctgtttttctttttaagacagggtctcactgtgttgcccaggctagagtgcaggggtatgatcaatcatggctcactagattctcaaccctctgggctcaaaggattctcttgcctcaaccctcagagtagctcagactacaagtgtgcaccaccgtgcccmgctaattaaaaaaaattttttttgtagagataaattctcatcctagctcttatctagataatactaattatgagtaagttagctctaaaaaatgggttttattgtatatctaaaaatgtaacctgatttccaccacctacagcctcatgttgggttagaaattaatggaatagaatagtctgtcaccatgaattggcttggtcatgaagataactgccacat

SEQ ID NO: 267227 - DNA, 597 bp, Homo sapiens
agactctgtctcaaaaattaaataagtaaataaataaatacatttcatccttaagatcacattacagttgatattttctggaagacttaagcatcttgaatttgatcacaactaaaatttttacttgagcaaatggattttctattatatatggatagaataaatacagatatcttacccctgaaattttgtttgcgctattaattgggtagtctgtttttctttttaagacagggtctcactgtgttgcccaggctagagtgcaggggtatgatcaatcatggctcactagattctcaaccctctgggctcaaaggattctcttgcctcaaccctcagagtagctcagactacaagtgtgcaccaccgtgccccgctaattaaaaaamattttttttgtagagataaattctcatcctagctcttatctagataatactaattatgagtaagttagctctaaaaaatgggttttattgtatatctaaaaatgtaacctgatttccaccacctacagcctcatgttgggttagaaattaatggaatagaatagtctgtcaccatgaattggcttggtcatgaagataactgccacat

SEQ ID NO: 267228 - DNA, 613 bp, Homo sapiens
aaaacaatcatcacatatttgtctttgattmtgtagttcagctgggtaatggtcccagtctgcgctcatgtaactaatctttatatccaactggtggaatggctaagaggaaatggggggacaggtgggccccctctctgagtgtcctctcaccctccaagagtcttgcctgggcttgttcacatggtttgggacacgttctcagtagcaaaagaagttaggccctgcatgcaagcacttttcatttattattgtcccattcaaaagagaatgtcacatggcaatgaaaaagtcagtgcaggattgggcgattatccaaaagcatatgtacaaggaagtacattttgggcactaatttgcaaacaatctctttcagtagacatgttttatgtgggtgagattctaataaatacatagagaaacagataaaaaggcagaagttattttagtataaacagacttcatggtaggaagtctttccttcaagctctgaagggcaatacttctatcttcatattattttcttttcatatttacatctaaatttttttcaatgtgataaaatctatagatttagttttggctgacattatccttaaccacatcaaaataa

SEQ ID NO: 267229 - DNA, 613 bp, Homo sapiens
aaaacaatcatcacatatttgtctttgattctgtagttcagctgggtaatggtcccagtctgcgctcatgtaactaatctttatatccaactggtggaatggctaagaggaaatggggggacaggtgggccccctctctgagtgtcctctcaccctccaagagtcttgcctgggcttgttcacatggtttgggacacgttctcagtagcaaaagaagttaggccctgcatgcaagcacttttcatttattattgtcccattmaaaagagaatgtcacatggcaatgaaaaagtcagtgcaggattgggcgattatccaaaagcatatgtacaaggaagtacattttgggcactaatttgcaaacaatctctttcagtagacatgttttatgtgggtgagattctaataaatacatagagaaacagataaaaaggcagaagttattttagtataaacagacttcatggtaggaagtctttccttcaagctctgaagggcaatacttctatcttcatattattttcttttcatatttacatctaaatttttttcaatgtgataaaatctatagatttagttttggctgacattatccttaaccacatcaaaataa

SEQ ID NO: 267230 - DNA, 454 bp, Homo sapiens
ttttgcttgggtgatgtgtacagcattgtttttcaagttgagcttagttgaggcttgagggctggcatatagagtgaatgtaaaattccattccaaagtattcaattatttgaggaaaatattcgagcaatgtatgaggtataatcctggctgaaagcctgcagtattaaaacaagattacattcttaactaactagtgttaaatccataatttcatctataacctctcttgggaaacttctaattttaagatatgtagttcaaaaaaataaataatatttagcttcaaaatagatttaacataaatttaatggactcactaraagtttcctctgggacttctaaatgataacattgttttgtctcatttccacatcatatattacaggaatataaaaatattaaggcttacaaagtactttttcatttgcttttcacataactgtgtgatcta

SEQ ID NO: 267231 - DNA, 579 bp, Homo sapiens
cttacatttccaccaacaatgtataaatgttcatttttctctacaacctaactagcatttgtcatattttagtttttaataataactattctgactggttgacatggcatctcattgtggttttgatttgcatttccctgatgaatagagatgtggggcattttttcatatgttagtggccacttgtatgtcatcttttgagaagtgtctattcatatcctttgcctattgtttaataaagttatttgttttttgcttgatttttttttagttgcttgtagattctggatattagacatttgcaggtgcatagttttgaatattttctccaattctgtgggttcctatttactctatttatactttcctttgctgtgcagaagtgctttagtttaattaggtcccacttgtctgcatttgtttttattgcaattacttttgaagacatggccagaaattctttgccaaggccaatgccaagaagrgtatttcctactttttttttaggaattttataatttgaggtcttacatttaaatctttaatccatcttgagttagtatttgtacatggtgaaag

SEQ ID NO: 267232 - DNA, 579 bp, Homo sapiens
tggaaggtagttgaatcatgggggcaggtctttcctgcactgttctcgtgatggtgaatgggtcacaggaaaatkgataggtttaaaaacaggagtttctctgcacaagctctctttttgcctgcctccatccacgtaagatgtgactttgctcctccttcgccttccgccatgattgtgaggccttttcaaccatgtggaactgtgagtcaattaaacctttttcctctataaattacccagtctcaggtatgtccttattagtagcaggagaacaaactaacacaaaaagtttactgaatcctggtcgacactaagcattgtttcttctacaacaaatctttgtgaaacctcatgtgtgtctcaggccctgtgctagagagcctgggatttcagaaatggaaagggactaccttcaagaagatcatcctgagcatattcttctttttatactcctacttgtaaatatcatcttaaaatatgtaatgcctagagttaatcttcaaatgagattcaatgaatagagaatatcaatgtctttattaacacagaatgttgtacacaaatacccattatcat

SEQ ID NO: 267233 - DNA, 579 bp, Homo sapiens
tggaaggtagttgaatcatgggggcaggtctttcctgcactgttctcgtgatggtgaatgggtcacaggaaaattgataggtttaaaaacaggagtttctctgcacaagctctctttttgcctgcctccatccacgtaagatgtgactttgctcctccttcgccttccgccatgattgtgaggccttttcaaccatgtggaactgtgagtcaattaaacctttttcctctataaattacccagtctcaggtatgtccttattagtagcaggagaacaaactaacacaaaaagtttactgaatcctggtcgacactaagcattgtttcttctacaacaaatctttgtgaaacctcatgtgtgtctcaggccctgtgctagagagcctgggatttcagaaatggaaagrgactaccttcaagaagatcatcctgagcatattcttctttttatactcctacttgtaaatatcatcttaaaatatgtaatgcctagagttaatcttcaaatgagattcaatgaatagagaatatcaatgtctttattaacacagaatgttgtacacaaatacccattatcat

SEQ ID NO: 267234 - DNA, 522 bp, Homo sapiens
tatgatcctatttttatagtgttaaaaactatgtatcattgaaaaatgaccaaaagaacatgattctctatggttgataggttcttaaattttctttgattttttttttccccccaatttggcttttctaatttttcatcaggtgtttacttttgtaataatagccataaaaggtattgttttcagaaatataattttaagccccactatataaatgtaaatgtaatagagtttaataatttttagtaaacatcactattcaaatccttacatttaaaacatgtaggaacttacattcagtttatgttttcttattctgacctgccattttatacatcartcagctatgccacctttccttgatctccaaaatataaggcattgtgagggcctgtgattgcattcataattcatttctccccacatattgatgagtgtcacctgtgtaccaggttttggggaatgcaatgatgaagagaccttatggcctctgaaacttacacttttctccatcctcacctc

SEQ ID NO: 267235 - DNA, 556 bp, Homo sapiens
ataacctgtgtttgtaatagtagattaccaagaaggcaattatattttagaattttttatcttacaggaaatttcaagagcaggaatgtcctccttcaccagaaccaacacggaaagaaaaagacaagaaaggctgccattgtgtcattttctagaatcccttcagttttagctaccaacggccaggaaaagccctcatcttctctttctctcctcagtttacatcttgttggtacctttctagccttagacaaatgatcaccatgttagccttagacsaagaagctggctagtcctttctgtgaagctaatacaatggtcatttccagacaaatttaaaggaaacactaaggctgcttcaaagattatctgattcctttaaaatatatgtctatatacacagacatgctctttttttaagtgcttacattttaatagagatgaatcagttttggaatctaagctgtttgccaagctgaagctacaggttgtgaaataatttttaacttttggaatcatactgcctactgttactctaaatagaaatatagggttt

SEQ ID NO: 267236 - DNA, 597 bp, Homo sapiens
cttgtattttctttcctaaagagggtcctcaaaattatataagctgtaggtcccctcaacacctggatctgattcctgcagtaaacagcaaaaacataccttttctaatgtctaaaacttgccaatttctggccatgatgccaaaagtaaaatagaacaaaaaagcagaaatcaacaaagacttaaattttaaatatataataaaaattcacatgatgaaaggacacattttaaattaggaaattaaaaacagggccaggcacagtggcccatgcctgtaatccctgcacttcaggaggccaaggtgagacagtcacctgagcccaggaatttgaggtcagcctgagcaacatagtgagacttcayctctataaataaaaataaaaataaattagccaggcgtggtgacacatgcttgtagtcctagctcttcaaggggctgaagcagatggactgcttcagcccaagagttcgagcctatagtaagctatgattgtgccactgcaccccaggctgggccacagactaagaccctatctcttagaaacaatgaaaaagaaaattaaaaaatatccaaatgactcaatgtagtattca

SEQ ID NO: 267237 - DNA, 589 bp, Homo sapiens
tatcatagatgaatgtcaaaatcatcatgccaagcaaaaacatcccagacacaaaaagagtacatactgtatatttctattatataaagtctagaaacaggcaaaactgaacaatgggaataaaaagtcagaagggagacaagggaccttcttggagagatagaaatgtcctatatgtgcttgtaatgatggttacacaaggtgtgtaatttttcaaaactcacatgacaggcttttccaagtaaagtaacagataatgggcaaagacatgaacaaatcatacaaggaaaaaaaatgcaacagtaaaaataagaatcagagttccctggaaacaataacaatataaaccaaaaaawgtttaaatatcattttatatcaattagcaaattaatttacaacttttttcttataaaataattacaccattgtaaaaactttatgaaagtataaagaaaaagataactcaacatttgggtcaatttctatttcttcccattgttttatctattattttaaagattaaaaaataacacaaaaagtattttttcttcaggtaaatcatagtataagcaacttatgtcatcatata

SEQ ID NO: 267238 - DNA, 513 bp, Homo sapiens
tgttattggctaaatacagcaatccagatctatatctatgtgttaaagtagtcacagtctaatttatcttgaacttattagggaagtacataacaaccattgttaaaattttatcagccatacccatcaagattccggattaaatgttaaaaataaatgaaatcacaaacaagtgagcaagaggctataaaaaatgaccatcaatccaatcaagacaaatgtgaatttaaaaaataaaaagttaaagaatgaccactaagatcttaagaggaaacacacagaacttatggaaataaaaaatataacctaatggtaaaaattcaatagatggactaaaaagcstatctcttcaaacactgctaaggagaactaaaggacagactatagtgaacataactacagctagaggagacatttaaaagagaatactatgaacaactttatgcaataaatatgaagcacagacaaaatggacatacgcctagaaaaatacaaactcaaaattgattcaag

SEQ ID NO: 267239 - DNA, 534 bp, Homo sapiens
caacagtatataaaaatatacattatgaccaatatgtcccagaaattcaggaacagaatatatagacttttttaaaattataaatataattcaccatatgaacagactaaagaaaaacactataagagatatggaaaaaggataagaaaatgtcacatttgtcttaaaaaaaaaaaaactatagcaaacaacactttttacagtgaaactcattaaaatcaagaacaagtatgtatgtctactattaccatatttattcaacattacattggaggtcctagttaatttaataagaaaataaagtggtatacaaatttttaagaatatatttgatatgattatctgcacaggaaacaatatacataataattattggaattagaattcagcaaggtatttggatataaaagtmtacatagtcccctcaacctgtcgaaaaaataaacagcaaaaaaaaataccacttctgtataaagctattagaaagcttaagtcaaataaaagacaccatttacaacagcaacagcaaatata

SEQ ID NO: 267240 - DNA, 648 bp, Homo sapiens
agggaggtttttgttagaggagctcaacaggatctttgctcaaggcaggccagtatgggaagatatgaagagtggggggtgtggaatttgatcagataacaatggtgggggattttcgataaactgacccaacaagattgtaactcacctaaatgaaccaaggacagtctaaagtttamgctttgagggcttagagggcctcactggagttaggtcaaagaaaacctttgtcagtatggactcatgtttgactttttgcatgcaacatgtttttgaaattcatattgttgcatgtgctctaaattcattttattttattgttgagtagtactccgttatatgaattaaccaagtgtatttaacccttttccaagttttgtgtgttatgaataaaacttcagtggacattcttgcacaagtatttgtgtggatgtgttttaatttctcttgggtaatatcttaggagttgatttctaggttatagggtaggtacatggttatgtttatactatattgccagttttccaaagtagttctgctactttatactcccaacagcaatgtatgagaacgccagttgttgtattccttgccaacacttggtattatgtctctttttaatgttgagcatggctttttttttttttt

SEQ ID NO: 267241 - DNA, 648 bp, Homo sapiens
agggaggtttttgttagaggagctcaacaggatctttgctcaaggcaggccagtatgggaagatatgaagagtggggggtgtggaatttgatcagataacaatggtgggggattttcgataaactgacccaacaagattgtaactcacctaaatgaaccaaggacagtctaaagtttaagctttgagggcttagagggcctcacyggagttaggtcaaagaaaacctttgtcagtatggactcatgtttgactttttgcatgcaacatgtttttgaaattcatattgttgcatgtgctctaaattcattttattttattgttgagtagtactccgttatatgaattaaccaagtgtatttaacccttttccaagttttgtgtgttatgaataaaacttcagtggacattcttgcacaagtatttgtgtggatgtgttttaatttctcttgggtaatatcttaggagttgatttctaggttatagggtaggtacatggttatgtttatactatattgccagttttccaaagtagttctgctactttatactcccaacagcaatgtatgagaacgccagttgttgtattccttgccaacacttggtattatgtctctttttaatgttgagcatggctttttttttttttt

SEQ ID NO: 267242 - DNA, 648 bp, Homo sapiens
agggaggtttttgttagaggagctcaacaggatctttgctcaaggcaggccagtatgggaagatatgaagagtggggggtgtggaatttgatcagataacaatggtgggggattttcgataaactgacccaacaagattgtaactcacctaaatgaaccaaggacagtctaaagtttaagctttgagggcttagagggcctcactggagttaggtcaaagaaaacctttgtcagtatggactcatgtttgactttttgcatgcaacatgtttttgaaattcatattgttgcatgtgctctaaattcattttattttattgttgagtagtactccgttatatgaattaaccaagtgtatttaacccttttccaagttttgtgtgttatgaataaaacttcagtggacattcttgcacaagtatttgtgtggatgtgttttaatttctcttgggtaatatcttaggagttgatttctaggttatagggtaggtacatggttatgtttatactatattgccagttttccaaagtagttctgctactttatactcccaacagcaatgtatgagaaygccagttgttgtattccttgccaacacttggtattatgtctctttttaatgttgagcatggctttttttttttttt

SEQ ID NO: 267243 - DNA, 560 bp, Homo sapiens
gggcaggaaatattaccataggatgacaattgccattactcttccaaacctagcatttggatccgccaagaaagagaaaggatagagatagtgcatggggtgcatgggcttagttatcattcagggccattctstgccaaagtcaggagctatatccagggaagtaaattaaccctatgggatgaagctgtttgtgcggggtttgtgaacaaaagtcgtttgaaaaggaatttggaggaaagaggcttattccagtgaacagtttgcaaacctgggagatacagccttaaaggaaggtacattccaaagtacaaagggagggctctggttttatagtgacagtgcctgcccaggtgcccaatcatgttcatttatgcaaataaaagattcaaacttgcctagttgtgattggtcaatacagctgagctctggttgattggttgatacagctgagatctccttggctggttcaggtgagcgcagcgtgtggcaaagtacagcagaagtgcgggtggtctggggactcagggtgacctctagtcaactgcagatggctgcgt

SEQ ID NO: 267244 - DNA, 560 bp, Homo sapiens
gggcaggaaatattaccataggatgacaattgccattactcttccaaacctagcatttggatccgccaagaaagagaaaggatagagatagtgcatggggtgcatgggcttagttatcattcagggccattctgtgccaaagtcaggagctatatccagggaagtaaattaaccctatgggatgaagctgtttgtgcggggtttgtgaacaaaagtcgtttgaaaaggaatttggaggaaagaggcttattccagtgaacagtttgcaaacctgggagatacagccttaaaggaaggtacattccaragtacaaagggagggctctggttttatagtgacagtgcctgcccaggtgcccaatcatgttcatttatgcaaataaaagattcaaacttgcctagttgtgattggtcaatacagctgagctctggttgattggttgatacagctgagatctccttggctggttcaggtgagcgcagcgtgtggcaaagtacagcagaagtgcgggtggtctggggactcagggtgacctctagtcaactgcagatggctgcgt

SEQ ID NO: 267245 - DNA, 613 bp, Homo sapiens
accaggtttcaaacctggactactatttagtcgctgtgtgacctggggcaggttatttaatccctgttgcatctactttattatctgtaaaataggaatagtcattgtatctacctcacaggctgttatgaggattaaatgagttaatacatgtagagtgtttaaatcagtacctgtacatagttatctttctacatatttgctcttrcttttatgatctatgacacttattctagatcttccatggacacttagggaaggtgatgactgtagttggatctttggagattgttgagtattttcttcctcagtaatgacacaagatggcgccagagggttggcatttatactcagggattccatccacagctggataatccacgaccagctgtgctgaaaatttagaatacaccagagaatctaggctttcctttgtccctctgtattttcttcaaaatggtgtcttggtggggagttcttggaggaaagcattatgttctggaatctctggggagttctcaagttgaaggaaaatctatttctattcaatggctggaaggcagtcagctgctggtgaagttaactgagctgtatagcagtggaaacacttgtg

SEQ ID NO: 267246 - DNA, 609 bp, Homo sapiens
tcagcttgtcatctggtttcattgcctggcaaaactgttcatatgcaaagtgaataattattttattataaaaagaactcattctcttttgccctctgctgtaggcactgactaggggactaccaagtataacaaaaggaacaaaaggcagaattaaagaaaacttagttaattttacattaaaattaggtggagaaatttgtaagtcaacagatataaaaattctgaatagtgatgctaattaaaaacacaataataaatgagtgcagcgagaacttagaaaatagcaaagggacgccaggcacagtggctcatgcctataatcccagcactttgggaggcygaggtgggcagatcacctgaggtcaggagtttgagaccagcctggccaacatagagaaacgccgtctctactaaaaatacaaaaattagctgggtgtggtggcaggcacctgtaattccagctactcaagaggctgagtcaggagaatcacttgaactcaagaggcagaggctgcagtgagctgagatcgtgctactgcactccagcctgagtgacaagagcgaaactccatctcaaaaaaaaaaaaaaaaaaaaaaaagaatggc

SEQ ID NO: 267247 - DNA, 378 bp, Homo sapiens
gccatggggatggagagtaatttattttctgtcatcttagtcaggtgaagctctttctaagaggaataacccaaatcaggaaggtttccctcmtaagccttcctgtccgctcattttccagtaatgttactgccttactctaccactggccagcattcatcatgatagccattccttgaatagactcttttgtgagcaaatctgttgagctttcattcaatttttaaaaacacagagaaataagatcttgcatttcacttatttacttctaattatttaaaacaagaagctgcctagtaatattttgattttgatggctagccaagtgatatattggaaaagggttttaattttgcttccattttccattctaaagct

SEQ ID NO: 267248 - DNA, 596 bp, Homo sapiens
gcctggctctctgctcctcaagcttgcagacagcctattgtgggaccttgtaatagtgtaagttaatactttataaactcccctttatatatatatatcctattagttctgtccctctagagaaccctgactaatacactttatattatagttggggcattatattaatttctaaaattttgtgcacaagtagattatattatctataaatttcattatgggatatcaaaaggggacaatgtgtctgatagtgctgagtaatggatctacagaccattcattctttcattccttcttttctggaaaatctcacactccaggcttccgtgacaacactgtctcccggtttccctgatcactctttcttagtctatttccctggcttctcttgtacccaaccctgagaagcggcagtgtttcctctgtttcatcctytacccctctgttcttatcaacttctctctcccacgaatttctatgacatttactaacaattatttgccaaactgctctcaaatctaggtaggtagactccccacccctcttgttgattccacagcacattctcacttgtccactctgttcgacttggattt

SEQ ID NO: 267249 - DNA, 553 bp, Homo sapiens
gcttatataatttaatttttaataatggctgagtttaacaactggcttgcaaaattcctgagcatttaataatcatctcccacgagcgcrtatgagcctgccccagcacactctgggtgccactcaaaggaagcccttctgcttccactggggcaaaggattttgagctttttttttttttttttttttttattgatcattcttgggtgtttctcacagagggggatttggccgggtcataggacaatagtggagggaaggtcagcagataaacaagtgaacaaaggtctctggttttcctaggcagaggaccctgcggccttccgcagtgtttgtgtccctgggtacttgagattagggagtggtgatgactctcaacgagcactctgccttcaagcatctgtttaacaaagcacatcttgcaccacccttaatccatttaaccatgagtggacacaacacatgtttcagagagcacagggttgggggtaaggtcacagatcaacaggatcccaaggcagaagaatttatcttagtacagaacaaaatgaaa

SEQ ID NO: 267250 - DNA, 553 bp, Homo sapiens
gcttatataatttaatttttaataatggctgagtttaacaactggcttgcaaaattcctgagcatttaataatcatctcccacgagcgcgtatgagcctgccccagcacactctgggtgccactcaaaggaagcccttctgcttccactggggcaaaggattttgagctttttttttttttttttttttttattgatcattcttgggtgtttctcacagagggggatttggccgggtcataggacaatagtggagggaaggtcagcagataaacaagtgaacaaaggtctctggttttcctaggcagaggaccctgcggccttccgcagtgtttgtgtccctgggtacttgagattagggagtggtgatgactctcaacgagcactctgccttcaagcatctgtttaacaaagcacatcttgcaccrcccttaatccatttaaccatgagtggacacaacacatgtttcagagagcacagggttgggggtaaggtcacagatcaacaggatcccaaggcagaagaatttatcttagtacagaacaaaatgaaa

SEQ ID NO: 267251 - DNA, 512 bp, Homo sapiens
gccttccctcttgatgctacaaagcctgcagaccccacttgctcaccctgttcccaagagcagcctacatgtggccctgtgtggcatgcggtgtcctcctctcccaagctgtgaggaaacgtgactaataaactgctgtcgatttcatgtgaccagtgttgggtgctgtgtgttcagccactctcataatccaagggtggagagctttccctcaccaacggggtaaagagaagacaaccaaaatagaaggcagagccaggtgggacataaggctcacagaaacccattttttggaaaggcttcagtgtctgctctgacttgccctcytctggctgaggggtgagacgctggctgcagtaaggggaatggggacagcagagaggggcaaacacctcgggccaagtgtcctggtgggaaggaaggtatgactggaaggtgttagcacacttcggaaaaatataataaaattagaaaaaggattgaattagaaaaaaaaatagagacaaaatctg

SEQ ID NO: 267252 - DNA, 570 bp, Homo sapiens
aggaccctctcaagatgatcccggacacaactgaaaaataacccagggaatttttgttttcagaagaattcccaggctcaggccctccttttatttacagtaatagcaaatcacccacttgcagtttttctagtctcccaccagctggagtctactaggtactgtgtatctttgggatccacttygggggatacaagaaaggaagaaagaagccaccagaacagaagggtatcccagtgctccagctagaacccagcagaacatctgagcttgccatatctgaatgcttaaaagtggaaagaaggagagttgctcttcatttattttgaaagaaaatccattagaaagatgaatttcgaatgaacatgaatgatcatgacaagtcaaatgcacatcataagtcaaatgaacaggaatgatcatcataagtcaaaggtattaatcaattagaccttcagcctaggaaacaaagttttcctttttctaatataccaccctgaaacaaatttgtcaataaatctcgaagatttagtacaaatagtacaattcatatttgctttcctctttcct

SEQ ID NO: 267253 - DNA, 549 bp, Homo sapiens
ttgtccgtgtacctcatttttcctggacctgggactagaactttggacccgccaaatggtgggactgaaagagctgtaacataaacagggctgaaacacgcttcccacttgccacattgtgggcaactagaaggagagaagagctgtgtccctttggggagcccagacctaggggctctctgagccagggctgtgacaccctctttggagctctgcagttccggggatctccaggcttctaggcaccaccgcattccctggtgcccacagtggaagccacctgtggtacacctggtccagccgtagccttgtacagagccagtgcctgtactggcacttggagctgcctgccccactgcagctgaygtgcctggctctgtgctgtggctggaccctgcgcttgctcacacaccccttgccactccgcacctagcttgcccttggcaggcgtgggatctgggccagtagcacaagccgagtgcagcctgctgggccaagtgggcggaatgaacccagtgggcggaatgaacccagtgggcccgagcaaaa

SEQ ID NO: 267254 - DNA, 544 bp, Homo sapiens
catacatatatacgtatggaagttgaaagttgccacacatccttgaataaactagagtgattatacttactgactcagcgaagtccctgccatttaaaaccacatgaaagtagacaagaatttgtattttacttgttacctattagggatttatttgaaactggtgacaagctgaagtaaatcttaaaaccttcagaatttactcataggttctaatgtgttttcagtcaaaaaaaataaaaattctcaaattaaaaaattaaatgaacagatttgtgaattttctacataaacacaacagaattgaaccattcaaatgcaagsaaatacactgagaaatatcattcagttttcatatatacgcagaaatgtaaggtagctatttgaagaatttcttccatacgtggtcataaattactgccgttttacatcttgggatgtggcaattacataaagtaaaatgtttacccttgtctgaattgcaaaaatgataaaagcatttttttcagagtctagaaagtcattatgtaaagtcatgtgccac

SEQ ID NO: 267255 - DNA, 544 bp, Homo sapiens
catacatatatacgtatggaagttgaaagttgccacacatccttgaataaactagagtgattatacttactgactcagcgaagtccctgccatttaaaaccacatgaaagtagacaagaatttgtattttacttgttacctattagggatttatttgaaactggtgacaagctgaagtaaatcttaaaaccttcagaatttactcataggttctaatgtgttttcagtcaaaaaaaataaaaattctcaaattaaaaaattaaatgaacagatttgtgaattttctacataaacacaacagaattgaaccattcaaatgcaaggaaatacactgagaaatatcaytcagttttcatatatacgcagaaatgtaaggtagctatttgaagaatttcttccatacgtggtcataaattactgccgttttacatcttgggatgtggcaattacataaagtaaaatgtttacccttgtctgaattgcaaaaatgataaaagcatttttttcagagtctagaaagtcattatgtaaagtcatgtgccac

SEQ ID NO: 267256 - DNA, 544 bp, Homo sapiens
catacatatatacgtatggaagttgaaagttgccacacatccttgaataaactagagtgattatacttactgactcagcgaagtccctgccatttaaaaccacatgaaagtagacaagaatttgtattttacttgttacctattagggatttatttgaaactggtgacaagctgaagtaaatcttaaaaccttcagaatttactcataggttctaatgtgttttcagtcaaaaaaaataaaaattctcaaattaaaaaattaaatgaacagatttgtgaattttctacataaacacaacagaattgaaccattcaaatgcaaggaaatacactgagaaatatcattcagttttcatatatacgcagaaatgtaaggtagctatttgaagaatttcttccataygtggtcataaattactgccgttttacatcttgggatgtggcaattacataaagtaaaatgtttacccttgtctgaattgcaaaaatgataaaagcatttttttcagagtctagaaagtcattatgtaaagtcatgtgccac

SEQ ID NO: 267257 - DNA, 620 bp, Homo sapiens
gacaccctttgtcaaactaagcttcactaggaggacctgtgctcatagaagaatatgctttaaaagtatcaattttccacagtcgatgatggagaaaagttcatttgcaccagaatgctgatagtcacaatacacagcctgacatatataacaatacagttttctgtaaacagaagttcttcctcttccaattcaggagtcagtcagagcataaatattgcatgtttcactttagaaactgattcattttagaaagcagatctggattattttgcagggtagaaatgaaggctatttctggcattcttgctcaaaaagtcaatatatgtacattaagtataaaaaagggtctctttcacctcttttgtttcgtagcattggctacataaagaacattgcttatccctaggtctagggccaagttcatttctgctaggaagttgaaatactagaagtgattagagttccatattctagattggtctttcttctggaaggaccacatcatctttcctttacttttataaaaaaaaaagtcatgagaaagcttcagytgaattggtgaaccggcgcctcttccatagttcatgcttacaatgcccactgctgagggccagaaa

SEQ ID NO: 267258 - DNA, 540 bp, Homo sapiens
gagctttatttatactagctaaactctggaactatcccaggtatccatcagtagaatagatgaactgtarcatatgcatacaagggaatactatgtagcaataagaaggactaaaccatgatacatacaacaatgtgaatgaatctcagaaatatgatgaattttaaaatgccttacaccaaaatacatacttcatcatatttgcataaaatttttagaaaatgccaggggttaaatggagggaggaataggttacaaaattgcatgaggaaacttgttgggcaatggaactgtttactatctcgattatgatgacctcaggggtgtaaacaaatatcaaaacccatcattttgaacagtgctgttcaatactacttaataatacctcagtaagttgtaaaaactaatcaattaaaaatgcggcttccccaaatcctctttactcaatagctattgactaaaatcctctctctttagtcaatagctaacattgtgctgaatagtgcaagtttgaaagcttttcctctaagatctaagatc

SEQ ID NO: 267259 - DNA, 451 bp, Homo sapiens
tcttttttctcccatatgtctcaaaaagttgtattttctgggtccaagggatctgcaagcctcctaaaggcatttccattgtcactaccaccaggtgtgaactgtaatctggcacgtatagttccaagaactgtcataatagatgctgaagaaacattgtgaagttaactcgctgttaccaactgtgaagtcattagctagaggaatcttgggcggtctgaaatctgagatactgtggaaagaacagaaagatcctgtatctttcctataattgttctactggaagttgtcattttacacaggagacattytgttttatttattttcttttgagacagggtctcactctgtcgcccaggctggagtgcagtgttgttaccacaggtcactggtgcctccactgcctgaggactgctcaagcaatcctcctgcctcagtcccctgaggagct

SEQ ID NO: 267260 - DNA, 451 bp, Homo sapiens
tcttttttctcccatatgtctcaaaaagttgtattttctgggtccaagggatctgcaagcctcctaaaggcatttccattgtcactaccaccaggtgtgaactgtaatctggcacgtatagttccaagaactgtcataatagatgctgaagaaacattgtgaagttaactcgctgttaccaactgtgaagtcattagctagaggaatcttgggcggtctgaaatctgagatactgtggaaagaacagaaagatcctgtatctttcctataattgttctactggaagttgtcattttacacaggagacattctgttttatttattttcttttgagacagggtctcactctgtcrcccaggctggagtgcagtgttgttaccacaggtcactggtgcctccactgcctgaggactgctcaagcaatcctcctgcctcagtcccctgaggagct

SEQ ID NO: 267261 - DNA, 451 bp, Homo sapiens
tcttttttctcccatatgtctcaaaaagttgtattttctgggtccaagggatctgcaagcctcctaaaggcatttccattgtcactaccaccaggtgtgaactgtaatctggcacgtatagttccaagaactgtcataatagatgctgaagaaacattgtgaagttaactcgctgttaccaactgtgaagtcattagctagaggaatcttgggcggtctgaaatctgagatactgtggaaagaacagaaagatcctgtatctttcctataattgttctactggaagttgtcattttacacaggagacattctgttttatttattttcttttgagacagggtctcactctgtcgcccaggctggagtgcagtgttgttaccacaggtcactggtgyctccactgcctgaggactgctcaagcaatcctcctgcctcagtcccctgaggagct

SEQ ID NO: 267262 - DNA, 447 bp, Homo sapiens
tgagacagggtctcactctgtcgcccaggctggagtgcagtgttgttaccacaggtcactggtgcctccactgcctgaggactgctcaagcaatcctcctgcctcagtcccctgaggagctggggccacaggcctgcaccaccatgcctggctaattatttttatttgtagagacaaagtctatcttgcctaggctgatctcgaactcctgggctcaagtaatcctcccgmggtggcttctcaaagtgcttgggattacagatgtaagctaccatgcccggcctcacaggagacatttttgatgtccctcttgacagtctacaaaagtctacaaatctttttttttttttttttgagacagggtcttgctctgtcacccagtctggaatgcagtggtgccatcatagctcactacagcctgagctgtactgagctcgagggatcttc

SEQ ID NO: 267263 - DNA, 575 bp, Homo sapiens
agcctggggacctagttagggagcctcccacccagggaaatgacgtgggtgtctgggatgacatgggagactgggatgggcttagggtaggaatggactaaacaaggtaccagtggagaaagaagcctcctcccatggatctatccctttttgcccccaaaaggaccagaattccagggagaaagcctcaccccaataggcaattgctgtgtagcggtcaatttcgtgagtcacaatgcaggagaaaatgtcagaaggttctggtgtgaagtttaagtaagaaaaggcctggaagctgagtccatcgacagctgagacaaaagtaggcccaaatccttccacagggayggaatgatgctgccagttcactgtcagcatgggtgggaagagattactgacaaaacagaccaaagtgttgggcttgccaaactccaggggcttcagcgtgaacacttcagcgataggaaaccctggtggggggattgaagtgtagggggaaaaagagactagtttagatggtatctctgtgtttggaggggccatggcatatggaggggagggcagagaagaacaca

SEQ ID NO: 267264 - DNA, 540 bp, Homo sapiens
gaggcagggtgccagggaaggactagggtttggaaatcatggtaaccctccagaaaacaaaagaacatttcccagtatcccaacatttatgcactaacccatcagcggttctggcagtgggragattcaggcccctggacagtagaaaagaagtttatgagactaccagtggggagacatatgggacacagccacctagagtcctaaaccaggggttagcaaactttttctgtaaagggccagatggcaaatattttagacattgtgggctatcagatctctgtcatgagtactcaactgtggcacgaaagcctccatgcacaatatgtaaatgaaggagagtggctgtgttcctagtttcctcctagcttttcctcccacttcttgagcatctccttctcagtctccttcatagactccttcctttcagctactctttaaatactggtgttccctggagtttttgtcctcaaccctctttttatttatggacactaaaattcaaatttcatgtaattttcatgtgtcacgaaatattct

SEQ ID NO: 267265 - DNA, 540 bp, Homo sapiens
gaggcagggtgccagggaaggactagggtttggaaatcatggtaaccctccagaaaacaaaagaacatttcccagtatcccaacatttatgcactaacccatcagcggttctggcagtggggagatkcaggcccctggacagtagaaaagaagtttatgagactaccagtggggagacatatgggacacagccacctagagtcctaaaccaggggttagcaaactttttctgtaaagggccagatggcaaatattttagacattgtgggctatcagatctctgtcatgagtactcaactgtggcacgaaagcctccatgcacaatatgtaaatgaaggagagtggctgtgttcctagtttcctcctagcttttcctcccacttcttgagcatctccttctcagtctccttcatagactccttcctttcagctactctttaaatactggtgttccctggagtttttgtcctcaaccctctttttatttatggacactaaaattcaaatttcatgtaattttcatgtgtcacgaaatattct

SEQ ID NO: 267266 - DNA, 583 bp, Homo sapiens
gtgtattaatgctcaaacagcatttcctaactactcaggtgacatatgtcatctgcttgatgatctctggtcggtcacttgtcttatcacatattcaaattacatttatcatgtgattcaatattgatttattaatttaaaattatatattccacgaatttcctttgaatctctgactaaaaaggtttttttaattttactttgaaaagctccaagcacacacagaagagaagaatctaataaactccaatgtactctcatgaatgtcaacaattttcaacatttaacattcttccattcttgtttcatctattgttctgcattttttggagtatkttaaacaaattctgtcattacatttcaccagtaaatacttttaggcatatctataatagataataacctttcccttaacataactataatgccatcaccacaaccaacaaaattaaaaattacttaacttcatttgacccaatctgttcatttctcctagttatctcaaaaatgtgtaagagaatgaagttttaaatgaaaagcagtgtcttataattttcaaaccgtgccattagtttaaaaaaat

SEQ ID NO: 267267 - DNA, 471 bp, Homo sapiens
atgtctttgttctctgagaggcaatgatttttatctggaccccacataacttttccccagagagcatcacagtaaaagcacatgtttatcttctctccttaacttctgacatccttaaatcccaaggaagggtatggagggagacagattgatgattctgtgtatttgggtaaaccaggttcctggctaaaatcacttagtcaaaaatgccaagcatggtcaagggagaagggttagagagtctaaaagaatgaaatttggagacaggtaaacttgaaatttattctttccttcacctattattgtgtatgtgatttggggtcatattcttaactataactacctattgyctcatcttagaataaggataaataatatctatgttgaaacactgctgtgagcattagtgctcaataactattactactgtactaatgcaggttcttgattttaaacaatagaatgcaaact

SEQ ID NO: 267268 - DNA, 558 bp, Homo sapiens
gttttaaattaaataggagaaaaagtcattaaaaagtacatttatattgtcttttatattcacctatttcagttaccttattggtgtctttatttccttacatggatttgactatattacactatattctagtgtcytttcacttcagcctgaaagtattttagtacagctgtcttgctaatgatgaaatctctgtttctttttacctgaaaatgtcttaatttctccttcatttagagtttttggctgacagcttttcccctcagcactttgaataagtctttcaattgcattctagcctccatgggtctctttctttctcttcctttctttctttctctctctctctctctctttctttttatcttcctctgtctctcttttttaatgttttacttttttcttttaaatagggatggagtgttgaactcctacactcaagcaatcctcccacctcagcctccccaagtgcttagattaaaagcatgagtcaccgcacctgaccctccatggcttctaatgaaagatcatctgtcaatcttcttgcttgaatgtgat

SEQ ID NO: 267269 - DNA, 657 bp, Homo sapiens
cattatgatttctattatctttttacatattcattatagctattataaagtttatctctaatccaataattaagttattcattatttttctcagtgatgcacttttcytccagaaggaattagccttatcctctgttaggcatatagagtagaaaatgatccttattttaatctggaatggatctgacttgaagcagagtttaagctttttctggctgtcattgtctactgtttcactgacatcctgatcccttaaatttggcagccccagataccattctttgtctctccatggccataagttgtttgctagaattatcagtctgttgctctgccctaaaaataagataatctttaggagtaaagcaactggagaatgttggctcctctcttgttattttcttttcatgatcttgtcttctcaagctgtcatcaccttgagagttttatgattccctcaagcatatattttttgtagttttttttcctttgagagggggtcttgctctgtcacccaggctggagtgcggtggtgtgatcatagctcactgcagactcagcttcctgagctccagtattcaagcaatcctcctgcctcagattcccaagtagctaggactataggcatgggccaccatgcccagttgattttttatt

SEQ ID NO: 267270 - DNA, 657 bp, Homo sapiens
cattatgatttctattatctttttacatattcattatagctattataaagtttatctctaatccaataattaagttattcattatttttctcagtgatgcacttttcctccagaaggaattagccttatcctctgttaggcatatagagtagaaaatgatccttattttaatctggaatggatctgacttgaagcagagtttaagctttttctggctgtcattgtctactgtttcactgacatcctgatcccttaaatttggcagccccagataccattctttgtctctccatggccataagttgtttgctagaattatcagtctgttgctctgccctaaaaataagataatctttaggagtaaagcaactggagaatgttggctcctctcttgttattttcttttcatgatcttgtcttctcaagctgtcatcaccttgagagttttatgattccctcaagcatatattttttgtagttttttttcctttgagagggggtcttgctctgtcacccaggctggagwgcggtggtgtgatcatagctcactgcagactcagcttcctgagctccagtattcaagcaatcctcctgcctcagattcccaagtagctaggactataggcatgggccaccatgcccagttgattttttatt

SEQ ID NO: 267271 - DNA, 657 bp, Homo sapiens
cattatgatttctattatctttttacatattcattatagctattataaagtttatctctaatccaataattaagttattcattatttttctcagtgatgcacttttcctccagaaggaattagccttatcctctgttaggcatatagagtagaaaatgatccttattttaatctggaatggatctgacttgaagcagagtttaagctttttctggctgtcattgtctactgtttcactgacatcctgatcccttaaatttggcagccccagataccattctttgtctctccatggccataagttgtttgctagaattatcagtctgttgctctgccctaaaaataagataatctttaggagtaaagcaactggagaatgttggctcctctcttgttattttcttttcatgatcttgtcttctcaagctgtcatcaccttgagagttttatgattccctcaagcatatattttttgtagttttttttcctttgagagggggtcttgctctgtcacccaggctggagtgcrgtggtgtgatcatagctcactgcagactcagcttcctgagctccagtattcaagcaatcctcctgcctcagattcccaagtagctaggactataggcatgggccaccatgcccagttgattttttatt

SEQ ID NO: 267272 - DNA, 605 bp, Homo sapiens
ctggacttcaaacttggctcgttgatctgctgtgtaaccttggaaaacttattcatctttttgagcttcagttttttcaaaataatttctaaataaaaggaataatttctaaatgaatggaatattatcttcattgaagrttcctgtgagatgtaaatggggaaagaaactatgcaggagtctcataaattctggctgttattgctgttattattatgagggccagagggaacatagactatgaggaccagatagatcaatgagcccctaaaatctgtgatccctgaagcagcaattgatgtgaaccaccccatcactcaccccgacgctcctgcgtcctcctgagcactcacccttgatggccccagctcctcggagactcagcaggaaagccaaggagagggctctcaagatcacagctctgatatggaacattctgtcttcagggcgcatgttgtggggtctataattgatgactgtgagcacaggaacagtgatgaggaactgaggccgagtggaggcagatgagactgaaactgtgggcctctagcactggaaatgggtggagaggaatcagcatggctgggattcacctatcagagaaa

SEQ ID NO: 267273 - DNA, 605 bp, Homo sapiens
ctggacttcaaacttggctcgttgatctgctgtgtaaccttggaaaacttattcatctttttgagcttcagttttttcaaaataatttctaaataaaaggaataatttctaaatgaatggaatattatcttcattgaagattcctgtgagatgtaaatggggaaagaaactatgcaggagtctcataaattctggctgttattgctgttattattatgagggccagagggaacatagactatgaggaccagatagatcaatgagcccctaaaatctgtgatycctgaagcagcaattgatgtgaaccaccccatcactcaccccgacgctcctgcgtcctcctgagcactcacccttgatggccccagctcctcggagactcagcaggaaagccaaggagagggctctcaagatcacagctctgatatggaacattctgtcttcagggcgcatgttgtggggtctataattgatgactgtgagcacaggaacagtgatgaggaactgaggccgagtggaggcagatgagactgaaactgtgggcctctagcactggaaatgggtggagaggaatcagcatggctgggattcacctatcagagaaa

SEQ ID NO: 267274 - DNA, 389 bp, Homo sapiens
gagtctcataaattctggctgttattgctgttattattatgagggccagagggaacatagactatgaggaccagatagatcaatgagcccctaaaatctgtgatccctgaagcarcaattgatgtgaaccaccccatcactcaccccgacgctcctgcgtcctcctgagcactcacccttgatggccccagctcctcggagactcagcaggaaagccaaggagagggctctcaagatcacagctctgatatggaacattctgtcttcagggcgcatgttgtggggtctataattgatgactgtgagcacaggaacagtgatgaggaactgaggccgagtggaggcagatgagactgaaactgtgggcctctagcactggaaatgggtgg

SEQ ID NO: 267275 - DNA, 601 bp, Homo sapiens
atggatggcagaggaggaggaatctggactcaaggagctggggggcyctgggcctggaatttcagggtctggggcccaaggcaccaggagaagaggcaggtcaggatatctgagtcaagacctgggatcttgccttagcaatgacactggagactaaaggtggactccatggtgcccttgagcccagccctaccccatctccactatcctctgccaccagctgtgcaacttctgctaggggtgaggttaataaactggagaagttaatttgtggagcatgaaacagatgagcagaacaatcacagcaccttaatttccccagtgtgcccaagaacagagcaggcctgaagacactcaaacagaaacaaacatgtgccgtgtcactgataattctgtgtagacacacacctgccagacactgctcatggcactccctaggaagaacagcatgtgggaaaggctgccaaaattgttcatgtaaaaattacatcaatgctgtcttcctcggtgctgcctatgcagctggcagccatctcttcctccacatcatggcctccctcagactcctcatgaaggataagatcctcaaaaagaggaccaa

SEQ ID NO: 267276 - DNA, 601 bp, Homo sapiens
atggatggcagaggaggaggaatctggactcaaggagctggggggctctgggcctggaatttcagggtctggggcccaaggcaccaggagaagaggcaggtcaggatatctgagtcaagacctgggatcttgccttagcaatgacactggagactaaaggtggactccatggtgcccttgagcccagccctaccccatctccactatcctctgccaccagctgtgcaacttctgcwaggggtgaggttaataaactggagaagttaatttgtggagcatgaaacagatgagcagaacaatcacagcaccttaatttccccagtgtgcccaagaacagagcaggcctgaagacactcaaacagaaacaaacatgtgccgtgtcactgataattctgtgtagacacacacctgccagacactgctcatggcactccctaggaagaacagcatgtgggaaaggctgccaaaattgttcatgtaaaaattacatcaatgctgtcttcctcggtgctgcctatgcagctggcagccatctcttcctccacatcatggcctccctcagactcctcatgaaggataagatcctcaaaaagaggaccaa

SEQ ID NO: 267277 - DNA, 416 bp, Homo sapiens
atatctgagtcaagacctgggatcttgccttagcaatgacactggagactaaaggtggactccatggtgcccttgagcccagccctaccccatctccactatcctctgccaccagctgtgcaacttctgctaggggtgaggttaataaactggagaagttaatttgtggagcatgaaacagatgagcagaacaatcacagcaccttaatttccccagtgtgcccaagaacagagcaggcctgaagayactcaaacagaaacaaacatgtgccgtgtcactgataattctgtgtagacacacacctgccagacactgctcatggcactccctaggaagaacagcatgtgggaaaggctgccaaaattgttcatgtaaaaattacatcaatgctgtcttcctcggtgctgcctatgca

SEQ ID NO: 267278 - DNA, 590 bp, Homo sapiens
ttgacctaattaatatatgcattatatacttctatggtgagaacacttaaaayctactctcttagcaatttgcaagaatacaatgcattgttattaattatattcaccacattgtacactaggcctcttgaacgtattcctcctatttggctgaaattttgtaacctgggacaaacatctttccaaccagcagcattttcagctcctaataaccaccattctattcactatttttattagttcaacttttttggattcacatataaatgagattatgtggtatttgtctttctgtggcatatccacttaacataatgttcttcaagttcatccatttttgttgtgagtgacaggatcttactcttttttaaggctcaatagtatgccattgtgtgtatataccacattttcattatccatttatctgttgatacacacttaggttgtttccatatcttagctattgtgaacaatgttgcaatgaacatggagcataagtatctctatgaagtgctgatttcatttcctttgggtgtatgctcagaaatgagattgctggatcacatggtagttctatttttaatttttta

SEQ ID NO: 267279 - DNA, 582 bp, Homo sapiens
tgttctaaaggttgaaagtacagtatgacaactacagttaagaatactgtgttgtataccataaatttgcttagagtagatcttaggtgttctcattatgaaaatacatgttaactatgtggagaagtttatgctaatgcattcgactggtaattagtttgctatttatgtcaggtcatcacattatacacattaaatatatgtataatttttatttaaaaggttaaaatacaaaaattaaaggtaggaagagatttaaaaataaatgtaattacaatcctaaaagttaaaatttttaaaaagagttccacgaaagaaagaaactggcctggcaagatggttcacgcctgtaatcccagcactttgggaagctcgaggctggtggctcacttgagctcaggagttcaagaccagcctgggcaacatgragaaaccccatctctgcagaaaaacacacacacaaaaaaaatagccaggcatggtggcaagcacctataatcccagctatttgcggggctgaggtgggaggattgcttgagcccgggaggttgaggcttcagtgagccaagaccgccccactgc

SEQ ID NO: 267280 - DNA, 602 bp, Homo sapiens
aaattaaaggtaggaagagatttaaaaataaatgtaattacaatcctaaaagttaaaatttttaaaaagagttccacgaaagaaagaaactggcctggcaagatggttcacgcctgtaatcccagcactttgggaagctcgaggctggtggctcacttgagctcaggagttcaagaccagcctgggcaacatgaagaaaccccatctctgcagaaaaacacacacacaaaaaaaatagccaggcatggtggcawgcacctataatcccagctatttgcggggctgaggtgggaggattgcttgagcccgggaggttgaggcttcagtgagccaagaccgccccactgcactccagcttgggtgacaaagtgagaccatgtctcaaaaataaacaaataagtaaataaataattaattaaaaaagaaactggaactaaaagtaaatcttattaataacacagaaagatgagagattaaaccctttttaattttataaataaatcttttgaggtttactttactttcatattagttaagatgcagttaatattctccattagatacagtcagtatttccacaatttgacctatcattgagaacc

SEQ ID NO: 267281 - DNA, 602 bp, Homo sapiens
aaattaaaggtaggaagagatttaaaaataaatgtaattacaatcctaaaagttaaaatttttaaaaagagttccacgaaagaaagaaactggcctggcaagatggttcacgcctgtaatcccagcactttgggaagctcgaggctggtggctcacttgagctcaggagttcaagaccagcctgggcaacatgaagaaaccccatctctgcagaaaaacacacacacaaaaaaaatagccaggcatggtggcaagcacctataatcccagctatttgcggggctgaggtgggaggattgcttgagcccgggaggttgaggcttcagtgagccaagaccgccccactgcactccagcttgggtgacaaagtgagaccatgtctcaaaaataaacaaataagtaaataaataattaattaaaaaagaaactggaactaaaagtaaatcttattaataacacagaaagatgagagattaaaccctttttaattttataaataaatcttttgagstttactttactttcatattagttaagatgcagttaatattctccattagatacagtcagtatttccacaatttgacctatcattgagaacc

SEQ ID NO: 267282 - DNA, 512 bp, Homo sapiens
cacatttttcttctgcactgccctggcagatgttctacatgaggacttcatctctgcagcaaacttctgcttggacattgaggcatttccatacatcctctgaaatctagttggaggctcccaaagctcaattcttgacttctgtgcacctacaggccgaacaccatgtggaagctgacaagtcttggggcctgtaccctctcaagcaatggcctgagctgtatgttggccccttttagctacagctgggatgctgggcaccaagtcccaagactgcacaaagcaacaagcctctgggcttggcccaggaaaccgttttttcctcctaagccgacctaagatgggaggggctgctttgaaggtctctgacatgccctggagayattctccccattgttttggcaattaacattcagctccttgttacttatgcaatttctgtggcaggtctaaatttctctgcagaaaatgagttttcttttctatagcattgtcaggctgcaaatttccca

SEQ ID NO: 267283 - DNA, 552 bp, Homo sapiens
ttcaacaaaagaaaatatactcaatgtttaaaggttaaagtagttgaagtcaagcatcattacaattttacaatttttgtaaagtatttccaagatttatttaaaagtatattttccttttgcacataaattttactttctaaatttagttgttttgaaggaaataatctcttgaaaattagaatacaaataaacygatatttgttgaatgtttattaatgccagattctattatcaagggtttcacatccattatttcattcaatctttgaggcagttttacatagtttcactacaaataacacactcaagttcacagagataataaatagcaaaacctatcttctgatttagctggaggaatatgtgcagaagcaaaagaatatcaaaaaccttactaaacaattcacatgatctcattacattaaaaatcaatacaagttgctaaaaaatgaaaaagaaacaacacagaaacataaatctcatggcccctattttatattaagaatagctttccaaaggagatcaggaatcttcagggtgctgtggcca

SEQ ID NO: 267284 - DNA, 560 bp, Homo sapiens
taacagtttttttaaattttcttggtttttgaagataaataatatgttcaccttaaacatgaaacacatcacatgccatctactatgtaagttttagtttttcagttatcacttgagtaatattttatatttttctcatggtctttgccatgctccaacacactagtgattacaatttcatcttaattcctgtgttgatgggtcacctgcttatttgctctcagatctattccttccccttctccactctgtttcattgcasagaaatcaatttcccagggcctcttgctagtagcttcctggtagattcagtcaatggaagatgctggcagaagactggtgggcaggattggagagaacccagagcatttctcttctgatgtctagagatgcatctcttactgctgttgcctgcccactgtggctcaaagtcctttctggtagctctctcatctgagtagagaagcaccaacagcagtttcagtttttgccacacagctcctgctacagggtctggcaaccctggttcacactgtagtttctcttcaccctctttagct

SEQ ID NO: 267285 - DNA, 618 bp, Homo sapiens
tgtcttttattaaaagaagtttcagaaagaatttattgaccaccagtaaggttatcatctccctgacagttcataggcaatctggtgcccagggctcactcgagaagaataggattataacaacagtattaatatgagcacacatttattaaacatttaattatatgttggtagcacattgtgtgcttacagtctgactgtaaggcttgagttgttaccttcacattatgctctggcagtggactacttcaaatacgtcacaggtagggagtagaccactacatgactaggcttggctttcatcagctcctatgtggatctgtatgtgcctgcaaggttactgtgttcagcgtctccatatgggctgatctagccaaaacaaagattaatagactacaagacagtcggttttccctagataggcaaatgacaagactccttcaatgttcatgctgaattttacataatttcaaggagtttatctgcacctatagttttactcaaattaattgtaagatccaaaggcctgtagctaataataataagcaggatattccayagactcatagacagtctctacagtcatcgtcatcatcatcatcattatcatatttaatg

SEQ ID NO: 267286 - DNA, 550 bp, Homo sapiens
aacaaacctataaaatcagaaaaagagcctaaggtgcttgttttacaacctgtttttttttttttagygctatagtttaaatgttgacctactcaacattttaaattattttaaaacttcaaatattatgaatatagagataaaataatcacaaggacatagagaggggaacgtcacacactggggcctgtcagggcatgggggactaggggagggatagcgttaggagaaatacttaatgtaaatggtgggttgatgggtgcagcaaaccaccatagcatgtgtatacctatgtaacaaacctgcacgttctgcagttgtatcccagaacttaaagtacaattttttaaaaactcatcatcattctttgtatagaagtgtaaacaagctaaccccaagactataaactgataacttaagaaaacatatcaaggtcaatctggatatatgctacaaaataacacatacaacccaattgcatttcttatagtcaagaaccaacctaatagaaaccataattaaaataagatgcaattaatgttagcaaaaa

SEQ ID NO: 267287 - DNA, 560 bp, Homo sapiens
aatattccttttcatatatgtaatattttctacactttccaaaatttctacacgaattcacaccatttttattatcaaaataagaacactatgagctgttttaagataaccagttactattcaaagcatatttaattaattttctaatattgacacttaagatttatgaaaattcataaaamtgttagtgaaattttgagctacattagtccagcagtttgctgtatacataaatacaaatgtaccaattacttgaaacctaaaacccacacaagatattttacatatttttaaaactttggtttaattctagctatcaagaaaaaaatattatttaactgagaaaagtgaattttctgtaagcaatatctcttcaaagcaaacatctgtgaaaggcatctgtatttctattgactcttatgaagtaaaaccccaattattgctgtccgtactaataaaggctaattatccccaggagtaagaaaaaaatattgattgtgactatgtctgatctacattggtgtcaggtagacgcttttttttttttttaaatgaaagtg

SEQ ID NO: 267288 - DNA, 458 bp, Homo sapiens
aagtgcaacaaaactgaaactgacaataaggacctaattaaactaagaaaattctgtaaagtaaaagaaactatcaagatagtaaacagataacctacaaaatgggagaaaatagtcacaatctatgcaaccaacaaaggtcttataaccagaatctataagaaacaattatataaaaccagcacaaaccaaataacattaaaattgagcaaattaaaatttgctcaattaaatgagcaaattacctgagtagactcttctcaaaagaagatatacacatagccaacaaatatgtataaaaaatgatcaacatcagtaatcattagataaatgcaaatcacaacctcaatgagatactatctcacacaagttagaatggctattaaaaagactaaaaaaaaaaaaaaaaaaagaaaagaawaaaggtgttgttggcaaggctgtagagcagagggaac

SEQ ID NO: 267289 - DNA, 521 bp, Homo sapiens
aatgcagtgctgccataacaaaaacataraatatgtagtattggtttacaaaccatggacaagtggacagtgaaaaggcagtgaggggattcatgaaagtaaaagctgtaaaagtcacagggaaattattactggaggctggacaaataaaggaaattctgacacatgcaacatgaataaaccttgaggacattatgccaggtgaaataagccagtaacaaaaataaaatactatatgattccatttatatgaggtatctaaaggagaaatattcctagaaaggggctgagaagaggaaagatggggagttgtttaatgggcatagaattttcagctttctgagatgaaacatttctgggtaatggtagcgtaacactggctatacttaacactactgacctgtacacttagaaagcgtaaggtggtaaacttatgtgtttttcagcacaattacaatttttaaaaaatctctattgatcgtctgtctgtctctatctctatctaatgtatctatcaatct

SEQ ID NO: 267290 - DNA, 521 bp, Homo sapiens
aatgcagtgctgccataacaaaaacataaaatatgtagtattggtttacaaaccatggacaagtggacagtgaaaaggcagtgaggggattcatgaaagtaaaagctgtaaaagtcacagggaaattattactggaggctggacaaataaaggaaattctgacacatgcaacatgaataaaccttgaggacattatgccaggtgaaataagccagtaacaaaaataaaatactatatgattccatttatatgaggtatctaaaggagamatattcctagaaaggggctgagaagaggaaagatggggagttgtttaatgggcatagaattttcagctttctgagatgaaacatttctgggtaatggtagcgtaacactggctatacttaacactactgacctgtacacttagaaagcgtaaggtggtaaacttatgtgtttttcagcacaattacaatttttaaaaaatctctattgatcgtctgtctgtctctatctctatctaatgtatctatcaatct

SEQ ID NO: 267291 - DNA, 607 bp, Homo sapiens
attcaactgaaaaaaatacaaaaagctagacaaaattgtaccaaaagggtgtagacaaacatgaattttatgtattacatattgttagtaccagtaatgtgtaacaaaacagaatattactgaacatgatcccacaataatatttttamattttctaaaaataatttgcataagagataccataataaatatataactttaaacactaaattctaaccttgagctgttcagtctcaaatcttattattgcatgttgaatcaataatagataacatcagaagtgatacttttccaagattagcaacttttattatttatgctctcttgaaggacctcaattacactgaaactattttttcccaatcataaacctagcacatcctaagacagcatatatttttatatttttagggtacaataaaaacttaaagttgaagaaatgtgttagaggtttaattcgcctaaaatataggtataggtaaataagataagtttgatatattgtttgatttctgtcatgctaaacatttctgaaatcatttgagccagaagttattgataaaggaagcaaacatcaaaaataatattgttgttccactaagtaagc

SEQ ID NO: 267292 - DNA, 607 bp, Homo sapiens
attcaactgaaaaaaatacaaaaagctagacaaaattgtaccaaaagggtgtagacaaacatgaattttatgtattacatattgttagtaccagtaatgtgtaacaaaacagaatattactgaacatgatcccacaataatatttttacattttctaaaaataatttgcataagagataccataataaatatataactttaaacactaaattctaaccttgagctgttcagtctcaaatcttattattgcatgttgaatcaataatagataacatcagaagtgatacttttccaagattagcaacttttattatttatgctctcttgaaggacctcaattacactgaaactattttttcccaatcataaacctagcacatcctaagacagcatatatttttatatttttagggtacaataaaaacttaaagttgaagaaatgtgttagaggtttaattcgcctaaaatataggtataggtaaataagataagtttgatatattgtttgatttctgtcatgctaaacrtttctgaaatcatttgagccagaagttattgataaaggaagcaaacatcaaaaataatattgttgttccactaagtaagc

SEQ ID NO: 267293 - DNA, 597 bp, Homo sapiens
gattcttacctcatgcttcctacaaactgaaagtgattttgtttaattaagactccaggaaggagcattctctatagctgagcagcttgtacagtcgtgggcaaggagagagaatgggaatggaaaagctgtggtgttggctttggtccttggtccaacaagtagatcaygatagcttgtctgctccccaggaaatctgcacactgacagataatgttaccctccagcctcatcccactgaccagccttggacacccaggacacatcacttctgtcacccaaaagcaagaaagtaggaaagtcagcttttttccacttattttcttccttgtcattcctcattcttctctctccctctctacttattatctgttcccttcctttctctctctttctaggaaagctaaagaatctgatcaatgttgactagagtcatacgatccttcttcttcatctgcaacaccatcattgtctttcccttcatacactggttctcaaacttgtgcttaaattaggccatgcaagatattgtcaaaacacaaatgctaggctccgcctccagagtttctgattcagtcagtctggggtgggccctaa

SEQ ID NO: 267294 - DNA, 592 bp, Homo sapiens
agttattttcttagtgccataaatctgtccattttaatttctaaatggaaatgaatgactgactctattgaaatcaacatttaacaaatatcttttaaagaagaagattctaggcactatagatttawctataaatttattttttgtttagcctcagttttaccaatttgcttttgtttttatcatttattctggttgggagaatagaattaatatatatttggcaaactatgaaaatatattaaaaaagcactgacaacattttgctttaaatattaggagataagaataagaaacataagaagactgcacaagttttaataatgttcaaaaattagatttcctgctcatttccagctccatatattttaaaaaacaagtttgtagccaaattgtgattctgagtcaagcaaatactgcagcagaaaggtcattttgcagaaataatagtattttaactttctcctctctgggtgagttaatgccatgatgcagatgccttccctatttagataagagaagataaagggaattgtattgtaattttaatatttcctttgtcactttgaataaaatccattaatgccagggc

SEQ ID NO: 267295 - DNA, 420 bp, Homo sapiens
ggacatcttaccactcctgcaatgaatgttttacctccaytgaagtatgtaaatgctttcagggatttgaaaataattatttcagtaaaggaatgtagagctcctgaactcgcataatttcccacaagaaaaattaaatcagaattatgtaagtatatcgctgcaaatccagctggccctaaggcaatgcctgggaagagagagcatgcagcatgccgcaaaagctcatctcaagctctgcctgtcctctgcagtcgaacttaagtgatcatttggagtaataccacaaggacatgaagcatccatggtgttgaaaaggtataaaaataaagagcagtagaatattgcggcaagaacccaagcagagtaagaaaatgagggggaagaaatacactatattaaaagcaagagacattggaa

SEQ ID NO: 267296 - DNA, 560 bp, Homo sapiens
taaaatagtatattcatatcttaacatattatgaatctattaaatggtgttttaaaatatttgtaaaatattaaaaatacatttttggtgaaaaatgctcaaatctgcatagacatcaaaattgtgactatataacatacatcggcatatatttagtatataagtatatactatctagcatatttatgagaccatgggggtgtgtgtgtgtgtgtgtgtgtgttcaaaacaaagttgtataagatacactgtagacattatgaactctggagacagactactgaaatgccaatattagttctgtcacctagcaagttacctaaatctttttcttcagactcctcctttgtgaaatgtataaagttgatggtgaaattagatgagttagtctttgcttagaaaaaatgtgtaacagagagtattatacaagtctttgttacgatcatttaaatacacacgcaacattatatgtacaaaaataaacatgtatacacacatgcaatsacaaaaacatgcaaaatagggcaaaatattatcagtgaatagtttttgtttctgag

SEQ ID NO: 267297 - DNA, 362 bp, Homo sapiens
ttggtgttgtatgggtttggacaaatataagtaacatgtatcccccatgatagtattatagagagcagttgaactgccctaaaggtcctctgtgctctgcctattcatctctccctttggctaaacccctggcacctactgatccttctagtgtctccataggttttccttttccagaatatcatatagctkgaatttttagtacttatccttttcagattggcttctttcacttagttatatgtatttattttttccttgtcttttcatggcttgatagttcatttttaacgatgaatcctattccactatctggatgtaccacaattggcttattcattcacctactgaatgacatcttg

SEQ ID NO: 267298 - DNA, 591 bp, Homo sapiens
ttgatgaatattgtatagcatttctggatcccattttcctgggccatcacttaggatttttgtgcccataattatagattaatctgtaattctattgtctttcttttaaaaaaaattgacacagggtcttaccctgtcacccaggctggagtacagtggcacaaaccacrcatcactgcagcctggacctcctatgctcaagtgatcctcctgccttagcctcctgagctgctgggacctcaggcatgcaccaccacgcccagctgattttttgtattttttagttgagatggggttttggcgtgttgcccgggctggtcttgaactcctgagctcaggcgatccacccgcttaggcctcccgaagtactgggattacaggtgtgagccaccatgctcagcctatattctcttttgctatatgattctaattaactttcaataatttactatctcataaaaatgttaggaaactgtttttttttttgagcttctctaaagtattttttaaaatctgttccttaaatttctggcaaaattcaccaacagaacacagctctataacatgacttatttgtttcaaggaggcata

SEQ ID NO: 267299 - DNA, 591 bp, Homo sapiens
ttgatgaatattgtatagcatttctggatcccattttcctgggccatcacttaggatttttgtgcccataattatagattaatctgtaattctattgtctttcttttaaaaaaaattgacacagggtcttaccctgtcacccaggctggagtacagtggcacaaaccacgcatcactgcagcctggacctcctatgctcaagtgatcctcctgccttagcctcctgagctgctgggacctcaggcatgcaccaccacgcccagctgattttttgtattttttagttgagatggggttttggcgtgttgcccgggctggtcttgaactcctgagctcaggcgatccacccgcttaggcctcccgaagtactgggattacaggtgtgagccaccatgctcagcctatattctcttttgctatatgattctaattaactttcaataatttactatctcataaaaatgttaggaaactgtttttttttttgagcttctctaaagtattttttaaaatctgttccttaaatttctggcaaaattcaccaacagaacacagctstataacatgacttatttgtttcaaggaggcata

SEQ ID NO: 267300 - DNA, 631 bp, Homo sapiens
aaataataatttttaattatatcttttgagtgtttagatttcagaggaaatgacaaatgaaacaaaatatgatgttggtgcaaacctaactgtggtttctgcattaaaagtaatggaaaaaaacacaattacgtttgcaccaacctaatatatgcacaatttttttcatttttttgtaaaatttagataactattgtataagattataagtaaaacaattcawtatagtgcttagattatattaaacatgagaaagacattttttaaataataggaatagaataaaatacgcttccttgtgaaattgtgagttcctcgacactggagtgatttaagtggagacaatgttatccaaaggattattacatgaaattgatgattgtggtttcttccagttccaattttctaaaattctttgaaactattgattctccattaaacttcaaatgctgatttctaaaacactttctttctgaagtttaatattatttaatatgtttttcatgaactcaaatataattgtttaacatttatacaccaataagtatttaatacactatatatcaagaagaagcactgggcataatatggcaaaaaataaagatatgatccttctcctcatgatgtttat

SEQ ID NO: 267301 - DNA, 589 bp, Homo sapiens
gtcctggaagtggagatatgaattaaaagctattgtaggaatctagggaagagataataatttagaccaaagaaataacaaaaaggcagaargaaagtttaaatttagaaggagatttaatcaaattttgtgatttattagggagtggcagaaatagatgtcaagaacttaatagtttctgaataaaacaaagtagctgatatcaaactcatccaacagctgtaaacaattataaatttggagcaaaatgtattttaagaggtataaaaacatgtttgaatgcatcagcccacactatgatatttaagaaaaaggaagagcatgaagtaagacttacattaaccctggatttttcactaggggaatttttcaaattgctgcacagagaaagagggccagacagagatcaaaggtctcaatatgagtgggaggagaaatcagaggtcagagtctggggctgtgaaagtggttgggatttggatggcaaaatatcagaaaggaggaaagtgccaagaagtcctccgagcgtctgcataaaatgtcgttgaggacctgtgacagtttctcagctgaccatgtgcaggacaag

SEQ ID NO: 267302 - DNA, 589 bp, Homo sapiens
gtcctggaagtggagatatgaattaaaagctattgtaggaatctagggaagagataataatttagaccaaagaaataacaaaaaggcagaaggaaagtttaaatttagaaggagatttaatcaaattttgtgatttattagggagtggcagaaatagatgtcaagaacttaatagtttctgaataaaacaaagtagctgatatcaaactcatccaacagctgtaaacaattataaatttggagcaaaatgtattttaagaggtataaaaacatgtttgaatgcatcagcccacactatgatatttaagaaaaaggaagagcatgaagtaagacttacattaaccctggatttttcactaggggaatttttcaaattgctgcacagagaaagagggccagacagagakcaaaggtctcaatatgagtgggaggagaaatcagaggtcagagtctggggctgtgaaagtggttgggatttggatggcaaaatatcagaaaggaggaaagtgccaagaagtcctccgagcgtctgcataaaatgtcgttgaggacctgtgacagtttctcagctgaccatgtgcaggacaag

SEQ ID NO: 267303 - DNA, 465 bp, Homo sapiens
atgagtgggaggagaaatcagaggtcagagtctggggctgtgaaagtggttgggatttggatggcaaaatatcagaaaggaggaaagtgccaagaagtcctccgagcgtctgcataaaatgtcgttgaggacctgtgacagtttctcagctgaccatgtgcaggacaagatgctaagaggtcaagtagtaarcagatgcagagaacctatgagctgagtttccagaggtctcactgaggaaatgttgaagtttcttcccaatcatagtagagagagttggtgcacacattaggcttcagttgagatgccagaaacaccattcctacaagtaaaagcatgtcttagtggtaagtgctctctttcgatatggggataagttaaggagttaaaggagatctgtgctaaaatggcctaaaacccaagcatcaacagaaaaagggtgatcctctcttcatttaatagctt

SEQ ID NO: 267304 - DNA, 561 bp, Homo sapiens
tgcacattgaaaaattgttctgtatttttttaagaataatgtactatgcttttattatcaagtattctgtactggaaaggcagaatatcaaatcccaagtaacaattaattgatctataacaaccacagcacaattctagaccatacaccattaaaaaagccagttagtagctgactgtctttgcataatatttatacatttatggccgtaaaaatactcaaaatactgagcttcaakgattaaaaagtaatatagaaattttggtacaaagcataccactatcaaagccaagtagaaaatctttaacacgttgggtctgaagtcaactatttatgctgtatatgctgaagtagttcatattctttttcttccttgcccagagttcctgtcagaagaggaggagagaattgctttggcagaaagggatagagagcaaaggtggaaaatggaaaccattcatgtagtgacataaaagctgtcaaccaaatgaagtacattcttctgaattgaagggcaaagaaaaactaaaagtaggacagaaagcacacaaagtagggaca

SEQ ID NO: 267305 - DNA, 528 bp, Homo sapiens
aataaaaatatttatgctttcatttaaaaattgttactatcaaacacatcttatatgtatggtcaaaaaggaaagatgctaatctaggcctaatccccactaaataagttaataaacatgagttgggaatatgagttttactaaaaggttaaacacatacacacacaaataggcttcaataacctgagaaatgacataatctgaggacttaagaatatggaaatcatgatatagattgactactcatgaatgtcaaaaaatatttattaatttaaaaataaagcataatagttacaaactgaaaatcagggtaaatgaataaaatgtatttaataacactacgagcttttatctccagttstacattttaatccatgtaaatttagaagggcaagaaaaacaaaggcaaagagtaaggtaaacaattcttcatgtaggggaatatttaaaatgtaatctcattcttgaccttaattacaaagctctaattaagagattcaagattttaaaagtaacttaaatgactct

SEQ ID NO: 267306 - DNA, 620 bp, Homo sapiens
tatagcaacgcaccgcacgactttctggttaataatggatgcatayaaggtagtggtcccataagattataatggagctatataatggagtaggctataccatctaaatctatgaccttcacacaaagataaaattacctaatgatgatcttttcagattatatccctattgttgatacacacgtgcacacacacactatgtatgtgtgtgtgtgtataacagacgatagatagatatagatgtgattcatctgtgaaaaattttctcttgagacatggctagcagtagcatcaccagattatacttgttatgatactaaatttctcaaggtaataccaaaatgtctcccaaaattgtttaccaatttaactcaataattagaagggatccagtttaatcacattttcattaactcttgatgtgacatttgaaaacttttgtcaatccctgatcaataattatgtataatgtctctttatattttttattagattaacatttttctcatgtatgtttattcaggccttttgctcattactctattttggcatttttccatttctttttttctgtatatattcatgttataatgttcatactattcctttgttggtcataa

SEQ ID NO: 267307 - DNA, 620 bp, Homo sapiens
tatagcaacgcaccgcacgactttctggttaataatggatgcatacaaggtagtggtcccataagattataatggagctatataatggagtaggctataccatctaaatctatgaccttcacacaaagataaaattacctaatgatgatcttttcagattatatccctattgttgatacacacgtgcacacacacactatgtatgtgtgtgtgtgtataacagacgatagatagatatagatgtgattcatctgtgaaaaattttctcttgagacatggctagcagtagcatcaccagattatacttgttatgatactaaatttctcaaggtaataccaaaatgtctcccaaaattgtttaccaatttaactcaataattagaagggatccagtttaatcacattttcattaactcttgatgtgacatttgaaaacttttgtcaatccctgatcaataattatgtataatgtctctttatattttttattagattaacatttttctcatgtatgtttattcasgccttttgctcattactctattttggcatttttccatttctttttttctgtatatattcatgttataatgttcatactattcctttgttggtcataa

SEQ ID NO: 267308 - DNA, 380 bp, Homo sapiens
ttaaaaataaataaataaaaataaataaaattgcaagaaatatcaatcctcctctatacaaagtcaaaccactgctaaagatgaaccagatcccaagtgattgatctctataccagcgttattaaagtgaaatcaagttaaatgttagaaagaattatatagatttaagttgttactcttccaaggggtrtgggggaggggagttttttttaagcaccctgatggagaaatgctattctgtaaactcttctcatcaaatatttatgcttacagaatgaacattttgttaataatatcataatgaactcccaaataatatttagtcttatttctgaatttcaaacatttggacatttttcagtaatacccacattttgttg

SEQ ID NO: 267309 - DNA, 528 bp, Homo sapiens
tatagtacactatgaggctctgccataaacaatcttaacattctcaggaaaaygtaactgtatttaactaaaactttagtataaactgtattggaatgatgagatagaagagtggtgaaagttgtgttggtgtaagagttcatcagatgtaatgagttctcaagagataatagaacaaggatagtaggaaaagcctatatagaacttgaggataagtagcagcaggagaaagatttaatgtatacaagagtagtgtccttgggaaacgacactctgattaaaatgaaatacattatcaaattctatgaggtcaaatacctcatagtttaaagtttctgagatttgtgtttgcttaaaaaggccttttctgaaatgcttacaaaaataatctcattttcttacaatactttcctagtttacttttgtttataaaattatctctttaatctatttggggtttaattttgtatggtttagtactgacttttaaaaaattttgtttgattatatctaatgtcacagatgtag

SEQ ID NO: 267310 - DNA, 543 bp, Homo sapiens
gtcttttctactttctgtcgttttcataaactttgaattttaaaaacatatagggaattccatggaagaggaattagtaattctttctaaaataaaggcttagagttctcagtagactactatactatacaaatgtcttgcattaaccaagtgtcagtagaataatgyaatttaatagaaattagttttatttacactttctctccagacctcttccaatatttgagattggggcatttgacaacattgccaaaccatgcgaatctcagttatagatatctgagggaaacaggtgtaccaagagcaattctatcttcaatgaaggaaatgtacattgctattatgaatgcatctgtgcttttcaattctgaaattcctgttcttaaacattaatttacactttaaaatgcccttaaaagtcgatgaaaaaagaaacacaaagttacctcagcattaatcaagaaatttgttgaattctcttccagtttccaaatattagtagtaattattgccacttttggggttgttattgagataaagcac

SEQ ID NO: 267311 - DNA, 606 bp, Homo sapiens
tgaaattcacatatacacttaaaatttagactctttctttcctaatggatactaaatttgggaaagacacattgctattttttaaaaataagtttgaaaaaaaagtgtaaaactaacttaaaaaatgttttttccctccaccgagattacttttgtatatttgtgcagagacactaaaactatgttccatggagtatccaggacatgtatgaggggttttgggggtgacagcagaaaggagctgggatacatgcagactcgtaagtcctcatctgcttcccacggccactctccttgaacttctttgtatttggggctctatgtaaactttcatttgaaaaagggattccactattcacagagtttggaagccactgaggtatgaaagtgttaagagaaagagmtttgcgaagagctaaaaatagacttgccattggatccagcaatctcaatactgggcatcgacccaaaggaaaagaaagctttatataaagacacctgcactcatgattatcacagcactgtttacaatagcaaaaatcatggaatcaaatgtccatcaatggatgattaggtaaagagaatgtggtacctatacaccatgac

SEQ ID NO: 267312 - DNA, 606 bp, Homo sapiens
tgaaattcacatatacacttaaaatttagactctttctttcctaatggatactaaatttgggaaagacacattgctattttttaaaaataagtttgaaaaaaaagtgtaaaactaacttaaaaaatgttttttccctccaccgagattacttttgtatatttgtgcagagacactaaaactatgttccatggagtatccaggacatgtatgaggggttttgggggtgacagcagaaaggagctgggatacatgcagactcgtaagtcctcatctgcttcccacggccactctccttgaacttctttgtatttggggctctatgtaaactttcatttgaaaaagggattccactattcacagagtttggaagccactgaggtatgaaagtgttaagagaaagagctttgcraagagctaaaaatagacttgccattggatccagcaatctcaatactgggcatcgacccaaaggaaaagaaagctttatataaagacacctgcactcatgattatcacagcactgtttacaatagcaaaaatcatggaatcaaatgtccatcaatggatgattaggtaaagagaatgtggtacctatacaccatgac

SEQ ID NO: 267313 - DNA, 631 bp, Homo sapiens
aactgtaagactcttgtctcatactgcacaaaaaattaactgaagtggatcataggtccatatataatagataaaaaccacaatgatatactactaaatacccactacaatggctatagtaagacagtagcttgtgttggtgaggatgaagagaaactggaatccccacacattgctgrtatgagtttaaaatggtgcagctccactggaagtaagtttggcagtttcttaaaaagttaaacttaccatgcaacccagaaattccacttcttggaatctatttaagaaaaatgaactcatgttgatacaaagacatgtctgtgaatgtttctagcagtgttattcctaataggtctaactgaaaacaattgaaatgcccatcgattggccaatggttaaataaatgtggtataccataccatggaacactgttctataattaaaagcacacaactaatatatgtactagaacatgaatgaaccttaaaaacactgtgctaagtaaaagaatccagacgaaaatagcctatgtattgtgtaattccatttatatgcaatgtctagaaaagacaagtttatagagacaaagcagatgattgtgcctaactaaagctggggatggaagacagga

SEQ ID NO: 267314 - DNA, 601 bp, Homo sapiens
ctgtttctggtgatgttgctgtaagatgccactgtgggcacactgtctatgggttaaccctcctctgcaaggagcagtgcctctgttgctataggctactgcttcaataaagttgctgtctaacaccaccagcttacccttacgttctttcctgggtgaagccaagaaccaggctaagccccaatttgggggcttttctgtcctgcattgctttgaggtagggtgagactcctcattagagctcagagaaaccctcttgctcaaaattagaataactggtaaatcataataaaaaataataaacatttactgagccctcactataccatgcattcttctgaatcttttgtgattttaaccttataaaaactcaggggcaggtgctactcttagccttatttactaagggtaagactgagctacagaagtgwccagggagcttgccagaagtcccagaaataggagaaatgatgcagtgcattggcctgggctattctggtccagggtccatgcctttacacaccacagtatgtgtcccagtgagaacctggcccttccctctccttccatgtccagagctctcagcctggttcacaaagcc

SEQ ID NO: 267315 - DNA, 526 bp, Homo sapiens
gagtaataggtcaggtgcctgagatctgttctgagatgaggttggatcttgtggaggggccaggttttcctaagctcatccagctgggtatgcagcatgcttccacattacgctggatggactctgcaagcctctgtctctgcatatggccatcatcaacttggtgttaggcaagaacagagggaagtagacaggagtrtctaattgttgctctaaaactgatgtagagcaggcttcactcccaaaagaattcaagagagagctggtggtggaagaaaggagctatattgaagcagctgtattacaactctgtgatttcagggttagcgcataggcagtgcacagagagtagccacatgggatgctggcagtggtatttatacccacttttaatgacatacaaattaagggacaggttattcagaaatcactagaaaatggggagtaacctctgggttttgccatagaaatgggtggcaacttgtgggcattgccatggcatttgtaaactgtcatggcacggcgg

SEQ ID NO: 267316 - DNA, 577 bp, Homo sapiens
agggggtggtataccatttgaagcacatatcagagtccactcatttatycaaacagatatttattaagagtctattaagattccaaacgttgcgagacattgacccaatctttgtaaactgagtgtttggaaaacactgaagattaactgtccaaatgagagagatacgacctaaatgggccagaaagatggggagggaggatgctctgagcaacctctggcatgtttttaaaatatcccccaaagcccaggcccttttacattatgctaggattatcaataattattactaaaaatatttttaaaatcacattttcagtaagaaagggtgagagacagttctaagattaatttatctttctacttaatcttggggccgattttaaatccattttaaagtcttactgtggcttcactgttccagctcatagtccagaagtgttaacataaaaccacgttgcatgttgaaaaagcatttcaaaggagcgaacctcttccaccagcaccgagggtattgtcacatgacaccgagtgaggtttctgaagtggaaatttgccttgggaaaatctttgccgt

SEQ ID NO: 267317 - DNA, 571 bp, Homo sapiens
ggaaacaacagtctgacattcctaacagggtcctccctgggaacacacacaagtgcatttcatatttgaattgtctcagtagtttcattttactcatttgatatttttcatcaattcatttattcattcactcatttattttgaaagtgtttttggtggtggtggtggtggtggtttttgttttttccatgtcaatctcaaatgtatttgcaatttatctrggtgtaatttacctacatgtaatatgtgaggtgggaatataacttcttctcttatatgaccaaccagttataacactaatcatgaaatcattgatccttttctcacctgatctgaaatactcttcttatcgtatacaaatgagagtgcaatgttgctatctgtttccaggcttttagtttctacccacccacctctaccctgcctgttgagcttgtgttcaatttacgtatttgtttggggaagaattaatataattacaatactgaattttccccttcaaggatatggtatctccgtctttttttataaatgtcttctgtgaagtcttttataaaagttttgtagtttt

SEQ ID NO: 267318 - DNA, 493 bp, Homo sapiens
cttgggctggtggctcctccctataatcccagcattttgggggctgaggcaggaggatcactagaggccaagagtttgaggttacagtgagctgtgattacaccactgcattccagcttgggtaacagaatgaaactctaactctttaaaaaaaaaaaagtacagatagcttggctcaatagaaattactatwtcaaattcctaagtttctgtttttaactttaataattcaatacttttgcttttcttttattccttgctatgttggttgcccagtttactagctttcatctttcctgcttagtaaagtaagacttatattttcctctatgtacacaactagctgcttcccataatctcatacttgttagtttcttattaatttttagctttattcacaggattcaagaatgtgacttatgtaggttctactttttagaatttcatgtggttttctttgtggcataatatatagtagatttttatgtaaatt

SEQ ID NO: 267319 - DNA, 632 bp, Homo sapiens
ctagctgcttcccataatctcatacttgttagtttcttattaatttttagctttattcacaggattcaagaatgtgacttatgtaggttctactttttagaatttcatgtggttttctttgtggcataatatatagtagatttttatgtaaattcaatgaggatttaaaaaggtgaagtctagtggtaatatgttttaaggtttagcattcaattgataactattaaattarcaatcattaatgattacattgttaatgtcttctatatcatttatttatttttggcttcttactttattactttataagtaataatattatttgtattttatatataaaatacataaagtaatagtaatttatagttttccctttattaaatgcttgtttgtcagatttggagatcaaggttatgctggctcgatggttgtcaactgtgggagacaccttattgtctcctattaccatatcatttttttgttctttgctgcttcatttatgtggaatgtaaattgacccataaaggagtcaaagtctcccttaattttgtattccactattttctagttgtactctaaaataagcagtagtacataatttcacatcttaaaaatagcctttgcacttctgt

SEQ ID NO: 267320 - DNA, 632 bp, Homo sapiens
ctagctgcttcccataatctcatacttgttagtttcttattaatttttagctttattcacaggattcaagaatgtgacttatgtaggttctactttttagaatttcatgtggttttctttgtggcataatatatagtagatttttatgtaaattcaatgaggatttaaaaaggtgaagtctagtggtaatatgttttaaggtttagcattcaattgataactattaaattagcaatcattaatgattacattgttaatgtcttctatatcatttatttatttttggcttcttactttattactttataagtaataatattatttgtattttatatataaaatayataaagtaatagtaatttatagttttccctttattaaatgcttgtttgtcagatttggagatcaaggttatgctggctcgatggttgtcaactgtgggagacaccttattgtctcctattaccatatcatttttttgttctttgctgcttcatttatgtggaatgtaaattgacccataaaggagtcaaagtctcccttaattttgtattccactattttctagttgtactctaaaataagcagtagtacataatttcacatcttaaaaatagcctttgcacttctgt

SEQ ID NO: 267321 - DNA, 598 bp, Homo sapiens
agaccaaggaagttataggagcccatgttgatgacatctttgatgactcttccagtaaacctgtggggaaacatgtaaatgagcacataatcccctccccaggattatgcacgattcaaaaaatccctggtggaagacttgggttcctatgaagaaaaagaggatgaggtgaccaaggagatggcagctcagatctgtgaggtggaacagagctggcaggaggtggttcagtctgtcctagaggttggtttccctcggaggatccagaccccctcagccagtgccgggcactttagtccctggaagctggaaaaggatgaacagccaggtagcttccagcccacagcaggcctccaacttggacctgccacagctccagagcttgactggatggagacaggactatctccgatattcattggtyatcaggatataccaggagttggtaacatccactcaggtgccacacctccctggatgatccaggatgaagaatgcatctctgggaaccaacaaacaggaccgtcctataaagaatttattaaagaaaaggaaaaagagaagttgaaggaactttccccaaactgagttggggcca

SEQ ID NO: 267322 - DNA, 525 bp, Homo sapiens
tgtataaagtgtaatccatgaccaaagggatctgcaatctagctgaggcttaaagcaagacatgtctaatgtcatcatttgactcttaatagttccctcttcccrtttagaaaaaaaagtatagctcattgccggcgctcatttgattttacataaacatgctctttgaggctgaagcaaatctgactgattttcaatgtgaaaataaaatatacaaactgttcttggagttagttctaaatagaactaacatcaaaatcatctgcatcagaataatctatttaggaaaaatcagattcatcaaattaatttttggctaacaactgttaaagaatgatgctaacatcacgcgtaggaatgctacgttttctaggatttgacattttccgtgagctagagagttactatattatgtaagtggaaataccattactaaaaccagaatgctgtaaatagaatgatgtcttttgttttcaaagttgatatactggagtaatgcgaaaataatacaagtgagatattaat

SEQ ID NO: 267323 - DNA, 617 bp, Homo sapiens
agctgaggcttaaagcaagacatgtctaatgtcatcatttgactcttaatagttccctcttcccgtttagaaaaaaaagtatagctcattgccggcgctcatttgattttacataaacatgctctttgaggctgaagcaaatctgactgattttcaatgtgaaaataaaatatacaaactgttcttggagttagttctaaatagaactaacatcaaaatcatctgcatcagaataatctatttaggaaaaatcagattcatcaaattaatttttggctaacaactgttaaagaatgatgctaacatcacgcgtaggaatgctacrttttctaggatttgacattttccgtgagctagagagttactatattatgtaagtggaaataccattactaaaaccagaatgctgtaaatagaatgatgtcttttgttttcaaagttgatatactggagtaatgcgaaaataatacaagtgagatattaatagttcatggcaaggttttcttaggatgaatgctgcagcctcaagattctcctgcgagtattcttggagcaaacaagaagaaaattaatccaaggcagaaaatgcaataatggtaactgtcgtctaagccaag

SEQ ID NO: 267324 - DNA, 625 bp, Homo sapiens
tatcttctgtacactcagccaccaagacttattgatacctcctaaatattctctataattaatttccttttccttccacctgcctctttcctagttcaagcacaaataacctcgtttctaaactactgttaactttttttcttgtcactttgcttttcrtcttgaattgggactctgtctctgaaatctattaaattttctgaagttcttcactttcttttcatcctttctcttttttctccatgaacttaccctggaagatcttgtctacttccctggctttgattcctgtcgacatgctgaagataaactgaagatgttacagtatcccactgagactttttccagaagtccagatctttaagtttagctgccagttcttcaaactcaacttgtcaaaaaatgagttgactactttctccctccaactggatcttgcttctctattacccatctcagtgaatgacaccaccttctgctacctctcataaacctggatgtggtctttgatttgtccttcttcctattttcctaggtcaaatcaaccatctctaactctacctcttaaacatctcctggccttttctcttgtcaccaaccctattgtcactaccttggtcccagg

SEQ ID NO: 267325 - DNA, 505 bp, Homo sapiens
ctcactattatcgtgttgctgtctgtctcatttcttaggtctgttagtaatygttttataaatttaggatctccagtgttaggtgcatatatgtttaggattgtgatattttcctgttggacaaggccttttaccattacataatgtccctctttgttccttttaaccactgttgctttacagttgtctgatattagaatagctacccctgctatcttttggtgtctatttgcatgaaatgcctctttccacccgtttactttaagtttatgtgagtccttatgtgttaagtgagtctcctgaaggcagcagatagttggttggtgagttcttacccattctgtggttctgtatcttttaagtggatcatttaggccatttacattcaatgttagtattgaaatgtgaggtatcattacattcgtcatgctcattgttgtctgtgtactttgggttttttcttttttgtttttgctttttaacttgtgtgtgtgtgttttttaat

SEQ ID NO: 267326 - DNA, 505 bp, Homo sapiens
ctcactattatcgtgttgctgtctgtctcatttcttaggtctgttagtaatcgttttataaatttaggatctycagtgttaggtgcatatatgtttaggattgtgatattttcctgttggacaaggccttttaccattacataatgtccctctttgttccttttaaccactgttgctttacagttgtctgatattagaatagctacccctgctatcttttggtgtctatttgcatgaaatgcctctttccacccgtttactttaagtttatgtgagtccttatgtgttaagtgagtctcctgaaggcagcagatagttggttggtgagttcttacccattctgtggttctgtatcttttaagtggatcatttaggccatttacattcaatgttagtattgaaatgtgaggtatcattacattcgtcatgctcattgttgtctgtgtactttgggttttttcttttttgtttttgctttttaacttgtgtgtgtgtgttttttaat

SEQ ID NO: 267327 - DNA, 520 bp, Homo sapiens
tacattcaatgttagtattgaaatgtgaggtatcattacattcgtcatgctcattgttgtctgtgtactttgggttttttcttttttgtttttgctttttaacttgtgtgtgtgtgttttttaataggtcccacgtgatttatgctttaaagaagctctgttttccaggatttgtttcaatatttagagctccttttatcagttcttgtagtggtggcttggtgtgaattatctyggcatttgtttgtctgaagatgactgtatctttccttcaaatatgatgcttagtttcgctgtatacaaaattcttggctgataattgttttgtttgagggggctgaagatagggccccaattctgtcttagcttgtagggtttctgctgagaaatctgctgttaatctgatagatttttcctttgtaagttacctggtgcttctgtctcacagctcttaaaatggtttcctttggataacctgatgacagtgtacctaggtgaagatcttttggtgatgaatttc

SEQ ID NO: 267328 - DNA, 602 bp, Homo sapiens
aggccagggaagttttcctcaattattcccccaaatatgttttccaggcttttagaattctcttcttcctcaggaacattgattattcttaggtttggttgtttaacataatcccagacttcttggaggctttgttcatattttcttattattttttctttgtctttgttgaattgggttaattcgaagaccttgtctttaagctctgaatttttttcttctactagttcaattctattgctgagactttccagagcattttgcatttctaaaagtgtgtccaaagtttcttgaatttttgattgtttttactttaagccatctatttccttgaatatttctctcttcacttcttgtaacattttttggattttcttgcattgggctttgcctttctctggcctctccctgattagcttaataacctcctgaattctttttcaggtaaatcagggatttcttcttggtttggatccattgcyggtgaactagtattatattttggggggtgttgaagagccttgttttgtcatattaccaaggttggttttctggttccttctcatttgggaaagtctagggctgaagactgttgttcagat

SEQ ID NO: 267329 - DNA, 603 bp, Homo sapiens
ttagtggtttaatgctatatttttcagatgctgttaaaattcttacaatgcccaaaaaaattggttcaaaatattaatagtgtcaaaggtgagaaatcagatttagatgaaataaaaaagtcccagttcactcaaatgcactttccttttcaggatagagcataaataatacccaacttacaactagaagaccaaagtacastcccacccaggagcacttgcttttatattttgatgtttttatcttcaaaattatagtttaatatctatatcatggggttgttacaaaaattaaatattacaaggtatgggaaaagccttagtttggtatgtggcaaatagtagttgcccatgagatgtttgtaaaaacaggtccataagcccatgggtaatggggtttaggaggtggagatgaatgaaatttgccctgaatagttcctgagcacctcatgctttctaggatctgcacctgcatcaccacttctgagaacactttagagaggagtaggcattgacaaagatccagggaggtgcgcatacgtactttttgttcttttctttccacagctgcgttgcatttttctattccccagtttcttaaaa

SEQ ID NO: 267330 - DNA, 603 bp, Homo sapiens
ttagtggtttaatgctatatttttcagatgctgttaaaattcttacaatgcccaaaaaaattggttcaaaatattaatagtgtcaaaggtgagaaatcagatttagatgaaataaaaaagtcccagttcactcaaatgcactttccttttcaggatagagcataaataatacccaacttacaactagaagaccaaagtacagtcccacccaggagcacttgcttttatattttgatgtttttatcttcaaaattatagtttaatatctatatcatggggttgttacaaaaattaaatattacaaggtatgggaaaagccttagtttggtatgtggcaaatagtagttgcccatgagatgtttgtaaaaacaggtccataagcccatgggtaatggggtttaggaggtggagatgaatgaaatttgccctgaatagttcctgagcacctcatgctttctagratctgcacctgcatcaccacttctgagaacactttagagaggagtaggcattgacaaagatccagggaggtgcgcatacgtactttttgttcttttctttccacagctgcgttgcatttttctattccccagtttcttaaaa

SEQ ID NO: 267331 - DNA, 603 bp, Homo sapiens
ttagtggtttaatgctatatttttcagatgctgttaaaattcttacaatgcccaaaaaaattggttcaaaatattaatagtgtcaaaggtgagaaatcagatttagatgaaataaaaaagtcccagttcactcaaatgcactttccttttcaggatagagcataaataatacccaacttacaactagaagaccaaagtacagtcccacccaggagcacttgcttttatattttgatgtttttatcttcaaaattatagtttaatatctatatcatggggttgttacaaaaattaaatattacaaggtatgggaaaagccttagtttggtatgtggcaaatagtagttgcccatgagatgtttgtaaaaacaggtccataagcccatgggtaatggggtttaggaggtggagatgaatgaaatttgccctgaatagttcctgagcacctcatgctttctaggatctgcacctgcatcaccacttctgagaacactttagagaggagtaggcattgacaaagatccagggaggtgcgcatacgtactttttgttcttttckttccacagctgcgttgcatttttctattccccagtttcttaaaa

SEQ ID NO: 267332 - DNA, 557 bp, Homo sapiens
ttgaattccaaaggccatatttaagattgtaaataaattagaaactgaccattgaagagggtaatcaaaaatgcaaactttattttacaagccatagtaacataattgattcaagcaaaagttctcaacagaaactcaaaccattgggtgaagagttaatgaggaacagagtgtttgcaagttgctaaagtatgaccccamagcttacttcctaatcacaaacttggggtcgttactttaaccaggtgatcaaattatatcacaaatgttggaataagcagccactctacactcctgttatgtgtaatattcaatacacagcaaacctatgaaatatttaacctgaacttagtcaagctcttatgtttaacttccattttacaagaaatactagactaaaggaacatggtaaacgaccttatgtgaaaacaatcagataatccagaatgtagaactttctataggacaactgtcctggtcttttaaaaaagtctgataaaagaaaagaagtgtggaagagaggacttaagggaaacaagtaaatccagtgtgtgttc

SEQ ID NO: 267333 - DNA, 557 bp, Homo sapiens
ttgaattccaaaggccatatttaagattgtaaataaattagaaactgaccattgaagagggtaatcaaaaatgcaaactttattttacaagccatagtaacataattgattcaagcaaaagttctcaacagaaactcaaaccattgggtgaagagttaatgaggaacagagtgtttgcaagttgctaaagtatgaccccacagcttacttcctaatcacaaacttggggtcgttrctttaaccaggtgatcaaattatatcacaaatgttggaataagcagccactctacactcctgttatgtgtaatattcaatacacagcaaacctatgaaatatttaacctgaacttagtcaagctcttatgtttaacttccattttacaagaaatactagactaaaggaacatggtaaacgaccttatgtgaaaacaatcagataatccagaatgtagaactttctataggacaactgtcctggtcttttaaaaaagtctgataaaagaaaagaagtgtggaagagaggacttaagggaaacaagtaaatccagtgtgtgttc

SEQ ID NO: 267334 - DNA, 557 bp, Homo sapiens
ttgaattccaaaggccatatttaagattgtaaataaattagaaactgaccattgaagagggtaatcaaaaatgcaaactttattttacaagccatagtaacataattgattcaagcaaaagttctcaacagaaactcaaaccattgggtgaagagttaatgaggaacagagtgtttgcaagttgctaaagtatgaccccacagcttacttcctaatcacaaacttggggtcgttactttaaccaggtgatcaaattatatcacaaatgttggaataagcagccactctacactcctgttatgtgtaatattcaatacacagmaaacctatgaaatatttaacctgaacttagtcaagctcttatgtttaacttccattttacaagaaatactagactaaaggaacatggtaaacgaccttatgtgaaaacaatcagataatccagaatgtagaactttctataggacaactgtcctggtcttttaaaaaagtctgataaaagaaaagaagtgtggaagagaggacttaagggaaacaagtaaatccagtgtgtgttc

SEQ ID NO: 267335 - DNA, 605 bp, Homo sapiens
gaaagtggacttttaacaccaaaccattctgatgactgtttaattgatttgcacagagtagctcaaacaacatctgctcaattgattagtaaatacgtatytctaatgctaatatttaattgttttagtccttaataaatatttatacattcatttattatttcattcaataaatacaaatcaatctgcagatttcccatttcttaaagagatgacacacaaaaaatgttttgaatacttggaatacataacttttagtgatttacaaaaattgtcagatctctactaatatttaaggtactaatttagcttatacatatatatgtatttagatgtatttagaatgatttatgatattaaatcgtgtacatttgaaatactgttttgacgattctcctagtctttgtcattgtaatcaacacagttttccagagcatattatcttcattccctctacattatatgagaagcagaatttttggaatctctgtgatttagtcactggaagttttatcccaagccacaaaaatagatgaaaagcaaatcagtctggtagatgaatattttaaatctctacattattattcttaaagaaattttaaaag

SEQ ID NO: 267336 - DNA, 605 bp, Homo sapiens
gaaagtggacttttaacaccaaaccattctgatgactgtttaattgatttgcacagagtagctcaaacaacatctgctcaattgattagtaaatacgtatctctaatgctaatatttaattgttttagtccttaataaatatttatacattcatttattatttcattcaataaatayaaatcaatctgcagatttcccatttcttaaagagatgacacacaaaaaatgttttgaatacttggaatacataacttttagtgatttacaaaaattgtcagatctctactaatatttaaggtactaatttagcttatacatatatatgtatttagatgtatttagaatgatttatgatattaaatcgtgtacatttgaaatactgttttgacgattctcctagtctttgtcattgtaatcaacacagttttccagagcatattatcttcattccctctacattatatgagaagcagaatttttggaatctctgtgatttagtcactggaagttttatcccaagccacaaaaatagatgaaaagcaaatcagtctggtagatgaatattttaaatctctacattattattcttaaagaaattttaaaag

SEQ ID NO: 267337 - DNA, 605 bp, Homo sapiens
gaaagtggacttttaacaccaaaccattctgatgactgtttaattgatttgcacagagtagctcaaacaacatctgctcaattgattagtaaatacgtatctctaatgctaatatttaattgttttagtccttaataaatatttatacattcatttattatttcattcaataaatacaaatcaatctgcagatttcccatttcttaaagagatgacacacaaaamatgttttgaatacttggaatacataacttttagtgatttacaaaaattgtcagatctctactaatatttaaggtactaatttagcttatacatatatatgtatttagatgtatttagaatgatttatgatattaaatcgtgtacatttgaaatactgttttgacgattctcctagtctttgtcattgtaatcaacacagttttccagagcatattatcttcattccctctacattatatgagaagcagaatttttggaatctctgtgatttagtcactggaagttttatcccaagccacaaaaatagatgaaaagcaaatcagtctggtagatgaatattttaaatctctacattattattcttaaagaaattttaaaag

SEQ ID NO: 267338 - DNA, 605 bp, Homo sapiens
gaaagtggacttttaacaccaaaccattctgatgactgtttaattgatttgcacagagtagctcaaacaacatctgctcaattgattagtaaatacgtatctctaatgctaatatttaattgttttagtccttaataaatatttatacattcatttattatttcattcaataaatacaaatcaatctgcagatttcccatttcttaaagagatgacacacaaaaaatgttttgaatacttggaatacataacttttagtgatttacaaaaattgtcagatctctactaatatttaaggtactaatttagcttatacatatatatgtatttagatgtatttagaatgatttatgatattaaatcrtgtacatttgaaatactgttttgacgattctcctagtctttgtcattgtaatcaacacagttttccagagcatattatcttcattccctctacattatatgagaagcagaatttttggaatctctgtgatttagtcactggaagttttatcccaagccacaaaaatagatgaaaagcaaatcagtctggtagatgaatattttaaatctctacattattattcttaaagaaattttaaaag

SEQ ID NO: 267339 - DNA, 535 bp, Homo sapiens
gctgctttttggagagaagacatgagtctgtacagaacatgctaatttgggggtggtgattgcctgcataaattcccagagcactgaggaatgtaggagaaaaggaagaccctgactgagtcaattactacgggccacagtttaagtcatggttgaaggtgaatgcgmtaaggtacaaatcataaagagggaagagcagtaggcttgggacagaatttgtggatacagtgctttttccggtaccacagaagaaaaagggtgaataaagggaacccagtgtgggtgacctcagaaccttaatttaacctgcttgcaaattaacccctttggctgacttagagaatggctaagttatgtgggtgtacataaagacagaaaatgtgaggacattcaagtccaacccatggcaatcagcaggttttctcttcttcctttcctggccccatcttcatttctgagcttcacctgtaaccaaatcaagtggtgcttttctcttgaaatccataggcagtttctgcttgaattggctctgagg

SEQ ID NO: 267340 - DNA, 607 bp, Homo sapiens
aggtagctcttttactggctgtcctaggctaacattagaggagatatgaaatcaataaatacagtatgttttccccagaattgatagtgcagtagggtgtgtgtgtgtgtgtgtgtgtgtgtgtgtgtgtgtgtgtggtggggacacaaatgaccataatgtagagcaaaatgtgaatgtcaaaggatgatgcaaatgaagggaccacatcacactgggtratcaggagtgattcttgaggaggttgaactggagtctggtgttgctgggttgtcgagcataacaatgaagatgatttgctcaggggtcagactttcctttgctgcctgtgtgaccttgtgaaagtcacttaatttttcgaggcctcaaatgtctccagtgctaagtggggctagtaaaggtcacttttgaaaattaagtgagatagtatatgcaggttacctgctacaatacaaaaactcattaaatgttacgatttttgttaaatattctgaatagagatgatagatgaaaactattagaatggataatgctgcttttagagacatatttgagaaaaaagagaaagacaatattttctctcggtcatatatattgaccaaggata

SEQ ID NO: 267341 - DNA, 609 bp, Homo sapiens
gggaagttcaagattaaagggtgctctggaaaacagtggagattctggtggcaagcactttagaagagactggtaactcggtaaaagcaacaagctaatcttcatgtaggtagttcagccagagagaatcagggaaattgatagctatgaagagccctcttaagatcagaataaacctcaaaggctaaacataccaaggatcatgaatttaattggattagattgtgaagcaatttatgccgcagggcactgtcaaaaccaatagagcaatccggcagcaagtagtggagtggagactcacagttgggagtgataccaacagaggaagatagctttacagaatgatttgggaaggcacagtcatatagaagcttcctaaaaccactgtcacttcaatgacatgctgaagtctgcactctctaagtggcaaccttagaggttttacactgtgaggtaaatatactttatgaaaayagctcatctaagtcactaaaaaaataagcaaacacaacaaagacaatcctctagtgggggcgggggagggcagtgattagtattcagagttgtacaatttatttaaaatgttcagttttaagccaaaaatatgag

SEQ ID NO: 267342 - DNA, 559 bp, Homo sapiens
cccttccctttactactattaaataattttaaaagaaattgtataaaacaatatgtataaattcattgttgaacttacatatatagacatatattatgcaataacagcacaaagaaattggatgtgagcaaaactatattgaattaaggaaattatacaacatggcaattagagtccacagcaactaatgaataaaaccagaaatgttaaataagaagataaataagaaagttgatgtaacaaactctttctttctcaatawgtatacatacacacacacacacacacacacacacacacacgtacatgcatacacctatatatttggcatcctttcctttccagcttcttaaaaaagacataaaattgtacaacatagtatttataagattgtactgttgattttataaatatatagatgtcatattataacagtaatagcataaaagggaaggtaggctatatagaagtaacatttctatatatcactggatttaagtttgtataaatttgcggttgattttggtacattaacatatgtatggcaagccgtagagca

SEQ ID NO: 267343 - DNA, 559 bp, Homo sapiens
cccttccctttactactattaaataattttaaaagaaattgtataaaacaatatgtataaattcattgttgaacttacatatatagacatatattatgcaataacagcacaaagaaattggatgtgagcaaaactatattgaattaaggaaattatacaacatggcaattagagtccacagcaactaatgaataaaaccagaaatgttaaataagaagataaataagaaagttgatgtaacaaactctttctttctcaatatgtatacatacacacacacacacacacacacacacacacacgtacatgcatacacytatatatttggcatcctttcctttccagcttcttaaaaaagacataaaattgtacaacatagtatttataagattgtactgttgattttataaatatatagatgtcatattataacagtaatagcataaaagggaaggtaggctatatagaagtaacatttctatatatcactggatttaagtttgtataaatttgcggttgattttggtacattaacatatgtatggcaagccgtagagca

SEQ ID NO: 267344 - DNA, 559 bp, Homo sapiens
cccttccctttactactattaaataattttaaaagaaattgtataaaacaatatgtataaattcattgttgaacttacatatatagacatatattatgcaataacagcacaaagaaattggatgtgagcaaaactatattgaattaaggaaattatacaacatggcaattagagtccacagcaactaatgaataaaaccagaaatgttaaataagaagataaataagaaagttgatgtaacaaactctttctttctcaatatgtatacatacacacacacacacacacacacacacacacacgtacatgcatacacctatatatttggcatcctttcctttccagcttcttaaaaaagacataaaattgtacaacatagtatttataagattgtactgttgattttataaatatatagatgtcatattataacagtaatagcataaaagggaaggtaggctatatagaagtaacatttctatataycactggatttaagtttgtataaatttgcggttgattttggtacattaacatatgtatggcaagccgtagagca

SEQ ID NO: 267345 - DNA, 515 bp, Homo sapiens
gaaaagcatgttatgttgcaagaacccaagagttccaaccgtgtcatcaatgcctctgccttgggcaaactcaacaaaggaaccaaggcgtgaattgactcgtgtgcccttgctgggtctagaattaaccattcgtaatgtcaagattttaagaatagagctgaggctggtcaaagactccaaagaaggtattctaagaaatatacatcatataaaacatagagatgtgatgacaaaggtaaataattgtttaagagagatttgtagaaaattttgctatctgatatgccatgtaaaatcactttgctgcctagctataaaagtcttaggtagaaatcagtattattctttgaggcttttagaatcgcatggatttttaaaattttagtaagactgattcccaaagctgttcctctgggcagtttaataactaaattgacacttttgcgtgtgtgtgtgtgtgtgtgtgtgtgtgtgtgtgtgtgtgygtgctgaaatagattactgaagaacag

SEQ ID NO: 267346 - DNA, 515 bp, Homo sapiens
gaaaagcatgttatgttgcaagaacccaagagttccaaccgtgtcatcaatgcctctgccttgggcaaactcaacaaaggaaccaaggcgtgaattgactcgtgtgcccttgctgggtctagaattaaccattcgtaatgtcaagattttaagaatagagctgaggctggtcaaagactccaaagaaggtattctaagaaatatacatcatataaaacatagagatgtgatgacaaaggtaaataattgtttaagagagatttgtagaaaattttgctatctgatatgccatgtaaaatcactttgctgcctagctataaaagtcttaggtagaaatcagtattattctttgaggcttttagaatcgcatggatttttaaaattttagtaagactgattcccaaagctgttcctctgggcagtttaataactaaattgacacttttgcgtgtgtgtgtgtgtgtgtgtgtgtgtgtgtgtgtgtgtgcgygctgaaatagattactgaagaacag

SEQ ID NO: 267347 - DNA, 682 bp, Homo sapiens
catctacctggacacatcacaacaaaggatttagcataggttgtgggattgcataagccaaaaacagaaacagagcataggaaatggcaggaggcactccccaaatggcttcattagaatgaatcttatctctgcagccctggccttacctaccagccctaatgagcctgctctgactcatactggcttcctttcatgcccagaccctttcatgcccggacccataaacacttatacctgagctctcatcatggagtctctccttgttatctctggcatctaatctctccttggaacctcagggaatcagccattcagcagtaggcccattcatagagggtctcctcccaaagctgctgcaaccgaacacacaaaatgtctatttccttaaggaacatggatgagtgtttaaactgtatctctttgtrgagttacattctgcataggataggcacagttgtatgaaaagagccctggacttagggtcaggagaaaccagttctaaccccagctctgccattagccagttgcttgtccaagtcccatggctgtcctgggtacagtttctccaactgcaaaagaagagtgttcaactccatcaaaatagaaatccctttcctggagtctaaatgggaagattgagttactcaaagctcacatatataaacaggtaggagattgg

SEQ ID NO: 267348 - DNA, 591 bp, Homo sapiens
ccattcatagagggtctcctcccaaagctgctgcaaccgaacacacaaaatgtctatttccttaaggaacatggatgagtgtttaaactgtatctctttgtggagttacattctgcataggataggcacagttgyatgaaaagagccctggacttagggtcaggagaaaccagttctaaccccagctctgccattagccagttgcttgtccaagtcccatggctgtcctgggtacagtttctccaactgcaaaagaagagtgttcaactccatcaaaatagaaatccctttcctggagtctaaatgggaagattgagttactcaaagctcacatatataaacaggtaggagattggacatgttaagattttctgtttctatgctgctgggtccttgtaacgggtcaatctcattagaaggaaaaccaacctcaaactggtaactggggacttgatgatgaaagtggtataaatggggactttggggacacagtctggggtccatattacacgattattcacagggcaccataggaccttcctcattgacatggagagaaaggcagcattaacctggcaggcctggtgggga

SEQ ID NO: 267349 - DNA, 682 bp, Homo sapiens
catctacctggacacatcacaacaaaggatttagcataggttgtgggattgcataagccaaaaacagaaacagagcataggaaatggcaggaggcactccccaaatggcttcattagaatgaatcttatctctgcagccctggccttacctaccagccctaatgagcctgctctgactcatactggcttcctttcatgcccagaccctttcatgcccggacccataaacacttatacctgagctctcatcatggagtctctccttgttatctctggcatctaatctctccttggaacctcagggaatcagccattcagcagtaggcccattcatagagggtctcctcccaaagctgctgcaaccgaacacacaaaatgtctatttccttaaggaacatggatgagtgtttaaactgtatctctttgtggagttacattctgcataggataggcacagttgtatgaaaagagccctggacttagggtcaggagaaaccakttctaaccccagctctgccattagccagttgcttgtccaagtcccatggctgtcctgggtacagtttctccaactgcaaaagaagagtgttcaactccatcaaaatagaaatccctttcctggagtctaaatgggaagattgagttactcaaagctcacatatataaacaggtaggagattgg

SEQ ID NO: 267350 - DNA, 591 bp, Homo sapiens
ccattcatagagggtctcctcccaaagctgctgcaaccgaacacacaaaatgtctatttccttaaggaacatggatgagtgtttaaactgtatctctttgtggagttacattctgcataggataggcacagttgtatgaaaagagccctggacttagggtcaggagaaaccagttctaaccccagctctgccattagccagttgcttgtccaagtcccatggctgtcctgggtacagtttctccaactgcaaaagaagagtgttcaactccatcaaaatagaaatccctttcctggagtctaaatgggaagattgagttactcaaagctcacatatataaacaggtaggagattggacatgttaagattttctgtttctatgctgctgggtccttgtaacgggycaatctcattagaaggaaaaccaacctcaaactggtaactggggacttgatgatgaaagtggtataaatggggactttggggacacagtctggggtccatattacacgattattcacagggcaccataggaccttcctcattgacatggagagaaaggcagcattaacctggcaggcctggtgggga

SEQ ID NO: 267351 - DNA, 562 bp, Homo sapiens
ttactatttattgattcagtttactttaatcaaaattacgtggttctcaacttggggctagtctgaatcatgatgttatgaacattcttatgcacatattctattacatgagtactgtacacaattctctcttgaaatagattcttgtattacagaaatgcawaggttctgtaccatactagatgctaaactggtttccaaagttcttgtgctgtttattacatcccaaccaacagtggatggaagttttagttcccctacatcttaatcattttcaaacatttaaaatcttaccaaaatggtagtatacaatggtgatccattttggttttaattttaattcttattactacaaatacattttaggattattttgagccacctgtattttttttggctgtgaaaatttttgtttatgccacctgaccatttctccccaagatttcgagttttttcttaaactgcctataaaagaggctatcagtttgctcatgatctttgatactcactaacagtcatatttgttatttatgaaatttccatatggtcctccacatttctc

SEQ ID NO: 267352 - DNA, 462 bp, Homo sapiens
gaacaaatggttgaaatgcattaaacatccaaattgttaagtgtaacccaaacacattaatgtcactgttagtggttttgcaatgtggcctctaaatacatgattgatctctcaggactgccatttaattatcagaagtgttattactcttccctttctacagctctgcttggggaaagtttgaaaaattaagttttgtgttaaggtcaggtaaaaaataagcctgttcttagaagaatgcatcctttcactttgcccacccacagatgatcagatccccacccaacaaaaccatytattcgacttcattgaaatgtcctttcagggtctggtttgtgtggctgggtggtgaggagcaggcagaaggctatttcttcttttagggtcttgatgaggcagcatggaaattatcaggaaacactttgaaggaggtggatggtggtggacatctgagttctctcg

SEQ ID NO: 267353 - DNA, 487 bp, Homo sapiens
agcactggatgaaaaaaaaataataattctgaagatcgtctgtctctacagcagtgttctcttagaatttctctattctctgtttttgtgttgttttgttttgttgttgtttttccatttgctattacctggaagtcatcagtgaggggcagayggaccctgtgtgtctccagatatgataccctaaaaagcctttgacatcatttatatgggatgcaggttagagcactgaatcctgtcaccagacaaccccaaattaggaatgttctatttttaaaaagggaattgtattctctaaacatgtcaataccataagagacagtgaaaggctgaggaaatggcccagattaaaggataagaaagaacagtatcagccaagtgcaatggcgggtcctagactagattccaaaagagacaggaaaatgcataaaggaaattactaggccagtttgaaaaattggaagatgcatggtaaattagataatat

SEQ ID NO: 267354 - DNA, 489 bp, Homo sapiens
ttattttcatttgatgtgaccatggttgtaaagatccttaatctcctgtcttcataatttcagtatatctctccctcaatcaggcatgcataataaacattctttccttttatgggacatgcaagaaaattaatacatgctggagaaaagtgaacattttaggttttaaaaaagtgctgagctttctctgtgctatttcccaactaaaggaggtaaaacctgctcctttatgacccacaactaaaaggaaaacgtgaaagtattcagagcacatacagcactcactgagaaattayaatgttcaagctgggaaagcattgaatgaggtgatgggattttctatcctcggatttttcattcagacttttcctgttagtgtgttcagtagccccttaagcattgagaaaacaaagactttgtagttgtatgccttcactccttgcacaggcatgtgccaggtgattaataatgttttggactctcttaagg

SEQ ID NO: 267355 - DNA, 526 bp, Homo sapiens
tgttggcccaactgcctcacgttacttagaaagacaagttgaagagagggcgttattttccctgagctctattgctcwgtgcaaagcatttttttaataaagattttgaaataaaacttttttaacattagatgtctcttttctttcttcttttcttcttctccatctctttcctcttttcacatttgtccttttccctttcctcccccaccctcctcttctttttcttcttctttttcaaattttctttttacaagggacaaaaggtacatataaaataaatcttaaaacacagctgaattctgctttctccgtttccttcccctaattgcaattgctaaggttaggtaatcacacatagatttctgagaaatatctactacgtgctctcactcttgaaacttttctattttacttaccgtattggaatgtgtgcattgttgtgtgtacaaaattatattaacacaccaaccatttggcatcaggcactgctggtatgtatagtcagtggtgactcattgcttca

SEQ ID NO: 267356 - DNA, 526 bp, Homo sapiens
tgttggcccaactgcctcacgttacttagaaagacaagttgaagagagggcgttattttccctgagctctattgctctgtgcaaagcatttttttaataaagattttgaaataaaacttttttaacattagatgtctcttttctttcttcttttcttcttctccatctctttcctcttttcacatttgtccttttccctttcctcccccaccctcctcttctttttcttcttctttttcaaattttctttttacaagggacaaaaggtayatataaaataaatcttaaaacacagctgaattctgctttctccgtttccttcccctaattgcaattgctaaggttaggtaatcacacatagatttctgagaaatatctactacgtgctctcactcttgaaacttttctattttacttaccgtattggaatgtgtgcattgttgtgtgtacaaaattatattaacacaccaaccatttggcatcaggcactgctggtatgtatagtcagtggtgactcattgcttca

SEQ ID NO: 267357 - DNA, 535 bp, Homo sapiens
ggaactgtacccagctgaagaaataggacatttctcgtatccagaagccctcttcaggccctgccctactcttcactccttaatcacacaaagaaaccactattttaagttctatcaccatrgatcagttctgcctcattattttatataaaagagtcattcagttcatattcttttgtgtctggcttcttgcactcaattattacgtttgagagagttttccactttgtagtgcttagcaataacttgttcattctcagtgttacatagtattccattttaggagcatactgtaatttatttaatcattctattgtggacatttgggttgtttctagtttttagctattaaagcaattgctactgtgaatgttctagtatagctttggtagccatatacgtacatttctgttgggtacatacctagaagtggaatcattggaacataacgtgtgtatctgttcaactttggaagatactgattgatatggtttggctctgtgaccccacccaaatcttgtctcaaattgtagtc

SEQ ID NO: 267358 - DNA, 596 bp, Homo sapiens
atttatttattagactctttgttaaaacgacacacatctgtacattaacctaggcgtacacaggatcagaatcaccaatatcactgtcttttacctcctcatttygtcctgctggaaggtcttcaggggcaataatactcacggagttgtcatttcttatgatgataatgccttcttctggaaactcctgaaggacatgcctgaggctgttttatagttaactttttaaataataaatagaaggagtacactctaaaataacagtacaagtatagtttaataaatacctaaactaataacagtcatttatcatcacaatcaagtattatgtactgtaaataattgcatgtgctagatttttgtatgactggcagctcagtatgtttgtttacatcagcatcatcacaaacgagtaatgcattatgctatgatgttagaatagctctgatgttattagatgatagaaatttttcagttccattataatcttatgggaccactgttgtaaatgcggtttgtcattgaccaaaacgtcattaagtggcacatgactatatatatatatatatgatattgacttatgcaattatggagct

SEQ ID NO: 267359 - DNA, 596 bp, Homo sapiens
atttatttattagactctttgttaaaacgacacacatctgtacattaacctaggcgtacacaggatcagaatcaccaatatcactgtcttttacctcctcatttcgtcctgctggaaggtcttcaggggcaataatactcacggagttgtcatttcttatgatgataatgccttcttctggaaactcctgaaggacatgcctgaggstgttttatagttaactttttaaataataaatagaaggagtacactctaaaataacagtacaagtatagtttaataaatacctaaactaataacagtcatttatcatcacaatcaagtattatgtactgtaaataattgcatgtgctagatttttgtatgactggcagctcagtatgtttgtttacatcagcatcatcacaaacgagtaatgcattatgctatgatgttagaatagctctgatgttattagatgatagaaatttttcagttccattataatcttatgggaccactgttgtaaatgcggtttgtcattgaccaaaacgtcattaagtggcacatgactatatatatatatatatgatattgacttatgcaattatggagct

SEQ ID NO: 267360 - DNA, 596 bp, Homo sapiens
atttatttattagactctttgttaaaacgacacacatctgtacattaacctaggcgtacacaggatcagaatcaccaatatcactgtcttttacctcctcatttcgtcctgctggaaggtcttcaggggcaataatactcacggagttgtcatttcttatgatgataatgccttcttctggaaactcctgaaggacatgcctgaggctgttttatagttaactttttaaataataaatagaaggagtacactctaaaataacagtacaagyatagtttaataaatacctaaactaataacagtcatttatcatcacaatcaagtattatgtactgtaaataattgcatgtgctagatttttgtatgactggcagctcagtatgtttgtttacatcagcatcatcacaaacgagtaatgcattatgctatgatgttagaatagctctgatgttattagatgatagaaatttttcagttccattataatcttatgggaccactgttgtaaatgcggtttgtcattgaccaaaacgtcattaagtggcacatgactatatatatatatatatgatattgacttatgcaattatggagct

SEQ ID NO: 267361 - DNA, 562 bp, Homo sapiens
tttgttgcatgaatctaaatgtagtgtgccatagtatgactttgcaaacagaaaataagctaaacatcacttttaggaattccctgtcagttgatggggagaaaacaatgcctattcagtggaattcaagtggtggtctgtggaccattgctgcrtggtgaatattcaactactgtcctgggagaggattaagacagttgttgagagtaagtgtttcaacacttttagtgcaatttgactgtgccaaagcaagtggacttgctttattgaaagagttacagaacaggtcaaattcacatgatgagtcacaaatggcaggaactatgtaattgttgagcacagtaggggcatgttctgaaataattagtcagattaagaagcttgcgatagattataaatcaatgtaatgtttgcttcattgagaaatttttgttatatatagaaaagcaaaaaatcttgttgaactaaacattatgcttagagaaattgtaaaatgtaatcattccataagggtaataactttaatttttttataggcaataatgtgaaagctgactaaaaa

SEQ ID NO: 267362 - DNA, 592 bp, Homo sapiens
ggaggaatgaggcccaggaccaatgaaagaatataaagctgttaaagagtttggggtaagtgttaagcattgtcactgccttggagaaggtgggtgtagggagattcccacctaatgggagctagtgctctcagtagaggaacacagcccacacagggaacaaagaaaagagagagagagagaagaaatcaatggccattttctcactcacctcttgctctctgtactctcaacagagcttcccactgtgagaccaactggaacccaaagagcaagggatgttgtagaccttaggggtcagccaggtgatgcccagaggggaattaaaaaaaaaagtagtagatctagagggaaaaagaaaagaaatccagcacagtgacctgacttgaagcattggtaggagaagcatcrataccagtgagaagcctagcagagtgtgcggtaaaaaataaaggctcaattactgatactcataatattattaattatcattattcttttgtgaaaaataaaagagatttaaaaaaaggaaaaagaaaaaataggaggaggaaggggggacttttcaaattcactgtgttgcatatttttg

SEQ ID NO: 267363 - DNA, 560 bp, Homo sapiens
tctactcttggttattcattcattgtcaactctatttgactccatttatgaattattttcaattagtaaatattcctagaagtaaatttaaaatatatatatttttctcaatgacacaaagaaaaaggaaactctatttgtctttcattaagttacttggcccacacacgactgtctacattatacaattttaaggtacaatttgtttaacgctctagaatcacaatggccatcttggcaaatccctcatccaaagtatgtatctcatttgaagactcccaggctttttttccctaatattttcaaatttgatttacttcctgcttgaagaggcagaaatttccatttttggatgcttcataattggaagttcttcttataacaayttgctctgtcactgttactactagccttgcttccatttatattctgggcatttgactgaactgagtcatgcacttggatgatgtgagatcacataaaaaattagtttcctgagtgagtactatggtccataatgtctgtactgtttatatattctcaagtttgaaggtttcata

SEQ ID NO: 267364 - DNA, 565 bp, Homo sapiens
ggaagagcatagaatattagcctaacatatgaatcagytgttccaattcttttattttagagatgagggaactcaagcctgcaataatatattcggcatcaccctggaagttgctggtgttgcttttcgcactcagcttttgtgacaatatatctactactctttctaatgcacattctagtctagtttacattaataattaggaatacttagctaatacctaatatgtgtgtcttatcaaatctcaaatattcatgaaatacctctaacatgtcaccttaaaaatatgtcatagcttttctccattgattgattagtaagtgggtcatatatttaaactcacagtacaacttggagatgtatatatatattatatatatattctattatctttatttttgtgaatcacttatctagccttctgtctttaaccttgcctcatgggtagcagagtaaaataatataactaatatacaattgggtaactcaaactaatttttaaggtgattcttagtttttcttgagaaaacacttggtttcctataaaaccttataatgacaaaaa

SEQ ID NO: 267365 - DNA, 565 bp, Homo sapiens
ggaagagcatagaatattagcctaacatatgaatcagctgttccaattcttttattttagagatgagggaactcaagcctgcaataatatattcggcatcaccctggaagttgctggtgttgcttttcgcactcagcttttgtgacaatatatctactactctttctaatgcacattctagtctagtttacattaataattaggaatacttagctaatacctaatatgtgtgtcttatcaaatctcaaatattcatgaaatacctctaacatgtcaccttaaaaatatgtcatagcttttctccattgattgattagtaagtgggtcatatatttaaactcacagtacaacttggagatgtatatatatattatatatatattctattatctttatttttgtgaatcacttatctagccttctgtctttaaccytgcctcatgggtagcagagtaaaataatataactaatatacaattgggtaactcaaactaatttttaaggtgattcttagtttttcttgagaaaacacttggtttcctataaaaccttataatgacaaaaa

SEQ ID NO: 267366 - DNA, 539 bp, Homo sapiens
tccttcaaaaatttaactattcagagaaatcatttttatggaagtttgaatttaatttaaattgtgaattttattgtgaatttattcaatcgccttgtaatatatttcctttgatrtcctacaatttgttgagtcttataagctgaaagtggcttcatgatttgcatataattcaaaattcctacttatgcattctatcactttatcttgattaaaggaaaatattaagttgtccttcttgttagtaattgatccataggagcttcaaacaaaaatagtgctcttttcagctgaatgcaataatctttcaatttaatttctgttattggcagaatcgtgttccctcccaaatttacatgttgaagtcataaaccctgtaattcttaatgtgactgtatttggaaacagggcctttaaagaagtaattaaggtaaaatgagttcatatgagtccttaattcaatatattttgtgtctttataagaagagatcaggacacaagcacacacagaaagaagatcaagtgaagacacagggagg

SEQ ID NO: 267367 - DNA, 539 bp, Homo sapiens
tccttcaaaaatttaactattcagagaaatcatttttatggaagtttgaatttaatttaaattgtgaattttattgtgaatttattcaatcgccttgtaatatatttcctttgatgtcctacaatttgttgagtcttataagctgaaagtggcttcatgatttgcatataattcaaaattcctacttatgcattctatcactttatcttgattaaaggaaaatattaagttgtccttcttgttagtaattgatccataggagcttcaaacaaaaatagtgctcttttcagytgaatgcaataatctttcaatttaatttctgttattggcagaatcgtgttccctcccaaatttacatgttgaagtcataaaccctgtaattcttaatgtgactgtatttggaaacagggcctttaaagaagtaattaaggtaaaatgagttcatatgagtccttaattcaatatattttgtgtctttataagaagagatcaggacacaagcacacacagaaagaagatcaagtgaagacacagggagg

SEQ ID NO: 267368 - DNA, 538 bp, Homo sapiens
ccttttattcttattgtagaactgaggggcaagaggtttaaagagattacatgatttgcctgagttgaaaccacaatttcaaaaggatattttcaaatgcaaatcagccattcattcttgggataaacttcaattggtcttgatgttttacctttttcacttaatgttgcattatattagctattttgtaaaaatttatgaacttatgtrtatatatacgattggcctatctaccatagagatgtcattttctcttttcattttgtttattatattcttcaatgcattactagtttatattttatgattcaaagtctatcagtatattcctttttaaaatccatttggatataatgcttataaaagctctctgaagtccagaattataaattctacttttttttcccaaatactttggtggttttatatttctccttaccatttttatctatatcaggtctgtaatttagtctttggtgaaacaaaattaatggataacctctttattcccactgaagcgcaatccatatgattatta

SEQ ID NO: 267369 - DNA, 549 bp, Homo sapiens
tattatgtaaatactgggcacttcagactatggcttttttttttttttttttttttttttttgagacggagtcttgccctgtcacccaggctagagtgaagtggcatgatctcagctcactacaacctytgctacctgggttcaagtgattctcctgcctcagcttcctgagtagctgggactacaggcacaaaccaccatgcccagctaatttttgtatttttagtagagacggggtttcaccatgttggtcaggctggtcttgaactcctgaccacgtgatccacccaccttggcctcccaaagtgctgagattacaggcatgagccaccacgcccagccagcctattgcatttttaaaatttttaattttaaattttaaaattattgatttggatgttttacaagtggcaaaggagaggcattttacagttttctgccactgagcaccaatgagcaccacaggatgacttcaaagtccttgtaaatgacactcctaataaaattacgcacctagtataaccattaagctgtgtcagcctgtattca

SEQ ID NO: 267370 - DNA, 589 bp, Homo sapiens
cataccttgctcataatattaatgttttctttattatttaatatgtgtaagttattaaaaattcaccataccaacattatgactaaacataaagttactgagtaaaaattaagactacttggctgttattgccttatttttaaaaacatttcccagyggcattttgcagtagagttttatgttcaaatgccacttgaaatagttcaattgaatatgcccttaggattatttgtttcaacctcttttctatttaaatctgttttgttttcctttttaattatattcaaacatttatatgatacataaatcaatattagatttaaaagtttcatttccatccccatcttatttttgcttttttgttacacaaagatagcataatatactcagtaatttgcatattgcctttttcacttcatatctgtatgaggaaatgagtttaaagagatctttctcatgcttttgaagctgccagtactctacagtggggtaaaatcatactttattgagccagccaccatttccggatattgggttgctcctgatattttatttacagaattgcatttccttgcatttaagtttgttc

SEQ ID NO: 267371 - DNA, 545 bp, Homo sapiens
tgtgtaagttattaaaaattcaccataccaacattatgactaaacataaagttactgagtaaaaattaagactacttggctgttattgccttatttttaaaaacatttcccagcggcattttgcagtagagttttatgttcaaatgccacttgaaatagttcaattgaatatgcccttaggattatttgtttcaacctcttttctatttaaatctgttttgttttcctttttaattatattcaaacatttatatgatacataaatcaatattagatttaaaagtttcatttccatccccatcttatttttgcttttttgttacacaaagatagcataatatactcagtaatttgcatattgcctttttcacttcatatctgtatgaggaaatgagtttaaagagatctttctcatgcttttgaagctgccartactctacagtggggtaaaatcatactttattgagccagccaccatttccggatattgggttgctcctgatattttatttacagaattgcatttccttgcatttaagtttgtt

SEQ ID NO: 267372 - DNA, 495 bp, Homo sapiens
gacatttttcttaagcacagttctaaagggcttcagtagaatcacactgtccagattgcatagttctggtaagcaatgttcaccttcaaacaggaagaagtccccgaagtttaaagtttatcaagtcagggtagaagttattgcttcataaaagcagaatagaactgtcattatcaatggagcatttcactcaggtttaattatagagcaataattcaaatgtttatttgaagaaaaagatggataatagtaaactttataatccactagctgttaaaatctaattgtcatttgactgtcttgccttatagtacctattgtgatggaatttttatgaatattgccaaaatagttcaaaataaaatgtagaactccattagattatccaagtgatcttttattggaaattgtgagcagagcaaaagtgacttgttattatagtgtttaygaaagaggaaaaatagttattaacaattgatgttcattcagccctta

SEQ ID NO: 267373 - DNA, 610 bp, Homo sapiens
cttggttgttgtatgtatactgtcccatttttagctgtatttagtgagagaaataggaaaaagtatatctactctatttttctagacctaaagaaatgccagagtctgtttgatatgctgtcaccaaataccatggactgggtggcttataaacaacacaatgtatttctcacagttctggaggcggggcatacaagacgaaggtgctggtagagttggcgtctgaggggagcctgcctytgggtccggatggccattttcccactgtgccctcacacggtggaaggcacaggaaagttctctgcagtctcttctataaaagcactcatcccatccatgaagcttgactttcatgacctaatcacctcccaaagttcttgtctcctaataccatcaccttgagagtaaggattttgatatatgaatttgggggtacataaatattcagaacatagcaagaactttcaataaatttcaagatatttcattgaattgatctgggttggggctcacaacaagtgattctactaatttctagggaaagttgtaaaccactgatgtgtctcaaaaccttaattaactgaagagttaagaaaacaaacaattatag

SEQ ID NO: 267374 - DNA, 610 bp, Homo sapiens
cttggttgttgtatgtatactgtcccatttttagctgtatttagtgagagaaataggaaaaagtatatctactctatttttctagacctaaagaaatgccagagtctgtttgatatgctgtcaccaaataccatggactgggtggcttataaacaacacaatgtatttctcacagttctggaggcggggcatacaagacgaaggtgctggtagagttggcgtctgaggggagcctgcctttgggtccggatggccattttcccactgtgccctcacacggtggaaggcacaggaaagttctctgcagtctcttctataaaagcactcatcccatccatgaagcttgactttcatgacctaatcacctcccaaagttcttgtctcctaataccatcaccttgagagtaaggattttgatatatgaatttgggggwacataaatattcagaacatagcaagaactttcaataaatttcaagatatttcattgaattgatctgggttggggctcacaacaagtgattctactaatttctagggaaagttgtaaaccactgatgtgtctcaaaaccttaattaactgaagagttaagaaaacaaacaattatag

SEQ ID NO: 267375 - DNA, 639 bp, Homo sapiens
tataacctattttgaggggggatccacatattttggaagaaaacatggtgggtcatggcaggaacaatctatagatgacacaacagaacgcagacgttggaggtcagacctaaatggaaataccccaacgtggagccaagctgacgggaggcaccgaggtctgaatcctaggcagtgaagtgccaaggagtgccaggtggggtgctgcaggagaacggggaagggcagttcaaatctgggccgttttgctggatcctctctgctcacagtcccccatcctcccccgcgtttggcatgctgtcccacccagttgactttaggtttggcaatgtaacctgctttgaattatggagcgtgaacaaatacttcacgctccaagggtgagcaaagcctagcgtgattgcattctgtgactgccactctcttgttcctacactctgccatgagagaaaaaaaaaatgagatatgagagatccaggacacaatccctcctgctctctggaatgagaccaggtgtgtcgtgtccccatggccaggagcgcagctacagagaaccacagcsgcagactcagaacaacctcccatcacatcaggctcacagcatgagcaacaagcaaatcttgctgttacaagttacta

SEQ ID NO: 267376 - DNA, 457 bp, Homo sapiens
tcttagagcccaggtgcatttttttgaaagtcgttccaggggcctgagatgaagtgggggtgtgagaagtaagttggctagggcagatagaacctaagtgtcttctccttaagtcagctccccttacgaggctgtatgatactgggccacccccattcaccgtggaaaacaaacccatcactaatggactgtattttggcatatgaagtagtcaaagacaattcctgatagaaccattatctacctgtgtggtccttcaagaattagaggaagaagaattctgtgcctctgagagattttgaaaaaaraaagagtgcttctggggggactagaggacagaatatatatccagaaggagattataagagaactaggtaaacaggaccacagaaggacttccaagagcctaaggaaaggtctcaaatgaaaagctagaggtcctattctacctacaaac

SEQ ID NO: 267377 - DNA, 541 bp, Homo sapiens
tcaccgtggaaaacaaacccatcactaatggactgtattttggcatatgaagtagtcaaagacaattcctgatagaaccattatctacctgtgtggtccttcaagaattagaggaagaagaattctgtgcctctgagagattttgaaaaaagaaagagtgcttctggggggactagaggacagaatatatatccagaaggagattataagagaactaggtaaacaggaccacagaaggacttccaagagcctaaggaaaggtctcaaatgaaaagctagaggtcctattctacctacaaacgtatttcatttgggtcacacagtgcttatcaggaaatccaaattctgatgcctcctgcaaagttgaaagatctggtaacactgggatcacatcccatagagcaacaatatcytaaagctggggtgcagctcccccttaaaagggagcatatattttttggttagccaagtctcactactacctgttaccttatattctcccaattttactcatttatattggttccagtaggctgtgaga

SEQ ID NO: 267378 - DNA, 623 bp, Homo sapiens
tcgaactcctggcctcaagtgatctacctgcctcggcctcccaaagtgccaggattacagtcgcaagccactgcacctggccaaaattttgctgttttttttcattcccgtgatccttacattttgatagcattataaattttttccctaaaaattaaaggggaaagatgaagtagaagtaaaactaaaagtgtttgtttttcagggtgtttgtttgtttgtttagtaattttagcacaagaaccaggtgaaccaggttgtttgacttcattcattcattttctttccaacatgaatattatgattgactatgcattaatcagagtcttttgcagatatgagaggggagggggttggaggtgagaggagagggagttggagctaaaggcaaacttttagtcaccccttccacagttctycttggaacaatcgtaaatatctgccatgtgttgttcacttaggtaacatttaaagcaccaggccagatgctgtgagagacataaagcattatgtaagtcagagatccctgttgattataatcaggattgaaagataacacatatgtctataggaagttaaataagaactttggagtctgactgaaagaaaatgagtgcacaaaa

SEQ ID NO: 267379 - DNA, 397 bp, Homo sapiens
tatacacaataaatctatacaatttttttttgagacggagttttgctcttgtcactgagactggagtgcaatggcatgatcttggctcactgcaacctccgcctcccaggttcaagtgattctcctgcctcctcctcctgagtagctgggattmcaagcacctgccaccacgcccagctaatttttgtgtttttagtagagatgggtttcaccatgttggccaggctagtctcgaactcctgacctcaggtgatccatctgcctcagcctcccaaagtgctgggattacaaatgcaagccaccatgactggcaatgtatatgatttgtcagttaaaaaattaaaaaataagaatcagaataagaaaagaaatgtcaggccagatgtggtggctcatg

SEQ ID NO: 267380 - DNA, 397 bp, Homo sapiens
tatacacaataaatctatacaatttttttttgagacggagttttgctcttgtcactgagactggagtgcaatggcatgatcttggctcactgcaacctccgcctcccaggttcaagtgattctcctgcctcctcctcctgagtagctgggattacaagcacctgccaccacgcccagctaatttttgtgtttttagtagagatgggtttcaccatgttggccaggctagtctcgaactcctgacctcaggtgatccatctgcctcagcctcccaaagtgctgggattacaaatgcaagccaycatgactggcaatgtatatgatttgtcagttaaaaaattaaaaaataagaatcagaataagaaaagaaatgtcaggccagatgtggtggctcatg

SEQ ID NO: 267381 - DNA, 397 bp, Homo sapiens
tatacacaataaatctatacaatttttttttgagacggagttttgctcttgtcactgagactggagtgcaatggcatgatcttggctcactgcaacctccgcctcccaggttcaagtgattctcctgcctcctcctcctgagtagctgggattacaagcacctgccaccacgcccagctaatttttgtgtttttagtagagatgggtttcaccatgttggccaggctagtctcgaactcctgacctcaggtgatccatctgcctcagcctcccaaagtgctgggattacaaatgcaagccaccatgactggcaatrtatatgatttgtcagttaaaaaattaaaaaataagaatcagaataagaaaagaaatgtcaggccagatgtggtggctcatg

SEQ ID NO: 267382 - DNA, 549 bp, Homo sapiens
aattaaaaaataagaatcagaataagaaaagaaatgtcaggccagatgtggtggctcatgcctaccatcccagcgctttgggaggtgaagacaaaaagatggcttgagaccagcctgggcaacatggcaagaccctatttctaccaaaaaaaaaaaaaaaacgaaaatagccaaatatgctggcaagtgcctgtggtcccagctgctcaggaggctgaggcaggaggaccccttgagcccaggaggttgaagctgtaytgagccatgatggcaccactgcattctagcttgggtgatagagcaacagcctgtctcaaaagaaaaaaaatattccttaaacataacctctgagaatccttccctcattctactatttagataaaattaattactacttccctctggtctcccatagtgcttcatatctcttggcatttctcatagtgtagcataattttttatgtgtctcttgctttgaggaactatagtttgtttgctactgcatccccgatgacttgcacagggcctggcacataacagatgctcaat

SEQ ID NO: 267383 - DNA, 589 bp, Homo sapiens
ctgtcctagtattatttcccataatatggaaagtaggctatgggtcaatacagatcagagttcttgccactgaggtgattttgagaaatgaattcctgtgcctcaatttcctcatttgcaaactgaggtcagtattatctacatcataactcactggsttgttaaaagtcatggtcatatttctgaatgttaacatttataagacaggctatatttcacttactgctgtatcccaaagattagtgtagtacctggcaccaacaggtgttttatatctatctatctgcctgcttgtctattgaaagaattaatgaatttaaaggtttactgcatgctgggtgctgtactaaatgctttacaaatattatttatttctcatcacagagatgcaggatagataggacaacctccatttcacaagtaaggaaatcaagatacaagattggtcctaaatcttatgctcttagctaccagaattattaaatttgaaccccagccctggctctcactagctgtgtgacctctgttgagttacttcactcattagcaccaggcactctgatatgtgtgccacatctgttgcctgatt

SEQ ID NO: 267384 - DNA, 590 bp, Homo sapiens
ttaagtaacttgcccaaagtcttactgctaataatagtagagcagagattcaaactttgtcattctagctatagactttgccctattaaccattataccattctgcctctctctggtcatrcattttgagtgacttaatacaaaaaatgagtagatgggttaaagacccatcagaacttgaaacttgtgctgtttctggcctatagtagccaggacagctaggcttgtacttaaatgtggcctgaccccacatgcttttgtttggacttggttttatttggatggccctttcatcagggataagaggaactcctacgaggaatttcctctgtgattagtctttgctttgtcccagcttgctgtgtggccacaatagatgctccccgtatcttcgcctgcttcagctagttcttctacattccctatttaacttgaggacattcacccagataagaattcaggaatagtcccagaatccttccagttctctcctaaaactcactctcttgaatctgtctccttttttcattttccactgttgtttctttaattccttcatttggctgctgctgctttttttttccccttgg

SEQ ID NO: 267385 - DNA, 590 bp, Homo sapiens
ttaagtaacttgcccaaagtcttactgctaataatagtagagcagagattcaaactttgtcattctagctatagactttgccctattaaccattataccattctgcctctctctggtcatgcattttgagtgacttaatacaaaaaatgagtagatgggttaaagacccatcagaacttgaaacttgtgctgtttctggcctatagtagccaggacagctaggcttgtacttaaatgtggcctgaccccacatgcttttgtttggacttggttttatttggatggccctttcatcagggataagaggaactcctacgaggaatttcctctgtgattagtctttgctttgtcccagcttgctgtgtggccasaatagatgctccccgtatcttcgcctgcttcagctagttcttctacattccctatttaacttgaggacattcacccagataagaattcaggaatagtcccagaatccttccagttctctcctaaaactcactctcttgaatctgtctccttttttcattttccactgttgtttctttaattccttcatttggctgctgctgctttttttttccccttgg

SEQ ID NO: 267386 - DNA, 584 bp, Homo sapiens
cctgcttcagctagttcttctacattccctatttaacttgaggacattcacccagataagaattcaggaatagtcccagaatccttccagktctctcctaaaactcactctcttgaatctgtctccttttttcattttccactgttgtttctttaattccttcatttggctgctgctgctttttttttccccttggcattaaggattcagtgatgaacaggacagacaaagcccctgtcctcaaggagttcccattatagtgggcagaggatgcaactgagatcagattgtgataagtactatgacaagtgttatgagtgagaaaagcaaactccagagagtggggtatagtgggttggcctgagggtattaaaagcttctgtgaggtagatgttcataaatttattgtgcaactagagatccaagttcagtgatttttttttttctcttgtaacatttgcctggttggatgaggcacggagaaagtggatggatcaatggctttcttcatttcctcgtcatctcttatttggccccattacatccagttcctgcctgtctacaactccatattaatgccagca

SEQ ID NO: 267387 - DNA, 601 bp, Homo sapiens
aaggcttatagcccaaacggaagtctctcattccacctttcagctccatgtccccttgaaacatttcaatcatttctttgatatttagtaagtagattaacacatttaagagtaaatagtgttattcatatcattatgcaggagaaaaatcatttttacccaaatttcaaagaaaaaaattcagaagggaaacatatttccagagcctaaactaccactcaaatctttcaaatcaactcaaaatagtataaatttgaggccaatgcctatatttatatctctgtagtaatagacaccaactataggatgatgacttttcctaaggatatgaattctgtgactgggggcttgtttccccactttaatttctaaatacctagattaattcactgattattttaaatcaaataagagcttytacttctattgaaactggagccaggcatcatcaggattatattatcaattgcatatgtaagatgggggtaggtttttatcctatagatttctaattaaacatgtttgactctcaaaattgaaagtttatgaatttagcaacaagcacacacaaaattattacatgaaaggttaatggagagtc

SEQ ID NO: 267388 - DNA, 578 bp, Homo sapiens
atggctgtttcactctgaagtgtgtgctttttgtctccaaaagtgaatatcttagaagaatatatatttacagagaatatacatttgctaagaatttgttacttatcaagaaatatgctcaacactacttgaataagacagaactcaaagccttttctctttttctgaggattaaatgaatggaagaaggaaagaaaataggaaaaagaaattccttgtataatgagaggatccttagctgttctagtagtaaagagaccatgtagaaaatcagcatcaacatataacaacaacagcatctatagcaatggtgaagcaagttcttcaccaggagagcaatgcatgacttctttaggtagtgacaccaagtcctcagagaaatatagcagcagctggggcagccctgcagcaacttgggaattgaagtagcacctgagaaactggggaagccagcagtatgtatgacagtcccatcataaggcaactcagctctcccctcaggttggtgtgtcctaggggaattcctgttagatgatgtgccaatacacamcagcatgctttttgctaaaaggcagatt

SEQ ID NO: 267389 - DNA, 589 bp, Homo sapiens
ttaattcacccacagacaacaggacctataatgatacattctaagtaaagcaccaggactttaagtgttttggttgtctatcycaactagtgacagtgaaagacgctacagactacttctctcccaacctaccatctaagagtatgaagaaacgcatttaagaaatggagtggggcctggtgcagtggctcacacaggtaatccctgtgctgtgggagactgaggtgggaagattgtttgaagccaaaagtttgagactaacctgggcaacaaagtgagacccatctctacaaaaaaaaaaaaaaaaaagaaaaaaagaaaaatttttagctgggcaccatgggatgagcctgtagtgccagctatttgggaggctgaagtgggacaattgcatgtgcccaggagtttgagcttgcagtgagctatgatggtaccactgaactccagcctgggtgacagactgagaccctgtttccaaaaaaaaaaaaccttaattggggaaatcgtgctatattttgagataacttgagttcccctgggaagtgatgaaatggcaaatgtagtgtaaaatcaaacatccagtcacttt

SEQ ID NO: 267390 - DNA, 536 bp, Homo sapiens
ttctctggcagctgattagatggtgcccatccagattaaggtgggtttgccttccccagcccactgactcaaatgttaatatcctttggcaatgccttcacagacacactcaggattaatactttgcatccttccatccaatcaagttgacactcagtattaaccatcacaagtctaccccttgtcaacttgaacccatgcacatcttctgagattatgcataatcttcaaataaagacagtaataaggtcataattatgtctaatgtaatacaactacccttcatacaacyggaaatgtaccaatccccaacccaaatacataaagttaacaatacttaaatgctgatatgaagtcaataaatcttatgtcacatgataaaggaaataaaatgaagatattttcttagtacaagtgtatacgtgcacaaacatgtttttaacaaaagaaggaggaaatacttaggacaattacagtcctcattcctgcagctggtcaagtggtcatagctggtattggtgattaacttcttctac

SEQ ID NO: 267391 - DNA, 509 bp, Homo sapiens
gtctgtgtgcttcagttctttctccactgctttaaggtctcagtttaactgagcatccaaaactcattttctttcagcctttgattttattgaaggaaacattaactcactactttctaattaagcaaatctctttgtgcccttctactttttgtggccatttttttctagtggaaaaatagaggtaaacaataagaacaattttaaaaagraattagggcaatgcccttctagtctggggatggtgttttcctacttagcagttctcctcgtggggggaccgtaagataattcaggatactcccttcccattagtttattttgacattatcatgctttctgctttcttctcaactgcttcaggtcacctgctgagttttgtggttggcatcattcttgttcttattgttgtcttaaaaagactagtctctaacagagatggcttacttttttagatgaactcagacttttaaaaaaaaattgctttttgttacatgttatcaaatgtt

SEQ ID NO: 267392 - DNA, 520 bp, Homo sapiens
tgtaaaaatacgcctgaaaaagtaaaactctagcagcttcattaactattaaacttagtcttcacaacaatttcattaatataaaaatgatttgtaagtaggctactrtaaatataaaaataatccttcgcagagaaactataaataactgtatattaaattagtgactcaggaaaaggattttaaaagaatagttaaaatcttttcatttcactttgccatgaaataaaagtttactcttagatgtagattattctttatgggtttgttatcctagggattggggcctcaaaaagtgagcactgaagacaatcttaacaaccttaaaatagctctggagggattttgcttccagccaagataaagtaagtaggatttcatgcctgaaacaactgagaaatacagacaaaaataaatgagacaatggtattcaagacattggacatgaggcaataaagtgcaatgatccttgaaagatgggaacaagcagaggtgagccccatgattgccctagcttata

SEQ ID NO: 267393 - DNA, 598 bp, Homo sapiens
ctaataaacaaaaaggcaccaacttgagacctatgcataaaactacaaaactaaagcaagcaaaattaaacaaaactgaattcctccaayaaagaagaaaagaagaaaaattggattaagatcatttaacagaaaaagaaccatcagataaaaaggagagattctacaaataaatctcaaaagacacaaaaatatttcatatagctgtagaatgagcttaaagaagagatacagaatttcaaataggtgattactatgagattatagaagatgataaaaagagtaagttgggcagagaaatggaaaataaaaataaaagcatgataaagtcccattaaaagcgcatatataaaataacccccactgaaaaacagctgtggatccagtgaagaggcttaaagaaatgacataaaccaagttaagaaaaacgaagatattgacatttttataaagatgatagatgtagaagtcaaagggaatcctacatacctataattggtgttcctgaaaaagagaacagaaaaaatggaatacaaatattaaaagatttaaaagaagaaaataagcctggaataaagatttgaaactgaagataaaa

SEQ ID NO: 267394 - DNA, 599 bp, Homo sapiens
ggtggaggatctacattccaggtctgattacttgggagctgctagcaattttcttactctttaagagctttttgcaggagttgtatatgtagtttcattgcaaggcaaatgaccggcgcagggtttgaagtcagataaccagtggcacttaagtttcctttaaaagagggcagagtccccagccagtgaaatatgggactgaagtaaagaagattggtcacaagggcatttactgtatgagggtccaagggaggtacattccagaggagagagtatggaagactcaactcatttacccacctcrcagttatactaaggcaaggcaccctaggcaattgaaactccattccgtccactcggagcagagaggcaggttgatgacagcctaactgcacacatgtaggaccctctcctaatatccaccctcaagtgaatgggcatccaaatttgacttcagttatgaccatggtttgcagaatgccctgagccaggaaaaagaaagccccttggacttgaccataagaatgggctttgaggtcagaacactcctgggcattccatttctgccacttactaagtgacattaggcaagtgactta

SEQ ID NO: 267395 - DNA, 599 bp, Homo sapiens
ggtggaggatctacattccaggtctgattacttgggagctgctagcaattttcttactctttaagagctttttgcaggagttgtatatgtagtttcattgcaaggcaaatgaccggcgcagggtttgaagtcagataaccagtggcacttaagtttcctttaaaagagggcagagtccccagccagtgaaatatgggactgaagtaaagaagattggtcacaagggcatttactgtatgagggtccaagggaggtacattccagaggagagagtatggaagactcaactcatttacccacctcgcagttatactaaggcaaggcaccctaggcaattgaaactccattccgtccactyggagcagagaggcaggttgatgacagcctaactgcacacatgtaggaccctctcctaatatccaccctcaagtgaatgggcatccaaatttgacttcagttatgaccatggtttgcagaatgccctgagccaggaaaaagaaagccccttggacttgaccataagaatgggctttgaggtcagaacactcctgggcattccatttctgccacttactaagtgacattaggcaagtgactta

SEQ ID NO: 267396 - DNA, 607 bp, Homo sapiens
gatcggtttttttttagcctaaagatcagacctaaaatatgacagtgtaaagagctgaaaagtaagtatcctgaacttctgtctgggtaactgaaggatagtctccacatcccaggggtgagctgtagcatattctttcttacggcatcttttwggctgactgtgggagaaatgtgtgttgatctactttattatccatataaaaacaaagttgggttaaactactactcatattagcaaaaatgtactttcagtacatctgttgtttatacaaatcctgtgaaacacttagacaagaacttttatgttctccaacttgaaataactttacctgcctatatagtcagataattttgagcattctgatttttgatcagatatatgggtgtttggctgatcattgagtttcaccttatagacattgcttggtacttttagatgaacaaatatttcataacttattttctggtgatatttgataatctgttcatattgcagaaccaggtaaagataggagagaaggttggaacagagatgttaatataagcgaagttacatatagactcaatttaagctaaatatctgaatgggtaaacaaagaactcat

SEQ ID NO: 267397 - DNA, 632 bp, Homo sapiens
cttgatgatttcgagtgtctttctctggggccagaacttaaagaattccatatcatcacttttggacattgaataccatttcaatgtttcccttattttgtgtgtctcaggttttgaaaaacgaatktctcttggccttgcttttggccctttacttgcaggtgcccaaattcagcagtgctgactgccctgttcctgagacttagattgcaactcttacatttttacatttaagtaacattgaaagctttttctctaaagaagcaaaagaggctttttaaaaactctgctagatcttattaaagtatcataattttatccttatatagaatgagtgagaagagaaaacaatttgatgtcaaaagcacagagtttgagtcctggctctgccatttattgctagtataaacttggggaatttctttggaccccaattgcttcatctgtgaaatggaaataaaaatgacttccttatgggaacttcaaggggggaaaaaaaacgtggctgtacctgaatgtgcttgccaagaggtaggtggttataaatgttaacatgaaaataatgaaaaacaacagcttctacccaatataaaacaacaaatttgaaaagaaaaccaatgacacacacacac

SEQ ID NO: 267398 - DNA, 301 bp, Homo sapiens
gttttgactctcttcaaacacaagatgcaaaatagggaattaatcaggtccaamcagtttggaggtttatgtgaccactcttgccactaaaaaacaagaagttgcatgaaatttttccctttggatcggtcatgcaaatttgcattgtataagcaatcacaaattctgtgacacatgcttccaaggaaaattaagaccttggttggttgtttaatgtgcataatgtgactgcttagcgtatttgagaatgtcatgctatagagaatttcatggtaagttcttattggcaaattctgttcac

SEQ ID NO: 267399 - DNA, 590 bp, Homo sapiens
aacaattgtaaatatacatacacccaacactagtgcacaaaggtatataaagcaaacattattatagctaaagagagagatagaccccaatacaataatagccagagacttcaacaccccactttcagcattggacagatcatccagacagaaaatcaacaaagcaacattggacttaatcctactgtagaccaaatggacctaatagatatctacagaacattttatccartggctgtagaatacatatttttctactcagcacatggatcattctcaaggatagaacatatccttgagaataaggccacaaaacaactcctaaaattttgtaaaattgaaattatatcaagtactttctctgatcacaatggactaatactagaagtcaataacaagaggaacattggaaactatacaaacacaaggaaattaaacaatatgctcctgaatgaccagaagcatattgggtcaatgaagaaattaagaaggaagttaaaatttttcttgaaacataaaaaaggaaacagaacataaaaaaacctatggggtacagtgaaaccagtactaagaggaaaatttatagcaat

SEQ ID NO: 267400 - DNA, 580 bp, Homo sapiens
acttaatcctactgtagaccaaatggacctaatagatatctacagaacattttatccagtggctgtagaatacatatttttctactcagcacatggatcattctcaaggatagaacatatccttgagaataaggccacaaaacaactcctaaaattttgtaaaattgaaattatatcaagtactttctctgatcacaatggactaatactagaagtcaataacaagaggaacattggaaactatayaaacacaaggaaattaaacaatatgctcctgaatgaccagaagcatattgggtcaatgaagaaattaagaaggaagttaaaatttttcttgaaacataaaaaaggaaacagaacataaaaaaacctatggggtacagtgaaaccagtactaagaggaaaatttatagcaataaccacctacataaaaaagtggaaaaacttcaaataaacaacctaatgatgcaccttaaagaagtagaaaagagcaacccaaacttaaaattagcagaagaaatgaaataataaagatcagagcagagataaatagaaatgaaacttaaaaatactgaaatca

SEQ ID NO: 267401 - DNA, 585 bp, Homo sapiens
caatggactaatactagaagtcaataacaagaggaacattggaaactatacaaacacaaggaaattaaacaatatgctcctgaatgaccagaagcatattgggtcaatgaagaaattaagaaggaagttaaaatttttcttgaaacataaaaaaggaaacagaacataaaaaaacctatggggtacagtgaaaccagtactaagaggaaaatttatagcaataaccacctacataaaaaagtggaaaaacttcaaataaacaacctaatgatgcaccttaaagaagtagaaaagagcaacccaaacttaaaattagcagaagaaatgaaataataaagatcagagcagagataaatagaaatgaaayttaaaaatactgaaatcaacaaacaacaatttggttttttgaaaagataaactcaacaaatctttagccagactaagaaaaaagagagaaaactcaaacagataaaattagagatggaaaaggagacattgcaactgataccacagaaattcaaaggatcattagagactgctttgagcaactatattcctggacaaatacaacctaccaagattgaa

SEQ ID NO: 267402 - DNA, 585 bp, Homo sapiens
caatggactaatactagaagtcaataacaagaggaacattggaaactatacaaacacaaggaaattaaacaatatgctcctgaatgaccagaagcatattgggtcaatgaagaaattaagaaggaagttaaaatttttcttgaaacataaaaaaggaaacagaacataaaaaaacctatggggtacagtgaaaccagtactaagaggaaaatttatagcaataaccacctacataaaaaagtggaaaaacttcaaataaacaacctaatgatgcaccttaaagaagtagaaaagagcaacccaaacttaaaattagcagaagaaatgaaataataaagatcagagcagagataaatagaaatgaaacttaaaaatactgaaatcaacaaacaacaatttggttttttgaaaagataaactcaacaaatctttagccagactaagaaaaaagagagaaaactcaaacagataaaattagagatgraaaaggagacattgcaactgataccacagaaattcaaaggatcattagagactgctttgagcaactatattcctggacaaatacaacctaccaagattgaa

SEQ ID NO: 267403 - DNA, 568 bp, Homo sapiens
tgctgggattacaggcatgagccaccgcgtctggcctggtagaaaagattttaaaaagtatatctgtatagggcacttaccaggaatgaagcttgcaggactggaagttgctctgggtgagtcggtgagtgagtgtgagtgaatgtgaaggcctaggatatgactgaacactgctatagactttagaaacactgtacacttagactacactcaattcatttaaaaatatttttctttcttcacataataaattaatcttagcatactgtaacatttttactttatmaactttttaaattttttaaaacttcttgactcttttaaataacacttagcttaacttacaaatacattgtacagctgtataaaaatatttctttatatccttattctgtaagctttttcctattaaattttttttaactttttctgttaaaaactaagacacaaacacacacattagactaggcttacatagggtcagaatcaccaatatcacttacttccacctctacgtcttgttccattgtaaggtcttcaggggcaataacattcacggagttgtcat

SEQ ID NO: 267404 - DNA, 568 bp, Homo sapiens
tgctgggattacaggcatgagccaccgcgtctggcctggtagaaaagattttaaaaagtatatctgtatagggcacttaccaggaatgaagcttgcaggactggaagttgctctgggtgagtcggtgagtgagtgtgagtgaatgtgaaggcctaggatatgactgaacactgctatagactttagaaacactgtacacttagactacactcaattcatttaaaaatatttttctttcttcacataataaattaatcttagcatactgtaacatttttactttataaactttttwaattttttaaaacttcttgactcttttaaataacacttagcttaacttacaaatacattgtacagctgtataaaaatatttctttatatccttattctgtaagctttttcctattaaattttttttaactttttctgttaaaaactaagacacaaacacacacattagactaggcttacatagggtcagaatcaccaatatcacttacttccacctctacgtcttgttccattgtaaggtcttcaggggcaataacattcacggagttgtcat

SEQ ID NO: 267405 - DNA, 558 bp, Homo sapiens
accgcgtctggcctggtagaaaagattttaaaaagtatatctgtatagggcacttaccaggaatgaagcttgcaggactggaagttgctctgggtgagtcggtgagtgagtgtgagtgaatgtgaaggcctaggatatgactgaacactgctatagactttagaaacactgtacacttagactacactcaattcatttaaaaatatttttctttcttcacataataaattaatcttagcatactgtaacatttttactttataaactttttaaattttttaaaacttcttgactcttttaaataacacttagcttaacttacaaatacattgtacagctgtataaaaatatttctttatatccttattctgtaagctttttcctattaaattttttttaactttttctgttaaaaactaagacacaaacacacacattagactaggcttacatagggtcagaatcaccaatatcacttacttccacctctacgtcttgtyccattgtaaggtcttcaggggcaataacattcacggagttgtcatcagctatgataac

SEQ ID NO: 267406 - DNA, 532 bp, Homo sapiens
aaaaaggctaatattcatatgaagagatgttcaaactcatttataatttaaaaatgcaaataaaaacaagatamaatcttttctataaattggcaaaaattaaacagaaggattatgccagcattggtgacattagggcaagagggcacactcttatgttgcaatattttgagagtctctttcaacattttaaatccttaacttataacctaataggtactactacgtgccagcataggttgtatgaatgtttgtgaacaagaatgtactattatttgtagttttttaaaaattggaaatggcctaaatatggaaccaggagcatataatgcaactattaaaaattaagggcgggcgcagtggctcatgcctatagtcccacttacttgagagactgaagtggaagaattgtttgagcccaggagttcaagacttcagtgagctatgatcacaccactgcactccattgtgggtgacagagtgagatcctgtcttaaaaacaaaacaaaacattgagaagtatctattacca

SEQ ID NO: 267407 - DNA, 532 bp, Homo sapiens
aaaaaggctaatattcatatgaagagatgttcaaactcatttataatttaaaaatgcaaataaaaacaagataaaatcttttctataaattggcaaaaattaaacagaaggattatgccagcattggtgacattagggcaagagggcacactcttatgttgcaatattttgagagwctctttcaacattttaaatccttaacttataacctaataggtactactacgtgccagcataggttgtatgaatgtttgtgaacaagaatgtactattatttgtagttttttaaaaattggaaatggcctaaatatggaaccaggagcatataatgcaactattaaaaattaagggcgggcgcagtggctcatgcctatagtcccacttacttgagagactgaagtggaagaattgtttgagcccaggagttcaagacttcagtgagctatgatcacaccactgcactccattgtgggtgacagagtgagatcctgtcttaaaaacaaaacaaaacattgagaagtatctattacca

SEQ ID NO: 267408 - DNA, 526 bp, Homo sapiens
tcaccacttagtagaataaagcagaaaactcatattagatgcagaagaatcacttgacaatgttcaatactccatctcgctaaaaacctctcaaaacctctccaaacaaacttagagaattcacgagacaattctgaaggctgctctgcctgtacctacacttcacccatttttaacaagttggtctttgaaaagaaccctggagttgaaccaggattgttttctgccacaaatatggaggaattccactttgaaatacacagtgcagtcagtgtgcagatgggcaacagaaaaatgttgtggccaactgaaaaatgttctccccaaggaactcaataccagaaccattaagagtacttytcagcctttgctttctactggaattacttggggagcttcaatgctttggcagcagtttttgtttttgttttttgtttgttttgttttgttttccagcattatttctctttctcttttaaaaaatactttaaattgaggtatatataacatccagtacaatgtacaa

SEQ ID NO: 267409 - DNA, 544 bp, Homo sapiens
ctttaccaagggtttgtttaagaattttgcccatttaaaaaactcagacttatttttaaatttataggacttctttttatactctgaatatacctatgccatttataggagctacgaatattttcccagtctgtagcttgtcttttcagtttctaaataacatsttttgatgaatagaaatgtttaattttgatgaaagccattttatccattttttttaatggttagtaccttttgtgctctgttcaaaaactctgtctactccaaaattgttaagatgttctcttatgttttctttctaaaagctttcgggttctgggctttacatttaggtctcagttagtccatttttttgttgctctaaagaaatacctgaggctgggtaatttatcaagagaagtggtttattttggttcatgtttctgcaggctgtactggaagcttacaatcacagtggacagtgaaggcagagctggtatgtcacacggtgaaagaagaagtgagagagagacgggggaagtgccaggctctttaaatgaacaga

SEQ ID NO: 267410 - DNA, 587 bp, Homo sapiens
aagagtctatttgggattatagagtaaggatagattatgttatttcttgcaaactgtctgagaaatcctttgagagcatgtggtaggaggataatacatgttacactgttagcaaactttacttttgttgaaaaccttgtaagcttgggatttcaattattctttgctattaataagacctcattcagtccatattaacttagaattggtatagatggcttcttcctgattctgtaagtactttaatgtttggctgagtgcaaacagttcgcacatttgagcagaccaattattaggcaattttcctaactctgcttctataagattttccttatcacttactgaatacccattgtgtctttttccctcaatcacctgggaggaaccatctattgtcctgtcctgaagggagttcttcctaggtctggtcagacctttgtatggtaattaattaagatttagatcccctgttaggaaacctgctgggttaaggatttttgataggaaggttacgggttgtcagtggmctcagtgcttttgggctacatttacactgacaacaaggtggtattggagtgtaatacggt

SEQ ID NO: 267411 - DNA, 496 bp, Homo sapiens
ttacagggtcatgttaaagagactaaggagctgacttaaagaggctcatacttattgcagatgggacgctatgagcatcaataaatcatcaataaacagtagttatatggcaatggccacagatggaaacatttaaaaatttgtttactcataagttcaaaacgatactagaaatcaaaacaaaaagtttattcatcacctttggaggatgataaactcattactttgaaaattggcaaataaatggtaaatcattgatcctgtttttcctatatgaattgtaactcacagtaattagttattaaagaggcaagtaatagtaaatagagaggcaaattcctctttatagaaatattctagctaatacatgaaatagaaattacataattaggatwccattattttcaaaccttaaagaattatagtatctaagcaatgattatcattggctactaacatcacaaaaagagagacaaccagatatctggatatcaga

SEQ ID NO: 267412 - DNA, 625 bp, Homo sapiens
attgtttttactttaaaatgtcaaatatctctctgtcatatgtttgtgttatgttacatgcttttgtcattattcaaaaaacatacagtatttttaaaaatttcaatagcttttggggtacaagtggttatgagttgtatgaattatatcgtggtgtattctgagattttagtgcacctgtcacctgagtcgtgtatgttgtacccaatatatagtacttttatcccacactcccttcctaccctcccacttctgagtctccaaagtccattatatcactctgtatgtctttgcatattcatagcttagctgccacttataaatgagaacatacagatcataaagtaattttggttgttttctggcacttaactaaactgacatctaatctgcctcactgatttatgtgattggctggcttctgtaggcatttgaatgagtgacctctgccttgacctaagcctctatatggtgctctgtcatcctttgatgaaagactatattaaacagaataatctatatgattttyataaatagagagtccaaagagtaagaatttgtcagagtgtctccagcactgtctagaggaaaaatgtatgcagaccaagggcctcaaggatattgt

SEQ ID NO: 267413 - DNA, 568 bp, Homo sapiens
ctgctttccaccacagcacagatttatttatgtacacccacgggtctttctgaaggttcagctggcagcgaggcaccaaggagaatcgagaaaccctctgcagagtatctgtcatcatttccttccaacaatatttatagcgcagacctataggctaaacactgagcctagtgatagaaaacagagcaaatgaaagtatgaaatttctccctttcgctggctaaggacaaccgacttggaagaaattgaagcaacataaagaaaaaagaaacacaatggacayatttaaatattataatattgttattgcaagaacaaagggttacccaagtgctttacaaatgaaatgctgccttgaggctaaatacaaattcaccatagagcattcaagacccagggagaggagtaattctcctgtggcagggactttggaggaagggggctataccctgggttgttgaacttcaggtcccattgctaactgatgaacacataacagataagctccaaaatctctcttgtgcacaccctgaacaccaaggaacaccttggaaatactagtgccatc

SEQ ID NO: 267414 - DNA, 536 bp, Homo sapiens
tttgttgatcacggcaatagagcagagagaggtgccatatctcaaggcataaggtatgttccatccaaggcaaagtgaaaccaatgacwtgttttttccccatcatgcaaaaattctccactgtgacccagattggtcgtggcacccaaaccaacatctcttacccataagagcttcctgactcccatttcctatggctattgctaatattctccttctgatgaaacagtccctttttttgttgtgttggtaaaataaattaaactatagttagtaaatgattaagctacaatccaatctaaatttgtccccatgttgctccatactgtatcacctttccttatttcttcataacttataactattcttctgttaatgtatcatttgtctactcaaactgcaaatataagctctgtgaaagacggacctgtgtctgcatccccagcaattagaacagttcctggtacagcgtaggcacctacatatttgctgaatgaattaacgaatgaatattgctattcctagggtctgtctta

SEQ ID NO: 267415 - DNA, 502 bp, Homo sapiens
attatgtaataattgcttccaacaaatgactccttcctgggtcctcacccatttgcagtattatgtaaccattccttctctcaacatggaggccatgttaaaaatacccctgccccattacaggctgatcttgtaacttgctttgcccagtagcaaagaaccaagatcagttctgtggagaaactgacattggttaagttctaaggccttaaaagaccttccagcatccactcttactgtcytgaaacccagttgcaatattatgaaatccaggctacctgtctggggagagaggtcctgaaggatgacagaccacctgacagaggagaacaagtcccagggttcctgacacggagggtcatctcagacctcctcatccagcttagcccagctcagcccccaactggatgcagtcacctgagttgctccagccaacaccacacgaagcagaatctcaggagaactctgcctgaattctgaccctcagaacgctgggcaataa

SEQ ID NO: 267416 - DNA, 635 bp, Homo sapiens
tttcagatttttaaggagggttcattcattcattcaacaaatatatattkcactctgcacttactgtgggctaggcatggaagatatgacttgtaagtaagacagtgtttctgctctgacaaaatgtacactctagtaggcaatggaggcacacacagaaacaaatgaacaagaaaatgtcagttggtgacaagtactgggtgaagaaaatgcaaggcagtagaatggagaatggcagaagcagaaacaaattgtatgagcaaccaggttaggtgatatttgaacattgaccactgtcagtaaacatcctgaagaaggaattagggatccaaagactcatttatgccccgacacttctctatcttctctttccactctatcagggaagactaaggtacaagatctttagagaaagtctttgaaaggatgaaatcagattcatcttcatcttctctttataaaaaaaaaaagccagctgtaagcttttgtgagtttctttattgaccttagggcctgagctgtgggctttcctatgtccaataaataaataatagtggttcataggaagctgacaggagatgtttgcagaactgaagggaaaaatgtttgttgaattaaaatgttcattgaattga

SEQ ID NO: 267417 - DNA, 547 bp, Homo sapiens
caacactatagaccaaatggacctaacacatgtgcatagaatatttcacccaacagcagaatacactttcgtctcaggtacacacagaaccttcgccaggatagatcacaagtgaggtcagaacaaaatcttagccaactcaagaagattgcaatcataccaagtatctttcttgaccacagtagaatgaaactagaaatcaatagcaaaaggaaaactggaaaatacacaaatatgtgcaaattaaacagaaaacttttaaacaaccaatgggtcaaagaataaatcaaaagagaaattataaaataccattagacaaatgaaaacaaaaacacaacataccaaaacctatgggattcagcaaaagcaaactaagaaggaagtttatagtgataaacacctaaatttaaaaagaaaaaagctctccattcaacaacctaactttayacctaaaagaactagatcaagcttgcccaacccacagcccagaacagctttgaatgtggccccacacaaatttgtaaactttcttaaaacattatgagat

SEQ ID NO: 267418 - DNA, 426 bp, Homo sapiens
ttctcatttataagtgggagctaaacctcagtgactcgtagacataaagatggcaaaaatagacactggggactattaracaggggaatggtggggggcaagggttggaaaactgactgttgggtaccatgcttagtacctgggtgtcggcatcactcatactcaaacctcagcatcatgcaatataaccaggaaataaacctgcacatgtatccctgaatctaaaataaaagttgaaaaaaattatgcaatattcatacagtggaatactactcagttatataaagaaatgaactatgagtacatgtagcatcatagacaaatctcagagatattaaactaaatgaaagaaacccaacaaaaagagcatataactatattattaggcttccatgaagttctaaaacaggcaaaactaatgttaac

SEQ ID NO: 267419 - DNA, 615 bp, Homo sapiens
acaaaaggagagaaagagtacttctttaccaaatgatgcccagtctggttttttctttttgtcttactactgctaataaaaaataccaaaaacagatttagccttatgtgtcatacatgtgaaaaaatgaagacttagaaaaagtgatgatctaagagaaatgtattgctatttgtggcaggaaaataattgaacccttatgccggtcactctatcactaagtggaattgggagatatagcctagcttttgctaggttactttatggtaataaacagcccctcacatctcactggcttacaaaaattaaggtttatttcttgctcatgttatcctttggctgcagtggttttaggttgggcctagctctgatttaccagccttctgcattgcaggatccaagctaaatgagtaggctctgttttgagcctgtgtctgttggggcaaaggaaaatgatgcaactgtggaaccrtgcaaaggctcttaaaggtgtctagacttagaatactctcttccatgtcatgtggtcaaagatgaatgtgtataatggtcttaaagggatggagagtcaatatggggaacaacaatacaatctacatactatggaagggtatg

SEQ ID NO: 267420 - DNA, 615 bp, Homo sapiens
acaaaaggagagaaagagtacttctttaccaaatgatgcccagtctggttttttctttttgtcttactactgctaataaaaaataccaaaaacagatttagccttatgtgtcatacatgtgaaaaaatgaagacttagaaaaagtgatgatctaagagaaatgtattgctatttgtggcaggaaaataattgaacccttatgccggtcactctatcactaagtggaattgggagatatagcctagcttttgctaggttactttatggtaataaacagcccctcacatctcactggcttacaaaaattaaggtttatttcttgctcatgttatcctttggctgcagtggttttaggttgggcctagctctgatttaccagccttctgcattgcaggatccaagctaaatgagtaggctctgttttgagcctgtgtctgttggggcaaaggaaaatgatgcaactgtggaaccatgcaaaggctcttaaaggtgtctagacttagaatactctcttccatgtcatgtggtcaaagatgaatgtgtataatggtcttamagggatggagagtcaatatggggaacaacaatacaatctacatactatggaagggtatg

SEQ ID NO: 267421 - DNA, 379 bp, Homo sapiens
atttcaattcttttaccataaatttatgcaaagtctagtcattttaacttcatccacatctgaggttatttcactttatttaaatttgccatcatggcatcrttagttttattaagcaactgccacataggtttatgaattctatctttcctgtttgtatgattcacttctacttatatttttatttttattacttaaatgctttcttcacctttacttattttattttccactttcttcagttcttgagtcattgtattttaatatattctctagttgaaatgctttatttcccctttggcctaagaattctttaaagaaacatttgaaaaacagcacattacatgaagctagtgttaattggttaagaaatcatgta

SEQ ID NO: 267422 - DNA, 379 bp, Homo sapiens
atttcaattcttttaccataaatttatgcaaagtctagtcattttaacttcatccacatctgaggttatttcactttatttaaatttgccatcatggcatcattagttttattaagcaactgccacataggtttatgaattctatctttcctgtttgtatgattcacttctacttatatttttatttttattacttaaatgctttcttcacctttacttattttattttccastttcttcagttcttgagtcattgtattttaatatattctctagttgaaatgctttatttcccctttggcctaagaattctttaaagaaacatttgaaaaacagcacattacatgaagctagtgttaattggttaagaaatcatgta

SEQ ID NO: 267423 - DNA, 594 bp, Homo sapiens
taggggtgtgtgtgtatgtggaaggggggcatctttctagcattaaagttaaaattttcatctaaagtattaatacattgatgtaggtaaattaaggaaagtatgacctgataagcaaggatagcatgataatttctggaaataagactattagttcaaagcataagaaattgctaacatttagccatattcatgtgtagcacaactatttcatgtgtttcatttaacatgcaatctatcatttttaacattaattaaataatgaaatatttcagatagcaaaacaatgaagatacaataaaggtttatgtagttattggcagtcgttttgagagtttagaaacattatggaattcaggaataatgacaatatatcaaaagtatgaaggctaaacagatatttgatagattaactacctagacatatactgattccatatagcaaacatctgcttccatgatcacattggtggaagaggaaacttactcttttgtcctgtgactttggtaaagcccaatatcatcagatttctaattgaaaataatatagaagtaaagcagtagatatrcccccctatatttttgtctgtggtg

SEQ ID NO: 267424 - DNA, 576 bp, Homo sapiens
taacaaacagataagaacagaaaatctttcagttaagagaggtggcaaaagcggtctgaatgtttcaattttccaagtgatacaattttgctttggtacaacagatgaagtttcccartaatctgctgtgtcgggaattagttgaggatttgtggttttcaagtagtaggtcagcaatgatttgagaaaatcctgaattaaagagaaacaatttaaggttagacgggtgatcagcttaaagtccattactgctggcttaagtcttagagaagaaaaagaatgttacactgtagtgctcacagaatctggaaaagagttgaccagaggctaggaggaaagaggaaataaaaaagaagggctttaatatattagattgagtattatttaatcaaatgttagaagaatattttgatcatttgcaaagttattatatatttttgtcttaaactgcctcatcaaatagaaatcttaagtaatcagaaggaaacagtctgacctctttggaactaacctcaaattgcagtttgagatcattttataaaatccactggataactgctgacatggttaataaat

SEQ ID NO: 267425 - DNA, 472 bp, Homo sapiens
gttgtatgtcaaaaatattactgaagtttttttaaaattgtgaactatgcaaaatttaaatgtatattataggaatagttaaaatatttttccacttagtaaaaatattttttctattttatctgtaaaatagtctactatattatcatagtaatttttaatataaatataaatacaatattacatatggttcttgtttatgacaacatattatattatcatagtaatttttgtattatcatagtatttataagtataccatattctactatattatcctaataatttttactatatcwtagtaatttttctatatattttctgctatattatcatagtaattttttttttttttcgagacagagtctagctctgtctcccaggctggagtgcaagggcgcgatctcggctcacagcaacctccacctcctgggttcaagtgattctcctgcctcagccgcccgagtagctg

SEQ ID NO: 267426 - DNA, 592 bp, Homo sapiens
taaagcttaaaaaaaaaaaatttcacatacttttaatgtatcagattataattctcaagccaatatgtttgtagcaagatgaagcaggtaagtaaccatgttcatttactagaaatcatttgattgttcatgtaatagaaatgaaataaacataaaattgaagaaattactaaaaactctttcttgttaaataggaaatgctaaagataagctggaaataggaaaacccccacatacatgcrcacacatgcagatatgtgtgtctccatccatttacccactgatggggcctagacacaacatcccagtagcaatgagcacctttagcacccagatcttgctttctaaataccattccccactagaaagaagcagagttccttagacaaaaggctctttggagatctgaggcaggaaaattacaagcgcctgggacatctttctgtgccagaaagcaaggagatgtcccatgacaaatggtgtcatgtcaaaagtttacaaggagctagaagggtctctggccaattttggggcaattttaacacgaaatttaacagaagtgtacttggttgtaaaatacagaataaataaa

SEQ ID NO: 267427 - DNA, 588 bp, Homo sapiens
agaccaacctggccaacatggtgaaacctcrtctctacaaaaattagaggagcacgatggcaggtgcctgtaatcccagctacttgggaggctgaggtgggagaattgcttgaacctgagagcggaggttggcgtgagccgagatcacaccaatgcactccagcctgagcaacagaggagactccatctcaaataaaaataaataaataaataagtactgtcaattatccttatttttttacagacaagaaactgagggaaagagtcataacaataatagtaataataaacccttccatggcttttcatcatgcaccagagggaactcacatatctcactctggcaaacaaaccttcacacaggctttcagcacctccccactggtaactgatgctcaagctgaagttaaatcctggaggtgcaacaagtcaaactatttgataacgtatttctctgcagacttcatccttctgtcagaaatgcccttccctgaacaacagcccactccagctgtgtcctcctaggaagcgtctcttcttgcaaaagtatacacctaagtcacttcctctgtgaatctcctggatgtc

SEQ ID NO: 267428 - DNA, 512 bp, Homo sapiens
aactcaatgtgagttttactttttcatttttaagtattagctagcctgttttaaataattttctctggtgagctcaaaatatttaaggcagctgaacaatcttgttctcttaaaaatgaaacttaattcaactctaaaaatatctgaaaccgaacatgcattatttctggcgtactctccctcaagtrgcaacatcaactatttcatgacattttctaaacatcgtgtccacctaaaccttttttttttttcaggtctcacaaggactaagaattacaaactcttctttcaggcttccctaattcccctctatttaaaatctctgtcctgatactcagatttgtccaagtcaaatatttcattacccactttgaagttacacatgagacctcactcagaaacccaaggcgcttctcactcctctcacttttgtgtatacagtgtactgggtacatctttgctgactgcaagctccccagggcagcaacccatttaatctacatttgagatct

SEQ ID NO: 267429 - DNA, 551 bp, Homo sapiens
agatatgattgtaggcgacagtgagaccctgtctcaaaaacaaaaattattgagcaagtactggaaattttacacacatcatctctaatcttaataaacttgaaagcaggtattgctattcccatttcaaagataagaaaactgaggttcaaagaagttaagatggtcatgggcacagaactagaaaacagcactaggctgtcckaattccaaagcccccatacattctgctataccatgctgctgctcacatcacgggtaaatcaagattacttataaaaggaggatcaccgttacatgtaagtctcctgagtggctcacaaggcccaggatccctgctgcccagcaccactccggccagccattgccaccctctgttccagccctgacttctgcctctctagggacaagctggacttctaatctaattgatacacagaaaataaaaccacaggagtgaattaccaaagactttattctgtttccagatgctcatatgatatcacctagagcacaatcccctttattctgcctctaacacatgctagact

SEQ ID NO: 267430 - DNA, 404 bp, Homo sapiens
aatgtgtcactacagtttgcataaaaggattatgccccacccccacccacccagataattaactggaaaactttattagaagtaataaaagagtggagcaccatgaccagaaaaaaataaacaagraaaaaatgatgaacaatattaagcagtaaaagaaaaaaaatcctgtagaatattatgcatagagcaatttcatttatgtcctccaacctttatagttaagtgttcatatatgtttatgaaagtttccatacttatatttccaaaagatatttgaaacgtattttttccctaggcaagtaatggacctcttgccacaacataactcttgaaagtgaaccaaatatggaccaaaattaacagtgattactgctggtatatatgtttgttatacagtatgc

SEQ ID NO: 267431 - DNA, 632 bp, Homo sapiens
caaatgaaaaaaatagaggagttgtgagaaatacataattgcataacagaaagtcatacaggggctgatccataatttcaaagtaaaatctctccaaaagtccttaacaagtacatgtctctcatatttaaaatacagactgagcatccctatctgaaaatccaaaatctgaaatgctccaaaatccaaaatgttctgaagaccaacctgatgcgcaaaggaaatgctcactggagtatttcacacttcagattttcaaactggggtgctcaactggtaagtatataatgcaaatattccaaaatctgaaaaaagtctaaactcctaaacacttctactctcaaatatttcacgtaagggatattcaagctataattaaaatattatgcgtaatttccaaaattcatcactgtacaaaaaactttactgcttgccttttatgaaratcaaagtaacatacagataagaaggaattacaaatttctagaagatggtgctttgttctactcacttgacaaccaaaagctgtccagtcaagaacataacaactggcatttactaagtgcttatcatgtactactacacaaagtggattctattagtaaggccattgtacagacaaacagactgac

SEQ ID NO: 267432 - DNA, 632 bp, Homo sapiens
caaatgaaaaaaatagaggagttgtgagaaatacataattgcataacagaaagtcatacaggggctgatccataatttcaaagtaaaatctctccaaaagtccttaacaagtacatgtctctcatatttaaaatacagactgagcatccctatctgaaaatccaaaatctgaaatgctccaaaatccaaaatgttctgaagaccaacctgatgcgcaaaggaaatgctcactggagtatttcacacttcagattttcaaactggggtgctcaactggtaagtatataatgcaaatattccaaaatctgaaaaaagtctaaactcctaaacacttctactctcaaatatttcacgtaagggatattcaagctataattaaaatattatgcgtaatttccaaaattcatcactgtacaaaaaactttactgcttgccttttatgaagatcaaagtaacatacagataagaaggaattacaaatttctagaagatggtgctttgttctactcacttgacaaccaaaagctgtccagtcaagaacataacaactggcatttactaagtgcttatcatgtactactacacraagtggattctattagtaaggccattgtacagacaaacagactgac

SEQ ID NO: 267433 - DNA, 481 bp, Homo sapiens
ccctgcccttggaatcctgttgaggagacttgggtctctttttgtcagtggggagtgaggagaaggctcagggagttctgctgatgcttcagaagagctactcttgattttcatggctgctctgagctcatacatgaggaaaggcataggcctccattaatttttttcatcagtaattgtcttctagtcaagaagagcttcatggtttgccagttcctcgcaaacaggagctttaataggactgaacgctattcactgaatgctgtctattcctagtgggcaaagttgtatggatttcccgacatcttcattgtcctggtccatcttcttcgctcaggccacttcctcaactttctcagtcaaaccgtctctttttgggrggtccagaggtgttgcacaagactcaaggagctctacaccaggagtcagtggtcctggcctggaccctgacctgtctccatggcttgtgtgatgctgaact

SEQ ID NO: 267434 - DNA, 481 bp, Homo sapiens
ccctgcccttggaatcctgttgaggagacttgggtctctttttgtcagtggggagtgaggagaaggctcagggagttctgctgatgcttcagaagagctactcttgattttcatggctgctctgagctcatacatgaggaaaggcataggcctccattaatttttttcatcagtaattgtcttctagtcaagaagagcttcatggtttgccagttcctcgcaaacaggagctttaataggactgaacgctattcactgaatgctgtctattcctagtgggcaaagttgtatggatttcccgacatcttcattgtcctggtccatcttcttcgctcaggccacttcctcaactttctcagtcaaaccgtctctttttggggggtccagaggtgttgcacaagactcaaggagctctacaccaggagycagtggtcctggcctggaccctgacctgtctccatggcttgtgtgatgctgaact

SEQ ID NO: 267435 - DNA, 576 bp, Homo sapiens
atgtgaggcccattggcttttgcctcaatgaccatctctatgtcccaaggggtacataggaacctctgggctcttccatagggaacctatgctcccttgcgggagcattgacacaggcctctccccgcctcaccaccgtatgtgagcatttttcactcttagtatggctaccccctcttagtggtggggccctgcaagctgatctcacaaatgccaccgtggaatggaaggcgtgttaaaaaaaaaaaaaaatctttgcttttgctttcccccaagactacctaacaacccctaatcctaatccacagtcttggatttcaagcttgggggtggggctggggggccaaaaatctcagrtctgtttccttcccctatttctctcttttccttctcgcagtgtccactggagcaagaaggggaggctctcacctctttgctttctgttatgtcttccatcgtccatagggcagtgaccctcatggcttggccacaagaaaagcaggcatcttctctaaactatggaagaaatcatgaggtggggcccccagtcttttggtatgggagatgccaaacaaa

SEQ ID NO: 267436 - DNA, 557 bp, Homo sapiens
gtggtaaaaaaaaaaaaatccttcgggggagaaaaagacagtccatgagaatactgtcaaattgtctaatacctttattcaatcgtgcttggaaagaggaagcgaggcagacacggggccctggaatctgtgaaacacctaccccaggtttgctcaggttgttaaggaatctccagggacatccctcttcccattagcatggattgggcctgcgaagacaccgcagctgactgatatctgctctgttagattacmaagccacgtaattgctgtttgaggttcgagtcatggtgagggactcatctgcgtttctgttcatttgtatagcaattaatttgtacctaaattaacaataaaaatagttatgtgatccaataaagtagacatgatggcagaaaaaataacctcatctgttttaccgtactagcaaggccaaatcgtccttttcccctcccactgttgtttgtctctctggagaaggttattttcaggcaggcagagcgggaaccgggtgtgcatgctggcccctgtcaggggtccagcctcaaaggccacag

SEQ ID NO: 267437 - DNA, 557 bp, Homo sapiens
gtggtaaaaaaaaaaaaatccttcgggggagaaaaagacagtccatgagaatactgtcaaattgtctaatacctttattcaatcgtgcttggaaagaggaagcgaggcagacacggggccctggaatctgtgaaacacctaccccaggtttgctcaggttgttaaggaatctccagggacatccctcttcccattagcatggattgggcctgcgaagacaccgcagctgactgatatctgctctgttagattacaaagccacgtaattgctgtttgaggttcgagtcatggtgagggactcatctgcgtttctgttcatttgtatagcaattaatttgtacctaaattaacaataaaaatrgttatgtgatccaataaagtagacatgatggcagaaaaaataacctcatctgttttaccgtactagcaaggccaaatcgtccttttcccctcccactgttgtttgtctctctggagaaggttattttcaggcaggcagagcgggaaccgggtgtgcatgctggcccctgtcaggggtccagcctcaaaggccacag

SEQ ID NO: 267438 - DNA, 516 bp, Homo sapiens
aacctacccaagagggaaaaaaggattaagaaaataaagatgcagctggggagtaggaggaggaagatggcattagtttaggggcagctggcttgaattaggcacctcccatcgggaaaaatgcatccaactcttgtggatgaaacattgacattcccttgcactcaaggaagcagygcactcctgtttggctaaggagtacctctgaacctgacgttttggggcatgtgagttccatttagtttcacactctcaccactgagcatttttggttgggcattggggttggctgcactgaataagccctcctctcagtctactgggatgataaaataggtacagagataaccgaaatataagctagtggggaggagtgctctgaggaaggacccaagaaactgctctggggctacagatgaaggagagatcagttttatgttgcatcaggaggagtcctcacggaagaggtggcatctgaacagggcctggaaggatgagtagcaataagttatggga

SEQ ID NO: 267439 - DNA, 516 bp, Homo sapiens
aacctacccaagagggaaaaaaggattaagaaaataaagatgcagctggggagtaggaggaggaagatggcattagtttaggggcagctggcttgaattaggcacctcccatcgggaaaaatgcatccaactcttgtggatgaaacattgacattcccttgcactcaaggaagcagtgcactcctgtttggctaaggagtacctctgaacctgacgttttggggcatgtgagttccatttagtttcacastctcaccactgagcatttttggttgggcattggggttggctgcactgaataagccctcctctcagtctactgggatgataaaataggtacagagataaccgaaatataagctagtggggaggagtgctctgaggaaggacccaagaaactgctctggggctacagatgaaggagagatcagttttatgttgcatcaggaggagtcctcacggaagaggtggcatctgaacagggcctggaaggatgagtagcaataagttatggga

SEQ ID NO: 267440 - DNA, 583 bp, Homo sapiens
actatcagtaataatctttttgctaaattcagcaagatttgcagtggagaatttctattattagtcaagatcatttataaaaataataagcattcattacatacactacttaygtagttgggtttacttacaacatacattcattcaacacagtcatcaagcctttatgtcacatactatgctgtgttctgtggaggaacaaatttatgagagacattagtgaggcctgtgctaagggagctaattgcataatacaagagttacataactaactagtttatagtggagaacataatgaatacttatatggtttggatttgtgttctcgcccaaatctcatgtcaaattttaatccccaatgttcgtggaggggcctggtgggaagtgattggatctgggggtggacttttcccttgctgttctcatgacagtgagttctcatgagatctgtttgtttaaaagtgtgtagcatctccttcttccccctctccttcctgctccagccacttgggatgtgcctgcttccccttcgccttttctaagtttcctgaggcctctccagtcatgcttcctgtacagcctg

SEQ ID NO: 267441 - DNA, 458 bp, Homo sapiens
gtttggatttgtgttctcgcccaaatctcatgtcaaattttaatccccaatgttcgtggaggggcctggtgggaagtgattggatctgggggtggacttttcccttgctgttctcatgacagtgagttctcatgagatctgtttgtttaaaagtgtgtagcatctccttcttccccctctccttcctgctccagccacttgggatgtgcctgcttccccttygccttttctaagtttcctgaggcctctccagtcatgcttcctgtacagcctgcagaccggtgagccaattaaacctcttttctttgtaaattagccagtttcaggtagttctttatagcattgagagaacggactaatacaaataccattataaaggaacagtaaaagcgctatggtgactcagatggtgaggaaaggaagaataatatttattcattcacaccacaaatatttcc

SEQ ID NO: 267442 - DNA, 522 bp, Homo sapiens
atggactctctatttaggaaggcatatggtagaagataacaaacatctgtcaggcactgtggctcacacgtgtaatcccagccctttgggaggctgaggcaggtggatcacctgaggtcaggagttcaagaccagcctggccaacatggagaaacctactaaaaatacaaaatacaaaatacaaaattttgtactaaaaatacaaaaattagccaggcatggtggcacgcacctgtaatcccagctactcaggagacggaggcagaattgcttaaattgggaggcagaggttgcagtgagctgagatcgcgccacagtactccagcctgggcgaccragcaagataaaaaaaaaagaagataacaaacatcaagcgaaggattggaactttaagatatttatctaacctaaaataattttcatcttatagataaatgaataaacaactttcaaatgatctcctaaattgttgaaaagtaatctgataaaattatgattattttatcatatcagcacctggcc

SEQ ID NO: 267443 - DNA, 557 bp, Homo sapiens
cattaaggggcatgagacacagtctgatattattcatcagtatagaatataaatcctttagtgtcagttcttagcagttaaagcaaacatttatataacacttcacttaaygtagatcaaattaataatagaattatttgatttctgccagatgatttcattacaaataagatatcttggtgaaagggggatggcatgaaaaaggccttaaatttttactttatttttttaaacaggtaagataatcttctatatttaaagaaactgaaaattcatacccacaaaaagcccatacaagtttattgaattctgaattggaaacgtgtgtgtgtgtgtgtaggtatatatttgtgtgtgtgagatatatatgtgtgtgtgaatgtcatttttggcacacttatatagatttgaatatgggtagtatattagatagtatagaattatagttcttttgttttttagaagtgatgattgtctatgatcgtgtaggagatgcatgttgaaatctttgagatgaagggtcatgatgtctacatcttactttcaagtggtttcac

SEQ ID NO: 267444 - DNA, 589 bp, Homo sapiens
acttaaagaggccaccaagggttacaatctccttacaaaagtgaatttaaaatgtactaacccctccttaagaatactacaagaaaagttgcttgtcatgattttgatattgaaattgatttgatttgatattgaagggaaaaatatcttcctcaagaatttttaacaccaagatacttcctcaaagtggctttggaataagaatgtatactgcatgggtggtccaaagaaactttacataaataatataatttagtagcctaagctaccacctcaggttcctgaaagaagcaaaatctaatactctaaaggaatccattttccttccacaactcaaagaattttcagataaacttctaaaaagtaaaatatcgcagtcgagcatgaaaggaaaacaaggtatgaatgagagsttaactggctctgctgcttactgggtaacatgctttttgaaatgtattgctacctgctggcaagcttgtgctttgagttgtgctgatttttctgcatttacaagtcttaccaagcgtctgtttagaattaaccaacataagttggaagttttcaaccattagtgtctagtgacagt

SEQ ID NO: 267445 - DNA, 530 bp, Homo sapiens
agacccctgtcttaatataactatcataaaacgatcatttaaaacattttttatatgacaagtacatgggattttgtatatgttagctcattgaaatcttataagaatcttaagtgtattaagagttgaagtattctcytcattttggagatgataaaactgagatgtgagaggttaatatcacatactttctaaatgccagagagaagatttacactaagacagttgggaactggagctggtacttatagctaccatattatactgcatctgaatgtgacctgacagttgtttgtttgagtctatcccactcctcatactaatctgcaagcagtccaaacagaataataatgagattggcaagatactgctcatacacaaagcaaagagtatacaagattctttaagcatataaagggaaccatgactgtgcacaagctggctatatactgcagcaaacacagcaacactaccagttagatgagtaagacactcttgctctcaaattctcatgaagttccctgacttcc

SEQ ID NO: 267446 - DNA, 444 bp, Homo sapiens
accttaaaaaaagggagtaatttagaagacaggcataaatataaggacagggaacaagaataggaacttggaatccatacacaaagaatccccatatgaaggatttggactttgtgacaggttctactggtttatagcattacattctccatctactttgtaacctagccatgcagtgtttaaatgaatattttttgtatacctactacgtgttatgcactgtgaatggtactagggatactatggtgaacaaaaatgtatagtctttatcttcattgagctcttatattagtgaagacaaattatcaacaactaattaaagtgacagagtaacaattccaaacaaggataagtgctgtgaagaaaatgaaacrttataatagaaaaaaaccagttgactgggtgagggaatggaaattaagaaaatgtcaatgagagaagttc

SEQ ID NO: 267447 - DNA, 406 bp, Homo sapiens
agggtctcccgactgagctggtctcagcaattataaatttgaattacttttatttatgaatcagataagataacaacttaaagaatgctgtaaatcactcttttctttcagaagaaccatctattcaactaggaaatatttatttagcatctaccatatgtcagatatctgggagtagattgattttttttttwaaaaaaaaaaggaagagagaaaaacacactccttgtcctcttggagttgccatatataaacaagaaaaaaataaaagaatttcaacttagattctggctacatatagctaaataattcagttagaaattctgaagttatgtatttttaaaaattactgccacagatatgttgaatatattaattagaaacaatctttagattagttagaatc

SEQ ID NO: 267448 - DNA, 502 bp, Homo sapiens
tactatcatctttgtgactatctcaggattagtatttcagaaacaggaatgttttgaaacaaatatgggtaattgtaaaaatgactggctgatatactagaagcaataacatgaaatagcaaatagaaataagcagttttcatagaatggagagcaaaaagcagtacctctcttccaccaaaatgtcatgggaatgtaaaaaaaaagaagatatgtgcaatgtaattaattctcacatcaagactcactgaacaaaccaatgaacaacttccaatccagaaaggttagttggwcaaaaagtatttttaaaacaaacaaaaatttttattatggaaaaatttcaacacaaatatagagagaatggtataatgaagcctctttagtcatcacctattatcaatagcatcaacttatggacaatcttatttaactcacaagatattcttaagacattaaaactagcactcagacagtaacctaaagcacatgcatttcctctagt

SEQ ID NO: 267449 - DNA, 581 bp, Homo sapiens
ttcctctagtaggtaaaaaagaaagaatatgtgctctcagtttccagtataggagatgccagtgagcatggcatctttagagcatagactttgggtgagactgatctgaatcctggttccacaatttactatatgagtgagatagggatacactatgtcatctttttgtgcctcagtttcttcagctataaactggggatgataatatctacctcacttgctgttgtgaggattaaataaaatactgtctgacatgtggcaaacacctaacaaactattattactatctcattcagattaaattatgaaagtatcaaaatatacactcacactgactgtacaattatgtgctaactctatatgtttttctttgttttaagtgataagctttcaaaggatatcacagactcttgcacaagtcaagcttgtttttctttctctttccctctccatacaaatacatttctttcatataasggaatttcttacattgatggagggaaaagggaaactatttttttttttgctagattatgaagctatacacattctaaaagtggttataaggattttccagttga

SEQ ID NO: 267450 - DNA, 582 bp, Homo sapiens
ttatgaattctctagcctgcacagccagagtgcttcctttactttttgttattttacttatttcattctgtttgacatacagctgtttctttccaggccttaggaaacagtaagctccttgggggcaggaagtcgtattttttctgtgtctttgcccatttgtatcagtttctgagggttgccaaaataaagtgccacaaactgggtgtcttaagcaacagaaatttatggtctctcagttcaggaagtctcagatcaaggtgtgagcagggccacactccctctgaaggtatgatgggaggatctgtctcaggtttctgtcttagtccactcaggctgctataacaaaatgctataggctgagtggtttatgaacagcagaaatgtgtttctcacagttttggaggcaggsaaatctaagaccaaggtgctcacaaatttggtggccagtgagggctcactttctgtttcacagatgctcattttcttcctgtgtccttacatggcaaaaggggtgagggagctctctgagatcccttttataagggctcagatcccatttgtgatggctttgccctcatg

SEQ ID NO: 267451 - DNA, 591 bp, Homo sapiens
gctggctgcctttatggcagcggtgtcaggccaagaggttgtaaacatgccatcctctggaatgcatctgcttgcttcacttggcagattcctcaagagttggatgaactccagccaatgtctgagtctctgtatcccatgtggggccccatgagaatatgtcytggtgtctccagcccacccctctgtgccctcctgtcccaactctagtactggcctgaggtaaacattattttattctattttttaaatttagacacttcatattgagcacttcttagatgcttggcactttatatgtcttgtgtcattcagtcttggccacaatattacaaagctgacttttcatttaattgggggaatatatcatatataaaaatgaataaatgttatctggagagtattaaaaaaaataatgaaatgtgcagcaattacccaggataagaaacagaacattaccagtaccttaaagacctctgtgtacctctctcaaattatagtgccctctcctccctgcaagagaaacggcatctgaattttgtattaatcatacccctgcttttctttacagtttactaagtatgcctgtat

SEQ ID NO: 267452 - DNA, 591 bp, Homo sapiens
gctggctgcctttatggcagcggtgtcaggccaagaggttgtaaacatgccatcctctggaatgcatctgcttgcttcacttggcagattcctcaagagttggatgaactccagccaatgtctgagtctctgtatcccatgtggggccccatgagaatatgtcctggtgtctccagcccacccctctgtgccctcctgtcccaactctagtactggyctgaggtaaacattattttattctattttttaaatttagacacttcatattgagcacttcttagatgcttggcactttatatgtcttgtgtcattcagtcttggccacaatattacaaagctgacttttcatttaattgggggaatatatcatatataaaaatgaataaatgttatctggagagtattaaaaaaaataatgaaatgtgcagcaattacccaggataagaaacagaacattaccagtaccttaaagacctctgtgtacctctctcaaattatagtgccctctcctccctgcaagagaaacggcatctgaattttgtattaatcatacccctgcttttctttacagtttactaagtatgcctgtat

SEQ ID NO: 267453 - DNA, 620 bp, Homo sapiens
ttcatacatatacatacaaatatactatgtgaccatatttgaagatagggcctttaagcaggcaattaagattaaataaggtcataagggtgggacagcaatccaataggacttgtatctttataagaaaatgatgaggctgggcacggtggctcacgcctgtaatcccagcactttgggaggccgaggcgggcggatcacgaggtcaggagattgagaccatcctggctaacacggtgaaaccccgtccctactaaaaatacaaaaaaattatccgggcatggtggctggcgcctgtagtcccagctacatgggaggctgaggcaggagaatggcgtgaatccrggaggcgaagcttgcagtgaggggagattgtgccactgcactccagcctgggggacagagcgagactccatctcaaaaaaaaaaaaaaaagaaaatgatgagacatgaggagcacatgagcacagaagaaagaccatgtgaggatacagcaagaagatggctgtctgcaagcctggaaaagagacctcaccagaaaccaatcctgctagcatcttgatcttggacttccaaccaacagaactgtgagaaaataaatgttgtttaagctacccagt

SEQ ID NO: 267454 - DNA, 420 bp, Homo sapiens
attggaagcaggtattgagctttaataagctctgtgctaagcactgaatgcacatattctaatccttacaacagcccagtgaattttatctaccttttattgcaattttagggttagacaaactaaagcagagagtcacccaaggcagctcatgtgtaagtagagaagttcacatgcagtgtcttttaaaattcaagtataatttttttctgtgaaaattggtaaatgaaagaaatctcagttgttcgtttcygacttgataaaaagcactgaaattaaagtagttctcctttttaagagtatgactgaaaattgttggcagagaaaaatacattttaataaacatgaactttggacttttgtttgtttgctaaaaaagtgaatgtttctgctaaatctaaaatttgatgatgttatata

SEQ ID NO: 267455 - DNA, 540 bp, Homo sapiens
agtatacaataatagttgtagacttaaatacctaactttcaacaataggacaatcagattgaagataagtaagaaaatataggacctaacacaataaaccaactagatctaccagacatattcagaatactctgtccacttaacaacgcatatattcttctcaagtaccctgggatatttttaatgattgacctacattaggccacaaaggaagtctcaatcaatttaagaaaataggccgggtgtggtggctcacacctgtaatcccagcactttgggagactgaggcaggtggatcatgaggtcaggagttcaagaccagctgggccaaaatggtgaaaccccttctctacyaaaaatgcaaaaattagcaaggtgtggtggtgggcatgtgtaatcccagctactcaggatgctgaggcagagaattgaacccaggaggcggaggttgcagtgagcaaggatcgtgccactgcactctagcctgggtgacagaacaaggttccatctcaaaaaaaaaaaaaaaaaagatatcataca

SEQ ID NO: 267456 - DNA, 633 bp, Homo sapiens
gcaccaaggctcatgacaatggaaacaacctagggtcctgtggccatgctcagttccaggtgaatggtcaagctaatggattgttcctggaagctgttgtggtatttttttcaagggatcatctcagtctggtttaccagactcttgctggcacactaattttaggtgattttgcaacccatatggacaaagcctcctgcaaaaaataatttcccagagcctactcgcctgaggggcagtctttcttttgtaggtatgaagagcaatgagtaaaaacatctctctctcaaagagtttaggttccagtgtagagaatcatttaatattatacatttgtagtacattttagaagtcataaagagctacactgtatagcagtttatttgatctttacaagaaattaattatttcaacaagtattattgatggtcttctatgtcttggcactgaaaatgctgagcatttatagatttatgaaatagatactattcctgatgacataagacatacagtggtgaagatacaaagttaaactaattacataaatagttattgcttacaattttgaaaactgaagtaaggttgacataagaaacctyttactccaccttcctcccaattagtggacaacct

SEQ ID NO: 267457 - DNA, 519 bp, Homo sapiens
acaatctgattcttatcaatgactgcaaaatatttcataatatgaatatattacagtatcttcaagcattcttctattgatgggtatttctattgggtatagctttggtttttttgtttgtttgccttggtttggtttacactgttacaagtattgctatactaaacacagcatgaacttatatacttatgactgatagaattaattcatcaaaatyagaagctaaatcaaaggctgctgcttcctatgttatattccttacaggtatataatatatgcacattaaaatgaattctgacaaaatgtatttaggttttcagtcttcattgtcactcatatggaaagaggtatttattttaaaagagatatttaccccctctttttgtttgttactccattttggttttatcagatccaaatgagagaaaaatttaatctagatctaataaattgatgcttgttttatagaaaatatttccctttgtctcttctgactaaaaattctttattgcaaatata

SEQ ID NO: 267458 - DNA, 631 bp, Homo sapiens
ccctgcccttgtcctgctgattggtccattttacagagtgctgatgggtccattttgcaaacctctagctagctgcagaaatgttcttcaaagccccactcaagccgggaaatccagctggcttcacctctcagtatcactggaacagtactgttgaaaatcatccaaaacatctctctggccaaattgagtgacctcttttcaggtttaatcctcttttatttcattttggcaataacttttatgcttgacacctcatttttaaagcactcttactttccttacctttctttctttctctttttttttttttttttctttttttgagatggagtcttgccctctcacccaggctggagtgcaatggcatggtcttagctcactgcaacctctgcctcccgggttcaaacgattctcctgcttcagcctccygagtagctgggattacaggcacccgccatcctgcccagctaatttctgtatttttagtagagacggggtttcataatgttggccaggctggtctcgaactcctgacctcgtgatctacccgcctcggtctcccaaagttctgggattacaggcgtgagccacggcgcccggccttttccttgcctttatatactgctct

SEQ ID NO: 267459 - DNA, 621 bp, Homo sapiens
ttttaggtgatcctaatgtacagactgttgagaacaactaagctactgatttcagaagccaaagcaattgatgaatgagatggtcaaaatatgagaatattcttcagaataaagaggtaacctcatcccaaattgagacgtgaggtagcagcaggctaggaagtaatcagataaattgtggaggatactggtgtggtatttttttctaaattgcttaacatgtcattttaatcagagaaagatggtagattactgttcattgccaagcagagataggccaaataattctctggcttgattaatgagtttttttcttaaacaagtgaaatgagcatgtacttgtttaacaaagtccctttacatggcttggtctgaggttagtaggtttagatctcagctgaaggaggaaagtrctagttagattgcagctgttagacaccaatacactaatgagccaactatggcatctaatcaatgtgtgaaaaatgggtaatgctcactaatgccctgctaatgttctcataatgatctgtcaaagtgctagagctaattattgtcatggtaatttggcccaagttcactagggataatcctggcattggtgaataagaacatacattg

SEQ ID NO: 267460 - DNA, 585 bp, Homo sapiens
tgctattgctttgagctaaactttccatttttattaaaaaaaaaaacaaaaaaaaaaactttgagtctagaggattacaagcgcctgtgcttttgatttttaataaaaagcgagcatttacctctgaacagtagcagcaagaaagggaattaaacctgaggctagtgagctgacctttagagaggtgccgatccagagggatatgcrgaatttaacacacatcccttttctttctcatgtacacactctccagctagtgttctttttcatatatttatttaactgggaaaattggtgatatttaaaaaatttattattcattcatgtttgtgtttgatgtattagctaggtgactaaagcccctctaagtgttacataggctagtatgattagatttccgtatataatatgaatgctgatggtgctgatttaaggtacggaatagaaagagaaatcatgtaactatctgtatacaagatactactgaatggggaatctggggtgatgcctgacgtagtgaaactaatcactccaacacagctgacaaaacactgctttcaactgggaatatgtatacccaaattg

SEQ ID NO: 267461 - DNA, 363 bp, Homo sapiens
atgagatctatgaaggcaaggtcttttggagcttttgtaagatggcagactttagtgagaaaaccatgtcagtggacctggatctgcagctttgtggttacaaaaataaaaccttggcagtcagttcagagttaaaaaggtcaggggagcaatccacactagcaagattaaaaaagacaataaggaagaatgttatgttataaatttacatagagatattagtctgccaagcaaacaaaaacrtttgtactaagtatggttggcacaatgtctcccctagagaaaacactacaggagaagaaaaaatgaaattaaacttcacttggcaagcatgagattaaagtaaagccaaagaggaaaaat

SEQ ID NO: 267462 - DNA, 545 bp, Homo sapiens
gcaaggtcttttggagcttttgtaagatggcagactttagtgagaaaaccatgtcagtggacctggatctgcagctttgtggttacaaaaataaaaccttggcagtcagttcagagttaaaaaggtcaggggagcaatccacactagcaagattaaaaaagacaataaggaagaatgttatgttataaatttacatagagatattagtctgccaagcaaacaaaaacgtttgtactaagtatggttggcacaatgtctccyctagagaaaacactacaggagaagaaaaaatgaaattaaacttcacttggcaagcatgagattaaagtaaagccaaagaggaaaaatgatccatatagctagcagcaccaattgtagaagttgcatcaagaattttttaacctcatgtccatggactgttggacttttaagttatctgtggaacccaagttgttgtaagaaaaaaatatgtttttatgcacatattcattttcaggaatgagaaggcaacagtttcattagattctcaagagagctgataaaac

SEQ ID NO: 267463 - DNA, 363 bp, Homo sapiens
atgagatctatgaaggcaaggtcttttggagcttttgtaagatggcagactttagtgagaaaaccatgtcagtggacctggatctgcagctttgtggttacaaaaataaaaccttggcagtcagttcagagttaaaaaggtcaggggagcaatccacactagcaagattaaaaaagacaataaggaagaatgttatgttataaatttacatagagatattagtctgccaagcaaacaaaaacgtttgtactaagtatggttggcacaatgtctcccstagagaaaacactacaggagaagaaaaaatgaaattaaacttcacttggcaagcatgagattaaagtaaagccaaagaggaaaaat

SEQ ID NO: 267464 - DNA, 567 bp, Homo sapiens
aaataatggataaactttctcccattcctgaatgtccccttgcaatgtaactgtcttccgtcaagaggtagattctatatcttctctccttgaatataagcttagttatgtgatattctttggctaatgacacattagcaagctggatgcaaacagaggtttgcatcaagaggtttgcattgggctttaccctctttttctactgaaaatttttccaccattatgtaacaaagtctggcttaacctgttggatgctgggagtcatatggcccattatcatcatcagcctactracagctagaaccaactgccagatatatgagggagaccagcatagaatagctccaggtaatcttccactaaaggcacaaccacccagttgacacacagacttgtgaataataaaatggttagcatattaagccactgaattttaggaaggtgattcataaagccatatagaaataaatatgtcaatgactccaaattctccctaagtgagatagtcttctaagcttccaacttaaatatccaaccatagccctgaaatttccactatgacatgca

SEQ ID NO: 267465 - DNA, 615 bp, Homo sapiens
gtagcttacctcttaagttcatggactcaaccaatgctttctatattctactagcctttttataatctatctctgtgtgtgtgtgtgtgtgtgtgtgtgtgtgtgtgtgtgtatgagatgtgacatgacataaaattagcatgggatgacatacattaaatttaatgtaatgctttattttctatatttttagatttcataatcattggctaaaaatatatataaaatcactattaaaattattcctttaggattaaaattttaataactatttcaactgccatataatattttactctgtgtaagattctaaaagaaatgaaatgaaaagycagccttctgacttattaatcacttgagaatagtagcaggattttttgtagacttttcatagatttttagtaagttataatgattttataaaatgcatctcaaagtaagataaaatttaacgcaatattttcacattttcaataatatggagttttagcttatactctaaaacttgtaagtatattaaatcattctaagcttcattttagtaacacaaataaaccaattacaaagaatatagtttttttcctttgcttaagacatgaaaaatatgtcaattgc

SEQ ID NO: 267466 - DNA, 615 bp, Homo sapiens
gtagcttacctcttaagttcatggactcaaccaatgctttctatattctactagcctttttataatctatctctgtgtgtgtgtgtgtgtgtgtgtgtgtgtgtgtgtgtgtatgagatgtgacatgacataaaattagcatgggatgacatacattaaatttaatgtaatgctttattttctatatttttagatttcataatcattggctaaaaatatatataaaatcactattaaaattattcctttaggattaaaattttaataactatttcaactgccatataatattttactctgtgtaagattctaaaagaaatgaaatgaaaagccagccttctgacttattaatcacttgagaatagtagcaggattttttgtagacttttcatagatttttagtaagttataatgattttataaaatgcatctcaaagtaagataaaatttaaygcaatattttcacattttcaataatatggagttttagcttatactctaaaacttgtaagtatattaaatcattctaagcttcattttagtaacacaaataaaccaattacaaagaatatagtttttttcctttgcttaagacatgaaaaatatgtcaattgc

SEQ ID NO: 267467 - DNA, 644 bp, Homo sapiens
cctgtatgacaaaatgataaactatgtgttcattagaaacattatataatagttgacaagtgtacagacttttcaggtggatgaataagaattcatatgcggtctccaacagtyacaagttttgtaacttatttgatttctctaaacttcagtttcctaatctagaatatttggatagtaaattggtagcattaaatgctaaaatataaaatagtaacaatataaataacatctgatgtttattgaaaattacactaagcctttgatatcagtcagacatttttatcctcaaaggagaatatgatggtagtcctattactatccccactttacaaatatatgtaatgcatgtaaagcttttagcatattgcctattacattataaattctccgacaaataatggttattattatgtttacaacccttcaatttctgaactcatgaatattgtattattaagagtggtataaaagagcataaaatataaataatatactgtcaaaaccaagattcactgggccactaataagtatttctgttaattccttgcagtaagtatatttgagaaatattataactatttagttactagttcaaagtgccattttttcagttgctaagtaatagaaatatggcattaatt

SEQ ID NO: 267468 - DNA, 644 bp, Homo sapiens
cctgtatgacaaaatgataaactatgtgttcattagaaacattatataatagttgacaagtgtacagacttttcaggtggatgaataagaattcatatgcggtctccaacagttacaagttttgtaacttatttgatttctctaaacttcagtttcctaatctagaatatttggayagtaaattggtagcattaaatgctaaaatataaaatagtaacaatataaataacatctgatgtttattgaaaattacactaagcctttgatatcagtcagacatttttatcctcaaaggagaatatgatggtagtcctattactatccccactttacaaatatatgtaatgcatgtaaagcttttagcatattgcctattacattataaattctccgacaaataatggttattattatgtttacaacccttcaatttctgaactcatgaatattgtattattaagagtggtataaaagagcataaaatataaataatatactgtcaaaaccaagattcactgggccactaataagtatttctgttaattccttgcagtaagtatatttgagaaatattataactatttagttactagttcaaagtgccattttttcagttgctaagtaatagaaatatggcattaatt

SEQ ID NO: 267469 - DNA, 518 bp, Homo sapiens
ttgtacttaaacattgttctgagaaagaggaaagtaaagtcaaagccagtgagttgagaaagatacccagaacaactgggtagttacatcaatgagaaaatgtgttaaaccagagaagactgaactgcttttaatgaacaagatcagctatttacttaatcagtgagatgccccaaactcttacttcaccagtaagagtggccactcaaaaacaaaatgggatcaattawagaaattaatgaaactcactcttttgcacagtcagacttatgattgtttaatattttactgcttgtattaaagttgttattgctaacatattcctaatctgaagcccatcaagagaatttttgactcttttctgaagtcattcaacaagtttgttttgaattttatttagatttatttggaaaggtacacctgtttttgactgtttagaaaatattaattatcaccatcgatatgcttgcaatatttcctgcccaatagaaaagaacatgcatgacatacatatgtgg

SEQ ID NO: 267470 - DNA, 518 bp, Homo sapiens
ttgtacttaaacattgttctgagaaagaggaaagtaaagtcaaagccagtgagttgagaaagatacccagaacaactgggtagttacatcaatgagaaaatgtgttaaaccagagaagactgaactgcttttaatgaacaagatcagctatttacttaatcagtgagatgccccaaactcttacttcaccagtaagagtggccactcaaaaacaaaatgggatcaattaaagaaattaatgaaactcactcttttgcacagtcagacttatgattgtttaatattttactgcttgtattaaagttgttattgctaacatattcctaatctgaagcccatcaagagaatttttgactcttttctgaagtcattcaacaagtttgttttgaattttatttagatttatttggaaaggtacacctgtttttgactgtttagaaaatattaattatcaccatcratatgcttgcaatatttcctgcccaatagaaaagaacatgcatgacatacatatgtgg

SEQ ID NO: 267471 - DNA, 587 bp, Homo sapiens
ctcagtttctccaccaaggctcaaaattcccatgctacttaaaataagtctccttaagttccccattcactgcatttctaaccatctccattgtatcgttctctgtatgacagaacatgaagtttttactccttttatctgttctgaaatttatctgtaatttttcgaacactttctctcagagctacagtttttcatctatcacaggagtagtaaactttctttgtaaaggcccagatagtaaataatttaggctatatggatcatatggtctctgtcacaactcagctctgcccttgtagttcaaatgcagccawagatagcagaaaaacaagtgaccttggttgtgttccacaaaacattccttttataaagtaagcagagggccagaactggcatatgggccatagtttgctgacccctgatctgtcttattacttatcagtgggaagtatgtatatcttgctttgtcttttttgaagggagtacaattaagggttttcttggaagtgtttcattaatattatttttgtattatatcttattgatatatcatagttacacacattgcagatacatgtgctatt

SEQ ID NO: 267472 - DNA, 587 bp, Homo sapiens
ctcagtttctccaccaaggctcaaaattcccatgctacttaaaataagtctccttaagttccccattcactgcatttctaaccatctccattgtatcgttctctgtatgacagaacatgaagtttttactccttttatctgttctgaaatttatctgtaatttttcgaacactttctctcagagctacagtttttcatctatcacaggagtagtaaactttctttgtaaaggcccagatagtaaataatttaggctatatggatcatatggtctctgtcacaactcagctctgcccttgtagttcaaatgcagccaaagatagcagaaaaacaagtgascttggttgtgttccacaaaacattccttttataaagtaagcagagggccagaactggcatatgggccatagtttgctgacccctgatctgtcttattacttatcagtgggaagtatgtatatcttgctttgtcttttttgaagggagtacaattaagggttttcttggaagtgtttcattaatattatttttgtattatatcttattgatatatcatagttacacacattgcagatacatgtgctatt

SEQ ID NO: 267473 - DNA, 587 bp, Homo sapiens
ctcagtttctccaccaaggctcaaaattcccatgctacttaaaataagtctccttaagttccccattcactgcatttctaaccatctccattgtatcgttctctgtatgacagaacatgaagtttttactccttttatctgttctgaaatttatctgtaatttttcgaacactttctctcagagctacagtttttcatctatcacaggagtagtaaactttctttgtaaaggcccagatagtaaataatttaggctatatggatcatatggtctctgtcacaactcagctctgcccttgtagttcaaatgcagccaaagatagcagaaaaacaagtgaccttggttgtgttccacaaaacattycttttataaagtaagcagagggccagaactggcatatgggccatagtttgctgacccctgatctgtcttattacttatcagtgggaagtatgtatatcttgctttgtcttttttgaagggagtacaattaagggttttcttggaagtgtttcattaatattatttttgtattatatcttattgatatatcatagttacacacattgcagatacatgtgctatt

SEQ ID NO: 267474 - DNA, 529 bp, Homo sapiens
gaattctctgtatttctttatgacaaccaggaaaacttgcttataccatttgagcagtgaagttaaaaatcacagacataacttcaatatgarttttattactggttatctgctagagagcttggaacattctgaatggaattaaaatgcatttcattggtgtggaatcatgaacatttgttaaaattgttttgtaaaaaactccctaggttttcacagctgtagaaatgctccctcaaagaaataagtgcagaatgaataaaaacagatgtggcatttttgcatattatcaacaaaaatctctttttattttatcttgtcaatgtcttaccataacattatttatgccattattctgttcacaacaagtgcaaagaaattacatgacatttccagtacatatactggtcttcagtagggttttctggttacttatatttctctagagagtacctttgcacaggaagtaattttctatgttttctaactaaaacccaacctttctggctgtgcactctgagaaacagca

SEQ ID NO: 267475 - DNA, 587 bp, Homo sapiens
gagggtatgtaaaaaggactgcgttattaacaattagttgatattattaagtaattacctaaaatggacacctgccattaatttctgtacaataaagagctggcacatgctaaaactggtttccttattttcttatctaactgggtaaagttattaaaattacggtaataaaggcacctaaaatacacaagatttgttaaaatgctcttaaagtaaatatagtattgcttgcattttggaaactttaaaaaataatattcttgctattaattgctatattaaagctattatttctaaactgaattacttataaataaaaaagawttttttaaagactgatctcagttccaactagcaaattatttcagacattttgcatttatttaatttccaatgctgcaattaagaaagaacatcaacactttgacttttagttggtctgaagcaaagtcccttccacgtgagattaaaacttgtcttgttcatcaaatgggatcaaaagctccttaattagtaggctggactaaggtacacagatgccctttgacctcctatgacagattgctaacattttagcatttacaaca

SEQ ID NO: 267476 - DNA, 579 bp, Homo sapiens
gggagggccggaggccaggataaaggggagatgggagaaagtggggagagaagaaaagaaagtacttcacaccacaacaaactaagaatttctatgtcaaaagtaaaactgacattttaagagagtgtatgtgaattctgagctctgagtaaggaagcttgtcttacagaagactagttaaggtactgactacttatcaaagggatgatgaaattgaatattaaaactaggttcttattcattaaaatacacattaatgaaagtaaaagaaaaaactttaaatttgtagaagatatttgaaaaaaaagttattcaaaaaggactaaaatcaaagacgtgtaaaatttttttgcaaaccaacaaggtgaaaaggaatagataatggaaaccaaaaggataaataggcatttcacaaaaataagaaataaaatgaaaaagcgtgacaagtgttaaagagaatggattcaatagagcacatccattgtacattggtgcamcttctttgcgaaaaacattgatgttatctggtaaagttgcatattaatatgcattactctaaagtggccactacccttaagc

SEQ ID NO: 267477 - DNA, 559 bp, Homo sapiens
tgctggttagattcttcaacgtctttaaatcaagaatcttcaagccttgattaaaaaaaacgatgctctaaagattctttctctttctggaattaggaatctatgggaagccttctaaaaatttaaattttaattcgatttcaggtattctaaccacctgaatatttatgtgaggatcacaataaaattagatycccaaatttcttttaaaatttaaattaaaaatttaataaattcttatgactacataataagtgaaccatctgataaaatagtgtaacaataaataaaataagttaaataatttaaatttaaataaattctgaataaatacctctgataaaactaatcgttaataatatagtgtgcccagcggtggctggcaagatggctgagtaggaacagctcctgtctgcagctcccagcgaaatcaatgcagaaggtgggtgatttctgcatttccaactgaggcacccagctcctctcatttggactggttagacagtgggtgcagcccacagagggtgagccgaagcagggtagggcgttgcctcaccca

SEQ ID NO: 267478 - DNA, 559 bp, Homo sapiens
tgctggttagattcttcaacgtctttaaatcaagaatcttcaagccttgattaaaaaaaacgatgctctaaagattctttctctttctggaattaggaatctatgggaagccttctaaaaatttaaattttaattcgatttcaggtattctaaccacctgaatatttatgtgaggatcacaataaaattagatccccaaatttcttttaaaatttaaattaaaaatttaataaattcttatgactacataataagtgaaccatctgataaaatagtgtaacaataaataaaataagttaaataatttaaatttaaataaattctgaataaatacctctgataaaactaatcgttaataatatagtgtgcccagcggtggctggcaagatggctgagtaggaacagctcctgtctgcagctcccagcgaaatcaatgcagaaggtgggtgatttctgcatttccaactgaggcacccagctcctctcatttggactggttagacagtgggtgcagcccacrgagggtgagccgaagcagggtagggcgttgcctcaccca

SEQ ID NO: 267479 - DNA, 493 bp, Homo sapiens
aaagcattcttattatattattgatagaatgaatcctaacacatctatatattagaaattaagtatttaaatttcatatcaaattaactaaaytatatggcacggattttatttatactaacaaaacagcaattgaactctagtcaattccaaatacagatctatcggctatctatgaacatcaaaggggaagaaaattctatcattgatattggttaacgtcacaggcttatttccaaaagtagactgtccattgtctaattagtttagagggtctcttctgtctccagcacacaattgaattttgttgcagttggagaggctgatgctaacctaggtggcagggctgaacacaagggaacagaagcttcagtgttttcaccataaaacacgagataaattgaggatagggattttggaaataatagatttaactgttgtccaagcttatctgcagtttcttccctttaaactaaattgatagtttacttat

SEQ ID NO: 267480 - DNA, 493 bp, Homo sapiens
aaagcattcttattatattattgatagaatgaatcctaacacatctatatattagaaattaagtatttaaatttcatatcaaattaactaaattatatggcacggattttatttatactaacaaaacagcaattgaactctagtcaattccaaatacagatctatcggctatctatgaacatcaaaggggaagaaaattctatcattgatattggttaasgtcacaggcttatttccaaaagtagactgtccattgtctaattagtttagagggtctcttctgtctccagcacacaattgaattttgttgcagttggagaggctgatgctaacctaggtggcagggctgaacacaagggaacagaagcttcagtgttttcaccataaaacacgagataaattgaggatagggattttggaaataatagatttaactgttgtccaagcttatctgcagtttcttccctttaaactaaattgatagtttacttat

SEQ ID NO: 267481 - DNA, 493 bp, Homo sapiens
aaagcattcttattatattattgatagaatgaatcctaacacatctatatattagaaattaagtatttaaatttcatatcaaattaactaaattatatggcacggattttatttatactaacaaaacagcaattgaactctagtcaattccaaatacagatctatcggctatctatgaacatcaaaggggaagaaaattctatcattgatattggttaacgtcacaggcttatttccaaaartagactgtccattgtctaattagtttagagggtctcttctgtctccagcacacaattgaattttgttgcagttggagaggctgatgctaacctaggtggcagggctgaacacaagggaacagaagcttcagtgttttcaccataaaacacgagataaattgaggatagggattttggaaataatagatttaactgttgtccaagcttatctgcagtttcttccctttaaactaaattgatagtttacttat

SEQ ID NO: 267482 - DNA, 493 bp, Homo sapiens
aaagcattcttattatattattgatagaatgaatcctaacacatctatatattagaaattaagtatttaaatttcatatcaaattaactaaattatatggcacggattttatttatactaacaaaacagcaattgaactctagtcaattccaaatacagatctatcggctatctatgaacatcaaaggggaagaaaattctatcattgatattggttaacgtcacaggcttatttccaaaagtagactgtccattgtctaattagtttagagggtctcttctgtctscagcacacaattgaattttgttgcagttggagaggctgatgctaacctaggtggcagggctgaacacaagggaacagaagcttcagtgttttcaccataaaacacgagataaattgaggatagggattttggaaataatagatttaactgttgtccaagcttatctgcagtttcttccctttaaactaaattgatagtttacttat

SEQ ID NO: 267483 - DNA, 574 bp, Homo sapiens
gacaatatagtgtagatgttttcccctctgaacatcatgttgaattgtggtacccagtgttggaggtggggcctcgtgggaggaaattagatcatgggggcagatttcttatgagtgcttcagcaccgtctccttggtgttgccacaatgggtgagttctcatgagatctggcttcctaaagtgtgtggcatctccccccacctcttgctcctgctattgccatgtgaggcacctgttgcccctttgctttccgccatgattgtaagcttcctcaggcttcaacagaagcttaagctggtgctatgcttgctgtacagtctgcagaaccttgagccaattaaatctcttttcttagaaattacccagcctcaggtgtttctttacagcaagcaagaatggcctaacacaccccagatagcactgctgagtatctatttaagattgtatgtgcgrtctttagaaatataacacatcaagaattagacaataaaagttacatgtatcataaagaaaaagaaaggctatcattatttatacatgatataatgttatatacagcaaattcaaagaaat

SEQ ID NO: 267484 - DNA, 610 bp, Homo sapiens
catttaatatattcttatttatggattatgttccatttttgagttagattcttaactgttataatacatggggaatatccatgctttattgtatctgagagttttaagtatagaaatatttttcacttaaaaaggtatgtaatttatatctatttctgcttaatttgtgaaaacaatcttttaaagcaaacaataattgtcctagtgaagcaaatttgccaccttacacattctccttaatagcatttkttgatttgttgaagatgcttaccttgctcaaatctgtttaaatctcattaaaatatattcacaaacaagtgctccatttttaaaattgctctgctaaggatacattaatacagtcaacttaattaacacaaagtattatacaatcataatgatacaaatttaaaaggaaaatggaataggtaaaaagtcatcaaattttaaaaacttgagtgatctgtagaaagtcaagaccagagattcagagaataaaataacctgtctaaatgttaatgctgaacaggagtagaactaaagtgttctgaattaaaatgcaggcatccttttcgattttatgattaatcatcagaattaaagtcaattg

SEQ ID NO: 267485 - DNA, 561 bp, Homo sapiens
tagggatcttcttaaggacagtgtcccaaagtagcatctcaagttaaagaaatatcatcaggaggaggtatatggttatggcttttgtctgattgagcaacttataatttaatacataagaaacatacaaagtttttaaaggaatgcttatagtttggctaaaagtgatagaaacagtacaaaatgaaaagaggttgttgaacctccaacctactgtgagaaggcagcaggtggagaaacttgcttaatgaaaaacacaaatatgtgtctctggaaaagaggtaatgactcaaacagaagaatcaagagctcagagaatcatctccaggaagctgaactgagttaaaaacaagaaactggcaatacgtgttctgctggatttcataattgctatgaacaaatgastgctgtgtattttgtgtttccttacttttcgaatgggagtgtctattgccattatcctatgtcattttatgttggatgtatatatggggtgcagataatttgtttctttagttaataggtttttatttcaagatgaactatattcaaggagctgta

SEQ ID NO: 267486 - DNA, 561 bp, Homo sapiens
tagggatcttcttaaggacagtgtcccaaagtagcatctcaagttaaagaaatatcatcaggaggaggtatatggttatggcttttgtctgattgagcaacttataatttaatacataagaaacatacaaagtttttaaaggaatgcttatagtttggctaaaagtgatagaaacagtacaaaatgaaaagaggttgttgaacctccaacctactgtgagaaggcagcaggtggagaaacttgcttaatgaaaaacacaaatatgtgtctctggaaaagaggtaatgactcaaacagaagaatcaagagctcagagaatcatctccaggaagctgaactgagttaaaaacaagaaactggcaatacgtgttctgctggatttcataattgctatgaacaaatgactgctgtgtattttgtgtttccttacttttcgaatgggagtgtctattgccrttatcctatgtcattttatgttggatgtatatatggggtgcagataatttgtttctttagttaataggtttttatttcaagatgaactatattcaaggagctgta

SEQ ID NO: 267487 - DNA, 618 bp, Homo sapiens
gctaaagaaaaaatattgaactctgagcttctatttctttgacgtgtttttcagttatgtaaagaccaataagtcctgtctttaaaaagctttctctagaattctctaaggcacaatcttatagtcatttcctaagaagggcttacgagataaccctagggagaacttcgggggttatagagtaagtagggaattaatgtttaaaaattatatcataaattgttgaaaaaatatatttttaattcaccagagattaccttgaagacaattctctgtcttgaaagattccctttcaagatgcaaattaacacaattatcttagttgaaaacatatttaggaggtatgcaatcaaaatattaaatcagttaaataaagccgacatgtgcaatcacatttggtaagtaaataatttttaattagaaactttaaaaaatatatttagcatacttttaagrgtggagcatattttccgcacagtcagtactgctcctcaatttgtgtttaactttatttttctaatccagaaaccaatgagctggtaagtgtgtagaaaactaaaatacaaaagcacggatagttttagaattatcaaagagatttaatgttaattctgcatt

SEQ ID NO: 267488 - DNA, 581 bp, Homo sapiens
tttttttggttccagtacttttaataatttaatattgccacttcattaattaaaacaaaggtcaaactcttaaaatttgagctaaggctagactatctgtaatgagttttgtggtagaaacatgtgtacctcttgcaaatgaaccactggaaaatcactaagagtgaaataaaaaatcaaagcaatttacttacatctaatagcatttaaatatctaattactgaatttaggttaaaaacaaaatgctgcattttggaaagaagggtggtgatctgctttttctagggwaagaggccagagagtggtcacaactatagcaacttgtccccaagtggacagcataccaaaataaatgtccagggggtcagaaatgcttacgaagagagagggcaggaattctcagtctcagccatggcccagaggaaaaacaacacccatagtgttggcaagtcaatcaaagtcttgttaaatatgactttgatgaagttagtatttgcctgtatttatttaataatgctatttggtcaaagagctaaacattcaatactattaaaaataaatagacaataatctttggtat

SEQ ID NO: 267489 - DNA, 649 bp, Homo sapiens
gctcactacaacctccgccttccgggtcctggttcaagcaaktctcctgcctcaggcttccgagtagctgggattacaggcacacaccaccatgcccagctaatttttgtatttttagtagagacagggttttgccatgttggccaggctggtcttgaactcctgacctcgtgatctgcccaccttggcctctcaaagtgctgggattacaggcatgaaccaccgtgcctggcccccaaaatacattttcatgtgcatccactataaagtggaaagggcgcagagtgaagaggagatcagactcttcagatatatcttccatgtgactaccagaactaaaggcacctaaaagtgatcatgaatgtcttagctcagagtgctgtattaaatttccataggttgagtggcttaaacaacaaacatttattactcacagttctggaggcttggaagtccaagatcatgatgtctgcacatttggttctggtgaggaccctttttctaattcacagatgtacatcttctccttgtatcctcacaaggtagaaaaaaagagaaagagagagcaagttatctcctctcttcttatggcaccactaatcccatcatgagggctccatcctcaagacctaattatctcctaaaggcc

SEQ ID NO: 267490 - DNA, 649 bp, Homo sapiens
gctcactacaacctccgccttccgggtcctggttcaagcaattctcctgcctcaggcttccgagtagctgggattacaggcacacaccaccatgcccagctaatttttgtatttttagtagagacagggttttgccatgttggccaggctggtcttgaactcctgacctcgtgatytgcccaccttggcctctcaaagtgctgggattacaggcatgaaccaccgtgcctggcccccaaaatacattttcatgtgcatccactataaagtggaaagggcgcagagtgaagaggagatcagactcttcagatatatcttccatgtgactaccagaactaaaggcacctaaaagtgatcatgaatgtcttagctcagagtgctgtattaaatttccataggttgagtggcttaaacaacaaacatttattactcacagttctggaggcttggaagtccaagatcatgatgtctgcacatttggttctggtgaggaccctttttctaattcacagatgtacatcttctccttgtatcctcacaaggtagaaaaaaagagaaagagagagcaagttatctcctctcttcttatggcaccactaatcccatcatgagggctccatcctcaagacctaattatctcctaaaggcc

SEQ ID NO: 267491 - DNA, 649 bp, Homo sapiens
gctcactacaacctccgccttccgggtcctggttcaagcaattctcctgcctcaggcttccgagtagctgggattacaggcacacaccaccatgcccagctaatttttgtatttttagtagagacagggttttgccatgttggccaggctggtcttgaactcctgacctcgtgatctgcccaccttggcctctcaaagtgctgggattacaggcatgaaccaccgtgcctggcccccaaaatacattttcatgtgcatccactataaagtggaaagggcgcagagtgaagaggagatcagactcttcagatatatcttccatgtgactaccagaactaaagrcacctaaaagtgatcatgaatgtcttagctcagagtgctgtattaaatttccataggttgagtggcttaaacaacaaacatttattactcacagttctggaggcttggaagtccaagatcatgatgtctgcacatttggttctggtgaggaccctttttctaattcacagatgtacatcttctccttgtatcctcacaaggtagaaaaaaagagaaagagagagcaagttatctcctctcttcttatggcaccactaatcccatcatgagggctccatcctcaagacctaattatctcctaaaggcc

SEQ ID NO: 267492 - DNA, 545 bp, Homo sapiens
tagaatataagggatggttattattaatataaaaaagcttycagagagtgatagacctaactcttttatatagggtggtcagagaaggctttttgctaaatggtatttgagcacagacttaaaaaaaaaagatgaagaaaatgggacaggtggaaatctggaggaagaatattttgaacagggaggaaaatagtcacgaagcatcaaggacagatccacattaggtgtactcaaggaaagaccaatgtagcaagagctgagtgattgaaacaaataaataaacaaacaaaactgggcagggagaatgaggacagaaaaagagcagaggttcaggccacacatgaccccagagatagtgatgatgatttggttttactgaatggtaggatttggctagatgaacagtgaccaatcctggtttttgcatggaagacgtagagagtaaggatttaaatggtgaaaccagttaggaacctattgcccaagaccaggtagggagtaatactggttgaactaaggtgatggtgttgaaagtgatgaaatat

SEQ ID NO: 267493 - DNA, 545 bp, Homo sapiens
tagaatataagggatggttattattaatataaaaaagcttccagagagtgatagaccyaactcttttatatagggtggtcagagaaggctttttgctaaatggtatttgagcacagacttaaaaaaaaaagatgaagaaaatgggacaggtggaaatctggaggaagaatattttgaacagggaggaaaatagtcacgaagcatcaaggacagatccacattaggtgtactcaaggaaagaccaatgtagcaagagctgagtgattgaaacaaataaataaacaaacaaaactgggcagggagaatgaggacagaaaaagagcagaggttcaggccacacatgaccccagagatagtgatgatgatttggttttactgaatggtaggatttggctagatgaacagtgaccaatcctggtttttgcatggaagacgtagagagtaaggatttaaatggtgaaaccagttaggaacctattgcccaagaccaggtagggagtaatactggttgaactaaggtgatggtgttgaaagtgatgaaatat

SEQ ID NO: 267494 - DNA, 545 bp, Homo sapiens
tagaatataagggatggttattattaatataaaaaagcttccagagagtgatagacctaactcttttatatagggtggtcagagaaggctttttgctaaatggtatttgagcacagacttaaaaaaaaaagatgaagaaaatgggacaggtggaaatctggaggaagaatattttgaacagggaggaaaatagtcacgaagcatcaaggmcagatccacattaggtgtactcaaggaaagaccaatgtagcaagagctgagtgattgaaacaaataaataaacaaacaaaactgggcagggagaatgaggacagaaaaagagcagaggttcaggccacacatgaccccagagatagtgatgatgatttggttttactgaatggtaggatttggctagatgaacagtgaccaatcctggtttttgcatggaagacgtagagagtaaggatttaaatggtgaaaccagttaggaacctattgcccaagaccaggtagggagtaatactggttgaactaaggtgatggtgttgaaagtgatgaaatat

SEQ ID NO: 267495 - DNA, 590 bp, Homo sapiens
tcagagaaggctttttgctaaatggtatttgagcacagacttaaaaaaaaaagatgaagaaaatgggacaggtggaaatctggaggaagaatattttgaacagggaggaaaatagtcacgaagcatcaaggacagatccacattaggtgtactcaaggaaagaccaatgtagcaagagctgagtgattgaaacaaataaataaacaaacaaaactgggcagggagaatgaggacagaaaaagagcagaggttcaggccacacatgaccccagagatagtgatgatgatttggttttactgaatggtaggatttggctagatgaacagtgaccaatcctggtttttgcatggaagacgtagagagtaaggatttaaatggtgaaaccagttaggaacctattgcccaagaccaggtagggagtaatactggttgaactaaggtgatggtgttgaaagtgatgaaatatggctgcattctggatatattttgaagttgacattaaygagttttactggttgatttaaatgacatgtagaagacaactaaatgataaagatttgggcctgagcaactacaagaatagagttac

SEQ ID NO: 267496 - DNA, 534 bp, Homo sapiens
taattggggaataatgtatgtaaagaacttaaccgcataccagtgaggtggaaagtactcaaaaagaatgtttgctgttmgtattctttgtattgttgttatttcttattactactactattattattatcatgctcattatattgtgaaaaatctattcactattctaccttccaccttgttaatgaaccagtctcatgcatgacaaccataggattaagtactaaaatgttttaattgggaaactttttagctaactgctaaaacaaacaaaaaacctatgagagaaatagaactttaagacttcactatcaaataaaataatataaaggtattttcttctcaagacagttttgggtatttgaaattaataaagcctggaatgattttgtgtcctctgctgcggtatgtgagtaattgtggaaaaattacatgatcttctgccaaaataaaatgtacatgggtttaagtctttctgattctaaagaaataatcaaaaagtacacatgtatttataagtgtctctgtttcttt

SEQ ID NO: 267497 - DNA, 554 bp, Homo sapiens
ttatttgttcgggtaactagaaattcaaaatattttccagtacttattaatgcgttgtcatcattacattggacccacaaagttaaattgtgaagtaaaggaacaatatttgaagaaatatagcattggaaatggaaggcttaaaatttttaagtcagtaatgatttagtatgacattttacatatgctgaaaaatatgtgcacattctcaaaaagctaarcaaactaatttctatattatattttatgtaacattagtttttcaaattcaatcacatgtaaatattttcccaaaagagtattttcttcacttgtctgtggtttaaataatttcaaggaaaaaaatgaacattctactggaattccatgtgattaattatatactatcaaggtcaattcagtgtgcactcattcatttaaatcaggttttttaaaacctcactgcaatggacagtctgagccggattcttcgttgttgtggggggctatacagtattgcacattacaagatgtttggcaatatccctggtctgtactcataagataccagtagc

SEQ ID NO: 267498 - DNA, 591 bp, Homo sapiens
atatttcagcatcgatttctggttgctttctttcatctctgcaactgcatagttagtccagttgggtcaccaggtcttgcctactattaagtgttatgcctataattgaaaagtcattaaagcaagttacttaaatgatttgccaaggatatgtatccaatcattagtccaatgacagataatcttttattggaaacagttcatgggttggcattatccactgtatacagaacagaattgggaatttatttagtaatttgtttagtaaacctagataaatatttgaaaacttatattgagctttcctctgttttgtggtcattttggtagctctatcaaaagctgtgggtattattyttctcattcactggtgaaaaaaggagaaaaatagaataaacatccaaatttctggcataatagcaattctgcaattattatactgaagaacacaccaagaacattagagttagaatggatttcaactgaaaatattctccagatccttatgcatacttgactctatataaatcatttttggaaggttcaaaagaagtgtaggataagattatcctgaagagctataatttttgt

SEQ ID NO: 267499 - DNA, 621 bp, Homo sapiens
attaccaaggaaataaaatatattaggcaattaaaattataagtgaaagtctttccttgacaaagtcagtctgtaaactattctgcaaatgggcagacaccattgcaagaataaaaggatcacaaagaataagggttacatgacactactaaaggaaactaataaaattcccataaccaactctaacgaaatgaaagtctacaaagtacctgtcaaagaattcaaactaattatctttaataaactcagtgaactaaaagagaacacagatagacaactaaacaactgactataaacagaaagttcagcaaataaacataaaccataaaatatagaaatcctacagctgaagaagacaataagtcaactaaaactttcaacagacagcctctatagtagactcagtcaatagtagattcaatcagaacaaagaacagtagattcaattaatcaggtgaatgaatgaacttgaaaacaggtcatytgaaattctccgatcataaaagcaaaaagaacaagaataaatagactgaataaagcttacaagacttttgagataccaccgtgtgaaacaatatatgcattatataagtttcaaaatgagaagagataagaaaaggg

SEQ ID NO: 267500 - DNA, 495 bp, Homo sapiens
caacagcatattaaaacaattttgtaccatgaccaagtgatatttatctctgggatgcaaggacaatttaacacatgcaaatcaattaatgggatacatgacmttagcaaacaaaagaaggagaataaccacaaaacaatctcaaaagatgttggaaaagcatttgataaaattcaacactctctcatgctaaaccactcaacaaattagttatatattagatatagaaggaagctgtctcaacacaataatggtcacatatgaatatcctacaactaaaatcatactcaacagagaaatgctgaaagcttttcctctaagatgtgaaagaaggcaaggatgctcattctcaccacttctattcagcatagtcctggaagtgccagcaagagcaattaagaaaggaaaaaaacaacaacaaggcatccaaattagataagaagaaataaaataatatctgtttgctggtggcattatataagaaaactgtaaaaa

SEQ ID NO: 267501 - DNA, 441 bp, Homo sapiens
tgcttggcaacttctaagaccctaacttgtgaaactagggaagtaagaaaccgttcaaatttaacatctgtcttcagtcatctttaaatcgtctctctttataaacactctgctcacttagcagaaggactgaaggaactaaggaacttgctaaagagaagaagaaaacaaaagctagacttagttccagttaattctgttattcttctgaaataaaaatgaaataaaaggaaggcagaattctctttttttttttttttagacaggatcttgctctgtgatggtgcaatctcaactcactgcaacctccatgtcccagatgcaggtgatcctcccgcctcagcytcccgagtagctgggactacaggcacgcacaaccatgcctagctaatttttctgtttttagtagagacagtgtttctccatgttgcccaggctggt

SEQ ID NO: 267502 - DNA, 557 bp, Homo sapiens
  misc_feature (1)...(557): n = A,T,C or G
nnnnnnnnnnnnnnnnnnnnnnnnnnnnnnnnnnnnnnnnnnnaacttttttttaacctagctaaaaaatgaaagcatagaattgatttcagtagctttgatgaaataatcaaaacacatcaagctattttaactctaaacgtgcttgctggacatagtacattgtaaggcttgggactccaaaggggataccagaayatcaacccaaacatcacagaactcttcgcattccctactttataaattcttctgatttataaagacagcttctgcaaccttgaacaaaatggcaaggataacttggagaaactgtcagtttaccttaatgttagaaaatgatacttcttttaaagcactatttaatttaggcttcatctaattctaattggctttctcatttacccagaaggatcatagaatcaaagaaatgatctaattcagccacctcattttacaaatcagtagagaaccttttaggttaaatgacacagccaggttttagcagatcacttggctcctagaccagcattcaatccctaaatgatcaatgtgttagc

SEQ ID NO: 267503 - DNA, 557 bp, Homo sapiens
  misc_feature (1)...(557): n = A,T,C or G
nnnnnnnnnnnnnnnnnnnnnnnnnnnnnnnnnnnnnnnnnnnaacttttttttaacctagctaaaaaatgaaagcatagaattgatttcagtagctttgatgaaataatcaaaacacatcaagctattttaactctaaacgtgcttgctggacatagtacattgtaaggcttgggactccaaaggggataccagaatatcaacccaaacatcacagaactcttcgcattccctactttataaattcttctgatttataaagrcagcttctgcaaccttgaacaaaatggcaaggataacttggagaaactgtcagtttaccttaatgttagaaaatgatacttcttttaaagcactatttaatttaggcttcatctaattctaattggctttctcatttacccagaaggatcatagaatcaaagaaatgatctaattcagccacctcattttacaaatcagtagagaaccttttaggttaaatgacacagccaggttttagcagatcacttggctcctagaccagcattcaatccctaaatgatcaatgtgttagc

SEQ ID NO: 267504 - DNA, 551 bp, Homo sapiens
taacttggagaaactgtcagtttaccttaatgttagaaaatgatacttcttttaaagcactatttaatttaggcttcatctaattctaattggctttctcatttacccagaasgatcatagaatcaaagaaatgatctaattcagccacctcattttacaaatcagtagagaaccttttaggttaaatgacacagccaggttttagcagatcacttggctcctagaccagcattcaatccctaaatgatcaatgtgttagccataagtaattcttttaagtaatttttttcatttcttttagagttttgaaaattacatgagaaatacatgagtgtataactattataaaatagtacaggaatagaaagtaaagtctacctccatacaaacatgctgtttaatccattctctccagagggtatcatcattcattctttcagaagaaacttgtgtatgcatttacatatctatgtataaaaactcggggggcatttaaaatcgagtcacctagggatctctttcttggaccatattggtataaactttatgg

SEQ ID NO: 267505 - DNA, 551 bp, Homo sapiens
taacttggagaaactgtcagtttaccttaatgttagaaaatgatacttcttttaaagcactatttaatttaggcttcatctaattctaattggctttctcatttacccagaaggatcatagaatcaaagaaatgatctaattcagccacctcattttacaaatcagtagagaaccttttaggttaaatgacacagccaggttttagcagatcacttggctcctagaccagcattcaatccctaaatgatcaatgtgttagccataagtaattcttttaagtaatttttttcatttcttttagagttttgaaaattacatgagaaatacatgagtgtataactattataaaatagtacaggaatagaaagtaaagtctacctccatacaaacatgctgtttaatccattctctccagagggtatcatcattcattctttcagaagaaacttgtgtatrcatttacatatctatgtataaaaactcggggggcatttaaaatcgagtcacctagggatctctttcttggaccatattggtataaactttatgg

SEQ ID NO: 267506 - DNA, 534 bp, Homo sapiens
tcaaacattgtagtccatggaccgtggtaagagatatattttaccctacaactcagtataatatgcacacatccataaagaagttttatgaacttacccttactaaatatgttaacactctgatattttattccattctattctgatttatttatttacaaaagctgattaccaaaccactgagttatgccatagcctgccacaccctgagttcagatgaccsaggagaccctttcagtcacagaagcatgtttccatgaatcttacatgaacagctcacagagaggaaaccaccataccaaacgcctccagttatattcttcgcatttagttcttctcccaaatgtgtccatttctctccacctctgcctggtttcagcccccctctagtcccctgaatgctgcattgtcctcctggtggtctgcctgcagcctgtctagtatcctaatccattctccacatggcagccagagtggtgagcgtttcaaaatgcacctccgagctggtcgctggactgcttcaaacctgtcaat

SEQ ID NO: 267507 - DNA, 596 bp, Homo sapiens
gatgctgcattttatttagcaggcctggcagttgagataaactttcaggagtagtatcaactcgtatcccagcttgtgtttctgtatagcctggaaatgctcagttaatgattacagtaggctgtgtttgcaacccctctctgaggctaggcagatcactgcacagtctggccacttgattgtgtagaactgctccgttactatggctaaaaaatgaggtgactgcatcagggttgatttattcatgttgcaaataaagacaaatgcccttttgrggcaacaagatggaaaactcagacagatctcttcggtagggaaagctgtcttcatagcgctctgaaatctctcatgccttgtcaacttctcctgccactttccttcctcatgcacacttgctgcataccacccccacttcgtgcctcctactttatttctaaaaacatcccctcatctaattattaatcctaaagtgtcggtgtttcaacagcttcactccgagaagacagtgccgagaatagtaccaatcgaaactaacagaggacacagtgccacattgactctatgctttctttgaagagagtggcatttccttatag

SEQ ID NO: 267508 - DNA, 559 bp, Homo sapiens
ttatatagacttctatagacttatgcaaattttcttctatacacaactagaacttgttggtttaattccattcaaaaactgaagtttcagaagaagtagatattaatgtaaagaaattccaagattcatgtcatttaccactgaactcatctctccaaggtatgcatcatcctrcaatataaaagttaatgagattaactcccatgtggctggttgatgtagtgacaaacttattttctgccacaatagattctaatctctatttttagatttctgtaggtgctacagaaggtttatataatataatgttacagaaaaatgaaagttcagttaagaagttgcctcccccatgtttcttttatttattgttttgttttgagtctcttgcttgtaagcatgtgtaattggtgctgtatgaagtggtgagtttaccaatggtggaagccagatgctataaccatcaataaatggctatagcatttaaatggaggttggcctctgtgtcttctgagaacctttccattttcaagattctttgagtctttatcagtgaccctca

SEQ ID NO: 267509 - DNA, 602 bp, Homo sapiens
aattccaagattcatgtcatttaccactgaactcatctctccaaggtatgcatcatcctacaatataaaagttaatgagattaactcccatgtggctggttgatgtagtgacaaacttattttctgccacaatagattctaatctctatttttagatttctgtaggtgctacagaaggtttatataatataatgttacagaaaaatgaaagttcagttaagaagttgcctcccccatgtttcttttatttattgttttgttttgagtctcttgcttgtaagcatgtgtaattggtgctgtatgaagtggtgagtttaccaatggtggaagccagatgctataaccatcaataaatggctatagcatttaaatggaggttggcctctgtgtcttctgagaacstttccattttcaagattctttgagtctttatcagtgaccctcaacctcttttttgccccaactcacttgacaaatagtatgtacagatcaggtcccctctgtaattccaatttcttctctctgacctaaaaaacacattgaaatatatgtgatctaatttgtgaagttaattaattaataattcttaatttcttacttaa

SEQ ID NO: 267510 - DNA, 583 bp, Homo sapiens
cccttggtaaagcaagaaaacagaaatctgttttttcagacatatacatgaaaatggaaaaattcatgaaaagggaagaaagtatatagttttattaaaattcttttggtgttccacaattgacaaaattagccaatactagattagcctttggatgtattaattatgtcactgtatgtgttaatctaataatctaatctgatcacatagaagcatttatttaagtagcatgtgttatttgcaaatccctgcacttgggatggggtggcagagcttcatgtacacaaagatgactaagagtttttccttacccacaaagaaacctttagtytagtgggagagctaatacaaagaaccaaatgaagggaaaggaggaaaaactgaatgtgggctgagtatcaaaatagaaatattttggttctaaaaagatgaaatgttaaaattccatcccacactatatactaagaacagtagagaaaaaaaaaaaaaaaaaagccctgacagtaccaagtgttggtaaggatatgaagcaactggaacgctactatgttactagtgagaatacaaaatatagtagagacac

SEQ ID NO: 267511 - DNA, 561 bp, Homo sapiens
gaaattgctattaaaaattgttagatcctttgacctggagctctataaacaaaaatgtcatttcaatttgaaagaaggaacaagaaaagagaaacaagcttcactgaaggtttgcaaccttaacaaattgaaaataatactcactgggtttttaaaaatatgatgttgttcatagaaatagcattattgtatcattatacatgtattattttgtataactgcctcaatttatcacacartagtagttccattaaaatccctgcttcatattgaaagtagcaaaaacactattggcgaaaacattgttataatttctagtcttattgcagtaagaatgctgtaaccacacaaattataaataggtgataagaaccataatgaaaaaaatgagaacatatttgattcattcctaggccagataacattaaataaaaacagttaaatgtgtaaaatatgaaatatgaattaatgtttataaacatctgcagacaactctttttataaaccttcttattgctgttaataaatataagaaagttatattaggaacattagctaagc

SEQ ID NO: 267512 - DNA, 561 bp, Homo sapiens
gaaattgctattaaaaattgttagatcctttgacctggagctctataaacaaaaatgtcatttcaatttgaaagaaggaacaagaaaagagaaacaagcttcactgaaggtttgcaaccttaacaaattgaaaataatactcactgggtttttaaaaatatgatgttgttcatagaaatagcattattgtatcattatacatgtattattttgtataactgcctcaatttatcacacagtagtakttccattaaaatccctgcttcatattgaaagtagcaaaaacactattggcgaaaacattgttataatttctagtcttattgcagtaagaatgctgtaaccacacaaattataaataggtgataagaaccataatgaaaaaaatgagaacatatttgattcattcctaggccagataacattaaataaaaacagttaaatgtgtaaaatatgaaatatgaattaatgtttataaacatctgcagacaactctttttataaaccttcttattgctgttaataaatataagaaagttatattaggaacattagctaagc

SEQ ID NO: 267513 - DNA, 561 bp, Homo sapiens
gaaattgctattaaaaattgttagatcctttgacctggagctctataaacaaaaatgtcatttcaatttgaaagaaggaacaagaaaagagaaacaagcttcactgaaggtttgcaaccttaacaaattgaaaataatactcactgggtttttaaaaatatgatgttgttcatagaaatagcattattgtatcattatacatgtattattttgtataactgcctcaatttatcacacagtagtagttccattaaaatccctgcttcatattgaaagtagcaaaaacactattggcgaaaacattgttataatttctagtcttattgcagtaagaatgctgtaaccacacaaattataaataggtgataagaaccataatgaaaaaaatgagaacawatttgattcattcctaggccagataacattaaataaaaacagttaaatgtgtaaaatatgaaatatgaattaatgtttataaacatctgcagacaactctttttataaaccttcttattgctgttaataaatataagaaagttatattaggaacattagctaagc

SEQ ID NO: 267514 - DNA, 615 bp, Homo sapiens
gggtagtgtggaaaggaagaatgaacaacggccctgggaagccttcccttcctgcagatattgttgggggagtgctggtctccattttgcgtttagaaaaccagacttagatgctggaggggcaccggttgtcttctttgaactcattccccgtaatgagctagaaaagagwacctaaccataggtattctctctagagactcatgtgtcccgtgggtacagtcaattcacagtatctgttctggcttttttcactttaattctgttctgcacattctgaacatatgcaggaaaaaaaatcattcctgaacttagcacaagctacactcgacacaacctaaattagtaaaaagcctttgatttattttgaagcaatttaactgtagacaaagcttgcatatatggaacagtattctcagagcctgagagttgttacagttgttctatttggaaattagaaggaattttttaataaggcacatttttcagtttcttacccattggtgtctattaagaatactatgtaatgttgaaatttccatcaaattaccaagcaaattactattaatgattagagatttagcctaacactctctctttgggccttaaataccc

SEQ ID NO: 267515 - DNA, 615 bp, Homo sapiens
gggtagtgtggaaaggaagaatgaacaacggccctgggaagccttcccttcctgcagatattgttgggggagtgctggtctccattttgcgtttagaaaaccagacttagatgctggaggggcaccggttgtcttctttgaactcattccccgtaatgagctagaaaagagtamctaaccataggtattctctctagagactcatgtgtcccgtgggtacagtcaattcacagtatctgttctggcttttttcactttaattctgttctgcacattctgaacatatgcaggaaaaaaaatcattcctgaacttagcacaagctacactcgacacaacctaaattagtaaaaagcctttgatttattttgaagcaatttaactgtagacaaagcttgcatatatggaacagtattctcagagcctgagagttgttacagttgttctatttggaaattagaaggaattttttaataaggcacatttttcagtttcttacccattggtgtctattaagaatactatgtaatgttgaaatttccatcaaattaccaagcaaattactattaatgattagagatttagcctaacactctctctttgggccttaaataccc

SEQ ID NO: 267516 - DNA, 615 bp, Homo sapiens
gggtagtgtggaaaggaagaatgaacaacggccctgggaagccttcccttcctgcagatattgttgggggagtgctggtctccattttgcgtttagaaaaccagacttagatgctggaggggcaccggttgtcttctttgaactcattccccgtaatgagctagaaaagagtacctaaccataggtattctctctagagactcatgtgtcccgtgggtacagtcaattcacagtatctgttctggcttttttcrctttaattctgttctgcacattctgaacatatgcaggaaaaaaaatcattcctgaacttagcacaagctacactcgacacaacctaaattagtaaaaagcctttgatttattttgaagcaatttaactgtagacaaagcttgcatatatggaacagtattctcagagcctgagagttgttacagttgttctatttggaaattagaaggaattttttaataaggcacatttttcagtttcttacccattggtgtctattaagaatactatgtaatgttgaaatttccatcaaattaccaagcaaattactattaatgattagagatttagcctaacactctctctttgggccttaaataccc

SEQ ID NO: 267517 - DNA, 615 bp, Homo sapiens
gggtagtgtggaaaggaagaatgaacaacggccctgggaagccttcccttcctgcagatattgttgggggagtgctggtctccattttgcgtttagaaaaccagacttagatgctggaggggcaccggttgtcttctttgaactcattccccgtaatgagctagaaaagagtacctaaccataggtattctctctagagactcatgtgtcccgtgggtacagtcaattcacagtatctgttctggcttttttcactttaattctgttctgcacattctgaacatatgcaggaaaraaaatcattcctgaacttagcacaagctacactcgacacaacctaaattagtaaaaagcctttgatttattttgaagcaatttaactgtagacaaagcttgcatatatggaacagtattctcagagcctgagagttgttacagttgttctatttggaaattagaaggaattttttaataaggcacatttttcagtttcttacccattggtgtctattaagaatactatgtaatgttgaaatttccatcaaattaccaagcaaattactattaatgattagagatttagcctaacactctctctttgggccttaaataccc

SEQ ID NO: 267518 - DNA, 606 bp, Homo sapiens
taaggagggaaccctgagttataaacaagaattacagtattacttacatgattattacatgagacttggcattttaaatttgaattgagactatatttgcaattttgaatgacctgtggctgaatcaagaagtgtacccaaaactgaaatagatgttgtcactaatgatgaccttaccgtgattatgagatctacttagcccctaaaggcatctacatttgtgkctcctgatcgtctagaggccccaaaattactgtaggttttagaggtcaacaacaatatcagaccctccacagggagtggaaagaaagagtgctgcaattttttaaaggcccactgtggtaggcaaaacctgaagatgctccccaagattcccagccttggtatgcacacaccttttccccattattcaatcactgctggatgtaatacaggttgtaattagggagattatctgggtgggcctgacataatcacatgagccctttaaaagacagagtattctcctgctgattccagaagaggaagtcagagagatgctccagctggcctaggagaaagcaaacgtccttgtgaactgcctatggaggccacatttgcaggaat

SEQ ID NO: 267519 - DNA, 606 bp, Homo sapiens
taaggagggaaccctgagttataaacaagaattacagtattacttacatgattattacatgagacttggcattttaaatttgaattgagactatatttgcaattttgaatgacctgtggctgaatcaagaagtgtacccaaaactgaaatagatgttgtcactaatgatgaccttaccgtgattatgagatctacttagcccctaaaggcatctacatttgtggctcctgatcgtctagaggccccaaaattactgtaggttttagaggtcarcaacaatatcagaccctccacagggagtggaaagaaagagtgctgcaattttttaaaggcccactgtggtaggcaaaacctgaagatgctccccaagattcccagccttggtatgcacacaccttttccccattattcaatcactgctggatgtaatacaggttgtaattagggagattatctgggtgggcctgacataatcacatgagccctttaaaagacagagtattctcctgctgattccagaagaggaagtcagagagatgctccagctggcctaggagaaagcaaacgtccttgtgaactgcctatggaggccacatttgcaggaat

SEQ ID NO: 267520 - DNA, 606 bp, Homo sapiens
taaggagggaaccctgagttataaacaagaattacagtattacttacatgattattacatgagacttggcattttaaatttgaattgagactatatttgcaattttgaatgacctgtggctgaatcaagaagtgtacccaaaactgaaatagatgttgtcactaatgatgaccttaccgtgattatgagatctacttagcccctaaaggcatctacatttgtggctcctgatcgtctagaggccccaaaattactgtaggttttagaggtcaacawcaatatcagaccctccacagggagtggaaagaaagagtgctgcaattttttaaaggcccactgtggtaggcaaaacctgaagatgctccccaagattcccagccttggtatgcacacaccttttccccattattcaatcactgctggatgtaatacaggttgtaattagggagattatctgggtgggcctgacataatcacatgagccctttaaaagacagagtattctcctgctgattccagaagaggaagtcagagagatgctccagctggcctaggagaaagcaaacgtccttgtgaactgcctatggaggccacatttgcaggaat

SEQ ID NO: 267521 - DNA, 336 bp, Homo sapiens
gaatttatattatattaagttgttaagtttgcagtagttcattgtgtggccacaaaactaatacaacgccattcagctcaattagggattcaaaattgccaaagatcaattttgtagtaaaggacttgmttatgtccatgctacccaaaccaggacacacaaacccttctatcctgaagcatcgattttactgaaaaatgtgatggtagttttaatgagtaaatgctgaagtcattttaatattgtagcaaacataaatttattgtactagatatctttcattttctcttctctattcattcttcacccttattcatcttgtcctatgcacttgga

SEQ ID NO: 267522 - DNA, 564 bp, Homo sapiens
gtgtagccctgcccctttctctcttttgctcctgctccagctgtgtaagatgtacctgcttccccttcaccttcctccatgactgtaagcttcctaagccctccccagccatgcttcctctacagcttgtggaaccctgagccaattaaacatcttttcttgataaattacccagtctcagatagttctttatagcaatgtgagaatggactaatacactgtatatttgttttccttgccaaattagtacattgaaatcttaatccccactgtgatggtcttaggaggtggagactttgggaggtgattaggtcttgagggtacggccttcatgaatgggattagtgtgcttataaaagagaccccaggaagctctctaatcctcttgctgtcacattagggtacaatgaggagtcaggagtctgcaacatggaagagagctctcaccagaayccgatcatgctggcaccctaatttcaaatttccagcctccagaactgtaagaaataaatctctgctgtttataagccacccagtttataggactttgttgtggtatcccaa

SEQ ID NO: 267523 - DNA, 536 bp, Homo sapiens
taaagaaaaagtttaattgatgcgaggctggccatgccacatggtagacaaagttattactcaaatcaatctcataaaggctcatatgtttagggatttttctttttttttaattattatactttaagttctagggtacatgtgcacaacatgcaggtttgttacctaggtatacatgtgccatgttggtttgctgcacccatcatttacattaggtatttytcctaatgttgtccctcccccgccccctgaccccccaaccgaccccgccctgtgtagggtagggatttttcaaaggcattttgggggaaggggtgagagtggctaagtgcttgctgctgattggttggggtggagatgaaatcatagggagtcaaagctgtctgtccccttgagctgagtcactcctctgtggggccacaggagcagtttggcaggaccaagtggagccagcagtgtcagacatgcaaaaggcctgaaaagatatctcaaaaggccagtctacattggtgatgttattgcagtagtaattgggg

SEQ ID NO: 267524 - DNA, 625 bp, Homo sapiens
acatgattttcagaatgcaagagctataatatcaggcaagatcttacatacagtactttatttatttggcataaggtggtcatacttcattaattttttaagagtccatgaccttgctttctaataaaatgctttgctagtaaagctctggagacccttgtttaaactttaattaaacagtttacttgaaacatgagcataatactttaagcctggcaatgaatattacaaattgaaaacaccaccaaatatgttgttataaaccaggctgtttgttttggggtgctgtcaacatttataaaccacttgctgataaaaagaaatactgttttacatgacaacattgaaatatgtgcaatagagatttccactcttgctgtctattgccagtaaatgaaagcctctgttcattcatgttgtgcttgatagctatgaaaaaatcattcctatccaaacctcaagcacacagggacaaaataattgccagtttcaagaacaaaagagcagtttgaaaccatctgtttgatagtggacttgttatatcaaagagttcctactggacaaatttctaaatgagacaaagrcagcagaaggagatagaaagtatgtattttatgttactgcg

SEQ ID NO: 267525 - DNA, 543 bp, Homo sapiens
aattgtggccctcagatgtcacaaaacactacccatgatacacactaccctggcatcttctagcttcttggactgtcaaaatttgtaagaccttatggattcagttcgattttttaagcctgtggatttttaaatcagagattctgtctgctaaactcagaaaatgatctgtgaagcagttgagaaacagtgatattttccatggtagttcctctagttatcttggatttcacttgctggrtatctatactcttattcttggcgcacttgattccatggagtctagcagatgcaatgaaagaattacatttttcagtacagtcaatttaggaaataagaagaccttgaattagcaagtgggttatatacatatatttttcaaataacatcatgcaaaataaacagtgaataatctccctcccatccttgcccttatccactcaatttacctcctctgtaaatagtttacttacacgttgagtatctcttgtctgaaatgcttgggaccagaagtgtttcagattttggtctctattttgagat

SEQ ID NO: 267526 - DNA, 543 bp, Homo sapiens
aattgtggccctcagatgtcacaaaacactacccatgatacacactaccctggcatcttctagcttcttggactgtcaaaatttgtaagaccttatggattcagttcgattttttaagcctgtggatttttaaatcagagattctgtctgctaaactcagaaaatgatctgtgaagcagttgagaaacagtgatattttccatggtagttcctctagttatcttggatttcacttgctgggtatctatactcttattcttggcgcacttgattccatggagtctagcagatgcaatgaaagaattacatttttcagtacartcaatttaggaaataagaagaccttgaattagcaagtgggttatatacatatatttttcaaataacatcatgcaaaataaacagtgaataatctccctcccatccttgcccttatccactcaatttacctcctctgtaaatagtttacttacacgttgagtatctcttgtctgaaatgcttgggaccagaagtgtttcagattttggtctctattttgagat

SEQ ID NO: 267527 - DNA, 514 bp, Homo sapiens
tgtaatggtagttaagaattcttaaaaagtattctttcaggctaaactagttgttcaaataatattttcaagcagctttattgagatataactcacatactatacaattcacccttctaatatgtacaattcattgttttagttcatccacagggttgtgaaaccattaccgtagtctaattttagaacatttcatcaccccaaaaaaatctcatacccattagaagtcagctcccattccctcttttccccagccttactgccctaggcaaacactaatttactttctgtccaatcgatctgcctattctggatattttatattaatggaattctgcagtatgtggtyttttgcgactggctttttttttaacttagtgtagtgatttcaaggttcatccatgctgtagcatgtatcaatactttgtttcttttatttctgaacaaaattccattttataaatatgcgacattttacttatccatccatccatcagttggtaaatatttgagt

SEQ ID NO: 267528 - DNA, 457 bp, Homo sapiens
tctaaaagatccattttcagatgtctgacttccagaactgttagctaataaatttgtattttattcagttggtgatactttgttggcagcaacaggaaatgaatacagtaagatagtacaaacagacctagacagaactagagataggtcacaacctagtccctaccacasatataatatattaaatgtataatctcaggaaagtcaccctatctcagtttcctttcctgtagagtgaaattatatctgccttactgtgttgtataaagacaaataaaattattcacatgaacactttgcaaagtgtttcatcctatacaaatgttaggcctaaaactttggcttagtttgcttaatgagagggagaactggaataaagacatctgtgcttagcatatttatgatatgaatactatgatgacataaatattatgccacaaccactcctgtcataaag

SEQ ID NO: 267529 - DNA, 603 bp, Homo sapiens
cattttcaaaaataaaaagaaacctaaatggtggggtatttgcagactctctaggtcgcatatcaaaaaggtggaccatacaatgtattgcccaaactgggacatttttgagagtgaaaatgggcattataaatatttttgttaaggtgacaagtataaactgggactgtccagggcaaataggacatatggatcatcttacatatgaaaacaaataaaaagtttgcattgattatctaccctgtactagggaaggtyttagggacttctaatactttactgcttcttttttattactttttattttaagtttcagggtacatgtgcaggatgcgcaggtttgttacataggtaaatgtgtgccacggtggtttgctgcacctgtcaacccatcacctaggtattaagcccagcatgcatcttttagtggtggggcaagtaaagtatttaatagcattttatgataagaggttcaatattatattaagaggtaaagatgtggggtctcataattttcatgtcctacaatgaacgatccagacatcttttctgtttacctacatagaaaacaataaaggctttttgtatgtctctcctgcactc

SEQ ID NO: 267530 - DNA, 575 bp, Homo sapiens
ataacagtgaaacacattaagtcaatgctgttttacatattgttattcagtagtaatgttctaataattaggttacttattgtttatctccttcaggatctgtctccccagttttaatatgataaatgtgtttttctttgttacaaataatataactaccactaattgagcacaggctatattccagatatattttattaaatcttcataagattctgtaagaaagataactttgtccccactttatggatgacaaaaacaaaaatgacttgtccaattcacacataaatggcagaactgggatctaaacccagctgaccctggaaactactctaaaatctatcatgttgcattttatcctaataaacgtcttgttttccttttttcctctttccaaatatccaatgcctctctgttttgttttcactccaagttatgaaagtccattcctgaaatatgactgtagtcccagaaataaagacatggagtagactgagagcctgtacrtaacctccttggagtaactaggtgggtggtccgcagagagccctccaggttcccaggctggaatgtgg

SEQ ID NO: 267531 - DNA, 515 bp, Homo sapiens
ttaaagaagtatgttccccacttgtttacaaagcagtgcagcagctgttaggaggcctccacccccactggacagacagaggcatttggaagatgcgccgagccttcccgtacagtctgctcaggctcacccctctgggaagacctcatcaccatcaggcaccagcagtgctgagaactcaggggtacaggaatggcagatgagtcacgcctggcttctcagattcagttttggtgtgctcttattattaacattttaagaaaaacatgctgcctctcaactgttttttgcagatgatgggtaaagaaaagcctgcaccatctcctgcctcctattcccttgtaggaaacatggcttcagagacacaggcattagtttcttggatgctgtgatgagaagggctctaatccctcccttctgcttgtgygcccctgcttcaaaaccctgttcacatcttgtgttctctatgaagcccttcttgaacacacaaggctgcagcggttgctcactttcct

SEQ ID NO: 267532 - DNA, 583 bp, Homo sapiens
tcctggatggatgcaacaaatttgggttccaatcaaacaccgtcactaactagctgtgtcaaccttggcaagcaacttacctccctctgctttcccacttgcaaaagcaatgcactttctgactgcctcaaaggattgtaaagggaataaactaaggaatgtgagaaaatatttgaaakgataccatgcattatttgtatgtaatatgtgctattggtggtttttgaaaatgggatgagatagtcccacactttcctctttggctaattgcagttgcattaaaaaaggcattacagattatttaaagaggaaagaactccacttttctcatcgctccttatgtgtctttcttgtcattaaatatcctcctgattgaggactgacacaactataagactgcaatttctcacagagctttgtccccagaagtaccctcagatgaaagctgagtttcaactcttatgaaaaatgtacatgacatgatctgagagtgttttatgaacctagtccaggaatttgcaggtaaaatatgtggtgtgctggctacacaaatgattttccttgtgtccctcgtaccgtctta

SEQ ID NO: 267533 - DNA, 583 bp, Homo sapiens
tcctggatggatgcaacaaatttgggttccaatcaaacaccgtcactaactagctgtgtcaaccttggcaagcaacttacctccctctgctttcccacttgcaaaagcaatgcactttctgactgcctcaaaggattgtaaagggaataaactaaggaatgtgagaaaatatttgaaatgataccatgcattatttgtatgtaatatgtgctattggtggtttttgaaaatgggatgagatagtcccacactttcctctttggctaattgcagttgcattaaaaaaggcattacagattatttaaagaggaaagaactccacttttctcatcgctccttatgtgtctttcttgtcattaaawatcctcctgattgaggactgacacaactataagactgcaatttctcacagagctttgtccccagaagtaccctcagatgaaagctgagtttcaactcttatgaaaaatgtacatgacatgatctgagagtgttttatgaacctagtccaggaatttgcaggtaaaatatgtggtgtgctggctacacaaatgattttccttgtgtccctcgtaccgtctta

SEQ ID NO: 267534 - DNA, 415 bp, Homo sapiens
tatttttaatgttgtaagactgaaaaatatattccaaggaaagtccaagtaagatgctgggagagagaccagtaagagcccaggccattgttactgttgataggtcacttctctgatttagatagtaggaaacatatattagcaataaaagagatctataaaagagcygattgcgtatttcattaaattggtagtgaagctgatcataaaatttaatattaggaggaagtggaataattggagcagaattaaagtaactgttattaaaaacttaaatttagtcttcaaagcccctcaccagctaccttgctggccctcatctaactccttcatttctttctttctttctttcttttttgagatggagtctcactctgtcacccaggctggagtgcagtggcaccatcttggctca

SEQ ID NO: 267535 - DNA, 415 bp, Homo sapiens
tatttttaatgttgtaagactgaaaaatatattccaaggaaagtccaagtaagatgctgggagagagaccagtaagagcccaggccattgttactgttgataggtcacttctctgatttagatagtaggaaacatatattagcaataaaagagatctataaaagagccgattgcgtatttcattaaattggtagtgaagctgatcataaaatttaatattaggaggaagtggaataattggagcagaattaaagtaactgttattaaaaacttaaatttagtcttcaaagcccctcaccagctaccttgctgkccctcatctaactccttcatttctttctttctttctttcttttttgagatggagtctcactctgtcacccaggctggagtgcagtggcaccatcttggctca

SEQ ID NO: 267536 - DNA, 599 bp, Homo sapiens
tgtcttgtcaccacaagtgagactttcttacagtctcagaatggatggttgccttttaacaatttagttagggacagaaaggaaaaagagttagggttgccaatacttcrtcaattttgtcttaataaagttgcctcacatggcctatcttgttccggggaatgaagaactcctaatggttttaggctttcatgaaggggtagtcattattttgaaaccctgttttgtgggaaacaaaacaagatagaacaagggtcactgctttttctttctccatggatatatataggatatatttattaattaagaagtttctagttctaagcagcaggaaaaaaaggagttatttcttttatggccttttatagctacttaacatctatttctacttctcctccctgatttcttcctttccatcttggagccctcagttagaaagccacggtatacacacacacattcccaccagttggtataggcactctgttagaccttgggggtaaatgttgtgtccagagttggttccttccagtgggttcgtggtctcactgacttcaagaatgaagctgcagacctttgcagtgagtgttacagctctt

SEQ ID NO: 267537 - DNA, 437 bp, Homo sapiens
ttggagaggacattgttgcaaaacactttcccttaatcttgctttccacttaaacatcataatcacacaaggctgagttacaccttcactgccaccctgtgaacattgtgctcagtatggatttggtgttacggtagcttcagaaacaattcattctgtcaaagtaccagtaatgatttcttttgtgggtatattaatctcacagaaaytaagcattacattttagacaataaactttataaaagatctgtcaattctatattttttaaatgctttatattatattcttccaaaacacaccccactccattgacctttaaacacattaacctctgcagggaaatttcttagatccatattatgagcataaagtgtctaattcaccacttagtggggaaaatagattgtagttggtgttaaaatgtcagcaaatcatc

SEQ ID NO: 267538 - DNA, 583 bp, Homo sapiens
tgctaataatttcagcttatgacattagccctccaggggaggaaaatccaggtggcctggaatatttatgatttactacagtgtttaacatacattgtgataggggtcatcatcagtatctttatttttattgtcatcattcacatcatcatcaaagaattratgataaattgacattgacctgtcaatgtcagaggcttcttgagaaactgctgaaaataaataaataaacaaataaataaatagaaaagaaagccactgtagacagcaaaaagtcatgtggtaacatttgttgttcttttgctatttaagcccattttttctattcaaaggcagtttagttgttacttggctccttatcctacatagctcttgttgctcttactgtaaactcttggctttgactattaagggtcctttagttcatcatttttttcttacttttatctgatcatggtactttagataatcatttaggatctaatacaggatttgtaattataagacaggtgtctggaatcaaagatactctcattaatatttcttcaaaaatattactgaagactcatgcatttgtttacca

SEQ ID NO: 267539 - DNA, 583 bp, Homo sapiens
taaagtaccagacaactagggacactccctgtgccccagagcctgctgaatttattcaaattggccaatcctgagcctgttcaccctgcctcatggtttctttctgtggaagccacaaggaagcctcctagccatcattttcccctctccctctgccttattatcaaccccagtgcttcccgtgaggctaccagtagcatcgtctactcccttctcttgggatctgggacaataacaaatttttttttttcaatggcaatcatcttcatctgttgacctgggcaaacatgtataataataaaacctatatttgaaaacaggttccctcctctgaggtacttttaggcactaaggaaagggaaaagctgaggaatccatttgaaakagcagaccctcttgctaaggactggcattgctgggctagaatcaattcatgctaaaacagctggttcgtaattctctttcaatcatgtgatccttgcgccctgggttaaaatgctcatttctggaaagggccatctcttcatatatctagtagaggtggttgcctgtatagtgtgattaaaagttttccccctaagag

SEQ ID NO: 267540 - DNA, 583 bp, Homo sapiens
taaagtaccagacaactagggacactccctgtgccccagagcctgctgaatttattcaaattggccaatcctgagcctgttcaccctgcctcatggtttctttctgtggaagccacaaggaagcctcctagccatcattttcccctctccctctgccttattatcaaccccagtgcttcccgtgaggctaccagtagcatcgtctactcccttctcttgggatctgggacaataacaaatttttttttttcaatggcaatcatcttcatctgttgacctgggcaaacatgtataataataaaacctatatttgaaaacaggttccctcctctgaggtacttttaggcactaaggaaagggaaaagctgaggaatccatttgaaatagcagaccctcttgctaaggactggcattgctgggctagaatcaattcatgctaaaacagctggttcgtaattctctttcaatcatgtgatccttgckccctgggttaaaatgctcatttctggaaagggccatctcttcatatatctagtagaggtggttgcctgtatagtgtgattaaaagttttccccctaagag

SEQ ID NO: 267541 - DNA, 605 bp, Homo sapiens
gagcccaaggtgcaagctcatgtcaagctctgtttaagtcatatttgctaagtctgttggtcatggcaaatcatatagacaagcttggaattagtgagtgaaggcactaaaagttacccagaaagggcaatggacatagggaagtgtgaagaatcaggaccatcaatgcaattgattgatcagggtctcaccttgctacacatctatctctaatcttgactctgtgagatgcagtctgaacaagttttatggatggccttttcatgatattgactggtgatctctttcttttaaaactaacatttttttctgattaaaataataaggcttgtgaggctgaggcaggagaatggcatgaacccgggaggcggagcttgcagtgagccaagatcgtgccactgcattccagcctgggcaacagagtgagactccatctcaaataataataataataataataataataayaacaacaataataaggcttattgtagaaaatttacaaaaattgaaaacgtctcaccacctagaaataatctcctactttttagcttgaatcttttcagattgtttcatgtgttctttttaattaaatgcgagaaata

SEQ ID NO: 267542 - DNA, 547 bp, Homo sapiens
tatgagagcagaagatggaaataaaactcctttcactagagttccagtatggataattacccgaggcacaatgcttctcactaatttagcaagtccttcaatatcagacttcattttataatttgtaattaagagatttctttggcaagttgaaaagtcatcattcaccttggaggtcaagatgctatctaggcattttggtagatcacgatgtgggttgactttcctctgcagcagttagagatatcagtgcttttctcttcatcatagctactctctccagtgctaccttctatcacatttctgacactaaaattgccccaacataacgttaagcagagtgagattttttgacttcttggtttcttggtctttttctgcacaaaattctaaacatttatacccttcttgattttctgttctgtaggaaacrtatatatttatcatatattctgtgtcagacgctgtgccaaatactttaatacatcacctgcctcatcacgtcattcttcccaattctgtactatttatgacacttagaagtata

SEQ ID NO: 267543 - DNA, 552 bp, Homo sapiens
ttatttatgcagtaaagggattctttatcagaaatagtctcaataggttttaagaaagtatgtgcaaaaatataataattatagccaaagatacaaatggatgtaagaaccttcagatataatttagtctatccactcactccgtgtgctgctgatagtaacaagagcaatattaataatcacccttattttgcataataatttagaatttatataacatatatgcttcaattgcttagtctaatgaaacaaatcatcctgtgattcacagattgaagccagctctatctttttcatgagtaatcttcatcttttatttgtccaagaaatatttattgagcatataatatgtgccaggcactctactaaactctaggattatggtaactggcaaagcagatayatacctgttcatagggaaattctgctctagtggaggaatacagaaaataaccaaataaatatagagatgatgggaagtgtcacaaaaataaaaaagcagagccaagggaagactttaactgctggaggagacatagaatcggtggtcaa

SEQ ID NO: 267544 - DNA, 636 bp, Homo sapiens
cgtttgccccttaggacaaatgtaagtaattggattacttctctcagaggcattagcatttaagccttagctcattgttgccctcaataaataaatttcgagcctcagaaaagagagtttcagtgatgaaacgagtgaaataatctttgttctttaagccacaacccactggtgggacctatttgaaagtaagacaaagcctagagcattctatagagtaagatagaacactgactcgtacattgttcatcataaatatgatattcttcttactaattaactaatttagtttaattttggctcttcacatttaaaaacatcatctaatttgcaatgggaaggaactacatagatactctattccaacaaataagacttccccaaatcaaaacctagtaagtagatgattctcaactagaacacaaatctctcaaattattgaccccatcyctttccaaaataccatcctgctacacttgatctcttttgatccccagtagtttttcattatactcctttccctgcattgttctgcatattggttgtattagtttgtattcggtggatataaactatctaggcagtgaagactctaaatatattcttctagctactatgtagctatttccaatgaaa

SEQ ID NO: 267545 - DNA, 574 bp, Homo sapiens
atatgagattccttatttcaaagggaaagccatatttatctctttctttagagtctagttcccctcattagttcattcattcaaccactcaattaatacttattgagtgccaaacagtgtacgagacacgaggacgaaatggtgtgcaaaggagcaagtaaaatccctgctctggtggaacttccagcctactgagagaggcagacttaattaagtgatcacacaattaaatctaaattttcctgtgataaatgcatcagagaaaaagtacacagtgccttgatctaggyaagtgtgatttccctttggctggggctgaggtctctacatttctaaaaatcagtcttgtaactctccctactattcaaagcaatttgattcttgggtctttggaaatttgcacggtagtgatgtctttttctgtcccccattattttttcagtggtcagtggggccagggagactccagggctcttataacaatgtgggggagtacaaagttcaaagtatctcttgagaagacatacaatctggcggccggctcagatcaactatttactcaccctgcaaactt

SEQ ID NO: 267546 - DNA, 608 bp, Homo sapiens
agtgccttgatctaggcaagtgtgatttccctttggctggggctgaggtctctacatttctaaaaatcagtcttgtaactctccctactattcaaagcaatttgattcttgggtctttggaaatttgcacrgtagtgatgtctttttctgtcccccattattttttcagtggtcagtggggccagggagactccagggctcttataacaatgtgggggagtacaaagttcaaagtatctcttgagaagacatacaatctggcggccggctcagatcaactatttactcaccctgcaaacttatacaattctcttattctctgtctataatgtccttacctgtgaaatgggcatgataactatcatcctcctaggatgtgtgtcacactaatatgcatggaaacagtttataaatggtgaagtacacaaatagtgtagcactattattatttgtgtcatgaatataatgacaacaacaagaaaagctgaagggagtaaacatgaaaattccatgatctttttcttttatcccttgtttcctgccagaaactgaaaagccgtgggtaggagctcttcatttttacccaggcagaccttgtcacagtgtga

SEQ ID NO: 267547 - DNA, 608 bp, Homo sapiens
agtgccttgatctaggcaagtgtgatttccctttggctggggctgaggtctctacatttctaaaaatcagtcttgtaactctccctactattcaaagcaatttgattcttgggtctttggaaatttgcacggtagygatgtctttttctgtcccccattattttttcagtggtcagtggggccagggagactccagggctcttataacaatgtgggggagtacaaagttcaaagtatctcttgagaagacatacaatctggcggccggctcagatcaactatttactcaccctgcaaacttatacaattctcttattctctgtctataatgtccttacctgtgaaatgggcatgataactatcatcctcctaggatgtgtgtcacactaatatgcatggaaacagtttataaatggtgaagtacacaaatagtgtagcactattattatttgtgtcatgaatataatgacaacaacaagaaaagctgaagggagtaaacatgaaaattccatgatctttttcttttatcccttgtttcctgccagaaactgaaaagccgtgggtaggagctcttcatttttacccaggcagaccttgtcacagtgtga

SEQ ID NO: 267548 - DNA, 608 bp, Homo sapiens
agtgccttgatctaggcaagtgtgatttccctttggctggggctgaggtctctacatttctaaaaatcagtcttgtaactctccctactattcaaagcaatttgattcttgggtctttggaaatttgcacggtagtgatgtctttttctgtcccccattattttttcagtggtcagtggggccagggagactccagggctcttataacaatgtgggggagtacaaagttcaaagtatctcttgagaagacatacaatctggcggccggctcagatcaactatttactcaccctgcaaacttatacaattctcttattctctgtctataatgtccttacctgtgaaatgggcatgataactrtcatcctcctaggatgtgtgtcacactaatatgcatggaaacagtttataaatggtgaagtacacaaatagtgtagcactattattatttgtgtcatgaatataatgacaacaacaagaaaagctgaagggagtaaacatgaaaattccatgatctttttcttttatcccttgtttcctgccagaaactgaaaagccgtgggtaggagctcttcatttttacccaggcagaccttgtcacagtgtga

SEQ ID NO: 267549 - DNA, 243 bp, Homo sapiens
aaaactccctcttctggaatgactaaccgtttcctctcctacagtccatgggttccaagtttttctcaaagatcctcttcttaatggactcatccgcccactctagctggatcctcccaaccctyttcttttgactgtctaacatattcgccagtgtccacatttccatgtcactctttcctggttttcaatgagtcctaaattgataaccaggctgcagaaacaattgaagactgggagtgc

SEQ ID NO: 267550 - DNA, 601 bp, Homo sapiens
cagctgtgccatttgagaattcttatttcttcagtaacttgagctgaaagaagaaagcagttgttacaaatcctattatatagatgggtaarctgaggctgcatgattgtgctgtacccaaggatcatccagggatttgccaaaatcagctacagagctgagccagctaccggcttcctgaccccagactgatgcccttaaattagagcacatgtgctctaccaaacatatttactaaattttacaatgaaaataggacaccaagctagactctaagagtggcatagttgtaaaatgacctaccttcaactgtaactatatattttgtgcctttacagaagtggcagaattctgaaagcagtgcattgtgccccgttctttatatccatggtggtttttagtcttgcagagaagcatttgtaaggatgtgaaaatcaggggaaaaggggaggagagaggacactgattaagctccttccgcaagatctgtactgaataatcttccatttgtctcaggaccacctcaccttgggtagatcatttaacctccctgggcctcatggcttcttgaaaagtacagaagggataaaatgggctgatg

SEQ ID NO: 267551 - DNA, 601 bp, Homo sapiens
cagctgtgccatttgagaattcttatttcttcagtaacttgagctgaaagaagaaagcagttgttacaaatcctattatatagatgggtaaactgaggctgcatgattgtgctgtacccaaggatcatccagggatttgccaaaatcagctacagagytgagccagctaccggcttcctgaccccagactgatgcccttaaattagagcacatgtgctctaccaaacatatttactaaattttacaatgaaaataggacaccaagctagactctaagagtggcatagttgtaaaatgacctaccttcaactgtaactatatattttgtgcctttacagaagtggcagaattctgaaagcagtgcattgtgccccgttctttatatccatggtggtttttagtcttgcagagaagcatttgtaaggatgtgaaaatcaggggaaaaggggaggagagaggacactgattaagctccttccgcaagatctgtactgaataatcttccatttgtctcaggaccacctcaccttgggtagatcatttaacctccctgggcctcatggcttcttgaaaagtacagaagggataaaatgggctgatg

SEQ ID NO: 267552 - DNA, 587 bp, Homo sapiens
tattattgcacaattttcttcatgtacctccatgctacgattttaactraaggaatatcatgagcgcctgctttgtctactctgtgctctccacagtgctttgtaccaggttcatctacctccatccccttatgccagtcaagctggactcctgactggtccctgaatccttcgggccttcctgtcacttggcctcacttgtgttattttcttcctctggaatagtcctgaaaattcctttctctcatgcctctaatcattttataaagcatatctcagcacatcctctgtgcagctttttggtacctattttgtacatagtactgtcctgacatgctttaccctttgaaactattctgaagacaactggcatattcttccccaaagctccccgtgggcctcagatttagacctgacagtctgtgagaacttttgagagggttgtgaaggtgtcttcttttccctgccaaactcagcacagtgcccggcacattatcatattattactaatgaagtaaaagagcaaattgatggtgcacgcacagaaacaacaacaacaaaaaagctttggaactagatgcagttgt

SEQ ID NO: 267553 - DNA, 587 bp, Homo sapiens
tattattgcacaattttcttcatgtacctccatgctacgattttaactgaaggaatatcatgagcgcctgctttgtctactctgtgctctccacagtgctttgtaccaggttcatctacctccatccccttatgccagtcaagctggactcctgactggtccctgaatccttcrggccttcctgtcacttggcctcacttgtgttattttcttcctctggaatagtcctgaaaattcctttctctcatgcctctaatcattttataaagcatatctcagcacatcctctgtgcagctttttggtacctattttgtacatagtactgtcctgacatgctttaccctttgaaactattctgaagacaactggcatattcttccccaaagctccccgtgggcctcagatttagacctgacagtctgtgagaacttttgagagggttgtgaaggtgtcttcttttccctgccaaactcagcacagtgcccggcacattatcatattattactaatgaagtaaaagagcaaattgatggtgcacgcacagaaacaacaacaacaaaaaagctttggaactagatgcagttgt

SEQ ID NO: 267554 - DNA, 546 bp, Homo sapiens
gagaaacagagaaagagagagaaagaaaagaagccctaaagacgctggctgtgcagatggctccagacctccacttctactctattatcagcagacttcactccagggatgatacactctgcaatttgtatgagaaagacacgtttttgaaaccatagtggttattattgcagaagctcctgcctcaagcagccgttttaatgtttttctccctgaaatctgaacatattcatcaaactgtgttgtgctcctggactsgcaattaatcacggctcatttcaagctttgttaattaataccaaggccagggacccagtggaggccgcaaatttaatctgcagtgttttaaaattattataatctgctaaaggaagagctgttggattttaaatagtttttaaaaaaatttcaacactgcattgccaaaaaattaaaagcgatttatgataatcttggtgaaggaaccaccctgaaatagcatctttttgttattgttagctgacatctggccagcagagggagtagaactgaactagaggcaccatg

SEQ ID NO: 267555 - DNA, 546 bp, Homo sapiens
cttagtaatccctatggaatctcaaaagttaaaaagaaaaactcagaaagaaaaaaaattatagaccctacccttgaagtattttcaatcttaatcttataccgtataatgaatacacttgaaagaattaaagacttcaccacttttccacttttattttttagctgtaatatggaaataataaaagcaacaagggcaggacaagctaatattttctaaataatatggaactggtcaatcagatcaatgaggagtttcacagtagattagtgcaattcataggtgcatcctgtagaaaaccctcctgatatgcatttcatggtcaccaacacagttagatgcaaccacagacttttttataagccatcacaatgaatcataatcctggcacagtacttgcagcccccaagtggtcttgctggctttcttttctctcacctttacactataatttccttgtttgcaggaatcataccttgtacatggcaggtgagcgataaaactttgtggaatraatgaatgaatgaatgaatgaatgaatgaatg

SEQ ID NO: 267556 - DNA, 662 bp, Homo sapiens
gtgatttttgtttggttgctctgatgtagggctcatcagcaatttccaagactgcctggtgaactcatgaacattttagtgattgggctgcctgtatttggagctcagcaggggcaaagatttgagacattcttctaactagaaagatagctcttctctttgtatgtctcatcttctctgagtgtttttgtagctttttccattcctcatgacttatttccatgggcctctttcaccttttgctgtgaacaccctagaattccttgcattctctcccctttactctccttctttcccctaatttcagttcctttacctgcctctgctcctctccgtctttctggtcttttccctgtctgtctctgctatgtttccactgacatatggatcttctcaacttgctaccaaggagctgcttttggyctcctgacaacacaaggtgctgccaccctgacaggcaggaaaaggcaggcgaggcgagcatatgttaatggaagggaggtgcggggaacagataagctgttgccagtctcaggcataagttacttaattagaagccaaaaactcttagctctggttgtcactttcctcctttgagagcacagtcatccatttggtgtcctcacttttgagtagcacccgtctgggctctctcagctctg

SEQ ID NO: 267557 - DNA, 595 bp, Homo sapiens
gagccaggaagctggaaatagcagaacatctatttgcacatcgcgagccacaggccagaaacccagatattggacttactrgagagtctccaggcatcggctgtgcgtctccctggtgccaggcactacctaccccagacaccaaagaagacccccatctatgttcccatggagactgttttgtagttgaggaaccagatatataaattcttagggtcttcactatcccctgtaagagtctgaaccctactgccttcctccagcctcggcttacccagccctcagccattatttcttctttcagtcccttaaactattcctctctcttcccacaaggccttggtatatacaattctctccccaacttcttctattaatttccttcctgtccttgaaatctaaattcaaatgctcctctcttgggtcagagtgaccaacccatccctgtttgcctgggatcttcccagttttactgctagaagctccaagtcttaggaaagacatatttcaggtaaatcaggatggttactgactctagtcaaatctcctgatgatacacactataaaatatttaacagccttattgagatataat

SEQ ID NO: 267558 - DNA, 595 bp, Homo sapiens
gagccaggaagctggaaatagcagaacatctatttgcacatcgcgagccacaggccagaaacccagatattggacttactggagagtctccaggcatcggctgtgcgtctccctggtgccaggcactacctaccccagacaccaaagaagacccccatctatgttcccatggagactgttttgtagttgaggaaccagatatataaattcttagggtcttcactatcccctgtaagagtctgaaccctactgccttcctccagcctcggcttacccagccctcagccattatttcttctttcagtcccttaaactattcctctctcttcccacaaggscttggtatatacaattctctccccaacttcttctattaatttccttcctgtccttgaaatctaaattcaaatgctcctctcttgggtcagagtgaccaacccatccctgtttgcctgggatcttcccagttttactgctagaagctccaagtcttaggaaagacatatttcaggtaaatcaggatggttactgactctagtcaaatctcctgatgatacacactataaaatatttaacagccttattgagatataat

SEQ ID NO: 267559 - DNA, 595 bp, Homo sapiens
gagccaggaagctggaaatagcagaacatctatttgcacatcgcgagccacaggccagaaacccagatattggacttactggagagtctccaggcatcggctgtgcgtctccctggtgccaggcactacctaccccagacaccaaagaagacccccatctatgttcccatggagactgttttgtagttgaggaaccagatatataaattcttagggtcttcactatcccctgtaagagtctgaaccctactgccttcctccagcctcggcttacccagccctcagccattatttcttctttcagtcccttaaactattcctctctcttcccacaaggccttggtatatacaattctctccccaacttcwtctattaatttccttcctgtccttgaaatctaaattcaaatgctcctctcttgggtcagagtgaccaacccatccctgtttgcctgggatcttcccagttttactgctagaagctccaagtcttaggaaagacatatttcaggtaaatcaggatggttactgactctagtcaaatctcctgatgatacacactataaaatatttaacagccttattgagatataat

SEQ ID NO: 267560 - DNA, 582 bp, Homo sapiens
ctcatcgataaaagggggtcatatgtgaagctgatatgaggattatatgagctagtctgtgtgcagtccttaagacagagcctggatctgctaaatgctccataaacattcgctcttgtcaatatgtatccatgtaaagccctgcacagagtctgcaccaaacagatgctccccgcttgccccacctcttacttgccaatttttctcctagcttaaatgagaatggattttaccaaaaaccgagtcacagtgttgcgtgctttctgggatctgacctcttctcactccctgcaatgggttgaatggtggccctaaagacatgttctaacctctaatcctggaacctgtggctattcccttacatggcaagagagtgactatgaccttatatctgaaaggatgtgactaagccaaggactttgagaggaggagtttatcctggattatctgggtggtccctaaatgcaatcacatgcatccttaaaggagaggcagaggaactttgraacaggtacacagaggagcgatgcacacagacgaggccaagtgaagatggtggcagagaccagagtgatgaggcca

SEQ ID NO: 267561 - DNA, 577 bp, Homo sapiens
tatctaccacctcaagcatttatcacttctttgtgttagtaacattccaattccactttttcagttattttaaaatacataataaattattgttaactccagttgccctattgtgcaactaaacactagatttattccttctatctaactgtatttttgtacctactaaccatcctctcgctatcccctcctccagactgccctttccagcctctggtaaccagcattctgctctctatctccatgagttcagttttttttagctctcacatatgagtgagaagatgcagtatttgtctttctgtgcctcgcttatttcacttaatataatgtcctccagtttcatccatgttgttgcaaatgacaggatttcattcttcttaaggctgaatagtattccattatgtatatgtaccacacttyctttatccattcatccactgatggacacttaagctgattccatatcttggctattgtgaatagtgctgcagcagacatgggaggtgcagatatttcttaaatatatggatgtctttttgtttggatatatacccagcagtggtgttgctagatc

SEQ ID NO: 267562 - DNA, 599 bp, Homo sapiens
tgccacattttctgctccaaaggacttagtctctccagacttccagaaaccacagattttggtctcagtacagctgacccagacactcgagcaaaaaaagttaaagaggtgcaaattaagaatgggagaagaggaaagggttttttaagtcttttgggttcatagtgcctatataagatcataagaagaaaacaaccatattagctatgattaactataaggcattggccaggcacagtcagtggctcacacctgtaatcccagcactttgggaggctgaggcaggagaatcgcttgagcccaggattttaagaccagcctgggcaacctagactctgtctctacagtaacttaaaaaaaaaaaaaaaaaatgagctgggtgtggtggcacacacctgtggtcccagtgaccagggaggctgagataagaggatcacttgagcccaggaggtcgaggctgtggtgagttgtgaacttgccactgtgcttcagcctgggcaacagagygagaccctgtctcaaaaaatcaaacaaacaaacaatgagacattgtcacacaaacccagcagcactcaagaagtcagtgtggcttctagagg

SEQ ID NO: 267563 - DNA, 525 bp, Homo sapiens
acttatggtacagaaatctactgcattttaaatacagatttaactgtcaatgaagtgaaaaaacaaggcagcaagatgcattacttactctcttagaaccgcataccatattggcagtggcaacaaaccatatacataatatgtccagggacaggcttgaatcagcagaaaaaatgctactaaaatgccaatagctacaaaactacaaggcaggagatggcttggtttctgaaaaatcaaacaaaacattgaaacacttccaaaccaatggtaattgataggttttaaaagagattttataaagtaaagaaaacctattactttctttcaatggttatactactagatgattaatcaaagagctgcattaagacaaggaaaaaaatctattatttgaggagcatattwgagaggaaaaacctagataacctggaattgctgcaattaagcaattctcaacttaaaagtgactatggccttaaagtttgtttgcaagtaacttgttcagaattctgaacatgtttc

SEQ ID NO: 267564 - DNA, 592 bp, Homo sapiens
catttctataattttgtcattttaagagtgttttatgagtagaatcacatacataacaagttgaacaatttatataacactttgttaccttttgtaaccttctgggattggcttttctcacttagcataattttctcaagaatcatccaaggtgctgtatcaatgggtcatttacttttatggctgaatagtactccatcatatggatatacaatggtttacttaaccattcaagcaccaaaggacatcaagggttgtttctacttgtggctattgttccagtttgtggctcttacaaataaagcttttataaacatttgtgyctaattttttgtgtaaacctttcatttctctaggaaaatacatcaagagtgcaattgctaggtcatacaacagtagcatgtttagtttcataagaaactgtaaaactcttttcagagtggttgtaccatgttacatttccactagcaatgcatgagagcaatttccttacatcctcaacagcatttggtgatgccactatttgtttttaactattctgataaactgttctggtaagtgtgtaatgatatttcattgttgattttttttt

SEQ ID NO: 267565 - DNA, 607 bp, Homo sapiens
ttttatggcccagaatatgatctatcttggtatatatgagcacttgaaaagagcatgtattctgctgttgttgggtagagtgttttatcattgtgaattaaatcytgttgtttgatagtgttgagttctgtattcttgctgattttcagtgttgttgttctatcaatttttgagaaaagggtatctttgctctgaagtctgtttgctctgaagtctattttatctgatattaatatagccactccagcttttttaaaataaatgtttgcatgatgtttcctccataattgaagtgagtgtcttttagacagcatgtggtttggtcacggtcatgttttttattctcttctaccaatctctgtttttcagttggtgtatttagactattcacatttaatgcagttattgatatgttagggcttaagtctgccattttatttttttgttttctgtttgttctcagtgttttgtgtttcctgacatccagtgtattacttgaacattttatagaattatttttttacttttctgtggtgttattaatgtatctctttgtatggctttttaaatggttgctgtaggtattatatatacatagctaatccca

SEQ ID NO: 267566 - DNA, 577 bp, Homo sapiens
tatctaccacctcaagcatttatcacttctttgtgttagtaacattccaattccactttttcagttaytttaaaatacataataaattattgttaactccagttgccctattgtgcaactaaacactagatttattccttctatctaactgtatttttgtacctactaaccatcctctcgctatcccctcctccagactgccctttccagcctctggtaaccagcattctgctctctatctccatgagttcagttttttttagctctcacatatgagtgagaagatgcagtatttgtctttctgtgcctcgcttatttcacttaatataatgtcctccagtttcatccatgttgttgcaaatgacaggatttcattcttcttaaggctgaatagtattccattatgtatatgtaccacacttcctttatccattcatccactgatggacacttaagctgattccatatcttggctattgtgaatagtgctgcagcagacatgggaggtgcagatatttcttaaatatatggatgtctttttgtttggatatatacccagcagtggtgttgctagatc

SEQ ID NO: 267567 - DNA, 606 bp, Homo sapiens
aggtttcactattattagtcagcatatatygaagcatgttcactgggaaaacattttctgcagtgacaatttcaaatgtgactgattaaaaggaattgctaaagaaatttgcagaacagtagcaatgaggcagccatgatctccttaacaggatactaagctctagtacttctgaattctcatttcaatcctgtccaggaatttcagaacttttttctccaaaatgcttcctctctcccctaccctcatgtatttacaacaatgatcattatttgcaatctataaacttccagttaacgtcctccaggaaaaccaccttcctgaatctccacaccagattcagctgtcatctcctatttactctcaagtccaactgagaccactgccaagatgaagctggtgtctggagcgtatgttttctcctggggtcttgattaccagtcagtttggcatcttacgagatgatggaaagagaaaagactgaatttatttttctgtgccactacaaaatctcttgacatttggctttccaagcaaacctaaaagaaatgaattaagtaattaaatcctgctaactacgtacaagacaacttccaaacattattt

SEQ ID NO: 267568 - DNA, 606 bp, Homo sapiens
aggtttcactattattagtcagcatatatcgaagcatgttcactgggaaaacattttctgcagtgacaatttcaaatgtgactgattaaaaggaattgctaaagaaatttgcagaacagtagcaatgaggcagccatgatctccttaacaggatactawgctctagtacttctgaattctcatttcaatcctgtccaggaatttcagaacttttttctccaaaatgcttcctctctcccctaccctcatgtatttacaacaatgatcattatttgcaatctataaacttccagttaacgtcctccaggaaaaccaccttcctgaatctccacaccagattcagctgtcatctcctatttactctcaagtccaactgagaccactgccaagatgaagctggtgtctggagcgtatgttttctcctggggtcttgattaccagtcagtttggcatcttacgagatgatggaaagagaaaagactgaatttatttttctgtgccactacaaaatctcttgacatttggctttccaagcaaacctaaaagaaatgaattaagtaattaaatcctgctaactacgtacaagacaacttccaaacattattt

SEQ ID NO: 267569 - DNA, 606 bp, Homo sapiens
aggtttcactattattagtcagcatatatcgaagcatgttcactgggaaaacattttctgcagtgacaatttcaaatgtgactgattaaaaggaattgctaaagaaatttgcagaacagtagcaatgaggcagccatgatctccttaacaggatactaagctctagtacttctgaattctcatttcaatcctgtccaggaatttcagaacttttttctccaaaatgcttcctctctcccctaccctcatgtatttacaacaatgatcattatttgcaatctataaacttccagttaacgtcctccaggaaaaccaccttcctgaatctccacaccagattcagctgtcatctcctatttactctcaagtccaactgagaccactgccaagatgaagctggtgtctggagcgtatgttttctcctggggtcttgattaccagtcagtttggcatcttacgagatgatggaaagagaaaagactgaatttatttttctgtgccactayaaaatctcttgacatttggctttccaagcaaacctaaaagaaatgaattaagtaattaaatcctgctaactacgtacaagacaacttccaaacattattt

SEQ ID NO: 267570 - DNA, 600 bp, Homo sapiens
tctcatagcaatctgctttcctgttttgttggctttaagatactatcaattataatctgtatcgttattttatatacaacaaagaaagaggaaacactaactaccaactaaactacagcatatcatcttgaatttaaaatgtaaaaaagtgcaaaaaatgttacagaattgatgagaagcaacatgatgagtagtttgcatttcatttcccttactacatytttgagagcctcatttatttctgtttcctcaggaccttatactatgccttacatgtggtgtatattcaatatgtgtattatgttgaattattagcttagaactgccccaaaagactttcaaaactcggtgacattaaggcccttaatttgtttctgtcttttgcattcacttatagacaagtcccatctataaattggactataaaaaagaaagcatggaatcctaacagactcctcatctacatatcagaagtaaacatttaaaaaatttgttagttttctcttgtgctttttattcggataacttgaagtgctatacagaatattccctatttgcaactcttgaacaatttattttaaaaaattggggcaagcaggg

SEQ ID NO: 267571 - DNA, 577 bp, Homo sapiens
tatctaccacctcaagcatttatcacttctttgtgttagtaacattccaattccactttttcagttattttaaaatacataataaattattgttaactccagttgccctattgtgcaactaaacactagatttattccttctatctaactgtatttttgtacctactaaccatcctctcgctatcccctcctccagactgccctttccagcctctggtaaccagcattctgctctctatctccatgagttcagytttttttagctctcacatatgagtgagaagatgcagtatttgtctttctgtgcctcgcttatttcacttaatataatgtcctccagtttcatccatgttgttgcaaatgacaggatttcattcttcttaaggctgaatagtattccattatgtatatgtaccacacttcctttatccattcatccactgatggacacttaagctgattccatatcttggctattgtgaatagtgctgcagcagacatgggaggtgcagatatttcttaaatatatggatgtctttttgtttggatatatacccagcagtggtgttgctagatc

SEQ ID NO: 267572 - DNA, 617 bp, Homo sapiens
gtcttgtgcctccttttacccaatgtctgaaaactgtaatttcatatattttgtccagtgttattgttgcttactgcgggagggctaggccagtatcagttaatctgttgtggccagaagcagaatcctaagtgtgctatattggaatttcattggaaggcttccctgaggaacaaataatgattgaaatgaaaagccatggagaagtggctcacctggtctcctgaagtgtccaccttttgcctccccactagttcctctgagatttttaggtaaaagggttattaaggtggatttaaagaagttttgtcttatttctggttttcagctaactagcaaaactaaaatgtgtctagagctagtcccaggtaatttcccctaactcttcacaagttaatcacagattcacraagtgaactttttaaagctatttgttttgttagtctaagaagtaaacatgctaatgtaactaacgaaatgtcttgaagaaacattaaagtttggaaataatgtccatctctggcaaatagtggaacttagccctcccaaaatactacaggtatcagttatgaaggctacaagtttgtatcaaagaggtggaatgaagggacgtggga

SEQ ID NO: 267573 - DNA, 531 bp, Homo sapiens
cagattcccacagggcttactccctcacactcttcaagctgttgctcaatgatgaccttttcagtaagcttttcccgtgacccaaatggaaactaaaactccctgcgcagtcctccccatccatttccctgcttctcttcctggatgataccattcgtcatctgacaagctccgtacttcacttgtttgtttgttactgtcagtctctctggcttgaatgtgaggtttccgaaatagggactttgagcagcacttttgctgtcatgtctcaagcaccctcyaaagtgtgcagggtaatgattaagtgaatgaagacagcatatattaatgaggttttagcatttcgttgaagtaattcaaataagagttagccacacaaagaacattttaaagtccatgaagtacatagtttgggtgatttgatttatatgtacatgcctatttgtaaatatgaacacactgcggtctaaatttgttggagtggttgttgtgcacattccttagtcccagaaaaaacaaatggctctgaat

SEQ ID NO: 267574 - DNA, 504 bp, Homo sapiens
tttatatgaagctttgtgatggaagccagcttaattctaatgcattcattttagtgctttgaccttctgctctctgaaaccatgagtttgtctcaggtaggagcgcaggtatctggcattaatgttttgggatcacatctgagaaccctgaatatcacaagaagttgactttcttatctcaagggacatgcattggctaactgattagtcaccacctacctttaattcacagttgtarcaaaaaccattccctttctcttgatgaatttacggcattaagcaaaggaattccaccatgtgactgtgaattgagatttgctattgtctatatgtctgctaataattgggcaggtataatcaggagcatgaaaattatgacagcatcataggaaaagggacctctttgggtcttcatctcctggtctgaccatccctttttgtttttttttgttgttgttgttttgagatggtgtctcgctctgtcgcccagctggagtgcaatgg

SEQ ID NO: 267575 - DNA, 513 bp, Homo sapiens
cattggctgaaaatacatcttcatgaaaatgaacaatttgagaaaacataattgaatataagccaattaaatgttggaaggtatttaccaaaaatgatcatttgggatctagaatagtgaaatgatgtacattcatcttttaagacagcttgatagcaaaatcaattataacttgagacagaaaactcatgttattgatgtaaagaaaaatatttatctttcgattctgaatagcatgaatctatttactycagaagcagtttcaagtcattatgatatcaggagaacaaagaagaaaatatatgcctattgtgcactagcatattttcaatgagcctattctcaaaccagtggtaggcaccaagtatctcattttgtcgggaggttttagaatgcagtttctttgtgaatctcagtaatgaggagtttatatcacttttatatggcttagtctagaagctgaaaaactacagtccacaggccagatgtctaaataaagattttttgaaacac

SEQ ID NO: 267576 - DNA, 540 bp, Homo sapiens
taaactactaataacatgtgascacaaaataaatgcattttagacatgcaaaaactttgaaactttttcacagatatattttatgtaaaaaaaaaatcactacaggagataattgaacagtgttcaagtcagtgactcaaaaacactgacagctgaatgtatcatacacacaaaaaagggaacctagtaggaaaatgacaaaatgttgaagccacaggaacacatttccttttctatgggtgacaacttactgcttgattgttcactaaataataggtcctcagagtttaaaagtaacctaaagacaaaataggattcttaactatatttataatattgaataaaaacattaaagcacttgaaaatttgtaaataaaaatattgaaatttttctcactttacatagacaaaatcaaaagataattatctgaagttaattaagaaatggatttaagtataatatttaaagttataaatgtacaagaataaagagtagtataattattaaaaattatgagtagggagaaaggtataagggtg

SEQ ID NO: 267577 - DNA, 596 bp, Homo sapiens
tatttttgatactttttttttacaaataaataatggaattcaattatcaatgtttctaatgttttaaattatggtgctataagtaaatattaatttagccagcttttttttcattttgctatatatttccaacctacagtaacagagttttagtgttttaacatttttaagaattgaggacaattgtaatttttctcattagttattaagattgctttgcatagattcagtttgcatggtctttttattattattattatttttgtcccacacactatgcaaagactgtctcctaagactggatttttagtgaacactgaaaagccattttagaggggaacaggtttcattgagaaaagarcctcttgatcatttgaaccctctaaatgaatcatgtgggagtctagtagaaacgtttatgaagctgggagaagctataccacggccttcagtctgaatcagattaccttttacattgcctaatctttcctttggaaaacagtacgaagtattaaagaagcccagtctcagctgcctcccttggccccaaaagctttctcagtgagtagcagagcactggctcaaagggcaaaagg

SEQ ID NO: 267578 - DNA, 586 bp, Homo sapiens
gcaccacgttggaaatgctctgctcagggcttcttctaggctctagtgcctagagtctcgcargcccacccacctggggaatcaggtcacttgccgctagcactgatgttttctacatgcatgtgtcaacccgaacgtttctaaactgtcactctcatatcaagtgttggaattgattaaaaccctagtgcctgctctgctctctcctatctgactcccttttacttctcttcatttctcaggttaggctcagcttattcttccaccaaagcatccatctgctaggagagcaggttccttagcctagaattgctaaaggaaatattttctctacactcagggtagaaaataaatgctcactgactaccagctttagttcttagtatgctaatgcaatctctacacagaacctagattttaaggcagtcttgctgcaaatcctcttttagatactagctggtaactattaatgtcttctctttgtattctcatgatagcagtcctaaactccatcccaggccctatctcctccttatcctcatctccagtaagatggagagttccatctgaataagaagattaagcc

SEQ ID NO: 267579 - DNA, 486 bp, Homo sapiens
atcccgcactgaggactagagggcttgttcccctagctttgggaatgcttgttgatgaacagctcctagctgtcagccttctagaaggaactgccccagttgaagagagacacaggcccaagggcttcccagggtagcctgaattccataactcattgacatggaatctataaagacgcagccacacccatcttgtggcaactccaaagagtaatcccaaatactcttctaatctcctttttggtgattggtacccagacataaacctgcaagctatcttctaggccttcctctcccaacccccaatagtcaatgagtgatttccatgccccaaaccctataccaagtgctttgccctcatagcctcctttaygcttccccactgccctctgagacagtgactgatattatttccactttatagataagggcaacccaatttggagatatggagtaagttttcaaagtcacacagctagtaagtga

SEQ ID NO: 267580 - DNA, 570 bp, Homo sapiens
ttcattaactaagtatagcccccccaccccattttctcccagagaagatttaaagggacttaccaagacacaaactaaacaacagttagtaaatttgagagacagtaaaaaagaatcacattaaacaaaaagaaaatgaaattttagtgcatgccctagaaatacccataactaattcttcaaattttaattattgcatcaactttgtattactctgtatacctaaagtaaatgaaactggctagttgttcacccagtcttttctgtcttctttcagggcacttcttcacctgacccagcaaacccttcccttctgtcctccactctttctttctagggccccaggctgcaggttggcaactacaatgaycttgcatgatgttagagcccatgaccacctgggtccttaaaggcatggagctaatcttcctaccggtcccctacacgctgtatttatcctgattttagcagaataatacatagacttcttctgtagtaatttgagctccctgaaataaactatggtgtaattgaatcttgcacttatttaattcttctgtagtatgagtg

SEQ ID NO: 267581 - DNA, 596 bp, Homo sapiens
tgtatattgctcatctctcaattcttgactcatactctacttctccattggaaccattttcctgttttgaggcctggtctcgtgactagtcctcttggtatctggatagagcatttcccttcaattacacttgctgcttggtgtcatgcaaggagtgaactgagttcttagacacatggcctcacttctgcttgcaacattctattgctttgtcctacctcagagactgaatttctatggccattggagttcttctataccaagccaatgtgtaccatacctctttggatcttctagtttggactgctgtgttcctgcccctctctcattggaactacctgtcttcacttagtctatttcctaccatcctgagccattaagggcccaggaagcccacctttgtgttattttttccatcttaggcttgaaataccagtggcaactatggctttaytgacacaggtatttttgcactctatttaattttttcctttttgccatttacctcttgcaacttttctatttcctatggttacattccttatcttgcaccacactgttgattttgatgttttccctgctattcattaattgca

SEQ ID NO: 267582 - DNA, 609 bp, Homo sapiens
acaatcttcattttgatttttccaatttttcttgtattaatgtgcgtgtgtttagttatatacaattttatcacatatgaaggttcctggggtcaccaccgcagtcaaggtgcccaacagttctatcaccaaggaattcctccattttgccctctcaccaccattaccacttcccttcagtgccctcttaagaggcccgggaagccattcatctcttctccattgccaaaattttgtattttcctgtcttttcaaaaatgtcacacaaatgaaatcatttagtgtgtaatcttttgggattggcttttctgtttcctcagcaattcagcatgttttaagaattaagagaaaggagataacctctatattagagagagatgatcacagaaagacagacatgcacattctcattggcttgcttgctttattgaaagtaatattcaaagtggaaaggctagaatagaccayatgttgccaaatgtatatgacgagttccaacctgtattctaagctccagatacagattttcacttccttctggaaagttccacatgaatcacttgaagaaaactaaaatgcaatgtgttcaaaatcaaatgtgtcatacat

SEQ ID NO: 267583 - DNA, 548 bp, Homo sapiens
ctggactcttagactatcagaatgccttaacctgactctcaaaacttacatccatatataatcatctgggagttgagcatagacaagacagaaagtgcctytggtaatgaaatttttgatggcataaaacatttctaataatttttattttaaattatcttgtttattacaaaaatatgaagtttgaatcaagtgagaattttccaactcttaaattaatctactctacttgatttgatagtacttaactcatctgtcttttgggatcatttttttctttatatcatagattgacttagatcaactttattacatcattacttgagagaggggaataaaagaatttgccagtgtatattttggtataatactaactgtctaaagcctaggaaatgtatattttatttgatattgccacaatagccttttaccaacaatttattttagtaaaaatttcctagagtgcaaataattataattgaccccattgggagtttggaggctcagctgtgaggagaaactaagtgcaggttctgagatattgcatg

SEQ ID NO: 267584 - DNA, 596 bp, Homo sapiens
caatattctgctaaattacaattttrtggtacggcctaagcttttataggtcaaaaactcttttcaatactgttgtcagcttttgcaaactcataattgaaaaaacaggttttcacatgttatctaatgtgctttaacaaagtatatgcgtaatgaaagtgtctctttaatttaattctggaaaaagttgttctctaataatctaataatgtatatgttttcattgatcagacatgagagtgtttcctttgcgcgctgttatgaaacaatgatatagttcatgtgaagtagcagtgctgggcacagtaagcactcatctgctgttggttccttttattagctgttattaaacattataatcatatttgaagagtcaagtgatttttcttcatctattgctatagacagcctctgttctaattttatacttgattatcctgttttacattatttaattgtataagctacctcaaaatatgcaaagtatcagttgaaattaaatattttaaatcaagtaagaatccaacatggtatttgtgatacgaatgatggcgatgagtttgttttaaacttacaaattacagctgataacagaa

SEQ ID NO: 267585 - DNA, 567 bp, Homo sapiens
tatttcttaaatagtcaaagttgaaagtcaaattactccttgatccatgggctgcagaagggatgctgtggaagcaggcatgaaaacagcattcatctcctcgtacatctccatcagaactcttgggtgactaggtgcattgtcaccaagcagcaatattttgaaaggaatcctttggtctgagaactagggctcaacagtgggcttaaattattcagtaaactactcagtaaamagatttgctgtcatccacactttgtgattccattgatatagaacaggcagggtacatttagcataattcttaaggaccctgggattttcaaaatggtaaataagcattggcttaactcaaagtcgccagttgaattagtccttaatgagagagtcagtctgtcctttgaagctttgaagaaaggcattgagttgtcctctctagctacaaaagtcttagatatcatcttcttccaatagaaggctgtttcatctacattgaaaatctattgtttcactgtagccacctttatcagttattttaactagattttctgaataacgctatagctt

SEQ ID NO: 267586 - DNA, 567 bp, Homo sapiens
tatttcttaaatagtcaaagttgaaagtcaaattactccttgatccatgggctgcagaagggatgctgtggaagcaggcatgaaaacagcattcatctcctcgtacatctccatcagaactcttgggtgactaggtgcattgtcaccaagcagcaatattttgaaaggaatcctttggtctgagaactagggctcaacagtgggcttaaattattcagtaaactactcagtaaaaagatttgctgtcatccacactttgtgattccattgatatagmacaggcagggtacatttagcataattcttaaggaccctgggattttcaaaatggtaaataagcattggcttaactcaaagtcgccagttgaattagtccttaatgagagagtcagtctgtcctttgaagctttgaagaaaggcattgagttgtcctctctagctacaaaagtcttagatatcatcttcttccaatagaaggctgtttcatctacattgaaaatctattgtttcactgtagccacctttatcagttattttaactagattttctgaataacgctatagctt

SEQ ID NO: 267587 - DNA, 567 bp, Homo sapiens
tatttcttaaatagtcaaagttgaaagtcaaattactccttgatccatgggctgcagaagggatgctgtggaagcaggcatgaaaacagcattcatctcctcgtacatctccatcagaactcttgggtgactaggtgcattgtcaccaagcagcaatattttgaaaggaatcctttggtctgagaactagggctcaacagtgggcttaaattattcagtaaactactcagtaaaaagatttgctgtcatccacactttgtgattccattgatatagaacaggcagrgtacatttagcataattcttaaggaccctgggattttcaaaatggtaaataagcattggcttaactcaaagtcgccagttgaattagtccttaatgagagagtcagtctgtcctttgaagctttgaagaaaggcattgagttgtcctctctagctacaaaagtcttagatatcatcttcttccaatagaaggctgtttcatctacattgaaaatctattgtttcactgtagccacctttatcagttattttaactagattttctgaataacgctatagctt

SEQ ID NO: 267588 - DNA, 567 bp, Homo sapiens
tatttcttaaatagtcaaagttgaaagtcaaattactccttgatccatgggctgcagaagggatgctgtggaagcaggcatgaaaacagcattcatctcctcgtacatctccatcagaactcttgggtgactaggtgcattgtcaccaagcagcaatattttgaaaggaatcctttggtctgagaactagggctcaacagtgggcttaaattattcagtaaactactcagtaaaaagatttgctgtcatccacactttgtgattccattgatatagaacaggcagggtacatttagcataattcttaaggaccctgggattttcaaaatggtaaataagcattggcttaactcaaagtcrccagttgaattagtccttaatgagagagtcagtctgtcctttgaagctttgaagaaaggcattgagttgtcctctctagctacaaaagtcttagatatcatcttcttccaatagaaggctgtttcatctacattgaaaatctattgtttcactgtagccacctttatcagttattttaactagattttctgaataacgctatagctt

SEQ ID NO: 267589 - DNA, 555 bp, Homo sapiens
ttttcttgcccagaccctatgaaatcttaatggaactgaagtattggttacagaacacttcattttacttagcttcctcatttcctcacatgagttggtaaataacatgcttttccaattattctcagagccagaacattcaaagtagttttatggaaaatattgcaatgatttgttctaactttaaatagcataaattctaayatggtgctatgccagaatctgttgcctttatgcatacaagaatacaggattaggaattctaagtgtatttatagcttgtatagcaagaacattttctattatttcagaatttgagctgcgttgccaaagctgagaacaatgaattttgattttgttagaaatgcagttttccctaaatttttatttttataaacttgtaatcaaagtacctcatatataaaggaaagtatacaaatcatacttttacatattgatgaatttttccaactgaacatacctgaataggcatgcccatatacaccatccagtttaagaagattattgctagctcgtttaagaagattattgtga

SEQ ID NO: 267590 - DNA, 592 bp, Homo sapiens
tgaatgaattaaatctattctttagtttgtagagaattgtttgtttttgtgwcacagatttacacaatatgagtttgctatatttatttatttttcttaattcgctgcaatgaatgcacagcttttttgtatggttttgtgaatgttttaaatttaattctagctatttagttttcttttataattaaaaaatccataatgcaattgaactatgatttgcatagaaaaaaatgcaccaattctaaggacgtagtttgatgtgttttgacaaaaatatacactcatataaccactaaggcagcagttatcttgttccctttcccagtcaatcctcaaccctaatcctacattcagggtaaggaccgatttgctttttgtcaccattggttagatttgccttcttaagagttttatgtaaatgtaattagtaatcatttagttgtgtctggcttcttttgtttagcaaaagacaaagtcagtcaacaggtgaatggataaacacattgtgatgaggacatttagtgagatactatatatatatgtatatatatgtatagtatatatatatatatatatatatataaaacctatt

SEQ ID NO: 267591 - DNA, 599 bp, Homo sapiens
aatgcagaatggactaatacagtacctgagtacatatacatacatgtgcatacatatatggctatataatatgtaattatattcctatgaatatatgcatttcatatatcacttatgaattataatttatgtaaattaagacatacattataatgaatacaaagagtcagaattgggatatctttgtatgttttaattttatttaagtttaatatataatttttaaaatattcacttccattaacacgtatttaacttttattgtgatctttgggcttaattattgacaaggcaaatttttttgtcttattagagcttacgatattgagatgaagagagacaattaaaagtccagtattcgtattggtgataattcctccarcaagggaagtcaaagtatattagagaattacctaacttgggccctgagaggttggaaatggtgccagtaaggtttccaggggaagggaggctcaatggaaacctgaagggtgaatggcaatgagtgaaggcaagaggcctagaaactcacatgcggaagtcacaaaagaaagataaagcaaagagtattcaaggaactgaaagaaactaagtataaa

SEQ ID NO: 267592 - DNA, 599 bp, Homo sapiens
aatgcagaatggactaatacagtacctgagtacatatacatacatgtgcatacatatatggctatataatatgtaattatattcctatgaatatatgcatttcatatatcacttatgaattataatttatgtaaattaagacatacattataatgaatacaaagagtcagaattgggatatctttgtatgttttaattttatttaagtttaatatataatttttaaaatattcacttccattaacacgtatttaacttttattgtgatctttgggcttaattattgacaaggcaaatttttttgtcttattagagcttacgatattgagatgaagagagacaattaaaagtccagtattcgtattggtgataattcctccaayaagggaagtcaaagtatattagagaattacctaacttgggccctgagaggttggaaatggtgccagtaaggtttccaggggaagggaggctcaatggaaacctgaagggtgaatggcaatgagtgaaggcaagaggcctagaaactcacatgcggaagtcacaaaagaaagataaagcaaagagtattcaaggaactgaaagaaactaagtataaa

SEQ ID NO: 267593 - DNA, 590 bp, Homo sapiens
acttacccatgcatatgtctttatgacagaacaatttttattctttgaggtatattcccagtaatgggattgtcagattgaatggtagttctgyttttaggtctttgagaaatttccatactgcattccacaatggttgaactagtttacactctcaccaaccgtgtatatatatgcattcccttttctccacaattctgccagcatctgttatttttgacttgttaatagtagccattcttaccaatgtcagatggtatctcattgtggttttgatttgcatttctctaatgatcagtgatactgaatttttttcatgtgcttgttggctgtatgtatatcttcttttgaaaagtgtttgttcatgtcctttgcccactttttaatagattttttcttgtaaaattgtttaagttccttatggatgctggatattagaccttcgtcagatacatagcttgcaaatattttctcccattctttagttttctatttactctgctgatagtttcttttgctgctcaaaagcttttaactagatcccatttgtccatttttgcttttgttatgattgctttcgatgtcttcac

SEQ ID NO: 267594 - DNA, 590 bp, Homo sapiens
acttacccatgcatatgtctttatgacagaacaatttttattctttgaggtatattcccagtaatgggattgtcagattgaatggtagttctgtttttaggtctttgagaaatttccatactgcattccacaatggttgaactagtttacactctcaccaaccgtgtatatatatgcaytcccttttctccacaattctgccagcatctgttatttttgacttgttaatagtagccattcttaccaatgtcagatggtatctcattgtggttttgatttgcatttctctaatgatcagtgatactgaatttttttcatgtgcttgttggctgtatgtatatcttcttttgaaaagtgtttgttcatgtcctttgcccactttttaatagattttttcttgtaaaattgtttaagttccttatggatgctggatattagaccttcgtcagatacatagcttgcaaatattttctcccattctttagttttctatttactctgctgatagtttcttttgctgctcaaaagcttttaactagatcccatttgtccatttttgcttttgttatgattgctttcgatgtcttcac

SEQ ID NO: 267595 - DNA, 590 bp, Homo sapiens
acttacccatgcatatgtctttatgacagaacaatttttattctttgaggtatattcccagtaatgggattgtcagattgaatggtagttctgtttttaggtctttgagaaatttccatactgcattccacaatggttgaactagtttacactctcaccaaccgtgtatatatatgcattcccttttctccacaattctgccagcatctgttatttttgacttgttaatagtagccattcttaccaatgtcagatggtatctcattgtggttttgatttgcatttctctaatgatcagtgatactgaatttttttcatrtgcttgttggctgtatgtatatcttcttttgaaaagtgtttgttcatgtcctttgcccactttttaatagattttttcttgtaaaattgtttaagttccttatggatgctggatattagaccttcgtcagatacatagcttgcaaatattttctcccattctttagttttctatttactctgctgatagtttcttttgctgctcaaaagcttttaactagatcccatttgtccatttttgcttttgttatgattgctttcgatgtcttcac

SEQ ID NO: 267596 - DNA, 643 bp, Homo sapiens
ttgaatgtcatttaaaaggcatccaatcatcagtgggattttgcttccagcttttgcccccgggtgcagcattcactcttctgtgtcggtgatgcaggtgcaggcataccctgagcagagccaccagcctcctcacacttgcagttccatctcagattgggggatggtgtgtgatgcatacttcccaatcttgtccatgtgacctgtaggggaagtagattcagagtcgtctccacaaactgcacaaatggaaaggagtagrgccatctactttggcttacaggctcattgtctctgaaggaaaaaaaaacatgtatatatacatatatctctctagaaaagtcctacacctacacctgtttgtataaaagatgttagggccaggcacagtggcttacgcctgtaatgccagcactttgggaagccaaggcagggggatcatttgagtctctacaaaaaaaattaaaatagaaggtgtggctggtaaaaaataaggttggtcctttatttcccacttgcttatttttcattttcttttgttgttgttgttgttggtggtgtgtgtgtgactatcaaccccagaaagctgtaatgatatataataggatttcagtgtcaaaactccacctttgcatgcataaca

SEQ ID NO: 267597 - DNA, 449 bp, Homo sapiens
cctacacctacacctgtttgtataaaagatgttagggccaggcacagtggcttacgcctgtaatgccagcactttgggaagccaaggcagggggatcatttgagtctctacaaaaaaaattaaaatagaaggtgtggctggtaaaaaataaggttggtcctttatttcccacttgcttatttttcattttcttttgttgttgttgttgktggtggtgtgtgtgtgactatcaaccccagaaagctgtaatgatatataataggatttcagtgtcaaaactccacctttgcatgcataacaactcatatttcttttctctatcttgtaacactccagagatagagggaagaggagaggtattcagaaaaagggcagggatttgaagagacagagggtaattctcaactcagcctttaaaccaagatgtttccttcagctcagccacccag

SEQ ID NO: 267598 - DNA, 449 bp, Homo sapiens
cctacacctacacctgtttgtataaaagatgttagggccaggcacagtggcttacgcctgtaatgccagcactttgggaagccaaggcagggggatcatttgagtctctacaaaaaaaattaaaatagaaggtgtggctggtaaaaaataaggttggtcctttatttcccacttgcttatttttcattttcttttgttgttgttgttgttggtggtgtgtgtgtgactatcaaccccagaaagctgtaatgatatataataggatttcartgtcaaaactccacctttgcatgcataacaactcatatttcttttctctatcttgtaacactccagagatagagggaagaggagaggtattcagaaaaagggcagggatttgaagagacagagggtaattctcaactcagcctttaaaccaagatgtttccttcagctcagccacccag

SEQ ID NO: 267599 - DNA, 510 bp, Homo sapiens
tcaatattctataagttaatatctgactttttagagcctgagtcctacttatcagcaaatggtaagtcaaaaatattatctttatctagagtgacagatgacctttggacaggttggtcagacattcctctgatataaatttgaaagggcacatggtaatctttttgccttatktataagttttagataacgttccttgataagatgatcactcagagtgctttgtaatatattccctacagttaaaagatagagttatatctctacagttaaaagatagtgtctgattcctgcctgaagaagctaaagtgaattagggatggggtttgatctcatctctgaaaatccagaaggcaatcatcaggtagactaatattggtggcagaaccagtttagtgctactgcactaagagggtcctgaacccccaagtgctgcagatgtgttttccaccatctagagtaggtcttgtggtggaaggagtaagtgcagcatcctcttggttctgatca

SEQ ID NO: 267600 - DNA, 637 bp, Homo sapiens
agttaatatctgactttttagagcctgagtcctacttatcagcaaatggtaagtcaaaaatattatctttatctagagtgacagatgacctttggacaggttggtcagacattcctctgatataaatttgaaagggcacatggtaatctttttgccttatttataagttttagataacgttccttgataagatgatcactcagagtgctttgtaatatattccctacagttaaaagatagagttatatctctacagttaaaagatagtgtctgattcctgcctgaagaagctaaagtgaattagggatggggtttgawctcatctctgaaaatccagaaggcaatcatcaggtagactaatattggtggcagaaccagtttagtgctactgcactaagagggtcctgaacccccaagtgctgcagatgtgttttccaccatctagagtaggtcttgtggtggaaggagtaagtgcagcatcctcttggttctgatcatataatcttctggatgggctaaggggcattaggagaaaggctgaggttgtgctgctgaatgctcagggactcaattagaggttacaagaggccatctgagagacagatacatctggctgatcatggcaactacagcaagg

SEQ ID NO: 267601 - DNA, 556 bp, Homo sapiens
aatgctaattgagaccataatataataccagtgcatattattagaatgtctaaaatktaaaagacaaatcatattaagtattggagagaatatgaagaaactagaactcatagacactgttggtggaaatacaaaatggtatgactactttggaagacaatttggcagcttcttaaaaagctaaacatacatctactatatgacctgatcatttcactcctaggtgtttatccaagagaaataaaaggatatgaccgcaaatgaccagtacccaaatttccatagcagctttatttgcaatatccacacacttaaaacaactcaaatgtccatcagcatgtgaatggataaggaatgtaagtggatatccataatataaaataatatcctgcaactaaaaggcataagctattgctgtatgtaataacttggatgtatttcagaataattattcttagtgaaagaagccagagaaaaaatacctgctgtatgattccactaatacaaattctagaaattcaaactgcctatagtgacagaaagcaacacagtgttt

SEQ ID NO: 267602 - DNA, 556 bp, Homo sapiens
aatgctaattgagaccataatataataccagtgcatattattagaatgtctaaaatttaaaagacaaatcatattaagtattggagagaatatgaagaaactagaactcatagacactgttggtggaaatacaaaatggtatgactactttggaagacaatttggcagcttcttaaaaagctaaacatacatctactatatgacctgatcatttcactcctaggtgtttatccaagagaaataaaaggatatgacygcaaatgaccagtacccaaatttccatagcagctttatttgcaatatccacacacttaaaacaactcaaatgtccatcagcatgtgaatggataaggaatgtaagtggatatccataatataaaataatatcctgcaactaaaaggcataagctattgctgtatgtaataacttggatgtatttcagaataattattcttagtgaaagaagccagagaaaaaatacctgctgtatgattccactaatacaaattctagaaattcaaactgcctatagtgacagaaagcaacacagtgttt

SEQ ID NO: 267603 - DNA, 556 bp, Homo sapiens
aatgctaattgagaccataatataataccagtgcatattattagaatgtctaaaatttaaaagacaaatcatattaagtattggagagaatatgaagaaactagaactcatagacactgttggtggaaatacaaaatggtatgactactttggaagacaatttggcagcttcttaaaaagctaaacatacatctactatatgacctgatcatttcactcctaggtgtttatccaagagaaataaaaggatatgaccgcaaatgaccagtacccaaatttccatagcagctttatttgcaatatccacacacttaaaacaactcaaatgtccatcagcatgtgaatggataaggaatgtaagtggatatccataatataaaataatatcctgcaactaaaaggcataagctattgctrtatgtaataacttggatgtatttcagaataattattcttagtgaaagaagccagagaaaaaatacctgctgtatgattccactaatacaaattctagaaattcaaactgcctatagtgacagaaagcaacacagtgttt

SEQ ID NO: 267604 - DNA, 613 bp, Homo sapiens
cttaatgataccaattccaactgaaggagcagtgaggtgttattaaaacaaagaattgaggatggagaattctgcctgcttggctcagcatcagcattctggccaaagaatgtttatcagtgcctgagtgaaggggttagaaaaataaaaggaatgactgccaagraaaaaaataataattaaaacctcttagtacaattataccccccattccccaaatcagaatatttttacatctttctcattatttttggtatgtattggtgcccttccttatggccctcagcttttcatatttcagattaatttaactgaattccctgaggtaaaaagcaaaattctaagaagatttcacaaataaagttgttttcctgagtcaaatgaaaacaggacatagaaagaactaaagatgagatacagtaagaagtatatagcttagactttgggcaaataaactagaaaataaaagagatattgcaagccgaagttacatggttttccttccattcagaggaggatcctggccaaatttggatttttattgaaattgtcttttagattttctatgctatcttccctagataactactgctttgtgaagtgatgtgtgagt

SEQ ID NO: 267605 - DNA, 458 bp, Homo sapiens
ctgacaagagcaaactgccaactccagctctttggggcctattcccatctgtggtcttatcttttttggttctgcaatacaataccatatagtacaatacaatacaatacaattctggtttgggctttcctgttttatcttacttcctgkttttttttttttttctccaagtatggaccaggttatatgaggaaaaacaaatcaaggcttcatctaccataactcctcatgtatctgatatgctaactcctgccttcctgtcttctaactcctcatgtatctgatatgctaagtcctgccttcgtttcttcttctaactccccattgcctctgactatactcttttgatcactgggatatctgagatattgtctcccccatgagcaccagagacaaacactttataaatcccaaccaatgaaaagataacaaccataaaacttggcatctgattttgc

SEQ ID NO: 267606 - DNA, 458 bp, Homo sapiens
ctgacaagagcaaactgccaactccagctctttggggcctattcccatctgtggtcttatcttttttggttctgcaatacaataccatatagtacaatacaatacaatacaattctggtttgggctttcctgttttatcttacttcctgtttttttttttttttctccaagtatggaccaggttatatgaggaaaaacaaatcaaggcttcatctaccataactcctcatgtatctgatatgctaactcctgccttcctgtcttctaactcctcatgtatctgatatgctaagtcctgccttcgtttcttcttctaactccccattgcctctgactatactcttttgatcactgrgatatctgagatattgtctcccccatgagcaccagagacaaacactttataaatcccaaccaatgaaaagataacaaccataaaacttggcatctgattttgc

SEQ ID NO: 267607 - DNA, 640 bp, Homo sapiens
ttgttatttattttataggtaattcttttctccagttgcatcagttctgaaaatcatagttaaaaattgtattggcaaatackccgaccctcatcatcattgtgattcttctagtggttccctgtgatccaaatgatcaagacatgataaagacaagccattgtttttggggggtggggtgggggaaagacccagtctaaaataaatgtagtccaaaatactaaacactgagaagaagaatacaccttgactcttagtcttcaaaaagtagagatataatgaaatagattgtagcctaatgagatattaggacacagtttgattcacatggaaatggaacaggcatgaaatacagagaaggaaagaggaaaatctttttttttttttttgagatggagacttgccctgtcgccaaggtggagtgcagtggagccatctcagctcacggcaacctccacctcctgggttcaagcgattctcctgcctcagcttcccgagtagctgggactacaggtgtgtgccaccacacccagctaatttttgtatttttagtagagatgggatttcatcatgttggccaggatggtttcaatctcttgacctcaagtgatccacccacctcagcttcccaaagtgtaga

SEQ ID NO: 267608 - DNA, 570 bp, Homo sapiens
ttgaattatcattcctgccctttcataaccatttgcaaaaaaaatcatcacttagagatgaatatggcaaaaaggagaacattcattgtctgcttccctgycttttatcctttgcccaagaagtggatggagacagatgatgaagagaagggtaagaatagactgaggacagaagataaactataattccctgaggactaagaaaggcagcacatgaatctctgtaggaaatgaaataattaagagaaattgataggaggaagagaggaagtgagggattaaaaggttcttctgcacttggaggagggagagtctgcagagtttatgaagatagagaggtgtagaaagaacaagggatgttaaaaaaatatttctgtgcactatttggagaaattttttagtcttaaggatttcaagaaaacatttgagttacttgtaatctctgttttcctcagtgcaacaccatctgaaattgctctcacagcaatgcatccatatttaatatttaatacatagattcacaaaatgcaattaatagcctagaccaataattaagtgtacatgtaagaa

SEQ ID NO: 267609 - DNA, 586 bp, Homo sapiens
cagctacaagaaactatgagtgacatttacttcaagaagaatggaagaagtaaattacagggaaaatgcagttgaatttgggtatgacacctgtcaacagcaaaggaaacatgcacccatcttccatgacaccaggaaatgaaactaaaatgaaagacaaagctgttctctaggtgctgtcatccagcctggttttccaaggcacgtaaatgctgactgcacaatctgtgaatgcaaacagttgtgcagagttgcagagtaggcctctattgcctttctcttacagatcctcaaccttgaaccctttataaatctctagatgcagtaaaatgcaggctaaggtgaaaatatggcatttacttgctgaaaaagataatggtagatgatgagggractcctaggtctttacatccagacatagagcaccacgctgtatgtgctttaaccctcaaataaaaaacaaggagaatggaaaacccacaagcactaaaaccactttagttacatggtgctaggcaagatgaataaggcaaaactccctcactcaaaattatgttaggaagctatgagcattaaagaaagttaa

SEQ ID NO: 267610 - DNA, 584 bp, Homo sapiens
cagtttctaggctacagcgcggggagaagtggccccaagaagagcttggtagtatttgtgatttgaaaagatacagattagagtttgtggaggccaaggaggctcaaattgaggggcaatggagaggaggttgcttcatagaaagcggcaagctacagagaatctgtagaaatggcccttcagtcctctttgagtactgatacgcacatacattaggtcttggaaagaaacagcaaaaagcagcagactaaacaattcttgaaattctcaggaggctggaaataaatcatgttctgaccagtcaacagaaaaagatcccataatataagcggcttcaggtagagtctccacagaggtatcaccctactagtgagactaaattaacctgaaaagaaagatggcattgcaacttcgctaatataacttaaaagcaaatgtatgaatgacccaagtgatttcaagtagttgtgtgccagaayacagacaaatactacttaaaggaatacatcaaaatctatcacccaacaatgcaaaattcaaaatatatgctattcaataaaaaattacaaggcagaccaaaaaag

SEQ ID NO: 267611 - DNA, 660 bp, Homo sapiens
tttctcaccctgaattattccctatacaaaaaacaaagaaaaggaataacaactttacttagctacttttcttcctctgctccactggaaaactctctgaaaatgtacttagcttctcctacggtctccttacacagtctaatgcctctcctatctctcaagccttagctctcgggtttcagcaccattattccactgsaactgcttttgcttcagactgtctagtctctgctcagaccttacctaacaagccccttcaacagcagaatgatattggccatgacatttttcttgaagttctttcttttttaatttctctattattctggttcatcttctgtctctttgattgatatttctcttttctgaaattcctcttttcacgccacctaccaggtgttgaagttctctagagtccagccctttgccttcttcctctccacccattcacttccatctgtcaatgctgaaggaacactttggaatgacttcatccacaagctgataggaagatgattcagaaattccaggttccacattcagacaggacaatgtccagaggagaaaagaaactgtttttttcttgtaattttgtatgagtcaatacacatttcttcagaagctagtcaacagaattctaacctcatttaatggccagaa

SEQ ID NO: 267612 - DNA, 657 bp, Homo sapiens
taggtctgtctgtcattttcttaaatgagtagaaaatattattgattgtctgaaaaagtataaaattcaattatcttagtagtacaaaaatagattaaaatgcttaactttaccaagtagaaatggaaatgtagttttgatctgaattatgttatctaattataacattgtcatccatcctttaaattaataaaatattgcttctacttttaatgatgtcattaataacgcagtcagcttgagctcaataggtaagctagtttatcttaacttgaaagtcatcctgtatttatagtatattaaatgcatgagccaatatttctgagcctggaataatgcatcaattcataaagagaattgcctttaatttagccattggtaggtaaaggataactgaatattcatcttctwcgaaggctattttaataatgacttaattgttctttttcaataataaaatcaactactcaagcaagtatgccatgttctgatcccagttaaaatgagtgtgtctcagtcttgttagagcagtgctaatgaagacagtctcagagccttgagtccttcatgagttccatggcctcagactttataatgttctaaagcaaaatccatgcaattgcaaataggggaattaagtgggcagtctatcaatgc

SEQ ID NO: 267613 - DNA, 657 bp, Homo sapiens
taggtctgtctgtcattttcttaaatgagtagaaaatattattgattgtctgaaaaagtataaaattcaattatcttagtagtacaaaaatagattaaaatgcttaactttaccaagtagaaatggaaatgtagttttgatctgaattatgttatctaattataacattgtcatccatcctttaaattaataaaatattgcttctacttttaatgatgtcattaataacgcagtcagcttgagctcaataggtaagctagtttatcttaacttgaaagtcatcctgtatttatagtatattaaatgcatgagccaatatttctgagcctggaataatgcatcaattcataaagagaattgcctttaatttagccattggtaggtaaaggataactgaatattcatcttctacgaaggctattttaataatgacttaattgttctttttcaataataaaatcaactactcaagcaagtawgccatgttctgatcccagttaaaatgagtgtgtctcagtcttgttagagcagtgctaatgaagacagtctcagagccttgagtccttcatgagttccatggcctcagactttataatgttctaaagcaaaatccatgcaattgcaaataggggaattaagtgggcagtctatcaatgc

SEQ ID NO: 267614 - DNA, 657 bp, Homo sapiens
taggtctgtctgtcattttcttaaatgagtagaaaatattattgattgtctgaaaaagtataaaattcaattatcttagtagtacaaaaatagattaaaatgcttaactttaccaagtagaaatggaaatgtagttttgatctgaattatgttatctaattataacattgtcatccatcctttaaattaataaaatattgcttctacttttaatgatgtcattaataacgcagtcagcttgagctcaataggtaagctagtttatcttaacttgaaagtcatcctgtatttatagtatattaaatgcatgagccaatatttctgagcctggaataatgcatcaattcataaagagaattgcctttaatttagccattggtaggtaaaggataactgaatattcatcttctacgaaggctattttaataatgacttaattgttctttttcaataataaaatcaactactcaagcaagtatgccatgttctgatcccagttraaatgagtgtgtctcagtcttgttagagcagtgctaatgaagacagtctcagagccttgagtccttcatgagttccatggcctcagactttataatgttctaaagcaaaatccatgcaattgcaaataggggaattaagtgggcagtctatcaatgc

SEQ ID NO: 267615 - DNA, 470 bp, Homo sapiens
ccatcatcttgtatacaaggacagagtataatatgttcatttcattaactttgattccatgtcatgaattcatacattttcaaattgaaagttctgcccacctacgggctgtgtgacctttggcacatcccctttctttctatatattattatcataacctcccatctatttagactgaagtggagtcataargtaacttcaaagcagttgtcatattaccatttaatcttcaacagaaaaattggagacttcaaaactttttagttttgaagacaactattttaacttcagccctcattacacaccccagcaatctccccatctccagtttgaatttacccagttcttcatatgctactgtttgtccagtctgtcttagagtatgctgtatgttaagatgaatacaatccttcacacgtggtatgaccagtggcacacgtaggggttttaaaacccttcccctgaatgc

SEQ ID NO: 267616 - DNA, 376 bp, Homo sapiens
aaaattcttaaaagctgaggtaagcacataactaacataastataaacattggacataaagtatatatgttatagattacactagtcagtagtttgctagtaaatgtttaacaacaggtacttagaggaataggggtaggtacgaaaaagtaacatttgtctatttcaatggtgtatgtactcctatcatggctagttttaatctaccaatatgatgtcattgactgtccattgactgtgcagttaggaaaagatgcatacaatcagctctcatgagctggtatgagatgccaccagctctcattgattattcgtccctctaagacatattgtctaaattagtcacacactggactgtcatccattgattttattt

SEQ ID NO: 267617 - DNA, 511 bp, Homo sapiens
taaaattcttaaaagctgaggtaagcacataactaacataagtataaacattggacataaagtatatatgttatagattacactagtcagtagtttgctagtaaatgtttaacaacaggtacttagaggaataggggtaggtacgaaaaagtaacatttgtctatttcaatggtgtatgtactcctatcatggctagttttaatctaccaatatgatgtcattgactgtccattgmctgtgcagttaggaaaagatgcatacaatcagctctcatgagctggtatgagatgccaccagctctcattgattattcgtccctctaagacatattgtctaaattagtcacacactggactgtcatccattgattttatttttccctcatgagctttattgagagataatttacatacaatgaactgcattcagttaaagtgtacaattcagtgatttttaacaattgtataaattagcaactacactaaagatagatcacctccactgggtacc

SEQ ID NO: 267618 - DNA, 527 bp, Homo sapiens
  misc_feature (1)...(527): n = A,T,C or G
gttgatcatgttttcatgtgtgtattggccattcatacatattctttttaaagtgtcttttcaaatttttggcacattaaaaagtatcaggctgcctgtcttattatttagttgtaagaattctttatatatttcggatactagtaaaacatttagttttcatttttcacatgtaggtgaatattagatggagtttaaaatgaattgtggaaaaatgacaatcccatacatctaacagtacatttcaagcaggatcatatatcttttttatttktataagtacaacagttctgtgaggaaagaaggatagttataattctccttcactttcagantaaagagaccaagttttagataggaaatagagcacttcttaggcatgtgggctttggaactagatgacctctgtttaaattgtgacctattcactagctgaggaacctctagcaagttgatagggagtctctaaaactcagttttattactgctaagatgtgagaaataatagtacttaaataaagagtaag

SEQ ID NO: 267619 - DNA, 537 bp, Homo sapiens
tcatgtccttttttgctcagtagtattccatggactagatcttatgcagttyaaccattcctctgttgaaggacatctgggttgtttctaggatttggttgttgtgattaaagtgataatgaacatttgtatttaggcttttgtgtgaatataagttttattttttctgggaaaaatgcccaagagtgcaattgctaggtcatagggtaattgcatgtttaattccataagaactattaaattattttacagagtaactatatcattttatgttcctaccagtaatgtatgagtgataccctgccacttgtttttgtaaatcaaattttatcaaaacacagccacacttatttgttaacatattcttcatagctgctttcacattgcaatgacagagttaaatggttgttaaagtcactatatagaccagaaagactgaaatatttactatctgaccctttttatgtcagaaatatttactttctggcagaaaaagatttctgacttcctctctaaggattggtatctaactgtaga

SEQ ID NO: 267620 - DNA, 515 bp, Homo sapiens
taaacttttacctcatcttatgctttttttaaaaaaacaatgctgtctttatttcttaactcccaaataaaaaaatacatttacatgacatttagggtagaactacaaggmcccataaggattaagcatacaatccagttattataatgctgttaactaaaactttcagagtctaattgagttttggagaaggagtaggttataaaattgatgtctctatagatattatctttaattaaaactacttctgtgtatcatgtagttgaaactagtagctggtgcagggtagggagattttttaaagtttgtatatgaataggaatttcttaactcctaacaatgttaggcagtcaattctgggtactagcaaatcaaattcatgaaatccttggctgtcccatattgagttcagggtaagataaaggcactaagagcaatcagtgataaaaacaaagtaatgtggttgaaattatgtgacctatttggaccaaggttgaatgcctgagaattctaac

SEQ ID NO: 267621 - DNA, 533 bp, Homo sapiens
attccatagaatagagggggaggaaatacttccaaactcattctgtggagtcagtactaccctgataccacaccagacaaagacatatcaaaaacagaaaactacaggccaatatctctgatgaatattgatgcaaaaatcttcaaaaatactagcaaaccaaattcaacagtacattaaaaagatcattcatcatgagccagtgggatttgtcccagagatgcaaggatgaatcaacatatgcaaatctatcaatgtgatacatcatatcaacaraatgaagtacaaaaaccatgtgatcatttaaattgatgctggaaaaacatttaataaacttcaacatcacttcttgaaaaaaactctcaaaaaactgtgtatagaaggaatataaatcaacagaataaaagccatttatcagacctgcactatgggaaaaactgaaagcctttcctcaaagatttggaacacaagaatgcccattgtcactactgttattcaacatagtactggaagccctacctagagcaatcaga

SEQ ID NO: 267622 - DNA, 585 bp, Homo sapiens
ctcaaatcaaaatggattacagacttaaatctaagagcccawactatgaacctactacaagaaaacattggggaaagtctccaggacattggtctgggcaaacattttttgaacaatacctcagaagtacaggcaaccaaagcaaaagtggacaagagggatcacatcaagttaaaaagcttctgcacagcaaaggatacagtcaataaagtgaagagacaacccatagaatgggataaaatatttgcaaattaaccctctgacaaggggttaataaccggaatacataagaaactccaataattctataggaaaaaaatgggcaaaagatttgaattgatacttctcaaaagaagacatgcaaatagaaaacaggcatatgaaaaggtgctcaacagcattaatcatcagagaaatgcaaaccaaaactactatgaattatctcaccccagttaaagtggctttttcttttcccaaaagacaggtaataacaaatgctggtgaggatgaaaagatcatacactgttggtgggaatgtaaatttgtacatctactatagagaacagtttggagtgtcctcaaaaa

SEQ ID NO: 267623 - DNA, 585 bp, Homo sapiens
ctcaaatcaaaatggattacagacttaaatctaagagcccaaactatgaacctactacaagaaaacattggggaaagtctccaggacattggtctgggcaaacattttttgaacaatacctcagaagtacaggcaaccaaagcaaaagtggacaagagggatcacatcaagttaaaaagcttctgcacagcaaaggatacagtcaataaagtgaagagacaacccatagaatgggataaaatatttgcaaattaaccctctgacaaggggttaataaccggaatacataagamactccaataattctataggaaaaaaatgggcaaaagatttgaattgatacttctcaaaagaagacatgcaaatagaaaacaggcatatgaaaaggtgctcaacagcattaatcatcagagaaatgcaaaccaaaactactatgaattatctcaccccagttaaagtggctttttcttttcccaaaagacaggtaataacaaatgctggtgaggatgaaaagatcatacactgttggtgggaatgtaaatttgtacatctactatagagaacagtttggagtgtcctcaaaaa

SEQ ID NO: 267624 - DNA, 585 bp, Homo sapiens
ctcaaatcaaaatggattacagacttaaatctaagagcccaaactatgaacctactacaagaaaacattggggaaagtctccaggacattggtctgggcaaacattttttgaacaatacctcagaagtacaggcaaccaaagcaaaagtggacaagagggatcacatcaagttaaaaagcttctgcacagcaaaggatacagtcaataaagtgaagagacaacccatagaatgggataaaatatttgcaaattaaccctctgacaaggggttaataaccggaatacataagaaactccaataattctataggaaaaaaatgggcaaaagatttgrattgatacttctcaaaagaagacatgcaaatagaaaacaggcatatgaaaaggtgctcaacagcattaatcatcagagaaatgcaaaccaaaactactatgaattatctcaccccagttaaagtggctttttcttttcccaaaagacaggtaataacaaatgctggtgaggatgaaaagatcatacactgttggtgggaatgtaaatttgtacatctactatagagaacagtttggagtgtcctcaaaaa

SEQ ID NO: 267625 - DNA, 556 bp, Homo sapiens
tttgcagatgagtcaataaaaattttccaaagtaaaatataaaaagaaaagaaaaacaggagaaaaacagaaaagagagcttccaaagctgtggaatgtcatcagacaatgtaacatacatrcaatcagactactgaaagagcaacagaatgggagacaaaaatatctgaagatataattggtaataattttcacaaaaataaaggatatcaaacctcagatttaacaaggtaagagattcctgagctaaataaatgcatacacacagagatacatacactcacacatgcatacacaacttccatatcatatttcaactgctttaaaccagaaatacagaaaaatctaggaggtagacagaaagaaaaaggcacagatacacagtgcatatagttgcaaagatagaagaaagacatcatacttttcattagaaactatagatgatcaagtaacattagcaatatgctgaaaaaaaatcctgccaaatcaagaaagtaataaccagaaaaagttatttttaaaaaataagatataaatattaattgagacaaaccaa

SEQ ID NO: 267626 - DNA, 487 bp, Homo sapiens
aatggacttattagtagagtggacataactaaggaaagaatctctgagcttaaagatatctcaatagaaattttcaaacctgaaaatcaatcagaaaaagacaaaaaaaaaaaaggaatcccaaattatgggacaactacaaaaggtatagcatatacataatgggtatatcagaggagaagaaagaaaagaagagaaaaaacaattgaaacaaggactgagaatgttccccaaattagtgtcagataacaaaccagagatccagagcaytcagaaaaccccaagcaatttaaatgccacaaaaacacctgggcatattattttcatgctacagaaaatctaaggtaaagagaaatcctgagaagagtgatgtcaaaaaccatggtggaataggaggctcctgacctttctcctacagattcaccagataaacatctatacatgtgtaagttcctccagaagaaagtcagaaatgagttgagagact

SEQ ID NO: 267627 - DNA, 592 bp, Homo sapiens
aacaaacctgcacgttgtgcacatgtaccatagaacttaaagtataataaaaataaataataataaaaataaaacctkaagaatccaggaataaaattgttctttaaaaaaaaaactcatgccataatatttatttttgaaaaaaatataaaatccatttctactgacatatcattggacattaccctagttcttaccttgcttttgaaaaatctctgtttacacttggcaattaataagcctcttggttgcttattttcatagattcacataaatactaaggagcataaaactttcttcatcttatatcttcttcataaaaatgataaaatttaaatcaagtatttaagtgctacatataaagccacattctgctttttaaggacagaattttatttaaaactctgtttcctggttcttaactatccccctttcccatttctctgtctcttacttttttctctctcatgcaggcatacctatgagatattgtgagttcagctccagaccactacaatgaagtgagagtatctcaatagagcaagtcacacaaacttctttagcttcccaatgcatataaaagtttgtgcta

SEQ ID NO: 267628 - DNA, 620 bp, Homo sapiens
tttccatagctactaaaaaggcatttgttaaacattcaacattcattctcatcaaaaactcttcataacataggtctgaatagatatttctttaacatgataaaataggtctactgaactcattagctagaatcttgcttaatcaataaatgagataatattttcataaagaaaggaacagaccaaagatttctactgtcatcactgtcatttaacatagagttgagtgataagtcatcaacattaggtaagatatgcaagaaagaataaccaagaaaattctgaaaaagaaccagaatcaaggagggctaatcatactagatactgaaacacatgataaacctacaataattaaaatgtacccagacagtatattagaaaacaatatgtaacccacaaatttgttccattttatctgggaattaatgtgggaagaaggtatcattttctgtcagtaaagaaagcaacwcaataataaaagagttgggaataataactcagtagacatatggaagagtgaccctgggtccatgtcacatgggttttgttctggaggtgtccttcccaataagggtacagaaaaaaggagaagaaaagcctgctgactggaagccagcagt

SEQ ID NO: 267629 - DNA, 620 bp, Homo sapiens
tttccatagctactaaaaaggcatttgttaaacattcaacattcattctcatcaaaaactcttcataacataggtctgaatagatatttctttaacatgataaaataggtctactgaactcattagctagaatcttgcttaatcaataaatgagataatattttcataaagaaaggaacagaccaaagatttctactgtcatcactgtcatttaacatagagttgagtgataagtcatcaacattaggtaagatatgcaagaaagaataaccaagaaaattctgaaaaagaaccagaatcaaggagggctaatcatactagatactgaaacacatgataaacctacaataattaaaatgtacccagacagtatattagaaaacaatatgtaacccacaaatttgttccattttatctgggaattaatgtgggaagaaggtatcattttctgtcagtaaagaaagcaactcaataataaaagagttgggaataataactcagtagacatatggaagagtgacyctgggtccatgtcacatgggttttgttctggaggtgtccttcccaataagggtacagaaaaaaggagaagaaaagcctgctgactggaagccagcagt

SEQ ID NO: 267630 - DNA, 557 bp, Homo sapiens
ctgctcctgcctttgctttgtgaatggtgacctagattcttagtgggtgaaacaaggttcttccctatgcagcaccttcttgcctctccagtctcatttctccctaatgcacaatccacagccartgatcctgctccaacttcatttggtctcacttgagtgacaaatgccataggtgtcatgtcagccttctccaggaagcctttcttaactgccaagagcaagtcgaatgtaaactcattgcactctctcagcactctctggatacattgggtcttactcctcacattctctgagaagagcagaagagaagggccttgtcctacctaccggttaatcctcagcacatgcttgtggcaggtgcctagtaaatgctttaataaaactagaaaattctcaagacagcaggttgctttcagaatatgtctgaatattgcagttcattggagtggattgacagtccgtggtgaataaacaaggtcaagtttgggagattgagctacagtagctcaggcaatcctatgtctttccacgaattgatcaaaactatgcaactt

SEQ ID NO: 267631 - DNA, 595 bp, Homo sapiens
gttaagagaccacactggagtagatgggccactaattcaacatgattaatgcccttataaatagaagaaatttggacacagccatgaacacagaatactgtgtgaacatgaaggtagaggtcagagagatacagcagaagccaagaaacaatggatgttggcaaaccatgaaaagtagggtgaggggcatagaatgcattctcccacacagccctcagttggaaccagccctgccagcacttgatcttagactcccagcctctggagtggggagacacattttgctgtctcgtttgtggtgctttgttacagaatcccaagcaaactaccacaygcagcacatcacaccttccgtggccagaatgcaggactcctggcacaggttagcaggtcctttgctcagtctcatgaggctccaatctgttagttgggctacattctcatgtcatctggggcagaatctgtgttggcagaactcacttcctcgtggctgtgttactgaaggccacctggaggccacccacagttcccttccatgaggccctctccataataaataaaaatcagaaaaatgttatctccacaacatagtggt

SEQ ID NO: 267632 - DNA, 529 bp, Homo sapiens
agtgtggaaatggactaatacaatggaataatactcagccataaaaagagtgaaatcatgtctttttcagcaaygtggatggaacttgaggccattatcctaagtgaaataactcagaaacataaaagcaaatagcacatattctcacttatgagtgggagctaacaatgggtacccatggatagacagagtggaataacatgctggagactccgaaaggtaggagagtgggaggagagtgagtattgaagattacctattgagtacaatggtacaaagaagtatacaactaaaaagcattcctatgtctcaagactccaagaaagaaaatggctacaatcttcttctaattttcaatttcatttttctctctttgtcattattggaaaaagcatgttattattatgttattgtgtatattactatgtattatatatatattatacctatataatacatactagatattagatgaatatataatttcttatagttattacttctccttcctttattttttaagccagct

SEQ ID NO: 267633 - DNA, 529 bp, Homo sapiens
agtgtggaaatggactaatacaatggaataatactcagccataaaaagagtgaaatcatgtctttttcagcaatgtggatggaacttgaggccattatcctaagtgaaataactcagaaacataaaagcaaatagcacatrttctcacttatgagtgggagctaacaatgggtacccatggatagacagagtggaataacatgctggagactccgaaaggtaggagagtgggaggagagtgagtattgaagattacctattgagtacaatggtacaaagaagtatacaactaaaaagcattcctatgtctcaagactccaagaaagaaaatggctacaatcttcttctaattttcaatttcatttttctctctttgtcattattggaaaaagcatgttattattatgttattgtgtatattactatgtattatatatatattatacctatataatacatactagatattagatgaatatataatttcttatagttattacttctccttcctttattttttaagccagct

SEQ ID NO: 267634 - DNA, 529 bp, Homo sapiens
agtgtggaaatggactaatacaatggaataatactcagccataaaaagagtgaaatcatgtctttttcagcaatgtggatggaacttgaggccattatcctaagtgaaataactcagaaacataaaagcaaatagcacatattctcacttatgagtgggagctaacaatgggtacccatggatagacagagtggaataacatgctggagactccgaaaggtaggagagtgggaggrgagtgagtattgaagattacctattgagtacaatggtacaaagaagtatacaactaaaaagcattcctatgtctcaagactccaagaaagaaaatggctacaatcttcttctaattttcaatttcatttttctctctttgtcattattggaaaaagcatgttattattatgttattgtgtatattactatgtattatatatatattatacctatataatacatactagatattagatgaatatataatttcttatagttattacttctccttcctttattttttaagccagct

SEQ ID NO: 267635 - DNA, 529 bp, Homo sapiens
agtgtggaaatggactaatacaatggaataatactcagccataaaaagagtgaaatcatgtctttttcagcaatgtggatggaacttgaggccattatcctaagtgaaataactcagaaacataaaagcaaatagcacatattctcacttatgagtgggagctaacaatgggtacccatggatagacagagtggaataacatgctggagactccgaaaggtaggagagtgggaggagagtgagtattgaagattacctattgagtacaatggtacaaagaagtatacaactaaaaagcattcctatgtctcaagactccaagaaagaaaatggctacaatcttcttctaattttcaatttcatttttctctctttgtcattattggaaaaagcatgttattattatgttattgtgtatattactatgtattatatatatattatacctatataatacataytagatattagatgaatatataatttcttatagttattacttctccttcctttattttttaagccagct

SEQ ID NO: 267636 - DNA, 622 bp, Homo sapiens
tgtttactaaaaggcacatatctaacgggaaaatactaagaggaacatatctgatgggaaaataccaagaggcacttattttatggtaaaataaagttctagtaytaagaaaccattttcttaaattaagcaacttggtgaagccctgctaatgaattacctaatcctgatatagaaaaatttttctttcttatgtgatagaatagattgtaaataaatgcagaatgctgtatttggaagataacttatccttagaacttatgagagggttattttcaagggaatgctttgtactctatgtaaagtcaacatcatcagtagagtttgattaatcatctatatcactgaacactcattctgttttgtatcatttcagggctattatttgccctttttcctactgtaatgttctcaccttgatttcaacaagtttttcacacaagatattaggtactaacagacccaaggagagtgggagatgtccttatggtgttctattaaaaatagcaaaaactgtcaaagacaaacctgagatcactgttgcaatgtaattgcttcattaaagctttataggagttgcagaaatcttacttctttagtaatacttcgaaggcattttata

SEQ ID NO: 267637 - DNA, 622 bp, Homo sapiens
tgtttactaaaaggcacatatctaacgggaaaatactaagaggaacatatctgatgggaaaataccaagaggcacttattttatggtaaaataaagttctagtattaagaaaccattttcttaaattaagcaacttggtgaagccctgctaatgaattacctaatcctgatatagaaaaatttttctttcttatgtgatagaatagattgtaaataaatgcagaatgctgtatttggaagataacttatccttagaacttatgagagggttattttcaagggaatgctttgtactctatgtaaagtcaacatcatcagtagagtttgattaatcatctatatcactgaacactcattctgttttgtatcatttcagggctattatttgccctttttcctactgtaatgttctyaccttgatttcaacaagtttttcacacaagatattaggtactaacagacccaaggagagtgggagatgtccttatggtgttctattaaaaatagcaaaaactgtcaaagacaaacctgagatcactgttgcaatgtaattgcttcattaaagctttataggagttgcagaaatcttacttctttagtaatacttcgaaggcattttata

SEQ ID NO: 267638 - DNA, 622 bp, Homo sapiens
tgtttactaaaaggcacatatctaacgggaaaatactaagaggaacatatctgatgggaaaataccaagaggcacttattttatggtaaaataaagttctagtattaagaaaccattttcttaaattaagcaacttggtgaagccctgctaatgaattacctaatcctgatatagaaaaatttttctttcttatgtgatagaatagattgtaaataaatgcagaatgctgtatttggaagataacttatccttagaacttatgagagggttattttcaagggaatgctttgtactctatgtaaagtcaacatcatcagtagagtttgattaatcatctatatcactgaacactcattctgttttgtatcatttcagggctattatttgccctttttcctactgtaatgttctcaccttgatttcaacaagtttttcacacaagatattaggtaytaacagacccaaggagagtgggagatgtccttatggtgttctattaaaaatagcaaaaactgtcaaagacaaacctgagatcactgttgcaatgtaattgcttcattaaagctttataggagttgcagaaatcttacttctttagtaatacttcgaaggcattttata

SEQ ID NO: 267639 - DNA, 612 bp, Homo sapiens
atctgtttaaaatagtaacaataataaataataataatacaaacagggcatttccaatgctgcagaaaatgatgtcataaaacttaaacagatgatcagatgatgttgcaactaagaagttaaatagataaatttaaaaggaggttgatctctgttgagactgattagtgaatttgatataagtggtcatgggcaaaaaatatatcagagcatttagcaaaaatataaaagagagtaatatgaaggaaaagaaaagagatttggagggtagacttaatgctcaaataaagaacgtttcagaaggaaaaaaaaatatttggaggacacgtacagatatatacagtaaataaggaaatatatgtataaatttccccttgttgaagaaatatgcaaatctatgaattgaaattgttccctaagtttgacactggattgatraggaaagttacatctaagcatattctgctctaattctgaacaaaagatcttacggaatcccattaaaaaagcattagagaaccctatttaagcaggggaaaaaaaatccagactggcacctatcgcacctatccatccaattgcaatataagaaactagaaatcaggaaaggaa

SEQ ID NO: 267640 - DNA, 612 bp, Homo sapiens
atctgtttaaaatagtaacaataataaataataataatacaaacagggcatttccaatgctgcagaaaatgatgtcataaaacttaaacagatgatcagatgatgttgcaactaagaagttaaatagataaatttaaaaggaggttgatctctgttgagactgattagtgaatttgatataagtggtcatgggcaaaaaatatatcagagcatttagcaaaaatataaaagagagtaatatgaaggaaaagaaaagagatttggagggtagacttaatgctcaaataaagaacgtttcagaaggaaaaaaaaatatttggaggacacgtacagatatatacagtaaataaggaaatatatgtataaatttccccttgttgaagaaatatgcaaatctatgaattgaaattgttccctaagtttgacactggattgataaggaaagttacatctaagcatattctgctctaattctgaacaaaagatcttacggaatcccattaaaaaagcattagagamccctatttaagcaggggaaaaaaaatccagactggcacctatcgcacctatccatccaattgcaatataagaaactagaaatcaggaaaggaa

SEQ ID NO: 267641 - DNA, 612 bp, Homo sapiens
atctgtttaaaatagtaacaataataaataataataatacaaacagggcatttccaatgctgcagaaaatgatgtcataaaacttaaacagatgatcagatgatgttgcaactaagaagttaaatagataaatttaaaaggaggttgatctctgttgagactgattagtgaatttgatataagtggtcatgggcaaaaaatatatcagagcatttagcaaaaatataaaagagagtaatatgaaggaaaagaaaagagatttggagggtagacttaatgctcaaataaagaacgtttcagaaggaaaaaaaaatatttggaggacacgtacagatatatacagtaaataaggaaatatatgtataaatttccccttgttgaagaaatatgcaaatctatgaattgaaattgttccctaagtttgacactggattgataaggaaagttacatctaagcatattctgctctaattctgaacaaaagatcttacggaatcccattaaaaaagcattagagaaccctatttaagcaggggaaaaaaaatccagactggcacctatcgcayctatccatccaattgcaatataagaaactagaaatcaggaaaggaa

SEQ ID NO: 267642 - DNA, 612 bp, Homo sapiens
atctgtttaaaatagtaacaataataaataataataatacaaacagggcatttccaatgctgcagaaaatgatgtcataaaacttaaacagatgatcagatgatgttgcaactaagaagttaaatagataaatttaaaaggaggttgatctctgttgagactgattagtgaatttgatataagtggtcatgggcaaaaaatatatcagagcatttagcaaaaatataaaagagagtaatatgaaggaaaagaaaagagatttggagggtagacttaatgctcaaataaagaacgtttcagaaggaaaaaaaaatatttggaggacacgtacagatatatacagtaaataaggaaatatatgtataaatttccccttgttgaagaaatatgcaaatctatgaattgaaattgttccctaagtttgacactggattgataaggaaagttacatctaagcatattctgctctaattctgaacaaaagatcttacggaatcccattaaaaaagcattagagaaccctatttaagcaggggaaaaaaaatccagactggcacctatcgcacmtatccatccaattgcaatataagaaactagaaatcaggaaaggaa

SEQ ID NO: 267643 - DNA, 353 bp, Homo sapiens
tacagaatgagaggtgatatatgtcacaaaacactcctttttgtgcaacaaacgccagccaaatatgaaggaaatattattactattagagtaaagctatcccatccataaaacctaagaggttaacaagaaaaatatggcttccatttggggacttttttgatttgactgtctcataytgaggtgagaaaattataactctgaagaggaacagtatcattcctaagtcctgagacatattagaaaaactcatcaaagaatatccttcttcaatcgtgctttgattctgtaacagtaggcatcggcaaactattcttaaagggtggctagtatacccttggacttttcaagcc

SEQ ID NO: 267644 - DNA, 591 bp, Homo sapiens
tataatatagggagtgttacagtaagttattattaaatatttttyaaaaacaataaatatataaacattttatctaaataaaatgtgtagcatttggatacaaaatattatctagaaaaaaagagagaagtgggcaaatagaattaatatttgctgatataaaatacattgacaacatcctaaacaaaaggatagattcccaggaaatactgtatcagtcttacaggttatttatgtaaactgtttacaaatctattagctctaaagggaaaatgagctttctgaaaaaattacaactgtggaaatctttttgttcttttgctatcatagatgccctgctataaacatcagtcagtaaaaggtaaattttatataatgcgtagatggttgtgtacttttcattattgtgcattactttctatggctgtaattcccaaggtaaattagaaactcaaaagtcatgatcacttacttgtgtcatttattccacaaatggaattacaacattctacaataactaagtgggggcatcaagattggaaaatcctcctgtaaggtatgaacttttccttttagttataatgacctggt

SEQ ID NO: 267645 - DNA, 548 bp, Homo sapiens
cagtccaccattgataggaacctgtgttgattctatgtttttgctattgctaacggtgctgtaattaacatacagacacatgggtctttttggtagaaggatttatttttctttgggtatccagtaatggggttgctgtgttggatggtagctcaacttttacttctttgagaaatcttcaaactgctctctgcagtggctaaactattttacatttccaacagtgtggaagcattagcttttctctgcagccccaacaagacctgttattttttgactttttaatgaaagccattctggcaggtgctagatggcatattactgtggttttgatttgcatttatctgatgatttgtgataatgaacattttttcataagtttgttggctgcctgtgtgccttcctgtgggaagtgtctgttcttgtagttygcctgcttattaataaggttatttgtgttttgtttgttgatttgtttaagttccttgtagattcaggatattaggcttttgtcagatgtgtagtttgtggatactttctcccagact

SEQ ID NO: 267646 - DNA, 542 bp, Homo sapiens
ttttttctaaatctgtgaaaaatgacattggtgktttgataggaatagcattgaatttgtaaattgccttgggcagtatggccatttgaacaatattgattcttccaatttatgagcatgaaatgctttcttatttattggtgtcatctgtggtttctttcaacaatgttttgagttctccttgcagcaatatttcacttacttggttagatgtagttctagatattttttctttttgtggctattgtaagtgagattacatatttgatgtggctctcagcttgaacattattggtgtacagaaatgctactattttttacacattgattttgtatcctgaaaatttactgaaatcctttatcagttctaggaggctttggtggagtgtagggttttcatggtatagaatcatattatcagcaaatagagatagtttgacttttcttctatttggatgtcatttatttccttctcttacctgattgctctggctaggacttccagtactatgttgaataggaatggtgaaagtggacattct

SEQ ID NO: 267647 - DNA, 480 bp, Homo sapiens
atagaatgagcgagggaggatccttcttccttgactttttagaataggtaaagtagaattcgcacaagctcttctttgtatgtcaggtaaaatttggctgtgactccatgtagtccaagccttttttgattggtaggatttttattacagattcaatttcagaactcattatcattattattgttattattatactttaagttctgggatacatgtgcagaacgtgcaggtttgttacataagtatacatgtgccttggtggtttctgcacccatcaacctgtcatctacattaggtatttctcctaatgctatccctcccctagctccccaccccgcgacaggccctggtgtgtgatgttaccctccctgtgcccatgtatcagaactcattatttatctrttcagggtttcagcttcttcctggtttaatttgggaggttgtgtgtttatgggaattgtccatttcctcttaatagac

SEQ ID NO: 267648 - DNA, 529 bp, Homo sapiens
cacagttaggtgaaagaaaggttttgtttgtcaaattcattattattgtatggtgattaaagtttatcttttctttttcagatttttgcatagcaacaaattatctaaaattccagctgggagcttttctaatctggattcattaaaaagattgtaagtgaaagcaagtgcattaacacaaaaaccttttataatttcctccaaaatccatcccaaacaatggttggttgccttctcctgcttttcctgtgaaagacattgcaattctagcatgttagggagaaaatggttttgttaactgcagagcratagagaacccagatagtcttctgggctttcatgtattctcttagaagtgacattcaaaaggagtattgaaaatagacgttttcctcgtttctctgtaatatccttgctggctaaatctaaaggctcccaagacttctttttcctttaactttttcatgagataagagatgtgagaagttccaaagaaagtctgactcctcgggccaggcttcagttttcc

SEQ ID NO: 267649 - DNA, 560 bp, Homo sapiens
ttcacccactcctaatccttttcttcaagtctttatttccttctttcttggtaattctcatgtcagacacacataatgctgcttcccagkcttcttggtgttctttgattgtatccaagccctcaaaagtcttggatatggtcatcaactgaccatatctatctgtctatctaatctatctgtaaaggggtacaagtacagatttgttacatggatatataacatagtggtgaagtctgggtttttagtgtaaccatcaccttaatagtgtgcactgcacccattagataatttctcatccctcactcccaccccacccttccacttttttgagtgtccagtgtctattatttcactccctacgtccgtgtgcatgcattatttagctcccacttgtaagcttgaaaacatgagacatttgacttcctctttctatttcactaaagataatggcttccagttccatccatgatgactctgctttttgccaaagttttcttacttgtcagaactggctgcaacagccatttggaataacacatccatttattcttgttttt

SEQ ID NO: 267650 - DNA, 595 bp, Homo sapiens
tccatattgatgccaaggagtttacaaaagaaaaaagccaactcctgggggagctgcgtggatcacacgtcacatttataagcctcctttgggcagcaaagcttctaccactcttttgagtaatccaaaaatattgaaataccaccaccacattacagcttccttgttctgtaacacataaacaaagcaaactggaacacttcagtgcttacagsttttttgtttgtttgtttttgcttttgggacagggtcacactctgtcacccaggctggagtgcagtggtgccttcatagctcactgcagcctccaactcctgggctcaagtgattctcccacctcagcctcccaagtggctgggactataggtgggtgccaccatgcttggctaactaaaaaattgtagacacagccataaaaaagaatgaagtaatgaattaatgcaggaacagtaaaccaaacaccatatgttctcacttataagtgggatctaaatattgggtactcatagttataaaaatgacaacgatagacactggggactactggtgagggaagggagggaggggggtgagggttgcaaaactattgggtact

SEQ ID NO: 267651 - DNA, 603 bp, Homo sapiens
aacacaaaatgatgtaagcaaaacaaaacccaaacacagtttctttgaaggyatttttcaatctcaacatattaaaagtttaaaaataacgtttgggtcctttaaaagtaatttcccccagaagttaccaaagacctcaagaaaatatttcatttctgtgccttcttattagagcaaggaaagtatttttgggatattagcagttctagggaaaaacacaattttttttcctgagacatgtaaataggaataagaaagtattgatctattgctattaaaggagttgatgctaaacagttcaatttagaaaacattctctgaatgcaggaagactaggctggaggaagccttgtgctttgtgggggccaagatcactcttggggccactggggctcactgttctgaagccctcccaacccaggcactgcactaggctggccacttccctttttctctgttctgtgtttcacacggttcagtgttttggtagataacatcctatgcaaatcttaaaataatgaaacttaactcaatcaaaatatgcacatatcaggaagcccctaaaacggatcatgtaaattaccgtactctcatcaactgatg

SEQ ID NO: 267652 - DNA, 620 bp, Homo sapiens
ttttttcatgtccatgatacaccttcgataattaatttaaactatttttttttactatccacaaaagaaggcacttatttttccccacaattacctgcagatgttctaatacctgtttttgtccagacaataacaggaggtgggttgccgtcagcttcacagagccactctacagcatgttcttccagcaccacttgatccttgggggttactgtaaattgtggaggagctaaagagaatgaaacatacatcaaaattgaaaattattttacaaattttcagtgccaatagaaaaaagaaaatgtcttcaaatatgtcatgtratcagaatttgtttacaattatatataaacaaggttataaagagtgtggaggtgcttctgtatgtttgtgcctgtttgcaaggaagccagaaatacacacatctggtctgcaaagcaaaacagcagtagccaacaagaagaaaccatttctaaatcttacggcagctgtttcccatgattgaatcatattggttatcattttagtagatgtgataaacatatttaaagctacaaattgtactttaaactattaacaaaaccgtcttctccaaactttcacatgcacaataaaatttg

SEQ ID NO: 267653 - DNA, 571 bp, Homo sapiens
aatctacctgctttagcctcccaaagtgctgaaattacaggcacaagccactgtgcctggcccgatgtatgttsgtagggccttttggctttgtttctgtgttgtacattcagtggcaaagaactctgtataatttccttgtttataaatagctttactgtggtggctttcccaaatgccagttttatgagtgttgtatcatgctcgtggtttaccatgagcaggctcatgacctcctgagtagctggggttgtgtgagcaacagtggtagcagaggtcaagagaaacttatctctttcccaaccatggtacactttgtgttggcagatgttgtattaggctgtgcaggtcaacctccaggccagtaggtggttcttgcagttaagagtttgttacaggggtagcagtagagtttatgctaaatccctgttaaccaggaaaggtactcaggtgttacagacaatgctgctgtgctgaggtgccggcctgggcgggaacaggtattgctggcctttaagccaggcagttgggactggaacccaccttccttccctctcaagatgcagtgggg

SEQ ID NO: 267654 - DNA, 546 bp, Homo sapiens
tgtatcatgctcgtggtttaccatgagcaggctcatgacctcctgagtagctggggttgtgtgagcaacagtggtagcagaggtcaagagaaacttatctctttcccaaccatggtacactttgtgttggcagatgttgtattaggctgtgcaggtcaacctccaggccagtaggtggttcttgcagttaagagtttgttacaggggtagcagtagagtttatgctaaatcccygttaaccaggaaaggtactcaggtgttacagacaatgctgctgtgctgaggtgccggcctgggcgggaacaggtattgctggcctttaagccaggcagttgggactggaacccaccttccttccctctcaagatgcagtggggctcaatcacctgtcctgaccaagggagcttttcgggatattcagtaaaaagtcacacattgtttactttcagtctacaaggctgccctggaccataaaacttgctacccaggccaaaaccatgcctctcaggcaaatatcttccttctctagtcccatgaaagggagcc

SEQ ID NO: 267655 - DNA, 615 bp, Homo sapiens
gtctagcccatggtaggtagggcttataatttatttgggaaataattttagtaatgctaggcaattcagaatagtaagaaacaaagactggaagaaaaaggttgggaaataacccagtaacctacttaacatccagtacacgatgcacaaaaatggggctggtgtaattggagcagaattttgtcctaagcatcctatgtggtaaacaatttgaatggatatgggatccaagtctgaggctaaataaaagcaggtggtaaagattctgggagaccagttctttcacggcagtacagagagagaattctgcctctccaggtgtgggactgactgtggcaggtttatcagaactctagctcaacatgttgagatacagacttgagcaccagtcttatccagtcctgtggaaaattgtaatgataamcaatgaaactgaggcacaagtcaagttgcttgtggtacagaaaggctctccatgaccatgcaaattgcttaggttcccccacttatccttatatccagacacgttggagactatgtttatagcagaagactaattttacacaccatctgctggtagactgagactagtaataagcctcctgtttagaaaaa

SEQ ID NO: 267656 - DNA, 601 bp, Homo sapiens
gaaaatagaggttcagagaaatcaagttacattcctgaggtcacaaagcttgtagaggtggaactaggattcaaccttgagtatgtctgacttgaaagccagtgatagttctgataactcaaattgtgcagttgagctcatcctccttgtccctctaccccaaactctcaaatttaatgactattggactatggttaaggtatcatagaaaaagttccaaataaaagagtcaggagaccctagttaattaaccattactttctctgtgacttcattcccattgttaggagtatgtctaaatgatttttaaggtctctaatagttctgacagtctgtgactctgagattttaaaatatttttatgtaacaacttccccatggaaaggtcatagccctgaaaaggtcatagccctgtgagttgcctgtagtgggaagataggaggataaaactctcagagaaattgaattgagttctttgggtttatcaacatgaaaaataggtacytagctgccagaatgtaaaggaataagtccttgggagataaacttagttaaggcagagcctcttctgtgtcaacactgtcagcagcaacctcagtca

SEQ ID NO: 267657 - DNA, 547 bp, Homo sapiens
ttttttgcttgagactagccagaggctaaactatatttttttaaatgtcataatatttatcacaatctttctgagtatatgaccccaaacactgtataatctcttccaaggttatatgaacataggaattatttactttttaaaagctgaaatagctatttccaaaattctattcaattttgtttgtttggatttatcgtaattaacaaatagttttgtcctatttttatgaaggtagccttcatccctctgtaatgatgttatgcccacatgttctttttgcttcatggttgtcatcaccacaaatagtttccccattacrtcacacaggtatacccatcagcaatctaaaactagagtcatataccataaatactaagatttctttacattaactttgttaaaaagtaattttggtgaagatgccatcagtaatgttaccttcactccaaaatattgaacttaaatctagaaaatatagtagcatgggtcctaaagtcttacataataataatgctagtaccaaaatgttatctattgaattaaa

SEQ ID NO: 267658 - DNA, 411 bp, Homo sapiens
ggaccagtttcattcttctgcatatgaatagccaattatcaagaaaagacttttggataagatccaaaagagcacaactcttacaggaaaagactgataaagttgacgataatcaaatgtaaaacttgtatgataatctagtgtaaaaggcaaacagcagtctgggcacaggcctgtaattctagtactttgggagacwgaagcaagaggatttcttgagcctaggagtttgagaccagcccgggcaatgtggcaaaaccctgtctctactaaataataataatgataataataataataataatcagtaattagccaggcatggtggcgttcacctgttgtcccagctactcagggtgctgaggtgagaggattgcttgagcctgggaaatcgaggctgtggtgagctat

SEQ ID NO: 267659 - DNA, 577 bp, Homo sapiens
gaaaaaaactgcaaagagctaaatattattcagaaggaataaataattgtggcctagtcataatgtataattttagatagcagttaaaattcatgaacagtacactaatttttgacaatataaatagatcaaaatactagactgaataaaaaaatgaattgaaggtttttatttatttatttattgagataggacatggtggagtgcagtggtgtgataatggctccactgcagctttgaccccttgggctcaagtgatcctcccactttagcttcccaagtagttgggactacaggaatgcaccaccatgtctggctattttttatttttattctatttttttagagatgggttgtcgctatgttgcctaggctagtcttaaactcctaggctcaagcgaccttctcaccttggccttccgaagtgtgaggattacagcattgaaccaccatgcttggccttgaagagacctttagtacagtatggtagtatgtatgtraaaatttaaaaacacaaaagaaatataatacccatgtatatttaagaaaaatgtaaaatatcaacttgaagaatgtg

SEQ ID NO: 267660 - DNA, 436 bp, Homo sapiens
cttattcaggtctgctatgcaaagaccaggggattctgaaaaatgggatgtggatatctttatagatgtcctgagaatttgaccttatgaccccctttctgctagctctgacttttatgtatttaacattttttaaaaattttctaaaacattttaatagacatactttccaagaatgttatgtactgcagttgttcactgaagattcattaagcatccatttattgagtgtcccctattgctgagaactctgctggaaggtgctacgtaggcccttgggacacaatagtgagaaagggagccttagtataaattcatggagcttacagccaaaagggagagacaaaatttaaataagcaagcccagaaatgaacaatattaacwattgtgacaagagtgtccaaggaaaaagaataaagataaatgaaagggtca

SEQ ID NO: 267661 - DNA, 417 bp, Homo sapiens
tatagaaatgacatgaagttgagaataaaatcataagtgacacttggtccagtgaaaacyggggaaagacccttccaagtagaggacaacagtctgcctgtgtgtggagaggtaacaaaaagccaggtgccctggggcaaagacagagggctcatgtgttggaactgcccagctatccagggcacttgtacccaactccctttcctctctctcttccctcagggtcagcctgatataattctcttaatgcttctagttctctactaatgttcctttataggtgtttctccttataaaatccttgcatgcttaccgccatcctggtatctgctttttggaggatccatatgaacacaagcagtagaggaaggcctcggtgaaaaggtgatgttaaattccattgagcctaaagctgtc

SEQ ID NO: 267662 - DNA, 613 bp, Homo sapiens
agagaaacccaaatcaaaaccacaatgaggtaccatctcacaccagtcagaatggcaattgctaaaaagcctaaaaataacagatgttggcaaagttgcaaagaaaagagaatgctcatcagccgttggtgggattgtaaattagttcagcccgtgtgaaaagcagtctggagacttctcaaataactaaaaacagaattgccatttgaccgagtgatcccattactgagcatatacacaaaggaaaataaattgttctacaaaaagacacatgcagttgtatccttttcatagcactattcacaataccgaagacatggaatcaatccaggtgcctatcagtagtgaaattggataaagaaaatgtggtacatatacaacatggaatactatgcagccataaaaagaacaaaatcatgtcctttgcagcaacatggacacagttggaggctatcatcgtaaaagaattaacacagaaacagaaaaccaaatactgcatgttctcacttacaagtgggagctacacattggrtacacatggatgtaaagatgggaatagaagacactgaggactctaaaaagtggggagggagggagagggaaagagttaaaa

SEQ ID NO: 267663 - DNA, 583 bp, Homo sapiens
aagtctaaccagtaattaaggtgattacaagtgcccagaaacccatagacttaaatatttgattttagacatattcaatttagattctctgttttggagaaatttggacgcaaaccaggaataaaggttttcatgaaatagtaaatagcaggattgttctgtccataatttctaaaattcatcacaatactgtggaaatggttggaaggaatcattacataaaagctctatgagatgggttaccccyttgtggggttaaagtccataaattccaaaaatgaaataaagtaattaatttaacgaatgtgtatagagtgcctgttacgtgtcaggcaatgttctagacttttgagatatacagtgagcaaacaatgctctcagccctctggagcttatattctagttattctagtgggggaggcaagacaataagaacataagaaatgagagtaaatgatacagtataaatcagaaagtgatgacactatggcaaaaaataaaataaaagaataaggagatgagagcagggagatggcctgctattttgaatacactggttaagaaggtgccatggaaaacaaga

SEQ ID NO: 267664 - DNA, 643 bp, Homo sapiens
ttttggtggctgagtagtattatacacacatacacccacaccactttttctttaaattttcttgcctaacaatatggaacttttgctttaaattcatatacattttgctttattataatttacttaaatataatttcataatttaggctcatgctttcatgaatgttttaaataatagtgtctaaatgttggaaaatcctgccatctgctagcatatactatcagtttgaaaataaggtaaagtaagctctgtgaatatgttgagtaaacattcattctctctcacaaccaaaaagtgttaaagacatcaaaagataaatatgatacatagttcatttcctaaataacctttaaaaatgagatgctctggaaaaaatcatggtgatagcagtgttaaataccagcagatggaaaaartatttaaaaaacaaaccagactagggcgagacagtcagaaaaactcagtatgaacaacaaagaaaaaaagcatactaatcttgggattaagaactgggtaagaaatagatctccctgggagctggttacagaatgattaacaaggtcagattacacttcctatcaagtttccatcaggtaaattgatggttttcagttgatctctgccaaaacaaaaaaacaaaca

SEQ ID NO: 267665 - DNA, 494 bp, Homo sapiens
aagacatcaaaagataaatatgatacatagttcatttcctaaataacctttaaaaatgagatgctctggaaaaaatcatggtgatagcagtgttaaataccagcagatggaaaaagtatttaaaawacaaaccagactagggcgagacagtcagaaaaactcagtatgaacaacaaagaaaaaaagcatactaatcttgggattaagaactgggtaagaaatagatctccctgggagctggttacagaatgattaacaaggtcagattacacttcctatcaagtttccatcaggtaaattgatggttttcagttgatctctgccaaaacaaaaaaacaaacaagaaaaaacaaaaacgaaactcatttagcaatttttgtcattagataaaacaagatgtgtttatatatggagaataaagcaggttcattgctcacataattttttaaaataaaatcatggaaattcacctcttgtaagcttgaatattataa

SEQ ID NO: 267666 - DNA, 554 bp, Homo sapiens
gtagtgacagggtctcattattttgcctaggctggtctcaaactcctggcctcaagccatcctccacttcccaaagtgctgggattacaggcgtgagccacttgcctgggttggtatgaattatttaaatrataaggaagcataaactgcaggttccaaatattgtttatgtgagcacacaacactcttttttcaggattaaccaggtaatttcaaactaaacttttagtcaagaagataacttgtgagtattttttgtaagtaaaatgtaggaatagccgtgagtggaaaacatggccaatttaagacaactccaataatgtatttggaatgaatggttcttccagaaaatgaatcggttgcaaaatccaactagctgattgtgcatgtgcacagtgtagctcttcaacattgctcagctttgtatgggagccatactgaactttaaggatgtgctcatcttacatagcataataggctccttgaaaatgacttgtgtgtaaaaatgaacatccatagaaatatgtatgatcttactgatacaaactaaagaa

SEQ ID NO: 267667 - DNA, 535 bp, Homo sapiens
tgtagctcttcaacattgctcagctttgtatgggagccatactgaactttaaggatgtgctcatcttacatagcataataggctccttgaaaatgacttgtgtgtaaaaatgaacatccatagaaatatrtatgatcttactgatacaaactaaagaaaggatttgcattttgcatcaattctcagcctgttccagagaccctagcagcagtaggccactgactatacctttacaatcaccaaggttggtgtttctaaagcagtaaagagtaacatctctatactctactggctgtgggggctttatagcgtcactcgcagaagagatgatgttggttgagcctttctgtcttatttgctcttgtttttaattttctgtcgttatattttaatctttcttttatctttggctttttgcatttgcacactgctgagtgggagacagtacccttaatctattttggaaaaacaagactcctctttttatctttagtaagctgtgcttgagctgtcttcatctgtgctgggcttactt

SEQ ID NO: 267668 - DNA, 618 bp, Homo sapiens
gtgcagtccctgatgcagcagattttacatgctatgggacaatacatattaacccaataattactcttaaaattgagtgatgggaaagtactttgagaaagaaacctgtttgtgtgaaaaaatataacaaagaaatattctgtgtactggagttggacaaaagctcaggaagactttcctgtagaattgattaagctgagacccaaaagataagccaaaaagatagctggaatgaaagttgggggtttggaaaaggaatagtgtgtctgacatgattctgaagagttaggaaaggccaaaytatgtagacccttgcaagaaagctacttaatgattctgagtggtgatgctagaggtgtagtagggtggtatacatgtgaagcataattaaaccttatttagattgttaatctgattacagaattgagaagtcaaatgagtggaagggacttacatgattaaaacaaaacagtgccctctccaagttgagttgaagacaggggattgctggagcccacacatgtacacttggaagaacagactgtgtgcatctcttcctaatgctgcattcagtgacatcacactggtagtttgaaatcaaccataatggaggtattt

SEQ ID NO: 267669 - DNA, 616 bp, Homo sapiens
taatttgtaagttttgcttaacttttcaggaaaaaagtaatctagaatatttttaaagaaatacaaacatctatgtacaaataaagcatttttttcaaattttaaataattcccttctgcttcatgggtgagagggcagagatgtgccagaggtgtctactttaggtctccgttgtctcaagggaggagtagaaatccccacctttctgtggaatcctgacaatcagagcatcccctgagagctccttctctgaaagctgccaaccttttctctcacacatatgtttctgtctcctcttaatgatattatgtctacccctatgttactagtgacactcactccccttttagtttctaagtgctctcatttcttcctcattctgaaattatctgggcagcatctcattgattagcattaggtctcttcaccttctaacaaaaactagtctgtgctagagaaggtctcgtccccacctacattccaaggagataaaacctactatataacattttaacttcatatcaaaataatagcctgcctttgtggcttatgacagagaaaaaaactagtggygggagttctcaagcaatttgaaaggaaggatagcttttcagc

SEQ ID NO: 267670 - DNA, 526 bp, Homo sapiens
tgcctcaacaatctaaccccaaccaactgcagactcacacatgcgtccagctgaaatttgcagaagctccctggccaaactgcagattcataacaataaattattattctttcaaaacattaattttggcggggggttgttatgtagcactacagtggcaatagctaaccaatacatcatttgtccagtacaagtgttccartgtatggatccaaacctctcccattatccccttgtacaaaaatgtctaacaaaccttgtccaaagccctaccaacacccaaatcatccaaatactgacttggaaagaaggggaaaggagataaaatctgaaagactaagcatttatttgaaagggactcagttactgcaaagaccatttaagttcttaagtgagggaaggtcgtaaagaaattagaacagccattgataagaagtttgtctcttttttcccccccaatctgagtacagagtgctaaatttgtaactatgttacaaataaacttaaccaaattttaaaacttaat

SEQ ID NO: 267671 - DNA, 562 bp, Homo sapiens
agatccttgagttctggatcaatgaatctgtctatagcctcagacataatctcagtattttaatcaccttcacagataagttatttatgaattaaatttttaaagaaaagcttttaacccagagatttacattttcatttcagagatgcttgaagatgaatctttagttgcccttctttgaccactttagcttgaacaccttcttcatcaagtagtttatatgatttaggactaacagtaaagtgcagatggagccctcactatttaaagagacatatcactgactccttagcaagccaaatattgttttgtaatcaaataattacctcagattatactgatttatgaattcttatctgatcttatattttcttttcttatttggcattgcattttatattttatcttacactatcaaaacaagatatacacrtggctagaaaatcaaatagaagggcttgtagtgaaaagaagcctgctgcttcctctttccaacccacttgcttgctctttagaggaaaccctttaaaaatgttcatttctagtgccttcggagtgctgc

SEQ ID NO: 267672 - DNA, 562 bp, Homo sapiens
agatccttgagttctggatcaatgaatctgtctatagcctcagacataatctcagtattttaatcaccttcacagataagttatttatgaattaaatttttaaagaaaagcttttaacccagagatttacattttcatttcagagatgcttgaagatgaatctttagttgcccttctttgaccactttagcttgaacaccttcttcatcaagtagtttatatgatttaggactaacagtaaagtgcagatggagccctcactatttaaagagacatatcactgactccttagcaagccaaatattgttttgtaatcaaataattacctcagattatactgatttatgaattcttatctgatcttatattttcttttcttatttggcattgcattttatattttatcttacactatcaaaacaagatatacacatggctagaaaatcaaatagaagggcttgtagtgaaaagaagcctgctgcttcctctttccaacccacttscttgctctttagaggaaaccctttaaaaatgttcatttctagtgccttcggagtgctgc

SEQ ID NO: 267673 - DNA, 564 bp, Homo sapiens
atagtactattaatgtgtaaattttgctttctgcagaaccaagttgtgtgataaaattacattttttctcagctactcgggaggctgaggcagaagtatcactcgaacctgggaggcagaggtcgcagtgagccgagattgtgctgctgcactccagcctgggtgacagagtgagactctgtctcaaaaaaggaaaaagaaattacatttcttcttctaagatctaatggcacaattgctgcgctactcaaaggaaacatttctacagtcaggctggaatggattatttttttctctgttccaccacatgcctttaccatattctcaagtttatcaaaaccctcattctatctaattaattgaatccycttctctccctaagactagtatttgaaaacctctcccccctcgctcctatttggactggttactcttcaggcttatgcaaaactataatttggggattgtatacattgttattctggtttggtacttctgtctcccaaagcctatcttgtcttcttccttagtttggttggaatacctacttaagtaactttttaa

SEQ ID NO: 267674 - DNA, 578 bp, Homo sapiens
catctgtttggtggttcactcagcttcctggatctgtggcataatgtctgactttagtttgggaaaattgttaatcatcactgcttaaaatattacttttgttcttttctgtctttttttctccttgtattctattacatatatgttagatcttctgtagttgtctcacagttcttggatattctgttcaaatttgttcaattcttttttctctttattttcagttttggagtttctactgacatattctgaagcacagagatgatttcctcsaccgtgtgcagagtactaatgagaccatcaaagctgtttgttatttctgttacagtatttttgattgtagcagttcttttttgttcttttttagactatccattcttttttagaatatccgtatctctgcttatgttatctatctgttcttgcatgttgtctactttttccattagctgttagtgcccttagtatgtgaatcatacttcttttaaattcacaggctaataattctatcatccctgctgtgttggagtgtggttctgatattttttcagtctcataaaattctgtgttttgccttt

SEQ ID NO: 267675 - DNA, 578 bp, Homo sapiens
catctgtttggtggttcactcagcttcctggatctgtggcataatgtctgactttagtttgggaaaattgttaatcatcactgcttaaaatattacttttgttcttttctgtctttttttctccttgtattctattacatatatgttagatcttctgtagttgtctcacagttcttggatattctgttcaaatttgttcaattcttttttctctttattttcagttttggagtttctactgacatattctgaagcacagagatgatttcctcgaccgtgtgcagagtactaatgagaccatcaaagctgtttgttatttctgttacagtatttttgattgtagcagttcttttttgttcytttttagactatccattcttttttagaatatccgtatctctgcttatgttatctatctgttcttgcatgttgtctactttttccattagctgttagtgcccttagtatgtgaatcatacttcttttaaattcacaggctaataattctatcatccctgctgtgttggagtgtggttctgatattttttcagtctcataaaattctgtgttttgccttt

SEQ ID NO: 267676 - DNA, 582 bp, Homo sapiens
atgacttcctcttcttttcttgcccttctctcccatgatcaaacatggccaactgaacagagtgatgagttttcagggcagcctttccgggaaagcagagaagcatggatctagaaataggatcgctgcagctaaaaaacagaatatttgagacatttaaaccaaaacccaatggtgttttctattttaactgttttattttcttatgccttatttctttcaggtttatgacctgttagtcttcatggatgatacattttaagaaaggaaaaagcaaatcttcaagctaaacctctgcagattggccaagttcttttaaactctatcatctcctgttaacatctctgaactcttatgctatgttgttggaagaatacaaactgcttaatctgtatagatgggatgcagagaggaaagggaaagaaaggaaaatggtaaaccaccaatacagaaacagtgtgactggcatgytaattagcccactgcagataagaatgagagtactgcgtagtacacagaggtgcctcaatgtagaggagagcactgcacggtacacagaggggcctcaatgtagaggagagc

SEQ ID NO: 267677 - DNA, 515 bp, Homo sapiens
gtagagaagagcactgcacggtacacagaggggcctcaatgtagaggatagcactgcgtggtacacagaggggcctcaatgtagaggatagcactgcacggcacacagaggggcctcaatgtagaggacagcactgcacggtacacagaarggcctcagtgtagaggggtttctgtgttgttcacactgcatcacttcatgtttttggctcatttgtggttttaatgcctattgttatattttcttaccactaagatggtcatcagaaagctaaacaaagagtgttatacagcccaagctgttcacttggctggatctccttacaagcataacatgtgaaagttctgttctcgaactgaaagaaaatcatttatgattctgttccaatgccttccttcatttttcattcaaagcattagaataactgatccatatactataaatagaatgagaatggtatgtattttttcttccttgataagtacacaggagtttttgttttattttatttttac

SEQ ID NO: 267678 - DNA, 656 bp, Homo sapiens
taataaaaaagacatactatgctaacactactacgaagcaaaccacagtggctatattatcaaagtacatttcagagcaaagaatattaccagatataaaatcattttataatgctaacaaggtcaattcytcaacaggacataagaaccttaaatatctatgttcttaatatcaaagcttcaaacaacatagagcaaaacccaaaagaacagaaataagaaatgcataatagtcagatttcctcatcccagttctcataatggatagaacaaataaggatagaacagatttaaatacaggaagacaaaaatcagctggaagggattagttaggtttaggagcaagaatcttgtagggaaaggagaaggaatcaacagagggaaagaacggtaacgtcagcttgagtaggatcaatgggtgaacactcctgaggatgctggaaggttgggaacacatgcaaaggtggaggagtcagcccaaagaagacaggcacagacgaaagggaaaatgaagatttaggagcctttcagttgaggagaataaaattaaagaagcctacaaatccttcttctctcctcctgcatttgggttactcagaaccactgcagacaccatgtggtcgtacagatggaagccagtacagatttatggtatc

SEQ ID NO: 267679 - DNA, 656 bp, Homo sapiens
taataaaaaagacatactatgctaacactactacgaagcaaaccacagtggctatattatcaaagtacatttcagagcaaagaatattaccagatataaaatcattttataatgctaacaaggtcaattcctcaacaggacataagaaccttaaatatctatgttcttaatatcaaagcttcaaacaacatagagcaaaacccaaaagaacagaaataagaaatgcataatagtcagatttcctcatcccagttctcataatggatagaacaaataaggatagaacagatttaaatacaggaagacaaaaatcagctggaagggattagttaggtttaggagcaagaatcttgtagggaaaggagaaggaatcaacagagggaaagaacggtaacgtcagcttgagtaggatcaatgggtgaacactcctgaggatgctggaaggttgggaacacatgcaaaggtggaggagtcagcccaaagaagacaggcacagacraaagggaaaatgaagatttaggagcctttcagttgaggagaataaaattaaagaagcctacaaatccttcttctctcctcctgcatttgggttactcagaaccactgcagacaccatgtggtcgtacagatggaagccagtacagatttatggtatc

SEQ ID NO: 267680 - DNA, 597 bp, Homo sapiens
tgtgagggatcataaatgcaatgctaaggagtttggactagatcgcaggcagtggggaatcattgcagtttttaattcaggagaggcccacaagaaagacatattttaattctgttggctaaatggagaatggattagaattgaggggggaggccaggaatgaaatgaaaatgcccagttcatgacttacaacaatagtccaagcatgagatgatcaaggtctagatcatagcagtgcatccagtggtcctaactcagcagaaaaggaataggataagtaaaggtaagagaacttgcagtagggacaaaatgtagatttagtgggaaatggaagggggctccatggttgtaaataggattcaagatcccaaagacagactagttttatccatatgctaacagagttcaaaatgtgaaatatttagsgtggaatttatgattcactgttgtcctgtgggatagcaagtgggtacggtataagatgattttaagtgataaaccaaagccttcagtgaatatcaagaagtgatgagactattggacaatgataggaaaggaatgaaaaatacaactagaaatacaactgtgagaaagcca

SEQ ID NO: 267681 - DNA, 494 bp, Homo sapiens
ctgtgggctaaattcacctgctgtcaagctttataggaacccagctacttccattggtttccatagtgcccgtggttgctttctcaccacagcagcagagctgagtagttgcaacagaaaccttatggcccatggagcagaaaatagtgactctctggccctttacagaaaaagttgtggagtcaacatcaaaaaatcaacaagcttagtgtatggcacatagcagacactcaatataaatataaatctctcccytcctgctgttttgagaaagtcatattaattactgaggggatgtgagaaagtgcttttcacttcatgaccctggactgcagggaacaagttcctttttttcccccaggctgggaaggaagcagtattgttagaaaagaattggtctcagaataagaagatagagtaagggttgcaagaacactctgatgatactaggaagttgtatccatacctcacagaggactttgaaaacagaagct

SEQ ID NO: 267682 - DNA, 565 bp, Homo sapiens
cacaccttctttatagattaaagtccaaatgaaatccatttggagggtgagctagcttcttcaattcggactcttacaatattcaattttgtgaaaatttaagtagacatcaactcatgaaaagatttacaaccagatgaaaaataaatatgaagtctgattggagccaaagaaattcagtagaaaatcaacagttgttcagtaaagtataacccaaacagtcctaggtgaggagggctctcgaggggctcagtggggctctgagcggagcaggcagtgggaaaggagctaagaagcaggtatgtagagattaacagaacctcctcaggcagaaataaaatcatggctgaaggaagaaagaaagacatttccttatttgggccgtgctgcaatgaaaatgacatctggatattttccaagttcccattggtggcaatatggtgccttagagaacctcttctgcacagaaagtacaccatgaggccacccacccyaccacagccaggtcagataaacagcaaaggcctgtcatctgatctgcaggctcacttatttttaaatgtat

SEQ ID NO: 267683 - DNA, 526 bp, Homo sapiens
gaaatggcaaattcatgttatcctagattctggcctactatttcatattttcactgcatacatagttcattccatctgtagtatggcaaattatcaccttttagaaagtaagattacctactaacgtttttctgcctctaaactaaaaaatgcactgaaatagaacaggttgttcaccacagggatattatgtagggcctctgctagtttcccaaagtaaatttccattgtattaatgaaatacatctaatttatcacagcatgactctgttgctgttcttcagagtgtcattgatttattttttaattcaaccaaatcctgaataaaactacatgctctgacatgaatgtacaagttagatggtcctatacaaaatgttgccagatacaaatgcaattctaagatacaaactaaaatgtgagtgttttaaaaaatctatatttgaagaatccatttggttaagaacttaacttagatgacarcagataggacaactgcccttcagtattccaaattgagctctag

SEQ ID NO: 267684 - DNA, 526 bp, Homo sapiens
gaaatggcaaattcatgttatcctagattctggcctactatttcatattttcactgcatacatagttcattccatctgtagtatggcaaattatcaccttttagaaagtaagattacctactaacgtttttctgcctctaaactaaaaaatgcactgaaatagaacaggttgttcaccacagggatattatgtagggcctctgctagtttcccaaagtaaatttccattgtattaatgaaatacatctaatttatcacagcatgactctgttgctgttcttcagagtgtcattgatttattttttaattcaaccaaatcctgaataaaactacatgctctgacatgaatgtacaagttagatggtcctatacaaaatgttgccagatacaaatgcaattctaagatacaaactaaaatgtgagtgttttaaaaaatctatatttgaagaatccatttggttaagaacttaacttagatgacagcagataggayaactgcccttcagtattccaaattgagctctag

SEQ ID NO: 267685 - DNA, 654 bp, Homo sapiens
gtcactggtctaaattctttataggtattggctaatttcagccataaaatagttatttaaagtagataatattgttgttctcccagttaataaaggaggtaactgaactagagagaatttttgactcargatcatacttaaatgaattggaatttgacctaaagccatatgaccttaaaattttaagctatattatgcctacttcacccctcatggataacatctttctgctctctcattacattgtctagagttcatgtgggaaactattatataaaatattatatagattatattttatcaatataaatcttcatttatattattaataaatttatcttaatataaatatattatataattatataaaaattatattgatataaatataaaaataatgctatattgtattaatataatataataatatattaacataatataatatattgctaatagatttgtattaatatatatttatataaatgtatttatatgattatacttatgtaattattgtatattattatatacaataattattatatttttatttttaggtataaatgtgagtgttgccaaacacaatctacataaagattgttggttgtaaagggtgatggaggtaggtcatgtatcttttgttttcccagc

SEQ ID NO: 267686 - DNA, 654 bp, Homo sapiens
gtcactggtctaaattctttataggtattggctaatttcagccataaaatagttatttaaagtagataatattgttgttctcccagttaataaaggaggtaactgaactagagagaatttttgactcaagatcatacttaaatgaattggaatttgacctaargccatatgaccttaaaattttaagctatattatgcctacttcacccctcatggataacatctttctgctctctcattacattgtctagagttcatgtgggaaactattatataaaatattatatagattatattttatcaatataaatcttcatttatattattaataaatttatcttaatataaatatattatataattatataaaaattatattgatataaatataaaaataatgctatattgtattaatataatataataatatattaacataatataatatattgctaatagatttgtattaatatatatttatataaatgtatttatatgattatacttatgtaattattgtatattattatatacaataattattatatttttatttttaggtataaatgtgagtgttgccaaacacaatctacataaagattgttggttgtaaagggtgatggaggtaggtcatgtatcttttgttttcccagc

SEQ ID NO: 267687 - DNA, 654 bp, Homo sapiens
gtcactggtctaaattctttataggtattggctaatttcagccataaaatagttatttaaagtagataatattgttgttctcccagttaataaaggaggtaactgaactagagagaatttttgactcaagatcatacttaaatgaattggaatttgacctaaagccatatgaccttaaaattttargctatattatgcctacttcacccctcatggataacatctttctgctctctcattacattgtctagagttcatgtgggaaactattatataaaatattatatagattatattttatcaatataaatcttcatttatattattaataaatttatcttaatataaatatattatataattatataaaaattatattgatataaatataaaaataatgctatattgtattaatataatataataatatattaacataatataatatattgctaatagatttgtattaatatatatttatataaatgtatttatatgattatacttatgtaattattgtatattattatatacaataattattatatttttatttttaggtataaatgtgagtgttgccaaacacaatctacataaagattgttggttgtaaagggtgatggaggtaggtcatgtatcttttgttttcccagc

SEQ ID NO: 267688 - DNA, 512 bp, Homo sapiens
ttatttaaagtagataatattgttgttctcccagttaataaaggaggtaactgaactagagagaatttttgactcaagatcatacttaaatgaattggaatttgacctaaagccatatgaccttaaaattttaagctatattatgcctacttcacccctcatggataacatctttctgctctctcattacattgtctagagttcatgtgggaaactattatataaaatattatatagattatattttatcaatataaatcttcatttatattattaataaatttatcttaatataaatatattatataattatataaaaattatattgatataaatataaaaataatgctatattgtattaatataatataataatatattaacataatataatatattgctaatagatttgtattaatatatatttatataaatgtatttatatrattatacttatgtaattattgtatattattatatacaataattattatatttttatttttaggtat

SEQ ID NO: 267689 - DNA, 502 bp, Homo sapiens
  misc_feature (1)...(502): n = A,T,C or G
tgcctcgttccttgcctcatacccacagttccctccaatggaaatttccttcccatctccccttccaaaatgtttactgtttggtttaagaacattgcagctggatttaagaatgattccctgttgtctataggataaatccccagtctgtagccggaggttcaaaggtttccatgatttgactctactcccatgttaccaccctcattcccaacacatattcctgtagtcactatccgtcaaagagacgtgaactttctcagttaygtaatttcaactaccccatgttcttatcttggaatactctttctttccttcttcaccagtcagaattctgaaaagtcccacttaaatctcatttacaccctgaagcctttcttggctgctttaggtagaagaaagtctcctaaactataacctattatctgctactcatctattctagaaaatggtaacatttaggaatagacatattttttccatcatagattagatnnnnnnn

SEQ ID NO: 267690 - DNA, 413 bp, Homo sapiens
tgtttttctcattatttatttcaagactgcatcatctggtacaagtcacgtgaactcagggcttcagttggtccatctgtgggtccctaatttttacatttttattttagaaaatgttgatggaaatcgataagttcatgttcctcaccaaatgctttgatattttcttatcaaattttgctgaattatatttctagcagtaaatttaacatcctaagattcatagatrctagtaggtcatcttgcccatctgccttacttttttaccattaattatttattattgttgtagcttcctagtgttttacacaacagagacacatggtaggttgagagagggggcaggggagagggaaagaatatttataaagtgccatacacagatggatggttaaaaaatgctgtttaatgat

SEQ ID NO: 267691 - DNA, 413 bp, Homo sapiens
tgtttttctcattatttatttcaagactgcatcatctggtacaagtcacgtgaactcagggcttcagttggtccatctgtgggtccctaatttttacatttttattttagaaaatgttgatggaaatcgataagttcatgttcctcaccaaatgctttgatattttcttatcaaattttgctgaattatatttctagcagtaaatttaacatcctaagattcatagatgytagtaggtcatcttgcccatctgccttacttttttaccattaattatttattattgttgtagcttcctagtgttttacacaacagagacacatggtaggttgagagagggggcaggggagagggaaagaatatttataaagtgccatacacagatggatggttaaaaaatgctgtttaatgat

SEQ ID NO: 267692 - DNA, 497 bp, Homo sapiens
acattctgcctttagaaatgttccctgcctttctgcttcatgttgccatgttttccttgcctaccctgatgttccacattcgtttacacaacctctcaactggccaccagttccaaatgtgtgttcattaagaagaaggttagattgaaaagtaactcccagcctcaattcctacttccaaaatctgtgcctgaaagcggccccacagtttaaagttatttctatctgtggatatgtggggaagagagtgaaatttacaaagtaaaagtaaccagcccaggacaggtcatttgggtgatgaggtagggataactatattttcttaatggtcaacttttttttaattttcttaaagacaaaaggtttatttaggaaaaagaccctaatcacccatctgggacggggagaccctgtacagcaaagaagtttccaaatcckcaaacctcagagaagcgggtaattgctattcatgagacaggtaatggaatggtactagg

SEQ ID NO: 267693 - DNA, 506 bp, Homo sapiens
tataagttccaggaagggtatacttcccaacacccattttgcatgtggtcatggagagtaatggacaatgaagaacctcccagaaggtggcctggactacacagaacaaagaacaaagaatttcttccaagakagcaaaccagggtccaaagaaggaatgtgccctattgccaggacagggggcctttaacaatatccaacaggacttcttccatgttatgcgtcaatgactggtttatgtctcccattgttcatttttccaaatggaaattttaaaggcaatcattccaaacttcatccatcattatacaagcatacctcagagatattacaggtttagttccagaccacggcaaaaaagcaaatacctcaataaggcaagttacagaaatatttggtttcccagtgcatgtaaaggtaatgtttataaaatactgtagtattttatattatttcgattaaaaatgttcataccttaattaaaatgctctattggggaaaaaagc

SEQ ID NO: 267694 - DNA, 594 bp, Homo sapiens
atagatcctgacacttccatacaagaactgtaacaatgttatgtttttacctaacaagatacaactatccttcatcaaaaactaggactttctcatctgtgcctcaaaaggagggacacaaagtctcaatggccatccctgggtgatgatcaaaatatccatctctgggcttttttttttttttttttttttttktgagattctctgttttctttcttcaagagagtaatctatggaggcagggctggcttcttcctgtttttcgttatacattccttgatgcttaccaggcattaacagatattttctaaatcaataaataatggtctcttgtttttctcctttccccaaacaaacttattccttaaaatcactaagtcatatggtagcctatgtacccctgcaaaaacccaatgaattgggcttaaaggagatatttataatttatctttatttacatttctgtctccattttaatttttagattttctttgtttgtgtgtttcatggacaagacagtaacataagaaatgcattttcgaaagaaagaaagagagaggaaggaaggagggaaggaaggaaggaaggaagggg

SEQ ID NO: 267695 - DNA, 552 bp, Homo sapiens
ctgcttgaaattttcagcatcttyacgtattataggttttaattgtgattcaagaaggattacaagattgatgaaaaggagtaaatggctgaatggtacagtaaatgtcattgagtttgtttcatttgggagtttttaggtaattaatcttacatgtttaatatccacagaagagttgaattggtgagtttggggcatttcaatagacagataatgagagatgccaagattttgggatccaaaggttaattagtaatcaaaatcataattataaaaaggatttaatttgttactaaagtatcaaatcctagtggaattcttgttataagtcatttcttttttttctctcttttaattctgtgaacttctggcattactccatacttaatatgcctgaaatagtcacaaagcaaaacctggggctgtaacacaatgagaaaagcctgttggaacaacacaggaaatgacagagttaatcgtttatcccctgctgggaaggattgtagaaaaatatataccatatgtataatcattgtacaacaccagattata

SEQ ID NO: 267696 - DNA, 557 bp, Homo sapiens
ttaatttgttactaaagtatcaaatcctagtggaattcttgttataagtcatttcttttttttctctcttttaattctgtgaacttctggcattactccatacttaatatgcctgaaatagtcacaaagcaaaacctggggctgtaacacaatgagaaaagcctgttggaacaacacaggaaatgacagagttaatcgtttatcccctgctgggaaggattgtagaaaaatatataccatatgtataatcattgtacaacaccagattataccaatttctccctcttctcattgtttgtatctcctagttacccagtaattccttatttatttatgactttagcaactgctctactattttctccttttttctctctcatattagccttctcattgacttctgtgtcaatagagatacrtgcctgacatctcgatttctggatatccttgcttccatctcaagtattcacttcctttgataaaggccattgtcatcactggtaactgtacaatttctgaaatctcagttccaagtaatcagtatctcactctctaat

SEQ ID NO: 267697 - DNA, 561 bp, Homo sapiens
tccaaaaaacagaaataagtctggctaaattaaacagtaagaagacttagaaaaaggaaaacaaaagaaaaacccaagcattacaaaactcactgagaccccagaaagggcagagccaggcttgaaggctacgtggtcaaggactccaccctaaatcatgctttagacctggcctggagaactcgtcagttctaggcatggacacttcagattgacccatgaatgccatgaatgctgctggtagaacctctgccatggttgctgctggaacttagtgcagctcctgcctctgtcactaccctcaccaaatggagttcatgtggtctctgctttttcctgtcaccagttcctatagggagagggactctgcttcagatggtagtgaattacctcctttcctttcaaactccttaaccaaatttacaaggtcccaaccttgctaggggccagatctagcctttgggattctaccacckgcaaattccttcaaatgtgtcctgcagacattctgaatgcactgtggtttcctgagtacatcatgatcccttgtttctgtctctt

SEQ ID NO: 267698 - DNA, 565 bp, Homo sapiens
tgtcccctgcttatagaaataaagctttaagaaaacaagaaaaaggagatttttttgatatgaaaatcagaatgttctgaaacctacaattacagttattctccagcttgaatgaacaacttcaatcaatcaaccagtcaaccatgttgccaatcaatcatttaggttctcttgagcagaagacattttttttgtgtgtgtgtaaaagaagkgttagtgatgatgggtaaggaatcattaggtgtctactttttggcagcctccccctgtttcttcaccttgcttccaattctcatcattaatccaagggtcaagaaatctggcagagtttcaagaaggcacatttatcccaggtccaaccaagtagcagggctatccattttccattacacatttagtaagcacctgcgtgaaaacatgttcaacatgattagccattagtaagacacagttaagtccacaatgagatagcactccacacctattagaatgacaagaataaaaaatagtgacaacaccaaatgctggcaagggtgcaagaaaatgatcatgcatacattgccgg

SEQ ID NO: 267699 - DNA, 609 bp, Homo sapiens
agctgtcctggacggagcatgtggctggcaggtaatgggacaagaaggggtaggaaccaggatctctgatatccgtctgctagtccaggattagtctcatctggacagttctataaatcagagaaagaaaatattttcatctggtttaagccactattactttcggtttctgttacaacagctgaacccatgctctaaacgatatacttgcccagacattgtgtttgggagagaggggcttggagatggtgtgaaaggcaggatgggtgaggtttgaacatgtctgctgcaaacttgggggctcaaagccattttctcattttctgtagcagtgttattataactgcttctctttgagacagttccgctgcaggatctgatggcagccaaattcatgaaggtcataggagagaaaagctgtcttacagaaacrttctccacgtgagtgatgccagactcctgctggcctagatgggaaacccaaggaatcagggacagtcaagtcaatcacccctttgacattattctctcttttccaaatgaatcttctttcacttcttgatgcaaggaaataatacaataacataaatataaatatactaaatatat

SEQ ID NO: 267700 - DNA, 635 bp, Homo sapiens
aaatccacacatacacagcaacatgatttatgacaaaaattacactatggtgcaatggggggaagtatgatttttttcagtaaatggtactgggtcaattacatatctatgctgaaaaaattaatcttgatccttttctcatgctatacatgaaaattaattccagatagattgtagatgcagatatgaaagataaaacaataaagcttttagaataaaacagagtagactccttgtggtcttgaagtaggcaaatattttaaaacaggtacaaaaacactaatggggaattttcatacgaattataaatatgattttcttaaaattaaaaatttctgctaatataaaagacaccatttagagtaaaaagacagactacattytgggaaaatatatttgttatatacatatatgtatgtatcctcatattcataaagtttctgattatttctttgaatataacttctgccttctgcctccatttttctccttttggaactcccacaatacctatattggtttgcttgataatgttcataagtcccttaggcattcttcactctttttttcttttttctttttgctcttctgactagataattttaaatgaaatgatctgtctttgtgtttataga

SEQ ID NO: 267701 - DNA, 480 bp, Homo sapiens
gagacaagataggaaacagcccctcagaaagtatttgaaactacacacggcattggatgtacgccctatttttcacctgccagccccactgcccctagcatagggagaagttgtggaccagggcaacagctcttagtgctgagctgcatcttcttggggcaggggctgatgtgggtaaagtaaaattgctctgcttactcatttcagtgcaactgttgttgattttgttctttcctggggtgctgcaactttgtaactggattctgaacttcttgtraagttattttgttctgtagatcattgttaaatcagtatttctgtaggggaacaagcgctgggacttccttttccatcattgtgctgatgttcttgctaatctcctttctcaaaaaaggaaaatattaaatcagaaatatgaatctcttggagaagggattcacctttaattacagagaaatgaagcgagtaacttggttctaa

SEQ ID NO: 267702 - DNA, 480 bp, Homo sapiens
gagacaagataggaaacagcccctcagaaagtatttgaaactacacacggcattggatgtacgccctatttttcacctgccagccccactgcccctagcatagggagaagttgtggaccagggcaacagctcttagtgctgagctgcatcttcttggggcaggggctgatgtgggtaaagtaaaattgctctgcttactcatttcagtgcaactgttgttgattttgttctttcctggggtgctgcaactttgtaactggattctgaacttcttgtgaagttattttgttctgtagatcattgttaaatcagtatttctgtaggggaacaagmgctgggacttccttttccatcattgtgctgatgttcttgctaatctcctttctcaaaaaaggaaaatattaaatcagaaatatgaatctcttggagaagggattcacctttaattacagagaaatgaagcgagtaacttggttctaa

SEQ ID NO: 267703 - DNA, 546 bp, Homo sapiens
atctacagaaaaattcaaaaattagccaggtatggtmacaggcacctgtggtcctcactactcgggaggctgaggcaggaggatcgcttgagctcaagagtttgaggctgcagtgagctagatagcaccactgcactcgagcctaatgatgaccagtgttggcaaggatgtggagacaaggaaaccttgctgtgctgttggtgagaatataaattagcacagacatttcaggaagtagcatgatgtttccttaaaacactaaaaatagaattactgtatgattcagcaatctcatctctaggtatatatccaaagaaattaaaatgggcatgccaaggatatatctgcactcccgtgtttatttcatcattattcacaatagctaagttatgaaagcaacctcagtgaccatcaaaggatgaatgggtaaagaaaatgtagtgtgtatatatatacatatttttatatacgtagtgtatatatatataaaatatatatacacatgatggaatactatacaaccttaaaaaaataaggaaatgctga

SEQ ID NO: 267704 - DNA, 580 bp, Homo sapiens
cccagtcagaatagctattaccaaatagacaaaacaataaatgctggcaaagatgtggagaaaggagaagtcttatacactattggtgggaatgtcaattagtacaactactatggaaaacagcatggagtttcatcaaaaagttaaaaatagagctaccatataacccaacaatcccactagtagatacatatccaaaggaaataaaaccagtatgacaaagagataactgcactcccatgcatattacagcactattcataatagccaagatataaaatcaacctaagtgtccatcagtggatgtattagtctgttctcatgctgctgataaagacatacccagsactgggtaatttataaagaaaaagaggtttaatggactcacagttccatgtggctgggtaggcctcacaatcatggcagaaggtgaaaggcacatcttacatggtggcaggcaagagagagcttgtgcaggggaacccctctttataaaaccatctgatctcgtgagacttattcagtatcacaggaacagcatcgaaaagacctgccctcgtgattgaatgacctcctacca

SEQ ID NO: 267705 - DNA, 592 bp, Homo sapiens
ttcacatatttctttaaatggttttgagaagattagtagctattcacttattatttatatattcaatacttttaaagttgtacttgaggatgggcttagatgtttgggctgaaagaggaatctccctgtggattagacaaagatggagctaaagcaagcatggacttttattcatggaacagctatagcaaagcctggccataagagccaattccctgggactccgcatccctctctgagacactctagccttagctaaccactagaccaggactagcaaagaccctgaacagaaccttagccctctgaagctttcagaaatgaagctaactattcaatttacaccacagttaaaggaacaccaactctcacagaatcaacacaactctggttattcaaaaaaccagagtgtccccttacctttaaattagctcagcaatagcrattatccagtctgaattgtctgaaatgacatatatggaattcagaatctggatagcaaggaagctcattgagagtgaggaggaattgaaattcaacctaaggaagccaagcgatccagtaaaacaatttaagagctgaaagatggaat

SEQ ID NO: 267706 - DNA, 384 bp, Homo sapiens
tgcggttgctggacgtccaatccagaccctgttctcctgggtatcaccagtggaggctgtagaacagcaaatattgctgcctgctccttcctctggaagctttgtcccagaggggcaccaacctgatgccagctggagctgtcttgtatgaagtgtccttcgacycctgttgggaggtctctcccagtcggatgcacaaggtcagggacccagctgaggtggcattcggtcccttggcagagctggtgcactgtgctgggagaatccctcttgtcaggattagttgttctcttcagagccagcaggccagaatgatgaaatccgctgaagctgctcccacagctaccccttcccccagatgctctgtcccagggagatggtagt

SEQ ID NO: 267707 - DNA, 575 bp, Homo sapiens
aactatggtatatgtgtatatatatatatatatatgatggaatactactcagccataaaaaggaatgaattaatggcatttgcagcaacctggatgtgactggagactattattctaagtgaattatctcaggaactgaaaaccaaagatcatatgttctcactcaaaagtgggagctaagctctgaggattcaaaggcacaacagtgacaaaatggactgggaactcgtgggggggaaggacggaaagggggtgagggataaaagaccacaaattggcttcagtgtatattgctcaggagatgggtgctccaaaatctcacagatcaccacaaagaacttatgtaatcaaataccacctgttcccccaaaayatatggaaataaaaagttaaaaataaataaataaaaataaaatttaaaaaatttttgagacttgctttatgactgagcatgtgatctatcttagaatatattctgtgtgcacatgagaggaatgtatattctgtggttgttggatggagtgttctgtagatccctattttgtccaaggggtcaagtgttgagttgaagtcca

SEQ ID NO: 267708 - DNA, 574 bp, Homo sapiens
gaatgctgctggattcatagaatgcattagggagaagactcttcttcgattttcttgggaaagtgtgagtaggattggtatcagtttttccttatatgtctggtagaatttggccgtgaatccatggtcctgggctcttttttgttggtaagtttttttattagtgattcaatttctgaacttgttatttatctgttcatgtcttcacttttatccctgattctatcttggraggttgtgtgtttctaggaatttatccattgtatctatattttctaacttgtgttcacaaaggtgttctgtatagtctctaaggaactattctatttctgtggaatcagttgtaatatcatctttgtcatttctcattgtgctcatttggatctttattttttattattccttgttagtttagctaatggtatatcaatcttgtttattcttttgaaggagcaacacttgttttcattgatgttttgtatggtcttttaggtctgaattcagctcagttctctgatttagttgtttattttcttctactttattcggagttggatgttcttttttcttgttt

SEQ ID NO: 267709 - DNA, 507 bp, Homo sapiens
taatttggttctttcttaaaatggatattttatctttcagctactgaattgttttattggattccttggattatgtttcaactttctcctcattctcactgagcttccttgtcatccarcttctgaattctatgtccacagtcagctcactctggttaagaaccatttctgggaggctaatgtgtacgtttataggtaagggcaaacactggctttttgagttgccagttcttggattcattctttctcatgtgtaagggttgatgtttcttcacccgtgagataagttgaggatagtcagctggctttgtttctgggtatatttcaaagggtcatgactttgtacagaatgtttatttctggctggatcttttccttagttttcacaggtgatacatacttgcaaaatattttaggtttgcattttgacctgagatccagcaggtggcgcttaagagtgctagcaggcagataggctcttcctactctctttcagggctcttcggt

SEQ ID NO: 267710 - DNA, 583 bp, Homo sapiens
ttaatcccctgtctaggtgctttccgggggttcaagaagttgtggccacacacagagttcaggcagatgtgggaatgctgggctggaagctctatcagacatggatttcctggctatgagtggcgggtttgggtgcagttgcctgacctgctgttgggttatattctagaggctgttcctgccatcagagttcagacagaagtgggactgctgggctggaagttctagctgcctggctatgagtgstggtgggggttgtggaatcacctatcctgcagtttttctgtttccctggataacaggaggctgtgtccactggcagagttcagaaagaagaggaactgctgggctggaagctctagcaggcatggcctgctggctacaagtggcagaggtgggcattgttgtttgtgggtctcattttccttttttacttgtatgcctcataaatttttgttgaaaactagatgctttagttaatatattttatcaactcttgattctgatttttctctacctctggggtacgttgctgtgaattttgttagtatcactgaaattttagctttcagggaattttttg

SEQ ID NO: 267711 - DNA, 602 bp, Homo sapiens
tgcatcagcgtgacctggatgtgagacatggagtcaaaggagatcattttggagcgttaagatttcagtaccccactggattttggacttgcatggggcctttagtccaaaatttatatttagatattaagaaatattacaggacawcaaactggtctaggtagaatatgatttacataccaatggaagggatggtgtacactgacagacccaggcaccatttgatcaactcccacagaggactgacatgtttcccatggtcaccaagcaaatctacaaatttcacaggttcctgagattgaaggaaagaaataaaatacaagagtattttctcaaaatagtaaagaccaaaacacctatacaagacttatatatgaataatcattcataacagtaaaataccagtcaattgatgaatacataaataaaatttattgataaaatattactcagtcacacaaagtaagtgctgatatatgatacaatatagataaaacttgaaatattgtgcctagtgaaagaagccagtaacaagacatcacatacgtatgagcctattcacatgaaatatccagaataatcaaatctatagagacagaaag

SEQ ID NO: 267712 - DNA, 649 bp, Homo sapiens
taatgtacacaaatcagcagctctgctatacaatagcgaccaagctgagaatcaaatcaagaactcaaccccttttacaatagctgcaaaataaataaaatacttaggaatatacctaacccgggaggtgaaagatctctacaaggaaaactacaaaatactgctgaaagaaatcatagatgaaacaaacaaatggaaacacgtcccatcctgatagatggatagaatcaatattgtgaaaataccatactgccaaaagcaacctacaaatacaatgcaatccccattaaaataccatgatcattcttcacagaactagaaaaattcccaaaattcatatgggacccaaaaagtatctgcatagccaaagcaaagctaagcaaaaagcataaacctggaggcaacacattacctaatttcaaactatactataaggccatagtcaccaaaacaacatgatactgctgtaaaaatgggcacatataccaacggaacagaatagagaacccacaaatccaaatatttacagccaacagatctttgacaaagcaaacaaaaacctaaagtgggaaaaggacaccctattcaacaaataaagctggkataattggctaaccacatctaggataatgaaactggatcctcatct

SEQ ID NO: 267713 - DNA, 592 bp, Homo sapiens
tagcagcacagtttgcaattgcaaaaatatggaaccagcccaaatccccatcagtcaatgaataggtaaagaaaatatgatataccatgatataccttggaatactactactcagccataaagaggaatgaaatattggcatttgcagcaacctggatggaattagagaccattattctaagtgaagtaactcaggaatgaaaaaccaaacattgtaggttttcactcatacgtggaagctaarctatgaggatgtaaaggcataagaatgatataatggactctcgggactcgagggaaagggtgagaggagggtgagggataaaaatctatatactgggtacagtgtatactgctcgggtgatgggtgcaccaaaatctcagaaatcaccactaaaaaacttatttatgtaaccaaacaccacctgttccccaaaaacctattgtaataaaaaataattaaaaaaattaaaagtggctaacacagtaagttttatggcgagtatattttatcacaataaaactaattaattagttaaaaattctactactacttttgtttaggaagagaagtaatcattaaacaagaaat

SEQ ID NO: 267714 - DNA, 592 bp, Homo sapiens
tagcagcacagtttgcaattgcaaaaatatggaaccagcccaaatccccatcagtcaatgaataggtaaagaaaatatgatataccatgatataccttggaatactactactcagccataaagaggaatgaaatattggcatttgcagcaacctggatggaattagagaccattattctaagtgaagtaactcaggaatgaaaaaccaaacattgtaggttttcactcatacgtggaagctaagctatgaggatgtaaaggcataagaatgatataatggactctygggactcgagggaaagggtgagaggagggtgagggataaaaatctatatactgggtacagtgtatactgctcgggtgatgggtgcaccaaaatctcagaaatcaccactaaaaaacttatttatgtaaccaaacaccacctgttccccaaaaacctattgtaataaaaaataattaaaaaaattaaaagtggctaacacagtaagttttatggcgagtatattttatcacaataaaactaattaattagttaaaaattctactactacttttgtttaggaagagaagtaatcattaaacaagaaat

SEQ ID NO: 267715 - DNA, 592 bp, Homo sapiens
tagcagcacagtttgcaattgcaaaaatatggaaccagcccaaatccccatcagtcaatgaataggtaaagaaaatatgatataccatgatataccttggaatactactactcagccataaagaggaatgaaatattggcatttgcagcaacctggatggaattagagaccattattctaagtgaagtaactcaggaatgaaaaaccaaacattgtaggttttcactcatacgtggaagctaagctatgaggatgtaaaggcataagaatgatataatggactctcgggactcragggaaagggtgagaggagggtgagggataaaaatctatatactgggtacagtgtatactgctcgggtgatgggtgcaccaaaatctcagaaatcaccactaaaaaacttatttatgtaaccaaacaccacctgttccccaaaaacctattgtaataaaaaataattaaaaaaattaaaagtggctaacacagtaagttttatggcgagtatattttatcacaataaaactaattaattagttaaaaattctactactacttttgtttaggaagagaagtaatcattaaacaagaaat

SEQ ID NO: 267716 - DNA, 592 bp, Homo sapiens
tagcagcacagtttgcaattgcaaaaatatggaaccagcccaaatccccatcagtcaatgaataggtaaagaaaatatgatataccatgatataccttggaatactactactcagccataaagaggaatgaaatattggcatttgcagcaacctggatggaattagagaccattattctaagtgaagtaactcaggaatgaaaaaccaaacattgtaggttttcactcatacgtggaagctaagctatgaggatgtaaaggcataagaatgatataatggactctcgggactcgagggaaagggtgagaggagggtgagggataaaaatctatatactgggtacagtgtatactgctcgggtgatgggtgcaccaaaatctcagaaatcaccactaaaaaacttatttatgtaaccaaacaccacckgttccccaaaaacctattgtaataaaaaataattaaaaaaattaaaagtggctaacacagtaagttttatggcgagtatattttatcacaataaaactaattaattagttaaaaattctactactacttttgtttaggaagagaagtaatcattaaacaagaaat

SEQ ID NO: 267717 - DNA, 531 bp, Homo sapiens
aacccaagcagactcataccaagacaaattataatcaagcagtcaaaaatcacagataaagagagaatcttataggtagcaggagaatagctactcactgtgcagaaagaagtttccataagactatcaccatatttcccagcagaaaccttacagtacagaaaggactggaatgatatattcaaagggctgagaaaaaaaaaaaaacaccctgaaaaataaaaacactatgttcagcaaaactgttcttcaaaactgaaggaaaaattaagaccttccaagataaacataaactgaggtttttcatcccctttacacctgccatcaagaattgccaaaaggagtccttcaagttgaaatcaaaagacacttgttagcaacataaaaccataaataacaaagatctctggyagaggtaaatacgcagacagatattaaatcctgtgatactataatattggtttataaatcacttctaattctggtatggagattaaaggacaaaaacatgaaaataactatgaatctatg

SEQ ID NO: 267718 - DNA, 568 bp, Homo sapiens
agttttagttgcttctatttatcctctaccatgacaacagcactcactccataggtcagggaagtgatgtgggaattctgccagttgctgagtatatctattcaaattatgcactgcagagctgaggaaataatcgcaagatggtttcatggactcwctgtacacgctgtgaaatgaatgtcagctaaacctatgatctgatggtctgacagagattttgtctcttctgcctgtccactgagctcaggttcactccattgttccttctcttctgctccaggaggcccaggtgtctatgccattgcctctgtccctctgtggcctacaggtgataaaagatttgcagggaggacacaaggacactctgggaggctggaaatgattatggattagaggctttgttatcacaccacacccacctgaaaatagcaaaatagcaggtagagagtcacactgtaaaattttatccaagaaggaacatgagagctggacataaaagtgaaataaacttcagaaactttaaaaattttagccagcagcagcccatgctatgggtgggtccaatgga

SEQ ID NO: 267719 - DNA, 598 bp, Homo sapiens
aattgagatagtcatctgggttttctcttaattttattaatgtggattaatacattgattttcatatttaggacaattgtttcattccagcaatacattttacatggccactcttgtaatgtgttcttggattctattttactagtagtttgttgaatatatttgcatccatgtttatcagggatattggtctatagttttcttgtagtaacagtatatggtttggtatcagggtaacrctggctttgtaaaatgagtttggaaatattatattcaatttttggatgaatttgaagatgattagtattatttaaaaaaaaagttagatagaattcttctgtgaaggtatctgttcctgggatttcctgtgctgtgaagttttaaattactgattcaatttctttactagctataggttctttcagattttttctctcttcatgattcactcttagtatgttgtgtgtttttaataatttatagattttctctaggttaccaaatttattgatctatattttttaatgtattgctttataatactttttatttctgtggcatcatttataatgtccgctcttttatttctgtttttagt

SEQ ID NO: 267720 - DNA, 610 bp, Homo sapiens
gattgggggaatagagaaatggagatttctagattgtggtgatgcttgcacaattctgtaaatttattagcaatcattaaactgtacatttgaaacggggaatcttattttatataaattatgctgcaataaagttttataacagcatgaatgaggtaaataatgacaaatcacaactctagattagtgtgaaatgatattacaaaatgtttatagcttaaaagaaaatccatatatttaagaatatattattctactttataatttactctgatttttctgaaagtgctatggaaaacaaattagaaataacgtcatgtgaaagaactttaggctattattcacactttctgcattcagatytcaattacagcttttgctagccaagtgatcttggatatgttatctaacttctctattcttcagtcatttcatcagaaaaatagtgataattaatagcttctatattatgagcttgttgtgatgtcaaatatttaatacagataaagttcctaaatattattaagtcctaagtagatagtaaattataattatatattttcacctatttattattggtaaaataattgaaaaaatacgttttcaggaa

SEQ ID NO: 267721 - DNA, 551 bp, Homo sapiens
actcagtcagacaaaaataaagaaaaacaaataagaacaatatacaaaacctccaagaaatatgagattatgtaaagcaacaaaatctatgcatcagtggcatgcctgagagaggagagagaataattaacttggaaaatatatttgaaaatatagtccataaaaattttcctaatcttattggagagtgtgacaggcaaatcaaasaaatacagagaactccagctaggtactatacaagatgaccatccacaaggaacatagccatcagattcaccaaggtcaatgggaaaagtaaaatccttaaaggcaagtaagggaaaaggtcatgtcactttcaaagagaactccatcaggatagcagcacacctctcagcagaaacctttaaaggcagaagacacgggggtgtattgtcagcatcctcaaagaaaagaaattccaactaaggatttcatgtcctggcaaactaagcttcataaataaaaaataaagtccttcccagatgaagtgtgttaccaccagaccaaccttaaaaggggtccttaaggga

SEQ ID NO: 267722 - DNA, 443 bp, Homo sapiens
taggtatgtggctttatttcttgrttctctatttggttccattctatgtctccatttttttaccattaccatacagtctttgttactatagttttttagtatattttgaagtcagataatgtggggcctcttttttctttttatgaaaaatttatttggctcttcaggctctttttttgttttatatgtattctaggattttttttctaattctgtgaaaaattatctttgtaatgataggagttatgtttagtctgtagattgctcttggcagtatggtcgttttaactagtgatacttccagtccatgagcataagatctttttctatttctggcatctatgatttattatatcagtgttttgtatttctccttatagtgatctttaacctccttggttaaacatatttctagtattttatttttgtaaatggctagtgta

SEQ ID NO: 267723 - DNA, 443 bp, Homo sapiens
taggtatgtggctttatttcttgattctctatttggttccattctatgtctccatttttttaccattaccatacagtctttgttactatagttttttagtatattttgaagtcagataatgtggggcctcttttttctttttatgaaaaatttatttggctcttcaggctctttttttgttttatatgtattctaggattttttttctaattctgtgaaaaattatctttgtaatgataggagttatgtttagtctgtagattgctcttggcagtatggtcgttttaactagtgatacttccagtccatgagcataagatctttttctrtttctggcatctatgatttattatatcagtgttttgtatttctccttatagtgatctttaacctccttggttaaacatatttctagtattttatttttgtaaatggctagtgta

SEQ ID NO: 267724 - DNA, 658 bp, Homo sapiens
caggtgcaggatataatctcctggtgtgccctttgctaagaccattggaaaagtgcagtattatggtgggagtgacccgattttcaaggtgccttctgtcacccctttctttgactaggaaagggaattccctgaccccttgcacttcctgggagaggcgatgccttgccctgctttggctcactctcattgcactgcacccgctgtcctgcacccactgtccaacactccccagtgagatgcatctggtacctcagttggaaatgcagaagtcacccatcttctgcgtcgctcatgctgggagctgtggactggagctgttcctatttggccatcttggaacccaaatcaacttatttaataatagattgaaacttgtttggaaagtctatcttaattatgtggtgagggtaacaaaaatcatcatcatcagcaacaaaaacmacagcagcaaaaccacctctggagagcttgtttttgagacctctataagccaagattccttgtacaaatcttgattattaaagctcaagattcagcatggtctgtgtatgtgattagggctcataggcatcttgcattatgaaatcaatcctacatccacaatggttgcctacaatgtatttatttcacacccttaatgcttgtctgcattctt

SEQ ID NO: 267725 - DNA, 601 bp, Homo sapiens
acatttttttagaaaatctaccttcttagtaaatttcatattaacagcctaagttgatattctaatatatttgtattgctttacaaatttccatttaaggtccaggtgtggtggctcgtgcctgtaatcccagcactttaggggycagcatgattggatcacctgaggtcaggagtttgagactagcctggccaaaaatggtgaaaccccatctctactaaaaatacaaaaattagccaagtgttgtggcgtgtgcttgtagccccagctattcaggaggctgaggcaggaaaacaagggaagcagaggttgcagtaggccaagattgcaccactgcaatctagcctaggcaacagagtgagactctgtctcaaaaaaaaaaaaaaaaaaatcaatttaatttcattaagccttttttaaagtcaatattttgatttccttatctggcattttgaagatttcttttgcacagagtctattgctgaagaattattgttttaatttgagagtgttatagtacatttctttttcaggctttctgcatctatacgttgatttctgagcaaccaggggaataggggattgttcttatttttgaatt

SEQ ID NO: 267726 - DNA, 545 bp, Homo sapiens
tatgttcaattttggagaatgttccatgcacaagtgagcagaatgtatattctgtggttgttgtgtatgctatagtgtaaatgactactacgtccatttgatctataatccagttaaatcttgttgattttctgccttgattatctgtctagtgatatcagtggggtgttaaagtcccactattgatatgttgctatcaatctattttcttaggtctagaagtatattttttataaatctgratgttccagtgtctgttgcatatataatttaaataaataaatcttcttttattggagcttttcttaatatataatgaccttatttatattttagtaccattgttgatctaaagtctgttttatctgatatgaaagtggttattcctgcttgcttttgtttttcatttgcatggtgtatctttttccaccgttttactttgagtctcattgtgcctttggccagtaggtgggtctcttgtagactgcagatggttgggtcttattttgtgactctgtatcctttaagtggagtatttatgccat

SEQ ID NO: 267727 - DNA, 559 bp, Homo sapiens
ggttctcaaaccgaagcactagcagaatcctctggaaggcttgctagatgcagattcctgtgccccaagagtatataattcagagcatggagggtagagcccagaatgtgcatttctaggcagactcaagagaatgctgaggctcctggtctaaagatcccaatttgacaaccagaggcctaaaagaacaacacttgggccattcttgggcttctctgaaagatgagtgtcaaatcagtcactcagcaaatatttatttttagcatgaattttgttactaaaacagaagagttgaaacctgctggtgtaattgcatctaacgctatgaaaagacatctccaagagctactccagattcggtctttgaagatgattgccaaccccttgccatcctgtagccaagcttccaggggggttgcagagagtgcgtacgtataaaccttaagcacaccttcttttactctgaacatggctccatccacacttttccagccataytgaactgtgtgaacagtgttaacagccaaagattctccagtccaggcacccacccagaatc

SEQ ID NO: 267728 - DNA, 363 bp, Homo sapiens
atttttcccccacttgcaccattgtagaacattgtagcttgggagagacggtggctccatggagtgattcccacagaaagaggctggtcacgagaagagcagttgcccaagtgtgtgtgagtggcctcgtccctgaaccataccaggtcagagttacatctgggagcattgcaacaattttttgcccttttagggctagctgacttgaaaacgaccctgttggcccagcctggtggtaatcygtcaagctctgaacacacacctgctgaaagagatgtgaactaagtggcatatggtgttgagggcaatgaaccccaacagtcaagagagactgaacaggacagagagcaagtgtgagtgcag

SEQ ID NO: 267729 - DNA, 506 bp, Homo sapiens
ttccttcctggcatttgagtcatttcccaatgtcttcgtgtgctttagagaaggaacttggtagccaacatggtctgtgagttctactgtttgtttctccaggagtcttctatccagatgcaggcaagagctgggcagaaggtttttttatttttatttttattttttgtttttatttttatttttttatttattttgagacagagtttcactcytgttgcccaggctgagtgcaatggtgcgatctcggctcaccacaacctctgcctcctgggattaagtgattctcctgcctcagcctcccaggtagctgggattacagacatgtgccatcacgcccagctaattttttgtatttttagtagagatagggtttctccatgttggtcaggctggtgtcaaactcccgacctcaggtgatccacccgtcttggcctcccaaagtgctgggattacaggcgtgagccactgctcccggcctgggcagaaggttttgaagaaataag

SEQ ID NO: 267730 - DNA, 506 bp, Homo sapiens
ttccttcctggcatttgagtcatttcccaatgtcttcgtgtgctttagagaaggaacttggtagccaacatggtctgtgagttctactgtttgtttctccaggagtcttctatccagatgcaggcaagagctgggcagaaggtttttttatttttatttttattttttgtttttatttttatttttttatttattttgagacagagtttcactcttgttgcccaggctgagtgcaatggtgcgatctcggctcaccacaacctctgcctcctgggattaagtgattctcctgcctcagcctcccaggtagctgggattacagacatgtgccatcacgcccagctaattttttgtatttttagtagagatagggtttctccatgttggtcaggctggtstcaaactcccgacctcaggtgatccacccgtcttggcctcccaaagtgctgggattacaggcgtgagccactgctcccggcctgggcagaaggttttgaagaaataag

SEQ ID NO: 267731 - DNA, 520 bp, Homo sapiens
ctagctcctccatcactcctggctcctccctcatcactcctagctcccccatcactactggctccccatcactcctggctcctccctcatcactcctggytcccccaacactcctggctcctcccccatcactcctggctcctcccccatcacttctggctcccccatcactactggctccccatcactcctggctccttgttcactcatggctctttcaaccctccttgcttcttcaacatcagtcttccaggtttgagcttggcaaggcatcagcttgcctaacagctgagaaaactgccgttactcatctcacatgaaactgtggaaggacctgtcttgcaggttggtaagaggattaaggggacagggtaagggaaagcgtttagaactcctagttcccatacatgcccatacatgcatgctttgctcagaatgctttgggctcagcccaaggccctgtactccacagtacacagagatccagggaaatgcaagctgacaggaaagcagcctccgt

SEQ ID NO: 267732 - DNA, 582 bp, Homo sapiens
cacaagagacgtctggaagggggctttactatcttcccagatcttcctgccttttaaaagacaagaactgctctcctctttgttttgtcactacataggatttatggctctttgctgaaatactatttaaccaaggacccctaagccattgttttcagaaatacttttggactggccgggcacggtggctcgcgcctgtaatcccagyactttgggaggcagaggcgggctgatcacgaggtcaggagatcgagaccatcctggctaacacaatgaaaccccgtctctattaaaaacacagaaaattagccgggcgtggtggcgggtgcctgtagtcccagctactcgggaggctgacgcaggagaatggcgtgaacccaggaggcagaggttgcagtgagccaagactgtgccactgcactccagcctgggcgacagagcaagactccgtctcaaaaaaaaaaaaagaaagaaagaaatacttttggcctaaggcttcccctgtgtgatgggtactacataaattaataaactcctgcttgtttttcttatgttaatttgacatctgttttcaggagagtt

SEQ ID NO: 267733 - DNA, 582 bp, Homo sapiens
cacaagagacgtctggaagggggctttactatcttcccagatcttcctgccttttaaaagacaagaactgctctcctctttgttttgtcactacataggatttatggctctttgctgaaatactatttaaccaaggacccctaagccattgttttcagaaatacttttggactggccgggcacggtggctcgcgcctgtaatcccagtactttgggaggcagaggcgggctgatcacgaggtcaggagatcgagaccatcctggctaacacaatgaaaccccgtctctattaaaaacacagaaaattagccgggcgtggtggcgggtgcctgtagtcccagctactcgggaggctgacgcaggagaatggcgtgaacccaggaggcagaggttgcagtgagccaagactgygccactgcactccagcctgggcgacagagcaagactccgtctcaaaaaaaaaaaaagaaagaaagaaatacttttggcctaaggcttcccctgtgtgatgggtactacataaattaataaactcctgcttgtttttcttatgttaatttgacatctgttttcaggagagtt

SEQ ID NO: 267734 - DNA, 582 bp, Homo sapiens
cacaagagacgtctggaagggggctttactatcttcccagatcttcctgccttttaaaagacaagaactgctctcctctttgttttgtcactacataggatttatggctctttgctgaaatactatttaaccaaggacccctaagccattgttttcagaaatacttttggactggccgggcacggtggctcgcgcctgtaatcccagtactttgggaggcagaggcgggctgatcacgaggtcaggagatcgagaccatcctggctaacacaatgaaaccccgtctctattaaaaacacagaaaattagccgggcgtggtggcgggtgcctgtagtcccagctactcgggaggctgacgcaggagaatggcgtgaacccaggaggcagaggttgcagtgagccaagactgtgccactgcactccagcctgggcgacagagcragactccgtctcaaaaaaaaaaaaagaaagaaagaaatacttttggcctaaggcttcccctgtgtgatgggtactacataaattaataaactcctgcttgtttttcttatgttaatttgacatctgttttcaggagagtt

SEQ ID NO: 267735 - DNA, 399 bp, Homo sapiens
gcaaaaatattttttaaatatgcttgccttgcatccattgctaaccccagccttccagctctcttgccagggcctggaaaacaatggagaaatagaaagggagcgaatgttcactycactgcccagcattcactcccaggatggggaacaccatgagcatggcaggtgctcctaaagctgcagagcctgggggtggcagggaggcacagccacccaggtgagaccgtctgggctgctctcagaacacagagaaggtccacagcctgccctggtgatacaaagcaggcaaggccccacattggggcttagcctgagagggctcttggcttcgtgcaggaatgaattcaagggccagtctgtgatgttaaacagtagattttcttgaagcagatgtgcaca

SEQ ID NO: 267736 - DNA, 581 bp, Homo sapiens
tatcacggtcaattactactaagtcatttcacatatttgatctcttctcaacttattctcttccacataccataaaccataacctctggcatctcagttttctactttcctgcaatayatcaataggatttctacttctgggcatttgcatttatgtttcatctttttatctttataaaatcatttacccatattgttggatctcaaatcaggtatctctttcagaaggtctttactgataaccgtatcgagtgttttgcttaaatcacagttatcttttattacataatctatatcttcatagcatatgatccagttaaatatcaatatacatttgcattttgttgtggtggttgttgttgtgtttctacctctgaaacataggcttcatgaaggaagggaatactgtgttgctctcaaactgcattagccaattgataaatacagattaaaggcatagaaccaagtattggaaattaagtattctttaatacataattagaatataaaagaaaatgcagtatgaaactcttctaaatgcacttacattggctactctgactacaagctaaacatgaaga

SEQ ID NO: 267737 - DNA, 632 bp, Homo sapiens
cttcacaatcctctgaaaactttatacttgtagtacacaaagccatctggcacacagcgggcacctgacagaggtcagtcttacatatataaccagtgattgccatgggaaagatttttttttttttttttttagcaaggggtgctttcttttttcccttggctcccatcacactagagatgagataggccaatggagtggggaggaaccaattgcattacatctccctacagttactttgggacaatagmactaatgctgataaaggagggggattatttaattgagcatgagatggaaggtttaatatgactttgtttgttttatgtacttgacagtggcttaaaattatggaatttgctacccaagatgatatgaaggaccggcaaagaaaatgtgttggaaggtgtataaaaacctaagttgggaaataatctagccaattcctatatgtagcatacatcagctgttaaatataatgatatatgtacttggaattaaacaaaaatatatattacatgtaattaatgggtcacatctctttattattgactgaattattgattctgcaagattttgccaccctaaaactgaggcaatatgattcctacttgtaagcccagccctccttt

SEQ ID NO: 267738 - DNA, 565 bp, Homo sapiens
ttagtggtaattactaagattttggtgcacacatcacccaagaagtgtacactgtattgaatacttattattttatcctttgcccccctcccctagattctccctgcatctccaaagtccattattcttatacctttgcattctcattgcttagctcccacttataagtgagaacataagatgtttggttttccattcctgagttacttaatttagaacaatctctctaattccttccaggttgttgcggatgtcatgatctcactcctttttacagctgcataatgttttatgttgtatatatgccacattttctttatccacttgttggtagataggcatttaggctggttcctgtaaattgtgctgctattaacatgggtgtacaagtgtctttttcatgcaatgacttcttttcttctgggtagatacccagtaatgggattgctgagtcaamtagtagttccacttttagttatttaaggaatctccatactgttttccatagtggtgtactagtttacattcccaccagcagtgtaaaagacaaaagtaaatattataa

SEQ ID NO: 267739 - DNA, 602 bp, Homo sapiens
ttaagattttcacctgattcttacagaaaaattttgttctctatctactataataggttttgagaaaaactggaagatttttaaaagtactaaaaaaaactttaaaataaaacattgtggctgcaaacaattatttattttttacaatttgtcatttggatagttctttgctctgctccacgtggtgttagggtagttccggaagctaggaaattcatttccaagatgactcactcacatggccagcagttgtgctgagtggctggacttagatgggactgtcaattgaatcatttacgcaggggctgtgcttctcacagcttggtgtcatggttgtgaaagggaacatctcaagagcaagcattttaagaaagagaaagcaggttggcaaggtctaataagagcaargaactgaactggcactcaaggaaagtgcgggttccttgcattccatcagttgtaatagttaataccaacctaccatcaatatagggagagataaaccccatctttccatagggggagtaacaaagaatgtttggtcattttttattgctctgcacttactataagtccatctatggtctaaaattatatttcaa

SEQ ID NO: 267740 - DNA, 602 bp, Homo sapiens
ttaagattttcacctgattcttacagaaaaattttgttctctatctactataataggttttgagaaaaactggaagatttttaaaagtactaaaaaaaactttaaaataaaacattgtggctgcaaacaattatttattttttacaatttgtcatttggatagttctttgctctgctccacgtggtgttagggtagttccggaagctaggaaattcatttccaagatgactcactcacatggccagcagttgtgctgagtggctggacttagatgggactgtcaattgaatcatttacgcaggggctgtgcttctcacagcttggtgtcatggttgtgaaagggaacatctcaagagcaagcattttaagaaagagaaagcaggttggcaaggtctaataagagcaaagaactgaactggcactcaaggaaagtgckggttccttgcattccatcagttgtaatagttaataccaacctaccatcaatatagggagagataaaccccatctttccatagggggagtaacaaagaatgtttggtcattttttattgctctgcacttactataagtccatctatggtctaaaattatatttcaa

SEQ ID NO: 267741 - DNA, 564 bp, Homo sapiens
attcagtgtctggtgagggctgctgtctgcttccaagatggggcttgttgatgcatcctctgaagctgattaatgctgtgtcttcatatgacagaaggaacagaaggggtaatttttttccctcaagtacttttacaagacactaatccattcatggcttaatcacctcctaaaggcctcacttctgaatactctygcattagggattaagattcagcatgagtcttggaggaaacacaaacattcaggtcatagcaggggatcaccctcctgacctcatttaaatttaattacctcttaaaagtcacttctgcaaatcctatggcgtaggtgtttaggacttcagcctatatgaatttggggacacaatttggtccatagcaattataaatgtgttaaaatgaattataggccccaatactggtttctttgtaatattatgcatcaacacccaatgctcttccttgtttattgactttgagcttgaccacataaacaactttgaacaatacaattgagatgatgttagtccagtaatgctagtaaagatattgctgagaaatg

SEQ ID NO: 267742 - DNA, 568 bp, Homo sapiens
ttcatgtgtaaaataaagattatttttggaaaaataattcaatataatcatatagttgggtatttgcaaaaggttacaatctttaaaaatcaacaggagcataagctatttcacggcacctaggcaatcaatgataatgagtattatgtagatttatgtgcaacaatgagccagccaggcaaggttttgaatacatgaacgtatattataatttcttatttccatttttaccacaaactctttggtaaagataagaacctcctcccttattgtaactcagtcctactttaatggcataaattacattgcttagacaaaactctaaaaaatataactactaactgtaatattgagaatcaagctccattagccaatttcataaaagaggaatctatctaacattttccagaagaaaattatttttatttccaagcaaattatactagtttgtaaattatgttgcattcrtgattgccctatctttagcataatttgtagtatttatatcttaaagtttatgttttatgtagacatttagataagctaaaataatcacaaacaaatatag

SEQ ID NO: 267743 - DNA, 700 bp, Homo sapiens
tgttttaaagaaaacatcctataacctttaatattaatctactttacctatttttccaaaagttcagakaaaaaaaactatttcattatgtattaatgaatttaacatttattgtgtcagcagatatgaattcttaggagttttttaggtaaaggaaacagccaattaaatcagcaatttctgctttttagaaatttcatccagagaaaatagaatattgttaatgaataaatatgtaacataatgtcaatttttaataggtttgatgaagaaaaacattcactaagtggattgagtgctggtttagacagaaaaagagttatctgacctaattgaatcaaacacaggatcaagccatgtacctctggcatattccaggaagctgggacctacgaggcatttcaagattcctgggcatcatatttgcctggagaatttaaaggccaatgtgtcaggggataatgagtggaagagcggtaatacaccaaattagagaggcagccaaaggacaggtcttgcagcaacttccaggccaaaaacaacaacaacaaaaaatagagtttcagtcaaagtggaagaaaaagacatttaaaaaatgaaagcagataagtgacactataattaaggaaaaaaatattttctttattctatgaatatatgatttggaggtcagatgggaaaataggcaaaagtagaagca

SEQ ID NO: 267744 - DNA, 596 bp, Homo sapiens
ttcccccttcactatctctctcctggtccaccagggtaatgtgtccttgtttcctctttgcccttctgccatgattataagttttctgagggctccccaaccatgcttcctgtacagcctgtgcaactgtgaatgaattaaacctgttgtcttcataaagtatccagtctcaggtagttctttatagcagtgtaaaaatgaattaatacaggccctctcctggcagggaagaattaaacatgcccaggcgtagttcttcaagttacaacataaatttgctacattacaagaatgtatttctcagtagaccaaaatttgtcatgaaaacatataaatattgcaytgtattttatgaaatgactcttcaatttaaacataaagagggatacttagccaaaattttgtgtaaaattaacattccaggaaagtgaactttttttgttctacctatctctactcaccaaaccattgaccagtaactagaatatacactattttaaagagcccaaaatgttaatagacattgaacataatttaatatgtataaaaatggggtaaacatttgtattttaaatatactaagatggtaaaataat

SEQ ID NO: 267745 - DNA, 596 bp, Homo sapiens
ttcccccttcactatctctctcctggtccaccagggtaatgtgtccttgtttcctctttgcccttctgccatgattataagttttctgagggctccccaaccatgcttcctgtacagcctgtgcaactgtgaatgaattaaacctgttgtcttcataaagtatccagtctcaggtagttctttatagcagtgtaaaaatgaattaatacaggccctctcctggcagggaagaattaaacatgcccaggcgtagttcttcaagttacaacataaatttgctacattacaagaatgtatttctcagtagaccaaaatttgtcatgaaaacatataaatattgcactgtattttatgaaatgactcttcaatttaaacataaagagggatacttagccaaaattttgtgtaaaattaacattccaggaaagtgaactttttttgttctacctatctctactcaccaaaccattgacyagtaactagaatatacactattttaaagagcccaaaatgttaatagacattgaacataatttaatatgtataaaaatggggtaaacatttgtattttaaatatactaagatggtaaaataat

SEQ ID NO: 267746 - DNA, 593 bp, Homo sapiens
agctgcttttaacctcttgatcatctacctttaattgcttttagttctacaccttgttgtgtgaacatctatgttgccacaaatcaatccatttcatattaagcatttctatatgtctagtgtattagacacccgtagctgcatgactaccgctctgaacttgccactcattgtaatgactgcacccaattgcagcttacaattaaatactagacaatgtctctattattttgaggtcctgctatctatattactctcagaaagcctcttagaaattcaaaaatttaaaataataaaattattcaaattattaatgaaaaatctggccactgaaaaatgraaaactgggttcgctcaagaaatattaaagggtaactaagctatactaacagctcagattgaatagtgtttttagtaggggagcattttatactctgcttacagtttgattgttatggccaaccatcttccttgagaaatcagcattccatgtattttcaaagcagaaaaagcaactgaagtgaagacccctgctggcagagatgctgctgcatgtttttcagccccaaggttaatccaaatctgattgtgcc

SEQ ID NO: 267747 - DNA, 477 bp, Homo sapiens
tgctccttcaaaacgtattttcaaatctgtattaaataaatatattgtagagtataattttaaattttttttatgactttaattttggctggcagtgacttctgttatatgcgtattggatctcctttggctgactcctatatcactttatcttgaatacttttgtagtgattttgattccttttgttttactattccatctgacatcatatactttttataggttgtattctgtgttgtcgagttgctgttgtatacctgccaatttaagggatttttttttcactactgttttcagagatttggttaagggaaattttaactgacttgtgtcatgaatttaggataattatatgcckacctgattatatattagagatttttatattctgttccttgaaattattcaaatgcaaaataatatcatttttctgtgacattacatagcaaaaatttgccaattctcttgaaagttct

SEQ ID NO: 267748 - DNA, 489 bp, Homo sapiens
taatactacattcttggaaaggtggtagagattaataccatccctagaaacttaaaagagggttcccatcttttttcccatttatttttaccgcttagctgtaaaaaaaaaaaaaaaaaaaaaaagaagtatatcttgcagtattacagtagacggtagactactggaaactcaatgaagtagtagccctagttgcagctgtttgtcatgtgttatctttgttaaattaacattgcttcaatcttttgcgtgtcctttcgtgagcagatatgttcttttccatctctattagaaatgaggaccagaaatagcttatactcacatggtttggttaacagtatatatacttagtttttctgcaaggattttgtttaragtttttctgcaaggcttttgactccccacatcctctgtcgctatgtattctggaggaacttgaaccacctgggcattatacagaacatcatactatattgttatatcctccag

SEQ ID NO: 267749 - DNA, 601 bp, Homo sapiens
atggctggcatacttaagtatctcatgaactgagaatgttctttttaatctatgtatctatctatctgtctttccttccatctatctatctataacctaccataataggtgtccctatcataagggacaacataatcatatcttcctcttcaataaaccattatgtcaactcccattccctatctctgagtgtctttttagtttatttttagaagtacttatttttaaatacataaataatgtttactcacagagactcttatatttaaatttgattaaatatcaaacgttattctacatgttgcattccttttaaatagtataactctaggatgattaattatcctcattctgtctaaaaatatatgtgaaggtataaaatttaagtagtgarattagctataataatatagcagaagaacactatagaattataaagtcattttatacattctgggtaccacatctgtaggatgggaaagtaattgtttatattctttctagaaaaatgttcaaaaataataacaaactcactggacattgttcatttctgatattgtttgttcctatttagaagttatttaagtttcattccaaccac

SEQ ID NO: 267750 - DNA, 385 bp, Homo sapiens
caaggtgaatgtagaaaacaaacgtagtataacatgccataaaattgttcatatgacttcctcaccaaaaaatagactcctgaaatcacactcatactattttcatggattaacgaaattgccgaaatggaaggaataaggagaaattgtttgcaccaaacctctcaaacagctaaagaggttcataaaagctcaattatttcatgaagatcatayacttgccaagtggcagagtgaggaccacatcccacattttccgcttcacagtcgaagccagtaatccctagtcttgattgcatgatagagactatgaaaaccagtgatggtttaatgagtccctctctagacacacatctaactcctaagttattatttattttggtca

SEQ ID NO: 267751 - DNA, 572 bp, Homo sapiens
ctaaggtcgtggctaaagtccatttcttcataaaatcttaaaatccagctttccagttcttcttctgcctgcttataatgtcaattgctgtcataatcatccttgataaatgactagtcctactcatcgatgctgtctaaagtctaactcatggcgttttcagcctgttattttacttgcctagacttagaggagcaactgcatatatatagagaccagtcacacactggctggtctcaattttacagaaactgtagaattggacccrtagaacactttttctagaagtaatttattttggtacaaaaaaatttaaaaaataaaaattagacctctagttaggctacagtcttaaaagctataaattcgtttagatttatgactaacaatgaaattcttggtaggaatagttagttgatggtaactcatcaaaacaactgactagactgatcaactgaattgctagaattctttatcaccaacatatagtattctatgctactatatacatcctgtgatatttaattattcaccttttactttaagaacaaatttctggaaacttttacttt

SEQ ID NO: 267752 - DNA, 485 bp, Homo sapiens
tacatcctgtgatatttaattattcaccttttactttaagaacaaatttctggaaacttttactttggtttttcagtaacacacaaggtatggaatrtgggaattcattctttattctaagtattacaaatagctagtgaaccaaggtatcttgtaatttaaaactatatatggcaggcatgtccaatcttttggctttcctgggccatgctggaaaaaaaagaattgtcttgggccacacataaaatacactaacactaatgatagctgatgagctttaaaaatttgcaaaaacaatcctcataattttttaagaaagtttacaaatttatgttgggctgcattcaaaactgttctgggctgcatgcgtggactgtggattggacaagcttgatatatgcataaaacaatgttaaaaaataactaacaatataaggcagctcattcatttttcctgattagtgtagaacaatagctaggtgaaa

SEQ ID NO: 267753 - DNA, 485 bp, Homo sapiens
tacatcctgtgatatttaattattcaccttttactttaagaacaaatttctggaaacttttactttggtttttcagtaacacacaaggtatggaatatgggaattcattctttattctaagtattacaaatagctagtgaaccaaggtatcttgtaatttaaaactatatatggcaggcrtgtccaatcttttggctttcctgggccatgctggaaaaaaaagaattgtcttgggccacacataaaatacactaacactaatgatagctgatgagctttaaaaatttgcaaaaacaatcctcataattttttaagaaagtttacaaatttatgttgggctgcattcaaaactgttctgggctgcatgcgtggactgtggattggacaagcttgatatatgcataaaacaatgttaaaaaataactaacaatataaggcagctcattcatttttcctgattagtgtagaacaatagctaggtgaaa

SEQ ID NO: 267754 - DNA, 485 bp, Homo sapiens
tacatcctgtgatatttaattattcaccttttactttaagaacaaatttctggaaacttttactttggtttttcagtaacacacaaggtatggaatatgggaattcattctttattctaagtattacaaatagctagtgaaccaaggtatcttgtaatttaaaactatatatggcaggcatgtccaatcttttggctttcctgggccaygctggaaaaaaaagaattgtcttgggccacacataaaatacactaacactaatgatagctgatgagctttaaaaatttgcaaaaacaatcctcataattttttaagaaagtttacaaatttatgttgggctgcattcaaaactgttctgggctgcatgcgtggactgtggattggacaagcttgatatatgcataaaacaatgttaaaaaataactaacaatataaggcagctcattcatttttcctgattagtgtagaacaatagctaggtgaaa

SEQ ID NO: 267755 - DNA, 594 bp, Homo sapiens
cgcatgtgggggcaatgaaggcattcaaaaaagccatgctgtcaaaccttttctctgtccttgcaaaagagcatgtctgtcagggagttgtaaatgagttgaatttctgttaagtctgggcagctagaagacttggaaacaatccaaggcgcaatattgaagctcaccatccatggctttcttgatgcgcttcctttttccgaggacggtttccaacctctgctctgattatctacatcctcgttattcatactttaaggcccatctcctcagggttgtcttccttaactgctctactgtcaaaaatctctccattttctgaatgtcactagttctgatgcttgaktagagaagattttagattaatctaggagcgaggcattgcatgaagtgaagaaggcaatgcatattgacaaggaggccgtttagaaggtcatttctgtatccacatttgaggtaatgaaaagataaacatggacaggattggaaagggaaaaaatgtgtaaaataatcaaaatgaattaactattgaataagagaaggcaagagagaaataaattcaaaattagtgtgaagtttcaagtttggggaatt

SEQ ID NO: 267756 - DNA, 524 bp, Homo sapiens
tcttcttgggtagattaaactccacactgcaacatttttggcaatagcatttcctttttctttctttctatttaaagattatgggagtcttgattccagacaatttttttttctccccaacaaagaaagtccaatatctaattttgatattttcaaggattgaatctatgctcttaaacaaacaatctctcttctccattattttcacctgatgtgaaggcttacggtgaggcctaacaagaaagcctgagtgggtcacattgttatgrgtttttttaagccatttctttctatcaatctatatacttttctattgtctgttctaaatattaatatacttttcacacacacaaaatacctacatacacataataaataagaagttccaaacttgaatcttttggggatttcaatttgattattttaagaataaaactgctgtcagctttgtttgtggagagggtttagcagctctgtttactctaaaagtaatcacttcttgattcaaactgcttcaccagtaa

SEQ ID NO: 267757 - DNA, 614 bp, Homo sapiens
acaatatacaaaacccgctttgggtggcatttcagttcaacttggtctttagccaagtgcctacacaccatctctttttcttcattcacccctggcaccctgagcaacccctgaagacctctggcaccctacagagtacagtataaagacatgtgatctgagccctctcattttacagatgccaaaaccaagacccagagagaggcagcttttgggtgtaacttatgttgtttgattatgataaagctgactaaagaagaagtttcttggttcaggtgtgctgtttttggctgtactgtgtacttcttatttgagggcaataatgccagaggaatatttctgtatcattaactcctcatcttccagacttatctttaagtgacatttccttcatattggcccaggtttatataacactgcacctaatcacagattttagaatagtttatagccaggaacatttcagagagagaagcacacrataatttattctaaggtctaatgacatttggtctaggattagatggtaaaaagcatcagattggaaaccatttcaaaataagatacgatatagatattatgtacatttttaaaaatttgctctggatgttcct

SEQ ID NO: 267758 - DNA, 498 bp, Homo sapiens
taacaactcttcactcccccttatcccatytcctagaaacatctaatttattttccataattatgaatgtgcctattctatatacagtcacgtgctacatagcaacactttggtcaatgatgaaccatatatacgcagtggttccacagaattataatattgtattttttaccataccttttctattttagatacacacattcttaccattgtgttacaactgcctacagtattcagtacagtatgctgcacaggtttgtagcctaggagcaataggctatactatataacctaggtatgtagcaggctaaccatctagatttgagtaaacacactctatggtgtttacacaacagtgaaataacctaacacatttctcagtgtatctctgtcattaagctacgtgtgactgtatttcatataaatggtatcacaatatttgtccttttgtgtctgagaattatgtgtttaattattttagggactgccaaactgttt

SEQ ID NO: 267759 - DNA, 498 bp, Homo sapiens
taacaactcttcactcccccttatcccatttcctagaaacatctaatttattttccataattatgaatgtgcctattctatatacagtcacgtgctacatagcaacactttggtcaatgatgaaccatatatacgcagtggttccacagaattataataytgtattttttaccataccttttctattttagatacacacattcttaccattgtgttacaactgcctacagtattcagtacagtatgctgcacaggtttgtagcctaggagcaataggctatactatataacctaggtatgtagcaggctaaccatctagatttgagtaaacacactctatggtgtttacacaacagtgaaataacctaacacatttctcagtgtatctctgtcattaagctacgtgtgactgtatttcatataaatggtatcacaatatttgtccttttgtgtctgagaattatgtgtttaattattttagggactgccaaactgttt

SEQ ID NO: 267760 - DNA, 584 bp, Homo sapiens
aaaagctcacaattttagaaaggcaaggggcaataaaccaaaagtgctgactaaaataaaaagggagggctactcactcctctgcagccagtgtggccttttattacctttatccctgaagctttggagcttagctgaaaagtaagcgggctcaggaactgacacactgtactttttgaacacaaggtccatcagtgtgatgcagaagcattttcacctcacatcagacacctactaggggttcctccacaggactccacagatgttacaactgagcaaccagctcaccaaatgaggccaatggcagctggtcctgttgaagtaaagaccatggagtaaatgggcctcaggaactgagtagggctaggamccactgccatagactagtaggttattgtatgagtcacctgaaagcacattagtaaacctgtccagaagaaaaagaatgcaaagccgaagtgcaattcagtgaaaaagtagcctcactattctacccaagaataccagctagtaggagaaaagggtatgcctgatcccttatgaaaaaattacatttaacttttcttctctaagccaagattcat

SEQ ID NO: 267761 - DNA, 584 bp, Homo sapiens
cattagtaaacctgtccagaagaaaaagaatgcaaagccgaagtgcaattcagtgaaaaagtagcctcactattctacccaagaataccagctagtaggagaaaagggtatgcctgatcccttatgaaaaaattacatttaacttttcttctctaagccaagrttcataacaggtgaagaagaaacagctggagtgtggtgataatttaatttttaatttgttttctctgctctaggcattcttcaactcaaagcaatgttttcagctttgttcattctgtttttttatgtttgaaggaaaaccaactttgatcaaggatttttatcagtcaagaccacagaccaacttcgatcagttcattcagcaaggatttacctaatactgctgtggatagggtattgcacaaagactatggggaatccacagcccttatccttagagaacccactatcgaggagggaaaataggatatacatagaagagtctcaaaagcagtgccattgaagggatacacagaaccaaaacagtgtgagagatggacagacacacagttttacttaaaatataattatgcttgtgttgg

SEQ ID NO: 267762 - DNA, 584 bp, Homo sapiens
cattagtaaacctgtccagaagaaaaagaatgcaaagccgaagtgcaattcagtgaaaaagtagcctcactattctacccaagaataccagctagtaggagaaaagggtatgcctgatcccttatgaaaaaattacatttaacttttcttctctaagccaagattcataacaggtgaagaagaaacagctggagtgtggtgataatttaatttttaatttgtyttctctgctctaggcattcttcaactcaaagcaatgttttcagctttgttcattctgtttttttatgtttgaaggaaaaccaactttgatcaaggatttttatcagtcaagaccacagaccaacttcgatcagttcattcagcaaggatttacctaatactgctgtggatagggtattgcacaaagactatggggaatccacagcccttatccttagagaacccactatcgaggagggaaaataggatatacatagaagagtctcaaaagcagtgccattgaagggatacacagaaccaaaacagtgtgagagatggacagacacacagttttacttaaaatataattatgcttgtgttgg

SEQ ID NO: 267763 - DNA, 582 bp, Homo sapiens
ccactaacattagtagtatatatttattttgtatccttgcatgttgcatcactcctacgccaccagatcatctgaccctaggaatcaaagatttggaatcctttggccatgcaaactagaattaccaaaacaaacaaacaaacaaacaaaacaaacaataactcaataagcttctagtcctgtagacttcraatgaccttcctcttgcatttcgtaggacaaccaactgcagttgcattattcccatagacatacttccgtccaattgtggtcaggaagtttagtcgtagatttcttatttatcaccagatttgtacgaacgtaaccacatccaaaccacctacccaaccaatattagtaatgtctttttacttcctgattgaagtgcaaagtgctttaaacattcagtgtaaacacatttgtttatttctttcttaatttgtgaggccactttgctggcagagagcagagtagaggaatccaagatgtattgatttctttcttcatgactatttaatcggttaaagtgtgcaccacttgcaaatgccaagatgctggttacattttaataaatgtcctctt

SEQ ID NO: 267764 - DNA, 405 bp, Homo sapiens
gatatgcccacggggttgagaggaagcaattacacaggggcacaaggaaatttgggagaggagtgtatcttgttagtaatgatgaaatatgtgtatacatatttcaaagctcatcaaattatacactttaaatacgagcaacttctatgccaattataacaatacagctgttaaaaaagagtaagtacytctcaaatcatttaaaagtctactattatctcttactcaaaccagaaaaagataggtgagaaatgtataaaggaacatctagctaaaattccaaggaaaatataatttactttaaactaataaatgattctgtggtgatttctacattctaatcatttctctaatgaataaacgattatgccatgtaaatcttatattactcttatgaaagagaag

SEQ ID NO: 267765 - DNA, 576 bp, Homo sapiens
acacacacacacgtatgttatgtatcaatataaatgaaaatatgaataaaataaactggttaaggtattactaaaatgttttcccattttagcatataaatctttttgaatcactcttctatttagagtcatcaatatctgtgtttttctttacaatatcatttcactatatcatcaagagtgtgtcggaaaattcccattttccttaaaaagtgcttcactattatctccagattttacccaagccacagatacccattctccaagttttaatgctggcacttttttgatcttaccagaaaattatcaattgaatattttcagacaattattgggacccatattattttctcagattgattcctaaataatgtattgaygaaaactttgagtaatagtgattatcctgtcataccaacaggagtaataattaagataaggcacgtagcacactttctgccacaattcccctctgtggaaagtgattgtaagacgccatcaattataaaatatatccaaattataaagatgctaaaatatggacaaatgtatatattgattgttgaattggacagt

SEQ ID NO: 267766 - DNA, 569 bp, Homo sapiens
ggtgctgcttttgagatagtgagttctcacaagatctggtcatttaaaagtatgtggcacctccccagcaattttctctctctacctctcttgctcccgctttcgccatgtgacatgcctactcttcctttgccttctgatatgactggaaacttcctgaggcctccccagaagcagatgtcacgatgcttcctgtacagcctgtagaactgtgagcctgttaaaccacttttcttataaattacccagtctcagttatttctttataaaaatgcaagaacagcctaacatatccaytcaagttttccatttctccaccttgttttgagccagcacatgaacctcaagagaagccaaccagatgtggcaatatgctcttgaactttgtagactgcagaatcatgagttaagtaaatgtcttttctttaaaaactacttagtctcaggtattctacagtaaacagactaaaacagagaaatgttgacttcctcattgtatatatatcagaactgtctaaataagaattgcattttttccatgtactctctaatattattgctttttacat

SEQ ID NO: 267767 - DNA, 569 bp, Homo sapiens
ggtgctgcttttgagatagtgagttctcacaagatctggtcatttaaaagtatgtggcacctccccagcaattttctctctctacctctcttgctcccgctttcgccatgtgacatgcctactcttcctttgccttctgatatgactggaaacttcctgaggcctccccagaagcagatgtcacgatgcttcctgtacagcctgtagaactgtgagcctgttaaaccacttttcttataaattacccagtctcagttatttctttataaaaatgcaagaacagcctaacatatccactcaagttttccatttctccaccttgttttgagccagcacatgaacctcaagagaagccaaccagatgtggcaatatgctcttgaactttgtagactgcagaatcatgagttaagtaaatgtcttttctttaaaaactacttagtctcaggtattctacagtaaacagactaaaacagagaaatgttgacttcctcattgtatatatatcagaactgtctaaataagaattgcattttttccatgtactctcyaatattattgctttttacat

SEQ ID NO: 267768 - DNA, 581 bp, Homo sapiens
tgacctgcagaactgctgaggctgagagatggaaagggtctttgttaggccaatccaatctctaatcagatcttctccagctggcagtaggtgatctgaaattattactggtctgctgctggtagagaagtctgaagaaacttggaagaaagtgaatgcttctccctctcctccatattaccaagaaaagctccatatctgttagcttccaccgattacctygtctttcttttctacccattgccaagtactctgctctttcctctaaatatgccattgcccttgataaattcttgtttctaaatcctatggaactgttacgttctttgtagaagtccttttaaaattactctttgacttatctttaatgaagtgaggatactacaaccatggcttaaattgttcattaatatctggttacatacaagtaaagcaatccctttctgacaagtaaagcaaccacaaatggcacatggcttccagagcctgtggaatgctctttgaatatgctaagatatgctaaggatgaatttcacttttggaaacattaaataattacatatgaccaaaccttgtatgca

SEQ ID NO: 267769 - DNA, 581 bp, Homo sapiens
tgacctgcagaactgctgaggctgagagatggaaagggtctttgttaggccaatccaatctctaatcagatcttctccagctggcagtaggtgatctgaaattattactggtctgctgctggtagagaagtctgaagaaacttggaagaaagtgaatgcttctccctctcctccatattaccaagaaaagctccatatctgttagcttccaccgattaccttgtctttcttttctacccattgccaagtactctgctctttcctctaaatatgccattgcccttgataaattcttgtttctaaatcctatggaactgttacgttctttgtagaagtccttttaaaattactctttgacttatctttaatgaagtgaggatactacaaccatgscttaaattgttcattaatatctggttacatacaagtaaagcaatccctttctgacaagtaaagcaaccacaaatggcacatggcttccagagcctgtggaatgctctttgaatatgctaagatatgctaaggatgaatttcacttttggaaacattaaataattacatatgaccaaaccttgtatgca

SEQ ID NO: 267770 - DNA, 617 bp, Homo sapiens
cttctacagttctggattttggtttttttattttctagttttttgacttgcactattagtttatttatttgaaatctttttacttttctgatggaggtatttactgctatgaactttcctcttagcactgttttttttttttttgctccatctcatagattagtgtgctttgttttgattttcattcatttcaatatattttgattttctcctcaatttctttgttgacacagtgattattcaggagcacattgtttaattaccatgcatttgtaccatttccaaagttccccttgctattaatttctagtttatttcattgtggtctgaaagatacttgatataactttgattttwaaaaatgtgttaatatttgttttgtgccctaacatatggcttatcttgcagaacgtctcaggtgctgatgagaatgacatatattatgtagatgttggttgaaatgttctataagtgttaggtctgtttggtctaatatatagtttaaatgaaatgttcctttgttattttgtgtctaggtaacgtgtctgatgctgaaagttgggtgttgaagttgtcaactatattttattgaagtctatctctccctttagatctaa

SEQ ID NO: 267771 - DNA, 556 bp, Homo sapiens
gtttgacaattatcctattaatttgatctatgtttacatgtatatagccaaaccagataattcagtacaaataactcacccaaaggacttattatctgggctggttatctacatagatcaaactagatcttaataactcccaaatttccactttactttatgtcctatasacataaccaaaggtgattctacctgctccggcctacgcatgccgagctgtttctacaacagtggattcagctttcaaacttatcacataattacagaaaagttcttgaagactagaggtatcaaaaatagctactaatgagttattattgcatttattatttctaaatcaacaggaatgtaaaatttatttgcattgtcattatctcttctgtgtagcatgaagtctaagattcatttaaatatctgttctcagtcagggtccatctgaccacttatatacaggtacctctaactgtcaatgaaaaaatcttatatttgactatgtctgagctatgacaatgtgatgacaatgaacattagtgtaagcttactttgttaaaaatat

SEQ ID NO: 267772 - DNA, 608 bp, Homo sapiens
aacaaaatgagacacccttccccctgcccatctttataaaaaattaaaaattagctgtgtgtgatgatgagcacagatagtactagctacttgggaggctgaggcaggagaatagcttgagcccaggaagttgaggctgcagtgagccatgattgtgccactgcactccatcctgggtgacagagcaagaccctgtctcaataaataaataaattaaattaaattgaaaataacttgcttctgaatgtgaaatacgcatctgtgcaaaygttcatcttttcttgctacctttccttttttgagaaggagttccttaacctggatatctttccttcaaaatttaattcattcaaagaatattcactgaccacctgctatgtgtaagaaacagtgtgctagattttgccaattctaaaagaagacagtgactaccttggcatgaacttagtttcgctaaaccaagaaaaatagctagcactgcaacttatatctgatataaaagtaaactcaaaagtataagtttattgttttttactagtctaagacaaaatttcaaaaaaacttcatttttcatgaaaaagagacaagtttcaattttacaatggctg

SEQ ID NO: 267773 - DNA, 608 bp, Homo sapiens
aacaaaatgagacacccttccccctgcccatctttataaaaaattaaaaattagctgtgtgtgatgatgagcacagatagtactagctacttgggaggctgaggcaggagaatagcttgagcccaggaagttgaggctgcagtgagccatgattgtgccactgcactccatcctgggtgacagagcaagaccctgtctcaataaataaataaattaaattaaattgaaaataacttgcttctgaatgtgaaatacgcatctgtgcaaatgttcatcttttcttgctacctttccttttttgagaaggagttccttaacctggatatctttccttcaaaatttaattcattcaaagaatattcactgaccacctgctatgtgtaagamacagtgtgctagattttgccaattctaaaagaagacagtgactaccttggcatgaacttagtttcgctaaaccaagaaaaatagctagcactgcaacttatatctgatataaaagtaaactcaaaagtataagtttattgttttttactagtctaagacaaaatttcaaaaaaacttcatttttcatgaaaaagagacaagtttcaattttacaatggctg

SEQ ID NO: 267774 - DNA, 618 bp, Homo sapiens
acccctccattttctaactcatatttattaatcctcacacttctttgagtaagggttgctttgtccatatacctcaataaagaaacatatgctgcagctcagtggcagaagcagatctgagattccaggcatcttttgtaagtcagacagtaaagagatttttaaaacrtaaaataatgctattcttatcactacatttttcttgttatgcgaaatatagttattttttcatgcaaaacaagctatttatgttatatgtaatgggattattatttatttgtgaatgaataaatacataaataaatattttaaacatccagttttgattttcatacaataaatattcatagatgtaatacccacataatcagacattctttgggggtcctcaatatttttttagtataaaagatatccagagaccaacattttaaagaacctctactctaagtcagttaaaacattttggtggaaaggatgtttagtgaaaaaggaagcacaggcctcagaatcagacaaacctggaggtaaatgcaaactccagcatttaattatgtgtgttcttggcagcttaacttttcagaacattagtttctaagcagtaaagtgagtttgaaa

SEQ ID NO: 267775 - DNA, 569 bp, Homo sapiens
ttatttagagttatttttgacaaaagatatttctattccctgctcacaaatttatttattaaattatttatttataccagtaaggactcatggataaacattctattctttgaggtaaaaccaaatacatttaattttttttcactcaatcattttaaattctgccagctcttttttttttccactttgttcttctggtctgacagattctgctactgaaagttctttttatttggttcctgtgtctctttgacatagcccactgccaaaatgattattttttaatttgcatgcttakggttcactctttgtgctgtaaggattgtgggttatgaaaaatgtatagtgtcatccacaattacaatatcatacaaaatactttcacagcctaaaatatcgcctgtactacacctattcaagcttacataccttcccacatcctcctggcaaccattgatcttggaatcatgtaatcttttacataacaataggtatttaagatttagccatgtgttttcatagcttgatagctcatagctttttatcataagataatattctgttttatg

SEQ ID NO: 267776 - DNA, 538 bp, Homo sapiens
cactatttaaaatggtcaaactcatcgaagcagagagcagagtgatggttgtcaggggctgggtggagggaggaatggagagttgctattcgatgggtacaaagtctctgttttgcaagatgaataggttctagagatctgtaaacactgtgcctatagttaacaatgctgtatttcataggtaaacatttgttgaggatagatctaacgttgtgttctgatcacaataataaaataatcaaaatttttaaaaataaaataaataaaatattaaaactaaacactcagttcctaagctgcggtagccacatttcaagtgtcatatggtcacatttggcaagtggctggcatattagaaagcatggatacaaatcatttccatcatggcagaaagtcctgaaagacagcctggatgaaaaaaagaaaacagaacatcatctacatatttctgattttcacacatacattgaaatgtacagtaaatatctggataattaaatgtattttttyaacttttgtgttcagatgttttcacaat

SEQ ID NO: 267777 - DNA, 373 bp, Homo sapiens
agacatgagtcagtgaagcagaataagagagacaggaagaacgtggcagatgacatacagtgcagtcacagactgagaagaccagaccagtgacatatcctggcgagaacacagatgtaactcaggagacaccttcagggggctggagttggggagatttttggcatacctattmtgatgacttctttctatccacagatttgaaaaacttggtaaattagcattgcacattataattaatgtctcaaaagggactgaagggtcctaccagactccagatgcacagctgcagaagtggtcaggtttttctcttcagtgcacccaatttaccttggtcttcactgtagcaaagttaaccattacctccatatgc

SEQ ID NO: 267778 - DNA, 548 bp, Homo sapiens
gaactgggactctttcttcactcctatagcagggctatagcagacatcacataaataaaaagcctttagcaaactgtgagattattattgatcttctacctccctattgtgacactttatgcaagccagtgacttgctttctatcatagctgttatactctgcaaaatcattacacacctgtaccactctgagggactacgtttggagtatagagcaagttacgacaaagcagaggaggcaccagaatggctggttgggccacatcacatggaagtgctacattcagatgttacatttaggtccctcatcctcttgatrggggttactgttctttgagtaacactgctctaatggtaagagaggcagaagctagctgactgttgaaggaaaacaacaatggctgagatctcatcagccatgggactcctggattttatctggtctaaagcactctcataataaaggtaaagtcaagaatcaactagcaattattgtggcctagtaaggtctggacactatgctaggagctttcaactgttacatcatt

SEQ ID NO: 267779 - DNA, 636 bp, Homo sapiens
gactgagtttcaagaataagcctctttttttcctttgaaaaccttttttttctttaccagaagaacaactaacaaactatggttattcaactttgggtatttggcagacattttcttgaaaatcaaccaagtaagtcagtcacttcataagaaatagctcactttatttgttgccagtgatacaatttgagcactgaagaaaaaaataagaattttggaagacctttatctgccaccacatgagcttgacacttgccccaatacttgaagtcccctggtgagattggtggtactatttactattaactagtgtgtcaacgtttgttatatttgcataattcaagccaatatttgtcaaatgactaacagataggagtaaaagwtccatccaaaatgcaagattgacccatgtgttttaatgtaacagcatatgaagagtacatatggtttcagattccatattgtaactaatctttaagaagttaccatttgttgggaattttggtgtagtattaatagccacagttgtctgacaatgatattaaaatactcctttttccaactatgtatctgtgtgaggctggattttcttcatatacttcaaccagaataacacatgacaacacattaaataca

SEQ ID NO: 267780 - DNA, 505 bp, Homo sapiens
tccttgcctcaccctctcgagtagctgggactacaggtgtgcactactgtgctaggtttcctttttaaagctcctaattttgcatcgtacacaacattttgttcatccatccaattcatccactgatggacacctgggttgtttcctgtttctaccttttgactattgtaaatagtactgttatgaacactagcatacaaatatgtgttcaagtcctcgctttcaattcttttgtgtgtatacctagaaggagaattgctggatcatatggtaacactatgtttaattttttttggaagcaccacactcttttccccagcagcagtaccattttacattcccaccagcaatgcacaaatgttctaatttctccatatccttgccgacaatttacattttaataatggccatcctaacaagtgtaaactggtatctcattgcggtgtacatttttttwaaaaattaggttgtacccaaatgtttgaagattgctgttgcctaattc

SEQ ID NO: 267781 - DNA, 551 bp, Homo sapiens
gctgcaggtcatcaacctggcagccaagctctacctgaccaactctaaacaggtaaagattaagagatgaccccccagatactctggtccccagaaactccctagacagtattcttttggccctccctaggcagggctgaactctagctcctattttggaaaagaagaatcagggaaggtggctggtctgcccacataaccaatgctaccccagtgcccacaaagaccttgtagtgctggtggtcactgttgaagagactctcctatgaagctgtgacctccagtctgctagtacaagagtcctgtctgccaccttggaactctggggctgtraagaaccacagttgattgggataagggaagggcccaacagtggcaggtactgatgggagaacgtgcatcccagatgtggtctgtgcttctttccaaagcttgacaatgcttggccagtctgtgccaaagataagggggtgagtctctgcttgggcttgggtggtgctggtggccactgtcattcccaaggtgaaaggttataagagatacacagccaa

SEQ ID NO: 267782 - DNA, 551 bp, Homo sapiens
gctgcaggtcatcaacctggcagccaagctctacctgaccaactctaaacaggtaaagattaagagatgaccccccagatactctggtccccagaaactccctagacagtattcttttggccctccctaggcagggctgaactctagctcctattttggaaaagaagaatcagggaaggtggctggtctgcccacataaccaatgctaccccagtgcccacaaagaccttgtagtgctggtggtcactgttgaagagactctcctatgaagctgtgacctccagtctgctagtacaagagtcctgtctgccaccttggaactctggggctgtgaagaaccacagttgattgggataagggaagggcccaacagtggcaggtactgatgggagaacrtgcatcccagatgtggtctgtgcttctttccaaagcttgacaatgcttggccagtctgtgccaaagataagggggtgagtctctgcttgggcttgggtggtgctggtggccactgtcattcccaaggtgaaaggttataagagatacacagccaa

SEQ ID NO: 267783 - DNA, 515 bp, Homo sapiens
aaaaggaatatacaatacgaccaagtgaaatttatcccaaatatgcaaggctggttcaacatttgaaaattcattaatgtaatccataatatcaatatggtaagatgaaaaacaacttgattattatcaataaatrcagaaataggatttgacaaaacccaacacgtattcatgataaaagtcccagtaaacaaagaagagagggaaatatccttaatttttaaggaatatctacaaaaatttcacaactaatatcatacttaataatgagaaactagtagctttcccactaatatcatgtacaaggcaaggatgtccccgctcaccactgcttttcaacatgacactggaagttccagctaatgcaataacacaagaaaagggaatgctaagaatttagattaggaaggaagaaataaaactgtattggcatgatcatctatgtaggaaatccaaaagaacccataaaaaatccccaaaacaaaaatagaagaacaaaccctcttgcccaaact

SEQ ID NO: 267784 - DNA, 554 bp, Homo sapiens
gtagcaacccaggtgtatgaaaacagacataaaataattgcattgatcttgggttgaaattctggaggaaaatgtggagggacgacaagaattcaaacgagaagtgggtactaacaggaggatgtttgaagtgataggctatgatgtctaggttaaagagagaagaaagtagagccaaagggagcttttagaagtaaagaaagtgatacttttaggggatttgagatatgaatgaggttgtagaacygatggagtggaaatacaaagtcggtagagttgaaaagttggttggcgctgtttagagaataacttcacagagtgaacaagtatagaggtggccaagtttggggtctccatgattgtgactggctgaagcagagtggaggttcaaaaagactattgtagtgaataatagggagctataaagcaggtgctggttgataatcgaaaagggcattgacgtcatccaggatcttgggttggatattaagactttaagccatgtaccaaagcctttgttaaatgtagaaggcttcactgggactccagccatt

SEQ ID NO: 267785 - DNA, 553 bp, Homo sapiens
tggcaggaatttgggattcaaggggggtgcttatataatctgctttcttaaggtaaggtttgctcttttatgctacctgtcatttctgccttaaacaatgtccgggaaattcagccacacacaacaaagaaccagatccctcatttcggttctatccttcctcctctagaactgacattccttggggccgtgtcctcaagtgacgtgtcctgctctagctaaatggcagtaatctgtgtttgactccagcagtttatcaagctatgtcattttatgccatgtcagtttatrgagagtggcacaagatacaacaggatagggaagctgagttttctatttgtctacttcattgaaaacatgattttgtttactgacaagtaaatggtataggtgtaaggaaagagtagcaactaccatattattttgccagaatcctcatgttaccgtttcaaaaaatgccaagaaagatgacagtgcatgttataacatcccttacaaataatagcaaagctttaatcagctgctacacagacacactcaggattgaaatgca

SEQ ID NO: 267786 - DNA, 482 bp, Homo sapiens
cactagtagcaatttaactaccctgttgccaaagctcttttcttaaattacagatcctcatgagctagtaagtttgaaggggagtcataaagaggaacaggcattatacgcaaggctgaagaagcagttggtaactaacagtacatytttttctaaggtaagtttaaggtcacaaaaagacttaatgtacagagttgaaaaacttacatatttcttagaagcttagaagttatgagtttagttggggctccaggaagatgcaagatgctagactccaaaaaataagagagaggtccagtgtagaataacactctatagattaaaggaggactcaagagtagaggaaaaacttagcaaaatacagggctatgagttaggtgttcctagttagagtctgagtgtccggaaatgatgaaatgggtgagctccaagaatgcaggatatgtgaaattggtaatcagatctactggtttgcttgttct

SEQ ID NO: 267787 - DNA, 583 bp, Homo sapiens
aacagtaaaaggacacaaataacaaaatcttaagacttaagttctagtcttaatatcattgmctataggagttgtgactttggtttttagttcacatctcttagtcttggtttttcttcattgcattattactcattaagcactctgagcaatacaaatgcattttctgcagtgcaaatgtattggaattgacaatcttcattatgttaaatattaagtagaactttgtacaaataatgcatttcatttagaactgagttaacatattcaagagtggcattgaattcagaaactgaattgtttctggcctggacaagctatgcatttatggttaagaacattcataaacatgattgtaccttattgaatctcatatttcttataacttatttttttcattgttaacacattccagggtaaatatgaacatgtatcaactagggaatataaaaaatcaaaagagaaataaaaatcaactagaattggttgattatgtcatcactgtactaattcgttttcctcaaagtacaaaaattccatgttgatgcatatattgtacctagattagcacttggagccaata

SEQ ID NO: 267788 - DNA, 591 bp, Homo sapiens
  misc_feature (1)...(591): n = A,T,C or G
nnnnnnnaagttgcattttatctattcttgataataaatatgacatcctgtgttttgtcatacatgaacagataatattgaaagtctcttccagaaatgagttcaaataggtataaagacttctgaataaatgaacagtctcttttcatattagagaaatacaccatagggatgcagaaactaagaaaagcatgtacctgctgcttcctaggtgtgaacatcaagcaagttatttaacctgtctgtgcctcaatttccatttgaaaaatggggataaaatatgaggataaagtgatataaatgtatatatatatacaacatatatagatcacttcacaatactaagcagtcggtgaattgtaacagttttctaaaaatktttggggatcattaaaatcatataaaatcaactgcagttttcctaactggatgtttggaaagtatcaataagtaaagtatattgtaatttgttgtgggttagaacctatcagaacaaaagactgagccaaataggagataattttgaggtcaacacatttccagaataattttgaatggcataaaaattttctcacaactcctccctctcat

SEQ ID NO: 267789 - DNA, 592 bp, Homo sapiens
cccagaaaatgtctattaaatcatagctttttagaaaaaaaaaaaagttgtaagtttcacttaaaaatcactgacctgagataagcctatggagatacattttcttcttcaacagttgaagctttgttagtgcgcacttaacaaattttcccacctatccttctattgacaaattactctataccaaacttttattttataaaatcaatactaacttcaggtctaattctataaaggcaattcttaagagtgatactttggaaaaacaaaaataatgtgtagttaaaaagagtaagcaagaactcatctgaaagtgaatggctggccatgatacataaacattaatggtgaagccatgaaaacaggccagaggctgtaattcggtatgcaagacctaakctgttagttgttttgttgttctttagatttactaagttgtttcaaatgtctctttaagaaatgttttcagaaataaaattatgactttttcatttcaggaactcaagtaagcataaacaaatattctcaaagctggcacaaatggtgggtccaagctcacggaactacatgagagctgggcgggtgacacgcc

SEQ ID NO: 267790 - DNA, 480 bp, Homo sapiens
tgtcaacaatttttaaatgtcctgatctaggaaagggttactcactaatgatctgtaagaggggagtgcatacttgggtctgctgtaccaccgaaaggttgtaggtattctcagcatcttctaagtaaccaacacaaaccaaagctttttacattgttcgtcgaatagcacattctagtctaagttgactttatagctatatttatcagctgcaattaataaaataccctattattaatgacttaagtaactgtttacttatctcaaatatgaagaggtctggaagaaggtagttgctgctattgawttaactacttaaccctggcattaagagaacagcctctttccatctttacttttgctatttcttactatgttgggtttcattcccattctcattgctttgtataacagttgcaaggtgtctactgcactaccagaaatcacagccacattccaggcaggaatgaaagtaaagga

SEQ ID NO: 267791 - DNA, 553 bp, Homo sapiens
gtttaactcccagttaaatgtttgaaattctcatgttggatcaactactgtgctctgtctttgagggctttccacagacaaatgttaaatggttttggtattttccatagcttcttctttctccaaaaacgcagaccaagtggcttgtttattcagtcatttsaatttctataatattttcatgttctggttcaagttggaaaaaaatgtgtacatttggaatggcctcattaaacttttggaaatatattacttaagttttcaatttaattttttaaatttaaaattccacccaacattggctaatttggtcccataatttaacatccaaggggagtttaggtctctaccagctcttcctccaagaaagggaaactcatcatcattgaggacaaaatagagttttcagattacacatcaagcctggtctgctagggtatgggagtgtgtaataggagaaataaaaagtggataaatatgagtgggtggggcaactgctcttctgtctatagcaggactcagcaaaatatgatccttgaactaaatcctgccc

SEQ ID NO: 267792 - DNA, 562 bp, Homo sapiens
gggggacagaactggggaagctacattgccatcagacttcaatgcaagtctgaccccaagtgaggaagagaagtttggtgaaagaatccgactgctaagcagamaaaaggaaggtttggcagagctgcctggaagtcttgaagtcagaatcttccattagaggaaacttgtgtatcccagtaatgggctggcttagtacccaccacactcagtcatcagcaagggcaaggcatgggaggggtggccttggcacaaatgctgtgatgaatttcagaggcagcagctggggccgtcagtcacttcagctccttgcagttagacatctgcaaggtgtattttaacagccctcatgtttacaaatcacccctttccactgaggtccatttgggaattgtcacaactagcccatctctagtcctgccttaatctttttgcttaagttaactatttataaagctgtgtatagttcattttcccaaaggtggatttaattattctgaagtaacttttctgttttcatgcaatattgttggtaatgtaactctttcaattgtggttaaaa

SEQ ID NO: 267793 - DNA, 562 bp, Homo sapiens
gggggacagaactggggaagctacattgccatcagacttcaatgcaagtctgaccccaagtgaggaagagaagtttggtgaaagaatccgactgctaagcagacaaaaggaaggtttggcagagctgcctggaagtcttgaagtcagaatcttccattagaggaaacttgtgtatcccagtaatgggctggcttagtacccaccacactcagtcatcagcaagggcaaggcatgggaggggtggccttggcacaaatgctgtgatgaatttcagaggcagcagctggggccgtcagtcacttcagctccttgcagttagacatctgcaaggtrtattttaacagccctcatgtttacaaatcacccctttccactgaggtccatttgggaattgtcacaactagcccatctctagtcctgccttaatctttttgcttaagttaactatttataaagctgtgtatagttcattttcccaaaggtggatttaattattctgaagtaacttttctgttttcatgcaatattgttggtaatgtaactctttcaattgtggttaaaa

SEQ ID NO: 267794 - DNA, 634 bp, Homo sapiens
tttctttcggggctcaataacattgttgctgctcactccagtcttttagctatgtaacttttgtcttttgattaccctctttaatatgtaaaatgtaaacagtgaatgcaggatgatttgggattttagggggaacagtgaggactggagacatgtatttcatgccagttaatgtagtatacagtggatttctagtaccctaatgctatggactgaatgtgtcctccaaaattcatgtgtcagaaatttaatccccaatgcaacagtgttgaatggtgggacctaatgggaagtgtttaggttatgagggcctcacattaatggattgatgccacaataaaatggacttgcaggaataagttttttctcttctacttttttgccatgtgagggcatagcattcrttatttctcttgcctttctgccttcttctatgtaaagacacaccagatgctggatccttgatcttggactccccagcctcccaaactgtgagaaatacattttcattccttataaattatccagtctcaggcattctgttacagtagccctaaatgtactaagacacctggcatcataattatcatcatcagcttggaccaataagatgaggaaaagaaaataaaattca

SEQ ID NO: 267795 - DNA, 366 bp, Homo sapiens
acaacatggcaattatagttaataacaatgtgttatacatttgaaaattactaagagtagattttaagtgttcttaccacaaaaatgataagyatgtgaggggatggatatgttaattagctttatttagtcattccacaatgtatgcatatttccaaacatcatgttgtataccataaatatatattattttaacttgtcagttaaataaataaatgaataatttaaaaattttttaaagataagagaaggagtggaagagctgtttggatattaagtagaaatggtcctcacttaaacatttgttctctcccatttttcttgaaaacttctgccaagttttcggtagattttatctctcatttt

SEQ ID NO: 267796 - DNA, 511 bp, Homo sapiens
cggagattaatctccctaaagctgtccggcaccctgagtgaggtgtcagttcaggtgatttccccagtgtcccgttctgatctctgctgtccgcttgcaagctttcctaaaaggattctgcaacacaggcaaagtatttgttgcaagagtacaaggcagcaaatgcaaggtatttgtttgggattgatatcattagaaggaagaagargaaagggttggagaggatgacaacgaaagagaaaaccctggacactggcatattcaatgttctttttaaaagaagaggagagtgtgcgtgaatttctggtttcagatctgacttatcaactaccaatgaaactttacagaatggaattccaaagcatacatgctccattctgagtgaaagtcaataaaaccagccatacatatttattgccccttgtaaaaataagattgtgtctttattttttaatacaaattatttttaatggaggctctgcagcctgtgtaaccctgtccccaagcttcc

SEQ ID NO: 267797 - DNA, 546 bp, Homo sapiens
attagactattgccttctgatgatttggggggcccatgtttctagggagtggtcccactgtatttaatccgggatagagtttaattttagaacagaaaataaaaaactggggaaggagatcttgaacttgggtgatggaaaatattcctttccttctcagccctcaactggataagtagytgtctgtatccctctgtgcgtcacttattccctgaaacggtggtgtctgttttgctcatcactttacccccacgcctagcatgatgtctaacatgcagcaagcaatgaatatagatttttttaagtgaatgatagaatgaacaaatactaaaaatgttcaccaaaggatggctaaatatacagcattcttagaataactgtaccttaaattacaagacgtcttccttactagaacgtacagtttttgagggaaaaacaaaaagacacggttcagcttgtcatccagcttttaatgaaccaccatttgggtcctatttatagtgtgttctctctagctgggtggaaatgggttggttttactttcca

SEQ ID NO: 267798 - DNA, 393 bp, Homo sapiens
ccaatggccaaaataaacagaccacttcatgttttccaaccactgtttttcttttctcacaattttgaaataaacctgccatcattcacaagacacaaggagagtaaaagaaacagaataactttccagttattttggaacttctactggaactaagttgaagaaaaaaacatcactttcccctttattgaaaaccagcgtatttctcatcaagtgacccacttttccgtgtgtcgaagccatcttgagaataaatcaagtcaaccagggaggtctttttaaatggaaagataccaactggccatggagttgcaattcaccctttctgagaaaataatctattttttctcacctccatgctcagttttagmgagcatgtttccttattctgtt

SEQ ID NO: 267799 - DNA, 626 bp, Homo sapiens
gtttccttattctgttttgcatcaagttttccactcactgcccagatagtacaagctgtataaacaacctgcaggcattacaccttctctagtcctagattccctttgctttgtcacatacgtgttgttccctggacataaaagttttatgttgctttatctcactcaggcaccccattatgtatcccrtacaggacaccccctgaagatactaacaggatgctttcctagttgttgggctcattcttattaaacacagacaccaagtatgaaaatattatagtcatgaagtataatcagagctatgattctgatctatgaattttcttataacacaatttataaaagctcatttttattttgtccttgtccaaaaaataaatcctggtgaaatgagtgagtcccctacatctcccaccttagtaagtaaaatagcaggtagcctcaagacagattctttgacattccaagtattccccaactcaagaaaatcttcaccgtgccaagacaactgctcagaaagtagaagaaattaggccaaatatttatcatagatcacactattaatacatttcttaaaaatgtatttctaatatatcttttcatcatatgaagtaaaacaccct

SEQ ID NO: 267800 - DNA, 626 bp, Homo sapiens
gtttccttattctgttttgcatcaagttttccactcactgcccagatagtacaagctgtataaacaacctgcaggcattacaccttctctagtcctagattccctttgctttgtcacatacgtgttgttccctggacataaaagttttatgttgctttatctcactcaggcaccccattatgtatcccgtacaggacaccccctgaagatactaacaggatgctttcctagttgttgggctcattcttattaaacacagacaccaagtatgaaaatattatagtcatgaagtataatcagagctatgrttctgatctatgaattttcttataacacaatttataaaagctcatttttattttgtccttgtccaaaaaataaatcctggtgaaatgagtgagtcccctacatctcccaccttagtaagtaaaatagcaggtagcctcaagacagattctttgacattccaagtattccccaactcaagaaaatcttcaccgtgccaagacaactgctcagaaagtagaagaaattaggccaaatatttatcatagatcacactattaatacatttcttaaaaatgtatttctaatatatcttttcatcatatgaagtaaaacaccct

SEQ ID NO: 267801 - DNA, 626 bp, Homo sapiens
gtttccttattctgttttgcatcaagttttccactcactgcccagatagtacaagctgtataaacaacctgcaggcattacaccttctctagtcctagattccctttgctttgtcacatacgtgttgttccctggacataaaagttttatgttgctttatctcactcaggcaccccattatgtatcccgtacaggacaccccctgaagatactaacaggatgctttcctagttgttgggctcattcttattaaacacagacaccaagtatgaaaatattatagtcatgaagtataatcagagctatgattctgatcyatgaattttcttataacacaatttataaaagctcatttttattttgtccttgtccaaaaaataaatcctggtgaaatgagtgagtcccctacatctcccaccttagtaagtaaaatagcaggtagcctcaagacagattctttgacattccaagtattccccaactcaagaaaatcttcaccgtgccaagacaactgctcagaaagtagaagaaattaggccaaatatttatcatagatcacactattaatacatttcttaaaaatgtatttctaatatatcttttcatcatatgaagtaaaacaccct

SEQ ID NO: 267802 - DNA, 626 bp, Homo sapiens
gtttccttattctgttttgcatcaagttttccactcactgcccagatagtacaagctgtataaacaacctgcaggcattacaccttctctagtcctagattccctttgctttgtcacatacgtgttgttccctggacataaaagttttatgttgctttatctcactcaggcaccccattatgtatcccgtacaggacaccccctgaagatactaacaggatgctttcctagttgttgggctcattcttattaaacacagacaccaagtatgaaaatattatagtcatgaagtataatcagagctatgattctgatctatgaattttcttataacacaatttataaaagctcatttttrttttgtccttgtccaaaaaataaatcctggtgaaatgagtgagtcccctacatctcccaccttagtaagtaaaatagcaggtagcctcaagacagattctttgacattccaagtattccccaactcaagaaaatcttcaccgtgccaagacaactgctcagaaagtagaagaaattaggccaaatatttatcatagatcacactattaatacatttcttaaaaatgtatttctaatatatcttttcatcatatgaagtaaaacaccct

SEQ ID NO: 267803 - DNA, 607 bp, Homo sapiens
aagaagaaagagtattagagtttagagaagagaagagaaactatgaaataacgtcataaaatgagagaacaaattcagcacgaaaacagagtaaacccacttcttagggttgccttgagataagggtcccagatgttgcaattttttttctccaggtgagttcagctgttcagagttcagggaaggtggagaataggctgttcactaacaaaaagattttggaagggaggttccaggctcttcgttttccagtgttctaccctgaattcctaacttytaattgctagtgtctctgaggttagacttgaacaatgatagtaagttgatttctgtgtgcctgagctaagatgttcacaatcaactctgggatgtatcacctctcttctctatctggtgaccctcctaatgtggttactgatcctatttgaacttaatgctgcatctggaggtcagaatttctggtcggccccttgttggatgcatcatactgctgcccttttcatcctgttcaattctgtagcctatctgaatgggctaaattaaacagtataattcagtataattttggatggacccacgagctctagaaattgagaaaaaaaacatg

SEQ ID NO: 267804 - DNA, 607 bp, Homo sapiens
aagaagaaagagtattagagtttagagaagagaagagaaactatgaaataacgtcataaaatgagagaacaaattcagcacgaaaacagagtaaacccacttcttagggttgccttgagataagggtcccagatgttgcaattttttttctccaggtgagttcagctgttcagagttcagggaaggtggagaataggctgttcactaacaaaaagattttggaagggaggttccaggctcttcgttttccagtgttctaccctgaattcctaacttctaattgctagtgtctctgaggttagacttgaacaatgatagtaagttgatttctgtgtgcctgagctaagatgttcacaatcaactctgggatgtatcacctctcttctctatctggtgacyctcctaatgtggttactgatcctatttgaacttaatgctgcatctggaggtcagaatttctggtcggccccttgttggatgcatcatactgctgcccttttcatcctgttcaattctgtagcctatctgaatgggctaaattaaacagtataattcagtataattttggatggacccacgagctctagaaattgagaaaaaaaacatg

SEQ ID NO: 267805 - DNA, 607 bp, Homo sapiens
aagaagaaagagtattagagtttagagaagagaagagaaactatgaaataacgtcataaaatgagagaacaaattcagcacgaaaacagagtaaacccacttcttagggttgccttgagataagggtcccagatgttgcaattttttttctccaggtgagttcagctgttcagagttcagggaaggtggagaataggctgttcactaacaaaaagattttggaagggaggttccaggctcttcgttttccagtgttctaccctgaattcctaacttctaattgctagtgtctctgaggttagacttgaacaatgatagtaagttgatttctgtgtgcctgagctaagatgttcacaatcaactctgggatgtatcacctctcttctctatctggtgaccctcctaatgtggttactgatcctatttgaacttaatgctgcatctggaggtcagaatttctggtcggccccttgttggatgcatcatactgctgcccttttcatcctgttcaattytgtagcctatctgaatgggctaaattaaacagtataattcagtataattttggatggacccacgagctctagaaattgagaaaaaaaacatg

SEQ ID NO: 267806 - DNA, 405 bp, Homo sapiens
gctaaattaaacagtataattcagtataattttggatggacccacgagctctagaaattgagaaaaaaaacatgaatgtatggctaggttacaaaaacattaaaaacattttatatttcacatttggagtcttcttttttaaataaaaaaatccatgtgtaaattttctaaaaatgtattgttaggaacgtgtttgggggtgcttttataaatgcatgcatgtacatacacattaggcaaagayattttcatcgttttttctttttgaggaaaatcatcatcagtttcatcactcattaaggtgcttctggcttatgtattcctggaacttggcaacttcaatcaccacaaatacttggtcatttactctgcttgttaaccttcccatatattaaattcatggga

SEQ ID NO: 267807 - DNA, 627 bp, Homo sapiens
ttccctctgtaaaataggaatggtaacactcagtggtgtgatcgatgagaaagtgctgtaaatgccagattctatagaggaaaaaacagcaggttcttaatgttatctttaaaacaggaaaacaaaagtacctaagttatagataggatctgaactcaatatactgaygaattctgtactattcagtgctccgccaccttgaaaaggacttctttggaaagcaggaaggcactttcttgccgggaacattcactgtgagcctggatgacccaccagagcagctgagagaggaatgttttcgttgactggagagttagaccgtgttgtgccttataagttccttcagttcagtataacttttcaaccaatgtttataaaaatttcccctttttcctgcatgacaatggctggacctatgaattgccagcatttttgtcattcactactactcatttccttcacagctgtgtgagtgtgaccaagttactgattcactgtgccttagtttttcatcttaaaaatgggattaataatagtatctccctagcacagaagtttccgaaacagatacatgtgaggtgcttagaaaatatctgacacaatgcaagggcacaataattatcagtt

SEQ ID NO: 267808 - DNA, 494 bp, Homo sapiens
gttgtcgatgtcttttgcaagatatttatataacatgtcctatatcattggagatatatcatagttatctaataaatcattattacttatgatttattgatgttttagcttttatgcctcaaatacaataattagggtaaaacataattattttgttttgtaaacatgaaagttactgtgttaatcagctctggctgccataacaaaacactagcaactgagtggcttcaacagcagaaattaatttctcacagctctggaagtccaagttgaaggtgtcagcaaacttggttcctggtargggctctattctctttgcaagtggctgccttctcacagtgtcctcacattggtggggacaggggggcaggggggtggtgggacgtggagagagaacgtgtgtgtgtgtgtgtgtgtgtgtgtacgtgtgagaaggcaagcgcaagtgagcgctctactatctcttcctcttttaataagggccctggacctat

SEQ ID NO: 267809 - DNA, 598 bp, Homo sapiens
agaaaatttaagaagatttttcctggaattgtgatattttatagagaaagatcattagggatyattaagttcaactttatttcagaaccaaggaaagttcacatcattttattttctttaaaacatagctatcttaagcccatgtgttctcttcattggagtttcagaagccatgtgtttctttttctgtaaatactaagtggatcagctcactgaataccctccccactctacaattttgggagactagggtttctgcctgattgctggtgatcattgctaacactcacagaattctggcctatctttacccagaggcgtaagttcccagcctgatacactatcaaattctcagcccaacagtgttcagtagttgctaagatctgttgaatttaaatggagctttgcctttgggcacaatgagcagcaagtacataatgtgagacagccgaaacccagacccccattacctgcatccagtttaattaaatgtaaattcttaagcactatttaagccactgagttttctgaaaatgcatgcccttaggctttgaaaataaatagtatctattctgagttctacccaggttttggctat

SEQ ID NO: 267810 - DNA, 483 bp, Homo sapiens
aattctttttatgtttaataagattatgactgtgyttgtagtactaaaattgtttacttcttttgtaatgtaaaaaaataaaactttcaccagttactcaatttaatgtatgaaaattttactcaatccaaattagttttctttagtgatttttagtaagttatgagtccctcttcaatataattttccaacattaatttatataagttatttgcccaatttcatttcttaaccaagcgaatgctattgagcatgggtattttctgttgaatcactggatgaaagcacattttaaaagtaattagctcatcctcatagttaacccaacaaactaatgaatgtcgcccataacaacacctgagctggtattttcattacataataccaccaaaagtgataagaaaaagggtatcatataaatattcataggtcatttttattcataaaacctgtgaaagacgataatgacaatttgccagtttg

SEQ ID NO: 267811 - DNA, 483 bp, Homo sapiens
aattctttttatgtttaataagattatgactgtgtttgtagtactaaaattgtttacttcttttgtaatgtaaaaaaataaaactttcaccagttactcaatttaatgtatgaaaattttactcaatccaaattagttttctttagtgatttttagtaagttatgagtccctcttcaatataattttccaacattaatttatataagttatttgcccaatttcatttcttaaccaagcgaatgctattgagcatgggtattttctgttgaatcactggatgaaagcacattttaaaagtaattagctcatcctcatagttaacccaacaaactaatgaatgtcgcccataacaacayctgagctggtattttcattacataataccaccaaaagtgataagaaaaagggtatcatataaatattcataggtcatttttattcataaaacctgtgaaagacgataatgacaatttgccagtttg

SEQ ID NO: 267812 - DNA, 489 bp, Homo sapiens
tgaatacatcatcttgaaatagaactcatagttaaggatataaaatataaggctgacctcttcgttgtggctactaacttactcaatgttcagataacaaaattgttgtaatgtgttcatcatgtaagataaaaatcttcaccattaagagttcaaaggccagaatcrtagtttgatatctaaccaacttaaagaataaatcttaacacataggctatagttttcagggatttcattaccttaaatctaggctcttccactcaaagtataatttccttttgcaaagttatttgcagttgctgttaatcgttacagcagcctctggaggatgtggtggggttctctcataaaagtcataaagggattgaagagtcatcatatgatagctatagccatacagtcaatctgccatcaaggatctatgcccatagcactctgaatgccaaacaaccaaacaatttgcagtttattttcttggcaatgaaaata

SEQ ID NO: 267813 - DNA, 556 bp, Homo sapiens
tacaataaattacatgtttactaccacacactagaatttattccaactgcatatttgtacctatygactaacctctcttcatcctcctcctccacccttcctagactctcgtaactgtcattctagtgtataagtccatgagatcaactttttttgctcccacatgtaattgagatcatgcaatatctgtttctgtgcctgccttatttgacttaacatagcgacctccatttctgtgttgctgcaaataacagaatttcttttttatagtgaatgatattctattttgtatttttataccacattttctttatccatttactcgatgggtacttagattcctatcttggctattgtgaatagttctgcaataaacatagggggtgaaggtatctctttgatgtaccgattccctctccattggataaatacctagtggtgggattgctggattgtatgatatttctacttttagtcttttgagaaacttctgtactgttttccataatgtctgtactgatttgcattcccatgaacagtatatacgggttcaatt

SEQ ID NO: 267814 - DNA, 562 bp, Homo sapiens
ttgccagcagttgttattttttgtctttttgttaatagccattctgactgaggtgagaagatcttctcattgtggttctcattgtgatgactgatgatgttgatattgaaaattttttaaatatgttttggccatttgtatgtcttcttttgagaaatgtctattcagatcgtttacccactttttaatagtgatatggctatgttgcttgggatatgtaccctggggttcatcgtctcatgctgagaaagaactcaggacccagacacatgtgagtgggttaagaagtagaaaatttaatagaataaaggagagaggagagcaggtcctagggaggtggagggggagagagagagrgaagagaaggggggagagagagagagagacagagagagagagacatgtccaaaaaagtggggaggtggttgactgcagcagattttataggaaggctggagaaggtggtgtctgatttacatagggctcacagattggttgatcaggcacgaggtttacatagtgcacagggaagactggtcaccccaacctagaatgtaaatgg

SEQ ID NO: 267815 - DNA, 628 bp, Homo sapiens
gatcattctggctgctgtatagagaatagtttgaggtggtggtggtgaatacaagagtggaagcaggaatctcagagagaaacttaacagcagtcaaggcaaaaggaaatagacaagtaaggtaatagtgggatggaagaaaggaraaagtctagctatattttgatgtataatgaacagaacctattgaatgttgaatatgtttatgaggaaaagggatgggtcaagaacaaacctcagtttccaagtaaaatatttaggctgtgattttgcttaggttatgtaggtataaaaatgcagtggtatggaagatagcaaaaaatataatacatgtgagcaagagatatggttaaaaattaaacaggagtaagaggctaattattcaatgtcaatctctgaatctcaaaaatgaaaaaggttagagaggttgacccccaaggtttctatcatttataaaaatacattactttgtgattctatgtttaaacaacctaatatgtggtcagactttacattcatccatgtcattcattcatgacataatttatgtcaatcattcaggacataatttaacaaaactaatgtaatagacacaccagacactgaagctactgaagcaaattataaa

SEQ ID NO: 267816 - DNA, 601 bp, Homo sapiens
taaatttacaaagtgttaacctaactttaagcttaaatctgggaatatcataacacatcaatattttccaaatttcttacctgatatgtaccatagtgagctgttttaggyggttttatgaaatcatttactaggaattcttgtttcctatatttctttatcagtaaccatatgttctatccccactagtcttctcattgagctcctaagcatgactttatattttcctgtatacctcaccagctatgcctccctctggctccaaccctgtgttcaattagtttgctctttcccaactcataagggttaagccttggttggaattgctcaacattgcatcctctttgcctggtacacagcagacactcagtaaatatttgttgaatgcacagctaaaatatcggaatttaactcaaactcctaaaaccaaatcaaatctatttttctattttctttgttgatattgcatagatcttagtttcattgacactcatttggaaatcagcagctatttattggtacagataccatattttcatccaattaaattttagcttgctgaaggtcagatatagtactctatatttctttggatattcac

SEQ ID NO: 267817 - DNA, 612 bp, Homo sapiens
acaaaggatagaaaataatatgtttggctctccatttctgcaaatacatgttgatgatagtttaaaaaaaaaaaaccattgatgattgtttctaaatgctagaagaggtagtacaaggatagatgagcctgcattaattagtcctaaaagttgcagastgataacaggatttagataaaagcacaaagaatctacaaggtcttaattagtgatcaaattcagcactgagtttgcaatactgtttcaagcttctgtctgacttgaaatcttgcctttcattcaacatgcccgtgttctcatatgcatttaccatggctactccactccagtctgctcctgctcagattaccctagaagagcctaggagggcactgctatcatcttgaagcagtcagtggcagaaggcagcaaactatagctaaagggcaaaatctagtccaatgcctgtttttgtgggacctacaagcaaaaacagctaagcaaaataatttttaaaggaagaggagagcagagtaagatggctgaatagaaggctacatttgccatccccgctgacacacaccaaattttaacaaccaactatgcaccaaaaagcaccatcagaagaaccaa

SEQ ID NO: 267818 - DNA, 471 bp, Homo sapiens
cctagccagaggggaatcacctattctagcagtcagagctcaagtttcttggcaggccttgccaccatggtccaaagcgctctggggttctaagtaaactcaaaaggcactgtaggacacaaagacttcaattcctaggcaattcctagtcctgggctgggcttagagccagtagattcggatggcatgtgacctagggagataccagatggggagrctaaaggagtgcttgcggccctcttctcccaaccccaggcagtgcagcttgcagcaacaaaaatgactccttccttctgcttgaggtgaggagagagaagaggaaagaggactttgtcttgcatcttggatatcagctcaaccacagtagaaaagggcactgggcagagttgtaaggccacattctggggcctatctcaaaaatgacattttagacacaccatggtccaagagggaactgctgcctagacagga

SEQ ID NO: 267819 - DNA, 591 bp, Homo sapiens
acaacaaaaaattaaaaagcaaggagacaaagtgtagagttttattagcattttgcttgtttgtttatgcaatcagtattaggttgccatcaatttaaaagagtgagttataagatagtctttgcaagcctcatggtaacctcaaattgaaaaaaatacagtgggaaacacaaaaaataaaaagaaagaaaatatatcactagagaaaatcaccttcactaaaaggaagacagaaagagatcwcacacacacacacacacacacacacacacacacacacacacataaataaataaataaataaataaaaaataaaataaaaataaaacagaaaacaaataacaaagtgacaggaataagtccttacttatcaatcataacattgaatgtaagtggtctaaaatctccaatccaaagccatagaatgtcttaatagattaaaacatgagacccaatgatctgttgcccacaagaaccacatctcacctgtaaagatgcacatggactgaaaacaaaaagatagaaaaaaataccccatgccaatgaagacaaaaaaagagcagaagtagctatacttgtattagacaaaat

SEQ ID NO: 267820 - DNA, 591 bp, Homo sapiens
acaacaaaaaattaaaaagcaaggagacaaagtgtagagttttattagcattttgcttgtttgtttatgcaatcagtattaggttgccatcaatttaaaagagtgagttataagatagtctttgcaagcctcatggtaacctcaaattgaaaaaaatacagtgggaaacacaaaaaataaaaagaaagaaaatatatcactagagaaaatcaccttcactaaaaggaagacagaaagagatctcacacacacacacacacacacacacacacacacacacacamataaataaataaataaataaataaaaaataaaataaaaataaaacagaaaacaaataacaaagtgacaggaataagtccttacttatcaatcataacattgaatgtaagtggtctaaaatctccaatccaaagccatagaatgtcttaatagattaaaacatgagacccaatgatctgttgcccacaagaaccacatctcacctgtaaagatgcacatggactgaaaacaaaaagatagaaaaaaataccccatgccaatgaagacaaaaaaagagcagaagtagctatacttgtattagacaaaat

SEQ ID NO: 267821 - DNA, 567 bp, Homo sapiens
ataacagtgaaataccactatgcgtctaattagaatgcccaaaagtcagaacactgacatcaaatgatgaaggttatgtggagcaacaaactgtcattaattgctagtggaaatgcaaaatggtayatccactttggaagataatttgtcagccatgtaaaatacaatgcaattaggtgggagtgaaataattctcaatacatatcaggaagtgatgattttctaggattctcctgaaataacctagaactgaagacttgctaccatgtattttattgaaggaattccatttttttcctagacaacccacatatgatccttttgggaagccatggtagttactcagtcctcaagacattttaaggtctgatatcaaatggccacagatatttttctcttctgttgcttccttgtttatttctccctcacccttttctaattctaactttctaaaaactaattcttccagagattaaactgtaggtatttcaaggtataaagagggtagccgtattactgaataatattgactgaaaacctccctatgctaaataatgacagaaaggt

SEQ ID NO: 267822 - DNA, 534 bp, Homo sapiens
ctgacctgtgttgaccacatctgtagattcttcccccattggcgatttaccataggtaagccttctccctgcaatttctgaggcacagcagacaagggaaaaagtgtgaaaagkttactcattataaactgagaaatggataaactcgtaatttttaaaacatatgaaacacatgttccccaggtaagaccttacactctaaatgtcaagccagagtgaattcttaatgctgagttataaagctctgaaaatagagtttacaatgaaaatgttgacaggctcttggagagactgtagtatagaaaatttaatatgtcaccttgttttacaagattttactggcatagaagaaaattaaaacatttaacatctttcacttcaccaaattgctttcctcctccaaactgtggtgctatttgtagcgctatttcatttgtaatcctccttgttattgtcattgtgcctaacacacattctcaactcagcactcacattttcttcctgaagtgctaacatgcttactggggaggcatt

SEQ ID NO: 267823 - DNA, 549 bp, Homo sapiens
actctaaatgtcaagccagagtgaattcttaatgctgagttataaagctctgaaaatagagtttacaatgaaaatgttgacaggctcttggagagactgtagtatagaaaatttaatatgtcaccttgttttacaagattttactggcatagaagaaaattaaaacatttaacatctttcacttcaccaaattgctttcctcctccaaactgtggtgctatttgtagcgctatttcatttgtaatcctccttgttattgtcattgtgcctaacacacattctcaactcagcactcacattttcttyctgaagtgctaacatgcttactggggaggcattatctggtaatcttattcacattttctgaaggcatgttaagttataagagttgtttgtgaggaaaggctgaaattatttacataactacacaggcaacataaataatgctgattattaaaatatttcctagaaaaacggcttttaaaaagcccttttttaaagtgaaacgtttgtactacaggtatttacacaaattcaagggaaaaataa

SEQ ID NO: 267824 - DNA, 549 bp, Homo sapiens
actctaaatgtcaagccagagtgaattcttaatgctgagttataaagctctgaaaatagagtttacaatgaaaatgttgacaggctcttggagagactgtagtatagaaaatttaatatgtcaccttgttttacaagattttactggcatagaagaaaattaaaacatttaacatctttcacttcaccaaattgctttcctcctccaaactgtggtgctatttgtagcgctatttcatttgtaatcctccttgttattgtcattgtgcctaacacacattctcaactcagcactcacattttcttcctgaagtgctaacatgcttactggggaggcattatctggtaatcttattcacatwttctgaaggcatgttaagttataagagttgtttgtgaggaaaggctgaaattatttacataactacacaggcaacataaataatgctgattattaaaatatttcctagaaaaacggcttttaaaaagcccttttttaaagtgaaacgtttgtactacaggtatttacacaaattcaagggaaaaataa

SEQ ID NO: 267825 - DNA, 549 bp, Homo sapiens
actctaaatgtcaagccagagtgaattcttaatgctgagttataaagctctgaaaatagagtttacaatgaaaatgttgacaggctcttggagagactgtagtatagaaaatttaatatgtcaccttgttttacaagattttactggcatagaagaaaattaaaacatttaacatctttcacttcaccaaattgctttcctcctccaaactgtggtgctatttgtagcgctatttcatttgtaatcctccttgttattgtcattgtgcctaacacacattctcaactcagcactcacattttcttcctgaagtgctaacatgcttactggggaggcattatctggtaatcttattcacattttctgaaggcatgttaagttataagagttgtttgtgaggaaaggctgaaattatttacataactacacaggcaacataaataatgctgattattaaaatatttcctagaaaaacggcttttaaaaagcccttttttaaagtgaaacgtttgtactayaggtatttacacaaattcaagggaaaaataa

SEQ ID NO: 267826 - DNA, 519 bp, Homo sapiens
ataaggcatatagaataaagggtgcaaagccgtggcaccagaatgcacatttatcaaattgctgtaaaacatgaagagatgagtatggatttggttacaaatgaggctagagtctgggtgcagtggcttatgcctgtaatcctagcactttgggaggccaaggcaggaggatcacttgaggtcaggagttcaaaaccagcctggccaacatggtgaccccatctctactaaaaatacaaaaaaaaaaaaaaaaaattagccaggagtgctagcacatgcctgtaatcccagatactcaggtggctgaggcaggaraattacttggcttgaacctgggaggcggaggttgcagtgagctgagatcacatcactgcactccggcctgggcaacatgagcaatgatctgtctcaaaaaaaaaaaaagaaaaaaaagaaaagaaaatgaggctagaggtataggcaggactcagatgctaaaagacatttaggccaccagaaagagttctcattcttctatgg

SEQ ID NO: 267827 - DNA, 579 bp, Homo sapiens
catagtcagaaacccaggacatggatgagatgcattcctctaggtttccatgtataagattctctctgacaaatgcctatggctattcattaacagtgtcaactcgtcactattcttatcagagtaggcagtaggcttcaatgatatttacaagttaagaagaasccagctctatatgctcagtcaatagcagtaaaacaaatcctggcttacaatgtttaggtccaggctaataaaatgctcttgaatataccagtttctatcaaaatgttcataccgtttgattaagtcattacaccactaggtaagaagaagacttgtcaaaggtatgtacagaagagcatttactaaatacaagaacattcattaatgaattattagcaaaagcaaaaattcagaaacaaatagaatagctttcaatatgtgaatcataaaccatgaaatattatgcaggaattaaaaaccatgaaactgatctgtaagaacaaatataggaagatgcccaagatatatcattaagtgaaaaaacaagccacaggataatcagataatctcatttatgttaaatagcaaagacag

SEQ ID NO: 267828 - DNA, 573 bp, Homo sapiens
ttagactgcttattatagagtatgcagatatagattataaatataaagactgttaacaataactttttacagggagataagtaattgtgttcactaactgtattcattactttcatctatatatactgcttatgacagtagacgtttaagatggttgaagtaccatacactgagattttccatgatttcctctaattaatttacttggcttccaggacacactctaggttttgatgtctctttactttgtagaaaagctttgtatctaatattaatatcttaattcaaatgtgtttgtatacagttattgagtcyaaataatatattttaccatacacataaaaataggacaaaaatcagtaccagaaataggttcataaagttattatccatcattatttcatcagaattgtataactgtgctatctaatgtaatgctacaattattctacttaatgatggggtgcaggacatgctacaccaaaatgtggtggtttggaggtcacgctctgcctgtctgccacctttctatgtgagagctgtccataaaagaaaccctcatgtgacagggag

SEQ ID NO: 267829 - DNA, 541 bp, Homo sapiens
tagctatttccattgtcacatgaattagaattcataacaaagaaaaggaaatgaaaggttgaaaattttttttaggttattttgttgatgtttctactataaaaagccttgtcaagttctctattgtaaattttataatgtagaagatgtcttttcactctgcatatttttcaggaatatatttgtattttaattttattgcagagttaattgacttaggaaggaggcaactaaaaccctactctttaaaatgcaattatttaagttgagggtgtgggggctgtgtgatggaatagrcgttggggaaatattggtgatggctgtatctcaatttgatttagcaataaaattaaagaaaaatgataagactagtaaacatataacagttacttataagaccacatttatttcttattttttctttctctcatgctttaactacaaaacaatgggaacatttagctaaatgaagatcattaagtcattaagaattacagagtcagagcaatttaattttctgcttatcatttgaaaataaaca

SEQ ID NO: 267830 - DNA, 484 bp, Homo sapiens
taacattggcaatggtcaattttgattataaagaagtccgtatgacagcttaattattttgcagaaaatatggccatttcgaaaatcattttaaataagttaaattggtctttataatgtttttaagccataaagacagttcttctttgtctgtcattaaaagtaattggcttataagatttggttaatttttaaaaatattattaacatacactactgctttacaggagtgtatttacctccttgatctattgaaaacattttagccagtttaagtttakggtaagtgttttaatcccaggggtagccataaggaatttaacttcatctctcaaacaaaatgtggatttttatctaacaaaggatgaaaatacaagttctgtactcactgatttttgatcgtgaagacaaagaaaaagtagaatgaagcctgggtaagagagttgagaacaaaaggaaagtaattttagatcaaatccttaca

SEQ ID NO: 267831 - DNA, 510 bp, Homo sapiens
aggcatatcaagagaagaaataaaaatcaatgtattttatttctaggattggtactattattgacacaaggatattgcatcaatatactctctagctatcatttttattttttgcatattactttttaagggtggcctgtgaaagcaacacgagattcccaaattatagacttaaaggtttactttaaaaagatgagatgattgttatttaactttcatccatctgtttctctttaaaaaactgcatttgcagcaaatcaagagtaacacrattttgaaaactgaaaaacaaaaaacaaaatatctgagcagccaatatactttaggataattttctaatgttctatgaaaataggtaaatcaatacaaggtgaaaatgttttgtttatttctagagatgttgattatgtatcaaacccagtttgtccatgaatgttaaatagacacttaccaagtgtctatttggttaaaatttggttaaaatttattttaaccgaagaattcaggaga

SEQ ID NO: 267832 - DNA, 631 bp, Homo sapiens
agatgcctgttatctcagcactccggaggctggggcaggagaatctatcgaacctgggaggcggaggttgcagtgagctgagattgcaccactgcactccagcctgggcaacagagtgagaatctttctcaaaaaaaaaaaaaaaaaaaaattagaaaagtcaaatcaatgaaccttttcctgtttttcctctgaagtacagaataaaagctaccttcctggttttactatgtccaggtaatttatyagacttaaataatcaataggcacaaactgatgtcaattcatacaactagattcaaaataccaaaactggagaaaccagagattactatatcctactcatattttacagatgagagaaatggtaagtgacctactcaaagttacaaggctaataaatccttaagttataccattcaactagggtacgtctctttcagattgcttcacactagccagtggaaggaactgttttgtagttggagtaataaaccttgatccaatggtctaaccaggaaactaatagtcagaggatgtatcaagctttttctttttgtatttttagtctcaattgaagaattgacccaattgggagtatgtgtcttggagggagggaacgtggttacag

SEQ ID NO: 267833 - DNA, 631 bp, Homo sapiens
agatgcctgttatctcagcactccggaggctggggcaggagaatctatcgaacctgggaggcggaggttgcagtgagctgagattgcaccactgcactccagcctgggcaacagagtgagaatctttctcaaaaaaaaaaaaaaaaaaaaattagaaaagtcaaatcaatgaaccttttcctgtttttcctctgaagtacagaataaaagctaccttcctggttttactatgtccaggtaatttatcagacttaaataatcaataggcacaaactgatgtcaattcatacaactagattcaaaataccaaaactggagaaaccagagattactatatcctactcatattttacagatgagagaaatggtaagtracctactcaaagttacaaggctaataaatccttaagttataccattcaactagggtacgtctctttcagattgcttcacactagccagtggaaggaactgttttgtagttggagtaataaaccttgatccaatggtctaaccaggaaactaatagtcagaggatgtatcaagctttttctttttgtatttttagtctcaattgaagaattgacccaattgggagtatgtgtcttggagggagggaacgtggttacag

SEQ ID NO: 267834 - DNA, 631 bp, Homo sapiens
agatgcctgttatctcagcactccggaggctggggcaggagaatctatcgaacctgggaggcggaggttgcagtgagctgagattgcaccactgcactccagcctgggcaacagagtgagaatctttctcaaaaaaaaaaaaaaaaaaaaattagaaaagtcaaatcaatgaaccttttcctgtttttcctctgaagtacagaataaaagctaccttcctggttttactatgtccaggtaatttatcagacttaaataatcaataggcacaaactgatgtcaattcatacaactagattcaaaataccaaaactggagaaaccagagattactatatcctactcatattttacagatgagagaaatggtaagtgacctactcaaagttacaaggctaataaatccttaagttataccattcaactagggtacgtctctttcagattgcytcacactagccagtggaaggaactgttttgtagttggagtaataaaccttgatccaatggtctaaccaggaaactaatagtcagaggatgtatcaagctttttctttttgtatttttagtctcaattgaagaattgacccaattgggagtatgtgtcttggagggagggaacgtggttacag

SEQ ID NO: 267835 - DNA, 499 bp, Homo sapiens
tcttctaaaacttctattaaagagttaatgttcatggctctattctatgccytatgatggaggagcaatcttttacatggtaccttgaacttgggcatgatccctgaggcctcccactgttttcaggaggctgtgccttacctgatgctggtgccaggtttgcagcctctaattgtttagaggttttcatggtctttttcctaagagatctggttgtattgctattgggatcattattatcctctcaggggggccatggctgtgcttttgagccattgctaggcattgcattatgatggctttttctctttgatcgagaattgctgagatcatccagtgggataattacattaacttttactatctttcacattttaaattgtgtcaatataaagctttgagagtagctacaggggtctcagggaggagttcactgaagtgaagtaagctgattgggcagctcagtcttctttaagatgtattgccttttcctggtcac

SEQ ID NO: 267836 - DNA, 588 bp, Homo sapiens
atgcacacaaacttggttaaacattatttcagggtgtctatgagggtgtttccagaagagcttagcatttgaattggagagagtgagcagatgaccctccccaattgggctagcatcatctaatccattaagggccttaatagaacaaaaagargtaagaaggttgaagattctttctacctgactgacaagttggtacatcaatctcctacctcaatgttcctgattctcaggccttcagactaaatgaatagctttccaggtctccaacttgaagacagtgtgtcatgggacttctcagcctccataatcaagtgaacaataccttatagtaaagctctgtctctgctctcctactatgtatatatgtttctaaaaataatcatgtgagatttactttcccttactaaactcatgactaaaggaaaaacaagaaattatgtttgaaaggaagcaatggtatttaaggcattaacagttactgtacacattcaatgataagttttgataatttgattgtataaaactaaattttctttacaatgcaatactttttatggtcattaaaatagtttcattgatatatat

SEQ ID NO: 267837 - DNA, 588 bp, Homo sapiens
atgcacacaaacttggttaaacattatttcagggtgtctatgagggtgtttccagaagagcttagcatttgaattggagagagtgagcagatgaccctccccaattgggctagcatcatctaatccattaagggccttaatagaacaaaaagaagtaagaaggttgaagattctttctacctgactgacaagttggtacatcaatctcctacctcaatgttcctgattctcaggccttcagactaaatgaatagctttccaggtctccaacttgaagacagtgtgtcatgggacttctcagcctccrtaatcaagtgaacaataccttatagtaaagctctgtctctgctctcctactatgtatatatgtttctaaaaataatcatgtgagatttactttcccttactaaactcatgactaaaggaaaaacaagaaattatgtttgaaaggaagcaatggtatttaaggcattaacagttactgtacacattcaatgataagttttgataatttgattgtataaaactaaattttctttacaatgcaatactttttatggtcattaaaatagtttcattgatatatat

SEQ ID NO: 267838 - DNA, 588 bp, Homo sapiens
atgcacacaaacttggttaaacattatttcagggtgtctatgagggtgtttccagaagagcttagcatttgaattggagagagtgagcagatgaccctccccaattgggctagcatcatctaatccattaagggccttaatagaacaaaaagaagtaagaaggttgaagattctttctacctgactgacaagttggtacatcaatctcctacctcaatgttcctgattctcaggccttcagactaaatgaatagctttccaggtctccaacttgaagacagtgtgtcatgggacttctcagcctccataatcaagtgaacaataccttatagtaaagctctgtctctgctctcctactatgtatatatgtttctaaaaataatcatgtgagatttactttcccttactaaactcatgactaaaggaaaaacaagaaattatgtttgaaaggaagcaatggtatttaaggcattaayagttactgtacacattcaatgataagttttgataatttgattgtataaaactaaattttctttacaatgcaatactttttatggtcattaaaatagtttcattgatatatat

SEQ ID NO: 267839 - DNA, 428 bp, Homo sapiens
tatgcttagtgcctaacacagtgctcctcagagaaagggaaaaagtaacgtctaattggaaatacattctcagaaatacatgcttagatgactttgtcaytgagtgaacatcacagagcgtacttacactaatctagatggtagagcctaccacacagctaggccttgtggtatagcctactgctcccaggctgcaaacctgtacagcaggtcactgtactgaatactgtatgtaagagttaaagaaacaggaaagaaacatgaaatgtggctcaacagtcaacaggtttattttagagaaataaacctgagagggacttctgtctgattttggtcaggagtattctctcttacagactaacagtatatattgtttttagggcaaggggccttatcacaagcttggaatgtttctgtgtgggggagaa

SEQ ID NO: 267840 - DNA, 604 bp, Homo sapiens
tttgtagctatggtatagctaacctttaattcctaacatcaagtcttcatattcttttctctacagtatgccaagggatgtctgaaaccttaattctttgaagtgggcatgacattggttctaagtttgggctaactaacccaccataccattatgaatgtagtgagcttttcaagccggcagattgtctgctaagggcacctacatcaacacatttagttcactcargtcccctcaaactcaatatgtacaaatatgctgtagtgtttgttattaaacatgcacagatttccatttatatcagtctgatcaaaataatttacttccatatgtggttattttagacattatttaaagaatgtaaagtaatcctgaaaatgtcaaatgagtattacaataacttcacaaggctattgattctttctgatgaatatacttatttgtcttataaaatttatacttattattaaggaatcagagcatttaaaaaatagatttttaattattgtacaaagcaattaaatatccaaacctgtgttgaatcaggactgtgagtgatcttagtatgtgaaatagtaatgttttctgatggccagaactacat

SEQ ID NO: 267841 - DNA, 602 bp, Homo sapiens
tatttaccattaatttgcaaattaactgtcttaatttaagataattaaatgcatattaaaaatattttgaaaggctgtattataacatactagtattggtttactaatttagttgattggaaggttatgggtcatattttggtctatacttcttcatattttgtacattttcatcaatgggcatatttttaccttgataattagaaaatttttkatactttaaaagtttagcttcttatataacttaatcatcatcattataataatcacttttagtactaagcactttcttttttatcatcttatttaaaacctcaaaaatgagtctagggaagttgaggctagaatataaaagacctagtatgcacattaaagttttgacaataagagaaaattgaaagtgtttaatgtgaagactggcattataatatttattttgaaaaaaattaaaaaaacctgtaagttacacccagagtggaatgatttggggaggaactggagttgactatggtattgatggagggagacatgagtatagttacagagggaaggaaatagtagggctttgctaaagagaaaggctaaggagacattttggaacg

SEQ ID NO: 267842 - DNA, 533 bp, Homo sapiens
gtggcttctgcacttacataggattgaaaatgaaataatcaatggtgataacatttgtagactatactttgagagctgtacaagaacatctcatttctttttgggagaccgtagaacaaaagtgcatgaaaaataagtaaggtggttaagtaagcagaaggtttagggagcattggaaagaggtaaaattatatgggaaggccagagagacaagtagtggcayggaactgaaggaagttcaggatggctagaatatggcaagtgttgagacgagtggagagccaggcaggcggcaggcagcaggctttgtatgacctgttaaattacaactgacacccaaataagtccaagtgcattcgtctttctaggattatttatcaaattcctacattttttcaagctgtttaagatacaaagattaaaaaagaacgattttttaacctatcgcatctccaatttggtgtaatagaaagtgaaataaaaggatgacagtaatacagagtaaaaagtgatatgaatgtaaaagccagaag

SEQ ID NO: 267843 - DNA, 497 bp, Homo sapiens
ttgtgtctgtgtgttccttctgaaaacagtagaaaaatgatattgtaacaataaatatggagcttacacaatgggaaacaaggaagagaaatcttaacatcaatggcagagttaatgtagaattgcagaatgcaggcccaaagtaataaggataaggtgacaatcttgatctggttaagagatatatagtacctcrcgcattatgactgtcctgttacttggagtcgttgacaactgactaaacatagggacacatttggtattcttttgcattcagcagaatgcagcagaataagcttggcagatataaaaaaacatttatgttcctccttctgcccttctccatccccttttgaagtgcctatacacaggggctttgcctggggatttcccagggctcctcctgccaaacaagctcaggcagggcagaggggtctcaaaatcctgaggacttggttgtgaatttggagtctgaattatttatctgttttcattcc

SEQ ID NO: 267844 - DNA, 438 bp, Homo sapiens
tagttttgatttgcatttctctgatgatcactgatgttgagggccttttcatacacattttccatttgtatgtcttcagatattgagaaatatctattcagatcttttgaccatttttaatcagattattaggtttttacttacagaattgtttgagcttatatattctggttattaatcccctgcagatattttctcccattctttgggttgatacttctttttgttcattgtttcctttgctgtgcaaaagctttttaacttgatgtgattccgtttgtccacttttgctttggttgactgtcctcgtggggtattactcaagaaatcttcgcccaccctaacctcctcgagattttcaccaatgttttcttgtagyagtttcatagcttgaggtcttagagttaagtcttcaacctattttgattttatttttgt

SEQ ID NO: 267845 - DNA, 438 bp, Homo sapiens
tagttttgatttgcatttctctgatgatcactgatgttgagggccttttcatacacattttccatttgtatgtcttcagatattgagaaatatctattcagatcttttgaccatttttaatcagattattaggtttttacttacagaattgtttgagcttatatattctggttattaatcccctgcagatattttctcccattctttgggttgatacttctttttgttcattgtttcctttgctgtgcaaaagctttttaacttgatgtgattccgtttgtccacttttgctttggttgactgtcctcgtggggtattactcaagaaatcttcgcccaccctaacctcctcgagattttcaccaatgttttcttgtagtagtttcwtagcttgaggtcttagagttaagtcttcaacctattttgattttatttttgt

SEQ ID NO: 267846 - DNA, 574 bp, Homo sapiens
gtaaatactaccttataaccattattttaaactggtaacaacttaacattgcttggataarcatacaaattaactatgaagcaaaaagaaaagtaaaaaacactacacttatctttgtcttcccactttttaactttttgttatttctatttatatctcattgtaatgtctatgtcttgagaagttgtagttgtttttgattggttcattatttggttttactacttaaaataagaggagtttacacaccacaattacggtgttataatattctgtgtttttctgtgtacttactattgccaatgagttttataccttcagatgatttcttattgctcattaactttcttttctttctgattgaagtactccctttagcatttcttgtagcataggtctggtgttgataaaatccctcagcttttgtttgcgtgagaaagtctttatttctctgtcatgtttgaaggatattttcactgaatatactattctagggtaaaaagttttttccttcggcattttcaatatgtcatacctgtaaggtttccactgaaatgtctgctgccagacctat

SEQ ID NO: 267847 - DNA, 574 bp, Homo sapiens
gtaaatactaccttataaccattattttaaactggtaacaacttaacattgcttggataaacatacaaattaactatgaagcaaaaagaaaagtaaaaaacactacacttatctttgtcttcccactttttaactttttgttatttctatttatatctcattgtaatgtctatgtcttgagaagttgtagttgtttttgattggttcatyatttggttttactacttaaaataagaggagtttacacaccacaattacggtgttataatattctgtgtttttctgtgtacttactattgccaatgagttttataccttcagatgatttcttattgctcattaactttcttttctttctgattgaagtactccctttagcatttcttgtagcataggtctggtgttgataaaatccctcagcttttgtttgcgtgagaaagtctttatttctctgtcatgtttgaaggatattttcactgaatatactattctagggtaaaaagttttttccttcggcattttcaatatgtcatacctgtaaggtttccactgaaatgtctgctgccagacctat

SEQ ID NO: 267848 - DNA, 592 bp, Homo sapiens
atgacacatagtactctgccttttatatctctttcacatgcataagttgtgtttaatgtatgacttcccttttgaattttaaattgtgtgaggcaaggacaaggtctgtctctatctttgttatatgccagtgtttggattattacctgaaaattaaccattgcacaaaactatttgctgaataaataaatgaaggaggctcggtgcggtggttcacaccagcaatcccagcactttcagaggccaaggtgtgtggatcacctgaggtcacgagttcgagaccagcctggccaacatggcgaaaccccatctctactaaaaatacaaaaattaggtgtggtagcaggtgcctgtaatcccagctacttgggagaccgaggtaagagaatcacctgaactagggaggtggaggttgcagtgagccgagattatgccactacaagatcacgatgatcatgccactgcactccagcctgggcaacagagagamtccatctcaaaaaaaaaaaaaaataaaaataaaaaataagtaaataaataaatgaaggaatgaacagacagtaaagcgtctttttttttttttttttggttg

SEQ ID NO: 267849 - DNA, 606 bp, Homo sapiens
ttatggtctttttttacaacttaatattcgctaaagaaaacaaaagatttaggagacccaaaaaagtcactatgtattatttaatgatggraagacaagggactggaatgtgtggcatcctgcagaggaatgtggtaatgacaccacacatactgtcaccagttatgcctactctagggcttcttgccatttcatcttttgataaactttttttcttattaaagtttgcgattctacatgcttgacaactgaaatggctgaatctttgaatttttaatacttctaactgaatcttgatatagtactgtaatttaaaaaattgaacttaaaaaatttataacacaatgccttctttctctagataaaaattcaataccccattgtactctctcctgccatctcatgacttcaataaataacaatattataataaatcaatctttttactattaacagattacttaagccatcaaggctcttttccattcactgttttttagaagtcatctgcaagctgaaggttttatcatttgccagcaattagtaagaaaaaagtaacaaggttatgtttgaggaagtatcaattctttcaggtcacaataataa

SEQ ID NO: 267850 - DNA, 571 bp, Homo sapiens
acattgccagccatctaggcattgctcgatgcagtcaagttgacacctaatattaaccatcacacctgtcaactttttttcttatactcagttttcatggcacctggtgttggagttgggttgagcattttaaggatccagtttagggaaagttaaattagagatacatttcatttgagtctagtgggatataaattttagttcttagtcattgctgtatgtgcaattattgttagctgtgctagtgtagaaatgcctatcaagaaacaccccgactgcccactgtgtggacccagcagcatcttgacacgaagtaacagggcttatagctacctggcaccagaagcgtttgggcacagaagtggcatrtacttttaaaagtggagagagaatcaaaatctgtggaaaacctttctaaatctcctagcgcatatatgaaagaaattcagatagagattttcctaaatttgacaagaattctaaaaatttatataacattaccaataattggttgtgaatctaaaggaaatatttctatgttattgagaataattttaaaaaatatatcaac

SEQ ID NO: 267851 - DNA, 571 bp, Homo sapiens
atgacaggacatagagatattttctttgattcttacatgtcattgagaagtaacaataatcagcatctctgaaatttcctttcacttatagagacccaagccttctggcaattttccatgaatgaagtctttcttgtaatcargatattcctgttttattaatttttttcttttatatttgtctgcgtaagaacagggaactgtcttaacagaatttctaatacctaggtggtcagatattccttcaaattaaacaaatttgatgtcttaaaactaagtgtaacaaataaataaataaataaagagaatgttcagctcctttgctaagctatacccagtaatttagaataagagtttaacggataaaataaaataagcaatagttactatttcatgtatatcctagtgcaggggtccctaaccctgggccatagactgatacagtgtctcctaaggaacagggccacacagcaggaggtgaataccagcaagggagggaagctgagctccgcctcctgtcaagtcggcaaattagattttcatgggagcatgagccttattgtgaactgct

SEQ ID NO: 267852 - DNA, 571 bp, Homo sapiens
atgacaggacatagagatattttctttgattcttacatgtcattgagaagtaacaataatcagcatctctgaaatttcctttcacttatagagacccaagccttctggcaattttccatgaatgaagtctttcttgtaatcaagatattcctgttttattaatttttttcttttatatttgtctgcgtaagaacagggaactgtcttaacagaatttctaatacctaggtggtcagatattccttcaaattaaacaaatttgatgtcttaaaactaagtgtaacaaataaataaataaataaagagaatgttcagctcctttgctaagctatacccartaatttagaataagagtttaacggataaaataaaataagcaatagttactatttcatgtatatcctagtgcaggggtccctaaccctgggccatagactgatacagtgtctcctaaggaacagggccacacagcaggaggtgaataccagcaagggagggaagctgagctccgcctcctgtcaagtcggcaaattagattttcatgggagcatgagccttattgtgaactgct

SEQ ID NO: 267853 - DNA, 684 bp, Homo sapiens
aggggtccctaaccctgggccatagactgatacagtgtctcctaaggaacagggccacacagcaggaggtgaataccagcaagggagggaagctgagctccgcctcctgtcaagtcggcaaattagattttcatgggagcatgagccttattgtgaactgcttacataagggatctaggctatgtgtgccttatgagaatctaatgattaatgcgcttgaatcatcmcaaaaaatggtctccactaaaccagtccctagtaccaaaatggttggggaacaatggcctagtgtacagttctcttgttttgaaagaagaagaaaccaggcaatagaaataactggtgcgataaattgacacttgaaaagcaggtagttaaggggaacaatgtttaagaaggcagtgagttttgaatcattaagacttgtaaagctgagtgtctaaagtgaacattttaattatggcatgtttcagttgtaaaaatagatcattaagaatcacttataatcttggccctaggataggtattttggatatattcttaattatgtaaccaaatgcctaataatatgtcaccagtattgtagatttctgttgccacctaaaattctgcattatatgcctgattctacaataaactaaccaatatcccctttggaaaatataaggctttaaccatttcttt

SEQ ID NO: 267854 - DNA, 578 bp, Homo sapiens
gcacctccacctacaataccagcggtattctcatataccgttgtaccgctctattttttttttttttttttttttttgagacagagtctcgctctgtcgcccaggctggagggcagttgtgcaatcttggctcactgcaacctccgcctcctgagttcaagcaattctcctgcctcagcctcctgagtaactgggtctacaggtgcatgccaccacgcctggctaattttttgtatttttagtagagatggggtttcaccatgttggccaggctggtctcaatctcctgacctcatgatccgcccgcctcggcctcccaaagtgctgagattacaggtgtgaggcaccgtgcccagccatactgctctattttttaaattatgcttaacatattctaacatattttatggkttattattgtctttaccccagaatataaataccactagggcagaaaagtttgttttgttcattgatgatatatcctaagttcttattacatggtaggtcctcaataaatatttttaaataaatagaatgtgatttataatttgacttaaacacttcaaatgaattaa

SEQ ID NO: 267855 - DNA, 547 bp, Homo sapiens
ctggtctcaaactcctgacctcggatgatcctcctgcctcggcctcccaaagtgctgggattacaggcgtaagccactgtgcccagctgaaccctggattcttatttattcgaaggttaaagtctttgagatgccaaggcaggaggatcacttgaggtcaagaatacgagaccagcctagccaacagagcagaaccctatctctactgaaaaaaaaaattaactgagcatggtggtgcacatctgtaatcctagctactcaggaggctgaggcaggaggatctcttgagcccaggagtttgaggttrcagtgagctatgattgtgccactctgtcaccctgggtgacagagaaaaacctgtccctaaaaaaaaaaaaatatatatatatatatagttaaaatattttatagtttgaaaagatacctgagcacatttataggcatagaagaatcaagggagatatagaagagcgtgtatgattgatgcagtaaagcaactaacatgcttttactctgcaaccctgttaaactccaaatgggctaagtg

SEQ ID NO: 267856 - DNA, 592 bp, Homo sapiens
cacaccacattagagaaaatactgaggagcccaccaggtccagcccagaggctatgtctggggtgagaccccctaactgtgtcttttgcacagcttctccttccattccagaaaccacgatttttccagaagggccaagtttttccacaggcggtctccacagcagtgccacagtggctctggcattgagggggacagacagcaggcgggtgaagggcaaagaggggaaacaaaagagatgtctgaaaagggagagatagaggaagggcggccttttatgtctacgggaaacctgtttgtcaagttcttgtaagtcagggattgtaygtatatccaaccatactttactacaattaaaaaaaaaagtcattcacggttgacatttcctaaatgtcatgtatagctacgaaacacaaccctggcaagatgtcaaaggtactgcctttgttgttaaaatctggtttgttcaggcacagcaaataactaacaaactcatggccattttctcttaaatcgaaaaatattttctgatgtatcccaaaaagcgcttttaaaatacatctacagacagttaaaagctatttgtattttc

SEQ ID NO: 267857 - DNA, 518 bp, Homo sapiens
tttcaggtagcagatatactgtctttactatgtttctaccaaagtaacctgtgcttgggagtctatagaaaagttggttcctaaactggctctgaaagggattccacaattattttatgcaatggcaacattgttggaatacatgcataaacctcaaagaggacatctttcctcaaagaggacaactttgaggaaaaatgctcatttggataaatagctttcttaagcctagagagaaaaacgattgaaatttcagtagtgataatccctagggtgaaggattattggtaatttttcttctttttaataattttctctgctttctaaattttctatagtgagtatgtactactttaacaatctgaatttttgttttcaatctcagaayatattatggaaaacagccttaaaaaagtgaaaaggagttgggcatggtggcaagcccttgtagctccagctacctgggaggctgaggcaagaagatagctttagcccagagttcaaggctattatgtgct

SEQ ID NO: 267858 - DNA, 561 bp, Homo sapiens
aaaataaacataatcagataagcatcacagctcacaattaaaatggatttatatggcttatgtgtccacatgggacaggcctcttcataattgaattcggacacctcttcagttattgtgggcttcatttaccatcttcctagtctttcataactgctggcaataggattatgctgagggggaaatcattttcaatcactgatgtctgcagtacaagcataaaaagataaaagtaaagcctttgagctgtaattagaaaattcctaaagtgtgctcatgtggcatatggtttagactactaccaactggcaagaccagttacagaagggatgtctaatgtcaccgttctgggataagcagccagtacaagtagcrttccaacacatgattagagtaatcttttgcagggtaaaacattcctgctttccacctctaatatgattagtgacaggcagctggaggcatctcattctcctgacaaaaatatgatcagaattgttttcaattggtacatctttccatcaagctgttgccttccagcagaataatcagagtttctga

SEQ ID NO: 267859 - DNA, 585 bp, Homo sapiens
acaggttcacgttagaagtactggtctacaatctacacaatctcttgagtttggctaagcaaacaggagttgaatgtaggtgagatataacaaaagtaaataataatgtataattataatacattaacatatgtattacatatgtattatataaatgtaataatgtgtcgctgatgcttccaattagacctcttggaaaagggggctgacagggattcaagatctgttactgggaatgttcttatcttgtccagcctctaacaaccatatcacctgtaaacagggmatggggataatgacagagaacttactgggctgttgtgcaaatcaaatgagaaactagtgtgatggttctatgctcccaaatgtttataattgttattaataatatgactcttttaagtcacttgagtaccatttattaaatttccactttagggaactaaaatagtatatggcaactcccgaaaatgcttttatccatgtttttctactcatgcataattgaagaatgccttattacactataccttctacaaattgctcctggaaggggcaaggctttctttctttttttttaacgat

SEQ ID NO: 267860 - DNA, 585 bp, Homo sapiens
acaggttcacgttagaagtactggtctacaatctacacaatctcttgagtttggctaagcaaacaggagttgaatgtaggtgagatataacaaaagtaaataataatgtataattataatacattaacatatgtattacatatgtattatataaatgtaataatgtgtcgctgatgcttccaattagacctcttggaaaagggggctgacagggattcaagatctgttactgggaatgttcttatcttgtccagcctctaacaaccatatcacctgtaaacagggaatggggataatgacagagaacttacygggctgttgtgcaaatcaaatgagaaactagtgtgatggttctatgctcccaaatgtttataattgttattaataatatgactcttttaagtcacttgagtaccatttattaaatttccactttagggaactaaaatagtatatggcaactcccgaaaatgcttttatccatgtttttctactcatgcataattgaagaatgccttattacactataccttctacaaattgctcctggaaggggcaaggctttctttctttttttttaacgat

SEQ ID NO: 267861 - DNA, 585 bp, Homo sapiens
acaggttcacgttagaagtactggtctacaatctacacaatctcttgagtttggctaagcaaacaggagttgaatgtaggtgagatataacaaaagtaaataataatgtataattataatacattaacatatgtattacatatgtattatataaatgtaataatgtgtcgctgatgcttccaattagacctcttggaaaagggggctgacagggattcaagatctgttactgggaatgttcttatcttgtccagcctctaacaaccatatcacctgtaaacagggaatggggataatgacagagaacttactgggctgttgtgcaaatcaaatgagaaactartgtgatggttctatgctcccaaatgtttataattgttattaataatatgactcttttaagtcacttgagtaccatttattaaatttccactttagggaactaaaatagtatatggcaactcccgaaaatgcttttatccatgtttttctactcatgcataattgaagaatgccttattacactataccttctacaaattgctcctggaaggggcaaggctttctttctttttttttaacgat

SEQ ID NO: 267862 - DNA, 629 bp, Homo sapiens
atctctgaggcaaactccaggctttctaaaacattgtcttgctggaaatctcatgaaatcatttgactctggtataatggtcatgatagcacaagaagaggatagaacatcgtgcagtaaaatgccatttttattatttatagcactgttctaatggagtaatttaccacgccactaatcagtaaaccaaatggaatggctttccatatctacctcatggaaaggctgtaaatgggattaaacattttttaatccatcaaacacaagagctccttggagatttaaaataaatatgcctacattcaaagctgcagataaaggcaaaagtgcatatgaattactttgtggtaagtgcagcccagaggcagtaaacttccatctggtttttctgcttccctcttcccactgctgccaatacaggaactcttttagtttttacacaccacctgcactcatcccacaggcctgttctcctttaaatgcctggaaagtagcaagcagagcagcaggtgggtgtagcaagttttccaatctacattgatgctttcagtktatgatgcatacaccttgagattatagaactccagagaggaagtgatctatcctagcagagaatcaacataatgtcc

SEQ ID NO: 267863 - DNA, 483 bp, Homo sapiens
gaataggagttacaggaaaagcagaaaaagcctgtcctacaggcccaacctgaagtgttagaaagtccaccccctgtgcaccaatttatccatccctggcaaggcttggacaggaggctaccccagctgcctccagaggctcagactcagaagaaagcacccctcagacaacaccacacagagaggagccagagcccttgcctgaaaagccaagggaggaactccaggtggatgaggtcggccaccttargtcgggccgtgcccgagcaatgcagatgcccctccgagaaacactgggacaaatttatttgaatgcacagaatgaagtctagggaggagaaaagctcttcgtttatcagcccttctctactactgatctcttaaattggagacaacatacttgctcctatacagagaagcctcaggctcttatagatctaatgcagtctattttcctaattcacaatcctacctgggctgatt

SEQ ID NO: 267864 - DNA, 585 bp, Homo sapiens
tcattataaaagttttgggttccctaaactcagggttcttctgttctaacacaaccaaccacatgtgtaggtatcatctggccctattcacaatgcctcgtggggattyggtctcagggaaccaatataaaatatgctgatgttcagcctacttgctatgccatgagtaataaagtccttgtttctgacccaggagtctcatgtctcacatccatgaactgctaacaggataatctattagttttcaagtaagataaaatctcagattcttcacagatcttgctactgctaacactgaaatggtaaatatgtgtctggcatgaaagtgacctatattgaaactgactagggaaagcaaaacaaaacaaaaaacctgcagctgaattgtgaagactctagttaaaaattagcaatgcctgccaagaaagccagcaggtgggctgtatcatgcatgctattaacactgacattgtgaggttacctttttcagtgctagttaatgggagatgcttaataaatgtttactaaactgaaatccttgttaaaattctaggtggattttaatggattgactactgagaagtc

SEQ ID NO: 267865 - DNA, 540 bp, Homo sapiens
gtagcagataggtcttgagaaaagaagtgtttttgtgaaacttctaattaaaacttaccttgcagcattattgcatctttatgtgtatctaactccttaatgctattttatccatctaggcccctaaatacctgtggttaaattcatctgcattagatctctgcattctacttccttacattctgatggattttatctctgttagcatctttcagcaccattaaagggacatgaatacattttgtgctgctccttgattgtactttcacttgactgtcattagaaaactcatacttcacatgtccagaaccaaaactctgacctcctttcactaaaaccaaacaagacccaccaactacagtctttctcatttcagtgaatgggaaagtactcattgcatttcaagtatttcaattcaaacaccttacagtcrtccctgacacctccctttctctcatcctccacatccaatctatcagaaaatcttctctgatgtttgttctatgagacttctaggcagtagctaaatctgtcacctct

SEQ ID NO: 267866 - DNA, 621 bp, Homo sapiens
ttcttagaaaggaatgcatccctgccaacaccttgatgttagcccagtgagacccattttcaaacttctgacctccagaactgtgtaataaaattgtgctgctttaagccaccactaagtttgtgacaagttgtcacagcaccaataggaacaaatacacagacttttcctgaacacacctggcctgtatcyacttcttagacctccctctggaatttcagagataagccagtttactcagccttcagtcttcatttcctccctcctgggggcagcccttactgcaagcacatactctcctgtgctcttttatgccatcgtttttacaggtgcccacccacactcagggtgggtggaagtgtctgcagtgcctggagggtaagtgctgcctgtgcctggaggggtaaattcagctctgaaactaggtttagagaatctgtgagggcaacatatgtaagccatgccctctgatccagctttcatcaataataaagctgatgttttaatctccatttgcctgacttatttcccagatgattcagaactcagatggggagaggaggaaaaggaacagaatccagcttcaggcagtaagactctcaaaagttatacatgatagta

SEQ ID NO: 267867 - DNA, 555 bp, Homo sapiens
tagtttcaaataatttcttggtttctgccttaatttctttctttattcaraagtcatttgggagcaggttaatttccatgtgattgtatgattttgagattgtcttgatattgatttctatttttattgcactgtggtctttgagtgtggttggtgttttaaatttgttgagaattgcttatggctgagaatgtggttgatcttagagtatgggccacatgcagatgagaagaatgtatatcctgttgttgttgggtggagtgttctatagatgtcagttaggtccatttggtcaaatgatgagtttagatcttgagtatatttgctagtttttagcctcaatgatctttctaatgcttttaatggggtagtgaagtctcccactattattgtgtagttacctaagtctcttcataggtctctaagaacttgttatgaatttgggtgctccattgtaggctgcatatatatttcggttatttaagtcctcttgttgaattagccctttatcattatgtaatgtcttctttgtcttttttgatcattgttggttta

SEQ ID NO: 267868 - DNA, 555 bp, Homo sapiens
tagtttcaaataatttcttggtttctgccttaatttctttctttattcagaagtcatttgggagcaggttaatttccatgtgattgtatgattttgagattgtcttgatattgatttctatttttattgcactgtggtctttgagtgtggttggtgttttaaatttgttgagaattgcttatgrctgagaatgtggttgatcttagagtatgggccacatgcagatgagaagaatgtatatcctgttgttgttgggtggagtgttctatagatgtcagttaggtccatttggtcaaatgatgagtttagatcttgagtatatttgctagtttttagcctcaatgatctttctaatgcttttaatggggtagtgaagtctcccactattattgtgtagttacctaagtctcttcataggtctctaagaacttgttatgaatttgggtgctccattgtaggctgcatatatatttcggttatttaagtcctcttgttgaattagccctttatcattatgtaatgtcttctttgtcttttttgatcattgttggttta

SEQ ID NO: 267869 - DNA, 555 bp, Homo sapiens
tagtttcaaataatttcttggtttctgccttaatttctttctttattcagaagtcatttgggagcaggttaatttccatgtgattgtatgattttgagattgtcttgatattgatttctatttttattgcactgtggtctttgagtgtggttggtgttttaaatttgttgagaattgcttatggctgagaatgtggttgatcttagagtatgggccacatgcagatgagaagaatgtatatcctgttgttgttgggtggagtgttctatagatgtcagttaggtccatttggtcaaatgatgagtttagatcttgagtatatttgctagtttttagcctcaatgatctttctaatgcttttaatggggtagtgaagtctcccactattattgtgtagttacctaagtctcttcataggtctctaagaacttgttatgaatttgggtgctccattgtaggctgcatatatatttyggttatttaagtcctcttgttgaattagccctttatcattatgtaatgtcttctttgtcttttttgatcattgttggttta

SEQ ID NO: 267870 - DNA, 555 bp, Homo sapiens
tagtttcaaataatttcttggtttctgccttaatttctttctttattcagaagtcatttgggagcaggttaatttccatgtgattgtatgattttgagattgtcttgatattgatttctatttttattgcactgtggtctttgagtgtggttggtgttttaaatttgttgagaattgcttatggctgagaatgtggttgatcttagagtatgggccacatgcagatgagaagaatgtatatcctgttgttgttgggtggagtgttctatagatgtcagttaggtccatttggtcaaatgatgagtttagatcttgagtatatttgctagtttttagcctcaatgatctttctaatgcttttaatggggtagtgaagtctcccactattattgtgtagttacctaagtctcttcataggtctctaagaacttgttatgaatttgggtgctccattgtaggctgcatatatatttcggttakttaagtcctcttgttgaattagccctttatcattatgtaatgtcttctttgtcttttttgatcattgttggttta

SEQ ID NO: 267871 - DNA, 590 bp, Homo sapiens
tccaatttgtagtccgattgagttgattcaaggaactggttttgaactctgagattcttgcctcatcttggtctactctactctgctgttaatacttctaattgtattgtgacattcttgtagtgagtttttcagctctagaagattagtttggctatttcatctttcatcttttgtatcatttaattggattccctagattccttgtgatggttttcaactttctcctgaatctcaatgctctccattgccatccagattctgaattttatatctgtcattttagccatttcatccatttcagccatttagccatgccatttagccattgctggggagcttgtgcagtaatttggagataagaagacactctgacttttgttatttttgtatctttgatgccctttaggttggtttttactgtggtataagttgggttttgttgatcggctttatttctggataattttggagggccaggtttcagctaatcaaacatggggtttgtactctaaacctagggggcyaggaccagatccatggctttttttctctggctctttgaggttaagtgcctgctgcactgaaga

SEQ ID NO: 267872 - DNA, 564 bp, Homo sapiens
tcttaaagaacccagctgaatttcattcatacaggaaaatttttttaatttaattttgtttaatgctaaacraaaaaaaaattcatcagcaattggacatttaaaacctttactgaatggaccataatttattcagaacctctacttaaaaaggcaaggatcaatcacaaattccaaaaacaactatactgcatactgtacaaggactaaagaatgaaagttatccagtagtaaaaaaattaattattactgtgattatatcttatcatttactaacatggaatcaaataattagcattaatcccccaaagtaattaatataaaataaaatgatttgaaagtaaaaggagaaggaataacttcaagaatatgaaattatataattcctattttaatttttaagattaaaaataaagaatgagaatatttaagaatttgcttcagtgaaaagaattatttatgttcatacaaagagcataattaaatagaagagcatgaataagagcctgaaagctgaatactagtgtgaaaactcccagatggtgggaaatacacaaattatct

SEQ ID NO: 267873 - DNA, 549 bp, Homo sapiens
cctccacattaggttagagaattacaacaagcatgtttcatatatttcctcgaattctcctgtaggattaaattctagccttccactatgattgggagggtatcatgacgcaccctttattggctggtttaccttctccgtctcacttctctctcatactagtattccttgtatctcccaaataaactacttgcacccaaatttttgtctcagagtctacttttaagagacccaaactaagataccatgtattaagataattggatatcagaagatgagyttgtttatccaaacagattttctcaatacaagtagatgaaaggaaattgtaattgaggaggatccctgtgcccgttgcctacatcagcactcacctcttcataactggccttctctctctgatcttgcttctgtcctactcagcctttggaccaagtccctaactcacgccccaagcattctctgctgtcctgcagccccagtgatttcttccacatttggaatcatgttttatttattgtttgtaccacttacctcacggttatctta

SEQ ID NO: 267874 - DNA, 608 bp, Homo sapiens
caatatatatcattcatgtgacagatattcattgagcatatactatgtgttaagactctgcttggtgagggagaatatagctatgaagaagacaaatgtgtccctagtccttatagagcttataatcttatgggaagatgaaggtacataagaggcataagcaggcaattttaaaatgtagaagtaaatgtgacttttgaagacaaagaccacttccatgataacttttaatcctatacttcttcccatgctaattgaatcctacacagataccatggagatgttttatgaactgtgtgattgatggcagaacatattcattaattttstccatggcacttgattgggtgtcataatgaatgcggaaatagaatccaaaggaactttaatatattgaagaaatgtttttcaaagtcagaatgaggttccgcaaggacaagctggggttttgcagaaaggcacacatacatgtgcaggattccagcatcttttctcacgggtgctgtttttacttaagcaatggcctccaatgagcatttattgaaccgctgctacctgccatgcacaatacaggaggagacttctatggattagaataatggtggtca

SEQ ID NO: 267875 - DNA, 549 bp, Homo sapiens
tgttcctgtctcctttaattccgctataattatactggacagagaaatagcagctgcggttcaaatgagtaggcgccattactccctcccaaatttcattttacttttgctcacacagcaaccccaaccagactttcattagaaatctctcatacggcttttgacttagtgtttctgtgttatgtggataaattctctcctgttaatgaactgaatragattgtccctccccctctaccaataaggggttgacgtcttacacgcaacatttctacttaaaatagagcagccattctgcctatttcacaaagggcagggctttgaagccacccacggcatgagctaacttgctcctgtattaagtgaccttataccaagtcacttttaaaaagttgctcggatcagagcagccacagtgcagtgccctcgagttccccttgcctgcagcttctgtgcctcagatggtaagtggcagaaagacaagtggctctgggcaagtaacagaccctctgagccttgtttcccaacacacccaccctttccttatct

SEQ ID NO: 267876 - DNA, 516 bp, Homo sapiens
atcattattattttattatattatcaatattgttattattattggaatgataatacccaggttgcagaatttctgagaaatacaaaataaataccatatgtgaaacygcaagacccaagttagatattattggtcaacacaatcctattttcttgccgaactccattgaattccaggcagatctagaatctggttgccttctaatttgggccaaaatctctgaccactatggaccctgtcaaaggttagcaatgtctctgggagtttcttgtgccagctttctttctcttttttttttttttcaggttatggatagctcaagtttttccattcctaaggaaatctcagctcaatatcagggttttcccaaatttcaccttgagtgccctggctacctctttctgcataatctccagggtgattcgtccactgtggggtgatcagagatctcaagggtatgctggagttcctaaagctgtattgcagcacagacagacctttctgcagcagttcact

SEQ ID NO: 267877 - DNA, 516 bp, Homo sapiens
atcattattattttattatattatcaatattgttattattattggaatgataatacccaggttgcagaatttctgagaaatacaaaataaataccatatgtgaaactgcaagacccaagttagatattattggtcaacacaatcctattttcttgccraactccattgaattccaggcagatctagaatctggttgccttctaatttgggccaaaatctctgaccactatggaccctgtcaaaggttagcaatgtctctgggagtttcttgtgccagctttctttctcttttttttttttttcaggttatggatagctcaagtttttccattcctaaggaaatctcagctcaatatcagggttttcccaaatttcaccttgagtgccctggctacctctttctgcataatctccagggtgattcgtccactgtggggtgatcagagatctcaagggtatgctggagttcctaaagctgtattgcagcacagacagacctttctgcagcagttcact

SEQ ID NO: 267878 - DNA, 516 bp, Homo sapiens
atcattattattttattatattatcaatattgttattattattggaatgataatacccaggttgcagaatttctgagaaatacaaaataaataccatatgtgaaactgcaagacccaagttagatattattggtcaacacaatcctattttcttgccgaactccattgaattccaggcagatctagaatctggttgccttctaatttgsgccaaaatctctgaccactatggaccctgtcaaaggttagcaatgtctctgggagtttcttgtgccagctttctttctcttttttttttttttcaggttatggatagctcaagtttttccattcctaaggaaatctcagctcaatatcagggttttcccaaatttcaccttgagtgccctggctacctctttctgcataatctccagggtgattcgtccactgtggggtgatcagagatctcaagggtatgctggagttcctaaagctgtattgcagcacagacagacctttctgcagcagttcact

SEQ ID NO: 267879 - DNA, 563 bp, Homo sapiens
gtcaaatacctacaagatactaggtatcatgatatatatattaaatacgttatctcrtttaattttacaacaaatgtataaggtaagtactatttggaagtgagaaaaatgagttttgagaatgttgaatcttttgcctgggatatagatttggaaattataacacttaaagttgaatttttatgaaaagttacatggcttaataatcaaacatcacttggacaattctgaaccaaagttattattagtgaacttaatcttccactttacgttgggcttgcttccaagtggtaatagccatttccaacaaccacacccatgctttaaaaaaattacatgtgagggaatatttcatatgaattcctaagaaaatgtcttccatgtttgcttcaaatattagaaatagtccacataactgtgaagcatttctcagaatgttatcattaacattgttacagctataataacatgattatttaatatgtttaatatctgtctctacttgtagaccccagcattcttggagtctgagactcatggagagggtatcgataggagtacag

SEQ ID NO: 267880 - DNA, 591 bp, Homo sapiens
gtacatgcctaaaagaggaatggctggctcatataataggtgtgcttcactcttcaagaaactgtcacactattttccaaagtagttgtatcattttacattctgaccagcagtgtatgagaggacagagtcctccatatcctcaccagcaccaggtataatcagtctttttaattgtagctgtttgaatagtgttgtagtggcttgtcattgcagtcttaatttgcatttccctgataactcacgatgtcrggcatctgttcatgggcttattatccagtggtgtatcttctttggtgaagtgtttttcaaatcatctgccaatgttttaattgggctggtatttcttagcgttaaattatgagagtttctgtgtattctgtctacaagttctttattagctgtatgatttgaaaacactttcagtggtatttgtcttttagttttctatacaatgtctttcaaaaaaatttttaattttgatgaagtccaactgtcactttgttgttttatgaaagtttctaaaagttttacagcgttatattttacatataggtccataatccattttaagttaatttttgtatatgg

SEQ ID NO: 267881 - DNA, 632 bp, Homo sapiens
gatataaatatcttgcaggctttggtgaaaagtagtgattctgtatgtaaaacatgaatacgtagctgatgcagtaartgctagaatgtttgcagcattggtggggtagagaggaagagaaaaagagatagaggctgaattacaaagagttctggtaggtaaagctcaaacatagacactgggaatggctttgattaattaaccacaactgaatccagggaagggatgttttcacttagggaaaatggatgcaagtctatataataaagtgacctcctcaacttcctggggtagtttaaataccctctctacacatccaaagcattgagaaaggagctacctcccgacgttgcttcttagaaccaggattgtagccaatcagtatatctccagtgattacaatcgccattccaaacggttgcctggacaatggggagcttaggccattggggctttttgtccttatttgtatgaattcccaacccatatggggtttaagcagagacaactgcccaatatgtccaagtacacacaggaaagaagtgactcctcattgggtgtccactgggaagacctctcttccttaggtctctccattctcttgcaagtagaaagaaattgaatggaaagat

SEQ ID NO: 267882 - DNA, 607 bp, Homo sapiens
ttaactcctcctacttcttaattcatccaacaaataattatttagcacccactcaatyccaagtactattctatgccttaaagatgcagtggtaaaagaattagatgtaaatttctatctttctggatcttatgccttgtaaaaaagaggcattggataggggaaaatggaggggagcagttaggccatgtattttactgagaataggatgaggaccattgcaagttttgaaggtaatctggcttacacctttaaatgatcactctggcctgggttcaggacacacaattagaggcaatggaagaagacagttaggagactgatttggtcccagatggtagcagtagacgtggtgtgtaattataagattttgaatatgtcttgaaggtagagctgataggattttgtatgaataaagaatgggatgttaaaaaaagaaaaaaaagagacgtcagaacgaccccaaaagtttggccagaacaactgggaagatgacacattggcactgactgggatggggaagaccatagaaggagcaggctgggaggctgggagtctggctgtgggtgccttttccacagcagcagagcgagcagttcagcgggag

SEQ ID NO: 267883 - DNA, 607 bp, Homo sapiens
ttaactcctcctacttcttaattcatccaacaaataattatttagcacccactcaatcccaagtactattctatgccttaaagatgcagtggtaaaagaattagatgyaaatttctatctttctggatcttatgccttgtaaaaaagaggcattggataggggaaaatggaggggagcagttaggccatgtattttactgagaataggatgaggaccattgcaagttttgaaggtaatctggcttacacctttaaatgatcactctggcctgggttcaggacacacaattagaggcaatggaagaagacagttaggagactgatttggtcccagatggtagcagtagacgtggtgtgtaattataagattttgaatatgtcttgaaggtagagctgataggattttgtatgaataaagaatgggatgttaaaaaaagaaaaaaaagagacgtcagaacgaccccaaaagtttggccagaacaactgggaagatgacacattggcactgactgggatggggaagaccatagaaggagcaggctgggaggctgggagtctggctgtgggtgccttttccacagcagcagagcgagcagttcagcgggag

SEQ ID NO: 267884 - DNA, 607 bp, Homo sapiens
ttaactcctcctacttcttaattcatccaacaaataattatttagcacccactcaatcccaagtactattctatgccttaaagatgcagtggtaaaagaattagatgtaaatttctatctttctggatcttatgccttgtaaaaaagaggcattggataggggaaaatggaggggagcagttaggccatgtattttactgagaataggatgaggaccattgcaagttttgaaggtaatctggcttacacctttaaatgatcactctggcctgggttcaggacacacaattagaggcaatggaagaagacagttaggagactgatttggtcccagatggtagcagtagacgtggtgtgtaattataagattttgaatatgtcttgaaggtagwgctgataggattttgtatgaataaagaatgggatgttaaaaaaagaaaaaaaagagacgtcagaacgaccccaaaagtttggccagaacaactgggaagatgacacattggcactgactgggatggggaagaccatagaaggagcaggctgggaggctgggagtctggctgtgggtgccttttccacagcagcagagcgagcagttcagcgggag

SEQ ID NO: 267885 - DNA, 575 bp, Homo sapiens
aggatcaactctcctcccacctacaaacaacaaaacaaaacacccttcctggcaccaactttattttctgggagcccagtctgcttaggaaaggaaaagtcaccaaagttcattgttttcctaggcagttggtgctccatgagtttaaagggagctccagatgggcagagatgatgaaagaatcatccaagtgaaacacttccctcttgggtgttaaatattgcatttaytgtgtccatggagctgttgaaaccaatagaactaatgagagagctggtatctgagaaagactcgtactaactaacactggggacaacatgccaaaagaaagagccaagtgacctcttggagggcagggacacagggagtgtgatcttggaaaagctctctccccagccagaagcaaaagaaagggagtcatatttgcccagggacacttgtgttttagtctaaattacagtgaagggacatatggaactggaatagacagggaaactagctaccgtgccagtgggtaaatgattttcttttactattatattgtaaatggcaccaagtattctgctggggtcata

SEQ ID NO: 267886 - DNA, 597 bp, Homo sapiens
tatgaccctcccaccatggtatttcaaaagcatataatttgtttcatttcacaggctgacagctggagggaaatttctcacaggatgacttgtaccttgagtctcacctatatctgatttaaacgatatttagatgagactttagattttagaattttgagttgatgctgaaatgcattaagacttttggggctattgagatggaatgaatatatttttcatgtgaggacatgaatttggaggcgtaggggtggaattttatagtctgaatatcttccaaaattygtgtgcagaaacttaatttccaatgtgatagctgtaagaggtggggcatttgaaaggtgattaggtcatgagggtgcagccctcatgaatgagattagcaacctcatgaaaaagcttgagggggtgaatttacttcttacatttctttaaccatgtgaagacacagcatccatccctctggaggaggcaacggggcactacattggaagcagagaacagccttccccagacaccaacctctcggcaccttgttactggactttgcagcctccagaattgtgagaaataaatgtctgttgtttataaattacc

SEQ ID NO: 267887 - DNA, 571 bp, Homo sapiens
tctttaaaacagtagcgtgtcactataatgtgataacatcatctttaagaaatagcagaatacttaagcctttcaaagtgattttgatttttagatcatcagatgtatgatgaaaatggttaaatgtttgtgatgtgagctctgtactcaatggcataacaatatttgtttttataatatacaatctttccttgaaataaaggatgaaacacttttcccttaaaataataataataattggtgggtaaaatatactataaagacataacattcccaattttaataataagattaaaaaaatcccccaaaggatcaaatgaactgttatttcagattatgaaggtttttttaaattcacattttcagatttattggctgaatttttgtcgatatctatctaacrtcatttatgatagaaaaagctttgaaaagcttaggctaaatttgtacactttatgtggtatgtgtgtatcaacacatgtacttattttaatgtaggtataattattactgaattgtggctttcaatgggaagctcactagggacagttaaatctgcctgcatttagct

SEQ ID NO: 267888 - DNA, 571 bp, Homo sapiens
tctttaaaacagtagcgtgtcactataatgtgataacatcatctttaagaaatagcagaatacttaagcctttcaaagtgattttgatttttagatcatcagatgtatgatgaaaatggttaaatgtttgtgatgtgagctctgtactcaatggcataacaatatttgtttttataatatacaatctttccttgaaataaaggatgaaacacttttcccttaaaataataataataattggtgggtaaaatatactataaagacataacattcccaattttaataataagattaaaaaaatcccccaaaggatcaaatgaactgttatttcagattatgaaggtttttttaaattcacattttcagatttattggctgaatttttgtcgatatctatctaacgtcatttatgatagaaaaagctttgaaaagcttaggctaaatttgtacactttatgtggtatgtgtgtatcaacacaygtacttattttaatgtaggtataattattactgaattgtggctttcaatgggaagctcactagggacagttaaatctgcctgcatttagct

SEQ ID NO: 267889 - DNA, 324 bp, Homo sapiens
gagacttgcacaaacacccatctctttaaaatcgcgaggccactaatcacggggtttgaatttgatgaactctagtcattctttttaggaagaaaaggctttacagctgctgcttatgttgttgccacctattcttattcattycttgccctctcgggcagcagatatcatcttcctggatgtttgaaaggcacatcaaaagtcatttgcccaatttctcttcactgataccagttcgaatcccagtactcagtgtattccacgtcctattcccagggtcctctgcgacatgtttttatacctttagattggtgaaaagaaaac

SEQ ID NO: 267890 - DNA, 622 bp, Homo sapiens
aaataattaactgaatttggttagaaactgagaacactacaaagcaggcatctaactaatagagatgatctctaaagaaaaaaaaaaaactagaatttcacattgagaagatttgggaaaatgacataatgtcataacttaagcatccttacattgtaatccaacgagcctttgtttagcaccttctctacatgcaggaactacaaggaacataagataaatatatacagtggactttacacttcagggagtataatcttgtttgtgaggcaagatacayagccatgaaaaacagaattatttaaaatatatatactttttttgagagagagagagaaaatctcacactgttgcacaagctggagtgcatttgtagagtcatggctcactgcaacctctacttcccgggttcaagtgatcccctcacctcagcctcccaggaagctgagactacaggtgcacaccaccatgcccagctagctttttgtactttttgtagatatggggttttgtcatgtagcccagactgttctggaactcctgggataaagcagtcctcccacctcagcctcccaaggtgataggattacaggtgtgagccactgagcctggcttaaatata

SEQ ID NO: 267891 - DNA, 436 bp, Homo sapiens
ttttgtttacattatttttaatatattaaaatagcattttaattctgtttatttcctatttgtcttctcaattatctaattgagaataataaatttcttatgactagaaactgtatagtcaacttgtttttgaacttctcaatagcagcccaacactgggcactcaagggaacataagattcactgaactgaggctgaatgattaatgtcacataacccctataatcattagagacctctgtgcactaaggagtgacacttcctaccgagcttccttcagaggttagggtgcaatcctggcatgcctttgctaaagctctttgtgtgaatcattttgttccctttatcccagcaataatttaaatctgcagcaacacctgaaacacattcatgaatgagtgatgtcaaacaygatgacattgtctcatctgtaacc

SEQ ID NO: 267892 - DNA, 606 bp, Homo sapiens
tttgtataatattttattccaattaagcctctccatctgtatttgttttcatctagcaaactgttaattgtargtggctctggatatatctgatggtgctggccacggaatatctgtccatctcatgtaaaaaatgtaggaaaatattttattaggaaaagaatggccacagtggtcatgcattttgattggggtgtttgatttgtttgcttttaagtaatagggctgggcttcaaggcctcatcaacagctcctcaccttgtttcctttctgagcagtagcaccaattgctatttaactctttaacttagggatacatatattggggtaatgctttaactttgacggtacatacattggtaatagaataggatagagctaatttactgatccagttttgtgggtggaggatttcacaactttggtcccattaccaacattttcttagcaaatgttttaaagttatgttaaataagcctgatagttggatattttcattcagatatcttagagcctaatacacctacacatcttttctctcctttcaaattttgatgcattcttcaaggaaaagttcattccactctcatctgtgggttttttccc

SEQ ID NO: 267893 - DNA, 606 bp, Homo sapiens
tttgtataatattttattccaattaagcctctccatctgtatttgttttcatctagcaaactgttaattgtaggtggctctggatatatctgatggtgctggccacggaatatctgtccatctcatgtaaaaaatgtaggaaaatattttattargaaaagaatggccacagtggtcatgcattttgattggggtgtttgatttgtttgcttttaagtaatagggctgggcttcaaggcctcatcaacagctcctcaccttgtttcctttctgagcagtagcaccaattgctatttaactctttaacttagggatacatatattggggtaatgctttaactttgacggtacatacattggtaatagaataggatagagctaatttactgatccagttttgtgggtggaggatttcacaactttggtcccattaccaacattttcttagcaaatgttttaaagttatgttaaataagcctgatagttggatattttcattcagatatcttagagcctaatacacctacacatcttttctctcctttcaaattttgatgcattcttcaaggaaaagttcattccactctcatctgtgggttttttccc

SEQ ID NO: 267894 - DNA, 637 bp, Homo sapiens
tcacctggggccaggagttcgagaacagcctgccaacatggcaaaaccccatctctactaaaaactacaaacaaacaaacaaaaatcagctaggcatggtggtacgcaccagtagtccctgctactcaggaggctgaggcacaagaatcacttgaactcaagaagtaggggtttcagtgagccgagatcatgccactgaactccagcctgggtgacagagcaagactctgcctcaaaaaaatgaaaayaaaaattatcagaacaaccttctgagataattattaaatttcccattttatagatggagaaactgatcctctgaatggtgaagaagtttgcctagtgttactggaaattgatccctcctgtaaaggctaaatcttacttttcttcttttaactatggaccactactgtataggtattcacaatgaagtaggcattactttttaaaatataattttaaatattagaaagaaaaatgttccagtctcattaagatggcaaattgccaaatggggaagacatctccatgggagatagggctctgaaacatccagctgagcagaggcatgaagagagagtgcatcctgcctgatgtggagggttcagggtagtttatagtcatgtggcagaaa

SEQ ID NO: 267895 - DNA, 637 bp, Homo sapiens
tcacctggggccaggagttcgagaacagcctgccaacatggcaaaaccccatctctactaaaaactacaaacaaacaaacaaaaatcagctaggcatggtggtacgcaccagtagtccctgctactcaggaggctgaggcacaagaatcacttgaactcaagaagtaggggtttcagtgagccgagatcatgccactgaactccagcctgggtgacagagcaagactctgcctcaaaaaaatgaaaacaaaaattatcagaacaaccttctgagataattattaaatttcccattttatagatggagaaactgatcctctgaatggtgaagaagtttgcctagtgttactggaaattgatccctcctgtaaaggctaaatcttacttttcttcttttaactatggaccactactgtataggtattcacaatgaagtaggcattactttttaaaatataattttaaatattagaaagaaaaatgttccagtctcattaagatrgcaaattgccaaatggggaagacatctccatgggagatagggctctgaaacatccagctgagcagaggcatgaagagagagtgcatcctgcctgatgtggagggttcagggtagtttatagtcatgtggcagaaa

SEQ ID NO: 267896 - DNA, 524 bp, Homo sapiens
ggaaagccttcacattgcaaccgtgagaggcaccatgtagggtggttgctgtcattcctattatatgactgagaaaacaggcccagtgaaatctgaaatacctggtcggagatgtggcaggtagggatgaacagctgtgaagaaagctagttccttccagtttgaaagcctgtacttctactgctaaaatgctctgttcattcaccttgggcctgaagcagctcacaacactagttaattggtttgggcaatcataatacccatgcatgaaacaaaacattattcagtggtaacrtatgaagcatatgggtaagattaaaactgaattcagtgagatccagaatacaatattggatgatagagcaaatactcccttggagaaggaatacagtgactttttatagacaacttttagaaaaatctcagtacagtattaatctgagtctacttaaagcacctgacaactatttacattgtaatatgactggttccaggatattttttacttgggtaaagtaagccat

SEQ ID NO: 267897 - DNA, 521 bp, Homo sapiens
caacattcaaggatttcatatgcggactgctttaaggcagctccctcagatctcttcaggatgacttcccagttagtttcaatttctctccctgccttcacactgtgaaagagcatggcatctctcgggaagtctctgtaatgctaccccttcttcagctcttagttaytggtcctgggtgaagatgacttgttccatttttgacccagatacaggctgttggaccctgcatggaaaactaaagcaagctatgccgaaactgtcattatctgaggcaaccagtgctctctggacccaaaagtaaagccttgactaactttgcttttctgttaatgagaaaattctcccagttacctggacattttctttctcctaagatttcatctagggtagggtctgtcttctggcctgtggctacctacttctggctataagtaactactaggaactttcctcctttcattcattcatcatgaatagtgaagtacttaagattgtggatccagtgtcagactgcctag

SEQ ID NO: 267898 - DNA, 616 bp, Homo sapiens
atcaatctctttaaaaaatcttcttgcatttctgttttatcttctctctctgcagccccttctttctcccttagttctacttccactaaaattgcctctctacatgcatattgatcagctttctgatttctttccctgagaatattcattgctgtcctgcttaatgacaggttggtgagcagaattatgtttaattcaagccattttcaccaacctgttctttgactcttttacatgaagccttcagagagtgtgtctactccgttagtacaagaaaagtagaaagaaatgtctgcccttgtgtcataataagattaagtaaaaatgtaacaaatgtgtttgtcctaattaagaggatacaacatcatagaaaaaaaggtcttaggcagacctacaaggagatacatttgacttggagaagatttgtgttttaatatgtaccatcgaaacccaacaacaataacttgtacacctgcttttagagtttaatggataatttaatcaaatgtggttttaattgtaccatttactgatataaattattattgtcatcattagccrtattgttaccaaactatttcaggatctaaacttggtactaggcattttgtgtgag

SEQ ID NO: 267899 - DNA, 548 bp, Homo sapiens
gtcagatagttaatattttaggttttgattgtcacacaatctctgaggcaactgctcaactttgccatagtagcacaaaacagccatagccaatacataaataaatgagtatggctttgttccaataaagcattatttataaaaatagtctggacttaacctgcagtccatagtttgctgacccctgtaccaggctcttaycgcttgatcacacacctgtgtttaaacttaaggcatcacgttatggaattgttcttagaatatagcttcttacaactctatatattacttgaattttatgcattttacaacctttgtaatgcctatcatttttacgtatatgaaggagaagagagagattttagcatgtgcttaatctgtttatgctgactcctgactttcctcctataaacatctatgtttaaaatattagtactaatgtgtccggaattggtgggttcttggtctcactgacttcaagaatgaagccacggaccctcgcggtgagtgttacagctcttaaaagcagcgtggacccaaacagtgag

SEQ ID NO: 267900 - DNA, 604 bp, Homo sapiens
tgaccggtgatttctagaaactcccaaacacctaggcagaatacaagatgacagaattgttttgctgatagaaggttaaggatatgttacagcaacaratacatagcacaaaattcatccttccagaagagaaactgtggcagtttcttgtatatttttccctgtttgaagggcgatacactatgaccacacataccccatcttacagattggcctttgtaaaactcagggctctttctgtatctctctaaatcttctacgtttgacagaaggctatgaggggacacagaaacagagaattagctgggctgaggctctctggcaagtccctaccacttcggaaggatggaaccctggcttctggcctcctcaccacgcactagccacccacccatactccctgggcacccaaagcattctcttgtgagtgtctgaccctcacacttcgaggtgtctcttctcaggtgaaggggttaaggattaataaaatactggcaacaccacaaaaccaggtgggaaaatctcattctctccttttaaattaaatgtacattggtagaaagagcaactccaatcttctacaagtattttaagttactgcaat

SEQ ID NO: 267901 - DNA, 493 bp, Homo sapiens
cgcgcgcatgcgtgtgtgtgtttcctgacatatgcatcaatgaagggggacaaaaagaattacaagaatatttactaatatgagtgaatcttacaaataaacatggatggtagtgaaaaataagaaaccaaatgagatgtatatgaatatatatcatgataccattcacatacagtcgactctccttatccatgrgttccacatctgtggattcaaataactgcagattgaaaatattcagtaaaaaaaggtgactgcaccgaacatattcagattttttcttgtcattattccctaaacagtacaatataacaacaatttacatactatttacattgtattaggtattgtaaggaatctagagattatttaaagcaggggagtctaatcttttggattccctgggccacactggaagaattgtcttgtgccttacataaaatacactaatgatagctgattagctaaacaaataaaaaatcgcaaaaattct

SEQ ID NO: 267902 - DNA, 493 bp, Homo sapiens
cgcgcgcatgcgtgtgtgtgtttcctgacatatgcatcaatgaagggggacaaaaagaattacaagaatatttactaatatgagtgaatcttacaaataaacatggatggtagtgaaaaataagaaaccaaatgagatgtatatgaatatatatcatgataccattcacatacagtcgactctccttatccatgggttccacatctgtggattcaaataactgcagattgaaaatattcagtaaaaaaaggtgactgcacygaacatattcagattttttcttgtcattattccctaaacagtacaatataacaacaatttacatactatttacattgtattaggtattgtaaggaatctagagattatttaaagcaggggagtctaatcttttggattccctgggccacactggaagaattgtcttgtgccttacataaaatacactaatgatagctgattagctaaacaaataaaaaatcgcaaaaattct

SEQ ID NO: 267903 - DNA, 581 bp, Homo sapiens
ggggctaccatctgctgagcctgtactgtgtgtgtgtggcaagttagatatgtcaattcagtaaattatcacgaaccacataaaatgtaggtatgtttttcaaggtttatagattaaggtactgaaactcagagaggtcaggtgacttgcccagggtcacacagctaaagatgacagagctagaattggaacccagtcctgtctgactccaaagcacacaggttatcactactccacaggtgccctctgctgtggaccacagggagaacaattgctcctttgctttgaagaaagaggaaggaaaattattgtaggtttgcaaagagttmatctacatttttcccctcaaagagggagattccttaacccaaatcgtcctcactgtcaccctggctcagctacttggcttccagagacaccaaagttaagtgtgcacattctcaaataggtctcctgtttttattttgtgcagcaggcagggaggggaactcttggcaaggagcccttctttgacagtagcctgggcagagagaagatcaaggagggacgcgtgggtattagagtggcaggaacaaagtcca

SEQ ID NO: 267904 - DNA, 635 bp, Homo sapiens
gggtgtggtaccaagttcgtgtgtggttggtctcggcatcatggggggagtatgccttcataacagccaacggggggtctctccacaactccaagcccagcaacttgtaatctagttttgacagtcaaaaggtattcagtgaatggatgattaaatgaataatagcctggtagaacaagactaacatgtctctatatgtgtgtgccttgacctccgttacagagtcctagagtctatattttctccccctgtgggagacaaagaaactgagactgaaacarttctacaacttgctgatgtcacacagggacaaggctctattttctgacccctgggcttttttttcaacaactgtattccatttctgagtcaaagggagtgcagactagaacacgcatcccagttctctcgctggagcagaagctcctattccacccacaccaactctttcttcatctgtacgatgggataatgtgccgtttcccctacctcactagagatagaggagggggatcctctaatgagacagcagggagaattatttgaaaaactaaaccaacatttaaggccagctgctgctattattttactagcagcttcttcttttgtgccaacttaaagctacttaaggtaat

SEQ ID NO: 267905 - DNA, 587 bp, Homo sapiens
tgtgtagcccctgaacccatttctcacccatcagattggcaaaaatttacaagcytgacaatacactctgttgacaaaattgtggggaaacaaacattcctaccatgcattgctagtgggaaggcaaatgtaagtattcatcttgttcaaagagatccctgcagaaatgccccaaataatgcttgaccaagtatctgggcaccctgtgtggtacagccaagttgacacagaaaattaattatcacagctatgatacttaatcatagctgattaatgactgttgtgacccctatgaaaaagaatttggcaatatccaaattctgtgtgcaacccctatgtaaaagaatttggcaatatccaaaagatctacctaatgcatctgggctttgactcagcaactcctaggaatttatcccaagatttacctccaacaatatgaaaatacagatgcacaaggttattcactgaagcattgtttctaatagcaagacattggaaactaccaaaatgtccaagcaaaaacaaatctattgaacccaggaaattggttcagtaaactctggcacatacatacaatagaataataa

SEQ ID NO: 267906 - DNA, 555 bp, Homo sapiens
ttctcaatgactaagatattgaacacttttgcatgtactcatggtcatttatacctctttttaagagaatagtctattcaaatctttggcctattttaagattgggttatttttctttatattgtggagttgtaaaagttctttatatattctgaatacaagactctaatcagatacttgatttgcaaatagtttctcccattccattgtcttctctctttcttgatagtgtcttttaaaagacacaagtttttcatgcttatgaagttcaatttatctagctttttgaccaggcgtggtggcccatgcctgtaatcctagcagtttgggaggctgaggtrggtggatcattgaaagctgagagtttgagaccagtctggccaatatagcaaaaccctgtttctactaaaaatgtaaaaattagccaggcatggttgcacacacctgtagtcttacctacccaggaagctaaggcatgagaatcacttgagcccgggagaaggaggttgcagtgagtggagatcgtgccattgcattccagcctgggtgacagag

SEQ ID NO: 267907 - DNA, 548 bp, Homo sapiens
tcatatttgatatgcattttctcaatgactaagatattgaacacttttgcatgtactcatggtcatttatacctctttttaagagaatagtctattcaaatctttggcctattttaagattgggttatttttctttatattgtggagttgtaaaagttctttatatattctgaatacaagactctaatcagatacttgatttgcaaatagtttctcccattccattgtcttctctctttcttgatagtgtcttttaaaagacacaagtttttcatgcttatgaagttcaatttatctagctttttgaccaggcgtggtggcccatgcctgtaatcctagcagtttgggaggctgaggtaggtggatcattgaaagctgagagtttgagaccagtctggccaatatagcaaaaccctgtttctactaaaaatrtaaaaattagccaggcatggttgcacacacctgtagtcttacctacccaggaagctaaggcatgagaatcacttgagcccgggagaaggaggttgcagtgagtggagatcgtgcca

SEQ ID NO: 267908 - DNA, 555 bp, Homo sapiens
ttctcaatgactaagatattgaacacttttgcatgtactcatggtcatttatacctctttttaagagaatagtctattcaaatctttggcctattttaagattgggttatttttctttatattgtggagttgtaaaagttctttatatattctgaatacaagactctaatcagatacttgatttgcaaatagtttctcccattccattgtcttctctctttcttgatagtgtcttttaaaagacacaagtttttcatgcttatgaagttcaatttatctagctttttgaccaggcgtggtggcccatgcctgtaatcctagcagtttgggaggctgaggtaggtggatcattgaaagctgagagtttgagaccagtctggccaatatagcaaaaccctgtttctactaaaaatgtaaaaattagccaggcatggttgcacacacctgtagtcttacctacccaggaagctaaggcatgagaatcrcttgagcccgggagaaggaggttgcagtgagtggagatcgtgccattgcattccagcctgggtgacagag

SEQ ID NO: 267909 - DNA, 286 bp, Homo sapiens
aacctctggcttcaatcatccttccttctgagaaatctcatctccttcggtaccatctttttgggctttccagtagcctgtgaaagcaattacgaagtctgtgtcaggttctcctggtagccaagttgtgacccagccgcagtggtatgctggtaaatgtttaacaatagttcaacggtggggtctatggaaaaaacaaaaacaaaaatccaaagccccaattttagcatttgctgatttcgrtagtgtaaatgattccactgtggctgatttcaagctaccagtg

SEQ ID NO: 267910 - DNA, 561 bp, Homo sapiens
caatttattccatgcatcagtgttccaaagtgagagggggatttgttaaccccatcagctggcttcttaattacatccttgcctatccaagacccgtggaggcgtcaatcactcttatccacaaagtyattctcagcgcaaaaaaaaaatccattatttaaataactcgcatccttctttgcgaaggcgcttcctaggctgtcagtggacaaaacaaccagttaaaggataaaaaaccacacttgctcaaacagctgctttgtttttagttgttttgctgattattttttgaacgggatgggttattttgatgtccggtagctgtggcctcagaacccctaagtggctggaagtcaagtgacgtcagtggagcttggcagctgcagctgacgctgtgggagtcagatgctcccagttggggtggcaacagtcaaggaggctcagatgtaacccagaaagacactgtgcagtggtgacaaggaccagctaattactgtcttctctcctggaagtgtcaatcttatgatttactctaagaacaatcttcatatagagatgagt

SEQ ID NO: 267911 - DNA, 511 bp, Homo sapiens
ctgtaacataagcagaggtgaaacagatcttactggtaaaattttaacacattggagaggaactcctgcttcaacagctgtaaaatctgctctaaataaaataaaataaatagttatttcatggttacagaaagaaaccaatgcagccaggacttaaggattcaagatcctgaatccttatggaatgagccaatattctagagaagagggagatactttgaggtaagccctatgagcctttgaggaataggctggtttctggcacagaacacagaagcaaaacagaaaacagtggcatagggtttgtagtattctccttgcactgcagagataaaataaaagttttaattgaggaaattagaaaatatttgtaactgaaaggcatttgtgcaatgtagaaaaagtcgtgcttagaggagaattgttaaagccttaaatacatgtactagaagagcagggaaragataataaccaatgatctaagcatccaattcagcaatctggaaaaaaa

SEQ ID NO: 267912 - DNA, 584 bp, Homo sapiens
ctataccaattataataattatgcccatagtaattataaatatatccacattaagaaaaaagataacaaataatccatttttctgcttaagacattggaaaaagaagaacaacctaaatctaaagcaatcaaaaagaaagaaataataaagattagaaccaaaattaataaaataaagactaaacaacagagtaaaaaaatcattgttatcaaagctggttatttgaaaagactaacaaaatttaaaattattttgataaattgaccaattaaaaaaagaagagatccaaattactgaaaacagaaaagaaaaaggaaacattacaactgacatttcaaaaataaaagakaatataaaggaatactatgaaaattatgtcaataaattagaaaattttgatgaaatagattaatgaccagaaaagcacaaattcctgaactgactcaagaagaaattagacaatctgcatataccgacaagtgagttagtaatcaaaataactatacacacacacaaaaagctcaggataaggccacttcactggtaaattatattaaacatttaaagaaaaattgagactggc

SEQ ID NO: 267913 - DNA, 560 bp, Homo sapiens
acactgtcaccattccaccattttttatctacttttggggctaaattttgaattcagcatttttttgtattttaaaaaggcattatggcatacatattaccccatcatgtcagagatagtgctatacaaccaaacatattagtatttctgcttccagatataggaatatttacactaaatgcaatagagactaaaaaaaaaaaactttattatagctaaggttcaacttttgccaccaaataaattcaggtcagtttttctatcaaataatttaggaaaaagcaacaacatgacactttctttcttttttttttttttaacggattctgaattaaagatgagtgtttgtagttttgtaatccaacattatcaaattatatttcattttacctcattttaacatgtaacaaatgcaggttttacatcaattagtggctttagcttgttgtaactattgttattrttagaatttgttacaaatgaagcagattccctggtaatttttatacagaaaggccaaggaattcaatttaatctagaatcataccaatcaagatgaa

SEQ ID NO: 267914 - DNA, 585 bp, Homo sapiens
agtttcctttcatagaatcattttagctaataaatggggaaagaatggtaggataaaaacattgccattctacacatacttaatgaaattatagatctagataatggttttcagctaacaccagggaaaaaaacagttaatatcctcaccattgttcaatatatctatgcaataaacatgtacatgtatccccraatctataaaaataaaattaaaaaaaataaataaaatgtgaggcatttttacagcaagccaaaaccaaaaataaaattaaaaagtcatctgcaaactattatttaaagtgttcatgtgggaaaatacatacaggaaaacaaaacaaaacactttccaagtaagatgggtttacttggtccttgattttcgtataagtgataggtagaactctagcctagaacaagccgcaatggtaatttttctatgtgttttcctttgtggagtaaatatgacaatgcataaatataaccttagggagagaaagaggaacatttcagagagaagttttcaatcaacttttcctcatcaggtggttcaggattctggatacctgggtctagttgcagaata

SEQ ID NO: 267915 - DNA, 601 bp, Homo sapiens
aaaaaacagttaatatcctcaccattgttcaatatatctatgcaataaacatgtacatgtatccccaaatctataaaaataaaattaaaaaaaataaataaaatgtgaggcatttttacagcaagccaaaaccaaaaataaaattaaaaagtcayctgcaaactattatttaaagtgttcatgtgggaaaatacatacaggaaaacaaaacaaaacactttccaagtaagatgggtttacttggtccttgattttcgtataagtgataggtagaactctagcctagaacaagccgcaatggtaatttttctatgtgttttcctttgtggagtaaatatgacaatgcataaatataaccttagggagagaaagaggaacatttcagagagaagttttcaatcaacttttcctcatcaggtggttcaggattctggatacctgggtctagttgcagaatactccaaagtctcattgaaaaatctccttatttaaccagttctaggtcaataaactacttgatttggacaaggtctccaagatctgcatcctttttccatgcttcagaaggttgactaagtttctaggacaccccatgtccacc

SEQ ID NO: 267916 - DNA, 585 bp, Homo sapiens
agtttcctttcatagaatcattttagctaataaatggggaaagaatggtaggataaaaacattgccattctacacatacttaatgaaattatagatctagataatggttttcagctaacaccagggaaaaaaacagttaatatcctcaccattgttcaatatatctatgcaataaacatgtacatgtatccccaaatctataaaaataaaattaaaaaaaataaataaaatgtgaggcatttttacagcaagccaaaaccaaaaataaaattaaaaagtcatctgcaaactattatttaaagtgttcatgtgggaaaatacatacaggaaaacaaaacaaaacactttccaagtaagatgggtttacttggtccttgattttcgtataagtgataggtagaactctagcctagaacaagccrcaatggtaatttttctatgtgttttcctttgtggagtaaatatgacaatgcataaatataaccttagggagagaaagaggaacatttcagagagaagttttcaatcaacttttcctcatcaggtggttcaggattctggatacctgggtctagttgcagaata

SEQ ID NO: 267917 - DNA, 611 bp, Homo sapiens
gattcataatgtcctttcagatttatgtgatttcagaaaccctatcaaattatacatatgtattctacttcaatagaatttattctagttctaaaaatttgtaatgaaaattttcttctttttaatgtaaaccgtttttaaggaatgactcatagttttcagaactgttaatgtaattgctattatatttttaagataaaytctttgggagaaaacgctatttaaagaaaatagcttaaaaatctattcatgttgagaaacagctatacatggcttggctaaacaacatttgtagtataaaagccactatgaaaacttcctcaaatcatttacctaaaagagcctagtcattctctggatgtgtcaaaagatcacaacaccaaaagctctttagagctgcctgcccattactcaattatcccttagcgggatggtaactacatcatagatgacagcttaactctattttccacaacatgatagtttataaaattactgtctatgctatagcatttctgtttgatttatgtccagcctgaggcataaaatctgtttccttccaggaggaaattatgctttcttgaatagaaagagtagatgacaaccataaa

SEQ ID NO: 267918 - DNA, 601 bp, Homo sapiens
aaaaaacagttaatatcctcaccattgttcaatatatctatgcaataaacatgtacatgtatccccaaatctataaaaataaaattaaaaaaaataaataaaatgtgaggcatttttacagcaagccaaaaccaaaaataaaattaaaaagtcatctgcaaactattatttaaagtgttcatgtgggaaaatacatacaggaaaacaaaacaaaacactttccaagtaagatgggtttacttggtccttgattttcgtataagtgataggtagaactctagcctagaacaagccgcaatggtaatttttctatgtgttttcctttgtggagtaaatatgacaatgcataaatataaccttagggagagaaagaggaacatttcagagagaagttttcaatcaacttttcctcatcaggtggttcaggattctggatacctgggtctagttgcagaatactccaaagtctcattgaaaaatctccttatttaaccagttctaggtcaataaactacttgattkggacaaggtctccaagatctgcatcctttttccatgcttcagaaggttgactaagtttctaggacaccccatgtccacc

SEQ ID NO: 267919 - DNA, 577 bp, Homo sapiens
atatagatagatacagacagatgataggtagataggtaaataggtaggtagataggtagataggtaggtagataggtaggtagatagataaataggttgatagatagacatagactgaacattctggttattcaaaagtttatggatgtaacttacatagaatttctttttgagccactgtctttgtatttatagctgaactaaatgtatggtttcatctctcttgtaaagtattctggtagataaatacgaatgaacaaagccataactataatgacaaaagaatatmatgaaactaaatatttaatgggatatggatatttgttctatgcttaataagaaatatcccttttctgtttaatgagcagtatattcctttaatatatgtacattctagtcatgttatgatattgttgtattgaacaaacaattttattatctatgtatgaatatactgtgaatgtgctagttttgtgccaaaaccaatataccatacataattggtgcattatgcttattctgacagaagctaccattaccagtactgtatagtcttaataaacttaagaaacatgta

SEQ ID NO: 267920 - DNA, 577 bp, Homo sapiens
atatagatagatacagacagatgataggtagataggtaaataggtaggtagataggtagataggtaggtagataggtaggtagatagataaataggttgatagatagacatagactgaacattctggttattcaaaagtttatggatgtaacttacatagaatttctttttgagccactgtctttgtatttatagctgaactaaatgtatggtttcatctctcttgtaaagtattctggtagataaatacgaatgaacaaagccataactataatgacaaaagaatatcatgaaactaaatatttaatgggatatggatatttgttctatgcttaataagaaatatcccttttctgtttaatgagcagtatattcctttaatatatgtacattctagtcatgttatgatattgttgtattgaacaaacaattttattatctatgtatgaatayactgtgaatgtgctagttttgtgccaaaaccaatataccatacataattggtgcattatgcttattctgacagaagctaccattaccagtactgtatagtcttaataaacttaagaaacatgta

SEQ ID NO: 267921 - DNA, 571 bp, Homo sapiens
tactgtaaaggaaaattacaggtagttaaggaagcacaatgtaaaaggaaatagtttaggctgggaggggcagtgttggtataggagaaagggagtttgaaacatttatcaatcagtcaaaattaaccagatgaggagagagattccaacagaagcactggcttgagtaaatrctttgagattaaaacaaacaaacaaacaaaatcatgccctattcagagaactgagacagtccctctgtgaaggtatattgtgaatgagggaagataattctaggtgaggccagagtagttggaaggaaacaggctatttcctttgtttaccacaacatagattttgaattttaacctgagtacaattgcagtagtagaaaagtccattttgatccactttacagtttcaaagatcactggcagttatctggagaatggactaggaggggaggtaaaatgtttaaaatattcttacaagttttgcttccctaccaggccccccagaaattgaagagtacccttctcctcaaaataaacctgtagtgaagctgcatccctacaaacacctccatagatct

SEQ ID NO: 267922 - DNA, 355 bp, Homo sapiens
ttaatttgaaagtttcatcaattttggcatcatatacttgggacttctacgttacagggttgctattaatgtgaaaaaaggctttataatgattaatttgaggcagtgagataatatttaaccagtagtaataattagactctatagctaggaagaggaacaccctggggaatcyagctgacaagcctaacatgtatgtttttttcacaagttactgtatttctccagtgtatccaggtctcttgtttgatgaacattctataaacacatggataataaattctctcagaatgttcacagatcaaaaaatcagttgggtacagaagagcagaatctgtaaatggaggacagattt

SEQ ID NO: 267923 - DNA, 568 bp, Homo sapiens
tccatgcaaaccaaagagtcagtcttattcccactgtgcccccaccaacatctctgagtccatttccaggtggaagatgagaagggcttgaaaacttgcccaaggctatccgcctcccagctgtgaaaggacctgtgaagtctgcacacctgattcatggccttctgtgagttctggccaggaggcttctccccmcattcaaattgttacaatgtttggctagagaattctttctctctgtggacgtttaccccctgctcctctggctaccctcccaatggatccctgtggtgccaggcaggaatgggctgcttggggacccagcgagctcccagtgcctttctcctgcttcttctacccctgtatttcactcagctctctaacttgactcagctccaggtcaagtcagaaacttctcccacaaacagaccttcagcttctccagcagtggtgtgtgttcaggacaggaaagtctccctttcccacttctgcagttggggcacttatagtatttggggcatcttccaggtcctgccggagcagaccacttccttcagagggtctgtgg

SEQ ID NO: 267924 - DNA, 636 bp, Homo sapiens
ttattttggtcagtgacatgaaaacatatctatacttttgagagtgagcatgttttcttggccaaaagagactgcaaaagagagattaaaaaaacagcatttactctgcatatttgtgttagaaaaggaatttctcaatatatattaaaatgttgttattcctgttaaaaacagaataagctcaggatgttgccggtatgactggaatactctgtagtcaccttccataggaaagcaattggaaaatataatttcccattcattaccttaaaaataagtttattatgcctaatattctttccataatatgtttttagaagcaagatggtcaatagcaagattcaaaatttgccttacatatatttttttaaaattttcatgattaatgttcaacttggtgaattatagtcttgatattaaaaattatttaaattgagcatacttatttttttgttttccactgacataaactgtactttaactgccattaataggmactacaaatatttcatttaactaatgaggaaatatacaaatagattcagttaatattggagttcatcaattattttttgaagagttaagttgaaaaatgaaaataaaaaatagaaggtgatttatacatttctatctgtt

SEQ ID NO: 267925 - DNA, 577 bp, Homo sapiens
ctgattcaaattatttttttatattgctgatgcaacttgtactatactctttcttgaytgaatttcttatttctgaggatttcgtgtctcatttctaattacaaggagctgtcctttgccatcaacaatatgaatgagccttcattaaagaggtttcactggagaaagaaagaatgagaaaaaaaacagagagagagagagagaccttgagagtctagcgagagcaagaaatagacaggtgtgaaaaaaggagatgaaagaatacaccaattttatttcatgcagggattcttaacagttgtattattgacattttgggccacatagttatttgttgtgaggagctgagctaagctatgctttgcaggatgtttagcagtctccctagtctttattcactaaattccagtaatgcctcttctgcaagtagtgacagccaaaaatgtgtcctaaagtacaaaattattctcaaacaagtgttttatactttccagtctttctgagttaaattttccacaataaagctattcccatggtagagttgactgacttaaaactaaatcatgtctaatttttt

SEQ ID NO: 267926 - DNA, 628 bp, Homo sapiens
aaaatattagcttttaagctaatgtgtgtataatatgtgtaaatatcaaagtaacaataatttatgatggctgctttttwttttaaaaaaaaaaaaaggtaaaatatcacttttcaatcaatgatagggcctgtgcaggaagttgtcattttcagcttaaggataaattagcaaaagttttgtctatcgactctcacctggtctttcatgctgagagacctgcattactaaggactgtcttgtaactagagtttgtgggtatgtaacagccaaaagttaagtagaccactgacactttggacctctaattcggctcttatcagccacaggctaaggctgaaacgattgaccacagagatctgaggagctgagtaagcggctagggcaggtttgactctttttgaacaaagccagacaaaactgtagaaaaagactttttaactatgtttgtagctagaagaaaaattactttggtcaaaagtggatgtaataatgcttgtaactatctgagaggaagcagactagtcaactcctttttttgcttttatcatctttattaaaggaaatggtctgcagactaggaagagtagaacaagcatggctcagaggaaatttattcggtatggca

SEQ ID NO: 267927 - DNA, 628 bp, Homo sapiens
aaaatattagcttttaagctaatgtgtgtataatatgtgtaaatatcaaagtaacaataatttatgatggctgcttttttttttaaaaaaaaaaaaaggtaaaatatcacttttcaatcaatgatagggcctgtgcaggaagttgtcattttcagcttaaggataaattagcaaaagttttgtctatcgactctcacctggtctttcatgctgagagacctgcattactaaggactgtcttgtaactagagyttgtgggtatgtaacagccaaaagttaagtagaccactgacactttggacctctaattcggctcttatcagccacaggctaaggctgaaacgattgaccacagagatctgaggagctgagtaagcggctagggcaggtttgactctttttgaacaaagccagacaaaactgtagaaaaagactttttaactatgtttgtagctagaagaaaaattactttggtcaaaagtggatgtaataatgcttgtaactatctgagaggaagcagactagtcaactcctttttttgcttttatcatctttattaaaggaaatggtctgcagactaggaagagtagaacaagcatggctcagaggaaatttattcggtatggca

SEQ ID NO: 267928 - DNA, 448 bp, Homo sapiens
agtaataatctgaaaaaaaactaagagaaaagctacacttagagattagcaatctttcccccaaaagaacaaatrgatgcacaaaaacacaagaactacatacatcataagaatggcctaaggataccatagaataatgcaattacattgtcacagaatcaaagaagttggcaataacatgatatgcccagaaagaggctcaaagaagaacttacaagttaatgaggaagatagacagcacaatggcaaaagtcaggaacagaatagaaaaaatgggtgaataaaaccactgtctaaataaaaagcacatcagaaacaacaaaaaatataggggcatagttggtgaagtgagataaaatataaataatcaatttcctcatgttctcaaataagtagtcaattatatgacatgaatacagaaatgtgagtttatcactctttcattaaa

SEQ ID NO: 267929 - DNA, 503 bp, Homo sapiens
cctcccatataccttcaagtgcaaagcctggatttctctgaagtgagatgtttgctcacacagtgcctttcttgaatgtactttgttctccgctggactcacctttgctaggggccagttatattcctgctgagtatgggtatacatagaaagggcaagtaaggaatgttttgccttctggaaatagattattaattgtgaacaaggagatgagacacaagcacwaaaatgctgaatgaaattcataagacattaggcatttgcaaggagaaagttgttttgcagacaaagatatgatgtgactatttagagctagatgggccactttattaaacagtttccttggtgctcagggagggaaagataatctttccagagattctgtgagttggatttctgttggttcttctaatttactcaagaacctgagtgacccaggccattgatgaggaagtaagtgctaatgactgataatgggcatcaagaattgggccaggtgaaaa

SEQ ID NO: 267930 - DNA, 636 bp, Homo sapiens
tatcacatctacattcagggggatatgaaacatgtaacaacaggtgtagaataagcattcacccgacagaagacatattggtcataatatgtattgctgaatcagtacatattagcagcattgtctataaggctctacaaaactattctctccytcactcattctggccaatcaggaagtctttattccaaaggttccctttttccagaatctcttcatggcttactctcccttgttgttcacgtactatctcagatattacatacttaatgagatcttttctgaccaatcaatgtctagtccttacctagtccaagtagtcactatcacacctgtttgttccattttttataggactgaaaaatatatagatttatttagtacacttatttatgtattttaacctaccagttggaatttaagttcatcaataactgaaattttattttgtcttctcaccagtgtatctacaaaaccaaggagagtgcctgacatgtggcagatattcagtgctcacctgttaaatgattgagtacatgaataaataaatgtaatcatagatggataaaagaaagtggctacacaatctagaaagtaaattagattattattttgttagcttaactatcatttttt

SEQ ID NO: 267931 - DNA, 636 bp, Homo sapiens
tatcacatctacattcagggggatatgaaacatgtaacaacaggtgtagaataagcattcacccgacagaagacatattggtcataatatgtattgctgaatcagtacatattagcagcattgtctataaggctctacaaaactattctctccctcactcattctggccaatcaggaagtctttattccaaaggttccctttttccagaatctcttcatggcttactctcccttgttgttcacgtactatctcagatattacatacttaatgagatcttttctgaccaatcaatgtctagtccttacctagtccaagtagtcactatcacacctgtttgttccattttttatargactgaaaaatatatagatttatttagtacacttatttatgtattttaacctaccagttggaatttaagttcatcaataactgaaattttattttgtcttctcaccagtgtatctacaaaaccaaggagagtgcctgacatgtggcagatattcagtgctcacctgttaaatgattgagtacatgaataaataaatgtaatcatagatggataaaagaaagtggctacacaatctagaaagtaaattagattattattttgttagcttaactatcatttttt

SEQ ID NO: 267932 - DNA, 510 bp, Homo sapiens
tatggttggttacatccagactgtgtaatttttayttatatttctgaaaaataaaactaatgaaaataactttgttagtcatgacagttctctcaacatgtttagtccaatttcacacctatttttaacaatttaggcacatcaaactctaagctgcaggcatcataagactagtagaatgataactccctggtgataaaagaatgcattgctcttggcaacgtctcatcaataagccagaatgagacatgttaaggaccacagtgtgatacacagcttgtaaagtggcaaatgttatgttgctaaggatgaagaaattcaggtgtaaactagaaactagaaacttattctctggtgaagaatcttcccaaggtaaattacatagaactttagaaaaagaattaagcttccaatttatcatgaaaataaatggaatcttgaaactatggcagtaaaagacctgctacttgataccatcctccatattaccaagggacttccatacaatca

SEQ ID NO: 267933 - DNA, 595 bp, Homo sapiens
tgctacttgataccatcctccatattaccaagggacttccatacaatcattaaaaactggtgaatgtttgctatcaacatctttgtacttccaaactaatgttttctcttggcagggttctctccagtaaggccgtgaaatagttatcatagaatgcataaatggcacattatccaaaatatagggctccagattgttttcttggagtctaaggggcttcacaaaagtagctccatggctgttgtagttggagaagtgctgggacaatgttgagcagatgggactccagtctaaaccagtggttctgccaaaatggctgttctcttacctgattacatgagtgatgtttacatagactttgaaaaacgaattcaaagawgtattgtaactgggatgggggctaagctattgaagttaccttatacttcaatgccttaaaatatatgcatgtataacttttgcaaacctatttaagaaaaaatgaattctaaggctattgcaagtcttaaatccactactctcaagtaagctcattcacgctttaaagtacttcggaagccacttaaaacactaacaatttgaaggtgtttattgg

SEQ ID NO: 267934 - DNA, 653 bp, Homo sapiens
aagcattttcttttacattacaaatagtatatttctttttagtgaaaactgcataatcaaaatgtataacttaaaataatgtaaatgtgtttagtgtgatttggaccagttataactatttcataagccatctatataatataaagctgtaggcagattccaatgctctgtaattatgtaacaaacatttcacaatataatgcataatccttaaagtaactcgagtggtttctggtgtgttataattgttctttgctgtaaatactacataaacaatttgtaagctttttatgcagcactacattttctttcttccatatgtggtrgctactctaaaatatatctctttttgttaactgggaatgtatcactaacatttctgaaaatgattatctcaagtctttggaaattacttatacattggtatataaacatataactctggattaggactaacatgataagattcaaagtgaagaacatatctcatctgatatttgtgaaagggactcactatcaattaattatttgtgtcatatatgatacacgtctacaacatgttaagcatcctggaaaatttgcgagtaataaataatatgatgtggcttctgcacccaaaaccttatatattgtttaaggcaataactattaaa

SEQ ID NO: 267935 - DNA, 653 bp, Homo sapiens
aagcattttcttttacattacaaatagtatatttctttttagtgaaaactgcataatcaaaatgtataacttaaaataatgtaaatgtgtttagtgtgatttggaccagttataactatttcataagccatctatataatataaagctgtaggcagattccaatgctctgtaattatgtaacaaacatttcacaatataatgcataatccttaaagtaactcgagtggtttctggtgtgttataattgttctttgctgtaaatactacataaacaatttgtaagctttttatgcagcactacattttctttcttccatatgtggtggctaytctaaaatatatctctttttgttaactgggaatgtatcactaacatttctgaaaatgattatctcaagtctttggaaattacttatacattggtatataaacatataactctggattaggactaacatgataagattcaaagtgaagaacatatctcatctgatatttgtgaaagggactcactatcaattaattatttgtgtcatatatgatacacgtctacaacatgttaagcatcctggaaaatttgcgagtaataaataatatgatgtggcttctgcacccaaaaccttatatattgtttaaggcaataactattaaa

SEQ ID NO: 267936 - DNA, 653 bp, Homo sapiens
aagcattttcttttacattacaaatagtatatttctttttagtgaaaactgcataatcaaaatgtataacttaaaataatgtaaatgtgtttagtgtgatttggaccagttataactatttcataagccatctatataatataaagctgtaggcagattccaatgctctgtaattatgtaacaaacatttcacaatataatgcataatccttaaagtaactcgagtggtttctggtgtgttataattgttctttgctgtaaatactacataaacaatttgtaagctttttatgcagcactacattttctttcttccatatgtggtggctactctaaaatatatctctttttgttaactgggaatgtatcactaacatttctgaaaatgattatctcaagtctttggaaattacttatacattggtatataaacatataactctggattaggactaacatgataagattcaaagtgaagaacatatctcatctgatatttgtgaaagggactcactatcaattaattatttgtgtcatatatgatacacgtctacaacatrttaagcatcctggaaaatttgcgagtaataaataatatgatgtggcttctgcacccaaaaccttatatattgtttaaggcaataactattaaa

SEQ ID NO: 267937 - DNA, 566 bp, Homo sapiens
tttataattcttctcttctaaaactctgattcataattttcttctgtcagtacatcctccaggttctacctatcagctgcatcctcccctcttatcagaaaacaagcccaaatctcagccataatgaatatacatagacaaaaatcaatcacaaccaaaataaacaaataattttttccctttaaagcaaaggctctttcctctcttacaatcaaattttgaaaaatctacctgccaactccacttcatccccatcactcttcatttttcactttagtgtcttccataaccactatactgaaaatcttccataaaggttaccaaggtcttattaataattctactgwaattgtgttcaagatatgtgaaaactaagagacacaacaatatttattttgcgagtatctctttaagctatgtaatgctgttacagaaatgagcaggacttagcacactagcctttaataaatatgtgctgaattaaaagaaatgaaattcatccatctatgaaatccaggaaagcaataaaaaaatcaatggcctttgcctgatttttaatcattcaa

SEQ ID NO: 267938 - DNA, 566 bp, Homo sapiens
tttataattcttctcttctaaaactctgattcataattttcttctgtcagtacatcctccaggttctacctatcagctgcatcctcccctcttatcagaaaacaagcccaaatctcagccataatgaatatacatagacaaaaatcaatcacaaccaaaataaacaaataattttttccctttaaagcaaaggctctttcctctcttacaatcaaattttgaaaaatctacctgccaactccacttcatccccatcactcttcatttttcactttagtgtcttccataaccactatactgaaaatcttccataaaggttaccaaggtcttattaataattctactgaaattgtgttcaagatatgtgaaaactaagagacacaacaatatttattttgcgagtatctctttaagctatgtaatgctgttacagaaatgagcaggacttagcacactagcctttaataaatatgtgctgaattaaaagaaatgaaattcatccatctatgaaatccargaaagcaataaaaaaatcaatggcctttgcctgatttttaatcattcaa

SEQ ID NO: 267939 - DNA, 640 bp, Homo sapiens
agacacaacaatatttattttgcgagtatctctttaagctatgtaatgctgttacagaaatgagcaggacttagcacactagcctttaataaatatgtgctgaattaaaagaaatgaaattcatccatctatgaaatccaggaaagcaataaaaaaatcaatggcctttgcctgatttttaatcattcaacattttgaatagcatttctgactgttgaaccataatcttctccttggaattttttcttctattgacttttatgaaattattcacattttatcagtcagaacaggatttggcagaataagctcatttgggaattgatgcaccaaaytaaaagttttgaaacaacttagaggtagccattggcatagtagcaggtttcgtttatagactgagaaatcaggaaacctgattgtacagtggggatacaaagtacagtggatacaaggttaaacagtggatgagagttgagtcaaccgggcatcatagaagaggtttatcacaggggattatcctgagatgcatattcagcctggaaagtggtggtcaagaaataggcagatggttaagatgcagcaagaggcccatactgcatcagagattaaggcagtggggagtctcatatgtaggcacaaa

SEQ ID NO: 267940 - DNA, 640 bp, Homo sapiens
agacacaacaatatttattttgcgagtatctctttaagctatgtaatgctgttacagaaatgagcaggacttagcacactagcctttaataaatatgtgctgaattaaaagaaatgaaattcatccatctatgaaatccaggaaagcaataaaaaaatcaatggcctttgcctgatttttaatcattcaacattttgaatagcatttctgactgttgaaccataatcttctccttggaattttttcttctattgacttttatgaaattattcacattttatcagtcagaacaggatttggcagaataagctcatttgggaattgatgcaccaaattaaaagttttgaaacaacttagaggtagccattggcatagtagcaggtttcgtttatagactgagaaatcaggaaacctgattgtacagtggggatacaaagtacagtggatacaaggttaaacagtggatgagagttgagtcaaccrggcatcatagaagaggtttatcacaggggattatcctgagatgcatattcagcctggaaagtggtggtcaagaaataggcagatggttaagatgcagcaagaggcccatactgcatcagagattaaggcagtggggagtctcatatgtaggcacaaa

SEQ ID NO: 267941 - DNA, 669 bp, Homo sapiens
tacacattaacctgaactttgtttttatactgcaaagttgtgaaggtattgagaaaaagacactgccgggaagatgcccatcccacctctctaagctgtatggaagcaagaggtcctataaaatctcattccaattctasgctaaaaccaaaatcagatagataatcactcagtgacattgaaagatattgagcatgaaagaaagtatttgatgacaaaagggaagaatacattcctgcaaataatttcatatataaacagaataaatttagtctttttttggtccaaaaattttcataacttttaaacattaaatgcataacacaacacaaagtgctaaattacaatggagaaacaaacatcaagttttgcaaagaaatgattgtgtcccaagacttttatgtccaaccagattgttgattatgtataaaggtgaccatgatgtgactcagaacctgtaactctagtgcatattttttgagactgtattcatagatcaaaccaacttagaagctaatcaaagtcaggaactcaagcatagaagtagattattcaattgcatgagtatagaatagaatgaaggcaattaatctcatattgcttagactgactacattaaattaaactggtcattgttgagaagcagctgttgtatcactggttaaagcc

SEQ ID NO: 267942 - DNA, 583 bp, Homo sapiens
tagaaaaaaatagaagtggagtgtagtctttcattcattaaattgctcaaaatagactccaaatgcctccgtactcttagaataactgaccataagtgtcagagtaattctgtctttatccagcagccctggagaggttcattgatgcttaggcattgcaattgggctgtacacattaacctgaactttgtttttatactgcaaagttgtgaaggtattgagaaaaagacactgccgggaagatgcccatcccacctctctaagctgtatggaagcaagaggtcctataaaatctcattccaattctaggctaaaaccaaaatcagayagataatcactcagtgacattgaaagatattgagcatgaaagaaagtatttgatgacaaaagggaagaatacattcctgcaaataatttcatatataaacagaataaatttagtctttttttggtccaaaaattttcataacttttaaacattaaatgcataacacaacacaaagtgctaaattacaatggagaaacaaacatcaagttttgcaaagaaatgattgtgtcccaagacttttatgtccaaccagat

SEQ ID NO: 267943 - DNA, 498 bp, Homo sapiens
atgatcaaatgtgaaatgtagaaagcgggtaaattcacatgtgaatatgccttaatttggctttcccaaggagcagatagtgagataaggacttgagtaacaggagattatttagaaggcacaacctgtcttcctaaataccttttaggcaaatagacaagtgacataagaaaaatcagaaagcctactagaagtgcattatctaacaagctgatgctgtggaaaactggagcttaattttgctagctaactctgggaaaacactgtcaaacatggcctgagagttattccatttgaaaggagaggaagatgggggatacaccaactcctgtttatacactaacttctgttagtcattgggtaagggctcctcctggagtgtgttaatcatacaactttagtgtgatgcacttctgcagaaaacagatttcaacatccattgaaagggttcaagccaaaaatgaaratgctgaaagataaaattcagaccagagtaca

SEQ ID NO: 267944 - DNA, 577 bp, Homo sapiens
aaccaaggcacctccctcttcctctcttccttgatgcctgaactgggaccctccccttctccgaatgcaccggcaaggaacagtgtccagagcacactgagcctggggagtttctcagtgcctcttgtgaccctccttccaaaataatcagccctcctgccctcccctgcagtccaccaaacactgtctcctggcacgcgacagaacctggaagcatcgagactgagtcccaattctgagccccacctcataatccccagcctcggtctctccctctgttctgtaagtgactgggacccagcagtctctaaggaatctggaacaccctccgatgttcaccccagcccrggcttgtggggtctaaccaggtctaaccacaagctcagtgggaattggacagaggttgggagggagtgttcaaggaggggttcctgacacccagttccaccagagccaggcgtaggctgcacaaggtcaagggcggctgcctctccccagtcgtgccccagctgccccacagatggtgggccagagcactcagctcccccatctgcagcttctgaaggtgggggcttcc

SEQ ID NO: 267945 - DNA, 577 bp, Homo sapiens
aaccaaggcacctccctcttcctctcttccttgatgcctgaactgggaccctccccttctccgaatgcaccggcaaggaacagtgtccagagcacactgagcctggggagtttctcagtgcctcttgtgaccctccttccaaaataatcagccctcctgccctcccctgcagtccaccaaacactgtctcctggcacgcgacagaacctggaagcatcgagactgagtcccaattctgagccccacctcataatccccagcctcggtctctccctctgttctgtaagtgactgggacccagcagtctctaaggaatctggaacaccctccgatgttcaccccagcccaggctygtggggtctaaccaggtctaaccacaagctcagtgggaattggacagaggttgggagggagtgttcaaggaggggttcctgacacccagttccaccagagccaggcgtaggctgcacaaggtcaagggcggctgcctctccccagtcgtgccccagctgccccacagatggtgggccagagcactcagctcccccatctgcagcttctgaaggtgggggcttcc

SEQ ID NO: 267946 - DNA, 577 bp, Homo sapiens
aaccaaggcacctccctcttcctctcttccttgatgcctgaactgggaccctccccttctccgaatgcaccggcaaggaacagtgtccagagcacactgagcctggggagtttctcagtgcctcttgtgaccctccttccaaaataatcagccctcctgccctcccctgcagtccaccaaacactgtctcctggcacgcgacagaacctggaagcatcgagactgagtcccaattctgagccccacctcataatccccagcctcggtctctccctctgttctgtaagtgactgggacccagcagtctctaaggaatctggaacaccctccgatgttcaccccagcccaggcttgtggggtctaaccaggtctaaccacaagctcagtgggaattggacagaggttgggagggagtgttcaaggaggggttcctgacacccagttccaccagarccaggcgtaggctgcacaaggtcaagggcggctgcctctccccagtcgtgccccagctgccccacagatggtgggccagagcactcagctcccccatctgcagcttctgaaggtgggggcttcc

SEQ ID NO: 267947 - DNA, 519 bp, Homo sapiens
ccagttttcatgaggtcctaaaggagacaccgcgcctgtggaagcagctcataaacttgatgggttatcgaatcggaagcttctttaggccaggcacagtggcttaagcctgtcattctagcgctctgggaggctgaggcaggaggatcacttgaggccaggagtttaagaccagcctgggcaacatagtgagacccagactctacaaaaaaagtgaaaaaattagccggacatagtggcacgtgcctgtagtcccagctacctgggaggctgaggcaggaggatgaattgagcctgggagattaaggatgcagtgagctgtgatcacaccactgcacagcagcctgggwgatagagtgagaccctgtctctaaaaaaaaaagaaaaagattctttagatgttgagcccttcctttgaggccagggacagtagtgactcctgtctgaagcccccagtcccccagatctgagtcccagagcctcagagtggacactcagggcagtgggatggaacgtgct

SEQ ID NO: 267948 - DNA, 564 bp, Homo sapiens
tgtcacaaaccataaaatacttggagatatggaatgaaatatgtgcaagacttctctgaaaagtacaaactgctcctgagagaaactaaacaagccctaaatacttggggaaatataccatgttcatggattgggagacccaatattattgtaatgatgattctccccaaattgatctacagattcaatagaatcccaaacaaactccaagttgcatttttttggtagaaattagagaagactctaacatgaatatggaagaataaagtttctagaatagccaaatagtcttaaaaaataacaatgctgaaaaactaagagcagctgatttgagacttactagagagctataagtaaaatcatgtggaataggcataaagataaacaaacaggccaacggaagagaaaaatacttacacattcaaataactttccacaaaagtaccagtgcaatgcaatagggaaagataatcttttcaacacatgrtgttgtaacaaccaggtatctgtatggaataaaatgagtctcaactcatacctcacatcatttgaaaagttaagttg

SEQ ID NO: 267949 - DNA, 508 bp, Homo sapiens
tcaaatgtcattctttcaagcctaaagagaatttgccaattatcatctccattctactgatgggaaaactgaggcattgagttccaattacaggcacggctgtctcctacccctgagttctcaggccccttccgttctcctttgtctccccctggacaaagagaagagagaattaccttcaggagctccttgggtggaggccaggtgacaggcaaacgagactaagatccaggagaagagaaaccccctagagaccaggagacacaagcagaggcggcatcagcttccacccctcacacccggatccggctggggaagctgggagtggaaaccagtcccagtctcaccccagtcctgcccacgggaggcaggaggccaggtacaggctctaggaccccatcagagcagcagcccactcttcccggcctccaggcacagcctctcagtgaggacctgcttayatagacaaacacagcctcacttctcacagatcaattagccaacgtca

SEQ ID NO: 267950 - DNA, 624 bp, Homo sapiens
tactttgtccttttttaccctggctttatctgagattcttaagaggaatattaaaacatctgcttatatgtttagttatattgcttttttaaaaaaaagctagatgcttttgaccagttttcttctgcaaaatacataaaacaagtaaacaaaaacctttagcacaaatagcgtgctttttacaagagtggatgcatagttttgatcatgaaaattatatctcttcttttagatattatttttcttcagggaactgaagttatattcaaggttgcactcagcctactgagcagccaagagacacttataatggaatgtgagagctttgaaaatattgttgagtttcttaaaaacacgctacctgatatgaatacctctgaaatggaaaaaattattacccaggtatgatttaaatgctaatagtattatatagcagttttctctactraatatatattaaatgctttagcctaaaaatgtagctttgcttgacagatattttcatcagatacattttatttagaaaggggactattgtgaaatttctacactgtgacattttctatctggctatgcacaaaaaatgctgtttagtgctacgtaatgagtttttcaggaatcctt

SEQ ID NO: 267951 - DNA, 581 bp, Homo sapiens
actttatttatggacactggaaaaaaatgcaaataatgcagaaaatcacaagaaaataaaagtaactataaatctcaacatctagagataatctttgaaactttgtattacatgtttctttgcttatatatacatataaaaatatataaagttgtacataaatgaaatcatactatatatactattgtggaacctgatttataattaaaaatataaagtattagattttttccagtaactataaatccatattatcatttttaatggttgtataataatccattgtatccatacccactaagtaaggaaaagatgatggttatttgaggataaccagttagtctagaaattctcttattaaaattcgaatgtttgagtatctctattagtaagtagtagagtaagtcaggttttttgtggtttcttttctcttctcagtgttagtatagacaccattgcttgaatagcagctgttgtctctccttccccctaggaagtttggastaactgtcctctagcttcaaagcaaacgaccttcctatttagtggtgacatgggagagcagtagcagccctaattaa

SEQ ID NO: 267952 - DNA, 662 bp, Homo sapiens
ataccaaaggctagcctaacccatgatactttcatggcaggtttttgagatggatatttctaagcagttgcatgcctatgaggtggaatatcatgtgctacaggatgagcttcaggaatcttcatattcctgtgaggatagtgaaactttggagaagctggagagggccaatagccaactgaaaagacaaaacatggacctcctagaaaaattacaggtaaagaaataaagatttgagcaaataagtacttcaatgcctcctgcatgcacagaactacctcaggaatgaaagggatatgtgcgtggaatgaaccattgctaaccaagagcccatgtatcagactgtccaagtgctctggggctacaaatgacatgttaaattaaacattacttggaaaaaaatgcaccctcacaaaatagctaaatggcagttcaaagtggaatctgcttaaatacctgttgcatgttatagatatttggttaarttaaagggaggaggaattgaatgtaggaaattgatgaagttgtgaaggacctgggcttgagctggaatctggagggttggtggaagaaatgagtgaggagggtctttaagtcaggctgagtaggagggtggcatcaatcagaaggacatggcagagcagcaaagttagcctagtgtc

SEQ ID NO: 267953 - DNA, 523 bp, Homo sapiens
agttgatagatcccagctgattcactatataattctggtaaacagrcagctgtatgtactgcatgccaccctaagaccacacaatataattgacagaagcatattttgacaagctgaatcctatagctcttgatgccttgcaaaagaaaaccctcacgcaacacttatgataatgacaatattaacaataacatcacccgttgctgactgagcattaataaaacatttattgagggtgcctagctactaagcacatgcactcagaaaacaactcaactataaggtaggcaattactattaggtccactttatagacagaaagctgaggcagaaagagatgaagtaattgccccaagttcacatggctaggaagtggcagtttagaattagaactccaaaagtctggtttcagaggccaaatcctgatatcccaaagtgtattactgcctattttcactctttatctggcttgaggatagcaacaaatgctaaacctaatttacaactctaaatatttgtcatc

SEQ ID NO: 267954 - DNA, 523 bp, Homo sapiens
agttgatagatcccagctgattcactatataattctggtaaacagacagctgtatgtactgcatgccaccctaagaccacacaatataattgacagaagcatattttgacaagctgaatcctatagctcttgatgccttgcaaaagaaaaccctcacgcaacacttatgataatgacaatattaacaataacatcacccgttgctgactgagcattaataaaacatttattgagggtgcctagctactaagcacatgcactcagaaaacaactcaactataaggtaggcaattactattaggtccactttatagacagaaagctgaggcagaaagagatgaagtaattgccccaagttcacatggctaggaagtggcagtttagaattaraactccaaaagtctggtttcagaggccaaatcctgatatcccaaagtgtattactgcctattttcactctttatctggcttgaggatagcaacaaatgctaaacctaatttacaactctaaatatttgtcatc

SEQ ID NO: 267955 - DNA, 586 bp, Homo sapiens
gctttttctgaccacctcgggcagagttaacttcatstttagtaataccagttgttttcttctattttcttctttttttatatatattcattgacctctgcctttacttttattatttacttccatacgttttactgttgttgttttaaaattttaatacctggctctcttactagctttttgagttgaacactcagtgtaactaatttttggccttcttgattttatatcaatatattcatggcttttaactgctccctagatccgtttcaataggtaaggctctaagcattgaattttcttccttctagcttctaagagtagttttctattcccaaacacatgtcattctacttgtcttctaatccttgatttctttctttttttggcattgtggtcagagaatatttgtataaatgattatgattatttggatttcaaaaagatttacttaaaaatctttgtggacaggtacataattacattttatgaatgttccaagtgtgctaaaaatgaatgagttttctccataggaggcgaagttctctataaatattaggtcaagcttatttatttgtgttactca

SEQ ID NO: 267956 - DNA, 632 bp, Homo sapiens
taaaaatgaatgagttttctccataggaggcgaagttctctataaatattaggtcaagcttatttatttgtgttactcaaatattatttatatttaatttctaaagatgagtatgttaaaatctcccacaggagctattaatttatcgatttcactccagaattcttttaggtgttattttctagctctcaaagctacatcattatgtatgttctcatgattgttctatctgtttgtttactgttacatgtgcttgcctctttggatgcttttgctttagtttaataggtcaattactcaaagagagctscctgtgctctcttttgctcagtatttgcctagtatattgtatatattcctttattgctcaatatttctatgtcagtttgttttatgtgtggctcttataaaaggctatgttgcttttctaataataaaaagatctttggaagctgaggtaagatgattgcttgagcccaggagttcaaggctacagtgagctatgattacaccactgcaaccccagcctgggcaacagagcaaggcccaatctctgggaaaaaaaaaaagaaagaaagaaagaaagaaagaaaaaggacatacagcttctttcctagcactatcacagttcc

SEQ ID NO: 267957 - DNA, 632 bp, Homo sapiens
taaaaatgaatgagttttctccataggaggcgaagttctctataaatattaggtcaagcttatttatttgtgttactcaaatattatttatatttaatttctaaagatgagtatgttaaaatctcccacaggagctattaatttatcgatttcactccagaattcttttaggtgttattttctagctctcaaagctacatcattatgtatgttctcatgattgttctatctgtttgtttactgttacatgtgcttgcctctttggatgcttttgctttagtttaataggtcaattactcaaagagagctgcctgtgctctcttttgctcagtatttgcctagtatattgtatatattcctttattgctcaatatttctatgtcagtttgttttatgtgtggctcttataaaaggctatgttgcttttctaataataaaaagatctttggaagctgaggtaagatgattgcttgagcccaggagttcaaggctacagtgagctatgattacaccactgcaaccccagcctgggcaacagagcaaggcccaatctctgkgaaaaaaaaaaagaaagaaagaaagaaagaaagaaaaaggacatacagcttctttcctagcactatcacagttcc

SEQ ID NO: 267958 - DNA, 604 bp, Homo sapiens
atgtcctttgcaggcacatggatggagctggaagccattgtcctcagtaaactaatgcaggaatagaaaaccaaacactgaatgttctcactcataaatgagagctgaataatgagaacaaatggacacagggacgggaacaacacacactggggcctgttggtaggggatagggaagaggaagagcatcaggaaaaatagctaatgcatgctgggtttaatacctaggtgatgggacgatagatgcagcaaaccaccatgacacatgtttacctttataacaaatctgcacatcctgcacatgtaccccgaaacttaaaataaagaaatcaggcaaataaaacaacyaagaaattctacaacttgtaactaaaaagtaacccttaaaataatattccctctcataaactttgtaaactaaagataacaaataaaacacttttattcagatatttatttcctgagattgctagaaaatataatgatttgagtcccagagtctttggggatatattttctataatggccttggaaagtggcatgaccagaatttaaaatcaatcaatcagaaggagcaaaaatttttaaaaggcagtatttctag

SEQ ID NO: 267959 - DNA, 564 bp, Homo sapiens
cacaccttcattaaattaggtgttcttgattgggttactctcacctttttacaaccccggatctctgttttcccagtcaaagattaatctcttgctcttcacaatttaaagattctttttggtaaccaagtttcagttattgaacagatacacatcacgaaatgttttctaggactttccttttctttttaagacagtatgggggggcgtgtgaggggaacaaaactaacagcattctgttatcctcaggagcctatacttttaagtatttttagtttttccccaggagcaaataacatggtcatttcatgtcagcctgttatgcattagcacaactctgatsagcgccatcagaggttattgatagtaccaataatatagatgttggaaaattttgcattgatttaatgcctgaaatcaatcaacctttcactattctctttcctttccattgctcctgcagactcggataacattcagttcctgaatctccagagcctcctgtaaaggggtaacggaatccatcagagagtctagtaatctacagctcctggattagaaccc

SEQ ID NO: 267960 - DNA, 595 bp, Homo sapiens
tataactggcattctgggttccggccatgcattattccttaatatctatatgttcacctcttgcttctctattgttgaatgtaagtcacagtgtaaaatattggcaaagtatcattcctgagataatacatgtggaagcactttagaaaagctaaatcgggtggatcacttgaggtcaggagttcaagaccagcctggccaaaatgatgaaamcctgtctctactaaaaatacaaaaattagccgggcatggtggtgcatgcctgtaatcccagctacctgggaggctgaggcacgagaactgcatgaacccgggaggcggaggttgcggtaagcagagattgaaccactgccctccagcctgggcaacacagtgagattccatctcaaaaaaagaaaagaaaaggtaaatcattttatctacctaaggtaaatgtagttatttttggagcctaattcacatctttattgatagaacatactatcagctcaaactaggcatggcactctgaagcaaccaaactatcctaccttcactataagatatatcgctctaaaagtctacgacagtcctccagatctcagtcttgatcaac

SEQ ID NO: 267961 - DNA, 580 bp, Homo sapiens
ctatataaggggaagaggtaccaataaaaaaataccctgtggaaggttgtccatacgttaattcactgagcaaatgcatattaaatacctatgatgtttcaggcacaatgatatagtaaaaaagacycactctgtcacccaggctggagtgcagaggtacaatcttggctcactgcaacttctgcctcctgggttcaagtgattcccctgcctcagtctcccaagtagctggaactacaggcacttgccaccacgcctggctaatttttgtggttttagtggagacggggtttcgccatgttggccaggctggtctcgaactgctgacctcaggtgatccacccatcttgacctcccaaagtgctgggattacaggcatgagccactgcgcccagcctagaatccttttctttaaagtgcttaccatctccacatagagctgacgctccaattaaacaaggaagtgttcaatgtgagagtacaaccatcatgtgaaaaagatgccaaatatacaaagcacaagaatatgtgctccatgagagcaggaatttttctccattttgctcacagccttatcccc

SEQ ID NO: 267962 - DNA, 613 bp, Homo sapiens
gtctgctttctcagggttctggtttcatcaaccatcccttctcttctgtatcttaaagttttcccttcatactgactcttttttgtaagcatttaaacatcccttactttttgccattttaagaataaaatctggccgggcgctatggctcatgcctgtaattccaacaatttgtgaggctgaagtgggaagattgcttgagctcaggagtttgggaccagcctgggcaacatggtgagacccctgtctctactaaaaatattaaaaataattagctgggcatggtggcacrtgcctgtggtctcagttactccagaggctgagacaggggaggattgcttgagcctgggaaatcgagactacagtgacctatgatccagccactgcactccagcctgggcaacagagtgacaccttgtctgaaacaaaacaaacaaaataataaaatcttccttgactaaatttcctattccaacgacttccttcacatcactcacattccatgtacaaagccatctgcgtggctaacctcagtgtcaataggacagagaagtactcatctccttcagagaagcactgcaagttacaaagtaatgggtagggatgtataatt

SEQ ID NO: 267963 - DNA, 594 bp, Homo sapiens
gcgtggctttaggggaagggtagatttcctttataattaattctgcttgtttaagaaaccattaagattagtttacagactatccaggcaacacggggatgatgttgaaagcgtaatggtatgaagtaaaatgcagcattttgagaaacgattgatttggtcatttaatgttataatttttaattgagctttttaaaacttcatcttcatataatggaaaatgctgggaagatatatagatgccaagtatcagttcatttgtattcaaggaaacactaatcattcctagccatttttccagctccagtagccttagaagcacaccgagttcgtgctatggtttttagggtgaagctgtttgacaatctcattttaacttttatcctaaaatacttcagagwttctttgtatttagttaaaaatctaaattattctttaaagcaaattttccaaagtaaaatagaagtctaaaactgagtctagattcaaaatagaatagagtaatacactgatttgaaaatgatagaactgtaaaactgtaaaactaagggtctccttaaggaatcaccggtccccactgtcttattttacaga

SEQ ID NO: 267964 - DNA, 587 bp, Homo sapiens
aaatcctgcaggggcttgaaaggattttggcttctactcttggtgagatagaaagcccctggtacagtgcagtgctcagtgtggaaatgacatgatctaagttgctttcaaaagaaccctttggctactgtgtggaatatggacaagggtaatgggcaggtgtctactgcactcatccagggtgagccattggtagctcacacagaagygacagcaagggaggtggttaggcagctgccagcttctggatataattgtaaaggtacagacatgatgatatgttgatgaatccaatgtgaggtccaggagaaggagagcaggcaaggatgacatcacggtttagggccacaggaattagaaaaaatggagcgacaataggacagactgcaggtgggtgatggcttaagagatcaggagccgcgttttggacacattaattttgagaagcttatagacattcaagaggagatgtcagtaggcagttgattatatgagtctggagctccagggacagatcagggctgagacagaaaattggaagttattagcatctagatggtatttaaagccatgagattagatgagtt

SEQ ID NO: 267965 - DNA, 587 bp, Homo sapiens
aaatcctgcaggggcttgaaaggattttggcttctactcttggtgagatagaaagcccctggtacagtgcagtgctcagtgtggaaatgacatgatctaagttgctttcaaaagaaccctttggctactgtgtggaatatggacaagggtaatgggcaggtgtctactgcactcatccagggtgagccattggtagctcacacagaagcgacagcaagggaggtggttaggcagctgccagcttctggatataattktaaaggtacagacatgatgatatgttgatgaatccaatgtgaggtccaggagaaggagagcaggcaaggatgacatcacggtttagggccacaggaattagaaaaaatggagcgacaataggacagactgcaggtgggtgatggcttaagagatcaggagccgcgttttggacacattaattttgagaagcttatagacattcaagaggagatgtcagtaggcagttgattatatgagtctggagctccagggacagatcagggctgagacagaaaattggaagttattagcatctagatggtatttaaagccatgagattagatgagtt

SEQ ID NO: 267966 - DNA, 587 bp, Homo sapiens
aaatcctgcaggggcttgaaaggattttggcttctactcttggtgagatagaaagcccctggtacagtgcagtgctcagtgtggaaatgacatgatctaagttgctttcaaaagaaccctttggctactgtgtggaatatggacaagggtaatgggcaggtgtctactgcactcatccagggtgagccattggtagctcacacagaagcgacagcaagggaggtggttaggcagctgccagcttctggatataattgtaaaggtacagacatgatgatatgttgatgaatccaatgtgaggtccaggagaaggagagcaggcaaggatgacatcacggtttagggccacaggaattagaaaaaatggagcracaataggacagactgcaggtgggtgatggcttaagagatcaggagccgcgttttggacacattaattttgagaagcttatagacattcaagaggagatgtcagtaggcagttgattatatgagtctggagctccagggacagatcagggctgagacagaaaattggaagttattagcatctagatggtatttaaagccatgagattagatgagtt

SEQ ID NO: 267967 - DNA, 313 bp, Homo sapiens
atggaaacagcttctttccttaaacctaatsaaccaacctctgctagcttccaacttttcttctgcagctttctcacctctctcagccttcacacaattgaagagagttaaaaccttacactggtttaggctttggcttaaggaaatgtggctgctttgatcttctatccagatcattgaaatgttcgccatagcagcaataaggctatttcagtttcttatcatccatgtgttcactggagtagcagttatcatttccttcaagaactcttccttcgcattcacagcttggctgtttggcacaagaagtcta

SEQ ID NO: 267968 - DNA, 560 bp, Homo sapiens
atttttctaaattgatgggcattacagtccccctgaaaagcttgtccaataacaaatwgcccatcctacgccagaagatttgattcattagatagggtagaactctggcttgaatttttaaaaagctcttccattgattctgatgcacaaagtttgagaacatttaccttaggggttaagaccaacttttgagttagatgaatctggatctgacagttctgccgtttactagctgtgtgactctaaacaagttatttcacctttctaagcttcagtttcctcatctataaagaggagataatagtagtccttcttttttacagttgtcttaacaattaaatgatacagtgcagtggttctcaaagtgtggtccctggaccagcagcatcagcattacctaggatattttcagaaacacaaaaactatcaggctccagccacatctactgcatcagaaactctgagggtaaggtctaccagtacttagcaagaagccattcaaggtgattgttatgcatactaaaatttaatcactaatataatgcatataaagtgtttag

SEQ ID NO: 267969 - DNA, 560 bp, Homo sapiens
atttttctaaattgatgggcattacagtccccctgaaaagcttgtccaataacaaatagcccatcctacgccagaagatttgattcattagatagggtagaactctggcttgaatttttaaaaagctcttccattgattctgatgcacaaagtttgagaacatttaccttaggggttaagacyaacttttgagttagatgaatctggatctgacagttctgccgtttactagctgtgtgactctaaacaagttatttcacctttctaagcttcagtttcctcatctataaagaggagataatagtagtccttcttttttacagttgtcttaacaattaaatgatacagtgcagtggttctcaaagtgtggtccctggaccagcagcatcagcattacctaggatattttcagaaacacaaaaactatcaggctccagccacatctactgcatcagaaactctgagggtaaggtctaccagtacttagcaagaagccattcaaggtgattgttatgcatactaaaatttaatcactaatataatgcatataaagtgtttag

SEQ ID NO: 267970 - DNA, 521 bp, Homo sapiens
aagcctttgaaatgctgaaattcctcatgtatgacctcggcttccgcaagcagtacagacctgacatgatgtcgctgcaggtgaggcacttgtgcttcccgaggaaggtgtgagactattaccagaaatcctggccctcttctcaattattacagttcagatttaaagaaatgtagagccattgtcttagaacttgggtaaagattggggcatgttttagttcacttagtgtgggatttgctatttaggtaaacttctaagtgtatgagacccagagscagaataccttttccataaaattcctgaagtaagtaaataagtaatttaagaaaggtaggtgatgaggacccagtcctttatgccctaagtctatgggttacatggagaaggtatcaaatcatctttattcactttttctcaacttctcagttgaaaaggctcacagatcttttgtttacaatctgaaagtatctttatccctttacttttgagtacacaaatagcagataccatgttatggt

SEQ ID NO: 267971 - DNA, 648 bp, Homo sapiens
gaaacaacggtttggtagctattattagaatttcaaagatacagggaagtacctgtgagtagtgtttgatctgggtccacagataaaaagataatagctatcagtttaaaaatacaatgatatttcaacttaaaaattattcatcaatttgacattacaaaaattcatgtaaatcggatttatacattcatttaatatggactgtaagtaccaagaagtattttatgtctataattttgaaaatgcagatgtttaaaaatctttggtgacagcattgctgtaggccgcagtattggggaccttattctgggagagtaggtccttttgcattttaaagtgagatataacacttttccactttctagagcaggaggtactgttttgggtmtagccaataggatgtttagaagtgtgcttaaatgcctcttgcagtgggtttggactcactccacaggatttctgatttcttgcttctctcttggtggcttgggtgctccaggcttcagttaccttatctgtaaaatgtgtaaaatcttgcttcagttaccttatctgtaaaatgtgggggttgaggtctttttcaactttaaatacatgtatcttgtcacgtttgtttctgctgctttctgtgttaagcataaagacatt

SEQ ID NO: 267972 - DNA, 648 bp, Homo sapiens
gaaacaacggtttggtagctattattagaatttcaaagatacagggaagtacctgtgagtagtgtttgatctgggtccacagataaaaagataatagctatcagtttaaaaatacaatgatatttcaacttaaaaattattcatcaatttgacattacaaaaattcatgtaaatcggatttatacattcatttaatatggactgtaagtaccaagaagtattttatgtctataattttgaaaatgcagatgtttaaaaatctttggtgacagcattgctgtaggccgcagtattggggaccttattctgggagagtaggtccttttgcattttaaagtgagatataacacttttccactttctagagcaggaggtactgttttgggtatagccaataggatgtttagaagtgtgcttaaatgcctcttgcagtgggtttggactcactccacaggatttctgatttcttgcttctctcttggtggcttgggtgctccaggcttcagttaccttatctgtaaaatgtgtaaaatcttgcttcagttaccttatctgtaaaatgtgggggttgaggtctttttcaactttaaatacwtgtatcttgtcacgtttgtttctgctgctttctgtgttaagcataaagacatt

SEQ ID NO: 267973 - DNA, 573 bp, Homo sapiens
ttgttcttctcaggtccaggttagtctatttttttctattgagaatttcagtaatgcatccttttttcttctctctgtactttcttggttatcattgcaactttgcaacaactctcttggagaatgtaaacataatctcctttaataactaaatttgtacaattttcttctggctattggtactaaattcaattacaatattcattaccaagatcactttttaagataatgtagatattttgagttatgatcctcttggttcacattgggaaaaggctgttatcctgatgttcttaaataggccatttttcttatttctcatgatgtgattaaataaagatttatcaacatcaatcaattaatgtaactggacaaggagtaagaatagatacctatcacataataccactgtctgcaggggttagcagtcaattggccasggcaacaacccctaaaaaccagttagcagagtaatcttccaatagaattgttccgatgggaatgtagttgtttccttgcactctgctaattagtgaccctgtatttaataattttagaatacaaaatataaat

SEQ ID NO: 267974 - DNA, 471 bp, Homo sapiens
aaccaacacacaatggtgcccatggtgatgarggctggggagggagagcatcaggaaaaatcgctaatgcatgctggtcttaataccgaagtgatgggctgataggtgcagcaaaccaccatggcacacctttacctgtgtaacaaatctgaacatcccacacgtgtatcccggaactttaaagattttaaaaattaaaataaaaattataaaactaaaaataaataaataaaaataaaaatgatgtccccagaactagatttctacatttttaaatttaataagtcaaatacagtctcaaaacttaaacacaaaagaatgctttctataaaggtacatctatgaacatgctcgagaaaaacgatgtatgaaaatatagcataacacatgtcacagtagaaacatgcatggggtacagtagaagcccagagaaagagggtaaagtcaaaccaggcaacaggatgagaaaca

SEQ ID NO: 267975 - DNA, 471 bp, Homo sapiens
aaccaacacacaatggtgcccatggtgatgagggctggggagggagagcatcargaaaaatcgctaatgcatgctggtcttaataccgaagtgatgggctgataggtgcagcaaaccaccatggcacacctttacctgtgtaacaaatctgaacatcccacacgtgtatcccggaactttaaagattttaaaaattaaaataaaaattataaaactaaaaataaataaataaaaataaaaatgatgtccccagaactagatttctacatttttaaatttaataagtcaaatacagtctcaaaacttaaacacaaaagaatgctttctataaaggtacatctatgaacatgctcgagaaaaacgatgtatgaaaatatagcataacacatgtcacagtagaaacatgcatggggtacagtagaagcccagagaaagagggtaaagtcaaaccaggcaacaggatgagaaaca

SEQ ID NO: 267976 - DNA, 475 bp, Homo sapiens
gagtgtagtttctctcgccaatgtctgaggagccctccacatactaaagagcaaaaatactaaatactactccacatgctaaagcgcaaaatccccacacatctgacagataccctcctatcaaaacttctctatggccaataagttaagtggtcataattccattatgactactggaatttttaagttaatttwgctaaatcggcttttataatcttttaagcagtttaaagcctttaagagaaactgatatatgaagttataaaacatttaagttttcaatccatgtttaaatatttggagaaatttatgttcaaaattttttagtttattaattgtgtaagtggatgaaaatatttccaaaattattgtttaaagattgcaaagatggtacatccctctaacatgtttcaagctatacccccataaaagcacaataatgtgtttaaaaacaatttccaaatttcataattgg

SEQ ID NO: 267977 - DNA, 475 bp, Homo sapiens
gagtgtagtttctctcgccaatgtctgaggagccctccacatactaaagagcaaaaatactaaatactactccacatgctaaagcgcaaaatccccacacatctgacagataccctcctatcaaaacttctctatggccaataagttaagtggtcataattccattatgactactggaatttttaagttaattttgctaaatcggcttttataatcttttaagcagtttaaagcctttaagagaaactgatatatgaagttataaaacatttaagttttcaatccatgtttaaatatttggagaaatttatgttcraaattttttagtttattaattgtgtaagtggatgaaaatatttccaaaattattgtttaaagattgcaaagatggtacatccctctaacatgtttcaagctatacccccataaaagcacaataatgtgtttaaaaacaatttccaaatttcataattgg

SEQ ID NO: 267978 - DNA, 595 bp, Homo sapiens
tcaaacttaaatttttgactgacaacatgaatgcatcagaatttttcttatatcattgaaatttctccttcaataattatactgtatgaatatacagatacatcaactatcagttaaatgtgtctttatcagctaagaaatattttcagattatgtctgctataattggattaatacattcccatttcagtataatgtgtttataagtttatactaagtttatttaaaaaaatagtatggcaagcctttccttcctaacagaccatatagatgctgcttctgattctgagagttgcttctgctcccamataatgaatgtaaaaggaagtggttacatagatttatggtgtgatttcatggcattatggtgaatactcataactgcaggaccttgtagaaaacaaaacctgatatttaactcaagtagtctggaccctatcctctgtgggaaaacatatatttccttgtagcttaaggccatcttagaagaatagatatacatgacatgaaagttttaacattttgtgagtgtgtgtggagaatttatcttttctagtcattcttggcatcatttttcacaatggaaaagcactat

SEQ ID NO: 267979 - DNA, 548 bp, Homo sapiens
tgacaacttccggagtgtcttatatacttgagaggatcagacctactgtattggattacacttagcaggccccagtacagcctttgaaactccatctttttttctgatagtgtgacctattaaagtctcctgatggcgtaagtgcatcagctgtgtgtatgcacaaagtagataacattgcaaataagagtgctatgctatctggctttatcacatttagcatcccttttgaagttaaagaaaagattatcctgtaaatgcttggcaagccacagttaatcctcatcttcatgagggaacgtgaaaggacacccttaacactcagtatcggctcgtggttttgtgttatwaatgtgagggttgaatttgatgctacagtggtgaaacccatcatgtcactattttagatgatgctccaccagccataacaacaaggcatttattttttcataaaatgtctgcattggtcttttttatatcaaatccaataaagatttcagtgttgtttcagctttcagaaactaggaacttaaaaaccatagtttatg

SEQ ID NO: 267980 - DNA, 545 bp, Homo sapiens
tcctctttgtgattgttgacagtctcctctgatttaaaattcttttaaaaagagtaccrattcctgactcctggaagcagcacattttcacagatgacattgtctacttgggtgatagcacaattgtttgtcttcctcacaataaaaaggatggaaataaaatgaactggtaacacagagcttcacagatattattatctgtgataatacactggtcttgggaagcaggcagtttaatgaacaactcttttgatttcacaaggccagtttgacccaaaagaaaactgaaaatcaggtaggacaaaaattccctctgtcactccaaggcttcagttttaatctctctttcctcaacttttcttcccctttactccttttgtttcttagaagccaataatatcttatcctggtttcttctgtcttactctgatttcttttatcatgaagtttataactcattaagactgaagtgttaagaacatactttgtggtctctcctgagattatctgattgctaaacagaataccagcaaaaagcaatgggg

SEQ ID NO: 267981 - DNA, 680 bp, Homo sapiens
aattttgtcaactacttactcacagcatcaaccgatacattttctcaacactgctatttccctaacacatagtcatacaggtaartaatatctctcaatctctatctgtatccctattatctctatatccatctaccttctacttccaggagcccaggacattactatctgccaagaaccaaagatacaaaattaggttactctagaaaatatgctcctctgatgagaataataaaagtatcaggattgtttttctctttgcagctcttctgccttctcctcatccttctttcagagtggtgcaatgctattagatttgcattctttttgagaggcacatcgtaccataaagagcttagtatgagagaagaacctagggaaaaaccattatggctgtacgctctattctgtctctcatcctgactttgaagaaacaagtagaagaagttcctgaagttttagctctttaaagggatcctcaaaacaagagagtccagaaggaatgcagaacattgctggaatgcaaaactgtgcatctacatgtagcaagtcctcaggaaaccaattatgccaacaggagagtatattgaacagatctgattgaatctgcaaaatgaaagtctaatgatcttgtaaatccttgctgaatacacttcttgcttccaaatactcactagcac

SEQ ID NO: 267982 - DNA, 680 bp, Homo sapiens
aattttgtcaactacttactcacagcatcaaccgatacattttctcaacactgctatttccctaacacatagtcatacaggtaagtaatatctctcaatctctatctgtatccctattatctctatatccatctaccttctacttccaggagcccaggacattactatctgccaagaaccaaagatacaaaattaggttactctagaaaatatgctcctctgatgagaataataaaagtatcaggattgtttttctctttgcagctcttctgccttctcctcatccttctttcagagtggtgcaatgctattagatttgcattctttttgagaggcacatcgtaccataaagagcttagtatgagagaagaacctagggaaaaaccattrtggctgtacgctctattctgtctctcatcctgactttgaagaaacaagtagaagaagttcctgaagttttagctctttaaagggatcctcaaaacaagagagtccagaaggaatgcagaacattgctggaatgcaaaactgtgcatctacatgtagcaagtcctcaggaaaccaattatgccaacaggagagtatattgaacagatctgattgaatctgcaaaatgaaagtctaatgatcttgtaaatccttgctgaatacacttcttgcttccaaatactcactagcac

SEQ ID NO: 267983 - DNA, 680 bp, Homo sapiens
aattttgtcaactacttactcacagcatcaaccgatacattttctcaacactgctatttccctaacacatagtcatacaggtaagtaatatctctcaatctctatctgtatccctattatctctatatccatctaccttctacttccaggagcccaggacattactatctgccaagaaccaaagatacaaaattaggttactctagaaaatatgctcctctgatgagaataataaaagtatcaggattgtttttctctttgcagctcttctgccttctcctcatccttctttcagagtggtgcaatgctattagatttgcattctttttgagaggcacatcgtaccataaagagcttagtatgagagaagaacctagggaaaaaccattatggctgtaygctctattctgtctctcatcctgactttgaagaaacaagtagaagaagttcctgaagttttagctctttaaagggatcctcaaaacaagagagtccagaaggaatgcagaacattgctggaatgcaaaactgtgcatctacatgtagcaagtcctcaggaaaccaattatgccaacaggagagtatattgaacagatctgattgaatctgcaaaatgaaagtctaatgatcttgtaaatccttgctgaatacacttcttgcttccaaatactcactagcac

SEQ ID NO: 267984 - DNA, 680 bp, Homo sapiens
aattttgtcaactacttactcacagcatcaaccgatacattttctcaacactgctatttccctaacacatagtcatacaggtaagtaatatctctcaatctctatctgtatccctattatctctatatccatctaccttctacttccaggagcccaggacattactatctgccaagaaccaaagatacaaaattaggttactctagaaaatatgctcctctgatgagaataataaaagtatcaggattgtttttctctttgcagctcttctgccttctcctcatccttctttcagagtggtgcaatgctattagatttgcattctttttgagaggcacatcgtaccataaagagcttagtatgagagaagaacctagggaaaaaccattatggctgtacgctctattctgtctctcatcctgactttgaagaaacaagtagaagaagttcctgaagttttagctctttaaagggatcctcaaaacaagagagtccagaaggaatgcagaacattgctggaatgmaaaactgtgcatctacatgtagcaagtcctcaggaaaccaattatgccaacaggagagtatattgaacagatctgattgaatctgcaaaatgaaagtctaatgatcttgtaaatccttgctgaatacacttcttgcttccaaatactcactagcac

SEQ ID NO: 267985 - DNA, 463 bp, Homo sapiens
taattcctattaggtgcataaaaaacagaactgttaaaatatgtaaatatacacagtacatatatatgtatgtatacttatataatgataggaatatatttatattttaaaatatatacataaatttatgtgcgtatatttgtacatatttaataattcatttgtaaatattttcattggtagaaaagttatccagaaaagaaagagattaattatsacaaagatcaggatatcagttgtctcttgggtaaaggtaggaggatgtaaatgctgatgcatgcgggggcttctgcatactcttagtaatttttttttcttacctggttgttctttgaaagttgtttgatttattattaatattgttcctctgtgtgcatatatgtatgtaaaaagaaaattttaaatatgtgtaggaaatatgtattttttaatagagaaaataataattgagcaagaaaaagca

SEQ ID NO: 267986 - DNA, 463 bp, Homo sapiens
taattcctattaggtgcataaaaaacagaactgttaaaatatgtaaatatacacagtacatatatatgtatgtatacttatataatgataggaatatatttatattttaaaatatatacataaatttatgtgcgtatatttgtacatatttaataattcatttgtaaatattttcattggtagaaaagttatccagaaaagaaagagattaattatgacaaagatcaggatatcagttgtctcttgggtaaaggtaggaggatgyaaatgctgatgcatgcgggggcttctgcatactcttagtaatttttttttcttacctggttgttctttgaaagttgtttgatttattattaatattgttcctctgtgtgcatatatgtatgtaaaaagaaaattttaaatatgtgtaggaaatatgtattttttaatagagaaaataataattgagcaagaaaaagca

SEQ ID NO: 267987 - DNA, 493 bp, Homo sapiens
tggtatgtttcacctcaccaaaacaaacaaacaaacaaaagcatgaaataaacacacacacacacatatatatatatatacacacacatacacacatatatatttctattacttcccagattctgttagttttgattagcacttcaaaacactttatatttgacatatccggtaaggatggagtcagagggagaattttaaatatagaatgtrgtttaattgcataaccctgagcacacctgtaagaaataatgagggaagcaaattgaaaactgctgagcatgggctgaattcagagaagtgtgggttttatggagccctgtaattttcaagcacttccactgatggcctacaaatgtactgagtgtaagagtgaaagggctttgactgtatttcagtaagttgatagatgggcttaaaggaataaaaatgcatcccacagatgagttgcgcctttaaaaaggagcagaataagagccaggacacaaaagaa

SEQ ID NO: 267988 - DNA, 584 bp, Homo sapiens
aacaccttaagacttaggactgccccccaatttcagtaccttatggccccctactggctcagtgtactggctcagaggactgaaaacatcagaatcataaaatttgagatagaaatttaaatgaatattgatctagtatcttgctgtcaaaagactttatgagtataaaagctatggaagtataacaggaggagatgcaaaatacctgaytagattagaaatgttgaatttctttatgacacaaacatctgaaactcattttttctggcctctgaagcaattatcactaatttccattttgtaaattaaaagaaaacaataaaatggaaaaacatttatgacaaatatgacaaaaagtttatattctaaaaatgcgaaactaaaacaggaaaacaatttttccttcttaaatcagcaagatatttaaaataattattctcaatgtagtaaagaggcatcaagacagccaccctcaacacactgctattgaaagcactttctagaaagcagtccagcattacacatcaacagccttacagataatcctatcacttgacagccattctatttctaagtaaataact

SEQ ID NO: 267989 - DNA, 559 bp, Homo sapiens
ggcaactgatttgctttatggacattactaaaatgttgaggcttctcctttgcattagctactagaaaacggaaaggcaaatctgcaacacatcctcagcaggctgttggactttatagaggtatagaagtctttcttatattagccttacttgtggctctatttcatatactaaactttgctttcctcttcctcatcctgctcatccccttctgatatatataaccttcttctattctgtatcttttttctaattgtccccaaaatatttttgaaaaaaaagagaagttccaatgaaatataccatgtgtatgtattgatacacatacatgaatacaatgcgcacgtgggcacacacatgaactaaaagcactccaccttccatgcgtatgtattgatacacatacatgaacacaatgcgcacgtgggcacacacrtgaactaaaagcactccactttccacgcgtatgtattgatacacatacatgaatacaatgtgcacgtgggcacacacgtgaactaaaagcacgccaccttccatgcgtatgtattgatacac

SEQ ID NO: 267990 - DNA, 528 bp, Homo sapiens
  misc_feature (1)...(528): n = A,T,C or G
accttgctaaatcttgtctatattgattcaaccaacttattttatttttattgcatttaaagctgaaggattacttctgtaatccttaaatgtaattcataaatgacatctattcttcacaaagaaatagtacatgttttattgaacacctactgtaggaaaggtaggggattaaggctttgcacaaagaatacaaagatgtataagaactctaattgatcttaaaatattaaggaaatagatggtcaaggttacatgataaacatatgtcaaactaaatgatatcaagataakaactgaatagtacaagaaacaacagaagaactgtcacaagaaaaaactcttgataaattgcttaatgagggttacatgattataaatgttttgaggtctgaaaggagaagacttgggagttacagtaatcattgattattccatggagatgatgacatgctttaggccttcaaggacctctgattcccttataggtgaaaagaagaaaaggatgtggggacatgnnnnnnnnnn

SEQ ID NO: 267991 - DNA, 612 bp, Homo sapiens
tgtgaaatgtaaagtggagtgtataaccttatctttatttctctctgaaaacagagaaacgtttgcattttgacactgaaagtttgctgggaactgatacaggtagctgttagaagagctgagagaagaaccaaggcaccaaattgctccttgctttgcaacgcaacattcattcattcaacaaacaagtccctactatgtgccagtggttgtgggacaggtgactaaagcacaggtgactaaagggaaagcgactaaagcacacttgtgacagtgattggagctgaggaggaggtaaatagagcaatgccacagagcaggagcagtgaaactcagaggtctacagtcaggcaggtgacctatgtgaaaaggtgccagggaggcctcatakaaagaagcctgctgtttatctaatgcacagaaaacattttaaaagaaaaagttttagcttgggcaacatggtgagacagtggctctacaaaaaatacacaaattagcctggtgcggtggcacatacctgtagtcccagctactcgggaggctgcggtgggaggatcacctgagcccaggaggcagaggttgcagtgagccatgactgcaccattgcactcc

SEQ ID NO: 267992 - DNA, 612 bp, Homo sapiens
tgtgaaatgtaaagtggagtgtataaccttatctttatttctctctgaaaacagagaaacgtttgcattttgacactgaaagtttgctgggaactgatacaggtagctgttagaagagctgagagaagaaccaaggcaccaaattgctccttgctttgcaacgcaacattcattcattcaacaaacaagtccctactatgtgccagtggttgtgggacaggtgactaaagcacaggtgactaaagggaaagcgactaaagcacacttgtgacagtgattggagctgaggaggaggtaaatagagcaatgccacagagcaggagcagtgaaactcagaggtctacagtcaggcaggtgacctatgtgaaaaggtgccagggaggcctcatataargaagcctgctgtttatctaatgcacagaaaacattttaaaagaaaaagttttagcttgggcaacatggtgagacagtggctctacaaaaaatacacaaattagcctggtgcggtggcacatacctgtagtcccagctactcgggaggctgcggtgggaggatcacctgagcccaggaggcagaggttgcagtgagccatgactgcaccattgcactcc

SEQ ID NO: 267993 - DNA, 636 bp, Homo sapiens
caagcgtagtgggggcagcaggcagggagggacaggaacagggatattaatgtttctgaagtggatctgatttgatacgtcttgttccattgtcagcatctgtttagcagggatttgtaatactttgtggctctggatcactcatgcttagcgcaggatgtggccttgcataccaattttgttattaaacacagtcctcgcctcccccacagcccatccatcacctcccaccccagcccccgcctgctctgagccgcccaccatatttcagggcccagctcccgcctgcctgccgcgcccgatgccggagggcctggggctgacaaattgaatcagggggagatcattcctggcctaacacagtttgcagcatgttggagggagaattgacaagagccctgtcagctccatcaccccaatcccacaggagctaagagygggctgggaacagggggtggagagaagggggtctccaggacaggcagaatcttcagggctgatacgaggagtcaggtaaagcccctttcttcagatccactgggaaatctaccatgcctagtgtctgtgtctccctcccaggggccagcactagcccttggcccaagagagaggctgagccactcagcccatgagaga

SEQ ID NO: 267994 - DNA, 561 bp, Homo sapiens
ctaatttggatttcctttatttctttctcttatctgattgctttagctgggacttccagtactatgttgaatagcaatggtgaaagtggtcatccttgtcgtattccagatcttggaggaaaggctttcagtttttcccccttcagcatgttaatagctgtggatctgtaatatatggcttttattatgttgaggatgtttgtggctgttttctcacaccttccccctttccccaattatttgaagttataaattatacttctactttgtctagtgttttatcttaaaacttagcccatatatttaactattattttctctcaatgtctaagtkttggaaagtttcatatcttcctcctaaagaaaacaataacttttcctaagccttcttcttttaccattttcaccatttccatattgtatcctataaattgtttttcctgttttgctattcatattttttgtaatccatctttacttggaattaacaatacatgttactgctttctttgtgaagaacagcaaaaacggaagtatttaaacatatctaccttacataat

SEQ ID NO: 267995 - DNA, 602 bp, Homo sapiens
aggaggattgtcaaaaccacactgttaagtagagcatgtaggatgggatgtattctttgacgattcttggaaaatagagtctgccatattcccaaatgactgagatgtccagtatgggacaggcgtgcggagaggcctgtatgggagaggtccagtatgggagaggcgtgtggagctagcgttgttcaaaattttatagacttcacagtgtgtcagttctctcaggcttctacaacaaaacaccagaaacggggtggcttataagcaagggaaatttatttctcacagttctggagcctgagaagtttaagatcaaggtgccagcaaatgtggtgtctgacgaggccccacttccctcttcctggacctgtctttttgcttctctgctggaaggagtragggagctccctcaggtctcttttgaaggccattaatcccattcatgagggctctgcccccatgacctaatcatcccccgaagaccccacctcttcatatgattaccttgaagattagggcttcaacatatgaattttgggggacacagacacttagaccatagcacagtgtgtacagagagattcattttgcctcaatttgca

SEQ ID NO: 267996 - DNA, 592 bp, Homo sapiens
atggtagttcacctgagtgaagtggtagatcacccaagtgatctctacggatgaggatcaagtggctagactggcagttgctcaagggcagggaccatgtcctcgtcgacctggtggtcccagggcccattatggagcatgtcacacagtgggacacaattatttcatttattaaacaaatgtttcttaagaagcttgcaaactagtgggagagcaggcaataaaaagcacagtgatccctttgatatactgatttcttccctttggataaatacccactagtgggattgttgaattgcaaggtagttctattttcagttttttgagaatctccatatcgttttccataacgtctrtactaatttacattcccaccaacagtgtataagagttcccttttcttcgcattcttgccagcatctgttactttttgtctttttaataatagccattctaactgggtaagatggtatctcattgtggttttggtttgcatttccctggtgattagtgatgctcagcattttttcatgtacctgttggccatttgtatgtcttattttgagaaatgtctgttcatgtcctttgccca

SEQ ID NO: 267997 - DNA, 636 bp, Homo sapiens
tgtaaagaaggtttagcaagtccataactaatgtttctgttttctttcttgtataagcacaagaatgatataaagataataatctctatttaaataagcctaaaagagctctttcaataagtagtaaatcaacctaagtggtttgaaatgctgtgttatatttgagtacggagcctatgttttttcttttttcatggtatataaaatagagaggtccagrcacagtggctcacatctgtaataccaacactttgggaagctgagtcaggaggatcacttgaacccgggaggtcaaagctgcagtgagccatgatttctccacttcactccagcctgggtgacagagtgagaccttgtctcaaaacaataaaaataaaaaataaagggcacctttctattgatgagatgaaacaaacacaaataggactgcctacatcatgattattttctccctactgacttgggaagtgacttttgtcctggaatccctttgtaatgaagccctcgtgggatggcagcaagctgtcctcacactgctttggtgtgccggctgccctcgggccttgtacaggagcgatgctacttccccagccccagcttggcgctctctcggctgtttccatttcttccaagcat

SEQ ID NO: 267998 - DNA, 528 bp, Homo sapiens
  misc_feature (1)...(528): n = A,T,C or G
accttgctaaatcttgtctatattgattcaaccaactyattttatttttattgcatttaaagctgaaggattacttctgtaatccttaaatgtaattcataaatgacatctattcttcacaaagaaatagtacatgttttattgaacacctactgtaggaaaggtaggggattaaggctttgcacaaagaatacaaagatgtataagaactctaattgatcttaaaatattaaggaaatagatggtcaaggttacatgataaacatatgtcaaactaaatgatatcaagataataactgaatagtacaagaaacaacagaagaactgtcacaagaaaaaactcttgataaattgcttaatgagggttacatgattataaatgttttgaggtctgaaaggagaagacttgggagttacagtaatcattgattattccatggagatgatgacatgctttaggccttcaaggacctctgattcccttataggtgaaaagaagaaaaggatgtggggacatgnnnnnnnnnn

SEQ ID NO: 267999 - DNA, 528 bp, Homo sapiens
  misc_feature (1)...(528): n = A,T,C or G
accttgctaaatcttgtctatattgattcaaccaacttattttatttttattgcatttaaagctgaagrattacttctgtaatccttaaatgtaattcataaatgacatctattcttcacaaagaaatagtacatgttttattgaacacctactgtaggaaaggtaggggattaaggctttgcacaaagaatacaaagatgtataagaactctaattgatcttaaaatattaaggaaatagatggtcaaggttacatgataaacatatgtcaaactaaatgatatcaagataataactgaatagtacaagaaacaacagaagaactgtcacaagaaaaaactcttgataaattgcttaatgagggttacatgattataaatgttttgaggtctgaaaggagaagacttgggagttacagtaatcattgattattccatggagatgatgacatgctttaggccttcaaggacctctgattcccttataggtgaaaagaagaaaaggatgtggggacatgnnnnnnnnnn

SEQ ID NO: 268000 - DNA, 559 bp, Homo sapiens
aaatggtttctagtaaacaaactagtttctagttgaggaatttcaagagagaccttggatgtgaggtcagtgcttattgctaatgtgtccatatttgcttacctccatatatatgtcctacaggggattcaactcagcagaccctgaacagaacttgctctcttttgttccactatggactcttccattttgtctcttctatcatatattccagatttccttgccccacttagctgccatatgcagcttccagcttttgaataaggtctgcagattctgtcccattttcactctgatagccatctcttcctctccactcctgttacacttttgtagttttcatcttcatcatctcttaccagtataygactatgtcacttggtctccctgcctttggtattgccctctctccaatccatcttccacactgttgtcaggcatttagctttgaaacattaaaataaattgcatcaaatcaaatcaatcaaatcatgttattctttcccctcaaatctcccttttatccgggatcatgtccaaacttcatcttattactctg

SEQ ID NO: 268001 - DNA, 577 bp, Homo sapiens
gcccaataccctgtgcagccttgggacactgctccctgcatcccagctgctccagctccagatgtggttcaaaagggtccaggtacagcttgggccactgctgcagaggtgcaagcataagcctttgcaatttccatgtggcattaagccagcaagtgcacagcatgcaagagctgaggcttggtagcctcyatctagatttcagaggatgtatggaaaagcgtggatatccaggcagaagcctgttgaaggggtggagcctgcatggaaaacttctactagggcagtgcagagggaaaacgtagggttggagctcccactgaggcactgcctagtggagctgtgagaagagggccaccatcctccagactctgaaattgtagagccattgatggtttgcactgtgcaccaggaaaaactacagggattcaatgccagcccatgaaagcagccttgggagcccaaccctgcaaaaccacaggtttggagctgcccaaggccttgggagcccatttcttgcatcattgtgccctggatgtgggacatggagacaaaggagattattttggagctttaa

SEQ ID NO: 268002 - DNA, 610 bp, Homo sapiens
tggatggaggcatttctgtgacagccagaagactggctggatgtcagaccaggttcatgctgggccttaacatgtttatagctgccgtgacttaaatgatataccaccagatggtctatcagatcttaaggggaactgaacgaggaatatcagagttaatcaactgtgtacagggcttaggagtttttttagttgtttaccattgtgtaggactgtataatagtatagcttatgatacagaaaaatggaagaaagggaggaattagataaataaagctagagtgaaacgtttattcatttattgaacatttaattggtatttattgagcatcaactattggctgagttttgtattacatcctggggacatagtactgtgatgaataaggcagattacaatatctgaaccaaagtattcatggggttcacaatccagagagtgagataaacttaaataataaaattaaataataaagacacaaataattcagtaattataactgtaaaaaagggctatgaaagagaagaacagggtattatgaaaacataaaacaggaaggactgatctaatstgggacaggtagggtaggttggagatgacattcctaag

SEQ ID NO: 268003 - DNA, 615 bp, Homo sapiens
gagggcttataaaattgcttcccttccagggtgtaggcttggccatgtaaagtggataacattttacatcaataaattgaaggaaaagacattgccccatataacgccggcacatagtagggctcaaggggaggaagaatctagagcagtggttctcagccttggctgcatggtggaagcaccaggggtacttgaaaaaataattccctggttcgcttccctagaaattctgatgtaattggtcttaggtgtggtctgagtgttgacatttttaaaagcccaccaggtgattctgttgtaaagccaaggtttcgaaacacatgctaaaaaaaaaaaaaaaaaaaaggaaagaaaaaaaaagaaccacaccctggtttaragggaaactctgggttcttctctactattttccttctgatctttacagggatgccatatcatctttaactcagccatgggcttggagggtcaagagctgattgtttgcgatagaaattttatattattctagatgtggtctactacatgttacaaagttgagtgtgtgtgccatatgcatgtgcacacatatgtgtgataaatttcttgtgagccctttgaagctccatgtcctta

SEQ ID NO: 268004 - DNA, 570 bp, Homo sapiens
gtgaagtgaccagctcttacatatcagccttccagactacatatttcaaatttgcaccacaaggaataaataaatgactgcctatagtgaaccccataagggtggaccattcaaagtttcttgctgtgagcaacttaaataaaaaagtgatgtgttgaaaggacactggagacatacagaatccttggcgggaggctggagaacaagatttagacagtgacaggcaaaaagtgggcctgggcagccagaccacagccaagatcaatgtcacagttgtcccattcagacactgaatgcctctgccggtgggcattgaactccactggtccaccatggtgggcaccgtgaccatgactgccccacagactggttggtgttgccacttttgctgccactaacagatggacaatccatgattcccccttctttgcctaattagcttctaattctaagccccagatgtgtgcatctgatgggccaagcctactctgggtgcrtaggctctagtagcaagcaaagctggaagagtgaatatcagcacttttcagcttctacagaagaaagtggttt

SEQ ID NO: 268005 - DNA, 561 bp, Homo sapiens
ctctgaccggagtgtccccctggtgctgcacatctttgtgtcctacaactgcttttyttggcaagttacatctagatctacgggaaaggtgagaaggggtcttcaggaaacccagcactacctgccagaggccacagaagcagctgggtgggcaaaaactccgtcagtcatttttatgcaaaacctctgtcagtcatttttattctcacacaactcacatatgggcacctgggggtctagctaaccagaacatcagttgaactaggttattttgtgtgtgtgaaacagtaaccaattagatcatttccatttactttttgctttctggtttagctggtgatagtatgtcaaaggcattacttgctagtggtgagaatcttcttctccggagcctgacttcctgggtttggctccaggctcaccatgcgccagctgcaagacttcagtcaaatcacttaaccttcatcctgccaagcctcagttccttcatctgtaaagtggggattagggtggtatctacctcccaggttggttgtgagaattacacatgaaatatatatg

SEQ ID NO: 268006 - DNA, 624 bp, Homo sapiens
ccttgcctgtttactgctgcctaatacaacacgttctttatctctttttggctctgccccaaagaaagcagggaggcttgttgctgcttggattccagtttctgtctccagtctggtcttgtggggtttaggggctggaaatggggaagagctagagcacagcatttaggattgagttttatactattcggtactccaattatgaaaacaacgatgatgatgcttctgacctgccctgttgggctgtttcttccccatccttttggtgagtagctgtgctgtgtcattctcatgctcccctgtccttctggtgatgacgaggcccatgttggaacctacagaagtgagaagtgaagactgtgaccctggagggtgttgcactgggaaaactagctggtatattgggaatgtgagctatgagtttatctgaattttaaccatgttctcactaacttatctggtcctgagggtcaccaagctaacaggctgggtcaaccatcagcagagccagcttcctgagcatgtgatctaygaagtcacacaggctctgcacttaaaaataaaaagccctccccctggtttaagttctgctaccatcatctggaaatttcttaagacctttta

SEQ ID NO: 268007 - DNA, 624 bp, Homo sapiens
ccttgcctgtttactgctgcctaatacaacacgttctttatctctttttggctctgccccaaagaaagcagggaggcttgttgctgcttggattccagtttctgtctccagtctggtcttgtggggtttaggggctggaaatggggaagagctagagcacagcatttaggattgagttttatactattcggtactccaattatgaaaacaacgatgatgatgcttctgacctgccctgttgggctgtttcttccccatccttttggtgagtagctgtgctgtgtcattctcatgctcccctgtccttctggtgatgacgaggcccatgttggaacctacagaagtgagaagtgaagactgtgaccctggagggtgttgcactgggaaaactagctggtatattgggaatgtgagctatgagtttatctgaattttaaccatgttctcactaacttatctggtcctgagggtcaccaagctaacaggctgggtcaaccatcagcagagccagcttcctgagcatgtgatctacgaagtcacacaggctctgcacttaaaaataaaaagycctccccctggtttaagttctgctaccatcatctggaaatttcttaagacctttta

SEQ ID NO: 268008 - DNA, 624 bp, Homo sapiens
ccttgcctgtttactgctgcctaatacaacacgttctttatctctttttggctctgccccaaagaaagcagggaggcttgttgctgcttggattccagtttctgtctccagtctggtcttgtggggtttaggggctggaaatggggaagagctagagcacagcatttaggattgagttttatactattcggtactccaattatgaaaacaacgatgatgatgcttctgacctgccctgttgggctgtttcttccccatccttttggtgagtagctgtgctgtgtcattctcatgctcccctgtccttctggtgatgacgaggcccatgttggaacctacagaagtgagaagtgaagactgtgaccctggagggtgttgcactgggaaaactagctggtatattgggaatgtgagctatgagtttatctgaattttaaccatgttctcactaacttatctggtcctgagggtcaccaagctaacaggctgggtcaaccatcagcagagccagcttcctgagcatgtgatctacgaagtcacacaggctctgcacttaaaaataaaaagccctcccccyggtttaagttctgctaccatcatctggaaatttcttaagacctttta

SEQ ID NO: 268009 - DNA, 417 bp, Homo sapiens
tgaggcccatctgtagcatttggtgtgaatgtcgcgaatgaaggctcatacagaaggtcaatcctaggatttaagtctctactgattagcctactttttaaaaaaattcttcagcgaagatagcagaagagatgacttatatagatgttacactcagccacaactgagagcagaactagtctagaatatcacaggtccagggcaaagraccaacaggagttgttttggtgtgagcagggtgggtcttacagaagtggtcttggtgatcagttggtgatggaagttctagatccattgagagacaagttccagacagtggcacgcagtccaacaacttctaccagaatccccagcctccggcattccatgtttctgctcctgtggcctccacggtgcacatgctagcagtttacctgg

SEQ ID NO: 268010 - DNA, 279 bp, Homo sapiens
aatctcattttctacaaaccatcttcattttgytgttatttcctttgggatccatttctcatacttagtgtggagtaggcctgtaagaaactaccagctccgggagacagaatgatagaattgtggcttgcttcctttctgtcagacttcctcagtatcttctcacttatttgaagtttatgtgaaaaagccagtgacatttttcctaaagctaagaggaggcagtaagtgtaactgtggactaaaaaaatattggtaattgaaagaacatgaagaaaa

SEQ ID NO: 268011 - DNA, 279 bp, Homo sapiens
aatctcattttctacaaaccatcttcattttgttgttatttcctttgggatccatttctcatacttagtgtggagtagscctgtaagaaactaccagctccgggagacagaatgatagaattgtggcttgcttcctttctgtcagacttcctcagtatcttctcacttatttgaagtttatgtgaaaaagccagtgacatttttcctaaagctaagaggaggcagtaagtgtaactgtggactaaaaaaatattggtaattgaaagaacatgaagaaaa

SEQ ID NO: 268012 - DNA, 279 bp, Homo sapiens
aatctcattttctacaaaccatcttcattttgttgttatttcctttgggatccatttctcatacttagtgtggagtaggcctgtaagaaactaccagctccgggagacagaatgatagaattgtggcttgcttcctttctgtcagacttcctcartatcttctcacttatttgaagtttatgtgaaaaagccagtgacatttttcctaaagctaagaggaggcagtaagtgtaactgtggactaaaaaaatattggtaattgaaagaacatgaagaaaa

SEQ ID NO: 268013 - DNA, 616 bp, Homo sapiens
aaagccagtgacatttttcctaaagctaagaggaggcagtaagtgtaactgtggactaaaaaaatattggtaattgaaagaacatgaagaaaagtcccaaagactttttttttttttttttttttgagacagagtctcactctgttgccgaggctagagtgcagtggyacaatctccactcactgcaacctctgcctcccaggttgaagcaattctcctgcctcagcctcccaagtagctgtgattacaggcatgtgccaccatgcccagctaattttagtagagactggatttcaccatgttggccaaactggtctcgaactcctgacctcaggtgatctggctgccttgccagacttttattcaaatccttgtgacatgacttggttaagccaaaaccataattttggtttatcctctcaaacctgtaaagtaaggatgatcatagaaacctctttgagctgttaggagatcgtgtgtgggtctcaaataaatctgggccagcttcctcccatcctgtatagccagggcgtcacactcagaggaaacagaaatcaattccaaaatactttgaaaagtaatacgtatatattaagaagtctctttaagtggcaaa

SEQ ID NO: 268014 - DNA, 616 bp, Homo sapiens
aaagccagtgacatttttcctaaagctaagaggaggcagtaagtgtaactgtggactaaaaaaatattggtaattgaaagaacatgaagaaaagtcccaaagactttttttttttttttttttttgagacagagtctcactctgttgccgaggctagagtgcagtggtacartctccactcactgcaacctctgcctcccaggttgaagcaattctcctgcctcagcctcccaagtagctgtgattacaggcatgtgccaccatgcccagctaattttagtagagactggatttcaccatgttggccaaactggtctcgaactcctgacctcaggtgatctggctgccttgccagacttttattcaaatccttgtgacatgacttggttaagccaaaaccataattttggtttatcctctcaaacctgtaaagtaaggatgatcatagaaacctctttgagctgttaggagatcgtgtgtgggtctcaaataaatctgggccagcttcctcccatcctgtatagccagggcgtcacactcagaggaaacagaaatcaattccaaaatactttgaaaagtaatacgtatatattaagaagtctctttaagtggcaaa

SEQ ID NO: 268015 - DNA, 549 bp, Homo sapiens
caacagatagattgcaatgccacacacaaaaatgcagaattacaacctccctgacagatcaggcagaaagaactgtgtaccgtataaccagtgatggaaacaggatagttaatgaagaagccaaatctttccttttcaggmagaaaataaatcataattcctttttgcatcttttcttttctccctaggaaagacccctaggaaagacccctggtaggcactcaagaattatttgtagaatgaaggactgattggctattaccgcttccttttctaagtgcttgccagtcatgtgcttaataagcaatttgagaaattgtaactataattgttactgtttattgaatgctctccatctactgtgcactgtactaagtgctgtatatacatgagttcactgcaccttcacatccctataaaatggtcattttcatctgtttgcagatgaagaacctgagcccagagaggttaagtgatgtgctcagggtcagagctcacagctaggaagtggaggaacccaatttgctcctttgcagtatgtctggcact

SEQ ID NO: 268016 - DNA, 571 bp, Homo sapiens
gcaccctgtaaagtgcaagttctggaaccaatctgcatgcagataccagagtattctaccaattaccagggtgtgatcttgggtatgttactcatccattccttggctaagtggaaataataatagtacctgtcttacaagcatattgtgaggaatmaatgagttaatgcagataaagcacttagaacaatgtctgtcacatacgttaagtgtttaggaattatttgctatgattgatgctgctgctgctactaatatgactaacataactagagagatgccctggcaagagtctgagaagtcagtcatatctgtatggttgaaaaggtgtctgcacacaggtggtaatgagactgtatgtaatgacgcttctatggatattctttcattgaacaaatgcctatagatcaaccactggctctgtgctagctgttgaaaaacaaataagtcaaagctcttacactccaggagctaccgccctgaaagggaaagttaagtcagcgcacgctatcatacaattaagggacaaaatgatggattagaaaggaagttacaggaagttagaaaaggg

SEQ ID NO: 268017 - DNA, 423 bp, Homo sapiens
gggctcaaacgccagggaggtttcactgaaggtggaagatttgagggatgaggcatttttggtgcaaagatgaccctgaagaagaccagagaaggaacttagtacaggaatcattaggagttgtaaaccaaaaataaaattctaagctccctcagccaattgaatggatccctcctctccgaccaggggattaaaaagaaacctgattatgtaggtcatgccatgatgggaaggggtggtgggacaggctttattatattggccttcctttgaagtccaggcgcaaatgaccagcattaacattaaaacgaagttcctaagkctgccagaacagactctttgtagcaataagatgccagattccaacctgactctagtatagcatcatatgacagacagtaggcattgaaataaactgaagta

SEQ ID NO: 268018 - DNA, 548 bp, Homo sapiens
gttgatctacttatccacttatggccacattaattatacttcaaccccttgttttgttcatgtgtgccaggaaatgcaatgagtcaatatacttactgagattgcagaagagactgaacackgcgctaggctctgaagagaaagatgaaaaagaagaaaggtgtgatttaccttgataaagaatggtgacaattgtatagggtttttgttaaaaattaaatggcagaatacacgtacagcactaacatcatgtctaccaaataccaggcagttgataatgacaggagctggtgttattaaggaaaatgacatcatagaggagatagacacagatgttggtgtttgcataccaaccaaaaataatgtgcagcttgatactgtgaaaacgggtatgtaatatagttaggaaatggcatagaaaaagaccagccacatgtataccttgagaatttttgatttttgttgagggtgctgtgacaaatgtgaaggatactcatttaattcatttttaacttggaattcagagtgcaattttggctaggctcatt

SEQ ID NO: 268019 - DNA, 548 bp, Homo sapiens
gttgatctacttatccacttatggccacattaattatacttcaaccccttgttttgttcatgtgtgccaggaaatgcaatgagtcaatatacttactgagattgcagaagagactgaacacggcgctaggctctgaagagaaagatgaaaaagaagaaaggtgtgatttaccttgataaagaatggtgacaattgtatagggtttttgttaaaaattaaatgkcagaatacacgtacagcactaacatcatgtctaccaaataccaggcagttgataatgacaggagctggtgttattaaggaaaatgacatcatagaggagatagacacagatgttggtgtttgcataccaaccaaaaataatgtgcagcttgatactgtgaaaacgggtatgtaatatagttaggaaatggcatagaaaaagaccagccacatgtataccttgagaatttttgatttttgttgagggtgctgtgacaaatgtgaaggatactcatttaattcatttttaacttggaattcagagtgcaattttggctaggctcatt

SEQ ID NO: 268020 - DNA, 548 bp, Homo sapiens
ccaacaccaaatcaaaaactaataccaaataaaagcaaaaccatcccaagacaatcttactcgttctttgaataagtttaggacttgtctattcaattaaaatatctgatccaggtttcttatggctcactgctacattgcttagttccaagcatatcttataggaagaggcagayggattatcttttttttttaaatatgtgtaatgaacatgtaaaggatgatgataagactaaagaatgttacgtatgtgtggagtgagtgtacactggtgattttggtcttggctcatggattacatcttttatagcttaataggtaagcacatttggactaacaaaagaagacgctttagttttatagtagttgatgtaccatctttggctttctttcctaagggccagggcctgcataggacgactgcacagtgcaacttgcgcatataaatcacagcctgccacctgttatttaatagctagcactgctgactcaataacagtaagattctgtaaaattgttccctccagccctgggtgttccccatagag

SEQ ID NO: 268021 - DNA, 596 bp, Homo sapiens
cacctggtgtgcagaaattttgactacatgctttaagcagaattcaggggagcagtttccagattgctatgcctgaagttttactgtgcaaagggtaaatattcacaggtgccatggaattcaatacaaggtaaatgatcataatccattcggcttcaaatctctctgggtttactgtctctgatgaacctgacagaatcaagaatttgtgtgtattgcagacttaatctacattcagggttatctttctttgtgtctggctaaggcagatatctattttcaacagactctggccagcattccccattatttcttatagcagattctatttactgtcagtgacatttgaatgtaacatctagataggggctgcggaagtgtaatccacattatcctaatggcagtcctgaaattgcagaagaggagtgtgataagtgttacattacagagaggagagacaacaagtactgtgagtgacaccgacaggcattaaggcattcttcttcttagtgttccttcccaawaggggcggtcttgagtctttttggttttttgttttgagatagggccttgctctgtagcccaggctggagtgc

SEQ ID NO: 268022 - DNA, 635 bp, Homo sapiens
tgtcagggagatgcaatggctgaagaacaggtaggagagattttaagagtgagagggactccatctaccattactggctctaagatgcaggggccacaagccagtgaacataggtggcttctagaagctgagaatgactcccagctcacagccaataaagaaatggactttggcccttcaattgcatagaaataaattctgtcaaccacctgaatgaacaatgagatggattctcctctgcctccagaaaggaacatagtcttgttgattcctttatttcagccttgtaatacytaagcacagactacagtgcctactggaattctaacctacagaaactaggcaataatagatggcagttgttttaagccactaagtttgtgttatttttttacagcagcaatagaaaactaatacaggatggaaataaaaatttctttaaatacttggcctattttatttcctgacctttgttaaggaataaaattcccttgagggacagtcctgtgaaagaagaagaaaacaaaaaaaaatatattgataggaaataatgaccactaaaatgctttctttttttccacataaaaacctaagcagttattttcaactatcattaggagagtaatttactcttc

SEQ ID NO: 268023 - DNA, 599 bp, Homo sapiens
acctgaaaatacaaaattttacgagctaaatttctgtagaaataccttgatgggaaacaaaaatccttatctaatgtttcaatggcaaaaacagatgcttggctacttttgctaagtatctggaacattactgtcagcactcctgtcacttattaatagttttcaaatgatgtgagtatctgacaggaagaraaaaaagaacagtctgttttgaattccttttaaaataaactgtttcctttgagggtttctcttgggtaggtggtgtttaaagctgtccctgtggctccgatttacccactgcttctttgtcaaggaaattggttctttcatattaactgttaaatctgtcttaccactcagtttctatctgtttgaaaatagctttcattttcaaactttgccaatttactagagtcacgctcaaagttattaaccaagcacccacttgggccatgaattgagcttgcttgaaacaaagggtccctgccatctggtagtttatcctgtaaaattggaaatagtattgcataaaaatatattaaatgtagggaaaagcaaacagcaaagcaaatgcatttatgagatcaacaatgcag

SEQ ID NO: 268024 - DNA, 599 bp, Homo sapiens
acctgaaaatacaaaattttacgagctaaatttctgtagaaataccttgatgggaaacaaaaatccttatctaatgtttcaatggcaaaaacagatgcttggctacttttgctaagtatctggaacattactgtcagcactcctgtcacttattaatagttttcaaatgatgtgagtatctgacaggaagaaaaaaaagmacagtctgttttgaattccttttaaaataaactgtttcctttgagggtttctcttgggtaggtggtgtttaaagctgtccctgtggctccgatttacccactgcttctttgtcaaggaaattggttctttcatattaactgttaaatctgtcttaccactcagtttctatctgtttgaaaatagctttcattttcaaactttgccaatttactagagtcacgctcaaagttattaaccaagcacccacttgggccatgaattgagcttgcttgaaacaaagggtccctgccatctggtagtttatcctgtaaaattggaaatagtattgcataaaaatatattaaatgtagggaaaagcaaacagcaaagcaaatgcatttatgagatcaacaatgcag

SEQ ID NO: 268025 - DNA, 500 bp, Homo sapiens
gtttgatcttcattcagtctagatgattgaaagattctagtgaaggacagcaataatcaaaggctaaatgagaaatacacagcagaagataagcatagtttatggacaaggataaaaggacaaaacgtccatctgacatttattatagcaaaaccttaaaaatgtacacatggatgtttcatggagccctggatgagtcaatatttatattttctagagggccatcttcctgaacatctgtattagaaaacaggtcctgagaattctgtaataatgtcttaaacccaccmgaactttgtaaggtgaacttctgaaatagctttacttttctcacatcattagttttcaaacagtctcttttgagtttctctttcttgaacctggcaaaaccagaatatcttcttacttacttttattcaataacagtctcatcgtgaggtatgactcagaaaagtctgatataaattaaaacattgttttcatattcaatttaaagtcag

SEQ ID NO: 268026 - DNA, 547 bp, Homo sapiens
ttgttttcatattcaatttaaagtcaggtcattttaggcttaacttgggctaagaaacctaaaggagagaacggcagcatggtcagattctttactattaattggcctcttctgttccctctcctctacttacctattgtctccaactcaaccagtataaaagtaaaagtaaagaaatatcaatttcttacttgactgatgtgtcatgtgctaaaatgttcttttggtgtgtcagatgccaaaatactctttcttatctcttggggtgttttagggggtcatcagtgaccaccacctgctgtcctcctggagggcttttgactttactgtgttctgtggttgatccgcytctcaattggctactaactacctttgccttagctccagctgcttgcgggacatcctgtacaggctctttctgttgtggtcatccagccctggggaggaaaacctgtagccaggattgttgccagatgttttaagtttggctttttgagaggttctcactgcctaccagaaattgagatatttctgccttgagtagaag

SEQ ID NO: 268027 - DNA, 570 bp, Homo sapiens
aatgcatacaccagtggacattatatatatgtttggatatggtctttttatcagcagtatataggcaatgattaatgactaaattgcagcagaaatgcatggcaagtaagatggatgaaaaaattcatgaatttttctcttctttaatgacaaataatctttacttaaagataaagatgtttatacattttggttaattaagttgtctcratcatagaggtagtttgattgaatgttagtatactattttaaaaaataggagatctcaggcataaggacctactttaatgaaaaataattaggcttaagaatgcaagtgcaaatggaagcagattcacaatattattttaatattaaaaattgtttagctgcctaccaggtgcctgcactcattctacgactcacgatacattgcatatataatacaactctggccccatcctatgaactttaaagtcttatgtaatctggcctctgtctgcctctttgactttggctgttgacactctcccacttactgaccatgcctcagcctcacttggcttccttcagttctttgaacatttagag

SEQ ID NO: 268028 - DNA, 512 bp, Homo sapiens
ccaaatctaatgggattattgaaactaacagaagtaaatgacttggtagggtgactaaacttatctctaaataactagagtaagatttattacctgcaattagaagaaagggcttctaaatgtgaaagcaagatttcaggcctaaaatacatgacttttacagtagaagtttcttcacatttgtacttttaaacctgtttatttctagttataaggggggaaataactattaacaggtctaaaaagggctgaccatactgctcatgttcagtgtttgaactaccagtgttctacagcctgtagagttgtttgctcccaatttaacttctgtcagttcaaacagtgtttccattcattggctggtaygataatttctggggatttggatgccacgattgattaactcactgccaaacctttactaatacacaatctggactgggacaattgtttccctaagggttgcttctcagcattagttactgaatgcagggaaaaaaaaaacaaagtgg

SEQ ID NO: 268029 - DNA, 512 bp, Homo sapiens
ccaaatctaatgggattattgaaactaacagaagtaaatgacttggtagggtgactaaacttatctctaaataactagagtaagatttattacctgcaattagaagaaagggcttctaaatgtgaaagcaagatttcaggcctaaaatacatgacttttacagtagaagtttcttcacatttgtacttttaaacctgtttatttctagttataaggggggaaataactattaacaggtctaaaaagggctgaccatactgctcatgttcagtgtttgaactaccagtgttctacagcctgtagagttgtttgctcccaatttaacttctgtcagttcaaacagtgtttccattcattggctggtatgataatttctggggatttggatgccacgattgattaactcactgccaaacctttamtaatacacaatctggactgggacaattgtttccctaagggttgcttctcagcattagttactgaatgcagggaaaaaaaaaacaaagtgg

SEQ ID NO: 268030 - DNA, 620 bp, Homo sapiens
ccagggaactgagaagccactcatccacctggcccactactgccactactggaatccagataaggcacatggaggtcaaagaattgacctgcctgattcgttaacaccagtgtcagtgtacactactctggaatccaagggcagatacactaagcccactgctaccactactggggcccaaagactggcctaaaaggaatccctgtccccagaaaaacttcaccacagcccccawgaaaaaaccacattctaagcaactgagaaaatcacacgtaccactgatactgtttacagtgaagaaatcatacagagactgcattaccacacacaccaagaagtaaagccaaagtgccctacccaaccgacactacagatacatactcagaaaagtcatctcctatgaaagcaaattcaaaaaactggaaaaagagcttgttatatcagatgtgcagatatcaaaataagagcacaggaaacacgaaaaaaacaaggaaatatgacgcctctaaaagaacaaaataacttttcagaaacggatcccaatcaggaagaatatcatgaaatcttgtaaaaacaattccaagtattgattctgaagaagctcagactgaattctagat

SEQ ID NO: 268031 - DNA, 620 bp, Homo sapiens
ccagggaactgagaagccactcatccacctggcccactactgccactactggaatccagataaggcacatggaggtcaaagaattgacctgcctgattcgttaacaccagtgtcagtgtacactactctggaatccaagggcagatacactaagcccactgctaccactactggggcccaaagactggcctaaaaggaatccctgtccccagaaaaacttcaccacagcccccatgaaaaaaccacattctaagcaactgagaaaatcacaygtaccactgatactgtttacagtgaagaaatcatacagagactgcattaccacacacaccaagaagtaaagccaaagtgccctacccaaccgacactacagatacatactcagaaaagtcatctcctatgaaagcaaattcaaaaaactggaaaaagagcttgttatatcagatgtgcagatatcaaaataagagcacaggaaacacgaaaaaaacaaggaaatatgacgcctctaaaagaacaaaataacttttcagaaacggatcccaatcaggaagaatatcatgaaatcttgtaaaaacaattccaagtattgattctgaagaagctcagactgaattctagat

SEQ ID NO: 268032 - DNA, 620 bp, Homo sapiens
ccagggaactgagaagccactcatccacctggcccactactgccactactggaatccagataaggcacatggaggtcaaagaattgacctgcctgattcgttaacaccagtgtcagtgtacactactctggaatccaagggcagatacactaagcccactgctaccactactggggcccaaagactggcctaaaaggaatccctgtccccagaaaaacttcaccacagcccccatgaaaaaaccacattctaagcaactgagaaaatcacacgtaccactgatactgtttacagtgaagaaatcatacagagactgcattaccacacacaccaagaagtaaagccaaagtgccctacccaaccgacactacagatacatactcagaaaagtcatctcctatgaaagcaaattcaaaaaactggaaaaagagcttgttatatcagatgtgcagatatcaaaawaagagcacaggaaacacgaaaaaaacaaggaaatatgacgcctctaaaagaacaaaataacttttcagaaacggatcccaatcaggaagaatatcatgaaatcttgtaaaaacaattccaagtattgattctgaagaagctcagactgaattctagat

SEQ ID NO: 268033 - DNA, 620 bp, Homo sapiens
ccagggaactgagaagccactcatccacctggcccactactgccactactggaatccagataaggcacatggaggtcaaagaattgacctgcctgattcgttaacaccagtgtcagtgtacactactctggaatccaagggcagatacactaagcccactgctaccactactggggcccaaagactggcctaaaaggaatccctgtccccagaaaaacttcaccacagcccccatgaaaaaaccacattctaagcaactgagaaaatcacacgtaccactgatactgtttacagtgaagaaatcatacagagactgcattaccacacacaccaagaagtaaagccaaagtgccctacccaaccgacactacagatacatactcagaaaagtcatctcctatgaaagcaaattcaaaaaactggaaaaagagcttgttatatcagatgtgcagatatcaaaataagrgcacaggaaacacgaaaaaaacaaggaaatatgacgcctctaaaagaacaaaataacttttcagaaacggatcccaatcaggaagaatatcatgaaatcttgtaaaaacaattccaagtattgattctgaagaagctcagactgaattctagat

SEQ ID NO: 268034 - DNA, 252 bp, Homo sapiens
acagagcaatcttgagcaaaaagaacaaagctgaaaacattacactacttgrttttaaaatatataacaaacctatcgtaaccaaaactgcatgatatgatataaaaatagagatatagaccaatggagcagaattgagaacatacaaacaaatacatatatattatagcaaacttctctttgacaaagacatcaagaacatacagtagcaaaggataccatcttcaataaacggtgctgggaaaattagat

SEQ ID NO: 268035 - DNA, 564 bp, Homo sapiens
aatttttagcaacatttctggcttctagctactaaacgaaagtaccacccccttccatatagcaatcagcttattattgctccagctttctgcctggagagagtctctaggctgccgaggaggaaggagatcccaggcagagcccactggaattcatgagttgaggggatgcagctgagattcaatggaaaccacagtatttagagtttaccatacagatacatgggaaagaatacatgacacagcaggagaagacayagaaacctgggagttagttgtatcagtgaacacaatagattagagttctgaggaaaagccatacagcaaaccaagcagagagaagacagtgagcagggcgaaaccttggtcacttgagagcaaatcaaagatgtaggtcaaaaacccgtcaaagaaaggtccagaaacttatgaagatggaaacgtagggcaaagcgagaaagccagcatgtagacaagcagctggagcaggagacttaagacacaaactgcagaatactatgataataagatcactatctgaaactcagaaagagtcagatgatc

SEQ ID NO: 268036 - DNA, 564 bp, Homo sapiens
aatttttagcaacatttctggcttctagctactaaacgaaagtaccacccccttccatatagcaatcagcttattattgctccagctttctgcctggagagagtctctaggctgccgaggaggaaggagatcccaggcagagcccactggaattcatgagttgaggggatgcagctgagattcaatggaaaccacagtatttagagtttaccatacagatacatgggaaagaatacatgacacagcaggagaagacacagaaacctgggagttagttgtatcagtgaacacaatagattagagttctgaggaaaagccatacagcaaaccaagcagagagaagacagtgagcagggcgaaaccttggtcacttgagagcaaatcaaagatgtaggtcaaaaacccgtcaaagaaaggtccagaaacttatgaagatggaaacrtagggcaaagcgagaaagccagcatgtagacaagcagctggagcaggagacttaagacacaaactgcagaatactatgataataagatcactatctgaaactcagaaagagtcagatgatc

SEQ ID NO: 268037 - DNA, 563 bp, Homo sapiens
ctcgcaaaaaaaaccctgacaaatagagctggacaaggccatgaagggcgagttctcatgcataaatgcctgataacaaatactgtcgtaaaacactggaaaaattacaacactgcacacaggtcatcacagccttacacaaaaagcacttctgaaaggacatctgcccagcaactgcctgtccaaacttagaatgatgtaayccttgtcattgatgcttgtagtcaaggataattatctctagacagtaatgtaatcctcctcattcttcctttaaaaaactttgtcttcctttacctccctgaatacacacatatgctactatgacacacatattttcattgcaatgtcctattcttaaataaatatcattttcttttagatcatctctatttgttatttaggttgacataaattgtgtcaaaaacgggatcttaagaaaaatcactaaaaaaaaattgttgattcttgaaacttgtgtgaggtactcatttgaaacctttgagctctttgtttccacaactcaccttttctccccaggtgagtattctctcagactgagc

SEQ ID NO: 268038 - DNA, 579 bp, Homo sapiens
tctcatgtgaagtgttcttaccacaaaaaaacaaaaatgaaaacaaaggaacacaaggaaacgttaggaagtgttggatatgatacgtctatcattgcaaatttggtgatggtatcaggtgtttatatccaaattcatcaaattgcacatgttaaatgttgttctttgtatattgactgtacctcaataaaggtatcttttaaatcacaaaaaattaaaaattaagtcttatgtgacctaggattgactttgggattttcaagttggagtcctggagagcctcaagaatgtattcctcatcttgtggatacagtaaattatcaggcctagtttggtagattgtatgggaaacattgtcaaatgataaataagtctaggtattttttcagttacatttatgggttaatattgatataattgtttcaaaaattatgtaaattcataaaatctaatgttattagttataactttattatgttaaatcttctttaaagttacrttgtatggaaatattatgtgtctaatctaaagatgatataaaatttataaacatttgatgatctggttctccaactgtca

SEQ ID NO: 268039 - DNA, 550 bp, Homo sapiens
cctccttcacttacaaaatcatttatccccggataggaagatgtcagacaggtctccaattatagcattctctgcctatttagataccaaactaaatactaagctaaaacccaagattcaagcccctcagagtaaagcatcaacaaaaagtattaggttggtgaaaaagtaattgcagtttttgccattaaaaattaatggacgacaaaaactgcaattacttttgcacaaacgtatagtwttttttatactattgttacaggtttcaaatattttctagtattttctattgaggtttctgccattaaaagtaatggcaaaaaaaaattggaatttaagaaaagaaattaaaagtaatggcaactggaatttaaggaaagaaatggcaaaaacacaattacttttgcaccatcctatagttgaaaatttgttcacatggaaatcttatagctatttttacagcacaaggagatgatgttttttgtctcactaaggctactgggaacagccttcatatgtgtttcattatatgtgattagctttaaaatga

SEQ ID NO: 268040 - DNA, 574 bp, Homo sapiens
gatactaaaataattagaggctttaaaaatctatcatttttaatatgaattacttttctatttaaaagcaccaagctgattatgctatagtgaatctattagtctgaaagtgtacagtcaatggaaattgaatataagagaatatcaaatatatatcataagattgagaggttacatactcagtaattgatatggtttagccgtgtcctcaaccaaatctcatcttgaattcccatgtgttgtgggagagacctggtgggaggtaattgaatcatgggggcaggtctttcttatgttgctctcatgacaatgaataagtttcatgagatctgatggttttaaaaatgggagtttccctgcacaatctctctctttgcctgctgtcatccatgtaagatgtgacttgctcctccttgccttccgccatggttgcaaggcctccccagccatgtggaacagtaagtccattaaacctctcttccttttgtatactacccagtcatgggtatgtattaatcagtagcatgaaagtggactaataaattggtascagtagagtggggtgttgctgaaa

SEQ ID NO: 268041 - DNA, 569 bp, Homo sapiens
ggccacactggcatctaggggccatagactggcacactctcaggcagccctggaatctggtgagtctgttccacaactcccatggggcctgcagagcaagtgtctctcacaggcacagattaaagcaaaacatctcaactatgtcttggttttggctccacagatgacttctgtgtgggcraatcttcttaatgtgttctcttactttttattgtccatgctgtaaaacgttaaaaaaaaaaaaaaaaaagctaaaataaacttccagagttcaaaatggcagactgtgactagggccaatgtccttttccttccaatgttggtttgtctgccaagtgatctcatacttgcttggtgaggctctgcctcctcgactcctatcttctctttcctccacctccccattcccggccacatgaggttctcatcagcatcattgtggtcaaaggactaggccctggggtgcagtctgccctgactctctttggggcttggctgagggaatttacttgtatcctgctttagaagctgaattgcctacagaggattgggacccaacatgacatttt

SEQ ID NO: 268042 - DNA, 569 bp, Homo sapiens
ggccacactggcatctaggggccatagactggcacactctcaggcagccctggaatctggtgagtctgttccacaactcccatggggcctgcagagcaagtgtctctcacaggcacagattaaagcaaaacatctcaactatgtcttggttttggctccacagatgacttctgtgtgggcgaatcttcttaatgtgttctcttactttttattgtccatgctgtaaaacgttaaaaaaaaaaaaaaaaaagctaaaataaacttccagagttcaaaatggcagactgtgactagggccaatgtccttttccttccaatgttggtttgtctgccaagtgatctcatacttgcttggtgaggctctgcctcctcgactcctatcttctctttcctccacctccccattcccggccacatgaggttctcatcagcatcattgtggtcaaaggactrggccctggggtgcagtctgccctgactctctttggggcttggctgagggaatttacttgtatcctgctttagaagctgaattgcctacagaggattgggacccaacatgacatttt

SEQ ID NO: 268043 - DNA, 591 bp, Homo sapiens
atatattgtgcaaaccctttttatggtgggattaatccattcacaaagacagagctttcatggcctaaacgtctcccaaaaggccccacctcccaatgctgttccattggggattaagtttcaacatgagttttggaggggataaaaacattcaaactattgcacccttgaactacaggttatggaacttccaactacttcctccagagtcacaggaattttggggtaaattacatgcttgtggtcggtcaccttgggttttgagctccttcttccactaaattaatcaatttacrtattgtctcacccaaatatggtgcccaagcagcaaagagataaatgccacaaggacagaggaggaggctgagggattcggtaggtctgtttatttcagtctatgtttgaccttgcactacatttgccaagtaactcagttgctaactttcctgaaacaaacctctcccacaggcattttttgtgtgtaggtgacattactgaaggcttggaaagatgaaaggaattgtaccatagcatcagaaactgactcaaacacagtgtcatccaattctgcttcgaaaggttccttggacc

SEQ ID NO: 268044 - DNA, 591 bp, Homo sapiens
atatattgtgcaaaccctttttatggtgggattaatccattcacaaagacagagctttcatggcctaaacgtctcccaaaaggccccacctcccaatgctgttccattggggattaagtttcaacatgagttttggaggggataaaaacattcaaactattgcacccttgaactacaggttatggaacttccaactacttcctccagagtcacaggaattttggggtaaattacatgcttgtggtcggtcaccttgggttttgagctccttcttccactaaattaatcaatttacgtattgtctcacccaaatatggtgcccaagcagcaaagagataaatgccacaaggacagaggaggaggctgagggattcggtaggtctgtttatttcartctatgtttgaccttgcactacatttgccaagtaactcagttgctaactttcctgaaacaaacctctcccacaggcattttttgtgtgtaggtgacattactgaaggcttggaaagatgaaaggaattgtaccatagcatcagaaactgactcaaacacagtgtcatccaattctgcttcgaaaggttccttggacc

SEQ ID NO: 268045 - DNA, 591 bp, Homo sapiens
atatattgtgcaaaccctttttatggtgggattaatccattcacaaagacagagctttcatggcctaaacgtctcccaaaaggccccacctcccaatgctgttccattggggattaagtttcaacatgagttttggaggggataaaaacattcaaactattgcacccttgaactacaggttatggaacttccaactacttcctccagagtcacaggaattttggggtaaattacatgcttgtggtcggtcaccttgggttttgagctccttcttccactaaattaatcaatttacgtattgtctcacccaaatatggtgcccaagcagcaaagagataaatgccacaaggacagaggaggaggctgagggattcggtaggtctgtttatttcagtctatgtttgaccttgcactacattygccaagtaactcagttgctaactttcctgaaacaaacctctcccacaggcattttttgtgtgtaggtgacattactgaaggcttggaaagatgaaaggaattgtaccatagcatcagaaactgactcaaacacagtgtcatccaattctgcttcgaaaggttccttggacc

SEQ ID NO: 268046 - DNA, 484 bp, Homo sapiens
gccatcatagtgctcacctcattcgttttctgcctgttgggcatcattgctcctcatttcctggtgtctggtgtcttgaacactgttatttaatacattgtattcggattttttaattgtttcatgcataaaggtaagtctggtccctgttactcctacttggttggaagtgggtgtcagaccactaatttttgtctgacgaatatacttatattccttttacatttaatgcattttgattcatttttttcacaacttgattccaatctgygtatgtagattcacataaattttctgaactgtccaaagtctgctcaaatatgcaagattggtttatcattagaatatcagttaatttaatccatcacattaacaaatttaaaagggcaaaattatccaatcatctgtagatgaagaaaaagagtcacataaaacctaaaatccatttatggtaaaaattaaagacgacatccttaaccagata

SEQ ID NO: 268047 - DNA, 522 bp, Homo sapiens
tctctggcaagggtcctcattcataatctggtcattcatcccaaatgttcattaagtttctaccatgtacaggcactgtgaggcactgggagtatggtgttgagcagcaaagtagataaggtccctgcactcaaggaactttgttctagtgggggaagaaagaccacaaaaagtaaaaataatcaaataaacaaacaagattattcccatgstggagctggacaggttctgtggtagagagtaagtaggggaaacttactattgacagaatagatgcaggtggtctctctaaataggggtcgtttgagctgagtcctcaaggatgatgaagtagagggagattattgtttttcaaaaaattaccctttttatggtaatagaggccctaaattttagctggagtaaagatattatattcccctgccccagtttgtaatcaggtgtagccacgtgggtcattcctggaagtggtatgaaaaacttccaggagttttccttaagaagagctaaaggaatgggagt

SEQ ID NO: 268048 - DNA, 634 bp, Homo sapiens
gtaatgaaattgtgtttacttgtgtgtctccaccatcaggctaagacatcctcaagtctaaggaccttggtgttttcatcccagagccccacaccttgcaagtgtccagagcatagtcattggatgatgctgtttcccacttaccctctggtttgacatggctgcaggattggcatatggaaactgactgggttgagaagagactcaaatagggacagactggagatgtaggcttagaaaggagagatttcctgaagctttaatgctgtgcaatagaaatatacagcatcaacttccttatacaactaggcgggtcagcaggtcacctgtggcggacccagggaggatgtcctcacaccgaacaggtgagcttggctcggagcatggccaggagccagcccatagccacatgccaccactttctggccttcactgtgtttgccttagtgtcctcgtctgtaaaacaggactaatggcatctacctcacaaggctgatgtkagaactttgtgaggaaacagttttcaaaagcttagaacagtgtctggcatgtcctcaattggcaagaaatgtcagctcctcttggtgtgatgatcaccaaacccacttttttttacaaacagagtggggagaca

SEQ ID NO: 268049 - DNA, 620 bp, Homo sapiens
aacttcatcttagaaagaataaagccagtaatagtgagaggaagtcagaagtgggcagggcagaccaggtaggcccttataagccttgctaagactttggattggagggttgaaagcgggacatgacatgatttgaattaatatttcctctttttattttattattattttttataaagttaggattcaaattctatttaggatgctattttaaaaagagaaaatgcaagacctgagagaaccagaaatcaccagtcaggagctgccatattattttcaaatattctcctctaaaagtggaactgcccacacaacacgagcatactcattrgtcttgccacacaaggaagaatttgtgagaaaagtcaaaattcagtttataacattctttctccataaatgatcagaggatatcaactttttctttatgatatgacttaggctaagaactgtgatcctggatgaaacttagcttccttggcctccctggcttctgcctattgtcaggcctctgagcccaagccaagccatcgcatcccctgtgacttgcacgtatgcccccagatggcctgaagtaactgaagaatcacaaaagaagtaaaaaggccctgccccacctt

SEQ ID NO: 268050 - DNA, 546 bp, Homo sapiens
ccacttgcatatcctagactttgtacaatcagattgacaaggggaaaaaaaacactttgggaaaaaatcttattgaggaaatgaagactgtcttaacttctagcttgtctcctatttgggcaagatgagagttctcttcagtcacttggtcaaccaacaagaatgtgttgagtgcctacctgagtattatgggggctactaaagggaaaacagaggtctccctgtccaagagtttgccctcttgctggggagacaggacacagtgatgggaaaggatcagagaacaggacacagtgtggggtggggaggggggaatcccctgtagaactggcatgacccatttgtgaaagcacattctccaaatgcaggtccactgtgtcttgaaygtggaagcaccccatgtccttagatacttgtcaacaggggctacagcccaggcaaaaggagaaaattaaccctgaagtgtcctctattaccaatgtggcccccaaagacatggagaaggttcatgcaggggccctcgataagccaatgtgtggcagacaa

SEQ ID NO: 268051 - DNA, 562 bp, Homo sapiens
ataaagaaattgtcatgatttctagggtctctcctagctctattggaacatggtagatgataaggtaaccaactgtcttggctggcctgaggttgaggagtttcctagaatatagaacttttcagtgctcaaaccagaaaagtctcagggaaactgagatgagatagtcactctaactgctgaataaatgtttgttgaatgaatkgacaactaactctgcatcccctcatctggaatagggactggggaactgggagaagaacaggagggctgtccaacttcttggcagcacttgagcataaagagaacctcatgattttataaaaaatcagatccaaatatattaaaatgtctaaaaatatatatgaaaaaccagcccaaagacaaatataaatcagtctgaataattatcgctacatttcccactcattggtgaaaatcttgtaattcatcagttagcctgaaacacacgtaaacaaaggtcattcagctccaaccataacaagaggcaactgaaagcacttagctgaaggcagtgctcaacatggaaatctacccacaa

SEQ ID NO: 268052 - DNA, 562 bp, Homo sapiens
ataaagaaattgtcatgatttctagggtctctcctagctctattggaacatggtagatgataaggtaaccaactgtcttggctggcctgaggttgaggagtttcctagaatatagaacttttcagtgctcaaaccagaaaagtctcagggaaactgagatgagatagtcactctaactgctgaataaatgtttgttgaatgaattgacaactaactctgcatcccctcatctggaatagggactggggaactgggagaagaacaggagggctgtccaacttcttggcagcacttgagcataaagagaacctcatgattttataaaaaatcagatccaaatatattaaaatgtctaaaaatatayatgaaaaaccagcccaaagacaaatataaatcagtctgaataattatcgctacatttcccactcattggtgaaaatcttgtaattcatcagttagcctgaaacacacgtaaacaaaggtcattcagctccaaccataacaagaggcaactgaaagcacttagctgaaggcagtgctcaacatggaaatctacccacaa

SEQ ID NO: 268053 - DNA, 484 bp, Homo sapiens
tctcattatagcttaatcactatgaatttctactagagtcatttaaaagaacaattttagcctgccctacttgttgggaagaataggggaaattaacagcatcttgtaactggaaggacccttataggttcctaagactgattccaattccaaacaataataccagtccgtaagtggatctgcttatagagaaacacctgttgcttctgttttttgtctcatatccagttagtttcccattcacagcaaaacattcccttcaatsccaaggaaactcaacctttttgattattagtatagtttcatcaaagtttctttgaaaggtaaaatatcccctttttcttgcctataatttttaaacctttttaaaggttgtaaagaattagttagtcaaggcttcttctcataaagccagggtttcttttttcctagactctatgtgcttaagtgctctatgataaaatgtggatgttataaactcatc

SEQ ID NO: 268054 - DNA, 583 bp, Homo sapiens
gaaatgaggttgactggaatataaaagagcacagctaaaaactacttgagattctgcagataaagcttaacaagaaaaaagcctcattttccctaagttcctgattgtaatgcagtggagattgtttatgggtatgttagtggatggcacaggctgtttcgctgtgagcgtggtacagagattgggaaatagcattcctactttttgtttccggagtaaatgatacatggtttaatgatgaaacaagtaacaaaatcataaccacaatcatagccaggatttactaagtactttctatgagcctgtactaaacacttacaggcattatcttatcaaagcctcacaatgattctataattattattatcctsattttacagatgagtaaactttggctttaaggtaataatgatgattataagcaaaagagtctggtgagaggatgtgtaggccgttttacttggtgctgaattcatatttactcatcttagggagaagactacaggagtggggagtcctggccccagagtggagtgagagggcaattctgtgaagctgccatcctcagatggcccctgcccac

SEQ ID NO: 268055 - DNA, 567 bp, Homo sapiens
cttttaagttttttttgtattgctgctttctgactagttgattgtaatgattttcttgtcgcttatcatgcttgggttttattgagtttcttggatatgtcagtttatagttgttattacatttggaaaaattgtagtcattaattcctcaggtttttttgccattaccctgacattttctgggactccatttacatatatgttagtctgcttgatgttgtcccacaggtcatggagactctgtttatttttatttaaaaatgagactctgttcttatttttacaagagcctttttatcttcagcctcattttatcttcagtttgaattgcttctatcactatcttttcgagttcatgtatcttttatttggcagtatctaatctactgttgagcccataaggtgaatttttttatttcatatattgtatttttcagttatagaattacatttgattccttttctatagtttccatttctctttkcattatgtttctgatttctcttaaatccttgaatatatgtataatagttgcttatagtgcctgtctacaaatttcatcatca

SEQ ID NO: 268056 - DNA, 582 bp, Homo sapiens
aaactctggccttagaacctcctgtcaggtgtccagctactggccatccagcgctcgagtcttgaattcctcctctycctccatcctgtcaacctggtcctcagctgaggtttgacaaatataagacagtagctatcatctgtgtgaccgacacttcatggtttacaaagcacattcacttatattatcttgattataactactatgccataagaaggctcaaagaggttaaatgaccaaaatcacaaaagtagtagagccaggactcaaacttgggtcttctgattccaagttccatccatccatgggacggtaagcatgtggccagggcagatgtctggcactatgaatctagacacttctttccacagaacctgtatttaactttctgcacagcggattatccagttgctgcccatcaatctgagttggcatatgaatgtgaaacttctttaccatcctgaactacagcatgcatgtggtcataacaactaggagcaggaccgacttgactcattggtgggtgaggcttccttcaactgcgttgttcaaaggttaggattggctctagacacagtatgc

SEQ ID NO: 268057 - DNA, 582 bp, Homo sapiens
aaactctggccttagaacctcctgtcaggtgtccagctactggccatccagcgctcgagtcttgaattcctcctctccctccatcctgtcaacctggtcctcagctgaggtttgacaaatataagacagtagctatcatctgtgtgaccracacttcatggtttacaaagcacattcacttatattatcttgattataactactatgccataagaaggctcaaagaggttaaatgaccaaaatcacaaaagtagtagagccaggactcaaacttgggtcttctgattccaagttccatccatccatgggacggtaagcatgtggccagggcagatgtctggcactatgaatctagacacttctttccacagaacctgtatttaactttctgcacagcggattatccagttgctgcccatcaatctgagttggcatatgaatgtgaaacttctttaccatcctgaactacagcatgcatgtggtcataacaactaggagcaggaccgacttgactcattggtgggtgaggcttccttcaactgcgttgttcaaaggttaggattggctctagacacagtatgc

SEQ ID NO: 268058 - DNA, 582 bp, Homo sapiens
aaactctggccttagaacctcctgtcaggtgtccagctactggccatccagcgctcgagtcttgaattcctcctctccctccatcctgtcaacctggtcctcagctgaggtttgacaaatataagacagtagctatcatctgtgtgaccgacacttcatggtttacaaagcacattcacttatattatcttgattataactactatgccataagaaggctcaaagaggttaaatgaccaaaatcacaaaagtagtagagccaggactcaaacttgggtcttctgattccaagttccatccatccatgggacggtaagcatgtggccagggcagatgtctggcactatgaatctagacacttctttscacagaacctgtatttaactttctgcacagcggattatccagttgctgcccatcaatctgagttggcatatgaatgtgaaacttctttaccatcctgaactacagcatgcatgtggtcataacaactaggagcaggaccgacttgactcattggtgggtgaggcttccttcaactgcgttgttcaaaggttaggattggctctagacacagtatgc

SEQ ID NO: 268059 - DNA, 585 bp, Homo sapiens
tactactgatagtgcctacttcatagcatttttatgagtaatactatcaccacagtgactagcacatggtaatactatcaccacagtgactagcgcatagtgatcaatagctataaccatttgaagaaaccaggggtgagtgtatctgagaatccaagaaaagatattggcacgttggtsgatcaaaaagcagatattggggtcagcatattttgccttaatctcaccagcatttctacatcttgttgacactttgtgaagtgggcaggacagcctccaccacaccctttatacaggaagacaaagcgacttgcccagattcaccaactgggaagtggcgagtgtttattatggatcaacatgtgtaaactgtagggggagggggtagaatgggacagagggagaagttgatcagcaaaccctattgggagctgtggagcatacgcagccctcagaggtgtcctgtcatgggtctttgtacccctgccactgttagctgttgcatttgggctacccggaaaggaaagagatgcccttgggcaaagcagctgtctatggcaagcacactctgaaggagctgacagc

SEQ ID NO: 268060 - DNA, 585 bp, Homo sapiens
tactactgatagtgcctacttcatagcatttttatgagtaatactatcaccacagtgactagcacatggtaatactatcaccacagtgactagcgcatagtgatcaatagctataaccatttgaagaaaccaggggtgagtgtatctgagaatccaagaaaagatattggcacgttggtggatcaaaaagcagatattggggtcagcatattttgccttaatctcaccagcatttctacatcttgttgacactttgtgaagtgggcaggacagcctccaccacaccctttatacaggaagacaaagcgacttgccyagattcaccaactgggaagtggcgagtgtttattatggatcaacatgtgtaaactgtagggggagggggtagaatgggacagagggagaagttgatcagcaaaccctattgggagctgtggagcatacgcagccctcagaggtgtcctgtcatgggtctttgtacccctgccactgttagctgttgcatttgggctacccggaaaggaaagagatgcccttgggcaaagcagctgtctatggcaagcacactctgaaggagctgacagc

SEQ ID NO: 268061 - DNA, 585 bp, Homo sapiens
tactactgatagtgcctacttcatagcatttttatgagtaatactatcaccacagtgactagcacatggtaatactatcaccacagtgactagcgcatagtgatcaatagctataaccatttgaagaaaccaggggtgagtgtatctgagaatccaagaaaagatattggcacgttggtggatcaaaaagcagatattggggtcagcatattttgccttaatctcaccagcatttctacatcttgttgacactttgtgaagtgggcaggacagcctccaccacaccctttatacaggaagacaaagcgacttgcccagattcaccaactgggaagtggcgagtgtttattatggatcaacatgtgtaaactgtagggggagggggtagaatgggacagagggagaagttgatcagcaaaccctattgggagctgtggarcatacgcagccctcagaggtgtcctgtcatgggtctttgtacccctgccactgttagctgttgcatttgggctacccggaaaggaaagagatgcccttgggcaaagcagctgtctatggcaagcacactctgaaggagctgacagc

SEQ ID NO: 268062 - DNA, 601 bp, Homo sapiens
cagccttcaggatgccacttcctaaaatccatctctaacgaggcatagctaacaaaatgtgtatggtgattatttattcygccagagtcccagggtgatggaatcagttgcatgtgaaatttgctttgacaaaccatccctggctatgtaagtcctctgctgtgctccagactgggagattctgctatcgattgaagcttctcatcaactcttcctgcaagtggcaagaaatagattgaagtccttgtcaggctttcagtcatgcactgtttcctgggactgcagttagaaaaacaagtcaccgaatagtgggacacttaaagggctacaagatacagggcaaaatgccattgcttcccagatgagaaggcaggcgcagctcctttgaggaatgtgtggggaggcatggatgtcaaagtgccagtcgtagtgattccggggtctcagagaacactgtcagatcagggctttgtctctcagcatgtgtcccagtttcttcagtttcaaaaggtaagaaatcatacctgccctggaaattctgaaagcccagaccactcatagtttattattgttattatctgttgatgtttataaagcaaca

SEQ ID NO: 268063 - DNA, 584 bp, Homo sapiens
ttgctgcttcctggatttaaggaaggattgaagaatttttttcaaaacaaagagtctcttataaattgaatctaacttttaagtaaacttttacaaaatcaaagtattatgaaaatataagaaaatgcataaatcaaagtgcacagcttcattagtgtttactaagtgaatacacctaccagccactccaaaaaatggygctttacctagacacttgacttgtgctgccctaggtattaagccctccaaagggcaaatgcctattttgacctctcatcatagatcagttttgtttgagttccataaaaatggatacatatacgttcttttgtgcctgcttaacttgcataatagtatgtttaagacaagcatctatgttatttttatttttgtatattcttccatagcatttattcctaaattttctaggtattattccgaaaattatctactctattattgatggatatttgagttgttcccaatgttttaataggaatgtgttaatgagttcttacatctgccttttggagcacatatattcatttatattgggtataaatttagaagtagaattattagat

SEQ ID NO: 268064 - DNA, 584 bp, Homo sapiens
ttgctgcttcctggatttaaggaaggattgaagaatttttttcaaaacaaagagtctcttataaattgaatctaacttttaagtaaacttttacaaaatcaaagtattatgaaaatataagaaaatgcataaatcaaagtgcacagcttcattagtgtttactaagtgaatacacctaccagccactccaaaaaatggcgctttacctagacacttgacttgtgctgccctaggtattaagccctccaaagggcaaatgcctattttgacctctcatcatagatcagttttgtttgagttccataaaaatggatacatatacgttcttttgtgcctgcttaacttgcataatagtatgtttaagacaagcatctatgttatttttatttttgtatattcttccatagcatttattcctaaattttctaggtattattccsaaaattatctactctattattgatggatatttgagttgttcccaatgttttaataggaatgtgttaatgagttcttacatctgccttttggagcacatatattcatttatattgggtataaatttagaagtagaattattagat

SEQ ID NO: 268065 - DNA, 496 bp, Homo sapiens
tgatgccactgcagtgctaaccacaaagccagtctcataacgcttattactattgttaaaacaactgcacgccaagtctggaaacccaaggcagacaacaacactccgttttcaaaaccatttgaatttttttttgcttcagggtgagtttgaagagaataaaattcccatgttggctaaaagaagaggaatctagccagattccaagataattaaactggtcaaccggctttaagacattaacagctggtgttttaatcactratgagataatcagtttctataatctgggagatggaccaaaaaacatgggcttggtttttcctttcattttaaatcagttcattggagaggagctattcttctatcttagtgctgtcactctgcaagctgctgataacctgtagccgagaaagaacattgcagtttcaccagtacacatatgcacagaagacagggcacattcagttagaccgttcttaacaaaataaacaga

SEQ ID NO: 268066 - DNA, 496 bp, Homo sapiens
tgatgccactgcagtgctaaccacaaagccagtctcataacgcttattactattgttaaaacaactgcacgccaagtctggaaacccaaggcagacaacaacactccgttttcaaaaccatttgaatttttttttgcttcagggtgagtttgaagagaataaaattcccatgttggctaaaagaagaggaatctagccagattccaagataattaaactggtcaaccggctttaagacattaacagctggtgttttaatcactgatgagataatcagtttctatratctgggagatggaccaaaaaacatgggcttggtttttcctttcattttaaatcagttcattggagaggagctattcttctatcttagtgctgtcactctgcaagctgctgataacctgtagccgagaaagaacattgcagtttcaccagtacacatatgcacagaagacagggcacattcagttagaccgttcttaacaaaataaacaga

SEQ ID NO: 268067 - DNA, 462 bp, Homo sapiens
atctgaccactgcaagggtacacggctcctagaaagatctcttactctatcttcactggagaccagtagtgtatcctccaaaaagactatagacatttgatgaacaaaacccagtccctccccaccttccttcatcctggatgttggtaaayaatttttttttatcagttggcatgacactaacagaactgaaaatcagtgaaatttccaaaagcttattgatattttaacatagagtcaggcccaacagagagtggtctgcatttcttcagggaggctgggtagggaggacacaggggctttggtctcattgtgaagttagatacagtttctcattggggctaaaatgattttctccttaaagtcccaaggctgggggatgttttctgcttgtttgtttttggtttttatttgtttaaaggaggattggtatttggccttttttccaagaaaaagaaagaa

SEQ ID NO: 268068 - DNA, 531 bp, Homo sapiens
attgtctatcattcttaaacatatatcattctgctactctatccaaatgctcatcataaaaataaaaataaaggtgttcattttcaattgatctatataccattattaatytagtcctatctttccacttgataaatgaataccttgaggggcacaaagaagggactttttcaaagtaattgttagcatcagtattagaattccagtcatttggtttcaatttaattgccttcctgtcttacaagtcttatgtactaaggcatttcttaatattgtagtatgatgagtagggtgcagaaagtggtagaagtatcatacatcacatgaagacagagaaggggatttcataattgctccttgaggttaagacttcatattcagttataccaaaaagccatcagtttcaccaactgctaatatgaccaaaaggttgcctgttcaagaagaaagtgcttagtgtatggggagaggaggaaaaaagagagagaggacaatgatgtgatgaaagtcctagagtacattaagcctagc

SEQ ID NO: 268069 - DNA, 632 bp, Homo sapiens
aattgcaccttgtcagattatttattctttatccctctgactgccccccataagccaaytgtcatgctaagcacacttttttttctggattattggaataggttatttatgtagcctattctttgtgtaatgaacttcaaaatctatacattaagtgaaaaattaagtacaatagttctatttttaaacatgagaaaatgctaattacaattctccagataaacatacataattacagcaattacaattcaacaataactcactggtacttactattataaactcataaactattattcagtatcctataaaatccaaaatctaattgaaagtgctagtttagcataattcccacaagccatcattctttaatattctggaatgaatgaggtttccgttgagctattaattgatactgacaagcaataaccactggaatgaaactgcaattatgagtggcaattaatcacatttgctgtcatctctggtgtcaaacagaattcaataatcttctaaatagttcttaaaagtttataccttttatttttcaactcacttagtataaaccaaaagcaatttgctgggataatcaagtaacacccaaagactatttctgtaaaatataaatattg

SEQ ID NO: 268070 - DNA, 547 bp, Homo sapiens
atgataagttcgctgagatctgatggacaagaaagaaccaacggtgtgaggagtgtgtgtgcagtttgtgttacatgtgtgtaggagagaaagaggaaaagggcattgcagtgtgtaggtaaaaatgtacaaaagtgtgtgagagactgcaggtagggaaaacttgggatgcccatagaattgctaaatagctcatatggctaacccataaatacaaagagaaggtagctagaattgataaatagcccatgtggctaacccatagtatacaagagaaagtaactagagaacaggcagagggaggggctggactcaagttrtacagatctttgtaggctggcttaaggatttgggattgtatttttttctgagcaaaatacaaaatcattagtggttttaagcagaggcatcatgggattgaaagtacaatcaattcttagtatttgcaaattttatatttatatttgcaaatctcatatttgcaaattcacctacttactaagatttatttgtaaccccaaaatgtgcccaaaacttgtggcacttt

SEQ ID NO: 268071 - DNA, 553 bp, Homo sapiens
tcacagtcacagagtggtgaaaaatttgagtcacccaatcaatgcgcacattcccagctgagacctaacaaggtaatgccctgtcttcctgcttcagctctcatactgtaaacaaatgtcctttttatggaccatttagtgccatgttttcaaaacttttagttagatgtgggcttaattcatttattcatttgacatatatttaattggctttcaatggctgttaaatcattatctgtcagaaaatgtcttgttcaccaacttgtaatattaatactaatcagcctataaatgcaaattttttaaccttatcatcatccagagagcctcaaaaagatattcccctyccaccaccatcaagctgaaggatgctttctttcattttcatagtagagagtttagtatattaaaatacttaatgctagctgcaattgggatatttatgaagttcccatcttttatatttttcagttcttttttttttttttttttgaggcagggtctaatgttgtcacccaggctggagtgcagtggcacaattatggctcactgc

SEQ ID NO: 268072 - DNA, 651 bp, Homo sapiens
ttgcatgctgctttagattgaagtacattaattcttttgtttatccacaggctatcaccaaccctctgaaaaagtcctactgttaatgattatatatgaakacattttcatcagctatctgccagtaacgttaggaactaaagcaattcatcaacaggccactcgttctctttttcaaattaaacaatctgttagatattattttccataggagaataaatatgatggattttatttctcacattgtaaatgatttttgagtctggatgtctgaaatatttctgcttaaacttgacaaggaattttttttttcataaggcaaagtcatccttaaggccgaaagtaatgtggtccaggtgcatcgtattttaccatcgtatcaacggaataggagagaactaagggtggatattggctgagatgtaactatgtgaccccaaggcgctgctcttccttagaaattgcttggtacacagaaatactcacagatataccccttttactgggcaatgcaaggacatcatttcttaactacaactcgctggcaatgtctatttacaccataaataatctttatacttatatttctatagaaatcagccatcttgccaggtgatagctggtttttgcgtttaatgcaaaaaggacttt

SEQ ID NO: 268073 - DNA, 651 bp, Homo sapiens
ttgcatgctgctttagattgaagtacattaattcttttgtttatccacaggctatcaccaaccctctgaaaaagtcctactgttaatgattatatatgaagacattttcatcagctatctgccagtaacgttaggaactaaagcaattcatcaacaggccactygttctctttttcaaattaaacaatctgttagatattattttccataggagaataaatatgatggattttatttctcacattgtaaatgatttttgagtctggatgtctgaaatatttctgcttaaacttgacaaggaattttttttttcataaggcaaagtcatccttaaggccgaaagtaatgtggtccaggtgcatcgtattttaccatcgtatcaacggaataggagagaactaagggtggatattggctgagatgtaactatgtgaccccaaggcgctgctcttccttagaaattgcttggtacacagaaatactcacagatataccccttttactgggcaatgcaaggacatcatttcttaactacaactcgctggcaatgtctatttacaccataaataatctttatacttatatttctatagaaatcagccatcttgccaggtgatagctggtttttgcgtttaatgcaaaaaggacttt

SEQ ID NO: 268074 - DNA, 514 bp, Homo sapiens
ttttaggtccactattcatgaattaaccatctagtgttaaaagctacaaactagatcattcaaagaaactggtaattttcttaactgccctttaacagtgaaaaatggatttgcatgctgctttagattgaagtacattaattcttttgtttatccacaggctatcaccaaccctctgaaaaagtcctactgttaatgattatatatgaagacattttcatcagctatctgccagtaacgttaggaactaaagcaattcatcaacaggccactcgttctctttttcaaattaaacaatctgttagatattattttccataggagaataaatatgatggattttatttctcacattgtaaatgatttttgagtctggatgtctgaaatatttctgcttaaacttgacaaggaattttttttttcataaggcaaagtcatccttaaggccraaagtaatgtggtccaggtgcatcgtattttaccatcgtatcaacggaataggagagaactaagg

SEQ ID NO: 268075 - DNA, 573 bp, Homo sapiens
ccagtaattactgccctggggaaactattaagcaagggtgtgtgtatgcgtgcgtgcacatctgtgtctctgtaggaaaaatatataataaaatgtaggccaggcacggtggctcacacatgtaatcccagcactttgggaggccaaggtggatgatcacttgaggtcaggagtttgaaaccakcctgaccaacatggtgaaaccccgtcgctactaaaaacacaaaaattagctgggtgtggtggtgcatgtctgtaatcccatccactcaggaggctgagaatcgcttgaacctgggaggcagaggttacagtgagccgagatcacgccattacactacagtctgggtgatagagcaagaccctgtctcaataaataaataaataaataaataacaagaatatatactgaaatgttaatggtaattctggttgacaggaatctttatttctccctgtaaactttcttgtattttctgggttatttgaaattagggtgtaattcttataaaatcagaaaaaattacagctacatttttcttgatagtactttgaattgattcagatctcctc

SEQ ID NO: 268076 - DNA, 605 bp, Homo sapiens
atgtagaatcttttaccgtaagctcctttaaaagcaatgaagagtctcagtttgtagcatttagggggacggattctacatgaaggcatggaggtggagcagttggcctacaaaagatcctgcaggttatgattttatgaaatgcttggtatgtatccctggatttatgattgagaacatgaaaccccaaaaaagttaattagcttagtcaaggttaagctgaattaacaagaagaaaacagattatttgaagatgattatttttcttctttcagttcataggttctacctgaaaagggaaaatgraagaaataaaaagaagagaaagccaggatgatctaactgcattgcaatgagtcctacattcttagaaatgtaatgctatcgttttccttttttgctcagtcatagttcagtacaaatattcagcaagcgttggcttttggagtctctcctgggtcttttgttttatgcaagaagaatatgtagaattatggagtaggttttctgggtcacgacttctgcctacctgcaattagtcagaactcaatcatatgacgccaccttattacttacgatcttactgctagtgcatataacttagc

SEQ ID NO: 268077 - DNA, 575 bp, Homo sapiens
caacatatttcaatgtgaacgggccctttttataaaacatactttaacactgctgtggattaataatgtgttagcagaaaaagacatgttgagcttagtgcaattatccttccatcccaattatattgtgacattaaatcttgtgacatttaataagaaaggccatttcacccatggctacctctagtgcagacgatttatgcaacagtgttcctgtatacaaaattatgaaaagaaggcattcttacatgctgatatgtctaacggcccatgtaaattaaataaggtgtagcaaaatatataaattgttaatattatgattacttggtacctgagacaaaagaaagacgaattaacaaccttggcttttaatccattacaaaattaaacaaacataagtggacaactaataagatagagagttgcttagtaaatagggaatcaggaagctatttctgtcccacgggaggcattttagtttttgtcataatacatattcatctgacgtatttggcgtatarcataacttagtatttgtggagatttaaattaatttgatgttagagttataagat

SEQ ID NO: 268078 - DNA, 617 bp, Homo sapiens
aaatatgttctgaagagggtctcaaatttaagtcattacatcatgattttacaaaaaagttttcagataaacttgctctatgatgggtgtcatttccttaataaaataaagaaattgaaggtagtttaagatcaaaacaaaatatacatatatattccatactgacaaacaataatggaagtggctttatactcagtataaagccaaaatactagcaacacatcatccctgatgctgtaatctgttggcagaggaacttttcagcattttgctttayacttccctataattttatggtttatcagttgatgcttaatcagtaggactgtgttaactaacactattcagtggctcatcattaagaattctttttcaaactccaacacaaataggaggacaatttgaagtaaagaccttctccatctgaagtatttgtttcttgaaggatgcttgattggccttaagcatagtgaatgtaataataacacttgaagtagatatgtgcatcagttctagaggtctctagctgaaatctatatacttacttacctctagaggaaaatctctaatgtttctctgaattttccaagctattttaggttagctccagctgaaaa

SEQ ID NO: 268079 - DNA, 617 bp, Homo sapiens
aaatatgttctgaagagggtctcaaatttaagtcattacatcatgattttacaaaaaagttttcagataaacttgctctatgatgggtgtcatttccttaataaaataaagaaattgaaggtagtttaagatcaaaacaaaatatacatatatattccatactgacaaacaataatggaagtggctttatactcagtataaagccaaaatactagcaacacatcatccctgatgctgtaatctgttggcagaggaacttttcagcattttgctttacrcttccctataattttatggtttatcagttgatgcttaatcagtaggactgtgttaactaacactattcagtggctcatcattaagaattctttttcaaactccaacacaaataggaggacaatttgaagtaaagaccttctccatctgaagtatttgtttcttgaaggatgcttgattggccttaagcatagtgaatgtaataataacacttgaagtagatatgtgcatcagttctagaggtctctagctgaaatctatatacttacttacctctagaggaaaatctctaatgtttctctgaattttccaagctattttaggttagctccagctgaaaa

SEQ ID NO: 268080 - DNA, 530 bp, Homo sapiens
agtgaatgtaataataacacttgaagtagatatgtgcatcagttctagaggtctctagctgaaatctatatacttacttacctctagaggaaaatctctaatgtttctctgaattttccaagctattttaggttagctccagctgaaaacattatttttgtttccyaatattattttgatgactaaatgctatatcattgaagatgatgacttgtaaaatgaatgcatgaatgacaataattaaaaatagacaaattagcttcaaaattatcaaaatatttatactcaattttttactaaacttttggtctatttctaagtaaaacataaaaatcataatgataataagataatgatcataacaaattacagtagtttatatttattaaccagttcctattacctattttacatttcaccttttcttcataacaaattatagtagtttatatttattaaccagatcctattacctatttttacatttcaccttttcttcataacaacctaattattattttcatgttaag

SEQ ID NO: 268081 - DNA, 530 bp, Homo sapiens
agtgaatgtaataataacacttgaagtagatatgtgcatcagttctagaggtctctagctgaaatctatatacttacttacctctagaggaaaatctctaatgtttctctgaattttccaagctattttaggttagctccagctgaaaacattatttttgtttcctaatattattttgatgactaaatgctatatcattgaagatgatgacttgtaaaatgaatgcatgaatgacaataattaaaaatagacaaattagcttcaaaattatcaaaatatttatactcaattttttactaaacttttggtctatttctaagtaaaacataaaaatcataatgataataagataatgatcataacaaattayagtagtttatatttattaaccagttcctattacctattttacatttcaccttttcttcataacaaattatagtagtttatatttattaaccagatcctattacctatttttacatttcaccttttcttcataacaacctaattattattttcatgttaag

SEQ ID NO: 268082 - DNA, 557 bp, Homo sapiens
ttttcaatatctccttattaaagaaaacaaacactacaacaaacatccttctgtatatccatgattatcccatagagcaaattactgaaatggaaatttctaactgaaatagtatgcacatactaaggatcatgattaatattttactttctctttttttattgattctaatattgctattttaatttacattttytatctagtctcattcacctgatgatcacatcccatctcatagctttaaatattgtctatatgctaatgattcccatatttatacctatactccagatatctccctgaattccaaattcataaagttaattatctaactgacatttccacctgaatgctttaatttgcatctcaaatttaaactgtgcaaaattgagctcctatacttctactccacgggaattgctcttcttcctgtctttaccatcacagttaatgacaattccatctttcttgtttttcaggtgaaaaccctgaaaatcatctttgatactctgggaagccaaaggttagcagcaggcttgcaatttgtttgcctttgt

SEQ ID NO: 268083 - DNA, 602 bp, Homo sapiens
tgctccacccatctaatggactatgaatccattaaaaaatgaggcaactttatatgtgagaaaataaaatgtctttgtgatatcactatatttcaaatagcaaagtacaggacatcrtgtatatactgctcttgtttgtgtagaacttacaaggaactgacagaagtgcttacaaataaggctgggtgcagtggctcacacctgtcatcccagcacttcaggaagccaaggtgggtatatcacctgaggttaggtgttcgagaccagcctcgccaaggtggtgaaaccccgtctttactaaaaatacaaaattagctgggcatggtggtgcacacctgtaatcccagctacttgggaggctgaggcaggagaattgcttcaacgtgggacgcggaagttgcagtaagctgacattgtgccactgcactccagcctgggtgacaggagcaaaaactccgtctcaaaaaaaaaaaaaaagggatacacaagaaacttttgatagtggttgctcctgaggaggggaaatgggtgatgggaatgtgtggggcaagagcagaatggagacttttcattacataccctttagtaatttgcgattttgt

SEQ ID NO: 268084 - DNA, 511 bp, Homo sapiens
ggtcacattacaatctataatttttgtggtctaatggccatatcagtaattcctaatatattttgggccacatttaaacaattttaccttttaaatcatatacatatatataattatatatatrtgtgtatatatatatatatatatatacacacacacacacatatatgttggtaatgtctattttcattaatttataaaaagttaatattgctttgtgtctacaatatatctttctaaataatatatgtatgattttgagggtaataaaataaaaacatatgaatgatatgtcttttaccatgtaaatttgcttagaaataaaaagagttatacaaagcaagttctaggaattacataacattgtggtgctcctagttttaaaataatggtagtagaggcagtgagactgtaaagaactgagtgtcctgtattgtgatagtagcaaaataaatttgaatgatttaggaaaggtgtaagaaatttggcaatttatgacaaaggacttgta

SEQ ID NO: 268085 - DNA, 539 bp, Homo sapiens
taattgcaacatgatgagattctcattgcttttaattaacctgcctttttctttctcaactccacaattaacttggctaaatttgttagcaaatgaaaaattctgactgcgttagttgcatgttgattttactgtctactatttgatacttacatcattatgttttaaatgaaacaaatcttaaaatcaggtctagattttatattctgtgataaaaatcaccacattttcccctaaggcattgccccagaaatgatttttttaaaagatagcactattggttttatttcttggaagggaaaaaatgtcagtcagagtagtaaggtaatgatccagtttatttggtaytatgagactcaaggatttagcagtaaaacgaaatctttgttaaagaaaaaataagcatatcatattaagaggaagagaattgaatttctatatttgatggcaaatctggcaacactagaagtggttacctaaaattaaaagccttttacaaactttttatttcaactagtcactgtaattgcataaaaaac

SEQ ID NO: 268086 - DNA, 585 bp, Homo sapiens
ctacgttttgaccaaacgtactcttcccttgagtattgcatttccaagaaatttccctcaactaaaatgcccactcaatttctcttcttgaacagcttattcattcytcatatcagcactgaccacctcactccagagcactctttttctaaattgcaattttaaaaatcacaggaggtctctaatgccattccatattccttgatgcccatccacttgctaacacttatgaaatggtcattgccttcattgtattaaaatttcaagtgcaatttgttatctttgctgtatgcatggattccatttacacactagacccatatattttcttatattctaggtgtcttttttgcttcaaattcctttctagcttttctttaaatccttactttgcccatcttcagtgctgggttggtaaaggagacagaaacttaacaatatccaccaagcaacagaactaccacatcaccaccaagaacttcatggcttcctgggcagatatgcagtgggcacaatttcataacagattaattgctaccaatcgtgaagaagttaaaatactctcagaatttagaaggtatactt

SEQ ID NO: 268087 - DNA, 530 bp, Homo sapiens
gctggttatgctggatatctttggagggtagtggagctgattaaaatgaagagatgagaagaaaatttttcacttaatccactttgtatcttctaaattttgaaccatgtggatgtcttaactattaaaaartaatctttaaaaatttttaaatagaaataaaaggggaggaacaaaagaaaggagtatttttaagtgtgatagagccagtgtaggtttcctaaaaacaatagacttgtgtgaagcctataacaatctaaaaaacatcttcaaagcgcctcttcttgatattaacactcacaaatttatcaatggccaagttacagaaatgtgattagagactctaaggagaaaagactctaaggaacaggtaaattatttcctacgtgagggcatgaaagtagatatttggaaagcttatgcagttgatcatgaggtgttcagtgtatgtggagtttgagcacatactcaagacatgttggagagctacctagaaatcattgataccctgttcacaaaaatgtatttta

SEQ ID NO: 268088 - DNA, 530 bp, Homo sapiens
gctggttatgctggatatctttggagggtagtggagctgattaaaatgaagagatgagaagaaaatttttcacttaatccactttgtatcttctaaattttgaaccatgtggatgtcttaactattaaaaaataatctttaaaaatttttaaatagaaataaaaggggaggaacaaaagaaaggagtatttttaagtgtgatagagccagtgtaggtttyctaaaaacaatagacttgtgtgaagcctataacaatctaaaaaacatcttcaaagcgcctcttcttgatattaacactcacaaatttatcaatggccaagttacagaaatgtgattagagactctaaggagaaaagactctaaggaacaggtaaattatttcctacgtgagggcatgaaagtagatatttggaaagcttatgcagttgatcatgaggtgttcagtgtatgtggagtttgagcacatactcaagacatgttggagagctacctagaaatcattgataccctgttcacaaaaatgtatttta

SEQ ID NO: 268089 - DNA, 570 bp, Homo sapiens
agattctccctcctctgtataccaacagcaagcattgcacacctctgttttcatataagtcgtgctgcccctgctggcagattttttgatgtgattgttgtctttaaagactctttatttttcaccattgtatcaatggcatataatagagtacaatgtgtagagatttaatatctgttcaatgaatgaatgactttgaagcaaaaaggagactatctaaaattaaatacttcttaaaaagatgatttagaatacaatttggttttgtgaaaagtagattaccaccctagaaatagaacttatggcaaataaagtgaatgcttagggaaaagtgttatgtaggaaactcgatgagctgataaagaaaactttaaactttgtggggtgaggaaagaaagaagtaaaaccacatactatgatttatgacaaacattacatatactcagkcattcaggcatgcaagtgctagtatttctgggaggtgaataagacttagaatttacaagggccttatattctaatacaggagacacattatgcaaataaatatccacaatataagtagcatgt

SEQ ID NO: 268090 - DNA, 576 bp, Homo sapiens
atttcctcttgtaggttatctaaacacttaagtacaaagatagctgtgcaagaatattatttttagcattcatcataatagaaaaaatagcaaacaactgaaatacatataaataaggaaaggctatgtaaaatatactgtactcatgtgatatattatacaacagttaaaagaaatgaactatttccatatatatcaatatagatcccaagatattattgactgaaaaatgcaagytgcagtaatacatgtataaaatactattatatattaaatgcatgttttcctaaccgcacacaataattccatctgttttgttcagtgcaaagtttgtgtgttagaaataatgtttaaaagtctaaaattatatccacaaaactcataacagtggttacagggaatgggcaaggaaactagaatttggatagcagtcaaatgatttcagttttatagatatacttcaattttttaaagaaagaataatgagttatgtgtgcttatgaaatttaaaattataataaataaaattactgagataatatggtagaaaagaagaactgaacacagccatttgaa

SEQ ID NO: 268091 - DNA, 582 bp, Homo sapiens
gtttttttaaactttctggaatcaagtggccacttaatcacttttggcattacagccttgaattacaaatgtgtataaaaacttggataggggcctggcacggtggctcacacctgtaatcccagcactttgggaggacgaggcgggcagatcacctgaggtcatgagttcaagaccagcctggccaacgtggtgaaaccccgtctctattaaaaaattagctgagtgcggtggcaggtgcctgtaatcygagctacttgggatgctgaggcaggagcattgcttgcacatgggagatggaggttgcaatcagccaagattgcgtgactgcactctagcccaggtgaaagggtgagactctgtctcaaaaaaaaaagaaaagaaacaaaaacttggataatggacaaacgtgtgggcagctgcttgttctgaacttcatttaacaatcaacttaaacccatccctatatattactttggcacttgatctgtccatcaaggagccaagtatttgcttctaactgggtacacttctagggtgaacatttgacaggaaagcaaatgtggagctggaagttgagcc

SEQ ID NO: 268092 - DNA, 533 bp, Homo sapiens
ataaaaacttggataggggcctggcacggtggctcacacctgtaatcccagcactttgggaggacgaggcgggcagatcacctgaggtcatgagttcaagaccagcctggccaacgtggtgaaaccccgtctctattaaaaaattagctgagtgcggtggcaggtgcctgtaatctgagctacttgggatgctgaggcaggagcattgcttgcacatgggagatggaggttgcaatcagccaagattgcgtgactgcactctagcccaggtgaaagggtgagactctgtctcaaaaaaaaaagaaaagaaacaaaaacttggataatggacaaacgtgtgggcagctgcttgttctgaacttcatttaacaatcaacttaaacccatccctatatattactttggcacttgatctgtccatcaaggagccaartatttgcttctaactgggtacacttctagggtgaacatttgacaggaaagcaaatgtggagctggaagttgagcctacaggagaggatgcagcaggctgg

SEQ ID NO: 268093 - DNA, 608 bp, Homo sapiens
ctcatccaggaggatacagacaacccccgagggcactgcttagagagcaggctgttggctgatttctatcatttcctgctttcctggcacgacatttctgtgaaacacaaactgcacaagtctacacaatgatcttgattttgaatctgttgtctgtctcattagttccatgaagactaaaatgtgatttcatggttgcagagtcctctactgggtacctatcaacacttacattgccttctctctagtctcaaagaacaaatttttctacccccttatccaaaggcaacatctccaccaatgcctcctagctcatcttccgccarctcaatcaaacaacatatttttgcttatttatcttcacctttttatttacactgaaaacacaactaccttccaggtaacagtaatttggtggaagaggctggctagctgttcaccaaaacttttcccctttcctcctgggcacacaggtagactatattcttcaggttcccttacagttagctgtgctttatgactaagatctggcagatgggcaaatggacaaacaccagaggcatgtgggactagcctatacaatgtcctgggcaatccgacatcaccac

SEQ ID NO: 268094 - DNA, 567 bp, Homo sapiens
gaaagaacctttctgagtgcatgtgttgtacacgcccttcacatacagtctttcaactcctcagmctctgtagatctgtctattcacaatgaagcatgtgcttcttggctgtcaacacagctgtgaatggccttgtattgattctcaggttgcaatcattttattgtttctgcttctagtcagcaggaagaataagaataaaaggcagctcactttatttacaagaaaatttagtttccaagaataggttactccattcttaagaaaaaactttcttactgtttcaatttggacgaagctcattctacgaattcatcctaggtaaggatccagaaatatactctgtttgggggagttttaaaagctatttaagtaaaaattgaatttcatcaatataaacaaaatacaatgcaaagtactatattaggcatttaggtgcggcaaagattaataaaaagactactttgaagagtgagtgtgtgtaagtgtgtgtgtgtgtgtgtgtttaacttggacataacatggcacagtaagtccatcttctgaggaatttgaaaaatttactga

SEQ ID NO: 268095 - DNA, 567 bp, Homo sapiens
gaaagaacctttctgagtgcatgtgttgtacacgcccttcacatacagtctttcaactcctcagcctctgtagatctgtctattcacaatgaagcatgtgcttcttggctgtcaacacagctgtgaatggccttgtattgattctcaggttgcaatcattttattgtttctgcytctagtcagcaggaagaataagaataaaaggcagctcactttatttacaagaaaatttagtttccaagaataggttactccattcttaagaaaaaactttcttactgtttcaatttggacgaagctcattctacgaattcatcctaggtaaggatccagaaatatactctgtttgggggagttttaaaagctatttaagtaaaaattgaatttcatcaatataaacaaaatacaatgcaaagtactatattaggcatttaggtgcggcaaagattaataaaaagactactttgaagagtgagtgtgtgtaagtgtgtgtgtgtgtgtgtgtttaacttggacataacatggcacagtaagtccatcttctgaggaatttgaaaaatttactga

SEQ ID NO: 268096 - DNA, 567 bp, Homo sapiens
gaaagaacctttctgagtgcatgtgttgtacacgcccttcacatacagtctttcaactcctcagcctctgtagatctgtctattcacaatgaagcatgtgcttcttggctgtcaacacagctgtgaatggccttgtattgattctcaggttgcaatcattttattgtttctgcttctagtcagcaggaagaataagaataaaaggcagctcactttatttacaagaaaatttagtttccaagaataggttactcsattcttaagaaaaaactttcttactgtttcaatttggacgaagctcattctacgaattcatcctaggtaaggatccagaaatatactctgtttgggggagttttaaaagctatttaagtaaaaattgaatttcatcaatataaacaaaatacaatgcaaagtactatattaggcatttaggtgcggcaaagattaataaaaagactactttgaagagtgagtgtgtgtaagtgtgtgtgtgtgtgtgtgtttaacttggacataacatggcacagtaagtccatcttctgaggaatttgaaaaatttactga

SEQ ID NO: 268097 - DNA, 567 bp, Homo sapiens
gaaagaacctttctgagtgcatgtgttgtacacgcccttcacatacagtctttcaactcctcagcctctgtagatctgtctattcacaatgaagcatgtgcttcttggctgtcaacacagctgtgaatggccttgtattgattctcaggttgcaatcattttattgtttctgcttctagtcagcaggaagaataagaataaaaggcagctcactttatttacaagaaaatttagtttccaagaataggttactccattcttaagaaaaaactttcttactgtttcaatttggacgaagctcattctacgaattcatcctaggtaaggatccagaaatatactctgtttgggggagttttaaaagctatttaagtaaaaattgaatttcatcaatataaacaaaatacaatgcaaagtactatattaggcatttaggtgcggcaaagattaataaaaagactactttgaagagtgagtgtgtgtaagtgtgtgtgtgtgtgtgtgtttaacttggacataacrtggcacagtaagtccatcttctgaggaatttgaaaaatttactga

SEQ ID NO: 268098 - DNA, 607 bp, Homo sapiens
tggtaagccttgagtgtttgttcatcaccacaatagggcagttgccaaatagaatgggaagtcagcttacacgggcaggctgtgttgtctggcatacctggcaacataggtgactgwgtgtgcaagaatctggttattactatggagggagctaaatatttgaacaactgaagtttatctccaggatgcctattcatacaccagacatactgtccattatagttcttatcatgtagttcattctgtttgtgcacagaagagtgtgtgtgtgtgtgtgtgtggtgtgtatgtgtgtgtgacagagagagagagagagacagagacagagacagagagcagtgggagaagtagtaaaaggaaatctgtgggattctgcatgcaggtgaggtgtggagagaatttttatgggcagagcattaactgagtctcctgtctccagccaggtttttcatggccagcttctgtggtccttcctgtttagaatctctgactcttaagggttcctctggtcaggtttaatcacctgtcagcccacttctatctgctctgttttcaagttatttgacataatttctcatgtacatataggcacccctgtcattctctt

SEQ ID NO: 268099 - DNA, 607 bp, Homo sapiens
tggtaagccttgagtgtttgttcatcaccacaatagggcagttgccaaatagaatgggaagtcagcttacacgggcaggctgtgttgtctggcatacctggcaacataggtgactgagtgtgcaagaatctggttattactatggagggagctaaatatttgaacaactgaagtttatctccaggatgcctattcatacaccagacatactgtccattatagttcttatcatgtagttcattctgtttgtgcacagaagagtgtgtgtgtgtgtgtgtgtggtgtgtatgtgtgtgtgacagagagagagagagagacagagacagagacagagagcagtgggagaagtagtaaaaggaratctgtgggattctgcatgcaggtgaggtgtggagagaatttttatgggcagagcattaactgagtctcctgtctccagccaggtttttcatggccagcttctgtggtccttcctgtttagaatctctgactcttaagggttcctctggtcaggtttaatcacctgtcagcccacttctatctgctctgttttcaagttatttgacataatttctcatgtacatataggcacccctgtcattctctt

SEQ ID NO: 268100 - DNA, 607 bp, Homo sapiens
tggtaagccttgagtgtttgttcatcaccacaatagggcagttgccaaatagaatgggaagtcagcttacacgggcaggctgtgttgtctggcatacctggcaacataggtgactgagtgtgcaagaatctggttattactatggagggagctaaatatttgaacaactgaagtttatctccaggatgcctattcatacaccagacatactgtccattatagttcttatcatgtagttcattctgtttgtgcacagaagagtgtgtgtgtgtgtgtgtgtggtgtgtatgtgtgtgtgacagagagagagagagagacagagacagagacagagagcagtgggagaagtagtaaaaggaaatctgtgggattctgcatgcaggtgaggtgtggagagamtttttatgggcagagcattaactgagtctcctgtctccagccaggtttttcatggccagcttctgtggtccttcctgtttagaatctctgactcttaagggttcctctggtcaggtttaatcacctgtcagcccacttctatctgctctgttttcaagttatttgacataatttctcatgtacatataggcacccctgtcattctctt

SEQ ID NO: 268101 - DNA, 607 bp, Homo sapiens
tggtaagccttgagtgtttgttcatcaccacaatagggcagttgccaaatagaatgggaagtcagcttacacgggcaggctgtgttgtctggcatacctggcaacataggtgactgagtgtgcaagaatctggttattactatggagggagctaaatatttgaacaactgaagtttatctccaggatgcctattcatacaccagacatactgtccattatagttcttatcatgtagttcattctgtttgtgcacagaagagtgtgtgtgtgtgtgtgtgtggtgtgtatgtgtgtgtgacagagagagagagagagacagagacagagacagagagcagtgggagaagtagtaaaaggaaatctgtgggattctgcatgcaggtgaggtgtggagagaatttttatgggcagagcattaactgagtctcctgtctccagccaggtttttcatggccagcttctgtggtccttcctgtttagaatctctgactcttaagggttcctctggtcaggtttaatcacctgtcagcccacttctatctgctctgttttcaagttatttgacawaatttctcatgtacatataggcacccctgtcattctctt

SEQ ID NO: 268102 - DNA, 626 bp, Homo sapiens
ctgctttacaggggtgctgagttgtgttttggcaggcagttaactattggaaaatcctttgttctgtaagtcttggttttactcttggctagaagagatctatttcagccttcaacttagttctgcaacatggctattccttgagagcatgcttcctacttctaagacatgtcctttctggagtctcagatgaatgtccaaggtattcagtaaagtctttcaactctggataaaccagaatgctaaatctcccagtctagatctctagtaacacttcgtctctcagccccagagaaggttatctttgctacacttcatagaaagccatcttgtgcacgtgcatgtgcattgtaatgcttggccactaaaatkttatgaatcttcatgaaaacttctgccgtctcttacttattccttccctcccttattttcagtctctgtcacataaattttcaccatgtcaaaaatccagtgtcttagtccattttgtgttgctataacaaaatactgcagattgggtgatttaaaatgaatagaaatgtattgactcacagttttgtaggctgggaaatctaatatcaagttgctggcatctggcaagggccttcctgctgtgtcaacccacg

SEQ ID NO: 268103 - DNA, 579 bp, Homo sapiens
tttgcaataattaggaaaaattgacagaaagttgtttcatagaactccagaaaaagcattagagcaactgtgttgaatgcccatgggatatcatgtaaggtgagaactaaaccagtcacagacacgattgacatctgcccaatagccattctccttttcttcctcgttaagagaactctgatattttcagatattggagcttttctatgtcaccttgttttgcataaaatgctcatccctggtgaaccactgcagattcaggggatgaatctgtctttgctcaattaattatggtcatcctattccctttccctgcttagaaatggttgtatgatccaaatctggccaatgagacataatgtcaagtttgcctagggaagtttttagggatattttcttagctaataaaaatagataaaagaaagtgttatctcrttatttttttcctgctactagacactgatgcgaatgaggatatgatggctggatccaccttgagatattgagaaaatcactcaattgggggtaacagaacagaaaaacagaaggcattatattaaggcatccttaatgtaacag

SEQ ID NO: 268104 - DNA, 611 bp, Homo sapiens
cagctttgcagggccatttcaaaatatgctgaagaaacatatttgctttttatttctctcagggccgctatctgtcattgggtatcttattgctacaaagagtcaggtttgtccctcttaagatttctgttttaatgttaatgctgatcagttgtgcctgaattccaaaggaagaagggtaygataaggcatgtccaaccctccttcccatcataacctgaactcacgttttgagttaactttggaatgcccttggccaagaggagtcatccattcagttggttggaggcttagaattttatttttggtttccaattctttaagaaagttaagcaatttttcaaagtaccagcaatagaaccttatttagctattttgacttgacatcactacccatgagagctcatttttcccatgaaatatttcacctgtgtatttcacctgaggagtcaggcagggtcagtgaaataattcttctttgtcaggaattcttatacctagtttaaattcttcctcagagcattgctgggaaaacattttgtctagctcaagatttaccttttttttttctaatcttcaatcttttttgtgccaggaatgtaggaaacccc

SEQ ID NO: 268105 - DNA, 611 bp, Homo sapiens
cagctttgcagggccatttcaaaatatgctgaagaaacatatttgctttttatttctctcagggccgctatctgtcattgggtatcttattgctacaaagagtcaggtttgtccctcttaagatttctgttttaatgttaatgctgatcagttgtgcctgaattccaaaggaagaagggtatgataaggcatgtccaaccctccttcccatcataacctgaactcacgttttgagttaactttggaatgcccttggccaagaggagtcatccattcagttggttggaggcttagaattttatttttggtttmcaattctttaagaaagttaagcaatttttcaaagtaccagcaatagaaccttatttagctattttgacttgacatcactacccatgagagctcatttttcccatgaaatatttcacctgtgtatttcacctgaggagtcaggcagggtcagtgaaataattcttctttgtcaggaattcttatacctagtttaaattcttcctcagagcattgctgggaaaacattttgtctagctcaagatttaccttttttttttctaatcttcaatcttttttgtgccaggaatgtaggaaacccc

SEQ ID NO: 268106 - DNA, 520 bp, Homo sapiens
ctttttctgacattagtatagtcactcaatttcttttctttctttctttcttttttttttagatggagtttagctgttgttgcccaggctggagtgcaatggcatggtctcggctcactgcaacttcaactttcgccttccagtttgaagcaattctcctgcctcagcctcccaagtaactgggrttacaggcacccagcaccatgcccagctgatttttgtatctttagtagagacagggtttcaccatgttagccaggctggtctcaaactcctgacctcaggtgatctgcctgcttcggcctcccaaagtgctgggattacaggcatgagccactgcacctggcaactctatctctttttttttttttttttttttttggttactgtttgtgtgaaatacccttttccatcctttgactttcaatctctttgtgtttttgaactaaaattagactcttacagacggcatatagttgggtattgttttgtaattcattctgccaatctctgcctatta

SEQ ID NO: 268107 - DNA, 612 bp, Homo sapiens
ggtggcttaattctaatttctaaaattgacctcactttttcctgaaaaatctttatcattcgttagataaaactagaaaggtactggggataaagtatattttcttcatagaaatgtgaactatatctggatttatttaagtcttttccctccggactcagagtaaatgaaactccaccaccacggaattacagaaaacagagttgtgataatagttattcttcaatatcatccagacttgcaagttgttagacatggaaaaaaacaggcatcagactggaattgagaactggcacacaataaagagcatgcagcttgcagagggcactgcaagtccccggactctgatcctccctgacttcagatgcattatcaccagggcaacttcgtgaaaatcacaagagtaggctgagtttcagtggactactggtatttgtgaagattgatacacagatctggtgtaatccctaaacacgtcatatyttcccctatttctcttggccaatggtcatggtcatgaaataagggctggcttaatgagagagtatatcagagtcaatttagcaccaataagagcaagcaccagaagctggctctgggttaaagcccaag

SEQ ID NO: 268108 - DNA, 562 bp, Homo sapiens
actatgtgatttctctattcagaattggtagaaccaacaaataagcactcagtggaatctgtaaattctttgtagtacatgcggcatctctacttttttttcttttgayatttaagtttccttgtaccagtattaaatgtttcagagaccttttggcagaatttttaaaaagtgaccttaagtaattttttagtaatttataaattaaaactcatttaaaattacaattttggttttattacctttaaaagttaggcttgacaagctcttttcatgacagactattagcctaagtacagagatgtggcatatccttattgcttttactcttggttttaaaaaaatatatcagtggcataaacacccaacaccatttattaaatactatgtgcacgatgcaaggtaccctctaggctgatgcaaaattgttatttatatacagtcccttctcccaaagagctatctccatattgcaggtgatagaacctaataaagagatttacaggataatataggctttggctacattttttgtaaaaattagatatgggaatagtaaaac

SEQ ID NO: 268109 - DNA, 562 bp, Homo sapiens
actatgtgatttctctattcagaattggtagaaccaacaaataagcactcagtggaatctgtaaattctttgtagtacatgcggcatctctacttttttttcttttgacatttaagtttccttgtaccagtattaaatgtttcagagaccttttggcagaatttttaaaaagtgaccttaagtaattttttagtaatttataaattaaaactcatttaaaattacaattttggttttattacctttaaaagttaggcttgacaagctcttttcrtgacagactattagcctaagtacagagatgtggcatatccttattgcttttactcttggttttaaaaaaatatatcagtggcataaacacccaacaccatttattaaatactatgtgcacgatgcaaggtaccctctaggctgatgcaaaattgttatttatatacagtcccttctcccaaagagctatctccatattgcaggtgatagaacctaataaagagatttacaggataatataggctttggctacattttttgtaaaaattagatatgggaatagtaaaac

SEQ ID NO: 268110 - DNA, 562 bp, Homo sapiens
actatgtgatttctctattcagaattggtagaaccaacaaataagcactcagtggaatctgtaaattctttgtagtacatgcggcatctctacttttttttcttttgacatttaagtttccttgtaccagtattaaatgtttcagagaccttttggcagaatttttaaaaagtgaccttaagtaattttttagtaatttataaattaaaactcatttaaaattacaattttggttttattacctttaaaagttaggcttgacaagctcttttcatgacagactattagcctaagtacagagatgtggcatatccttattgcttttactcttggttttaraaaaatatatcagtggcataaacacccaacaccatttattaaatactatgtgcacgatgcaaggtaccctctaggctgatgcaaaattgttatttatatacagtcccttctcccaaagagctatctccatattgcaggtgatagaacctaataaagagatttacaggataatataggctttggctacattttttgtaaaaattagatatgggaatagtaaaac

SEQ ID NO: 268111 - DNA, 396 bp, Homo sapiens
ttacccacatttgttcctaattcctgctctccaaaagaaaccatttatgaaatttctacttaaccatttttacctataaaatggccatttcaaacgactaaatttaatacttttactgtgtrtatggccaagtcataggaaatgtctgcttgttatttaaacatggaactgtttattcaacattgtttttaagaaaaatttgtatgtataaatcttgttcattcattgtagactttagtatatcatatatgtatccattttgctattgatagacatttgggttgtatttattatttgtttctttacaaacagcactgctacagttttattcatgcattcaggtgtatatattttataattttcctaggctatatatttagaaatggaatttctgga

SEQ ID NO: 268112 - DNA, 616 bp, Homo sapiens
tttttgactcattattctttatgatctttttgggtgcttctttgttactttatatgggaacatgcattgtttccattttatatgttgctatatgtataatttgtcatctcttcaacagaaattgcttatagtgattcataggactatgaaatagactgaaggcttatacaaaatgaaaatttagaaaatttaataaattttcaaagaaatcaaaattaataaataagtgcattggaaatgataaatataatgctgtataagcattatagccataactgtaaactctaagcattagaaatacatgaattaactttcagcatggtgttccgcaggagctgggtggcacaargagtggtctgccctttaggaacttccatgtgtcagttctatgtctagagcaagcactatgtactcagcaaagattttttattgtctaagcatattacctcctagaattgctttctctttagtgtttaaatgtctcagttgggaattttggaaggcaatgaaaaaaaagaggccaaggcaccaaaagacagacacaattctttattttgtacactgttttccagttttaaatgtaaataagtttttcatatattatgcaaagagttgg

SEQ ID NO: 268113 - DNA, 651 bp, Homo sapiens
gatagcaaccaaatttggtaagctggaaagaggaggacaaacaggaactgatatgatggatcagagaaaactggaatcaaagcagccattgtagaaagaagtaactcaacctgcatcacagaacctcagaaaagctcaggaattggcattctcagatatctcttgggaagatgggcatgtggtgaagtagaagaattgacataagcaattttggaaaagacatctgacaacaccaaacattttcaagatttaaagcgaaggatcaaaagaacattatttattgttaatgtcttattatacttttatttacaggcatagtcttatggatgtatagcaaaggaaaatttcttttttttaaattatactttaagttctagggtacatgtgcacaaygtgcaggtttgatacataggtatacatgtgccatacataggtatacatgatgggtggtttgctgcacccatcaactcgtcatttacattaggtatttctcctaatgctatccctccccgaccccctaccccccgacaggccccggtgtgtgatgttcaccaccctgtgtccaagtgttctcattgttcagttcccacctaggtgtgtgaacatgtggtgtttggttttctgtccacgtgatagtttgctgagaataat

SEQ ID NO: 268114 - DNA, 439 bp, Homo sapiens
tcctactacctcagagatctttcaaggattagaatgagcatggtacaaataaacttaaatgaattattggcactaaaaataataataatagaatgtcactcacrtgctttcttttagataagataatgatggaaagcccagatgaaaataggatgagataaaggcttatcaatggggactagaacttccctgagaagttacagtgagagggaccacattggaagatgacaaaataagcaatgatcaatttagctatgtggtgctgggctcaatcactaaatagcagatgttcagcaatgtatatcaggtgatcctagaagacaagggatgtctcattctgccaatcaagctataaggctgttgtcatggtaaaggcagcatgtcgttcaaaaggaagaggtcttgaaggctggcacgtctgagtagaaatcctgctagg

SEQ ID NO: 268115 - DNA, 603 bp, Homo sapiens
actgtactattgagctcccagtgaggttttttttttttttaaattttaattattttgttttttgttccataattcttatttargtcttttttataacatttcttttttgggattttctatctttttgcttcaagagaatttataagtcagtgttgaagcatttttatgtttgctttaaaattctcattagataattccaatacacgattcatcttggcgtgaattgattgtatttctctttcaagtttgattttcctgattcttgatatgatgggtattgtatcctgctcattttgtctattacattaggagactctgagtctgatttaaatctcttattttagtaagagtcaccctgtttagatgtattatgtgggtctagagctacttttaaattttcagaacctttgtggtgtcattttggtctgcttggataatctgctgtcgctggggctcccactagtccttcttgttagtactgcctgaagagacaaaaagggtttccctgggccaggcagcctgatatctctcagtggggaagaggagtctcaggcctggtccataaacaccaggaagcttccctggtctgattggttgttgggg

SEQ ID NO: 268116 - DNA, 615 bp, Homo sapiens
gactattaaagctgtagtggtatgagaataatgcatgcttgcatattgttactgtcagtaggtacacaatcaataaaacaatattgtccagtatttcaataaagcagatgtctgataagctaatagcagcttgaaatatgttaaagaataaatattcactaacacttcacacaggggaggaagtamctgtggagtcagagaataaatattgtgtcctccacctccagttggtaaggtacagcagcaattcttggacctgcaggaataggcctggtctgttttgctgtgcattatactcttccctggtagagcttattacaatagcaattacacagttatttgtacaattacttggttaacattttcctcctctgcaaggcactagctggatgaaattagagaccacactcaagtttctgaagacctccaaaaagagcaatgaggggaatacattcactgaaactaattcaaaccagtggtgtcagtgagtatgcacaatagatgatattttattatttgcaaagaatttgtcactacaagtgagaaattatgcaaaaacagtgaagacacttaaacaaatccctaatggccataatcttgtcaagaaatgggcaa

SEQ ID NO: 268117 - DNA, 435 bp, Homo sapiens
aagtaagctagagaagataaaatcttagaaaattataaagaagtgaacatatatttactattcattacrtgaaaatgaataataataaaagttttcatcttcattctttatcctcatcatcatcatgttgagtagacagaagaggagaaagagaagggattggtcttactgtctcagcagtggcagagggagaagaaaaaagtccatacataagtggatctgcacatttcaaactcaggttgttcaagtcaattttctatttatacatgaagcaactgcattatagattctactttggaaattgcttttaaaatttaatttattacatagctttctatgttatagccaaaagatctgttttagacttataccaaagttgcagaatggtacagaaattccatatacacccttcacccagtttcctttgatattatc

SEQ ID NO: 268118 - DNA, 554 bp, Homo sapiens
gtgtcacaagagccagaatagctttaaatattgaaaatgagatttaygccaatgcagtatattgttttatacaaacaacaaatattctgttttctagtgtgtggtgccagggaggaaatgagtttgcagaggcctggtgtagctcagctgatgtcatagactactcttttcatcattgatgtctatggtctaaagatggattcaaggactcacttgaagaagacagacaaggaagaatgaatgctatggtttgaatgtgtcagctctataattcaggtgtttccaatgtgataacatcaagaggtggggtctttaagaggtgattaagtcatgagggctcctccctgctgcatggggttagtgacctttataaatggcttgatggaggtagttcatctctcttgcccttccaccttctgccatgtaaggacatagcaaaaaaggccctcaccagatgccagtgcctgggtcttggacgtatagtgtaatatatttattacaagatattggctcacactattatgaaagttgagaagccccatgaattgccacct

SEQ ID NO: 268119 - DNA, 537 bp, Homo sapiens
atcgcttcagcccaagagtttgaggctgcagtgagtcttgatagcgccactgccctcttgctttgtggcctgggccacagagcaagaccccatctcaaaaaaataataataatgaaacaaattacagaattttgagagaggacattgtaaactagaattctctgcgttattttttgagatggaatatttgtcattttctttccatttaagtataaactttaagtgtgtgggaaaatattaaaagaggaaaataccatttcagatctttaaggcttggtgcacacttagcattccatgcccaggattctgacacggggtgtcacaagagccagaatagctttaaatattgaaaatgagatttacgccaatgcagtatattgttttatacaaacaayaaatattctgttttctagtgtgtggtgccagggaggaaatgagtttgcagaggcctggtgtagctcagctgatgtcatagactactcttttcatcattgatgtctatggtctaaagatggattcaaggactcacttgaagaa

SEQ ID NO: 268120 - DNA, 554 bp, Homo sapiens
gtgtcacaagagccagaatagctttaaatattgaaaatgagatttacgccaatgcagtatattgttttatacaaacaacaaatattctgttttctagtgtgtggtgccagggaggaaatgagtttgcagaggcctggtgtagctcagctgatgtcatagactactcttttcatcattgatgtctatggtctaaagatggattcaaggactcacttgaagaagacagacaaggaagaatgaatgctatggtttgaatgtgtcagctctataattcaggtgtttccaatgtgataacatcaagaggtggggtctttaagaggtgattaagtcatgagggctcctccctgytgcatggggttagtgacctttataaatggcttgatggaggtagttcatctctcttgcccttccaccttctgccatgtaaggacatagcaaaaaaggccctcaccagatgccagtgcctgggtcttggacgtatagtgtaatatatttattacaagatattggctcacactattatgaaagttgagaagccccatgaattgccacct

SEQ ID NO: 268121 - DNA, 527 bp, Homo sapiens
tggtaagagggaggtggggattctttgctctcatggttaagtcccagacccagttaagccctgtgagcctgggccttatgggtatggctttctcagcatcctttctcctactttcataggatggcaaaccctatgawgagtcttgagaatttcctgcctccacccaaaggtatcagatctctgccttataaactgtactggaagctggatctaaggagcctccctgtctgtcttccagagaaggacaagtttttcctctattcctcctggagtagatccttacttggcctcttgtttcctcttttaatgcctcacttaaaggacatatatgtccatatgtaatttttcttcttcatatatctgcatattctcacatttttgacagcacagtagagatctattacttttataaacaatacaattaactattgacatatctctagatgcctaaaaaggtctggcaccccatgatttgtgcaaaatacttgcttccgcaattcacatcctggaatattggatggcaaagt

SEQ ID NO: 268122 - DNA, 527 bp, Homo sapiens
tggtaagagggaggtggggattctttgctctcatggttaagtcccagacccagttaagccctgtgagcctgggccttatgggtatggctttctcagcatcctttctcctactttcataggatggcaaaccctatgatgagtcttgagaatttcctgcctccacccaaaggtatcagatctctgccttataaactgtactggaagctggatctaaggagcctccctgtctgtcttccagagaaggacaagtttttcctctrttcctcctggagtagatccttacttggcctcttgtttcctcttttaatgcctcacttaaaggacatatatgtccatatgtaatttttcttcttcatatatctgcatattctcacatttttgacagcacagtagagatctattacttttataaacaatacaattaactattgacatatctctagatgcctaaaaaggtctggcaccccatgatttgtgcaaaatacttgcttccgcaattcacatcctggaatattggatggcaaagt

SEQ ID NO: 268123 - DNA, 631 bp, Homo sapiens
gcctcttgtttcctcttttaatgcctcacttaaaggacatatatgtccatatgtaatttttcttcttcatatatctgcatattctcacatttttgacagcacagtagagatctattacttttataaacaatacaattaactattgacatatctctagatgcctaaaaaggtctggcaccccatgatttgtgcaaaatacttgcttccgcaattcacatcctggaatattggatggcaaagtaaactacaacttcccatcccatggattttcttgagagaaaatgatagcatcttgaatttgttcaatgccagtaaagtgatttgaagatgaaaactgctacataagtgctaagtattgttattgatcattaagaatcactcaacatagcacaagtgattctcttcattactggcatgaaagtcattttctctaggcaaagggtaaggacttactcataatattgacattttaaaaagygtgttactaggagacatggtgtgctggaaacacttatctttcctttcatttacgccctgatcttggaaatttatatcttgtggagtcagacctgcatttatttgtgtcaaatgctaatgttgctatattataaattttacatgaaactgctgt

SEQ ID NO: 268124 - DNA, 589 bp, Homo sapiens
ttactgttatacatatttgaccgataaactaaagctgagaggttgttacttgatggttgtcacacaggagataaatttctaaaaagtgccatgttactctactgaaggatagggagattttgctttgcccaccttggcgattaggattaagctgaggaagtaaagagatcaaatggggcaaagccctatcatttctaattgcttcctatgttatttctacctctgataatgcgtttattttggaattcaatcttactaaataaagagctttttgctgcaggatttcagtgtggtatgatggaaatgaaataggatcaagacattaaatttctattcttagctctgtcyccaattagtgactgttattttttctcatatactcagtaggataacaatatatttcatacttttattagaatcgtatgagattaacagatgtggaaaaattaaagtggtaaattacttcttatccatactatcgccttggagcatttctttaacacttgggtttattccctgacatattgagaagttgatgaaatagtcatcacatgtttcctatgttttcattatcactctgccagtggat

SEQ ID NO: 268125 - DNA, 569 bp, Homo sapiens
actctccaaactatcttaaggtcttgtatcgaaaatggccttgtgtcttaagcagtgtctgactttgggaacaggtacctgaggggaggttagagagagcaggctaygacatgcctttagagccctcatctgcaagatgaagacaatcaaggacagatatcaattcatttcaaagaactatttcatgcactgtgctgcttaaagcactatgtatttgtcagcgaggtttgaccaaactacctacatgaaaatatcaccaaattattcatctggtgttttcctctaaagttaatacagtgaaatgataaagcagtttggacttgcctacagaaaaaggatggcagaacgaacgtgattatctggggaattcagacctcaaaactactttttaacagaaatatccacaagctacatatttttttctttaagaaataccctagaaagcaccctcagttgtcaagttccgtctccttgtgggactccttataccaagaactccacgtggaagggaacaaacagggtgtctgatgtgagatgaaatctccagggccacacaaggggcctcatat

SEQ ID NO: 268126 - DNA, 569 bp, Homo sapiens
actctccaaactatcttaaggtcttgtatcgaaaatggccttgtgtcttaagcagtgtctgactttgggaacaggtacctgaggggaggttagagagagcaggctacgacatgcctttagagccctcatctgcaagatgaagacaatcaaggacagatatcaattcatttcaaagaactatttcatgcactgtgctgcttaaagcactatgtatttgtcagcgaggtttgaccaaactacctacatgaaaatatcaccaaattattcatctggtgttttcctctaaagttaatacagtgaaatgataaagcagtttggacttgcctacagaaaaaggatggcagaacgaacgtgattatctggkgaattcagacctcaaaactactttttaacagaaatatccacaagctacatatttttttctttaagaaataccctagaaagcaccctcagttgtcaagttccgtctccttgtgggactccttataccaagaactccacgtggaagggaacaaacagggtgtctgatgtgagatgaaatctccagggccacacaaggggcctcatat

SEQ ID NO: 268127 - DNA, 610 bp, Homo sapiens
gacacgcaggacacaaacatcctaatgaaggagctgttagtttatacttttaagatgacacctattataaaaataaatatttctaactatgttaaactctctaaattaactaaattgcttttcagcagatttccctgacattgcaggtatttaggagattgtttaaaagctagacaccagttttgagacatctagaggayagtgttatattttgcagccaattatgttcatgccatcagtgcaaggcagatctgaggtcttccttggtaggtggggcatgttactaggattttcttctgcaaattctgatcctacctgccagaaatctttcatctgctggcctttattatgctagtagaagctgttgtttactcaaacccactgtcctgctgaacactggaagtctttgctgtggccgtctttgctgcagggatacctcagtgtgcttctcttccacgctcacatctctggtcatcattggtaaatgtcccttgaacttcgttgttacatgacttcctgttgtaggtggctttatctgtcttgttcacagcacacactcagaaaaaagtggtattttcattgagtgcatgcacttacgatgatgacccta

SEQ ID NO: 268128 - DNA, 610 bp, Homo sapiens
gacacgcaggacacaaacatcctaatgaaggagctgttagtttatacttttaagatgacacctattataaaaataaatatttctaactatgttaaactctctaaattaactaaattgcttttcagcagatttccctgacattgcaggtatttaggagattgtttaaaagctagacaccagttttgagacatctagaggacagtgttatattttgcagccaattatgttcatgccatcartgcaaggcagatctgaggtcttccttggtaggtggggcatgttactaggattttcttctgcaaattctgatcctacctgccagaaatctttcatctgctggcctttattatgctagtagaagctgttgtttactcaaacccactgtcctgctgaacactggaagtctttgctgtggccgtctttgctgcagggatacctcagtgtgcttctcttccacgctcacatctctggtcatcattggtaaatgtcccttgaacttcgttgttacatgacttcctgttgtaggtggctttatctgtcttgttcacagcacacactcagaaaaaagtggtattttcattgagtgcatgcacttacgatgatgacccta

SEQ ID NO: 268129 - DNA, 610 bp, Homo sapiens
gacacgcaggacacaaacatcctaatgaaggagctgttagtttatacttttaagatgacacctattataaaaataaatatttctaactatgttaaactctctaaattaactaaattgcttttcagcagatttccctgacattgcaggtatttaggagattgtttaaaagctagacaccagttttgagacatctagaggacagtgttatattttgcagccaattatgttcatgccatcagtgcaaggcagatctgaggtcttccttggtaggtggggcatgttactaggattttcttctgcaaattctgatcctacctgccagaaatctttcatctgctggcctttattatgctagtagaagctgttgtttactcaaayccactgtcctgctgaacactggaagtctttgctgtggccgtctttgctgcagggatacctcagtgtgcttctcttccacgctcacatctctggtcatcattggtaaatgtcccttgaacttcgttgttacatgacttcctgttgtaggtggctttatctgtcttgttcacagcacacactcagaaaaaagtggtattttcattgagtgcatgcacttacgatgatgacccta

SEQ ID NO: 268130 - DNA, 568 bp, Homo sapiens
aattttgtcctttcttcattccacaagcaagagagatgagaccaagaagggagataagaatacgcatcttatcttatttttcttttttttttttttttttttgagacagagtctcgctgtgtcgcccaggccggagtgcagtggcacgatctcggttcactgcaacctccgcctcctgggttcacgccattctcctgcctcagcctcctaagtagctgggactacaggttatcttatttttctaaaaatcacatttagggaggtaatgtaaacagaaagckaaagtaaagagaagggtggccaatgactggacacagcagaaacaaagaaacgaaaaggacttttattattgaatgggagttgtaactgagatttattgaatccttgctatgtagcaaatactgccctaaacattttatttattattttttaaatcctcactcttttaataagtaccactcaattaatagttattattaatttatttaatttacggaaggccaatgaggatccaagaaatgaggtctcttgcctccctcctcacatatttgagatgatgctgtaagtg

SEQ ID NO: 268131 - DNA, 568 bp, Homo sapiens
aattttgtcctttcttcattccacaagcaagagagatgagaccaagaagggagataagaatacgcatcttatcttatttttcttttttttttttttttttttgagacagagtctcgctgtgtcgcccaggccggagtgcagtggcacgatctcggttcactgcaacctccgcctcctgggttcacgccattctcctgcctcagcctcctaagtagctgggactacaggttatcttatttttctaaaaatcacatttagggaggtaatgtaaacagaaagcgaaagtaaagagaagggtggccaatgactggacacagcagaaacaaagaaacraaaaggacttttattattgaatgggagttgtaactgagatttattgaatccttgctatgtagcaaatactgccctaaacattttatttattattttttaaatcctcactcttttaataagtaccactcaattaatagttattattaatttatttaatttacggaaggccaatgaggatccaagaaatgaggtctcttgcctccctcctcacatatttgagatgatgctgtaagtg

SEQ ID NO: 268132 - DNA, 535 bp, Homo sapiens
aagtgtctcattctctactggagcagggaacaaacaggcagctagaggacccgaaacgtgggaggttgtccctagtgttaagaggggtgacttaattatgttttttcttagttcaaaggatgtttcttttaagtttaggctgaaagtatagagtctcctgtattggtaggaagcccaatattgtatcaatttgagatctaggtttgctggcgtcacataccgtacacgcccagggcgtgaaccaggcctttgcggccaagttctagggsgctttggagacccggaacctcccgaatgtcagcgagaggcaggcgccagccgctctgcccaggcctgccccgcgctgcacatgattcagtgggttggggtgaggtagggtgtggaagcaacacaggaatgggtcacgaatagcaaatagtctctttccaaaaggagatcatgtacagacattgtactgggtctttgggaatgccgcaggggatcctgcgggaacagcgagaaagagggagagaggggctcgcagttacaaaagaag

SEQ ID NO: 268133 - DNA, 550 bp, Homo sapiens
gtgtggagaaaagggaaccctagtacactgttggtgaaaaatgtagattggtgcagccattatggaaaacagtatggagttcctaaagaaattaaaatagtactagcatatgacccagcaacccctcttctcaatctatacccaaagaagacgatatcaccctgtcaaaaagatgcctgcactcccatccatgttcattgcagcattattcacaatagctaagatacggaaataacgttagcatccctggacaaatgactggataaaaaaaccaggggatatatttacaacagaatattattcagccttaaaaaawaagatcctgccatttgccgtgacacggaggcacctagaggacactacactacgtgaaataagccaggcaccaaaatacaaactgcatgatgtcagttatatgtggaacctaaaaacaaaaggaaaaggtcaaatatatagagatagcgaatgataccaccattaccaggagtgaaggatacaggaggaaatgaggagatgtagatcaaaggatacaaagtagcagatatatagg

SEQ ID NO: 268134 - DNA, 543 bp, Homo sapiens
gagggaatgagggctgagagaagttaaacagggaagagagagccaaygcaaggacacattactgagttggccattgctacaggcaactggatgctttttaccatggattcatgtgagaaactttatgaagagtgtctcagacccctcccttcattgtgaataaaagcagttgcatgtatctattaattcccattctctaatgatcaagggttgctaagcagggtattgattatcctatcctccaggatgtgcccttatatgttctaagtgtttttccacagacatcttaaatagagaagatccagccaaagaagcaaaagatataacatgattttgagataaggcaggcaggcagtctgcaagtgtgtgaagctggttgaagtcggcctgggattggtcactacaactatggctagaatgagagggagggctgaggcaatttgaaatggtgtacaagaggtatcaaatatggagacatttaccatgttcatgaacaagaagcctcaatattgtaaatacattaattattttcaaacaatacta

SEQ ID NO: 268135 - DNA, 543 bp, Homo sapiens
gagggaatgagggctgagagaagttaaacagggaagagagagccaatgcaaggacacattactgagttggccattgctacaggcaactggatgctttttaccatggattcatgtgagaaactttatgaagagtgtctcagacccctcccttcattgtgaataaaagcagttgcatgtatctattaattcccattctctaatgatcaagggttgctaagcagggtattgattatcctatcctccaggatgtgcccttatatgttctaagtgtttttccacagacatctkaaatagagaagatccagccaaagaagcaaaagatataacatgattttgagataaggcaggcaggcagtctgcaagtgtgtgaagctggttgaagtcggcctgggattggtcactacaactatggctagaatgagagggagggctgaggcaatttgaaatggtgtacaagaggtatcaaatatggagacatttaccatgttcatgaacaagaagcctcaatattgtaaatacattaattattttcaaacaatacta

SEQ ID NO: 268136 - DNA, 584 bp, Homo sapiens
tgtggaaacttcatatttgacagagatgatagtgtaaacaactggggaaaaaataaagtatgcttgaataattggttatctctataagaaaaaaatgaaatttggatttcttactcagaccattcacaaaaatcaattctcattgtatttaagacttaaatccaaaaggctaatttctaaaccttttagcagaaagtagaagagaatattgctacattaggatacaaaagactttcttacatgaaactgttaagaaaaagtaattgacaaagtcaactaaattaatgttaagaatgttaatcaaaatataacataaatagaatggtaaaacgacacaaattttgaagagaatayttccaactcataaaacacacaccaatgttttacaactttgagtggaattagatccagatattaatgcaaaggcagtagatgaagaatcagctcacctaaaagcagaaccagctatgtctccactgtttttcaacaagggtcccattggtattttgggctggaccattctttggtgtaagacaatgccctgcattgcgggagttttatcatcctggtgtccacttcttaaa

SEQ ID NO: 268137 - DNA, 584 bp, Homo sapiens
tgtggaaacttcatatttgacagagatgatagtgtaaacaactggggaaaaaataaagtatgcttgaataattggttatctctataagaaaaaaatgaaatttggatttcttactcagaccattcacaaaaatcaattctcattgtatttaagacttaaatccaaaaggctaatttctaaaccttttagcagaaagtagaagagaatattgctacattaggatacaaaagactttcttacatgaaactgttaagaaaaagtaattgacaaagtcaactaaattaatgttaagaatgttaatcaaaatataacataaatagaatggtaaaacgacacaaattttgaagagaatacttccaactcataaaacacacaccaatgttttacaactttgagtggaattagatccagatattaatgcaaaggcagtagatgaagaatcagctcacctaaaagcagaaccagctatgtctccactgtttttcaacaagggtcccattggtattttgggctggaccattctttggtgtaagacaatgccctgcattgcgggagytttatcatcctggtgtccacttcttaaa

SEQ ID NO: 268138 - DNA, 635 bp, Homo sapiens
ggaagtggctgccttaagccagtcggtaaatctgatcacatcaatcacagagattaattcaaaagaaagagtggcacatgacccaagtcagtccaaccagggccaggagaactcacttctggggttttgcttgaggtgtcaggaggcagactcttttcccagtagaagtgctgggaagcatgtgggtaggagctgcttgtccccattctgggaactttgagaatttagccctcatggaggaagyaggagcaagaactagagagataaacctaggcccagtcacagagactgaaccctggataaagtctaactcataacctgcaacattcagtgtcgtgaacctccacatttccatttttacttaaggaacttggaatccattttctgtcacatgcaacccaaagcatcctaactgacacacctgtgaaatcagagtattttcttagataacctataaaatcatcctagaagatctataatctttaaaattcttttaagttaaatagactgattaaatgacacaatcatatctggaaaatgctgtgcacacaaattggatagagaccatatcttctgttaacttgtaaactaatgcagaaatattcttttggctactctttggcaaatattctgag

SEQ ID NO: 268139 - DNA, 519 bp, Homo sapiens
ggatgggaaatgatgctgaacaaacaaaaaccatagcttcccccaatcactgcagactgyctactcctgatgaaactacatgccctaaagaaaagatttccacaatgtggggaggatcaacccaaaaaaagggatggaacttatggattctttgtaagttttcatttattaaaacctttaaaccaatcagtcagcactgaaagatcatttacacctgaaccaatgcatgagtggtcatttgaatattgtgttgtctatgtgatgggttcctttcaacattttctgagaaatctaaaatcatgcgtgtaatgtgaagtcatgaatttggagaatataatgttgaaatggaaaataaattaggcaaatcttgatgatttacacccaaagctttgtgggaaaagtgatttaaattaaattttataatgtggaaaataaactaccacccaatgaaattttataacttgcatgaaaattcaaactgagggatttcacattactttacttcatcaatttaaaaat

SEQ ID NO: 268140 - DNA, 519 bp, Homo sapiens
ggatgggaaatgatgctgaacaaacaaaaaccatagcttcccccaatcactgcagactgtctactcctgatgaaactacatgccctaaagaaaagatttccacaatgtggggaggatcaacccaaaaaaagggatggaacttatggattctttgtaagttttcatttattaaaacctttaaaccaatcagtcagcactgaaagatcayttacacctgaaccaatgcatgagtggtcatttgaatattgtgttgtctatgtgatgggttcctttcaacattttctgagaaatctaaaatcatgcgtgtaatgtgaagtcatgaatttggagaatataatgttgaaatggaaaataaattaggcaaatcttgatgatttacacccaaagctttgtgggaaaagtgatttaaattaaattttataatgtggaaaataaactaccacccaatgaaattttataacttgcatgaaaattcaaactgagggatttcacattactttacttcatcaatttaaaaat

SEQ ID NO: 268141 - DNA, 519 bp, Homo sapiens
ggatgggaaatgatgctgaacaaacaaaaaccatagcttcccccaatcactgcagactgtctactcctgatgaaactacatgccctaaagaaaagatttccacaatgtggggaggatcaacccaaaaaaagggatggaacttatggattctttgtaagttttcatttattaaaacctttaaaccaatcagtcagcactgaaagatcatttacacctgaaccaatgcatgagtggtcatttgaatattgtgttgtctatgtgatgggttcctttcaacattttctgagaaatctaaaatcatgcgtgtaatgtgaagtcatgaatttggagaatataatgttgaaatggaaaataaattaggcaaatcttgatgmtttacacccaaagctttgtgggaaaagtgatttaaattaaattttataatgtggaaaataaactaccacccaatgaaattttataacttgcatgaaaattcaaactgagggatttcacattactttacttcatcaatttaaaaat

SEQ ID NO: 268142 - DNA, 584 bp, Homo sapiens
gatgtatttaataagtgttaatctctttaattttagtagttccatgtaaccaagtaagtattctttcactctacaagctcgtttactagcaaatcaaactaaaatataactagaacatgatactaaatgtataatggttaatcattacagaaggtatcctctaactgcaaaacattttgatctttgatttcaacttatctagagacatgtttttacggtggttggactgtgccataaaaagggtgtgaaagatgctgactcagttttactacattatagtagactcattccacctatgtcatttagaggacaactctgtgctgcctaagtgaagaattaccttctgtgcctgggttataaaagattccaatctgtctgggcatgcctaagaaagctgaaggcatgagaatttggaagcgtcttggaaaagctacctagctttgtgacccatcttacatgtataaaacacaaagtgaaaagagtaatttgtcttccaggatcttcttcattctcaaataccaccctgctttgacartctcaaagggtgttggttatgaagcctggtgaagcagctgcttggctct

SEQ ID NO: 268143 - DNA, 525 bp, Homo sapiens
tagtgcttggttcctttggagaayaccaggatgatgatcagattcattaaaagttatttgtaataaagaagagatggttcctcaattcagtggctgaactggtctcagaggacctcccaggaaccccagcagggcagcaggtatggatgtcatgaggtagaaaagcttaagttaagtggcttcagaggtcatacctataccatatagcagacccagaaaaactctgggataagtctgcccagacctcagaaaggacatgatgagagtgactgtcagaaattttactgctaacagcttagaactcaaattacagatacagtaatccaaaatcccttgattatacctccttggaggagtcaggaaagtagaagttaagaagatgcttgacctcttctctctcacttatttgtcttctctttgctattctttatgcctaaaactctccttaaagttttccctaataaccactcatttccaagtgccccttgtattgcatgctcattacagcattactgccctacacag

SEQ ID NO: 268144 - DNA, 544 bp, Homo sapiens
gtatgtatatctataaatttattaacacatttatacatacatacaagctttataaaccttaatcaagtcattggacctttttcaggctcctttttaaaaatgaagtttataaaaatcactccattgttgtaaggattaaatgaaactggattagaaattktatacaatgcatttgacttgtggtaaacacactgctttcctacccataaccaaaaatgtaatcttatatgttagtaaagtttcagatcttacacaagagctttttttctatgattacagtaagcttagctcctatagacatggtgatatttggatacaaatcttgactttaatgtaattgtattgccagcatgtgtttttccttagcacacactcataaaaatggattgaatgaaagtcaagcataacgatgtacttgtagccagatctgcttcaagaaaactgtgtttgaacaagcttcaatttttaacacatatctgtaatatcatgaataaatgaatcagatggcatgaggaatctcctatgaaccaaagttaaagaggga

SEQ ID NO: 268145 - DNA, 580 bp, Homo sapiens
tttaagaagaacatcccatcacttgagctatttaatatgtcctagggattgcaaaatacaataaaaacaaatactttttggataatattgccacacaatattacaattcacaaataactatgtggaggaagtcacctaagaaagacgatgttcaggctgggcrtggtgggccacatctgcaatcccagcactttgggacccaaaagcaggaggatcatctgaggccaggagtttgagacaagcctgagcaacagagcaagaccccatctccataaacattttaaaaattagccgagcatggtggtgcacgcctgtagtcccagctacttgggaggtcaaggcagtaagttcacttgaatccaggaggtcgagcttgcagtgagctatgatcccaccactatactccagcctaggcagcagagtgacatcctgtctctaaaaggaaaaaaaaaatgtacaaaagacatggtggggaggtaggggggtggggatgtggtcgaatgagcttttggtgtgtcttgagttgagaatcttcctaaacttttaatccccagggaaaggaattttaaaaacatagttc

SEQ ID NO: 268146 - DNA, 580 bp, Homo sapiens
tttaagaagaacatcccatcacttgagctatttaatatgtcctagggattgcaaaatacaataaaaacaaatactttttggataatattgccacacaatattacaattcacaaataactatgtggaggaagtcacctaagaaagacgatgttcaggctgggcgtggtgggccacatctgcaatcccagcactttgggacccaaaagcaggaggatcatctgaggccaggagtttgagacmagcctgagcaacagagcaagaccccatctccataaacattttaaaaattagccgagcatggtggtgcacgcctgtagtcccagctacttgggaggtcaaggcagtaagttcacttgaatccaggaggtcgagcttgcagtgagctatgatcccaccactatactccagcctaggcagcagagtgacatcctgtctctaaaaggaaaaaaaaaatgtacaaaagacatggtggggaggtaggggggtggggatgtggtcgaatgagcttttggtgtgtcttgagttgagaatcttcctaaacttttaatccccagggaaaggaattttaaaaacatagttc

SEQ ID NO: 268147 - DNA, 583 bp, Homo sapiens
catcactgaacaacctgccttttaaggtctgccatgaggtataacacatgaaattgttcaaaggtaaggaaatagagcgtgacaggtgagaaaaacatctaacacattcctkctcttctctaacaggttttccttgtgttaactcccttcttccccctttgctgtggtgtctacacaatcgggcactttctcttccaaacgctgagccctcataagtgctccctgacggaggacttaacagagaagcagttgaaagtagacttggcttctggctcctaagatgataagaaaactttgccatttccccttcatgtccactagctttatcagatggaagaaatgagtgaatgactcacagtcactagcaaatcacaggcggaggaggcaggggctgccttagagccctgtggacttcagcgtggccttttgtctcccatgccacagcctgtgtgggacacatggcagggacatcagggaggcagccactcttggcccgctcatcaccaccatccacgagactccacaggttccacgaggggcattaaaaataaccctgtctacatgggaggccttacaagagtgg

SEQ ID NO: 268148 - DNA, 583 bp, Homo sapiens
catcactgaacaacctgccttttaaggtctgccatgaggtataacacatgaaattgttcaaaggtaaggaaatagagcgtgacaggtgagaaaaacatctaacacattccttctcttctctaacaggttttccttgtgttaactcccttcttccccctttgctgtggtgtctacacaatcgggcactttctcttccaaacgctgagccctcakaagtgctccctgacggaggacttaacagagaagcagttgaaagtagacttggcttctggctcctaagatgataagaaaactttgccatttccccttcatgtccactagctttatcagatggaagaaatgagtgaatgactcacagtcactagcaaatcacaggcggaggaggcaggggctgccttagagccctgtggacttcagcgtggccttttgtctcccatgccacagcctgtgtgggacacatggcagggacatcagggaggcagccactcttggcccgctcatcaccaccatccacgagactccacaggttccacgaggggcattaaaaataaccctgtctacatgggaggccttacaagagtgg

SEQ ID NO: 268149 - DNA, 552 bp, Homo sapiens
ttcaatttccatagtaaatcaacttttgatttttttatactctatatacktttctaccattattaaaacaataaataacatccaagaaaagaagtaaaacttattccttaaaaatccaattttattaaaagaaaataaaatcttattttggaatacagcaattatttggcttatgtgaacatacagtgttggatgcgtaatgctaataattcacctaacccctaaaggagaagttagttgttttataagagtagttcatgtcccattgatcttcccttattttttcagagacacatcgtcatgcaaatctggactcacatttttgaacctcagcttcttcacccagataattatgacaacagtcctcacctccaaggattgatctgtgagttaaatgaaataatgtacatgaatgcttatcgccttcagcatttaaaaatattaatagtagtagcagcagtagcaagagttgtaatgtgaaagtacatggatgagaaagaggggaagcacctgaattaaatttttcatgacattaggcatgataatccgatt

SEQ ID NO: 268150 - DNA, 573 bp, Homo sapiens
ataaccctgctgaccaaaacaggatctggtccagagaggagaaactgaagaaatcagcagaaaccaacagatggcagagaggctgatccctggctgccctcattgcttagttgcataagatacttccaccagcaccatcacagtttacaaatgccatggcaacaaaccagaagttaccatcccttccatggccaccaccaagaagttaccatccctttcctggaacatcctaaataacccactcctcaatttgcattaacctgcccctgagtttgcatagaattgaagtgtgtaaaagtgagtgtaaatatagctgccaatagcccatatgttgctgactctgggcccactgcctatgagttagccctgctccactaggagcagtaccagtcaataaaagattgctaacactactggcatgtccttgaattctttcctgagcaaagccaagaaccctcctgagctaagcccctattttggggcatcaattccacgagtacttgtggagtgcrtgtacatgatgaacacttttgcacactggagatatgggagagaacaaactatacaagatga

SEQ ID NO: 268151 - DNA, 492 bp, Homo sapiens
acaagcacacagccctagagactaccacggggctgcagcccraagtgctcaccctggctcctgcacctggcggtctgtgtgctccctctcccacaaggggtttgagctcatggtggtcgaatagagagccgcacccctgtcatccaccctgtgcaggtggggggagggcagggaactctcctgtttcatcacactcaaaaacaagatgtataaaattatcattggtctcaagtctgtgattgatatgtatatatctgcccatgtgttttttactatgtctatatttatttgttaaaagtagatgtggtacacaacaaatgtatagaatctttatttgttaattaagaagctgaaaaaaattgcagtgtggtatgcagcaaataaccaactggacgttagaaaattggatgacacaaggccttcctctacctcttggcagattgacctttcatacaagatttaattacttggaccctagtttcctaatttata

SEQ ID NO: 268152 - DNA, 599 bp, Homo sapiens
cagatcttcaggatgaggatcaggagctggatcattcacaggccagagagtgataagagcaccactgctgtcggcaagtcagggaagcccttccatgccggagcagcacagttactctcagtgaaagccacaggctcaggctggccaactgtcacatcaaggaatgctgggaaagcaaaagtccccagggcagtgtttatagagacttttatatccagtggtgctagaaaaatccatgatgaacccctcaagggagggttacagcatagcctactagaggtctggaacaagaccatgtattctgcagcaaagaaaaggtaactgttgggagggtagctattgcagtgttgctgggccctactagagactgagcacctgatcatgggacatcatgactggggtgatgtccatggtgagctggatattatcagtccaggtggatgcagcagcaatgtctcttrtgatggaaatggtacatttctgatgagcctcaagtaggctcaggagccacaggtgagacacatttagtatgtgactcagaatcctttgttctctatgttataactcctttgttatagctatggtctcatgggggctcc

SEQ ID NO: 268153 - DNA, 599 bp, Homo sapiens
cagatcttcaggatgaggatcaggagctggatcattcacaggccagagagtgataagagcaccactgctgtcggcaagtcagggaagcccttccatgccggagcagcacagttactctcagtgaaagccacaggctcaggctggccaactgtcacatcaaggaatgctgggaaagcaaaagtccccagggcagtgtttatagagacttttatatccagtggtgctagaaaaatccatgatgaacccctcaagggagggttacagcatagcctactagaggtctggaacaagaccatgtattctgcagcaaagaaaaggtaactgttgggagggtagctattgcagtgttgctgggccctactagagactgagcacctgatcatgggacatcatgactggggtgatgtccatggtgagctggatattatcagtccaggtggatgcagcagcaatgtctcttgtgatggaaatggtacatttctgatgagcctcaagtaggctcaggagccacaggtgagwcacatttagtatgtgactcagaatcctttgttctctatgttataactcctttgttatagctatggtctcatgggggctcc

SEQ ID NO: 268154 - DNA, 594 bp, Homo sapiens
ctttcttgtgctttgtccctgatggttgaagggagtgagtaaaaagccctggagcctggctagcagatgtgtggccacactctcatcacaagaaatacaagagaagaaagaatctttctgaaagttgatagcaaatgatatttctatcttagcagcctaaatatgcatagtttatatgggcttcaaagggggatctctacagctagagataatactgattgaggtattcacgatacggcaatggacagattgccttcatatgcgctgtactgtctgaggtccagtgtgtaagatttatctagatgggcaccatattttgaaaagactaattcaggatatgggaagcttaagattgccttcatttgcactgcaatgtcctaggtccaatataagattatctggatgagcacaatattttggaaagagtagttcaggaaatatcaccacctamgaaaggcatgtattttttagcagaaactgcagtgagagacagatgatgcatacattgcaagcttctaattctagcaaaggggtacaggtcctaccatggccactctgagtagccacctcagacaagcatgacatgcatagcca

SEQ ID NO: 268155 - DNA, 530 bp, Homo sapiens
gtgactttgtaaacataattttagaaagaacactgttcaacatgaaaagaatcactaaataactgtgccctgcaccatgtagcattctttttcatttcccttacatccagaaggaacttagcaatatgtctgctcagtatggatttggaaagaggaaaaataatagtaacaatagtaataataacatctgtatcagtcagggttcaaggaaagtatcaagaaccatcataggtaatgtgtagtagtccattttcacgctgctataaagaactacctgagactggggaatttataaagaaaagaggtttcattgactcaattccacatggctggggaggcctcaggaaacttacaatcagggtggaaggtgaaggggaagtaaggcacgtcttacatggcagcaggagatgggcggagtgccwcacttttaaaccatcagatctcatgggaactcactcattgtcaccagaacagcatgggggaaaccacccccatgatttaactacctcccaccaggtccctcccttgac

SEQ ID NO: 268156 - DNA, 632 bp, Homo sapiens
tgtaaatggtagatcaaattcgcatattaacaactttggaagtaaaaacttcaatactctatctgtagccaaatattaatattttagtcattaagcctaattgcggagaagttatacaataaacaagatgaggctatattcttgctgaggtatctatgtgaagggtagcactctagaactctggagttaaaaagaacatgcaatatccctgaatttggcctcctactttgtttgggcaaggattgtctccaaaaactgacctccgagaagtagaatttagcctgttaaatacttacagtaatgggtcactcactgcctctgtcttgttttcrgggctgctgtaacaaattgccacaaatttagtggcatgaaaatcgcgatttatcatctcacagttctgaaggccagaagctcaaaggtgtttggccgggctgcacccgctacagggcctgtagtggagaatccatttgtttctagtttttcgtggcgtctggcttccttagctagtgccacattgctccaatctctgctccgtcttcacattatcttatcctctgtgtgtctcttaaaaagagacttgttactaaatttagggatcacccaggtaatacagaatgagtttctcatctcaa

SEQ ID NO: 268157 - DNA, 587 bp, Homo sapiens
aatccagctgtaaatccacctggtcctggagttttttttgttggcactttttaaattaccatttcaatcatgctgcttgttattggtctgttcagaatttctatttcttcctggattaatataggaggcttgtatatttccagaaatttatccatctcctctaggttttctagtttgtgcatgtaaaggtgttcatagtagccttgaatgatctttagtatttctgtgataycagttatactatcatctcctgttttgtttctaattgagcttatttggatcttgtctcttctattcttgattaatctcactaatggtctatcaagtttatttatcttttcaaagaaccggctctttgtttcatttatcttttgtatttcctggtttcagtttcatttacttctgctctggtatttgtttttcttttcttacgctgggtttggatttggtttgttcttgtttctctagttccttgaggtgtgaccttagatgtccatttgtgctctttcagactttttgatgtaggcatttaatactatgaactttcttcttagcaccgcttttgctgtatcttagaagttttgata

SEQ ID NO: 268158 - DNA, 567 bp, Homo sapiens
ctgtaaatccacctggtcctggagttttttttgttggcactttttaaattaccatttcaatcatgctgcttgttattggtctgttcagaatttctatttcttcctggattaatataggaggcttgtatatttccagaaatttatccatctcctctaggttttctagtttgtgcatgtaaaggtgttcatagtagccttgaatgatctttagtatttctgtgataccagttatactatcatctcctgttttgtttctaattgagcttatttggatcttgtctcttctattcttgattaatctcactaatggtctatcaagtttatttatcttttcaaagaaccggctctttgtttcatttatcttttgtatttcctggtttcagtttcatttacttctgctctggtatttgtttttcttttcttacrctgggtttggatttggtttgttcttgtttctctagttccttgaggtgtgaccttagatgtccatttgtgctctttcagactttttgatgtaggcatttaatactatgaactttcttcttagcaccgcttttgctgtatctt

SEQ ID NO: 268159 - DNA, 598 bp, Homo sapiens
tcactctttccactaatagcctggttgagctttctgtgggctttggtttccagctttcactggcacaccttcaggtctgctttgcttcacactctgcccctagcagacaagtccctcctgcccacaaggttccctggtctgcagtctcaaacctgattcactgttccaggggatgggaaggaatctgacagtgctgcccaagtgctagtgcaataaaagttgcaactccccaactcccttcagacattttaaagaaaataacagaaataagtaagaattcaattgaagatttggaaatctaagttttctatcaaaaatgtttaaaagaacataaaatctctgactcaagatttaaactgtgaactacagctgtgtgtaagattaggtcatatgatttatgtgtttgaattttttatagaaaaaaataaaatatcyatttacatttacttgccctatccacaaattattgtacacactgacagaaatgtattatgctaggttttttaatggtgctttgcctgaaggtttttttaatcacaaattttctcaggacctcatgcacacaaaactaactacagaataaaagccacctaaagta

SEQ ID NO: 268160 - DNA, 608 bp, Homo sapiens
aaactggtctgctgcttaacattgyttttcaaagatctgctgaaaacattacttctttaacaactacagtgtaatttctgccaattgccacttgttgatacctcctaggaaaccaccaaaaattagctggaaaaatatgttttgaaatgtttaagaggaaaattatttcctttgaatatctgtagaaagcaatataccatgatttttgagggctgtgttgctgccaaaaaatgtgtttgtctaagcagaacttgaggtacgtgaaattttacattttctataaacttaaagctgtaaccatcaacaactctctggctactttcttctctctggttaacaacacttaataatagggtatccagagagttatgaaagcttactctttatagatcttcaatcaagaaaacggccttgtccttggtaagcttacgtgtagttctctcattggagaaactgttctaagcaaatcatgaagtcctactttctccccagaatattaaggtatcaggtgcccaaactggaaggttctactggtctcgggaaacctcaggcaaactggactcttaccagttgcctttgatattcttaaggaattaatttgaaaaact

SEQ ID NO: 268161 - DNA, 592 bp, Homo sapiens
agtattttgtttcagtgatcaatggggaaaagagaattcagctaatcatctctctggccttgtcatagctaaataggggcatccgtacgtctgcccctatgggacttacagatgcgggggaggatttttttcyagaatataaaggtgtagggggatctcttaatccccactatgttccagaagcacagggctcaggtaaaattcaacatcgtcagatcatacaattaacaatgacaacaacaaatcatttaggtagtatgatgctgtacagcattagaaatagaataagtgaatataatgggagaattgaattaattcatggaaaatccaaataaggtaaaggaatgttaataatgttttagctgaaaagaatgtcttcaaagtcatttaatattaaagacactacagcagtgaaaatgtcctgttaaaggcaaagggaaagtcaacttttatgccttactgatgttgcaagaaaatctaaactggcctctagaaacctatactagtgttgagttacatagaaagggttccaagagtggtgaaaagagctatgatccaagcatcatcctcttgtctcagattatgagcttag

SEQ ID NO: 268162 - DNA, 592 bp, Homo sapiens
agtattttgtttcagtgatcaatggggaaaagagaattcagctaatcatctctctggccttgtcatagctaaataggggcatccgtacgtctgcccctatgggacttacagatgcgggggaggatttttttccagaatataaaggtgtagggggatctyttaatccccactatgttccagaagcacagggctcaggtaaaattcaacatcgtcagatcatacaattaacaatgacaacaacaaatcatttaggtagtatgatgctgtacagcattagaaatagaataagtgaatataatgggagaattgaattaattcatggaaaatccaaataaggtaaaggaatgttaataatgttttagctgaaaagaatgtcttcaaagtcatttaatattaaagacactacagcagtgaaaatgtcctgttaaaggcaaagggaaagtcaacttttatgccttactgatgttgcaagaaaatctaaactggcctctagaaacctatactagtgttgagttacatagaaagggttccaagagtggtgaaaagagctatgatccaagcatcatcctcttgtctcagattatgagcttag

SEQ ID NO: 268163 - DNA, 592 bp, Homo sapiens
agtattttgtttcagtgatcaatggggaaaagagaattcagctaatcatctctctggccttgtcatagctaaataggggcatccgtacgtctgcccctatgggacttacagatgcgggggaggatttttttccagaatataaaggtgtagggggatctcttaatccccactatgttccagaagcacagggctcaggtaaaattcaacatcgtcagatcatacaattaacaatgacaacaacaaatcatttaggtagtatgatgctgtacagcattagaaatagaataagtgaatataatgggagaattgaattaattcatggaaaatccaaataaggtaaaggaatgttaataatgttttagctgaaaagaatgtcttcaaagtcatttaatattaaagacactacagcagtgaaaatgtcctgttaaaggcaaagggaaagtcaacttttatgccttactgatgttgcaagaaaatctaaactggcctctagaaacctatactagtgttgagttacayagaaagggttccaagagtggtgaaaagagctatgatccaagcatcatcctcttgtctcagattatgagcttag

SEQ ID NO: 268164 - DNA, 565 bp, Homo sapiens
ttataatcagttatcttaattataaaaataccagatttaagtttgtcttattgaaaatagtttttaaaaactcaacagttttcacaaatgagttacttaaacaaattataatagtaggtaatatcttgattgttcaatttgatgaagtaaaaagtagaacaaatagaggtcctggattgttgaccaagcatctctagccagcagatttctcttctgtcaaaygggcaaattggactttacctccaaatctgttttcaagtccacattcccatggctgactattccaaactactgaatactttgaaaaggttggttataatatgacatagtttggatattttgtccccaccaaatctcatgttgaaatgtaatcccaaatgttggaggtggagcctggtgagaggtatattgcttatgagggcagatccctcatggtttagtgctatccttgcaatagtgagtgagtagtacttgtgagatctggttgtttaagggtgtggtacccatgccctcctcccaagctcccaacttcttctggctcctgcttttgccatctgacatgcaa

SEQ ID NO: 268165 - DNA, 588 bp, Homo sapiens
aagtaaaaatctgtactacatgaatttggaagaatcaaaatgggttatatctcaagtttcttaagaaaatttccagatggtacttctgtaaaccctcaactattgacttctttactctcagaactgctttcatctttcattccctacgttaaccctgtgaattaacaactgtggtatttaatactaaataggatatataacttcctatttggtcktctcatgaattagtttcttttatctgtttgaatattgattatattctcttttttttaccattaataatggcctaaacctcatcaactagcatgcaagcaaatagaaagcaagatattaagtcaagtttacccaggaggttcaaataaagtaacttaggcataaacatggtggtaaattcaagcagaaagagccacataaacaaaaacatccagatgggaaagtacatggagaaagctgtttctgagaaagggctaatttcctagaagttgttagtcataagttgttccattaacaaacccagcaattcatctctggataactactctcactcactctatcaccaggtagtttttctaagtgtgtcctgtgtag

SEQ ID NO: 268166 - DNA, 619 bp, Homo sapiens
gatctttcattctcattctacataatattctcattttgtgactatgccatactttatctgttacactgttgagtagcttcgggctactcaaattgggtaaatttacaaatcaggttttgatgaacattcttgtatatattttggtaaaaatcagtatgcatttctgttggattttgyctatgagtgatattgctgagtcttggtatatgtatatgttcaaatttaacaaataacagcagttttacaaatcagttgtcctaattcactctcaacagtatttgagtgttccagttgcttcaccggctcatcaatatatggtattgtctttaagacattctgataggtatgcagtggcatgacattggagcttaattggcatttcctcaattatcgagctagaacatcatctctatgtaagttggctacaaatataaatatatatttgcatatatttgattttgtccacatactgattctgttcatataaattgcagatatatatatttctttatatatttgcatttcataggtatgcaaacatataattgttcaactgttttgcttattctactgctctcttttaattttcaaaatttgtttataaattatggatataagt

SEQ ID NO: 268167 - DNA, 564 bp, Homo sapiens
aactgcaacttcagtctcttatcctcaaacaatctcttactccaaatcccactgttttaatttttttcttactgctccacagatgctagagctgtcagccctgagttttatctaataggagcattctttgcttcaccaaaataaaatcaagctctgggaattaacacctacttagatgtgacatcatagaaccagtggattaaaacttcttccacatgttccagttgcctccrtaagttaagattttaaaaaaccaaaactatttttactacaaagattttacatgtagttgttcctaaaatcatgtcctttttatgcctaaaactttccaaaagctttcctttagacataaaataaaatccaaactttttaccttcacctataaaattatacatgactgaatccctggatacctctctgacctattctcagatcacttttcaccttgatcatcatactctaataactgttgcaagaatccaacaaacatgatctctcagggcctttgcctttgctgttccctctgcctggaatgttcttctcccagatatccacatggtccac

SEQ ID NO: 268168 - DNA, 547 bp, Homo sapiens
tatgggaattttgcatttcttaacattttatgaaaaggtattgacagcttttttccatactatcttatcaagaatgtatgtatagaaaacaatcttggaagaagatattaccccactctaaggaagaggacaatatgttttctgaccagaatagtagcaataatgtataaggcataggtgttcctctaaggcaaaggttgggtaggtttgcttagagccctctttataagactgaggatttcctaaactccaagttccttcagttgtgatataaatccatgtgtgcagaccatatccacctgggcctgactttgcataacctttgcagaacttagggggcaacaggaactaaagatagcatgaatttcatgctcagtgtgatcatgaagttcatgtgtcatgagtaataaaactctttgtttctgacctaggtaggagtctcatgccttctgtcatcatmcataaaactacgacaggcaaacttgctagcttgcaagtatggtaaaacctcacacatttcactgttcttaaaagaagaaccagcaaa

SEQ ID NO: 268169 - DNA, 577 bp, Homo sapiens
ccctctttataagactgaggatttcctaaactccaagttccttcagttgtgatataaatccatgtgtgcagaccatatccacctgggcctgactttgcataacctttgcagaacttagggggcaacaggaactaaagatagcatgaatttcatgctcagtgtgatcatgaagttcatgtgtcatgagtaataaaactctttgtttctgacctaggtaggagtctcatgccttctgtcatcatacataaaactacgacaggcaaacttgctagcttgcaagtatggtaaaacctcacacatttcactgttcttaaaagaagaaccagcaaattcacatccctcacaaaatatcttacctgctttctgacacctgatatttcwttctattctctggattaactctgtcccttgttaaattccaaatatttctggagaccaaaaataattactacaaagaaaaaagataaaaagaacataggaacacaattctaaggaaattattgaaagactataactgagccactaatggaagaagtggctacatagaaaagtcttggaactatccaaggcaaactat

SEQ ID NO: 268170 - DNA, 537 bp, Homo sapiens
aataagtagcagcaagatcaaaatggtaattttaaaattacaaacaaaaaaaatccaggaccagatgcattcacaacagagtactaccagacattcaaagaattggtaccaatccttttgacactatttcacatgataaagaggggatcctctctaattctatgaagccagcatcaccctaatatcaaaaccaggaaaggatataaccaaaaaaaaaaaaaaaaaaactacagaccaatatccccgatgaacatagatgctaaaatccttaacaaaatactagctaaccaaatctaacaacatatcaaaagggtaatccaccatgatcaagtgggtttcatgccaggaatgcagagayggtttaacatacacaagtcaataaatgtgatacaccacataaacagaattgaaaacaaaaatcacatgattatctcaatagatgcagaaaaagcaatcaacaaaatccaacatccttttatgatttaaatctctcagcaaaatcagcatacagcagacatacctcaatgtaaaaaaagc

SEQ ID NO: 268171 - DNA, 575 bp, Homo sapiens
tatattgtaatgataaatatattttgagacatctaaggaatctgcaatatctacagagaactccctggtaatttacaattgaagtartacatagacaaattggaagagtaacacataattaaagccaaggagcaaggagtgctacaatacaattgtaataattgagaaagaaaaagccaaaattaagctaactctttagaaaagcatgtaaaaataatttaaagggttttaaagatatgttcggaacaaaacaaactacacttattagattatttgcttgtaagaaattgaacatatagcaatgacacatataaagaaaaattaattccaattttgtgtgtgtggtcaaagatagtcattttatactgaaaaatgtgaaacaactatgcttaaaagagatctgaagtctaagaaaagtaaaagaaggtatacttctagattgggaagagaatgagatccaccgggaagagatttcataactgtaatgatttggggagaaattttcacctaagttcaaagttttactatagagagacctataaaagaaagatcttgtaaaataaatgatgtcactt

SEQ ID NO: 268172 - DNA, 575 bp, Homo sapiens
tatattgtaatgataaatatattttgagacatctaaggaatctgcaatatctacagagaactccctggtaatttacaattgaagtagtacatagacaaattggaagagtaacacataattaaagccaaggagcaaggagtgctacaatacaattgtaataattgagaaagaaaaagccaaaattaagctaactctttagaaaagcatgtaaaaataatttaaagggttttaaagatatgttcggaacaaaacaaactacacttattagattatttgcttgtaagaaattgaacatatagcaatgacacatataaagaaaaattaattccaattttgtgtgtgtggtcaaagatagtcattttatactgaaaaatgtgaaacaactatgcttaaaagagatctgaagtctaagaaaagtaaaagaaggtatacttctagattgggaagagaatgagatccaccgggaagagatttcataactgtaatgatttggggagaaattttcacctaagttcaaakttttactatagagagacctataaaagaaagatcttgtaaaataaatgatgtcactt

SEQ ID NO: 268173 - DNA, 612 bp, Homo sapiens
tttctttctaacaaaatatacttttcatcagtgtatttaacatactaaataactccagcaatagttataaaaccacatttacttcttcatttacttccagttgatgtaatttattacccaagagagtgagatttcycttctttgtggacttggattcttggtgcagtggaaaagcgcagggcaccacagtggtgcattgtgacagcaatgagttatggcagtgaggacaatggcagtgaacagatcccagcactctcttgcattttccaggaaactatataggaggtggcgtctagagcatgtgaacaatgctttttgcctgtgtaatgtgagctgtggagttggtatgaattttagttggaaggaaactgagatgtaaaatagtttacttccaaaactgaaaagccattaatagtattaacatctgtatttgttgattatttgccatatctttcttcttcttccaaagtttcgtaatatttgattaaaagacgaaattgctacttttgctccaaacttattttctacagagacaggaaataaaataaaataaaatcatggcctaattttattcagtgtgtatgttatttcaatgtgattttagattttgtg

SEQ ID NO: 268174 - DNA, 579 bp, Homo sapiens
ggtagggatgaaagaaagtgaatgaatatgttctctgtccttcattcattgtggaagacagagataatacttgtgtaagggagttgatagtagaattgggcattccactatgactacgcttctacaggragtcattatgattaaatctatggccttttgtgcctgtggtctggggagagagttaagaccaaatcctcagtgcctctttgaatagtattgcacaaaacagcctttccacattttctctccgaggcattaaagctactcatgacctcgggaaccactaacatctcaaatccaaggtatcataatttctccctattttcccagacgaaacctgagtttggtaccactcctctgtgtgtgttacaattaaaggctattggatttactatttcaattctttattaatatttattttatagtgactctgctagactaccacttatttgaggataagaaagaaggctggctttttaaatattgccatcacttattacaatgactggcacatggagtgtccctcacatacctaagtggagtgaaaaatgtttcattatttgactttttagcatataa

SEQ ID NO: 268175 - DNA, 549 bp, Homo sapiens
gagccttacatgcttaaagattaaatagttatcttcaactcagctaaattcagttcaaaaaatgtctttagaacctggttctagaagggtaagaatcaaataatactgcaraagagtaaaagtaagttggatcgtatggcctatgtggactcatggcaaagtggtagagccacatttaatcacagaaagtcatagaaagtcagctgtattagcatctcaaacccaagtgcaggagaaggattagtgaatgccttgtagagaaggtaggatttgactacagtcttaaaaaaggttgagggatgatgactgtatgcagaaaaaatagaatcagaaacttaaaggtgaaaggtcaaacttacatttggagcaggaaaagtgtatactaaacttctgtggtgcttggtccaatatggccaatatacattgtaccttagaagaggatgggtttgaaattgggcttgagttttaagtcgtctttctagttctaaagaatttaatagtgtgtatgtccttgcttgctgtaatacggaaatgataatcttaggaaat

SEQ ID NO: 268176 - DNA, 543 bp, Homo sapiens
aaactcgcttttatcaagtgacatcaggctagcaagtagcctgaggaacaccttaggaaggcttctgaaattttggattatagctggtggtgtctgcttgtaagtcacatttaggagtcaaagtatatttgtaccccacttgtcttctataactcccagtctttctgtatttgattaaaagttacagcctattttcacayatctttttgagtcaatgagaaaaactgtgtgccaattttggggagaaatgttacttgcaggagagaggggcagtgggttgagaggaatacacctagagatggcagcaggtaaccagcaatggagagagcagtaaccattgaaaatagcagagcagtggtccatgcctggatgacatggtcatcgactacaggactaaactgtggggcatgaagaattcctgggaaactctctgcaacactgaaggaaggaaacaagctaaaagtctagctgtcatgcattcaagtatggaataaggacttcagctaatttgatttggacatgtgttcagtataatacttgcaa

SEQ ID NO: 268177 - DNA, 543 bp, Homo sapiens
aaactcgcttttatcaagtgacatcaggctagcaagtagcctgaggaacaccttaggaaggcttctgaaattttggattatagctggtggtgtctgcttgtaagtcacatttaggagtcaaagtatatttgtaccccacttgtcttctataactcccagtctttctgtatttgattaaaagttacagcctattttcacacatctttttgagtcaatgagaaaaactgtgtgccaattttggggagaaatgttacttgcaggagagaggggcagtgggttgagaggaatacacctwgagatggcagcaggtaaccagcaatggagagagcagtaaccattgaaaatagcagagcagtggtccatgcctggatgacatggtcatcgactacaggactaaactgtggggcatgaagaattcctgggaaactctctgcaacactgaaggaaggaaacaagctaaaagtctagctgtcatgcattcaagtatggaataaggacttcagctaatttgatttggacatgtgttcagtataatacttgcaa

SEQ ID NO: 268178 - DNA, 601 bp, Homo sapiens
aggggtcttatcttttatgtggccaaagggtcaagaagatctggtggaatcctgggccatcyggtttctttaagcagttgtgcctgtagataaagggactaaagaaaaacagtaagaaatgtaacttttccagttatttcatcaggactgtcctggtgacaatattacttaatattttactccctacaatgtacatatgttagtgtggttggttccttatattcaagtacataaaagatgagactcaaatgtgatacttccaattcttaaagacatgccttccagcaacattctgggcctcagttcctttatttcaatatttactggggtcttgtcaagtccaaaattctacaattctgagtgttatgattgaattacagctaggaattcatggtaactatattttataattaactctaagtcaaactcaataaaaactataaagacttcatttacagaaagaaaaataagatgtgaaatgtaagacatttatgatagaatattgtacagcataaatttttaaagaagttctatactaagtatttaagttctccttccacaaagaaggcacagggaagggaggttgtttattaaaaaaaga

SEQ ID NO: 268179 - DNA, 599 bp, Homo sapiens
gggtcttatcttttatgtggccaaagggtcaagaagatctggtggaatcctgggccatccggtttctttaagcagttgtgcctgtagataaagggactaaagaaaaacagtaagaaatgtaacttttccagttatttcatcaggactgtcctggtgacaatattacttaatattttactccctacaatgtacatatgttagtgtggttggttccttatattcaagtacataaaagatgagactcaaatgtgatacttccaattcttaaagacatgccttccagcaacattctgggcctcagttcctttatttcaatatttactggggtcttgtcaagtccaaaattctacaattctgagtgttatgattgaattacagctaggaattcatggtaacwatattttataattaactctaagtcaaactcaataaaaactataaagacttcatttacagaaagaaaaataagatgtgaaatgtaagacatttatgatagaatattgtacagcataaatttttaaagaagttctatactaagtatttaagttctccttccacaaagaaggcacagggaagggaggttgtttattaaaaaaaga

SEQ ID NO: 268180 - DNA, 518 bp, Homo sapiens
gctcgagtaggagtagtgtgtagactagtttagatggaacagagggtttgggggagtggacagacagcttcaaagtaggatgaggaacatattgtcaagtgtcttgaatgcctgataaagatatacaacaaaattctgcagaaaaagtagaatcattacaaattttaataaaagagtataatgtatagaatgcaattttttggactgaaattaatctggcagcaatgtttaggataaattagatgtaaaaagagtggagacaagaaagttagtgaagattggtttaacagcagtagaaatatagaagaagggataaatgcaaatattgtgagttcctgaagtgcaagtgtgatctcatttatctttgcatcctaagcacatagaatatagtaaatgcttaataatttttaatataaaaacttgattwttgattgttagaaatgccagaggggaagaagtaaaaaacaattccaaatttcaagcctaggtgattgaaaaataatactgacacaaataga

SEQ ID NO: 268181 - DNA, 544 bp, Homo sapiens
tatatggaaaataatttagtataaatatattggtaattcaaggaattttgggaagatttgggagaaccrggtttattcagtgagcagccacatcacagtcacactgcagaactggtccatggaggacattatcaaggccttgctgctaatgactgaaacagttgcctgaggggactgggtaccgccaccaacattgctccttctcagaagctcagtctccctgcaaccactgacaccatctaagggagtttttgtatttcctgtgactctttcatagtttcagtggaagctggtcacatttcagtttctttaatgtggtgtataggtttttcttcctaccaaggttcataagatgggtgaagcctctcctcatataaagcgtggtcagataatgggcagccagaatcagcaatgtctcttcatctcaattagaatacaataagcaccttactataagactttacacatttgggctctgatctctttctgtaactccatcttccatcattctcttccacattccctatgccccacattgagactc

SEQ ID NO: 268182 - DNA, 618 bp, Homo sapiens
ttactcactcattctctggccaataaatgaacattttcctcatctagtaaacagttttcttaagaagttccccacagtttatttgcttggtcccttgcctattatttttacagttccactagagtaaggtgaaagaagtcctcagcagagtgacttggagactaataacagtctttcctccctaccccaatcccttacacatacaggtacacacatgcaaacacacacacacacacacacacacacgcacgcacacagtatagaggtgatactagagaacatatcaggaaatgttcagcctcagcagtttatactatatattggawgtattgccacctctcttgacaggcaaaactagtactgaattttattcactcaagtcagatttttcatttctctcaggagcctggttgacaatagctcaatccctaaaatctagtttttcatttctattgctccagttcaacatacataactgtattcatcagaaaaccaaagtcagacagatttcaagctctttttttgggcttctgagcctcaggcaaaagcaaaccaaggaatggggctactacctctatctctcaaggttctatggccattaatgaggttttgtctttg

SEQ ID NO: 268183 - DNA, 544 bp, Homo sapiens
tatatggaaaataatttagtataaatatattggtaattcaaggaattttgggaagatttgggagaaccaggtttattcagtgagcagccacatcacagtcacactgcagaactggtccatggaggacattatcaaggccttgctgctaatgactgaaacagttgcctgaggggactgggtaccgccaccaacattgctccttctcagaarctcagtctccctgcaaccactgacaccatctaagggagtttttgtatttcctgtgactctttcatagtttcagtggaagctggtcacatttcagtttctttaatgtggtgtataggtttttcttcctaccaaggttcataagatgggtgaagcctctcctcatataaagcgtggtcagataatgggcagccagaatcagcaatgtctcttcatctcaattagaatacaataagcaccttactataagactttacacatttgggctctgatctctttctgtaactccatcttccatcattctcttccacattccctatgccccacattgagactc

SEQ ID NO: 268184 - DNA, 544 bp, Homo sapiens
tatatggaaaataatttagtataaatatattggtaattcaaggaattttgggaagatttgggagaaccaggtttattcagtgagcagccacatcacagtcacactgcagaactggtccatggaggacattatcaaggccttgctgctaatgactgaaacagttgcctgaggggactgggtaccgccaccaacattgctccttctcagaagctcagtctccctgcaaccactgacaccatctaagggagtttttgtatttcctgtgactctttcatagtttcagtggaagctggtcacatttcagtttctttaatgtggtgtataggtttttcttcctaccaaggttcataagatgggtgaagcctctcctcatataaagcgtggtcagataatgggcagccagaatcagcaatgtctcttcatctcaattagaatacaayaagcaccttactataagactttacacatttgggctctgatctctttctgtaactccatcttccatcattctcttccacattccctatgccccacattgagactc

SEQ ID NO: 268185 - DNA, 544 bp, Homo sapiens
tatatggaaaataatttagtataaatatattggtaattcaaggaattttgggaagatttgggagaaccaggtttattcagtgagcagccacatcacagtcacactgcagaactggtccatggaggacattatcaaggccttgctgctaatgactgaaacagttgcctgaggggactgggtaccgccaccaacattgctccttctcagaagctcagtctccctgcaaccactgacaccatctaagggagtttttgtatttcctgtgactctttcatagtttcagtggaagctggtcacatttcagtttctttaatgtggtgtataggtttttcttcctaccaaggttcataagatgggtgaagcctctcctcatataaagcgtggtcagataatgggcagccagaatcagcaatgtctcttcatctcaattagaatacaataagcaccttactataagmctttacacatttgggctctgatctctttctgtaactccatcttccatcattctcttccacattccctatgccccacattgagactc

SEQ ID NO: 268186 - DNA, 600 bp, Homo sapiens
ttgaggacaatgtttatggataaaaataaaaagtgaatttaaattcgtttttgcttgtttttacttaagtgttactggcatctattaaattcttatgtactcatctgacattcataagcattagttgtactggaatcaggcagcagaagagtgagcctgacattgtttttgtaatatctggatgaacatggtagcctattttggctacttctttcatcttctactttccattaaagatcaactttgcagacagattttctaatatttataagctaaagtagtttttgctttgcctgacaaacttgcattgattctatacacttcctccatttctagaatctttgtcacttttaatggtttctcacagccctggggaatgtggacacaaaaccctcttcaacctgaaaactattagtgaggcagatggaaggcaaattgagagccagatatggggattcatggatttttctccctccagtatacattagcttgactggagagcaagaaaaggcacttctcaaattcatgcctagacattcaaagwgtatggcaggaaggagagaggcagcctctgacacaaaacttgctgtaacatttatt

SEQ ID NO: 268187 - DNA, 550 bp, Homo sapiens
aataaccccatctccatgggacagagcagctgggggaaggggcggctgtgggtgtgtcttcaccagacttaaatgttcctgcgtgctggctctgaagagagcagcaaatcctgaccaggagggttttcctagcacagcactcaagctgtgctacgggacagactgcctcctcaagtgggtcmctgattcccgtgcctcctgactaagagagacctcctaactgggtttgatagacatctcatacaggagagctctggctggcaacaggtcagtgcccctctgggacgaagcttccaggggaaggagcaggcctcaatctttgctgttctgcagcctctgctggtgatacccaggcaaacagggtctggagtggacctccagcaaactgcagcagacctgcagaagaggggcctgactgttagaagaaaatctaataaacagaaaacaataacaacaacactaacaaaaagaagccccacacagaaaccgcatccaaaggtcatcaacctcaaagataaaaggtagataaatccacaaatatgagaaaaat

SEQ ID NO: 268188 - DNA, 604 bp, Homo sapiens
ctgttgctggaaaaggtttcccagtgttttttttttttttttcctaataaacagaattgtttgttttacactcagttaacttcccaaaaggatttgaagcatgtttmttatcaagtcgaaactttgcactcctttccccaacatttttttcaacactatcccaaaattctgaggacaatggttccaagaagtttccattagaacctgtcatctccttttttttagtggtcagcaagactcatttcatcatggctaatatttctggcatcagcagaaatctaatttggtcctgtcactccccaacaattgtattctaatcttcacctgattttgtgtatcaccaaatctgactcatatcacatctcattcctaatccacaaatcttttcattgtgtccttggaactcataactgtcatcatgatatatcacactcgacatcctcaaacttttctcagaaaaaatattcagcttctgcctctcttttgatcttggctgtcttctgaggtagctgctttcattacagtccttgtagatggcttcttatttccatttagaatagatgattcttttttactcttaattgataaatttggatgaccataa

SEQ ID NO: 268189 - DNA, 604 bp, Homo sapiens
ctgttgctggaaaaggtttcccagtgttttttttttttttttcctaataaacagaattgtttgttttacactcagttaacttcccaaaaggatttgaagcatgtttcttatcaagtcgaaactttgcactcctttccccaacatttttttcaacactatcccaaaattctgaggacaatggttccaagaagtttccattagaacctgtcatctccttttttttagtggtcagcaagactcatttcatcatggctaatatttctggcatcagcagaaatctaatttggtcctgtcactccccaacaattgtattctaatcttcacctgattttgtgtatcaccaaatctgactcatatcacatctcattcctaatccacaaatcttttcaytgtgtccttggaactcataactgtcatcatgatatatcacactcgacatcctcaaacttttctcagaaaaaatattcagcttctgcctctcttttgatcttggctgtcttctgaggtagctgctttcattacagtccttgtagatggcttcttatttccatttagaatagatgattcttttttactcttaattgataaatttggatgaccataa

SEQ ID NO: 268190 - DNA, 560 bp, Homo sapiens
aattattttactttgtctttctgatatgtatttttttctttgtcgttgcgtgacaaaggctttctcaaacctagccatgcattagaatcagtaagggatcttttaatatttactaatatatgagactgatctatatattaacttttcattcctgccataacaaattaccaaatgaactgcaacaacaacaacaacaacaacaacaacaacaacaaagcagtaacatgttggatacagcatgcctcagcttattactctgctccagatttcaaaagaccaaaatcgaggtgtggacaaaactgcattttttattggaaatctagggaagcgtctatcgccgagcccattgaggttggcggaattrgtttcttgtgactataggactgaagttcctgcttctctactggccatcagccaggggctacccttacctcctagggacttgtctctgatccttacatgtggctccctacatctcagagatagtaacagtgcatcgaatcttctcactggaaattcctcagacttcaccttctgcatccatcatctcttcaggctgc

SEQ ID NO: 268191 - DNA, 429 bp, Homo sapiens
ggatggagttgtttatattattcctttattatccttttaatgtccatgagatccttagtgacattccctctttcatttctaatattagttgtttgtgtcctctctctctttttttcttacttggcctggctagaggcttattgatttcattgacctttttaaacagcagcttttgattatattgatattttctactttttttgtttttgattttactgatttctaatctatttttattattattttctgcttacttttgctttaatttgctctttttttcaagtttcaaaatttgaagcttacgcaattcattttagatgtttcttcttttctaatatctacattcaatgctatacattttcctctcatcagtgtttactgaatcccawaaattttgattagttgtgctttcatgttcatttagttcaa

SEQ ID NO: 268192 - DNA, 627 bp, Homo sapiens
tatccatagttaaattcagaagctcagcaaattaaggcagtaatatcaaaactaataactttatgaaatcttgatgaaaaacagaattcaaaactagaagactcatgtttcatcttgcctttgcattaacttactgtttgatctaggctggtaaggcaatctttttaggcctaaattatctcaggattcaacttacattgctataacctactagattctaccagtagctggaggaatgttggagagattaaagtattgtacaagattcttccctcaagaaattactatctaggagaaaacatagagtatgtgattaatgattatataaatggmagtacaaggtgattaggatgataaatttattctgagattttgggaaggtaacatgagggttacattctgaaatgggtcacaaagacatttaaataagaagtaagtacatagacaagtgggaaggccagtaaaatcacagcacaaaatttgctctctcgtattgtttcctcctattccctaagcactaaacatgaccaaattttactcattctttaagacacaagataagaaaatttctacagtgaggctttcctcagtgtctaatttatatccccatgtgaaaatttttgaaag

SEQ ID NO: 268193 - DNA, 627 bp, Homo sapiens
tatccatagttaaattcagaagctcagcaaattaaggcagtaatatcaaaactaataactttatgaaatcttgatgaaaaacagaattcaaaactagaagactcatgtttcatcttgcctttgcattaacttactgtttgatctaggctggtaaggcaatctttttaggcctaaattatctcaggattcaacttacattgctataacctactagattctaccagtagctggaggaatgttggagagattaaagtattgtacaagattcttccctcaagaaattactatctaggagaaaacatagagtatgtgattaatgattatataaatggcagtacaaggtgattaggatgataaatttattctgagattttgggaaggtaacatgagggttacattctgaaatgggtcacaaagacatttaaataagaagtaagtacatagacaagtgggaaggccagtaaaatcacagcacaaaatttrctctctcgtattgtttcctcctattccctaagcactaaacatgaccaaattttactcattctttaagacacaagataagaaaatttctacagtgaggctttcctcagtgtctaatttatatccccatgtgaaaatttttgaaag

SEQ ID NO: 268194 - DNA, 582 bp, Homo sapiens
ggtaaaaacaaggtagtaactgggggcctaaacaggtctggcagtaagaggagacttcctgcataaagtgaacctcactcaacatccaagtagaattctacttttgctatctaattttgactattaaaaaaaattcctcaatagacttttgtaaatgtacagccttttcacataccatgctgttgcctgacatatttgctggcctctgaactcacattcactcttcaagattcatttcaaaattctaccacactttgaaaatgttctttttatgacctcttttatctaagtaaattatagctttcaccatgttgtacttttatttatttatttagacttttcttctaacacattgaggtgaattatatgttatttctatgtctacagagcttagcaaagttcctctcagtcagtaggtccttggtaatgtcaacaccagcaattctaatacaacaattataaataaaaataaatatactttgggattaagttgtgccagtaagtatgctgtgtcttatcctgtkaagtaggttctaattttattttcatttcatagataagatatatgagacagacaggtca

SEQ ID NO: 268195 - DNA, 587 bp, Homo sapiens
gccaatttttgcaaataaaaatacagaattgctagttaaattttaacatcagataaagaataaataatttactcgtgtaagaatgccctgtgcaatatttgagatatacgtcacagtgaaaatgtatgtattgtttatctgatgttcaaatttaactagctatcctgtattttgcctgacaactacacacccaattatttcaacccttcttttctactttccttctctctttctctccctctttctttcctccttcatcccaatatctttctttttgtgccagcatatacatcaagggtttggaggttctaagatctgaactaggaccaaaaaaaaaagagtctaagaaattcaaagtggacctcaagcccaagcacattctccaaatcatctttaagcagaactctgcccttggcatggtggyagaagactcgttattcagttatttttaaacttgtactttttttttgtttgaataatgttcctcgaccactgtaaaacttcctgattaagagacaagagaggagaagagagcaacaaaaaaagatccatacttagggaggccctgacttaatgccaacaagtat

SEQ ID NO: 268196 - DNA, 587 bp, Homo sapiens
gccaatttttgcaaataaaaatacagaattgctagttaaattttaacatcagataaagaataaataatttactcgtgtaagaatgccctgtgcaatatttgagatatacgtcacagtgaaaatgtatgtattgtttatctgatgttcaaatttaactagctatcctgtattttgcctgacaactacacacccaattatttcaacccttcttttctactttccttctctctttctctccctctttctttcctccttcatcccaatatctttctttttgtgccagcatatacatcaagggtttggaggttctaagatctgaactaggaccaaaaaaaaaagagtctaagaaattcaaagtggacctcaagcccaagcacattctccaaatcatctttaagcagaactctgcccttggcatggtggtagaagaytcgttattcagttatttttaaacttgtactttttttttgtttgaataatgttcctcgaccactgtaaaacttcctgattaagagacaagagaggagaagagagcaacaaaaaaagatccatacttagggaggccctgacttaatgccaacaagtat

SEQ ID NO: 268197 - DNA, 541 bp, Homo sapiens
tatgaatctttgtgtcacagatttcttgctgtggcctaaaatcagaccctaaagatccagtactgaattctaaagtataacactactactccattgacattgcagatacagctttgggtagctagggtacctgttatgtgacctcagtgcaatgctgtcaatcagagtttgagctcctgctccagatatgattaacctgattgtcatgcttttttctgaatgatatgatatgatcctacacaatgtaggctgattcataagtcaagcacaaggaaatgtaaratagatgagttgtatgtatgtgaaaggaagcaagctctatgaaaaatccatcaagttatcagtacatgagggtgttttttttttttaacacaatttagaattaacagagaagaaaataggaaagcagattcaacaaagatttttgtcaaagcaactgttcagtcctaggaggctccgccagctgtctggttgtgtgaggaatccacagccatggctcgctggttgcaaagctgggaacggaatcagaactgaagcctca

SEQ ID NO: 268198 - DNA, 544 bp, Homo sapiens
tagatttaagacttaatttgaaatatagatgcatatacctttaatactgacaacagtcataacgtcattagatatttttctatactaattctcatatcagtcttctatcacattatgcaaaagtgagttgaaattattgtatttcttaatatttgagatttaaaaatgagatacttctctaagtcatagtgaatgacaacattgcaaataataattaaattttccttagtattattgctaatgaaaagggaacaaaaatcattatagaacaagatgtttcaggtaattgatccatctaaaatcgctccrtattttacatagaataaattaacttacctttcttgttacattggataagaaaaagagaggaattgataaagaaatatatcaatgaaaatgttcttattcatagtgagttttaagcagtaaaatttcagattctgtttacattttagtttaattgcttgaatatacatgtaggtggagaaaatactaattgtgcatgttagactggatgattgtttggtagaaaagcaaaatgtcc

SEQ ID NO: 268199 - DNA, 543 bp, Homo sapiens
catttttttattcccagtggcgtttacggtaaaggagaagcttattgtttcatagtatgcgtttgcatgttgtttggatgctaagcattccacctcagagaaccttgagatggtgggaaagctcagaatctagtcacttgaagtaggaaaacaactctgatgcagtgcccctcttctttgcgttttcctcaactgatcagacacctacggtgttttcaactccagaaatgtgaacaccaaagcaaagctaaaacatcagcagggctaaggatatgcctagtyttagtctgttcttgtgcatacaatcattgactgtataacgctttctaaaaaaggaatatatcacaattaaaggctgagaaacttcgtggaaaaaagaactatcgtaattgtggttagggaaatgacttctttgcattttctaagtaactggtcccaggtcatgagattttacggcttacctaagtaaaaatattctgcatttgttaccttgtcctttttattttttagtagaaatattaatttgtaggaattagtgtcaaa

SEQ ID NO: 268200 - DNA, 510 bp, Homo sapiens
gcttttaatgaaaatacttagggtaaaacaaaattctacaagttgggcaaggctcagtgagaatagattttctttgctccatgtaatgtcacctggggcagctttaatgggactggaagatctactaccaaaatagcctcacttacatagctgtcaaattgatactcattctcagctgagagctcagctagagctgctggcccaggatctcctccatgtcacctctcaactggcaaggttggayataacacagtatgacagtctcaagttagctgaactaaaactactggtagttcaactcagggtagttgaatttgagtcccactaagttagagagattagataaaaacctcgagctttctgttgaaatttcagaaaggatgcactttaggaaggaaatctatatgccaggaataaggaattcataatgagaataaggataaaacccaaatagtctcatcccaaaaagtataagaccagggttctacagggtcagtgttgctagccaac

SEQ ID NO: 268201 - DNA, 511 bp, Homo sapiens
attttatataaagttttaaggcagaaagaaattgaggataaacctttggtgttttggcttaaacggttgatagaggtttagagatatataacagtgaatgccactattaataaatgactcagttggaaattgatgctagatctgcctgaatccaaagctcttgttctttactactgtgctaagctgaaaaattgtcccttcttggtcccaggttttyttgactaaacaaacagaaaaaaaaaaaaaaaaaaaaagaaaagaaagaaagaaaaagaaaaaaaagtgagaaagtggttaagccaatatgacttctctcacatttgtgattctctgagatatctaagacttctactcaatttcttggtctacacatcaagaaacatgaactgaatcaatgtatatccaatttaaattacccagttgtgtcagtctgaaaaattcaacattcacatgcacatttacatacacacagtcaagaaataatgggataaattggaaagcacgtgaactt

SEQ ID NO: 268202 - DNA, 619 bp, Homo sapiens
aaactaaaaacattgacacacaccaaaataaatacccaacaggggaaaaagacaatctagagaatgagagaagatattttcaaattatgtatctgacaaaggactaatatccagaatctacaaggaattcaaacagaacaacaagaaaaaaatcaaccccattaaaaagtcggcgaaagacagacatttctcaaaagaagacatacaagaagccmacaaacatatgaagaaatcctcaatatcactaatcatcagagaagtgcacattgaaaccacaatgaaataccacctcacattagtcagaatggccactattgaaaagtcaaaaaccaacagatgttgacgaggatatggagaaaagggaatacttttatgctgttggtgggaatgtaaactgtacaacctttatggaaaacagtatggagatttctaaagaaactaaaaatagacctaccattcaatccagcaatcccactactgtgaatctacccaaaggacaagaaaccaccatattgaaaagacacctgaacttacatgtttatcgcagcactattcataaaagcaaagtcataggatcaacctgtttccattaataaatgattggagaaggtaaacatgg

SEQ ID NO: 268203 - DNA, 593 bp, Homo sapiens
cagtcttttcccagtctcaccatttgaggaaatgttaatttatcgtacaatttgtgataaacacataaagagggatttattatcaactgtaaaatctattgtaattgagatctgatgtaataatttggataactcttcaagtatttgaagctatcactgaaccaactagtaataataaatcaatttaaatactaaatataatgtttttccttatctataagtcactgatattattaaaaaattagaaaatacagaaaattttagatcatttattttaacattacatggaatttggactcaatgctggatttatttatgtcataacatttgaagtacctatagatatagatacttaatctatatctatagatactgaaatattcatgacccagttactatatgtgtatttgtgtatayatagatacttaaatattcatgacccagctactatatgtgtatttgtgtacatataataacacacacacaaaagtgcttgatttttaaaatattttaaagtttaaaagagacctcaaaatatcttatataatgacaataataactcagtgaaaatcaacatgcagatgtgttaagaa

SEQ ID NO: 268204 - DNA, 632 bp, Homo sapiens
ttgtctgaattgtggattatgttgcattatctttagggaatttgaaatttattcactttgctattatctttattggacatttgctttctttgacatacaacataagaatttcttgtgaatccagggtgtagcaaatatctgtagtaagagaataagtaattattagatgttagttgactgcccaaagtaatatgggtgagtgaatgggtgaactcaatagtaaagccatcyttttccttaagaaaccaaattaatggggtccattatcaggacagagaggttctctgtttcactgaaagtttgttacaaaacacccattgttccctaaagagcaaaaagaacaaagctagaggtatcacactacctgacttcaaaatataccacaagttatagtaatcaaaatagcatggtactatcataaaaacagacagatggtacaatgaaacagaatagagaacccagaaataaatccacacagctacagtcaattgatttttgatgaagttgtcaagaacacacagtggggaaagaacagtctcttcaatagtgtgttgaggcaactggatatctacatacagaggaattaaattatatccttatctccaccatatataaaaatgatctcaaaataa

SEQ ID NO: 268205 - DNA, 509 bp, Homo sapiens
tggcctgtcttaaggtcttgtgccttttcatttcacatgcatttcacctcacccatatgttaacctccatcagtatctcctggcaggcactcagtcagtgtctgtgacatgagtctcacctttatccatctggctacctttcatagaaggcactatcccayctggatctccatccaaccaccttcctgaagatcagacctgcagtcaagactgccaacctgttccctccttgggaagttacccttaaaagaatagtctgtcccaagattaaccacttctaaactgaattcagtgttctgtaatacctctctgcttcaccaaacctggtccttctcatctaccctggagtcaatagcaggacagtcttcctagacctcatacccggagaatccttcctgccttaaagactcgcctccagcatcccttctcttgtaaagactcccccaaaccagtgtgcaggcaggcaggccctcttctccgcaccccacaatgccttctttccctcactc

SEQ ID NO: 268206 - DNA, 479 bp, Homo sapiens
atactcttaaaagtaactattcatcttctaattgcacacagaaattaattctaaatgaattaatgagaatttcaaaaaggcaaaaattatcaaactagattatggaaaggaatctttgtcagacctctgatggaagggagcaatgtcaaagcatgtaagagtagatacaaatgcataaaaacttcacactctaaaatgcaataacataaargaaagcaaaatcaggtgacagagggcaaatatctccactgtaaagggtggagaagatttaacatttgctgatttttttttaaaaaaagcaaagcctctaagatgtcaatatgggcaaacatactcagggaagaagtaaactggtcaacacacaaacgaaaaaatattcattttcattagttgcaaaagaagtgtaaaggcaaaacataaatagattcaaattttgcttattaaattgtatttcaaatggtagtatattccgatggttt

SEQ ID NO: 268207 - DNA, 479 bp, Homo sapiens
atactcttaaaagtaactattcatcttctaattgcacacagaaattaattctaaatgaattaatgagaatttcaaaaaggcaaaaattatcaaactagattatggaaaggaatctttgtcagacctctgatggaagggagcaatgtcaaagcatgtaagagtagatacaaatgcataaaaacttcacactctaaaatgcaataacataaaggaaagcaaaatcaggtgacagagggcaaatatctccactgtaaagggtggagaagatttaacatttgctgatttttttttaaaaaaagcaaagcctctaagatgtcaatatgggcaaacatactcagggaagaagtaaactggtcaacacacaaacgaaaaaatattcattttcattagttgcaaaagaagtgtaaaggcaaaacataaatagattcaaattttgcttattaaattgtattwcaaatggtagtatattccgatggttt

SEQ ID NO: 268208 - DNA, 611 bp, Homo sapiens
attacatttaccttttgtagcaaatctcatgaataacctatttcctttagcaagtttgttagctggacgaagatcgtttcttaacaaagaytcctcttctacctgagacaacgtatccaacttaagaaagaagagtatttttaatataaaaattaaagtccttttgatatttcttcagtagtaaagctaccattaagaaaagcattctacctttaatacttacaagcattatagcactagttccgctgtagaatttctaactcagagatttcccctgcccaccttgtctaaaagaacagtctccatcattctctatcccctactcttttcacaacactcattgccacctgacacagtatgaggtatctgtgcatcagtgtatcctctgcactccccactagaatgcaggctccgagagggccaggactttgttttgcttgaagctatatccctagcacttagaatatggtatataataggtactcagtaaatattttttaaatgaatgcatgttaatatttttaacaacagtacataatccattaggaagtatgccattacttgctgtttcttcattttactaattagataacacttcaaagtatttctca

SEQ ID NO: 268209 - DNA, 611 bp, Homo sapiens
attacatttaccttttgtagcaaatctcatgaataacctatttcctttagcaagtttgttagctggacgaagatcgtttcttaacaaagattcctcttctacctgagacaacgtatccaacttaagaaagaagagtatttttaatataaaaattaaagtccttttgatatttcttcagtagtaaagctaccattaagaaaagcattctacctttaatacttacaagcattatagcactagttccgctgtagaatttctaactcagagatttcccctgcccaccttgtctaaaagaacagtctccatcattctctatcccctactcttttcacaacactcattgccacctgacacagtatgagrtatctgtgcatcagtgtatcctctgcactccccactagaatgcaggctccgagagggccaggactttgttttgcttgaagctatatccctagcacttagaatatggtatataataggtactcagtaaatattttttaaatgaatgcatgttaatatttttaacaacagtacataatccattaggaagtatgccattacttgctgtttcttcattttactaattagataacacttcaaagtatttctca

SEQ ID NO: 268210 - DNA, 489 bp, Homo sapiens
aatatgtaagtattagcagttcttgataactgtcaagtaagtttggattgtcctttacactaccgccccctacagggaagccctttgctgctccttgtcaggacatgctaaacgaattcccccttcatcattcccattggaaaacgtggatgatgaaggtatccctgggatatgtagaayggaggcatgacagccagttggctttgtagcaactaatttaatgtgcctctttaaggaagataatttagcaagaaaagagctttgagaaatcttacggaaaataaacttaaaagagtatttctcaaaactatgcgtcccctatatctcagtttgggaaatgaagctctgaggctctcacttctgttactaatgtgccatgtggcctgaggcaaatatgttccttcctctgtttctcaggttctgataaataatacaaggtaggtgaaccatgtaattctgagagtccctccaattctaatataccttagt

SEQ ID NO: 268211 - DNA, 489 bp, Homo sapiens
aatatgtaagtattagcagttcttgataactgtcaagtaagtttggattgtcctttacactaccgccccctacagggaagccctttgctgctccttgtcaggacatgctaaacgaattcccccttcatcattcccattggaaaacgtggatgatgaaggtatccctgggatatgtagaacggaggcatgacagccagttggctttgtagcaactaatttaatgtgcctctttaaggaagataatttagcaagaaaagagctttgagaaatcttacggaaaataaacttaaaagagtatttctcaaaactatgcgtcccctatatctcagtttgggaaatgaagctctgaggctctcacttctgttactaatgtgccatgtggcctgaggcaaatatgttccttcctctrtttctcaggttctgataaataatacaaggtaggtgaaccatgtaattctgagagtccctccaattctaatataccttagt

SEQ ID NO: 268212 - DNA, 536 bp, Homo sapiens
tagcttcgtccctgggtctcaattgctcccgctggagcttcgcttgggccgaggtgagcgctgaaattgctcacaccctctattctgggaccttacgatgctctgtgtccgaagtgttaaaaagatttcagactttccgcacggaaaggaattgtgttcactagacctcgcttttccagcatgtggaagaatggcattcagtgagctgtgtcatcgcttcagataaagaaaatgtcaccgtggctgcagagatctcctgggatcactctgaggaggtgtttgagactgaaatgctccagatttgattatccagttgctcacgggcatcgcccctagaagagataatagcatctttgcataacatgtccatgtccaaaatagrtcttttggtgcaaaaaaccaaccctctgtcccaacccgttccttagctaccctcaggagggagatatactccagttacagtacaaggaactcgagggattacctgtgactcctctttcctacatccccacgtctattccagcagcaagccctgc

SEQ ID NO: 268213 - DNA, 538 bp, Homo sapiens
ctctgggcaggcagagaagtcttgttggctctctggccccacctaagtcctgggaacttcctctggccacaacttggaagggccatacctgggtctcaggaagsacatctcctgaactttctagctgagccctgccagaagagagattagactcccgaaattgggagagcctttggaaaacaaaacctgaggatgacttctaatagctgagctctgcaagtagtacacatggatataatttgcatttattatgtcccttaggtaatacacactttttagtctggtgaggggaagaccagtacttttgtcatattttatgtggggaaagtgtattaccaaagcctttagggatctgtgcaagatcaaaaagagccgtcagaacggagttggaaaggacttggagatcatttaaaggaagtcatcattttaaagagcataggcacggggctcagggacatagagcagtgtagcggcgtgacagcctcacagtcctgtgttgagaccggattccgtgggaccctctttcaagctgtcagag

SEQ ID NO: 268214 - DNA, 538 bp, Homo sapiens
ctctgggcaggcagagaagtcttgttggctctctggccccacctaagtcctgggaacttcctctggccacaacttggaagggccatacctgggtctcaggaagcacatctcctgaactttctagctgagccctgccagaagagagattagactcccgaaattgggagagcctttggaaaacaaaacctgmggatgacttctaatagctgagctctgcaagtagtacacatggatataatttgcatttattatgtcccttaggtaatacacactttttagtctggtgaggggaagaccagtacttttgtcatattttatgtggggaaagtgtattaccaaagcctttagggatctgtgcaagatcaaaaagagccgtcagaacggagttggaaaggacttggagatcatttaaaggaagtcatcattttaaagagcataggcacggggctcagggacatagagcagtgtagcggcgtgacagcctcacagtcctgtgttgagaccggattccgtgggaccctctttcaagctgtcagag

SEQ ID NO: 268215 - DNA, 583 bp, Homo sapiens
gacagttggtgaccctttgagggagcagagtggaccgaaggattttggttctgacccaatatgggcagttatgatcggtgtttgatttaggcagatctcggaaacctcaattagaaactctagtctagaaggatctggacgaggggcaaaagtgtcaacaccttcttctctcctattccaaagtgatctttccgtgggaatgcggcaaggagtcagcaggcatagtgaaaatgggcggcgatggatactcccagcacttgctgagcactgctacgcctcaggactgggacaggtgctttacaccccaaaattcccgtttcttgattccaaaatgtcgtagattataagacacaccrtttaaagatggcctttaggagaaaaggaaaatacgaggatcttaaatgcacaatggattgtgagacactgattttaggaacataagatatgagaaaaagtgaatcttagaagtgaggaaataaagtatagtatgcgtaattctcccaacagccaagagatgaattatcgccatgtttgaatgagggaactgagactggggaaggcttcaccacttgctcaaggccgc

SEQ ID NO: 268216 - DNA, 583 bp, Homo sapiens
gacagttggtgaccctttgagggagcagagtggaccgaaggattttggttctgacccaatatgggcagttatgatcggtgtttgatttaggcagatctcggaaacctcaattagaaactctagtctagaaggatctggacgaggggcaaaagtgtcaacaccttcttctctcctattccaaagtgatctttccgtgggaatgcggcaaggagtcagcaggcatagtgaaaatgggcggcgatggatactcccagcacttgctgagcactgctacgcctcaggactgggacaggtgctttacaccccaaaattcccgtttcttgattccaaaatgtcgtagattataagacacaccatttaaagatggcctttaggagaaaaggaaaatacgaggatcttaaatgcacaatggattgtgagacactgattttaggaacataagatatgagaaaaagtgaatcttagaagtgrggaaataaagtatagtatgcgtaattctcccaacagccaagagatgaattatcgccatgtttgaatgagggaactgagactggggaaggcttcaccacttgctcaaggccgc

SEQ ID NO: 268217 - DNA, 516 bp, Homo sapiens
tcatattttctctcccttgaccatgttagtttgtagtttattcccagcatctctaaatattctggttccttgtttctcaatgttagttcttcttcgattcgtgataaaaggagaagtgcttttgaaatgataaacaaccgcacattcctatcaaagcatgaaaattatttttgaatttcaaataagtagaaaattaaaagactaataaatatttgattttggtacttctggtggatcttttttcttttccttttctttcttttttttttttttttaacttcttacagaagcacatgtttacgaaggtgggcttaratctttttttttttttaatttaaattgtgggcttttggtttgctttgctttgttgttctagacagcatttagtatgttaccagatgcatgtagttatagatattataccattagatgagaaaaatctgtataatcagtgtggtttaagtgtttcctaaggtcaagttgtaggtcatgaccctatgacaatcaatgaacttt

SEQ ID NO: 268218 - DNA, 516 bp, Homo sapiens
tcatattttctctcccttgaccatgttagtttgtagtttattcccagcatctctaaatattctggttccttgtttctcaatgttagttcttcttcgattcgtgataaaaggagaagtgcttttgaaatgataaacaaccgcacattcctatcaaagcatgaaaattatttttgaatttcaaataagtagaaaattaaaagactaataaatatttgattttggtacttctggtggatcttttttcttttccttttctttcttttttttttttttttaacttcttacagaagcacatgtttacgaaggtgggcttagatctttttttttttttaatttaaattgkgggcttttggtttgctttgctttgttgttctagacagcatttagtatgttaccagatgcatgtagttatagatattataccattagatgagaaaaatctgtataatcagtgtggtttaagtgtttcctaaggtcaagttgtaggtcatgaccctatgacaatcaatgaacttt

SEQ ID NO: 268219 - DNA, 591 bp, Homo sapiens
ctttggctgcttcggggagttgccaatgagtggaaattctgccaatgatctgtgacaccttttcaacaaacattaattgaatgacatttcttttttccccaaatcatccatctgtcctttcttatgcaacttttgagtttcaaagggtagaaggcaagatttcttttggtcacacatgtggcctaagaagacagtctatgtattgaacactataatctactgtagmcttgtaaataaatctaaatattcaccagtctgtaccaacatgctaaatataaaatgaattcattcagccttcttttccatctgcccatgaaaacatcttgcttttgtgaaggcctttggaaaatgtaagatccaaggcttctgtatgctttttaattgtttaggggcacaaatgggagtggaaaagtaaggtgaaggcaggaagaacattttcaaaattcataggttaaaaaatataagatccagttttttttagtttatacataatttttaaaattgtcttaaagtaccaaaaagcatctcacttataatagtgctgtttagtaaagcagagaacatacatcaagttgtctttgaagtcccatt

SEQ ID NO: 268220 - DNA, 591 bp, Homo sapiens
ctttggctgcttcggggagttgccaatgagtggaaattctgccaatgatctgtgacaccttttcaacaaacattaattgaatgacatttcttttttccccaaatcatccatctgtcctttcttatgcaacttttgagtttcaaagggtagaaggcaagatttcttttggtcacacatgtggcctaagaagacagtctatgtattgaacactataatctactgtagacttgtaaataaatctaaatattcaccagtctgwaccaacatgctaaatataaaatgaattcattcagccttcttttccatctgcccatgaaaacatcttgcttttgtgaaggcctttggaaaatgtaagatccaaggcttctgtatgctttttaattgtttaggggcacaaatgggagtggaaaagtaaggtgaaggcaggaagaacattttcaaaattcataggttaaaaaatataagatccagttttttttagtttatacataatttttaaaattgtcttaaagtaccaaaaagcatctcacttataatagtgctgtttagtaaagcagagaacatacatcaagttgtctttgaagtcccatt

SEQ ID NO: 268221 - DNA, 591 bp, Homo sapiens
ctttggctgcttcggggagttgccaatgagtggaaattctgccaatgatctgtgacaccttttcaacaaacattaattgaatgacatttcttttttccccaaatcatccatctgtcctttcttatgcaacttttgagtttcaaagggtagaaggcaagatttcttttggtcacacatgtggcctaagaagacagtctatgtattgaacactataatctactgtagacttgtaaataaatctaaatattcaccagtctgtaccaacatgctaaatataaaatgaattcattcagccttcttttccatctgcccatgaaaacatcttgcttttgtgaaggcctttggaaaatgtaagatccaaggcttctgtatgctttttaattgtttaggggcacaaatgggagtggaaaagtaaggtgaaggcaggaagaacattttcaaaattcataggttaaaaaatataagatccagttttttttagtttatacataatttttaaaattgtcttaaagtamcaaaaagcatctcacttataatagtgctgtttagtaaagcagagaacatacatcaagttgtctttgaagtcccatt

SEQ ID NO: 268222 - DNA, 562 bp, Homo sapiens
aagcagagaacatacatcaagttgtctttgaagtcccattgcttggatattaaaaagaaatttaaaaaaattgaactggtatctatttttcagtaggtcaaaaggcaygtataattacactcatgatttttgagtatcatgctaatgaggctaggaaaatgtagaccttgacattgccttgtttagttacattcactatgaaaaaaagaatattgtttacccctcaggagttttcttaaggaaaagaaaaatcaatctctatcaatgagcaatatttttctccccaagggatattgatctgaacattgacttcacaatgggtgagttattttcctcagactccctactatgaattgttaggtgacatgtcttttgtgagccaataaacatgttgtgtctagtgtagtaatctcatctgggagatgacaatttctgtagagtggttagtttgtagtatttcaccttttgtatgtctgtgttacatattcccgagaagtatatttcaagtttaaaaagcattacctctcatattcttcttaggagaacagttggcagtgaacag

SEQ ID NO: 268223 - DNA, 596 bp, Homo sapiens
gacattgccttgtttagttacattcactatgaaaaaaagaatattgtttacccctcaggagttttcttaaggaaaagaaaaatcaatctctatcaatgagcaatatttttctccccaagggatattgatctgaacattgacttcacaatgggtgagttattttcctcagactccctactatgaattgttaggtgacatgtcttttgtgagccaataaacatgttgtgtctagtgtagtaatctcatctgggagatgacaatttctgtagagtggttagtttgtagtatttcaccttttgtatgtctgtgttacatattccygagaagtatatttcaagtttaaaaagcattacctctcatattcttcttaggagaacagttggcagtgaacagtttctttcctacatgctcctcaactgcatgtcctctaggcttgtgcatagacccatgactcatgaatagtcttataaatgtcttcatgattcccttttctccctttatgcaatggtacaatttggcatctttaattttgaaaataaaacaaatattcaatttaccagataaaccattctttaaaggaacactgtaatgggtgg

SEQ ID NO: 268224 - DNA, 577 bp, Homo sapiens
gcctgttattaaattagcctcattaaatcaggattaaattagacaaacatgtgaaataagccttacaagagtcawaaaacattacacaaacctgagattgtgtttgtgcattattcaaagtcacaataagttcttaaagccaagggagaaaaggataaaacagcagttctcaaacttcggtgcacatgagattcatctcgggtttcatttcaaagtacacatggctgtttcccaggcctgaggcctattcgaactacaggctgagagacactgggataagggattggctgaaaattgattcctattcattcatcagatagtttaagtactaggaagccttagaggatacaaataattacaagatactgctcaaatgtcaaacaactccggctctacatgtagagagacgacaaatatccagaaatgataaaatgtaaggctctgtgtgtcaaagcagaaaagcagccaatgagtaacacctcttctagtttcccccttgaaccagaacctagaagaggcttcatattcccgaaaaggaaattctggttcactcttattcctaaagtacacactgtca

SEQ ID NO: 268225 - DNA, 646 bp, Homo sapiens
aaggggaaactgctccccagcagagccgttcttcaaaggggacttcttcaggcaggaaaagggaacgtctgatactggagctgaataaacagactcatcaagctgagtgccagattggaaatccaggcgctggagcatgaggcccgccagccgcacacctcatgcatgctatggctctgtctctctcctctctttccttctctctctctcttttttcttccattctgtaatcttcttcactcgagtgacttagtgatcctgggtatacacccatcgtttttcacaactattaactgactaatctaataggctccagaagtttcaaaacccatttttgaatcacagactcttctaccatctccactcatgcagttcactctgtctctcaacactcacatctccccacagccaataaccttcctcagaaagtagctccttttagatcagggcagattattcatacacacaatgtttcaaaccctggatacctggctagtagaatcctagagcttgatggaaactccaaagatttttttttttttcaggaaaaactacaaatttgtaatctcagaaakatcatagtctaccctggaccttgaaagagttcatccccatttacaggttggttcagtggctcacagtctat

SEQ ID NO: 268226 - DNA, 581 bp, Homo sapiens
actaaaaacttctgccccactcttgccatttccccaggcccctgtgttcagcctcaggcctatagctgctgtggccacaccttccgccagccatgcttgcctaggctccagaataagagtgggacagctcagaaagattaaggtgccataacacactgaaacagaatcacttargctgcctcaatcctggcaaaggggagggtattatttgcaaagccccctgctgagtctcccaggtgctagctagacaggctcaggagatagtttggcagccaccctggaaaaaatgcctgtgtctctgcaaataaatctgccagtgtagaaagcactgggttttccccagtgcttgtgcaaatagtactctgtgctttgctggtattggaaattccttggtataagtagctctagaccatgaaaattgaagttatggatttcttgtcattgttgttacccttgacctgttgggaaataattccccaaatcaatggtcatacttccgattattcacaactgaaaaatctttagtaaccagaaaacaaaaaaaagtgttccctgaattccccttcacggctcagcaactg

SEQ ID NO: 268227 - DNA, 510 bp, Homo sapiens
tgggcagtgctgaccccaatcaatttgataaagcttgtaagagttgccattatatgcaacaggaggactctttgacagaaataatatatgaaatgtgtctctttatttttaatattttaatttttttcagctcattagctatcataagtattagtgtgttttatgtgtgtcccaggacaattttttttcttccaatgtggcccagggaagccaaaatattggacacccctggcttaagctttatgccttgattctttggtgctaaaacttttgaaactaaaaacactctttttattatgcacacaaaaaagccatgctctagcaaattaaaagccttgattttcaagactattttctcaacactgagttttaagaccttatttagacatttaagtggtcaaaaccttgattctttgttccctgcatttcctttatgcatcccttctagaagcagggcttgcccatgactgaatggggaakagtcacaggtaactggaatttgaagcgggt

SEQ ID NO: 268228 - DNA, 519 bp, Homo sapiens
gaggtgacatacttaagatggtgcaatcctgtcctaatgaagaacatgttagatcccaaggttggtttatgggcagttcttgttcttgtcccagttgatatttgttttatcaagtcaggaactatttttgtcatcattgttaatcttcctcttgccagatctgttttggccragggcatgcacttgaggtatgttagaagaatggagtgcagtattgtgggaaagaattatcactaattctgtctgcctacagcttcctcggccctgttcatctgatctcaattccctaaacaaaattgtagatggaaagtcctgcaagtccatgacctggttccagaaagtagatttttgagctgaaagagcaagatcgcagcattcccatgatgacaataggtctttgttatgttggaaagaattttgacttgtccatcaggggagatcttgacagaatattttgccaataaagaagtctaccactaaatgggtaggtccaactccattaggctcatctttggcctc

SEQ ID NO: 268229 - DNA, 519 bp, Homo sapiens
gaggtgacatacttaagatggtgcaatcctgtcctaatgaagaacatgttagatcccaaggttggtttatgggcagttcttgttcttgtcccagttgatatttgttttatcaagtcaggaactatttttgtcatcattgttaatcttcctcttgccagatctgttttggccgagggcatgcacttgaggtatgttagaagaatggagtgcagtattgtgggaaagaattatcactaattctgtctgcctacagcttcctcggccctrttcatctgatctcaattccctaaacaaaattgtagatggaaagtcctgcaagtccatgacctggttccagaaagtagatttttgagctgaaagagcaagatcgcagcattcccatgatgacaataggtctttgttatgttggaaagaattttgacttgtccatcaggggagatcttgacagaatattttgccaataaagaagtctaccactaaatgggtaggtccaactccattaggctcatctttggcctc

SEQ ID NO: 268230 - DNA, 576 bp, Homo sapiens
aacggcattaaaaatatgaaatcaggaaattaacatcagtttaatgtcaccatctgatccaaatatttcattaaggcttttttcattgtcctaatcatatcctttacaggttcatggtccaatccaagatcatgttgcatttagctgtcatgtctctttagtttccatcaatatgaartagttgctcagtctttccttatattttgtgaccttgacagtaagatcagttacttagcagaatctccctcaatttgatttgcctgatattttctcctgattagattcagttgatgtatttttagcaggaaagtaattgaagtaatgctgtgtccttctcagtgcaccattatcaggagatattcaggctgatttgccccattactggtgatgttagcttttattacttggttaaaatgttgtcaagtctcttctcttctcttaattatatatgttaattaataagtgttttgtacttattaattcatgttattaattatgttgtggggagatactttgaggctatgtcaatagttaaattttcacccatgagttttagtatccatagatgattcttgc

SEQ ID NO: 268231 - DNA, 576 bp, Homo sapiens
aacggcattaaaaatatgaaatcaggaaattaacatcagtttaatgtcaccatctgatccaaatatttcattaaggcttttttcattgtcctaatcatatcctttacaggttcatggtccaatccaagatcatgttgcatttagctgtcatgtctctttagtttccatcaatatgaaatagttgctcagtctttccttatattttgtgaccttgacagtaagatcagttacttagcagaatctccctcaatttgatttgcctgwtattttctcctgattagattcagttgatgtatttttagcaggaaagtaattgaagtaatgctgtgtccttctcagtgcaccattatcaggagatattcaggctgatttgccccattactggtgatgttagcttttattacttggttaaaatgttgtcaagtctcttctcttctcttaattatatatgttaattaataagtgttttgtacttattaattcatgttattaattatgttgtggggagatactttgaggctatgtcaatagttaaattttcacccatgagttttagtatccatagatgattcttgc

SEQ ID NO: 268232 - DNA, 594 bp, Homo sapiens
aggctcagatgctaggaaatgtcagagaagtgttcctggctgtcagtcctaaaatagacaggcagaatagcatgatggttaaaagtcttcatttggatactgggaacactggttaatatatttgtcagagaaggcttaggttatttaacttctttatattccaatttcctacctattctttaattttcttgtgyggaaattgatatttatttttatgcattttatgaatattatctgatacccaaaacttgctttgaagagtgagtagcatatggtaggtgatcaataaactaactgtaatcaatagttaagtaaggtgggtgtagtgtccagaagataagtggatatagatgtgttatagggatggaccttggggaatatttgtgctgtggatgaaggaaaaaaaagtgtctcccaggaacgggagcaaagtgagatcctgggatcctgccatgaaccaaaatactagatggctctgggaactcagagggaatggaagtcagatcccagtgctaacagatgccaaggggcatcagaattctaattctgcagggagtttaggaatctcagttggcaagccgctttcattacgca

SEQ ID NO: 268233 - DNA, 614 bp, Homo sapiens
acaaccctgccctgtgcacagaagaggaagaactggaaatatcagacgtctctaatcactaccagatgttccatgttatccatgtcagcttagtaacctttgagccttatgacgttcttggctaagcaatttctcatacttcacatttaaatagtccaactcatttatcaaaaatgtcttttactttaacttgaggcagggtgatgggtctaaaatatttcataatatttagtgcactccacagcattctaaayaaaacatattaattttgtcgacataaaaaccaaacccacaattgacttttatctaaatgtcagagaatggtgttaatgattccacaagttattcacatcaactcaataaattgggaaattattataaagccctcaatgacaaggtgttaattggtactcagggtggtatttttacttcattatttattaagatcacaattaagctcatcaaggctaacagcctctaggttaatatctgttaggcactgtgaaggagtcattgcacaaataaatgttccacatcacatacaaaatagtcggttttgtttgtatcactgttttttaaaaactgaaaccaagtagtctacttgatttattaat

SEQ ID NO: 268234 - DNA, 614 bp, Homo sapiens
acaaccctgccctgtgcacagaagaggaagaactggaaatatcagacgtctctaatcactaccagatgttccatgttatccatgtcagcttagtaacctttgagccttatgacgttcttggctaagcaatttctcatacttcacatttaaatagtccaactcatttatcaaaaatgtcttttactttaacttgaggcagggtgatgggtctaaaatatttcataatatttagtgcactccacagcattctaaacaaaacatattaattttgtcgacataaaaaccaaacccacaattgacttttatctaaatgtcagagaatrgtgttaatgattccacaagttattcacatcaactcaataaattgggaaattattataaagccctcaatgacaaggtgttaattggtactcagggtggtatttttacttcattatttattaagatcacaattaagctcatcaaggctaacagcctctaggttaatatctgttaggcactgtgaaggagtcattgcacaaataaatgttccacatcacatacaaaatagtcggttttgtttgtatcactgttttttaaaaactgaaaccaagtagtctacttgatttattaat

SEQ ID NO: 268235 - DNA, 614 bp, Homo sapiens
acaaccctgccctgtgcacagaagaggaagaactggaaatatcagacgtctctaatcactaccagatgttccatgttatccatgtcagcttagtaacctttgagccttatgacgttcttggctaagcaatttctcatacttcacatttaaatagtccaactcatttatcaaaaatgtcttttactttaacttgaggcagggtgatgggtctaaaatatttcataatatttagtgcactccacagcattctaaacaaaacatattaattttgtcgacataaaaaccaaacccacaattgacttttatctaaatgtcagagaatggtgttaatgattccacaagttattcacatcaactcaataaattgggaaattattataaagccctcaatgacaaggtgttaattggtactcagggtggtatttttacttcattatttattaagatcacaattaagctcatcaaggctaacagcctctaggttaatatctgttaggcactgtgaaggagtcattgcacaaataaatgttccacatcacatrcaaaatagtcggttttgtttgtatcactgttttttaaaaactgaaaccaagtagtctacttgatttattaat

SEQ ID NO: 268236 - DNA, 490 bp, Homo sapiens
tctgtctcaataaataagtaacccctaaaagttcactccctgatccctggaacctgtgactctgttaccagggatgagggggtgagttttttatcatatctcctttagataatggctaactgggaaggagttagagaaaaggagtgagygaaaaggcagaatggccatctctctggggaatgagttcaggttgctggaccaaacagctacaggatttgggcagtcctaagtttcattttcacttttcacactaaggatctttgtggatgggatccagggtacagaccttgagatggagagattatccaggtatgctcaatctaataccttgagtccttgaaagtggagactcttttctgagtctcaacagagagaggagatggaagaagaagaaatgcatagtatgaaagggacttgacccactgttgctgactttgaaaatggagaagggggctctgggccacagaatacagaggcgtctagaagctgg

SEQ ID NO: 268237 - DNA, 581 bp, Homo sapiens
ccatttcctctaaactaaatttttggcataaggttcttatcattttctttttggtgtctgcaggctctgcaactggttatatgtacctttttccttttttcttttctttttttttttttctgggacagagtcctactctgtcactcagactggggtgcagtggtgcaatcttggctcactgtaacctcggcctcccaggttcaagcaattctcctgcctcagcctcccaagtagctgggattacaggcatgtgccaccatgcctgggtaatttttgtattttttttagtaaagacagggttttaccatgttgtccaggctgctctagaactcttgacctcaagtgatccccccgcctcagccccttttttcttttttttttcattttcagttcaggagagttttagcttaattataggctacagaaccagctttgggcttcatctatcctttctaatatttactgtttcctatttctctaatcctagctctttatttcttccctttactttcactggrcttattttgctatagtggaatgcagagggatgagtattccaggaaggcacaaaaactgtgcca

SEQ ID NO: 268238 - DNA, 675 bp, Homo sapiens
agtgtggcttgcacccaggtgctggcagctctgggtttagaaaccttattcyggtaaaatactgtcatctagtgtctactcttgtaattccaggctggcggggttctgttctctagggagagattgagcaggtgatcacttacattaagccctcattggagcagatggagctggtatttctgtaacacaggattgccctcaggggaatctcttgctccgcaaatgagaagcaacatctggagaagggtacctgcactagaagaggaacacagacgatggtttgcatccatttctcaacctctcacctgtagcacaatttttaaaaaacaaacaaaaaaacgcctcccaggacaagccctggcttggggaccacatccagacggtgccggcatagctctgcctcatcagccaccttgttctggggctaggtaaagagtcagaagattggggttcagatctgagctccccgcaccccagctgagtggccctgaggaagatgtgccttcaccctggccccagacttcccatctgtaaaataaaactttttggagcctggtttctaaaggctcatccagttttggtatttcaccacatgtgcatggttctgccccagtattcatgtccaagggctctggaccccacaccctggggacctggttagtctgatgcaggaca

SEQ ID NO: 268239 - DNA, 639 bp, Homo sapiens
tgatggctagactgatctactctgattgtgcagtctttagctcaaaaacctgcagtggctccacaccatcaattgggtggagcaccgagctactcacctggatrtttgtggttcttcatgtcatgcctcagtggaggccagcacattcgggtaattgcaattcctgattgcaagtaactgccacttgctgtactatctctgggattttgctcctgctgtaacctccacctgcagagcccacctctctgtctcactctgtgaacatcctacccattgcaaatgtcattgtctccacaaaggcacttctgccatatctagcagataggatctcagcctcttgtgagaactctcatgcctggattgccatacaattcctgcaacactttcctttagtccactctccaaacatggaaatgtccaagttgaaagggctcttccagactatctacaacagtggctcttgaagtgttttgggagagcttttgtaaaaatctgaatatcttagtcccatttcaggatgagaatcaaaacacatgtgcatgtacatgttggaaagaaaaaattttcaggtaattttctcagacaccagaagataagaatcacatatctcgtataatcacttcatattatgatgaaatg

SEQ ID NO: 268240 - DNA, 569 bp, Homo sapiens
gttgtgtaactgaacaagctggaacagatggcataggatggactgatgtataagagatgctctcagaataaacactgaaccagttattcatatgaacacatttcttcgttagaaatttgaaaatcagaactgcttggagataggttttcttagtcatcttttatgaaataagtactgattacagaggacaggtagagaccagatagagttcagcccatgcagctgcctcttaagacatctcctccagwggcgcccagtggtgtctgagggtgtccaggagtgttccagccctctttcctcctcctggatggcccgagtggcctggggcttgaccctgcctgcttgccttgcagttagagttcagcctgatccttgcagatcagggcatagaaactgacaagggagaagtcatttgcccagcaacatacaaccacagaaatactggtcttgctttgtccagctctggggtcaagccttctgagttccctcacttagggaggaagcaagctatagaggaaatgcaggatagtcagacacaactgggtcagatctcagctccaccgctagag

SEQ ID NO: 268241 - DNA, 591 bp, Homo sapiens
aatggaagcaaattctgatcatgatttttgtcaacattaaaaacaagctttttgaaactgtcactctctccgcaatggtacttttaagtatttttacaaaatgtacccattctccataatttggtccrcttactccgcctggctattaaggctgtaaaatggacccttatgtaattaatgaaacatgtaaattcatttttctccaggccttacttagttaattagttagaaaaagataagtttccaactgcagagtagtagtaatatctacagtggagacacatgtcagaaaaccacaaaattcctgtgaatgaaagaatgactgtacttgcctcatgttctgcaggcaagttatgcatgttgtcagtttaactaagattatgccaaagagaatttcgtgaacattctcacttttctttggcatacaccgaaaggcaacaaatgtaagtttgttttttttttccccaatgtttacgcaatttggaacaaagaccaattatcaatgtaggtgccctaccatacgtctgggaatacataaaaagcacaaatgtggtccaggatacatcactttttttgggcccacccaaggga

SEQ ID NO: 268242 - DNA, 584 bp, Homo sapiens
tcccctttgtgcctctcctttggaaggtgagggtaggcatgttctctcctgccttctggtttttccttgcctctccacactggctgtggagacgggtttgtgccctttgggccacagcctcaacatccrggaggaccaataggttcaaattgtaaggatacagagttcaggtgagtgtgaagacaggctttccccgcaaattgcgctttcctcaaccaagcaacatcaagcatagttgtgagttccttgggactgagataccacattaaaggtgtcaggaatccttcagggcaatgctttatttttaaatttttttatttttaagagatatgactattaggccttttcactttccccagctacctctggaccacacttccatcactttctcagctctagcctcactagccttgggcaacagaatttttcggctggggtctgcgaatccctaggggattgatgaatgggcttcaaggagtcacttatcctcatgaaattgaatacaacatattctgtgtgtgttcatatattcaatctcgaagcctttatcaaagtctcaaaggggtctctggtccaagaaagat

SEQ ID NO: 268243 - DNA, 586 bp, Homo sapiens
gaggacaggagtggggcatgagggccagatttgtgtatttcagctcctcatactcagtgtcttccttgtggtggccgtagtcttggcctaggcaccctgtcaacctgctcccctggcccctggctgcctcttattactatcattcaaacaggggtaaagttatgtagcaaggtgaccctgtccctccattctgaggtggatggggaggctggagactaagtaattaacacacagttgggagtaaaggtgcccagggaaatttcctgcagaagccaagcctggcagacgggaaagctcagcaggagcaaggcagtgaggcggggcatggggctgggaaagccatgggcagcctctttgcactttgcctacttttkctctggtaagaagctgtcatggtgagggcagtgggggccagggagagggaaagtgcagggtgctggacagagagaggagcgggacccaggcctggagagaaaggtcattctcctctgggttctttcctgaagagggacagccactacagtccttggactcccagccaggccatgggcctcctggctggaggagtaggctttgaggagctcag

SEQ ID NO: 268244 - DNA, 525 bp, Homo sapiens
ttcctgcagaagccaagcctggcagacgggaaagctcagcaggagcaaggcagtgaggcggggcatggggctgggaaagccatgggcagcctctttgcactttgcctacttttgctctggtaagaagctgtcatggtgagggcagtgggggccagggagagggaaagtgcagggtgctggacagagagaggagcgggacccaggcctggagagaaaggtcattctcctctgggttctttcctgaagagggacagccactacagtccttggactcccagccaggccatgggcctcctggctggaggagtaggctttgaggagctcaggaggcttctaaacacagcacacacacaacatgcacatgcaacatagcaacaacagacatgaatcacatagattggcaaacagcaacacacagtaccatggcaggcacacatgctcagccacacgcgccacacacaagcagcaagaagttcacaagcatggtcacacatgcagggrcacacaatagcacatgcacacaca

SEQ ID NO: 268245 - DNA, 566 bp, Homo sapiens
ggacccctgtcttgctgcactacaatgatctgtgtccctgggtatgagtgagcccacacaagacgaggcttagcagaggaaggctaggtggctgacgatactggctttaaatctctactgctttacttcttaactgtgcaccttggggcaagttacttcacttctctgaaccttggtttctttatcttaaaaatgagaataataacaataatgatagaaatagtaaataaatcatgaggttattatgaggagtaaatgtgattatgtatattaagtgctttgcacagtgtctagcatgcagcaagtattcaataaataatagctagtaataaaaatggcaagtgttacctgtgagtgcacagaggttctgagcaggctgcccatttgccatggaggcacatgcagctgcctggacccttgtgcctggtgctgcccatgacctgctgtgcaagctctgactctggggaacttgccctctgcctctgaaccttcattcctggtctcaaaaaygagggggctggattagagcctgtcttccaggttccacattctgctgagctgcttct

SEQ ID NO: 268246 - DNA, 635 bp, Homo sapiens
gaacatgagaaactttagacagaactgcaagatgatcatataatttcccaggagcctctggtcaggaagctcctgacctctccctggaagcatgacaggtgggcaagatagtgcatttggcttaaggcagcctcatcccaacccctaaattccccgtttgtttcctgtacaccttatcaaatgaaagaaagaatattagmtttggagtccaagacccctctgtttaaagcccagcttttgttctaaccaggtgaccttagacaagtcaccttttcttcccaagtctgggcttctcatttgcaaacttgaaatacccacttatggaacaattgtgagaattaaatgagacaatgtctgcaaaacacctagcacacagtagacatgcagcaaccctccactcttttccaaggacaacatagtttaaaatatataaaccttcatttcctttggaaagaacacccctggcaggaattaaacccaatgaaaatcaaacactgattctcccactccaatctctctcaccccttgttaaggaacgttctgcctcatgtctgcctgtgttcctcttcctgcccgagctcacagattctgtcatcaatcagcatgtggtcggtggcccccatggtgtgagcaag

SEQ ID NO: 268247 - DNA, 605 bp, Homo sapiens
ggccaccaaatgcagacagagtccctgaagaatgggcctgcttattggacttagagaaggacaagagaggagccccggcttggggaggtgggatatgaacaagccaaagtgaccccactcgatgcctaccactgagacacctctgctcagctctggccccaccaacagagaatgacacagatatctcttcccttcgaaggtcacattccagcagagacaataaacatgtaaattaatggtaacagaaagtgattcatgcccaaaatgaagctgcagcagtgagggtcccaagagtcttcaggtctgtgtgtggggtcatcagggaaggcttcactgaggaggcaatgccttggcagggttgtgaaggatraataggagcccaccccggctcagtgacaatcttgaccactaggatttcttgactgtttagcatgtgccacacactgtgttggtctgttgtcacatctcattcaagcttcacaacatgcctgaaagatagactttattatcagcacctttgtttttctctagataaagagacagacttggagaggttggatcatgcactccaggtcacatagtaaataagaggcagaggtaggcat

SEQ ID NO: 268248 - DNA, 547 bp, Homo sapiens
ggagatccaagatgagcaccatggaggtcctggggctggcacgctggcagcgaggcagcaggagtggaagtctgtgccacgctggcccaggacacaccatcagggccacccttctatcccagtaatcacagcttargcagcagccccaatcccctgataagcaccttctctgcaccctcaagagggcagaaattggctgggaatactgagaagaaatttgggcctcccagacccagggtttctggggaacagctctgccagggttgagcaatctagggaggatatgctagttttgcgaggctccaggctgcagataaggctagattaagtgagggtttgaaggaggggcgtactcaatgagcccaccttctaaacactgcccagcaaagcacaaccttcccactacttcctaaatagtggcttctctggatgctagctggcctcttcagatgaggaatttccctcccattctgggccctccccttcagagaacactggagcccaaggtgctttcagtaacaagtttcattgcagctaaaaataatgg

SEQ ID NO: 268249 - DNA, 547 bp, Homo sapiens
ggagatccaagatgagcaccatggaggtcctggggctggcacgctggcagcgaggcagcaggagtggaagtctgtgccacgctggcccaggacacaccatcagggccacccttctatcccagtaatcacagcttaggcagcagccccaatcccctgatmagcaccttctctgcaccctcaagagggcagaaattggctgggaatactgagaagaaatttgggcctcccagacccagggtttctggggaacagctctgccagggttgagcaatctagggaggatatgctagttttgcgaggctccaggctgcagataaggctagattaagtgagggtttgaaggaggggcgtactcaatgagcccaccttctaaacactgcccagcaaagcacaaccttcccactacttcctaaatagtggcttctctggatgctagctggcctcttcagatgaggaatttccctcccattctgggccctccccttcagagaacactggagcccaaggtgctttcagtaacaagtttcattgcagctaaaaataatgg

SEQ ID NO: 268250 - DNA, 547 bp, Homo sapiens
ggagatccaagatgagcaccatggaggtcctggggctggcacgctggcagcgaggcagcaggagtggaagtctgtgccacgctggcccaggacacaccatcagggccacccttctatcccagtaatcacagcttaggcagcagccccaatcccctgataagcaccttctctgcaccctcaagagggcagaaattggctgggaatactgagaagaaatttgggcctcccagacccagggtttctggggaacagctctgccagggttgagcaatctagggaggatatgctagttttgcgaggctccaggctgcagayaaggctagattaagtgagggtttgaaggaggggcgtactcaatgagcccaccttctaaacactgcccagcaaagcacaaccttcccactacttcctaaatagtggcttctctggatgctagctggcctcttcagatgaggaatttccctcccattctgggccctccccttcagagaacactggagcccaaggtgctttcagtaacaagtttcattgcagctaaaaataatgg

SEQ ID NO: 268251 - DNA, 547 bp, Homo sapiens
ggagatccaagatgagcaccatggaggtcctggggctggcacgctggcagcgaggcagcaggagtggaagtctgtgccacgctggcccaggacacaccatcagggccacccttctatcccagtaatcacagcttaggcagcagccccaatcccctgataagcaccttctctgcaccctcaagagggcagaaattggctgggaatactgagaagaaatttgggcctcccagacccagggtttctggggaacagctctgccagggttgagcaatctagggaggatatgctagttttgcgaggctccaggctgcagataaggctrgattaagtgagggtttgaaggaggggcgtactcaatgagcccaccttctaaacactgcccagcaaagcacaaccttcccactacttcctaaatagtggcttctctggatgctagctggcctcttcagatgaggaatttccctcccattctgggccctccccttcagagaacactggagcccaaggtgctttcagtaacaagtttcattgcagctaaaaataatgg

SEQ ID NO: 268252 - DNA, 470 bp, Homo sapiens
agaagccacaaaggggagatccaagatgagcaccatggaggtcctggggctggcacgctggcagcgaggcagcaggagtggaagtctgtgccacgctggcccaggacacaccatcagggccacccttctatcccagtaatcacagcttaggcagcagccccaatcccctgataagcaccttctctgcaccctcaagagggcagaaattggctgggaatactgagaagaaatttgggcctcccagacccagggtttctggggaacagctctgccagggttgagcaatctagggaggatatgctagttttgcgaggctccaggctgcagataaggctagattaagtgagggyttgaaggaggggcgtactcaatgagcccaccttctaaacactgcccagcaaagcacaaccttcccactacttcctaaatagtggcttctctggatgctagctggcctcttcagatgagga

SEQ ID NO: 268253 - DNA, 600 bp, Homo sapiens
ctggttcagatttatacctgaaatattagaactgggaggaaacttatgccttattgttattgagttcaatccctaattttatagttggggccacaggtccagggacaataactgactcactcaaatctcacaaaagcagatggcaggctgagaaccctccaggtgctaytttatgtggacatgaccatgaaagtgggggatagcaaagcccactgaacacctccaggtattcccacccatcactctgacttcctgtaacagtctttgtctcttgaggtgcatctggctgaacaggtacctattagctgggccacaggatggaggctcccagaagacaaaagttctttcttacagtgactcactatatgaaaaaagggctttatttcatatctacaagcctcagtttcccaatcattaaaatgggggaaaagattatctgccttttctcttctggtcttaggagaggctactccttgagcaaagcctgccattctttaaaaaatatcttcacaggtcatgccatctggtatcgatgagagaaggcaagagaacatggggtctaggaagtcaagctgagaacatagcctgtttttgtttgtt

SEQ ID NO: 268254 - DNA, 600 bp, Homo sapiens
ctggttcagatttatacctgaaatattagaactgggaggaaacttatgccttattgttattgagttcaatccctaattttatagttggggccacaggtccagggacaataactgactcactcaaatctcacaaaagcagatggcaggctgagaaccctccaggtgctactttatgtggacatgaccatgaaagtgggggatagcaaagcccactgaacacctccaggtattcccacccatcactctgacttcctgtaacagyctttgtctcttgaggtgcatctggctgaacaggtacctattagctgggccacaggatggaggctcccagaagacaaaagttctttcttacagtgactcactatatgaaaaaagggctttatttcatatctacaagcctcagtttcccaatcattaaaatgggggaaaagattatctgccttttctcttctggtcttaggagaggctactccttgagcaaagcctgccattctttaaaaaatatcttcacaggtcatgccatctggtatcgatgagagaaggcaagagaacatggggtctaggaagtcaagctgagaacatagcctgtttttgtttgtt

SEQ ID NO: 268255 - DNA, 600 bp, Homo sapiens
ctggttcagatttatacctgaaatattagaactgggaggaaacttatgccttattgttattgagttcaatccctaattttatagttggggccacaggtccagggacaataactgactcactcaaatctcacaaaagcagatggcaggctgagaaccctccaggtgctactttatgtggacatgaccatgaaagtgggggatagcaaagcccactgaacacctccaggtattcccacccatcactctgacttcctgtaacagtctttgtctcttgaggtgcatctggctgaacaggtacctattagctgggccacaggatggaggctcccagaagacaaaagttctttcttacagtgactcactatatgamaaaagggctttatttcatatctacaagcctcagtttcccaatcattaaaatgggggaaaagattatctgccttttctcttctggtcttaggagaggctactccttgagcaaagcctgccattctttaaaaaatatcttcacaggtcatgccatctggtatcgatgagagaaggcaagagaacatggggtctaggaagtcaagctgagaacatagcctgtttttgtttgtt

SEQ ID NO: 268256 - DNA, 493 bp, Homo sapiens
tgcccttggactcccttcccatcactactgcctaaatccaccatactgatctcaagcaccatagattagctctgtctctttttgcacttcatagaaacaaaatcttataactgctcctcctttgtgtatacctccttttgtacaacatcatgcttccataaggttgtgtgtcattgtagagtggccattctaattgctagatattattctattgtataattatattatgatttgcttatccattctactattgatggacatttgggtagtttccagtttggtgctattacagatagtgttaaaatagtctgtttttaatattttaaacaatcacttaaaaagacagatactttaaaatatccaggaagaaaataattgtatattcatgyttccatttaataaatatttgtcaagcaccaactgtgtcctggaatggtcttctcccttcctctcctaagcttagcctttacagaacaggtgacatcccacctct

SEQ ID NO: 268257 - DNA, 493 bp, Homo sapiens
tgcccttggactcccttcccatcactactgcctaaatccaccatactgatctcaagcaccatagattagctctgtctctttttgcacttcatagaaacaaaatcttataactgctcctcctttgtgtatacctccttttgtacaacatcatgcttccataaggttgtgtgtcattgtagagtggccattctaattgctagatattattctattgtataattatattatgatttgcttatccattctactattgatggacatttgggtagtttccagtttggtgctattacagatagtgttaaaatagtctgtttttaatattttaaacaatcacttaaaaagacagatactttaaaatatccaggaagaaaataattgtatattcatgcttccatttaataaatatttgtyaagcaccaactgtgtcctggaatggtcttctcccttcctctcctaagcttagcctttacagaacaggtgacatcccacctct

SEQ ID NO: 268258 - DNA, 477 bp, Homo sapiens
gtctcctcccctaaatacaagctccgtgagagcaaggaccagtctggatttgcccttcttgaatacatagccctttgcatgggtctggcacacggtggcagaaagtggaaatagggggtttgaaaaacataatgacaaatatgctgtggctgctttaggcctggctgcatttcyctgttgactgtggcagcccttattttctccttagaaaacaagccccctgaagttcttctggcaatatccatcctcccacaaacaggcttgggcctggtacctagttatttgttcaacaggtatggattgaacaccactatgtgccttatgcttttctggggtgggatatgtcaatgagggacatagagagaaattccttcctggtttggggagactgaaaagagacaaatgaattcaggaaggttggagagagggatgcaatttggaagtggatagtcagggaaggcctcaccagaaagtgac

SEQ ID NO: 268259 - DNA, 518 bp, Homo sapiens
gtagccccctgtgggaaagaatgcatgagaattgtgttgaatttttaaagcctgtggcatttaggccttaaatgatatttgaaagtactctctctctgtctgtctctgtatttgtccttttctctcttctctttctctctttccctcccccaggtaatttataggaaaaaaaagagagtatttaaataatatatgttttcttattttgcaagatattaaactttttaaattacacataaccttgagatttaaaaaattcactttgyagctgtccttgaagggtttgttgctttgtgatccagggtgagagacagttctaactcaacccgtttacagagattaaacaatttgcctcccttgagacctgccatggatttccctctgggctttagctctcctccattccttaggtgcaggctccttccctgcactcccacctccaatgatattaaccatatggaggctgaagtgcatctgccaacatgaacaaccttgaattgatcttcattagcatgatt

SEQ ID NO: 268260 - DNA, 558 bp, Homo sapiens
tttgttggccccccagagtccatttttgtaattactatkcagtgcagctttaaaagttaagatcatcaccaaattactcaatcttaaccaagacatttttaatttatctcccatgggataacacattatgagcatttactttctgatctcagtagaatgcagagaaggttaaactattccctccctgagacagcataatgcagtggaaagatctcagacaaggatgtatttcctaggtccaccctgacttcttaagggctcttagtttgggcttccatgtacccccttggtacccacattcatatctgtaaactaaacataaaaatacctggtgtcttagctaagatactttgggttatgagtaacagaaacagaagccgattcaagttttcacttagcacagtgtttagcaaatagtcgatgcaccataaataagtggtgaatgaatgaatgagtgtcttaagaaagtaggaaaggtatcagaagaatcctggggcgtcatgtggtatctaaaagaaacctggaaatcaaagcttcagaaagatcagaaatcatagg

SEQ ID NO: 268261 - DNA, 558 bp, Homo sapiens
tttgttggccccccagagtccatttttgtaattactatgyagtgcagctttaaaagttaagatcatcaccaaattactcaatcttaaccaagacatttttaatttatctcccatgggataacacattatgagcatttactttctgatctcagtagaatgcagagaaggttaaactattccctccctgagacagcataatgcagtggaaagatctcagacaaggatgtatttcctaggtccaccctgacttcttaagggctcttagtttgggcttccatgtacccccttggtacccacattcatatctgtaaactaaacataaaaatacctggtgtcttagctaagatactttgggttatgagtaacagaaacagaagccgattcaagttttcacttagcacagtgtttagcaaatagtcgatgcaccataaataagtggtgaatgaatgaatgagtgtcttaagaaagtaggaaaggtatcagaagaatcctggggcgtcatgtggtatctaaaagaaacctggaaatcaaagcttcagaaagatcagaaatcatagg

SEQ ID NO: 268262 - DNA, 558 bp, Homo sapiens
tttgttggccccccagagtccatttttgtaattactatgcagtgcagctttaaaagttaagatcatcaccaaattactcaatcttaaccaagacatttttaatttatctcccatgggataacacattatgagcatttactttctgatctcagtagaatgcagagaaggttaaactattccctccctgagacagcataatgcagtggaaagatctcagacaaggatgtatttcctaggtccaccctgacttcttaagggctcttagtttgggcttccatgtacccccttggtacccayattcatatctgtaaactaaacataaaaatacctggtgtcttagctaagatactttgggttatgagtaacagaaacagaagccgattcaagttttcacttagcacagtgtttagcaaatagtcgatgcaccataaataagtggtgaatgaatgaatgagtgtcttaagaaagtaggaaaggtatcagaagaatcctggggcgtcatgtggtatctaaaagaaacctggaaatcaaagcttcagaaagatcagaaatcatagg

SEQ ID NO: 268263 - DNA, 558 bp, Homo sapiens
tttgttggccccccagagtccatttttgtaattactatgcagtgcagctttaaaagttaagatcatcaccaaattactcaatcttaaccaagacatttttaatttatctcccatgggataacacattatgagcatttactttctgatctcagtagaatgcagagaaggttaaactattccctccctgagacagcataatgcagtggaaagatctcagacaaggatgtatttcctaggtccaccctgacttcttaagggctcttagtttgggcttccatgtacccccttggtacccacattcatatctgtaaactaaacataaaaatacctggtgtcttagctaagatactttgggttatgagtaacagaaacagaagcygattcaagttttcacttagcacagtgtttagcaaatagtcgatgcaccataaataagtggtgaatgaatgaatgagtgtcttaagaaagtaggaaaggtatcagaagaatcctggggcgtcatgtggtatctaaaagaaacctggaaatcaaagcttcagaaagatcagaaatcatagg

SEQ ID NO: 268264 - DNA, 524 bp, Homo sapiens
catagctgccagccttgactcctccctgtcccccactccgccccatcctccctgtcaccaaagcctggcaagtctgtacacgttaagtctcaaatgtcgttaaacccctgtctttcccccaccctggaggccaccctcttggtcaggagwgattgagatcacaagctcaggagtaggcatgcctgaacaagcatgtgccagctttacgccctttggtaaagcactcaacctctggaaacctcaggtttctcttctataacatggggcaaataatggttcctacctcagtagaggataattatgagagcacaatgtgacaagtagatcatcttccacctgacttaacccaaaatcctattactgagtctccctgtttcaggtcccaaccccttctccccaggcagtcagagggcccagtctgaaattcaagtctgttctctcactcctggtgtctagtgaaaggagcctgtcttttggagtcataaagtgtagattcatgtgtgcctaggaagcccagttatttg

SEQ ID NO: 268265 - DNA, 524 bp, Homo sapiens
catagctgccagccttgactcctccctgtcccccactccgccccatcctccctgtcaccaaagcctggcaagtctgtacacgttaagtctcaaatgtcgttaaacccctgtctttcccccaccctggaggccaccctcttggtcaggagagattgagatcacaagctcaggagtaggcatgcctgaacaagcatgtgccagctttacgccctttggtaaagcactcaacctctggaaacctcaggtttctcttctataacatggggcaaataatggttcctacctcagtagaggataattatgagagcacaatgtgacaagtagatcatcttccacctgacttaacccaaaatcctattactgagtctccctgtttcaggtcccraccccttctccccaggcagtcagagggcccagtctgaaattcaagtctgttctctcactcctggtgtctagtgaaaggagcctgtcttttggagtcataaagtgtagattcatgtgtgcctaggaagcccagttatttg

SEQ ID NO: 268266 - DNA, 364 bp, Homo sapiens
ctccgtctcaaaacaaacaaacaaacaaacagaataaggcagttctcttttggtgggtgtrcaacaatctccaagagttacactgttaatgatataagcatgaggtagtgtgtggagggagttactgtttccatgcgtgggggtgaaggaaatacatacaataagattatgtcagaatctctgttacactgtaacagtgattgccattagggaggggacctgcagatcaggagaaacagtaggagggagacttgttgcatatgtccttgtgcactgattgaactttttttctgtgcatgtattttttttttttttctttttcttcgagatggagtattgctctgtcacccaggctggagtgcag

SEQ ID NO: 268267 - DNA, 364 bp, Homo sapiens
ctccgtctcaaaacaaacaaacaaacaaacagaataaggcagttctcttttggtgggtgtgcaacaatctccaagagttacactgttaatgatataagcatgaggtagtgtgtggagggagttactgtttccatgcgtgggggtgaaggaaatacatacaataagattatgtcagaatctctgttacactgtaacagtgattgccattagggaggggacctgcagatcaggagaaacagtaggagggagacttgttgcatatgtccttrtgcactgattgaactttttttctgtgcatgtattttttttttttttctttttcttcgagatggagtattgctctgtcacccaggctggagtgcag

SEQ ID NO: 268268 - DNA, 364 bp, Homo sapiens
ctccgtctcaaaacaaacaaacaaacaaacagaataaggcagttctcttttggtgggtgtgcaacaatctccaagagttacactgttaatgatataagcatgaggtagtgtgtggagggagttactgtttccatgcgtgggggtgaaggaaatacatacaataagattatgtcagaatctctgttacactgtaacagtgattgccattagggaggggacctgcagatcaggagaaacagtaggagggagacttgttgcatatgtccttgtgcactgattgaactttttttctgtgcatgtattttttttttttttctttttcttcgagatggmgtattgctctgtcacccaggctggagtgcag

SEQ ID NO: 268269 - DNA, 554 bp, Homo sapiens
atgtttcttagaaacttcagccaagccatgatgttaaatgacaaagagggaacttggaaatagatttcttgggagagtttacacacatcttgaaggaagattggcaccttccaagtggcatacaaggagtaatggtgcctactttacacctgagaaaagtgttgttaaggtgacaagatagaggagactgaataggaattggcctttcagattacgaagaatgcaggcacatttcctgttgcacacacatgagctacatggatgaaatggaggtcctggatttatcatggatcctctacaatagagctgcctagatgagcagagaaatggaagatgmccatgaaggatacattcttagagctaacaaaagccccaatacattccatggaatagaaaacctgcctactggctccaccaccaatacctaacttcagtcaaggaatttgctggaaagctctgagaagagttaattttcaatattttccaagtcagagtatgaagccaccaggaaacagtatcagttaatgtaaaacttcttatccattttttctcca

SEQ ID NO: 268270 - DNA, 514 bp, Homo sapiens
gctactataagcaactatttaccaataaactgaaaaatctaaaagaaactgataaatttctagacacaacctaccaagattgaaccacgaagaaatccaaaacctaacagatgaataacaggtaacaagattgaagtcacaataaaaagtctctcagtaaagaaaagcctgggacccaatggcttcactgctgaattctaccaaatgttgaaagaasaactaatgtaaatcatactcaaactgttccaaaaaataaagaaggaaatacttccaaactcattctctgaagccagtatcaccctgataccaaaaccagaaaaatatatacaaaaccaaaaaataaaacaaacaaaaaataactaaaggccaatatttctaatgaatattgatgcaaaaatattcaacaaaatactaggaaacgaaattcaagaatatgttaaaacaatcatttatcaagaccaaatggtatttattccagagatgcaaggatggttcaacatatgcaaattaatca

SEQ ID NO: 268271 - DNA, 606 bp, Homo sapiens
taaatttctagacacaacctaccaagattgaaccacgaagaaatccaaaacctaacagatgaataacaggtaacaagattgaagtcacaataaaaagtctctcagtaaagaaaagcctgggacccaatggcttcactgctgaattctaccaaatgttgaaagaacaactaatgtaaatcatactcaaactgttccaaaaaataaagaaggaaatacttccaaactcattctctgaagccagtatcaccctgataccaaaaccagaaaaatatatacaaaaccaaaaaataaaacaaacaaaaaataactamaggccaatatttctaatgaatattgatgcaaaaatattcaacaaaatactaggaaacgaaattcaagaatatgttaaaacaatcatttatcaagaccaaatggtatttattccagagatgcaaggatggttcaacatatgcaaattaatcaatgtgacacactgtgtcaacagaatgaaggacaaaaactatatcatcatttccactgatgctaaaaaatcattgcataaaattcaacatcccttcatgataaaaaagcactaaaaaaactaagatagaaggaacatacctgaac

SEQ ID NO: 268272 - DNA, 538 bp, Homo sapiens
ttgcctcccagagcacaagcgtcaatcctccaatgttgaagcctcagcaaccctagccagcccatgcctttatcccagcaaagccacrgaggcacagtttgtttatattaataatgctgtcatgaagaaaaagtggaatctactttcatataacttaatgaaattgggttgaatgtaactcacttccggggtattaacgatttaatactgtagaaggcaatactttacaattagggagggacagaatctgtaatggctgggaaattcagatatgcacattttcagtacaccccaccccttgtgatgtcagataatcatggttccttggtactcatatttcactaactatcgcagtgacggcaaattctctgtagcagatgcttcagatcggtctccactttcatacgcctcttctaggcttggggaggggtcccagcaactttgtatttgtatatttcatattatttttcttaaaagggggtgcttgaaattgtataagctaacagctctgcataatttagatctgcctctacaaatg

SEQ ID NO: 268273 - DNA, 597 bp, Homo sapiens
ctttcatataacttaatgaaattgggttgaatgtaactcacttccggggtattaacgatttaatactgtagaaggcaatactttacaattagggagggacagaatctgtaatggctgggaaattcagatatgcacattttcagtacaccccaccccttgtgatgtcagataatcatggttccttggtactcatatttcactaactatcgcagtgacggcaaattctctgtagcagatgcttcagatcggtctccactttcatacgcctcttctaggcttggggaggggtcccagcaactttgtatttgtatatttcatattatttttcttaaaagggggtgcttgaaattgtataagctaacagctctgcataatttagatctgccyctacaaatgtatctttgaattttccaagtgaaaaaagagtttaacaaagagtaatctagcaatatacgtatttttaaagtaaaagctacataaagactgacattactgggggaagatctgcaggctgtagaaaagtcctggagattttttttctttttttagagaactgtgcttatgatacctattagaaatacataccaattaaatcag

SEQ ID NO: 268274 - DNA, 594 bp, Homo sapiens
ccactgccaatattgtgggcagatggggagggagaggcctaaaagctgtgcttgctttcttakcagggaagcttactgtctgggggaaggtctgagcggggcactgtggagcaaggcttcttgccaaccatgtaggaactgggtaaggcctttcattagtaactatcccccaattccctggcaaactatgacactgcagaggcagccataatcccctatggaacttaactgtattggtctgagagccaccccctcctacctccacagtggcaatagcaagccccacccaaggagagtctgagcccagatctgcctaaatctgctcccacctgatagtatttctctacccaccctggtacctgaacacaaaacaaataaactcttcagggtcttatgacccatcacttgagaaaccagaatactcaacctggccaacttagggcaagcttaagcttagatagatccccctactactacggcagctggtgctctcttgaaagagtcacctccttgctggaggccaaccaacttaggccattacagcaactcatgacagaataaccctgctcccaggaaggagaaaacaacagctaa

SEQ ID NO: 268275 - DNA, 594 bp, Homo sapiens
ccactgccaatattgtgggcagatggggagggagaggcctaaaagctgtgcttgctttcttagcagggaagcttactgtctgggggaaggtctgagcggggcactgtggagcaaggcttcttgccaaccatgtaggaactgggtaaggcctttcattagtaactatcccccaattccctggcaaactatgacactgcagaggcagccataatcccctayggaacttaactgtattggtctgagagccaccccctcctacctccacagtggcaatagcaagccccacccaaggagagtctgagcccagatctgcctaaatctgctcccacctgatagtatttctctacccaccctggtacctgaacacaaaacaaataaactcttcagggtcttatgacccatcacttgagaaaccagaatactcaacctggccaacttagggcaagcttaagcttagatagatccccctactactacggcagctggtgctctcttgaaagagtcacctccttgctggaggccaaccaacttaggccattacagcaactcatgacagaataaccctgctcccaggaaggagaaaacaacagctaa

SEQ ID NO: 268276 - DNA, 547 bp, Homo sapiens
gcataaaccttacaggacctatgaaacaataacacagtgaaaaaaacaaggcattgaatcacaactagcatgatgaatagaacggtactttacatttcaatactaatgttgaatgtaaatggcctaaaggctccacccaaaacaagctygtctaacttgcagcctgcaggctgcatgcagctcaggatagctttgaatacagcccaacacaaatccataaactttcttaaaacattatgactttttttgtgatttttttctttttttagctcatcagctattgttagtgtattttatgtgtggcccaagacaattcttcttcttccaacatgacccagggaagtcaaagattagacaccctgaattaaaagatacagactggcagaatgaataaaaatccactgggcaaatatttgccttcctcaagagactcacctaatacataaagattcacataaacttaaggtaaagagattgaaaaagatatttcacacaaatgaaaactaacagcaagtagaagcagctattcgtaaatcagacaaatcag

SEQ ID NO: 268277 - DNA, 579 bp, Homo sapiens
taaaactggaaattaactccaaaaggaaccctcaaaactatacagatacatggaaatcaatctgctgttgaataatctttgggttgacaataaaattaagatggaaatttaaaaattctttgaactgagtgataatagtgacacaacttatcaaaatctctgggatacagcaaaagcggtactaagaggaaatttcatagcattaaatgcctacatcagaaagcctgaaagagtacaaatagacaatttaaggtcacccctcaaggaactagagaaacaagaacaaaccaatcccaaacacagcagaataaaagamataacaaagatcagagcagaactaaatgaaattgaaacgaaaacaatacaaacaatatatgaaacaaaaagatgcatttttttaaaagataaacaaaattgatagaccattagtgagattaacagagaaaagaagagagaagacagtctgtagtgttcttttagtgttaagtcctttcctggttttggtattagggtaatactggcttcatagaacgatttagggaggattccctctttctctatcttttggaatactttcag

SEQ ID NO: 268278 - DNA, 611 bp, Homo sapiens
taagtgatgatttctcaaacatgattgactaaaaatttatatcatagagaaataatgcccaaatgtagattcctcaagggttggcagcacactatgtcagagaggcttttgtgcaactcacttatccagaagctgactcaaagagatgttcactgagaactttcttaaggcaactcatcaaacacgactcttacatgaggtttcatttccatgattcttggccaatttttttttttttggtcaaaaaaactttcacttccgtaaatcatccctaaatcatattatttcacattctcaactgcaagtattcacacaggtttttatctttgctttkaccttttttcaaagatgtcatgacaccatttctttctccaaacactgtgttgtctgtagttgttattcaatagcacaaaaatgtgaactcaaatcaatcacttaagatttgatttggtcatttccaagatttgcaaaaaccttaacttgattttataacctatgttcaaaaactctaaccccggagatttatcctagctctattccaaagtacctgtgttataccaaatgcacatcccatcacttctcagagcatcaacttgtaattctttgcaaac

SEQ ID NO: 268279 - DNA, 572 bp, Homo sapiens
caggctatgtcagtttgacgtctagagggcaggagacttaataactgaggtcagttgcttaggtgctacatgcctatgtaactgaccacctctctgcaagccccctgatgccaagactcaggaaagcttacctggtaggcaatactccatctgtgttatgcacatcawtagtaggagaattaagtacaaccctgtgtaatgccagtaggaggagacacccggaaacttacatctaatttctcttggattttacccatgtgtgtttttccttttgctatttttcatctatttttttctgatataaactataagggtgagtacaatagcttttctgtattctgtgagttattctagttaatcatcaaacatgaaagtggtattggaaacagagtggaatttttatgttcataaggttcattttcatgttcaatatatttttatttaatttcccatgagatttccttattacctgctatttagaagtatacagtttggaaattttacaaatgtttggaaatttttctggtatcattttattatgaatttttagttcccttccatttttgtctgag

SEQ ID NO: 268280 - DNA, 572 bp, Homo sapiens
caggctatgtcagtttgacgtctagagggcaggagacttaataactgaggtcagttgcttaggtgctacatgcctatgtaactgaccacctctctgcaagccccctgatgccaagactcaggaaagcttacctggtaggcaatactccatctgtgttatgcacatcattagtaggagawttaagtacaaccctgtgtaatgccagtaggaggagacacccggaaacttacatctaatttctcttggattttacccatgtgtgtttttccttttgctatttttcatctatttttttctgatataaactataagggtgagtacaatagcttttctgtattctgtgagttattctagttaatcatcaaacatgaaagtggtattggaaacagagtggaatttttatgttcataaggttcattttcatgttcaatatatttttatttaatttcccatgagatttccttattacctgctatttagaagtatacagtttggaaattttacaaatgtttggaaatttttctggtatcattttattatgaatttttagttcccttccatttttgtctgag

SEQ ID NO: 268281 - DNA, 532 bp, Homo sapiens
agatggtgtctcattgtggttttgatttgtgtttctctgattagtgattatgagtgttcaaatgtttgttggccacttttatgtcttcttttgagaagtgtctgtttatgttctttattcatttttaaatgaggttatttgatttttgtttggtgaattaagttctttatagatgctatatattagatctttgttttatgcatagtttgtgaatattttctcccattctataggttgtctgtttactctgyctatagtttattttgctgtgcagtagctctgtagtttaatttggtcccatttgtcaacttttgttattgcaattgcttttagggacttagctaaacattcttcaccaaggccaatgttgagaaggggatttcctagattttcttttagtattttcatagtttgaggtcttaagcctcaaagatatgaaatctttaatccactttgagttaatttttgtatatggtaaaaggtaaggatccagtttcattattctgcctatggctagccagttatcccagca

SEQ ID NO: 268282 - DNA, 514 bp, Homo sapiens
ttcatttttcaaataaatattgtttggggtttttatctaggatccccttgcctagcactagatcctgaagactgaagattttctcctgttttcttctagaagtcttatagtaatgttttatatttaaatatgtggtctgttttgagttaaattttttataagttgtgagaatctggttgaagtttgatttttgcctgtggatatccaattgctcctgcaccatttgttgaaacggcaatctttttttccactaaattgcttcagtactttggtcaaaactgttgggtatatttgtcttgctctatctctgggttytctgttctcatttcttagtctatatgtctctcctctgccaataccatgcatccttgactactgtaattatataagaagttgagatcagactgatttcttctacattattagtcatttttaaagactgttttagctattctggttcctttcccttttcatataaattattgaatactctatatctaaaaaaactctcact

SEQ ID NO: 268283 - DNA, 443 bp, Homo sapiens
ggctaggtcatctgcagtattgtgcttgagtagggttgttattgtctaaaagttttctgtctcactaactggcccctttcctcatccttggctagagagatcaggcttttattgaagctcttgtaaaaaaaaaatctgtgcccattggtatttctagtttgatggcttctctagtcctaagtgtggtatatattaggcaaaaacaaaacctagctaacttaccaccttgtcattcctcaggatccgaggtttctagctggtctgctcagagtcttcttatgcttgctttatgtacaatatccagagttttaattttacttagcacargtaatagagaaaaagtatttccattcaattttcctgaaaatgaaagtccactgacactgtagatttctaagagcctgaagagttaatagaacatacaagtttttttagttagcaaa

SEQ ID NO: 268284 - DNA, 565 bp, Homo sapiens
ataaggagctgagcatctgggtctgaacatgggtagaagacatgggcaggagaaagtcatttaggactgtatattgtactcagtttatgccccaacctaaatccatgcaattatgcctttcctccccacccaccctgactgtagccaaggccacttatcttgctttcagactgagcaaaacctaacaaaggtagtgaatccaagttgctgctgctgctgcagtgagtgtcctcatgcacagctctgacttgtaaagattgctgtgcctacacattgaacaaaaaaatcccatgggactctggttttcatagtgcctgccaggagtgattgagaagtgtggttaaggccccatgaagtagtctttgacygatgggagatgagagacagaaagcaatcagaagatatattattctttcttcctcgctgtatgcacagttattctgaaacagtaatttctatagcttctttgaaaacatctcacaagaccaaggaatcagctgcacttgtcacaaagcagtcagtagcttggtgtcactctccttgactgtgttctttttccttcctc

SEQ ID NO: 268285 - DNA, 527 bp, Homo sapiens
catttagggttttagccttgttactgttggacagtagtaaaagttctaaagaagatgtgttcaacatcaacccgtcttctaccatcaacaccacaagggttttagctttgttattcttgggcagtagtaaaagttctgactctctactgggattcctctggcataaatccaggarggagtgtagtggtgctgcattattgtcaggtgggaatggaagcatagactccctacacagccttctctgaaaccatcacagtggggaggttagaataccttgttaatgccagataagggtgaaagttgagttccccattcagcctttgttgtcatgtgtaaggataaagccacaacatatactgtggtgtttggtgtttggctagaatagtaaatttactatgtacaatatttctgacttgctagatggctcctttcctgcttttttcactcaagagaacagatttaattatttatttattattaataataattatttaatctgtgcccattgacatttttgggttgctgac

SEQ ID NO: 268286 - DNA, 527 bp, Homo sapiens
catttagggttttagccttgttactgttggacagtagtaaaagttctaaagaagatgtgttcaacatcaacccgtcttctaccatcaacaccacaagggttttagctttgttattcttgggcagtagtaaaagttctgactctctactgggattcctctggcataaatccaggaaggagtgtagtggtgctgcattattgtcaggtgggaatggaagcatagactccctacacagccttctctgaaaccatcacagtggggaggttagaataccttgttaatgccagataagggtgaaagttgagttccccattcagcctttgttgtcatgtgtaaggataaagccacaacatatactgtggtgtttggtgtttggctagaatagtaaatttactatgtacaatatttctgacttgctagatggctcctttcctgctyttttcactcaagagaacagatttaattatttatttattattaataataattatttaatctgtgcccattgacatttttgggttgctgac

SEQ ID NO: 268287 - DNA, 479 bp, Homo sapiens
aatatctgtaattacaggagtctctgattaaagtatatgaattatttgaaggcaaaaactataccttatatttctttgtacctgcaaagttctcaagttataattgggtgcatagtaactgttcaaagtattcttaatgaggaacaaaataaagtaaaataaaatagagttttttcattcaataacaatcaacagaaatttattgaatggcaggstatggcaaattctggttagaatttagaaatacaagatgttctctacctacatatagcttacgtggaagcaaatactgactaaataatctcagaagttcataatttaatagcagaacaaagaggagttgctgctatcacagaatagattgtttcaagcaaacattcatgtcaatatatgagtatgaatggtgggtgctttgtgaaaacatgattgtgattcttgtgaaaaaatgactataaagaaatgttttgacaaatggggat

SEQ ID NO: 268288 - DNA, 479 bp, Homo sapiens
aatatctgtaattacaggagtctctgattaaagtatatgaattatttgaaggcaaaaactataccttatatttctttgtacctgcaaagttctcaagttataattgggtgcatagtaactgttcaaagtattcttaatgaggaacaaaataaagtaaaataaaatagagttttttcattcaataacaatcaacagaaatttattgaatggcagggtatggcaaattctggttagaatttagaaatacaagatgttctctacctacatayagcttacgtggaagcaaatactgactaaataatctcagaagttcataatttaatagcagaacaaagaggagttgctgctatcacagaatagattgtttcaagcaaacattcatgtcaatatatgagtatgaatggtgggtgctttgtgaaaacatgattgtgattcttgtgaaaaaatgactataaagaaatgttttgacaaatggggat

SEQ ID NO: 268289 - DNA, 538 bp, Homo sapiens
aatcagcaactaactagaagaatcagagggaaacaatggggtgacactgaggagaatagaatactggatagcaaggtagggaccaaggcctttgacccttgaagatttgctgaaaaaaaacatcaactggcaaaaggctgattaattgaagaaaaagtattcaaatttatttarcatttatacattggagtcttcaccatgaagatccaactctccagtgggatacagaagctggcataccaccttggagttagagaaaaaaatgtggggttggtgcatgacaaaaagtttatggtggtaaatcaagttttaatggcaaggcagactatggaagcaggagaggctccatgcagacctaggaagtcacaggcaggcttggccgggagggacagagaagacgtggctggtaaaggtggtcttgttatatagatgaaaattcactagtagctgccctcagagagaatagatagtaaagtattattttagatcttaaggtgatagactcagttaatctttcctacgtctggacaaggaaagg

SEQ ID NO: 268290 - DNA, 538 bp, Homo sapiens
aatcagcaactaactagaagaatcagagggaaacaatggggtgacactgaggagaatagaatactggatagcaaggtagggaccaaggcctttgacccttgaagatttgctgaaaaaaaacatcaactggcaaaaggctgattaattgaagaaaaagtattcaaatttatttagcatttatacattggagtcttcaccatgaagatccaactctccagtgggatacagaagctggcataccaycttggagttagagaaaaaaatgtggggttggtgcatgacaaaaagtttatggtggtaaatcaagttttaatggcaaggcagactatggaagcaggagaggctccatgcagacctaggaagtcacaggcaggcttggccgggagggacagagaagacgtggctggtaaaggtggtcttgttatatagatgaaaattcactagtagctgccctcagagagaatagatagtaaagtattattttagatcttaaggtgatagactcagttaatctttcctacgtctggacaaggaaagg

SEQ ID NO: 268291 - DNA, 510 bp, Homo sapiens
ccaatccctgcatgctattgcttgcttatggatgagtgaaaggaataaaaattttaagttatagctacagtttctctacctgtacattccaatactgaccttgcatggtttctttgagggctaagtatgacaaaaggatgcagtgatttygaacttagattttaaaaaacaaatatgactcttttgaactgtgtgaacataggcacattgctggatctgagtaatttcatgtgctaagagggaataatagcatcagccttaatgctgcattattgcatttagcattatttctttctgaagatgaaagaagacagacatcattatatttaacaaagtgcctggcacatataaaatagtcaataaatgttatctatcattgctattattacctaatactgcgcatagtaagccctgaacctgttcctggcatgtggagccatgtactatgttcatgacattaaacaaagtagtagctatataatgaatatataaatgtgacttttattatta

SEQ ID NO: 268292 - DNA, 510 bp, Homo sapiens
ccaatccctgcatgctattgcttgcttatggatgagtgaaaggaataaaaattttaagttatagctacagtttctctacctgtacattccaatactgaccttgcatggtttctttgagggctaagtatgacaaaaggatgcagtgatttcgaacttagrttttaaaaaacaaatatgactcttttgaactgtgtgaacataggcacattgctggatctgagtaatttcatgtgctaagagggaataatagcatcagccttaatgctgcattattgcatttagcattatttctttctgaagatgaaagaagacagacatcattatatttaacaaagtgcctggcacatataaaatagtcaataaatgttatctatcattgctattattacctaatactgcgcatagtaagccctgaacctgttcctggcatgtggagccatgtactatgttcatgacattaaacaaagtagtagctatataatgaatatataaatgtgacttttattatta

SEQ ID NO: 268293 - DNA, 510 bp, Homo sapiens
ccaatccctgcatgctattgcttgcttatggatgagtgaaaggaataaaaattttaagttatagctacagtttctctacctgtacattccaatactgaccttgcatggtttctttgagggctaagtatgacaaaaggatgcagtgatttcgaacttagattttaaaaaacaaatatgactcttttgaactgtgtgaacataggcacattgctggatctgagtaatttcatgtgctaagagggaataatagcatcagccttaatgctgcattattgcatttagcattatttctttctgaagatgaaagaagacagacatcattatatttaacaaagtgcctggcacatataaaatagtcaataaatgttatctatcattgctattattacctaatactgcgcatagtaagccctgaacctgttcctggcatgtggagcyatgtactatgttcatgacattaaacaaagtagtagctatataatgaatatataaatgtgacttttattatta

SEQ ID NO: 268294 - DNA, 617 bp, Homo sapiens
atttacttctaggatggtattaggatggaataagataatgcattaaaatatactttaaacctctaaaatcctgtatatgtttacatggtttaaataaagagaatttgtctatatatttctgtgtttaaaatatgcaaaggtactaacatttttgtgtctatggrgcagtattcattttttgcactgtgtaatggttataattcatttcatttccagagacaggaaacctagtaatttaagttaaagagacagtgtcttataatgatgtagagcaattaagcgaaagctaagagaagtatctggaaccagagacaagtctgtcctcaagacctcctttttatcctcatgcttctcttcgtatctctgtcttctctttcactttttttttttttttttttcaaatttctttcctttccttctctggtccaaatggtgaaaaatatagctaatccagtggtttccatttttatattttatctcttacaatccgcaagatatacatttcaattttaaagctgaattgaataaaaatttgatgactgaatttggaacaagtgcctactcctaaacaaatcaactctgggatcaagtaacattgctgataccatgaccatcat

SEQ ID NO: 268295 - DNA, 617 bp, Homo sapiens
atttacttctaggatggtattaggatggaataagataatgcattaaaatatactttaaacctctaaaatcctgtatatgtttacatggtttaaataaagagaatttgtctatatatttctgtgtttaaaatatgcaaaggtactaacatttttgtgtctatggagcagtattcattttttgcactgtgtaatggttataattcatttcatttccagagacaggaaacctagtaatttaagttaaagagacagtgtcttataatgatgtagagcaattaagcgaaagctmagagaagtatctggaaccagagacaagtctgtcctcaagacctcctttttatcctcatgcttctcttcgtatctctgtcttctctttcactttttttttttttttttttcaaatttctttcctttccttctctggtccaaatggtgaaaaatatagctaatccagtggtttccatttttatattttatctcttacaatccgcaagatatacatttcaattttaaagctgaattgaataaaaatttgatgactgaatttggaacaagtgcctactcctaaacaaatcaactctgggatcaagtaacattgctgataccatgaccatcat

SEQ ID NO: 268296 - DNA, 537 bp, Homo sapiens
aacctagtaatttaagttaaagagacagtgtcttataatgatgtagagcaattaagcgaaagctaagagaagtatctggaaccagagacaagtctgtcctcaagacctcctttttatcctcatgcttctcttcgtatctctgtcttctctttcactttttttttttttttttttcaaatttctttcctttccttctctggtccaaatggtgaaaaatatagctaatccagkggtttccatttttatattttatctcttacaatccgcaagatatacatttcaattttaaagctgaattgaataaaaatttgatgactgaatttggaacaagtgcctactcctaaacaaatcaactctgggatcaagtaacattgctgataccatgaccatcatgtcaatattgtcaatgaatgggtcattcccagaaaaagagggaccctgctactgtgttgacaaaataataggaactcattaaatatgtaactttttttgtgcactaaaatggttaaatttggtggtataattatatgtttattc

SEQ ID NO: 268297 - DNA, 537 bp, Homo sapiens
aacctagtaatttaagttaaagagacagtgtcttataatgatgtagagcaattaagcgaaagctaagagaagtatctggaaccagagacaagtctgtcctcaagacctcctttttatcctcatgcttctcttcgtatctctgtcttctctttcactttttttttttttttttttcaaatttctttcctttccttctctggtccaaatggtgaaaaatatagctaatccagtggttyccatttttatattttatctcttacaatccgcaagatatacatttcaattttaaagctgaattgaataaaaatttgatgactgaatttggaacaagtgcctactcctaaacaaatcaactctgggatcaagtaacattgctgataccatgaccatcatgtcaatattgtcaatgaatgggtcattcccagaaaaagagggaccctgctactgtgttgacaaaataataggaactcattaaatatgtaactttttttgtgcactaaaatggttaaatttggtggtataattatatgtttattc

SEQ ID NO: 268298 - DNA, 557 bp, Homo sapiens
accaacttttaggtttgtgaattctgttgtttttctactttattgtgcttatatttgctgtactcattattattcctctccttctagcttaagtttagtttgcttttattttctaggtttttgaggtgtaaagttaggtttttgatttgagatccttctccattaatacatgcatttaaagttatacattttcttctgagcactgcttcactgcatcccatcagttcttgtaggctgtgtattaatgtccatttttctttaaatattttgcattttctttttgatttctttttttctttttttttttcaacttgtattttaaacacagytggtacatatgcaggtttgttgtattggaatattgcatgatgctgaggtttggagtatggtgttatgagcatagtacccaaaaggtagtttttcaacccatgttcctccctttctcatccttctagtagtctgcagtgtttattattctcatatttatgtccacgtgtgatcaatgttcagctcccactccaacgatttatgtaatgaaccactgtcaaatagtggct

SEQ ID NO: 268299 - DNA, 557 bp, Homo sapiens
accaacttttaggtttgtgaattctgttgtttttctactttattgtgcttatatttgctgtactcattattattcctctccttctagcttaagtttagtttgcttttattttctaggtttttgaggtgtaaagttaggtttttgatttgagatccttctccattaatacatgcatttaaagttatacattttcttctgagcactgcttcactgcatcccatcagttcttgtaggctgtgtattaatgtccatttttctttaaatattttgcattttctttttgatttctttttttctttttttttttcaacttgtattttaaacacagctggtacatatgcaggtttgttgtattggaatattgcatgatgctgaggtttggagtatggtgttatgagcatagtacccaaaaggtagtttttcaacccatgttcctccctttctcatccttctagtagtctgcagtgtttattattctcatatttatgtccaygtgtgatcaatgttcagctcccactccaacgatttatgtaatgaaccactgtcaaatagtggct

SEQ ID NO: 268300 - DNA, 557 bp, Homo sapiens
accaacttttaggtttgtgaattctgttgtttttctactttattgtgcttatatttgctgtactcattattattcctctccttctagcttaagtttagtttgcttttattttctaggtttttgaggtgtaaagttaggtttttgatttgagatccttctccattaatacatgcatttaaagttatacattttcttctgagcactgcttcactgcatcccatcagttcttgtaggctgtgtattaatgtccatttttctttaaatattttgcattttctttttgatttctttttttctttttttttttcaacttgtattttaaacacagctggtacatatgcaggtttgttgtattggaatattgcatgatgctgaggtttggagtatggtgttatgagcatagtacccaaaaggtagtttttcaacccatgttcctccctttctcatccttctagtagtctgcagtgtttattattctcatatttatgtccacgtgtgatcaatgttcagctcccactcmaacgatttatgtaatgaaccactgtcaaatagtggct

SEQ ID NO: 268301 - DNA, 548 bp, Homo sapiens
gctgggattaaggcgtaagccactgtgyccagccaccattcatttttcaaggcccaagctccttctcccctcctccaggaagcctctctgcagcccccaccccaccccaggagccctccttggcttcctttccctttgaccactctgggcgtaggtctgtcaccaccccactcccggtctggagacaaaaccaggtcaatgtcaatactttattgcacaaaagacagagtagcagagtccctccccctgccccccacctgcccacacacatgcaagcaatccctggagactggggggacttggcactgcctcctcctggggctgcaaactcagatgacttcaggggccaagtagttgatggaggtaaatagtgagatgggccaaatgccggagcaggccagggctgcagcagcagtaatcggtggaatgcatgcacatgttattgggagagtgtggagtgaacaagacctttcaaaagtgtgaagatcccagccagcaggcctccagtttgcagtccgtggctcagtccagctcctaccactcccaga

SEQ ID NO: 268302 - DNA, 565 bp, Homo sapiens
atctgtcacaaatatcaatagtgctgaggttgaaaaactgaatggtaagcttttgggcctgaaactaccatgttcaacttgtatatacaggatctagcacagtatctggaatgtcgcaagcactaaaagtattattacaatgttgaaagaaggaaggaagtaataaaacattcaatcttctgattaacaaaatgtgtctaacctcagctgagaaagggactgctgtatagtggaaagagtgtggactttgaagtaagagaactgagttccaatctctgctctgtagtttatatttcacttaggaaagycattaactcagattcaatttcatctgtaaaatgaagctaatatttattcattcaacaaaaatgtgttccacacctagtaaatcccaggctcaaggtaacttgttaacatacattggtgattaaaaccaatgtggttttctgtctctagtgagcttatgataaagtcgagaagacttctgtctctaatgaacttatgataaagtcaagaagacatataataagtaaacagacacattcattgctagaaatctgacaag

SEQ ID NO: 268303 - DNA, 600 bp, Homo sapiens
ttcacgtaatttatgctttattttttctccctcttctctttctaggaaagaacagctggaggcagcatccaggtaagtttctgattatgaattcccttcttcacatctctgtgtcaagacagagcatcctgctccatatggtgtagggccccatgggaggtcatgctggtcccaagatagagtctttggggtcacactgttgctgaccaccatagtcctctgcctggtttccttctggttgatctgagggaaacttaataggaatcatggcagcagcctcttattgagggtctgggttctgtgtcaggagttctgcatatgttatctcatttggtcttcayaaccacaatgtaagataggccctaatatcatcccttgtggatgaggagattgtggctcagagaggttgggttgagattgagtggcaagaccaaaattcaaagtcaggtgcaaatattaagaccatgttattttcatgatatatcatttcatctgcttcttgggctcacagatggtaagttgactcgagactgtaattcatgatcatcatgactgtggaggtttcccagtaaaccacatctatctatatacctatatgac

SEQ ID NO: 268304 - DNA, 603 bp, Homo sapiens
ggttgacgatggatatttgactcaagctgggttagagtcttctgtgctacttaagggaataccattttttctctttttggatcatgtcaatccaagatttgtcagcaatgtagagagaggttgtgtaaagcaggagagaataagtccaacatgcaaacaaaagacacagaaacaagctgagctgagaaatgagaggaaggagagtgaacatgacaacactgtttgaacacttggattcagctgtgcaaagaagagaaattttcccggactttaaatacaatgagtcaacaaatccttggtgcttaaggtagtttgagttgggtttctgcctcttacaatgcaaagactgattagtataacttgccttattattttactttaaagcttctttaatattatcagttccattggatacaaaactatacaatttrtaagcccaattttgtgaaacaataatgtatatactaaatctagttgtaacaatagcaagcatttattgaccatttactacgtgccaggcaagatgctaacccaggcaatggaaccccagaccctgatggttaaccaccaaacccagttgccttccgctttctttgatttggt

SEQ ID NO: 268305 - DNA, 557 bp, Homo sapiens
ttgtgttgttttctagaaagggagatataaactatgagacttttattattattattattattattwttttgagacagagtttcactcttgtttcccaggctggagtgcaatggtgcgatctcggctcagcgcaacctccgcctcccgagttcaagtgattctcctgcctcagcctcctgagtagctgggattacaggcatgtaccaccacccccggctaattttgtatctttagtagagatgggttttctccatgctggtcaggctggtcttgaactcccgacctcaggtgatccacctgccttggcctcccaaagtgctgggattacaggtgtgagccaccgtgcctggccactatgagactttttaaagcagtagataactcttttgtttttaccagtttataaaaagcatgcagaaacatgaaaactgaagaaaccacgaacattaagagtgaacgcagaaaatcacattttctgtacttgaagccgtcagagttgagtgtcctttttcagcaaaggagccagagagctgggaaaggattgaagctggtcaaaa

SEQ ID NO: 268306 - DNA, 444 bp, Homo sapiens
gtaatgtcccctggtgtcccccaccaggcagagcatctggcccttggttgatgcttcccagatgcatttccagactttgcagtggaagcatgctggttgctataggactcaggtgctggaagatagtattgctccaattcagaatctcactgcttttcaycatgaaaagactagagctgctcaggcctccaggccagaccctgtgaggcccaccccacaaaagcttcctcccacacctggcacagagcagcaatgatggtacctcatcccttttaggggaaaccaaatgccccctccactaatggcaggctgcgtgcatcctaagccacccctgtagtgttgctttacttacgggagtcaggcattgtgtcccagcagcgacactggggaacttcccccacttcatcactctgcagctcactgggccctgcatcccgcttttta

SEQ ID NO: 268307 - DNA, 407 bp, Homo sapiens
agttagttatagcagcccaaatggactaagaaagatactcctacatgtttacattttgaaaaaagacagatttaaagaagaagcagtaaatgcaggtttagcccatggggaagcctgaccatccctctggtagcactacacagagaaccaggagctctacttcatagctgcacagcaggtgcccaaatcagtgtactctaatcactacacaacctaagcagacaaacttcactcaaccacaggaaaagtttccactctgcctttctttctcmaaaacagataatgtgataaatcactgttaaattatctagccaacagcaaccatgagttactcttcacatagttccatttagctacagacaattccatctctttgtgcgactgtggtgtaccttgcaacagtgaat

SEQ ID NO: 268308 - DNA, 407 bp, Homo sapiens
agttagttatagcagcccaaatggactaagaaagatactcctacatgtttacattttgaaaaaagacagatttaaagaagaagcagtaaatgcaggtttagcccatggggaagcctgaccatccctctggtagcactacacagagaaccaggagctctacttcatagctgcacagcaggtgcccaaatcagtgtactctaatcactacacaacctaagcagacaaacttcactcaaccacaggaaaagtttccactctgcctttctttctccaaaacagataatgtgataaatcactgttaaattatctagccaacagcaaccatgagttactcttcacatagttccatttagctacagacaattccatctctttgtgygactgtggtgtaccttgcaacagtgaat

SEQ ID NO: 268309 - DNA, 573 bp, Homo sapiens
aataggcatgtgatatgagctggcccatctggaacggattcagtactttgctgggaatgctgggacaaagcagctcacgcttccccactagacttgagtaaagaagcatgccactctggatgtcctggcaggccattagcatcctggggcagctattgaggcagtaatgatgaggaagctctgatagagaactggagaggcagaaatgggattaggctgtatcatttacctttgatacagttaactacttcctccatcttaacattctttcttcagtttgttttcaggataccactctcctggttttcctgctccctcagtagctgttccttctcagtctcctctctggatccttctcccagactttaaaatatgatggtaggccccayggcctaagcctgaactaatgttccagcactcttctcttgcttactactttcagcctcactggcccctggccagtttcctcagtgcctctccacttcctcttccccccttgcagaagacactttcctcatcatggattgcactttcctattccctcattatgaaacacacttttcccatcatggg

SEQ ID NO: 268310 - DNA, 635 bp, Homo sapiens
taatattaagtaaaaaataaaatgtagttttctttaagtgtttcgtgagactctaatattccaaagtacaaaaacaattattttaaaatacaaatattagtatgcttttggtgacatagacaaccaacattttatgaccaagacattatcacataaagcttatattggagatatttataacaagrctttttctctttggcatctcaggtgtttgactatgattttggactacaggatgactttatgggctcagcctttctggatctgacacaattggagttaaacaggtaacttttgaactgctgtaatatcaccaccccttgtcatgcagtgggcttgtgtaacagaaaatgtcagctgatctggggtctagttctgtcatttatagtggtgagccttcctgctagtcagcctttctcaaatccatcttcctcacttacccagtggaaataatagcatcttccctgactacctcattcaacaacttttcaaccgaaaacttcttggatacctacttgctctgttccccagtactgtgctaagcaccaggaatcgagagataaaagagacattccttcctttcatattgcccatatggttttaatggggcataaaaaaagattatgcacgttagt

SEQ ID NO: 268311 - DNA, 635 bp, Homo sapiens
taatattaagtaaaaaataaaatgtagttttctttaagtgtttcgtgagactctaatattccaaagtacaaaaacaattattttaaaatacaaatattagtatgcttttggtgacatagacaaccaacattttatgaccaagacattatcacataaagcttatattggagatatttataacaagactttttctctttggcatctcaggtrtttgactatgattttggactacaggatgactttatgggctcagcctttctggatctgacacaattggagttaaacaggtaacttttgaactgctgtaatatcaccaccccttgtcatgcagtgggcttgtgtaacagaaaatgtcagctgatctggggtctagttctgtcatttatagtggtgagccttcctgctagtcagcctttctcaaatccatcttcctcacttacccagtggaaataatagcatcttccctgactacctcattcaacaacttttcaaccgaaaacttcttggatacctacttgctctgttccccagtactgtgctaagcaccaggaatcgagagataaaagagacattccttcctttcatattgcccatatggttttaatggggcataaaaaaagattatgcacgttagt

SEQ ID NO: 268312 - DNA, 575 bp, Homo sapiens
atcataggaaacatgagtttcctcatttcatgagaaaatgacctctacagggattaaattcttcttcttgtaaatatgaaataaaatctaggagaaatacgcctttcagagagtagcagaccctgtggcttatgtgattatctccctccaaagagcagaaagcccttggggggagatctattaaaataaacaaaaaagggcattggcatcattgagagagaatgaagcactgatttgagccaagtgttgcactgtggacttagcagatacaaaaacaaaacaaaaataacttcacaattaaataggcccacaaactgaactagagcctcactcctcaggaaagattacagaaaatatttggttctrttattatctggtttgctatatttcctaagattcagggttgattttagccaatagtgaccaaacctgaaacccagctcatttgtaccttatactctttgggggccttttatataattgcaggaatttatatgtaatgcactatgaaaggcaatgcttaggaaaacctaatttacaatttttcatgtaattttggacaatgtttgaaaaaa

SEQ ID NO: 268313 - DNA, 589 bp, Homo sapiens
tgtgtgtaactagatgcattcttgagtcttggaattgaaccatattgatatatgttgggaagctcaaaatttatgacagaagaataagaagggaaaggagacagatgagaaactggaaaagaaagaggaaggagactatgggacctataaaatgagaagaggccgtgagaaaattatgcctaagcttttaacagcttagataaattatggtaagaacatttaaatacttcattttcaattcatatttaatatagaaactataygcaagtgattcgttacaagcttagaaacacaaaagttgtttggtctaaaatgagaataaaaatacattagaagttcctttgtttttgcaaggcttgttagatactttaggacttatagtaaatatatactcaattagaccttcctgcagaaaagcatgaggcttcagataagctttcctataagtaaactaattagctggagagaccttttgcagtgaaataacttttttatgcttaaaaaaattaagtcctctattaggtgattaaacattttaaatacatttttaaaaaccaattaaaggcaataactgaaaattgtcatctgt

SEQ ID NO: 268314 - DNA, 592 bp, Homo sapiens
ttttctccttctcctcttagaacttgaaagaaccaataggccaggtctaaatactctgcaaagaaagcctcastcaatataggagacttggaatgttctgttgaggcaaaaattaggccctgctcaagggaaagaataatcataagctaaaaaagacatatgataatatgaactatttcctaccacccaaagaaaaaatattttcccgccacccaccccaccccaccccgctggcctttcctcacaacgtgtagagttttaaggaaaacttgatctagctgcagagagaatgttccccagtgaacgcggtgccagacagtctctaggtcttgctttgatggtgtggagagacattaaccttttcactggttagttgaaaggtaagtaagttgtactgagaggtatttttcagtgactcaaattttttcccttacgaagaatttagctgaccaacttttcaaaccagagtgccactttctcaggctgtgaaaagctgcccacaatttgactgaaatttcaatccactcttgtgccttgctcaatgcatgtgtatgtgtgggagttgtaaattgaggccttaaccaccagagtt

SEQ ID NO: 268315 - DNA, 592 bp, Homo sapiens
ttttctccttctcctcttagaacttgaaagaaccaataggccaggtctaaatactctgcaaagaaagcctcagtcaatataggagacttggaatgttctgttgaggcaaaaattaggccctgctcaagggaaagaataatcataagctaaaaaagacatatgataatatgaactatttcctaccacccaaagaaaaaatattttcccgccacccaccccaccccaccccgctggcctttcctcacaacgtgtagagttttaaggaaaacttgatctagctgcagagagaatgttccccagtgaacgcggkgccagacagtctctaggtcttgctttgatggtgtggagagacattaaccttttcactggttagttgaaaggtaagtaagttgtactgagaggtatttttcagtgactcaaattttttcccttacgaagaatttagctgaccaacttttcaaaccagagtgccactttctcaggctgtgaaaagctgcccacaatttgactgaaatttcaatccactcttgtgccttgctcaatgcatgtgtatgtgtgggagttgtaaattgaggccttaaccaccagagtt

SEQ ID NO: 268316 - DNA, 551 bp, Homo sapiens
atgtgtgccatctagagagaccaactaccaaaattctgaatttttgtgttacctttaaaaaatggatgttttcccctcattcgtaaatgttattaagcagtgaatagaatatgtaccattgtgatgccatacattttacattttttaaaaccatgccaatatattcatagtactctgtataaaccgaaataaaaacatataaatctcctgaaaacataatagctcaagtgttaggcacctgagttgtgctaagaggggatttctaatgtggcagtgcctgctctgtatgccactctctcagagctaataccctgaaaacgcttttcataaaaatgtcagttgattttgaagagaaaggtaatatggtgaccacaaggctaataaacggagagaaaggtggcaggcatgagtgaaaggcatttaaaataggaaatagccaattataagaataaatgtggtaacctacmataaactgcgtggtcagagacagattaaattcttgctctttcttattcctcactctatttggtatttatggttttgcttttaaa

SEQ ID NO: 268317 - DNA, 576 bp, Homo sapiens
tttgtagtttaaattgtagatttcaactcaccacctacattcctcctttttatgttattattataacatcaaatttcatcagtctggcgttcaagactctctgttaactgagttcatatgcgctattgaatagttttatctctcattaatccctaaatcaaattttcygcttcagccagtgtggttttcatagatttcctaaaagtataccatgttcatttgttcctgcaaacagaagctgattcagttctttaccttaaatactcctttgttttctttgccaactcaaattcctagccaagagcctttcactgaggagtgtgttcttgataatggctatatttttaaaaatgtcttaacaagcaaaaattagtccagagcatttaaggtagtgagggatggttaatagagaagaatgggagacagatgggagagtaataagtctggaaacttatggaggatactgacatctgattcaaatatttagaagattgcttcatagaagaggaattactcatttttgctctagatctagagtctaaaaatagatttaggactaatctgggggagtgctga

SEQ ID NO: 268318 - DNA, 590 bp, Homo sapiens
gggctcccaagaccttgggcagctctgcccctgtggctcttcagggtacagaccccgcagtggttttcaccagttggtgttgagtgcctgcggcttttccaggaacatgttgcamgctgttgataggtctacctttctggagtctggttgccctctcctcacagctccattaggcagtgccccaatggggactctgtgtgggggctccaacctcatattttctctctgccctaccctagtagaggttctccatggggactctgcttttgcagtgggcttctgcctggacatccaggtgtttccatacattctctgaaatctaggcagaggctcccaagcctcaactgttgccctctgtgcacctagaggtttaacatcacatgaaagctgccaaggtttttggcttgaactctctgtagcagcagcctgagacatatctggggccttttagcatagctggagctggagcagctaggacgcagggtgccatgtcctgaggtggcacagagaagcagggccctgggtctggccccctaaaccatttttctctcctaggcctcctggcctgtgatgggaggggctgccacaaa

SEQ ID NO: 268319 - DNA, 624 bp, Homo sapiens
agccatgccagaacagcaatgccaattaagttctaccttgctagctatgtcatggctccttcaaaaacataaagcttttgagagggtgactcaaaatgacaactgactaaaatggtcacttcccccaagtgtcttgggaatctaaagctagaggacaccttggagacccgatgatccatattstgtttcagagcgaacttggaaactctgttttctgcagtgtttagtatacttgtccagaacatgttaatttcaaattgacacccaagcaaagcacacaaacatcacacttgagcaacactagctacaataactaggtagcctttctcattagggctgaggtcttatacagcattgcaatgaacttcatctgaatactagcttgtatgccaactacaggtcaaactccaaggacttcttgctctgtgcctctttccacaactttccttattgtgtgcaattgtctcaggtactcagagcaatgtaggctgacttccaattagtcctccaaagttttaaggacttacataaatgactatatggaaacaatactctctaaggaatcttactaccctggaaacaagatatagctacccagtcaatttctattcctcatgtaaattc

SEQ ID NO: 268320 - DNA, 624 bp, Homo sapiens
agccatgccagaacagcaatgccaattaagttctaccttgctagctatgtcatggctccttcaaaaacataaagcttttgagagggtgactcaaaatgacaactgactaaaatggtcacttcccccaagtgtcttgggaatctaaagctagaggacaccttggagacccgatgatccatattgtgtttcagagcgaacttggaaactctgttttctgcagtgtttagtatacttgtccagaacatgttaatttcaaattgacamccaagcaaagcacacaaacatcacacttgagcaacactagctacaataactaggtagcctttctcattagggctgaggtcttatacagcattgcaatgaacttcatctgaatactagcttgtatgccaactacaggtcaaactccaaggacttcttgctctgtgcctctttccacaactttccttattgtgtgcaattgtctcaggtactcagagcaatgtaggctgacttccaattagtcctccaaagttttaaggacttacataaatgactatatggaaacaatactctctaaggaatcttactaccctggaaacaagatatagctacccagtcaatttctattcctcatgtaaattc

SEQ ID NO: 268321 - DNA, 624 bp, Homo sapiens
agccatgccagaacagcaatgccaattaagttctaccttgctagctatgtcatggctccttcaaaaacataaagcttttgagagggtgactcaaaatgacaactgactaaaatggtcacttcccccaagtgtcttgggaatctaaagctagaggacaccttggagacccgatgatccatattgtgtttcagagcgaacttggaaactctgttttctgcagtgtttagtatacttgtccagaacatgttaatttcaaattgacacccaagcaaagcacacaaacatcacacttgagcaacactagctacaataactaggtagcctttctcattagggctgaggtcttatacagcattgcaatgaacttcatctgaatactagcttgtatgccaactacaggtcaaactccaaggacttcttgctctstgcctctttccacaactttccttattgtgtgcaattgtctcaggtactcagagcaatgtaggctgacttccaattagtcctccaaagttttaaggacttacataaatgactatatggaaacaatactctctaaggaatcttactaccctggaaacaagatatagctacccagtcaatttctattcctcatgtaaattc

SEQ ID NO: 268322 - DNA, 534 bp, Homo sapiens
tgttctccccaaatttatatgttgaagccctaactgctgaagtgactttatttagagatataaggtctttaaggaagtaattatgtttaaatttgataatgaaggagctaatccaataggattaatgtcctcataataagaggaagaaataccagcaatgtgcacgcagaaagaaaaggccatgtgcgaacacagcaataagatggccatttgtaatccaagaaagaaggcttcaggagaaagcaccattgctggcatattgatcttggactttcagcctttgaagctgtgaaaacaatacatttctgytgtttgaggcacacaaataaaccatatataaacaaaatgacactatgaataaaaagactaaaattatataaaggaaccaaatagacattctgaagctaaatgtcttcattagtctgctttggctgccatagcaaaaactaccttaaacattttgttatggcagcccagactattgcagattaaggtacaatgaattgggtactgctgtaacaaatactaaaaatg

SEQ ID NO: 268323 - DNA, 593 bp, Homo sapiens
tacagctattttgaattctctgyctaaacggtcacatatctctgtcttcccaggataggattcttgtaccttatttagttcattttttgaggtcacatttttctgggtggtgttgatgttagtagatgttctttggtgtctgggaagtgaagaactaggtatttattgcagtcttcactgtttgggtttgtttctacccatccttcttggggagactttccagatatttgaaatgacttggatgttgtgatctgagctatatctgctttaagggacatcccaagcagagtaatgctgtggttcttgagaactcatagaactaccaccttgatggtcttagacaagatctggtaaaattctcttgattaccaggtaggaactcttgttctttcctttcactttctcccaaacaaattgaatctctctctctgttctgagccacctaaagttagagatggagtgacacaagtaaccctttggccaccactactaggactgtactggatcagacctgaagccaacacagcactgggtctcatccaagggcgatgatacccactccctggctactgcctatgatcactcaaggcact

SEQ ID NO: 268324 - DNA, 554 bp, Homo sapiens
ataactccccttttcccttcctttcaaccctggcaatgactactccttctttttataaatttgactattttagaaactcatataagtgaaatcattcagtatttgttttattgggacagcctcatttcacttagaatagcatccttaaggttcattcaagtttttgaagaaccactaattattaagcatctatcttgtgctacaaaattcctacaaattacttcattcaatcctcccaacatctctataaattagttttattcttctatattgcagttaatrtaattaagactcaaattagttaagtgactttcccaagggtcaccaagtcaaacgtgtgtttttcccaaatcctttgtttatcccttaggccactttgtggcagctatttgcagttgatctatgtccgtaaggaagacaataaaaacaaaatttattgaacaattcaattttatgttcccttaatccctgattatttgttttgttttcatttgggtaagaagtaggcatcatatgtagattttttgaagagatgctgctaagaaacacaacag

SEQ ID NO: 268325 - DNA, 578 bp, Homo sapiens
gtcaccaagtcaaacgtgtgtttttcccaaatcctttgtttatcccttaggccactttgtggcagctatttgcagttgatctatgtccgtaaggaagacaataaaaacaaaatttattgaacaattcaattttatgttcccttaatccctgattatttgttttgttttcatttgggtaagaagtaggcatcatatgtagattttttgaagagatgctgctaagaaacacaacaggctatgtgaaaatcgtgggcctgaaatgctcataatacagstctaacattacatgtttatatgaacaaattattttggcatattttggtttaagtgcaaatcatagaacatttattattataggtataaaaaaaggttgccaaacactttgggcctagtgcttatgaaacaataccactcaatgcttcaaaatactaaataacacaataagcaaaatcttagcttctgaccaagtaaacaagtcgaatgatccagagatctaatggcttaggtttttagcctatttttgggattaatgtgaatgtgtactttatgtctgtcttcttcttggcagaatctgcaac

SEQ ID NO: 268326 - DNA, 591 bp, Homo sapiens
tcattcttcttctatacttacaacaacaaagactgatcagggagtccaaggcaactgtaggcaggagagctcccccagcacagcctagtgctctaaggagaagtgatcaggctgcttagtcacatggatcttgaatcccatttctcttcactgggtggaatctctcaaccagggtgtccagtaaaccctgctggtgttttccaaccaaaaacagtttaaaacctccctgggacacagctcccaaggggaggggtgggccaccatctttgctgttttgcctgccttggctgtttttgcckttgtgctttggagagtccaaagcaactgggggctggagtggaaccccagcacacatagatgctctacaaaaatgcgattaggctgaatatttattttattttatttttatttccataggttttgagaaacaggtgggatttgattagatgagtaactactttagtggtgatttctgagatttcagtgcacccattaacctagcagtatacactgtaccaaatttgtagtcttttcttcctcaaccccctcccaccctttcccccaaggccccaacgtccattgtatcattcc

SEQ ID NO: 268327 - DNA, 463 bp, Homo sapiens
tccaatgatagaatggatataaaataaaaagatagtagattatcctggtgattagcaagcccctcaaagtattatacatccactttgctatctgtctagtcattcttcttctatacttacaacaacaaagactgatcagggagtccaaggcaactgtaggcaggagagctcccccagcacagcctagtgctctaaggagaagtgatcaggctgcttagtcacatggatcttgaatcccatttctcttcactgggtggaatctctcaaccagggtgtccagtaaaccctgctggtgttttccaaccaaaaacagtttaaaacctccctgggacacagctcccaaggggaggggtgggccaccatctttgctgttttgcctgccttggctgtttttgcctttgtgctttggagagtccaaagcaactgggggstggagtggaaccccagcacacatagatgctct

SEQ ID NO: 268328 - DNA, 591 bp, Homo sapiens
tcattcttcttctatacttacaacaacaaagactgatcagggagtccaaggcaactgtaggcaggagagctcccccagcacagcctagtgctctaaggagaagtgatcaggctgcttagtcacatggatcttgaatcccatttctcttcactgggtggaatctctcaaccagggtgtccagtaaaccctgctggtgttttccaaccaaaaacagtttaaaacctccctgggacacagctcccaaggggaggggtgggccaccatctttgctgttttgcctgccttggctgtttttgcctttgtgctttggagagtccaaagcaactgggggctggagtggaaccccagcacacatagatgctctacaaaaatgcgattaggctgaatatttattttattttatttttatttccataggttttgrgaaacaggtgggatttgattagatgagtaactactttagtggtgatttctgagatttcagtgcacccattaacctagcagtatacactgtaccaaatttgtagtcttttcttcctcaaccccctcccaccctttcccccaaggccccaacgtccattgtatcattcc

SEQ ID NO: 268329 - DNA, 591 bp, Homo sapiens
tcattcttcttctatacttacaacaacaaagactgatcagggagtccaaggcaactgtaggcaggagagctcccccagcacagcctagtgctctaaggagaagtgatcaggctgcttagtcacatggatcttgaatcccatttctcttcactgggtggaatctctcaaccagggtgtccagtaaaccctgctggtgttttccaaccaaaaacagtttaaaacctccctgggacacagctcccaaggggaggggtgggccaccatctttgctgttttgcctgccttggctgtttttgcctttgtgctttggagagtccaaagcaactgggggctggagtggaaccccagcacacatagatgctctacaaaaatgcgattaggctgaatatttattttattttatttttatttccataggttttgagaaacaggtgggatttgattagatgagtaactactttagtggtgatttctgagatttcagtgcacccattaacctagcagtatacactgtaccaaatttgtagtmttttcttcctcaaccccctcccaccctttcccccaaggccccaacgtccattgtatcattcc

SEQ ID NO: 268330 - DNA, 557 bp, Homo sapiens
gggtgtgagttcctgaacaaattgtacacttctcaggatggaattactgtgcacatccagcatagttacacttgcacaagagagtaacaagaggggcattgcaatgcaaatgtagtttcatttwaaaaaataaattaacataatttgtgatactaatagaataaaaaagaaaacacatattgtcatctcaacaggtataaaaaagcatacaagaaaatttgacacccaatcatgatgaaaacgcaaaaaaaattatgaatgaaagggaagttcatcaacttgataaagggttatctttaagaacatactcaaactattccgaaaaatggaagagagggaaacacttccaaacatactctatgaggccagtcttaccgtaatacaaaaaccagacaaagacacattaaaaaaactacacacaataactttgatgaatgttgatgcaaaaatcctcaaccaaaaactaacaaaaaacacttaagactccatcaaaaaactattcaaactgataaactaattcagtgaagtttcaggatacaaacccaacatacaaaaat

SEQ ID NO: 268331 - DNA, 557 bp, Homo sapiens
gggtgtgagttcctgaacaaattgtacacttctcaggatggaattactgtgcacatccagcatagttacacttgcacaagagagtaacaagaggggcattgcaatgcaaatgtagtttcattttaaaaaataaattaacataatttgtgatactaatagaataaaaaagaaaacacatattgtcatctcaacaggtataaaaaagcatacaagaaaatttgacacccaatcatgatgaaaacgcaaaaaaaattatgaatgaaagggaagttcatcaacttgataaagggttatctttaagaacatactcaaactattcygaaaaatggaagagagggaaacacttccaaacatactctatgaggccagtcttaccgtaatacaaaaaccagacaaagacacattaaaaaaactacacacaataactttgatgaatgttgatgcaaaaatcctcaaccaaaaactaacaaaaaacacttaagactccatcaaaaaactattcaaactgataaactaattcagtgaagtttcaggatacaaacccaacatacaaaaat

SEQ ID NO: 268332 - DNA, 625 bp, Homo sapiens
aaagccttaaatctaatacctcaaactatttaaccactacaacaaaacattggagaaaaccttcaaggcattggtcttggcaaaaatttcttaagtaatatccaacaagcacaggcaaccaaagcaaaaatggaaaaatgggagcacattgagttataaattttctgcacagcaaagtaaacaatgaacaaagtgaagaaacaacccacagaatgagagaaaatatttgcaaactatccatctgaccagggattaataatcagaatatataaggagctcaaacaactctacagaaaaataatctaataatccaatataaaaaatgagcaaaagatttgaatagatatttctcaaaagaacacatcgcaaataggcatatgaatagatgttcaatatcaatgatcatcagtgaaatgcaaatcaaaactacaatgagatatcatctcacctcagttaaaatggcttataaagacatgcaataacagatgctggcaaagatgtggagaaaagggaaccctcgtatattgttggtgagagtgtaagttagtacamcctctatgaagcacagtttggaagttcctcgaaatatctaaaactggagctatcaccccatccagcattcatc

SEQ ID NO: 268333 - DNA, 625 bp, Homo sapiens
aaagccttaaatctaatacctcaaactatttaaccactacaacaaaacattggagaaaaccttcaaggcattggtcttggcaaaaatttcttaagtaatatccaacaagcacaggcaaccaaagcaaaaatggaaaaatgggagcacattgagttataaattttctgcacagcaaagtaaacaatgaacaaagtgaagaaacaacccacagaatgagagaaaatatttgcaaactatccatctgaccagggattaataatcagaatatataaggagctcaaacaactctacagaaaaataatctaataatccaatataaaaaatgagcaaaagatttgaatagatatttctcaaaagaacacatcgcaaataggcatatgaatagatgttcaatatcaatgatcatcagtgaaatgcaaatcaaaactacaatgagatatcatctcacctcagttaaaatggcttataaagacatgcaataacagatgctggcaaagatgtggagaaaagggaaccctcgtatattgttggtgagagtgtaagttagtacacccwctatgaagcacagtttggaagttcctcgaaatatctaaaactggagctatcaccccatccagcattcatc

SEQ ID NO: 268334 - DNA, 625 bp, Homo sapiens
aaagccttaaatctaatacctcaaactatttaaccactacaacaaaacattggagaaaaccttcaaggcattggtcttggcaaaaatttcttaagtaatatccaacaagcacaggcaaccaaagcaaaaatggaaaaatgggagcacattgagttataaattttctgcacagcaaagtaaacaatgaacaaagtgaagaaacaacccacagaatgagagaaaatatttgcaaactatccatctgaccagggattaataatcagaatatataaggagctcaaacaactctacagaaaaataatctaataatccaatataaaaaatgagcaaaagatttgaatagatatttctcaaaagaacacatcgcaaataggcatatgaatagatgttcaatatcaatgatcatcagtgaaatgcaaatcaaaactacaatgagatatcatctcacctcagttaaaatggcttataaagacatgcaataacagatgctggcaaagatgtggagaaaagggaaccctcgtatattgttggtgagagtgtaagttagtacaccctctatgaagmacagtttggaagttcctcgaaatatctaaaactggagctatcaccccatccagcattcatc

SEQ ID NO: 268335 - DNA, 625 bp, Homo sapiens
aaagccttaaatctaatacctcaaactatttaaccactacaacaaaacattggagaaaaccttcaaggcattggtcttggcaaaaatttcttaagtaatatccaacaagcacaggcaaccaaagcaaaaatggaaaaatgggagcacattgagttataaattttctgcacagcaaagtaaacaatgaacaaagtgaagaaacaacccacagaatgagagaaaatatttgcaaactatccatctgaccagggattaataatcagaatatataaggagctcaaacaactctacagaaaaataatctaataatccaatataaaaaatgagcaaaagatttgaatagatatttctcaaaagaacacatcgcaaataggcatatgaatagatgttcaatatcaatgatcatcagtgaaatgcaaatcaaaactacaatgagatatcatctcacctcagttaaaatggcttataaagacatgcaataacagatgctggcaaagatgtggagaaaagggaaccctcgtatattgttggtgagagtgtaagttagtacaccctctatgaagcacagtttggaagttcctcgaaatawctaaaactggagctatcaccccatccagcattcatc

SEQ ID NO: 268336 - DNA, 612 bp, Homo sapiens
tctgaccaaagtttattaggtgggaatttcctccccctaataagcctgggagcgctatgggagactggagtttatttcatctctgcaatctcgaccataagagacaggtacaccccggggggtccagttcagagacctacccctaggtgctcattctctttctcagggacgttctatgctgagaaagggaattcagcgatatttctcccatttgcttttgaaagaagagaaatatggctctgttctgcccagctcaccggcggtcagagtttaaggttatctctcttattccctgaacaactggtgttatcctgttcttttttcagggtgcccasatttcatattgctcaaacacacatgctgtacaatttgtgtagtaaacgcaattattacagggtcgtgagacgatatacatccttctcggctgacaggattaagagattaaaataaagacaggcataggaaatcacaagggtattgatttgggaagtgataagtgtatatgtaatctttacaatttatgtttagagattgcagtgaagacaggcataagaaattacaaaagtattaatttggggaactaataaatgtcgatataatcttcacaatcta

SEQ ID NO: 268337 - DNA, 560 bp, Homo sapiens
aaataccaaaaaaaaaaaaaaaacccacactttaaagtatagcccacccacataatgctttgcttgcaggaaatcattaaattgaatgaagttaaatgatgaaaatgaaagctttctaaaagggggaaaaatgggaagcatggacaaagttatagaatagcaactawtatttttaagcgcctgataggtgccaggcactgactataaaacttatgtaaattgtctcatttaatccttactatgaccctgctgggtaactattaccaaaaccattttactggtgagaaacctattactaagagactgtaacatcccagaggttatacagctttgtggcttgaattcggatctacttaatgccaaaggaactcatgttccttttactattctctactgtgagtcaaaaacatagagaactatggttaggctctatttcttacattaatttttgttaaatattaagtattttcaaaaaaccattattcatgtgtatggagaataataataaactgaacacctgtgtactcaccaaaaaaaaaaaagattagaagaagcaacta

SEQ ID NO: 268338 - DNA, 560 bp, Homo sapiens
aaataccaaaaaaaaaaaaaaaacccacactttaaagtatagcccacccacataatgctttgcttgcaggaaatcattaaattgaatgaagttaaatgatgaaaatgaaagctttctaaaagggggaaaaatgggaagcatggacaaagttatagaatagcaactaatatttttaagcrcctgataggtgccaggcactgactataaaacttatgtaaattgtctcatttaatccttactatgaccctgctgggtaactattaccaaaaccattttactggtgagaaacctattactaagagactgtaacatcccagaggttatacagctttgtggcttgaattcggatctacttaatgccaaaggaactcatgttccttttactattctctactgtgagtcaaaaacatagagaactatggttaggctctatttcttacattaatttttgttaaatattaagtattttcaaaaaaccattattcatgtgtatggagaataataataaactgaacacctgtgtactcaccaaaaaaaaaaaagattagaagaagcaacta

SEQ ID NO: 268339 - DNA, 584 bp, Homo sapiens
cccatcaacagtggattggatttttaaaaagtgatacatatacactatagaatactatgcagccataaaagagaatgcaattatgtcctccacagcaacatggatgcagctggggtcattatcctaaatgaattagcacagaaacagaaaatccaatactgcatgttctcacttataaatgggatctaaacaatgggtatacatggacataaagatggaaacaataaacacacaggattctaaaatgtggaagggaggaaagggcaaaagttgaaaaactacttttctcatactatttttattatttgcgtgatggtttcaacagaagcccaaacctcagtattataaaataaatatatgtaacaaaactccacaggtacccttgaatctaaaatgaataaaaaactgttaatatagttctgagattaggaaacatcatagttatatttaactcatgtttctgttcttttctaataatagcaaatttctaaccctcaacaatwtataaatagctctacataaaatatgtaactttttaattattgagaaaaaataggcctggcacagtggctcacacctgtaat

SEQ ID NO: 268340 - DNA, 580 bp, Homo sapiens
caatatataaatagctctacataaaatatgtaactttttaattattgagaaaaaataggcctggcacagtggctcacacctrtaatccttgcactttgagaggccaaggtgggtggatcacctgagatcaggagttagagaccagcctggccaacatggtgacaccccgtctctactaaaaatacaaaaaattagtcaggtgtgctggctggacctgaaatcccagctactcaggaggctgaggcaggagaatcgcctgaacccaggagacagaggttgcagtgagctgagatcacaccactggactccagcctgggaaacaagagtgaaactaggtctcaaaaaaacaaattaaaaaaaaaagagtttatttgtaataaaatgaagtaaaatgcaatactttttttaaaaaaattaagaacaagcgaaatccaaattagcagtagaaaagaaataataaaatcagaacttcttaataaaatcaaaactgaaaaacaataccaaaaaatcaacaagaccaaatttgattttctaaaaaattaacaaaatttatctatcactagctagaatagccaaaaaa

SEQ ID NO: 268341 - DNA, 580 bp, Homo sapiens
caatatataaatagctctacataaaatatgtaactttttaattattgagaaaaaataggcctggcacagtggctcacacctgtaatccttgcactttgagaggccaaggtgggtggatcacctgagatcaggagttagagaccagcctggccaacatggtgacaccccgtctctactaaaaatacaaaaaattagtcaggtgtgctggctggacctgaaatcccagctactcaggaggctgaggcaggagaatcgcctgaacccaggagacagaggttgcagtgagctgagatcacaccactggactccagcctgggaaacaagagtgaaactaggtctcaaaaaaacaaatwaaaaaaaaaagagtttatttgtaataaaatgaagtaaaatgcaatactttttttaaaaaaattaagaacaagcgaaatccaaattagcagtagaaaagaaataataaaatcagaacttcttaataaaatcaaaactgaaaaacaataccaaaaaatcaacaagaccaaatttgattttctaaaaaattaacaaaatttatctatcactagctagaatagccaaaaaa

SEQ ID NO: 268342 - DNA, 602 bp, Homo sapiens
tcacaccttgacttctgtgcctagtttttatcctttgtttctactgcatatttaaatcttgctggtgaaagtcctgcatatcaacatctttctgtctatagtcaaacacctgtagactaattaccagatcatttctattaaaccagatactagaatatgactgctgctatgactcttattgataatccagctgggttatctattttgctattctgatatttccataaaaataaattttattatgtatattggaggtttacaacatgttatgggaaacatatagatagtaaaatggttgctatagwgaaacaacttatctgttatctcacatagttttctttttgtgacagaaggagctgaaatctacttatttaacaaaatctcaagtttttccccccaagatgatggattagaggcttttagcttgctacagccacttgtacatgggaaagtagtgcataaagatcaactctgtgagttttaattcaagaaggaagataggagtccatggaatcatgaaagactccccacatcctaaggagtagaatgccagcaaacagcccctgtgatggtgtgaagctgataaaagtgagtgaaaacct

SEQ ID NO: 268343 - DNA, 546 bp, Homo sapiens
tgcatggagttggtggctttttttttaagtaaatraactcacgaagagaaaaccaaatactgcatgatctctattataagtggtagtaaatattgggtactcatgaacatattaatggcaacagtagaaactgggactactagaagggagactgagagggaaagccagggttgaaaaactgtctactgggcactatgctgagtaacggggtgatgggatcatctgcaccccaaacctcagcattctgcaatatacccaggtgacaaacctgcagaagtaacccctgaatctaaaataaaatttaaaaattaaagaaataaaaattccaaatgcaataaaattcaagtcatttttgagggcctcccataagtcatagaataatgtgaaaatttcacttctaatatgaggttatagaaaataaataaataaatactgaaaaagtatataaaagccttatgtggtgcttaaataatggggttatcaataaaataagcattatctatgtctgcttattacacttgaaatctggtggctctgtggtttctg

SEQ ID NO: 268344 - DNA, 576 bp, Homo sapiens
tgcttattacacttgaaatctggtggctctgtggtttctgtattaaccttgggtgagaagtttttttttaatkggaaaatgaaatattctgtagttatccactggttttggttctaactcctctgaggcaatacagcacaaagaatttgactctgtttttgaaatggagtaggacaaaatacatcgagaaggaaaaccctgaaaattaatgacttaatacattatactgctacacatgtgaaacttagagctgttgagtagacatttcagtgatacccatacgttaatctccccagatctctgcaatgtctccttttatggttactactttgttctaatctacaaagctgagcccaaatccacagagatgggccttactcaatgtgatggtcattttttatatgtcaagttggctgggctgcagttccccattattcaatcaaacaccaattgctgctgtaaaggtgttttgtatatgtgattaaagtccacagtcagttaactttaagtaaaggaggctatcctaggtaatctggaagactcttatctacttagttagaaggccctaagaaaaga

SEQ ID NO: 268345 - DNA, 574 bp, Homo sapiens
cctgttttatatacgcacaaagagctaaaagaaaccaggaaaatgatgtctcaataaatgtagaatatcaataaagaaatagaaattataaaaaggaactgaagttctgaaattgaaaagtacaataagtgaaaagacaaaaaatcagtagacaagctcagcagcagacytgaccatgcaaaagaaagaaacagcatatttgaagataggactactgaaaattatccaatttgaggagcagaaagaaaaaagaatgaagaaaaatgaacagagtttaaaagaccagtggaacatcatcaagtgtgccaaaaagcacacaatggaagtttcaggagaggagaaagagaaagggaaagcaaaaatgttttaagaaataatgaccaaagccttcccaaatttaaaaagtagtgatgaatctactattccaagaagctcaatgaatcccaagaaggatacattaaaaaatattaggttggtgcaaatgtaattgcggtttttgcattgttggaatttgctgtttgatatttgaatacattcttaaataaatgtggtatgttatacatcattttaatgg

SEQ ID NO: 268346 - DNA, 552 bp, Homo sapiens
attccatgcgttatgtaatcacagctacataaccataacatgggaggctcatcatctggctccaagccactattgtttgtgaggtgtataaatgcaacattgacactgtgaaagagctgctraataaacccatgtctcatctccctgctgtctctcaagtgttcttccagctccctgactcccatccacccactcccctcggacctcagctggggcttgaagctgaaactatccaaaataaaattccaaaattttcaacattggaaagttaccatgagtttatagtttcattagtatactgaagtgtcctttatttaaagatatctttactcatattatctcacttcaccttctaaaggagttcattttgttattcccattttaatgagaaactgaagtgtaggaaggttagtaacttccctggagccacaaagttagcaagcagcagagccatgattcaaatagaggtataatttcaaagtctatgcacttaatcataaaagtatgcatggccccctttcctaacagagtagttgactactccaaatatca

SEQ ID NO: 268347 - DNA, 460 bp, Homo sapiens
ttgtagagcatctatgtgtgctggggttccactccagcccccagttgctttggactctccaaagcacaaaggcgcaaacagccaaggcaggcaaaacagcaaagatggtggcccacccctccccttgggagctgtgtcccagggaggttttaaactgtttttggttggaaaacaccagcagggtttactggacaccctgtttgagagattccacccactgaagagaaatgggattcaagatccatgtgactaaacagcctgatcacttytccttatagcactatgctgtgctgggggagctctcctgcctacagttgccttggactccctgatcagtctttgttgttgtaagtgtataagaagaatgactatacagatagcaaagtggatgtataatactttgaggggcttgctaatcaccaggataatctactatctttttattttatatccattctat

SEQ ID NO: 268348 - DNA, 595 bp, Homo sapiens
aaacatcttgcacaaagcctcatacctgtgaaaacatccaaaaaaagcagtctattgactgtactcaatctacactgcagttgaaagaacactcacatgcagagatgagaaacaaccaacgcaagaactgcagtaactcaaatggccagagtgttgtgtgtcctccaaatgattgcaccagttctccaacaagagctgttaaccaagctaagcttactgaaatgacagaaattaaattcagaatatggataggaagaaagatcatcaagattcagtagaatggcaaaacctaatttaaggaaaccaagaatcccaataaaatgatacaggagctgaagaatgaaacagtcagtatattaaaaaaaaaaaaaaaacctgatggacatgacagagctgaataatacaatacaaaatctttacaatgctaccataaatattagtagcataatagaccaactagaggaactaatctcagaacttgaaaactggctctctgaaataaaacaatcagacaaaaagaaaaagaaagaaacamacaaaaactctgagaagtatgagattatgtaaatatgtcatatctatgaattactggcat

SEQ ID NO: 268349 - DNA, 355 bp, Homo sapiens
tttcttgtacattcttattagtcccctgttggatgagtagtttgcaaatatttcctcccattcaagagggtgtctcttcactcaatgtttttgttctgcagcagctttttaatttaatatagwcccatttgtctatttttgtttttgttgcctgtgctcttaaggtcttatctgtaatatccttccctagactaactgtcctgaagcgttttctcttagtagttttacaattttgggtctctcatttaagtctttaatccttcttgaattgacttttgtataccgtgatatatatgggtccagtttcattcttcttcatatggttatccagttttcctacacaatttattgaaga

SEQ ID NO: 268350 - DNA, 355 bp, Homo sapiens
tttcttgtacattcttattagtcccctgttggatgagtagtttgcaaatatttcctcccattcaagagggtgtctcttcactcaatgtttttgttctgcagcagctttttaatttaatatagacccatttgtctatttttgtttttgttgcctgtgctyttaaggtcttatctgtaatatccttccctagactaactgtcctgaagcgttttctcttagtagttttacaattttgggtctctcatttaagtctttaatccttcttgaattgacttttgtataccgtgatatatatgggtccagtttcattcttcttcatatggttatccagttttcctacacaatttattgaaga

SEQ ID NO: 268351 - DNA, 587 bp, Homo sapiens
  misc_feature (1)...(587): n = A,T,C or G
nnnnnnnnnnnnnnnnnnnnnnnncctttagcctttagctgaaaccattgccaatttcagttttccaagactttktgtgctatctatacaagcaacattctatatgtaaatcactctgtcaagtattttggaaaatataaaaaataaacaactatgtagcatgtggtttatggagacaattatgaggcttctgtcttgtgcatatggatgtgaagaaactaccaattaaaaagcacttttgccatagtgagttgtgttttactccctccctcaccaaactccatctccccaccttaccctcccccatcactttttcccctttcctcctatataatcaacaggctcagcttctccagtgatatttgtgtttgtactctgaaatgatgtgaatacatattttgattaacactgtttccttagaggaaagaacacttgtcttacaagtacattgcagtgcaaatgtttaaaatcactccaaagtgcctaagtgggacttacatcaatgtttctgcttgactttttcacagaagaaatgatatcttctggaaagcaaagacaaacaaaattcttttggaatagaaatgagt

SEQ ID NO: 268352 - DNA, 658 bp, Homo sapiens
ccctcaccaaactccatctccccaccttaccctcccccatcactttttcccctttcctcctatataatcaacaggctcagcttctccagtgatatttgtgtttgtactctgaaatgatgtgaatacatattttgattaacactgtttccttagaggaaagaacacttgtcttacaagtacattgcagtgcaaatgtttaaaatcactccaaagtgcctaagtgggacttacatcaatgtttctgcttgactttttcacagaagaaatgatatcttctggaaagcaaagrcaaacaaaattcttttggaatagaaatgagtgacgaatcatctccattaaacaaaatgatagaactattgctgttcaattaaggtctttataatgaatcataaaaatgcaagatgtaaagtatgtctgtgtggttgagctccaattcttaatgataaattgagttgatttctcccccagtgagtttggagtgtttggattttatctttttttaatctgtcttaatcattaattataatttcaaaaataatatgagtcactgcttcacagcttggaagcaaaggcagcattctgttttggggaaatgtttttatagcaattaacttctatttatgtcactcttctgccatatttagaagtcaccacattt

SEQ ID NO: 268353 - DNA, 543 bp, Homo sapiens
aactcaatcccatttacaataactacataaatataaaatagctagaaatacatttaaccaatgtgatgaagcctctctacaaggctgtgtttgtttcttttcactgttttttctctaatcttgtcttctcactttatttcattaatttgatcttcaatcacggatatcctttttctgcttgatagaatcggctattraagcgtgtgtatgattcatgaatttctcgtactgtggttttcagctctatcaggtcatataaggttttctatacacagttattatagttagccattcatctccccttttttcaaggtttttagcttccttgatatgggttagaacatgctcttttagataggaaaagtttgttattacccaccttctgaaggttggtaaataaactgtagaagacaaagataaatggtgaaatttcccaagctcatgggttggaagaatcaatatcattaaaatgaatacatggcacaaagcgatctacagacaatgcagtgcttatcaatatattattattttacacagttagaa

SEQ ID NO: 268354 - DNA, 600 bp, Homo sapiens
taggagaagctgagtaccaaatcaaaaactcaatcccatttacaataactacataaatataaaatagctagaaatacatttaaccaatgtgatgaagcctctctacaaggctgtgtttgtttcttttcactgttttttctctaatcttgtcttctcactttatttcattaatttgatcttcaatcacggatatcctttttctgcttgatagaatcggctattaaagcgtgtgtatgattcatgaatttctcgtactgtggttttcagctctatcaggtcatataaggttttctatayacagttattatagttagccattcatctccccttttttcaaggtttttagcttccttgatatgggttagaacatgctcttttagataggaaaagtttgttattacccaccttctgaaggttggtaaataaactgtagaagacaaagataaatggtgaaatttcccaagctcatgggttggaagaatcaatatcattaaaatgaatacatggcacaaagcgatctacagacaatgcagtgcttatcaatatattattattttacacagttagaaaaataatccaaaaataaaaacataaccagaa

SEQ ID NO: 268355 - DNA, 543 bp, Homo sapiens
aactcaatcccatttacaataactacataaatataaaatagctagaaatacatttaaccaatgtgatgaagcctctctacaaggctgtgtttgtttcttttcactgttttttctctaatcttgtcttctcactttatttcattaatttgatcttcaatcacggatatcctttttctgcttgatagaatcggctattaaagcgtgtgtatgattcatgaatttctcgtactgtggttttcagctctatcaggtcatataaggttttctatacacagttattatagttagccattcatctccccttttttcaaggtttttagcttccttgatatgggttagaacatgctcttttagmtaggaaaagtttgttattacccaccttctgaaggttggtaaataaactgtagaagacaaagataaatggtgaaatttcccaagctcatgggttggaagaatcaatatcattaaaatgaatacatggcacaaagcgatctacagacaatgcagtgcttatcaatatattattattttacacagttagaa

SEQ ID NO: 268356 - DNA, 610 bp, Homo sapiens
gtaaggttgtaaacatagcttgaggcccagtaacagagggcattaagtattcctttaaaatttttgaagaggctcttctttgggtactggggagcccttcaaggttattggatggaggagtgacaggctgtgtttgtaaataaagaggttgactcttgctgggaggatggatggtggggacttgggagggactggagtagggagacacctagggaaggacggtgggatgactcaggggagaaatcatagagcctacatcctaggaattgaagggagcccacagatggcaatggcatgtaggggagactgttaaaaatgtcattcatgaacatgtgggggaccctsaatagaattggtagagaaggggtaaaaggcgaatggtgcaaagtaactgcccactaggaggacagtggaagggaaataaacttggcagagtccagaccggaaattaaaattgtatgtatgcttttaaatctatcctctagcaggcatctcaccaacacctcactccaacacatttgccttacctggtaaatcaagtctgcagcattaagtaattgctacgtgttatcagaaatcaatggcagtttatacatgatactggaataac

SEQ ID NO: 268357 - DNA, 611 bp, Homo sapiens
ctattggtatacataggcaacaatggggaagctatgagaaacatcttttatttgttagtrgtgataaccgtaatgcagtttccattcattcacagagttctgagaaatctgagtgacacaactacaaagtgagaacttttccaattactgtctcaaatttattacaagcacttgtcaatataagtgaaagcctatctcacttgaaaagaagtaaaaagtttgcagatatgccattcgccttttatgttttgacaacttcatgaacatttgtaaagattttactaacacgtcctgtttgaacactcttgatgtggtggtttttcctggaaggccctaagaagccaccattttgctctgtaattgacttgtgctcacctgcccaaagaattaataccataatgaatttggggcatgaggtaaatgtgaatgacaaacctggtcactccttattcatagagaaggattctgtgaacacctcccaagtctaatggctctaggtgaagtggagtctaagcccaaatgacagtcagaaaaagacagatatgaatctacgattgccaatggatggaatgattgctttgttgcaggtaaaagctccccatcacccagct

SEQ ID NO: 268358 - DNA, 611 bp, Homo sapiens
ctattggtatacataggcaacaatggggaagctatgagaaacatcttttatttgttagtagtgataaccrtaatgcagtttccattcattcacagagttctgagaaatctgagtgacacaactacaaagtgagaacttttccaattactgtctcaaatttattacaagcacttgtcaatataagtgaaagcctatctcacttgaaaagaagtaaaaagtttgcagatatgccattcgccttttatgttttgacaacttcatgaacatttgtaaagattttactaacacgtcctgtttgaacactcttgatgtggtggtttttcctggaaggccctaagaagccaccattttgctctgtaattgacttgtgctcacctgcccaaagaattaataccataatgaatttggggcatgaggtaaatgtgaatgacaaacctggtcactccttattcatagagaaggattctgtgaacacctcccaagtctaatggctctaggtgaagtggagtctaagcccaaatgacagtcagaaaaagacagatatgaatctacgattgccaatggatggaatgattgctttgttgcaggtaaaagctccccatcacccagct

SEQ ID NO: 268359 - DNA, 450 bp, Homo sapiens
cttaccagctaggtgactgggtcaattattttgcttctctgtgcctcagctttcacttctcttatgagaataacccacttaatgaggctgttgtgaggttgaatgaaataactgtgtctataaaatatcagcrtattaggttctttaaaactatcattttcttcctgctttttacctatatccctgaggtacagggtcagaactcaaaattaatagccagtatttattgagtgccacatactgttctaagtttgttacttatagtaactacttaatctgcatagcagctctatagggtagatactattttattaacattttttgagagagaatacagaggcactgagaagttaaaaaccagcttgcgtaagttttcacagctaggaaatctcagagccaggactcagttttacaacatcagggaacctagcaccaaagctggtgctctta

SEQ ID NO: 268360 - DNA, 450 bp, Homo sapiens
cttaccagctaggtgactgggtcaattattttgcttctctgtgcctcagctttcacttctcttatgagaataacccacttaatgaggctgttgtgaggttgaatgaaataactgtgtctataaaatatcagcatattaggttctttaaaactatcattttcttcctgctttttacctatatccctgaggtacagggtcagaactcaaaattaatagccagtatttattgagygccacatactgttctaagtttgttacttatagtaactacttaatctgcatagcagctctatagggtagatactattttattaacattttttgagagagaatacagaggcactgagaagttaaaaaccagcttgcgtaagttttcacagctaggaaatctcagagccaggactcagttttacaacatcagggaacctagcaccaaagctggtgctctta

SEQ ID NO: 268361 - DNA, 546 bp, Homo sapiens
gactttaaatcctgactcctcttctcctagttatgtggctatgaataagttatacctgttcacaaagggtgttgtgatgattacatgaaatgatctttgtaaagtgcctaacacagagcagccattccagaatgtagttcctattattgttatgctttggattaaaaaagaaaacaacacatctgctgcttatagtttyttttaaattatctttaaatgtttggctataagcagccatatcagctccagtttctcccatctaacattgaatttgctactttttttttttttaatttgagacagggtcttgctctgtcacacaggctagagtacaatggtgcaatctcagctcactgcaacctcaccttccatgctcaagtgatcctcccacctcagcctcccaagtagctgggaccacaggtgcataccaccatgcccagctatttttttatatttttaacagagataagatattgccatgttgcccaggcagatctcgaactcctgagctcaaacaatctgttctccttggtctaccaaagtgct

SEQ ID NO: 268362 - DNA, 524 bp, Homo sapiens
cattcccagcaaaacgtttcagaaactcctgagcaccatcttaaagtgaaagatgggacaacaaacyccaagcacatatttcagttttacaatatttaatagcttctcatttcagtcagaatatggctgcttattggaaaagtttaggctaatgacagtgtagtagaaagagtctggatttttaagtcaaaatggttctaatactgctggccgtgtgatcttcaaacattgatttcctctgtcccagctttagggttgctcatctgcatttggattcaagagtactttcccagcaggttattttgaggctaaatgaggtaatatactgatagagaccctttaatactagctacttaataaactttagatctttatatacactaaagctcattattaggatctttgggagtcatatattaaatgtaaatgaattattcaggcagaactttctctaaaatagatgttacgcttcactgctttagcaaacagagtatactgaacataatttaaattcttctgaagtc

SEQ ID NO: 268363 - DNA, 608 bp, Homo sapiens
atttttgtatatatttctttctttttttttttggtagagatagggtttcagcctgggctgatctcgaactcctgggctcaagtgatctgccggcctcggcctcccaaagtgctggggttacaggcgtgaggcacagggctcagccgtcaatgaagttcttaaggagaagaacaacttgctgtgatcacagatctttgcttctggttctccaagttcttagtgttttctgcttattgagaccagaacgaaccctgctttgtagagacagacctaccagactgtgtcctggtgaatcagactccagctcccaaagcactttgccacagacccctcttcctcaggaagaaggatgaagattgagcacttttgcaaagcaaccaagagagtaatgtgctgcagtgggaataaatcayggacagaggaaatgaatgaaccacatgtttctggatttcaaatatcacttctggaaatgagcgagtctttctgctttctgatttcaattaattttcttacaaactctccctagcatttttcattgcagtcaattatttaacttgttccagtatgaaaattgggtccttacaaaacacttaattgatttgacccgt

SEQ ID NO: 268364 - DNA, 574 bp, Homo sapiens
taaatgtgagaactctgattttcaagaaatcttaccaaccttttcaatctgttttacaaagttatttatttttgaaacagggggttctatttttgctgagtgttagcaaattgtagcatcagattcaaggttggtttccaaattctgagtcaactaatgttaaatgtgattaaaattgaaagtcattttaggaactggccttctcattagctagctgcaggtttgcactagacttccatgcaagaaatctgagactttaaagaaatgattattttcagcttaaacatgagctgaggaagtaaagrtaatttttttaaaaagaaaagaaaccaaaaaaagaaagaaaagataaaatagtggttctcagatttgctgcatactgggatcactagcaaagctttaaaaacactaatgcctagggacccactcccagagattctgatttagagtaggtctgggctggggtgagacatcaaggttttgaagagctctacaggtgcttcttacctcgagctaaggttgagatacaatgagataaagcagagaggcagctagtaaacaaggcgattttttg

SEQ ID NO: 268365 - DNA, 574 bp, Homo sapiens
taaatgtgagaactctgattttcaagaaatcttaccaaccttttcaatctgttttacaaagttatttatttttgaaacagggggttctatttttgctgagtgttagcaaattgtagcatcagattcaaggttggtttccaaattctgagtcaactaatgttaaatgtgattaaaattgaaagtcattttaggaactggccttctcattagctagctgcaggtttgcactagacttccatgcaagaaatctgagactttaaagaaatgattattttcagcttaaacatgagctgaggaagtaaaggtaatttttttaaaaagaaaagaaaccaaaaaaagaaagaaaagataaaatagtggttctcagatttgctgcatactgggatcactagcaaagctttaaaaacactaatgcctrgggacccactcccagagattctgatttagagtaggtctgggctggggtgagacatcaaggttttgaagagctctacaggtgcttcttacctcgagctaaggttgagatacaatgagataaagcagagaggcagctagtaaacaaggcgattttttg

SEQ ID NO: 268366 - DNA, 589 bp, Homo sapiens
gcatcttcctattcatgaataaggtataccccacatttatgcatcttcctttaataacatttgtggcttttttgtatagtggtgctcttttgtcagttctattyctatgactttaatgtttttcactcctactgtcaatgatatgtttagttttcttattgtttagtattggtatatggaaatacaactgattactttgatattaaccttgttatttagtaaaattgctaaagttactttttaattatagcagtctatctagttattttgaattttaaacatacagaattatgttaccagaaaataaggatcattttattgttttccttccaatcatcttactttttcttgcacctccccttaatagcagtagtgatagaagggtagagtagtgatagaaggtgtctcatacctgtttccagggaaaaagcttccaaaatttcattactaagtatggtgtttaggctggctccctggctcacacctgtaatcccagcactttgggaggatcacttgtggccaggagttagaacagcctgaccaacatggtgaaactccatctctactaaaaatacaaaaattagccaag

SEQ ID NO: 268367 - DNA, 522 bp, Homo sapiens
cagtctgcaagctgaggagcaaggagagccagtccgagtcccaaacagaagaactttgagtctgatgttcgagggcaggaagacttaccttataaggaggcaatacggagagtgtagagggtgttgaaagggaaaaaaaaagcaatcatgatacattcttgggaccagttattaattacgaataaatggttgctggtggaaatgtcaattmgtacagattatttgaaagcaatttggcagtgtgtcaaaacttttaaactattcataatttttaactcaataatttaacctttagaaatctatcccaagaaaataatccaaaatgcactgaatggtatattcattgcaatatagactacaaagaaaatggaaaacaacaaacaacataggaatgttaagccactgcagtaaattcacttgaaatactattttgtcattatgtttataagacaccttggtttgtagtcttcttttctcgtgatatctttgtcaaattttggtatctaggtaatactggcctca

SEQ ID NO: 268368 - DNA, 528 bp, Homo sapiens
agaaatgcaataaaaagaaactatgtgggttttgttttgttttttgttttttgttttttktttttgagacgaagtctctctgtgttgcccaggctggagtgcaatggtgtgatctcggctcaccgcatcctctgcctctcaggttcaagcaattctcctgtctcagcctcctgagtagatgggactacaggcacatgccaccacacccagctaatttttgtatttttcggggttttgccatattgatcaggctggtgtcgaattcctgagctcaggtgatccacctaccttggcctcccaaagtgctgggattacaggcgtgagccaccacgcccagccggtatggttcttattcttccattacttctcccccctttcaccagatgttcagttattttgttgtgtttgttttgttttgctttgcccacattttctctccatactcatagtagaaatcattgctcaacattttggttcctgcattcattcagtgagtattgagtacctgtcatgctctcaatcccagag

SEQ ID NO: 268369 - DNA, 196 bp, Homo sapiens
aactatactttgtaaggttctaatgcggtacatgaagtattataatattgatagtaatgctagaatgggataagttaaacatgtacactacaaaycctaaagcaaccactaatataacaacaacatctggagagttatagctaataaatcaacaaatgagataaaatggagttataacaattatccagtaaacctc

SEQ ID NO: 268370 - DNA, 608 bp, Homo sapiens
  misc_feature (1)...(608): n = A,T,C or G
ctgttactaagcttcaacaattaccaactcatgttggtataatccgctgaattgagagaaagttgtagaaaatatgactttttatttttctgactcaggactacacattgcattctgttggtcctatttccttatctcctttaatctagaatgattccttagtttttatggttttcatgacattgacatattttatagttttcatgacattgacatatttggcagaaatactacagaagtgatgttgtgtacttctcagtgttttccatcaggaggcccatggtgtcatgttgtcccacaatttggcgatgctaattttgatcacttgattaaggtgatatttaccagatttctccactataaaggtatcttttcccctctttttaataattaaataatctgggaagagataaatatcctattccccaacaaactttcaaccaatgctttargcatccacagatgattcttccctaacttgactattatagtgatgattacaaaatggtgatttcctgactttatcattccttctataattattagtcatactctaaagaagagcttttcttttatcccatttttagttacatcnatttatgtatttt

SEQ ID NO: 268371 - DNA, 578 bp, Homo sapiens
tccccttctcttcttaccaaaaaatttaggtgaaatggttagagttgctgatttttagtcctatctaactgtgattatcttattttatatatgttgagagtctgaattttatggtcctttatagaatgttaagtttttgttctgacaggtgataatttactgacacagcagcttcttccatttgtgacatggttttagactttgtgaagatgggtgtagagtaagtctagagtaaccttttaaaatgtggcctttctgggatctccatgggttctgactcaactcccgtgtcttctagcaccatgtgatgtctaaactctccatttggaaatggcctctaggtagagaggtggggtgaatgctctctcatatgtttctcttttctcaaagattacagccctgtacttcctgttgtctgatatctgaaaacagttgtttcatatattttgtccagttttttagttgcttatggtgggagggtaagactagtacctgttactatgtcatatttcttcatactrcatatttctacatatcaatgttgaggatgtggtggagaatataggtgtaaagcaagt

SEQ ID NO: 268372 - DNA, 650 bp, Homo sapiens
ggccaggttgtgtgcaaagtacatttatgtaattccatctcattgaatccctgtaaacagtttgagatataggtatgattatttctattttgtagataaagaagttaagaactaaggttttaattctaattctcacaaaaaccttatgtgataaatataattttccgtattttaagataaagaagctgagatacagaagaagcagcctttccttctctaaaattgcaaatcactctgctcttttacctctctgggaagcctacagcttctagtcttgagtgggaatatgtcttatctcctttactacatcagaaacaacatcaggagctcccagaccaagtctcagcacagagttttcacagatggatttataaatgaacaagtgaatcagcaaattactcccttctgtgctgtgaacttgtttggtctakggaggcctttgctttcctgacaacattaagatgcaaggaacagagtgctttgactcaatttccttcatttcttgaagttgaggcctctgcttgattagaggagacctggtcctcacctttctatgcagcaagagaaagaacactagcaacggaaaataaagtctgctctctgctccatcccactgtgcctggcttggacacatatgacccattttcaca

SEQ ID NO: 268373 - DNA, 650 bp, Homo sapiens
ggccaggttgtgtgcaaagtacatttatgtaattccatctcattgaatccctgtaaacagtttgagatataggtatgattatttctattttgtagataaagaagttaagaactaaggttttaattctaattctcacaaaaaccttatgtgataaatataattttccgtattttaagataaagaagctgagatacagaagaagcagcctttccttctctaaaattgcaaatcactctgctcttttacctctctgggaagcctacagcttctagtcttgagtgggaatatgtcttatctcctttactacatcagaaacaacatcaggagctcccagaccaagtctcagcacagagttttcacagatggatttataaatgaacaagtgaatcagcaaattactcccttctgtgctgtgaacttgtttggtctagggaggcctttgctttcctgacaacattaagatgcaaggaacagagygctttgactcaatttccttcatttcttgaagttgaggcctctgcttgattagaggagacctggtcctcacctttctatgcagcaagagaaagaacactagcaacggaaaataaagtctgctctctgctccatcccactgtgcctggcttggacacatatgacccattttcaca

SEQ ID NO: 268374 - DNA, 650 bp, Homo sapiens
ggccaggttgtgtgcaaagtacatttatgtaattccatctcattgaatccctgtaaacagtttgagatataggtatgattatttctattttgtagataaagaagttaagaactaaggttttaattctaattctcacaaaaaccttatgtgataaatataattttccgtattttaagataaagaagctgagatacagaagaagcagcctttccttctctaaaattgcaaatcactctgctcttttacctctctgggaagcctacagcttctagtcttgagtgggaatatgtcttatctcctttactacatcagaaacaacatcaggagctcccagaccaagtctcagcacagagttttcacagatggatttataaatgaacaagtgaatcagcaaattactcccttctgtgctgtgaacttgtttggtctagggaggcctttgctttcctgacaacattaagatgcaaggaacagagtgctttgactcaatttccttcatttcttgaagttgaggcctctgcttgattagaggagacctggtcctcacctttctatgcagcaagagaaagaacactagcaacrgaaaataaagtctgctctctgctccatcccactgtgcctggcttggacacatatgacccattttcaca

SEQ ID NO: 268375 - DNA, 575 bp, Homo sapiens
atgattttcagcaaattacttcatatctttgtacctgggcttctgtatatgaaaaatgaggggcaagaatccctgtccgacagggtccttataagaattacacatgagagcttttagaatccagtaggtactcaatatttgttaattgagtctaaaaaaatctaaattttttcccctgtaaattctataccctggttctagtgttactcactggaatataaacaacttaagcctacctctgctatccagtrgcactcttttaagtgtttatggactgacaaatgataaagctagtacggtccctagctcagcagaggtgctggataaaactcgttttactcatgagtatatgaaaaacgggagaaagacattcaagagcatctgaaatgactcctccaaatccttagtaccatcatagcagctcatcagggtaagtaatgacatttacacaccacaatatcagacagttgggcaatcactttgcctgccccaatactgagtttgttattttgcctatgatttttcagaaaactggatggaaactacaggccgtactgtagcaggagaagacctga

SEQ ID NO: 268376 - DNA, 575 bp, Homo sapiens
atgattttcagcaaattacttcatatctttgtacctgggcttctgtatatgaaaaatgaggggcaagaatccctgtccgacagggtccttataagaattacacatgagagcttttagaatccagtaggtactcaatatttgttaattgagtctaaaaaaatctaaattttttcccctgtaaattctataccctggttctagtgttactcactggaatataaacaacttaagcctacctctgctatccagtggcactcttttaagtgtttatggactgacaaatgataaagctagtacggtccctagctcagcagaggtgctggataaaactcgttttactcatgagtatatgaaaaacgggagaaagacattcaagagcatctgaaatgactcctccaaatccttagtaccatcatagcagctcatcagggtaagtaatgacatttacacaccacaatatcagacagttgggcaatcactttgcctgccccaatactgagtttgttaytttgcctatgatttttcagaaaactggatggaaactacaggccgtactgtagcaggagaagacctga

SEQ ID NO: 268377 - DNA, 579 bp, Homo sapiens
ggtgtgcaggggggaaatctgcctggaaaagtagatggaggcctgatcagggctttcaaatttgtcattctccatgtgaagggagaattactcgcataatcttgttgttcctgttgtgtgtatcaacagccttcaggtaaataggagctttttattcctttatgcatgagattcaatgaaggtactttgttttggatatggtgttagtggagaaatcaagcaggtggctggaaatgagaatttacacttaggatcaggttgtggctagagacagatttaagttattggtccacagttgatcacggaagccatgtttggccatttatccttctctctcaaattaacagaattccaagttttaaccaggtacrttgccatgtacctaaaatactatatttctttgcatctagctatatccatgagcctatagtctgacacatcaaatgtaagcagtaggggtatatggtacttccagaaagtcttcttcaaaggaagaggtcatatttatcttccaagctgtttgcttttagcaaaggacatgatgcctggcactccagcagccaaattggatgctaaaga

SEQ ID NO: 268378 - DNA, 626 bp, Homo sapiens
ctgagggatctaaccctccatccactgataaaattcttttaagaaagttatatgagtgaatgattgtttgcatttattattagtgggttatctacttgtttagagaagattgataatcttgcaacaaggattaaataaaaccattccatctctcataatgtcttataatgcctccccattcgtcatcatcatgatcattatgctggtcaagacaaaaagttaatcagccacaaacaaacataagaagaatttcttttttttttctgcactgattggatcaaggaaggggatttgcaaatatcttctagtcaaagaacttcattccaagttgccattgcactttatgcattacctaatccaaacartttacataactgtattataatcaatcatgcagttctttatctgtttccctcactggactatgatctccttgagggcaggcgcctatcttaatgactatcatgttgccattcactagcatagttcctggtacaatccctcatgataagataattgtatttctgtaatttgactttaagactacaaatccaaaggccacctcagtactctgttactgagtactgagattataatatgacagttgtgctggagaatcagttcca

SEQ ID NO: 268379 - DNA, 626 bp, Homo sapiens
ctgagggatctaaccctccatccactgataaaattcttttaagaaagttatatgagtgaatgattgtttgcatttattattagtgggttatctacttgtttagagaagattgataatcttgcaacaaggattaaataaaaccattccatctctcataatgtcttataatgcctccccattcgtcatcatcatgatcattatgctggtcaagacaaaaagttaatcagccacaaacaaacataagaagaatttcttttttttttctgcactgattggatcaaggaaggggatttgcaaatatcttctagtcaaagaacttcattccaagttgccattgcactttatgcattacctaatccaaacaatttacataactgtattataatcaatcatgcagttctttatctgtttccctcactggactatgatctccttgagggcaggcgcctatcttaatgactatcatgttgccattcactagcatagttcctggtacaatccctcatgataagataattgtatttctrtaatttgactttaagactacaaatccaaaggccacctcagtactctgttactgagtactgagattataatatgacagttgtgctggagaatcagttcca

SEQ ID NO: 268380 - DNA, 620 bp, Homo sapiens
aagatatttttgatttctagtacaaaatgactttcctagaaatataatttcccagaagaagggtacacaagaaatgtgtggcttaaaattcaccttttagtcattgtataaaagttgaaggataactgctcagttattacacgggagcagctggtggaaaaaccacaggcccagtgatgatgatagatactggacatagaggaatgagatccattttcctaataggycagcaactttatgttctatctgtgggtgcctgtcctgaagcctgtgctcccactgaattcccgaattctgcccatctaatcccaatcacattttcacactggaccgactaagtcttttccagcaatttcattccttttcccctgccctctgcattcctttgtgatctcatttggtctaaatatcatgtgatggaattggaagagccaagtaggctagatttaaattctggctctgcctacacttgaccacctagaaaacctcatagagttcctgtaaagatttaaatacacctaccacacatttatatatagtatttaacatagtgtctagcacaaaagtgttaaagaaataattctctttctctctaattgttgtttatatagtagaccaat

SEQ ID NO: 268381 - DNA, 620 bp, Homo sapiens
aagatatttttgatttctagtacaaaatgactttcctagaaatataatttcccagaagaagggtacacaagaaatgtgtggcttaaaattcaccttttagtcattgtataaaagttgaaggataactgctcagttattacacgggagcagctggtggaaaaaccacaggcccagtgatgatgatagatactggacatagaggaatgagatccattttcctaataggccagcaactttatgttctatctgtgggtgcctgtcctgaagcctgtgctcccactgaattcccgaattctgcccatctaatcccaatcacattttcacactggaccgactaagtcttttccagcaatttcattccttttcccctgccctctgcattcctttgtgatctcatttggtctaaatatcatgtgatggaattggaagagccaagtaggctagayttaaattctggctctgcctacacttgaccacctagaaaacctcatagagttcctgtaaagatttaaatacacctaccacacatttatatatagtatttaacatagtgtctagcacaaaagtgttaaagaaataattctctttctctctaattgttgtttatatagtagaccaat

SEQ ID NO: 268382 - DNA, 603 bp, Homo sapiens
ttgggctgcaactaccaaattaggtcgaaattaaagctaatggaaatcattcagtgaactgagattgcccttagagattaaagtaaggaaaaaagctgaaggtaaaacccaagagaataacaacattttagaggaagagggaagagtcatccaaagaactatggatgagagtgggcagacacatgaagacaaccagaggaaaatgtcacagaatgcaggggaggaggaagattcataatgtgataatggtcagtggtgacagatgatacaggagtccaagaagcttgaaaaatgtccaatagataattctatctctcatcccctcccaggttgtcrtgagttcagaaaagatcatggaaggaaaaggctttgtaaaatcgcattcacatctgtgattcattattatttcttgtctgttgacctatccacagtgctgcgctatcagaggacttaagatgtttaagccgaagccctacttccataatcatttactttcctgtttcttcgatttattaatgagaaatcaaatcagaaagagttaaattacttatcactgtctcaaaggaataatgttggttttcacaacatcccagtttcaggtat

SEQ ID NO: 268383 - DNA, 542 bp, Homo sapiens
agagttaaattacttatcactgtctcaaaggaataatgttggttttcacaacatcccagtttcaggtataccatcagagtcattcagagatctgaagtacagatttttccttctttgggtggtagtattcctgaaatatcattaataaattcatttaaaaaatctgttttaagtacagaaaagtaggttgctattgaaagctttatgctctgttttttttaattctgaatttgattcgtttaacaatgaaatacatctaaattcttaagacagtctctgaaggccattataaatcacagtgctatttctttctgacaattatgtcagtaagctcatgtcaggaggcatatgacaggcagaatggcacagaaaaatggaaacagtacagatyaagtatcagaataaaaatcttaataatagcagccatcttattgaattttttgctatatgtcaagtcctttacatatattatatccttttttctcttcaacattttaatcctcattttacagatgaggaaattgcagatcagagtggtgaag

SEQ ID NO: 268384 - DNA, 449 bp, Homo sapiens
gaggatttaaggccatccaaaatcagaaggtctatggaaaactctagtctcacactcaaccactgaaggaatgccttttaccatgcataatggccagctatgcagcttctgctggagcatctgctgaggtggagaggcagctcactccttagtgaggcaactcactctttgttggatgggtctcttggttatacaagagtcctttcttactctgaatraactccttaattcgttacagagaataagtccactccctcttctgcctgataaccatctaaataatgatagtgacactaaggacttgaacctgactcttctaatttcaaaagactacccctgccccatcactttacagcatcattaaggctttctggttaattggaattattctgccagattaaatgtttcatgtgccatttagttttttagtagctttttatgatttgaaa

SEQ ID NO: 268385 - DNA, 388 bp, Homo sapiens
cttatcccaagtatatttgataaataaaactacaaraatacaaatattgcatataagacagtattttttaaggttggaaataaatgtataaggatatacaatatagtcattttctgatttaaaaagccttttaaaatttttatgtgctgtgatctgatcatttctcaagtcacctttgtaagtgcctgttttctgacggcctctatacattgtcattctgacctgaacaagcagaacaattaaagtattataggttcactgtatcctgagctgaaccaaactcttgtgattccaaagctgcaggatgagctgctacctctgccataactagaagatgagtaatcaagaacctcccatcagaactgttgtttccaagaatgtacttttt

SEQ ID NO: 268386 - DNA, 582 bp, Homo sapiens
atcatttctcaagtcacctttgtaagtgcctgttttctgacggcctctatacattgtcattctgacctgaacaagcagaacaattaaagtattataggttcactgtatcctgagctgaaccaaactcttgtgattccaaagctgcaggatgagctgctacctctgccataactagaagatgagtaatcaagaacctcccatcagaactgttgtttccaagaatgtactttttagctaagctacagggatcaggaggttgtctaaaacgattggatccagggacatgatacagttcctatgtcagcacagctaaamagaagatgccctaggcacaaccacttggcacttgtgaaattattgactaaagaatggagattctgatagcacagctcagaaaaacccaacacatcttacaaccactgtgtatgccagaaaaaagtagcagatgaaaaggaagtacaatttctaactcatttccatattctaagacttgcctaagtaagtttgattagctgaatctaaattatatctgataacctagagacatggcatctgcaagggtatatgagataggtagtgagc

SEQ ID NO: 268387 - DNA, 562 bp, Homo sapiens
ctgtgacaagaaataaaggaagaaagaggatcagcttacactgtgttcctaaaacttttaccagtgtgtgcatgtgcaaacttgtgcttatcagctcatatgccgacttacaaattcagtccatttatttccagagtttcaacatttaccaatgaatgttatagaaaggccaagtcgaaggcaaatgaagtaggcaatttactaggctaaggtcctggctgtgtgatatctccaaatattagyagaaaaaaatggaaaaccttcatctcaaattcaggtgcttgggatgtgagctgtcaaacatctggtgaggtctaaggactgggtttacaattttttttctttttttactgttttctttactcttgttccccacctcacaacttccaatagccaccaagatatttagttctgtgtaagtgtttcctaaatcaagagtatcatgctttctcttccaagcatttcttcagctctgcttttgaaaagcagaaatgtgcttcagaacagccaactccttaatctgtcccagcagatccatcaccagacaggaactttccttctc

SEQ ID NO: 268388 - DNA, 592 bp, Homo sapiens
agaatatttactcacatatacatgtgtacatgtttttaaaataatagctttataagataaaatttgcatacaatgtaactcaaccacttaaaaaatacaatccagtggtttttagtatatttagaattattcaaccatcaccacaatcaattttagagcatttcatcactccataaagaaaccctatatgcattgacagtcacctcccatttccccaycctcccaccccaacataggcaaccactaatctactttttgtccctatggatttgcctatcctggttattttatataaatgaaattatacaccatgtggtcttttgtggctgcttttttcacttacattgttttcaagacgtgtttgtgttgtagaatgtgtaagtacttcatttcttcttattgccaaataatattccattatatggatatgccacatttaatctgttcatttatcagttgatggacatttcaattgtttccaatttttagttattatggataatgctgctgtgagcatttgtgtacaaacttttctgtgacatatatttttatttccattggctgtatgcctaggagtgagattgttgggtca

SEQ ID NO: 268389 - DNA, 592 bp, Homo sapiens
agaatatttactcacatatacatgtgtacatgtttttaaaataatagctttataagataaaatttgcatacaatgtaactcaaccacttaaaaaatacaatccagtggtttttagtatatttagaattattcaaccatcaccacaatcaattttagagcatttcatcactccataaagaaaccctatatgcattgacagtcacctcccatttccccaccctcccaccccaacataggcaaccactaatctactttttgtccctatggatttgcctatcctggttattttatataaatgaaattatacaccatgtggtcttttgtggctgcttttttcacttacattgttttcaagacgtgtttgtgttgtagaatgtgtaagtacttcatttcttcttattgccaaataatattccattatatggatatgccacatttaatctgttcatttatcagttgatggacatttcaattgtttccaatttttagttattatggataatgctgctgtgagcatttgtgtacaaacttttctgtgacatatrtttttatttccattggctgtatgcctaggagtgagattgttgggtca

SEQ ID NO: 268390 - DNA, 576 bp, Homo sapiens
acaaaatttttacaacgaagtaaataatcctaattatatatttataaatgtctcaagttcttaagtttcattcagtgctaatgaatccaccatgtgactcatctcccaattacacttagaagtgtaacagattttgttcagaatgttcaattactagatgttcatttcagttttgatacctagtgaacatttcatcagggacctgaaaaatgtctttgaatgaggagaatgtatgtctctgtaatcagcatcawttgataacaataattagaaataactaatgttgataaaaacagcacaatgtcactttcctatgaaattgagtcattttagacttcttgacaatgaaaaaagtcagctttattttttctggaattttttaaaattgtggttgttctttttaataatgccaaactattcttttaaagtactttcataataatgaatatttaatgtgtataaatatgaaatgtgcaatattgtctattaattcagcaatggctccttttataggacttcattatctatggatgcatatgagtgtttatgtgttgcagtaacagtagtagtcacaga

SEQ ID NO: 268391 - DNA, 576 bp, Homo sapiens
acaaaatttttacaacgaagtaaataatcctaattatatatttataaatgtctcaagttcttaagtttcattcagtgctaatgaatccaccatgtgactcatctcccaattacacttagaagtgtaacagattttgttcagaatgttcaattactagatgttcatttcagttttgatacctagtgaacatttcatcagggacctgaaaaatgtctttgaatgaggagaatgtatgtctctgtaatcagcatcatttgataacaataattagaaataactaatgttgataaaaacagcacaatgtcactttcctatgaaattgagtcattttagacttcttgacaatgaaaaaagtcagctttattttttctggaattttttaaaattgtggttgttctttttaataatgccaaactattcttttaaagtactttcataataatgaatatttaatgtgtataaatatgaaatgtgcratattgtctattaattcagcaatggctccttttataggacttcattatctatggatgcatatgagtgtttatgtgttgcagtaacagtagtagtcacaga

SEQ ID NO: 268392 - DNA, 587 bp, Homo sapiens
gctgtcaaggtccattgatgtataccagcattagtggctaaaacctcaaagagaaattgagcatttaaatagcctcaatcatcttcttccacaattatattaataacttaataatttttatgcatgttcatgcagactttaatattcttctctgtaggaggtgaagcttactgcactcgccagttccctgagtgtaagttggatttacggataagcttctaagtasggaaagagaaaagcagtaattttatagtggagaaacatggcagtcatcagcttaatgaagtgatcaaggttaacacctctagtaattactcatgttgatatattacatgcacctgatatgatgagatgagcacacagagcatgtttgacactcttccccaaatccatgatctcacctcagtataatcatttaaaaagttagacaaatccaaatctagggacattctacaaaatacaaggtgacttccaaaagtttgtgaaaaaataaaattgaaagataaaaacgaaaattataaacttagtatctcaacatattctctatcaagctcaaggtactttttaaaacaatgatatcactcatt

SEQ ID NO: 268393 - DNA, 556 bp, Homo sapiens
tctacaattacttagtcttatttatatctaaaaataaattcaatatttattcccagttttttcatggattctgtatttctaaattatttttaatatttaccactttattaattctattgaaattgtctagctaatatttttgtttatttttattcgtttcccctgagacttgctaattgtttttgattcactgagttattgcatgtgtaaaaatgaatttttcagcttagaattaaaatcctgagatatcacttcctaatccttagaaatttccccgttattatgtctttcttctgaaactgtgtgttgttttagaatgtatcaaccattcrgtcattcaataagtattttactgattgcctactataggatctcaagttccttgttctaggaacaagaggaaaacaataaaccaaatacacaaaatcgtttcacttagaggtcacattctaaggaaggaaaacaaaaacagatgagtaaaaagaacatcaatttaggtcatacatgattagctcttggctcctgtcctctgcctcaccacaattctcaagctgga

SEQ ID NO: 268394 - DNA, 563 bp, Homo sapiens
tgtgctgtgtggccatgatttctacaattacttagtcttatttatatctaaaaataaattcaatatttattcccagttttttcatggattctgtatttctaaattatttttaatatttaccactttattaattctattgaaattgtctagctaatatttttgtttatttttattcgtttcccctgagacttgctaattgtttttgattcactgagttattgcatgtgtaaaaatgaatttttcagcttagaattaaaatcctgagatatcacttcctaatccttagaaatttccccgttattatgtctttcttctgaaactgtgtgttgttttagaatgtatcaaccattcaktcattcaataagtattttactgattgcctactataggatctcaagttccttgttctaggaacaagaggaaaacaataaaccaaatacacaaaatcgtttcacttagaggtcacattctaaggaaggaaaacaaaaacagatgagtaaaaagaacatcaatttaggtcatacatgattagctcttggctcctgtcctctgcctcaccacaa

SEQ ID NO: 268395 - DNA, 501 bp, Homo sapiens
ccttctttaatgaaaggtttaattatgatatcttcatgcatctaatgttttcctgcaaaaaaataaaagtataacaatgtgctatttttgaaaaaaaaaattgtcttggtgcacctgctacaaatctgaaggagaggtrtcttaaacaaaacaaacataaaactggcctatcaaaagaggtgagattaaaattaatggtctctctagatcacattttattaaaatttaagagaagattcttagttatttgtttacattccttgccacagcagattcataaccaagtactatctgccctacatttgaaatgtgctcgaaaccctcctcctctctccacttcccatgccgccacctcggtagaaccctcctcaattctcactgaactctcaatagcctgctgacttggctttttccactttgggtgcctcacattcctcataagagttagagtgactcgtttcatctgaagtaataccaaattactcttctacttaaaacgtt

SEQ ID NO: 268396 - DNA, 582 bp, Homo sapiens
gtaaacacacatatatataccacatacatatatagcaggaaaatttggatagatttaacaatattgagctatctcttccagaggcatgctgtatcttatttgttatatttactactagamatgttacaatattttgaattatgagtatgactggagtttcataaactttaataataatgtttatatgcaataataataattataaattattactataaaataatatataaaatttattattataaaataataaaaataattgctgtttatatgcaatataattattcttacatcatctcatttcacagaaatttgttgtttacccattagttctaagttttaaactgagtctttttttgtatccagccatattgactgtaaataattatattttgtattattcaagtctgacttttttttactaagtggactatatttattcttcccctgaaacagggtctctctctgttgcccagggtggaacacagtggggcaatcaaagctcgctgcaccctggaacttctgggctcaagcagttctcccacctcagccttctgagtaactgggactacagccaccatg

SEQ ID NO: 268397 - DNA, 548 bp, Homo sapiens
tttttgcaagtttcattgtggctaagtacattttgtacataaattaaatttatgcacatatcatttgacctggtaattcaacttacaggaatgtaatttttttmtgagaaaataatagatttgtatacaagtaaatttattatacattaattatacaagaaaaattggtagcaaccaaattgtcatactatccacgatttttggacagctatgaagagacatgcttttaaataaaagtcaagcatctaagaattcccaaggatctatctgagaaatagtcattgaaaagtatatgaagcaacatattctgtagataaataaaattatttacatacacacaaaaatgactgattcaaatacatctcaaggctaactataattgttttgcatagggttttgtatgttttgtgtctcaccttactgatttggttataagaaaacactttgggccaataaatatctaatgaactctatagagttgtcctcatgcaccaagccacaaaatccaaacaccaagtttactaattcaatcaataaaggtgtcatta

SEQ ID NO: 268398 - DNA, 542 bp, Homo sapiens
ggtacatacatctgtaacacataaaagctgttgagaagagtgagttttaatttctgaaatgaacttttgaaataagtttccaatggactgttagcaatctttaasgtttatttttgaaaagctgatcacactctatgctttcaatagttacatagcactaagggagtgccacatgctggttttggtgctttagatatattaacacttaatcatacagcaaatgtattagatgagagccattaatatccttagttttaaatgaggaaaatgaaacagggagaggttaaatacactgcatataaaagtatcaaagcctgggcttgaccccaggtaacccagcttcgagtgagtgcttaccacagtatcctactgtctgtcccactctctctttagcaagccagaatcattagatttccttgatagaactattgcagtgaaatgcagcttttaatggctagactggtatacactcttctgtttgggtacaaaatgagatgaagaagattatggttttgatttttattgaaccatgttgatagccc

SEQ ID NO: 268399 - DNA, 641 bp, Homo sapiens
atttttaaatctatggaggatatattcttataactaagatttcctgataagaagacaggcctcataacttctaggggaactagacattcctccttggacatcaaggatagaaagaggctgggcgcagtggcttatgcctgtaatcccagcactttaggaggctgaggtggggggattgcttgagctctgcagttcaggaccaggatgggcaacatggcaaaaccccatctctacaaaaaaatacaaaaagtagccaggcgtggtagtgcacacttgcagtcccaactacttgggaggctgaggcaggtgggctgattgagctcctgggaggtcaatgctgcagtcagcygtgatcttgctgctgtacccacactgggcaacagagcaagatcctgcctcacaaaaaaataaatacataaaaataaaaaataaaagaagaagaatagaaagatgcatggggagaaactctctgcttttcacttgttcatacttccttgaatagaaagtatgccttttaaagattaaaaaataaaaataaataatacttgaactgaacacctgtcttataggtagagggttcatgaacatcctgacatcaaatgccaggcaaaagagttattgttcctaagccaagttactga

SEQ ID NO: 268400 - DNA, 584 bp, Homo sapiens
tgataaataattaatagtgatatactttgataagttgtgtttcctgttttttaggtaagaagaaaatagatttaacttgtattttttaatcatacaaaagcactcttcagacactaattacatatatcttctttgaaaattaaatatagaagtagaatttataaggatttatttattctcatcatgagttaaaccttgctgtgtgtttgggagtccacttcttttgtttcattctttttcaaaatgtttatatttaataaaaaatattactttaacacaaaatatctgaaaattctaagatataaattttgatttccacggttacatcgtggtatcctccatcaattttggaataggctcaggaactgaacacatttctttaactgacttaactcctaataacatgtgttaatgatcatttgtcctgaaaattccccatagttagaatgacaaaatattttgtcactcaaaatatggcacatagttaaataatgttctgaaggactgatgatgaaattgaacatgyaaaataaagaccattctgaaaaatacagaactaatttttccctacttaggtacaaggg

SEQ ID NO: 268401 - DNA, 562 bp, Homo sapiens
gtatataataattatatatcacaataataactatataataataattgagagaatggttaaggatggcaaatatcttctttctcccaaaagygaaatgcagtccatgataaaataatgtgttaaccataaattatttacatatttctctgatcatttgaaaaattatatttgaatgcaaaatattaatgtactatatacaggacattttatttagtagagagcgtttaatgttttcatagctgacaaaaatatatataaagttatatgttggtgccaaattgtagctcctcataattttcatgtgttgcaacatggaaactaaatggacaaaaattctacattatctcaggcagttttaggtgattgattgtgtataagttgattttagaagatctagatgagtagaatacaagcagaaagcaattctcccttttaccactgccttccactaccacactattttcacctataggggtttcgagtatcctggtttgcctgggacttgtcaagttttagcagagggttttctgtcccagggaaatacccagatcctagcaaacag

SEQ ID NO: 268402 - DNA, 562 bp, Homo sapiens
gtatataataattatatatcacaataataactatataataataattgagagaatggttaaggatggcaaatatcttctttctcccaaaagcgaaatgcagtccatgataaaataatgtgttaaccataaattatttacatatttctctgatcatttgaaaaattatatttgaatgcaaaatattaatgtactatatacaggacattttatttagtagagagygtttaatgttttcatagctgacaaaaatatatataaagttatatgttggtgccaaattgtagctcctcataattttcatgtgttgcaacatggaaactaaatggacaaaaattctacattatctcaggcagttttaggtgattgattgtgtataagttgattttagaagatctagatgagtagaatacaagcagaaagcaattctcccttttaccactgccttccactaccacactattttcacctataggggtttcgagtatcctggtttgcctgggacttgtcaagttttagcagagggttttctgtcccagggaaatacccagatcctagcaaacag

SEQ ID NO: 268403 - DNA, 562 bp, Homo sapiens
gtatataataattatatatcacaataataactatataataataattgagagaatggttaaggatggcaaatatcttctttctcccaaaagcgaaatgcagtccatgataaaataatgtgttaaccataaattatttacatatttctctgatcatttgaaaaattatatttgaatgcaaaatattaatgtactatatacaggacattttatttagtagagagcgtttaatgttttcrtagctgacaaaaatatatataaagttatatgttggtgccaaattgtagctcctcataattttcatgtgttgcaacatggaaactaaatggacaaaaattctacattatctcaggcagttttaggtgattgattgtgtataagttgattttagaagatctagatgagtagaatacaagcagaaagcaattctcccttttaccactgccttccactaccacactattttcacctataggggtttcgagtatcctggtttgcctgggacttgtcaagttttagcagagggttttctgtcccagggaaatacccagatcctagcaaacag

SEQ ID NO: 268404 - DNA, 532 bp, Homo sapiens
tctctttgccaaagcatagtaagaatcacattttctccagttcccagcaagttcctcatctccatcagagaccacttcagcctggatttcattgtccatatcaccatcaacattttggtcagtcattcaacgagtctctargaagtcccaaactttcccacattttcttatcattctctgagccctccaaactgttccaacctctgactgtttcctagctccaaaatcatttccacattttcagatatctttacagcagcaccccactctctgaggtaccaatttactgtattagtccaggacccaactcaccatcaaccctagtgacccactagcaaatttttttctttctgttcacatgatgttatactggcctagacgtcttaattccagagggaagaatgctgccaccaggagacacaatggtgatttcattaaattggatgttaatattcccacctggcactttgggctcctcctacctctaagtcaacaggcaaagaagggagttacaatgttggctggggtaact

SEQ ID NO: 268405 - DNA, 596 bp, Homo sapiens
gggaaaacaccaaatatgactgatatacatgaaataagaatttcaaaaggtaagagagagaaagaatgagaatgaggggaaatatctgaggaaacaagggctgagaattttccaaaattaatgatagatacaaaaccacagatccaagtgtcttagagaataccaacaagaaaaacaaaatgcacacctaagcatgtcagattcaaatttctgaaaagcaagggcaaaaagaaaatcttgaagttaaatttaaaaataagattgtgaaaacaggaacaaatataaaaattgtggaactcttttcataataagtcatacaagccaggagataaaaaagtgatatctgtaaagtgccagaaaaccaaaaaaagctaccaacytaagttctattcccagcgaaagaatgttttataataaagaagaaataagatctccatgacaaagatatgttttgtcaggagacttcattgccagaggcccgcactacaaaaaatgttaaaagaacccttcagaaggaatacaaaaccagatggaaatttggattgacacaaacaaatgaagtgtgcaggaaatgggataaatgaaggaaattttaa

SEQ ID NO: 268406 - DNA, 572 bp, Homo sapiens
attacgaaaagtgaaagaagccatacaagactgcctgctgtaggattatgatattctagaaaaggcaaaactatgagactgtaaagaaatycatggtttccagaggaaaagtttggctacacagaggaggaattttgggggaaggatggacctattctctatcttgattgttgttgcttgactctataacactttcaaaagttgtagaattgtaccctaaaagagtgggttttactgtatataaattatttctgaaaaattggaagatatttaaatgttctacgaactttattaaaagtcaataaatcaaccatgtaaactaaaattaaccactataaatataacagacacatttgttcaggaaaattattatagcatatatgttgccctgcaaattatttcagaaatcagaatgaatttatgtttttaatatagctattctttccttaaaaatctctatatcgtgcaggtgggaaataatgataggctagaaacaaatgagtgatccctgggcatttcttttatgcctctgtaacaaaccaatgttcaattatatcactagttaatgaatt

SEQ ID NO: 268407 - DNA, 578 bp, Homo sapiens
ctggctggtacacagtaagtgctgcataattgttacactcacctgataagctgtgtgacttacccgagtttacatcatgtatagcaggttctcatgcagaakattaagtattctgagaagatgaatatgtttcataagtatttttgaaaagatgcatttcttctttgaatggtagttttcctcattactctttttatccctatggttttatatctgtgtgatggtatgctatatatatatatatatatacacacacacggttaaaatgtttataaattatatttatatatttatctaaatataaattatattatgcatacatttgtcaaataacatattattctgacaatagttaaaatggtaagggagattttatttagggctatcatattaggcgtcaagaccatcggacaatggtgagactccaaatacaacaaagacagctggagatgtgaagccttacagcagagttagtggacagaaaattactaagagaagacttcaagtgcagggaatcttgctaaaccgatttaaactgattctttttcctaaactttaatttcaggtttaagggtgca

SEQ ID NO: 268408 - DNA, 584 bp, Homo sapiens
tcagaaaaaaaaatctaaaaaagttatgtatatgggttttttgtttcactgctatggttggtatgaatgaagtgattcattcttactgcttctttgtacatttgtccttaggttgaattcataattttcatactcttaaacatgtcataaatattacctcatttgacaagtaaatcaaagcagaatagaaatgtatgtttatattttacttaattattgataattcagaagacatactaatttttattaaaccagtaataccaaagtcttatttatcaaagatttactcaaatcttgtgaactagaaaaacatttggtttagttactatatttctgagagtttcaggatttaatacatatgtgtgtgtgtttatttatctctaaacaaatttaaatagagcttcctacaggacttaatgaatttatttgctaatactatccagatgcaraaagatgtcacatatatgtatacataatatatgtatacacacacaaacatacagacagatgcatgtagatactctgtgcctttcattttaaaattctagctaggagtcaggtaaatataataatacaaaattcac

SEQ ID NO: 268409 - DNA, 518 bp, Homo sapiens
acgataattatgaaaattgtggccagataaaagtgttgcagttgtactggatttgggacttggaataaaaggcaaaaaaagaaggtagaaaaaacaacatatctattctctctgaaggtatcctaaagaataggaaaagctttctactttgggaagaatctcaaggatgtggtgacagcaaatgcagcagtcagcctcgctcccaaagggactggctgcttaactccacatcatcaaccacattggcactggagtgattgaatgctttgagacttgaccaaaaggaaatgaggctctggtattctttaaatatatttagggtacagtcacacaggtgccattgtagtgtttggttgtacaacaaattattctgtgtgtgcactgatgtgtagacaagatagaaataaaartaacatctaaaagcagagtaagaaggaaggctgggccgtgaggcccatctttaagttgactttgtttttttattttcttagtagtaactctcctaaggagggaaaatt

SEQ ID NO: 268410 - DNA, 518 bp, Homo sapiens
acgataattatgaaaattgtggccagataaaagtgttgcagttgtactggatttgggacttggaataaaaggcaaaaaaagaaggtagaaaaaacaacatatctattctctctgaaggtatcctaaagaataggaaaagctttctactttgggaagaatctcaaggatgtggtgacagcaaatgcagcagtcagcctcgctcccaaagggactggctgcttaactccacatcatcaaccacattggcactggagtgattgaatgctttgagacttgaccaaaaggaaatgaggctctggtattctttaaatatatttagggtacagtcacacaggtgccattgtagtgtttggttgtacaacaaattattctgtgtgtgcactgatgtgtagacaagatagaaataaaagtaacatctaaaagcagagtaagaaggaaggctgggcygtgaggcccatctttaagttgactttgtttttttattttcttagtagtaactctcctaaggagggaaaatt

SEQ ID NO: 268411 - DNA, 514 bp, Homo sapiens
cattgtagtgtttggttgtacaacaaattattctgtgtgtgcactgatgtgtagacaagatagaaataaaagtaacatctaaaagcagagtaagaaggaaggctgggccgtgaggcccatctttaagttgactttgtttttttattttcttagtagtaactctcctaaggagggaaaattatatattagaaaactcttatgtagtgcatcagtttttgttctacccacaagtaatgtgaatttgaagtagmcccagacataaatatcaccagggccagacccttggaaaacattccctaaattcctccattgtttgacttatctttcttgtcaccagctatgtcagtatgaagtgacatcattgatataaaatttttaaaagcactttactaaagttagaaaaatgcattaataaaaatttgttactttatgtttcaaattatttattgtattatccccttgcatctattataagaagcggaaaaaactttagcaaaggccagttgggtttagt

SEQ ID NO: 268412 - DNA, 620 bp, Homo sapiens
gtgtttagatatgacaagaaccaaattagatacaaaatggagggacatttctcctagaaattttctctaatccaccagtttttcttctgtgacaggctgaggtctgaaggaatagtattttatacttgggttataattacatgcttgccattcctcctggtctagccagattgaaaatatttctaaggaaaaatgtcttagtccatttttggttgcttacaacataggtaatttacaaggatttatttcttatagttatggaggctgtgaagtccaaggttgagggcctgcatctggtgagggccttagaactctgcagagggcatcacgtggcaaggaggctgagaatgctagctcaggttcatcttcttcttcttataaagccaccagtcctactcctttggtaactcgttaatccattaatccactaatcaacaaatggattagtccattcatgaggaaagagctctcatgattcaatcatctctaaaaggcycccctctctatactgccacattgggtattaaatttcaacacgagttttggagaggacaaacactcaagtcatggcaacagaatatgactgtttcataaattgtgtgttgcctaaaacacagaat

SEQ ID NO: 268413 - DNA, 588 bp, Homo sapiens
agggcaaacctaataattattggtattaaagtagagatagagagaaagataggggtagaaaatttattcaaagggataataacagagaacttcccaaacctagagaaagatatcaacattcaagtacaagagggttatagaacaccaagcagctttaaaccaaagaagactaccaaggcatttgctattcatattccaaaagtcaaggaaaagaaaggatcttaaagacagcaagagaaaagaaacaaataatattcaatggagctgcaatacatctggcagcagatttctcagtggaaaccatacaggccaggagagagtgtcatgacatacttaaaatgttgaaagaaaacaacttttattctacaatagtacatccagtaaaaatatccttcaaacacaagaagaaataaagaccktctcagacaaacaaaagctaagggctttcatcaacaacagactcatcctacaagaaatgctaaaagaaattcttcaatctgaaagaagaggacattcctgggcaagaaatcatctgaaggtaaaaaattcactggtaatagtgagtacacagaaaacacagaatattat

SEQ ID NO: 268414 - DNA, 561 bp, Homo sapiens
caaacaaaataaaataccaaggaagaaacttaaccaaagaaatggaagatctctacaatgaaagctataagacattgatgcaagaaattaaagaggacagcaaaaaagaaaaagatattgcatattcrtgaattgcaataatcaatattgttaaaatacccctactacccaaagcagtctacagattcaatgcaattcatgccaaaataccaatgacattcttcgtgaaaataggggaaaaatcctaaaaatttatatggaaccacaaaagacccataatagacaaagtcatcctgagcaaaaagtataaaactggagaaattacattacctgacttcaaattatactacagagctattgtaaccaaaacaacacggtagtggtataaaaaaggtacaaagaccaatagaacagaatagagaagccagaaataccacacacctgcagtgaactcatttttgacaaagataccaagaacatacactggtaaaaatacagtctctgcattaaatggtgctggggaaactggataaccgtatgcagaagagtgaaactagaccc

SEQ ID NO: 268415 - DNA, 655 bp, Homo sapiens
acaaacatatacgaactaatcgattaaacaggcaaataaatgaatttaatttaactaatagaatatgacctcagtctagaaaaatatttaagcagcatacaaaacacactcatcrtagagaaaaaatttacaaacaaaatggcattaaatgtaacatctctaaatgtaaaccaaaattcgacattaaagaggggaaaagatgttattcgcaacacatgtaatcacaaagacttattttgagaatatacagataacttcgtgtaaacaagaaagagagaaaactcatgagaacataagctaaagctccaaacaggtgtaagttaacatatacaagacacaaagtgggatattctaatgatttaaatggtcagtatacataaagaaatgtgcttcaccttatcagtaaccaaggaaatacaaattaaacagtaataaaatttattataacatccataagaatggctagaatttaaagaaccaggggatggcacacaaggagaaatcataaaattctcatatattgatagtagatatataaattgttataatcattgcagaagataggaactcttgattaattttaagatgcatatgtcatatgactaagcaatttattcctcaaggtatacaattaaaaatattctgacacacgtta

SEQ ID NO: 268416 - DNA, 655 bp, Homo sapiens
acaaacatatacgaactaatcgattaaacaggcaaataaatgaatttaatttaactaatagaatatgacctcagtctagaaaaatatttaagcagcatacaaaacacactcatcatagagaaaaaatttacaaacaaaatggcattaaatgtaacatctctaaatgtaaaccaaaattcgacattaaagaggggaaaagatgttattcgcaacacatgtaatcacaaagacttattttgagaatatacagataacttcgtgtaaacaagaaagagagaaaactcatgagaacataagctaaagctccaaacaggtgtaagttaacatatacaagacacaaagtgggatattctaatgatttaaatggtcagtatacataaagaaatgtgcttcaccttatcagtaaccaagraaatacaaattaaacagtaataaaatttattataacatccataagaatggctagaatttaaagaaccaggggatggcacacaaggagaaatcataaaattctcatatattgatagtagatatataaattgttataatcattgcagaagataggaactcttgattaattttaagatgcatatgtcatatgactaagcaatttattcctcaaggtatacaattaaaaatattctgacacacgtta

SEQ ID NO: 268417 - DNA, 564 bp, Homo sapiens
cacatggtcagcatagatcctctctaggaggattttaaaagttgtttacatcctacattcattagggaagacctgggtgttcacctctgtatgactctgctcctttaggaaaccttccgtgacatatttcatgagagctattcatttctgccagcactctgtgctggaaaarcccatccagcctgcctgtttttcttatgcttggactcttgtgcttacttttttaaaaaacatatttttattttaagttccagtgtacatgtgcaggatgtgcaggtttgttacgtaggtaaacatgtgccgtggtggcttgttgtacctatcaacccatcacctcactattaagtcgagcatgcattagctattttttcctaatgctctctccccgcaccccacctctgaaaaggcagtagtatgtattcttccccctccctgtgtccatgtgttctcatttttcagttcccacttactagtgagaacatgtggtgtttggttttctgttcctgcattagtttgctgaggataatggcttctagctccacccatgtgctttcaaaggacgtg

SEQ ID NO: 268418 - DNA, 590 bp, Homo sapiens
catgaattatggactttaaccctgtcctcttttcattgctccacggtttcccccattctatgaccaggattaggaaatttcctacggttagattgygtatcaaccaaatgatgagttagctcttttgctgaaattatctaaacataaggatttgtctgagctttccaatcactaaaattatattttctacttatttatttaaagtaaggttttgttgagtaacctaaccaaaaatatgcacacatttgtaatatatatgtacacgtataatctgttttcatatctatctatctatctatctatctatctatctatctatctatcacaaattgttagtctatgtagtaacctttgtctgttgggatatttactatttttcctgagctatatttcttattttctgtttatgcccacaaaaagaagtttatcgctccttccctcattgacatgttggacaaagcccctgaaggaccggggcagattcccactccacacgtgcacttgtcgttgtatttcccaaagtcctctttggagttgctgagccctgagatccagctcagtgttttgtttgtgaacacgtaaatcagagt

SEQ ID NO: 268419 - DNA, 590 bp, Homo sapiens
catgaattatggactttaaccctgtcctcttttcattgctccacggtttcccccattctatgaccaggattaggaaatttcctacggttagattgcgtatcaaccaaatgatgagttagctcttttgctgaaattatctaaacataaggatttgtctgagctttccaatcactaaaattatattttctacttatttatttaaagtaaggttttgttgagtaacctaaccaaaaatatgcacrcatttgtaatatatatgtacacgtataatctgttttcatatctatctatctatctatctatctatctatctatctatctatcacaaattgttagtctatgtagtaacctttgtctgttgggatatttactatttttcctgagctatatttcttattttctgtttatgcccacaaaaagaagtttatcgctccttccctcattgacatgttggacaaagcccctgaaggaccggggcagattcccactccacacgtgcacttgtcgttgtatttcccaaagtcctctttggagttgctgagccctgagatccagctcagtgttttgtttgtgaacacgtaaatcagagt

SEQ ID NO: 268420 - DNA, 569 bp, Homo sapiens
aggtatctagcagggcagttgagaggctgttctactggagaagaagctgtcttgcwaatgcagcttctggcatcttgggaaagtatagcatctcctcagcagttctgactcatccaccaagcctcctgtttttctccttctgtcacccataaaaatctgtgaggggtgtgtgtgtgtgtgtgtgtgtgtgtgtgtgtgtgtgtagttggggccatgaaaaaagtgacttggcctccaatatgaactgtccctccctctcagccaacctaagtggcacttctaagtgcaggggaatatgtatgtggtttctgagagggaggatgaaaaaattacttgcttatcattaagggataggaagccaaatgaatcatctcctggagctgctttctgctctcagaaggatagttccgggtttctaggacagaagtcttgctttaggcaggaaaccttgtaagttctcccatttctactggccttcctgacaacttgtgtatcttcctaaattgaatatgactatatatataaaatttttatttcacttttctgtgcctctgtccttactttagcca

SEQ ID NO: 268421 - DNA, 528 bp, Homo sapiens
catggggctgagtctttcctgtgctgttctcatgatagtgaatayatctcatgaaatctgatggttttaaaaaggaaagattccctgcacaagctcatttttcttctctgctgccatgtgagatgtgcctttcactttctgccataaatgtgaggcctccttagccaaatggaattgtaagtcccttaaacctctttattgtgtaaattgcccaatctcaggtttgttttatcagccgtgtgaaaacatactaatacaaggattaagtttacacacagtctaacaatgacatctttgtcatgattgctgcctggtcaccagtattatgaaatgccataaatactgaaattcatccttattgtagagatgttaaagtgtgtactaatatgtatcttttaagttattgaaatattgaaatatgctgtttaaggctagtctattagatatgttcaagtatataaatgtatattcctggtggttttaaaattttattgtaagaattgatccctttgtctctatcttgagctt

SEQ ID NO: 268422 - DNA, 528 bp, Homo sapiens
catggggctgagtctttcctgtgctgttctcatgatagtgaatacatctcatgaaatctgatggttttaaaaaggaaagattccctgcacaagctcatttttcttctctgctgccatgtgagatgtgcctttcactttctgccataaatgtgaggcctccttagccaaatggaattgtaagtcccttaaacctctttattgtgtaaattgcccaatctcaggtttgttttatcagccgtgtgaaaacatactaatacaaggattaagtttacacacagtctaacaatgacatctttgtcatgattgctgcctggtcaccagtattatgaaatgccataaatactgaaattcatccttattgtagagatgttaaagtgtgtactaatatgtatcttttaagttattgaaatattgaaatatgctgtttaaggctagtctattagatatgttcaagtatataaatgtatattcctggtggttttaaaattttatygtaagaattgatccctttgtctctatcttgagctt

SEQ ID NO: 268423 - DNA, 569 bp, Homo sapiens
ggtttcaagccattataattctaaaccccattgaagataaaattcccccatcactggcgactgggagattcttaaagtaggttgctgagtccttttgacttgattctggtaataattattagctttcttcctttccaatgtgataagaaattccacgctaattttgcatatttcytacctcagacctgaaattgctatttccacaggaaagcttcatttcttttagtgagaaatgttcatctcaagatcacaatttaggcttagcaatttcattgctgctacgttgtatattgtttctagggctttccagtgggcagaactagaaaatatacactacacatttttaatgataaattaccatataaattcacactgacttttctaattcaaattcaaatctatcatattttaaacataatcttatgttacattttgtctctttcttccataagaacccccattctcatgaatacaaggaatgaaagaattagaatatcttctaatcactcatttgctttaacccacagtacacacacatcagtttcaggatcacaatacttacactacca

SEQ ID NO: 268424 - DNA, 541 bp, Homo sapiens
tttaaacacatttgatgggtttcaagccattataattctaaaccccattgaagataaaattcccccatcactggcgactgggagattcttaaagtaggttgctgagtccttttgacttgattctggtaataattattagctttcttcctttccaatgtgataagaaattccacgctaattttgcatatttcttacctcagacctgaaattgctatttccacaggaaagcttcatttcttttagtgagaaatgttcatctcaagatcacaatttaggcttagcaatttcattgctgctacgttgtatattgwttctagggctttccagtgggcagaactagaaaatatacactacacatttttaatgataaattaccatataaattcacactgacttttctaattcaaattcaaatctatcatattttaaacataatcttatgttacattttgtctctttcttccataagaacccccattctcatgaatacaaggaatgaaagaattagaatatcttctaatcactcatttgctttaaccca

SEQ ID NO: 268425 - DNA, 563 bp, Homo sapiens
agctcctttcccacgcaatttaataagagaataccgtgatttcacctcaccactaactttctcaatcccgtctctttctgtagtcggccattgctttcacatacatctaaatcccatttaggtctaagtcattccacagccttcttatttcatgccaccttaaaggcacaaagacaaatagcaagagacctgcaatttactacataacaattgtcctttctttcattatgtgttcccacctgttttctttcattatgtgttcccacctgttttctttcactcaactctattaggtgaatgccacgcctcaaaaccatgcccctcctataaaaccactactgttttttgcagatacttaaacatctttttctcagaggaatgattttgtaatccttttgagaggggkgtgtgtgtatatgtgtgtatatgtgtgtgtgtagtgtgtgtgaatttcatgtgtgtgcatgtgtagtatatttattttatgccacatacaaaacacataaatagatacataaatgctacgaagtgttttgatgatatttaattgataatatttagtg

SEQ ID NO: 268426 - DNA, 644 bp, Homo sapiens
tagttaaattgtataggacacagaagaaatatatcattcttcttaagaatagtgtatattacaaagtatttcacacatgttttgctgagattctaaattttaatgacattttgataagaaaatacattattatgctaaaaaaattatgtagacttggtaccatggcttgtcaaaaattatctgaaaataccccatgtgttacatttcattttgtaaagaaatgtatcattcagatgagtttgtgaaaaggacaacctaaattacttacttgatttgacattttggtggctattacccaatcctccttattttaatatggaaaaaaagctcaacacttacaaagacattttgtgctacttttgaaactgagctcaaataaaaatatctgcataggtttcagatwtattgaattagaagaaagcaagtccacctaaaacaaatttgcttaatgccagttaattaatgatcaatttgcctaatgatctgttcgctcaaaagttctattaatcatatttacatctcatacatagaagaaaggttttttccttttgtaactgttaacgtatctttcaatttttgaacctttcatatattttaggccactttatactaactaactcattaactttattttctacaatttc

SEQ ID NO: 268427 - DNA, 604 bp, Homo sapiens
caaaaatcagctgacagtagggaaaggaaatgttttggattaatattaataaagacatgagaaatttaaagtaaccgtctcagagagggtgagcaaatgatctatgaaaacacaacagtattttaggatgaggctgaaagcacacttgaagttgtgatgaatttaaagtcagaaaagcattacatatgcatccaggttgaaaggcagggaaggcagaaagttgtatagaactagggctgggggttatgacacaytaaattcttcagaaagaaaggtatggagactgataatttgttcaaggctctaattttaattttgaactctaagtcaggtaaaaatggattttactatttgtagtacatagtagaccacaggaagtgtaaggttcagtatatgagagtgcccagtggggttgaaaattgtgggactatgagttctagaacattgggctaagaagatagtagaaactagtaagagaaatagtttgaaatttatatttttgaggtggcacaatcattgataatattcaatatggttgtgaccccaggggtgtggcagagaaggcatagaggaaatgttctttggagaggacagaacaaggcca

SEQ ID NO: 268428 - DNA, 514 bp, Homo sapiens
ttgtgatgaatttaaagtcagaaaagcattacatatgcatccaggttgaaaggcagggaaggcagaaagttgtatagaactagggctgggggttatgacacattaaattcttcagaaagaaaggtatggagactgataatttgttcaaggctctaattttaattttgaactctaagtcaggtaaaaatggattttactatttgtagtacatagtagaccacaggaagtgtaaggttcagtatatgagagtgcccartggggttgaaaattgtgggactatgagttctagaacattgggctaagaagatagtagaaactagtaagagaaatagtttgaaatttatatttttgaggtggcacaatcattgataatattcaatatggttgtgaccccaggggtgtggcagagaaggcatagaggaaatgttctttggagaggacagaacaaggccaaataactgaggcactaaattgagtcaggttctgagacagtgtgaaggatgacttagatcca

SEQ ID NO: 268429 - DNA, 617 bp, Homo sapiens
tgcttttagtgaaatgacaggtaagacatctttcttcaattagttctatttcttggaatcattcagaacagtgtactggcgaagcaggtccaacaatgtacagcatggcagtgccacttacttgatacagtccaatatgctgctttgtcttaggrtagatataaggttgcatgatatgcatattatatgaagtaatatggaagaaaaatgctgctgatttttaaaattatgcactaaaaaatggaaggggttgtttcagctttacactagaatgtagaaagctacaaagagcttggtttccattctaactagaaaagtctgtataatatacaaaatcataactcattttgaacctatcacagagatgctcataggactacttgctagcctgaaatctaaacaaagaaacataaacagatgcctcttaggagataaaagacacaagcaccagtaatttgtagcagcattgaaagatgggaagatggtgtctcaatatgagcaggcaagaagaatttaggtaaaacgtcaatgaattgctgaagaataagtgcaggcctgggtgacagtatagagctttgggaggcacagaccacttgggaggaattcacacccagtta

SEQ ID NO: 268430 - DNA, 594 bp, Homo sapiens
aaataataaagaacaaaaagctgaaataataccaaggtaatcaaagataaataatcactatgtgtgtgtatgaatataataatgaatactgattacttttacttctccttcataaatattagaaagtgagagcagtgagttaatttatagctcaaaattttgaattatatcatgraaaaatagccttcagaagtgttttacccttttccttcaagttgtttgtattttttgatgagcatgtacattttggataataaaatagaaattataaaactgattaagtacagagattattatcaccattaagaagaaatgagtggagttctaaaatttaatgagttactctgctaatgtgatttttatagtcatttttacaatttcagattagtttagtactgatgcacatcaaaatatgttgtaaatgaacaaggttaagtaatcaacatgcatgacttcaaattctttaatgtcattcaagtaaactgaagtaacttaataaaattcatcaaagggcttaatcagagtatacttttaataaacgacagacacaattcactttaagaaaacttcatgacctcccatataaatttaatt

SEQ ID NO: 268431 - DNA, 594 bp, Homo sapiens
aaataataaagaacaaaaagctgaaataataccaaggtaatcaaagataaataatcactatgtgtgtgtatgaatataataatgaatactgattacttttacttctccttcataaatattagaaagtgagagcagtgagttaatttatagctcaaaattttgaattatatcatggaaaaatagccttcagaagtgttttacccttttccttcaagttgtttgtattttttgatgagcatgtacattttggataataaaatagaaattataaaactgattaagtacagagattattatcaccattaagaagaaatgagtggagttctaaaatttaatgagttactctgctaatgtgatttttatagtcatttttacaatttcagattagtttagtactgatgcacatcaaaatatgttgtaaatgaacaaggttaagtaatcaacatgcatgacttcaaattctttaatgtcattcaagtaaactgaagtaacttaataaarttcatcaaagggcttaatcagagtatacttttaataaacgacagacacaattcactttaagaaaacttcatgacctcccatataaatttaatt

SEQ ID NO: 268432 - DNA, 540 bp, Homo sapiens
gtaagggagaatatcagaatcattgaacaattttttgtggtagctattgtccatgggcttaagaggatagaaagagatcctgtaatataaatgggttttctgattcgattgagaacaaaggatgtgaaattataaaaatcaggtacaaagggcgaggtggaagcatctggaactactcttattccagcaaggcaatcaagctaaagcaatatctagtttctggaggaattgcagagaaaaagtttcaccattaaagatgcaaaaggtaaatggatgttgattctttttaaacccccatttagtgtgcctgttggccaaatgtgaagagcaaatgagtcatgtatagtgaccatacatttttaaatcttaattattaggttggcaattgtaggtttatttcccaaacagataagacctggtatcactttcaccctctctgctttttgtccccacttacaagtagaaacaacratagaaagccaaatacactccccaaaccaatcacataagatacccgttttctaattattccatttcagc

SEQ ID NO: 268433 - DNA, 340 bp, Homo sapiens
gtaggcctctgtaagtgggagtggttgtcagtattaaaagtgtgtttctgatcaagtataaataataatcatgcattcattttatgaagtatgaacgccaccaactaaatgaacaaatgacaattgttgaaaaaaaccatgtaattattttgagtaaaaaaaaatagttttggatttataaatatagtactgaggatatttattgagacatgttttcaatatgcatagrgggttaaatgaaagatccaaggaataagccttcaaggaatgtatgcaccatttgaaataaaatctggagagataacagtaactgtccattttttcctgctcaactgcccta

SEQ ID NO: 268434 - DNA, 623 bp, Homo sapiens
gagggataccctcatcttccatgcatcagatagacaattcttggcaacatcctttatgttccttaacacagtctggtggaactgagcccctgttgccaaatgcagtaatctcaacagtgcctcccttatactgacttttctttcttcaatatcttatctgttttccccagtttctcatctccatttcttagaaaattcaacatcatctaaatctatgtctttagctttgatttttgagaatctacattaaaacactaggtactggaagtggccctaggaagcagaacctcaggatggtattattgaaggatcacttctgtaccccaaaagtaagaaagactccattgttagttctaagtgtagtaacaataatccccagcaggttacatcatcacactaattaaaacaataayctgaaatgacctgatgtgaaatacaagttaaagcaaaagcactggccttctcagtagtcctagaaattattttaataattaaaattgtaaagattatgaagatagctggctttttgttaaataacttggaagtcttaaagtaaggaaagtatagactcaggtcatccaactattaaatcagagaatgctgtaaatgtcacaaaaactcca

SEQ ID NO: 268435 - DNA, 574 bp, Homo sapiens
aacaaaattattgttgattcaaagaaacatcaaaatacattactgtcaaaattagaagctagtaaatgttctttcattaactagatcaatgtgttttaattgtgaaatattaactcaccctcccataattgcctttaattttacaaagatagtttaacaagtactttcttccataaaatacattacagaaattaatagttattatccctatatagtatataaacagaaataatactctttatctttgcttattaattcacgttagataagtaaaaatagatatttgccaacttttcactttcaatattaaacayaatttgaatatttctctcaatagcttgtttccttaaagatcattagaatagattatatggttaacatgtggatttaattactttcaagtctcttatgttttaaaaagatttatatacaactacatttttgtcattcttttacttttaaaaactttaatatattctggaataaaaaaactgatatttgaagaatttaagaatctcaatattttctcaggtattttaattgtaagtatcagaccaaactagtccagtataaa

SEQ ID NO: 268436 - DNA, 510 bp, Homo sapiens
ccctgttgattgattgtgttgctctgatcttctgtctctttgccattttttccatttagtgcatctatcagttgccgagagaggggtattaaagccctcaattataattgtgggtttttctatttctcctttcagcactgtaaagttttgcttcatgtattttcagaccgtgttgtttaatgaatccacacttaagattgttatgtctttctgatggattgatcctttcttcattatgaatttctctgttaatagtaattttcttgactctaatgtctacttctccagacataaatataactaattcttctatttattggttaatcttttcatggtatatatttttcatacttttacttaacatctttatgttattgagtacaaagtgagtttgttgcaaatagcatatagctgggtcacatgttttttttttttttactaawtctgtcagactgtcgttgattgatgtatttacattaaaggtaattattgatattatagtacttaagt

SEQ ID NO: 268437 - DNA, 425 bp, Homo sapiens
gggcagctgcagctacactccagaagggcaggrctcctgcccaatcccagctcccaagagcacagggatgcccaggtccacagccacagctggatggccgcagctgctcccagggagcacaaggttcctgccctgccagggcttctgccttttcccggctcctgctggctctttggagtgtgcagccctggccatgcctcaccccctgaagccagcatcatggcagcagccgctccagacaggcctccactaccatcagtagtatgtgccttgtaagacttttatgaggatctaattcaattatgcttgtaagatagatgactagaatgaaggaagggagtgtggcaaggagctggctatttgttgggtgatattgttgaccttatgcacagcaaaaactagtcatctacctcattctatttgca

SEQ ID NO: 268438 - DNA, 614 bp, Homo sapiens
aggatgaccttagctatgttatttatggactagaatggatgatatggcctttctttcaatatgcaactttactgagctggaaatcaaaaggagcaaagacggtgggaaggaattgtttgttttgtgtgttatgatgatagaacagcatgaggatcccaactgctaaaacagctgcatcataaataacccatgtagaacagatacaatgtgggtgtgtgtgtgtgtggtgaggggaagggcttcagtggggctgcagaatgagttcgtgaatgaaatggttagtcacacaagacttataaatactgaagagtaactaagattgctggcatgtgtttttattaaagttctgagttggaaagttagattcaagacttaatggtgatggaatggccattctttattaatttggcattttagtaaacctgcatttcattttatacagttctctaattcagaaacctgagcgagaaatcttctctttctcttgcatcctgcctctctcccccakttcagtcagtcatcaggcctatcagttctacttcctagatagttcttaagtttagccccacctcttaatccccatggccagttcccatggtttaggttatgtaata

SEQ ID NO: 268439 - DNA, 497 bp, Homo sapiens
gtgggtgtgtgggtgaagatgactggaactttaatctcttcctgaggtctgtttttgaatttgccaaagatagaggacaaagctttgagagtgagaacagtggtggagagaaagagcgtctttttaaagaggtgttgagatgatggggtcagatggcttcaggaaggccaaggatttgttgctaaaggtaggggcagtgtcatcgggaccacttgtgggtggatgagragtgagctagccagcccagggataaaagcaacatgaattaatgaggcttctgagaatcctcagcaattggactgacccctgctgcctggcttcccagggtgggttccaagcacagtgtggcctcacattctaagtagctgacagcaggaggtgctgatatggagtagtggaggaagggtttgccagaagagaagcttgggaaagtctcaatccccaggctttggaataagtagaagaaagccttgctaccctaaatagtgacagctgga

SEQ ID NO: 268440 - DNA, 497 bp, Homo sapiens
gtgggtgtgtgggtgaagatgactggaactttaatctcttcctgaggtctgtttttgaatttgccaaagatagaggacaaagctttgagagtgagaacagtggtggagagaaagagcgtctttttaaagaggtgttgagatgatggggtcagatggcttcaggaaggccaaggatttgttgctaaaggtaggggcagtgtcatcgggaccacttgtgggtggatgaggagtgagctagccagcccagggataaaagcaacatgaattaatgaggcttctgagaatcctcagcaattggactgacccctgctgcctrgcttcccagggtgggttccaagcacagtgtggcctcacattctaagtagctgacagcaggaggtgctgatatggagtagtggaggaagggtttgccagaagagaagcttgggaaagtctcaatccccaggctttggaataagtagaagaaagccttgctaccctaaatagtgacagctgga

SEQ ID NO: 268441 - DNA, 655 bp, Homo sapiens
aagtctcaatccccaggctttggaataagtagaagaaagccttgctaccctaaatagtgacagctggaaatcacgagggagcattctgtttgggagtcatgacccttcccgtcacatttctgcattctggcaggctgttggagagatstgtgtgacagcctcacctttcagcacgcctcagtcacaccagggagacagcaggagtgaggaggaaggagagagaagagagcttgcgcctgcttcctaaacagttccttctctctgggtcaggaccaggttacagaggtcaccagtcatgtggtaacatcctgatgataaggtggaaagtctctcctctactcccttgaggtggcatttgcatgggccattaaagaagggatgttgatctctcctgggccatcgtccacacacgtatctcagccccctgccaaccccctcagcaaaggcacccgggttagaatctagacattcacagtggggaactcttgatttttaattatgcaggaaaccactttatctttttaaaatgataaatgacttaggagaagcagacacaatcatgccttttcaggattgtttaggagatttggaggtagaaatatgatggattggatttgaattcacttagcgctgactaagataaattgtcactaaa

SEQ ID NO: 268442 - DNA, 552 bp, Homo sapiens
ggctttgggactgtcaggtccagatgactccctttttaaggctcttgtgaaatcactccacccagaggatgcacaaaaagtaagcattaggtatctaaaagcttccgttaggaactcttaggaggaaatggtatttaacaagctttcttcagactaaacattgccaattccactactgggagtgatgacaaatggctctcaccccagctttgacgctagtgacctgtgcgatattgggcaagaccatctacctttccattacatcatatgggcctaaacaacttcttctgggcttaaagtgtctgttgttctaatctgagagttaagaagatgggggcagatgccaataggcaacaaayatgacctcccaaccataaattattctaggggtgcaggtagccctgcatccaaacctgttccccaagcacacatcctatttccctcatcaaacttctatagctcaaattctcaaattcagacacttctcaattaaaggccacattaaaatgcaaataatatgtgggaccgtaatcacactttagcctcagcaac

SEQ ID NO: 268443 - DNA, 552 bp, Homo sapiens
ggctttgggactgtcaggtccagatgactccctttttaaggctcttgtgaaatcactccacccagaggatgcacaaaaagtaagcattaggtatctaaaagcttccgttaggaactcttaggaggaaatggtatttaacaagctttcttcagactaaacattgccaattccactactgggagtgatgacaaatggctctcaccccagctttgacgctagtgacctgtgcgatattgggcaagaccatctacctttccattacatcatatgggcctaaacaacttcttctgggcttaaagtgtctgttgttctaatctgagagttaagaagatgggggcagatgccaataggcaacaaacatgacctcccaaccataaattattctaggggtgcaggtagccctgcatccaaacctgttccccaagcacacatcctatttccctcatcaaacttctatagctcaaattctcaaattcagacacytctcaattaaaggccacattaaaatgcaaataatatgtgggaccgtaatcacactttagcctcagcaac

SEQ ID NO: 268444 - DNA, 547 bp, Homo sapiens
gagcaaggggaattcctagggattgtctaggatacacttctggttcaatacagaaaaataggacgatatccctttacacattttttacttgtgttcccaataagagatattttcctagaaaagcttatcaggcattttamccaggctaagtagaaccaaaagttctattctattaatgttaacataaagttaagtttagagctcttaataattgatgcatctttttaagtgactgttggctttgatttaagaaagaagcagacacattttcacacttcactgatatcaccatttccacaagagacatctgcacactcctccctgactccgtgtcatatggtcaccattaaaggtcaccacaattggaaatctattcctaagaactaagaaggttatttaatcatctaggagaggagagctgtcagggctgagaataccaccatgaggaatttgggtcccctacaatcaagtgggtagtatgttattttcaagttcaaattttcttccatttatttctgttattttttaaaccgcaaatatattaata

SEQ ID NO: 268445 - DNA, 577 bp, Homo sapiens
gctttaaattatcattccttccctttgtctacacccaacctgggcaaaccctccaaattataatgatccagaaagaggascattattgtttttatctttgccacatgaatattgtgggtgaagcaaacagagaaaggccatgccaaaggccatcaccagggagattacagagtaattttgttcaaaattcccttcccccaccaaatatttctatactggggaaatctatttctacactggaaaaatttgagggccacaagcctcaaaacaggccctgatggtaggaccactgtagaaacagtgggcacaatagccaacaggtagaaacttcccagggaggaggtgtcacaaaagacattgaagctgctggcttgtaggtaccaaggtgtttacacacagaatgctaacttcagagccagctgctagctgctagctcctcctctccccagctgctctgcacagcacagagcctaaacaaactcaatttggcatacccaaagaaagcctctgaagtgggaaaaaaatctcccccttttcctgacgacagcagacatcatctcccaagtgagtagcccaa

SEQ ID NO: 268446 - DNA, 577 bp, Homo sapiens
tgaacagaataacatcctccacccaccttaaacaagaattgtaaatgaaacagagaatcactgtgataaacagaatgtaacatctataaaggggggcccatcaactcaataccaaagaaaaactgagttatgggaagagagagacacgacactggagactccagagctagtcctttctgccaccaactagctgtgtccatgtcagcattgtcccttaactgctctgtgcagcagttttcccttagaaatgaaggggttggcctttcttgtctgcttggcttttcaagcagcctgactctcccacactgtaagcacatacatccctactgttgggtgcgatgatccagggctctcctttatttcttccagctcctgcttggttcctttctcttagagccatctccagaccccctgctgccmgcattggtgattgactttgctgttttgtctcttggctttccaaaaaggatgatgagattggcttatcctcaaataaccactctctagcttggatcttggtctgctagactaacatcccagctgtgcccacaccagtcacttgaaagttggggaagga

SEQ ID NO: 268447 - DNA, 595 bp, Homo sapiens
tggggaaggaagattcagacaatcatttctgtgttttctttcagttccagaatcctaagattccatcaacataacaaaagcctgaacaaataaagttttctttggtcaaaataaaccactgctgtgtttaatcaccatgaagaatggcaggtccatcttcagcaagaagtcaagggattttccgccttaagtgcagaaggaaatctgtcttattttagaagcacawctctttctttgttactgtttttcttggttcaaacgagacagtgttactatctataaactgcatagatattcggtttcaagtacttctgtagtggaaggaaactcatgcagaatggaaaaataacctggaaggatctcaatgccagactcaaagctgtcattgccacatgtttcttggattggggccacacttatcaagcttcccttcttgtaaatgtttattgaaacagagcttttgacaggagtcaatctgactaatatcattttcctgttaaattccaaattgcttttgttgctgagagctcttaataacaaaaatgaggaagttgcatctgtagcaaaaggcagacctctagggctggatttcacc

SEQ ID NO: 268448 - DNA, 523 bp, Homo sapiens
cggtcttaatcatcaagctgttagccaayctcagttatattttacaggtaaaagcagacatttaatagatttctcttctcaaaaggcaaatgctctagtgtagccaaagatcatctacaatttttaaaaagcttaaagacatttacatattagcttttatgggcttaaactccaaagtctagagagttatgtaaataacaatactcagaaaaagaaatttatctatttaatttgggctcatgcaaagcttggatacaaatagtgcctggaagagaaataaacatgattcctaagagttttctcatgtggctaatccctccaggcagtgaaggactggattctcgacagatgctttcaccaactttttctcttggagcatccaaataggtgtaactattaataagcatctgaatgagtagtctgcctgctaaccccagaggactatggacaaaagctagagtggaaagatgatgaagcaacttaaaaactctcaaggaacattatttgatgcacttgattcata

SEQ ID NO: 268449 - DNA, 502 bp, Homo sapiens
tattttatctcactgtcttctcctatttctttcttctcaggcctcttgaaccttctagttgtttttttcccagcatatataaaactttctccatcttcctacacaagtgagcaggagcatttccatgattcttaattaaatccagtagtttttggaaatcctgctaaggaggcgttayatctccatttgctggctcttcattcctattacaggcctcctcctctccccactgtgagcctgggagggagtgcacatgggcgtcttcaaggtttctaagtaggctgctcagcagtgggctcctctggcagatccccagcaacccagagccctgaagttttgcccatatgcatgacagattttatttgatttgtttatatattttttgagacagagtctcactctgtggcccaggctgcagtgcagtggcatgatctggactcactggaacctctgcctcctgagttcaagcgattcttccacctcagcacccctgagtagctgg

SEQ ID NO: 268450 - DNA, 502 bp, Homo sapiens
tattttatctcactgtcttctcctatttctttcttctcaggcctcttgaaccttctagttgtttttttcccagcatatataaaactttctccatcttcctacacaagtgagcaggagcatttccatgattcttaattaaatccagtagtttttggaaatcctgctaaggaggcgttacrtctccatttgctggctcttcattcctattacaggcctcctcctctccccactgtgagcctgggagggagtgcacatgggcgtcttcaaggtttctaagtaggctgctcagcagtgggctcctctggcagatccccagcaacccagagccctgaagttttgcccatatgcatgacagattttatttgatttgtttatatattttttgagacagagtctcactctgtggcccaggctgcagtgcagtggcatgatctggactcactggaacctctgcctcctgagttcaagcgattcttccacctcagcacccctgagtagctgg

SEQ ID NO: 268451 - DNA, 502 bp, Homo sapiens
tattttatctcactgtcttctcctatttctttcttctcaggcctcttgaaccttctagttgtttttttcccagcatatataaaactttctccatcttcctacacaagtgagcaggagcatttccatgattcttaattaaatccagtagtttttggaaatcctgctaaggaggcgttacatctccatttgctggctcttcattcctattacaggcctcctcctctccccactgtgagcctgggagggagtgcacatgggcgtcttcaaggtttctaagtaggctgctcagcagtgggctcctctggcagatccccagcaacccagagccckgaagttttgcccatatgcatgacagattttatttgatttgtttatatattttttgagacagagtctcactctgtggcccaggctgcagtgcagtggcatgatctggactcactggaacctctgcctcctgagttcaagcgattcttccacctcagcacccctgagtagctgg

SEQ ID NO: 268452 - DNA, 502 bp, Homo sapiens
tattttatctcactgtcttctcctatttctttcttctcaggcctcttgaaccttctagttgtttttttcccagcatatataaaactttctccatcttcctacacaagtgagcaggagcatttccatgattcttaattaaatccagtagtttttggaaatcctgctaaggaggcgttacatctccatttgctggctcttcattcctattacaggcctcctcctctccccactgtgagcctgggagggagtgcacatgggcgtcttcaaggtttctaagtaggctgctcagcagtgggctcctctggcagatccccagcaacccagagccctgaagttttgcccrtatgcatgacagattttatttgatttgtttatatattttttgagacagagtctcactctgtggcccaggctgcagtgcagtggcatgatctggactcactggaacctctgcctcctgagttcaagcgattcttccacctcagcacccctgagtagctgg

SEQ ID NO: 268453 - DNA, 657 bp, Homo sapiens
agaaagatgaacttttaaaataaatggtgtttgatgccaaatgctggctagtctgtggagtgctaagaactcttgttaattgctggtgggaatgcaaaatgatacagctattttgaaagacagtttggcaatttctcacaaaactaagcatattcttaccatacgaccagcaattacattccttgatatttgcctaaatragctgaaaacttatgtccacacagaaacctgcacatggatatttatagcagcttcataattgtcaaaatgtggcagcaacatagatgtccttcagcaggtgaatgggtaaacaaactgtggtacatccagacaatggatattattcagcaccaaaaagaaatgaactaccacatcatgaaaacacatggaagaaatgttaatatatatcattaagtaaaagaagccaatcagaaaagactacatactatatagttccaattatatgacattctggaaaaggtaaaaactactaacatgggtaaaaaattagtggttgccacagtatacagaggagggaggagggatgaaaggataaataggcagaacacaaagaacttttagggcagtgaaactctcctgaatatactgttgtaactgcagaatcagcccaatctggttcaactttatataatacaa

SEQ ID NO: 268454 - DNA, 360 bp, Homo sapiens
acacatggggatttcgaaattacaattcaagatgagacttggtggggacacaaagccaaaccatatcaccaggtttgataaattttgcattatcaatttagtaaaaaatgtgctgttcatgggatgaaaaattaagcaaaattaattwaaaaatagaataaaatttattaccataaaagtgataagcaagttagaaattatatgacagttttctgaacatttccaatccaattaatattctgcatgcaatttatctaatgaactgccatttcttctttctgtcatcaacctcaccaagacatgttgcaaaccactgacttactaaattttctaaaaactacctctgactatatggccatc

SEQ ID NO: 268455 - DNA, 557 bp, Homo sapiens
atagatatgagaatggtgtacagaagttacttaattcccattgtagctgtccatatacaagagagtttagtctgggtctcattttcctaaaatatgagataatagatattattgatattttgagcaccatttcagttctaagctaattccctgaccaaagcaatggtaattgaacgaatgcaatatataaactttagcatttattcttgttttttctgagtaaaaaaatcaaatatttaatatttatgagactaaaacaaacacaataatccaacatctgtaataaactatgacatggatatttttatttataaaaatagatgataattttaggcaaattagctactatttaggcagaatattttaaaaatctcaataggttttacaaytctcttttttttccttaatttggttttagtacctttaggctatttggtttttccagatgtttaaggaagcaaagcggctcgaagtggtaaataaatgcttcttaaatttaagtagaccctaaatagatacttcttgtagaataattttagttaaataaatacgtaaca

SEQ ID NO: 268456 - DNA, 601 bp, Homo sapiens
gcaaataaagatccatacgtcatttctaggaagaaggactgattgaatattttttaaatgcccactttggggagtggcaccagggaaatagtggagtgggaagctctgaattcctgtgtttcatcagaaatataataaacatatcagaaacattgagaactctgtcttaagtttgtaaaacagtcaaagtcttagagcaataattgaatgctgagtcaataaaagtcaggtaaaaattcccctgtaatgcaaggaaatcttagccaaaacaaagtaagcctagaataatcaaaatagcaaatcctggggaaagagaatacctcattgccagagttagtccattaaaatttagaaatgtccaattttcagccaaaaatcataaagccatacaaagaaatcagaaagtattggacactcaaaggaaaaaataattcacagaagtaggccctgaagacgcacaaacattggactttctatacaaagactttaaatcaaatgttttaaaactrctcaaagtgctaaaggaaattatagacaagaactaaaggaaaccagcaaaataatatatgtgataacaacatcaaaataaagatataaaata

SEQ ID NO: 268457 - DNA, 592 bp, Homo sapiens
catggtttcttgagttgttgtctactttctcttgtgagaaagtgaaacccagggaaaacatcttcagactgtaaaactttctcaaggaaacaattgctgaggttgatttaagaaggctctggataagtccctagcatatgtgctactttagctttcaagaagggggcaaaatggatggactcagcacgttctttctatagcgccacgtgagtataattgattgcctcaaatagctgtgataccttttctgagaaggctaagtagccttgtagaaatcgtgacttatcaacatcatgtaagaagggcttagaaaaataagttgatttttctttttttttttttactaaaagttattttttttccccctttagctgatagattttatatttgcttctctaatatattgggaaattatcctcaaaacaagcaaatgcaaaccaacaaacaaaaactggcatagaacgtgatattatggacacttggtattacagggaagtaattaatgcttcaaatgactggcattaattctctaagaagcagtatagtaycattaatacaaaaaaagtaaataaaatgacagcaaaatggaagg

SEQ ID NO: 268458 - DNA, 593 bp, Homo sapiens
catgcaatttaactagctactgctagcaaacactgtgggtgagagaaatgccttgccaagcgtgtgggagctgggtgaggcctactstcactttatatttcccactccctgcaaaactctattgcggaggaggcagctatgatcatttttggaacattacccaatggccagataactgcctcccaatgcccccagagccctctgattgccctgtacgtaaaaagccagaacataaacttgtctcatttagcccccacctgtttttgcccttccatgtgtcctggtagcttaacacaaaagacagaaaccttgaggaaccctatggctctgctcatcacctaataaaccagaatacctcccctgggtaacataatgcaagtacaaatccacctgcttccacctcagctggtgctcttttataagtgccacctcctggctagaggccacctgacagacaattacagcatctcaagaagtagaataacaatgcacccatgaagtacaaaacttgtgtgtgagctcagtcatcatcattgcctgcaacaccctggctaaccaggaggttctgcgtctgtacacatgaccagttcact

SEQ ID NO: 268459 - DNA, 445 bp, Homo sapiens
cccctctcctccggggccggggggcaagaaaaaaaaacttagatttttgtcctgtggctgggagcaaaaaaaaaaaaatgacaagaaagacaatttaccattttatttttgtaattcatgatgtatatagagtataaaawttttttttatctaatattaaaactttgtgctttacatcagggtagagtggttttcaaagctttatcatatgatgttgatggcacatatgcaagtatgactataaataggaacaagctttgaggagatttgcaataaaatattgatagcaatagagaaaattttcaagtaatgcccaaagctaaactctaagaggatcaacatgtaattgacatagtttgcccatcccatgggtcttaatttccaactcttccttgaggaaattgtgtttccttaatgattcttctgctattgttggaaaaaaatg

SEQ ID NO: 268460 - DNA, 445 bp, Homo sapiens
cccctctcctccggggccggggggcaagaaaaaaaaacttagatttttgtcctgtggctgggagcaaaaaaaaaaaaatgacaagaaagacaatttaccattttatttttgtaattcatgatgtatatagagtataaaatttttttttatctaatattaaaactttgtgctttacatcagggtagagtggttttcaaagctttatcatatgatgttgatggcacatatgcaagtatgactataaataggaacaagctttgaggagatttgcaataaaatattgatagcaatagagaaaatkttcaagtaatgcccaaagctaaactctaagaggatcaacatgtaattgacatagtttgcccatcccatgggtcttaatttccaactcttccttgaggaaattgtgtttccttaatgattcttctgctattgttggaaaaaaatg

SEQ ID NO: 268461 - DNA, 583 bp, Homo sapiens
agacttactgtattttatctcaagatgtaatttctgaagttatcaatacttgttgtgtgatactttacctgttaaacttgttttctaacctatataataaactaataactctctttagtggttgtgaattgattgaggagttgttattctttggttttctaattcaaattagtcttttatccattcaacctagaagtgttctgcttgtataaaataagtaggaatgcagtaggyttcctatcactttcacttctaggaacacagtgattaattagccaatgccagagctctacatgagtcagactattctgattgccactttgcctctgctgtccattactgtagctatgcccaccttgcctttgatggttaagtgctgccacttgtcccctgccaccttgggatccaattatttccattttatttaaattttgtagttgagtgtctgtggtttccactgctggagctgacatacagagaagaacaattacaggtctcttcaaagatgcagttgctgccttcacaaaactatttcacaaggcattggtcaagggtatatcttctggaccctcccaactgagat

SEQ ID NO: 268462 - DNA, 583 bp, Homo sapiens
agacttactgtattttatctcaagatgtaatttctgaagttatcaatacttgttgtgtgatactttacctgttaaacttgttttctaacctatataataaactaataactctctttagtggttgtgaattgattgaggagttgttattctttggttttctaattcaaattagtcttttatccattcaacctagaagtgttctgcttgtataaaataagtaggaatgcagtaggcttcctatcactttcacttctaggaacacagtgattaattagccaatgccagagctctacatgagtcrgactattctgattgccactttgcctctgctgtccattactgtagctatgcccaccttgcctttgatggttaagtgctgccacttgtcccctgccaccttgggatccaattatttccattttatttaaattttgtagttgagtgtctgtggtttccactgctggagctgacatacagagaagaacaattacaggtctcttcaaagatgcagttgctgccttcacaaaactatttcacaaggcattggtcaagggtatatcttctggaccctcccaactgagat

SEQ ID NO: 268463 - DNA, 374 bp, Homo sapiens
acacttgcaactaagaaaatgcaaattaaaaccagggtgatgaaaaattcaatgcttcaacattttgtaaaaattaagatgtcagcaatacctaatactgcagagggtacagagcagaagggatgcatacacagctagtagaggtgtcaaaaattacagctccttgagaaagagttgtaaaatgtcaccaacatatctattggctagagatatgacatcattttttccaccaagtctactcctaggttcatratccaaagaaagaaatcttgtttataatccaagaatacatgtcaaacaacattcatagcagccttatttatagtaagaaacactagaaacaacctaactatccatcaacaaaataatagata

SEQ ID NO: 268464 - DNA, 563 bp, Homo sapiens
atttcttttcccttttactgaggcatgcttcatattcatattcttgagaaagagtaacctcagtttctgggaagtttatccacaagtcacagtttcacatgtatttatattaccgaatggtaaaaacacctccatcattggtttagtagagtgcaaaagatcaaatgcataaaatgtgaggttgggttattgcaaggttgaacaaatgacaatggtgagcctgctgtggggataggtgccaatttcaaatcaacttataatgggattctggttattgcagtttcactcaatctcatgttccaacatggacttagagaatcattgcccatctgagctgcaagagacttcattgaagcactttggcccagacccacgctgttggcatttggatagctaagccattccagacagatgctttcttaatggctggcctctgaatcttctccaagtcctccatgttccacttagcattacattgcttttcagttggagaggcacttttttttctttgacctggtgtatcaattmaatttttcttaatcctttttattctgtgtgccatc

SEQ ID NO: 268465 - DNA, 565 bp, Homo sapiens
tggcagacattgaagaagaattcctcaagaaaaatgaaactcaaaatgrttagttggtaatcactctgaatcttgtcatagggacgatatcctgataattgcacagaaagctagagagcaagcaagggaaaattgattattgagctgaggaggtatacatcagagtttgttattgctgaattcactgaaatctttggaaaagagaaccaaagaaaagtggagcaatatttaaataggaaaatacttgaggataaaatggagtttacccaggaatggaagcttggtttggcattctaacattaatgtaaattattaacagaataaaaaataaaatcattttatcatcctagtagatacagaaaaatacttttaaaaaaatcagcatctatgcatgataaaaactctcaggaaactagaaagaagaggggacttccacaaactgataacaggcatcaaaaaaaaaaaacagctaatataatacttaaatgtgaactattgaatgctccactcctaagataggacacaaggcaatcctactcctcaatatttactcaagaaaaattaa

SEQ ID NO: 268466 - DNA, 585 bp, Homo sapiens
taatgttacctgtaaaagaaacaatctaaatatataaatatacagatagattaaaacaaatgaattttaaaaagttcataagtggctatatcattatcagataaagtagacttcaagataaagagatattatgagaaataagaacatttcataatgattaaagawtaaattcattagaaggacacacaaataaatatataaccaaaaacagagcttctaaatacataaagcaaaacatgataggattaaagggggaaaaaggttattccacaatggtagctgaagattttagaacttctctcagcaattgatatagcaactacaaatcggcaaaaaatgtaaaatatctgtacaacactattaactctgttgatcattgatctagctgatatttatagactactgaaagcaaccattgcaaaataaacattattttcaagagcacatgaaaattctcaccaatacagaccatatgcaggttcattaaaaaagttctcaatacgtttaaaagaattaaaattatatagagaatgttttctgatcacagtgatataaaatataaagtatctaaaaaaacagaaaccc

SEQ ID NO: 268467 - DNA, 554 bp, Homo sapiens
tatggtccctaagctatggtacaagtagagcacacacagataagacacaatacaccctgtgtagttttcctgagcctctgggactgtctcatcatgagtcctagttttctgttgtcctcttgttacctttgtataagtaataaacctgcttcacgtaactcattgtgtatgtcagtgttctgtcacaacggactcaggcaagtaatacaaacacaacctgagaggcactgaactgtaatggtaatcagtgcacagtgaacgtcttttataattgttgcaattacataaaaaaatttatattttaaactgaaaacgatttaaattacatacaaaaaataataattcttgacagctccaaactccaatttcatgttattgatktcacaaattatgtcttcatatgttttatacccattagaatagatttataggctttttaatgttttatcatttaaattcctgcatcaaaattacaataatacaggttactatattgatattaatacatgtattaggttggtgcaaaagtaattgaggcttttgccattctttca

SEQ ID NO: 268468 - DNA, 620 bp, Homo sapiens
cagtgcacagtgaacgtcttttataattgttgcaattacataaaaaaatttatattttaaactgaaaacgatttaaattacatacaaaaaataataattcttgacagctccaaactccaatttcatgttattgatttcacaaattatgtcttcatatgttttatacccattagaatagatttataggctttttaatgttttatcatttaaattcctgcatcaaaattacaataatacaggttactatattgatattaatacatgtattaggttggtgcaaaagtaattgaggcttttgccattctttcagtcatcaaagaggtttaatayttacccttactggagaaatatttgtcttcatcttaatgttgctgtctaatgttctttcatttgaacttgaagaaattcccttagcatttcatttacactagaactagaggtgatgaacttcctcagcttttgtttatctgggaaagtcttaatttctccttcatttttatggaaatttttttcgggtacagtatacttggtagacagatttattttctttcaacattttgaatattttatccaattatcttttgttctgcaagatttcttttgtgaaatctgctgataat

SEQ ID NO: 268469 - DNA, 504 bp, Homo sapiens
gtctgtgttctccttttgctcactgagcatttttatgagttattttaaattttttgtttcaagctcatatatttgtgtttctttaggatcagtttctagagttgtattttgttcctttgattgggcttcatttccctgtttctttgtatatcttacaattatttcctgagatatggatatttgaataaacagcctcctcatccagtctttttatactagctttaggcaggaataaaccttcaccagtcagccaagccagagcttctataaagaggacctcrtaaatcttgtctgatctcttgcttcccctggcacctgcctgtggaactgaagctctaatgtgctatgatgcttgcctctgttttcagtgatatccgaacttggctgttggtattagtctatcactctattagtccattttcatgctgctgataaagacacacccgagactgggaagaaatagaggtttaatggactcacagttccacgtgtctggggaggccc

SEQ ID NO: 268470 - DNA, 562 bp, Homo sapiens
tttttatctatgttcattaaggatatttgcctgaagtttctgttttttgtgtgcgtgtgtgagtccttttctgattttggatcagggtaatgttggactagtagaatgacaagaagaattatattttatttaatatctggaagagtttsaattcttactagttcttatttaagagtttggtagaattcagcactttgttggaaggtttttattacttattcaatcttgttactccttattattctcttctagttttcaatttcttgttcaattatagcaggttatttgtgtccaggaatttgttcatttcttctaggttttcaaattagttggtgtattgctgttcataatagtcactaactgtattagtccattcttgtactgttaaaaacatacctgagactgggtaatttttaaagaaaaaatgcttaattgactcacagttccacaggttgcacaggtaacatggctagggaggactccagaaactttcaatcatgacagaagatgaaggggaagcaggcatgtatcacatggccaaggaggaaggaagacagaaagg

SEQ ID NO: 268471 - DNA, 562 bp, Homo sapiens
tttttatctatgttcattaaggatatttgcctgaagtttctgttttttgtgtgcgtgtgtgagtccttttctgattttggatcagggtaatgttggactagtagaatgacaagaagaattatattttatttaatatctggaagagtttcaattcttactagttcttatttaagagtttggtagaattcagcactttgttggaaggtttttattacttattcaatcttgttactccttattattctcttctagttttcaatttcttgttcaattatagcaggttatttgtgtccaggaatttgttcatttcttctaggttttcaaattagttggtgtattgctgttcataatagtcactaactgtattagtccattcttgtactgttaaaaacatacctgagactgggtaatttttaaagaaaaaatgyttaattgactcacagttccacaggttgcacaggtaacatggctagggaggactccagaaactttcaatcatgacagaagatgaaggggaagcaggcatgtatcacatggccaaggaggaaggaagacagaaagg

SEQ ID NO: 268472 - DNA, 598 bp, Homo sapiens
tctcatttgtgtatttactcttcagtcagttttatatttttgtgttttcatgatggtaaatatcatcttttgcattccaaatgcagaactctattaaacttttcttggagggccaatccaattgcgatgaattatctcaatttttgcttgtctagagaagactttatttctcctttgtctctgaagaatagctttgctgggtattgtattcattaccaacagcttttttaaaaattcagtagctaayatatgttatctcattatcttctggcctatatggtttctgctgaaaaatctgctgttactccaatggggattctcttatttatgacttgataccttgatactcttctttttttacaattctctctttgtcttcaacttttaacagtttggctgtaatgcatcttggaaagaaccttttgggggttcaatttgtttgggtatatttgagctttctgtatctgaatttctatttctctccctgacttgggaagtttccagctattattttgttaacatttctcctgtttagaaaaaaaaatagtgcagctcactgctagtgctcatttaattttgcataaacatgttctttgag

SEQ ID NO: 268473 - DNA, 570 bp, Homo sapiens
gtacctcatcattaccaatgtgagaattattaacttgatctaatattcttcacaactaatatacctgagagaaataagtctatttaatttttaattttggggggaatatacacattttcttttgacttttagcaatagtgaattggttagacacttttctttaacaatatatgaatcattaatacatcatcaacaatatagtcatctggagtttgtcatattttcttatattcttggcactttttttgttcttaggcatttctggctgttattcaagtctgatcttaatattactgattcagttttkgggaatataaattctgatatttccttctttgatttctgttactcttccatcttcttaactttcctcattcacatttcacttagattatgcagtttgaatcttggagtcgggtctgttggggccagttatttaactactcttattctcagcatttacactagaaatgaaaggatgagaactatgttatagggcttctgcaggattacacaaatagacagtaagatgccagcacagtatcaaacatagttggtcttaagtatata

SEQ ID NO: 268474 - DNA, 570 bp, Homo sapiens
gtacctcatcattaccaatgtgagaattattaacttgatctaatattcttcacaactaatatacctgagagaaataagtctatttaatttttaattttggggggaatatacacattttcttttgacttttagcaatagtgaattggttagacacttttctttaacaatatatgaatcattaatacatcatcaacaatatagtcatctggagtttgtcatattttcttatattcttggcactttttttgttcttaggcatttctggctgttattcaagtctgatcttaatattactgattcagttttggggaatataaattctgatatttccttctttgatttctgttactcttccatcttcttaactttcctcattcacattycacttagattatgcagtttgaatcttggagtcgggtctgttggggccagttatttaactactcttattctcagcatttacactagaaatgaaaggatgagaactatgttatagggcttctgcaggattacacaaatagacagtaagatgccagcacagtatcaaacatagttggtcttaagtatata

SEQ ID NO: 268475 - DNA, 534 bp, Homo sapiens
gctggctgtgagtcagttttgctgatactggctggactttctcatgtgtctgagcatgtattcatcagkgctaccacaaggataactgagtttcctacttagaatggctagcagtatagtaaccattaagaagacatcaaaaacaagataaagaagcaaatgtgagagttaaaaggaggggggaaatagtgctgattgagacatatcaaattagatgtcagacaaatagagaggttttatagatagttaaatattggtccaaaggtcaagaggaaaaaaacaggtataaatgggaacatgattgttaataataagagccatagttgtgtgcagtgtcatttatggagactatgtagagcagaaagtcaggaccactctgagactggtcaataattctgctttgttttgcttctactaccaaagtaactcaagtaatggctgtcaattaaaggaccattaaatgttatcaagattgaatcattatgattgttgtcatatagtctttctgtaaaattagacatatttcactcaaat

SEQ ID NO: 268476 - DNA, 566 bp, Homo sapiens
gaatgtgttaggctttcaggggagtttgtcttaataagaagtctcatccataacacacttgatcattccaaacctgttgcctagttagcgctggggaagtccaaacctrtgactggcagccttccacaaatttgtgggatattggaggaactagatgcacaaacactacccttaattgtctgtggcaacaagttctttcctgtcttaacttattccttggagtgaactgttttagggcaaaattattgggactgcatctcctatactgtctccaggaaacatctcttgtgtagatggaaaaaaacttattctaagcctgtaaaattacctcctaggctttccatgaagagactcattggattgcattgctattggaataagttacaacattggaactccgaatcagcagcaaccaaaagatcgatcctttaaattagaaagacccctaaatttgaaaaaaaaaaagattttaaaagatcttcattctaaacaattgccatatttgtatttctaagatcaaattaatgaaaaaagacacataataatgtcatggctacccttagaaa

SEQ ID NO: 268477 - DNA, 503 bp, Homo sapiens
agggaagtgaggaaatgagatagggaagagaaggaagcccaaatgagtgaaacaataggcaggttatcaatccagaagatgggagtttagttccctggagcaatgtgagagtcagygcagaaaatagctctgaattattccagctagagaatgaaggacctatggtgtttatttaccaaatctttgactataatccactgaggcctgctcctagaaatgttacctttattttatgtctagttttccctgagtgaaggctgatatgtttctcaggcaaaactaaacacaaaacagcaaaaacaaacaaacaaacaaaaaacaaaaaccttccatcagagggttcaggtattttcactaagcagctttcggcagttgggtcccaaggggaaatgggtggggcattgacaatatctgatatggtgttccatatagaaaaagtacaattgaaggaataaatgaatgaaatgtttctaaggattttgtaattgggacaccacaggaag

SEQ ID NO: 268478 - DNA, 640 bp, Homo sapiens
aagtttatgagttaacctctgcccaacagagttgtaaaatagccttattgacagtaagtcaagcccaaaactgcactgaaaggaaactcactaatctctttgcctatttccaagttgtaaataatttttctcacttctaacatctgggaatttgctttttcacttctatatccccacatctttcaacaacaatgagcagttagtatgcttttgtcttagtttatctcccagaaatagacttgaagcaagaatttgatttcctaaagtttgagaggtcatccagaaaaactagtagggaagtgaggaaatgagatagggaagagaaggaagcccaaatgagtgaaacaataggcaggttatcaatccagaagatgggagtttagttccctggagcaatgtgagagtcagcgcagaaaatagctctgaattattccagctagagaatgaargacctatggtgtttatttaccaaatctttgactataatccactgaggcctgctcctagaaatgttacctttattttatgtctagttttccctgagtgaaggctgatatgtttctcaggcaaaactaaacacaaaacagcaaaaacaaacaaacaaacaaaaaacaaaaaccttccatcagagggttcaggt

SEQ ID NO: 268479 - DNA, 508 bp, Homo sapiens
ccttttcttttttctggagggcacttactccagttatccacctggctcagtcacacattttctccaagtctttgcttaaatgttctcttctcataaatcttccttgacaacaatcttcccatatgtgtttgtgtatgtatgtgtgtgcatttgataatgtactcaaggtttttaaataaaatattatatatcaacgtatatttgcaaatatcatcagagcaaaatatagtacatttttgaaataaataatatattgtcattttgtttatattcattttagtggccttcaatttgcaaattctttttatgcaagcattctctggaatatttcattttcttcacaagttggaattaacattaacaaaaggatcaaagggtagctgtacacacagatgtcatatcttttcaactagaattttggtaacacagaaaaaacaaagattataacaaaaggartatagtgacatatgactaaaatcactaagcttaaactgtgcataagtaaaac

SEQ ID NO: 268480 - DNA, 547 bp, Homo sapiens
tgagtctcacctgtcaactaacaatgtttaatatttttcttaaagagtctgtctattcttaagtaaatctgttatgtttttaaaattaattattaggggtcattattataatcagtcataatgtgtyagattcaaaatgagctttttgatttaataattcacctaagcttcttcaagaatctctaacttgttggaaagtgactgtaaagtgggggcggctgcagtgaggagtaaaggggagatacattctaaacaaggccaccagtggtacttttctccctaagctttaaagagtcttttagacatgactcattctctttttgagaaactctattttttgaattactccttctttcccctgttttgttccaagatggtgtctgagtaggtagaatggtttaaagagaaaaaaaatgtaaaggacatgaatttgttccttgagaaatctccaaactgctgtacacgtggctggagtaatttacattcccactaacagtctataagtgttcccttttctcttcagcctcgccaacatctgttgtttttt

SEQ ID NO: 268481 - DNA, 472 bp, Homo sapiens
gccaggcatggtggctcacgcctgtgctcctagcactgtggaagtctgaggtgggcagatcccttgagcccaggagtttgagaccagcctgggcaacayggcgagacctcatcgctacaaaaatacaaaaaaaacctagctgggcatggtggcgtacacctgtagtcccagctactagggaggctgaggtgggaggatcgcttgagctggggaggttgatgcagcagtgagccgtgatcatgccaccgcactctagcctgggtgacagagtgagaccctgtctcaaaaaagagagtagatgtgtgacccaagtcagtctattgggtcttattctgtgattttgtggaagtgttgaaaagaaagaatgtcctttctgttgaacctagagctcagaggatatattcctaaagctaccaggggctggagagaaccctgcctcagaatgaagtctaagaagagagaagagaggtaa

SEQ ID NO: 268482 - DNA, 559 bp, Homo sapiens
aaatgtgaaatgttgtgcaaatgccaagaatcaccattgtcataagctgcgaagagagccagagatagaaagagcagggttgccgtctgcacgggtccctagtgctagaaccagagactgaggcaggcagacaaagatctggtggccatggagagacactgccatgtgttctctcccttcctccactcagcccagccctaccccacaaaagaggcaggtgctcagtagatatytgtgggctcaaatacaccccagggtccgcatttctgcttcttccgacttgcacctcccccaggaactcttaagacctgacccaccactccaggtcccctccttacctcgggacacaaccgctgctcttggccttctgttttgagaaagtttgtcatcacgaagaaagagttcccctgtggagaaggagaggctaagaaaatgcaaggcctttgaaaagagaactacttaattataataatccagcttgctgggcgaacctctccacttttctaagcttctagaaatcaggatctgtgggcaacttggaatatgccaagggcttaat

SEQ ID NO: 268483 - DNA, 564 bp, Homo sapiens
atactactggtatggtattctaacatttgacatgacattgttcatcaaattattaacttttggttaactgtgtgtttctttgtttgctttgctttccaagaatatgtttcacagatactattagttcaagaaagctggggaaaagaaaaaataataaaggttaagatcctgactagggaatgaattagagaaagccaaagtaattgcctggaaaagatatgtgggaggttgggtcaagtttcaaggttcagaagtagacttcgagataagcatttttctggatatttggaattatctcctaaagatattattctttgaaatatgaccaaaaacatatagccaaacatcaattttgttttggcaaatccagtccaagaaaataagttatctaaaggctcagaagtgctttgtcctagttctttctcaggcttcttaatcaatactcasaactctgtaccaattattggtaagtaatatatatagattaccagagactgcagtttctgccagtgtgtctgaattaaccctttcagtgttttgtaaacttcagttgtaaaatattag

SEQ ID NO: 268484 - DNA, 564 bp, Homo sapiens
atactactggtatggtattctaacatttgacatgacattgttcatcaaattattaacttttggttaactgtgtgtttctttgtttgctttgctttccaagaatatgtttcacagatactattagttcaagaaagctggggaaaagaaaaaataataaaggttaagatcctgactagggaatgaattagagaaagccaaagtaattgcctggaaaagatatgtgggaggttgggtcaagtttcaaggttcagaagtagacttcgagataagcatttttctggatatttggaattatctcctaaagatattattctttgaaatatgaccaaaaacatatagccaaacatcaattttgttttggcaaatccagtccaagaaaataagttatctaaaggctcagaagtgctttgtcctagttctttctcaggcttcttaatcaatactcacaactctgtaccaattattggtaagtaatatatatagattaccagagactgcagtttctgccagtgtgtctgaattaaccctttcagtgttttgtraacttcagttgtaaaatattag

SEQ ID NO: 268485 - DNA, 278 bp, Homo sapiens
agatagtaggttaatattagcaatttaaaaagaagaaacttaaaatccatgaaagaacataattttgcaaaagacatgaaaggcaatacactgtttcattccatttatrtgatattctggtaaaggcaaaagtatagagacaaatcagatcagtggttgccagggtatataagtaggggttggagacttaatacaaaggaaattgagggaatttatgggggtgatgggagtattctgtatattgattgcagtggtagttatatgattatatacattaa

SEQ ID NO: 268486 - DNA, 640 bp, Homo sapiens
caacaaactgtagcattttaattgataaacataatcttaaaaaaaaatctgcagcaaaatccttcataatgtgaaatgttaaacattttgtccgcaagataaaatatgaggctagattacttattatcattactccatcccactttattctaatccattcatagccagtgcaagatggcaaggagtaaagactaaagaccagaaaggtaaaatgccactcccattttcayactatacatttgtgtttatgaaatgtccaagataattttctacttattagaattaatatcacagttttgtgtggtttctgatacaagatcaatattttaaaaagtgtatttctttacacaataaatagaagattaaaatataaaaagatacccctttgaacagcatcaaaacatcaaatacttgagataaatttaattaaatatatgcaaaatctctacagaactatataactttattgagtaatattgaatgaaacctaaataaatcaagagatagaatgtgttcataaattgaaaacttaaatttataaagatgtccattttcctaaattcatctgttgattacaatatcaatcatagttccaagaggcttctttatcttcaaaaattgacatgtgaattctagaatt

SEQ ID NO: 268487 - DNA, 640 bp, Homo sapiens
caacaaactgtagcattttaattgataaacataatcttaaaaaaaaatctgcagcaaaatccttcataatgtgaaatgttaaacattttgtccgcaagataaaatatgaggctagattacttattatcattactccatcccactttattctaatccattcatagccagtgcaagatggcaaggagtaaagactaaagaccagaaaggtaaaatgccactcccattttcacactatacatttgtgtttatgaaatgtccaagataattttctacttattagaattaatatcacagttttgtgtggtttctgatacaagatcaatattttaaaaagtgtatttctttacacaataaatagaagattaaaatataaaaagatacccctttgaacagcatcaaaacatcaaatacttgagataaatttaattaaatatatgcaaaatctctacagaactatataactttattgagtaatattgaatgaaacctaaataaatcaagagatagamtgtgttcataaattgaaaacttaaatttataaagatgtccattttcctaaattcatctgttgattacaatatcaatcatagttccaagaggcttctttatcttcaaaaattgacatgtgaattctagaatt

SEQ ID NO: 268488 - DNA, 590 bp, Homo sapiens
gggtggacaattagatataatgtgcaggactgcactgagactggtttaaagaaatcagccataaagaaaaatgtttaactaattaaagacatctaaatacagcatggttattatatataatgaaaatgcatgaaaacaaaaatgtgaaaattattgactgaaaaagaggttacaaagtgtatatttgatgaaaaataatatgtaaggctagagkaaaaggtactaacaatagtgctttcttgtttataggactatttcaacacattttgctcctctgcatttaaaaacttttctctgatgcacatatactgtttctgtaataataaaattatgtttaaatgattcaacatttctgaatagcaaattactatatatgtatacttcaaaatagacaatttatagggctatacccaacttgtggctgtgcactatccacttagtatacaggtacttcttacccttcttttaatatctaattataaaattctgaactcattgagggctattagcacatctacaattgtttatgcttcttctaagtttgatatttgtatggtatttttaaaattatatattatgaactttttgta

SEQ ID NO: 268489 - DNA, 590 bp, Homo sapiens
gggtggacaattagatataatgtgcaggactgcactgagactggtttaaagaaatcagccataaagaaaaatgtttaactaattaaagacatctaaatacagcatggttattatatataatgaaaatgcatgaaaacaaaaatgtgaaaattattgactgaaaaagaggttacaaagtgtatatttgatgaaaaataatatgtaaggctagagtmaaaggtactaacaatagtgctttcttgtttataggactatttcaacacattttgctcctctgcatttaaaaacttttctctgatgcacatatactgtttctgtaataataaaattatgtttaaatgattcaacatttctgaatagcaaattactatatatgtatacttcaaaatagacaatttatagggctatacccaacttgtggctgtgcactatccacttagtatacaggtacttcttacccttcttttaatatctaattataaaattctgaactcattgagggctattagcacatctacaattgtttatgcttcttctaagtttgatatttgtatggtatttttaaaattatatattatgaactttttgta

SEQ ID NO: 268490 - DNA, 590 bp, Homo sapiens
gggtggacaattagatataatgtgcaggactgcactgagactggtttaaagaaatcagccataaagaaaaatgtttaactaattaaagacatctaaatacagcatggttattatatataatgaaaatgcatgaaaacaaaaatgtgaaaattattgactgaaaaagaggttacaaagtgtatatttgatgaaaaataatatgtaaggctagagtaaaaggtactaacaatrgtgctttcttgtttataggactatttcaacacattttgctcctctgcatttaaaaacttttctctgatgcacatatactgtttctgtaataataaaattatgtttaaatgattcaacatttctgaatagcaaattactatatatgtatacttcaaaatagacaatttatagggctatacccaacttgtggctgtgcactatccacttagtatacaggtacttcttacccttcttttaatatctaattataaaattctgaactcattgagggctattagcacatctacaattgtttatgcttcttctaagtttgatatttgtatggtatttttaaaattatatattatgaactttttgta

SEQ ID NO: 268491 - DNA, 590 bp, Homo sapiens
gactatgtatttgaacacacttggtacggtacatggaaggtagcaggtacacaatatgtgcttttttaaaaaacagagtgtttgacttctggttctggccataataaaataatggatttcagactgaatcttctgctgtaaacaactataaaactagacaaaatgtaccatgtgcccattttaaagcattgtacaacacacagcatagagtcgtgatccttgaagtgaactccacrtttaaagctggccttttatatagggatacttccaaaactgcaggaaagcaaagaggagcccaaatagatcacagcaatttttctgaatggagaaaccaattgtaggatgcagctgaggtggctggaatttatgaagaacattccagagaagaaagagtagaactgagaaagagatctaaaaatctacaaatgagtcttcttgaattttttgagtgaacaacatattatgcatgtacagagtaagatttcacaaggccacacagagaactgtttctaaggggccatgagcggaatgaggatttcactggttcaacaatgttgaaagccattagagtttcaaccagtcaaagtgaa

SEQ ID NO: 268492 - DNA, 566 bp, Homo sapiens
cttaaataaataaattgcaaattattctaagaatacatgattatgaaatattttcaagcctaacagaaataaagataacagtataattattcttgataaccccaagctgaagagaactcaaaggcccrcaaaattggaaaatgggttgtaaaagctgtgatatagtcaaataattggaaactactcaaaagtactacaaaaaaagacaccaaaagtatgtattgtatgatcacatccatataaagtttcagaatgggcaagatcaatctgtagtgatagaaacaagaataatggctggagggtgacgggaattgattattaagtggcatgagaaatttctgaggtaatgtcaatgttctatgggctgtgagtggctctatcatgtatttttatcaaaagtcattgaataatgatttaaaaattgtgcatttcatcttatctaaagtataccaaaattaaaaacaaggaaaaaatgctatcaaaaagtatggaaaagtaaactttcgcacattagtctcaaaaaccaatgatttctgatattctttttactctatcaatgtttttca

SEQ ID NO: 268493 - DNA, 590 bp, Homo sapiens
caaagatggaattataaatacaataattccagtttaaagaattagaatggtaaaggttaatacaatttagtatgcctaaaaatcacttgaaaagttactaacaatgtaaattcttgtgccttaggcctgagattttgattcaataggtctagcatgggacataggaatctggatttttaggaatgataaaggaaaattgcttaaaatagggtargttatgacttacaaatataaaatgaacacttgtctaagatttttaactcatttatttaatgagggagccagtaagatattatactaagttttatggaaaattaagagccacacataactaggcactaaggaacactgaaataaatttgcttgataggttcaaaactgacttcttgatggtagatggaaaaaggaaaattaattatacttccaccaaaatcaatcatttgcctgtctatagacaagaatatttgcattactatcagtaatctacaactaacagaattgcaaataacaaagaaaacaaaaggcacagagactccatagaaacagataacccaggttattctagacaaggatgagatttccattaaaga

SEQ ID NO: 268494 - DNA, 590 bp, Homo sapiens
caaagatggaattataaatacaataattccagtttaaagaattagaatggtaaaggttaatacaatttagtatgcctaaaaatcacttgaaaagttactaacaatgtaaattcttgtgccttaggcctgagattttgattcaataggtctagcatgggacataggaatctggatttttaggaatgataaaggaaaattgcttaaaatagggtagrttatgacttacaaatataaaatgaacacttgtctaagatttttaactcatttatttaatgagggagccagtaagatattatactaagttttatggaaaattaagagccacacataactaggcactaaggaacactgaaataaatttgcttgataggttcaaaactgacttcttgatggtagatggaaaaaggaaaattaattatacttccaccaaaatcaatcatttgcctgtctatagacaagaatatttgcattactatcagtaatctacaactaacagaattgcaaataacaaagaaaacaaaaggcacagagactccatagaaacagataacccaggttattctagacaaggatgagatttccattaaaga

SEQ ID NO: 268495 - DNA, 590 bp, Homo sapiens
caaagatggaattataaatacaataattccagtttaaagaattagaatggtaaaggttaatacaatttagtatgcctaaaaatcacttgaaaagttactaacaatgtaaattcttgtgccttaggcctgagattttgattcaataggtctagcatgggacataggaatctggatttttaggaatgataaaggaaaattgcttaaaatagggtaggttatgacttacaaatataaaatgaacacttgtctaagatttttaactcatttatttaatgagggagccagtaagatattatactaagttttatggaaaattaagagccacacataactaggcactaaggaacactgaaataaatttgcttgataggttcaaaactgacttcttgatggwagatggaaaaaggaaaattaattatacttccaccaaaatcaatcatttgcctgtctatagacaagaatatttgcattactatcagtaatctacaactaacagaattgcaaataacaaagaaaacaaaaggcacagagactccatagaaacagataacccaggttattctagacaaggatgagatttccattaaaga

SEQ ID NO: 268496 - DNA, 590 bp, Homo sapiens
caaagatggaattataaatacaataattccagtttaaagaattagaatggtaaaggttaatacaatttagtatgcctaaaaatcacttgaaaagttactaacaatgtaaattcttgtgccttaggcctgagattttgattcaataggtctagcatgggacataggaatctggatttttaggaatgataaaggaaaattgcttaaaatagggtaggttatgacttacaaatataaaatgaacacttgtctaagatttttaactcatttatttaatgagggagccagtaagatattatactaagttttatggaaaattaagagccacacataactaggcactaaggaacactgaaataaatttgcttgataggttcaaaactgacttcttgatggtagrtggaaaaaggaaaattaattatacttccaccaaaatcaatcatttgcctgtctatagacaagaatatttgcattactatcagtaatctacaactaacagaattgcaaataacaaagaaaacaaaaggcacagagactccatagaaacagataacccaggttattctagacaaggatgagatttccattaaaga

SEQ ID NO: 268497 - DNA, 467 bp, Homo sapiens
tccatcttaaaatctttccattttctcctgaaacaaattgctcaagcaattcaaatacaatgaatgtggtcagtgggtcrcacctggagaaatcattttctaacctgtaatcaagactgttgaattactcccttcactggaaagaataaaatattaccacataaattcgtattatgataatggtccactatgaatgctttggtgttcttaattttcttaagatttattaatatttctgaagtaactactaaatgccaagcaatatattttctaatttaatctttcattgacttttactttcacttcaattgagctactcactttcatggctataaacttaacttttcaataacttaaaaattgatttctaatgttataaactttaatgttccactctgtgacatgctctttcagactctctcttccttactgccaactcaccttctcttctatttcttccagtgccc

SEQ ID NO: 268498 - DNA, 467 bp, Homo sapiens
tccatcttaaaatctttccattttctcctgaaacaaattgctcaagcaattcaaatacaatgaatgtggtcagtgggtcacacctggagaaatcattttctaacctrtaatcaagactgttgaattactcccttcactggaaagaataaaatattaccacataaattcgtattatgataatggtccactatgaatgctttggtgttcttaattttcttaagatttattaatatttctgaagtaactactaaatgccaagcaatatattttctaatttaatctttcattgacttttactttcacttcaattgagctactcactttcatggctataaacttaacttttcaataacttaaaaattgatttctaatgttataaactttaatgttccactctgtgacatgctctttcagactctctcttccttactgccaactcaccttctcttctatttcttccagtgccc

SEQ ID NO: 268499 - DNA, 467 bp, Homo sapiens
tccatcttaaaatctttccattttctcctgaaacaaattgctcaagcaattcaaatacaatgaatgtggtcagtgggtcacacctggagaaatcattttctaacctgtaatcaagactgttgaattactcccttcactggaaagaataaaatattaccacataaattcgtattatgataatggyccactatgaatgctttggtgttcttaattttcttaagatttattaatatttctgaagtaactactaaatgccaagcaatatattttctaatttaatctttcattgacttttactttcacttcaattgagctactcactttcatggctataaacttaacttttcaataacttaaaaattgatttctaatgttataaactttaatgttccactctgtgacatgctctttcagactctctcttccttactgccaactcaccttctcttctatttcttccagtgccc

SEQ ID NO: 268500 - DNA, 467 bp, Homo sapiens
tccatcttaaaatctttccattttctcctgaaacaaattgctcaagcaattcaaatacaatgaatgtggtcagtgggtcacacctggagaaatcattttctaacctgtaatcaagactgttgaattactcccttcactggaaagaataaaatattaccacataaattcgtattatgataatggtccactatgaatgctttggtgttcttaattttcttaagatttattaatatttctgaagtaactactraatgccaagcaatatattttctaatttaatctttcattgacttttactttcacttcaattgagctactcactttcatggctataaacttaacttttcaataacttaaaaattgatttctaatgttataaactttaatgttccactctgtgacatgctctttcagactctctcttccttactgccaactcaccttctcttctatttcttccagtgccc

SEQ ID NO: 268501 - DNA, 508 bp, Homo sapiens
gctactcactttcatggctataaacttaacttttcaataacttaaaaattgatttctaatgttataaactttaatgttccactctgtgacatgctctttcagactctctcttccttactgccaactcaccttctcttctatttcttccagtgccccagtatcttgactcttccattttcttttttcttttcttttattaagtggatacatgataatttcacatgttgatgkggcacaatgtggtattttgatacatgacacattgttaaaacctctcctccctgtctttcccagtctggtaaccactcttctactctctattagatcagtgtttttagatttcacatatgaatgagatcatgtgatatttgtcttaccgtggttagcttatttcacttaccacaatgtcgtctatgctcattcatgttgtcacaagtgacacgattttaccctttattatggccaaatgtgcatatgatatagtttggatatttgtcctgacccatat

SEQ ID NO: 268502 - DNA, 508 bp, Homo sapiens
gctactcactttcatggctataaacttaacttttcaataacttaaaaattgatttctaatgttataaactttaatgttccactctgtgacatgctctttcagactctctcttccttactgccaactcaccttctcttctatttcttccagtgccccagtatcttgactcttccattttcttttttcttttcttttattaagtggatacatgataatttcacatgttgatgtggyacaatgtggtattttgatacatgacacattgttaaaacctctcctccctgtctttcccagtctggtaaccactcttctactctctattagatcagtgtttttagatttcacatatgaatgagatcatgtgatatttgtcttaccgtggttagcttatttcacttaccacaatgtcgtctatgctcattcatgttgtcacaagtgacacgattttaccctttattatggccaaatgtgcatatgatatagtttggatatttgtcctgacccatat

SEQ ID NO: 268503 - DNA, 508 bp, Homo sapiens
gctactcactttcatggctataaacttaacttttcaataacttaaaaattgatttctaatgttataaactttaatgttccactctgtgacatgctctttcagactctctcttccttactgccaactcaccttctcttctatttcttccagtgccccagtatcttgactcttccattttcttttttcttttcttttattaagtggatacatgataatttcacatgttgatgtggcacaatgtggtattttgatacatgacacattgttaaaacctctcctccctrtctttcccagtctggtaaccactcttctactctctattagatcagtgtttttagatttcacatatgaatgagatcatgtgatatttgtcttaccgtggttagcttatttcacttaccacaatgtcgtctatgctcattcatgttgtcacaagtgacacgattttaccctttattatggccaaatgtgcatatgatatagtttggatatttgtcctgacccatat

SEQ ID NO: 268504 - DNA, 508 bp, Homo sapiens
gctactcactttcatggctataaacttaacttttcaataacttaaaaattgatttctaatgttataaactttaatgttccactctgtgacatgctctttcagactctctcttccttactgccaactcaccttctcttctatttcttccagtgccccagtatcttgactcttccattttcttttttcttttcttttattaagtggatacatgataatttcacatgttgatgtggcacaatgtggtattttgatacatgacacattgttaaaacctctcctccctgtctttcccagtctggtaaccactcttctactctctattagatcagtgtttttagatttcacatatgaatgagatcatgtgatatttgtcttaycgtggttagcttatttcacttaccacaatgtcgtctatgctcattcatgttgtcacaagtgacacgattttaccctttattatggccaaatgtgcatatgatatagtttggatatttgtcctgacccatat

SEQ ID NO: 268505 - DNA, 484 bp, Homo sapiens
taagcagggtgagatgatatctcactgtggatttgacttgcatttctctgactattagtgatgatgagcattttttcatttacctgttggtgattttttttgtcttgtttggagaaatgtctattcagctgtcttgactattttctaatccaattatttgtatttttgctattgagttgtttgagttttctataaatwtggggtattaaccccttatgaagtgaatagtttgcagatattttctcccattttgtaggttgtgtcttcactcttgtgattgtttcctatgcagtgcagaagtttttatttggtataatcccatttgtttatttttgcttttgttgtgcatgtctttcgatgtcttttctaaaaagtccttgcccagaccaatgacatataacatttcacctaagttttctcctactagtttcatagtttggggtcttacctttaaatatttaatttattttgtgttgatttttgt

SEQ ID NO: 268506 - DNA, 597 bp, Homo sapiens
tgttgtgcatgtctttcgatgtcttttctaaaaagtccttgcccagaccaatgacatataacatttcacctaagttttctcctactagtttcatagtttggggtcttacctttaaatatttaatttattttgtgttgatttttgtatatgatgagagataggggtctactttcattcttttgtatgtggatatgcactttcccagcaccatttgttgaaaagactgtcttttcccaaaattgaatgtttgcacctttgtcaaaaataagttgcatgtaaatatgtggttttatgcctgggttctctatttttgttccactggtctatgtgcctgtttttatgccaataccatgttgttttagttaagatagctttgtaatatattttraaattagatagtgtaatacgtctagtgttgctctttttgcttaagatttattttgctatttgggatgttttgtagtttcacatgaattttaagatttttttaacatctgtgaagaatgaaattggaaatttgatagagattatattggatttatagattgattttcatagtatggtcatttcaacaatattaattcttctagtccatga

SEQ ID NO: 268507 - DNA, 372 bp, Homo sapiens
tattcttttgctaatttgggtcttagtttgttcttgattttatagttccttgaaatacattgttagatggtttattyattatctttcttctttattgatgtagaaatgtattgctataaacttccctctaaggactgttttgctgtatttcataagttttcatatgttctgatttcatttttatttgtcttcagacatttttgaaattaattttttattgacccattggttgtttaaggatatgttgtttaatttgtatgtatttgcacaatttctgaagttcctcctgttgtttatttctagctttattccatatggttaaaaaaacacgtgatatgatttgattttttgattagctaagacttgttttgt

SEQ ID NO: 268508 - DNA, 372 bp, Homo sapiens
tattcttttgctaatttgggtcttagtttgttcttgattttatagttccttgaaatacattgttagatggtttattcattatctttcttctttattgatgtagaaatstattgctataaacttccctctaaggactgttttgctgtatttcataagttttcatatgttctgatttcatttttatttgtcttcagacatttttgaaattaattttttattgacccattggttgtttaaggatatgttgtttaatttgtatgtatttgcacaatttctgaagttcctcctgttgtttatttctagctttattccatatggttaaaaaaacacgtgatatgatttgattttttgattagctaagacttgttttgt

SEQ ID NO: 268509 - DNA, 372 bp, Homo sapiens
tattcttttgctaatttgggtcttagtttgttcttgattttatagttccttgaaatacattgttagatggtttattcattatctttcttctttattgatgtagaaatgtattgctataaacttccctctaaggactgttttgctgtatttyataagttttcatatgttctgatttcatttttatttgtcttcagacatttttgaaattaattttttattgacccattggttgtttaaggatatgttgtttaatttgtatgtatttgcacaatttctgaagttcctcctgttgtttatttctagctttattccatatggttaaaaaaacacgtgatatgatttgattttttgattagctaagacttgttttgt

SEQ ID NO: 268510 - DNA, 372 bp, Homo sapiens
tattcttttgctaatttgggtcttagtttgttcttgattttatagttccttgaaatacattgttagatggtttattcattatctttcttctttattgatgtagaaatgtattgctataaacttccctctaaggactgttttgctgtatttcataagttttcatatgttctgatttcatttttatttgtcttcagacatttttraaattaattttttattgacccattggttgtttaaggatatgttgtttaatttgtatgtatttgcacaatttctgaagttcctcctgttgtttatttctagctttattccatatggttaaaaaaacacgtgatatgatttgattttttgattagctaagacttgttttgt

SEQ ID NO: 268511 - DNA, 474 bp, Homo sapiens
tgttttgtggtctaacatatctatcatggacaatattccatgtgcaggtgaaaagacagtgaattatgcagttgttggatgaaatgttatgtaaataactgttgaattcttttgatctagagtgcagtttaaatgtttctttgttgagattctctctcaatgatctgttcattgctgaaaatgggatgtcgaagtttcttaccattattgtacagttttttatctctccttttaratctattaatgtttgctttatatatttaagttctccaatgttgagtgcagtatatatttacaattattgtattctcttgttgtactgacccctttattattacataatggccttgtttgtctgtgtttacagtttttttacttgaagtctattttatttgatataaatataactacttctgcattctttggtttccattatcataaaatatattttttcatctgatcactttcaattta

SEQ ID NO: 268512 - DNA, 621 bp, Homo sapiens
aacacaactctttatagatgcctatggtccaaaaatgaggattcctaatcrtccccaaaaataagggatcctctgcaagtcaacctgggagagagtttagtattgttctgaggcaatgaaagccattgagattcacatgtaagagggtagagaaagggaatccacatgttttgatccctccatctgatggatataacttggtcttcattacattgcaccaccgttggtgtcagagagaactagatttgaatcccagttccttcactcattatgatttgatggtgaatgtgtttttaactcgtctgagcctccgtttgctcatctataaaagatgggattgttatgagacttgcaaataaggtaagtgtgtaaaaatctgggaataatgcctgtaatttaaaagacggcattgtgatgaggcttcaataaggtaagtgtgtaaaaatctggacacaatgttactaattttgtaggttttcaatatatagagaaggaggattatttttctctcatttaatttttagaacaagtttataaaattggtattattcatatttttgagataatcaaaggatcagtaagtttaaataaatcaccatagtaacaaagcagttcacaaca

SEQ ID NO: 268513 - DNA, 621 bp, Homo sapiens
aacacaactctttatagatgcctatggtccaaaaatgaggattcctaatcatccccaaaaataagggatcctctgcaagtcaacctgggagagagtttagtattgttctgaggcaatgaaagccattgagattcacatgtaagagggtagagaaagggaatccacatgttttgatccctccatctgatggatataacttggtcttcattacattgcaccaccgttggtgtcagagagaactagatttgaatcccagttccttcactcattatgatttgatggtgaatgtgtttttaactcgtctgagcctccgtttgctcatctataaaagatgggattgttatgagacttgcaaataaggtaagtgtgtaaaaatctgggaataatgcctgtaatttaaaagacggcrttgtgatgaggcttcaataaggtaagtgtgtaaaaatctggacacaatgttactaattttgtaggttttcaatatatagagaaggaggattatttttctctcatttaatttttagaacaagtttataaaattggtattattcatatttttgagataatcaaaggatcagtaagtttaaataaatcaccatagtaacaaagcagttcacaaca

SEQ ID NO: 268514 - DNA, 592 bp, Homo sapiens
gatgcagaaaacacatttgamaaaattcaatatactttcatgataaaactctcaacaaaataagtatacaagaaacttacctcaacactataaaggctgtatatgaaaaacctatatctaatattataatcaatggggaaaaactgaaagctttttctttaatatctggaacaagacagggatgtctactctcatcactcctattcaacatagtactggaagtcctagccagagcaatcaggcaagagaaaaaaaaaggcatcaaaattgaaaggaaggatatagttacctctgttaacagaagacatgattattatacattaaaaactctaaagactccacagaaaatggttagaaataatgcagtcagtctttcatatctgctggggatttgtttcaggaccccctcagataacaaaatctgtgatgatcaactccctcacataaaatcgtgtacagttggccctatgtatccatgggtccacatctgtggattcaaacaaccacagatggaaaatatgtacaagttaggttcatggttgattgagttaatggttgcagaacccattgatatgaaggactgactatataa

SEQ ID NO: 268515 - DNA, 556 bp, Homo sapiens
agaagacatgattattatacattaaaaactctaaagactccacagaaaatggttagaaataatgcagtcagtctttcatatctgctggggatttgtttcaggaccccctcagataacaaaatctgtgatgatcaactccctcacataaaatcgtgtacagttggccctatgtatccatgggtccacatctgtggattcaaacaaccacagatggaaaatatgtacaagttaggttcatggttgattgagttaatggttgcagaacccattgatatgaaggactgactatataataaatatactaaagttgtaggatacacaattgacatacaaaaatcattgctatttctaaacactaacaatgcattgtctgaaagggaaatttaaaaaatagtgtcaaataaactactttggaactaactgaccgaagaagtgaaagacttaaacactacaaattatgaaagattgatgacagaartttaaaccaaagtaaattgaaagacaacccatggattgaaagagttagtattgtattattaaagtgtccatattactc

SEQ ID NO: 268516 - DNA, 574 bp, Homo sapiens
taaaccaaagtaaattgaaagacaacccatggattgaaagagttagtattgtattattaaagtgtccatattactcaaagcaatctacacatttaatgtaatccatatcaaaattccaatggtactcacagaaatagaaaaaaaaatcctaaaattcatatagaatcacaaaaatccctgagtggctgaaggtattttgagcaagaacaaagctacaggtatcacasttcctgacttcaaattaaattacaaagctgtagaaagaaaaacactgtggtactggcataaaaacagacacataaaccagtgaaacaaaatagagaacctaggcataacccacacatttgcagcaattgatcaccctggaaggtgacaaggagagactataggcagaggatatgctcttgaacaaatggtgttaggaaagctggatgtctacatgtaaaagaatgaaatcggatccctagctcacgccttatgtaaaaattaactcaaaatggattaaacgtttaaatgtaatcactgaaaccacaaaactcctggaagaagacaggagaaaaccttcttgacattg

SEQ ID NO: 268517 - DNA, 612 bp, Homo sapiens
tagtcccagctactcaggaggctgaggtaggaggattgcttgagcccaggagttcaaggctgcaatgagctattatcttgccactggactttaccctggatgacagagtgagacccggtttcaaaaataaaaaaaagaactaccacataatccaacaatttcacttctggatatatgtccagtgaaattgacataagagtcttagagaggtgtctgtcatcycctgttcattgcagcacgacacacaatgaccaaaatatgaaaataacctaaatgtcctttggcagaggaacagatgaatgggtaaagaaaatgtgacatgtatacataaaatgaaatattatacaaccttaaaaaagaaagaaatccttctatttgtgaaaacatggatggagctggaagatattgcaccaagcaaaaatgcaagacacagagacaactacttcatgatttcacttacatgtggaatctacaagagtcaaattcttaaaaacagagaacaggacagtgtttgccaggggctcagggaggggaaatggggtgatgttaattaaattgtgcaatgttcaagttataataatttctggatatataatgtacaacatggaacaa

SEQ ID NO: 268518 - DNA, 612 bp, Homo sapiens
tagtcccagctactcaggaggctgaggtaggaggattgcttgagcccaggagttcaaggctgcaatgagctattatcttgccactggactttaccctggatgacagagtgagacccggtttcaaaaataaaaaaaagaactaccacataatccaacaatttcacttctggatatatgtccagtgaaattgacataagagtcttagagaggtgtctgtcatctcctgttcattgcagcacgacacacaatgaccaaaatatgaaaataacctaaatgtcctttggcagaggaacagatgaatgggtaaagaaaatgtgacatgtatacataaaatgaaatattatacaaccttaaaaaagaargaaatccttctatttgtgaaaacatggatggagctggaagatattgcaccaagcaaaaatgcaagacacagagacaactacttcatgatttcacttacatgtggaatctacaagagtcaaattcttaaaaacagagaacaggacagtgtttgccaggggctcagggaggggaaatggggtgatgttaattaaattgtgcaatgttcaagttataataatttctggatatataatgtacaacatggaacaa

SEQ ID NO: 268519 - DNA, 444 bp, Homo sapiens
aaattttctacattcaaactaatagtagaaaactctccaagatacaattttaaggaaaaaaaatcaaagtcaagaagactatagaggargctgcctttagtgtaaaacagttgaaaattataaatatattcatatgtttataaagaaattttaggaggctataaaaaaacaaaacaaagggaaagaggaacaggagctgggacacaggtgagtaaggtgtatggtaggcatatgtcttcatcttcatatgcttttatttaaaaatgttggaccacgtgtacgtgttatctattttaaaaattagattttaaaatacaaacaagaaaacaagaaaatgaaagtttaaaaagagcatgtggaactaccagaaaaagatactaatccatggagataatggcaaggtagctcctagatgcactgatttctctaccacattgtataaac

SEQ ID NO: 268520 - DNA, 444 bp, Homo sapiens
aaattttctacattcaaactaatagtagaaaactctccaagatacaattttaaggaaaaaaaatcaaagtcaagaagactatagaggaagctgcctttagtgtaaaacagttgaaaattataaatatattcatatgtttataaagaaattttaggaggctataaaaaaacaaaacaaagggaaagaggaacaggagctgggacacaggtgagtaaggtgtatggtaggcatatgtcttcatcttcatatrcttttatttaaaaatgttggaccacgtgtacgtgttatctattttaaaaattagattttaaaatacaaacaagaaaacaagaaaatgaaagtttaaaaagagcatgtggaactaccagaaaaagatactaatccatggagataatggcaaggtagctcctagatgcactgatttctctaccacattgtataaac

SEQ ID NO: 268521 - DNA, 444 bp, Homo sapiens
aaattttctacattcaaactaatagtagaaaactctccaagatacaattttaaggaaaaaaaatcaaagtcaagaagactatagaggaagctgcctttagtgtaaaacagttgaaaattataaatatattcatatgtttataaagaaattttaggaggctataaaaaaacaaaacaaagggaaagaggaacaggagctgggacacaggtgagtaaggtgtatggtaggcatatgtcttcatcttcatatgcttttatttaaaaatgttggaccacgtgtacrtgttatctattttaaaaattagattttaaaatacaaacaagaaaacaagaaaatgaaagtttaaaaagagcatgtggaactaccagaaaaagatactaatccatggagataatggcaaggtagctcctagatgcactgatttctctaccacattgtataaac

SEQ ID NO: 268522 - DNA, 588 bp, Homo sapiens
ggaaacctagtagtatttgtctctagacctgcagctgaactgagcattttagggarggaacaaacatacacacgatatatatatagtcagattatgaacccagtgtagcccagaatgcaaaaatttctcagtaacagagatccccaagagaaaaatatgatttagcttatctcagtggcctttcatgtggcaaatgaaaagttaaagtccataatgagaaatatatgggaagccagtgacaccatccattcaatgtagactctcaacatctgtgacaatcattccctgttgtaccccaacctgcttatatattggggtgatatcatcttttgatcataacatacataaacctcaagcttcagtaagaaatatttatgaacaaccagatattctgtgcttccagtcaaaactcaggtagatcacattttatgtgacaggagaaggcacagttgatgcccagttaaccctgagatcatctctgcctgcagcttcctatcatcatagcaagctctttccctgcagtccaccatttgtatctgccctttgctatatagatagcaaaaataagcatctgaaaagatgcttaac

SEQ ID NO: 268523 - DNA, 332 bp, Homo sapiens
ttggcttcaaattataccctcatagattctacaaacagtgagttttcaagcatctgaagcaaaataaaggtttaactttgtaagatgaatctgcacattattgctggatattcggtttttcactgtaggcatcaatttgctctgawatgtcctattgaagattttaccaaaagagtgtttccatcctgctgagtcaaaagaatggtttaattctgtgagatgaaatcaccaatcataaatcattttcagagacagcttcatatagtttttatctcagaatattcggtttttcactataagcctcaatgggctttgaaatacatcctcataaa

SEQ ID NO: 268524 - DNA, 641 bp, Homo sapiens
agatcataaaacattttcacagttggcttgtttctagtttttatcacgtgatactcagtttttcatgacagggcacaatgggctccaaaatgtccctttgtacattctacaaaaagaatgattttggtctgctgaataaaaacaaaggttttatactgtgagaggaatccacacataggaaggaattttcacagatagcttgtgtctagttttcattgcaggatgttcagttttttcatatacttcttgatggactctgaaatgtcccttcatagactacaaagaaagcatttacaacctgctgaataaaaacaaaggtttaaccctgtgagttgaatccacacatcacaaagcattctcatatatagcttgtttctagtttttatcttgagatataacrtttttaactttaggccttaattttctctgaaatgtgccattttagtttctacaaaaacagtgtttcaacctgctgaattaaaacaaggtttaactctgtgatatgaattgacacatcacaaagtattttcacagatagatttttactagtttttgtcatgggattttcagtttttcactaatgtttttcatgtactctgaaatgtccctatgtagattttacaaaaagagtgtttccgacc

SEQ ID NO: 268525 - DNA, 641 bp, Homo sapiens
agatcataaaacattttcacagttggcttgtttctagtttttatcacgtgatactcagtttttcatgacagggcacaatgggctccaaaatgtccctttgtacattctacaaaaagaatgattttggtctgctgaataaaaacaaaggttttatactgtgagaggaatccacacataggaaggaattttcacagatagcttgtgtctagttttcattgcaggatgttcagttttttcatatacttcttgatggactctgaaatgtcccttcatagactacaaagaaagcatttacaacctgctgaataaaaacaaaggtttaaccctgtgagttgaatccacacatcacaaagcattctcatatatagcttgtttctagtttttatcttgagatataacgtttttaactttaggccttaattttctctgaaatktgccattttagtttctacaaaaacagtgtttcaacctgctgaattaaaacaaggtttaactctgtgatatgaattgacacatcacaaagtattttcacagatagatttttactagtttttgtcatgggattttcagtttttcactaatgtttttcatgtactctgaaatgtccctatgtagattttacaaaaagagtgtttccgacc

SEQ ID NO: 268526 - DNA, 410 bp, Homo sapiens
ccacacattggaaagcattttcacagatagcttgtttgtagtttttttctccacatgttttgtttttcactataggcttcaatgggctttgaaatatttctttgtagattytgcaaaaagaatgtttccaacctgcatatttaaaacactggtttaactctgtggcatgaatccacaatggcaaagcattttcacagatagcttttttcctggtttttttttttttttttttttttttttttttgggtggggggagatatttgatctttcactgcaggtctcaatgggctctgaaatggcccttcataaattctacataaagagtgtttccattctgctgaatcaaaacaaatatttaactctggaagatgaatccacacatcccaaagcatttttacagataggttgtt

SEQ ID NO: 268527 - DNA, 410 bp, Homo sapiens
ccacacattggaaagcattttcacagatagcttgtttgtagtttttttctccacatgttttgtttttcactataggcttcaatgggctttgaaatatttctttgtagattctgcaaaaagaatgtttccaacctgcatatttaaaacactggtttaactctgtggcatgaatccmcaatggcaaagcattttcacagatagcttttttcctggtttttttttttttttttttttttttttttttgggtggggggagatatttgatctttcactgcaggtctcaatgggctctgaaatggcccttcataaattctacataaagagtgtttccattctgctgaatcaaaacaaatatttaactctggaagatgaatccacacatcccaaagcatttttacagataggttgtt

SEQ ID NO: 268528 - DNA, 574 bp, Homo sapiens
ttccaaattgttgaattaaaacaaaggtttaactgtgtgacattatttcacagatcacaaagcattttcacagayagcttgtttctagtttttatcgcaggatatttggttttaaactccaggcctcaatgtgcttcaaaatgtctcatcttagattctacaaaaaaacatgtttccaacatgctgaatcaaaacaaaaagttggctctgtgagataattccatgcctcacaaagccttttgacagatagcttgcattaagttttcatcacgggatattccatttttctctataggcatcagtgggctccaaaatgtccctttgcagatcctacagtgaaagtgtttctaaactgctgaattaaaacaaagatttagctttgtgagataaatccagacatcacaaagcatttcactgatagtttgtttccagtttttatcacaggatagtcagtttcttactataggcctcaatttgctctgtaatatcccctcttagattccagaaaaggagagtttccagcctactgaatcacaagaaatgtttaactctgtgagataaaatcacacattgg

SEQ ID NO: 268529 - DNA, 630 bp, Homo sapiens
gggtcaaaatagttttcaagtcactgacttaagattttatcctaggggatgaggaaattagtctaagtgattacctctttctggtgggatgtttgtttaatctgtcatcttagaaaacactgctgagttcctaytttcagttcattattgtatactaccaaagctgctactcaaaggctgagcttatcttctatttgcttgttctgcgtggtgcccactggtccttactgcttttgatatagttatctactttttaaagacagtttagcactcacatatttttgttcaatctttacttctcacacaaacagaaaaaggaaattatgtattctgtatcaacaaagatttaacaaaacatccatgtactacaactgtctacttactaaaatcaagaattagtatcttttttcttcttatattaaaactatcttttcatacgctatttttagcttatgaactgaaagtcttttagagataatttacttcaatgaactattattatttatattttataagcaaattgtcacaacttggtcttagctagctccaacgttcacttacagtctgtaatgtttctgaaagcatccatgatttcagctacaaagaagatacttaggaactattctgttt

SEQ ID NO: 268530 - DNA, 472 bp, Homo sapiens
agtcactgccagctctgcagcatcatgaaacccctgagtccttcacaactcccagatcatctcatccttcctccttgctctgggaagaccatgtctgagtagttccaaccaacctctcaccttaaacccagtccctgacaaccagaagtacctccttagtctggacttgaccttccttgctgtcatggtccatcagcaatgaccagggctgaagcagcaygttttttctacaaacacccctccctcccagtgacgctcgtccaatcctcagtggtcaggcagggagtggggacagcttcctgccaagagctctggaaggcagctctgcctcctctgcttgaagcaggctcctgtatactctgagatggtggtgttcattttaaagaagggaccatctttcctccacagctcagcttacatttggagggagacaaatgtgagtttccaatcccagaatcttagccactgtacc

SEQ ID NO: 268531 - DNA, 584 bp, Homo sapiens
ttttacattaagttgtataaaatatactatgttataaaatgcaaagtttgcatcattttagagctaaaacttaaggccacaaaaagaatctgctattttcttattaataaaaaatcctatttttatataatgcaaataatgaagatgaagtaacctattatttaattaaacatgtctttaaaaaaaaagaaataattggtccttgctaatggcccttcagggcaagcccccagagtgctggggcccaagtttaccctcctgcctctaatatcaaagggactttggcagaaaagtttgagaaaccctgtcaggaacagagcctacacaaggaccaggaaatctgacttcttcattctttaaaagaacaaaacaaatagcaacattgttttttctaccttcctactgttttaccttcaagtttarcattaagaacatgaaatgttgtgtttaaatttatgattcttatttctggttcctttctgtttaataattactagctgaatcattaatcatcaaccaagtgaatggtcacactttatagaaggctacaaggtggaacacaagattagttggattcttaagaa

SEQ ID NO: 268532 - DNA, 381 bp, Homo sapiens
ggctctgttaggattatcatctggtttcccctgctggtgttggaagrgctgtgttggtgcaggccagtgctatcctgtgactagagggaagaagctccgcctgggcctgatttggccacaagctcctagtaagatgctgaaaaggaacacaaactctaggcccaggacaccctccccatgccatcccactcctgacttctgtgcaccttgtgagcagatcagatttggtgttgcttcttccacatcatcctcgcatcccctttcacagactcggatagatcccctcatgggaacctatggatctatggcatatctatggatatgccaccccatggcaactgtcctttagccttcatagcatacatcaccctgaattatagc

SEQ ID NO: 268533 - DNA, 381 bp, Homo sapiens
ggctctgttaggattatcatctggtttcccctgctggtgttggaagggctgtgttggtgcaggccagtgctatcctgtgactagagggaagaagctccgcctgggcctgatttggccacaagctcctagtaagatgctgaaaaggaacacaaactctaggcccaggacaccctccccatgccatcccacwcctgacttctgtgcaccttgtgagcagatcagatttggtgttgcttcttccacatcatcctcgcatcccctttcacagactcggatagatcccctcatgggaacctatggatctatggcatatctatggatatgccaccccatggcaactgtcctttagccttcatagcatacatcaccctgaattatagc

SEQ ID NO: 268534 - DNA, 381 bp, Homo sapiens
ggctctgttaggattatcatctggtttcccctgctggtgttggaagggctgtgttggtgcaggccagtgctatcctgtgactagagggaagaagctccgcctgggcctgatttggccacaagctcctagtaagatgctgaaaaggaacacaaactctaggcccaggacaccctccccatgccatcccactcctgacttctgtgcaccttgtgagcagatcagatttggtgttgcttcttccacatcatcctcrcatcccctttcacagactcggatagatcccctcatgggaacctatggatctatggcatatctatggatatgccaccccatggcaactgtcctttagccttcatagcatacatcaccctgaattatagc

SEQ ID NO: 268535 - DNA, 233 bp, Homo sapiens
ttcccacaaacagaggtttaatgtgctgttaccaagaactcccaggccccctgcagctctgggaagttgaaggggctggggagaagaggtcagtctgtgygcatcccatcgaagctgatcccactggcattggacctggagtggataacccaaataagtgtctccgtccttgctgctccatccagaatggtgatgacagggggcagggcagggaaaagcatgctcacaaaggg

SEQ ID NO: 268536 - DNA, 233 bp, Homo sapiens
ttcccacaaacagaggtttaatgtgctgttaccaagaactcccaggccccctgcagctctgggaagttgaaggggctggggagaagaggtcagtctgtgcgcatcccatcraagctgatcccactggcattggacctggagtggataacccaaataagtgtctccgtccttgctgctccatccagaatggtgatgacagggggcagggcagggaaaagcatgctcacaaaggg

SEQ ID NO: 268537 - DNA, 233 bp, Homo sapiens
ttcccacaaacagaggtttaatgtgctgttaccaagaactcccaggccccctgcagctctgggaagttgaaggggctggggagaagaggtcagtctgtgcgcatcccatcgaagctgatcccactggcattggacctggagtggatarcccaaataagtgtctccgtccttgctgctccatccagaatggtgatgacagggggcagggcagggaaaagcatgctcacaaaggg

SEQ ID NO: 268538 - DNA, 526 bp, Homo sapiens
ctagtgtggcaccaggatagaaatatctctaccaaagcccgatgccaactgtgctcacaggacacaggagagaggccactcagcaaagctgtgaccatggaggaaccacaaccaccaccagagcttcaggcaggcaaaaaggggggctgacagggaatggggraaacaaataccctgactcctctctccccgttctcagctgggacctctattggccgagagatcagggggcccaggtgacacagtctgcagaggtcagcctccctgggcagagcagcacagagaacacagtgaggcaaacagaaaaccatccccgtcccattccacccgcgagtccctgctctgataccaaagccttctctctgctgctttattgccacctctgtcactgcctgcagccaaacagtgactgacagggaaggagagtcaagagtccttcaacgcaaatactccagctcacaaggaaggtgggatccaggcagagggcagcttgagggaagagggctgtgtctgaagggcagcaggg

SEQ ID NO: 268539 - DNA, 330 bp, Homo sapiens
tagtttcaagtgtagtccccatgcaaagcccacctggcgaagtggttagacacagatgctggggctgggctcargatccctgttctaccacctgttggctgtacaaccttgggcaagatacttgattaccatgcctcagtttctgcatcttaaaaaatgtgaataacagtaatgcctacttcacatggtggtgaaaaagtagatgagttaatagttatgagatacagccaggcctggtggcctgggcccatagtcctagctactcagaaggctgaggtggaaagattgcttgaacccaggagttcaagaccagcctgggtaacatagcaa

SEQ ID NO: 268540 - DNA, 330 bp, Homo sapiens
tagtttcaagtgtagtccccatgcaaagcccacctggcgaagtggttagacacagatgctggggctgggctcaggatccctgttctaccacctgttggctgtacaaccttgggcaagatacttgattaccatgcctcagtttcygcatcttaaaaaatgtgaataacagtaatgcctacttcacatggtggtgaaaaagtagatgagttaatagttatgagatacagccaggcctggtggcctgggcccatagtcctagctactcagaaggctgaggtggaaagattgcttgaacccaggagttcaagaccagcctgggtaacatagcaa

SEQ ID NO: 268541 - DNA, 330 bp, Homo sapiens
tagtttcaagtgtagtccccatgcaaagcccacctggcgaagtggttagacacagatgctggggctgggctcaggatccctgttctaccacctgttggctgtacaaccttgggcaagatacttgattaccatgcctcagtttctrcatcttaaaaaatgtgaataacagtaatgcctacttcacatggtggtgaaaaagtagatgagttaatagttatgagatacagccaggcctggtggcctgggcccatagtcctagctactcagaaggctgaggtggaaagattgcttgaacccaggagttcaagaccagcctgggtaacatagcaa

SEQ ID NO: 268542 - DNA, 330 bp, Homo sapiens
tagtttcaagtgtagtccccatgcaaagcccacctggcgaagtggttagacacagatgctggggctgggctcaggatccctgttctaccacctgttggctgtacaaccttgggcaagatacttgattaccatgcctcagtttctgcatcttaaaaaatgtgaataacagtaatgcctacttcacatggtggtgaaaaagtagatgagttaatagttatgagatacagccaggcctggtggcmtgggcccatagtcctagctactcagaaggctgaggtggaaagattgcttgaacccaggagttcaagaccagcctgggtaacatagcaa

SEQ ID NO: 268543 - DNA, 582 bp, Homo sapiens
ggattctgggctcagtgatacatccaagaacataactttccctcgaccctggagtcttcacagaccttccttccactgtgaggcactggagaatcacttgagaccagactcagggaactcttccctcatgggaagacattcattcatccactcyatgtctctgaagccccaagagaaggatctgaatcccctagtctgaagagtcagcaagtttccaacatagcaatcgtgataaaaagggagaattgataaaggagggagcagccccacctcagtaacaatagaggtaggaaaattccagctagtacatgtacttaatatgaaagcagacatgtgccaagaccgtgctttcatggatattaggtgttcccaaatataagaaacacccattcttgcccacaggcctcactggatactatccaagatgtctagagaatgagaggaaagagagaatagtaatatccaaaaggtgaaaacaacacaaatgttcaccaatagaagaacggataaacaaagtgtgatatatccatacaatggaatattagtcagccttgaaaaggaatgaagtactgataaatgcta

SEQ ID NO: 268544 - DNA, 582 bp, Homo sapiens
ggattctgggctcagtgatacatccaagaacataactttccctcgaccctggagtcttcacagaccttccttccactgtgaggcactggagaatcacttgagaccagactcagggaactcttccctcatgggaagacattcattcatccactctatgtctctgaagccccaagagaaggatctgaatcccctagtctgaagagtcagcaagtttccaacatagcaatcgtgataaaaagggagaattgawaaaggagggagcagccccacctcagtaacaatagaggtaggaaaattccagctagtacatgtacttaatatgaaagcagacatgtgccaagaccgtgctttcatggatattaggtgttcccaaatataagaaacacccattcttgcccacaggcctcactggatactatccaagatgtctagagaatgagaggaaagagagaatagtaatatccaaaaggtgaaaacaacacaaatgttcaccaatagaagaacggataaacaaagtgtgatatatccatacaatggaatattagtcagccttgaaaaggaatgaagtactgataaatgcta

SEQ ID NO: 268545 - DNA, 518 bp, Homo sapiens
attgctggtaaatattaaggaattaaaaaaaatggaagagtcaaatgcaayggttccattcctttggaaaacgtttgagactagttaagagtttggcctaagtgaatgaatgtcctaaaatctacacttgtggcaggatcttcccttccagaggcaaaccttcactgtgtggagctcccagggtaaaaagaccattgtcgagtgcatgtatataggttccctcatccatttcaaaggctatggttcctggaatttcaccaaagtttgttaatgtccaccagattcctaaaaaataaaattgatatttcaacttcatattttagttttgacagagagttctttgttattataacttagtttaaaaaactttttattttgcagtcataagaaataatacgaagatctcacataccctttactcactttgtctcaatgatgacatcttgcataagtatcatacattgttagaatcaggaaactgacattgatataatccatgaagcttattcagatttcac

SEQ ID NO: 268546 - DNA, 594 bp, Homo sapiens
gtagccctctccctacataaacaccatttcttcatagtgaactatagagaaacttagaaggcaagacctcaactgcctaagtggacataaatgtaaaatttttaggtcttgtgcaggtcctgactcagagtgaagaacgtgaagcccttgctgcctcaggtgaggaacctaaatggatgtcaaataaactcagtaatcaaggtaaatgataatgtaatattttattaaatcaaaattaatgcaggaaatccatgatgaacaacatattaacattttaaataaagacaaaatcaatattactgaggttttctttcacttcatgcttctaatgtggcttggcaatggtgctgtgttgttactgatcctatcagactactgagcatctgctagagatgataacagtagagtcaaagggtgagtcaaagagtgcrtacatttaaaattcagataataatcatatttaatgactacagcttgaggttttaaaatttcttcatatctgtaggtgtagtgtctttatctattttaaaaattttcttctttctttctacttttcttggaaattgtcaaaagtgtactgtattagccttttca

SEQ ID NO: 268547 - DNA, 594 bp, Homo sapiens
gtagccctctccctacataaacaccatttcttcatagtgaactatagagaaacttagaaggcaagacctcaactgcctaagtggacataaatgtaaaatttttaggtcttgtgcaggtcctgactcagagtgaagaacgtgaagcccttgctgcctcaggtgaggaacctaaatggatgtcaaataaactcagtaatcaaggtaaatgataatgtaatattttattaaatcaaaattaatgcaggaaatccatgatgaacaacatattaacattttaaataaagacaaaatcaatattactgaggttttctttcacttcatgcttctaatgtggcttggcaatggtgctgtgttgttactgatcctatcagactactgagcatctgctagagatgataacagtagagtcaaagggtgagtcaaagagtgcatacatttaaaattcagataataatcatatttaatgactacagcttgaggttttaaaatttcttcatatctgtaggtgtagtgtctttatctattttaaaaatttycttctttctttctacttttcttggaaattgtcaaaagtgtactgtattagccttttca

SEQ ID NO: 268548 - DNA, 596 bp, Homo sapiens
tggaatactacacagccataaaaaggaacaagtggtacaacaatgatggacctcaagaatgttataagtgaaagaagactgatacaaaaggtcacatgttgcatgatttcttaggaaatattcagaataggcaatttyacatagatagcagactagtggttgccaaggactaggagagagggaggatgggatgtgactgctttaatgggtaggaagagatttccttctgagatgacgaaaatgctgagcaactagacagtggtgaacctcttgaatatgtactaaaaaccactgactgtacaaaagggtgaatttcataattatgaattacatcgcaataaaaaaataaaaacccaggagcgatttgaaaaaagttaatgtgcaaagtgcctacaacaatttcttggcgcattgaaagtgctatataagcattaattatgattattacgataatcttaagacactcttgtctccattttcatcataaagttttcagaagataactcaccactcctcacaggaaattcacagagtaaaaatctcacattcattcaggatatacctgccatttattctggcatcttcatgaggccaga

SEQ ID NO: 268549 - DNA, 596 bp, Homo sapiens
tggaatactacacagccataaaaaggaacaagtggtacaacaatgatggacctcaagaatgttataagtgaaagaagactgatacaaaaggtcacatgttgcatgatttcttaggaaatattcagaataggcaattttacatagatagcagactagtggttgccaaggactaggagagagggaggatgggatgtgactgctttaatgggtaggaagagatttccttctgagatgacgaaaatgytgagcaactagacagtggtgaacctcttgaatatgtactaaaaaccactgactgtacaaaagggtgaatttcataattatgaattacatcgcaataaaaaaataaaaacccaggagcgatttgaaaaaagttaatgtgcaaagtgcctacaacaatttcttggcgcattgaaagtgctatataagcattaattatgattattacgataatcttaagacactcttgtctccattttcatcataaagttttcagaagataactcaccactcctcacaggaaattcacagagtaaaaatctcacattcattcaggatatacctgccatttattctggcatcttcatgaggccaga

SEQ ID NO: 268550 - DNA, 537 bp, Homo sapiens
aattatttttacataattttattatgtggacagccattcttataactaaaactttcggatgtttatattacaagtacaattattatttattattattaatgtcagtagccaaatgtaatcaactctcttccttttacttccttttttgaatcaaaatattacacttatagaagcaagagcaacggctctatatctggatcactgccgtgcctagaagatacaacagcacaatttacaaatcyaaatttccaggaagtctctccacatacctctagtacaaaagatgcttcagagactagagggtcagtggggaaagagagaaaatattcaactcctagttcaggacaaaagggaagaaagccggctgttgaaagaaatccaagaatgactgtcgcaactcgctcctttctgtaaagtattcatggtgttttacttaaaatatttgctcttatgatggtcaataatattaatagttatgctttgtaaaagaatttattctttacttataattaatggatcattctaagttattatatg

SEQ ID NO: 268551 - DNA, 546 bp, Homo sapiens
tattcatggtgttttacttaaaatatttgctcttatgatggtcaataatattaatagttatgctttgtaaaagaatttattctttacttataattaatggatcattctaagttattatatgtttagttgctatagtaagatgatgtgaaagatttgttgcctgttaaatatttctgggatctttgytttattttaatattatgatttgtgcttccaaagttgagctgtaattttattgtttatacaaatgtagaataaagcttaagtttggggagaaaaataaaagctagagttttcctttcagctatagaacagtcatttatttctataaatgcttttttatgtagctttcctagttccacatttaaaaagataaatatggggatctacacaggtctcagtaaataatagttcttgattaataatgcatttagtataaagcttgaagtttaaagtagaattttgctcagcctacatcttttatggtcaggctgctataattatgtaatacccagttaaatttcaatttcagataaacaagcaata

SEQ ID NO: 268552 - DNA, 546 bp, Homo sapiens
tattcatggtgttttacttaaaatatttgctcttatgatggtcaataatattaatagttatgctttgtaaaagaatttattctttacttataattaatggatcattctaagttattatatgtttagttgctatagtaagatgatgtgaaagatttgttgcctgttaaatatttctgggatctttgttttattttwatattatgatttgtgcttccaaagttgagctgtaattttattgtttatacaaatgtagaataaagcttaagtttggggagaaaaataaaagctagagttttcctttcagctatagaacagtcatttatttctataaatgcttttttatgtagctttcctagttccacatttaaaaagataaatatggggatctacacaggtctcagtaaataatagttcttgattaataatgcatttagtataaagcttgaagtttaaagtagaattttgctcagcctacatcttttatggtcaggctgctataattatgtaatacccagttaaatttcaatttcagataaacaagcaata

SEQ ID NO: 268553 - DNA, 327 bp, Homo sapiens
tccccgggccaaccccccaggagtccagtcttcaggacctccttgagccgacttccacckatggagggggatcttcagggtgcctgctgggttctcaggactcctcttcagatcctagtttggacccctccgggttagaaaggatgggctcagcacatctggtgaggcaggcaggtcctcgctgcagcacagaatgatcccatggccctcaaggcgtggtgtcagctgaaagttcactgatccgtgagccctctgcctccctcctccgttgaaagagcagtggcgtgccccgcttctaaaagccctggggctcctgcaagcggacac

SEQ ID NO: 268554 - DNA, 524 bp, Homo sapiens
ccaggcaggttacaggaccttgccactgccacgggcataaggggaggggtgtgaaaagcgtgacttgtccagagaggccagcattccagggacagggattgttgccgtctcccattcccggcttactcctcagaattgtatcgtggtgtggcttcattgctcagagaagagccgtgcaggggtacaaccatcttcttggaggtgggtctgctcctctcctgccggacaatgagctgctgttgggttttgtcctgggctggagtgtggtcctcttgatcctagaaaagaggccgctcaggatggggatgagacttcgattgctccgggaccgacgcgtctcctcacgtgatcgaggacttcaaaaacccaaagtggaaccgccgtgaaaatgatggacaaccggccacgggacccaggcagagamgcagaaagaggctcaacaaagactggccgacatggaaaaaatcgcattttggcgaacagagcacattcgtccaaagatacacacgcacacgggcatacac

SEQ ID NO: 268555 - DNA, 477 bp, Homo sapiens
ggggaagagagtgacagaaagataaacagtgagacagaaagaaagaccagaaattaccagtgtgagaaattaayaaaggagaggacatcactacagtttctgtagacatcaaaacaagtataaaagatttatagtggccccagctagtgggataaggcaattaaaagaagttaaatttgtaaatattgaaaaggaaagtaaatgcttttttggagatggcatggctatgtacaaatgtcaaaaattatctacaaacaattagaaataaaagccagtttggtaaggtgactggatttataacaaatgcacaaaaagcaaaaatcaattgtatacctattacaattttgtttgataaagtagaaataattcatcacaaacaaggacagaaaagaaagggaataaacacgtccttaaattttgtaccctaggtgcctctcttgcttcacccaaggctcagtcctgatgaaaatggctcat

SEQ ID NO: 268556 - DNA, 636 bp, Homo sapiens
ctttgtgtcccttcacaaaacaaattgcttaaatgaaactacagagttaatataattgagtacatttgcttctatgagatgctcttttaagtggaattagaatctaatttgaaatgtcaattaaaagtttaaatattcaactcaataacatttagatttttgttttgttttgttttgagagggagtttagctcttgtcacccaggctgaagtgcaatggcacaatctcagctcactgcaagcaccttctcctgggttcaagcgattctcctgcctcaacgtcccgagtagctgggattacaggtgcctgccaccacacccrgctaatttttgtattttcagtagagatggggtttcagcatgttggccaggctggtcttgaactcctgacctcaggggatccacccacctcggcctcccaaagtgctgggatttggggcatgagccaccatgctcggcctttttagattactttactttattttagttacttatctttatgactttattgttataaaaatgctaattttaaaaaatcaatataacaaagaacatagaagatgatcaacaagcattcccacctctgtgatctagaaataactgtcatcaatccaaaagcttacacatggcggattcc

SEQ ID NO: 268557 - DNA, 479 bp, Homo sapiens
ccatgtcacccacccatcttcggttttgtttgtttttacagagatgaggtctcactatattgcccaggctggtattgaactcctggccttaagcgatcctcctgccttggcctcccaaagtgctggagttacagatgtgagcctctgtgctcagcccatccttggctgttcaagtgtagaggtaagtagtagatgccaagtttacctccaggccagaaggggctkatgccccagggcagaatcataaccctaaccaggcctcccactgcatgaagacattatgttctgaagcttaaacctggacaaaggtctgaccagtagcactgtgttcatgaatatcaggtcaaaaatttaaaactgtgactatccagaagaacctggtagatgtatgtgcagtccacagtccaatggtcagccttgataacaagccacctgtactttctttttatcatggagtctttgacgtaaaaattgatgac

SEQ ID NO: 268558 - DNA, 479 bp, Homo sapiens
ccatgtcacccacccatcttcggttttgtttgtttttacagagatgaggtctcactatattgcccaggctggtattgaactcctggccttaagcgatcctcctgccttggcctcccaaagtgctggagttacagatgtgagcctctgtgctcagcccatccttggctgttcaagtgtagaggtaagtagtagatgccaagtttacctccaggccagaaggggcttatgccccagggcagaatcataaccctaaccaggcctcccactgcatgaagacattatgttctgaagcttaaacctggacaaaggtctgaccagtagcactgtgttcatgaatatcaggtcaaaaatttaaaactgtgactatccagaagaacctggtagatgtatgtgcagtccacagtccaatggtcagccttgataacaarccacctgtactttctttttatcatggagtctttgacgtaaaaattgatgac

SEQ ID NO: 268559 - DNA, 544 bp, Homo sapiens
attgatgacactttcttgcttctgatgtgcttccctttcttcttcattttccataagtagtttcctccatcccgcctcccaacaggccacagtcaattcaggacattttaaccatgaaaatgagtctccataacacgaatttagaggccagacagggtggatcacgcctgtaatcccagcaytctgtgaggctgaagtgggggaatggcttgaacttaggagcttcagaccagcctgggcaacatggtgaaaccctgtctctaacaaaaaataaataaataaataaaaataagccatgtatggtggtgcatgctactagtcccagctactcaggaggctgaggtgggaggattgtggggtcaaggaggtcaagtatggagtgggccaagatcatgccactgcaatccagcctgggtaatggagtgagaccttatatcaagaaaaagaaaaagatttaaaggacaggctgactttcttgttacaagccaatgctcatttgctattccataaatcctagggcacctcttaagaattatgctaaatc

SEQ ID NO: 268560 - DNA, 544 bp, Homo sapiens
attgatgacactttcttgcttctgatgtgcttccctttcttcttcattttccataagtagtttcctccatcccgcctcccaacaggccacagtcaattcaggacattttaaccatgaaaatgagtctccataacacgaatttagaggccagacagggtggatcacgcctgtaatcccagcattctgtgaggctgaagtgggggaatggcttgarcttaggagcttcagaccagcctgggcaacatggtgaaaccctgtctctaacaaaaaataaataaataaataaaaataagccatgtatggtggtgcatgctactagtcccagctactcaggaggctgaggtgggaggattgtggggtcaaggaggtcaagtatggagtgggccaagatcatgccactgcaatccagcctgggtaatggagtgagaccttatatcaagaaaaagaaaaagatttaaaggacaggctgactttcttgttacaagccaatgctcatttgctattccataaatcctagggcacctcttaagaattatgctaaatc

SEQ ID NO: 268561 - DNA, 544 bp, Homo sapiens
attgatgacactttcttgcttctgatgtgcttccctttcttcttcattttccataagtagtttcctccatcccgcctcccaacaggccacagtcaattcaggacattttaaccatgaaaatgagtctccataacacgaatttagaggccagacagggtggatcacgcctgtaatcccagcattctgtgaggctgaagtgggggaatggcttgaacttaggagcttcagaccagcctgggcaacatggtgaaaccctgtctctaacaaaaaataaataaataaataaaaataagccatgtatggtggtgcatgctactagtcccagctactcaggaggctgaggtgggaggattgtggggycaaggaggtcaagtatggagtgggccaagatcatgccactgcaatccagcctgggtaatggagtgagaccttatatcaagaaaaagaaaaagatttaaaggacaggctgactttcttgttacaagccaatgctcatttgctattccataaatcctagggcacctcttaagaattatgctaaatc

SEQ ID NO: 268562 - DNA, 537 bp, Homo sapiens
tcatgttcttgatgttctcaagtgagctgtctcattttattagaagggaaacagcagccccttgtggacaaaaaaagaaagtgaatgaatttttaggacccggtgcagtggttcaggcctgtaatcccagcactttgggacacctgggcggagggtaacttgagcccaagagttcaagaccagcctgggcaacacagtgacacgccgatctttaccaaaaattgaaaaattctctgggcttggtggctcatacctcagaagccagctacttggaagtctgaggtgggaagatctcttaagcccaggaggtcaaggctgcagtgagtgtgatcataccactgcattccagcctgggtgacacagcaagaccctatttcaaaaaaattatatttatgtagcactttctacaaggaatatagtatcatgtttgtatttaaatracatcaggactagcatggtggcttacacctgtaatctcagctcctcagacggcggaaggcgggaggatcgcttgagtccaggagttggaaggccagc

SEQ ID NO: 268563 - DNA, 537 bp, Homo sapiens
tcatgttcttgatgttctcaagtgagctgtctcattttattagaagggaaacagcagccccttgtggacaaaaaaagaaagtgaatgaatttttaggacccggtgcagtggttcaggcctgtaatcccagcactttgggacacctgggcggagggtaacttgagcccaagagttcaagaccagcctgggcaacacagtgacacgccgatctttaccaaaaattgaaaaattctctgggcttggtggctcatacctcagaagccagctacttggaagtctgaggtgggaagatctcttaagcccaggaggtcaaggctgcagtgagtgtgatcataccactgcattccagcctgggtgacacagcaagaccctatttcaaaaaaattatatttatgtagcactttctacaaggaatatagtatcatgtttgtatttaaataacatcaggactagcatggtggcttacacctgtaatctcagctcctcagacggcggaaggcgggaggatcgcttgagkccaggagttggaaggccagc

SEQ ID NO: 268564 - DNA, 614 bp, Homo sapiens
acaaattagaactacatgtaacaacataggtcaaactcacaatacataatgttaagcagtaaaataaaataaatgggtgtgtatttgtttcctggggctgttgtaacaacttatcacaaacttagtgattttaaacaagataaatttattctctctcagttagagagaccagaagtacaacatttgtttcactgacctaaagtcaagatggcagaagggctatattctcaatggagactccaaaagataatccattcatggcctcttccatcctgtgggccttcctctattttcaaagccagcatcacagcatcttcaaacttctccgtttctattgtcccattgccttctgctccctctgtctcctttttacaaggacatttgtgatggcatttagggctcactcagataacccaggatgatctcctctcaaatttcttttttctttcttcttcttttttttgagacagagtcttgctctgccacccaggctagagtgcaatggtgcgatcttggcttactgcaacctctgcctcctgtgttcaagtgawtctccctgcctcaggctctcgagtagctgggattacaggtgccgccaccaccacacccagcta

SEQ ID NO: 268565 - DNA, 590 bp, Homo sapiens
taaatgttgaagcaatgaggataatcaccccttcactaattaattaggtcttatataataagttttatttatttgaagtcatgttgtaatttctattggaccatatttgctaatwtatcaagatggggaggctaggcaccatggctcacacctgtaatcccagcactttgggaggccaagacaggaggattgcttgaggccagaatttagagaccagcctaggcaacgtagcaagactgcacttctataaattttttttaattggctgtgttggtgcatgcctgtaatcccagctacttggaaggctaaaatgggaggattgcttaagtccaggagttcgaggctgcagtgagctatgattgtgccaccacacttcgttcagcctgggtaatggagcaagaccccatctctaaaaaaatgaaaaattaaaaataaatcaaatttaaaaaaaaacaggagagggagttctgtaaggttacatttgtgaagtcaatgtgtaagtgcaaatggtttaatttcaatttgttactcattaggtcagagcatccatgtcccctatggacaaagtcttctatgactacaggaaattt

SEQ ID NO: 268566 - DNA, 551 bp, Homo sapiens
ttgctttgagctgtaacaaaaataaggtttctgaagaaagaagagatatcagacaaaaagtgatttctctaggaattaaaaaagaagcagaaatagataaagaaaaattgttcttgtgaatttagtgcacagcaaagtattattgtttttagtgccgagtctcttttcccctaaaacctggatatgctgtattctttaagcaaatttcaagaaagaagtgaaaaatctcataggaagagagaaaggaaaatcactctttgaatatacactaaaacctgaatgtacaaatggtatgtatcagtgtaccagggaaaatgcacaatacacttaagttgtttaatttgaatagaatataataaaagagcaatttaaaagctgtggatagtgtatagataaaccaaaagggataattctgtatgtaccctgcaactgttaccttctctaggcctgaarggatgaagggcagtattagttattgaaacttggagacaaaaatgccatgtggagataaccaccttcaagaagtgatccaggacattggtgagagataa

SEQ ID NO: 268567 - DNA, 516 bp, Homo sapiens
gaaaaccttcactgacttaagtgcactcctttctatgtttgcatagatctctttcttaactttaccccattatagtaaaattatgttttcacatttgcctttatacccaaacctccaccaaaatattgtgagctctctcagggtaaggactttgtcttmttattgttatacctggagacagattaaaacaatatgatgtttgtggggaccagggaaaaggggaatgggagaggctcctctggttagtctaaaagaaaagtatcaggcacctacttgaatcctcatttgatttctttctgaccgtgagaggggatgctgagatgcccaaagatgtgcaaatggcgggatccggcgcaccatagtaggcaggggagtgaagatttctcacctcgggtcttcctagaccttcaggtcacacgggaattgttctgtttatagacggcgctggccttagtactcactctccctctattttccttgcttccttataactaggtttccctactcacttcctca

SEQ ID NO: 268568 - DNA, 516 bp, Homo sapiens
gaaaaccttcactgacttaagtgcactcctttctatgtttgcatagatctctttcttaactttaccccattatagtaaaattatgttttcacatttgcctttatacccaaacctccaccaaaatattgtgagctctctcagggtaaggactttgtcttcttattgttatacctggagacagattaaaacaatatgatgtttgtggggaccagggaaaaggggaatgggagaggctcctctggttagtctaaaagaaaagtatcaggcacctacttgaatcctcatttgatttctttctgaccrtgagaggggatgctgagatgcccaaagatgtgcaaatggcgggatccggcgcaccatagtaggcaggggagtgaagatttctcacctcgggtcttcctagaccttcaggtcacacgggaattgttctgtttatagacggcgctggccttagtactcactctccctctattttccttgcttccttataactaggtttccctactcacttcctca

SEQ ID NO: 268569 - DNA, 557 bp, Homo sapiens
catacacactggttccttagaaatgtaaatttgtaaagtcaatgtaaaactgaaacttcaaaagtcaattttcattgctgctgttgtgcatttctattatcaaattttatttacagtgatttacgtgagtaaaaaatggattacacgatttcctaacatctcactaagtatgggtttggatcttaagtaatttacatttttcttttccagttgattgttatactgggctaatgatttccttcaaattccactaataaatcacagattctcagtgctgttattccattgctttattattaaatggcacccttttctagtttttgkttttgcaaaccagtggagtatttaaagtaaaatttcagaatcccttttggagctttcggttgagaccaggctccttggaaccctagtgctttgggagttctgctgctgctgcagtaccaaaagtagcttctttgaatttcatttgggttttgtagggctcccccgaggcccgagaactgggagaagggaaagagctcatcggtttgtttgaaggccggcgggcggtgcaggca

SEQ ID NO: 268570 - DNA, 588 bp, Homo sapiens
ctctttctctgcacatctatgatcagaagcagcaatcagcagacagagcacagatcactgacatttgaaggacaagatcctttttgcccatcctggctccagcaagctgtttcaggaaatgtgtacagctgcctgccatgggggtggtcatgggtagcgtccactacactaagagcygaaattgaccaaaattaaccacaatttaggtccaagccttttcctggaagtcacaaaccttcaatagactctagagttccaaaataattacatcagacagatgctgctgtgcaaatgttgtctagctggggagagacattccagcagcttcctactccaccagaatgctgtctccttctccacattttgtgcagagaacataactggcctccacacaaagtttatttttttctccccatccccagtagtaacgaaggctaagatgttccatttgggagggaggggcagattgggtgtatactggaagtcacagatggtggttgtggatcatggggagggacctcagggttgaggtggctcaaactgttatctgaggtgccttggctaaaggatattatagcaggtagagag

SEQ ID NO: 268571 - DNA, 591 bp, Homo sapiens
tagttaattgctctgagatctactaaatgacaaaacaaaaacaatttaaaagtgagagctacaaggcaaagagacctaattagcaaagaaaattgtagcaacagtaatatagcggttgctgcaaaaattttacaattatggggaaaggctctataagccctgtgaaattcattcccatttaaacatagtatattgarcctaatattaaacggtctgcaagttcacaatagaagttcattaatactatactataaatcaaaagctttagagcaggagttagaagatccatatcacagtttcatttctgccaccaactagcttagttaagtgtctcaacctcccccatgtgtaagattcctaaacagtaaattgaggagtaccagttaagaataacaaaagagatttgttaaaagttcagattcctggatcccaccctggataattctgattcattaagtctaagacgggtattaacatctactgtattttagtgccacccaccccactctgcagaccctagaaaccactgatttctatatattttacaaggtaagagaagtcaaataagaaaaatgtagaaatactggtata

SEQ ID NO: 268572 - DNA, 621 bp, Homo sapiens
tatttaactatccattggtgcctgatatccgtctgtgcctgatattgtgttaggccaaatagatgcaaagctaaataaagcatggattctaaactctatcttgtttatatatgtttgttggtgaaaaatctttgtaaatagaaccattttaatggcaaaatatttatgtttaaaatatacttgtagtgaatcctttcataaaagaaataactactctgagatgtgtcatatttttcattttcttcaggttagactttttaaatagtgaagtattcctgaggttttaaaaatgtaatataattcaacaaatattttctgagtacttattatgtatgtcttttatataactttaaaatctatgtactcaagtgagattgggttgaaattcaggtactgttttccgtctgacttctattagctcacatggrgtttgttgtcctaagttagttggggatcctgtttttgtctattagcgtatattcttgtaactattatgcatcccctgactgttttcttattacttcagcaagaattacactcagttgttcagtttttaaatgacgtaattagcagcactattttacattctctttaaaattctgtcttcagttggactccctt

SEQ ID NO: 268573 - DNA, 491 bp, Homo sapiens
aataacaataaaataataataattgtcataggcattggaaaagaagagttaatactatgtctttttgccaatgatatgattatatatctagaaaaccaaagaaaagctagtaaaattaacagaagagattttggcaaagggctggacacaagataaatacacaaacccaatagattgcaagaaacrgatgtaaagagaaaaattagaaatgcaaggagaatgtaataaaaatttaaagatggtgagagactttacttcttttatatttaggcaaataaagtagacaaagaaaaaacaaatacaatcatatcaacagaaattatgttatagatatataattatagctaaacaaaaaaataaacataaaagtaataaactgttagctattctggcaataagcacttagaaaatttaatgtgtaaaaatgttttatttacaatagtaaaaaaattggaaaatgcttaagaataaaggtcacaacaaaagcacaa

SEQ ID NO: 268574 - DNA, 491 bp, Homo sapiens
aataacaataaaataataataattgtcataggcattggaaaagaagagttaatactatgtctttttgccaatgatatgattatatatctagaaaaccaaagaaaagctagtaaaattaacagaagagattttggcaaagggctggacacaagataaatacacaaacccaatagattgcaagaaacggatgtaaagagaaaaattagaaatgcaaggagaatgtaataaaaatttaaagatggtgagagactttacttcttttatatttaggcaaataaagtagacaaagaaaaaacaaatacaatcatatcaacagaaattatgttatagatatataattatagctaaacaaaaamataaacataaaagtaataaactgttagctattctggcaataagcacttagaaaatttaatgtgtaaaaatgttttatttacaatagtaaaaaaattggaaaatgcttaagaataaaggtcacaacaaaagcacaa

SEQ ID NO: 268575 - DNA, 605 bp, Homo sapiens
tgctctgctccccagagcttgagcctccagagcactcttttttccctggatcaatgccattactttgtcccacctcccagggtcagaatcacagctatatcgtgcctcctgggctcaagctgctgagatatgctgcagaatgaccgactctggcttagtgggagaactgcattcactcataccttggagagtgaacctgtacctcaagtctcaagtgctgtagtagtttcacaagaccctgagttcagaaacccagctccatagcacccatgagcacctgtgccctggattctagtgctgctgtcactacctgtgagccatgtcagaccaayaccaagagagatcttctcagataagtccccactgtgaggaagacaaaaacaggaggattcctaaatcccttacccaaataacccatgcagccaccatcactgccacaaattcctgtaacctagactactgaaacccccagtcattgctaacatttatcataaccgaagaagctgcacaaaaactacacaactgtatccatatgaaaccagagccactgcatcctgcccaactgaaaccctcaggcccatctacaggtgaaagtctttctctac

SEQ ID NO: 268576 - DNA, 605 bp, Homo sapiens
tgctctgctccccagagcttgagcctccagagcactcttttttccctggatcaatgccattactttgtcccacctcccagggtcagaatcacagctatatcgtgcctcctgggctcaagctgctgagatatgctgcagaatgaccgactctggcttagtgggagaactgcattcactcataccttggagagtgaacctgtacctcaagtctcaagtgctgtagtagtttcacaagaccctgagttcagaaacccagctccatagcacccatgagcacctgtgccctggattctagtgctgctgtcactacctgtgagccatgtcagaccaataccaagagagatcttctcagataagtccccactgtgaggaagacaaaaacaggaggattcctaaatcscttacccaaataacccatgcagccaccatcactgccacaaattcctgtaacctagactactgaaacccccagtcattgctaacatttatcataaccgaagaagctgcacaaaaactacacaactgtatccatatgaaaccagagccactgcatcctgcccaactgaaaccctcaggcccatctacaggtgaaagtctttctctac

SEQ ID NO: 268577 - DNA, 461 bp, Homo sapiens
atcaatcatttaaaaaacttaacaccaattgtttataaattcttccaaataataaaaagggaatatttccaactttttatgaggcagtgtttccctcataccaaaagcaaagaaagacatcacaagaaaacaataaactaacataatttaggaatatagatgcagagctcctcaacgaaatactacacaatttaattcaggaacatataaaaaggattatacaccatgaccaagtgggatttatcccaggactgttaggttagctaacaatcaaaaattagttaatgtaatacaccatatcaacagaataaagaacaaaagccatatgatcatctagagttaaaaaaaaatttttwaaaatctaacatattttatgattcaaaaaagttggtcatcaggaaaatgcaaatcaaaaccacaatgagataccacctcatacccactagggtggctataaataa

SEQ ID NO: 268578 - DNA, 461 bp, Homo sapiens
atcaatcatttaaaaaacttaacaccaattgtttataaattcttccaaataataaaaagggaatatttccaactttttatgaggcagtgtttccctcataccaaaagcaaagaaagacatcacaagaaaacaataaactaacataatttaggaatatagatgcagagctcctcaacgaaatactacacaatttaattcaggaacatataaaaaggattatacaccatgaccaagtgggatttatcccaggactgttaggttagctaacaatcaaaaattagttaatgtaatacaccatatcaacagaataaagaacaaaagccatatgatcatctagagttaaaaaaaaatttttawaaatctaacatattttatgattcaaaaaagttggtcatcaggaaaatgcaaatcaaaaccacaatgagataccacctcatacccactagggtggctataaataa

SEQ ID NO: 268579 - DNA, 551 bp, Homo sapiens
actcaccaattcccctggctgtgggtgggggttcccttggctccacgttactcccgagtgggctgttgccctkccctgcttttctccattttctgtgggtccagttgttttcctgatcagtcccactgtgagtacctggatatttcagttgaaggttctgtattcactcatcccttttgctcctctctgtgagtaccacaccacagctgtttctatgtggccgtcttggcccttagcatttgaagtgagtttttcagttctattagttcagtttggttctttcttaaaacagacatttcatctttcatctcctgttttattttattgtatatcttacaatccttgggttggatttcaactttctcctgaatgttgatcttccttctgatgcatattgtgaattctgttttttcacttcagcaagcttgagaatcattgctggagaattagtgtaattgtttggaggtcagaagacactctggctttttgagtttccagagtccttgcactggttatttcctgtctgtgtgggctgatggtccttcaatcat

SEQ ID NO: 268580 - DNA, 551 bp, Homo sapiens
actcaccaattcccctggctgtgggtgggggttcccttggctccacgttactcccgagtgggctgttgcccttccctgcttttctccattttctgtgggtccagttgttttcctgatcagtcccactgtgagtacctggatatttcagttgaaggttctgtattcactcatcccttttgctcctctctgtgagtaccacaccacagctgtttctatgtggccgtcttggcccttagcatttgaagtgagtttttcagttctattagttcagtttggttctttcttaaaacagacatttcatctttcatctcctgttttattttattgtatatcttacaatccttgggttggatttcaactttctcytgaatgttgatcttccttctgatgcatattgtgaattctgttttttcacttcagcaagcttgagaatcattgctggagaattagtgtaattgtttggaggtcagaagacactctggctttttgagtttccagagtccttgcactggttatttcctgtctgtgtgggctgatggtccttcaatcat

SEQ ID NO: 268581 - DNA, 551 bp, Homo sapiens
actcaccaattcccctggctgtgggtgggggttcccttggctccacgttactcccgagtgggctgttgcccttccctgcttttctccattttctgtgggtccagttgttttcctgatcagtcccactgtgagtacctggatatttcagttgaaggttctgtattcactcatcccttttgctcctctctgtgagtaccacaccacagctgtttctatgtggccgtcttggcccttagcatttgaagtgagtttttcagttctattagttcagtttggttctttcttaaaacagacatttcatctttcatctcctgttttattttattgtatatcttacaatccttgggttggatttcaactttctcctgaatgttgatcttccttctgakgcatattgtgaattctgttttttcacttcagcaagcttgagaatcattgctggagaattagtgtaattgtttggaggtcagaagacactctggctttttgagtttccagagtccttgcactggttatttcctgtctgtgtgggctgatggtccttcaatcat

SEQ ID NO: 268582 - DNA, 555 bp, Homo sapiens
aaatattcctatttcttttaaaaaatagaatctgctttctttcactcagaaaattgctccccaccaccccatttctggctttcctaccttcatatccccatctttctcttggctacatagggcttattatattgtagtaaaatacacataacatgaaatttgccatcttaaccattgttaaatgtacagttgagtggcagtaggtctgttcatattgctttgtagccaccaccaccatccatctccagaactcttttcatcttgcagacctaaaactctgtacccattaaacaactcccatttccccttccccagtccctggaaaccaacattgtactttctgtctctatgagtttgagtgccgtagaaggcttatrtaagtggaatcatagtatttgctcttttgtgactatcttatttcacttagcataatgtcctcaaggtttatccatgttgtggcacgtatcacgatatccttcctctttaaggcaaaataatattccattgtctatgtatactacattttttaaatccattcatttgtcgatgagcact

SEQ ID NO: 268583 - DNA, 490 bp, Homo sapiens
aaacaagagatgtaatgaatgaatcaaaactctagtgattaataaaatgaaatacacaaaccatttaagaaaaaatggggaatataaataaaataagaaatgacacagtaaaaataaaagtcataacagatgacttacccacctttattcaaaaaatttagaacatatacatattggagaatttcttggggaaatatattttactactgaaattgaccccattatagatagaatgcttaagggggccatttgctatggaaaaaagagaaaattaccaaggaacttttactcgccaacacacacacacacacacacacacacacacacacacacrcacgcacgcacacacacagagagagagagagagaaagagagagagacaaagggcccaggtgcctttacagggaaattctaccaaacatataaagatcatgccagtctgatgccaaataaatttttccaaaacctacaaaattaaggaaaacttaca

SEQ ID NO: 268584 - DNA, 550 bp, Homo sapiens
aggcagggcatggagtgacactgccacaagtcagcagacactagaggccatcagaagccggaagaatggggaatgattctgccccagagctcaggagggagcatggccctaccagcactttgatttaggatctctggtgtccagagctgtgagagaaaaacattttgttgcttttaccaaccacgtttgtggtattttgccatggcagccacaggaagctaatgtatcttccttatgaaaagtgaagacattggtttctgagcattcaggtgacctgctccaacccgaggctgccctctgatgatccccaatagcctttgagtttggattctgtaacgctgcygaagtttcatgcttgacctatctgtcttcctctgcaattttcctgaacagaccacacagtgaggccaaaccatgggcagtcttagcatgacagtggctgggtgttcgtggaggagagagtttctagggagcaccctgcatgcccagcctctctgggtatcactgtgttgcagcgcgtttgtggttatgtttcattagcagagcggtt

SEQ ID NO: 268585 - DNA, 550 bp, Homo sapiens
aggcagggcatggagtgacactgccacaagtcagcagacactagaggccatcagaagccggaagaatggggaatgattctgccccagagctcaggagggagcatggccctaccagcactttgatttaggatctctggtgtccagagctgtgagagaaaaacattttgttgcttttaccaaccacgtttgtggtattttgccatggcagccacaggaagctaatgtatcttccttatgaaaagtgaagacattggtttctgagcattcaggtgacctgctccaacccgaggctgccctctgatgatccccaatagcctttgagtttggattctgtaacgctgctgaagtttcatgcttgacctatctgtcttcctctgcaattttcctgaacagaccacacagtgaggccaaaccatgggcagtcttagcatgacagtggctgggtgttcgtggaggagagagtttctagggagcaccctgcatgcccagcmtctctgggtatcactgtgttgcagcgcgtttgtggttatgtttcattagcagagcggtt

SEQ ID NO: 268586 - DNA, 624 bp, Homo sapiens
tcagaaacaatgcaggtgaaatacagtggatttcaatgtccttaaagtataaccatcctttggtattggcaggggattggttcctgaacccctatattctgtctatatcaaaatccatgagttcttaagtctcatatrtaaaatgacatggtatctgaatataacctatgcataccatccattatataaattatttctagattacttataatacctaatacaatgtaaatgctatgtaaatagtcactacattctattgcttttttgtttgtattatttttattgtatattgttatttttcattgtgttttttttttttcaaatattttctacccatggttggtttaatccatggatgcagaacccatggataaggaagggccaactgacaggtcaaaaaagtggttaacccagaattccacatcaaaaacaaaggcaagggataggaattccagaatggcaaaatgaggagcatggcagctctcttttaaataaagacccatttaacggaaaaacattattttttaaagcatttaaaatccctggaaattgttttaagggtatacagcaaaggaagaaacattcaatcaaaaaactttactaaatcattgtgaggacaatgag

SEQ ID NO: 268587 - DNA, 262 bp, Homo sapiens
tttagagacagaaacccacggtccagtgaggccgtctctttcactctgaaacctgctggtaactggtgggakaactcattatgtgagtccagatcttttctcactcaaacactttctaatccacattgctcaattcctggagcagtaatgaataaacataagaaacagatcatttgttattctatgaactgagctgaatattcaaatcaagaccagcactagattatacctcaggacatgtcacctgagttatttgccaaac

SEQ ID NO: 268588 - DNA, 599 bp, Homo sapiens
tgccaccacacctgactattttttactattatttttgtagaaacaaggtctcttatgttgctcagactggtctcaaactcctgggctcaagcaatcttcctgcctcagccttccatcttaatgtcatttttaagggrcttggtctttatctgagaagcgaagtgcaactttcaagagtttcaaattaaacaggttaatttagaccaaagtgggagtgcccctatctactccgaagtgctatctggagagtccccttctttgtctctcgccatcagaagatcgcaagtgtggagagcctcccgggggctcccagggtgtaccagggtcgggggtgtaaaggaagtgagcaatgagctggcctctcccacaaactaatagtaaatccatgtacagcacattatgtacatataagttcactgcaccttgataagggatgagaaggcctgatggttatagcaaatgaaattggctagatttgaaaaaaaaaaaagtcatgagaaaagaaaagggattcagatgtttataggaagttctcttttaaagcagagcccttctgagccatgaaagaaaatggtttctaattcagtatcttttaccgg

SEQ ID NO: 268589 - DNA, 599 bp, Homo sapiens
tgccaccacacctgactattttttactattatttttgtagaaacaaggtctcttatgttgctcagactggtctcaaactcctgggctcaagcaatcttcctgcctcagccttccatcttaatgtcatttttaagggacttggtctttatctgagaagcraagtgcaactttcaagagtttcaaattaaacaggttaatttagaccaaagtgggagtgcccctatctactccgaagtgctatctggagagtccccttctttgtctctcgccatcagaagatcgcaagtgtggagagcctcccgggggctcccagggtgtaccagggtcgggggtgtaaaggaagtgagcaatgagctggcctctcccacaaactaatagtaaatccatgtacagcacattatgtacatataagttcactgcaccttgataagggatgagaaggcctgatggttatagcaaatgaaattggctagatttgaaaaaaaaaaaagtcatgagaaaagaaaagggattcagatgtttataggaagttctcttttaaagcagagcccttctgagccatgaaagaaaatggtttctaattcagtatcttttaccgg

SEQ ID NO: 268590 - DNA, 599 bp, Homo sapiens
tgccaccacacctgactattttttactattatttttgtagaaacaaggtctcttatgttgctcagactggtctcaaactcctgggctcaagcaatcttcctgcctcagccttccatcttaatgtcatttttaagggacttggtctttatctgagaagcgaagtgcaactttcaagagtttcaaattaaacaggttaatttagaccaaagtgggagtgcccctatctactccgaagtgctatctggagagtccccttctttgtctctcgccatcagaagatcgcaagtgtggagagcctcccgggggctcccagggtgtaccagggtcgggggtgtaaaggaagtgagcaatgagctggcctctcccacaaactaatagtaaatccaygtacagcacattatgtacatataagttcactgcaccttgataagggatgagaaggcctgatggttatagcaaatgaaattggctagatttgaaaaaaaaaaaagtcatgagaaaagaaaagggattcagatgtttataggaagttctcttttaaagcagagcccttctgagccatgaaagaaaatggtttctaattcagtatcttttaccgg

SEQ ID NO: 268591 - DNA, 599 bp, Homo sapiens
tgccaccacacctgactattttttactattatttttgtagaaacaaggtctcttatgttgctcagactggtctcaaactcctgggctcaagcaatcttcctgcctcagccttccatcttaatgtcatttttaagggacttggtctttatctgagaagcgaagtgcaactttcaagagtttcaaattaaacaggttaatttagaccaaagtgggagtgcccctatctactccgaagtgctatctggagagtccccttctttgtctctcgccatcagaagatcgcaagtgtggagagcctcccgggggctcccagggtgtaccagggtcgggggtgtaaaggaagtgagcaatgagctggcctctcccacaaactaatagtaaatccatgtacagcacattatgtacatataagttcactgcaccttgataagggatgagaaggccygatggttatagcaaatgaaattggctagatttgaaaaaaaaaaaagtcatgagaaaagaaaagggattcagatgtttataggaagttctcttttaaagcagagcccttctgagccatgaaagaaaatggtttctaattcagtatcttttaccgg

SEQ ID NO: 268592 - DNA, 418 bp, Homo sapiens
cctctgcttcttgtgcccattgtggctgacaacttcaataaagaagttttccgatctggccaggacaaaagtcacagaacataatttttatgggattaaaaccatttctgctcttgtagtttcagtagagaatgttttctgaaaccagcttacaggaaggcatcaacacttacggtgatttatgcctctgatttttaggagaaaatggtaaatgacaagtacaatgcctgagatttattaaaacaaaaacatttcagagaatgtcatggggtggtttgaggtctgctcaktttcctgtgccttatacatctacggggctgcacgatcctagaagacgtgtctgagccccctggaaaggcctctgggctgtggagggcacctgtgatggagagaggtgtcctggccgccaggtcaccct

SEQ ID NO: 268593 - DNA, 565 bp, Homo sapiens
tgggaagttttcagccattatttcttcaaatagtctctttccccctttcttccttttaaattcgcataatrcatatgttattctgctcaacactctaccgtaagtcccttaggctctctctgctttgcttcactcttttttttgtttttgcttgtcttgataatttaaaaagtcctgttcttaaatttactggttctttcttctatctgatcaagtctgctattgagtagttctcgtgaatttttaaattcgcttaatgtattcctcactccaagtagttttgtttgtttcttcttcttagtttctgtctcttttctgatattatcattttgttcatttttaaaaatttcattagttttttccatctgtgccttcttttactccattgaacatccttacgacagttattttgaattatttatctgctaattcatatattcccatgcctttagggttagtttcaggatatttaatttgttaccttgggcccagtctttgtggtctggtttcatgcaggaaggactttcaccagtcagcatggccagagactctagagacctctaaa

SEQ ID NO: 268594 - DNA, 563 bp, Homo sapiens
atacagacctgcttccccagatgcagcggcctactatttccctacttaacctcactcccctgctcatattccagtgagctcctccattccccccactcctgagaatataataaatttagccagctccttttgaataagggaatggataaaggagccagttgtcaagtatgttatatgagaatccctattatcacggggctcattatcacaggattttactatatttgactccctccaatggactgtaagaagtcaatccattgatgctgtgcaccctagttgcaaaagcccgttccatccttggatacttttaattggtggaaagtcatggcccagacactactctatattaatgtacatacattagcactagctctatgatcacacagaaggatgctatgccattcaaataytggaaaatagaaagcacatattttccaagttttatcttctacaggctaaatttcctgagtttccttatttgtctgccttgttcactaattgtgccttgggtggcaagggaagtacctggagcatgatgggcacccagtaaagatctactg

SEQ ID NO: 268595 - DNA, 583 bp, Homo sapiens
cttgttaatagaaaatataagagaagaatattggccagagcagtaccctaccagtcattgcagtatttaagaaaaaagccatgagctggtaaaaattccattcactataatttcccctattaaacaatgtggtaaattgttgtaaatattatctgattctgtcctaaataatatctctttcagggatagctaatacttgtgcttcaggtcataaaaagatcatgagttaggataatcaaaatttgaatcatagttatattttcttccaaaaatactattatccctattagaatcatatggcaagctaagctagagatagaaatgatttagttarttcctagaagaaatgcatgtgccaaattaggaacctcagttggactgtttggggaatatactagtcaagattctcatggttgccagtgacagagacccagctcaaaacagatgagttattttattatctctttctctgctcaactcacatctttgcctgtttctgcatgttggcctcattttctatgacttcagatagtctttctccatgtagtaaggagaggaaggagcaaggctaccaaaagttaca

SEQ ID NO: 268596 - DNA, 537 bp, Homo sapiens
cgcttgagtgactgataaaatgtcaagatgccattatttccaagagagtgtttgggagcaatagatctgtttcaatttatcccatccacctgaatttaagtcttcagatttaactttgttggctgctacaaccaaattgtctctgggttttgagagaacagccatcatggaatgcagacaggattataataatggtcacgccatgacatttatgttgtatttcactgtgcacattggtgcaatattttggacttaattaatactctccaggaacctcagtttatggatggcaatacccatattttagatcatgggaaatacmgcaacaaaaattcaattcataaggcagatggcaaagcctagtttgaagaacaacaaaacaggaagatttacaatgagtttcagaactcttcaactggaatccagccgctgccaaagctctgttatttcactggagggtaacaatctgtgagggtcattagtgtcttcagaaaaactgagattaaaaagtagtcaaatgaaatgaataaatagtcg

SEQ ID NO: 268597 - DNA, 559 bp, Homo sapiens
ggccccttatctactatcaccttgatcttggacttcccagcatcacaactgtgagaaataaatttctgttgtttataagccacccaggttatggtattttattataacagcccaaatgtcttaaaacagtcacatattgtatgattccatttatatgaaatgttcagaataggcaaaaaccattgaaaaagaaagtagtgatttttggggaataggggaaggagagaatagaaagtgactgctgatggggatggggtttctttttgagctgatagaaatgtattaaaattaaatagtgatgatggttgcacaactctgaatattaaaatgcactgaattatatgctttaaaaagagtaaatgttatgctatgtgatttatatctcaatgagctgttatttaaaaatttaatggggaaagtctggagctaggwtttttaaagaataatttaattattatgattattagaattattagaatttccttggaaagctccaagaagatatgtgggatcattactgtaggagggttccagaagaaagtgtgttaaaactgtcata

SEQ ID NO: 268598 - DNA, 583 bp, Homo sapiens
cgtatcttctgtaatatttgatagatttcactgaaatttagtacacaggtaggggttatagaaataacagattggattgggtgatggttacagtttactkaactgctagggtagctgtctctgagtatcttccaaaaaatggcttgcagtaattgataccctgggagaagctaatgcattggcagaggggctagaaatttaagaaagctatatagtgatttggtcgatgacatagccagactatataaatttaaatgcaactgccattttagtgaaaagttcctttttttttttctctcctgccaaagtttctgaataattatatctctactttaggatacttggataggtacagcctctgggtccaagaaatcttaggaagcttttcaaaaagccacagcacagtcagtaacagcccatctgtctcttaattttagagtatttttttaaaaagaaaaattgctttcaatttttatgcccacctctaagctgtaatgcaaattactcagcaggctgccctgacaggtgataaacaaatgtcgtcacttgctaatttcctaatcagacgcctaatttatctata

SEQ ID NO: 268599 - DNA, 555 bp, Homo sapiens
tcactgaaatttagtacacaggtaggggttatagaaataacagattggattgggtgatggttacagtttacttaactgctagggtagctgtctctgagtatcttccaaaaaatggcttgcagtaattgataccctgggagaagctaatgcattggcagaggggctagaaatttaagaaagctatatagtgatttggtcgatgacatagccagactatataaatttaaatgcaactgccattttagtgaaaagttcctttttttttttctctcctgccaaagtttctgaataattatatctctactttaggatacttggataggtacagcctctgggtccaagaaatcttaggaagcttttcaaaaagccacagcacagtcagtaacagcccatctgtctcttaattttagagtatttttttaaaaagaaaaattgctttcratttttatgcccacctctaagctgtaatgcaaattactcagcaggctgccctgacaggtgataaacaaatgtcgtcacttgctaatttcctaatcagacgcctaatttatctat

SEQ ID NO: 268600 - DNA, 577 bp, Homo sapiens
ttctgtaatatttgatagatttcactgaaatttagtacacaggtaggggttatagaaataacagattggattgggtgatggttacagtttacttaactgctagggtagctgtctctgagtatcttccaaaaaatggcttgcagtaattgataccctgggagaagctaatgcattggcagaggggctagaaatttaagaaagctatatagtgatttggtcgatgacatagccagactatataaatttaaatgcaactgccattttagtgaaaagttcctttttttttttctctcctgccaaagtttctgaataattatatctctactttaggatacttggataggtacagcctctgggtccaagaaatcttaggaagcttttcaaaaagccacagcacagtcagtaacagcccatctgtctcttaattttagagtatttttttaaaaagaaaaattgctttcaatttttatgcccacctctaagctgtaatgcaaattactcagcaggctgccctgacaggtgataarcaaatgtcgtcacttgctaatttcctaatcagacgcctaatttatctata

SEQ ID NO: 268601 - DNA, 501 bp, Homo sapiens
gctcctagtgatagaaggagggcaatttagttgtgggcatgaggagtaggctcaggaaaactagaggggaagagataagccaatcaaaaaatcatagaaaaggccaacagattttgctgtgtgccaggcgtttacctaattcctttacttgtattgtgctcatttgtaacaaattttatcctcctaataattttttgagatagatgctattaatatccttatattactgatgggtaaactaggcccagggatgttaaaygttttaccctgagtcatgcagtaaatattataacttaagcatataggttctagagcctgcacttgtaatactctgcacttctgagtcctggttgattaacaccatgttggagctgaaattgtgattgagacagaaagtgaattccaattgcaaagttaaggatagcagggagtagagaaaactattgaactgttgtggcattcttgtgtatctagtccatgtattgcatacttgaagataca

SEQ ID NO: 268602 - DNA, 486 bp, Homo sapiens
gctcctagtgatagaaggagggcaatttagttgtgggcatgaggagtaggctcaggaaaactagaggggaagagataagccaatcaaaaaatcatagaaaaggccaacagattttgctgtgtgccaggcgtttacctaattcctttacttgtattgtgctcatttgtaacaaattttatcctcctaataattttttgagatagatgctattaatatccttatattactgatgggtaaactaggcccagggatgttaaatgttttaccctgagtcatgcagtaaatattataacttaagcatataggttctagagcctgcacttgtaatactctgcacttctgagtyctggttgattaacaccatgttggagctgaaattgtgattgagacagaaagtgaattccaattgcaaagttaaggatagcagggagtagagaaaactattgaactgttgtggcattcttgtgtatctagtccatgtattgc

SEQ ID NO: 268603 - DNA, 386 bp, Homo sapiens
ctatcatgggaacagtgcaggaaagaccacctgcatgattcaatcatctcccaccaggttcctcccacagtatttgggaattatgggagctacaagaggagatttgggtgaagacacagagccaaaccayatcagtgtacaataaattcttgctggatgagtcattaggcttatgttagcctatgcttttcttaggaatcattcaaagttaatcatagctcaaattatgaaataggtcattctttctttctttcatttatctatttattttcctcagaaattcagctacttgctcttctcaaattgtaatctggctcaattagaatccacctttaagcaacctttatgcttcccctccctagtcagcacccatggcttcagaatct

SEQ ID NO: 268604 - DNA, 386 bp, Homo sapiens
ctatcatgggaacagtgcaggaaagaccacctgcatgattcaatcatctcccaccaggttcctcccacagtatttgggaattatgggagctacaagaggagatttgggtgaagacacagagccaaaccatatcagtgtacaataaattcttgctggatgagtcattargcttatgttagcctatgcttttcttaggaatcattcaaagttaatcatagctcaaattatgaaataggtcattctttctttctttcatttatctatttattttcctcagaaattcagctacttgctcttctcaaattgtaatctggctcaattagaatccacctttaagcaacctttatgcttcccctccctagtcagcacccatggcttcagaatct

SEQ ID NO: 268605 - DNA, 386 bp, Homo sapiens
ctatcatgggaacagtgcaggaaagaccacctgcatgattcaatcatctcccaccaggttcctcccacagtatttgggaattatgggagctacaagaggagatttgggtgaagacacagagccaaaccatatcagtgtacaataaattcttgctggatgagtcattaggcttatgttagcctatgcttttcttaggaatcattcaaagttaatcatagctcaaattatgaaataggtcattctttctttctttcatttatctatttattttcctcagaaattcagctacttgctcttctcaaattgtaatctggctcaattagaatccacctttaagcaacctttatgcttcccctccctrgtcagcacccatggcttcagaatct

SEQ ID NO: 268606 - DNA, 572 bp, Homo sapiens
caatttctgcccaagaaaaggaaggcgtgatccagtttctcttctttatggaccacacacttgacawgtgacttcacttggccttcacaacagtgctgcaaggtaagctttattattattatcctttacagatgaggaaattgaatatcaatgaataggcaattcatgattaaccatctatttagggttcaagaatgagttgaactcggatcaatctttctagtttgaaagctgtgttctttctactattccaagcttcttccattctgctgttcccattgctgagagaggaaacacttaagtattacaactctgaaactgtagagaattcccttgaagggactgggatactggtgatgcataactggaattcagcggagccacatctataagaagtactgctaggtttaagttggtaggagaagctggtgggaaaaggggtataaaacacggtttgtggacaaattcaagagctgaggggatgcggggggcactcttgaggtgttgacctcagaccatgcctgatggggacagagtggttgttagcactaagcacttacccagttgtacaa

SEQ ID NO: 268607 - DNA, 532 bp, Homo sapiens
gtcatgtctgacctttacctcttctccactactgarcagacatttttgccaattatgatccaaaacacgctgaaaagtatccttggccattgacagtttgcaagggagaagcaatgcctctggaataataccatagccaggacaaagaggaagggtaaacaaagcattactttgtgttgcaaatagatggctttgttaaatactggagaaatcccctctgtgtccaccttacgcagctctgataaaaatgcatttgcaatacgctcagtgtcaagaaatcacatcttactgggccaaggaggttaagagcatctccccaactacagaataaaactcattaaaatagtctttccagcaagagaaagccctgtttgctaccctccccatacccttctctttttcatttaaactaatgttttgcagagctagacacatgatcaaaatagcacaatccacatttgtattaaaaataataagcacagcaaaaatgggaggaaaaattaatggtaaacagcatcagaaaacacagcag

SEQ ID NO: 268608 - DNA, 636 bp, Homo sapiens
ggggccaatgttcatatttgaaaataaagagaatgttgtagaaaatgctaccctcaacatacataagcatttcttgtgtttcactgtgttaagcatgcttttaatcagttagtgcagttattgagaactagcaaataaactgtggtgaattcggatgttgctcctattaaggatgttttcttttaatggagaacttttgaaaatgagcttttaataactcaggaccatatttttaatggtaaaattacaggcarcctcagcttatatcagggattttgtcttctttgagaaccactaaacattgggctggtaaacttcagtggatagtttaggagaccctaaaaaccatttcagggcaggctatacacaaaaaactcgggaaattaaaacaaaaacataattgtgggtcctaaccctcaaggttttagtgaagtccttaatttagatttttcagaagctcattaggtgtttctgatactgagctggcttcggggacatcgacctatcccagtattttcattttacaggtgaagagactgaggtccagaaagcggctgcaatagcaatgactatttgttctttgttgtttaccaagtagtatcaacaaaaagtatttcctttaatttttatcagtgt

SEQ ID NO: 268609 - DNA, 636 bp, Homo sapiens
ttattgagaactagcaaataaactgtggtgaattcggatgttgctcctattaaggatgttttcttttaatggagaacttttgaaaatgagcttttaataactcaggaccatatttttaatggtaaaattacaggcagmctcagcttatatcagggattttgtcttctttgagaaccactaaacattgggctggtaaacttcagtggatagtttaggagaccctaaaaaccatttcagggcaggctatacacaaaaaactcgggaaattaaaacaaaaacataattgtgggtcctaaccctcaaggttttagtgaagtccttaatttagatttttcagaagctcattaggtgtttctgatactgagctggcttcggggacatcgacctatcccagtattttcattttacaggtgaagagactgaggtccagaaagcggctgcaatagcaatgactatttgttctttgttgtttaccaagtagtatcaacaaaaagtatttcctttaatttttatcagtgtcccatggtgtttgaaatattagggactaatatgaggcaaaataaaagcatgtgcccgaaatctcatagctagttagcagcaggatcagaattaatattcatgtctcccgattcctat

SEQ ID NO: 268610 - DNA, 575 bp, Homo sapiens
agtgtcaatcattttgaaagaaaaaagttatgctgctttgtctagtttaaaatgagrgttggtgtcaaatttctagaaaagtaataaaaatgttgtatttaaatataaattagcactccttgctgtttgactccccatttgcctggttcagaaacattggtcttaaattgcagttttcctctatgtgggagacctacagagaaggtcaggctcagaccaccaagggcttgaatgtgagagttcagcctttctttctcccttattcaggttcctctggaagctgtctccctccttgctggaattctctaagccttcctcatgcctttcttggagagccttctcaatctatcaatctttggcaatggttgcctgctgcctttctctgggagttgggggagggggtccaagccccctcatgccctttccttcctcaaagcccttttctgtgtggtgaattagaatcctttcaagccccatatgttccttccctcaaacactgaggccgaaaagtgagttaatttttcctcccaggatgagaactccctcttatatgttccccatttccaacagtatta

SEQ ID NO: 268611 - DNA, 411 bp, Homo sapiens
acaaaaacaggtgttaagccagatctggcccatggcccagtttaccagcctctgctccacatagatattgtgctcttgtcccactgagccacttccataccctggggatacctcttgttttctcactgccacattgttttggatttttttttttttttttacatgatggccagttaggtgctgccacaagtggagacagaggagaggctcaggaaagcaaagtttattatatgtacaggtcttcgagacaggaggcatggcatgacacatgggaaagacaccagagtagacaggaggcagaaaacaggcccagggagccctcaggccacagccttcattggggttcccagggaaaggcaacacagagcatgagaagcataggactggcmgtttgaagaatttcagtgggct

SEQ ID NO: 268612 - DNA, 377 bp, Homo sapiens
ttctctctcccatgaaagtctaagctgatctgggagtttagactatccacaaatctgcaaggtgcctagaatgattgggacaagtccctgtggctgggaaatgttattgggaaaggctatttgtccctgtacacaaggtatctctttcatccacatatttcaagccagtcatctatattcttattactgccataggaatgggctttaactttcttttaatagcatgacccagaagttgccaatatctattgcattaatgtcccatttcccagaatttagccatgtggtygggaaatgcagttccagctagatggtcaattgcccagctgaaaaatcaactgtaatgtaagaagacgaagagaatggataatgaggaa

SEQ ID NO: 268613 - DNA, 540 bp, Homo sapiens
agagagtgtgcagcattcctggcaagctcccattatcccatcactctctcagatggtgggcagtggaatcgatattcccaaggctttaaaaagctcccaaatgttgtgctgccattcattcaacaacagggggagaaataagggaagaaaaaaactgatgttggcttcttattttgcttatgttgttaaaagccgctctgatgctgtggttctggagtaggtcccctctttctttgaaagcatgctgcgtgatagactgtcatttgtcccctgcctccagaagagccagctggcagcgaagtgctaaagccagtgacttgcatgtgtttttctgacatttmacaaatgggaacagcttgcaaatctgcattaactcactctgtctcgcaaataatcagggcctacgcagtgtagacgctgggaacattagctccgacacaaaagagtgagaggctgggggctgggggggcgacagaaaacaagtcagcaaataacggatgttttaacgaagggatgaatgtaacattctggttcagagga

SEQ ID NO: 268614 - DNA, 576 bp, Homo sapiens
atagaagaaacggacttatataaaatgagtgaattaggtttactaggtgctaagcttcttgaggataagtacttgggttgtatttgttttttgaatcccscacgatgactagcataatgattggcactagacaggcaataatatatgctttgtgtttgttttcattttttattgttaaatagaatagactgacagtctgattctgattgatacggactgagagctgagattgtgtaggtgggtgctgcttgaaggctgaggacgaacaaaatgaccattcaaactctcttctaatttaagaaatccactattcaatctaaatacttatgataaactgtgtaataggaggaaacaataataaaatgacccttttgcaatcgcttctgagacaaccaaattaacactttgtcacacacccatttattttaattgttctctccaaggtaatatcaaaaagtcaacatggatagaggaaacagaagaaaaaaaacaatttgttcctcattaaatgttagaaaagtccgagataaacctatttaaaattgatctgataagcccgagaacagtgatgcactg

SEQ ID NO: 268615 - DNA, 576 bp, Homo sapiens
atagaagaaacggacttatataaaatgagtgaattaggtttactaggtgctaagcttcttgaggataagtacttgggttgtatttgttttttgaatcccccacgatgactagcataatgattggcactagacaggcaataatatatgctttgtgtttgttttcattttttattgttaaatagaatagactgacagtctgattctgattgatacggactgagagctgagattgtgtaggtgggtgctgcttgaaggctgaggacgaacaaaatgaccattcaaactctcttctaatttaagaaatccactattcaatctaaatacttatgataaactgtgtaataggaggaaacaataataaawtgacccttttgcaatcgcttctgagacaaccaaattaacactttgtcacacacccatttattttaattgttctctccaaggtaatatcaaaaagtcaacatggatagaggaaacagaagaaaaaaaacaatttgttcctcattaaatgttagaaaagtccgagataaacctatttaaaattgatctgataagcccgagaacagtgatgcactg

SEQ ID NO: 268616 - DNA, 537 bp, Homo sapiens
ttcatggctttttaaaaacatttttataaaatctgccaaattttatgaaatttacatttaaaaagtctaagatttataaatggtctgttaaaaatatttaaggacttaatgtacgtaatttatcatattagttgggtttgagctctttgtgaacttcagtggggatggaaaattgaaatagtaaaaggaaaaataaatgtattggwtcagatattttagttacctgtaaaataataataatagtaatcatcatcatcatcactccaaatggcttaagccacaaagtaagtttcagccactgaaatagtaaagactggggtcaggctggccttcatctcagctggcttccctcatagtggcatttgcaggatctatccatgtacataccaatgcccagaaacagagatcttctagcttcctctgaactactgaaaaattgctacactctcctctgatctctacctataaccaggggaatatcaaattatcacccacctctgaaccatgcactgaataaaatagatgagtttaattggc

SEQ ID NO: 268617 - DNA, 537 bp, Homo sapiens
ttcatggctttttaaaaacatttttataaaatctgccaaattttatgaaatttacatttaaaaagtctaagatttataaatggtctgttaaaaatatttaaggacttaatgtacgtaatttatcatattagttgggtttgagctctttgtgaacttcagtggggatggaaaattgaaatagtaaaaggaaaaataaatgtattggttcagatattttagttacctgtaaaataataataatagtaatcatcatcatcatcactccaaatggcttaagcmacaaagtaagtttcagccactgaaatagtaaagactggggtcaggctggccttcatctcagctggcttccctcatagtggcatttgcaggatctatccatgtacataccaatgcccagaaacagagatcttctagcttcctctgaactactgaaaaattgctacactctcctctgatctctacctataaccaggggaatatcaaattatcacccacctctgaaccatgcactgaataaaatagatgagtttaattggc

SEQ ID NO: 268618 - DNA, 567 bp, Homo sapiens
ggctgcctattctgttccagtgacctatacatttgtttttatgtcagtacaatgttgctttcattactataactcagtatattttgaaacaatgtaatgtgatgccctaagctatgttcgtgtttctcaacattgatttggctatttgttttatgtgtgtatagttcaatataggttttagaatatttttctatttctgtgaaacatgccattagaatttgtatagggattgcaccgaatgtactgactgcattaggtagtatggctgttttaacagtattatgtgttccaattcatgaacacagagtatctttccatttgtgtcttcagtatttttcatcagtttttaaatttttccacttacagcttttttttacccccttaaattcattcctaagtggttttattgtttttgatgytttgtaaattggatttctaaaaaattttttttcagatagttcattgttagtacataagggaactaatttttgcagttgattttgtaccctgtaattttacttaatttgttcattagtataatagtgttttggtgacatctaaaatttt

SEQ ID NO: 268619 - DNA, 523 bp, Homo sapiens
attcgtaattttggcttgttaagttgcatgcttctattaatatgaatgtttccatttattcttggtcacttaattggttggtatataattgttccttgtatctcatgatctcttggatttttgttgtcwattgtaaagtctttcatttataattttgttttagtcttttcttagtctaaaagtttatcaataaaggcctcagtttctgtgatgttttctattgtttttctagtctgttttttttaaatttctgctctgatctttattattggatttattctactgaattttgcttgttttgttctctagttttttattctataaagttaggttgcttatttgagatcattctttttttcttaatttatgcatttgttactatacacttctctcagagctgcttttgctgcatccaatacattttgatatgtcatatttttatttttatgtctcaacattttatttttcttaatttcttgtttgacccactggttgttcagaagtgtattgtttaatttccacc

SEQ ID NO: 268620 - DNA, 523 bp, Homo sapiens
attcgtaattttggcttgttaagttgcatgcttctattaatatgaatgtttccatttattcttggtcacttaattggttggtatataattgttccttgtatctcatgatctcttggatttttgttgtcaattgtaaagtctttcatttataattttgttttastcttttcttagtctaaaagtttatcaataaaggcctcagtttctgtgatgttttctattgtttttctagtctgttttttttaaatttctgctctgatctttattattggatttattctactgaattttgcttgttttgttctctagttttttattctataaagttaggttgcttatttgagatcattctttttttcttaatttatgcatttgttactatacacttctctcagagctgcttttgctgcatccaatacattttgatatgtcatatttttatttttatgtctcaacattttatttttcttaatttcttgtttgacccactggttgttcagaagtgtattgtttaatttccacc

SEQ ID NO: 268621 - DNA, 523 bp, Homo sapiens
attcgtaattttggcttgttaagttgcatgcttctattaatatgaatgtttccatttattcttggtcacttaattggttggtatataattgttccttgtatctcatgatctcttggatttttgttgtcaattgtaaagtctttcatttataattttgttttagtcttttcttagtctaaaagtttatcaataaaggcctyagtttctgtgatgttttctattgtttttctagtctgttttttttaaatttctgctctgatctttattattggatttattctactgaattttgcttgttttgttctctagttttttattctataaagttaggttgcttatttgagatcattctttttttcttaatttatgcatttgttactatacacttctctcagagctgcttttgctgcatccaatacattttgatatgtcatatttttatttttatgtctcaacattttatttttcttaatttcttgtttgacccactggttgttcagaagtgtattgtttaatttccacc

SEQ ID NO: 268622 - DNA, 523 bp, Homo sapiens
attcgtaattttggcttgttaagttgcatgcttctattaatatgaatgtttccatttattcttggtcacttaattggttggtatataattgttccttgtatctcatgatctcttggatttttgttgtcaattgtaaagtctttcatttataattttgttttagtcttttcttagtctaaaagtttatcaataaaggcctcagtttctgtgatgttttctattgtttttctagtctgttttttttaaatttctgctctgatctttattattggatttattctactgaattttgcttgttttgttctctagttttttattctataaagttaggttgcttatttgagatcattctttttttcttaatttakgcatttgttactatacacttctctcagagctgcttttgctgcatccaatacattttgatatgtcatatttttatttttatgtctcaacattttatttttcttaatttcttgtttgacccactggttgttcagaagtgtattgtttaatttccacc

SEQ ID NO: 268623 - DNA, 586 bp, Homo sapiens
tttattctactgaattttgcttgttttgttctctagttttttattctataaagttaggttgcttatttgagatcattctttttttcttaatttatgcatttgttactatacacttctctcagagctgcttttgctgcatccaatacattttgatatgtcatatttttatttttatgtctcaacattttatttttcttaatttcttgtttgacccactggttgttcagaagtgtattgtttaatttccacctatttgagaattttccagtttycctcttattaatttctagtttcatataccattgtggtcagaaactgtattcaatattattttaattttcttaaatgtgttaagacttgtttattggcttcacatatgatatatcctggagaatgttatgtgtgcactttgatttggtaggtttttgtttttatttatggatacttttttgtttttccttttaattttttactgtgtgcacttgaaaagaatgtgtattctgctgctgttgaggagaacattctgtatgtatccagtaggtccatttggtacaggctgtttaaatctgctgtttctttaccgatt

SEQ ID NO: 268624 - DNA, 586 bp, Homo sapiens
tttattctactgaattttgcttgttttgttctctagttttttattctataaagttaggttgcttatttgagatcattctttttttcttaatttatgcatttgttactatacacttctctcagagctgcttttgctgcatccaatacattttgatatgtcatatttttatttttatgtctcaacattttatttttcttaatttcttgtttgacccactggttgttcagaagtgtattgtttaatttccacctatttgagaattttccagttttcctcttattaatttctagtttcatataccattgtggtcagaaactgtaytcaatattattttaattttcttaaatgtgttaagacttgtttattggcttcacatatgatatatcctggagaatgttatgtgtgcactttgatttggtaggtttttgtttttatttatggatacttttttgtttttccttttaattttttactgtgtgcacttgaaaagaatgtgtattctgctgctgttgaggagaacattctgtatgtatccagtaggtccatttggtacaggctgtttaaatctgctgtttctttaccgatt

SEQ ID NO: 268625 - DNA, 572 bp, Homo sapiens
gattttagacatgtcagcatctcagtcagggccaagattagggtgattcaagtgaggacaagttgctacattaaaatattatatatcttgatctcagttttccacacctccttttaayttgatgccccaggcaagtaactcaattcactttagtccaaaacaagaaggttaagaaaatggctttttaagtttctctgtgacaacctctcatacctggtgattctctttagcccactgagtgagacgaacactttctagctattagtgagagaaatcccactctacattcagtcatcatgcttcttcaggaatgcactggcctctgatctgagagtagcacctctaagccaacatttagaaaatcagccttgaatcttggaataaaagtacctagttttcttgtatcttgttttgtgtggttgagtgcatttatgcaatgttcattagtaatgtcactgcttagaatgagaagtataaaagaatggttatcaaattttaatgtacatattaatcacttggggatttggttaaaatacagattcggagtagtatggtgtgtgatatgatttaga

SEQ ID NO: 268626 - DNA, 572 bp, Homo sapiens
gattttagacatgtcagcatctcagtcagggccaagattagggtgattcaagtgaggacaagttgctacattaaaatattatatatcttgatctcagttttccacacctccttttaacttgatgccccaggcaagtaactcaattcactttagtccaaaacaagraggttaagaaaatggctttttaagtttctctgtgacaacctctcatacctggtgattctctttagcccactgagtgagacgaacactttctagctattagtgagagaaatcccactctacattcagtcatcatgcttcttcaggaatgcactggcctctgatctgagagtagcacctctaagccaacatttagaaaatcagccttgaatcttggaataaaagtacctagttttcttgtatcttgttttgtgtggttgagtgcatttatgcaatgttcattagtaatgtcactgcttagaatgagaagtataaaagaatggttatcaaattttaatgtacatattaatcacttggggatttggttaaaatacagattcggagtagtatggtgtgtgatatgatttaga

SEQ ID NO: 268627 - DNA, 572 bp, Homo sapiens
gattttagacatgtcagcatctcagtcagggccaagattagggtgattcaagtgaggacaagttgctacattaaaatattatatatcttgatctcagttttccacacctccttttaacttgatgccccaggcaagtaactcaattcactttagtccaaaacaagaaggttaagaaaatggctttttaagtttctctgtgacaacctctcatacctggtgattctctttagcccactgagtgagaygaacactttctagctattagtgagagaaatcccactctacattcagtcatcatgcttcttcaggaatgcactggcctctgatctgagagtagcacctctaagccaacatttagaaaatcagccttgaatcttggaataaaagtacctagttttcttgtatcttgttttgtgtggttgagtgcatttatgcaatgttcattagtaatgtcactgcttagaatgagaagtataaaagaatggttatcaaattttaatgtacatattaatcacttggggatttggttaaaatacagattcggagtagtatggtgtgtgatatgatttaga

SEQ ID NO: 268628 - DNA, 512 bp, Homo sapiens
ctatattgattgatgcataatataataaatgttgaacttttttgtacttcctttagatttcaccttccaagataaatttttgatattttttacttttataagttttacataatttctcctttgaatttgataaaattagaaggttcatgcacaaataaagggmatatctctatagttgacattgtagctataatatataagattatataatatataatatatatattaacagacaatatggataaaaaataagattatataatatatattaacttagacaatatggataaaaaataagatgggaagatggtctaatataaagtgagatcttagagttaatttaaataatgtactgatataagttattttattagtcttctggaacgttttagcccaaaacccaaactgctaacccatgattccaggaagattcataaggcgcagtggttgaaattggagatattaactcattaaggtggaactagtctctaaaattgacctcctcctataca

SEQ ID NO: 268629 - DNA, 505 bp, Homo sapiens
gattgatgcataatataataaatgttgaacttttttgtacttcctttagatttcaccttccaagataaatttttgatattttttacttttataagttttacataatttctcctttgaatttgataaaattagaaggttcatgcacaaataaagggcatatctctatagttgacattgtagcyataatatataagattatataatatataatatatatattaacagacaatatggataaaaaataagattatataatatatattaacttagacaatatggataaaaaataagatgggaagatggtctaatataaagtgagatcttagagttaatttaaataatgtactgatataagttattttattagtcttctggaacgttttagcccaaaacccaaactgctaacccatgattccaggaagattcataaggcgcagtggttgaaattggagatattaactcattaaggtggaactagtctctaaaattgacctcctcctataca

SEQ ID NO: 268630 - DNA, 505 bp, Homo sapiens
gattgatgcataatataataaatgttgaacttttttgtacttcctttagatttcaccttccaagataaatttttgatattttttacttttataagttttacataatttctcctttgaatttgataaaattagaaggttcatgcacaaataaagggcatatctctatagttgacattgtagctataatayataagattatataatatataatatatatattaacagacaatatggataaaaaataagattatataatatatattaacttagacaatatggataaaaaataagatgggaagatggtctaatataaagtgagatcttagagttaatttaaataatgtactgatataagttattttattagtcttctggaacgttttagcccaaaacccaaactgctaacccatgattccaggaagattcataaggcgcagtggttgaaattggagatattaactcattaaggtggaactagtctctaaaattgacctcctcctataca

SEQ ID NO: 268631 - DNA, 588 bp, Homo sapiens
taatataataaatgttgaacttttttgtacttcctttagatttcaccttccaagataaatttttgatattttttacttttataagttttacataatttctcctttgaatttgataaaattagaaggttcatgcacaaataaagggcatatctctatagttgacattgtagctataatatataagattatataatatataatatatatattaacagacaatatggataaaaaataagattatataatatatattaacttagacaatatggataaaaaataagatgggaagatggtctaatataaagtgagatcttagagttaatttaaataatgtactgatataagttattttattagtcttctggaacgttttagcccaaaacccaaactgctaacccatgattccaggaagattcataaggmgcagtggttgaaattggagatattaactcattaaggtggaactagtctctaaaattgacctcctcctatacaggggaagatctatcattttttttttaaataaaaaattggaatttggggaagtgtttatccttaatttcttatttatcctagaagagacttttt

SEQ ID NO: 268632 - DNA, 337 bp, Homo sapiens
aagcaaaatttcaattccttcttaaatcttttggttataattgcaggcaatggtgccatcctcaacatgaatttctgtcttccttacaattattttcaaaatgttcattatcaaatcataagaaaatgtgttcttttccccatttctcatttctaatatagaccatctatttaatagagatagaaacagactcctaacycttccttctatcccactctacctcctgcctagccctattatagagttgaactcaactagatcattcgatttccagtgaaataaattttaaaatagagagttattatttatatatagttagaaataatggggcttattc

SEQ ID NO: 268633 - DNA, 337 bp, Homo sapiens
aagcaaaatttcaattccttcttaaatcttttggttataattgcaggcaatggtgccatcctcaacatgaatttctgtcttccttacaattattttcaaaatgttcattatcaaatcataagaaaatgtgttcttttccccatttctcatttctaatatagaccatctatttaatagagatagaaacagactcctaactcttccttctatcccactctacctcctgcctmgccctattatagagttgaactcaactagatcattcgatttccagtgaaataaattttaaaatagagagttattatttatatatagttagaaataatggggcttattc

SEQ ID NO: 268634 - DNA, 549 bp, Homo sapiens
gatgtgttttacaaagccaaagtcaataactggaaaccagggtattaataccattgatcaaaccttaataatttaagaattagggggattaaactcatattgatgtcactcttatgactattgatcctaagrtgaagaggttgaaaagactcaaaagttgtagaaaacagacttaaacaatttataataaatctaaatgttgagaaatgactatttactagacactattattgagttacatgtattaatttttttcaagaatcctagaaataattcttatttctcagatacaggtgacaaaaattgaggcaaggaaatattaggtagattatacaagagcaaatggtaagaacaagattcaaatttagccaacctacttctgagtcagtgctcctaagatagaatggggttgatgttaatatccttgtcttctgagacctcattatcccataattatggagatatcttcgacaaatagtttatacatttaagtcttaagccagaatcctgtaaggttaaagttaagtttcttacgttaagtcagtgaat

SEQ ID NO: 268635 - DNA, 604 bp, Homo sapiens
tgttagtgttataattttcaaaagctgttacaaagattttacatacacatactcaagtataaatttacacaaacctgatactttgtcaatataaacttctagaaaggaacatatgtcttaacctttatagtaataaaatgacctttgtagtcaagaaaycttgtttctctttagaataggtattgtgtagatttcagggcaaggtaatttctagtccctcctctgccaaccagaatcactagtaagtacaacaccagcagtagcccaggccatatatttgcattttgtttgcagatctaccaggatctgattgtattgccccattttcagagttgaaatgtattatatgcttaccctaatggctgagtgccagctttccaacactattaaaaaaactgacaaactgacattaacaaagcaataaggagtcaacagtggacccttggcttttatgtccaccagaaagtcaggctctgaaatgccttcctggctgccctctggaagttgctgcaccaaccactgtgcagtggcagaaagatgttttcttgctgatcatgaaggtctttaaagatcactatctgctgatttaggtttattgccattg

SEQ ID NO: 268636 - DNA, 604 bp, Homo sapiens
tgttagtgttataattttcaaaagctgttacaaagattttacatacacatactcaagtataaatttacacaaacctgatactttgtcaatataaacttctagaaaggaacatatgtcttaacctttatagtaataaaatgacctttgtagtcaagaaaccttgtttctctttagaataggtattgtgtagatttcagggcaaggtaatttctagtccctcctctgccaaccagaatcactagtaagtacaacaccagcagtagcccaggccatatatttgcattttgtttgcagatctaccaggatctgattgtattgccccattttcagagttgaaatgtattatatgcttaccctaatggctgagtgccagctttccaacactattaaaaaaactgacaaactgacattaacaaagcaataaggagtcaacagtggacccttggcttttatgtccaccagaaagtcaggctctgaaatgccttyctggctgccctctggaagttgctgcaccaaccactgtgcagtggcagaaagatgttttcttgctgatcatgaaggtctttaaagatcactatctgctgatttaggtttattgccattg

SEQ ID NO: 268637 - DNA, 649 bp, Homo sapiens
aatactaattttgggaatgaattcctaagcagttgggtgtgagtaatgagataaggttaaattattgatcatgtataacatggattataaaataatatgagtatatcctaaagtaaaatctcaaaaagtacactttctaaaataaaaataaaattaatctagtttgtttggcgttctatgmaaaacacattttagggtcagttaattttggggatatttgttctgataaatgattcaacatatattttgtctagtatttgttgctctttttcctttctgccattgttgcctgctctagtcagacttctcattgttgcctgctctagtcagatttctgataccagagctcataggtgaagtagatcaaaatttctattgtcacaaaatcccctaagtcccaaggtaaaataaaataatgatgtatatatatagatatgtataacttttgccaatttgtccctttattaccaatgaccacagaaaggtctctttttttccatccgttgagtaaaatgcccttctttttaattttgcaagcaccccatgtctttgagcagttctgttagcaagatctacattccttgatttgggaagagcagagcacatacctccttctcttgggagaagagaaaatccaaaaggaaattta

SEQ ID NO: 268638 - DNA, 649 bp, Homo sapiens
aatactaattttgggaatgaattcctaagcagttgggtgtgagtaatgagataaggttaaattattgatcatgtataacatggattataaaataatatgagtatatcctaaagtaaaatctcaaaaagtacactttctaaaataaaaataaaattaatctagtttgtttggcgttctatgcaaaacacattttagggtcagttaattttggggatatttgttctgataaatgattcaamatatattttgtctagtatttgttgctctttttcctttctgccattgttgcctgctctagtcagacttctcattgttgcctgctctagtcagatttctgataccagagctcataggtgaagtagatcaaaatttctattgtcacaaaatcccctaagtcccaaggtaaaataaaataatgatgtatatatatagatatgtataacttttgccaatttgtccctttattaccaatgaccacagaaaggtctctttttttccatccgttgagtaaaatgcccttctttttaattttgcaagcaccccatgtctttgagcagttctgttagcaagatctacattccttgatttgggaagagcagagcacatacctccttctcttgggagaagagaaaatccaaaaggaaattta

SEQ ID NO: 268639 - DNA, 649 bp, Homo sapiens
aatactaattttgggaatgaattcctaagcagttgggtgtgagtaatgagataaggttaaattattgatcatgtataacatggattataaaataatatgagtatatcctaaagtaaaatctcaaaaagtacactttctaaaataaaaataaaattaatctagtttgtttggcgttctatgcaaaacacattttagggtcagttaattttggggatatttgttctgataaatgattcaacatatattttgtctagtatttgttgctctttttcctttctgccattgttgcctgctctagtcagacttctcattgttgcctgctctagtcagayttctgataccagagctcataggtgaagtagatcaaaatttctattgtcacaaaatcccctaagtcccaaggtaaaataaaataatgatgtatatatatagatatgtataacttttgccaatttgtccctttattaccaatgaccacagaaaggtctctttttttccatccgttgagtaaaatgcccttctttttaattttgcaagcaccccatgtctttgagcagttctgttagcaagatctacattccttgatttgggaagagcagagcacatacctccttctcttgggagaagagaaaatccaaaaggaaattta

SEQ ID NO: 268640 - DNA, 649 bp, Homo sapiens
aatactaattttgggaatgaattcctaagcagttgggtgtgagtaatgagataaggttaaattattgatcatgtataacatggattataaaataatatgagtatatcctaaagtaaaatctcaaaaagtacactttctaaaataaaaataaaattaatctagtttgtttggcgttctatgcaaaacacattttagggtcagttaattttggggatatttgttctgataaatgattcaacatatattttgtctagtatttgttgctctttttcctttctgccattgttgcctgctctagtcagacttctcattgttgcctgctctagtcagatttctgataccagagctcataggtgaagtagatcaaaatttctattgtcacaaaatcccctaagtcccaaggtaaaataaaataatgatgtatatatatagatatgtataacttttgccaatttgtccctttattaccaatgaccacagaaaggtctctttttttccatccgttgagtaaaatgcccttctttttaattttgcaagcaccccatgtctttgagcagttctgttagcaagatctacattccttgatttgggaagagcagagcacatayctccttctcttgggagaagagaaaatccaaaaggaaattta

SEQ ID NO: 268641 - DNA, 542 bp, Homo sapiens
  misc_feature (1)...(542): n = A,T,C or G
ctcttaaataggtatgaagtcaaatgacattttataacatatacaataagggagtttgtcaaaagttgataaactaagttctatgatatagtatggttatggtgtcccatccaaatctaatatgacctataatcctcagtattgnaggtggggcctggtgggaggtgattggattatgngggtggatttctcataatagtttaccaccatccccttggtgctgtctttatgatagtgagtgacctctcatgagatctggctgcttmaaagtatgttgcatcttgttctctttctcttgctcctaccgtatgagatgtctgctcccccttcactttccaccatgattgtgggtttcctgaggcctccccagaagctgagcaaatgccccaagccatacttcctatatagcctgcagaatcatgagccaattaaacctcttttctttttaaattacttaatctcagctatctctttttagcaatgtgagaactaatacactccatcacctattacatatgtaacctgtggaagctgacttgaca

SEQ ID NO: 268642 - DNA, 542 bp, Homo sapiens
  misc_feature (1)...(542): n = A,T,C or G
ctcttaaataggtatgaagtcaaatgacattttataacatatacaataagggagtttgtcaaaagttgataaactaagttctatgatatagtatggttatggtgtcccatccaaatctaatatgacctataatcctcagtattgnaggtggggcctggtgggaggtgattggattatgngggtggatttctcataatagtttaccaccatccccttggtgctgtctttatgatagtgagtgacctctcatgagatctggctgcttaaaagtatgttgcatcttgttctctttctcttgctcctaccgtatgagatgtctgctcccccttcactttccaccatgattgtgggtttcctgaggcctccccagaagctgagcaaatgccccaagccatacttcctatatagcctgcagaatcatgagccaattaaacctcttttctttttaaattacttaatctcagctatctctttttagcaatgtgagaaytaatacactccatcacctattacatatgtaacctgtggaagctgacttgaca

SEQ ID NO: 268643 - DNA, 380 bp, Homo sapiens
atatgtcaaaaatatgtttgtactcccatactctttgaagcattattcctagcagcaaatatatggaaacaactgaagtgcccatcaatggatgaatggattaaacaatgtggtattcggatacaatgaaataccattcagtcctaaaagtacaggaaattctgtcattttcaacaacatggatgaaactaggtgtatataacactgcataaaataagctaggcacagaaagacaaataccacatgatctcacttacatgtgcaaaatgaaaattgaactcatagaaggagcgagtagaatagtggttactcaaggctggggaaataggtggtcatggcwacaggaaacactgattaaggttacataagctcagagtgga

SEQ ID NO: 268644 - DNA, 551 bp, Homo sapiens
tagcagccccggagttgctctgcatctatcgtggttgtggaggctgtctgatttgtgaatcattctttactcacttaaactctgttaaatttgtcttaagtttttaacatgtctttctgacatacttaggcatatmtggaaatcatgttttgaattagacattgttgaaattgacccaagccctgtgatcctgaaaaacagaaggtcaaaaaatcttttcaccttttatgtttttggaaatggcttactgacaagaaccatccttcctaagtgacttggatgagactcaaacatgcttccttatatgacaagatcagacaaggttgttccaaattcccatcctttgccagataaggaattagtaaattctttgtccccactgatcaatctaaacaaaatgtttattaaccaacctttgcttaagattgtttcctccaagtcctttatctttgagtaaacttagtctatgacagcatacaacccatctttaacagtcacttccaataggctggcctcaggaaaacattccctaatctgctgaatcatgacac

SEQ ID NO: 268645 - DNA, 602 bp, Homo sapiens
tgcttaagattgtttcctccaagtcctttatctttgagtaaacttagtctatgacagcatacaacccatctttaacagtcacttccaataggctggcctcaggaaaacattccctaatctgctgaatcatgacactgttattcatctcacttccacatctggttctttcgatctttgtttactctttcccattaaaaaacaacaacaaaaaacccttttccctaacttttgataaactcatattttctggttttaatgttctccctactgcaatagccctcatttttctatgacaatagtcccttcccmcaaccgttttcaataatccttctgaacaaagtatcttactcagttcatatttattgtgtatttgacagagcaattaacatataattggtatgagaaagcaaaaaagagaagagaattttaccacgtatgtaaacccgaatatcatcaatatttacaacgtagaataaggataaaaagtccaggaaatggtttggaaaacaaaacaaaacacagacacctgaagaatacaatggaaattggagaaatttattgaaaaacttaagagatgtgcatccctcatcaaaaccaagatt

SEQ ID NO: 268646 - DNA, 602 bp, Homo sapiens
tgcttaagattgtttcctccaagtcctttatctttgagtaaacttagtctatgacagcatacaacccatctttaacagtcacttccaataggctggcctcaggaaaacattccctaatctgctgaatcatgacactgttattcatctcacttccacatctggttctttcgatctttgtttactctttcccattaaaaaacaacaacaaaaaacccttttccctaacttttgataaactcatattttctggttttaatgttctccctactgcaatagccctcatttttctatgacaatagtcccttcccccaaccgttttcaataatccttctgaacaaagtatcttactcagttcatatttattgtgtatttgacagagcaattaacatataattggtatgagaaagcaaaaaagagaagagaattttaccamgtatgtaaacccgaatatcatcaatatttacaacgtagaataaggataaaaagtccaggaaatggtttggaaaacaaaacaaaacacagacacctgaagaatacaatggaaattggagaaatttattgaaaaacttaagagatgtgcatccctcatcaaaaccaagatt

SEQ ID NO: 268647 - DNA, 591 bp, Homo sapiens
ctccctactgcaatagccctcatttttctatgacaatagtcccttcccccaaccgttttcaataatccttctgaacaaagtatcttactcagttcatatttattgtgtatttgacagagcaattaacatataattggtatgagaaagcaaaaaagagaagagaattttaccacgtatgtaaacccgaatatcatcaatatttacaacgtagaataaggataaaaagtccaggaaatgstttggaaaacaaaacaaaacacagacacctgaagaatacaatggaaattggagaaatttattgaaaaacttaagagatgtgcatccctcatcaaaaccaagattttattctcttgtcagctagaagggacaataaagagggtctaggaggaatcacaaagtatttagcacctaataactgccaaaatttccactaattactctagcacttaaccctcagcaagaacactcaccagtgtaggtgagtatggtgtgggctttgaaggtcaatagacctagatttaaatttagatatttcttagacactgattgactcaacataaaaatagtaacaataaagtattagaactatta

SEQ ID NO: 268648 - DNA, 631 bp, Homo sapiens
tgagatttggcaggggcatatattcaagctatatcagagggcatgaggagttaatgttcaatgggtatagagggttcagcttttgcaagatgaagtcagttctgcagattaatggagatgatgcacaaaaatatgaatgtatttaacactattgacctgtacacttcaaattgattaagatggtaaatcttatgygtattttgccaaattaaagaaattaaaattatttactgagcaaagattaaacacataagaatatttaaaattttattataactatattgattagattttactgagctttatactaaaatatgagattatactaggctatgtacttatacatattctatatactacatattatagtctatattcctcacagtaagaggaggtaagtactgtttcattttgttaataaaacagaccagaatagcaagataactcaataaagataatactgaagaagtatcaggatatgaaccagttctttccctaacatccatttaccaatagaagtgaaactcaagtttaagtcaagctattaagttgcttatagtcattatatctttcatttgctggcatcttgccaccacttctataaaaccttactcttgaaaaaaagtgagag

SEQ ID NO: 268649 - DNA, 474 bp, Homo sapiens
ctattaagttgcttatagtcattatatctttcatttgctggcatcttgccaccacttctataaaaccttactcttgaaaaaaagtgagaggtaaaaggtaatattcacagtcaaaaagagcatcatcagstacccaacacatgggtgccatttcaacaccattctccaaaagacaaagtagacataacttccgcttagagagacagttgaatacttgtcaaacagctgccataaacccatggggtctgctacattgaacagtgtcatcctctgaacatgactttcaatgatatctttgtattaaggcaaaatacgtcaactggaaataacattttcaaccttgtttgaatccaaatgtcagtgtgtttacatgttctctgctcttgcctatgacactggcatcttagtgcatgagctgacatatattttgtggtcatgctggcatgctacatcaaggtcctatgatgagcagtt

SEQ ID NO: 268650 - DNA, 474 bp, Homo sapiens
ctattaagttgcttatagtcattatatctttcatttgctggcatcttgccaccacttctataaaaccttactcttgaaaaaaagtgagaggtaaaaggtaatattcacagtcaaaaagagcatcatcagctacccaacacatgggtgccatttcaacaccattctccaaaagacaaagtagacataacttccgcttagagagacagttgaatacttgtcaaacarctgccataaacccatggggtctgctacattgaacagtgtcatcctctgaacatgactttcaatgatatctttgtattaaggcaaaatacgtcaactggaaataacattttcaaccttgtttgaatccaaatgtcagtgtgtttacatgttctctgctcttgcctatgacactggcatcttagtgcatgagctgacatatattttgtggtcatgctggcatgctacatcaaggtcctatgatgagcagtt

SEQ ID NO: 268651 - DNA, 539 bp, Homo sapiens
atagaatagaatttcacagttacttaactgccacagtgactaagaagaaaatgtttgcyggtctctaatctagatagggatatgaagacatagcccctctcttttgccaatggaagtgtaaattgactcaatgtacatggagagttaattggtaccatatatcaaaatctaaaatgccctataacacagcaactcatttatatgaagtattcagatatctagaagaaagcaaaactgtatatataaacttatttgcagcattctgaaacgaattaagatgtacctaaatactaaggaacattataaaatataatttatccacacaatccataaaatataataatcagtagttgagaagaaagtataagagacacacacacacacacacaaatagggtaaaatatctaggatttttaaattgtatttagctacttcattttgtcaaaatctaggatcctttacatgtaaagtcatattgtacatactgtgcaccaacttgttcatgtaaaagaatatgttgttacacagatgaatgcact

SEQ ID NO: 268652 - DNA, 600 bp, Homo sapiens
tctctaatccatagaaccatgtgagagaattatttgagtcgaacatttttgggtatagtttgttctgcaacatatacatatttatgcccagcaatacatcactcaaaggtcaaatgccgattaccaattgtctttttttttttaagaaattgttgtctgggcacggtggcttacgcctataatcccwgcactttgggaggccgaggcgggcagattgcctgaggtcagtgtttcaagaccagtctggccaacatggtgaaactccatctctactaaaaatacaaaaaaattagctgggcgtggtggcaaacacctgtaatcccagctactcaggaggctgaggcaggggaattgcttgaaccagggaggtggaggttgcagtgagccgagatcatgccactgcaccccaacctgggcgacagagcaagactccatctcaaaaacaaaaaacaaattaaaatgtcatgatctaggtgcacttaccttaaatctttcatccccttcttgcagctcaactctgaaaatattggagctggaaaaaaatatcactgtattctatcttggtttatagatgaggaaactgaggattttacagaaaaa

SEQ ID NO: 268653 - DNA, 600 bp, Homo sapiens
tctctaatccatagaaccatgtgagagaattatttgagtcgaacatttttgggtatagtttgttctgcaacatatacatatttatgcccagcaatacatcactcaaaggtcaaatgccgattaccaattgtctttttttttttaagaaattgttgtctgggcacggtggcttacgcctataatccctgcactttgggaggccgaggcgggcagattgcctgaggtcagtgtttcaagaccagtctggccaacatggtgaaactccatctctactaaaaatacaaaaaaattagctgggcgtggtggcawacacctgtaatcccagctactcaggaggctgaggcaggggaattgcttgaaccagggaggtggaggttgcagtgagccgagatcatgccactgcaccccaacctgggcgacagagcaagactccatctcaaaaacaaaaaacaaattaaaatgtcatgatctaggtgcacttaccttaaatctttcatccccttcttgcagctcaactctgaaaatattggagctggaaaaaaatatcactgtattctatcttggtttatagatgaggaaactgaggattttacagaaaaa

SEQ ID NO: 268654 - DNA, 520 bp, Homo sapiens
gcaccacaatgtcttccacaatggttgtggtttccacaagacaaccattgtgtcttccacaatggtttccactcccaccaacagtgtaaaagcgttcctrtttctccacatcctctccagcatctattgtttactgacttttaaatgatcgccattctaactggcgtgagatggtgtcggtatctcattggagatgagatggttttgatttgcatttctctaatgaccagtgacctacttaacaaacctgcacgttgtgcacatataccccagaacttgaagtattaaaaaaaaatcccttggaaattattcaagcataaaaaaattgaaaataaaaaaaagaagcatgctgattcaccaaggcatagaaaaggtgctcactccattgcagatgtcgtaaaatgagaaggaaggcaatcatttttcaaattattcttgatttttcaaataactactttatttttcatttcttatattttaaattacagtattctaaataaactagttttactatttttaa

SEQ ID NO: 268655 - DNA, 575 bp, Homo sapiens
ccaacagtgtaaaagcgttcctatttctccacatcctctccagcatctattgtttactgacttttaaatgatygccattctaactggcgtgagatggtgtcggtatctcattggagatgagatggttttgatttgcatttctctaatgaccagtgacctacttaacaaacctgcacgttgtgcacatataccccagaacttgaagtattaaaaaaaaatcccttggaaattattcaagcataaaaaaattgaaaataaaaaaaagaagcatgctgattcaccaaggcatagaaaaggtgctcactccattgcagatgtcgtaaaatgagaaggaaggcaatcatttttcaaattattcttgatttttcaaataactactttatttttcatttcttatattttaaattacagtattctaaataaactagttttactatttttaaaaatctccgtatgtatttaccactgacagtatagagtttttgatgttttggcaaatttttttaaggtcatggaacaatcatagtttttccattggctatgatcaatttgcacaggttaatttgtatgggcat

SEQ ID NO: 268656 - DNA, 575 bp, Homo sapiens
ccaacagtgtaaaagcgttcctatttctccacatcctctccagcatctattgtttactgacttttaaatgatcgccattctaactggcgtgagatggtgtcggtatctcattggagatgagatggttttgatttgcatttctctaatgaccagtgacctacttaacaaacctgcacgttgtgcacatataccccagaacttgaagtattaaaaaaaaatccctkggaaattattcaagcataaaaaaattgaaaataaaaaaaagaagcatgctgattcaccaaggcatagaaaaggtgctcactccattgcagatgtcgtaaaatgagaaggaaggcaatcatttttcaaattattcttgatttttcaaataactactttatttttcatttcttatattttaaattacagtattctaaataaactagttttactatttttaaaaatctccgtatgtatttaccactgacagtatagagtttttgatgttttggcaaatttttttaaggtcatggaacaatcatagtttttccattggctatgatcaatttgcacaggttaatttgtatgggcat

SEQ ID NO: 268657 - DNA, 552 bp, Homo sapiens
agttctgctttatgtaactctcaattagaccagactttatttgaaacatgttcttatggcaaaatgcaggagcttagaaaagtaaacacagctgcgcagccattttaagcaagctctacatttcattggctaaagtaggttactggcaaaacccaatatcactgacaaaggaaagtaccactgtggtcaacagggaggtgaatatttgctatatcataatagaattagcatgcatgtgtgcacacaaatacataccrccgtcacccaatcccatagccatatattgcatatgagtgtcttcttcctttctaatcaaagatttctgttattatttaactaaatccactgaatcttccactgtttctctggcatttagttgggttcattgagtatgagattcctgttccagcaagcatcatattggtaactgcaattcaaagagaggattcttgctgcttgctggacttaactgcacaactatatttttgaaggagaaacaacttgttatcactgttcaatgacttagtcttataatttggggaaaaaaaagta

SEQ ID NO: 268658 - DNA, 600 bp, Homo sapiens
tggctgtttaccgcacagttcacaagcattaatatatttgctaatctagtagagtctacggagtttgataatttgattttttttaactttatgactttaggacataagccttgtggttacataccaagatatataggtattgatatayggtatggggttattcaaactaacagataaaggtggggctttctcagtttaaagctttttagaattgattttaatatgtcatgcttctgtgtgtctgtaatcccaaaattcaggaggggacgtacaatttgagattacatgttcagggtcacagcatgatgagccatcctcttgcagtgagagaaatatttgcttcataaaatcattgaatggttttaaaagtcacatggcaaacagatttgtcttatgcaagtgagaatcaatttagaaaagctgcccgtgccttctccactaccacatgttcagccttacaaacttatttcttagtactcaaaacaaacattttggaagattctgagattatttgacacattctcctcattttgcattgccatctggatgcagaatccaaagcagcaccattttatcaagaaagctattcctgggaaacag

SEQ ID NO: 268659 - DNA, 552 bp, Homo sapiens
cctctaaatttgtggtaatatttcacaccagcaatgaaaaactagtactccgagatttgaattaaacattttagyataataattttaaaaatttaaataaagcaagcataagtaactatttactgcaggaggccagttttagtctttgtatttttaggtatgtttgaaaaatatacaacttctatttaaagttatcatttaaatatattataaaatttagaaaactaaataatatgaagtgtcggtgagctgtgagaatataaaaaccctcatccatttctcatggaaagtaggccatggtaggcagtcaggagatacacaaacagactatgcaactgaaatttgattctggatatatactgcaaagaaaatctcacacagctcctttcaagggtatgaatgattatggttactgaggtactttttatgattgggctcagtgggttggtagtccataattagcagaataaataaggttgattcatatagaggaaaacagcagttaggtacaacaacacaagatgagataacacaatattatttacataaaag

SEQ ID NO: 268660 - DNA, 530 bp, Homo sapiens
agtttccctcatctttgaaatgtaggtaatggcaatctgaagggcttatggtaatattaaataatgcagatacaaaatatayagaacatgccccagaaatgtgttccttttttgctcgtttcaattacctcatttacataaatgaaatagttaatattttgatctgttctgaagcactcagctgactaacctgataggccaataacagcttgatgaatgcagggcatccttgttgtgttcatcattcaggagtccacagtagatctcgctaatcaatcgtttcactccttcctgctgagagcagatacagccttagttagaatgtagcccaagttggcatgtgagttaaaacatatttgcaatccttaattaggttcccaagagaaagggttaaattcatagtaatagcagcaaagatatgctatttatatatgcaatagcttctggagacaaggcattttcctttacttcgtaatgcatattggatcttattttagcccacaccagttaggagttaaaagtctaataac

SEQ ID NO: 268661 - DNA, 530 bp, Homo sapiens
agtttccctcatctttgaaatgtaggtaatggcaatctgaagggcttatggtaatattaaataatgcagatacaaaatatatagaacatgccccagaaatgtgttccttttttgctcgtttcaattacctcatttacataaatgaaatagttaatattttgatctgttctgaagcactcagctgactaacytgataggccaataacagcttgatgaatgcagggcatccttgttgtgttcatcattcaggagtccacagtagatctcgctaatcaatcgtttcactccttcctgctgagagcagatacagccttagttagaatgtagcccaagttggcatgtgagttaaaacatatttgcaatccttaattaggttcccaagagaaagggttaaattcatagtaatagcagcaaagatatgctatttatatatgcaatagcttctggagacaaggcattttcctttacttcgtaatgcatattggatcttattttagcccacaccagttaggagttaaaagtctaataac

SEQ ID NO: 268662 - DNA, 628 bp, Homo sapiens
gaatcatggggaccattctttcccatgctattcttatgacggtgaataagtctcatgagatctggtgggtttatcaggggtttccattttgcttcttcttcattttctcttgccaccaccatataagaagcrcctttcacctcctgccatgattctgaggcctcatcagccatgtgaaactgttaagtccagttaaacctctttttgttcccagttttgggtatgtgtttttcagccgtgtaaacacagactaatgcatctttataattttttttatttcattaaattggacttgacctttctctggtgcctccttgattagcttaataatcaatcttctgaattctttttctggaaaatcagggatttcttcttggtttggagccattgctcatgagatagtgtggcttattgatggtgttaaagaaatccattttgtcatattaccagaattatttttctggattctcctcctttgagtaggctatgtcagagggaagatctcaggctaaaggtctgctgttcagattattttctcccttggggtgatcccttaatgtagtactctccccattttcctagggatggggcttcctgagagccgggctgtggtgattgttatttttct

SEQ ID NO: 268663 - DNA, 628 bp, Homo sapiens
gaatcatggggaccattctttcccatgctattcttatgacggtgaataagtctcatgagatctggtgggtttatcaggggtttccattttgcttcttcttcattttctcttgccaccaccatataagaagcgcctttcacctcctgccatgattctgaggsctcatcagccatgtgaaactgttaagtccagttaaacctctttttgttcccagttttgggtatgtgtttttcagccgtgtaaacacagactaatgcatctttataattttttttatttcattaaattggacttgacctttctctggtgcctccttgattagcttaataatcaatcttctgaattctttttctggaaaatcagggatttcttcttggtttggagccattgctcatgagatagtgtggcttattgatggtgttaaagaaatccattttgtcatattaccagaattatttttctggattctcctcctttgagtaggctatgtcagagggaagatctcaggctaaaggtctgctgttcagattattttctcccttggggtgatcccttaatgtagtactctccccattttcctagggatggggcttcctgagagccgggctgtggtgattgttatttttct

SEQ ID NO: 268664 - DNA, 628 bp, Homo sapiens
gaatcatggggaccattctttcccatgctattcttatgacggtgaataagtctcatgagatctggtgggtttatcaggggtttccattttgcttcttcttcattttctcttgccaccaccatataagaagcgcctttcacctcctgccatgattctgaggcctcatcagccatgtgaaactgttaagtccagttaaacctctttttgttcccagttttgggtatgtgtttttcagccgtgtaaacacagactaatgcatctttataattttttttatttcattaaattggacttgacctttctctggtgcctccttgattagcttaataatcaatcttctgaattctttttctggaaaatcagggatttcttcttggtttggagccattgctcatgagatagtgtggcttattgatggtgttaaagaaatccattttgtcatattaccagaattatttttctggattctcctcctttgagtaggctatgtcagagggaagatctcaggctaaaggtctgctgttcagattattttctcccttggggtgatcccttaatgtagtactctcyccattttcctagggatggggcttcctgagagccgggctgtggtgattgttatttttct

SEQ ID NO: 268665 - DNA, 585 bp, Homo sapiens
aagtaaagggatggagaaagatcatgcaagtggaaaacaaaaaacagcaggtgttgctgttcttgtgtcatataaaacaaactataaataaagtaaaaaaagacagggaagggcaattatatattgataaagggttcaattgaaccagaagatttaactcttctaaatatacatgggttcaacttcagagcacccagatttctataacaaacatcactagacttagaaaagagatcaaaagacatataatcatagcrgggaatttcaacatcccaccattagcactaggcagatcatcaagacagaaaattaacaagctctggacttaaattggacttttgaacaaatggacctaataaacatctgtgaaatcctccatcaaacaaccatagaaaatatattcttctcatccgtgcatggaacagtctctaaaattgactacctgctagtaataaagtaaatctcaaaaaattcaaaaaaatcaaaattatataaagcatcttctcagactactgtggaattaaaaaaaaatcggtgaaaagaggaaatttcaaaaaccacataagtatatgaaaactaaacaac

SEQ ID NO: 268666 - DNA, 595 bp, Homo sapiens
tctcaaatcttactgtgggctgcatgaggggcatagaatgtcctcagtttgcctttttttaaaaaaaaaatcatcttcaaagaggaccaatgtggcatacaaaatgaacttcttttaatgccaaaatttcttgggaatggttctgtactacgtttacatttattttccatttaggctggattattaggtcttttaagttgccgtcattcaagacatttttataacttkgtgccaggtggctgctcctggaaaactcttggtcccactttacaccttaatatgcaaattccaatcatcaagatcttcaagcagtaagaagaatcagctcatgaatttgaaaaaggaagatactccagggggttttatcacagaacaaggcttttgtactctaatggaacaggtcagagtattccaaaaactgttccagattcccttttaagaatcccatcaacaaatcctactcattgctgctcaagttctgcattccctgtgaaccggcccgtaagaatatctatcccacagtacagtctcttatctgagcagctcctatatttatgtttagtgtgcttgatcctaaccctatctatttcatgtt

SEQ ID NO: 268667 - DNA, 575 bp, Homo sapiens
agacccaggactagggtaagacaataagatacttgcctcagccacatgatttaaaaagataccccccaaatcagtaatcaaataatatttaacacaattttaaaaaatcaaaattattggaaaaattacaatgaacaataaattttaaaatgtagacatagttggtataattgaattcttttcttttgcagtttccaaagtcttctcacatccttgattccaatacaaatacagaaaacagaaaatctagattcataaagatacagttagaagtgactatattaggtacaaggatggaaaatattctcagggtgacctcagctcacagttctatgtatttggtttctaggagatgcattaataggaatcttttggtaggctgtgtggtgattgttgtcttagaattaaataacaayagcaacccctctaaattaagggggacttaggaaggattctaacatttccctgggatctgttgcagacacagagctctacatgtatcatcttatttgatcctcattacaacttattactattttaaacactagaaaactgaaattcaggaaggtgaaaca

SEQ ID NO: 268668 - DNA, 529 bp, Homo sapiens
agaaatgaccagatgtgtgattatataatgattcatgggctgtagccaatggtttgcctggatggtcagggacgtggaagaagtatgattggaaaatcggtgacaaagaaatttggggaagaggtatgtggatggacctctctggtcaaaacctgtgaagatatttgtatcttgtgtgagttttcaccaataggtgacctcagtagaggaggatttcaataatcaagtggataggatgacccgttctgtggacaccactcagtatctttccccagccacccctgtcattgcccaatgggcccatgaacraagtggctatggtggcagggatggaggttaagcatgggctcagcgacatggacttccactcaccaaggctgacctggctacagccactgcctagtgcccaatttcctagcagcagaaaccaacactgagcccttgatatggcaccgttcctcagggtgatcagccagctagctggtggcaggttgattacattggacctcttacatcacagaaagggcag

SEQ ID NO: 268669 - DNA, 619 bp, Homo sapiens
gccagagcaggaacaagagacagaggtggaggggtgatgccacacacttttaaatgaccagatctcatgtgaaccagagcaagaactcacttattaccaaggggatggccattcatgaaggatctgcttccatggtccaaamagctcccaccaggtcccacctccaacattggggattacatttcaacatgagattcaggcaaagagaaatatccaaactatatcaaaccttaagtgcatattgctaagtgaaagaagctaatctggaacggttgcagactgcatgattccaatcagatgaggggaaggaatgatgaataggtggagcataggagacttttatggcagggaaactattctttatgatactataatggtagatacatttcattatacattggtcaaaacttacagaatgtataacaccatgagtgaactctaatgtaaattatggactttgcttgataatgatgtgtcactgttggttcattgatagtaacaaatgtaccactctggtgtgagatgttgatagtgggggaggctgtatttgtgtgagagtaaggaatatatgggaattctctgtaactctgctgcatttcactgtaaacctaaaatggca

SEQ ID NO: 268670 - DNA, 591 bp, Homo sapiens
aaacctatcgcctgcatggtcctgcttaccaagcagcgacaaacatcatagcaggcaggtggccctagtctcactcaaagctatttaattggaagtatgtcacttacaatcagaaagttagctacgaaggagtcagagaaatctaattttgagcttttcagcctctgcaatacaggaaagtagtatagaaggtgtttggaatggttgctaaaagctagggttttatatccatcactatggtcccatgcatataaaaagacacattatgccagtggccccagcctctgtcaaagaccaaacactagattcagctgggcttctcaaaaatcaactatatggagrtacaatatgcatatgataaaatgcacctatcttaagtgtacaattcagtgagtttgacagatatgatgtaaatgtaatcaccaccataatcaagatatgaaatctttccgtcattccaaaaagttcctttgtgttcctttgcaggcaatcccctcatttctcccactccaagaaaccagagatctgattcatgtcactattgactagttttttctgttctagaatttcatataaatgaaagcctacagt

SEQ ID NO: 268671 - DNA, 589 bp, Homo sapiens
acactattttcttcattccagcattcagagagacataagaatgacaactgacataatctcatttaagataactcatctgtagcacagacaggctgactaccttgttttaagtcatatctagttagttggctaggatagttcacctgggaccataggtgtgaacccttggttctggctgttagttggattccttgcttcttctctacttcatgttcayagaggtagccaagatgctgccagacaacttcttctcacatgtctgatgtcttggttgggacggctggaatagctaggcctagtgccatgtctatgcagatttatcagggggatatcttgggcttccctatacatggtggtcccagatacctggagttcttacataatggttagtttcccctagagcaagcattctaagagacacactggaagtcctagaggatcacttgtcacattctattagtaaagcaaagtactaagactcgctccagattcaaagtgaggagaattaaactcaatagcaggaatagcaaatgatttgcaaccatctgtaatatattgcaataaataatgtatctgaatagcttcacat

SEQ ID NO: 268672 - DNA, 590 bp, Homo sapiens
ccacgtccaggtaatatttttattttttgtagagagggtctcactatgttacccaggctgatctcaaactcctgggctcaagcgatcctcccaccttggcctctcaagagtgctgggaawacaggctgagctaccactccccccgctaaaaggtttccatgtgcacggcaacctcatggttcgagatggctgctgtaactgcatcctttaagcctaaatccagacgagaaaaagaagcgaagtcagggtgacgtggggaaaggcccttctaagctgtgggagctaactttaagaagcttttcattaattccgtttatatctcactggccaaacctagctgcaaggaaagttgggaaatgtagtcctttattctgggcagcaatatgatgttaaaaagatcaagatgtgcttattaaggaggggagtgttgatattcagctaggcagctagcagattctgccacagtgtttactatgcaaaataatttccagtgtgggagatataaatcattaaattaaaagtgtttaacaaataccaaacaggacatatttttatatgcatagtcatagtataactattaatagtttgaa

SEQ ID NO: 268673 - DNA, 711 bp, Homo sapiens
tttgttgtgaccttcttcataatagccaaaaggtggaaacaacccaagtgttcatcaaccaagaaatggataaacaaaatattttatacacatacagtgggatattattcagccatgaaaaaaatcaagttttgatatatgctactacatggatgagccttgaaaacattatactaagtgaaataagccagagaaatgacaaagtattgtataattccacttatatgaaatatctagaagaggcaaatttatagagacagaaaataggttaaaggtggaggggataagggagtgttattgcttaatggttattgaatttgttttgggtgctggaaaagcttcrttaacagatagtggtggtgtttgcacaatagcatgtatgcaattaatgccactgaactgtacccttaaaatggttaaaatgtcatactttgtgttgtgtatatgttatcataataaaaaaagaaatgattcggtgtatatttttaaattacggtgttttgctgaagacaggaataatgttggcagaaaaggcaaatgtattgcttccttttttagagactttaattatttgtaggtagacaatattcttacaggtaattaaagtatgcttagttgtctttttaaaaataccacattttagttcatttgaaaaggaactgagtaatcttgatagattatcatacacctagttgatgaaatattttgtaa

SEQ ID NO: 268674 - DNA, 622 bp, Homo sapiens
attagctcaaactaggtcaaattttccaattaactatatccagatgagtagggagttacagactaccaacaggattcctagaagcccaagctattacttggggagccatttccagagaagggaatggctcatgggttcagtagacccttctaaaagcatctatcccagagttcccatccaggcaatgcagaggcccagagcaacktataaaggagggttgtctttcttcctgtgaactctgaaaatttggcacaggtctcagttaatttaaaagtttattttgccaagattgaggatgtccccatgacacagcctcaggaggtcctgacaacatgtgctcaaggtggctggggtacagcttagttttatacattttagggagacacgagacatcaatcaatatatataagaagtacagtcaatatatgtaaaaagacaggtgagacaggaagggttgcattattttgagcttctgcttagtccttccaaaagaggcaatcagctatgcatctcagtgagcagaggggtgactttgaatagaatgggaggcagatttgccctaagcagttcccagcataactttttccctttagcttagtgatttgggggcctcaagatttgt

SEQ ID NO: 268675 - DNA, 535 bp, Homo sapiens
agttgtacacctttgccaaatattaacccataaatacggtctcattttgtttaacaagagagaataatgcatctccctaagttttgaactcattaattccccaggcattctagctaaaaagcatacttatttttttctttgataagtcacatgcctgtgtctgtcagttcaataatttatatrgaacagggagttttaagcatggttatttcactgttgatgatcatcaataaattcatcacattgtgggggaattttcataaaattgcttatatcttgtcttgattatttcttactttgtgactcaatgattgggaaccagctgtgaaagttgatcacacaaattgggtcattcttgttatactcaactaaatcagagttgaggaaccagggggaaaatgcactcagggcatatcatattgctccaagaatgtaattctctgcaaacctggctgccgaaactgcctgttttaacgtgaaccagttttaatataatagctacagaaacagcctgctgtaactctacaactagttt

SEQ ID NO: 268676 - DNA, 636 bp, Homo sapiens
gtgcacaccaccatacctggctaattttcgtattttttgtatagatagggttctgccatgtagcccaggctggtctggaactcccaggctcagatgatctacctacctcagcctctcaaagggcttagattacaggcatgakccaccatgcctggccagttttgtctttacttaatcaagttttagtaccatttccattacatcacctactcaaaataagatatttacatcaactgtttatcaataaagtatctgtagtttctacgtcactcttttgccttcaagtttccttagctgattcctttttaaccaagaatggacaaaaaacaaacaaacaaaaaaccccagaaatataattttttagctcctcttttttttttctgtaagaaaaggaaggtgtgttttaaaattccatgatagttactgatattttcttaatttttccagaagtgagaagctgaggcaagaggaggccaagtaacttgtatgaagttgtatgatcaccaagaagcagaaatcagagtaggctcttgacctatgctgcctcttatcatgtacaggaagattttattctgaacccttaaggatatagctaagagattttttaatgttaccatcgagacttcaatgtcaggt

SEQ ID NO: 268677 - DNA, 460 bp, Homo sapiens
caccatacctggctaattttcgtattttttgtatagatagggttctgccatgtagcccaggctggtctggaactcccaggctcagatgatctacctacctcagcctctcaaagggcttagattacaggcatgagccaccatgcctggccagttttgtcttkacttaatcaagttttagtaccatttccattacatcacctactcaaaataagatatttacatcaactgtttatcaataaagtatctgtagtttctacgtcactcttttgccttcaagtttccttagctgattcctttttaaccaagaatggacaaaaaacaaacaaacaaaaaaccccagaaatataattttttagctcctcttttttttttctgtaagaaaaggaaggtgtgttttaaaattccatgatagttactgatattttcttaatttttccagaagtgagaagctgaggcaaga

SEQ ID NO: 268678 - DNA, 561 bp, Homo sapiens
caaatcataaaatttgtcatggcttagcacagtttagtggaaagatcttggtctttgaagtaagattgatgtgtttgaattccagctgtaaataaaaaggacyaacatgattagttaaagtggagaaagctctaagaaggaagaactcagtctaggactccttgtataactactgcggcatgcttactattgtattacacagtgtgctaagcacttgccttactgatttaatgtttacaccaaccctctgtggtaggcattagcaactccatttaactgatttttaaaaaatgtagtcttagagattaagcaatttgtaaatagtataacacggatttcaacccggttgtttttaactgctttattgaggtataattgacattcaataagtatacataaagtgcataatttgatgttgtgacatatgtatacacccatgaaactatcaccgcagtcaagataatgaatgtatctatcacctccaaaagtttcctcctgccacttcccaccctgccccatctccaagcaaccactgatctgctttctgtcaatagagattag

SEQ ID NO: 268679 - DNA, 561 bp, Homo sapiens
caaatcataaaatttgtcatggcttagcacagtttagtggaaagatcttggtctttgaagtaagattgatgtgtttgaattccagctgtaaataaaaaggactarcatgattagttaaagtggagaaagctctaagaaggaagaactcagtctaggactccttgtataactactgcggcatgcttactattgtattacacagtgtgctaagcacttgccttactgatttaatgtttacaccaaccctctgtggtaggcattagcaactccatttaactgatttttaaaaaatgtagtcttagagattaagcaatttgtaaatagtataacacggatttcaacccggttgtttttaactgctttattgaggtataattgacattcaataagtatacataaagtgcataatttgatgttgtgacatatgtatacacccatgaaactatcaccgcagtcaagataatgaatgtatctatcacctccaaaagtttcctcctgccacttcccaccctgccccatctccaagcaaccactgatctgctttctgtcaatagagattag

SEQ ID NO: 268680 - DNA, 561 bp, Homo sapiens
caaatcataaaatttgtcatggcttagcacagtttagtggaaagatcttggtctttgaagtaagattgatgtgtttgaattccagctgtaaataaaaaggactaacatgattagttaaagtggagaaagctctaagaaggaagaactcagtctaggactccttgtataactactgckgcatgcttactattgtattacacagtgtgctaagcacttgccttactgatttaatgtttacaccaaccctctgtggtaggcattagcaactccatttaactgatttttaaaaaatgtagtcttagagattaagcaatttgtaaatagtataacacggatttcaacccggttgtttttaactgctttattgaggtataattgacattcaataagtatacataaagtgcataatttgatgttgtgacatatgtatacacccatgaaactatcaccgcagtcaagataatgaatgtatctatcacctccaaaagtttcctcctgccacttcccaccctgccccatctccaagcaaccactgatctgctttctgtcaatagagattag

SEQ ID NO: 268681 - DNA, 533 bp, Homo sapiens
cttaaactcatcaaaaagttaaatgtagagttcccacatgacccagaaattattttcctaggtatgtagccaagagaaacaaaaatatgcattcacacaaaacttacacataaatgttcatagtagtattattcgtaatcatmaaaaattagcatgtgcctatcaatagataaatggataaacaaaattagcatctacatacaatgaaatatcatttagtcttaaaaacgaatgagggggctggcaagacggccaaataggaacagctgcgatctgcagctccaagcgagatcaatgcagttggcaggtgatttctgcatttccaactgaggtacccagctcatctcactgagactggttagacagtgggtgcagcccatggagggtaagcagaagcagggtgggccatcacctcacctgggaagtgcaaggggtccaggaactccctcccctagccaagggaagccataagggactatgccacgtggaacagtgcattcaggcgcagatactacactttttccactgtcttc

SEQ ID NO: 268682 - DNA, 533 bp, Homo sapiens
cttaaactcatcaaaaagttaaatgtagagttcccacatgacccagaaattattttcctaggtatgtagccaagagaaacaaaaatatgcattcacacaaaacttacacataaatgttcatagtagtattattcgtaatcataaaaaattagcatgtgcctatcaatagataaatggataaacaaaattagcatctacatacaatgaaatatcatttagtcttaaaaacgaatgagggggctggcaagacggccaaataggaacagctgcgatctgcagctccaagcgagatcaatgcagttggcaggtgatttctgcatttccaactgaggtacccagctcatctcactgagactggttagacagtgggtgcagcccatggagggtaagcagaagcagggtgggccatcacctcacctgggaagtgcaaggggtccaggaactccctcccctagccaagggaagccatragggactatgccacgtggaacagtgcattcaggcgcagatactacactttttccactgtcttc

SEQ ID NO: 268683 - DNA, 561 bp, Homo sapiens
caaatcataaaatttgtcatggcttagcacagtttagtggaaagatcttggtctttgaagtaagattgatgtgtttgaattccagctgtaaataaaaaggactaacatgattagttaaagtggagaaagctctaagaaggaagaactcagtctaggactccttgtataactactgcggcatgcttactattgtattacacagtgtgctaagcacttgccttactgatttaatgtttacaccaaccctctgtggtaggcattagcaactccatttaactgatttttaaaaaatgtagtcttagagattaagcaatttgtaaatagtataacacggatttcaacccggttgtttttaactgctttattgaggtataattgacattcaataagtatacataaagtgcataatttgatgttgtgacatatgtatacacccatgaaactatcaccgcagtcaagataatgaatgtatctatcacctccaaaagtttcctcctgccacttcccaccctgycccatctccaagcaaccactgatctgctttctgtcaatagagattag

SEQ ID NO: 268684 - DNA, 595 bp, Homo sapiens
ggaaattgagtcactctaaagagacataaaggagattgcctgggactgtgggtcaggtgtgagactggagaatgaggagtgactcttaaagtgtattggtttcttttttggagtgctgaaaatgtgttaaaatttaaaaaaagcaatgacagaaataaacacagacacatacacacacacacacacacacacgtacatacacacactaccagatgcctgggccacactgcagagctgcagattcctaatatatagagatatatttaagamtcattgccaaggatgagaaccaagataacatttaaaatttttatttatagagttttgattggaaggtccatttttttacactagcctcacctaaaaatgattaagtattcatatttttatataataaatatagcaacagtaagaaataattttaaaatatttgtaagtattttcatataaatttaaatctcatcccaccccaagccctgtgaggttagaatggtgggagacctccgtgggggaggagggaggcatgtgactctgctcttcacctctggagacgtgggcccaggtgctaagacctcaggtgctgagtgccaaataa

SEQ ID NO: 268685 - DNA, 542 bp, Homo sapiens
ggatttgaaactcggctttgttgtgcttttccatggctatagactgaaatctatctttttaatttgactacagtgcatctcagcacctgtgtattgcctgtagttaaaatctatatgctkatatttttattactattttattacttgtattaaagataatactttagccaataagatacactattttctggtagcattctagtgcatgaggagaacatggaaacttaaaaacaactgatatgctgtagaattttatgaatttttttcttttgcttaaatagcagacatgttataaaaagttgtcttaagttgtatatgcctaaatttttcacatatacatatatcatcagagaaaatgggttataaaatggagacaattatttacattttaaaatactacagttgtcttctatgaagttgtgagagagaaagcaccaaatataatgagaataattatttcattaaaaaatgaaattagatgattttacactaaaaacagcatggatgtatctggaggttcttaaatgcaaataaacactgat

SEQ ID NO: 268686 - DNA, 460 bp, Homo sapiens
atgatgactccgtttatgctgtctgttgccctacccatgtgcaatcttaaaacataagtacctgtagagtcaagttggtttaagtgtttcatcttgaaattagaaggcactcctatagccataaactcttatgaattgttttaaagttaattaaaagctggaaaaaaaaccaccaggcagtacatcagaaatatgtacaartcaaaaaaattcagatgattggttaaaaaaagatcccaaaccaatgaaaatacagtatatggaagaactatatataagtaacagattcttgtggtctgagattaaccagtgcagtttattagaaataagatactaagatacagaatgaaaaatgactaggggaaataagagcaaggttaatagaggcatgcatgaaaggtcagcgtgttcaatttacttgctaaagatcccaaagtccaaaaacttaaatagacacagt

SEQ ID NO: 268687 - DNA, 460 bp, Homo sapiens
atgatgactccgtttatgctgtctgttgccctacccatgtgcaatcttaaaacataagtacctgtagagtcaagttggtttaagtgtttcatcttgaaattagaaggcactcctatagccataaactcttatgaattgttttaaagttaattaaaagctggaaaaaaaaccaccaggcagtacatcagaaatatgtacaaatcaaaaaaattcagatgattggttaaaaaaagatcccaaaccaatgaaaatacagtatatggaagaactatatataagtaacagattcttgtggtctgagattaaccagtgcagtttattagaaataagatactaagatacagaatgaaaaatgactaggggaaataagagcaaggttaatagaggcatgcatgaaaggtcagcgtgttmaatttacttgctaaagatcccaaagtccaaaaacttaaatagacacagt

SEQ ID NO: 268688 - DNA, 634 bp, Homo sapiens
tattgcaaatgacaccaagacttgctgagctggagagttcaagaagaaygtacatacaattatcttcaaaagaaacaaatttgatattgaaaaggaaatagaaacatactttaaatttgcaaaactttcagatacagtggtttcccacacattttcttattaaatgtcatagctatgctcaccttcttggatgacaatgaatctaaacatgtggtgggttgctcaggagagaaacaaaacaagatgtagatgaagagaagtaatctttggagagaatgataaacccacccaattttctggaggacatggaccacacattattattctggatggaaaatccatcacaaccctctataatgatttaaatactccacctttacagaagaaggtatacaatgagcacacagaatatctcagcatcattagtcaccaaagaaatgcaaatttaaaccacaaggagaaaccaccatacacccacccaaatagccaagagtaaaaaaactgcaaacaccaaaagctgttaggaatataaaacaatcagaacctcatatgtacacacagctggcaggtgcataaagtggtacaatctatttggattttttgatcaaaatatattccagaaatcctatcaaac

SEQ ID NO: 268689 - DNA, 634 bp, Homo sapiens
tattgcaaatgacaccaagacttgctgagctggagagttcaagaagaacrtacatacaattatcttcaaaagaaacaaatttgatattgaaaaggaaatagaaacatactttaaatttgcaaaactttcagatacagtggtttcccacacattttcttattaaatgtcatagctatgctcaccttcttggatgacaatgaatctaaacatgtggtgggttgctcaggagagaaacaaaacaagatgtagatgaagagaagtaatctttggagagaatgataaacccacccaattttctggaggacatggaccacacattattattctggatggaaaatccatcacaaccctctataatgatttaaatactccacctttacagaagaaggtatacaatgagcacacagaatatctcagcatcattagtcaccaaagaaatgcaaatttaaaccacaaggagaaaccaccatacacccacccaaatagccaagagtaaaaaaactgcaaacaccaaaagctgttaggaatataaaacaatcagaacctcatatgtacacacagctggcaggtgcataaagtggtacaatctatttggattttttgatcaaaatatattccagaaatcctatcaaac

SEQ ID NO: 268690 - DNA, 634 bp, Homo sapiens
tattgcaaatgacaccaagacttgctgagctggagagttcaagaagaacgtacatacaattatcttcaaaagaaacaaatttgatattgaaaaggaaatagaaacatactttaaatttgcaaaactttcagatacagtggtttcccacacattttcttattaaatgtcatagctatgctcaccttcttggatgacaatgaatctaaacatgtgktgggttgctcaggagagaaacaaaacaagatgtagatgaagagaagtaatctttggagagaatgataaacccacccaattttctggaggacatggaccacacattattattctggatggaaaatccatcacaaccctctataatgatttaaatactccacctttacagaagaaggtatacaatgagcacacagaatatctcagcatcattagtcaccaaagaaatgcaaatttaaaccacaaggagaaaccaccatacacccacccaaatagccaagagtaaaaaaactgcaaacaccaaaagctgttaggaatataaaacaatcagaacctcatatgtacacacagctggcaggtgcataaagtggtacaatctatttggattttttgatcaaaatatattccagaaatcctatcaaac

SEQ ID NO: 268691 - DNA, 560 bp, Homo sapiens
ttgagaccagccggggcaacataatgggaccccatctgtacaaaagaastattttaaaaaaattaaccaggtatggtggttctcagctacttgggaggctgaggagggaggattacttgagcctgggaagtcgaggctgcagtgaactgggatcacaccactgcattccagcctgagcaacagagtgagaccctatttcaaaaaaaagaatattcattattgcattataaataatactaaaaaacaaacccaacaaaaccctgatgcccttcaagaagaaaatgagtaagtaaactgccatattcatacaatggaatattactcagaatgaaaggataacatggatgaaattcagtaaaaatccacaaaaaacccacaaaaagtcatgtgtcacttaaccataggaatacattttgagaaatgtgtcatcaggcaattttgtggtgcaaacatcatataagtgttacttccacaaacttagaggaattagtctactatacacctaggctatatggcataccccattgctcctaggctgtaaacctatacagcatgctact

SEQ ID NO: 268692 - DNA, 559 bp, Homo sapiens
caatcagaacaaagcaagtttgaatccttcctttgcataagagggcctgattgaaaacttttataaaagccaaaccattctgttgttctctggaacaccttcattttatacagaaggatatttctccttgtttgtgaactgttcactggaataaagtctcattcctccaaattcattttcagggaattttattattctttaagttctgggatacaagtaaagaatgtgcaggtttgttacacaggcatacatgtgccttggtggttttgctscacccatcaacctgtcacctacatgaaatatttctcctaatgctatccctccccttgccccctcaccccccagcaggccctggtgtgtgatgttcccctgtgtccatgtgttctcattgttcaattcccacttatgagtaagaacatgtggtgtttaatttcctgttcttgtgtcagtttgctgataatgatggtttccagcttcattcatgtccctgaaaaggacatgcacgcatccttttttatggctgcataatattccatggagtatatgtgccacattttct

SEQ ID NO: 268693 - DNA, 520 bp, Homo sapiens
tctacatctgaaaaagggtagaaagaacttggttaagagggaatcaaaatctaaagtaggcaaagggattgtgtagcttttcaaaagaaaattgagcctmttgttccagataaattgcagcccagaataaagagggaatgtatataaccagtgtctcacccacagttgagatggcagagaagggccacaggtttgccgtttccctttggtatacaaacaaaatcatgtaagcccttgccccatgtgactatggaaggccagaccctgggagtgggtttgacagtgccccccacccctagagtgccagcgcatggcctgaaccacttcctatcttcctcatcctctggactgctgctccagctgacacttgggccatcccactgtaagcttgtgcacagagtacccctttcgtccccaagaatcttaattctcgaaggctctgtcaacaggagaccactgctgctagactacagaagggaatcaactgtgctaaaggcttaaggataccataagaaaacaa

SEQ ID NO: 268694 - DNA, 520 bp, Homo sapiens
tctacatctgaaaaagggtagaaagaacttggttaagagggaatcaaaatctaaagtaggcaaagggattgtgtagcttttcaaaagaaaattgagcctcttgttccagataaattgcagcccagaataaagagggaatgtatataaccagtgtctcacccacagttgagatggcagagaagggccacrggtttgccgtttccctttggtatacaaacaaaatcatgtaagcccttgccccatgtgactatggaaggccagaccctgggagtgggtttgacagtgccccccacccctagagtgccagcgcatggcctgaaccacttcctatcttcctcatcctctggactgctgctccagctgacacttgggccatcccactgtaagcttgtgcacagagtacccctttcgtccccaagaatcttaattctcgaaggctctgtcaacaggagaccactgctgctagactacagaagggaatcaactgtgctaaaggcttaaggataccataagaaaacaa

SEQ ID NO: 268695 - DNA, 520 bp, Homo sapiens
tctacatctgaaaaagggtagaaagaacttggttaagagggaatcaaaatctaaagtaggcaaagggattgtgtagcttttcaaaagaaaattgagcctcttgttccagataaattgcagcccagaataaagagggaatgtatataaccagtgtctcacccacagttgagatggcagagaagggccacaggtttgccgtttccctttggtatacaaacaaaatcatgtaagcccttgccccatgtgactatggaaggccagaccctgggagtgggtttgacagtgccccccacccctagagtgccagcgcatggcctgaaccacttcctatcttcctcatcctctggactgctgctccagctgacacttgggccatcccactgtaagcttgtgcacagagtacccctttygtccccaagaatcttaattctcgaaggctctgtcaacaggagaccactgctgctagactacagaagggaatcaactgtgctaaaggcttaaggataccataagaaaacaa

SEQ ID NO: 268696 - DNA, 590 bp, Homo sapiens
cctaggtattcagtgtgataataatccaaggcaaaagtcaacggagtatttttaaatagacagtaaccacacagaaaggaaaccatacttcattataagatgattagagttcattaatcatcctttatgatgaaagagtttgaatatatgacccatgagaaaaatgtcagactgtcagtgttttgtaaagagagaaactgtaaaaagtacagtgtggctgtctttacatttttgaagggcttttatagaaaaartaggtaaatttcatgtagtctgtaagcacagaactgggagaaatggatagacattaacaagaggcagttgaatacaagggaaaagtctatataataattgcagctttgtgtagcaatgaattacttatcactagcatgcaacctgaaaccgcactctagaactcttcaagaggaaatcactgtctgagagaggtttgcaccagacaatcaatcgaattcctttccaattgtagaccttatgattccactatcttagttagtaaagataacaagaatgaaaacagcaatagtgctaaggttatatcttgatgtctagcctttatctatataaagaag

SEQ ID NO: 268697 - DNA, 554 bp, Homo sapiens
acttcatctgggtattgtgaaacagcacccacctgtcagtgctatgccccagccccttgctgtctccttcccttgcttcccaatgcaatcccctctcaatgtagctccttgagttctaaaggacctccagtttttcctggcattgacaatttactgaaaaaacataaaaactgtcagacatattcttataactgtcctccaacaccaaatgtcaagtatactgaaataaaamtatcttttaccttctacattttcccactaatgctcatcgtattctcattagaaaacagtgatgagatatttagaattaggactatttcataagttaggaccccgccacccaacaatgcaaatggtcaaaatgtaggtaacaaatacttataatcataaatggtattaagaaatgactgtgtaatgctgagttaaaaggtattataaggtcaggtgtggtagctcatgcccgtaatcccagcattttgggaggttgaggcaggaggatcgcttgaggccaaaagttagagaccagtctgggcaacatagagagatcccatctc

SEQ ID NO: 268698 - DNA, 554 bp, Homo sapiens
acttcatctgggtattgtgaaacagcacccacctgtcagtgctatgccccagccccttgctgtctccttcccttgcttcccaatgcaatcccctctcaatgtagctccttgagttctaaaggacctccagtttttcctggcattgacaatttactgaaaaaacataaaaactgtcagacatattcttataactgtcctccaacaccaaatgtcaagtatactgaaataaaactwtcttttaccttctacattttcccactaatgctcatcgtattctcattagaaaacagtgatgagatatttagaattaggactatttcataagttaggaccccgccacccaacaatgcaaatggtcaaaatgtaggtaacaaatacttataatcataaatggtattaagaaatgactgtgtaatgctgagttaaaaggtattataaggtcaggtgtggtagctcatgcccgtaatcccagcattttgggaggttgaggcaggaggatcgcttgaggccaaaagttagagaccagtctgggcaacatagagagatcccatctc

SEQ ID NO: 268699 - DNA, 467 bp, Homo sapiens
gcagaagcaagttatcaggaakatctagctaagatcattgatgaaggtggctacactggaaaaccaattcttaatgtagacgaaacagccttatattggaagaagatgccatctaggacttccatagctaaagaggagaagtcaatgcctggctctaaagctttaaaagataggctgactctttcattaggggccgatgcagctggtgactttaagttgaagtcagtgcccattcaccattccaaaaaatcctaggatccttaagaattatgctagctctatttttcttgtgctctataaatggaataacaaaccccaacatatctatttacagcatgatttcctaaatattttaagcccactgttgaggcctactgctcagaaaacaaaagagattcccttcagactattacttctcattgacaatgcacctgatgccccaaaagccctgatggagatgtacaagg

SEQ ID NO: 268700 - DNA, 573 bp, Homo sapiens
gtaaattgaaaatgcgttcaccattctagatgccattaagaacatytgtgatccatgggaggaggtcaaaatatcaacattaacagaagtttgaaagaagtggattccaaacatcatgaatgactttgaggtattcaagatttcagtggaataagtaactacacatgtggtagaaatagcaagagaactagaatttgaagtggagcctaaagatgtgactgaattgctgcagccttatgatagaacttgaatggatgatgaattgcttcttacaaatgagcaaagaagatggtttcttgagatggaagctactcctggtgaagatgctctcaacattattgaaatggcaacaaagcatttagaatatcacataaacttagttgaaaaagcagcagcagggtttgagaggattgactccaattttgaaataagttctactactggtaaaatgctatcaaacaacctctcatgctacagagaaatctgtcgtataaggaagagtcaattgaaacagacaatttcctgaattttggagcagtggagaagactctgagatgggtgtggggaagatga

SEQ ID NO: 268701 - DNA, 462 bp, Homo sapiens
gaatactgacatccaggttgcagacaattttggtctggtcaacagtcaaacaattcctttctctgtgctatctaaaaaacaaagagaattcaatcaaactcaayatatcattctgttgtgtttaagagtttccattttgaattccagaaacatttgttatttgccttttacatgaagagtattgacacttgggaatacaaagaagaatgtcaagcatggcctttaagggcctttacagccaaatgagtgacaaagactattataataatagttagaaatcaggaagaagtgatgtcctacaggagtatgaacttagggctataggattaggaaagctgaactattacttgtaaaaccattgccaaaatccatattcatatctagttctaggtcattcataatctcccttctccacgatgccacatgctttagtttcagcaacacacattagtgaattttcag

SEQ ID NO: 268702 - DNA, 462 bp, Homo sapiens
gaatactgacatccaggttgcagacaattttggtctggtcaacagtcaaacaattcctttctctgtgctatctaaaaaacaaagagaattcaatcaaactcaatatatcattctgttgtgtttaagagtttccattttgaattccagaaacatttgttatttgccttttacatgaagagtattgacacttgggaatacaaagaagaatgtcaagcatggcctttaagggcctttacagccaaatgagtgacaaagactattataataatagttagaaatcaggaagaagtgatgtcctacaggagtatgaacttagggctataggattaggaaagctgaactattacttgtaaaaccaytgccaaaatccatattcatatctagttctaggtcattcataatctcccttctccacgatgccacatgctttagtttcagcaacacacattagtgaattttcag

SEQ ID NO: 268703 - DNA, 634 bp, Homo sapiens
atcaaacagaaccagtagaaaccaatctcactttggactctttctgacttcgtgtttcttttgttccttaactcttcccagcattatayttttagagagaatatttgaactatatatgtagatatatggcttataaagtctatgtttgcctctgcaaaaagagtggggatttaaagatggaacacacgtcattactttcactaactcttctacttccttccatttacagataacaatttggaaaggaagcttgtttgcactcggcctaggtagcgtgacacgctaactattctcacttaagaagaagatggagttaacactagagatctggagcatctgtgagtctaggatcctgcatcaataacctggggagaaatggctatcaagtcctaaactctaccttagtgtgtaggttcaagatataagcaaagagataatgcagcctaatggaaagaaaagatccctaagagtttgacttaataagtttcttcctccttcctccctgctctccccttcccgatcccctctcccttctctctgctccattctccctcttcctttcttcctcttcctcctcctccttcatctttcctcctccttccccttctttttcttcctccacttccgttcctct

SEQ ID NO: 268704 - DNA, 658 bp, Homo sapiens
tgtttgcactcggcctaggtagcgtgacacgctaactattctcacttaagaagaagatggagttaacactagagatctggagcatctgtgagtctaggatcctgcatcaataacctggggagaaatggctatcaagtcctaaactctaccttagtgtgtaggttcaagatataagcaaagagataatgcagcctaatggaaagaaaagatccctaagagtttgacttaataagtttcttcctccttcctccctgctctccccttcccgatcccctctcccttctctctgctccattctccctcttcctttcttcctcttcctcctcctccttcatctttcctcctccttccccttctttttcttcctccacttccgttcctcttccttcttgcaaaaaacactggagtaactgcttgtcttcacccatcttctcattccctcccctccccacaccttttcatcaccacctgtcattgtgaggaatccagagatctgcatgttaataattctcttgtgctaccctttgctgactttctyctacacctatgatttcaataattgaagaggtttccaaggttcttacaagccaagaaccttatctctcttggcctcatgtgaactgtcatcaaatatcctgctgttaattagcaaaggtta

SEQ ID NO: 268705 - DNA, 567 bp, Homo sapiens
acatttatgtggtttaccacatttccttcaaagtcagaattaaaacccagaacctgaaatatattaagtttccatatactactcatgatatggtttggctgtgtccccacccaaatctcatcttgaattrtacctcccataattcccacaagatgtgggatggacccagtgggagataattgaatcatgggggtgtttgccccatactgttctcatggtagtgaataagtctcatgagatctgatggttttataaggggacactccttttgcttggctctcattctttcttgtctgctgccacgtaaaacatgtctttccccttctgccatgattgtgaggcctccctagtcatgtggaactgtgagttcattaaacctctttttctttattaattatccagtctcaggtatgcctttatcagcggcacggaaatggactaatacaacttagcattccagaatgtgtgcccttgtgtggtcatgtactcttaatgccaactctgaggccagaatgaagacaatcttattagtgcagagggggcaactaatgcatttaacaattcaga

SEQ ID NO: 268706 - DNA, 567 bp, Homo sapiens
acatttatgtggtttaccacatttccttcaaagtcagaattaaaacccagaacctgaaatatattaagtttccatatactactcatgatatggtttggctgtgtccccacccaaatctcatcttgaattatacctcccataattcccacaagatgtgggatggacccagtgggagataattgaatcatgggggtgtttgccccatactgttctcatggtagtgaataagtctcatgagatctgatggttttataaggggacactccttttgcttggctctcattctttcttgtctgctgccacgtaaaacatgtctttccccttctgccatgattgtgaggcctccctagtcatgtggaactgtgagttcattaaacctctttttctttattaattatccagtctcaggtatgcctttatcagcggcayggaaatggactaatacaacttagcattccagaatgtgtgcccttgtgtggtcatgtactcttaatgccaactctgaggccagaatgaagacaatcttattagtgcagagggggcaactaatgcatttaacaattcaga

SEQ ID NO: 268707 - DNA, 619 bp, Homo sapiens
tgttacagcactattttggctgcatttaaaacaccacatgaacaatgaacaacagtatcaactaaatatgctataggtgttattatactcttgcggcaaacatcctgaattgaggttcagtgaggaatgagacatcaccaaaaataagtcatcaacaggaccatatcaatgtcaggatttagcttcagcatccagcctaggccaagagatctggagacctttgggagggaattagcattttttaaaattattattattatggcatctagaaattatatgcattctgttacaagaaggatccatggaaatgaagtctgtttttyccccccaagattgtaaattcctctaaaatcaggtgcttggaatcagagctgctaaatcaccagtggatgatggggttttgtatggaagaaaagttaagcaatcacaatcacactccagagtgaacagagagagagtatccttgagtctaggggaagattaaccttgtggggatgtcaatagtgactcacaaaggaatttccaaagtcaatactactaaaatgctttctccctccaaagtatgaatatctaacataacaacaataatattaataatttgatgttcacagaaactgaa

SEQ ID NO: 268708 - DNA, 522 bp, Homo sapiens
tcaaggtacatctataaatgataacagtaagaagtgaaagcatttataagaaaggaaagtaatgggcgaacaaccccgctggttcacttccacacaagagcaaaataaaacctttgataacaactactaaggtaagcagtaagctgtatacagtgcctttatggcagctgtgctgtgttatccagcatagttttactcactatattcagctctgtacaggagtatacrgtcgtgttacacatctatgtatttacatccaggtcccacatccagcctttccccctgagaactggactatcagacttacagctttctaagtactttctgttttcctgtgaacacagatattaatttccaagtgtgctttggcctaagacattttcctcctctttagatgcttggagtagattgtactcgggcttgatagattgctcactctgcaattaacaccccttctctattccacccgtacccccacactatgtaagcatctaattcccaattctagaacaccagacttcc

SEQ ID NO: 268709 - DNA, 551 bp, Homo sapiens
tggcattctttccattcagaagttctccaggaatacctgtttggtttggtttatttaaaagaagaagaagaagtaagaaaaatatacaactctgaggaaaacttaagtcatgacatcaagaggcataatctctctttctagggccaaatctttgcctgtggataaagaagtatactagctttgaattactaaatcccttttatttcctagaaaaaaaaaacatccagcagcccatcatgacaatagcacaagatgactggactaaaggaacgtgatatggataaacagtgagtgtgtctcagccttgaagctggaagagagtgagggaatagagagaggagttggaaaccgaatgagcctaattcttgatagctgaacttgtcatgggatttcactccacagactttcagatgactttgtgtgaaagttggcttttctttcttaataggacagtgtgtgaatgtgtaaagtcrtaaatatattattttacatacagctatctccaacttttcagtcttcttgatgtaagaaactctttactcatttgactt

SEQ ID NO: 268710 - DNA, 620 bp, Homo sapiens
tctccaacttttcagtcttcttgatgtaagaaactctttactcatttgacttcatgtcattcacataaaagtatatgtattaaaaatgagttaataccgtgccactatatataactgattaatacttttttacatatgcagccatactgttatataaactgatatagaaatatgtctccctagtttataactggttaatactcaaatacacacatacatccccacaaataagggggaaaacacaatggagtttgtatacaatgtacagaaaacaaaacaactatcacactactacattcatacctagagaattattttaggcagaatttccttttgtggattattaccgtattctttaagcccacagcagyagtataaccttgcggcattcgtaaaaacactgagagactcattaaattctgaacaataaacaaagcctaagtaacattgacatatctgctgtcccatttcatatttaaagaaaaatttatcagttttgtgattgtttaaaagaaaaaagaggaaaaaccagccataaaagtaatcatatgtcaccaagatcctggctttacaaaaactagagtaaaattgaaatcaagtaacagatgtcaaaataagaa

SEQ ID NO: 268711 - DNA, 560 bp, Homo sapiens
cctgaacaagggggtcagatacagccactgactcagagacttctatgatatcattaacaaagaagacacgcaaaaagagggtagtgtggtacagatgacaagtatgctttggagtccaaccaacttggtttgaatcagaatttcaccrctttctggttagtgacttgggtccaattttgttttcctacctgtacaagggagataataataccaatcattgagcctgacatataataaatattcaataagtgtccattccctttcttcttgcatccttctacatgtgccttttgcccattgctgatgtggaaaacacacacacacacacacacacgtacattaacattttatttatgaggatttcattgatttcatcaaaagtcttaatattagagatccacagttgccatggtctaagttccagcaacagcagttcaacaaagagcaaaaaagaaacataaagtttagattatagttattttttgcttgtttgaaaggaatggggcattctgtataaattgcttttacaattaatttaacatgaccctacaagaaatagc

SEQ ID NO: 268712 - DNA, 589 bp, Homo sapiens
gtccattccctttcttcttgcatccttctacatgtgccttttgcccattgctgatgtggaaaacacacacacacacacacacacgtacattaacattttatttatgaggatttcattgatttcatcaaaagtcttaatattagagatccacagttgccatggtctaagttccagcaacagcagttcaacaaagagcaaaaaagaaacataaagtttagattatagttattttttgcttgtttgaaaggaatggggcattctgtataaattgcttttacaattaatttaacatgaccctacaagaaatagcaatggagaaatttgggaagttattatgaaggaaaatgaaaacaagagtttaatgactatatctgtatataaagtaacaaaaaacttgttggtagctcattaaccaaaaacacccaagttccattcactggcaaatgataaatcctttagagaagacatttatcactattgctattttttttttaccacctcagagaaaatatcaacctagcaagagggagaggaaaaaccacaccaataaackacttctatattcctttttttaaaaatatgggtcttt

SEQ ID NO: 268713 - DNA, 451 bp, Homo sapiens
aagtaactcttccaaggtcacatgagtgaaagcagggttcaaagcaaggtttacctgattctaaagcatatcttcataataaaatgacactatggcagattaaaacggtaaatggcaaacccatttactcaatcagatagtccagaaagctcaatcaagtagtacagaatgcaacttcagtagacaatgggtagctacctgtctagccattacaaggacaagtgaatgttgatcttggtccgaggaagkgtgttctgggtgtagacaaaaatataatctgctgaccaataatatttcacactgccaaaataacttctcttctaatctcaaatacaagtacagttcgagaatatatgataatcattttataatgagagccctgtggtcacctagggatgcatttcagctctttcaggagatagtcatgtctcacttgatgacagagatatgt

SEQ ID NO: 268714 - DNA, 451 bp, Homo sapiens
aagtaactcttccaaggtcacatgagtgaaagcagggttcaaagcaaggtttacctgattctaaagcatatcttcataataaaatgacactatggcagattaaaacggtaaatggcaaacccatttactcaatcagatagtccagaaagctcaatcaagtagtacagaatgcaacttcagtagacaatgggtagctacctgtctagccattacaaggacaagtgaatgttgatcttggtccgaggaagtgtgttctgggtgtagacaaaaatataatctgctgaccaataatatttcacactgccaaaataacttctcttctaatctcaaatacaagtacagttygagaatatatgataatcattttataatgagagccctgtggtcacctagggatgcatttcagctctttcaggagatagtcatgtctcacttgatgacagagatatgt

SEQ ID NO: 268715 - DNA, 626 bp, Homo sapiens
ttcaaaattcagaaagtgtttgaggtaatkctggcaaggcataatggagttcatctttcccttaggacaaaaagaagtatcttacagatggtagaggaattcgtcacaagatactaatttttttccccagcattttcaaaaaagtagagattaaaagaaaataaagctactgttacttcctaagaacccccaaaacctaaattgttttgtctgctttctaccttaggggtacctaagtaaccctacaaataaaacattctatcttcagttaattttaaatatgattttgatttccagaatacaacatcaacctcctcaaagaagttagataaagaagttacagtcatttcagttttccaaatcaaatgaaggcactgtaaacccgaaaggaaatgctcactcaaagactcagaactccccaattccatgggcttttcaagaaacaaccaaaaatcaccagcaattgctcaaatttaatttgaaactaatgaaagagcctacttatgtaaaaatgctactttctaaatgatttttgagaaacaatattgcccttgatatattcatttagggagtacactgacttggcagaaactcaatctacctcctgctaaaataaataggcctct

SEQ ID NO: 268716 - DNA, 547 bp, Homo sapiens
ccttgggaagattaccttctggtgggatagacagacataaatgcatcaatacatggcatggcaccagttaccaggtggggagagagagatggacgaggagagatatttcagtgccatgacgagggaaatcstcagagtcctgaataaaatgagggagtgagcataaggatgttgggcaagtggtgttctgggcagagaaaagggcagcctgtccaaagtccccagggaggcagagtgcccagcaccatctagaaatagcacagaagccagtgtggttaagacaggtgggtcaaggggagaatagtagagacaggatataaagagtagtcaagagccacgttatgtggaacctcataggccagagcaggggtccctaacacccgagccacagaccagtactggtcagcggcctgttaggaaccaggtctcacagcaggaggtgagcagcaggtgagcaagtgaagcttcatctgtatttacagccactccccatcactcacattgccaccgagctctgcctcctgttagatcagcagcagcattagat

SEQ ID NO: 268717 - DNA, 547 bp, Homo sapiens
ccttgggaagattaccttctggtgggatagacagacataaatgcatcaatacatggcatggcaccagttaccaggtggggagagagagatggacgaggagagatatttcagtgccatgacgagggaaatcctcagagtcctgaataaaatgagggagtgagcataaggatgktgggcaagtggtgttctgggcagagaaaagggcagcctgtccaaagtccccagggaggcagagtgcccagcaccatctagaaatagcacagaagccagtgtggttaagacaggtgggtcaaggggagaatagtagagacaggatataaagagtagtcaagagccacgttatgtggaacctcataggccagagcaggggtccctaacacccgagccacagaccagtactggtcagcggcctgttaggaaccaggtctcacagcaggaggtgagcagcaggtgagcaagtgaagcttcatctgtatttacagccactccccatcactcacattgccaccgagctctgcctcctgttagatcagcagcagcattagat

SEQ ID NO: 268718 - DNA, 547 bp, Homo sapiens
gatgattccaaatttgtttttgacccacgtattagcagcaaaatttcctggcactgaattcttaggtaagtcagctcaggaaagggaacaaaatcacaaatattaaggacaccacgtattatagctgtgaaatttcatttttcttcatttacctcctaccatctgtcttctgaacttttatccccccatgcctgatactcattgcccaatttctctatgtttagtttataatttaagtctactcaggaaatggttcacgagtgtatctgcatgagtagaaacagttaagatttaatatgttatcattctcaaaaggtagatgcagcttaaaatgacaaatcaaaattaatcaaagaaaggaccctcctgtaactgtggaaatacacgtcctcataaagagatacaggacacaaactttggattagagaagctgagtctagaccktagttagaattaaacaactcaagtggctggcttgacttcctgatagtgatgctgtcccaccgaaggaatcacataattaaaatattttctaaattgagggagg

SEQ ID NO: 268719 - DNA, 573 bp, Homo sapiens
ggctggcttgacttcctgatagtgatgctgtcccaccgaaggaatcacataattaaaatattttctaaattgagggaggaaagggggacaaaagaaggaaggcatttatagctgtgaagcaataagtagaggcatcctaaattagcaaagccaaaattagaaaagtaggcacatttaagaaactattcttaaaatagaaccaggaccatcacagccagacagcaacctctgtcctttgaaatctaaactttatcactttcataaaggcttggaattgcttaaaagtgtgggtttctttgctccttcttctaaaagcttagatttaaagcagaacaacacaaaatagaattttaagtgatttaatgatgacagattgaaagaataattgcattagttaatggtcatgttttgactgagcacatatagatttgcaaacattcttggaattgaaaccctagtgcaaggtattcaaattaaatgcatgtgtatattaaaaatcagtgtactgcagcatgactaatttatgataatgtctgttgtccttttaaagakgtaaatgcatttagaaaagaa

SEQ ID NO: 268720 - DNA, 572 bp, Homo sapiens
caacatcaacctcctcaaagaagttagataaagaagttacagtcatttcagttttccaaatcaaatgaaggcactgtaaacccgaaaggaaatgctcactcaaagactcagaactccccaattccatgggcttttcaagaaacaaccaaaaatcaccagcaattgctcaaatttaatttgaaactaatgaaagagcctacttatgtaaaaatgctactttctaaatgatttttgagaaacaatattgcccttgatatattcatttagggagtacactgacttggcagaaactcaatctacctcctgctaaaataaataggcctcttctacagactgaaggagtcaaatggtggaagrggaaagataaataattttacaattttaaccataaagccattttccttcaagaagcatcatgcattgtttcagttgactgttgtcactgggatttgcaaaacaatgaatcagtcttttaacttagtaaatagaataaaatctgtctcctagaacttataggcagcttaaagaattaaatcacttctcatcctattatacctaataaagcttaattt

SEQ ID NO: 268721 - DNA, 572 bp, Homo sapiens
caacatcaacctcctcaaagaagttagataaagaagttacagtcatttcagttttccaaatcaaatgaaggcactgtaaacccgaaaggaaatgctcactcaaagactcagaactccccaattccatgggcttttcaagaaacaaccaaaaatcaccagcaattgctcaaatttaatttgaaactaatgaaagagcctacttatgtaaaaatgctactttctaaatgatttttgagaaacaatattgcccttgatatattcatttagggagtacactgacttggcagaaactcaatctacctcctgctaaaataaataggcctcttctacagactgaaggagtcaaatggtggaaggggaaagataaataattttacaattttaaccataaagccattttccttcaagaagcatcatgcattgtttcagttgactgttgtcactgggatttgcaaaayaatgaatcagtcttttaacttagtaaatagaataaaatctgtctcctagaacttataggcagcttaaagaattaaatcacttctcatcctattatacctaataaagcttaattt

SEQ ID NO: 268722 - DNA, 558 bp, Homo sapiens
ccatacagaaactcatcttgggtacatcctgaattatttctttccacattatcttgttgaaaaaaatatgatgcacacaaatgcatgtatattagtaggtatacccttatcttagtgcatatctttactgtgcctatcatgaaagtcagtgtgatataatggaaagaatactggcttcagagttgagtaaatttgtgcttgaatcttaatgccaatttacatccctttcactctcaaaaatgttccatgtcacactaaatattatttatatttaattagttaatttataactctgctataattattggccaacagtaggtacttgataaaaggtaggcattgtttaacaaacatagatgtagttcagttttctyagcattgacaggaaggtaccattctgacttccaagagaactgtaattgttattaaaaaagaaaatggaggattgcctataaatcacaaacattttgaaagtatcaggtagagaatattagctatcccatgaaaaaaaaaatgaaggatagaggcatcaatgtcaaggtcatcatgaaacccaga

SEQ ID NO: 268723 - DNA, 558 bp, Homo sapiens
ccatacagaaactcatcttgggtacatcctgaattatttctttccacattatcttgttgaaaaaaatatgatgcacacaaatgcatgtatattagtaggtatacccttatcttagtgcatatctttactgtgcctatcatgaaagtcagtgtgatataatggaaagaatactggcttcagagttgagtaaatttgtgcttgaatcttaatgccaatttacatccctttcactctcaaaaatgttccatgtcacactaaatattatttatatttaattagttaatttataactctgctataattattggccaacagtaggtacttgataaaaggtaggcattgtttaacaaacatagatgtagttcagttttcttagcattgayaggaaggtaccattctgacttccaagagaactgtaattgttattaaaaaagaaaatggaggattgcctataaatcacaaacattttgaaagtatcaggtagagaatattagctatcccatgaaaaaaaaaatgaaggatagaggcatcaatgtcaaggtcatcatgaaacccaga

SEQ ID NO: 268724 - DNA, 552 bp, Homo sapiens
aaaaaggtaaataaataaaaagataagataatgtggcattaggagatatacctaatgctaaatgacgagttaatgggtacagcataccagcatggcacatgtatacatatgtaacaaacctgcacgttgtgcacatgtaccctaaaacttaaagtatactaataataaaattwaaaaaaaagataatgtgataatgtgaccagcccaacataaaagcatttgtaatgatgagaaacactgaagaggcagtgatgaacccccggtaaggcagaagggtgctcagagaggacacctgagctacatttttaaaagattaatgggagcttctcaggcacagagaaaacactattctaaagtaaaacgatagcatattcaaagatttgaaatcataccttttggggatgggaaccagtggtatactggagctagctctacctgctcacaggagccaattgttaaattttcaggaatttgcaaaccacttgacctcctgtaaactttaaattggccaaagtcagagtatttacaatacagaaattggcaaatgctaca

SEQ ID NO: 268725 - DNA, 560 bp, Homo sapiens
ttctaacttgggaaaacacataaatgggggagcgatcatttatagaagacagagtaaaatatgctcatatttggccatattgatagtaaatgtccatatttataccccccattaagccattgagagttaatgtgttcatagaggaaaagctaaatcttcctctggtccaatattttattttatttatttttattttatttatttttttgagacaggatctcactctgatactcaggctgggtgcaatagtggaatcagggctcattgcagcctcaacctccccaggcccaggtgatcctcccacctcagtctcctgagtagctgggactacagatgcacaacaccacaactgtctaatttttgtatattttgtagagacagggttttgtcatgttgcccaggctggtcttgagctcctgggttcaagcaatccacctgacttggtctcccaaagtgccaggattggcccaggatcgagcccagcctcaatattttattttttwaaaatctatttagataatattagtcctttcaaaatgaaaagcgcagtgtctcattgt

SEQ ID NO: 268726 - DNA, 562 bp, Homo sapiens
tgttattaaataaatttgggaatgatacagggttaaacaaaactaaaagttttcatttttaaaggactcctccaggcttttaatacataatgtgaatcctcaagaatttatccctagtgtgcaaagggtcacaaacttctttccctgtgtaactgtttcctggaggaaaaaaaagagagagagagaaatattttgcatgcatgatactttcttattgttaggttagatgaggtaaatgatcttttttcttaacctcaatgattacagataacatggaaacatttttataatttcaattttaggattcatatctcataagttcaggttaaartccaatttcccatccaaagcctagcacttatgtcctttacaggatgtgaacacataaaaccacaaaacaatgaacacatcagtaaaagtccgagatctgccacatgttcacaaggaataaatgtgaaggtagaacgcagggcagaaatcagaatatttcaggggtatcagcagagcaattgttaaagtcctgagacatgagatcagatcccatagaagagtgacaaggctt

SEQ ID NO: 268727 - DNA, 562 bp, Homo sapiens
tgttattaaataaatttgggaatgatacagggttaaacaaaactaaaagttttcatttttaaaggactcctccaggcttttaatacataatgtgaatcctcaagaatttatccctagtgtgcaaagggtcacaaacttctttccctgtgtaactgtttcctggaggaaaaaaaagagagagagagaaatattttgcatgcatgatactttcttattgttaggttagatgaggtaaatgatcttttttcttaacctcaatgattacagataacatggaaacatttttataatttcaattttaggattcatatctcataagttcaggttaaaatccaatttcccatccaaagcctagcacttatgtcctttacaggatgtgaacacataaaaccacaaaacaatgaacacatcagtaaaagtccgagatctgccacatgttcacaaggaataaatgtgaaggtagaacgcagggcagaaatcagmatatttcaggggtatcagcagagcaattgttaaagtcctgagacatgagatcagatcccatagaagagtgacaaggctt

SEQ ID NO: 268728 - DNA, 562 bp, Homo sapiens
tgttattaaataaatttgggaatgatacagggttaaacaaaactaaaagttttcatttttaaaggactcctccaggcttttaatacataatgtgaatcctcaagaatttatccctagtgtgcaaagggtcacaaacttctttccctgtgtaactgtttcctggaggaaaaaaaagagagagagagaaatattttgcatgcatgatactttcttattgttaggttagatgaggtaaatgatcttttttcttaacctcaatgattacagataacatggaaacatttttataatttcaattttaggattcatatctcataagttcaggttaaaatccaatttcccatccaaagcctagcacttatgtcctttacaggatgtgaacacataaaaccacaaaacaatgaacacatcagtaaaagtccgagatctgccacatgttcacaaggaataaatgtgaaggtagaacgcagggcagaaatcagaatatttcaggggtatcagcagagcaattgtyaaagtcctgagacatgagatcagatcccatagaagagtgacaaggctt

SEQ ID NO: 268729 - DNA, 588 bp, Homo sapiens
ctgttccgtctagtctaagactaagggactttggaaaaggtcccagcaatgatgcctgtgagtggccaagggcagtggcagctcttttccaaagggatgccgggctcatcagcagtgtggattttccatgaaaggtcagtgaagacctgctgcccatcacagagaaatggctcttcttcatcagataggtttaaatgtgaccatttagctttcaaccccttctctgtggtgattttgaatgaagaagttttaataagatgttttaaaaaatctcttcaagaaaacgtcaaatatttcagtctctttccactcctagaacgtcaaaaaccatgaaacattcttgtaaaaggaacatacaacaactttcagggacatacagcccttaarttcccaagtgataactaccaccataggcccaatttgggcccaaaatgcataataaggaaaaactatggattagagttctatcctatgttaaaattttacaaggtaaatagtaataataattatctgattctccaaaggaagcaatcaacaaaacatttttttttatttttgctaaacattacatgaaaatcttcacacata

SEQ ID NO: 268730 - DNA, 525 bp, Homo sapiens
tgatgccagccgcactactggtggaccacggcttgagatggccactggaacaagacacgtggaccttgtattcagcacccctcctgcatggctcccattccaagttcctttttttagctcctcttcctagtttaaaattagaagcagtttctggaggcataagccagtcacttctccacagctagctttagaaataaagtcactttcctttcactgcgctttmtcctcattattggcttttcaaacagtaagcacctgagcctgtgctcggtaacaacatggcataatcacaatattgttttctatcgagaatcaactaaaacacctatatacccagtagagtcaaatgggtatgctgaagactttcaggaaggtttacaaagatcagattcaatcacccaccagctctgtctcctaaacattatttcactctgcaccagtctcttcatcccattccaccgccacctgcaaccttggcgcagaccattgctttctctcgcatggatgagaggagtatcctccatt

SEQ ID NO: 268731 - DNA, 570 bp, Homo sapiens
ctctgcggtagtctgctatggaatcatgaactacctttataagtaaatctttaagtgtgtgaaaatgaagttgtatatgttacttttgctgttgaatttttctgagatttatgggaatactttaacacacatattcaggccatgaatgtaccatgaatgttttttatttttttaatgatttttatataactgaaatgtgttttgttgttgcaaaaagtgcaaatggaattttttaatgaaatgcaacagagcttaagtttcctctcatttaaattctcgtatgtttgtgtattttctttatttagtattatccwatgcgtaactcagtaatggatatatctgatgagcaggttttcattgctagtttagaaagtattgagtgactttgtgcatccgctgctagtggaagttattaatgatcatgattgatttagaaatatagacttggaaactctcatcccttcctgtttccatcagtgagcctgcctccagggctgactctcaacttctggcttgctgctatagatctagtgagctctgggaaacaaaagcattaagattgttaatact

SEQ ID NO: 268732 - DNA, 570 bp, Homo sapiens
ctctgcggtagtctgctatggaatcatgaactacctttataagtaaatctttaagtgtgtgaaaatgaagttgtatatgttacttttgctgttgaatttttctgagatttatgggaatactttaacacacatattcaggccatgaatgtaccatgaatgttttttatttttttaatgatttttatataactgaaatgtgttttgttgttgcaaaaagtgcaaatggaattttttaatgaaatgcaacagagcttaagtttcctctcatttaaattctcgtatgtttgtgtattttctttatttagtattatccaatgcgtaactcagtaatggatatatctgatgagcaggttttcrttgctagtttagaaagtattgagtgactttgtgcatccgctgctagtggaagttattaatgatcatgattgatttagaaatatagacttggaaactctcatcccttcctgtttccatcagtgagcctgcctccagggctgactctcaacttctggcttgctgctatagatctagtgagctctgggaaacaaaagcattaagattgttaatact

SEQ ID NO: 268733 - DNA, 594 bp, Homo sapiens
tctgttgttttttaagccatccagcttctggtactttgttatagcagcttgaattgccgaagactaactgttataaaaataaataccatagtttgggaatttaaatgagaaatttatttccacagttctggaggctggaaagtccaaattcaaggtgtgtcttgatttagttcgtgatgaaggttgtcttcttgtcttaaagatggccatcttcttgctgtgtcctcacatggtgggggagagagagaaaaaaagagagcactctatgtctcttcttataaggkcaccaatcctatcacaagggctccactctcatgacctgattacattagaaatttcccatattcaaaatggaggttagagtttcaacatttgaattttggaggaacacaattcagtgtgcagcaggtacattggttacaattgatgagctaatattgatatattactgttaataaagactatagtttacattaggattcatcctttgtattgtacattctattggtttgacaaatgaataatgacatggatccacaattacggtatcatacagagtagttttactcccctaagtatcccttctactctatt

SEQ ID NO: 268734 - DNA, 526 bp, Homo sapiens
atttttattctattttactatctattatttgttagtaacacaatgttttgagtaatgtagttttatagtaaattgtaaagcagagaagtgtcagtcttcctattttttttcttcctatgtgttgtctgcagtgaatcttttgctttttcatataaactttggaactactttttgatwtccacaaaataacttccaagattttgattgggattgcatgtaatggaagatcaatttgggaagaactaatatattgataatactgagtcatcctattctggtacataggatatctctccatttatttaattcttgtttattttgtcagggtcttggagggttttttaaaaaaaatatatcttgtacatattgtgtcagatttagattaatttaccttttttggtgctaacataaatggtattgtgtttttaatttcatattgcaattgtgcattgctggtataataagaaaaccgttaactttttatattaaccttgcatcctgcaactttgttatagtcacttattat

SEQ ID NO: 268735 - DNA, 526 bp, Homo sapiens
atttttattctattttactatctattatttgttagtaacacaatgttttgagtaatgtagttttatagtaaattgtaaagcagagaagtgtcagtcttcctattttttttcttcctatgtgttgtctgcagtgaatcttttgctttttcatataaactttggaactactttttgatatccacaaaataacttccaagattttgattgggattgcatgtaatggaagatcaatttgggaagaactaatatattgataatactgagtcatcctattctggtacataggatatctctccatttatttaattcttgtttattttgtcagggtcttggagggtttttwaaaaaaaatatatcttgtacatattgtgtcagatttagattaatttaccttttttggtgctaacataaatggtattgtgtttttaatttcatattgcaattgtgcattgctggtataataagaaaaccgttaactttttatattaaccttgcatcctgcaactttgttatagtcacttattat

SEQ ID NO: 268736 - DNA, 605 bp, Homo sapiens
gttcaaatctttgaccatttatctatgtttagcttcaacccactttttcgaaaccacctactcattcattttctcacaaccagtcacttttctcctctatttatcaacccaagagctgtttttctacttttctgacttttaattgcatttcactttctctgttcttttttgttcaaaactttttcttttttcttataaaaatacttttgcttactcttcagaaagtgtattcatcattttattcctgtgtattttccttttttcagctgagctgctgatctacaggaccctattttctttcccatctaattactgttatttctctctgactgagtccatattccagcaagaaggtatgacttttgccttccgcatatgactgttttctttctagctctgggttttgtgcacattttttgcattgcctaatattcatctttkacagtttgtcaataacctctactcatctcccctccttgaagttcctcctcagaattattttcttccaaggatcttttacatctagagtatggggtatacctcctcatgggtgtttctctaaaatcatagactaccctaaataccactgggatcatatagtaaac

SEQ ID NO: 268737 - DNA, 640 bp, Homo sapiens
tcagccaacttgttttaccaataattttcttcttgagccaccaaatgtttatgaacaagtcagctggaagagttgaaaggttctgaaatctgccaaagcatgtcagttgttttatgtttaaattccctaaagaaaagaaawgtagggtataatacagaaaatatcatctgctatcttttctccccagggcaatggctctgcattgccatcagtgaaacggcccatcctttactttgtttgactggcaccttgtgactttcacgtcagtggagttgtgagatctttaatgtgcatagctcagactgtgtatgttggcattactgcaggaagaaattgagatatcttaacagaagtaattgtatacctgtattgttggctactctgtcataattacttctgcaattgccaagtttcatgaatttaaagttagcctattaatttggcttctattgtagagaaaaatctaggcttttcaattatacaaagaaaaggaagaaaaacttattttttctaaattcttttgtgtgtattacaaatagcagaatcgtgttgtattgttagctgaaatttcaccttctaaagatttcatttctgtctctgccttaaaataaaataaaaaataataagtcattggctcaaa

SEQ ID NO: 268738 - DNA, 640 bp, Homo sapiens
tcagccaacttgttttaccaataattttcttcttgagccaccaaatgtttatgaacaagtcagctggaagagttgaaaggttctgaaatctgccaaagcatgtcagttgttttatgtttaaattccctaaagaaaagaaaagtagggtataatacagaaaatatcatctgctatcttttctccccagggcaatggctctgcattgccatcagtgaaacggcccatcctttactttgtttgactggcaccttgtgactttcacgtcagtggagttgtgagatctttaatgtgcatagctcagactgtgtatgttggcattactgcaggaagaaattgagatatcttaacagaagtaattgtatacctgtattgttggctactctgtcataattacttctgcaattgccaagtttcatgaatttaaagttagcctattaatttggcttctattgtagagaaaaatctaggcttttcaattatacaaagaaaaggaagaaaarcttattttttctaaattcttttgtgtgtattacaaatagcagaatcgtgttgtattgttagctgaaatttcaccttctaaagatttcatttctgtctctgccttaaaataaaataaaaaataataagtcattggctcaaa

SEQ ID NO: 268739 - DNA, 557 bp, Homo sapiens
aaaggattgcattttattatctctactagattataaattcttggaaaggagaaaccttgctttagtcacctctgcatcttcatagaccacataaaaaatacgtggaataaggacactcattaagtaatgggttgaatttagcatcagcaatcctattcacaaaaattccactaaaaaccccatcctcaatcaggcraagtgataaataacacaaacagtataatcttcacaacaatcaatcattttggaaaattatatttttataaacatcttctataattcaattgtaactaatactatggaggttcagtactgatggaactgagtatgagtggagctgagtttttagaactaatttttccaaaagaaattatcagtctaggatgatccagagtttggggagtctgaccactttaaaaatatggtcttctatttcatcaacaatactccacctaattgctagctccttatgcaaaagatggttacataaccacttgaaaccctgagcttgatctgttttggtaacaagctcttttgaggacaatgtatggaaagat

SEQ ID NO: 268740 - DNA, 581 bp, Homo sapiens
aactaatactatggaggttcagtactgatggaactgagtatgagtggagctgagtttttagaactaatttttccaaaagaaattatcagtctaggrtgatccagagtttggggagtctgaccactttaaaaatatggtcttctatttcatcaacaatactccacctaattgctagctccttatgcaaaagatggttacataaccacttgaaaccctgagcttgatctgttttggtaacaagctcttttgaggacaatgtatggaaagatgcatctaatcacgtaaatccaaaatgtttcattgcagaagtgaatggtttggtttaactctcgaagggaagtttaaaagcttcatggagaagagtacacattcaattcttttttttgtccaaatgcagcttattcagaatgtgtctagttgttcagcaagttcagtgctcatgtggcattcaggcaattattgaatgttggagaaccaaactcgaggtccttttaatgacatttgagaagtgtaggacaaccacagttttcacatcacatgtgggcagctctggtttcccagtgtgttcactccacttcgca

SEQ ID NO: 268741 - DNA, 546 bp, Homo sapiens
ttagacttgagggctcccctctcacttcagtcatgccacaatcctggggccttttcagtaatctctcacgtgtcctcaggggttattgctgagggggcatattgcactagtacccccattgtcccagcagctttctgctgctccagagtcatgcatggaattgagcatcgtgggtgtggctaggtactttcaggcttctgggctgatttccctggacacatcatatttcatatgaaattccatttgaatttcattctcccttgacatacatattgcattccgtaaaggtaattgctgycttcctggtgcagctggtgttaaaagagcagagtcctcactattttggaaccaaaacactctcctgcaccgttaccctttactttaaaagtctcttctaatcttggaaactcctccttatcgcctgcttttctggctacttatctgttttgtaaacatcagccactctatttctctctcagaagtggactttgatgtcttataaattgcagaacctgaaccggtggcacacagagctcagttcccctt

SEQ ID NO: 268742 - DNA, 556 bp, Homo sapiens
ttctagagagactggtttgtgaattgaaagaattgtgatgatctaattaatgttttggtttcaggtttgaaagattagaagtcctggctgtatttgcctccacagtcttggcacagttgggagctctctttatattaaaagaaaggtacatttgtataggatattattytaaatccccccatgacacctttgggaacatgaaagaaacccgtcagacacatttgctttcaagggtatgaaaacttagatgagcagggctggagttttgatagtacactttctttatgtttcagactttttcttctgtttcattttttttacttccttccttaatgctactaaattgaatcagaagtggttgtgaatgaaacagagattcagtcaggcatgtttgatgcttattacaaacccattgaaataggcttggcagagaaagatagacattacatattaaggataatttgtgaaaaaagaaaacaactaaaaaggataatttatgagtctccttgcctcatcactgctaatagttaatagttataatattaaaagattttgt

SEQ ID NO: 268743 - DNA, 346 bp, Homo sapiens
tcccagctacttgggaggctgaggcaggagaatcccttgaacccggtaggcggaggttgcagtgagccgagatcacgtcattgcactcctrcctgggtgacaaaagtgaaactccatctcaaaacataaacaaaagaacaaagatttgtgaattacttgaaatttgagtgggaaataatattaagtactttctatatgccaagcactgctaaatactttacatagaataacctatttaattctagccaggtaggtacccaggttctcacctggcttttttgagagttgagggaattaatttgtatgtagtttgaatatcccttatctgaaatgcttggggccagaa

SEQ ID NO: 268744 - DNA, 657 bp, Homo sapiens
ttaacttttccctgtctccatcaggcaaaatctgttcttcagtatgacactgttatccccattaaaccttactttagttgcagctgattggtttggcaatttactctattgctttggattttattgccctagtcccaggaatctggccttccccctttgcccttcagagcttaataagaaccttctctctgttgaatcctctaggtcactgatagaaatgttaaaccacctcagattcagagctgaccctggaggaactgtggcaccatttgttgtgtgtccctaggttgacactgatccattgataacctctctttaggtctgactttccagctggttttccactcacctcatgactgagtagttcagaccttgtttttccacttaattgatgtgtgtgttgtgtggggcagaatcaaagaccctgctaaaacttaagattgattatatcgctggcttcctttggttgaccagaactcccacaaggatatcrccctggtcagactagacgtatccttgtcagagccacactgctttttctttttattaaaaagtgttcattatttcatgttgtgatgatttctccacttttttctaagtgtcaaaatcctgctgaaattacaatagctcagctataaacgaagtggaaaattcagg

SEQ ID NO: 268745 - DNA, 652 bp, Homo sapiens
agtagaaatggaaaaagaataattgcattgaaagagaagggacatgaacattcttgaagcatatattgccgtattgagtcatgatgtaatgagtaactgggaaccaagtttgtttttttttgctgtttgtttgttttttcaaaatgcttgtgaactttagtggataaaacatcatgaaactgaccatagactgttcccaggatccatcatttgtgtattataaggtgaatactaaataaatactaaatctataaatgaatattaaataaatactaaatctataaatgagtactaaataagtaataaatctgcacacataccttacgygaacaaattaaatggaattgtgtctttggtcatgactcagaagtgtttcaaactggtctaaagtacttattttaataaagaaaaagtactttcaatttccaaatgcaataaataaaaatatcctctaattctgtaatcatatttttaaaaaaagtttgaggttggtgaattttaccaggcacaagattataaaactaaccccaaactatttctaagatatataatttgtgtttggtaagacgtgtattgagtaaatattataacctgcagatacatctcatgtgaacttgaacccataatggttggaaacagtttccacaagatt

SEQ ID NO: 268746 - DNA, 541 bp, Homo sapiens
ctgaagaatgattcaatatgtggcttcccagaattccaaagtaattttctttaatatgtaagtagacaataaatgctcttgactatattgagaagttccatcacgttaacatttataatttaggtcctaatgagaggcaagaaaacactgcattaagagttagatgatttaagctcagatccagtccatacagtttgccagatgggtgaccttgggtaaatcctgtggccatctttcaatctcattttctcatctgtaaaattatctgaccacctcgaacatgggaatataacaagaaacaataaaagcacttccctgcttcatcaaatcttacaaaatgraaaaagaagatatatatgtccatattaatgcttgaaaacaagacagaatgtcatttattgtgacagagagtataaggaattcctgagaatagaagctggtagacttgtactgatgaagcagaagtcttcatcaagaggaaccacaaactgaaacatgttcaagaggagagagctcttccagaaattcctgagataactca

SEQ ID NO: 268747 - DNA, 545 bp, Homo sapiens
atttgataaataaaatatggtgtatgtacacatggaatactacacagacataaaaaagaacaaaatcatgtcctttgtagcaacatgtatgcagctggaagccattactgagtgagttaatgcagaaacagaaaaccraatttctcatattctcacttataaatgggaagctaaacattgagtacccatgggcataaagatagcaacaacagacactgaggactattagaggggaggaagagaaaggagcaagggttgaaaaactaactcttgggtactatgctcactatctgggtgacaggatcattcatatcccaaacctcagcatcatgcagtatacccacgtaacaaagctgcatatgtacccctggaatctaaaataaaagttgaaattatgaaaaataaaaaaaagttacagatattctaataaagaaatatgaatttataaaaataaaataaaataagcatgagatcaaaatgagacaagtacataggcgaaaccatacaactgatgtgtgtgctatggaagcatcacagacttagcc

SEQ ID NO: 268748 - DNA, 614 bp, Homo sapiens
tgcacataaatattctgaggtattatcttaactgatttataacttatttacaaaaggacataatttttaatactcttttctggtcttgatacaaagagtttccactaaagataagaagtggtcattcattaaataaaatgtttcaaagtccaataaatcctaacatcatttaacttagcatgtgtaagccacgtttgcatcagttagaaaaatggtggatgctttacacaaagagggaaakcttgcaaagaaagaagaggaaaatgccagggcctttgtcaatattttgataaaacacataaaaatagaataattttattttgtttcatctgtttccgtttggtctgcctcttatatcaaatacattttgcacctccgagctcagtgactactcagtgatttttattttgttattattttctttttctacttaagtctggaatattttgaaagaagaatgttggctacttcctaacttagactaccctaatagggccacaagattcatacaagaaaagattttgccatttctttctataaatctctgacatcaccccaaaactcaggtgaagatttcattgtgcgctatctgctaagaatgacaccatatttgt

SEQ ID NO: 268749 - DNA, 530 bp, Homo sapiens
tgttccctggttcaactgattagaaataggtgagaatgagtctatcctctccccactgtctcacagctatgtggtgaagaacatctgctttcttctccctctcacatgtgtttaggcaatgctagaatatttctccttacttgtgacaacttcagtttcttagcatccaggagaaatattattttaaaataataaaataccagttttrgagaagaatggctaaaaaattaaacacttaagatgggagtaatttctggcaagtccattcattcattcattgcatctgaatatacatattctgtctccccaaactcaagacctcactgagaacgttccatttagcaaactctatataatgacatctaagaggagtcccactaatcagtttccagttccaaagggtcagcacaatccaattattctgaaaatctggtaagtgcaacacataagaaactttttaccatttcatgtgcatcatatggcactgccaaaatgctttggcaaatttgcttatggattatttaaaaaat

SEQ ID NO: 268750 - DNA, 621 bp, Homo sapiens
agtgatattattcacaatttgattctgtcatgtttcttggattttaagggagccctattaatattactagttaagataacagcaacaatatggaatttttcttgcttaagtagatataactgagaaagaaagcaaataatgcaatttaatttaactgtaatttgtttgatgcttatataccaagcactraagcagaccttgatataaagaaaagaaatacatgacactgaatatttagtcttaatttcctattttaatgatgagaagttgagactcagaaaggttcagtaaacttactcatagatgggaactgaacaatgagaacacttggacacaggaagaggaacataacatactggggcctgttgtgtggtgggggagaggggagggatagcattaggagatatacccaatgtaaatgacgagttaatgggtgcagcacaccaacatggcacatgtatacatatgtaacaaacctgcacattgtgcacgtctaccctagaacttaaagtataataaaaaaaaaaaaaaaaaaaaaaaagattcttgattcccaggccagcaatcttggtaaagaaccaacctatattaacattccacccctgatataattaaattaaa

SEQ ID NO: 268751 - DNA, 621 bp, Homo sapiens
agtgatattattcacaatttgattctgtcatgtttcttggattttaagggagccctattaatattactagttaagataacagcaacaatatggaatttttcttgcttaagtagatataactgagaaagaaagcaaataatgcaatttaatttaactgtaatttgtttgatgcttatataccaagcactgaagcagaccttgatataaagaaaagaaatacatgacactgaatatttagtcttaatttcctattttaatgatgagaagttgagactcagaaaggttcagtaaacttactcatagatgggaaytgaacaatgagaacacttggacacaggaagaggaacataacatactggggcctgttgtgtggtgggggagaggggagggatagcattaggagatatacccaatgtaaatgacgagttaatgggtgcagcacaccaacatggcacatgtatacatatgtaacaaacctgcacattgtgcacgtctaccctagaacttaaagtataataaaaaaaaaaaaaaaaaaaaaaaagattcttgattcccaggccagcaatcttggtaaagaaccaacctatattaacattccacccctgatataattaaattaaa

SEQ ID NO: 268752 - DNA, 621 bp, Homo sapiens
agtgatattattcacaatttgattctgtcatgtttcttggattttaagggagccctattaatattactagttaagataacagcaacaatatggaatttttcttgcttaagtagatataactgagaaagaaagcaaataatgcaatttaatttaactgtaatttgtttgatgcttatataccaagcactgaagcagaccttgatataaagaaaagaaatacatgacactgaatatttagtcttaatttcctattttaatgatgagaagttgagactcagaaaggttcagtaaacttactcatagatgggaactgaacaatgagaacacttggacacaggaagaggaacataacatactggggcctgttgtgtggtgggggagrggggagggatagcattaggagatatacccaatgtaaatgacgagttaatgggtgcagcacaccaacatggcacatgtatacatatgtaacaaacctgcacattgtgcacgtctaccctagaacttaaagtataataaaaaaaaaaaaaaaaaaaaaaaagattcttgattcccaggccagcaatcttggtaaagaaccaacctatattaacattccacccctgatataattaaattaaa

SEQ ID NO: 268753 - DNA, 430 bp, Homo sapiens
ttttaactttcagacaggggcccaactccacagaatagtgaattcaaaccctactaaaaagggatgaagtgtggtgttaggaaggtgccaggggaagagactgttcatgctaacctgtcttgggatccagccagggccaactggctggttgsttgctgctggagagggcaagtggggagcaccaagacctagagctcaaaccatccgttggcataggctaggagccggcagggaaataataagggcaggcttatacaggggaggttctgtccagcaggccaattctggtaactgaaggccagaggcttcagatgcaattgatgatagaaatttaagatgaagaatgggggtgtctcgataagtaaggatcacccaacagggaggaatctggagtgaatgttatccaaatttaaagaagtggatcaacctc

SEQ ID NO: 268754 - DNA, 584 bp, Homo sapiens
cactaatcattttacctaagtggccactcataacagcagtcaaggccgaagttcaactgtggagatgccggggaccaccatgaactgatgatggaagagaaaatgagagaccacttctcagatcctgaacaccatgtatgccctacaarctatcctgcagtctgaattgactgcaaggagacattctgaactcttcaatagtgataacagctgggccaaggtcactgctttaggttaggaactggtagcaaggctgagcctgcagataaactaagagatccccttggggagagaaagggaaagaggctggtggccagcatggccctggcacatggtagccatgtcttctgcctcaactcctgttcccaaatttccagaaccgtggagctggccatcgttcctaaaggcagagacagcaggtcataatggtaacagcacatgttctggaattaggctggctttgactcctaactagggttgccacatttagcaaataaaagtacaggacacccagttaaatgtaaatttcagataaacaatgaataatttttttttctctaactatgtccccaaaattacatggg

SEQ ID NO: 268755 - DNA, 550 bp, Homo sapiens
ttttttcaattattttcacttttcattagaagtttttgcagctgttgctcacctcattaagttcactaagatgctaggcatttaattttcatgttgtaatttgtagtaagttgtttgacattaaagctagttttctgagtctataatttctgcagtttttttgctgcccttctcctgtagtaaccagttaccttttagaagaccgaagaatttaatgcaattaatgtaatttttaacttaactagtctcaattattggaattttgttcttataggktgtccagaccatggtgccttccatgtgctggaatgctcattaccaggtaccttctagaaatatattctgcttgctcgtaaaatgtccctcctgatccagcctccaatttaattacttagtaatcagttggctaattgaacactttctctcgcaagatttttctaattctcagccaaaactttcctctgctaatttataacaaggaatgtttttcttacttggtgtttgcacattcccggtacttgtagcttttatcatttttccccttagctat

SEQ ID NO: 268756 - DNA, 604 bp, Homo sapiens
ctttgtccctgtctctctgtgacactatttcacttaacatagtctcctcttggttcatccatgttgttgcaaatgaaagaatttcctgtttttgtttttaatggctgaatactctctatctatctatctgtctatctatctctctctctctatgtatctatctatacacagacacacacacacacacacacacacacacacacacacacaatattttaaaatctaatcatccattgttggatacttaggttgtttccatgtcttggatattgtaaataggactgaaatgaacatgggagagtagatatcttttcaacatactgatatcaattcatttgggtatacaactagtagtggcattgctggattacgtaataattctttttttttgagactgagttttgctcttgttgcccaggctggartgcaatggcaccatctcagctcaccgcaacatctgcctcctgggttcaagcgattctcctgtctcagcctctggagtagctgggattatttttagttttattgaggaatcttcatactgttttacaaaatggctgtaactaatttacactaataataacagtgtatacgggtttccttt

SEQ ID NO: 268757 - DNA, 606 bp, Homo sapiens
atttttccagttcaagaacccagctggaggtcaaggtgcacacttaactactcattaggctgaggagctggttgggcggctaaggattattctctagacaaagggtttttagccttatctcacccaaagatgttcttttataatattttgtgatgyccctgagattatcctgaaataaaatctataagccattttccatatatataatttcataaatcaatataatactctaagtataatattataaagaaataaaggatatgtattttataataaaaatcgtatatatacatatgttcaatttttatatttcaatagatatctgctaggtcacaatcacgatagaaaacagaatctgacagatgcttgtgcctatgcatggatccatgggaatgctgacagtgggttgctttggtgttaacatgagtgctgtggtgttcttaaatggtgaacaacacttactaatattctaagtaaaacaaagtccgattttcctttcacctcatcaattccatttctgaaatattcattgtgtgttaggaacatgcaaataatactctgtgtctatatatcaaggagagtgagcatccaagcccagttaattgc

SEQ ID NO: 268758 - DNA, 616 bp, Homo sapiens
gttaacatgagtgctgtggtgttcttaaatggtgaacaacacttactaatattctaagtaaaacaaagtccgattttcctttcacctcatcaattccatttctgaaatattcattgtgtgttaggaacatgcaaataatactctgtgtctatatatcaaggagagtgagcatccaagcccagttaattgcaagcagactattacttatttgagactctcctgttcactgttgcccacctagcaaccctggtgcatacctccatacatgtcagtagtgtcattccatcattatgattctaagtcatccctctacatatctaaatggytctctggtggcaatagtacctccattaagaaccactgccttgtttcaatcaaaatccactattagagcagttttttttagatgagaggaagatagaagacatgacttaacaaacccttaattctacgttaattgcatatcaataagtactaaatgttgttggaaatgtaataggcactctgctgtgaaggactttcccccatattgatcagtagatgttcccaactctagaaacacattccagcatctaaatgaagactatctgtattttctattagtgaaagaggctag

SEQ ID NO: 268759 - DNA, 603 bp, Homo sapiens
aatttttatatttcaatagatatctgctaggtcacaatcacgatagaaaacagaatctgacagatgcttgtgcctatgcatggatccatgggaatgctgacagtgggttgctttggtgttaacatgagtgctgtggtgttcttaaatggtgaacaacacttactaatattctaagtaaaacaaagtccgattttcctttcacctcatcaattccatttctgaaatattcattgtgtgttaggaacatgcaaataatactctgtgtctatatatcaaggagagtgagcatccaagcccagttaattgcaagcagactattacttatttgagactctcctgttcactgttgcccacctagcaaccctggtgcatacctccatacatgtcagtagtgtcattccatcattatgattctaagtcatccctctacatatctaaatggttctctggtggcaatagtacctccattaagaaccactgccttgtttcaatcaaaatccactattagagcagttttttttagatgagaggaagatagaagacatgacttaacaaacccttaattytacgttaattgcatatcaataagtactaaatgttgtt

SEQ ID NO: 268760 - DNA, 570 bp, Homo sapiens
aagctttctgaatttgtttcacgattctctgaaaccctttattatttttctttttttcttctgtattcaagttgcatgcttttcattaatctatttcaagttgattaatagattaatcatttttctataggaccatttagtaaatattattaaaatatattaaaaagttgtattttatatgtaataaagttaatacgattaacactggatctattttaggactttttcatatgttctatttctttgctgaaattttactgtatttttgttcattttaagtttatttgtctttaccttactgaccatcattataggtattgcattaaagactttgtctgatagtttcagaatctggatcatcttggtgttggcatctattacttatctttttccttgagaatagttcacattttcttggctttttaaaaatcttattttgggatattatccaggaccttgaaaatgtgttgtgttaactcaattcaattacattgttctacccaaagtattggtgtctctttttaggagagaataaatttggrtagacacacattttcagatatcatgcct

SEQ ID NO: 268761 - DNA, 590 bp, Homo sapiens
cacaaacctcaaatatatattctcactcagcttcacagggtgtttaaggaacctggccttgttctagaccggtcaatgacagattaggtagaaacttgaacatcatgagtaacaaattgctttgcctctgttagcagagaatcaaatatccctcacatgaaaacatgacaaagctgttttagcctgtgtttctaggaaacagygctcctcttcatcttccagatccaggaggttcccaaactctctgaagtacttgatgcttctctcctttctttgaacctcatggccctgccctagtacaggtccttttacaagagtctcctaactggttacctcccatacctctctctccaaagcacttttcaccttgcttctggagtttctttcttaaatatacatctgatcatttccttctccattacaggtgattgttaattctagtatcctaaattttccagatttaggggttcacttttaatgtccaaattaaatagcaaacacacacacacatataagtccttatatagcttatttatacaagacaaataaaggcataggtgtatctatatgtgaatgaattcctggacatg

SEQ ID NO: 268762 - DNA, 590 bp, Homo sapiens
cacaaacctcaaatatatattctcactcagcttcacagggtgtttaaggaacctggccttgttctagaccggtcaatgacagattaggtagaaacttgaacatcatgagtaacaaattgctttgcctctgttagcagagaatcaaatatccctcacatgaaaacatgacaaagctgttttagcctgtgtttctaggaaacagcgctcctcttcatcttccagatccaggaggttcccaaactctctgaagtacttgatgcttctctcctttctttgaacctcatggccctgccctagtacaggtccttttacaagagtctcctaactggttacctcccatacctctctctccaaagcacttttcaccttgcttctggagtttctttcttaaatatacatctgatcatttccttctccattacaggtgattgttaattctagtatcctaaattttccagatttaggggtycacttttaatgtccaaattaaatagcaaacacacacacacatataagtccttatatagcttatttatacaagacaaataaaggcataggtgtatctatatgtgaatgaattcctggacatg

SEQ ID NO: 268763 - DNA, 657 bp, Homo sapiens
acatctaaaatgatacgaaatcaaaattcagtgttcataaaaaagtgttattgcaacacagccatgctcattcctttatggattgcctatggttgcttttgtgctgaaacagcagagttgacaagttacttcagagactgaatggtccacaaggcctaaaatatctactgtttggcattttacagaaaatgttcgccaactctacactgatcccttcttagaatgcctttcctcgtgccttgtttgcccatgacaatgtacagttgaccctgaacaatgtggaggttggcaagcttttgtgtacaactttctgactccccaaaaacttaactataaataacctactgttgactggaagcctcaccaatgacttaaacagtcagttaacacatattttgtatattataggtattatatagtggattcttacaacaaagtaagctagagaaaagaaaaaggtattaagaaaatcataaagaagtaaacatatatgtactcttcattaagtggaagtggatcatcataaaggttttcatcctcatggttatcatgttaagtaggctgaggaggaggaagaggaggggttggttttgccatctgcgtrtgagtgaacccatgcagttcaaacccatgttatttaacggtaaactgtataca

SEQ ID NO: 268764 - DNA, 598 bp, Homo sapiens
ttccctttaactatttcatctctgtaagcgttgagcttagtgtgggtgcttagttttgactccttgtctaggatgtgcagtgatgctttgcaacaggactacggaggaagtcactcagatgtcccgatacaggagctgtttcacggaagggggcagagagaggtgccaaagacaagttttacactcagcatgatttgcatggggacagcccacatagctactacraaacaaaaaatcatctgcaaaataattgcctacataaaactttgtctgaaaatatgtgtgtgtttttttaattataaagaacaaaatactaagagatttaagaaagaatggtacttttatagcagtcaaatagaaattattggctaaaaagcagagttgtaataaactccagtttagaagttgtaacttttaaataaaaatagttctggcaaagaagaaaaatgggttatttaagaaaagtttgtgacaaaggagagtgcaattttaccagaatagatgattatgggtttaagaaaagagaaatttagatctagaagcatatgtgatagccatttaaaccatttatgaagtgattttatacttttaccatcat

SEQ ID NO: 268765 - DNA, 543 bp, Homo sapiens
taccaataattttagtactgagtagtactaaaatatcaccctaaagcagaatatataactctattaatttttaacccaataattgaatgtccttccctttgtatgtattattactattattacaaattacacataggcgaaaatttgaagaaaacataacaactttttactggatttgtgttagctagtgagattatggacttttctttctacttatctgtttttctagtttttggattttttttaatgtgattacattgctttaatagtaaaattattaaaatactatttttaataataaaaataatatataaatgatcatcacagataagtaaatagaaaaagtaccataaaggacatgcagcaaactacaaattctagttaccttgtttgagagaaatgagatttaggarggagatatgagcatgataatttagttccctacatacttttgtattatttgaaatttttatacagaacatttattcatgcattatttatgaacttaaaatgaattaatcaaattttaaaatgaattattta

SEQ ID NO: 268766 - DNA, 372 bp, Homo sapiens
gtctgcttagtctgaaatattagggtgctgcaatcaaaggctggaaaagaaataatgaaccggcaaacacaacagatgtctgatagagcccctaatggggaagaaagaaaagttacatctgccatttacactgtctgtgattgtgcatggagatggcactcaamgtgaggagtcccaccatgtcttccagcttcctggagcatgggaagccagactgataatttcagaggtgactcaatcagcatagtgaaagcattaatgttggcagacagaaaactcatattctcccagtttccttgtgtcagagaaatcaaaaacaaatggtagctttcttaactcttgacattttagttgaaaaatatttccttccaa

SEQ ID NO: 268767 - DNA, 536 bp, Homo sapiens
aactcctcagcctgtacatctgtactttctttgttttcactcatctttatactcatatgtacattttctctagttctggttttgcatccttatttatattttcccatattgatagcaggggttcttgtgcttcacattatttacaaaagaagacagggaacaaataagtaaatgtctgcatccataaagcaaaagcattgagtggatcgtaaagccttgctgctttgtgtattctacctgttgtgatatttacttcccaatatctgtctaggtgggcaaaattcacaatctacataagaatgaaatgaacttgttctcttgaaattttcttacttccctaagcatgaaatagaagtacaccttgttttccttcagtgaaaactcaagtgtagtctggttgccgtctctttgaacaggcaagaataacawgtgttttggatcagatgcctctcatgtgcattcttgaggatccttggtaaccttaaggaacagaagcagttttaaacttaggctcataaactgagagtcacactgtc

SEQ ID NO: 268768 - DNA, 564 bp, Homo sapiens
aatgaaatgaacttgttctcttgaaattttcttacttccctaagcatgaaatagaagtacaccttgttttccttcagtgaaaactcaagtgtagtctggttgccgtctctttgaacaggcaagaataacatgtgttttggatcagatgcctctcatgtgcattcttgaggatccttggtaaccttaaggaacagaagcagttttaaacttaggctcataaactgagagtcacactgtcatgtggtaggcatggttccttgtgatcaaggrctttgataggtagctctatactaattctgttctgcagtaccgctaatacgtaagtaggatctgaaattgaaccctagacgcattctgatgatgcattgaaactgtctttttaagtctccggaaaattttattttcccgtgttggatggggaatagtcacaaagagatacaatttgagtcttctgcggctatgccattcaacattttaatccaaacatccctttttccttatcctcccagagaaagcattcttttggagagtaatgaacgaaatgaatagtggagatgacatgaa

SEQ ID NO: 268769 - DNA, 474 bp, Homo sapiens
gcagtggctcccgcctataatcccagcactttgggaggccaaggcaggtggatcacctgaagtcgggagtttgagatcagcctgaccaacatggagaaacttgtctctactaaaaatacaaaattagcctggcatggtggctcatgcctrtaatcccagctacttgggaggctgaggcaggagaattgcttgaacctgggaagcagaggttgcggtgagccaaggtcatgccactgcactccagcctgggcaacaagagcaaaactctgtctacaaaaaagaaaaagaaaaagaaaaaaaacaaatgagctttatatttgaggaaaattttaggttcacagcaaaactacgcaggaagtttagatttcccacatactccctgccttcacacaagtacagccttcccactatcaacatccccactacagtgggacattcattacaaggggtgatcctttgttgacacatcattat

SEQ ID NO: 268770 - DNA, 575 bp, Homo sapiens
cagtatgctcaagctgtaaaaattttgtatattattctgcagtttcttttaataacttaaattcttctttttcattgtttgttttttaatccatctggagtttaatttcatgcatggtgtgaagtcggtatataattatatttccttccatatggaaagccagttgtcctaacaacatttattgactagtccatttcattttcccaatttagtaatttcttccctattatatataatagcatttactacttatttggggaccatctattttgtcccacttacrtatttgactatcgctgtgccagtactgtgtagttttaattactaaagcatagtaagcattggtatcttataggacaagttttccccatcttcttctaaatagtcttgtgtgttcttgttcatgtctatcttcatgtaaattttagaatctctttgttaatctgatgaagaatcatattcattatgttttttttgagttgcattgtttttggtggggaattgacaacttattgaatttttccttccatgaaaatggaatacacaaacatttactgaggtctcattttacggca

SEQ ID NO: 268771 - DNA, 495 bp, Homo sapiens
gtgaaaacagtatgtattaaatgagatgatacatgtgaaacatgtagagctctaattttattttttttttatttatttttttgagacagagtcccgatctgttgcccaggcagtggtgtgatgttggctcactgcaacctccgcctcccggattcaagcgattctcatgcgtcagcctcctgggtagttgagattacaggcatgtatgcccaactgatttttgtatttttagtagagatggggttttcagcatgttgttcaggctggtctcgaactcctggcctcaggtgatccatctgcctcggcctcccagagtgctgggattacacgtgtgagccgtggcacctggcctaactaatctttttttttttttttttaagtgcactgcactgaagtgcagtggtgtgatcacagctcattgcaaccttgaactcctgggctcaagygatcctcctgcctcagcctcccgagtaagtgggatacaggcatgcacta

SEQ ID NO: 268772 - DNA, 444 bp, Homo sapiens
ggtagttttctgttctttgttccttctcctctaccactgctccacttgactagccttaaaaaataaaaagcaattaaaataaataagatggcaattttatgactaggtaaactggtattgtaagaaaaygtcttttttgggaaatacagaagtatttagacaaaaggggacatcatgtgtgcatcttactctaaaatggtttggggaaaaatgcatatagagagagagataaagtaagtgtagttaaatgttaacatttggggtatgtaggtgagtggtatgtggaagttcattttactattcttgcaacttttgtataagtctgaaattattttagtatttaaaagtttaaaaaaaaaaaggccctcctgtggctgaggtggtaggagggttagtgtgaaaagatgggagaggggctatgggatggagaggggtggggcagaa

SEQ ID NO: 268773 - DNA, 444 bp, Homo sapiens
ggtagttttctgttctttgttccttctcctctaccactgctccacttgactagccttaaaaaataaaaagcaattaaaataaataagatggcaattttatgactaggtaaactggtattgtaagaaaatgtcttttttgggaaatacagaagtatttagacaaaaggggacatcatgtgtgcatcttactctaaaatggtttggggaaaaatgcatatagagagagagataaagtaagtgtagttaaatgttaacatttggggtatgtaggtgagtggtatgtggaagttcattttactattcttgcaacttttgtataagtctgaaattattttagtatttaaaagtttwaaaaaaaaaaggccctcctgtggctgaggtggtaggagggttagtgtgaaaagatgggagaggggctatgggatggagaggggtggggcagaa

SEQ ID NO: 268774 - DNA, 573 bp, Homo sapiens
gtcagctattccctgcccaatccacccaaccaaagaaaaaagattgacaggttcccagtccttccctacagagtttgtcaccaatatcaccccagcaatccaagggcgaaaacttcagcaacacaggccctctcaaaagcttgttccatgtgaaaagccctcattaaactctgagttatatttagaaaaaaaaatgaaacagaagttatatttagatgaaatggctcaaaagaattttaccaaaagcagcatgtttatactgatcttccaaaagaaaaggtttccttagcttttacatacaactcctaaaaacagacaacytcttcatacatatacatacaaagatttctgcttgggttcctttgggtctgaaagaacaggagctcccaggatatgagcaagactgcccctgggaagcagtgggatataaggacctaacaatgagcacgcgtttgaagaacaggacaatttcatacacagccctgagatgagatggtctgagaaataataaagcaaagcctttcgtgtgcttgtgctgaacgaaagaggttctgtaatttataagatggacac

SEQ ID NO: 268775 - DNA, 646 bp, Homo sapiens
atggtttctgttgcaactgcacagctctgctgttgtagtgtaaaagcagccatattcaacacataaataagtggcatggctgtgttcccataaaactttattcataaaacaggcagtgggtgaatttgccctgtgagttttagttgccaacccttggtagagatggacccaaagaagtgggcaaaaaaaaaatgtgaatgtctttttctgcatttcattgaccacatgacagcatccaccaacaaaagactgactggacaaccaaatagacaggatgactcaactagttgatgttagctaccctctgttatcactcaccacagttctggccagatcacctcacaaatggggtagtcatatggcaaggttggaggctatgaatggcacaaaagtatgagttcctacttactaaagctggtataattacttttgccatgcagtgcccaacctgccagcagcagaggccratgctgagtccccagcacggtatcattctttgaggagaccaaccacccactttctgccaagatgattaccaggccctttccactctagaaggagaattgcttcatcttgactggaattaacacatgttctagatatagtcttaccttttctgcctgcagggccttggacaacactctga

SEQ ID NO: 268776 - DNA, 520 bp, Homo sapiens
acatatggggaagctaaggggccctattaaacctcagcgaatccttccagctatggtcgctggtctaggattctgactcccttcagaacactaaatgcaaacaagctggtcttctgtcctstgtgtttcttcagggttctccaaaggctctcctctttctgacacagacttgtaaaccctctcctggttaaagccactcatccaagggctggggtctggagaggtgacagaggaggcagtggcagaacagtgaaaaatttgcatttctgaggaccgccctccacccccaagagtgaaggacctagttccttaggctttgccctgcctaggtacaaagatcaaagtttcagggttaggctgagatacttgaggattcaactttgatgcggattccatccaaggatatgctaataaagttgcagctgacttctcctgggttgttaagaacctttggcgatattgggctgggtagggtcagagaggaagataatttaaaaatagatggtgttctcccattcag

SEQ ID NO: 268777 - DNA, 625 bp, Homo sapiens
gtgtcttgtttgccagagatatgggctattaggcattatcaacacccacctggccaagaaaaaagctgtgaaatgtagatcccaatatcagcaaatctatggacaaatcaaaataagtgtatgctgtatgccttagctgactttctctgagtgatatggttatgcgatgtatttgcaactgcctctgtttaaaattgtcagccaaaaaatgctattttcactcatattataaatactgcagttgtataaacagtagtatttgttccccaacaaactgccaaaaggatcactttactgtttattaatggcataataatcagaccttaggttaaaatacttttaatttacttgtttactttttttttgagacggggtatcactttgtcacccaggctggagtgcagtggcccaatctgagctcactgcarcctccacctcccaggctcaagcaatcctcccacctcagcctcccgagtagctgggaatacaggcatgcaccaccatgcctggctattttttgtagagatggggtttcaccatgctgtccaggctggtctcaaactgtgaagctcaagtgattcacctgccttggcctcccaaagtgttgggactacaggaatgtgcc

SEQ ID NO: 268778 - DNA, 531 bp, Homo sapiens
tgaaaaaaaatgcagccggtaaatacaatctcagttttaaaaggctaatagtgttaccgggtttttttgtttttttttgttgttgttgtttgtttgtttgtttgttttgccacattggtttttctttccttgagaaaaccaagttcactttttgaggttttaatagttatgtgactgtaagcatttttaaataatattttatataaaaatagccctttacagtttacatggcagccttatragagctatcttatttaatatttacacaacctagtgaggtagagattattttcttactaaagggttctgctgagacacaaacccaagttgtctattctgttcaaagtccatcacccttatgctgctgaactggcaatcacaaatcttaccacagagcagttttaaatggattttatcaccttttataggccttggctatataaattgtactatgttatgcaaacgattaaatttacattacttcctagatatgctaaagatacacatctacacagtaaagatattggaata

SEQ ID NO: 268779 - DNA, 537 bp, Homo sapiens
catactttcttcacactaaaaaattgccatctctgggagaaattacatccccaaaagattaaaaacattcatatcaaacatccaacttttgtgaggctcatagaaataaagaccatgaatttagaagttcaaagcaccacaaagaataggcagctgtcatgcggtgagtggctaagagccccgtgtctggaaccatgtcggttcacattcctactcttccaccctctaactgcgtgacgctgggaaaggtatgcctcctctctgttccttggtttccctatctgtgaaatgtggctactaagagagtgtccacctcacagagttgtaatgagaattaaacaacactgcctggtatgtaggaagtgctcaatgttaccttttattattattaaagcagctttgcccaaaagtcacattgcacatatttccagattcaaatcattcatagtcatgctttatgattctccctgttcatctctctccacacaaaaagaaaataagmggtcatctttgataagggagccaaattgaagaatt

SEQ ID NO: 268780 - DNA, 624 bp, Homo sapiens
gtactaatgtctatgtcagggttttgatactgtactatagttttktaagatgttacctttgggggaaacagtgaaatgtacacagtacctccctgtacatttttgggcaacttcctgtgaatctataattatcttaaaacaaaaagtattttttaaaaatgactctctctctctgtctctctctctctctcactggtaacaagccggtaggttatactgcggcctgaaatacattttattctaaagggcttaagtccagcaaaggttggcaactcacaacctgtgaaatatttaatgatgacaacctgaattggacagatattctctccaactccatattcattcagattcaactgcaaaagttgatgttgttgtcattattattactatttcattttctaaagtattattatgacaggtaccatagaaattgagtaaatgatatgacttcagacatatatggtaattagcattaagaactgttatgaaaatatttccattttcttcctattaatgtaatactgagtgaacattcagtctttaagactatatgattagtattattaaatagctgaataaagtaaattattcaactcttgagaaaaaaaaactgccactagagaa

SEQ ID NO: 268781 - DNA, 642 bp, Homo sapiens
tcctcctctataaaggaataataatagcagctaatgattattttgtgaagtgtgacagtgttctactcaccttttgatttagccatcacgactaccttatagtacaggttctattatcccatyttacatatgaagaaattgaggctcagataggttcaatagcttatccaagatcatgctgctggttgaaccacagctgggacaagcacttttgagtccagagccttcccctctctttaaccttggtgccctatgtctctgggattagtaatttccaaacttgtttacttcctggaagtcaaggtactcatgagaaacataatttgagagtcagaggatgagggtcaaaaaagaaaaaaagcaataattgatatattaaatttaaagttaaaatatacctttaagatgttataaaaatatatcttcattatcttagaccagattctagaataagcagcaaaatatagcaaatgtttaagaaaaatgtataggaaaagcttcaaatagaggaaagctataatattattttggctaagtgagaaaagatattattgttttacccagtttatggatctgagcagcaaaacacctgtgtctagtttctatggcataggagtacagtttaagaacccctaagatgat

SEQ ID NO: 268782 - DNA, 468 bp, Homo sapiens
tggagtgcagtggtacaatctcagctcactgcaatctctgccatccgggcttgagcgatcctcctgcctcagccccctgagtagctgggactacaggtgcatgytaccacattcagctaactttttaattccttgtagagatggggtctcattatattgtccaggctggtcttgaactcctggactcaagcaatcctcccagttcagcctgccaaagtgctgggattacagggttaagccaccacacctggccagaactgactttaactacactagtttctaatctataacagttctgattcatgaaagaaacaaataaaaatgcgtcctataattctgaatggtgtcattctgattctggacacaggatttactcaggctgcaatggagagtataggaagaagacaatgttatttccttaaaaaggagtcaatcaaagacattcacatgcaaggctgtttcagtgaa

SEQ ID NO: 268783 - DNA, 468 bp, Homo sapiens
tggagtgcagtggtacaatctcagctcactgcaatctctgccatccgggcttgagcgatcctcctgcctcagccccctgagtagctgggactacaggtgcatgctaccacattcagctaactttttaattccttgtagagatggggtctcattatattgtccaggctggtcttgaactcctggactcaagcaatcctcccagttcagcctgccaaagtgctgggattacagggttaagccaccacacstggccagaactgactttaactacactagtttctaatctataacagttctgattcatgaaagaaacaaataaaaatgcgtcctataattctgaatggtgtcattctgattctggacacaggatttactcaggctgcaatggagagtataggaagaagacaatgttatttccttaaaaaggagtcaatcaaagacattcacatgcaaggctgtttcagtgaa

SEQ ID NO: 268784 - DNA, 499 bp, Homo sapiens
tctggggaggctgaagcagcagttagtgagaaggaggcaaaaccagagaagggcgatgctgccattctcattacccgattccgagcctgggtccggccagagctggggcagaggggagaggctgtggaccagatatgataagagttctgatgaaagattggactgggctttggagagaccaagaatgtgatcatgtttaggattgacctagccatttactagctwtgtggccccacaggtcacttaaacctttacgttaattaaacccctccctgcctcagttcaattaaagtacctggggattaaaagagctggtgcatgcacagcccttggtacggtagccagcacacagtaagtgcccagaaagtgttcgctttccgtagtagaagtggtagcagtagcaatagttgtgacagcagcagtagtacttctaccgatagacatcgtgcccaaaagtgaccacccctcccgcctcccccgagaaaaaccccaaatgcta

SEQ ID NO: 268785 - DNA, 499 bp, Homo sapiens
tctggggaggctgaagcagcagttagtgagaaggaggcaaaaccagagaagggcgatgctgccattctcattacccgattccgagcctgggtccggccagagctggggcagaggggagaggctgtggaccagatatgataagagttctgatgaaagattggactgggctttggagagaccaagaatgtgatcatgtttaggattgacctagccatttactagctttgtggccccacaggtcacttaaacctttacgttaattaaacccctccctgcctcagttcaattaaagtacctggggattaaaagagctggtgcatgcacagcccttggtacggtagccagcacacagtaagtgcccagraagtgttcgctttccgtagtagaagtggtagcagtagcaatagttgtgacagcagcagtagtacttctaccgatagacatcgtgcccaaaagtgaccacccctcccgcctcccccgagaaaaaccccaaatgcta

SEQ ID NO: 268786 - DNA, 546 bp, Homo sapiens
ttatttattttatttatttattatttccattgctttagtggtacaaggtttttttgttgttgttgcatgagtgaactgtataatggtgaagtctgagcttttaatgtagtgatgtagtgatgaatagtgtacattgtacccaataggtgrttttttattcctcatctccctctccccctccctacttctgaatctccagtgtccattatagcactctttatggctttgcatacccatggcttagctcccacttgtaagggagaacatgtggtatttggttttctattcctgagttacttcacttaggataatgaccagttctatcctagttgctgcaaacatgtttcattcatttttatggctgagtagtattctgccataaataactactgttcagtcttcaagcttgtcccgcctaactttattgttcttgttgttctgttttgttttgttttagactttagcagcctgaagccatgacttttagtttctgtccctagtgataagcagaaaagggagatgagcaaggggctttactgacccaaa

SEQ ID NO: 268787 - DNA, 615 bp, Homo sapiens
aagcaagaacctttttttccttcagctagtatatatgagttaaaattttccagttcttctgaaaaaggtcatttctataaatgatgcattttaaataccatttaatagctgttattgaaatttggctcatgaaaaaactacagttatatttttttgtgtgtaatctggcaaaaatgtcactatacatgtcagctaattgtgtaatatcttgctgctgttttgtttcctgtgcacttccatcaacaatttcagcttataacagtgattcttttccttttgcatctcaatatacctgatataaactttttctcccatcaataatagtgattcatgacagtaatcatgaaatctttcataggagacaatgttgttakaatctgtctctaggggaaagttgagaagggattgcatagttcagcattttcctcaggagattcggatgtgacccctagaggttataaaccgtaccaccttttgagaatcactgatcttcctaggggttataaactaccttcccttttgagaattactgatttctgaatgaagacaaagaatttatagtttttctttaagccaaattaacatacttctagaacacagtgtatagatgctaga

SEQ ID NO: 268788 - DNA, 601 bp, Homo sapiens
tcactttggcttatttgcttagcaattccaaccaaagctaatgagctgtagatcaaagcaatttgttgacaatattaatggcagtctcaggtctaagtaaattatctgacctttcactccgttacttggctgtcaggaagctgaaaggaagagttcaagcctagtcttggttgtgactacatttgctagcacctgaaataatgagttttggtagccacacgatttttttttgtaattaatatatactatttgtacacttttatgcagtacatgtggtattttgttacatgcatagaatgtgtgatgatcaagtcagagtatttagggtgtccagcaccttgagtatttgtcatttytatgtgttgagaacatttctagccctctcttctagttattttgatatatatacaatacactgctgctaactatagacatcctactctgctatcaaacattagaacttattccttctacttaactgtatgtttgtaccaatttatgcccatccattcctctacccacccacacacacacattcttgccaattggtaactattacttttaacattacttttaaatggcaaaaactgcaattactttt

SEQ ID NO: 268789 - DNA, 507 bp, Homo sapiens
tgtaaatatactataaattacattttgcatacatactttytcatatctagtatcactagttacattacgtatctagttacattaatcatatatattactacacaggagtttcatacagaaagccatatatactataattaatgatttaagggattttcaagggtaatattaactgtatagtatttttgctttaccaatagatttcagaagctgacctctttgttaaggtatactctagtaatcaactaaaaactaccatgatgtatattttaaaagagaacttcaaggctttaatgtatatgcacatgcacacatgggtgtgtatgtgtaatgaaatatattttttaatataggaaacttaaataatacaatgccacttaccttctctatatccccctctctacacacatagtagagtgcctgcattctcagtgcttccacattttggctatcttggagcagcaacctgcaggaaaacaatttagttaatgtcaaaataaatttata

SEQ ID NO: 268790 - DNA, 507 bp, Homo sapiens
tgtaaatatactataaattacattttgcatacatactttctcatatctagtatcactagttacattacgtatctagttacattaatcatatatattactacacaggagtttcatacagaaagccatatatactataattaatgatttaagggattttcaagggtaatattaactgtatagtatttttgctttaccaatagatttcagaagctgacctctttgttaaggtatactctagtaatcaactaaaaactaccatgatgtatattttaaaagagaacttcaaggctttaatgtatatgcacatgcacacatgggtgtgtatgtgtaatgaaatrtattttttaatataggaaacttaaataatacaatgccacttaccttctctatatccccctctctacacacatagtagagtgcctgcattctcagtgcttccacattttggctatcttggagcagcaacctgcaggaaaacaatttagttaatgtcaaaataaatttata

SEQ ID NO: 268791 - DNA, 548 bp, Homo sapiens
agacttgtgtcatcttttattacttaacctttgtgctgtctcaactgtctggtcccaatcctgcaaggctagttgtaatttcattttcttaacaaaagcaggaaggaagctcggaaaattcacgattatctggttcayagtctccagggcacctgaataattctggcgcatctcaaggcattgtgcctaatggaagggaaaaaaagtgatatccaaactgtgatctttcatatcaaagttctcataacgcagagcaggcagagtatgagcgtttaatacttacttttctgtgaggagcagttatcactttttaagtttttgtcaaaacaaaattttaaaacatcacagaataatacaaatacattatataagctattgtgttttaaaatttacttttaaatggctgaaaaacatgattaaaggataaaattttttaaaatgttctcggaaataccataaaataatgtttccatttaaaacaaaattatctttttagattaaaatgtttccaggaaattttcaagtagcatctaaaattttaagaaatt

SEQ ID NO: 268792 - DNA, 579 bp, Homo sapiens
ggcctgtgcattgtaaatctgatcattttgctgtgcccaaaacatcttaagtataattataccaaagcctgaaaaaagactggctaaagagaaaactaaaatagattttttaaaatgcaaacacacaattctgcctacaaaaatgttaagtgccaaggaaaatattgttaaaatccaagaggacctcctttcctaagctgcagtgttcaggaatttatatgtatataaggttggtagtgaccatggacaratcattgcctacacctctgccagaacatctgtcatttctcatgaagccggaactttaaatgtcacaactagatcagaaataacattgatatcagaaccatcatgtactttttttctgctctgcatgtgagcatctggggtgcctaaaatccaaccctcacagctcttgaaaagtcctgtgtcttgcagaagggatgcctttcagtgatgcatccgtgaggaggcggcgccttttgataattcacacaaaggtcttgctagtagagggaggccttaccttgactggaggagagacctacgtttggatctcggctaaagtatcttccaaga

SEQ ID NO: 268793 - DNA, 579 bp, Homo sapiens
ggcctgtgcattgtaaatctgatcattttgctgtgcccaaaacatcttaagtataattataccaaagcctgaaaaaagactggctaaagagaaaactaaaatagattttttaaaatgcaaacacacaattctgcctacaaaaatgttaagtgccaaggaaaatattgttaaaatccaagaggacctcctttcctaagctgcagtgttcaggaatttatatgtatataaggttggtagtgaccatggacaaatcattgcctacacctctgccagaacatctgtcatttctcatgaagccggaactttaaatgtcacaactagatcagaaataacattgatatcagaaccatcatgtactttttttctgctctgcatgtgagcatctggggtgcctaaaatccaaccctcacagctcttgaaaagtcctgtgtcttgcagaagggatgcctttcagtgatgcatccgtgaggaggcggcrccttttgataattcacacaaaggtcttgctagtagagggaggccttaccttgactggaggagagacctacgtttggatctcggctaaagtatcttccaaga

SEQ ID NO: 268794 - DNA, 579 bp, Homo sapiens
ggcctgtgcattgtaaatctgatcattttgctgtgcccaaaacatcttaagtataattataccaaagcctgaaaaaagactggctaaagagaaaactaaaatagattttttaaaatgcaaacacacaattctgcctacaaaaatgttaagtgccaaggaaaatattgttaaaatccaagaggacctcctttcctaagctgcagtgttcaggaatttatatgtatataaggttggtagtgaccatggacaaatcattgcctacacctctgccagaacatctgtcatttctcatgaagccggaactttaaatgtcacaactagatcagaaataacattgatatcagaaccatcatgtactttttttctgctctgcatgtgagcatctggggtgcctaaaatccaaccctcacagctcttgaaaagtcctgtgtcttgcagaagggatgcctttcagtgatgcatccgtgaggaggcggcgycttttgataattcacacaaaggtcttgctagtagagggaggccttaccttgactggaggagagacctacgtttggatctcggctaaagtatcttccaaga

SEQ ID NO: 268795 - DNA, 527 bp, Homo sapiens
cactgcctgatcaaataattagaagaaaaaatggctggaaagatatagagaatatacaacaggtaagcctgttaaataatctacattttatcctagagcccatgggaagctactatgccatgtttataggcattggcatgacaggatcaggttgcctttgggaaccatcaccctggtgtcactgtgaagaactgactagagggaaatgagactgggatcaatcaggaggctacttcaggaccgtaagcaagaaataacgatggagtcagctaaaagatgacagagagggctacggaaatgcggagttattggaaaagtctgaaatgtttagaaagcaaaattcctaagacttgagatttccctaaatttaccatttccgtcattgccaaaaatgtttagcaactttgcaaaaacactatgacagaacccctaagttacataatgtggagaattaagctcaataaatggttgctgaataaatgaacagaaaatatcaaaaacttkgactccacttataggtttctgtt

SEQ ID NO: 268796 - DNA, 527 bp, Homo sapiens
cactgcctgatcaaataattagaagaaaaaatggctggaaagatatagagaatatacaacaggtaagcctgttaaataatctacattttatcctagagcccatgggaagctactatgccatgtttataggcattggcatgacaggatcaggttgcctttgggaaccatcaccctggtgtcactgtgaagaactgactagagggaaatgagactgggatcaatcaggaggctacttcaggaccgtaagcaagaaataacgatggagtcagctaaaagatgacagagagggctacggaaatgcggagttattggaaaagtctgaaatgtttagaaagcaaaattcctaagacttgagatttccctaaatttaccatttccgtcattgccaaaaatgtttagcaactttgcaaaaacactatgacagaacccctaagttacataatgtggagaattaagctcaataaatggttgctgaataaatgaacagaaaatatcaaaaactttsactccacttataggtttctgtt

SEQ ID NO: 268797 - DNA, 546 bp, Homo sapiens
taataaatttaacaataaactgagtacttaaaaaattccaaattgatataagaaacaatttgaaaatgatcagtctgaaatctattaaaaactttccttcaaagaggtctcaaggcctgcaacaatgaattattccaaacatcaaagaattagcagccgggtgcggtggctcacgcctgtaatcccagcacgttggaaggccgtggcagggggaatcacctgaggtcaggagtttgagaccagcctgaccaacatggtgaaaccctgtctctgctaaaaatactaaaaatacaaaaattagctgggcatggtggtgagcatctgtaatcccagcaactcaggaggctgagacaacagaatcgcttcaacctgggaggcagaggttgcagtgagctgagatcaygccattacactccagcctgggcaacaagagcaaaactccgtctcaaaaaaaaaaaaaaaaaaaaaagaaaaaaagaattagcatcaatttgttgaacacagatgcagaaatcctgaacaaaatattataaaacatctttaaat

SEQ ID NO: 268798 - DNA, 547 bp, Homo sapiens
  misc_feature (1)...(547): n = A,T,C or G
aggttagcatttgtttcagcagccacagtggcaaacatagacaatccagcagccagagaaaaatccacttccttgtttctctagtttggaattgggctttaggtgtctctgtctccttctgctgctttcnccctttttttttttttttttttttttttttttgtctaaacatctccatgctatgctagccaacacctactcatcctcatttggkatttcctcttttgcttttttgctttcctacaaagcatcttgggcccatcctcctctgtctgccccaaacatcagaatacctaatcaaatagtcatatagccatctttctccctctaatattaagtgtggactccctcaattttagttttctgatgggattttcctaattctcaaaccattctgtcttatgtgtactagagtaatgcattgtgtttttggttcgtgtacatttacagaggccttaaaagagacattagctgatttttcacaataaccccataatcgaggcagatgaaaaacggagcccttttattcctaggccaagacccttct

SEQ ID NO: 268799 - DNA, 569 bp, Homo sapiens
gggctatctagtgatacatgggatggtggtgtccacttttaagcattttcctgagagaacctgggttatgtcaggtatgtctgtgtgctttcagatcgtgctttcagtccttaactgggcaagatacgttttctagtacaaggaaagtataggtatgtctgaatgtcctaatcaaaaacaaagctcttcatgtaattccacaaaccaaagactattaagaaaatgtctctccagcagcaaggtaagaatcaccactcatctttaatataatgaaaactggaaaatcaaaaaggtttatgtgaacactaagtcatktctgggtggtgggatgacaggtgatttaaaaatttttctttattcatatcaaatttttattttttctacagtatactattagtgtgttatttaaatagatgtactacttaaataattttaatagtaaagaagatactctaagtaaatacatagagaaaaatgtaaggaattcccaaggcaccccaggttttgtgttaaaatttcagatgaaattaagtaaatgtttaggataataccagatccttctgaattct

SEQ ID NO: 268800 - DNA, 491 bp, Homo sapiens
ttattcagctttgccaagttttacttgtattcctttgtgtgtctgtgtgtatattaagttctatacaattttatcacctgcataggttcatgtatttgctaccacagtcgagacaccaacttaattccactagcacaaagatcctgtgttgccgttttatagacataacctcctccttcccgacccctcccctggtctccccatccatagttctatccctrccctctgaccaccactaatctgcctccatttctaaaatgtttttcatttcaaaattttttataaatagaatcacactgtatgtaatcttttctaattggctgcttttcactcagcatgattccctggagattcatccagtctgtgtgtatcaattatttgttcctttgtatgactgagtagtgtttcctggtacagatgtaccacagttgtttagtcactcacctgctgaacaacttctgggctgtttctaggttttgactactaaacat

SEQ ID NO: 268801 - DNA, 587 bp, Homo sapiens
aatttctcatttttgtctaagctagttcaagttgaattttggaatttacagcaaaaagagttctatctaatacaattactagacagtagaaagtaagacgttggtaaaagggagaaaagtcaatgtttccttcttgatggatgaactggtgatcctcttaaccaattttaaggggcacagagcaggagaagcaggtttagaggacatggtgagtttgagatatcgtccagcagacagttggaccatttggggtctgctggacttggcagttargtggtcagtgataacctcatgtgaagatgtttcgatagaatagtcagtacatgaaagcagtgttgatgataccctatccctgagtggaacatcttataatctgtacatgatccaaaacccaagaactctccacaagctttcctaaggttacactttctgtaaacttttctctcataaaaggcaactcttattgggtttgatagcattttccagaaactcaagaagttaataacatctaagccatttcctctggtatcacccaatattcagttcctaggagctcctgggaattcattagagccacatagtgagag

SEQ ID NO: 268802 - DNA, 646 bp, Homo sapiens
ctttaaatttatttactgcatattttgttacacttcagaaggactttttttctttacaattacttcataatctaaaagtcgacaggaaatacagacagcagatgaattctcatgcactgatgaagtcaccttttttggcctttgcaagactaagtgttaataacttagagtaactgaatccttcgccatctttaacaatttccatgggactgtggcctatctgatgtttatgttgctgaaatcagcttgccttttctcattcaaccatgtcctaagactcaaacaactgtatttatcttaaccaaaaaggaatattttgccactaaaagcagtactcagctaaagccagtgcaactctatagtttagctttgtacatttttccctttgtttatcaatgaatggcatcacttctgtaacaattaactaaattgtctgcagaaaaaaagtcacagataaatattttattgccagataaatcttggtgatctttatactyaatgttctagtacatcttttttttgtttgtttgtcttttgagacagggtcttgctctgtcatccaggctggagtgcagtgatgcgatctcagctcactgcaacttctgtttcctgtgctcaagcaatcctcccacctcagcctctggag

SEQ ID NO: 268803 - DNA, 646 bp, Homo sapiens
ctttaaatttatttactgcatattttgttacacttcagaaggactttttttctttacaattacttcataatctaaaagtcgacaggaaatacagacagcagatgaattctcatgcactgatgaagtcaccttttttggcctttgcaagactaagtgttaataacttagagtaactgaatccttcgccatctttaacaatttccatgggactgtggcctatctgatgtttatgttgctgaaatcagcttgccttttctcattcaaccatgtcctaagactcaaacaactgtatttatcttaaccaaaaaggaatattttgccactaaaagcagtactcagctaaagccagtgcaactctatagtttagctttgtacatttttccctttgtttatcaatgaatggcatcacttctgtaacaattaactaaattgtctgcagaaaaaaagtcacagataaatattttattgccagataaatcttggtgatctttatacttaatgttctagtacatsttttttttgtttgtttgtcttttgagacagggtcttgctctgtcatccaggctggagtgcagtgatgcgatctcagctcactgcaacttctgtttcctgtgctcaagcaatcctcccacctcagcctctggag

SEQ ID NO: 268804 - DNA, 590 bp, Homo sapiens
atcttgacaagaatcttactttccttctggtaaagggaggatatctttcatataggcgttatgaaaggcaggttccctcctgcctttgggaagaaaacgcagagggtcagaacacccttcttgcacctgctgyttttaaaaatgcctttagttcaaaataacccttatgccaaagtgatatctgttggggtggcagattctgccacccttcagcttttgctctgagtgagatgacaaacaactggagggctttgagcggaacagggacatgatcttgcctgtgtctaacaggcacacgccgactgctgattaagaatagaccggagggaataaggaggagatgggttaggagccattgcagtaatccaggtgagaggggattgtggtttagtggtgctgtggacatgtgagagatgaacagattctagatagattctgaaagtcttgttgacaggatttattgactgaaaagtcagtatgagagactgcaatgatgccaaggttttgggtgttaatagctattaatagaaaagtaacattgccaacaacttgagatggggaagactgggcagagcaggttgtcaaggagg

SEQ ID NO: 268805 - DNA, 590 bp, Homo sapiens
atcttgacaagaatcttactttccttctggtaaagggaggatatctttcatataggcgttatgaaaggcaggttccctcctgcctttgggaagaaaacgcagagggtcagaacacccttcttgcacctgctgcttttaaaaatgcctttagttcaaaataacccttatgccaaagtgatatctgttggggtggcagattctgccacccttcagcttttgctctgagtgagatgacaaacaactggagggctttgagcggaacagggacatgatcttgcctgtgtctaacaggcacacgccgactgctgattaagaatagaccggagggaataaggaggagatgggttaggagccattgcagtaatccaggtgagaggggattgtggtttagtggtgctgtggacatgtgagagatgaacagattctagatagattctgaaagkcttgttgacaggatttattgactgaaaagtcagtatgagagactgcaatgatgccaaggttttgggtgttaatagctattaatagaaaagtaacattgccaacaacttgagatggggaagactgggcagagcaggttgtcaaggagg

SEQ ID NO: 268806 - DNA, 603 bp, Homo sapiens
gcatgcttctccagtccctaaagtctgtgattacataagccatgtgtttatgtcccacaacagctccaggtggtaccatggctwtcctcacctccaccttcttgttccatagtcttcccacaacccgtgtctgaaggagaccttactattttctttccactcctgaacctgcttctgctggattctccgttaatagcaacattctgttcgctcattcatgctggcgacctcggggttatcctcgactcttccctctactgtatcccccacatccagtgatcacagtttctggaatctggttctccccccattttccattctgatgcttgagattgtgtctctgtcatgtctcacctggaccattgctgttccttcctttgtggtgcctctaccttcagtgctgcaccttcatccttatcactgctcccagaatgatccatctaaaaacagaggctggcaagcaaaggtctgggccaaagccagcacactacctgtttttgagagcttgttcgggggttctagcaggggagcacagctactcgtatacccttgaccaaagactggttctcctctatcggagatggttgtcctctctgaccaagc

SEQ ID NO: 268807 - DNA, 603 bp, Homo sapiens
gcatgcttctccagtccctaaagtctgtgattacataagccatgtgtttatgtcccacaacagctccaggtggtaccatggctatcctcacctccaccttcttgttccatagtcttcccacaacccgtgtctgaaggagaccttactattttctttccactcctgaacctgcttctgctggattctccgttaatagcaacattctgttcgctcattcatgctggcgacctcggggttatcctcgactcttccctctactgtatcccccacatccagtgatcacagtttctggaatctgrttctccccccattttccattctgatgcttgagattgtgtctctgtcatgtctcacctggaccattgctgttccttcctttgtggtgcctctaccttcagtgctgcaccttcatccttatcactgctcccagaatgatccatctaaaaacagaggctggcaagcaaaggtctgggccaaagccagcacactacctgtttttgagagcttgttcgggggttctagcaggggagcacagctactcgtatacccttgaccaaagactggttctcctctatcggagatggttgtcctctctgaccaagc

SEQ ID NO: 268808 - DNA, 586 bp, Homo sapiens
gttactctcaggcaaaattttatgcctgcctcatatagtgtcaggatgtctcaaaatctaaattaaattaaacaacacacttgctttgacagatcatgtgtttattcagaagtttattcaagccaggagcatgcacaaaatctgacagtattcaaggttataaatttttttaaaccactgtttcagtcaaatgtatctaattaaatgcttttggagatgatgatgttagtaaaccaggtcgactttttgacattatttacagacatgcagacgttactgcttaacaaatcagcccctcgaatctcttgagtccctgattgatcacgaagggattacaaagaatataaattcttgcagaaaaaggaaaccctcctcacctargaaactgttaaccctgtaggtgatacatgggcacctctgggataaaatcctgagctacttgttcatttcttactgataattacctttctgaaagttccatttctcattatcctttatggtcagttccagtccaacatctttttcaaagtctgctgagtccttcagctcatgttcatctcccttcccttggccatttataggacga

SEQ ID NO: 268809 - DNA, 587 bp, Homo sapiens
cttttaactttctcaaacaattgcttttggctcttgcctcatctgatccttatataagcccagaagaaaacagaggctcagaagaggttaaagattttgagggtagcacatggctaattagtagcagagctgggtctttttttatgacatggagagctatacatagtttctattagccagtttcattttcctttcaacagaagccctgcagcaacacacttatcaacatgggcagtgatctttggttggaccttctctgggcaaaggactttggacaccaaatatgctttctgtaacaaccactacacccaattttccaatttttcatggggatccggtaaccatataggaaaaaggaggaaccatcttcctgctcctattatrctaagactcatcctacttaattcctcatttaaaacaagaacttttgttatttccaaacaatattcaattaccaaagagtttctctggattaattgcaggacgtcactctcctttaggatagagcacattgtccatcagccccaccaaatcagtcaagagtgaagaaggaagatattgccagggaggaaccaaggcctaggagc

SEQ ID NO: 268810 - DNA, 589 bp, Homo sapiens
cacctcaccaaacagaaattaggtcagatatcctgcctcagggacctaccaaactgggcccaggagatctccacatagctacctaccacacccacagtctagcccggagtctactccgtaggaaggcaggacaccactggcctcatcccagtctgtctagttggtgccttcacagatttcactctcagcgttcaccaacccaagctggatcactgccagcctcatggccactccatctccaaaaacggcaggcctctgcaaacagctcctcctcacagaaaggscaacagcccttgagcctacttatctgccggctctgacagatggaccccagaattcaccaaaccaaatgattttatttccctctacacatctatgtgcatgagagcagtcaacgaattaattgcattaggaaacctaccaagctgaaaacaactgcttaaaaccaagaaccaaaaaggtgcggaaagacagaaggcaagcaaacctcaggggcatattcggaaatggacaattatgatccattaagcctggttaagaaactgaaatttatgaggaagaaacatctggaactgcctggcatgtaaag

SEQ ID NO: 268811 - DNA, 495 bp, Homo sapiens
tccccagcaccagtgttgctgcagatctccaatggccctccaagacttttcgtgttaggatctgatctcttcccactcttttggggctccctcaagacttgcagcaagtagcacctgtgggtggtgccctcctggcccagcctcccctgcctcctcctagctcatctgctcccagctccatccatgggacccggagatctgcactgttggagaacaggtgggcagggcacctctcctgcatttctgkacctgcagtgatgggctgagctcggctggtggacagattcactgggtagatacttgtctaagggtctgacacgtctctaactccacctccacccactctcaagagggcacagtcaatatttcagcgtgacattttggaaaggttgctaaaccaggccaaagctagtctattccccaccagttacttttctcctaaaaatggccttcactagatcctcagatgtcacgccatcttctgatacctggctc

SEQ ID NO: 268812 - DNA, 598 bp, Homo sapiens
gaagtttccctgggagaaaaaattcagtaatgacatgaattggcaccaaaggatgcaggaccaatatccttgggttgcctcttttttctctactctcagtctgcagttaccaaattccctctgacgcttcaaactacagctcccccatggcccctccatgtagttgcacagctccaactacmgcttccccatggcccctcctcacatcttcccagagtgacctcagcatctactactgtcagtgccacacagttcatttccatgtgatgatatttttcctgcttattaggacagcttccctagataaactagaagcacttgaggaagcctatccccctgtatcagccagggagaccttccaggaaagagatggcacactcaaagcatctaactgaggagagtttggtaaagggactgtttactgaattgtggacagagctaagtcaaaccaacaaaagatgggctaacaacaaccaagaaccattactatgaagaatcgttaaggtatgggaaaagaaaaggtgccagaacatagatagagcagtggttctaactatagctggagttctggggagagggttgtccaacaaaagctgca

SEQ ID NO: 268813 - DNA, 533 bp, Homo sapiens
gtttgtacttaaatgtgagctggtaagaaaagataactcatgctccagcatgctcatcagctaaatactaccacagctacaagtgtcaacagctacatgggcagcccgggaatgagtcttgcaaataaaagagcacagtgtgaaatgatgactttttctgctcaaaaagcaccctgggtagggctgaactgttttgggtcaagaagaggactcgatttctggggtgatttttatcgttatcagagagtagactgtacttgccgtgaacgtatatacggctactccgcacactcctactggtggaggcaaacttgtagtcacttgtctttctctctgggcctttamcccccacaatgaaacatatttttcatttcagtttcacttacgtatcactttctcctttaaaagggtgaataataaagtaaaaaaatcaccatcaatgaatatttcagtgtgttaccagggcacacacacatggacatgtatatgtgtgcacacacatacactcaaaccctcccccatgccacgtgact

SEQ ID NO: 268814 - DNA, 573 bp, Homo sapiens
tgtctctgtccttagcctaggcctaagacagaccctattggcatgctgatatgtaaaaagtgtttttcttctgcaaaggagaggctgagaaattatctctttatcccaggtttccccagaagttgaaaagggaatacacatacatatacacacagagacacacacacagacacccagacacactcacacaccaatgtcaccacgttcaacctggagttagcaagacgtaggaggtgagatggggtcagatctacggagaggagaacctgaaatacaccaaagttggcctctaaaggtatgctggtcaatgcacagaccaaatagacacagacattgattctgactaaggagagaagaacttgacataaatgcttaacacaatcytcttctcaagtcccagaaactcacatctatgaataatttgtgaggcagagcctcagccgctaagaggtaaataactaatctgtccgtgacagagcaagacctacagctgcaaagtttgaaaggtataacggataaatcaaaccaacaaatagttcattgaacccccactctgctagactccaggacagg

SEQ ID NO: 268815 - DNA, 619 bp, Homo sapiens
tgtaattaccaatgttctgttggttcatataccttacctttgcaacatttttctctcatctttactttgtactttgtggcaaagcagaattttaagatggaaactaagatccaggtccccattgtacgattccctccccaagtgaggacagaacctgagaatataacagataacacttttgtgattagactgcattatatggcaattgtggaaggacttttgtaggtataattaaggtccctaatcagttgactttgagtgaataaaaacaggagattttcttgggtgggcctgacctcatcaggcaagctccttaaaagattatctrcaggtcagaaactagaagcctcagagattctgctgctggcctcgaagaagcaagtcatcatgagctttacagccacaagcaaggaaataaattcttcctcaaaccacatgagcttgggagaggacccagagcctcagatgagatcccagacacctgaggtctgacacttgacacattgattttagccttgtgagaactgagtagaggttccagctaagctctgctcagattcctggttcatagacactgtgagataataaatgtgtattattctaagccactaaatttgtg

SEQ ID NO: 268816 - DNA, 577 bp, Homo sapiens
aaaagactcatagggttgtatacagtatatctgaattaaacaaattgagatgcttagcctcctcaattaaatcacttagaataaattataagacttccatcatctttcaccagcactcattaaacacttcctaaatgtacaaaactaacaatatcttagctkcccacatttgctgacaatgcatgcaactccatcaacaagcaaactgcatttaactcctataacctcagaaaaacacagttattaagagaccaaaacataaataccctcatcatttcaagcttgttgcttaatatttgcatttcattccattaaaggaataatttccattgactgccaaaacgaacaaaccattgcaccataaagccacattttaattttactttaaggggactccatgcaaacccttttgaaggcactactctactattgccttttaaaattatgctaacattgttgaaggtataaaatataattatttgtctcagaagagaaataaaagaaattgtggttactttgtcttttccttagaaatataatatgaattcaaactaaagaagtcaaattaggtgagtgg

SEQ ID NO: 268817 - DNA, 577 bp, Homo sapiens
aaaagactcatagggttgtatacagtatatctgaattaaacaaattgagatgcttagcctcctcaattaaatcacttagaataaattataagacttccatcatctttcaccagcactcattaaacacttcctaaatgtacaaaactaacaatatcttagctgcccacatttgctgacaatgcatgcaactccatcaacaagcaaactgcatttaactcctataacctcagaaaaacacagttattaagagaccaaaacataaataccctcatcatttcaagcttgttgcttaatatttgcatttcattccattaaaggaataatttccattgactgccaaaaygaacaaaccattgcaccataaagccacattttaattttactttaaggggactccatgcaaacccttttgaaggcactactctactattgccttttaaaattatgctaacattgttgaaggtataaaatataattatttgtctcagaagagaaataaaagaaattgtggttactttgtcttttccttagaaatataatatgaattcaaactaaagaagtcaaattaggtgagtgg

SEQ ID NO: 268818 - DNA, 564 bp, Homo sapiens
cacagatgcctctggagcggcaggagagctatggttgatgtcaaatcccagccaaaggacttgctgggagtctccaactctgtttcatatcttagactattctattttcaagctaatgtgaaacactgcttatatttttttgaataattgaatggaggtgaaaacactggtgagaggcagagctagaaaaatactacttagctactgttattgcaaccctaattttagttttggcctaaaagtaaacttggagtttatcctgatggaggataaacagtcttcataatgaaaatctttcttaataattataacagtggacattggtataattgttttctgttataaagtaccattgcatccattgaacattagaggagtggaatgggcccctttgtcatattgtgagctttcagccaagaaaataattctatcaatggccataggagtgtttctgggggaatgtctccattagatgtagattttgactttaccattcwataacttttttgggtatgattcttggagaggtaaggaggaaatacattaagggttggaatggcagca

SEQ ID NO: 268819 - DNA, 587 bp, Homo sapiens
tgtagaaaatgtaaataaaaagaaggaagataaaataatccatagctctaccacttgagaacaagagctgtaaacactttgttgcattttcctttaatctatttttaaaagagagagagagagtgtgtgtgtgtgtttattaacttttaaccagtggaataatgttagtctgttttggagccttcatttttcacttgaagaaaagaatatctagccttcttctaaatattgggattgcctggaacattttagtcactctcttgccccccaggtttagcacaggcaggagggaacaccccttcttaggctactaattgttatgttccatgacattatggggatcaaagagatgcctggggaatgattgtgggaactcagaatgatagtcatttagccctgagttgagaaattgtctccccaagcttcttcttcctcacccttccagtgcattcctaaaatacacactgccaccaaacagatacagctccaattcatcttcatctgagcccagtttattgcctcttttgtctctttcattaaccctctggtctatggggtacttgcagwattgctattttgcaagaaat

SEQ ID NO: 268820 - DNA, 601 bp, Homo sapiens
catcagaaaaaatcccaagacttttaggcaaatgagcctacaaacacaggtggaatggacttgcaatttaccaagaaataggtttgtcatacttagaaaccaactgyataaacatgtttttatctattaataacttcattttccaaaacgctctactttatatgagacgattcttgatggaaataccatttgcttctaggctcgttgcttaaacataaagttaaaaatctttgtatgacacataaaattgtggtgactgcttaactttgcaactatagtgctcctgaaatgctcatttaaccagtctgtgttccagacctacagaacttagatggtgctaacattgcgcaaaaattgtgtatttcttctacaactaacttctgataaaaagggggcagagaaggttaactctctccccctttagctttatttgcttagtgaatttctacaaaacataatttaagtgctatatttttccaaggttttaataaggaaataaaaaccgcaataggtatcttaagcagaaagtgcatttcatacatatacaataggaagggctaaaataactaaagtagctgtggcatggaggaaggttttgagt

SEQ ID NO: 268821 - DNA, 601 bp, Homo sapiens
catcagaaaaaatcccaagacttttaggcaaatgagcctacaaacacaggtggaatggacttgcaatttaccaagaaataggtttgtcatacttagaaaccaactgcataaacatgtttttatctattaataactycattttccaaaacgctctactttatatgagacgattcttgatggaaataccatttgcttctaggctcgttgcttaaacataaagttaaaaatctttgtatgacacataaaattgtggtgactgcttaactttgcaactatagtgctcctgaaatgctcatttaaccagtctgtgttccagacctacagaacttagatggtgctaacattgcgcaaaaattgtgtatttcttctacaactaacttctgataaaaagggggcagagaaggttaactctctccccctttagctttatttgcttagtgaatttctacaaaacataatttaagtgctatatttttccaaggttttaataaggaaataaaaaccgcaataggtatcttaagcagaaagtgcatttcatacatatacaataggaagggctaaaataactaaagtagctgtggcatggaggaaggttttgagt

SEQ ID NO: 268822 - DNA, 601 bp, Homo sapiens
catcagaaaaaatcccaagacttttaggcaaatgagcctacaaacacaggtggaatggacttgcaatttaccaagaaataggtttgtcatacttagaaaccaactgcataaacatgtttttatctattaataacttcattttccaaaacgctctactttatatgagacrattcttgatggaaataccatttgcttctaggctcgttgcttaaacataaagttaaaaatctttgtatgacacataaaattgtggtgactgcttaactttgcaactatagtgctcctgaaatgctcatttaaccagtctgtgttccagacctacagaacttagatggtgctaacattgcgcaaaaattgtgtatttcttctacaactaacttctgataaaaagggggcagagaaggttaactctctccccctttagctttatttgcttagtgaatttctacaaaacataatttaagtgctatatttttccaaggttttaataaggaaataaaaaccgcaataggtatcttaagcagaaagtgcatttcatacatatacaataggaagggctaaaataactaaagtagctgtggcatggaggaaggttttgagt

SEQ ID NO: 268823 - DNA, 601 bp, Homo sapiens
catcagaaaaaatcccaagacttttaggcaaatgagcctacaaacacaggtggaatggacttgcaatttaccaagaaataggtttgtcatacttagaaaccaactgcataaacatgtttttatctattaataacttcattttccaaaacgctctactttatatgagacgattcttgatggaaataccatttgcttctaggctcgttgcttaaacataaagttaaaaatctttgtatgacacataaaattgtggtgactgcttaactttgcaactatagygctcctgaaatgctcatttaaccagtctgtgttccagacctacagaacttagatggtgctaacattgcgcaaaaattgtgtatttcttctacaactaacttctgataaaaagggggcagagaaggttaactctctccccctttagctttatttgcttagtgaatttctacaaaacataatttaagtgctatatttttccaaggttttaataaggaaataaaaaccgcaataggtatcttaagcagaaagtgcatttcatacatatacaataggaagggctaaaataactaaagtagctgtggcatggaggaaggttttgagt

SEQ ID NO: 268824 - DNA, 523 bp, Homo sapiens
aacttgtagattcaaggctatctccatgaaactaccaacatcattcttcacagaattagaaaaaactattctaaatttatatggaacacccccaaaagccagaatggccaaagcaattctgagcaaaaataataaagccagagaggcgtcatactacccaatttccagctatactataagtgtacactaaccatgatactgttacaaaagcagacacttaagccaatggaacagaatagaacactcaaaaataaagctgcacacttaccaccatctggatcgtggacaaggccaacaaaaacaaacaatggggaaaaggcaccctattcaataaatggtgctgggataattcgctagccataagcagaagagtgaaactggatgcttaccttccaccayacacacaaattaattcaagatggattaaaggttaaaatgtaagacttcagattatgaaaactctaaaacaaaacctaggaaatatttttctcgacattggccttggcaaataatttttggctaa

SEQ ID NO: 268825 - DNA, 567 bp, Homo sapiens
agccagcgagggatgccagcaagctgtcacctctcagaaatacaggaagaacatcaataatgttcgaagttataaagtagtaggtttctatcaagagtaaaacataaacgaagttataaagtagtaggtttctatcaagaataaaacataaacgatcaaagaattccttataaaaacattttttatttctaggaatcaaaacataaatataaaatttgagagtccaccaaaaaaaattagatgccagatttcactataattatcagggaagcgcccaaatgggttgtttacggcgcctcggggaaactttctgtttcgtgttaagggtcttgaaccatgatgtttagaaaaccatgggctgatgctttcagaacctctgtgatttttgcctcygacactgcatccaatagactagcatgttgattagggaaagctaaattcaataaaagacgactgtaagtggggtcaccaccttgaggggtcatgttagaaaagtagatgataaggtggtattgatagagtattgaagtctgggctcaaatggttgcccggggcctttcaagacca

SEQ ID NO: 268826 - DNA, 520 bp, Homo sapiens
agtttgaatattaaacattactacttttatctccctcagtcagcataaaacatactacttatggttttaataaccaaattcaatgagcaccaacaaaatttgatgtaactattaactttgaaattttgttgaaatagaactatgccttgggtatcattcaaagcatttaattgttgcaataaaaaactttgagataaattgaaatgatggacaatatgggtcgaaagcaacactggcttgagggaataggctaatgtttgagaacagaattgttaaggacaagattggatgtttatattaytttaggaaagatacactctaatggagtttaattctaaaatgtttaatattatgaaaatattatatgttatatgatcattatagaaaattaaaaatataagaacatcagaagcaaaatagtcaaagtctacctaaacccaattagaagtgaatactattaatcttgatttgcatgtttctaatcttattattatcaaattaataaacagctttcagatat

SEQ ID NO: 268827 - DNA, 520 bp, Homo sapiens
agtttgaatattaaacattactacttttatctccctcagtcagcataaaacatactacttatggttttaataaccaaattcaatgagcaccaacaaaatttgatgtaactattaactttgaaattttgttgaaatagaactatgccttgggtatcattcaaagcatttaattgttgcaataaaaaactttgagataaattgaaatgatggacaatatgggtcgaaagcaacactggcttgagggaataggctaatgtttgagaacagaattgttaaggacaagattggatgtttatattattttaggaaagayacactctaatggagtttaattctaaaatgtttaatattatgaaaatattatatgttatatgatcattatagaaaattaaaaatataagaacatcagaagcaaaatagtcaaagtctacctaaacccaattagaagtgaatactattaatcttgatttgcatgtttctaatcttattattatcaaattaataaacagctttcagatat

SEQ ID NO: 268828 - DNA, 419 bp, Homo sapiens
taatcttattattatcaaattaataaacagctttcagatattctgcttctccctgttactagatcaggataatgtcatttatgtacaggcatctcctgcttactcagttcagcattgatcaataaatattttagacttccattcaaaacacttccatttttcttttgcccatattctttttattcagtgctgcctgttttcaaatacayaacactttgtcaaacaaattccaacattagattggatatagttggtatcaaagtagtaatacacattgccattcctaatcctcagtgcattgatcctgaaaattatttgtaagaatagaaaaatactggatatttcaaattaagtctcattttgttgcttacccatgaaagactggaattaaccaacataaccattacaaggtgattgag

SEQ ID NO: 268829 - DNA, 601 bp, Homo sapiens
tgtcacaaaatttgactttactgaagaccgttttaaggatctttgcagctgacagcagtgacttttttacctcctacaaagtttcaactgacagtcttattgtctctgactttcccaaattaatgacataattagtcaccagggctttggctgctcaatagggatttagtaagcaatgagtcatatgttggggaacacttcaacaaacaaaatgttggcagagaaagatgtatgaatcagctaggaagaaacactattctatcactgaggatctttctaatattagatatcacagaaaaattttcatatagattaccatatgagtgagccaaaacctctaggaacaaaaaagcttagtataattataactccttgccatgatttaacttaaaatttctttacttatttagcaattctataaacaagaatcatttctgttaaggatactaaggagagtgttcctattgaatcagaacatttaaaasaaataattgagggaactcacacatgtaaaacgtcattaaccaaactaaaataaaatgtgagggcataaacttaaccagaaatgtttaaaacctatatataaaaaaaactagaaaac

SEQ ID NO: 268830 - DNA, 566 bp, Homo sapiens
cataacaaaacgacattttctagaatttctttttccagatttagaaaaatagacaaatttacttggaggaataaagaagcaagaatagctagaaatatcctataaaatcaatggaatttggagtcaatacaaaatattaagcaattcttaaagcttctatgattaaaatgagttataactacagatagatgaagatcatatagaaaatcaagacattgacagatatggaaaggtggtatataatgaaaacatttcagatcartgagggggaaatgttaaccggaaaagaatattaaaaaggcaatgaactcaataagacaacaagaagcaaaccacagaaaaataactggactggattagaaagaaaatactttagacacttcaaaaataaaatattcaaataaccaatgaacttattaaaaggtttttatttatattggttacctgaaaaaataattcaaaccacaatgagatgtaagtacttgtcattcagaatcctgaatttgaaaggaatattttagaattctaagttgaagagaaagtgcaaagtattgatgagaatgttg

SEQ ID NO: 268831 - DNA, 566 bp, Homo sapiens
cataacaaaacgacattttctagaatttctttttccagatttagaaaaatagacaaatttacttggaggaataaagaagcaagaatagctagaaatatcctataaaatcaatggaatttggagtcaatacaaaatattaagcaattcttaaagcttctatgattaaaatgagttataactacagatagatgaagatcatatagaaaatcaagacattgacagatatggaaaggtggtatataatgaaaacatttcagatcagtgagggggaaatgttaaccggaaaagaatattaaaaaggcaatgaactcaataagacaacaagaagcaaaccacagaaaaataactggactggattagaaagaaaataytttagacacttcaaaaataaaatattcaaataaccaatgaacttattaaaaggtttttatttatattggttacctgaaaaaataattcaaaccacaatgagatgtaagtacttgtcattcagaatcctgaatttgaaaggaatattttagaattctaagttgaagagaaagtgcaaagtattgatgagaatgttg

SEQ ID NO: 268832 - DNA, 605 bp, Homo sapiens
cccagggtcttgggcagccccgcccctgtggctttgcagggtacagccccccttctggctgcattgagtgtctgcagcttttccaggcacacagtgcaagctgtcagtggatctaccattctggggtctggaggatggtggcccttttctcacagctctgcttggcagtaccccagtggggactctgtgtgggagctccaaccccatatttccctttgacactgccctagcagaggttatccatgagggcccccccctcccctcccccccacagcaaacttttgcctggatttccaggcattttcatacatcttctgaaatgtaggcggaggttcatgaacgttaattcttgacttyggtgcatctgcaggcttaacaccacctagaacctgaaaggcttggaacttgcaccctctgaagccatggcctgaggtgtaccttggccccttttacctatggcaggagcagctgggatgcagggccccaagttcctaggctgcacacagcagggggttctggacccacaaaaccatttttccttctaagcctcctggcctgtgatgggagggtctgctgtgagggtctctaacatgccctggagacat

SEQ ID NO: 268833 - DNA, 558 bp, Homo sapiens
tcctggctatatctatattaataggttttgcacatttaaaccaaagtcacacatatggtttgattctaattaattctaatgcatcttgcaggtttcaaactgtattctattatgtaattatctgctgatccactctgtatcctgttgtgtaagttgcgatgattaacctctgcctttacgatgtaatccaaatgtagcatatagacctcaatgataagattgatcatggtgcatttaatcattaatttattattaatctcttttatcctggtacttagagtgcagatttttctcaacaactatttacgcaatcattaaatgaaatatagccttgtgtcacttagcaatgaggatatgttctgagaagtgtgtggctaggtgattatcttactgtgcaaacttcatagagtgatcaatctataatggtgatagcaatttttcaaccctattataatcttaatgagccattgttttacatgctgtctcttattgatgtaaacgttgttatgtggcacatgattatrtaaaagatattaatccattcattatttatgcatt

SEQ ID NO: 268834 - DNA, 522 bp, Homo sapiens
ttgagctaaaatgaaagtgtcctggcaatttaggtatcatgagtttcataacttcaccttcttttctaaaaaaggacacacgtgcttgctctaaactctaagaaagctgacagaatctttatccagggatggtgaatggcagtaaaattctttttcacagatacagaaatgtctttcatgtgttgatttcttacacctaaattgttgtcttgtgacagcatttctgtggggtgccgagaagctttgatctaagagtacccctttctggtgctctaattctaatctgaccgtgggrgacagtcgagagcagtgcttttcaagctctaatgtgcatctgaatgacctggggattctaaatcagtcatctggggtggggcctgaggtcatgcatttccaacaagctcgagaggctgaaggcttagagcagcagttcttaaacctgagcatgcatcagaaacacagggggccttgtgaaaatgggtggctgggcaccacctccagggtttttgatatagtagtact

SEQ ID NO: 268835 - DNA, 598 bp, Homo sapiens
tttaagaactgctggcttagaacatccctcatgactgtgagtggtccctcactggcttcacatgaaagttgatggttacaaaattcaagatgaaacaaccatgataggccttctaagcaggtattttgtgagtttaaatgaaaagagatccacatgccttatttagataatgaagataaggatagctaacatttattaatcttttctctttgtaacacactaagggtataacacacattatctcacttggcatctggcatgggcagcagtgttggtgtttgatgtttggctgaggagccagacttgtgtgcgtgctgggagggggtgttttcggtgcactgttgtggtctgcagaggtacctgcatgccaggccaaactgtccctcaggaaacacctttagatctagactagcagaygctagaggcccgagttctgcttcacagagtctgcaggaaataaatgaaagaagttgagggcaggtgttaacaatcatctgtttcaaccgcaaaagtacctgaatatagaacagaatttgtcaagcctggcgcacagcaggagcacctggatgcccgggacccatccacagagggtgtgatt

SEQ ID NO: 268836 - DNA, 553 bp, Homo sapiens
gccccacccgcaggcttctaatttaattggtctggggtgggaaactaagcagcagttttgctttttgttttttttctgtgtgtgttttgtttttgagacagggtcttgctccattgcccagggttggggtgcagtggttcagtcatggcttactgcagccttaaactcctaggctcaagcaatccttgtgcctcagcctcctaaagtgctgggattacaggcatgagccatcgtgcccagccagttttgttttctagttgaagtaatatataaatagccaaaaaagtgcacaagtcatgtgtgcaactcagtgaattatcacaaagcatacatttttttatatttgcataactrggtatatcacaatttgtctgttctgctgggcatttgagttgtttctagtttgagcaattacaaataatgctgctgcaaacatccttgtatgtgccttccagtgcatgtgcgcacacttttatctgggtataaactgaggagcagaattgctggattgcagggtaggatttggttcaattttagtagatgctgccaaact

SEQ ID NO: 268837 - DNA, 553 bp, Homo sapiens
gccccacccgcaggcttctaatttaattggtctggggtgggaaactaagcagcagttttgctttttgttttttttctgtgtgtgttttgtttttgagacagggtcttgctccattgcccagggttggggtgcagtggttcagtcatggcttactgcagccttaaactcctaggctcaagcaatccttgtgcctcagcctcctaaagtgctgggattacaggcatgagccatcgtgcccagccagttttgttttctagttgaagtaatatataaatagccaaaaaagtgcacaagtcatgtgtgcaactcagtgaattatcacaaagcatacatttttttatatttgcataactgggtatatcacaatttgtctgttctgctgggcatttgagttgtttctagtttgagcaattacaaataatgctgctgcaaacatccttgtatgtgccttccagtgcatgtgcgcacacttttatctgggtataaactgaggagcagaattgctggattgcagggtaggwtttggttcaattttagtagatgctgccaaact

SEQ ID NO: 268838 - DNA, 574 bp, Homo sapiens
tgggaggccaaggtggacagactgcctgagtccaggagttcaakaccaccctcggcaacaagcaaaaccccatctctacaaaaaatacaaaaattagccgggcatggtggtacatgcctgcagtcccagctactcaggaggctgaggctgaagatcacttgagtctggaggtgaaggttgcaatgggccgagatcatgccactgcactccagcctgggtaacagagcgagaccttgtctcaaaataataataataataagttaactataaatgaaaagacagaggctaggcacggtgtctcacacctgtaatcccagcactttgggaggccgaggcaggcagatcacctgaggtcgggagttccagaccagcctgaccaacatggagaaaccccatctctactaaaaatacaaaaaaattagccaggcgtggtggtgcatgcctgtaatcccagctactcgggaggctgaggcagaagaatcgcttgaacccaggaggtggaggttgcagtgagccgagattgcgccattgcactttagcctaggcaacaagggtaaaactccatctcaaaaaa

SEQ ID NO: 268839 - DNA, 529 bp, Homo sapiens
taaaactgctaggttcatagtgagcattcaaatatttcactgaggctgggcatggtggctcatacctgtaatcccagcactttgggaggccaaagtgggtggatcacttgaggtcaggagttccagaccagcctggaaaacatggtgaaaccccatctctactaaaaatacaaaaaattagcgggatgtggtggcaggcacctgtaatcccagctacttgggagactgaggcaagagaattgcttgaacccaggaggtggaggctgcagtgagccaagattgtaccactgcactctagcctgggtgacagagtgagactccgtctcaaaaaaaaaaacaaacaaaacacaaaaacaacaacaaaaaaacccaaaacttcattggttacatgacacttctttagattgtttacaaaaagaacagaaaagtagttgttgaaaagattaaatatttttaaatagtaaaaaytacataaatatcagttatcatataatattgagtatttaaagtccttggaatttatttttcc

SEQ ID NO: 268840 - DNA, 532 bp, Homo sapiens
tgaccaccattcctaagtgactgctgttttaacgcacatgaatctctgcattactgtgtggtgcactagaatgagggctggacttagtggagggagaccctcgagagggctctgccgctggccagtcttgtgacattgggcctcartgttctgacttgtaaaatgaaggaattgatgggatgatacctaagatgcctttccttccaaatgggcttcaatctaattttctatatgtcaggacttcttctaggcatgaagatgatgagtaagatacagtctctttttcaaagatgattatagatggaggatacacataaatattataaaagtcaatccacaaacagtgtaataaggtaggtgatgtaagagagtgatatgttgtgtgttttgaggatacacctaaagggacaattgcttctgtctggcaggactgtgtgtgtgggataagacgggggtaggtgaggggaagtagggaggctacaggaaagtggtaacaagtaggctgggcctgcaggtaggggtcagagctttc

SEQ ID NO: 268841 - DNA, 634 bp, Homo sapiens
agatcatatctgcgaatgtgcatcattagtgtttaactggcaaaactagatacaaggaagatagatgatcccattggaaaaagccaaatcggattttgaagagactttgacttgccccctttcactttttcttcctggcaaaggaaaagcaaaaactaaatggcttcgcatatggtttttgtgcatttgcaacaagtcaggagaggcacattggtcttcggctggtcagctctgtgggccgtttatctgttattgacatcacagagaaagcctgggatggaaacaactcctcatgtttgcgtcaagtactgttaatatttgtttgcagccctccttttcttcttagaactgaaaaccagccatctatttccctcagactagaatctattatttatgaattatttctctattcatcgctttgctctgaaaygcggtactgccaaacccttccagctgatcaagggtttcagacaaaaggaatgcaaagacagaacagcatccaaaaatagaaattaaatccatttatccttattccacctgacaaaggaattatgctgactggcatgatttttacctacacacaggaaaaaaatggtgaagaaaagaaaacctatgtttgaatgttcccagcctc

SEQ ID NO: 268842 - DNA, 444 bp, Homo sapiens
tttccttacttttctgagatttccattttcaaggacaaagaacctatgcaagttatgacagtgtcaatcctagccttagcagcagtaatccatataggccaaaccctataatcagctgaggcttatatcacagacagaggcgagatatataatgacacctgtgacytatattcctcatttataacctggactcctggcttgcaggagggtggaggatagagcagcaatgaaccagttaaaagccacataagattgcagcagggttcttgagagaattaagccctaatctcttaaagcatccattgtatgaaatgaattaatttctctctcatgcatttagaatgtcacgacttatataccatccttgggagaattgagaaaatagccactcaaattattttctgtgtcctataattcatatgaggagccctatttgagaagtga

SEQ ID NO: 268843 - DNA, 542 bp, Homo sapiens
gtcagtaaccctaagggcaaatagagaataaaaggattggaaaacttytttaatgaaataatagatgaaaacttctcaagtctggcaagaaatataaacatccagatacaggaggcttagcaatccccaggaagatacaaatgcaaaaagatcttctccacagcccgttatagtcaaactgcctaaagtccaagataaagagtaaatcctaagaacagcaagaaaaaagcatctagtcacctctaaaggaaactccattaaactaacagtggatttctcagcagaaatcttacaagccagaagagaactgaatgacatattcacagtgctaaaagaaaataactgtcagccaagaatgctatactcagcaaaataatcctttgtaaatgaaggagagataaagcctttcccagacaatcaaatcctgagggaattcattaccactagaccaaccctacaagaaatgctcaagaaagtcctaaacctgaaaccaaagggatatttacaataatgaaaacacataaaagtataaaactcactgg

SEQ ID NO: 268844 - DNA, 458 bp, Homo sapiens
gtggccacagatgacataggcattaattatttcttgcatttaacctcagtgcataagggtggggtccaagtgtttgggtgagagttcaaccaaggaggtagggctcacccactgaaagtcatccaggtctttcattcatgggccatctgatgaaagaagtgagacatgtttttaaaaaattgtttatattgcagcaagcatttgagctgtctgaaggaaatgattggtctgacttctatctacttctctgcatcattgtttgccaaacatctacattygtaccctggggcagccattgataatcattccaaaatcttgccctgttttatgcgtcttggcttatagacttgcaccttttactttggtctgcatctgtgacggttaattttatgtgtcaacttgactgggctggaggatgcccagatattttgttaaagattattctgggtttgtatgtg

SEQ ID NO: 268845 - DNA, 595 bp, Homo sapiens
cctttcccctttcttctgagaaacaaatggggaagtgagtggaaagaatgattccccaaggtcatagatgaaagacctgcacatccacacatgattmaaggtgttgaggttccacccacctggaaagacaattaaagggttcaggagaaaaatacttttctttgaaagatatggaagtgctgggcctttggtttctcttttctctccagttgtgtcctgtgtttttgtgaaatgccctttcaactctcaccgcctttccccagttgaggccaccttggacctgggcaccagatcaataagagatggcatgagaggtcattaaaaatgccatggcagagtgcctcacccaattgcctgtctttctaggtgagatccttctcatcactcctagcgctcatccttgatggtcaacctgtttccctgggggctgtttgttatctaccagccaaacattatttccttagacccttaagcaacaaagatcacctgttcctggtgacctgcattgaaagttgaaaggttttgtgttcagatggacctccttttggggtgtgagctggtttgaacaaatggaaaagaggacaggacggagaac

SEQ ID NO: 268846 - DNA, 595 bp, Homo sapiens
cctttcccctttcttctgagaaacaaatggggaagtgagtggaaagaatgattccccaaggtcatagatgaaagacctgcacatccacacatgattcaaggtgttgaggttccacccacctggaaagacaattaaagggttcrggagaaaaatacttttctttgaaagatatggaagtgctgggcctttggtttctcttttctctccagttgtgtcctgtgtttttgtgaaatgccctttcaactctcaccgcctttccccagttgaggccaccttggacctgggcaccagatcaataagagatggcatgagaggtcattaaaaatgccatggcagagtgcctcacccaattgcctgtctttctaggtgagatccttctcatcactcctagcgctcatccttgatggtcaacctgtttccctgggggctgtttgttatctaccagccaaacattatttccttagacccttaagcaacaaagatcacctgttcctggtgacctgcattgaaagttgaaaggttttgtgttcagatggacctccttttggggtgtgagctggtttgaacaaatggaaaagaggacaggacggagaac

SEQ ID NO: 268847 - DNA, 595 bp, Homo sapiens
cctttcccctttcttctgagaaacaaatggggaagtgagtggaaagaatgattccccaaggtcatagatgaaagacctgcacatccacacatgattcaaggtgttgaggttccacccacctggaaagacaattaaagggttcaggagaaaaatacttttctttgaaagatatggaagtgctgggcctttggtttctcttttctctccagttgtgtcctgtgtttttgtgaaatgccctttcaactctcaccgcctwtccccagttgaggccaccttggacctgggcaccagatcaataagagatggcatgagaggtcattaaaaatgccatggcagagtgcctcacccaattgcctgtctttctaggtgagatccttctcatcactcctagcgctcatccttgatggtcaacctgtttccctgggggctgtttgttatctaccagccaaacattatttccttagacccttaagcaacaaagatcacctgttcctggtgacctgcattgaaagttgaaaggttttgtgttcagatggacctccttttggggtgtgagctggtttgaacaaatggaaaagaggacaggacggagaac

SEQ ID NO: 268848 - DNA, 408 bp, Homo sapiens
ccttgtgcttggccttagaccagctgtagaaggaatgcgggatcttgccttgtgaactcacatcataaaaaaaggtggatcaaatagctctccagaagtgtggagaagtctctgcagtggcctgcagtgcttgctgtacttgaatactttgtaagttgttccttcctagtcatttaaagtcttctgaaatgtcttttctttctttcccactcattctttggaaatgaagggttattaatgctaataaaaattacttttgaaaattttgataataataatgataataatttctatgagactaatgatataatagctaccattttgttagcattgagtatgcattargcatgctatatgcattattgtgttgaattcttgccatcatcctgcaagacaggaattattatc

SEQ ID NO: 268849 - DNA, 582 bp, Homo sapiens
gttgccctgcaaaatctcagacagatgggtgactgtcctccttttcagaggtttcctgagaaatagatcatccacattctctgtaacccatacccacaccgtgcgcccggtaagaatgtctcaaattagcatagctttcaaaagaagagtagttggtagtccagctccatgttgggtgacatggattatgcatcttagaataaaagaggcatgaaaatcaaatatgtaagtgtcagaacaaactgactcaactcaatgcccygtgacctcactgttattcctgataataccagctattcttcttatggaaaaccaccttcacttccagtagctacttttcaattagatcaaatgctgcattgttatatgtaatatgtaagtcaattatatgatcaggacctcaattctaggatatgaaaaaatacttttccctctgcagggctggcccttagtgtagaagagttagcagttatctcctgggtgtgacttgagttgatccagagtccccagtggttaggattttcatagcccatacattttgaattcccctgttcaatacccatacacaaataggctctcata

SEQ ID NO: 268850 - DNA, 563 bp, Homo sapiens
ctgcaactcaggagaaggactttaccgagaatcatgctggcaccacgatctcagacttccagcctccagaactgtgagagataaatatttgttgttttaggcacycagtctatatggtaatttgctatagcagcctgattggactaagacaggactggacctgtttctgataatatcttaaatcactgtatattgggaagagaaagagaaatgatcagtttgcaattagtgcctcttgggaagagaaggacaagaccttatgaacttgttttgcagcaacacaaatgttcagcctaaaggacttgtgtcttatagatacagttggttagaggcccacttaactcttctctccatgcctctgacactggacccacatgcaatctatgcaccagtgcaggaggcaggcccaggcagagctaacatgttttggaacatgtatcatgaaccaagcaccttaaacacgtcatctgatttaaacctcagtaaaacagtttgaagtaaagggtgttagtcccatttcgcagatgaagaagtcaagttttgaaggttagaaagcttacctg

SEQ ID NO: 268851 - DNA, 403 bp, Homo sapiens
gtttctcaatgtctcctttcctgactgtggaaggcaggtaaattatgtgcttattatgtgtttggctcygtgtcaggccttctgccttgaattctgtgctgtaattctcataaccacatttcaggactgataccattccctatcttacagtggaaataccaagactcagagagatgaagcagtttgtccctagtcactcaggttataaacggtgtggccaggattcacaccatggctttctgactataaagacctatttattttactgccacttccatccatcctctgtcctgtggccaaagcaccctaacatgacttcctgtgcttgtggtcctggggcaggtttgggtgcctgggagggtggaggaagggagggagcaagctcatggtgggaccatctaca

SEQ ID NO: 268852 - DNA, 610 bp, Homo sapiens
tattagcccaacctcagggactaaaaagccaggttgaggccaattctggagagatggatgtgcttcccgcctccccaccggcaggcagctgtctacggaatggcagggggaggtggcacagagcaaagccmcctgcaggctccctgtccttcaaacccatgggagatgatgctgccctgcaaaggatagtcatggctactctgccaccctgcatgcctcagtttcccccatcccctactattgtacagtactgccttgaacaggaaaaatgatgccttttaggtgaggaaaaggagtaaccacagccttggtaagagactggagggaggagccttgagggatgggggtcagcctacagttgcggagccccacaagctctggtagagaccgtgtgggtctgagtccacagcttccagattgcattgggagagagaggcctggctgtgccctgtgtgtggcaagtgagtgatggaaggttgaggatgagataagtgctctgggttctgcttctctttctggggctgagcttgctcaagaagggacaaaatcataatcaaaggtacaatttggattctctagaaatttcagcatctgtcctcctgcaggcctc

SEQ ID NO: 268853 - DNA, 610 bp, Homo sapiens
tattagcccaacctcagggactaaaaagccaggttgaggccaattctggagagatggatgtgcttcccgcctccccaccggcaggcagctgtctacggaatggcagggggaggtggcacagagcaaagccacctgcaggctccctgtccttcaaacccatgggagatgatgctgccctgcaaaggatagtcatggctactctgccaccctgcatgcctcagtttcccccatcccctactattgtacagtactgccttgaacaggaaaaatgatgccttttaggtgaggaaaaggagtaaccacagccttggtaagagactggagggaggagccttgagggatgggggtcagcctacagttgcggagccccacaagctctggtagagaccgtgtgggtctgagtccacagcttccagattgcaytgggagagagaggcctggctgtgccctgtgtgtggcaagtgagtgatggaaggttgaggatgagataagtgctctgggttctgcttctctttctggggctgagcttgctcaagaagggacaaaatcataatcaaaggtacaatttggattctctagaaatttcagcatctgtcctcctgcaggcctc

SEQ ID NO: 268854 - DNA, 611 bp, Homo sapiens
gacaccaaggggctgctttttgttttaccttattaaatgggtgctgtttactatatttatgttaagacaaaaaaattcaggcttaggcacgctgagaaatttgctaaagttcctatagctagaaaggaacaggaaatgaatataggtctgactcaaggccaaaagccaagtaacgatcacactgaacctcctcttcaggtagtgatttttatcttgttttattttcatttttggataagtaatgcatggaacatgtacaaaattcaaaatgtgaaaagggcacctagtgaaaagcaagtctccctcctattcccaaccttctctccaggcccccttctcctcccaggagaccacattgtccccatttcatccagggtctctcattcatgccagagctttgccrtgtggatagagcaaatccatttcaaaggatggcactgggagaaacagccactgagttatgacttaacaaattatttgtccttgttcctctcttccaaaaactctttcacaaggtttcagtgactcaacaaatattgattaaacacatactatttccagacactgtgctcagcactagggaaacaaacaataaaccaaacaagctgctt

SEQ ID NO: 268855 - DNA, 600 bp, Homo sapiens
ccgattccttccttctatgggccacttgagtcacttgtgtacatgctagagaccaggccaggtgtagtagaagattaaacacagggccgggcgtggtggctcatgcctgtaatcctagcactttgggaggctgaggcgggcgggtcacgaggtcaggagatcgagaccatcctggttaacacagtgaaaccccgtctctactaaaaacacaaaaaattagccaggcatggtggtgggcgcctgtagtaccagctactcgggaggctgaggtgagagaatggcttgaacccgggaggcggagcttgcagtgagccragatcacaccactgtacctccagccggggtgacagagtgagactccatctcaaaaacaaaaaaacaaacaaacaaaaatcccaaaaaacagcaacaagaagattaaacacagacacagaccttttccctccagaaccttagaaatgaatgaagggaccagtagctgcacagatcattctagtaaagacaatatataataagagaaatcattttttgtttaaatattgatttgctgattcctataaaaatgcttcttttgccctttttttcttcccatgagccttt

SEQ ID NO: 268856 - DNA, 600 bp, Homo sapiens
ccgattccttccttctatgggccacttgagtcacttgtgtacatgctagagaccaggccaggtgtagtagaagattaaacacagggccgggcgtggtggctcatgcctgtaatcctagcactttgggaggctgaggcgggcgggtcacgaggtcaggagatcgagaccatcctggttaacacagtgaaaccccgtctctactaaaaacacaaaaaattagccaggcatggtggtgggcgcctgtagtaccagctactcgggaggctgaggtgagagaatggcttgaacccgggaggcggagcttgcagtgagccaagatcacascactgtacctccagccggggtgacagagtgagactccatctcaaaaacaaaaaaacaaacaaacaaaaatcccaaaaaacagcaacaagaagattaaacacagacacagaccttttccctccagaaccttagaaatgaatgaagggaccagtagctgcacagatcattctagtaaagacaatatataataagagaaatcattttttgtttaaatattgatttgctgattcctataaaaatgcttcttttgccctttttttcttcccatgagccttt

SEQ ID NO: 268857 - DNA, 558 bp, Homo sapiens
gagttttgtgcttgccttatgttacccaggagtagtactccrgggggcggggaagggcatggagctccccaaattctctgtcctttctgttaagccaccagggcaggtgcaggagcaagaacacgaggctgggtcagtcaagtctgtgctctggctccccctatgtaggcatgagtagtggtcacagtgaggatcagagggaagctctctggctgttggggtaatgttccagggagaagtgcagccgcctctgctgcacagaagaatccacatggggagtatgtgtagcagcaggaagtaaacctcacctggctcctacatgcttggcaaggcagttctcacatttgcagtattccactagcatcaggtaactggattccaggcacactcctctcaaaactcaaaaatgccccaggtcataagccttccccactgagatggtttagatctgtgtctctgcccaagtcttatgtcaaattgtgatccccaatgttggaagtggggcctgattggagaggattggatcatgggggtagagtattcatgaaaggtttagcg

SEQ ID NO: 268858 - DNA, 598 bp, Homo sapiens
gtaaacctcacctggctcctacatgcttggcaaggcagttctcmcatttgcagtattccactagcatcaggtaactggattccaggcacactcctctcaaaactcaaaaatgccccaggtcataagccttccccactgagatggtttagatctgtgtctctgcccaagtcttatgtcaaattgtgatccccaatgttggaagtggggcctgattggagaggattggatcatgggggtagagtattcatgaaaggtttagcgccatcctcccttggtactcttcttgtgatagtgagtgagttatcacgagatctgtttttttttttaagtgtatagcacctttgccctcactctctctcttgctcctgctcccatcatgcaaaacaacctgctgctctgttgccttctgccatgattagatgcttcctgaggcctccccagaagcagaaaccactatgcttcctgtacagcctatgggaccataagccaattaaacctctttttaaaaaaataaattactcagtttcaagtatttctttatgggaataagagaaaggcctaacacacccactgagatggaaactgtggctttcaggcc

SEQ ID NO: 268859 - DNA, 598 bp, Homo sapiens
gtaaacctcacctggctcctacatgcttggcaaggcagttctcacatttgcagtattccactagcatcaggtaactggattccaggcacactcctctcaaaactcaaaaatgccccaggtcataagccttccccactgagatggtttagatctgtgtctctgcccaagtcttatgtcaaattgtgatccccaatgttggaagtggggcctgattggagaggattggatcatgggggtagagtattcatgaaaggtttagcrccatcctcccttggtactcttcttgtgatagtgagtgagttatcacgagatctgtttttttttttaagtgtatagcacctttgccctcactctctctcttgctcctgctcccatcatgcaaaacaacctgctgctctgttgccttctgccatgattagatgcttcctgaggcctccccagaagcagaaaccactatgcttcctgtacagcctatgggaccataagccaattaaacctctttttaaaaaaataaattactcagtttcaagtatttctttatgggaataagagaaaggcctaacacacccactgagatggaaactgtggctttcaggcc

SEQ ID NO: 268860 - DNA, 598 bp, Homo sapiens
gtaaacctcacctggctcctacatgcttggcaaggcagttctcacatttgcagtattccactagcatcaggtaactggattccaggcacactcctctcaaaactcaaaaatgccccaggtcataagccttccccactgagatggtttagatctgtgtctctgcccaagtcttatgtcaaattgtgatccccaatgttggaagtggggcctgattggagaggattggatcatgggggtagagtattcatgaaaggtttagcgccatcctcccttggtactcttcttgtgatagtgagtgagttatcacgagatctgtttttttttttaagtgtatagcacctttgccctcactctctctcttgctcctgctcccatcatgcaaaacaacctgctgctctgttgccttctgccatgattagatgcttcctgaggcctccccagaagcagaaaccactatgcttcctgtacagcctatgggaccataagmcaattaaacctctttttaaaaaaataaattactcagtttcaagtatttctttatgggaataagagaaaggcctaacacacccactgagatggaaactgtggctttcaggcc

SEQ ID NO: 268861 - DNA, 605 bp, Homo sapiens
ttatgtttttcctcccaaacccactttttacacaaacacacacatatacacatattctcacaatttcacaaagacaaatcagccatgttttayaatagcagacattatgccattatgtattcaatcaatataaatatcgatataggctttgggaaatatgaataccaaccatgggttatattgctgatgaaataattacgccaatcactgggtacacagaatacaaaaacaacaagagactgtcaaatgaaaaatccatatcagtatgatagatgtgtacgtttgtgtgtatgtgtatgtttgtgtgtgtgtgtgtgtgtgttattttaatgaattaatatctgtttggaaaataaatcaaaatggcaaagcaccaattcctgggacttcagaaatattctcctgacattaactaagccaaaaatagcaatctattttcacttaagatatcaccctcccctagttatttggctagtcataaagtgatacatcagtgattccagtgtgatcccaacaaatatttgcacagggaatgcaggatacatctgtagaaagtagcattcatatagatatgatgtgaaaggccttaatctcagattttgcag

SEQ ID NO: 268862 - DNA, 605 bp, Homo sapiens
ttatgtttttcctcccaaacccactttttacacaaacacacacatatacacatattctcacaatttcacaaagacaaatcagccatgttttacratagcagacattatgccattatgtattcaatcaatataaatatcgatataggctttgggaaatatgaataccaaccatgggttatattgctgatgaaataattacgccaatcactgggtacacagaatacaaaaacaacaagagactgtcaaatgaaaaatccatatcagtatgatagatgtgtacgtttgtgtgtatgtgtatgtttgtgtgtgtgtgtgtgtgtgttattttaatgaattaatatctgtttggaaaataaatcaaaatggcaaagcaccaattcctgggacttcagaaatattctcctgacattaactaagccaaaaatagcaatctattttcacttaagatatcaccctcccctagttatttggctagtcataaagtgatacatcagtgattccagtgtgatcccaacaaatatttgcacagggaatgcaggatacatctgtagaaagtagcattcatatagatatgatgtgaaaggccttaatctcagattttgcag

SEQ ID NO: 268863 - DNA, 605 bp, Homo sapiens
ttatgtttttcctcccaaacccactttttacacaaacacacacatatacacatattctcacaatttcacaaagacaaatcagccatgttttacaatagcagacattatgccattatgtattcaatcaatataaatatcgatataggctttgggaamtatgaataccaaccatgggttatattgctgatgaaataattacgccaatcactgggtacacagaatacaaaaacaacaagagactgtcaaatgaaaaatccatatcagtatgatagatgtgtacgtttgtgtgtatgtgtatgtttgtgtgtgtgtgtgtgtgtgttattttaatgaattaatatctgtttggaaaataaatcaaaatggcaaagcaccaattcctgggacttcagaaatattctcctgacattaactaagccaaaaatagcaatctattttcacttaagatatcaccctcccctagttatttggctagtcataaagtgatacatcagtgattccagtgtgatcccaacaaatatttgcacagggaatgcaggatacatctgtagaaagtagcattcatatagatatgatgtgaaaggccttaatctcagattttgcag

SEQ ID NO: 268864 - DNA, 601 bp, Homo sapiens
gcttttctgctacatgaagatacagaactggtcacttttgccattccacttctaccatgtgagaatgcagcaagaaggctttccctagataccagcatcttgatctttaacttgccagcctccagaactgtgagaaaacaatttctgttcttggtaaattgtccagtctcaggtgtcttgttataacagcaaggctgggtaagccagatgtgttggagttttattttaaattcttgatgatttctccttagttagaagcaacagatgcatagagaaataagcattgcatttaactagactgtctatgaaatgaacttcagttttgcttcccctacagttgagttgttactttaggtagaggagttgtggaaaggtgctggtaaaatatagacactggatcaatatgaagtgaattgagaactggatgaactcacttcatatgaagtgagtattgaataaacttgtctagagaggtcatgaggtgactgttctagacctttgtcttccattttccttgatctcagtagtctatctagtattaaatttgaacttttttatacatrttgcgctaaagatggattgtagaattttttgacaggat

SEQ ID NO: 268865 - DNA, 566 bp, Homo sapiens
ctcaataagttgatgtatactgagaaatgattctaaagaagttagtgatatcctgtttaggaatagatttagaaaactgaagttactttccagctctacaattctgtattaggaacaatagggaaatgataaastgcctctatatggcaatctagtgaatctctgggggatgactgtctacctgcatagtagttgaggagcaagacaaacttccaaacacacaaaaatcaacttgaaataacatcaaattcagcctgggcaatatattgagaccccatatctacaaaaaattagccaggactgtggcacacgcctgtagtcccaactacttgggaggttgaggcaggaggatcgcttgagcctgagaggccaaggctgcagccaggtgcgatcatgccactgcactccaatctgggcaacagagagagaccctgtctcaacaaaatcaaacaaaagcatcgaatgcattccatattcaggttctgtaacagtgacatgtctactgaattacttttatttcttttaggaatgtctatatatatggattgtcactattaaaaaaagaa

SEQ ID NO: 268866 - DNA, 566 bp, Homo sapiens
ctcaataagttgatgtatactgagaaatgattctaaagaagttagtgatatcctgtttaggaatagatttagaaaactgaagttactttccagctctacaattctgtattaggaacaatagggaaatgataaagtgcctctatatggcaatctagtgaatctctgggggatgactgtctacctgcatagtagttgaggagcaagacaaacttccaaacacacaaaaatcaacttgaaataacatcaaattcagcctgggcaatatattgagaccccatatctacaaaaaattagccaggactgtggcacacgcctgtagtcccaactacttgggaggttgaggcaggaggatcgcttgagcctgagaggccaaggctgcagcsaggtgcgatcatgccactgcactccaatctgggcaacagagagagaccctgtctcaacaaaatcaaacaaaagcatcgaatgcattccatattcaggttctgtaacagtgacatgtctactgaattacttttatttcttttaggaatgtctatatatatggattgtcactattaaaaaaagaa

SEQ ID NO: 268867 - DNA, 566 bp, Homo sapiens
ctcaataagttgatgtatactgagaaatgattctaaagaagttagtgatatcctgtttaggaatagatttagaaaactgaagttactttccagctctacaattctgtattaggaacaatagggaaatgataaagtgcctctatatggcaatctagtgaatctctgggggatgactgtctacctgcatagtagttgaggagcaagacaaacttccaaacacacaaaaatcaacttgaaataacatcaaattcagcctgggcaatatattgagaccccatatctacaaaaaattagccaggactgtggcacacgcctgtagtcccaactacttgggaggttgaggcaggaggatcgcttgagcctgagaggccaaggctgcagccaggtgcgatcatgccactgmactccaatctgggcaacagagagagaccctgtctcaacaaaatcaaacaaaagcatcgaatgcattccatattcaggttctgtaacagtgacatgtctactgaattacttttatttcttttaggaatgtctatatatatggattgtcactattaaaaaaagaa

SEQ ID NO: 268868 - DNA, 566 bp, Homo sapiens
ctcaataagttgatgtatactgagaaatgattctaaagaagttagtgatatcctgtttaggaatagatttagaaaactgaagttactttccagctctacaattctgtattaggaacaatagggaaatgataaagtgcctctatatggcaatctagtgaatctctgggggatgactgtctacctgcatagtagttgaggagcaagacaaacttccaaacacacaaaaatcaacttgaaataacatcaaattcagcctgggcaatatattgagaccccatatctacaaaaaattagccaggactgtggcacacgcctgtagtcccaactacttgggaggttgaggcaggaggatcgcttgagcctgagaggccaaggctgcagccaggtgcgatcatgccactgcactccaatctgggcaacagagagagaycctgtctcaacaaaatcaaacaaaagcatcgaatgcattccatattcaggttctgtaacagtgacatgtctactgaattacttttatttcttttaggaatgtctatatatatggattgtcactattaaaaaaagaa

SEQ ID NO: 268869 - DNA, 563 bp, Homo sapiens
  misc_feature (1)...(563): n = A,T,C or G
tgcatttaacctaatttaatgtaaaaataaataaaaaataggttggtgcaaaagtaattgaggtttttgacattactttttaaaaaactgcaattacttttacaccaaycattttatttatttatttatttatttatttatttatttatttatatttacttcagtcttctgtagctctgttacttaacctatcctgtcctcatgtgggggcgggctgttatggaagcatttatctctttatcattttagaaatcttccaaatatgctgtaatttgaatttgactcatatgccaaggtactttattttttaaacctttcactttaagttcaggggtacaagtgatggtttgttccacaggtaaacatttgtcatgggggtctgttgtacagattatttcatcacccaggnattaagcctagtacccactagttatttttcntgatcctctccctcctcacaacttccaccctctgaaaagccccagtgtgtgttgtggccctctatgtgtccctgtcctatcatcgttagagtcccttatctgtatggttctacggaaatttgg

SEQ ID NO: 268870 - DNA, 589 bp, Homo sapiens
  misc_feature (1)...(589): n = A,T,C or G
acattactttttaaaaaactgcaattacttttacaccaaccattttatttatttatttatttatttatttatttatttatttatatttacttcagtcttctgtagctctgttacttaacctatcctgtcctcatgtgggggcgggctgttatggaagcatttatctctttatcattttagaaatcttccaaatatgctgtaatttgaatttgactcatatgccaaggtactttattttttaaacctttcactttaagttcaggggtacaagtgatggtttgttccacaggtaaacatttgtcatgggggtctgttgtacagattatttcatcacccaggnattaagcctagtacccactagttatttttcntgatcctctccctcctcacaacttccaccctctgaaaagccccaktgtgtgttgtggccctctatgtgtccctgtcctatcatcgttagagtcccttatctgtatggttctacggaaatttggtgacaggaaatcagatacgttagtaccaatactcagctgtacaagtgggtatcagccaaacaggatgaaaatggttcaacagaaaactgtttcac

SEQ ID NO: 268871 - DNA, 610 bp, Homo sapiens
acactaataattattatttttatgtagccgtaatttagatgagcatgtcttattccttctctctttcctcagaagactgttgctagactcttctcataactataatatgaaaacactaaataatttggcatgattaaaaataggataataacaattttttaaaaaatctattcatgctgtggttaaccataatcagtaataatgcaaaaaatacaaaaattacaacaatcttatgggatagtcacagggatattccaggcccttctgaaagttatgaatcagcaaagcactttaggatcaaaatttttgagttaaacaccgacaaccagtgcctttattagtaagaagaccgccattcaaattggacaagaaacattctccaggctgaggtataaacttaacttaaaaacatattaaaactatgacgctaagagaactatagagtttacaatagaatttttaactyatgtagataattgatatatttttaaagaaaaatagaactaatatactaccatggtagatactttaaaatttttcaaataagccagaattatttttttccaaatctatcctacaaaacatgtaacaaaagtttggtccattgtac

SEQ ID NO: 268872 - DNA, 615 bp, Homo sapiens
gtttaatttctatgtttttatatggttttcaaaatttctcttgttattgatttatagttttattccagagtagttagataagatgcttaatattatttcactttttttctaaatttttaaaaatttgctttgtaacttaatatatggtatctcctcaagaatgatcctttcttcagccactggatgaaatgttctgtaaatatttgttaggttcatttggtctattgtgcagatttagtcccatgtttgtttgttaaatttttttctgagagatctctccagtgctgaaagtggagcatcaaagtcttccattcttatcttattggggtccatatctttttttatctytaataatatttactttatatatctgggtgacccagtgttgggtgcatatatatttaaaattgttatattgtcttgctgaattgactactttatcattattacatagtgtacttcattgtctttcctattttgtctgataaaagtgtaataactcttgctctttttttggtttccattgacatgaaatatctcttttcatctctttattttcagtctatgagtgtcttcatagctgaagtgtttttcttgcaggcaacagagaaatgg

SEQ ID NO: 268873 - DNA, 514 bp, Homo sapiens
atagcattcctttgactttctaarcacttagagacatgtcacagctgaagcatagctttatctgaaagaattaaatgtgtttggctttctgtactaaatattctttaaacactcttcactatggactatctctattggagcctttttttttttttttttttttttttttttttttttttttttgaaacgcagtctggctctgtggctctgttgtccaggctggagtgcagtggcgcaatctcagctcactctaagctccgcctcccgggttcacgccattctcctgcctcagactccggagtagctgggactacaggcgccggccaccaagcctggctaattttttgtatttttagtagagatggggtttcaccgtgttagccaggatggtctggatctcctgacctcttgatccacccgccttggcctcccaaagtgctgggattaacggtgtgagccacctcgcccagcctggagccctttctttaatataaacataaatgttagtcaactt

SEQ ID NO: 268874 - DNA, 558 bp, Homo sapiens
tattgcattagtttaagaaaatgccacagccatctcaatctttagaaaccactcttctgattagtcagcagccattaatacggaggcaaaaatcttccaggaacaaaaagattaccacggggcttaaagatcagatgattgttagcatttttacaataaatgttttcaattgaggtgtgtacattattttttagatatgttatttgcacacttaatagactctctaatactgtaaacataacttytatatgtactgggaaaccacaccatttgtgtgattgagtttattgcaatgttcactatattgcaattgtctggaactaagaccctaatatctctgaagtttacctgtagatttttcatgtttgttacctcccacctaacggatagtctacatgagaaaaatgattgataattcgtattattcttaattatcagaaacattcaaacttaggttgtgtataatgtgtttttgattgtgtgtatgtgtgtgaagtaaatatgatttctaatttcttattctcactagtaacctagatattaaatgtaaacctatat

SEQ ID NO: 268875 - DNA, 579 bp, Homo sapiens
ctccaatagttcacaaattagtaaatttattatttttaccatgagcattgcttgctgtttctaatttctttattaattctttcaactgtcatttttaacaacttgtatcatcagctcacctatstccttatcacttcctcttgctttgtaagtcaattttgatatcatattcattaccctcccgctattattgtattttgaatctcctcttctttggactatatgcaatacctaaatgcatttttagtttctcatttatttttcaatatgtgtaagtggttatcaggctgttattttttctcggtcttggtgtttgctctgaatttgtgtgggtgctttaaacttgctttatgttgtattggacttaattgttttcatgtagagtccaagcttgaagaatagctttaatatttcattcacttttcctgaaggctgagattcaggagaggagaaggtaaactcggatggaatttagtgctttttcttaacggaagtaacctgcttaaaaacatctattcagtgacctttgccaggcattttagacacgagggctaatgtattcatttcaaaaaagaaaga

SEQ ID NO: 268876 - DNA, 579 bp, Homo sapiens
ctccaatagttcacaaattagtaaatttattatttttaccatgagcattgcttgctgtttctaatttctttattaattctttcaactgtcatttttaacaacttgtatcatcagctcacctatctccttatcacttcctcttgctttgtaagtcaattttgatatcatattcattaccctccckctattattgtattttgaatctcctcttctttggactatatgcaatacctaaatgcatttttagtttctcatttatttttcaatatgtgtaagtggttatcaggctgttattttttctcggtcttggtgtttgctctgaatttgtgtgggtgctttaaacttgctttatgttgtattggacttaattgttttcatgtagagtccaagcttgaagaatagctttaatatttcattcacttttcctgaaggctgagattcaggagaggagaaggtaaactcggatggaatttagtgctttttcttaacggaagtaacctgcttaaaaacatctattcagtgacctttgccaggcattttagacacgagggctaatgtattcatttcaaaaaagaaaga

SEQ ID NO: 268877 - DNA, 510 bp, Homo sapiens
gctgccttcctgtgttcgtctgtgctcaaagtctggagggggctgaggtgtcatggggctggtgtgtcagccttgccccaagcatgcacatgtccagccacatcacaatagtgcccaggcttggacacaactttgctctaccccagactgggttccgggagtaaggagaagccaggcagcgggagctggcacttctgagctttcaggagcagggggacttcctgaacccccatgaatacagggatgcccaagtctgtagccacagctgggcagctgcagcagcatctgggagcacggtgctaccaccctgccaactcagaaaaggatggggctcctgcctgttcctgtttcctactgagtccgtggagcatgcagcctcagcagtacttcccaactccagcagtggctgtgtygtacgggctgagagctgtcatcaatagtgaattaaatattttgttattacttttcattactttttaaatttttggtaatgtttttgaattaaaatca

SEQ ID NO: 268878 - DNA, 658 bp, Homo sapiens
attattatatgtgtagtttctaaacataaaatttatagctacttgtgtttatttgtgagatactatatttcatttttaatatcttttagtagaccttacacttttctgattatakttcctcatctttcttttgtgagagtgggacagagcaatagtcatttatgcattcatctagccaagtgaatctgcagttttacacatgttaatattgaacgggcagaggaagcagtaagttacacatttgtctcaggtgagtagaggaattactttgagttctgtcctttgttccatacctgtgaagattaactctcaatttacattgctggggtgaaattcaacagaactgttttagggtgaagatcttggtgcacccaaagaagaccctagtgagaaaattgtgaaggaggtatttagagatgttatttttgtagctgtcttatttaggaataaaacgggaggcaggtttgcatgacacagctcccagcttggctgttcactttgacttagtgatttgggggctctgaaatttattttcctttcacagaaagatagatatctgagtagatggaggaatgctactcattccctatcttaaaacgctgcctttttgcctaaccctgagttttctatattttttttctgatctcagatataataa

SEQ ID NO: 268879 - DNA, 640 bp, Homo sapiens
taataaaattatctctattttaggtattttrtttccaagttctagacagttgcttaaacttttccctgacatattgtatttctgtttgatttcctccaaaaatattaaacttacaaaaagctagtaatctttaatatttaaaaattaacttttaactggtttgcctaaattgtcattttaactctgctcagtaaacactcaaactctgcacagcagtgtgtgaggtagctgccatcatggtgtctgagaagtgggttttcacaattctgctacctcagctctgctgtgctggctgtggattctgtgagaaggtactggggcagcactgtaacatcagccattggcttaatgtcaacaatattttggaggaactcatagagaggggtcaccaggtaacagtgttgactcacacacacaggctttttcattgactatgggaagccttctgcattgaactttgaggtggtccaagtgccacatgacaaagtgaattttgacaatgtacataatgaatttctggacctagtcctgaatgtcttgtcaagcttgacctcctggcagtcagcaaaagaactgaataatttttctgaatctagagaaatttttaaaactctgtgtgagagttttgcctacaatcaga

SEQ ID NO: 268880 - DNA, 640 bp, Homo sapiens
taataaaattatctctattttaggtattttatttccaagttctagacagttgcttaaacttttccctgacatattgtatttctgtttgatttcctccaaaaatattaaacttacaaaaagctagtaatctttaatatttaaaaattaacttttaactggtttgcctaaattgtcattttaactctgctcagtaaacactcaaactctgcacagcagtgtgtgaggtagctgmcatcatggtgtctgagaagtgggttttcacaattctgctacctcagctctgctgtgctggctgtggattctgtgagaaggtactggggcagcactgtaacatcagccattggcttaatgtcaacaatattttggaggaactcatagagaggggtcaccaggtaacagtgttgactcacacacacaggctttttcattgactatgggaagccttctgcattgaactttgaggtggtccaagtgccacatgacaaagtgaattttgacaatgtacataatgaatttctggacctagtcctgaatgtcttgtcaagcttgacctcctggcagtcagcaaaagaactgaataatttttctgaatctagagaaatttttaaaactctgtgtgagagttttgcctacaatcaga

SEQ ID NO: 268881 - DNA, 579 bp, Homo sapiens
ctccaatagttcacaaattagtaaatttattatttttaccatgagcattgcttgctgtttctaatttctttattaattctttcaactgtcatttttaacaacttgtatcatcagctcacctatctccttatcacttcctcttgctttgtaagtcaattttgatatcatattcattaccctcccgctattattgtattttgaatctcctcttctttggactatatgcaatacctaaatgcatttttagtttctcatttatttttcaatatgtgtaagtggttatcaggctgttattttttctcggtcttggtgtttgctctgaatttgtgtgggtgctttaaacttgctttatgttgtattggacttaattgttttcatgtagagtccaagcttgaagaatagctttaatatttcattcacttttcctgaaggctgagattcaggagaggagaaggtaaactcggatggaatttagtgctttttcttaayggaagtaacctgcttaaaaacatctattcagtgacctttgccaggcattttagacacgagggctaatgtattcatttcaaaaaagaaaga

SEQ ID NO: 268882 - DNA, 445 bp, Homo sapiens
ccaattaattgacttttattaatacgtacatgttgtataagtcataattttagaaatcataattcatgagctaagtggtgggttaggagcttcagcaaggctcagtatgatctttttttgactttaatgactagtcaattagactattacaaagttgttagttgctgacaattttgttcattttattaattatcagtgtaggtacagtctgtgattctctttaactctaatgcttaaaatgatggttamattttattattgacttgaaaactgtaaaccaaaaataaaaattctaagcttctcacccaaccatccaaatggacttcctcctcagccagaggaagttaaaatttaacctgagagtctgtttcaggccatgatgggaaatgagggtcaaatatgccttagtatacctctctggcattagcatcaacacagactttca

SEQ ID NO: 268883 - DNA, 368 bp, Homo sapiens
aaccattagacaataaaaataaataaaagtatataacacagaaaggaaaatcacctctgtttgaagatgacatgatattatatgtgaaaaaccctaagtactccccaaaatactcttaaaactaataattcagtaaatttgcagaatacaaaatcaacatacaaaaatcagttatctttctgtatactaayaaaaaataattagaaaaaggaattaagaaaaagaatcctatacagaaacaagtatatagaaataaacaagtaggtgaaagtgttatcaaaaactacaaaacattgatgaatgcaaattaaaaatacactattttggaaaggtatgttgacagaaaaacaatactgtttaaacattca

SEQ ID NO: 268884 - DNA, 436 bp, Homo sapiens
cctgaaaaaacatttctccaaggaagttacacacatggccaatcagctgtatgataaaatgctcaatataattaatcatcagaaaaatctgaaccgtgatgatatatgaattcacaactcttaggatgtattttttagcacagatgcacacaagcaaacacacacacaattgttggcttggatatggagaaatcaaaactcttgtacactgtaggtgagaatataaaatattgcagacactatggaagcaatgtagaggttcttaagaaattaaaaatagaacttccacatggtgaaccccatctgtactaaaaatacaaaaattagacaggcggtaggggcatgcgcctgtartcccagctactcaggaggctgacgcaggagaattgcttcagcctgggaggcggaggttgcagtgagccgagatcctgccact

SEQ ID NO: 268885 - DNA, 637 bp, Homo sapiens
tggcatccaactccatccatgtccctgcaaaggacataatctcattctttttttcctggctgcattgaattctatagtgtataggtaccacatattctttatccagtctatcactgatgagcatttagattgattccatgtctttgctattgtgaacagtgctgcaataaacatgtgcatacatgtttctttataatagaattgtttacatttctttggctgtatacttagtaatgggattgctgggtcaaatggtatttctgtctttaggcctttgaggaatcaccacactgtcttccatgatgattgaattaatttatactccccaaagtatatagtgtttattttttctccccaatctctccaacatctgtttttttaatttattttttattttttaataatagccattctaactggtgtgagttggtatctcattgtggttttaatttgcatttgtctaataatcagtgatgctcagctattttttcaaatattgctggatgcaggtatatcttcttttgaaaagtgtctgtttatatcctttgcccactttttaattttttctagtaaatttgtttaagtctcttatagatgatgaawgttagattttagccagatgcatagtttacaaaaa

SEQ ID NO: 268886 - DNA, 561 bp, Homo sapiens
ataatattctctgatggttgtttttatttctgtcaagtctgtgctaatctcctccttgtcatttctgattgtgtttatttgaatcttctctcttttttctttattattgtagctrgaattctattttgttaatttgtttcaaaaaaatacccagattcttgattcatttttcgtttgaatgttttttattgtgtctgtatctctttcagttcatctctgattttcattatttcttgcttctgctagctttggaattttttttgctcttggttctctgttcttttagttgtgattttcaggttgttaatttgagatttttctagctttccaatgcgggcatttagtcctatacattttcctcttaacactgcttgggtttatcctagagattttggcatgttgtatctttgttctcattagtttcaaagatcttcttgatttctgtcttaatttcattatttgcccaaaagtcattcaggagtagtcattatttgcccaaaagtcgttcaatgtaattgtatggttttgagtaaatttcttagtctggatttctaagttgat

SEQ ID NO: 268887 - DNA, 376 bp, Homo sapiens
gaggctctgtccagggagtttccaagtcrctaatagctcaatagttctggcagggagtggctagaggcccaggcttgggagatctgcctggtgaggagatatgggaacaggcaaccacattacagtctggtcacttttctgtagggctgctgcagtatgctgggggcccactccagtccctagttgcctcagattttccagtacctgaaggtattaccagtgaaatatgagaaacagcaaagatggcagcctgccctttttccgaatagctctgtaccagggaggtacagacctgttgctggcccaaacacacctctaagaggtgtctgaagaccccagttgggaggtctaacacagtcagaaggactgtgttaat

SEQ ID NO: 268888 - DNA, 509 bp, Homo sapiens
gtggagtctaagtagagcagctgaccacattttcatagagcagctgtgctgtgctgggggtacatatcagcccctggtcaccttggaacctccaaacctcaaaggcaggattggttaggttgcccaaacagcaaagatgacagcctgccccttccccagaagctctatactaaccctatacctgaaaactctgtcagmtaaggaacaccagtggcggtacccaaaatccctgttgggagactccacccagtgatgaggagcagggtcagggatccacttaaaaaagcagtctgctcacacatttttgtaggactgctttgctgtgctgggctatcactttcaccccagtcatcttggactgttcaaagcctccaagttgaaattgctaagtcgcccaaacagcaaagatggcagcccacacctcttgcgagccctctcccagggtgttttcaaatctctagtggcgggagaacactgattggggtggctagaagcccctgtttggaggt

SEQ ID NO: 268889 - DNA, 509 bp, Homo sapiens
gtggagtctaagtagagcagctgaccacattttcatagagcagctgtgctgtgctgggggtacatatcagcccctggtcaccttggaacctccaaacctcaaaggcaggattggttaggttgcccaaacagcaaagatgacagcctgccccttccccagaagctctatactaaccctatacctgaaaactctgtcagctaaggaacaccagtggcggtacccaaaatccctgttgggagactccacccagtgatgaggagcagggtcagggatccacttaaaaaagcagtctgctcacacatttttgtaggactgctttgctgtgctgggctatcactttcaccccagtcatcttggactgttcaaagcctccaagttgaaattgmtaagtcgcccaaacagcaaagatggcagcccacacctcttgcgagccctctcccagggtgttttcaaatctctagtggcgggagaacactgattggggtggctagaagcccctgtttggaggt

SEQ ID NO: 268890 - DNA, 604 bp, Homo sapiens
ctgggctatcactttcaccccagtcatcttggactgttcaaagcctccaagttgaaattgctaagtcgcccaaacagcaaagatggcagcccacacctcttgcgagccctctcccagggtgttttcaaatctctagtggcgggagaacactgattggggyggctagaagcccctgtttggaggtcccgcccaataggaaggaacaggatctggaacctgcttaaagaagcagtctggccaagtttaggtagagtagatttgcaacagctgagggattccttccacccgcccccggcccagttcatctggactctccaaagctcaaatggcagaacagctaagttgctcaaacagtaaaaatggcagtcctcactgcacactacccctctgcacccaacccccagctccatccccggtaggcacaacactgctaccatgactgtctggaattccaagccagtgggtcttatcctgtgaggtgttgtgagggtggcgcttgcaggtggccgcctgaattcaacctctttgctaggaatatggtcacattcctaacctcccactttgccagaactacagctacttttgccaggaagcccagaaagct

SEQ ID NO: 268891 - DNA, 523 bp, Homo sapiens
acattctattttgaaagatagaatatatgcaagtaataaaaactgtgtaaaaactgttatctccagagaaaaaccaatgctaaggaagcatccagtgtagataatagagagtatcctggagtcactgatattaataatttagatgagagctgaactatatgcaggaataggtaaaagaatgaagaagagaaaaaaacacaaaaagaaaagcaggtaaagtgttcaggacagttctcaagactcaaagtttagtttgcaaggaagatactgagtaagaatcagatgatgctgataggcaagataagagccagatactcctcaggagttgaaatatttattaagcacatttagggactactaaaaagagttaagaaaagaaaatatgggataagattatastttttaaaaaaagattccaagatgttcgatggattaaattgtggaagggccaaactagaaagagctgaccattgaggaaattttgtatgaattcaggtagcagatgatggaaaaatggactaga

SEQ ID NO: 268892 - DNA, 583 bp, Homo sapiens
ccacttcaccctcactaacatggctattatcaaaaagataagtaattaaaagtgttggcaaggatatggagaatttggaatcttcatactttgcttgtgtgtatcaaaaattattcaggcactttgaaacaatctgccagtttattaaagtttaaacagagttacaatatgacccagcaattctacctctagtaatataccagacacaaatggcaataggtctatacaaaattaatacatgcatgttgataacatcttaaccaaaactggagagaaaactacagttcatcactgataaatgaataaacaatatgttttagaatattatttggcaataaaaataataaagtcttgatgcatgctataccattaatgagactttttaaaacattatactaagtatagatgccaaacaacaaagatccttcatataacaatatgtcccttcatatgaaatgctctkaataggaaaattgatagagataaaaaataagttagtgtttgcctaaaatgcaggataaggaatggctaagggtacagtgtttcttttggtgggtgataaaatactctaaatcttgttgtt

SEQ ID NO: 268893 - DNA, 640 bp, Homo sapiens
actgttattataatgtttaattgtgataaatggaattatattcatgcattaaaaatttaaaaacttacagcattaacatctttaaatttctgaatgagttttggtcctatctgaggtttcaatacctaggcctgaatgtagagttgagatrtacagaagctttatccaatttaatagtaaaaatgtaacaattatgaaacacacaaaaaagggttggagtatcaagttcaaaaggaggattagacagcaggaatcataactaaaacactaaaattaaaacaacagatttgagaagtaagacacattacccataaatctgtaaatatcctaaaatatggagctactatgactagtatcactttctagaaagaaggcttttaaggatattaatggtttgcctcaaaattgagaaataattttgtctttcctttttttctttaaaagcagagaaaaacatttgcttcacatctcatcaaatcttctgcatcaagccacatcatgttaaacaaccttctgctgttctcccttcagataagtctcataggaaccactcttggtgggaatgttttgatttggccaatggaaggtagtcattggctaaatgttaagataattatagatgagctcattaaaaaggagc

SEQ ID NO: 268894 - DNA, 640 bp, Homo sapiens
actgttattataatgtttaattgtgataaatggaattatattcatgcattaaaaatttaaaaacttacagcattaacatctttaaatttctgaatgagttttggtcctatctgaggtttcaatacctaggcctgaatgtagagttgagatgtacagaagctttatccaatttaatagtaaaaatgtaacaattatgaaacacacaaaaaagggttggagtatcaagttcaaaaggaggattagacagcaggaatcataactaaaacactaaaattaaaacaacagatttgagaagtaagacacattaccyataaatctgtaaatatcctaaaatatggagctactatgactagtatcactttctagaaagaaggcttttaaggatattaatggtttgcctcaaaattgagaaataattttgtctttcctttttttctttaaaagcagagaaaaacatttgcttcacatctcatcaaatcttctgcatcaagccacatcatgttaaacaaccttctgctgttctcccttcagataagtctcataggaaccactcttggtgggaatgttttgatttggccaatggaaggtagtcattggctaaatgttaagataattatagatgagctcattaaaaaggagc

SEQ ID NO: 268895 - DNA, 606 bp, Homo sapiens
caaattacaaaattcaatagcattctttaacccagatacaagtataaaatgtaacaaaataagatgtttagaattgcaacacaaactatcatcgaagagttatcttaaagatactcaataaccacaagctatttataatagctgttttagagtacttgtctactaattctatcatgtatgtcatgactgtgaacttgtctgtttaataatatgctatttgttgctctcagtcatatatttatgctttgttaactacttcataacttttttttctgattttaccttgttggatactgggctatttttttttaattctgttaartatttggacgctttgatctggtagagagatatttgtaatttcatccattagaagcttgcgtttaagtttattagatcacattctaacattttatttcggagtaaattttattccaccaaagaggccatacacatctaaagactctatttggatgatgtttggagacctttaaccatggcaaaaaaaaaactatatacatatgtatgatttttatatacgtatgtatacatgaagtaactattattggaccacctactatttctagttgttttatgacctgtttc

SEQ ID NO: 268896 - DNA, 590 bp, Homo sapiens
tgaattgccaatgtgttagtactaagaggtgggcctttaagaggtgataaggtcatgagggcagaaccttcatgaatgaaattaggggccttataaaagggtttggaagaatgggcttcttctcttccactctttgccatgtaagaacacagcattggcccactatttatcttccatcttttctgccctgtaagaacaccaagaaggcaccttttatggccttcagcagatgccaaaactgctggtatcttgatctaggactttttagcttccagaattgtgtgaaaataaatttctcttctctatagattgatgaatctctgttatttttttgtaacagcaraagtaggttgagacaatatgtgaatctccaaaagagaatatttgaaataaaataagaatgtgagggtaatagatactagatccaaaatccgattaggaaacaaaatgataaaagatataggtgagatgttaaattaatttgaaataacacttgaaagaattgataaataaattagaaacagaaatcaaggcttatggcattaaagtgaatttactaattgaaattatttaaggcaatctcaatgagc

SEQ ID NO: 268897 - DNA, 530 bp, Homo sapiens
atttaatagaaaactaaatgaagttatattcacaacaaaaggcttaaagaggttgttaagtaaaaagatttggcctaaaatgtgggtctgaatttgtgtttgtaattactctgatcttaaaatcactgaaaagctaatctgcccttgccagaaaaattttgaaagaaacacattgtatgcctgtatcaaaacatcacaaatatgtcataaatatatacctatatataytatgtgcacataaaattaaaaataaaaataaactgtgtaatatgattactatatttgtgaaagctcatgaattcagagaaaaaaactaacgtatttcagaagaagctagcatactcaaatattttcatcttagagaatgataataaaatatatactttgcttaattgtgttacaggtaattagataggcattaggaatgtcaggtgacagttccatgattatcacactgcctctctaaaaatgagaattttgcagccagtagtgccagggagagacaagctctttatgatccacagctgtta

SEQ ID NO: 268898 - DNA, 478 bp, Homo sapiens
gccaggatatatctaaaataagattgacaataattagtaatcttgagattgttatgaataagtatgagcaattaatatccctcaaacttatgaaacaaacaattattrtattattatgaaaaaagttttaaaaattaaaatgtctttatttttatttatatatatatattttccctgatcatgatgatgaaagtgggtggtttgattgatctttgccataaataaagaagatagtaatttagataatgaaataacttttttagagttgcacactttcattatgcaccatccttggggaataaaattactgctgtttctttgtgcaaatattttgaagtagcaaaaaataacttagtatgttttttggcatagcatcccaaatatgtcatatttagtaataactaagtactgagatagaacatcaccacttgttgtttttgctgataagcaaacttatggaaatgtggaaataaatttc

SEQ ID NO: 268899 - DNA, 593 bp, Homo sapiens
ctgagtctttacacttgcagtaatatatcttttgccttcacacttggaacacagcatgggtgttaattaatatttttaattcctgtagttttcactcaaatctatttgatcatactctattatctttttataatcccagtcacaaatacacacacacacacacacacacacacacacattccttttaagccaaataattgataactaattttttttwaaaaaagcttcttttctgtttggttctctgtactgtaaaatttatatcaaatatattaactgtaatataaaagtttttttgcttgtccaagatttttacttgctacaggtggttaaatttctatctaggacagaatgagcaaagccagtaactgaaaatattgaacagcatgattcccaactagacaaaagagagactcgaaataagaaaaatttataatgaacactggacacagtaggcctgaagactccctatgattccaatatatttctaggtgtaaaagattactgttattctactcaccctcccatgaagactaacaggcttcatgggactaactctataacaagaaaatattttaaattggtgaagcttt

SEQ ID NO: 268900 - DNA, 592 bp, Homo sapiens
gtttgggggaataattgaggaagacttccctggccttgctagagacctagacatgcaaatacaagaagcataaagaacacccaggaaattcagtgcaaaaagattttcacctacacacattgtcatcaggttatccaaagttaagatgaaggaaagaatcttaagagctgtgagacagaaaaaccaggtaacctataaagtaaaacctatcaggttaacagcagatttttcagcagaaaccctacaagctagaatggatggggccctatcttcagcttcctcaaacaaaacaagtaccagccaacaattttgtagccagcaaaactaagcatcatatatgaaggaaaaattcagccattttcagacaaacaaatgctgagaatttgccattaccaagccactgtaagaactgctaaaaggagctgtaaatcttgaaacaaatcctggaatcacatcaaacagaacatctttaaagcataagtcaracagaacctataaaacaaaaatacaagtttaaaagcaaaaacaaaaaaaacaaaaataaccaaagtacacaggcaacaaagagcatgatgaatgcaatggtacctca

SEQ ID NO: 268901 - DNA, 558 bp, Homo sapiens
ccaaaaccagcaaagatacaacaaaaaatgaaaacctcaccccagtatccttgatgaacatagatgcaaaaatccttaaaaaaatacccgcaaactaaatccagaagcacatcaaaaagctaatccaccataatcaagtaagctttattcatggggtgcaaggttgactcaacatatggaaatcaataaatatggttcatctcataaacagaactaaacacaaaaaatgattatttcaacagatgcagaaaagactttcaataaaattcaacactcttcaagttaaaagccctcagtaaaaataagcattggaggaacatacctcaaaataataaaagccatctatgacaaaacgactgccaacataatatgtagtgggcaaaagttggaagcattccccttgaaaactggcacaagacaaggatgccctctctcacccctcttatttaacatggtactggaagtcctggctagagatatcaggcaaaggaaataaatatarggcatccaaatagaaagaggaaagtcaaactctccatgtctgcagatggcaagatt

SEQ ID NO: 268902 - DNA, 568 bp, Homo sapiens
tttgttcatgttttctataatgttttgctttctttactttttattgaaagtttgacagcaacagatttctttatgaagatttttaaaccccttttactgggcttattttgaagaccattaagattatttacactcttctctggctgccttgtttcaaaaatctaattaatttttaaggtactgccactatattcaaattgaggcttrttcttgagaggacacaaatgcaaaaattctaaaaccatcacttctctctcttgtctttcctgttctctgtcctcccagttcttttgttactcaagggcctgaaattacataatttaagggcaattgagtataaacttaaaatctgtcacttattttctaatcttaatttttgatttttatccttttaatcactctatttgttcttatttctctttttaatggtagcctgtaatgatttcaaaacagcattgttacataattgctattgctcagtttgggattcactaagaattgcaacactatatccatatctgatctcactatatccaagtctagccagtcattctgtagctggcctact

SEQ ID NO: 268903 - DNA, 587 bp, Homo sapiens
gtgaaggtaaaactctctctattaccaaggtgcagcatcatagaggaaaagaaatttttcacatatacttctaactagaaacagtaaaggagtgttagagacataattaggctgattctttcttctgacaagtagagctgcctagtttcctgaagaatcattatgattctaatacttacagcttaaatgcattatcagtaatcacaagtaaaaccatgaaacaaaattggattagaaaatgagtaaatgataargagtagttcttctcatggtgcatggaactgttacttgaacagcataatttaaccaaccaagaaagctgtttgcaaagataataaaatactctttggaaggaagcccaagagagtcctgagctctttgctttttaaataaacagtacgccaatttacaataaaaaattattgataaaatgatcttcatttctcttaggcaagcattgagtattattttcttcatgttgatacctcccattgttaatagtgctaaggagaaatttattagaaggaaaatacacagtaatatatttgttttatgtttttgtttggttttctttaggtggaatttca

SEQ ID NO: 268904 - DNA, 568 bp, Homo sapiens
tttgttcatgttttctataatgttttgctttctttactttttattgaaagtttgacagcaacagatttctttatgaagatttttaaaccccttttactgggcttattttgaagaccattaagattatttacactcttctctggctgccttgtttcaaaaatctaattaatttttaaggtactgccactatattcaaattgaggcttattcttgagaggacacaaatgcaaaaattctaaaaccatcacttctctctcttgtctttcctgttctctgtcctcccagttcttttgttactcaagggcctgaaattacataatttaagggcaattgagtataaayttaaaatctgtcacttattttctaatcttaatttttgatttttatccttttaatcactctatttgttcttatttctctttttaatggtagcctgtaatgatttcaaaacagcattgttacataattgctattgctcagtttgggattcactaagaattgcaacactatatccatatctgatctcactatatccaagtctagccagtcattctgtagctggcctact

SEQ ID NO: 268905 - DNA, 480 bp, Homo sapiens
taatgctaaatgacgagttaatgggtgcagctcaccaacatggcacatgtatacatatgtaactaacctgcacattgtgcacatgtaccctaaaacttaaagtataataataaaaaaaaatttaaaaaaagaataagaaaaaaaacacacacaaaaaaataaaaaaaaaataaagatacacaaacttactaactatccacctaagagtgtacacggatttgcatccaaccacaaactcctgctacaggatattattaaggtttatttaaaaatgtaaagcaataacacaaattttcctcactgttaaagaaaataaaattcatttgaaatgaaaaaawaaataaataaactttacgatcaaattctggatgtctggaggaaaagactgatttccataggactgcttattcaatccaccttattgctgaggcaattcctagagtgcatgccttctaagtaatttctgccaattacaagagg

SEQ ID NO: 268906 - DNA, 551 bp, Homo sapiens
ggatctccagaagactggccttaatagaagtgaaactcagcatagaaattcatttaatggaagaggaagagtagaaaaggatgattatacttgtaggtaagattgcagcatttaggttagaagtaagcagtttgaktccatctaaagataaggaagattcttatgtgtttcatgttttcttcaagttctatgcaggtactagtgttttaaattcaagctaggtactacctatgctcttacttatattaagaaatgtattattcatcttatctgtcattacattccacctgaaagcactactaaaaaattcacaactttcttgtgtactctgcttctcttctttactctgcagtcacctcctctcttgttttactatgagtgtgtcaaagttttgtgaatcattccaaatttcactttctccaaaaaggactgtactcctctttttccatatacagctattcttgcttggtggtggaaaatagtaaatgtgtaggagccctacaaaacagtaacattattttagatttcctcctccagatataagaaccaaa

SEQ ID NO: 268907 - DNA, 537 bp, Homo sapiens
agccagctgtctcaggatgatgccatgcctcagagaacattgcaagaccagtgaattccacgaatatgagcccactgctgcacttctttatctgtgaagtgagtgccttggtcagaggcaatgctgtgtggaatatgatgacagtkgacaaggtatgctgccagtccacaaatgaaagtcttggcaaaagcattgagtgcaggactggcaaattcatatctgcagaaagtgtctattttagtgaggacaaacaactgccctttccatgagaaaaaaagaaaaagtccagtgtaatcaacctgtcagcaagtagctagctgattaccctgagtaatggtgccatatcaagtgctcggtgtttttctctgctgctggcagatgggacattcagtcgtagctgtagtaaagtcagccttggtgagtggaagtccctgttgctgaatgcataacctccattcctgccacaatggctactgtgttcatgagctcactgggcaatgacaggagtggatggagaaggaggctgagtggtgtcca

SEQ ID NO: 268908 - DNA, 537 bp, Homo sapiens
agccagctgtctcaggatgatgccatgcctcagagaacattgcaagaccagtgaattccacgaatatgagcccactgctgcacttctttatctgtgaagtgagtgccttggtcagaggcaatgctgtgtggaatatgatgacagtggacaaggtatgctgccagtccacaaatgaaagtcttggcaaaagcattgagtgcaggactggcaaattcatatctgcagaaagtgtctattttagtgaggacaaacaactgccctttccatgagaaaaaaagaaaaagtccagtgtaatcaacctgtcakcaagtagctagctgattaccctgagtaatggtgccatatcaagtgctcggtgtttttctctgctgctggcagatgggacattcagtcgtagctgtagtaaagtcagccttggtgagtggaagtccctgttgctgaatgcataacctccattcctgccacaatggctactgtgttcatgagctcactgggcaatgacaggagtggatggagaaggaggctgagtggtgtcca

SEQ ID NO: 268909 - DNA, 537 bp, Homo sapiens
agccagctgtctcaggatgatgccatgcctcagagaacattgcaagaccagtgaattccacgaatatgagcccactgctgcacttctttatctgtgaagtgagtgccttggtcagaggcaatgctgtgtggaatatgatgacagtggacaaggtatgctgccagtccacaaatgaaagtcttggcaaaagcattgagtgcaggactggcaaattcatatctgcagaaagtgtctattttagtgaggacaaacaactgccctttccatgagaaaaaaagaaaaagtccagtgtaatcaacctgtcagcaagtagctagctgattaccctgagtaatggtgccatatcaagtgctcggtgtttttctctgctgctggcagatgggacattcagtcrtagctgtagtaaagtcagccttggtgagtggaagtccctgttgctgaatgcataacctccattcctgccacaatggctactgtgttcatgagctcactgggcaatgacaggagtggatggagaaggaggctgagtggtgtcca

SEQ ID NO: 268910 - DNA, 529 bp, Homo sapiens
aaatgtgaactaacaaaccaaaggttatactgggtatgaaaaagattagctaatttaacttcctaaccagtggtgtgtarctgtagcagtgctagcaaactaatacaagaactaataataacaaaggtttattttcttacagttctgatggctagacgtccaaaatcagggtttgccaggtctgttttttcttgaagtttttatggccaccatcttatattctcatatagctttttctctgcatatgggcattcctggtgtcacttcctcttcttggaaggacactagtcataatggattagagacccacccttgaactctttaagcttaattatctctaaaggccttatcttcaaatacagtcaggcttcatatacaaattttaggggagtacaattcaattcataacactgatttttaaaacagattatttaaagtttgtgtttaaagttttaaagggtgcataatattaattggttcataagtcaactgaaaaaaatatttgtaatacataacacaggaaaaaggc

SEQ ID NO: 268911 - DNA, 549 bp, Homo sapiens
gggtcatgttatattgttctggacaagttatgtttgaaatgttttctaagtagtgtttactaggtagcggttgtatgggctgacaccttgagtacgatgctgagctggagatatagattgaaaattatcgtattgtgtgtcagaccaaccaatatgcttttcttgattgaataaaagagaagaaaactaaagataaaataattacaatgcagaatcaggaaaaggaaaaakgatctcatggactttaataacaagtatctggagagataggaggagaaccagagagagtaatgctattagaaactcatagtaggagaacttccaggtgtggatggtcaactttttgaatgttgaaaatgactgaaaagtaattcattgggctttgcaaatcagagatcactgatgactataggaagaatatatttattgaagaggtagagtcaacagcaggatttgaacacttaatgaacaaaagagagaaattaggaatagcagcacagggtgggggaagcctggaggatggtaggaggttgaagtagctcccttttc

SEQ ID NO: 268912 - DNA, 569 bp, Homo sapiens
ctaattggccatttctactcattttcttcattacctgtgatcctagatagcttccactgctctaccagtcttctgagcccatatgtcaatcagactgcatctgatttctagctctcagaatttcttatcatttctagctcatcagtggatattttttcttatagtcaactccattatgttttaattatattgaaagactttttattaggttttaggtgaggagttatataaatgggagataagtcttctcagttccccattttgttacaaattttycacacaaatattttaaaacatattagacactgatagttttctagtaggaaactattatatgtatatctatgaatgtatgaagtttatatttttcatgtttataaattcctatatcctactataggaatgaatattatctatgtgcctaactgtgtatttatgtgtttgtgcctgtgtgtgtgtgtgtgtgtgtgtgtgtgtgtgtgtgtatgagagatggaaaaaacacatttacaccttggtcatcatgtttaaactgtcatgcctggatataactattatatttaagatat

SEQ ID NO: 268913 - DNA, 594 bp, Homo sapiens
tgaacaaagaaaaagcaggcaatcatggcacctaggttcctgaccaaggcaactagaagaatggtgaggcaattcactaagtttggaaccattaagtacaattggataaattgcacaattccatgttgccatagattggcttattacctccattctagaaagaaggacattcagacttagagaattcaaaggacttgcataacatccctagttactaaatggtatgttacatctcaatcttagttctctaatgtccakgtatgtatttagtaagtatgatatttttactttccattatttggatctgaaattatcttaactatttcatttactcatttaatttcagtatggattgtttgcatttataatgggtaagcactgagaattgaagtcagcatggtccagtccctgtcctcaaggagctttcagtctcaattcctgatttgcaaagcaagtagtacctaggaaggaataaactgtctgactgatacatgccttataaccacatagctatttagtggcaaacattaagttctaatgtgctgtctaggaagcaatgttaaatttcagtctcacctattttctttttcccat

SEQ ID NO: 268914 - DNA, 435 bp, Homo sapiens
gatgatatcatggggttcccatagatacccaggatcacgaacatcagatttcattttcatgagacagaaataaattcctgcttggttcaagatacatatcataaaaggaaaaaaaaaaaaaagaagtcctgacgaagatgccatttattttctagaaaatctacctggaaataaamagttgactcaccgattcacaccatttccattgtaagtaagacgatatcactgtatttatcattaagcatttttttacttgctttatttcagaaaaatagggtttgttcatttttttctcacatgctaacagaagattatatttactgtaactatatatctgaaaccaaataggaatatatttctctcccatatgtattaggtagccaaacctatgtgtaacatcctcccaaacagcaaaccagagaatcagcaattgtc

SEQ ID NO: 268915 - DNA, 602 bp, Homo sapiens
aatataagtgaagatatattacaaatgatgttttctactttactatgtattttagagggtgagtataaaaattgatttatgattaacatcataagttctgtatcaattacaatcacatgtgtatggcataagaattaactttacaccgttactgagaggaaaataaattgttgataaaacaggtaatcactcaaaactcaggacctccaacaggtaattgatctgcagctttatattctttgttcttatgagaataattgtccagaaatgacaaacgttgccaaccattttttttcttgacaatataattgtgaaatagccaattagacttagagtttcmgatcaatattttgatagctttttgagatgaagcattcttttgatggtggtcaaaattaagggctacattaaggagaagatttttcaataagtgatttagtgctgcgtctagcacacagtgtaattaataatatgtctataacactgccagagaattaagtggaatttactaacaaatgctgctacgctttcacttctactttgataatttactttacattaatataaatgaggtaaaattaacaccagctcaaagtatagca

SEQ ID NO: 268916 - DNA, 547 bp, Homo sapiens
atccaccactgcactgaagccagtgttccctgggctgttcccagtgagggtacttgcagaccattcttacttaacactatttaccaggcagattttgcttagagactcccattgacctgatcaagattacctcagaactgctttgctatctggggctcttctgaccctatccctccagctgttattccttaagcctgcattgaacccactcttgatggctactcctatttgcttccccttcacaggcatttmtcctaatgcacacctcttagtatctgcttctcagaagcttcaaactcttacataccaacttaagtttaatgttgacctggagagctctgataaatctcatccctcagaaataagagccaaacctctaaaacatttttttgtgatttgtttcctcaagattttaagacttaaatatatcctgtttggagtcagatctgtggagatgatacataaagccattgtgagaattacacaaaatgatggtttatgtatcattccctacaatttttcttgaggagactcaaaaaggttaata

SEQ ID NO: 268917 - DNA, 558 bp, Homo sapiens
gacttaaatatatcctgtttggagtcagatctgtggagatgatacataaagccattgtgagaattacacaaaatgatggtttatgtatcattccctacaatttttcttgaggagactcaaaaaggttaataactcactccaaatcaccttgacactgagaggaagtgtcagaattaaaactcagtggacatcattggtggaaaagatccaagattttccactgaaacagaaaatcatattctggcttatgaagcattkggtaaatccctaaatgtttcattcatttttcatcaggtagtgagaggctctgtccttggtgctgaattgcaaaaaaaattacagagtattattcttcttatggagcttatagtctggtgggaaaaacagttaataaataaatgacatgacttcagctcctttattctatttaaaacaaaacaaaatgtaagtaatatctatggtttcactgactcctactaactaaatatagaaaaaatttcattaacttctgaagaattttatctgaaagagatactctcgaagtctgtggaaaacatc

SEQ ID NO: 268918 - DNA, 558 bp, Homo sapiens
gacttaaatatatcctgtttggagtcagatctgtggagatgatacataaagccattgtgagaattacacaaaatgatggtttatgtatcattccctacaatttttcttgaggagactcaaaaaggttaataactcactccaaatcaccttgacactgagaggaagtgtcagaattaaaactcagtggacatcattggtggaaaagatccaagattttccactgaaacagaaaatcatattctggcttatgaagcattgggtaaatccctaaatgtttcattcatttttcatcaggtagtgagaggctctgtccttggtgctgaattgcaaaaaaaattacagagtattattcttcttatggagcttatagtctggtgggaaaaacagttaataaataaatgacatgacttcagctcctttattctatttaaaacaaaacaaaatgtaagtaatatmtatggtttcactgactcctactaactaaatatagaaaaaatttcattaacttctgaagaattttatctgaaagagatactctcgaagtctgtggaaaacatc

SEQ ID NO: 268919 - DNA, 558 bp, Homo sapiens
gacttaaatatatcctgtttggagtcagatctgtggagatgatacataaagccattgtgagaattacacaaaatgatggtttatgtatcattccctacaatttttcttgaggagactcaaaaaggttaataactcactccaaatcaccttgacactgagaggaagtgtcagaattaaaactcagtggacatcattggtggaaaagatccaagattttccactgaaacagaaaatcatattctggcttatgaagcattgggtaaatccctaaatgtttcattcatttttcatcaggtagtgagaggctctgtccttggtgctgaattgcaaaaaaaattacagagtattattcttcttatggagcttatagtctggtgggaaaaacagttaataaataaatgacatgacttcagctcctttattctatttaaaacaaaacaaaatgtaagtaatatctayggtttcactgactcctactaactaaatatagaaaaaatttcattaacttctgaagaattttatctgaaagagatactctcgaagtctgtggaaaacatc

SEQ ID NO: 268920 - DNA, 608 bp, Homo sapiens
tccccttaacacccttgaggtaaagtggctcccactgtctgaatcaatattttctaaccggccaaatctgggtataatctgctctaagattattttgaccatattcctggtagtggctgtcagatggggagaggcttctacccagctggaaaggtgatctacgatcacaagcaaatactttactctttgtactttgggtatttctgtgaaatctacttgaatgctgtggaatggtcttagtccaggaggtcgtcctcctgtggcctgtcttctaattaactttttgttcatcctttgagaagttacacaacttccacatacttgtttagcgaggatataaatccctatacaccaataatttctaagtattgcatcacacagagccaggggtccccaattctccctttgcatmatatattcattagttctctcattaggggtttacttatcatctctcacatcaggaagtacctatttctcatcttcagtttgagtgacccctatcctaattctcctttctcctctttggtaaactgaggccttaatactatcttagggaggtctgggatcaggctaaatagtctaatttcttcctctagggaggcttg

SEQ ID NO: 268921 - DNA, 568 bp, Homo sapiens
gggaatgggatattgttttctgcaaactatttctcctggttgctttagtttaatctgtaaaggtataatttttaacttcccctgttgccttccctaacccacacaaggggattaatttttcattactcttcatctgttaggaggcccattattacttttatttgtccctcgtctattcctaatcctaaatccagtctcacacttatgtcttgatttagttagttcctgcttcaggaacatataagagtgaaacttcaatttgttctgatcacaatctaaataacatttgcttgaatatcagaacctgaaatcactccccttttactcctgaaactgtccattttttccttagagggttctgtaccsctcgatggatgaattagggagaatcgagccgccccagtatcaaccaaatatgttacttctttccccttgagtcccaccatcaattttatcaagggttcctggtgggacctacttaaaaggagcccctgacccccctaatcttcataaatagtcatcacagggattatcttctctttctttttccattctggacattctctgt

SEQ ID NO: 268922 - DNA, 568 bp, Homo sapiens
gggaatgggatattgttttctgcaaactatttctcctggttgctttagtttaatctgtaaaggtataatttttaacttcccctgttgccttccctaacccacacaaggggattaatttttcattactcttcatctgttaggaggcccattattacttttatttgtccctcgtctattcctaatcctaaatccagtctcacacttatgtcttgatttagttagttcctgcttcaggaacatataagagtgaaacttcaatttgttctgatcacaatctaaataacatttgcttgaatatcagaacctgaaatcactccccttttactcctgaaactgtccattttttccttagagggttctgtacccctcgatggatgaattagggagaatygagccgccccagtatcaaccaaatatgttacttctttccccttgagtcccaccatcaattttatcaagggttcctggtgggacctacttaaaaggagcccctgacccccctaatcttcataaatagtcatcacagggattatcttctctttctttttccattctggacattctctgt

SEQ ID NO: 268923 - DNA, 601 bp, Homo sapiens
gcatgcacatccctcccccagttcctcattggtcgagtactatgggattacaatcttcctggatgttgcctaagtttcattatcccctcgtaaggtcataccccatccccttccctgcttaagttttgatttcccaataacaaaactttcttcctttttatagcctgaccccttttccacatcctgttcatgtttcatgactttctaggtgcatgaactgtgtggtttgtcacatctgcaggctggctgccagtacttagattcatcattccttgaaaatagagcatttaaaatgttttctcacaccgtaaccaaagaaaatatctcctgaaaattattgttgttaattatagcttaaaartataaagctataaatatattcttttgttattactgaatgaaggcaagtgtattaaaccttggaaatataaaactaatgatatactcaagataaattaggaaaaggaatgggatgagtagagatatggaggtctatagaaacacaaatatattcatattacaaaaataaacacatacaaactgacaatcaatctaaacaagaaagcaaataaaggatcagagcaagatgagcaagtacaac

SEQ ID NO: 268924 - DNA, 583 bp, Homo sapiens
taataatctgatttaaaatgagtgaaacatctgaatagatagttctcaaaagcagacatacaaatggcaaacgggtatatgaaaacatactgaacaccagtgctcatcagagaaatgcaaatcaatattacaatgagataccctcttactccagttaaaattattttttatctaaaagacaggcaaaaatcaatgctggcaagcatgtagataaaggggaaccctcgtacaatgttggtaggaatgtaaactattatagccactatggagaatagtacagacagtcctcaaaacactataaatggaactaacatatgatccaacattcccactgttaggtgtatacccaaaagaaacaaaattatatgaaagagatatctgcgctctcatgtctgtcacagcactattcacaatagccaagatttggaagcarcatatgcccatcaacagatacatggataaataaaatgtggtacatatacacaatggaatgttactgagccataaaaaagaacaaaatcctataattcacaaccatattgatggaactggaggacatttagttaagtgaaataaggtagac

SEQ ID NO: 268925 - DNA, 593 bp, Homo sapiens
cgaggtagatagcaatctgaaaacttaaaacgacatagaatcctgcctacccttttgtctgtttgaccgtaaaactggaagtggttgactctttcagctatgagcattggcataccctttttgtttttagaactaaggagccatttaaatctkatatttccagatcaagtcaaggaactgtttcccttgtggtatcactagtagctgtaatataactcttgaatagaattggaggcaatctaggaaaactcaattttcactagattaacttgaattttcagttatgatgaaaattatctttggaaagaaaatgtacagatagtccaatttcgacctatttttgtgatacaatgtgccttaatagcccaatgaaaccattttcataaggctaatgatagccttaaacatgcatactttgaataaagtatattatatgttccaaataggaagagattatgctgaacaacagccaagtaatcataaataattttgaataatctaactttgaattgaattcactagttctctattcctagagaagttatctgctagctacttgttgtctgaacataaataaggaaatgaagattatt

SEQ ID NO: 268926 - DNA, 572 bp, Homo sapiens
ttcaatgtattactcaaggtgtttatcaagcctctataactctgaatgattgcattcccagctctgcatcctagtggcaggtactttatgagatcactaatcagctcctttatgctttcagctattattttccctggacttctcagaatatcttttcaggactatgtagttgaagagtccgccaagtattttagcagagtttgtagccagattttgggtcctttcccttgtgtattcattcctttatagaattttcccctctatttcctaatgttacaaagtaattcaactccaacttctgactacttatcctaataaaaytactctgtcctgattaagctctgtcacccagctcagcaaatttggggagccccatcaagggaaaggaatccaaacagataaatatggacctcatcctgtatagttctctctgttcaagtgttctaacctctctacttactacctagtctccagaactttcaaatagtagttttataatattttgtctagcattttaaataattattagtaggagggttttctgatatcagctactctgccactaactgaaa

SEQ ID NO: 268927 - DNA, 572 bp, Homo sapiens
ttcaatgtattactcaaggtgtttatcaagcctctataactctgaatgattgcattcccagctctgcatcctagtggcaggtactttatgagatcactaatcagctcctttatgctttcagctattattttccctggacttctcagaatatcttttcaggactatgtagttgaagagtccgccaagtattttagcagagtttgtagccagattttgggtcctttcccttgtgtattcattcctttatagaattttcccctctatttcctaatgttacaaagtaattcaactccaacttctgactacttatcctaataaaattactctgtcctgattaagctctgtcacccagctcagcaaatttggggagccccatcaagggraaggaatccaaacagataaatatggacctcatcctgtatagttctctctgttcaagtgttctaacctctctacttactacctagtctccagaactttcaaatagtagttttataatattttgtctagcattttaaataattattagtaggagggttttctgatatcagctactctgccactaactgaaa

SEQ ID NO: 268928 - DNA, 572 bp, Homo sapiens
ttcaatgtattactcaaggtgtttatcaagcctctataactctgaatgattgcattcccagctctgcatcctagtggcaggtactttatgagatcactaatcagctcctttatgctttcagctattattttccctggacttctcagaatatcttttcaggactatgtagttgaagagtccgccaagtattttagcagagtttgtagccagattttgggtcctttcccttgtgtattcattcctttatagaattttcccctctatttcctaatgttacaaagtaattcaactccaacttctgactacttatcctaataaaattactctgtcctgattaagctctgtcacccagctcagcaaatttggggagccccatcaagggaaaggaatccaaacagataaatatggacctcatcctgtatagttctctctgttcaagtgttctaacctctctacttactacctagtctcyagaactttcaaatagtagttttataatattttgtctagcattttaaataattattagtaggagggttttctgatatcagctactctgccactaactgaaa

SEQ ID NO: 268929 - DNA, 592 bp, Homo sapiens
cacttacttaatccttcttcctaactgaaatgtgggtgtgatggctggactccagcagctatcttatgaaaatgaggtgactctgaaatgaccctgagaatgacaagatgactgtgataatgtcactctggggatgaaagccacatactaaggatggtggaacagaaagataaaaggtaccagatttcctaatgatatgtatagaactgctgtacctgtctcagacagcaggtttatgagaaaaaataaattcctttctcattcaagactcttattttagttctctattattagaaactcaatataattttaactgatacacaagaaaaaactctttaaaaagcacaactataatagattttcaaaagatctccyaaatgtgaacagacagagttcaaacacacaaaattagttatatagtgattctgactgaaattaatttgagttgatgtacatacacttcactctgcagcaataaatgtgaatatattctcaataaatagagcttgggcagcagggattttatttatgactgtactcaaattatgaaatttatttgatattatataatttaaaaatatttgtgtatacc

SEQ ID NO: 268930 - DNA, 579 bp, Homo sapiens
ttcactttcaacaatttgttgtcattaatattaattttatccctccatcaatagctactcatctttcagtctagttagaaacctactgtggaggctttgtgggcacaaggaagtgtaacacacaatcctattcatgtactgaatccagatacacacatatataggcgaaaggtgaaataacaagagagtcacatgtactcccatagaacaatatgactaaatgagtagcagtataagtgaatgagcagtataagtaaatattatgaagtgataggagtttatcactgggctgggttttctggagaaagaaatttcagataagagctctgctatttagtacttagtgcacrcttgaagttcatggctttaacattttcagtttttattcttttcagaagactccctaaaggcccacattaagtggctttatactttcgctgatgaaagattctgtattgtgtagcacatgacgttgttgcggggagtatgacaagctgcaatgctcttagcatccatttttgtttcaacttagctttctgatttcctatgatgacactggtcaatttgggattcaagaag

SEQ ID NO: 268931 - DNA, 579 bp, Homo sapiens
ttcactttcaacaatttgttgtcattaatattaattttatccctccatcaatagctactcatctttcagtctagttagaaacctactgtggaggctttgtgggcacaaggaagtgtaacacacaatcctattcatgtactgaatccagatacacacatatataggcgaaaggtgaaataacaagagagtcacatgtactcccatagaacaatatgactaaatgagtagcagtataagtgaatgagcagtataagtaaatattatgaagtgataggagtttatcactgggctgggttttctggagaaagaaatttcagataagagctctgctatttagtacttagtgcacacttgaagttcrtggctttaacattttcagtttttattcttttcagaagactccctaaaggcccacattaagtggctttatactttcgctgatgaaagattctgtattgtgtagcacatgacgttgttgcggggagtatgacaagctgcaatgctcttagcatccatttttgtttcaacttagctttctgatttcctatgatgacactggtcaatttgggattcaagaag

SEQ ID NO: 268932 - DNA, 579 bp, Homo sapiens
ttcactttcaacaatttgttgtcattaatattaattttatccctccatcaatagctactcatctttcagtctagttagaaacctactgtggaggctttgtgggcacaaggaagtgtaacacacaatcctattcatgtactgaatccagatacacacatatataggcgaaaggtgaaataacaagagagtcacatgtactcccatagaacaatatgactaaatgagtagcagtataagtgaatgagcagtataagtaaatattatgaagtgataggagtttatcactgggctgggttttctggagaaagaaatttcagataagagctctgctatttagtacttagtgcacacttgaagttcatggctttaacattttcagtttttattcttttcagaagactccctaaaggcccacattaagtggctttatacwttcgctgatgaaagattctgtattgtgtagcacatgacgttgttgcggggagtatgacaagctgcaatgctcttagcatccatttttgtttcaacttagctttctgatttcctatgatgacactggtcaatttgggattcaagaag

SEQ ID NO: 268933 - DNA, 641 bp, Homo sapiens
ttcactttcaacaatttgttgtcattaatattaattttatccctccatcaatagctactcatctttcagtctagttagaaacctactgtggaggctttgtgggcacaaggaagtgtaacacacaatcctattcatgtactgaatccagatacacacatatataggcgaaaggtgaaataacaagagagtcacatgtactcccatagaacaatatgactaaatgagtagcagtataagtgaatgagcagtataagtaaatattatgaagtgataggagtttatcactgggctgggttttctggagaaagaaatttcagataagagctctgctatttagtacttagtgcacacttgaagttcatggctttaacattttcagtttttattcttttcagaagactccctaaaggcccacattaagtggctttatactttcgctgatgaaagattctgtattgtgtagcacatgacrttgttgcggggagtatgacaagctgcaatgctcttagcatccatttttgtttcaacttagctttctgatttcctatgatgacactggtcaatttgggattcaagaagaccttggatgaattggtcttcttgaacataaagtcttttttctgtgtctctgactgcatttt

SEQ ID NO: 268934 - DNA, 553 bp, Homo sapiens
tttttccttttattttcctcatcttacttaaattgtaagtctaaaataatatatttcaagaatgacttatatttctaggtttattgtattgtattgcatatggagacttattttcttactttggactgtctcttgttcataagccacacaatttaatgagcacagttgttattgttcttgtaagccataaagtttgtcttagggaaaaaaaataccttttattttaaaatattcttcagctgcatttccaaccaaactgcacaaaataattttaaaagktcattaaaaatgcttgtatcccaatttagcagtcaaaattaacttgtttgaattaaatttaaaacttcccaagattcaagtccaagtctgaccccaaataaatattattgtctaatttaatcctggaggtagtaatttgtaccacatttactttagaacatgttgtttacttcaatgaacattctaatgataggcaaaataattgattctaggataatggatttcccaacttaatatttcctatctgcacttaatatttcccatatgcatgagt

SEQ ID NO: 268935 - DNA, 403 bp, Homo sapiens
ttctccaggtgaaattaatctcattttcttttctgctctcatgatgtttttgtgtacctcttgcatggcattgctttgtgtttagataattctgtacctggcagtctaattccacaggttacatgttccttaaagcaagagaccttgatttgttcatctctgttccattcacaactaatagacccttgaatatttatgtagcacaaattgccaaaaggagacctcttcatagattcagggtgatttcaagacagaaattctaaaaagtgatcattctggaattatmtaatgaccaagagaacatttttctctctctcatccatcacactctcactttctagttaactaatagcagtgaagtaagaaaacctgtgaagcatggacagctagagaagagtatgtg

SEQ ID NO: 268936 - DNA, 403 bp, Homo sapiens
ttctccaggtgaaattaatctcattttcttttctgctctcatgatgtttttgtgtacctcttgcatggcattgctttgtgtttagataattctgtacctggcagtctaattccacaggttacatgttccttaaagcaagagaccttgatttgttcatctctgttccattcacaactaatagacccttgaatatttatgtagcacaaattgccaaaaggagacctcttcatagattcagggtgatttcaagacagaaattctaaaaagtgatcattctggaattatatratgaccaagagaacatttttctctctctcatccatcacactctcactttctagttaactaatagcagtgaagtaagaaaacctgtgaagcatggacagctagagaagagtatgtg

SEQ ID NO: 268937 - DNA, 627 bp, Homo sapiens
gtgaaagacattgcagttgtaagagccaaggtgataccaagacaaactaagagcaccacttggcctgagagacaggaagacaggagraggaggaggagaaggaggaagaggagaggagatggaggggaaaggaggaaagagaaggaagggaggaggttgggattagagaaagggagggaaaggaaagccctttaggaacgacaccaggtttaaatgcctgcaggacaagcagcaactaggtagacaaggatcattttcacagagatcataggaacttcaagacagtacaagaatactgcgtgcaaaagtatctcctcattgtcaatgccatgaaggtgcagtaagacacacccacttctgcggagccacacagtactgagaaaggaaatgtgagggtgatgaaaacataaaagattatttttaacctaaacaaactaaaattagttagagaaatagattgttatattagataagggttatttaacattatgacgtttaaattataaacttagatgaaaatgcttttcttctatccagaggatgagagttcaacacgatgatcatgttaagtgactaaagaattcacattttcctgatccatgtgaaggtagtctgagcaaaactggt

SEQ ID NO: 268938 - DNA, 561 bp, Homo sapiens
tgtattcaatgacaagtgaaagagagcagtacttgttttcattttatcaccaatgctgtatgttctkccatgttttaacacatcaaagcaatgcatatacaaagtcagaatttgtatgatgtaaatacaagttaattctgtaatttgcttacacattagatagtcatttcactgatatattaactcatgcaattgcatcatttttagctaagcttcataaatgcatctgtcctgtgtatttactggttaaataaaattttctgaaatctaaactaacttaggaaggcttaatttttttagtgtagatattttttaaaaaccttatagaaaatgttaacagatatctgaaataaaacactatgcaatattcattttatcagccataatctatcatgtatagttttgattttacctaacagccctttaagagaggtctccccagaagcacattatttccaacagcaagatctgcatgtaagaaaatgttgagattcggcgttctgggctatcagcgcaaaagccggagcatcacttcagggttgattgaaacatagaagtaaa

SEQ ID NO: 268939 - DNA, 561 bp, Homo sapiens
tgtattcaatgacaagtgaaagagagcagtacttgttttcattttatcaccaatgctgtatgttctgccatgttttaacacatcaaagcaatgcatatacaaagtcagaatttgtatgatgtaaatacaagttaattctgtaatttgcttacacattagatagtcatttcactgatatattaactcatgcaattgcatcatttttagctaagcttcataaatgcatctgtcctgtgtatttactggttaaataaaattttctgaaatctaaactaacttaggaaggcttmatttttttagtgtagatattttttaaaaaccttatagaaaatgttaacagatatctgaaataaaacactatgcaatattcattttatcagccataatctatcatgtatagttttgattttacctaacagccctttaagagaggtctccccagaagcacattatttccaacagcaagatctgcatgtaagaaaatgttgagattcggcgttctgggctatcagcgcaaaagccggagcatcacttcagggttgattgaaacatagaagtaaa

SEQ ID NO: 268940 - DNA, 554 bp, Homo sapiens
taattggttggtattacggatatttgttttgatggacaattatactatgtaactcagaactctttcagttggatgccaatatttatgaaaattttcagaaatgaggacaaatcttttaggatagggaatagaatggaacttaaccaatttctgggataaatatcctggcyagagataaagtgaagctaactgcaatgttagagcttacagaaggaggaagtgacctgcgagaacagagacacacctaactcatcaaggaaacttgaggggaacaatatctagacacaagaagtggtgtccttgaagaatccttgaaatcatctaggaaagccttaaacctgtgacaggctcagcaagcactaaaccagcttcccaaatgcagagggatcagaaacattattcagtgggatagatagtgaagtagacagaaaaaaacatagctccttgccttgccattttccctgtgtcaggccatagttgggggagtgggagaaatcttacctttgaatgaagatttaaaaggtgattgtcacaaaaatcataaaataaaatat

SEQ ID NO: 268941 - DNA, 554 bp, Homo sapiens
taattggttggtattacggatatttgttttgatggacaattatactatgtaactcagaactctttcagttggatgccaatatttatgaaaattttcagaaatgaggacaaatcttttaggatagggaatagaatggaacttaaccaatttctgggataaatatcctggccagagataaagtgaagctaactgcaatgttagagcttacagaaggaggaagtgacctgcgagaacagagacacayctaactcatcaaggaaacttgaggggaacaatatctagacacaagaagtggtgtccttgaagaatccttgaaatcatctaggaaagccttaaacctgtgacaggctcagcaagcactaaaccagcttcccaaatgcagagggatcagaaacattattcagtgggatagatagtgaagtagacagaaaaaaacatagctccttgccttgccattttccctgtgtcaggccatagttgggggagtgggagaaatcttacctttgaatgaagatttaaaaggtgattgtcacaaaaatcataaaataaaatat

SEQ ID NO: 268942 - DNA, 603 bp, Homo sapiens
gtccatcatgacaaaatgggatttattccaagaatggaagattggtttaacattccaaaaatcaattaatgctatttaccgttttgatcaaataaaaataactatgtgattattatgayagatatcaaagttatttgagaaaatttaacatcattttatgatagaaactatcagcaaatgagaaatagaagaaaattcctcactccagtaaagagtaactatgtacaaccaggaaacacactaaatgataaaatattgaacattttccacctaaattgggaagaactcaaggatttcaactcttaatctatttgacattgtaatagaagttctaaccataacaataaggtaaaaacaataaagtgtatattgatgagaaagaacatcactcttaattgcagataatatgattgcttcagaaatccaaaaaatttacagaactactaaaaatgatagatgaagttagcaagataataaaaaagttaagattttaaaacattttatttataccctattaagtataaattaaacataatttgtgaaaataatgtatccatcatagttttgaaaaatgcttaaaaataaatatagtaaataatttgt

SEQ ID NO: 268943 - DNA, 624 bp, Homo sapiens
ttctgggtagagggatgtgtgcagggatacattttatttccagttatgcatattgtatttgtgcaattccaagacaacagtttttctgagagaaacaaaaataccaccacattaaatatgtacattaataagacattttccaatttcraaggttaaaatatgaaacaaatgtacatcttagaatatagtttatcaagtattatacatatagatatatgtttactgaaaattattgggtaatcaaatttaatttacctttccccagaatatgtctttcttcttctccacagaatcttggaaaacttgtagtgcatgcaatgtaataatttaaacttcacagctttccaagcacctgtggaactctactgaaagctaaaacttcagatttatcaaaacctcatgctcaaagcacctaaaatgagaaacttgttttcattttccttagaatcagccctcctggataccaaatatcagagaaagggaaaaaactgcccctaaaccaccttagtaaaactgcaatctctgtcaacttgaaggaacctgtggctggcattgcagaatcttttctactgctttcattgtggcagtggtttacaaagcacccaagagtccttcaaagagcta

SEQ ID NO: 268944 - DNA, 624 bp, Homo sapiens
ttctgggtagagggatgtgtgcagggatacattttatttccagttatgcatattgtatttgtgcaattccaagacaacagtttttctgagagaaacaaaaataccaccacattaaatatgtacattaataagacattttccaatttcgaaggttaaaatatgaaacaaatgtacatcttagaatatagtttatcaagtattatacatatagatatatgtttactgaaaattattgggtaatcaaatttaatttacctttccccagaatatgtctttcttcttctccacagaatcttggaaaacttgtagtgcatgcaatgtaataatttaaacttcacagctttccaagcacctgtggaactctactgaaagctaaaacttcagatttatcaaaacctcatgctcaaagcacctaaaatgagaaacttgttttcattttccttagaatcagccctcctggataccaaatatcagagaaagggaaaaaactgcccctaaaccaccttagtaaaactgcaatctctgtcaacttgaaggaacytgtggctggcattgcagaatcttttctactgctttcattgtggcagtggtttacaaagcacccaagagtccttcaaagagcta

SEQ ID NO: 268945 - DNA, 254 bp, Homo sapiens
aacccacagaatgcacagcacaaaaagtgaaccctaatgtaaactatggactctggatgataatgatgtgtcaatgtaggtccatcattgtaaaaaatgtaccattctgatgggagatgttgatataggggatgttatgcacgtgtggaggaacttggggtatatgggaaattgctataccttcctctcaattttgctgcraacctaaaattgctctaaagaataacgtctgatcatttgttttattttttaaa

SEQ ID NO: 268946 - DNA, 254 bp, Homo sapiens
aacccacagaatgcacagcacaaaaagtgaaccctaatgtaaactatggactctggatgataatgatgtgtcaatgtaggtccatcattgtaaaaaatgtaccattctgatgggagatgttgatataggggatgttatgcacgtgtggaggaacttggggtatatgggaaattgctataccttcctctcaattttgctgcgaacctaaaattgctctaaagaataacgtctgwtcatttgttttattttttaaa

SEQ ID NO: 268947 - DNA, 554 bp, Homo sapiens
acattcaaattggaaaggaagaagtaaaaacatccttgttcacagatgacatgatcttacacctaggaaacctaaagactccactaaaaaactgttataactgataaagtaattcagtaacattgcaagatacaaaaccaaaataaattctgagttaatgctggaagagttaagactttgggggactgttgggaaagcatgattggattttgcaatgcaagaaggacatgagatttgggaggggccagagacagaatgatatggtttggatctgtgtcctcacccagatmtcatgtgcaatggttggagatggggcccggtgggaggtgattggatcatgggggcaatttctaatggtttttcaccatcctgctagtgctattctcatgatagacttctcacaagatctgattgtttaaaattgtgtagcacttctccccgccccttttcctcctgctctggccacataaaatgtgcatgcttcctttttgccttccaccatgattgtaactttcctgaggcctcccctgccgtgcttcctgtacagcctgcag

SEQ ID NO: 268948 - DNA, 635 bp, Homo sapiens
ttagtttacaatgttccactcaggttcatattattttggttatttaaaaagatgtagtgataaattcggaattccagaagacagaaaacatatcatggtctttgaaatgtatttgtcccttctattcatcatcttataaatgtaatttgaaaatcactggagtcttcttattttatgctcacaaatgccctgtgagtaaagcacagtatatgttatcatttttgatatttgcagaaatgggcactcaaaacataaaatgacacagccaaggtaacccagtttataagtggcagagtcagtacttgaawtcaggggttctgaactcaggagctttcctacaaaattattattagtttttatagcatattgagaaatgtaacaagttagattagttgacaattacagctttttatttttataaatattttaaaacacatatttgaagatattatcaatctgttttacagctgaggaagttaaagcagaaaaaaatgtctgactagcatgagatcaatatattcagtgagattagttgttagtaccctacattttttacttttaggccacagaaaataatggtgataatgtttcatacctgcaaatatgctatgtattgcagttcattataaaatgga

SEQ ID NO: 268949 - DNA, 530 bp, Homo sapiens
gataaattcctagacacatgtctaggttcctaaacaacctaacaagattgaaccattaagaaatccaaaacctgaacagatgaataacaagtaatgagatcaaagtcataataaaaagtcccccatcaaagaaaagcttgggacctgatagctgactgctgaatcttacaaacatttaaagaagaastaataccaaccctactcaaactattccaaaaaattgaggaggcaatactttcaaacttattctacaaggtcactgttactctgatactaaaaccagacaaaaacacaaggaaaacaaactatagaccaatatctctgatgcataatgatacaaaaaatcttcaacaaaataccagcaaaccaaattcaacaacacgttaaaaagaacattcatcatgaccaactggaattttacccgggatgcaaggatggttcaacatacacaaatcagtcaatatgatgcaccatatcaatgggatgaaggatgaaaaccacatggtaatttcaattgctgctgtaaaagc

SEQ ID NO: 268950 - DNA, 587 bp, Homo sapiens
tttcctatccgagtggccccagggaattgacttatcccaaatagttcagctgtgatagtaatgactcttttcttgggcagccctatcaattatttgaatcttgattgcatagtttctttttataaaaccgaccttggaattcttcaaaagtttaccatcattaggrgaaagttctaaatttctaaggaccttgagagaaaaactgataaagaaaatttgttatagtaaattggaaatatgaataaacatcctcataggagggaagaactgagcagtttggagtagtcaagcttggttacttctcctagatgagcctggtactttcttcagattctttatctctgtgtgctcatttttcaaaaggacattctaattttagccaattggaaaaataagaaaaaataaatcacttagaaaaatatataaagggtagtattttatgctttctaagttttttttctttctttttccattgcttctttcttttcctttaggggtaggtttgaagatatttattctgagaattctaatggcattaattttcagttccatctagccaagtgatttacagtaagtatttgttaata

SEQ ID NO: 268951 - DNA, 565 bp, Homo sapiens
gttccctgtaaagtggatacacacacttgatgggcatataactggattacctggaccgtatttttataatccagtattattcatggggctgcataaaaatgctacacctggacaagagtgtgcagtcacagcacatcagtgcctccattcatgaaagctctcctactccatctttcgatataggatagatttgcagtgagmatgtcttaatgctcattttagctatgtttttcctttccgaaacactacaaggcttgaaagtcatttataatgacttacgcgccttctttgcagggaagtatctgcttttaggtatagttgatgaactcaaaatgtagtatatgcgttgagtcccaaagtcctttaatagcagctcattagatgtttgttagcaaaaatcactggaagaaaacaaacatctttgtttcatagaaacatcttgaactactttactatgcttttgggtcatcaagactccaaacgtattgtgtcaaacactctttcttcaactttgaaacccatgtggatagccagggaaaagcaatctgtatgtttctaattaatt

SEQ ID NO: 268952 - DNA, 565 bp, Homo sapiens
gttccctgtaaagtggatacacacacttgatgggcatataactggattacctggaccgtatttttataatccagtattattcatggggctgcataaaaatgctacacctggacaagagtgtgcagtcacagcacatcagtgcctccattcatgaaagctctcctactccatctttcgatataggatagatttgcagtgagaatgtcttaatgctcattttagctatgtttttcctttccgaaacactacaaggcttgaaagtcatttataatgacttackcgccttctttgcagggaagtatctgcttttaggtatagttgatgaactcaaaatgtagtatatgcgttgagtcccaaagtcctttaatagcagctcattagatgtttgttagcaaaaatcactggaagaaaacaaacatctttgtttcatagaaacatcttgaactactttactatgcttttgggtcatcaagactccaaacgtattgtgtcaaacactctttcttcaactttgaaacccatgtggatagccagggaaaagcaatctgtatgtttctaattaatt

SEQ ID NO: 268953 - DNA, 565 bp, Homo sapiens
gttccctgtaaagtggatacacacacttgatgggcatataactggattacctggaccgtatttttataatccagtattattcatggggctgcataaaaatgctacacctggacaagagtgtgcagtcacagcacatcagtgcctccattcatgaaagctctcctactccatctttcgatataggatagatttgcagtgagaatgtcttaatgctcattttagctatgtttttcctttccgaaacactacaaggcttgaaagtcatttataatgacttacgcgccttctttgcagggaagtatctkcttttaggtatagttgatgaactcaaaatgtagtatatgcgttgagtcccaaagtcctttaatagcagctcattagatgtttgttagcaaaaatcactggaagaaaacaaacatctttgtttcatagaaacatcttgaactactttactatgcttttgggtcatcaagactccaaacgtattgtgtcaaacactctttcttcaactttgaaacccatgtggatagccagggaaaagcaatctgtatgtttctaattaatt

SEQ ID NO: 268954 - DNA, 565 bp, Homo sapiens
gttccctgtaaagtggatacacacacttgatgggcatataactggattacctggaccgtatttttataatccagtattattcatggggctgcataaaaatgctacacctggacaagagtgtgcagtcacagcacatcagtgcctccattcatgaaagctctcctactccatctttcgatataggatagatttgcagtgagaatgtcttaatgctcattttagctatgtttttcctttccgaaacactacaaggcttgaaagtcatttataatgacttacgcgccttctttgcagggaagtatctgcttttaggtatasttgatgaactcaaaatgtagtatatgcgttgagtcccaaagtcctttaatagcagctcattagatgtttgttagcaaaaatcactggaagaaaacaaacatctttgtttcatagaaacatcttgaactactttactatgcttttgggtcatcaagactccaaacgtattgtgtcaaacactctttcttcaactttgaaacccatgtggatagccagggaaaagcaatctgtatgtttctaattaatt

SEQ ID NO: 268955 - DNA, 621 bp, Homo sapiens
tcaaactgacaggaacacaggcctctgatagatttaattagaattttacaatgtctttgattaataacactaaattgaaatacataaaagataaggatactcttgtcaagttrttgaagacttaggatttataatcaattgtgattcattgtacattttcaaattttgctaaccactcatagccttattgctaaagaaaagacatttacattttactgaggtgcaaatgaaataaaaggaaattggctgcttgtttcagcaatttatgtttcaatatgggaaatgatatacatcattagattctaaggcacaataaatgggcaaatacaagttgttattaagcacattgctataaatattactcataaaacaaaacctttgaaatagtttttatctctagttttggcttttataactgttccttggaaataatactatattcctgtattttctaaatgtagaaggttaatctttgtcactacagagaaacaaaactttctgcaacgtaacaccatatacagataaaaagtaaggaacagaaaagaagtgtgaaatcttgaaaaggacttgtcttaggacagtttatcatttatcctgtatcaccattttctacaacttttc

SEQ ID NO: 268956 - DNA, 514 bp, Homo sapiens
aaatattactcataaaacaaaacctttgaaatagtttttatctctagttttggcttttataactgttccttggaaataatactatattcctgtattttctaaatgtagaaggttaatctttgtcactacagagaaacaaaactttctgcaacgtaacaccatatacagataaaaagtaaggaacagaaaagaagtgtgaaatcttgaaaaggacttgtcttaggacagtttatcatttatcctgtatcaccattttctacaacttttctagcatttttaacacaaattgaattctgtgtccccagtagaacactcactagtggcctggaaatgtaagayactcagattatgaagcctcaaagaaagacaggaattccctggttccattaaagttgtaggtttgctttcactgccatactctgcttatcatttcaggctagaattatctcaacgtttttccgcctggcatgatttgtttctatttctccagtctctatgaacgctaattttaaaa

SEQ ID NO: 268957 - DNA, 514 bp, Homo sapiens
aaatattactcataaaacaaaacctttgaaatagtttttatctctagttttggcttttataactgttccttggaaataatactatattcctgtattttctaaatgtagaaggttaatctttgtcactacagagaaacaaaactttctgcaacgtaacaccatatacagataaaaagtaaggaacagaaaagaagtgtgaaatcttgaaaaggacttgtcttaggacagtttatcatttatcctgtatcaccattttctacaacttttctagcatttttaacacaaattgaattctgtgtccccagtagaacactcactagtggcctggaaatgtaagatactcwgattatgaagcctcaaagaaagacaggaattccctggttccattaaagttgtaggtttgctttcactgccatactctgcttatcatttcaggctagaattatctcaacgtttttccgcctggcatgatttgtttctatttctccagtctctatgaacgctaattttaaaa

SEQ ID NO: 268958 - DNA, 539 bp, Homo sapiens
cttttgtaactcagctttgcaaggttgatgtattgcactttagacagctgataatgaaccctcctagcaattagaagtagaaataccgaggagtcaaaattgtgctgttcccagtgggtcaaaaaaaggaaacaacccatgtgaaacatttctttatgtgcttgcaaaacaaagaaaacatwtcaatttatatactggtatatttgaatttctcttgcctttaaaaaattcctacttcattttaagtaccatccgactctaaagtgtcattaaataagtatgaattctgttgcagttacacacgtttaatggccaatacaatgtcttttatgggatgcattatttagtaatcttacattaagacaataacttcaatcattatgccttcaaatagcaataagcatggtaatggctttgctgagctgcttcctggctctatcattgtgttttccctttaatattagagcactgtttttatttttatcccaagagtgtgttccatcccctacccccaattcctgttttctgagagtggaagc

SEQ ID NO: 268959 - DNA, 648 bp, Homo sapiens
aatgctctgtgtaacacagattctcccctgcacttgtagatgttgccatcccaygcaaccacaagggagctcacttagtgggtctcatggtggatgctggcctaggaagttctacacatgggtggcactatctcccgtcaacatgcatgggaggtcagacatgatctctgcctctgcagagatcctgaagggattgaaaagaacagtcaggtgctgaaaaggctgtaatcaaggaggaccttcagggtgaatggactgctccagctggtgagttcactgcttcccagctcaaggtagcagatgaatctgaaggcttgtaggtgccttctgtgcctattcagcaggtcccttctgaagactggagcactcagcctgccactgaatcctggtctgttatcctgctcaggccactgaatgataagaccaaccattgagtgggctaaagctgtgattccacaagcttgtaaagagcaagtgaagcagagaggattagaaatcatgtggcccagttgagaggtcatgaactagcagggtatagactggaataggtctgaagatgttttatttaattttcagtgtttaaaaatcgatgcaacccttttaaaatcaggacatttcagcaaagattggatttcagctttttgatgt

SEQ ID NO: 268960 - DNA, 523 bp, Homo sapiens
ggtctgttatcctgctcaggccactgaatgataagaccaaccattgagtgggctaaagctgtgattccacaagcttgtaaagagcaagtgaagcagagaggattagaaatcatgtggcccagttgagaggtcatgaactagcagggtatagactggaataggtctgaagatgttttatttaattttcagtgtttaaaaatcgatgcaacccttttaaaatcaggacatttcagcaaagattggatttcagctttttgatgtcagctaacaatgggcctgcgcccacatgaccatggtgaggggcctgctgtctttaggtggtctggcactctccaagtttccagagccctacagtccctgttgacctctcttactgatctggcccattagttgctacttatcattctgcttgcactgttggttttctcagacctgagaaactgttccttcttaactgatttctttattcatgttacctgttcagcccttatggrcattcgtgtttatggccccagctgttctt

SEQ ID NO: 268961 - DNA, 515 bp, Homo sapiens
ctatttatataagctggcataaggaaaaaatggattaactagaagaaggagagatttgtgatgagcttgagaaagaactgctagaagaaaatgtgaaacattatcttctatttcctgatggagattttgaacgctccttattcttaataaaaataatgataattgcttacatctgtacaatgccttagtacttttaaaagtgttgtcacataaaatagcttatttgagcccattttatgaaactcttttttttttttttttttttttttaraaaaggatgtggatggcaggcgatagataatcccatctaggatgaacatcagctaggggtgtggggagtaaattaaggacctcggtgtggtttcttccggctgtgtaattctatttttcatcagggtaatggccttttaaaaaagagtcataaatacactgtcaaggaacaaggctattggaatgactctggttcactcttcttggactgatttatggtatcaggaatcacctagcttattaca

SEQ ID NO: 268962 - DNA, 550 bp, Homo sapiens
gtaaattaaggacctcggtgtggtttcttccggctgtgtaattctatttttcatcagggtaatggccttttaaaaaagagtcataaatacactgtcaaggaacaaggctattggaatgactctggttcactcttcttggactgatttatggtatcaggaatcacctagcttattacaactatttttatttcagtattttcagtctgaagcataccacggtgtttagaaatagytagagagacttggataatttttgttaagccaggtctctgataagcatcaccacgcctgtagaagtcatttgacagattttgcttctctccatcgttcaacttagtttggatttgtaaggtgaatgatgtcaggatgagtatccaacctgcaaaggtagtgtgaggactggcctcaaatttcggaagcctgtgtgctgagcttgccatttatccgttgtgtgacttttgctcatctacaaaacaggattacatcagcagaacctagcctctcttgtgtgcacatgggagggcacatggacccaaatggcttttattcc

SEQ ID NO: 268963 - DNA, 600 bp, Homo sapiens
cgttacttaataatgtggattaagtcttcctgttaggttatatggtcaatattttctaaaaatcaaatgagctacatcaatagctctaagattttgtgaaactatgtttaaagcatgtaagcaaattataattgtgtcagaaattttatcttttgcaaataaacttataagtgtataattgataaaatatatatatcaatctctaaattataattatgataatcccatggttcaggagaaacttaagaaaaaatattttgttgtcaacagtgttcaagtatatggtctttcaagggtatatgcaagcaagagtgtaaaacctttgttcttggaaggtcacttttgtggctggcaactgagaaacctctgaggaatcaagaaccacataagaataactttgccaaaatttggcaagttgaaggatttacctactaactctcatccctcataggttgagggttgctactgagggtgttaaatgttcaacaatattgkgttgccccgtgcttggactgaacaatctccaatgtcactagagaaaggcttcaggcagaccaaagagtcagaggtggaatctactagcatgtagggaactgtaca

SEQ ID NO: 268964 - DNA, 431 bp, Homo sapiens
ggtgggggtggctctcagcaggatggatggggagctggaagacagattgagtgggaagatgatcttcccctggagtttggctgtccagtggctgaactcccctctgaccgtcccctgccaaactcctcttggcattcagatgttccttcccttctctctttctcygccatgccattctgctggtgtctgcttgtcttcttgtgttttctcctcctctcctcatctgtttgtctgcctctgcaccctggggtttgggagttatatgggtataggatagggaggtgtgaggggccaaaaggcaatgtttttggtgcaaaaacagaaatgcctgttcccacttagggctgtgggtctccaggcttgggggtggggcctttgccagagaaccgccctcctctacccaacatttccctgtctgtatcaaaaatgtt

SEQ ID NO: 268965 - DNA, 546 bp, Homo sapiens
aaactctgaaatctagaggaaagcaaggcaagaagtggaaggagcagacaggcatcaagcccaccagtatgcatgggctagttcaaagaaacctcagacagtgatgtgccgtctgtattgggatgtgtccacacatccacccagccacctatggccacctatgtgaggaaagtcctatttgtcattaacctttttcctacaatgccctaccctttttgttttttttttttttttttttttgaaaaacttgtcttctaacacgactgagttcacacctcttctctgatgattccctttcccattcttccttagcattttgagctcacttctgtagcacctaaaacattgcataatggtcttttgcagccttttccaatggttaaactgtatacttataattagtagggactgtattttattcatatttctatccttagcacttatttcttaraaagtgttcagtaagtgtatgtgtggagtgagtaaataagtgaatcctggaatccatgaagggccccaaagtgactgttattttttatgtaattc

SEQ ID NO: 268966 - DNA, 572 bp, Homo sapiens
gggtcatcacaagatgtttctgttgaaaatttcttttgttgtaaaayatccctgggaccattgggcgagaactgaaaataaaggtaatatgatgagatcagcactgctgtggcactgacatataaacagtcaaattagctctcttgtcaggaaaaaatgaaagcctcagccacaaaacattattccagcagcagcctgaagtgtcctttgagctattaaggtcattaataatgaaatgtccaagcagtgccttttgggttgttaaataatgtgaggattacttgatttgataaaacctatttcctgtggatggttgtttactgaattaaacgtggtttgtttggtagtattcctttttataattaaaataattcacattgccaacacatatttaagggattcaatttgacattctttgagctaattaacagagaggaattgcttcatagactgaaaatagagattctgttttttgtttctaaacttttgtgtctttttaaaaggaacagtctgctggtttgggtcagcatgttctccttatttttttcccccaagaggaaacattaatcaga

SEQ ID NO: 268967 - DNA, 571 bp, Homo sapiens
agttttgttaagaatgagaaataatgacataagacccaacaaacagggagatttatctattttgttcatttatgcattcaaaaaacacgtggaaaatatttactgtttatatgaaatgaatgattgaatgaatgaatgaatgattaccatacagtgttggaattgactgttagttatarattttaaaattatggtggtacaatatacttgattgtgtgatttatttcagtaggtcttagtcacatatcagaaggtaggtctggaagaagcagagagctgggattttgtcagacagaaaagatgaaaatagaaagggacaagggtgtgttagatattatttaagtgctggactgtgaagtctaacacggcaaaggaagaatgcagatgagttgctcgtggacaggaccagagtttctggagaactggcatttggtgggcatgtattgaaaggagtagagattgagatcaaagggtgagactctagactttaaaattcagagcccctcctgatgatatggcttgtagttgagcttgacctgaaatgatatttttaaattgtatcttctgtcac

SEQ ID NO: 268968 - DNA, 611 bp, Homo sapiens
ccttctccacattacaaggggcttttccaatcatgattctttctatgctaggccaccaaatatatatgagcctctttgtgcctcagtttctccttctgaaaaaggggaaagcaatattcatttcaaagagttgtaaagtttaaatgggataataaataaaaaattataaatttgcctacaactgaggtataagatataccaaattatttaatttttaaaaattcaatggaatctgcctctaagttcccatttaatatgatgccaagttactaaatatgaaccactaattgagactcatttctctgtttggcaatgtaaacactgtcagatacttagaaatatcctttggcctttagtccatccaggttgcaaatgagatggtcactgtatgaggcgacatgatccattcaaaggcaggtggctccactgcctctctgcgaggtagggtgctgtcatmctttgctgcagagctcaagtctgtggtgcacgaagtttcatttcctcagcaaacacattggcccactcatcaaaagtcctgttgcctcctggggtacttctaacccaggctctgacattagcacacacatcaccacttatcttttctcaagacg

SEQ ID NO: 268969 - DNA, 562 bp, Homo sapiens
aatatgaaccactaattgagactcatttctctgtttggcaatgtaaacactgtcagatacttagaaatatcctttggcctttagtccatccaggttgcaaatgagatggtcactgtatgaggcgacatgatccattcaaaggcaggtggctccactgcctctctgcgaggtagggtgctgtcatcctttgctgcagagctcaagtctgtggtgcacgaagtttcayttcctcagcaaacacattggcccactcatcaaaagtcctgttgcctcctggggtacttctaacccaggctctgacattagcacacacatcaccacttatcttttctcaagacggcagagactgctatccttgggtgaatccctcactttcaacacagtaacacccctcccaccccacactccatcccctccctctcaggaacatgtggctacattcccctcccacacaaaaatccagataaacatatattaaagatacttaacttttgtattggtccatgcaaatataatacctttaacaaactctgagaccagaagcctagaatttccaggagga

SEQ ID NO: 268970 - DNA, 551 bp, Homo sapiens
tgaaaggtcttgggcaattgtttaaccaccrtagacctcagtttccccacctatcaagtggggataacgatataaatgtcagggattattacaacagaaaattttgctaggtgggcgtctggaataacaattcttgatattttcagagtgcttggatagtgcacaaataagtccacttctgtaataactgtgatagcagtttactaaaatgctcatgcgtctgttgccttatgtcattcaaccctcacagcagtcctgggggaaccccattttccctgcatcatcctctcatgctgttttgcacactgccagcccgggctgtctgtttctgcttcacccacttttctttgtcaaggccctgcctgtccttgaaggctccgctcagctcccacctcctccctggtcttcctgcctgtgtctctccagattagtttcgtttgcatccctgctgcagcaccgtctcacagtctctctctccgctttctcacatatccccactgcaggccaggctccccctgctagacagagagctccctgaagacaggggccaa

SEQ ID NO: 268971 - DNA, 594 bp, Homo sapiens
cccccacccccaccttggcagcagccctatcagatcagcttcaatagttttgtatctgcctctctagactgggcactttcaggccagggaccatgcctgcttcatctctctttccctctctccctcccctcctctcctctctctcttccctgcctcttgcctccttccgtacttccacaaacatttactaaatgcctactatgtgccagkccatagggatcactagcatagggctggcacatggtaggaggcctactttctcaatgaggagttttaaaatagctcatacaagatcaaattctaacaaccgcatttacatgacatgaaaatgttttcctatttttaacttagcaccttttttggccctccaaatgataacatctctttaaggtttctgagataactttacatacaaggcatttgattctcacaacaatggtgtcagccaggcagacagaaagccctctcctcaccttccagaagcgaaaacgcggtgcagaaagctgaagtaagttgcccaaagtcacatagtgagttcgggcaaagtcaggaccttaatggaggagctctttcctctctatagtatccctcctg

SEQ ID NO: 268972 - DNA, 568 bp, Homo sapiens
gaggctatcttatctccccgacttgactgatcttgtagagacacgttgaattttatagccactgtatatgtcacaatgtgtaaccttgtgttttgttctcaatgaactggtaatgccagtgttagtggatttgtacacctacttccaaacatagcaatatccatagaatattgttacttataatattttgttctcccttttcctaacacttctggaaatttgcaacttcacttttatccaaaattatatggttaatctttgatataatacaatactaaaataacagctaatatatgaagttggaaaccctatttttttccttgcacttctaatttcctatgagtagattctggctgtgtgatgatggttgaacacgtaaaaaggagaaattattttggtctttcttgatgttatggaactccttgaaacataggttacaattaatttctgagagattctattccccactggcataaaatccattaccttccttactccaygccagatgcctcagtggctctcagactgtcttcttcttgctgcaaaactggcctagggacaggcactc

SEQ ID NO: 268973 - DNA, 490 bp, Homo sapiens
cactgcctttgacaagaattatgtacatggaactgatgatgatgaagtcacagaatctcagcgcctaaaggacaccccttgtttttttaagaaagcatgcttacattttgttatatacatagactgcatagtggtgaagttaggactttaaggttatccatcacccatataacataccttgtattcgttaagtaatttctcatcatccaccctcctcccaccagctcaccctcttgagtctccaatgtccattattctacactctacatccatatgtacacattatttagctcctacttataagtgagaacatgcagtatttgtctgtctgtttccgagtagtttcacttaagataatggcctccagttccatccaccttgctgcaaatgacatgacttyattcttttatggctgaatagtattccactgtgtatatatatataccattttctttaaccagtcctctattgatggacacttaggttgatt

SEQ ID NO: 268974 - DNA, 558 bp, Homo sapiens
ggctaacttatacaatataaacaacccatgctgtatcctgtcctgaaaacatggccatgcccaatcagttgttttctctttggaattttaaataggtaacatggaggaaataagatagcaggagccactagagttaaaaaaaaaaaaaaaaggtatacaaaaaagtcatgaattagaatcaagtttgggatatattggggtaggaggacagagtatgggtacaaagtcagaattatgagagagcaagacaagcaaatgttatgaggaatccaaaaccttgacactaarggcaagtagctctgatacagggaatagacataaaaagattgcaacccaaatattctgactgaaacaactcttttgcctactataaatcccctgaggaccctcatgtcttagtcctcattgtaatcctggaactaaatattattcaaatgaatcaaataaaaattgattagcattcattaattaaatcagtgcacttgcttttcatctcatgctccagtggaatatcttttcattgacttttgttgccatttgatttgtatgttgttagtc

SEQ ID NO: 268975 - DNA, 589 bp, Homo sapiens
tccatagcaactgacatggtacttttcctgtgctcactgcctgggaaatatttgtgaaatagatgaaataatcatgctgtcttaaaatagtgactttagtctttccttttaaaagaaattatgtrctaagtattaaaaatacaagtcatactgacctacatataaagaagttagttttttttaaaaaaaccacccagcatcacatcacctaaaaataagcattgccaggctttggtgaagatcaattcagttaccactctattatacatagaaacagaaaggatagccgggcgcagtggctcacgcctgtaatcccaggactttgggagcccgaggcaggcagatcatgaggtcaggagatcgagaccatcctggctaacaaggtgaaaccccacctctactaaaaatacaaaaaaattagccaggcgtagtggtaggcacctgtagtcccagctactcagcaggctgaggcaggagaatggcatgaacccgggaggtagagcttgcagtgagtctagatcatgccactgcactccaacctgggcgacagagcgagactccatctcaaaaagaaaaagaaaggagagtt

SEQ ID NO: 268976 - DNA, 589 bp, Homo sapiens
tccatagcaactgacatggtacttttcctgtgctcactgcctgggaaatatttgtgaaatagatgaaataatcatgctgtcttaaaatagtgactttagtctttccttttaaaagaaattatgtactaagtattaaaaatacaagtcatactgacctacatataaagaagttagttttttttaaaaaaaccacccagcatcacatcacctaaaaataagcattgccaggctttggtgaagatcaattcagttaccactctattatacatagaaacagaaaggatagccgggcgcagtggctcacgcctgtaatcycaggactttgggagcccgaggcaggcagatcatgaggtcaggagatcgagaccatcctggctaacaaggtgaaaccccacctctactaaaaatacaaaaaaattagccaggcgtagtggtaggcacctgtagtcccagctactcagcaggctgaggcaggagaatggcatgaacccgggaggtagagcttgcagtgagtctagatcatgccactgcactccaacctgggcgacagagcgagactccatctcaaaaagaaaaagaaaggagagtt

SEQ ID NO: 268977 - DNA, 593 bp, Homo sapiens
tttagttcttcaagtcatagaagacttgggcctgggcatcctgcaatggccgacagtgagcagcccacctgagccactgaacctgcttcctttcaccctctttccctttccttgtgatggaaagagccaatcctggtagccagattctggctccatcacccacaagctttgtgatcttgtataacctcactctttgagactgctcactcaaaagaaaatgagaggccaggygtggtggctcactcctgtaatcccagcactttgggaggctgaggagggtggatcacttgaggccaggagttcgagaccagctggccaacatggtgaaaccctgtttctaacaaaaatgcaaaacaatagccaggtgtggtggtgtatgcctgtagtcccagctactcaggaggctgaggtaggagcattgcttgaacccaggaggcaaaggtggaggttgcagtgagatgagttcgtaccactacactcgtgggtggcacagcaagattgcatctcaaaatgaataaataaataaataaaaataaataaaataaataaataagaaaatgggaatagtaactagatgtcttacgccaagatta

SEQ ID NO: 268978 - DNA, 593 bp, Homo sapiens
tttagttcttcaagtcatagaagacttgggcctgggcatcctgcaatggccgacagtgagcagcccacctgagccactgaacctgcttcctttcaccctctttccctttccttgtgatggaaagagccaatcctggtagccagattctggctccatcacccacaagctttgtgatcttgtataacctcactctttgagactgctcactcaaaagaaaatgagaggccaggtgtggtggctcactcctgtaatcccagcactttgggaggctgaggagggtggatcacttgaggccaggagttcgagaccagctggccaacatggtgaaaccctgtttctaacaaaaatgcaaaacaatagccrggtgtggtggtgtatgcctgtagtcccagctactcaggaggctgaggtaggagcattgcttgaacccaggaggcaaaggtggaggttgcagtgagatgagttcgtaccactacactcgtgggtggcacagcaagattgcatctcaaaatgaataaataaataaataaaaataaataaaataaataaataagaaaatgggaatagtaactagatgtcttacgccaagatta

SEQ ID NO: 268979 - DNA, 584 bp, Homo sapiens
gtgagcaggtgaaagatgattttatttagcagcagctctcatcaacagctttctcacactgtccacctttatctcagctgtctgctctggctctgtggctcctgctgccccccacacctgcagctgcatggctggctctcccctgccttcagggtcagcagcttaactctttctctgggcacaagcaagcagagctatgccctggctccctcctgtctgtccgcaggatggacagctttggctctctctctctttctctggacgccagcgtgcccaccatgttaagctgagctgagccccgagatcccctgtatagcgttagccggacggttacaccttttacggacaacagtggcttaragccaggtatgaacttacacaaacaggttatataacaagtggaggtgtgtgcttgtgcaccaaactcgctgagttatgcaggcctggatgtctgcctcagcctattccttgaccaaagcacatccatgtaccttacaatgatcaaatgtcacctgggtgcaaagtcacccccagctgagaaccactggcctagggtgttggttttggagcggtcagaggagttg

SEQ ID NO: 268980 - DNA, 483 bp, Homo sapiens
tttctgtttggaagatctgtacagtcctgtaaatggggtgttgacatctccagcttctattttattggggtctctctctctctctttagctctaataatatttgctttacatatctgggtgccccagcattgggtgcatatatatttacaattgttatatcctcttgtggaattaactcctttatcattatataatgaccttctttaactctttttagagtttttgtggtgaaactgattttgtctgatacacatatagctactcctggtcttctttgtttccattggcatggaatatcattttccattgttgtattttcagtctatttgtatctttttaggtgaagtgcattgtaggcaayggatcattgggtcttgttttttaatccattcagccactctatttcttttaattacaaaatttagtccatttacattcaatcttattattgctaaataaggacttactcttgctattttgtt

SEQ ID NO: 268981 - DNA, 656 bp, Homo sapiens
aaaaagtctgaaagagtacaaatagacaatctaagatcacacctcaaggaactacagaaacaagaacaagtcaaacccaaacccagcagaagaaagaaataaccaagatcagaacaaaattaaatgaaattgaaacaaataaatagaaaagataaataaaacaaaaaactgtttctttgaaaagataagtaaaattgatagactattagtgagattaaccaagaagagagaagatcctaataagcgcaaataaaaatgaaatgagagatattacaactggtascacaaaaatacaaaagatcattcaaggctactgtgaacatctttatgcacaaaaactagaaaacctagaggagttggataaattcctggaaatatacaaccctcctagattaaaccaggagaaaatggaaacactgaacagaacagtaacaacagtgagattaaaatagtaataaaaaatctgccaacaaaaaaagtccgggaccagatggatgcacagctgaattatatcagatattcaaataagaattggtaccaatctgattgacactattccaaaagatagagaaagagaaaatcttccctaaattattctatgaagccagtgtcaccctaataccaaaactaggaaaggacataacaaaaaaagaaga

SEQ ID NO: 268982 - DNA, 482 bp, Homo sapiens
tctcctatctctttcattaccactttatggccaataaatcttagatttgcctttttgaggctattttctaaatcttgtacgtgtgcttcattttttaaaattttttcttttgtctccacagactgtatattcaaatggcccrtctttaaactcactaattttgatgcattcttaagtatatgctttttgtttttcagctgtagaatttctgctttattttctttatttttaaaattaaaaaaatatttattcatttttgagagacaaagtctcactccatcacccaggctgtagtgcagtggcatgatcatggctcatggcaggcttgacctcccaggctcaggtgatcctcccacctcagcctcctgagtagctgggactactattctgtgttctctgtgctgtcttgaatttctttgagttttctcaaaacagctattttgaattctctatctgctttctccaggattgcttccttatgc

SEQ ID NO: 268983 - DNA, 556 bp, Homo sapiens
tggtccttgcaaacaacaggagggggtatcttttaagactcaccacacctataactgatgctccactcctgactaaagcctacattatttcctaaagaggaccaacatctatggataatattgttagcaaaygagatctgcaagggcctatttagaattcttttaaaaaacagatccatgcttgattcaacctccataagaaaaagtagttcctgagaaaaatgtgaaggagaaatttttgctaagtcatgtctctaccatatgattaatcccacagagaaaaaaggaagtccaacagaggaactgggccagttcattctacccactggatgcctaaactctgaacctagggaagaagtaaggtctctgcctcatttagtccttccattttgcggtgtgagcaacccaattgagtcataactctacatgttcattcattcaacatccaacaaaaatgcatggctttatctacgcatgtattcattcacacatttagcaattggtaattcatttaggaagcatttgccaaatacctacacttcaagcattctgctaa

SEQ ID NO: 268984 - DNA, 556 bp, Homo sapiens
tggtccttgcaaacaacaggagggggtatcttttaagactcaccacacctataactgatgctccactcctgactaaagcctacattatttcctaaagaggaccaacatctatggataatattgttagcaaatgagatctgcaaggrcctatttagaattcttttaaaaaacagatccatgcttgattcaacctccataagaaaaagtagttcctgagaaaaatgtgaaggagaaatttttgctaagtcatgtctctaccatatgattaatcccacagagaaaaaaggaagtccaacagaggaactgggccagttcattctacccactggatgcctaaactctgaacctagggaagaagtaaggtctctgcctcatttagtccttccattttgcggtgtgagcaacccaattgagtcataactctacatgttcattcattcaacatccaacaaaaatgcatggctttatctacgcatgtattcattcacacatttagcaattggtaattcatttaggaagcatttgccaaatacctacacttcaagcattctgctaa

SEQ ID NO: 268985 - DNA, 558 bp, Homo sapiens
ttgcactcacagcccattggccatcaccagttggtaactgtgaaggaacaggagggtgagtaccatagttctgccatactctgcaagcctcaatttcctctgtaaaataggaataatcttacttaaaagtgtagctgtggctgggcgcggtggcttacgcctgtaatcccagcactttgggaggccaaggtgggcagatcacctgaggtcaggagtttgagaccagcctgaccaacatcgtgaaacctcgtctatactaaaaatacaaaaattagctgggtgtggtggtgggtgcctgtaatcctagctactagggaggctgaggcacaagaattgcttgaaccctggaggcaggggttgcagtgagccgagattgtgccactgcaytccagcctgggcgacaaagtgagattttgtctcaaaaaaaaaagtgttgctgtgagggttaaatgagtaccatataaaagaagcatttaagtctctgggaagcaacctgtttaggtgaaggtaggtatcttaccaccttctcccatcccgagggtcattctcaactctctt

SEQ ID NO: 268986 - DNA, 558 bp, Homo sapiens
ttgcactcacagcccattggccatcaccagttggtaactgtgaaggaacaggagggtgagtaccatagttctgccatactctgcaagcctcaatttcctctgtaaaataggaataatcttacttaaaagtgtagctgtggctgggcgcggtggcttacgcctgtaatcccagcactttgggaggccaaggtgggcagatcacctgaggtcaggagtttgagaccagcctgaccaacatcgtgaaacctcgtctatactaaaaatacaaaaattagctgggtgtggtggtgggtgcctgtaatcctagctactagggaggctgaggcacaagaattgcttgaaccctggaggcaggggttgcagtgagccgagattgtgccactgcattccagcctgggcgacaaagtgagattttgtctcaaaaaaaaaagtgttgctgtgagggttaaatgagtaccatataaaagaagcatttaagtctctgggaagcaacctgtttaggtgwaggtaggtatcttaccaccttctcccatcccgagggtcattctcaactctctt

SEQ ID NO: 268987 - DNA, 622 bp, Homo sapiens
ttgtggcattgttggttttggtggcagtcgtaccagggctgttgtttttagtagtgatggcgatgctgtgtcatttaaccttgcagaagtttaaattctaccagtatttcctgttayagtttctgcctttggtgtcatgtgaaaaaaaaagaccattactatagcaaagctatgtctttaataaatgtattttgttctaattatcttatgattatacatacagatacacacagattttaatcttaatttatctgaaattaatctgatacaaaatgtgtactagtgtcaaaggatcataagaacatcatgaactatcttagattgaaagacaaagctgaatttattgcttacagtcagggagagctatgctgctaagtcagtgtccccagcaggagggcagcagatcttacagagggtggtggggaagtgtgtaggtcagtggctggaggatttctaggcatgtaagtattctggatctggagaaaagaggttatgtggaactgctgttgaaggactgacattcagaggtgtgtttcttagagtgggtcaattcctgataaagtgtttttccacaataagagatggtcactgacttgttggcttgtaaaaacaggttcactaa

SEQ ID NO: 268988 - DNA, 556 bp, Homo sapiens
tggtccttgcaaacaacaggagggggtatcttttaagactcaccacacctataactgatgctccactcctgactaaagcctacattatttcctaaagaggaccaacatctatggataatattgttagcaaatgagatctgcaagggcctatttagaattcttttaaaaaacagatccatgcttgattcaacctccataagaaaaagtagttcctgagaaaaatgtgaaggagaaatttttgctaagtcatgtctctaccatatgattaatcccacagagaaaaaaggaagtccaacagaggaactgggccagttcattctacccactggatgcctaaactctgaacctagggaagaagtaaggtctctgcctcatttagtccttccattttgcggtgtgagcaacccaattgagtcataactctacatgttcattcattcaacatccaacaaaaatgcatggctttatctacgcatgtattcattcacacatttagcaaytggtaattcatttaggaagcatttgccaaatacctacacttcaagcattctgctaa

SEQ ID NO: 268989 - DNA, 596 bp, Homo sapiens
atgggtagccatgtggtgctagcacagtcccctggttttcattgtcagctacacctgctgaagacggggagatttgatagacatggagatggaaatcttctctgtcaggtgcccaccaacactggcgaaacaagtggtctttctgcatccttgatctgttctgtcttgaaaatttggcactgagacttcggagtaactatgaccttttaaagtaactcttgctttttcttctggagtagattaaaaaaaaattcwattctggctatgctggtatgcaatattatggactcaaaagttacataaattacctttaaaaatcattctaacaccattggtcttcacaaaagtttagtgggtaggtcgaggtaatgtcaagtgcttctaaagaatatggaaagtagtttatccactgagagtgaaataagcaagaagaaacacagacaggaagatactagtcatctgctgaagtgccagagagattttgtaaaacatgaagctaagcagatttggaaatacccaggtttaagtaaaatggcttgagcaaaagcctacagaagcaagaagactagaaaatgcaacttgaatcccaatcattt

SEQ ID NO: 268990 - DNA, 542 bp, Homo sapiens
ggttctttgatgggcaaacttggatctccagttggcacatttatgtctattgatggaatggattgtagattatcctgttatgtcttgatctactccatgataaagaaaatctacttaattacatccctcttgctccatggtcatctggcaacttcttgatcaaaataackgaatccccatgtaaattttctaccagtggtgagaatgcaatggtaagctgacataaatttttggttggcctgggacttccactaagttttctatgccttagtctccgtgtttttctttttatcatattcagtggctaattattggaagtttccacatctttagagttaataacagtatgcatgagaattaattaattaatatgtgtaaagtacttagagcagtactagaaatacacttcaattctaattacatgttaaaattttctcagtgttattgtagattatcgtgctagcaagaagttgagttagatatgagctagttctccagcttgatcatctttgagtacagtgaaaaagccaaggacataggaa

SEQ ID NO: 268991 - DNA, 587 bp, Homo sapiens
agattatcgtgctagcaagaagttgagttagatatgagctagttctccagcttgatcatctttgagtacagtgaaaaagccaaggacataggaagttgcggacctgaggtaataatctttgcaaattacttctactttgtgaaacctgagccaagcagtctccattctccttcttatacctgcttgtcatctacatctttccaaaagagtttggagtttggaatttggaggatgccattttattttatttaaaacaggtagggagtttcattctttctacagacagacgatatacaaagcatgcatgacacttataattttgcatttcaaatgagataaaaatgaattgaaggggagggtcaagacctacagagcaggaatcagcaaagtgtttctgtaaagagccagtactaaatrttttcagctttttgagccgtacaattttcatcacaactactcaacaccaaggtgtagcatgacagcaaccacagctaacatgtaaactaatgagcttgcacgtttcaataaaacttgattacataagcaggttgcaatatgtatttgactcattggctatagtgtgttgg

SEQ ID NO: 268992 - DNA, 617 bp, Homo sapiens
agattatcgtgctagcaagaagttgagttagatatgagctagttctccagcttgatcatctttgagtacagtgaaaaagccaaggacataggaagttgcggacctgaggtaataatctttgcaaattacttctactttgtgaaacctgagccaagcagtctccattctccttcttatacctgcttgtcatctacatctttccaaaagagtttggagtttggaatttggaggatgccattttattttatttaaaacaggtagggagtttcattctttctacagacagacgatatacaaagcatgcatgacacttataattttgcatttcaaatgagataaaaatgaattgaaggggagggtcaagacctacagagcaggaatcagcaaagtgtttctgtaaagagccagtactaaatgttttcagctttttgagccgtacaattttcatcacaactactcaacaccaaggtgtagcatgacagcaaccacagctaamatgtaaactaatgagcttgcacgtttcaataaaacttgattacataagcaggttgcaatatgtatttgactcattggctatagtgtgttggcctctgctattgattaaagtatactgattc

SEQ ID NO: 268993 - DNA, 592 bp, Homo sapiens
tggccacccctgccttagataaaggtagtctattgtgactcagtaaatatgtttatgttcctaaaatcaaacatgctttattaatatacctgccaaaagcagacctgtaagagcaaattcatttggaaaaataatgttttcattttcctagtgttaatgaatgcctttattttttaaacttttctttctagcgcctccaccctctcagtttacctctmgtttcagacttagtaaaatagtttgttactttccagtttaggatttatgcctcttgaaggctggggaagaaaattcctaatacctggagtccaactctgtagtttttaccaagcataaggtcaatgctattttctaaaaaaaaaaaaaaaaaaacaaaacaacaaaaaacacacacacacacaaccaagaagaaaaagaaggaaaagaagaacaagacaaacacaacaagcaattgatagaggcaaatttagaaagttacactgccaataaattacctgatagcctggacagtgaattaccaatgatttgcgctgccagtgctttattccctgatctgcactgtcatagcacacgacagtgcaagtcaggttca

SEQ ID NO: 268994 - DNA, 592 bp, Homo sapiens
tggccacccctgccttagataaaggtagtctattgtgactcagtaaatatgtttatgttcctaaaatcaaacatgctttattaatatacctgccaaaagcagacctgtaagagcaaattcatttggaaaaataatgttttcattttcctagtgttaatgaatgcctttattttttaaacttttctttctagcgcctccaccctctcagtttacctctagtttcagacttagtaaaatagtttgttactttccagtttaggatttatgcctcttgaaggctggggaagaaaattcctaatacctggagtccaactctgtagtttttaccaagcataaggtcaatgctattttctaaaaaaaaaaaaaaaaaaacaaaacaacaaaaaamacacacacacacaaccaagaagaaaaagaaggaaaagaagaacaagacaaacacaacaagcaattgatagaggcaaatttagaaagttacactgccaataaattacctgatagcctggacagtgaattaccaatgatttgcgctgccagtgctttattccctgatctgcactgtcatagcacacgacagtgcaagtcaggttca

SEQ ID NO: 268995 - DNA, 592 bp, Homo sapiens
tggccacccctgccttagataaaggtagtctattgtgactcagtaaatatgtttatgttcctaaaatcaaacatgctttattaatatacctgccaaaagcagacctgtaagagcaaattcatttggaaaaataatgttttcattttcctagtgttaatgaatgcctttattttttaaacttttctttctagcgcctccaccctctcagtttacctctagtttcagacttagtaaaatagtttgttactttccagtttaggatttatgcctcttgaaggctggggaagaaaattcctaatacctggagtccaactctgtagtttttaccaagcataaggtcaatgctattttctaaaaaaaaaaaaaaaaaaacaaaacaacaaaaaacacacacacacacaaccaagaagaaaaagaaggaaaagaagaacaagacaaacacaacaagcaattgatagargcaaatttagaaagttacactgccaataaattacctgatagcctggacagtgaattaccaatgatttgcgctgccagtgctttattccctgatctgcactgtcatagcacacgacagtgcaagtcaggttca

SEQ ID NO: 268996 - DNA, 592 bp, Homo sapiens
tggccacccctgccttagataaaggtagtctattgtgactcagtaaatatgtttatgttcctaaaatcaaacatgctttattaatatacctgccaaaagcagacctgtaagagcaaattcatttggaaaaataatgttttcattttcctagtgttaatgaatgcctttattttttaaacttttctttctagcgcctccaccctctcagtttacctctagtttcagacttagtaaaatagtttgttactttccagtttaggatttatgcctcttgaaggctggggaagaaaattcctaatacctggagtccaactctgtagtttttaccaagcataaggtcaatgctattttctaaaaaaaaaaaaaaaaaaacaaaacaacaaaaaacacacacacacacaaccaagaagaaaaagaaggaaaagaagaacaagacaaacacaacaagcaattgatagaggcaaatttagaaagttacactgccaataaattacctgatagcctggacagtgaattaccaatgakttgcgctgccagtgctttattccctgatctgcactgtcatagcacacgacagtgcaagtcaggttca

SEQ ID NO: 268997 - DNA, 579 bp, Homo sapiens
gtggggttagaggagttttttgtaaaatctggggaaaataaaatgctagcaactttgcagtttgatactttagggmaagcatttgaaaaacatgcacacctgtgaactctgaagcattccacaccacacataatgtttgattaatcaccaaaatgattacactaagtggcatccacagtaatttaaacagatatataaatcgtttgtaattacaggatattgggctctacaattcattgcttagcaaagaggtatttgttgtataattactgcatctttgtgagatatttgctgtgcatttatggtgtagtttatactgagcttgcaggccactatctttggttccctcttgtctaaactcaagcagtcttcaataaagggtaaagccacaattaccttggcaaataaatactctatagtacttgggaagatcatgaatgtggagacatttacaataacaatattcaaaagcaaatatagttaacactggatttttccacaccattgaaaggtagcattggtgtggctactaatacagcttaagaactacgtgcagtataactcaagtcatggcccaca

SEQ ID NO: 268998 - DNA, 579 bp, Homo sapiens
gtggggttagaggagttttttgtaaaatctggggaaaataaaatgctagcaactttgcagtttgatactttagggaaagcatttgaaaaacatgcacacctgtgaactctgaagcattccacaccayacataatgtttgattaatcaccaaaatgattacactaagtggcatccacagtaatttaaacagatatataaatcgtttgtaattacaggatattgggctctacaattcattgcttagcaaagaggtatttgttgtataattactgcatctttgtgagatatttgctgtgcatttatggtgtagtttatactgagcttgcaggccactatctttggttccctcttgtctaaactcaagcagtcttcaataaagggtaaagccacaattaccttggcaaataaatactctatagtacttgggaagatcatgaatgtggagacatttacaataacaatattcaaaagcaaatatagttaacactggatttttccacaccattgaaaggtagcattggtgtggctactaatacagcttaagaactacgtgcagtataactcaagtcatggcccaca

SEQ ID NO: 268999 - DNA, 579 bp, Homo sapiens
gtggggttagaggagttttttgtaaaatctggggaaaataaaatgctagcaactttgcagtttgatactttagggaaagcatttgaaaaacatgcacacctgtgaactctgaagcattccacaccacacataatgtttgattaatcaccaaaatgattacactaagtggcatccacagtaatttaaacagatatataaatcgtttgtaattacaggatattgggctctacaattcattgcttagcaaagaggtatttgttgtataattactgcatctttgtgagatatttgctgtgcatttatggtgtagtttayactgagcttgcaggccactatctttggttccctcttgtctaaactcaagcagtcttcaataaagggtaaagccacaattaccttggcaaataaatactctatagtacttgggaagatcatgaatgtggagacatttacaataacaatattcaaaagcaaatatagttaacactggatttttccacaccattgaaaggtagcattggtgtggctactaatacagcttaagaactacgtgcagtataactcaagtcatggcccaca

SEQ ID NO: 269000 - DNA, 609 bp, Homo sapiens
gaaagcatttgaaaaacatgcacacctgtgaactctgaagcattccacaccacacataatgtttgattaatcaccaaaatgattacactaagtggcatccacagtaatttaaacagatatataaatcgtttgtaattacaggatattgggctctacaattcattgcttagcaaagaggtatttgttgtataattactgcatctttgtgagatatttgctgtgcatttatggtgtagtttatactgagcttgcaggccactatctttggttccctcttgtctaaactcaagcagtcttcaataaagggtaaagccacaattaccttggcaaataaatactctatagtacttgggaagatcatgaatgtggagacatttacaataacaatattcaaaagcaaatatagttaacactggatttttccacaccattgaaaggtagcattggtgtggctamtaatacagcttaagaactacgtgcagtataactcaagtcatggcccacaatggactcattttgtggattccaggagcatacttctaacgaagcctggtagcaagatactatgcccaatgttcactggaaaaatacagatataccccccacata

SEQ ID NO: 269001 - DNA, 609 bp, Homo sapiens
gaaagcatttgaaaaacatgcacacctgtgaactctgaagcattccacaccacacataatgtttgattaatcaccaaaatgattacactaagtggcatccacagtaatttaaacagatatataaatcgtttgtaattacaggatattgggctctacaattcattgcttagcaaagaggtatttgttgtataattactgcatctttgtgagatatttgctgtgcatttatggtgtagtttatactgagcttgcaggccactatctttggttccctcttgtctaaactcaagcagtcttcaataaagggtaaagccacaattaccttggcaaataaatactctatagtacttgggaagatcatgaatgtggagacatttacaataacaatattcaaaagcaaatatagttaacactggatttttccacaccattgaaaggtagcattggtgtggctactaatacagcttaagaactacgtgcagtataactcaagtcatggcccacaatggactcattttrtggattccaggagcatacttctaacgaagcctggtagcaagatactatgcccaatgttcactggaaaaatacagatataccccccacata

SEQ ID NO: 269002 - DNA, 539 bp, Homo sapiens
ctaaaagggaagaatgaaaaagttctttttaaagtctttttcctatagtccataaatacaacgaatagatttagtcatgcctgcgaagctggctgctatgtaattttgtccaattgtccacttccactaagtagagagcaaaaaataagttctatgtgaaagagagaaagagagaggggaggmgggagagatacaacaaaagagaatttagatcaaacataaggacagcttcaaataagtgtttgagggttttgttttgtcttgaaatcctgaacgacaataactgagatgcacacacaaatgatccatcacagaaaaaaaatacagttaagtaaaagatttacatctgactggacacttcgagatttctggacttccataataatggcagtcctatagatgaagaccataaatgtgtggaaaagtgctgagctttagctagcacagttggcatgaaccaatttgggactatctggcactgtctctggaggtagtaaaaacaatgagcagctaacatcttcaatatatgagaatgaatg

SEQ ID NO: 269003 - DNA, 539 bp, Homo sapiens
ctaaaagggaagaatgaaaaagttctttttaaagtctttttcctatagtccataaatacaacgaatagatttagtcatgcctgcgaagctggctgctatgtaattttgtccaattgtccacttccactaagtagagagcaaaaaataagttctatgtgaaagagagaaagagagaggggaggcgggagagatacaacaaaagagaatttagatcaaacataaggacagcttcaaataagtgtttgagggttttgttttgtcttgaaatcctgaacracaataactgagatgcacacacaaatgatccatcacagaaaaaaaatacagttaagtaaaagatttacatctgactggacacttcgagatttctggacttccataataatggcagtcctatagatgaagaccataaatgtgtggaaaagtgctgagctttagctagcacagttggcatgaaccaatttgggactatctggcactgtctctggaggtagtaaaaacaatgagcagctaacatcttcaatatatgagaatgaatg

SEQ ID NO: 269004 - DNA, 539 bp, Homo sapiens
ctaaaagggaagaatgaaaaagttctttttaaagtctttttcctatagtccataaatacaacgaatagatttagtcatgcctgcgaagctggctgctatgtaattttgtccaattgtccacttccactaagtagagagcaaaaaataagttctatgtgaaagagagaaagagagaggggaggcgggagagatacaacaaaagagaatttagatcaaacataaggacagcttcaaataagtgtttgagggttttgttttgtcttgaaatcctgaacgacaataactgagatgcacacacaaatratccatcacagaaaaaaaatacagttaagtaaaagatttacatctgactggacacttcgagatttctggacttccataataatggcagtcctatagatgaagaccataaatgtgtggaaaagtgctgagctttagctagcacagttggcatgaaccaatttgggactatctggcactgtctctggaggtagtaaaaacaatgagcagctaacatcttcaatatatgagaatgaatg

SEQ ID NO: 269005 - DNA, 539 bp, Homo sapiens
ctaaaagggaagaatgaaaaagttctttttaaagtctttttcctatagtccataaatacaacgaatagatttagtcatgcctgcgaagctggctgctatgtaattttgtccaattgtccacttccactaagtagagagcaaaaaataagttctatgtgaaagagagaaagagagaggggaggcgggagagatacaacaaaagagaatttagatcaaacataaggacagcttcaaataagtgtttgagggttttgttttgtcttgaaatcctgaacgacaataactgagatgcacacacaaatgatccatcacagaaaaaaaatacagttaagtaaaagatttacatctgactggacamttcgagatttctggacttccataataatggcagtcctatagatgaagaccataaatgtgtggaaaagtgctgagctttagctagcacagttggcatgaaccaatttgggactatctggcactgtctctggaggtagtaaaaacaatgagcagctaacatcttcaatatatgagaatgaatg

SEQ ID NO: 269006 - DNA, 375 bp, Homo sapiens
tgggttgctatctagtaccaaatagctgatctgaaataacacctttaaaaactagaatttgatttttatagtgactaatactgcttattatggatctttttttttggtgttttaactacatgaactgaagaaagtttagaaggattgaaaagtatatacttaagtaatttaataataaaagrgctagttgtatttttcttaatcaaataaatacatttggatagggcatgggttgtgcatattaataatagcaaattttatggagagtccttctaaatactactttcaaacaaaaactgttacctgtggtgccaaatgtagtcagtcttgcttgatggcttttagggccaagtaggaagctgcaaactgagggac

SEQ ID NO: 269007 - DNA, 567 bp, Homo sapiens
cattaatttcttccaaaattattggaagaaaatgaacatggattacttgcttcttaagaaaacaagtgattcctaagaaattaaatttaaatgtaaagttgggcagggtgttttttacttttaaaatactttatactaagacattgagatataatatacatacaaagaggtcacaagtaagtgtatatctcaatgaattttcacaaagtgtatacttcccaycagatcaagaagtagattaccaatgcccccagaagtcctgctcacgtgagcttccagtcattcctcccacagaggaaaccatcatcatggcttatgtgacaattaactaattttgcctattctagaactttatctaatggaatcatgcagtgtgtcatttatttattaatttagtaaaatttatttgagagcaatttaggtcacccaaaaattgagtagaaagtacagtttttatatatccccctatacacaacacacacacacacacacacacacacacacacaccccacacacacacaccctatggacatcctccaccagaatggtatatttgtgactatcaa

SEQ ID NO: 269008 - DNA, 609 bp, Homo sapiens
attgaatcgtaactaatctatcaatacttcattaatttcttccaaaattattggaagaaaatgaacatggattacttgcttcttaagaaaacaagtgattcctaagaaattaaatttaaatgtaaagttgggcagggtgttttttacttttaaaatactttatactaagacattgagatataatatacatacaaagaggtcacaagtaagtgtatatctcaatgaattttcacaaagtgtatacttcccatcagatcaagaagtagattaccaatgcccccagaagtcctgctcacgtgagcttccagtcattcctcccacagaggaaaccatcatcatggcttatgtgacaattaactaattttgcctattctagaactttatctaatggaatcatgcagtgtgtcatttatttattaatttagtaaaatttatttgagagcaatttaggtcacccaaaaattgagtagaaagtacagtttttatatatccccctatacacaacacacacacacacacacacacacacacacacaccccacacacacacaccctatggrcatcctccaccagaatggtatatttgtgactatcaatgaacctacatta

SEQ ID NO: 269009 - DNA, 625 bp, Homo sapiens
aatatccacatttcacaaactttactatgtacagtataagaacttcttagtctcattccaatttaaatcagtctcattccaacattcacatttaaatctaaagcttctgatttactttattttggttcttttcacctgcagttgagagatctgacctctctcttttagtaatggttgtttgctacttgaagatgccttatgatctgaacatttcaaatgtcctgtaataaatactggwtgtattggaaagcaatgtgatcaggatcccagtgtctgtctttcttgataactaatcaattcactctgtctcaacaattccattcattctaaagagattccttggtattaaagtcgcttttcacttaatcattttggtacttcacttagttattttaaatggaagggccttgctattttcatttccttctcatttatttatgtagtcatgttccttttcaatcttttctcagaggtcatctcaactgctcatctgtccattttaatgtactgtggttggactctgaaggacatgatgttccttctaccaacaattttcatctattcaaccaatgtcaatgttgaacctgcaatgcctaatttagaatcctttcagacaatgcgcaaa

SEQ ID NO: 269010 - DNA, 650 bp, Homo sapiens
ttctaaaaacaaaaaaattgcaacagagaaattcaaattgttatagttaattgtgagattaaattgccatttgtcaatagcaatgtaatttctattataaattacaggactgtagctttcaggaatattttatcaatatgttttcaatgatttaataacaatatttctcaaaaataagccaaactggttttttccgctttttaaatgaacatgttcagaggattttcatcagtgtgctagccagctctgcaaaatttctagtaaataaattatcaccaggaggctcraaatccattaccataaaaaaagccatttttccttccctaatcgattgcccactgtgctactgctaatgggaccatacacacatgttgcgcagagggaatttgttttcaggttctctcttttctagaatttattttacaaagaatttctcactaaactcataaattagtcaatgcataaaatgaacacttcagcttgcagcaggagaaacataaatgttgtgcacctagggcattttccaagctggtttccaggaaaatggaggttgcactaggtgatttgcaaacactgcagcacctgcctgggagagccagtcctttccctgcttcccacgccatagtttgtttgctcatgtgttcttgttg

SEQ ID NO: 269011 - DNA, 650 bp, Homo sapiens
ttctaaaaacaaaaaaattgcaacagagaaattcaaattgttatagttaattgtgagattaaattgccatttgtcaatagcaatgtaatttctattataaattacaggactgtagctttcaggaatattttatcaatatgttttcaatgatttaataacaatatttctcaaaaataagccaaactggttttttccgctttttaaatgaacatgttcagaggattttcatcagtgtgctagccagctctgcaaaatttctagtaaataaattatcaccaggaggctcgaaatccattaccataaaaaaagccatttttccttccctaatcgattgcccactgtgctactgctaatgggaccatayacacatgttgcgcagagggaatttgttttcaggttctctcttttctagaatttattttacaaagaatttctcactaaactcataaattagtcaatgcataaaatgaacacttcagcttgcagcaggagaaacataaatgttgtgcacctagggcattttccaagctggtttccaggaaaatggaggttgcactaggtgatttgcaaacactgcagcacctgcctgggagagccagtcctttccctgcttcccacgccatagtttgtttgctcatgtgttcttgttg

SEQ ID NO: 269012 - DNA, 578 bp, Homo sapiens
ccagaactttggctgctaaatcagccttgcctatacacagaataggtaatcctagggaataaaatagaaagtggcacgggatgggcctgtctcccccagatttatccyagttgaatcagtcaatctgaaatttttatttcaatttttttctcttgaccactccagttgccttctctcaacaatttaggattcggaagctaaaagcagatttaagttcaattattcaattgccttccattcacagattttcttgatcaaggtagcactcctgtaagaggtaaaatctggaatcttggctgaatttcttgattttttattatgaatgaaaatacacattttttgagataacagttgagtattaacaaatgcaaaccagcctgagaataaaatgcctgcaaagattggggtgaagtgaaggtgcattggagaaagcaggcaggggataagaacacaaggaacttggtataaggcatagaaaattatagtagaagcacttcgtggaattgcatgacttatctatgtggttaggccagattctgactgttagcatatgtcatactttctttatgatgtcttta

SEQ ID NO: 269013 - DNA, 578 bp, Homo sapiens
ccagaactttggctgctaaatcagccttgcctatacacagaataggtaatcctagggaataaaatagaaagtggcacgggatgggcctgtctcccccagatttatcccagttgaatcagtcaatctgaaatttttatttcaatttttttctcttgaccactccagttgccttctctcaacaatttaggattcggaagctaaaagcagatttaagttcaattattcaattgccttccattcacagattttcttgatcaaggtagcactcctgtaagaggtaaaatctggaatctyggctgaatttcttgattttttattatgaatgaaaatacacattttttgagataacagttgagtattaacaaatgcaaaccagcctgagaataaaatgcctgcaaagattggggtgaagtgaaggtgcattggagaaagcaggcaggggataagaacacaaggaacttggtataaggcatagaaaattatagtagaagcacttcgtggaattgcatgacttatctatgtggttaggccagattctgactgttagcatatgtcatactttctttatgatgtcttta

SEQ ID NO: 269014 - DNA, 616 bp, Homo sapiens
cctttcttattggcccaaaactttgttgaaccatataatgttatactcttttatgtgtaaactttgaagatgacacgacaaagcagataaacaaggaacaacgacaaaaacatggattaaaaggaggagactgacaaacataatagtgctctgttgcggggattgctgagaaagattcgcccgcttcaaaatggctcactaaaaaaaataggtcagagatactagattgagaaatgttaagytctcagaaagatcattagcactagatttagataaataaagcattagaattagatgatcatatatgggttttgaggaaattcaagtgtaggcaaaatttatgacttgtaattagaaagagccatttcattagcttgaaatcctaaggaattatatatgagctgatactgctttggtagaaaaattaggataatagggaatagaataatatttctaaagttagtatctcatcctaatttcctgtcgaaccctaattctgtacttctagttatatatgagctattcccaagtttatatcacaaattcccatcaccatgcagaattaatagatgttaacattgttatatttacttctaattgcttttataaataaaac

SEQ ID NO: 269015 - DNA, 584 bp, Homo sapiens
cttccactgccatttatgccgtttattagtggaaagtaattttttaaaagagccctttcttttaaagtgtattgaagcggtataaaagtatggaatcatgtcctttgcaacaacatggatgtagctggaggctattatcctaagtaaattaatgcagaaacagaaagccaaagattgcctgttctcacttataagtgagagctaaatattcagtacacatggacraaaagatgtgaacaaaagacattgaggactacaagaagggggagggagggagaggagcaagggctgaaaaactacctattgggtattatgttcactacgtgggtgactgattcagtcgtaccccaaccctcagcatcatgcaatatagccttataacaaaccttcacaagtacctcctgaatctgaaataatagttgaaataaataaataatacaataagccttgcagtatgatgtgaaactccccccgtcttcttccatccagtggtcctttttctaagacttatcatgagggaagaaaggtgctccaatatcttggcttaaatccaagccaggaaattctattaggcttccaaaatg

SEQ ID NO: 269016 - DNA, 592 bp, Homo sapiens
cttccactgccatttatgccgtttattagtggaaagtaattttttaaaagagccctttcttttaaagtgtattgaagcggtataaaagtatggaatcatgtcctttgcaacaacatggatgtagctggaggctattatcctaagtaaattaatgcagaaacagaaagccaaagattgcctgttctcacttataagtgagagctaaatattcagtacacatggacgaaaagatgtgaacaaaagacattgaggactacaagaagrgggagggagggagaggagcaagggctgaaaaactacctattgggtattatgttcactacgtgggtgactgattcagtcgtaccccaaccctcagcatcatgcaatatagccttataacaaaccttcacaagtacctcctgaatctgaaataatagttgaaataaataaataatacaataagccttgcagtatgatgtgaaactccccccgtcttcttccatccagtggtcctttttctaagacttatcatgagggaagaaaggtgctccaatatcttggcttaaatccaagccaggaaattctattaggcttccaaaatgaatccctc

SEQ ID NO: 269017 - DNA, 492 bp, Homo sapiens
aaggtcacacagttaggcattggctgacccagtattcaaatgtatatcagcctgactccagtgactctactcttgccaatactcaaaagaagggtgaagcccgcccataggtcttcggtatctttccactctctgtaaatagctatactctacatgcatactcttcaaggaaaagagaatgctgggagaagaatagagttttcyttaggcagggtttctcaacttttgaaaaatattaatattatcataccccaagagcatttttaaacattttttgtttctaataatacactaattttttttttcttctgtaccatggacctttaggggaccacaaatcattgtaacatctaagatttttctcaacaccgcagtggcggcagtgggcagtgatattgcccctgttgggaatgtatgctctcaagtgacacagcaaacgcatcgttgaagctctccttttatttaacaatacccaacagggataacagagtt

SEQ ID NO: 269018 - DNA, 429 bp, Homo sapiens
aatgctagtgtaaaatatagatgtggcttaaatgttatagaatctcaatttgcttccttggggttctagctctacacttcactagaaatccatgaattccatgcagaggaatctatcaaaatcaagcacagggactgaaggatggcaatttcaggtagataactattgctatttttatggttggagactgcagttgtgttcagatttctgggaaccagatagtatttcaaaaatgttttccataattttttttcaaaaagaatgaggatttcctgtaaatggacttaggcttttcataattttttktaccctctcctttcaaaatagccacataagatactacccattggactaagcaactgctcttcagcaaggtgataactcttctgggtttagagggttgacttatagttaatttttgtaagggaa

SEQ ID NO: 269019 - DNA, 429 bp, Homo sapiens
aatgctagtgtaaaatatagatgtggcttaaatgttatagaatctcaatttgcttccttggggttctagctctacacttcactagaaatccatgaattccatgcagaggaatctatcaaaatcaagcacagggactgaaggatggcaatttcaggtagataactattgctatttttatggttggagactgcagttgtgttcagatttctgggaaccagatagtatttcaaaaatgttttccataattttttttcaaaaagaatgaggatttcctgtaaatggacttaggcttttcataattttttgtaccctctcctttcaaaatagccacataagatactacccattggactaagcaactrctcttcagcaaggtgataactcttctgggtttagagggttgacttatagttaatttttgtaagggaa

SEQ ID NO: 269020 - DNA, 613 bp, Homo sapiens
tgtggaattagggaggtaaactgcttttactaaatctggtcactcttcatgtcagttgaattctagagagagggccctggtcagggtgaagggatttaaacgtgaatgctgaacttccgtggctcagtttgactggagctcaagggcagcaggaagaagggtgggagagctggctggtgtgaattcaaagagggctgtcaatatcaggccaaagaagatgggtttgagtctatatataatggggaggatagctccttgaatcaatctacgctttaacaagattagtatggtgatagagtataaattgagttgtctgtaatctcacttctggtctcacgtctataatgttgatgaattggtctctttatgggcatttccccctcctgcactttgagatgtgcaagaatttcttgggcactattgcttcgttcaataagagagggccctaagatccayggccgctttagtgaaaggacttatctagagggttacaaaataaattaagcatataaatctcgggagaaagactgtgatccagttatatgttcactttatgattcaatggccatatgatgaactttcaaaaagcagtgaaagaaaaaaatcaagagga

SEQ ID NO: 269021 - DNA, 528 bp, Homo sapiens
attttgaaatactgaagatgaaattaatgagattcttctgcatctcatatccaccctgagctgtggtcttcttgatacctrtgaatagaatggtgaacagatacttcattcaacaaatattcactgagcaaccaatacatatccggcacagaggaaaccatataacaaaacagacaaggtctttgttctcatttttaagttttatgggtaggaatatatttttttctagtccattttctgtcagaaataccattttaggaaccatgataattgttttaaaaatgaattgaggaatgtaagttggtaagcaacatttctctcctttgctcacttctttcttacttataaaatgacagaaaacagtgtaataaaaatttttatttatgcttcacagcaggaaaaagtaattgaaataaaagcttatcatcaatgttacccacagatattactgggtatcttcaggttgaattcacataccaagtacatacaacttccctccttcttctttctctcttctaatcacacaac

SEQ ID NO: 269022 - DNA, 547 bp, Homo sapiens
ttaacgatatacatcaaagattggcaaactacggccctaggtcaaatccaatgcactgcatatttgcagactcaccaggaaagaatgatttttacatttttaaatagttgaaaagaaaaatcgaaagaagaatactatgttgtgacacatgaaaatcatatgaaatttggatttcagtgtctatagataagkttttcttgaaactcagccacacttatttgtttatgtagtgtctaaagctgcttttgtgccacaatggcagagttaagtggctgcaaaagagagcacatagcttgcaaagactaaaatatttatttaccaccttgtccttttcagaagtagtttgctgacttctcatatacatggtcaaattagatgagctcagggcccattcctggtgaggtaaaggcaacctgtaacacagcacaaggaacaaagcttcaagggagaaaagaatttagaagaaacctggtccagcctcctagcccatagaatgtcctgcaagagccatccagacatggggactaacaattccaagaatcctagc

SEQ ID NO: 269023 - DNA, 566 bp, Homo sapiens
tatatcacccaatatttataatatatattagatattatatataatagatatattagatataatagatagattatatctatcacccaatatttacaaatgtatgatccaatctgatcaatgtctgtctcctccctctaatgataagcaaaccttttctgtaacgggccagataataaatatctcaggccctgtgtgccatgtattctctgcagcaactactcagctctgacattgtagtgcaaagcagtcacagataatacataaagtaatgaccatgactatgttccaataaaattttatttacaaaaacaagcagcagcagtatttggctcaagggtcatggtttgacaaccrctgctccagactgactataacttcatataagcagggagcatgtctattttgtcacactatattcttagtatctagcacagggtaagtgctcaaatacttattgaagacacacatgaatttgttgtagcaaatccccagaacactgcaacaatgactttaagataattcctctaccttccttcctgtccttccccagttaactctgaacaccc

SEQ ID NO: 269024 - DNA, 580 bp, Homo sapiens
ttgtcagcaaatgcactgagccatttataaacattccaaagcctgggacagtgtagaagcacattagaggagaaccaggatcttcataaataaagaatcaggcatggttgggggtaggggtgttatttgatgtttccctataaagagaagagcttaggaaacaaggtaattaaatgattataggtccatgtggctcctatcccacaagcttagggggcagggaaagtggaattaagggagctatgagtagagggcagcatacagttctatccatcattccccagggagcctgtttgcttagactgtgctccctgctaagaaggaaggaaactcctactgtagattaggctcagtgcccaaaggggctgtagtgtggccatgtttctcagagggagaataaccaagctgtgaaaagggctcagaccttcccccargaaagatggtttgacccctgtggagactttccatgatgtccccatgcaaaatagaactcctgatgggaatcttggcagaaaactttcaaccagagaaggcctgatggactgccatctttggacacctagtagggcccacacagggc

SEQ ID NO: 269025 - DNA, 368 bp, Homo sapiens
tctggtatatacataaaatgaaagctgtaggtcaacttctcccctgaagaaatgcataggcatgtgatttggcttctaatctggggagctcacagaagcctgaagtctgtgtgtgtgcccaaggttaagaacccctgctcagagatgttttctgatagacagatgaggagtttttatatatatatacacacaccatgttctcayttagaagtgggaactaaatattgggtactcatggacataaatgtggcaacagtagacactggtgactactgggagagaggtaggagggcaagaattgaaaaaatatctattggatactatgctcactacctggtgatgggatcaattgtattccaaaccctagc

SEQ ID NO: 269026 - DNA, 368 bp, Homo sapiens
tctggtatatacataaaatgaaagctgtaggtcaacttctcccctgaagaaatgcataggcatgtgatttggcttctaatctggggagctcacagaagcctgaagtctgtgtgtgtgcccaaggttaagaacccctgctcagagatgttttctgatagacagatgaggagtttttatatatatatacacacaccatgttctcacttagaagtgggaactaaatattgggtactcatggacataaatgtggcaacagtagrcactggtgactactgggagagaggtaggagggcaagaattgaaaaaatatctattggatactatgctcactacctggtgatgggatcaattgtattccaaaccctagc

SEQ ID NO: 269027 - DNA, 540 bp, Homo sapiens
ttataaaaccactttctaaagagggccaaaacaagacaataattgtccatggatgacaaaaagttttagggcagctatagccaaagacacaatagacaaggaaatttcttacctctgtaatacacaataatttaacatatattatsttacacaacaattataattattgctgataatatatactaagtcatatcagaattataggagtttctcataattttggaacacataccaataacatatttatacaaatacagcccaaagaaagccaaacaccatttcctatttgacaacgcttcctgtataatttttataccaaataagccaaatatgtcatttttggattttagagaacctcatattttaaagaattaactaggtcagaaagagacataatttataatttgattttcaaaagtttgtcaaataccaaaggtataaaacacttgatatcacaaaataggatcacaggtcattgtcaaataagtcattcatttaaccaaagtgataactcaaggatttccaaaaaaggtgaaaacc

SEQ ID NO: 269028 - DNA, 540 bp, Homo sapiens
ggatgtcaggaaggaggggctccagccaagcttcagggataaggtgcactgagggcaagaccagagggargaggaagccatgcacgtggaggagggcgagcactgcggagagaagacaggcaaaagccccaagggggaaatcagtttgacacctcagcctcctttttgacttctctcctttctccccttggctggaatccagactgctcatcctggcccagaagccagcctccctttctgggagatccagggacttcccagcccttggtctgactggacatctcagagtaactctgccccaaaaactgtggttgccatggactctaaaactagttctccaggtaaacaaaactactttgctcacccacatacaggaaacggcagatttctggcctttcaacacaggttttcctctgccggcaaactccagcatccagcagaggtgttggcaagactccacctgtttcctggcagaagccccaaaccaccccacctcacaccggcacaaaggagctcaaaccatgaaatataaggaagagc

SEQ ID NO: 269029 - DNA, 540 bp, Homo sapiens
ggatgtcaggaaggaggggctccagccaagcttcagggataaggtgcactgagggcaagaccagagggaagaggaagccatgcacgtggaggagggcgagcactgcggagagaagacaggcaaaagccccaagggggaaatcagtttgacacctcagcctcctttttgacttctctcctttctccccttggctggaatccagactgctcatcctggcccagaagccagcctccctttctgggagatccagggacttcccagcccttggtctgactggacatctcagagtaactcygccccaaaaactgtggttgccatggactctaaaactagttctccaggtaaacaaaactactttgctcacccacatacaggaaacggcagatttctggcctttcaacacaggttttcctctgccggcaaactccagcatccagcagaggtgttggcaagactccacctgtttcctggcagaagccccaaaccaccccacctcacaccggcacaaaggagctcaaaccatgaaatataaggaagagc

SEQ ID NO: 269030 - DNA, 473 bp, Homo sapiens
tgttgatctcattcattgcattcagtctcaacaggtttgccagcaagcagggaaatgggacttcttcttaaagagaaaacttcccagtggaagatgggaagagatggaagcagagagtgagtctctctgccaccttgactgtggggagtccaggcaacagggcctgcacagtggaccattctatgaaaccatgaatccatagaggcaagctggagctagggaggaagtcagtcttggaggctagactacagcaaattcgttttccaggataagctctggaaggtgaaagagcctgtgagcctgggaatgacctagaaaaaggtaatttcagaaacytaaattttgcaacctgttcttgtttctaatattttcctgtatgtctctgtttatgtctcacttgtaaatgaatgatccattctaaaatggatctcacttgtaaatgaatgatccattcattttgaaaaccctgactt

SEQ ID NO: 269031 - DNA, 583 bp, Homo sapiens
gatgatgctgaacagagtaagacaataacaaaattagcctctttcatgctaagggtcacgaagatgggtcttttccatggatggctcggggttgtgtgtactgcaggaagctcatgacccatgagccacttgtgcatgatttggcccaaagaaccgtgctaattggtaacaggttgcaactcttcatttccttctcactcaccttctacaagcacctttggccttctccttcaccctatctgttgctcatgtgttctgaaagatttcccttctgctttcaagggctagcctggcttagttagccacaacgcccccacttcctgcccagatgccccttcatgaataaccccattcatcccatgcatgggagaaattggctcatcctcaagctctgattaatacaacctccaatactagtttctttccaacaaagtaacctggtttcctatcaacagaccagtacctaaaatctaggtggggtgagggggtagtttaaaacaatgagaaagtccaagaactttttgtttaattttctatttgytaatgacttgtgcaactccctcctttcgtcccttttgcttgg

SEQ ID NO: 269032 - DNA, 591 bp, Homo sapiens
tttaagcctctgagattggcagtatatctattgtggcagtccacattactctaactaatgtacagtagaagaacacacttaggtattggaaaatctytgcgaccatctcctgacttcacagagccttcacactgtaaaactcagtgtgaaaaaaaatgaataagaagaaataaatgaaattaagttaaatgaacattcttctcatttaagcaaagttcaatcatatttcctatgcataaagaaaataaataagtagacaaatagcccttgggaactgagataggactaaaggatctaaacggatctaattcttatagaccattgagaaaatggtgaaaataagagacttctgaaaatgaccatactatgaaatgcataggaggaccactggcagacaccaaagaatagtttctttttcttttgccttaaaaattactgttattttttctttttcctctctattctctcaactatcatagttgtcagttagtcccacctaacacttgattatgtaatatctttccttattagtttcatgcaaataactgcaactaaattgcaattccctaagggcaaggaccaagttgtcaa

SEQ ID NO: 269033 - DNA, 591 bp, Homo sapiens
tttaagcctctgagattggcagtatatctattgtggcagtccacattactctaactaatgtacagtagaagaacacacttaggtattggaaaatctctgcgaccatctcctgacttcacagagccttcacactgtaaaactcagtgtgaaaaaaaatgaataagaagaaataaatgaaattaagttaaatgaacattmttctcatttaagcaaagttcaatcatatttcctatgcataaagaaaataaataagtagacaaatagcccttgggaactgagataggactaaaggatctaaacggatctaattcttatagaccattgagaaaatggtgaaaataagagacttctgaaaatgaccatactatgaaatgcataggaggaccactggcagacaccaaagaatagtttctttttcttttgccttaaaaattactgttattttttctttttcctctctattctctcaactatcatagttgtcagttagtcccacctaacacttgattatgtaatatctttccttattagtttcatgcaaataactgcaactaaattgcaattccctaagggcaaggaccaagttgtcaa

SEQ ID NO: 269034 - DNA, 337 bp, Homo sapiens
gtccaacagtgataaaaaaaaagtgtgtgtacatatatatatatatatatatatatatatatatatatatatatttttttttttttttttttttttttttaaaaaatacatgaccatggtgtgaatatgaaacttgatgagggatagggttaaatccccttggaaataagcggggaagattttgcaaaatattcatacccaagcctcacctcagatatactaaataaaarttccctggatgagagtttttcctttattgcttaaatttttataagggaaattttcaaaaatacccaaaggtggagagaataatatcatgaattcccaggtcctcatc

SEQ ID NO: 269035 - DNA, 337 bp, Homo sapiens
gtccaacagtgataaaaaaaaagtgtgtgtacatatatatatatatatatatatatatatatatatatatatatttttttttttttttttttttttttttaaaaaatacatgaccatggtgtgaatatgaaacttgatgagggatagggttaaatccccttggaaataagcggggaagattttgcaaaatattcatacccaagcctcacctcagatatactaaataaaaattccctggatgagagtttttmctttattgcttaaatttttataagggaaattttcaaaaatacccaaaggtggagagaataatatcatgaattcccaggtcctcatc

SEQ ID NO: 269036 - DNA, 337 bp, Homo sapiens
gtccaacagtgataaaaaaaaagtgtgtgtacatatatatatatatatatatatatatatatatatatatatatttttttttttttttttttttttttttaaaaaatacatgaccatggtgtgaatatgaaacttgatgagggatagggttaaatccccttggaaataagcggggaagattttgcaaaatattcatacccaagcctcacctcagatatactaaataaaaattccctggatgagagtttttcmtttattgcttaaatttttataagggaaattttcaaaaatacccaaaggtggagagaataatatcatgaattcccaggtcctcatc

SEQ ID NO: 269037 - DNA, 563 bp, Homo sapiens
agcattcaagctcaaccatatcaaggaaacattcaaaacgtttcccactgatcaatgttattccatctattagacctggaaaccactggcattgaccagctttcataaatcacagttgagacacctgaagtctaaagagggaaaaaccgacttatctgaagtcacacaactaagttcatactcccagtgatgatatatactggatttttcaggacagtcttaaatttaaatattatgtctcattgttcctacaaatcactgaactatctttattacaatttctagattacttattataatgcgaagaaagactgaaaaatcaggacaccagttctttaaaatgtcatagataatgtctcaagcaggaattaaaaccaacaaaattaaacacagtaaggtacaacaacaggaggacagatactcttctttatgagcattcaaataatcttggtgggggatagagaaagtggggaaaggcttctgtcagttgaagactgttgggagcaagccccccaaaatctggccatawactggccccaagactggccataaacaaaatctct

SEQ ID NO: 269038 - DNA, 563 bp, Homo sapiens
gattgaaataccaggaagctgtttggtctcttccagtccacatgtaattaaatatctatagggtgccagtgtcgctatcccctgagcactgtggaggctacatcagaagcccaggactccacttctttcctcaaggagtttagaatatcatggggaggcctgatttgtacacctaaaataaagagttttaaatgttagcataaaacaaaacatatcaagggtcaacaagtacagcagtaggatccacaggcagtcggcataaggagaaaccagtgtctaatggaggtaaaggaaagactttctttggagtcagtcctgcccatcccagctttgcctggctacagcttctggtaaaccctcaacttgcaaatccagaacaattccatctattatcycagtttttcttgaactttttgaccacaacacataattaaaaaactactttctatgacaattcagtactcacctacaaaaacataaagaagcagtattcttctggatgggtttcttcatttctctagattcagtgtccatcctgcttttctccccaggtagcagatgca

SEQ ID NO: 269039 - DNA, 624 bp, Homo sapiens
tttgagccactttcattggcttggtgtggcagtcttccctccataaaaagtataagtcacctggagcctgcattgtttcctctttaaatgcttttatctggctccccatgatgagccattagcagcactgtaaagtgatgcaagctacctagtggaagtaaagtggaccttgacatctgaagcatagatttgagtcttggcccattccccactgccttgtgaacctgggctagccattaagaagactgagcttttattttcttgttataattcagaaataatagcaatatttcacttatgggtttgttatgcaagttaaatgagtgtttggaggttggtcctagagaggagtttgggtcatggggacaaattcctcaggaatagatgaataccctctcatgggggtgagtgagttctgtctctctcacaggaatggatgagktcccacacgaatgaactgttaaaaagaggctggcttcctccgcttttctcgcttgcttcctcttgtgccgtgtgatctctttgcacttgcctgctttcccgctttccaccatgaatggaagcagcctgaggccctcaccagaagtagctgctcaatcatgaaccttgcagccaccaaaatca

SEQ ID NO: 269040 - DNA, 624 bp, Homo sapiens
tttgagccactttcattggcttggtgtggcagtcttccctccataaaaagtataagtcacctggagcctgcattgtttcctctttaaatgcttttatctggctccccatgatgagccattagcagcactgtaaagtgatgcaagctacctagtggaagtaaagtggaccttgacatctgaagcatagatttgagtcttggcccattccccactgccttgtgaacctgggctagccattaagaagactgagcttttattttcttgttataattcagaaataatagcaatatttcacttatgggtttgttatgcaagttaaatgagtgtttggaggttggtcctagagaggagtttgggtcatggggacaaattcctcaggaatagatgaataccctctcatgggggtgagtgagttctgtctctctcacaggaatggatgaggtcccacacraatgaactgttaaaaagaggctggcttcctccgcttttctcgcttgcttcctcttgtgccgtgtgatctctttgcacttgcctgctttcccgctttccaccatgaatggaagcagcctgaggccctcaccagaagtagctgctcaatcatgaaccttgcagccaccaaaatca

SEQ ID NO: 269041 - DNA, 614 bp, Homo sapiens
taatgtcaaggtgtagtaaagacatagagtgcttagtggtccagaagcagcaggccaggaaggtggaggaggacagaagcaagaacaacttccagagaggaggasgagaagagctgcaggaaacaggcttctgttcccatgacctttaaccttctgctaattgcagtaagtgcattgtgtgccaggtggggaggatgccaacaaaaaacaacaacaaaaacaaacacaaacacacacaaaaccatagtcttttgggccgggagaacctaaaaattgagtctggagaattatgactgtgaaagagtgagggtggggagcagtcccaacagagaaagggccagaaatgtggtctccaaattccatctatacacattgctgactgactcctgaatcatacatttggggaaaaaaaaaaatcccctcaaagcagctctgctaaagacaaagatcttaaattgagtctacactgcatgagaaacagagtttgtaacacaggaccagccaagagagttgcttgctaaaataaaagaactctcattcaagaaaagtgacaggatccagaatctgtacaagattgcattcacaatattaaacttataatctaaaattagcca

SEQ ID NO: 269042 - DNA, 366 bp, Homo sapiens
ataaggaatgaaaaaaggggcataagactagagatactatggatattagaaggataataagggaatatgttatacaagtttaagctaacagatctgacaatgtagatgaaatgggcaaattcttttaataacgtgaattaagaaaatcgatccaagatgaaatcaataaattaaatktccctatatcaaaaaaagaaaattgaattcataatttaaaactttctcacagagaaaactctagggcaagattgctctaataatatttctatcaaatatttaataaataacacccaaatctacacaaagtccttcagaaaacagagaaagaggaaatacttcccagctcattgtataaggtcagtatta

SEQ ID NO: 269043 - DNA, 348 bp, Homo sapiens
gatgaaataatctgtacaccaagccccatgacacaagtttacctgtgtaacaamcctgcatttgtacctctgaacttaaaataaaagcaaaaatccctctatttgtatacatttataggagacttattttgcaggattatttcattaaaggtaaaatatttggtattatgaaaaaaagaaaagaaaacatgttccgtactgagacagtgggaacctgactaggtgacaagaactggggaggggaggtaattttcgagcctaggggacttggagagatcggaggcagagcagtcagcactgctgcagggaattggggcaactgagtgtgagcaggaggaagatagaaaa

SEQ ID NO: 269044 - DNA, 348 bp, Homo sapiens
gatgaaataatctgtacaccaagccccatgacacaagtttacctgtgtaacaaacctgcatttgtacctctgaacttaaaataaaagcaaaaatccctctatttgtatacatttataggagacttattttgcaggattatttcattaaagrtaaaatatttggtattatgaaaaaaagaaaagaaaacatgttccgtactgagacagtgggaacctgactaggtgacaagaactggggaggggaggtaattttcgagcctaggggacttggagagatcggaggcagagcagtcagcactgctgcagggaattggggcaactgagtgtgagcaggaggaagatagaaaa

SEQ ID NO: 269045 - DNA, 589 bp, Homo sapiens
ctgttttctactgtgaaccactgacccatggaaaaatcaatggaaagccacaaacaaatacaaagcaacctggttctttattttccttagagaaatataaagtattaacctgcttcctaaattataaataaggaagccttggaacaaagtcagttaaagtataatattaaaaagattgaagaaaaagagacttgtaagatttagaggaaaaggcagagttatctctttttaatgcttactttcaaagataatcagcttactaattttcttgacttttaggtcaaccttaaccttttaacacattggttgttatctggagggtgcacacctrtggaaagtagtaaaactgtactttcctgggccatctacaagatcttgattcattggggctttatcatatatgtattttttgctccatgggtaattctcaagcaccattctggttcagaatcttggttttaacttatggtctcaacaaggcagccccaccagtccacaaaaggataaagatttcaacttctctaccttcttcaatatcatgcttacccatgtagcttgatttggtcaatgaaatgtgggcaaagtgtca

SEQ ID NO: 269046 - DNA, 549 bp, Homo sapiens
ccagagtcactttggtgacccaaacttgatgttgggttaactattggccacccttccaggtatcccaggggtctcagcatttggtgtggggaccctcattggctgtaactcaggcaccccaggttttcagtactggttgtggccacccccccagatgccctagggtatttggtattgatattccctttaggatttggggtagggaactttggttttgagagagaaaagttaggtaattagggtgggtccttggtaaaactccttttttctttatttttattttttatttccagaagtttttgggaaacaggtggtatttggttatatgagtacgttttttagygttgatttgtgagattttggtgcacccatcacctgagcagtgtacattgaacccaatttgtagccttttatccctcacccttttcccacactttccccctgagtcctcaaaatccattgtatcattcttatacctttgcatcctcacagcttaggtcccacttatgagtgagaacatacaatatttgattttccgttactgagtta

SEQ ID NO: 269047 - DNA, 574 bp, Homo sapiens
ccttgctgttcttgtgagagtgagtgagttatcatgagagctggttgtttataagtgtgtgacacctcccccttctctctgttcctcctactctggccacataagacccatgcctccttcccctttgccttccaccatgattgtaagtttcgggaggcatccccagaaacagaagcctgtacagcctgcagaaccatgagcaaattaaaactattttctttataaattacccaatttcaagtatgtatttgtagtgtgtgagaatggacaaatacaaagctataatactacactaaataaaatatttttcaaaaatgaaataaagacttcttaacatatataaaagttgaaagaattcatcaccatcagacttgagctaccagaaacatcaaaggaaatgatttgggcagaaggaaaacaataccagatggaaatatgtacctatataayggaatatagagcagtgataatggtaacaacatgaaaatatccctctatgtacatatatatatatataccttatttaaatgtctttaaaagatgactgtctttagacaaataattaaaatgtaat

SEQ ID NO: 269048 - DNA, 550 bp, Homo sapiens
ctttcaaaaccataatctatgccataaatgtgcttgctattgagactatcactacttctagcccctcttgatgcagaacaggtgagctccaaattggggcttagcctatgacgattcttggatttccaagaaatgattcagtggtgatctgttgttagggtagaagaacatctttattgaagcagtagtgttatagttccagccatgttacagctctgttactgctcctacagaggagggctaccccacaggcrgtgtgctgagaatagcagctcagggcagttttgcagtcatatttatacctattattaattaaagatacattaaggggtagtttatgcagaaatttctaggaaaatgatgataacttttgagtcatcaggtcattgccatggaaagtgacagtaactcccaggtgttgccatggcaatggtaaactgacatggcacactagtgagtgtgtattacagaaagcttcttctgcaccatttctgttttagctagtcctccatttggtccagtgtctgagccccacctctagagttgagtc

SEQ ID NO: 269049 - DNA, 556 bp, Homo sapiens
ccgtggtgatgtaatgatcaccatcatcaacttcctctgtctcttctccagtcagcacccattattgacataaccaatttgtcttttatactgtatgagagaggatccaaagggattatcccatcagtgtcccagcagcccacctattgggtaaagttctcatgctagactgtatcatagccagtcaaaaagcccattatgtgtctgcagatgtgggatggtcagytaagaacactcagaagagtacagtgagcatggaagaaaccttgaatgtcctggcttgtacattgtctgaccccctgagcccatttttattatggtgtactgacatttctatggcactggattcttacatcatttccattaactcagtaaattatccacctcctagatcagggccacaggacataagtttgtctccagtgtcccaccttttccttataacacccattgctctactttcagcaacattccctcatgtcgtgttagagtccattgctttcctgagaaaaaagctaatgtttgttgggtgcttactatgtaccaggtatgtcac

SEQ ID NO: 269050 - DNA, 547 bp, Homo sapiens
tctccactgcagagaactttctattgcttattaaactttcactcctacctcactctttgtgtccacacttcttaattttcttggccatgagacacagaactctgggtgatacctaacaatgacagactgctacagtgtggtacattcatgagagtgtaacagtttcactttattttttgccctgaagaaagaagtattatttcctaatagccagtttctgaccctctcctgtatactaactttctactgctttgttgaagcccctcttgataagaaaacctgggatttaycaagcctctggcttgatgaacagcctcctaaagctgtatacaagtggccatccaacattttttttcagtgtttctgttgctttgtaggttattaagcaagtccaggcctctgaggtctccacttgggcaatgctgttgactccttctcttgtccctcccacaataatcatttgttaagcccccctctcttcccaacccttgctacctgtggaatttaggctcagcaacaaactgttcatttgcagttcataatctgc

SEQ ID NO: 269051 - DNA, 614 bp, Homo sapiens
tacctaactgtattagtccatttttacccactatacagaactacctgagactgggaaatttataaagaaaggaggtttaattgactcacagttacacatggctgggtaggtgttaggacacttacaatcatggtggaaggcaaaggggaagcaaggcatgtcttacgtggtggaaggagagagcaargggggaagcgccacactttcaaaccatcagatatcatgagaactcgctatcatgagaacatggggaaaatctgccctcttgacccaaccacctgccactatatccctgccctgacacgtagggattgcagtctgacataagatttgtatggggacacagagccaaaccatatcattcctcttctggcttttcccaattctcatgttcttttcccactgcaaaattaatcatgcattttcagtagtcccccaaagtcttaactcattccaccattaactcaaaagtccaagtccaaagtctcatctgagacaagacaagtcccttccgcctatgagcctgtaaaatattagtagaaaaacaggttagttacttccaagatacgatgaaggcacagacattgggtaaataatcccattctaaatggaat

SEQ ID NO: 269052 - DNA, 617 bp, Homo sapiens
gtgttggagaaaaatgcaaataagaaaacggagaaggactctgagtacactgcctatggggtagccctgctctgcaggagaagtcatgaagctgtaatattgccagagctgtaatactgccacttcaataaggctgttttcttctaccctaccagtggctcactcttaaattctttcctgggcaaagccaataagtctcatgggctaagccccaatttggggctcatttgccctgcatcagcatggtacccaaagtgggatgaagagagaagacggcagcatgagagatggttgaagaaatggcagctgacatttggtgatcaacagggtggcagtcagtgaaatggcatttggtgggatgaacagtcagtggaatggtagtcaatgaggtggcagttggtgagatggtaaaaaatgaaaattggtaaagacaatgagcagagagacagtgaaaggcagcaaagcagagctgttaacacytaagagctgttacactaccagccaaaggctattttcagagccatcattttccttggcaggcagtagaactaagcagaaatgcaagttgccttaatactgctgctttgtgtgagacctgctgctctgactaccagacc

SEQ ID NO: 269053 - DNA, 578 bp, Homo sapiens
ttgttggcctgtaggcaagaagaaacaaattttacaaggctaactatgcatggatcaaatatgggtattatacaaagaggagttaaagggaacraatctagtgtcaaagataacagaaatgagaagtgaaatatactaatcattctgaaaataatattgtgcccctgatgaaagaaattaaatattgtatgggagcaattaaactttaaaaaagagataactgttgaggggagtaggtatttctgttcgtgttcaggattaatggacccttggtaaaggtgcctcatggtgaagaacaaaacaaaggtaagaacagcaagcataggcaagactataaagaggatatccatggaaggtcaattattaacacttatcttttgtgatttttagcttgaggtcccagattttttcacattggtactttgggtgctcttctgggttgatggaagtgatgctgtcagcttccccatgtgtttacttgagtatatgaatccaagaatctgttccagtgaccttccctgctgtaggagtggaaagaagtacagtgtacttcccaatcttccctcccaatctgggcc

SEQ ID NO: 269054 - DNA, 592 bp, Homo sapiens
tgggagggacccagtaggagataattgaatcacgtggtagtttctcccatactgttcttgtaagtctcatgagatctaatggttttattaggggaaaccccttttgcttggttctcattctctcttgctgctgccatgtaagaagtgcctttagccttctgccatgattgtgaggcctccccagccacgtggaactgtgaatccgttaaacctctttttctttataaattaggcagtcgcagacatgtctttatcrgcagcatgaaaatggactaatacaagagctgggggaataaacactccaacctcttcctcctctctccttttagctcccactggttctcttcactgaccacatccaactggagctaaagggtaaggaagcccactcgtggtatccatataggtcagcctcctaggggcacaaaatggggtgtgtggagattggatttggaggggcaagtggaaaaggaagctaacacagtatccataatagtaacaataattactatttttatttttattattccagcacctggcaccagaatactgaatgcttagcataatgtctggagcctggatgtgcaataat

SEQ ID NO: 269055 - DNA, 592 bp, Homo sapiens
tgggagggacccagtaggagataattgaatcacgtggtagtttctcccatactgttcttgtaagtctcatgagatctaatggttttattaggggaaaccccttttgcttggttctcattctctcttgctgctgccatgtaagaagtgcctttagccttctgccatgattgtgaggcctccccagccacgtggaactgtgaatccgttaaacctctttttctttataaattaggcagtcgcagacatgtctttatcggcagcatgaaaatggactaatacaagagctgggggaataaacactccaacctcttcctcctctctccttttagctcccactggttctcttcactgaccacatccaactggagctaaagggtaaggaagcccactcgtggtatccatataggtcagcctcctaggggcacaaaatggggtgtgtggagaktggatttggaggggcaagtggaaaaggaagctaacacagtatccataatagtaacaataattactatttttatttttattattccagcacctggcaccagaatactgaatgcttagcataatgtctggagcctggatgtgcaataat

SEQ ID NO: 269056 - DNA, 548 bp, Homo sapiens
ggggaggcctcatagtcatggcagaaggcgaaggagaagcaaagtcatctcttacatgtcagcaggcaagagatcatgtgcaggggaactgccctttataaaaccatcagatcttgggagacttactcactrtcatgagaacagtgcaggaaaaacctgcccctatgattcagttacctcctgatggtccctcccatgacacatggggattatgggagctgcaattcaagatgagatttgggtggggagacagccaaaccatatcagatataaacctcttttaaaggctgtaactctttaaggatacacagtgcctttgtggctaggtcatgaatccaggtgacttaaaaacccatgtacctccatctcccactccgtccaaaaaagaacctgtgcttttttttaactattgctccaagctgccatggtgagctattacagggctttatatatatatttgcttacccgtgaaaatatcttttatgttacatatacacatgtatatttcttcatcattcatataaaaacattgtttctcttaattattg

SEQ ID NO: 269057 - DNA, 562 bp, Homo sapiens
tagtgctaaaacatggctgcaaattctgtgacattcttcccattgagaggtgtggtctccattcctccctcttgaaccttgtcaagcttgtgaaatcttaggccagtagagtatggcagaaggaatgctaagtgattccagagctggggcataaagggccatacagcttctgccccatttgctggaaaattattcttggagacttcrgcctgagtctgtcatgctggaaagaactggggtaggcactcctgttgccagtctcgactgagtccaggcttccagtcatccatccatccctaatgatagggacaagaggcacggaaattctgggcagaagaggatgggtccccagcgagggccctaccctcaagcctggaaccacagcccaaggtaagaacatacatccctgttttcccactcaaatgttgacatttccaaaaccacccatggctcaccccacccctcattgtgtgtccataaaaatcctaggctctgccagcagagagagaagaggaaaaacagttggacatcagagactatgtttgaacgttggagagaagca

SEQ ID NO: 269058 - DNA, 562 bp, Homo sapiens
tagtgctaaaacatggctgcaaattctgtgacattcttcccattgagaggtgtggtctccattcctccctcttgaaccttgtcaagcttgtgaaatcttaggccagtagagtatggcagaaggaatgctaagtgattccagagctggggcataaagggccatacagcttctgccccatttgctggaaaattattcttggagacttcggcctgagtctgtcatgctggaaagaactggggtaggcactcctgttgccagtctcgactgagtccaggcttccagtcatccatccatccctaatgatagggacaagaggcasggaaattctgggcagaagaggatgggtccccagcgagggccctaccctcaagcctggaaccacagcccaaggtaagaacatacatccctgttttcccactcaaatgttgacatttccaaaaccacccatggctcaccccacccctcattgtgtgtccataaaaatcctaggctctgccagcagagagagaagaggaaaaacagttggacatcagagactatgtttgaacgttggagagaagca

SEQ ID NO: 269059 - DNA, 529 bp, Homo sapiens
atgagccctttaaaagcaaagcactttcttcaattgggagcagctgaaatagtcagagatttgaagcatgagggaggcttgatgcactgttgctgactttgaagaccgaaggggctactagcaagggccggagcacagtttctaggagctaagagtgacccctagccaacagctagtcctacaagcacaggaactgagagtgaagtacctagtagggcatggcaggttggagctgggttgtaatggtttctgtaaactatggaaggggatttgaaatttttattctgctccattggaagcayattttaaaagaattttttaaaactaactgaaaatacctgaagaatctaacacactatgtgtatgagtatgtatgtatgtatgttatatctatagtattatattttatatacataaaacacacattttaatatttgaggtaagtgaataattcctcttactactattctccctgttaatataaaattataaaattgctacaactaattcagttaaatgtttattaaga

SEQ ID NO: 269060 - DNA, 623 bp, Homo sapiens
acggtggctcacgcctgtaatgccagctcttagggaggccaaggcgggtggatcacgaggtcaggagatcgagaccatgctggctaacacggtgaaaccccgtctctactataaatacaaaaarttagccgggcaaggtggcgggtgcctggagtcccagctactcaggaggctgaggcaggagaatggtgtgaaccccaggaggcagagcttgcagtgagccaagacagcaccactgcactccagcctgggcgacagagcgagactccatctcaaaaacaaaacaaaacaaaacaaaacaaactgaaaagagaattgctttggaaatgggcccaggtttggggaaaagttatattttatatattatttgtatgagttttgtatcactgtacgttttactttcaaaattaaataaaaagtttaagacaattaaaggaagcatctatgaattaataagaattctaaactttatttttcctatttaggaagtcaattgtggaaggaaatgtcatattcaacatcttaatgaggtaaaaagtgaatatttgagactgaatgtcagtgacttggctctgagaatatggttagtatacagggtagaaccctagggacttggttctggt

SEQ ID NO: 269061 - DNA, 603 bp, Homo sapiens
atatttattaagtagtagttgtttctgggcatagcaacattttaaaagcatgttttgcttcaacacttttcacatatgaatcaagtacatgattaatatacacaattcttcaaaatatttaaaactacacattaagcaacatacattgaacctgcagataaaatctcatcttttatttatatactatgctagaaaggagtgatgttgttaaataaacttccacgaattcatataaatgaaacaaattcatataaatgaaagcaaagaaatgaaacgccaaaagatgaagaaattgttaggacacaaaaaataaaggcatatatgtgatgatacattctctgacatgcacaaatgtcctttgaaataattaaagccagcctggcacagcggctcacacctctaatcccagcactttgggaggccgaggtgggaggatcctttgaagccaggagttccagaccagtctggaaaacgtgagacctcccttatctctacaaaaaagttaaaaaatcagccgggtgtgtgtggtggcaaacacttgtagtcccagctcctcaagaggtgagtgkgggggattgctagagccccagaggtcaaggttgc

SEQ ID NO: 269062 - DNA, 622 bp, Homo sapiens
aaatgaccatcctttgtccattgctctgtaatgccacctttttcataaattagatatctgtctatgcatagatctatttctgggcttcagtctatttcattggtctgtctaatcttgtgaaaataccataccattttaattaatatawctttacaataagtcttgatatctaacaaaatagaacctttcaccaagttctttcttttcaaaattgtcttgactattcttttatttctttaggagcatagggagtgctgggagggtttttctattttgtttttaattttttaaaaataaacatgataatattgattttttgaaagagtatagttctgtgaattttgacacaaatatagattcatataaccaccaccaccaaagtcaggatatagacagtcccgcaacaccaaaaaaaaagtctcatgctacccctttgtagtcatattctccctcaaccccaacccctggcaaacactggactgttctccattgacataactctttcttcttaaaaagatcatctacatggaatcatatagcatgtaacattttgaaattggcttctttaactcagcacaatgtctttgatatacactcaagcggctgtgtgtatcaatagttt

SEQ ID NO: 269063 - DNA, 647 bp, Homo sapiens
aatataacttgtagttgatctttcttctgtataggcactcaggctgtcccagcaccatctatttaaatgaccatcctttgtccattgctctgtaatgccacctttttcataaattagatatctgtctatgcatagatctatttctgggcttcagtctatttcattggtctgtctaatcttgtgaaaataccataccattttaattaatataactttacaataagtcttgatatctaacaaaatagawcctttcaccaagttctttcttttcaaaattgtcttgactattcttttatttctttaggagcatagggagtgctgggagggtttttctattttgtttttaattttttaaaaataaacatgataatattgattttttgaaagagtatagttctgtgaattttgacacaaatatagattcatataaccaccaccaccaaagtcaggatatagacagtcccgcaacaccaaaaaaaaagtctcatgctacccctttgtagtcatattctccctcaaccccaacccctggcaaacactggactgttctccattgacataactctttcttcttaaaaagatcatctacatggaatcatatagcatgtaacattttgaaattggcttctttaactcagcacaatgtc

SEQ ID NO: 269064 - DNA, 647 bp, Homo sapiens
aatataacttgtagttgatctttcttctgtataggcactcaggctgtcccagcaccatctatttaaatgaccatcctttgtccattgctctgtaatgccacctttttcataaattagatatctgtctatgcatagatctatttctgggcttcagtctatttcattggtctgtctaatcttgtgaaaataccataccattttaattaatataactttacaataagtcttgatatctaacaaaatagaacctttcaccaagttctttcttttcaaaattgtcttgaytattcttttatttctttaggagcatagggagtgctgggagggtttttctattttgtttttaattttttaaaaataaacatgataatattgattttttgaaagagtatagttctgtgaattttgacacaaatatagattcatataaccaccaccaccaaagtcaggatatagacagtcccgcaacaccaaaaaaaaagtctcatgctacccctttgtagtcatattctccctcaaccccaacccctggcaaacactggactgttctccattgacataactctttcttcttaaaaagatcatctacatggaatcatatagcatgtaacattttgaaattggcttctttaactcagcacaatgtc

SEQ ID NO: 269065 - DNA, 524 bp, Homo sapiens
ttaagtctttttttaaatgtcagttttctaaatgttatcagatataaactgtagggggtgcggggtgaaaagaatgacaaggtagggagggatctactgcgatgttgatggctaaggcgctacctctccatgctcctctgcttcattaatagcagcaacaggataatcagcaacagagggctccgtgtggaaactgatgagggctgctcaacaccttwcacataaaggtctttctggcagacagcgtttggcacggtttaggactctgagcttccaaagctgcctgcctctgtgccacctactgctgatttatttataaccatagttatttatattcagtaaataattaattgtgaacttcaatgaatcaatagctttttctaaaagattccattaggaggaaagaaaatttgcattcttaaagggtagttgacattttccgatgctctgagaacagtaagggaaaataatattttgaacatacagaattgtttttataattttcctgagtcatttgatgaatt

SEQ ID NO: 269066 - DNA, 578 bp, Homo sapiens
atcgttgcctccatttcacttaatgcctttaagaattccaaacttttcttctctgatattaacatactcttggatttggggcaattaaccttttgtatatcaaattaatggataattccatcacattttaaaaattctaaataactaatttaaccttgataagtattttgatgwatttaaagtgataataacttaaaattgatagtctcttgattttttttttttttttttcagcaaatggtagaaggtctgattagttggagaaggttgtattgtgttttgcgaggaggtaaactctattgtttttacagtccagaggaaattgaagctaaagtggaaccagctttggtagtacccattaacaaggtaaaggaaatgctattttgagaaaaaaatatacatcttaggaagtttgtttttgtctgtgcagtttacattgttgttgtcttataaataaaagagaagtactggtaaaaacaggttacttcataaatatgatttaatctgtttctgtttttctattagagcttatctgttataagaaaatgtatatttcctaagaaaacatagtaatggac

SEQ ID NO: 269067 - DNA, 547 bp, Homo sapiens
acactgctttttacttacagaaagtcttttagtgagaccttttattatataaattcacctaatttaactgttttgtttaaactgttttgttttgacaaatcaaggacataatacatcagtattataatgaatctattttggcttagaaaattaagtttttgaaatatataattttattaatgaaaaattgacatgcttttttcattacttgccaactttttattttgtttggtttatgcagtgttgtatttcctgtcgctttttcatactttagtcttttgaaaatttcagatggaaaaattgaaacagaataatgaacacctgtataccattcatctagacttttcagctgttgttaacattttgccacatttgctttctttctagttaaaatttttttctgaaccattttaaaatcagttgcaaacaacgtaacatttcttctctgaatatgttagcatatttctcctaaaaccaaggacactttttcrtaaccataatattattgtcatgctcaaaatgtttattgttgatacaatattatcta

SEQ ID NO: 269068 - DNA, 547 bp, Homo sapiens
acactgctttttacttacagaaagtcttttagtgagaccttttattatataaattcacctaatttaactgttttgtttaaactgttttgttttgacaaatcaaggacataatacatcagtattataatgaatctattttggcttagaaaattaagtttttgaaatatataattttattaatgaaaaattgacatgcttttttcattacttgccaactttttattttgtttggtttatgcagtgttgtatttcctgtcgctttttcatactttagtcttttgaaaatttcagatggaaaaattgaaacagaataatgaacacctgtataccattcatctagacttttcagctgttgttaacattttgccacatttgctttctttctagttaaaatttttttctgaaccattttaaaatcagttgcaaacaacgtaacatttcttctctgaatatgttagcatatttctcctaaaaccaaggacactttttcataaccataatattattgtcatgctcaaaawgtttattgttgatacaatattatcta

SEQ ID NO: 269069 - DNA, 578 bp, Homo sapiens
tatagcaatacctattaaatgacaagcaataattttaagacattgattaaatggcttaaagaactargcttaggagtatttggttttttaaccctaagaccatttcttcaacttcagcaattagtataatgagaacctggcagatacatggcacaaagctccaggctacaggcacataaaatgcaaaacagagaaatagaggaagacaatgagaatctgatcaagaataaagctccaaaataacagaattatcttatttgtacctcacgggtaaaaagagagaaatccctgtctttgtaatgatcctgtccttggatattttttctaatgcattcattagacatctgcatcattcttttaagctaaagtataaccactcatttttcagcacttcttaatcagttattacctctaggactggcaactaaagtaagtaatccctcagcaggctcaaatcctcttaatcatttcagatgctaagagtttacttatggcatcttcctatgaaattcatgatcatttctttacgaattcacacatgatcatgatcattaaaactggaaaggaataattatatt

SEQ ID NO: 269070 - DNA, 578 bp, Homo sapiens
tatagcaatacctattaaatgacaagcaataattttaagacattgattaaatggcttaaagaactaggcttargagtatttggttttttaaccctaagaccatttcttcaacttcagcaattagtataatgagaacctggcagatacatggcacaaagctccaggctacaggcacataaaatgcaaaacagagaaatagaggaagacaatgagaatctgatcaagaataaagctccaaaataacagaattatcttatttgtacctcacgggtaaaaagagagaaatccctgtctttgtaatgatcctgtccttggatattttttctaatgcattcattagacatctgcatcattcttttaagctaaagtataaccactcatttttcagcacttcttaatcagttattacctctaggactggcaactaaagtaagtaatccctcagcaggctcaaatcctcttaatcatttcagatgctaagagtttacttatggcatcttcctatgaaattcatgatcatttctttacgaattcacacatgatcatgatcattaaaactggaaaggaataattatatt

SEQ ID NO: 269071 - DNA, 583 bp, Homo sapiens
attgtgtggcacaaatcaatctcatgagttggtagccaggggagtgtttgaagacttttctcatcaggtgctgttaggcctccttccttataccagattcattcttcatgatgactaaagaacacattcacaagtgacaaatgaggagaacccaacctgggcctccattctgcccttaggctccagcccatctccctacaaaatgccagagcagactctctcttgtcctaagctagtccaggagaggcagattccctggaatctgctgaaaagaaacaaaaccacttggctgatgctggcaacaatgaagaaccctacctagtccagggaagaccctcctatctttgtcccccacaggaaaggggtctgctctcagatgccccactgccctttggaggattaagcagcaactctcttccttttggatactgggctgccctacatgaaggcaagaaaatgatattttagtaatatcayttagtaaactaaaatattgtaccaaaagaagtacaattaaaaaaaaaaaacatgagtgatgacctagtgaaagaacaaacaacaacatgaagaataaatattttat

SEQ ID NO: 269072 - DNA, 595 bp, Homo sapiens
tcccttccacctatgagcctataaagtcaatagcaagttagttacttcctagatacaatgggggtacaggcattgggtaagtacagccattccaagtggaataaatttgccaaaacaaaggggctacaggccccatgcaagttcaaaatacggcagagctgtcaaatcttaaagctccaaagtgatctcctttgattccatatctcacatccagtcctgcccttgactcctgtcaccaaggttgcagttgcaaggctttcaatttgaaatcaactgcttgttaaaacataggaatggacccatcctgttcaaagaatgtaggaatatgtgataactctcctaatagttatcagttcytaataggaactggagaatccttgaatctcatcagtttgaatgtggtaaagtatttatattcccttcaaaaatgtctgaaattttgagaaattcatcagtacttgcaagtgagttggagttttagcagcaagctatgtattttatccagagtcaaattttaagtttttagcctgggacctgggaaacatagtgaaaccttgtctgtataaaaaataaaaaagaattaaccaggtgtggt

SEQ ID NO: 269073 - DNA, 586 bp, Homo sapiens
tatcatcccttcccaagtgacagccatgacaaacagcctggtttgaattctattcaaccttaaatcaacttaaagaacaggtcatctcttatcttcttatcatccctatgaaactttcttatccagtattttgacctccactcatctcttctctatttgtgtaatatttatatagcgttccrtagagttttaggtataacttaaattgtttttaagagatgtatatttgtctgttctcattcagtggaaaataacctccattggctatagcattttttaatccctcagaatactaatctcagagtaggcagtaaatatatgaggaattgctgaagtgaggaatgagttaaccaataaaccaataatagtgttcagtaagtaatagttggacactttaaaaaaattttaatgaacatatagacatatatgtatatgttatatgcatgttataaacctcatttcccattcatattgttttgcaattttaagaaccataattcttcttgtgaccgcttttctggggccacttcatgcctcaagattagacaattataatatcattctctaactgtatgggctcctcagg

SEQ ID NO: 269074 - DNA, 529 bp, Homo sapiens
acagcaacctcaacccattagtgtggtgtttcctgttgcacaatgcctttaccatgattagaagtccaacacaaactcatcctcctacccacacacacaaygttagcagcctattcatatatttatgtacaaaacactttattttataggatccccttcgaagtcattattatctgagttaaaaaaaaagaataaaaaaaaaactaaataaaagggagaaacaaaaacacaggtaaaaccaacaaaaaatgcctcaagaataagatttgtcaggaaatattctctctgtcctagagaggagaaaattatggcagagagttgttttcataagactgtgaaacctgccagtgccagagatggcattgggtacagtagtcctgtcccatctgtttcactttgctatgaatttgagaaaaacactagccctggaccagacccacagaagacataagcaaaatgcacttgggatctgaaggtcagaaatgatgatctgatgtaactgaacttgacgcacctttgggagccatca

SEQ ID NO: 269075 - DNA, 623 bp, Homo sapiens
tcacggtgtcgtttcagtctgagtctgaaggcctgagaatgaaggaaagcagctagtgtgaagaccagcaggcccaagaccaaggaaaaccaatgtttctgtttgtatgtgaagacacacaaaaaaagccaatgtcccaggtcaagggagccagacggggagaattttctcatacttaggggagggtatagaactttttttccgtttgagtcttcaatggattagatgaagcttattgccattaaggaggaaaacctgctttactcagtctattgatttaaatattaatcttatccaaaagcatcttcacagaaacatccagaataatgttggatcaaatacttgggcacccagtgaagctgatgcgtaaaattawccatcacaacacatttatgaaggcatcaggaggaaaatcggtggatgttgaactcattctgcttaatcaatggagaacaccctggaaattccagagaaaaaggataagccttcacacagctatatatctatgtttcttctcatagtctgtattataagctgaaatttttagaagttcacttgttcgttagaacagaaagaaaaaaacatggtaacagtgacttaaaataacttttgcctacagtagc

SEQ ID NO: 269076 - DNA, 451 bp, Homo sapiens
cgtctgctgctatttccaaagatgcccaaatctataaatattaagctacattttggaccctaaccttgagaaagggcagctaycatttaatattgccagggaaagagaaaaggtgtaggggtaggcaaaggagagaaacaaaacaacacaaatgtcaaatctgattgattaaaaactaggtaggcaaatcagcaagggctggtccagcatcactggagaatgaggtcagaaagggctgtttcaaaattatttggtattttcagaaattgattactgagggagagcattaagaagtagctgtgaacattcatttaatgggccactgcctcttgtacagggctggagttgtcacattcagtctcatctactccttgttaagttgtgcttcttctggagcatgtttatttattacagatactgtaagcataaactacaaactagaataataaat

SEQ ID NO: 269077 - DNA, 495 bp, Homo sapiens
ttttttttctccttttcatcacaaccttttgctaaagctgtgcaaaatgtgtcatgcataaaaagtatgcaattttcatgtaattagaggaacacaagatgaaaatgagttccatcagagcaatcaaggatggtaatgtggtatgtatttgtcagtgcctatttgtcatgaaagcaaaacccaacaagttatatattttatttcattttaactctgaaaaatataaatgccattttgccatggccaaatctataaattkcaataatcctttctttttttttgaaaagtgaagttttggaactgcagattagatcattttactcttttaaagaatggaatgctattttatgaaaaacactgagattacaggacagatttattccatggagggtcagatttacagcaggaggtgataggtttacagtttgctatacaagaaacacactataatttattttctctgaaaatacacttgcatcttacagtagcatgtgc

SEQ ID NO: 269078 - DNA, 604 bp, Homo sapiens
tttttaaaaaaattagctgggtgtgttggtgcatgcctgtagtccctggtacttgagaggctgaggyaggaggatacttgaggccagaagtttgaggttactgcgagctatgatcatgccactgtactccatcctggtgacaaagtgagaccctgtctcttaaaaaaaaaaaaaaaaaccatcacagtacccctcatccattgtgaggattaaatgaggtaacatacagaaagcgtctgacagaacggtccaggcactagggaaccaaaaagcactcttgtgtgcacgtgcgtttaactccttttatcaatggcatgattttaaagctgtttcacccgagtacacagcagggaagccatccttggagagctgaacatgcacgaaaaggaaaaaaaaaaagcttcagggaaaaacacttgaaattttcatttatcagaaaggattttgaaatatctactgtaactttccccccagtctttaagataacataactcagtatggcattatgttggtaccaacagttgctctcagtggcatattttttcctgagaacaaatatatctgtggacatcatcccttttcagagcaaatattttgtaatgcc

SEQ ID NO: 269079 - DNA, 620 bp, Homo sapiens
cacctctcataattgcacaagatttcctcggagtagaggtgggtatctacttggtgatatctgtggaatggcctgcatcttttcgtctttctctgattgcaaggaaggaagtcagtaatggcttatagatgcgggaactttgcccagtaccctgacatcatgagtgcctccccttctgtttggtgcttatctgaattctctttgcacgtggaagtggatgtcatggcactggagaggctgcctggccagggcagcaagtaagggttagaattcaggaaaccagctcaacccagttttagcactgaaagttcagtgtcctgggaatcccttcatcgtgaatacactgggacaattggtcaacttaggccagagtgtggctgtggcaggaacaaggttttgctgacctggacaacaggagaaactaaaatcagaagaaaaggcaaaggaaatgtacaatgagagggatgccagccatctggcytgctgggtttgctgactggagagagggggacagtaaatcagttctgggggacaataaattagagttgatttgtaaatctttcacctagattccctaaatgggccgggcacggtggctcacacctgtattaaaactacaa

SEQ ID NO: 269080 - DNA, 631 bp, Homo sapiens
aatattttgttcagctgcatatagtgtccccgtagtttaatttggattaaacgccagctagttaaaatgcagatttcaggaaaactccacaggtggtccacactgggcctacattaccacagcagcccctttggtgggacacagtcctccaggtcccctgaggccttcacatggcccaaagcactgattcattttactggcctcgccctctaggcatttgggtttacaaccytgggttctcaaaaaacaactatctgtgaaagcattcagacctccaagggaaacttcagtcagggaagaaatcaacacccaaggagacactccctatcagagcctcagtactatgctctcctagttgtctctcaaattttttttctccttgatacttctgtaacttcaaggtcttcatcccagtgtactccttcctctactcaagacatcatctccccaaaaacaccattggtgatgatctgcatctaagggttttcaagaaacaaaacatctctctttttagcagggctacaaaagacacaccatgacctttatttcttgcctgattaccacccattaccatccactctcagtccatatggtttgggtgcgctgactccagtccatttctggggaaagg

SEQ ID NO: 269081 - DNA, 483 bp, Homo sapiens
atgaagagaaggttcacataaaaaatatcaggctggtgtggtggctcatgcctgtaatcacagcacctggggaggctgagaagggaggatcatctgagctcaagagtttgagacccacctaggcaaaatggtgataccctgcctctacaaaaaatttaaaaataagccaggcatgggggcctgtgcctgtagtcccagctactcaggaggctgagacaaaatgatcacttgggcctaggaagttgaggctgcagtgagcggtgatcatgtcactgcactctagcctrggcaacagaacaagaccctgtctcaaaaaaaaaaaaaaaaatcgatgacagtgagcatactgaaaatggtcagcctttggtgaggttgtggagaaaagggaacacttatacacaccgttggtgggagtgtaaattagttcaaccattgtcgaaagcagtgtgtggcgattactcaaattcctaaagacagaaatac

SEQ ID NO: 269082 - DNA, 599 bp, Homo sapiens
ttccccactccccctcccagccaaatagtgggttgtttaatagaatctcgttggagtttctgtaaacaggtttgcacttgtggctcttgcatgggaaggctttctgggattgtgatatttaaaaatggtttacaaatggtggggcacggtggagcatagctgtaatcccagcactttgggaggctgaggaaggcaggtcacaaggttgagagatcgaggccatcctggacaacttatggtgaaaccctgtctctactaaaaatacaaaaattagctgggcatggtggcgcatgcccgtagtcccagctactcaggaggctgaggtaggaaaattgcttgaacccaggaggtggaggttgcagtgagcagagatcgtgccactgcattccagcctsgcaacagagtgagactccatctcaaaaaaagaaaaaaaaatggtttataaattaaacagtatgtcaccacccttccctagcctctcaaagattagcagatgtgcctgcacatatattttttctttgtggggtggggggtgggcggagtttttgtttttaaatattagaatttaatatgaattttgttattgcaaaccacctcaa

SEQ ID NO: 269083 - DNA, 576 bp, Homo sapiens
tgacagcctaagaaataccccagaaagtctgcttcctacactggtcattatgtcatttaatattcttttaaaaaagtaaaacaactctcatttggcaaatgccttttagagttaacagatacagtagaaaggccatagtttttgtgactagggacctggactggaatcctggctctccatacactagtgacactctgtcaagtggaggaatcttatttcttaatggagatagtaacaccttctttgaagggtgttatagcaattgcagaattcactggatgtttacaatgtgcaatgcaccctgctagagctttataagcacctcactaaattcttacaacaaacttatgagccagggattattagccccaccccatctgctttccaagtgcacagataagggatcacctgtattgcattaggtaaattacctggaatctccctgctagttagggagggaggggcaaaggtagtgtaggtgaaagctcctaggagttactgaatgggmgccaaaggatcatcagctaccttttcctgcttctcttaaatacctgaaatcttcccttttgaatgaca

SEQ ID NO: 269084 - DNA, 564 bp, Homo sapiens
atatacacacatacatataaacatatatgtttatttcttttcattcytcttctataaatggctgtttacaactttctctaccctcttcaagcctctttctcattctgtcttctttatattcagcagaagacttgcaggataactcactaaccaaatcaaagtcatctttcttttttcaattcttctatttataaaggttactagcaactagttaacaactacagtataattattatactataaatattattgaagattttttctcttttgtattttagaagctctttgaactttataacccaagaccaagcacagcatctgctatgttgttgatgctcaggatatattttttaatgaataaatgattctctcttttatctaaatataatccacctggtagatatatatgtggcatatatatatatatatatatatcatatatatatttatatatgaacacacacatataaacctgtatgtgtatactgtcagtggtattattaattagtacagccattttggaaaacagtatggagatttctcagaaaactaaaaatttattta

SEQ ID NO: 269085 - DNA, 527 bp, Homo sapiens
ttccaagtgttatttaaggagagtctaagaaaactttctgaagtgttttttacttttctgtcagcattaggtactacatatagtacataatgttgtttataaacttaattattactgtatagttttcatcactgattaaaatttctctggaagtattaggtttcasaatttagataaagaattaattaatcttgaaatagaaaagtggcaaatcataggtgacatcagtagttttcagttttctctaattaatttttcttttccaagagccaactactaacaatccaggagtctacagcttcatagccaggcactttcttaaatgaaatcaattcctggcctcaagcctggtggataataaaatgtccgaagcagcacatttaaaaaagagatttgaaaaaaggaaggagctggaatctcagcaaagcagaacaatttatttgtaagaattgatcatcgactgctacaaacaggaaatgaatattggagtccaatgctttggaaatccacagcaagctcagctcttc

SEQ ID NO: 269086 - DNA, 649 bp, Homo sapiens
atttatttttaattatagcatctcacaaagtcaagagaagttggaatttgccttgctgtgacatttaggagtccccaactcagttgtagtttgcttattttgggtgagtactctcatcaggcatgctgtccgcaggggctgaccatttgtggtcatctcacgtcctgtgtttgcttggctgcagcaagaagcaggctgctgcaaccgctggtcatttgtatctgtttggaagattcaacaggagagggaggcttgcagaaaacaagcttatgagatgagggtgcattgctgagctctgcaatattattttcttgcaaacttstgtggttcctttacctctctggtcctcatttttcaaatgtggattttaagttacagctaaaacaggtgatttctaagaattttgagataaaataatcaaccttttgattctagaagcatccatacctgagccttgccaaagggatgctattctgttcaaaatcctgcaaagtgaagtatttcccagttctccctttctgtcttcccatggtaagccatttctggagttagcaagtcttgtcataagcaaggtgctttcttaaacattctctaattagcactctttctttataatcttttatttataatctttagaaaggccaatcct

SEQ ID NO: 269087 - DNA, 504 bp, Homo sapiens
atgacccaggctaccttcttcactgttttggtgtgaaggctgcccatcttggcaggtccttggtaaaagaggccaaactctttatagttaaaaatttactttgctcatcttacagccttttacatctaaatatagtttcatcaagtaacattcttacaattatattcattttttattaaccctcattttgaacagcaaattcactttactagcatactgaggcartcaatgacataatttggattttgcagtgattaaatagaggattggaagaacattaagaggggaaagagcaaatcagtaaattttaaccttaggaggtagaatgctcagcaagaggcctgggatatgtagctttcagggttcagttatgaattcaattatgcaccccataattcttcatctaaatcattagcttacagtctcaattgtcatcagacacagcaggcatttggaacttaggtgctttggggagaagagcagacatggtctttccatttggcc

SEQ ID NO: 269088 - DNA, 285 bp, Homo sapiens
ggtgactagacaggtgtttgatgatccagttattgcccctccacagaagtttcctgaatggaaaataaaacttgtgggcaacattcataaaatttgtttttatagcattataaaagtacatgttcatgtaacaaataataaaacatatataaaataaaatttttaaagccactcctcawctcccttccttcccccacctcctcatacccaattcaaatggctacaaagattgctattatcaagagattgatattatcctttcacacatttttctatgcacacgtg

SEQ ID NO: 269089 - DNA, 599 bp, Homo sapiens
acaagtgggagcatagtgaatgttcaattaaatacaagctgaagctgctacctgatgattttaggtttcttatgccagcagaccaacaggcaaataaaggaatgactatactgccaggagtagttgacctgattgttacatagacaccatgatgctgtaacatatttgggcagtgaaaagtatttcaggactcagaagatttagtaggttgcctcttgctgctttcatttgcaatgataatcgtaaatgagaattgcagtaaacaaggtttgacaagggcacagtgaccaggggctcagatacctcatgataaaggtctgggatacccaccaaacatgcaatctagrataacagaataatgttcaagggtgagaaaaatctagaatgagtgccaaaaacagagaataaatacctaaaatagtagcttgtcccatgaagtttcctgacttataagtaatttttcttttttttcccctagaaattttgactgtccactagcctaaagatgaagtgatagctcttagtaatataaccttggcatgtgagtagatctgaacaatgcaagatgtggacattagcagaaactgttggcactcgtc

SEQ ID NO: 269090 - DNA, 611 bp, Homo sapiens
cacttgtaagaattgcaaaaataacagtgtcaagtttcaaccagagacaaaatgtattataatctcttctacttctacaggtgtgggcactgttcttttttaaagagctcccctgtgagggaatgttgataataactgacaacacaatggacataattcaaattaatcagcagagttgttaccttccttgaaggatgagatcagagaaaccttaatcagaaaagaccctacctacatggggtcacttcacaatttgcaccaatactgtacaactatcaaggaccaatgagattagaagttaaatctctcaatgaatataagaataagtattggctacaattcctaaaycccagcaagagtcaaaacattatttcaattaagtttactcagaagttatgccaaattcaaagccaaaatgttctattttatatcatatttcaatatttgcctaatcaactattgtccacccaaacttaccagcccagaataactcaaatcaataaataagtaaatatcaatgatataaaattcaccatacttgcttttactctacagataaataactatttaaaacacttaataagatgtcagcagcaatggcagagtaagta

SEQ ID NO: 269091 - DNA, 611 bp, Homo sapiens
cacttgtaagaattgcaaaaataacagtgtcaagtttcaaccagagacaaaatgtattataatctcttctacttctacaggtgtgggcactgttcttttttaaagagctcccctgtgagggaatgttgataataactgacaacacaatggacataattcaaattaatcagcagagttgttaccttccttgaaggatgagatcagagaaaccttaatcagaaaagaccctacctacatggggtcacttcacaatttgcaccaatactgtacaactatcaaggaccaatgagattagaagttaaatctctcaatgaatataagaataagtattggctacaattcctaaatcccagcaagagtcaaaacattatttcaattaagtttactcagaagttatgccaaattcaaagccaaaatgttctattttatatcatatttcaatatttgcctaatcaactattgtccacccaaacttaccagcccagaataactcaaatcaataaataagtaaatatcaatgatataaaattcaccatacttgcttttactctacarataaataactatttaaaacacttaataagatgtcagcagcaatggcagagtaagta

SEQ ID NO: 269092 - DNA, 563 bp, Homo sapiens
ctaggtggaggttctcaaaccgcaattattgatgtctgtgtacccgcaggctcaacatcaaatggaagctgccaaggcttggggcttccaccctctgaagccacagcctgagttctatgttggcctctttcagccatggctggagcagctggaatgcagggcacaaggcagcacacaacatgaggaccctaggcccagcccacaaaaccattttttcctcctaggcctttgggcctgtgatggaagaggctgttgtgaaggcccattgacatgccctggagacattttccctrttgtcttggggattaacattcagctccttgttacttatgcaaagttctgcagctggcttgaaggcttgaatttctactcagaaaatgggattttcttctctattgcattgtcaggctgcaaattttccaaacttttttgatatgcttcccttataaaacctaatgccagccaggcatggtggctcacacctgtaatctctgcactttggaaggctgaggtggcagatcacttgaagtcagaagtttgagaccagcctggccaacatggtg

SEQ ID NO: 269093 - DNA, 631 bp, Homo sapiens
ttggacacagtcttaatagcgagttagttagatggttaactaggttcaaacccctccccaatcaccatagtagtctagaacaaaaagctctccaattaggaataatcagaacagggctgcaacactatgcaacttgtaaacatagccatacctgagacaatacagaaatggttataggacattagaaaggaaaagcatattaataattttacaaaaatcatacatagaatggatgactattgcagattcagctatttgtaagtaatcccaaaggatcagaacatgtaaaattctgatttatttgctgtttggtgaaccaaattcaaatagcagcaaagaaattgcagtgtataatttactgaaaaataccaatgaatagattgacagtgacacatgtgaagtgggatttgaaacactgaacacagattataccaagaggttgttttacattggaaaaaataatctgtagttaagagagtaaattcaggagttaaaccaacctactaccttcatgacgtctacaactaatttttctatctartgaggggagaagagcaatcctctttcctagagttgttttaagtattaaacatggcagatgaaaacattctcaatagttgctgacagtaat

SEQ ID NO: 269094 - DNA, 599 bp, Homo sapiens
aaaaataatgtcgacccagtaagaacaagcacacctcgtgtccatctcctggtttataatactattctttaataatagaaactagggctcctcatctcattctagggctaggaaatatacaaaatgagtctggagcatcttgtaggcattaccagaaagtgagaacatttttaaaaacaaatcaacaaacacttcaatggtggaatatgtcagtgtgacacagagccaactctagagctcttaatggccaatgcaggaaaaatctgagcagaaattgaaataatattgaattgtaaccaagtataaaataaatatctaggagttcatatggagataaacaaataactgagtaaataagtaagtgggggaagagggrtatcttacgcagaatctttcaaataatacatgtagatgccctgtcctcaaggaggtagataatagtaccacattctgtaagtgtggactgtgtatagtgacttccttccaaaaaggacagtttgaaaagagggaggaaatggtaaccttgtagtggagaaacctgacgaatactatctcacccaggtgatcaatgacaacatcaagagtgataagtcatgtag

SEQ ID NO: 269095 - DNA, 599 bp, Homo sapiens
aaaaataatgtcgacccagtaagaacaagcacacctcgtgtccatctcctggtttataatactattctttaataatagaaactagggctcctcatctcattctagggctaggaaatatacaaaatgagtctggagcatcttgtaggcattaccagaaagtgagaacatttttaaaaacaaatcaacaaacacttcaatggtggaatatgtcagtgtgacacagagccaactctagagctcttaatggccaatgcaggaaaaatctgagcagaaattgaaataatattgaattgtaaccaagtataaaataaatatctaggagttcatatggagataaacaaataactgagtaaataagtaagtgggggaagagggatatcttacgcagaatctttcaaataatacatgtagatgccctgtcctcaaggaggtagataatagtaccacattctgtaagtgtggactgtgtatagtgacttccttccaaaaaggamagtttgaaaagagggaggaaatggtaaccttgtagtggagaaacctgacgaatactatctcacccaggtgatcaatgacaacatcaagagtgataagtcatgtag

SEQ ID NO: 269096 - DNA, 480 bp, Homo sapiens
ttttagtagtgaatgtatatttttaataacatagtttaaagtttttcttatatacttcagtgcccctacaaaataaaatttttgaaataaattacagttttctctttttgctgtattattaaattctaacattagtaatcatattgtcttgtaagttagccatattttggggacctataaaaatggctgagtggctgtaacagaaatggtttcaaattgctgtacctttgctattctttttgtctgtttattcatttctttttctttgttggaaattatcagtttattgctacatgtgtttgattttatactaattctctctgctacttctttataatttgatagcatacaaacatcttaagtacctatgcatctaagagatggggtaatctctgatgattaaaagaaaacaatcattgtcactgatctcamagaatacaatctattttaggtgaaggatatatacaaaaacaatacatt

SEQ ID NO: 269097 - DNA, 506 bp, Homo sapiens
gaaatattattacacataagttatgtgcttgtttagtatctgggaattattttatactttcatatataattatgaagagaaatgactcttgacttttgttcataaatataaaggaaatatacctgtatttactttatctacccacattgaaagcttttaccaccagaaatcattcttcttattttttgttataaatattgattgcttgactcacaaatggtatgaatagaaaagtgtattctacactgtgaccttataattccataaagcaatgccaaagttttcaacaactgttttgtagaaatgtatgtgagaatgtgtaatgyatttcatttggtgattgactgaaaaaaagtacaattgtttatttgaaatttcatttcagtgaccatcaaaaaaaattgtaccatgactaaaggtttagtttgctatagttcttcaagccatttttatttacataagcatcttcagtcctgaaatgacttttgacatagaacagactggtg

SEQ ID NO: 269098 - DNA, 633 bp, Homo sapiens
gcctctagagagagaaacataggttaagtacatttaactgagtgaaagtacaaayggggatagaaggattttcacagatcatagccctgttaccaccagaaataggagtgcgcagaaagcaggggcctcagaaggactttggatatctaccgaagagaaatctgcagaaaagatagcaaaacgggccaaagtcagcatagaggagaaaaaacaaacaaacaaaatacaaaccaacaaacaaaaaacagcctactttctgattctgcctagactgcccctaacctaaatgaaatctattcattttttacccttgttttaatggtgagatatgaaaagcggcatgctggagagagaaatgagtagtcatatgtcaacagcaacaatataatttctggaacagcctcctgtgtaatttctaaagataattagattgcaaatcctcctcaggaagaagaacaaaaagagtacagttgagttttcaggttttttgataatttttttcccatatgtccttgcaaacttaaagaaaaaagaatagtttatgttactttctaaaaaactataattccaacttgtagataagtctctcttcctctatttatctatacttcctatttgttacagctaaaaacc

SEQ ID NO: 269099 - DNA, 627 bp, Homo sapiens
cctatcactaaaacttaaaatatatgtctcctattctattgaaaatagggaaatcgagtaaagctacaataattagatctggacgtggagaaaaaaataatttataaatatattgtttcttcattattttaaaataaatgttactttcctatatttttaaaataattattactcgtctatctttggctcattccctgaaacrcatctgcccaatacttccatcatatgtaattgttaataatcagtgtcttctgtgatgggtagcattatctctgcagtgtttgaatgtgagagagatgacaaagtgatcatcttgcagctcagtattgattatacatctgttctttataccacgaataaattgcagtcccacctggcaatatctctattattgtcattctaggtaccagaaatccaatatttcgattctgaataaatcaattccactttgatttctgggtgttaggatggtattttagctaatctaacaaaataaatcacaaaacatttttgttttgattttccacttttaattgttttgttttgctgcttatcaagtttcctttgaccactgcattcttacctagaccaaatgagaaattagagagataggaagacatgaagaca

SEQ ID NO: 269100 - DNA, 627 bp, Homo sapiens
cctatcactaaaacttaaaatatatgtctcctattctattgaaaatagggaaatcgagtaaagctacaataattagatctggacgtggagaaaaaaataatttataaatatattgtttcttcattattttaaaataaatgttactttcctatatttttaaaataattattactcgtctatctttggctcattccctgaaacgcatctgcccaatacttccatcatatgtaattgttaataatcagtgtcttctgtgatgggtagcattatctctgcagtgtttgaatgtgagagagatgacaaagtgatcatcttgcagctcagtattgattatacatctgttctttataccacgaataaattgcagtcccacctggcaatatctctattattgtcattctaggtaccagaaatccaatatttcgattctgaataaatcaattccactttgatttctgggtgttaggatggyattttagctaatctaacaaaataaatcacaaaacatttttgttttgattttccacttttaattgttttgttttgctgcttatcaagtttcctttgaccactgcattcttacctagaccaaatgagaaattagagagataggaagacatgaagaca

SEQ ID NO: 269101 - DNA, 552 bp, Homo sapiens
aaaaggaaatatctaaaattaataacctaagcttctaccttagaaaactagagaagaaagaactaaataaatccaaattaatcataagaaaataaataacaaaaattagaccacaaatcaatgaaattaaaaacagaaaatcaagacagaaaattaaaaaaaraaaaaccctccaacatctggttctttgaaaagatcaataaaattaacatggctcttgccagtcttactgagaaaaaaaacagagaagacaggtaactatataagaaaagaaagaggaggtgtccctatagattccatggaacctaaatagataataaagaaagataatgatagactctatgcccgcaaattgggtaatctagatattatggactaattatttgaaagctataatctgccaaatgcacacaagaattaatagacaattaataaataattaataaccttctaaaagataaagtgccaaatcatcaaattatcagatgaggtatcagagaatgagtggagcagaagcatggtagctatttcagattatgttgtcaggagagg

SEQ ID NO: 269102 - DNA, 675 bp, Homo sapiens
ggctacaataacaaaaataccatagagggggtggctcataaatgacaggaaagtatttctcatagttcctcataacaaggatgccggttgttgctctcaaagacaacagagatttggaaggaagagactagaagttccaagctcaaggtgccaatagatttggtgtgtggtgagtgcccaactcctggttcataatcggccatctttttgctgtgacttcacaaagaggaaagaaaggggaaggatgctttctgggggtccctttcataagggttataatcccattcatgagggtgatacccccatgacctaattatctcctaaaagccccatatctcaataccatcattttggagataaggtttcaacatatgaattttggggggaattagtctatgtcatactctgyatatgttttaattctgcatgcactttgagatttcaacttatgatctacttcaggaagtttaaggcacttaagcaagaagcagaggtaaaagaaagccccactagttactgaattttttttaaatccataactatttttccttgatcggtcaatatttgtcagaagttgcaaatatggttactgtatttttgttacatgtcttactccaattcagtcttacctttctgttttactccactgcataggtttaagcaaaaatgctatgc

SEQ ID NO: 269103 - DNA, 675 bp, Homo sapiens
ggctacaataacaaaaataccatagagggggtggctcataaatgacaggaaagtatttctcatagttcctcataacaaggatgccggttgttgctctcaaagacaacagagatttggaaggaagagactagaagttccaagctcaaggtgccaatagatttggtgtgtggtgagtgcccaactcctggttcataatcggccatctttttgctgtgacttcacaaagaggaaagaaaggggaaggatgctttctgggggtccctttcataagggttataatcccattcatgagggtgatacccccatgacctaattatctcctaaaagccccatatctcaataccatcattttggagataaggtttcaacatatgaattttggggggaattagtctatgtcatactctgtatatgttttaattctgcatgcactttgagatttcaacttatgatctacttcaggaagtttaaggcacttaagcaagaagcagargtaaaagaaagccccactagttactgaattttttttaaatccataactatttttccttgatcggtcaatatttgtcagaagttgcaaatatggttactgtatttttgttacatgtcttactccaattcagtcttacctttctgttttactccactgcataggtttaagcaaaaatgctatgc

SEQ ID NO: 269104 - DNA, 536 bp, Homo sapiens
tatagttactaaatacatatattctcccagtatctacctaaagtacagtttctctcaggaaagaatgccattgcatatctcttttaaaatatgtgactgaattcaattattgctactaactccctcagtcaataccaaggagacattattaaaggcaatattgttaaatgataactatattgatttgatagtcctcaaggatgggtactttcctctcagtcattcttcaaactgaaatacaaatacaatatttctctaactgagcttcatccaaccaagtattacttcatgcagtagctagaaaggaatagtcagtaattaataatgtcactgttcttatgtaatatcttctggcagaagattaagacatgcttgtaggtatattggtagatttggtggtgatgacaaagactaaaattttatcacatgtttatcatgtgaacatacaaaatagtatcatgaaaaaaacttttgaagstttaagtccttataactgatctcttaatagagttcaaaccttataaaaaatagaaacc

SEQ ID NO: 269105 - DNA, 592 bp, Homo sapiens
actgtaggaatgaagctaaaaatgtagggagatattcgggaattaaaatgaaagaatttgttataggattgaatgaggtgcacaagtaccgcagagctatccggggtgactatgtggtttctagctttagcaaatggattgagaaaatggagggtgatgtaattcagtaggagagggaacaatgaagaagaactcaaggagatcttgattatctgttttacgtatgttaaccatgagtcatcttgcaggtatcttgcarcattaaagttctgaggtgacatctgggataaaaatgtaaatttgtgagttatcaaaaaacatgccaaaggatgaaaattgctttaaaacaggaagtatgctttttagtataattcctgtttcaaagcgattttcatccttgggcatgttttagggccttagaacaaatctttaggaaactgagcattaaaaggctggataatataggtcagagcagcaaaaggatatggggatgagagctcaaattggtaggaagaaacctagaaatacattgccatagaaaaataacaggttgccaaaggagaagtaaacaattatgaaagttgctgaaaaa

SEQ ID NO: 269106 - DNA, 620 bp, Homo sapiens
aaaatatgttcacttttacagaaataacttaaaaatataacaataatcacaagatgaacaggaaatatacttccagattatctatgaaaactyacgaggcttagatgcataatataaatattccccatttcccaccacttgtgtgactgcttgattaataatggtatatgttcaatggtagccttcctctgtcctgtgtttttatgatttgtctgctcagtggtgaccactgctcttagatgtgtatttaaacccaaattcgatgatcatgtagaagctactgctgacatagctactaatcaataacatcccgatgttgctgtatcaaccatttatctattcaataatatttacagaacatctacatgttctagacaaataggaataaaaatgtgtctaccctcatggagcttatattccagtgagggatatatacagtaaatcagtaaatacttgctatacgttaatgctacatagaaagtaaaatataggtaagcaaaagtttatgatgggaatgttgggagcccttttagactgggtgatatggtaagccttgctgatgaagtgacatttgagcaaagacctgcatgaagtgagggagaaagaatatcatatacata

SEQ ID NO: 269107 - DNA, 620 bp, Homo sapiens
aaaatatgttcacttttacagaaataacttaaaaatataacaataatcacaagatgaacaggaaatatacttccagattatctatgaaaacttacgaggcttagatgcataatataaatattccccatttcccaccacttgtgtgactgcttgattaataatggtatatgttcaatggtagccttcctctgtcctgtgtttttatgatttgtctgctcagtgrtgaccactgctcttagatgtgtatttaaacccaaattcgatgatcatgtagaagctactgctgacatagctactaatcaataacatcccgatgttgctgtatcaaccatttatctattcaataatatttacagaacatctacatgttctagacaaataggaataaaaatgtgtctaccctcatggagcttatattccagtgagggatatatacagtaaatcagtaaatacttgctatacgttaatgctacatagaaagtaaaatataggtaagcaaaagtttatgatgggaatgttgggagcccttttagactgggtgatatggtaagccttgctgatgaagtgacatttgagcaaagacctgcatgaagtgagggagaaagaatatcatatacata

SEQ ID NO: 269108 - DNA, 620 bp, Homo sapiens
aaaatatgttcacttttacagaaataacttaaaaatataacaataatcacaagatgaacaggaaatatacttccagattatctatgaaaacttacgaggcttagatgcataatataaatattccccatttcccaccacttgtgtgactgcttgattaataatggtatatgttcaatggtagccttcctctgtcctgtgtttttatgatttgtctgctcagtggtgaccactgcycttagatgtgtatttaaacccaaattcgatgatcatgtagaagctactgctgacatagctactaatcaataacatcccgatgttgctgtatcaaccatttatctattcaataatatttacagaacatctacatgttctagacaaataggaataaaaatgtgtctaccctcatggagcttatattccagtgagggatatatacagtaaatcagtaaatacttgctatacgttaatgctacatagaaagtaaaatataggtaagcaaaagtttatgatgggaatgttgggagcccttttagactgggtgatatggtaagccttgctgatgaagtgacatttgagcaaagacctgcatgaagtgagggagaaagaatatcatatacata

SEQ ID NO: 269109 - DNA, 682 bp, Homo sapiens
tgatgtccagaattaggcagagttaaactagctgtcataggcaatgctagaccaagaaataatacttgcttcctgtaggcatgtagcttcccttagcttttggctgacattacaggaattcatatcaaagtttttaaatctcctcatttagaatctatagtgtacattgtyattttgtcaaatatcaactgatttgtgtagggatttttaattaaaattatttcatagtcattatctctttgatggtagcataatttatagtagtacccctcaaaatgtaaatccatcaatatcatcacatctaaaactttaatattttcatataagtttatttcataattgtactttcgttaatgaagtgtttgtcatctctattctttttgccctcggctaatggagtttaaaagacactgatacatcacagcatcattagcctctaggtgcttgctagttcattgccttattgatgaagtcaccttaggataaggactccataactatacctcattggatacgtacaggatgagtctgccttttgttaaattccaatatataatagactagtttatcacacatttcctgtgtgtatctctttaatgttacatgttcttttataacaaaccaattttactgcatatttttgcttatgttgtgtcacagaaattactgctgcctggcaaaa

SEQ ID NO: 269110 - DNA, 682 bp, Homo sapiens
tgatgtccagaattaggcagagttaaactagctgtcataggcaatgctagaccaagaaataatacttgcttcctgtaggcatgtagcttcccttagcttttggctgacattacaggaattcatatcaaagtttttaaatctcctcatttagaatctatagtgtacattgttattttgtcaaatatcaactgatttgtgtagggatttttaattaaaattatttcatagtmattatctctttgatggtagcataatttatagtagtacccctcaaaatgtaaatccatcaatatcatcacatctaaaactttaatattttcatataagtttatttcataattgtactttcgttaatgaagtgtttgtcatctctattctttttgccctcggctaatggagtttaaaagacactgatacatcacagcatcattagcctctaggtgcttgctagttcattgccttattgatgaagtcaccttaggataaggactccataactatacctcattggatacgtacaggatgagtctgccttttgttaaattccaatatataatagactagtttatcacacatttcctgtgtgtatctctttaatgttacatgttcttttataacaaaccaattttactgcatatttttgcttatgttgtgtcacagaaattactgctgcctggcaaaa

SEQ ID NO: 269111 - DNA, 472 bp, Homo sapiens
acggccataaaaatgaacaagatcatgtcctttgcagcaacactgatggaactagaggacattatcctcagtgagctcatacaggaacagaaaaccagctaccaygttctcacttttaagtgggagctaaacatcgagtacacctggacacaaagaaaggaagaaacagacactgagacctactggaggatggagggtaggaggagggtttcaaaaaactttgtattagttactatgcttattacctggattatgaaagaaatctgtacacaaaactctgatgaaacacaatttacctatataacaaacctgtacatgtatccctgaacctaaaataagttaagaataaaataaatgtgatgttgcattctacaaaacatttcttactctgcataattatagaataaatataaataatgctaattatatcagaaaattacatatatcatactttagtaacagattagtctat

SEQ ID NO: 269112 - DNA, 378 bp, Homo sapiens
tgcatgccacccaatctgagccttgctctagcctcgatggcagccttgcctctgccaggagggtacactgcaggaagggaagaggatgacaaccaatcwctgtaggaaggagaggaagggtccccgtgcaggtgggtgttcttaccagagagcccagggagttgtaaagttctccttcccctgtggcatctggcaagcaggaatgctaccagggtaggaaacaagtcaagtagcagggaaagaggaaaggagaggcaaaagagacagacccaaggtaagagagaccagcacctagagataaaggctgcatacaatcccttgatccacaccttctacccctatttacccatctgtgagatcttgggtaagttaccttcc

SEQ ID NO: 269113 - DNA, 610 bp, Homo sapiens
ttacttattatcacattttgacttaaattgcccttagctgtatatactcctttagttactttactgagggccttctagtgccggaacttacgcattctcaaagacctgggaagacaaaacaatcaatttattctcaaaggaaaaacaaaatgagatcatcgtcaatggggtttatatgcaggcaagaagtaacaactagggcttcaaaycatataacacgagaagctaaccactatgcttgcagaaaagcacagccttggtatttacctggagagttctatccttgtaacactacagaaggatatgttaggattagagaattttagcactggacaaaactttaaagttttaactgtaagaaaaactacagagaagtgacttgcacaagttcacagagtaagtgactattagagttgaacccaggtcttctgactcctaaaggcttcacacctatttcgcaggcacagagtagccacaagcatgtttttcttctttctagtagtttcaccacaatgtgaaagaccagctctgccctgagagtgccaatgtcctttcccacacttcttagatgccttcctcttcctgaaccccagaagaagagggcacctga

SEQ ID NO: 269114 - DNA, 610 bp, Homo sapiens
ttacttattatcacattttgacttaaattgcccttagctgtatatactcctttagttactttactgagggccttctagtgccggaacttacgcattctcaaagacctgggaagacaaaacaatcaatttattctcaaaggaaaaacaaaatgagatcatcgtcaatggggtttatatgcaggcaagaagtaacaactagggcttcaaaccatataacacgrgaagctaaccactatgcttgcagaaaagcacagccttggtatttacctggagagttctatccttgtaacactacagaaggatatgttaggattagagaattttagcactggacaaaactttaaagttttaactgtaagaaaaactacagagaagtgacttgcacaagttcacagagtaagtgactattagagttgaacccaggtcttctgactcctaaaggcttcacacctatttcgcaggcacagagtagccacaagcatgtttttcttctttctagtagtttcaccacaatgtgaaagaccagctctgccctgagagtgccaatgtcctttcccacacttcttagatgccttcctcttcctgaaccccagaagaagagggcacctga

SEQ ID NO: 269115 - DNA, 610 bp, Homo sapiens
ttacttattatcacattttgacttaaattgcccttagctgtatatactcctttagttactttactgagggccttctagtgccggaacttacgcattctcaaagacctgggaagacaaaacaatcaatttattctcaaaggaaaaacaaaatgagatcatcgtcaatggggtttatatgcaggcaagaagtaacaactagggcttcaaaccatataacacgagaagctaaccactatgcttgcagaaaagcacagccttggtatttacctggagagttctatccttgtaacactacagaaggatatgtkaggattagagaattttagcactggacaaaactttaaagttttaactgtaagaaaaactacagagaagtgacttgcacaagttcacagagtaagtgactattagagttgaacccaggtcttctgactcctaaaggcttcacacctatttcgcaggcacagagtagccacaagcatgtttttcttctttctagtagtttcaccacaatgtgaaagaccagctctgccctgagagtgccaatgtcctttcccacacttcttagatgccttcctcttcctgaaccccagaagaagagggcacctga

SEQ ID NO: 269116 - DNA, 579 bp, Homo sapiens
cctaagtgattttatcccattgcaaggcttagataccatttgtgtactaattacagtcacatktgtttccaatacaaatgtttccttaaacacaatagtattatgaaaaatatctatttcatattttcatctatgagtcaaaatatccaaaatggatttcctgactttctacctcccactcccatctgctccttcctgaggcttccctgtgtaattaaccatccaatctaccatccacccagctggttaaagcagaaacctacgaatcattcttatttctccttttttttctcccaccctgacctctcctgaatccaacgttagtaaattctatcagactaacacccagaagataccttgaatcagctcttattaccttttctgctaccattctgatcaaagctgtatcatctttcagctgaaacactgaaaaagctcctaactgccattcctgtttccattctttcctttctttcttcatctttatacagtctccaggttgatttttaaaaaaacatacagcatatcactaccctgcttcaaacccttcagtgcattctattcctcttaaaatgaatt

SEQ ID NO: 269117 - DNA, 579 bp, Homo sapiens
cctaagtgattttatcccattgcaaggcttagataccatttgtgtactaattacagtcacatgtgtttccaatacaaatgtttccttaaacacaatagtattatgaaaaatatctatttcatattttcatctatgagtcaaaatatccaaaatggatttcctgactttctacctcccactcccatctgctccttcctgaggcttccctgtgtaattaaccatccaatctaccatccacccagctggttaaagcagaaacctaygaatcattcttatttctccttttttttctcccaccctgacctctcctgaatccaacgttagtaaattctatcagactaacacccagaagataccttgaatcagctcttattaccttttctgctaccattctgatcaaagctgtatcatctttcagctgaaacactgaaaaagctcctaactgccattcctgtttccattctttcctttctttcttcatctttatacagtctccaggttgatttttaaaaaaacatacagcatatcactaccctgcttcaaacccttcagtgcattctattcctcttaaaatgaatt

SEQ ID NO: 269118 - DNA, 442 bp, Homo sapiens
tgccccaaagggcacctgacatccactgatggtctataagcatcaatgtttagagaatccagttttctgtatcccaaagggatcattagctataaatgcttgaattttagaaacaatagcaaggaaatgtattcactttcattttgtctttttcctttcagctttgatgaaatggctaaatatgaccttccagccacaatcgacttcattgtaaagaaarctggacagaagcagctacactatgttggccattcccagggcaccaccattggtaagtaatggcagtcaaggccaagtggtttacttctcataaacactttcccagtggttatggtaggcatgttagcaaccacactaattgctttccattcatttaatgcctccaacaacacaatgacatagggacaattataattcctattatatgggaaaacaaaacaag

SEQ ID NO: 269119 - DNA, 604 bp, Homo sapiens
gttaactgcgcatctgttttccaaaggaatgttgatgttctgtctctcattctcccacatgactatgcattcctgctctggtggctaygctcatttaaagaggtttacaaagctgccctcaaagtactacacccctgtgtgtgagagacttcccaggacttaccactacccattgccattacacagacctgtcccatatcccagatccccagcacactgtcctctcctttctgaagtactaatacctgatataataagctaataattctaactgttcatggaatttctggtcttcttaaacaataccctttcctttgttgacagccagaggagtgatttcaatgggatatattcccaaatagaagaaaaagatgccgtgcttgcaggtcaaggctggaaatattttacaataggcagaggcctttggcataggcagacatattaagcagtcctcacacttgctgtaataagaatccagactttggagcttatcttatctgcagtcaatatgagtttgggcagtcatttcttcatctctccacccaggctcaggaagttgttgacaggatttagtgctataatatctataagctcttagctcagg

SEQ ID NO: 269120 - DNA, 604 bp, Homo sapiens
gttaactgcgcatctgttttccaaaggaatgttgatgttctgtctctcattctcccacatgactatgcattcctgctctggtggctacgctcatttaaagaggtttacaaagctgccctcaaagtactacacccctgtgtgtgagagacttcccaggacttaccactacccattgccattacacagacctgtcccatatcccagatccccagcacactgtcctctcctttctgaagtactaatacctgatataataagctaataattctaactgttcatggmatttctggtcttcttaaacaataccctttcctttgttgacagccagaggagtgatttcaatgggatatattcccaaatagaagaaaaagatgccgtgcttgcaggtcaaggctggaaatattttacaataggcagaggcctttggcataggcagacatattaagcagtcctcacacttgctgtaataagaatccagactttggagcttatcttatctgcagtcaatatgagtttgggcagtcatttcttcatctctccacccaggctcaggaagttgttgacaggatttagtgctataatatctataagctcttagctcagg

SEQ ID NO: 269121 - DNA, 559 bp, Homo sapiens
ggatgaattactaaaagataaagcctctgttttaacataataatactgttcttacatctaaaattttaaaaatatctagccagtgctcagatttccaattatttcattaataatgtttatttatgaaatgttttatastttgtttagattgaaattcaaataaggcctttatcttttattacttgatgttgtctcatgtttctttagatatacaggtccatttgcccttgccctttttttttttttttcttgagacggagtcttgctctgtcacccaggtaggagtgcagtggcatgatctcagctcactgcaacctttgcctctggggttcaaaggattctcccgcctcagcctccccagtagctgggattacaggcgcacaccaccacgcccagctaattttgtatttttagtagagatgtggtttcaccatgttggccaggctggtctcaaaatcttgaccttgtgatccacccgcctcagcctcccagagtgctgggattacaggggtgagttagtacacctggccttgttgttgtttttgttgttgaagaaact

SEQ ID NO: 269122 - DNA, 572 bp, Homo sapiens
ttacttattaggattattattcctttgctcttacatattagacaatcttcttataataacttataggctattataagttattataacttatagtaggtgagtcaagatagactcatctactaaatgggaaattggtagagcagcctatataaagtatctgattacagaacaatggataatttctccgctcacataaaacattgatactctggcttatcaggtcttctttgtggttttgkttcatataaatcagttcctagaagtctgattacctttcagtaacctaataaaagcatattcataagtgtgcaaagcaaagcttacatacaattattgaaccaaataaggccaaatctcagaaaccagccagcttccatttaataattttattttaatatttacattttgtcacttagtaaattatatttctctgaattttaaccttcttgtgtacttacttcaaggtttgttttcaagaccaagagcatgtgaaaaattttgtcgtcctgtattcatttggtttctctgctcattctgcccaggttctcttctcatctgtttatatcatccag

SEQ ID NO: 269123 - DNA, 547 bp, Homo sapiens
tgcaaatctagcagtgttttgttaccacagctctaaaatttaactcctttttgaaattagttctgtaagtgaccaaacaaggacatgcagccaataaccctatgaaaaaaaacacttactgttatttaaaataacatttttacattcacaatctattttcacagaatttgatagaactatgcagttatccagatttgccactagagggtagggtagatttggaggctgcttgtgtttttcctcctaatccaggggcatttactctatttaatcaatagatgatgcctgtactcattttacttagcatrtcagcccctttattaaaaattgtgaaaaaaaagactacctaaataagcaaaacccaatcaggaattaaattttagagaagttcccagatggaagataggaaaagctaacattctgctaagtactttatatatggaaaaacaattaatacccacaaaagtactataaaattggtaatattatgccaattttatgttaattatacaaatatatacataatataaatatataatattggcac

SEQ ID NO: 269124 - DNA, 540 bp, Homo sapiens
ttgtaggctatgatcaggaatggcaagcttcccagtgtacctggagaacagaatatrtaaaggaatatgataggatataaacttggaggcagataatcaaagtctgaatgtcaggctaggaaatttggacatattgcggaagttttggagacaagggtcatttctcggaggtctgtcttcggactaccatatgggcaacagttaatggaatcacctacagaaagaataggttgaaggcaagtcctgaaaaaatctagataagccatagaaatggtccaaattaaagctatgctgacttctccaaggaagaaagagagttttgaagaatccttggggaatgctaatgatttcagagaggtggaaggtggagtagccagtgcctgggacaaaaggaacaatcacaaacagaaggaaaatcagaaatcattgtgttatggaagtccaagtcaggggactgagtttcaaggagactgtggtaacgaacataacacatttcaaaaggtgaagataggccattgaatttggcaattaaaagccatg

SEQ ID NO: 269125 - DNA, 392 bp, Homo sapiens
ggtaaagctgaaacaaatgttttttagaaaaagaatagttagggtaagaatcatgaaagctaacagcamattttagaaaaatgctgtatgctaggacgaaaatagggctcctagatcaccagaaggatgtaaccacccattttacaattatgacaaatggggctcaacagaaagatgagcaataccccccttggtttaaaggaaaagttcatggaaaaccaagcctcattagaaagaagttaaatcccagatacttctctctggagaagtctcagttctcctgaggcttccctagtttacctcttgcttcagttcagggcctatttttaaaactctgatttaaggtggtgttcatttatgtcatctacttggtctgtaccataacatccttt

SEQ ID NO: 269126 - DNA, 561 bp, Homo sapiens
atgaacatactaaaagtcatagtaccaatttcctaggcttttatggggataaaataaaatattgcaaaagtaaagctaaargccaattttttccaaaggttatttcagtatttgtaaacgttatagagatgaaaattatagagataaaatagtaatcataattctatgtcttagaaaataatctaattaagagaaactattaaaaatctttacttttgaacaagccaactttgaacaatggttccttatgggtttcagtctaacacaatttagcttcttagagaataggggtacagaacaattatcttgggactggcttcactgtaacagcctcattggctgctatttggaatacagtagagacaactattcaaccacaccagtctgtggatgtgaactcttcctcctccttcttcttgaattctcaataacagaaaatgaagaggtgataaaacaggactgctgcttcttcataaagaggggatcccatctcccttccaccctgtcctgttattttgcaggttttatttcaaaacaaaagtcacccacaaagaaaggaac

SEQ ID NO: 269127 - DNA, 561 bp, Homo sapiens
atgaacatactaaaagtcatagtaccaatttcctaggcttttatggggataaaataaaatattgcaaaagtaaagctaaaggccaattttttccaaaggttatttcagtatttgtaaacgttatagagatgaaaattatagagataaaatagtaatcataattctatgtcttagaaaataatctaattaagagaaactattaaaaatctttacttttgaacaagccaactttgaacaatggttccttatgggtttcagtctaacacaatttagcttcttagagaataggggtacagaacaattatcttgggactggcttcactgtaacagcctcattggctgctatttggaatacagtagagacaactattcaaccacaccagtctgtggatgtgaactcttcctcctccttcttcttgaattctcaataacagaaaatgaagaggtgataaaacaggactgctgcttcttcataaagaggggatcccatctcccttccaccctgtcctgttattttgcaggttttayttcaaaacaaaagtcacccacaaagaaaggaac

SEQ ID NO: 269128 - DNA, 617 bp, Homo sapiens
gcaatccatgaacatggaatacctttccattttttaatgtcattttcaatttctttcatcagtgttttatagttttcattgtagaaatctttcacttctttggtatggtttattcctaggtgttttattttatttgtagctattataaatgggattatttcttgtttttttttctttcttttttttaagattatttgctcttggcatattgaaatgctgctgaattttgtatgttgatgttgtatcctgcaaatttaatgaatttgtttatcagttctagcaggttttttgttggagtctttasgtttttctaaatataagattctgagaaaaaagaacaaagctggaggcatcacatgacctgacttcaaattatactacaaacctgtaataatcaaaactgcatgatactggcataaaaacagacacatagaccaatggaacagaataaagaacccacaaataaatccacacatttatagtcaactaattttcaacaaaggcatcaagaacatacattgggcaaaggacaatttccacaagaaatgatgctgggaaaactagatatccatatgcagaagaatgaaattagatctctatctcttgccagatacaaa

SEQ ID NO: 269129 - DNA, 564 bp, Homo sapiens
ggagtttaaaaaaaaactgaccttatagagatagtgagaagaatgatggttaccagaggstgggaaaggtagtaggggtgggggaaggataaagaggcattggttaatgggtaccaaaataccgttagaaggactaaagtctggcatgcacaataggatgactatagttaacaataattcattgtatatttcaaaataactagaagagtcaaattagaatgtctctaacaaaaagaaatgataaatgcttgaggtgatggatatcccaattaccctgatttggtcattacacattgtatgcttatatcaaaatatatgtgtctcataaatatgtacaactattatatacccataaacatttttaaaagcaaaaaaaaatctgtctttaagggtttggaataccatatgaatttatacagtaaatagatatatcaaaatgagtcaaaggaaagctggaatttcttaaggtatcaaatggccctataattatcatacatacctgattcatatttttcttgttggatccagcccataaggacataaattcgctacatatcaaccaga

SEQ ID NO: 269130 - DNA, 627 bp, Homo sapiens
accaaaaacagcctatgaaagtaaataataattatctttgaatgagataaaatatttgcagactatccatattacaagggattagtaaccagaatatataaggagctcaactcaatagcaacaacaaggacaacaagcccaaatagcaatagcaaaaaaccaaaattcaagaatcatcttcagacttcttgacatttctttcattctaggaaagagccatgcttggggatctatttgtacttactgattcagtcaaggagaccaaattattcaggaaaagttacttaggaatgtgtctccagatgaggaagagtatcaaatattatttacaaggagattgcaataaaggccctcaatcccaaattcacttctccatagtgaagcttccctgtattctgcccagtcagtgcttgccaatatttttttctcattaattggtatgaaatgtaaaacrgtttttcttaaggtcaaataataccttgaatataagggaaaatcggggttttccatgttacccatgtgtacactgcattcgagtactgtcccagattagccagctctcaggctgaaaagtagagaacagtgagccaaagagaagcaaccattgaacagaaaagatatgataat

SEQ ID NO: 269131 - DNA, 584 bp, Homo sapiens
attatttgcctattggtggcatttttgatctcctatgagttctttgatacttttttagtatatgctgactgatgctaactgcctgttctgagcttggaaagtgcctgtcaatctaaaatactaatgaatatatgtttgttactgatgatagtggtgataatgaaaatatttccctaaactgaaatattgcactttcacatgatttattctcttaaaattggaaactttagtggaagttcaatgacaaattcaaagcttttattagtgtgggttcctttcaacttttacttggaactagattattgatttctttccaaaatayctggaaagtaaattgtaaagtaaattaagtaaagtaagtaaattaagaagtaagttgtcagcttaaaaaactttagaaatttctacatagtgcttacatttacttgctatttcataaatactaaatcacacactgaatagataagctcaattgatttattatagtaagcttgtgtgttccaactcacaaacaaatataaccatgccttttcaatttgtttaaatataggtataagcccttcccttttattttttaaaaatcc

SEQ ID NO: 269132 - DNA, 568 bp, Homo sapiens
acttttaaccaattcattgaaatttcagtccccatgtcccattctccaacagtgctattaaaaaaataaataaaagaaaaagtaaacaaaaaatctcttgtaaactctgaaatacaggacataatggatagagagtttcatgagagaaaatttctgttttaatgtgacaactgacactgcacagggtcccctatttaacctaatcagaaaacttcttataatacagacttayttttctttgctttatctagaaacatgaggtttttattttatttttatttatttatttatttatttatgggaagagtctcactcaggctggagtgcagtggcatgatctaggctcactgcagcctctgcctcctgggttcaagcgattctcctgcctcagcctcccaagtagctgggattacagacatgtgccaccatgcctggctaatttttgtatttttagtagaaacggggtttctctatgttggccaggctggtctcaagctcctgacctcaggtgatccacctgccttggacttccaaattgctgggtttacaggcgtgagccaccacaccc

SEQ ID NO: 269133 - DNA, 594 bp, Homo sapiens
tgtatatacaaatttcctgggtgtggtttacaaagacaygaaatttatcatgcttactcaagtcctatagctcttccagggaggaagaggaggtgagtgtaaatggacactgattagttcctcaccaaatttctattcaaatccccatcttctgtccagtggagagcatttaaaaactacaataatatgctcagctcagtgtccctctgccaacttccagatttctgagggagagagagcattcagggagatccaaagaaccagggtggaaggtcaagtaaggcactataatttaatgactaagagcacaggctctggagccagcatgcctgggcttaaattctggtctgtcagcttgctatttgtggactttaggcctcttaacataaccggttgtgccttaatttcatcatttgtgaaatggtgactattagtggtacccatctcatattgttgatgagaagtttaactgatataaagtatttagaacattacatctaatgaatgatctttaattctaaatctttccaaaattatctctccttaagccaaatctttcccataaaagttttctccttttatatttcacagctc

SEQ ID NO: 269134 - DNA, 594 bp, Homo sapiens
tgtatatacaaatttcctgggtgtggtttacaaagacatraaatttatcatgcttactcaagtcctatagctcttccagggaggaagaggaggtgagtgtaaatggacactgattagttcctcaccaaatttctattcaaatccccatcttctgtccagtggagagcatttaaaaactacaataatatgctcagctcagtgtccctctgccaacttccagatttctgagggagagagagcattcagggagatccaaagaaccagggtggaaggtcaagtaaggcactataatttaatgactaagagcacaggctctggagccagcatgcctgggcttaaattctggtctgtcagcttgctatttgtggactttaggcctcttaacataaccggttgtgccttaatttcatcatttgtgaaatggtgactattagtggtacccatctcatattgttgatgagaagtttaactgatataaagtatttagaacattacatctaatgaatgatctttaattctaaatctttccaaaattatctctccttaagccaaatctttcccataaaagttttctccttttatatttcacagctc

SEQ ID NO: 269135 - DNA, 594 bp, Homo sapiens
tgtatatacaaatttcctgggtgtggtttacaaagacatgaaatttatcatgcttactcaagtcctatagctcttccagggaggaagaggaggtgagtgtaaatggacactgattagttcctcaccaaatttctattcaaatccccatcytctgtccagtggagagcatttaaaaactacaataatatgctcagctcagtgtccctctgccaacttccagatttctgagggagagagagcattcagggagatccaaagaaccagggtggaaggtcaagtaaggcactataatttaatgactaagagcacaggctctggagccagcatgcctgggcttaaattctggtctgtcagcttgctatttgtggactttaggcctcttaacataaccggttgtgccttaatttcatcatttgtgaaatggtgactattagtggtacccatctcatattgttgatgagaagtttaactgatataaagtatttagaacattacatctaatgaatgatctttaattctaaatctttccaaaattatctctccttaagccaaatctttcccataaaagttttctccttttatatttcacagctc

SEQ ID NO: 269136 - DNA, 560 bp, Homo sapiens
ctttacaacataatgagaccctgattttatttttaaaggtaaaagaaaaaagaaattaaaaaaaagaatttttttttcccaaatttctacatcctagatttgaaaaacccaagtatcattcatgactactttttcagtttaagctcagtctatcrgcaagaagccaaaatcattattggatttcctcacatacttgggaataaaataacaataacaatacacatttccctttaatataaaacttttctctaaaagttttcgtagatctggtgacacaccagatcgaaaatagtactatttgctagggaatggcatgctaaggcacactatccctggcagatactactacctcctaaaaatgatacttcttacttatatctttaatgatccatataatggtatttaaaaagtggctagtaaatgacatcctaaagaactattaggcagtcttagttattaaacatagataagaagtcagagaatatactttaaaaacaaacatgttttttgtttgtttgtttgttttttgtttttgtttttttgagaaggaataagtgtag

SEQ ID NO: 269137 - DNA, 560 bp, Homo sapiens
ctttacaacataatgagaccctgattttatttttaaaggtaaaagaaaaaagaaattaaaaaaaagaatttttttttcccaaatttctacatcctagatttgaaaaacccaagtatcattcatgactactttttcagtttaagctcagtctatcagcaagaagccaaaatcattattggatttcctcacatacttgggaataaaataacaataacaatacacatttccctttaatataaaacttttctctaaaagttttcgtagatctggtgacacaccagatcgaaaatagtactatttgctagggaatgrcatgctaaggcacactatccctggcagatactactacctcctaaaaatgatacttcttacttatatctttaatgatccatataatggtatttaaaaagtggctagtaaatgacatcctaaagaactattaggcagtcttagttattaaacatagataagaagtcagagaatatactttaaaaacaaacatgttttttgtttgtttgtttgttttttgtttttgtttttttgagaaggaataagtgtag

SEQ ID NO: 269138 - DNA, 607 bp, Homo sapiens
aaaacttcctttgctatcttatacaagataattgaagttgtttaaaatgtttgtttaaaaacaactatgacttcaactacttatctgtgcagattctatcatatcatatagccaaataaaacaaagcactactgtgtaagtctaggcagatataaccaaagttctgttatttgtaataccatttctaattttggggatcactgaagtagtgtcacccttatcactgtacttcatgatatgtgaaggtcataaatttgaattgtatatgataaatatatactactgctactcatttactytatatgtgttgaagcctctacaacattttttgtttgaaaagatttgcttctaaaaatgtccctggataagttggtttctataatccttctctcctctgacattatatctagatccttttaaaaaattagaaaatatctacttgtattttcagcctttgcgaatttgaagtaggaagtagagaaatggctgggaattattttagtcctggagcacttagaggggagtcaggcttgtgcggcttccaaatttagggtttaggatcagccagcaagcagcacaaagcaccacaaacctttacggaggaaga

SEQ ID NO: 269139 - DNA, 607 bp, Homo sapiens
aaaacttcctttgctatcttatacaagataattgaagttgtttaaaatgtttgtttaaaaacaactatgacttcaactacttatctgtgcagattctatcatatcatatagccaaataaaacaaagcactactgtgtaagtctaggcagatataaccaaagttctgttatttgtaataccatttctaattttggggatcactgaagtagtgtcacccttatcactgtacttcatgatatgtgaaggtcataaatttgaattgtatatgataaatatatactactgctactcatttactctatatgtgttgaagcctctacaacattttttgtttgaaaagatttgcttctaaawatgtccctggataagttggtttctataatccttctctcctctgacattatatctagatccttttaaaaaattagaaaatatctacttgtattttcagcctttgcgaatttgaagtaggaagtagagaaatggctgggaattattttagtcctggagcacttagaggggagtcaggcttgtgcggcttccaaatttagggtttaggatcagccagcaagcagcacaaagcaccacaaacctttacggaggaaga

SEQ ID NO: 269140 - DNA, 479 bp, Homo sapiens
attttcatctaagagaacaatagttcaatttaggagtggaaagagccacgggcatgacctacctaaatgcagagtccatttgttgaaggacggctgattctggaatggcttttcctcaggtcggatgctatattataaaggaaagccaaagtagtggaggaaacaggacattgaccatgcagagctttccctataatcagccatcaccttagcaaccagcttcgctgcctcaggcctaaattcttctgtagctgctttaatttatggataccattttccctgtctgcctagtgggaattcattaggcagtgtcccgatgtgtaggtrtacatcactggggctgtggaaggttttagctgatagatgaacatggtattatgtgaccttgaataacataatatgccaatcagtctctgttattagtttcttcttgctgccataacaaatttccacaaactcagtggcttaaaaagcacata

SEQ ID NO: 269141 - DNA, 479 bp, Homo sapiens
attttcatctaagagaacaatagttcaatttaggagtggaaagagccacgggcatgacctacctaaatgcagagtccatttgttgaaggacggctgattctggaatggcttttcctcaggtcggatgctatattataaaggaaagccaaagtagtggaggaaacaggacattgaccatgcagagctttccctataatcagccatcaccttagcaaccagcttcgctgcctcaggcctaaattcttctgtagctgctttaatttatggataccattttccctgtctgcctagtgggaattcattaggcagtgtcccgatgtgtaggtatacatcactggggctgtggaaggttttagctgatagatgaacatgrtattatgtgaccttgaataacataatatgccaatcagtctctgttattagtttcttcttgctgccataacaaatttccacaaactcagtggcttaaaaagcacata

SEQ ID NO: 269142 - DNA, 477 bp, Homo sapiens
gtctcacaaaaaatgcaaacctcaggggatggtactccaaagtaattaaccaaaacaagagtagttgttatgcaaataccaaggaatttaatctccttaagaaaacaataaattcctggttcagacctaaaggcacaaattttaaaatgtgtgtagattacagactcagctcagctccattctaaaagatgcattctctataagacctccctaacacctggaatasaagcagctgggtaaacatcctggccatgcagtatgggcagcatgagtcagttagagggcaaggttctttctcttgatccgcccacataccttgggggtgttagaagccttgatggaagtaggagatgaagtgtttcatggaaaaacacctacttccgcatgataaggcaaggagagggagtgaaagagaagatgggccctacccttctgcagggccctaaagccactaccaagacaggagaagggaaagcc

SEQ ID NO: 269143 - DNA, 510 bp, Homo sapiens
ctccgttataatagagcaaatccmttataatcttatggaaccactattatatatggaggcctgtcattggccagaatattgttatgcagtacatgactctccttactttcatatcttggagcctatttcttctcctaaatcccttggggatgcgtatgaattacatgtttgaaagtagattctccctggggacttcaattttgctatacaatttctgcttgctcatgactagaaacttaaagattgcttttgggactggaaaaacagatttttcagctcagaaatgtggtttctttgataacataatgatctcaaaatgtagtaggcatttggtctatttgcttgcagttggttcgataaccatgcataaacttcttttctggacttaacaattatggaaacaccatcgtatttactgtcttcgttccttttccttaaatcttgattcttgggatacagaagcagccagactttttagtcttgtggagcctcaaatttctggatctttct

SEQ ID NO: 269144 - DNA, 427 bp, Homo sapiens
atctgaagatgcttagaagattctggaagagctagtctatcaactactgcagacattaacctttggttttcttttgtttccatagaaatgtyttttatgaaagatctgtttgcctgtaccatatatagagacttaggccatttatttgcagtgccacctcctggaatgggacactgttgtttaactgaactgatctattctcaggaccaagagactgactagaagatatggcatgatatatttaaatttgctcttttctgcttatcccaatttgtctttcaactcctttgtctatttgtatcagacaacctctaacctatagctcttcaaatctatcagtgtggcttttagtatgtaaaacttttttaagtttcaaagagcggactgaaggaaatcaaaatattttaccccgaaatgtatttctttg

SEQ ID NO: 269145 - DNA, 427 bp, Homo sapiens
atctgaagatgcttagaagattctggaagagctagtctatcaactactgcagacattaacctttggttttcttttgtttccatagaaatgtcttttatgaaagatctgtttgcctgtaccatatatagagacttaggccatttatttgcagtgccacctcctggaatgggacactgtygtttaactgaactgatctattctcaggaccaagagactgactagaagatatggcatgatatatttaaatttgctcttttctgcttatcccaatttgtctttcaactcctttgtctatttgtatcagacaacctctaacctatagctcttcaaatctatcagtgtggcttttagtatgtaaaacttttttaagtttcaaagagcggactgaaggaaatcaaaatattttaccccgaaatgtatttctttg

SEQ ID NO: 269146 - DNA, 614 bp, Homo sapiens
tgtcacccaaaattcgtatkttgaagtcctaattcccagaacctcagaatgtgactttttgaagttagggactttaaggaagtaatgaagttaaaatggtattattagggtaggccctaatccaatttgaatggtgcccttgttagaagagaagactaggacacagacaggcacagagagaagatcatgtgaagaaacaaggagaagatagccatctacaagccaagaagagaagtctcaaaagaaatcaaatctgctgacaccttgatctaagatttccagtttctgtaaattgtgagaaaataaatttctattgcttaagacaccaagttggtggaatatggtctggaagccacagcaaactaatacattatctattgactatttgatgaatccagatattatactttattcttttttctgttttgcaatgtttccatacagatactgtcaacattgtgtaaaaatggccataggccttgacatacccaacatataatgaagatgcttgatgtatcaaaagatcatatagtaattcccaatgtattatcaaaatcaaaaggctgagagaattttaagattacagtgaacatgcttctccaaaaagaggtttt

SEQ ID NO: 269147 - DNA, 487 bp, Homo sapiens
ataaagttagtgagaaaaaaacaaaaagctagttacagcaacgtataaatacattaaataaaaattgtctattttatacatatatatatatatatamacacatatattcctctgtaattgattctaattttcttttttgtattcttaacttgattctttgttatagttttcatctctttccttaccagattgtttatagtacttggaagtctgtgcttatgcttattctgatccttttcctgttttaaccaatttgctcctgatcctgattttctcctttccatttaaaaaaaaatatatttcattgcaggctaattattactaaatattttctagcttttggtggctgatatagaactctagagattgctacatgacaatctttctaaaatgctaaagatagctttgctggtttttaaaatactgtttctgtgatcctaagtcctaatggttggtattgaaactgagcataagtaacctagatgct

SEQ ID NO: 269148 - DNA, 601 bp, Homo sapiens
agcctttatcatattattctgacctcatgtctttctttgtaaaaagatggaaaacrttctccctaagtaaattattaactaatagaaattccttatagaaatcttatgaggatgacatctggaataaattcagcaggcaagtatgccatctaaatattggtcattttttcctactgaattgagtgggagctgaacccgacatattcattatttgtctaacatgttttatatatggttcacacagaatggtgtttatggtattgctgcaaattcaggtattttgggaattcacttccattatagtttcacaaacattgacttgtgtttagaaaaaatgagaatttagtgttttaaaaaaggtgttctttgcaatttctccttttagagttaagctaatcataattttgatccaaaacaatatcctacctctgccaagttaatgttaatgttctatttattcaacttccagtttttaaattttactaatattttgcttcagtgaattacacaatattctctctgtgtgcctgcaaaattcccactgcaaacaagatcattttaagtgtacataaagtgtcaaattatttaagtagatttttga

SEQ ID NO: 269149 - DNA, 601 bp, Homo sapiens
agcctttatcatattattctgacctcatgtctttctttgtaaaaagatggaaaacgttctccctaagtaaattattaactaatagaaattccttatagaaatcttatgaggatgacatctggaataaattcagcaggyaagtatgccatctaaatattggtcattttttcctactgaattgagtgggagctgaacccgacatattcattatttgtctaacatgttttatatatggttcacacagaatggtgtttatggtattgctgcaaattcaggtattttgggaattcacttccattatagtttcacaaacattgacttgtgtttagaaaaaatgagaatttagtgttttaaaaaaggtgttctttgcaatttctccttttagagttaagctaatcataattttgatccaaaacaatatcctacctctgccaagttaatgttaatgttctatttattcaacttccagtttttaaattttactaatattttgcttcagtgaattacacaatattctctctgtgtgcctgcaaaattcccactgcaaacaagatcattttaagtgtacataaagtgtcaaattatttaagtagatttttga

SEQ ID NO: 269150 - DNA, 601 bp, Homo sapiens
agcctttatcatattattctgacctcatgtctttctttgtaaaaagatggaaaacgttctccctaagtaaattattaactaatagaaattccttatagaaatcttatgaggatgacatctggaataaattcagcaggcragtatgccatctaaatattggtcattttttcctactgaattgagtgggagctgaacccgacatattcattatttgtctaacatgttttatatatggttcacacagaatggtgtttatggtattgctgcaaattcaggtattttgggaattcacttccattatagtttcacaaacattgacttgtgtttagaaaaaatgagaatttagtgttttaaaaaaggtgttctttgcaatttctccttttagagttaagctaatcataattttgatccaaaacaatatcctacctctgccaagttaatgttaatgttctatttattcaacttccagtttttaaattttactaatattttgcttcagtgaattacacaatattctctctgtgtgcctgcaaaattcccactgcaaacaagatcattttaagtgtacataaagtgtcaaattatttaagtagatttttga

SEQ ID NO: 269151 - DNA, 566 bp, Homo sapiens
gcagacagaaacatacacaggtggaattaagcagtggccctttgtataaagtggaaacaatcacatgtttattaacaatagacagggaaaattaaaagaaaatagtggaacaatgaaagaggagaatttgacaggtttatttaagagtcctagctgtgaagaagagccaaggtaaaataattacccatggaaaggaacaactgcattgttatctacactgagatacgttagtattgataaaaattcagcattggtgaaatgaaaactaagaatggtaagtgctatgttctgaatgtttgtgttccttccctttccccagaattattttattgtatgctaatctctaaggtggtggaattaggaggtagacactttgggagatgagattaatgtccttatgaatgaggcattaaagaccacttaccccttccaccatgtaaagacacagctagaatgttccatttatgarccaaaaagtgataatatcagatcattaattatatgtaaagagaaatatatattatttcaataattaattgtaggctcaatttattataaaatacccc

SEQ ID NO: 269152 - DNA, 585 bp, Homo sapiens
gagaataatcctcaattacaatactttaattacctacaatattttgtaatgatgtttctctacttcttcagggctggggcaagactstgcacagaaattacaaagtacaaattcttgcattagtcagatatagatgtatgtttgtctacgaaaacatatcatacacgtttgctaattgtctagcatcctgaaggatgctagaaaagttaaacataatttaatgaatgataacatcacaactcagaatacatgggataaggagaaaatagaccaagaagatattcagaaggacaggagaaaatgaaacgcgagactactattccaagccttgaatatcaggccttatgatctcaatcatcagcataatactgatgattgagaagataaaatcattgagtgaggcccacaccatgtttcccctcaagacgggaaacaaaaggattgttttttctgtgcttcctcaaaaagaggccccaattgtccctttttcttttcacaagccccagagaacctcttgggtttccttgtcctctcatgcatggagctctccatgctagccagaaagatcaaagtcttgaagccaag

SEQ ID NO: 269153 - DNA, 637 bp, Homo sapiens
tgtaatgagcagagaagaacttcattctgaaagaaaatataacccaagaactgaccccaaatcacaaaaaatccttgtcagtccccaggttttctctaataagacatctattctgaaaatactggatttgtatctttagggagaytgctgaaatgccctttgaaatccaaattattattgaatattaaaaaaatcaaagtctatattaaataatgaagatgactttaaaagttgttttgtaacgacagatgtggagtaaaaattaacaagtttgctagataactagataatttctagttatttatatttaggccaggaataacatcttatttctcaccataactttgagaaaaaaaagggcatggttaaagaaataccatagctatctacatattactttcaagttctaaaagtcactttccagggtgtacaaaattatttttcttacctagtctttctctccatacaatatgagatttaatgatagaatgagtttataaattttgacttctgtgaatgtgcaactgagatacatgctttctattaatttctgttcattctttactttttcagaaatgaaaataacacatagtagcaggagtgaaagggagatagagccaaaaggtccatccagatc

SEQ ID NO: 269154 - DNA, 559 bp, Homo sapiens
atagcatgcggacaggaagagaaaaagaggacaaggagaacaaacacatagcttggtcttccttacgtataaggtattacaaaagtagaattgttggacccagattataagaccctgaactgaaggctaaaaggtttgaattttattccataaaactgggaagattctggaagttcatgagaatggaaataatagcatccaaacagccctgtagcaagcttgacctggctacagatttgtagggtgggttgaagaaaagggttgatgatgagaaaaagacagcaagtaagggctatcagagaaatccaagtgaagcatgatattaatcaagaatgcaaagtaacagataagtggcattatgtagagatgtgaggaaatagtggggactcagttaatatctattatatgaatggataataaataaatgagktcaggcagatggaaataaaataaggaactattttttttcctatttctgactcaagttattagtgaaaagcctgcatccagtcttccctccagagttttatctccctgcctgacacccttaaaggaaagg

SEQ ID NO: 269155 - DNA, 582 bp, Homo sapiens
aaatcattctaccatgaagatacaygcacatgaatgttcattacaccattattcacaatagcaaagacatagaatcaacctaaatgtccatcggtgacagactggataaagaaattgtggtacatatacaccatggaatactatgtagccataaaaaagaacaagatcgtgtcttttgcaagaatatggatggagctggaggccattatccttagcaaactaaaccaaatactgcatgttctcacttataagtggaagctaaatgataagaacttatcatttcaactttcaaagatatgatattaatgtctcagttagtaggtcaagcttgcaattctaagatttgctgaagagaaggcagataatgggaatgggttcctattcttccttttttctcttctctgctatgagatccccacctccccctagtgatctggagctagttagtactcaggaccctgacttagaaaatataatgactattactgtaaaacaagaacaacatattttaaccagttgaagcctctgagaacagtaaacatgtattttgctctgtgaaaacaaatataacttagagggcag

SEQ ID NO: 269156 - DNA, 533 bp, Homo sapiens
actggttttgcctaatatcattttagtagccaggtacctaatttctttttttctttgtctttatagaaatttgaaaagaaaattggggggagggcagaatcaaacaatactagcaagaaactttttaaaattataaccaatcaattgcattttgatatttttcaatrtagtgttaactttagctacattttcccaaaggataaagacaaattcacactctctacatgccctgagaacattccttagggatatggtcagcaacattcccaccctcctcatgccccagtgagaatctgttcaacatttcttctccagtcttctattatatagatatattttggagattggaggggtccaacggtacaaaactctatacaaaagcatgctaaacactgttctaaacattagaatgatataagaaaccatacaatatagagatacatgtatcattataaagtatctaggtgagaacactcaaatgagaagatttgcctgcacagcatgaaaagaaacttgaacctctaatagacttt

SEQ ID NO: 269157 - DNA, 533 bp, Homo sapiens
actggttttgcctaatatcattttagtagccaggtacctaatttctttttttctttgtctttatagaaatttgaaaagaaaattggggggagggcagaatcaaacaatactagcaagaaactttttaaaattataaccaatcaattgcattttgatatttttcaatgtagtgttaactttagctacattttcccaaaggataaagacaaattcacactctctacatgccctgagaacattccttagggatatggtcagcaacattcccaccctcctcatgccccagtgagaatctgttcaacatttcttctccagtcttctattatatagatatattttggagattggaggggtccaacggtacaaaactctatacaaaagcatgctaaacacygttctaaacattagaatgatataagaaaccatacaatatagagatacatgtatcattataaagtatctaggtgagaacactcaaatgagaagatttgcctgcacagcatgaaaagaaacttgaacctctaatagacttt

SEQ ID NO: 269158 - DNA, 611 bp, Homo sapiens
acagttctaattactcaggatattgtgttgagtacttgcatttaaactcccagatctcattttttaaaacctatatacatcaacagtacatagccatcatgccagaagcagttgatacattaaaaggagacattctccagaacaatagagacaatttaataaaatgtatgagtgaacaaggagttctagctctcaatttattgttccctagatgtgatatattggatatgccatttagcctactaaggccttaacatttaagtagatgctctttagagttatacttatttaagatttatctagatgctctttaaagcttayaacaaacagaaatttaactaaattatttttaaggcttattccaggtaaaaagaaacttaaagtttttattttaatctctcaaattggtggttttcaaagtgtggtcccctaccagcatcctagaaatttgttaaaatacacattttagacctcatcctagacatactgaactacaaaccttggggcagggagtatagcaatcttttttttaaagaagttctgatgggtactaggctttctcaaccactgcctggacatataaaatatgtttaatagtaaatatatgtatg

SEQ ID NO: 269159 - DNA, 551 bp, Homo sapiens
agaaggtgccttgcttccccttcaccttcccccatgattgtaagattcctaaggcctccccagctatgctgaactgtgagacaaaatattttgggaatattcttatgctttttgtgaatttaaaattatgtcagtgtcacagagttttttcctgtgggttaattactagggatcaactgcagtggattacacatacacacacacacacacacacacacacacacgcatacacatgagaatactgataaaggcttgtaactaaagaaacaaaacctagatgatctcctgtaattatccaattcttcctgttacaaaactcagaaaatgatgaatagagagacagggagaataaaatcctgggtttgcaatcacttctataaatgagtaagactctcctttatttagaaatgtattatcctgtctaagtttataagtaatgtggtttggttgtgtacatttgcagctrgcactagtacattaacgaacttacagaaagatttaccagaaattttattaggtgtcacttttgctgtttggtctctataactgga

SEQ ID NO: 269160 - DNA, 540 bp, Homo sapiens
ggcttccggattctgggaattaagatagtaatggactccaaagatctacagaactttgcttttgaccaatccctgtttttagttccacatattcctcgcactttgtcgatttgatagctctaaggttttagcttttctggagttatttagggcaaattgccttacttgtccttttatgcmtccctgaaagttctttggttttaacttcctccattttgttaagtcaattatgattctccattctattatgttgtctgtgctccagttctttttcttcaatgtaatgaagccattgcaaaaactcatttactgtcattgaattgagtatttgaaaagagaacacataaacaccaatggtcaatgagggacgtaattttgaagcagtggaggagtaagtgttggagtaagaaggctctgaataagaagagagaaggctgcccaagggttccagggagatggttggctggaatatgagagtaaaggaaagacactgaaaaaggagctactaaaaataaatcaccggctttgtatttttgcctg

SEQ ID NO: 269161 - DNA, 507 bp, Homo sapiens
aagcaaaaccagctcgaggattgaattcaactgtattatgtagtaatgaaatgctaataaggaagttggagttaacagcactgaataactctgctagacatatattttgagctattttttctagtataatttatggatgtgttttcattcatcacatttgttctatttcttcttttgaccaactgaatgaataaaataagtctgatggagattcasggtgtgttctatgattattaaaaccattcagctaacttgtttgagtcagtgttatatcactaattagcactttattaccaaataaattaatgagctacaatatatggcttcatagtgcatataatatagaagttcttagtgttgttctatttttaaaatggaagctaaatggatgctaggaaatctaaaagcactgtgttccctatagtcaagagaagactgtattcatgactataatgataatgctaatatgaataatggcctactgttattataaaaccagtcttaggc

SEQ ID NO: 269162 - DNA, 551 bp, Homo sapiens
gagtggaatggtaattctgttttaaattcttttagaaattgccacactgctttctacatgactgaactaatttacatttccaccagcagtgtataaacattcccttttccccacaatcttgccagcatctgttatattttgacttcttaacaatagccattatgattaatgtgagatggtatctcattgcggttttgatgtgcaattctctaatgattagtgatgttgagcatttttcgtttttgttttcttttttgtttctttttcctttttttttttttttttttttttttgtttgagacagagtcttgctctgctgcccaggctggagtgcagtggcacaagctcrgctcactgcaacctctgcctcctaggttcaagcgattcttctgcctcagcatcccaagtagctgggattacaggcacctgccaccacacccagctaatttttgtatttttagtagagacgggatttcaccatgttggccaggctggttttatatgcttgttagcctcatgtatatcttcttttgaaaagtgtctgttcatgt

SEQ ID NO: 269163 - DNA, 545 bp, Homo sapiens
tagcttaattatttttagcctactaattttctcttcagccataatcattcttattcaaattaattgagatttttatttcaaaaatcaaatttttaattttataattccccaccaatttcttcttttgaatgtcatcatctttcaaatatctctgagaagataaattatatttatttcaatttttycttcttagtgtgttataaatctctctccttgggtttcaggttttctgtttgttgagtgtggtacctccattttatggtgttgcattcctaaaatgttaaatgagtcttgcttgtgtatttgcctccatatttgagatgactcattactggttagtgaatggggaagcattcctggaaaatggaaatgactccaggaaagggactactgttttaggcataggggctcctaattcctctggattttgccattaccaaggagtcttttcttggtttccaatagtcatacaggcaatcatggatttttaaaacagttactatatttaatattatgtggaaaatagttctcaaaattttgtacag

SEQ ID NO: 269164 - DNA, 545 bp, Homo sapiens
tagcttaattatttttagcctactaattttctcttcagccataatcattcttattcaaattaattgagatttttatttcaaaaatcaaatttttaattttataattccccaccaatttcttcttttgaatgtcatcatctttcaaatatctctgagaagataaattatatttatttcaattttttcttcttagtstgttataaatctctctccttgggtttcaggttttctgtttgttgagtgtggtacctccattttatggtgttgcattcctaaaatgttaaatgagtcttgcttgtgtatttgcctccatatttgagatgactcattactggttagtgaatggggaagcattcctggaaaatggaaatgactccaggaaagggactactgttttaggcataggggctcctaattcctctggattttgccattaccaaggagtcttttcttggtttccaatagtcatacaggcaatcatggatttttaaaacagttactatatttaatattatgtggaaaatagttctcaaaattttgtacag

SEQ ID NO: 269165 - DNA, 650 bp, Homo sapiens
actgaaggattttttttttaatgagaagactgtacttgtcatgactggaataattggtagcattttatttagaaacattttttaaagtaaaacacaataataattcggctatattgctctaaaatctacactaaaattaagcatttagttatatggcattatataccttttaatcttaggagaaataataatataaaaattctcttaagagtaaaattgccattaaccaagattaataatagagataaaagtattaaatgctaatttacagaagacctatgagactttcaatacacagatagctaatgccagaatgttttaataactttttaattgtgtgttaattatttattcattaaattgtttattctagtacttcatccagagtctctggtggtcctggatgaagaaatttaagcccttccttgcttgtaaacaaccaagtaggcatttttattgcatttaaattagttgtgatgggaaaacgtgtgagaacaggcatggaactctrtcagacttcatgaactttcacttacccctgaatcataaatctcaacatttaaatgttagctctaaaattaatatgattatgttgacatcatttttggaccctaactagattatatgaatttatagtaaatgtatgtcat

SEQ ID NO: 269166 - DNA, 541 bp, Homo sapiens
tccacataattttttgatataaaagaactaattttttaatgcaaggtgatttatttgggaaaagtacttattttgacattaagaatagttcactacaaaggtgtgtgagttcaagcccrttctgcatctagtctcttggacattgatgattatttcttctttaagctgaagaagaaaaataaaaatgaaaattttaatttgattgctaaaagatatttacattgaaaactctaggaaaagagtaagttctccttaaatgtttgattataaatgtaatcacattccttgcaaacaggaaacttaaatttctaaaacggtactgccatgaaaaaatgtcaacctatagatttaaatatttgtctcactaccaacttggacattggaaaactgactctataactttttgctttgttttgttttctatttggccaatagaaagaaaagaaaccaacatctagaagtgaaatatatttatttgtttctgatcacggagaatataaaatttttgtaataacttctaagaatgttttgttagcagttt

SEQ ID NO: 269167 - DNA, 637 bp, Homo sapiens
caggaatgagattctattagcttgtagtaagctatagacagattaaaccaaacattttccagaagtgtgtaacaaagggggcaggcttaagtgaaccataggtttaatcaagataatgatggccacagactctaataagggtaaaaagagaataaagaggtggtaggtttagtggattgtaayttcagattagtttgaagtccattggactaagtgttttagaaaaagttgtttgaaaagagtgggttttatttaaagaattgattattttaacaacaacaaaaaattagccaggcgtggtggtgcacacctgtaggcccagctactcaggaggttgagacaggagaactgcttgaacctgggaggcagaggttgcagtgagccaagatcccagtgctacactccagcctgggcaacagagtgagacttcttctaaaaataaattaaaaaaaagaaaaaacagaattgactattttaatttcagatgttggtatgtgtacagttctcctctgctgatacttgctctattcataccacacattttaattttacataggctgtaagtctattaattattgtctttttttaagcacaattatcttttaaatatatttaaataatgtgataaaagattatt

SEQ ID NO: 269168 - DNA, 518 bp, Homo sapiens
caatattgtgtccacagtatattgctcctgtggcttttcctaattttttggtcttcctactatcttaaaatgcagtaatagcatgtgcattgtctaacactatttgtacaatattgggaaatgtaatcttaaaatagatagagaagtcctaatagaaatactgtgaatatgccctaagaagtcacatagatttagtaagagacagttttcttcttcaatcaattaagattctattcccctaaagtaaatctatagattcaatttaaaaagggtatagtattcttctctatagttctcaccctccactaatatttctcaggatctcttcctgctgtargtaatgaacatttattctagagcctgtcataacattaatcaacatacctaccttctagtgctattaaaaatttgcatctttttacttgcatttttttaatgtgaagtcaggtgctgtgatggttaaattgtgtgtctaacctgacttaacaatgggtgtccagatacttagtcaagcgtta

SEQ ID NO: 269169 - DNA, 484 bp, Homo sapiens
atgaagtctctggcagatttgatgtctggtaaagactttctttctcatagatggcaccttcttgctcctaatcaccaccccagatgccctgcttcttatactataacgttgagggttagaatttcaacatctgaatattttgtggggtacaaacattcagaccatagcacctgtctatacactctctgggctccacctctgtcctaccttgagtcattaagtgatttgcagtgttgctaaagtttttaatttaattaatttaattcaagatagtgtgagtaattataattaaaaacaaaaattttccaatctggaaaactccacagtaatagtggagaaagatagcatctttaccattggataagtacagtcatgaactgcatatatgccagyggtgctgtagattgtaacactttatttttactgtacattttttacttttagatatgtttagatacacaaataccgttgtgttacagtggtc

SEQ ID NO: 269170 - DNA, 549 bp, Homo sapiens
agtaataaagatgaaggagtaagatttttgatactttttcagagtattctcattcaatacacatgtatcttgaaattatatttgatcaaaagttgtttgacttgggaactatcttctgttcagagcttgttttcttctaattacaattagcagttactgatgctacaatattcctttatgaagccaagaactgaaccaaaatacaaacaacataaactaccacttgatgagaagaacttcaaagtcaaattgcaaaaggtgactaaaaaaggrgagtactttcagccattttcaaaataatctatgatatgtactggaaaacttctaataatccttgtcattttacaagtaagtagagagtaatagaaaattcacccttaatagaaaaaatgtaatcataggattaaatttaaatcaatgacaaattatagtaataaatgaacactaggttgaatgttttgaaatcttagaggtttaaaatagataaattcctttaagtgagccaattctgtttccatttatgagtagaaattcaaaataatgttgata

SEQ ID NO: 269171 - DNA, 549 bp, Homo sapiens
agtaataaagatgaaggagtaagatttttgatactttttcagagtattctcattcaatacacatgtatcttgaaattatatttgatcaaaagttgtttgacttgggaactatcttctgttcagagcttgttttcttctaattacaattagcagttactgatgctacaatattcctttatgaagccaagaactgaaccaaaatacaaacaacataaactaccacttgatgagaagaacttcaaagtcaaattgcaaaaggtgactaaaaaaggagagtactttcagccrttttcaaaataatctatgatatgtactggaaaacttctaataatccttgtcattttacaagtaagtagagagtaatagaaaattcacccttaatagaaaaaatgtaatcataggattaaatttaaatcaatgacaaattatagtaataaatgaacactaggttgaatgttttgaaatcttagaggtttaaaatagataaattcctttaagtgagccaattctgtttccatttatgagtagaaattcaaaataatgttgata

SEQ ID NO: 269172 - DNA, 551 bp, Homo sapiens
ttttgaataacaatttggacaatggaaaataagtgaaagaaagctaaagtatttttaaaaataccctgtatacaggtagttcatgcataaaacagaaatgtaatggaatgattttgaattttttgcattaactatttatacctgcatttatctcttacaaatctctaccatagtcagtaaactctgagtactagagaaagagaagagctaaaattagaatagagataacaagtttatgctgcagttctgcttttcctatgtatatttttaactcatcaggctcatcattgaatgacaataatagtgtatattattatcgcatttttgaggaaactacatactgtgttccatagtgagtgtaccatcctacattcctatcaatcgtgtrtaagggttctaatttctccacatcctcactgacacttgttatcttttttttttttataatagtcatcataacagatgagaggtgataattcattgtggtttatatttgcatttttctgatgattagtggtattgagtatcttttcatgtaactgttggacatt

SEQ ID NO: 269173 - DNA, 550 bp, Homo sapiens
tgttatttttatttcctctgagagaatttgaatattccaggtaagctagaaaacttttcttggctttgccaataagtgacagggaatcactcagaatcttctttgaaataggacaaaatatacacatgtaaataaatagtaattagctcaggatttatctatttaaataaaaaaatatagattggcaatcttactgatgttaaatatgaaaatccaccaattgttttaaggcttgtctaatgtttaaggctctggaaggggcttgctatttattcagtagaaaaaaaaagtgttagggaaattatccaagtaaaattagagacatatataaatagccacacagtatcactagttcccatggtgatttttatgttaatttatataacctgctttgatgatcagcctttaaaattggggaaaaagaataaaaaacatcaacaatctttattacccataaaaaagatccctatatttacattctagaatcatgtaaaacactgtgaaaatacatcctggtttccctagaacakacaaaagttgattaattttc

SEQ ID NO: 269174 - DNA, 542 bp, Homo sapiens
ttatttcctctgagataatttgaatattccaagtaagctagaaaacttttcttggctttgccaataagtgacagggaatcactcagaatcttctttgaaataggacaaaatatacacatgtaaataaatagtaattagctcargatttatctatttaaataaaaaaatatagattggcaatcttactgatgttaaatatgaaaatccaccaattgttttaaggcttgtctaatgtttaaggctctggaaggggcttgctatttattcagtagaaaaaaaaagtgttagggaaattatccaagtaaaattagagacatatataaatagccacacagtatcactagttcccatggtgatttttatgttaatttatataacctgctttgatgatcagcctttaaaattggggaaaaagaataaaaaacatcaacaatctttattacccataaaaaagatccctatatttacattctagaatcatgtaaaacactgtgaaaatacatcctggtttccctagaacatacaaaagttgattaattttc

SEQ ID NO: 269175 - DNA, 585 bp, Homo sapiens
tgttactttcttaaaaaaagcaggctagatgactggctgtactgattccagactcccctctgtcaatgtccattccatttctatgggataygggggcatagacttcattcggactgcttcctgctgacagagggcctagttagggagctaaagaatgcaatttatttacctggagttggaaataatcatgaggtcttggacccatagaagcaatgtgttgaatcattgcatgaggatttaatagtctttgagaaaagcagtcttgcaactcatgcatattgtccagaaagagtacaatccacagcaaagaagaatgcctattcttataatcatagcaagggttactgataattttctccaccaggagggtcctggcccaaaccaggaagataaccattgacatagtgacatcataaggttggacattaattcacttatgcatgtcttggagggctagggaaacattttgtgaattagctagaatatacatgtgcaagagtggtgtagagtgcagatctgcttgttactcttcaaagcctatcttgagtaatggaccatctggaagcttagttggtgtgattatgg

SEQ ID NO: 269176 - DNA, 647 bp, Homo sapiens
cagggtgataaaacttgcagccagaggcagcttggagacctggaactggtctgtgtgtgacgttgttgggtatcccagtctgctccactgagatcttggcacagcaggaccctcccttctccagtctactcccaggtagatctttaggcatccagagtgcccactcatatgagttagcagcctgagtcactctatcctccttgtgcatagatcatggtgcagaggcaccctctccacttcccctcaggctgatcttcaggcagtcagagcacatccttacctggatcagtagcctgagccatcctacctttcctgtgcatagatcatggtatagtggagtcttctccactccatgaccaggcagatctcaggcagttggagcacttcctaacctgaatcagcagcctgagctgccccacccttcttgtgcagattatggtgattggggccccctaaacttcatgcccaggcagatctcggggatttgtagcacctactctcttggattaggagtttcagtggcctccctgcaccatgcagagaacttgggcctgaggaggttccccaaatccatgcctmggcacatcgctaggggcttggtggccacctaccagacacccttcagtgctgttttttgtgactgccgt

SEQ ID NO: 269177 - DNA, 597 bp, Homo sapiens
aattagataaacagcaacacaataatagtggaggacttcaatactccactgacagcactaacaggtaatcaaaacagaaagtcatcacagaaacaatggatttaaactatactttgcaacaaatggacttaacagatatatacagaacatttcatccaacaaccacagaatacacattgtattcaacagtgcctggaactttctccaagatagaccacatgatagggcataaaatgatcctcaataaatttaagaaaattgaaattatatcaaacactctctcagacaacagtggaataaaagtggaaatcaactccaaaaggaaacttcaaaaccatgcaaatacatggaaattamataacctgctcctgaatgagtatcgggtcaaaaacaaaaccaagatggaaattaaaaaattcttcaaactgattgacagtaatgacacaacctatcaacctattaaaacctctgggatacagcaaaggcatctttctatgaggaaagttcatagccccaaacacttaatcaaaaagtctgaaatagcacaaactgacattctaaggtcgtatcttaaggatatagagaaataagaacaaa

SEQ ID NO: 269178 - DNA, 633 bp, Homo sapiens
agttattagaaggaataagtttgagggttttttcgcagtctatctcacaccatggtgaatatggctgataataataattttttttttgagactgagtttcactcttgttgcccaggctggagtgcaatggcatgatctcggctcactgcaaccttcacgtcctgggttcaagcaattctcctgcctcaccctcccaagtagctgggattacaggtgctcaccatcacgcctggctaattttgtatttttttagtagagagggagtttcaccatgttggtcaggctggtcttgaactcctgctctcaagtgatccacctgcctcggcctcccaaagtgttgggattacagacatgagcccccacgtccggccctatagctaataattgaatactgtacatttcaatactgctaaaagaggaaatcaaacattctcatcagaaaaaaattaaacatttgagrgcatggataggttattcagcttgatttactgattccataaaaataataaatatatcatagcatcactttgtaccatacaaatgtatacaactataatttgtcaatatttaataaacaaaggtaaacttaagggttctgatggtcaagactctttctctgacatcactgaattt

SEQ ID NO: 269179 - DNA, 204 bp, Homo sapiens
gtgacttgcagctttgcccttataaatcatacattacagtgacttctactgtcagtgtaatatgaggacattagttaaatctcctctgaacaaaagtgtttgaatatggactacctagayttttaattactggcaactgtaggtttttaaacttgtatgaattcgtttctagctgtccaaaaatgtccatccatttaaacataa

SEQ ID NO: 269180 - DNA, 564 bp, Homo sapiens
tgcctttcagccattgccaaagacaagttgactatttttgtgtaaatctatttggggctgtatattctgttcttttgatttatgtgtagattctttcataaatattatgccgccatgattgttgtagctttatagtaagtcttcagatttggacagtatggaccttccaactcttcttcttcagtatcgtgttggcttttctaagtatyttagagaaaaagctcaagtgatgaactgaagataacaccagggctttatatagattagcaaagaatgcaacatgacctaaagattgatccacacaaattctctacactttcaaacatggctctgagaatacttaagttgccatatggtacttgggtaggtagaaaagacataattataactaatttgagtatgactttaccctcattgtctcattgcaatttagaaaagaattctcgatatttttgatgactaactgtggttttgggaaattgcttttccaaagaagtaagttaacaaaacaatatggaaatcttgacaccagaagtttaaatattaaagagagtaaaactctta

SEQ ID NO: 269181 - DNA, 551 bp, Homo sapiens
gtcacacaaaccatgtgggttgatggatattttcacatcaaactgtcatcttgtctctgytgttacattatatttgctgcctcaacagtgactcaaattgttatttttttacagccggtgtcccaactacaaaatagcccagtatatttttgaccacccatttaactatttattgatatctaaaggctttagttttttatcataaatataagtctaaaaagagtctagattttggatggtggcacatatttaaaaacacatctatgcataggattctcgctgtggatagaaattattttacaaatcagggttgacttgttgatataacattttgttcattacatttatttatttataccagttaccacccagcttattggaatgacattttatgatgactacttcctgatgctccaggaagcctctaggggaatgagaatggtctctaggggactggttatttgtgtaggcatttctggtcacagccagaggatcacacacatattcacaaatatctattagaaggcaattttctgttaaactgaaggatt

SEQ ID NO: 269182 - DNA, 614 bp, Homo sapiens
tcaatatatcactctgatctttgtctctgacttcagattgacttcctttctttgtgtctttgatctctctccctgttgttataggatgccagtcagacaggatttaggactcactctactttagtatgtccttctcctaacctaatgaattccatttcttaagatcttattttcaaataaagttgcattctgagttttcaggaaggatttgaatttattaaataatttaaatatatattttatacttttttaatggcatggataaagtgtttagacagtttattaaatgctatgggagaaaattatactgttagtctaaagcaaaataaccgagttggtcactaytggcccaaactctaattaatatacacatatacccatttatgtgactgtatcattattatagagtgatcaatcaacttagtgctctggggttgtggggctgtaccccaaactgtatcatttgtaatatgaacatttccagtacttatctttttaacacttgttaaaaattaaaacatgtagctaaaatatattagttacaaataatgtgatacagtacatatacttaacagtcttcattccattctcattgagaatgagaagcaagaatt

SEQ ID NO: 269183 - DNA, 604 bp, Homo sapiens
ggtgagggcaggtatttaaggaagctaaacaaatgccttccattgtaggatgtttataggcgatatttaaaatcaacaaatgaataaatagcagaatagcatgttatgtaaccctaaaggcaaataccagaagaaacagctaaaaggattaaaagtggcttcctctaggtgatgagaggtgagaagggctgtggaagacagaatttggtgttttatattataagccttgaagaagatttgactttgatatacatgtatatttttaattataaaaatattttttaaaatgaatgctgggctacagaaggcagtcaagaaacatcaacagtagctccctttaattcctgatcattattattttccccacatatttatttatattcatgtttattgtgctgcaggttctcattaaatgtttgctaaatgactaagcgaataactcatcaaggtttacakattgaatcaccaacaaaatcatcagaagagaaaaaaagaagagacatatatattgccttctattttataatgggactgtcgcccatgaataaagttttgaccaatttatggtcagtctttttggcatttttttatgggacggacaggg

SEQ ID NO: 269184 - DNA, 614 bp, Homo sapiens
aattatctgaatgctcagttttactattttatacgaatcaaacatcaaaaaaggacaaggatggagtcccaaaggagaatagaatacttgcatttcgagaaaatgtccatggatatgtgctatgaattaacgtaagctaattttgctgtttgtaattattaagttctttggggtagacatgtcctrttgtaagagagatgtgagtgttcttggtcacctttctacagccttgctatcacgtatgacatcaagtctcaaactgaattctgctacaactacaaacatttattatcaagcagtcagagaaaccatcacaacacacaactggtactgcatgttctctagctccctctctgatattttagtgcttggactacattctggattaaaagttctctcaaagcagatgcaaaagtatttcagaggcaaggtgtaggcaaatccaggcaaaccagcactctgagtcagcagaccaatgggagactgtcagcatcaggccttgggcaccatgctgaagtgtacagaccgcagagctccccatacttgtatgcctcatctggcaaagggggaggatcatgtttttaataattccagtcagtgcacatatctaaaga

SEQ ID NO: 269185 - DNA, 614 bp, Homo sapiens
aattatctgaatgctcagttttactattttatacgaatcaaacatcaaaaaaggacaaggatggagtcccaaaggagaatagaatacttgcatttcgagaaaatgtccatggatatgtgctatgaattaacgtaagctaattttgctgtttgtaattattaagttctttggggtagacatgtcctgttgtaagagagatgtgagtgttcttggtcacctttctacagccttgctatcacgtatgacatcaagtctcaaactgaattctgctacaactacaaacatttattatcaagcagtcagagaaaccatcacaacacacaactggtactgcatgttctctagctccctctctgatattttagtgcttggactacattctggattaaaagttctctcaaagcagatgcaaaagtatttcagaggcaaggtgtaggcaaatccaggcaaaccagcactctgagtcagcagaccratgggagactgtcagcatcaggccttgggcaccatgctgaagtgtacagaccgcagagctccccatacttgtatgcctcatctggcaaagggggaggatcatgtttttaataattccagtcagtgcacatatctaaaga

SEQ ID NO: 269186 - DNA, 588 bp, Homo sapiens
atttgttgttttctgaaattaaaatataactagccatcytgtattttatccagcaaccctactgctaccacacagtgtccagctatcctggatttcttctggttctttctatttgaaatgttttttattgccacggcgcttttactgatgctggttgtattagtttcctagggctgttgtaacaaagaaccacagactaggtggcttaacatgatacaaatgtgtcgtctcacagaattaaaggctagaaatccaaagtcaaggtgatggcagggctatactctgggtctttgggaaaggatctttccttgtctcttctgatctgtggcagcccaggtgttccttggcttgtggtagcataattccagtctctggctcagtcttcataaggcaaccttccccatctgtgtcttctcctctacatataaggacactagtcatattggaataagggctcatcctactccagtatgacttcatcttaactaattacatctgcaatgatcttatttccaagtatgatcacatggtactaggggttaggacttgaatatatattttgggaggacacgagtcaatccacagtac

SEQ ID NO: 269187 - DNA, 611 bp, Homo sapiens
gctattattcttccaaatatttgtattcattctccttacctggatctccccctccccccaattttcctctttctgaaacttaaattacttttatgttaggccacttgatattatcatactggtcatgaaatctctgatcattttttgtttttcatttagtagtttctttctatgtgcttcattttgaatacatcttattattgtgtcctcaagtttactgaaatattctaatattttctttcatagaatagaatctactgttaaataactcagtgtattttttcatctccaaaagttttatttcttttcgtttcacctacttgtcttcattatgctcacgtttttcttgacatattttaatgtttgtaatgtataatagctttttaaatgtgcttacctgctaattttataatctctgtcatttctgggtctgtttcttttgaaaagtttttctccttgttatggaccagatttttctgcttcttcatactctagtattttttactgggtgtcagctattgtaaattttatattactgatcgttagtttttgtgtgtttttctttaaagagtattarattctttctcctacagaaagtgaagttagataca

SEQ ID NO: 269188 - DNA, 606 bp, Homo sapiens
aggagagacgccatctaaagtatttatatctctgcagacaaattagaaactgcacataaagggatcactttgagagtcaaaatatgcctttcccttgggagaacaatcagtcaagagccaagaaagtggtagtctccgtttgggactattgggacctaaaggaaagtcttaatcagactttgcctttttagttatcctgatgcgttaatcttgtatgaagctagttgtctcccttaaatagaactagccaggagaacagcactccaygtcggcagccggactgaacgaggggagtatacactgcgctgcccagggtttgggaggtgcggtgtcctagcctggtgcccatggactgcactgttcaaggcgtgacctgagagtcaccaccagcggttcccagcattgttcctgctgctctggttgctctccaaggagaggaattcctacaccacgactttcccagggtccagacacttgccagcacctgacccatcaggaaatcgcctctcccctcttccttcccctattccttcccgagcattccccagtccagggtgtggtcagccctcagaagatctgctgggattgattgacaaaaaaacaaaa

SEQ ID NO: 269189 - DNA, 494 bp, Homo sapiens
tgcatggaagaggcagagaaacgcacctgagaatgttgcatagmtgttaaactccctttcttaaactcatttctctgtcggatttctacagatccttaaaacattatctgttacacattaagtcagtcttttttttttttttaaattggcctttcttcaatgaatttcaatcttccctattcaccctgggtgccccggtggctgttgctttcattctggaacttgggtaaaatctacacccacatcgatttgttaacaatatctgttgaaagcctattgtgctttggcttagctgatcgctgctgtagccatgaaaatggacacctatatttaagggtgagaattataccacggatatgaaatgtctcttagaatggacaagggagagggacacattactagaaaacaaagaaaacacactgagttgaatatttgtggcttaagttgctagttatacttggagaattctgagttggtttgcattagaattctta

SEQ ID NO: 269190 - DNA, 494 bp, Homo sapiens
tgcatggaagaggcagagaaacgcacctgagaatgttgcatagctgttaaactccctttcttaaactcatttctmtgtcggatttctacagatccttaaaacattatctgttacacattaagtcagtcttttttttttttttaaattggcctttcttcaatgaatttcaatcttccctattcaccctgggtgccccggtggctgttgctttcattctggaacttgggtaaaatctacacccacatcgatttgttaacaatatctgttgaaagcctattgtgctttggcttagctgatcgctgctgtagccatgaaaatggacacctatatttaagggtgagaattataccacggatatgaaatgtctcttagaatggacaagggagagggacacattactagaaaacaaagaaaacacactgagttgaatatttgtggcttaagttgctagttatacttggagaattctgagttggtttgcattagaattctta

SEQ ID NO: 269191 - DNA, 639 bp, Homo sapiens
ccagtgctagaaatcaggaggagggtagacccttctcttgccaaatggcttatatttagtctgatctatgttctttgggctgtagacttgcctgagcatatgtggtagattggagggaagggccaggaggacygcatttatataaaggaccaatatgatatctggtgcacatgactttctctagaaatagggtagtaattatgaataccatatgagctgtcactctaaatgtcatcaactcagtttccatggatttatgtctgagtcttaggttcagaggaagctgcaaataaaaactggaggagttgtacccttgcagaataaaaattagcactattttgggaccaatgcatataataatacaatattcagaggtttttctaactccattatcgacataccaaagctttgctgcattgggggcttttagaggaagcactgtagtttcttttttgttttaattgatgcctttagcacatcacagattttatccgaaaaagagacaagtaaagtccacttaatgtaattgtaataagtagaaagatacatcatcactgcatattcttccatgacacttatttcatttttttccttctaactttaaaaattgtggggaatgtacattaggtgatttataat

SEQ ID NO: 269192 - DNA, 639 bp, Homo sapiens
ccagtgctagaaatcaggaggagggtagacccttctcttgccaaatggcttatatttagtctgatctatgttctttgggctgtagacttgcctgagcatatgtggtagattggagggaagggccaggaggaccgcatttatataaaggaccaatatgatatctggtgcacatgactttctctagaaatagggtagtaattatgaataccatatgagctgtcactctaaatgtcatcaactcagtttccatggatttatgtctgagtcttaggttcagaggaagctgcaaataaaaactggaggagttgtacccttgcagaataaaaattagcactattttgggaccaatgcatataataatacaatattcagaggtttttctaactccattatcgacataccaaagctttgctgcattgggggcttttagaggaagcactgtagtttcttttttgttttaattgatgmctttagcacatcacagattttatccgaaaaagagacaagtaaagtccacttaatgtaattgtaataagtagaaagatacatcatcactgcatattcttccatgacacttatttcatttttttccttctaactttaaaaattgtggggaatgtacattaggtgatttataat

SEQ ID NO: 269193 - DNA, 588 bp, Homo sapiens
aaagaaatattcctttgacagtcaaaaacttaaagaaattattattaaacacatgaaagctgcctttcgcattcataagaagaaaaattcaagttagaattgtattgatatgtaatttttcatctataaaattggcaagaaaacagataatgtacccttggcgatgatgtagagataacaggcacactgatagtcaaagtataaattggtatgactcctattatgayaaatttgcttatatccatgccaatttcaaatgaatatcacctagaaatggcaatttctctttcagaaatttattgtatacaaatcatcttaaacatgtgaaataacatacatatataagttttttgcaatattatttataacagcaaacaattaaaaccacacacacacacacaccccttcacataatggaataccatacagtcttaaaatgaatgaagaagctctttatgtattaatatggggtgatattcaaaatatagtatgaagtggaaaatatcaatgtgtggaacaactcatattctgtcatccaagtgataaagataaatataagaaggtatgtttgtgtacatgagtgtgcta

SEQ ID NO: 269194 - DNA, 398 bp, Homo sapiens
atgtacccttggcgatgatgtagagataacaggcacactgatagtcaaagtataaattggtatgactcctattatgataaatttgcttatatccatgccaatttcaaatgaatatcacctagaaatggcaatttctctttcagaaatttattgtatacaaatcatcttaaacatgtgaaataacatacatatataagttttttgcaatattatttataacagcaaacaattaaaaccacacacacacacacaccccttcacataatggaataccatacagkcttaaaatgaatgaagaagctctttatgtattaatatggggtgatattcaaaatatagtatgaagtggaaaatatcaatgtgtggaacaactcatattctgtcatccaagtgataaa

SEQ ID NO: 269195 - DNA, 613 bp, Homo sapiens
aggacttaatttagtgggttacaaagacaatatgaaaggcagctatgatcatgtgatgcttatgtatgagggaagaacaggggtgtgacaggagcataygggttgagaaactggtagacggggagacctaaaacattcctgaacatttttggacatcaaggaaggctttctggataaagtaacacataagctatactctgaacaatcagttaagagttagctgaaaatgagaatggggataaaaaggaggagtgtcccaagcaaatccaaagacccagaagtaagtgaaataaagcaaattcaatgaaccatagccatgcagtctagcaagaactcaggtagtccaggacagcatagtgagccacaaggctggaaaagcaagcaagactcagattataaactgtatcattatacgctgcattaaagagtttgaacttttgtctaaaagttttggaaccaaataaggaactttagcatctggaaaagattactgtggttacattatgtatgggaaatgaattggaaaagaatagacttaagccaaggaagtcagttatggggaggttgcttaggaatccagacatgcgatgttgtagtctgaactaaaaatagt

SEQ ID NO: 269196 - DNA, 545 bp, Homo sapiens
ctactttactagaagaactagagaatttgattttctcatatttccttattattatctacctctgggaaatgtatgatttgcaaagccagtggtggagcaaaaatggtgcttatgcttctacatgctgccttcagcaggagaaatgcatattcgttccaatctttccataccaccaagttctgtcatgacttttagaagtacccagaatatctctgatattccagacatatgtagaaatgtatatgatgccatcaccagtaaatgactaaacagtattgtaattccctaccactctagacctttcaagatctttaagatgtcatggacctatagaagcaattagggtttttgttggccggagtggggaattggcatgaagggagctggaaagayaatttttagtccttaccaaccctaaagtgccttgatgttttttgctgtgttctatgctcatgaaaaaaaataaaaaataaaaaaaaggttctatactaatggtaaagcaaaggaaatctcccccaactccaccttagcctcagtaacaaaca

SEQ ID NO: 269197 - DNA, 646 bp, Homo sapiens
ctactttacatttagaggcattttatgtttattttcaatctaccttaatttttaaagagaaaaatatttgctcacatttattaaaggagtactcaaataaatccccaaaatgtattaatattattttaaactgtagtacactttctccaggcagatcaagctaaattctcttgtgtatgagagtgtacttagagtgcacagaggcgcagtagccaaaccacatggttcaaatcacagtgcaccgctttctatctgggcagcctkggaaaaatacttaagtatttaatccctctgggctttaattttcacatctataaaatggaaagtgatagtacattacctcatggatgtgatatgtacattaaaattaataatacatataaatcactgagaagagtgcctgggtacatagtgagcatggaattaaccttagttgttattactgttactatcgctatttgattccagagtatcctatgtatttcttttcttgacactcatcacacttttaagtatgtctcatatttgtcttcacttccagatggcaattttcatgagttcaaagacattcctacccaactcatagtggatgttcgggaaacagtctcttaattgtccatcctgactgcagagccatcaaacaatg

SEQ ID NO: 269198 - DNA, 561 bp, Homo sapiens
aaggaaggtgaagcacaaccttgactaaagagattgctatgggctgtggttcagcaatgatgaggtgctggggatggtgatgaggggggaccagatgcaaggaactttttagaaatggtagtgactttctagaagcagcagcttttgggctggcagaggtgactctggaaaacaaagacagktgatatccccagaggtagattgtgagtaggaacagaaataggaaccaacagacaagaaaggcacagggcgagggaaagatgctgacttcatccaggacacacaattttggtgtctgtggaccagctgggctcattggctacttaacctacctcaaatccagggtgagccttgacagagactccagagatggggaagcagatgtgaacaatgacacaagcttgaggctgtagaatgaggacgagtgtgaagggagagggaatagagaaaagagaaaacatcagcaaaggcagaaccaagagctttcagtatttctgtaaggatcctttccttattatgtgactagaaaaatagttaagtctcagaatgcctacaaaaatg

SEQ ID NO: 269199 - DNA, 561 bp, Homo sapiens
aaggaaggtgaagcacaaccttgactaaagagattgctatgggctgtggttcagcaatgatgaggtgctggggatggtgatgaggggggaccagatgcaaggaactttttagaaatggtagtgactttctagaagcagcagcttttgggctggcagaggtgactctggaaaacaaagacaggtgatatccccagaggtagattgtgagtaggaacagaaataggaaccaacagacaagaaaggcacagggcgagggaaagatgctgacttcatccaggacacacaattttggtgtctgtggaccagctgggctcattggctacttaacctacctcaaatccagggtgagccttgacagagactccagagatggggaagcagatrtgaacaatgacacaagcttgaggctgtagaatgaggacgagtgtgaagggagagggaatagagaaaagagaaaacatcagcaaaggcagaaccaagagctttcagtatttctgtaaggatcctttccttattatgtgactagaaaaatagttaagtctcagaatgcctacaaaaatg

SEQ ID NO: 269200 - DNA, 490 bp, Homo sapiens
ttgaaccatccatggtgagcaccttgagctcacctccttcgctggtcctggagatccttcctccaccctgcccgtcctactctgcccttcatcctgtgccccaacctgggcccaggatctcattgtggccatttgttttatcccaagccattgtgctgggataggagatatgaaggtaagaccctttccctcccgctctcatagcacccatggtcccatggaatggatcccatcgagtcatgatgactccaacacttacctagctgcccwtgtctgagccttggggccagacatctggatgcccagctgccatctctgtctgatttcctgtccctcagcacttcctgatgaagcccccctgccccatgtccctcctgcaggaacttttctttacccacaggacaattctagacttcagatccccctttttagccttatctcccctccaaccaccccactgcccctccctggacctagcatcttattgcag

SEQ ID NO: 269201 - DNA, 578 bp, Homo sapiens
tcctttctgccttacgttacaaggaracacctatatattcttcaacaccatgttcaattatctttactctaaaatgttctttatttcagtcttacagagttcattatgttctccttaagccatcacttttattgtcatatttttctctattttcataccaatcattctaaatgataatattcttttaaacatccatgtcagtaaataaactatgatttctttgaagataagaatcatgttttgtgtttgtgcctccacaagagatgcattttacattctgaatacccaataaatgagtgataaataagagtcaattaaacagttaataattcaagagtatattaatgaaaagaatattggggacataagcttgacattatggtatcaattctgttaattattaatttctcattcttgtatgaatcatttcaatttactgagcctctttggtcaagtatcaataataatgcaaacattgtcttattggacaggttttatgatcatatgttacggtaattcatagcaagttacatgaatatatgttattaaaattatatgtaaagcatcatgtcacacag

SEQ ID NO: 269202 - DNA, 373 bp, Homo sapiens
gacaggttttatgatcatatgttacggtaattcatagcaagttacatgaatatatgttattaaaattatatgtaaagcatcatgtcacacagcataaatagatgcaattttgtctattaaaataacttaaaaatatatgtaaractactttaaactacaaagagatctaattgtaaaggattattgtgtgttattaactaccacaatccaatataataatgaaaattccatgttcttgatctatcagttataggttttttctttaatcctcaaaaatgccttttaaacatctagatggcaacggcagattcaaagttccagctaacagatgagccagaagtacctgaaaaaccgtaatagttttccaaacatc

SEQ ID NO: 269203 - DNA, 373 bp, Homo sapiens
gacaggttttatgatcatatgttacggtaattcatagcaagttacatgaatatatgttattaaaattatatgtaaagcatcatgtcacacagcataaatagatgcaattttgtctattaaaataacttaaaaatatatgtaaaactactttaaactacaaagagatctaattgtaaaggattattgtgtgttattaactaccacaatccaatataataatgaaaattccatgttcttgatctatcagttataggttttttctttaatcctcaaaaatgccttttaaacatctagatggcaacggcagattcaaagttccagctaacagatgagycagaagtacctgaaaaaccgtaatagttttccaaacatc

SEQ ID NO: 269204 - DNA, 629 bp, Homo sapiens
ctcaaaaaaaataaataaataaaaataaaaagaaaagaaaaagattggtggagtgtggtcaatattccttgtagacactatattgtcccaatatctaaagagttattatttatatttttttaaaaaactaccacttacacattgtagctgctaaaagatagagatagagatacttttactaactcttacatgagtttttatgtccctgtccaggtctgctgaaatcatatggtgctcataaatatctagttatatagccaagaaacaaaaattgctgtctcttataacttgggtctggaaagctattccacctacaaattgtcagaattctcagataactctattaaacccgtcctcctacacagaggtaagataaatcaggtaaaataacaaaaaaaccataattaaactctggaagatttaaaaaacaaatgattaataattttatttttatgcaaataacaaatctttgggacagatcaaatgcattttttacttccatgttgccaaactttgatttgattgatwctatatttatccccatgtggtagctggagcactcactttagagagaaactttcttaattctagcctatcaaggagaatctgcaagttaaaaactcactttt

SEQ ID NO: 269205 - DNA, 569 bp, Homo sapiens
ggagattgaaagatcttgtttccaattctgatgttggtagaacaatgagacctcaaatgaatcactttacctctgtagacctctttgagttctatcactattttataatttaattttggagaactgtaaatgaaggattttaaatacttacattttgtacrgatgtattgagcaaaaaatatgtgtgtgtacatatttaatacaatatttactcacatttaaaaaatatattgagcataacattatatatgcatgtagatatgtatatatacacacatacacatattatgtacctaggcagaaaggctgtttgtgtttatttaaaatgaaataaaaattttcattttgaagatttttttaaaaattttttcttattaaattaaatttttgtattatagaaaaaaatcagaaagtaaaaatcacccattttatatacacagacacacacccatatataaaatcacccatagtcttaaaatgttggtgcatatcctgtcatctctctatcgcttcactctcttcctctttctcttcactctcttactcttcacctgtatctctataattat

SEQ ID NO: 269206 - DNA, 569 bp, Homo sapiens
ggagattgaaagatcttgtttccaattctgatgttggtagaacaatgagacctcaaatgaatcactttacctctgtagacctctttgagttctatcactattttataatttaattttggagaactgtaaatgaaggattttaaatacttacattttgtacggatgtattgagcaaaaaatatgtgtgtgtacatatttaatacaatatttactcacatttaaaaaatatattgagcataacattatatatrcatgtagatatgtatatatacacacatacacatattatgtacctaggcagaaaggctgtttgtgtttatttaaaatgaaataaaaattttcattttgaagatttttttaaaaattttttcttattaaattaaatttttgtattatagaaaaaaatcagaaagtaaaaatcacccattttatatacacagacacacacccatatataaaatcacccatagtcttaaaatgttggtgcatatcctgtcatctctctatcgcttcactctcttcctctttctcttcactctcttactcttcacctgtatctctataattat

SEQ ID NO: 269207 - DNA, 569 bp, Homo sapiens
ggagattgaaagatcttgtttccaattctgatgttggtagaacaatgagacctcaaatgaatcactttacctctgtagacctctttgagttctatcactattttataatttaattttggagaactgtaaatgaaggattttaaatacttacattttgtacggatgtattgagcaaaaaatatgtgtgtgtacatatttaatacaatatttactcacatttaaaaaatatattgagcataacattatatatgcatgtagatatgtatatatacacacatacacatattatgtacctaggcagaaaggctgtttgtgtttatttaaaatgaaataaaaattttcattttgaagattttttwaaaaattttttcttattaaattaaatttttgtattatagaaaaaaatcagaaagtaaaaatcacccattttatatacacagacacacacccatatataaaatcacccatagtcttaaaatgttggtgcatatcctgtcatctctctatcgcttcactctcttcctctttctcttcactctcttactcttcacctgtatctctataattat

SEQ ID NO: 269208 - DNA, 447 bp, Homo sapiens
cggaagggaacaaattgaaatatttgcaactagtaaaaaaaaggatacaatactatttgcgtatgggttgggtcagataaatctgactttgagaaatgtatttggaatgaacatgtgactttagaatctgcttgcactctctatgtctgagctttctcatttgtaaaataaggataacaatactacctcatggtatcactatgatatatacatgaaataacttgtgtgaggcatttgtcgattggctgtcaggtgatggcagttcaataaatggaatttatatgtgatctttctcttcttagtttttaaaatgcttgaaattctctgtgtgcctctctgtctgtctctttctcattctctctgtctcccyctacatatatatgtatacgtcatctgtataagtatatattatataatcatgtaaatttcatataaactgattactgc

SEQ ID NO: 269209 - DNA, 447 bp, Homo sapiens
cggaagggaacaaattgaaatatttgcaactagtaaaaaaaaggatacaatactatttgcgtatgggttgggtcagataaatctgactttgagaaatgtatttggaatgaacatgtgactttagaatctgcttgcactctctatgtctgagctttctcatttgtaaaataaggataacaatactacctcatggtatcactatgatatatacatgaaataacttgtgtgaggcatttgtcgattggctgtcaggtgatggcagttcaataaatggaatttatatgtgatctttctcttcttagtttttaaaatgcttgaaattctctgtgtgcctctctgtctgtctctttctcattctctctgtctccccctacatatatatgtatacrtcatctgtataagtatatattatataatcatgtaaatttcatataaactgattactgc

SEQ ID NO: 269210 - DNA, 503 bp, Homo sapiens
actaattttctccggcaatgatattgacttcctgttgcttcacagaccgaatttattctccccttcaagtctgtgctcttactgttccctctgaatccaatcatccccagataatccacagctaccttctttttcarctattcagatataaattcaaagtttgcctcttcaaaaacacctcccctgaccatgcgaacttacctactttttcctcattccccaaccaccctagatttagtcactttatttccttcatggaagttaccactatctgaaattacctcaatctcgtgttctttcattttttaaaatgtctacctaacccactaaaatgtgacgtctcattcactatgcctatatcatgtgaaataaaatcactgattgtgtaaaatatctcaaatgagtgaaggattgggacatcctgaaatcttgtaaaatttcctcacaggccttctaaaagagggcatctatttggacatttgtggagggttagcaatttatgg

SEQ ID NO: 269211 - DNA, 503 bp, Homo sapiens
actaattttctccggcaatgatattgacttcctgttgcttcacagaccgaatttattctccccttcaagtctgtgctcttactgttccctctgaatccaatcatccccagataatccacagctaccttctttttcagckattcagatataaattcaaagtttgcctcttcaaaaacacctcccctgaccatgcgaacttacctactttttcctcattccccaaccaccctagatttagtcactttatttccttcatggaagttaccactatctgaaattacctcaatctcgtgttctttcattttttaaaatgtctacctaacccactaaaatgtgacgtctcattcactatgcctatatcatgtgaaataaaatcactgattgtgtaaaatatctcaaatgagtgaaggattgggacatcctgaaatcttgtaaaatttcctcacaggccttctaaaagagggcatctatttggacatttgtggagggttagcaatttatgg

SEQ ID NO: 269212 - DNA, 503 bp, Homo sapiens
actaattttctccggcaatgatattgacttcctgttgcttcacagaccgaatttattctccccttcaagtctgtgctcttactgttccctctgaatccaatcatccccagataatccacagctaccttctttttcagctattcagatataaattcaaagtttgcctcttcaaaaacacctcccctgaccatgcgaacttacctactttttcctcattccccaaccaccctagatttagtcactttatttccttcatggaagttaccactatctgaaattacctcaatctcrtgttctttcattttttaaaatgtctacctaacccactaaaatgtgacgtctcattcactatgcctatatcatgtgaaataaaatcactgattgtgtaaaatatctcaaatgagtgaaggattgggacatcctgaaatcttgtaaaatttcctcacaggccttctaaaagagggcatctatttggacatttgtggagggttagcaatttatgg

SEQ ID NO: 269213 - DNA, 503 bp, Homo sapiens
actaattttctccggcaatgatattgacttcctgttgcttcacagaccgaatttattctccccttcaagtctgtgctcttactgttccctctgaatccaatcatccccagataatccacagctaccttctttttcagctattcagatataaattcaaagtttgcctcttcaaaaacacctcccctgaccatgcgaacttacctactttttcctcattccccaaccaccctagatttagtcactttatttccttcatggaagttaccactatctgaaattacctcaatctcgtgttctttcattttttaaaatgtctacctaacccactaaaatgtgacgtctcattcactatgcctatatcatgtgaaataaaatcactgattgtgtaaaatayctcaaatgagtgaaggattgggacatcctgaaatcttgtaaaatttcctcacaggccttctaaaagagggcatctatttggacatttgtggagggttagcaatttatgg

SEQ ID NO: 269214 - DNA, 552 bp, Homo sapiens
catcttcaagtacaagactttaaaaaaatactttgcagcagaatgacatggatctcctaactttatttttacttaatatcaatttttaagtttaagaattaatttcagttagaagaatagagcaaaactatgtctggaaaatttaaggaccacgcatttcaaaataatccaagaaaagcatatagtttcatggatatagtgttttacttttttggaaaatacaaaatcgtcagtcattctcataatcaaaaaaaatatgcacagttcagaagttgcaaatcctatatatagaacaagccacacccrttttcatccttctatacatacatggatgggaattgatgaaaagactgtgtttaaacattcgataataaagtcattggtgaattatttgtattacaactttccactgaatgaatgctcatttttcatttaaacagtctcacgattagcaaataacaagaggtatccattagtacaggtctcattgactaggctgatcaccgataccaatcggactaaaaaagctacactcagaatcattcctcaatc

SEQ ID NO: 269215 - DNA, 594 bp, Homo sapiens
tggctattatcaagaaaacaagagataataagtgctggtggaggtgtggataaaaataaattcttatacactgtttatgggagtgtacattggtacagccattatggaaacagtatagagatttctcaaaaattaaaaatagagctaccatacaattcagcaatcccactactgggtatatatacaawgaaaatgaaatcagtatcttgaagagatatctgcaacacctttttcattgcagcattattcacaatagccaagatatggaaacaagtagccaccaatgtatgaatgggtaaagaaattgtagtacatatataggcatactttggcgatatcatgggtttagttccagaccaccataataaagtgagttacacaaagtttttggtttctagttcatataaaagttatgcttacactatactgcagtctattaagtgtgcagtagcattatgtctaagaataatgtacatattttaattataaaatacattattactaaaaatgctaatgaccatctaagccgttagtgagtcaaaatatttttgctggcgaagtgtcttgcctctgtgttgattgctgctgactgat

SEQ ID NO: 269216 - DNA, 508 bp, Homo sapiens
ctggtggaggtgtggataaaaataaattcttatacactgtttatgggagtgtacattggtacagccattatggaaacagtatagagatttctcaaaaattaaaaatagagctaccatacaattcagcaatcccactactgggtatatatacaaagaaaatgaaatcagtatcttgaagagatatctgcaacacctttttcattgcagcattattcacaatagccaagatatggaaacaagtagccaccaatgtatgaatgggtaaagaaattgtagtacatatataggcatactttggcgatatcatgggtttagttccagaccaccataataaagtgagttacacaaagtttttggtttctagttcatataaaagttatgcttacactatactgcagtctattaagtgtgcagtagcattatgtctragaataatgtacatattttaattataaaatacattattactaaaaatgctaatgaccatctaagccgttagtgagtcaaa

SEQ ID NO: 269217 - DNA, 575 bp, Homo sapiens
tgctgtaattctgggggctactcaattcgtgaatggttcattgatcaattaaacttctttaaatgtaattcaccagaagtttttcttttaacaattgtttacaaagaagtattttacttttctactgaattattttataattttaccaatctaaaatacacactattgatatcatattttcaaatttaaatacctctggtaatcacttcttagaattttgaaatggaaacagtattagaacaaatttgaatcatttgaatataactctcttttccatatctaggctactgggtattgtgaggaaaagtcatacatctatgaagattggtacattttcatactcactatctccataagccctccatactagcacagtggcaycaagtgttctgttttacactgaacctctcttttttcttctatagggtttattgcaaacgtattttcctctcctgaaatgtccaagaccactagaactgtactaatctcacaattccctctgtatttactgtccctcagctccagaaatttaccaatagtttattttttgacagagggctcaaaatctcctactt

SEQ ID NO: 269218 - DNA, 610 bp, Homo sapiens
tttattaatgacaagtgattattaacagaatacagatgagccacaggttaggaaagaagatgtgcaaatcacatatcacgaaaaatcttatatccagaatatagaaagaattctcaaaactcaacagctaagaaacaacccaataaaatataggcaatattttagacaataggcatgaatagactctttaccaagcaagagttacagatgatcaataaatacgtgaaaagatagtcaatatcattagtcattaggtacatggaagtacaactgcaatgagataccactttgcaactattataacgaaaaagaagaaaactgacaatgccaagtgttgacatggatggggaacaactggagctttcatacattgctggttggaatgtaaaatggcacagcaaaactttcaytttttataaagttaggcacatgattatgatataatacaatattccctctcctaggtatttacctaggagactaggagatatgaaaatatttgttcacacaaaaactagtacaagtatatttatagcagctctattttaatcatcaaaaactagaaaaaacttagatgtccctcaataaataaaatgataaatagtggaac

SEQ ID NO: 269219 - DNA, 540 bp, Homo sapiens
ttttaaatgaaatcacacagcatgttgccttttgtgtttggcttcttaatgttataatattttcaaggctcgtccacattgtagcttgtatcagttcttctatactttgtgtgaaagtttttctatgaatatatattttcaattatgttgaatatgagtagaattgtcaaatgataagrtagctctatgtttaacattttgtggaattcccaaatgtttttgaaagtttttgtacaatgttacaattccaccaccaactttcctctatatctatcaacactttttatttttgatcttgtcattttgccatcttaatgagtgcaaaatgctatctcattgtaggtttttttattttattttattttattttttgagatggaatcttgcactgtcgcccaggctggagtgcagtggcgcaatctccactcactgcaagctccacctcaccagttcacgtcattctcctgccttagcctcctgagtagctgggctacaggcgccagccaccaagcccggctaatttttgtgtgtgtgtatttt

SEQ ID NO: 269220 - DNA, 431 bp, Homo sapiens
agacagtaggtcaacagtgggtgtatttttttctgctttgattgtattttatttaattattaattttggcttaatagagtcttcctttggcaggctggacaaatgtcatggcccctagccctttccaactcataatgaaaatagacctatttccagcttcaccttgctgattgcttctacctgctgctcaggataatttgttcagtgtaaatgaagacttcagtagttattgaaggaaaaaggtacaaaaagagactgttgtgcagcatctacataaagcggcttgtgcaaaacagtcctgattaaatgaaagtgtcttaagattatgagatcttcagtgtttcacaattacarttaaagcagtcataaataattactgtaaactagaaaatcaaccatatctggcaaattagaattcatttaatttgcct

SEQ ID NO: 269221 - DNA, 432 bp, Homo sapiens
atggtgagttcacaagatctacacttttggtaaatttcaagtacatagtataatattaactrtggttactctgctgtacgtagatctctagaactattcatcctacgtaattgaaactctgttccccctttagtaacatttcatcttttttcccactcccacctgatcacatctggtaactaccattctaattccttctcttatgatattgattttttaagattcttatgttcttggcatcaagcagtacttattttttatatgtctggcttatttctcttagcataataaataatgtcatttgttctcacgaatgaaatgatttccttatttttttaaggataagtaacattccattgtgtaagtataccacaatttcttcattcgttgatagtcacttaggttgtgtctatgtttttgctattgtgaata

SEQ ID NO: 269222 - DNA, 432 bp, Homo sapiens
atggtgagttcacaagatctacacttttggtaaatttcaagtacatagtataatattaactatggttactctgctgtacgtagatctctagaactattcatcctacrtaattgaaactctgttccccctttagtaacatttcatcttttttcccactcccacctgatcacatctggtaactaccattctaattccttctcttatgatattgattttttaagattcttatgttcttggcatcaagcagtacttattttttatatgtctggcttatttctcttagcataataaataatgtcatttgttctcacgaatgaaatgatttccttatttttttaaggataagtaacattccattgtgtaagtataccacaatttcttcattcgttgatagtcacttaggttgtgtctatgtttttgctattgtgaata

SEQ ID NO: 269223 - DNA, 432 bp, Homo sapiens
atggtgagttcacaagatctacacttttggtaaatttcaagtacatagtataatattaactatggttactctgctgtacgtagatctctagaactattcatcctacgtaattgaaactctgttcccccttkagtaacatttcatcttttttcccactcccacctgatcacatctggtaactaccattctaattccttctcttatgatattgattttttaagattcttatgttcttggcatcaagcagtacttattttttatatgtctggcttatttctcttagcataataaataatgtcatttgttctcacgaatgaaatgatttccttatttttttaaggataagtaacattccattgtgtaagtataccacaatttcttcattcgttgatagtcacttaggttgtgtctatgtttttgctattgtgaata

SEQ ID NO: 269224 - DNA, 433 bp, Homo sapiens
tttttattaataaattcatgtgagatctataatttaataaattatatgttccaaaaacacaaaatattggatcttcatcctcaaatttaagaacagttctattttacctgatgtgcagcaaatctggaagattgtgaagaattctggaatgacactgacatcataaacctgcattttcatttacagtgagtcaattggatttatagtctcaacctagagacaatatttaaaagttcaatgttattaattgttttaactgactgacttatagaaaaatgtggcaatccaaattccttactggcaaaattatatacatcattaaaccgaattatctgctaaatcttatatttaacatctttttctgagaaraagtatgaatcaaattttaaacttccagagttaagtttttgatctttcaagtggaccttaatga

SEQ ID NO: 269225 - DNA, 567 bp, Homo sapiens
cacacttttggcctgaaacaattactgaacttttaaaagtgttgtgggcacatagtaggtgtgtatatttaggggtacatgagatgttttgatataggcatacgatgtataataatcacaacatgaagaatggggcacccatccccttaagcatttacccttttagttactaacaatccagttattttctttaagttattttaaaatatacarttatgatattaatggctatagtcaccatattgtactaccaaatagtaagtcttactcattctttctaatttttttctttttttggtagccattaaccattcccacctccgtcaaccccaccccaccattacccttcccagcttctggtaatcatctttctactttctatgtccatgagttcaattgtttcgatttttatatcacacaaataaatgagaccatgcgatgtttgtcttttgtgcttggcttatttatcacttaaaataataatctccagttccatccatgttgttgcaaatgactgaatctcattctttttatggcttaagagtatttcgttgtttatatgtacca

SEQ ID NO: 269226 - DNA, 567 bp, Homo sapiens
cacacttttggcctgaaacaattactgaacttttaaaagtgttgtgggcacatagtaggtgtgtatatttaggggtacatgagatgttttgatataggcatacgatgtataataatcacaacatgaagaatggggcacccatccccttaagcatttacccttttagttactaacaatccagttattttctttaagttattttaaaatatacagttatgatattaatggctatagtcaccatattgtactaccaaatagtaagtcttactcattctttctaatttttttctttttttggtagccattaaccattcccacctccgtcaaccccaccccaccattacccttcccagcttctggtaatcatctttctactttctatgtscatgagttcaattgtttcgatttttatatcacacaaataaatgagaccatgcgatgtttgtcttttgtgcttggcttatttatcacttaaaataataatctccagttccatccatgttgttgcaaatgactgaatctcattctttttatggcttaagagtatttcgttgtttatatgtacca

SEQ ID NO: 269227 - DNA, 433 bp, Homo sapiens
tgcattcccgtacacaccaggtgtgatctttttcatgagtttaggcttttatgaaattaaaacgtatctttttgtaaaataaaccctgcaaaatcatccataaggcaaataaatgcagaagrcagagctatccaggaaaaacatttttgcttatctcaataaagtatcctaccactcatggaagcaggtaccaagaaggtctgaattgagagctccatcctgtacagaagcaactgacctttcttttccaaagaaaatacaacggtacataactatgttacgtaataaagatgtaaaggtagagataagaacggtgtaataaaaatggttatggatagctaaaatcagttctgttcccaggtgtggttaccttaaattagttttatagcttgtccagggaattcagagctgagaaaaatgcagttttgagttt

SEQ ID NO: 269228 - DNA, 541 bp, Homo sapiens
ctttgtttccaaaagaataatcagggaagcaaaactttaaagaattattttatttgtttttcactcaatttaaaataggtaatatactataataaaataggtatagtatatgamttaaggatagtgagatatttgagtagaaacatcactaaaagaaaaaaatagttaatcataagttaaaatagtaatcatttgcatgttttctgtagtcagttttttttttcttttcaatgtttatgctattgataaaacaataaaaattgacacacaaatataaaggtctaaaccttcttagctactccattttcatgagctaaattctcttcttggatgagttttaaatgttccttttcaagtcagtaggggtgatgaatgcccagccaaagagttggccccttgattctacggtaaagcagatgtccatgttagacatcaagaaaaataacattggttgggaatgttgtaacatttatataaattatatgggttaaacatactggaaaaaatgaggcatataatttatgtacagtgtgattattgt

SEQ ID NO: 269229 - DNA, 533 bp, Homo sapiens
gcagcagcattttgtgaaactatctggggtccctctactgaagtctgatatcyagccagcttctgtgtgtgttgctccataaggcaataagtcatagatgatctatatctggtattgttcctgttgccatgagtttttctcaggaaatgctatttcagagggcttggtggacatgttcttgggtcacctgaaccttgacagttgatacagcaagcagagtttctcttttagcaccagagggtcttataaacgtttacctacataacaaacctgcacatgtacccctgaacttaaaataaaagttaataaaaataaaacaatttgttcagaattgaaaaaaaaggctttgaggtgatggatgtgttaattagattgatttaattatcttacattgtacttataaattataacaccatacatatatgcaactataattaaaacataaaaaacatacaactataatttgtccatttacaatttaaaaataaccaaagacagaacttctcgaatgatggcttaagtagctcagtaaa

SEQ ID NO: 269230 - DNA, 605 bp, Homo sapiens
agtcttggaaaagtaaattaaaatactcccatggaaattgctgagtgtttttgagattgtatgccctattttaagcctgatgtaattttgacattttctgctacatgctttggcgactgacacactgyatgaaatcaggctcttctattctcacatatattgccccaagaaacacctttaaaattgatgtatcaaattaacttaaactttaattcttcctcttcaaacttccctgttagctattatgaaaattgggtccatttttcttaggacacttctgttggccctgcacccctttcagtctcctgtctgccacagaatgaatcgtctccctgcttataagccactgaggaagaggaagcaacataaaggctctagaaatgcggtgacgagaggtctcctacttcactgttaccatagtcttctagataccagtttctgactggtcactctaaagggaaaagcagagatgccaaaataaatcttcctaatctcatcagtggaggtcacaggaaactcccagaggcttggccatgtccaatttctcctttcttagggatgactaaagtcagagttgcaccaaatttttaaagagaggaggagtg

SEQ ID NO: 269231 - DNA, 605 bp, Homo sapiens
agtcttggaaaagtaaattaaaatactcccatggaaattgctgagtgtttttgagattgtatgccctattttaagcctgatgtaattttgacattttctgctacatgctttggcgactgacacactgtatgaaatcaggctcttckattctcacatatattgccccaagaaacacctttaaaattgatgtatcaaattaacttaaactttaattcttcctcttcaaacttccctgttagctattatgaaaattgggtccatttttcttaggacacttctgttggccctgcacccctttcagtctcctgtctgccacagaatgaatcgtctccctgcttataagccactgaggaagaggaagcaacataaaggctctagaaatgcggtgacgagaggtctcctacttcactgttaccatagtcttctagataccagtttctgactggtcactctaaagggaaaagcagagatgccaaaataaatcttcctaatctcatcagtggaggtcacaggaaactcccagaggcttggccatgtccaatttctcctttcttagggatgactaaagtcagagttgcaccaaatttttaaagagaggaggagtg

SEQ ID NO: 269232 - DNA, 605 bp, Homo sapiens
agtcttggaaaagtaaattaaaatactcccatggaaattgctgagtgtttttgagattgtatgccctattttaagcctgatgtaattttgacattttctgctacatgctttggcgactgacacactgtatgaaatcaggctcttctattctcacatatattgccccaagaaacacctttaaaattgatgtatcaaattaacttaaactttaattcttcctcttcaaacttccctgttagctattatgaaaattgggtccatttttsttaggacacttctgttggccctgcacccctttcagtctcctgtctgccacagaatgaatcgtctccctgcttataagccactgaggaagaggaagcaacataaaggctctagaaatgcggtgacgagaggtctcctacttcactgttaccatagtcttctagataccagtttctgactggtcactctaaagggaaaagcagagatgccaaaataaatcttcctaatctcatcagtggaggtcacaggaaactcccagaggcttggccatgtccaatttctcctttcttagggatgactaaagtcagagttgcaccaaatttttaaagagaggaggagtg

SEQ ID NO: 269233 - DNA, 605 bp, Homo sapiens
agtcttggaaaagtaaattaaaatactcccatggaaattgctgagtgtttttgagattgtatgccctattttaagcctgatgtaattttgacattttctgctacatgctttggcgactgacacactgtatgaaatcaggctcttctattctcacatatattgccccaagaaacacctttaaaattgatgtatcaaattaacttaaactttaattcttcctcttcaaacttccctgttagctattatgaaaattgggtccatttttcttaggacacttctgttggccctgcacccctttcastctcctgtctgccacagaatgaatcgtctccctgcttataagccactgaggaagaggaagcaacataaaggctctagaaatgcggtgacgagaggtctcctacttcactgttaccatagtcttctagataccagtttctgactggtcactctaaagggaaaagcagagatgccaaaataaatcttcctaatctcatcagtggaggtcacaggaaactcccagaggcttggccatgtccaatttctcctttcttagggatgactaaagtcagagttgcaccaaatttttaaagagaggaggagtg

SEQ ID NO: 269234 - DNA, 569 bp, Homo sapiens
ttactctgtttctataataaaatgaaccatgttttagcagtgactcttaggaatagtagcaggaaaatatgtttaaatcagataaattcaagaatctcagaagaaaaaatggaaacaaataaacatattgtaatcaaaaatgttcttttcctaatccaaatggactctaaggtagcagagaagcagactgttgaatatggaacttgcccctcactgccaycaatccatccatgactccactgcagtatcttatgctccaagatgagaaagctaagaaatacataagagcttaaatatctcttctctctgtggaactcaacaaatgttaggtttctgcatgggacagcaacctcaaagctgaatgatgcttttaagttcacacaagttcattcaaatcagaatgaagcaggatttccagagaaaacatgcttcaggtttcactccattgctacatcctgagagcaatccagagacagtcttgttatgagttgaaacaatacttgaaagtgcaaagaaaacaggtgactattcacctgccattcttaccaacatcttgtgttgttagtttg

SEQ ID NO: 269235 - DNA, 596 bp, Homo sapiens
agaaaaacaagatagagaactcagaaacagataaatgcatgcatgcgtatggaatatatgatgatatttgcatataaatctagtgagaaatgcatataataaggtgttgaaaaatttgtttatacattaaatgtatcaaaatattatgtaccccatgaacatgtacaactattagttgtaaaaaagtctgaaaaaaattgctctctatttaaaagaatataaaactagatccctacttctctatttttttaaatccaaatggastaagcctataaatattaaaatggaaaccataaagcattgaagaaaatgaaagtaatagtttcataacctccgtgtgggggaagaactaagaaatctagaaatttagcagctattgaagacagtaaaataattaattacataacattttaaaaaatttctactgacaaaataaaagtcagagatgtagtatagagaagtttaagcaaatatttttgttttagaaatgaaaacaaatggcagaaaatagcaactctaatgaaatatctcaaaataatggctaatgcaaacttagaagttttttcctattaatacatgcataagtaagtttattg

SEQ ID NO: 269236 - DNA, 531 bp, Homo sapiens
aattcagaggtattccaatggttggagccattaaaacaagaaaaagagaaaacgtrttgattatttgactatgtaggtttttttaaaacaagaattactactatatctaatattaaattcaggaaactttttagttcattttaattaatagtcccatcaattgtatatacagtatatgcagaacctcaatgaaataataatgtcttataggaaattatcacattcttaaaggaattattaagtgctgttgttttgaccttttcctttttcttatacacactagcaaattcgcaatttttttttttctgaattgtccttcaatttgtaaaatcacttccttactgttatggtcattgctcgtatttaatttattttttaaggtaaccacgttaagcattctgtgtaagaaacaaaagagacaaaagatataatcattttcttcaatgaggtatgtttttgtataaacgaaatatgtatttgttgatagaagtcaggctctaaaattactactctgcctttccttccacagat

SEQ ID NO: 269237 - DNA, 625 bp, Homo sapiens
catcagatgagaacttcataaaagtcaactttttttcacagcacactcccagtcttttcattgctataaactgatcattgttggtataattgagggtacagttactagtactaagagactgctctgtctgcatatactagacaaatatagggacaacgaaaatrtaaacaaccttatgatattgtaaactaccagaattcaaaaaataagatcaagggcattgttaatatttaccagaatatgtttcaataaaacattaattaaatgggatatatatctttgtatgatggattagtaaaatatggtgtcaaatcatataaatatatttgctttggggaattcccttttggacccttttattttttatcatctcatagcatatcacaagtccccagaaatatgccatgctaatattgccaactgagtttttccaagcaaagatgacatcagccatctgtcacacagtactaatgctgagaagcaaagccaactatagagaaaataaatacctttcatattgattagccaaatatttatgttgagaatgaaatgattaaaatctcactattcaagctaattactgtaagtgaatatttgcctccaagtgaatgacataccagcagtg

SEQ ID NO: 269238 - DNA, 584 bp, Homo sapiens
agccagggtggtctcgatctcctgacctcgtgatccgcccacctcggcctcccaaagtgctgggattacaggcgtgagctactgcgcccggcctgttttttgatttttaaaatatgactctcaatagctaataaaaatatctgaacagttctgtatgcctttcaratccaatattactaggctatggtacttacgtattcttaaagtgagtatttaggactttttcttttgccttttctttgactttggcttttcttccttgatattctgaatctgacttcaagaactgaaagccaaggtagcaggcaatgtattgtcttatctaacttttactatctcgtaaaagaaagcaaacatttttgcctgcaaataaaaactttttctgtaattaatctcaaataataattacaaagtccttacacaaggaattattatgcacaacacattcctttgaaagaagtgaatgcataaaatagaaaaatcgtgtcttatgaatttttcattgatctgtaaagacagagaaatttatactaaactaagccttgggacactgaactagtcttccaggtaccaagataacagag

SEQ ID NO: 269239 - DNA, 584 bp, Homo sapiens
agccagggtggtctcgatctcctgacctcgtgatccgcccacctcggcctcccaaagtgctgggattacaggcgtgagctactgcgcccggcctgttttttgatttttaaaatatgactctcaatagctaataaaaatatctgaacagttctgtatgcctttcagatccaatattactaggcyatggtacttacgtattcttaaagtgagtatttaggactttttcttttgccttttctttgactttggcttttcttccttgatattctgaatctgacttcaagaactgaaagccaaggtagcaggcaatgtattgtcttatctaacttttactatctcgtaaaagaaagcaaacatttttgcctgcaaataaaaactttttctgtaattaatctcaaataataattacaaagtccttacacaaggaattattatgcacaacacattcctttgaaagaagtgaatgcataaaatagaaaaatcgtgtcttatgaatttttcattgatctgtaaagacagagaaatttatactaaactaagccttgggacactgaactagtcttccaggtaccaagataacagag

SEQ ID NO: 269240 - DNA, 568 bp, Homo sapiens
ggctgccatttttttctcacttagaatgctgacaaaactggtatagtttggagggacagctaagaatgaaggaaaaagaacttgcagctttctacaccccgcatggctctgtaaaatttggagaaagtgcagaggttatatattctccacacagaaggaaggaaaggagtggagtgtgctgccaatgtcttgacctacggtttacagtctcataaaagaagaagcgagagcttacaggcctttgaaaaagcaaagggcagyaaattcctgtaattaagaacctacacacacaagttcagagaatacacatccgtaggaaaggttacagaacttcctagaatttcgttctgggttaattggttaaagtttttccccattaaagccaatctttacacagactgaacaaattgacctttattaacatgtgcagaaaccaacacaagctacaaggaacctgaagactcaggaaacatgacacaataaaaggaccaaaataaatccccagtacccagcaacaaaagaaatgaagatctatgaatttcatgatgaagaattcaaaataattact

SEQ ID NO: 269241 - DNA, 594 bp, Homo sapiens
ttaatatggtttgattctgacataaaaacaaacatacagaccaacgaaacagaaaacggagtccagaaataaactgacacatatagagtcaacagatgtttaacataggtgccaagaatccacagtcagaaaaagtctgtccagcaaatttacatgagaaaaacaaccccattaaaaagtgggcaaaggacatgaacagacatttctcaaaagaagacatacatatggccaaccagcatatggataaaagctcaatattactgatcatcagagaaatgctaattgaaagcacaatgagataccatctcacaccagtcagaatgcctattattacrcagtcaaaaaatagcggatgctggtgaggttgtggagaaaaaggaatgcttatacactgttggtgggggtgcgaatcagttcaaccattgtggaagacagtgtggcaattcctcaaagaccaaaacacagaaataccactcgactcagaaatctcattactgggtatatacgtatatatgcaaaagagtataaattgtaacactgtgaagacacatgtacatgtatgttcattgcaacattattcacaatagcaaagac

SEQ ID NO: 269242 - DNA, 545 bp, Homo sapiens
gtgatagagggttattgtaagacgtgcagtgaaaataggtgatgggcagtggactgattcagaatttattcggaggcaattgaccacaaaatttccagatgcattggtgtattcaagtaagccaataatgaaagatgattctaagtcctgtgatcaaagaaactgggaaaatgaagttgtcttttattgaaatggacaagactatagaaggagtagattaagagggttggaaataaaaaacatttgttttaggacgtgtagtttgagatatctgttagatatcaaaatgtagaatttgagtaggttgttgcatttacmaatcttaaattaaaaaggaaggtatatgcatggaagtcaatagcattttaggtatgtttaaagccatgaaactgaacaagatcacctaggaaatgattgaaagtagagaaaatatttagaagcaagttcttgtacatttcaatgcataggaataaatataagaaagaaatagcagagagagagacaatatgtttccataaggaagggatggaatcaacagatagtgg

SEQ ID NO: 269243 - DNA, 545 bp, Homo sapiens
gtgatagagggttattgtaagacgtgcagtgaaaataggtgatgggcagtggactgattcagaatttattcggaggcaattgaccacaaaatttccagatgcattggtgtattcaagtaagccaataatgaaagatgattctaagtcctgtgatcaaagaaactgggaaaatgaagttgtcttttattgaaatggacaagactatagaaggagtagattaagagggttggaaataaaaaacatttgttttaggacgtgtagtttgagatatctgttagatatcaaaatgtagaatttgagtaggttgttgcatttacaaatcttaaattaaaaaggaaggtatatgcatggaagtcaatagcattttaggtatgtttaaagccatgaaactgaacaagatcacctaggaaatgattgaaagtagagaaaatatttagaagcaagttcttgtacatttcaatgcataggaataaatataagaaagaaatagcagagagagagacaataygtttccataaggaagggatggaatcaacagatagtgg

SEQ ID NO: 269244 - DNA, 553 bp, Homo sapiens
aattaggaaaataaaaagccctcttaaatcctggacttttttggtttgaaaaatgggaaccacccatgttgatcttgcctgataccccttcaagatgctttcagtcagggaaactggatgaagaacacatgagggcttcctgcacattatgctgcaacttcttataaatctctgctttaaaacagaaaaaggtttttttgttgttgttcgtttctttgtttttaaagatgagctcaagtctgctttgctccttcttattgcagtgactgtctctatcattattgcatggttcctataagacatggttgtmtgagggcacccactagccagtcaacaaatttcatcacaaataaaattccaaattttcttttggatacaacacaagccgctgtggcttccattgctacaggctaacattgacttagtgtttcccatttaccaagattgtaccagctaatgtaaagggtttgtggtggtggattcttccacattttaccctccaaagatctcaatgaggacttgcacaattactaatacatacagcctggtttta

SEQ ID NO: 269245 - DNA, 609 bp, Homo sapiens
ttacaaaatataaaattttcttgtgtgggagaccattttatgttgttttgttgctgattattgttttctgtaatttaattctttagatatataggtcaactcaatgaaaatgttagtgcacttgttctatcactaagtttccatggtatgcttaatatagtagtgcacatttcatttggaaaaatattctgtcatgatgtgaatagattaaccaacaacaggaaatttgcaaaatgataatgctcccaaccacattcattcttatcatctgtatttgtgttggggacttcaagtccagtccattattaaaacatgtgttgcatggctcaaatacttgtaataattattccctaagccagcatttttgttactgaacaatatgatcaataaacacaaggatcacttcttagctgtgtagttatgctccagcaccacccatcacaaagcgttggggaaagctgcctgctctgaccttttccccttcccatccaagtttcaacagctgtttttctagagaccataacacaggtgcctatccttgcttagtaagtgtaaaygtggcaggctaaggacctgatgtggcaagctaagaatggaagtttctgaggc

SEQ ID NO: 269246 - DNA, 579 bp, Homo sapiens
gaaaaaccacttcatgaacatgttaactttcattcccaaaaagaaagattgtaacccccaagtatttgactaggacarattaaataatagccttacttgtactataggcttgaaattttagtatcttccggagagtaggaaggctaattcgtagaagggtaaatatttccagttacaattagtggagtctagtttttctatcttaatacaaagaggttaaaatagattatctctcagtactttatagctctaaaaatgtgatgattctacaggaaatgatgaaagtaataagctacaatctgctcagtagtctgtatcaaatctattgcttggatggttctaaatgaagttaattagaaaccccttcattctaatttaagaaaagctggcaataaaggttcattctgtattttaggaatgctggagtagtcatatttctttaagacatagctgccaaaccctatgtgagtgttttgtgaataagtcaggggatattggcatcttgctggaatgaggctatagtggcctcatgatctctaggtggatatatagatgtgtcagtgacttgtggagaatggt

SEQ ID NO: 269247 - DNA, 579 bp, Homo sapiens
gaaaaaccacttcatgaacatgttaactttcattcccaaaaagaaagattgtaacccccaagtatttgactaggacagattaaataatagccttacttgtactataggcttgaaattttagtatcttccggagagtaggaaggctaattcgtagaagggtaaatatttccagttacaattagtggagtctagtttttctatcttaatacaaagaggttaaaatagattawctctcagtactttatagctctaaaaatgtgatgattctacaggaaatgatgaaagtaataagctacaatctgctcagtagtctgtatcaaatctattgcttggatggttctaaatgaagttaattagaaaccccttcattctaatttaagaaaagctggcaataaaggttcattctgtattttaggaatgctggagtagtcatatttctttaagacatagctgccaaaccctatgtgagtgttttgtgaataagtcaggggatattggcatcttgctggaatgaggctatagtggcctcatgatctctaggtggatatatagatgtgtcagtgacttgtggagaatggt

SEQ ID NO: 269248 - DNA, 535 bp, Homo sapiens
tcctgccataaatcattttctcagagtggacctcaatttagggtagaattgctagttacatagatgatgtcaattgggaaatacagaaaaaatagtcccggtttttctttcttactcacttgctacattgcttgaaatttcaccataagagtttgcagtttggctaaagttttgatatttatgtcctgttttaagatgtaaatatcggcctggtgtggtggctcatgcctgtaatcccagcactttgggaggctgaaatgggccaatcacgaggtcaggagttcgaggccagcctgaccaacatrgtgaaaccccatctctacaaaaaaatacaaaaattagccaggtgtggtggtgcacgcctgtaatcccagctaatcaggaggctgaggcaggagaatcgcttgaacccaggaggcagaggttgcagtgagccaagatcgcactactgcactccagcctgggtgacagagtgagactccatctccaaaaagaaagaaagaaagatagatagatatgtaaatatcatagcgag

SEQ ID NO: 269249 - DNA, 567 bp, Homo sapiens
gcagtgcacaaccctcacacgcacatttcacaatagggtttgcgctcctatcaaaatctagtgtcccctctgatctgacaggaggcagagaaacataaatataaaaaaagcaccaaagaaaaatgagctatcttttaacattaatgagattaaaatctaatatgcagcagrgaaaaaacaattgcaaagaagatgcttaaaatttttaaaaacacaaatttaaaattaaaaaggagtacaataagtcagaaataaatcaacccaggatctgctgctgccaatatcctttaaattcttggttaatgtagaaaaaccaatatgcagatgttttaggagacaatgttaaattagattaggcaatcgatacaagtttagaaggatgagcctacaaaatgcctctgtagaaataacatttagaaacaaggcacatgaacaccacacacacacacacacacacacacacacacacacacacaatgaggcaagtatgtgagccaataactttactcacttcagagtttcaactctgattatttctaacatatgtagcgctgcaattgggcctta

SEQ ID NO: 269250 - DNA, 567 bp, Homo sapiens
gcagtgcacaaccctcacacgcacatttcacaatagggtttgcgctcctatcaaaatctagtgtcccctctgatctgacaggaggcagagaaacataaatataaaaaaagcaccaaagaaaaatgagctatcttttaacattaatgagattaaaatctaatatgcagcagagaaaaaacaattgcaaagaagatgcttaaawtttttaaaaacacaaatttaaaattaaaaaggagtacaataagtcagaaataaatcaacccaggatctgctgctgccaatatcctttaaattcttggttaatgtagaaaaaccaatatgcagatgttttaggagacaatgttaaattagattaggcaatcgatacaagtttagaaggatgagcctacaaaatgcctctgtagaaataacatttagaaacaaggcacatgaacaccacacacacacacacacacacacacacacacacacacacaatgaggcaagtatgtgagccaataactttactcacttcagagtttcaactctgattatttctaacatatgtagcgctgcaattgggcctta

SEQ ID NO: 269251 - DNA, 580 bp, Homo sapiens
tgtttctgtgtagtcagtgcactaaaaattccaaaggaactagatttacagtcatctctcctccttctactcttagtattagagagaacgcagkgccaggagccctctaatgcaaatgttttctggccaaggccttgtataattccatgttcaaagagacatttgaaggtgacttgacagcactttataaaacatttgctccttagcaaatggactgagttactgtgcatcactgtcaccatggcacaggactacaaatgtatcaagtgacaaaaggagagagatagggggacaagcaggtgtatgagcatcaactctcctcggcattgtctacatccagacttgagggcgtcccttatgacattaacaaacagaaggacaatggcttaattgcaatccctttcaggaatggtccttaaaacatcttgcagatgacaacatgcattagtctcctgacagtactgggctgctactagagtgcttcataaatgtcacactgatagggccaccctgaaatagcagggcatcaactaaaacactaaagtagatggcccagtcttctttatatcaaatctgaggg

SEQ ID NO: 269252 - DNA, 580 bp, Homo sapiens
tgtttctgtgtagtcagtgcactaaaaattccaaaggaactagatttacagtcatctctcctccttctactcttagtattagagagaacgcagtgccaggagccctctaatgcaaatgttttctggccaaggccttgtataattccatgttcaaagagacatttgaaggtgacttgacagcactttataaaacatttgctccttagcaaatggactgagttactgtgcatcactgtcaccatggcacaggactacaaatgtatcaagtgacaaaaggagagagatagggggacaagcaggtgtatgagcatcaactctcctcrgcattgtctacatccagacttgagggcgtcccttatgacattaacaaacagaaggacaatggcttaattgcaatccctttcaggaatggtccttaaaacatcttgcagatgacaacatgcattagtctcctgacagtactgggctgctactagagtgcttcataaatgtcacactgatagggccaccctgaaatagcagggcatcaactaaaacactaaagtagatggcccagtcttctttatatcaaatctgaggg

SEQ ID NO: 269253 - DNA, 567 bp, Homo sapiens
gccacaatctcaggcaccttcttcatttagactttattttttaggcttacagaaaaatcgagtgtatagtacagagaattcccattcatctcatctccacccccaccttcacagttcccatattactgacatctggtattattgtggtacagttatttcagttgatgagccaatgttaatacataattattaattaacatccatagtttctatgaggactcacactttctgttgtacattctatgggttttgataaatgtrtaatgacatatgtctaccattacagtatcatacagggtagttccactgccctaaaaaaaatccctatacttcatctattcaaccttccttccttccctcacctctggtccctgacaaccactatctttttgctgtctccttagtttggccttttccagaccatcagatacttagtatcatatagtaaaaggctagactttttaatattggcttattccacttggtaatatgcatttttctccatgtcttttcatggcttgatagctaatttctttatattgctaaataatattctattgtgtgcat

SEQ ID NO: 269254 - DNA, 567 bp, Homo sapiens
gccacaatctcaggcaccttcttcatttagactttattttttaggcttacagaaaaatcgagtgtatagtacagagaattcccattcatctcatctccacccccaccttcacagttcccatattactgacatctggtattattgtggtacagttatttcagttgatgagccaatgttaatacataattattaattaacatccatagtttctatgaggactcacactttctgttgtacattctatgggttttgataaatgtataatgacatatgtctaccattacagtatcatacagggtagttccactgccctaaaaaaaatccctatacttcatctattcaaccttccttccttccctcacctctggtccctgacaaccactatctttttgctgtctccttagtttggccttttccagaccatcagatacttagtatcatatagtaaaaggctagactttttaatattggyttattccacttggtaatatgcatttttctccatgtcttttcatggcttgatagctaatttctttatattgctaaataatattctattgtgtgcat

SEQ ID NO: 269255 - DNA, 572 bp, Homo sapiens
ataaggaatatatgtgtaaaatgttaccactgtttacctctgaaaaatgctcccactggtgtttgatactttagtttttgtcccagtggagtcaataaagcataaagtcaagggtttctaaacacgacctgggtgcagatggcagccggtgaactgtgaaarctgaccctgcatccaatctgtgactcaactaatccttcggagctatttataatcataattttctcttgaaatcagatgacataactcccaaagggcttatattttgaactaaaaagtttgcagggaagggaagtaaagaaggaggcggccacggaaggagaggtcatgggattttgactcttacaatcatatgtcagtgaaaatatttctgtccacagtggactcttggaaaatgattacattcatgtactgatgtggttatttctgggcaattggtacccgcaattacaccttctaagtgctaaaattcaagtgctaggtgcagttaggagatactggtttctcaagtttgaaatgttcctttcctgctttactattcttataaaggacatgtttcacgcagcaacgaa

SEQ ID NO: 269256 - DNA, 589 bp, Homo sapiens
gtccctaatgctgaattctaaatccagcaaaactattcagaaataaagaaaaataaagacattaccagattaagaaaatctaattactatggaaattggggataatttctatatagtaaactggtaaggaaagccttcactgaggaagaaataatttaaataaatacacaatggaggttagaaagagaatgatggagaggtctgggagggtgggtgktaacaaatttttaaaacggattggctaccacattatctaggaggccaagcttgcctgacatgccagaaacaacaagaagggcagtgaagcaggaagaaattggacaagtgggaataatgtaggcaatgtgatgagtggggaatgtggtgcctgacctttggttttggcccgagaaagacaggaaaccaaatgtagagttttgagaaaaaatgttgattgatctgaactgaggtttcaaaaggattactctgctacagaatggaaaatgtgcttttgtttgggtagtaaaaatagaaacaaggagatcagaaggaaggctgttgttcataacccaggagacacatgggagcttagaccaagtagtaatggttg

SEQ ID NO: 269257 - DNA, 596 bp, Homo sapiens
tctaccctgtcctgtgtgagacaggaaatctatttttgcagattgctcaataagcatcatgagccacataaataacagctgtaaactccttaattcaccgggctcaactgctaccgaacagattcatctagtggctacatcagcaccttgtgctttcagatatctgtttcaatggcattttgtggcatttgtctttaccgagtgccaataaattttctttgagcagctaattgctaattttgtcatttctacaataaagcttggtccacctgttttcaccttagattgtcccttttctaaacgtcaaaaakgtagtgcaaattaaaaaaaaaaattatcttttacattaattctaccatttgtcctaagggatagatatctttgaaaacatgtttatattatagtgagagtgaatggcagggatgaaatgtatcatccaaaaacccaccaggttgtccaaatagtagaaaggtgagttttactggcaatatcagtttgcaaattgggaagagacagtctccagtgtgtaccaaagatgctctctcttcgaagagggaaagggtagttgggtttttatgcctcacagagtctattac

SEQ ID NO: 269258 - DNA, 476 bp, Homo sapiens
tgatgataagtagttccacttccatttctacctattgattcctggacctatgactcctggctatgggagaaacagtaccatatattggatgctgattcagaacatatacaaccttctggagaaatctatctcagccctgtaaaatattgtcacctagctggtactgtagaagccagcttcttcaggagaatgggaaacatgctaagaccagtgaattctatgagcatgagctgattgctgcactttttccctgtgaagtgaattcctgggtcagaaacaatgctgtgtggaataggatggcagtgaataagtcattacataagtytacagatggtagttttggcaatagcattgtatgcagggaagacaaatccatatccatactaagtgtctatgccagtaaggacaaaatgctgccccttctgtgatggaagtagtctaatggaatcaatctgccctggggaatggtgccatat

SEQ ID NO: 269259 - DNA, 626 bp, Homo sapiens
agcttgcatagcagcctggacttgttgcagtcttttcctgttctgtgccccactcataactagcagttttttgtgtcacccagtaaatgggctaggktaacacacccaaatatgtcgcctttataatccaaataggtccactaggaattgtgcttctttctcagttataggaggggccagatgcaacaactctttactttagaagggttatctccacaggccctgcaccactggacccttagaaatttcactgaaatggaaggcccctgaagtttagttggatttatttcctgccccctgacaatgcacatgtcttgccaataaatccacagtggttgttacttcttgctcactaggtccaattaacataatatcatcaatgaagtgaacagggtgatagcttgtggaagggaaaagcaatcaggatccctgcaaaatagattatgacatagggctgaagggttggtatacccctgaggtaggagggcaaaggtatattgctggccttgccagtgaatcaaattgcttctggtgggccttatggacaggtatggagaaaaagcatttaccagaacaatagctgcataacaggcaccagatgtgttaatgtgttcaagaatgaaact

SEQ ID NO: 269260 - DNA, 626 bp, Homo sapiens
agcttgcatagcagcctggacttgttgcagtcttttcctgttctgtgccccactcataactagcagttttttgtgtcacccagtaaatgggctagggtaacacacccaaatatgtcgcctttataatccaaataggtccactaggaattgtgcttctttctcagttataggaggggccagatgcaacaactctttactttagaagggttatctccacaggccctgcaccactggacccttagaaatttcactgaaatggaaggcccctgaagtttagttggatttatttcctgccccctgacaatgcacatgtcttgccaataaatccacagtggttgttacttcttgctcactaggtccaattaacataatatcatcaatgaagtgaacagggtgatagcttgwggaagggaaaagcaatcaggatccctgcaaaatagattatgacatagggctgaagggttggtatacccctgaggtaggagggcaaaggtatattgctggccttgccagtgaatcaaattgcttctggtgggccttatggacaggtatggagaaaaagcatttaccagaacaatagctgcataacaggcaccagatgtgttaatgtgttcaagaatgaaact

SEQ ID NO: 269261 - DNA, 600 bp, Homo sapiens
atagttataaatggaccatctttatctaaatactttctgttaaggattctgccacttcatatacctgtcacagaaccctttagagggaaagaaggattctaaaaaagaaggttctgtaaacctaaattttctcaaaaagaggacactttagcttatccagtaaacttggtttatgacaattcaattctttcctgaagggatttttaccattttaatttttatctcttaaaatatgcctagatttagactgtatacagcccaaactcttcagcttccctaattttacttcttctaggactgctatttatactttggctaatataactttctcttgttaatgataggaatctaggaaattcccagtaattatgcaaaaaatgtataactaaagtatttgatctctgtcatatgtatttaatttctgtattttgttctttctccaaagaaaaaaattatgcaaagtgaaaaggaaaggaaaagtgatctaaaagatctcttaaggtaggattcagtatgtcttcatgggaagatggtgaaaacctacaagaatctgatgytcaaagtgtattacagtgtcatcttcaaaacataaccaaggcc

SEQ ID NO: 269262 - DNA, 564 bp, Homo sapiens
ttgtttaattaatgaataaatgactatatgaatgaattaatggaatttcttattttatgatatggaagatttataaactgctatattatttatcaaaatgcaataggaaatagatggcccaaatttcaagtaatagctaaaagaggaggtaggaagatttggcatagatttttggatttatcattcttctttcttaataactagagaaaatgctgggaaatatatatcttgmagcttagaaaatgaagagaattctgtagttgtataatcaaccattaatgtgttgttggtgggaaaaagatgtttagtatctaatattgtggtgtattgaatcaagaaaactggcatttcttcatcatttaaaaatgaacattgtgttctgttctgaatacagaaatatgatcaatgcaaatctcaagctaaaagctttattagatatttctctttaagctaaacccacacacacacacacacacactcatgtctaaatgtgtttactatttattttttactcttaaagtgatgttatttacatgtgttgttagaatgcaaaccttatcagta

SEQ ID NO: 269263 - DNA, 564 bp, Homo sapiens
ttgtttaattaatgaataaatgactatatgaatgaattaatggaatttcttattttatgatatggaagatttataaactgctatattatttatcaaaatgcaataggaaatagatggcccaaatttcaagtaatagctaaaagaggaggtaggaagatttggcatagatttttggatttatcattcttctttcttaataactagagaaaatgctgggaaatatatatcttgcagcttagaaaatgaagagaattctgtagttgtataatcaaccattaatgtgttgttggtgggaaaaagatgtttagtatctaatattgtgstgtattgaatcaagaaaactggcatttcttcatcatttaaaaatgaacattgtgttctgttctgaatacagaaatatgatcaatgcaaatctcaagctaaaagctttattagatatttctctttaagctaaacccacacacacacacacacacactcatgtctaaatgtgtttactatttattttttactcttaaagtgatgttatttacatgtgttgttagaatgcaaaccttatcagta

SEQ ID NO: 269264 - DNA, 564 bp, Homo sapiens
ccagaacttacactgtgaactaccacacaagtcagacatctattcactgaggcaaatcttgcaacataatgcttaaggtactggtttggtgtcattatgtatttgaaagtaatacgagtgtacttctgaaaacaaaatccaaaaattaaatctcattttcaggccaacatgaagtattaaatttaaaataactagaaaatgaaattatttgatgatggttacaatggaagttatttaaatcaaataccagagtagaagtatgttagtctgttagggctgccataacaaaataccacagaatgggtggcttaaacaacatgaatttattttttcacaaytatggatgctaggagtacaggatcacagtgtcagctggtttggtttcctctgaggttgctcttcttgacttacagacaacaccctttttgctgtgtcttcacatggtcttttctctgagcacatgcaccccagtgtctcttcctcttcttatatggacaccagtcataacggacttgggccccactcttgttacttcattaactttaattacacccttaatagccc

SEQ ID NO: 269265 - DNA, 492 bp, Homo sapiens
acaaaaacagaaaaacactttactaaayaaatacctcccaaagttataatttccatattcttgtctgttagggagaagccaggtgagaacagaggaggacatccagagtaaactggacacagtaacagaggtgaggaggtcctcacaaagggtgcctccggtgaaaagagaaagatagccagagggagaggacccgagggagggcaaggccagctccttccctctccctctctggccacacaacttattcttagcagcttcctgtccactgctgctaagtcatttccacatgaacgcgtcttttgcaccatggctattttccttttgcccccatttctgtctgaggaaaggtttgatggtgatttcagtgttgacacactcgacttttagactgcagctgacttaccatgcttgttgaatgagtctgttcctctcacatggacagtttccacttatgaaaagtcccttcctttttcatttcctctgcagaaa

SEQ ID NO: 269266 - DNA, 541 bp, Homo sapiens
aatgaggagtccatgaaattgggggagtttgctgctgtgtgtgtgtgtgtgtgtgtgtktgtgtgtgtgtgtgtatgtgtatgtgtacatagttttcctctttgagaaattgctattgttgcttctcagtgcacctggatgtctgaagatattttttatttaacgagctgtctaggaaatacaaaggttactgttattttatctttatgttgatatttttctgtttaatatttgcattaaaattgttcccccaaatagaatatctacatgatatagcaaccagtgaacaaatcaacatatctacctacacatatatatataaatctatatattaatctctctctgtatctaattaatatatatgtataatttagccttcctctcaagcaaggacataagtggtaaattaatgataatataatctttactatggaatggctggtctactctgcatggagcaacctctccatcatgtggacttttaagatattgctactaaagttaaagccatgctatgctcttgaaactgtaaatatcaatt

SEQ ID NO: 269267 - DNA, 541 bp, Homo sapiens
aatgaggagtccatgaaattgggggagtttgctgctgtgtgtgtgtgtgtgtgtgtgtttgtgtgtgtgtgtgtatgtgtatgtgtacatagttttcctctttgagaaattgctattgttgcttctcagtgcacctggatgtctgawgatattttttatttaacgagctgtctaggaaatacaaaggttactgttattttatctttatgttgatatttttctgtttaatatttgcattaaaattgttcccccaaatagaatatctacatgatatagcaaccagtgaacaaatcaacatatctacctacacatatatatataaatctatatattaatctctctctgtatctaattaatatatatgtataatttagccttcctctcaagcaaggacataagtggtaaattaatgataatataatctttactatggaatggctggtctactctgcatggagcaacctctccatcatgtggacttttaagatattgctactaaagttaaagccatgctatgctcttgaaactgtaaatatcaatt

SEQ ID NO: 269268 - DNA, 541 bp, Homo sapiens
aatgaggagtccatgaaattgggggagtttgctgctgtgtgtgtgtgtgtgtgtgtgtttgtgtgtgtgtgtgtatgtgtatgtgtacatagttttcctctttgagaaattgctattgttgcttctcagtgcacctggatgtctgaagatattttttatttaacgagctgtctaggaaatacaaaggttactgttattttatctttatgttgatatttttctstttaatatttgcattaaaattgttcccccaaatagaatatctacatgatatagcaaccagtgaacaaatcaacatatctacctacacatatatatataaatctatatattaatctctctctgtatctaattaatatatatgtataatttagccttcctctcaagcaaggacataagtggtaaattaatgataatataatctttactatggaatggctggtctactctgcatggagcaacctctccatcatgtggacttttaagatattgctactaaagttaaagccatgctatgctcttgaaactgtaaatatcaatt

SEQ ID NO: 269269 - DNA, 541 bp, Homo sapiens
aatgaggagtccatgaaattgggggagtttgctgctgtgtgtgtgtgtgtgtgtgtgtttgtgtgtgtgtgtgtatgtgtatgtgtacatagttttcctctttgagaaattgctattgttgcttctcagtgcacctggatgtctgaagatattttttatttaacgagctgtctaggaaatacaaaggttactgttattttatctttatgttgatatttttctgtttaatatttgcattaaaattgttcccccaaatagaatatctacatgatatagcaaccagtgaacaaatcaacatatctacctacacatatatatataaatctatatattaatctctctctgtatctaattaatatataygtataatttagccttcctctcaagcaaggacataagtggtaaattaatgataatataatctttactatggaatggctggtctactctgcatggagcaacctctccatcatgtggacttttaagatattgctactaaagttaaagccatgctatgctcttgaaactgtaaatatcaatt

SEQ ID NO: 269270 - DNA, 584 bp, Homo sapiens
attttccattctagtgtctgtctccagcaatggttgacggtcttgttatcatgaactgtagatagcatgtgacttgcttgtaaccacaaccatggaggtaatgcattcgtgctttgaaaccatggggacggacgcaggctggtccacgggttcagaaaaaggtttcactgccatttcccagtatgagagtttacaaaggtgttcatcaggtcacctagctggggatctaatgctccattgttggactgtagcattgctctgatgcttcaaccagctcctcagcatcccmcctgtcattctgttcccatgcatttaaaataagaaggacaatctaaatagtatattccccagcacaacaaaaaaaatttttcaataattttgtttttgcttccttttatttaagaccttgaaaaatttatagttatagcactctgtgtaagacagtgcaaggaagtaaattttaaaatacctcatcttctgcacatgtattgcacagtcattatgacagggttcaaagcaagaaaaattaaaaactgtctgacttttgtctcaaaaatttatctggcttgattgaagaaggccaa

SEQ ID NO: 269271 - DNA, 584 bp, Homo sapiens
attttccattctagtgtctgtctccagcaatggttgacggtcttgttatcatgaactgtagatagcatgtgacttgcttgtaaccacaaccatggaggtaatgcattcgtgctttgaaaccatggggacggacgcaggctggtccacgggttcagaaaaaggtttcactgccatttcccagtatgagagtttacaaaggtgttcatcaggtcacctagctggggatctaatgctccattgttggactgtagcattgctctgatgcttcaaccagctcctcagcatcccacctgtcattctgttcccatgcatttaaaataagaaggacaatctaaatagtatattccccagcacaacaaaaaaaatttttcaataattttgtttttgcttccttttatttaagaccttgaaaaatttatagttatagcactctgtgtaagacagtgcaaggaagtaaattttaaaatacctcatcttctgcacatgtattgcacagtcattatgacagggttcaaagcaagaaaaattaaaaactgtctgrcttttgtctcaaaaatttatctggcttgattgaagaaggccaa

SEQ ID NO: 269272 - DNA, 629 bp, Homo sapiens
tctcaggccccactggactactttttttcctcaaagcattgaaatactatataatactgtatttggaatagtttttctttaaaatggctaaagttcctttcagattaaaaataataatatttaggaattatgactgcagaagagttgtgggagtgagaagggaaagcactagctcttcagggaggtgtgaacatcgttgccattctcgctgctggcaacttyttagatccatgacagttaaaaggtaaaataatatcaaacttgtgtgtggactttcacatttaaaaagtagcatcttttgtgttcatatccattaagaactataaaacatggtgagtgattatttattgaagtgttccacttcagaacaataaatggctgaatgaacctttctccttttggtgactctgcagggatcttcggaacctagtgattgaaatggttttatctacagacatgtcaggtcacttccagcaaattaaaaatataagaaacagtttgcagcagcctgaagggtaggttttgtgttttttttgttgtttttttttttttgtcatgttaaagttccaggggcttggcctcagaaaagactgtaattgtttcctttgttttgaataatataagcatgt

SEQ ID NO: 269273 - DNA, 637 bp, Homo sapiens
gattgtaattcatgtacaaatgcctcacaactggatgagtgaagcagaaataattttcagagccaaaagaagttaatataactagctgttctgtgttcatagacacatttaattgtgagtcattaaaaggaagaaagttaccttatagaggtctgaattgggattgagcctccaatgttcccaatgaaactatggaactaaacaccatgaaatgaatagcaattgaagttaaactagttttgtaccctagaaacccattgttttattaaagaaaatggaaaaaaaycacttatttaaatttttgagtgggttcaaattatgtatttataaatatagctgtggttttaaaaaaggcagcattcattatctactatgataacacagaatataaactgtcaatagtaaaaagaaattaaattagaaaatcagagatggaattaattagtgattgactcataaatatttacaattattatcttgctagctgtgaaaatttattataaatacatttcctgtttttactttggttcatttctgcctcccataaatagtactttctccacaaatcccccttacttatttctgcactatggactatatcattaagttccactacaaactaatataggaagagagg

SEQ ID NO: 269274 - DNA, 604 bp, Homo sapiens
atctccagggaattgtaaagacaggtataagctgtggggcctgagaacctcaggctgccttgagtttccatttckatgggactagtttttctacttactcctcatttttaaaagtgtattttggccccctgaaggcagcatcctcaaatgacagcgaaacctctaagaaaaatataaattcttctttcacaatgcttattgcgatgacctctgcttttaccttgatggaaaataaatattccttatcctgggacagaatgaggaaattataaaggtggccaaatctatactcagagattctaacattctctttatacaaagttctagttccttcatagtttacctacagggccccctactaatcttgcactcatggcctttattcaccctaaagagtaaataatactttgaaatatttataaataaattaaataattaatgtactttagcattcaatgtgctttgacagtgaaaatttaatattctaaattaattgtgaggtacaggaagcaaatagaatataaaatctcttgctccatctgtaggaaggtcatccctgcatatatctgtcaaatgcctaagccctataggaaatatgttgcca

SEQ ID NO: 269275 - DNA, 438 bp, Homo sapiens
tacagctcatagaagtcaacaattttcttcaacactggtaggcagcctctaaatggccctgatcaccctcacctcctgccattcacacccttgtaaaattccacccctggacctagtgactcacttctaacaaagagaatacagcaaaagtaacatcgcttctgagrtgaggctacaaggagactacgatgcctgccttagtcacccttctcctgctctttccattgctccctctgatggaagccagttgccatgtgatgaggtgccctatggagaggcccacgtgacaaggtattgtaaaaagcctctgaccaatagccatctagaaacggaggcccagtccagcagcctctgagatgaatcctgccaacctgagcttggagacagattctctccctatcctgccttgggatgatcacagccaccatcaacaccttc

SEQ ID NO: 269276 - DNA, 438 bp, Homo sapiens
tacagctcatagaagtcaacaattttcttcaacactggtaggcagcctctaaatggccctgatcaccctcacctcctgccattcacacccttgtaaaattccacccctggacctagtgactcacttctaacaaagagaatacagcaaaagtaacatcgcttctgaggtgaggctacaaggagactacgatgcctgccttagtcacccttctcctgctctttccattgctccctctgatggaagccagttgccatgtgatgaggtgccctatggagaggcccacrtgacaaggtattgtaaaaagcctctgaccaatagccatctagaaacggaggcccagtccagcagcctctgagatgaatcctgccaacctgagcttggagacagattctctccctatcctgccttgggatgatcacagccaccatcaacaccttc

SEQ ID NO: 269277 - DNA, 438 bp, Homo sapiens
tacagctcatagaagtcaacaattttcttcaacactggtaggcagcctctaaatggccctgatcaccctcacctcctgccattcacacccttgtaaaattccacccctggacctagtgactcacttctaacaaagagaatacagcaaaagtaacatcgcttctgaggtgaggctacaaggagactacgatgcctgccttagtcacccttctcctgctctttccattgctccctctgatggaagccagttgccatgtgatgaggtgccctatggagaggcccacgtgrcaaggtattgtaaaaagcctctgaccaatagccatctagaaacggaggcccagtccagcagcctctgagatgaatcctgccaacctgagcttggagacagattctctccctatcctgccttgggatgatcacagccaccatcaacaccttc

SEQ ID NO: 269278 - DNA, 539 bp, Homo sapiens
caatctgataaaagtcccattcgactatcatgtcccttcccagaggacagggacatgccttttttgtcttttatacccaactatcacaggtcctggcacagaagccacacagtcttttttaattgtgttctactactcacaatttcctgtatccaccaggggagaaaaaagtaagtataaactagcacagacatagatttttttacactgtatactaaagaggtcagattatacacaatattttatgcyttacttttttacttaatacatcttagaagtttgcacatgcttttatggaaagactggctgcattttttttggtctataacagaatattctattataaaactgtacactataatttttatttaaccaactctttgctggtggacattaagaacggaggaatgtttcaacaaaggaacaatcaacattaacaaaatactgcagaggagtcaatttgtggactaagaggggagccactggatttggaaacgaggagataaattttagcgcaaagatgaaggcagaatccagat

SEQ ID NO: 269279 - DNA, 617 bp, Homo sapiens
gaaagaacagtcttttcaacaaatgcttctggaacatctagagatccacatgcaaaagaaaaaagttggactcttcccttacaaaacacacaaaaatgaactctcacattacatacctaaatgtaagagctaaacctataaaatttctagaagaaaacataggagtaaatctctgtgactctgggttaggcaaagaattgttcttagatatgatgccaaaaaaaaatcaacaacagaacattatcaaaactgaaaattttgcttgaaaggatagcatcaaggaagtgaaatgacaacccacagaatgagagataatttttgcaartcatgtatctgataagggacctgtagtcagaatatgcaaagaacccttacagttcaataagacaacccaatttaaaaacaggcaaaggatgtgaataggcatttctccaaagatacggaaaaacggccaataagcacataaaaagatgctcaaaatcatttgccatttgggaaatgcaatcaaaaccacaatgaggtatcacttcacgcccattagggtggctatagatcagaaagtcagataacatgtgttggcaagcacatggaaacactgaagtccttatacactgctg

SEQ ID NO: 269280 - DNA, 617 bp, Homo sapiens
gaaagaacagtcttttcaacaaatgcttctggaacatctagagatccacatgcaaaagaaaaaagttggactcttcccttacaaaacacacaaaaatgaactctcacattacatacctaaatgtaagagctaaacctataaaatttctagaagaaaacataggagtaaatctctgtgactctgggttaggcaaagaattgttcttagatatgatgccaaaaaaaaatcaacaacagaacattatcaaaactgaaaattttgcttgaaaggatagcatcaaggaagtgaaatgacaacccacagaatgagagataatttttgcaagtcatgtatctgataagggacctgtagtcagaatatgcaaagaacccttacarttcaataagacaacccaatttaaaaacaggcaaaggatgtgaataggcatttctccaaagatacggaaaaacggccaataagcacataaaaagatgctcaaaatcatttgccatttgggaaatgcaatcaaaaccacaatgaggtatcacttcacgcccattagggtggctatagatcagaaagtcagataacatgtgttggcaagcacatggaaacactgaagtccttatacactgctg

SEQ ID NO: 269281 - DNA, 476 bp, Homo sapiens
ggggagtttatgaagtattaacttacacaatcacaaggtcccacaataggctgtctgcaagtttgaggagcaaggagagccaatccgagtctcaaaactgaagaacctggagtccgatgttagagggcaggaagtgtccagcatgggagaaagatgtaggctgggaagctaggccaatcttaccttttcatgtttttctgcctgctttatattcgctagcagctgattagaaagatggtacccaccagtattaaaggtgggtctgccttccccagcccactgactcaaatgtttatctccttttacaatgccctcacagacacttccagtaggtcaatactttgcagccttcamcccaatcaagttgacactcagtattaactgtcacaccacccttgcactaaaggtatacatacacccactagggcatggtcaaggtcagagatctgggccagacaggaactgaagtagatggt

SEQ ID NO: 269282 - DNA, 476 bp, Homo sapiens
ggggagtttatgaagtattaacttacacaatcacaaggtcccacaataggctgtctgcaagtttgaggagcaaggagagccaatccgagtctcaaaactgaagaacctggagtccgatgttagagggcaggaagtgtccagcatgggagaaagatgtaggctgggaagctaggccaatcttaccttttcatgtttttctgcctgctttatattcgctagcagctgattagaaagatggtacccaccagtattaaaggtgggtctgccttccccagcccactgactcaaatgtttatctccttttacaatgccctcacagacacttccagtaggtcaatactttgcagccttcaacccaatcaagttgacactcagtattaactgtcacaccacccttgcactaaaggtatacatacacccactagggcatggtcaasgtcagagatctgggccagacaggaactgaagtagatggt

SEQ ID NO: 269283 - DNA, 462 bp, Homo sapiens
ttcacttaacacttttcttgaaatacacttgttttttgccactttttatttgacctaagaagtaacattaatgaaacaatgatttgacgtgataggcatttccctcctaatgagcactaaaacacttaactatttgaaaaaagaagtttctcygtgtaccagctaatatattctcctcggccgccgttggtacacggaccacattttgtttctcaaagcaatccgatgatttctgaggtcctttgcagcttgaacacggaacgactgtggtgatcgagtagccaaaagttcacggaatgcactgtcacaattgtgattccgccatagcgccgtgcatccatccaacacttgtttaatacctatatttaatacctaataccttagactgtcctaggctgtggacacagaagactaaaccccacttcctgagttgaagtgggggaaatagaggagtaaatcatt

SEQ ID NO: 269284 - DNA, 462 bp, Homo sapiens
ttcacttaacacttttcttgaaatacacttgttttttgccactttttatttgacctaagaagtaacattaatgaaacaatgatttgacgtgataggcatttccctcctaatgagcactaaaacacttaactatttgaaaaaagaagtttctccgtgtaccarctaatatattctcctcggccgccgttggtacacggaccacattttgtttctcaaagcaatccgatgatttctgaggtcctttgcagcttgaacacggaacgactgtggtgatcgagtagccaaaagttcacggaatgcactgtcacaattgtgattccgccatagcgccgtgcatccatccaacacttgtttaatacctatatttaatacctaataccttagactgtcctaggctgtggacacagaagactaaaccccacttcctgagttgaagtgggggaaatagaggagtaaatcatt

SEQ ID NO: 269285 - DNA, 492 bp, Homo sapiens
tcagaatgcttaagtcatgtaaaaacgtatcaaaattattatcattacagctaccaggaaatagctacctactccatgttagatactgcagttaagtatctcacacagtttcactgattcctaacaacactgcaaagcatgttactaacccttaaggagtaggaagctgaagctctgagaggctatgcaactactcaatggaaatgtggggatctgaactctacctagctccaaagggcgtacttttttctaaaatttctaatttttttccaatttcacaatggaggcagagttttcactacaattttaataatttcaccagctgggtggggtggctcacgcctgtaattccagtactgtgggaggctgaggtgggaggacggcttgggtcccrgggagacaactgggcaacagtgaagattctgactctaaaaaaaataataatttcaccaaaagggggaacagatttctaaatcggaatctcttgttaaa

SEQ ID NO: 269286 - DNA, 492 bp, Homo sapiens
tcagaatgcttaagtcatgtaaaaacgtatcaaaattattatcattacagctaccaggaaatagctacctactccatgttagatactgcagttaagtatctcacacagtttcactgattcctaacaacactgcaaagcatgttactaacccttaaggagtaggaagctgaagctctgagaggctatgcaactactcaatggaaatgtggggatctgaactctacctagctccaaagggcgtacttttttctaaaatttctaatttttttccaatttcacaatggaggcagagttttcactacaattttaataatttcaccagctgggtggggtggctcacgcctgtaattccagtactgtgggaggctgaggtgggaggacggcttgggtcccggggagacaactgggcaacagtgaagattctgactctaaaaaaaataakaatttcaccaaaagggggaacagatttctaaatcggaatctcttgttaaa

SEQ ID NO: 269287 - DNA, 492 bp, Homo sapiens
tcagaatgcttaagtcatgtaaaaacgtatcaaaattattatcattacagctaccaggaaatagctacctactccatgttagatactgcagttaagtatctcacacagtttcactgattcctaacaacactgcaaagcatgttactaacccttaaggagtaggaagctgaagctctgagaggctatgcaactactcaatggaaatgtggggatctgaactctacctagctccaaagggcgtacttttttctaaaatttctaatttttttccaatttcacaatggaggcagagttttcactacaattttaataatttcaccagctgggtggggtggctcacgcctgtaattccagtactgtgggaggctgaggtgggaggacggcttgggtcccggggagacaactgggcaacagtgaagattctgactctaaaaaaaataataatttcaccaaaagggggracagatttctaaatcggaatctcttgttaaa

SEQ ID NO: 269288 - DNA, 516 bp, Homo sapiens
cggtatcactctgctataaaaactatttccaaaacaaaacaaacctatctaccccctttcttgatttaaaaaaaaaaaagaagaagaaagaaggaaaatttgagggtttttgmttttttcaacttcacataccggtttgcctttgcaaaaaaaaaaaaaaaaaatgtttagtctcaaagtatagctgcaaggtggaccggctgcacgggtcccagagggccgctcgcctccgacggtcgcagtttcagccgggccgcgcccgcgagaaacagcggagaggccccagcaggcgggcgccgccggacaggtttaccgtccgcgtcggccccggggaaccgctccctcgcgcccgcagcacttgttcgcggcgcggactccacaccgcggccgcccgccccaggggaggagtgagtccgccccagcggcgccaacccggggacccggggcaagggttcggggccatccgccgccggcgcgccccccatccggaaagcggcgacggcccccaagttgggc

SEQ ID NO: 269289 - DNA, 516 bp, Homo sapiens
cggtatcactctgctataaaaactatttccaaaacaaaacaaacctatctaccccctttcttgatttaaaaaaaaaaaagaagaagaaagaaggaaaatttgagggtttttgcttttttcaacttcacataccggtttgcctttgcaaaaaaaaaaaaaaaaawtgtttagtctcaaagtatagctgcaaggtggaccggctgcacgggtcccagagggccgctcgcctccgacggtcgcagtttcagccgggccgcgcccgcgagaaacagcggagaggccccagcaggcgggcgccgccggacaggtttaccgtccgcgtcggccccggggaaccgctccctcgcgcccgcagcacttgttcgcggcgcggactccacaccgcggccgcccgccccaggggaggagtgagtccgccccagcggcgccaacccggggacccggggcaagggttcggggccatccgccgccggcgcgccccccatccggaaagcggcgacggcccccaagttgggc

SEQ ID NO: 269290 - DNA, 516 bp, Homo sapiens
cggtatcactctgctataaaaactatttccaaaacaaaacaaacctatctaccccctttcttgatttaaaaaaaaaaaagaagaagaaagaaggaaaatttgagggtttttgcttttttcaacttcacataccggtttgcctttgcaaaaaaaaaaaaaaaaaatgtttagtctcaaagtatagctgcaaggtggaccggctgcacgggtcccagagggccgctcgcctccgacggtcgcagtttcagccgggccgcgcccgcgagaaacagcggagaggccccagcagrcgggcgccgccggacaggtttaccgtccgcgtcggccccggggaaccgctccctcgcgcccgcagcacttgttcgcggcgcggactccacaccgcggccgcccgccccaggggaggagtgagtccgccccagcggcgccaacccggggacccggggcaagggttcggggccatccgccgccggcgcgccccccatccggaaagcggcgacggcccccaagttgggc

SEQ ID NO: 269291 - DNA, 558 bp, Homo sapiens
tttaaaagaaacagaaattagatgtaaaaactgctcagctaatgttgaatttttgttaatttcagaggcaggaactaatctattaggaagaaacttaatgttaaaattaggtataggtttacgtattggctcagaaggattctacacttcattaaacctgctcaccactgcagaagaaacatacattcatcctgatgtttgggcaagggaaggaaattggggaaaactccaaattccccctatacatataaagttaaaaacccctggagaaatagtaagaagaaagcaatatyctattcctttagaaggcagaataggcctgaaacctgtaattgaaagcctcatcaaggatgggctccttgaaccctgtatgtccccttataacaccccaatactgcctgtgaagaaaccagataggtcatgtcgactagcataagacctctgggccatcaaccagacagtctagactacccatcctgttgtccctaatccttaaaccattctcagtaaaattccatatgaacatcaatggtttacagtaataggtttaaaagatgc

SEQ ID NO: 269292 - DNA, 416 bp, Homo sapiens
gggggtagctttaggggtccttacccaagaacacggaggtcaccagcaacccatggatctcctatcaaaagttttagatccagtaacctgtggatggcctgaatgtttcaatccattgcagctaccgccttgttaactaaagaaagcagaaaactaacctttgggggaaagttagttgtaaacatgccccatcaggttagagccatcttaaattaaaaggcaggaaggtggcttactgacttgagaattttaaagtatgaagctatcctgttagaaagagatgatttaacactaaccactgataattcacttaacccagaggtttcctgactggagatycaaatctaaagagacctgagcatgagtgtttagatttaatgatcatacaaaagttaggcctgatttaagagagaccc

SEQ ID NO: 269293 - DNA, 611 bp, Homo sapiens
tggtggacccttactggacactctgccaagtaactggagtggtacttgtgctctagtccaactggccatccctttcaccctagcattccattaacataatagaagagaaaatcagaagagaagaagtgaccttcatgggtcctttgactcccacgtttataaagatgctactggagttccacgaggggtaccagataaatttaaggcccgaaatcaaacagcttcaggatttgaatctgtgctgttttggtggtcaactgtaaataaaaatgtagatyggataaactacatttattacaaccaacaaaggtttgttaactacacaagacatgccattaagggaacagcctcccaattaggtcccattaactaaatagtctgggaaaacaggatagccctagatacgatgctagcagaaaaaggtggtgtctgtgtcttgattggagtccaatgatgtacttttattcctaataacacagcccctgacggaacagtaacaaaagctttgcaggacctaacctccttatccaatgagttagcaagcaattctggaataaatgatccctttacaagtttaatggagaaatggtctggaaaatggaaaggcttaa

SEQ ID NO: 269294 - DNA, 611 bp, Homo sapiens
tggtggacccttactggacactctgccaagtaactggagtggtacttgtgctctagtccaactggccatccctttcaccctagcattccattaacataatagaagagaaaatcagaagagaagaagtgaccttcatgggtcctttgactcccacgtttataaagatgctactggagttccacgaggggtaccagataaatttaaggcccgaaatcaaacagcttcaggatttgaatctgtgctgttttggtggtcaactgtaaataaaaatgtagattggataaactacatttattacaaccaacaaaggtttgttaactacacaagacatgccattaagggaacagcctcccaattaggtcccattaactaaatagtctgggaaaacaggatagccctagatacgatgctagcagaaaaaggtggtgtctgtgtcwtgattggagtccaatgatgtacttttattcctaataacacagcccctgacggaacagtaacaaaagctttgcaggacctaacctccttatccaatgagttagcaagcaattctggaataaatgatccctttacaagtttaatggagaaatggtctggaaaatggaaaggcttaa

SEQ ID NO: 269295 - DNA, 613 bp, Homo sapiens
tttttgcctgagtgctgcttcttcctcacagcaccgatcatttgtttctaacaatctcgctaaaagcagcctagaaagcagccacttatgcagaaagagtaataatttatgctctacaagtcatataaaaaatgaagtttcatttgtttaccggctaatttacttcctgggagacatttttcattctaaaacagtgattccctaccaagagttcatagatgccaagaagtccataaaaggagtaatggaattgccaaattatgttaaatacttcaaaaggactcaaagccatatactagttcccaataggcctgcacaagttattagaacaagctgctttgcattcttgtgtgatcagaaccagtaactagatggcaatcaggtctgttactgaagatggaaaaactatacttaagtttgtataacaatctttcataacatggcttcacagaaaagaagtataaaaaggattccttggttgaaaaagagtgctcttttcccttcattatttaagattaggrcaaatttataaaacaggaaaaaaatagcacaaatcccttggcaaacagagtaaaacatctactctgttttgctttttttcacttcttacact

SEQ ID NO: 269296 - DNA, 584 bp, Homo sapiens
ccttctgcttcctacccttccaaatgctgtatttccccccagaagacttgccaagaccactctagcctgcgcatcttccattccagctaaccaaaggcatccttgcattgactaaaccaaattattttgcagagaaggcatctaaaaacttctactgtagaccattcaccttaataattgttttcatgacattattcaataataaaatgagggaaagaagccctctttaactcccttgccctggagaatccaagcaagtgtctttcccacttgctttgcccaaaccctgggagctttcaaagtgaaagtttaatggaaggaaaagaaaatctaaaagaaaaactctccgaaaaattaaactcaggtaaagaatcatgggattamaaatttttattctttgtgtatttgatttctgaaacatttgaaatctctctctcactccttaaatctgccactgggctaagagagtattgtatataatgtgcactcattgatttaacagaattagaacatccaggcactcactcagattttggttccacaactgctcaaagtctagtcatttagttaatgagttaacacca

SEQ ID NO: 269297 - DNA, 660 bp, Homo sapiens
ttaaggtcaatcttattttcattgtctgaatttatgcattcacttactgaaggacatcttgattgcttccaagttttggcatttatgaataaagctgttataaacgtctgtttgcaggtttttgtgtggacatgagatttcaagtcctttggataaataccaaggtacatgattgctgcatcatatggtaagagtatatttagtttcgtaagaaagtgccaagctgtcttccaaagtggctgtgtcattgtgtattcctaccagcagtgaatgagccttcttgtcgctctgcatcctcaccagcgtttggtgttgtcagtgttctggattttgaccattctaataagtgtgtagtggcatgttgttgttttaaktttcatttccctgatgacatgtgatgtggagcatcttttcgtatgcttatttactgtctgcttatcttctttgctgaggtatctgttaaggtctttgacccatcttttaattgggtcgtttgttttcttattttcgagttttaggagttctttgtatattttggatgagagtcctttatcagatacatcatttgcaaagacatgtcattccttgtctgtggcttgcatttccattctcttgacaatgtctcttatagagcagaaatatttaatttcagcaaagtct

SEQ ID NO: 269298 - DNA, 596 bp, Homo sapiens
tttattataaggtattagctgacaattacaaaggctgacaagtccccagtctgctgtctgcaagctggagaccaacgaaagccagtggtgaatttctgtccaagtgtgaaggcctgagaaacaggataaattgacatctaagtgtaggagaagactgttgtcccaattcaagtaggcaggcagaaagaaaaaaaaggtgcatttctccttctctgcctgttctttgtttatttgtttgtttgtttgttttattcaggccttaaatggattgggtgaggctcacccacmttggggagggcaatgttcttttctgagcccgctgattcaaatgttaatcttgtctggaaacaccatcacagacatactcagaactcatggttaaccagatatctgggtatcccttgacccagtcaagttgacacattaaataaactgttatggtgcctacagccaggatagctggactgaataaagagcctctaatctctgaatctgtgcataatgtcaccttataagcagtggaataaattgtgtatcagataaagtttagctaagcagacaactggttctgcaaataatgttcatggcagacaatc

SEQ ID NO: 269299 - DNA, 587 bp, Homo sapiens
gcagaaagaaaaaaaaggtgcatttctccttctctgcctgttctttgtttatttgtttgtttgtttgttttattcaggccttaaatggattgggtgaggctcacccacattggggagggcaatgttcttttctgagcccgctgattcaaatgttaatcttgtctggaaacaccatcacagacatactcagaactcatggttaaccagatatctgggtatcccttgacccagtcaagttgacacattaaataaactgttatggtgcctacagccaggatagctggactgaataaagagcctctaatctctgaatctgtgcataatgtcaccttataagcagtggaataaattgtgtatcagataaagtttagctaagcagacaactggttctgcaaataatgttcatggcagacaatctacttataatgcaaaacaccaatataataaaaaaaktactgtggccagaataaaatgaagcaaacattaataataatcaggataaactctgaaggtgactcacgtttaatctccagaggcgatcttcagtgagctggctaagcctgtccaccatttaagtcatgattttg

SEQ ID NO: 269300 - DNA, 558 bp, Homo sapiens
ccaaaagaattgcttgtgttttctgatttatataagcagaaatctggagaacaggcatgggaatggatattaagggtgtgggataataatggaaggaacatagagttggattggtctgaatttattgatttgggctgaatttattaatttcycaagcagggattctgcatttaatattgtagctcgatgagttaaaaaaaggttctaatcgtttatttgcttagttagctgaaacatggattaaaagatggcccactgtgagaaagctggaaatgcctgatctccctttgtttaatgtagaggaaggatccaaaggcttagggagattgcggtgctggagtggattagtcactttagacttattcatcccagctgggagggtccagaagacatacccttgaccaatgctttgcgaaatagatttgtgaggggagcacctgcatctttgaagagctctgtgattgctcttctctgtatgccagatctaacagagggaactgtggttactcaactacaaaatttaaattcagtgggaataattggatcccaaggtggtag

SEQ ID NO: 269301 - DNA, 561 bp, Homo sapiens
atgatcagttgacagagaaaaagaaggctggggcctggttcacagatggttctgcacaatatgcaggcaccacccaaaaatggatagctgcagcactacagccactttctacaacacctctgaaggacagcagtgaatggggaatcttcctagtgggcagaacttccagcagtgagcctggttgtacgcttttcatggaaggagaaatggccagatgtgcaattatatactgattaatgggctattgccaatggtttggctggatggtcagagacttggaggaagtatgactggaaaattggtgacaaagaaattttgggaagacgtatgtggatggacctttctgagtggttaagaactgtgaagatatgtatatcccatgtgagtgctcaccggtgggtaacctcagcagaggaggattttaataagcaaattgataggatgattcattctatggacaccactcagcctctttcccgagccacccctgtcagctcccaatgggcccartggccatggtggcaggcatggaggttacacatgggctcagcaacatggact

SEQ ID NO: 269302 - DNA, 523 bp, Homo sapiens
taagttttcccttttgcttattcctcttttctcaaacttttgaggtaggggaaggaatattccagaagtataatactaaacctatttttaaatatatgttactcatagaactattaacaatttttgtgaaataattaattggtctccaaaaaaatggtaaattatctctacttattagagatagttactgtctctaaataagatattaagtaaataatatgtacttattatttctaactcttgaatttccattactcccacagtagagaagactctggaggctctcacttatcctatagatactctgataacctttcaaattactttcctggtggtgaccagaaaattaagctttcctcaagaggccacttttctccccatatttatgcgcattacaattgcaaagatgtcttttycaccagggacatttatttactgacttatttaatgcaatgtgtcagcaaaaaacaaaaagagttcacatattttgtggttacatcttggctatagtaatgttgtgttt

SEQ ID NO: 269303 - DNA, 539 bp, Homo sapiens
acgtcatatctggccaaactaagcttcctcagtgaaggagaaataagatccttttcagataagcaaattctgagagaattcattaccatcagagtgccttacaaaatatcttaaaaggagcactaaatacagaaaggaaaaagcattaccagccaatacaaaaatacacttaattacccagaccagtgacactataaagcagacacataaataagtctgcataataaccagctaacaatacaatgacaggatcaaatccacacatatcaatactatccttgaatgtaaatgggtttaaggccccatttaaaaggcacagagtggcaagctggataaaaaagcaagactgaatggtaagctgtcttcragagacccatctcacacacatgacaccataggctcaaaataaaggaatgttggaaaatttatcaagcatatggaaatcacaaaaaaagtagaggtggcaatcctaatttcagacaaaacagactttaaaataacaaagttcaaaaaagacaaagaagggtgtgacataattg

SEQ ID NO: 269304 - DNA, 595 bp, Homo sapiens
aagtcacatcaaatatctttactgatcacagtggaataaagctagaagtcaataacaagaggaactctggaatacaaacacatggaaattaaacgatatactccaaatgaccattgggtcaatgaagaaattaagaagaaatttttaaaaatacttgaaacaccatcctggctaacacagtgaaaccccgtctctactaaaaatacaaaaaattagccaggcaaggtggtgggcacctgtagtcccagctactcgggaggctgaggcaggagaatggcatgaccccaggagccggagcttgcagtgagctgagatcatgccactgcactccagcctgggcgatagagcaagagtacttctcaaaaaaaaaaaaaaaaaaaaaaaaaaaaaaaaaaaacttgaaacaaatgaaaatggaaacataacacatcaaaacctgtgggatataggaaaaacaatactaagagggaagcttatatagcaatacatgcctacatttaaaarggggaaaaatttcaaataagtaacctagcaatgcatctgaaagaactagaaaagcaagagcaaaccagatccaaaattagtagaagaaaag

SEQ ID NO: 269305 - DNA, 622 bp, Homo sapiens
aattgaatctccatgaagcaatagactatacttttttgatcattattagttatayaatgcctttacagtaatttcaatgtagtagctgtttaataaatatctactgacctaatgattattgactatatagacataaacatacattatatagatccagaaactgataataacaccgaatttcaattacatcctctttctaatctggtaaatttttaacaaaatccatcttctctgctgatccatatacatacataaattgacaggtttagaaagagttactggaatgtggagagggatgtttacatattcagaaggatgttctgatgtgtctcaaaatagaaaatccatgacatatttgatttacctttgacgcacagaaacacctggacaaaaaagagaatattatctttccataataaaagaaaaattcagaataaaaatacgaaattttttaaatttctaaatatggacctctaatttataagtccaataacctagggaatttacaaaaatatattccctctttaagtaacaagtaaatcaattataattcatcttgacactaatatgaatgtctgtatacatttattcattatacgttaatttctcctttgggttaact

SEQ ID NO: 269306 - DNA, 556 bp, Homo sapiens
caccatatccattggcattttaaaatctgcgagaagttctatactagataaaactgtttaattttgtttaactgtgtgcattctaaactaatttgaccacaaacccatttttgcctaacacattaacattttacaaaatatgtatttcagggaactcacttgggataacattgatgacattattagtagaaactcttgatataagaaaggccacagaaatggtagaagccagttgattatttggaagaggmcttccagttgagaaggtatcacagtggataatctcatctcatgaaggaagtaagccaaccaacaactctgtaataaatgtgtgctatacatgtagcacctcaatcaagtacagtgctgttcattggaactcagtgctgccctaatgccgtggaaggcaacatcagtcagaacttggctagtgcccatggagggagtatttagaccagccctaggaagagatttcctactgttgtggcctcagagaacataatccattcaaagttttttcttttaaaatgtattaataataagacaagagcactga

SEQ ID NO: 269307 - DNA, 589 bp, Homo sapiens
agtgttttggaacaaagaattctaaataattaaattttctcatggtttaactgagaattttttttattttagtaacatatgtttattcatttcccctaatcagtctacagcaaacaaataatatcataaatgataatttaattatgtttgtacagctggaataaatactatgaagaaaaagtggatgattccagtaaaatcgatagtggggaaaaccaaatcctgtttgggtgtcaggggaagcttctccaaggaaaagccaatttcagttcaggcctgaaggcctatggacaccctcactcctgttagttttgctggagtcagggctttctttgtatctcttaagcctaaatagtcaagagaagtagtttggttaggtggatagtgagtatccaggtagagasagaccacaccagggaatattcttagaaagggacatgatagtcatatggagatcctatcctgagtgacagttttttcctctctgcttattatgcttttgaaacaccttaagaaaaatatcttctttttcacatttctttttagatttcagctgctatttggagtagctggagaaaacataaccagt

SEQ ID NO: 269308 - DNA, 521 bp, Homo sapiens
ggttgactggaccctacagaccctacatgaaaggccagagaaagaaggttgacgggactctatgctaagggcctcacacagcagaggcgctggagccaggagctggggagttcagagaacacagaactgactctttcctgatgggctaggggagcgagggcctcacagatattacccatgcacaagcatggagtattgattagccatagaacaacacagaggctggggattttaaaaacatgcctgtgctttggaaacacacagcattatgaacgtgtggtgggtagatgaatacagaaccacaaaccttaattttaaataaaatgaattaaataatcactcttcctttaggaatcaagtgctttattattctttaaataggatgagctagaagagtaagcgtctgcgtttttaccctgtgaaattaacaagcgggagaggcctcttgcatggacaccttttgtggtgcaaggatgctactggcyggtcggcaggggagagctgcttgaattttcccagca

SEQ ID NO: 269309 - DNA, 509 bp, Homo sapiens
tgtgtttgctgggtgtgagctgcgtcccagcaccaagtgtgtgctgggtacatggaagctgttgtcaaaccatgctgtcttcctgctcatgtaacacacgggattggagccactcgctctgatttgtttatttttayggctcttcaggcttgttcacaagatggttacaaaacacacaagtttgctattttgaggagccatttgaaaacctggagccataattgcatctaaagatctttcactagaaaatgttcagcaaaaacttcctaagtcccaaatgctcctgagaacgtttctttgtgctgacaggttttgctctcaagtatctcaaagttacccattttaatgggacagtcctcaaaagggccttaaagtagttaactggtcatcttgtcatctctcaagccatgttatgacatgttccccactagaaactgtgtcttagacagtaagggaaactcttcccatgccgtagactcaaaaccagaaccttaaactcatatactcat

SEQ ID NO: 269310 - DNA, 595 bp, Homo sapiens
tgatcatcccacatatctgctattttgtatcatttgacttatatctccccatcaccccccacccataaccactgtttcactctcacctacgtgtatttgagcttttatttttaatttttacttttttgagacagggtctcactctgtcaaycaggctggagtgcagtggcgtgatctcggctcactgcaacctctgcctcctgggttcaagtgatcctcccacctcagcctccagagtagctgagactacaaatgcacatcaccatgcccggctaatttttgtatttttagtagagacggggtttcaccatgttggccagaccggtctccaagtcctgagctcaaatgatccacccccttcagcctcccaaagtgctgggattacaggcctgagccaccgcacccaggctgagctctttaggaaaaaaaaaaaagttccacatttaagtgagataatacaatatttttctttctgcatctgacttatattacgtagtataatattttctgggtatatctatattgtggcaaatagcaggattgcattcttcttaaggctgaataatatttcattgaagatatatatatatatata

SEQ ID NO: 269311 - DNA, 595 bp, Homo sapiens
tgatcatcccacatatctgctattttgtatcatttgacttatatctccccatcaccccccacccataaccactgtttcactctcacctacgtgtatttgagcttttatttttaatttttacttttttgagacagggtctcactctgtcaatcaggctggagtgcagtggcgtgatctcggctcactgcaacctctgcctcctgggttcaagtgatcctcccacctcagcctccagagtagctgagactacaaatgcacatcaccatgcccggctaatttttgtatttttagtagagacggggtttcaccatgttggccagaccggtctccaagtcctgagctcaaatgatccaccyccttcagcctcccaaagtgctgggattacaggcctgagccaccgcacccaggctgagctctttaggaaaaaaaaaaaagttccacatttaagtgagataatacaatatttttctttctgcatctgacttatattacgtagtataatattttctgggtatatctatattgtggcaaatagcaggattgcattcttcttaaggctgaataatatttcattgaagatatatatatatatata

SEQ ID NO: 269312 - DNA, 595 bp, Homo sapiens
tgatcatcccacatatctgctattttgtatcatttgacttatatctccccatcaccccccacccataaccactgtttcactctcacctacgtgtatttgagcttttatttttaatttttacttttttgagacagggtctcactctgtcaatcaggctggagtgcagtggcgtgatctcggctcactgcaacctctgcctcctgggttcaagtgatcctcccacctcagcctccagagtagctgagactacaaatgcacatcaccatgcccggctaatttttgtatttttagtagagacggggtttcaccatgttggccagaccggtctccaagtcctgagctcaaatgatccacccccttcagyctcccaaagtgctgggattacaggcctgagccaccgcacccaggctgagctctttaggaaaaaaaaaaaagttccacatttaagtgagataatacaatatttttctttctgcatctgacttatattacgtagtataatattttctgggtatatctatattgtggcaaatagcaggattgcattcttcttaaggctgaataatatttcattgaagatatatatatatatata

SEQ ID NO: 269313 - DNA, 595 bp, Homo sapiens
tgatcatcccacatatctgctattttgtatcatttgacttatatctccccatcaccccccacccataaccactgtttcactctcacctacgtgtatttgagcttttatttttaatttttacttttttgagacagggtctcactctgtcaatcaggctggagtgcagtggcgtgatctcggctcactgcaacctctgcctcctgggttcaagtgatcctcccacctcagcctccagagtagctgagactacaaatgcacatcaccatgcccggctaatttttgtatttttagtagagacggggtttcaccatgttggccagaccggtctccaagtcctgagctcaaatgatccacccccttcagcctcccaaagtgctgggattacaggcctgagccaccgcacccaggctgagctctttaggaaaaaaaaaaaagttccacatttaagtgagataatacaatatttttctttctgcatctgacttatattacktagtataatattttctgggtatatctatattgtggcaaatagcaggattgcattcttcttaaggctgaataatatttcattgaagatatatatatatatata

SEQ ID NO: 269314 - DNA, 561 bp, Homo sapiens
tggaggacgaggatgtggccactgcagatggaacccagagagccggaggatgaggaggtggctactgcagatggaacccagagaaccagaggaagaggaggtggccactgcagatggaaaccagggagttggaggatgaggrtgtggccactgcagatggaacccagggagcgggaggacgaggatgtggccactgcagatggaacccagatagggttgctttatcactacaggtgttaggtgactcatttgtcataggaaagggctcatcagatcctcaagcggcctcagctgttttctggaatcggggggccttgaagaggtgtctcagggtcctctgggcaagctggccagggctccaggagctgctgccctccgtcagagccgctctgtgctgcctgctttctacactcgtgatcccggttccatgggggctgttcactgtgagaggtgggggctcagccggcccacccgactgcagaggccccttcttctaggattctccggcccacccaactgcagaggccccttcttctaggattctctggcccaaccgactgc

SEQ ID NO: 269315 - DNA, 452 bp, Homo sapiens
tggctgccggacaaggtcaagaaactgaagtggctccctctattgttgctccagttctgaataaaccgaagtaacctctcagctctagcaatccagctccacataggaccatttccacaaataactgcagcttctaaggctgcagcttctaaggccccagggtggtattaaaaaatcctggtgtgggcagtaggagtgctgcagggtcaaattgatgctagcaggtcagtgtattgaaacttgscattgaagccttggagaaagagatttctacttcagaaagctaaggaacaatgaattgatttgccagcagaacgaggggcaaaatgaccctgtattgcagaggactgtagacatgctctgtgccacagatgaagacttcgtgatatccgatgaaaggggcccacaggaggaacaagaagagttttaacaacccgaaccaggagagcctt

SEQ ID NO: 269316 - DNA, 452 bp, Homo sapiens
tggctgccggacaaggtcaagaaactgaagtggctccctctattgttgctccagttctgaataaaccgaagtaacctctcagctctagcaatccagctccacataggaccatttccacaaataactgcagcttctaaggctgcagcttctaaggccccagggtggtattaaaaaatcctggtgtgggcagtaggagtgctgcagggtcaaattgatgctagcaggtcagtgtattgaaacttggcattgaagccttggagaaagagatttctacttcagaaagctaaggaacaatgaattgatttgccagcagaacgaggggcamaatgaccctgtattgcagaggactgtagacatgctctgtgccacagatgaagacttcgtgatatccgatgaaaggggcccacaggaggaacaagaagagttttaacaacccgaaccaggagagcctt

SEQ ID NO: 269317 - DNA, 520 bp, Homo sapiens
tccatccagtctaattaaaatcctagcatatattttacctttttcaggaaaacatccacaacatactctgttgtcaagtttgtgatgaaacaaatacyctcaaacatggttgctggtggtcatacgaaagcacagaacctcgtaaataaggaattagtaaattccaacaaaattgagtatgcatatactctttagcctatcgtatctcattctttcaaaagtggcgaagaaagggaaaaataagatttattctctttcccctatgaattattaactcagaataaacaaaaaatgaacaaagtttctcaatttgctattaaatgtacaaggaataataagatttggttatcattaattttcagcttcagataaaattatagatgtgttatgattatgaatacctaacatcataaaaagaaaatcaacccaaccttgtactaacactacatacacaatctaggaataaagtgtgaaggtaaccaaacatctagatttaagtaccagaggaacatattaaata

SEQ ID NO: 269318 - DNA, 520 bp, Homo sapiens
tccatccagtctaattaaaatcctagcatatattttacctttttcaggaaaacatccacaacatactctgttgtcaagtttgtgatgaaacaaataccctcaaacatggttgctggtggtcatacgaaagcacagaacctcgtaaataaggaattagtaaattccaacaaaattgagtatgcatatactctttagcctatcgtatctcattctttcaaaagtggcgaagaaagggaaaaataagatttattctctttcccctatgaattattaactcagaataaacaaaaaatgaacaaagtttctcaatttgctattaaatgtacaaggaataataagatttggttatcattaattttcagcttcagataaaattatagatgtgttatgattatgaatacctaacatcataaaaagaaaatcaacccaamcttgtactaacactacatacacaatctaggaataaagtgtgaaggtaaccaaacatctagatttaagtaccagaggaacatattaaata

SEQ ID NO: 269319 - DNA, 590 bp, Homo sapiens
ttagctgaggttacagttatcttgactggggctggaggatcagcttctaagaaggctcaatctcatgattattggaaggaggtttcagttcctttttggcagttagttgaaggtctcagtttttctctgcaggaccttttccataggactgttgagtgtccttatgatatggcagctggcttcttccagggaaggtgatgtaagagagaaggcaaggagaaaatcctctttatgttctactcttgaaagtcactcttcaccacttctgccatattktattcattagaagctagtcactaagaagagctcaagctactataatccccaagacaactttaaaatgtttgctttcagaaaagtataagatcacatagaacagaaagtgccatagggttacatagaacagaaacaaagaaaagataatataattatgttatagatttgatttcattttctctgtatgtatatttggtatatgttggaagaagaaaagaaaacgcagagaacagaatcctttatgacaacatgaatgatcagacagcaatggggaattaagaaatataagtttgggaccagattgggtagaattt

SEQ ID NO: 269320 - DNA, 588 bp, Homo sapiens
ctctgctttttactttattctgccatttttttcttcttggattttgaaattctactttgttatacycttttaagattgtcatgccttgttacaaattggcctttttttccccaataaaatgaccatttttatctgtgttagtatcctttgtcttaaaatctacttttttgatattcatatagccatatcagctttcttttgcttagtgttttcatgctgtatcttttactgatttttttactttcaacctgtctgtgttatatttaaaatatgtgttgaaaacagcataccactgaactttgctctttatccagtctgacaatcttaagagtagtgaaaatatacacccacaaaaagacctatgcaagaatgttcatagtaaacttttttataatagttaaaacttaggaacaactcaaatgctcatcaataggtaaatgaaacattattataacatacttatataggagagtgctactcaacaacaaaaagttatgatatacttacatatgcaacaaaatggttaaatctaaaaaaaaaaactgttaagtgacaaaagccaggaaaaaaagtaacatgctttatgat

SEQ ID NO: 269321 - DNA, 609 bp, Homo sapiens
agtttgaaagcacatcctgtgtgaggatgaagtgtctgggagttgtttcacagctttgatcatgtaatgaaagcatttgtgtttatgggtcaggaagtgacaagaaggttttgtttgagtaggtggtaasgtctgacacctgagaggcaggcagtgtaataatatctaattgcaatacaatattcagctttcaggtagggttttgctaatggaagagaatcggtatattctgtatttcttctaccagattattatctgatgaatgccttagagactacccgtaattcagagagagagagaaaattacataagcaaattgcaagaataatctctttccttgtgcttatattattacattgcattttgctttctgcatttaaagcaccctttttctaaagactcaagaaacttttaatagacctttgttagtataaaccagatcattcttatgagaagtaaacttcctataggcatacttcattttattgtgcttcatttctattgcattttttaacaaattgaaggtttgtggtaacaaatagcatatgctcactttgggtctctgtgtcacattttggtgtttctggcaatatttaggctctttcatta

SEQ ID NO: 269322 - DNA, 442 bp, Homo sapiens
agatattgtatttgactggaggatgtttcacttacctgatactataaaacagaagatatataaatctgcccttcaagcaatattaattagacatgctaaatgagaaccagtaaaattttccaagctcacagggtgtagagtagaagctgaagtgctggtagggacaaattctccacttaatagccctttgaggaatgtttactggggcttatggcaaaaccctgtgagtgcttcccaaagacaactaatgggactttgaactagagaatttccacttgagaagaatttactgccttgctrtgggacattaactgaaaccatccctgtcactggaggacataaaatgatctgacatctgaaatacccatgctgtctgggatgatgtcagagaaacactgtaagagggatagcagtgtccagagggttccatcataaaatggga

SEQ ID NO: 269323 - DNA, 572 bp, Homo sapiens
agagtgtacagttaaagaaaataagctttgtgctcttttttcactggccatacaaatcatagacattccagactcctaccttctacaagcgtcttccctctgctgcttttattcttccttatcctcctcaggacccttttgttctcatcttcactgtcctttcttcccttttaggagaataggggtagttgaggatttgttttctttttcagaaatttatctgttactcattgacagaaattcagaatcacaaagcactaagagatcagtaatatgatagctgctattaasttgcctttaaaatgagagatatgaatgaaggagacttttaagatgttagactggtgctttttgatcattaatgaacatacaaatctcctggagattttgttaaaatgcagagtttggaagtggaatctggtattttgcatttctaccaagctgccagtgatagggaccacactttgagtagcagagtagggctgagggctgtttctttaggaatgcactccttccttgaagaaagttggccttcctttctgttcttccttttctctttaggaatgcaccct

SEQ ID NO: 269324 - DNA, 572 bp, Homo sapiens
agagtgtacagttaaagaaaataagctttgtgctcttttttcactggccatacaaatcatagacattccagactcctaccttctacaagcgtcttccctctgctgcttttattcttccttatcctcctcaggacccttttgttctcatcttcactgtcctttcttcccttttaggagaataggggtagttgaggatttgttttctttttcagaaatttatctgttactcattgacagaaattcagaatcacaaagcactaagagatcagtaatatgatagctgctattaagtygcctttaaaatgagagatatgaatgaaggagacttttaagatgttagactggtgctttttgatcattaatgaacatacaaatctcctggagattttgttaaaatgcagagtttggaagtggaatctggtattttgcatttctaccaagctgccagtgatagggaccacactttgagtagcagagtagggctgagggctgtttctttaggaatgcactccttccttgaagaaagttggccttcctttctgttcttccttttctctttaggaatgcaccct

SEQ ID NO: 269325 - DNA, 588 bp, Homo sapiens
aaatgcaaatcaaaaccacaatgagataccatctcacaccagttagaatggcaatcattaagaagtcaggagaccctgcttctaaaaaaaatcttaacccttgagtacatattttttaaatgttctctgtgattaaatggaaagtatgaataaaccacttctgcttcataccaaagtatgatagttgtctcaaggaaaagcacatgtgtgattgagtcaggagctaaacaagctgtctttttttttttcccatgaaaagccatttttacttgaaagaatgactggcagactggtgttttagrtttgggtatttggcaggcagtttcttggatatgaaggaagtgagtctgtcatttcaaagaaaactcagggtttgttgccaaagataaaatctgagctttcaagcaaaaaattagaattttggaaatttgtttctgccaccgtttacttgagggcttcccaacacttaaagttttttctgagaacaatggtaacattaacaactgtgattttgatattgtctaataaaatgtgtcaacatcaaggacattcatttaactcaatgaatgaatattttctaaatgacga

SEQ ID NO: 269326 - DNA, 588 bp, Homo sapiens
aaatgcaaatcaaaaccacaatgagataccatctcacaccagttagaatggcaatcattaagaagtcaggagaccctgcttctaaaaaaaatcttaacccttgagtacatattttttaaatgttctctgtgattaaatggaaagtatgaataaaccacttctgcttcataccaaagtatgatagttgtctcaaggaaaagcacatgtgtgattgagtcaggagctaaacaagctgtctttttttttttcccatgaaaagccatttttacttgaaagaatgactggcagactggtgttttagatttgggtatttggcaggcagtttcttggatatgaaggaagtgagtctgtcatttcaaagaaaactcagggtttgttgccaaagataaaatctgagctttcaagcaaaaaattagaattttggaaatttgtttctgccaccgtttacttgagggcttcccaacacttaaagttttttctgagaacaatggtaacattaacaactgtgattttgatattgtctaataaaatgtrtcaacatcaaggacattcatttaactcaatgaatgaatattttctaaatgacga

SEQ ID NO: 269327 - DNA, 548 bp, Homo sapiens
agtccagagggggacaaggcagcagggggctggcatgtctgtgctgccccaagcatgtacacacccagccaggtcatgacagtgcccaggttcgamcacaactttgctctgcactgaaccatgtgccaggagatgggtgaggccagagagcagaagcaagcacttctgagcctgcaggagtgggggtgggggttttcaggccccccgaaggcacagggatgcccgggtccaaagccacagctgggtggctgcagctgcacccagttcctagcccccaacagctctgcggaacatgcagccttagccacgcctcccctgctgcagccagcatcttggtagtggccactccaggcgggcctcaactcccatcagaaggttgagtaaagtttctttatttcaatggttcttaaatacaatatttatcagaatcacttagagtgcttaataaaacagatttcctgtcccacctctggagtttctgatttagtaggtctgaggtggaaccagataagttttacttctaacaggtttctaggaaatactgatgc

SEQ ID NO: 269328 - DNA, 548 bp, Homo sapiens
agtccagagggggacaaggcagcagggggctggcatgtctgtgctgccccaagcatgtacacacccagccaggtcatgacagtgcccaggttcgaccacaactttgctctgcactgaaccatgtgccaggagatgggtgaggccagagagcagaagcaagcacttctgagcctgcaggagtgggggtgggggttktcaggccccccgaaggcacagggatgcccgggtccaaagccacagctgggtggctgcagctgcacccagttcctagcccccaacagctctgcggaacatgcagccttagccacgcctcccctgctgcagccagcatcttggtagtggccactccaggcgggcctcaactcccatcagaaggttgagtaaagtttctttatttcaatggttcttaaatacaatatttatcagaatcacttagagtgcttaataaaacagatttcctgtcccacctctggagtttctgatttagtaggtctgaggtggaaccagataagttttacttctaacaggtttctaggaaatactgatgc

SEQ ID NO: 269329 - DNA, 454 bp, Homo sapiens
ttcttgcatttttcttatatgcctgctctttcactcccttacagctctcagctctcagtcacatagtgttatttctgccctggcacactgcttggccatggcatgatgcattgtatacaatgagcacactaattctatcacaatatctgcatactaactacttcggctgaattgactattatactaatctactctattccaaaaaacaggggtctttagaattgtggtatacaataaagaaaacagcatctggcctggctttgagagattctgtacatgacttaattgctaggtactaagtgataaatatgaacaaacaagctcataaaacttatagactaatggcttagaagttgcttcattataaacaatatcagttaactactaaacacattcatattacacrcatctacttaattatagtctactaatatactactatattgtgtatatt

SEQ ID NO: 269330 - DNA, 564 bp, Homo sapiens
aagtcttacttcaaccattttagcattttcctttgaagttatcatgcagatcttaaaaacaatctgatagtaagctgtctatatccacgtacttaatttaaaaaatctcttgtttactactaagattttaattctagggaagaaaaatgcttgcttggggtgagtgagcattcactctgaggaagcaagatatgaccctggatcttatctgactgtaggtgggaytggtcagtgggggaaatctatggacaggttttgtgtgtatgtcttttactgggaaaagactcattctacatggtttttcaaagggattagtgaaatatttttaagagccagatgtttctgtgttaaattcctaatggggttaattcacacaaattaccgaatttctctgatctcattttcccacctgtaaatgtgaggtcgtaatacctatcttgaagtgtcattggaattaaatgagctcatgcctttaaagttcttgttcataaatgcaccaggagtttatttcttattctataaatgcatctttccctttttcagaaatataattcatgatcactc

SEQ ID NO: 269331 - DNA, 564 bp, Homo sapiens
aagtcttacttcaaccattttagcattttcctttgaagttatcatgcagatcttaaaaacaatctgatagtaagctgtctatatccacgtacttaatttaaaaaatctcttgtttactactaagattttaattctagggaagaaaaatgcttgcttggggtgagtgagcattcactctgaggaagcaagatatgaccctggatcttatctgactgtaggtgggattggtcagtgggggaaatctatggacaggttttgtgtgtatgtcttttactgggaaaagactcattctacatggtttttcaaagggattagtgaaatatttttaagagccagatgtttctgtgttaaattcctaatggggttaattcacacaaattaccgaatttctctgatctcattttcccacctgtaaatgtgaggtcrtaatacctatcttgaagtgtcattggaattaaatgagctcatgcctttaaagttcttgttcataaatgcaccaggagtttatttcttattctataaatgcatctttccctttttcagaaatataattcatgatcactc

SEQ ID NO: 269332 - DNA, 615 bp, Homo sapiens
  misc_feature (1)...(615): n = A,T,C or G
gtggttcttacctttttgattaattaattcaatgctctctccaccttccttatcaatagcttatatgccatgaaacattttcagtttcttctttaataacttagcagaccttttcygctgcaaaactcctggaatttccagcacattacaaaagatgaaagccaattgagcactacatttatgaaaagttgctggatcttgaactttaattagtaaattgcatcagataaatgcaaatttaaaccaaaataaaacattatctacacacctaccagattggcaataccaaaaagtctgacaataccaagttttaccaaggataaacagcaataagaacactcgtacaatgctgataggaaaaaaaatagttaaataatcctntaaaaacagttgggtatgatcacattatttgagaaagttaaagatattttttaatactgcaattctactttgaacaacgtatcctaaagaaacttatgcacatgtttaggataatctatgtacaaaaatgaatataacttttttttgcacttgcaaaaaactgggagcaactcaaaaacagtagaaataggcaaataattgaatactatatagtgatgaaaatgaatgaatacc

SEQ ID NO: 269333 - DNA, 595 bp, Homo sapiens
agacaacccacagagtgggagaaaatcttctcaaactatgcatccaacagagtactaatatccagaatttacaaggaactcaaatcagcaagaaagaaacaaaacaatcccatcaaaaggtggactaaggacatggatagacagttctcgaaagaagatataaaaatggctaacaaacataaggaaaaatgctcagtgtcactaatgatcagggaaatgcaattcaaagccacagtgaggtaccaccttattcctgcaagaatggctataatttaaaaaaaatagaaaaaataataagtgttcgtgtgaatgtggtgaaaagggaacagttttacactgctggtaggaawgtaaactagtacagccactatggaaaacagtgtggagattccttaaagaactaaaagtaaaactaccatttgatctagtaatcccactgctaggactctacccagaggaaaagaagtcatatgaaaaagacacttctctacacctgtttatagcagcaaaattcacaatttcaaaaatatggaaccagcttaaaatgcccaccaaccaatgagtggataaagaaaatgtgagatgtatatatata

SEQ ID NO: 269334 - DNA, 535 bp, Homo sapiens
cctatctgaatttctgcagctaagtggaattttgccaagcttttcagtgtaaaggactagaagaaagaaaatgtatgaacacackggagtgagagagcatcacgtaattacaaagtaataatgagtttagaatttcagaaaacaaagttgtggcaggtgataaggcagggaaggcatgcagcttttgagacatccagagggaagtgcctagtttggcaatttttgaaaagcaatctaatttcacagaggtagatcagatgacccatcataaccaacagaggaaccagtctgggttaagtcatgtgactatttcttaagaatggaaagttatttgactttcatgtgagaaattacacaaaaatattgtgattgatattgtttaaggggaacgcacgttgttgagaccattcaaactatttttatggaaattagtagtcaggaaaaacacacaaaaaaggagataatcaatatgtatgtacagagatttggctccagataaacacccatatgataacatcaggtctactcagcacat

SEQ ID NO: 269335 - DNA, 579 bp, Homo sapiens
attctgacaccttcattactagttcataccaaattctggtctctggcagaaagtctagcattcaatattgagaaaggacccctttctccatattttgcagtctagcattacaccggacatgtaactgggcttaagcaaacactgattgattgacttggtcactttaycatttctggtaacacattaaatcattattacaaatgatcctcaagtaagagttaaatttcatttcaaatggttattccaaatgttgtgcatccctcccaggactaacaaattatgcaagaccatgcaggcaggatttaaaaccaacctccagcaatgttacttttgcaagctctctccaatgtctatatctgcaatatctttactgcctcacataaggctctttaagcttaacgttgtttttaagaatgttcttttacttgttacttttccttattgctttgtggcttaaatttaattcagttttatgttttgcttttttgattttttttcttcaaagttctgacttttcatgcttgggattgtatggagtagccactgttcttcactaacgcagtaactaatatatggttg

SEQ ID NO: 269336 - DNA, 319 bp, Homo sapiens
tctggtgggcaagaatgattatccactattatcatactcagattagaggccaagcccacagggttagaggccctggggaatattgagaagaatggatttggctaaacaagatgtttgccactttctctttttggactgtccaccttgtgctctctgtccctcacctgagtgctctacatcttgtcacctttctgctcaccgcctctgytttgtagtagcctggaggctgccccaggacagaggccccaaatagtttagcttttactttcctcagctatcctctgactcttaactgactgctagtttaatttgccactgg

SEQ ID NO: 269337 - DNA, 319 bp, Homo sapiens
tctggtgggcaagaatgattatccactattatcatactcagattagaggccaagcccacagggttagaggccctggggaatattgagaagaatggatttggctaaacaagatgtttgccactttctctttttggactgtccaccttgtgctctctgtccctcacctgagtgctctacatcttgtcacctttctgctcaccgcctctgctttgtagtagcctggaggctgccccaggacagaggccccaartagtttagcttttactttcctcagctatcctctgactcttaactgactgctagtttaatttgccactgg

SEQ ID NO: 269338 - DNA, 319 bp, Homo sapiens
tctggtgggcaagaatgattatccactattatcatactcagattagaggccaagcccacagggttagaggccctggggaatattgagaagaatggatttggctaaacaagatgtttgccactttctctttttggactgtccaccttgtgctctctgtccctcacctgagtgctctacatcttgtcacctttctgctcaccgcctctgctttgtagtagcctggaggctgccccaggacagaggccccaaayagtttagcttttactttcctcagctatcctctgactcttaactgactgctagtttaatttgccactgg

SEQ ID NO: 269339 - DNA, 592 bp, Homo sapiens
aaaaactttggaaagtacaaatgaatgcaatgcatcagattaacaaaagttactcttgtctagtatggctaggatatccatacctctctccctccacatatcagagagaattttgaccataagactttacagtaggcttttctttcttaacttcttatgatgaagctccatgtggacttcattatattccatgaaatgtgtagtgtctttgctctctgctcctcctacatccgttcactgaagatgctttgcacccagacctgctgagaagcaggtaggccttaccagttctatgtccataggacaaccccttccccagtggtcacacctaactgaaccatatgtaaacacctgacccaagttgggcctattatattgtcttcccagaagtttgggactaaggccctgaagractgtgtcaataagatggtgctgggttctggagccaggtttggcactaaagccagtcaaagccacatgcaaactaaagttgtagaagaggatcaggcatggttttctttccctcctcaggagaaagaaagaaggaagtgtgctcagggccagagaaaagagaccatgtggaccagtgagg

SEQ ID NO: 269340 - DNA, 543 bp, Homo sapiens
gtgtgtctagttccactatccatagcctggttctcaagaggctgccacccatgatgttttctgtctttagctcttccagggattatcactataactcgaagtatctgtttcatacaacattaatatctatttcttatcttaccaacttaagcttgtcttttaactctttgctgtaaaagattactatttcagctcatagcaactactctgcttcgtttttccctgtatctgctcccattttttctttttgttcttctattgtttatactttaaataatatttttgacttttatttcttgttctgtcaacttcagacatatcatggtgtatgatatggagtcggtcactcctacacgctctcccatctctccttcccacctmtaactcctactgttcatcatttctaccactacttttatattgccaaggtttaaaacatttacattctgaatggaaattttaattaagtattcatcgctttgtctatacattgattcagagaagcaaaaatagataaacatcatttataatattatgatattg

SEQ ID NO: 269341 - DNA, 477 bp, Homo sapiens
ggtttaacaaaccctccaggtgattcagatgcatactcaagttggggaagccctgctttaaaataatgtacacacactctccacaccacacaccccttgtatatggtatgcttattttgagaaacaatctattaacaaatgagaggaccgtggtagccaacaactagataattcctgctgagggataagtcaatagggtccaggtcattygaatttgggaaacagactcaattcctggtttctgtataaactcattcagtggactagctttctgacaggtctttgaaaaatgagacccctggtaacagccctctctctcaaatatttccctggcctgcagcaattaaacagctgagcaggaaactggacctgaagttctgttaaccctttgtcagctaaagcacatgagcaatctgtcttgctggagagattttattttcaacctctttccctctcaccacactacaaaggaaaact

SEQ ID NO: 269342 - DNA, 476 bp, Homo sapiens
aagacagaaggaagaggctcccccatacagagatggggagggggtgctccaaagccaaaagaggaggtccccaagtacggtggacaccagccaggtatatatgcagaggctggaggaggcgatgtctgatttgcayagggctcaggggattggtttgactaggcatgtcattcatgtagcttgcaaaaaagctggccctcccaccctagccttttaatatgcaaatacaatgcaccatgatgttctacacacgtggggataggtgggggccatgctgccgggaacatgtgggaaaagggcaagaaggctgagggaatctccatgtttgggtagacccagtttctaatggttggcatttgcatatcaaaggttgccagcctggctctaagagccggaacttcacaagaaaacatttctggagatgctttaaaaaatgaaaacttcccaaggaccccttgtcctctctatctgcctaa

SEQ ID NO: 269343 - DNA, 597 bp, Homo sapiens
gtggcactcatgctatcattctccactcctaagcaaatggtagactttactaattgatcatwctgctctttcatactgaatctaataattcttatcagcattctaagcagctactaacaattcatagagatatttaagttgaaatccattcccaattcctgtattagactaaaagcttattgagtgcttatatactatctttctttttttatactctataacacttcacatgatagaaactcagtaaatactcactgaatttaacaaactgaatttcgagtataaatcttgttcaaagaaagttccctacacaagaactttgggtcatgagtcaacataaagttgttttgattctatacaaatacataagaaacaatgcaacatacttttaactttgactgaattttcatcaagtatgaataatgagctgtagcaatggtttgaataataattcataacaataattcataatttataataataaatggtggattatgcaccattatgtattaacttcaaagctagatgattcaaggacacaaagaagtggaaagcccggcctctcgccttgaggaactctcttatctagttgagata

SEQ ID NO: 269344 - DNA, 594 bp, Homo sapiens
attaacaaatgagaggaccgtggtagccaacaactagataattcctgctgagggataagtcaatagggtccaggtcattcgaatttgggaaacagactcaattcctggtttctgtataaactcattcagtggactagctttctgacaggtctttgaaaaatgagacccctggtaacagccctctctctcaaatatttccctggcctgcagcaattaaacagctgagcaggaaactggacctgaagttctgttaaccctttgtcagctaaagcacatgagcaatctgtcttgctggagagattttattttcaacctctttccctctcaccacactacaaaggaaaactgcctcctgaaacatctcctggtggagctgcgagcttccgtgtctgtgtgattgaaaacagcaaggtcagagatcaacagaaatgaatggtcattacaaactaaatgcagctgctgaatctccttgtacttctccttggtgtcatgaagacaaatagcattaaaaaaagttytcccagtgaagcagctctcattttctcctctctcatccccttccaaacatttcttaatgaactacaagtccatcat

SEQ ID NO: 269345 - DNA, 577 bp, Homo sapiens
acattattgagctcctaggaaataccagatatgttatatattctatttagttctagcaatcaaatatgagatattggattcatctgagacctatgtcttaaatcccagctcagcctcttactagctatgcaaccttgtcctctctggaagtcagcrgtctcatttgcaaagtggggttgctagtaataataataatcttctaggtttatagagaagattacatgatgtcatgaatataactacttaatgtaataaacagccacaatttatcaaagattagctccattttatacacaaagtatatgattcagaagtgtaggtaactctcccaataaggtgatgaaaacagaacatggcacatttcctcctgggatggtgactgactaattcaaaacattacgcatgaatcatatggtttttaaatgcattctctatatatttaagcatttgttatcattaaactcccttcataataatgtgaaacaatgatccttgaaggtggctttcagattcagcatgtcagtccctgctccaggccattctagtggttgggaatgagaactcagctagctgtggg

SEQ ID NO: 269346 - DNA, 577 bp, Homo sapiens
acattattgagctcctaggaaataccagatatgttatatattctatttagttctagcaatcaaatatgagatattggattcatctgagacctatgtcttaaatcccagctcagcctcttactagctatgcaaccttgtcctctctggaagtcagcagtctcatttgcaaagtggggttgctagtaataataataatcttctaggtttatagagaagattacatgatgtcatgaatataactacttaatgtaataaacagccacaatttatcaaagattagctccattttatacacaaagtatatgattcagaagtgtaggtaactctcccaataaggtgatgaaaacagaacatggcacatttcctcctgggatggtgactgactaattcamaacattacgcatgaatcatatggtttttaaatgcattctctatatatttaagcatttgttatcattaaactcccttcataataatgtgaaacaatgatccttgaaggtggctttcagattcagcatgtcagtccctgctccaggccattctagtggttgggaatgagaactcagctagctgtggg

SEQ ID NO: 269347 - DNA, 568 bp, Homo sapiens
taatgtgaaacaatgatccttgaaggtggctttcagattcwgcatgtcagtccctgctccaggccattctagtggttgggaatgagaactcagctagctgtgggctccctggagctcctttgcgcgagacccgggctctcctgattccttcctccacctctctttgggatgggttcccctggacttgcttccccaaactcttggcctgtatgtcagcatccctgttcctctctttcaggtggaatccttacccacagattttgttgtaggggcagtaattacccccaaatattgtacttcctctcctacatttaaaccccttaaagttacaggatcatctgactagttctaggcagtaaaatgtggccagaagtgtatcacctttgcaccaaggcaatgaaaaacccatgctggattctccaatcttatttctcctgttgtggagtgttaagtgcacatgacctacatgatacaaatactaaaatggtagccttggttagtatgggtccctgagggacactggagcaggttgtcaccccataccacattggatactttgtatgtataa

SEQ ID NO: 269348 - DNA, 568 bp, Homo sapiens
taatgtgaaacaatgatccttgaaggtggctttcagattcagcatgtcagtccctgctccaggccattctagtggttgggaatgagaactcagctagctgtgggctccctggagctcctttgcgcgagacccgggctctcctgattccttcctccacctctctttkggatgggttcccctggacttgcttccccaaactcttggcctgtatgtcagcatccctgttcctctctttcaggtggaatccttacccacagattttgttgtaggggcagtaattacccccaaatattgtacttcctctcctacatttaaaccccttaaagttacaggatcatctgactagttctaggcagtaaaatgtggccagaagtgtatcacctttgcaccaaggcaatgaaaaacccatgctggattctccaatcttatttctcctgttgtggagtgttaagtgcacatgacctacatgatacaaatactaaaatggtagccttggttagtatgggtccctgagggacactggagcaggttgtcaccccataccacattggatactttgtatgtataa

SEQ ID NO: 269349 - DNA, 568 bp, Homo sapiens
taatgtgaaacaatgatccttgaaggtggctttcagattcagcatgtcagtccctgctccaggccattctagtggttgggaatgagaactcagctagctgtgggctccctggagctcctttgcgcgagacccgggctctcctgattccttcctccacctctctttgggatgggttcccctggacttgcttccccaaactcttggcctgtatgtcagcatccctgttcctctctttcaggtggaatccttacccacagattttgttgtaggggcagtaattacccccaaatattgtacttcctctcctacatttaaaccccttaaagttacaggatcatctgactagttctaggcagtaaaatgtggccagaagtgtatcacctttgcaccaaggcaatgaaaaacccatgctggattctccaatcttatttctcctgttgtggagtgttaagtgcacatgacctacatgatacaaatactaaaatggtagccttggttagyatgggtccctgagggacactggagcaggttgtcaccccataccacattggatactttgtatgtataa

SEQ ID NO: 269350 - DNA, 499 bp, Homo sapiens
ttctgtggtgtgatttcaggagaatgctctgttatgaygctctgttgccattcttactccacaccttataaaatgacaaataaaagaaccccaactctaaactgacttaagcaaaaggaagattggttggtgagattctggggtagctccataaaatcaaagaaagagtttgtcacccaacccttgagcaggacagggagggcagcactgaagattttaggggaaatgcgaacttgtgcatcctctgggtgctctctgccccaccttcattctgttcttcctggggtgttcctcattctatgtggacatggtaccatgaccacaaacttagcttaaaaactcacagggaagagctcatgggccatctctggaccccatcactgtgtccgggaaactaggaaagtgtaaaaggacgatagtcctcatttagaccctatgaataggattgagggagaatagcagtttcccccaatagaaggggcaagaaggaaaagacaga

SEQ ID NO: 269351 - DNA, 619 bp, Homo sapiens
cctgtctgaaactgttgcaataagtctacccagccttaacttctttccagttctccctactttttaaaatattccctactcaaaactctattctgaattatcagtgaagcttatcagtcatacacaggcacaccctgtttaaaaagtgtaaaaagctcctcactgcacttagaataaattcccagtactctggctgtaggtggttggatggcttcaacttctcgcattgcgtccctcctaactcactatactccagcctcactggtctttctcatttccttcaggcatcagacccttttcctccagggccttacaactactgtcctttttttcatgcaatgctcttccctacccaccttcatctggtcaccamctctcatccttcagatctccatttcaatgtcacctccttggagataagtctaccctttctcaagaagactgctgtcactctattctttttctagcacgctgttctttttatgcataggaagaaattaaacacttacttgtttgcttcctggattaatgtgtgtcacaatgatcataatcttgatcataatcactccaagaggtcaaggcttgtgtgtccattttatttgcctctccacattcagca

SEQ ID NO: 269352 - DNA, 626 bp, Homo sapiens
cttaattcaaacaattattctaggaaactgttttaatgaaaatagtttgaatagtgtaaaaccaaggacatattttataaggatgctttctagaacagtcttcaatataattccatgccctcatgtccaactattccaataaaagcatttctatgtgggccaggctatgatgcattccaagtctgattctacaatgggatgaatttagggacgcattttagagtgtggatggatagaktatcatgggtgtccaatcttttggcttccctgggccacactggaagaattgtcttgggccacacataaaatacactaacactaacaatagctgatgagcttccaaaaaatcacaaaaaaactcataatgttttaagaaagtttatgaatttgtgttgggctacatttaaagccatcctaggccacatgtggtccatggaccatgggttagaaaagtttggattacatagtcttctggttgttttttgctaatattgtttttctcaactccagttttgaaagtaactgggtacaaatgagtactgaaaggtactcatattctatgtttcagttaaattgagcaaggaacaggattgataaccaggtgtgaaatctgaggagcctgactg

SEQ ID NO: 269353 - DNA, 586 bp, Homo sapiens
gattcaacaatttaaaaggggaaaaaagcccatttctaacctcatgaagtttatagtaaggccacaaggatacctaataagaggtaacatttattgaattaggtactrtatgtgtattatgctatttaatcctcaaaaacggaaagaaaaagaaaaaccctgaagaaggtactatggcttatacagatggaaaatgaagtttaaggagattaagtaacttgaccaaggacacacctctagatagtggggaggtaggagtcaaacccagacggtctggctccaaaatcaatacacttaatacttctatttaagaccaccatgcttatctgcataggttgtgtacctcttaactcagaggaacacagttcaaataaactccaacttgcacaatctcatatagcagtctgaaacccagacacaccaccatattttcttcacatgtgatttttcgactcttgttcaagtaaaaatcaaacacgaagatggaggaagatgaaatggaaaaattcccagaaaaacacaaactactaaaattgactcaaaaagaaataaaaaatctgaatagactattataataaataaataa

SEQ ID NO: 269354 - DNA, 575 bp, Homo sapiens
tagagataaggcattacgagaagggaatttgagtcatagtgtgcataagtgggtgtcgagtccaaagccaaagccggaactgccattgagctgagcttcccactggcatgttttccacattctgaatggtggagacattcttgaataggtagtcacaattaacaacagaacataagtattactgatacaaaggatggttcccataaaaaggctttatccttctctagttcaagcttctgcaaagccttaaaaagaagccagctccacttcaagagatatggtgcattctacatccctgtgacccaagcggataagtaatgtcctcagagaaagccattattagtaggttggataatgataatagtatgagtaattggagagaaataaagtagtttctgttagaatagtcattgggggctgcctatatgtaattgggttgcaatccttaagactaaacttatgccaacttctcttycataaaaaaagaaaattttggaggtgctctttctgcagaccagagacataataataattaacttcagtgacatgagccactgatctgctccatggaattg

SEQ ID NO: 269355 - DNA, 567 bp, Homo sapiens
atgttccattaatctattcacctattctttcatcagtactacactggcttgactgccgtagtgatacagtaagtcttgaagtcaggttgtgtcagtcctccaattttattctccttgaataatgagttggtattctggatcttttacctctacacataaacattagaattkgtttgtcaatatacacaaaatcactttctgggattttgattgggacttctttgaatctatagttcaaattaagaagaactgacatcttgacaatatagttttcttactcaggaacatgggctatctctctatttatttagttcttcctccatatctttcatcagggttttgtagtttttcatatagatcttgtacatcttttgttagatttatagttaagtatttcatttttggggtgttaatataaatggcaatgtgttgttaatttcaaatttcattgttcattgctggtatataggaaagtgattgacttttatatattaaccttatatcttgcaaccgtgctataattgcttatttcccggagtttttttgttgattattttgggctttcta

SEQ ID NO: 269356 - DNA, 567 bp, Homo sapiens
atgttccattaatctattcacctattctttcatcagtactacactggcttgactgccgtagtgatacagtaagtcttgaagtcaggttgtgtcagtcctccaattttattctccttgaataatgagttggtattctggatcttttacctctacacataaacattagaattgktttgtcaatatacacaaaatcactttctgggattttgattgggacttctttgaatctatagttcaaattaagaagaactgacatcttgacaatatagttttcttactcaggaacatgggctatctctctatttatttagttcttcctccatatctttcatcagggttttgtagtttttcatatagatcttgtacatcttttgttagatttatagttaagtatttcatttttggggtgttaatataaatggcaatgtgttgttaatttcaaatttcattgttcattgctggtatataggaaagtgattgacttttatatattaaccttatatcttgcaaccgtgctataattgcttatttcccggagtttttttgttgattattttgggctttcta

SEQ ID NO: 269357 - DNA, 596 bp, Homo sapiens
tttgtataaaaacattctaattactttcttataccttattttagaacctaatttaaatttaaattttctaaactttatattaggcatgcatcaaaaatatgcatcmatttttctaaaatttaaactagaaaaatgtttaaatttaatttagatttttctaaattttaatttaaattttaaattagaggtttaaattttaaaaaaatagatgcatatgttaggtgcccagtgtaaatttttgcttatttatctgtttttgatgaacaaatactcccacattctcttcagtctgcattgattttctgggctggttgcactgaatttgtagtcagaaagtaattgaaagttgtaatggggtgccatctactggggaaatagaacatagattaaaaaacagaattgataggcgttcccactgcaaaaaagaatgtgatgaagatgatgtaaaagaaaacatgaaaaaagatgggaagtttacattttgcataagactagaaaaattttatttgaactcaaatatgcttctttgatatactactttgttttaacactagcacagacactagatatcaaaagaaaccctctgtttatactta

SEQ ID NO: 269358 - DNA, 596 bp, Homo sapiens
tttgtataaaaacattctaattactttcttataccttattttagaacctaatttaaatttaaattttctaaactttatattaggcatgcatcaaaaatatgcatcaatttttctaaaatttaaactagaaaaatgtttaaatttaatttagatttttctaaattttaatttaaattttaaattagaggtttaaatttwaaaaaaatagatgcatatgttaggtgcccagtgtaaatttttgcttatttatctgtttttgatgaacaaatactcccacattctcttcagtctgcattgattttctgggctggttgcactgaatttgtagtcagaaagtaattgaaagttgtaatggggtgccatctactggggaaatagaacatagattaaaaaacagaattgataggcgttcccactgcaaaaaagaatgtgatgaagatgatgtaaaagaaaacatgaaaaaagatgggaagtttacattttgcataagactagaaaaattttatttgaactcaaatatgcttctttgatatactactttgttttaacactagcacagacactagatatcaaaagaaaccctctgtttatactta

SEQ ID NO: 269359 - DNA, 596 bp, Homo sapiens
tttgtataaaaacattctaattactttcttataccttattttagaacctaatttaaatttaaattttctaaactttatattaggcatgcatcaaaaatatgcatcaatttttctaaaatttaaactagaaaaatgtttaaatttaatttagatttttctaaattttaatttaaattttaaattagaggtttaaattttaaaaaaatagatgcatatgttaggtgcccartgtaaatttttgcttatttatctgtttttgatgaacaaatactcccacattctcttcagtctgcattgattttctgggctggttgcactgaatttgtagtcagaaagtaattgaaagttgtaatggggtgccatctactggggaaatagaacatagattaaaaaacagaattgataggcgttcccactgcaaaaaagaatgtgatgaagatgatgtaaaagaaaacatgaaaaaagatgggaagtttacattttgcataagactagaaaaattttatttgaactcaaatatgcttctttgatatactactttgttttaacactagcacagacactagatatcaaaagaaaccctctgtttatactta

SEQ ID NO: 269360 - DNA, 596 bp, Homo sapiens
tttgtataaaaacattctaattactttcttataccttattttagaacctaatttaaatttaaattttctaaactttatattaggcatgcatcaaaaatatgcatcaatttttctaaaatttaaactagaaaaatgtttaaatttaatttagatttttctaaattttaatttaaattttaaattagaggtttaaattttaaaaaaatagatgcatatgttaggtgcccagtgtaaatttttgcttatttatctgtttttgatgaacaaatactcccacattctcttcagtctgcattgattttctgggctggttgcactgaatttgtagtcagaaagtaattgaaagttgtaatggggtgccatctactggggaaatagaacatagattaaaaaacagaattgataggcgttcccactgcaaaaaagaatgtgatgaakatgatgtaaaagaaaacatgaaaaaagatgggaagtttacattttgcataagactagaaaaattttatttgaactcaaatatgcttctttgatatactactttgttttaacactagcacagacactagatatcaaaagaaaccctctgtttatactta

SEQ ID NO: 269361 - DNA, 503 bp, Homo sapiens
gcaggggagtctctataagactatcagcagacttctcagcagaaattttgcaagccagaaggaagtggggtgatatattcaaaatcctaaaagaaaagaactgtcaacaaaaaatatatacccagcaatcctgtcttttggaaaacaagaggtgataaggactttctcaaacaaaagctgagagagcttaacactactagatctgcattacaaaaaaaatgctaaaggaagttcttcaatctgaaggaagggctgctaattagtatcataaaaacwtatgaaattatacaactcactagtaaaagtaaatacactgtcaaatccaaaacaccctaatactgtaatggtgataggcaaatcaattatgtctctattataagtgtcaaaaggcaaaactactaaaaacaatgcaagcttcaataatttgctaagggatacatattacaaaaagatgtgaagtgtgacatcaaaaacataaaatgtggaagaagggggagtaaaaa

SEQ ID NO: 269362 - DNA, 603 bp, Homo sapiens
ctaataacataaatcaactttcattttaataatgtatagcttaagttttctcacatccaaaacaattagtgttgccaaatttaagattatttctctactttagacatcagaacatgcacaaggacttgaggaataaacaaatccaagaaaacaatcttagcctgataaagtaaaaattttgaataawttcataaatcatttaaaacacaatcttgttaaattagctatttcatagtatgttatgaatgtaaaagcagaacacagaaaaggcattttccaaaaagatataggacttagtaggatttccttttatgttaacaaatggcccatggaagagcagttttcagaatgaccagggcatagtcagacacctctttcattggaagcttcaccaaagggcacacttctcctgaactcagagttttgagtccagacccagctcttgccaaagttcactgggagttttgctaagcttcaagatgatcccacctgaaagctctttggagacaaagttaaggtaagttccccttaatatttccagaaccatatgaacatataagcaaactgtgtaaggctacgtagaaatgattgaattttaatttt

SEQ ID NO: 269363 - DNA, 603 bp, Homo sapiens
ctaataacataaatcaactttcattttaataatgtatagcttaagttttctcacatccaaaacaattagtgttgccaaatttaagattatttctctactttagacatcagaacatgcacaaggacttgaggaataaacaaatccaagaaaacaatcttagcctgataaagtaaaaattttgaataaattcataaatcatttaaaacacaatcttgttaaattagctatttcatagtatgttatgaatgtaaaagcagaacacagaaaaggcattttccaaaaagatataggacttagtaggatttccttttatgttaacaaatggcccatggaagagcagttttcagaatgaccagggcatagtcagacacctctttcattggaagcttcaccaaagggcacacttctcctgaactcagagttttgagtccmgacccagctcttgccaaagttcactgggagttttgctaagcttcaagatgatcccacctgaaagctctttggagacaaagttaaggtaagttccccttaatatttccagaaccatatgaacatataagcaaactgtgtaaggctacgtagaaatgattgaattttaatttt

SEQ ID NO: 269364 - DNA, 598 bp, Homo sapiens
ttatagcgtttcagagctaaaagtggtattagaagttgcctttgaacagtcccattttacatgtgagaaaactaaagtctaagctcttgggtgaagtgactgagccttgatcacccagctgacaagcaccaaagcacttcccgatattatttcctccatattcctctgcagttagccccmaccaactccaccagaaagtatttgtagacttaggtatttcctttaaaagcctcagatgactttacttggggtgtggtggaagggaccacaattttattataatttaccaatagccaggagttttgttccactaaaacatatgtattgactgatctgctgaatcttgctttggggggaaggtgtttttttttgagcccatctgaaaatgttaaatgtttcattactcttagattattaaatgaataactccagggaaaaaatgtatcattgtttcttatgagtattaagacaaagaggcaaaactttccatttgaccacaagagggcagctacaacatttcctgctaggtctttggggttctgaactacgatcaactgggcatttggggactcagcttgccatagactccctaataata

SEQ ID NO: 269365 - DNA, 598 bp, Homo sapiens
ttatagcgtttcagagctaaaagtggtattagaagttgcctttgaacagtcccattttacatgtgagaaaactaaagtctaagctcttgggtgaagtgactgagccttgatcacccagctgacaagcaccaaagcacttcccgatattatttcctccatattcctctgcagttagcccccaccaactccaccagaaagtatttgtagacttaggtatttcctttaaaagcctcagatgactttacttggggtgtggtggaagggaccacaattttattataatttaccaatagccaggagttttgttccactaaaacatatgtattgactgatctgctgaatcttgctttggggggaaggtgtttttttttgagcccatctgaaaatgttaaatgtttcattactcttagattattaaatgaataactccagggaaaaaatgtatcattgtttcttatgagtattaagacaaagaggcaaaactttcmatttgaccacaagagggcagctacaacatttcctgctaggtctttggggttctgaactacgatcaactgggcatttggggactcagcttgccatagactccctaataata

SEQ ID NO: 269366 - DNA, 534 bp, Homo sapiens
tttgctaaattaatgacaaaaagactttacaccagtgtccctcttggtttagagctctgccaggtccttgtcagtacgtcctttaatcccytacctcttcactcctggcagccttccctgatgctggctgaccatcagtagcctacacctgagagcatcagaagtacaagatatcttcctcgattcctactgccacattcatccacctttaggacttctcacttattccattagactctgtaaagccagctgcttttctgatccatgcttgcttgtcatacccagtggataccaccttctatttgccaactgttctctctcagggtctaaaacaggtctatatcctcagggcctgcctcacttggttcctgttccagctcgtggcttagccataccacaggaccctcactgggttaactggaaagatgctgtttagtcttggctaccatggcagaaccctgacagcacacaaagcagtgcaagtaatattcaacttcaaaaaatgttatctttcaaaaatatgcttgcaaatag

SEQ ID NO: 269367 - DNA, 534 bp, Homo sapiens
tttgctaaattaatgacaaaaagactttacaccagtgtccctcttggtttagagctctgccaggtccttgtcagtacgtcctttaatcccctacctcttcactcctggcagccttccctgatgctggctgaccatcagtagcctacacctgagagcatcagaagtacaagatatcttcctcgattcctactgccacattcatccacctttaggacttctcacttattccattagactctgtaaagccagctgcttttctgatccatgcttgcttgtcatacccagtggataccaccttctatttgccaactgttctctctcagggtctaaaacaggtctatatcctcagggcctgcctcacttggttcctgttccagctygtggcttagccataccacaggaccctcactgggttaactggaaagatgctgtttagtcttggctaccatggcagaaccctgacagcacacaaagcagtgcaagtaatattcaacttcaaaaaatgttatctttcaaaaatatgcttgcaaatag

SEQ ID NO: 269368 - DNA, 593 bp, Homo sapiens
cactttgctctctgtctcccaggagactgagggacagtcaaggccactgagtcaccaccttgctgttccctttcagtctctccagatggagtgccaaggctgcaaaggctgcgccgccccatcccgggggtcaggcaggctcacagatggacctttggaagtaatccagatgcagagcaacactgagcccatccatccagagccaagtgtcagtgtctgaatcaatgttcagcaagarctctttaataagcttaatatctagagtcctgtacttcctggctgaaggagctctggcaagttacttaccctccctgattctcattttcctcatctgtgaaatgggaataatcccaaaagctacctcacatgtgtgtgatgattaaatgagttttaccacgtgtaaaaaggctttgtgcacatgttcattaatactgtaaatattagtataatgttttagaggtttattgatcacaagagcaggtgactatatttgcactggaaataacccttttcaaagtgcttttattttgcgaatgattttaaaaggcacttggtgtgagatcagataccttcatttaccactccaaaaatta

SEQ ID NO: 269369 - DNA, 648 bp, Homo sapiens
attaaaatatgaaagacttaattgaagctttaaaagtaaaaagaaagaaatgaagtcaaatgcctctgattattttaagaacaatattttatcatggtgaataactatcggaatcccctcaacacaagtaaacaagctgtcgggggtcatttaatagtttttatatttttacttatcaaaaagacattatgtatagccactctgtaaaaagtctggcaatttcttatagacatacgtgtagcatgtgacccagcaatcccacttctaggtatttacccaagagaatgaaaagttatgttcacaacataactyatacataaatgtttacagcagctctatttgtaattgttaaaaactgaaaataactacgtgtcctccaaagggtgaatggataaacaaactgtggtatatccatataacagagtatcacctagcaataaaaaggaacagattattgagacatggagcaacttagatgaatctcaaaggcattttgctgagtgaaaagttacatgacaaaagttatgtgacattcttgacaagacaaaactatagtgacagaggacagaccagtggtttgctagtgcttaaagtaggagagggactgtaaagtagtaataatgttaggcaattttgggggtgctagaa

SEQ ID NO: 269370 - DNA, 545 bp, Homo sapiens
agtcctatcatcaggcaggtaacaatgtgttatagatgaggcagcaaggtctggaaaagagaagtgactaacctgaggcttctaggtgagggagtaggaagtagaccttttcattactctgtgctgtgcttccactgaaaaatggaagagagccagggtcagaagaggggagagttggaggaatagacaaaaacatraaaaatggaagtggctactacttccttttctagcagtaaagacatttatacaaacatacctactattataatatatgcatggtatagtagatatacagctatgcaagccttcccactccctagctgctcactacaaaaattcatcaacaactacctagaatcaggaaagtctgagaaaaactccgtatcagatacacctggtccagttttaactcttgcttatttttaagaaatttaaaaaattatggaaaagaataaagatgaaactataataatctcaatttccattactcaaaatgaaccattatcaatatactggtatatttgcttccagtctttttaaaaata

SEQ ID NO: 269371 - DNA, 559 bp, Homo sapiens
tatttgcttccagtctttttaaaaataaaaatagcttattattatgtttataaaattataattttatacatttcaaaataaagtgtattaaatttgattttacttgaacttgtagaagcaaggctaaaggtattattaaatttcaaattcatattgctttgtatcaaaaaatattttttgtaaaagtactttttaacgttaagagaacatgataaacattggtgttggaatcaagacttttaaagggctgtattttaattttcaacattttaaatttacttcctgctatgaaagaaaaaaggccatggcctttttttccacatcttcacattttctctatcatcacctccaacttttgtaagttttattatttttttacattgtttgggtttataatattgaattttgttctgtaattactgttttcwtatgctaaataggcaatatttaagtggattgaaccactggttttttaaaagacacataccttctctgttttaattttgattaaaatgaattggcaagtttttgtcatctgttttgttcagacaagctcatg

SEQ ID NO: 269372 - DNA, 560 bp, Homo sapiens
atgtttctgccatgactaaaatctttcaacagcttctcagcaaaaatagagtttaaaataagattcaaacttcatatgatgggctacaaagctctgcctgatctggccccagcctccttttcaaccccactctctgcctccttgcttctcctccctaacccagctcattaggccctagtcaccccacttgtctctcagtgcctcagcatctcattctgagctctttctcacctgagaagctcttgcttgatgtagatgaccttctctctagcagtcatcacctcagcctcttgtttgttttctccattacatctatttacacctcacattatactggaattactttattcatttgcttgcrtacctgcttcttgtctacctttgcccactagtatgtaatgactatgagtccagagactgtctttgtaattctgcctttatcagcagcacatagagggaacccagtaaatgtttgtcaaatgaaggaaggaaggaagagaagaaaggaaggaaggaaggactagtgtgaaggaggcaagactgtggcatacagacacact

SEQ ID NO: 269373 - DNA, 548 bp, Homo sapiens
attaaataggtattgctattggaataaggattatttcccacttgtagcactaaaataaatgttactataagaaaaagtgctacaaagtaattactattaaaaaataccatagtagctgggcatggtggcttactcctgtaatcctaggactttagaaggccaaggcaggaggattgcttgagcccagaagtttgagaccagaccagcctgggaaacatagcaagactcatctctaaaaacataataataaccaggaatggtggtgcatgcctatagtcccagctacttgggaggctgaggtgggaggattgcttaagcccaggagttagaggtgtcagtgagctatgatcatgccactgcactccagcctcggcaacagagtgagaccctgtttctaaaaaatartaataataacatgttaaattctactttcaatgagtctaaattcacatatatttccagagttttctggttggaaggtcaaggtggcttgactagtaggttcattatacttcactcactaattcatttattgaaaatttattgaa

SEQ ID NO: 269374 - DNA, 253 bp, Homo sapiens
tgcctgccatacccaactctgtttcattctctagacatttacgtagctagctcttactttgtctccacactttttaagaaacaccttctccaactgccctatttaaaatatcccctccaatccatcactttctatccccttatctggctttttcttcatagtatctatcactacttgacatttggttacatatttgtttgtttgragttttttattgtctgtcatttctaccagaatagaggtacctaagagc

SEQ ID NO: 269375 - DNA, 639 bp, Homo sapiens
tcactgcagacttccccatttttttgtttgagacggagtcttgctctgtcgcccaggctggagtgatcttggcttactgcaagctccgcctcctgggttcacgccattctcmtgcctcagcttcccgagtagctgggactacaggcgcccgccaccatgcccggctaattttttgtatttttagtagagacggggtttcaccgtgttagccaggatggtctcggtctcctgacctcgtgatccacccgcctcggtctcccaaagtgctgggattacaggcgtgagccaccgcgcccagcccagacttcccttttctaacaatcagttttggacccttgtctccaggtcttagttttcctgggcatgcttgtgagatttgctttcgcccacgcaccatctgtagtaggggatgtccctgcactctaccactctgacagaggagtaaccctttccagaggaggagggagtcagttgcctagtgtgatggaaatttcccagctcctaaaatctgggcagtggatctcaaatttcagagtacctaagaatcacctggggcctttgttaaactttagattgtcagctcctgctgacccctaattctgattcagtaggtctaagagcccaggattgaattctaat

SEQ ID NO: 269376 - DNA, 567 bp, Homo sapiens
ggctcccatgtcctgctgaataaccatacatggaagaaaatttggttttgggtttgattttattttaatcattaatttgttgtctgattaaaaaataagtscatgtccatttatttgtgaaaagtactagagtgtattgttatgagcaaggtatttggagattgagtttgaacccagaactcataagctgtgtgactttgcacaagtcatttactatttcctcttctgtaaaatggagaaaaataatcatagctacccccaagtgattgttctgaggatttaatgagagaacttacttaatgtccttagtgcctgaatgcagtaagcacttagattttagctattattatcataactgttatagtctcaccaacctagatgatctattaatgctttcatatattctcttttttaattatgcatttatgttttaaaataggcagtatcatattaggcatatgcaattttgtgtcctacttcttttcaattaatactatatcctgtgtgtggagcttctaatggaacacaggtaagagcattggcttaggaataagcagacctcagtta

SEQ ID NO: 269377 - DNA, 528 bp, Homo sapiens
ttaaatgttctcttgtgccttgccccagctcttggccaagttgccgctgaataaacttacagatcactggaccttgggtcatgaastttcttttagcttttctttttttccttggctcactgcaacctctgcctcctgggttcaagcgattctcatgcctcaccctaccgagtagctgggattaccagcgcatgccaccatgcccagctagtttttgcattttttagtagagatggggttcaccatgttggccaggctggtctcgaactcctgaccttaggtgatccacccacctcagcctcccaaagtgttgggattacaggcgtcagccaccgtgcccaatcttctctaagctttttcctcacacattttctgtgattcctgagagtaagatgaaagtacgtcagtcagagacatggtatgaacacagctccccagggattggtgctggaacaatgccctacccaccacccagtggtgcttctacctaaggatttatcaggactcttcctgcaaggagttggtagt

SEQ ID NO: 269378 - DNA, 528 bp, Homo sapiens
ttaaatgttctcttgtgccttgccccagctcttggccaagttgccgctgaataaacttacagatcactggaccttgggtcatgaactttcttttagcttttctttttttccttggctcactgcaacctctgcctcctgggttcaagcgattctcatgcctcaccctaccgagtagctgggattaccagcgcatgccaccatgcccagctagtttttgcattttttagtagagatggggttcaccatgttggccaggctggtctcgaactcctgaccttaggtgatccacccacctcagcctcccaaagtgttgggattacaggcrtcagccaccgtgcccaatcttctctaagctttttcctcacacattttctgtgattcctgagagtaagatgaaagtacgtcagtcagagacatggtatgaacacagctccccagggattggtgctggaacaatgccctacccaccacccagtggtgcttctacctaaggatttatcaggactcttcctgcaaggagttggtagt

SEQ ID NO: 269379 - DNA, 567 bp, Homo sapiens
cagaaactaaaaatttccatagcataaatcatgcctttttcagcttgtgacagccactgtctcaaactcaattagtcattgtgcacaaggaaagccgagatcatcacagattcacacatgcttaatggataaagcatgactggggagagatttcctctgtttaatttctgctgttcgtgttcattggtagatcacatggctattaaaataaatagrgcagtggaagtttcttttgggcagggttaagcagatgttctttatttaaaaagattgaatgcattttatcctagagagaaaatttgggaggcagaggaaatgaaagaggcatcagagggtataaagagtgtttatttagaaagcttgtctcattgcttgaatgcagacccttcccattgggatacctatctctgaacctcagaatgtgagcaccagaacaaagccagacctctggaggaccaaagggctgactcagatgcttctggggaaaatgctgagcaagagacgaggattgtttttactgatactagaaaactggaattgcctggacttctttcgcaatttcttaca

SEQ ID NO: 269380 - DNA, 580 bp, Homo sapiens
atgtttaaattcctatagcttatgaatgaaatcataattatctttttaatcttttgatctagtaagaaaacacacacaaacaaaagcccaaactgataatacagcattcagaattcaaataaggaaagtagtatagagatcaaaccacagcaggacagaatggcttggtatggttctaagggagtagtaaatagcatgagtcacattttatttctcagtggagtgtctttgatttagaaagtgtgacttcctatgcttaagaaaatgctagaagagaattacaataatttatgccaggcaagatacagaaaatttcgatatggtagatattgctggctgttcaccaatacatgtttcctctttttcctggacccagagctagactacatttctaagcctgtcttgcagttaggtatgggcgtgtgacttcattctaaccaatgaactgtgagtgatagctccaggcaaggcccacaaaacttcctatatgggctcctccwcactctctccccttctgcctagtgaatggagatgatgataagatatctaggagagcagggagccacaagatggaaagatt

SEQ ID NO: 269381 - DNA, 495 bp, Homo sapiens
tctaggagagcagggagccacaagatggaaagattatcaactgaatcaccatgtaaaagacaactccctgctgataaagaagacgtctgtctcaaactattagagagtgagaaacaaattttattgtgtttgagtccatctctgtgtctttctctccatgtatacatgtacatattctactagaatatatatattctagtagaatatgcatgtatgaatagacacataatagaatrtatatatatgtacatttcgtagaatagtggaatatacatatatatgctgttagtttcagtattagtctatactaatatatctggtatatacaagaataataattttcttgtatcttaatttattgggaaatagaaagtaaaatagttaggaaaaaaaaccttataggttgggctgtacccatgtgcatttttataaggcaaactctgcaggtttcactgggagtcccttacttaatgctttataaatacaaattttagc

SEQ ID NO: 269382 - DNA, 570 bp, Homo sapiens
actgtactccagtctgggtgacagagtgagactctgtctccaaagaaaaggaaaaaaagagacatttaataagagccaactaggcactgagctagctgatggagaaataggtatgaattagacaattagacatactccatggcttcaaagagaggttccatttgacaagtcagaagtgaatggtaatttgcaagacagtttctaccttacttgggacaagtgatccctttcttaggattttgcctacacatctgctaaactaaatatcaaatttmcttgtactgagaagctgcataagccatagctttggaatcagaaactcgagttcaaattcttgatttcaacacatacagctctgttttgaacaacctctgtgtaggtacattacttatcccccaatctgcctcaggttcctcatctgaaaatgtgtacaataagataatctaatattattatgagtaaataacttagcaagtgctatatttatggtaggtaatcaaaaataatagtgcttgaaggaagaaggaatataagcaattttagagcattgtgcaaataactgagaaaatt

SEQ ID NO: 269383 - DNA, 597 bp, Homo sapiens
catttttacttggataataatgtgcattaaaagtatgatattgattgtttaccttaaatgccctaatagcagcaaattattcatttctgaccttctgtgattatttcccactgcaggaccaacccaggacaaaagttaatacatctcattttcttatttctactcaggtgtgtcaaactaacagtagcaagaaagaccacaggatagagaggagactgtctttatttttgacccttcattttctscaacagtcaggagttgacatattttggattaaaaagaagaaaaaattaagcaatcatgcaaatcaattaccaatatattcacaaaagatccaaagtatatagaatatttgctttcttattcctaggattcatatagactaaaaaggatctgtatataaacagtaaatattctatcatcaatgcaccatttgcagaactgcagagtatcaaataactggatagctaggaagttaaggtgctgtgaagtattacagctactgtttttctaactgctgaaagcaccaagacaatacaaagttttgtttagaaacagtttttcccttgctaccttgtgaatcaaaggaaactctta

SEQ ID NO: 269384 - DNA, 571 bp, Homo sapiens
tggatttaaataataaatttagatctagttttatagtataagactaaaacaaataaagaaattctgtggttatgaaagatttgcctccaattcaagattgtccttaaccaaaactattattttataggcaccagggccaaagcatatacatatatatgtatttcacacctcccaactgcttggtacaatgaaggaaagctagcagcagcaaatgaaaaaactgatcctaggctctacaggagtcactgtacttggaaaaggagagcagggatgtctgctgtaggcacagaccatgggcatgaatggctcagaagctggtggaactagttgtagtctgggccatgcactaataatcaaggtaggtactatgaaactcaatcctcccacctcctctactgaaagatgatatattacctatgactacagcatacaaaccttaacctccctagattgaagcaactccaatgtgaatacaattaacagggaaccsacggtagggtatgctgagcaatgcaattcaaatgccaaatgtggagaacaaagatggtcctgataattctgctaaagtagt

SEQ ID NO: 269385 - DNA, 449 bp, Homo sapiens
agtattctgtaaaaggatttttcttggtttgaattttgatcagggcttcttaaaatgtaacttttttttaatcacacataaaaggtaagaaattaagcagggcaaaatttaattacagaacaattcctacctgtattgttaaagatttattgctgaaaaatcctagttaaagaaaactaagggggaggagaaggggggaaagatgattaakcactttaaaatactggcatcactagagactttttctatttattattgccagtggagttaacgctgaccaggaagaattactctacattgcaggggccaggttctctgtgccctgaataattaattatccagggctagatgtattgaagcagggttcaaattcccacacattgggatcagttctatcaagataatactgataaagggatgaatttgtaatggatattgttgttgattta

SEQ ID NO: 269386 - DNA, 569 bp, Homo sapiens
atttatttcttcctttaagtctaataatatttgttttacatattggagtgctccagtgttagaaatatatatatatatatatttacaattgttatattctcttgctgaattgatctttttgtcattatatgatgacattataaaatgacaatcttggtctctttctacagtttttgatatacagtctattttatctaatttmtagctactcctgttctttttggcttctgtttgcatggaatagcattttccattttttcactttcagtctacgtatatctttacaggtgaaggaagacttgtaggcagcatatagtttggtgttattctttcatacattcagccactctatatcttttaactgatgaatgtattccatttacattcaagtttattattgacaaataaagacttactcttgccactcagctaattgcctcctagtaattttgtggatcttttgttcctctctttcttgtttacctttgtggtttggtggttatctgtagttataagctttgattgttttctttttctcatttgtatgactgctgtaatttttcctttgt

SEQ ID NO: 269387 - DNA, 594 bp, Homo sapiens
ctaagtggcctaatgttcaggagtttgtgtggctacttgagcacagcctcatcactcaggacaggggcaccaagctgttctgtgagctgagggtgccccagggctgctccttcaccaggttgggcatgtygttctcactggacaagaccacctgttccatgggggggcagtgtgccttgagggcttaaacaccaaggttacagctgctccactgggcctaggctctgagtagccaggtttgggcacctcagccactgggatgaagacggagtgtcttataggtggttttttccaagtgggtagggagctgtaactgcttggctggggaatggcacactaccatttgtgagcgcagtatagttggcagatcctcaggggcagggagatgtggcggctacttgcctccagagcaggacatactctcgcagtgtctccagtctcaaaacggcaccatatagcagcagcctgggcagagaagcaaaatatgggttccttctttggagtaatgcagccatgtgaactcctggaaactccctatactgggctcagagcttggaaggactgtagggttctccagcagcaaatactgtaggt

SEQ ID NO: 269388 - DNA, 545 bp, Homo sapiens
aagtttatattagcatttttcatttggaaagctcaagctattgccaaagttcaaaagacatgaagctccagaaatatttagtatcttgtctatcagattacaataatatcttgagacaatactatataatgatactctagcttaagtaaaaacaaactaaactaaaaacttcattataggcagttataatattgataattggagctgattctattaaggggcaaccctcctccccagtcaacacaaaatgcatgttkcttgttagaagactgtgttgactatattttcttattttctgtattcctgatgctctggcatctggggtctctctaactgggcagagactgccctctctccctaaggacagccaattcatagagattagcaaatgactaaccttggagcacagctttcacttgcaaattcaccaatccaaagcccacaactcccccacacctcttctatttggctcttaaactccaggccaatattcccctatcctaatcactgcaaggccagttaccaaacaactcaggacagcctcc

SEQ ID NO: 269389 - DNA, 539 bp, Homo sapiens
agacctagaactgggatgaccccttagaattgttccaagttgggcaaggagcatttctaccccccttcctccctacctccccacatagctcagccactggatgcaggctgcccacacaaagtgaattgtgaccttgggcgaggctttccaaagagcaattcccagagagggctgacagctgaaggatttcagtcagcagaattcccagccactgggagaaaaagagatttagtgctgcgtgggcaggacagattctggcaggccagtctagcatctactcttcaaacagcccattttaagccacactaattgtttmtttgtacggaacttaactgtttactaatgcttttatacaacctacccctcaattcagacaacaaccctgcgaaatgtgaatattgttgcctctaattaatagatgacagatgagtgttgccagttgtaaggtgtcccagggaaactctcaaaggtagtggaaagactttgaaagtccacggatatagaagttttggattctcacaattatggggtaggtgaac

SEQ ID NO: 269390 - DNA, 503 bp, Homo sapiens
gaagaaactaccctgcacatattgaaacagcactgtctcaaccacccgctgatggagcaaagcataggaacaagaaagtgaacattgggaaagaattaaccagtaaacatttaaacaagaggtgtggtctaatcatgggacgaatcagaaccgtattggacttcctatcactcatctgtactacttagtactgtttttattttaactaattaattaatacttttttggagatagcgttttgctctgtcgcccaggctggagtgcagtggagcgatctcagctcactgcagcctcgacctcctgggatcaagtgattcttccacctcagctccctagtaactgggattacgggggtcaccaccacacccggcttttttgggtagtttttgtaaagacgaggtctcgctatgttgcctaggccggtctggaactcccagsctcaagcaatccacctgcctctgccccctaaagttctgggattacaggtgtgagccactgcgcct

SEQ ID NO: 269391 - DNA, 451 bp, Homo sapiens
gagtcatccttttttgtcttgattgggccagaattctgctgagatgtcctccagtttttaacatcacttccacccagtgatcctcctattccccaggaacattgggtaacgtctggagacatgtttggttacctcaaatgggaagtgcttttggtatccagtgggtagaggccaaggatgctgctaagcatcctacacaatgcagaggacagtcaccacagaaaagaattatcctgtccaaaatgtcaacagtgctgaggctgagaaatcctcttcatcatctgcccttcttatagcttgttaattattttctaagttcctattttaatattatctactgtaaatgtatcatcctagcacctcaaagagatacggtatacactattcactgtttgagtttgaratgaaattgaagccttaagaatgtcttcagaccaggcgtggtggccca

SEQ ID NO: 269392 - DNA, 581 bp, Homo sapiens
ccttcagcctgcccaccccaaatcaaaatcagaccatcacacrtctctgggaggcagctatcacaaatcaggctgagcaaacaggcagggcaccatttagaagataaagtctgggtcttccacttcaaagtcactaagaaaacacgtagtgttttccttggtgcaaagacttttaatggcttaaaaatgtcatccagaattcccccatccatttagctaaggcaggtgtatttctcccattctttctctcctagaaaattgcctttctcaactctttgttacccaaggatttagtgttctactttgcagattattcagaccctgtcttctcttttctctcttatttttcccatgcacaaggaatggaggaaaatactcattcattttgcttcttacccagcagagtagagactgtacctctgtgcgtttctgttatctgagtctttccttggaataaatccttgactctcagctgtgctaagtctgagggattcttgcatattcttgcttcttcgagtcatttatccaacccactcaaatctgcccccaccgagggtgttatcagtccaagaacacctgca

SEQ ID NO: 269393 - DNA, 648 bp, Homo sapiens
atgcactcatatgttcatcacagcactgtttacaatagcaaagacatggtatcaacctagatgctcatcaatggtggactggataaagaaaatgtggggcatgtacaccatggaatatgatgcagccataaaaaagtatgagatcatgtcctttgtggcagcatcgatacagctggaggccattttcccaagtgaattaaggtgggaacaaaaaacgaattaccacatgttctcacttgtaagtgggaggtaaacactgggtactcaacggatgtaaagatggcaacaagagacatgggggctactagaggggaaggagggaaggaagcaaggtttgaaaatctaactattgggtactatgctcagtacctgggtgacaggaggaatcataccccaaacctcagcatcacgtactacacccaggtaacctgcacatgtaccccctgaatctaaaataaaagttgaaattataagaaaaagtcaacttctaataaaatagaagctatggaataaaggtcttaggtaagaattaagttttcagataatcattactgcttgtattattaacttgcatttatagagctctttayactttttaagagcataaaatgcactggtgcttccggaaatctggaaagacagcagatg

SEQ ID NO: 269394 - DNA, 544 bp, Homo sapiens
cgtctggcttcctgaggcaacgtgggtttggctgggctccccctctgcacagatggaataagcagctgcttacctggtaggagctgagtacctggagagtcctccaggkccctcaaatctctttcctcccaccttgcaaatctttatatcaatccagctcgtgagctaaaggaagcctttccaaactatcctctctggattatgcaaaaaaacgattgggtgggaaattaggtttgggaatttctacggcacttctcaaaaacaggcttcagtgcagtaggaattttcagaaagaagatagaaaatgcattgttttccatactttggaaacagaaccccttctctacccagccccaccctgactcataaacatgttttgagaaatagtggtttaccaacattgattcctgttaaaatccaaacatatctgcttataatttctgtctcagttattgtaactcggctgtgttcagccaaactggagcctaaggcaaaagaaaaaaaaaaaatcagtgaaacagatcctgtctttatttacaaattg

SEQ ID NO: 269395 - DNA, 544 bp, Homo sapiens
cgtctggcttcctgaggcaacgtgggtttggctgggctccccctctgcacagatggaataagcagctgcttacctggtaggagctgagtacctggagagtcctccagggccctcaaatctctttcctcccaccttgcaaatctttatatcaatccagctcgtgagctaaaggaagcctttccaaactatcctctctggattatgcaaawaaacgattgggtgggaaattaggtttgggaatttctacggcacttctcaaaaacaggcttcagtgcagtaggaattttcagaaagaagatagaaaatgcattgttttccatactttggaaacagaaccccttctctacccagccccaccctgactcataaacatgttttgagaaatagtggtttaccaacattgattcctgttaaaatccaaacatatctgcttataatttctgtctcagttattgtaactcggctgtgttcagccaaactggagcctaaggcaaaagaaaaaaaaaaaatcagtgaaacagatcctgtctttatttacaaattg

SEQ ID NO: 269396 - DNA, 562 bp, Homo sapiens
ttggtggggttttttatatacaagaagatcatgcatgtgaattatttcaaaaggtagcagccaaagataaaaatctcccaaactgaacatttctcttttaaggttaccatctgttctcttatccatagctacagaaatgatgaagcaataaatatgttgatgtcagcaacacaaaagcatttctagcttccaccaataaaataaaaagagagaaaaaaagaatagaggaggaaaattttaaggaaataagttattccatgttcactctttttaaaattattagtttccgtagcaccttataaaggtgataaaagagcccagaattttaatccccagatgtgcctgaacgttctgataacagctttgtgaagatacaatgtacaaaccataaaactcaccatttcaaagtgtacaattcatggactcttaatacattcrgaattgtgaatcatcactatctaattttcatcccctccccaaaagaaaccccaggagcattggcagttatttcccatatccctctgcccccaggctctaacaaccactaatctattttctgtct

SEQ ID NO: 269397 - DNA, 624 bp, Homo sapiens
tggattcttttttcttccatggtcagtaacttatgttattgaataagtctgtagtgtttaatctggcatgaagtgtgatctttctgtgggcagcatttttcctcagaacagatctgaaaaaacagatagctgcactggcttgtcagcctcagatctgggctttggcctctcccaatgtgtttagaactgggagtgtacagtcccttctccttggaaaacacaattcatcccttatgcttacacggagtgactcaggctggcacagccaccatttataccactgcaatgcagaagccttgcagaagygctttaactttgccagcccctaaacatgcctctaaagcagcttgcagcctgcgtaatcatagcattagaagtagaaataataacaacatcaagaacaactgacattattgagtgtttatatggactggatgtttttctaagtactttccataaactaaactcactcagtcctcacaacaaccctatgaggtaggcatggttgttattcccattttacagatggtgtacatgaggcactgagaggctgaatagcccaaggccacattgcttggaagtagaaaagcagaatttaaacttgggcattctagctacagagct

SEQ ID NO: 269398 - DNA, 536 bp, Homo sapiens
tgaaaaaacagatagctgcactggcttgtcagcctcagatctgggctttggcctctcccaatgtgtttagaactgggagtgtacagtcccttctccttggaaaacacaattcatcccttatgcttacacggagtgactcaggctggcacagccaccatttataccactgcaatgcagaagccttgcagaagcgctttaactttgccagcccctaaacatgcctctaaagcagcttgcagcctgcgtaatcatagcwttagaagtagaaataataacaacatcaagaacaactgacattattgagtgtttatatggactggatgtttttctaagtactttccataaactaaactcactcagtcctcacaacaaccctatgaggtaggcatggttgttattcccattttacagatggtgtacatgaggcactgagaggctgaatagcccaaggccacattgcttggaagtagaaaagcagaatttaaacttgggcattctagctacagagcttgtgcccttaaacactgtgctatggc

SEQ ID NO: 269399 - DNA, 624 bp, Homo sapiens
tggattcttttttcttccatggtcagtaacttatgttattgaataagtctgtagtgtttaatctggcatgaagtgtgatctttctgtgggcagcatttttcctcagaacagatctgaaaaaacagatagctgcactggcttgtcagcctcagatctgggctttggcctctcccaatgtgtttagaactgggagtgtacagtcccttctccttggaaaacacaattcatcccttatgcttacacggagtgactcaggctggcacagccaccatttataccactgcaatgcagaagccttgcagaagcgctttaactttgccagcccctaaacatgcctctaaagcagcttgcagcctgcgtaatcatagcattagaagtagaaataataacaacatcaagaacaactgacattattgagtgtttatatggactggatgtttttctaagtactttcyataaactaaactcactcagtcctcacaacaaccctatgaggtaggcatggttgttattcccattttacagatggtgtacatgaggcactgagaggctgaatagcccaaggccacattgcttggaagtagaaaagcagaatttaaacttgggcattctagctacagagct

SEQ ID NO: 269400 - DNA, 536 bp, Homo sapiens
tgaaaaaacagatagctgcactggcttgtcagcctcagatctgggctttggcctctcccaatgtgtttagaactgggagtgtacagtcccttctccttggaaaacacaattcatcccttatgcttacacggagtgactcaggctggcacagccaccatttataccactgcaatgcagaagccttgcagaagcgctttaactttgccagcccctaaacatgcctctaaagcagcttgcagcctgcgtaatcatagcattagaagtagaaataataacaacatcaagaacaactgacattattgagtgtttatatggactggatgtttttctaagtactttccataaactaaactcactcagtcctcacaacaaccctatgaggtaggcatggttgttattcccattttacagatggtrtacatgaggcactgagaggctgaatagcccaaggccacattgcttggaagtagaaaagcagaatttaaacttgggcattctagctacagagcttgtgcccttaaacactgtgctatggc

SEQ ID NO: 269401 - DNA, 581 bp, Homo sapiens
tctgtttgccaatgctaaagagaagcatgcgagcacagctgtgaatgccagaagtcagaggtggcagtccaagatgatgtgccaaggtcagaggtaggaaagacaaggcagacaagcagagatggtccaggggctggtgcctgggcaagagacaccaagggcagagtgggggacsaaggcattagttgcaaattagaggtcagggctcaagccacacactgggaccaggtatatagtagagctggaattggaactggctgccttaggcagaggccacaccacaggacaactggagactgtgagctggtccctggtgaaggatgctggtgtggaatgatgaggctgggaacatgaccattccttgaggatcagccacattctgtaaggggtggctgttcatagagagctgggtcccataggaaggacctctaggtaaggatgggagtgagggaaggggaaacaacgtttctgtttatttttttgattcacttagcaaatatgacatgagcgcctaccctgtgagttatagcagaatagtatgagagcatgggctgtagaccagtatgccagagctggaaact

SEQ ID NO: 269402 - DNA, 581 bp, Homo sapiens
tctgtttgccaatgctaaagagaagcatgcgagcacagctgtgaatgccagaagtcagaggtggcagtccaagatgatgtgccaaggtcagaggtaggaaagacaaggcagacaagcagagatggtccaggggctggtgcctgggcaagagacaccaagggcagagtgggggaccaaggcattagttgcaaattagaggtcagggctcaagycacacactgggaccaggtatatagtagagctggaattggaactggctgccttaggcagaggccacaccacaggacaactggagactgtgagctggtccctggtgaaggatgctggtgtggaatgatgaggctgggaacatgaccattccttgaggatcagccacattctgtaaggggtggctgttcatagagagctgggtcccataggaaggacctctaggtaaggatgggagtgagggaaggggaaacaacgtttctgtttatttttttgattcacttagcaaatatgacatgagcgcctaccctgtgagttatagcagaatagtatgagagcatgggctgtagaccagtatgccagagctggaaact

SEQ ID NO: 269403 - DNA, 581 bp, Homo sapiens
tctgtttgccaatgctaaagagaagcatgcgagcacagctgtgaatgccagaagtcagaggtggcagtccaagatgatgtgccaaggtcagaggtaggaaagacaaggcagacaagcagagatggtccaggggctggtgcctgggcaagagacaccaagggcagagtgggggaccaaggcattagttgcaaattagaggtcagggctcaagccacacactgggaccaggtatatagtagagctggaattggaactggctgccttaggcagaggccacaccacaggacaactggagactgtgagctggtccctggtgaaggatgctggtgtggaatgatgaggctgggaacatgaccattccttgaggatcagccacattctgtaaggggtggctgktcatagagagctgggtcccataggaaggacctctaggtaaggatgggagtgagggaaggggaaacaacgtttctgtttatttttttgattcacttagcaaatatgacatgagcgcctaccctgtgagttatagcagaatagtatgagagcatgggctgtagaccagtatgccagagctggaaact

SEQ ID NO: 269404 - DNA, 581 bp, Homo sapiens
tctgtttgccaatgctaaagagaagcatgcgagcacagctgtgaatgccagaagtcagaggtggcagtccaagatgatgtgccaaggtcagaggtaggaaagacaaggcagacaagcagagatggtccaggggctggtgcctgggcaagagacaccaagggcagagtgggggaccaaggcattagttgcaaattagaggtcagggctcaagccacacactgggaccaggtatatagtagagctggaattggaactggctgccttaggcagaggccacaccacaggacaactggagactgtgagctggtccctggtgaaggatgctggtgtggaatgatgaggctgggaacatgaccattccttgaggatcagccacattctgtaaggggtggctgttcatagagagctgggtcccataggaaggacctctaggtaaggatgggagtgagggaaggggaaasaacgtttctgtttatttttttgattcacttagcaaatatgacatgagcgcctaccctgtgagttatagcagaatagtatgagagcatgggctgtagaccagtatgccagagctggaaact

SEQ ID NO: 269405 - DNA, 540 bp, Homo sapiens
tagaacagtgtctaacaccctctaagtgctcattgaatactggttggtattagtatttgtaggtgccacctatgcaaggtgctgggaatgcaatgctgagctgaattggacatgggccttgccctcttgtacctcacagtctagtgaagttgatasacagtaaccatccaattgtatgatataagtaagtgtgaggctaggaggccttacaaagagggatgtggctgagtcaaaggacatcctgaaaaagtgatgcttcagggataggggaagggtcattctaggcagcaggagcagcatgtgtaaaggccctgtggtaggaatgtatgaagagttgtcagaaggtcctatggctgggtgagcacttagagtaataagacttggaaggaaagcaagggccagatggtgcagagccatttagggctatattaatggtgtaggcctttctaataagggcaacggaaaacccttaaaatgtcaggccctgcagtgagggaggtgacatgatccaatttgcattttgaaaagatggcttcagct

SEQ ID NO: 269406 - DNA, 540 bp, Homo sapiens
tagaacagtgtctaacaccctctaagtgctcattgaatactggttggtattagtatttgtaggtgccacctatgcaaggtgctgggaatgcaatgctgagctgaattggacatgggccttgccctcttgtacctcacagtctagtgaagttgatacacagtaaccatccaattgtatgatataagtaagtgtgaggctaggaggccttacaaagagggatgtggctgagtcaaaggacatcctgaaaaagtgatgcttcagggatargggaagggtcattctaggcagcaggagcagcatgtgtaaaggccctgtggtaggaatgtatgaagagttgtcagaaggtcctatggctgggtgagcacttagagtaataagacttggaaggaaagcaagggccagatggtgcagagccatttagggctatattaatggtgtaggcctttctaataagggcaacggaaaacccttaaaatgtcaggccctgcagtgagggaggtgacatgatccaatttgcattttgaaaagatggcttcagct

SEQ ID NO: 269407 - DNA, 540 bp, Homo sapiens
tagaacagtgtctaacaccctctaagtgctcattgaatactggttggtattagtatttgtaggtgccacctatgcaaggtgctgggaatgcaatgctgagctgaattggacatgggccttgccctcttgtacctcacagtctagtgaagttgatacacagtaaccatccaattgtatgatataagtaagtgtgaggctaggaggccttacaaagagggatgtggctgagtcaaaggacatcctgaaaaagtgatgcttcagggataggggaagggtcattctaggcagcaggagcagcatgtgtaaaggccctgtggtaggaatgtatgaagagttgtcagaaggtcctatggctgggtgagcacttagagtaataagacttggaaggaaagcaagggccagatggtgcrgagccatttagggctatattaatggtgtaggcctttctaataagggcaacggaaaacccttaaaatgtcaggccctgcagtgagggaggtgacatgatccaatttgcattttgaaaagatggcttcagct

SEQ ID NO: 269408 - DNA, 596 bp, Homo sapiens
atggttacaaatgccacacagataagctaaagatagaatgcaaatgaagaaatgcaggccacaaactattcactatgtttataaccaagttagagaaaaatagtgaactaatacgtagggaagaaacttgaaaattcatgaaaatatgaacactggtcaagtggtgagatttgggctatattttcactatttctatctttttccagaatttttcttttctgtgttttccttactctccatattttaaaaactaaatggcttgagttttaaagccatytccaagtggataagagctttctcatttccctttgtgagattaacaaactcaaaagttccaagagaaatgaaatgttcacacattcttaaaaaaaatcactctataaaatcttgcaccagtctggggaacccatcacgacacaccacgccccaaccccaccactgctggcctccaccctggacgaattttccagtgttgccttttcagtaacaaagagaataaaatcagcaatcttttctccctgtcagcagccatggttactgactgtgggtatagatgactgctcacgcccaaggaggttataaataagacttttgaa

SEQ ID NO: 269409 - DNA, 411 bp, Homo sapiens
ccatcacgacacaccacgccccaaccccaccactgctggcctccaccctggacgaattttccagtgttgccttttcagtaacaaagagaataaaatcagcaatcttttctccctgtcagcagccatggttrctgactgtgggtatagatgactgctcacgcccaaggaggttataaataagacttttgaacagttatcaaaaaccaggacactggaaaaggttctccgggcccagaaaatgtcagggagaccacaacattgtagcaggggtatatcgcctgctctgggctgagctctcttccaactgcccactgattccctgttgtcccaccttgctctgacattgtcctcggcttcccacatgccaggaaagcaaagcagaaaaagaaacgagggatggattctcctggg

SEQ ID NO: 269410 - DNA, 572 bp, Homo sapiens
  misc_feature (1)...(572): n = A,T,C or G
tgcaccagtctggggaacccatcacgacacaccacgccccaaccccaccactgctggcctccaccctggacgaattttccagtgttgccttttcagtaacaaagagaataaaatcagcaatcttttctccctgtcagcagccatggttactgactgtgggtatagatgactgctcacgcccaaggaggttataaataagacttttgaacagttatcaaaaaccaggacactggaaaaggttctccgggcccagaaaatgtcagggagaccacaacattgtagcaggggtatatcgcctgctctgggctgagctctcttccaactgcccactgattccctgttgtcccaccttgctctgacattgtcctcggcttcccacatgccaggaaagcaaagcagaaaaagaaacgagggayggattctcctgggactttcactctgctggttttcatctggcccctggtctgtgagctaggggtgatgttcagagtcatgaaatgccaacaacagggcacagcttncttggggatctatgggaccagtcagaaggtgctccttangatgtactaacc

SEQ ID NO: 269411 - DNA, 572 bp, Homo sapiens
  misc_feature (1)...(572): n = A,T,C or G
tgcaccagtctggggaacccatcacgacacaccacgccccaaccccaccactgctggcctccaccctggacgaattttccagtgttgccttttcagtaacaaagagaataaaatcagcaatcttttctccctgtcagcagccatggttactgactgtgggtatagatgactgctcacgcccaaggaggttataaataagacttttgaacagttatcaaaaaccaggacactggaaaaggttctccgggcccagaaaatgtcagggagaccacaacattgtagcaggggtatatcgcctgctctgggctgagctctcttccaactgcccactgattccctgttgtcccaccttgctctgacattgtcctcggcttcccacatgccaggaaagcaaagcagaaaaagaaacgagggatrgattctcctgggactttcactctgctggttttcatctggcccctggtctgtgagctaggggtgatgttcagagtcatgaaatgccaacaacagggcacagcttncttggggatctatgggaccagtcagaaggtgctccttangatgtactaacc

SEQ ID NO: 269412 - DNA, 570 bp, Homo sapiens
cctcattttttttttttttttccatctgaaacatggggatgaggatatctactctttgttcttggacaaatgggaacacagatgtggatgtatttgaggaggatagaaagtaaaacccactgcatggacaagctacaactcagagcctcattttgtttgtctagcagtgttgaaatagatttcatatttttaaaaatccacatttttaacttctctggaaaaactggaagatctgacaggatggggcttgtattagactggcagcctggtgtgattaagagcaaggttctgaaatcatatgcacaggttcaaatccctgctctaccactctgaaagctgagtgactttgggtgagtccctcaacctctccatttctgtttcttcaactctgaaatgagaatcataacaatattcctccctcacagtgttatgacaatgtaattargcaagctaatatttatgacgtgctcagaacaatgtttgacacattgcaagagctatataaaggttaggtggatacataaatatcccagcacatggcaacaagcagctggagctgagcagtggccg

SEQ ID NO: 269413 - DNA, 460 bp, Homo sapiens
actccttacactagcaactaaccatgtttaaaaaaaccttagccagtattacaaaaacaaaacatwtagagtagtgttcatgaatacaagcataataggttccttgccttctacaaaaataatcatctttgaaatgctaaaagcaggtttcaactggggttcctctctgtgatgagaaggtgcagatacacatggggtgatccactgatttaccttctcaaagtattctttggaaacagtttgatttgacttgattgtaggagactctagtgtccagtttgctgggcagacttctccatgggttttttttacaaactggaatgcctttaccaagcagagggtgtcttccacgttttagcccactgggaggtcactgacactcaaatgcttgataaattcatggggtcaattatgaagactcctcttagtgcaaaccaggaccttctaacagcacaccata

SEQ ID NO: 269414 - DNA, 518 bp, Homo sapiens
ttttttttttttttttttttaakggttctagaggcatggtctacctttgtttcccaggccagtctcgaactcctgggctcaagcaatcatcctcccttagcctcccaaagtgctgggattgcaggtatgagctactgcacccagaccatccagggttttgagcagagcagtgacacaccctggtttatattccaatggagttgttattgctgctgaatagagactcgactgcagaggcacaaaggtgaaagccgggtccagaagtagccacagcaatagctcaggcgagcacttagtcatagctagactggtcctgcaggggtggtggaaaatgactggattctggatatgttttgaaccgacatccaacaagaatcactgttgaattagacatcaagtgtgaacaaaagaaaggagtctttgaaagagtcttctttgaaaatactgcaaatgagcttttatttctgattttgatcctaatcctaggggagttcaacatgatggagacattgtttagg

SEQ ID NO: 269415 - DNA, 518 bp, Homo sapiens
ttttttttttttttttttttaaggkttctagaggcatggtctacctttgtttcccaggccagtctcgaactcctgggctcaagcaatcatcctcccttagcctcccaaagtgctgggattgcaggtatgagctactgcacccagaccatccagggttttgagcagagcagtgacacaccctggtttatattccaatggagttgttattgctgctgaatagagactcgactgcagaggcacaaaggtgaaagccgggtccagaagtagccacagcaatagctcaggcgagcacttagtcatagctagactggtcctgcaggggtggtggaaaatgactggattctggatatgttttgaaccgacatccaacaagaatcactgttgaattagacatcaagtgtgaacaaaagaaaggagtctttgaaagagtcttctttgaaaatactgcaaatgagcttttatttctgattttgatcctaatcctaggggagttcaacatgatggagacattgtttagg

SEQ ID NO: 269416 - DNA, 318 bp, Homo sapiens
tgtagcatattcccaataacacagattctgccaggaaaactgttggcacagagaatacaggtaggggcatatggtctgaaaaagaacttgcccaggattcatcatctttgctccttccaagcaaacttggtttttgtcctatgcatgtggygtgtgctaattttcatcctatgacctttgggtgtgctcttctccctaactggatgacttcccttcattctctcagccttccctgtcctcctacttctctgattaactgcactccaccctcatttctctcttgctgtctctgccctcattttgtatctctctattagt

SEQ ID NO: 269417 - DNA, 595 bp, Homo sapiens
gctcacgcctataatcctagcactttgggaggctgaggcaggtggatcacgaagtccagagttcgaggccagactggccaatatggtgaaacccgtctctactaaaaatataaaaaaaattagccgggcatgktggtgcttgcctgtagtcccagctacttgggaggctgaagcagaagaatcacttgaacctgggaggcggaggtagcagtgagctgagatcgtgccactgcactccagctaggatgacagagtgagactccatctcaaaaaaaaaaaaattatcacaggagcatgaaccctattgtgaactgtgcatgtgagggatctaggtagcacgctgggtatgagaacctaactaatgcctgatgatctgaggtggaagagtttcatcctgaagccatcctctctacccactccacccctgtctgtggagaagtcttccgtgaaactggtctctggtggccaaaaaggttgaggatgctgtcctagaccactcagtcccggccaaagggtcccagacaaaccacacagcagacccactggttcatgggaaataagtgtttgttgtcttcagccactaagttttgggagt

SEQ ID NO: 269418 - DNA, 566 bp, Homo sapiens
atcgtgaccctggcacacagctaataaatgagggggttttcaaccagttactttgtactgggtcmttcttaagaaccagggaattgagagccttgtgttcactcataaggtaatggaacttaactgagccactggaaatagtgatacttgtcatttattcaatttaccccacacatgaatacctcccaacagtggaaagagtcagctgtgctcactaaaaaggtggtgaagtggtcacgtgcacaagtatgtgtgtgcagtcaggaatgtggagaccagggtagggacgtgtgaaaaatgctggatgtgggctcagcatggccctgccctgccccagagcctccacataggaatgccagtgtcatgaatcttaaattccatcccagctgcatgggcaacatcagccccacccagatggagtgggaaggggcgtgggatgagcttgctgaaggggcggccatctttctagtcccgcctcagtgtcatggtagccaggcagatgtctgtgaacacttgtggaaaagtgggatccaaatatgaagagctgctgcctccctgcctgtggc

SEQ ID NO: 269419 - DNA, 551 bp, Homo sapiens
tgtatacatgtagagaggaagggtccctacacaaagctagaaccagttttcaactggttcaggcaaccaggaatttcatttggttttacagtgaattagtttttgccaaagcatttttgcccaatgtgttatctcaaaaggaacatagtgctatgtcttttactgagtccacaatatatacatttatcttctctctggtaatatcattgtgccacaacagtaccaaaaggagggcattatttctaaagtgtagctgtaaagtcaagattcaggactatattgyagttcactccagggttgaaggataaattgacttcctacataaaaattaaactttagttgtgaagacacaggtgataagctacttggattctcttcaccaaaaaggaaaataaggctgggcatagtggctcacacctgcaatcccagcactttgggagaccgagattggaggattgcttgagctcaggagtttgagactagcctgggcaacagggcaagatgctgtgtctaccaagtttaaaaattagctgggtatggtggcacacatc

SEQ ID NO: 269420 - DNA, 603 bp, Homo sapiens
ttctattttcttcactcaattgctacatcagtacagtgtgcccacaccaacttaggacttcattttgaatcttttttgtttcccaaatatactcattcattcaacaaatatatttcaagaaccaaaaaatccatttaaaatgtggaaactggtctagaggctgaggatatggctgtaaacaaaatgtataggctttcatgaggcctccatttgtgggaggggaaaggagacaagaaataaacatagtatcagctctccagcaaaaaagtgtttcacacagagagaaaacaagagtgagttccattaaaaatgtggaaactagtctagaggctgaggatacagccgtaaacaaaatgtataggctttcatgaggcctccatttgggggaggggaaaggagacaagaaataaacatagtatcagctctccagcaaaaaagtgtttcccacagagagaaaacaagaatgagttcagcatgtttaaagaatagaaagaaggatggtacatacttgtggggaaaggggagtagtrcaagataaaaatgatatcaacaaaattttgtattatttttacattatttcccccacaaatcttgcactattgc

SEQ ID NO: 269421 - DNA, 603 bp, Homo sapiens
ttctattttcttcactcaattgctacatcagtacagtgtgcccacaccaacttaggacttcattttgaatcttttttgtttcccaaatatactcattcattcaacaaatatatttcaagaaccaaaaaatccatttaaaatgtggaaactggtctagaggctgaggatatggctgtaaacaaaatgtataggctttcatgaggcctccatttgtgggaggggaaaggagacaagaaataaacatagtatcagctctccagcaaaaaagtgtttcacacagagagaaaacaagagtgagttccattaaaaatgtggaaactagtctagaggctgaggatacagccgtaaacaaaatgtataggctttcatgaggcctccatttgggggaggggaaaggagacaagaaataaacatagtatcagctctccagcaaaaaagtgtttcccacagagagaaaacaagaatgagttcagcatgtttaaagaatagaaagaaggatggtacatacttgtggggaaaggggagtagtgcaagataaaaatgatatcaacaaaattttgtattatttttayattatttcccccacaaatcttgcactattgc

SEQ ID NO: 269422 - DNA, 567 bp, Homo sapiens
tctcgagttcctgagctcagatgatccacccaccccagcctcccaaagtgctgggattacacaggcatgagtcactgcgcctggtccatcattctgattttcatttggcaatggtaccccctccccatccctaaaactgacaagcagttcattaataaatcaaaatgtacatgcatgaaactagcctcattttaagggaaatctgctacaaatccttcctacaattttttttaaygtggataacttttcttcaccttttttaagtaggctacacatgcagtggattgcatacggccacagtacctagtagactgagacacaatttgagtgcggggtgtggccctgacattgtttcatacaagcagagctttctggccacaggcaggtttgaagcccgtctgccctcattagcataaggtgctacactaaccttccccactgttaaatgaatctaaaaagttcgctctcctgtggctctctgcattgtcaccaggacaggatttaattcaagactcaaattgagtcttaaactccattttttaccggcgtctgggttaagggatgtga

SEQ ID NO: 269423 - DNA, 589 bp, Homo sapiens
atcaataaaaaattaaaatgttaacttttgtattctgcatttcattatatatataaatatattaaaagattcttaattgaagaaattgaactgtgtacagggagattgcatctcattcaagaagaggygtcagcccttctctttatatgtgttcaatacagaaattgaattcgacataaaattttctatatgtgttcagtgtagaaacatgcagaaatatgttcaatgcttatgtgactaaacaaatattattgattatggtcacttagcatctacctatttcggtaaagtaattgcaaaaaaaaaaaagaggaaaagagaaatgaatcagataaaagaaaagaaaacaaaaacttcaaataaatttagccatactcatctactttgattcactatctcatcttaagaaaaagaagcaatggatggcagcttacttgatagatcatagatagatagatagatagatagatagatagatagatagatacatagatacatagatagatacatagatagatctatatgttaataattcacacataatttccttttgtgtttgagatgttttatttaaagttgttagaaaccc

SEQ ID NO: 269424 - DNA, 569 bp, Homo sapiens
tatttggaagtgcttgtctttgttcacaagaataactgaaaaagagagtatagtcaatcagcaggagcctcaaattcaatagaactaacagctttaagtatatttcctactgatgatagatctgttatttcattttataggacagcattatgtcactgttattatcatcattattgtaacaataaaatgaatttgctataaatctacatataagtaatatgcctggagaagcyttttctgcactttgattatagggtactttattaccatgtttattgaaaactagtgtaatgatactttccaactaaaattttccgactctttcatctttaagcagatttaagaatcaaatgtgcttatgaaaagatttttcttcatccttttgaaacaatgtcttattaaaaacttaaaaaatccttttggtagtatatcctattttcttttataaaaataagaccataagccttgggtccatctaaatttaagcattttgttgattctctaaattgaaaaatagaatgtgaaaaatagacaatgtgaataaatttctccaaaaattttaagattgg

SEQ ID NO: 269425 - DNA, 500 bp, Homo sapiens
tagctatggaagtgattgaagtagatagattatgcatatgttttcaagataatgtcagcaggttgaacaattatatgtgggtgagagataaagaggaaagtcagagatgatggaagatgactcagagtttttgccaaagcagctggaacataagaagagagattggaaaaattatgagaaaaggtttggaatgggaaagggaattaggaatcagtttttgatgcgttaaattgagatgtcaattagacaactaagttaagatacacatttttggtgtctggagtttgggagaagggtccaagttggagacgctaatatagaagtcatcatttataaaaaggtacttaaatctctaattcagcccaaattgctaaaggtrtgagatagacttaatacacagagaagaggttcaaggactgagtcttggtacacttctcagtgttcagatgctgggaagacaagaagagagctaatgaaagatactgagagagtggctatta

SEQ ID NO: 269426 - DNA, 607 bp, Homo sapiens
gggtttttgtggggggttcaataaattaatgttaagttattagaataatctgtggcacataataagtgaaaaataagtgtaacttaaaagtgtgactataattaataacattaccgtgagccacagctaagccaagttttcacctgcaggtgtatgccctaggccagttggcttcacattgtgttttagggatccctgggattgggtggagatggctcaggctccccagagatagaggtctcttagctgtggacagcctggtgggtaaaactcatcagaaaagacacccccatcctcyagccagagccttggcatttttatccattcaatgtattggaattctagataagttctcatttaaagaatgggttctaagctcacaacaaatggaaaactgtggctccagatatttgtgacctgtgcaagttccccagctcattttagtggccctgtgagcacctgtccctgctgcttgccaggagttcctcatggaactgtgaccatgaggcccagggaagtttctcttacttctaaatcttggggactcgcatggctacaactttgatttcctggcattgccaaaggctaagcgtgcttctaaggggtg

SEQ ID NO: 269427 - DNA, 595 bp, Homo sapiens
cccagttttggccaaagtgatgaaaatgagatttactgggcagaatttacaaaaacttttttttttttaaagaacaattcatctggcatgctcttttgccctttaatcttggtctttacctttttccatcttcttgtctgggaccyggacttagcatttggaagtatagcagccattttgcaatgttaagaactgtaaactaaggataattaaattgtaagattaaaggaatttggacttttgatgacattgcagattcaccccactagtcttagactgcctaactctaatcttctgtgacatgggactagtaaactcctttccatttaagccactcttttttgggttttgttgcttgcagctataaacaatcctgactgatacacccttcataatcaattgagaggctcatagtaaatttgtctgggattttccctgtccaaacatacaactccaataactcctatttcactctccacctatattagtcaggattctccagagaaatagaaaaaaatatatatatgaacatttttaattttatgttgtttaaaaaatacatatttttaaggaattgactcatgcaattatggaa

SEQ ID NO: 269428 - DNA, 495 bp, Homo sapiens
gattatatattcctcccacccccttccccagaagtctctttcgttgatggrcactgacatctttacccttagcccagcccttcttgtgaatggccacagtattcctttccttgccctacttcctcagtggggcatctttgtccatgtacttggacatttaatattactcttccttctggaaatgcagagtctattctgtcctttcacttctgggacagcctctcttctttactttgctcaagatcaatgactcatttcttgaatgctttcctatatgtttctcctctaccaggcagccaccagccttccaggaagctaagcagtattgaaaggaagttgaagaagaggaacccagagtctccttccaatatctggaaggtcaggatctttctaacaggatgcatgggaagtacaccaggctataactctattatttagagcttgttgtgtacttagtaaattgtggataattcatttcactgtattggctcaacc

SEQ ID NO: 269429 - DNA, 549 bp, Homo sapiens
gctactacaaaggaggtcccccctcaactcttttttgcaataaaaattgtggggcccagagtgtgcagagaagatatacaccagcatccctcccctggagtggaacatccctaccctggagtggaataacaggcttattcctagtcagatgccctatgcatctatcacttatggagcatatgacgaagtagggcaggacaaatcctgttactgtttcttaaaccactctcacatctccatatcagcaaggtgtccgagtctactcaggtaatggtgttttgactgagggggcctcagtttgtgccctgagaatctaagaggaatggagaacttgkcctagcctgttgggctgactgcccttacttgctaactgacaagggaatgggagcaacatagcagaatatttatcctggcttccacatataaaggctggtgtccagggccaattgttggcaaaagagagtagtgggaagatgtttcccccatctaagattctcagcacccttattctaatcccttgtcctctttatcccacaccaagttccccaa

SEQ ID NO: 269430 - DNA, 503 bp, Homo sapiens
aatggcctgtctcctcttatccaaatgattccaacctgcttcccaggcctttggccaacttccccgaaccctgtctcagcagcttctggctcattgctcgctgacacggccacctctgctcctgccaaggaaatctgctggcctttgcttcccctccccacctccatctcactcagttcctcctcaggccacaggcatgcctgagtggcaaatggcagcaaagaggaaggtgaaaaaggmaggaagaacgggaggaagggagcccgagagaaaacattcagaggagggagtttatgtacattatccaaatggatgtcaggtccctgtcgacaaagtttttaattgtgtgtgggtatgtctgtgtgttgtgtgggtatgtagggtgtgtgtggtagtttatggggagagggaataaaaggaatagtacaaatatattccactattattcaaactagggggaaaaagctataaagataatgagcttgtgacacaggaggcaaaca

SEQ ID NO: 269431 - DNA, 369 bp, Homo sapiens
agggatgggtttttgaacacggaagtaccatggtgagaaaaagagttaggaaggtttcttttgtagctctatagaggatggattgattggattgggaagggagacaggaagctcagctcagaggctcttgcaataatgtaaataaataaattatgagtcagctgggatggggatagaaacagaaattcaggaaaattcaaacaccactaaattgcatggcagtataatctccacttctgaaaaattacagtattkcccaaatattccagatctgcttctacgtgatagttctattggcaaacctcagaaagtcgggtttataaaaccatgatggtaactagattaaagaatcaattaaaaatttgtgga

SEQ ID NO: 269432 - DNA, 575 bp, Homo sapiens
caacattaacacaatcataagaaactatcagcattaacttctgtgcaagaaaaaaagtcacattttgggaactaaaaacccaattaccattattaaacactgaagagcaatataactgraatggagatgaatcatcatagctatcatttattagttccaaccacataacagttctgtgataagctctgcatttgtgagtttgttcatttgtttgtttttgaaggtcagagataatataactaaagtatcttgcctcttaagtatatgttaaactgaactgacaatctttttaaatctaaaaatattacttcacataccaatcacagttcctttgctcacaggtaacagaaaatcggtctaactgtttaaatcataataacagcaacaacagtaataacataaagattttgtggttcaagtaatttaagaaacccagaaatggaaggaggtgtactacttacttggatctcccttcaaaaaagaacaaactatccatgtgtgcaggatgccggtaactgacagccgccagccagtgggcattaagggtcctctacagtgttgagttggaacaacag

SEQ ID NO: 269433 - DNA, 575 bp, Homo sapiens
caacattaacacaatcataagaaactatcagcattaacttctgtgcaagaaaaaaagtcacattttgggaactaaaaacccaattaccattattaaacactgaagagcaatataactggaatggagatgaatcatcatagctatcatttattagttccaaccacataacagttctgtgataagctctgcatttgtgagtttgttcatttgtttgtttttgaaggtcagagataatataactaaagtatcttgcctcttaagtatatgttaaactgaactgacaatctttttaaatctaaaaatattacttcacataccaatcacagttcctttgctcacaggtaacagaaaatcggtctaactgtttaaatcataataacagcaacaacagtaataayataaagattttgtggttcaagtaatttaagaaacccagaaatggaaggaggtgtactacttacttggatctcccttcaaaaaagaacaaactatccatgtgtgcaggatgccggtaactgacagccgccagccagtgggcattaagggtcctctacagtgttgagttggaacaacag

SEQ ID NO: 269434 - DNA, 575 bp, Homo sapiens
caacattaacacaatcataagaaactatcagcattaacttctgtgcaagaaaaaaagtcacattttgggaactaaaaacccaattaccattattaaacactgaagagcaatataactggaatggagatgaatcatcatagctatcatttattagttccaaccacataacagttctgtgataagctctgcatttgtgagtttgttcatttgtttgtttttgaaggtcagagataatataactaaagtatcttgcctcttaagtatatgttaaactgaactgacaatctttttaaatctaaaaatattacttcacataccaatcacagttcctttgctcacaggtaacagaaaatcggtctaactgtttaaatcataataacagcaacaacagtaataacataaagattttgtggttcaagtaatttaagaaacccagaaatggaaggaggtgtactacttacttggatctcccttcaaaaaagaacaaactatccaygtgtgcaggatgccggtaactgacagccgccagccagtgggcattaagggtcctctacagtgttgagttggaacaacag

SEQ ID NO: 269435 - DNA, 613 bp, Homo sapiens
ggtatacaaagaagcaaagataaagaattatcacaattatacctatcatatgtattctttttttttaacctacagaaactcaaaagtgagcaaaatgcaaaattgagtcttcatcttyttttattctcaaaattaataaaaactggagaaaaaaactaaatggtgactaggtgagcaagtgcaactgaactgatgttaaggtgttaaaacgtgagtcaatgtttccttggtttaagcaaatttaagagagttcagcgggccacagactcactgatgcgaaggtacccaaattctgtcatacatgtgaacttcatgcattatggcctctttacataagggaaaattattttaaactgaatattaaaaataccaaaaggtaaaatggatgtttaaagcgctgtttactcccagaattaaatgtcctctaatatttaactccagcttaggcattcagcaaaacaatacttggaaatattttttatttaatcaggtatataaatatcatgtaaaggaaatattactttgatgtgccatgtgctacactaagaactatttttacataatcacattcaaccaatggcatttgataaactataatattttcagttcctat

SEQ ID NO: 269436 - DNA, 537 bp, Homo sapiens
ctctgttcttgttgtctgtctaatatttgtaaaatcagttcttccaacaggataatgttagctcaacattttgagatgattgcttaatgcccatggatctaagaagacagaactcaatgacaaactccaggcaaaactgcccaaagaaagtttttttccttccttatggcctctttgttgctcaattgtgtctagggtccttgactttgactgcatcaccttccccacaatgtgagaccagagaccactggaacaggtccatcctgacactgagggrcaactagcctaacttcaagatagttgatcaatgatgctttcagaaaaagatcttgaccaagaggaggagatgtgaaaatggataatatatgttgcagttatctcgtcataaccaattaaattacagtcaagaccacagggaaaaaacagttggggcacaagagcctactcagggattatatcgcaatccagttgctgaaatgacctcctataaccttaagactaaatttacctagtagcagcttaagtgaactgctgtga

SEQ ID NO: 269437 - DNA, 602 bp, Homo sapiens
ctgggtgaggcgacaccctgccctgctttagcttgccctccgggggctgcacccgctgtccaaccagtcccaatgaggagtaccaggtaccttagttggaaatgcagaaatcacccatcttctatgtcaatctcactgggagctgtagaccagagctgtttctattcagccatcttcaaccacttaactatatttaaagagctaaaggaaaccatggaaaaacaactraaggaaaccaggagaacaatatctcacctaatagaaaatatcaataaagagacaagaattatgaaaagtaatcaatcagaaattctagagttaaaaagtaaaataactaaaataaaaattcagtgatagatctaagcaggcagaagaaagggtcagcaaacttgaagataggataattaagattatttagtttgaggagtagaaagaaaaaagaatgaagaacaattaacagagcctaagatgtctgtgggacagcatcaaacatactcaagacacataatgggaatcctagaaggacaggaaagaaaggagcagaaagaatatttgaagaaataattgcctaaaactctcccaatttgatgaaagacataaat

SEQ ID NO: 269438 - DNA, 602 bp, Homo sapiens
ctgggtgaggcgacaccctgccctgctttagcttgccctccgggggctgcacccgctgtccaaccagtcccaatgaggagtaccaggtaccttagttggaaatgcagaaatcacccatcttctatgtcaatctcactgggagctgtagaccagagctgtttctattcagccatcttcaaccacttaactatatttaaagagctaaaggaaaccatggaaaaacaactaaaggaaaccaggagaacaatatctcacctaatagaaaatatcaataaagagacaagaattatgaaaagtaatcaatcagaaattctagagttaaaaagtaaaataactaaaataaaaattcagtgatagmtctaagcaggcagaagaaagggtcagcaaacttgaagataggataattaagattatttagtttgaggagtagaaagaaaaaagaatgaagaacaattaacagagcctaagatgtctgtgggacagcatcaaacatactcaagacacataatgggaatcctagaaggacaggaaagaaaggagcagaaagaatatttgaagaaataattgcctaaaactctcccaatttgatgaaagacataaat

SEQ ID NO: 269439 - DNA, 586 bp, Homo sapiens
tttccttttctccacactgttgccagcacttgttagcttttgtcattttggtaatagccattctaacaggtgtaacgtggtatctcattgtggtcttgatttgcatttttctgatgattactgacattgagcttttttgtcatatacctattggccatttgtgtctcttcttttgagaaatgggtccttaatccatttttaaatcaagttatttggtttttgctctgcagtgttttatgtcttaagcttggtaaatacacaggtgttcattttgaatgcctgaaagtactcactgacaagaggttttataggaagcrtaaaaaaattctatctcctaactatttgctgtcacctgtagagtcagtccccatttagtctctctccctgtccactgagtcagtagctttgtcaggctcccctgatggtcagagattaaacatctgctaatacacacatacagtgcaaataaattgcatagaaaaattgcagatcttggggaaaaaatgtaagatttcatgaagtcaatgaaagtgatgctggagagctgcagaatgcccctccaatgcccctgatgcctgatgcgggg

SEQ ID NO: 269440 - DNA, 604 bp, Homo sapiens
tacttttcacctttgcagtttcctttgtggttcctgtgctcgtgtatgtatatatatatatttagagtattgcaatttttctgtttcttagtttcttttacttaacagagtacagctgttttccaacatggctatatactttaaataattgtcattttgagtgggcatagactccttgtaatgttcatgttccacatttacckaaatgcttaggtttccaggctttttgttatttgtataatgtgcattgtaataggcaactttatgcacctggcttcttatttctgttgtatttagttaacttcacaggggagggatcattggagcagaggtctcagtatatatatatagctcttcttctgaaatcacacttaatttggattctctctacaccagcagggttgatgggttttattccttctttaccattactggctattgttagttcttttcatttctaccaagttagaaggtcctgaaagttgtcttaatttcaacttctggatcactagcagaggtgattacttttgtgttttatcatccattgtggaatctctatagtctttgtccacttaggaggtcaaatttgccattttctttttga

SEQ ID NO: 269441 - DNA, 563 bp, Homo sapiens
gagggttggggaggagaggcactgcagaggggaactgtaaagatttcctctaattgctctgccggtgcattgcaaaatcttcttccaagatctaggtgttttgtaacaatgcggcactttacagtatgtgacccaccgtactactagaacaagaaatccatgttacatttttggctaataaaattaaaagtaaacagttgaaagaagaatctctctctctcccactccagagtccctcgcaaacatgtccgccattggggtgaactcgccttaccagctgatctaccactcttccacagcctgtctgagcttttctctctctgctggaaaagaagccaagaagaaaataggtaaaaatggttcctcgtggcctaccattcattggtggtggcggtggggtgggggataggtttccgtctaccctgtgtaggttggtgggatggtttgatttggtcttctgattagaaggatacatagcggctctgcctggagatccagcagctgtccacacagatttgctcatggaaaggttgtyacagtccagccctatcactgcatagcac

SEQ ID NO: 269442 - DNA, 625 bp, Homo sapiens
ggtggttaatgactgtaatcctagtactccagaagaccaaggcaggaaaatcatttgcagcctgtagttcaagaccaaaatagtgaaagcccatctctagaaatataaaatcaactgagcaacatagtgaaagcccatctctagaaatataaaaagataaaaagaaaaastgtcataaatatatgatatatcataaaatgtcaccataggacacacacatacacacacacacacacaaatcaaattgtagaaagcatctatttccacctcacagttcaaaaacaataaaaaatatggcagcctcacagaaaaaataatctattagtttttctctcttcctataccccagctgtaggcattgccatccccaaacttctggcattattgttgccatactattattagctgtccctgctatcagtcctgaagatgcttatagttcattttctcattactttgttacttttattgctactacacttctgtcacctagttagtcactaggttgccagaagtaatttctggacccaattttcggacaagaaccagtactagaaatggatacaccatatagagcttttataattgcaataatttacctgtaattagatttgtttgcttcata

SEQ ID NO: 269443 - DNA, 549 bp, Homo sapiens
gaaaaactgctgtatgcctctagcattctttattttaccttcacagttactcaaaacttatttgttgaatgaaagcttaattttcctttttatgcaagatttggtgtgtggcagaaggcagtagcctggaggtggcggcatacatagacattgaggggctggtgaaacagtgtcccagtcaccagggaggcacaggaagagaggcatgaaaactgctctgcccctgactgtatgggaaaccccaagagcatcatctcgctgtccatgaccactggatttgtaagatccaagggggcctgactcttcctttgttcttagtctcttatatctcatgcatctcatacgcctgacatggggacatagaagaatgctattaataacattgctattaatacaaacattctctaaatgcaaaatggaattaagtrattcctcttttaacctctgaaatactttaatatgatttaagaaatactttaatttgaaagatgaatctcttttgataaaagacatgttcatataaaaagaagacaggcgactggataatta

SEQ ID NO: 269444 - DNA, 609 bp, Homo sapiens
gcacagtcaatggatgtgggtaaatgtttgtttctgaatccttgctggaacccaagtcacctctcctctcatggaagtcctctgccatatccacgytgaccaataacattctaaagtaggcttcaagatcagtctccttggctctgcagtgctattactcctgcaggaaatgcatctggcatttgttactctcacagtaacatcctttcttccattcacagttgaggccctaactcttcccattttagttatggtaaggccaggttatgctgcaggaacaaactcaaaattacaatggcttcaaatagtagttgtgtatttgtcactcacaccatgtgtccattttggatagatagttctactccatgttaccttcactcaaggaccaagactgatggagtcacctccatttagaaaatcactggcccttgaattaaggggaagaacaatggagaattgcccacttgcactggtatctttctactgaatctcaaacacatcatttccactcacaactcattgactaaagcagtcctcttggcctcacctaatccaaatggagtagatgaaaatgcaaacataccatgtgtctagaagaaggagaatggg

SEQ ID NO: 269445 - DNA, 176 bp, Homo sapiens
ttccattccattagatgattccattcgggtccattcgatgattctcttcgattccattcgataattccgtttttttccgtttgatgttgattccaytcgattccattcgatgataattccattcgattctatgcgatgattccattccattccatttgaagttgattccattcgag

SEQ ID NO: 269446 - DNA, 180 bp, Homo sapiens
ttccattccattagatgattccattcgggtccgttcgatgattctcttcgattcmattcgataattccgtttttttccgtttgatgttgataccattcgattccattcgaagataattccattcgattctatgcgatgattccattccattccatttgaagatgattccattcgagacca

SEQ ID NO: 269447 - DNA, 180 bp, Homo sapiens
ttccattccattagatgattccattcgggtccgttcgatgattctcttcgattcaattcgataattccgtttttttccgtttgatgttgatwccattcgattccattcgaagataattccattcgattctatgcgatgattccattccattccatttgaagatgattccattcgagacca

SEQ ID NO: 269448 - DNA, 180 bp, Homo sapiens
ttccattccattagatgattccattcgggtccgttcgatgattctcttcgattcaattcgataattccgtttttttccgtttgatgttgataccattcgattccattcgawgataattccattcgattctatgcgatgattccattccattccatttgaagatgattccattcgagacca

SEQ ID NO: 269449 - DNA, 456 bp, Homo sapiens
cattcgagtccatggattattccattccattccatcagatgattcccttcgggtccattcgatgattctcttcgattccattcgataattccgtttttttccgtttgrtgttgattccattcgattccattcgatgataattccattcgattctatgcgatgattccattccattccatttgaagatgattccattcgagaccattcgatgattgcattcaattcattcgatgacgattccattcaattctgttcaatgattccatcagattccatttgatgatgattccattcgattccatttgatgatgattccatgcgattccattagatgatgacccctttcatttccattcaatgaggattccattcggctccatttgatgatgattctttgaattccatttgatgacaattccattcaataccaattgatgatggttatttttgattcca

SEQ ID NO: 269450 - DNA, 456 bp, Homo sapiens
cattcgagtccatggattattccattccattccatcagatgattcccttcgggtccattcgatgattctcttcgattccattcgataattccgtttttttccgtttgatgttgattccattcgattccattcgatgataattccattcgattctatgcgatgattccattccattccatttgaagatgattccattcgagaccattcgatgattgcattcaattcattcgatgacgattccattcaattctgttcaatgattccatcagattccatttgatgatgattccattcgattccatttgatgatgattccatgcgattccattagatgatgacccctttcatttccattcaatgaggattccattcggytccatttgatgatgattctttgaattccatttgatgacaattccattcaataccaattgatgatggttatttttgattcca

SEQ ID NO: 269451 - DNA, 583 bp, Homo sapiens
atggctttttcaaggtattttttggttctccagacatttcactactaaaaaccactcagatcatacaatgattaggcaagaaatattaggaaagaacattaagtcaatctcttgcatattttaaatctattctttaagtattggcaatgtatttaaaagtttttaaaagactgtgtcggcaccactgagccaaaataaacatgtctgttagctcaattcagtttggaaattagcagtttgcaacctctgccttaaatgccaggaagaaataatggatgaaaataaaagaattatgttttttgaatttttctgcatttaaaaawttttgaaaaacactggccaaatatttttaaagctagcccagaagctagtccagaaatgtgctttccttttataatcttttaggcagatccataaactgttagaattaacagattgttccctcggttaagcatgcagagcctgtctgttatggtcactgaatcagcctatcagctggtggcaggcatggtttgtgtgaatgatcctagcaggacagtgcttctgtgcatattgtacatattgtccctgtggtacattgcag

SEQ ID NO: 269452 - DNA, 658 bp, Homo sapiens
cagaaatatgctaacaacaaatgcaagttacacatgtaactttaaattttctagcagccaaattttttttttttttttttttttttttttttttttttgagacggagctctctctgtctcccaggccggagtgcagtggcgtgatctcggctcactgcaacctctgcctcccaggttcaggtgattcttctacctcagcctcccgagtagctgggactacaggcgcgtgccaccatgcccggctatttttttgtatttttagtagagacggggtttcaccatgttagccaggatggtctygatctcctgacctcatgatccgcccagctcggcctcccaaagtgctgggattacaggcgtgagccacccgcctagccctctagctgccacatttttaaaaagaaacaaatgaagttaattttactaatatacattatgtactgcaatatcaaaaattatttcaacaattaatataaaactattgaaatatttttacatagtaatttcatagttagtcttcaaaatttgatgttaactttcacacttccaacacatctcagtttgaatgagccacatttcaagtgctcaatagctacatgtggctagtggctactgtagtggacagaacagccctggatcaaagagatgtgagaattac

SEQ ID NO: 269453 - DNA, 578 bp, Homo sapiens
  misc_feature (1)...(578): n = A,T,C or G
ctttctctgttcctcagcgtgcgatgtggtttcactaccactctctgctttcacnaaagcagataaggtatcaacccatttaaaaagtgaanaataatctgtctgctttgccggtagtgaatgcttacagaacacacactgatacaatagattttaaataatttatgtccggcactttttttttttttttcaatctgtaaatgaggacacctaatgcggaatggtcggcatgatactctatccttcccccattaagataacaagatgagaggcaatgattcagatcagtatatttttggagctttgagcggataaaaattaaaaattaaaagagatgatgttctgaaatactttgggtaagcaagctcataaaagccatttggaaacctgaaattacacattaattcagaatctccttctgaggggctcctaaaacacctttctgttttcttggcaggatgaaagcattacttttgtgtcactgcctggtgytttcacggggtctattctaatgctcactaaggcgtcatgctctgttctaatgtgcctcttgtagccatctttggtttgaaccaact

SEQ ID NO: 269454 - DNA, 578 bp, Homo sapiens
  misc_feature (1)...(578): n = A,T,C or G
ctttctctgttcctcagcgtgcgatgtggtttcactaccactctctgctttcacnaaagcagataaggtatcaacccatttaaaaagtgaanaataatctgtctgctttgccggtagtgaatgcttacagaacacacactgatacaatagattttaaataatttatgtccggcactttttttttttttttcaatctgtaaatgaggacacctaatgcggaatggtcggcatgatactctatccttcccccattaagataacaagatgagaggcaatgattcagatcagtatatttttggagctttgagcggataaaaattaaaaattaaaagagatgatgttctgaaatactttgggtaagcaagctcataaaagccatttggaaacctgaaattacacattaattcagaatctccttctgaggggctcctaaaacacctttctgttttcttggcaggatgaaagcattacttttgtgtcactgcctggtgctttcacrgggtctattctaatgctcactaaggcgtcatgctctgttctaatgtgcctcttgtagccatctttggtttgaaccaact

SEQ ID NO: 269455 - DNA, 547 bp, Homo sapiens
aggaaacttcacagcattaaatgyccacatcaaaaaagtctgaaagagcacaaatagacaatctaagctcacattttaaggaactagagaaacaagaacaaaccaaacccaaacccagcagaagaaaagaaataacaaagatcagagcagaactgaatgaaattgaaacaaacaaacaaaaacaatacaaaagataaatgaaacaaaaagctggtttttggaaagataaagctggttttttgaaaagataaacaaaaccaatacaccattagtgagattaaccaataaaagaagagagatcacccaaataagctcagttagaaatgaaatgggagatattacaaacaatactacaaaaatataaaagatcattcaaggctactatgaacatctttatgcacataagctagaaaatctagaggagatggataattcccggaaatatacgacccttctagattaaatcaggaagaaatagaaactctgaacagaccaataacgagtagtgagattaaaacagtaataaaaaaaaattgccaacaaaaaa

SEQ ID NO: 269456 - DNA, 539 bp, Homo sapiens
atggtccaggacatggagtatctttgtgaacatcacatttaagctggagaagaatgtgcagtctgccgtttttggatggagtattttagaaatttgtcaatgagatcaagttgattgattgagcatgccattcagggcaactgtatcctgactgattttctgtctgcttcatctatcaagtcctgaaaraggtgtgttgaagtcttcaactacaagagtggattttgtccatttctccttgaattacatcagtttttgcctcacatattttgctgttcttttgttcaaaaataataaagctattttaacttcctattgattagtgttagcaaggtgtatctttcctcatccctttgttcttaacatatctgagtctttatatttaaaggggaagttttcttatagaacacatggagttaaatcttgcttttttaatccaatctgacattcttttaattgatatatttagataattcacatttaaagtgatgatttacatagttggattaatatctactatattcgtctatattgttttc

SEQ ID NO: 269457 - DNA, 539 bp, Homo sapiens
atggtccaggacatggagtatctttgtgaacatcacatttaagctggagaagaatgtgcagtctgccgtttttggatggagtattttagaaatttgtcaatgagatcaagttgattgattgagcatgccattcagggcaactgtatcctgactgattttctgtctgcttcatctatcaagtcctgaaagaggtgtgttgaagtcttcaactacaagagtggatkttgtccatttctccttgaattacatcagtttttgcctcacatattttgctgttcttttgttcaaaaataataaagctattttaacttcctattgattagtgttagcaaggtgtatctttcctcatccctttgttcttaacatatctgagtctttatatttaaaggggaagttttcttatagaacacatggagttaaatcttgcttttttaatccaatctgacattcttttaattgatatatttagataattcacatttaaagtgatgatttacatagttggattaatatctactatattcgtctatattgttttc

SEQ ID NO: 269458 - DNA, 591 bp, Homo sapiens
gttctgtgcgtcacagactcaaagaccaggagggagagagcggtatgtaagccccagttacaatgctggacattgagcgtcgtgataaatatgtgtactgagcgtggtgggagtgyccagaacaggacaccgatttcacccaggtgcggggggaaggaagttctgacgaagctttactgaggaactggacactgagctggaccttgaatgaacattaggagtttgtcaggcagagaccggatggaaggcggggaaagaggcttggcaagtagcttgatgtggccagggcagagggggatgcctggggttaagaggtggggaggggtccgcagaatcaagagatgcagctgaaggagcaggtagaagccggactaagaaggaccttgtgtgtgcgctgggggatttggtcttcataggctctgcagtagcactgctcaacgctttctggcctctgtgccctaccctagttctgtttaggaatgactgggtctgcagcaggcaggttcgagatagaaaagtgcaggctcacaaacccctgggaggaagtgtgctgggcttcgggtagcgtgtagaggagaaaatggagtaggg

SEQ ID NO: 269459 - DNA, 578 bp, Homo sapiens
tgctcaactgcatgggagttagaagtttcgattcagactggcctaagctgtttaatacctgaaccggagaccgttttgtatagctggaagtaaccagaaagctgaggtatcttctaagatatcatcaaggaggggaaaaagatatccagaaaagcatgtctgaaggcagcactggaagaaaaatgaagctgtttctggtttgttccctaccaaggtaagtctactcgataaacaaacaacactagaaaatctggaactaacttactttcttttctttttctttttctctttctttctttctttctttctttctttctttctttctttctttctttctttctttctttctttctttctctttccttcttctcaggtaaaaataaacaaaatgtaagtcctaatattatctgcagtagctcatcacatgcagtcccwggggtgagctgggtgagctctcagtttggaggccagaactccagcgtggtccgttcaactggaacccaacccagaactcgcgtgcagactgaggcctcagagtctgaggcgcttgacccagctctgagcaaatgccagcccag

SEQ ID NO: 269460 - DNA, 539 bp, Homo sapiens
tcatgaaaggcttggtgccatccttctggtaatgtgtgggttcttgctctattcgtttccaaaagaagtgattgttaggaaatgcctggcacctgcctcctctgtctttttcctcctctcttgccatgtggagcctgcacccctttgccttcccccataagtggaagcagcctgaggcctcaccagatgcagatgctggcgccatgcttcttgtacagcctgcagaaccatggtccaaataaacctctttctgttgtaaattacctagcctcaggtattcctttatagcaacacaaatggactcatacagtaggtttaggagaagaaagaggaggaagagaagaatcagcaacccacacagaatattccaacattggaggaatcattactatcttcatctaatctctcgacttcagtttcccaactgttaaaaaaaaaaaggaractatctaattcctagtaaatgggctccataaataaatagcctcgatttgtagcatctgcacattaccctggtgtaaatactcccaccatggttg

SEQ ID NO: 269461 - DNA, 589 bp, Homo sapiens
gtttccatcattctgaaatttcacaatgatgtgcctggcatgaatccagttttgttcattgtactgggcatttagtagacacttttggtctagaaatgtatatctttgaattcaaagaaaatttcttaaactattccttctatgatttcttctcctccattttctttctggaactcctatygtttggatattagatttccacaacttgtcctctattttttgaaaaatattttcttccctattttctatccctttgcttttttgttctactttctggaagatttctccatcttagttttctaatccttctattgagtttttcatttatgctttcatgtttttaatttatgaaggctttcactctttttatagtatcctatctctatttcatagatgtaatattttgtctctgtgaggctattaatgattatttcaggttttttagaaaaaggctttattctccatgtacggtctcttgcatccaagttactttttcctttctgtttgtttgttatggactgtttgacattagagactttccaccaatacctggtgatcttttgctgtctgtatatgtttaaaagagcag

SEQ ID NO: 269462 - DNA, 589 bp, Homo sapiens
gtttccatcattctgaaatttcacaatgatgtgcctggcatgaatccagttttgttcattgtactgggcatttagtagacacttttggtctagaaatgtatatctttgaattcaaagaaaatttcttaaactattccttctatgatttcttctcctccattttctttctggaactcctattgtttggatattagatttccacaacttgtcctctattttttgaaaaatattttcttccctattttctatccctttgcttttttgttctactttctggaagatttctccatcttagttttctaatccttctattgagtttttcatttatgctttcatgtttttaatttatgaaggctttcactctttttatagtatcctatctctatttcatagatgtaatattttgtctctgtgaggctattaatgattatttcagsttttttagaaaaaggctttattctccatgtacggtctcttgcatccaagttactttttcctttctgtttgtttgttatggactgtttgacattagagactttccaccaatacctggtgatcttttgctgtctgtatatgtttaaaagagcag

SEQ ID NO: 269463 - DNA, 602 bp, Homo sapiens
ttcttgggacacagttttccaagtaagaatcaagtaggtgaccagacaatctttggattaagaaataaaattagatgaaaaagagacaggcagacagacagaaaggaagaaagaagaaaagaaagtgcatgagcatacacataccattccctattaactccatgcatctccccaattatcttgggacatttcttcatcttattatgagtgtctgaaacacagaacatgctctcttctaacctataaatgaaccactcatagacttctgtttgcctcatcaatttctacacctttttgaaaaatagatcattttacattccttttcaatgacgggaaggagttcacatttttaaaaaacatatatccatttcttagcatatgtgcagaatgacttcccagcatgaaactggctgacccctttaaatgttctcattccaaatacaagggaaagcccatcttgtgcaactccacaggaatccttgcagaattatatcagatgagaaccacttggcggctcattagaaatagtccccgtctgtcactaaggttagatttgaggacatctttacaakgatataagggggcctttcccccacatttcc

SEQ ID NO: 269464 - DNA, 623 bp, Homo sapiens
agactattcactgaatcttttagactagaatctagaccaataaaatgcattttagtttgtatggaatgtcctagcttcctagaggctagggttcgacgtcttgtttgtcaagacataaagggattaatgacatacccactgtgtgctagaccacagagtgggcacagagggatgaaaaaataaaaattcctgcccttgaggagctcacagtctaagctgtcaataataacatctaacatttattaaatactatgacctaggcactgawctaaaagctttatgtcaactcagttaatacagccaacaactctttgacatcactggaaattccatatgctgaattcacacggaattaagtggaaatctacaaagtagccagtctactggttctgtagtggtcaacctattaaaaatggtttttaatttctaaagtactttatgccaaatataacatgtttatggtatatgcctgactgtagaattataactcaggggaataacgacttatttaaatgtaacagatctattcatagtctgtaaagaacaattcatcctctgatcttgtttttcagattaagcagtgtgtttattaaaaattattatcatcgcaatactaaaaagat

SEQ ID NO: 269465 - DNA, 623 bp, Homo sapiens
agactattcactgaatcttttagactagaatctagaccaataaaatgcattttagtttgtatggaatgtcctagcttcctagaggctagggttcgacgtcttgtttgtcaagacataaagggattaatgacatacccactgtgtgctagaccacagagtgggcacagagggatgaaaaaataaaaattcctgcccttgaggagctcacagtctaagctgtcaataataacatctaacatttattaaatactatgacctaggcactgatctaaaagctttatgtcaactcagttaatacwgccaacaactctttgacatcactggaaattccatatgctgaattcacacggaattaagtggaaatctacaaagtagccagtctactggttctgtagtggtcaacctattaaaaatggtttttaatttctaaagtactttatgccaaatataacatgtttatggtatatgcctgactgtagaattataactcaggggaataacgacttatttaaatgtaacagatctattcatagtctgtaaagaacaattcatcctctgatcttgtttttcagattaagcagtgtgtttattaaaaattattatcatcgcaatactaaaaagat

SEQ ID NO: 269466 - DNA, 592 bp, Homo sapiens
gaaatgttaatgcatcacttttatttatttttatttttatttttattttttttgagacagaatctcactctgtcgcccaggctggagtgcagtggcgcgatctgggctcactgcaagctccgcctcccaggttcacgccgttaatgcatcacttaactggaatttggtttgacaaggtctgtgtgtggctggaaaaggggggaaggggacgaccaatcataggatgatacacagggctggatctgtaaatgcttcatttctcagtctgtgactttacagaattgtatctgtaaaagagacaatgatactgcaattttggtttacatatgctttggaaagagtatatgaagtaaaggcattttctttaatggacaactagaagcatgttrgaattttagcctctgtgactattcaaaaaaaatttgtaagcttttctaacaagaagtggtatgctaaatcaagtttctctatggagagcttgttagataaaataattacaaaaatttgaagaactctggaagaaatataattactataaatcattttgaaattgaggtatatgagtgagaaatggttttatgagttttggggt

SEQ ID NO: 269467 - DNA, 582 bp, Homo sapiens
ttaaaaagtgttttcccccacaacaaaacttaagaggctcagagttaaatctagaaacaatagtgctttttctgtttttctaactggagagtgagaccttagttaccaagactgcacttgctgcttttttttaaagtatgcagttatataaacataaataaatatggcctgcaaatatttttatgtttttctaaattggtgattgtgaaaagaggttgtgcatgactgtactgtatgaacatgggtctcagtggactgtaatcctcataaactacaaggtacggtgaagcatttggccaagtatcrtcaatccaaaaagctgttctaatgccctgagcattcccagtgcaacgttggtaccttggaaacatgtaaaaggagtatgggtggctcaaccccatctgctacaggtactagaacaatctacagccttactatgcaaaatgagatgtgctgacctgcagagcaccacctccaggttatgtcaaaaatgcagaatgtcaggccctacctcagacctagtgaatcaaatatctgtattttaaaaaaatcacccagccaagtctcacacacattcaagtt

SEQ ID NO: 269468 - DNA, 601 bp, Homo sapiens
gaagacaggtaaccggaaaacattacgtaatatgtgattttatttatgtgacattttgcagaaggcaaaattatggggattgaaaacagctcattaattgctagaagtggggcagttttgactacaaaggggtagtgcaagagtttctgggggtgatgacactgttctgtatcctgattgtagtgttgcctacgtgaagctatgcatgtgataaaactcatagaactttacaccagaaaaggtcaaatttatggtacattaatctaaaattagtaattaataaaatggaaataattatcaaacccatcatctttttaacaacagccactcctgccaccaaatacacaaacaaaaaccagagacacaccattcccctgtccctgcattccataatgattaacggaggccactcgatagctaccacttagtcctcattcttccctaccattttggctkaagtgcatcaggttctgttgatagtagcatctgaaatgtctcttgaatggtttctctctttgctaatcctaacatgacttctccagttctatagtctaagaactctggtttggattatttttgtagcctccaaaatggtttcccc

SEQ ID NO: 269469 - DNA, 620 bp, Homo sapiens
tgctgagatatagaccatatacaatattgactcattaattcaacaaatatttcttgaacagctatgatgtgttaggcactggggatacaaaaacaagacatgacatcattcctatttcatggagctgacaatttagtggattggtaaatattaaaactgaactactagactataagaaatgcaggaagtgtatcttagacatttttgagttgcacatacctggcatgtaagtatgaatgcaatgcatgtttgaatgaaggaatgtttgaatgttgtcataagcggtgtttttttttttaagtcaaaaaccccttagatttctaaagctgagtgtttttttactaatctcattattgttttcaaattctscaataataataatagcttagacactgaattcagtaaccacagaggctgtttataatttgttggtgctttttaaacatctttgaaagccaaacaagcccttgactcctggccaataattcactgtgtcttcatgtatatacctgaggggtagcagtcatcaaaaggcctgtgcaccagcatgtgaaatatggggatccttatactgtggaatgtataaagattgcttactctgtaatttttaaaagccctgt

SEQ ID NO: 269470 - DNA, 510 bp, Homo sapiens
agctttccctgtctatataatgggcataactattattatcatgtatttcaggcctgtcacatgatagtctttgtagaccccacctctgtggctatgacagccctgtaaagctggctagcgactggtgtgatgtgggtaacagtcaatgacagcaaaccagcccttgcctctagacaggccttcaaggctctttcgggcttgagtctcctgcatcactggggggtttccaggaacgagcttgttccaccagtgcagtgggagtgtgtgtgctctcaggactcagggcaactgctcctacccttgtgatgtgaagggatttcagtattttaactggtccatctccatttggctgatcatatattgaraattagagagattaagcaaattgcccaagacggcccaatcaatgagtggtgggtctcaggtgtgtctcactctagacacctgtagccttaaccgctgagcagtcctgctccatttgacacgagtgaatgtgcatgaaggtgccca

SEQ ID NO: 269471 - DNA, 510 bp, Homo sapiens
agctttccctgtctatataatgggcataactattattatcatgtatttcaggcctgtcacatgatagtctttgtagaccccacctctgtggctatgacagccctgtaaagctggctagcgactggtgtgatgtgggtaacagtcaatgacagcaaaccagcccttgcctctagacaggccttcaaggctctttcgggcttgagtctcctgcatcactggggggtttccaggaacgagcttgttccaccagtgcagtgggagtgtgtgtgctctcaggactcagggcaactgctcctacccttgtgatgtgaagggatttcagtattttaactggtccatctccatttggctgatcatatattgaaaattagagagattaagcaaattgcccaagacggcccaatcartgagtggtgggtctcaggtgtgtctcactctagacacctgtagccttaaccgctgagcagtcctgctccatttgacacgagtgaatgtgcatgaaggtgccca

SEQ ID NO: 269472 - DNA, 565 bp, Homo sapiens
cttattacataaccctttaagatcttttccatatttatgatttttacaaaatttcaggcatctagaataattataaaaacatatcttawttttatggctttttaaaagtgaaaatagattaataattaagaaatataagaggataaaaatattagagatttttcattaacattgaggaaaatataagtatacagttagttaggaaacgcattatattatttgactccataaaggggaagcaattaaactaattattaagatatgagtacatgtgtgttaagtgtcagtatttgtattttaaatctctttttttttaaagtatagtgcaatgtagtgaatgcagacaaaatgttcctataacatatctgtacagatttttttctaagacgggagtcttgctatgttgtccaggctggtcttgaactctggggctgaagcgatactcctggcttagcctccctagtagctgggactacaggcacacaccaacttaccagtaacacattagttttaaggggctcagatgaaggaaaataaaatggatttaagatgagtaaaaaagaat

SEQ ID NO: 269473 - DNA, 593 bp, Homo sapiens
cctgctaaattaatatgttgaagcccgaatcctctcctcactcctatgtgactgtattggagacagtccttttaaggagataattaaggttaaatgaggtgatcagggtaaagccctgattccacagaactggtgcccttataagaaaagagacaacgctctctttatcatctgaggagacattgagaaggtactgtctgcaagccaaaaagaaaacccgaacatgatcatgctggcattctgatctcagacttccagcaggcagaactgtgagaaaatatatttctactgtttgagccacccaatctatgtattttgttatggcagcctgagctgactaacacactattctactaaaaaagtcaagtatgtctaacagccaaaaaaggtcctaaacattctgatctactacrtcccatatcctaagctctctgatgtaattgcctttgattcttcacatctcttaagcaagttccagccaaactggcttacatgcaattccgtgagcatgctaagcatgctcctgcctttgggtctttggtttccctctgcttcagacactttttttcccaagaactcatatcactcacttc

SEQ ID NO: 269474 - DNA, 580 bp, Homo sapiens
ctagttccttcttccatattgtgccaagctatttggccagctacatggacagtgaccttattttattcaagtatactacagaatcagtgagtggttttcagctctaaatttactccctctggtgatcctgctaattataaacttactagccttcagggaatggtattaaatattttcctcttttggcaacttagtctctgaattctaaatcgaatgatgctttcatgtcaaatgacccattcragtgttttttaaatgtattttcataagatgcagcatatatttttagcaactagtaaataattatattaatatacttataccaattgtttaaatcataatgaaacacttactgacaaataaaatagcaattactgatataaaatggggaaataattttactctcctgcatttgtacagagaacatttgagtaacagttttcccaagcaaagtaaaccaaatatttatctggtggatttaggcagcagaacacaacacagagagtttacatgtttcaagaagttacatacctcctgcaagcgatataacctaatatccaaattatcttagtcaatttga

SEQ ID NO: 269475 - DNA, 612 bp, Homo sapiens
gttagtaattagaatatgcaggttatttaagggacagaaaatggctctttaaactcaggtaaaaagaagttgtatactattattggtttaaaaaattacaaacaaaaaccaaaaaatgccttcaggagctatcttgtcttccttgggtctctgtaagcatctcagggctgcagctttcacagggaaagaggcttttgggtcgaaaccctgtggatgccagcacggtggtctctgtgcaagccaaaatgtccatgcttctgtgaagttcaggcacttggcaagattttaaataaatgctagcttgaatgctcaagatatttgactgacctaaggggtggtggrcaccatgacttggatatagctgcataaagcataattaccaagcctggctgtctgtatgccaaggatgccaggtaaaaccctggccacccacaattaggctctgcctttttgttgggaggaccactgtgagtagtgtctggacagaaaagggggccaaggagacctcacaaatcagtacctgttgcaggttcctcatctataaaataggaacacaaagagcacctatctcatcgggttgcagagaggactgggtgagatgatgaaagtcaa

SEQ ID NO: 269476 - DNA, 538 bp, Homo sapiens
ttaatcctaaaacagcttcaactccaaatcttctgagcttagttagggagcccaggacagctcctttgagcaaatgctactgcaccagtgactagccctacattagagacaaggacacggagtcccaggaaggaacttgtgctcaaagtcacctaagtgccacaaagcaggagagagctgagttctaggcttccacacctctcaaagccaactcagcaagatcatctcatacaatctaasttgccatcaattgtgaaaacatgtttttgacacaccactaggaaggagaaaatgctgccaactaaactatgatacatggctttctggaaacatcagttgcaagatgcattacaatttcagatatgttaaaatctgagtgaaaatgtgtgctaaattgatgatatacagtctctttctgcaggtgttggatggttctaaacacgcttccccatgttctcttcctctgcccagttctgcttccttccttctgattcttgtcttaatgagctctcatccaaggaccccaagctataatccc

SEQ ID NO: 269477 - DNA, 408 bp, Homo sapiens
gccttttgaacagtgcctggtacatgacaagcattcaaaaaatttgttgaatgaatgaataaagtgtgacttgccatgtgtcttgattgctctcgttcttagtttcctcatctttaaaatgggaacagtgtaaattagttcaaccattgtagaaagcagtatggcagttcctcaaggagctaaaagcagaactaccattcaacccagcattcccattamtgggtagatacccaaaagaatatacatcattccaccataaagacacttgcacacaaatggtcactgcagcactattcacaatagaaaagacatgaaattaacctaaatgcccatcggtggcagactggataaagaaattgtggtaaatatacaccatggaatactatgcagttgttaaaaagaatgaga

SEQ ID NO: 269478 - DNA, 398 bp, Homo sapiens
attgtcatataccaactaagatttcaaccttgacacctctgtggaaagttcatctgtttttttttttttttttaascatgatgatggttataaccctggagaacaccctaagtacagaatattcaagttggtacctgcattacctcctgtcttcaccctgacacaagagttcttctgtccccagcttagggtgaggaaactgactgaaagcaaacaaaagttcaccagatcaaagaattcatatgtgacagaatgtgaggactcttgagctccctgctttcccccgaaacactgtagttcccattgtcacgttcaatggtggcccccgttggccccaggatgaatggcctgccatagacacattttgttggcaccgtcttcatttcagccaatctgca

SEQ ID NO: 269479 - DNA, 661 bp, Homo sapiens
aatccagggattgtttacagaatctcaaataaggctagaaaacattcacaacaaaaaaccctcaaaattattcccatatctagagaataaagtaactctttcttccgttgtctttatttaagatgtgatggaatcactcttggcatctgcctagactttttctgaaattagtaactttaaytccccattaaattctggaggaaatgtattttggaagtcagagaagctaaattcaataaaaatatgtatgaattcattttattgcacaattggtatgctcctgctggataaatttcttccagtagcttcaaaattaagagcacgtcacatattatgctataggcagaaccaggagtcctgtagaaaactcaaccttggagaaagctttagacccttggagttagaaatgacctcaggacaggtcatccagcttcctgcccactgcaggaatcctctctacaacattcacagtgtatggttgatatggtttggatctgtgtccccacccaaatctcatgtttaattgtaatcctcaagttttaggtggggcctggtggcaggtgattagatcgtgggagcagatgtctcatgaatgtagcaccatcccccttggtgctgttcttgtgatagggaattcttgcaagacctggttgtttaaaag

SEQ ID NO: 269480 - DNA, 543 bp, Homo sapiens
tccctgtgctacatggagaagccatggtcttctgaataaaaattagacaactgttagaaaaatacttatgtgaattccgagtaaacaaccaacaagggtccattacaatatgtaacaataacagaccagttaaataaattatggtacatccacaaaatgggctattttgcagccattgtgaaggattatgacatggatttatayttatttttgtaggaaaatgttcattttaagtaaaaaaattgaaaaatacaaaatggcttacatagaagcatccctatatttttctcaaaggatgggtgcatagagagaaagatagcaaaaatatctggaaagagtatgccaaaatatgaataatgattgagtggtagaaatatatgtgttttaattttttcttccttcttcttaattttttaatgtatttgctttattttataatttttaatcttattttcctataatggacatttataataataaaattaaagaaaaaattttcaaggaaaaatatcctcttccagaattggagcctatgtttatttt

SEQ ID NO: 269481 - DNA, 579 bp, Homo sapiens
tcatccattggtggacacctcaattgcttccaccttttggctattgtgcataatgctgctatgaacatggctgtagaaacatctcttcaagtccctgcacccaattcttttggatacataccaagaagtggggttgctggatcatatggtaattatatttttacttttctggggaattgccatactatttgacatctacatattttctcatttattctcacaacaacgctgtgatacagggataatgatgaggaaacagactcaggaagatgaagcaccrttttacagatgaagaaactgaaactcaaaaaggtaagtacttagtaattatgggatagtgatcaggagcttgggcttgggaatcagacacacctggagctctggtggattgaactccagatttctctggctcaaacatgtcagcctccacaaaaaaatgtgagttttttcttgttactttccaaaattgtatatttctacttcaaatcaccctggaagttaactcttttggtttattcccaatcaaattactgagtagggaagaagggagctcctgtaaataatcctgctgggagaacg

SEQ ID NO: 269482 - DNA, 579 bp, Homo sapiens
tcatccattggtggacacctcaattgcttccaccttttggctattgtgcataatgctgctatgaacatggctgtagaaacatctcttcaagtccctgcacccaattcttttggatacataccaagaagtggggttgctggatcatatggtaattatatttttacttttctggggaattgccatactatttgacatctacatattttctcatttattctcacaacaacgctgtgatacagggataatgatgaggaaacagactcaggaagatgaagcaccattttacagatgaagaaactgaaactcaaaaaggtaagtactyagtaattatgggatagtgatcaggagcttgggcttgggaatcagacacacctggagctctggtggattgaactccagatttctctggctcaaacatgtcagcctccacaaaaaaatgtgagttttttcttgttactttccaaaattgtatatttctacttcaaatcaccctggaagttaactcttttggtttattcccaatcaaattactgagtagggaagaagggagctcctgtaaataatcctgctgggagaacg

SEQ ID NO: 269483 - DNA, 509 bp, Homo sapiens
gaagttaactcttttggtttattcccaatcaaattactgagtagggaagaagggagctcctgtaaataatcctgctgggagaacgtgaggttacatttctatttacatagcaatgatatttgtatggaaaatacatttctaggtctggcctaggtataaaagaaagaaatgtaaggagggaacaagaaaattggctcttttttttttgagacataaacaataaccaattatgttgaacyggaatcaaaataggtggctggtgtgtccaatgggatattgcggaagaaagcaaggaaagtgactgcatatagtatctctccactcactcattttaatctttacaattatgaggcatatcacatacatatgtttcaggatataatatgtgttgtttcaataatagtaagtatttgtgccctacctcccagtttaaacactgaacattgccagtatatcaacaatctaaacttgcccctctccaaccccaccctcctcccttcctaataccc

SEQ ID NO: 269484 - DNA, 599 bp, Homo sapiens
tatctaaatacatgatcagttaatatttgtcttaaaggggttttctttgttcttttcttattataggaaggttaaacaatatgcttatttatgccatagcttcacaaacaggaaggaggttttaaatggtttagttccacaatttgagtagatgcatatttaaagaaacgttgttgcataataaatactgcctcttcctaaaatgcatcatgccacagccaattttggaaaacacaaatatgaggtgagtgtattttgaaaactatgtgaatataatagatcyttaattcatatttgtggattttatgggaaatacttgttttctaaggcatctgtcttgcaaaaagtcagtttctgctatgaaggatgttaaaggggatatgtaggttaaattctgtttctgagctttgcttccagagtaaacacccaacttacttttgccctaaagtattttattgttctagtagagaagactaacaacatattctaaaccactaagtaatttatgtaaacttcgcttacaaactacacttgtgtgacacttatatgagcaaaagcattttcatatttcttactatatcattcaattcttgcttacc

SEQ ID NO: 269485 - DNA, 599 bp, Homo sapiens
tatctaaatacatgatcagttaatatttgtcttaaaggggttttctttgttcttttcttattataggaaggttaaacaatatgcttatttatgccatagcttcacaaacaggaaggaggttttaaatggtttagttccacaatttgagtagatgcatatttaaagaaacgttgttgcataataaatactgcctcttcctaaaatgcatcatgccacagccaattttggaaaacacaaatatgaggtgagtgtattttgaaaactatgtgaatataatagatctttaattcatatttgtggattttatgggaaatacttgttttctaaggcatctgtcttgcaaaaagtcagtttctgctatgaaggatgttaaaggggatatgtaggttaaattctgtttctgagctttgcttccagagtaaacacccaacttacttttgccctaaagtattttattgttctagtagagaagactaacaacatattctaaaccactaagtaatttatgtaaacttcgcttacaaactayacttgtgtgacacttatatgagcaaaagcattttcatatttcttactatatcattcaattcttgcttacc

SEQ ID NO: 269486 - DNA, 603 bp, Homo sapiens
tgtgggagggacccggtgggatatagttgaattatgggggcagtttgccccatgctgttgtcatggtagtgaataagtctcatgagatctgrtggttttataaggggaaacacctttcgtttggttcttactctctctctcgcctgccgccaagtaagacatgccttttgccttcttcacgattgtgaggaccccccgcagccacttggaaccgtgagtccattaaacctctttttctttataaattacccagtcttgggtatgtctttatcagcagcgtgaaaatggactaatattcatgtctgttgagtactcattatatgccaggaactgtttggtgctgaagatcagtgggtgaacaaaagcagttgatccttgcccttactaattctgcatgtaactgaagaggtacatttttaaagtgcatacaaaaagggcaactatggtaagtgctacgaagaaaatatagcatgttttgagggaatccagctaattctgggaggtcagtaactgttctcccaaagaagtaaagtatcaaccaatacctgaagaatggctatctgatgcctagaaaaacagaagagggaagaacatggtgcttag

SEQ ID NO: 269487 - DNA, 537 bp, Homo sapiens
ggggtagtgagtaaggtgagttgaccagtaagatgagaatggaaaggtaagctggggccagaataagcgagatctcatttgatgtgaatataaaattgggctggattctctaaatgctggtaagctaatgatcttgcagtgagagatcatttaatcttacctcctcattttgccaatcaagaaactgagggccagagagaaatgacttgmccaagactacaaagcaagttagtggcaaaactggggccagcaaccaggtctcccacacctagtaccatccaactctgttaaacaattcctgcataagtgtatgaaaactgaaataatttaaaagaatggctctttccatgttttcccatgtctttcacccagttttcaccccccatttttttaggtgattaaactttttcctaagtttcagctaattaatatcttcccaactaaaataactactgtggttcaaagccagaatgattttatagaaattgctaatgatgcagttttcctgtgtggctcagttgtatgtggcagaatggc

SEQ ID NO: 269488 - DNA, 604 bp, Homo sapiens
agaaattggatgaatggatgtattgttattgatgtaatgaaccttagaggtgggtgggatcagaaagatctatttgctttcaaaggaaatggggagtggacaggtatgttggcagcataagaactggaataacagcacatctcattcatgccttaaaagaacgtgaaactttgaatgtacagcaatggtattcaataggtatgactttgcccctaaaggacatagacaccagggatgttgctaaatatcctccaatgcacaacacaacyctcacgacaaagagttatctggccaaaaatatcaatagggctgaggttgggaatcccaaccttacaggttgcctttttggcatttatgcaaatgaagtcccagagaagatgattctggaaggtgtcactgcagatagagtgtgaggaaggggcctggattagcttctgtggtagaggctggtgggagctggtgagttatggggtttgcagagttttcctgcgagtggaacagtctccaggagagggtctgaaccctctggggccttggaaagaacagaacattgattgaattcaattagaaggccctggacgcagtgggagatgaggtggatatg

SEQ ID NO: 269489 - DNA, 498 bp, Homo sapiens
aacatatgcatggtatttagtactggtaaaatactcaatatgcatcaacaattattaatattatcttatttttatttgaggcagaggctgcaaatacaaatgcctttataggccaactggagagaaatgaattaagctaattctccacctaaaaggaacgtggctattcaccttcagcaaattactccacctgggagttttgatgaggttgtcacactgtacgatatttttaagagaagttagaaatctggactttggagggataaaattttccattttaaaatgtttactctaaatttaaattacaagataatattgtggcatccaacagtgtatgaactgaacaaaatgtgtgtggggctggtatagcccatgggctgccatctgtgaaatctgatttaagacaggcttccrgcttgaggcagagatcctgggagaccttttggaagataaagcttccccttcattctcctgagatattaggctccaacatctcta

SEQ ID NO: 269490 - DNA, 459 bp, Homo sapiens
agagcacagtgttcctatggacagagcatcaacacctcagaggctgctgaccagcccatagctagtaggctttgggttaagttattctgtattgcatcagctgtggccaggattccaaggtcaggtgatgcgaaacatcccaagccgtgggtcaggaacctcgcagagaaaggctagaggatggtaggctcctggcatggccaactgctaygatatcggggtgaagaaaggtaaccaaaatagccaaagagaaagaagccccatgaatatgaagagacaaatgtcccaataggagcatgatactttggctggtgacagatgctagacatggagaacagaccagcctagtgggtgagtctgcaggtcctgagttcttatcccagctccaccattctctggctgtgtgatcttgggtaaattactcggcctctctgaacttgagcttcccagtctttcaac

SEQ ID NO: 269491 - DNA, 507 bp, Homo sapiens
tgcaactttcaggaactgtcaattgtctagggaatataaacaaaagaacaaaggcaaagttggctcattagaagagaagcaatctcagattgaactgaatataaaacccacttrgaatttaaacaccagagtggtatgtgggaggaacaaggttacaaactctggggagaggtcctgataaaccaaagcaattccatcctggttctcagtccctgttcataaaaatttcacagaagggggacaagtctccagagcttgagcttctggcatagcaaccccgctgccagttgcctctgtttgctttgagatatcagaagggagactccaggcaagctggctttgatttgtctaaatatagtctcttttctgagagtacagtgaatcaagcaaggggtcctggggccagcatcgtgtttggcatttttactttatgggctgcatgatgtttggcacattccttcccctctgcaggcctcaatttctccctccattgagaaagaaatccag

SEQ ID NO: 269492 - DNA, 507 bp, Homo sapiens
tgcaactttcaggaactgtcaattgtctagggaatataaacaaaagaacaaaggcaaagttggctcattagaagagaagcaatctcagattgaactgaatataaaacccacttagaatttaaacaccagagtggtatgtgggaggaacaaggttacaaactctggggagaggtcctgataaaccaaagcaattccatcctggttctcagtccctgttcataaaaatttcacagaagggggacaagtctccagagcttgagcttctggcatagcaaccccgctgccagttgcctctgtttgctttgagatatcagaagggagactccaggcaagctggctttgatttgtctaaatatagtctcttttctgagagtacagtgaatcaagcaaggggtcctggggccagcatsgtgtttggcatttttactttatgggctgcatgatgtttggcacattccttcccctctgcaggcctcaatttctccctccattgagaaagaaatccag

SEQ ID NO: 269493 - DNA, 507 bp, Homo sapiens
tgcaactttcaggaactgtcaattgtctagggaatataaacaaaagaacaaaggcaaagttggctcattagaagagaagcaatctcagattgaactgaatataaaacccacttagaatttaaacaccagagtggtatgtgggaggaacaaggttacaaactctggggagaggtcctgataaaccaaagcaattccatcctggttctcagtccctgttcataaaaatttcacagaagggggacaagtctccagagcttgagcttctggcatagcaaccccgctgccagttgcctctgtttgctttgagatatcagaagggagactccaggcaagctggctttgatttgtctaaatatagtctcttttctgagagtacagtgaatcaagcaaggggtcctggggccagcatcgtgtttggcatttttactttatgggctgcatgaygtttggcacattccttcccctctgcaggcctcaatttctccctccattgagaaagaaatccag

SEQ ID NO: 269494 - DNA, 507 bp, Homo sapiens
tgcaactttcaggaactgtcaattgtctagggaatataaacaaaagaacaaaggcaaagttggctcattagaagagaagcaatctcagattgaactgaatataaaacccacttagaatttaaacaccagagtggtatgtgggaggaacaaggttacaaactctggggagaggtcctgataaaccaaagcaattccatcctggttctcagtccctgttcataaaaatttcacagaagggggacaagtctccagagcttgagcttctggcatagcaaccccgctgccagttgcctctgtttgctttgagatatcagaagggagactccaggcaagctggctttgatttgtctaaatatagtctcttttctgagagtacagtgaatcaagcaaggggtcctggggccagcatcgtgtttggcatttttactttatgggctgcatgatgtttggcacattccttccyctctgcaggcctcaatttctccctccattgagaaagaaatccag

SEQ ID NO: 269495 - DNA, 608 bp, Homo sapiens
acctatgtaacaaacctgtatgttctgcacatgtatcccagaaattaaggtaaaatttaaaaataaataaataaataaacttactctgggaacaaaaaggcaaaactaaaaataaaataaaatttatagaactataagagcttcttcaaatctttgaaakgctgtcagaaaaatgttgaccaaagggttgtataagaatggcctcaaatatatattttggtacaccaatattttttcttctgttttcacctctgtcattctctaatgattctccccgctctaaaatgttgtttctagtctcttctcattcccttctctttttctctttctttttctagcttgctttctttttctctctctgacccctttctctccttcccttcctttcattaaatttcttccttaattatccacaatatataataaatacatttttttcaaaaagttttgtttcttttttttcttaaaaaggtgtgagtaggaggagaatgaggaagaagaggagggaggaagaggggagggcccagggggaggagatgggggaaaagagaataaaggggagggagaggaagaataaacaataatgatctttttttgttccccctctg

SEQ ID NO: 269496 - DNA, 608 bp, Homo sapiens
acctatgtaacaaacctgtatgttctgcacatgtatcccagaaattaaggtaaaatttaaaaataaataaataaataaacttactctgggaacaaaaaggcaaaactaaaaataaaataaaatttatagaactataagagcttcttcaaatctttgaaaggctgtcagaaaaatgttgaccaaagggttgtataagaatggcctcaaatatatattttggtacaccaatattttttcttctgttttcacctctgtcattctctaatgattctccccrctctaaaatgttgtttctagtctcttctcattcccttctctttttctctttctttttctagcttgctttctttttctctctctgacccctttctctccttcccttcctttcattaaatttcttccttaattatccacaatatataataaatacatttttttcaaaaagttttgtttcttttttttcttaaaaaggtgtgagtaggaggagaatgaggaagaagaggagggaggaagaggggagggcccagggggaggagatgggggaaaagagaataaaggggagggagaggaagaataaacaataatgatctttttttgttccccctctg

SEQ ID NO: 269497 - DNA, 569 bp, Homo sapiens
ctggcttatcattccctatttcttgttttactgggttaaagggaaggagagtcgtaagaatcttaaaaatatatttttatttggttttgaactaaatgagataatgatctatgtctcttcttaggaggaagaaacaccaatattaacccttcaccagctgcctggacgcatcagaaatactcaaggataagcgacacccaggtttatgaaccttgtattggtcagattcagtcagggtagatttgttatgattgttatgaaataagagagttgtaatatgaattaaacgctatgcaattatggcagaaactaggaaagtgaaattctgaaagtggtatttaaaggatcaggaaaggaktcatagtaaatctgaaaagtcaaaagtcaagcacatacagaaacacaagtgggctcataaaggggaagtgcaggagatgtctgtgggaaatcattgcctctcagaggcaactgctctgggtgttgcagatgagatgatgggcctggagctgctgtttgtaaagaggaagaactggaagtgctggaagctaccaggtactgctatgcctgtc

SEQ ID NO: 269498 - DNA, 569 bp, Homo sapiens
ctggcttatcattccctatttcttgttttactgggttaaagggaaggagagtcgtaagaatcttaaaaatatatttttatttggttttgaactaaatgagataatgatctatgtctcttcttaggaggaagaaacaccaatattaacccttcaccagctgcctggacgcatcagaaatactcaaggataagcgacacccaggtttatgaaccttgtattggtcagattcagtcagggtagatttgttatgattgttatgaaataagagagttgtaatatgaattaaacgctatgcaattatggcagaaactaggaaagtgaaattctgaaagtggtatttaaaggatcaggaaaggattcatagtaaatctgaaaagtcaaaagtcaagcacatacagmaacacaagtgggctcataaaggggaagtgcaggagatgtctgtgggaaatcattgcctctcagaggcaactgctctgggtgttgcagatgagatgatgggcctggagctgctgtttgtaaagaggaagaactggaagtgctggaagctaccaggtactgctatgcctgtc

SEQ ID NO: 269499 - DNA, 620 bp, Homo sapiens
tgttctggttgtgaaacagcacttggtcagtatggtggagcagagtgagccagagaaagagtggtacaaattaaagtcagagtggtaggaggcagccagaacatagagggattgctaaactgggaagaagtttgaattttctgtaagttgaataggaaagccactagagaatttttaggcaggtgagaatgacatgacatgattatgttttgagaaagtcactctgcctgctttgaagagaatggatcatagcaaagcaagcatggaagcaggaagatctgttagaaaatgagtgcctaaatccagaccagagataacagtggcatgaactagagaagactgggaatactagggatataatttggagggatttgtttatggatcagatatagaggaaaaagggaaagagaacttcatgamaattccaagacttgatttgaacaacttagggattgtggaacactaggaaaaagcacatatgttgggaagataaaccaagaattcccatttcagcaagccaaatttatgatgcccatcagacatacatgagaagaagctgaacatccaatgggatacaaatggtgtccaaaggagaggttaagattgggtttaattttagg

SEQ ID NO: 269500 - DNA, 604 bp, Homo sapiens
tctcagtttccacacctgtgaaatgggagtgttctcccatagcccctgggccgcaatactcagattctttgacaactatgaagtttgtccctgacacccaaaggaatcatgacaatgggaatgcctctgtcttcacctttcattwtagttattttatattgctctttcaccactgtctgagttgggctcccaaacagatctgtgagacaaattaggagacacagaataaaccatttaatttctgtttcttagaggaatattaaacatttggcttgcaagcttttaagacagaatcatagaccataaaactatttaataagtacaatgtactaaaaatatcctttactgagacagattggtgaaattaaaagagcaccagcttaaagatcaggaagccagatgctgttctctgctcaggcccagcctcaatcatgtggccctgggcaggcacctcctcaacttgacctcagttttgccctttttacaatggtatctataagttcttcttggctctgctattctggaattatcttatgtagaataagtcttcccaagctgtgtggggcttttcctggtagatttgagggaagttttgttctgtttt

SEQ ID NO: 269501 - DNA, 596 bp, Homo sapiens
aagctgtgtggggcttttcctggtagatttgagggaagttttgttctgttttgttttattgtttgcttaccctgctactgccagtgaagtcaacactacaagcagacagtaagccaggaaacatttctccctgtcaggtcagcacatcccattaggtggatctggtgctcaagtttattagatcaggagaccgatgctggggaaggctcacagagtggtctgagtcagttgctctaccatgaggttggagtgtagtagattcaacatcctgtgtacatctcctgatcaatggccaatcccatcttccagattggaaatgaaacccacagtagtttgaaatctagttggtgtccccccaagtacttaccagcaaagttattatttagctcattacttcctaaatcataccagtggaaaaattaagacycaggggcatgagggcttctgtgagattgggcacaccagattctgaggtttacagaccttggatgcaggctcttctcgagtgaggttgagtagttgcacctgtgctctgcaccctacaaatgacagtcagtgttaagatcatttacaagggagttttaaaaagaggagag

SEQ ID NO: 269502 - DNA, 644 bp, Homo sapiens
gatagtgacatgtgttatagttgtgacaataccatttaccaccttcgtgattttggatgagacgtaatcactctgagtttttgtttccccatcagtaaaatagtggccaaacaagacactggaagtgaatatgttttgaaacatgcgaattacatgtaagctgctctaaattttgttgtccttctacatttcaggaggcgctatcacacttggtgtgacatcaagataaagagcggaggtggatggggatggaagatgatgctcctatcctccctgcctgaaacctgttctaccaattatagatcaaatgccctaaaatgtagtgacccgtgaaaaggacaaataaagcaatgaatacattttcagtcgtcctatttttatttctggggactctattcagaaggacgtatccagattagttttcccttggttcataaactcgagagagcctgtttttataaagaaaacctggaatcttaagtaagacataatcattccttctcctttccttatctctaakttaaacatctctatttttcccaaatgttttatctcacggtgttttcagacccttcactttcctatcccccatcctaaataaatttttacatttaaaaaatgaaaaaataattttcaaaatattg

SEQ ID NO: 269503 - DNA, 495 bp, Homo sapiens
ggttttgtaatctctgatctgcttaaagggataaattgtcatyttattgggcagtgttctacaggcaatccttctccacaaattgttaaaactcacaggtgcttttttttaattgttacatttcctactgtggttgcttttgcaactgttatttttccaagactgttaatgtaaacaagaaggaaagtcataggccgacaataggagcaccacccattacatacaaactaaagattagactccagttgaattagtattgttacatccacacagcaaaacaaggagttagaacactaagagttcttttcattccttccctagggaattttccaagtataaaataggacatttttctctgtgttaaccataagagtcgactctctgatatgctaaagaattgctgtccgctctaggctcagaaatggcccttcatctactggtttccctttccctcattacattctgagtaaatgaccttctttctgttgctagaaa

SEQ ID NO: 269504 - DNA, 495 bp, Homo sapiens
ggttttgtaatctctgatctgcttaaagggataaattgtcatttkattgggcagtgttctacaggcaatccttctccacaaattgttaaaactcacaggtgcttttttttaattgttacatttcctactgtggttgcttttgcaactgttatttttccaagactgttaatgtaaacaagaaggaaagtcataggccgacaataggagcaccacccattacatacaaactaaagattagactccagttgaattagtattgttacatccacacagcaaaacaaggagttagaacactaagagttcttttcattccttccctagggaattttccaagtataaaataggacatttttctctgtgttaaccataagagtcgactctctgatatgctaaagaattgctgtccgctctaggctcagaaatggcccttcatctactggtttccctttccctcattacattctgagtaaatgaccttctttctgttgctagaaa

SEQ ID NO: 269505 - DNA, 559 bp, Homo sapiens
gaggagacgtcagaaagtattgctaagcacttaacatgtacaaagcagggacacggattgtgaaggaatagtctaggctcttaatcccttctcctcaaataatttgcagtccttatggtaaaattacttaagccaatgcacaatgccataaataaaaatgagtagcaagataaatgtcagccaaagatcacaggcagtttccagcgaaaggagttctcaatgggtccagtgtgcttagggaagtgtttatggcaaaagcaagatgtaatttgggccttgaatgactaaacaatatttgatttggaagagagaatgagaggaataacaatgattcataaaggtgggaattttactttatttactccaatatgtctgatgcctaagtggtgtgtcagatgcatagtaaatgctagagacatgcatttgaaayagtgaatagactggattgttctctccacttgcttttggatcagcttggagctacctagactgcattttgctcatcatttttctgaaaaatatacatattcttaactcctctcaccctttgagagccctt

SEQ ID NO: 269506 - DNA, 559 bp, Homo sapiens
gaggagacgtcagaaagtattgctaagcacttaacatgtacaaagcagggacacggattgtgaaggaatagtctaggctcttaatcccttctcctcaaataatttgcagtccttatggtaaaattacttaagccaatgcacaatgccataaataaaaatgagtagcaagataaatgtcagccaaagatcacaggcagtttccagcgaaaggagttctcaatgggtccagtgtgcttagggaagtgtttatggcaaaagcaagatgtaatttgggccttgaatgactaaacaatatttgatttggaagagagaatgagaggaataacaatgattcataaaggtgggaattttactttatttactccaatatgtctgatgcctaagtggtgtgtcagatgcatagtaaatgctagagacatgcatttgaaatartgaatagactggattgttctctccacttgcttttggatcagcttggagctacctagactgcattttgctcatcatttttctgaaaaatatacatattcttaactcctctcaccctttgagagccctt

SEQ ID NO: 269507 - DNA, 568 bp, Homo sapiens
gacatctccttgatggtggaatggaaagttagctccctgtgccctgaggctttgcatgtagctatgtaaatggctgcactttcattcacttatgtrtcttaagactgattcccacagagagtgaatacattgaacgtcaaactatctaaactggagctagaaaggaatttgaagtttatctagttcagaggttttctttctctctttttcttatctttaaaaggatcagaattccccttcttttctttttccaaatgagatcttatgtagaattttatcatataaagcagataaaggataactgctctggatgaaatgggggtctcctatgcagtgcctgctcatgttccctaatgcccaacccctacatctgtgccttgttgtgttttgagatggcttaaaataaaggagtcatataatctattgttaaaactgagacagttttgagcatataaggagaccctgttaataattatgctgcaacaacgggtgtaaactgggactatcataaataaattagaaagcatggaaccctagttttaaggaatatagtatgaaaactgttggc

SEQ ID NO: 269508 - DNA, 613 bp, Homo sapiens
acagcttgcttttttaaaatttaacagtaatatgcaattctgttttatgaagtacactatgatttctaggaacttcattgcctaagcaaggtggtcactttgcctcattcaattcagccttcctaatatgggcatctgctctattttaacgctattatctctcttttatctatttgttgatagatgcctttgtgtacaatttggttgtgcaaaaaaaaatttcccagttatttttgaaaaggtacgtctcatgtgtcagaaataaagtcactggcattaaatgttcttataaatatttattgagcacctaccacatgccaaattctatytaagctaaggaaagtaagaggcatacagtcttggcctcatgttccttagttttagtgggggaaaaagacaagtaaacagacacaatacaaggtgctaagtgtcacatgaaggatgggtttagcatgtctctttttgctgatcagcttaggggaaggaaagcctgtgttaggagcaggtataaacattatacagtaagttctcactcaacatcctcaatagattcttggaaactgcaactataagcaaaatgagatggtataagaaaaccagttttaccataggc

SEQ ID NO: 269509 - DNA, 573 bp, Homo sapiens
ggaatccactattgaagcccattgactggggccaagttgacaacaatctaggaccttcctggtccaaccacatctttttgggcccagggaattctcaccatgctggggtcattagggtcccccaacttctactccaacccactcaggcatccccctcagtcaggcattactcttccactgctctcctgtcctgttggcatgagccacaccaaatatgaagcttacaacttgctggtgctgtttcctgggatttactccctgctctggagtatctctaaacctttggaggtgctrccacatgccccaccctcaccccaggttttgatgaccaccccatcttttaggagttccccttatttttatatcctcatcctttctctatccatgctcagtcatggtcaatgtgaaatctgtgctgtggctttcctggcttggctcttcatagataaacctataaagccaagatttgagaaatctttctctctctctctctctctctctctctctctctcaataaagttggtgttcttttttttttctttagcaaattggcaacatttcctatcagattat

SEQ ID NO: 269510 - DNA, 605 bp, Homo sapiens
tgaattagctattgtggacttcgaactttggagagtccaaggcgaccagggactgaagtgggcccccagcacagcacagctgccctacgaaaatgtcaccagactgctttttaaagttggtccctgatcccatccctcaccaccaggggggacctcccaactggggtctccagctaccccagacagtgttctctggctgacacaggtttcaaacctcgctgagttggagctcccagagggaggggcaggctgccatctttgctgcttttgtgacttagctattctgtcctttgggctgaggagtgtccaaggagagcagaggcttgagcgggcctccagcacagcacacctgctctgcaaaaacatggccagactgcttcttaaagtaggttcttgttttcattcctcttcartgggcaggagctcccaaccaaggtcttcagccacctcccacagatgcatttgggctggccacaaagtctgtatctacctgggatggaggtctcagaggagagagcaggctgctatctttgctgttttgcagctttcactggtgatacctccatgtactagaaaatctgaggtgactagagactggagcgggc

SEQ ID NO: 269511 - DNA, 577 bp, Homo sapiens
accaggtatgtgtgacactctaggttttctccattctggggcaaaattcctttccatctgtggccctgtgacactaaaaaacaaattatctgcttccataatgcaggcaaaggtataggagagacattctcattcccatagtgagaaatagaaagaaataaagggatctctggtccaagtaagcctgaaaccccggcaaattctattgcgtttcaaggcstgggaataatcttcggtggcttaaagtttgagaaatttgactacataaaaataagaacgcatagataaccataagcaaaattaaaagacaaatgacatattaggaaaaatgcaactcatagaataaactgcatgttgtttccttaaaatataaagagcctctgaagcatgatcaaataagaccaacatccatttgaaaaatgggcaagatgtagatgaaatatttttagaaaaaaaaagatggcttttaaatatatgaaaatatgatcaacagcactcacaatgagagaaatatatattaaaacgttccaaaaggaacaatgtacattggactacttcttaggagggcatttgatag

SEQ ID NO: 269512 - DNA, 621 bp, Homo sapiens
tgttcttgtcttagttcattcctgctgctataacgaaaatatctgagactgggtaatttataaggaacagaaatttatttctcacagttctggaggctggaaagtctaagattaaagctccggcttctgatgaccattgagggccttcttgctgagtcttcacagggcagaagctagccggctaaacgcctatgcaaagcctctacttttaaaagggtcttcatcccattagtgagggagcagccccagggcctaattatttcatgaagtctccacctcttaaytgcaacactggcagcacctgaactttgcaggggacatgttcaaaacatggcagttctataagcatgtactttctttaaaaggaagaccatcttcagttactcccaaattatctcctttgctgaatcagaaaacacctgtcaggactccagagattccacagttaacttacttctctttctttactcttggacccacaataagttatgtccctatgctgaactgagaaagcatttataaataaaagacaagtttaataaacctcttcttttcaccaaataaatcccagttcagaaatgccagcagatgtctgaaacagcaaagaataatgcataaatt

SEQ ID NO: 269513 - DNA, 572 bp, Homo sapiens
ctgttgcaaattctactttgcgaaagtaaaaaccaccaccctgtgctctatgaaagttcctttcttgcctactgataatagtttggttctcttgagttaaaatatagctttattttcagatatttaaaatatctgctttttattttctaaaaatcactctaactacttggtggagagtagamtgcaggaggatgaaattggaccctgcaatacagatactcttgaggtaatctagaccttccattaaatgggtgatccatggaatggcaggatcaatgtcatctggaagcctgtaagaaaagatgagtctctggtctttcttcagacctactaaagtagaatgtacactttaacaagatccccaggtaatttgtatgcttactagaaattgtgaaggacttctctaggtgagatttgatgcttgcttatctagggtgatgtgtgtggaaatggggataagggaatggatacaagatatatttttgagatacaaatgacagaattttaggatgacttgatgtcagaaataaggaaaaggaagaaatccagcatgataagttaggtttctagct

SEQ ID NO: 269514 - DNA, 523 bp, Homo sapiens
tcttaatatatttgtgtgttttttctttgggttctttcatagaatggaagagaaataggartggggggatgatttctccaatgatggttttcaaaacgtagctgaaataatgctgccattcacgagatttgaaaactgatacacatttatgtctgtaatacgttgagtatgtaaaagaaagagttacatacttagtttctaaacttttctccttttcagtgcatccagaaattgcaagctgaagtaaaagcttcccaggagcaacttatagcccaggtaagtgttttcctccttttttcatccctttatttatgtcattgttagcttggaaatgaacagaacatggaaagaagttataaatgagtttcgtctggagcaaaccaaatcacaaggctaaaaatgagtatttttactgcgtctacacagtttcttttcatacataaaattctgatttttgtggatgaccaaaattccaaactgagctcttatatataatcagatggtctaatcaggtgctatcaga

SEQ ID NO: 269515 - DNA, 484 bp, Homo sapiens
catgtgccaactggactctctctccagggactcagcacattaaattcaggtgaggaaagagagaaaaaacagttggagctggtacattctaccagggatacccaggcatcatggtgaagtagcttatgctgcttgaaccagaactgtcctagatcctctccatttctgagtgtgtttcctactgattttaggaggtacccccaaaccctccaataaattctctttttctttaagctagccagaatcagaatcagttgtttataactgagaacccatcattcttcttttatcccagtagttctgaaaatgtggctcctgaaccagaaacattagcatcacctaggactttgaaatgcagattttgaggactcatctcattctgctaaagtcwgaaattctgggaaaaggatgcagagttttaaaagtcctgtaggtgattgtgatggtggtaaaatctgaggtgtactgcactgtccagtgaagc

SEQ ID NO: 269516 - DNA, 484 bp, Homo sapiens
catgtgccaactggactctctctccagggactcagcacattaaattcaggtgaggaaagagagaaaaaacagttggagctggtacattctaccagggatacccaggcatcatggtgaagtagcttatgctgcttgaaccagaactgtcctagatcctctccatttctgagtgtgtttcctactgattttaggaggtacccccaaaccctccaataaattctctttttctttaagctagccagaatcagaatcagttgtttataactgagaacccatcattcttcttttatcccagtagttctgaaaatgtggctcctgaaccagaaacattagcatcacctaggactttgaaatgcagattttgaggactcatctcattctgctaaagtcagaaattctgggaaaaggatgcagagttttamaagtcctgtaggtgattgtgatggtggtaaaatctgaggtgtactgcactgtccagtgaagc

SEQ ID NO: 269517 - DNA, 472 bp, Homo sapiens
cttgtgatctaaaagtaaaccaaaaccttcctgaatgttagcttattattttctccttaacattgtcataggctaaagatgtgccccctcaaattctaataatttttttttttttttttttttttttgagacagagtctcactctgtcgcccagactggaatgcagtggtgcgatctcagctcactgcaacctccgcctcctgggttcaagtgattctcctgcctcagcytcccgagtagctgggattacaggcacatgccaccatgcctggctaatttttttgtgtttttattagagatggagttttaccatattggccaggctggtcttgaactcctgaccttgtgatccgcccgccttagcctccgaaagtgctgaggttacacgtgtgacccaccgcacacggccctaataattcttaagttgtagaagcaagttactcttttgaagtgccatgtgttagcttgcctt

SEQ ID NO: 269518 - DNA, 569 bp, Homo sapiens
atcagggaggagaatgggtatggggggatacaggcttagctgctttcctgactgtattgacccctccttgctgtgaacaaaactctgtgtggctgggtttgtctcctgtagatatatagagggcacatgcttgggtaatatttccccagagaaagctcaacttttgtcatttctccgaccaggggagctgaccacactcacwgccctagaccgagaaaggaaggatgtgttcaaccttgttgccaaggcgacggatggaggtggccgatcgtgccaggcagacatcaccctccatgtggaggatgtgaatgacaatgccccgcggttcttccccagccactgtgctgtggctgtcttcgacaacaccacagtgaagacccctgtggctgtagtatttgcccgggatcccgaccaaggtgagtctgagaaggattgaggccatttccaatgatctcctgggtcaccttgggcaagggtttggtcccctttgtgtctctctaggactggtaagggcggtgcctccttgttgagtctggggacacttaaaagtaaaaagtatttatcctcaa

SEQ ID NO: 269519 - DNA, 550 bp, Homo sapiens
ttttctgaagagtgaagttgaacccttttcaatattttacattttaactccatattttcattggagttaattctttttcttttaaaatttacwaggtaaattgcattcattcaaacatatttgttccatattgtaccaattatagcttatgctaccacaaagtgttctattctgattgtatatacatacctgcatgtatacatacatatatataactcattaatgtgatatatatatatcacatatatatatgtatgtgtgtatgtatatatatatgtatataacctgtccaattttcctgagtcaaattttataattcagatagggtaaaaaaaatgctctcagcatcagaatagccaggtcaacacaggaaaatgatgatgataaaagtgggatcaaaacaccctgctctgtttgacaccagcagggtaaaattaagatttcctagagaaagtgagttttagcttggcattgaaggaggtgagatattcgagggatgtaggggttctagggagggcaaacagtcaacacaaaggcagggtggctggac

SEQ ID NO: 269520 - DNA, 573 bp, Homo sapiens
ctgcagaggcagggagcccttgctggaatctggggcttaagcaaccctggacaaggctgcctgcttccctcctggagtccccacatccactccaaacatcctggcaccccttaattttcccttattctcttgaagagagagagaactaggaaaccgtctcacttctttcctactagccacagaagactcaaagtcaggttcacagaaactcaccgaagggcctcagaggccacccaggtcagcctgtgtctcacacagattcctccccatggctcccctggaatggtgctctctacctccccaaacagctgccttatcattgagcaatattttttaaaatttaccatggagattttgaacatattaaaaaatagaatagtacaatgrgccctgtgttcccaccacccagcttcagtaatcatctgcagagaccagcctggtttcctctttaccctttggcccctacatccatccaaccgcagacactgtgtcatttcacttgtaaggacatcagtgtgtatctctgtataataagaactccttttctaaacaaaaccacaataccttatcaca

SEQ ID NO: 269521 - DNA, 543 bp, Homo sapiens
tgcagacaacatggttgtctaaatagaaaatctcaagaaatctaaccaaaaactcctagaattatcgagtacagaaaggtcacaggatacaagattaaaatacacaaatcagttatatttctatatactaccaatggacacacagaaactggaataaaaaataccatttataattgctccaaagaaaattaaatacttaagtataaatctaacamaacacaggatctgataaatggttaaaataacaaatagtgtcaggaaggatcacctaggtcagaagttcaagaccagcctgaccaacatggcaaagccccctctctactaaaagtacaaaaatcagctaggcgtggtggcatgcacctgtagtcccagctactcgagaggctgagacaggagaatcgcttgaacccaggaggcaggggttgcagtgagctgagatggtgccactgcactccagcctgggtgacagagtgagactgtgtctcaaaaaacaaacaaacaaacaccacaaatagtggtaacaccaaaggctggcaaagttgc

SEQ ID NO: 269522 - DNA, 589 bp, Homo sapiens
ttaagccttaagtgtgttttcccactcagtgacaaaaaggtaagggaaggggtgtcatctcttccattgtcctgtcctgaaattaatctccacatttcaagaaaattaagtgttacctgttgtgtccggtttcttcagagaaacaaagccagtaggagatatatatatacacacacacacacatatgtgaacacagatacacatagagagactgagagagagacaaatcaaggaactggctcccatgaccgtatgagycggcaagtctgcgagtcatagggcaggcctgtaggcaggagctgatgctgcagtctggaggcagaatttcttctccaaggaaacctcagctttgttctaaaggcctttatactgattggatgtggcccacccacaatattgagaaaacctcttttacttaaaggcaactgattatagatgttaaccacatttacaaaataccttcgcagcaacacctggattagtgtttgactgaattataagttgacacatataaaactggctgtcatgtgggctcatctgctatgcaaggagagggctgaaaattcttactcaagttttcgagagaagc

SEQ ID NO: 269523 - DNA, 568 bp, Homo sapiens
agttaagaccaactatgtggataactggttgaatgtttttgcaaagccatacccagtatttgagtggaggagtgggtaaaatcaactcacctgagtctgcctagttgcactcaggtaaattcaatatccacctttctcattctggacccaggctcttaaccactatttttatagcagtcatcttaatgttattcttattgtataacatacctacccatcccaaaggtagaatcagaggaaacaaggtgggatttcttcctgtctctttttagaattatatgttgaatcaaggtttccaagtctttcccttagcataaaccatgctgattctgaaacccagtgatgatactttttatttcctttgttttatttcacttaccatcttctctgtctcaayatgctgtgcaataagcaatgttaaaggaaagaaaaaaggaaaccctttttagagtctgttataacaccctgatgcttggaatttcagagaagacccttgtagaaggtaaggcaggaatgccctttttttctatttttgaggtaaaaatctttgcaaaagattttatttttt

SEQ ID NO: 269524 - DNA, 593 bp, Homo sapiens
aacattctttgatatttttcctgctctttacgggttgagaggatggtattactcccagtatcgaagaaagtgtacacgccccctgtgatactgttccttatatctaagttaaaaaagaatgatattaccttcagtatcgcagggggtggggtgtacactccgcctgtgatattatttctaatatcaaggggaagagagaataatgttactcccaacagcgcaagggatgtacacaaatggtgatattgttcctaatatccagggaaggagatgatgatattactggccatatcgcaggaagtgtacacccttctgtaatattgtttctaacattcagtgggggagagaataaaattgatcccaatatcgcagaaggtgtacagacccctttgatagagtttttaatgtacagggaaaaakaataatattatgcccaatgtcgcaggggttgtaacccccccgccccccactgtatattcttcctaataggcagcatagtagaggtttatattactaccaatatcgcagaaggtgcacacacacctgtgatatacttcctaatatccagcgggaaagaggctgctattactttc

SEQ ID NO: 269525 - DNA, 593 bp, Homo sapiens
aacattctttgatatttttcctgctctttacgggttgagaggatggtattactcccagtatcgaagaaagtgtacacgccccctgtgatactgttccttatatctaagttaaaaaagaatgatattaccttcagtatcgcagggggtggggtgtacactccgcctgtgatattatttctaatatcaaggggaagagagaataatgttactcccaacagcgcaagggatgtacacaaatggtgatattgttcctaatatccagggaaggagatgatgatattactggccatatcgcaggaagtgtacacccttctgtaatattgtttctaacattcagtgggggagagaataaaattgatcccaatatcgcagaaggtgtacagacccctttgatagagtttttaatgtacagggaaaaataataatattatgcccaatgtcgcaggggttgtaacccccccgccccccactgtatattcttcctaataggcagcatagtagaggyttatattactaccaatatcgcagaaggtgcacacacacctgtgatatacttcctaatatccagcgggaaagaggctgctattactttc

SEQ ID NO: 269526 - DNA, 579 bp, Homo sapiens
aaaggttggtattagggaactakttcccagttaataatctgataatcggccaggtcagggtagactctgaaaactccctgtgtccctgcaagacaaatttctcctccttttacatttcatatgctttggattttcattttcatggatggtagctgtcctcttcacatctcaaaatgatgcttaggtaacactgcagacctagtgcctggagatcaggaagggctggggggttggtaaaagagagtcctacagctctactgggctcttcagcagaatggaaaggacatgtctccattttcctgcgagagaaaggtagatttctttctgaatatgaaaaaaaaaatctaatttggttatccacatgggagagaaaatgaaaaataattttaaactggattgtgtatgttaggtgcaatgaagaagatactaaacgaccacccagtggttccatctgcttcccccttccacagacacacacaaaaatggttccctgtttgcatattatcttcccactaaaaatcacttggtccgtggtgaacaaaattgtgtgcacatcagaatgaaattctgaaacatgga

SEQ ID NO: 269527 - DNA, 484 bp, Homo sapiens
actctctttgctctctatttaatgattcttgctaaagtccataaggcactttgccagcagttggtttttagtatgaaaagtagcatttccttaatgagtctgagtctgccttccaaatgaagggtttacttacattttcctaatgggaaaacgagcttttcttctacacttccttaggggtttcataagttctttttcaataactcatccttaacactttctccaattctgcctgtaatcaatattcccttcacatgtaaagagctcaggaggaaatcaactattttttwaaaaatacgcaataaggaaattctgctactcttagaaatagcaggagctaacattcattctttgcatatcatgtgctaggcattgtgccaattaccttatatacattgtctcattatatgtatccatgaccatatatgtgctaagcatgaaattttcttaagccagatagctgagtagaattttaaaatattat

SEQ ID NO: 269528 - DNA, 546 bp, Homo sapiens
aacacttctttttaatgcttacaaccttttttwaaaaatctactttattttctctatctgaatgcactagattttgtttgtttgtttttgtggttggttggtatggttttgcttattgaggttttcaggctgatttagaaaaaagaaatttttacaggagagagtggacttgtttacaattcagagttgaggcaacaaaaaaaaatcttgcagtcattatgagtaatatgtgtatccaagtttatacaaagaatgtaaaggtgataaagttggcttagttaaatcaagagacagccttcttctagaatattatagctaagaaaatttggacttaagtttaaaaagctgctctaaagagttcatcaatgccctgagtttgcagagagttcaattattgcattattctttggacttgctgaaaactcagtgttctacttttatttggcaacaccatctcctaggatatgtggctgtttccagttttccagcatcttcagtgacagaggcaatgggatcctttaaaatgttgggccaagaaaattggcc

SEQ ID NO: 269529 - DNA, 580 bp, Homo sapiens
gggctaataatagtatctgtctcatagtttttgtgagaataaaaaaattgtccaggtaaaatgcttagctggtgactggcacacagtaattgctcaataaatgttagctattattgctatcattatataatcatcatggtttccaatgcctttacttggcaaataaaagaacaaaagtcacccgatattgatctcccttttcttccctagttttctggggggtgggaggcagagaccgaattttctgatctgtgaaatctgaatttatcattgtaattttccataagtgctatgtagagaactcatttaagttgctgggatgaaaaaaaatcaaaagtggcctattgtgctgggtgcagtggttcacgcctgcaatcccagcactttgggaggccgaggggggtggatcgcctgaggtcaggagttcaagaccagcctggccaacatggtgaaaccttgactctactaaaaatacaaaaattagcctggcatgrtggtgggcacctgtaatcccagctactcaggaggctgaggcaggagaatcccttgaacccaggaggtggaggattcagtgagccga

SEQ ID NO: 269530 - DNA, 337 bp, Homo sapiens
ttattaggcagttttcctaactctgcttctacaagtgtttccttatcacttcctgaatactcattgtgtctttttccctcaatcacccrggaggaacctgtcctgaagggatttagatcccctgttaggaaacctgctgggttaagggaattttcagtggttaatgttaaatcatctttttctaacagaatagccccatactttaagatttttcagttagtaagctacattttcactttttatatattttttgacttagggtagttctgaactggtgaggtgtgctcacaatgaggtttcctctaaaagttacttttctacttccttctgttagcaa

SEQ ID NO: 269531 - DNA, 337 bp, Homo sapiens
ttattaggcagttttcctaactctgcttctacaagtgtttccttatcacttcctgaatactcattgtgtctttttccctcaatcacccgggaggaacctgtcctgaagggatttagatcccctgttaggaaacctgctgggttaagggaattttcagtggttaatgttaaatcatctttttctaacagaatagccccatactttaagatttttsagttagtaagctacattttcactttttatatattttttgacttagggtagttctgaactggtgaggtgtgctcacaatgaggtttcctctaaaagttacttttctacttccttctgttagcaa

SEQ ID NO: 269532 - DNA, 582 bp, Homo sapiens
ggccgcagctagaagcaacactatagaagtttattgctrgcaagagccacatactcagaatgtccaaacaggggtttaggtctccacacttaaatatgagcagacaaccaaggattctcaggcttttggggaagccctctaatatgactgatagagactaaaacaaatgaacagggaaaaagttagcaaaaagtataagaaaggtaagagaaagctatgaaaaccaaaaaacaaataaccagacaaaaaacaaacaaacaaaatagataccaagaaaatagctttcggagagcaaaaatttgctttgggaaaaaaattacagcatgaatggaaaaatccaaagaagatttagaagatatatttaaagaaaatttccagaataatgagcaaacaaagatataaaataagggtaaatataagaacatttaatggccaggtgagaagttctagtttctaaataataggtatagaaagagagaaagagaaaatggaagggggcaataattattacatattttaagaaaaagagtccagaattgaagaacataagttttcagattaaaggagcctattaaatgccca

SEQ ID NO: 269533 - DNA, 419 bp, Homo sapiens
gtcctgggactgagtcccaagcttcttatgtttttccatcagtgcctaggaaagtcctgggyacacagatactcaatgaatgtttgttggtttgacttgccagcaaagccgtggctcctagggaagtgacttcagcttctttatcttcttggtgtgactatcttaaaagggagtaagtgagcctttctttgtaactgactgtatttgagaatgcagcatgacagacaaaacattcatctcattcatggagaattgtaaaatccagcagaagagctctctttttaaccagtgcttacaatttgtcctttttcacccttccttggcaaatcacgcaatattccttcttaaaaatgggtaaagtgccagccgaacttagaagagggactgattctatctctattctgaccaggtatacggta

SEQ ID NO: 269534 - DNA, 591 bp, Homo sapiens
gtaaactttaaggcttttctctctaccctaaaggagatgaagatttcagaatcattttcagattctaccagctgtatgcccagtaatagttatcttgtttatggaagagttacttattttcatgtgggaaagaagtcayccgatttctatttgtttcctcatttgtctaatgtttttatcttaagaaaaatacatattcagtttaattttttttgcaagaaacttctgtattcaaaccctgattactagtttctcaatggagacatactttaagagaataatatttcatataaaacttgcattttaaaatcattttctgtttactttttcaggcattatacagacctctaaagaaatttcaaaaacatggacatcatatttagtgtttttccagtccttaaagtcctttttggttatatcatgtatggttgtaaacagaaattctttgcacagtattattcagcttgacagttcagtcatgtctatttcagtcactcaaagcaggattaaggatgttacttgttattggaatattcctgacatggaggcagctattttcaccaaaatgctgtcttaaaagcccaaaaagca

SEQ ID NO: 269535 - DNA, 591 bp, Homo sapiens
gtaaactttaaggcttttctctctaccctaaaggagatgaagatttcagaatcattttcagattctaccagctgtatgcccagtaatagttatcttgtttatggaagagttacttattttcatgtgggaaagaagtcacccgatttctatttgtttcctcatttgtctaatgtttttatcttaagaaaaatacatattcagtttaattttttttgcaagaaacttctgtattcaaaccctgattactagtttctcaatggagacrtactttaagagaataatatttcatataaaacttgcattttaaaatcattttctgtttactttttcaggcattatacagacctctaaagaaatttcaaaaacatggacatcatatttagtgtttttccagtccttaaagtcctttttggttatatcatgtatggttgtaaacagaaattctttgcacagtattattcagcttgacagttcagtcatgtctatttcagtcactcaaagcaggattaaggatgttacttgttattggaatattcctgacatggaggcagctattttcaccaaaatgctgtcttaaaagcccaaaaagca

SEQ ID NO: 269536 - DNA, 538 bp, Homo sapiens
ccaaagcaagactaagcaaaaagatcaaatctggaggcatcacactacctgatttcaaaytataccataagcccacagtcaccaaaacagcatggtactggtacaaaaataggcacatagaccaatggaacagaatagagaacacagaaataaactcaaatacttacagccaactgatctttgataaagcaaatgaaaacataaagtgggaaaaggacacccttttcaacaaatggtgctgggataattgaatagccacaagtaggagaatgaaactggatcgtcatctctcaccttatacaaaaatcaactgaagatggattaaggacttaaacctaagacctgaaactataaaaattctagaagataacattggaaaaacccttctagacattggcttaagcaagggtttcatgaccaagaacccaaaagcaaatgcaataaaaacaaagataaattgctggtacctaattaaactaaagagcttttgcatggcaaacggaagtcagcaaacagcccacagagtggaagaaaatct

SEQ ID NO: 269537 - DNA, 538 bp, Homo sapiens
ccaaagcaagactaagcaaaaagatcaaatctggaggcatcacactacctgatttcaaattataccataagcccacagtcaccaaaacagcatggtactggtacaaaaataggcacatagaccaatggaacagaatagagaacacagaaataaactcaaatacttacagccaactgatctttgataaagcaaatgaaaacataaagtgggaaaaggacacccttttcarcaaatggtgctgggataattgaatagccacaagtaggagaatgaaactggatcgtcatctctcaccttatacaaaaatcaactgaagatggattaaggacttaaacctaagacctgaaactataaaaattctagaagataacattggaaaaacccttctagacattggcttaagcaagggtttcatgaccaagaacccaaaagcaaatgcaataaaaacaaagataaattgctggtacctaattaaactaaagagcttttgcatggcaaacggaagtcagcaaacagcccacagagtggaagaaaatct

SEQ ID NO: 269538 - DNA, 539 bp, Homo sapiens
tgagtctatttgcctcttaaagacacatcaggacaagtggactgattgtcagtatttattacaamcatgacattagaaaatattaattcggattcattaagagctaattatgttcactagggaaaatggagcagaaaacacaaataaaaaactaaaagcaatcataattccaaaccagctgctacaactaccataacattttcttgtatctctttccactcttttactttgcaggtatgttttcatgatcattgagtttttttaatgggtggtgcatgtgtgtgttagtatatattttatgtatataagtatataagtttataagtatacaagtatgcttatattttaaacatctttcaatgatagtataagctttttctctttaaaatttattattacaaatacaattattctggacatacaaaaagataccaagagctgtataacaaacatgaggtatccaccaccatttaagaacaaatgtcatgaccaatcccgttgaatctcttctctgacttgcaaaagtaactacaaatcta

SEQ ID NO: 269539 - DNA, 539 bp, Homo sapiens
tgagtctatttgcctcttaaagacacatcaggacaagtggactgattgtcagtatttattacaaacatgacattagaaaatattaattcrgattcattaagagctaattatgttcactagggaaaatggagcagaaaacacaaataaaaaactaaaagcaatcataattccaaaccagctgctacaactaccataacattttcttgtatctctttccactcttttactttgcaggtatgttttcatgatcattgagtttttttaatgggtggtgcatgtgtgtgttagtatatattttatgtatataagtatataagtttataagtatacaagtatgcttatattttaaacatctttcaatgatagtataagctttttctctttaaaatttattattacaaatacaattattctggacatacaaaaagataccaagagctgtataacaaacatgaggtatccaccaccatttaagaacaaatgtcatgaccaatcccgttgaatctcttctctgacttgcaaaagtaactacaaatcta

SEQ ID NO: 269540 - DNA, 567 bp, Homo sapiens
gaaagtaaaaaaaaaaatcttaaacttttttttaaacagttaaatggagtatccatttagaatttgtcaggtgcaaagctatcacragaagttattacattctttcagtaaaaggcttacttatggataatgacgacctttgtttgaataacacttcaacatttggaaactctttggctgtataatctaaatctgccatgaggcaaacatgacacaattagcctataagagacggttaatgtgtgaagcagggaggtaagacttggtttttgccttcaaggagttcatagcctgctgatagagacagaggcacaaagttttataattataaaggtacttttggaatgtggtgttgcagagaaagggaccaatgctactatgtggtggggagagggaagctttgcagggggtgtgtgtctcatagggtgagtaatgcttgggagatagaagaaaaaaaggacattccagacagagaagcacattcctaaaggcaaaaaaaaaaaaatgttgaagtgatgggaacatattcgaagaacaatagaaaatgattgtggctgcaaattactt

SEQ ID NO: 269541 - DNA, 535 bp, Homo sapiens
attctttcagtaaaaggcttacttatggataatgacgacctttgtttgaataacacttcaacatttggaaactctytggctgtataatctaaatctgccatgaggcaaacatgacacaattagcctataagagacggttaatgtgtgaagcagggaggtaagacttggtttttgccttcaaggagttcatagcctgctgatagagacagaggcacaaagttttataattataaaggtacttttggaatgtggtgttgcagagaaagggaccaatgctactatgtggtggggagagggaagctttgcagggggtgtgtgtctcatagggtgagtaatgcttgggagatagaagaaaaaaaggacattccagacagagaagcacattcctaaaggcaaaaaaaaaaaaatgttgaagtgatgggaacatattcgaagaacaatagaaaatgattgtggctgcaaattacttgacatttctcttgttcagaggtgcagtctgtgtccccgtccttgactctgagaatccctgtgatca

SEQ ID NO: 269542 - DNA, 524 bp, Homo sapiens
ctctctttagaacacaattagcttctagctaaaacaggatctcccaaattgcaattcctaagaccccaataaatgccttctcttaccaaattgcagtctggtttttcgcttcttcttggctgacagtctgaattctcacgccaccacttactgatggtgtgtgtgacttttggcatgctatttaacttctttgtgactcagtttttacttatgcaaaaaggatcagaattatagttctatctcatcaacatgttgtgaagagcaaataagaatgcaaayaggggctgggtgtggtggctcacacctgtaaccccagcactttggaaggctgaggagggcagatgcctgagcccaggagtttgagaccagcctgggcaacatggcaaaaccccatctctacaaaaaaatataaaaattatctggatgtggtgatgtgtgcctgtagtcccacctgcttgggaggctgaggtaggaggattgcttgaatctgggaggtcaaggctgcagtgaggtttgatcccacc

SEQ ID NO: 269543 - DNA, 522 bp, Homo sapiens
tattggggatgggacccaggtgtaaacatttatttatgttttatatataccttatacacctaggctctaggctataaatttatttttcccttggggtcgctgaataaactgtgtattgtgcacctacattttgactgtgacctgtcacatgaggtcaggtgtggaatttttcacttgtggtgtcatgtccatgctcaaaaagtttcagactttggagcatgttggattttgtrtttttggattagggatgctcaggctgaaatatgcatactagttgctagatcttgtgcaactactaacttctaggcactttacattcaacttagttcttccagttgtttgggcagaaaccttgaagtcatatttgattctttttttccacactcaacataaacctatatgcaactcctataacctctacctttaaaatatacccagaatctgacaacttcttttttttaaattaatttaatttaaagttccgggatacttacgcaggatgttcaggtttgttacgtaggt

SEQ ID NO: 269544 - DNA, 522 bp, Homo sapiens
tattggggatgggacccaggtgtaaacatttatttatgttttatatataccttatacacctaggctctaggctataaatttatttttcccttggggtcgctgaataaactgtgtattgtgcacctacattttgactgtgacctgtcacatgaggtcaggtgtggaatttttcacttgtggtgtcatgtccatgctcaaaaagtttcagactttggagcatgttggattttgtgtttttggattagggatgctcaggctgaaatatgcatactagttgctagatcttgtgcaactactaacttctaggcactttacattcaacttagttcttccagttgtttgggcagaaaccttgaagtcatatttgattctttttttccacactcaacataaacctatatgcaactcctatarcctctacctttaaaatatacccagaatctgacaacttcttttttttaaattaatttaatttaaagttccgggatacttacgcaggatgttcaggtttgttacgtaggt

SEQ ID NO: 269545 - DNA, 632 bp, Homo sapiens
cataagacattaatcagctttttggaacattctaagtgttcagaaactagtagctattatctaattatcattattatcatcatcactatcttttaagacccctgttaaaactcctttttttgtaagacccctttgccaaatacaacttcctccctcaaaatgctttcttacattttgtcccacgcctgaaacttggacatacttctaatatggctctcatactgaatcataaatattttttgcatatctgttccctctctgaaagcttctaaagaaagggaaccacaytgcattcatctttgtattctcagtggctaccagtgcctgacacacgggagatacgaaaataaatattagctgaatgaatcaataattgaaggagttctttaaaagccaagcaaaaaccaaataccaatcaatcaaatcatatttaactgcactaaggaaatttactattcagagaaatcataagaaaaattaaagaaccgaatgaaatcgtgaaaagcacgtggatttgggagtcaggcttgtctgagttagaaccccagctgttcctcttccaaactccatgacctagatcaagttattcaaccttcaagagcctttgcaccttcatctttaggtaaggtgag

SEQ ID NO: 269546 - DNA, 541 bp, Homo sapiens
acccagctagcaaagattgaatttttgttctcatccaccagaaaactcctaagacaccataaaaatatataacataaactttggatttgctcttaagataattgattctctcgacctagccttcctgaggacggacagaggcccagccacatgctacggggagcatccctatgcctggctcatagtaagtacttaatgcatgttaatttttaacctcyctttcccttaaaaagaagaaaccttgcttctccaaatgtaccttagttcctgcctacagagaaatgcaccatttccattctgggcctcaatagctaagtagcatccagggaaagtaggaatctcaaacctctgtcacagtacttgctggaaactagattagcaacagtgtgcctaatccagtttccaagaagtactgcaacagaggcttgagattcccttttttctctttttattcatgcatttcctattttctcaagcagttagaaaaggaaagaagatgttctgctagaaaaatctccattcacatccagcaaatttcatc

SEQ ID NO: 269547 - DNA, 520 bp, Homo sapiens
tatttcaagctatcaatgtgagtcgctgaatgtgaagttgcagagatatgcaccgtcagctcctgtgacctggcacaggctggctccagccaaccacctgtctgtcaacacagagactatggcaacctctagagaggagtggcagctccttcactttcaccttcctcgtctttagcacattccttttttggccagctctaactcagaagagggttctaggaatcttatttctggtttaacaagttatttttggcttcatggagaacaaactgccattattagtatttttaatttatttggtggttattgccctcatcagctttactatttggacattttacatgtttccaaacatgtacccttttcatctagrattcaaatttgctggcatatagttttccacagcatttttatatttttaatacttactaaaattatttacccactttaattataatatatacattttaaattctttttcttgatatgtcttgccaaaaggttgcagttgtattaaata

SEQ ID NO: 269548 - DNA, 587 bp, Homo sapiens
ttaataccactttgctggcatccatcacaactctgaagtgacctggagactcrgtctgattcagagttggagaaaatggcaatgacttcaagataggaaggctcaatggaatttcacagaaaagcaaatttcacagggcaataaaaataagttgtatttttttttccttttttgaaagcactaggtattctcaaatatttgattttctcttcaggatattatttaaaaataaaaaataagatgagggaaataaacagactattttcactcatttattagatttatacaaagagaaaatcatataattcttgcggtaaggaagacttttttaacagcttaaatgaaaaacatgaagtgggagttggattgactgataattgcagtgcaaaaaatcaagagccctggaggaaggaaagagtgagttagaacataaagtatatcacttgtgtttcaaaacacctaactttttcttttctcactccactcaagtcacagaaaactaaaatgacaaaagccccaaatacgttctcagtccttctcaacctttcagagcatggcacgcatagaattgagaatattctgagatt

SEQ ID NO: 269549 - DNA, 427 bp, Homo sapiens
cagttcctccagtgccccttgcttcttcctgccacagggtctttgcataactttttccacttgcaagtctattctcttttccttcaacctcttccccatttgcctaattaacttctctagatcctctacatctcagttcaaactttctttgcaccagtcacattcgctgacctctgtgaccaggccaaccccgtactaaaaatattcttcctccaagcatttccagttatcactttgcatttcttcctttgatgtttttgatttatgtctacatcccccacccarctgtaagctcctagatgaaaaagacttgttctctttaacctgctcattattcccctagcacctccaagtatagttggcccatcacacagcaggtgcttaataaatatttgatgatttctttaatgagtgagtgaatgaacct

SEQ ID NO: 269550 - DNA, 566 bp, Homo sapiens
atggctaacaaacatatgaaaaaaatgcctaacatcactaatgatcagggaattgcaaatcaacaccgcaatgcaatgccaccttactcctgcaagaatggctataatcaaaaaatcaaaaaataatacatgttggtgtggatgtggtgaaaggggaacacttttacrctgttgatgggaatgtaaactagtacaaccactatggaaaacagtgtggagattccttaaataactaaaagtagaactaccgtttgatccagcaatcccactactggatatctactcagaggaaaagaagtcatgtgaaaaagaaacttgcccaaatggctatcaatcagtgagttcgtaaagaaattgtcacacacacacacacacacacacacacacacacacaccatggaatactactcagccataaaaaggagtgaaataatgacatttgcagcaacctggatggagttagagaccattattgtaagtgaagtaactcaggaatggaaaaccaaacatcatatgttctccctcataagtgggagataagcatttgaatgcaaaggcatacaaat

SEQ ID NO: 269551 - DNA, 581 bp, Homo sapiens
ctactgtaaggtagatgcctaatgatttcctattgaaagtctcatcaaattgtccttgtttgataagaggaatgagcatgagcatttttgtggtggagaaggattctctggtgaaggtttcctgggaatttttctgctacagctttggctaactctctcaaaacagtctcatatgaaacacgttatttttctttggccctccagaaagtcaacaggcaaaatgccttgagcatccaaaaaaaccattgccatgacacttgctctttaccaatctgcttttgcttagcctggaccacttccacctcttggtagccattgctttgattgtgccttgtcttcagaattatacwgttgaagccatgttttatctcctgtaacaattgtttgaagaatcaggctcaggatttcaatcccacttgtttaaaatttccattgaaagctctatttttgtctgcatcgatctggatgcaacagtgttgtcacccatcgagtgaaaactttgctcaacttttaatttttcagtcagaattgtgtcagcagaactcacagatgtctgtgatgttgactattgtttctgctct

SEQ ID NO: 269552 - DNA, 581 bp, Homo sapiens
ctactgtaaggtagatgcctaatgatttcctattgaaagtctcatcaaattgtccttgtttgataagaggaatgagcatgagcatttttgtggtggagaaggattctctggtgaaggtttcctgggaatttttctgctacagctttggctaactctctcaaaacagtctcatatgaaacacgttatttttctttggccctccagaaagtcaacaggcaaaatgccttgagcatccaaaaaaaccattgccatgacacttgctctttaccaatctgcttttgcttagcctggaccacttccacctcttggtagccattgctttgattgtgccttgtcttcagaattatactgttgaagccatgttttatctcctgtwacaattgtttgaagaatcaggctcaggatttcaatcccacttgtttaaaatttccattgaaagctctatttttgtctgcatcgatctggatgcaacagtgttgtcacccatcgagtgaaaactttgctcaacttttaatttttcagtcagaattgtgtcagcagaactcacagatgtctgtgatgttgactattgtttctgctct

SEQ ID NO: 269553 - DNA, 608 bp, Homo sapiens
gcttacataacaaaatatatagactgggtggcttaaataacagaaagttattttctcacagttttcgggggctggaagtccaagaccagagtgtcagcacagtcagcttctgctgagggccctctcttggcttgcagatggccgccctctcacggtgtcctcacatgatggggagaaggagaragcaagctctgtgtactcttttcttatgaggggactaatcccatgaggaagaccccactctcatgacctcatctaaacctgattgcctcccaagggctccatctccaaatactatctcattgggagctggggcatcaacatatggattttggggttggaggggggaatacaattcagtccgtagcagaatgcttttaattaaagttgtttttaacttaatagtgatcttaaaaaattcaatatccaggtgatatggactaggaatgggctaactgtggtagggcccacaagcacgttagcaaactctaatttacctgatatacaatggttgatcgccaagacagaaaggtttaacaagcaactgataaaatagccatccactaatatgtaatacaaaaagatattttgtgtgctcaattccttgt

SEQ ID NO: 269554 - DNA, 310 bp, Homo sapiens
tcttcctgcacatgcaaacagagttattcctgagcacgaaatgactggtgacagccatctccaggagaatatatcagaaaactttaaatacagtcaccaaccctrtaattcaaacccaaacgtttaggacctgcagatacagagactaaaaatattttgtattcgtaaattagagcactgaccccataggcacttaggccttctcttaaacttgcacaggctgctggatgagtctctgacaacctccccagcaaccagcctttcttctgccttcatcttcctgcttcagcctgtgtcccaattgtgttag

SEQ ID NO: 269555 - DNA, 534 bp, Homo sapiens
ccagctcaccggcggtcagagtttaaggttatctctcttattccctgaacaattgctgttatcctgttcttttttcaaggtgcccagatttcatattgctcaaacacacatgctgtacagtttgtgcagttaatgcaattattacagggtcctgaggcaacatacatcctcctcagccgatgggattaagagattaaagtaaagacaggcataggaaatcacaagggtattgattggggaagtgataagtgtccatgaaatctttacaatttacttttagagattgcagtaaagacagccataagaaattataaaagtattaatttggggaactaataaatgtccatgaaaacttcacaatccacgttcttctgccatggcttcagccagtccctccatttggggtccctgacttcccgcaacaatatctgcattcctcagcacaaaccctakgtcatagcctatgtacactgcgcctgtcatggaaacaggttaacctgattttctggttttagttactgtcttcaatcccat

SEQ ID NO: 269556 - DNA, 528 bp, Homo sapiens
agaaagtttcatggttctcttagctctcgagttgactgtgggtaacaacatttcttctttcttctccacacattttccttgtctttccttttcaagaaacccacaggggtgttccaccctccaaattacattcttattttcttattaacaacaggtttctaggacccagcctactttcctctcctcttggaaactgccactaacatactgtctctgaatgtcctgtttcttccaatctgctagaatggggtatgtcttctccacctccttctttcatttctgccctgaaagtatgagatacctgcaatggtctaaatgcataaggaaagatagtgtgcatggaaaaataaaagtaggctaatatggctcgcactagagaacagggrcaaaggaagaagctagaggagggagaagggtcagatcatgaatgcatcgaggctctgctgagaagttggattttatcccaaggtcaagggtgagccaatgaagtataatttaagtcaagagggacctggtcacacttttcac

SEQ ID NO: 269557 - DNA, 560 bp, Homo sapiens
tatgggtcaaaaacacgatgcaatcattcattgaacagttattgctagttaccacttgacattcactcaagtagactctacacacaagtcagactacagtcaggtttgagatatgtacaactcaattgcaattgttttcctccaacaccaaaccccaactttgtaggaaaacatcttttcctacaacaaagctaactacttctcctgaaatacttctctgarttgattttgcaattgagaaattatcacattttcctgttacttctgcaaatcaaatattgaggtaatgtaggcataaccacaaggtagcaagcaaacaaaataattcctatccctcctcttagagattttctctggctccatttatatgtggtaaagagcaaaatggacaaaactgttatgattctacttctcttttaagcagatcagtgaaggcaatgagtaatgggtttggcacagttctgcaaaagtatatcgtgtaccagccaaaaaaagtctctctctgcctgtctgtctctttctcttgttttcctgtttaaggttcttaatatcatgccatt

SEQ ID NO: 269558 - DNA, 585 bp, Homo sapiens
atttgaaactttgcatctgaattcgtttccaattctattttaatgatgggtctttgatttttttgtggttgaaatatttattgtaatatttgtggattcacatgcagttttgtaaaatagtacagagagatcccatgtaaattttgttcattttccttgatggtaacattttgtgaggaaataatataatatcacaactaagatgttaatattgatacaatacactgatcttattcaaattttcccatttacatttgtatttgtgtgtgtgttcagttttatacagttacctacatgtaggttaatttatccaccaccacaatcaagaccctgaaagttccaacataagaatctctcctgttagtcttttatattaataatatgctatctcttatataccctamatatctttctcccttcttctcccctgccccataatatgccccccatgtctaaatttttgtcatttcaaaactgctatataaatgaaatcacacagtatatgagcttttaggactggctttttttcccgactcagagtaattacctggaaatttattcaaattgttgatgcataaatagttc

SEQ ID NO: 269559 - DNA, 615 bp, Homo sapiens
tttagctactttatacaagtggaatcatacagtatttgtccctttgtaactggcttactttgcctaagataatgtcttcaaggttaactaatgttgtggtgcatgacagaatgtctttctttttaaggctacataatatgccattgcatgtaaataccacattttctttatccattcaactgtcagtgaatatttggrttgctttcacctcttggctgttatgagtaatcaaccatatgatgaacatgaatgtgtaaatatatcttcaaagttctttgaattcttttggatgtatatgcaaaagtggaattgctgtatcatatgataattctatttttatttttttgagaaactgctaagatattaatgtgtcccctccaaaattcaggcattgaaaaattaatggccaatgtaatggtattaagagatgattaggttatgaacatttctctcctcatgaatggaattaagaccactataaaaaagacaacctctgcagcattggcttccttgcccttttgccttctgccacatgaggacacagcatgtctcctgaaagaatgcattagcgggcgctatcttagaagcagagagcaacactcaccagacaattga

SEQ ID NO: 269560 - DNA, 615 bp, Homo sapiens
tttagctactttatacaagtggaatcatacagtatttgtccctttgtaactggcttactttgcctaagataatgtcttcaaggttaactaatgttgtggtgcatgacagaatgtctttctttttaaggctacataatatgccattgcatgtaaataccacattttctttatccattcaactgtcagtgaatatttgggttgctttcacctcttggctgttatgagtaatcaaccatatgatgaacatgaatgtgtaaatatatcttcaaagttctttgaattcttttggatgtatatgcaaaagtggaattgctgtatcatatgataattctatttttatttttttgagaaactgctaagatattaatgtgtcccctccaaaattcaggcattgaaaaattaayggccaatgtaatggtattaagagatgattaggttatgaacatttctctcctcatgaatggaattaagaccactataaaaaagacaacctctgcagcattggcttccttgcccttttgccttctgccacatgaggacacagcatgtctcctgaaagaatgcattagcgggcgctatcttagaagcagagagcaacactcaccagacaattga

SEQ ID NO: 269561 - DNA, 615 bp, Homo sapiens
tttagctactttatacaagtggaatcatacagtatttgtccctttgtaactggcttactttgcctaagataatgtcttcaaggttaactaatgttgtggtgcatgacagaatgtctttctttttaaggctacataatatgccattgcatgtaaataccacattttctttatccattcaactgtcagtgaatatttgggttgctttcacctcttggctgttatgagtaatcaaccatatgatgaacatgaatgtgtaaatatatcttcaaagttctttgaattcttttggatgtatatgcaaaagtggaattgctgtatcatatgataattctatttttatttttttgagaaactgctaagatattaatgtgtcccctccaaaattcaggcattgaaaaattaatggccaatgtaatggtattaagagatgattaggttatgaacatttctctcctcatgaatggaattaagaccackataaaaaagacaacctctgcagcattggcttccttgcccttttgccttctgccacatgaggacacagcatgtctcctgaaagaatgcattagcgggcgctatcttagaagcagagagcaacactcaccagacaattga

SEQ ID NO: 269562 - DNA, 380 bp, Homo sapiens
gcccatgtcttgggtctctccatatcgccagcatcttgtacaaagttcagtatatgttcacttatttttcttatttatactttctatctktatctgttttgcaaaagaactctgagacagctaacatggtaaatatttatgagattataatcagaatacaggtataacctcaccattacttggcactattatgcaagctctttctttgtatagattatctcatttaatcctctccacagacctaagaggtgggtactattttcagcatttacagatgaagaaacaagatttagaaaagttgagttgcctaaagtgatctaagtaactagtaaagtcagggttcaaacccaggtctttctgacaccaacatcagtgttctt

SEQ ID NO: 269563 - DNA, 609 bp, Homo sapiens
tgggagccactgtgcccggcctatacattcttttagttatggatttgaatacatccataaactatatgttttgaaagaatatatgtttctgagactctagttacatgatcccaaattgttttgcagaagtgttatacaagttccatcggcagcataaaaaagtttgcatttytcaccaactaattttggctattattttttaaaaaagataatgtgaccgttaaagatgatctctaatattagaagaattttcatttcctttctttctagtatgaaaatttttcctaaagggtttacctaactttgctgtgccttttgattcctatagtggatcatagtacaaacttgggaggcaaaattgttcatcggaatgtatagtattccatttctcagctgaataatcttggtcaagttgcttaacttctccataccttataaaatagcaagaataatagtaactaatccagaagactgatactaagattatgttaaaatatataacattattggaaccaatgattagcaaatagaaagcgttcagtaaatgtaaacttttattatttttctgagttaacaatttggtgtccttctctgggcagtgttccttaa

SEQ ID NO: 269564 - DNA, 461 bp, Homo sapiens
gttttgaaagaatatatgtttctgagactctagttacatgatcccaaattgttttgcagaagtgttatacaagttccatcggcagcataaaaaagtttgcatttctcaccaactaattttggctattattttttaaaaaagataatgtgaccgttaaagatgatctctaatattagaagaattttcatttcctttctttctagtatgaaaatttttcctaaagggtttacctaactttgctgtgccttttgattcctatagtggatcatagtacaaacttgggaggcaaaattgttcatyggaatgtatagtattccatttctcagctgaataatcttggtcaagttgcttaacttctccataccttataaaatagcaagaataatagtaactaatccagaagactgatactaagattatgttaaaatatataacattattggaaccaatgattagcaaat

SEQ ID NO: 269565 - DNA, 609 bp, Homo sapiens
tgggagccactgtgcccggcctatacattcttttagttatggatttgaatacatccataaactatatgttttgaaagaatatatgtttctgagactctagttacatgatcccaaattgttttgcagaagtgttatacaagttccatcggcagcataaaaaagtttgcatttctcaccaactaattttggctattattttttaaaaaagataatgtgaccgttaaagatgatctctaatattagaagaattttcatttcctttctttctagtatgaaaatttttcctaaagggtttacctaactttgctgtgccttttgattcctatagtggatcatagtacaaacttgggaggcaaaattgttcatcggaatgtatagtattccatttctcagctgaataatcttggkcaagttgcttaacttctccataccttataaaatagcaagaataatagtaactaatccagaagactgatactaagattatgttaaaatatataacattattggaaccaatgattagcaaatagaaagcgttcagtaaatgtaaacttttattatttttctgagttaacaatttggtgtccttctctgggcagtgttccttaa

SEQ ID NO: 269566 - DNA, 600 bp, Homo sapiens
tatagtattccatttctcagctgaataatcttggtcaagttgcttaacttctccataccttataaaatagcaagaataatagtaactaatccagaagactgatactaagattatgttaaaatatataacattattggaaccaatgattagcaaatagaaagcgttcagtaaatgtaaacttttattatttttctgagttaacaatttggtgtccttctctgggcagtgttccttaagagaatcattgataaactgtgaagaatacagaggagagtgttcaggatgacatgaggtctagatgtgccatgaacagtagataaaagctgatgtagtgttttgacttggtgtgatatggaagtgtaagagatattttcagatatttgaagggatttacacagaagagggaatagataatctcctgatgactccataaggcagagctaggaccaagaagcagayttttgaataatttttaataatgagaatgtagtggacatctttttttcctgtccagtacccatttctcctccgttgggaacaatagaatcctgatttatgtttgagaccagttgtctcccactctaaattcaggtgctctga

SEQ ID NO: 269567 - DNA, 451 bp, Homo sapiens
tagtggacatctttttttcctgtccagtacccatttctcctccgttgggaacaatagaatcctgatttatstttgagaccagttgtctcccactctaaattcaggtgctctgagtgagataaactatttccagtttgggcactttactaaggcctgactaactcattattttatccccttgacactgttagtggctcaggaattgaaacataataattgtcagtccagtgagattcaagttctggattttgctgaagctttgtatctgaagtgggaagcgtaaaaaattggagctgtcagccaccatcttgtcaacatcccagaggagcctgttggagagtgaacccaataacaaaaagcactgtccctgatggtattgtgtgagcccctgaatccagcttcgcatgaatgcacacttggtatcaccagttatgtcaatgtttgaatttca

SEQ ID NO: 269568 - DNA, 451 bp, Homo sapiens
tagtggacatctttttttcctgtccagtacccatttctcctccgttgggaacaatagaatcctgatttatgtttgagaccagttgtctcccactctaaattcaggtgctctgagtgagataaactatttccagtttgggcactttactaaggcctgactaactcattattttatccccttgacactgttagtggctcaggaattgaaacataataattgtcagtccagtgagattcaagttctggattttgctgaagctttgtatctgaagtgggaagcgtraaaaattggagctgtcagccaccatcttgtcaacatcccagaggagcctgttggagagtgaacccaataacaaaaagcactgtccctgatggtattgtgtgagcccctgaatccagcttcgcatgaatgcacacttggtatcaccagttatgtcaatgtttgaatttca

SEQ ID NO: 269569 - DNA, 451 bp, Homo sapiens
tagtggacatctttttttcctgtccagtacccatttctcctccgttgggaacaatagaatcctgatttatgtttgagaccagttgtctcccactctaaattcaggtgctctgagtgagataaactatttccagtttgggcactttactaaggcctgactaactcattattttatccccttgacactgttagtggctcaggaattgaaacataataattgtcagtccagtgagattcaagttctggattttgctgaagctttgtatctgaagtgggaagcgtaaaaaattggagctgtcagccaccatcttgycaacatcccagaggagcctgttggagagtgaacccaataacaaaaagcactgtccctgatggtattgtgtgagcccctgaatccagcttcgcatgaatgcacacttggtatcaccagttatgtcaatgtttgaatttca

SEQ ID NO: 269570 - DNA, 546 bp, Homo sapiens
agtgcttgattaatgtgaatatgacaaatcagaaaaaggtctctgcatcaccaaaagaatgctgaaatgattaatattgctagaatgtgtttcaggaygtcaaaccttgacatggggacccttccccaacttaagagcaatctcagcatgtttgaagcttatttgaatgatgacagtagaaaatgcgggaattttcatgtgattcttaacctgtctttggcaatcagcaactatttgtccagtgtctcaagtcatgtccattaaaacaagaatagagagagtaaaagttgaattcaaggttaaaccctatgttacttctgccatatcaaaaacttagagttaagaaagcaaaactagcaaccagaaaatgcaagttctagttaaatattggcaaagtaaaaatattttttactttgcttacttcccaaggtagttctgggaataaaaaggttatagtggttgtaacactttgcaacaagcagactaatttcgtctattcatgtgttcttttcatttattaatttaacaaatatttactaagtatgg

SEQ ID NO: 269571 - DNA, 612 bp, Homo sapiens
gcacaatttaaaaattgcattatttctggaacgttctatttaatattttcagaacatagttgaccacatgtaagtgaaactgtgatacacaaaaccatggataagggggaactaccttcatttgtgcaaggtactgtacttaatacctaggtaaacattagtgagaaaaacaaattgcctctgctcttttgggtcttccttactagctagtggcatatttatgtcagacgttagtattaatattatgccatgcacaggctatatcctaatctaagaatcatgggtatacatatgaaatacacacatgcataaatatttcaaattctgctcaggggttgttcacttagaaggtaggattggagccaagcagacctatgcttgtaagcaggctctaccacttactagaatgtgacctggaaaatgtaatsaatttatattattctttgaagtgtttatatgtacaacgaggggaaaaataattgcttaatcttagggttgctagaatttaatgacataaattttattaagcactcatttggcatacatagagtcctctataaattatgacttaaaattatatttggttgaaataagccagttgcaaaaagacaa

SEQ ID NO: 269572 - DNA, 612 bp, Homo sapiens
gcacaatttaaaaattgcattatttctggaacgttctatttaatattttcagaacatagttgaccacatgtaagtgaaactgtgatacacaaaaccatggataagggggaactaccttcatttgtgcaaggtactgtacttaatacctaggtaaacattagtgagaaaaacaaattgcctctgctcttttgggtcttccttactagctagtggcatatttatgtcagacgttagtattaatattatgccatgcacaggctatatcctaatctaagaatcatgggtatacatatgaaatacacacatgcataaatatttcaaattctgctcaggggttgttcacttagaaggtaggattggagccaagcagacctatgcttgtaagcaggctctaccacttactagaatgtgacctggaaaatgtaatgaatttatattattctttgaagtstttatatgtacaacgaggggaaaaataattgcttaatcttagggttgctagaatttaatgacataaattttattaagcactcatttggcatacatagagtcctctataaattatgacttaaaattatatttggttgaaataagccagttgcaaaaagacaa

SEQ ID NO: 269573 - DNA, 574 bp, Homo sapiens
gctgcaagctaaagcaactgatttttgtggggggtattgtataaaatataaattctgtttgttcagacttggaaatttgacatgaagatatattcttgagaataataaagtgagcctatcacttcaaagaaacaacatttggtgttaaagataacatttgaaccgaaaaatgagaattttgcaaaccttgtagctgcaatcatgaacttgacagcttctcaatacataaagacttttctgaaaatattggtgatactattaacaaatgtgatttttgatactatataataaaatgtgacgaatagaaaatctttgtaactcagtgaattaatattttccaaatgaacagagcataatgtcataaaatagtatatggggaaaatcttcattaaatgtacaaaataaattaatgtattttaatgtaacaaagtacaaaatgttmattaaaaaggatgcacattcaatattacaactgatatttgagaatctatcacttgagttttggtgtagtatcaacaaaatatctacaattatctgtaaaaggcattaaaatatacaactatttcaaaccaca

SEQ ID NO: 269574 - DNA, 574 bp, Homo sapiens
gctgcaagctaaagcaactgatttttgtggggggtattgtataaaatataaattctgtttgttcagacttggaaatttgacatgaagatatattcttgagaataataaagtgagcctatcacttcaaagaaacaacatttggtgttaaagataacatttgaaccgaaaaatgagaattttgcaaaccttgtagctgcaatcatgaacttgacagcttctcaatacataaagacttttctgaaaatattggtgatactattaacaaatgtgatttttgatactatataataaaatgtgacgaatagaaaatctttgtaactcagtgaattaatattttccaaatgaacagagcataatgtcataaaatagtatatggggaaaatcttcattaaatgtacaaaataaattaatgtattttaatgtaacaaagtacaaaatgttaattaaaaaggaygcacattcaatattacaactgatatttgagaatctatcacttgagttttggtgtagtatcaacaaaatatctacaattatctgtaaaaggcattaaaatatacaactatttcaaaccaca

SEQ ID NO: 269575 - DNA, 574 bp, Homo sapiens
gctgcaagctaaagcaactgatttttgtggggggtattgtataaaatataaattctgtttgttcagacttggaaatttgacatgaagatatattcttgagaataataaagtgagcctatcacttcaaagaaacaacatttggtgttaaagataacatttgaaccgaaaaatgagaattttgcaaaccttgtagctgcaatcatgaacttgacagcttctcaatacataaagacttttctgaaaatattggtgatactattaacaaatgtgatttttgatactatataataaaatgtgacgaatagaaaatctttgtaactcagtgaattaatattttccaaatgaacagagcataatgtcataaaatagtatatggggaaaatcttcattaaatgtacaaaataaattaatgtattttaatgtaacaaagtacaaaatgttaattaaaaaggatgcacattcaatattacaastgatatttgagaatctatcacttgagttttggtgtagtatcaacaaaatatctacaattatctgtaaaaggcattaaaatatacaactatttcaaaccaca

SEQ ID NO: 269576 - DNA, 613 bp, Homo sapiens
atattattagcagccttcttattcaatgcctcatctaaaacaagaatctcttctatgagcctccgacatgttatctcatctatacttaaatatttctagttgttggacacatgccatatcacaaggcagttcatttcatatgttacaatcttttttttttcattatgcacatctaattatacaaaaagtgaatgatcttgcacttctaagatcccagctatgtgtctgctgctgccgttggacagggaccacactttgagaaccacagacctagggtctaaccacagttcctcatacagcttacagggtaacatgttctgagttgcatgcaatggacttgcaacagtgctcgttcagttttgggacttgtctggttggtgaattatgaataaaggctttgttaataggagagcagtggtgtgaataatccaccactgtggataatccaaaagccatttcagcttggttttggaaggtgttcaagctggaatttrgttctgcagcagccctggatttaccttcataaataggtttgctgaggccaatgttaaaactaaacgactgtttcctgaataaacacatgctttccacagtgggggcggcaagccagccg

SEQ ID NO: 269577 - DNA, 613 bp, Homo sapiens
atattattagcagccttcttattcaatgcctcatctaaaacaagaatctcttctatgagcctccgacatgttatctcatctatacttaaatatttctagttgttggacacatgccatatcacaaggcagttcatttcatatgttacaatcttttttttttcattatgcacatctaattatacaaaaagtgaatgatcttgcacttctaagatcccagctatgtgtctgctgctgccgttggacagggaccacactttgagaaccacagacctagggtctaaccacagttcctcatacagcttacagggtaacatgttctgagttgcatgcaatggacttgcaacagtgctcgttcagttttgggacttgtctggttggtgaattatgaataaaggctttgttaataggagagcagtggtgtgaataatccaccactgtggataatccaaaagccatttcagcttggttttggaaggtgttcaagctggaatttggttctgcagcagccctggatttaccttcataaataggtttgctgaggccaatgttaaaaytaaacgactgtttcctgaataaacacatgctttccacagtgggggcggcaagccagccg

SEQ ID NO: 269578 - DNA, 503 bp, Homo sapiens
cttctagacagacaaaagctgaggaatgtcatcaaagatctgtcctacaaaaaatgttaaagttctttaatctgaaataaaaggacattactgaccaacaagrtatcatgtgaaggcagaaaactcactggaaatactaaatatacagaaaaatacagaatattctaataactataactgtggtatgtaaactacttatatcttgagcagaaagactaaaagttaaactatcaaatatcataactacaacagcttttcaagtcatagacagtataagaagatataattagaaacaaaaacctaaaaagcagagggaataaagtctggagtttttattagttttctttttgcttgttagctagtttgttcatttttgtaaataatattaagttgtcatcagtttaaaataatgagttataaaatgtcatttgctatctcatggtaacctcaaatccagaaacctacaacagacatacaaaaaataaaaagcaagaaattaaaac

SEQ ID NO: 269579 - DNA, 503 bp, Homo sapiens
cttctagacagacaaaagctgaggaatgtcatcaaagatctgtcctacaaaaaatgttaaagttctttaatctgaaataaaaggacattactgaccaacaaggyatcatgtgaaggcagaaaactcactggaaatactaaatatacagaaaaatacagaatattctaataactataactgtggtatgtaaactacttatatcttgagcagaaagactaaaagttaaactatcaaatatcataactacaacagcttttcaagtcatagacagtataagaagatataattagaaacaaaaacctaaaaagcagagggaataaagtctggagtttttattagttttctttttgcttgttagctagtttgttcatttttgtaaataatattaagttgtcatcagtttaaaataatgagttataaaatgtcatttgctatctcatggtaacctcaaatccagaaacctacaacagacatacaaaaaataaaaagcaagaaattaaaac

SEQ ID NO: 269580 - DNA, 586 bp, Homo sapiens
attgcaataaaaacaaaattgacaaatggaacctaattaaactacagcatttctctacagcaaaagtcacaatcaacagagtgaacagacaatctacagaatgggagaaaatatttgcgaactgtgcaaaggtttagtatccacaatctttaagaaacttataccaaaaagcaaaaaaaaaaaaacccattaaaaagtgagcaaaggacacaagcagacacttttcaaaagaaaacatacccacaacaaacagacatgtgataaaatgctcaacatcactaatcattagagaaatgcaaatcaaaaccaccatgaggtaccatctcacaccaccagaatggctattattaaaaagtcaaaaaataacatgttmtcaaggttttatagtaaagacaacagttttacactgccattggtaatgtaaattagttcagccactgtggaaagcagtttggtgatttctcaaggaactcaaagcagaattgccatttgacccagcaatcccattattgggtatatattcaaagaaatagaaaccattctaccataaacacacatgcacgtgtatgttcatcatagcactact

SEQ ID NO: 269581 - DNA, 459 bp, Homo sapiens
gaacaacagcttgaataactgtgtgtttctcattagaaaccttagagaccagaagaaaaaaatttaaaaactgctggaaaatgttgatgttcataatgttgggttgaggtctaccattttaggatgtgttttctgtttgttctcgctgatctttatcctctgttttctctttcctgctttcttttggagtacaaaaccataacaaaaagcccagaatcccatatgcagtgaaaatatccttcaggaaagaagattaaatcgagacattctcagatgaaggacacttagaattcatcaccagcaaacctgctctaaaagaaytgctaaaggaaattcttcaaatgaaaccagagggaaacttgaaacttgaaacttcaagaatgtaggaagagtaacagaactggtaaagacctaagtaaatacaatagactgttcttcccttgagctctttaaaatatg

SEQ ID NO: 269582 - DNA, 590 bp, Homo sapiens
cagaactctaggcgcccgacaccctccttgaacaggccgggaaactggggcctaatgagaagaggctgtgcaaggtcacacagcaaggagcaaagcgataaygagaacccaagctccccagcgtcccattctctgctgctttctaccctacctccctagttccaagaatggtcattgattttatagagggaatactgtttcaaccagaacctgggagggtttccactggctacaagcaatagttaggacatagacaaaattctgcaggagagcaagaatcttacagctacatttggagaggtttgccctgtggtggttacttaggacacaaacacacatgagggaaaatacatcaggtgacatgtttggattgaatagcattctttcattttcttgaaggaaaatgtagctatttgagccttgaaatgctagttcttgcattttgcagtgttgtttccagtagcaaaaaactgaaacaatctaaatttcctttggcaaaggaatggataaactgtggtaaagctcaaccttagagtacaatgcagcatttaaaaaataatgaaggttgagaccaggagcttgagaccagc

SEQ ID NO: 269583 - DNA, 398 bp, Homo sapiens
catctggagacagaaagcctgaatttgaatcattgctctgctaatcagtagccacaagacttggggcaagtcatgaatcccactgggtgttggtttctacatctgaaaacagggactgagattttctagctcctggaggttattgggggaatcaaatgaaacagtggaacttaaaatgctttgcaaactgaaagacaccccagaatggggagaggggaacaggagagtcaagtcacgtagaaggcggtgagtcagaaggacggtgcagagccaacatgtytcttgggctgtctgcatcatttaacttgtcaagatggctgttggctttgcccttggcttgggtcaccctgattaacaggtgcctggccagctggaagtttgactctgactaagctgac

SEQ ID NO: 269584 - DNA, 522 bp, Homo sapiens
agaaagcaccagtaggagatttggaaagtaggatggaaaggaaggcagccaaaacatgatgtgttaatgggcaactgagtcatattcccagtggggacctctgggtgacaatgtagcacatgcctcagagttgtccctaccaaggaatattttctaccaacttccatctgttaactgaaggcttctcctgcagatctcagtccctagcacccccagactgccctgagcattggccaagcatgctgagaaagccctgkggcagagtcctgggtgcatgcagcaagaagctggggagtaaaggaaagttgagtccctgtgggtaggagcagggctataagagcagccgacacagctggaatccctggtgcctatagcagtgcctggaacatagctggtgtcaaaaaaacaagttacataaatgaatgcattcattccatttgttttacaaaactttttaaaattatttttttaaagggggaaactttcttcaaaggaaatattatgaacaaagttcaaaatgta

SEQ ID NO: 269585 - DNA, 613 bp, Homo sapiens
tgtctctggttcaccagtgtgaaccccagtggatattagcatgctgtctcagtctattctccaaagctgaaaaccacgagttagtgctgaaaatcaaaggtagcctgggagagttggccagtgagggtgggcaccacccctgggctttggctcagactgagtaagaacctcccctggaagcacctgggaagccctggctgaggactgggacgttcttccccaagactggaggaaaggaagaagcattattgcaaaatcatgacacctcaactgtctccaggaacacaagccattaagtccgatgtcacttgcatcccattgctccagaagcaaacttagtagcygagggggttgtcagcaccatccgttgtcactctcacagaagctgcttttcacagctgccagagggactgtcatcttggacacacatgtgtggaattgagtccccttgtccctgggaagatttgctgggtaaacacatcttgagggggtggtggctgggaacaaaaatcctgaagaaattagaaacacaagtttgtgctacaaagccaagtttgaggtcactaaattagaatgtacactcatggacagggagagagaggtggaaagaaag

SEQ ID NO: 269586 - DNA, 523 bp, Homo sapiens
gcttgcattaaatataaatataataatgtgtccaatgcaacatggttaaaaacccgaggtcagcaaacagctgggctattcaggaaacagctcagtggcccattataactggaagttggggtctatattggtctctaaggctcccataacaaagcaccacaaactcgatgacttaatgcaacagaagtttattctctcatggttccttttggagagcagaagtctaaaaatcaaggggtcagcagggccacacttcctgtggagrctctacaagagattccatcctttgcctcttccagcttctagtgattctaattccttggcttgcagctcctcccctgtgtccttatgtctcaactctccctctcttttattttataaggacaacactccttgagcttagggcccaccctaaatctagaatcatctcatctcaagattcttaacatcttcaaaagccccatttccattaaagtcacattcacaggtactggggtggtggggtggggttaggacttagacg

SEQ ID NO: 269587 - DNA, 473 bp, Homo sapiens
tctctctctctctctctctctctctctctctctctctctgcccttttctcctctgcccctacccattcccatgttctctatatctaccttcattttgtgtatctactacattctcttcttggcatgccaattttctctattgcacatggctcaacatggcagctgtcccaaagacataccccctcacagcttcatgtctgtcagcatctaaatgacagaggmtctgtgtcccaatagagaggaattgattggtcaagtggtcactcctagacctatcagcagtggctgtcaggcagtggggaggaatctactggtacaaaatgtggctgtattaggcatctctttagcaaggattcgaaggctgtcttagagaggagggaagaatctttgggaaggagtatgagtgaatagagtagaaatgctgacatctcttgtacacctttaaataccaatattataaatagatctgagag

SEQ ID NO: 269588 - DNA, 474 bp, Homo sapiens
ctcaatcaacttccctccatgtagcctcaggtgaaactgactgcagcccccaactccagggtgagttctattggtcaaatgctgcctaccagtgattggtcacaacaggcatgtgacccaattctggccaatgagacataagcacrtatttgctaatgggattctacaaaaaaagtttcatttcaaatagagagtctcagaagagacatcattcttcttcctctggacactaacactaacacatctagatgtgatgcctggaagtgatgtagtcatcctgctatcagcctaaggttggagccaatgcacaggatcacaaaacagaaatatggggaatcccaggtccttgatgacaccactgaggcacttatttaaccaaccttgaagacatcctcttccagaacttctttctaaataaagctattacacattcttttttatgccactttgagctggaggtttgatgagctgcaa

SEQ ID NO: 269589 - DNA, 607 bp, Homo sapiens
gggaggggagagagaaatttgggagggtatatttttctctgttgttttagtttattttcactcactaagttttggtggggtaatatacattttaatgggtcaaataatgcagcagtcctctactctaaagaccatgaaaaggtgagggtctccacaaatttaaaaagatgccaaaaggtacactctttctaagccacttacgaaaaactaaatcaataatacgaagccatctgaaaaaaaaagaggagaaaggactcttaaaatgtttgactttctatgaagaacacatgccctattgatacaataaggagtaattagggggacagctccaaagcacagccaactccctggtgagtttccaaagtccagcagcgaagagcaaagttataagtaggtctgagcaaacttgccctgggctttcaccrgatctgaggagcccatgtaattgaaactgagttcatcaaagccctgcttgacctcctccccacttcgcaattgccaccaagaccatggcctgaccagcccactttggcctgcatgatgtagccctcacagccaccctagtctcatctcctgccactcctcccttgcctgggcgcaacaggag

SEQ ID NO: 269590 - DNA, 607 bp, Homo sapiens
gggaggggagagagaaatttgggagggtatatttttctctgttgttttagtttattttcactcactaagttttggtggggtaatatacattttaatgggtcaaataatgcagcagtcctctactctaaagaccatgaaaaggtgagggtctccacaaatttaaaaagatgccaaaaggtacactctttctaagccacttacgaaaaactaaatcaataatacgaagccatctgaaaaaaaaagaggagaaaggactcttaaaatgtttgactttctatgaagaacacatgccctattgatacaataaggagtaattagggggacagctccaaagcacagccaactccctggtgagtttccaaagtccagcagcgaagagcaaagttataagtaggtctgagcaaacttgccctgggctttcaccagatctgaggagcccatgtaattgaaactgagttcatcaaagccctgcttgacctcctccccacttcgcaattgccaccaagaccatggcytgaccagcccactttggcctgcatgatgtagccctcacagccaccctagtctcatctcctgccactcctcccttgcctgggcgcaacaggag

SEQ ID NO: 269591 - DNA, 482 bp, Homo sapiens
cctccccagccttccctttccctttcccttttatggagagtccttagttctgctagatccataagctattccagggaggcagattctttgctttcccctgtaaagctctttgattgtgcctctggtagttaatacaccaaatggtcttcaggggtacttcatacgtgcactccgcagctaatcacagtgccttggcctgctgtttccctacctctgtgttttccacatgttgacaggctcagttcaaacaccaggcccatcagcttctggagagtcacggcaaagctcggctctgatttgggtgtctgcttcagagattttccaaaggatatcctgtagtagataaatcatttcattaggccaggttccctgttcaaaccaggaagcagarggcctgccatgtaggaaaacccagataatattgttatggctgtactcagagcatttgtaaatattgttgtcagtgtctttcacgcaggttc

SEQ ID NO: 269592 - DNA, 601 bp, Homo sapiens
atagaatacacagctctctagagtgattcgccacattttggcattgccacagtgttccctgaacttcaatcactcataacagcaccttcagagtttttgccatttttacctataataatattcacttaatattttatgtatactgactcatttccttttatccctaataaacttatttttgaatgacactttccattcctactatgaatgaaaacccatactacttatctgagataaaagaaagcaacataattaaaagtgaatgtaaacaaaattttaaaaatttactaaattttggctagatactgttgcctaccacagggtactcattgaaaaccaagatgaagcaaatgtgagggaggtgttaaagacagattcccaccaaacaaggactttggcctcatcaggaaaactaaaagaaattttaaataagatgatttmcttatcacctaattcagtgctatttaaagacacctacaggtaccacttaaaagcatccagcagtatgtaggtatacagtgagaagtaccaccaccagcagtatgcagatcaacagtgagaagctgcgagttggctaatataggtatgggaaagctcacat

SEQ ID NO: 269593 - DNA, 635 bp, Homo sapiens
ttgttataacattggtgaaaaaaaaaatgcttttgttacatgttatttcacttaaagtggcagtttccaagaacctatggatgatgataagtgaggtcttactatatatatatatatatatatatatatatatatatatatatatatatatatatggttttacataaaactacagttttatataggtcttactatatatatatatatatatatataggtctttatatatataaagagagagtaatatatatagttatatataaaactatagtttatatatagtaatatatatagttatatatatatatatatatcatcatgcaggagttaagaaactaggatgatttcataggattaatattcactcctctttaccattccttacttcttgtttctctctcttgtgacccagtttctcctagtggtctagcttgggggttcccctaccactttattgaggtataattgacaggtaaaaattgtatatatatttaaggtgtacaaacttaatgatgttttaatatacatcatgaaatgactaacataataaaaccaataacrtattcaccacctcacataattgccttattttatgcatgtggtgagaatacctaaggtctactttcttaacaaat

SEQ ID NO: 269594 - DNA, 498 bp, Homo sapiens
attgtcttcattctatattcaatttgccttataaaattcttcttataaataataagtgcaagaacccataatgattctcattccttgaactgttccttcatttcttattgaactgatgtactcagagtatacttaaaagcccactgtccccacrtagacaataaatattcttggacaaagtttttttttcctcttttaggttgaagacttttcttttatctccttcaaatgttgcagtaggtgttcatgtcaatcaatgtaacactataaatttgcgtggttttttcggtcagtattcattagtggcagcctagggaataactaagagttttccaggttatttgtatgaattttaattaaatacagacagtatatttggataccatctgtatggacatcattcttttttttttttggcatgaagatttacatgaagaaattgtctggtcctactcagctccatggagctgccagacacgcccccacattatgcagtca

SEQ ID NO: 269595 - DNA, 356 bp, Homo sapiens
ggaattggcattaagtttttgttttcttttcttttctccatatttatatctgtggcaatgctgggaactaacaaggctagagagaagagaagaaatgtcttcccttttatatgttcccytttaaattagctaagctgcataatttaaatagacatttaacacctgttcctccctgaatatttacatgaaaatcctgggccttaaatgcttctgagccttgatagaccttaaacttgtcattaatttaacaagtatgtattgattcttatttcgcatagtttgctgctttgtcttagtacataccaaagtgttgatgaaatcctaatgagccacgttccccatgatagaagcagtaa

SEQ ID NO: 269596 - DNA, 356 bp, Homo sapiens
ggaattggcattaagtttttgttttcttttcttttctccatatttatatctgtggcaatgctgggaactaacaaggctagagagaagagaagaaatgtcttcccttttatatgttcccctttaaattagctaagctgcataatttaaatagacatttaacacctgttcctcyctgaatatttacatgaaaatcctgggccttaaatgcttctgagccttgatagaccttaaacttgtcattaatttaacaagtatgtattgattcttatttcgcatagtttgctgctttgtcttagtacataccaaagtgttgatgaaatcctaatgagccacgttccccatgatagaagcagtaa

SEQ ID NO: 269597 - DNA, 395 bp, Homo sapiens
caagccctgtggactaaatcatcatcttagaaatctttttctttcaccttttcatgccaatatacttgatttcaatttttgtggacatatcaaagaaagactaattcttcctttaatgctatgcctaatatgttattctctattctgttctctgtgctttgatgttatccagaagggaaatattaaatgtttatgaactggaccacttctaatatctctccccagaaaatcaagacatagccccattgcrggaaaaaaaaaaaatcgtactcttaagttagacattaaatagatggttttaaaaaaggtctttataaactgacaacttattattaacattattcagatactcttactatatgattccatttatataaagttctaggaaatgcaca

SEQ ID NO: 269598 - DNA, 395 bp, Homo sapiens
caagccctgtggactaaatcatcatcttagaaatctttttctttcaccttttcatgccaatatacttgatttcaatttttgtggacatatcaaagaaagactaattcttcctttaatgctatgcctaatatgttattctctattctgttctctgtgctttgatgttatccagaagggaaatattaaatgtttatgaactggaccacttctaatatctctccccagaaaatcaagacatagccccattgcaggaaaaaaaaaaaatcgtactcttaagttagacattaaatagatggttttaaaaaaggtctttrtaaactgacaacttattattaacattattcagatactcttactatatgattccatttatataaagttctaggaaatgcaca

SEQ ID NO: 269599 - DNA, 596 bp, Homo sapiens
caggtgcccaccactatgcctggctaatttttgcattcttagtagtgatggggtttcaccatgttggccaggctggtctcaaactcatgacctcaggtgatccacctgcctcagcctcccaaagtgctggaattacaggcatgagccaccatgactgggctgtacrttctaattttctaaaatcttctagaaacaccaatagtaattaaaaaaaaactcttaagtaacaaaaaataaagttttccttggtgatttattttaaaaatcaacacttacctagaatgtacactatacctcatgtactaagtgctatacataaattatctcatgtcatctcttcaatgttcttatgagataattattattttccttcttttacaagtgagcaaatttgttagtaagttacttgctcaaaattatatagctagctaatgacagaactaggaatttgaactcaactgtttccaattcagactttacattcgtagtcattaggataatagctaagggtaacccaatcctcaatatacacaaaagtaatgcccttatggttcctgctgggtttcttattaatgtcactttgattttagcttact

SEQ ID NO: 269600 - DNA, 596 bp, Homo sapiens
caggtgcccaccactatgcctggctaatttttgcattcttagtagtgatggggtttcaccatgttggccaggctggtctcaaactcatgacctcaggtgatccacctgcctcagcctcccaaagtgctggaattacaggcatgagccaccatgactgggctgtacattctaattttctaaaatcttctagaaacaccaatagtaattaaaaaaaamctcttaagtaacaaaaaataaagttttccttggtgatttattttaaaaatcaacacttacctagaatgtacactatacctcatgtactaagtgctatacataaattatctcatgtcatctcttcaatgttcttatgagataattattattttccttcttttacaagtgagcaaatttgttagtaagttacttgctcaaaattatatagctagctaatgacagaactaggaatttgaactcaactgtttccaattcagactttacattcgtagtcattaggataatagctaagggtaacccaatcctcaatatacacaaaagtaatgcccttatggttcctgctgggtttcttattaatgtcactttgattttagcttact

SEQ ID NO: 269601 - DNA, 449 bp, Homo sapiens
tatacaacctcagtttttactctttcctcactgatacagcaaatttataaataaaatcaatactgtgaaaaagaaaaagtggataaagtaatttaaaaaggaatgttactgcaaattctattgctattaaaattcttttgtatatattttcattattcaattttacattattcaatcagtgacttcagtaggtgatrttatatcccatggagaactatttcctttaacttactgtgtttattctttattagcaggaattttcaataaacgtgacttcactaggtggcctaaggtaaatttaaatttctcagttctaggttgtaattctagtctaatcactctccagacatgagagatctaaaacttcatggaaagtcaggcacagtggctcatgcctgtaattccagaacttagggaagctgaggcaggaggatcacctgagcccagga

SEQ ID NO: 269602 - DNA, 577 bp, Homo sapiens
tttcattaagttgatcttcaatctctgatatcctttcttttgcttgattgatttggctattgatactcgtgtatgcttcawgaagttctcatgctgtgtttttcatcttcatcaagtcatttatgttcttctctcaactggttattctagttagcagttcctgtaaccttttatcaaggttcttagctttcttgctttgggttagaacatgctcctttggctcagagaagcttgttattacccaccttctgaagcctacttctgtcaatttgtcaaactcattctccatctagttttgtttccttgctgccaaggagttgtgatcctttggaggagaagaggctttctgagctttgaaattttaagcctttttgggctgatttttcctcatctttgtggatttatctacctttggtctttgatgttggagaccttcagatcgagtttttgcgtggtcatcctttctgttgatgttgatactattgctttcgtttgttagtttgccttctaacagtcaggcccctcttctgcaggttggctggagtttgctggaggtccactccagcccctgtctggt

SEQ ID NO: 269603 - DNA, 577 bp, Homo sapiens
tttcattaagttgatcttcaatctctgatatcctttcttttgcttgattgatttggctattgatactcgtgtatgcttcatgaagttctcatgctgtgtttttcatcttcatcaagtcatttatgttcttctctcaactggttattctagttagcagttcctgtaaccttttatcaaggttcttagctttcttgctttgggttagaacatgctcctttggctcagagaagcttgttattacccaccttctgaagcctacttctgtcaatttgtcaaactcattctccatctagttttgtttccttgctgccaaggagttgtgatcctttggaggagaagaggctttctgagctttgaaattttaagcctttttgggctgatttttcctcatctttgtggatttatctacctttggtctttgatgttggagaccttcagatcgagtttttgcgtggtcatcctttctgttgatgttgatactattgctttcgtttrttagtttgccttctaacagtcaggcccctcttctgcaggttggctggagtttgctggaggtccactccagcccctgtctggt

SEQ ID NO: 269604 - DNA, 369 bp, Homo sapiens
catggactgaacctagttcacatgttttctgttctatctttgctgctatggtttttgtcttaatggggcactyagtttacaggtcaccacatttcttataatttctaatatcctatcaccaggtactttacaccagactggactccagacatctgatttttgaaaaaactttactatagaggctaaagttgttaaccattaaatataacaaatctccaataacattccaatgtaaatttggctataatttaagttcttgatcccacatcccatttattagcactaaatatgtgtcactcattgccttacagattgaggatacaaaaaataaaagactaagaatactcctactctaaagatacccctacc

SEQ ID NO: 269605 - DNA, 571 bp, Homo sapiens
agagaaaaaagagagctctcaaattactaagatcagtaataaaagttatatattaatacgaatcttacagaaatttttgaaaattaagagaatactatgaacaattgtatgccaacaaattagattaacyaaataaaacgaatgagtttctggaaacacacaatctaccaaaatttaattatgaataaatagaatatctgactaaacctataactacaagatttaatcagtaatcaaaaccacctattgaagaaaaattcttgatcagatgacttaactattgaattctgccaaacatttaaagaagaattaacaccatttttccccaaatattaaaaaggaacagtctaactctctctgtgagccctgtattaccctgatattaaagataggtaaagagagtacacaaaaaagaaaactacagaccaataacttctatgaatattgatgcaaaaattgctcaacaaaatactagcaaaccatattcagcagcatattaaaaggatcatataccatgaccaagtgggatttattctttgctgcaagaatggttcaccatataaagttcagc

SEQ ID NO: 269606 - DNA, 603 bp, Homo sapiens
gctaaattgaagacactgtcaagcctgagcaatcttgagggactgaatgcaaagtttagttaaaaactaaaagtgcttataatcaaagaatgtcagtgaaataggcatatgatgtatgaaaataacccagaaacctgctcttgytaagaatactaaaattcagaaaggttaattaacatcccccatatcatagagatttggcagaagtagaatggacaccccacatctatctggactcaaagtctgtgttcattctaatctatcacagaaccacaatgtgtatttctcagtagaactttaggtcatttttaaatattgagtggaagattgaagtaaatgttttctaagatgacaatcaaagaatctatgttttgtttttttctgccaaaacatttaataataattgaatctaatccatcaagtagaatagatcaaattttatataaggtaagatttataagtgtcaaaaataaaatgtttatgtttgttatcttcatttcagtgtaatatcagaaaatatgttattaattaaaggtatttcaatctcagtcattcaacaaagattttctgaatggctattaattgctaagcatggttgaaagt

SEQ ID NO: 269607 - DNA, 601 bp, Homo sapiens
tttgagagaaaatagagtacatagctgtctgagaaatgacatttcaaawtaatacattttacaatatatataagcaatggtgggaaaaggaaaatgtatatgaacaagtaaaatgtgaaaacacacaggcacagatatatgtatctccttggattcagagctaagcattctgaaagcaatgaagctgcatttcaataaatgaaataatattatatatatagttggcagcaaaaaatgacagaattaaaatttaccttaaattctcttgcatgtgtattaaatgaaatgcagatgattttatatgctaccatgaatagtaattttttaataaatgtataatgtttatataataaattttacattgaaaatatattcttacagggtttgtgtctttacataaaaatgtatgcatagctatattttggaagaccactgtacgtatgttgggactgcattctagtatgtctatataagagtcattgcttctactgcattctcccacatctccctttcttttattttttgtttcttttttgcttttgcctgattcagtatattgacatttacttattctttaatgttaagatttttaaaacttttc

SEQ ID NO: 269608 - DNA, 627 bp, Homo sapiens
atagaatttacccacaaatgcagatttcaaacttgcttagtgatactaagcaaggatttctcaggcaataaataagcaacagctgcctcctagtagctccctgttcaaatggagatcatgtgttccaaacaaccatagttcttcctctctcttttgtgatggaagtggctcacatcacttacttatattacccactaggctccaagcatttatgtttgcaattcctgaaccaaataagtgcattagatatatatcaaaggtgaacctgattataggggttggtgtgggaagtctcttgaagaacgagagggctaaaggagttttaaagaaatggaacacaaaaaagaaaatggattgttcaatctacacagtgccaactgtttgggaaaacacttggaatcaaataagtgtgcagtgtctttagagatgtaatacaaatatgatgctgaaaggaacattatgtatttagagaatagtaatatgtaaagatggaaaataatgcagaggctagtcttttgtgaaacataaatacccaagtaaggggaatagactacaatcaatggacagtgtgaaaacagtgaaaaatttgagcacagagcraattgcgtgaattatgcatagcattat

SEQ ID NO: 269609 - DNA, 583 bp, Homo sapiens
ggagaaataagtcacaagaatgaatgagttgttccttaccagtttatatttgggccaagttttaaaagttgagcaatttcaaactcaaagaacaaactacaagcttaatctctttcccaactgcctgtggcaaaggcttttgggaggaactgcatgaaatgaaccttgaaatgtcaaaggtagaggatactttccaattcaacttctccacagtgagaccagcgatgataaggtcattttcgtagtaaattagtgactgggctaggactgtaacatgaatttccagatccttaatccattttttttctaccccaccctaacctccaacaattgttacctcctcatggttcatgtctttatatgaccttcttaagaagtgagcagattaaaaaaaaaaagaagaagaagaagaaaacaaaaacaaacaaaaaaaatacgatgactttttaagatagccaagtaccaggagtagatattaggaatttcctmatgttgaaaatttcactttttgtacatcaatgaattacagtgtttgaatgttgtgcttttctttcaggtgtcttcagtcagggaggacaggtca

SEQ ID NO: 269610 - DNA, 525 bp, Homo sapiens
aagatggttaatcatagtgactacaaatcacacttttaatttagaaggaatttttatttataaattagctcctttaattttcactaaaatgctgtggaagagatagctttatccaattcgaaaaacaatgttacatgtcaaaatgagaagacctgctctaggtcaaacaggcctyttaatctaggagtcccaggattaggagctatgttccccttagtagaccacaattaacaacatatgtttacagtcaagcttcatctttaaaaaaataaatgtatattgaatcagaaattcttaagtcaccttcaataaattattgtctaaagagcttcaactgctagaattttgctgagatcctcctattttatgaatagctgttgttattttttgccatctgggtaggcaaagtgaagagatgattagataggtaagtatatagagaaagaagagagagagagaaagacagacagagagagagagagagagtaagattaacttgcataacacatagctaaaaaaggacaa

SEQ ID NO: 269611 - DNA, 548 bp, Homo sapiens
ttcagtgccttgctaagtgctagaaggtattttgtgatggaagaaagtgtattatatatgcaatgattatatatattrgaagatgaagaagagagatgaatcagaaaagcaatactaagcgcatcctagagtttgtaaaatcagaagggaaaaaatacaaaacaaagctgaagatacttattttccaagtttttagcttaaaaaatagatggtgaaaccacattataatatcttaattgtctcttattactccaaaattcacccttagtttttatttaataaatttacttatccatgtaagaaatgatgtattattaggattttcattgattcattacttactttagcaaaagagggaaataaactacctgtttattactagaacactggctaaataaattatgataaacccataaaatgggatactatgcaaccaacgaggggaaacaaataaatatgctctatatgtattgaggtagtgaaatcttcattatattgattgtccttggagaaaacaaagagtagaactctgtgtagagtgtgccacc

SEQ ID NO: 269612 - DNA, 348 bp, Homo sapiens
cagagcaattgaaaattcaagtgagaccctaagtatacatctgaaataatcaacattggaatgatttaaaattgcgtatattgaaaaaaataccaaaaaaacctatgcagaaaacaaaatgtaagcctaattaaaatctttaagagaaccccacattaggaaagtgaataaagaaagaggaattatcaagcaagaaggaaaggatgagaaaaatatacacttctaccaaaaaaaaaaaaaaaaaaggaaaagaagcatagcccaatgcaatactcttatacttagctctamagtgattccatttgcttatttattgttttttagatcctgctcattatggaatataat

SEQ ID NO: 269613 - DNA, 348 bp, Homo sapiens
cagagcaattgaaaattcaagtgagaccctaagtatacatctgaaataatcaacattggaatgatttaaaattgcgtatattgaaaaaaataccaaaaaaacctatgcagaaaacaaaatgtaagcctaattaaaatctttaagagaaccccacattaggaaagtgaataaagaaagaggaattatcaagcaagaaggaaaggatgagaaaaatatacacttctaccaaaaaaaaaaaaaaaaaaggaaaagaagcatagcccaatgcaatactcttatacttagctctacagtsattccatttgcttatttattgttttttagatcctgctcattatggaatataat

SEQ ID NO: 269614 - DNA, 348 bp, Homo sapiens
cagagcaattgaaaattcaagtgagaccctaagtatacatctgaaataatcaacattggaatgatttaaaattgcgtatattgaaaaaaataccaaaaaaacctatgcagaaaacaaaatgtaagcctaattaaaatctttaagagaaccccacattaggaaagtgaataaagaaagaggaattatcaagcaagaaggaaaggatgagaaaaatatacacttctaccaaaaaaaaaaaaaaaaaaggaaaagaagcatagcccaatgcaatactcttatacttagctctacagtgattccatttgyttatttattgttttttagatcctgctcattatggaatataat

SEQ ID NO: 269615 - DNA, 592 bp, Homo sapiens
gttttgcatttgcttgtatgacttttccctgactattgtttgtccaggtagaggaagaattgcctccagaaaattaaaatggaggcagtctgacatatagtaagtgagtagtttgcaaatattttccttgattctgtgggtatcttttcacttcattgattgcttcctttcctgcgcagaagtttttcaacctgatgtggtccatttttgctatgaattktctgtgttagttaggtatttcaacctgatgtggtccatttttgctatggttgtctgtgttagttaggtattactcaagaaatctttgccagtccaatgttcaagagagtttcaacacagttttcttgtagtagtttcattgtttgaggtcttagatttaagtcttcaatccattttgagttgatttttatgtatggtgagagataggattgtggtttcatttttctgtatatggatatccagttttcccagcatcatttattgaagactgtccttttcccagtgtatgttcttggcaccttcaccaaaaatgggttcactgtggacatatggatttatttctgggttctctattctgttccactgattcatg

SEQ ID NO: 269616 - DNA, 592 bp, Homo sapiens
gttttgcatttgcttgtatgacttttccctgactattgtttgtccaggtagaggaagaattgcctccagaaaattaaaatggaggcagtctgacatatagtaagtgagtagtttgcaaatattttccttgattctgtgggtatcttttcacttcattgattgcttcctttcctgcgcagaagtttttcaacctgatgtggtccatttttgctatgaattttctgtgttagttaggtatttcaacctgatgtggtccatttttgctatggttgtctgtgttagttaggtattactcaagaaatctttgccagtccaatgttcaagagagtttcaacacagttttcttgtagtagtttcattgtttgaggtcttagatttaagtcttcaatccattttgagttgatttttatgtatggtgagagataggattgtggtttcatttttctrtatatggatatccagttttcccagcatcatttattgaagactgtccttttcccagtgtatgttcttggcaccttcaccaaaaatgggttcactgtggacatatggatttatttctgggttctctattctgttccactgattcatg

SEQ ID NO: 269617 - DNA, 533 bp, Homo sapiens
attttgccacaaactcttgtattcttatcaagatttagtagagttttaggaataaatatttctccatttgctgtatgccctcaggactgttttcagaaacaaaaatatttaaacagaattttcatcaattaaatgcttgtttcactgggaagagagtcctctgaattgttcacattrccattccacccattgtggtttttatttgctccttccaaatgactaatgcttctgattgttgtctcatgtgcacacaaccatttctaaatcttcatagtaaaatgcctgttcctatcttttgccaattttttttcatttgtcttcttattaccgagttatatgggctgtatttcattgtactctatttttgtttaccagatatgctacttgtttttatcacatcgaaaatagaaataggagtttttttcctaactattaatctctttaatgagattaaggtcttaaaagaaaaatacttttcttgaaagatttacttctttattcctcatcttttgatattttgcataaatttttca

SEQ ID NO: 269618 - DNA, 533 bp, Homo sapiens
attttgccacaaactcttgtattcttatcaagatttagtagagttttaggaataaatatttctccatttgctgtatgccctcaggactgttttcagaaacaaaaatatttaaacagaattttcatcaattaaatgcttgtttcactgggaagagagtcctctgaattgttcacattgccattccacccattgtggtttttatttgctccttccaaatgactaatgcttctgattgttgtctcatgtgcacacaaccatttctaaatcttcatagtaaaatgcctgttcctatcttttgccaattttttttcatttgtcttcttattaccgagttatatgggctgtatttcattgtactctatttttgtttaccagatatgctacttgtttttatcacatcgaaaatagaaataggagtttttttcctaactattaatctctttaatgagattaaggtcttaaaagaaaartacttttcttgaaagatttacttctttattcctcatcttttgatattttgcataaatttttca

SEQ ID NO: 269619 - DNA, 595 bp, Homo sapiens
tatcactgccttagctgtaccccagagtttctgatacgttgtatctttcttctcattagtttcaaagagcttctttatttctgccttaattttattatttacccaaaagtcattttgrgagtatgttgcttaatttccatgtaattgcattgttttgagtgatcttcttagtcttgacttgtatttttattgtgcagtggccctagagtgtgtttgttatgattttggttcttttgtatttgctgaagattcttttatgtccaattatgtggttgattttagagaatgtgccatgtggcaatgagaagaatgtatattctgttgttttcaggtggagagttctgtagaagtatatcatatccatttggtccaaagtggagttccagtcctgaatatctttgttaattttctgccttgatgatctgcctaaaaactgtcagcagagtgttgaagtccccactattattgtgtgagattctctgtctctttgtaggcctctaagaatttgctctatgaatctttgtgttcctgtgttgggtgcatatatagttaggctagttaggtcttcttgctgaattgaaccctttaccattat

SEQ ID NO: 269620 - DNA, 561 bp, Homo sapiens
tatatcatatccatttggtccaaagtggagttccagtcctgaatatctttgttaattttctgccttgatgatctgcctaaaaactgtcagcagagtgttgaagtccccactattattgtgtgagattctctgtctctttgtaggcctctaagaatttgctctatgaatctttgtgttcctgtgttgggtgcatatatagttaggctagttaggtcttcttgctgaattgaaccctttaccattatgtaatcccctttttttgtcttagttaatctttattggtttaaagtctgttttctttgaaattagggttaaaaccattgcttttttctggtttctttcattcctttatttggagtctgtgggtgtcattgcatgtgacattggtctcttgaagacagcataccattgggtcttgcttttttatccatcctggccctctgtgccttttaaatgaagtatttagcacrtttacattaaaggttagtatcgatatgtgtggattttatcctgtcattgtgttgctagctggttattatgctgacttgtttgtgtggttgg

SEQ ID NO: 269621 - DNA, 673 bp, Homo sapiens
tggtggtgatgtgtcttgaggatgayctttttgtgtagaatctcacagggtttttctctgtttcctgaatttgactattagcttctctagtggggctggagaagttttcgtgatgatatcatgaaatatgttttccaagttgtttgctttcttcctgtccctttcagggatgcaaatgattcacagacttgtcttccttacataatcccatatttctcagagtttttgtttcttattttttattcttttatctttatttttgtctgactgtcttatttcagaaaaccactctttaagttctgatgttctttcctcagtgtggtctattctgctgttaatatttgtgattgccttgtgaaattctcatcctgtagtgtgttttttgctctatcacatgagttagattattttttaaatcggctgtttcatctgtcagctcctgtacacttttgttgtgattcttagtttccttggattgaattttggtcttctgctgaatcttgatgaccttttctgtccagattctgaattatatttctgtcatttctccagattctggagagttcacaaggaccaggggcctggagacagcaaggacaagtgttgtgaaacagcaaagaccacaacccacccctcctacttgaagctccaacccagggaactgcaaagctac

SEQ ID NO: 269622 - DNA, 673 bp, Homo sapiens
tggtggtgatgtgtcttgaggatgacctttttgtgtagaatctcacagggtttttctctgtttcctgaatttgactattagcttctctagtggggctggagaagttttcgtgatgatatcatgaaatatgttttccaagttgtttgctttcttcctgtccctttcagggatgcaaatgattcacagayttgtcttccttacataatcccatatttctcagagtttttgtttcttattttttattcttttatctttatttttgtctgactgtcttatttcagaaaaccactctttaagttctgatgttctttcctcagtgtggtctattctgctgttaatatttgtgattgccttgtgaaattctcatcctgtagtgtgttttttgctctatcacatgagttagattattttttaaatcggctgtttcatctgtcagctcctgtacacttttgttgtgattcttagtttccttggattgaattttggtcttctgctgaatcttgatgaccttttctgtccagattctgaattatatttctgtcatttctccagattctggagagttcacaaggaccaggggcctggagacagcaaggacaagtgttgtgaaacagcaaagaccacaacccacccctcctacttgaagctccaacccagggaactgcaaagctac

SEQ ID NO: 269623 - DNA, 673 bp, Homo sapiens
tggtggtgatgtgtcttgaggatgacctttttgtgtagaatctcacagggtttttctctgtttcctgaatttgactattagcttctctagtggggctggagaagttttcgtgatgatatcatgaaatatgttttccaagttgtttgctttcttcctgtccctttcagggatgcaaatgattcacagacttgtcttccttacataatcccatatttcycagagtttttgtttcttattttttattcttttatctttatttttgtctgactgtcttatttcagaaaaccactctttaagttctgatgttctttcctcagtgtggtctattctgctgttaatatttgtgattgccttgtgaaattctcatcctgtagtgtgttttttgctctatcacatgagttagattattttttaaatcggctgtttcatctgtcagctcctgtacacttttgttgtgattcttagtttccttggattgaattttggtcttctgctgaatcttgatgaccttttctgtccagattctgaattatatttctgtcatttctccagattctggagagttcacaaggaccaggggcctggagacagcaaggacaagtgttgtgaaacagcaaagaccacaacccacccctcctacttgaagctccaacccagggaactgcaaagctac

SEQ ID NO: 269624 - DNA, 558 bp, Homo sapiens
gtcagtcacattcagcatgagtatactctctgaccttctttgtttgaggagtattttggactagaagttctttctggtgttttcttttgaggcctcccagtttctctgacctatcctgctcctacctcggaaatttctcagttgactggatcctttctcttcctcttctccaacccctgctgactgtatgctccactactatgacaccaattctgtccactttcttccttattgatatgaatatactaactttaagccctctgcctccaatgggttcagtttttgagaaattcagaaaccccaaaagcaaccacgtgtggccaaagccattttctccatcaaattatatgttagaacaaaatattatattaagagtcctccataatattagaggaaagttttcaccctcatttaagcagataaccttaatatgtccaatcttccagagaaagaattctaataaaaatgtaaagtgggaayagatgagaaccaacttttatacaaattagtaagttttatgcttttgtatttgtacctaactcattactaaaattttta

SEQ ID NO: 269625 - DNA, 611 bp, Homo sapiens
tttatttttatattggacaattaaaaacaacataaatatctgacaataggagattgtttaaataagcaatggccattaagaagcatttactgggagagtgattaacagtataaagatgttcataatattaataaactaagtgcaaaggcagattatggagaactgcatagtccatatgtcattttaatttttaaaattgtggaaagctccttctttgataaatgtaaagtgtatggatgcgttaagtacaagaaacaattctggccatagtttagtgtgctaaggcaggttttatttccaaagaactaaaatatgtgttggattcctaattatatataatattttaagacacaatctttaataatatatttctagaatttagtatacattatttatgtttgctcttttctctcattatataacacaagtgctggstggcttaaggccaaatatccactagtgttgaaagacaaagacacatctccaactttattgatctccaaacttcctttccaaattatattaaagtcatgaccaatatggtcaatcattagtagcaaaacttttgtcttttttttccttcatttttataaaaggcagaccaaatatct

SEQ ID NO: 269626 - DNA, 634 bp, Homo sapiens
gcacctggaataacgccaggcacacagctggtgctcaggaaatatgtctaatgagtaaaagaatgaatgagtttcttcctccaccagcatcagaatctcaaagctcagaccagggcaaggctaataaggcatctggggcataaaatgtaaggaaacacttactcttaggcccccctgcactagcatgaccccgaacatgacagcctccttgaattctgcaccctaggcacctcactgcctcaccctaatcttagcttttagaatcctcactgttaagaacacatatttctcaccataccttgtacctcctggatcacaatcactaggaggagagagcagcctgggaattccatttctaatgagcttctttgtcagtcttacacagaattttgttggaaaatcactgatttaaattaagcagttttgccaagatgaattttcattacatcatstctggccagttccatcctcatctcattcaaggtctttcccaccctttctcccttagcttagctttcccctcttctccctaacaaagttataacagcagctaacagtgttttctaagccccagacactgttgtaagcaccttaccatttataacacacctaatcctcatacatcatgccacag

SEQ ID NO: 269627 - DNA, 548 bp, Homo sapiens
aagtaaaggggaggcaaggagtgaacagagatttcagggtcttgaagaaaagggagscttaaaacaagttcagatgtgacaagttcagattagcttggagacacaggacagcagagaatatcaattccaggctagagcccaagaaagcagcataactccaggaaaaactcatagttgcatatagtcgtgtatgtaagcagagagagcattaagcagctaagcagagaatgcctcaggagcaatacaatcacctatttgcccaaaagtagcataaaaccagataaagtcttaggagtgccatagatgctttctttagctaatatttgaggaggagaatgatctcatgtgtcctaaagtggttttagaagatatgagagaaagctgtacttgaacggtagggatgaaggatgatttggcggtatcttcaaaggacaacagaccatatggcaacaacagtatcatagcagatatcaacatagattacaaccagtccatcttcacccccaactacccaccagtcacaacctcaatatgttagaactcaatat

SEQ ID NO: 269628 - DNA, 548 bp, Homo sapiens
aagtaaaggggaggcaaggagtgaacagagatttcagggtcttgaagaaaagggagccttraaacaagttcagatgtgacaagttcagattagcttggagacacaggacagcagagaatatcaattccaggctagagcccaagaaagcagcataactccaggaaaaactcatagttgcatatagtcgtgtatgtaagcagagagagcattaagcagctaagcagagaatgcctcaggagcaatacaatcacctatttgcccaaaagtagcataaaaccagataaagtcttaggagtgccatagatgctttctttagctaatatttgaggaggagaatgatctcatgtgtcctaaagtggttttagaagatatgagagaaagctgtacttgaacggtagggatgaaggatgatttggcggtatcttcaaaggacaacagaccatatggcaacaacagtatcatagcagatatcaacatagattacaaccagtccatcttcacccccaactacccaccagtcacaacctcaatatgttagaactcaatat

SEQ ID NO: 269629 - DNA, 548 bp, Homo sapiens
aagtaaaggggaggcaaggagtgaacagagatttcagggtcttgaagaaaagggagccttaaaacaagttcagatgtgacaagttcagattagcttggagacacaggacagcagagaatatcaattccaggctagagcccaagaaagcagcataactccaggaaaaactcatagttgcatatagtcgtgtatgtaagcagagagagcattaagcagctaagcagagaatgcctcaggagcaatacaatcacctatttgcccaaaagtagcataaaaccagataaagtcttaggagtgccatagatgctttctttagctaatatytgaggaggagaatgatctcatgtgtcctaaagtggttttagaagatatgagagaaagctgtacttgaacggtagggatgaaggatgatttggcggtatcttcaaaggacaacagaccatatggcaacaacagtatcatagcagatatcaacatagattacaaccagtccatcttcacccccaactacccaccagtcacaacctcaatatgttagaactcaatat

SEQ ID NO: 269630 - DNA, 532 bp, Homo sapiens
ccagcaccacacccagccaatttttgtaattttagtagagatgggatttcactgtgttggccaggctggtcttgaactcctggcctcaagtgatccacccacctcggcctcccartgtgctaggattacaggcatgagccaccatgcctggcctataataattactttaaaggccacatatggttacagatttcattaaaaatgtgataaaactcaagagcaggaggaagaggaaggtgtatcctcacagtgatggccgagagagaaaaaggtaaaagtgaaaatgtacaagtgttcttgcatcctctgcatatgttacatttgctaacacctcactggctaggcaaatcacatggccaaactcagaatcaaaagaaagagactctgaccctttagtgggagaaactgcaaagtcacaatgtaaatgggcactgacacaaaaagggatgaagaattgagaccataacttaataattctaccagtcattaaccaggtgaccatatatgaatggatgagtttcaggattcccta

SEQ ID NO: 269631 - DNA, 532 bp, Homo sapiens
ccagcaccacacccagccaatttttgtaattttagtagagatgggatttcactgtgttggccaggctggtcttgaactcctggcctcaagtgatccacccacctcggcctcccaatgtgctaggattacaggcatgagccaccatgcctggcctataataattactttaaaggccacatatggttacagatttcattaaaaatgtgataaaactcaagagcaggaggaagaggaaggtgtatcctcacagtgatggccgagagagaaaaaggtaaaagtgaaaatgtacaagtgttcttgcatcctctgcatatgttacatttgctaacacctcactggctaggcaaatcacatggccaaactcagaatcaaaagaaagagactctgaccctttagtgggagaaactgcaaagtcacawtgtaaatgggcactgacacaaaaagggatgaagaattgagaccataacttaataattctaccagtcattaaccaggtgaccatatatgaatggatgagtttcaggattcccta

SEQ ID NO: 269632 - DNA, 572 bp, Homo sapiens
gaaaaatagccgcatgtatgcttatttaggtaagaatgtgtccacctgaggtgatcataaatctttactccttaatttagggtacmgtaattttgtattcttaaaatataatcacatttacttttgttattattgattaggaccatcacaattatattaattgaccttcatcagaagtcaaaataacagcatgtctttctaaaagcccatgacttccaagtgaatttatttggagtatatttccatttttcttttatgcacaagtagttactgactccctatttttcaaaagataaattaaaactggaaactccttattgtattttattttccactgagtaacaatatcttagaaaacattttcctaggttaattattatactttgcataatattctttgcaagaggctaagtaaagaatgggattgataaaaattggctctgagtgtagaacagagatgagactaagaggtaaaatatggtgtagttggtgatttggtaaatgttaaggtacacgaatattttttttttctaagtagagtgcgctcacaaaataagagccaggcaaatttg

SEQ ID NO: 269633 - DNA, 603 bp, Homo sapiens
gggtctctggctaccaagtttaacaccctcataacacagagtctctgactcctcccttctagactcaggtgcaacactgcttattgaacatgggaggtagcttccccaacagtagcctggagaggttgtttgaaaatctcagaagtgtagacaaaatattgaccaatggaaggaaggaatctgtgtttatttgcaaaactgcagccagttttgtaatttaactttttgtgcttccttccttccttggcttacctctctttayccactccacccccacccccaccaccctgggactacaaactcattagcaggtaaattctgtcacacattctgtttcctagagaatctagggtaaggaaccctggcacttgaaatttactccagaaaggaatatgagtggggggaaatcaaaagtttgacctgaaattaacaataaatgactgcatgtgactgaatttaacagtcaaaactagactgggaggctgatggaactgaggctgtagaaaaagagagttacattttcatacatctgactttgtgactttggaataaaacagttgctatattcagaaacattaagaagttcacgcttcttaatttaaa

SEQ ID NO: 269634 - DNA, 573 bp, Homo sapiens
aaagtataagcagtgactaagaagttaacatagaagagcatgggtttaggtgtccaacatatatagccttggttttatttctgcaattcaccagctttgtgcccttgggcaagttactgaagctctcagtctcttcatccataaaacagacaacagacgatgcccttgggatttgctctaagggyaaacatatagttcttagtcctgtgactggaaagcggtaagcacttaattactgtgagctatgattactattatcaaggtgtttggttgaatgaaatttgaggaactaacctgtcaatgagaattttctctgtgatataaaagtgaatgtttactacagagtttgaagcaaaaataaagcttttcttgttctccatcctacataaaaacttttccattctcccaaaagtaaaatagacgacagggtatcttcaggataaaacaaaaattcccgatctttgatatgttcgtgcattgattcccttagtttcaaaaatatttatgatagatatctggaaacaaagccatagacacttgtaagtaaaaagacacatggtaaagaaatgtatt

SEQ ID NO: 269635 - DNA, 573 bp, Homo sapiens
aaagtataagcagtgactaagaagttaacatagaagagcatgggtttaggtgtccaacatatatagccttggttttatttctgcaattcaccagctttgtgcccttgggcaagttactgaagctctcagtctcttcatccataaaacagacaacagacgatgcccttgggatttgctctaagggcaaacatatagttcttagtcctgtgactggaaagcggtaagcacttaattactgtgagctatgattactattatcaaggtgtttggttgaatgaaatttgaggaactaacytgtcaatgagaattttctctgtgatataaaagtgaatgtttactacagagtttgaagcaaaaataaagcttttcttgttctccatcctacataaaaacttttccattctcccaaaagtaaaatagacgacagggtatcttcaggataaaacaaaaattcccgatctttgatatgttcgtgcattgattcccttagtttcaaaaatatttatgatagatatctggaaacaaagccatagacacttgtaagtaaaaagacacatggtaaagaaatgtatt

SEQ ID NO: 269636 - DNA, 573 bp, Homo sapiens
ataatatataagaaagcactgagtccagttctgtcatagagtcaggacttagtaaattgtatttgctgttttagttacttttactatggtgaccacagctatttgttcatggccagagaagatattaaagatctcagtgactaaagttaagcacatcatcagaatcctgtctttaacaagtgtgacatatctcattcttcttgctttacrgagaaatcctgataattttgctcacataagcattaagaacctcaaatgcaataaatctttgagcctgctttaactaaaatttgtcaaggatcagggatgcatgaaaataagccatttctatgcaatgtattgacagtttctactttcttggatttgtctcagaaggcaacagtaaaccactctgccttaaaccagatgtgaaaatcaagagttcttactaagaatgcctacactagaatttaattgtgacacatttgagggcggaatcccaagtagaagtcggtgatttccaacaatcagcccatcagaagaccttaaaatgacccagggacctgaaaaaatatacattcctagtctccaccc

SEQ ID NO: 269637 - DNA, 563 bp, Homo sapiens
tgcccactgacacagagcagctgagaagccatcatgctggacactgcagacattatccagagtaaatcctgtgtgcttcttttttttttttttttttcctagcccacgacattactaggtttgtctggctttccataatttggtgttggtgtttctttcccactaaaaagaaaggttgtgacctataggttcaagacatagctaggttgaaaacataaatttgtttggcctccacagtgtttttataacatttaagtcaacattagaaaactgaaatatttcgcataaaaagccaatttttcagattctcctataaaacactaaaggtctggcaacacggcaccactcacagtattttacagctgagtaataggctgccctttttagaagaaacataatctctaagctaccctagaccccaccactccttattgtwtctttggcaaaaagtctaatatctatgaccatttaaacttgtttcagatagacagatggacggatagatagatagatagataatttttcatagagaaatactttggtggctacatttctaacaaaag

SEQ ID NO: 269638 - DNA, 533 bp, Homo sapiens
ttgaaaaagagactggaaactccttcctgcaaaaattagtgtattctacattggcttccagttttgttagtaaacatttcttcacaatgaagtctcctgagtcaatatcctggaagggaacctaggcagtatcttggtgctcagagaagttgatgtccttttactctaagaagaatgatttttcttccaggaagtaattaatagaaatgagccaatgcattatggcatttggagatactttcatctggtttgtaaattctgcactmtaaatataaatttaatataaggaataaaagtgcagtaaataagagcactacacatttctaaagaaaataaggaatcttacctcaatgtacacaatctgcaattgttttgggcagaggtgggctccattacattttacacaggttattaaataagaactaagagataatatctacccacagttgtgccacacatccaaaaagaaaggcctgactattgcttttagtagtgacatccttgcaggtgactgccatagatacaggaaagtt

SEQ ID NO: 269639 - DNA, 582 bp, Homo sapiens
aaaatgtgaccaggaaatagagtaagaatggaacctggcttatgactctgacctttctcacacaaaattcaggccagcctcatcaagccctcaaaaaagggttcaggcaaaaatagtcatgtcagcaaaattccaggttaggtaactgaaggtgattaagttttctcaaatataaactgctggccataaggttcaatttcagcctcaaaatgtggttaggttaatttctactaattttttgccatcttatgaaataactagatgctaaaaatctattgcaattttctttccttcaagactttaagtaaatttgaatcattttaattttttcttctcttttttcccccaaagagtgatatatgtaatatctttcatgttgtttgaaagacaacatcaaaacatacttttattttatttttatttttaatctttgagatggagtytcgctctgttgcccaggctggagtgcagtggcgccatctcggctcactgcaaccttcgcttcccaggttcaagcgatttgctgggattacatgctcatgccaccatgcccgactaatttttgtatttggggtttgaggg

SEQ ID NO: 269640 - DNA, 533 bp, Homo sapiens
ttgttctcacactgctctaaagaaatatgtgagactgggtagtttacaaagaaaagagatttaattggctcatgattctgtaggctgtacagaaagcatggcagcatcagctcagcttctgcggaggcctcagcaaacttacaatcatgacagaaggagaagggggagccagaacwtcacatggctggagcagtaggaaatgaaagagaaaggaggtgctacacacttttcaacaaccagatcttgtgagaactcactcactatcacaataacagtaccaaggtgatggtgctaaatcattcacgaaggatccacccccatgactcaatcacctcccatcaggccccacctccaacactggggattataattccacatgagatttgggtgaggacacagattcaaaccacatcattctgtccctggaacctccaaaatcttatatcattctgacatatcaaaatacaatcatgccctcccaacagttcaacaaagtcttaactcattctagcattaactctaaagtcaaaagt

SEQ ID NO: 269641 - DNA, 533 bp, Homo sapiens
ttgttctcacactgctctaaagaaatatgtgagactgggtagtttacaaagaaaagagatttaattggctcatgattctgtaggctgtacagaaagcatggcagcatcagctcagcttctgcggaggcctcagcaaacttacaatcatgacagaaggagaagggggagccagaacatcacatggctggagcagtaggaaatgaaagagaaaggaggtgctacacacttttcaacaaccagatcttgtgagaactcactcactatcacaataacagtaccaaggtgatggtgctaaatcattcacgaaggatccacccccatgactcaatcacctcccatcaggccccacctccaacactggggattataattccacatgagatttgggtgaggacacagattcaaaccacatcattctgtccctggaacctccaaaatcttatatcattctgacatatcaaaatacaatcatgccctcccaacagttcamcaaagtcttaactcattctagcattaactctaaagtcaaaagt

SEQ ID NO: 269642 - DNA, 401 bp, Homo sapiens
acttaacattattagccaacagggaaatgcaaactaaaacaagaagaaatcttattttatatccactatggttaaatttaacaaggctaacaataccaagtattgacaagaaaatagaataattggayctttcaaatattgcttatggaagtgaatcaccttggagaaccatttggtggttccttctaaaactaaatgtatacctaccccacatcacagaaatttcactcattgatattcactcaaaagaagtgaaaacttatgtctacacaaagacatgctcacaaatgtttctaatagtgtaattcttattattcccaaatgggaaacagccagatgtctatcaaaaggaaaatgaataagcaattatagtatattaattgaatgatgctggtgagaag

SEQ ID NO: 269643 - DNA, 513 bp, Homo sapiens
ttgaatagacttttcacaacagatatacaaatggccaataagtacaactgaaagtacttaacattattagccaacagggaaatgcaaactaaaacaagaagaaatcttattttatatccactatggttaaatttaacaaggctaacaataccaagtattgacaagaaaatagaataattggatctttcaaatattgcttatggaagtgaatcaccttggagaaccatttggtggttccttctaaaactaaatgtatacctaccccacatcacrgaaatttcactcattgatattcactcaaaagaagtgaaaacttatgtctacacaaagacatgctcacaaatgtttctaatagtgtaattcttattattcccaaatgggaaacagccagatgtctatcaaaaggaaaatgaataagcaattatagtatattaattgaatgatgctggtgagaagtaaaatggaatgacctacttttacacaagacaacatggatgaatctcaaaaacacac

SEQ ID NO: 269644 - DNA, 632 bp, Homo sapiens
cattttaaatagtcgaatcttatttaatagagtgagatggtcatgctatgaaaagcatgaagaaaccgagacctactaaattagaaaatttatgcctcccatttgactgaccatctggaatatgttcccactgagtagaatgagaaatacttaaattatttttctacatgttctccatgttccattgtatatagttgaattgagataagtaaatgtgcacaatacatgacacttttatatgcaggtctgttttcccacaagactgtggcttcatgggcacatgggtggggctgcagcactggctggctttcttcaacgataagcaagcaggaaactaagcccaggcttgggatgcctcaaagggcataagggaaagaccttatttggtcacccatcccactgatcagctgtaactacccccttgagaaattcacttagtgttttcagaaaagaaccctctcrttttgtcctgggggtaaaatgctcctatcattccattaatgagtagcaatggagaagaggaagaactgtgcttcataccacaggccaacattcaacttttgtcctttcctccctcactttgtcatagttcccaattttaagacctttactgagtggtttcttgatttctt

SEQ ID NO: 269645 - DNA, 572 bp, Homo sapiens
aatatccggctgttttgtattatttgttcaagcaatttttcctatttcttttgaagtaatgtggtgctcttgttaaaagtcagttgactatatatatgtgttcctatttcagaactctctattgttttattatttatttttatttttatagggacagagtctcactatgtcacccagtctgcagtgcagtggcacagtcatatctcactgtaacctcaaattcttggacgcaagcaatctcttcaccttagcctcctgagtatctaggactataggtacatgctacgatgcctggctaatttcttttcttttattttctattttattttagaaacaggtcttgctatgttgcccaggctggtcttgaactcctgacctcgtgcaatcttctcctcttggcctctcaaatcactaagattacaggcatgagcctcgatgtctggattactctattttrtggactcatttatatataatgacagctattttaagtttagatttaaattaattttatatctattttttccattttgtagatttcaaatgcagtaattaactttgcttatgatttt

SEQ ID NO: 269646 - DNA, 530 bp, Homo sapiens
aacttttaaacatgggttgggcattgctggtgtgcaagtagtaaaagtagatgtgcttttagaattgaatgtacacagaatagatgcccgccctgactcttctctgtgtgcatccacccagcacctcttcaagtctgacattttctaatttagctgtctagaaatacaggtcccccctttgccttaagaaattgctctttgttaccagggaagtggtccccattcctagccaaaacagtaagagtatgtatgatttccctaaatacatccactcwttctaggattcacacattcagacaccacaccccgtaagcttccatgcatgccagtgcaccaacacaccatgtacataccaacaaaattctcagggcagcatgctatcccacacagcctcaaatctagacagtgggccctctgtgctgtctcgaaaccaggcaatggctgacttcactacactctccttacttgctagtgtgaaggaagaattggaccacatacttagacagatgggtgattaaattaccaggggc

SEQ ID NO: 269647 - DNA, 614 bp, Homo sapiens
ctctcatctgatctttgcattgggcccttaaaatgcatgtaatgggcccagttctagtcccaaggttttttggtcctgccaaactaaaggatacttcctttaatgttcttcgattctgcttctgattctggtagcagcagaatgtggtttttgcctttatttttttttgtttctaattcaaatagttactgttttargaatagtctctttttgacagttactgaaaaaaagatctgtgtttttccccttgagcattatgttttgcagtctgtttgtttacttgggttgaattttacccaaggtctttgaaacttaacaaaatctcagttgctgctgcgttcaaaatcttgtacagatttaggtcttatttgccgggttaaaacacacacacacacacacacacacacacacacacacagtttctctctgtctctctccaacacaagaaatggccattttaacttttttctgcagttttaaatatattgttttcataactaagcaaatataacataggttaaaaatctctccagtgaaattcacatcttacagaaagacctttttttcccccttcaacttgtttattcttcccctttgctttgctgctaaaccca

SEQ ID NO: 269648 - DNA, 528 bp, Homo sapiens
gcagcccaggtggtcacatcccttccttggaattcaatgggagtcttatgacaacatctggcaaacccaacacaaccagcaagaggatcatttgggaagccagccagacataagcttgtaggagaggcatgaacttgaggcatctctttcctgccaagagataccaaggtgggtgggcagagctggcaagagagactcagctacagtaagcagcctgaaccagaaaacctatttgycccaaattattaaattattaagccacatttcattgttaaaacaagttgagcataggtgaaaaaatactatgtaatccaacatggttttgcctcttttgaagtacaaactttataagaggagattgtgaaagagaatgtgtgtgtgtgtgtgtgtgtgtgtatacacatgcaacataaataaatatatatatatatatatacacatacacacaaccataggctctcatttaattccaaaataaaatgctatttaaaagcatgtgtaatactctatataaactataattgtatt

SEQ ID NO: 269649 - DNA, 462 bp, Homo sapiens
atgcccagccaagcaacaagatttctatctccttcctccccagaagccccttggggtacattctgggcaactgaagggcttacagctatgagcccaagactaagagaaagatgatttgttactgtaatactgtctggactctataccatgaagatgataatgaattttggcttctgaaagaaagtacccagtattggaccctaatccagctaaaattattttgtcaaagtactgggaaatgagaataaataccataatgccaggctttcatgttattgcataatcgggatcccagttgggatgggaggataagggagcrggcaccaactcttagctgtgcagaaagaccgaacgaaaattcttccagatagttgtatccagaaagaaaaagatgaggaagatctcacccttttaaaatgccctgaatctggctgttctggaagtgactgttcctgcagctgc

SEQ ID NO: 269650 - DNA, 543 bp, Homo sapiens
gagtttgttgccgaagtctttttaagcaggctggcctaggtgagcagatgggtgcctattgcctgggtcggcagatgggtgggtttgctacctgggtctgtggggttgggccttgagcttaggtctataggagtccacctttttattgagtccatggttgcatgcctattgactatacccatgagggcaggcctgcagcctgtatccacaagggcaaatctgaagcctgggtccacaggagatgacctgatactggaggtggccttgagcctttgtttgcagaagttgggctggcactggaacgagcctgggatctgagcccattgtgcactgcccaatagtggcactgaggcccaaatttgtgggggcaggtctgggtcttgggtgtaagggacctggtgtagagtgtgggtcttcagaggggttctggggcctcagtttacagagattggcctggcactggggtcttcmatgatgggctgagacaaggtctgctgagacctgaggccacaagtgccagccttgaggctggatgtgtgggtg

SEQ ID NO: 269651 - DNA, 534 bp, Homo sapiens
gtgggggggtgagggataaaagactacaaattgggttcagtgtatactgctcgggtgataggtgcaccaaaatcctacaagtcaccactgaagaacttactcttgtaaccaaaagccacctgttcccccaaaacttatcgaaataaattttttttaaaaaaatatgtttaatatacctaacctatccaatgaatatcacagcttagccttgacaaccttaaacatacacagaacacttacatgagcctagaattgggcaatatcatctaacacaaagcctatttcatatttcataataaagtgttgactatcttaggtaatttatcggatatagcacactgaagcttatcagttgtttacccttctaatggtacatctgactgggagctatggctcactgatgcccagcatcatgagagagtatcatcctgcatattgctagcctgggaaaagatcaaaattcaaaattcaaagtacggtttgtactgcatgtgtagtgcttttacaccaycgtaaagtcgaaaaattgtaagt

SEQ ID NO: 269652 - DNA, 492 bp, Homo sapiens
ttcttgtttctagaataattagtatgggtctccatcccaagacagactttttggtcctgtgctagaaaagacttcctgagctaattcatttcatttatttctaagtatcttgttttcatcatggcatctcctgcaggaaatgaaaatagccagcagcttcggcatagagagactgagaggtcccagcccaacacctcaggacaaaggcagggcatagcagattaaatgccaccattgctgcagtcgcctgctctcacttttctctccctgtcaaagctgatattgagtgtactctccctgtgaattgagcattctgtcatcaaaaagctcggtgatgaagcytatctcatttttaaaatcaagacttgtctcccgtctttaatactggatgactaatacctaggtcattttttaaaaactaaattaatttgatgctctgattccctgttgttgtgcaacaaattaccttaaaacgtagtggcttaaaatagc

SEQ ID NO: 269653 - DNA, 441 bp, Homo sapiens
aacacgggctgcttctataagctgaaaaaggcaagaaagggtttctccccgagaagttccagaaggaacatccctatgccatcaccttgatttcaactcagtgtgacacatgtcagactgctgacctccagaactgcaggataatacatttgtgttgtcttaagccactctgtttatggtgacttgtgatgttaacagcaggmaactaacacactaactgatgctatattaatatttcatatttttgcttaatatccttccctccaaagaatgcagactccgtgaggggcagagacttagagtgttctttgaagcatttccagcacctgaaacatgctcaggcaacatctagaatatttattgaatgaataaacaaccactccgagttggttgggtttttttcaatgatgaaagacaaagaagaaattggagcttgaaaat

SEQ ID NO: 269654 - DNA, 574 bp, Homo sapiens
atcctttcccctttgtgtattcttagtgcccttgttgaaaattagttgaccttgtatatttgggtttatttctctttcattggtctatgtgtctatctttatttcagtaccatacagttttgattatcatagctttataattattctttttaatgctattgtaaatgggatcattttcttgattttcttttttggataagtagttgttgatgtaaggaaatgctactaatttttgtacagtgatctttgtatcctgctgttttactgaattcatttattagttctaacagttttttttttttttttttggtgtggagtctttaaagctttctacgtatagaatcatgtcatctttaaacaaggattttatttcttcctttctgatttggatgtccttcatttctttttcktctctgattgctcttaaaattagattcaaatattataatgaattttgaacagaaaagggagataaattctgattctggctgttgagtgaagtcactgtgctgaggcttgcagtagaggggtggagaagcagacaccagccaggtttggaaaccacatgcacttt

SEQ ID NO: 269655 - DNA, 610 bp, Homo sapiens
ataatgaattttgaacagaaaagggagataaattctgattctggctgttgagtgaagtcactgtgctgaggcttgcagtagaggggtggagaagcagacaccagccaggtttggaaaccacatgcactttgtggcttgggacttggaacacatcccctttcctctgaggccaagtcctctgcccttatgaaaaaatctaacttcctattttaaagacaagtagctcagagcaactccgaaagtcatagactttaaatggcctctacgaaacatggtggtaagtttgggaagtgaatcagaaacagatgaattaaattttgcctgaaattacatagagattttaacagacagagaagaacattcttaagagaagaagcatrttttggcatttcttactcaaatcccaaacatttgagagatgcctttgaataatttcattaagagaaaaagcaaaacaaacaaaacaaccctcttgagactcagaacttaaaaagtaggctgaattataatgtcttttccatagcttatctccaaccacattttccatatagcagaatatgttcctggtataatactacctcagcagagatcaaaggaaaaatcagggcct

SEQ ID NO: 269656 - DNA, 566 bp, Homo sapiens
tcacttttggaaatactgacaatagttcatgatcttatgggttcataaaacccagkttgggtatctttgatccttttaacctctatattttggatgtaaggtatggaaaaattttgttttcttagccaatgcctgagactaccatttagagagagtgctgtgtgttgagataatgtttgtttggaaaagcctgcttgggcaggtgagtccttgtacttcatgaatgttggctaacctcagggcctctgaaaaaggggccaatgctgctgctctgaagacgtttttggggtcttgggagaaggagggagaagggagaagagttgagagagccaggcagatggggtggggtgagggtgaggctgaactgtgtgctgcgattcctccatgaactctcaaattgtttttaaagtcactaaacccatggactccctgttgcacttttcctttttctttttcagatgcataggcctgagtttcttatctgggaatgctgctgtggaatggatagggacagttctgtactttcagatctgacgtcaaagacgcccaggataagtcacatcctt

SEQ ID NO: 269657 - DNA, 566 bp, Homo sapiens
tcacttttggaaatactgacaatagttcatgatcttatgggttcataaaacccaggttgggtatctttgatccttttaacctctatattttggatgtaaggtatggaaaaattttgttttcttagccaatgcctgagactaccatttagagagagtgctgtgkgttgagataatgtttgtttggaaaagcctgcttgggcaggtgagtccttgtacttcatgaatgttggctaacctcagggcctctgaaaaaggggccaatgctgctgctctgaagacgtttttggggtcttgggagaaggagggagaagggagaagagttgagagagccaggcagatggggtggggtgagggtgaggctgaactgtgtgctgcgattcctccatgaactctcaaattgtttttaaagtcactaaacccatggactccctgttgcacttttcctttttctttttcagatgcataggcctgagtttcttatctgggaatgctgctgtggaatggatagggacagttctgtactttcagatctgacgtcaaagacgcccaggataagtcacatcctt

SEQ ID NO: 269658 - DNA, 589 bp, Homo sapiens
ccttgtctccttttacctgtcactggacagcatacacacactcagagactgctcctgccttgggcccttcaaccccgaagagagcagaaaaatggattgtaagttgattggccaaactcatgggaaagcaaggaaactgctgtgatgatggctgggcttggggcccctgtcagcagaagactctattggctgatgaagctgatggcagggccacgttggaggtacaccagttcctagggaagtctgatggcaacagttcctggcaggtattttactgtctcagactagagcctattcacatggcactaggccttctgctctcccactaagtgattctctatgtgtcacatgctagcaatagacaactggatcctaaaacagggacatcagaagcttagctctgcaaactgagggactttacgcggtcagagaggagggtgataacacatcaaatatctaatgcaggagacgacaaataggctgcatgctccacacaatcaaggctaattatttgagcacgcttctagattgggaakggaagttaaaaaaaaaatgaaaaagtaaggaaaaaaaaaagcaagcttcttat

SEQ ID NO: 269659 - DNA, 519 bp, Homo sapiens
tttctttgtgggctagggcggttcatcattttgtgagagctggtaggggggcacttgtgtgagcaagatattgagcctaaagaaaatggtcaaggaaaatgtcttgggtgctggagaggggagtttaaaggtatgggtctgaaaaagcagtatttgctactgaggctaaagcataccggagtggacagaaaggactgtttggtggggaaaaggatatggcatttggargcagataggtctggatatagatcccggctctgtccatttgtgttcattacctttcactaggccatgctgtgtaacaaatagattccaactctcaatggcttacaaaatatttctttctttctcatattacatagtgttggctacaggtcagttgtagctcttcctcaggcattggtgggctcagattcatttcttactgcaagacccaagttaatggagaagcagcttttgggacatgacttctcataacagagggcacaggaacaataaaccaagttgaatcatgcaatc

SEQ ID NO: 269660 - DNA, 568 bp, Homo sapiens
ctatgctgtgtttgctcatgttccattggtcaaagcaagtcaaattgccaagaccaacatctrtgtggtagtgataaataccaatatggggagaaggaggtgaaaatggaaaataacaatgcaagctaccacattgtctaaagattttgaaactctgggcttcagttatcccttgtgcaatacagtgatatcagcatttgttttctaaaattgttgggaggaagaaataaaattaatttgtgtataaaacctactatagtgcctagtgtaaaataatattttatgcacatgagattgccttgccttggtactcagaatagtgcatagttccaatgtcagagggaattaaactttctgctccccatttttcttctgccaaatgactggatgatgtgtaagagctcttctgactctaaagtcctctgtttctaaaaatcttatactaaagaatcaaatagtcccttaccctaaaagtaccctctagctaaagaggaaactttaagtttgtcagaggttttatttggcttgcctttcctcgacccagccaactaccaggggcagagaaaag

SEQ ID NO: 269661 - DNA, 568 bp, Homo sapiens
aggtcatggaatgtgccaagattacacagttagtagcagcagagcccagattcgaagataggcagacaactgtgtattcctttctcttaacctctttcctgaactgtctgccacaaccaataaaatagttgtttattctcagttatcagatggatgtctataaagtctgaaaaatgaagataaagttgaaacatctttaatcaactctgatttactcgataactaccagacattaacaaactttatgtaccatatgtgctgaaaaagccaggtgccacaaraaggattagaggtgaaattttctttccattttgatttccactttttattagtgacacctcccaagtggttcagaggacgcctattagtgttcgtggacatcttgtgctatttgcagccatccttggagagatctgggtggctgaactccacacctgctaggtgtccctctgcctctgtcgaacatccctgcctgaacaactctagcatcctcaataagctgagaagcctcccttttcgtgacttgtgagcatcttgcgatttctccattgtcaaatctctgaggcca

SEQ ID NO: 269662 - DNA, 673 bp, Homo sapiens
tgaaaaggggtcttggatgtttctgccaatgtgataggcgattgcaggatgtttgtgaagcagcctgatgaaccctctcaaatagaggcacctaatgctgttcagctgtgtaattgggatggcaatgggccaatgagaggcagaagtttgtgcttaaccttttgtgagtcttgtttcaggaggctgtgtgggggtagggggtagaagcattacaaataataagcttctccgcctgatttgtaatgaattagtaataaatgtcctagcactgtacaaaagtctgacgattacagagcagctttggctaagtgcacgggaccacatcttattttgatcagctgtagcatagcaaagacgtgtaattatcataatctaacaattagcctggcatcactttccagtgtttaattaccccgataaatggtaattgaatagaggacttaatgacaagagagaaactttcattctgccttaggtgcttaagttgtctacttggytaggcataattttctagcattgcttgaacaacagtcctggttatcattttccttttttgcagcctgccattattttgtttcctgatcttgacctttgtttataatatttagcttctctcaaaattttatactgggacccagaacacaggaagagattattggatgctttacacagt

SEQ ID NO: 269663 - DNA, 561 bp, Homo sapiens
accattcatacaatggatttgggagtgtcaggaagaagagaaccaaacttggtttagctgaggccactgagttgcttattaaacagatgtgatgcttttccatcttggggaacaggcattctgagtagcactgtcccacatagcagggtgcagctttacattttgccaggtgttttcatctctaatcttatgttttgttcatcacaaagtctctgggagattggtagggttagtgtttccattggactagtgacttaattctgggaatgaaagaacatattagctctacaagggccatgctgtgtgtgatgctttaggtctaactcatagtgtggacccatagcygtttaccatggaactttctgcactatggtgtttattctggagaaaagtttctatttaacatgaggctatcagttcagcaatacagcatttgtcctgtttgttcatttgttgttgacatcaaataaaagtcacaatccagaagctatttatataaacaaaagatgatctttgattttctcttttttgctcatctcttcccttttctttcctttcttt

SEQ ID NO: 269664 - DNA, 535 bp, Homo sapiens
aggttccaggcaccttgtttctcacctttgtaccttttggtttcctcatgctgcccatcctatctagagtgcctctgccaattgtagataactcctgctcaaactttgactcgggtaagccttttcttatctccaaggctatatttgggatcccacctttacatctcaaaatgtaattacaagtttatgggtctgtccccctgaccaggccgaaatctttgaggaaaggaattattttctattcatccttgtaccccacagtccaaggtgatacatagcacatagttaaagctcagggaaggtgtttgaatgactgattaaaggcatatcagatgaaactgttcaaataattataacaactgtaaaaactgtaaagaggtcagagaaaacaaatatatcaaaagtagtatcttactctcattgagcattacatttagctctgactggtagccaagcccarcaataaatatgatatgatcaacgtatagtagaaaatagtgtggtttagagggaacagcatgggatttggaagagg

SEQ ID NO: 269665 - DNA, 481 bp, Homo sapiens
catggaaaagacgttaggttttgacatcagctgactgacagttacatttggaggcaccagttgagggtttgagattttgttgagtccagcaggtagatggaaatctgcatttagtgttatcacatgcctttaaacacttagctgaagataaaaccacctctgttcatggaatggagcttaaaataacccagtttcaactcttcagacctaaaagcttccttccctctctacttgctcttgctcttgttccctctcattctctcatagccacagtggaaagaaagtttaagtaaaaatacaatttacaaaagatttwtacatttttttctgaaatgtattcttcctcattccctccctgcctatatctaaatatactaaatgtgatacatttgtaagcaaataaagtatacattttacattctcacaggaaccaaatgaccttagcttttttatgggcactaaaaaatgttagtatttgcat

SEQ ID NO: 269666 - DNA, 638 bp, Homo sapiens
ttttacaatttcaaatatgtgctgctcaaaagatccactgtccagaatctttgaagtttcttaatctcttagtagattgaatgtatctcctcctttacgtagcccattttccagagaagtttacataacagatgctctccacagaaacaataatcttgtgtttctttttccttctttctttaaattttgcattccttaccaagagtcttaaggacatctaaaaagtcaccyctactattagaaaaaaaagtactgatttattttacagacatttcttgactgtatgttagggcctcttccttttgctgtttacatgcaaaataagggaactatggaggtgaatgttcctgtccctaccctcaaaaagttgatctaactgagcaaactaacagacaataactatagaacaagataaaggaagctaacggtaatagtaacagaaagtgccatgcagtgttctaactcataagtgggagctgaacaatgagaacacatggacacagggaggggaacaacacacgctggggcctgtgaggggtgggggacaaggggaaggagaacatcaggacaaatacctaatgcatgcgggacttaaaacctagatgacgggttcataggtgcagcaaaccaccgtggca

SEQ ID NO: 269667 - DNA, 512 bp, Homo sapiens
gatggccctaaacaggcttatgttgaaatcggctttcttgagaagctctcatccagattcaatgaamaagtgtctctaaaatatttaaatgcaatccttggcaaataacgggtagtcaataaataataattattattatctttaacactgactattttagtaacttttaacctaaattggggtgagaacacctggctccaccagttcttaagttataataatttagtttcaacaataatcttccccaggtttttgtataccgccccacacccccccccccgcccccgccaagaaaaggtatcttttgtatttttgctttgtttttgtatattaggtgagtgtgtgggaggcctaaaagcaaatggtatattaaattttctttcaaaaaaaattccaactgtgcatactttttaaaagtgctcctcccagactcaacaggaggattaaagttttttttttaacataatccattaatggccgttccaattatattcatgctgctgtcacctagt

SEQ ID NO: 269668 - DNA, 512 bp, Homo sapiens
gatggccctaaacaggcttatgttgaaatcggctttcttgagaagctctcatccagattcaatgaaawagtgtctctaaaatatttaaatgcaatccttggcaaataacgggtagtcaataaataataattattattatctttaacactgactattttagtaacttttaacctaaattggggtgagaacacctggctccaccagttcttaagttataataatttagtttcaacaataatcttccccaggtttttgtataccgccccacacccccccccccgcccccgccaagaaaaggtatcttttgtatttttgctttgtttttgtatattaggtgagtgtgtgggaggcctaaaagcaaatggtatattaaattttctttcaaaaaaaattccaactgtgcatactttttaaaagtgctcctcccagactcaacaggaggattaaagttttttttttaacataatccattaatggccgttccaattatattcatgctgctgtcacctagt

SEQ ID NO: 269669 - DNA, 512 bp, Homo sapiens
gatggccctaaacaggcttatgttgaaatcggctttcttgagaagctctcatccagattcaatgaaaaagtgtctctaaaatatttaaatgcaatccttggcaaataacgggtagtcaataaataatwattattattatctttaacactgactattttagtaacttttaacctaaattggggtgagaacacctggctccaccagttcttaagttataataatttagtttcaacaataatcttccccaggtttttgtataccgccccacacccccccccccgcccccgccaagaaaaggtatcttttgtatttttgctttgtttttgtatattaggtgagtgtgtgggaggcctaaaagcaaatggtatattaaattttctttcaaaaaaaattccaactgtgcatactttttaaaagtgctcctcccagactcaacaggaggattaaagttttttttttaacataatccattaatggccgttccaattatattcatgctgctgtcacctagt

SEQ ID NO: 269670 - DNA, 625 bp, Homo sapiens
aaatattttcaaactatgcatctgacaaggactaatactcagaatctgcaaggaactcaaacaactcaacaaacaaaaaaacaactagccccattaaaaagtgggcaaaggacatgaacacacattcctcaggagagacacacaagcaacccacaaacatataaaaaatgcttaacatcactaatcgtccaagaaatgcaaattaaaaccaaaatgagataccatctcataccagtcagaatggctactatcaaaaagacaaaaaacaacagatgttggtgaggttggagagaaaagggaatacttatacattgttagtgaaaatgtaaataaacacaactactatagaaaacagtatggagggttctcaaacacctaaaaatagaactaccatttgactcagcagtcccactattgggtatctatccaaaggaaacaaaatccttgtatcaaaaagacacctccactcatgtttatcacagcactattcatattagcaaagttatggaatcaatcaaagtgtccaccaacagataastggataaagcaagtgtgtgcgtgtgtgtgtgtgtgtgtgtgtgtgtgtgtgtgtgtgtgtgtgtgtaataatatgcagccaaaaaag

SEQ ID NO: 269671 - DNA, 444 bp, Homo sapiens
taaagttggtgaattggagatatagatgataggctcaattaagtactggtttccaataatctgttatgagcccatcacccataaaagccagataaaattataaataataagtttaaaggtaacaacaggctaagcaccagtatctgatgccagaaggagcttaaggcacaatgctggagataagtggtttcagaaatactgagccattattacagagagtaatrtaacagggattatttaagaaagataaataatgcactatgatcaaaattaaaattactaaaatttgatatcacattttaaacataattatgtaaaaaaattcattttactttttctaagatgtactcttttatttagatggaagacatgtttgtgaaaaataacaatttccccagcatgtcacttctcaaaaaacatgtttcaaagatgaaatagagaaaa

SEQ ID NO: 269672 - DNA, 509 bp, Homo sapiens
ataaaatttgcattcttctagaataaagaagacatcattctatttaccagatctactaaagccagaatttagttaaaacactaagctattgcctcaagaattccttttgttcaattctgggaggagctcctcctctgtaatcaaccagattagcatggacctctatgtttctaccaactctccttgtcccaacagaacttctgttctgttgaagaatgactgtcactggtgttactatttttagataatcaatttttacagctgaagttcatcatatacatatattatctattaaytgtgtcttacagagattgtctttctccatcgtctacttcacaaatatcacctgttactaataggaagaattgtccttctttcatttgttgcccatgaacttgcctatgctttttgactatccaaatctaccaccaagggtttttatgaggatgaaatgtatgtatgcatatataatacaatgtaatgtttggcacaaatggatgattgttttt

SEQ ID NO: 269673 - DNA, 509 bp, Homo sapiens
ataaaatttgcattcttctagaataaagaagacatcattctatttaccagatctactaaagccagaatttagttaaaacactaagctattgcctcaagaattccttttgttcaattctgggaggagctcctcctctgtaatcaaccagattagcatggacctctatgtttctaccaactctccttgtcccaacagaacttctgttctgttgaagaatgactgtcactggtgttactatttttagataatcaatttttacagctgaagttcatcatatacatatattatctattaattgtgtcttacagagattgtctttctccatcgtctactkcacaaatatcacctgttactaataggaagaattgtccttctttcatttgttgcccatgaacttgcctatgctttttgactatccaaatctaccaccaagggtttttatgaggatgaaatgtatgtatgcatatataatacaatgtaatgtttggcacaaatggatgattgttttt

SEQ ID NO: 269674 - DNA, 531 bp, Homo sapiens
gtccatgctgtaccatggcaaaacaattaatttttgtctgtggtcatttaatatgaaatgatactaaatttttattggaacaagtggctgttgcaatgaaacattcgggtgagaaagaagaatgcaaacaggatataatgggaggctcactgcttccaactgtactagagaagaaagaacatatactcatagttttgttttacattctcagaaaaaggaacaatcaaaggctgatggaaattctgtgattttcctgaaagactctttaatcacaggctacaaggcctggcatagctaaaaatcagaaacaaagccaggtgcggtggctcaggcctgtactttgggaggytgaggcaggtggattgcctgaactcagaagttcgagaccagcctgggcaacacagtgaaaccccatctctactaaaaatacaaaaaaattagctgggcatggcggtgagtgcctgtaatcccagttactcgggaggctaggataggagaatcgcttaaacccaggaagcagtggttgcagtg

SEQ ID NO: 269675 - DNA, 587 bp, Homo sapiens
agaagttcgagaccagcctgggcaacacagtgaaaccccatctctactaaaaatacaaaaaaattagctgggcatggcggtgagtgcctgtaatcccagttactcgggaggctaggataggagaatcgcttaaacccaggaagcagtggttgcagtgagccaagatggagccattgcactccagcctgggtgactgagcttgactctatctcaaaaaaaaaaaaaaaaaatcagaaaccagtttaatattgtagatgttgaatyacagtgtaaaacagtggtattgtttgaaaaatcgtaggactggaagaatgagggagagggaatttggaacaaataggagtgaatgtgagatttaaggctttaaaattccactgagggacttctgcttccagttattataggattcagcagaccatgtctcctattgagaatacttagccagttatacaatgctccaaatacagaatcatctgttagagggtatgacgagcttccaagcaaccagaatatgagaaacaagatcacaaatgtaagagaagtatggataagtgaactgaattctgccttttcccctcagggtattt

SEQ ID NO: 269676 - DNA, 587 bp, Homo sapiens
agaagttcgagaccagcctgggcaacacagtgaaaccccatctctactaaaaatacaaaaaaattagctgggcatggcggtgagtgcctgtaatcccagttactcgggaggctaggataggagaatcgcttaaacccaggaagcagtggttgcagtgagccaagatggagccattgcactccagcctgggtgactgagcttgactctatctcaaaaaaaaaaaaaaaaaatcagaaaccagtttaatattgtagatgttgaatcacagtgtaaaacagtggtattgtttgaaaaatcgtaggactggaagaatgagggagagggaatttggaacaaataggagtgaatgtgagatttaaggctttaaaattccactgagggacttctgcttccagytattataggattcagcagaccatgtctcctattgagaatacttagccagttatacaatgctccaaatacagaatcatctgttagagggtatgacgagcttccaagcaaccagaatatgagaaacaagatcacaaatgtaagagaagtatggataagtgaactgaattctgccttttcccctcagggtattt

SEQ ID NO: 269677 - DNA, 615 bp, Homo sapiens
taaatcttcacaatgttaaccttactcataaaaattcagactcagttttatttgttagcagacgctaacaaacaaagccaagtgaaactagctagaagtagcaaagattaacaagtttggtttaaataacgaaataaagctcaatattgaatttgtttcttgcctccccaaatgtgacagtccaattttatatatactcacatgaatagtttattctattggatatgaaaatagtgccaacgatgttatatgggttaacaaaatctgagttctgggcaaccgtgtgacagacaccattggctggcaatctaacagtcatttctccctttcttccttgctaagagaatcccaatttgtccaacctcctttgggtgaccacatccttcagggaggctgggttattccaaaaagtcttgagtattcttatcaaggtagttttattatcctaggcaaattaactgctttaggcttagacycgtgacccaatttttgccaatatgatataaagtacagtctgtttggggacttctagaaatgtcttcccattctaaataaaggaaaaaaaaaactggatgtccccattttctaattggtcaccactgtctgggctgctgc

SEQ ID NO: 269678 - DNA, 559 bp, Homo sapiens
atgcccctcaaaacacattttgagaagcattaatttactataagaatttttacttaagtacwttgggacaaaatgtagtgaagaaacttcaccatttaagcttgactgtttgtagaaaaatgttttaaaatgagaacagctaccaactgttgagtgcttactctgaactgggcactgtcataacctctttaacttaccaagtacagatactgttaggaacctcattcaatatgtgaggaaaatgaggcacagggagaaaggccctattactccagatataaactgctcacattgtccatatttgcaagaaggaagaactttatcttaaacttcaaactaacatccaaatcctattgctagacaagtattcttcacactcatttaagttggccatgagtaacttggcaaaccctatcagacgactatgcctgggaattcagtctaaaccgtcatcttaaaacctgggcttacggatgtggccatttcggtatgatttggaaacatttctaattaaagacacagttggactgaatttaatcctagcacaaacagctaccac

SEQ ID NO: 269679 - DNA, 584 bp, Homo sapiens
tttcccaaacatatttagacaaagaactcctttttattcacataaaactttgatcaagcagaataaatgcccctcaaaacacattttgagaagcattaatttactataagaatttttacttaagtactttgggacaaaatgtagtgaagaaacttcaccatttaagcttgactgtttgtagaaaaatgttttaaaatgagaacagctaccaactgttgagtgcttactctgaaytgggcactgtcataacctctttaacttaccaagtacagatactgttaggaacctcattcaatatgtgaggaaaatgaggcacagggagaaaggccctattactccagatataaactgctcacattgtccatatttgcaagaaggaagaactttatcttaaacttcaaactaacatccaaatcctattgctagacaagtattcttcacactcatttaagttggccatgagtaacttggcaaaccctatcagacgactatgcctgggaattcagtctaaaccgtcatcttaaaacctgggcttacggatgtggccatttcggtatgatttggaaacatttctaattaaagac

SEQ ID NO: 269680 - DNA, 584 bp, Homo sapiens
tttcccaaacatatttagacaaagaactcctttttattcacataaaactttgatcaagcagaataaatgcccctcaaaacacattttgagaagcattaatttactataagaatttttacttaagtactttgggacaaaatgtagtgaagaaacttcaccatttaagcttgactgtttgtagaaaaatgttttaaaatgagaacagctaccaactgttgagtgcttactctgaactgggcactgtcataacctctttaacttaccaagtacagatactgttaggaacctcattcaatatgtgaggaaaatgaggcacagggagaaaggccctattactccagatataaactgctcacattgtccatatttgcaagaaggaagaactttatcttaaacttcaaactaacatccaaatcctattgctagacaagtattcttcacactcatttaagttggccatgagtaacttggcaaaccctatcagacgacyatgcctgggaattcagtctaaaccgtcatcttaaaacctgggcttacggatgtggccatttcggtatgatttggaaacatttctaattaaagac

SEQ ID NO: 269681 - DNA, 598 bp, Homo sapiens
taaggctataaagagggggtaaaaataccataacaactaaaaaaaaaaaaaaagtggagccatcttgaaaatgtgaattctatctaaaaataataaattgaaatgcctttaaattgtcacagcttygtgcaaggccgatgaagacctagagaaacatcacaagttttacatgagtccttaacagcagatgtgccaggttgctgagtttgatgtaagttccccaaataaaatgctctgcaaagtattcatgtctatcatcttcatttatgctattattaaaatatttgttgagctataactgacatatgtgaaactgcatatatttaacaagtatagttttagaagttttgacctatggaattaattctacctatggaattacttaattaattctacaaggaggatgatgaacatatccatcagacctaagagtttacttgtacctccttccaacctaggcaaccactgacatgacatgttactatgggttagcttgcattttctgagattctatataaatgggcttatacaatacgtatttactttttgtctggtttctttcactcagcatcattttgaaattcctccatgctattgc

SEQ ID NO: 269682 - DNA, 468 bp, Homo sapiens
attattattgtactggttaatgtcacatttatatttcacctctcctaggacttggacttggaaagatgatgagacatcattcttaccattaatggcaggaagcaaggtcatatttggtaacgatgtgatgttataggttttataaagtgraagttactctgagtggaagaagttctcatcacaatgcttgggatcaagttctggtcttgctatttaccagctttggtatctctggaaaacaaccacctgacttttcctattttttaagacataatcaataattgtttccccatccttgtatcctcaaataaactgtgaatatagaaacaatttttaaatggttctacaattgttttgcaattatgttaattagaatgtcaagggtcttttggtctgatagagttgtcaagctgaagtgcttgggtgaggcctaagaacccatattcacactgattccatgctaggggc

SEQ ID NO: 269683 - DNA, 468 bp, Homo sapiens
attattattgtactggttaatgtcacatttatatttcacctctcctaggacttggacttggaaagatgatgagacatcattcttaccattaatggcaggaagcaaggtcatatttggtaacgatgtgatgttataggttttataaagtgaaagttactctgagtggaagaagttctcatcacaatgcttgggatcaagtwctggtcttgctatttaccagctttggtatctctggaaaacaaccacctgacttttcctattttttaagacataatcaataattgtttccccatccttgtatcctcaaataaactgtgaatatagaaacaatttttaaatggttctacaattgttttgcaattatgttaattagaatgtcaagggtcttttggtctgatagagttgtcaagctgaagtgcttgggtgaggcctaagaacccatattcacactgattccatgctaggggc

SEQ ID NO: 269684 - DNA, 579 bp, Homo sapiens
tgcaggtctcaaagctacctatgtcagacacacagggcgcagacataggctgctctgactccaaatattctgcgtgttattctcacaccacatgtcttctgcctaatgtgctaaaacaattcaaattcaatgtctctgggccattcttcaacacacactcattttcacttttgtgggagatgatccaaaacttgattgctatgaattcttttatttatttattttttaatgtgtgcagttctctcacatcttaaagtgtacatgttcagctctgtaggatttcttacaggcaaacaaacacatataaatcaccattatgctttaattctaactgaatacctttgcccaacattactccatggaccagaactcatatacttttgcatatttgtatcagttaaacattgtctacctatgccatgtcaatctttcatgagtatgaccagtccacaagttccaamaatgtagcagtgcaacaaaacctagacacgcaccctagagatctaacacatacaggcataaggagacatacatacagatgttcacagcaatacctttttttgtaagagtaaactaatg

SEQ ID NO: 269685 - DNA, 564 bp, Homo sapiens
cttaatgcctcttatttggtctcaacttctactctgcaattgcttcttcccttgctatcacttgtctggctttctgactttgacgcttctcaagagaggtttagttggatttctgattggaatccagtgtcgagcatccctgtcagaaaggctcttaggacaggtcaccagatggctgcagttctcctgtggtttgctgttgctacctttaatttccacagtgatcatgatttagtcagctctggccaaggctgcagattctggagttccaaggatggcagcgtaagtatcggaaggtataggaagctgagtcatttcagacctttcttctacaaaagtgaatggatatctatcgacacagggaagcttgaggtaaatgccaagagactgagacaggcaatgtgtgctttgatggagaagataccccaatgggatggtgatcagggaggaagaaaatagagtgtaaattgraaatgtggcttatcttgtatgacgtcctcaagatgcactcaataaatgcttgccctatgaaatgttgaaggaagagacaacatttggcctaca

SEQ ID NO: 269686 - DNA, 564 bp, Homo sapiens
cttaatgcctcttatttggtctcaacttctactctgcaattgcttcttcccttgctatcacttgtctggctttctgactttgacgcttctcaagagaggtttagttggatttctgattggaatccagtgtcgagcatccctgtcagaaaggctcttaggacaggtcaccagatggctgcagttctcctgtggtttgctgttgctacctttaatttccacagtgatcatgatttagtcagctctggccaaggctgcagattctggagttccaaggatggcagcgtaagtatcggaaggtataggaagctgagtcatttcagacctttcttctacaaaagtgaatggatatctatcgacacagggaagcttgaggtaaatgccaagagactgagacaggcaatgtgtgctttgatggagaagataccccaatgggatggtgatcagggaggaagaaaatagagtgtaaattgaaaatgtggcttatsttgtatgacgtcctcaagatgcactcaataaatgcttgccctatgaaatgttgaaggaagagacaacatttggcctaca

SEQ ID NO: 269687 - DNA, 545 bp, Homo sapiens
ggcagaggcagagatgagagtggcatgtctacaagccaaggaacagcaaggattgctggcagcaccagatgctaagagaaaggtgaggccctgctaacacaccaacaccttgattccagacttctagcctccagaactgtgagaaaataaagttctgttattttaaatccccctagtttatggtcatttkttatagcagccctagtaaactaaacattgtggtgataccaaggaaatgaatgggggaaaggacgggtgagttgaatgcttttgttgttctgagaaggaagtagtcatttccatagggggttgtgggcctattgagagaagtttcatgggggggccctgggtcttgagagtgagcagggttgggacatctaaggtgcaaaggaagaagaaattacatgtagctttaggaaatagtgcaaataaaggtacaaatagtacaaatagaaacacacatagaatataccatggactgtgtctagggagaattacatgctttagttgtactagggcatgtttttgagtgaaaaaaagtagtg

SEQ ID NO: 269688 - DNA, 459 bp, Homo sapiens
atatacgtaaagacatttgggttctatcctaagtcaacttcctttaagaagccctcctttatggcccactccaccacctagccctaagaaccaataagaccatttagtttttgctcctgtcataccctatgcctctctagtgaatcagccagcacacttagttctgcatgttcattttttaccttctacagcatactattaatatatgcatttctaactgacaatattgattttcaatttttaaagaaaatttcaaatgctgtttgctatttttatctctgtatgcccccacccagacccctcagcatcctgaatcaaaattaaaggcaacatcctccattgacaaggaaaggagcaagctccttgggaggttttgtttttrcatgatggtatctaagcatgtgctctttctcacaaatttatggctggattgctagggtctaataaagtacaggcaca

SEQ ID NO: 269689 - DNA, 597 bp, Homo sapiens
cagtaacaaatagtcatccagttcctctttgggggttgctcaaccctacaggaagtggaagcaaattatagagccactcctctgaaaacatgtacacaccaacacaattttgaactcaaatgtagggatttactgactctcaaactctatttacagactctccattgcagacacctctacttttaataatgcaaaactggctccttcaaagttacccactttactgtaaagcagcccctttattgtcgaatagctcaaaggtgagaaaaaacttcctcagagctgaaatttgcatctttgaaccttccacctgttcagtggtcctccttctgtcctgcagagggcagcctgcaccattctgcatgaccacagccctgcaagtatttgaagatagtttgttctgccttggctgtctctgggctgaatgtctccatttctttctgtggttattcatttctcatgggatgcagaccatttatcagcctgattgccttcctctaattgtgcactagctctgtgagttgtttcctttagtcacacagtaatatatacttaytgtaaattaagatcaaaccaaaacccaaacaaaggaaaaat

SEQ ID NO: 269690 - DNA, 602 bp, Homo sapiens
cagactgaattagtgtaagccacagcccaatgactgatatcctcacaagcagatgaaagttgggggccaagcacagtggctcgcttttataatgtcagtactttgggaggctgaagcaggaggatcacttgagaccaggaatttgagaccagcatggtcaacagagggagaccctgtctctacaaaacaaaacaamaaaaaaaaagttgccaggtgtggtggtggttcacttttgtactcccagcactttgggaggctgagctgtgtgggtcacttgaggccaggagttcgagaccagcctgggccacatggcaaaacctcatctctacaaaaaaatacaaaaattagctgggtaaggtggtgcacacctataatcccagctattcaggaggctgaggtgggaggatcccttgagccaaggagtttgaggctgcagtaagctgtgattataccactgcactacagcctgggcagcagagcaagatcctgcctcaacaaataaaaaataaataaaggaagacagaagttgtgacacaaacaaaatgccatatgaagacacagaaacacagcaggaaggcagccatgtaaaaacagaggcagag

SEQ ID NO: 269691 - DNA, 616 bp, Homo sapiens
tgttgttttaagccacctgatttgtggtactttgctatggcagcttgaggaaactaatatactagaaaaatttactccccgaaccaaaagaaatgaaaggaaattcagcagcaagttcttagcccaagaaaaggagctcagtaatctgaaagtagtttgtactttactttccaagaaagaagattaatatatctaggtatttattatccatagtattgtttttactatcactatcattttataagggaaatgatatttcactgccaatgcaggtgagaatattaacacatttaggtttcacttttacaaattcttaatttcctcattttgctaaggacaagtaaaaaattcggtcatggattagcacaattctacccccggattcattaaatccttgccaattccagtttatctgcaaggataatggtcctcaaatcttttcagagagtgactgcaatatgcataggacggtatacatgacacaaacagcattttacaaacctcccagaaataaaacattctcttatttgcatttccttaatattttcacctgtacaactgatttatgtttactaaygaacaaataatgaaaatttagccctaaaataaaatctgg

SEQ ID NO: 269692 - DNA, 481 bp, Homo sapiens
attctccgattctcaattagcacagagcatagctactattgtttgaaaccaaatccatttaactccaaacttaacaattcattccactcttctgctttgcctttgttaatttgctgcctgcttcccaatttcatgttttatctacccaactatacgccatgctctttaagatcgaagaccatctctgggctytccttccatggggctctctctggctaagcattcagtgcctgattaaaatagatgtggaagagaagaaacaggtgccaagaggctgatgatccattgtgatgaaagttctcctgctatagcaagacatcccttcctctgtgctgacaataaactatttgatgaattcaggtgcctttgtcccccattcaggtcctcctcctccttgttctgtcttcttttgtgcattagtgatgagtatttcctcctaggtttgctatgactagatatgtttgggttgggtaaaaattgt

SEQ ID NO: 269693 - DNA, 589 bp, Homo sapiens
tttattcatgtattattcatgtattatgtaacatacagaaagttaaaggctagaagttcaaaacctgtaaatgtaaatctcttcatattttcctgtagcacctgcttagtcttgctcacctttgcgtagtatgaaacccccatatttgaagccacagttctatcatatcaaggatatatgctgttaacagtggtaagaatcatctgctcgtactgtgttctgtctcaaataatgactatgtttcatgctgtatggttatgctaataggactcatcaagaaatcgatcccttccccactgtacacatttgttcattacccattggagcactggggcattcaaatttttcagtgggcattgattgggctggagcttctggtgatttattggtcttctcagatgaaacagycaacctcaaatgccctctttctctacaacttttctttgggggctaaaaatacagcttggtttaatgtacttccaagcttttgcaccaaaatacatgcactagtgggggagaggaaataagcatccccagagctgagtataacctaagaggctgtgctgaaaaatatacccacacacacaga

SEQ ID NO: 269694 - DNA, 499 bp, Homo sapiens
agaagggggaagataaaacatgaaaatttaggcaactattgacggctagagattgcatagaagscaagtctgagagaaaaactggatcagaaattgaaatccaatggctattggcaggcactaattggggctatgcatttctctcccattgttctgcttcaattagaagaaaaaaactaactgtatgataaagtagagaggtcaagtttggtgttctagaaatatgtggccccacagtttcctggatatatcactttatcctttttatttatttatttttatgtcttttgagatggagcctcaccctgtcccccaggctacagtgcaatggcgcgatctcagctcactgcaaactccgcctcctaggttctagcgattctcctgcctcaacctcctgagtagctgggattacagatgcccagcaccatggctggataatttttgtatttttagtagagacagggtttcactgtgttggtcaggctggtctcaaactcct

SEQ ID NO: 269695 - DNA, 588 bp, Homo sapiens
ttatcacttggtcacattagaatagctcttaccctggaagttaaaaaaaaaagaaatagaactccttctytgggaacagaagatttaaagctaatttttgtagaggtggaaactcttggccatgtttccactagagtgggttctctgctctgagagcaaggtgagctgtctcctgataaggtgtctttctgcctgacgtcttggtattcctgggagcaaagttcccaggaaaaagcctactttctagttggttaggctgtatgttttatttccattgaaaacagtagaaaagcctactttctagttggttaggctgtatgttttatttccattgaaaacatattctttatttgtcaatcttcaattctcaactttactcactcatactattcaaagtaccaataatgtatactaagaatagccagcattcaattacttactacaggccagatcccatgtcagatgctttatatgcaaccaactatccattcagtcctcaccacagttctatcaggtcagaatatacaaccttcaacctcgtttaacacaggaggccaccgaggcccaccctcacatactttgagctat

SEQ ID NO: 269696 - DNA, 563 bp, Homo sapiens
ggggaaatgtcacccctaaagggaggaaaatgagttcttggggaacgaaaaaccttactcaaattgtgtatgaagcatagacacacatagagtgcataaacagatatacagtacatctgaggaataaaaatttcctgaggttggggctgtcaggaaaaaatgtctcaaaagtgtccttgtaggggtgacaatgaggaaaaggctgagaatcactgctttgggttgttttaatatgctttatatgtatccctttcattttcccaacagaattgaagctatttaagagcagggattgcatcttctatttctcctgaatgtttacaccacatgctcaaaggtcccaatattattttatcaccctcctgggagtacactgtggtctaattttatgcaactttcaattatgtaaattttaatgaatgtcataawacatatccagggttgaaaaatttaaaataatgcaaattccttcaaactaaaaatttgccaagaattgcatgatttcaaagctggtaagccaagtgaattgttaatcatgttcactgctgggtaatagcattaac

SEQ ID NO: 269697 - DNA, 519 bp, Homo sapiens
tgggcttttggagatgaattgagtaaaatacaagcatacactaagatttggcaggttccattccagaccaccacaataaagcaaatttgcaacaaagtgagtaacaaccgttttggtttttcagtgcattataaaagttatgtttgtctgttgtctactaaggacataatagcattctgtcttaatatatgtacatgttaattaaaaatactttacagttagtaattgctaatgatcatctgagccttcgrtgacttgcaatctttttgctggcagagggtcttgcctcaatgtcgatggttggtgactgatcagagtggtaattgctcagtgttggagtggctgtggcagtttcttaaaattaaacaacaatgaagttggcagccttggttgactctttctttcacaaaagatttctctgtagcatgctatgctgtttggtagcattttaccaacagtagaacttctttcaaaattgaagtcaatcctctcaaaccctatcattgcttcatcatcaaa

SEQ ID NO: 269698 - DNA, 591 bp, Homo sapiens
cttactatttttatgatatctgcagttacttcttcctctgaagtcttaaactcctcaaagtcattcatgagggttggaatcaacttcttccaaactcttactaacattgctattttgaccacctcccatgaatcacaaatgttccagaaggtttttaatttattttgctcagatcgatcagagaagtcaccatctatggcagctatagccttatgaaatgttttcctaaataataagacatgaaagtcaaagtaactccttgatccatgggtgcataattaatgttgtgttagcaggtatgaaagcaacactcayctccttgtacatccccatcagggatcttaggtaagcaagtgcgttgtcaatgaccaggaatttttttttttaataatctctttttttcctgagcagtaggtctcacagtaggcttaaaatagttactaaatcatgctgtaaacagataaactgtaagctaggctttgctgttccatttctagagcacaggcagagtagattttgcatcattttcaagggccataggattttcagtatggcaaatgagcactgacttcaacttaaaatcactagctg

SEQ ID NO: 269699 - DNA, 597 bp, Homo sapiens
aagactggggttctttgaagtaatgaatcacctttattggtcatggaattttgtaaaagccactttactccctgagtctcagttttcttagctctataatggggagataaaaataattttttctttatagggtggttgtgaggattaaataaggcaatacgtggaataaaattaggacaatacctagtatgaagtgattgctcaagaaatattatcatcactgctgttaytgttctagatcgatttgtaggccagtgagagtaactctcaaacaaaatatgaagactgagagagactcatacatggcattagtgactttttgactcattttaatcctgcagttataactaggtaagtgacatggggagatatcaaataattgctttgataaaattataaatatctatttcagaacatgttgatgaaaagatactacattattccagatatgctgccagtgtgtggaatatattttttgtttctttttttctcaattcaagttaagaaagctttttattgaacatttatgatgggttggctgaagatccgggcacagtggatacaagaataagcttaggaactgctttggtggtgcat

SEQ ID NO: 269700 - DNA, 470 bp, Homo sapiens
agctacagcaatatatcagcatgtttttggaaaccttctcctcttgtgatttaagtcaagtcatgggaaacaacaaaattcactcttcccaaaggcatatgaagatgcctattttcacacttcctcacagatrtgcacagtgacacatgagcacacacacgcagcagagtgagcacttcactgggaatactccggacctctcctctctgatagttggtgagtacaggctagcagaagtcagctgtaaaagaccttctgacacgcagccaaagctctaaagccctgctgaggagtttgtcctccccaaagcctgtgattctaggagaacacgcacagtaagttgaaagttgttttctctttaacccaggaagaaactaggtatttaactgaagctgaattaagttagagaaaacaaatacattgtgcccaggatttacctttctctaccacccctttgtgaactttgtaca

SEQ ID NO: 269701 - DNA, 407 bp, Homo sapiens
taattagctagtccagaaagattctcccctttggaatttgtacaagaatacatggaagaaataacccagttgtcaataaaggaaaaaggagaaactgaagaaattagagagagaaaaagaaaacgaccaatggaacccagcacagcccatgagaaagagagaamcacagcagcttaatagtttgcattatctccttacagaaaggctatctctgtttctttcaaaatagaacacacaaactcacaccataaacaaaatcagattgtaagaaaaattctcatttgcattttcatgttttagcaatgtttagctggttcaagtacataaataatcattgcccaaagacttggtcaaaattaactgaagtgtagacatagggctcaaaagaaataaaactgattgcatgt

SEQ ID NO: 269702 - DNA, 407 bp, Homo sapiens
taattagctagtccagaaagattctcccctttggaatttgtacaagaatacatggaagaaataacccagttgtcaataaaggaaaaaggagaaactgaagaaattagagagagaaaaagaaaacgaccaatggaacccagcacagcccatgagaaagagagaaacmcagcagcttaatagtttgcattatctccttacagaaaggctatctctgtttctttcaaaatagaacacacaaactcacaccataaacaaaatcagattgtaagaaaaattctcatttgcattttcatgttttagcaatgtttagctggttcaagtacataaataatcattgcccaaagacttggtcaaaattaactgaagtgtagacatagggctcaaaagaaataaaactgattgcatgt

SEQ ID NO: 269703 - DNA, 605 bp, Homo sapiens
aagctttcagatatgtgaggtcaggccagttttaaaaactaaaggtaayttttttttcttaccacgtgtctttataaaaagagcaccagacttagtgaacattttcaagaaattcctaagtggtgtgttcttgtttcagatctgccagttactatccaagagacacaggcaaatcatttagctttttcaggctccattttcccatgtcagagctccttccagaggggccctcatcttagtctccttagggccctcagagttcctgattcatcatcagaatctgagcaccttaatttatagtgcatctttttgatgggcatatcctcctggctatttagaatcaactcaatttcatgtgttacttttttttttttttctctgagatggagtttcgctcttgttgcccaggctggagtgcagtggtactatctcggctcactgcaacctccgcctcccgggttcaagcaattcttctacctcagcctcccaagtagctgggattacaggcacccaccaccaccgccggctaattttttgtatttttagtagtgacagggtttcaccttgttggccaggctgcttttgaactcctgggctcaagcaat

SEQ ID NO: 269704 - DNA, 629 bp, Homo sapiens
atttacattgtttttagacataatgccattgcacccaaatagactacagtatagtgtaaacaaaacyttatatgcactgggaaaccaaaacattcatatgacttgttttattgctatattctttatttatttatttatttatttatttatttatttatttatttattttgtggtgaggtggtgatctggaatcagccagcaatctctccaagctatgcctgtaagtggttttctgattaatccttttatttcttatatctttaaaagctcaattgattacaggtgcaagcctgttatttatggaaattgtgatagattgaaaatcagcacccctgggtttaccacctgagaaatttccttcccttccctgagcctcagtgacctgatttctaaaataaaaacattttattaagtgacctccaaagcctgttttagctattggagtccctgaatccacattttttaaatctcacaatatgaacttctataagaaataacataggtgattgttttcattctaagaaaaagaagcatttttctgctcacctaggagtcaaatggaagtaaaattttgaaataaaaacaccagaaagatagatctggttcagacgatattaaccaatctatgt

SEQ ID NO: 269705 - DNA, 634 bp, Homo sapiens
ctgcagtattttagagcagccttaatattggataaatcattgtttgactcagttgcttttgcccactcttttcaaggttctggcgctgtactaaactcaattataattcctctctcttgagacagaggtctccaggctgagttcactgtttctgatacctcctattagcttgttcccgatacctcctattagcttgttccctctcactttacaagggcttaattagccattataggagactctttccaaatgcaggctttgcaaaatgattagtgctatgggccgtacttcaaaaataaaattgcatttaggataattttctcatattttaaaatgttactttcatgataaaaaataatacaggaaaacattcttattgcttcaaaaaatccaaactgtactacacagtgaaattactgcttgactctgacccaattatattcaagycttctgttaataaccatttgcaatgttttatacataaatgggatcatcctgtaacttatttatttcacaatacaacatggggctctttaatgtaagcaggtaaagatctgagaataaggtaataatttttaaacacaattttacttggttcagtcatttactttttaagaacctactatgtgtttgg

SEQ ID NO: 269706 - DNA, 628 bp, Homo sapiens
tgttgtaaatggctacttagctgaaaatggcacttagcagccaggacaagaaaagagaagagtttatttatttcctaagataaaaacccttataatatgcaatcttgatactctcatcattgtcagtcaccctcagttaagcagagcagaggtcacaaggactgctcccatgctctttactgaagagtggttccctttcgtgttggcaccacttcatagcaaatctttcacacagaagcatagttttgggtgggggctctttaaggggatccagactccatatcatttacatgattcattctctgatcctgttttgactgggttggtttcaatcattcattagacacctatttcttctggtctattatgagatgtgtgagatgtattggggatggaataataaataaatagaaataatctcactctactcaatgagctttcatactagtagaaaataaaagatcaagaacaagtacacagacaagtaattcaaataattataaattgtggcaaattctatgaagaaaakaatgatgcagcaaaagcaaacaataacagggagatctagttagggtgaatcagaaaggcctttcagaagaagtgctatttaagccaatgcttgagggat

SEQ ID NO: 269707 - DNA, 423 bp, Homo sapiens
agacatggacaatacaaataactcacagaagagcaaaatccagaataaaaagaaccccaacatgttgataagaaaaacataatagcctaattaaaagaaatgacaaatgtaatagcaaaagtgtagaggagggaaaaacttgaataccaaatkaacctaaaaattgtgtttcttctcactagtaatacatgaaatggtatttaaatgtaattcaattctaatgcatgccaatcaggtttacaaacatgtcaaagtttgataatgtcaattgctggagtatgtggaataagagaaacccttataaattagtgtacctgctttggagagcaatttagtaatacctagttaagttgaagaagtgaaatatttttgtcaataactaggatggttgaaatgttcattcccatgattcaagttgtcagt

SEQ ID NO: 269708 - DNA, 562 bp, Homo sapiens
tgaaacagtatgaaggggcttttttgcatccaattcctgttcaacaraaattcttgattgggttagtgtggctaactagtttctgaaatgcacggccaatggtagtagtttcagtatctttggcattatatgcatattactctgcactgaactcttaatgaactatggaaataattttctggtgagctcatttggaacaataagatgtactcattttttcttccacttggcttttaggattgaaggttaaaaggaaaattcaacggtttttcttatgccagaggtacttccagaagactagcaagctgctggtggctatcagtcttttcctccaaatctcaaaattaggcacacaggatgttgcagctatacaggtattttagaacaggaacagagtcacacgttttcatatatttcatcatgtcttccaagtctccaactttaaggaaaaacaattagcttttgcattgtacttctagggtagaacccacttgacacacccaataatgtatactcagatcccacttcaagaaaggccttgctgctcagctccaggactctg

SEQ ID NO: 269709 - DNA, 499 bp, Homo sapiens
attcatggaaacatgtacatttattatttgaaacagtatgaaggggcttttttgcatccaattcctgttcaacagaaattcttgattgggttagtgtggctaactagtttctgaaatgcacggccaatggtagtagtttcagtatctttggcattatatgcatattactctgcactgaactcttaatgaactatggaaataattttctggtgagctcatttggaacaataaratgtactcattttttcttccacttggcttttaggattgaaggttaaaaggaaaattcaacggtttttcttatgccagaggtacttccagaagactagcaagctgctggtggctatcagtcttttcctccaaatctcaaaattaggcacacaggatgttgcagctatacaggtattttagaacaggaacagagtcacacgttttcatatatttcatcatgtcttccaagtctccaactttaaggaaaaacaattagcttttgcattgt

SEQ ID NO: 269710 - DNA, 587 bp, Homo sapiens
tgacataggcaaaagcgctagagctctagtctgtcttttggatcaagagctataatcgtatgggcttctggtggctctttcccacaacatagaaagatatgaccagagaattcaggtaaataaagctgatacccaaagaaggaaacagagctgactgatagcaaaagagagaaacagcccaaacctcattttttaactcttagatttagcagggcctacaggcaactatactcttggatcctcaatattcatgagccaattattctccttgttttgcttaaaccactaaaagttaggtttctgttgccacaaagagacttataaccattacatgtatgaaacttaccttcttaattatgttttaacatttcatattaagctgcacttaatttgttgattttaacagtagttctatattagaaccaatatactacatggaatgtggacggagacaaccrtgaggatgagaatgatattggtgatgatgacaggatgtgacatgaaggttttcaagggtaaaaaattcattagcaatgttagaagagccttccgttagaacacaaagctattcttcagtctttagccac

SEQ ID NO: 269711 - DNA, 493 bp, Homo sapiens
gagtccaaacttttcttgtgctccaaagtgatttatcacagatcagaaacttcagtttgacaaatttttaactgtcaaagtgtctgctttctctgtagatgacattccattatacccatgcacaacaagtcatcttgtcaagaggttaactgaagtcaaatcatgacttgctttaattacttggcctctaatagaaaagaaaggccccttgttagtacataatttgatgtcttactgagtaaagcaagaatgttttttgggaagatttaagccaagatgcrcttactcaaagatataatacttggaaataataagttaacactagcacagcatctactacactttacatatcacattaatctgtatttaatcagcagaaaagaaccactatacgtattatggaactaaaattagagcttatgtaaatggggagaggtctgggcaaatgaaaatatgagaaatcacacttggagggttgcataaatggtcacta

SEQ ID NO: 269712 - DNA, 450 bp, Homo sapiens
caataaaactttctgcaatgattgaaatattctgtattatccaatacagtagtcacatgtgactattgaggatttgaaatgtagatggtgttagtgaagaattggacttttaatgttatttaattataattaatttaaatgcaaatagatacatatgactagtggctatcatattgggcaatacaggattaggtcaaacagttccttggagatgggtggtattttacacatactggccatagaagggttctttgaagaggtgaatttcaacagcatgtataaatgaggtaaaggaattgacctggttggggatygggggatggcgaaagaaaagagaacagcacatgtctcaggcaggcaagaaactggtggttctgtttgaggaaatgcagtttaacacagctggaatgtagaaagcaagctgggagtgttgtttgaatgtgttaaagc

SEQ ID NO: 269713 - DNA, 516 bp, Homo sapiens
attaacataaaacctatcacaataaaactactgaccatcaagaccaacttgaagaagcaaatctctaactactcttgaggaatactttggtagctcagaatgcacagagctaccacagataaaaaattctgccacatatcaaaacaccataaacaattacacactacacagggaataattcactatgatggaaagtcctgtttatttttcaaataagaagattatcatcctgggaatctgagataatagaacaatctggaggaatgggaatataacaaaatagtatgttagaagatagaaaattatagcagaatgaatagaaacccyagtgaaataacagaatgctacacaaacttaagctagtttgtagaagaacaaaaaaggatttctaaaaatgaaaaatatacagatattgatattaaaaactcagtggaggggataagcagcagattaggtatagctgaaaagacattaaaaagctaaaagataaggctgaggcaattacccagaaagcaa

SEQ ID NO: 269714 - DNA, 556 bp, Homo sapiens
tctgattccttacaacacacctctttgcataaagcaattctgagtgaacctctgttctttgcagtgaaacaggacttaagtaaatataagatttaactaagagaagttygcacagatgcttctgggtgatagaaagataaacaggactctaattcatgaatatgctaattaattttctgctttggaagttaatgcttgttagctgacaatagatattagaaataatagttattgtctctttaatatctatagagcatatttaagggtatctttgttatctcaataacacaagctcagaaaaactggcttcagaaatattggctccatttgcagcccatttagctaagtgggtgcacccagtgtcctccggcttggcctcatggctgccatctctcagaaagtactgcctgtaccactcttatactctggctctctccactttgaactgaatgtttcccactgagctttaatttgtgactttctatgtttgtatgtatttatttaacattttagacatagagtcttgctctgtcacccaggctggagtgcagtggca

SEQ ID NO: 269715 - DNA, 517 bp, Homo sapiens
ctctctccactttgaactgaatgtttcccactgagctttaatttgtgactttctatgtttgtatgtatttatttaacattttagacatagagtcttgctctgtcacccaggctggagtgcagtggcacaattgcagctcactgcagcctcaaactcccaggctcaagggatcctcccacctcagcctcccaagtagccaggactatagatgcatgctaccacacccagctaattttttcttttcttttcttttctctttttttttttttttgtagagatgaggtmttgctatgttacctaggctggtctcaaactattgacctcaagtgattttcttgtctctgcctccaaaggtgctgggtttataggcattagccaccgctcatgagtttttctcaactcaagagtttttctgatagctataatccagccttcctacaacaactggttggcagcccaaactaatattttcctttaagtacctttgacatctacagagggttctctttaggcaacc

SEQ ID NO: 269716 - DNA, 602 bp, Homo sapiens
cgtcatcatttgtggaatgaggataatgaaagtaactgtctaatagaatttttgtgaggattaaatgagataatgtatgtaaatcatttggcaaggtgcctagtacacattaagtgatgtaaaatatttcctaccactgcagtagcagtgcatagtgtgatcaatcatttataaatgttaagtaaaatcratcagtaatgtttagttaattgcttattcccagtgccttgttatatgtcctggaaaaatgcaaaagaaatataaatcagcctttaatttcataatgctgataaagtagttgggcagaagaagttacctgtgaaaagttattcattaaacaagtgcttgtcaagtgcctactagcactttttcctgatgaaaacaaaaattcttactctagtagactttacatttcatctgggggcccagggggactggcaatgataaatagtcttaataaagacgttattgtagaagatgagggtaaaagattttaaaaagtagattgaatgagtgcagtttgaaatagagaagacctcaatgtaagatgatatttgagcaaagatttgaatacagtgaaggagtttgcccggcaatcatcg

SEQ ID NO: 269717 - DNA, 626 bp, Homo sapiens
tgataaatagtcttaataaagacgttattgtagaagatgagggtaaaagattttaaaaagtagattgaatgagtgcagtttgaaatagagaagacctcaatgtaagatgatatttgagcaaagatttgaatacagtgaaggagtttgcccrgcaatcatcgaattgaacactccctgtgtgttagaatatctaatctgcttattctgcatcttgaaataagtaaaggactcaaaggagaattgggatatggcattctagatggaaaacaataataaggtggagtccttagtttattaatacattcattaaacaattttttttttttttttttgagacggagtctggctctgttgcccaggcttggagtgcagtgacacaatctcggctcatggcaagctccacctcccgggttcacaccattctcctgcctcagcctccccagtagctgggactacaggtgcccgccaccactcccagctaattttttgtatttttagtagagacggggtttcaccatgttagccaggatggtctcgatctcctgacctcgtgatcctcccgcctcggcctcccaaagtgctgggattacaggcgtgagccaccgtgcccagccaacaaatcttta

SEQ ID NO: 269718 - DNA, 513 bp, Homo sapiens
gatagatagactataatacataattgatatattagaggcaaaaccataaaggaaagaaaagaaatatataacattaggttattcattgcctctgaggagggaggtgagctatataattagagaggggcacagagagaatatatactggtatgctttcatatgtaatctgattgatggatcacagttgctaaagttattctttgtttattaatacttttttacctgtatgtttgtgtgtgyacaataagcagtttatatatttttgtatgtatattttataataaaataatatttggtagaagaattgagatttaaattcagagagaattactctagaacccattgtcttaataaatatacatacaatgaattagtaaatggatggaattatctgttcacatttgctttcctttcacaggtggtctttcctttgacatctttctataattttgagcctaataattcatagtcaccaagatatgcttctaaatcttcattcagtgtttgatgcaa

SEQ ID NO: 269719 - DNA, 611 bp, Homo sapiens
accaaaatgtccacttcatgatgattgtcaagaaagattccatctcagtgagactacaaaaaaaacctgtgcttccctctaaacattatgtgtgtttttttattgggggaactataatttgtacaactgaccttttttttctcttttaccaagagtttagacccaaatttttcatgcatccttaagcaaatatatagaccatgaatggcaaattatgagtcataaatccctcttcagtctccartgcagatgccacaaatcaaacacagtactattacccatgaaatgtggcctcagaatcctttgcaacatagcccttctggaaattgctaccaaacagtgaaagttggaacaatggctgaaacccatttggcattctcagaacactgcactgtgtcttgcattttaagtctcatttctagtaatattttacatttttgttttttttctccttctgtatactaaattaggcttgtgttatctttcacagattcacatttacaagttactttaaattctatccagaccaaattgtggaaatcaatcaaagcacacctaatctaacccctcgaggagctcccaatactatggggactgaaatatgtgaatag

SEQ ID NO: 269720 - DNA, 573 bp, Homo sapiens
tagcccttctggaaattgctaccaaacagtgaaagttggaacaatggctgaaacccatttggcattctcagaacactgcactgtgkcttgcattttaagtctcatttctagtaatattttacatttttgttttttttctccttctgtatactaaattaggcttgtgttatctttcacagattcacatttacaagttactttaaattctatccagaccaaattgtggaaatcaatcaaagcacacctaatctaacccctcgaggagctcccaatactatggggactgaaatatgtgaataggcaaacttctcaaagtatgaaaattactgtgataaaataaagcatagagttattaaatggatgttaggaaaagcatatccccaccagaactcaagaaacttttactcatggtggatggtgaagtaggagcaggcatatcacacaggcagatcaggagcaagaaagagggggaggagacacacacatttctaaacaaccagatcgcatttgaattcactcactatcaggtgaacagcactgagctatgaggcatccccagaagccaagcagatg

SEQ ID NO: 269721 - DNA, 573 bp, Homo sapiens
tagcccttctggaaattgctaccaaacagtgaaagttggaacaatggctgaaacccatttggcattctcagaacactgcactgtgtcttgcattttaagtctcatttctagtaatattttacatttttgttttttttctccttctgtatactaaattaggcttgtgttatctttcayagattcacatttacaagttactttaaattctatccagaccaaattgtggaaatcaatcaaagcacacctaatctaacccctcgaggagctcccaatactatggggactgaaatatgtgaataggcaaacttctcaaagtatgaaaattactgtgataaaataaagcatagagttattaaatggatgttaggaaaagcatatccccaccagaactcaagaaacttttactcatggtggatggtgaagtaggagcaggcatatcacacaggcagatcaggagcaagaaagagggggaggagacacacacatttctaaacaaccagatcgcatttgaattcactcactatcaggtgaacagcactgagctatgaggcatccccagaagccaagcagatg

SEQ ID NO: 269722 - DNA, 612 bp, Homo sapiens
tctgtttagaatctttcaaagggttttatcttatcttaggataatatctaaacttctttccatgttttataaggacctacacattcaggcctcctgctacccctctcaccttctcaatgcacccgcccacttggagatcaacagtccctttacagtaaaagtatttcagtacttgaaaaccagtctctcttactccccctctctctccstttctctctcttggaatcacctgtcgagattctttcataactcttgctctacataactaattctggtctcatctcaagcaacttctcttgtgaagcttctctgaccatacaaacttggatttggtggatgttccacaagcccttgtagcatcctataatctcattaacatagatattggtatattgtattataggttactcactagaattgcaagttacataagagtagcaagtgatatctaacacattcactgcttcagttatttgttgttgctgtttgaggtggagtctcactctgttgcccaggctggagtgcagtggtacgatcttggctcactgcaacctctgcctcctgggttcaagctattctcctgcctctgtctcctgagtagccaccacaagc

SEQ ID NO: 269723 - DNA, 519 bp, Homo sapiens
tttcatctcttgttcgatgggattacttgccagttgtgtgtagtttggttttgtttcaaaaagagttcatgagtattatatttcccgagctcttgcgtgtcaaaaaatatctgccctttatctccatgcttggtgacaccctagcttggtacaatatttttgaatcatgttgtttctctcagaagttggtggtcattactccatgtcccttggtactggagttgccatggcaaagccttgaaaccacttgactttttccccctataggggctgacttgcckttttctgcctaaatgtcaaatttttttctggattcttaacacttaacagtttaaccaggaaatttcccaatttagaccattctgtatcaatttctcttgacataattgtcctcttttttatccattaataccgttcttcttttcagaaaactttttaggttatatctttgaattctcttttttctttccttgtactctaaggatgtcagttgtcttcacgttggataattttttctct

SEQ ID NO: 269724 - DNA, 519 bp, Homo sapiens
tttcatctcttgttcgatgggattacttgccagttgtgtgtagtttggttttgtttcaaaaagagttcatgagtattatatttcccgagctcttgcgtgtcaaaaaatatctgccctttatctccatgcttggtgacaccctagcttggtacaatatttttgaatcatgttgtttctctcagaagttggtggtcattactccatgtcccttggtactggagttgccatggcaaagccttgaaaccacttgactttttccccctataggggctgacttgccgttttctgcctaaatgtcaaatttttttctggattcttaacayttaacagtttaaccaggaaatttcccaatttagaccattctgtatcaatttctcttgacataattgtcctcttttttatccattaataccgttcttcttttcagaaaactttttaggttatatctttgaattctcttttttctttccttgtactctaaggatgtcagttgtcttcacgttggataattttttctct

SEQ ID NO: 269725 - DNA, 589 bp, Homo sapiens
cacagttcctatcctcttggagcttaaaatgttttgaaagaaacaaatattaaccaacaaaaakatagaaaatattatttcattctacctgccttcatgaaggaagaagtagaactaacatttgaaagaccaatctaacatcgttttcagggagagttgaattatatacttacaagttaacagctgacactaaaggaagtctaacattttttgccttaaagctgagcaaactgaagttcaaaaagttcgatgatgtgcagtatactattagaaaagccaggattatactctaattccaaatcctatgttggtgctcttttctcaactatgctatcataacacatgcacacacatgcacacacacatgcacacacacatgcacacacacacatatttgtatagtcatcccttgatattcttgagggagaaattccaggactcccgtggatatcaaaatccacagatgctcaagtccctgctatagaatgatttattatttaatatttatatataacctatgcacatcctcccatatactttaaatcatttctacattacttataatatctgctacagtgtaaatactata

SEQ ID NO: 269726 - DNA, 589 bp, Homo sapiens
cacagttcctatcctcttggagcttaaaatgttttgaaagaaacaaatattaaccaacaaaaagatagaaaatattatttcattctacctgccttcatgaaggaagaagtagaactaacatttgaaagaccaatctaacatcgttttcagggagagttgaattatatacttacaagttaacagctgacactaaaggaagtctaacattttttgccttaaagctgagcaaactgaagttcaaaaagttcgatgatgtgcagtatactattagaaaagccaggattatactctaattccaaatcctatgttggtgctcttttctcaactatgctatcataacacatgcacacacatgcacacacacatgcacacacacatgcacacacacacatatttgtatagtcatcccttgatattcttgagggagaaattccaggactcccgtggatatcaaaatccacagatgctcaagtccctgmtatagaatgatttattatttaatatttatatataacctatgcacatcctcccatatactttaaatcatttctacattacttataatatctgctacagtgtaaatactata

SEQ ID NO: 269727 - DNA, 613 bp, Homo sapiens
gcctatggtaaaactggttttcttataccatctcattttgcttatagttgcagtttccaagaatctattgaggatgttgagtgagaacttactgtataatgtttatacctgctcctaacacaggctttccttcccctaagctgatcagcaaaaagagacatgctaaacccatccttcatgtgacacttagcaccttgtattgtgtctgtttacttgtctttttcccccactaaaactaaggaacatgaggccaagactgtatgcctcttactttccttagcttagatagaatttggcatgtggtaggtgctcaataaatatttataagaacatttaatgccagtgactttatttctgacacatgagacgtaccttttcaaaaataactgggaaatttttttttgcacaaccaaatkgtacacaaaggcatctatcaacaaatagataaaagagagataatagcgttaaaatagagcagatgcccatattaggaaggctgaattgaatgaggcaaagtgaccaccttgcttaggcaatgaagttcctagaaatcatagtgtacttcataaaacagaattgcatattactgttaaattttaaaaaagcaagctgt

SEQ ID NO: 269728 - DNA, 661 bp, Homo sapiens
gatgtaacatttagacattataaaaacatttccagtgaaaaacacacctccccttccccatagatccttaattcttctaccttgaggcaaccaccttcagcagtttcttgcatgttctcccagaaagttttcatgcccatacactgatatacatatgtaaacacaacaggtacagatctgctccatgattttggcatactaaagttctcagcctccrtatatgaaagttgatagtaagtgaaatctgtcatgcttgaagcattcacttctttggagcttaaagggtatggacgatggggaaggctagggtcctgatgaaagctgaagatgctcatcactgtcatttctgttgttcccagaacgtgatactgctgggcatcattggtcctccagatgggctcggagatggtccccatactcttcctctgcactgaacctaagctcagttacagagactccccatgcttttcttaagaatacatggttttaggtccatggtccagtgacatttagcagtcagtactccagaaagttttctataaaaatcctgaaacaccacaacactacttcatatcgggggagctacctcttaagtcataccatttcttctccttaatgcagcatctgagctcctatcccttctgggaacacccggaggaat

SEQ ID NO: 269729 - DNA, 661 bp, Homo sapiens
gatgtaacatttagacattataaaaacatttccagtgaaaaacacacctccccttccccatagatccttaattcttctaccttgaggcaaccaccttcagcagtttcttgcatgttctcccagaaagttttcatgcccatacactgatatacatatgtaaacacaacaggtacagatctgctccatgattttggcatactaaagttctcagcctccatatatgaaagttgatagtaagtgaaatctgtcatgcttgaagcattcacttctttggagcttaaagggtatggacgatggggaaggctagggtcctgatgaaagctgaagatgctcatcactgtcatttctgttgttcccagaacgtgatactgctgggcatcattggtcctccagatgggctcggagatggtccccatactcttcctctgcactgaacctaagctcagttacagagactccccatgcttttcttaagaatacatggttttaggtccatggtccagtgacatttagcagtcagtactccagaaagttttctataaaaatcctgaaacaccacaayactacttcatatcgggggagctacctcttaagtcataccatttcttctccttaatgcagcatctgagctcctatcccttctgggaacacccggaggaat

SEQ ID NO: 269730 - DNA, 656 bp, Homo sapiens
ctggccatatatagaggcagctgtagacagtgtctttgatgccagcttgctgggggaattttccacaaaagcacacgaggatttgtcccacccgactgagaatgctgtttttctggatggatctctatttatgcatgaggaaacttggcactggcatagcggtagcttatttttctattttgtttggttttattttgtgcttcagaaatagaacagattaagcattacttgcttttgaaggctcagctctccctacagcatgacttcaaatgttgttctccccaggcaagaatgggggaaaacacatcttctagcttttgttaaaagcaatgcaaacgtagagaatagttgaaaaaaattttctgtttaatttatatgtctttgaaaataaatcttttttcctacaaaaataatgcttattgtaaagaaattagaataaatcagaaaacatacatacaagaaaaaacaatacaattggatgacaattaaaatgatgtaataaaattacattagagctggaagggaccttmgaaataatctaactcaataaactattttattttataaatgatcaaactggttcccagagaggttaagcaacttgcttaaggtcacacagccaataataagagttagaatctatccttttttttttt

SEQ ID NO: 269731 - DNA, 580 bp, Homo sapiens
atatggccaattccaagacacaatcaatctaggagactgggagggctagaagcaaggagccagcaagtctagacacactccaaagccatgagggggttcatgccctgagccctggattctatccaacccacgaggggttttatgccctgggcttagattatggtgcgtcagggtagccttccaccctttagcacagagcttggtgttccaaaggccatgaggggttttagaccctggaccctggacatgtttcaagactcttttacattatgtcagacatgcaagccctgcctcagcttctcccaatactcagctttcctctcaacatgccccccttttctttttcataaaaccrccacagctatcattgcttgttcttgatgacggctttctcttcagaggcagcttcctcttcagaggtggcttctgcatctgtaaactaaaaggagacagcacaagcacacaaccaccagaacaaaatccacaaatgtagagcctccaatggccttcaactgtaaatcttttggaacgggataagagtttttaaggatctcagttacaatacaaatagatggtgatg

SEQ ID NO: 269732 - DNA, 541 bp, Homo sapiens
aatctgtaagagaaagcactcctgatagaaattggccaggagtgtctctcaggttttaactaaagaaaacctgtctttaactgccagctgcatttcgtgtttctttcctctttaactcttacatgttctacattgttgcatgtgtactaatgtttaaagcatatatttgcatttcacaggggaaattatctgctgggattcccagagttcttggaacatactcagttttgaacataaggatcctttcattgatccattgatcacagctatggaccaaggcaaatgttaatatcggcttctattctcagccataatcctgctccattcctaaaatgcagagtgactaagatgcatactgacagggaatccagtgagtccaatktgtcagagaggtattcacccatcaaagtggtctgaacactgtggaactcttcattccaaattgttagagagtacgacatgggaaaaagcactggatttggagccaaacacttactatctgaataatctggggcatgacattaaatcattcttagcctta

SEQ ID NO: 269733 - DNA, 551 bp, Homo sapiens
tggcaaacaccaccttaacaaagttaacatcattagtattggtacaaaatgaaattgtgtgccattttatagtaatcagtgagaagagcacagatcatttctctagcattcctacaaaagtatacagctatcatgaaggaaaatcagaacaatctaaattgaaggaaattctccagaataattggcttgtaatcatcaagtttcaaggtcctgaaagtcaagggattctatgagtaacttgtcctagttgaaggagactaaccaaacacgataactgactccaaaatggaactttggttctaaaggaaattatttgagtactttgtgaaagttgactgagttctgagagaygaaatgactttaagttgctgattttgatggttgaattttaattatgtagaggaatgcccttgtttaggaaaaaaaatgcattgaattatttagaggtgatggtatatcctgtcatcaatgtgtgcacccaaatgtttcctgaaaaaaaaattacatgtactatacttggaagcttcctagaagtttgagattgtttcaaa

SEQ ID NO: 269734 - DNA, 523 bp, Homo sapiens
ctagtttagggcaaatggtatagggttaacagatagtgggggattgcagaactactcaactccctacccccacctcctaaatttctattgtctggatcagggagaatggtctttrtagtggaaagggcagggcagagttatttaagaaagaatcaaagcccaaaataaatgagtatgataggtttacatcttacagaatttataggccttaggtttttttgtttttgtttgtttgagatggagtcttgctctattgcccaggctggagtgcagtggtgtgatctcggctcactgcagcctccacctctctgcaacctccatctcccgggttcaagccattctcctgcttcagtctcccgagaggcaggaactacaggtgtgcaccatcatgcccggctaatttttgtatttttagtagagatggggtttcaccatgctggccaggctggtcttgaactcctgacttcgtgatccacctgcctcagcctcccaaagtgctaggattacaggcgtgagccactgt

SEQ ID NO: 269735 - DNA, 564 bp, Homo sapiens
cattggcatatttttaatttaatgagccataaatgccactttagttttactttgatttgaatttatgtaataattttgaggttgattatttttgcatatatttgtttattaactatatgtttttctcattatgtctgctcatgagtcttattcaataaccctattggaactcctattgttttttaaaattaatgttggttcaaagcagaaatatggttaccttctgggctccctgtcgtaagaatgtgctggcaaaagtttctaaaacacagttgagaaatccaacccctgtgattgaaatcctgcctctttgaatgaactctgtcctgcaaaaaaaacaaaaaacacatctttgatgtcattctatgcttggatatgtaaacgacagacatttctagctgcataattaccacttataatcaataaaaaataatatycttaataattcaataactacctattataagaagattttgttaaaagtaacttatagtttatataatattaacagtcttattcaaattaaagaatattcatttcatgctgcaaaatctctttttaaaa

SEQ ID NO: 269736 - DNA, 524 bp, Homo sapiens
gactagcgcacggtaggaaatcaataatgcacttaggaaggaaagaatgaagagatggagggagtatagggaagagaaagtgaagaagcaaaagaaggcaagaaatatataatacatctcaatacttgtgtcatgraaaatgaaccagatatcacaggagttccactggctcaggtcaacagaagacaaccttcacctgattgtgggatgagccacctaaaaaatctgagagtgaggctcacccactcaagcagtgcctgtatctgagtctcgtctcttgctttgtccacttagtgggtgtgattcaaaacaaaacccaatggaactgtgacagagaaagcacaactcaaatcccagaacacctttgtgaaaatgaagggcagcttatacagtcatttaaaaatttgttttcttctggatttgagaaaataaaaaagttcaggggaaatatggatcaggaattaatccccagagcacgcagtcaccagtgctgaatcctcaaaacggcagtttccgggaaagca

SEQ ID NO: 269737 - DNA, 625 bp, Homo sapiens
tttgtgaaaatgaagggcagcttatacagtcatttaaaaatttgttttcttctggatttgagaaaataaaaaagttcaggggaaatatggatcaggaattaatccccagagcacgcagtcaccagtgctgaatcctcaaaacggcagtttccgggaaagcaaaagctcttaatgagatcctgtccttgaattattgactggttaggtatggcaaatcttgcctaattgttttcatgatgggaatctaattaaagtgtctttgaggggcaaaaaaagcttccacagatactcttgttgtgatgacctcagttctaatcaygtttttagcattctcctgtaagcacacagaaataagggtcccaaaggaaacacggggtcttcaagtcagactgcccactcactcctgaccaactccctggctctgctgctgctgcagagacttcttgactcactgctgctccaggatggcagactatgtagtctctcccatgctgtctgtctgaacccatttacataactgcctccacagaaaaccaatgcaatttgcagagctctcaatacatgctatgtagtttcagccttaacatgaacatgtgtatttatacgtgtaaaatcacacacacac

SEQ ID NO: 269738 - DNA, 567 bp, Homo sapiens
ccggcttgaatgttaagaggtggtggacagagcactggaggtgtggattcaaatatgggtacatggctaacctgctgggtgaccctagacaagtcactcatgggctctgagtctcagtttcctyatcactacaagagggttagggagacaggctccatcgtcccctctggtggaggtaagtcaacattctaagtgtggatctgggaaagaggatggaagccaaacccatcatcataaatggaaatcaagttctgatggttctgcaaggtcttctacaagtaaagctctcttgcctcatgtattcatcaaatactcactgacctcctctatgtctagcacattctaggtctggacatacagtgatgaatgagttccacatgattcttgctgaaagaagtggagagtctgctgttgtcttattcagccctcgcaataactccctagaagtgaacattaccccctcagcctttctttgtagataaggaaactgaagctcagagaggtgaagtgacttgtctaccagtacacacctcattgcttcatgagctcttattcaggtgctggttc

SEQ ID NO: 269739 - DNA, 567 bp, Homo sapiens
ccggcttgaatgttaagaggtggtggacagagcactggaggtgtggattcaaatatgggtacatggctaacctgctgggtgaccctagacaagtcactcatgggctctgagtctcagtttccttatcactacaagagggttagggagacaggctccatcgtcccctctggtggaggtaagtcaacattctaagtgtggatctgggaaagaggatggaagccaaacccatcatcataaatggaaatcaagttctgatggttctgcaaggtcttctacaagtaaagctctcttgcctcatgtattcatcaaatactcactgacctcctctatgtctagcacattctaggtctggrcatacagtgatgaatgagttccacatgattcttgctgaaagaagtggagagtctgctgttgtcttattcagccctcgcaataactccctagaagtgaacattaccccctcagcctttctttgtagataaggaaactgaagctcagagaggtgaagtgacttgtctaccagtacacacctcattgcttcatgagctcttattcaggtgctggttc

SEQ ID NO: 269740 - DNA, 458 bp, Homo sapiens
aaggccagatggtttcccttcagaaaagccataaagaccragggaggtgtcagtgcctgagatcatcatggagtcctaaataattgatgggtctcttgaatttgaaaaggaaaaaaatgcaccaagttggaaataacagtgatgactcattcatggttgaacctttggaaatggagggagagtgtgttcacctggtgggctaggggtggagaggcttggggacaaagatcagtcatcttgtcgctcttgcttcattgagttccttccagcaggccaaactgagcggccatctcagttggatgtagggcagataaagccttcttcacacaaacacaatcctttctcttccttggggggccagaggtggtaggcattccttacgaaggagaaactaaacagctctctttttttaaagctccttcctttcccagcctctggtaatgtatcaccaaaaagta

SEQ ID NO: 269741 - DNA, 593 bp, Homo sapiens
aacctgggaggtggaggttgcgccactgcactctagcctgggcaacagagtaagactgtctcaaaaaataataataatttggaaatacagttctaaaaggcctttactcatatactacaaaatagtcttacttttaaataaaacagaaaaatggacttcaaaaaacatgagatctaatatcttattcaccttggctccctagtgtctggcacgatgcctggcacatagtaggcattcaataaatatttgccaaattaatttatttattaagctaagtcactgaaataaatggtaactgccagagttttaaaaattaaaaccaaatggaatatttatagagtgagtcacaatgttaaatttaacaatataaaaataaatggtaattgccagattttttttaaattaaaaacaagatrgaatttttatcatgagtcataataccaaatttaacagtataaaaatatgccatctgcaacacactctggaatagtccactttttcatatttacaagtccaaaaggcaaacaatattaagagctgattcggggggaaatagataaaagaggctccgctataaattgataaaggttgaa

SEQ ID NO: 269742 - DNA, 586 bp, Homo sapiens
tttttggcccaagaacagcatgaaaaaaattaggacgatacgaagggtgatatgaactgaggtacttggggaacctctgttctacacaaagcatggtttaacccgagatgttccagggctgaacctgcctctggattctctrtgtggtacagtgacagccacaaaagcagctcccatctactgagctcttggccaaacataggcaagctcttaagcattgtaactgcatgacctcatttaatctccagagcactgtgagcatgggtcttttatgatccccatttaaccgatgagtaacctgaggccccaagaggctgcccatggtcatttagctagtaagtggcgtagcaggaatttaaacccatggctggttgatttccaaagcttgtacttttttttttagaaaaattaagcttttaattttgagattcacatgcaattgtaagaaataatagagagttactatggaacattcacccagttccccccatcacaatggtaacattttgcaaaactataggactatatcacagccaggatctgacattgatacagtggagatacagacaatttccatcactataaa

SEQ ID NO: 269743 - DNA, 595 bp, Homo sapiens
caataaaactataataaatggaaggaaaaaaagaatcactcaagatatgtagaatactattgagaaggactcatttcaaaggtcatttctgagctttaggataactctagacactgtcccccaccccacttttctgtgatacacacatcaggaaacactactttaaatgcattatcatggttcacccaggttgccaagtgaagygctcctggagacagtcagccaggtgccaattatgaagttggcaccttcctgattatcccacatcctgataaggaagacagatgctgccacttcctgaaacccctggctgtacccacctgggcctcctgacaaccaccaactatcactgaagtgctgttcatgggggccaggttacttccagacaatttaagatatttacattgccctctgctttctccgagctcttaatttataactcctttctgtttgtgtataaacccttttagtcctttgcccatattaatccttcttggtatcatttggaaagagatgatattggtttgattctctctggctctccccacctcccaaactggtagggaaaaaaatgaagacacatttgggtatgatg

SEQ ID NO: 269744 - DNA, 552 bp, Homo sapiens
tctccgagctcttaatttataactcctttctgtttgtgtataaacccttttagtcctttgcccatattaatccttcttggtatcatttggaaagagatgatattggtttgattctctctggctctccccacctcccaaactggtagggaaaaaaatgaagacacatttgggtatgatgtaatctagcaagttcctttttattacagatcaatctttagagaaagatraagttgcctgaaagcaataaaaaggtgaggcctgtaaaattttctttaattcaatcatctcaggaagcttttctttataacgaagctaacaacaactcttgttatctatgcttataataattccagtcaaatgcataaggctttagggtttatcttgttcatttttcataataaatccctattttacagataaaaaactgaagcatagagaggttaaggattttcctatggccatgtggatctttagtagcagatgtgggattttaactttagatttgtcaaaaatcaaacacacacacaaaaatagtgcttacaactgccctat

SEQ ID NO: 269745 - DNA, 620 bp, Homo sapiens
ctaagataataacttatgccaggcacagtattaagtactttcatatagacctcatttcatacttaaaacagccctgggagtaggttctattgttatgttcatttcacagatgagaaatgtggatcttggagatgtaacttgcccaaattccaagccagaacgtgacagagctgggatttgaatacagatctgactcacaccagagtatgtgcttaaccaccagggatatgccctctccaactccttggttaaacctcctggggtgccttctttttttttttttttttttttttttttttttttttttttgagaagacagttttgctcttgttgcccaggctggagtgcaatggcacgatctcagctcactgcaacctccgcctggtgggttcaagcaattctcctgcctcagcctcccaagtaggtgagattacatgtgcctaccaccacgcccagctaattttttgtatttttagtagagacagggtttcaccatgttggccaggctgttcttgaactcctgatctcaggtgatcygcctgcctcagcctcccaaagtgctaggattacagacgtgagccaccgcacccagctatcttctcttaaatattctcactcca

SEQ ID NO: 269746 - DNA, 588 bp, Homo sapiens
ggcatttttcaccttgactttactttcaatgtgacaaggcagtgtctaacttcagggcattccgtggttatgaaatcttgacacctcacctactgtgggaatgacatgttgaaacagtttctccattctctgaggcattttcatattaagctctggtgaatgrgtattaatgagatggtcattggagtgtcaggcgggccgtgtctcttctttttctgtctctctccccctgcccttccccatcccatcctcctcccccacccccagctgcacagctgacaacttcaaacatttaattactgatcccctcatcccctaacaatcaatagttggcatcccccaaaatcaaataatattcaatgtgcagagctgtatttgttttcacataacactgcagggaaattaaagataactcatcatgtgaatcaggttctctctttatgattaagaagtgactgccacttccatgcacatcctaggggttacctaacgtggctctaaaatgtccttggcaaatgttcttactgcttctccaattacattaaactatggattgtctaatgattctttggaaaaatatacttttat

SEQ ID NO: 269747 - DNA, 617 bp, Homo sapiens
gaagtgggttggcatcccagttccaccgatttaagctatgggaccaattatgaaactttccaaagcctgagttccattatttgtaagaaggtgatgataacaccaccaaccgcattgggttgttggtgatatatatatgtaataattcatatatctgacacataataaatattcaataaatattactttatcttatcattttgctaaattgtaacagaaaattccctataaggtcttcagartaattctgcctactatgccctccccatgcagctgccaacaaatttattatagttggtatgtcactggttacgttttccaatgtttgaaaaaaattctacctcactccccatccttaccacacatatatcccccacctacttggagtataaactcctgggaaaccacttacaatgtacagtttggctgtggctcaccacactcttctcaaggctcttcagtattgggatggatggcaagaattgcatttattttctcacttcttttgtttaaggtgctgagtcagattaagagatggcactgtcccaaattgcaacgaactggactccacttgtattttgtaaagttgagctgacccggctcagctcctaaaagag

SEQ ID NO: 269748 - DNA, 617 bp, Homo sapiens
gaagtgggttggcatcccagttccaccgatttaagctatgggaccaattatgaaactttccaaagcctgagttccattatttgtaagaaggtgatgataacaccaccaaccgcattgggttgttggtgatatatatatgtaataattcatatatctgacacataataaatattcaataaatattactttatcttatcattttgctaaattgtaacagaaaattccctataaggtcttcagagtaattctgcctactatgccctccccatgcagctgccaacaaatttattatagttggtatgtcactggttaygttttccaatgtttgaaaaaaattctacctcactccccatccttaccacacatatatcccccacctacttggagtataaactcctgggaaaccacttacaatgtacagtttggctgtggctcaccacactcttctcaaggctcttcagtattgggatggatggcaagaattgcatttattttctcacttcttttgtttaaggtgctgagtcagattaagagatggcactgtcccaaattgcaacgaactggactccacttgtattttgtaaagttgagctgacccggctcagctcctaaaagag

SEQ ID NO: 269749 - DNA, 594 bp, Homo sapiens
cgaactttaaaaataggctttgcatgagatgattttgtagtagatgagttgtagtttaatgtaagttgttctgagcccatttaaagtargctaggcttagttatgattttcagaagattacgtgtattaaatgcattttttgacttaagatattttcaacttaatgatgggtttatcaggatacaaacctgtggtaagttgaagagcatctgtatagtatgttagttgtatgggggtgggagaagaaagtgatgtggctataaggtggcacagtgaagtgctgggacagcactgttcaatagaaataaaatgtgagacacatatgtggtttaaaattttctagcagccacattaaaaagtaaaaaaaggtaaaattaattttaataatacattttctcaaactcaagatatcgaaaataccatttccacatgtaatcaatatcaaaacattattgttgagatattttatatatttttttgtactaagtcttctaaatctggtgtgtattttacactttcagcatatctcaaatgaaatagcaacatttcacatgcacaagactcacatatcttctgatggctatcttgtcgaat

SEQ ID NO: 269750 - DNA, 594 bp, Homo sapiens
cgaactttaaaaataggctttgcatgagatgattttgtagtagatgagttgtagtttaatgtaagttgttctgagcccatttaaagtaagctaggcttagttatgattttcagaagattacgtgtattaaatgcattttttgacttaagatattttcaacttaatgatgggtttatcaggatacaaacctgtggtaagttgaagagcatctgtatagtatgttagttgtatgggggtgggagaagaaagtgatgtggctataaggtggcacagtgaagtgctgggacagcactgttcaatagaaataaaatgtgagacacatatgtggtttaaaattttctagcagccacattaaaaagtaaaaaaaggtaaaattaattttaataatacattttctcaaactcaagatatcgaaaataccatttccacatgtaatcaatatcaaaacattattgttgagatattttatatatttttttgtactaagtcttctaaatctggtgtgtattttacacttkcagcatatctcaaatgaaatagcaacatttcacatgcacaagactcacatatcttctgatggctatcttgtcgaat

SEQ ID NO: 269751 - DNA, 594 bp, Homo sapiens
cgaactttaaaaataggctttgcatgagatgattttgtagtagatgagttgtagtttaatgtaagttgttctgagcccatttaaagtaagctaggcttagttatgattttcagaagattacgtgtattaaatgcattttttgacttaagatattttcaacttaatgatgggtttatcaggatacaaacctgtggtaagttgaagagcatctgtatagtatgttagttgtatgggggtgggagaagaaagtgatgtggctataaggtggcacagtgaagtgctgggacagcactgttcaatagaaataaaatgtgagacacatatgtggtttaaaattttctagcagccacattaaaaagtaaaaaaaggtaaaattaattttaataatacattttctcaaactcaagatatcgaaaataccatttccacatgtaatcaatatcaaaacattattgttgagatattttatatatttttttgtactaagtcttctaaatctggtgtgtattttacactttcagcayatctcaaatgaaatagcaacatttcacatgcacaagactcacatatcttctgatggctatcttgtcgaat

SEQ ID NO: 269752 - DNA, 586 bp, Homo sapiens
agtagacaataataacggcagtagtagyagtggtggtggtagtaatagtagtggtagtaataacagctaacatttattgagcatttccaggaattgttttaagtgctttacatatattacctcatagggttgttgtgaagataaaatgagttaggttttttttttttttttgagacagggttttactctgttgctgaggctggagggcagtggcatgatcacagctcactgcagccttaacttccctggctcaagcagatcctcccaccttcgcctcccaagtagctgggactacagatgcacaccaccatacctggctaatgtttttatttttttgtagagatggggcctccctacattgcccaggctggtcttgaactcccgggctcaagaattcctcctgccttggcctcccaatctgctgggattacaggtatgagcctggccattagccatttttaacagatggagaaactgtgttaaatgccctgtatacaatatctcattcagttctcataactacctatctactttattattcccactttgcaggtgaggaaactgaggcacagactggttacttatg

SEQ ID NO: 269753 - DNA, 586 bp, Homo sapiens
gtggtgctatcctacatactggggtttccagtctcagcaaagactccatccccatgtggatctgaagagaacatgccggccgggcaacaagtgtctccttggcagccagtgtgcactgggggagatggatgaccaaaggctctccctgacataacccaggagtaggggagccccagggatgactgaasttgagtttcctgttaggccatcagaatgggaccttcagatcattttaaagctgatcaaaaaagataataggaaatggttatttcttgcccacctgagattcacattctctatgcttttaagtgcatttttctatttttgtctatatttagccttttaagtaatttttttagagttgtgccctggctaagaactgccattcttcatatctgtcttcctcaccaccagatcctgagagcctttaccacagcattacccaatagaaatagaatgtgacccacaaatgcaagccacatacaaaattctaaatgttctagtagccacatttaaagagcaaaaagaaacaagtgaaattaattttaataacatattttagttaacccaacagatctaaagtaaa

SEQ ID NO: 269754 - DNA, 586 bp, Homo sapiens
gtggtgctatcctacatactggggtttccagtctcagcaaagactccatccccatgtggatctgaagagaacatgccggccgggcaacaagtgtctccttggcagccagtgtgcactgggggagatggatgaccaaaggctctccctgacataacccaggagtaggggagccccagggatgactgaagttgagtttcctgytaggccatcagaatgggaccttcagatcattttaaagctgatcaaaaaagataataggaaatggttatttcttgcccacctgagattcacattctctatgcttttaagtgcatttttctatttttgtctatatttagccttttaagtaatttttttagagttgtgccctggctaagaactgccattcttcatatctgtcttcctcaccaccagatcctgagagcctttaccacagcattacccaatagaaatagaatgtgacccacaaatgcaagccacatacaaaattctaaatgttctagtagccacatttaaagagcaaaaagaaacaagtgaaattaattttaataacatattttagttaacccaacagatctaaagtaaa

SEQ ID NO: 269755 - DNA, 568 bp, Homo sapiens
ttgcccttatgaagcctcctctagtgaggaggacaggcattaaataaataaacatattgatatacaattacagggagttacatttccaggagrgtaacctgtagtataataaccttcctgcaagtcacaatacacactctggacaaaacaacaatttgaaggcaattgttacctttttaccaaaagaagacagaaactggaaggaggttgactccatttttgccttaaaatgctttccagtttatgtatcccagagtggctagaactcaagcaaaaagcctcagctggcttgaggagtcagaggatgcagtttggagctgccagaaaggtagaaagtgaagaagaaatgtggaaaaagagggagcaatgaaatgtgaacccctaaaaacctaaattaaaaactctacttcaaattcttgttgactcatgcactgtgcatgtgtaaggaagatttcaaggttcttagcaaaaagcaacagctgggaagttggagaaattgagcagttcagctgttattcaacacaagaaaaactgagtttggagtttgaacttaaccaaagtaatgcct

SEQ ID NO: 269756 - DNA, 591 bp, Homo sapiens
ggctacttcaaatggagatgtgctgtaagtataaaatgcacactggatttgaaatccttaaaaaaattagaaagaaagaaaactcatttgtcatgttttgtatcgactatacactaaatttataatatgtggatatatattaagttaagcaaaatatataataaaattatttttaccagtttctctttacttttctaatgtagctactggaaaattaaaacttatgtatgtggcttgcacttgcggttcacactgtgtttcagttgggcagcaagggcccaaaccctccctcccacagccctttaggatccacggtgggcagggacagtgtggtggccagagccaaggcctcagctctcagccaccrcaagacagtcagctggtccctgtggttctggtctcaacagccagtacacaaccacagaccccacagtgtggtggaaaagagcttgaggtcagagagaccttggtttcaatcctagctcctttagagtgttcttggatttgaacttttatccccttccatttccttattcctaaaatgggggaactcaccccataacatttatggagacttttttttattcaacc

SEQ ID NO: 269757 - DNA, 594 bp, Homo sapiens
tttgaccaacaaattcccgtattgggaatctaatcattggggttcattaaatgtagtttctgatgaagcccttggtgggtggcagtgggatttcttaatccagtcactaatcaaaactgcacactgcaacatttccagagaagtggctaatagaaaaatagattctgttagttgatttcaggtttctttctaaattgttaatgttgggttttgcacactctgagattggrattgactagaatgctttgactagactagacaagcactcaagaaattttcaaaggataaaccaaaccaaaacaaaagtaggaaaggggaaatatggaagtaatcaggttgtctgtatcagctgataatagtctgtccctgggcacacagccagaaaatttgaaccctggccagcaactcacacactccaggtgatctgccaaaacagagggctgtgatgactggcctaggagcagggagcctgcagctcacaggggtactgagatgcaaataactgctctggccatgcaaaggaatatttagggcagtatttacatagtgcaaaacttctgaagaaacgaaatgtctgtggcagatgctgctggt

SEQ ID NO: 269758 - DNA, 543 bp, Homo sapiens
cctagtaactgaacctcattggctattactggaagtagaaatggaaccttcgaaaagtaccaccatccttatcttctgatattcagaaactgatagtccagagtgtgaaataagaatccagcctgcataaaacaataggaaatggaagctgctacacgatccctygaagaaagggagagaaaatcgggccagataggaagcttgtggcttaataaataattattgaaaactccatgggtgtttcaagaaagagagcctgaatattgaagtcttgctcaagccaggttttggctgaatatcttttaaatacaagactgcttaactttagcgtataaatagatttggtttatacagtcctataagcagggcagaatacttcatgctgaggtattgagttgtgtagtatgattgtgcatgcactacagaagaataattttaaataataacaatggcaacagttctcacaatctgcatattgtgcagattgtgacaatcaacatataaaataaaaacactattttatatgtttttcgtggtacctcc

SEQ ID NO: 269759 - DNA, 598 bp, Homo sapiens
ccctccactacccctggtctagtcatcaatcagaatccacaggtctggaaatggcgaagtaggggtggggaagcaaattgttctcaaacatgccttgtttgtagagaaaagagctctatctctgggtcagcaaatcccccttgaattcctaagacctagcaacctcttcccttccccaccttgcagaagtctgacctgcctttcagcggagtatcatcacttactcaggaaacggtgtcacactgggaggaggcagttcccttatcagcttggaatatttttgttgtggtttacatctttctcaatgtgactgtgttgcaaaggacaggtagcgatgaatggatccacagctaccaagtttttgaactawagaggattctcagggcccttctggcacagggaattgaggtgagagctggttgtacataagagacagccattaagatactgggtctctctggaattcttttgcagggacttataacatcagactatcgtctgtgcccaccctccaagctgctctggaccaagtcctgtggtgaggctgaaactcaagggctcctgtgttcaggcaggacctgggctagaaagatgctct

SEQ ID NO: 269760 - DNA, 598 bp, Homo sapiens
ccctccactacccctggtctagtcatcaatcagaatccacaggtctggaaatggcgaagtaggggtggggaagcaaattgttctcaaacatgccttgtttgtagagaaaagagctctatctctgggtcagcaaatcccccttgaattcctaagacctagcaacctcttcccttccccaccttgcagaagtctgacctgcctttcagcggagtatcatcacttactcaggaaacggtgtcacactgggaggaggcagttcccttatcagcttggaatatttttgttgtggtttacatctttctcaatgtgactgtgttgcaaaggacaggtagcgatgaatggatccacagctaccaagtttttgaactaaagaggattctcagggcccttctggcacagggaattgaggtgagagctggttgtacataagagacagccattaagatactgggtctctctggaattcttttgcagggacttataacatcagactatcgtctgtgcccaccctccaagctgctctggaccaagtcctgtsgtgaggctgaaactcaagggctcctgtgttcaggcaggacctgggctagaaagatgctct

SEQ ID NO: 269761 - DNA, 536 bp, Homo sapiens
tcatacagctattgtgagattaaaatgattaaaatgagattaaaatkatatacatatatataatatatataaagagcttagcacaagtgcctggcatataacagaagctaataaatgttagcaacagtaaataacaaaagagtaacaatggaagagaaagtcagctggcactagagttctttgcacacacacagaaacatgcagggatctccattaaaaaaaaaaaaggaaccaaagagtactgcaaaaggaaagggagttctcaaaaagacaaaactgtagtgatgagaaataggtcagtggtagccaggggttatggactgggggaggatgggaccaaaaaggggcagaatgaggtgatagaactgttacatatcctgattgtggtagtaattaaatgaaactatgtatgtgttaaaatttatacaaataaatgccaagagacaaaagtcgattttaccgtatgacaatattttaagaaaggaaagtaagttcttgcacatttcttttagcctctgcctgatattcacctgacc

SEQ ID NO: 269762 - DNA, 468 bp, Homo sapiens
tatctactcttcacacacaaagatctgcagagaccaggaagcttctttttcacagactccaccctccttgaaggacacttgtggtttgaaatggcaatatgttcccctccctacctgtctaaggggctctgtgcagcgggaagggcagagtccacaggccttaaacctttgcccctatagcaactctaccttttcttccttgttttcatgttggtttccaggtaagatccctgctaaagagagcacagtacatttaaaatttttgaaaacagagttaactatttactttgtgatccatactttacttttccaaatttaactggccaaagacatcatttaagcttcagttcataggtaagatratattttcctagtctaactcttccacaaatataaattgctctggtaatatattcatttagatgagtgctggcaacatttataaaaaaaattctgtggttcactaga

SEQ ID NO: 269763 - DNA, 554 bp, Homo sapiens
ttgattttcatttcgagacaacaaataaaaatactttagaaatatattgcatayagtcatctgttagctgcattttttcttgcaggctcattgcttatcaccccctaaaatactcttagcaagggctatctctggagaatcatattataggccaatatcagggtatgacacttattatatgtaaagtagacagttctcaagtgtagtcccggaccaccatatcagtgtacctggaaaccagttagaagtgcataggccccatccagacttattgaatcagaaaccctggagatggcaccagcaatctgtgtttccccaagtacttcaggtgattctgatgcattctaaaatttgagattgagtggggcttatgcattttcaactagtttccgggtggcactgatgtggtgatccagggccaccttttgagaactgtctattttatacattgctttatgtttgaaggacctgcaatgcttgcaccgcttttataattgcaaaccccactggtacatgggacatacttacactggccttacattaggaaggtcgta

SEQ ID NO: 269764 - DNA, 554 bp, Homo sapiens
ttgattttcatttcgagacaacaaataaaaatactttagaaatatattgcatacagtcatctgttagctgcattttttcttgcaggctcattgcttatcaccccctaaaatactcttagcaagggctatctctggagaatcatattataggccaatatcagggtatgacacttattatatgtaaagtagacagttctcaagtgtagtcccggaccaccatatcagtgtacctggaaaccagttagaagtgcataggccccatccagacttattgaatcagaaaccctggagatggcaccagcaatctgtgtttccccaagtrcttcaggtgattctgatgcattctaaaatttgagattgagtggggcttatgcattttcaactagtttccgggtggcactgatgtggtgatccagggccaccttttgagaactgtctattttatacattgctttatgtttgaaggacctgcaatgcttgcaccgcttttataattgcaaaccccactggtacatgggacatacttacactggccttacattaggaaggtcgta

SEQ ID NO: 269765 - DNA, 554 bp, Homo sapiens
ttgattttcatttcgagacaacaaataaaaatactttagaaatatattgcatacagtcatctgttagctgcattttttcttgcaggctcattgcttatcaccccctaaaatactcttagcaagggctatctctggagaatcatattataggccaatatcagggtatgacacttattatatgtaaagtagacagttctcaagtgtagtcccggaccaccatatcagtgtacctggaaaccagttagaagtgcataggccccatccagacttattgaatcagaaaccctggagatggcaccagcaatctgtgtttccccaagtacttcaggtgattctgatgcattctaaaatttgagattgagtggggcttatgcattttcaactagtttccgggtggcactgatgtggtgatccagggccaccttttgagaactgtctattttatacattgctttatgtttgaaggwcctgcaatgcttgcaccgcttttataattgcaaaccccactggtacatgggacatacttacactggccttacattaggaaggtcgta

SEQ ID NO: 269766 - DNA, 615 bp, Homo sapiens
tggctggttgttactagttgccaggcactgtcctcaacgtgtggtcctggatccacatcagcatcgcctgaaagctagttagagatgcataggccctgcccagattgaactagaaaccgtggggatgggcccagcaatctgtgtcttaaccagaccttcaggtgattctgatgctctctaaagtttgagcacccttgccttacttcactgaatcctcacaatgactgtggaaggtatggaaattattgggcattattgttttcattttatagagaaggaacctgagtctcaaaaatattgagtgatggtctgaaatgagtacttataccaggattggaatgcaggtcattctgccactcaagttccctcttccccaaacatgtttccttactgatgaaaaccaagcatgacagagggtgggggtgacaaacaatcgttcctatggaaaccagaaaaggtagcttcagttccaggtcaggaaagacatgctgarcatcagttacaggttagtcaccatgtgctatggtctgaatgtttctgtctccttaaaactgatatgtagcaatactaacccccaaggtgatgttattaggaggcagggcctttgggaagcca

SEQ ID NO: 269767 - DNA, 539 bp, Homo sapiens
acatctagcccattgcctctcctctggctctgggccgtcactgatgattgccgtgtgaatggcaccctggagcctgatctatggggagcagagcaagtactacgagtgggcaagtgggtggtggtggtggtggtagtggtggtggtgttagcagttctggtggtgacggtagtggtggagcacattcttcaaatgcctttgcttctgcacttgctcccttaggaggtggcaaacccatctgttytgaagagtagaaacagagcctttgctattctgatgggatgctggaatattccccatcctcttcacctattgtagttaagggcatgaccttccttttctttctttaatttttttttcaattttttatcaaagatttattttattttccagatgaattaatgctgttaagttaaataacatgcctaagattatcagatagtgagtagtacagtacggatttgaacaaactatatttgttctgcattccaagaagcatattttttgaagagaaaaagatctggattcacatcccagct

SEQ ID NO: 269768 - DNA, 550 bp, Homo sapiens
ggtggtagtggtggtggtgttagcagttctggtggtgacggtagtggtggagcacattcttcaaatgcctttgcttctgcacttgctcccttaggaggtggcaaacccatctgttctgaagagtagaaacagagcctttgctattctgatgggatgctggaatattccccatcctcttcacctattgtagttaagggcatgaccttccttttctttctttaatttttttttcaattttttatcaaagatttattttattttccagatgaattaatgctgttaagttaaataacatgcctaagattatcagatagtgagtagtacagtamggatttgaacaaactatatttgttctgcattccaagaagcatattttttgaagagaaaaagatctggattcacatcccagcttttccacttaaagctgctgaccttggcccagtctcttctttgaaatgggaatgataataacatcaatctcatacagttgttgtggggctaaatgaaatggtccatgtaccatgcttagaactaggtaaatgcttacaaa

SEQ ID NO: 269769 - DNA, 569 bp, Homo sapiens
  misc_feature (1)...(569): n = A,T,C or G
gcccagtacataatagaactcagtaattgttaaatgaatgacttcaagtgagagaaaccaaatacacaaagcttttcaaaaaggaattgagcatattttgtatagaatagtgaagaggtggctgggcgcggtggctcacgcctgtaatcccagcactttggaagggcccgaggcaggtggatcacgaggtcaagagattaagaccatcctggccaacatagtgaaacctcatctttaccaaaaatacaaaatttagcagggtgtggtggcaggcacttatagtcccagctactcgggaggctagagcaggagaatcacttgaagccaggaggcagaggttgcagtgagccaggattgcaccnntgcactccagcctggtgacagagcgagactccatcaaaaaaaaataaakaaagaatagtgaagaggtaggatcagaagattttttttttaatctacctttctactaaggagaggtgtcacagttgtaaattccctgtgtaactggtacagaaataggtgggagagaagaactagggaaacaatgtttaaagaaaaagaaagataca

SEQ ID NO: 269770 - DNA, 552 bp, Homo sapiens
taaattttgtggactgattgacccctgtttcacagatgcagaaactatgtgtcaaagaagttaaatgacttgcttaaggtcacacagatagaaagtttagatgggatttgaaagcaaatcactgactctaaaacccttattctttccaaattaacatcctgtcattcataagcatttattgagattcttacacactaattctgtgctctggaacatagggccagaaagatttgtaagatttggttcctactctcaagaaactgggattccgattatctgcaaaaaatcatattcctgaaatcagattccctaaatgaaagcaagtccatatggtataagcccttggtacattttaagccgaggatacctttcctacctcccaaacctaagattataagagtggccaccagagccctcaccctggtctatttccttctacaacactggccagcacattcatagaacytggttgcagagataagtcaaatcactgcaaacttgggatggccaacgccccatcctagcttctctagattcctttgcagggatgtc

SEQ ID NO: 269771 - DNA, 472 bp, Homo sapiens
gctactttcaaactatcaacatgatgtcggccaactcaaaaaacttttgaaaatttaacaattggctttcacaagcccatggaagctggctccagcacaccaytgtctctaagactcaatttccttatctgtcaaatggatgaataatagcgtttacctcatagggattgttggaaggttgaagtgagaaaatgatagtggacttttattgagtatttatatctatccaccaggcacttactatgcattattcactgacttctcaaaaccatacaataggtactgatattccttccattttatacatgaggaagttgagctgaagtaactagtccaaagtgatacagtagcaagtgggagaacctgaatttattccagagcccgtgaggtgacagagacattagcccaatgctcagcacggggcaatgctcagtaattgggagctattatcataagataaataaacttctga

SEQ ID NO: 269772 - DNA, 472 bp, Homo sapiens
gctactttcaaactatcaacatgatgtcggccaactcaaaaaacttttgaaaatttaacaattggctttcacaagcccatggaagctggctccagcacaccattgtctctaagactcaatttccttatctgtcaaatggatgaataatagcgtttacctcatagggattgttggaaggttgaagtgagaaaatgatagtggacttttattgagtatttatatctatccaccaggcacttactatgcattattcactgacttctcaaaaccatacaataggtactgatattccttccattttatacatgaggaagttgagctgaagtaactagtccaaagtgayacagtagcaagtgggagaacctgaatttattccagagcccgtgaggtgacagagacattagcccaatgctcagcacggggcaatgctcagtaattgggagctattatcataagataaataaacttctga

SEQ ID NO: 269773 - DNA, 472 bp, Homo sapiens
gctactttcaaactatcaacatgatgtcggccaactcaaaaaacttttgaaaatttaacaattggctttcacaagcccatggaagctggctccagcacaccattgtctctaagactcaatttccttatctgtcaaatggatgaataatagcgtttacctcatagggattgttggaaggttgaagtgagaaaatgatagtggacttttattgagtatttatatctatccaccaggcacttactatgcattattcactgacttctcaaaaccatacaataggtactgatattccttccattttatacatgaggaagttgagctgaagtaactagtccaaagtgatacagtagcaagtgggagaacctgaatttattccagagcccgtgaggtgacagagacattagcccaatgctcagcayggggcaatgctcagtaattgggagctattatcataagataaataaacttctga

SEQ ID NO: 269774 - DNA, 475 bp, Homo sapiens
atacttgctacgtctactcattcattcaacaaaaaagtactgagtgcctacaataaatgagacatacacaatacctgcctttatgggacttayattctagtagcatctagtaagcactcatttatttgttaaacaaacaaatggaagagtaaatcaataaatgaatattaaatcacactatgccagttaaacccaacccaaactttggtatttagtcaatgctactcttaacaaaagaactccaacatacccaactagttatttccccaagattggggagtatccaagcatgctagccaaagataaatatagtatttttctaggccatcctttaaaaaggctccattatttaaaacatgccttgagctatatctacatcccagtttttccagtgggtacttgccttggagactctcgcttattgaagactttttctttccaacatgccctctgtactgagtgtataatcaccact

SEQ ID NO: 269775 - DNA, 632 bp, Homo sapiens
ttttgtttgtttttaaagactacatgttcatctgatttgatgccaaggtagtatttgggtaagccagaacaaatccccatttaaaactctcgcccttctttaaaagtttcaagaaattttctcttcaagactaacctcatgtgggtggtgttggggaccacctacagggcgtcgtttgagaggtgctgaaagatgacccctcgcttcagtgtaccttttctctgtcctccattagaacctaaaattctaccatcacgattctacttggctggattttcaattgccagatttgctacaagagtaacccactggatctagtctgccttcctgggactgagctggtttgactgcattttctcagggatgggaaggtttgaagcttttaagaccattgaccatacaggggtgtggaggggccatgagatgggtagactacaacccagaggggcccaatctccttttctgacatcaatattttgtcttgggttggctctgagatcagctggtgtgtacaatatgggtatatgtgtaaccatgtgcagatttaaatagtaaagatacatgggtgyacttatgatatgtacatgattttataaaatgaaaagaaacacaggccccgggattagaccaac

SEQ ID NO: 269776 - DNA, 557 bp, Homo sapiens
gacacactgccatggcccagctatgcccgaccactctgcccaggagagggtgggccaaatggggccctaaaatggttttcatgtaatgaggctataagcacctggagacaaagagccagcctccaacctggccatgggcctatgcagggccctgggagagcttttgcttttccacctttcccggcctcccgtagtgctgggattacaggcatgagccactgtgcccagcctggctgagcatttttaatgtcaaaaataagcagcagaggataagcagaagcttttagacatagaaagctgaagacatggccattgagatgctgtgctgagtgtagaagaataatcttgttactcaaatgcaggaaaaacccggtttgacaacatcgtgaataggtctccattgatggtagtaacttgaagataccagamagtttttacttagcataaaaacacatatgctggaagagtaaagctgaagaaaatgcttttactaggtgattatcttccagaattacattgcagtactcggataaagcaaatgtcaattactaaaacca

SEQ ID NO: 269777 - DNA, 565 bp, Homo sapiens
aattatattcccacatggcataacaaatacctattaagaggaaaagggtaataaataagaaccagaaactcacaaatacatatattttaaagaccagacacaaacacaagaaattaacaaacctatctcagaacataaggttttggagggtaaaaaccatgacttttttcttccttctgaaaagtctaaaacaatacacttcagtctccattttccaaagtaaatgtgtgtgtcctgctctacataataaagcatattcccacaaaagctgactttaattttttcctcttttcagattaagattcacttttcttttttctgatttggcccaagtgtcttaaggcaaaatagagcatgagcatggcatctctcattctacacattcaagcagtgcatcagaggaccctatgtgatgcccctgaatctacaactgccaagatcactgcatgaacctagaagaaaaccagaaatgtgagcagattcagtccaygccaattgcttgcattgaccctgaatactattctttccagagcttaaatttcattccgaaactaaaatacaagtt

SEQ ID NO: 269778 - DNA, 514 bp, Homo sapiens
ttaaattacaatgggattaaagttagtmtaatttggcattatattttatgagagattagattaaaagcaaggtgaaaattgggttgagtgaaaattacccttgaaaactccttatttgcctataaagtagattatacatggttttggatatgtatatctttatgtaatgcattttatgccacttaagtttgaggactacggaactagactaagaggaaagaatatattcatatgtctgagaattctgcccttaaaataacctactacacccttgcagtgagtacagggtgggtagagaattcagaaatactccttgtgttcaatgtttatcttccactgacattctttaatagctttgcaaattgttgtgtggattaagttagttaaacaagatgaacacccccagcataaggtctggaaaacagaaagtgcttaatagatattccctatatttgaatatgactgaaatatacactcacacacatttacatagaaaaatgtgatttcttttttt

SEQ ID NO: 269779 - DNA, 599 bp, Homo sapiens
taactacctgtttatatgctagaaaatattagagaaaacatactgaattataacccattgttaagtgttaaattcagcatatataacaattagattcacaaatgaacaatggattaaacataataaaattttactctgtgagaaaattataaagatgtctttcaaatgtggcatatgttccctggaaaactgaaaaagtccaccgagcattatgactgttttttaaaaagtggtaaaagatggagcaacatggctttctttttcaaagcgcttctgtccatgaattatcccctccttcccattagtactttaattaagaaatgcatttcagttgtcttttacacaagaatagaactatgactgtatttgaagaataatcaacatagaagagaaatgaataatgactatcttccagaggtagaaactttgcttcmtcttattttttgaggaaagggaagacatctttcttcatttgtatgaagaatagttgcattacattgggtgaaaattatggaatttcaaatgtttgttataaagctttatattgatgctgcatagtcaaaggtgaatttgctggttattatgctattctctctacc

SEQ ID NO: 269780 - DNA, 608 bp, Homo sapiens
agggcccctccttcaagcttctgttttcaaaattcactgtttcctcaaatctagtgttaatagatgcttcccgcagttgatattattgtgatccttagtgttcttttttgcatttactagatgaaaattacttatgttgtttttctttttgtgatttttctatgaattgaaaaataaagtatttgctacgttttgggggtatgatgttctgtatagcaatatcaatatgttccatatattttctaaaaatattactaaatacattaattaattgaactttttaaaaaagaaagaaaataaactctgggtgataggtaggtaatactataacacccattttacaggcaagaaaactgaggcacagaaagcattaggttcttacaaacccatcagatgaactagaggggcagasgtattactggactttgacttaagaatcatgcctctgacactgtcatccagaattcaggaagctattaccaccattcataattctggaaactcttgctgtcactacatcattactgttgactcagctaccctgaaacaagtattttgcaatggaatgcctatcctctttatgtaccactctttacagttttcattgc

SEQ ID NO: 269781 - DNA, 559 bp, Homo sapiens
tgaaattcttggttgaagtttttttttctttaagaatgttgaatagaggcgcccaatctcttctggcttgtaggatttcacctgagaggtctgctgttagcctgatgggaatctttttgtaggttacctgacctttctctttagctgcctttaacgttctttcttgcattttgaccttgggaaatctgatgattatgtgtcttggggatggtctccctgtgtagaatcttgcagaagttctctgtatttcctgaatttgactgttggcctctctagcaaggttkggaaagttttcatgggcagtatcctgaaatattttccaagttgtttgctttctcccccttctttactccagcttgatcagagtccatgaaagaagcaataaggagtaactagaagctttctagatgtacagacatgtatggtcaagttggcccttaaacaattcacactctttttctctgtcctgatgcttagtctgcatcatgaacccaaattcctccccagatcatctcacaagtacaaattgggcacataggcaggtaaatcaagttggcac

SEQ ID NO: 269782 - DNA, 559 bp, Homo sapiens
tgaaattcttggttgaagtttttttttctttaagaatgttgaatagaggcgcccaatctcttctggcttgtaggatttcacctgagaggtctgctgttagcctgatgggaatctttttgtaggttacctgacctttctctttagctgcctttaacgttctttcttgcattttgaccttgggaaatctgatgattatgtgtcttggggatggtctccctgtgtagaatcttgcagaagttctctgtatttcctgaatttgactgttggcctctctagcaaggtttggaaagttttcatgggcagtatcctgaaatattttccaagttgtttgctttctcccccttctttactccagcttgatcagagtccrtgaaagaagcaataaggagtaactagaagctttctagatgtacagacatgtatggtcaagttggcccttaaacaattcacactctttttctctgtcctgatgcttagtctgcatcatgaacccaaattcctccccagatcatctcacaagtacaaattgggcacataggcaggtaaatcaagttggcac

SEQ ID NO: 269783 - DNA, 633 bp, Homo sapiens
acaagcgtagctacaatataaaaattatgaagataaaatttatatatatataatttttatataaaaccctatgtacctttttccagatttcttctctttagcatctgttatcttcatgagtttttacccaccttctgtcagtttccctgaattcttttgtttctaaattggtgtttcttattcatcttaccaaagtattttcttcttactgattttttttcattttaaaattttgtatactagtccatcaaaattcttttctaagtatttttcagtaatatcaagtgttgcttaattcagtgtagggcaaatacatatcaccttgagggcataaggggtaaaagtcctgtaactggttaatgaaggtacttctggatagaaatttgtttcttattattcaaatctcattgyatgggttactgcctacttgtggattactgcctattcttactaattcatattactaacttgaatctgacaaatgtgagtgagcacacatttgcacactttcctggggaaaaaacagcagccaatttcatgtgtggcagcgtttttctccctttccctcattattcttcctgatacataaaaactcgaaggctaatttctgagaaaaggacatttagtgatgtg

SEQ ID NO: 269784 - DNA, 548 bp, Homo sapiens
tcatgttctctcactcattctggttaggcagcatcagcagtcttgaccatctcccttctagctcccatctgctctcttctccacttcctgcttcagccacctctaggaaaactattcctactyctaatgtcagtgtgtacctgtgaaacattttagacaatcacctctttcctgcttggaattgtttagctaattatccttccacacatcaccaatttcagctgcatatacgtaagaggtatgcaatcaatttctttgagcaacatattttaggagttacttaaagtgcagtttcaactgagatgagtaactagttaatgccacttggagccatagaagagtttaatattcttgctcatgatgtaatgaaaataagttttgaataaattgaaaaataataactaccatgaattaagtcctcctatacatagccatattatatgcactaattatataatttttagtaaccctaaatattacactttacagatgaggatacagatatagaagagttatattactaaattaccaaattagataatattaga

SEQ ID NO: 269785 - DNA, 568 bp, Homo sapiens
tcatttaattgtacactgattgatacggttaggctttgtgtccccacccaagtctcattttgaattgtaatccccataacccccataaacctcatgtgtcaaggaagagaccaggtgaaggtaattgaatcatgggagtggtttcccccatgctgttttcgtgatagtgartaagttctcacgagatctgatgtttttataaggggctcttcccccttttgcttggcacttctcctttctgctgccctgtgaagaaggtgccttgcttcccctttgccttctgccatgattgtaagttcagccatgctgaactgtgagtcaactaaactgctttcctttatacattacccagtctcagccagttctctatagcagtctgaaaatggactaatatactgtttcactaatagattaagtaatagaatttgagacttgaaagtgaatttagtgcatctctcagaggttgtcttaccaggagcaaatctgaatggtttagattcaagggagatattccagctagagctagctactgaatatacgaatgagttctaaggggagatttcatttc

SEQ ID NO: 269786 - DNA, 569 bp, Homo sapiens
gtttatttattagttctagcaggggttttttgtggaatccttagggttttctacatatacaattatgtcgtcttcaagcagacaaaatcttacttcttcctttccaatttgaattctttttatttatttttcttgccttattgctctagctaggacattcagtacaggcataactcagtgatacagtgggcctggttacagacaaccacaattaagtaaatatcttaataaagcaagtcaaaagtttttttcgatccctagtgcatataaaagttatgtttgcactatactgtactcctttaggtatgtaatatcattatgtcttaaaacacmtatatatatatatatatatatatatatatatatatatatacacacacacatatacacatatatataaacacatatacatatatatgtcttaagaaatactttattgctaaaaattgctaacaatcatcgaaccttaaatgagttgtaatttccttgcctgtgaagagtcttactgctgactgatgagaatagtggtacctgaaggttggggagggtgtgaaacactcttttaaaaa

SEQ ID NO: 269787 - DNA, 561 bp, Homo sapiens
catgtaaaaataggtacatactgatccatatttttgcctccaatgaactcaaaattgaattttaaaatcttgtttaaagtagcattaatatatatttatttaattgaaaactctatatttaaaaatagaagcttttaaaagtgtaaagcatggtagttccataaaattaatatgttagttcaatatttatgagtttacatgtgacactgatcaaaactgaaatgatgttcaaaaatataattaaagaatggattaatgctttgtttccaaaatataatattttggtgtagagccaagtatgactatattatgtgtgatttataatttgtaatttcaaatagtttccaaaacattggatgtttcttatctgaatactcaagaaaagtgtgtgtttactcaaataatagtttaagcaaatgtctggccttttttccccttttctcatatcgtatcaaaccaaatctcatacatatcatatcgtawaatatctcatatggtatcatatcacatatatcatatcatatcatatcgtatcatttctatcatatcgtaacatatcat

SEQ ID NO: 269788 - DNA, 490 bp, Homo sapiens
gagtataattatgtcatctcagcacttgactttcccaaattcatgttaacrttttctttccttttaaaaaataagttgccaacaaatgttaaaatagtgctattacctaaagtgtttagaagagaccaatattagatagctggaaataattcagacaactgtcattattcagagcagaacatatagtggagcagtcagtttttctccaactattaaaaaccaattcatttttttgagtcgatatgtgggtatggacacacatctgggtatatgaaagtgtggtgtgtgtgataatgtttactaaaggcttcagacatgatttctaggtttcaggctcacaattcctatttctttgatattgtatctaagatgcatttcttagaagataggcacttcatagaaatggatataccttaataacattgatacaaagaagggaggttacactgaggcagaaataaatgacaccctttataatatttgaaatgat

SEQ ID NO: 269789 - DNA, 490 bp, Homo sapiens
gagtataattatgtcatctcagcacttgactttcccaaattcatgttaacattttctttccttttaaaaaataagttgccaacaaatgttaaaatagtgctattacctaaagtgtttagaagagaccaatattagatagctggaaataattcagacaactgtcattattcagagcagaacatatagtggagcagtcagtttttctmcaactattaaaaaccaattcatttttttgagtcgatatgtgggtatggacacacatctgggtatatgaaagtgtggtgtgtgtgataatgtttactaaaggcttcagacatgatttctaggtttcaggctcacaattcctatttctttgatattgtatctaagatgcatttcttagaagataggcacttcatagaaatggatataccttaataacattgatacaaagaagggaggttacactgaggcagaaataaatgacaccctttataatatttgaaatgat

SEQ ID NO: 269790 - DNA, 459 bp, Homo sapiens
tatttgcctcttagtctgtatgttaaattctgatttgtactaactgcctgcttgtaataactaccaattctcatgtaagtttgactagatgtagaaacttaggcaarctatctcgcctctctggactccaatttctcacctgaacacgagagatacacattaaaacctcttctggtgttactttaaaaaatatcttatacctcatatatataatgttacatgatgccttagaacatttttaactactttaattttctaatctgttcagtttcattatgccttaaaatgtactatctctatgaaataaattcatatctgaaaattatcagagtatacttttttgtttaaaaataatatatttagtattatatcaagtgtgcttataattttatatatgtacaatacgtccatttgtataggtagatgtagtatatttttaaaaattaatttatgtatcca

SEQ ID NO: 269791 - DNA, 622 bp, Homo sapiens
cataaatgtcttcttttgagaartgtctgttcatatccttcgcctactttttgatgggttgtctttttcttgtaaatttgtttaagttctttgtagattctggatattagccctttgtcagatggatagattgcaaaaattttctcccattctgtaggttgcctgttcactctgataatattttcttttgctgtgcagaagctctttagtttaattagatcccatttgtcaatgttggcttttgttgccattgcttttggtgtttaatcatgaaatctttgtccatgcctatgtgatacatggaatactatgcagacacagtaaagaatgaaatcatgtcttttgcaacaacaagcatgctaattggaagccattatcctaagtgaattaacacagaaacagaaaagcagatactgcatgttcttactgaaaatgcgcatgcatggatataaggatgggaacaagagacactggggactggtagagaggggaggagagaggggactgttggctcaaaaagtatctattgggtgctatccttattacctgggtgatgggatcatccataccccagtcctcaacatcacatgttatgctcatataacaaacctgcactcatacc

SEQ ID NO: 269792 - DNA, 622 bp, Homo sapiens
cataaatgtcttcttttgagaagtgtctgttcatatccttcgcctactttttgatgggttgtctttttcttgtaaatttgtttaagttctttgtagattctggatattagccctttgtcagatggatagattgcaaaaattttctcccattctgtaggttgcctgttcactctgataatattttcttttgctgtgcagaagctctttagtttaattagatcccatttgtcaatgttggcttttgttgccattgcttttggtgtttaatcatgaaatctttgtccatgcctatgtgatacatggaatactatgcagacacagtaaagaatgaaatcatgtsttttgcaacaacaagcatgctaattggaagccattatcctaagtgaattaacacagaaacagaaaagcagatactgcatgttcttactgaaaatgcgcatgcatggatataaggatgggaacaagagacactggggactggtagagaggggaggagagaggggactgttggctcaaaaagtatctattgggtgctatccttattacctgggtgatgggatcatccataccccagtcctcaacatcacatgttatgctcatataacaaacctgcactcatacc

SEQ ID NO: 269793 - DNA, 537 bp, Homo sapiens
tgtaaattctttgatgacagaagagatctttcacacactggtgtgctaaagacatttggacacattggtattgtaaagggagcccagaactgaaagcagggtacaaggtgaagtgcagagaggaaaatcagtgatgcagagtccctgacataataaaatggttgggagatgagatatatatatatacatggaaaggtactgaataggctaccaatgggaaattgaaagaatggcagacagtaaggaccagaagttgttagagatgtaagaaaacacagttgactgagaaggacaaggcaagcrtcttggggaagtagaaatagccaattagtgaattagagagttgagtagccagaggcaggcgtgaatccagaaagcacaagaataggcaaatgagaagcttcacttctcatccccatgtcagaccccctgaatcagaagttctggggatgggggtggaaaatctgcactcttcaccagctcctaggtcattctaatgtaggggttgccaaatagcaaatctggagagacactgcc

SEQ ID NO: 269794 - DNA, 571 bp, Homo sapiens
aggggagaccctatgtaggtgcacaaggaaagaaaagaagggaagagttgtttagggaatttggggggaggatttggggattttttgggacttcctagtttctggttctggatgagttctaagatcattttggctggtgaccttagagtgattgaaaggtatgatgaaataagttttaattgctttttgaaattatttatttcaacaaaagttcctaaggcaatcccttgactgcatgaaggygttacctccagatactttcagcagaaataggaggaaagggaatgaagtgataattaaaaatcattataatcgcaaagatgatagaggtaatagtgtgtatttaatgcttactatatgcatagtactttactaaacactttatacacagtattttattaaatcttcaccacaaccctatgggactggcattatcgctgccccatttcgtaagtaataaaactgaagcagagagtttcaggaacttgcccacaatcctgaaactagttcatggatggatgagccaggattcaaatataggctgtggtctgattatgcagtttcaactctt

SEQ ID NO: 269795 - DNA, 571 bp, Homo sapiens
aggggagaccctatgtaggtgcacaaggaaagaaaagaagggaagagttgtttagggaatttggggggaggatttggggattttttgggacttcctagtttctggttctggatgagttctaagatcattttggctggtgaccttagagtgattgaaaggtatgatgaaataagttttaattgctttttgaaattatttatttcaacaaaagttcctaaggcaatcccttgactgcatgaaggcgttacctccagatactttcagcagaaataggaggaaagggaatgaagtgataattaaaaatcattataatcgcaaagatgatagaggtaatagtgtgtatttaatgcttactatatgcatagtactttactaaacactttatacacagtattttattaaatcttcaccacaaccctatgggactggcattatcgctgccccatttygtaagtaataaaactgaagcagagagtttcaggaacttgcccacaatcctgaaactagttcatggatggatgagccaggattcaaatataggctgtggtctgattatgcagtttcaactctt

SEQ ID NO: 269796 - DNA, 470 bp, Homo sapiens
tgaggaaaacaaaactccatgatgcaattttaggccaactgatgcagtattcaggagggaccgtcctatctcttctttacctttcatatttacagaaatctatgcaatcctccaggcatttgcattcatcctcactgtccttcattaaaayttgttaagaatatcagccattgcaggtgagtcagcatcatgtgtcctatctggatctgtagcctgattgatagaaaggtctcagaaaagcatcagaaacacttatagaagactatgccaccaataaacttagtgaccctggactgcctgggttcagatgctgggctttgacacatacaagctctgtgaccttggcaagctatggaatatctcaaccatggttcagagagtagatgttactcacccaggttcacacagaaaactggcaaagcttggtctggaacccacagctcatgaccaaaggttgtgaaatagctgcc

SEQ ID NO: 269797 - DNA, 470 bp, Homo sapiens
tgaggaaaacaaaactccatgatgcaattttaggccaactgatgcagtattcaggagggaccgtcctatctcttctttacctttcatatttacagaaatctatgcaatcctccaggcatttgcattcatcctcactgtccttcattaaaacttgttaagaatatcagccattgcaggtgagtcagcatcatgtgtcctatctggatctgtagcytgattgatagaaaggtctcagaaaagcatcagaaacacttatagaagactatgccaccaataaacttagtgaccctggactgcctgggttcagatgctgggctttgacacatacaagctctgtgaccttggcaagctatggaatatctcaaccatggttcagagagtagatgttactcacccaggttcacacagaaaactggcaaagcttggtctggaacccacagctcatgaccaaaggttgtgaaatagctgcc

SEQ ID NO: 269798 - DNA, 550 bp, Homo sapiens
ttgctcttatccagggcatgtactccagttcattgttgtcccaatgattccaggctaaaggacagtcaccattttcttattctagaacctattatgttacctgcctggcctctgcaggcatttcagtttgtgaccctggattccttmctagtactttttcaagcttcccagggtcttctacagtgatgtactgaattaaccagatagcagtcctctaaacagcctggcgtgggttgaatcctgtcccaccaaaaaatatgttgaggtcgcaatcctcaatatttatgaatgtgaccttattcagaaatagggactttgcagatgtagtcaaattaaaatgatgtcttactggattaggtagactctaatctaaaataatatgtccttattagaagacacagacacagcagaagggtggccaggggaagacagaggatagattggagagaggctaccacaagccaaggaacacctaaggctaccagaagctggaagaagcatggaaggatccccacttagaggcttcagagggggcatggtcctgccaaca

SEQ ID NO: 269799 - DNA, 550 bp, Homo sapiens
ttgctcttatccagggcatgtactccagttcattgttgtcccaatgattccaggctaaaggacagtcaccattttcttattctagaacctattatgttacctgcctggcctctgcaggcatttcagtttgtgaccctggattccttactagtactttttcaagcttcccagggycttctacagtgatgtactgaattaaccagatagcagtcctctaaacagcctggcgtgggttgaatcctgtcccaccaaaaaatatgttgaggtcgcaatcctcaatatttatgaatgtgaccttattcagaaatagggactttgcagatgtagtcaaattaaaatgatgtcttactggattaggtagactctaatctaaaataatatgtccttattagaagacacagacacagcagaagggtggccaggggaagacagaggatagattggagagaggctaccacaagccaaggaacacctaaggctaccagaagctggaagaagcatggaaggatccccacttagaggcttcagagggggcatggtcctgccaaca

SEQ ID NO: 269800 - DNA, 601 bp, Homo sapiens
atgagctaataatacacacaaagcccttagaatggtgcctggcacagtgtgtgtgtgtgtatgatccacaggcacttgttcttattgttgtttgtgtcattgccgttgttgtgggtggtgatcttgagaggcagttttaataggatattggggacagatgtcattttcataacttatatttggacttctgcacctcacgctaatttacctcaaatgacagtaagtcagcactactgaattaattcagtcatcatattttcactggcttagttgtaaggggtcctctcacactgaagagcagcgtcctctgtgctgtgtgaggtggactatgacattctcctgtgcctggtcagttgtgggacccaatgcaccagagattgcacaattggtaccgaaggggaaaatgagtcagaaaacagggaggggtggcacaaggagaagaggggaactggctccttgcmtatcccccaaagcactctccagatatcagagctccttgaatcacagcaacagagggatgggttttgagctcagaggaatgacccaactccacgcaagcaagccgctgaagtctctgcacgctgccgtccgactggccact

SEQ ID NO: 269801 - DNA, 620 bp, Homo sapiens
cgctgccgtccgactggccactgggtgtcactcttgtctatgtttgctgggtgtcagggtctgagaagaaattcagcctttgctgaagtctccatcttctccgtgtaggttttctttttgtgcttgtrtattactccctaaagtatgtgtgtatacttaagtgcctaaattaaaaaaataagtcagattgataaattaatgtactcaaaaccagaaaaaagaacataggaaaaaagctagtattttatagtattacagttagaaaacattcttttgttacattccttcttttattcttcatattgcctgtgtctttataattcaatttcttgtggaatctatttttgacactaataattttgccattggtctcatagccatttatttgcatgatgtgtctacgtgtaatatattttattacatattgacagcaagttgtccacttcttcttcatagagtatctattttagtagctattttcagtgaagatctgtgggttataaatactctcagtcctgagtcttggcctgtcttaaatatatataacacttaacatatactcttgaattataatttagctaggtatagcataacatcttcaaagtttgcaggaaaaaata

SEQ ID NO: 269802 - DNA, 585 bp, Homo sapiens
cttacagcatcccagcctgaaggyttcaaggaggtcaggcctggcagagcctgggaggagcatcaggccgtggggtccagacagtccagcagctctgaggactccagcctggaggaggagctcctctcggccacctcagacagctatcgcctgccggagcctgatgaccttgatgacccggaactgctcatggacctaagcactggtcaggaggaggaggctgagaacttcgcccccatattggcttttctggatcatgagggttatgctgaccactttaagagtctctatgacttctccttctctttcctcacttcttccttttatagcttctctgaggaggatgagtttgtggcctacctggaggcatcaagaaagtgggccaagaagagccacatgacctgggcccatgcccgtctctgcttcctcctgggccggctgagcatcaggaaggtcaaactctctcaggccagggtgtacttcgaggaggccatccacattctcaatggagcatttgaggacctatccttggtggccactctgtacatcaatttggctgccatctacctgaaacagaggctgaga

SEQ ID NO: 269803 - DNA, 585 bp, Homo sapiens
cttacagcatcccagcctgaaggtttcaaggaggtcaggcctggcagagcctgggaggagcatcaggccgtggggtccagacagtccagcagctctgaggactccagcctggaggaggagctcctctcggccacctcagacagctatcgcctgccggagcctgatgaccttgatgacccggaactgctcatggacctaagcactggtcaggaggaggaggctgagaacttcgcccccatattggcttttctggatcatgagggttatgctgaccactttaagagtctctatgacttctccttctctttcctcacttcttccttttatagcttctctgaggaggatgagtttgtggcctacctggaggcatcaagaaagtgggccaagaagagccacatgacctgggcccatgcccgkctctgcttcctcctgggccggctgagcatcaggaaggtcaaactctctcaggccagggtgtacttcgaggaggccatccacattctcaatggagcatttgaggacctatccttggtggccactctgtacatcaatttggctgccatctacctgaaacagaggctgaga

SEQ ID NO: 269804 - DNA, 579 bp, Homo sapiens
aggcccagggagagcgcgagttatactggggtcatcaaaatggaattaacaatggtgaattttattgtgctcaactaactgtgcaccagactgtttcaccatttcacatgtagacttaatctccaccacagctctatgaagaagacataatcaygtcataaaagctacagataaggaaactgaaacacagagaagttaaataagttgtcgaggcaagtaaaagaaccaagataaaatccagacactttggcctcaaagaccaagtgagtagccaagatgacaactgcataactagagctagaggaagtcagatctagaaccccgatctccgaccagtggtcctgcacgtctccctccatgctgtttctactctcatggggcacaatgacaataggacttagggggagggactgaaaagtgtttacatctgagaaatctggagaagcgaaattgttcatagctaaagtcgtgccttttgtgccaagggcatcatttggggggacactccctgctgtaggtgccaaggtgcctagatcaagacttcaagcagaggaagcagaatatggttgttttgggttc

SEQ ID NO: 269805 - DNA, 579 bp, Homo sapiens
aggcccagggagagcgcgagttatactggggtcatcaaaatggaattaacaatggtgaattttattgtgctcaactaactgtgcaccagactgtttcaccatttcacatgtagacttaatctccaccacagctctatgaagaagacataatcatgtcataaaagctacagataaggaaactgaaacacagagaagttaaataagttgtcraggcaagtaaaagaaccaagataaaatccagacactttggcctcaaagaccaagtgagtagccaagatgacaactgcataactagagctagaggaagtcagatctagaaccccgatctccgaccagtggtcctgcacgtctccctccatgctgtttctactctcatggggcacaatgacaataggacttagggggagggactgaaaagtgtttacatctgagaaatctggagaagcgaaattgttcatagctaaagtcgtgccttttgtgccaagggcatcatttggggggacactccctgctgtaggtgccaaggtgcctagatcaagacttcaagcagaggaagcagaatatggttgttttgggttc

SEQ ID NO: 269806 - DNA, 579 bp, Homo sapiens
aggcccagggagagcgcgagttatactggggtcatcaaaatggaattaacaatggtgaattttattgtgctcaactaactgtgcaccagactgtttcaccatttcacatgtagacttaatctccaccacagctctatgaagaagacataatcatgtcataaaagctacagataaggaaactgaaacacagagaagttaaataagttgtcgaggcaagtaaaagaaccaagataaaatccagacactttggcctcaaagaccaagtgagtagccaagatgacamctgcataactagagctagaggaagtcagatctagaaccccgatctccgaccagtggtcctgcacgtctccctccatgctgtttctactctcatggggcacaatgacaataggacttagggggagggactgaaaagtgtttacatctgagaaatctggagaagcgaaattgttcatagctaaagtcgtgccttttgtgccaagggcatcatttggggggacactccctgctgtaggtgccaaggtgcctagatcaagacttcaagcagaggaagcagaatatggttgttttgggttc

SEQ ID NO: 269807 - DNA, 579 bp, Homo sapiens
aggcccagggagagcgcgagttatactggggtcatcaaaatggaattaacaatggtgaattttattgtgctcaactaactgtgcaccagactgtttcaccatttcacatgtagacttaatctccaccacagctctatgaagaagacataatcatgtcataaaagctacagataaggaaactgaaacacagagaagttaaataagttgtcgaggcaagtaaaagaaccaagataaaatccagacactttggcctcaaagaccaagtgagtagccaagatgacaactgcataactagagctagaggaagtcagatctagaaccccgatctccgaccagtggtcctgcaygtctccctccatgctgtttctactctcatggggcacaatgacaataggacttagggggagggactgaaaagtgtttacatctgagaaatctggagaagcgaaattgttcatagctaaagtcgtgccttttgtgccaagggcatcatttggggggacactccctgctgtaggtgccaaggtgcctagatcaagacttcaagcagaggaagcagaatatggttgttttgggttc

SEQ ID NO: 269808 - DNA, 416 bp, Homo sapiens
aaaaaacctagttagaagaaaaaggggaaaaattttaaagagtgaagaaagcctacaggatttatggaacaccattaaatgagcaaatgctcacattatgaacttcaaaggaagaaaagagaaaaagacacgcaaagtttatttaatgaaataactgctgaaagcttcttaagtcttgggagagatatggacattcagatccatgaagctcaaaagttaccaaatttattccaaaggcacatttttatcaaaatgtcaaaatacaaaggcagaatcttaaaagcagcaagtgccgtaaagggaatccccattagactatcagtgaayaccttagcagaaaccttgaaagtcaggagaaaagtgggataatatattcaaagtactgaaagaaaaaaatgccagcctggaatactata

SEQ ID NO: 269809 - DNA, 598 bp, Homo sapiens
gagttgggagagtgagggggtacatatcaggaaatatatgctgtcccaccgaagagggaagaccgccaagtgagaggcccagtagcaaagagcacccctaacatacacaccctcccgcttaacggtgtgggacccaggaatagatgtgcttattaagaatctactcagttctgcttcattgtgacagctaccaccaattgacattcataccaagccatccatacatctcgtctcaattaaaagtctgagcagaggaataattgaagcttaaagaggtaaagtaagttgctcaggtcactcagtgatgaaaaggagaaagagcttcagacccaagtgtccctgaatgcaggaccagggtgcctggccacacctcyaggtttggctgcacttctcaatgtcaaggcttacatgcctccaaagatggatttcctttttagccatttccttgtctatgacataagtaagtctgatataattctgacagccctgggctcagggaagttaattaatttgcagaaggtcacacagctagtaagaaacagattctaacctaagtatgcccaactccaaaacacattacattgcccccacctgagct

SEQ ID NO: 269810 - DNA, 577 bp, Homo sapiens
acaccaatcacaatgcttctgatactgaatcatattacataatatatcatttgcccctttcctgtcacccagctgaatccccacttccctgaaatgtgtgcccaaacctggcattgaatgacactgaccctcctcagaaggagctcagtcctcttccctgcttactccatttctctgagtgtgcaaggaaaaagtggttgttgctagtctgtcatctacactctctgccacttattaatctctctgttttcaaacaatgccagataaggcytaggctgggtgcttgcaatgagcaacaggacctagcttgaagttaatgcattattttattttcattgtatttgccattatttacataattctgtttatggaaaacaatacaagtttttcttctatatagactagtcatcccttataaaaataagttaatatgagtaaaagaagtaaatcaatttagaaaatgttttgtaaaggctctttggtgcatatcgtgataaatgcatgcatacatacacacacgtgtacatatacacacacaactgtgaaggaagccctgaacagcagaaatcctgtcatt

SEQ ID NO: 269811 - DNA, 614 bp, Homo sapiens
acacacaactgtgaaggaagccctgaacagcagaaatcctgtcatttgtgcaactaagtccttgagtcatgagacccccgcctcaagtaccactgtctttgccactaactaccaatgtgtctgggagaaagttacccttctgttcctcagtttactcacctgtaaaaagaagataatataattgagytataaaaatatattatttcatctctccaatactatttctcatcctattcatacagtataaaaatagcactgctgaaaaacccagaggtgaggttcttttatcagaggacaaatatctgagatgtgtagaggttaagtgacttgcccaaggtcgcactgcaatttaatatcaaaatcaagaccaaaatacaggttccctttagtgataggcttcctgatccctcatcctaacaccctccattcctgcatattcccttccccaaataaacttctgccaaatgaggtgcattatatttacaaagaggaagaaaatgaacacacacacacacacatacatatatatacacatgcacaatataaaggcatcttaaaataatggaaaagcaaataagaaaaggacaaaagcaatattggatttcagaatgtta

SEQ ID NO: 269812 - DNA, 561 bp, Homo sapiens
tgttttaggccactcagtgtgctatgcagtgatgttattaatagagatgctttgtaaagcagctgccctgaaatcaataagatgccttgtagttgggtatggcacatgcctgtagttccagctactcaggaggttgacactggaggatcacttgagccccggagtstgaggtcgcaggaagccctgactgtaccactgaactccagcctgggcaacagaggagaaactgtctcaaaaaaaaaaaaaaaaaaaaaagacatgtattggtattctctcccatccatcaagtcctccatctcatctgcccccattgtggatgagacaaaatgtgtgtgtaaatgtaactggacaatatttaatcatatacactatttacatgtaatttatgtcataattttcttaacattcaatttccaagcctttgctcttggaaagcttccctggagcttctgggaggttatgtgggagcacagccttatggcaggaggaagatggtgaatccaagtcaggtttcgtgcaatccatctggccattctgaggctgtgtcttttgagctaagat

SEQ ID NO: 269813 - DNA, 558 bp, Homo sapiens
ttgtccagcctgctcctaatggtgtcctgaagctcctcatcacccagcaggaccgctgctgccagggccagaaggaagtactcagtggcatcatgggcatcctaaccccgtggtatgggggcaaagaagagacagcattagcaaacacttccaggacaggctaggaggctgtgctggccactctagttttttttktttgtttgtttgtttgtttgtttgcccaacatccaatccccatctcctgagtccttagggagcccctctctccctccactgtggtccttgggacattgctaatcacagtgccctgcactccaggcacagaggtggtcccttactgaggctcagccaatcatgaaacatcattgccctgggcacagtgcttcagggatgtgtacatgacccaaacttggcctacatctgccactccctgggactttccactgtgtctcaataaggaaaatagtccctctgaagtggcaggttcagaggtggacttgaacctgccagtagctagaaggggaaaaggccaagaaacaaagcaaagtagaaacatac

SEQ ID NO: 269814 - DNA, 490 bp, Homo sapiens
gacaagaaagagagaaaaatgaaatacaagcaagagaggagaagagggactcaggccraagtccagcctgacccttcccatgcccgtgccaggacctgtctcagcaaactgcacagcttggacttactcggtagtactccactgcatgatgcctgtggcgggtcccattgaagaacacatcacctgcttcttcataaagtttgagagccagcaaaggctcctctgacttcagggctgtctggatggctgcctaggtgggacagagacagctgttaaaggcagagaggagggcttcctgacctccacaggactggcagagctaagacgcagaccacctaaatcaactaatcctctgctaaagtcccccaaatcctaaatgtcttcacactcctagggctggtaagaggactttagacattctccagtctggcatttccccatcctgttatgagagattgcttttggtggtgctagattatttttaacagta

SEQ ID NO: 269815 - DNA, 546 bp, Homo sapiens
ctttatctctagcaagctattttggatttcatctacacaaaatgtgctaaggaagttgaagagtaaagaatataccactgcacctgcagcacagttacaggacctcaaatagcctcaggtccagaatgattcacttccatggaattgaccctgcacaacatcagttaggtggcagcctggggttgggtgaggcctgggaccagttctggccagtgaacatttcatcactggggcaagatgctgcagttgctgtgttattgcatggrcagctacagagagagagaggggcagtgagatggaatcctggagtcaggaggctttgccaccaaaacaatgcacaatcggaacagtgccctctgggcttcagtctcccacaacatgaaaggagaagactgaattgtctgctctctggaaaccctttcagcccaaaaatcgcaaggcagatggcgtagaggctgagagtgaaggctctaagtcacactgtgtgcagttctcagctccaccacttaccagttgtatcaccttgggcaaattactcagcctctc

SEQ ID NO: 269816 - DNA, 546 bp, Homo sapiens
ctttatctctagcaagctattttggatttcatctacacaaaatgtgctaaggaagttgaagagtaaagaatataccactgcacctgcagcacagttacaggacctcaaatagcctcaggtccagaatgattcacttccatggaattgaccctgcacaacatcagttaggtggcagcctggggttgggtgaggcctgggaccagttctggccagtgaacatttcatcactggggcaagatgctgcagttgctgtgttattgcatgggcagctacagagagagagaggggcagtgagatggaatcctggagtcaggaggctttgccaccaaaacaatgcacaatcggaacagtgccctctgggcttcagtctcccacaacatgaaaggagaagactgaattgyctgctctctggaaaccctttcagcccaaaaatcgcaaggcagatggcgtagaggctgagagtgaaggctctaagtcacactgtgtgcagttctcagctccaccacttaccagttgtatcaccttgggcaaattactcagcctctc

SEQ ID NO: 269817 - DNA, 605 bp, Homo sapiens
ctgtttttcctattatagaatgcattctaattttccagcttccttattgtttctcagagaggtgcccttctggctcatgggatccgaggcctctggtgaattggcttgagcattctcacactctagaagacatcagaaatacccaaagtgctaattaaaaacacacacctcagaactctactcctagatatttcaaggtagagtaagtagagaggggctccaggaatattataaaattcagcttttcataaaaatgtaccattaacacatatacaccatagaatactatrcagccataaaaaagaatgagagcatgtctttcatgagacatggatggagctggaggccattattcttagcaaactaatgcaggaacagaaaacaaaatgccacatgttctcacttataagtgggagctaaatgataagaacttataaacacaaagaggaaaacaacagacactgggatctacttgagggtggaggttgggaggagggagagaagcagaaaagatcactattgggtactgagcttcatacctggctgatgaaataatctgtataacaaacctccatgatataagtttacctaagaaccaaaccttc

SEQ ID NO: 269818 - DNA, 604 bp, Homo sapiens
cagaacctcagctttcaaatactgaagcagaatcagcattttatcaatatccataggtgattcataggtaaaataaagtttcaaaagcaccaatctagacatatggttctcaacactggctcaaattagaatcatttgaagaacttattattaaaaaaaatctatggctgtactatggaccacaaaaatctgaatctctaaggatgaagcaatattttttctttttattcctttattatttttaatttttgtgggtacatattaggtgtatatatttatggaatacatgagatattttgatataggtgtatacaatgggtaataatcacatcagggtaaatcacatcgcctcaaacatttatcttttctttttgttgcaagcaatccaattatactcttttagttatttttaaatgtacaataaattattgttgactacagtcaccccrttgtattatcaaacattagatcttatttattctatctagctgcatttttgtacccattaacatccctacttctccctagcgcacacacccttctctgcctctagtaaccatcattctactctttatcttcatgagtccaattgttttaatttttt

SEQ ID NO: 269819 - DNA, 600 bp, Homo sapiens
ctgtgtcttgatcttctttcttcttctttttactccacttctaccgttgtgaagacagtaacttttcagagttgggaagaaagacaggcctgacaggaccctatttaaggggcagacaggacagctggggacaattatacatttcagggccattataaccacaccccaattgtctccctaatgatgccaatgtctgtctccactccagcccttccattatctgcccctattgaaccttaagccttgctgtagtcagatctgtgatgacctgtgtaggctcaatgtatattgagcaccttcagtgttctaagccatgagacktagttcgatatgtgaatggggatctgctttttaataagatgggcatacccaggctgctgctggattgagatggcatgtatgacagttctttgataacagcttagataattacaaggcaatggtgataacaattagaattcttccatgccactaatcctggaaaaaatttgtcacttgaccaaaactacagccttgcttataacttgctttcaacttccttacactcttaagatgaccttttatttcatcttctccaggtaaagaaactccttccaagga

SEQ ID NO: 269820 - DNA, 551 bp, Homo sapiens
gaaccttaagccttgctgtagtcagatctgtgatgacctgtgtaggctcaatgtatattgagcaccttcagtgttctaagccatgagacgtagttcgatatgtgaatggggatctgctttttaataagatgggcatacccaggctgctgctggattgagatggcatgtatgacagttctttgataayagcttagataattacaaggcaatggtgataacaattagaattcttccatgccactaatcctggaaaaaatttgtcacttgaccaaaactacagccttgcttataacttgctttcaacttccttacactcttaagatgaccttttatttcatcttctccaggtaaagaaactccttccaaggatccaactgtatcgagtgagtgtatagcctcatctgaatacaaggaaaaatgttttctgccacagaacattaatccaggtatccaaatgccaaagacaagccctattcttccatgttgagtattgcgataacctctttatctttcccatctaaagagcccctccctctttccctcttgatgaa

SEQ ID NO: 269821 - DNA, 574 bp, Homo sapiens
ggaggcctggatggatgcggggtgctgaagtgaaaggggttrcatgagattggagcataagcctaggaggaactgcatggaacaaacacccacgtgaagtttacatcaaagtcaggttatatgggaatgtcatagaagagctcatttgcagccacagcattttcaggttaaagacaggccttttaaaggtagaagtccacagctgtcttgtggactcaggccagcatgataggggtcatctctaatgtgctgaggaatttgcagaggtcctggcaagttgaggctgcaagtgagacctctgtgatgatccattccaacgccttctcagtttattgtgttgaataattattaacaggattgctacttactgtctaaagaagacacattgcaaagtgcaattatacgatgaacctcctcagtatggcctttctcgacaacactatccaaaggtatcccctgccttcaagcactccatctctctgtctcttgaccccattaattttttttcatagcgctcttctccatctgaaactattatgtttgtggaatttcttgcctagttactcacttacca

SEQ ID NO: 269822 - DNA, 530 bp, Homo sapiens
aatgtcctcatttgaggaagctgaggccttgaaaatttaagtgacttgcccaaccaaggtcatacagttttatacaatttaatgtgcataaacaatattagaggagaggcaggtgcatggtgtgattttcagagaccacgcaccactggacaaaccttcatagrtcaaaataataagaccatcctgcatgaacaaagtccagagggagcctgcccaaaatatgttctataacttcaacccatatttctccctcctggggaactgaagggggtaggtgttagcaccacagaaaaattatcgaagccagaaagatcagagagccagcagtgtcttgccagccatctctgtaaccaaacacacagtttgagagaagcccccacctccagtttcctccccctacaatttcccctacttacagttccaaaaccctgccatgatattaatcagagaagcacccaacctggcccacactttatgatgtgtgtctccgaaacctcaccagttctcatggccaggtgtagctgttagga

SEQ ID NO: 269823 - DNA, 580 bp, Homo sapiens
gagccttgatatcagtcttgccattcctgtttcctagatagagaaactgaagttcacattgacattgccaaagttaagcagcaggatgcagggaaggatggggtaaaccacccgccccctacacactgggcaagtggagctggaggagatgaggcctgcttccttagaacctccctcaaccctactctgaagccctatactcttgcctcagcctcccagagtgctgggatttcaggcatgagccaccgtgcctggcytaaatttaatttttaattttaagtgaaattagccttttgagtccagtgaagagagtttcaggctggggacagtggctaatgcttgtaatcccagcactttgctcatctcctgtccccctgcagggactggtaaataaggacatttatagtgtaaataagagcatctcctgtccctgaagcaccttacaaggttactctaagtaggctaggttcctctgccaaccagttaatcctgctgtcagttactagagtcgatttagcatccctggatgaatcttgaagttgagctgcttgtggcttctgagccacaatatcttcactcc

SEQ ID NO: 269824 - DNA, 608 bp, Homo sapiens
gccaccaccactctcatatatgcacctctggaactacttggcaccaaccaaagacctgaaaaagtattttagtcactcacattcagccctgcctcagaccccaagcatcatcatcatcatcatcatcatcatcatcatcatcatcgctattatttatggagctgccattacatgctaggtgtcttacatakataaccattaactaattccccatagggtagttcatattatttccatttcataagtggtaaaaacaaggctcagagagaactagtcatttcctcaaggaacacagcagccaacttagaatgtgcactcccatctgtgtgcccctagaacgcatgttttgagaggggctagccaagtggtcctgcatagaggctcccagcactaactttgggctggatgcctgggttcagctgcttgctccccatttcacttactgctgtgcgatcttggccatattacctcactttctaagtctgtctttcctgtctgtaaaaatagtgtaataacaatcacaccaatctcatagggttgttgtgaacatgatatgcgatcatgaatataaaacacttagcatgaggcctggaacggaaaatgtgctc

SEQ ID NO: 269825 - DNA, 455 bp, Homo sapiens
gagggggctccattatgatgcacactggttcatattttagtttagagcacaggttcttaagagwgtgacttattcctgaaggaataaaaaggactttgagaagaataaaagtagtcaacattattatggggcattgacatagcaatttgcttgtaaatgattttaaaaactactgctaataatacaccttattgtatatagtactcccaaccaaagccaccttgggtaatcaaattaatacaaggcaatagaaagggaatgggagcgcatatagcattaacagcaacgactacaattaatacaagtacataaaataatccaatgggaccactgaacaaccctgggcaatgaaagcatttttcaagatataccatttaatgtggttgtacagcagagtaatataatgggggtgaatagtatttactaaggaaagaaattgatgcaaagagtgaatg

SEQ ID NO: 269826 - DNA, 551 bp, Homo sapiens
tttactccattatcacctctgtgaggccctctctacacaccttaatcaaaattgtgttacctcctttgaatggctgttccctttttactccttcataacacttaacaccatctaacatattacatatttctcttactttttcttgtttttctcctcccattagaatctaagctctagaagggcaggggcatttgtgtgttttatggcagtaactgacatgtagtgggtaggaaataaatcctgcaagttcactgataatgattttaaaaagcctttcaatacacacacacrcacacacgcctcgagcatttgcttgtagtcattattataagtcatatatgtttgcctgcatagccaagcataagttccttatctctgaaggaaaccaaaatacttctctctcaaaaaactgaggattattgagctgaagaaggaaaaaaaccagggggccattctgtcccttcttctgcctgcttgatggcaggacagcaatttacaaatacaagaggtcttcatcccttcctctctgccttttctagtctaaagacagg

SEQ ID NO: 269827 - DNA, 375 bp, Homo sapiens
cttctggtcacctaagtatttacccttaaacctggttgatctcccttatgctgtcacttttctaaaccatataagtatttaatattttaatctgatctctcccaatttcttctccttatatttaaaggtacaacaacacaattttaacayttgaacacttacagggttcctagctcagtgcctcattaaccaaccagtagcaggaaaggggtaaggataaaccgtcaaagaaacaaatcctaaagccgtcaatgcctgtttttagtccattttctgctgccataacagaataccacagactggataatttatctataaaagaagtttattcagctcacagttctggaggctgggaattccaagagcatggcactg

SEQ ID NO: 269828 - DNA, 375 bp, Homo sapiens
cttctggtcacctaagtatttacccttaaacctggttgatctcccttatgctgtcacttttctaaaccatataagtatttaatattttaatctgatctctcccaatttcttctccttatatttaaaggtacaacaacacaattttaacacttgaacacttacagggttcctagctcagtgcctcattaaccaaccagtagcaggaaaggggtaaggataaaccgtcaaagaaacaaatcctaaagccgtcaatgcctgtttttagtccattttctgctgccayaacagaataccacagactggataatttatctataaaagaagtttattcagctcacagttctggaggctgggaattccaagagcatggcactg

SEQ ID NO: 269829 - DNA, 471 bp, Homo sapiens
aagctgaagccagggtgcaaatcagagaaagataaaccagaaggctgatgttgaggaatacagtaaactatccccctgaatccattacctaccttcaacaattatcaacattttgtcagtttaatagggatcttctgctcttagcctcaatatgacagaaagcccttaacakggttacttaggaagatttaagaatatgagaaaatggctgggcacaatggctcatgcctataatcccaggtagcctttgggaggccgaggctcgtggatcacttgagctcaggagtttgagaacagcctggacaacatggtgaaacactttctccagaaaaaaatgttaaaaattagccaactgtggtggtgtgcgcctgtagttccagctcctcgggaggctgaggtaggaggaccacttgagaccgggatattgagactgcagtgagctgtgatcacaccactgcattccggcctggg

SEQ ID NO: 269830 - DNA, 644 bp, Homo sapiens
gggttctatctaaaggactcaagagccatcatgattgtccaaggagggatccagggccaattacataattttcagggcaaaataaaattatggagttccttgttcaaaacacagggggatatttgcaattaaaggcactataagcatttttttccttctgcagtatgtctcttgacttgtcattatgattcttatttgctattaaacatcattataaaaatgaaaaattaaaattttgaattattaccatagattgtgccattcttctttatattgtataatttcatttcaaaatgcaaatagaaaatcatttaactcatatgcagaattactgaaattacacaatttgtatttcctagctggtacattcaaatgtacttcattcttactagaacaatgtaaacrctgcacaaaattaactcttctattattttacttattgacaatgagcaccttctatcaacactctacctttggcttactgatgagtaaagaataactgaaggaaagcaactatgagttgccctgtttcccttaccttctaagtcatcattttgtcattgttgtaaatcttttgatagtacagggaagtaacttaaaaaaaatggttgttcatctttcttagaatgctaatgccttctctg

SEQ ID NO: 269831 - DNA, 603 bp, Homo sapiens
aatcctttccttgtgcaggaagggaatgcaaatgaggaaggaaagattcaagggtaccgagcctcctggggatgggaggggagaagaaacagaaatgtttgtcaggagtgtggctgagaaaagactcctcctgactttccaggggtagccctctaagcagactacttgtttggttatttccaagaatatcctccaacagaacaaggaatactcaggagattttcccacctacctgcaaggtttatgccaagactattatggccattgaaggggaacaaaggcataaaataatgttttgccaggaaataaaggaaaagaaaaaagactgcagcactataattaggtatttggcttcactgtatttcaaattgaggtttccaatacagttttgtyctcttcttgaaagggctaattatactgatgtttccaaagaaacacgtgattgttacagtggttttattagcaagttttccagagagctggtatgaattaaaagcaggaccagttccattcaaaaaatatttggtcgttttattttcaaactctgaaagtaggagcactcatatttatagatccctctgtacacatagaaatgtgcagaga

SEQ ID NO: 269832 - DNA, 603 bp, Homo sapiens
attttcaattgccattcaaataataagctgtatttttttaaatttcaatagactttttgggtgaaatttacttgagaaatgtatcttagaaacagaagaacaaagaagatttatgagaattttgaagaacaacaatgaagtgtgaggaattattcccaatatataaacagcactaatcaggcagaaaggcattagcactggtctcataatcccccatgaatgctgaatgttaatcctttaatttctagatcatggatgggttcgaggagatgggcagagggacagttggggaaatggagagagaagcagaggagactcagaggtgtcagaatagtgacattttatcaaaaaaagtcactatctgtacagaagttttgtattatcttaataattaatagggctatactagtacaactcagctaaatataatcgttagatatcrgcgcatacaatgaaatgaatgaaaccagaatagagagctgagaaaggtatacatacatatgagaactgagtggatccctcgtgtagcactgtaagtcagagggaagaatagctattcaataaataatatgaagataattagttatccatttgaaaacagtt

SEQ ID NO: 269833 - DNA, 528 bp, Homo sapiens
aggacacttagggatcagggtgtgaaggacctgcctgggatgcctcactaagtttaagattttcatcctaaagaaaatgggaagataccaagggatgtcaagcactaagaagagatttgcattttggaaaaattagtatagcagctgagattctgttttttgatcattttattcacatttctcccycctacaacactataaagttaattaaggtactgaccatgttggtcttactcaacataatgtatacccaacatacttcacagtaaaatctcataaatccttattgaatgaatggaggaggtgagatcagaagcaggaggcagctgaaatagagtgagtaaattggagcagtggcagcagagggggtggatatgagatcctcgggagtgtgtatagtgcagcacttgggtacgcattggatctggagaataagggagaggtgtcaagcttgggtgattctatctatggtaacttggtgactggtggttgctattcattgaacctgggaaaaaacaaaggagaact

SEQ ID NO: 269834 - DNA, 528 bp, Homo sapiens
ggagttgtgaatagacaatctcctttgatgtctttccccagctgcctacattcttcaataaaaaggctacctcattctgccagtaaacctcttggtggtacctgaccttctgtggtttgatcttttctcagcctgtctttgcaattccctcaaacctagtttccctttcagtgcctagaatgctgatttactttgaaagagcaccatcagctgtggtttttctgtgccgcgagttaaccaataactgagtccaggccagcagtgagtagaccaaccaatgttcccattctactcaccctcagccttccagcaacaccgttccctsagttttgggtgaaaggcataccaagaagcagaaatacaacagcagatccgtcagtttgcagaaaatcgagtaattccaacttatttttgaaggaaaaccttttagcagctcttacaaaaggaaatacagaaaataaaaatcacagggcttcccctcccctcatttttatgtacccctgatcatggaagggtgagatggtcaaa

SEQ ID NO: 269835 - DNA, 574 bp, Homo sapiens
atggtgtcaaaaaaaaatggcctctgcaaatagacggtcatcaggcttgtgatcttaggtcaacctctctaagccccagtttcctcatatgtaaaatggagacattaacagtattgtctatgacatatggttattataacatataaatgagataaatcaagtaaagcattagttcatgtaggcactaaataaagcaaaggacagatctcaaacctgaggagtagacagacattcatgtaacacaacaaagtaataaaaaaaagatgtcacgctatcagactgacctttgtaatgcatacaattatgttttccagatagtccattctgaggacatacctttcaggggctccctgtccctcgcctcctttactctcatgacatgacactttcacagccacctctttacctcacacaytgcattcaggaaaagcactgcatgcaacagaaaatggctgattcccccatgttttgagtctggacacaggacctggcagaaatctgagggatggagaacaaagagatgaaaagcactgatggcataagaaataaggaaggaaggacatctatgaatatg

SEQ ID NO: 269836 - DNA, 563 bp, Homo sapiens
accatccagtcaagaccaggacacaacctcaggcctgggtttgtctccccactaaatttgagtctgtttaaaagtagctgctgggtccctatatatacaaactcccaactagctcaatgtctagaaaatcasagacaaccaacaaaagtttgttgaatgttatggattgaattatggcccctcacataaaagatatgctggagtcccagtccccagtatcctgggatgtgatcttatttagagatagggtcttcccaaaggtaatcaaattaaagtgagctaattggggtagacctcaatccgatatgactagtgtccttatgattaagaggaaatttgaacacatagacagacatacatagaggaataactacgtgaaaagacacagggaaatgatagccatctataagccaaggaggaaggcctggagcagatgcttccctcccagccctcacaaggaaccaatcactttcagcctccaaaactatgagacaacatttctgttgcttaagccacccagattgtaggactttgttacagcagccctagcaaatgaatacatt

SEQ ID NO: 269837 - DNA, 536 bp, Homo sapiens
cccaagtgggatatagaactgtaggtaacaggcagttaataagctaaacaggtagggacagaggctcattaatggttgctctatgatttgtggccggttccctcagcacctaaatcttgaaataaatatattcagagactccgttatccaggaagaggacatggatcatttttctttcattaacaatggagccgctacagcaacatttttatttatatgcacatttcsaagcctaaaagcttgtccctttaaacctgcttgcactaaattttgatcggcccttgatgaaagaagacttatgaatcggagacaacctggtaaccatctgtgcccaatgcatattaaaggaaatgtaaattcgcaaaagactccccagcatatatcagcttctccaccctgggaagacagaggatgattagagaatctgggaccaaatctcccaattcaggagggccatgttaatgaggaactttgccgaagtacacagcaggaagaagccttcaacaaaagaaatttctagataacagatgggccca

SEQ ID NO: 269838 - DNA, 563 bp, Homo sapiens
accatccagtcaagaccaggacacaacctcaggcctgggtttgtctccccactaaatttgagtctgtttaaaagtagctgctgggtccctatatatacaaactcccaactagctcaatgtctagaaaatcacagacaaccaacaaaagtttgttgaatgttatggattgaattatggcccctcacataaaagatatgctggagtcccagtccccagtatcctgggatgtgatcttatttagagatagggtcttcccaaaggtaatcaaattaaagtgagctaattggggtagacctcaatccratatgactagtgtccttatgattaagaggaaatttgaacacatagacagacatacatagaggaataactacgtgaaaagacacagggaaatgatagccatctataagccaaggaggaaggcctggagcagatgcttccctcccagccctcacaaggaaccaatcactttcagcctccaaaactatgagacaacatttctgttgcttaagccacccagattgtaggactttgttacagcagccctagcaaatgaatacatt

SEQ ID NO: 269839 - DNA, 603 bp, Homo sapiens
gaaactggatggagtcacctaacaatacagagaagacaaaaatctgataaataagcccccccaaactccaaaacagtgatcagaaagaagataaggaacccatagagaagcctgaaaagtagttgaggagacagaatgagtatgagaaaattgtcacagcctggaggtcaagtgaagagtgtttcaagaagtaaaaaattgtgtcaaatgatgcagagagttgacgaagaatgagtgctgtaaggtgatcactagattcagcaatgtggaagtcactggtgactttaccagaacaggttcaaatgagtgatgagaacaaagcctgatgaaatgagttaaaaacagactggaagatgagcaagcagaaggasagtatagacaactccattgagtgttttgtcatggaggggagcagtgcaagtgggcagtaggtggagaaagacatgggactgggaattaaagttcttttgtgtttgttcttttaacatgagaaatattaagagtttttgtatacccatgggaatgatccagttgatggggaatattaatgatacagaacacaagatgaacttctggagttaagtaagtaaaaggagatgagct

SEQ ID NO: 269840 - DNA, 593 bp, Homo sapiens
tagccaagggacaggctagaaacagataggcagcagagggaagatggtctggaattatcaatttgctgggcctcatgctcaaacgcataattaacagttgataattgttctgggttgggcagagtcctataatggttagatcaaggcatagtttactgtacttaaatctgggcatttacaattattctccccttaatataaattaggaagttggaagctctctctctcaaacagatttctctctctctcttttttttyttttttaacaactctactaccacctaacttgccctttaaaaatatgctcagattcttccaaggataagagtgagagacaagaggatatgaatccaaaaggtggtttctgctgttttgccacatctgctcaaaattccacagctggcactgcctcctagagattaccagaatgactaatgattcacacagctcccagtcttaaatgtgctcgggaaaatgttcagggatttgaccacagcttttcaacatcaagaatgagaggtgtgagagctcccagacatcagctagttcatctcttgccagatctggatttttcccttctggataagattcta

SEQ ID NO: 269841 - DNA, 327 bp, Homo sapiens
gtatgcctatatcaaaataactcaagtgcctcataaataatacatctactakgtacccataaaatttaaaaatacttatttttaaaaaaacaaaggaacagtttcttgcaaagttaaatcacttttttccctttgcatttagaccaaatatattttgctatgcagaaatgcctaagtaaattatgtgataactgaaaagtagtttaatagaatttacatttgattttttaaaaatccattaagctaaggatttataaagacattttttcttctgctcaatacttgcctgaacaaaacacccacccagccaaaatcaaacaaaaagct

SEQ ID NO: 269842 - DNA, 329 bp, Homo sapiens
cataaacagaaattcagaggagataaatggtaggtctgtgtgggcttcagtgagacaagaccagtgtaactctttcttgcaacagagccctgggccatagaatagcattattcatctttgaatgtggaactagaccctgtttccactccttaattccagctttaattccccttcccctgctcctggtctccatccatgactcattacaataaaaaamagtacaggttgtaagacttcacagatacctaagcaaacagtgaagccaacattctccaaaatgtattctgcgtgtcacttgttatatgagatgcttcttgagaaaaaaaaaa

SEQ ID NO: 269843 - DNA, 585 bp, Homo sapiens
gctgtgtctctgtgggacttaagaacatatagggaatgagagatccaaacacaatgcattgacaatgataggatttcctaggaagccttattaatgggcagggcaccaagagtgccacggaaggggctaggctttcagcaaaatgtgcaggaactatgtttcaggagtgggggagaatctggcaaatgttaaatatatattgaggatcatctgtcctctgctactacaggcagagaagggagaaaatgggctcttaactcttattggggcaaccaatgaaaatggaycagcaactcttttcattcattataattattcagtgtctcctatatgtaagaacaagaggacccctcccctctccttcaagcttggaaagtgggctgggataagtagtagaggcagctgtggagcatactgttctcttgctgtgcgatcttgggcataataacagtgcctcctttacaggatagttgtaaggatttaaaccaggttatgtattgaaagtgcttacaacagtacctagcacacagtacatgctctatgttagtaacagtaacttgttattgctactactgccatccttat

SEQ ID NO: 269844 - DNA, 544 bp, Homo sapiens
gatgctgtaagttctttgacatcttcccatcaagagttgagttctatttccccttttctatactctggacttgcctgagactactttgataatagagtgtaatataaataatggcggggcattctgagccttgccctaaaaaggactggcagcttccactttgatctctaggaactctgagccagtgtgtaagaagtccacataccctggggctattctacagagaggaagcttaaaccrgccacttggaaaggcgaaagagagatagagaagacggtccagccagtcccacctgttccagccctcagtcgttctaactctccaactgtacaagccattttagctcaggccacaaacttcattgagcagaagctagcttattcttactatggattgtcctaattcttgactagtggaatcatgaaatacaatgataataaattgttgtgtcaagccattaagctttttagttgcttgttactgaggaggagataaccaaaacatccacgtttgtgaatgatatattctttgaaaacagagatga

SEQ ID NO: 269845 - DNA, 629 bp, Homo sapiens
tgtctgcagcatatgagtgccagacacacagcaggctctttgttgaatggctatgatccattcagtttatagaagaagaaacggagactcacagaaggagattgtcatgctcaaggttgtccacctattacatggcagtttcctaacttgtgagtaaatgttctttgcactacaagattaaacatggcatgatagcaaattaaaaggaaggatagtgttsaacaaacaaatgatgcatattgagtcaaaagataagatggtactttatgttatttctttgagattacagttgtattttttaaaaaacctatagttacaagtcacacatcaaaaagtgaggccagtgtcaacaggcatatatctgtctgtctatctctccctcagcagatcataagcacaatattttacacgaaaagaattgtctagaaaatccctctacctacatactatataagcatttagggcgtaattattcttttaaaaatattccattatatattttaaaataaaacatacgaacaaattaaaaatgatagacaaagtacaattgctttaggttactttaaccattagaaggaagttattgtggtgatggttgtacaacactatgaatgtactaaatatcactg

SEQ ID NO: 269846 - DNA, 543 bp, Homo sapiens
ggatggctggcatggtgaggatggcagagaagaggtgcaggaagaacccacatttatgatatcacactggatactacaccaaccctgggactgtctactactgtaacttaaaaattgtttaagcatcattggtcaaatgcttccaaaagcatctaatggatattcctagccaggggaaattactcactrctgtggctcccaaagcattcttctaacatctctctcatgacatttattcatattgtgtcagtgtcaccatctttctaaatatgtgcctcatctaaaagactatgaactccctattccctagcatactatccagctgagaggagaaaataaaagtctgttggatgaattaattaatgaattaaatacagaggcataggatgagttctggagtactgttcatatcactgctatcactccatttgatttttttcatgtggttgctattaaagaaaaatatgttccatgttgtagcctgcattggttccaaagtcatctgatattctcctgggatagcagggacaatttaccaaaagg

SEQ ID NO: 269847 - DNA, 612 bp, Homo sapiens
taaatcttcacaatgttaamcttactcataaaaattcagactcagttttatttgttagcagacgctaacaaacaaagccaagtgaaactagctagaagtagcaaagattaacaagtttggtttaaataacgaaataaagctcaatattgaatttgtttcttgcctccccaaatgtgacagtccaattttatatatactcacatgaatagtttattctattggatatgaaaatagtgccaacgatgttatatgggttaacaaaatctgagttctgggcaaccgtgtgacagacaccattggctggcaatctaacagtcatttctccctctcttccttgctaagagaatcccaatttgtccaacctcctttgggtgaccacatccttcagggaggttgggttattccaaaaagtcttgagtattcttatcaaggtagttttattatcttaggcaaattaactgctttaggcttagactcgtgacccaatttttgccaatatgatataaagtacagtctgtttggggacttctagaaatgtcttcccattctaaataaaggaaaaaaaaaactggatgtccccattttctaattggtcaccactgtctgggctgc

SEQ ID NO: 269848 - DNA, 572 bp, Homo sapiens
gcataaggtctggtatgtcacaaatctctaataaagtttctctgaattaaataaggacttcggcagagaggtcgcaaatcttgaagatttgcagaccctcaatttattgggccacattctgggagtgcctgtggaaacctgcagttttggtagtggtctttaacaatgtaccgtctcttcaacacaggatgacccattacattaaaatccttttgatccaaaaatgttattattctgtaaactgaggccccaaatatcaaggaggttatatcaccttgattagcatgaacagcctctaatactatatagtgagattttcacaacaaatgcctctgttgggtcctctctctgactccaaaccttcctcttgcaatccaagtctctctacagaaaagttgcaaaaaaaaacygaaatcaatcatatgatacactcatcacccccacctttattccctgctaagaatatttatgtactttccgaccctgcaaagattttcatcttgagtaatttgctttgaaagtaacaattgtgaaaatggactctattcattctgttgagagtgataagctga

SEQ ID NO: 269849 - DNA, 633 bp, Homo sapiens
tacatacagcagcagttctcaaagtgtggtctacaggtctatggagcaggaatggggaggaatatcttcagattttatcagggagtctggaacaacaaaaccatttttataataacactaaggtattgtttggctttgtcactgtcttggcatttgcattgatggtgcaaaaacaatggcggataaaactgctgacacctcagcctgaatccaggcagtggcacccaactatactagggatcattgtattcttcaccacttagtgcttgtagtgagagagaaagagagagaggtagagaaaagagatggagggagggggaatattcatttgtgctgaatgaaggagtaaaaatgattaatcatattaaatcctgacccttcagtgctaatctttttaatactctctgtgataaaatgggtggtatacataaagtacttctgctgctcactgaagtataacagcygcctcaagaaaaactgtttgtgcaactgtttgagttgtgagctgaactattgacctttttcaaaaggtaccaattttacctgaaataatgactgagataaactatgattattgggacctgggtatttggtaaacattttcttgaaaatgaaagaagagaaactgtcatt

SEQ ID NO: 269850 - DNA, 535 bp, Homo sapiens
taaactgttgatgacagcatggatgaatctcaaaagcaagtgctaagtgaaaaaacaaaaacaacaacaaaaaagtgatgaaatactaggtaattccatttatatgaaattctagcaagggccaaggattagaggaaaagattgactgcaaaggggccaaagggaatattttgaagaaacagaaatattttgtatcctggctgtaaaagtcatagttacrggattctatatatttatcaaaactcattgtcttgtacacataaaattggtcaattttaatgtgtgtaaatcatacctcaagaaagcctgatatgagccaagcacagtggctcatgcctgtaatcccagcactttgggaggccaaggtgggagaatcacttgagcccaggagtttgagaccagcctagacaccatagtgagacctcatctctacaaataacaataataataataataaaaattagccaggcatggtggcacatgcctgtagtcctcaggaggctaaggtggaaggattgcctgagtctgggggtta

SEQ ID NO: 269851 - DNA, 615 bp, Homo sapiens
catactgggttatttggggtaagtaaatctgcctctctgggactcagcttccccatgtgtcaaatgagaatgaactggatatttccactgtttcttccacttcaaacattctgaaatcccaaatatattttgagtacattaaagattcattttctaaaatctatatatcttctctataaacttgaaattccatcttgagggagtcatttctttgtattttagcttttaaatcatcagtagttctctttccaaatgagaataacccaaaggtaatatggcaaatcagtggggtgttgagaattcaacacgacttaattatattaacgatctctcacttggtgtctgggggagtagaaatgtgtcatgtgaaaagtgacgattgaaaagagggaatacttaataatggtaataataacaaaaamcacttacatagcacttaccatgtacttttatgtggattaaatcacataatcctccccacaaccttgtaaaattggtactactgtattataatcacttcacagatgagaatgctgaggtatagatatataattacttccttaagggcacacaactcattagtggcaaagccagaatttgaacccaggaagtccg

SEQ ID NO: 269852 - DNA, 594 bp, Homo sapiens
tcttgcaagggttaagcactcaataaatgtgagatactattattattgtcattattrtaacagataaaagttggcagatattggtggatgtattcattgtcaaatctccctttattagtctttatattattaaataattgggaaaataaattcattttattttatatgcaccataacttgttcaaattttatttcttaatattgataatgatttatcataaaatttatagtttatggagtaccttcacatgcatttcttcctccaagccccacaaggatgatgcagctgaggctctgggaaattggttatttcatccagggtgcctgattggcgagtggttaagacttgaacccatgtcttcacaccccagatgcattactgtagctgttacactgagtggaggttgtaaacatacacaggcttcgttgttgttagaatcttgatttgattgtatcgctaccacttactataggtcattttgtgagcaactgcctaatttcatggaatatcagattttatatcagtaaaaattagaggacaatgacttctctctacttgctatataaattaaaaaatatatatatcagatcaca

SEQ ID NO: 269853 - DNA, 565 bp, Homo sapiens
gttactcaattattcactcgtttagctgtctctccctcaactrtagtgcaggttccatgacagcaaggatgatgttcatttcttgctgttaccattcctggtgttcagaaggcactcaagaatctttgctgaatgaatgagtaatacatcttagaatgctagtttccatgaaagggctacaaccagtctgcaggatcttcaggtcaggaactgggccttgtgctggtttccatgatactgctctatacgtgctcaggaaatatctgttgaattggattcaaccaaaacatttgaatttctgttcagtgagaagtgttccctatgtaagaagaaatttaaagctatgtttgataacactcttctgagagaaagcctgctttttagttgaccagccatcccagtttgccttggactgagggatcttctggggacatgagactaatgggtcaccctacatgccttccccagctttagagccagaaatacctaacggatcagttaggaattatatttaggtgctagtaacaaaagccagaaataacagtatttaaaccacaagagttta

SEQ ID NO: 269854 - DNA, 565 bp, Homo sapiens
gttactcaattattcactcgtttagctgtctctccctcaactatagtgcagkttccatgacagcaaggatgatgttcatttcttgctgttaccattcctggtgttcagaaggcactcaagaatctttgctgaatgaatgagtaatacatcttagaatgctagtttccatgaaagggctacaaccagtctgcaggatcttcaggtcaggaactgggccttgtgctggtttccatgatactgctctatacgtgctcaggaaatatctgttgaattggattcaaccaaaacatttgaatttctgttcagtgagaagtgttccctatgtaagaagaaatttaaagctatgtttgataacactcttctgagagaaagcctgctttttagttgaccagccatcccagtttgccttggactgagggatcttctggggacatgagactaatgggtcaccctacatgccttccccagctttagagccagaaatacctaacggatcagttaggaattatatttaggtgctagtaacaaaagccagaaataacagtatttaaaccacaagagttta

SEQ ID NO: 269855 - DNA, 563 bp, Homo sapiens
agcctataactctaacatttatgatctaacatttatgaactttgtggtctcttaatacctcagtatcttttgtgtctctatgtctttgtacttccttttccctaaatctgggaaacttctctctggtcttctgcatggttggctccagtctatttttcaggatacaacgcaagcattgctgcctctctgtataccaagccccatctttaggactgagttagggattctagtctgctccttatgcttacttgtcaccctgtgttataactgctggcagccttgtccttcctcctgatgtgagctcaatgataatgctacattgattgattaaatcacacattgaagatataatagacatgcaaaaaaaattgttgagtgagtgagtgaaacmaaatagtgtttgattacttttgtgtagagaattatagattttaaaaataatattttgaatagcattttaaattttaattaataagtaagtttcatggtacttagttttctcttatatgtaccttttcagccatactctttctaggaatcttgcgtacttgtcagtgagcatg

SEQ ID NO: 269856 - DNA, 591 bp, Homo sapiens
gtgctgctactccacaagctatgagggaccccaacagatgaagacatcaaaagaattgttctaagtgcatcacagctggctacttggaattatgatttatgttcagctgtagcccagtttgaagaatttgaaaccaaggggggaaaagtctatctgttcattttgcgagctccagtcttgttacatgcagtgtttcagcacttctcaggtgagcagcggaaagtgtagttcatctagcagagctgtgcttttagagacccccctcatgttgcccctgcatgatgtatgagtacctgtgcttctcaaggaacccacatttgctgagtgcatttctatttcactgtctctttctaataattttagatsaggtcaacctatttggcctctggctacatgagaacagtgaatacagaatgcaaaatgattaacagatacagtgaaaggcctagataacttgttttcttagagaccctacactgagttgtggaaggacatcagtcttcctttcacacctgcttagttttgctcatggtgtggctatggcccttgctgtttctctgccttttaaatccttaccatcctttaaaggcc

SEQ ID NO: 269857 - DNA, 543 bp, Homo sapiens
cttaggatgtaagttctctcctgatggtctcttgaagcaagcagggacatctggcttctctggctttcactgtcatctgtctgcatttccatgcagcctgttttatgtttttacttgcatttccatctggatagggtattgccctttatgcttttcttaggcatgcttgatgttgaatattaaaatcctatttctctcttcgtacccctcatgcattattagccacttatttctacctttaaattgctgcacatggcagaacatttcttgatgcttttttagaaaagccttttatggtaattatagctttcttcaagtgcatttatttttccctttttaccgtgctgtagacattactttgttcatgcctratttttgttaaggcaaaaagcctgcctagctggtaactgtgtggacagacttttttttttctagtggttggaattttatgtgtagaaccttggaaactctctcatttccactctgccaaaggcatcggattcagccagagttattcgttcatcatttcccccaactacttat

SEQ ID NO: 269858 - DNA, 479 bp, Homo sapiens
gccttttgggatgaactgctagagcattcaaggtggggcgggagagggaaccaccccagtgcatccaggatctcttgaggagaccagcatttatttgaaatcttgagatgaagcagcaataactctggctactctgaggtttctcagctttctttttttttttttaactaattaaatttttggtagagatagggtcttcctatgttacacaggctggtcttgaacacctggcctcaggcaatcctcttgcctcaatctcccaaagcactgggattataggcgtgagccaccccatccagctcagctttctaagtctgsttctgagagtaaattaaaattggaggtatgatgatatcacatttacagtgctgttttttgttgttgttcatagaagcaaatatagtggcccaaagtatgtgctaattctctctggctgagtttcagaaaggaccttaacccaataaaacctaaagggatgc

SEQ ID NO: 269859 - DNA, 384 bp, Homo sapiens
aaagccagcggatccaccaaggatatattgtggctggagcatctgattgtaaacatctgtctataagcattcctagggtgaattcctctttctttagtccatcatgccaaacttgggagtttgggctgggtagctacatactagcataggatccttagggttcagcttgttctaccttaagcaggagagaggaattttkttttgaaggctatgaaggcaggttgtgaaagtgaaagagtagctgaccaatggtttttgctatggcttgaatgtctatccctccccagaattcgtatgttgagatcctaaccaaggtgatggtattaggcagtaaagcccttgggaagtgattaggttatgagtggggttggtgtccctataaaa

SEQ ID NO: 269860 - DNA, 679 bp, Homo sapiens
tgcaaagctcactccacactttcatcccaagggcctctagaagtttccaagagtgtcttgcatgctcatatttaacccaatctgattttacaagcttagtcccttcattgaaacctgctgcctgagaaatacacttacagggactcctacagcactgcccctactgccaggatccatgccaaggttgtgttcccccgtgccagcagcaccattggtgctcacgctactgaagtcctgctgtgtttacacagtaaaggagagaacaccacactccccagctttatcaaygggtccaaagttcctttgagaagacaaaccttcactttttgccaatagtggctctcccatacatcaaggttttgtcccagcgctgagctgtcgaacagacaccacagagtcctttttgtatcctcacctctcctcacccttagacaggctctcaacccagggtagtggaggatgcttacaagttctttaagctcagccagtctctgaatcccagtttatactcagtcaggacccctaccatttagataagcggctcttaaagaaaatccttttctcttcatttaggttaagggttgccttcattttgagccagctcaactgcaaatgcaagagcccctgtgatctccctccttcataataatcgcatcccagttggaatggagaggggact

SEQ ID NO: 269861 - DNA, 522 bp, Homo sapiens
ctgcttggacatctctaagtaggaaaactttgagcttttaaggtggaattactggcaaaggctagaagtgagagaaaccagttctcttcccatttccccttggtaggaggtggttgggcaggcctttcctctgtgaggggactgggcctccatttggwtaatgagggcactatgaattaagtatctgtgttgattcagggaaggggagggagggaagagcctctagaaagagttgtaaactcaaattcccatacatggggtaggcgagaatgacgtaaagtgggtgcattcaacagggtgtaagaggccagggaggggtgacaaactggaaagtgaatgtcccacctatggagggcagacatgacccagctccagctgaacatggccatgtagaaatgcaagcctagtcttccccaaatttccaatttttcagtagaggccagatatttggattgttatgtatggtctcccaattttcaaatgctggcaagcaactaaaaatgtattaaaatgttgtgcagg

SEQ ID NO: 269862 - DNA, 556 bp, Homo sapiens
tccatgtcttctatattcacttacacgtatgccagttgacagtattttaacrttcaactttccctactgttagctatgtcagtaaataggtactttccctccatttagaggcctgttttggacccgtttattggctatgatgaggactctatggattcagagacatcatccatggcctcatttagaacagacagaacaccagctactcctgatgatgacttggatgaagtaagcttttctacttctctagcctagggtgatattgtcaccaaatctttgatttaagggggaagaaaaaggatttcacttttcatctcctttatataaacagcacaaagtgatctcataatagtaaacaattttgaggctgcactttattatctcttgaaaaatagcttcacttatagcaggtaaaccttttagaaatttctctccagttcaactctctaatttgaagacttctttcaaaataaaagttactttccaatattctttatctagggaaggtaggaacccaagaggccttagcaggcttttggatgtggtctgacactgt

SEQ ID NO: 269863 - DNA, 631 bp, Homo sapiens
aaacatgttacttcaatacttatatttcaaaatgtgctatataaaaaatattttttaggtaaatgtgaatttataagtaaacgttttagtccctaatgcatttatgaaaaaaaagactaagaagcaaggtaacttgtcttagaaaataccttgattaatctgaccaaatttcaggtgtttgttttttattttgcaagtaaaacatggaaacatcagattttgattgtatcctgcagaatctgacttaggatctggttcagtgtatgttgatatataaagtataagaaaaattcccatttgatttctgttattttgccagttagttcttctttaggctattttgaattaggtctggataaaaagttaggtgttagtaggcttcagtgaagaagagtcattcttttgtagcccacatatctttctcataatgcttgaatagattgartatgcaaaaggctgttagcggccataaaacttcatggcaagaccacgctgagatatttgaaagctctaaatattcatacagtttaaactggagctccacttcctgcatttccctgatcaaaaaatttggaagaatggatgacaccatctataaattcttcttctcaatctcttagttgactagtca

SEQ ID NO: 269864 - DNA, 535 bp, Homo sapiens
aactatagctatgaaataaaaagacacttaaccaggtgttttttaaaaaggacattttgttgacaactggagaaatttaatgtggactgggtatcagatgacaaaagtaattaatgttaattttgtaaagtgtaccaataaccttgtgggttttttttttttttttttttttttttacaraaaggctttatctgttagagatacacattgaagtatttacatgtgaaataaaatgaaagctggaattttttcttttaaaaaaacttacttcctacacagtttaattacagacctaatcactttctctgatccctccccagcaaatgcctcattatctctaacagaaggtccaaatttagaatttggcatacagaccctctgggatttgagtcttatctacctatttctctagtgtctcctctcccttctctccctccattctctctctctttctctctccattctccactcttggtcctttacactgatctttttacctggaagatagtcccatcttgcctttctacctctgcct

SEQ ID NO: 269865 - DNA, 535 bp, Homo sapiens
aactatagctatgaaataaaaagacacttaaccaggtgttttttaaaaaggacattttgttgacaactggagaaatttaatgtggactgggtatcagatgacaaaagtaattaatgttaattttgtaaagtgtaccaataaccttgtgggttttttttttttttttttttttttttacagaaaggctttatctgttagagatacacattgaagtatttacatgtgaaataaaatgaaagctggaattttttcttttaaaaaaacttacttcctacacagtttaattacagacctaatcactttctctgatccctccccagcaaatgcctcattatctctaacagaaggtccaaatttaraatttggcatacagaccctctgggatttgagtcttatctacctatttctctagtgtctcctctcccttctctccctccattctctctctctttctctctccattctccactcttggtcctttacactgatctttttacctggaagatagtcccatcttgcctttctacctctgcct

SEQ ID NO: 269866 - DNA, 520 bp, Homo sapiens
ctatctatgttggttgaaagcatattggctgaaaggccagtgctcccaatgatcaaagagaagcaaattcaaaacctctttggagaaacacccttttaacacagacctcaaaacatttccccagataaagttctcaagtagaaaagttcatggagtggagggaaacagaaataaaatcagaccattagagattcaaatattgaaattattagtcatagagtacaaactatactaaaaatagttaaaaatatgaaaaatattaaaaataaaataagggatataaacaaagaactagtggctataaaaataaatcaaacctttaggatggagaaaaataattatrattgaaaattaaatggatggtaaacattaggttagatacagataaagagacatttagtgaactagcaaatagatctaaagaaattattcaatagtaggaacaaaaagacagatatttaaaatatatatacacggttaagataaatggaaatcagagtgagaaaggctaatatatgtc

SEQ ID NO: 269867 - DNA, 520 bp, Homo sapiens
ctatctatgttggttgaaagcatattggctgaaaggccagtgctcccaatgatcaaagagaagcaaattcaaaacctctttggagaaacacccttttaacacagacctcaaaacatttccccagataaagttctcaagtagaaaagttcatggagtggagggaaacagaaataaaatcagaccattagagattcaaatattgaaattattagtcatagagtacaaactatactaaaaatagttaaaaatatgaaaaatattaaaaataaaataagggatataaacaaagaactagtggctataaaaataaatcaaacctttaggatggagaaaaataattataattgaaaattaaatggatggtaaacrttaggttagatacagataaagagacatttagtgaactagcaaatagatctaaagaaattattcaatagtaggaacaaaaagacagatatttaaaatatatatacacggttaagataaatggaaatcagagtgagaaaggctaatatatgtc

SEQ ID NO: 269868 - DNA, 614 bp, Homo sapiens
tgagactgggtaatttataaaggaaagagctttaattgactcacagtttggcatggcttcagaggcctcaggaaacttacaatcatggcagaaggcaaaagggaagcaaggaaccttcttcacatggcagcaggagagaatgcaggaggaactgccaaacacttttaaagcatcagatcttgtgagaacttaccgtcatgagaacagcatgatccaatcacccaccactaggtccctcactcaacacatggggattaaaattcaagatgagaattgggtggcaacatagagccaaaacatctcataggatagtaataagagatttaaaaggattttattttttaaggagtactacggttaaaagtcagctcaatkaaaagcagatattcaagctataggtatattttaaaggcctttatgttttattctcttcttggattgtgtttttctggaaaaaaggtttttttcttttcttctcagtagacttaattgtttttctccattttgtcttcttgctactcttgatgcacacatgagaggacctaagataatacaacctgggactccttgggaaaaacagaagaggggccacagactgcgttttgggaaaaacg

SEQ ID NO: 269869 - DNA, 472 bp, Homo sapiens
tctttgggaaataaagacaattataagattattggtaaaatttggagatttgacctaaattaggcaggtcagatatttggtttgctaaatgctttaaggtcataaactgcttctctgacttttgaaaattgttcrgcttacctgctttagagccattagatcctagatacggtatggggacatgtggaattagccattccccctagcaatgctggaaagtgtcagaccttatctgcacttctgtctggtgtcctaggtgccacacctggtacataattagaatcacttgcttaccaagtttttcaccaaaaataaaagtggctaagagttaacattgtaacatgtaattgagactactgaagaaacagttttacatgcaaggtgtgtaagggagaagggaaggaagaggagagaaggcaggaaagagggaagggagggaggaatttctctctcacatagtgttaggatgtcc

SEQ ID NO: 269870 - DNA, 579 bp, Homo sapiens
ctgcagctgggctacatcaattcccacatctcctctcctaagagagccaattaatatttttaaattggtatcagaatagccaggctagaacctagctcttgtcctggtgtcaaatgtgatcactctcattcaacctcagatttaatgttgacttgtctgctggaaatcwctactgcctacactgggaagattccaagtttttttagaaaaaacccctttaatgatccattttggctagagaggataaagttgattttccagggagatgtcagcagcttgcgctctttttgggtgtctctcatcttgtctttgtggttaattgtggagtcacagtcatatcatgggcagctaaaataggaacaggactccttgatgggctgtctacaccacaagcagtcattaccccgggtcaggacttcctgagaaataaagagggtatacaggaaaatgaacaaggcaacaagattcctacagatcctataattgtctagtgaaattgataggctatgcttgtcaaagctgctgtttggcattctcccttcctgtctctccctccctcctggtgactggcaatgtcca

SEQ ID NO: 269871 - DNA, 590 bp, Homo sapiens
gataataaaagcacatgcaagcgagccaatttgttttatatgtaaccatttcagatgcaggatcagaaggattttctcccttcattctcaaatttctgctaggcatgagtatttatgatcaagctagactcaaaacaaactaacaatgcgttaaatattaacacccaggactcttatggaatgattttttttgtactaagtttggcagtttagggacagttgccaatgatccaactaaattaaagtgctgttgaatacacgcttaaataaagaaaagcctatttagtagttgagaggctaaaaaagaaaagaaaawtggcaccaattgcccggcttccttccacaactacctctaaggtagaagactctcaaggatccagacttccttttcatagactccagatagatgaggtttatgatggacactggattaatggcttctgttagtctgcagcttggctatatcagttcccacatatcctgtctcgagagagccagatgaataggattcctccttagggcattattgaatggcaatggcacttctccaatagtagcatccctagcatgggcatcaggcccagatattt

SEQ ID NO: 269872 - DNA, 590 bp, Homo sapiens
gataataaaagcacatgcaagcgagccaatttgttttatatgtaaccatttcagatgcaggatcagaaggattttctcccttcattctcaaatttctgctaggcatgagtatttatgatcaagctagactcaaaacaaactaacaatgcgttaaatattaacacccaggactcttatggaatgattttttttgtactaagtttggcagtttagggacagttgccaatgatccaactaaattaaagtgctgttgaatacacgcttaaataaagaaaagcctatttagtagttgagaggctaaaaaagaaaagaaaattggcaccaattgcccggcttccttccacaactacctctaaggtagaagactctcaaggayccagacttccttttcatagactccagatagatgaggtttatgatggacactggattaatggcttctgttagtctgcagcttggctatatcagttcccacatatcctgtctcgagagagccagatgaataggattcctccttagggcattattgaatggcaatggcacttctccaatagtagcatccctagcatgggcatcaggcccagatattt

SEQ ID NO: 269873 - DNA, 601 bp, Homo sapiens
caggtatttcttcatagcagcatgagaatggactaatatagcttcctagagttgctcaaagtggaaagtggttgtacaaaaataatctggattttcactggtactctgtgggccatagaaaaatgccacctcctcagctctgaaaggctcttcacagtctggcttgaacctcatttatcacaatctacgttatctaagatttggccatataagatctattcactgcctaccttttcctgtaatttgtctatgctcttctatcccccaggcctttgctcatgctatgatctaatcaataaaagagaaaatatacacccatctattattacatacagtaggaaaaacactaaagcatatcacatttgaaatgtagggtaaagaaaatttaaagaaaataacggcagttaaagttctgatttggtaggttgaaagaattgctgctggcttgagtakgtgttgacatgagcacagttgtgttcaagtaagtcaagatgggttacagtaagaaaatgtgtacaattgttaaataagacagaatcaggctctagcctgggtggaaatggtgaagaacagatgtagagagaattccagggcaagaaaa

SEQ ID NO: 269874 - DNA, 576 bp, Homo sapiens
tcacctatgtgatgacctcaaaaggcagagagacccaactttaagaaaagccaatgtatagagacaggattacatgtaatagctaaactgtgagaagtggggaataactataaatgaatcaccggattaactgagtcactcatatattcattcattcattcaatcagtcaatattgttagagctctttccatatgctgtgctaggtatagaatttggaaatagaaaaataagtcagccttccaatgggaaaaaatttatctatctatctatctatctatcaacgatctatctatctacrtcaccatccataatctgataagagttttttaaaaaataggcatgaattgtttcagaagtataaacagtaaactgtctttccacctgggttgaataagaaaggctcgctgaagaagacaccgttggcttggaacttgaggagtgggtaagatgataacagatggagaaacaggtgaagcatcctgggcaaagaaaaaagcaggtgccgagacacaacagagagaaatcacagtgactatttgtgggaagaaatagggcctgattaattacacccctaa

SEQ ID NO: 269875 - DNA, 581 bp, Homo sapiens
gccttacttactgcaatgaatgaacccaatctccctccacccagaccctcagcaggaccatttctctcttggcccactttccaccaattctgccccccatgctcactgcccttagtgggacaggccctgtggggaccctttggatggcacactttctgtggtgcctgcccaggccctgcaggaccctggggcacttgggcatatgtgtgtgggctgtggaaggtgggatttsagtcagctgtcacaatgccactggggctacaatcacccatgcaggaacccagccctggtcacttttcatcccttctgtctctgtggagcactgcctgtgttcacgtgccaatccctattctggcatgtcaggactgggttcagcaacctccagggctcccacccctggcgaccagcccatagcatggaggcctgctctcgaataccacacgcgtgttgcagatgggggcacacgtgctgcctctcgtgtctgctttggccctggggagtggggagtttggcaggaacagtccccctcctgcaatcatcggctcattctctcagcgccacagaggcacggctggctcctc

SEQ ID NO: 269876 - DNA, 554 bp, Homo sapiens
aaaattacttatcaacagttgatttcacagatgggtaagctgaggcctaaaagcttctcattgtttctgaatgaaactgaccccagctttttaactgttttgggaattaggagccctcagagaatctcaagtaagctgtgggtactctcccccttccaaaatgcacactcactgcaacacgcagaatgctgctattttccacaggtcctcctactccaagcccaactatggacctcaaggtcggaccccctctaacctgagagtactgggtattggaaaaagcaatgrctatgaatcagcagtcctgggttcaaagtcttggccccagtttcttcagctttggaataggagggggtggacttcaaaagtaagacattatgggctatacaaggttctgatgcagccacatgtggcccaaactctagcccagtgcgtggtgctgcctctgtggccaaccccagctctttctcttcccccaggcattctaacctctctattctgggttccacgtcctgggtgatcaaatcagccagcttgggctatgtgttactgac

SEQ ID NO: 269877 - DNA, 661 bp, Homo sapiens
tcttctctggctcagtgttgctgggagctcagcactttcttccagttaccgacctcccgccagtgtcttgcaggtcaaagaggatcagcagagggggtggctggggttagggtgagggtctctgaaggaccaggagccccacgtgstatacagtcagtatgaaaagtccaagcttgtggaaggctgggaactagagacagggtgggcaggaatgccagcagaggtgttgcctcatggccagatgcctggattggccttgccattgctgtgtgactagcagcagtctggtgccctctctgtgcattgggtgttgagtaaccaagggagatgtcccaatccctgagatacaacagggacagggggtgacgggttaagattgccccagtgggagagagggtcaggcaccaaggtggtccctggatgctggggatctcgggttagttcaccacactctcgaggcacattcacacacacacttgcacgttgaccaaaagagacagatgtgtatgggagggtggaagggccatggctcctgttttggaaggtgactaagcactcctgggacagtgcagaccctgggctatgccagacagtcactgtccaaaccgcctctctttggcaacttgttgagtccttgacctcttggaaggaaggtggcccg

SEQ ID NO: 269878 - DNA, 661 bp, Homo sapiens
tcttctctggctcagtgttgctgggagctcagcactttcttccagttaccgacctcccgccagtgtcttgcaggtcaaagaggatcagcagagggggtggctggggttagggtgagggtctctgaaggaccaggagccccacgtgctatacagtcagtatgaaaagtccaagcttgtggaaggctgggaactagagacagggtgggcaggaatgccagcagaggtgttgcctcatggccagatgcctggattggccttgccattgctgtgtgactagcagcagtctggtgccctctctgtgcattgggtgttgagtaaccaagggagatgtcccaatccctgagatacaacagggacagggggtgacgggttaagattgccccagtgggagagagggtcaggcaccaaggtggtccctggatgctggggatctcgggttagttcaccacactctcgaggcacattcacacacacayttgcacgttgaccaaaagagacagatgtgtatgggagggtggaagggccatggctcctgttttggaaggtgactaagcactcctgggacagtgcagaccctgggctatgccagacagtcactgtccaaaccgcctctctttggcaacttgttgagtccttgacctcttggaaggaaggtggcccg

SEQ ID NO: 269879 - DNA, 661 bp, Homo sapiens
tcttctctggctcagtgttgctgggagctcagcactttcttccagttaccgacctcccgccagtgtcttgcaggtcaaagaggatcagcagagggggtggctggggttagggtgagggtctctgaaggaccaggagccccacgtgctatacagtcagtatgaaaagtccaagcttgtggaaggctgggaactagagacagggtgggcaggaatgccagcagaggtgttgcctcatggccagatgcctggattggccttgccattgctgtgtgactagcagcagtctggtgccctctctgtgcattgggtgttgagtaaccaagggagatgtcccaatccctgagatacaacagggacagggggtgacgggttaagattgccccagtgggagagagggtcaggcaccaaggtggtccctggatgctggggatctcgggttagttcaccacactctcgaggcacattcacacacacacttgyacgttgaccaaaagagacagatgtgtatgggagggtggaagggccatggctcctgttttggaaggtgactaagcactcctgggacagtgcagaccctgggctatgccagacagtcactgtccaaaccgcctctctttggcaacttgttgagtccttgacctcttggaaggaaggtggcccg

SEQ ID NO: 269880 - DNA, 529 bp, Homo sapiens
acatatagaaaaaaatgcatacttcaggggcagtaacttctatcttaaaccatgtgtttgaccattttacctgagtagtcacracagcccagctaattcgagcttgctgagtgaggttctgtagctcaccagcttttcaggtggctcctttttgtatttctatgcctttgtgggttgtctttctctgagttcagaagccctgaattgatatatatgtagctatagatatagatataatttcttatatttcaataggccacagggaaaatggacgaaaaccagttcgtggctgtgacaagcacaaacgctgccaagatcttcaacctgtatccccgcaagggaagaatatctgtgggttctgacagcgacctcgtcatctgggatccagatgctgtgaagatcgtctctgccaagaaccaccagtctgtaaggcccgctctggtgggagtggagtagaatggagaatgcatgcaaggaacttggtcaggagaaatgtgtttatgtggtgtgccagggtagttagactagg

SEQ ID NO: 269881 - DNA, 590 bp, Homo sapiens
agccaataacctggtgacagtctattcaatgaatagccccaaattgagaagtaagtagtatcttcaaaatggatgctakgtgaagaagattccgggaagctggcaaaacaggaagcaccaggaatctgtctcccctcctagacagcgattgcactggcagaatctgtctaatgtcactattttagaactctggagtctattgaaagcttgcaactttcagggaaggcttgggtggcaaagcgcagttaattatgaccaacttaagctcttagcacagcagcagctacccatccctcatcctccagccccatgggagggagctgagcacacacatgttccggagcagtttgcacacagcctgtgagagtcagggtggaaagcaagaactgtgttctccaaattctgaggatctgtgcttccgacactgctgcttctgatcacagaggtgcaaacaaaatgcttgatggccattgttgttgcacctcccccacaatgttgccagccactctccctcaggctgaagtgacttctgggagaattaaagggccagcaccttttcaccctcttcatttttctcctttcctcctttt

SEQ ID NO: 269882 - DNA, 590 bp, Homo sapiens
agccaataacctggtgacagtctattcaatgaatagccccaaattgagaagtaagtagtatcttcaaaatggatgctatgtgaagaagattccgggaagctggcaaaacaggaagcaccaggaatctgtctcccctcctagacagcgattgcactggcagaatctgtctaatgtcactattttagaactctggagtctattgaaagcttgcaactttcagggaaggcttgggtggcaaagcgcagttaattatgaccaacttaagctcttagcacagcagcagctacccatccctcatcctccagccccatgggagggagctgagcacacacatgttccggagcagtttgcacacagcctgtgagagtcagggtggaaagcaagaactgtgttctccaaattctgaggatctgtgcttccgacactgctgcttctgatcacagaggtgcaaacaaaatgcttgatggccattgttgttgcacctcccccacaatgttgccagccactctccctcaggctgaagtgacttctgggagaattaaagggccagcaccttttcrccctcttcatttttctcctttcctcctttt

SEQ ID NO: 269883 - DNA, 600 bp, Homo sapiens
ctctatctggcagaactgttcttgaaaagtgagagagaaactaagatgtttccagataaaagtggagggagtttattaccactagaacttccctgtaagaaatgctcaaaggagtcctgcaaggtgaaatgaaaggacacgagacagtaacttgaaactatacggagaaataaagctctcggtacgtgtaaatacatyggacaatcacgaaagccaagattattgtaataataatttgtaactccttatatttgtataagaggctaatacatatttaaaaaacaacaattaatctaaaagctagtattattgtaaatgtagcttggaggttctacctggattttgtgaatagcctaaaaatatctctctatactgaatcctgatagaatgttcccctcaacaatggtactggagttgattaagtatctttctcttttagtcagcagagccttctttatttgtgactttcttgcagacatgcaaagcatttgctttgacactgcactgtccagctttcaacatctattgatgactttttcatcaaaatgagaaaatttagcctcaaaaaaagatgattaccagtcccaggacagaattaga

SEQ ID NO: 269884 - DNA, 622 bp, Homo sapiens
gagacggcatctgaaatattggaaggggttagagcaggtggaaatctcagaaggagaacaagaggacttagggaatttgcctcaattgtcagacagactgggtggcatggcagtctgttgattctatactttaaagatgttgagcagagcaagataaagtggaggatattctggggggaaagaaacaatagaggcatctgacatgagcataaaaagagccaaggaaaagaaaggctaggagtcaggaagtgcaatggaaagtaaagcatcacaacagctaacattctgtggagcactttacatgcactaatttactcagaacaagcctatgaacttggtacacataccaactccatctataaatgaggaaactgagacacscgaaaaatgcaaaactttagttatgttcttctagtttatcacatcctagattctataacagtgtatctcaatcatggttgcacacatagaatcacctgaagtaagtttttaaaatactgaaacccaggatataaaatgaatgtgcaaagattgctagcattcctatacaccaacaacaggcaagcagagagacaaatcatgaatgaactcccattcacaactgctacaaaacaataaaaca

SEQ ID NO: 269885 - DNA, 622 bp, Homo sapiens
gagacggcatctgaaatattggaaggggttagagcaggtggaaatctcagaaggagaacaagaggacttagggaatttgcctcaattgtcagacagactgggtggcatggcagtctgttgattctatactttaaagatgttgagcagagcaagataaagtggaggatattctggggggaaagaaacaatagaggcatctgacatgagcataaaaagagccaaggaaaagaaaggctaggagtcaggaagtgcaatggaaagtaaagcatcacaacagctaacattctgtggagcactttacatgcactaatttactcagaacaagcctatgaacttggtacacataccaactccatctataaatgaggaaactgagacaccsgaaaaatgcaaaactttagttatgttcttctagtttatcacatcctagattctataacagtgtatctcaatcatggttgcacacatagaatcacctgaagtaagtttttaaaatactgaaacccaggatataaaatgaatgtgcaaagattgctagcattcctatacaccaacaacaggcaagcagagagacaaatcatgaatgaactcccattcacaactgctacaaaacaataaaaca

SEQ ID NO: 269886 - DNA, 364 bp, Homo sapiens
tgagggctgaaaagttaccgatggatacaattttcattatttgggtaatgggcaaaccttaccattatacaatatactagtgcacaacgtagtaggactgcacatgtacctcttgaatctaaaataaaatttaagaaaagaaaaaatattytaataagaaaaaataaaatgaaataaaattcttcctttccccatgtcttttacaatatcccacttatatggctcttatggcccctgcaccccatctactgaataatgtggcccaagtaatgttacttctgatgcctcaactgcctccatcccaggctgcactcctctttcttagagaatttatatgaaaggctctcctgattttgcacacccc

SEQ ID NO: 269887 - DNA, 618 bp, Homo sapiens
aggcatatgttgatgaaagagggacttcacagcaaaaggagtctgaaaatacaggagtcgatttctctgggttttccaaggtctttcttatttgtttctcatttgcctagagaaagtgggagaaaaggcaaagttgagcattgatttgaggagggagtaaccagggagcagttcgcctctcctattaacatccatcacaggccaggtgcggtggctcacgcctgtaatcccagcactttgggaggctgaggcaggtggatcacctgaggtcgggagttcgagaccagcctgaccaacatggagaaaccctgtctctactaaaaatacaaaatcagctgggcatggtggcacatgtctgtaatcccagctactcaggaggcggaggttgccgtgagctgagatcgcgccactgcactccagcctgggcaacaagagcaaacctccgtctcaaaaaacaaaagacaaacaaacaaacamatatatccatcacaagaggtaatgacatattcaaatttcctgtctccttctgattagatgcactgatttcatcaaaggatgaaaacatttacaccttagagactcattcctactactgtaaacattttgccgtttttcaaa

SEQ ID NO: 269888 - DNA, 618 bp, Homo sapiens
aggcatatgttgatgaaagagggacttcacagcaaaaggagtctgaaaatacaggagtcgatttctctgggttttccaaggtctttcttatttgtttctcatttgcctagagaaagtgggagaaaaggcaaagttgagcattgatttgaggagggagtaaccagggagcagttcgcctctcctattaacatccatcacaggccaggtgcggtggctcacgcctgtaatcccagcactttgggaggctgaggcaggtggatcacctgaggtcgggagttcgagaccagcctgaccaacatggagaaaccctgtctctactaaaaatacaaaatcagctgggcatggtggcacatgtctgtaatcccagctactcaggaggcggaggttgccgtgagctgagatcgcgccactgcactccagcctgggcaacaagagcaaacctccgtctcaaaaaacaaaagacaaacaaacaaacacawatatccatcacaagaggtaatgacatattcaaatttcctgtctccttctgattagatgcactgatttcatcaaaggatgaaaacatttacaccttagagactcattcctactactgtaaacattttgccgtttttcaaa

SEQ ID NO: 269889 - DNA, 629 bp, Homo sapiens
tgagttacatttataatcataaagaatgttatttttaaatatgtgtccaggatgttgttttagatagaaatttatttactgagcatggtaaaaattgccaatggaaaattattgacccaagcttttatctcgctactcgattaggcagatatattatctaaagtgaaaaacaaaaataaaataaaatcaggcctctcattagagtcaaattgtcacctcgtgcaaagtatttcagcagctggacagctgagtgggaaaatgmtcattatggcgagagtgtgaaatgagggcttacaaatgtcctcgaagtaaatcctttccacgaaaggattagttaataggacatgacataatcaccttcctggtggggagttgttggggtttccttcccaattttacacactgagcatctctctttgattttaacattctcaaatgttcgaaagccagttccaaaaacagaattttctttggccctaagtgggaagaagataaattttaaagtagctgcagaccgatacaataatagagatattcatttcaaatgctctaatcctctagtttccttgatgcaggctcacaggtacaatttaatctcctaaatgaaaatctctaagtaagggccagat

SEQ ID NO: 269890 - DNA, 400 bp, Homo sapiens
acaggaggggtttttttttcttttggttgttgttcttttcaaatttagttttatttttttccaactgaagaaaaaagagcagwcaagccactaaaaaacgagttatgaagaaacagctgaaaggatcttcataacatgtgtcactctaggctagaaggtgatcaggactaaaaaatgatacagagttcaattaatttaggaaaatgccctctattcaggttaagggagagtctctgtatcaaaagttcaaaggcggtctaatggcctgtgtcggactgtcagagatgacaagcataaaattcttaggaacactgtaacgtaactaaacaacaacaaaaaagtttttatataacgctgtttatttttgttttggaaaactcttatttttacaaaatcattt

SEQ ID NO: 269891 - DNA, 598 bp, Homo sapiens
gaattgttttaacatttaacatttaaagtacaatgttaacttgctgaagtgtttattttttatcaaaaaaattcaatatgaccatacactcagataatatactacaaaatgattagttttaccagtagggaatttttggctgtaaatgttacacctgtgaaaatatacattgcagtcttttgcaataggttgattaatcagttgttggcataactagagcatattaagatctgactratctaaaattcttaaaatcaaacacgtattgaatatatgttaggagcagcatttgtaatagaaaacctagggttaaatactatgcaaatattatactggattatttgtctggtgcagtgttttatctttaatataataatttatctataatttattttaaaattgtaactaaatattaattctcaaactaaaaaattgagtgacttaagagatggggataggatttataagttgtctatggtcttgcagtaagtctggtggatataggccttggcaattacccttgtacaaaataaaataagaatataatattgttaagtggattattcattgttagggatataactgttgacattggctg

SEQ ID NO: 269892 - DNA, 598 bp, Homo sapiens
gaattgttttaacatttaacatttaaagtacaatgttaacttgctgaagtgtttattttttatcaaaaaaattcaatatgaccatacactcagataatatactacaaaatgattagttttaccagtagggaatttttggctgtaaatgttacacctgtgaaaatatacattgcagtcttttgcaataggttgattaatcagttgttggcataactagagcatattaagatctgactgatctaaaattcttaaaatcaaacacgtattgaatatatgttaggagcagcatttgtaatagaaaacctagggttaaatactatgcaaatattatactggattatttgtctggtgcagtgttttatctttaatataataatttatctataatttattttaaaattgtaactaaatattaattctcaaactaaaaaattgagtgacttaagagatggggataggatttataagttgtctatgktcttgcagtaagtctggtggatataggccttggcaattacccttgtacaaaataaaataagaatataatattgttaagtggattattcattgttagggatataactgttgacattggctg

SEQ ID NO: 269893 - DNA, 515 bp, Homo sapiens
tatatacccaggagaaatgaaaacacacattcacacaaaatcttatacacaagtgttcaaagtagcattattcataatagctataaagtaaacacaactgaaatgtccaccaaccaatgaatggataaacaaatgtggtttgttcatgcaatgaaatattattcagccataaaaaggaacaacgtattgaggaactttgaaaacattatgctaagtaaaagaagwcagacacaaaatgccacatattgtctgattttatttatacgaaatgtccaggatgggcaaatctgtagagacagaaagtaggttagtgtttgctcagcactgcaggaagtaggagtagggatgaaggagggtgaggtgaatattggctggtaatggatatcagtttcttttaggggaaacaaagctgttttaaaattatattgttatagttgcaccaaccatggcaaccgtgtgagtatatgaagaaacattaaactgtatactttaattgtgtgaagtatgaattaatt

SEQ ID NO: 269894 - DNA, 597 bp, Homo sapiens
tcatgacaaacccatcacaaagttattttaatggcaaaatgatattttaagaggatgcatgtagttcattcgacaaggttcttgactaattttcaagagcaatgccctaaaaataatctaccaaatgctggtagatcattatgagatagatgccccaaaaatataatctaatgaagaatcactgtcctcatagttaacctacaactaaagtctttcctttaggttaaagaatgaatacttccttgagactattttcttgttttggtattttattggggttgcttttaatttagatgatagaacagtctcagatggaattttaaaaagaaaaaaaatcacctataactccactgctctaagaatgccattccaagatgtatatgcataaagatatttacacaggtataatcatacaatgcatgcaattttgtgttccttttttccacttaatattacagcttctttgccatgttattacatagtccttatatytatcattttaatggctgcataatcatctacaagttattgcttgtggcaacacagttcctttaggtttgagaataggcaacaattatgtggaataattgggaaaaa

SEQ ID NO: 269895 - DNA, 492 bp, Homo sapiens
tcatacttctatctgtctttattcttctcctgtaggctgggtgtgacccagatgagcccacagcatgttttccttgatttccttagggtatctcaatgaaaggaacatgtatcacattcactgaagggagatatgtcatatcatcacaaagccaatgacatgaatactaatataacatttttatgatttttaaattctacagccagccaaccattgaacatttgtcactggatgatttatctataaatcctctcatgttgttattttcttccacttcatcttcagtacttttctcttatatctccagatatattcaaccccaatatgtgtatttaagagcctcttcaacactcttgaattattccagaaaactttaaacactcgtcttgtttcataatgcrcaaggatttagttcttttgttctaatttcttggccattcagtttatctcctaggacttctgttttctcaaccaaaatggatgaaaaatggt

SEQ ID NO: 269896 - DNA, 454 bp, Homo sapiens
ttgcaattgtgtccactgagagatgaagtaggaaggatgccattcacctaatgggagaaatgggaatttcaaagaggtggaagtcatgatataaaggagcattggacaagaatctgaactttcctgtttattttcagtaatcgctataatcactaagcaccatgccwgtgtgagtgcatacacgcatacgtgtgcgtgtgtgtgtgtgtgtgtgcgtgcgtgtgtatgttttgggggtgtcatgcttaatctcccactgccctctttctcttctgttgcttagccccaccttcatgctctttgctgagaaagctgcctgggtgggtcaaagagaggttcatgagatggagttgacattttctcatagtacttaaaaactatttttatttggagcatgctggataactggcaaattctgttccaattaaactcctttttctgtcttcaagcagtt

SEQ ID NO: 269897 - DNA, 531 bp, Homo sapiens
cagcgttgcgtaataagttggtagtgctattcttctggggcttctttaagataacataggtatctggcaaggaagtgtctacctctgtcttctcctgttctctaatctcttaattgttacttcccaacagatgccaatgggccagagagcctgtatgacacaatccaaaaacatcagcatctcaaggcacagactaactcagagaaggggttagaatggwtccagagggaaaatgttgagcaaccagcacagcaaagaagcttatctttgcacacttcacagtttttaaagcactcagaaaatcttcaaggctgcagattgagaaagtgacaatggatgaaatagaggagcagaacagttaagtgacttgcccaaggtttaacagatagtaggaggtattaatagaagcggaccttagcaatctgaaccttgtgtctaatgtctttgttgtgtatatccttcccacctttgccctccctccccaaacacaagaatgttcttgtagatggaaatcttttggtgctatggctg

SEQ ID NO: 269898 - DNA, 570 bp, Homo sapiens
gcattcactaatctgctttctttttctacttgtttacctattctggatattttatataaacgaaattatactatatgtagccttggtgtttgtcttctttcacttcgcatagttttcaaggtgcatccatgttgtggcatgtgtcagtacttctttcctttttatggctgcatagtattccattgtatgtatatatcagattgtatttatcttctcatcagctgatagacattgggttgtttccatttttggttattgtgaatagtgytgggccaggcactttttaaagcactttacattaattaattctgttcacaaatatccttggaagaagatactataattacatcatttttacagatgagaaaggaaaaattagatcttttgcccaagttacagttaatagaagaggattgcggaggaggagctgagactccaatttcttatttcccaggtcagtgctgtttccaacctaccatcctgctcagctctgtaagggcagggcctaccacttacttctcaccacagacacttgtgctcagcgtatttgatgtaaattagttgaattaa

SEQ ID NO: 269899 - DNA, 584 bp, Homo sapiens
agagagttaagtggggagagcttggacctgttaaaataggccttcaatattacaagaagttctctgcaggtttttagtcaggggacataaagagaagtttaactttgtggtgacaaaataaagactaactatagatttaaattaaattctgtagtagatgtataaacatccactgagctttcctcttatctttctaaacaaaggcaaattgcaaatccagtgcattgtagttgtgaaatcatttgtaatagtggtttcttawagctagctctacaagtgatttccaggactcctgcttggaaaaagaaagtagtgcctgcttttaactttaattttaattaaggctgagtgagtcaaagatatgtgggtgttaaaaatcattgttttccatagtggcattagcttaaaaccctcattacaatagagccattgttctattaactagcacctttttatgcattataaaggatcactgctatggtccaaatgttggtgttggaaatttatatgttggaacttaatttgtattttggagcctaaaattcaatgtgacagttttaagaagtaggccttttgggaagtga

SEQ ID NO: 269900 - DNA, 565 bp, Homo sapiens
aaaactcttcttaatctcttctctgaaacctacaccaggcctatgattcatctttgggctctgtttagattcctgattattgagccagaaagattttatttaattactatttgaaaagtttccaatgacaccatctcaatggtgttaattccacttggatcagtgcttactatccccctgatgttcacaggtctggatatagcatttgcccctttgctgacatttcatgcttgttgaagggagtgatgatcacaccagtggctcagggctgcrtgtccttaggctggtcatatttcataactggtctcagttcagacagaaactggcccctttccaaaacccagtttagttcagttctttgctgggaagatgaagaaaatcaggaaagcattgagttatgagagggagggtactcttacagttaccaagattgttattattatgaagttcctgttgaagatgttctgtcaccttcctggacacacatagaactgtggggtggggttgggggcacgcatgagggcagaggttccttgtgctggtctgtgacttggtactgggctgc

SEQ ID NO: 269901 - DNA, 534 bp, Homo sapiens
atgatattttctttccatcccctccttaccccacaagccctgcaaaatctttggtgacacagaaygtgagattaactccttctttctgtatttgcgtttatactgggcatctcaaccggcgtagaaaatcgaacggctttaacactcacttctttatcaaagagcctggatcattccatggataatgtagaggcttttgggaagggtagtgtttgggaagactgccctgagttgaaccactctgggtagggaagttctcaaattacaacccagttttggcccagaatactgtgggctgagaaggctctaatggttagagaccaaaattatccccctttcctcaaaatgattctcagttccccagtcccacctatttctgtaaatcactgtattagtagtttatttggggagagatctaaatagatctttacatataaaccttacaacttaagatatttaagcacaaggtaaaacctgcccattagttccctaagggtaggatctgtatcttagttctcctttctgatccaacac

SEQ ID NO: 269902 - DNA, 534 bp, Homo sapiens
atgatattttctttccatcccctccttaccccacaagccctgcaaaatctttggtgacacagaatgtgagattaactccttctttctgtatttgcgtttatactgggcatctcaaccggcgtagaaaatcgaacggctttaacwctcacttctttatcaaagagcctggatcattccatggataatgtagaggcttttgggaagggtagtgtttgggaagactgccctgagttgaaccactctgggtagggaagttctcaaattacaacccagttttggcccagaatactgtgggctgagaaggctctaatggttagagaccaaaattatccccctttcctcaaaatgattctcagttccccagtcccacctatttctgtaaatcactgtattagtagtttatttggggagagatctaaatagatctttacatataaaccttacaacttaagatatttaagcacaaggtaaaacctgcccattagttccctaagggtaggatctgtatcttagttctcctttctgatccaacac

SEQ ID NO: 269903 - DNA, 534 bp, Homo sapiens
atgatattttctttccatcccctccttaccccacaagccctgcaaaatctttggtgacacagaatgtgagattaactccttctttctgtatttgcgtttatactgggcatctcaaccggcgtagaaaatcgaacggctttaacactcacttctttatcaaagagcctggatcattccatggataatgtagaggcttttgggaagggtagtgtttgggaagactgccctgagttgaaccactctgggtagggaagttctcaaattacaacccasttttggcccagaatactgtgggctgagaaggctctaatggttagagaccaaaattatccccctttcctcaaaatgattctcagttccccagtcccacctatttctgtaaatcactgtattagtagtttatttggggagagatctaaatagatctttacatataaaccttacaacttaagatatttaagcacaaggtaaaacctgcccattagttccctaagggtaggatctgtatcttagttctcctttctgatccaacac

SEQ ID NO: 269904 - DNA, 534 bp, Homo sapiens
atgatattttctttccatcccctccttaccccacaagccctgcaaaatctttggtgacacagaatgtgagattaactccttctttctgtatttgcgtttatactgggcatctcaaccggcgtagaaaatcgaacggctttaacactcacttctttatcaaagagcctggatcattccatggataatgtagaggcttttgggaagggtagtgtttgggaagactgccctgagttgaaccactctgggtagggaagttctcaaattacaacccagttttggcccagaatactgtgggctgagaaggctctaatggttagagaccaaaattatccccctttcctcaaaatgattctcagttccccagtcccacctatttctgtaaatcactgtattagtagtttatttggggwgagatctaaatagatctttacatataaaccttacaacttaagatatttaagcacaaggtaaaacctgcccattagttccctaagggtaggatctgtatcttagttctcctttctgatccaacac

SEQ ID NO: 269905 - DNA, 603 bp, Homo sapiens
tgagtgaaatggcttaaagagcatgagtgaatwaacaaatgagataagcaagtatagtttcagaggcagctgagactgagagagatgaacaataagtgacctggtatgattcttgaagggcagtatagacaaaaaatagtctaacagacaactatctttcttctaataaaaacaaatcacccttgaatgttttttctttttatccttttagttgagtctaccctatattgcaactccaaatataggattaatacatctgttcaacatacgcatatttattctttagatctttagatcagaacataccagcgtaatttttccaaatctcacttgagcttattgaagaactattttcttttttcatttcaggagcaaacccgcatgttggaaatggggataactggcccagaaggccatgtactgagcaggccagaagaggtaagttacaggggatgaaggtgcacacacaacgcatgaataaacattgttaaaaggcgacgagaatgtgagtaccaggttgcagtattggaacatttcttccaaagaccacttctgattgactctaactcaggagcccgtgagaaaattagaaaggaatgtaag

SEQ ID NO: 269906 - DNA, 643 bp, Homo sapiens
tgatcatagtgtgctgtcaacagtgaaagaaaatctgagggatcctcacagaaacggggcgcactttggaatgaaggagcacttttggtgagtcgaaaactattagctgactgcagtcaagatgaaatccactttggaaatgtttgggtgtttttttaagtttggctcaatcacttgtttttcactgttccttatgtaatcttgtgggatgtggcgtcagaaagtcataaatcattcatggtgctttggggaaaaaaaaaacaacactgtgcaaagcagatgcaacttaaaatgaaatgagagaagtttttgggtgaaaccgaaaagaaaagcgtaactcgcatggtttgtagccaacgctgatcactaattctcgcaatctctatatggcttggtcatttgtttccagtttcttgtgcttcactgtaaatggagagtgagtgaaagatatagcctatcacaactgcattgcatttttccaacagtcttagaaaagatgctgtagtagcggcatttttggaaatgattcaaactggcagatttttatttcctgcttgaagaaatccagaaagccccrttttgttcaaaaaatcccttttacgacatgcttgtcactgctgttcataatacctatggatcaatt

SEQ ID NO: 269907 - DNA, 576 bp, Homo sapiens
aagtgtagtttctacaacaaagggaaaggggaccactagcaaaatctgccacaatgtataaatgaattttggtctctgatgtgttcacatttgacagatgactgatttaggtgtctttgttgttttgcagccacagttttaaatgcagtctctggtatacaaaataaggtgaatattaatagtttgtggaactgcagaagtacagaatgtgacttaaaacccctgaactagaaactccctgagagcttttccagctttgacattccagaattctgtggaagtcctgcccacatatatgagcttacagaggttttcctctctggagattggcaagggtgttcttgttaccttcaggactgagaactgtgctcattgtttaagttagcacagccctagccaagtatcatgaaaagcgctctgtcattcagcagtcttcccccttgkgctgggagttccccagaggtggtatagtttactgaggcattgaaaactcaggcatccaagcagtaacagcttcttagtggggagtggctcagactttccctccacagtttcagagattgttgtagtagaaga

SEQ ID NO: 269908 - DNA, 462 bp, Homo sapiens
tgcacaaacatgtgttaacctgatagcacaaagatgacagagtagttgacccccaacctctcacattttatacacgtttctttcccagcaatagaaatcctgatttttaattgggtgcatgaaaaacataattttaaaatagcattccccaatctgctttgcagttaggtatggtcatttaactaagtctggccaaaagaatataagcagtagtgttatatgcaatttctgggaaatgtcctgctgacagaatgcaactgagatggttggagtttgaatagccatttggaacatgaggtttaaascccatgttgaatgtggcagagccacaaaatataatcagtctagatctctcatgaacccagaaccacaatctcagcccttgattatttgcatccaaattttatttgtgtgaggccaaaacaaatttttgtattgttgaagacattgctgttttgtttt

SEQ ID NO: 269909 - DNA, 596 bp, Homo sapiens
ttggggtccctgctgcctgcccactgccctctccaaccactctccagctatgctcttctaggcacttctcactttaccctgatcctgccctcctgacctagcaccccagccacagccttagaactcaagggactgcctgggaaatgtccacatgtgcctgccatccaggctccgtacacccccagtacatcagctacctcgttcgttcattcartctttattgtgctttgcatcaggcactggggatatagcaataaataggacagacaaggctctgccctcttgcactttacattccaataggtgaaggcaggccgtgagctcatttcaggttgtgatcagttctatggaagaaacaaggaagatgaaatgaaaaagcaatggaggatgacttcagatagggtcattagcataggcatcttggaggaggcaagatgaggaagatgttgaagcatgagtcaatgagaagggctgagagaagagtactcaaggagaggggagaacaagcaccaaaaccctgatgtgaggagagcttggctttttcaagtaactgaaagtgtggctagaattacctactgggggagatttcccatctc

SEQ ID NO: 269910 - DNA, 608 bp, Homo sapiens
tttaggggtacatgttccaaccatagcatcacccgaggagaaagaagcactcatttgagttctgatttgggttcttcccttagtaggacctgtgccctgaggccctgcttatactctgaccttaagcagctcacttttcctttccaaacctgagtgttcttatctgtaaaatgagcatgattaaaatatttcactctcctgggtacaaagtcagtgtaagattcaagtgaacatagattttagggagtcagcaaatataagaggatgtttaggaggcctagtttttgagtcagaactctgggcttgggtcctgggtcaaagttatttaactctagaagacttgaggcatgttatcaacctccagcctcagcttcctcaagtgtaaagttcttgtgaggtgcttgtgaggattaaatgagatcatatatgtaacgcatttggcccactgctacatgaatgaagcacttcataaatgtcagctatcttataagtagattatctaattcaacattttccaaagtgtgtttcacaaaatattagtcctataacatattccagaaagatagggggamcctgggttcaagcacgtttgtgaaatgcagcactca

SEQ ID NO: 269911 - DNA, 606 bp, Homo sapiens
ctttgtgaattgtgtcaatacccctgttttatcacatgttacaggaacttcaaaatgagggtccttcaccacagtaatattcaaagttgtgggtgaggcatagtttttgccatctgaggctgtaatcttcagggaataactggtgggttgaccagcagtaagattgataaaagggcgtttgagggatatcactccggagaaatgatttagatcaaaatactctagttcattgcctgatacaatctcgtattttaggttctgaagctcatccacatctatggctgacatagtcattatcgatttccctactggccagtcttggcrgatagaccctgtacagttgacttcttcaaacataggctggttgtcattcaagttcctgagctgaagaaaaatggacacttccttctcccggcgaaaaggggatccccagtctgatgctcttacccggaaggtataaattcttttcatgagttcatagtccatgggtttggaggtggagatgatccccaggtaggggtcaatagaaaatggcaaagcttttggtccagcaatggaataggtgacatatccattttccccatgatcccggtcagtggcagtcac

SEQ ID NO: 269912 - DNA, 609 bp, Homo sapiens
ctgcctgtgtgtttcttgcaatataatacaaacaaaaacctatttgtttaagccactgttagtggattttctattacttgcaggtagctcaaagcattctttgaaaatgagtcaagtacttatcttgcaatgtcattgatccaaaactcagactaaaaaaatagctaagaataaaacaaatatttactgagtagctaagattacaatccagtgtgctaagtgcttagttgcatgtaactttacattgagctgcaatgaccttatgaggcagatactactattagtcccattttatagattggaaaactcagtcatagaaatatcttgctcagggccatacagctagtaagtgctgaagacagaaaggcttctgactagccgcaatggtttctactatgtacttgactcataggagagtccctygctcagatattacatatccattttatacccaatgcagacatgtagttatctaatagatgcactgtcataaagaagacagagagagaagggcccctggaataattgacggctgacagtgtcaatgagagaagattaaacacaaaaaagaaaagctttgcctttcagtgagaggcaaatagtctaaaa

SEQ ID NO: 269913 - DNA, 446 bp, Homo sapiens
tctcaactagtattgattgagcctggttctataccaggcactgttctaggcactagggaattcatctgtgaataagatacacagagctcctctcttcatggagtccawgaagacagtcattaaacaaataaacaagaaaatattgggtagtgatatatgtcatgaagaaaatagggcaaagtgataaagaggggaattgacaggaagtctactccaaacaggagctcaggaggtgacatttaagctgaaaactgaatgacaagaaggaattattcatgtgagaatcttaagggaagcagtaagtgcaaaggccccgaggcaggtctgggttttgtgtggctgcagcttgtgaactggagaagtagcatgggcccaggaggtgcagagccttctaggccagggcaaggagtttctattttaatctaagtgctatgggaagccactgg

SEQ ID NO: 269914 - DNA, 446 bp, Homo sapiens
tctcaactagtattgattgagcctggttctataccaggcactgttctaggcactagggaattcatctgtgaataagatacacagagctcctctcttcatggagtccaagaagacagtcattaaacaaataaacaagaaaatattgggtagtgatatatgtcatgaagaaaatagggcaaagtgataaagaggggaattgacaggaagtctactccaaacaggagctcaggaggtgacatttaagctgaaaactgaatgacaagaaggaaytattcatgtgagaatcttaagggaagcagtaagtgcaaaggccccgaggcaggtctgggttttgtgtggctgcagcttgtgaactggagaagtagcatgggcccaggaggtgcagagccttctaggccagggcaaggagtttctattttaatctaagtgctatgggaagccactgg

SEQ ID NO: 269915 - DNA, 613 bp, Homo sapiens
aaataatgtgtgtgcatatagagggaaggactgtaatggatgggtgattccaaacccctctaattgtcccacccctctgccccaggtgttcagtgctaagactggctcttgtggctctcaagaaagaatcctaaacatattctgtttatgaaaaaccttaaagaggtgagataaataaattaagagggactgtgctttgaaccagaataaaaattgtaaatgaaagaatggtgacattctaggtatctgctagtcaagtcttagccactgaaataatttctcttcttagtagtagggagtgattgatggtttttgagaagaagcagaaccaggacagggctacrtcattgggatgagtaatctaacattagaccaaaaaagggattttcgcattcaagtctcccactctggtgtggatagggcttgaacaccagctctattggtttaagacaactggaattcactgagggtagagagacttaatctacttccaagaaacttggatgaacatgtgagtcatttgttagtttgtaggcagccactgtcagattctcatataacaaaacaactggatgtggccaggagaggagccagtggcttgagccattgatgg

SEQ ID NO: 269916 - DNA, 613 bp, Homo sapiens
aaataatgtgtgtgcatatagagggaaggactgtaatggatgggtgattccaaacccctctaattgtcccacccctctgccccaggtgttcagtgctaagactggctcttgtggctctcaagaaagaatcctaaacatattctgtttatgaaaaaccttaaagaggtgagataaataaattaagagggactgtgctttgaaccagaataaaaattgtaaatgaaagaatggtgacattctaggtatctgctagtcaagtcttagccactgaaataatttctcttcttagtagtagggagtgattgatggtttttgagaagaagcagaaccaggacagggctacatcattgggatgagtaatctaacattagaccaaaaaagggattttcgcattcaagtctcccactctggtgtggatagggcttgaacaccagctctattggtttaagacaactggawttcactgagggtagagagacttaatctacttccaagaaacttggatgaacatgtgagtcatttgttagtttgtaggcagccactgtcagattctcatataacaaaacaactggatgtggccaggagaggagccagtggcttgagccattgatgg

SEQ ID NO: 269917 - DNA, 610 bp, Homo sapiens
aactaacataactaatccattttttaaggggcctttactcattcctgcatgtaggctaggataattttagaacactgagataatatgcaaaaacagcaatcatgtagttttaaaaatgaactctaggattaaaggagaagtatgtaaacagctaactatattttgttaaagatttataggaacattttcacatgacaaagaagttcccaaccactgtggaccctcactggtgccsagatgtctgtggttattggtcatctcttgatctcaactccctccttgtccccttacccttacacaaaaagagcctaaaatttgtcttgacttaagatggtactttagaatgatggtccaccatcttctcagttagctggctatctgaataaatctgcttttccttccaccaaccatcatttttcatgtctggctttcaagcagtgagcagctgaacctaggttcagttacatggggcagtaatgaggcatccctctccctcccaaccagggtggtatcagtggaggcctagtggggagcctgaactcccaaccctgctcagcagtaatgagataccttccccaccaacctaggttgtcaagggaggcctgatgga

SEQ ID NO: 269918 - DNA, 547 bp, Homo sapiens
ggggtctgcactgactccaggtaattggtgtcagagttgaattgaattattggacacccagttggtatcaaagaattggagaattggtggtccttggaaaatgacagatttgctgtcagaaaaacaatgctgtgcttcattggagcactgctcctgtgtgcctagagatcactttgctcttctgcaccaaagrgaagcacaggtggaatctgtgaggtttcaaagtccaagtgcaaaggcttctacaaagccatttctactcagtgttggtcaacttgctgggctgggcctggagaatgtgagcaccagtctcttttgctcttatgaagtccaaactaatcttgaatttgtcatcccctggaggttggcctgggaaatgagatggggtggaggctccattttgcaaagacccaacaccacctaagttctaatcacttccctctgactctcctctatcctggggaaaagttgccagtctctgggccagaatagccttgctctgattcagtgagtatcttctcaaatcactattcatgacagaagttat

SEQ ID NO: 269919 - DNA, 595 bp, Homo sapiens
tttagaataaaataaagccattgaaagagtaaatcaatccaatctcaaagtgaaagaacctaggagaggggttacagacccagatttcactagaattagggacgtgaacatgggaccctttctggctatgaaattcctgtaactaggcctcgtaactgggcctcagtatgttgggagaacacaaaaccctgagtcccagccaaatccagagtcaatttgtatcctcagtgacctcctcctgaaaaataasaccaaatgtttggtgtggtataactgtctgcttcatctgcccattttaattctaggaggatctgtaattgaaaataaaagagtgaattatgaaaactgattaagccaaacccatcgtattcatatattcatggtaagttgagaaacaccttgtgcacttgctatttagaatacgtgtaattatttggagaatttattaatagcagatgagcgaatcaaacagaattgctttataatttaatgtataatatttaattgaataattgattaacttctgactttaagttcaatgtataagaaaactttactaaatttaaagatactattggaacattcagaagaacct

SEQ ID NO: 269920 - DNA, 646 bp, Homo sapiens
gactcacgcgatcacaaggtaaagtcccacgataggccgtctgcaagttgaggagcaaggaagccagtagtggatcagcccgagacccaaaacctcaaaagtagggaagccaacagtgcagccttcagtctgtggccaaaggccagagatcccctcggcaaactgctagtgtaaatccaagagtcctaaagccaaagaacttggagtctgatgttcaaggtcaggaagcatccagcactggagaaaaatgaaggcaagtcaggttctcccaccttcttccgcctgctttattctagccaagttggcagttgattagatggtgcycacccacattgagggtgggtctgcctttcccagtccattgagtcaaatgttaatcgcctttggccaatacactcacagacacccagaaagaatactttgcatccttcaatccaatcaatttgacaatattaaccatctgatggtgtaagtggatctatgggcccctgcctaagtcacatattgagccctgcaggtgacaagaccccagagttttcccacagcacagtgtggtgaggaatacggtagtcatggcccagtgtggctgaggggcctagtgagtgtttcccttccctcaaaaacagaattggcccagcaaagagac

SEQ ID NO: 269921 - DNA, 553 bp, Homo sapiens
aatattgagacttcttaggaaagtaattaacactgttaactgtcagtgtagaataacttcaggagtggctaataggcctacagagagggtctcatccctgagaaccctccccagtacacagggacaagctcaggcagaacctgatcccttaggcagaactgattggttcagagaaggacatgtggcctaagtgaggccaataagattctatctcaggattttggaatttggagctgagcaatacagaaactaggagtcagagtcatatgaatggcagtgttcttgagagaaggtctatggatctagaatttattgttgaggatcttggactcaccttgactcctggttcaacgacaggcataactgtgtctggtactgtgctctttctaatactgctctcctgcttcctctccycaactccctttaggctcaagctagcatgtttaagtttctgttatttaaaaccataaataatatttcaaaacaagtcacttgaggtaatatttatacagtagcaagaaaaaaattactactttgatgttttcaataaaat

SEQ ID NO: 269922 - DNA, 255 bp, Homo sapiens
gtttgatagctctgtaggaatcaagtgtttaaaatgtgtgggaattgtgtacataactcactataaccacctttcatccaggtgcctcagactacttcaccatagtcataaatcctgtcacatcccagggatgcagttcatgagtctcttaatctagcctggtaagtaraaaaattacagaggtcacatgaataatgactggaataggaaatggaccaagatagcaaggccttatcttgatcccctccctgtttt

SEQ ID NO: 269923 - DNA, 601 bp, Homo sapiens
gtggtaaaccgattcatagagagaggttctaaatacattggtccctcataggcaaactccagttcactccgaacatagtccctaaataagaaaattgattagaatgtatatattagatacattcctagcggaatcacaatatgcttataaaagcatattatgttaatgatacccctttccatatctaaggaaaaatttagatatgaagaattatatataaatggccttcatctctgttttctgtgcactagaaacagacacaacttattgaaatggaattttaccatacagagaaagctgccaaagctccacattatgaaattttctttcttttcatggccttattaaatattttatgcccagtaaaaacccaattgagagctgatctcwctcaactctactacactaaccaatcacatctagtgatattacactaaacatctcttttggctatcttccaccaccatcaccccaccctcatcttatttccctcaaagttttggccccgattatattttattagtcccaagtagaaccacaaactagttagaaaactgggggataggagtacaacccttaaaaattatcattttcaactcta

SEQ ID NO: 269924 - DNA, 483 bp, Homo sapiens
gatatgttggcagcacctgccatggacttgctggattcattttctcctggatttttgatagctgctcccgccagcgctgtggtcacttgrcctgggcctgcagatttggttgttgctatgctcatagcacctgttgcaggactcattgctgcccctgctattgccacatctgttctaggtcctgttgctgttcctgccactgccatgccacctgctgtccttgctgctcctccttcagcagcccctggagtgctcgtggatggagaagccgcactagccgttccgtgggaggcatgttggattccctctcccccagcataagcagaagaggtggctgcagatacatcacaaggcttgtagagcccagtctcactctgatccccttctctgtggagctctgcagcctataccaaggggaagagaaacagatgagattgagatgactgaaagggagatcagaactttctactcctctcttatcct

SEQ ID NO: 269925 - DNA, 577 bp, Homo sapiens
ctttttctcttttctcatgtgtaaaattatgattcttgcagttctcatattctatgaatttataayaccatatgaaaaataacccttctacatactcaagaacatattctgtaattctagaaatcaagtatgtttattctaacctaaaaaatcatgcctattgtcattataatactaattgattgaggttttactttaacatggttttagttctggtgttcgatgcctgtttttcctgttgagatgtgcaagtgttttcagaggggccaagaagcgccttcatcttgctggagcagtgggccagaaagaagcatagatttggcaggtggtagcttgcagacagacatgatttcagaggctctcctgtgcctgtcaattttttttccaagttgtccctgatgcctgaaattctatgacagaggacaatgagagataagggcacatggatgtcctggtaaatgcttaggaatccgagtacagggcttgttggagagccctgattcatagtgtttgccaattcctttggtgtaaatattcccatcatggcccattttaaactaccaatgtgatgtctgct

SEQ ID NO: 269926 - DNA, 524 bp, Homo sapiens
cacatagaccagtggaagataatggagaacccagaaataaatccatgtatccacagccaactgatttttgacaatactcattggggaaaggatagtctcttcaataaatggtgctgggaaaactggatatccatatgtagaagaatgaaactagaccctcacctataaccctatacaaaaataaactcaaaatagatcaaagacctagatataagaccccaaactataaaactactagaagaaaacataagggaattgcttcaaggcgttggtctgagaaaatattttatgaataaaacctcaaccacacaggcaacaaaagcaaaaataaacaaatgggattatatcaaactaaaaaactgtacatcagggccaggcatggtggctcatgcctgtaatcccagcaatttgggaggccagggggcgtggatcacctgaggtcaggagttcgagacaagcctggccaatatggcaaaaccctgtctctactaaaaayacaaaaattagccagacatcatggcatg

SEQ ID NO: 269927 - DNA, 608 bp, Homo sapiens
cctaacacataattaactgctgttggaatgaatctttgtccccttgcctccgtgcctgctggacttcatatctgtgtattaatagtcacttttgtttggcgatcttgtgaaaaatgcagactaatttttaatccttaaagagataatacattcacataattttatttttattttttcagataatggcctttcgccrtgtggcacatttcaataattttaaaaaaacagttgcaaaatgttatgcagtgacaaatctcccatctttgtcccaagtcacattgctgtcctacatcacagcaaccacgatagttaatttcttataagttcttccaataatactttatacatatacttgtaatactaataaacattcttcttttcttcctttttaaatagtagtaacatactctgcacacacttcttaacttttcttttagttggttaacaatgtatcctggagattgatccacactgatacacaaagatattcttcattctgtttatggttgcataatacttcattgtatgcatgaaaaatttcttttaatgaaggttggtctgtttccagtttttgttattatgcacaatgagaaatgaacagccttgta

SEQ ID NO: 269928 - DNA, 608 bp, Homo sapiens
cctaacacataattaactgctgttggaatgaatctttgtccccttgcctccgtgcctgctggacttcatatctgtgtattaatagtcacttttgtttggcgatcttgtgaaaaatgcagactaatttttaatccttaaagagataatacattcacataattttatttttattttttcagataatggcctttcgccgtgtggcacatttcaataattttaaaaaaacagttgcaaaatgttatgcagtracaaatctcccatctttgtcccaagtcacattgctgtcctacatcacagcaaccacgatagttaatttcttataagttcttccaataatactttatacatatacttgtaatactaataaacattcttcttttcttcctttttaaatagtagtaacatactctgcacacacttcttaacttttcttttagttggttaacaatgtatcctggagattgatccacactgatacacaaagatattcttcattctgtttatggttgcataatacttcattgtatgcatgaaaaatttcttttaatgaaggttggtctgtttccagtttttgttattatgcacaatgagaaatgaacagccttgta

SEQ ID NO: 269929 - DNA, 602 bp, Homo sapiens
gatggatgtttaaccataactaatttaaccatttgtctattgatggatatttaagtttttccagtttattttagtgtaataaataatgcttctgtgaaaatcctttttattacatctttatatattttgaacaaatgtttccatagaataaatcagatcagggaaatgtatttattcattttagttaactgtttttaatattataaaagaaatacacattcatggcaaaatattcaaagagtacagaaggatacaaggtaaaaagaaaagctccttgggaggccaaggcgggtggattgcttgagaccaggagttcaaggccaatctggacaacagagcaagactctatctcttaagaaaaaaaaaaaaaggaaagaaagaaagctctcttcacactccctactcccagcccccaggaccacccacacaggtatctgctcttcatagtttcttatgagaaaacacattttaatagatgatcctaaattgccctctgaaaacygtatgtaagaataattctttttcttttcttttctttccttctttgttcctttccttctttccttttgaaaagtctcacttttttcatttgggtggccagg

SEQ ID NO: 269930 - DNA, 510 bp, Homo sapiens
ggcagtgtcatggagcaagataaatacttatcttccctattcagcctcctgagcagctgggaccacaggcatgagctaccacaccctgtttgttatttttatttttgtacagaaggggtctcactttgttgcccaagctgatcttgagctccaggattcaagcaatcctcccacctcagcctcccaaagtgctgggattacaggtgtgagccaccgcacccagccttatccattaagtaacttctaagggaaattgatgctgctcctgcctgagtaactaaatgtctttmgagtagaggaaatggagaggggtatagaaatactacacccttaatagctcagctaggctcccaatgatgaaaatgaaaagaatgaaaaggggttcctcacccaaaaaattcagctgagctatgtgagttactgtgggaaatcttatctgcagtctcatcttgaaagtgaaggtcccacaacctcctacagaggccccactggtgggggagcagcatgagt

SEQ ID NO: 269931 - DNA, 561 bp, Homo sapiens
tgtcaactgaaaagaatttatcgtgtctgttttccctaatgtgctacattgttgtgaagaacaaatgaaaaaagaactgtgtcagtgctcagaagaaataaaaagtacaccagaaaaagcagtcccaaaaacaacccaaaaaggtaaatgtcaacccggatgaagcaaagacagcttatttgtcaagtcctacaggtaggtgttaagagtaaaaactcccggttatgctgagtttctgaagggcaggaaccaattattkgtgcccacagctcaagctcagctcaaggcacacagtaggcctccataaaggtcagcttgaatgccagctccctcttccccagaccaaaaggaatacaaaaatatagaacaggaagcaatgccactcacctcgctggggcctccaagctcctaatagggctggtcagagctgaggctttacaggcccagttgccatgactactaaagccctctcctcctgcttctttattcaaaacccccgaacaagtcttggcaagatccctgccttacacaaatgagcatctatcctgtctccaggacttg

SEQ ID NO: 269932 - DNA, 582 bp, Homo sapiens
gaatgtgcttgcctctcctgcctgcctttccacctcctccacctcttccacctctgccacccctgagatagcaagacccacccttcctcttcctccttttcctcctcctcctcagcctacccaaaatgaagaccatgcgaatgaagacctttctgatgacccacttccactcggtgaatagtaaatatattttttcttccttttacttttcttaataacatttcttttctctagcttactttattttaagaatacagtgtataacacatataacatacatatctgttaattgactgtttatgttatcgacgagtcttcccagtcaacagtaggctactaacttgttaagttttgggggagtcaaaaattataygtggattttcaactgcacatgcagagaggatgtccgtgtccctaaccccatgttgcttaaggatcaactgtggtttgttagagagaaatggatactgaaacaatatcttaggtaagactatctagagactatctagcatacttcctttgtacataatggtaggcatattattttgttttgataaattaaactatgtcatggaagaaaga

SEQ ID NO: 269933 - DNA, 574 bp, Homo sapiens
catttttctgagaagaggagccatagttttcataaaaactctcaagaggagccacagcccaaataggttcagaatcactggtcctgatctgagagtaaagacagcatcttcctccatggggtctctaaaagactgtagccttcaacctggctgatcatcaggactgttagtgaaaaagcgcctggaagcggtgttgtttaggcattgagagagaagacagctactctccttattggaactgtgttggctgattggagcctcccatatccatttgggaagttggagtttttgagctcactaaatatcccctattttccctgaaatttggttgcatgttagaaggtattcaaactaacatatgttgtgccaaatgaatggactggtctggtctcatctcagagatgggggcagggctgggtgacttcactaggtgtgtgttgctggtagtaatggtaggaggcacagaggttgttttatgttgccctcacttgaatgcttggtaygtagtttggtacttagccattgtttgtgcatttatataaaggaattgtttcctttccttttagagacattg

SEQ ID NO: 269934 - DNA, 600 bp, Homo sapiens
acttggtggaaataatttattcattccattgggatcacacattagaaaattttagcccatctttgtcacaccattcccttgggggcagttcagctgtgaggggagcagttcttcagtctgtcctatgcatgctccagggaaaccaccagggttctacagagacaatcatggattccgtaaacgtagctccagagtgtcaggtgacagaccacacagaacaaacccccaatccctgcttttgcagggcttatactctagggagggaaccagacattaaataaacccacaggtaataattgacatcatacttccctgtgaagagaagagacataatgccatgaaaacctacaaaaggggaacaatctggcacagtccaagaaggcttccccaaggcagtgaagtgagctaagatctgaaagatgtatagatgtcartaggcaaaagtgtaggaacagcaggtgccaaggcccaatggcaggaaagatggtggctcatttgataaagtggaaaaggaaattggtgtcataggccgcaaggggacattaggagcagttgagaaacaggcaggaacaagatggaggctcatagcccaagttaagg

SEQ ID NO: 269935 - DNA, 601 bp, Homo sapiens
ttctaaataaccactctccaataaaaggaatcaggaaccacagcttcttggaaaaatgactaactatagggctcggcagggaaaatacaagatgaacctggagcatactgcagyatgagaaggtcaggaagtacagtaaaaacaaaaagctaaagaaaagacaagccacagatggaagaaaatatttgcaaaacacatatctgataaaggatttgcatctaaattatgcaaagaactcttaaaattcaacaataagaaaacaaacgaccatatttaaaacaggcaaaagatctgacagacacctcaccaaagataacacagatggcaaataagcaagtgaaaagatattcaacatcatatgttattagggaactataaaataaaattatgagatactgccacacacctagtataatggataaaatcccaaacactgagaacaccatatgccgatgaagctgtgaagcaacagaaactctcatccactgatggtgggaatgcaaaaatggtacagcccactttggaagacagtttggcagcttcttacaaagcttaacagatgatcaatcaaatgcagtccattatccaaatgagttgaaaa

SEQ ID NO: 269936 - DNA, 410 bp, Homo sapiens
tgggtatctacctaacagaaataaaaatatgttcatgcaaagacttgcatgcaaatgttcatagcagcattattcataatagccggagtggaaacaatccaaatgtctattcaaccagtgcatagataagcaaaatgtggtgtatccaaacaatgaaataggcctcagcaataaaaaggaacaaaatacagacgcgcgccgcarcatgcataaacttcaaaacattttgataaagaagttaggtgtgtgactgcatttatatgaagtgtccagaaaaggcaaaagtcttatagagacagagagcagattagtagttgtctggggctgggtataagagagttattgacggccaatgagtttgctattttggggatcatggagatattctaaaactggattgttatgtttga

SEQ ID NO: 269937 - DNA, 410 bp, Homo sapiens
tgggtatctacctaacagaaataaaaatatgttcatgcaaagacttgcatgcaaatgttcatagcagcattattcataatagccggagtggaaacaatccaaatgtctattcaaccagtgcatagataagcaaaatgtggtgtatccaaacaatgaaataggcctcagcaataaaaaggaacaaaatacagacgcgcgccgcaacatgcataaacttcaaaacattttgataaagaagttaggtgtgtgactgcrtttatatgaagtgtccagaaaaggcaaaagtcttatagagacagagagcagattagtagttgtctggggctgggtataagagagttattgacggccaatgagtttgctattttggggatcatggagatattctaaaactggattgttatgtttga

SEQ ID NO: 269938 - DNA, 579 bp, Homo sapiens
ttcctagtgaagataagtgaagacattttaacacccacagacacaacctaacccaaattaacactgtccattcctttgtcacattcaccactgtccctggctagcacaggctctagttatgattttattaacattaccttaaaactataaggtgtccaacattatttctgaggccacctcttgcctgctcagaaaacaccaagggaaaaaacaaccaataattctccccctttttccaacatacgttgacctgttttagttccttattcaagataccctcaaccacagtattggtttatgtatacatttgtccttcataagccaactgtggagcatataccaggagcaatcatgaacagggaagaactaccatcaactttaagtggggcctatgtctaccaaaataattaactggttattttactagcacacacaaactaacattcraccaggcttatctgaaaccaaataagcatgttctacccaaatcaaaaatcaagtttatgtgtgacactcctttcaactcagaagattaagtatgatgctggttacaaaacagaatgctatgaagttccccat

SEQ ID NO: 269939 - DNA, 615 bp, Homo sapiens
ggtgatgaccttactccatctcccaggtccctgggaccatcccyggggggcagtgggggtgagaaatgaacccaaagaaggagctgcctctgtgtcaaaggccatgtgtatttcctcctcacttggacccgtgttgttggacggggcagggtttcagggccctactggctctttgggccttggacaatcctgtgacaggatccaagtggtcaggcggttcatggtcatgtaacctggggttattcacacttctgaaggagccccacggttcggtatggaggtaaaggcctgagggaggcagcaggacagacagtgctctaggccccctccctgcatctaatcgatcagcttccatgtaggattccatttcataaagctctctgctgctaaaataaactcacagcgccagcccatcccctcctagaaccagcagggaaactgaggcccagagaggacaaagggtggtcccctaaatgccagcccatcacgcagagccttgtactcggtgtctgacttctgcaccagagctctccgtgctccacccctaccctgcctcaacatacctttttgtaaccttcgcccaacagtctctcgagaagcagcaccagctgggag

SEQ ID NO: 269940 - DNA, 615 bp, Homo sapiens
ggtgatgaccttactccatctcccaggtccctgggaccatccccggggggcagtgggggtgagaaatgracccaaagaaggagctgcctctgtgtcaaaggccatgtgtatttcctcctcacttggacccgtgttgttggacggggcagggtttcagggccctactggctctttgggccttggacaatcctgtgacaggatccaagtggtcaggcggttcatggtcatgtaacctggggttattcacacttctgaaggagccccacggttcggtatggaggtaaaggcctgagggaggcagcaggacagacagtgctctaggccccctccctgcatctaatcgatcagcttccatgtaggattccatttcataaagctctctgctgctaaaataaactcacagcgccagcccatcccctcctagaaccagcagggaaactgaggcccagagaggacaaagggtggtcccctaaatgccagcccatcacgcagagccttgtactcggtgtctgacttctgcaccagagctctccgtgctccacccctaccctgcctcaacatacctttttgtaaccttcgcccaacagtctctcgagaagcagcaccagctgggag

SEQ ID NO: 269941 - DNA, 615 bp, Homo sapiens
ggtgatgaccttactccatctcccaggtccctgggaccatccccggggggcagtgggggtgagaaatgaacccaaagaaggagctgcctctgtgtcaaaggccatgtgtatttcctcctcacttggacccgtgttgttggacggggcagggtttcagggccctactggctctttgggccttggacaatcctgtgacaggatccaagtggtcaggcggttcatggtcatgtaacctggggttattcacacttctgaaggagccccacggttcggtatggaggtaaaggcctgagggaggcagcaggacagacagtgctctaggccccctccctgcatctaatcgatcagcttccatgtaggattccatttcataaagctctctgctgctaaaataaactcacagcgccagcccatcccctcctagaaccagcagggaaactgaggcccagagaggacaaagggtggtcccctaaatgccagcccatcacrcagagccttgtactcggtgtctgacttctgcaccagagctctccgtgctccacccctaccctgcctcaacatacctttttgtaaccttcgcccaacagtctctcgagaagcagcaccagctgggag

SEQ ID NO: 269942 - DNA, 513 bp, Homo sapiens
atgaatttcaacatatctttggtgtgaaaagactgaggataacaccaaccccgaatctataagctttgttttattttatgtgaaaggcctttttttccctcttggtcactcctgtactgtatctagtacacttgaactttataaggctaatgaaaatatctgtgtcctaaaaataaaatgtactggctccaaaatgaaaataaaattacaaaatccaagttaattaagtttgattaaatatctactgaataacaaaactaacatgatatcagctagtcaactgctatccaagtcagctgttatgcagttatatataaatcagatatttatacatcttgtaactattagatttctgtwttggcctaatatggaggagtggggttttttcaaaaagaagcagcctaaaaacaatgaggacctaaagtgtccctcttcagatgcttttgttttcaaacaacatctcaataatggcaatggagatttgatgtatctgtaccatagatttaaaaaaag

SEQ ID NO: 269943 - DNA, 604 bp, Homo sapiens
actaaattgaatgaaccgtaattccctaactaaacttcagcttcaaaacaagcattttattgttcatctcaattccttacttctttcatatcttccttctttttttcttcattccttgcttggttgcttttttcttcccttctttcccacctattgccctcctttcctccttccatcttaatatattatctatctgtctatctgtctatcatctatccatctatctatcctctatttttttggtgggcaaagtggagaaggaagaaaaagtgatattaaaaatatatcttaccaataagcctagtagaacctcaccaatcaacacttttgacatgaaggtccagtgcagattaccactttgagaaaactggtgactgaataggaatactaaaaaggtgactggtaaccaaacttattttgtagataacaacatttaacaatgcaataaygtgaaactgtatgtaaacaatagatgtcagctattattattacatacaaatactatttattcaatttcctctgttaatggttcctcaagcatagtctgagacctcccccccacccgccaacagggcctggagatcataactatttttattataat

SEQ ID NO: 269944 - DNA, 572 bp, Homo sapiens
gggatggattgtatctattccattaacatggatgattgaacgctgcctcagtaccattgtatttgatattcaaactgatgctatcattttcttagtaatgattgaaagctgcctcggtatcattatgtttgatattcaaaccgatgttatcattttcttggtttgcatgtggaaaagactgatgaattattagttacatcaaatctttaacatgtgcaaattagtcaaatgcaaaacatgtttataatattcatggttattattcctccatttatattattttttgaggcttcacacaagagcagaagaatgtgtgaaggtattagctgccacttagttgtttagagtttaaatatttaaagcacagagaccttmgtaaaaagaagggatttatgtggatacaaggaaaaatattgttttgtccactgaactgtagttattatatgaaagctaatggaaataggagaattgaaaaatgtaggtaaacttgttgttttaaaatactcaatttgtatggagtttggatattttatgaagtaaacaggaggtgggagtggtacaaactgagtacc

SEQ ID NO: 269945 - DNA, 572 bp, Homo sapiens
gggatggattgtatctattccattaacatggatgattgaacgctgcctcagtaccattgtatttgatattcaaactgatgctatcattttcttagtaatgattgaaagctgcctcggtatcattatgtttgatattcaaaccgatgttatcattttcttggtttgcatgtggaaaagactgatgaattattagttacatcaaatctttaacatgtgcaaattagtcaaatgcaaaacatgtttataatattcatggttattattcctccatttatattattttttgaggcttcacacaagagcagaagaatgtgtgaaggtattagctgccacttagttgtttagagtttaaatatttaaagcacagagaccttagtaaaaagaagggatttatgtggatacaaggaaaaatattgttttgtccactgaactgtagttaytatatgaaagctaatggaaataggagaattgaaaaatgtaggtaaacttgttgttttaaaatactcaatttgtatggagtttggatattttatgaagtaaacaggaggtgggagtggtacaaactgagtacc

SEQ ID NO: 269946 - DNA, 572 bp, Homo sapiens
gggatggattgtatctattccattaacatggatgattgaacgctgcctcagtaccattgtatttgatattcaaactgatgctatcattttcttagtaatgattgaaagctgcctcggtatcattatgtttgatattcaaaccgatgttatcattttcttggtttgcatgtggaaaagactgatgaattattagttacatcaaatctttaacatgtgcaaattagtcaaatgcaaaacatgtttataatattcatggttattattcctccatttatattattttttgaggcttcacacaagagcagaagaatgtgtgaaggtattagctgccacttagttgtttagagtttaaatatttaaagcacagagaccttagtaaaaagaagggatttatgtggatacaaggaaaaatattgttttgtccactgaactgtagttattatatgaaagctaatggaaataggagaattgaaaaatgtaggtaaacttsttgttttaaaatactcaatttgtatggagtttggatattttatgaagtaaacaggaggtgggagtggtacaaactgagtacc

SEQ ID NO: 269947 - DNA, 575 bp, Homo sapiens
agtaacttaatgtggcgattaagacacattctttatatatttgcatatatacaaagacgtggatgtccttttaaattatacccaccttctgcctaggctaatgcyatattaaattgcattgaaatgcaaaagcacctcaatataatgattttccacatcccatttacttgttgattattaatgaatgcttcctgagttgtgttcctgctattttgtctttaagactactttcagggttttcgcatcatattcaagaggccagtcagagttctgtgcttgcggcttcattaaaattctgtcctacacatcatctgactcacactttataatctatcagaacacctgtttgctttacaatggccacgaggcagctcaaaacactgtggtatttagcatttaataatgagcacaagatatgtatttttgacactttaaattttctttagaaaagtgcatggaaaagagccaagtttgaatgaattatctaaacttttgcaatttcataatgtgaattttaaccaacttttaaaaaatgtgtacgagaaagtgccttctctctttgtcagtgaacctta

SEQ ID NO: 269948 - DNA, 581 bp, Homo sapiens
ctattacaaattaaactctcatcccacctggaagaagttagcagcataaactgtaacacatctgaagtggtgcccacggttactcttgcaagcttcttatgggaaacacaatattttggtatttcccaacctggtgctgttaacaagaatcatcccttgtttgtgtttgttaatcagcttgatgagcagtttctgtgttgatcttcccaaactgtgttggccagttgccaaatcaagtgcataaattacacactgccctctctccaagctgctcccaaccctgcagaacatcagaaagaatttcctttgaatgcgcaaatctgtgtaagccgattgcttagactgatactttgtggggttggtctgatgtgacatgatcatgtgtcacaatattatgacactgtgatgacgtattttaatgttaagaaataatattttgaccaatatccaaatgtcagtctttttgaaaggtcagattctctttatataatggtgtttcctagagaagttatttataggtcttgaggctccamgtaccaacctaagcactctattccaagaaccaaggagcaacatatggc

SEQ ID NO: 269949 - DNA, 628 bp, Homo sapiens
agctttggccctttggcccttccacattctgccatgtaaagacacaatgttcatctcctctggaggatgcagcatcaagatgtcattccctcaccaaaaactgaacttgccagtatcttgaacttggacttcccagccaccagaactatgagaaataagtttctattctttataaattacttagtctcaggtattttgttagagtagcataaatggactaagacaagccataagaattagagctcacaaatcaaaggcaagaaatcagagtggttcataaactcaacctgcttatggttgtgcagggcacttgggtcaagggagcaagaggcactgaaatctagcttaggatccctttgccaagcagtctacatggttgcatccagtaaaaagggacagctttatcttattagtgtraagatactctataggctagtggtgggattacaccatgcagagtgtgaatcctggcaagtagttgaaccgtatgatctgatacttgatcatcctgaacctgagtctcttcacctgtaaatagtctaataataatacccacctaggctcattctgagggttaacaagattgataagctataatatacaaaatttttatcataatgactggcat

SEQ ID NO: 269950 - DNA, 628 bp, Homo sapiens
agctttggccctttggcccttccacattctgccatgtaaagacacaatgttcatctcctctggaggatgcagcatcaagatgtcattccctcaccaaaaactgaacttgccagtatcttgaacttggacttcccagccaccagaactatgagaaataagtttctattctttataaattacttagtctcaggtattttgttagagtagcataaatggactaagacaagccataagaattagagctcacaaatcaaaggcaagaaatcagagtggttcataaactcaacctgcttatggttgtgcagggcacttgggtcaagggagcaagaggcactgaaatctagcttaggatccctttgccaagcagtctacatggttgcatccagtaaaaagggacagctttatcttattagtgtgaagatactctataggctagtggtgggattacaccatgcagagtgtgaatcctggcaagtagttgaacygtatgatctgatacttgatcatcctgaacctgagtctcttcacctgtaaatagtctaataataatacccacctaggctcattctgagggttaacaagattgataagctataatatacaaaatttttatcataatgactggcat

SEQ ID NO: 269951 - DNA, 485 bp, Homo sapiens
tgtgagtcaactgagcaattcttctgctggactcccctgggatacgtcacatgactatatttgtctccaagcttcagtggagmctggttggttctcaacgtgtaatcacttgaccagcacaatcagtatcacctaggaaattgttagaaatgcaagttctcaggtgccatcccaggactactgattttaaaactttagaggtggagcccaggaatctgctctaagctggcttccaggtgattccaatgctcactcaagcttaagcacttccgtttagagagcatcggagggggtggtactcttatcatcctgcaagctaggctgagcttcctcaaacggtggtaccacattccattgggctgaaaacagatgttgagatgcctcttgagacctaggcccagaagttgtcctgtgtcatctgtgacaccttctattggtcaaagcaaatcacaaggacagttttaattcaaggggaagtaaaatag

SEQ ID NO: 269952 - DNA, 542 bp, Homo sapiens
gcctcatttgtagacagagtctttccaggggtgatcaaattacagtgaggtcattagggtggaccttaatctcactgatgtctttataaaaaggataatcttgggcacagcgctgtgcatgaaagaaggacaatgtgacgagatctagggagaagatgtccatatatgaatcaatgagagagacctagaacagacccttccctcccagcsctcaggagccaacccagcagacacctagattttggacttccagcctccagaactgtaagacaatgcacttctgatgtttaaactacccagtctgtggttacaacagctctaccaaactagtacacattcccttaaaggaagttcgtacagtgccttacaacaatgaactacattaaaacacactaaagaaagtaagacacaaagggagattgattgttcccatatactgacatttgaaaagatctaatacatgggaaattggtcttgaatcaactcataacatagagttccctcaagagtcccaattcatcattaacatccatcaaaaaaat

SEQ ID NO: 269953 - DNA, 608 bp, Homo sapiens
agggcaaacaggcctgagcagaagagaaactggaaatggactgttacattatgagggtctggagagggcgaaagcaactgacagaggggagtccacttgcccaggccactgggaactgctgcagcagcagcagcagcagcagcagcagtgtgtgtgtgtgtgtgtgtgtgtgtgtgtgygcgcgcagatctctgaagaacccacaaaagtgctttatgagaaagctagatttaaacactggccacactgggaggtaggagagtgcaaagccagctttgacatgagacaagtaccatattttctgtcgcctcttagtttcttgtgctctaattctagaaggatcagaaacttcagaagagaaagactacaccctttcttttcatttgcagcaggccccagataggaaggacaaatagcaaatagcttaagcttcgaaaaccaagcagaaacattgataataccaagctgaacattttaagtgcctaattgaaatcatgctgtactgcgtacagtggctataaggcttcctaacacctccaagggatcctgaaaagtatttgtccaggagcacacttaagaccatcactacaaagcaggtttaaagaaac

SEQ ID NO: 269954 - DNA, 633 bp, Homo sapiens
agtggatttcaaaattaaaaacttttaggctgctctacagagtagccattctcttgttttttgtttttttggttttttttacttctctaatcaacttgctttcattctcaaaaaaacccaaaaaccgacctttggacttcaaaggatagcattaggaaagtaaaaagacccacagaatgggagaaaatatatgcaaatcatattatctcttaagatttatgtaaagaatataaagaatatgtaaaaactcataattcatcaacaaaaaacccaaataaaaaatgggcaaagggtgtgaggagacatttctacaaagacatagcatgtgaagaaatygaaatcttcattcaatgctgttgggaatgttaagtggtacaatacttccagaaaacagtctggcagtccttaggagtttaaacacagagttaccatatgacccaaccactctactcttagttagatacccaagagaactgacaaaatatgtaacacacaaaaatttgtgcttcaatgttcatggaggcattattcataatagtaaaaaaaaaaacaaaacaaacgaaaaaaagaaacaacccatatgtccaactgataaatgaataatcaaaatgtggtacattcatatgctaaaaa

SEQ ID NO: 269955 - DNA, 564 bp, Homo sapiens
gtataaggtgagccaggtacataatttaaaagttttccagtggccacatttccaaaaagtagaagaaagatacatatattgagatatcactctgtgccccataaatatgatgatgcataatcattatgtgtcaattaaaaataaaagaaaaaggccaggtgcggtggctcacgcctgtaatcccagcactttgggaggccgaggcaggcggatcacctgagatcgggagttcgagatcagtctgaccaatatgtagaaaccccgtctctactaaaaatgcaaaattagctgggcgtggtggcgcatgcctgtaatcccagctactagggaggctgaggcaggagaatcacttgaacccaggaggcagaggttgcggtgagccgagatcrcgccattgcactccagcctgggcaacaagagtgaaactctgtctccaaataaataaataaataaataaataaataaatggaaaatggtacaagaagcaggtgaaattaattttaataatatattttctttaacttaatatattcaaatattatcactttgttatggaatcaatat

SEQ ID NO: 269956 - DNA, 566 bp, Homo sapiens
ttgaaatcaatcccaacctaccaccactgggcactagcaaccaatgatctgccatttgactctatagttttgtcttttctataatgttatatgaataaaatcagattgcacttagccttttgtttgacttctttcacttatcacattgattttgagatttatttagagggtatttaataggagtgagttccttttaattgctaagtagtattacattgtatagatgtactataccattcactagttggtgggcagttgggctgttccagtttttggcttataaataaagctgttaagaacattcaggccaggaacagtgcctcatgtctttaatcccaacattttgggaggtcaaggtgagatcatggctggaggatcactggaggcctggagttcaagaccaccagcctggtcaacatagtgagatcccayctctattataaaaatttaaaaatttaaaaatttcaaacttaagacaagaacattcaagtacaaatgtttgtgtggacatgcttttatttctccctaataaatatgcaggagaggagtagattgagatatgtttt

SEQ ID NO: 269957 - DNA, 597 bp, Homo sapiens
ggaggctacagtgagctttgattgtaccactgcactccagcctgggcaacagagtgagaccctgtctcaaaaacaaacaaacaaaaaacaaaaacaacttaatagcttaagttggtgaaacaagaaatagaagtttcatggtgacatttaaacttacaaaggcaagcaacggaactaaaataataactagcaaaaatcagaatggagtaatttttaaaaagtcagataagttwtggaagtaaatccttatttttcacagttgaggagttaatagaaatatattaaatgtatatatcaagaaatagtgatatatgcatgttctcactgatacatgggagctaaaaaagttgatctcatggaggtagatagtagagtggcagttgccagtggttgggaagggcataggggaggggagaataaagagaagtagattaatgagtacaaaaatatagtcagatagaagaaataagttctagtgttcgatagcacagtagggtgactacagttatcaataatttgttatatatttaaaaatagctaagagagaagatttggtatcttctcaacatgaaggaataataaaatctttgaggtgat

SEQ ID NO: 269958 - DNA, 601 bp, Homo sapiens
atatatcaataaaactataataaacggaagraaaaaaagaatcactcaagatatgtagaatactattgagaaggactcatttcaaaggtcatttctgagctttaggataactctagacactgtcccccaccccacttttctgtgatacacacatcaggaaacactactttaaatgcattatcatggttcacccaggttgccaagtgaagtgctcctggagacagtcagccaggtgccaattatgaagttggcaccttcctgattatcccacatcctgataaggaagacagatgctgccacttcctgaaacccctggctgtacccacctgggcctcctgacaaccaccaactatcactgaagtgctgttcatgggggccaggttacttccagacaatttaagatatttacattgccctctgctttctccgagctcttaatttataactcctttctgtttgtgtataaacccttttagtcctttgcccatattaatccttcttggtatcatttggaaagagatgatattggtttgattctctctggctctccccacctcccaaactggtagggaaaaaaatgaagacacatttgggtatgatg

SEQ ID NO: 269959 - DNA, 624 bp, Homo sapiens
ggaaaccctgctgtacactcatgagagaatgagagttacaaaagcaaataacatcttcgtattatgaaaatggttttgatctatggacctcctaaagcaattttagggatccctagaggtgctcataccacaatttgagaattagtgcattgaaaataattagaaataaactgattccagtgtagcaaaactttgttatgtgtagagaagargtgtgctctgaattgggaagtatagattaggaccagatcttgggaggacgattatcagcttaaggagtttgaatgttgttctcaatgcactggggaaccacagatggcttttggcttgatcagatctttgtgtggggacaattagtctgtcaataaaatgagtaggatggattagaaagaggacagagaaaaggcaaccagttaagagcactttaacgaggccgtgtgtagttgtatatctagagccagacctcaggatttttgtgacaattaaatgtgttaatctatgtaaaatgcatataacaaagcctgatccatggtaagcattatttgtattagaagtagttgtaataattgttgtgggtagtagcaatattattattgctattattatttatattagatgagtcgt

SEQ ID NO: 269960 - DNA, 579 bp, Homo sapiens
atcatctattttatctgtcaaagctattctcattccactagatgcctctacatttttacattgtggttagttcacacttggttggtctcttattcgcacataaattactaacagttatctttgcaatcaagtcataatctccttacaagcaactagaaagcctagtgctaagcacatagtaggcaggtaataaaaatttgatgttgaatgaatatacctccattagaagcccactgacatgagtttcatactcctttataatgaaaccatgtctttgagttaacttaaaaaaaattaaaaagagcaaatctgctaacataattcaagggtgaagactacacaagtgaataaatctagcatccatgtagacaatgacagtgttcacaaaaatgacagtatccaacacctaataccaagagcaaacatttattgggtgtggattatgtgccatgcattgctttaggcatttcattccatttttacaactactctacaagtggatcctattataatctttgtttcacaaatgagattaraacacaacatgattaagaaacttgcccacagtaaagatttgac

SEQ ID NO: 269961 - DNA, 450 bp, Homo sapiens
cactggggacttgccccacaagttttcttcccccttattaacttataccctcttactgggtggggaattagcttctagtccttccatagatcttgcttttctgtttcctttactatttctacattttcctcctacctgctcagttatgtcagattgttcttttttttcctccaaaatatctccttcacatgtatttctgaatttttcttctgtttgctcagatcattccacattgcagtgttctatttaaagctgaaaggtttttgctgtgtagttagtgtgaaggactctaaactcaatttgcattgtaagtggtgrctgcaggcaagttcatccagctaagagcaatgcaaatgctaaaggacactttcacccaagctcccctctctcagtctctttctctctctctgtctttctcaaaagaatgcatggtgtgcatttaataaataa

SEQ ID NO: 269962 - DNA, 450 bp, Homo sapiens
cactggggacttgccccacaagttttcttcccccttattaacttataccctcttactgggtggggaattagcttctagtccttccatagatcttgcttttctgtttcctttactatttctacattttcctcctacctgctcagttatgtcagattgttcttttttttcctccaaaatatctccttcacatgtatttctgaatttttcttctgtttgctcagatcattccacattgcagtgttctatttaaagctgaaaggtttttgctgtgtagttagtgtgaaggactctaaactcaatttgcattgtaagtggtgactgcaggcaagttcatccagctaagagcaatgcaaatgctaaaggacactttcacccaagctccyctctctcagtctctttctctctctctgtctttctcaaaagaatgcatggtgtgcatttaataaataa

SEQ ID NO: 269963 - DNA, 430 bp, Homo sapiens
tcaacacaatggtttgattttttttttcagatatggaaccccaggtttcctaaccagggattcatctctcaaatctctctatatgtgggtttcctgctatatttttaggcttctgttacagccaagtaaaaccctatctccattatagcagtctgtgagttttctagattaatcttcctactttcaaatggggccacagatagaccaaatattctacatagatggggtgttttaaaataactgctctgttctcagtttccttagctggaaagtgggaataacaatagaacctatgccaaagaaaaattatttgatgcagagaaagcactcaagcactcgggatatgcctaatacaaagcccacccttaattcattatagctgttattgktacttaatgtacttcctggttatattctggcaacaagtggg

SEQ ID NO: 269964 - DNA, 585 bp, Homo sapiens
cctgctatatttttaggcttctgttacagccaagtaaaaccctatctccattatagcagtctgtgagttttctagattaatcttcctactttcaaatggggccacagatagaccaaatattctacatagatggggtgttttaaaataactgctctgttctcagtttccttagctggaaagtgggaataacaatagaacctatgccaaagaaaaattatttgatgcagagaaagcactcaagcactcgggatatgcctaatacaaagcccacccttaattcattatagctgttattgttacttaatgtacttcctggttatattctggcaacaagtgggttccaccttccctcagaagcctttttaaaaaactgtcttgtttatacatattaaaggaagaacaagtttactattccaagtagctcctttcrattattgattcattctgcctttaattccttcaacaaatactgacgttttgcagaggtgatacgggatgttccaatacagacgtggtctctgtcctcagggatctttcaatctagcaaaggagatagtatgagacaaataattttgcaaataaata

SEQ ID NO: 269965 - DNA, 551 bp, Homo sapiens
ttccttcaacaaatactgacgttttgcagaggtgataygggatgttccaatacagacgtggtctctgtcctcagggatctttcaatctagcaaaggagatagtatgagacaaataattttgcaaataaatatatagttaccaattgtgataagtgatatttaggaaaggcacaagatgccttggggtcataaggtggaaaggtggatctaatttagatcgggagttcaaggacagcctctcagacagctgaaactgagaactaaaggatgaatttgcaattaacaagacctgaaagcattttaggtagaagggacaataggtacaaaagcccagagagataaaatagcctaactgattcaaggaatggaaagatgactatggctaggaacagggagaagagtgataaaaatgagaatggagtctgcagttcattttgaaatgtaccagaagcaagaaagattaatgctaagagagagggatgggtaaatggatagacatatgataaagcaagtataaaatgttagtcactggccagccatggtggtgtatg

SEQ ID NO: 269966 - DNA, 634 bp, Homo sapiens
tttgagtgattaatcaagcaatcagttcaagccacaactagcaacttgaaagagtgaatatgcttttctaaatttgataggcccagggaaaatgtatacttaaaatagcatgatggcttttgttttacctgtttgtgtggacctgtaaaacgttttaagatgagagctataaaaggaaaagcaggatggtggtgccacatcacaaagcaattttaatctgctagataccttgagaggaaaccatagtccaagataaaggtaaaatcactagaaaaattgttttcctgatttttgtgtttttgctcttataccttttggttgaatctctccaataagatggaaaaacacttaatagtgctwaataccatattttcttcatctctccaaggtaaacttcagatagaatttcttttttttccctacacaaaactgtccttcatactacctcctttccctgatgttctaatctatacataggccacgttctactctctgatgtagacaagcaagagacttggcaccttgaaatttgaatagaaacccaaagagcccatgttgttgagctgctatttatgtcctgttcatttacatggtagttttgtgatattccttgttgctttcacagaaaggtttc

SEQ ID NO: 269967 - DNA, 573 bp, Homo sapiens
aaggaaatcatttgtgcagttacctttgattcaagcaaatatcagctcttttttccatgtttttctgggcttactcaactgtagaattattggagttatatgcgcatttctgagaagctctgtacttgtctatttagtcagaactaaaaaggaagtgggcattcatagcaacccattttatttatagctctgctgtggcagtttattgtaagtacagtcacttgttagcataagttaaaagctattacactttgattgcaactatcattaggtaaagttatctgaataagcttgggtctccactgacaaatgaaagatgtaaatttctcacacrcttttaatgagtaattagtgcaaacctaccatttgctctgcaaagttcaaggttattttatttactaacatgactaaataaaagatcaatttcagttcaagtaggaaattgattatgattgacaaaagaagactgaagaccttcataaagagtatcaaactattttttcaagctaagctgtagtcattagccatgtacagatatctttcttcagtcacaatcctacttgtgaagttaag

SEQ ID NO: 269968 - DNA, 525 bp, Homo sapiens
aatggggccatttctaacgagtgaggtgacttacttctgctcctgaatagttcctattgcatagaagttgttckgcaccagagcattctctttcacccactgctcctagccctgcaccataaaaccctaccccaaacgctgagtatcctgtccacaggaccctactttggctatatgaagccagctctcctgatcactacagcctcttcaaaactccctagaggtcatacagcagctgttttcaaactttaacgtgcattagaatcacctgaagtatttgttaaatacaaggttccaggctccaccccctcaagcttagaataggtctataggcctgtgagtttgattttttcagtttcccaggtaatcctactgctgctgatgatgatcaggagcaacactttgagaccgtggctctctgtctgtcttctcaagtgagtaggcagtccacttcaggtcgacggggctgaggcaaggaagcttttacagtgttgattgtgttaccttgttagcctggattttgac

SEQ ID NO: 269969 - DNA, 529 bp, Homo sapiens
gagatgtaaagtggcgcataccactaagttgtgaatagtgattgccttgggaaaatgagcttggaaatgggggagacttttattttacgagtttccataaatttttgaaaaatattttacaacaagcctatgttactttagtcattaaaaaccctagttagagacttttatgcaacaaattggagccttttcaaatcctgttccaggatctacattaaaagggaaaaggctcacaataaaaaaaaattgtgtgagatgacggaaatatcaatttgcctgatttaccatttcacaatgcacacatatattaaaagatcacactgtacactataaatatatgcaaatttatttgcatataaatacatttatcatcaaagttttaaaaatggtggtggtgggatggaggtagcatctctgtcctaagtggtgagcatctaggccaggtgtccaagtcagtggggaagagaaaaaygtcttaggctttctggttgatgacattgggaatgtttaccttgggaaagaggagatt

SEQ ID NO: 269970 - DNA, 573 bp, Homo sapiens
tgcatataaatacatttatcatcaaagttttaaaaatggtggtggtgggatggaggtagcatctctgtcctaagtggtgagcatctaggccaggtgtccaagtcagtggggaagagaaaaatgtcttaggctttctggttgatgacattgggaatgtttaycttgggaaagaggagatttgcataagtaccttaaatgtcattctgattgagttttaggatgagtcacagctggaaggaggaggcagaaaagaaagatcttgacactctagatgatgggccaaatgtagcaacatgaattgtgtggggatcaatgccagtatctttcctgaggttttacaaagccacctgcctgcatacagggaggggagtagccctcaagagcaacgctcatcacaacaagcctccagggtcttggttaactccaagaggaagtcaaaaagtcatgcagctgccaagaaaaggtatatgttgtttgacagcattgatagaaatctgtctagtttaattcttaaccactggtattcatcaaaatcacctgacagtctttttaaaaatatgctcaggccccacc

SEQ ID NO: 269971 - DNA, 573 bp, Homo sapiens
tgcatataaatacatttatcatcaaagttttaaaaatggtggtggtgggatggaggtagcatctctgtcctaagtggtgagcatctaggccaggtgtccaagtcagtggggaagagaaaaatgtcttaggctttctggttgatgacattgggaatgtttaccttgggaaagaggagatttgcataagtaccttaaatgtcattctgattgagttttaggatgagtcacagctggaaggaggaggcagaaaagaaagatcttgacactcyagatgatgggccaaatgtagcaacatgaattgtgtggggatcaatgccagtatctttcctgaggttttacaaagccacctgcctgcatacagggaggggagtagccctcaagagcaacgctcatcacaacaagcctccagggtcttggttaactccaagaggaagtcaaaaagtcatgcagctgccaagaaaaggtatatgttgtttgacagcattgatagaaatctgtctagtttaattcttaaccactggtattcatcaaaatcacctgacagtctttttaaaaatatgctcaggccccacc

SEQ ID NO: 269972 - DNA, 582 bp, Homo sapiens
aagaaaaggtatatgttgtttgacagcattgatagaaatctgtctagtttaattcttaaccactggtattcatcaaaatcacctgacagtctttttaaaaatatgctcaggccccacccaaactgactgtattcaaatcttggggagaagggataaggaattagaacatggattttggaatcagctcctccatatgggtctctgaytttaaaaactgacaaaagactcttcaatgttaaaggagctacaatcttaaatttttaatttctgaaatcatgtttaataaaaaacctgtgtttttatttgattattgaagtaatttttggacaatgcagtcttcatgctaagttttctacttactcaaatcagttttaaataaaattgaaatcatgttgaatgcatcattttgtaatgtgatttcatttaatattctgatatggatatttttctatgctctttagcataatgtttaataggcgcataaactctattatagaagatgaccaaaatttactaaatttctattgtcatatatttggatcttttccaaaatgtttcagtattgttgtttttggagatagt

SEQ ID NO: 269973 - DNA, 479 bp, Homo sapiens
tagcctagtaaccacttttaaatctcaattgttttatccacaaatggaattttatactgtctagttcgaagaatgatttggaggactttaataaagtatatgaagcatttagtacagggactgtccattagacagcattgaagaaaaaaaaaaaaaaaawccctggctcactggtttgtctcccacaacagaacaaggacctcgggagggcttagagtatgtcttttatttctatgatccccagttacctggcaaggagtaaattctcagtacaggtgtgttagagtattaacatagaaaaaccaagcccacagccgtaggggctaaacgaaatgaaatgacaggcttctttttttggctcagagagagctttagtgctttgtgcatgtcctcttactatctctctgtacagagaggttctgtttgtttgagcctagtgatgtgaaaagcaatcaaaacgactgtaaaaatctcaatag

SEQ ID NO: 269974 - DNA, 567 bp, Homo sapiens
ggaaacacagaagaatatagacaaaaaagttgttatcccctctttgaccccactcccctctctagagattaccaccatgaacaatttggtgggtctcattctggatcttctctctgtatttagaaataagtatatatatatatatatatatgcacaagttattaactaatatataattttaggatgttaaaatatacattctacgtgctcataagttttatataggcaaggatttttgtctgtggttcactactttatccccactccctaaacagtacctgacatataaatcatcwataaatgtttgctgttttaggggataaattatcctgcagcttgcttttatgatcagcaataggtcttggagatctttccatgatagcccatatagaacctttttaaaggttgcattatgttttttagtatggatattccagaatttgctttaccattttcctgtagatgtaattcaggttgtttccaattttctgctagtataagcaatgctgcaacgaacacccatgaaaatgattctctgtgtacatgtgcaagtgtttcagtaaggtg

SEQ ID NO: 269975 - DNA, 506 bp, Homo sapiens
aggcattgaataatcctccataagcttcaagtgtctaggctcaaattccacttttttcccaaaaagtctccttgactttgttacctctcctgaatccctacattagagactctagttcaaaatttaatgcttgtaatacagcatattggccactaatgtttaatacatatttgtcttgtttcatctctttgtttagcctccctaaaggtagatgtatatctcccttcctacagagtaagctctatcagattaaggacrtgtttgtttcttttattagtctaataccatcacaatgtctcacacattacagacaatgaatagattgttttagaatgagcagttctgatactgcagcatcatttatatctttgatttctatgctacatatactatacttgctggctggtaattaaaatgaaaagcagtttatttttgttttgtataaaaacaaattggagtcaaaatagaactatttgaatggggcagtatctgagtctgattttttg

SEQ ID NO: 269976 - DNA, 608 bp, Homo sapiens
tacattctctgtttgccagaaacttccttaaagcatgacagcagagtgttccccatcacagccccaccttatctgtgcctcttgcctttagctgtgcttggcttcagaagaacaatgtgattttactcatgttgcaaatgaaacaaaatatgctgaacacttacccattttttaatatcatttttcattgcacacaagcatgcccattaatatttctatgcttaagcatataacccacatttctttggcaacctacaattgtactcccaccaaaatataatttagccattcaatttaccaatgagtcacagattaaaaaataggtttttttcttatttacttagcaggatattataattttttaaaaaacaagagttggtgttctttggcccataagaatcattcattaatgtaatgacattaaatatggtggtcatgtcacccttgtcttgcagtataattttcttactcttaytagaataaagatgaactaaagccataatcactctaaatcacattaagcaggtttttttaaaaaattttttctttccataaaaaggtctgtattattcagctcacttacccgttcttctctatgttaaggaaaa

SEQ ID NO: 269977 - DNA, 551 bp, Homo sapiens
ggccaaaacttccaaaatttgattttttagaaaattaatctatacacccaagaagctcaaagaaacccaagcaggataaatacaaatagatccacacttgaacacatcattgtcaaactgttgtatgccaaatccaaagagaaaatcttgaaagcagcaagaagaatagcacgcaccatagaaaggtgagcatccatgcaattaagctggcttctcatctaaaaccatggatgccagaaggaagaagaatagcacatccatactgcaaaaagaaaataatgtcaaacaagaattctgtatctaacaaaactatccttcaaaaatgrgggcaaaataaggacatttttggataaacagagactgagcaaatgtattgctagcagccctgttttaaaagatgtaccaaaggaaggaaggccttccggaaatggtactctatgatagcacaaatccacaggaaaaaatgaagagcactgtaaatgataactatgttagtataaaagattccataaaatatattttttctcctttttcccaatttctttaaaaga

SEQ ID NO: 269978 - DNA, 399 bp, Homo sapiens
accttttgtttctcaatttgaaagtaaagctgaccgaatgcttctctcatgctgtaatattttactgtgtatttcctacaaaggaggatgttctacatagtcataatacgagaatcaaatcggtaaattagcactgacaggttactgccaactaattctcagcccttatttaagtttcatcagaggtcctgataatttcctttatagcagagctacccagttcagaatgatgcattgcctttagttgtcacacttctttagtttttttcagtctggaagagttatttggtctttgcgggacttccacgaccttgacacttctgaagattacagaccagctgtttcayagtctgtcaatttaggtttgttctttgtttccttatggttagatttagttta

SEQ ID NO: 269979 - DNA, 507 bp, Homo sapiens
caggtgtcaatagtgaggtttctacaaataaaaccaacatggaaaactacaaaagcagcattccagagtagaggaaagaaaaccagtttgggaatcaggcaagtgtgtgattcatatgccagtaactttacagttatgtaaacattatcttgggccaaatagtcacgtcagactcagtttccatatcagaaaattggagataagaacacctacttcacagggttgtcataaagctaatatatgtgaagcaccatgtaacagttggtaatgagtgatttttaagtctctgatacctgttttcccttctagacgatggtagaaacttccrgaatgggtaaattatgcctaagggcaactactatcttccctccggctttttcgaaaggtaaactaaaattcagccatatagacaggtcaatgggctcaagttgcaattatcagtgggtccactctgacaattttaagggggactctttcatggaacttcagagaccaggaaagaaccag

SEQ ID NO: 269980 - DNA, 536 bp, Homo sapiens
taacagtgctgggaggtggggcttaatggtaagtgtttaggtcatgagggctccactctcatgaatggattaatgccaattataaaagggtttcaggctgcaagttcaatctcttgctctatcaagcaaagctctctcacgccyttccatcttctgctgggataatgcagcaagaaggcccttttgagattcaggtcccttaaccttggacttcccagcctccaggtgagctctaagacataaatctctgggccgggtgtggtcgttcacgcctgtaaccccagcaatttgggagcccaaggcaggtggatcacctgaggtcaggaatttgagactagcctgaccaacacagtgaaatcccatctctactaaaaacacaaaattagccaggtgtggtggtgcatgtctgtaatcccagctacctgggaggctaaggcaggagagtcgcttgaacctaggaggcagaggttgaagagagccaaaatggtgcagcctgggcaacaagagtaaaactccaactcaaaaaaaaaaaaaga

SEQ ID NO: 269981 - DNA, 653 bp, Homo sapiens
gcatccagctggaggaacacaccccacccaaagcaggcacctgggactgagctgcagctccagccggtctctgccaggcaggaatgtaggcccagtggtgccaatcttctctgattttttttttttcaagagaagcagaaaagaacaaattttgttttttgatgtgcaggttctcaatttttaaacattggcaatgagttcaaatgggttttgaaatactatgtgggccaagcaaaatatatctgttagccagatttgactcacaggccactggtttgcaattttctgaagttttggtaccgtaataaaagcaatgggtcctgcctggattcaaacaccagttctcccatctgctggctgggcaaccttgggcaagtcctctagcctctccaggcctcagttgctccatctgtaaaatggggataatagtagtgtctacttgatatgatatttgagaaaacttcatgaaatcatgtcatggaaattccttgatatctctctctctctctggaaatgttagctttattactaatgcaccctctgcaggctccctgggggratggaagataaaaacagcggcaacgggcaaaaacggaggtgaggaaaatggaccaagcaggcagaacagagccaaaccagaaaacgccggccaa

SEQ ID NO: 269982 - DNA, 555 bp, Homo sapiens
gtttacattcccaccagcagtgtagaagtgttccctgttcatcatatccatgccagcatctactgttttttgatttttttattatggccattcttgcaggaggtggtatcacaatgtggttttgatttgcatttctctgatcattttatcatgtttgtcgggcattttttcctgtgttgagcattttttcatatgtgtattgactattttgtatatcttcttttgagaattgtctgttcatgttcttagcccactttttgatgggattgtttgtttttttcttgttgatttgtttgagttcattgtgtttgtttttttcttgttgatttgtttgagttcattgtagattctggatattagtcctttgtcagatgtatagattgtgaagattttctcccactctgtgggctgtttactctgctaactgttccttgtgctgtgcaaaagctctttagtttaattaggtcccagctatttatctttgtttttgtagtatttgcttttggttcttggttatgaaatccttgcctragccaatgtctagaagggtttttc

SEQ ID NO: 269983 - DNA, 571 bp, Homo sapiens
cttaaccaacttaagggaacaaagtattttcatgcattttagttgggtgtttctattgcctttatacagtggggttaagacttataattattcttatcattgaaggaagtcctgaaggatctgcatcaaacagtgaaactaccaactcattatgtgtacttgtgggtaatctgtggatatgttgtaattcaaacttttctagcaaatttaaactataatgtgtctcaaccagcccaaattaatgaggctttggagtatgaccattgaatctaattactaacaagacctaaatgaagtgcaaagcaaaactgactttggctttgaattccaggtctgcgctggctgtatracctcgggcaagtcattttttttctctagtataaaatgagattctgatatgtaggttacagggctgttttgagaagtaaatgagattacttatataaagtgtcagtacagagacagtcacataaataggaggcattcaataaaggaagccattagtagtagtacaaaagatgtctcattctataaataatggatgtatttcaaaaatgttgccagtaaacac

SEQ ID NO: 269984 - DNA, 488 bp, Homo sapiens
atatttactcagagctgtaattataattactttgtatatatggacatggttaatgataatgacatcctgtattttcatagtaccttcccatttacagtcgactttcactgacatgaattaggcatcctaataacccgctgagtttggattattagccccttgtcacaaatggggaaaatgagggccagaggggttggttatgtggcctgtcctacgttacacatccaggacatggaggtgcaggattggaaccacatcacctaatccaaagtagtgctttttattttctaccatgcttaytcttctaagtcttgtccatgctgtctgctctctcttccacattcaattaaaaaatccctcaagggcacctctaactgtgtaacaaaggaaaaccacctaatcatctcctcccagctcttttgtttatgcttttgaccaactccaatttgttctccagacaatagccgaagtcatcatgatagtcaatc

SEQ ID NO: 269985 - DNA, 534 bp, Homo sapiens
agaatgacttaaataatagcagggagagggcaggtctagtcaaagaacaagtttyaggggagggtgcagcctaggagagggcaggtttccaaggggctggcaggacccagccaaggtggtgggtagctcccctctttccaaaagctgaagtggttcctaaaagccctggattacaaggcagaggacagcattcaggtggggagaatgtgttaaaaggatctcaagtacactcaagggatgtttgtttttgattagaagatgaggattaactggattaatggagcctcatgaatggagaatgtgcagatgctaattgcccctaaattacagtggattccattggaattgtgtattcctctccacaaacccaaccactgcctgcctgctctctccttccctccctccccacacaatgctaaaatgaatgtgtcattgtaactgagatgaaaggccttgaaattgattttctacttccttccaagatctcttgtttgcaaaacacaggaagatgtaagttactaatcgagttccagt

SEQ ID NO: 269986 - DNA, 534 bp, Homo sapiens
agaatgacttaaataatagcagggagagggcaggtctagtcaaagaacaagtttcaggggagggtgcagcctaggagagggcaggtttccaaggggctggcaggacccagccaaggtggtgggtagctccccyctttccaaaagctgaagtggttcctaaaagccctggattacaaggcagaggacagcattcaggtggggagaatgtgttaaaaggatctcaagtacactcaagggatgtttgtttttgattagaagatgaggattaactggattaatggagcctcatgaatggagaatgtgcagatgctaattgcccctaaattacagtggattccattggaattgtgtattcctctccacaaacccaaccactgcctgcctgctctctccttccctccctccccacacaatgctaaaatgaatgtgtcattgtaactgagatgaaaggccttgaaattgattttctacttccttccaagatctcttgtttgcaaaacacaggaagatgtaagttactaatcgagttccagt

SEQ ID NO: 269987 - DNA, 566 bp, Homo sapiens
agccttcttacaatttcatttttaatattaaaattaggctgtggcatttcccttcgaacagaaggaagtcacaggtgcccatttctgatkcagttctcagaatatcctaatctcctctcctgctgaacagtctctgccagggagtcaccacacccaggagcttaagagtcattttcataaattccccatctatgaaattgctgtggacagttaataaacccagagtcaaaggctaatggatgccagcaagagcatggggagaggagacaggctggtgattgggggatttgggaaattagccactcaccttttaagcatcctgggaaatcgcaggtggctatagctatgctagggccaagccaggtataaaggcggaactaggggagagttcaggctggtagtaacagataatacaaagtgcaggccctgggagccttatttattattttccatcagccaagtgaaggcaatttttagatttagacttttttttgatgaactatcaccatggtgatggaattggaaattcttttcctgacaacattgctgttaaaccatttgtttaa

SEQ ID NO: 269988 - DNA, 566 bp, Homo sapiens
agccttcttacaatttcatttttaatattaaaattaggctgtggcatttcccttcgaacagaaggaagtcacaggtgcccatttctgatgcagttctcagaatatcctaatctcctctcctgctgaacagtctctgccagggagtcrccacacccaggagcttaagagtcattttcataaattccccatctatgaaattgctgtggacagttaataaacccagagtcaaaggctaatggatgccagcaagagcatggggagaggagacaggctggtgattgggggatttgggaaattagccactcaccttttaagcatcctgggaaatcgcaggtggctatagctatgctagggccaagccaggtataaaggcggaactaggggagagttcaggctggtagtaacagataatacaaagtgcaggccctgggagccttatttattattttccatcagccaagtgaaggcaatttttagatttagacttttttttgatgaactatcaccatggtgatggaattggaaattcttttcctgacaacattgctgttaaaccatttgtttaa

SEQ ID NO: 269989 - DNA, 566 bp, Homo sapiens
agccttcttacaatttcatttttaatattaaaattaggctgtggcatttcccttcgaacagaaggaagtcacaggtgcccatttctgatgcagttctcagaatatcctaatctcctctcctgctgaacagtctctgccagggagtcaccacacccaggagcttaagagtcattttcataaatkccccatctatgaaattgctgtggacagttaataaacccagagtcaaaggctaatggatgccagcaagagcatggggagaggagacaggctggtgattgggggatttgggaaattagccactcaccttttaagcatcctgggaaatcgcaggtggctatagctatgctagggccaagccaggtataaaggcggaactaggggagagttcaggctggtagtaacagataatacaaagtgcaggccctgggagccttatttattattttccatcagccaagtgaaggcaatttttagatttagacttttttttgatgaactatcaccatggtgatggaattggaaattcttttcctgacaacattgctgttaaaccatttgtttaa

SEQ ID NO: 269990 - DNA, 349 bp, Homo sapiens
tcttagtgaaatggtgatatattttttttcttattacctgttcaccttttgcccattttcttgtggaacaaagcagggctgtaagctggggtgggtgtgtcctttttgggtgtacttaacatgtttgagcttagagcgctcactctcttgtttcttggcttggcttttgctcccctcgggaggatgtcagggcacacactggacaatgccaccacttgttytcacgcagagtttcatctaaaaccatgaggggcctgaaacttcttcctgcctttgcttgttaccccccgcaaaaaccatcacatttagtaagatgcttttaggtgtgagaaacacacatctctggctc

SEQ ID NO: 269991 - DNA, 536 bp, Homo sapiens
gtaagcctaactcttcttttaccttcaaggaagctatcaaaatacaagggaatgtgagtgatcatacaagtctccctaatttattcttttaatgaattaacttgggactctaacttataactagcaacttgtgctrtggtgcaacccacaatttaacgcaaagcaaagggcagagagtcaagacttcaaactaggctgtgacccggaaggcagtttggcttctttcaggcattccatcacttgcttcccgcctctgcaaaggtcgacccccaggtctgagaagggacagtgtttgcactggcaagagagatctgcagtcttgtggaatgagttgacccagctggaagatcccaattctgagtgccatgtcacttcctttctccttcccaggatgcagctaaaagttctccctttgctgtctatgaaagatgtagccctgtacaaggcttccttcctgttgcccagcaacccagagtgggggaggcaaattggcctggagactcggggcgtgactagttgtcaatgcagggtgctaa

SEQ ID NO: 269992 - DNA, 536 bp, Homo sapiens
gtaagcctaactcttcttttaccttcaaggaagctatcaaaatacaagggaatgtgagtgatcatacaagtctccctaatttattcttttaatgaattaacttgggactctaacttataactagcaacttgtgctgtggtgcaacccacaatttaaygcaaagcaaagggcagagagtcaagacttcaaactaggctgtgacccggaaggcagtttggcttctttcaggcattccatcacttgcttcccgcctctgcaaaggtcgacccccaggtctgagaagggacagtgtttgcactggcaagagagatctgcagtcttgtggaatgagttgacccagctggaagatcccaattctgagtgccatgtcacttcctttctccttcccaggatgcagctaaaagttctccctttgctgtctatgaaagatgtagccctgtacaaggcttccttcctgttgcccagcaacccagagtgggggaggcaaattggcctggagactcggggcgtgactagttgtcaatgcagggtgctaa

SEQ ID NO: 269993 - DNA, 539 bp, Homo sapiens
gctggctgcaatttgtcctgctcctttcagccctgctgccagcgaggccttgcctaagtgttatgaatgttcctcaggctgccaaggtggctgctttcctttccttaagagcttcctttggtgagagcagctagcatttccaagtcttgtwtctttctagccccatttcatgccatgctctttttagctctttcgttaacatttccgtattagggaccttcagtgcctgatgtgagctgggcattgggaaggagtcgaaggggatgtcccaggagagtccagagtggggataggtggggaagtcaactatctggaatcacagatgataacatgcgaagcagcctgatctccctatctcaaagtaaaggccatagatgtctaacttaaaggtctgtctatgccacgaatttgcctgacctctttccagggcaaagtgattttaactgaagatccataatgacttttaaaggcggactacaggacaagtcacacaaagtgctgagttacttgaggatttaaagcagttgctttcaagaata

SEQ ID NO: 269994 - DNA, 555 bp, Homo sapiens
atgtgacatttggcatcatttctcactaatgacatctttctgagagccttgcagagattgtctgctgactcacccaagttacggtcacccagagacacagctrtgtgggatctgagaagcgaattagcaggttgttggtctctaaaggtgcaggggaggacatggatgtagaaggggagtttcaagaggaggaaaaccatcttctagtttaatagctttcaaggaccatgtgcacttgctttgtgctctaagataattgcttcctcctaattaacctttcctggtttctcttttaaaaaaaaattgtaattttggctcatattgaaatgttaccttgggtgcagagaggtcaagctgccttggttcaaatcccagcccgaccagctgtgtgacctcacacaaattacttaatctctgaactccagtttcttcatcagttcaatgcaaataatgacagcacataaatacattcatcatgaggtagttggaggggttatgtgagaaaatgtgctcaagtgtttgctgcagtacctggaaaatagtaagggcttagtg

SEQ ID NO: 269995 - DNA, 495 bp, Homo sapiens
tcaaaacaaattctattaggtgacccgaaggctgaaaggttgactgtgtttaactggattattttacattttctcagtttgtgctttatttatacgcagtaagtttcactcaatccacctgrcttcttaccttttgtccagcttgaaaaatgaaatgagtttgggctttggcactatgtgtttcataggctcctaatctctctttgtatgttttgttggccaataatacgtaaaactatgccccaggctttcttgaagtgcatgtaaatatctgcctctctcttatctcccatggtagtaattcatccaggaaacttacttccaacaggttaggtattaaactctccctcacataaatccacattggatgtctctgatcaaattataattttcaaagtattccatcactatgtccagttaaatcgttcctaatattttcccatgactgggtgactttttaaaaaatcttgattgtgctacagaagtgttttccca

SEQ ID NO: 269996 - DNA, 599 bp, Homo sapiens
acctttgccttgtgtggtgaaagcagccatagacactctgtaaagaaatgagcatgaggttaggcacagtgcctcatgcctgtaatcccagcactttgggaggccaaggcaggcagaatgcttgaagtcaggagttcaagaccagcctggccaacgtggagaaaccttgtctctactaaaaatacaaaaatcagctgggtgtgatggtgcatgcctgtaatcccagctactcaggaggctgaggcaggagaatygcttgaacccaggagatggaggttgcagtaggccaggattgcaccattgcactccagcctggccaaacagtgagtgagactccatttcgaaaagaaaagaaataagcatgagtgactgcattccagtaaaactttatttacaaaaacagggagtgggatcagattggccccgtaggccatagttcgccaacccctcgccaaatgaaataaagaagcaaaaagcaaaagtaagtaagaaactaaatgtaataatgaccatgtatgatcattgccataaaagaaacaaatggggtgctgagatggacagtttcggggagacttgctttggatggagtgatggggaag

SEQ ID NO: 269997 - DNA, 599 bp, Homo sapiens
acctttgccttgtgtggtgaaagcagccatagacactctgtaaagaaatgagcatgaggttaggcacagtgcctcatgcctgtaatcccagcactttgggaggccaaggcaggcagaatgcttgaagtcaggagttcaagaccagcctggccaacgtggagaaaccttgtctctactaaaaatacaaaaatcagctgggtgtgatggtgcatgcctgtaatcccagctactcaggaggctgaggcaggagaattgcttgaacccaggagatggaggttgcagtaggccaggattgcaccattgcactccagcctggccaaacagtgagtgagactccatttcgaaaagaaaagaaataagcatgagtgactgcattccagtaaaactttatttacaaaaacagggagtgggatcagattggccccgtaggccatagytcgccaacccctcgccaaatgaaataaagaagcaaaaagcaaaagtaagtaagaaactaaatgtaataatgaccatgtatgatcattgccataaaagaaacaaatggggtgctgagatggacagtttcggggagacttgctttggatggagtgatggggaag

SEQ ID NO: 269998 - DNA, 559 bp, Homo sapiens
attcattaatatgcatttggctcattgtggggtgcatgccaatagggactgactacgcaacagttcagattttggtaaatgggggtaggggagaaagagggtggggattggatctgaatagacaggtgaagatgacagattcccgggattgcaatgaggcttgggggcctcaaggactgaggcaggaggatcactccctcttcctaagcagtagcaccaatgcatgtggtggaggttccatgcgcagascctcccttatgcccatcaaaataaaacaaatcctcaccagaggagccaagagtagacctaatcagcagacactgatcctgccaacactccctgacttccattattgtagatagagctgaatgggttatccaggactccaagcactgctgcccccatccctcctgccctttactataataaccataagtcttaatttcttctttgatcaataactccatgtctgaattctaaaatacagcatctgctctcatattcctctgataaatggtttgaattaatgtaaagcacattattcttagagtcttggctt

SEQ ID NO: 269999 - DNA, 579 bp, Homo sapiens
agcttagactttgaagtcgtataattccctttataaaatgaatattaaacatagtaatattgtgttggttagatgatattgaaacatgtgaagaatttagtatattgtctataaatatttaataaatggtagtgatgatggaaagagaaagcagggtctaggtttgggaacataaatgagaaaattattatgtgaaccctttgaatttttaggtggtttctttcccattatgttaacaaccctgcattgggttggtgtggttaccaatttgtaaaatttggggatggattaggacatttctagcaagcttagctttaaaagcacagctgattccattgagcaaaggaagaaagtccctggagtaggtttctgccttgggcatctgtacttgcatgtatgtgtaggtttatatgtgtgggtatatagctggtcatcattaggcatagattccatatttgtgagttaatctactcattagaatttatttgtaacctcctaaatcccccaaatcaatacttgagktgctttcacagtgtttttatggtcatttgtagacatgcatgtgcacaaagcagtgga

SEQ ID NO: 270000 - DNA, 452 bp, Homo sapiens
gggtttgtctttatcagcagtgtaaaawtggactagtacatcagccttatagactctccacataaaatggaataaagaccttttggggcaaatgacatgcctcaggcatgtctaagcaaagtctaagctttgaatatttgttcgcttatctacaagctgtgtgacattgggcatgttacttaaccttaacctacataagcttgtgagcctgggttttctcatctgagaaatgggggaaataactatactttccccataatgaggttttcaagattatatataaagtatttagcatactctctggcatacaggcatgttaaagaaaaaaattattcatgacatttgttaaagcagtaaagcagactttattcaggactatcaacataggttatagggactactgtgatggggttttgtagtagaagagagagattgaaatgcaacaagggaaa

SEQ ID NO: 270001 - DNA, 452 bp, Homo sapiens
gggtttgtctttatcagcagtgtaaaaatggactagtacatcagccttatagactctccacataaaatggaataaagaycttttggggcaaatgacatgcctcaggcatgtctaagcaaagtctaagctttgaatatttgttcgcttatctacaagctgtgtgacattgggcatgttacttaaccttaacctacataagcttgtgagcctgggttttctcatctgagaaatgggggaaataactatactttccccataatgaggttttcaagattatatataaagtatttagcatactctctggcatacaggcatgttaaagaaaaaaattattcatgacatttgttaaagcagtaaagcagactttattcaggactatcaacataggttatagggactactgtgatggggttttgtagtagaagagagagattgaaatgcaacaagggaaa

SEQ ID NO: 270002 - DNA, 607 bp, Homo sapiens
atatttaaggttaataaaattctcactagaaaaaaataattcaattttagacaggctctcttgtaagtcagaatgcccttgtactcttctcctaactgttgattggtaagaaaatgaaacattattttctttaatttaaatgtaattcctttgcaaaagactgtgcagggctgggcaggaagggtgaaaaaaatacttagatagggagtatgggatcttttgtggatgtgctgtgtatattttcaagaatatttcttgtgtacatgacactcctaacaggtgggagaggagacacttactgcggagatcattggtgcaatggtggagccctctggtctaacataattttattgcaaagttcgatacataaaaakataaagagaaaaagtactctagtttccctgcctccttgcttcctgtcattcttaggagtgatcttgaagtagttccagggaagtatcaagaatatatatatttatatattcctaatatatatattatataatatattatatatatgtattatacatacatatattcacttgaaatgttcctcttggcttccaaaataccgctctcatctgatgtccccagaacatcctggata

SEQ ID NO: 270003 - DNA, 561 bp, Homo sapiens
gttgctacctgtgccttgggtttcttttatttttctggcaaacatccacctttcttcaatactcagataacatgtgtcgccttctccaatgactgttgggcttcattcataaaaatttgtcatttcttcctctgagctcccatggagtattgaatcaaagcatcgtggttaatagaagtttcttattatgtgcgtctcaataattgtttgatttgtctgccttgctccagaatataaaattcttgagagtaggccttatcttatctattcgtgtgtttttctttctggaacataatagctgttccatgcatgtttggctgagcacwgaatgctgagatgtgacttgtggttgtttgtatgacgctggggttggtttctctgtcctcagaactcttaatatagaaagtggttaagaatgagacctgaggtgctaggctgcttagattcagtcacagcttgactggttgtcaagtgtgtgatcttggagaagtgacaaaggttttctggactttgtcttatctgtaaaaattgtgttattaatagaaaatcccttcccttctc

SEQ ID NO: 270004 - DNA, 572 bp, Homo sapiens
tatttcatatatataatttctctcttcaggccttggccatgctgtctacagcacctagattacactttctcctccaccatcctgatccagtctctaacatttgacttaaaaaamcgctattgaagaaagcctttccccatccctctgctagatatgcctgttcacatctccaaaacctggtaacatattttaatggaatttattgtacttggtagtgattgagagtttattacattttaaaaatccagtttgtcagtatccacaatatatctggcattgtactagccatcatggacacaaagcagaacaaggcaaacattgctgtcctcatggaacttatacatcagttgggggacggttttcccacctcttgtcctagatcattttcttttttaggggcacaggtgtcctgtgcttctgggtatcccctaagctatattaagttatggtgagcaaagtggaaggcaatgcagtggtttttggtccatataggatgcaccagaacatagtgctgtccttgtggcaccccactcttaagagataacgacatgttatagcacatacagaggaca

SEQ ID NO: 270005 - DNA, 572 bp, Homo sapiens
tatttcatatatataatttctctcttcaggccttggccatgctgtctacagcacctagattacactttctcctccaccatcctgatccagtctctaacatttgacttaaaaaaccgctattgaagaaagcctttccccatccctctgctagatatgcctgttcacatctccaaaacctggtaacatattttaatggaatttattgtacttggtagtgattgagagtttattacattttaaaaatccagtttgtcagtatccacaatatatctggcattgtactagccatcatggacacaaagcagaacaaggcaaacattgctgtcctcatggaacttatacatcagttgggggayggttttcccacctcttgtcctagatcattttcttttttaggggcacaggtgtcctgtgcttctgggtatcccctaagctatattaagttatggtgagcaaagtggaaggcaatgcagtggtttttggtccatataggatgcaccagaacatagtgctgtccttgtggcaccccactcttaagagataacgacatgttatagcacatacagaggaca

SEQ ID NO: 270006 - DNA, 633 bp, Homo sapiens
ttatttgcagactgaaaagtaaatggtagcagcagactgggcaagaagaccagaatttgaagtaccactgacccaacagatttagacaaacccagaatctcacgtatttagatattttaaatgtccaggatacaaccccaaatttctcagcatacaatacaaaatcactcagcctaaaaagaagcagaagaaaaactccctgaggaaagatattcaacagatgcctaaactgagatcctatagatgtaggaattattaacagagtttttatggtaatcaatgtaaaaagactccaagaagtatgggtgttctgtcactgacggcaagaagkaaaaagagaaaaggaaagtaagagtgaatatacttttaggaataatagaaaaatagaaagtcttagcaaataaatagagttattaagaagaatcaaaaggaaattttagaactaaaaagtataataagtgaaataaaaactcactaggtgaaatcaatagcagaatggagatgagatgataagaaagagccagtgaacttcaagatagatcaatagaaattatctgatctggacaatagaggagaaaaaaagattagaaaaaaaaatgaacggagcttcagagacctgtaagataatgccca

SEQ ID NO: 270007 - DNA, 633 bp, Homo sapiens
ttatttgcagactgaaaagtaaatggtagcagcagactgggcaagaagaccagaatttgaagtaccactgacccaacagatttagacaaacccagaatctcacgtatttagatattttaaatgtccaggatacaaccccaaatttctcagcatacaatacaaaatcactcagcctaaaaagaagcagaagaaaaactccctgaggaaagatattcaacagatgcctaaactgagatcctatagatgtaggaattattaacagagtttttatggtaatcaatgtaaaaagactccaagaagtatgggtgttctgtcactgacggcaagaagtaaaaagagaaaaggaaagtaagagtgaatatacttttaggaataatagaaaaatagaaagtcttagcaaataaatagagttattaagaagaaycaaaaggaaattttagaactaaaaagtataataagtgaaataaaaactcactaggtgaaatcaatagcagaatggagatgagatgataagaaagagccagtgaacttcaagatagatcaatagaaattatctgatctggacaatagaggagaaaaaaagattagaaaaaaaaatgaacggagcttcagagacctgtaagataatgccca

SEQ ID NO: 270008 - DNA, 601 bp, Homo sapiens
aactacttgggaggctgtagtgggaggatcacctgagccccagagktggaggctgcagtgaaccaagatagcaccactgcactccagcctgggcatcagagtgacatcctgttggaaagaaaagaaaagaaaaaagaagacaggagaggagaggagagggaaaaaagaggaagaaagaagaaagagagagagaaagaaagaccacatgattatatggatcttagatctaaatataaaaccataaggctttggaagaaaacattgaagaaaatctttgttacctggggtttagcaaagagttcacagacatgacataagaagtataatcaaagaaaaaaataaattggactttatcaaaattaaaagcttggctttgtgaaagacattattaacagaatgaaaaaaatcaccccactggctaggagaaaatatgtgcaaatacaaagaactcttgtccaaaatatataaagatatctcaaaactccacagtaaggacaagcaagttaatttaaatgggaaaaagacctgaacacacatttgaccaaagaggatatgtagacagcaaataagcacatgagttgttattgaaatgtaaattaaa

SEQ ID NO: 270009 - DNA, 580 bp, Homo sapiens
aactatcacctggaaggtttgttcaggcagaaatccggggcagctgtaggcccaactcatccagtttgcttcttttgggtattatacgcttgttggcaatgtgtaaaaaaagttttycacgtatgtatttcggtttcctttgtttacagtgagagggcacgtctagtatcagttactccaatatgacgatcagcagaattccatgtgtctttgtattatgtgaaatactgtattagatgtaagaatgctaaatgatgtcatgcattttcaattgacttttgaactagcttcagcaaattttcactttgtaactccagttcttaatgtctctatttattagaaactgattatctagcaacataaacaaaatattctattttttgaaagatgtactcataggaaaatgaatccattacagatgatgagtttacatttatataataaagtttatcaaaatgtatttttcttaatctggtcttgcagcaagtttgctaattaattctctatgttaaagaacctacataagaaaatggggttactatagcagttgagatctggtttgtgtgacaaagggaattgg

SEQ ID NO: 270010 - DNA, 580 bp, Homo sapiens
aactatcacctggaaggtttgttcaggcagaaatccggggcagctgtaggcccaactcatccagtttgcttcttttgggtattatacgcttgttggcaatgtgtaaaaaaagttttccacgtatgtatttcggtttcctttgtttacagtgagagggcacgtctagtatcagttactccaatatgacgatcagcagaattccatgtgtctttgtattatgtgaaatactgtattagatgtaagaatgctaaatgatgtcatgcattttcaattgacttttgaactagcttcagcaaattttcactttgtaactccagttcttaatgtctctatttattagaaactgattatctagcaacataaacaaaatattctattttttgaaagatgtactcataggaaaatgaatccattacagatgatgagtttacatttatataataaagtttatcaaaatrtatttttcttaatctggtcttgcagcaagtttgctaattaattctctatgttaaagaacctacataagaaaatggggttactatagcagttgagatctggtttgtgtgacaaagggaattgg

SEQ ID NO: 270011 - DNA, 471 bp, Homo sapiens
tttttgactgttttttatcctgattctcaatataatggaatggaatttatattttaaagaagcaacataggaastgtgtgtgaatgtgtgtttatagttgtcagttcacgtattaagaaaacccatgactcaagaaagattgtaataagccaccttaaaaggtaccattcccttgattttagctgttccaaaggcattgactaatttaaaatgtttgtactatgtttgtcatattccataaacaaagattatgccctctggatcactctgtcttttgaaaattaacgtaattggaaatttaaagaaatattttaaaggaaagaccactaagatcgtgatatatgtatatatataattttcttttatcttttcatagattattttcaatctgtcagtacacacaatgtccacgggagaattatttacctgtttctaaagtctatttatgcatctttcaggaacaagcaaata

SEQ ID NO: 270012 - DNA, 471 bp, Homo sapiens
tttttgactgttttttatcctgattctcaatataatggaatggaatttatattttaaagaagcaacataggaactgtgtgtgawtgtgtgtttatagttgtcagttcacgtattaagaaaacccatgactcaagaaagattgtaataagccaccttaaaaggtaccattcccttgattttagctgttccaaaggcattgactaatttaaaatgtttgtactatgtttgtcatattccataaacaaagattatgccctctggatcactctgtcttttgaaaattaacgtaattggaaatttaaagaaatattttaaaggaaagaccactaagatcgtgatatatgtatatatataattttcttttatcttttcatagattattttcaatctgtcagtacacacaatgtccacgggagaattatttacctgtttctaaagtctatttatgcatctttcaggaacaagcaaata

SEQ ID NO: 270013 - DNA, 609 bp, Homo sapiens
ataggaaccttcaatatagagcatgcatataaatagtgagaggaaaaagcagtaagagaaagcagaaagagtacatttgagggttatgagagaaatatatagtgcatgtgcacacacacacacacatggctttggtctcattaagtattccctacccccaatgcatgtgctaaacataactttggaaaatgagtcaaggatatttctaatgtggggttttaatcaatagccaatgtatcaatgaagtgtcatagtagtcattagtaatatcaatctctctggccttgctaagcttggtatgcaaggtctgtattttgggtttatacatcaggtaattgttctataatttgtacattctgtgtaacaaactgtttcttycttctcatatcccacttataaaagaagtgacacatgtgttaccatcaaagatttgaaacaaatagtgcagtaagttttaagtcattttttcctctttatagctcaatactagggagatattaaaactagagtgataagagtactaggtggtctgggagagcaaatgtgccaccatggaagtatttcatgagaagtgaaaatctgatctttcatagaggagatcatagagtt

SEQ ID NO: 270014 - DNA, 493 bp, Homo sapiens
aactagtgattacattacagggatgctcgtctccaactctgatggtgatagaaagtcttcctagcagtaaatgtattggcaagtcactcaatcactctgaatttcagtttccttgcctggaaacaggagacaaccagtttacctcaaaggatgactataagagttaaaggacctgaaggatataacatacctgctagaggaatcagtgcttcaaagatacacaaaatgtgggccaggcgtggtcactcacgcctgtaatcccagcactttgggaggccgaggcaggtgkatgatgaggtcaggcgttcaagaccagcctggtcaacatagtgaaaccccatctctactaaaaatacaaaaaattagccaggcatggtggtggacacctgtaatcccagctattagggaggctgagttaggagaatcgctgaacctggaaggtggaggttgcagtgagctgagatggcgccattgcactccaacctgggcaaca

SEQ ID NO: 270015 - DNA, 537 bp, Homo sapiens
aaccttaacttgaatgactgtaattgacctttgaagtttagatctaaaaacacagtctttgttatattctctttttgtgaatattttctctaatttccagattatgcatttgcctgctccatgtcccagcttttaaatatgctcacatttcatgatgacttcccaattcttttttgtgcaatagtaaaaaggcaagcttcattttatttttttattttctgtgcagaggctatacatccaaaatttctctagtattcacacagtgttctctcatatctcaaggctctcttaggagtttcctaacatgtttttcatctatttattagatatgtaagtaatttttgtggatgtcatcattttctttttatagcraatttcaggtttatgtaagttgtattctagtgtgttaacttatatttggtggtattccatagttttaggaagcaatcaataaaggcagatttagttataaaacttatatatgatattgttttcaccttttcttctacctgtttcattcatgtggtatagctctaa

SEQ ID NO: 270016 - DNA, 519 bp, Homo sapiens
taaaaaccactcagcatagtttaccatgtgccaaacattgttctaagaactttatatgcatgttctcattttactctcacaaagggaaagtgtatctgcccagtgaaatcatggaatcacgggagatgaaatagtacgttagcagggttttctgtctatttcatagtaagaataatgtctgattccaaatgtgctcatgtactaatccccaaagatgtctgtgtcttaatccttggaaactgtgaatatgttggattacatggcaaagaggaattaaggctgctaatcagctgaccttaaaatagggagrgtatcctaggtcgtgcaggtggccccaaagtaatcccaaagctgcttaaagttgggggagggcagaagaagagagagtcagaagaagatgttattatgcataagtggtcataacaatgcagcactcctggctttgaagatgaagaaagggggtcatgagctgcagaatgtcagcagcctctagaacgtagaaaaagaaaggcaatgaat

SEQ ID NO: 270017 - DNA, 631 bp, Homo sapiens
tacccgcctccaagtgataggaaagaacagccaagtttgaatgcacactgatgtttcaggaccatggacagtagcatcggttgcccaggaaagtacaaatggtatatcattattttaaaagttattttattttaaaagtcatttataaatttgtctattttctttgagcctctttctttacacatgacctgctctcccaaaccaaccctctctggtttcaaataccccattactaattgatcaattgttcaaagacattcggcragggcatgctggctcacgcctgtaattccaggacattgggaggccgaggtgggcagatcacgtgggcaggagatcgagaccatcctcgccaacatggtgaaaccctgtctctactgaaaatacagaagttatctgggcgtggtggcgtgcacctgtaatctcagctactcgggaaggctgatggcaggagactcacttgaacccgggaggtggaggttgcagtgagccgagatcgcgccactgcactccagcctggtgacagagcgagactccatcataaataaataaataaataataaatgaataaataaaatcattggcaccacgtattatttatcccttaatattttgatttgactccttctca

SEQ ID NO: 270018 - DNA, 516 bp, Homo sapiens
ataaaaataaaatactcatacagtagttgtgaagattaaagaatataatggttgtaaaatcttaacatagtatctggcacctgagaaaataatgatagcattttctacttttcytcttttaattatgacaaggaagacgatgatgtatatgaaaagaagaaacatcaagaaaggcatattcttgaacattcatggtggttgtctctgggggtgagataatgagtcttttttttctcttttttatccctacctttcttgtttctctgcattgctcatttttctacggtgaacatggtggggataaggcataaaagtctgttagaagccaagtgttacagttcagaggaaagcgagcctatttccagctgtgggtgattaactgaaagttactagataggtaggatttctctaggtggaaatggagggagatgattgcagataaaggggatggggcaaagtttcaaagcagaaacactgtctgtaacacaggaaagtaagcaggcctgatgcgctgca

SEQ ID NO: 270019 - DNA, 588 bp, Homo sapiens
ctctttttctttatttctgtaaaacacagataatattacataaggaatatgtacaaagactttggcatacaggaagtgcttaatgaatggttaaggttgttactgttattccctttctacctagtctgttttttctcccgggacttgaccattggttattacaatcttatgctgcaaaacattttgtgaatcatcatcactggaaaagaatatctctattcatttttctctctagtttccaaattactgaatttgacagcaaaattcccataactgtattgatgacttgtagttcagattgatgttatcaarcctcacaattgttatttaccaaatcttttcctcactgctaattgactgtccaccccatttattggagtctctttttcttttatattaaccacaaaaatccctaaatgccctcgttcaagttcaataaatgatctaatctcccattttactaatgtatcaggatgttaaattcgactcttcctgttgtcttgaattttctgcataggtccttggctgagaataacacaatagttgccaaatcctcccccattctaaagagcaatgctaaaccagcca

SEQ ID NO: 270020 - DNA, 533 bp, Homo sapiens
tgggaccacaggcgtgagccaccatgcctcgccaatttttgtatttttagggtttcgccatgttggccaggctggtcttgaactcctgacctcaagtgatccagccaccttggcctcccaaagtgctgggattacaggcatgagccaccgcacccggccagttttgtgttttttcattctgacattagataatgtcttgccaatatccagtatctttagcagtaattcagtatgatgttcaccatgccatgctaatcagtttggttttcatccacttccatttttcgtgtaaatttgtttctttccgaagtctrgttcatcacactgttgttgaaatgtacatacacattgttggaaaatcactttttttaaaaaaaccatcctggtttaaattttgtctagaaaacttcattttgtcatgttttctttaagttgatggtcatttccagattcagtaaatatgttaaaatccttaaacatgtaacagaaaattttagccttgcaattttaggaggcaattcagcaaaatcgtt

SEQ ID NO: 270021 - DNA, 560 bp, Homo sapiens
tctttttctttaccctgcaccaaaaatcctaatagttcagaattagggatcattaaaaagaggtccaaacaaaaatacaatctaattagtgtatttttaggatgttttcatatcttttaaatccctggaatgcctgttcaggaaataccaacagaataatggccataatttcaataatgttttccaaaccaagccaaaacttacacaggccacaaaaacattaatgagggaaacagctctgtatatttgaagtgggcaccatttccctcccaatrtttagtatttataattatcatatgcatcctttttcagtataaaaaagctagatatatacttgtaaaatagatttattcaaagtgctaaaaataagttctagctcttcaaagatcacattccagtttttcaaacagtcttgaaaaagagacatttcagggcaggctcagttccaccactaactgtgttactttaggcagatccacacagtctggttgggtcttaggttttacttataaacaataacgctatgtaggctggttagatatctgtgtgtgttctgtatt

SEQ ID NO: 270022 - DNA, 570 bp, Homo sapiens
catttgattgcactctaggcctccatatgagtactattttatatactttagcaaaagcaaatgagtctcaactatctatgaattaattataattactgaccgatttaatgttttcttttacattcctttttatatgtattcrtctaaaacaaacattattctaggcatgcaataaacaattattagttcaagttgaagtgattctgtataaaattggtctcgtatttattcattcagaaaataagcagggagagggtgcatattttaaaaacttcagtaatttctgtaccagacaacccttaagcaaaataagatttgaacctttcagaattgcttaatgaattgatattacatggaataccatgtaatatttctaaacttttgcagaattttttttcctttttttgaagcctttgaacataagctttgtcacagatcctgcatttgaatgttgaaaatatgattgtgttttgattgacttggtgcatctttaagatagaagccacgtattctgagcaaagccatgccaacatttgacagattattgtggaaagctctggatgaaagaga

SEQ ID NO: 270023 - DNA, 582 bp, Homo sapiens
ttttgattgacttggtgcatctttaagatagaagccacgtattctgagcaaagccatgccaacatttgacagattattgtggaaagctctggatgaaagagagggtgagttaaattaattgaaatgctgtcttaaagagtggaaactccaagattccatttaacaagaataagacacttttttgaatggaagtggttttggagggaataaaacatataagaaaaccaaggtgtgctattttaaatttattctaagcatatcttgtcattactctttggctgcccataatttctttatgatgttggtcaggatcaccaaagactatgctctgctcattcatctctaacatacactcgacagttctctaatstattggtcataaccacagtggatcttcagatcctgagggatgtttcaggagcctctggatgttttgaaatatttttctcccagccctttcctcctaagatccaacttggctagcttgaggatatcaatgaatttcaaatagcatttgtgatgaggccacttgctccactgtataaatttgccattaaaagcaaataaaatgtgacatcttcc

SEQ ID NO: 270024 - DNA, 580 bp, Homo sapiens
ctctgcttgccaagttgaagacttgaaaagtaaaacaaaaacaaagcaagtttacacaaggtcttatagtgttgtctagtcttgtcaatttgtcttttaaagacacataatcttgattagtcaatcctatacctaccattctcatataatcatataccaaggtagcatattaatagtaaggaaagtagcttaaaaaggaaagcaaaaatagatggtaattatccttggttgtgtgccagaagcatcttctttcgatrttactgaattttgtatggtaggcattggcttcccattttacagataagaagattgaggctcagaggatttcagggacattgaatgaggttgtgcttattagtgaaggagatatccaaatcctagtgtgctgtggttttaattccattttccctattgaattttgacaaatcgcccccccccgcccccaacccccaaccgtctggaaaatcaggatgctagcactcaacgcttttattccagattgccaggtgcctttgtggagggtagaagggcttctcagagtggttgggaagatgcagccatcagtcttaaattgctgctt

SEQ ID NO: 270025 - DNA, 585 bp, Homo sapiens
gggcactgtgccaagtgctttcacagaattttatattttatctttgcaacaatttctatgaaataggggctatgatattccagtttttagatgattaaacttatttgctcagagcaagttctgttgggatcactgggaccttcctgttatatgatataccccacatgctattgacaatggtattagccagtaaatatttaaatgtaaaagtcagcaaaatcatgcttaagttggatggatgagcaaactgtacattttaagatgaaataaattatttgtaaatctgaagagcaaacataaggtytgtatattgctagaaaaatgcatttgaactattctctcactctaatactgtgtatttctgcatttgtagtataaactgcatcatcgttgaaggataacaaatagatattctataattgtggtaatgtatcttaatagaaatagtgtgccatagtcaaagtgacttaactaatcaatatgttttataccatattttacattcctctattgaaaggtattctttaagagataaggtgtgcgatttagtccatttagctcctaattccaactttcctacatttt

SEQ ID NO: 270026 - DNA, 586 bp, Homo sapiens
ttggaaataaatcacaattgggtctaaagcaaatgtccctaagtaatatgatgatacctgacatggagaacatacaatgtctccaattctcactaaaagttagaaagtgttcgggcgcggtgactcatgcctgtaatcccagcactgtgggaggctgaggatggtggatcacctgaggtcaggagttcgagactagtctggccaacatggtgaaacctgctctctactaaaagtacaaaaattagaggggcgtggttttgggcacttgtaatcccagctactcaagaggctgaggcaggagamtcgcttgaacctgggaggcggaggttgcagtgagcagagatcgggccactgcactccagcctgggtgataagagcgagactccatcttttaaaaaaacaaaagaaaaaagaaaaaaaaacagttagaaagctatttattttttaattaatactcacagaaaactgaaaagtagctaataccaataatgatactaactactgccgtttatttagtgtttccttctttgatggcattgcataatgatattcagtacatcattttaaccctcacagaaaacttaag

SEQ ID NO: 270027 - DNA, 564 bp, Homo sapiens
ttgtttgtggcacatttaaaatctactcttggcaattttgaaatgcccttttctgatttatgttttaaattacccctgttgaaaatctgtaaaggattcatctccatattgctgtctaacttaaattttctttgacttctctctgaccgtaacacatttttagagtcactatacccttttacggtggccccgatgagtcccttaccacataccttctgatctgatcactctctttccaggctttcttaagtattttatyttccaagtcacttccttctgagatttcaatctctcctctattctgcctggccaaactctaaacatctgaccagcctcatttcaaatcctaccttttcataaagcccgacgcttataattaagccattccagactggtctgtgttctctgaattccagcagtatttctcagttgttcctctattgagtttttatgtatacaatcttgggaaggagtaaagagaattatacagctgtaatgagaactgatatactgagtgatgtggagaaaataataatgatactaacagatagaggagaggcaggt

SEQ ID NO: 270028 - DNA, 568 bp, Homo sapiens
attctttggtttttcagtgctataaaccctttaatacaactcacttctcacgttcatcctaataaaagtgaatggaacatccattctttggtttttcaatgtttcgttatggtaccagaatttctccaattttggcataggatgytagtaactattatgctccccatccctatctcaagtgtggtccttagggccttggagtaatggaaatggaggcagaaatcttttggctggaagaatatttgagaattgtattggccatatggtgtaatctcatgccatgaaattagaaaagtcttattttcttgagttttcagagtggcttaaataaagaaccttatatgctcccaaatagggtaactttctaagttgtctcctgtcaatttcttttgcccttaccaggatacctaaccagcatctggcaaggcagggtgcaggggtggggaggccgagggctcccaacagagaaatggtcattccatctttgccctttggctaatcctttttatgtcaaattgtccaccactgaatctggtgataaatctcaaacaatttaagttttagattt

SEQ ID NO: 270029 - DNA, 622 bp, Homo sapiens
ataaataaacttggtttgggcagtataaaataggggtcaagagaacttgggtctatagtatcagaccctctacgtttgaagcctaggttgccgggaaataactgagaaattttgagggagtccttcagctcggagattggaataatgacacatgcacacctaataggactgttrtgagaattaagggagatacttttaaaataatttgcacgctgtctggcacatggtaagctctctgagaatgtttatttctgcctgggacagaaaagccctaggttagttcaaattctttgagaagcagatgccaaaatgggattgtacatgcaagagatttattgcgggaaaggactttgaaggataaacagaaggaagtaggcgtagcaaggaaagctttcagaccataatgtaggtctgtcacctgtgacagaaggagaggaaggaaggcagattaaggagcaagtctcagattgccgtacagttccaagaaagtttgggccaggctgttgcagagtcccccagccaaagttatctgttggaggaaacccatgtcccacaggaaggggcctgcacagtcattggctgggaacattccagaagaagcaagaattctgtgtgaatgtgg

SEQ ID NO: 270030 - DNA, 622 bp, Homo sapiens
ataaataaacttggtttgggcagtataaaataggggtcaagagaacttgggtctatagtatcagaccctctacgtttgaagcctaggttgccgggaaataactgagaaattttgagggagtccttcagctcggagattggaataatgacacatgcacacctaataggactgttgtgagaattaagggagatacttttaaaataatttgcacgctgtctggcacatggtaagctctctgagaatgtttatttctgcctgggacagaaaagccctaggttagttcaaattctttgagaagcagatgccaaaatgggattgtacatgcaagagatttattgcgggaaaggactttgaaggataaacagaaggaagtaggcgtagcaaggaaagctttcagaccataatgtaggtctgtcacctgtgacagaaggagaggaaggaaggcagattaaggagcaagtctcagattgcmgtacagttccaagaaagtttgggccaggctgttgcagagtcccccagccaaagttatctgttggaggaaacccatgtcccacaggaaggggcctgcacagtcattggctgggaacattccagaagaagcaagaattctgtgtgaatgtgg

SEQ ID NO: 270031 - DNA, 596 bp, Homo sapiens
ggcctagtaattaataaaaataaacacaactgtaatgacgtcaccagatagatctgcttggaatattttgcaattttttttgtttaatttctaagctaaaccgtatccattttattttagtttaaaaattatatagaggaaaaccccaaagattaccattttaaattgcaattgtacagttaagaaagactaggcagccacaatttcctgggatgttgggcttactaaggtgagtttataagatcaacttttgtgaatggttgggctttagactgtggtattaatatttccacttatattttcatgcacagttatttgacgatctctaaaattggtacatttgtagcagagccacaaattcactaagcatagaagtgaattcacaggtgcatttttttttttttcacctgcytttatacttccttgaaaaccatactagaacctaaggcttctcacacagggtcacatgaggccaccagaaagacatctttggccaggaaagatgaataattttgtcttaggccaagaataagaatttggttagtttagcagaagcagaaatatttcccaaatttgtaacttctataaaaacagtc

SEQ ID NO: 270032 - DNA, 552 bp, Homo sapiens
atgctgagtacaaacattgcttctgtaacctggggcaaattgcatagccttcctgtgcctgcgaatccttatatgttaaatgagcaaaaacgcagcgctcttctaaggagttgctttgaggagtgaatgaaatgatctargtaaaaatgcttggttcagggctatccttaataaaaatgaaaaggtagctattaatagattaaaaatgacatttctcagcatggcctacaaagtccgccatgaaccgacctcagtttactatggaaggttatttctcaccatcacctttccacctcttgccacttcctttatgatctggcccaggggagtctcaaacttgattgtgcatcagaaacgccctagagggcttgttaaaactcagacggctgattcagttggaatgaggacagggctcagaagtttacattttcaacaagttcacaggtgatatggatgctgctggcccacagatctcactttgggaaccaccagtctagtgtagactttcattaaaaaaaaaaaaaagcccctgttccctctttcacctgaaaa

SEQ ID NO: 270033 - DNA, 615 bp, Homo sapiens
cacctgttgttgcttgttaaaagctgatttctggtcttttccccagacttacagaattagaatatttgagggagtgtctagtgttctaaaatttttagttttccaggtgattcttctatatgttaacattgaagaacattttacttctaggggtggtgcgtgattaatctctctccaaaacacacacacacacacacacacacacacrcacatgcatacgcaccccccacacacgcacacgaatgttaatcccagttaatgcttattttattggaagagaaagtagtctttatcttctgcttcttcttgaataaaccctaatgctcctattatacgcatttatttttttaaatatatttgttggtggaaagaattcagctattctccttgaaagagttcagagtctgagaatatgtggtttgcaagggtaacaccttgctcagatcgcactcatcctaaagttgggcatctctgttctagtcaactggtggctgtttaatgcaatttgcaatggacacagataatttaacaggcacaatttattagacaaactttttaaaagcaaaagcattttcggtgaattctatgctcaagggttgatgaaacattactaaa

SEQ ID NO: 270034 - DNA, 615 bp, Homo sapiens
cacctgttgttgcttgttaaaagctgatttctggtcttttccccagacttacagaattagaatatttgagggagtgtctagtgttctaaaatttttagttttccaggtgattcttctatatgttaacattgaagaacattttacttctaggggtggtgcgtgattaatctctctccaaaacacacacacacacacacacacacacacacacatgcatacgcaccccccacacacgcacacgaatgttaatcccagttaatgcttattttattggaagagaaagtagtctttwtcttctgcttcttcttgaataaaccctaatgctcctattatacgcatttatttttttaaatatatttgttggtggaaagaattcagctattctccttgaaagagttcagagtctgagaatatgtggtttgcaagggtaacaccttgctcagatcgcactcatcctaaagttgggcatctctgttctagtcaactggtggctgtttaatgcaatttgcaatggacacagataatttaacaggcacaatttattagacaaactttttaaaagcaaaagcattttcggtgaattctatgctcaagggttgatgaaacattactaaa

SEQ ID NO: 270035 - DNA, 595 bp, Homo sapiens
gaaatgttctcaccatggtacaaacatttttattttttcctgaaaaaccagtttctgtataatacatggatgacttattttctttagggatgcagaaactcaaatcagagtataaaaggtgaggggaactgcatttattgaagtatctaatatgtgccaggcctttggcaaagtgtttccctgactgtaggacctggtgaggaatttgctacctgtccagattgatattcccgattgagtgcctgtgtcctaatccctttgatggagcctagggctttgacggaggacatgtctcagattccactgggacacctaggctccagtctctgttgtactatactgtaggaaagggtgaaaggccagccagctgcttccttaggggaacccctttctagttaatggacactacagagctagcatcsatcaatagcattttcagagttctcaaccaatagataaataaaaagaaggtgaggaataggagagcaaaatgtcaccccatttttactaataaaattgatattagaaaatggaaaaatgtactctcctaggcacaagcagaattggactcccatagaaatgcattaggaggagg

SEQ ID NO: 270036 - DNA, 604 bp, Homo sapiens
gctgaccaaagagcagtaaagggggaagaagggagggaaaatgagagagagagaaaccgtaaaggctaaagacagagagtggttaagataaggagggaaggaggaaggatgggaggttagtattgaggccgacacacagatccttgttcatctcttacttttatgatccggggagccatgccacacagccccagccagctctgtcctgatgctctctgagtggggtatgtctgccttggaattttgttcacagacaggcattgctcagtcttgcccctggcagtttgtgcatgcttggttcgtcatatctgaccactccattaaakaatagaatagaatagagtagaattctgatcctcttatgtaggccttgcttccaaaagcagaaactcaaatacctgtggagttaggcagatagaaaaggtgtgttgctgacaggtattaattatagagaatgcaagggattgtagtaaacttgtaggcgggtgccttgtttaaaggcactcaaacttggaaaaaaaaaaaaaaaaagcaaaaaagaatgggctggctaaagccaaaatccctttcctgctggatttggtttgcagggcctttgtttcgt

SEQ ID NO: 270037 - DNA, 604 bp, Homo sapiens
gctgaccaaagagcagtaaagggggaagaagggagggaaaatgagagagagagaaaccgtaaaggctaaagacagagagtggttaagataaggagggaaggaggaaggatgggaggttagtattgaggccgacacacagatccttgttcatctcttacttttatgatccggggagccatgccacacagccccagccagctctgtcctgatgctctctgagtggggtatgtctgccttggaattttgttcacagacaggcattgctcagtcttgcccctggcagtttgtgcatgcttggttcgtcatatctgaccactccattaaagaatagaatagaatagagtagaattctgatcctcttatgtaggycttgcttccaaaagcagaaactcaaatacctgtggagttaggcagatagaaaaggtgtgttgctgacaggtattaattatagagaatgcaagggattgtagtaaacttgtaggcgggtgccttgtttaaaggcactcaaacttggaaaaaaaaaaaaaaaaagcaaaaaagaatgggctggctaaagccaaaatccctttcctgctggatttggtttgcagggcctttgtttcgt

SEQ ID NO: 270038 - DNA, 604 bp, Homo sapiens
gctgaccaaagagcagtaaagggggaagaagggagggaaaatgagagagagagaaaccgtaaaggctaaagacagagagtggttaagataaggagggaaggaggaaggatgggaggttagtattgaggccgacacacagatccttgttcatctcttacttttatgatccggggagccatgccacacagccccagccagctctgtcctgatgctctctgagtggggtatgtctgccttggaattttgttcacagacaggcattgctcagtcttgcccctggcagtttgtgcatgcttggttcgtcatatctgaccactccattaaagaatagaatagaatagagtagaattctgatcctcttatgtaggccttgcttccaaaagcagaaactcraatacctgtggagttaggcagatagaaaaggtgtgttgctgacaggtattaattatagagaatgcaagggattgtagtaaacttgtaggcgggtgccttgtttaaaggcactcaaacttggaaaaaaaaaaaaaaaaagcaaaaaagaatgggctggctaaagccaaaatccctttcctgctggatttggtttgcagggcctttgtttcgt

SEQ ID NO: 270039 - DNA, 604 bp, Homo sapiens
gctgaccaaagagcagtaaagggggaagaagggagggaaaatgagagagagagaaaccgtaaaggctaaagacagagagtggttaagataaggagggaaggaggaaggatgggaggttagtattgaggccgacacacagatccttgttcatctcttacttttatgatccggggagccatgccacacagccccagccagctctgtcctgatgctctctgagtggggtatgtctgccttggaattttgttcacagacaggcattgctcagtcttgcccctggcagtttgtgcatgcttggttcgtcatatctgaccactccattaaagaatagaatagaatagagtagaattctgatcctcttatgtaggccttgcttccaaaagcagaaactcaaatacctgtggagttaggcagatagaaaaggtgtgttgctgacaggtattaattatagagaatgcaagggattgtagtaaacttgtaggcgggtgccttgtttaaaggcactcaaacttgraaaaaaaaaaaaaaaaagcaaaaaagaatgggctggctaaagccaaaatccctttcctgctggatttggtttgcagggcctttgtttcgt

SEQ ID NO: 270040 - DNA, 563 bp, Homo sapiens
acaatggaaggtgaagtatgacttgtcatgaaactgtcaatagaatctgagctcactttccattagtaggtgctatgaaattgcagggatgtgctgaacagccrcagaaataactaaagtaaaagtggcttcatggcacttagtaattttaatatttgtcattgttaccaaaagccttaaagcagtgatttcaatgtttaattcctcttctatgagttgttggtctcaatttttcctttattgccttgaaatcaaaacagaaattcctcaagtgttttctctttgagagcattttttgttgttgctctttatcttctttagtatggaatgtaatagttgaatatcgcttggattgctgtctcttctgaaggctaatagggtattttataaatctggctgagacgtgggttaaaggtaggttgggtttaggtaaaaattgattgctactgaactgagttcaagcataaaaatcccaaatggataaaatctagatagcagacaggccaaaagaaacataaaaaagaactcaggttggattttaaatgaaaaattcactaagactc

SEQ ID NO: 270041 - DNA, 563 bp, Homo sapiens
acaatggaaggtgaagtatgacttgtcatgaaactgtcaatagaatctgagctcactttccattagtaggtgctatgaaattgcagggatgtgctgaacagccacagaaatarctaaagtaaaagtggcttcatggcacttagtaattttaatatttgtcattgttaccaaaagccttaaagcagtgatttcaatgtttaattcctcttctatgagttgttggtctcaatttttcctttattgccttgaaatcaaaacagaaattcctcaagtgttttctctttgagagcattttttgttgttgctctttatcttctttagtatggaatgtaatagttgaatatcgcttggattgctgtctcttctgaaggctaatagggtattttataaatctggctgagacgtgggttaaaggtaggttgggtttaggtaaaaattgattgctactgaactgagttcaagcataaaaatcccaaatggataaaatctagatagcagacaggccaaaagaaacataaaaaagaactcaggttggattttaaatgaaaaattcactaagactc

SEQ ID NO: 270042 - DNA, 540 bp, Homo sapiens
tttacctccctttaaaacagtcaaaggtagactttgaaatgactaagaaagttgagtaaaataaaagaccaacaggacaggtcctctaccaaactgggaagcaggtaacccaggcgccttgtcacttctagttcctcccctctcrtcattattgcaacttcttgaggcctttattctcttccccattttctgctgggccttgctctcagctgagggttaaggaaactccacagtggtagccactgacagtagtttaaggctctgcttcacaaaccaggagtgtgtatgccatggagtccttgaactccaagatgaacatggagtctattgtgaagcatcgtttttatttgaagagctaacatttgtatgttaaaaatatatgtagtatggaaaagcatataggcatgattttaaatagacagcacaagactcaaaagaaattgatcaaaatcttttgggctgagtcctcagactcctgggggttaagaattcactcttggtttgatgggttactttggtggaaaatacaggagaagtaac

SEQ ID NO: 270043 - DNA, 624 bp, Homo sapiens
tacccttgcccctctttgttctgttctcaacagagcagctaatagaagtcagagtatgtctcaaaatcattgctcagaaccattccctcagggtaaacactgaagtctttgcagtggcccacaaggccctgcgtggactggattcttgcccactctctgacttcatcttctactcctcttccctgctcatggcattcaagacactggcttccctgatgttatgtgaacatgccaggccactstgccttaggatctttgctgtggctcttccttctgcctggaatgctcttcccacaggcatctatttgcctatctctgtcacttcccttaaatctgtgctcaaatctcaccccctccccttctgaacatcctctataacattccccaggcccagcactcatactttttaccctgcttacttctgtgtttttaaaaaaacaaaacatcactttctaatttacttatcctttttacagtctattttctgactgtttgtggatttatattctacaaaagcagggaattttgctttcagatataattttcccaagcctctagaatgaataggatttctcatctttgacactactgacctctgggctgcataactctttgacataggag

SEQ ID NO: 270044 - DNA, 606 bp, Homo sapiens
gattccccaggctggcaactttcagtagtgctgtgtttaaggctacaggacaagcaaaaaacaaagccaraaacaaaaaacaaaaccccacagatgatagtgaaataaagaggtaactgtataagttcctcttaaacctactttttggtgatacattaccagaggctgggaaaggaaggagctttaaaaaaagagagctgtttagtttctccttcgtaaggaatgcctaccacctctggccccccaaggaagagaaaggattgtgtttgtgtgaagaaggctttatctgccctacatccaactgagatggccgctcagtttggcctgctggaaggaactcaatgaagcaagagcgacaagatgactgatctttgtccccaagcctctccacccctagcccaccaggtgaacacactctccctccatttccaaaggttcaaccatgaatgagtcatcactgttatttccaacttggtgcatttttttccttttcaaattcaagagacccatcaattatttaggactccatgatgatctcaggcactgacacctcccttggtctttatggcttttctgaagggaaaccatctggccttccttaacttg

SEQ ID NO: 270045 - DNA, 624 bp, Homo sapiens
tacccttgcccctctttgttctgttctcaacagagcagctaatagaagtcagagtatgtctcaaaatcattgctcagaaccattccctcagggtaaacactgaagtctttgcagtggcccacaaggccctgcgtggactggattcttgcccactctctgacttcatcttctactcctcttccctgctcatggcattcaagacactggcttccctgatgttatgtgaacatgccaggccactgtgccttaggatctttgctgtggctcttccttctgcctggaatgctcttcccacaggcatctatttgcctatctctgtcacttcccttaaatctgtgctcaaatctcaccccctccccttctgaacatcctctataacattccccaggcccrgcactcatactttttaccctgcttacttctgtgtttttaaaaaaacaaaacatcactttctaatttacttatcctttttacagtctattttctgactgtttgtggatttatattctacaaaagcagggaattttgctttcagatataattttcccaagcctctagaatgaataggatttctcatctttgacactactgacctctgggctgcataactctttgacataggag

SEQ ID NO: 270046 - DNA, 396 bp, Homo sapiens
agcacaagttgactgaagaactgaagaaaaatggtttgcttctgatttatgtgtagatagctggcttcctcagaaacagccatggtctggaaatataatgagttaattcaataaagcttacattactctgctctgtgttaggccctgctcaaggtgctggaaactcagaggagaatttgatattcagcctctgcctgcatgaagcttatactcaaattggacactaktggtacctcatttcctaggattcagcaccaatttatgtgctgatcagttaaccttatcttgacctctctataatgtttgggaacgagtcccaacctttctaaatatgcctgttagcatactatgtaacctatagtgatatcctcctttcttccccatttcctcttcagg

SEQ ID NO: 270047 - DNA, 537 bp, Homo sapiens
gctgccactgttttagcctgagggccctgcaggcagcccctggcaacatttttaattcaacatcaaactgcaacttgaaatttgaaaaagtgggggaaaaatgacaagatgtcaatgtctcagaacctagcaagtggggcttgtaaatatacccgatttggatttctttgagctgggggaagtttctcattttttgtagccactgggagtgactgaaccccatcaaagagaccttaaaggatgctgaaagagctcaaaggggatgctatgtctcaagaagagagctccagacctggtcagagagccttttaaataagtcaggtggcaagctggccaggacacattcttaagtcaaaaaggcagattgtaaaacaataaaggtcccatcttttgggggaaaaaatatgtgtgtgaatgcacaccaagaagtttgraaggcaatactctgtaatatttaaaatctcttcttatatctttattgtctgaactttttgtttacaaagatcctatatattacttttagaacgagaaaaaaat

SEQ ID NO: 270048 - DNA, 553 bp, Homo sapiens
ttggggaagatggtgggctctggtgaggagataagatgaagaaagagtattggctttggtcctgatagctagccttctcagggtttgctggaagagttataaacaattcagtaggggktggggacagtgagggaagcaacaatggtgagtaattttaaaagattccagaggccaggcactgtggctcatgcctgtaatgctctagcactttgggaggttgaggtgggtggatcacctgaggccaggagttggagaccagcctggtcaacatggtgaaaccccatctctactaaaaatacaaaattagccaagcatggtggcacatacctgtaatgccagctactctggaggctgaggcagaagaattgcttgaacccaggaggcagaggttgcattgagccgagatcgtgtcattgcactccagcctaggcaacaagagcaaaactctgtctcaaaaaaaaaaaaaaaaaaaaagattctagaaaggcctagtgctgtccagtaaaactttctgagattatggaaatgttttgtatttgcactatccagtatg

SEQ ID NO: 270049 - DNA, 553 bp, Homo sapiens
ttggggaagatggtgggctctggtgaggagataagatgaagaaagagtattggctttggtcctgatagctagccttctcagggtttgctggaagagttataaacaattcagtaggggttggggacagtgagggaagcaacaatggtgagtaattttaaaagattccagaggccaggcactgtggctcatgcctgtaatgctctagcactttgggaggttgaggygggtggatcacctgaggccaggagttggagaccagcctggtcaacatggtgaaaccccatctctactaaaaatacaaaattagccaagcatggtggcacatacctgtaatgccagctactctggaggctgaggcagaagaattgcttgaacccaggaggcagaggttgcattgagccgagatcgtgtcattgcactccagcctaggcaacaagagcaaaactctgtctcaaaaaaaaaaaaaaaaaaaaagattctagaaaggcctagtgctgtccagtaaaactttctgagattatggaaatgttttgtatttgcactatccagtatg

SEQ ID NO: 270050 - DNA, 609 bp, Homo sapiens
ttgtgactctcttttttgatgaacaaatgagtttggatcagaggtttaggagagggagcatcttccttctcttctctaagctctgagtctggttctccctatggctcacttttgatcctctctgctcatcttctaccactgacaaaacctgtctgctgattagaactttgactcagaaataagtggaatggataatagargtgaggatttgggaggagtagaaaaaaaaaaagcattctaagaagagagtggtgggtagtaaaatcttatatatatataaaagagccctttgctcccccatcctcctgaaaagaaacgcaatttcccctcatttctagctgctctgagcactagctataaaaataaaaaatgagaaatagaatcggttgttgtcatttcaaatacaaatgggcatgtacattcagcctttatggctagataacttccacttccagtgctcggtatttattggctttgacttattgatagaacatcctggggcctgaagtcctccttcccacagagcaaagacaccatcagcaaccgctttctcctctcaacccatgaataataatgtgaatgatgatgacggtgttattattatcattt

SEQ ID NO: 270051 - DNA, 609 bp, Homo sapiens
ttaagtggatttctcaggatcaagatgctttgcaagggtgtcatgaagttgttggctggagcaccaatcatacgaggctgggctagatgaatatccacttccacaaacacatttatgtaattcttggcaggtctcagatcctcgctggctgttgtccaaagacatcagtttcttgttcacatggttctctccatagggaaactctacaacatgrgagagatttcccttaaagagtgattgagggaggaactccaggtagaagccacagtctttttgtaatctaatctcaggtgacagacacttgcttcttctatattctactttttagaagtatgtcaataagttaggaggagggtatcatttggggccatgttagagggtgcccaccatagtctgcactttgggcctcaataatttacctttctctcacattccaaatacattcattccctcccaaggtccccaaagtctcatgtcattatagctatcagctcaaagtccaggatctcatcaactaagtcagatcccggtacggatgagatttctcagggtgagttccaaagttcagctccttatatggattctcttactatagagacctatgaaaat

SEQ ID NO: 270052 - DNA, 609 bp, Homo sapiens
ttaagtggatttctcaggatcaagatgctttgcaagggtgtcatgaagttgttggctggagcaccaatcatacgaggctgggctagatgaatatccacttccacaaacacatttatgtaattcttggcaggtctcagatcctcgctggctgttgtccaaagacatcagtttcttgttcacatggttctctccatagggaaactctacaacatgagagagatttcccttaaagagtgattgagggaggaactccaggtagaagccacagtctttttgtaatctaatctcaggtgacagacacttgcttcttctatattctactttttagaagtatgtcaataagttaggaggagggtatcatttggggccatgttagagggtgcccaccatagtctgcactttgggcctcaataatttacctttctctcacattccaaatacattcattccctcccaaggtccccaaagtctcatgtcattatagctatcagctcaaagtccaggatctcatcaactaagtcagatcccggtacggawgagatttctcagggtgagttccaaagttcagctccttatatggattctcttactatagagacctatgaaaat

SEQ ID NO: 270053 - DNA, 583 bp, Homo sapiens
tctacttttcctaagtacagggaaaaaaacctgtcttcaatgcaaacttcaacagaatctacatctcaggaagaagatggggactgaaccacttagagcatctccagtcctcattacagaacactgtagtagtaagatgataatttaacataagaaaactgccttcctggattttccttgagaagtgattaatatgtaagagtggacaactcagggtttcacttctaccttctccatttgatgactctcagaatgaccagatatrccatgcacggtgatggagaacaagaaccatagtttgaaatcagaacaatgggattccacccggcactggtacctattaaatctcttcgaatctcagttttctcattagtaacaatctcagcaggattgttttgaaattcattgataaaaagtatgaaaagagttgctgtatacattacctttgtgatttttgttgtgtcatgtgtgtaaattccagaatattctaagagaagcagcatgatttagttattcaaacacagatgctgtgacagaaatttaactctgccactcataagcagcatgaagaatttaaatgttc

SEQ ID NO: 270054 - DNA, 583 bp, Homo sapiens
tctacttttcctaagtacagggaaaaaaacctgtcttcaatgcaaacttcaacagaatctacatctcaggaagaagatggggactgaaccacttagagcatctccagtcctcattacagaacactgtagtagtaagatgataatttaacataagaaaactgccttcctggattttccttgagaagtgattaatatgtaagagtggacaactcagggtttcacttctaccttctccatttgatgactctcagaatgaccagatataccatgcacggtgatggagaacaagaaccatagtttgaaatcagaacaatgggattccacccggcactggtacctattaaatctcttcgaatctcagttttctcattagtaacaatctcagcaggattgttttgaaattcattgataaaaagtatgaaaagagttgctgtayacattacctttgtgatttttgttgtgtcatgtgtgtaaattccagaatattctaagagaagcagcatgatttagttattcaaacacagatgctgtgacagaaatttaactctgccactcataagcagcatgaagaatttaaatgttc

SEQ ID NO: 270055 - DNA, 602 bp, Homo sapiens
ctgcctggtttcttggattgttctatattaccraatcattattttgttctatattaccgaatcattctttgcttacctttgtggataattagaatttaagaggtgaagttttctgaatattgccaggccttatgttttatttattaattaattcattctgaacatgcaatgctgagtgtccattgtgtatcaggcactgtacaagatcctcattagcgttacaaagagaaaaaacagagtacctactctcaaggagtgtacattctagttagggagcagaaaacgttctgcttttatgaatacctattgactccttagtaacttttgaagaagctaaccttttgataaaattttgcccatttaagtttggtttgcattttaccttctagaaacaaaattttcgttagtttttcagtgaatatgattttaaagcatttcatagaatttagtaaaatatgatatatgagtaaatgttattgaaatatgttaatgttttgaatgagttcttcagattccagaactgctcaaagtttcatttctgaaaatgggtttaagacagatttagagaaaatgcttggatttaagtcaaataaagaatctta

SEQ ID NO: 270056 - DNA, 610 bp, Homo sapiens
tccatggccctaagcatggagagtcaatatgtttaacaagctaaacagaggaaccctggaatgggctgctttggccaaaccataggctatgccgagaatcagcatagagaaggaaaagttatcccactgaaaagtatagtcatcaacttatttgtgttttaatatagctgaatttttcctggtcagtataggcaatacagaaaagaaaacaagaaaatrtttggagctgatggagaagccaaaactcatatcaaggcaaagaaggatgcacagagaaagagtagtaactagggacagaactatattagcagcacctttctacgcttatgccaacaggaattcttaattttctctgcccaggtcctaaagccaggaccacatcagacacaccatgtttgttctgtgtcagatatacctgcttctttaatcttctatatcatcttacatatgagaaagcttccttaattaagcttatgtcttatgttttgttttgaatggattttgaaagtgttgtttattgaagctactactttgtagtgattgataaccacatcaagtatcattaaggggccccttgacctttgtgggggcagttgggtggggcacaaaa

SEQ ID NO: 270057 - DNA, 610 bp, Homo sapiens
tccatggccctaagcatggagagtcaatatgtttaacaagctaaacagaggaaccctggaatgggctgctttggccaaaccataggctatgccgagaatcagcatagagaaggaaaagttatcccactgaaaagtatagtcatcaacttatttgtgttttaatatagctgaatttttcctggtcagtataggcaatacagaaaagaaaacaagaaaatgtttggagctgatggagaagccaaaactcatatcaaggcaaagaaggatgcacagagaaagagtagtaactagggacagaactatattagcagcacctttctacrcttatgccaacaggaattcttaattttctctgcccaggtcctaaagccaggaccacatcagacacaccatgtttgttctgtgtcagatatacctgcttctttaatcttctatatcatcttacatatgagaaagcttccttaattaagcttatgtcttatgttttgttttgaatggattttgaaagtgttgtttattgaagctactactttgtagtgattgataaccacatcaagtatcattaaggggccccttgacctttgtgggggcagttgggtggggcacaaaa

SEQ ID NO: 270058 - DNA, 580 bp, Homo sapiens
cttgaattgtctttgcacccttttcaaaaatcagttgactacgtgtgagggtttatttctggactgtctgttctattcattgatctatatgtctccctatgccagttccacactgtcttgattactgtagctttttgcagtaagttttgaaatgagaaagtgtaagtcttctgactttgttatttttcattgttgttttggttattctgggttattggttattggttatattcttgttctcttgatgtggtctttaggagaggtatagtaggaggtgtttaatatgatgcagaatttgtggtaatagacaaatgattcaaccccctccttcccacttccataacattctagctcttgaaatttctgtacctttctatatgctgtaggtggggagaaattcatgtaatttaaaccatgtaatttaaatttgccagactgctaggagaacaagttgtagtatcaatgtttgttttcctttttttaacccgtttaccctgtgcatcccctctctcacaaagcctgagtatatgttttagaagagrtaagaccgaagaggaaggagatggttggtttgggtagt

SEQ ID NO: 270059 - DNA, 542 bp, Homo sapiens
cttactgcaacctccgcctcccgggttcaagtgattctcttgcctcagcctcccgactagctgggattacaggcatgcaccaccatgcacggctaattttgtatttttagtagagacagggttttaccatggtttgccaggctggtctcaaactcctgacctcaggtgatctgcccgcctcggcctcccaaagtgctgggattacaggcatgagccactgcacctggccagattttatccttttaaatgtacttgttttcctctgaattggataaaactaggtttattttcttcatattgcatttttgctgccaagtaaggcatatctttacataatatagtctgtaaaagctgtttacytcaaccacacagaaataaatagatggataaactctggagttctcttatgtttctttactaaagagaatacctaatcatacccaacaacaacctgctaagaatataatcaggcttatcaggaataggaacacattgattatatcctttctatgtcaaataatcctgtcatctaaaataatttc

SEQ ID NO: 270060 - DNA, 547 bp, Homo sapiens
acttgggcacttgctactgctatcaaccaaatggcattggcaatctaacagttacttatgtaggatcaaactgcgatagtgcattgtgttaaaatgtcatgttagtataaatcatgcatatcatagaatattatgttgctatgaattaggaaaaatcatttaattatggaaaagaacacactgaattaccaggataggaaaacctatcttaaataaagacttaactttttttttatacttaaagctcctttttcttcttaaagcttctcttttatgtctctggaaaagctcccttgagtgatgaaattgctgtttgacctttttgtttttgtttcttctaagtccatatattctgtgtcgtgtatgtgattagggatggacaaagggttcttattccctaggactctcttttcctcttccagcgatcatcttttcaggttcttataacattttactcctgtctgttttyagtaaatctttttattattcatatcctcatccttttaaaaatgtattaatgcccataaatcttacccaggtgtttgat

SEQ ID NO: 270061 - DNA, 578 bp, Homo sapiens
agaagtagcattctagaatggtggraacgagattgaaaacagaagcgtaaatgtaaagtaagaattaaattggcatgctgcttttatatgttagagttgctttttggagtaagtgacatgaaaagttctcacatttttatatcaaatcattaaaattatatagaaaaattgtatatacagtgaatggtattcagtattcctctggaaactttactgataatattctttagtcactttccattatataatcattcttatatggatttacacatgcccaaatttgataatatcttttaacatataactgcttatagtaataagaagaagattgaattaatctgttaacatgtaacacagatgtttctttggacacccttggttaagtgattgctatgttaaaatgtataatgtgtcctgttagtttgggaaattttgagaggaatatttagacataaaggaaaaataagtcaattctaggttagtggctttcatttttaactatgaccacaataagaaacattttatattgaagcccaggacacatcatacatctgtttatcaaaacagaaattccagtg

SEQ ID NO: 270062 - DNA, 545 bp, Homo sapiens
tagcattctagaatggtggaaacgagattgaaaacagaagcgtaaatgtaaagtaagaattaaattggcatgctgcttttatatgttagagttgctttttggagtaagtgacatgaaaagttctcacatttttatatcaaatcattaaaattatatagaaaaattgtatatacagtgaatggtattcagtattcctctggaaactttactgataatattctttagtcactttccattatataatcattcttatatggatttacacatgcccaaatttgataatatcttttaacatataactgcttatagtaataagaagaagattgaattaatctgttaacatgtaacacagatgtttctttggacacccttggttaagtgattgctatgttaaaatgtataatgtgtcctgttagtttgggaaattttgagaggaatatttagacataaaggaaaaataagtcaattctaggttagtggctttcatttttractatgaccacaataagaaacattttatattgaagcccaggacacatcataca

SEQ ID NO: 270063 - DNA, 547 bp, Homo sapiens
taggagagttttttgggccaggcccaaagtggcatgaatcacttccaccacactccacaacctagaaatcatgtacatggccacacctaattggaaagaagaaagggaagagcagtggagccacgtggccaggaggagcagagaacacagmgatgcatgaatattgagctctcgctgccaagccctccttgtccttcatttctgctcaggaggaatcctgcagaggtgctccaaactcacagggacttgatctttcaagagcaagaaactaaaaaagaaagtttcctaatctcactcccagccttgttcagtgactcctcccaggaactgttttaacgatctatcgctgctacgtaacaagtcacctcaaaagggactacgcaagggtgtcaatagcaggcatgcttcactgaaccaatctaacagtctacacaggtgctccagcagggcagagtagaacaatgtgggacctttgagtccagccaaccagggttcaaatcccagctgcgacacttcgcagctggacgaccctgaacatgccacttag

SEQ ID NO: 270064 - DNA, 632 bp, Homo sapiens
tagggttagggttataacctaaccatataatcaaaactttacattataatataaacttttgaaaaacaaagaaagaatcttgaaagcagcaagagagaagtgactcatcacatacaagtgatcctcaatgagattatcaacacatttctcatcagcaactttggaggccagaaggcagtgggccaatatattcagtgctaccaacaacaacaacaacctgycaaccaagagtcaaaactggctcagaactaacacaaatgtcagaactatcagacaaggatattaaactagttattgtaagtatattccagttgttcaacagttaagtaaaggcattaaagatctaaaaaggtcacaagtcaaatctagagagattaaatctacaatgtctgagatgaaaaaaaaaaaaatactagtctttaatgtttggttcccaaaaggtggaaaagagagaaaaaaggggtgggggaaaggtgctaccccctttaaattccctggaaatcattcagaggagaaggacttgcaacaatgggggaggtacaacaatggctgcctttctctgcacctctgtgatcagaggcagcaatcagagatcagacaacagatgccaatatgtagaggatagggtcctt

SEQ ID NO: 270065 - DNA, 632 bp, Homo sapiens
tagggttagggttataacctaaccatataatcaaaactttacattataatataaacttttgaaaaacaaagaaagaatcttgaaagcagcaagagagaagtgactcatcacatacaagtgatcctcaatgagattatcaacacatttctcatcagcaactttggaggccagaaggcagtgggccaatatattcagtgctaccaacaacaacaacaacctgccaaccaagagtcaaaactggctcagaactaacacaaatgtcagaactatcagacaaggatattaaactagttattgtaagtatattccagttgttcaacagttaagtaaaggcattaaagatctaaaaaggtcacaagtcaaatctagagagattaaatctacaatgtctgagatgaaaaaaaaaaaaatactagtctttaatgtttggttcccaaaaggtggaaaagagagaaaaaaggggtgggggaaaggtgctaccccctttaaattccctggaaatcattcagaggagaaggacttgcaacaatgggggaggtacaacaatggctgcctttctctgcacytctgtgatcagaggcagcaatcagagatcagacaacagatgccaatatgtagaggatagggtcctt

SEQ ID NO: 270066 - DNA, 559 bp, Homo sapiens
acaggaaatgaattatatatataaaataattatatataatgttgcaccattgtctttttgcttgcattgcttttgcattgctttaaaaagaaatctgatgtcattcttatatttgtacctctgcatgtaacatgtctttttttctctgactgcttttgagatattctctttgttaccagttttgaacaatttgattaggatatatcttggtatagttttcttcacgtttgttgagccagagatttgttgaacttcttggacatttggctttatagttttcaataaattttaamagtttctgaccattatctatgtgtgtgtgtgtgtgtgtgtgtgtgtgtgtgtgtgtgtgtataaaatgaaagtagaaggatgagaaaagataccatgttatccctaaccaaaagaaagctggagcagttatataaatatcacagtagatttcagagcaaagaatatggctaaagataaaaaagatcttttattatgataaaggggttaattcatcaaattataattctaaatgtttatgcatctaataacagaacctcaaaacaca

SEQ ID NO: 270067 - DNA, 559 bp, Homo sapiens
acaggaaatgaattatatatataaaataattatatataatgttgcaccattgtctttttgcttgcattgcttttgcattgctttaaaaagaaatctgatgtcattcttatatttgtacctctgcatgtaacatgtctttttttctctgactgcttttgagatattctctttgttaccagttttgaacaatttgattaggatatatcttggtatagttttcttcacgtttgttgagccagagatttgttgaacttcttggacatttggctttatagttttcaataaattttaacagtttctgaccattatctatgtgtgtrtgtgtgtgtgtgtgtgtgtgtgtgtgtgtgtgtataaaatgaaagtagaaggatgagaaaagataccatgttatccctaaccaaaagaaagctggagcagttatataaatatcacagtagatttcagagcaaagaatatggctaaagataaaaaagatcttttattatgataaaggggttaattcatcaaattataattctaaatgtttatgcatctaataacagaacctcaaaacaca

SEQ ID NO: 270068 - DNA, 562 bp, Homo sapiens
aaaactattgaagaaaatgaatttgcagttaaacattgtcacaaaaacaaagctccaggaccagagagcttcgatggtgaagaatatgtaacatttatgggagaaataatgtctgttagacagaaacacaggcataccttgttttgttgtgctttgttttacagattgaaggtttgtggcaatcctgcgtcaaacatatcagcaccttgtctccaacagcatatgctcacttcrtgtctctgtgtcagcaattcttagcaataaagttttaaaaaaattaaggtatgtacattgttttaaagacataaagctattgcacacttaatagattacagcagagtgtaaacataactttttttcttttattattaaaccttaagttctgggataaatgtgcagaacatgcttttatatgcactggaaaacaaaaaaaaatgtgtgatttgccttattgcagtggcctggaactgaacttgcaatatctctgaggtatgcctgcacttctaaaaaaattgaacagaaggaaacacttcccaattcatcctatgaggccagttaccta

SEQ ID NO: 270069 - DNA, 557 bp, Homo sapiens
cactagtaatgaaagaattggaattacaacttaaaaccaatcctattcataatagcataaaaaatatgaactatttaaggataaacctgtcaaaagatacatatgatctatacactggaaactataaacattactgaggaaattaaagaaaactttaataaatggagatatgtgttcatgaatcagaggacttaatattattaagatctcaagtttcccaaaactgaccttcagattcaacagtttcaattgaaatcccagtaggcttattggagaaattgacaagccgatgcttacactcatacagaaattcaaccaacctrgtatggccaaaataagaataaaattggcagaccactatcatctaactttaagacttactataaagctccagtgatcaagatagtgtggtattcatgtgtgtgaggccgttcttgcattgctataaagaaatacctgagactgggtaatttataaagaaaagagatttaattggctcacagttctgtaggctttacaggaggcatggtgctggcatcttctctgcttctggggag

SEQ ID NO: 270070 - DNA, 576 bp, Homo sapiens
catgatagactaccctgggtattgtgggcatctgttattcttaccatctagcaatcattctcctttctcrcagtaaatgtgcaatgatttctctctaaagaactacactgttgcccactgtcagtccacatgattaatatggagttccatccttactccagaaatgcacacatgatgtaggcctagccaattctaacgttgcattctcttggccatggtaatgggtcagaactgatgagctacaactagccccttgctgggacttgaacctttgcatgagtgctggaattcctggtggccatcttgctaccacaagggaaagttcattctgaagacagaatcagaacaccagaagcaaagccaagaaatggagaaaaagaaactgagacccaatcgtctttttcaatgccctggatcaagccatgcctgaagttctaactgccttagtttacaagagccaataaaattcttttttagttaagccagtttgagttgggcttctgacacttaaatagaaatatcccaaacttttacacagactaaatactgtccacgaatgtttgagaagatgcactg

SEQ ID NO: 270071 - DNA, 576 bp, Homo sapiens
catgatagactaccctgggtattgtgggcatctgttattcttaccatctagcaatcattctcctttctcacagtaaatgtgcaatgatttctctctaaagaactacactgttgcccactgtcagtccacatgattaatatggagttccatccttactccagaaatgcacacatgatgtaggcctagccaattctaacgttgcattctcttggccatggtaatgggtcagaactgatgagctacaactagccccttgctgggacttgaacctttgcatgagtgctggaattccyggtggccatcttgctaccacaagggaaagttcattctgaagacagaatcagaacaccagaagcaaagccaagaaatggagaaaaagaaactgagacccaatcgtctttttcaatgccctggatcaagccatgcctgaagttctaactgccttagtttacaagagccaataaaattcttttttagttaagccagtttgagttgggcttctgacacttaaatagaaatatcccaaacttttacacagactaaatactgtccacgaatgtttgagaagatgcactg

SEQ ID NO: 270072 - DNA, 363 bp, Homo sapiens
ataaagtcaaattagaaaaactgccataggagaaatcattacttcatgctttgacagtgtgaaagaggcaggggtcttagcagtcatcagaaagctgggatatttggctgcttgactgaattccagcatcctgaagccactgcttactgttgcaccagttccagaggatgacattcagaaggaacccttcaggcctaatcactcatctctgcccctaaatcccagaacctggagagactgtgtagtactttaagaactccttttgtctgggctgctgacaagcccaccaagtcttccatcttttaaaattgtcattgaggctttcccsatggctttcttcaggttgacattctgataccactc

SEQ ID NO: 270073 - DNA, 439 bp, Homo sapiens
tttccataaggctgctccagtgtggaaatggagcagctgacatcactgagaaggtgatcccagagagaaaacaaagaagaagctgcaatggcttttatgacctaaccctagaagacacacccatcatttctgcactatcctgttgggttacacaggtcaccccatccactgtggaatgggactacataagcgtgtgaatcactaggagccgtcttggaggctggctgtcacaccgagttactaaaattcataaaaatgtaattcctagagcctggaggtccacaagggtatggactttgctttgttcattgttgtgtccccagaacctaaaatagtgctgggcacatggtaaaggctcaataaatattttataaatgaatgaaaaagaagactgcagggcaggtggcamtttacttggcttggatggaagcataagatt

SEQ ID NO: 270074 - DNA, 629 bp, Homo sapiens
taggggctgccatctagttaatattgccatacgaatgtcaatttcctggtttgttaatgtgctgtagttatataagatattatcactggggaagctcagggaagggtacaatgtatggacaggaccactctggactagttttgtaacttcttcttcttttttgagatggagtcttgctctgtcacccaggctggaatgcagtggcacaatttcagctcactgaaacctccgcctcctgggttacagmtattctcctgcctcagcctcccgagtagctgggaccgcaggtgtgtgccaccatggagggctaatttttgtatttttagtagagacagggtttcgccatgttagccaggctggtcttgaacttctggcctcaggtgatctgcccgcctcagcctctcaaagtgctggaactacaggcgtgagacactgcacccagccttatttttgtaacttcttataagtctataattatttcaaaataagttacaaaaaataataagggcagtaaagattaaagtccccaatgtgcaaaataagtgttagaagctataagcacccaggggagttctggctcccgtccatttgggagtggtgatatttattaagtacctactcctcattgc

SEQ ID NO: 270075 - DNA, 629 bp, Homo sapiens
taggggctgccatctagttaatattgccatacgaatgtcaatttcctggtttgttaatgtgctgtagttatataagatattatcactggggaagctcagggaagggtacaatgtatggacaggaccactctggactagttttgtaacttcttcttcttttttgagatggagtcttgctctgtcacccaggctggaatgcagtggcacaatttcagctcactgaaacctccgcctcctgggttacagatattctcctgcctcagcctcccgagtagctgggaccgcaggtgtgtgccaccatggagggctaatttttgtatttttagtagagacagggtttcgccaygttagccaggctggtcttgaacttctggcctcaggtgatctgcccgcctcagcctctcaaagtgctggaactacaggcgtgagacactgcacccagccttatttttgtaacttcttataagtctataattatttcaaaataagttacaaaaaataataagggcagtaaagattaaagtccccaatgtgcaaaataagtgttagaagctataagcacccaggggagttctggctcccgtccatttgggagtggtgatatttattaagtacctactcctcattgc

SEQ ID NO: 270076 - DNA, 527 bp, Homo sapiens
aagtgcacacctgtaaaatgaggacaacactcagccctacctcacagagcccttgggaggtagcaagtaaggctgaagaagtactaagtacagggttttgtacctatgcacagtaattatttttcctcatcagcaagtgagggccagttgyggtagctcctgactgtaatcccagcattttgagaggctgaggccaaagggttgcttgaggccagaagttcaagaccagcctgggcaacatagggagaccttgtcattataaaataaataaaaagaaagtttttttgaaaagtgaggattattactattactatttccatatctctctgctgcattgtaagacatgtgactatcgagtgattgattttctttttaaacagcagaactcttatgtctgtaaaagtgaatgccattcattcatggtcatctccaacgggactgagctggacataaggagcactgaattacaacagcgcctgtgccccgtccccctgggactgcactaagcgaggctaggaaggacactg

SEQ ID NO: 270077 - DNA, 531 bp, Homo sapiens
atctcaatgaccagctaatgcatagaatattgctgggcacatagtaggtgtgcataaatacctgtcgagtgtccaaatggacaaagtgacccagtccccacagtggctactcctgaggcactcacatgtcaataatagagacatacagaaagaactctccccccagaccccgaacaagtttccaggtacagggtcatagtacgcagttaaattatggcttccaatacatttacaaagtcagttttgaaaagaatttgtttctctcttccctgtcagctttattcacctactcttactaagacattggatccagtacctgacacatagcaggtttgtaataaataggtgtgtaataaaaagtaatgaatgcattactgatgtcaagagccacactgctggcctgatrtaaccgtcagaaaaatacggcagcagagccccaagcaagccagccatgtgcattttcttccattagcgtcctgtaccagatagtatctttctaaatggaatcataagacctgacctggtatagga

SEQ ID NO: 270078 - DNA, 592 bp, Homo sapiens
gacaatatattggagcttatttttacaagtctttttgggctgcattgtcctctgctcggtttcttgtgggcacccgtctcacctcccaaactagacagtgagcaccttaaggttgccttctgtccgcttagcctgaggacgcggcccacagacaatgctccgtgaatgtcaggtgagtggtgcgttgaagcacctttggtccatmgttattatatgaagaggggaaaaaataaagactggaaacatttttccattcaggaagaggttggtgacaccaatgagccttccacaagcaaagtgtcagcaggagagataatgacactaccacctccaaacgcccttccagctcattccaaaaatggaaaaaacacaggatctggagatgaagctcgctgttctcgcctccctccccaacctcacccagggcaccagcccggaatgaaaaacattccatatagaggcttgggagcacggtctgtcccaggcaaggccctcggacccatttctaaagagctgaagaatcacaggagaaagagaggaaagggaggaagaggaaacctcaacctttcagttacattcactcttccgcctc

SEQ ID NO: 270079 - DNA, 592 bp, Homo sapiens
gacaatatattggagcttatttttacaagtctttttgggctgcattgtcctctgctcggtttcttgtgggcacccgtctcacctcccaaactagacagtgagcaccttaaggttgccttctgtccgcttagcctgaggacgcggcccacagacaatgctccgtgaatgtcaggtgagtggtgcgttgaagcacctttggtccatcgttattatatgaagaggggaaaaaataaagactggaaacatttttccattcaggaagaggttggtgacaccaatgagccttccacaagcaaagtgtcagcaggagagataatgacactaccacctccaaacgcccttccagctcattccaaaaatggaaaaaacacaggatctggagatgaagctcgctgttctcgcctccctccccaacctcacccagggcaccagcccggaatgraaaacattccatatagaggcttgggagcacggtctgtcccaggcaaggccctcggacccatttctaaagagctgaagaatcacaggagaaagagaggaaagggaggaagaggaaacctcaacctttcagttacattcactcttccgcctc

SEQ ID NO: 270080 - DNA, 592 bp, Homo sapiens
gacaatatattggagcttatttttacaagtctttttgggctgcattgtcctctgctcggtttcttgtgggcacccgtctcacctcccaaactagacagtgagcaccttaaggttgccttctgtccgcttagcctgaggacgcggcccacagacaatgctccgtgaatgtcaggtgagtggtgcgttgaagcacctttggtccatcgttattatatgaagaggggaaaaaataaagactggaaacatttttccattcaggaagaggttggtgacaccaatgagccttccacaagcaaagtgtcagcaggagagataatgacactaccacctccaaacgcccttccagctcattccaaaaatggaaaaaacacaggatctggagatgaagctcgctgttctcgcctccctccccaacctcacccagggcaccagcccggaatgaaaaacattccatatagaggcttgggagcacggtctgtcccaggcaaggccctyggacccatttctaaagagctgaagaatcacaggagaaagagaggaaagggaggaagaggaaacctcaacctttcagttacattcactcttccgcctc

SEQ ID NO: 270081 - DNA, 235 bp, Homo sapiens
tgcctgcagtccagaatccccctcattcccaccttcaataaagggaatcctgtgggaagagaaaggaatgtgttaaagtgtagatcaagaagggacaggagaataaaaagaaatggaagmaggtgcacacacaggaaagatgatgagtgttctattgttgttaaagagttcatgctctaacaacacaaaccaaattaatcccagcctccccacttaaggacggtaaggggcaagt

SEQ ID NO: 270082 - DNA, 622 bp, Homo sapiens
gtttggccctgtgttcctaaaaattttatgggaaggtcactaataaactaagtgtgtaaatgctccgccatctagttaaaaaataataactgctactggagctgacttatactacatattttctgcaaaacacatttacttacctttccttctaataaaatacacccagcaataaataaaaggcagtaaaaagtatccatggcttgctattaaacttgatatatktttaacaacaggttttagtatactgtttttagaaggatcaggtatttgaaaataagcacccaatgagtacatgattaagattggcaccaaggtacaaatataataatttgtcccaagtacagtgtctgtactcagagaatttaaatgtctacccatgaaagatcagattgcactttaaaatggtcaatatactgctagcaatgagtcacttgtataaaaatgccactctaaagcacattatagtctttttggggttttttgtttttgttttttcaagtttaaactacagtctagtggatttagttcttcatgcttttgcctaagtgctacaatggcagggaaagaggctttggaatttcagatttttttttctttcttttttgtaaagaaaacctct

SEQ ID NO: 270083 - DNA, 543 bp, Homo sapiens
ttttagtatactgtttttagaaggatcaggtatttgaaaataagcacccaatgagtacatgattaagattggcaccaaggtacaaatataataatttgtcccaagtacagtgtctgtactcagagaatttaaatgtctacccatgaaagatcagattgcactttaaaatggtcaatatactgctagcaatgagtcacttgtataaaaatgccactctaaagcacattatagtctttttggggttttttgtttttgttttttcaagtttaaactacagtctagtggatttagttcttcatgcttttgcctaagtgctacaatggcagggaaagaggctttggaatttcagatttttttttctttcttttttgtaaagaaaacctctcaagagggtatccaaccactttttggagacataaacatatgtaaagcaaagtgacccaaataaaggaagaattaaaaaaaawatatatttattcttcaatttaggccaattctcttttacgggctccttgcaattagctggcaatcttgtcctgtggg

SEQ ID NO: 270084 - DNA, 528 bp, Homo sapiens
tttttggtaaagaaaaaaagaaacaggctataagtaaaaacaggtataaaaattaacacaaaacctttgagtaatgtatttatcctataagcggaaaattctgagaataatggaggactgaggggattaaaatgccacgcagtagatggactatttcagattttatagtcagggaaactggcttcgggaggacagctctcaattcatgtactttacgtaagagcagttctttctataggccataaagttgtaggtgatacaatcaactgggttataaaatagcttctttttagaatggagatgatacaaaaatcaatttctacaaccatcatttcctcctgaacacctctttcactttcaacctaaacttactctcccctttgggaattcccagtgtatttctttgagatgtcttccacrttaacagtagagcctacaaagaaccaacatgcagaggctacttgtcaaagggcactttctgtaggtagtctaaaagaacacaattatacacatacacaaacgtgtaca

SEQ ID NO: 270085 - DNA, 581 bp, Homo sapiens
tcaaaacagtatttactgtatgattagattcatataaagatttttttaaagaacaggcaaactaaacataccagtgagtatgtccygggaggagagtgactggaaaggcactgaagggatcttttggagtgctggcaatgctgtttctggatttaagtactagttagctgtgcatgttcagtttgtgaaaattcattgagctgcacatttgtgattgtacatgtttttatacataaatcatacttcactaacaattcagaaatgggagaagaaaaagactgtacgaggaatagtgatgcagactgtgagccctctgtggactgagacctttgcatggtttatcactgcgttcaccccagcacttaccagtgagtggcacagcatggatacattagtgagtgttggccaaaacaggcatggaggtggatttctaacagaaacttagctgaagaaatagcagctaatcttaataccattttaacttaccagttcgcatctatgaaaagtattcatattactttacaaatctccaaataaattcacaggctatgcatgtagccatacacagatgactgctataa

SEQ ID NO: 270086 - DNA, 581 bp, Homo sapiens
tcaaaacagtatttactgtatgattagattcatataaagatttttttaaagaacaggcaaactaaacataccagtgagtatgtcccgggaggagagtgactggaaaggcactgaagggatcttttggagtgctggcaatgctgtttctggatttaagtactagttagctgtgcatgttcagtttgtgaaaattcattgagctgcacatttgtgattgtacatgtttttatacataaatcatacttcactaacaattcagaaatgggagaagaaaaagactgtacgaggaatagtgatgcagactgtgagccctctgtggactgagacctttgcatggtttatcactgcrttcaccccagcacttaccagtgagtggcacagcatggatacattagtgagtgttggccaaaacaggcatggaggtggatttctaacagaaacttagctgaagaaatagcagctaatcttaataccattttaacttaccagttcgcatctatgaaaagtattcatattactttacaaatctccaaataaattcacaggctatgcatgtagccatacacagatgactgctataa

SEQ ID NO: 270087 - DNA, 544 bp, Homo sapiens
acagtggcttatgcccgtaatcccagtactttgtgaagccgaggccagaggatcacttgaggccaggagattgagaccagcctgggaaatatagcaaaactctatctttccaaaaataaataaataaataaataagccattagccaaacatggtagcaaacgcttgtggtcccagctactcaggaggttgaggcagtaggatcacttgaacataggagtttgaggctgcagtgagctgtgatcacgtcactgcacaccagctctacacaatagaattaaaaaaaaaaacaaaagtaaaaactcttctcaactctcaggtcaaacaaagacaggcagtaggctggacttggctcctgagcagtagtttgccaacccctagtttagtagcaagacaaaagaagttatttgctatgagattaaatagaragtttaagccagagactaatgcagaacacctactggaaaaggaaaggaaagagagaggaagataagaatttatgaaagatcctaaaatataaacaggtaagtggcttttatgaaacag

SEQ ID NO: 270088 - DNA, 645 bp, Homo sapiens
gatagtgacatgtgttatagttgtgacaataccatttaccaccttcgtgattttggatgagacgtaatcactctgagtttttgtttccycatcagtaaaatagtggccaaacaggacactggaagtgaatatgttttgaaacatgcgaattacatgtaagctgctctaaattttgttgtccttctacatttcaggaggcgctatcacacttggtgtgacatcaagataaagagcggaggtggatggggatggaagatgatgctcctatcctccctgcctgaaacctgttctaccaattatagatcaaatgccctaaaatgtagtgacccgtgaaaaggacaaataaagcaatgaatacattttcagtcgtcctatttttatttctggggactctattcagaaggacgtatccagattagttttcccttggttcataaactcgagagagcctgtttttataaagaaaacctggaatcttaagtaagacataatcattccttctcctttccttatctctaatttaaacatctctatttttcccaaatgttttatctcacggtgttttcagacccttcactttcctatcccccatcctaaataaatttttacatttaaaaaatgaaaaaataattttcaaaatattgt

SEQ ID NO: 270089 - DNA, 614 bp, Homo sapiens
atcataaaagtgacaacaccaaatgctggtgaggatgtagasaagctggatcactcacacattgctggtgtgaaagtaaaacagtacagctactctggtaaaatagtttgacattttgttaaaaaactaaacatgcaactaccataaaacccagcaattgtactcttgggcatttatcccagagaaacaaaaacttatatttatgcaaaaacctgtacacaaatggtcataacaattttattttagtagccaaaaactggaaacaacacagttgttcttcagtggatgaatggataaattttggacatctttgtaaagaaatactattcaacaaaaaaggagaacaaactatttatatacacagtaacctggatgcatccttagagaattatgctgagtgaaaaaatgtcaaaccccaaaggttaaattttgtatacttttatttatgtaacattctcaaaatgacaaaattatagaaataaagaacaaatttgtaatttccaggggttaaggagacgatgggggcaggaaggaagtgagtgtgttatataagagctgtatgagagatccttatgaggacagaaatattctgtgttttacctgtatcaatgtca

SEQ ID NO: 270090 - DNA, 614 bp, Homo sapiens
atcataaaagtgacaacaccaaatgctggtgaggatgtagacaagctggatcactcacacattgctggtgtgaaagtaaaacagtacagctactctggtaaaatagtttgacattttgttaaaaaactaaacatgcaactaccataaaacccagcaattgtactcttgggcatttatcccagagaaacaaaaacttatatttatgcaaaaacctgtacacaaatggtcataacaattttattttagtagccaaaaactggaaacaacacagttgttcttcagtggatgaatggataaattttggacatctttgtaaagaaatactattcaacaaaaaaggagaacaaactatttatatacacagtaacytggatgcatccttagagaattatgctgagtgaaaaaatgtcaaaccccaaaggttaaattttgtatacttttatttatgtaacattctcaaaatgacaaaattatagaaataaagaacaaatttgtaatttccaggggttaaggagacgatgggggcaggaaggaagtgagtgtgttatataagagctgtatgagagatccttatgaggacagaaatattctgtgttttacctgtatcaatgtca

SEQ ID NO: 270091 - DNA, 520 bp, Homo sapiens
cttaaccaaataatattctgtgtggaaggtactaagtgcatgaatatcctgaggataaggagaacttggcttcttcaaagaactgaaacatcacctgtgtttcagtgcacaggtggcagcaggagcacagggacacaagccaaggtcaaaccatgcattaggtgtcatggtcatggccctgtatttatcctaagagcccagaaaagccttgggaaattttgtatccaatgttctccatatacctgagtggcaacactgcatatgcaaccatatccacttgcattagtcagactcctacgagtcattcctgatacttccctctccctgacacgtcatgtagaactaatmaccatgtcctgtcaacctaatgtcttaatattctcttgaatccttccacatggttctgtctgcattgaccctcccttgctcaagagcttttggctggcttcttgctttactctggacccctctgtctagcctgcacaacagccaactgatatttttaaaatgcaacaatgat

SEQ ID NO: 270092 - DNA, 638 bp, Homo sapiens
aatttaccaaatcttgtattgatatggcactttcccaaccctcaacatgaaaaagtgatttcaaaatgtacaatagacaggtgaagataaaggcaggaaagttctggtagagtatgtttctcacatataagtagtgtattaattaatatagttgtagtaaatatgttatctaggcacaaatcagtgagtcaacattggaaaagagattttgcagccacatttgatggggagaagcagtttgtgtgccagatactgaatataatagacattctaagtaatttagttaagtgggatgtgatatttgaaattgacacaatccctagaaaatgcagagtgtgagttgtctgaatttattgtagaaagtaacatgcatttttcaacatttagtaggaattcactcttggtttatctacctgtattattaaaattmtttgtgctgcatgcacacctcttctggctaagtaaaaacaggaagacagacaaacaaaacatttattaaacatacatttgagttactttcagagtttatgtgtttgggaaggacaaaacccaagatagcttttgagaactcagtagaagcacatagaaactttattctagattagagcactgctttaactggcatcttgctctataat

SEQ ID NO: 270093 - DNA, 566 bp, Homo sapiens
tttaaacaatgcaggacaaatggagttaaaattttaattttattgaaaatattaargccagtaaaaatcatgccaatgttgttcagtagaggctgagaggttctcagatgaaccaggtattcggttattggatatttttccaaatactgtacctctctctactcatcatatcaggttgtgtgtagaatctcttctctcagagttcaccttatttgtagagcattcataatgcttatcccctcctccagatattccttcttatcttttccaaggcattcccaaggcccctttatgcataactttatcatttccttccacagttatgagatacacagagctatgtgattgctgagtccataaacttctcaacagccagctagttattcattttggtagcattggctgattgatatagtaggtatggattaaagaagcattaaagaaatgtgtaaaaaaaaaaaaaagggagggatcggccgggaatggtggctcacacctgtaattccagcattttgggaggccgaaggggggtgaatcactgtcaggagttcaagaccatcatggcc

SEQ ID NO: 270094 - DNA, 566 bp, Homo sapiens
tttaaacaatgcaggacaaatggagttaaaattttaattttattgaaaatattaaagccagtaaaaatcatgccaatgttgttcagtagaggctgagaggttctcagatgaaccaggtattcggttattggatatttttccaaatactgtacctctctctactcatcatatcaggttgtgtgtagaatctcttctctcagagttcaccttatttgtagagcattcataatgcttatcccctcctccagatattccttyttatcttttccaaggcattcccaaggcccctttatgcataactttatcatttccttccacagttatgagatacacagagctatgtgattgctgagtccataaacttctcaacagccagctagttattcattttggtagcattggctgattgatatagtaggtatggattaaagaagcattaaagaaatgtgtaaaaaaaaaaaaaagggagggatcggccgggaatggtggctcacacctgtaattccagcattttgggaggccgaaggggggtgaatcactgtcaggagttcaagaccatcatggcc

SEQ ID NO: 270095 - DNA, 615 bp, Homo sapiens
acacctgtaattccagcattttgggaggccgaaggggggtgaatcactgtcaggrgttcaagaccatcatggccaacatggtgaaacctcatttctactaaaggaaaatacaaaaattagccgggtgtggtgatgcacacctgtagtcccagctactcgggaggctgagtcaggagaatcacttgaacccaggaggcagaggttgcagtgagccgagatggcaccactgcactccaacctgggtgacagagtgagactctgtctcaaaaaaaaaaaaatcaatgttaataagagaaacataagatctatctatccaactacctatcttaatttaggaaattctggctgcatgccatgtctcatgcctataatcggaacagtttaggaggctgaggtgggcatccaagtgatcacttagatcacttgaggccaggagttcaacaccagcctgggcagcatggtgaaaccctgtctctactaagaatacaaaaattagtctctcccttagttgcttccttctccctagtttaatgttttttatattacaaccctagattgagccattcctccctgctcatcagggcatcttaggttggttcatgcatcaattccaag

SEQ ID NO: 270096 - DNA, 617 bp, Homo sapiens
tctatgatgagctgcacagtctttgatggaaaagttatgcaatttgcacttcttttagaagattcaaaatagtataacaataatgatgacaaagcaattctatcccttgcatatcacctagtagtttcataaatagtgattttacaaatgttgtgtaattttatcccctgagcaatcttacagagtatgcattttttagctcactgaactgaaaagtgaaaggattaagaggcttacagaagacctcatagacagtaagaaaaatgctargatgataactgcaggcctcttaacactagattcttaagggcccattggaatgagggccaaggatccagagtgaggttgattatattcaaggtcccttgggggctttttgactttgcttgattgtctttattcccaggagatgagaagagatggaagagtgacagtagctacatgtggtcgcccctctgagccctggtcacaggataaagtgggacctttattttttaattgtattgtaccctgacaagtaatgttaccagactgggtacataaaaatacaggatgcctagttaaatttaaatttcagataaacaacaaatgcttttctggtactataaaaaagatcc

SEQ ID NO: 270097 - DNA, 578 bp, Homo sapiens
aacactagattcttaagggcccattggaatgagggccaaggatccagagtgaggttgattatattcaaggtcccttgggggctttttgactttgcttgattgtctttattcccaggagatgagaagagatggaagagtgacagtagctacatgtggtcgcccctctgagccctggtcacaggataaagtgggacctttattttttaattgtattgtaccctgacaagtaatgttaccagactgggtacataaaaatacaggatgcctagttaaatttaaatttcagataaacaacaaatgcttttctggtactataaaaaagatccatgcaataattaggacaccctgatgctgaaagattattcattgcwtatcagaaatccaaatctaactgtgtttctcgtagtttatctagcaacctcagcacaagttttaactcaagaagtcccaacttctagacaatgtacccctgactttggataaaggagatgtaactaccttttgtgtggaggctgccaaattatgtcagaaactttacatctatattatatcctaaaatggaaactattagtaaaaaa

SEQ ID NO: 270098 - DNA, 491 bp, Homo sapiens
ccactttcacctgtatgtatgctcaagtaacttgccctctgcaacctgtttattaacctgcaaaaaggaaaatgataaaactgtacatgtttacatcattggattactatgagaaccaaatgagattatacatgacaacaatagcaggtagtatttattgcatgcttactatcaaccaggtacccttccaatttgtttcattccttttatttaattttcatgataactttacgagaaagttaaatgtccccatttatatgtgaggcctagagagattgaatagcattcctaaagtcacatttctggttagtggtagagccaggtayaggagttttattccagagtacatattcttcaccaatgaacattattaggaataattatcaaaaaataaatgccagtcagctcccatggaatttatactagaatagtgtcattatatcataagagcacataaaaaaatttcaaacttcatacatccactgaaaata

SEQ ID NO: 270099 - DNA, 528 bp, Homo sapiens
cctcagttcaaatggtccttctttgtgayaccttcatgataaccactccacccttctccaggcagtttgttacttcatcatctgccctatagcacacttgaccccattgtataagaactaagtgttggctgggcgcggtggctcacacctataatccaagcactttgggaggctgaggtgggcgaatcacgaagtcaggagttcaagaccatcctggccaacatggtgaaaccccgtctctactaaaaatacaaaaaattagctggtcgtagtggcagatacctgtaatcccaactacttgggaggctgaggcaggagaatcgcttgaaccctgggaggcggagattgcagtgagcggagatcacaccactgcactccagcctgggtgacagagtgagactctgtctcaaaacaaacagaaaacgacaacataaactgtcttatttattttacttttatttttctcttttttttccatcaacttttatttgaagttccaggctacacatgtagccagcaggatgtgca

SEQ ID NO: 270100 - DNA, 528 bp, Homo sapiens
cctcagttcaaatggtccttctttgtgataccttcatgataaccactccacccttctccaggcagtttgttacttcatcatctgccctatagcacacttgaccccattgtataagaactaagtgttggctgggcgcggtggctcacacctataatccmagcactttgggaggctgaggtgggcgaatcacgaagtcaggagttcaagaccatcctggccaacatggtgaaaccccgtctctactaaaaatacaaaaaattagctggtcgtagtggcagatacctgtaatcccaactacttgggaggctgaggcaggagaatcgcttgaaccctgggaggcggagattgcagtgagcggagatcacaccactgcactccagcctgggtgacagagtgagactctgtctcaaaacaaacagaaaacgacaacataaactgtcttatttattttacttttatttttctcttttttttccatcaacttttatttgaagttccaggctacacatgtagccagcaggatgtgca

SEQ ID NO: 270101 - DNA, 528 bp, Homo sapiens
cctcagttcaaatggtccttctttgtgataccttcatgataaccactccacccttctccaggcagtttgttacttcatcatctgccctatagcacacttgaccccattgtataagaactaagtgttggctgggcgcggtggctcacacctataatccaagcactttgggaggctgaggtgggcgaatcacgaagtcaggagttcaagaccatcctggccaacatggtgaaaccccgtctctactaaaaatacaaaaaattagctggtcgtagtggcagatacctgtaatcccaactacttgggaggctgaggcaggagaatcgcttgaaccctgggaggcggagattgcagtgagcsgagatcacaccactgcactccagcctgggtgacagagtgagactctgtctcaaaacaaacagaaaacgacaacataaactgtcttatttattttacttttatttttctcttttttttccatcaacttttatttgaagttccaggctacacatgtagccagcaggatgtgca

SEQ ID NO: 270102 - DNA, 454 bp, Homo sapiens
tcaatgtatgcattagtgttaaaagcacaggttttgggatcacacagaactgagtttgaatttcagatttgccccttacgagctgtgtgacwctgtaaccttaagatatttttaatttctctgtgctttggatccagtgtccataaaataggaataatgatacctcttggtgttgttataaagattagataagaaaatttgtaaaactagcacagtgccttgcaaatactaagtgaaaaataaataataaacttgtctattctattctattctattctattctattctattctattctattctattctattctattctattctattctacattgagttgtcttagaggagggagagagacattttaggaccaccaccaccaccaccaccaccaccaccaccaccaccaccaccaccactaataataataataataggctgcctcctctggtcag

SEQ ID NO: 270103 - DNA, 454 bp, Homo sapiens
tcaatgtatgcattagtgttaaaagcacaggttttgggatcacacagaactgagtttgaatttcagatttgccccttacgagctgtgtgacactgtaaccttaagatatttttaatttctctgtgctttggatccagtgtccataaaataggaataatgatacctcttggtgttgttataaagattagataagaaaatttgtaaaactagcacagtgccttgcaaatactaagtgaaaaataaataataaacttgtctattctattctattctattctattctattctattctattctattctattctattctattctattctattctacattragttgtcttagaggagggagagagacattttaggaccaccaccaccaccaccaccaccaccaccaccaccaccaccaccaccactaataataataataataggctgcctcctctggtcag

SEQ ID NO: 270104 - DNA, 454 bp, Homo sapiens
tcaatgtatgcattagtgttaaaagcacaggttttgggatcacacagaactgagtttgaatttcagatttgccccttacgagctgtgtgacactgtaaccttaagatatttttaatttctctgtgctttggatccagtgtccataaaataggaataatgatacctcttggtgttgttataaagattagataagaaaatttgtaaaactagcacagtgccttgcaaatactaagtgaaaaataaataataaacttgtctattctattctattctattctattctattctattctattctattctattctattctattctattctattctacattgagttgtcttagaggagggagaragacattttaggaccaccaccaccaccaccaccaccaccaccaccaccaccaccaccaccactaataataataataataggctgcctcctctggtcag

SEQ ID NO: 270105 - DNA, 617 bp, Homo sapiens
ctcttattaaaaaacccgtgatcagggagtgcagaataggactgagagaggttacataaaggattaaagaatagtatgtgagaagttgaaatcaaatgaggaaactagaagtcattaaagggctctagttcctctttaacatcacatctggaatatgtttcctccttgaaagcctcataaagaaatcataaaaccctctcttgttcttggttcattccagctaaagtttcagactagtcttggaagrgatgcatgtggcttcagctaggggtgccattcccatggtgtctacatgctaaggagtggtcacactctttgttaccctaatcaccttcctctatgtagcttatacattagtcaatcttcatgccatagatccatttaacagttactttttcagtgaacatttatttattgagcttatactatttgccaggtactctgccagacactggggacaagaaaatacaaaacaacagtccctgacctacctttgttgaggaggcaaacacgtaaccaaataattgcaatttaaatatgagaaatgctaatggagttgtgaacagattcctatagaagactaacagggagtggttaacgttgcctgcgggaggggg

SEQ ID NO: 270106 - DNA, 617 bp, Homo sapiens
ctcttattaaaaaacccgtgatcagggagtgcagaataggactgagagaggttacataaaggattaaagaatagtatgtgagaagttgaaatcaaatgaggaaactagaagtcattaaagggctctagttcctctttaacatcacatctggaatatgtttcctccttgaaagcctcataaagaaatcataaaaccctctcttgttcttggttcattccagctaaagtttcagactagtcttggaagggatgcatgtggcttcagctaggggtsccattcccatggtgtctacatgctaaggagtggtcacactctttgttaccctaatcaccttcctctatgtagcttatacattagtcaatcttcatgccatagatccatttaacagttactttttcagtgaacatttatttattgagcttatactatttgccaggtactctgccagacactggggacaagaaaatacaaaacaacagtccctgacctacctttgttgaggaggcaaacacgtaaccaaataattgcaatttaaatatgagaaatgctaatggagttgtgaacagattcctatagaagactaacagggagtggttaacgttgcctgcgggaggggg

SEQ ID NO: 270107 - DNA, 605 bp, Homo sapiens
gcatcgtaattgctacaatagaatattgtgggcagataaaggaagaccaaagaaatctcccagaggaaagttatctatgctgagatgtgagagataagtaggtgttaggcaaagatttacaggtaggaaaaagcatgacaataaatgagaaacttaagtagttcagtaggacagggacttgaagtaaagtgtcacggaacaggataaaaaaaaactgaaaaatatctagggcttgactcatccagaattctgwgaagtttttaaaatggctgggactttttctaacagcaatatgcaagggttttaaatagagaagtgacatgatcagattttattttccagtttctttaattggtagtagaaaatgagagtgaaccaacactgaaggcaaagagaccatttaggaaatcattattatcattataatcacattgttataataatgaccataatgatagtgcttggagatggggttggagccagtggtaatgtaaccaagtggatggacttgagcagtaagtttttgtaactttattagccctaatgctgcaatcttgacatatattttgtaatataccttccattctattaaaattagtagataa

SEQ ID NO: 270108 - DNA, 582 bp, Homo sapiens
ttagtctgtttgtggatcatctgaggtcaggagtttgagatcagcctggccaacatagtgaaaccccctctccacaaaaatacaaaaattagctgggcgccgtggtgcttgcctgtaattccagctactcggtaagctgaggcaggagaaccacttgaacccagaaagcagaggttgcagtgagctgagatcatgcactccagcctgggagacagggcgagaatcatctcaaaaaaaaatcaattatattcatttgacagcaaagwctcctcaatgtgtttggagtgggtgtgagacatgatcagatggtcattttggtgcattattcatatggtgggtgtaagggaaaagagagagaaataagggaatcgttcatgtgtattaattgagaatcaatattaatagtagtgtgacttggagaaaggtacagatttgaggtctacgttagctatttacaggaattattttaactttccctatttcctagaatatcagatatgaatatacttgtccacttttctccttttaaaacaaatgcttattaaatgtcaatttttttaaaaacagagcattgtttataca

SEQ ID NO: 270109 - DNA, 595 bp, Homo sapiens
tcatttgggaaatcagcatttagcaaacatcatagtaatattctaaggatgaatcatcaatgctaaaactaatgggtaaatgtttgatgaggaagaggatatttatggagtgtcagactatatctctacaaggtccccctcccattctttacaaggggaaaaggaataactttacagtgaagaaacctagttggtaccagaattcccccttatccttagttttgcttcacacagtttctattacttgcaatcaattgcagtttaaaaatatcaagttagaaattacagaaataaataattcctaagttttaaattgtgcaccattctgagtgcgatgatgaaatctctcatgttcctactctgttccacctgagacatgaatcatccctttgtccagcatgttcacgctgtatacactacctgcctgttagtaacrtagtagctctctcagttattagatcaactgtgacggtattgcagtctttgtgttcaagtaacttgttctacttaagcgattaaacgtagtgagcaaggcatgtcaaaagccaagatagacttaaagctagttctcttatgccaaacagttagccaagtt

SEQ ID NO: 270110 - DNA, 595 bp, Homo sapiens
tcatttgggaaatcagcatttagcaaacatcatagtaatattctaaggatgaatcatcaatgctaaaactaatgggtaaatgtttgatgaggaagaggatatttatggagtgtcagactatatctctacaaggtccccctcccattctttacaaggggaaaaggaataactttacagtgaagaaacctagttggtaccagaattcccccttatccttagttttgcttcacacagtttctattacttgcaatcaattgcagtttaaaaatatcaagttagaaattacagaaataaataattcctaagttttaaattgtgcaccattctgagtgcgatgatgaaatctctcatgttcctactctgttccacctgagacatgaatcatccctttgtccagcatgttcacgctgtatacactacctgcctgttagtaacgtagtagctctctcagttattagatcaactgtgacggtattgcagtctttgtgttcaagtaacttrttctacttaagcgattaaacgtagtgagcaaggcatgtcaaaagccaagatagacttaaagctagttctcttatgccaaacagttagccaagtt

SEQ ID NO: 270111 - DNA, 505 bp, Homo sapiens
tatgttattatgaagaaagtttgagtggtctggatagaagataaaaccagccacaatattcccttaagccaaagcctaatctagagtaaggccctaactgtcttcaattctacaaggctgaaagaggtgagaaagctacagaagaaaagttggaagctagcagaagttagttcatgaggtttaaggaaagaagccatctccataacagaaaagtgcaaagtgaaacagcaagggcttatgtagaagctgcaggaaaccactcagaagatctaactagctaagatcattgatgaaggtggccatattatactacagattttcattgcagacaaaagagccttctattagaagamgttaccatctagaacatcctaaagaggaaaagtcagtgcctggcttccgagcttcagaggacaaactgacttgttaggggacagcagctgtgacctgaaattgaagccagggttcatttaccactctgaaaatgctggagcacttaaagaat

SEQ ID NO: 270112 - DNA, 505 bp, Homo sapiens
tatgttattatgaagaaagtttgagtggtctggatagaagataaaaccagccacaatattcccttaagccaaagcctaatctagagtaaggccctaactgtcttcaattctacaaggctgaaagaggtgagaaagctacagaagaaaagttggaagctagcagaagttagttcatgaggtttaaggaaagaagccatctccataacagaaaagtgcaaagtgaaacagcaagggcttatgtagaagctgcaggaaaccactcagaagatctaactagctaagatcattgatgaaggtggccatattatactacagattttcattgcagacaaaagagccttctattagaagacgttaccatctagaacatcctaaagaggaaaagtcagtgcctggcttccragcttcagaggacaaactgacttgttaggggacagcagctgtgacctgaaattgaagccagggttcatttaccactctgaaaatgctggagcacttaaagaat

SEQ ID NO: 270113 - DNA, 534 bp, Homo sapiens
tagtatctctttaatctctacccaattagtctaaattctaccttttggggccaaccagatcatgttcattcctcttccccattcacttatgtaccaaaaagaatattaattaagtacctcctaggtgtttgatattgttttgagcctgtaatacagcagtgaaaaaaaggataaaatttctgctttcacggtgttaacattttaatcccttaaatcttttgaaaagacccaccaacttctaagggttttcctttccttagcccaaatattcctgcttcttccaaccactcatcatggagaaaaatttcaaattcttatcaatattggtagtttccttcctctaaacatattctggtttgtaaatcatctcttttaaaacacaactacctgatacrgtttggctcggtgtccccatccaaatctcatgtcaaaatctccagtgttggaagtggggcccggtgggaggtaatttggatcatgtgggtgctaaatctctcatgaatcatttagcacccatccctttggtgctgttcc

SEQ ID NO: 270114 - DNA, 514 bp, Homo sapiens
cttgaatttagaaggaaaatgcatctttaccatttatcttttgcggagtacctccttagtaactctgggcttcgaaccaggaccatttccagaatgcaaagaattactcctattagagaaaaatgaacagtagatttacaatccttatatttataaagattgttaaaaattgtgtgtgtgtgtgtgtgtgtgtgtgtgtgtgtgcaagaacatgcattgagattttgaaacatgcccatggactacaacgaaaggttctttttttaaaaaacaagttttcttttgtttttaattagctcataatcattgtacctatttatggggtgcagtgtgatgtttatatatatgtatrtgtgtgtgtgtatatatatatatatatatatatatataaaatgacaataaaatcagagtaaataccatatccatcacctcaacactcctcttttctagctattttaacttataatacattattgttgagtacagtcactgctttgcaactgagcatgagaat

SEQ ID NO: 270115 - DNA, 544 bp, Homo sapiens
tctctcagtagtggaaccccacacactcaccttcaccagcttggagctctgcttccctgctggggttttatagcagccaaatccattttggaggcttttgaatctatggggccaagggactctgaaggcatctgtgtcagttatcagactggtgaagtctctgtgctaggacctaagtaatacagtcgaaaggaggaacctgggggctcgtgttgaggtttgtctaaacgcctagaattcttttagggagggagcttgggatacaaacaatttttattcatcagggccttgaagttcagtgatcactggtccggataattaagactttaggaaatgtgacctcatctttgatgaaatttatgtctaagattttgaaacaaatataaagacaatttaaaartgcatgagcatagtaaagcttgacgttaattacaacagcaacagctaatatttatggagtgcttattatagagcaggtttaaccccttcactattctgtactttggaatcagaagggtgtgatgataggattttgtaaaaacca

SEQ ID NO: 270116 - DNA, 544 bp, Homo sapiens
tctctcagtagtggaaccccacacactcaccttcaccagcttggagctctgcttccctgctggggttttatagcagccaaatccattttggaggcttttgaatctatggggccaagggactctgaaggcatctgtgtcagttatcagactggtgaagtctctgtgctaggacctaagtaatacagtcgaaaggaggaacctgggggctcgtgttgaggtttgtctaaacgcctagaattcttttagggagggagcttgggatacaaacaatttttattcatcagggccttgaagttcagtgatcactggtccggataattaagactttaggaaatgtgacctcatctttgatgaaatttatgtctaagattttgaaacaaatataaagacaatttaaaagtgcatgagcatagtaaagcttgacgttaattacaacagyaacagctaatatttatggagtgcttattatagagcaggtttaaccccttcactattctgtactttggaatcagaagggtgtgatgataggattttgtaaaaacca

SEQ ID NO: 270117 - DNA, 544 bp, Homo sapiens
tctctcagtagtggaaccccacacactcaccttcaccagcttggagctctgcttccctgctggggttttatagcagccaaatccattttggaggcttttgaatctatggggccaagggactctgaaggcatctgtgtcagttatcagactggtgaagtctctgtgctaggacctaagtaatacagtcgaaaggaggaacctgggggctcgtgttgaggtttgtctaaacgcctagaattcttttagggagggagcttgggatacaaacaatttttattcatcagggccttgaagttcagtgatcactggtccggataattaagactttaggaaatgtgacctcatctttgatgaaatttatgtctaagattttgaaacaaatataaagacaatttaaaagtgcatgagcatagtaaagcttgacgttaattacaacagcaacagckaatatttatggagtgcttattatagagcaggtttaaccccttcactattctgtactttggaatcagaagggtgtgatgataggattttgtaaaaacca

SEQ ID NO: 270118 - DNA, 304 bp, Homo sapiens
gttaggctggactgagtccaggattgaattggatttgataattaactgaactggattcagttagaggtctcaggcctcaggaaggtactttatttttaaaatgggatcttttgaatccaaagagtctgggactccaccttccaggactccatgtaaattttatgtataaaaattatggacccagaacatgtgcatttttagaaaaatgggttaaccgcactagagaraacttagaattaagatggccacaatggggaagttttaatttggataaaattatttgtgaggcacattagaaaagggg

SEQ ID NO: 270119 - DNA, 578 bp, Homo sapiens
cattttaaatcacaaccaaaaggacctagaacaagaagttctttaccgcaagatgtctgccttcattgcagacaatcaagacacttgaaaagagattgtctgcttttatttcagtatgccaataagcctccctttaggccgactgtttccaccctaaaaagaacccaagagacctcagcccttctgataaaaatcaacattgatgaggctccaagggattctctggtaaatttctccctataatacctttaaataaacatggagaaacaaaggttaaaataaatggggagtcatgtacrgtcatggtggataccagagctaccctatctaccgtaaactccacttcaataagccaacaaatcccttggagtaaaaaggtcattcctgtggtgggggtttcaaatcaagtacaagaggatctcttatctgaatccatccaattaactttggggccttttcataataacaaactttttactatgtgatactgctccagtaaattggctagggcgagatttactttcaaaactaaaagggcacatgcaattttccttgctcctttcaaatagcttctcctg

SEQ ID NO: 270120 - DNA, 578 bp, Homo sapiens
cattttaaatcacaaccaaaaggacctagaacaagaagttctttaccgcaagatgtctgccttcattgcagacaatcaagacacttgaaaagagattgtctgcttttatttcagtatgccaataagcctccctttaggccgactgtttccaccctaaaaagaacccaagagacctcagcccttctgataaaaatcaacattgatgaggctccaagggattctctggtaaatttctccctataatacctttaaataaacatggagaaacaaaggttaaaataaatggggagtcatgtacagtcatggtggataccagagctaccctatctaccgtaaactccacttcaataagccaacaaatcccttggagtaaaaaggtcattcctgtggtgggggtttcaaatcaagtacaagaggatctcttatctgaatccatccaattaactttggggccttttcataataacaaactttttactwtgtgatactgctccagtaaattggctagggcgagatttactttcaaaactaaaagggcacatgcaattttccttgctcctttcaaatagcttctcctg

SEQ ID NO: 270121 - DNA, 585 bp, Homo sapiens
cctggaaagttccatttctctcattttctcataattcatttattagctagaatatcacaacattcctccagcccttcctaaactccctaccttacccaatcatccatactctatattttagctcctggttttcttcatcacagaacttattgcatttttaaagtaataaatttgtttgttcaagaatctttttttggtagctatttgtytctttcctccaggagaatataagtttcctgaaggtaggaaatgcatctgtcttatttactgttggatcacagaaccacaataaatatttatttttaaaaggaacagatcattcattccaatattttctctcatttctttctatgttctctgtttctatatgtgtgaagcagggttattcctaaccattgagcacatattgaacttgtcttcccttgatcactttgctggtgtttgctctattctcctaatctctgaaaattttattcatactttcattttctccattaaaactcttttaattttaataaacatgagctagttctgcctctttcattataccccttgtaatatgttgtttttcccttatggtactta

SEQ ID NO: 270122 - DNA, 518 bp, Homo sapiens
taaaaggaatcattagatccatttttaattacttaaaaataaaatgacctttttcttccctctttacaactcttaccaaaaagaatgtcatgaggtaacttctagtagaatttatctyaccattttgattaaaatccatatgttgcatttgacatgagtaaaatatttaaaatacagattcaatttataagaaaaaaagattgctgaagtgaaggctttagagatttcttttgaattttacctttattacattaattgaatttggtgaagagctccattctgaaatattattctactcaatttggaaaacatgtatcacataattggccttaaaactggaaaggacttgaggatatgactcatgtggtatagagatcatatcagtccagggaagcttagttataactagataattcgttcatgttgctttattcatttaacaaatatttaccattacacacgtgaccgtactaagaggattggcaaagcccttcccgcatgtagcagctcatgttcta

SEQ ID NO: 270123 - DNA, 518 bp, Homo sapiens
taaaaggaatcattagatccatttttaattacttaaaaataaaatgacctttttcttccctctttacaactcttaccaaaaagaatgtcatgaggtaacttctagtagaatttatcttaccattttgattaaaatccatatgttgcatttgacatgagtaaaatatttaaaatacagattcaatttataagaaaaaaagattgctgaagtgaaggctttagagatttcttttgaattttacctttattacattaattgaatttkgtgaagagctccattctgaaatattattctactcaatttggaaaacatgtatcacataattggccttaaaactggaaaggacttgaggatatgactcatgtggtatagagatcatatcagtccagggaagcttagttataactagataattcgttcatgttgctttattcatttaacaaatatttaccattacacacgtgaccgtactaagaggattggcaaagcccttcccgcatgtagcagctcatgttcta

SEQ ID NO: 270124 - DNA, 518 bp, Homo sapiens
taaaaggaatcattagatccatttttaattacttaaaaataaaatgacctttttcttccctctttacaactcttaccaaaaagaatgtcatgaggtaacttctagtagaatttatcttaccattttgattaaaatccatatgttgcatttgacatgagtaaaatatttaaaatacagattcaatttataagaaaaaaagattgctgaagtgaaggctttagagatttcttttgaattttacctttattacattaattgaatttgktgaagagctccattctgaaatattattctactcaatttggaaaacatgtatcacataattggccttaaaactggaaaggacttgaggatatgactcatgtggtatagagatcatatcagtccagggaagcttagttataactagataattcgttcatgttgctttattcatttaacaaatatttaccattacacacgtgaccgtactaagaggattggcaaagcccttcccgcatgtagcagctcatgttcta

SEQ ID NO: 270125 - DNA, 595 bp, Homo sapiens
catttaacaaatatttaccattacacacgtgaccgtactaagaggattggcaaagcccttcccgcatgtagcagctcatgttctagttggggagtcacaaaataaaaacataaaaaataatcattgcaagttctgataactgctatgaaggaaataaatagggtactgtgattgagaatggagggaaatcatttatttaaagtagggagaggrggcatgtctgtcagaataatattttagacaagctgaaatgtgaatactggggaggactcaaatgtagaaaagtctttcctacagaagaaacagagcgcaaatgtcctcagattggggaaaatttagaatattttaaaaactgatagaaggctagtgtgactacagccaaatgacagaggatgcagagaaactttaggttcattgagaaagggtcccagtgccagagttagcagtcttttagacaatggtaagaagttttaattttgagtattgattaatagattgttgttatgcaaagaaaaagatactatatgaaggatggcaggagtgagggaatgttaatctagtttctttagtgaaaaaaaaatcattctctaaaatt

SEQ ID NO: 270126 - DNA, 604 bp, Homo sapiens
tcagtataatttctattgtgtaaaagccatgcccattctcttgtaaccttatcctttgtctcctgcacaaacctttcctaaacctatctctgagtcttcaggcaagatgaaatgagctagattctgttctgtttggctcttcatcagtgttcaattcatttgcatatagcttatgtttgtaatatcattatcatatggagagagcagccaggactaaaacataagggatggtagctacacaatttaatcccattgaaactctcttctttatttaatgaaactcccagtgtgactcatcttattccataacctccttgtcccctcctttcctgttctctcaacatctgctttgaaytcactaacaacattttttatgctactagatgtaaaactttttgcttcttcaatatattagattgccctcctgacaaatactaaattataaataatatataagaaaaaatatttcattgctataatgttaagaataataatcatggttaacatttatgagcatttatgagctaggcagtttgtttacatgtattatatgtatcaactcactttcttctaacaagaaccatcatggaatgtgtcagtatcg

SEQ ID NO: 270127 - DNA, 644 bp, Homo sapiens
acctcttgtgaactaaaatcacttcagatcatggatatgctctctctaatatgcacaacatttagatggtcccgctaaaatgtcaggtcataaaaaaggtctgctaacawggtaatattcaaggtgattttctggcttttgccaatggtattgtcccgtgcaatagaaacacagcttctctaaaaggtgtggtccatacaagaactagttccgacaaaatgtactttctgagctcgctaatggattcttacggcattctggagttgccttctctaaagcttctgtaacttactaatgcccacatgtttcctccgtatttgttggagacccctaaattttagggacttcaaaatctgatctaaggtctctctttcaagaaaatacagcaaaataaccaaaagaaaatttgcatattataggccctactggacttttaacaaatatttgagaatgagagaaaaggcactagaaccactttcattaccttctagcagtatagagtttgggcaaaccacctaaactctgtgatctcaagttgctttgtagtaattttcaagtgtaggaatgcttttgtgtgtttttgtttgtcagtgttttgatgtttaaaacaattttttctaaatcagttttaacatactggataa

SEQ ID NO: 270128 - DNA, 644 bp, Homo sapiens
acctcttgtgaactaaaatcacttcagatcatggatatgctctctctaatatgcacaacatttagatggtcccgctaaaatgtcaggtcataaaaaaggtctgctaacatggtaatattcaaggtgattttctggcttttgccaatggtattgtcccgtgcaatagaaacacagcttctctaaaaggtgtggtccatacaagaactagttccgacaaaatgtactttctgagctcgctaatggattcttayggcattctggagttgccttctctaaagcttctgtaacttactaatgcccacatgtttcctccgtatttgttggagacccctaaattttagggacttcaaaatctgatctaaggtctctctttcaagaaaatacagcaaaataaccaaaagaaaatttgcatattataggccctactggacttttaacaaatatttgagaatgagagaaaaggcactagaaccactttcattaccttctagcagtatagagtttgggcaaaccacctaaactctgtgatctcaagttgctttgtagtaattttcaagtgtaggaatgcttttgtgtgtttttgtttgtcagtgttttgatgtttaaaacaattttttctaaatcagttttaacatactggataa

SEQ ID NO: 270129 - DNA, 599 bp, Homo sapiens
gagggaattgaatcatgagggtgtttcccatgctgttcttgtgatggcaaataagtctcatgagatctgatggttttataaagggagttcccctgcacatgctcttttgcctgctgccatgtaagatgtgcctttgctcttccttagccttccaccatgattgtcaggcctcctcagccgtgtggaactatgagtcttttaaacctctttttctttataaattacccagtttcgggtatttcttcataggagtataaaaatggactaayacagtgtaaaataaaaagatgtggtttacccagcagtattcacagctttttaatttaaattctggacacactttcacagttatgttgaatgtcaagaaatataattctgtataacttttaatttttttcctcttattgtcaattatcactttaccatgtattgtgatctatagaaatgtcaagatcaaagtgaacactaatcccagaaagtgaggtagctttgtattttctaccatgggccaggtgcatctgtgttttgatctttgctgatttataaaactgctctaatcttgcccatgattcactttctttatttcttttccaaaggca

SEQ ID NO: 270130 - DNA, 599 bp, Homo sapiens
gagggaattgaatcatgagggtgtttcccatgctgttcttgtgatggcaaataagtctcatgagatctgatggttttataaagggagttcccctgcacatgctcttttgcctgctgccatgtaagatgtgcctttgctcttccttagccttccaccatgattgtcaggcctcctcagccgtgtggaactatgagtcttttaaacctctttttctttataaattacccagtttcgggtatttcttcataggagtataaaaatggactaatacagtgtaaaataaaaagatgtggtttacccagcagtattcacagctttttaatttaaattctggacacactttcacagttatgttgaatgtcaagaaatatmattctgtataacttttaatttttttcctcttattgtcaattatcactttaccatgtattgtgatctatagaaatgtcaagatcaaagtgaacactaatcccagaaagtgaggtagctttgtattttctaccatgggccaggtgcatctgtgttttgatctttgctgatttataaaactgctctaatcttgcccatgattcactttctttatttcttttccaaaggca

SEQ ID NO: 270131 - DNA, 529 bp, Homo sapiens
cttaaatcaaatgaatatatgtaacatatgtaatttttttttaaaaaaagaaaccagcttttattttttaaagaccgaacaaagaaacaagtttttctttggatttggctaagctgggatgctaataagatggctgtttgcaaatggaccagtttgtgtccacagagtgatatatayaggctctcatataaatatgcatacacatatgtatgtacatgtattattttctccctctttctttttctccttctctctttcatttgttctttttttaaactcttctatcttttggaactatgagggcaaacctaaatatgttgcaaggtaacttatttttatctaatgaacatgcaacagccaattgaacaaaataataaatggtacgttttaagtattaacgtctatttgatctgaagtgtggaaacaaagtcatttgagctacttattggactgaaacgtggatttgcatgattctctatgtaaagtgagtttttaaactaaatttcttgacagagagggaagagggaag

SEQ ID NO: 270132 - DNA, 353 bp, Homo sapiens
tgctgacagaaggaggcagaactgatacgctcgtttgatgatgccaagctctctcatgcctctgcatggacttcacaggcccattgccatatattagcgctttaatcagaaagcagctctactgggggagttgaacaagagagtgcttccttttcctttgcatgtttacatccttttatctacttattatctaattctccttccraattgacatgtagagaatatgcaggaatccagatggctctggaaaagtcacggagacaaagattctattgcaaatgcttattgtccctcccacacccaaatgtccaaaaaaagctctaatagcattaagcatgcatgtgatgccatat

SEQ ID NO: 270133 - DNA, 549 bp, Homo sapiens
gacctttccacaggtttttatcacagtatagtggtgtcaatagttgggtttatatgtcagttgacttccccagggtgaaagtggaagctgccagatgtgcttatgcttaatcggcactgtgccacttttaccatgctctattcctcaaggaaagtctgagggtacgcagagattcaagaagggggaaatcaatttcaccttttaatggtagagtgccatacacattcagagatagaagaaattgacagtggccacctttatatactacatatcacaaaaggatttgcatttttaatcacagttcttmcatttatatgtttattgggtcaactaaattatattcagcttctcagtacataatatattttcagtagtttttttttttttttttttttttttttttttgtcattgctgtttccctgcctgctgcaagtcttttcttcttctccttcctctccacccttaaccagaccatattctggtcatactacaggaatttctccaggaatttttttctcaaaaggcttaattaccctcttatttatgtt

SEQ ID NO: 270134 - DNA, 565 bp, Homo sapiens
tatcacaatgtgaaagtaaaggcttatcttactctgcatttccaatttttctttacattctaccaatagcattatagcaataataataacaataataataataaygacaatcaataccaagatgtgaatattttcatcagttgtttagtaggcttggcatgtattgcagagggaatctaatactccttttcttaaactgtgacaaataaaatagagctttcattttccaacaaaaaaaacatcttttagatatctcagaggagaagatcctttactgtactgtggtatacaggaaaggagaatagttaaaaattctaaatgtctgaatgcctggtgtcaacaatttgggccaagtttacaatactttgcagggccaagcatgaacagatgaacaggtttctctctgcatctctctctctctcttctctctcacacacacgtacactcacatattaattttttaaagtgtcttataataactcttgtgatattccatagtgttggacagatgagtcaatgctttattagggaattatgacaccctcataatgacaggagagtttga

SEQ ID NO: 270135 - DNA, 616 bp, Homo sapiens
ccctgggcttgaatttcagctggaattcaaaaccattggctgtgtggtctttgatttcttagctaacttatctggaagctttggtgttgtcatctatgaaatcagtaataatactgtccaggactgtttaaagataaagtatgtggatacatgcacatatttagaatagtgcatgagatgatgtaaagtcctaggtaaatatgttactattttgatttattttcaaaactatttttagcttacaggtacaaaaacaggctgtaggacaccatttgctaatccctgccctaaagtggacacggtgtgctggtccacccatatccctcacctcagcactggaacaccattctcctgcttgctaggagttctggctcctgctaagcacccgtctgagaatcaggaattgtcttcctctgaaggaagctgtcttgttaatatcacacttcttccccgggggcagcctgcatccaatgactatcaaaggagggttgtaaaagtcttgttctcaaagatgactctgaagaactatctcagctcctgagctcctcctgggatcctataaggtgtgtgttacaactacaaggcagcacarcttgccctttgccagtcttgcttc

SEQ ID NO: 270136 - DNA, 379 bp, Homo sapiens
taatatcacacttcttccccgggggcagcctgcatccaatgactatcaaaggagggttgtaaaagtcttgttctcaaagatgactctgaagaactatctcagctcctgagctcctcctgggatcctataaggtgtgtgttacaactacaaggcagcacagcttgccctttgccagtcttgcttccctgcccttcacaggtgcgattcctgactacacctcaaaggatatcagtcatccacctcccaccatattttagattgtttgtatcccacagccttgaggattatatacagctrtgtttaatgctcctcagccttaagctgctctcattatcctttattatcccttacgtgatttttagaacttcagaacatgatc

SEQ ID NO: 270137 - DNA, 329 bp, Homo sapiens
tatttagccataaaaaagaataccgtcttgtcatttgtggaaacatgaataaaactcgaggacagtatgttaagtgaaacaagccaggaatggaaagacaaatattgcatgttctcacttatatatgggagttaaaaagtggatctcatagaggtacggagtagaatggtgatgactttaggctgggaagggtaggagggtggtagaataaagagaagttatttaacaggtacaaaaatacagttasaagaataaattctggtgttcaaaagcatgtagggtgaatgtaggtttattgtaagttttaaaatagctggaagaaaatattt

SEQ ID NO: 270138 - DNA, 489 bp, Homo sapiens
tatgttttcatatgagtatgtgtttagatgtatttacttaagtggcttaagtaaatttaagtcattgrtaattttaacaatgctttttaaataagtagatctatgttgacacactgaggccatgtagaggaagtagaatattgtcatggtggccaaataacaaatatttttctttcctttaatattagcaattttatacaagtatttcattaaagcaatttaactgaatgcaatttaattatagtccatttgtatccagaatttaatcagagaagaaaaccattaggagatcaataggcagatctatacaattgttacatgaatcttaccttatgcaattgtgggagttagttaaatagtttccgcaaggtttttgtctttgcttgtggtgctggagcttgaagtccacaaggaaggtagttggaaagggaagatgattgtaaagtggggaaagtaaaaaaaaatctagagttaaaatatacaagctgg

SEQ ID NO: 270139 - DNA, 489 bp, Homo sapiens
tatgttttcatatgagtatgtgtttagatgtatttacttaagtggcttaagtaaatttaagtcattggtaattttaacaatgctttttaaataagtagatctatgttgacacactgaggccatgtagaggaagtagaatattgtcatggtggccaaataacaaatatttttctttcctttaatattagcaattttatacaagtatttcattaaagcaatttaactgaatgcaatttaattatagtccatttgtatccagaatttaatcagagaagaaaaccattaggagatcaataggcagatctatacaattgttacatgratcttaccttatgcaattgtgggagttagttaaatagtttccgcaaggtttttgtctttgcttgtggtgctggagcttgaagtccacaaggaaggtagttggaaagggaagatgattgtaaagtggggaaagtaaaaaaaaatctagagttaaaatatacaagctgg

SEQ ID NO: 270140 - DNA, 570 bp, Homo sapiens
aatccgtgcatgggaggagatagaagttagaaggaaatatccctagttgcctggctttctcctacttctgctaacagccctcaacctcaagtgttactttttagggaagtctcccctcaaccccacaacactaagttgggcatcccctaaaagtccctgtggtgtcacttaattaccccgttatatcctttaacaactctgcactaaartggaacagttggctttctctccatgagtctattcgctcctttagctaacttcaagactatgcctgttatttctcatctgtttagcactgtacttggcacataaaagtctcttcaaaaatgtttgttgatagaatgaatacatgaaaatataaataaacaggaggagtgtggaggggcaggttatcaaggaagcagtggggtttactcaaagatagaggagtactgagggagaacagactgcagcttctggcccccctgtaagaagtccaacaatgccaggtttgctggtgctgacagaaataccctagcctaaaattgtgaacttcgattatttctgtgcacaaaaaatctagtaaaactt

SEQ ID NO: 270141 - DNA, 570 bp, Homo sapiens
aatccgtgcatgggaggagatagaagttagaaggaaatatccctagttgcctggctttctcctacttctgctaacagccctcaacctcaagtgttactttttagggaagtctcccctcaaccccacaacactaagttgggcatcccctaaaagtccctgtggtgtcacttaattaccccgttatatcctttaacaactctgcactaaagtggaacagttggctttctctccatgagtctattcgctcctttagctaacttcaagactatgcctgttatttctcatctgtttagcactgtacttggcacataaaagtctcttcaaaaatgtttgttgatagaatgaatacatgaaaatataaataaacaggaggagtgtggaggggcaggttatcaaggaagcagtggggtttactcaaagatagaggagtactgagggagaacagactgcagcttctggcccccctgtaagaagtccaacaatgccaggtttgckggtgctgacagaaataccctagcctaaaattgtgaacttcgattatttctgtgcacaaaaaatctagtaaaactt

SEQ ID NO: 270142 - DNA, 331 bp, Homo sapiens
gacttttgtactgatctttaaacagcaaagagaaaaactgaaatcgactatttgaaggtggggtttttttttgttggkgagtaaggttagaggtagtgtttcagaaggaatttccttcattgttaatttagtaaatatatattgagcaactattacattgctttgctgggccgtgggcaacaaatgatgaacaggtcaaaaatgtttgatcctgcctgcaactctcatgctaatgggaagacagacaatatgcaagtaactacagtaagagctaatatttatcaactgcatactatgtgccagacactgttcctaggctttattgaaaagc

SEQ ID NO: 270143 - DNA, 331 bp, Homo sapiens
gacttttgtactgatctttaaacagcaaagagaaaaactgaaatcgactatttgaaggtggggtttttttttgttggtgagtaaggttagaggtagtgtttcagaaggaatttccttcattgttaatttagtaaatatatattgagcaactattacattgctttgctgggccgtgggcaacaaatgatgaacaggtyaaaaatgtttgatcctgcctgcaactctcatgctaatgggaagacagacaatatgcaagtaactacagtaagagctaatatttatcaactgcatactatgtgccagacactgttcctaggctttattgaaaagc

SEQ ID NO: 270144 - DNA, 371 bp, Homo sapiens
aattagaaaaaactatacaagtgtttgtatgttgaatgccttcaatgtgattcaggtagaaatgtaaaattaatgacatcttcctaaacttttgattaatagtttaacatagtaacattttcagtggactcctagtggtattagatgaaaaagaaaacaaatatatgattttcatcttcttgtcccctctctgaacccagagtgataacttttcttgaggaaagacacgttcaaattatatatgattttttaaagtttttacattaattttaatattttgggccatgatgtttatcccaaaaatataactttgattattctgtctcctaatcaaytgagaattctgataatgcatgtggtaatttcctcaa

SEQ ID NO: 270145 - DNA, 619 bp, Homo sapiens
tgatttggtcactacagctttgcaggtgtttgttttgagacagagtgctctgtagcctaggctggagtgcagtggcgcaatcttggcaaactgcaacctccacctccaggttcaagcaattcttccacctcagcctcccgaatagctgggactacaggcgtgtgccactatgcctggctaatttttgtatttttagcagagatggggtttcaccacgttggtcagactggtcttgaactcctgacctcaagtgatccacctgccttggcctcccaaactgctgggattacaggcataagccactgtgcccagccaactttgtactatattttgaggtgaggtagtgtgatgcttccagctttgttctttctgctgaggattgctttggctatctggggtcttttgtagttccatgtaaattttagaatcgyctcttttatttctctgaagaattgcactggtattttgatagggattgcattgaatctgtaaattgctttgggtagtattatcattttaacaatattaattagtcctatccatgagcacggaaactttccatttttgtgtgtcctgtattaaactctttatgctgctataaagaaacatctgagactgg

SEQ ID NO: 270146 - DNA, 619 bp, Homo sapiens
tgatttggtcactacagctttgcaggtgtttgttttgagacagagtgctctgtagcctaggctggagtgcagtggcgcaatcttggcaaactgcaacctccacctccaggttcaagcaattcttccacctcagcctcccgaatagctgggactacaggcgtgtgccactatgcctggctaatttttgtatttttagcagagatggggtttcaccacgttggtcagactggtcttgaactcctgacctcaagtgatccacctgccttggcctcccaaactgctgggattacaggcataagccactgtgcccagccaactttgtactatattttgaggtgaggtagtgtgatgcttccagctttgttctttctgctgaggattgctttggctatctggggtcttttgtagttccatgtaaattttagaatcgtctcttttatttctctgaagaattgcactggtattttgatagggattgcattgaatctgtaaattgctttgggtagtattatcattttaacaatattaattagtcctatccatgagcacgraaactttccatttttgtgtgtcctgtattaaactctttatgctgctataaagaaacatctgagactgg

SEQ ID NO: 270147 - DNA, 631 bp, Homo sapiens
gtttgagtgaatcaatgaaggsatttgcttaagttgatgaaacataggaggaatgggccagaacttctgattcctggccaagcatttttttttaacctgtttccatatagaattgttataatttggggctaataaatctttgtgttaaaggggtgggtgggtactgtatcccatgaatataagtgaaaagtatttctaaggcagtggtcacaaacttgcccggtctgaggaatcacctgaggcatttgttaagcatgtggatttccataccctcgggagattctgctccaggagggctgaagtggagctctggaatcttgtgtgttaaacaaccaagccaggtgcttcttaggatatattgggtttgggaaatgtctaagccttaaggcactggcagaggtaaggggttatttgatcaggaagctgctgcccctcttaggggagattctggaaactttattttgactttcctttcctttagccatggacgcatcatatgatggtactgaggtaactgtcgtgatggaggaaattgaggaagcctattgttacacctctcctgggccacccaagaagaagaaaaagtataaaatacatggagaaaagacaaagaaacccaggttagccaaca

SEQ ID NO: 270148 - DNA, 617 bp, Homo sapiens
tttcatattacagattgaatgtagtatattgtactaactgctatcagttataatcaggaataaggtttgcatgtttagaggtagatagagctgcttgtgtaatacagtaccacattattttgttagcactggtggttggaaactatgctraaagcaaaaatgcaagtaaagccaaagatggtggaggagaccaaggctttgggtgcttgggttaaaggactaacaaggaagcatttagaattatgtctgtcagcattttcttatttctagttcacagtaacaaaatacactgacagctatttaaactgctgggtttttgtttttttgagagtatccctgtcatggcataaactgctgtttttttaaactgaaattcctgcaggaagaataaccttgctgttgcaggctggaaccttttatccttaactccttatttcaatagaaacagttgtctgtaacttctattttggtaatgtagagcaacagcaacaactacgttatagcagaacaggttgtattttcccttattggagctcatcagctactgccatttaaattattttgtgcttattggcctggcattcttctttctgggagagctttgtcttacctacagg

SEQ ID NO: 270149 - DNA, 587 bp, Homo sapiens
ctttctcaggctccttggaaagcttttagttaatcaaagctttatttctagcagtctaggcagccctcctctctgaagttgggccaaactacttgggtagtaaaatacattccacttggctccttagggctgctattattattattactattaccaggaaaaatgggcattttcagaggtccccagaatttccatatgagttttttaaagtgaacagaaaatggtggcacttgaggcagcaaatggaaggactaaaataaggatgagaagagaaatgtcactggtctgccttggggaaagaggggatggcacacagaacaggtcaggacytgagatggagcctggtcactccagatcaaggctggaccttgaaaggcaggcaggttttgaatggaaggggaaggcatgccatacttaagtctctcccactagactgtagtctggtgagtgaacatgaagtgtgagtatggataaggataagtgtgagtgataaggataagtgtgagtgaacatgaagagtgttccatttggctggaggagatggcgtgggggcatggggtgggagaaggggtgttacggaaaataag

SEQ ID NO: 270150 - DNA, 476 bp, Homo sapiens
tgcttgagctcaggagtttgaagaagccagcctgggcaacatggtgagaccccatctctattaccaaaaaaaaaaaaaaaaaaaaaaaaattattggccaggcawggtggctcacgcctgtaatcccagcactttgggaggtagaggtgagaggatcgcttgaacccagaaatttgagaccagcctggcaacatagtgagactgtctctataaaacactaacacgctaattaaataaataaaattcaaataattgatatatttgaattcgaatttcaccttgatatgtacattttgttttcctacctgctctatgttcttctctccttctttctccctctcttttttagtgaaagtgtctcactatgttgcccaggctggagtacagtggctattcacaggtgcaatcatagctcactgcagcctcaaattcctaggctcaagcaatcctcctgcctcagcctcctgattagctgg

SEQ ID NO: 270151 - DNA, 378 bp, Homo sapiens
agtttaacagtcaattagacactgttgaagagagagttagccaggcagtggctcacgcctgtaataccagcactttgggaggccaagacaggcagaccacttgaggtcaggagttcgagaccagcctggccaatatgacgaaaccccatctgtgctaaaaacacaaaaattagctgagcatggtggcctgcactcatagtcccagcttctcaggaggctgaggcatgagaatctcttgaacccaggaggcggaggttgcagtgagccaagatcatgccactgcaatccagcatgggtgacagaatgagactctgtctcaaaaaaaaaaaaaaaaaaagagttagtaattaatagaagatrgatcgaagaaatattcaa

SEQ ID NO: 270152 - DNA, 613 bp, Homo sapiens
agcaactatccttggagaagctaacaagggctctacagggaaaaaaaaaacaaaaacaaaaggactcttttatccagtggttctcaaacttgcgtgtgcatgagactcacttggaggacttgttaaaacagtttctgatttatcagagctgggagtgtgtgtgtgtgtgtgtctgtgtgtgygagagagagagggaaagaggagagagagagagagaaaaagaagaatgtgaatttctgataagttcttaggtggtgtggatgtggtctggggtaacactttgagaaccactgctttaatcaaaatcaaacaagttcaggcaattctgcatatcatatcccactgcctcccacacataccttctctgccgtcccccatgaccctagactcacagcaaaccttagtaaggaatcctgcagggaatgagccctgtttaaatgggtttagcccacattttctgccctcatttaactataggacccattttttgcagcatatctattcccagccttcagggcttagtacctcagaacccactgcaagaaaccaacgcacccaaaacatcacacttcacaggacacagaggaacagcgtgtctcttttcttataaatg

SEQ ID NO: 270153 - DNA, 613 bp, Homo sapiens
agcaactatccttggagaagctaacaagggctctacagggaaaaaaaaaacaaaaacaaaaggactcttttatccagtggttctcaaacttgcgtgtgcatgagactcacttggaggacttgttaaaacagtttctgatttatcagagctgggagtgtgtgtgtgtgtgtgtctgtgtgtgtgagagagagagrgaaagaggagagagagagagagaaaaagaagaatgtgaatttctgataagttcttaggtggtgtggatgtggtctggggtaacactttgagaaccactgctttaatcaaaatcaaacaagttcaggcaattctgcatatcatatcccactgcctcccacacataccttctctgccgtcccccatgaccctagactcacagcaaaccttagtaaggaatcctgcagggaatgagccctgtttaaatgggtttagcccacattttctgccctcatttaactataggacccattttttgcagcatatctattcccagccttcagggcttagtacctcagaacccactgcaagaaaccaacgcacccaaaacatcacacttcacaggacacagaggaacagcgtgtctcttttcttataaatg

SEQ ID NO: 270154 - DNA, 603 bp, Homo sapiens
gagaagaattgtcatgccttccaacccaaactctttaaatatccattcaacatattgagcagactgtgttccctgtgtcgtggaaggcagggcccttctggtggctgccatagcctctcctgtactgtggttggcatttgggctccagctcccacttggacacccagccacaaaacaaagccccattgttcacctgctgtccctggtcccttcagaaagcctctctgtggttacagaggctctcatcttgaggacctaggctagatggggtctaacctccaaccagaggagtttgtagaaggattcttcccaatccttccagtccctgcctgagaggaggtctgtgctcccctgtccccatctcatcacatmcccagggctgcctgagcaccccttggagaccagcgcctcagggcccagcctctcaacctttcctacctgacctggggcccctgagcatttacagggcagcctggtgcctgggaggggtggttgggctcgatggacctgcaagttcctttcctctcggctgttctgaggttctaaacacccaccctctgcccttgtctgggcttcttggtgggaattcagggagggaccagg

SEQ ID NO: 270155 - DNA, 603 bp, Homo sapiens
gagaagaattgtcatgccttccaacccaaactctttaaatatccattcaacatattgagcagactgtgttccctgtgtcgtggaaggcagggcccttctggtggctgccatagcctctcctgtactgtggttggcatttgggctccagctcccacttggacacccagccacaaaacaaagccccattgttcacctgctgtccctggtcccttcagaaagcctctctgtggttacagaggctctcatcttgaggacctaggctagatggggtctaacctccaaccagaggagtttgtagaaggattcttcccaatccttccagtccctgcctgagaggaggtctgtgctcccctgtccccatctcatcacatccccagggctscctgagcaccccttggagaccagcgcctcagggcccagcctctcaacctttcctacctgacctggggcccctgagcatttacagggcagcctggtgcctgggaggggtggttgggctcgatggacctgcaagttcctttcctctcggctgttctgaggttctaaacacccaccctctgcccttgtctgggcttcttggtgggaattcagggagggaccagg

SEQ ID NO: 270156 - DNA, 576 bp, Homo sapiens
gattttagacacagaaactgaggtccaaggagcaaacatgacttgcctgagctcccaaatctaagaagtgtccagaccttgaagcaaactagaacccctattttgaaactcagccctgagttcagctttgagctcctgggctcaagtgatcctcccacctcagcctcagagtagctgggattacagacttcagccacaatagcagcctaacatctagttctaaatggctccaacttcattctcactttaaagaatccccttttccattctcacgggtgctcatctagtaaggagtcaagaaggtgctagaatgcaatttctcaccagagactccctggtcagcagggctcgtagttccctattacaggctgatagtgctaatggcttcacaggttgtccaaggttcctggaagacccagaagccagaagaagggaagggrcgggggtatagctcaggggtagagcatcggactgcagaagaagggaagctggagacgcaagcatccatggataaagctggagacgcaagcatccgtggataaagctggagacgcaagcatccgtggataaagctgg

SEQ ID NO: 270157 - DNA, 576 bp, Homo sapiens
gattttagacacagaaactgaggtccaaggagcaaacatgacttgcctgagctcccaaatctaagaagtgtccagaccttgaagcaaactagaacccctattttgaaactcagccctgagttcagctttgagctcctgggctcaagtgatcctcccacctcagcctcagagtagctgggattacagacttcagccacaatagcagcctaacatctagttctaaatggctccaacttcattctcactttaaagaatccccttttccattctcacgggtgctcatctagtaaggagtcaagaaggtgctagaatgcaatttctcaccagagactccctggtcagcagggctcgtagttccctattacaggctgatagtgctaatggcttcacaggttgtccaaggttcctggaagacccagaagccagaagaagggaaggggcgggggtatagctcaggggtagagcatcggactgcagaagaagggaagctggagacgcaagcatccrtggataaagctggagacgcaagcatccgtggataaagctggagacgcaagcatccgtggataaagctgg

SEQ ID NO: 270158 - DNA, 587 bp, Homo sapiens
atgtgtggtgtgaggcagggataagttatcttttttgtttttttcccatgtggatacccatttattgaggaatgatctgcaaggctgcctttgtcagtatcacagtgcccatccaaatacacatggatctgtttctgggttttctatttgtttcaagagtctgtctatccktgtgctaatactgcactatgttaactactgtaactttacaataggtctggtagagcagaaagtttcttccattgtaatataaacttggtagctaaatttggggtatcatctatagctctcatctatctctattagagaccttcattttctactaaaataaagctagttatgatagatcaaattggcttcagttggttcacaacaatgtcagtaacagatacccaaatgtcatgtaacagcctatgtagtctataaaagaaagggatcatttcatcagttcccttgaagctgagcccaggaaatctggccaaaaaactccaaatatccactctatttattatgtttcattaatagcagggggtagtaacttccccgtggctcatttaacataagcagttccctccctgtggttagtc

SEQ ID NO: 270159 - DNA, 562 bp, Homo sapiens
gctctgtgtgtgttcgctgtttttactgctgttgtttcygcgatttgcctgggccctcctccaaggcaggagacttatctgtccaccctgagccctcagcagcccaggctgctcctggtaatgctaccaactcactgtgtgccctggggcaagtcctatctctctatttggagactcagtttctccttatgcaaaatgaggaccaaaatgaggatccaccaatgagggtcagtggctctcacactgggtcccttggggccctggaattctgtggagatgccccgggggagtggtggactgagcattttcattttcatttgtcttatatgtttggatcatgtaaaaaatttcatttgaacaaagaaatctgttgcttctaacaaccttttaaaagcttgaatacaaatggatgagatgttccgtaaaggtcttccaggtccagagttgatgaatcttgttgcaaaatcataatgggctagcagcttaagtcgcccgttataaatgtctccccggcacagagttcaagtttctcacgtataatccctgcccccattaggcccgg

SEQ ID NO: 270160 - DNA, 569 bp, Homo sapiens
gtcctgtgtgtgtcctggaaacagaaataatttggggttggggtgtgttttcaggttcatgctctgctcttcttatcccacagagtttgacagagctaagccaagccagagttacgctgacacacaaaaatgacacaggctaaatcacaaaccctgcaaaggctgctgagtttcatcatccccgtcccaaaggcaagcccctcttcccttgagtaaggatacctaatgtgtgtcaggggattcaccagatgcagacaggaaccaagccccatcctgccctagaagagcctgcaggccggtgaggagggcagacaactttcacccaggacaaaagttgctaagagaataaagagacatcacattttcttgagtactcactatgcaccaggagttgttccaagatcccaattagcagtaacgcmtttaaacctcagagcagctcaacatggtagaggtgtgttcccatccacagcactgcactgacaccagacagcctgggagggctgtgggagccagactgggtatgactctgtggcctggggtcagatgtctgcagcttcccagagaag

SEQ ID NO: 270161 - DNA, 457 bp, Homo sapiens
gtctaaattaggtatggtaagacccacgactgtcacgaaggacgaagtgtttatacttacacaacttccagcagggcaccggagtacctatctctccgccccttcctccacacgggatattataaattgtcttaatttgcaaaagcaattgtttaaagcattctaggtccctagaaacaggaggcatcgcacgccgtgcaaggccacatggggaagcgccaaggttcagcaggaggtagaaggagtgagggaaggggttgtccaaaagtmttgattgtggtttccatgggaaaaaatgggtgagacaggttaagcaggtttaggactggccggtttgaataatttcagtgggctcccaggtgtagggactgcctctcatagtctgatactcggccctggattgattagggcaggaggatatgggaagaaggggcttgatatgggaagagtttgatgg

SEQ ID NO: 270162 - DNA, 400 bp, Homo sapiens
ctcggggagttgtagcccagagacccacagacagtagaggagagaaaccagaactagcactcaggtctgtttcagactagccgcgttctctccactacaccagccatgtggctggatattagcatcaataggaaaagacagggatagtcgacttytgaggggtgttctggctgccccatccaaccccttttttggaagtggccccgtaatttcttttttaggaaaccatagctccccaatcgtccatcttcttgctttgagtgggacccaccctactctctgccggtcaatatactgactaccctggccacaggattgatcggttcagagatgggcacgtgatcccagctggtccaatcacagggagctcgggggcttgaaaaggtgcttccgggcggag

SEQ ID NO: 270163 - DNA, 400 bp, Homo sapiens
ctcggggagttgtagcccagagacccacagacagtagaggagagaaaccagaactagcactcaggtctgtttcagactagccgcgttctctccactacaccagccatgtggctggatattagcatcaataggaaaagacagggatagtcgacttctgaggggtgttctggctgccccatccaaccccttttttggaagtggccccgtaatttcttttttaggaaaccatagctccccaatcgtccatcttcttgctttgagtgggacccaccctactctctgccggtcaatatactgactaccctggccacaggattgatcggttcagagatggscacgtgatcccagctggtccaatcacagggagctcgggggcttgaaaaggtgcttccgggcggag

SEQ ID NO: 270164 - DNA, 442 bp, Homo sapiens
agaaaaacaggcaaaggatatgagcagcaattctcatagtagaaataaaaatggtcaatgaatatgcaaaaagatgtattcgacttccctagtartcatgtaaatgcaaattaaagcttccttctatttggtacaacatgtttaatctggttgtatcaagtgttggctagaacataggagaatagttctctcatacactatggtagtctatcttggagaccaattttaaaacatttattaaaattttaaattgcttatatccttctgcccagtaattcaatgtccaaatgtctgtcctggagcattcaaacatgtgctcaaaaacttttacgtatatatataaaatgtttatcagtgaaagagaaaaattggtatgtttggatttaagaccacctaaggcattatatacctccatcatttgagtgtttgagtgttttagaac

SEQ ID NO: 270165 - DNA, 442 bp, Homo sapiens
agaaaaacaggcaaaggatatgagcagcaattctcatagtagaaataaaaatggtcaatgaatatgcaaaaagatgtattcgacttccctagtagtcatgtaaatgcaaattaaagcttccttctatttggtacaacatgtttaatctggttgtatcaagtgttggctagaayataggagaatagttctctcatacactatggtagtctatcttggagaccaattttaaaacatttattaaaattttaaattgcttatatccttctgcccagtaattcaatgtccaaatgtctgtcctggagcattcaaacatgtgctcaaaaacttttacgtatatatataaaatgtttatcagtgaaagagaaaaattggtatgtttggatttaagaccacctaaggcattatatacctccatcatttgagtgtttgagtgttttagaac

SEQ ID NO: 270166 - DNA, 442 bp, Homo sapiens
agaaaaacaggcaaaggatatgagcagcaattctcatagtagaaataaaaatggtcaatgaatatgcaaaaagatgtattcgacttccctagtagtcatgtaaatgcaaattaaagcttccttctatttggtacaacatgtttaatctggttgtatcaagtgttggctagaacataggagaatagttctctcatacactatggtagtctatcttggagaccaattttaaaacatttattaaaattttaaattgcttatatcyttctgcccagtaattcaatgtccaaatgtctgtcctggagcattcaaacatgtgctcaaaaacttttacgtatatatataaaatgtttatcagtgaaagagaaaaattggtatgtttggatttaagaccacctaaggcattatatacctccatcatttgagtgtttgagtgttttagaac

SEQ ID NO: 270167 - DNA, 442 bp, Homo sapiens
agaaaaacaggcaaaggatatgagcagcaattctcatagtagaaataaaaatggtcaatgaatatgcaaaaagatgtattcgacttccctagtagtcatgtaaatgcaaattaaagcttccttctatttggtacaacatgtttaatctggttgtatcaagtgttggctagaacataggagaatagttctctcatacactatggtagtctatcttggagaccaattttaaaacatttattaaaattttaaattgcttatatccttctgcccagtaattcaatgtccaaatgtctgtcctggagcattcaaacatgtgctcaaaaacttttacrtatatatataaaatgtttatcagtgaaagagaaaaattggtatgtttggatttaagaccacctaaggcattatatacctccatcatttgagtgtttgagtgttttagaac

SEQ ID NO: 270168 - DNA, 414 bp, Homo sapiens
tcgcagacaataatttaaagaaaatctttgtcatgatgtgtcatggactgacagattctcagtaataaatataaacaatattcttggcctccaactctaactacatacwactccctggatttttctgtggtccctttgactgcaacctgctccccgatactaacttgtctaagtcatggttcttacttgtagcaacagaactggattccggctcaccttggcaaaaaacagtttaatggaatgacgtcattgtgtagattaaagaattgatggaaggctaaaaaaaaccaagctgtgaaacaaggagaaaccacaggaagctgtcattatagccaagcccctgccgctggaacagctggtgaagatgctggtgcattgtctcaggatactaaacaaactactggcaccatcacc

SEQ ID NO: 270169 - DNA, 417 bp, Homo sapiens
cctctaaccaaaactccccacaaatccacccgtggtgaccaccctygcacactcagcctcagctcaatcatagttgagggttccacctcgggatacttaaataaggagaacctgagacagttaatgggaggcagattatggcaccaatgactagagagtctaggagggtgaggatgggtacttggaatgaaacatggggagtctcagttctagaatcagaattctggttccaaatcccaactccaccagtgttaagaccagggttgggtgagtcatttacttctccgtgcctctactttaaattgggcttaataagagcatctaacacagaggttttttttttcagaattaagtgagataatgtagataagatgcttaaacagggctgatatacagtaagtacataataaatgtttc

SEQ ID NO: 270170 - DNA, 614 bp, Homo sapiens
tttgctctttttgcccaggctagagtgcaatggcgtgatctcgactcactgcaacttcygcctccctggttcaagcgattctcctgcctcagtctcctgaatagctgggattacaggcacccgccaccacgcccagctaattttttgtattttcagtagagatggggtttctccatgttggccaggctgatctcgaactcctgacctctggtgatccacctgtcttggcctcccaacgtgctgggattacaggcatgagccactgcgccattttaaagtagacaattcggtggcattatctacatctccaccactgtgcagccatcaccgctatctaattacagaacattttcatcgccccaaccagaaaccctgtacccattaagcagtctctcctttccctccttccagcagcccctggcaaccaccaatatgatatcagtttctattctcttgctatttgaaaaacatacacttttctgctttatttttttcctggatttttgttaataagtatgtgttttgatatgtgaaataaagcagaaaccaagagccacaaagaatgaacaagtaagttacatggcattgagtgctgagctgtatgtcagaggggg

SEQ ID NO: 270171 - DNA, 614 bp, Homo sapiens
tttgctctttttgcccaggctagagtgcaatggcgtgatctcgactcactgcaacttctgcctccctggttcaagcgattctcctgcctcagtctcctgaatagctgggattacaggcacccgccaccacgcccagctaattttttgtattttcagtagagatggggtttctccatgttggccaggctgatctcgaactcctgacctctggtgatccacctgtcttggcctcccaacgtgctgggattacaggcatgagccactgcgccattttaaagtagacaattcggtggcattatctacatctccaccactgtgcagccatcaccgctatctaattacagaacattttcatcgccccaaccagaaaccctgtacccattaagcagtctctcctttccctccttccagcagcycctggcaaccaccaatatgatatcagtttctattctcttgctatttgaaaaacatacacttttctgctttatttttttcctggatttttgttaataagtatgtgttttgatatgtgaaataaagcagaaaccaagagccacaaagaatgaacaagtaagttacatggcattgagtgctgagctgtatgtcagaggggg

SEQ ID NO: 270172 - DNA, 581 bp, Homo sapiens
tagggagagctgagccttcaaaagcaagtaatgcttaatctgttctatttctgaagcacaaaataaaaccaaacaaaatagaaaaataagctaccgctatgccagtgccaagtttcctcatgcataaatagagatccatccagaaaaacagcattctcagtcgggtgggacaaatcctcgtgtgcttttgtggaaaattcccccagcaagctggcatcaaagacactgtctacagctgcctctatatatggccagaaaactacacaaaggttgtgagatgcatgagctttgctgtggcaagcacctgggtgagaaagctgctccagccctgatcctatggcataaacatggctgacagccctagacctgaytgcaagaccaccttgagcaaaactagcatagggcaagacctacagttgctattcttgcgtcttttcctggaccgcctaccaaaccctacagaagcccacccactgattatctcagtagtgctcagcttcccttccccagggacctacagttaatcctctcttcttgcttcttcaccaatacctctcttaggaagggacccatagccacaa

SEQ ID NO: 270173 - DNA, 581 bp, Homo sapiens
tagggagagctgagccttcaaaagcaagtaatgcttaatctgttctatttctgaagcacaaaataaaaccaaacaaaatagaaaaataagctaccgctatgccagtgccaagtttcctcatgcataaatagagatccatccagaaaaacagcattctcagtcgggtgggacaaatcctcgtgtgcttttgtggaaaattcccccagcaagctggcatcaaagacactgtctacagctgcctctatatatggccagaaaactacacaaaggttgtgagatgcatgagctttgctgtggcaagcacctgggtgagaaagctgctccagccctgatcctatggcataaacatggctgacagccctagacctgactgcaagaccaccttgagcaaaactagcatagggcaagacctacagttgctattcttgcgtcttttcctggaccrcctaccaaaccctacagaagcccacccactgattatctcagtagtgctcagcttcccttccccagggacctacagttaatcctctcttcttgcttcttcaccaatacctctcttaggaagggacccatagccacaa

SEQ ID NO: 270174 - DNA, 542 bp, Homo sapiens
attaggtgggaatttcctcrtcctagtaagcctgggagcgctatgggagactggggcttatttcatccctacagctttgaccataaaagacggccaccccccgaagcggccattttagaagcctaccctcagggatgcattcgctttctcagggatgttccttgctgagaaaaagaattcagtggtatttctcccatttgcttttgaaagaagagaaatatggctctgttccacccggctactggcggtcagagtttaaggttatctctcttgttccctgaacattgctgttatcctgttcttttttcaaagtgcccagatttcatattgttcaaacacacatgctctacaaacaatttgtgcagttaacacaatcatcacagggtcctgaggtgacatacatcctcctcagcttatgaagatgacaggattaagatattaaagtaaagacaggcataggaaatcacaagagtattgactggggaagtggtaagtgtccatgaaatcttcacaatttatgttcagagattgcagtaaagaca

SEQ ID NO: 270175 - DNA, 542 bp, Homo sapiens
attaggtgggaatttcctcatcctagtaagcctgggagcgctatgggagactggggcttatttcatccctacagctttgaccataaaagacggccaccccccgaagcggccattttagaagcctaccctcagggatgcattcgctttctcagggatgttccttgctgagaaaaagaattcagtggtatttctcccatttgcttttgaaagaagagaaatatggctctgttccacccggctactggcggtcagagtttaaggttatctctcttgttccctgaacattgctgttatccygttcttttttcaaagtgcccagatttcatattgttcaaacacacatgctctacaaacaatttgtgcagttaacacaatcatcacagggtcctgaggtgacatacatcctcctcagcttatgaagatgacaggattaagatattaaagtaaagacaggcataggaaatcacaagagtattgactggggaagtggtaagtgtccatgaaatcttcacaatttatgttcagagattgcagtaaagaca

SEQ ID NO: 270176 - DNA, 542 bp, Homo sapiens
attaggtgggaatttcctcatcctagtaagcctgggagcgctatgggagactggggcttatttcatccctacagctttgaccataaaagacggccaccccccgaagcggccattttagaagcctaccctcagggatgcattcgctttctcagggatgttccttgctgagaaaaagaattcagtggtatttctcccatttgcttttgaaagaagagaaatatggctctgttccacccggctactggcggtcagagtttaaggttatctctcttgttccctgaacattgctgttatcctgttcttttttcaaagtgcccagatttcwtattgttcaaacacacatgctctacaaacaatttgtgcagttaacacaatcatcacagggtcctgaggtgacatacatcctcctcagcttatgaagatgacaggattaagatattaaagtaaagacaggcataggaaatcacaagagtattgactggggaagtggtaagtgtccatgaaatcttcacaatttatgttcagagattgcagtaaagaca

SEQ ID NO: 270177 - DNA, 542 bp, Homo sapiens
attaggtgggaatttcctcatcctagtaagcctgggagcgctatgggagactggggcttatttcatccctacagctttgaccataaaagacggccaccccccgaagcggccattttagaagcctaccctcagggatgcattcgctttctcagggatgttccttgctgagaaaaagaattcagtggtatttctcccatttgcttttgaaagaagagaaatatggctctgttccacccggctactggcggtcagagtttaaggttatctctcttgttccctgaacattgctgttatcctgttcttttttcaaagtgcccagatttcatattgttcaaacacacatgctctacaaacaatttgtgcagttaacrcaatcatcacagggtcctgaggtgacatacatcctcctcagcttatgaagatgacaggattaagatattaaagtaaagacaggcataggaaatcacaagagtattgactggggaagtggtaagtgtccatgaaatcttcacaatttatgttcagagattgcagtaaagaca

SEQ ID NO: 270178 - DNA, 482 bp, Homo sapiens
ctttgtctagtgctgagttgagtagagccataacacactcccatctctcctcaagagaatgcatttgtaagactgttaattctgtaaccaaggggcagagttgaaaacagctaagccttatgtgaaccaagccttcaatcttatttttgtcctgctcttctgaattagccaggccccygtgttcatgaatatcctgagaacccaggtgccatcctaaacatggagtgttctgcaattgcagaggaaaggtaatgcaggcaaacaatccaggatatccacccgaagataaataatgttgaacttgaattactggagctagctattagcattaccgtatttctcctaccaccagttgaaatttgcttagcaagatgcctgcttgaaacctttcaatgactttccattgagcttagaataaaatctcaatattctgagtacgaattacaaagccttctataatctgcatcccacctacctcacct

SEQ ID NO: 270179 - DNA, 482 bp, Homo sapiens
ctttgtctagtgctgagttgagtagagccataacacactcccatctctcctcaagagaatgcatttgtaagactgttaattctgtaaccaaggggcagagttgaaaacagctaagccttatgtgaaccaagccttcaatcttatttttgtcctgctcttctgaattagccaggcccccgtgttcatgaatatcctgaraacccaggtgccatcctaaacatggagtgttctgcaattgcagaggaaaggtaatgcaggcaaacaatccaggatatccacccgaagataaataatgttgaacttgaattactggagctagctattagcattaccgtatttctcctaccaccagttgaaatttgcttagcaagatgcctgcttgaaacctttcaatgactttccattgagcttagaataaaatctcaatattctgagtacgaattacaaagccttctataatctgcatcccacctacctcacct

SEQ ID NO: 270180 - DNA, 482 bp, Homo sapiens
ctttgtctagtgctgagttgagtagagccataacacactcccatctctcctcaagagaatgcatttgtaagactgttaattctgtaaccaaggggcagagttgaaaacagctaagccttatgtgaaccaagccttcaatcttatttttgtcctgctcttctgaattagccaggcccccgtgttcatgaatatcctgagaacccaggtgccatcctaaacatggagtgttctgcaattgcagaggaaaggtaatgcaggcaaacaatccaggatatccacccgaagataaataatgttgaacttgaattactggagctagctattagcattaccgtatttctcctaccaccagttgaaatttgcttagcaagatgcctgcttgaaacctttcaatgactttccattgascttagaataaaatctcaatattctgagtacgaattacaaagccttctataatctgcatcccacctacctcacct

SEQ ID NO: 270181 - DNA, 508 bp, Homo sapiens
tcacttgggaatgagcctcttgcgattttacattagcctaagagctttcaggaaacctgagtgcatcacctgtgtactgcacaagataaattgaggaccagtcatgcamcacatagtgagggaaaacatccttattctagtcattatttcaaacagtaaatgctgtttctcagcaaggcatgagtgtcctagtgttaccagttatctttttttgttccaaatcaactgattcaaattagccatattcagtgcaacttaaaagaaatcacagaaaataatcctgtacatgagtattgctcaaccacagggacagtcctaattttgtgttataatgagttgtgagtggtgctacagataactttctattcatattattgtggttaagaacacagtctctggggtcacaaaatcttggtccagatccccactctatcacctactgtcaaggaaggacttatacaagtcccttcttgtctgtattagtccgttttcacactgctataaagaa

SEQ ID NO: 270182 - DNA, 625 bp, Homo sapiens
ccaggtgcagtggctcacacatgtaatcctagcaatttgggaggctgaggcaggtggatcgcctgagatcaggagttcacaaccagcctgggcaatacagtgagatcccaaccctaaaaaagaaaaattaataacattgcttaagtgcccttctcagtacctaacacatagttttataactgctgctaacttattagctgtcagcttgttttaatcacataccagctcattttgttatttattcccttattccctcaataagaacataagctcctatgggcatagactcatgcttctcttccaccccacagaagtccccatatatccgacatctctgagcatgakgtaggtcagactcgctagattttagaaaaggaaagtttgagattattaaatccaacctcctaatagtactgatgagaaatctcaggcccagagaacttacataacttgtttgagttcaaatatatagatggttataaagccaggattataactatgacctttagacccattatccagtgtttctcaacaattcttgttatccctaattccaaggaaaggaaatatgacaaagaaagagacaggggaggaactaaatataaaatatacacacacgcacaca

SEQ ID NO: 270183 - DNA, 569 bp, Homo sapiens
ttaaatccaacctcctaatagtactgatgagaaatctcaggcccagagaacttacataacttgtttgagttcaaatatatagatggttataaagccaggattataactatgacctttagacccattatccagtgtttctcaacaattcttgttatccctaattccaaggaaaggaaatatgacaaagaaagagacaggggaggaactaaatataaaatatacacacacgcacacacacaattcagtgaaactaattggttattgtaaaggccaaatatgccaagagtctatctggcctgctatcagactaatgytgtgaatgactgctgaattattacccacaactgggtaattgtggccaatgaaatgaagatacagcatcaagccagggaacatctggaaaacatatagatcaagccttatcaccattcattatcaccaattcgtggctggctaaacttggccactcccagatgccatggagttgggaaaaaagtgtgaaaaagtatcctatttggtgtgtgatatttctgtaaaaacagtcctcgagcttggagaatgcagagact

SEQ ID NO: 270184 - DNA, 626 bp, Homo sapiens
cactttttgaatagcccatcagctcctcattggcttgagatgatgcattctttaatatgcatgatattcttatatgtactacatatgaattatgtactaggattacgaagggagtatgaattgcacttaccagacctccaaattcctacatattctctgcttatctttccaactttacctcctttctccctacatttagagctcactggctttttcttattcttaaaaactaagctatttctagccccagtgctttcaccagagtttgttccttctttctggtctggtcctcccccagattattggatggttcctttgtctcattctggtgtctgttctaaaatccacttctgtgagaggtcttttctgatcacccaaatgagaaatatcccttagatactcaagtgttctctgttctttcatgaattttattatcttcatagcrtttattacaatctaacatttccttattatttatgtatgtgtttgcttatttatttatttattgtttatctctcccactaatatgtaggctcaacaagaggaaccttgggaccttgactgtcttgttcagcattataaatattctctgagcctagaacatgcctgaaacatggcagataacc

SEQ ID NO: 270185 - DNA, 461 bp, Homo sapiens
gatcagtaaagtaaaataaaaagactgtagtcctgaatatggattggaagtatcagtaaaattcatgatatattttgtttcttaaaaagaatcatacgtcctagtcttgtctattgaaaaggcatagaaacaaggaaggactcagtagcaaaggacacttctaataccaaaattgtggcccctaaataccatttcccatttaaaggaaccagggctccttagagaagtggccaaatacaagtctgtggtaggaaatctgtaaaatgaacctgaacatcttgtgatcaaggaatctatgaaaggtttctarggtcatttcaagaagacccaagagttaatccgaacagccagctattggcaaaaattgcggcaactggagtccattgcaatcagttaaaacatccagcagttttaaaatatgaatttatagtatgactaacaaaaacattataggcaacttt

SEQ ID NO: 270186 - DNA, 461 bp, Homo sapiens
gatcagtaaagtaaaataaaaagactgtagtcctgaatatggattggaagtatcagtaaaattcatgatatattttgtttcttaaaaagaatcatacgtcctagtcttgtctattgaaaaggcatagaaacaaggaaggactcagtagcaaaggacacttctaataccaaaattgtggcccctaaataccatttcccatttaaaggaaccagggctccttagagaagtggccaaatacaagtctgtggtaggaaatctgtaaaatgaacctgaacatcttgtgatcaaggaatctatgaaaggtttctaaggtcatttcaagaagacccaagagttaatcygaacagccagctattggcaaaaattgcggcaactggagtccattgcaatcagttaaaacatccagcagttttaaaatatgaatttatagtatgactaacaaaaacattataggcaacttt

SEQ ID NO: 270187 - DNA, 461 bp, Homo sapiens
gatcagtaaagtaaaataaaaagactgtagtcctgaatatggattggaagtatcagtaaaattcatgatatattttgtttcttaaaaagaatcatacgtcctagtcttgtctattgaaaaggcatagaaacaaggaaggactcagtagcaaaggacacttctaataccaaaattgtggcccctaaataccatttcccatttaaaggaaccagggctccttagagaagtggccaaatacaagtctgtggtaggaaatctgtaaaatgaacctgaacatcttgtgatcaaggaatctatgaaaggtttctaaggtcatttcaagaagacccaagagttaatccgaacagccagctattggcaaaaattgcggcaactgragtccattgcaatcagttaaaacatccagcagttttaaaatatgaatttatagtatgactaacaaaaacattataggcaacttt

SEQ ID NO: 270188 - DNA, 546 bp, Homo sapiens
ttattcagtaagtagtgttaaaataagcatttccccatataaggatctgaactctttttgctcatacttctgacaccaaatgcatacagcttttccaacagcgctccccaactctccaacaccagctgggtggtctacaattcaattcaattctgacactgtctgccaggagttagcatcagatcccacaagttaaggcctcagccccacaagactgccttcatttcagatgccagttgcaagtaccaagttgtckccagtacgtcagatgaccagctgtaagttcagggattctcatgcctccacccagatttaataactcactagaacagcccaaataactcacgaatgtgctttacttattattaccactttattataaaggatataacctggggacatccaaatggagggcacacacataaggcaatagtggggaagtgtgctgatcctccacggcttctcagagcataccaccttcccagaaccttgatatgttcaccaactcagaaagtctccaaaccccatcattcaggagtttttatg

SEQ ID NO: 270189 - DNA, 621 bp, Homo sapiens
ggaggccattatctttaatgaaatgattcagaaacataaagtcaaaaaccacatgttctcacttacaaatgggtggtaaacaatgggtatacatacctatacagagtggaataatggacatgggaaacttcaaaaggtagaacagtagaagggggtgggtacaatgtaccctattcagatgatgggtacattaaaagtccagacttcaccactatggaatatattcacataacataactgcacttacacccttaaatccataaaaatttaaaataaaataaatatccagaactaaccatctctcacaactgccaacmctactttcctagtccataccacaccaccgccatttctcagcaaaaccatgggaaaagctcattacctgatctccctacatcaaccctggactacctctctcacataacaaagctcttctcaaagtagcaattactgtttgaaaacttaatttctactacataacaactctaatcaacccatccacaaccactaccagtggcttctcatctcacatagaataaaatccaagttctgtatgatcatggccccaggctacttcaccaacttaatcttataatattcactcaactcatcatgctgacc

SEQ ID NO: 270190 - DNA, 463 bp, Homo sapiens
agaactatgatctgtggttattaactgagcattttatgggcagaaaatggaaatcaaagacaagagaaccatgatataaatcctgatctggcctctcaattaaaatgatattaaaaagcagtataattttccaccacagcccacgtggaaaacggttgcagaatgagtggacttcctttccagaaagyaagataaaaaatgcttttagcccagcacagcttgtagcacatacagaaagtcaaaagaaattcagaaaatgggcaaggaaggtggtttgaaaatttgcttcgcctgagctggctgaatttattcctggtcccagaagagtaaaaattagtgttttcaagtctaatctaccagaaccactaagtcagcccagctttgatagccttagctgcacgtggctgttcaatagacaaggggagcttaggaactgctcctaacacctgcctcctaggccctg

SEQ ID NO: 270191 - DNA, 536 bp, Homo sapiens
ttctcattattcctgtgactactagaattctgcagtctaacacatttttgaagagaatatataaacagaaaatatgaaatcttggtgcttacctatcttcattagatgttctgccactgagtaccatgcagtttgggccaaatcaattaatttctctaggactcaactttcctcatatgtgaaatggggataaaccactaattctggtttcaaaggatcatggagataatcaaaagaagtgattgtgaatgtactttgtaaatgaagctccacacacaaatataagagcacaactattcctttcccagtatgcacccagcccccatttatagaacttctcgagaaaatgttgagtccastgatcccccaaccacaccagctttctgtggaatgttatcacacaacaaagtctcttctaggaaactaagcacctggaagaccttattaggtgcaccagttggcaagtcactgcttcagaatatcagtcagccaagaaacagtgtggctgtgtgcctgccttattctcagaaatacca

SEQ ID NO: 270192 - DNA, 587 bp, Homo sapiens
ttctggtcttgcttcttgcaatccctgtatttcaatctgctgagagttatctttctaaaatacaaacatcactgggtcatgcaaacactctgcctctccactcccaaagcaaacactgctgcaaattctctcaggccttcaggataaaaatccagactcttcagcatgagacaccatgttctatgatccccttgtccctccaaacacctcgcattcaatgctcaacaagtattgaactaacttgcaattcttgagacccaccaaaatcattctcacctctaagttrtaaggtgctatttcttccactcactcagaatattctccctctattcttttcacctgattaactccaagtcagttccttagatttcagcttagagtcatttcccctaaaagccctctctgatgcccctaccccagtgatgggctaggacatctaacaagatgcttccctccctccctggctgttgaggcattcaacatactctaatagaatcacttatgtaatagtctttcttcctcactagaaactcatcagctttatctagctcactgctttatctccataacagtacctggcagaattc

SEQ ID NO: 270193 - DNA, 371 bp, Homo sapiens
gggctgggaaggcgctgtgactttcacaccctcacgaccatggcaatttgacagcagaggataatgaaccccacagctggggttgggatgcttctgtctgcttcggcagtggcctcttcactccggtactggaaaaaagtactcagggggaagctgcttcccaggtcaaaaatgatccttgaaaaatgctatccaggggccacttccaaaatcrtaatgtccacagtaggcaggaaacagggaggcacgagcgaaaatggaaaccagtgctcctctgaggataaaattttctctctactgagatggaaatttttctccctttcctttgcttctgctaccatggaatggccctctatttttcttttttctga

SEQ ID NO: 270194 - DNA, 403 bp, Homo sapiens
atgccttctcattaataagatgcataatagatgaaatttcccctcaccacccagccccaccatgcccttagcaacaagatctaaacaggggaagggtctttccccagccccacytaaaaacgtcttctaatcccacttttggaacagcagaagaaacattcaaccagaaataagaaagctgtgaaaaggcagagtccatttagggttagtttgaagactatttgtgtgcgtgtttttttaaaacaacatctggacaaattttaaaatgtacttgtggtcccattcatgaaacgggaagcagaccatgggctcagagcaccaattacttgcccttttgtttccgccatttcttggagaaaatttagtgagctaacttgcagcatgtcaatataataaagtaccc

SEQ ID NO: 270195 - DNA, 562 bp, Homo sapiens
taagcaatcgcttccttaatgtaacatttttacttcttactggacactcaaccttgaacaactaattcccttttgccccttactcttcccccctttttttgcatgaagtcayaaaagttatggcagttattttttggcttgtaaaaaaaaaaaaatctatttctgcagtttgaagatggaatgtaaaatttctgtgaaacatgtatataaaagtatatttattgaaccatccatatacacatatccatgctgattccaatggaaaaaaattaaagttttctgaaattttctgtggttaactcataattattactatttaaccaactttatatgcaagaacttccaattaccccagggagaaacctatgtatgacctggaaaacatctcactttagacaaggctttatgtcgagaaatgagaattcatttgttcattcaagaagtatttattgataggtgctaggcaagatacaaagatgactcagacacagatcctgcccataaggagcttacagtctaataggggagagagaacacatacatggaatacatggtcagaact

SEQ ID NO: 270196 - DNA, 582 bp, Homo sapiens
cttctgccgttcactttctatgcaaaatactagaacgagtgggaaaaaaaaaaaccataagttacaaaagaaaaactgctctaagtaggtcacaaacaaacattaccaaaatctcctaatgttcccctggtgcagtgtcagctcaggaacagcaaactgagttaaacaaagaactgtctacttttctacctgtaagaggtacaaaagcttagacttttgtaccggtaagcagctccaacaaaactgacgtatgacttggtagggatgtagggcagccttgccaagccttacattaccacaatttgcttcaattcacttgttcctgataaatgcacaagtaatcagttagagcaccagtttgtgaaataatcacgtaattttcatgttcctgcccaagtgataaccatttgcctgaggccaagaactgtatttttttaatattttaagtagaaactaacgaaattttccctcaataatgtgtaaggtaatttcattctattttgcytcaagcagtaataaaattagctggactcaagcttaaacagtttaaatgtaggtcattctagtgtttttccatttgac

SEQ ID NO: 270197 - DNA, 534 bp, Homo sapiens
gaagagataagtgaagcacacacaaaaggcagaatatatagtgcatcaagaatgtgtgttttataatctgacagacctagttagaccatagtccatatttcaaatataattacatgtgctcatagctgagaaccttctcctgggatggatgcatttcaccaggtcactgctgaaatgttgtacttttatggatggtgatgaggaagcatctgttttaggtgtggtatttcctggaggcagaaaactgcttgagttagctcattcagtttttcagtggcctttctaatgcatgttttgytttgttttaatgctttgcaaaagattcctagagtggaaattgcctttgcaaaaattataacagtgagaaaattatgacagtgaaagggatctgccctaactgtccccatcttgcttctgggtatctttgctcattcctgggtgtgggccaagctaactttgggagaaatttagttaaattataatggcccttcccagatactaaattgcccttgtaaaactaatgaaaggccacca

SEQ ID NO: 270198 - DNA, 592 bp, Homo sapiens
taaaatagcatagtatttgcatataacctatacacatcctgtcatacactttaaatcatctctcaattacttataatatctaatacaatggaaatcctatgtaaatagttggtatactgtattgcttttacttccattattttttattgttgtcttattatctttgggtttttcccctaatacttcaaacccgaggttggttgaatcygtagttttggaacctgtggatccagagggccagctgtacatattacgcttgtaacaatacatatcaatgaatgattacaatttgtatataactctggaggtacaggaaaggtctgaaatgcacactaaaatcgtgatagatcatagctctataggatgtattcagtaaatatttgttaggtgaattaatgaaattatctgtggcatcacagaacaggcaatttccatcttgtttatatttttatgtacatctgaattttttacagttttacattacttttatttcttttttatatgagaagttcataaaggcattcttttaaaaaatattgaaataacacagatacgttcataactctgctaactttttgtagtgcctatcatt

SEQ ID NO: 270199 - DNA, 605 bp, Homo sapiens
aaccaaggagcatctagagagccagcaaaccaccagagcttgcggacaggccttcagaaggaaccaatcctgctgacaccttgatcttgaacttttagcctccagagctgtgaggccatacattcctgttgtttaagctccccagtttgtggtactgtgttccagcagccytagaaagtgaatgctatatgcacgcttgccatcccaattttcacacccagtaactgatcctataaaaataattgcacaagtaagcaaaggagttatcataaggatattgacaacagcagtgtttatcatttacaacagagaaaacaacctaaatgtcttacagtgaaagaaaagttcataaatgatagtacattcacacaatggaaagtcatgtagcttttcaaaatgatgttgtcagtataaagcttgagagggaaagacattcacaataagttgcttaaaggggactacaaaagagtatgtatatatatactgttggccattttttgcaacttatatatgtgtgtgtgtgtgtgtgtgtgtgtgtgttataaatgcataggaaaaagtctgaaagtatatcaacatatttacagtggtagaatttcaggtaa

SEQ ID NO: 270200 - DNA, 495 bp, Homo sapiens
cctagaaagtgaatgctatatgcacgcttgccatcccaattttcacacccagtaactgatcctataaaaataattgcacaagtaagcaaaggagttatcataaggatattgacaacagcagtgtttatcatttacaacagagaaaacaacctaaatgtcttacagtgaaagaaaagttcataaatgatagtacattcacacaatggaaagtcatgtagcttttcaaaatgatgttgtcagtataaagcttgagagggaaagacattcacaataagttgcttaaaggggactacaaaagagtatgtatatatatactgttggccattttttgcaacttatatatgtgtgtgtgtgtgtgtgtgtgtgtgtgttataaatgcataggaaaaagtctgaaagtatatcaacatatttacagtggtagaatttcaggtaatttacattttcctctctttgcttctccatattttcttaagagatgtrgtttaaaaatta

SEQ ID NO: 270201 - DNA, 637 bp, Homo sapiens
ttgctgggccaattctgtttttgagggaagggaaacactcactaggcccctcagccacactgggccatgactaccgtattcctcaccacactgtgctgtgggaaaactctggggtcttgtcacctgcagggctcaatatgtgacttaggcaggggcccatagatccacttacaccatcagatggttaatattgtcaaattgattggattgaaggatgcaaagtattctttctgggtgtctgtgagtgtattgccaaaggcgattaacatttgactcaatggactgggaaaggcagacccaccctcaatgtgggtgggcaccatctaatcaactgccaacttggctagaataaagcaggcggaaraaggtgggagaacctgacttgccttcatttttctccagtgctggatgcttcctgaccttgaacatcagactccaagttctttggctttaggactcttggatttacactagcagtttgccgaggggatctctggcctttggccacagactgaaggctgcactgttggcttccctacttttgaggttttgggtctcgggctgatccactactggcttccttgctcctcaacttgcagacggcctatcgtgggactttaccttgtgatcgcgtgag

SEQ ID NO: 270202 - DNA, 547 bp, Homo sapiens
agtagctgtgtatggattcaagtgcaataagaaagctggtgttgtcaggttcagattgaaaagataatgttaggtaaaataggtagaagagtttgtaatttgtaaacattatacatgactttctatttaggctaatataaaagtaatttttagtatttatgttcttggtgatattttaacctcattaactctaattgaaatgatagtatagatttgttagttttccttatcacattgtgatgtgttgagtaatgtttgtttcctaatagataaggccttttatgaaagcgcacctaaatcgtgataaagacaaagaacttttaaaattaactcagtacctcaaggagatagcaaaattagatgactttttggatctaaatcacaaatattgggaaaggtaagttttaattgcttatttattttctctttacatcaatgaagaaaaaattatcatttttcatcagtgacyccagtatatatatagctgtcttaatttttatttaaaataggtgacttctaaaaacattttctaatccagtgacctacc

SEQ ID NO: 270203 - DNA, 597 bp, Homo sapiens
ttcagaaacgcagactcccaccagatggaaaatgttacataggctgtcacacagaytgaactctgactgccattccttgttctaattttcttcctgaggggcctgaagaaagtcatgcacacagtccaaacctgaacattcctttctgtggaccccaagtttttaagacacagctttattttcttaaccaattgcaaatcaaagaatcactgaatctatttatgacctataagccctggcttcaacatatcctcctgcctttttgagccaaaccaatgtataacctccatgtattgatttacaattttgcctataacttctgctttccagaaatgtacccctgcccttaaaatctcttgctgataagccatggggagtttgggccttaagcattatctgaccaattctccttgcttggtatcctacaataaatccttttctttctctcattgaacatctttttttataattaatgaataatttattttgtttttgttgctgctgtttacctacagctgtttatctcacagcaaatcttgatgtcagcatttggctttgctgtgccaagtgagcagacccaagttcagttcaataaca

SEQ ID NO: 270204 - DNA, 588 bp, Homo sapiens
caaccaataacatattaacttgaacctagaggaagaggtaagggaacaattcggtatctgtgttttatatatcatggatagtcaagaaagtcattctaggcagtagggaaatgtgcacagaggtactgcaattacatgcgcctgtaaaacccagaggctggcacactggaagggaaatagtggagattcctggcatctcctggccacttacgctgaggtattcccactagctgtgtgcccagcacttcctctgcatgcctcagatgcatttgacaatctcaggtgaactgcacttcagggtcaagggaaccccggccatggttctaagaarcaactcccattttagtatcacctacatttgaaaccacagagcactgtccaggagaggtgatggtggtgggtctcctcctttggctctctggcccatcagctgatactagggagcgctatccctcagcccacatttctcagcatggtaagtctgagagtcttgatgattaaaacacatttttgtgtgtgcaatttcataggttttctaaactcttgaaacccttgcatgaaggacaaagggaccccacgttacacact

SEQ ID NO: 270205 - DNA, 420 bp, Homo sapiens
ggtcatgtctcacttaatccttataaaaatcctctgagtcctttctacattttaccaatgaagaagttacagtgatgtgtcctagggttgccatctgagaagcaattgagttaggacacatcctcacttctgcactgctgtctgtctttaccaatcacaaaggcacaaagtctggctgcatcctttcatacatacatgatgaaacatacatgattatttcatatgagtgccaaacccratcctagccatcccttccaactcacagccccacagtgaatgcccccttcttaaactactttgtgtcatggatttcatatgtacgtgtctattttctccaattagatggtaagtcctcacagacagttttacattccttccactctccccaaaaccttagaacaacactttataaataccagg

SEQ ID NO: 270206 - DNA, 637 bp, Homo sapiens
ctacgaaagtgttttccactaaggaagagaagagaggattaggagggagactggtagctaaaaggaacttcagttttatctgtagcatcatacaggtttttacgggacaatgtattcatatattatcagtgcaattacaaatgtaataataaggaaagtgcacaatttggtgccccaagaacctgggttcaaattttagctctgccacttatttccatatttggccaaggaatcaaaygttctgaaaaagtatagtgtaagacttagggaggagctaaggtctgatgtgcaggtgggcactggggaccctttgaaggatatcagtggcttaactagggtgggaaatagctaacataagattataagtgctttaaaagtagagatcatattttatttatttttttatcttaacaatgattagctttttacacaataggctcacaatacatatggagagttgctagagagactttaggagaatatatgagttcatggggagggtagaaggagctgaagaagctggtatggactacattatttaccaccaagacagtagccatgaagggcaatgagaaggtggcatttttgtggaactgacagactgaaggaagagaggtttgttttgttgccttagtta

SEQ ID NO: 270207 - DNA, 574 bp, Homo sapiens
ggaggatttcatcagcagaagtgcttaggtaagaacaaggacaaattaattaacttgtcatattcttcctctcacaaagcatgaatgctgtggattcttgcataacaaagcaccgtttccctgtggtgccaaatgtccatttgcttgcttctcttctttctccaattgggggtcccaaaggtacacaacatattaacatgacagtcccaacagttacacatagctgctaatggaaatcactctgaagtgtgtatctatacataggtctgtatgcaacgtgagtgaagcatgatactgattctttacagacagctagatagacattcaatgctagagctgcagggctttttaaaataaaaatgtacatgtttacaaaactaaatatctggactttattagaatattctttattttaaaaattgacatttattaattataatttatattttgccttttaattttaagagatcattttgaatatttcaaaagaaaatttttcrtattgtggtaaaaaacacatagcataaaatttaccatcttaatcatttttaagcatatagtactttttaaggta

SEQ ID NO: 270208 - DNA, 462 bp, Homo sapiens
tactgcatataaactccactgaaggggcaaagaccactcttattaatctttgcgtcatcattgactagctgagtctttcttattattcaatatacatttgtttaaatagagatactcttcaacttacgatggggttatgtcccaataaacccatcgtaagttgaaaatatcgtaacttgaaagtgcatttaatatacccaacctacagaacatcgtaacttagcctagcccaccttaaatgtgctcagacatttacatcagcctacagttgggcaaaatcrtctaacacaaagcccattttataataaagttattgaatatctcatataatttattgaatactatactgaaaggaaaaaacaaaatggctgtatgagaactctaagtaccgtctctactgaatgtgtattgctttcacaccatcataaaattgaaaaatcataactcaaaccaatataagct

SEQ ID NO: 270209 - DNA, 582 bp, Homo sapiens
aaaaaagtgtgaaagacaagtttatggtgggtaaagctgttcatcttgtttctgttgtaatttataatccagagagtttaccattgtaaatattttaaaaagtcgtcttgccacccagcctcatatttacacatgggatttactggtccaatgttaggtcagaagtcaatatgaaacaggaatggaggctctgatgtcttgtcccttggaaatgttttcagaaaattccacaagcagatcactgtactgtgaaaataatgggctgcttagcacatctccagtcttcacctrcataggggcctttgtgtaacacatcagtcattctaatgtagcatcatcaatagtttcaaattcaagaatagttgttaaatctgccaaggtagaaggtggtgcaaggggaggaagaataattagctagaaggtaaaagaaaagcagcaaatgtatgaggattctcagcccctgggaattttttttaaaaaaataaatagtaaattaagtaacttgcaagcatttttgaccccatttaacagtaaattgagtaatcttgccacccaaaacaaataaatgtaaacagagaattg

SEQ ID NO: 270210 - DNA, 605 bp, Homo sapiens
tccaatgtaagtgactatttattgtttgtaagtcgtaagtaaaaatttgcctactggaccaaaacaaagataagtaaatagaaaatatttgtgatgcacatacccagaccgaatgtgtggagtaatcagtgaggaggtgaattttgarcagacctgtgaaactggatagaatggcaaatgcagatgtctcccaagttccatctcattctttacctgtagatcctaattctgtgctgcagtaatggtaactcaatgatatcaatcaaccatttacaaggcactttagcatagattatagcatatcctcagaataaacctgtaaattcagtaccgttccatacctcaaataagaaacctggaacttttttaaagtgacatggccaagcttccactgctggacctcaaaattcctttccttactgctgccttcacccatcttcctatacaattccattttgtctttccaaaccacatatatctcctttttcctctttcataataaccatgaccttatatccaattcctaaatttcctagtttatatccacaatcaacactgaacgagacatcttatgtatttcttagctggctcgttggttttggcag

SEQ ID NO: 270211 - DNA, 619 bp, Homo sapiens
ctacctcacactttgcaaaaggaggaatggcaagccaagatgaaaactcataagcagaatcaaagacaaattggtaaaaagaaaggaaatagaattgtatgcatttctgtgactacatttaagtctattcagggaacagggtattgtttaagtctgtatacttaccataaattccttgcatgtttgaaataattaggaagacaagaaaggatttagattttccatttctttgcgttccagctaccttcatgtaaagaatacttgagaagcctattaactcatattgtcttaagtccaatgtaagtgactatttattgtttgtaagtcgtaagtaaaaatttgcctactggaccaaaacaaagataagtaaatagaaaatatttgtgatgcacatacccagaccgaatgtgtggagtaatcagtgaggaggtgaattttgaacagacctgtgaaactggatagaatggcaaatgcagatgtctcccaagttccatctcattctttacctgtagatcctaattctgtgctgcagtaatggtaactcaatgatatcartcaaccatttacaaggcactttagcatagattatagcatatcctcagaataaacctgtaaattc

SEQ ID NO: 270212 - DNA, 629 bp, Homo sapiens
taacacattatggggtcctctggatacatcagcagatatttcttggaatcattgtttcataggtatctgactccaactccaatttttgccttttacaccaaattaatattgtcaataaatcagcattttagatttagagtaaacctgaagcttttagaaactctcaataccagaataaattacatatattatgtgtgtgcttaagtatttttattttactattgcacacacatatatcctatcctggctaaacactgtttttataataatttactatgtgttcccactaagtagtagtaaaggtaattttagagcatttaggttaatttatcagatttaataatgccaaacaaatrtggctcttttaagtaatgagaccagagtaggaaagaagcatcaggacaaatctgaaaccacagaataattagatttaggctttcaaaagcacttggctccatatcctccatcccacccacaaggaaataaaaggacaaggcatttaaaaatgaattattctctgaagactttccctactgtgtctgtttagtcttcacagttttcaatattgacagtgagtttcttttcaccaccaatatggcaagttcctttgagataaagagagatttcac

SEQ ID NO: 270213 - DNA, 581 bp, Homo sapiens
tgggggtcatctttgctgacttaaaaaaaaaaacaaagtatgtagctttttgtctcttggaaagaatcctagagccaaactctcttaagtaaataaaggtttaaaagaataaatgtttctcaactaatggtgtgatggattgccactgtatatgtatttccctgcaaagctagtcaaagtcttttttctcactgcctctttaatcttagtgaaaaacctttccttagagcttgagcaggccccataggagtcctattttttctttgtgtgtttctacatgctgcttctctttaccagattttaagatatactggtttcctrcacccatgttcaaagagaaattgtattttctcatattaattattatttagaattttctttgttatggcagggattatccaagaacctcctttcctagggtagccttaatattttaaacaggttttcagatggtgagaaatgcagtcatttttaaatatcatttgccattcttaaaatatttggatatttggtatctaaatgccagaggaggtcagttataagaggaggtgaatttaaaagagtaattgccaacatgatct

SEQ ID NO: 270214 - DNA, 463 bp, Homo sapiens
gcaagaaaaagagttggttgagtgtcaacttatcattataaatcatcaaaaaattaagattttttttcccctttgtaaagaatactgcttggaaattaaagaaccttttctacggaagaaaattactatgctagtgacaaatacaatcttgtgatagataataggctcttttatatcaagtttatttgctagagaatcattatgtgttcatagtagccttatgagagcttattaattggaaattttattttctatatgttttggtttttacatttggctcatactcctttawgtaaaagaaagtgattgttcctagctattgagcacataggctgctcaagaatcaaagtcattaaagccttctaccaaagagtcttaagcatttgcttggccgtctacaacatccacttctttaggaaagtaactctagagtcagagtagccattgcatttttccctcatac

SEQ ID NO: 270215 - DNA, 598 bp, Homo sapiens
ggtacttttctaggagctagggcttagcaatgaactaaataaagtctgtgccttcagtactatctaccttataaggctgttgatggagtcaataggatataaagtttggcacagtgcattgtgtagagaawgtgctcagtcgatgttagatgctttgtttatcaatgccacaatttatgtgcaaaaacattgcattaggtgttacaagaaatgcaaaaaagtctgtgaaagcatgaaacccttcttttagtattagtagtctgtttgcatattaagatattgattactttagtttgtaattccctaaagtagactctgaggcaaggatttgaatgtatgtagtttatttaagaggttatctcaggacatactggtaggggaatggggatgaaggaagagtcagaaaaataatagccattagagagtacattaatgaacacattactactgtggacaactggcgctcattcccgcttgggggtttctgcaagaagcaaagcacacctcaggattgtctacccaaaggaaaaagaaactgggatatttattagccattgcctttctgtcattggccaggggctgctcttgggcagataat

SEQ ID NO: 270216 - DNA, 585 bp, Homo sapiens
aagtgcatttcattttactacagcaataatataagctttaaaaaggagcagcttttcaggagtagaatgctgagccattgaccatgggttttctgaaaaggagcactaagtgcagggcttgagaagatggacaggagaagatgctcttggccattgtgccaggcagctgtggaactgtatttgggaagtatttaggagttaagactacatgaattggccaagacctaggaggctcaaagaaaccctattttcttagggcctatatcgcagccattccctagttaccagggcctatttaccaagactgggaaaggatgaaaacgccataacaggccaccagaggaaaggacaggcagagtgtattggaggcaagcacaccaggggtcwtcagagcaacccagtttgtgctttcctgaaatgacaggtcatttattcctttaacaaatatttattgagcaccttccatggcccagtactatttcaatatttcaattcctgccttgttttttccttctcctcctccccacaacatactggcatgcccattgctacagagtcattctacttttgactctattatttatt

SEQ ID NO: 270217 - DNA, 569 bp, Homo sapiens
ttcctagtgagattgtggagcaattttcacggcttttaaggcaaagcagaaacttgtagtggtgacaaattataccgtggagacctcttaaacacttagccttggtgaacattaaacctgtctgttcaacaggtttattgcaggattaggtacttcctggagaaggattcactctgcctttgacattgatgtaaatttggcttctgctagatttataaaaggtgctatacagaagtcattcaattttctcaaaagttcacttatgaatttggggtgtggatttattcatattacagacatctcttcattatcccttgaagttgaccacctaagaaatattctcagattcatattgagttaggttgttgcaatcccttytgataattcatgtctacctagaaattgtattaactctttctggccaccataattttgctgattaaatgacaaaggcagtgtgctactaagattcggaattcctatactaagattcacatcctggccaacatggtgaaactccatcactgctaaaaatacaaaaattagtcaggcatggtggcagacgcctt

SEQ ID NO: 270218 - DNA, 550 bp, Homo sapiens
ttctgggcaatatagagtttcttttttttgcttagaatgtcataaatacatgtgaacacgtttaatgcaggcctttttattctctccaaaatgtcaacagtattttcagaataaagactatgaaatatattgctgtagtggaaaattctggtcctttgtctttaatgtctttttgagtggataaagaaaattcacccggtttgtagtttctatatttccgtgaatctttgaccttgcartgggttgcaataaaagagaaacaaaacactgtgtcttttgttttattttagagacaataaatgacctccccaatgctggttgggtatgatgcatgcagtggtctgtgtatttctgtgtttcactacagacttatgtaggtttgactaacccagaataataaacgagactgagtttaggaggttctaattgggctggtgattatagagataagattaaaatctcaaggatttacataagtgtgtattagtccattctcatgctgctaaaagggtatacctgagactgggtaatttataaaggaaagaggttt

SEQ ID NO: 270219 - DNA, 567 bp, Homo sapiens
gtaccatatcttaacagggacattaatgaccaatttaaggcaagtagggaggtaaggggcctgcaaagaatgttatatatgaargttaagggacctgggtaattacccttgagaagaaaagatctggaagagtagatagacaagatatttcaaatatttgaaaaatctttttacagacaacacattctacatgttttaatgagcagggctggacccaaagcacagaaatcacaagaaggaagacttccattctcattattagaactatccaaaaatgaggggaaaatacttgggagaggagcaaatggctcttcacagggaaagttttacgtacaggctgaatgatcacccttttagaaccatgtgaaaagaatttccttttggatagaagcacagactagataagagcagctaacatttactaagcacttaatgatatgctaggagctttacaaaattattcatttaatcctcacaacaactccaagaaatagatactcccattttactgatgaggaaattgataggttaagtgacttgcccactgtccaacaggaagtagctgaa

SEQ ID NO: 270220 - DNA, 563 bp, Homo sapiens
agacacaattttgagggataaatatataataatttatgaattatatgtgtctttttttgttatttatccaaacatcagcagcacatcaacaaaaatcaaaaaataattaaattttgtcatcttttgtattttrctgacattcagtcatataaaaacatattattttataatatacatattattctttatatgtattctttatacatattactccattttgttgttatgaacctatatttatcaaggtagatgaagaaagtatattttattggcagctagcttcaatgtataacttttatatttgtagatataatgtctaccttttacatattacgacatatgatatactaacctacatctgtactcctgcttcaagccccgccagtgttaaggataggcctggtctgcagtgtgtgatgcagcaaaagacagtgaaaaagataaagctctggatagttcttgcagctgttcatccagtaatgcatggagaatgttaaataacaggagatacttactaagtgctatttcagggtaaatgatgaaattctcaattaggaattaag

SEQ ID NO: 270221 - DNA, 478 bp, Homo sapiens
gatgtgatgatcctggagaagcaaccaaactgtctggtttcagactgtgcatctatccactcacaatgccatgttctcagaaccttcctttcttctttaggtgcagatcagataattaacttacattttctgaaaaagctgtctcaatactgtgtgatagaatgaatcacttctttccctacatgtaggatctcattggaatagataaaaagcttgaataagcctcatctacagcatcttttcttccatacaggataccaccctgacccccagtgcagaaagatgtctttttccctgcattgacaacctgttatcatacaccacaattttaccaactttagagtctgaagacttctcctaatgcctttttggattttttgttgcagtagcccaaaagcatttgtcctrctctaagtaggaacatgaaacagcttctcactgtcactcactcatataatagttttttttaagatactca

SEQ ID NO: 270222 - DNA, 514 bp, Homo sapiens
aatcattctaattcccatcctccagatttttcaacatctgaatattcagtgggtgtcatgaaggcatcatcatagagtactgaaattacggcatctgggaaaaattttaaacaggtccacaggaatrttttctgttgttttacaaattacaggcaaaaacctaaagaaaattatagttttcccaattctcagatggtattttgtctaatctaatgcaagacaaaaagtggagtagtttatattgtttatcttgtattggaaagatgtagttattttggaaaaaatattacactctctaaatttagtaattattcacacttgtgtatttgaatgtataacataaggccatgtcaatggactataggaattcagaagaaagaagttgccctcatttaaaggaacgtggtaaagctttgaagaaaggtaacatttgtgagggatataaaagaataagtagtattgtgacataaacaacttggaaggaaggaaattctaaatgaaaaagtagcataat

SEQ ID NO: 270223 - DNA, 619 bp, Homo sapiens
tcttaataatggtagactcttggcaggtccacagaagtgcagccagtatgataacacactggaaacctcagcagagaagcacccatgccaagaaataaggagctccagcctgcagaaaatctaggrgacataatgacacactgaaagtactaaagggttttattgtcaacaaaggattagcctgcatggctgcagaggctgcaattagcttaagttagtggaaattaagggaggggtctgcttggagtcaacataagaagacaacagctaaaggcatattattaacacctggtcatggccacttgcctgcgatggtgaagagagctttcaacgtggcagagggtacattttggatgccatctaagagcacattagtttctacagcaatgttttgcaacttggaggcaggtatacatatattgagaggtgggtttcccaggctggagtcatcagaacctaactagctccctgtccccatattctaccatgtaccccagctaagatgtccagctctctactccatctcagccctgcttgggctccaggactactaacatgacaatggggactcggggttctgatgagggcaatacacatggttttagtcctggttagttga

SEQ ID NO: 270224 - DNA, 619 bp, Homo sapiens
tcttaataatggtagactcttggcaggtccacagaagtgcagccagtatgataacacactggaaacctcagcagagaagcacccatgccaagaaataaggagctccagcctgcagaaaatctaggagacataatgacacactgaaagtactaaagggttttattgtcaacaaaggattagcctgcatggctgcagaggctgcaattagcttaagttagtggaaattaagggaggggtctgcttggagtcaacataagaagacaacagctaaaggcatattattaacacctggtcatggccacttgcctgcgatggtgaagagagctttcaacgtggcagagggtacattttggatgccatctaagagcacattagtttctacagcaatgttttgcaacttggaggcaggtatacatatattgagaggtgggtttcccaggctggagtcatcagaacctaactagctccctgtccccatattctaccaygtaccccagctaagatgtccagctctctactccatctcagccctgcttgggctccaggactactaacatgacaatggggactcggggttctgatgagggcaatacacatggttttagtcctggttagttga

SEQ ID NO: 270225 - DNA, 657 bp, Homo sapiens
atctgtatatgtatatctgtatatatatatatatatctgtacgtgtgtctctcaatacatctaaaaaatatgtattttcatgacttgaaatagaaaagattggatttaggcaaggaaagcattgcagtgcaaagtttccacccccagactcttaccctctccagctaacttctgcaggatttggtggaataagcaggcagtcataatttcctgatgactgactgaaggatatgtacttctcctcctaatgaaatcctcagtagtgagtcatggtgccagaggcactgttctcaaggctccattctgcttattcctaatccaaattctgaaaagagcacacatctaaatccaaccctttagatctctgtgtgggactggagtatatatttcttttccaacttctctctctcttccttgtatcctctgcagcagaactgacagccactgggcargagtggtcagctttagtaaccatgatggcaacagagaaataaagaatccattatcattgctgactgtgctgtgatagtgagtgtctctttcataaggccacaaaaatggacatttaatcatttactgagtcgcggcagaccctgggccaagtaatttaggtgaacaacttctggtatgactacctacaaatggcaaaatgttata

SEQ ID NO: 270226 - DNA, 455 bp, Homo sapiens
tcaaggctccattctgcttattcctaatccaaattctgaaaagagcacacatctaaatccaaccctttagatctctgtgtgggactggagtatatatttcttttccaacttctctctctcttccttgtatcctctgcagcagaactgacagccactgggcaagagtggtcagctttagtaaccatgatggcaacagagaaataaagaatccattatcattgctgactgtgctgtgatrgtgagtgtctctttcataaggccacaaaaatggacatttaatcatttactgagtcgcggcagaccctgggccaagtaatttaggtgaacaacttctggtatgactacctacaaatggcaaaatgttatagaaatctggttatttcctttaagagtgtaaatctgatacttctgcctccttggaaaagacattttcttgaggtactcggaaagagaaa

SEQ ID NO: 270227 - DNA, 455 bp, Homo sapiens
tcaaggctccattctgcttattcctaatccaaattctgaaaagagcacacatctaaatccaaccctttagatctctgtgtgggactggagtatatatttcttttccaacttctctctctcttccttgtatcctctgcagcagaactgacagccactgggcaagagtggtcagctttagtaaccatgatggcaacagagaaataaagaatccattatcattgctgactgtgctgtgatagtgagtgtctctttcataaggccacaaaaatggacatttaatcatttactgagtcgcggcagaccctgggccaagtaatttaggtgaacaacttcyggtatgactacctacaaatggcaaaatgttatagaaatctggttatttcctttaagagtgtaaatctgatacttctgcctccttggaaaagacattttcttgaggtactcggaaagagaaa

SEQ ID NO: 270228 - DNA, 553 bp, Homo sapiens
ggtcttcaagcccttcctctttttcctcaccacctatttttttcctgaactcctgatttttcttcccaccaaactagaaccgacaaagtttctagtagcctactgtaatagctttttaatatttgtttcctaaattaattttaggaagttggccattctcattctttctgtcctctctacggcttttagtttcacagaggtcagcctggcttgactccaggtttcagtgtcagtggtctagggagattttctttttcatgagaaaggcytctggattttagctgcctgtgtctaaactccaccaaactccaaggtccaaccttgtcttgatttttctctctaactttctccttcagggttctcattcatcttcacattttcaatcaccacctgttaccagtgattcccaaaatgttctcttgcacttaactttctcccagaggatcaacctcacagcttcatcatctagttaaacatctctacatcaatgactgtcttgctaacatgttcatgtcatggtccctgtttccctccaagtcaactttttccactc

SEQ ID NO: 270229 - DNA, 570 bp, Homo sapiens
tattctactgatgtttctgttggacaggctaggctgccctccaggtgccaattgcctggttagaggtcawctggaaattgtacgggacatctcactggccattccctgagcagagctctggtgggatctttagaaaaatacatacccagttccatgaaatacatcttttctaagttacaaagagcattccctagtgatcttttaaatccaaagagcgctcctactgcatatttgaactgaggcactctttctgttcatatcacatgtgggtgcatgcaagttgaggccaaaagatagccttgtcattttctttaaatttcaactcaaaactccaaaaagtcttccttaattagcttcctccactcagcatctctgcatatagcttgataaatattgtcatcacacattaatcttggctatttagttcatgtatgtgtgctttgaatatcttccaggtgatacacatcttgaggactggaatcatgtcttctgtgccttttctatttctagctttcttattatacctctctacctaagtgcttaatggaaacttgttgagttgaagtgaat

SEQ ID NO: 270230 - DNA, 576 bp, Homo sapiens
aatttatcaatttcttagaaggaaaacctactatatggtgactctatatcaatatttaatgtaatagtgcctggagcactggattgactttcttactgtgaaaatgggaaagaaaattragacactgctctattttctaatggtgagacccttagataaattacattttagttgttgttctatacattctaggagtgataatgatcaggttctttgtgttcattgatatgttcttgctaatttcattttgttagacttaagtgcagcatttaatgttattgatcaatgtggaaagtaccaaaatgctctaacactcccatggctatgtggcttggctctactttgtcaagaaaaggtggcttattggccttctttcttagtttcctgaaatacccgcttttttctctactttctctgagagtaatacctcacgtgctaataagtattgcatattaacaaaaatcccaacagatttttgtgttcatttttacatctagtacattcaggccaagcttgatttatttgtgacattggcaatcctcttattttttctctgctgcctacctatctaccttt

SEQ ID NO: 270231 - DNA, 554 bp, Homo sapiens
tatgtaatgatcttcccccattgtgccaaatcacattgcaaaaaggacaaaaattaccaatggaaatattcacagccctctctctgctcccacctgctatttgtatattctacatcccccttcccagagagggttttctctgagaaacaagctacgttatgctacataataaaggatagtgtgggaaagaaggatggggtagaggaagacacagaaaagccagtgagcacatgtgaagaaagagctgggtgtgtttaaagacagaagggtctggtgcggtggcacacgcctgtagtaccagctgctcaggctgaggtaggatgattgcttgagcccaggagttctgagcttttgtgtgctatgccaattgggtgtctgcactcagtttggcgtcaatatrgtgacctcatgtgggtggaggatcaccaggttgcctaaggaggagtgaaccagtccaggtcagaaatggagcaggtcaaagctccagtgctggttaatagtgggatggtgcctgtaagtagccactgcatcccaacttgagcacacagcatacc

SEQ ID NO: 270232 - DNA, 593 bp, Homo sapiens
cgtgctgccacacccggctaatttttgtacttttattagagatggggtttcactgggttggccaggctggtcttgaactcctggcctcaggtgatctgcccacctcagccttccaaagtgctgggattgagggcgtgagcctgtaggattcttaaaaatagtaagccaatgctggaaaattcagtagcagttctgctctgaggactattttttcctgttgagctctgcagaggctcctgcagtctccaaaactcagctttgatttgcagggaaatgctgccagcagtggagccagactcaacagcatgccaccttcatgtccatgtattaaaagctagagatcagggtaatggttcccctgtattatgattgaccacatttgatagacaggcatgatgtaaggagaatatgtcctagttcctctgtacagacaacatccctcccaggataaacaaaatcctctgactagttcttaacttttcaaactctcttggaacatctgtaatcaaactcaggaactgtggttctcaatcctggytggacttaagaagcacctgaggaacttaaacaatgatgtctgagccaattaagtc

SEQ ID NO: 270233 - DNA, 636 bp, Homo sapiens
aaaaattgaccataactcctcaacctagaaaaaatcatggccactttttcttctgtgtatattcctttcagttattttctatgtacatgatgacaaattctctatagttatgtattatttttactcaatatcattacatcattagcaggtccctataccattcaaaattattgtaaaaactatgtttgatggctgtacaatattctactgtatarctattgtgcaatttatttaattagtccctcactgatgtgtttaagattgattccaatacctagatagaaagggaacttgaagattaacctgctaagatctgttttcagaaagtcacaaaacatattagcatatcaaaagtcatgagaattctgtggtaaagaataaaggccttgttttaacagaacattttccaaatacattttctcatgaaattctacctcttctttttattttggctaaagacctattatattctgtctgcagcattctaatacttcaaggaacccagctggaaaaaggctgctattgggttttcccattgcaatttgaatcttagaagcaaagcagtgtcaggagaatatagctttgttagaagtacaagtaacttggtggctataatgggtaatccttcagtaatac

SEQ ID NO: 270234 - DNA, 572 bp, Homo sapiens
ttataaaaatgataatttccttgcttggctacagatcagtaaaacagctactttatgcagcacctagtgtatttgtgacaacatttctaaaggcaatttggcaataagagccaaatactttaaaaatgtgcaaatatttcacattgttgttatattttatatcatttatcataatttttaaattgaaacaaatttagggattaacaataatagaatggcaagtaaatcatggaggatctatatgatgaaatattatgcattaagggtgatattatggccaggcatgggggctcactccggtaatcccagcactttgggaggcagaggcaggtggatcacctgaggtcaagagttcaagaccaacctggccaacatagcaaaacctatctctactaaaaaatacaaaagtagctgggcatggtggcatgcacctgtaatcccagctactcaggaggctgaggcaggagaattgcttgaacccaggaggcagargttgtagggagctgagatcatgccactgcactccagcctgggcaagaatgtgagactccatctcaaacaaaaaaaaaaaa

SEQ ID NO: 270235 - DNA, 570 bp, Homo sapiens
actcctcaacctagaaaaaatcatggccactttttcttctgtgtatattcctttcagttattttctatgtacatgatgacaaattctctatagttatgtattatttttactcaatatcattacatcattagcaggtccctataccattcaaaattattgtaaaaactatgtttgatggctgtacaatattctactgtataactattgtgcaatttatttaattagtccctcactgatgtgtttaagattgattccaatacctagatagaaagggaacttgaagattaacctgytaagatctgttttcagaaagtcacaaaacatattagcatatcaaaagtcatgagaattctgtggtaaagaataaaggccttgttttaacagaacattttccaaatacattttctcatgaaattctacctcttctttttattttggctaaagacctattatattctgtctgcagcattctaatacttcaaggaacccagctggaaaaaggctgctattgggttttcccattgcaatttgaatcttagaagcaaagcagtgtcaggagaatatagcttt

SEQ ID NO: 270236 - DNA, 554 bp, Homo sapiens
aacagaaatgaggcgcttcaatcatttccaatgttgtaatttcccattgaatgcagagaagaaacatacttttccaagacctgaactttttttctttccttcttaatgtaacaaatgactgctgtgattcaaaagcactatttggtctcctatcaattattttattttacatttggggtttgtacatttgatcagcagtaaagctaattcatttctcaattcatcttcctacgtaggtatatatgtgagaacaaagcaagtactgagctggcaaagcatcttttttcactggatcctcttctgttacttttaaaatgtrtctctctgtgttagcattttatggaaatgtatgcataggaaaatacaccctacttttctcctttctcaagactcatttccactaccataaggctaatgattccattttataagcaggcttcattacctagccataaatatgacaagaaaaatattaaaatcaatttgagtcatcacaggtggtaacatccaatttatctgacattattaaagaattagatgagaaatagaaatga

SEQ ID NO: 270237 - DNA, 619 bp, Homo sapiens
aaggggagttattcacaaattgaattgsttgaacaaaaaggaagaatagatggaacagaaaccccaaaattgttccacttagaaatgagatgtggctactctttgattcatcttgtaccaaattctgagtcaatcacatggaaatattgcattttaaaataagtgttacagcacaacatttacagctctcaagctctaaactgaagctgccacatgtcaagtgttgacttgtatggctcataaatcaccagctgttgtttagacagtatccatcttcaaagtttgtacagcaaaggggtctattcaatgcatttttaaatcaaatttctgcagaggagttttggacgagacagatctgggaactacactgagaacaacctcttagttgttgattcaaacacacttttggcaaaatttaactcgggctgaaaaaaaatctgaatttcaaagctgtagtaaagtactgattaaatggtaatctatatttatagtgttttaaacctttaattaatacacatgtccttatgtaaaagtttggggaacttgaaagactttatgaaattcattggaggataaaaagaaataacacttctaaatcaaagtcagatttggagaaaac

SEQ ID NO: 270238 - DNA, 460 bp, Homo sapiens
atgcaatttaaagaaatcccttcaggtttcctagggtaattttattggaaaataaatatgtacagttagcaaggtaaaagaaatagaaactatacggctgggtgcagtggctaagtcccacaattccagcactttgaaaggctgaggtgggtggatcatgagggcaggagttcaagaccagcctgaccaagatggtgaaaccttgcctctactaaaaatacaaaaattagctgggcatcgtggctgtggccagtaatctcagctacttgggaggctgaggcaggagaatggcttgaacccgagtggcagaaattacagtaagccaagatygtgccactgcactccagcctggggaactgagattctgtctaaaaaaaaaacaacaaaactataataattgttcggttcataaatatattcaggtgtagatatcagaagtcacaacagcataaagtggcat

SEQ ID NO: 270239 - DNA, 561 bp, Homo sapiens
ctctactaaaaatacaaaaacttagccaggcatggtggggtgtgcctgtaatcccagctactcaggaggctgaggcaggagaaatcacttgagcctgggtcccagtggttgcagtgagcagaacacgcccctacactccagcctgggcaagagtgagactctgtctcaaagaaaaattaaaaaaaaagaaaaagaaaactgtttaatgtatatgaatgtattgttatgtgtagtgtctgcaaacactacacataactatgctaattgtyctgaagtcatcaatagaaagccaagtacaactacagactctactgttcagtttatgcactgaactctttttgtttttgctgtgtaagtacttcagcctgcaaatgttggataattaccttggataataaagttactttcaaagaaacttagtatcttttagcgtttctcattccatattgctaaatttaatcctatgtttctgctaagcttctgtgtgctcttaaaatgagcttttatctaaacacatttgtgtttactttaaaggactaaaaatgggccaggcatggtggt

SEQ ID NO: 270240 - DNA, 418 bp, Homo sapiens
gcagagaaaagagaatgcttatactctgctggtgggagtgtaaattagtttaactgtaaaaagcagtgtggcaattcctcacagaactgaaaacagaattatcatttgactcaggaacctgataattgggtatataccaaaagaaatataaattattataaagacgcatccatatgcatgctatgcatgttcattgcagcactattcacagtagcaaagacatggacaggacctaaatgcccatcaataaagaaaatatggtatggtcagaagcggtggctcatgccttcaatccyagagctttggaaggccaaggcaggtggactgcctgagcttagaagtttgaaaccagcctgaaaaaaatagcaaaatcttgtctacatggaaaatacaaaaagaaaaagtggccagccatagt

SEQ ID NO: 270241 - DNA, 377 bp, Homo sapiens
tggtgtctgactctggagctcaggctgttgcttcttggtctggtggtgagtccttcatagtctggtgagtgcgggtgtcccactctggaacccatgctgttgcttcctggcctggtggagaatcttccagcctggagagtgcggtgtctgactctggagcccaaggctggaaacttggggacgtcccaaatcccgraatggaaactcccccagttctcccccttggcgtgccctatctggtgagtttcgggggaactcatgacccaagtcataataggaatttcaagcctcataaagacatcatggttgaagcagaggtgtttcgtttccagcaaagcccaatagcaagctaacaattgctcctcgaaagggttata

SEQ ID NO: 270242 - DNA, 593 bp, Homo sapiens
gtgattttcccaccttaacctctctgtgttgaaattacaggaatgaccaccaaccctggcctgttcaatttatttggaattttaaaaattactttatatgctttttatagttgcttttgaaatgtttttcattgggccatgtttctctaatattttgtgtacattgcaatctttgattgagatttggacattgacaaaaagctacctgttacaatctttttataatatagctttgtcctggcatagtctgaaatcaatagtcttggctagagattctgggaatttctcaaacatgttcttaggatgtgtcttgtctaaattttgtgtttattgtttagttaaatggcttattttttttaataatcagtaatcacttgctgcagccattccctgwttggggtactgcagtttctctgcttctctaacatttatctttagactcagtagactcaaactgtcattccaatgtatatcaccacttctttaagcgttttatgtcatgggagacattaaccagtgtctaagaagcacatagaagccagaaataaagatgtatgtgccaatgtttttctttaaaaaaaaaaaaaaaagaa

SEQ ID NO: 270243 - DNA, 540 bp, Homo sapiens
ggctactcgaccacagatcaaaaatatgtggaaaaaagatgaatgcttgtgtctgtactgaacatgtagaccttcccccttgtcattattccttaaacaatacagcataactatttatggcccggcacagtggctcacaccagtaatcccagcactttggaaagctggggcaggaggatgccttgaagccaggagtttgagactagcctgggcaataaagcagcaccctgtctctacaaaaatatgtatmtattttaaattatccaggcgtggtggcgcatgcctgtggtcccagctactagggaggctgaggtgggaggattacttgagtccaggagtttcaggctgcagtgagctatgatcacaccactgtactccagcctgagcaacagaatgagaccccatctcttaaaaaaaaaacaaaaaaaaaacaaaccaaccacttacataacacttattgtactaggtactgtaagtaatctagtgatgacttaaagtaaatgggagggaaaaaatagcatctatgggaggatgtgtgta

SEQ ID NO: 270244 - DNA, 596 bp, Homo sapiens
aagaaaaattgtatgatcaactcaaagtgataaaaaccagtatcacataatgatttcaaaaataaattttttcaacctgaaaactttcgggctgaatttaattcagccagcttatttatttttatttttattttttttttgagacactcttggtctgtttcccaggctggagtgcagtggtgcgatctctgctcactgcaacctcgccaggttcaggtgattctcctgcctcagcctcccaagtagctgggactacagacrcgtgccaccacacccagctatgtttttgtatttttagtagagacggggtttcaccgtgttagccaggatggtcttgatctgctgacctcatgatccgcccgcctgggcctcccaaagtgctgggattacaggcgtgagccaccacgcccagcctcagctgacttttgaaaacacaattcaaagatgggcaaatgatctgaatgtacatttttctaaagataaaaaggtcaactgcacatgaaaagatgctgaacatcattagacaccagggaaatgcaaatcaaaaccacattaagataccacttcacacattaaggtgagtgtaattaaaaaga

SEQ ID NO: 270245 - DNA, 383 bp, Homo sapiens
ttcctaaaaacccttgtaatctctagagcaataagagygtcttttgtgtgctcatgagatggttggtgtctggaagcccctagagagactcagaatgggggctggttcagaaagacccaggcaagatcagaggattgggacttaaatcagccatgcctgtgatggagcctccttaaaaacccaaaggactggcttgaggagctcgtggatagctggacgtgtggtggttcccggagggtggcatgccaggagagggcatggaatctctgcaccccttcccagcataccttggcctgtccatctcttcatctggctattttatctgtgtacttcgtaatgaccttggtgataaaccagtaaacatgtttccctgagttctgtga

SEQ ID NO: 270246 - DNA, 555 bp, Homo sapiens
tccaaggcgtctccgtagccactggggagtaaaccagaatctctctgcctgaggttkttcagctcggctgaggttgcagttcccgagcgctcctccaggtttgaggctggaggcggaagtgacgtcacggagcgctgctgtgttttccggcgctttctccgcgccgccaaacccgttttcttcctggtggcgtttgggcttaatacagctttggcgaggtcggatgacgggtgggagccagcggtggaaggggtggcgaaagtaccggtttgccccaggccgccgaggggcctccttagagagaccttgcctgctccgctcgcgtccgccggggccgcgcgggtcctcctggcgccgccaggttcaaaaagccactcgagttgtcactgcgacggccctgggccaggagccgtttcgggatctgtcgtaagggcgcttcctcacgatttttgcaaacacggtgattgccgcttcaaactcttccaaagcaattctttgtgacttttttttttccagaaacaacgagttttcgtcgttcgaatcaggttgactggt

SEQ ID NO: 270247 - DNA, 555 bp, Homo sapiens
tccaaggcgtctccgtagccactggggagtaaaccagaatctctctgcctgaggttgttcagctcggctgaggttgcagytcccgagcgctcctccaggtttgaggctggaggcggaagtgacgtcacggagcgctgctgtgttttccggcgctttctccgcgccgccaaacccgttttcttcctggtggcgtttgggcttaatacagctttggcgaggtcggatgacgggtgggagccagcggtggaaggggtggcgaaagtaccggtttgccccaggccgccgaggggcctccttagagagaccttgcctgctccgctcgcgtccgccggggccgcgcgggtcctcctggcgccgccaggttcaaaaagccactcgagttgtcactgcgacggccctgggccaggagccgtttcgggatctgtcgtaagggcgcttcctcacgatttttgcaaacacggtgattgccgcttcaaactcttccaaagcaattctttgtgacttttttttttccagaaacaacgagttttcgtcgttcgaatcaggttgactggt

SEQ ID NO: 270248 - DNA, 523 bp, Homo sapiens
ttctaaattctccaagtgttgtcatattgcgtcaatatggtgcctccagaaaccaaaaaaaccgaccaagcattgtgctgtttgtgattagtagtacaaattgcagcaattctcctttcaccttagagggaatatcttgacaagcgccagacaactgaacccctagaaacttcaggtggttagcctgaatgtttgggtgtattccccaacaaacattcacgtctgtcttacgaaagaactcataaaggcatcaatagagaggacaagttgtgggatrtaaagatgaccatacctgctggatgttattgcaagcaacagtataactgatgtaacgctgagaaaaagtaagttgctcctggttgtccttacaggttgagaaaatggtatttctaggtcagtagctcacatttgtagtaaattaatgaacattagttattaggggaaaagtatgggcactaatagcacaatttgccagaaacataaaatgagtaaacttaaatgtacccaattacagtgcccccca

SEQ ID NO: 270249 - DNA, 464 bp, Homo sapiens
tggactgtgatttgcatcttgacaaaccaaccgttttttgttttgttgttgttktttttttcagagagtcctgctctgttgctcaggctggcgtgcagtggtgtgatctcggctcactgcaatctctgcctcccgggttcaagcgattctcctgcctcagcctcctgagtagctgggactacaggcgtgcactaccacacccagctaattttcgtatttttagtagagacagggttttaccatgttggccaggatggtcttgatctcctgaccttgtgatccacctgtctcggcctcccagagtgctgggattacaggcatgagccaccacacctggccttttttttttgagatgcagtcccgctctgtcgcctaggctggagtggcatgatctcaactcatagcgacctctgcctcccaggttcaagtgattctcctgcctcagcctcctgagtagctgggat

SEQ ID NO: 270250 - DNA, 583 bp, Homo sapiens
ttcaaagggctgggggaagttattttaaacctagaattctatatgtagcatcaagtgcaagataaaataacacattttcagataaaaaaggactcagactcactctgaaatcattaaaggttttatacaacagaggaaataaaataagtaaaccaaaggtcagtttatatttatatttaagttcaaataatgggtagtacataatggtttttacaatgtctggaattaaaatcacagatcattttcacatgaaggaaaggcaaaggacatggggctgggatggatgacagataaggctttgtcttgttcaagggaggatatggatgstgaatgcatatgtgcacacacacacacatttaaaatgtgtcagaaattaagcattctcattatgtgaccaaaccccaggtgtacacttttaaatcagaaaagaaaaaaaatgaaacaaaatttcatccatgcaataaaagagagaaaacttcatatgccatgattaacagacaacataaaaacgatagcaaaaataaaaactaaacatattagtaaacttaataaatgttaatgggttaaaatcatgtataaaaaa

SEQ ID NO: 270251 - DNA, 607 bp, Homo sapiens
tgagcttcctgcatgccttcctggtagaaatcctagggcagcgtcccattttcgaccttctgccattgcccatggcagatcacgtcactgcactccagcctgcatgatggagtgagaccctgtcttcaacaaataaattaataagtaagtaagtaaataaataaataaataagkaaataatatttgctgaaagagagcacagttccatgaccatgaggccctggtagagggacctcttctgtggccacagtcccagcttcatctctgaaggactgtggatcccagacacagagacgtccgggagttgcaagggagcaccacctgattctgtcctctctgtccctcttgagaagtgtcgcccatgcttctgccatgaggcgagctgggtggagaatgaatgcccacactgaacattcaggtgggttgtggtttctgagagctacgtggccatgaggccgctggtcaagagattcctcctcttcatcttcaccttcctgcctgcggctgtctttgtctggggcttcctgcaggccttcctggtagaaatctgcttgctgctgctggcctgcctgaggcccagggcagtgtcccagtgtctaccttctgc

SEQ ID NO: 270252 - DNA, 596 bp, Homo sapiens
gtgccgaatgagcggatgaatgaacaggacacctccacgtggaatgcaaatgctgttggacaggacaaggggaaggacagcgcagggcagcacaccatgccttgccagagggattgyataaacaattgctatagaagcttacaggctggcggaggtcccttcaggcttgggctgttgaaggcttattaggagagagtgtgctcaaactgatctttgaatcctggctggcacttggaggcagagaggacagagaaaagcatgcctggaaggtaggtgagatgggccaaggtgtgcaggtaggaccagagagggaaggtgtgtctgggggcaggagggagggtacatgcctggaaagcattggagaacatctcggagaggtcagtacaggccagaatgcataggcccaggctgcagagttcagctgtgacccctgatgttattttaaggtggtggttttttcatattcaattatgaatgaaattgcatttgaggatggcagctgatgatggcgtgtggttatgctgtgtgggctgctttcaaaatagctcaccccaaacttcattagtgattagttcgaggaaagtgcagcctgaccc

SEQ ID NO: 270253 - DNA, 606 bp, Homo sapiens
agccctgcagactctgactccttcagcttccayctctggaccaaaggcagctcttcccacacatgtttcacatctgctttctctctatctcctccaccactgccctgtccaacaccaccaaacacccaggcttccattctgcccacattgccccttaaacaacattcacattacatgatggctttacccactgcttttcagataaagcctaaaatccttcatcaaggcctctgtggcgtcgcctcaatctttctctccagctcagctcacagcttccccttcctctgtgcctctagcctcactctgcccacctttcagccttcatcttcaccaagttccatctgccacagggtctgtgcacttgctgttccctctgcctggaacgctcttccctgagatgtttccatgtaacccctgcctgagaatgtgacgctgcccctagcctaggaccagaggctccgtgagctccagacacctctccttaaggcacctgccagactaatgatttcacattggttcatgtgattctctgacgaacatctgcccctctctccagactgtaagctccataaagagagggatcaagtctatttcactcatcatcct

SEQ ID NO: 270254 - DNA, 553 bp, Homo sapiens
tgtccctacctccctcgccccaggggatctgtggtttcctactggtttcctgcaaattctagaggagacccatgaragcgctgggcctcccctaggaaggactggaattcccaagggaaagggtgtggctgagagtcctcccagggctgtgaaagaggagacactcactcccttctcccctcagagtcctggaagctgagcacctcccctctcctctggcccccagctccggacatccgagaaccgcaacctagaatccatgcacacttgcttcatcggtcctaaaatacactttttttggcgggggtgaaggggggaggatatccttattcaaagtggaggctagagagatgtctaagacgtactgcattagctaaattagtactgatttgtcctggggcacaattacaaggtttaaggttacagtaccaggagtttgagaggcaattataattcaaagacagctagctaaggggtggctgggagttacaatcagaacaagggaaagtttagtggaagatgctgtttgtcagtgaatttgaaagcatgtttt

SEQ ID NO: 270255 - DNA, 368 bp, Homo sapiens
ctaggaaggactggaattcccaagggaaagggtgtggctgagagtcctcccagggctgtgaaagaggagacactcactcccttctcccctcagagtcctggaagctgagcacctcccctctcctctggcccccagctccggacatccgagaaccgcaacctagaatccatgcacacttgcttcatcggtcctaaaatacactttttttggcrggggtgaaggggggaggatatccttattcaaagtggaggctagagagatgtctaagacgtactgcattagctaaattagtactgatttgtcctggggcacaattacaaggtttaaggttacagtaccaggagtttgagaggcaattataattcaaa

SEQ ID NO: 270256 - DNA, 642 bp, Homo sapiens
tttttctgtgtgtgcctttacctttttctctctttctcttggtctttctcagatcgctctgtggtctatcctggactttatcattctttacaattaagcgccaggaataargttcaccctgaacaaaagcagtttttttgattgtttgtttgtttgttttttgagacagactttcactcttgttgcccaggctggagtgcaatggtgcgatctcagctcactgcaacctccgcctcccggcttcaagagattctcttgcctcagcctcccaagtagctgagattacaggcatgcaccaccatgcccggctatttttttgtatttagtagagatggggtttcacgatgttggtcagaccagtctcaaactcctgacctcagatgatcgacccacctcggcctcccaaagtgctgggattacaggtgtgcaccactgcagccagccagcaaaagcagtttaaagtcaagtctactgggacagatgtggggcagaaggtgggccctttggacctgggatcagaaatgggcaagacatcctgtggtattgtgttttggaattcctcagggacaaagtggcagtgagtgatttggccgtgttgggagggattccaggcctgctcctaaccaccttcccaggtatgtg

SEQ ID NO: 270257 - DNA, 642 bp, Homo sapiens
tttttctgtgtgtgcctttacctttttctctctttctcttggtctttctcagatcgctctgtggtctatcctggactttatcattctttacaattaagcgccaggaataaagttcaccctgaacaaaagcagtttttttgattgtttgtttgtttgttttttgagacagactttcactcttgttgcccaggctggagtgcaatggygcgatctcagctcactgcaacctccgcctcccggcttcaagagattctcttgcctcagcctcccaagtagctgagattacaggcatgcaccaccatgcccggctatttttttgtatttagtagagatggggtttcacgatgttggtcagaccagtctcaaactcctgacctcagatgatcgacccacctcggcctcccaaagtgctgggattacaggtgtgcaccactgcagccagccagcaaaagcagtttaaagtcaagtctactgggacagatgtggggcagaaggtgggccctttggacctgggatcagaaatgggcaagacatcctgtggtattgtgttttggaattcctcagggacaaagtggcagtgagtgatttggccgtgttgggagggattccaggcctgctcctaaccaccttcccaggtatgtg

SEQ ID NO: 270258 - DNA, 642 bp, Homo sapiens
tttttctgtgtgtgcctttacctttttctctctttctcttggtctttctcagatcgctctgtggtctatcctggactttatcattctttacaattaagcgccaggaataaagttcaccctgaacaaaagcagtttttttgattgtttgtttgtttgttttttgagacagactttcactcttgttgcccaggctggagtgcaatggtgcgatctcagctcactgcaacctccgcctcccggcttcaagagattctcttgcctcagcctcccaagtagctgagattacaggcatgcaccaccatgcccggctatttttttgtatttagtagagatggggtttcacgatgttggtcagaccagtctcaaactcctgacctcagatgatcgacccacctcggcctcccaaagtgctgggattacaggtgtgcacmactgcagccagccagcaaaagcagtttaaagtcaagtctactgggacagatgtggggcagaaggtgggccctttggacctgggatcagaaatgggcaagacatcctgtggtattgtgttttggaattcctcagggacaaagtggcagtgagtgatttggccgtgttgggagggattccaggcctgctcctaaccaccttcccaggtatgtg

SEQ ID NO: 270259 - DNA, 561 bp, Homo sapiens
cctttgtcgctaataagctggaagttactttgataacagcagggttagactcgagaataaaacacatttctttcactaccacacaccattaatatcgcagaaatgtggtcagaagaaatgcccagtgcaaggcgggcttagccagtggtcttccccagcagaatcctgggaagtcggaccccragtccccatttcagcaaacgccttccctccttccaaggccaggctctttctgaccgcgtcagaccgactatcaccttccagaaatgtcatctgaccaaaaaagaatactgatcgtgtttcattatttcctggcgtcagacactcccatctctgtggcctgtgggaaaggtgcaagccctgtaaacagcctcgatataataaagtccatgcatgcagcaacaaaaaacaattttatatgcagacaaggcccgatttcataagaaattacttatgcaggcgttctgcaattatcctgtgatactttcaggcaacagtctgacagcagttgtgcaaacaataaagggattacagaaataaaaacaaataatattacacaca

SEQ ID NO: 270260 - DNA, 593 bp, Homo sapiens
aagaacacagtaggccacccccatgggctatactcttgcagggaggtggcaggagaattcagagaaaggaaaaggtaaaattcagcatccattataatattacttgacatctagtaayctttttcttgggcagtagggttcttagcttacttagggagatatctttagtcctttctagaaaaattaatgctaaagaggagaggggctactctatcttgggatctttctgatgcaacttccttgggcctggaatccatcctaaacctcttaggtcaatatgtcttgtcttcaggaggttttctgtagagccctgtttcctaaaatcctaaactctccagtagctaagggtcacctcacgtgtttcagaaaataaataaaataaaaatagtctaaaagggccttacagatctgtgctcccagtttcaggcacccgcatatcaccttcctgatgctttttgctatagagttgtactgcaataaactaccttcacattttttcccatgtttttgtacccctgctaatatttttttaattaattcactattttttactttaatgcatttaaaaggaaactatatcattaccctaaatg

SEQ ID NO: 270261 - DNA, 593 bp, Homo sapiens
aagaacacagtaggccacccccatgggctatactcttgcagggaggtggcaggagaattcagagaaaggaaaaggtaaaattcagcatccattataatattacttgacatctagtaacctttttcttgggcagtagggttcttagcttacttagggagatatctttagtcctttctagaaaaattaatgctaaagaggagaggggctactctatcttgggatctttctgatgcaacttccttgggcctggaatccatcctaaacctcttaggtcaatatgtcttgtcttcaggaggttttctgtagagccctgtttcctaaaatcctaaactctccagtagctaagggtcmcctcacgtgtttcagaaaataaataaaataaaaatagtctaaaagggccttacagatctgtgctcccagtttcaggcacccgcatatcaccttcctgatgctttttgctatagagttgtactgcaataaactaccttcacattttttcccatgtttttgtacccctgctaatatttttttaattaattcactattttttactttaatgcatttaaaaggaaactatatcattaccctaaatg

SEQ ID NO: 270262 - DNA, 580 bp, Homo sapiens
aaataagatcatgaaaatatacttatatcaaaacaacccaagccaggcatggtggctcacacttgtactcccaacactaaggaaggccaagcggggaggattgcttgagcccaggagttcaagacgagcctaggcaacatagcaagagcttgtctctactaatagaaaaaaaaattgctgggcatagtgacatgtcacctatttgggaggctgaggtgggaggatcacttaattccaggagttcaaggctgcagtgagcaatgattgtgccactacaatccaacctgggcaatagagcaagaccctgtctaaaaacaaacaaaaawtccgacccccaaaacatgtccttgtgataaaacactagagacgttttcatcaaattaaaagcaaactaaagatgcaaagatgccccatcaccccaattcttaaatattgttatggaagttctaactaatgcaattagcaaagaaaattaaataagaactataaatattggaaataagaaaactttatccttttttttctaatggtatgtttgtatttagagaattccattaaatcttaaaacccagaaagtcga

SEQ ID NO: 270263 - DNA, 493 bp, Homo sapiens
cccgagggtggcagagatgcaaatatctgaagctatttaatgagcacccacgccttgccctgggttgcaggagcctggggaggccaacagggagacgtgcttcctgattttaaggaccccagggttggttcctatacacaggrcatgatgtaatcaatgagtctgatttcatattgtctgagaggtgagcgtggggcccggcagggggaaggtatattttggaagtctttcatagcttctgaacctctgtctgacagcttagagggtagaggtgagggcattcaataatttgttggtgggactatgtatctatttgtctgtgtgcattatttcttctttagtccacccactcatctatctatctgctcattgatccatgcatccatccatccatgtatccatccatccatccatccaacatccatctgacacctactaaatttcttgagtgaggtaacaaagaaaagtaagacacagatgcatatccactaac

SEQ ID NO: 270264 - DNA, 493 bp, Homo sapiens
cccgagggtggcagagatgcaaatatctgaagctatttaatgagcacccacgccttgccctgggttgcaggagcctggggaggccaacagggagacgtgcttcctgattttaaggaccccagggttggttcctatacacaggacatgatgtaatcaatgagtctgatttcatattgtctgagaggtgagcgtggggcccggcagggggaaggtatattttggaagtctttcatagcttctgaacctctgtctgacagcttagagggtagaggtgagggcattcaataatttgttggtgggactatgtatctatttgtctgtgtgcattatttcttctttagtccacccactcatctatctatctgctcattgatccatgcatccatccatccatstatccatccatccatccatccaacatccatctgacacctactaaatttcttgagtgaggtaacaaagaaaagtaagacacagatgcatatccactaac

SEQ ID NO: 270265 - DNA, 606 bp, Homo sapiens
tctcaaaaaaactcccagtcacctgatcctttttcgagtgaacagtgctcaaatatttgcatcgtctctttgggtggatgtttcagatccatctgtcctttagatgatgagtttcaggagggcagggtgtttgagattctctctgcagagccaggcaccgtgcctggtgtgcagtggagagtcagaagggcttactgaataaatkaatgaatgagtatttgcatgagcaagtacgagaatgctgaaagtagctagggagtcaacaggagagtggagtttgaaaaaggcacgttgaaggacttggaatccaaattagttcaaccagaatttgtaggtacttgtcacctgcaaagcattgggtttcagtcacatgtgggccccaggaggtcctggataagggtacagggtggtgaggcacgggctgtgaaatccaccatgagacagagtggggttagctctttatggagggtgtgaagggtgggggaggggattgggagtggctgtgtggaagaactgttctcttctaagttttctggggtgacattaaagtaaagttctagtgaccaaacttctcacctggctgtgcctccatgagtagagggcagg

SEQ ID NO: 270266 - DNA, 606 bp, Homo sapiens
tctcaaaaaaactcccagtcacctgatcctttttcgagtgaacagtgctcaaatatttgcatcgtctctttgggtggatgtttcagatccatctgtcctttagatgatgagtttcaggagggcagggtgtttgagattctctctgcagagccaggcaccgtgcctggtgtgcagtggagagtcagaagggcttactgaataaatgaatgaatgagtatttgcatgagcaagtacgagaatgctgaaagtagctagggagtcaacaggagagtggagtttgaaaaaggcacgttgaaggacttggaatccaaattagttcaaccagaatttgtaggtacttgtcacctgcaaagcattgggtttcagtcacatrtgggccccaggaggtcctggataagggtacagggtggtgaggcacgggctgtgaaatccaccatgagacagagtggggttagctctttatggagggtgtgaagggtgggggaggggattgggagtggctgtgtggaagaactgttctcttctaagttttctggggtgacattaaagtaaagttctagtgaccaaacttctcacctggctgtgcctccatgagtagagggcagg

SEQ ID NO: 270267 - DNA, 578 bp, Homo sapiens
ggtcaaaaatggttgttaattaaacaagtcatgaaaaatggcattgcaaggagattgtccggcagacaccagactttctaatgatatacctcagataggtatccattggtttgcactaaaatgaatagaaaaaaaaaacaactttcggagcatctcacacaatcgaaagtaaggktaacaaaagtatacccacattaacaacctcagttgaatcacatattctacttagattttaatggtaacatactatacttctccatttgaagatgcgatatcactttctgtcttagtgacttaaagtgatttacatggttgactccttcacaaataaaccagaaaagaaattaatattatatccggccatgctgctggctgccctgagtgtttatggctgtgtatcttaaatcaagcagagtaacaggcaaaaagatggctagttggtgagggcagggtcgagggctgaggtggataaagcacagaccccaaggagaggagggtgtggggtaccacttcttcctttctctatagttcttctcgagtgtacactcggttacctagggaaccagtgtgtagcaaga

SEQ ID NO: 270268 - DNA, 558 bp, Homo sapiens
tatcttaaatcaagcagagtaacaggcaaaaagatggctagttggtgagggcagggtcgagggctgaggtggataaagcacagaccccaaggagaggagggtgtggggtaccacttcttcctttctctatagttcttctcgagtgtacactcggttacctagggaaccagtgtgtagcaagaacgcttctcattggccatgagttgaggttcaatgtgggtgggactccgaggcataggtgaaacaggacacctgagcttggcttcttggagtggggctttctgaatgcatggggaaggactgtaccttggaagttaactccagtataaggaaggcaggaacattttccacctgaccactcattcggccttcactgcagggagggatgacattcacacmggggtcaaggccataaacatctggaaccaacaggtgccccaggccagcctgcatgtgtgaaagccattatgaatgctctacttacccaatctttgcagccagatacttggaacactgtctgcaaagcagaaagggcacatagatgcatttggagcccta

SEQ ID NO: 270269 - DNA, 509 bp, Homo sapiens
cctggcttggatgctgggcgctgaggatggccaagggcggcccgccagccctcctggcactgcctgctcaccctggaccatctcaagctgaagggcagcacacttccacctggcttgtgctgcagctgttgctagaccagcttcgcttgtcaatcaacagttctgctcatccgctccatgccacctgcccacaatccccaggccctggaagaccccggtagctggggctgggacaggggraggcctgcgaccaatagaacagagggagggcagggaccgagtcctctgagaggtggcctggaggttccggaagctgctctggcccagacctgtgaatgtttgctgccagcagccctgtggcaacactgctccatgtggttcttcttagggccctgtcaacactcatgcaggtcctgaactgcgtgcgcccacaggggcttcacctctagctctggggcaggtatctggtaagccccacacctctagctgggaggggctgggtctctatg

SEQ ID NO: 270270 - DNA, 542 bp, Homo sapiens
aatgcttacacacatgtccatagaagctttatttgatggatcaaaatggaaacaacagaaatatccatcaataggtgaatggacaaattgtgttatatccatataatggaatatcactcaattaataaaactgaatgatcctcatgaatcttataatcattatttttggtgacacaaaaggttgcacattgtatgagtccgtttatagaacattctgagaacaaacaaaaagccagggacagtggtgaggagaagaattgaagcaggtggcatgaggacactttttgcagtgstgtgaatattcatatcgcgattgtgttggtggttacagaactgtatatattagtcaaaggccatagtgctcttcatccaaaaaggtgactttttggtacaaaaaagtatatgcaagaaatctgggttttaaaaagagtctcaaaacaagtatatagagaaaatttaaagttttttgggggaaaaatgcaaacctgtgtttctggattaaaaaaaactcaaagatgctcattgttttagtccattttgtt

SEQ ID NO: 270271 - DNA, 609 bp, Homo sapiens
tggtctcactagaaatttctactaaacttttaaagaataattaacaattttacacagtgtttttcagaaaacaaaaaaggaggaagcacttctaaacccattttgatcccctaaaccgcacaaatatggtacaaaataagaaaaactatactctctagctctcatgaacttagttgcaaaaatcctcaacaaaatattagcaaatcaattcaccaacataaaaaattaactagacaacacaaccaagttagatttatttcagatatgcaagattaattcaatawtcaaaaattaatcaatgtaatccactgctatgatttggatatggtttatttgtccctaccataactcaagttgaaatttgatcccaaatgcagaggtgttggaaggtgggtcctagtgagaggggtttggatcctggggacagatccctcatgaatggcttggtgctattctcatggtagtgagtgagttctctgagactggattcattctcaaggaaatagattagctactgtgagagtgggttgttatacagccaagatgccctcaggctttgtcccttcacacatttccacttcctctttgaccttcaccatgttttaaccc

SEQ ID NO: 270272 - DNA, 556 bp, Homo sapiens
ccaggcacttcacaaatatttgttgagtgggtgtatgaacagaatggcagaagtctgagaaagaaaaaaaaaatagcctctggcagctggcagctgggagctggactggtgctcttggccatggtggtcttctattaaacatagacattttcaaccaacaccaacatcagaggttgctctgtgaccatgatggagtgagacaaaaacaagactctctctaatcatttctgagtacagaccaaaagaaaagcacagcgcaaaccacatcaaaaccaaacattctctcctctctgcaaatgtgggtgagtgaggttccttttttgatatttagccccacttcatttctcaggcttccagcatgcagatgaagacacsctggcatagaactgcccccgattcctgacagcactcaagccagagcacacctttgatgtgctcccaaataaccagctccaatatcaacctaacacaagttcaagccctgtaagatgtccccacaacacaatctgcctcagtttcccaccatttcccatggtgtgcaggctacaggtggtct

SEQ ID NO: 270273 - DNA, 470 bp, Homo sapiens
aaccttgtctgtaatgtttttaaattttatctatgtttattrtctgcctgatctgttacattctcagaggagaatgtcacattattgtcatatagtttttgtttgttgttgttgtttttattgttttttgagatggatcctgtcacccaggctggagtgcagtgccacgatcttggctcactgcaacctctgcctcctgggttcaagtgattctcctgcctcagcctcctgagtagctgggattacaggttcccaccatcacatcaggctaatttttttgtatttttgtagagacagggtttcgccatgtttgccaggctggtctcaaactcctgacctcaggtgatccacccgccttggtctcccaaagtgctaggattacaggcttgagccaccgtacccggcctgtcatgttgttttacttaatatatttttgtgccacattgcacaaggaagtaagagttcattaa

SEQ ID NO: 270274 - DNA, 521 bp, Homo sapiens
cacatgttcctgaaagtgttgtatctagatctacatcaattctacccaaattaaagcaaccacttgatgaaactgcagcaatttaaaaaactctcaaagagcatgtaatatgggaatacgaagttgacaagatgttattaaagacgaataaaattataccaatacctagacacctgatcccaacattaaacatgaaatacactaaaccagagttattttctggaggagtatttaaaatgatggggatgttattacttgggtcgcmatgaacctgaaaacccattttctacagaatatacagcagcagggaagcaaggggaccagcagacccctttttaagtacgcatgtgataagcaatgaacacgaactgcccagagcagtctccaacactgacacgattcgcttccccaccacgacgccctagcgctactgtgcaacgaagacctcccaagcactggttccaatgcggagaccatgggctcccagactctgggaactccaacacgactgcgaaacgaac

SEQ ID NO: 270275 - DNA, 521 bp, Homo sapiens
cacatgttcctgaaagtgttgtatctagatctacatcaattctacccaaattaaagcaaccacttgatgaaactgcagcaatttaaaaaactctcaaagagcatgtaatatgggaatacgaagttgacaagatgttattaaagacgaataaaattataccaatacctagacacctgatcccaacattaaacatgaaatacactaaaccagagttattttctggaggagtatttaaaatgatggggatgttattacttgggtcgcaatgaacctgaaaaccmattttctacagaatatacagcagcagggaagcaaggggaccagcagacccctttttaagtacgcatgtgataagcaatgaacacgaactgcccagagcagtctccaacactgacacgattcgcttccccaccacgacgccctagcgctactgtgcaacgaagacctcccaagcactggttccaatgcggagaccatgggctcccagactctgggaactccaacacgactgcgaaacgaac

SEQ ID NO: 270276 - DNA, 521 bp, Homo sapiens
atgcaggatgtgggcaaactcacactgccctgccaccattgccacagttaccatattaacagggcttttcccctgcacatgttcactaggacttaagctgtgacttgytgtggaaggattttccaccttcactgaatccccccgtttctcccttgagtgtattctcttatgtttaacaaggcaagacatatagaagtaagctttctcacactcatcacagccatagggtctctctcccgtgtgagttctgtgatgtacaatgagcattgtctttgtaaggaaggctttcccacagtcactgcatttatagggtttctctcctgagtgaattttctgatgtctaatgagtcctgacttctgtgaacagggttgcccacattcaggacatacaaagggagtctttcctgtatgatatctctgatgtgctacaaggcaagacttctggctgaaggccttgccacagtcaatgcatccataaggtttctctccagtgtgagttcgttgatgtatgttgagattgc

SEQ ID NO: 270277 - DNA, 521 bp, Homo sapiens
gcacaggtccctcccccagctcctcataggctgagtactatgctgtcacagtcttcccggatgttgcctattgattgttgggtagaggctctaggtgttttttttttttttgggttgtcttgctccattttgtcgcagcccacaatgcattgcaatcctagttagcttaggggctctttaagtatttgacttatgatctaagtagctgggcaggctgataagaacagacaaaatgagctatttcgcaagctagtaaactttcatcttaractgcacttttggctcaggtgaaggcaactaaggtgggaggaagcgggaggctgacaatcaggcattggctatggaagcaggggcctagtatatcctgttacttctgtagtttgctgaccgaagcctacttagggcactttggcttggaaatagatcactgtatacattatttccttcaccaaccccagaagatttcacataaaaattataatttctaaatttatttattttttttttggtaaaagagaaca

SEQ ID NO: 270278 - DNA, 539 bp, Homo sapiens
aagttcaagcaattctcctgtctcagcctgctgagtagctgggattacaggcgcccgccaccacacctggctaatttttgtatttttagtagagacagggtttcaccattttggccagtctgatcttgaactcctgagctcaagcggtccacctgcctcagcttcccaaagtgttaacatyacaggcatgagccaccatacccagcctgagatctttttaaaattatttaagtttttatttctaaagcaaagtaacttgacagtagagatctttattgaccgagttgtacattgagcctagccctagcccttttaaggggcactgtgtggaacagcctggggtccccagacctaaacttctcactcttcaccatccagttttcaagccggtgtgaagcccctgatgctaaccagcagttatgacaggccatggaggagcgggcacagctggaagcacacctggggcagtgaggctttgcagagggagggatgtggaaggaagatgaccccaggtggctaggagcaggagaggaccagtg

SEQ ID NO: 270279 - DNA, 588 bp, Homo sapiens
tctggtgcttggagacctcttccctaggaattagtgggtggagtctctatatacttgtgattcacagctaaatatgaaatttcccaatccaggaggagacagcaaagagctggggtaaagatgtgcagactggttgaaacacttagccaaacttaagcggcctggatgggaccatcactcccaaagctgtcagcagagaaasgccctctgtgtcaatcaattcaagcctggtattgctctgaaattgagtcctcatcccatgggggaaggtctctgggggcttttcattcctttatactagtgttctggatataacttcctgcttcccactttcttttttgatttctcagaagaccagtgtctccctctgaaccgtggccttctgtgcaccgagctcagtggctcttccccaccaaaactcctaagagaagtcatccctccccaaaaggatccccacaagatgttctggccctctgctgactgctccctcgaatcagcacctcaaggactgtttgagaatgctgtgctctccattggtcaccttcggactccgtttccctgctgccatgtgtattcttctcttctgcc

SEQ ID NO: 270280 - DNA, 588 bp, Homo sapiens
tctggtgcttggagacctcttccctaggaattagtgggtggagtctctatatacttgtgattcacagctaaatatgaaatttcccaatccaggaggagacagcaaagagctggggtaaagatgtgcagactggttgaaacacttagccaaacttaagcggcctggatgggaccatcactcccaaagctgtcagcagagaaacgccctctgtgtcaatcaattcaagcctggtattgctctgaaattgagtcctcatcccatgggggaaggtctctgggggcttttcattcctttatactagtgttctggatataacttcctgcttcccactttcttttttgatttctcagaagaccagtgtctccctctgaaccgtggccttctgtgcaccgagctcagtggctcttccccaccaaaactcctaagagaagtcatccctccccaaaaggatccccacragatgttctggccctctgctgactgctccctcgaatcagcacctcaaggactgtttgagaatgctgtgctctccattggtcaccttcggactccgtttccctgctgccatgtgtattcttctcttctgcc

SEQ ID NO: 270281 - DNA, 577 bp, Homo sapiens
tatccccatgtgacagatgaggacacagactcagaaaggccaagtgactccccgaaagccacacactggttagcagtggagccttgattcaaacccagaagggcaaacccaaagccccttcctctcacacctcatccctcctcacctcaaggccagtttactgagcagagaggaactcacgcttccagattcaccccatacatttaacctgctgcgcagcaaatgcctggactttgcctggcagaaaatgatcatgaaatccctgggatgggggcagcctgggccctcaagaaacatcccaacccacattcccattgcccttgttgaggaggtcagtcctgggaaatcctactcccttgttccttcccaggytccatctgagctaagtgcctccaggaagggcagggagccccatctccacacacagcacgggaagagggggtgtgacacaggcctacatcagaactctcaccagcctcagcccctgcagacccggtgggactgggctttgcttcttgttagactaagggaaagggggcttcaatgacagtctagctcactagaggcagaacaaact

SEQ ID NO: 270282 - DNA, 511 bp, Homo sapiens
tcacatcaggacatcaaggttggcctggtggcaagggtgtgacccttggacttgtgagcaagwggtggtggggtctaaggtagggggctctgcagggcaggacctgtgatccagtcctctcacctgagcatccacccacagttgcgacattagccgtggagcctggttatggagagcgtggtggagaataagttcggcagcatcctgcagatggacatgatggacatgctgggtgagggctgcaggcaggctcaggcagtgaagaagccggccagccctcatgtgcccctgcagagtgctctcctcactggccattctgcatacatggctgctggtcaaccagactgtggtgctgggcggtgaggtgaagctccgctgtgaggtgtgcagggacttagcatttggaggcgaacagcagcaaggtgggcaccaatgtcatgccctcctcaccatgctcaaggtgggtgctgctgccagctgggtgcaagtggtaggcaggctgtgggggggg

SEQ ID NO: 270283 - DNA, 568 bp, Homo sapiens
tacatctgtcaatttgtctatctcattctccatccagttctgcacccttgctggagaggcattgcaatcatttggagaagaagaggcacccttgccttttgggttctcagtgtttttgtcattgattctcatcttcatgagtttgtctagtttcgatctttgatggggttcttgtggggacttttttgttgctgttgttcatttctgtttgtttttctttcaatggtcagatccctcttctgtatggttgctgtggtttgctgggggttcacttcaggccctatttatctggttcactyctgaacctggagatattaaggagattggagaacagcaaagatgggtgcctgctccttcctctgggatctctgaccttaaggaacaccaatctgatgccagtaggaacacagctgtatagggtgtctgacaaccccagttggagtatctcacccagttgggtggcatgaggaacagaacccatttaatgaagcacttttattgtcccttggtggagggggtatgcttcactggggttaaactcactcctctgggctgcttggattcctca

SEQ ID NO: 270284 - DNA, 568 bp, Homo sapiens
tacatctgtcaatttgtctatctcattctccatccagttctgcacccttgctggagaggcattgcaatcatttggagaagaagaggcacccttgccttttgggttctcagtgtttttgtcattgattctcatcttcatgagtttgtctagtttcgatctttgatggggttcttgtggggacttttttgttgctgttgttcatttctgtttgtttttctttcaatggtcagatccctcttctgtatggttgctgtggtttgctgggggttcacttcaggccctatttatctggttcacttctgaaccyggagatattaaggagattggagaacagcaaagatgggtgcctgctccttcctctgggatctctgaccttaaggaacaccaatctgatgccagtaggaacacagctgtatagggtgtctgacaaccccagttggagtatctcacccagttgggtggcatgaggaacagaacccatttaatgaagcacttttattgtcccttggtggagggggtatgcttcactggggttaaactcactcctctgggctgcttggattcctca

SEQ ID NO: 270285 - DNA, 568 bp, Homo sapiens
tacatctgtcaatttgtctatctcattctccatccagttctgcacccttgctggagaggcattgcaatcatttggagaagaagaggcacccttgccttttgggttctcagtgtttttgtcattgattctcatcttcatgagtttgtctagtttcgatctttgatggggttcttgtggggacttttttgttgctgttgttcatttctgtttgtttttctttcaatggtcagatccctcttctgtatggttgctgtggtttgctgggggttcacttcaggccctatttatctggttcacttctgaacctggagatattaaggagattggagaacagcaaagatgggtgcctgctccttcctctgggatctctgaccttaaggaacaccaatctgatgccagtaggaacacagctgtatagggtgtctgacaaccccagttggagtatctcacccagttgggtggcaygaggaacagaacccatttaatgaagcacttttattgtcccttggtggagggggtatgcttcactggggttaaactcactcctctgggctgcttggattcctca

SEQ ID NO: 270286 - DNA, 495 bp, Homo sapiens
gagggaaccagcacaccctgttttaactgactgcccagtgagcctggtcagcagacattgggtaggccgtagggcttgtccacttgagctttccaggcaaaaaaaactgtcagagctggggattcgtgcttagtttggcaaggctcagtattagaggctgaagaacccttggcagaactgccagcccatccagttgcggcagtgccaccccacagcatagcaagaggctacaytggcaagccctgactcaccataggttgtaagaacagccagacgcccatggggtgctagtgatgctgggttcatctatgactgcagtactctggacattctgagctgctcatctggttccactagatccccaggccctctcccaactaggcggtttgaggtctaaggaaatgccatatcccctgggtatggagcttggaatcttacctcttcagccattctgctgacccctaaccctgcccttttagccctcaagggcctaca

SEQ ID NO: 270287 - DNA, 277 bp, Homo sapiens
caagagtgaaactccatctcaaaaaaaaaaaaattctttcaatcaatagacatgaaatgtttttaaatttattwttgtcttctccaatttttttttattgatgtatcttttatttgaaagatatttaagctccttggttaaatttgttctcagaaatttattattttagtgctattgtaaataagattgctttctgtctcttttttgtcagatagtttgtttaaagtgtatggaaccataacttacacttgtatgttaattttctattttgctaaat

SEQ ID NO: 270288 - DNA, 466 bp, Homo sapiens
agtttgggatgattgcagtgtaagttcagaattctcagtgggaccaagtttggtgggccattttctggtctgtagccaagaacaggggtcctrtagtttgccacctgaatgaaagcctgccttctgaagagaatattcctcaatcttgggcattagcagagtttcacagctccctccgtagatctcaaagctctttaagggcacttattttggagatgggttcttgctacataacccaggttgatcttgaagttctgtcctaaagcatttctcattacaggtttgagtcatgattcctgtttctctcataaaggcatttttgtcaggctgatgaattttcttgctgtcagaaaataagcaaataaggcaccatttatttttccatcttagtgatgtcactcttcctgtccatttttactttctactttctatttcaattttgtcagtagttttagatttagacatt

SEQ ID NO: 270289 - DNA, 466 bp, Homo sapiens
agtttgggatgattgcagtgtaagttcagaattctcagtgggaccaagtttggtgggccattttctggtctgtagccaagaacaggggtcctatagtttgccacctgaatgaaagcctgccttctgaagagaatattcctcaatcttgggcattagcagagtttcacarctccctccgtagatctcaaagctctttaagggcacttattttggagatgggttcttgctacataacccaggttgatcttgaagttctgtcctaaagcatttctcattacaggtttgagtcatgattcctgtttctctcataaaggcatttttgtcaggctgatgaattttcttgctgtcagaaaataagcaaataaggcaccatttatttttccatcttagtgatgtcactcttcctgtccatttttactttctactttctatttcaattttgtcagtagttttagatttagacatt

SEQ ID NO: 270290 - DNA, 466 bp, Homo sapiens
agtttgggatgattgcagtgtaagttcagaattctcagtgggaccaagtttggtgggccattttctggtctgtagccaagaacaggggtcctatagtttgccacctgaatgaaagcctgccttctgaagagaatattcctcaatcttgggcattagcagagtttcacagctccctccgtagatctcaaagctctttaagggcacttrttttggagatgggttcttgctacataacccaggttgatcttgaagttctgtcctaaagcatttctcattacaggtttgagtcatgattcctgtttctctcataaaggcatttttgtcaggctgatgaattttcttgctgtcagaaaataagcaaataaggcaccatttatttttccatcttagtgatgtcactcttcctgtccatttttactttctactttctatttcaattttgtcagtagttttagatttagacatt

SEQ ID NO: 270291 - DNA, 553 bp, Homo sapiens
tcacaccttactacacataagataattcatactggaaagaaaccctacaaatgtgaggagtgtgrcaaagcttttaaccaatctgcaaaccttactacacataagagaattcatactggagagaaaccctacaaatgtgaagaatgtggcagagcttttagccagtcctcaacccttactgcacataagataattcatgctggagagaaaccttacaaatgtgaagaatgtggcaaagcttttagccagtcctcaacccttactacacataagataattcatactggagagaaattctacaaatgtgaagaatgtggtaaggcctttagccagttatcccaccttactacacataagagaattcattctggagagaaaccctacaagtgtgaagaatgtggcaaagcttttaaacaatcctcaacccttactacacataagagaattcatgctggagagaaattctacaaatgtgaagtatgtagcaaagcctttagccggttctcacaccttactacacataagagaattcatactggagagaagccctaca

SEQ ID NO: 270292 - DNA, 553 bp, Homo sapiens
tcacaccttactacacataagataattcatactggaaagaaaccctacaaatgtgaggagtgtggcaaagcttttaaccartctgcaaaccttactacacataagagaattcatactggagagaaaccctacaaatgtgaagaatgtggcagagcttttagccagtcctcaacccttactgcacataagataattcatgctggagagaaaccttacaaatgtgaagaatgtggcaaagcttttagccagtcctcaacccttactacacataagataattcatactggagagaaattctacaaatgtgaagaatgtggtaaggcctttagccagttatcccaccttactacacataagagaattcattctggagagaaaccctacaagtgtgaagaatgtggcaaagcttttaaacaatcctcaacccttactacacataagagaattcatgctggagagaaattctacaaatgtgaagtatgtagcaaagcctttagccggttctcacaccttactacacataagagaattcatactggagagaagccctaca

SEQ ID NO: 270293 - DNA, 559 bp, Homo sapiens
tggaaagaaaccctacaaatgcgaagagtgtggaaaagcctttaaccggctctcacaccttactacacataagataattcatactggaaagaaaccctacaaatgtgaggagtgtggcaaagcttttaaccaatctgcaaaccttactacacataagagaattcatactggagagaaaccctacaaatgtgaagaatgtggcagagcttttagccagtcctcaacccttactgcacataagataattcatgctggagagaaaccttacaaatgtgaagaatgtggcaaagcttttagccagtcctcaacccttactacacataagataattcatactggagagaaattctacaaatgtgaagaatrtggtaaggcctttagccagttatcccaccttactacacataagagaattcattctggagagaaaccctacaagtgtgaagaatgtggcaaagcttttaaacaatcctcaacccttactacacataagagaattcatgctggagagaaattctacaaatgtgaagtatgtagcaaagcctttagccggttctca

SEQ ID NO: 270294 - DNA, 559 bp, Homo sapiens
tggaaagaaaccctacaaatgcgaagagtgtggaaaagcctttaaccggctctcacaccttactacacataagataattcatactggaaagaaaccctacaaatgtgaggagtgtggcaaagcttttaaccaatctgcaaaccttactacacataagagaattcatactggagagaaaccctacaaatgtgaagaatgtggcagagcttttagccagtcctcaacccttactgcacataagataattcatgctggagagaaaccttacaaatgtgaagaatgtggcaaagcttttagccagtcctcaacccttactacacataagataattcatactggagagaaattctacaaatgtgaagaatgtggtaaggcctttagccagttatcccaccttactacacataagagaattcattctggagagaaamcctacaagtgtgaagaatgtggcaaagcttttaaacaatcctcaacccttactacacataagagaattcatgctggagagaaattctacaaatgtgaagtatgtagcaaagcctttagccggttctca

SEQ ID NO: 270295 - DNA, 553 bp, Homo sapiens
tcacaccttactacacataagataattcatactggaaagaaaccctacaaatgtgaggagtgtggcaaagcttttaaccaatctgcaaaccttactacacataagagaattcatactggagagaaaccctacaaatgtgaagaatgtggcagagcttttagccagtcctcaacccttactgcacataagataattcatgctggagagaaaccttacaaatgtgaagaatgtggcaaagcttttagccagtcctcaacccttactacacataagataattcatactggagagaaattctacaaatgtgaagaatgtggtaaggcctttagccagttatcccaccttactacacataagagaattcattctggagagaaaccctacaagtrtgaagaatgtggcaaagcttttaaacaatcctcaacccttactacacataagagaattcatgctggagagaaattctacaaatgtgaagtatgtagcaaagcctttagccggttctcacaccttactacacataagagaattcatactggagagaagccctaca

SEQ ID NO: 270296 - DNA, 591 bp, Homo sapiens
gaattcatgctggagagaaattctacraatgtgaagtatgtagcaaagcctttagccggttctcacaccttactacacataagagaattcatactggagagaagccctacaaatgtgaagaatgtggcaaagcttttaacctatcgtcacaacttactacacataagataattcatactggagagaaaccctacaaatgtgaagaatgtggcaaagcttttaaccagtcctcaactctttctaaacataaggtaattcatactggagagaagccctacaaatatgaagaatgtggcaaagcttttaaccagtcctcacaccttactacacataagatgattcatactggagagaaaccctacaagtgtgaagaatgtggcaaagcctttaacaactcctctattcttaacagacataagatgattcatactggagagaaactctacaaacctgaaagttgtaacaatgcttgtgacaacattgcaaagatttccaaatataaaagaaattgtgctggtgagaaataatagaaatatgaatgtgacaaagcctttaaatggttatcacactggattgtaggtaaggtaattc

SEQ ID NO: 270297 - DNA, 591 bp, Homo sapiens
gaattcatgctggagagaaattctacaaatgtgaagtatgtagcaaagcctttagccggttctcacaccttactacacataagagaattcatactggagagaagccctacaaatgtgaagaatgtggcaaagcttttaacctatcrtcacaacttactacacataagataattcatactggagagaaaccctacaaatgtgaagaatgtggcaaagcttttaaccagtcctcaactctttctaaacataaggtaattcatactggagagaagccctacaaatatgaagaatgtggcaaagcttttaaccagtcctcacaccttactacacataagatgattcatactggagagaaaccctacaagtgtgaagaatgtggcaaagcctttaacaactcctctattcttaacagacataagatgattcatactggagagaaactctacaaacctgaaagttgtaacaatgcttgtgacaacattgcaaagatttccaaatataaaagaaattgtgctggtgagaaataatagaaatatgaatgtgacaaagcctttaaatggttatcacactggattgtaggtaaggtaattc

SEQ ID NO: 270298 - DNA, 591 bp, Homo sapiens
gaattcatgctggagagaaattctacaaatgtgaagtatgtagcaaagcctttagccggttctcacaccttactacacataagagaattcatactggagagaagccctacaaatgtgaagaatgtggcaaagcttttaacctatcgtcacaacttactacacataagataattcatactggagagaaaccctacaaatgtgaagaatgtggcaaagcttttaaccagtcctcaactctttctaaacataaggtaattcatactggagagaagccctacaaatrtgaagaatgtggcaaagcttttaaccagtcctcacaccttactacacataagatgattcatactggagagaaaccctacaagtgtgaagaatgtggcaaagcctttaacaactcctctattcttaacagacataagatgattcatactggagagaaactctacaaacctgaaagttgtaacaatgcttgtgacaacattgcaaagatttccaaatataaaagaaattgtgctggtgagaaataatagaaatatgaatgtgacaaagcctttaaatggttatcacactggattgtaggtaaggtaattc

SEQ ID NO: 270299 - DNA, 591 bp, Homo sapiens
gaattcatgctggagagaaattctacaaatgtgaagtatgtagcaaagcctttagccggttctcacaccttactacacataagagaattcatactggagagaagccctacaaatgtgaagaatgtggcaaagcttttaacctatcgtcacaacttactacacataagataattcatactggagagaaaccctacaaatgtgaagaatgtggcaaagcttttaaccagtcctcaactctttctaaacataaggtaattcatactggagagaagccctacaaatatgaagaatgtggcaaagcttttaaccagtcctcacaccttactacacataagatgattcatactggagagaaaccctacaagtgtgaagaatgyggcaaagcctttaacaactcctctattcttaacagacataagatgattcatactggagagaaactctacaaacctgaaagttgtaacaatgcttgtgacaacattgcaaagatttccaaatataaaagaaattgtgctggtgagaaataatagaaatatgaatgtgacaaagcctttaaatggttatcacactggattgtaggtaaggtaattc

SEQ ID NO: 270300 - DNA, 310 bp, Homo sapiens
catgtccacaggcgagaggattaaatcagttagtgttgtgctkctttctttgtaaaaagaaaaaatattgttagaaaaagagtcttactagattcttacccaaagtgtgacaaatacaaaatttcctagaaaatatagaaattagaattttagagagtttatggtaagtgaaccatattaaattattattttttaagacagagcctcactgtcacccaggctggagtacagtgtcacaatctgggctcactgcaacctacatcttccaggttcaagcagttctgcctcagcctcccaaatagcggggatt

SEQ ID NO: 270301 - DNA, 567 bp, Homo sapiens
gaggacgtggacgcgggcatagacatgaaagaggtcaagttaagcaaggattcgagarccagacaaggttaaaaaaaagatcaatgcgtgagatgcaaaaaaaaggacactaaaaaaaataaatgtccagaaggtaataaagagagtagtaaaggctgtggtataaaaaagtcaccagctaaaagctgtcacaccctaaaaaaaaaaaaaaaaaatactgatctaatccgggctggcaggggctaaaaaatataaagactagagacagactgagcaccttctcattaggcttccagaagcccacagtcacattacaagttaaaggcagcaggattctgccatatctggattccaatttctcactaatggctaagtcactatatgaagttacaaagtggggggaacccctcctctgggaaactaaacaggagaaagagccatgctttatgaaaacttgcttataaacttcataaaattgccccatgccagaggctatcggtacatgctagtgcttatttacaccttttcagggtgggttgaggctttccccaccaggacaaaaaaagc

SEQ ID NO: 270302 - DNA, 591 bp, Homo sapiens
atatgtatatgtatagttgtatgtgcatatggatgtatatgtatgtatgtatacatttagtatataccatgtcttaatcaattacacaatgttttgactctaccattctgcatgagaaaaccaagccatttctcacactcaaatttgaccatgcaaccacatgaatatgacagcactcgacatatcagacacattggaaaacattctgactttcccaaggtctcaggctatttatcaagctcaatacaaaaaagcatttcatgtacatgtgttttgaaacatttcagctgtttcatatcacatgctacttakaagtaggaaatgattgcagtatggttttaaaaatatggtacacaggtatttcttgtatttctataagtttcaaaagaaaatgacaattcaccaatttcttgctgaagacatgcgcataggcacacatggttttctcacctgcgcttatcatggtacctggttagtaagagtaaactctttagggctagtgagagaaggaagtaacatttcacaaattcgagaaagaaatgtaaagcaaaatagttaaaatagaggaatggaactagtaaagaaaacata

SEQ ID NO: 270303 - DNA, 622 bp, Homo sapiens
tttttgaaccgaaatttagagctgattcagaagagacaaatacagaacgtccaagttagcagtcrtttcccaaatttaggagacaatgatgcaggcccaggtgacttttggtttgttttattctttcctttattctccaatgtatttttaaagtcctgtaaaaatcagggtaattaatcagaaaagtataaattggaaatatcaggacctggagaaatctgggcaaagaaggatcagggatatattattcataggattcatactacatgattcatgttggaatttgtgactgtgtgggaccccgtaggttacatttgctgtaaacttgcctctagtatctctgacaagctatacaagagaaacatgataagttatatcaactgtgagaaagcagaccagtttcttgagggatgttaatgtttcatggcttataattctgaggctcaaatacatctttgatagttcttcacggaggtgttatggtaggtggtgttcttaactgtagccttctcataaatgcaaaagtagatttcttttagctgtttcttcattgtatttaatgttattaacgctgtctaataacatacacatatatatgaatttgtctgtgtgcatacatgtg

SEQ ID NO: 270304 - DNA, 592 bp, Homo sapiens
aaaagggtacatgctgtatgattccatttttataacatgctactaatgacaaaactaaagatgaaaagatttctgattgccaagggttagggctgaggagaggttgtgactataaacaaggagcatgagggagtttgcattgatgcaacattctgaatctcgattacggtggtggtgacatgaatcaatatatgtgttaagatttcttaaagctacatataaaaaacaaacaaaaatgcatgcatgttaaaactggtgatttccaaataaattctgtagttaacagtattgtaacaatttcactttcctgtatttggtaaygaactatgcttatgtaagttgttatctttggaagaagctgggttaagggcaagaactctggaatattttggtaagattttgtgaatctaaacttatttcaaaataaaaacttacaaaaacatcttatttatattaatttcataacacctgatgttacttataaacttaaacatattcaagtatggtcaattacacttatgaactgaatatactgtatccagtttcattctgaagtactttagttattctgaaataacacaaacttagaacc

SEQ ID NO: 270305 - DNA, 592 bp, Homo sapiens
aaaagggtacatgctgtatgattccatttttataacatgctactaatgacaaaactaaagatgaaaagatttctgattgccaagggttagggctgaggagaggttgtgactataaacaaggagcatgagggagtttgcattgatgcaacattctgaatctcgattacggtggtggtgacatgaatcaatatatgtgttaagatttcttaaagctacatataaaaaacaaacaaaaatgcatgcatgttaaaactggtgatttccaaataaattctgtagttaacagtattgtaacaatttcactttcctgtatttggtaatgaacyatgcttatgtaagttgttatctttggaagaagctgggttaagggcaagaactctggaatattttggtaagattttgtgaatctaaacttatttcaaaataaaaacttacaaaaacatcttatttatattaatttcataacacctgatgttacttataaacttaaacatattcaagtatggtcaattacacttatgaactgaatatactgtatccagtttcattctgaagtactttagttattctgaaataacacaaacttagaacc

SEQ ID NO: 270306 - DNA, 592 bp, Homo sapiens
aaaagggtacatgctgtatgattccatttttataacatgctactaatgacaaaactaaagatgaaaagatttctgattgccaagggttagggctgaggagaggttgtgactataaacaaggagcatgagggagtttgcattgatgcaacattctgaatctcgattacggtggtggtgacatgaatcaatatatgtgttaagatttcttaaagctacatataaaaaacaaacaaaaatgcatgcatgttaaaactggtgatttccaaataaattctgtagttaacagtattgtaacaatttcactttcctgtatttggtaatgaactatgcttatgtaagttgttatctttggaagaagctgggttaagggcaagaactctggaatattttggtaagattttgtgaatctaaacttatttcaaaataaaaacttacaaaaacatcttatttatattaatttcataacacctgatgttacttataaacttaaacatattcaagtatggtcaattacacttatgaaytgaatatactgtatccagtttcattctgaagtactttagttattctgaaataacacaaacttagaacc

SEQ ID NO: 270307 - DNA, 617 bp, Homo sapiens
gaggtgactctttagtgaaaaccctattttatttatttatttttttgtgagcaataaagctttttaatcacctgggtgcaggcggactgagtccgaaaaaggagtcagaaaagggtgataaggggagggcagttttatagcatttgggtaggtagtggaaaattacagytaaagggggttgaaaaccctattttagtataaaggaaactccatgtataaatatccctcatctcttacacattgggagagatgtgtaagattccttttatctcttacacataaaggaaattccatgtataaatatccttcatttcttacaaataaaacacaataatataaacacaccgaaaagtaaaagcaactgtacaaacaaggctagataattcacaatgtatatagatttggctgctttctaaataggtctttatacaatacacacatagtcaaatataaacaggtcactttttgcagggaaccccaaaatttggcaggataccagaccacagaaataaagagaaatatcagaccacacaggttgatcccaaatgacaaaggctgtattaatttattctacaaatgtttgctgaatgacatctatgtgtaagtcactatgctca

SEQ ID NO: 270308 - DNA, 617 bp, Homo sapiens
gaggtgactctttagtgaaaaccctattttatttatttatttttttgtgagcaataaagctttttaatcacctgggtgcaggcggactgagtccgaaaaaggagtcagaaaagggtgataaggggagggcagttttatagcatttgggtaggtagtggaaaattacagctaaagggggttgaaaaccctattttagtataaaggaaactccatgtataaatatccctcatctcttacacattgggagagatgtgtaagattccttttatctcttacacataaaggaaattccatgtataaatatccttcatttcttacaaataaaacacaataatataaacacacckaaaagtaaaagcaactgtacaaacaaggctagataattcacaatgtatatagatttggctgctttctaaataggtctttatacaatacacacatagtcaaatataaacaggtcactttttgcagggaaccccaaaatttggcaggataccagaccacagaaataaagagaaatatcagaccacacaggttgatcccaaatgacaaaggctgtattaatttattctacaaatgtttgctgaatgacatctatgtgtaagtcactatgctca

SEQ ID NO: 270309 - DNA, 461 bp, Homo sapiens
aggaatgtggctcagctatgtccagattggctgtttttgtttttgtttggagatagggtcttgctgtgttgcccaggctggagcgcagtggtgcgatcatagttcacggcagccttgacctcctgggctcaagggatcctcyctcctcagcctcccaagtagctgtgaccagaggcacaagccaacatacttggcaattttttttttttttttttttttttttagtagagtcagggtctcactatgttgcccagactggtctccaactcctgagctcaagggcttctcccactttggcttcccaaagtgccgggattacaagcgtgaaccatgcctggccagattgactggggtttttttgtgtgtggttttgtttttgtttttttatttgtttttgtttgagacacggtcttgctctgttgtccagactagagtgtggtggtgtgatcatggctcactgt

SEQ ID NO: 270310 - DNA, 535 bp, Homo sapiens
gccatcatatggattattaaagggcatagaacagtgctgggtacttactgggtgctcacaaaatgttaccagtttctctagtagtaagaatttattggccaggtgtagtggctcacacctgtaatcccagcactttgggaaaccgaggcaggcagatcccttgaggtcaggagttcgagaccagcctggccaacatggtgaaatcccatctctactaaaaaatacaaaaattagctggtgcacctgtaattccagctactcrggaggctgaggcaggagaatcacttgaacctaggaggtggaggttgcagtgagccaagatcacaccactgcactccagcctgggcaacagtgagactctgtctcaaaaaaaaaaaaaaaaagaatttattgagcaccaactgtgtgcccgccccatgctgaatattttacctgcattgagtacctggccctactgtgagatatcaggtgttgcccttatttgcaactgaggcacacaaaagggaaactgaggcacacaaaaggacttgagttt

SEQ ID NO: 270311 - DNA, 585 bp, Homo sapiens
gaggtcacagtggtcagagccctgggctgggggtcagaagaccaggctttccctggcctcactgcgcgaccctgggcaagtctcccccagtctctgggactctgttttcccctattgaataagagggcctgcggctctgaggttccagcatgcagtgaactctcattagcaatggtaaattaagaataggcatatgggccgggcatgctggctcacacctataatcccaacamtttgggaggctgaggcaggtggatcacctaaggtcaggagttcaagtccagcctggccaacatggtgaaaccccatctctactaaaaatacaaaaattatccgggcttggtggcacacacctgtaatcccagctacttgggagtctgaggcaggagaatcgcttgaatccaggaggtggaggttgtagtgagccgagattgcgctatagcattccagactgggtgacagagcgagactccatatcaaaaaaaaaaaaatggcacatggtactgggctggacggtagaggcttccacccgaggcccaggcacaccccccgtgtcagaccccattattggctgctggttgatga

SEQ ID NO: 270312 - DNA, 599 bp, Homo sapiens
cactttgtctgtgtcgggcatgagactgagaattttgcctttattattctagttaatccttccatttacactgtgagactgttgctaccacttcctctattttacagtggaggaaattgagtctcagaaaggttaaggaatttgctcaaagttgcagaactagtaagtagcagaaggcagtttacacccaggtctgtctacttttacaatttatttggcccagtgtcctgcctgtgccaccctctgccatgtgcccccttgtccagaggccctggagctcaggtcaggggctcattcaagcctgccgcgtggggctgggccagaacatccctcagcaaagccatctttacacaagctcaaagaggccccgacccagatcttgagcggatctgggatctccgtgtccccatggctttcctgacatcttgaggtttcagtatctggacatgagcaaaagtgtcatctctctacctgcctaaagggaaagtctccattcaactgaagaatcttctyttctctcttcacttgattataaagaacacacttctgttaacttcaatatttgccttagccccacactctatttaaaagccaaacat

SEQ ID NO: 270313 - DNA, 564 bp, Homo sapiens
tagttgacaacgataaggcaatatgagggaacttgggggaaaacactgaaacagacttggtgtgctggtggttacatttgtcagaactagtagaactatagaccaaaaaggataaattcaactgtatataaattaaaaataaataaaaaygatttgaaaaaaatactgagaatgaaagagagacagcatgacagattcagaagagatattttttaaccataagaaaaaacatgaatcactttatgccagaaagttagaaaatataattgatgtagacaatttttggtaaaaaatataaattatctaatattgtgactcaaaaaaaatgagaaatttgaatgaacaaagaacgattaaataaattatatatgttgccagccgaaaatctatttcttagatagacagcaagcccaataactttataggcaaatatttcctagattctaaacatactaccacatcatactaaaaatattttttaaaacacaatttcagaggacagaaaaaggaaaactatccaaatcatgttatggggctactataacctcattaccaaaaccagat

SEQ ID NO: 270314 - DNA, 623 bp, Homo sapiens
ttgccctttacatttttttcttcatttcaaccttggagaatctgatgattatgtgtcttggggttgatcttctcatggagtatctttctggggttctctgggtttcctgaatttgaatgttggcctgtcttgctaggttggggaagttctcctggatgatattgtgaagtgtgttttccaacttggttctgttctccccacctctttcaggcacttcaatcagttgtaggtttggtctttctacataatcccatagttcttggaggttttgttcattccttttcattcttttttctctaatcttgtctgctggtcttatttcagtgagatagtcttcaagctctgaaattctttcccccrcttggtcaattcggctattgatatttgtgattgtattgtcaagttcttatgttgtgtttctcagctccatcaggtcatttcggttcctctctaaactggttattctggttaacagctcctgtaatgttttctcatgtctcttagtgcagcaaagtttgttattatccaccttctgaagcctacttctgtcaattcatccatctcagcctctgccccattctgtgctcttgttggagagatgttgcaatcatttggaggagaag

SEQ ID NO: 270315 - DNA, 595 bp, Homo sapiens
ttcttatgttgtgtttctcagctccatcaggtcatttcggttcctctctaaactggttattctggttaacagctcctgtaatgttttctcatgtctcttagtgcagcaaagtttgttattatccaccttctgaagcctacttctgtcaattcatccatctcagcctctgccccattctgtgctcttgttggagagatgttgcaatcatttggaggagaagaggcactctggcgttctgagttttcagtgttctttcattgattctcatctttgtgagtttatgtagcttcaatctttgaggctgctggcctttggatggggttttcttgcagggacttttttggttgatgctgttgttgttgctttctgtttgtttgyttttgttttaacagtcaggccccgcttctgtagggcttctgtggtttgctgggggtccactccagaccctattcactggggtttctcccatacctggaggtgtcatcagtggaggctacagaacagcaaagatggctgcctgctccttcctctgggatctccatcctggaagggcaccaacctgatgccagcatgaacactcctgtatggtgacccc

SEQ ID NO: 270316 - DNA, 565 bp, Homo sapiens
tgagtttatgtagcttcaatctttgaggctgctggcctttggatggggttttcttgcagggacttttttggttgatgctgttgttgttgctttctgtttgtttgcttttgttttaacagtcaggccccgcttctgtagggcttctgtggtttgctgggggtccactccagaccctattcactggggtttctcccatacctggaggtgtcatcagtggaggctacagaacagcaaagatggctgcctgctccttcctctgggatctccatcctggaagggcaccaacctgatgccagcatgaacactcctgtatggtgacccctgttgtggggggtcttggtcagcaggcatgggatctgcttaatgaaacacttttgctaccccttggcagagggggtgtgctatgctgggggggatctcacttgtccagactgcccagattcctcagagccagcaggggaaaagactaagtctgctgatctgtgaagaccgcagacacccctccccygaggggctcagtcccagggagatcagagctctgtccctatacgcctggctgtagttg

SEQ ID NO: 270317 - DNA, 515 bp, Homo sapiens
atatgggctgggacttccatcggcatggagtatctgtttctatgctgtggaacggagtgcagaggggccactcctaccctgtgggcattgggatcacagtagggggctcccagcttaccagcctgcacagctcgccagggcagccactgctgcccatgtttctagaagtatggatggcttccctctgcctttggggtaatatgggccccagctgtagtctgtggcccttgttttctggccgtggcttagaagagagctgcagccctctccrctggggctgagatcctttgggcctggccaggtcccttgcccctgcaaacctgctggtggcctgggagctgcatctggggtcaggggtttgcaaacagtgctgctttttttttttttcaggtttgagaagagtaagtaaaatgaagacacatttgaggtctggctctacacacaaaaatggacaacaggctggtctggctcttgcagcctggctaagtggaggctcatttcataggctgacgctg

SEQ ID NO: 270318 - DNA, 574 bp, Homo sapiens
cgcagcgcgtagtcatagtcataggggcgagtcctaaggctcgccttgggtctctcctatctccttcccccgggagtccccagctagtgcgtttcggcacctctgcccctaccccggcccctacgcctcagctctgacctcaggttggggtggggcagcccggtggattcacgtgcctgcttccccggctaccagcctcccggaggcaccgccagaggattccctgggagccaaggagaaggaaacccagagggaaaacactctccagcagccaccctggtccaggcggccagcgcagcacagctcagaggggaggagctgcaggccctctccaaggctgtcctcgccagcgggtgcccsgggccagcccttcttgcctccagtgcctgcctttcagtttcctcgtctatggcccaggagtcactcccaccccctggctcactgtggctcatctatcaagcccttgttttctaaggtctcctgctgggggcaaagggaagaagggggtcctataggactttcctcctttccctcaagttcctctctaggggctccacagaggcagttgccagct

SEQ ID NO: 270319 - DNA, 574 bp, Homo sapiens
agaggtgagttcttgctctgttgcccaggttggtcttgaacccctgggctcaagccatcttcgtgtctcagccttctaagtagctgagactacaggcatgcrccaccatacccagctaatttttaaaatgttttttgtagagatggggtcttgctgttgcccaggctggtcttgaatgcctgggctcaagcgatccttctgcctcagccttccaagtagctaggactgcagccatgcaccactatacctggctaattttgtttaaaattttttgtagaggtgaggtcttgctgtgttgcccaggttggtcttgaacccctgggctcaagccatcttcctgtctcagccttctaagtagctaggactacaggcatgcgccaccatacccagctaatgttttatttttaatattttttgtagagatggggtcttgctgtgttgtgcaggctggtctcaaactcctggcctcaaacagtcctcctgcctctgcctcccaaagcactgggattataggagtgagccaccacactggctttctctgtgtctttaactcccagctgggcctgcccatagt

SEQ ID NO: 270320 - DNA, 585 bp, Homo sapiens
gaggtcacagtggtcagagccctgggctgggggtcagaagaccaggctttccctggcctcactgcrcgaccctgggcaagtctcccccagtctctgggactctgttttcccctattgaataagagggcctgcggctctgaggttccagcatgcagtgaactctcattagcaatggtaaattaagaataggcatatgggccgggcatgctggctcacacctataatcccaacaatttgggaggctgaggcaggtggatcacctaaggtcaggagttcaagtccagcctggccaacatggtgaaaccccatctctactaaaaatacaaaaattatccgggcttggtggcacacacctgtaatcccagctacttgggagtctgaggcaggagaatcgcttgaatccaggaggtggaggttgtagtgagccgagattgcgctatagcattccagactgggtgacagagcgagactccatatcaaaaaaaaaaaaatggcacatggtactgggctggacggtagaggcttccacccgaggcccaggcacaccccccgtgtcagaccccattattggctgctggttgatga

SEQ ID NO: 270321 - DNA, 560 bp, Homo sapiens
cctcgtgtctggctttaagctcttatttcaggaaggccctagacctgctttcatctcaggccagctcccagagtctgaggctgcacctgggcttagcaggagagtgtaccatgttgcgatgtctgctgagggcttgggggctgggggaggtggcaggattcgctacctctagagtggctttctgggtctccctgagtactggagggagctaacggcttcttgcactgtccctcgaaggccagcacagggctggctctatgcgcatgcaagtctgtgccagagttgatgggctctggraggcccaatgtccatgtgagaggcggtgtgctcggggagggggctgggacctggcagggtctcatttcagcccactcccagcttctgcccaggtggggttacctggaaaaaaagatgcatgctctgagcccttccagggcaggagctgtgctctggtcatcctcgtacctgcctagtcaccttgcctggcacatggcaggggtcagtgggtgctgggctgcaggaagctgaggccatttcacatcttctggtggggcctcagg

SEQ ID NO: 270322 - DNA, 521 bp, Homo sapiens
tcctcaaaaacaatgcctgtgggcyaggcgcagtggcttacactttgcttccctcacccatcacaggtggtgggttttttttttttttatctgttttgagacggagtttcgctcttgtcacccaggctggagtgcagtggtgcaatctccagtcactgcaacctccacctcctgggttcaagtgattctccagcctcagcttcccaagtagctgggatcacaggcacccaccactacgccacattttgtatttttagtagagatggggtttcaccatgttggccagggtggtgtcgaactcctgacctcagatgatccgcccgcctcaccctcccaaagtgctgggattacaggtgtgagccatcacacccagccaggtggtggttttctaaaaaaaaaaaaaaaaattagctttttttttttttaacaatatggttgtttattattattatcaagtattatacatagttacatatacatacataattgtatgtgctatacaattaggtttgtttatacca

SEQ ID NO: 270323 - DNA, 619 bp, Homo sapiens
aacagtgataacaccccaggctaccaagcgctcagagaaactcatccattcttggggggagaataatcagcccaggcttttcggaaggcaattggataacatttatcaaaaaaacacaaaaaaaytgtggctgggcgcggtggctcatacctgtaatcccagcactttgggaggccaaggtggtgggtcacctgaggtcaggagttcgagaccagcctggtcaacatggtgaaaccccatctctattaaaaagtacaataattagtcgggtgtggtggcgggtgcctgtaatcccaggtactcaggatgctgaggcaagagaatcgcttgaacccaggaaggtggaggttgcagtgagccgagatcatgccactgggctccagcctgggcaacagagcgagactccatctcaaaaaaaaagaaaaaaaaatgttgatccagtaattccacttgtgggaatttatccgtgacagcatgggtacaaagagattgtgaacaaggacgttcgttgccacactattggcaataaaaaattggagccagcgtggctgtcactcaacatgagaatggctgtgtaaattatagggtgtccatgcagcggaacagcttgcagccaatt

SEQ ID NO: 270324 - DNA, 619 bp, Homo sapiens
aacagtgataacaccccaggctaccaagcgctcagagaaactcatccattcttggggggagaataatcagcccaggcttttcggaaggcaattggataacatttatcaaaaaaacacaaaaaaactgtggctgggcgcggtggctcatrcctgtaatcccagcactttgggaggccaaggtggtgggtcacctgaggtcaggagttcgagaccagcctggtcaacatggtgaaaccccatctctattaaaaagtacaataattagtcgggtgtggtggcgggtgcctgtaatcccaggtactcaggatgctgaggcaagagaatcgcttgaacccaggaaggtggaggttgcagtgagccgagatcatgccactgggctccagcctgggcaacagagcgagactccatctcaaaaaaaaagaaaaaaaaatgttgatccagtaattccacttgtgggaatttatccgtgacagcatgggtacaaagagattgtgaacaaggacgttcgttgccacactattggcaataaaaaattggagccagcgtggctgtcactcaacatgagaatggctgtgtaaattatagggtgtccatgcagcggaacagcttgcagccaatt

SEQ ID NO: 270325 - DNA, 480 bp, Homo sapiens
gacttatgataggacatttgagcataaaaaagtcacattaggataaaactttatagagaaagtaaaatgtaggtggaacttcaaagatagcagggaacaatgcaaactcttaaaaaagagmtagttggtgtatttttaaatggctttggagggagacagagaagcaggggtctgggagccactgggatgtctttgacccagatccttcccatcgtcatcacctcatggccaggctcacagctaagcagagcccctatctggacctcagtggcaggtgtggttttgtccccagcaacaccaggcagggttactggagttcaaggccaaggctgagtgggctcttgatgtctgcattgcccaccagccccatgccagaggaacaggcttgttttcagtgtggcacttgccccctgggctgttctcagagtcctcctggtttacccccagtcaaggagggatcctgggcttaaccccaccctc

SEQ ID NO: 270326 - DNA, 550 bp, Homo sapiens
ggcagttctcgatattcacgatcacggctttgaagtcccggtcaacctgcccctctctgtccccggcattcattgacacgggctttccctggcctgggatcccatcccaacacacacgacagaaaacagtgcaaaataataacacaaatgccaaatgtacacagtgtacaactctgaactgagaaagtgcaaggagaccacgggaatggaagtgggtaggggtcgggaggatgggcaccaggctggtgtcctgacagccacacctgggtgcaggccacgtgtcctcacggccaaggtaaccgggtgtctcaggcacttaataaatattaagggtgaccrgtgactcaggctctgcctctgggaagtggcatcatttggtgaatgagtttggtctcggtgccaccacggattcagccagatcatttccgacgccatgaatccctttcctggcttaaggaaggtacaaacccacctcgaaagacactgggtgggtcatgattcgggggtgacagggcaaaggctaacctggctgtctagcaaggcttgcata

SEQ ID NO: 270327 - DNA, 601 bp, Homo sapiens
gaacccaccatgtcctacctcccagtctgagtgtttttcacagtgtggaacttggagggttgaggcatgcccctggggacaacattctctcctttgttctcttcaagccttggcctgcaggaaggcttagcttggtgctattgcgtctttaacacctttgtaacacgtgtcaatttcctggagctgtccagaggctgcaacagcatcagactagaatgttctgttcttggcttggctgcacacagtggctcacacctataatcccagcactttgggagggggaggtgggagggtcatttaagcccaggagttcgagaccaggctgggtaacacagggagagcctgtctctacaaaaaatttaaaaattagccakgtgtagtggtctgtgcctttcgtcccagctacctgggtagctgagctgggaggatcacttgagccccaagaggttgagactgcagtgagctgtgattgtgccattgcactccagcctgggtaacagagtgaggccctgtcttggaaaaaaaaaaaaaagaattttataattttctgttcctgttgtatcgacttgtaggatcatcttttgtttctggctaggcaacc

SEQ ID NO: 270328 - DNA, 601 bp, Homo sapiens
gaacccaccatgtcctacctcccagtctgagtgtttttcacagtgtggaacttggagggttgaggcatgcccctggggacaacattctctcctttgttctcttcaagccttggcctgcaggaaggcttagcttggtgctattgcgtctttaacacctttgtaacacgtgtcaatttcctggagctgtccagaggctgcaacagcatcagactagaatgttctgttcttggcttggctgcacacagtggctcacacctataatcccagcactttgggagggggaggtgggagggtcatttaagcccaggagttcgagaccaggctgggtaacacagggagagcctgtctctacaaaaaatttaaaaattagccaggtgtagtggtctgtgcctttcgtcccagctacctgggtagctgagctgggaggatcacttgagccccaagaggttgagactgcagtgagctgtgattgtgccattgcactccagcctgggtaacagagtgaggccctgtcttggaaaaaaaaaaaaaagaattttataattttctgttcytgttgtatcgacttgtaggatcatcttttgtttctggctaggcaacc

SEQ ID NO: 270329 - DNA, 599 bp, Homo sapiens
catctctctgagcttcacttttttttttaatcaaaaaaatgggcatcataattccttccccatagtcattgtgtgagaattaaatgagataatgtgaatcaatggcttggtataaagtaggtgcttagtaaatgttagtattttttcattccactaggaagagtatgtggtctttggacagtgtcctccccactttctgaggctcagtttccttgtttgtaaaaaaaggatgacaatctcttactttctgagagatgctttaaggataaaatgatgcagcactgccctggcacatagttgatgctcagagaatatttgttgagtaaatgaatcaaataaccaatrccttgcttcattaattcattcattcatcaaatattcattgtgcacctactacgtgcctggcaccatgatattgctgctgagaacagggtggtgaacaacagacagtcacagttctgtgaagtttatagtctaagtggggacataaggaataagggagataattaatgcaaaacttgcaacacatagtaggtcctcagtaacaagctaatgacttcgttactctaggcattataggggcacgttccagttggata

SEQ ID NO: 270330 - DNA, 521 bp, Homo sapiens
gcagtggcatgatctcggctcactgcaacctctgcctcctgggtttaagtgattctcctgcctcagcctctggagtagctgggattacaggcgtgcaccaccatacccagctaatttttttttttttttttttttgtatttttagtagagacagggtttcaccatgttagccaggctggtctcaaactcctgacctcaggtgatccgcctgcctcagcctcccaaagtgctgggattagaggtgtgagccaccacacccggccaagatgttacttcttgactattacattgataaaggctttttaaaaacatataaggccttcagtgtgtaatgctgtccaccttcatacggagcagatakgcatgtggatatttataaaattcttcttcaaagtaattttgcagtatatatcaaaaacttcaaactataccaatgacttattttgaggacactatattcagttgataatcaggtatatgtaacataattacatgagacttccattgcatttgttatgcta

SEQ ID NO: 270331 - DNA, 547 bp, Homo sapiens
attttgccacaattttatgaaaaaggcctcagggggaaaagaaaattccttagaatgccaccccagcttcgttctgggatttcagtgtcttcagtcagatctgaagtgtgcagaagctgttagggcgggagcagccggggcgcagtcccaccgccggtcactagagggcggcagagaccagtgggccctgcccgacctctggctaaggccccaggcacgcatgcgctctcccaccccagccttcggcgcgaggcccctgcagagattcaggctaacctcggtctccaaggcaacggcttggcgaggcgaccctaggargtgcgcagcagaggggcaggggggcggcctgcggccaggggaagcagtgcgcatgcgtgggaaaacaggttccaccccttccccaacatttaagcccccctaagattggggccttggggactgtccccactgacctcgtggatgccaaagtgtgcgtaggagtcaaagtagtaatctttggatgtcatgtcctcagcgttgggcttctcactgctttccgcctggccac

SEQ ID NO: 270332 - DNA, 584 bp, Homo sapiens
caggttcaagcgattctcatgcttcagcctcccgaatagctgggattacagacatgcgccaccacccacgactaatttttgtatttttggtagagacgggatttcaccatattggccaggctggtctcaaactcttgtcctcaggtgatctgcccacctcagcctcccaaagtgctgggattacaggcaygagccactgcacccggcctgaccagttttagctggcatgatattgaaaccccctctgctttaacctttacaggggaagtaactttgaaatggccaaggcactttctgctctctgtgtctgttttcctcagcccttttctgtctgtaaaaccaccctgctctgctcagctcctctactcattctattttgtagaataaagtgctgcttgattctagaatcacaaataaaataaattaaggtctttaaagtaaatgtgttgtaatttcgttttttgacatctttgtatctgcaggttgggctgctccctaaatattttagaggttaaccagccatagcaggcactttaggcaaatggaaaccattgtttgaacaacatttgcagaaaggaacaaag

SEQ ID NO: 270333 - DNA, 429 bp, Homo sapiens
gggattattatccataaaccgtcactttcctgcttttcttcttagatgatttgttttttaaatagttcattaagtatcttggttgaaagatttttttttttttgagacggagtctcactctgtcacccaggctggagtgcagtggcgtgatctcggctcacggaaacytccacttcccaggttcaagcgatttttttgcatcagcctccgagtagctgggattgcaggcatgtgccaccacgcccggttaatttttgtattttcaggagagatggggtttcaccattttggccaggctggtcttgaactcctgacctcgtgtgatccactggcctcctaaggtgctggggttacaggcgtgagccacacgcccagctgaaaggtttatagatataatttttagtattgaattaggctaggagttaatta

SEQ ID NO: 270334 - DNA, 497 bp, Homo sapiens
cctctggcctcagcttccagagtagctgggaccacaggggtgtgccaccatgcccggataatttttgtttttttttgtagagatgagrtctttctatgttgcccaggcctcaagcgatccaaccacctcggaccccaaaagtgctgggactacaggcatgagccatggcgcctggcccaggataaaatacttccatggcttagaaacagaggtctccagaaccttggccaggctgtgctgtttatgagaaaatcattcccttgctgaaggcaacatgtgtattgctgggattccagctgggcatttggcttaggaaccaaggggacgttccacggtgggtccttgacccgacgtcttatctggcagctgacgttgtaactgcttcttctcagggaccgtggctattcagttagaaatgtcattcccttctgaccccattttctatttggatttggtccaaattcctcatgcaggaccgggagctgaaagcctccttg

SEQ ID NO: 270335 - DNA, 497 bp, Homo sapiens
cctctggcctcagcttccagagtagctgggaccacaggggtgtgccaccatgcccggataatttttgtttttttttgtagagatgaggtctttctatgttgcccaggcctcaagcgatccaaccacctcggaccccaaaagtgctgggactacaggcatgagccatggcgcctggcccaggataaaatacttccatggcttagaaacagaggtctccagaaccttggccaggctgtgctgtttatgagaaaatcattcccttgctgaaggcaacatgtgtattgctgggattccagctgggcatttggcttaggaaccaaggggacgttccacggtgggtccttgacccgacgtcttatctggcagctgacgttgtaactgcttcttctcagggaccgtggctattcagttagaaatgtcattcycttctgaccccattttctatttggatttggtccaaattcctcatgcaggaccgggagctgaaagcctccttg

SEQ ID NO: 270336 - DNA, 461 bp, Homo sapiens
tcatcccgtctaatgtctattattttttgatttttgattacggccattcttgcaggagtaaagcagtagcacattgtgcttttgatttacatttctctgatcattagtgatgttgagcattttttcatatgtttgttgcttatttgtatatcttcttttgagaattgttttttcatgtccttagccccctttttgatgggattgtttgtttttttacttgctagtttgtctaaattagttgtagattcttgatattcgtcctytgttagatgtacagattgtgaatattttctcccactctgtgggttgtctgtttactctgctgactgtttcttttaccatacaaaaactccttagtttaattaagtacaacctagttatctgtgtttttattgcattggtttttgggttcttggtcataaaatctttccttaagccaatgtctagaagggtttttctga

SEQ ID NO: 270337 - DNA, 553 bp, Homo sapiens
agttcagatagagcttactgtggatattaatcatcaaagtagcagggtttgctggctcatgcctataaycccatcactttggtaggcaaagataggaaaataacttgaggccaggagtttgagagcagcctgggcaaaatagtgagacattgcctttacaaaaactttaagtaacagacaagcatagtggcgagcatctttcattacggctactcagaggccaaggtgtgagaatcccagcagcacagaagttcgagactttagtgagctatggatgcaccactgcacatcagcgtgggtgacagaggaagatcatgtctcaaaaagaaagacaaaatatccacttgtgggttctctctatctacttccttaacccacactcttcatttgtctaagtgctggggctgtgctttcaacaacttttacaacttctgggaacgaagtccgtggcccttgatgactgtgatgcatgttcatcccacacacaggggtttcctgttcttttgttatttccctctctcgttcaacaagtgttgcttcttactggaatgga

SEQ ID NO: 270338 - DNA, 575 bp, Homo sapiens
taggtggggtctgcacacagtgaccatcatctcctccctgtcatcctcaggtctcttcctgtcccccacccaagcctgcccttcccattctagttcaggagggtatgcaaatcctgactctctgaggaataacattagagactgtggtttcagagactgaatcaccccaaaccgggaaggaacaagtgtagcctcagttcagatagagcttactgtggatattaatcatcaaagtagcagggtttgctggctcatgcctataatcccatcactttggtaggcaaagatrggaaaataacttgaggccaggagtttgagagcagcctgggcaaaatagtgagacattgcctttacaaaaactttaagtaacagacaagcatagtggcgagcatctttcattacggctactcagaggccaaggtgtgagaatcccagcagcacagaagttcgagactttagtgagctatggatgcaccactgcacatcagcgtgggtgacagaggaagatcatgtctcaaaaagaaagacaaaatatccacttgtgggttctctctatctacttccttaacccacac

SEQ ID NO: 270339 - DNA, 575 bp, Homo sapiens
taggtggggtctgcacacagtgaccatcatctcctccctgtcatcctcaggtctcttcctgtcccccacccaagcctgcccttcccattctagttcaggagggtatgcaaatcctgactctctgaggaataacattagagactgtggtttcagagactgaatcaccccaaaccgggaaggaacaagtgtagcctcagttcagatagagcttactgtggatattaatcatcaaagtagcagggtttgctggctcatgcctataatcccatcactttggtaggcaaagataggaaaataacttgaggccaggagtttgagagcagcctgggcaaaatagtgagacattgcctttacaaaaactttaagtaacagacaagcatartggcgagcatctttcattacggctactcagaggccaaggtgtgagaatcccagcagcacagaagttcgagactttagtgagctatggatgcaccactgcacatcagcgtgggtgacagaggaagatcatgtctcaaaaagaaagacaaaatatccacttgtgggttctctctatctacttccttaacccacac

SEQ ID NO: 270340 - DNA, 604 bp, Homo sapiens
aagagtttaaataatcttccttgtacatgggaaattaaattaggcagcgatcaagtaatggatctatgattgcactgccagtaagaggcacaatcaggactggagtccaggaagcctggcttctgaatccttgctcctcatgtctttaggaatatggagttctgactgcgatagggtgaaagaggtaagtcctcacagtttgcctgttgatctctaaccttctgcatcatgggaatgtgtcacaaagctggaggcygcacctggcctggcccctctcacccactctcaatctcctagcaagtgccacacacaaggcctgtgtccttgtccattggttcttgcatgacaatcagagggacatcgatcatccctttcaagtgagtactccatggtccatggcacaggggtggaaaagaaaggagaatatttactcaggacgtggtctcatgtgggtaatgtggaaatgtgtagttggcaggatggaggtagcatgccactgtagatcctggggaccctccagcaccaggcatgaaacctgcagtggctaaactctgggctagtcatggggcctaggggaagaggacactcaaaggttggggctgtg

SEQ ID NO: 270341 - DNA, 604 bp, Homo sapiens
aagagtttaaataatcttccttgtacatgggaaattaaattaggcagcgatcaagtaatggatctatgattgcactgccagtaagaggcacaatcaggactggagtccaggaagcctggcttctgaatccttgctcctcatgtctttaggaatatggagttctgactgcgatagggtgaaagaggtaagtcctcacagtttgcctgttgatctctaaccttctgcatcatgggaatgtgtcacaaagctggaggccgcacctggcctggcccctctcacccactctcaatctcctagcaagtgccacacacaaggcctgtgtccttgtccattggttcttgcatgacaatcagagggacatcratcatccctttcaagtgagtactccatggtccatggcacaggggtggaaaagaaaggagaatatttactcaggacgtggtctcatgtgggtaatgtggaaatgtgtagttggcaggatggaggtagcatgccactgtagatcctggggaccctccagcaccaggcatgaaacctgcagtggctaaactctgggctagtcatggggcctaggggaagaggacactcaaaggttggggctgtg

SEQ ID NO: 270342 - DNA, 599 bp, Homo sapiens
gtgatgattcttcaaacagctaaaatagaactaccatttaacccatgtatcccatcactgggtatataccgagaagaatataaatcattctaccataaaaacatgtgcatgtgaatgtttattaccacagtattcacaatggcaaaaacatggaatcaacctcaatgcccatggaggacagactggatagagaaaatgtggtacatatacaccatagtattctatgcagcctcaaaaaagaatgagattatgtcttttgcagaaacatggatggagctgtagaccattttccttagcaaacaaatgtggaaacaaaaaatgaaatgctgcatgttctcacttagaagtgtgagctaaatgatgaggctcatggacaccaagaggggaacaacacrcaccggggcctacttgagagtggagggtgaaagatgggacaggagctgaaaaaatgactattgggttctaggcttagcaactggatgattaaatgatctgtaccacaaacgcccatgacacgagttttcctgcacatgtacccctgaatgtaaaataaaagtttaaaaaacaaagaaaaaaataatctcatctttcttctggaa

SEQ ID NO: 270343 - DNA, 583 bp, Homo sapiens
cattctagtggggaggcagattgctgtcaacataagaattaagtacattttaatgttaggtggtgatgataaatgtcatggaaaaagtcgagcaaggtagggaggatggggtagttggaggtggggtstggattgcaacagcagtggtcagggaggatctcacagagaaggcaacttttgagcagagacatgaaggaggggagtgagccatggggacaccaggggagtgttcaggcagagggaacagctagtgcaaagctcctatggatgaagcagaccagacttggtagagcagctaggaggccagtgtggctggagcagagtggccaagggggagggtaagcgatgggtgccagattgtgtgggctgtggggaggacttcggactttgacttttatgtgacctgactcaggtctcataacaggcttcctttggttgtctcgtgggggagtggagaaaggagagactgaaggcaggggctagagcagagactggggctggggctgctatgaagatgcaaatggcagacgatgttggctaggaccagggtgggggtcatggtgggggcaggtggatagtggat

SEQ ID NO: 270344 - DNA, 567 bp, Homo sapiens
agtattgatgtttcatcagtctcaattttataaaaccatcctttactttgtaataaagcaatgctgagagacattttccataatgcagggggaaaaatgtggatcaatcacaaactcaaagaacgttacagttataatgctttcgacatttttttctacttctgtgatgctttttcaagataagcttccccctccccctttttttcccctccacctgtgcactgtcttatcgcgatatactcttgacttctgaaaatcaagttgcaggattggtatgactggaatgcagaggttctcttgaagtagtgtcaccacataactattctctattgataaacttatcgcaaccaagttcttctatcagagggttgataacttcagaggcagtcagagctatcgtaaaggttaaaatatcgaggtccaccctgtgaggatttcgctgatattcggcatcaaacgctgcttcccttgctctgcaggcttccacgaatcgcctgcggcgttcttcaagytcttgtattctgccgggagcaatcgggtaattttccagatagtggcggagaaact

SEQ ID NO: 270345 - DNA, 595 bp, Homo sapiens
atattattttgaacaactgataggcatatgaaatctgaacaaaatgttaacctttggctttacccatttgaaaagatcaggaaggttggaaatattatttattactaaagctataaaacagtcaattttcagatgttaatttataatatttaaaatgcatacaattttgagccagttatttcatttctttgtaattattctttaatacaactactgggaatttgatttwaaaaagttgattagaaagcttaatacagcatcatttgtgagagcaaaatactggaaacagcctaaatgtccatcaaaagagtcaaattcaataatttttgataaccattctacaggaatattatgcagtgtttaaaaactgaggcagcaccatgaatagatgactttgcaaaatacagtgtttgacaaccagtccagtccaattcctaaagtacatttgttcagaaagaaaagaaaacatagatctgtatatttctgtaaacagattatctccataatttgagtagagaagccagtaatattattgtactggggaataaaattggggctcaatactgagggaaagactaaattttgggctcactga

SEQ ID NO: 270346 - DNA, 565 bp, Homo sapiens
gcccctgggatactcacctggtactcattgtccagctctgagatgtgcaggtcaaattgtttgccatccttaaagggcayaccttcagattttccttaatgcttccaggctccacacacatgctgttcatgaccacccaattgccaaagtacactccaaagtggaaggcaatgtctgacttcttatctatcccggtgtggaaatcaacctgcagctgtgggtccttgctgaggtcaaagcacacagcatgttggacaggtcccttctgtatagggcacacacaggacacacacacaaatctcttcccacctttcccaggacagacagaagccttcccggtgacactgcaggcctcatccctgcaggactgcttcagcttcttgttccctcatgcagggatatgctctgcccctcatccccagatggaaactgagccacagtcactgacctgaggctatgagttgtctattctctgagaactctatactccttgatagaagtgtcagtggcagatagagatcctcttggaaactttggcaggtccctataggtgagtcatagcaca

SEQ ID NO: 270347 - DNA, 578 bp, Homo sapiens
agtgtgatgctcctgttttctctttataccttgaagtctcaagacagtagccgtcacatacaaaaattacggaaaaaaggatcccaggactcccagggcccaatattagataacagagtgttggccatgaaccaacctcaaagatttccactgagtagaggacagacaccctcatttcctcacctctctcctgtctcatgttctaggaaacccttcaaatagttggccttcacccactgaaccaagctccaaaaccggtgagtacagaaccctcttatatccgcttttggaaacctggggaggtggaaaccttggattcaggcgttgactcagcatctcacagctctgacattgtacgcctgtcttctaccatctccaaactccagatactccaacagcgaaagggatctggacccaaaacagggctctgtgaaatctcttaatctctcattttatggagctgagatctcctacaagctagaaaaatgattggcaatytgacatccttctcaggaaaaatgcaatgtttgttctgcctgcattcctaactggaggataaattcctgggggcttgagag

SEQ ID NO: 270348 - DNA, 558 bp, Homo sapiens
ggacacatatcaacatatcatctttcataatataaatatacagtcggtcctccatatctgtggggtttacaggtgtttattgaaccaacaataaatcaaaaatattttcagaaaaaaatccccgaagtttcaagaagcaaaaaactatgttgaatcgacacaaattgagtggcgtgtaggctgtgtcaggaattataagtaatcaagrgatgatttcatgtatacaggaggatgtgcatgggttctatgcaattgctatgctattttttttttttttttgagacagtctcactctctcacccaggctggagtgcagtggcatgatctcagctcactgcaacctccgcctcccaggttcaagcgattgtcttccctcagcctccccagtagcctcccctaggattacaggcacgtgccaccatgcacagataaatttttttgtgtgtgtatttttagtagagacggggtttcagaatgttggaccagctggtcttgaactcctgacctcgtgatctacccaactcagcctcccaaagtgctgggattacaggcgtgagc

SEQ ID NO: 270349 - DNA, 558 bp, Homo sapiens
ggacacatatcaacatatcatctttcataatataaatatacagtcggtcctccatatctgtggggtttacaggtgtttattgaaccaacaataaatcaaaaatattttcagaaaaaaatccccgaagtttcaagaagcaaaaaactatgttgaatcgacacaaattgagtggcgtgtaggctgtgtcaggaattataagtaatcaagggatgatttcatgtatacaggaggatgtgcatgggttctatgcaattrctatgctattttttttttttttttgagacagtctcactctctcacccaggctggagtgcagtggcatgatctcagctcactgcaacctccgcctcccaggttcaagcgattgtcttccctcagcctccccagtagcctcccctaggattacaggcacgtgccaccatgcacagataaatttttttgtgtgtgtatttttagtagagacggggtttcagaatgttggaccagctggtcttgaactcctgacctcgtgatctacccaactcagcctcccaaagtgctgggattacaggcgtgagc

SEQ ID NO: 270350 - DNA, 558 bp, Homo sapiens
ggacacatatcaacatatcatctttcataatataaatatacagtcggtcctccatatctgtggggtttacaggtgtttattgaaccaacaataaatcaaaaatattttcagaaaaaaatccccgaagtttcaagaagcaaaaaactatgttgaatcgacacaaattgagtggcgtgtaggctgtgtcaggaattataagtaatcaagggatgatttcatgtatacaggaggatgtgcatgggttctatgcaattgctatgctattttttttttttttttgagacagtctcactctctcacccaggctggagtgcagtggcatgatctcagctcactgcaacctccgcctcccaggttcaagcgattgtcttccctcagcctccccagtagcctcccctaggattacaggcacgtgccaccatgcacagataaatttttttgtgtgtgtatttttagtagagayggggtttcagaatgttggaccagctggtcttgaactcctgacctcgtgatctacccaactcagcctcccaaagtgctgggattacaggcgtgagc

SEQ ID NO: 270351 - DNA, 578 bp, Homo sapiens
ggggaaatgggcgctgtggtgggaagaatmactgtcgccaatgatggctacattgtaaaccctggagcctgtgactatttatgttatagggcaggggactgaaggggaaggtggagctcaggttgttgatgagttgaccttgagatggggagacagcctggactgtcctgctgggctcagtgtaatcacaagggtccgcgtgagaggtggaggaagaggggagtggggattagagcagtgtagtgggagggagacgctatcagccactgtgggctttgaaggtggaggaaggccactagtcacagaatgcaggtggcctctaagggctggagaagtcaagagaactgatttgctgagtctccagagggaacgcagccctgcagatgccttgatttcagcacagggagaactggatccaatttctgtccccagaagtggaaggggtcagtgtgttctctcctgctgccatgtttgtgataattttctgcagcagcaacaggaaaccgacacaggaacccaggtcaaggacaagctaggaaaccaaacaaggatagccaggtgtggtggtgggcacgagt

SEQ ID NO: 270352 - DNA, 541 bp, Homo sapiens
aatcttgggctttagcaaagtttcacaattgcctccctggwtctcaaagctctcttaaaggcacttatttttgagatggggtctcactgcataacccaggttggtcttaaaattttggcctgaagcaattcttcaaccttactgtaccatgtagctgtcattacagatattaaccatgctgcctggttctctcattaagacatttttgtcatggatgactgacagactttcttgctgttgggggttaagcaaatagggcacctttttctttttatctgcttctaagagtgtaaatgctttatagctatatatctcatataatctttgtctttttgcagctgactcatttcattttgcataatgttatcaagatttatctttataattggtagaacattttctgctttttgaaaactgagtgatattccagtatttttatatttcagattatatttactgaatgatttggtgacagaaatttgcattgcctttacctattagcttacagtaataattattgctatgtaaatgactcctcata

SEQ ID NO: 270353 - DNA, 541 bp, Homo sapiens
aatcttgggctttagcaaagtttcacaattgcctccctggatctcawagctctcttaaaggcacttatttttgagatggggtctcactgcataacccaggttggtcttaaaattttggcctgaagcaattcttcaaccttactgtaccatgtagctgtcattacagatattaaccatgctgcctggttctctcattaagacatttttgtcatggatgactgacagactttcttgctgttgggggttaagcaaatagggcacctttttctttttatctgcttctaagagtgtaaatgctttatagctatatatctcatataatctttgtctttttgcagctgactcatttcattttgcataatgttatcaagatttatctttataattggtagaacattttctgctttttgaaaactgagtgatattccagtatttttatatttcagattatatttactgaatgatttggtgacagaaatttgcattgcctttacctattagcttacagtaataattattgctatgtaaatgactcctcata

SEQ ID NO: 270354 - DNA, 541 bp, Homo sapiens
aatcttgggctttagcaaagtttcacaattgcctccctggatctcaaagctctcttaaaggcacttatttttgagatggggtctcactgcataacccaggttggtcttaaaattttggcctgaagcaattcttcaaccttactgtaccatgtagctgtcattacagatattaaccatgctgcctggttctctcattaagacatttttgtcatggatgactgacagactttcttgctgttgggggttaagcaaatagggcacctttttctttttatctgcttctaagagtgtaaatgctttatagctatatatctcatataatctttgtctttttgcagctgactcatttcattttgcataatgtyatcaagatttatctttataattggtagaacattttctgctttttgaaaactgagtgatattccagtatttttatatttcagattatatttactgaatgatttggtgacagaaatttgcattgcctttacctattagcttacagtaataattattgctatgtaaatgactcctcata

SEQ ID NO: 270355 - DNA, 607 bp, Homo sapiens
tcaaactcattctctgttcagttttgtttgtttgctggtgaggagttgtgatcctttgtaggagaaaaggcattctggtttttggaattttcagcctttttacactggcttctccccatctttatggatttatctacytttggtctttgatgttgatgaccttcagatggggttctgagtaaacatcctttttgtagatgttgcttctgttcctttctgtttgttagtttttcttttaacagtcaggcccctctgctgcagatgtgctggagcttgctggaggtccactccagaccctgttttcctgggtatcaccagctgaggctacagaacagcaaagattgctgcccattcattcctctggaagcttcgtcccacaggccacccgccagatgccagccagagctctcctgtatgaggtgtctgtcagcttctactgggaggtgcctcccaattaggagacatgggtgtcagggacccacttgaggtggcagtctgacccttagcagagctcaaacgctaggtgttgtttttttatgttacgttattttcagtggtaagaactgctttcagcatctttcctatggaagacatatgcagtgccgat

SEQ ID NO: 270356 - DNA, 607 bp, Homo sapiens
tcaaactcattctctgttcagttttgtttgtttgctggtgaggagttgtgatcctttgtaggagaaaaggcattctggtttttggaattttcagcctttttacactggcttctccccatctttatggatttatctacctttggtctttgatgttgatgaccttcagatggggttctgagtaaacatcctttttgtagatgttgcttctgttcctttctgtttgttagtttttcttttaacagtcaggcccctctgctgcagatgtgctggagcttgctggaggtccactccagaccctgttttcctgggtatcaccagctgaggctacagaacagcaaagattgctgcccattcattcctctggaagcttcgtcccacaggccacccgccagatgccagccagagctctcctgtatgaggtgtctgtcagcttctactgggaggtgcctcccaattaggagacatgggtgtcagggacccacttgaggtggcagtctgacccttagcagagctcaaacrctaggtgttgtttttttatgttacgttattttcagtggtaagaactgctttcagcatctttcctatggaagacatatgcagtgccgat

SEQ ID NO: 270357 - DNA, 635 bp, Homo sapiens
gagacaaaccttacaaatgtgaagaatgtggcaaaacctttaagtggtcctcaacacttactaaacataagataattcatactggagagaaaccctacaaatgtgaagaatgtggcawagcctttactacattttcgagccttactaaacataaagtaattcatactggagagaaacactacaaatgtgaagaatgtggcaaagtcttcagctggtcctcaagccttactacacataaggcaattcatgctggagagaaactctacaaatgtgaagaatgtggcaaagcctttaagtggtcctcaaaccttatggaacataagagaattcatactggagagaaaccctacaaatgtgaagaatgtggcaaagccttcagtaaggttgcaaaccttactaaacataaggtaattcatactggagagaaacaatacaaatgtgaagaatgtggcaaagccttcatctggtcctcaagacttagtgaacataagagaattcatactggagagaaaccctacaaatgtgaagaatgtggcaaagcctttagctgggtctcagtccttaacaaacataagaaaattcatgctggaaagaaattctacaaatgtgaagaatgtggtaaagacttcaaccaa

SEQ ID NO: 270358 - DNA, 571 bp, Homo sapiens
gctggagacaaaccttacaaatgtgaagaatgtggcaaaacctttaagtggtcctcaacacttactaaacataagataattcatactggagagaaaccctacaaatgtgaagaatgtggcaaagcctttactacattttcgagccttactaaacataaagtaattcatactggagagaaacactacaaatgtgaagaatgtggcaaagtcttcagctggtcctcaagccttactacacataaggcaatwcatgctggagagaaactctacaaatgtgaagaatgtggcaaagcctttaagtggtcctcaaaccttatggaacataagagaattcatactggagagaaaccctacaaatgtgaagaatgtggcaaagccttcagtaaggttgcaaaccttactaaacataaggtaattcatactggagagaaacaatacaaatgtgaagaatgtggcaaagccttcatctggtcctcaagacttagtgaacataagagaattcatactggagagaaaccctacaaatgtgaagaatgtggcaaagcctttagctgggtctcagtccttaaca

SEQ ID NO: 270359 - DNA, 615 bp, Homo sapiens
tttgctagaacaaacataaaaattaaatttttaagagaatagtaagtgagcaatttaaaatttatttaggatgtacttacagcacaacttacatttccatgcaaaatcctctgttttaaagtgtgaatgttaaaggttgcaaagcaataaaatgacctctgtacatttggaataatatttattttccatattgatattacgatttggagacatttatcactytttttttaatgttttagtggttgaagtttagtctacagtttatattcttagtcacctaactagcgatctcctaggttttctctgaaaacttttggagataatggcagcttttggattaaaacatttcctgttagtttgcatgcaaaccagtttactgtgatcacacagtggccagtcatgggagcataagcaagccttccgttttcgtgtctttcatactatcaccataagcaccagtaactccaagtgccccaagcttaaaataaaagccctaaagttattggcttctcccatgcactgtgctgggttcagaacatgctgttaaacatcaaagttcctatggttatgactgacaaatgagaaaacagcaaagagacagacagtatttgaaac

SEQ ID NO: 270360 - DNA, 581 bp, Homo sapiens
atttatgatttgcaaatattttcttccattttttagttgcctcatcctgttgattgtattatattccgtgcagcagtttttaaatttaaaataatctgattcatstattttttcaatttgctccttgggatttgaggtcaaattctaaaagtgactgcccaaccaatgttacagggctttcagtctatgttttttatagtagtttcagagttttagaccttacatttaagtatctaatttattttgtgtttttattttaagtatctaatttgtttatatatggtgtgagttgagggtcttattatattcctctacatgtggatataaagttttctcaacaccatttattgaagatactgccttttccctaagaaattgccacctttatttaaaaatcagatggctgtaaatacatcaatataaacatcaagatatttctggtctcctttttcttctctacttgcctgtgtgtctgtttttattcaagtaccatacttttttgtttgtttgtttgtttactatagctttttagtatatttcagttcagtctggtagagtgataccttcactttttctattgc

SEQ ID NO: 270361 - DNA, 586 bp, Homo sapiens
ttgacaaaaatattctcaatacactagacactgatgaaacatacctcaaaataatgtcatctgtgacaaatccttagccawcatgatactaaaacaaaaatggatgcattctccataagaataaaaataagaatatccattctaaacagtcctactgaacatagttatggagtcgtagccagagaaataaaaggaatctgaatagaaaacgaagtcaaattatctttactgatgatataattctctaccaagaatactttaaagatttcaccaaaagactcctaagcctaaagacttcaaaaaaatctcagaatacaaaatcaacccaaatgcatagaatttctgtacaccaataaactgagaacaaaataaaaaacagctctatttacaatagccacaaaaaaaaaatacctagaaatacattaaatcaagggggtaaaatatctctacagagaactacaaaacattgctgaaagaaatgagagagaatgcaaataaatggaaaaatactggatgctcatggattcaaataatatagttaaaatggtcattctgcctaaagcaacctacggattaagtgctattt

SEQ ID NO: 270362 - DNA, 586 bp, Homo sapiens
ttgacaaaaatattctcaatacactagacactgatgaaacatacctcaaaataatgtcatctgtgacaaatccttagccatcatgatactaaaacaaaaatggatgcattctccataagaataaaaataagaatatccattctaaacagtcctactgaacatagttatggagtcgtagccagagaaataaaaggaatctgaatagaaaacgaagtcaaattatctttactgatgatataattctctaccaagaatactttaaagatttcaccraaagactcctaagcctaaagacttcaaaaaaatctcagaatacaaaatcaacccaaatgcatagaatttctgtacaccaataaactgagaacaaaataaaaaacagctctatttacaatagccacaaaaaaaaaatacctagaaatacattaaatcaagggggtaaaatatctctacagagaactacaaaacattgctgaaagaaatgagagagaatgcaaataaatggaaaaatactggatgctcatggattcaaataatatagttaaaatggtcattctgcctaaagcaacctacggattaagtgctattt

SEQ ID NO: 270363 - DNA, 502 bp, Homo sapiens
caataatgctcctgtttctcttgctgagagtagctatgcacttgggtgtttggagagaaattcttcttagggagatattttctggctgacttgatcaatcttatatccaatctcagttttttcttaagacacttttaacttttttctttcaatataatctttctcagaatgagagctgtttttctctcaaatgcattgtgtgtctgtttcagaaaccctattagtcccatggtgtctgtgaaagacgtgggctgtcacagtgagaactctcagagctatctctatctggactcatgccaaaacccagcagtatttttttcatgccrccattataaataaaaactgaggctgaaacagtgctcccttttctattattgtgaaggtgcaattctacccaggaggcctgcaagctctcctcctgctgctcaggcttcactgtctgatgtggcactggagtgctgctgtggcaattggggttcacctaagatgtgagtttccagct

SEQ ID NO: 270364 - DNA, 502 bp, Homo sapiens
caataatgctcctgtttctcttgctgagagtagctatgcacttgggtgtttggagagaaattcttcttagggagatattttctggctgacttgatcaatcttatatccaatctcagttttttcttaagacacttttaacttttttctttcaatataatctttctcagaatgagagctgtttttctctcaaatgcattgtgtgtctgtttcagaaaccctattagtcccatggtgtctgtgaaagacgtgggctgtcacagtgagaactctcagagctatctctatctggactcatgccaaaacccagcagtatttttttcatgccaccattataaataaaaactgaggctgaaacagtgctcccttttctrttattgtgaaggtgcaattctacccaggaggcctgcaagctctcctcctgctgctcaggcttcactgtctgatgtggcactggagtgctgctgtggcaattggggttcacctaagatgtgagtttccagct

SEQ ID NO: 270365 - DNA, 551 bp, Homo sapiens
aacactcattacttttgaccaacatctcctccacctccagcttcaggcaatcatcattctactctttgcttttatgagtatcaattttttttattctccaayttaaaacttttaattaaaaagtagactttaatgttgaaaatgcaaacttggggagggcagaaagatcacacacaaggccgccacttcacacctggagtgagtttgaattttttaatactctacatagaagtgagataatttgctattgttttgtgtgtgtgctggcttattgctggcttattttccaggttcatcaatgttgttgcaaataaagactgttttaaaaaattttcttctttgaaatataaaaaaaaacctggccaaataaagtctgaacgaattaagtatagctccttagcatagctcacagttaattttagttgactatcctctctgtagacaacattcttcatcagcattttttaccatacaactagacctcaactaacagtcattatgtatcacaaaaatgaatcagtttagaagccatcttaataatgagacaattg

SEQ ID NO: 270366 - DNA, 551 bp, Homo sapiens
aacactcattacttttgaccaacatctcctccacctccagcttcaggcaatcatcattctactctttgcttttatgagtatcaattttttttattctccaacttaaaacttttaattaaaaagtagactttaatgtygaaaatgcaaacttggggagggcagaaagatcacacacaaggccgccacttcacacctggagtgagtttgaattttttaatactctacatagaagtgagataatttgctattgttttgtgtgtgtgctggcttattgctggcttattttccaggttcatcaatgttgttgcaaataaagactgttttaaaaaattttcttctttgaaatataaaaaaaaacctggccaaataaagtctgaacgaattaagtatagctccttagcatagctcacagttaattttagttgactatcctctctgtagacaacattcttcatcagcattttttaccatacaactagacctcaactaacagtcattatgtatcacaaaaatgaatcagtttagaagccatcttaataatgagacaattg

SEQ ID NO: 270367 - DNA, 551 bp, Homo sapiens
aacactcattacttttgaccaacatctcctccacctccagcttcaggcaatcatcattctactctttgcttttatgagtatcaattttttttattctccaacttaaaacttttaattaaaaagtagactttaatgttgaaaatgcaaacttggggagggcagaaagatcacacacaaggccgccacttcacacctggagtgagtttgaattttttaatactctacatagaagtgagataatttgctattgttttgtgtgtgtgctggcttattgctggcttattttccaggttcatcaatgttgttgcaaataaagactkttttaaaaaattttcttctttgaaatataaaaaaaaacctggccaaataaagtctgaacgaattaagtatagctccttagcatagctcacagttaattttagttgactatcctctctgtagacaacattcttcatcagcattttttaccatacaactagacctcaactaacagtcattatgtatcacaaaaatgaatcagtttagaagccatcttaataatgagacaattg

SEQ ID NO: 270368 - DNA, 268 bp, Homo sapiens
gttgctttcttttccgcaattgtgtttaaaactgtycaaagagactctccaaatgcttggctttctgtctagaagtttcaaatggggcttttgggtgtgcatctttttctagtttcgcacagctgcagaggcttcaggaaactaacaatcatggaaggcaaaggggaagcaaagactttctggttgtggctggagaaagagctacaatgtactgactggtctcactcaggatgttcctgacattcaggataggtggggtgacccagca

SEQ ID NO: 270369 - DNA, 268 bp, Homo sapiens
gttgctttcttttccgcaattgtgtttaaaactgttcaaagagactctccaaatgcttggctttctgtctagaagyttcaaatggggcttttgggtgtgcatctttttctagtttcgcacagctgcagaggcttcaggaaactaacaatcatggaaggcaaaggggaagcaaagactttctggttgtggctggagaaagagctacaatgtactgactggtctcactcaggatgttcctgacattcaggataggtggggtgacccagca

SEQ ID NO: 270370 - DNA, 516 bp, Homo sapiens
tgacaagtaaaagtggagaaaataaatttagttgagtgagaaaaaattcctcttccaagaaaacaggttttataaagataaaaatagaaaggctttttgaatatacttgtaggttggatattaacttttcattaaggtgagtgcactttaaaaaaggtttttttaattaattaaaacttcacagagaatataaacagtgattcttattatttcctttaccagtttacaccactacctgtttacaatcctgtttaggctctttagtttcccctaggagaaaatgtcagggttcaggcaagggcacattttcaactggactgcagatcactttagcagcaaaacttgatatttgaggaggtgattattagccagaggttttccttagaggacagcagtccaatgtgggaatgcagacagttaagttatttcccattgttaacctcatggcctttggtacaagcaagccaccaccaaaactgctcagaggcasgctggccatcctctagccatcaagtc

SEQ ID NO: 270371 - DNA, 410 bp, Homo sapiens
agcgaggcttaggaaaactggtaaaatacctgtgtctcctctttgtatgaaggtcatagagaactaccacgtgctttgtatayggcataaagctcttgagtggtacagtggtacagagagtgtccacatgtcctaaaacaaaggggatattgtgtttcttgtatacacacccagacacctgttaggattgtcaccctaacacctggatacagaccattggtgaggtcttgtgtctcacatgcagatgcaatccacagtttgattcctgactgtcaaatgtaaacacctgtccaaagttgggatggtgactcatttctaaacccagctcatagacaagtgaggactcttctgtctggcccagttaatccgagaaatattaacttttctacctgggcttagggagcagcata

SEQ ID NO: 270372 - DNA, 507 bp, Homo sapiens
tttcctagcaaggaatattgatattaatactctaggaaaagaatttcattcctggggggaggtctataaacggccattctgggaatgtctgttctatgcgattgagataaggactgagataagccctggtctcctgcagtaccctcaggcttactaggattgggaaactccagcctggtaaatttttggtcagaccagttctctgctctcaaaccttgttttctgttaagatgtttatcaakacaatacgtgcaccgctgaacatagacccttatcaggagtttctgatattgccctttgaagcacgtgatctttgtgacctactccctgttcttacaccccctccccttttgaaatccttaataaaaacctgctggttttgtggctcaggtgggcatcatggtcctatcgatatgtgatgtcacccccagcggcccagctgtaaaattcctacctttgtactctttatttctcagaccggccgacaattatggaaaatagaaagaa

SEQ ID NO: 270373 - DNA, 507 bp, Homo sapiens
tttcctagcaaggaatattgatattaatactctaggaaaagaatttcattcctggggggaggtctataaacggccattctgggaatgtctgttctatgcgattgagataaggactgagataagccctggtctcctgcagtaccctcaggcttactaggattgggaaactccagcctggtaaatttttggtcagaccagttctctgctctcaaaccttgttttctgttaagatgtttatcaagacaatacgtgcaccgctgaacatagacccttatcaggagtttctgatattgccctttgaagcacgtgatctttgtgacmtactccctgttcttacaccccctccccttttgaaatccttaataaaaacctgctggttttgtggctcaggtgggcatcatggtcctatcgatatgtgatgtcacccccagcggcccagctgtaaaattcctacctttgtactctttatttctcagaccggccgacaattatggaaaatagaaagaa

SEQ ID NO: 270374 - DNA, 507 bp, Homo sapiens
tttcctagcaaggaatattgatattaatactctaggaaaagaatttcattcctggggggaggtctataaacggccattctgggaatgtctgttctatgcgattgagataaggactgagataagccctggtctcctgcagtaccctcaggcttactaggattgggaaactccagcctggtaaatttttggtcagaccagttctctgctctcaaaccttgttttctgttaagatgtttatcaagacaatacgtgcaccgctgaacatagacccttatcaggagtttctgatattgccctttgaagcacgtgatctttgtgacctactccctgttcttacaccccctccccttttgaaatccttaataaaaacctgctggttttgtggctcaggtgggcatcatggtcctaycgatatgtgatgtcacccccagcggcccagctgtaaaattcctacctttgtactctttatttctcagaccggccgacaattatggaaaatagaaagaa

SEQ ID NO: 270375 - DNA, 609 bp, Homo sapiens
ctcaaaccttgttttctgttaagatgtttatcaagacaatacgtgcaccgctgaacatagacccttatcaggagtttctgatattgccctttgaagcacgtgatctttgtgacctactccctgttcttacaccccctccccttttgaaatccttaataaaaacctgctggttttgtggctcaggtgggcatcatggtcctatcgatatgtgatgtcacccccagcggcccagctgtaaaattcctacctttgtactctttatttctcagaccggccgacaattatggaaaatagaaagaacctatgttgaaatactgggggcaagttcccccaatatctggcatgccaacatggttttatcytaagtgcatgtgggaacccgattccctttggtaggtgtggagaaatgtttattggtccagaccacagaaacgcttgttcggctccctgatgattggtgagttgtctgtgtattgtctggggtaagtatgggtcacacagagtctaaacattatgcttatctctactatattaaactcctgttaaaacagggaggagtttgagtgaccatggaaaatatggtcaccctattcagggtggtggaagaac

SEQ ID NO: 270376 - DNA, 590 bp, Homo sapiens
gagtttatatgcctctgtcaaaaggaatacacagtttagatgtttaatcatagtacctgagaaggtactgatgtccttcccttggaaacatcttgaatacatactaactttccggtcagtaagacctcaaaaggttgaatgaatactaacaacttacacaccttaaatgattatcaaacattactgggtgatattaactggctttgccccacctcgggcataactactgataagttacagaacctactttctatcctaaagggcaatgcagacttggactcacccaggtatttgaccccccactgcaaaaaggaaaattgaggaaatagagcaagctattactcagaggctactagattgcatagacccatgatattaagtccaattatttgtatttcctactaaatattccccracaggattaataagacagatggccccaaggctgcacctcctagaatgggttctttgctcacataccaggactaaaataccatctccctgtgtctatctagtagtaaagtcaatcaattgcaatcaattgcaaggttatgacctggatttcgtaagaatacccttaagtaaaaagc

SEQ ID NO: 270377 - DNA, 569 bp, Homo sapiens
ttattaaagttttcatttgtaagtctcatatccaatgctataagtaagtctcgaccccataaattgatagctatatttgcaacataaggctggaaagtacatgattgtccatccggaccaagacaaggtaaaatctcagcactccgttgaacactttgagctgctcctactcccactagggatgwggagattagtctgaggggccaggatgggggtcaatccttactggatattactgacacatcagctcctgtgtccataagcccatacatttttttttaatttgtacgaaacaggtgggtctattagaggctaagggttggaatagatagattttgcatgtagttgtgctcccaaaccctttatttcctcatttctcctttcatgcagaagggtgtaatttgcaggggataagcaataattgtgctatatattcccctggttcaaaaacacaaagatcttttgacattaaagctatttgaatttctccttaaccagagtcaactactctggggactgcagtgatgccttgcaagttaaggcagcttttgcctaaaattagtcccatg

SEQ ID NO: 270378 - DNA, 651 bp, Homo sapiens
gcttgcaatctgcatttgcatttcataggctagagctatggtaagcatttctgcagcagaggcatgagtgatstgaagctgcactgcatcttgcagacatgcgataaattgtgcataaggctcctgtgatccctgtgtgacatgtagaaaagactgcactgtaactccctcttcaggaattgtgctccaaacatgcttggtggctaaggaagactggtggtaagtggcctctctgatgggagtgttaattgttgtaccagatctgaaaaggggccacagctcatcaacatttcctctgtagtgtttccttgaagagcggtgcgattctgcctagcctggtctgcacacatttcttgccaatttaaactccatgtcagatatgcactggtggataagcaagtgcaagccaaaggtttttcatcaaaaggtggaaggcacatggctctgaacaccgattctaacagccctatagtgaatgggctttgcactccattattaaccacaccagtttttaattcttttagtaatttaaactctacaagagtgtgttcatgtcaaaaatgtggtggatcattcagatcaagccttatggtaataggaaaagcataaggtcccaaaagttcccttgccatagcaacagcatgcaaaatt

SEQ ID NO: 270379 - DNA, 524 bp, Homo sapiens
ggcctgtctagaatacttttaaatactcttctaagtttaatctaaagcattcaaattgcagacaaactttggtgaaaagcatttcttagccaagtttgcttgtatttgcattaaatcagataaaccaggggttaagtgtttctatttctcttctacctgcgctagacctgttaagccaaacacactcatcatgatagcagtagaagcagaagtcttaagatctaacagttattgagcactagctaccaggatcctaattattttttacacattatcttttttattcattgggaggtggaggctgcagtgaaccaagtttgtgccattgcactccagcctgacaasagagcaaaactccatctcaaaaaaacaaacaaacaaaaaaaaaagaaagaaagaaagaaaaagagatgtagatgtaattattatcctgaagattaagatgagggaatagagacccagagaggtagccagctattagaactcaaactgttaagtttgtccccaggactgttttttttttt

SEQ ID NO: 270380 - DNA, 524 bp, Homo sapiens
ggcctgtctagaatacttttaaatactcttctaagtttaatctaaagcattcaaattgcagacaaactttggtgaaaagcatttcttagccaagtttgcttgtatttgcattaaatcagataaaccaggggttaagtgtttctatttctcttctacctgcgctagacctgttaagccaaacacactcatcatgatagcagtagaagcagaagtcttaagatctaacagttattgagcactagctaccaggatcctaattattttttacacattatcttttttattcattgggaggtggaggctgcagtgaaccaagtttgtgccattgcactccagcctgacaacagagcaaaactccatctcaaaaaaacaaacaaamaaaaaaaaaagaaagaaagaaagaaaaagagatgtagatgtaattattatcctgaagattaagatgagggaatagagacccagagaggtagccagctattagaactcaaactgttaagtttgtccccaggactgttttttttttt

SEQ ID NO: 270381 - DNA, 520 bp, Homo sapiens
tttcttgacatctacacctggtaccaggctctagaactgcaaagatggatataatatgattccagttctaaaattcaccagtgccttacaatcagcaagaagaagtggagaactggcaagtgagaagctgcagtggaaagaaaaggtgatactctcacatgtgcagcttttccatgtggaggagaagaatgtggraaaggagaaatatacatttaaaccaaaaaaagcagtttaagtacaggatttgaagtagaaaaatatgaggcttatttgatgacagggtaggacaagtggagtgtgagaaaagaatatagtttgggagggtcgtgtggagatgagacgataagagatgttggaaacatgaatgattgcttagaattatgatgggggctcagctctgtagggtgttatgagccatcaaatgttttgcagcagggctgtaatatgagcagctctgtgttttcagagagaacactggtaacctttccaaaagtttaagcttgaaaaaagacaatgtgtt

SEQ ID NO: 270382 - DNA, 636 bp, Homo sapiens
acatttaaaccaaaaaaagcagtttaagtacaggatttgaagtagaaaaatatgaggcttatttgatgacagggtaggacaagtggagtgtgagaaaagaatatagtttgggagggtcgtgtggagatgagacgataagagatgttggaaacatgaatgattgcttagaattatgatgggggctcagctctgtagggtgttatgagccatcaaatgttttgcagcagggctgtaatatgagcagctctgtgttttcagagagaacactggtaacctttcmaaaagtttaagcttgaaaaaagacaatgtgttcagcaaagtgcaatgcaaacttggaatctggtaccctctttgataaaatacattttcccttttttaagagacttttgagcccagaatgtatgggctgccttcgtaaacatggttaaatcataatggaaaagttagatatttattttccacaaatcaaattcaattagacaatgtttaatcttccctaacagggttttactaattggtatttaaactctttaaagagtaggcatatttacaaagcagggactccttttctttcaaaaatattgaacctggacactgggagctgaatggagatatgtgtaaaataattttagacaa

SEQ ID NO: 270383 - DNA, 524 bp, Homo sapiens
ttatctgtaaaattggatgataacatctacttaatagtgcagttccgagaataaaaactaagatatctaaggcatgcagcactaaaaagtattgaaaatygtaaacttactctcctcatcatcatgagctatgcttcccttaaacaatgctgttctgttcccaatatgaggtatcccgcagattagaatggctgcataattgcttatcctccaggcctcattccccacaaaaggacggcatactttctggagtatagcattcctgaaaagggcccctctagaccatgtttgattagtttcagtgatggtggactaactgcatccccatctcttctgccaccaaatcactcaaaactcagaaaactatttctgtattatcaggacaaagcactccctatgcatattctccaaggcttctgcactcggaggtcaccaggaagagatctgctctgctctctcattcactggagccctacagatctgggaaagctttgggtttttttttgttttgttttgttttgttt

SEQ ID NO: 270384 - DNA, 623 bp, Homo sapiens
atgggtctttcatgtttctgcatgtcttgtgagcagagggactggctgcctttgttcagaacaatcttaaaaagaatcactgtatagtgaacagccttggaaggtaaagagaatgtctccctctagagcaaaggctaggtttgcttactgcccaacataaaagatccaggttctcaaagctcagagctcctctcctgcaacacgtccactgagtgtgcagatgtcacctggcttttccatcaccatgtgggagtcagggctcaagaaactagcacaagaaaatgttgatacttgggctattgctatttctgtgagtaataaagttctttgtctctgacctaggagtcttttgtcctctgccaatgtccatgaaattgtggcaggctaattgtgatgttgtaaaatatatatttggtctttgacaccatttcctggcatacaactcctaaattccttggactcttccaagtgatgtcttcttgtatgctaatgaattggctgatggctgagagctcctatatagcttcaagagagaagctggtcatcagaaagaccaargcaggattagagtgttgggactccaggaagtggggaggtgctgaaggttaagttgatcaccaatg

SEQ ID NO: 270385 - DNA, 598 bp, Homo sapiens
cctgcctggggtttaattaattcgtggggctggatgcctggatagctcagggcactccctgatgcttggggctagcaggcagaggcgcccagcgcaagtgcagctcactgaagcttccgcactgggcttggcaacggagtgttaccttctcattagggaaatggggagtggagccctccagaggctcccaccccctggactcctggtycctagcccccagtccatagtccagcagctctcctggtgtggaggacagggacttctccattccatccctttcaatctccttcacagcaggaaggattcctaagtagcatgattaattagtcactggagcaagggagggaacagagagagacctgtagaggtcagaatttgaagagcccgtggaacccagaaccaatcactgttcatccccacctccctgacccccttggtcctcctcctccttcccagccctccgcaggctcccctcacattgactgtctccactcgacttcagggttccctgagcctcttagggaaaggacgttggaacattagaagggccttggaggatgggaagtgaggtgagtgaccccaactgtctggtgcatgc

SEQ ID NO: 270386 - DNA, 597 bp, Homo sapiens
gtgcttttgaagcgatcactccagctgcaatgtgatacaaagacaagggggttccgagtatcaacagatggaccagcaaggattctgctgcatgcctgagacagcagtgaattgaggagggatgaagaggggtcaagggtggggcggggtggtcctcaggcttctagactgtaccatttaatgaagtgtggcaccattcactgaaatggaaacatggcagaatatcagggttgtggggtgaaggtcatgagcttgtttttggaccactgagtttgggatgtctatgagggagatactaagttagctccctactcaggcatagagtgcaaaggaaagccctggaatgaaggtgtaaatttgtaagccctctgtatgcagatggtgattgaagctatgagcatgcatgcagctttcttgagagatgatataaragaacagaaatggattcatccctgtgaaggccatcatttggtgaaatcattctccatctgggttgcacatgagagtcatgaggacagctttagaaatgctgatgcctgggttctagctacagaggttatgattttatcgttgttttggtctggtatgtgacccccg

SEQ ID NO: 270387 - DNA, 607 bp, Homo sapiens
agggcagtccctggagactgggcaggtgtggagagaggagaatgctctctgtaagggccaatgactcagggaaggccttgaagcagatggaggtagggctgggctccaagctacagccagttccaagctactgacccttcttctacaccttttgcctccacaaccgggcaggtactgttgagacttgggtcaaagagtgtcagaggggacagagaaggctgtgagatcagggcaggagatcttcactcttgagaagacrcagcaggggatgcctctggacctctgcaggcctcagggtctagacaatgagggtcaaggattccagcctcaaagtctcccttggcttcttagcacagatggcagtggccacagtcttggtttatagtattatgaagttattcctgccctttcctccctgaaaagggtgccaattaatgtgaagtaaggtttgtacctgcatcagccatccctcctcaaaacctccagaccatttccattttgatcagtgtaattttgaaatgcagctgggttttcacttccaccttgcaatcgtccccctccccagattcaatttagattaaggagaacaaaggcaggggatgtttgc

SEQ ID NO: 270388 - DNA, 607 bp, Homo sapiens
agggcagtccctggagactgggcaggtgtggagagaggagaatgctctctgtaagggccaatgactcagggaaggccttgaagcagatggaggtagggctgggctccaagctacagccagttccaagctactgacccttcttctacaccttttgcctccacaaccgggcaggtactgttgagacttgggtcaaagagtgtcagaggggacagagaaggctgtgagatcagggcaggagatcttcactcttgagaagacgcagcaggggatgcctctggacctctgcaggcctcagggtctagacaatgagggtcaaggattccagcctcaaagtctccctkggcttcttagcacagatggcagtggccacagtcttggtttatagtattatgaagttattcctgccctttcctccctgaaaagggtgccaattaatgtgaagtaaggtttgtacctgcatcagccatccctcctcaaaacctccagaccatttccattttgatcagtgtaattttgaaatgcagctgggttttcacttccaccttgcaatcgtccccctccccagattcaatttagattaaggagaacaaaggcaggggatgtttgc

SEQ ID NO: 270389 - DNA, 499 bp, Homo sapiens
tctgggctcactgcagcctctgcctcccaggtgattctcctgcctcagtctcccaggtagctgggactgcyggtgtgtgccaccacgcccagataatttttgtatttttagtagagatggggtttcaccatgttggccagaatagtcttgatctcttgacctcgtgatctgcccgccttagcctcccaaagtactgggattacaggtgtgagccaccacgcccagccaaatgtgtgttgtttaacaaatttatgttaatttgtttcagcagccataggaaattaatacaaccacccaaaacttacctaagtggtagccccaattatagcagctgtagcagatattgtatttttactagaatagaccaacccaacctctgacataaataacagctattggtctagtgaaagcatccgtttcaattcctatcatcaagacagatggaagacatttgcattcatttgaaaggacagcagcagacactcacagtgttggcaaa

SEQ ID NO: 270390 - DNA, 499 bp, Homo sapiens
tctgggctcactgcagcctctgcctcccaggtgattctcctgcctcagtctcccaggtagctgggactgctggtgtgtgccaccacgcccagataatttttgtatttttagtagagatggggtttcaccatgttggccagaatagtcttgatctcttgacctcgtgatctgcccgccttagcctcccaaagtactgggattacaggtgtgagccaccacgcccagccaaatgtgtgttgtttaacaaatttatgttaatttgtttcagcagccataggaaattaatacaaccacccaaaacttacctaagtggtagccccaattatagcagctgtagcagatattgtatttttactagaatagaccaacccaacctctgacataaataacagctattggtctagtgaaagcrtccgtttcaattcctatcatcaagacagatggaagacatttgcattcatttgaaaggacagcagcagacactcacagtgttggcaaa

SEQ ID NO: 270391 - DNA, 398 bp, Homo sapiens
tgatttagatgtttgtccctccaaatctcatgttgaaatgtgatcctcagtgttggtgatggagcttggtgggaggtgtctgggtcatgggggcaggtccctcatggatggcggggtgtgctcccagtggtaatgakttcatgggagcgctggttgttgaaaggagcctggcacctcctcctcctcgctctcttgctccctcctcaccacgtggcactcctgatcctcctttgccttctgctatgagtaaaagcttcctgaggcctccccagaagccaagcagatgctggcaccatgtttatacagcctgcagaaccatgggccaaacaaacctcttttctttgtacgttacccagtttcaggtgttccttcatagcaacacaacacaaaatggacta

SEQ ID NO: 270392 - DNA, 614 bp, Homo sapiens
aaatcccccctcttcatttttttttaatccccttctggtgctgaatgggttgggtaatacttgcttacgtgggtgaagacagtctttactcagttgcttgatttaaatgctgaccttttctgggaacacccttatagacacagccagaaataatgttttcctagctaactgggaatcctgtagccgagtcaagttgacataagattaaccatcacaggcagggtgctgtaacagacactgcyggggttcccacatggctccatgctgactctccccaggcgagctcatggtgccttactgcaagtgccagcttctctgcacaaggactttctctccccccatacagatacaggccaccagtgctagagagccactgcccctgagggctgccctccaccagcaatgaaagttacttggatggtagatacccaagcttcaaactaatccaggaacagaaatccaaataccacatgttctaatttataagtgatagctaaatgatgagaacacatgggcacatagagcagaatgacacacactggggcctaatgaaggatggagggtgggaagagggagaggatcggggtactagggtaatacctgggtgatgaaat

SEQ ID NO: 270393 - DNA, 508 bp, Homo sapiens
ctccagccattggctagccctaggaggagtaggctctctaggatctgccaagwtccaagacaaaaaataaaaaggtgtaattaatacacaagtgttagttggtaaggctgtaaagttccagagcaaggagccctggcaggcaagttccatgtggatcagagctcctaggacatccaggtggagccttcccctgggtttgaagggcacctgagtacagaagacaagtaatatcatatcaaggtaaaaataacattattatcttctctaaaatataatccaagcttattagagagaaattcaagaattcaggccagggaaaggaagttgtaaaacaacatcatgattttggccacccagaaatgattgctggggaaagtgctttatagccaacctctagatgttcagttatttcagttgcaagtgacagggaacccaatctaaactggcctaaaaaactcaaatggatggaaacaaaaattctaaatatggactggcttcaggtacagtt

SEQ ID NO: 270394 - DNA, 508 bp, Homo sapiens
ctccagccattggctagccctaggaggagtaggctctctaggatctgccaagttccaagacaaaaaataaaaaggtgtaattaatacacaagtgttagttggtaaggctgtaaagttccagagcaaggwgccctggcaggcaagttccatgtggatcagagctcctaggacatccaggtggagccttcccctgggtttgaagggcacctgagtacagaagacaagtaatatcatatcaaggtaaaaataacattattatcttctctaaaatataatccaagcttattagagagaaattcaagaattcaggccagggaaaggaagttgtaaaacaacatcatgattttggccacccagaaatgattgctggggaaagtgctttatagccaacctctagatgttcagttatttcagttgcaagtgacagggaacccaatctaaactggcctaaaaaactcaaatggatggaaacaaaaattctaaatatggactggcttcaggtacagtt

SEQ ID NO: 270395 - DNA, 452 bp, Homo sapiens
tatgtatgtgtgtttgtatgtttttcagggagtgttgacatttagggatgtggccwtagaattctctctggaggagtggcaatgcctggacaccgcacagcagaatttatataggaatgtgatgttagagaactacagaaacctggtctttgtgggtgaggataacttcaatatacaattccctaatataccctataaattttatttctcttttttgtagaatggtttttttggtagtttatgctttcagatctctgttttttttttttgttttttttttttaacttcaagatttgtctatgtagaaaagaatttcaagatgtttcattttgatctgaactttccacactcctgagctgatctgtgttcttcactctagattagtgttaattttagaaatttagtggcataacatactgttgcccacatcttaaaatctaattgccactacc

SEQ ID NO: 270396 - DNA, 282 bp, Homo sapiens
atgtgggcaacaagagtgaaactccatctcaaaaaaaaaaaaaaattctttcaatcaatagacatgaaatgtttttaaatttatttttgtcttctccaattattgatgtatcttttatttgaaagatatttaagctccttggttaaatttgttctcagaaatttattattttagtgctattgtaaataagattgctttctgtctctyttttgtcagatagtttgtttaaagtgtatggaaccataacttacacttgtatgttaattttctattttgctaact

SEQ ID NO: 270397 - DNA, 546 bp, Homo sapiens
ttactacacataagataattcatactggaaagaaaccctacaaatgtgaggagtgtggcaaagcttttaaccaatctgcaaaccttactacacataagagaattcatactggagagaaaccctacaaatgtgaagaatgtggcagagcttttagccagtcctcaacccttactgcacataagataattcatgctggagagaaaccttacaaatgtgaagaatgtggcaaagcttttagccagtcctcaacccttactacacataagataattcatactggagagaaattctacaaatgtgaagaatgtggtaaggcctttagccrgttatcccaccttactacacataagagaattcattctggagagaaaccctacaagtgtgaagaatgtggcaaagcttttaaacaatcctcaacccttactacacataagagaattcatgctggagagaaattctacaaatgtgaagtatgtagcaaagcctttagccggttctcacaccttactacacataagagaattcatactggagagaagccctaca

SEQ ID NO: 270398 - DNA, 483 bp, Homo sapiens
gatgctggtgtgtgtcacagccctgataggctgtttattcctcatcatcctctcctatgtcttcattgtggctgccatcttgaggattccctctgccgaaggccggcacaagacattttctacgtgtgtatcccacctcactgtggtggtcacgcactatagttttgcctcctttatctacctcaagcccaagggcctccattctatgtacagtgacgccttgatggccaccacctatactgtcttcacccccttccttagcccaatcattttcagcctaaggaacaaggagctgaagaatgccataaataaaaacttttacagaaaattctgtcctccaagttcctgagcgccagtttggtggtgatgaaatataataatgtgtatctccatagggctgttgtaagkgttcaggtatgtgaaaatatgtgtttgatacatactagctattgttttcccttccctttttgcttaagctcaagt

SEQ ID NO: 270399 - DNA, 609 bp, Homo sapiens
tatttgcataaataaactctagcatgaataacttttcagcttaacatgtacttgtttatgtatgtataactatttayatgtttacatatttcacttgcaacatttattccatctgtgtgtataaccagtaatcctccccggtctccactctgtaggaccctgcaaggtgcctggtcattggactttctactgcaggagtgtgtgggatgcacctgagccagagttccctgcagcctaggaggccaaggaatcccagggcagtcaatgtccctggtgctgaaggagatggatccccttccttcccctgcaccctcctctcaccctcgcagcatcctccagacacctggacctgctgtcaggatccaaaagcagtgctttggaagccttagggaggtaaccactgattcccatgcttctactcacattggctgctcagcaaaagtaggaaagtccctactgcaaaaatgtcaatgtcccctctggtgcctggcaactgccagggccagccctacttcttgtatcttccatgtttgaaattttaacatttgaactcacacccgaggttgaccagaagacccagatagctctgagctttgcacctgtgaccca

SEQ ID NO: 270400 - DNA, 568 bp, Homo sapiens
aggcatgagccactgtgcccaacctttgaggcaatcttgatcattaaccccaaatgtggggttgaccatatgtcttaagttgttctggacttctacttatgcttctttgtcatggcatttttttttatgaattcacctgggattttgttaatagtgcaaaagartttattttggggtccattcatcttggacccaggaggagttacaggctctgggtttcaaatggttcaagatccaccacctgagggcctgaggtatgtggggacctgtgtttccaatcctgtgtgtttattatcaggcgctgtctctggtccacagcatccaaagagggcaggtatggtagcaggagtcatttcccctgtgcaccctcagctgctgacccctgatataaccaccagattattgtcagactctgagccacatgctcagccatgtctcaaagatggcctctcctccaaaggttttgacatcattgctctgtaacaccaatgagaccttccagccgatgttttctttagagcccttggtttggtgtctagccttatcaccaacatgccattgacctcag

SEQ ID NO: 270401 - DNA, 568 bp, Homo sapiens
aggcatgagccactgtgcccaacctttgaggcaatcttgatcattaaccccaaatgtggggttgaccatatgtcttaagttgttctggacttctacttatgcttctttgtcatggcatttttttttatgaattcacctgggattttgttaatagtgcaaaagagtttattttggggtccattcatcttggacccaggaggagttacaggctctgggtttcaaatggttcaagatccaccacctgagggcctgaggtatgtrgggacctgtgtttccaatcctgtgtgtttattatcaggcgctgtctctggtccacagcatccaaagagggcaggtatggtagcaggagtcatttcccctgtgcaccctcagctgctgacccctgatataaccaccagattattgtcagactctgagccacatgctcagccatgtctcaaagatggcctctcctccaaaggttttgacatcattgctctgtaacaccaatgagaccttccagccgatgttttctttagagcccttggtttggtgtctagccttatcaccaacatgccattgacctcag

SEQ ID NO: 270402 - DNA, 568 bp, Homo sapiens
aggcatgagccactgtgcccaacctttgaggcaatcttgatcattaaccccaaatgtggggttgaccatatgtcttaagttgttctggacttctacttatgcttctttgtcatggcatttttttttatgaattcacctgggattttgttaatagtgcaaaagagtttattttggggtccattcatcttggacccaggaggagttacaggctctgggtttcaaatggttcaagatccaccacctgagggcctgaggtatgtggggacctgtgtttccaatcctgtgtgtttattatcaggcgctgtctctggtccacagcatccaaagagggcaggtatggtagcaggagtcatttcccctgtgcaccctcagctgctgacccctgatataaccaccagattattgtcagactctgagccacatgctcagccatgtctcaaagatggcctctcctccaaaggttttgacatcattgctctgtaacaccaatgagaccttccagccgatgttttctttagagcccttggtttgstgtctagccttatcaccaacatgccattgacctcag

SEQ ID NO: 270403 - DNA, 390 bp, Homo sapiens
tccaaggccctggctatcccttctttttcatctctgccctgactctgtggggtccttcatttgcgagatgggaactggggatcttgggtcactccartcaccccagaccacaccaggccagccccggctcttttatcagaacaatgccgagaaaagtgaccactacaaacagagtcagggtcaccgtcaggcgatgaactccagggatttaatgtttgatcccatcattctggggagaaattaattcaaaggaggtctggtagcagagaagtacccaccaacggacacgccctgacctcggggttttctggttcactctctggcccactgggggtgaactttctgatgttgagttctgtcctgataagggagaagatatctacatgttga

SEQ ID NO: 270404 - DNA, 390 bp, Homo sapiens
tccaaggccctggctatcccttctttttcatctctgccctgactctgtggggtccttcatttgcgagatgggaactggggatcttgggtcactccaatcaccccagaccacaccaggccagccccggctcttttatcagaacaatgccragaaaagtgaccactacaaacagagtcagggtcaccgtcaggcgatgaactccagggatttaatgtttgatcccatcattctggggagaaattaattcaaaggaggtctggtagcagagaagtacccaccaacggacacgccctgacctcggggttttctggttcactctctggcccactgggggtgaactttctgatgttgagttctgtcctgataagggagaagatatctacatgttga

SEQ ID NO: 270405 - DNA, 390 bp, Homo sapiens
tccaaggccctggctatcccttctttttcatctctgccctgactctgtggggtccttcatttgcgagatgggaactggggatcttgggtcactccaatcaccccagaccacaccaggccagccccggctcttttatcagaacaatgccgagaaaagtgaccactacaaacagagtcagggtcaccgtcaggcgatgaactccagggatttaatgtttgatcccatcattctggggagaaattaattcaaaggaggtctggtagcagagaagtacccaccaacggacacgccctgacctcggggttttctggttcactctctggcccactgggggtgaactttctgatgytgagttctgtcctgataagggagaagatatctacatgttga

SEQ ID NO: 270406 - DNA, 569 bp, Homo sapiens
tgtcaaaagtatacttaaatgatacctttgccgtgtactaaaattacttttcattatgacctatttgtacatcgtttgaactaaatatctcagcctagaaatgtaaacgtgttttgtttttgctctgcaggttaggtcagcagacgtctgaaacaaatacgattgcaagggtgaaagtgacatgatttacttaaatcaggcaatttctccatgaaagcattgaagcctcaactcataaagacactcttcagcagatgagctgtaaggttgtccagcatttgtcatattaggtgatttgaaaggaaagaacaattataaaaatgaatgtaattctctgttgaagaaaaaataatccagtttttgcagcagggggccacagattaaaaacagatttcacagcaattcggctgctataacattatacaattaaaacgyaagaagaaacagctctcgtgccaaagaagacagttgtgggaattagtttgtttggggacggggaggcaggttccccctgcagcatcaaaggttattttgtttcccctaggaacagcactgttgccataaacggt

SEQ ID NO: 270407 - DNA, 539 bp, Homo sapiens
cagtgtctttttctatgcgtttcacagtctactctttccccactgaactgtgtgtcttcatggggagtttgactttgcttctctctctggtgccttctggagcctggaggctctcaacttccatttcaactgcctgacctgggccagccatatctccatgacccatctcccacctggacccattgctagggtgggcggatcccagaggccaggctgttggatttctgcatgactggcctttttctctttgcagtttaattgtcgggacatcagactaacagtgacaataacacatctctgcaaaatataggccacagagcgctggtggaggtagaggtgggggcaggtgtatgtgtcttgttggagggtttcaaaaatggaagrcatttccctaaagtttgatcgtcaatgaccttgtcttctagtgatcttcctttaagtttcttgtgtgcatatctgatttctccaactaaactaattaatttatttgataacgcatactacttggttagcattgtgataaatttttaaaggtattt

SEQ ID NO: 270408 - DNA, 503 bp, Homo sapiens
ggagggagggagtaaaggctgaaaaaatacctattcagtgctatgctcactaccttggtgacagaatcacttgtaccccaatcctcagcrtcacacaatatatccctgtaacaaatctgcacatgtaccccttaaatctaaagaacaagaagaagagctaagcccatagaccttgggtgaggagcaagggaggagaagccttgattcctgggcttcaggaggctgagccaggagcagaagccagaacgagttcttgcagagctggggagtcgtgtgcagtttgcggtaagtcattctgacagcaagagctgtgggggttcagagcctgtaaagaacaaaagcaaaacattgctttttgaatataggagtaatacaaatttatttttgaacattcagaaatacagggaagtttcaagcagaaaataaaaactgcctgtaatcccgctatccagagataaaccttgttaaattttttatgcatttctttacaggcctgtgggcat

SEQ ID NO: 270409 - DNA, 503 bp, Homo sapiens
ggagggagggagtaaaggctgaaaaaatacctattcagtgctatgctcactaccttggtgacagaatcacttgtaccccaatcctcagcgtcacacaatatatccctgtaacaaatctgcacatgtaccccttaaatctaaagaacaagaagaagagctaagcccatagaccttgggtgaggagcaagggaggagaagccttgattcctgggcttcaggaggctgagccaggagcagaagccagaacgagttcttgcagagctggggrgtcgtgtgcagtttgcggtaagtcattctgacagcaagagctgtgggggttcagagcctgtaaagaacaaaagcaaaacattgctttttgaatataggagtaatacaaatttatttttgaacattcagaaatacagggaagtttcaagcagaaaataaaaactgcctgtaatcccgctatccagagataaaccttgttaaattttttatgcatttctttacaggcctgtgggcat

SEQ ID NO: 270410 - DNA, 461 bp, Homo sapiens
tgctgggattacaagcatgagcctccatgcttggccttgaagtgccttctaatcttacagttttagcctttctgagaatgtcacagaaacggaatcatacagtatgtattcttttgtgtctgactctttcattggcatgacacatttcagatgcatgcatggtgttatgtatatcagtagctcattcctttttatggctgagcagtattccattatatgaatgctttacagtttgtttytttgttcactagttcaatgacatttaggttgtttgtactttttgggtgattatgagtaaatacactacaaacatttggattctggtttctgtgagaacatacattttcatttctctagggctatcttttttttttttttttttttgagacaaggtatcgctctgtctcccaggctggagcgcagtggcacaatctcaggtcactgccgcccggcctccctgg

SEQ ID NO: 270411 - DNA, 586 bp, Homo sapiens
agacttggcgtgcgccctggaagacaccccggcctgtggagagactgccagggcctcaaatcacttaggaaagggcgcgggtccggttggaccttgaaggacaggcaggcgagggtactccagggaacagctaagcaaaggcggcgargaccccgggggaagaggtctagactggcttggattcagggtccacctgggtgggaggtgaggcagcagaatgggcaggtcagaccctgaagggtctccagtgtcagttttatccttaaggcctgggagatgcagaatagtctgagacagaactatgtttaaaaccctcgaaggccgcgttggagaagggaatccgctccagggtcgaaaatttaaacacacgtgggcggagtcttgcgcgcgccaaagaggaacattgggcgacgggcgcggcctggagagcgcatgcgcattcggaagggtcggcagttccccagtgggcagagtgggtggatgggaaggttctagctttttatttgaaattttatttatttttattttatttatttatttagagacggagtctcgccctgtcacccaggctggcgtgcagtggcga

SEQ ID NO: 270412 - DNA, 586 bp, Homo sapiens
agacttggcgtgcgccctggaagacaccccggcctgtggagagactgccagggcctcaaatcacttaggaaagggcgcgggtccggttggaccttgaaggacaggcaggcgagggtactccagggaacagctaagcaaaggcggcgaagaccccgggggaagaggtctagactggcttggattcagggtccacctgggtgggaggtgaggcagcagaatgggcaggtcagaccctgaagggtctccagtgtcagttttatccttaaggcctgggagatgcagaatagtctgagacagaactatgtttaaaaccctcgaaggccgcgttggagaagggaatccgctccagggtcgaaaatttaaacrcacgtgggcggagtcttgcgcgcgccaaagaggaacattgggcgacgggcgcggcctggagagcgcatgcgcattcggaagggtcggcagttccccagtgggcagagtgggtggatgggaaggttctagctttttatttgaaattttatttatttttattttatttatttatttagagacggagtctcgccctgtcacccaggctggcgtgcagtggcga

SEQ ID NO: 270413 - DNA, 580 bp, Homo sapiens
aggcctgaagtgaacccccaacaagccacagcagccttacagaagaggaacctgactattgaaagaaaaacaaacagaaggtaacagcaacaacatcaacaaaaaaagtcytgacaaaaacttcatccaagggtcagcagcctcaaagatcaaaaccagacaaactcatgaagatgagaaagaatcaaccaaaaaatgctgaacacacaaaaggccaaagtgcctcttctccaaatgatcacaacacctctccagaaagggcacaaatctgaacagagaaaaagattgatgaattgacagaagtaggcttcagaaggtgggtaataacaaacttcaaggaggtaaagaagcatgttctaacccaatgcaaagaagctaagaaccatggtaaaagattacaggagttgctaactacaataaccagtttagagagaaacataaataacctaatggagctgaaaacacagcatgagaaatttgtgaagcatacacaggtatcagtagccaaagcaatcaagcagaagaaagaatatcagagcttaaagactatcttgctgaaataaggcaggcagacaagatt

SEQ ID NO: 270414 - DNA, 659 bp, Homo sapiens
tttcagttggattatgtcacatttagcacaggtgactcattttggtttggtttggtctgtttggaactagtgtacaagctcagtttagaacgatggcctccaataactttgttttgttttgtttttttgagagggagtctcgctctgtcaccaggctggagtggaatagcacaatctcagctcacagcaacctctgcctcctgggttcaagcgattctcttgccacagccccctgagtagctgggattacaggcacgcgccaccaaacccagctaatttttgtatttttagtagacatggggtttcaccttgttggccatgatggtctccatctcctgaccttgtgatctgcccgccccggcgtcccaaagttctgggattacagacgtgagccaccaccccccgccaactttgttttttaaaaccctggctttttggtgaagttcttacgtaggtcagagtgtgaccaaaactctaggccttagtgscactctcaatttccattatttcgggtttttgtccttataatgttattcacaggttatggtgtcttcatagtcacatatgtctttgagtttctgtcaggccagtcaacgagagactatttaacattctagagatgactgcatgcaaacatttataatttttgagagaatacg

SEQ ID NO: 270415 - DNA, 570 bp, Homo sapiens
tgtgctgggcccagcaatatgtcaaaatctcctttgagggcagcacccaggaaagaaagttacatcacctagattcttgactcaattcatgtcacaacaccatctaagggcttggcctacacagacgagtggaattactcaaatgctaggcaaataggtctgtaaaaatcacacattcatgaagcttctgtggttagatttataattctgcacatgtctcagctttagttatgagagtcaacatctcctgtgagttatgtgcaagtacaggactcaccatttcaatgatatatcggatctgtgaatgagagtcccaatcccacccaaggacggtgtcctggtatgaaagtcacaggctcacsggcatgttgaattctttctcaagagtcactaccccacctgtggatgggatccacatatgagagtcacaattttaactttcgattgcctcttagtgtcagattcagaacctcaaggtgatcagtgtccctgtgggagggtgacaacttttacatttgggtgggtgtgcatataagaatcacaatgtcacctccgtgattggtactgcta

SEQ ID NO: 270416 - DNA, 605 bp, Homo sapiens
tgtttgacccacacatatgtcacaatacacaatgtatgcagggcctgggaaaaagaggagaatcacttcacttaggtgctgaccctagtgatacatcacagtcccattttgctcagagcccatccagtatgggacagtcacatcacctagatggtgggttcagcaatatgttacaacaccccctgaaaataggttttaggcaggatagttacatattgtacgtcagaggccaagagatatgttgcaatgctttctgtggtcaggactcacaaagtaaaaaagagtgccataatttaaaaactgggatcagctgtatgtcaaaatcaccctagatggcaggrgtcagttatgagaggagtcacatcacataggtgctgggccaagtgacatatcacagtcctgtcaaaaggtcctaggaagaaaactatagtcatatcacctaggtgatgggcctaaagatatgtcataataaaccctgtgagcagtgaccaggaggaagaattacatcacctatgtgctgggcccagtgaaaagtcactctcccttttgtgggcatggcccaggcagaagaggacagtcatgtaacctaggtcatggagatatat

SEQ ID NO: 270417 - DNA, 605 bp, Homo sapiens
tgtttgacccacacatatgtcacaatacacaatgtatgcagggcctgggaaaaagaggagaatcacttcacttaggtgctgaccctagtgatacatcacagtcccattttgctcagagcccatccagtatgggacagtcacatcacctagatggtgggttcagcaatatgttacaacaccccctgaaaataggttttaggcaggatagttacatattgtacgtcagaggccaagagatatgttgcaatgctttctgtggtcaggactcacaaagtaaaaaagagtgccataatttaaaaactgggatcagctgtatgtcaaaatcaccctagatggcaggagtcagttatgagagsagtcacatcacataggtgctgggccaagtgacatatcacagtcctgtcaaaaggtcctaggaagaaaactatagtcatatcacctaggtgatgggcctaaagatatgtcataataaaccctgtgagcagtgaccaggaggaagaattacatcacctatgtgctgggcccagtgaaaagtcactctcccttttgtgggcatggcccaggcagaagaggacagtcatgtaacctaggtcatggagatatat

SEQ ID NO: 270418 - DNA, 491 bp, Homo sapiens
cccatggacaatcaccatttatccatccagccatccatccagccacttatctaacaaatactaacagaatacggmacatggcgctcattctaggagctcaaaaaattgctgtagacaaggatggacaagatccttgcccttgtgtgctgactttcagttatttagagcctctatagatacatgtttgaatgtcacgaagtaatttatcagggttgcctaggttaaaaactgattgaggtggagaagatatggtggcaagagaagaactcttcggggaggtggcattttatctgggacagaaggttgaggattcagctatgaggaaagtatgagagagtatattccaggtgacggggaccacaagaacaaagccctggaatcagaaggagcttgatgtgtttgagaaacaaaataaaggccactgtggctgaattttggtcacatgagatgaggtagaggaggagatttgggacaggtcttttaggaccaaa

SEQ ID NO: 270419 - DNA, 583 bp, Homo sapiens
taagctgaaatgaggttactagggtggaccctaatccattataactggtgtctttataggaagagaaaatttggacacacagggagaaaaccacagggaggagatggccatctacaattccagaaaagcagcctcagaagaaaccaatctgcaaacatctttatctgcaactccctgcctccmaaatggtgagaaaattaatttctgctttttaagccaaccagactgcaggactttgttatggcagccccagaaaattaatacagacagcaaacggccagatgtcccacttgaaaaatggatccaggaacagaaaagtaaatgttgtgagaatgacgtttgatggcagggttttattctgcagttgcctacaggaatgacaacagaaaacttaagatggtatgttccaaaataagctctgtagaaaaccagtgtgactgctactttaaagaaaaattgaggagtgttttacttccagttatgtggtaaattttagaataagtgcgatgtggtgctgagaagaatgtatattctgttgatttagggtggaaagttctgtagatgtctattaggtccacttggt

SEQ ID NO: 270420 - DNA, 583 bp, Homo sapiens
taagctgaaatgaggttactagggtggaccctaatccattataactggtgtctttataggaagagaaaatttggacacacagggagaaaaccacagggaggagatggccatctacaattccagaaaagcagcctcagaagaaaccaatctgcaaacatctttatctgcaactccctgcctcccaaatggtgagaaaattaatttctgctttttaagccaaccagactgcaggactttgttatggcagccccagaaaattaatacagacagcaaacggccagatgtcccacttgaaaaatggatccagraacagaaaagtaaatgttgtgagaatgacgtttgatggcagggttttattctgcagttgcctacaggaatgacaacagaaaacttaagatggtatgttccaaaataagctctgtagaaaaccagtgtgactgctactttaaagaaaaattgaggagtgttttacttccagttatgtggtaaattttagaataagtgcgatgtggtgctgagaagaatgtatattctgttgatttagggtggaaagttctgtagatgtctattaggtccacttggt

SEQ ID NO: 270421 - DNA, 621 bp, Homo sapiens
aacaaaatttcccgcttaggttaaacggtggcacagttgtgttctgccgcatctcgagaaaagttacttaggctccgtgatcatcagttttcttatctctaaaatgggcatagtaggattaacctcttagggttcccagggatcttgggttagtctgcacacatttccaggaacatgccaggcacctggggagcagcacagctccttcacaaggtcctccatcatcatgaayggatgttagtaatcatgactgacacagatgctgcctaagggatgatgatggtggtgatggtggtgatgaaggtgtggttacgctgctgctgtgacgatgggatgacagcaaggatgcagaagaaagaacacggctctgccatgtcaggaccatttaggtcagtggttccgaactaggagtgatttcacccacaggggatgtttggcaatgcctggagacacttttagttgttcacactgttgagggaggtgctattggaatacagtgggtgggggccagggaccttgttaaccaccctgcaatgcataggaaagcccctgcaagaaagaatgatccagccaaaatgtccgtggggcccaggtcaaaaggccctggtctacgaggacggg

SEQ ID NO: 270422 - DNA, 621 bp, Homo sapiens
aacaaaatttcccgcttaggttaaacggtggcacagttgtgttctgccgcatctcgagaaaagttacttaggctccgtgatcatcagttttcttatctctaaaatgggcatagtaggattaacctcttagggttcccagggatcttgggttagtctgcacacatttccaggaacatgccaggcacctggggagcagcacagctccttcacaaggtcctccatcatcatgaatrgatgttagtaatcatgactgacacagatgctgcctaagggatgatgatggtggtgatggtggtgatgaaggtgtggttacgctgctgctgtgacgatgggatgacagcaaggatgcagaagaaagaacacggctctgccatgtcaggaccatttaggtcagtggttccgaactaggagtgatttcacccacaggggatgtttggcaatgcctggagacacttttagttgttcacactgttgagggaggtgctattggaatacagtgggtgggggccagggaccttgttaaccaccctgcaatgcataggaaagcccctgcaagaaagaatgatccagccaaaatgtccgtggggcccaggtcaaaaggccctggtctacgaggacggg

SEQ ID NO: 270423 - DNA, 415 bp, Homo sapiens
gggcactggtgtctccccctgcgcagggtagggtggagggcagaggggagaatgctgaagctctgctccctagcctacctcttccagactcttctagagtcaagagagctaaaagagkccgggtgcagtggctcacgcctgtaatcccagcactttgaaaggccgaggctggctgatcacttgaggtcaataattcgagtccagcctggccaacatggtgaaactctgtctctactaaaaatacaaaaattagccagccataaaagcaggtgcctgtaataccagctacccaggagactgaggcaggagaatcacttgaaccggggaggcggaggttgcagtgagctgagattgctccacgcactccagcctgagcaacaaagtgagacacggtctcaaaaaataaaaagaggcc

SEQ ID NO: 270424 - DNA, 563 bp, Homo sapiens
ctactcaggagattgaggcaggagaatcacctgaacctgggaggtggagattacagtgagcggagattgcaccactgcactccagcctgggcaacagagtaagattctgtctcaaaaaaaaaaaagatgcagaatactagtgtatagtagatggtgtgctcctatataatttttttaatatactaaatattagcacaggaaggayacattaaaaaaataataacctgggcaacatgtggggagaagtagatggcattgggccataggagtggattatattttacagttttcaaattctgaatcagataggtttagatggtattaaaattttaaatagccaaggcaaaagaagaaagattaagcagataattcagctcctttactggatcttaaacgtttataaacgttttccagtggagcttcctgtgttttctaagtataacatcactatctgccaaaatgatacatttactcccacatttcaaattgcatgactctcttgtttttcccttgcctaattgcacttgctggtatctctagttccatgcgaaataagagcaaaa

SEQ ID NO: 270425 - DNA, 384 bp, Homo sapiens
attttttttttcttggaatactggagaattattgtgttcctttgaaagtgtcataaaccttgcttttctgtgttttctctgtctttatgtgtctttatattgatttctgcacatctggagaaacagttgtttcatttttttaaatttacattcactggaggaagcttttttttttgttttttgaagttattaccatgatgtttatcacatagaaccatttggctttaattttggatttgtgcagagggaaagactggataagtttcttgagtataaacaaatatatacacacacacacacacacacagaaacatgtttctgtgtgygtgtgtatatatacacacacatatatatatatatatatatcacaaattttggcttagg

SEQ ID NO: 270426 - DNA, 528 bp, Homo sapiens
agggacagagttgggcgcggactcccccggcctcttgtagggggattagtggtgggggacttcaaaagggatagccgggagggctgcttagaggaggcattgttgaattttgtattctgttattttaccttcacatccgtggggtctyaatccccatgggtcttgattcgcttctaagtgtgcccctcgcccagcctgagccactccctgggtaccgcctgggctcccagctcctgccatctggggagtccacctcctcactaaccccagagggcttgtgtgacccatagattgggcttcccggctctaacgccctccacaccttcccatctccctggaatacaaatcgcccccttttccagcctacctcctgcatcccgcgtgcaggctgcgctctcccccactcattcagacttttccttagatgtctcctttaggaagccctttgacccaggctgggtcagaagccctctccgggcttccccggcgccctgcgtgtccttattaggactctgattgcatgtgttg

SEQ ID NO: 270427 - DNA, 528 bp, Homo sapiens
agggacagagttgggcgcggactcccccggcctcttgtagggggattagtggtgggggacttcaaaagggatagccgggagggctgcttagaggaggcattgttgaattttgtattctgttattttaccttcacatccgtggggtcttaatccccatgggtcttgattcgcttctaagtgtgcccctcgcccagcctgagccactccctgggtaccgcctgggctcccagctcctgccatctggggagtccacctcctcactaaccccagagggcttgtgtgacccatagattgggcttcccggctctaacgccctccacaccttcccatctccctggaatacaaatcgcccccttttccagcctacctcctgcatcccgcgtgcaggctgcgctctcccccactcattcagacttttccttagatgtctcctttaggaagccctttgacccaggctgggtcagaagccctctccgggcttccccrgcgccctgcgtgtccttattaggactctgattgcatgtgttg

SEQ ID NO: 270428 - DNA, 524 bp, Homo sapiens
  misc_feature (1)...(524): n = A,T,C or G
attgcttgcaacctaacacaaatacatattttttttccttttacacaaaaggcatctcaacgtacatgcygtttgacgcattgcttttgtttatttgttttaacttcatggtatgttgtggcaatctttccatatccatatatggaaagtgtcctcatgtttttaatagcttcgtggtattatagtgtatggatgtaccataatttatttaaccagtttcctctagatggacatttaggttgtttggcatttttgctcttacaagcaacactaatgaataaccttgcacagacatcatttcacacgtgtgcaagtggnnnnnnnnnnnnnnnnnnnnnnnnnnnnnnnnnnnnnnnnnnnnnnnnnnnnnnnnnnnnnnnnnnnnnnnnnnnnnnnnnnnnnnnnnnnnnnnnnnnnaattcatattcccaacagcaatagatggtatctgttttcccataatctcactagcagagtgttatcaaacttttggatttttgccaattcaataggtgaaaaatggc

SEQ ID NO: 270429 - DNA, 524 bp, Homo sapiens
  misc_feature (1)...(524): n = A,T,C or G
attgcttgcaacctaacacaaatacatattttttttccttttacacaaaaggcatctcaacgtacatgctgtttgacgcattgcttttgtttatttgttttaacttcatggtatgttgtggcaatctttccatatccatatatggaaagtgtcctcatgtttttaatagcttcgtggtattatagtgtatggatgtaccataatttatttaaccagtttcctctagatggacatttaggttgtttggcatttttgctcttacaagcaacactaatgaataaccttgcacagacatcatttcacacrtgtgcaagtggnnnnnnnnnnnnnnnnnnnnnnnnnnnnnnnnnnnnnnnnnnnnnnnnnnnnnnnnnnnnnnnnnnnnnnnnnnnnnnnnnnnnnnnnnnnnnnnnnnnnaattcatattcccaacagcaatagatggtatctgttttcccataatctcactagcagagtgttatcaaacttttggatttttgccaattcaataggtgaaaaatggc

SEQ ID NO: 270430 - DNA, 524 bp, Homo sapiens
  misc_feature (1)...(524): n = A,T,C or G
attgcttgcaacctaacacaaatacatattttttttccttttacacaaaaggcatctcaacgtacatgctgtttgacgcattgcttttgtttatttgttttaacttcatggtatgttgtggcaatctttccatatccatatatggaaagtgtcctcatgtttttaatagcttcgtggtattatagtgtatggatgtaccataatttatttaaccagtttcctctagatggacatttaggttgtttggcatttttgctcttacaagcaacactaatgaataaccttgcacagacatcatttcacacgtgtscaagtggnnnnnnnnnnnnnnnnnnnnnnnnnnnnnnnnnnnnnnnnnnnnnnnnnnnnnnnnnnnnnnnnnnnnnnnnnnnnnnnnnnnnnnnnnnnnnnnnnnnnaattcatattcccaacagcaatagatggtatctgttttcccataatctcactagcagagtgttatcaaacttttggatttttgccaattcaataggtgaaaaatggc

SEQ ID NO: 270431 - DNA, 403 bp, Homo sapiens
gggaggactctgaacacaggaggttttcagttagtatttgtttggtgaatggatcatgtctctatggtaggtagtctggcatgggtcaggagcacagccctggagacaaacttaatagtttgagttctaatagctggctgcctctctgggtctttatatcctcatctgaatcctgaggataataattacatctacacctctctgtcgaagaattgtgatgaatgaaaaagatgatgcataaagaaaaattaggatgctggtagctagctctcagtaattgttagatctgatgacatttgctcctactgctatcaagctgagtgtgtttctatgkataaaagctaacaaccaacaagctgagtgtgtttctatgtataaaaactaacaaccaacaaagggtgaa

SEQ ID NO: 270432 - DNA, 465 bp, Homo sapiens
ggcacattcaattatgcaaatgctgacagagcatgaggtcagtggctctcaaagtgggcatcagaattccctggagagtttgttagggcacagttttctgggwcctgcccccggagcttccgacttagtaggtcttgggggaacctgggaatgtgcatttcctatgaattgccagaggctgctgctggtctcgggactacactttaagcaacaatccgaaagaatctgggttcctgaatgatggccacacgcacagcctcacaaggtcattcaccccggagctactatgggaaagagaattcaatttgtttttattgtttaagctacactattgtcttacaataagatggccagtgaatttttgtttctcctttagccagtttgacttagatttctgttgcttgcaactgaaaatgccctgatcatcatatgtaacattgactgcttttgatttactcattcagt

SEQ ID NO: 270433 - DNA, 638 bp, Homo sapiens
tctgccgggatcctcagagttaaacaaaagcctcctccctgtgctctgaaatcacactccaggggctggcaggcgccttccaagtccttccctctccaaggacgagagcctgcctgcgtctcctctgccgtctcccctgccgtgggaggccctgaggcccccatcctgctgttctccatcccacccaccaaggggtccagatctcaaattcgccctttctcggcaagaactctgaaggtggcccggagcaggccactgtgagaagccatcaccccacgaccagggtcacccctgggaaaatctggggccgggcagccagatccctgaaggccagaggatgtctgggaagaaagggcgtggacggcacctgctgggcctgccacaaactctctgggtcccatgtccccgctgctcctcttccagggccgagtcagggagagacatcccagggagggcacccraaacagcacagcacccctcagtcaggaagcagtgccggctgccctggcccggaggaagaggcctggaagaaagtttgaagcctgtaatccccgtgtaatcgggctggctgcccacggggtctgcggccctgggtcctcggcccctcccatgctcttctcttgaacctcggcttcctc

SEQ ID NO: 270434 - DNA, 584 bp, Homo sapiens
ccttgtcatgaccttttctccttatccccttctaccactcctaagtctgtagaccagcactgcctaatggaataataaacatcttgcaattatgtgtgttgcacatacaacttaaattttctaatggtcacatgaaaagaaaataaaaacaaacagaggagatcaactttaaaaatgaattttatctaacccaatatatccaaaatattattatttcaacatgtcaagacgtaatccatgcaggaaattattaatgaaatatgttacattcatttttttcatcctaagtgtttgtaatcaagtggggactttacatttgcagcacatctcaggacacaccagccacactggcctcatttcagcagctccatcaccacatgtggatagcggctggtttaaaattatgatccttattagtaaggccctattgtcattctttttgttttctttcccactcctcactgatatcttcaactagtcataccttccttartattcatggcttctgaatgctgaagacactgcacaaaatttccccgggtgaaactgtcagaagctggacagtgctggacaggacagtaaga

SEQ ID NO: 270435 - DNA, 571 bp, Homo sapiens
aaatttttgtccatcctcagcaaatggacaacatttctagttctgacatagagctaaatttattcagcatgcaggctgatcttwttctggtgttccagtcacacactcttgatatgctattatcattgcaaccaatgtcagttaggtaggtacccggatggcacagcctgtgtcccttaagtgaaaaaaatctaattatcttctttcacatagaactgaggatcctggcatcccggaagcatgtatctcaaacacctgagctaaccactcatgttaaaaagaaatgaaaaatccacaacactgcatgtaattttagattcttctatgaaatagtggagagagtagatggtggtgtggtgtttgtctttgaatgtccttaattggcataagttgacaattctatttaagttctccagagttatatatgtgtaagtgcccacacacaatattgtatttaatccttaaaactgatctgcaatgtagacatatatagagctaaaaaatctccatgtctgggaaatactgattggatacttgcataatgacatgagatgtggaaattcttgaagac

SEQ ID NO: 270436 - DNA, 571 bp, Homo sapiens
aaatttttgtccatcctcagcaaatggacaacatttctagttctgacatagagctaaatttattcagcatgcaggctgatctttttctggtgttccagtcacacactcttgatatgctattatcattgcaaccaatgtcagttaggtaggtacycggatggcacagcctgtgtcccttaagtgaaaaaaatctaattatcttctttcacatagaactgaggatcctggcatcccggaagcatgtatctcaaacacctgagctaaccactcatgttaaaaagaaatgaaaaatccacaacactgcatgtaattttagattcttctatgaaatagtggagagagtagatggtggtgtggtgtttgtctttgaatgtccttaattggcataagttgacaattctatttaagttctccagagttatatatgtgtaagtgcccacacacaatattgtatttaatccttaaaactgatctgcaatgtagacatatatagagctaaaaaatctccatgtctgggaaatactgattggatacttgcataatgacatgagatgtggaaattcttgaagac

SEQ ID NO: 270437 - DNA, 571 bp, Homo sapiens
aaatttttgtccatcctcagcaaatggacaacatttctagttctgacatagagctaaatttattcagcatgcaggctgatctttttctggtgttccagtcacacactcttgatatgctattatcattgcaaccaatgtcagttaggtaggtacccggatggcacagcctgtgtcccttaagtgaaaaaaatcyaattatcttctttcacatagaactgaggatcctggcatcccggaagcatgtatctcaaacacctgagctaaccactcatgttaaaaagaaatgaaaaatccacaacactgcatgtaattttagattcttctatgaaatagtggagagagtagatggtggtgtggtgtttgtctttgaatgtccttaattggcataagttgacaattctatttaagttctccagagttatatatgtgtaagtgcccacacacaatattgtatttaatccttaaaactgatctgcaatgtagacatatatagagctaaaaaatctccatgtctgggaaatactgattggatacttgcataatgacatgagatgtggaaattcttgaagac

SEQ ID NO: 270438 - DNA, 553 bp, Homo sapiens
cgtctcattctctctcacctcatgtttacaagtgtggtccttgtgacttggaaactcctcctcttctgccaagtcacctctattctacctgggtctgagctgaatattcagtttcaaaggaaagttcccctggtctccctgaatagaaaaaaaagttctcctagtaaaggttctttgaacaccatggacctttctgtcctggcacatatcacatttttaattttayatttatttgggtggttatttgatcaatatatctctcctgcagtctgtgggctctcagagagtaatggccaatcttttgatgtttggtactatagactatcttggaccataggagatgttaaatattttctgaaagaagaaaaactgctccagctttcttggcttctcctaaaataacaagacttaaagcctcatccatgtatggtttgctaaggcaaagaggtgaggacattcatatttcatgatacagccgtattacaggattgaacaacagtgacattactatcttccaatatggtgccattagactacattgtctccaatttta

SEQ ID NO: 270439 - DNA, 563 bp, Homo sapiens
tccatctcagtctctagagatggtaaatctgtggatctgctcatcagttaacttctccaagatctcatagctcataagtggaaggaaaaggatttaaattcagatgtttatgcccccttagcctctttacattcctctagtgattttcaaatttttctcacccatgaagtccattgtttcagctaaatcttacataaaagcatgcaaaccagytaaaatcagaatggatctcttcctaacacagcttcagaatcactaaagcacatcaggctgattttcaccaaagaaaaccttaagccagaagcctggataaactccttaaaagcctctgttagagtcataatatagtagtcacttgctctagaacattctagaatgttctgaaatattttcgaatgcttgagaaaactctgtacttatggaaatgtcccatgttgcactatccaatatgatagtcactaggcacatgggctgttgaacaatagaaatatggctaatgtaattgagaaactgaaaatgtaatttacatgtacatttaagatgaaatagccagacatggctac

SEQ ID NO: 270440 - DNA, 556 bp, Homo sapiens
tcagacaggactctttttttgctggaggcaatttctgatggtgatgatgattctgctaagccccatcagttctctctcttccccagcctgaaaagtcagtgcccagtttgtcaccgttagttaagatccactgaattttttgctaaaaatgtgcattcattcaatacatatttacagaatatcttttctcctagatttgcatggtattcagagatttctctgtgggaacttcttgggtcagaacataatccgcatatccactgttatctcccagaccctcaatagtgcaggaaatcatgaattgtaattctcaatgtcattgagagttgcaagccttgtgagagttgcagagccttcaggacagcatactaccatgtagtgttgggtgccagctctaggccacgtagcccagctgtgaattctggctgtgtgacctgccagtgctgtgactgttggtaagtgagttattttctctgtggctcaggrtagtgaatactgaaggtgctgcctaaacctccttgaataatccccttaatcagttgggtgtgtccatggt

SEQ ID NO: 270441 - DNA, 599 bp, Homo sapiens
gggacctcatgcacaatccagtggaaatcactaatatgatgcagtcacagcttgtggatgggaattttaagagcctttatttctaagaactcctgctcagagagagtgtggcttctttttatagctagtgcacaaggcaggtttaggtggtggttcttcttagaatgcaatttagtgaggcatccccagtgtattcctttgatagaaatatatttatcaagcacctcttttgggccagacactgtgctggggtacagtggtgaacagagtagacactggtgaatgtctcctcacagagcttagagtctagcttcattcaaaaaactcatggyccagcaagacagcatcatagagaaaagttgctcccgaccggacatgtgacattaagtcaaaggacacagtcagcccaaggtaccctcaccctctttgctccatctagcgttctccattagccacctaactagaagcagggggcccaggagccccggtgaggcagtctgtagcctccaaggcactgagcagcaagaagggagcagagtgaatctccagggcaatgaaagataatggcacacagccatgacccggtgatgatgaataac

SEQ ID NO: 270442 - DNA, 647 bp, Homo sapiens
gtatagcctgtagaactatgtatgagtcaattaaacttcttttcttcgtaaattacccagtttcaggtagttctttatagcagtgtgagaacagactaatacaagcatcagcaaaatttttctgtaaaggaccagatagtaaatattttaaactttacaggccatatggtctctgtcacaactatgactcgattctgtcattatagaatttcacacaatgaggtgtgaaagcagccacagacagtatgtaccacataaatgtggctgtgttccaataaaactttatttacaaaaacaagctgcaggcctgatttgactcataggccatggttttccaattcctggcctacatggctgattgtacccctaagtaagccatggactgagccggcaaaagtctccattacagtgatatgagggaagattggctacgtttatgactgatacaaagctagaagaaatatccagtatgatggatgacaaagtcaagttttaaaatcatgctgaggagccaaaactattagtctaaattaacttatattgttatttgattaacaaaacattatcacaaccaagctaagctacattctaccaaaraagtaaagagtaagttggatttagcaataattgctcaaaaacaacctggt

SEQ ID NO: 270443 - DNA, 549 bp, Homo sapiens
tgcctgaactttcaacataatctgcttcgttatttttggagttatttgacttatgcacatttgtctagcttattctttcttaattactctgataaaagcaagtacatatttctatgtcatattcaagtacttgattgaagaaaataaaaatattcatttgtgtgggaagtgctctagttttgtaataaaaggacagaccctggagccaacagcctaggttcaaatttagggtccctcactcaccagctgtatggacttggaaaagtcacttaatctctatgaacttctatcacctcatttgtaaaattggattattagagcctattggggatttttttgttttgttttatattatatgagttatttgatgtagggcacttagcatggcacctagtgatatgggttggstttgtgtctccacccaaatctcatgtagatttgcagaagaggggcctggtggcaggtcattggttcatggaggcagattgcccccttgctattcttgtgatattaagttcgcatgacatctggttgattaaacgtatgtag

SEQ ID NO: 270444 - DNA, 506 bp, Homo sapiens
caaggtgacaggagagagaagaagaagaatcaaatgaagggggaagccctttataaaaccaccagatctcatgagaacttactcactatcccatgaatagcataggagaaattgcccccatgattgaattacatgcccactgggtctctcccatgacatgtagggattatgggaattacaattcaagatgagatttgggtgggaacacagccaaaccatatcattctgcccttggctcctcccaaatctgatgtcctcacatttcaaaacacaatcatgcctttccaacaatcccctaaattcttaactcattccatcattaactcagaagtccaagtccaaagtctcatttgggacaaggcaagcctcatctgcttatgagcctgtaaaatcagaagcaagttagttacttactagatacaatggaggtacasacattgggtaaatacacccaaatgggagaaactggccaaaacaaaggggctacagaccccaggtaagtctaa

SEQ ID NO: 270445 - DNA, 668 bp, Homo sapiens
ggttataataccaagttttatgacttaaaagacattcttgctaagaatctatttattaaagtactaatagataaatataagtgagcagccgaaaaatgatggaactcacccttcttccacttctgtttggtttcttcatgcaccaccttaaaaggcaaaataaatgatgatatgatccatgctgacaaaacactgcccaccacccattcaaaggaaattatcataaaatggtttggaatatggatttatacccattcttattaatcaaaattttttctctatgtctaacttgtacctggagataccatctaatgatagtacatggccaccacaattagcaacacatcaaatattgtttattgtaacttaatttcttcctttaaaaattgcttaaaaattgtgtatgyttcataagatactcaaaacacaccgtttgacattgtgtaagtggctaatcaaatgtaattctatcagtggcatatgcttcaaatcacttttgtagatgggtgtacaattttaaaagtgtagggacacctaagcttatgtatataatatactaattaactcgaaatctgccatgcagtagcttctcaataaacagcaactgttattaacaatttcctatttattgggcatttactgcatataatttttttacaaatcttaaa

SEQ ID NO: 270446 - DNA, 639 bp, Homo sapiens
atatctttgacagggtatggcaaggcctggcacagaggaggtaataattcattcatggagtatcaggcacaatggacactctggatgcagctataaacaaaacagactgaagtcccctgcccttgggagatactagcccagcagtgatagatagaaaggtagacagaggtggacaggactccccagctagtccccaaagtgcagccagggtggacaccagaactctagggcaacatgggaagtctctggccaagttcctggtgaaaggaaagctatgaattgtcctgttgccaagacccgcctgaatgctgcctgtgcactgtcgctatagcctaattagtggcagagcatgccttgatccctcccgctccccagtatgatgggggctcagaacagcagaacasctgtgcagcctcacactacagtgtctttggacacacacgccagccagccccatagtgaggaccaaagacacaaggagatcatttccggtcaaattcatcaattgtaatgaaatctccacgtttgctgctagagactgatcccacagatacttgcagatgataaagccagaccaggaggctagagccccgtttattacgaagaggctcctgcaactttttgaaacggcaacccaca

SEQ ID NO: 270447 - DNA, 595 bp, Homo sapiens
tgcataagtggacaccagccccttaccaacaccgtcgttatacacagaacctcggacaggcctcacgggctctgcatggactggtccctggccctgttgctcccctcccttctcagggctacagtcacactagcacctccagttctttgagggccttttgtctggacactctttcccctctccggcatctgttcacctccctttcctcttttaggtcacatgtctaatgccctctcctgacagaggctgtttctccctttccagggctaagtctcccacttgcaaaaccttccctttgttgcatcatataggcatattgyaggcagtgtgtgtgtgtgtgtgtgtgtgtgtgtgtcattataaattagttaatgagaatctcactcattggaacccatcttcccagaaacaagcctaaatcctctcagtatcattatcctcaatttatcatctcttctcactctgttttcaggctctccatcaagacaacagtgggtcccagcagttacactcacaacatgctctccagacatttgcagtcctgatttttagccttgctcgagtacccaatatctctctccgaacttacctcaaa

SEQ ID NO: 270448 - DNA, 528 bp, Homo sapiens
tgtaatcttggcataattacttattcttggagtttgtcaatttttttggatttcttacatagataatcattttatctgcaaactaagttttgtttcttactttccaatcactatacctttgttttcttttcttatcttactgcattagctaggacttccaggacgatgttgaaaarcaatggtaagagggcacatccttgccttgctactgatcttatcaggaaagctagtttcctaccatgaagtgtgatgttagttgtaggctttttgtagttgttctttattaagttgaagaagtttctgtctgttactagtttgttgagagttattatgagtattgattttgccaagtgctttttctgcatctattgatatgtgcatgtgatatctattgatatgtgcatatgagcctcctggtcatcatcccaggcttagctcacaaaagttgtgagcagggaggccaccaggaatgtggggcaggtattatgcttcccattttacagaaagtaatgccagaagaaaacagtg

SEQ ID NO: 270449 - DNA, 450 bp, Homo sapiens
tctggtctttgttaaatgtgcctctctcattggaacccacagttacagaaagattctgggattcccatcagaactcacaaaagaccataggtccactagagattgtcagaggaaaaataaaaaggctttaaaggtcattggttttaaccagaaaaaaaaaaaaaaaaacaattctaggtaatgcaggccagttaagttggtttgacagccaacctcagcagcagcagcagcagcagcagcagcagcttccaatatctttctagattggttcattttccaagatctgtaatttttaaatgaggagtaggatcaaaggtcaatctcacttcctggagcagaagcttaagtatgggctgtaatcatatcacygagcaaacttcaaaagctgctggtgcagtgacagcaaccacctgtctatcttcaaaccagatgaatggcttttctgatgca

SEQ ID NO: 270450 - DNA, 509 bp, Homo sapiens
tgaaatgccctattttccactataacattacaattcaccagattccttccccttcatatagttatcaatgtatccatccatcatccatccatccatcctccatctatgcattcatccttccatccatcatcyatccttctatctagccagttcatttcacaataatctgagtttggaccctgtgtgaccttggataagtggctttatttctctaatcttctattatgtcatttgtaaaataggaatattaaaagcatagcatataggattgctgttaggtttaaacaagcaacaaatgtaaagaaagccggtgcgcgctcactctctaactatatttatattagttccattgcttattttcttccattcaaaatgctttaaaatgttggaatcatttctggcacttttctctttcttccccatcatctcattcatgatcaaccatctaaaattggctctttcttttccatactcccagtaactcatacaagctttcaagctggacttct

SEQ ID NO: 270451 - DNA, 509 bp, Homo sapiens
tgaaatgccctattttccactataacattacaattcaccagattccttccccttcatatagttatcaatgtatccatccatcatccatccatccatcctccatctatgcattcatccttccatccatcatctatccttctatctagccagttcatttcacaataatctgagtttggaccctgtgtgaccttggataagtggctttatttctctaatcttctattatgtcatttgtaaaataggaatattaaaagcatagcatataggattgctgttaggtttaaacaagcaacaaatgtaaagaaagccggtgcgcgctcactctctaactatatttatattagttccattgcttattttcttccattcaaaatgstttaaaatgttggaatcatttctggcacttttctctttcttccccatcatctcattcatgatcaaccatctaaaattggctctttcttttccatactcccagtaactcatacaagctttcaagctggacttct

SEQ ID NO: 270452 - DNA, 509 bp, Homo sapiens
tgaaatgccctattttccactataacattacaattcaccagattccttccccttcatatagttatcaatgtatccatccatcatccatccatccatcctccatctatgcattcatccttccatccatcatctatccttctatctagccagttcatttcacaataatctgagtttggaccctgtgtgaccttggataagtggctttatttctctaatcttctattatgtcatttgtaaaataggaatattaaaagcatagcatataggattgctgttaggtttaaacaagcaacaaatgtaaagaaagccggtgcgcgctcactctctaactatatttatattagttccattgcttattttcttccattcaaaatgctttaaaatgttggaatcatttctggcacttttctctttcttcyccatcatctcattcatgatcaaccatctaaaattggctctttcttttccatactcccagtaactcatacaagctttcaagctggacttct

SEQ ID NO: 270453 - DNA, 509 bp, Homo sapiens
tgaaatgccctattttccactataacattacaattcaccagattccttccccttcatatagttatcaatgtatccatccatcatccatccatccatcctccatctatgcattcatccttccatccatcatctatccttctatctagccagttcatttcacaataatctgagtttggaccctgtgtgaccttggataagtggctttatttctctaatcttctattatgtcatttgtaaaataggaatattaaaagcatagcatataggattgctgttaggtttaaacaagcaacaaatgtaaagaaagccggtgcgcgctcactctctaactatatttatattagttccattgcttattttcttccattcaaaatgctttaaaatgttggaatcatttctggcacttttctctttcttccccatcatctcattcatgatcaascatctaaaattggctctttcttttccatactcccagtaactcatacaagctttcaagctggacttct

SEQ ID NO: 270454 - DNA, 570 bp, Homo sapiens
ttttccatactcccagtaactcatacaagctttcaagctggacttctcaccttgggtgtttcctgattcartccatcttccacactgcccccagattaatttttctgaaatacattttccattatgttattcccttctttaaaactttcactgggtcttaccacctattttttagaaggttttttcttcttgtactttttcaagtttcttgtatttttcattatagatgtaacgcaagtgtatcaatggagacttgtaaaccagaggggaaaaaacaactctgaatcccaacgcatgaacaaaattgcagttaggattttgataaattcctttcagattccacccttctttttctttatttagaggcttgttttgctttgtaggaatcctactgcacacacaatctcctgtttagtattcaattctcattcatatgatttttccatgccattatcatcatctttataaccatcctctttaatggttatgtaatattctattgagctgcctaacctgttttcatttgctggaaatctaacctatttgcagagcatttaggagagtcaggca

SEQ ID NO: 270455 - DNA, 570 bp, Homo sapiens
ttttccatactcccagtaactcatacaagctttcaagctggacttctcaccttgggtgtttcctgattcaatccatcttccacactgcccccagattaatttttctgaaatayattttccattatgttattcccttctttaaaactttcactgggtcttaccacctattttttagaaggttttttcttcttgtactttttcaagtttcttgtatttttcattatagatgtaacgcaagtgtatcaatggagacttgtaaaccagaggggaaaaaacaactctgaatcccaacgcatgaacaaaattgcagttaggattttgataaattcctttcagattccacccttctttttctttatttagaggcttgttttgctttgtaggaatcctactgcacacacaatctcctgtttagtattcaattctcattcatatgatttttccatgccattatcatcatctttataaccatcctctttaatggttatgtaatattctattgagctgcctaacctgttttcatttgctggaaatctaacctatttgcagagcatttaggagagtcaggca

SEQ ID NO: 270456 - DNA, 570 bp, Homo sapiens
ttttccatactcccagtaactcatacaagctttcaagctggacttctcaccttgggtgtttcctgattcaatccatcttccacactgcccccagattaatttttctgaaatacattttccattatgttattcccttctttaaaactttcactgggtcttaccacctattttttagaaggttttttcttcttgtactttttcaagtttcttgtatttttcattatagatgtaacgcaagtgtatcaatggagacttgtaaaccagaggggaaaaaacaactctgaatcccaaygcatgaacaaaattgcagttaggattttgataaattcctttcagattccacccttctttttctttatttagaggcttgttttgctttgtaggaatcctactgcacacacaatctcctgtttagtattcaattctcattcatatgatttttccatgccattatcatcatctttataaccatcctctttaatggttatgtaatattctattgagctgcctaacctgttttcatttgctggaaatctaacctatttgcagagcatttaggagagtcaggca

SEQ ID NO: 270457 - DNA, 479 bp, Homo sapiens
tctttatttagaggcttgttttgctttgtaggaatcctactgcacacacaatctcctgtttagtattcaattctcattcatatgatttttccatgccattatcatcatctttataaccatcctctttaatggttatgtaatattctattgagctgcctaacctgttttcatttgctggaaatctarcctatttgcagagcatttaggagagtcaggcatgtggcaactacttcctaagcgttggctattattactatttcacatacaatgcataaaacatatacaatattcatatatcatttaatataatgtattttgtacatattttcctgtatttacctctgtttaacttctcagatgtgtattacttccccaaagtgcatgactatttttatgcctttggatactgtattagtccattttcaaactgctatgatgaaatacccaagactgggtaatttataaagaaaaagagtttt

SEQ ID NO: 270458 - DNA, 479 bp, Homo sapiens
tctttatttagaggcttgttttgctttgtaggaatcctactgcacacacaatctcctgtttagtattcaattctcattcatatgatttttccatgccattatcatcatctttataaccatcctctttaatggttatgtaatattctattgagctgcctaacctgttttcatttgctggaaatctaacctatttgcagagcatttaggagagtcaggcrtgtggcaactacttcctaagcgttggctattattactatttcacatacaatgcataaaacatatacaatattcatatatcatttaatataatgtattttgtacatattttcctgtatttacctctgtttaacttctcagatgtgtattacttccccaaagtgcatgactatttttatgcctttggatactgtattagtccattttcaaactgctatgatgaaatacccaagactgggtaatttataaagaaaaagagtttt

SEQ ID NO: 270459 - DNA, 479 bp, Homo sapiens
tctttatttagaggcttgttttgctttgtaggaatcctactgcacacacaatctcctgtttagtattcaattctcattcatatgatttttccatgccattatcatcatctttataaccatcctctttaatggttatgtaatattctattgagctgcctaacctgttttcatttgctggaaatctaacctatttgcagagcatttaggagagtcaggcatgtggcaactacttcctaagcgttggctattattactatttcacatacaatgcataaaacatatacaatattcatatatcatttaatataatgtattttgtacrtattttcctgtatttacctctgtttaacttctcagatgtgtattacttccccaaagtgcatgactatttttatgcctttggatactgtattagtccattttcaaactgctatgatgaaatacccaagactgggtaatttataaagaaaaagagtttt

SEQ ID NO: 270460 - DNA, 479 bp, Homo sapiens
tctttatttagaggcttgttttgctttgtaggaatcctactgcacacacaatctcctgtttagtattcaattctcattcatatgatttttccatgccattatcatcatctttataaccatcctctttaatggttatgtaatattctattgagctgcctaacctgttttcatttgctggaaatctaacctatttgcagagcatttaggagagtcaggcatgtggcaactacttcctaagcgttggctattattactatttcacatacaatgcataaaacatatacaatattcatatatcatttaatataatgtattttgtacatattttcctgtatttacctctgtttaacttctcagatgtrtattacttccccaaagtgcatgactatttttatgcctttggatactgtattagtccattttcaaactgctatgatgaaatacccaagactgggtaatttataaagaaaaagagtttt

SEQ ID NO: 270461 - DNA, 604 bp, Homo sapiens
tgagttagtgcccgagacccactgtgtacaagagtttccttaacctcaggggtttgggaagagccctctgaaactgaaacacactacaatctcagagactttcatttgtgaaaaaacaaaacccaatctggtccacttctctaactccagagttttccaaaatattagtttatacaagtaattttttgattcccctaattttttttccccagaacccatattaacctcccatggaaccagtatctcttcagaacacattttgcaaaacgctatgctggaaaactgaccagggaggactgaatcagacacttacgtggctttgcgtgatctcctgttgctacctggraaggctttaagaatcagagggagcccagcggactcctgtcacctgggagctggctacctgggagcctgggtcccagccagagccagttcaagtcctgacttctgccccagcccaaagcgtggttgcttttacagactggagacctatgaagacacgtacagcccctcagctttgcctccataaagcctccccttccagcacccaaactcgtgcactgggcctggtctggggaccagctctaggctgctttccttgttt

SEQ ID NO: 270462 - DNA, 604 bp, Homo sapiens
tgagttagtgcccgagacccactgtgtacaagagtttccttaacctcaggggtttgggaagagccctctgaaactgaaacacactacaatctcagagactttcatttgtgaaaaaacaaaacccaatctggtccacttctctaactccagagttttccaaaatattagtttatacaagtaattttttgattcccctaattttttttccccagaacccatattaacctcccatggaaccagtatctcttcagaacacattttgcaaaacgctatgctggaaaactgaccagggaggactgaatcagacacttacgtggctttgcgtgatctcctgttgctacctggaaaggctttaagaatcagagggagcccagcggactcctgtcacctgggagctggctacctgggagcctgggtcccagccagagccagttcaagtcctgacttctgccccagcccaaagcgtggttgcttttacagactggagacctrtgaagacacgtacagcccctcagctttgcctccataaagcctccccttccagcacccaaactcgtgcactgggcctggtctggggaccagctctaggctgctttccttgttt

SEQ ID NO: 270463 - DNA, 627 bp, Homo sapiens
caacagtaaaatttcaacacaaacaaaaagtagagagttgacaaaagttgaccaacaacactttatcagtgaagacaaaaatgccatgtatgtattactaacttcctttcacaaacggtagcacatttcatctctatgctatagaaaggccattccatcagaacaaagaatcctctgtcccaagagggkgtggtggacaagctcagaacaacactgtctatcactctaccccatttgaacgtttttctatagcactatcactacgcaaaactaccatatttatttatttttcttgtttcctgtctttctctgctatcagaacacaaactccacgggggcaggcaatcttgtctttcttaatcactgctgcctccctcaatgctgagaattgtgcttgagatattgtcttcccccagtaaatatttgttaagtgaatgagttaaccaaatagggaatgcacagataggcacggccaccaggtggcgggacggtgcacacagtggtgaggaccctgtcaagggagagagtgtctgtccaccagaacaggattggagggcaaaggccatgctctcgctgctctgtggctagtacggaaaatggagctgggtacataataagcactcaaca

SEQ ID NO: 270464 - DNA, 627 bp, Homo sapiens
caacagtaaaatttcaacacaaacaaaaagtagagagttgacaaaagttgaccaacaacactttatcagtgaagacaaaaatgccatgtatgtattactaacttcctttcacaaacggtagcacatttcatctctatgctatagaaaggccattccatcagaacaaagaatcctctgtcccaagagggtgtggtggacaagctcagaacaacactgtctatcactctaccccatttgaacgtttttctatagcactatcactacgcaaaactaccatatttatttatttttcttgtttcctgtctttctctgctatsagaacacaaactccacgggggcaggcaatcttgtctttcttaatcactgctgcctccctcaatgctgagaattgtgcttgagatattgtcttcccccagtaaatatttgttaagtgaatgagttaaccaaatagggaatgcacagataggcacggccaccaggtggcgggacggtgcacacagtggtgaggaccctgtcaagggagagagtgtctgtccaccagaacaggattggagggcaaaggccatgctctcgctgctctgtggctagtacggaaaatggagctgggtacataataagcactcaaca

SEQ ID NO: 270465 - DNA, 627 bp, Homo sapiens
caacagtaaaatttcaacacaaacaaaaagtagagagttgacaaaagttgaccaacaacactttatcagtgaagacaaaaatgccatgtatgtattactaacttcctttcacaaacggtagcacatttcatctctatgctatagaaaggccattccatcagaacaaagaatcctctgtcccaagagggtgtggtggacaagctcagaacaacactgtctatcactctaccccatttgaacgtttttctatagcactatcactacgcaaaactaccatatttatttatttttcttgtttcctgtctttctctgctatcagaacacaaactccacgggggcaggcaatcttgtctttcttaatcactgctgcctccctcaatgctgagaattgtgcttgagatattgtcttcccccagtaaatatttgttaagtgaatgagttaaccaaatagggaatgcacagataggcacggccaccaggtggcgggacggtgcacacagtggtgaggaccctgtcaagggagagagtgtctgtccaccagaacaggattggagggcaaaggccatgctctcgctgctctrtggctagtacggaaaatggagctgggtacataataagcactcaaca

SEQ ID NO: 270466 - DNA, 555 bp, Homo sapiens
ccaaggtcaggaccactataataagttggggaaagttaatcggtggaagcaagttaagcacagaaaactagattttaatgattctgattgtgtgacagctgtcagaatttaaccaaatgagacccagaaaaggcaaatctaagactctgttgttttttgaatctgagcttctgtggatttaaaatgacgggcgtgcattttccattaggtcggggatgatgtctgtccctctctctcggatactcattgcctgcacattgcctggcactgagcagatatttaatagacaggagtgggatgcatcactaagagagtgcaggtgcatcgtagagttcttccttagccctgcaagtctgctgtttcgaatacttacatttactgcagcaaaacaaaatatccaacagtacatctcttgtacctcagcatccatctcccagagcagtggttctcaaagtgcagtcctcttttgcatccccattcagtcccaacactccaaatggacatagaaatgrtctccgctggtcctgtttccaatgcataaaagttgaaagtgag

SEQ ID NO: 270467 - DNA, 523 bp, Homo sapiens
aaagggccaggattggtgctgaggggagcccagtaaagaggaatggaagatctggatgttgacgggtgcctgggggcagaaaacagaggaatgaattctrtttccccaaaattcacatgctgatgtcctcaccaccagtacctcagagtgtggctgcatttggaaataggggcaggagagaggtaatcaacaaaaaattaagtcatatgtgcaagtccaaatttagtatgactgtagtatgactgctgcctctccttataagaagaggaaatttggacacagacatctacagaggaagagcacacgatgaggggaggagcagtggccagctatctgcaggctaaagacagaggcctaagaagaaatcaaccctaccaacactttgatcttggactcctggcctccagaaccatgagaacataaatttctgttgtttaagccacccagtactttgttatggtagccctagcaaacgaacacaggcagactcttataacacccacatcacagtccagacgctgag

SEQ ID NO: 270468 - DNA, 523 bp, Homo sapiens
aaagggccaggattggtgctgaggggagcccagtaaagaggaatggaagatctggatgttgacgggtgcctgggggcagaaaacagaggaatgaattctatttccccaaaattcacatgctgatgtcctcaccaccagtacctcagagtgtggctgcatttggaaataggggcaggagagaggtaatcaacaaaaaattaagtcatatgtgcaagtccaaatttastatgactgtagtatgactgctgcctctccttataagaagaggaaatttggacacagacatctacagaggaagagcacacgatgaggggaggagcagtggccagctatctgcaggctaaagacagaggcctaagaagaaatcaaccctaccaacactttgatcttggactcctggcctccagaaccatgagaacataaatttctgttgtttaagccacccagtactttgttatggtagccctagcaaacgaacacaggcagactcttataacacccacatcacagtccagacgctgag

SEQ ID NO: 270469 - DNA, 523 bp, Homo sapiens
aaagggccaggattggtgctgaggggagcccagtaaagaggaatggaagatctggatgttgacgggtgcctgggggcagaaaacagaggaatgaattctatttccccaaaattcacatgctgatgtcctcaccaccagtacctcagagtgtggctgcatttggaaataggggcaggagagaggtaatcaacaaaaaattaagtcatatgtgcaagtccaaatttagtatgactgtagtatgactgctgcctctccttataagaagaggaaatttggacacagacatctacagaggaagascacacgatgaggggaggagcagtggccagctatctgcaggctaaagacagaggcctaagaagaaatcaaccctaccaacactttgatcttggactcctggcctccagaaccatgagaacataaatttctgttgtttaagccacccagtactttgttatggtagccctagcaaacgaacacaggcagactcttataacacccacatcacagtccagacgctgag

SEQ ID NO: 270470 - DNA, 565 bp, Homo sapiens
ataggtacttttcaaaagaagacatacacacggccgacaagcatatgaaaaaaagctcagtaccgttgatcattagagaaacgtaaatccaatccacaaggagataccatctcacactagttagaatgactattactaaaaagcgaaaaaataacatgaggccaggcatagtggctcacgcctataatcccagcactttgggaggctgaggcaggtggatcacttgaggtcaggagttcaagaccagcctggccaacagggtgaaaccctgtttctactaaaaatgcaaaaatcagcagggtgtggtggcatgtgcatgtaatcccagctacctgggaggctaagccaggagaatygcttgaacatgggaggtggaggttgcagtgagccgagatcacaccactgcagtccatcctgggtgacacagtgagactcagtctcaaataaataaataacaaatgctagagaggtcatggagaaaagggaacacctatttactgttggtcggaatgtaaatttgttcagccattgtggaaaacggtgtggcagttcctcaaagagctga

SEQ ID NO: 270471 - DNA, 565 bp, Homo sapiens
ataggtacttttcaaaagaagacatacacacggccgacaagcatatgaaaaaaagctcagtaccgttgatcattagagaaacgtaaatccaatccacaaggagataccatctcacactagttagaatgactattactaaaaagcgaaaaaataacatgaggccaggcatagtggctcacgcctataatcccagcactttgggaggctgaggcaggtggatcacttgaggtcaggagttcaagaccagcctggccaacagggtgaaaccctgtttctactaaaaatgcaaaaatcagcagggtgtggtggcatgtgcatgtaatcccagctacctgggaggctaagccaggagaattgcttgaacmtgggaggtggaggttgcagtgagccgagatcacaccactgcagtccatcctgggtgacacagtgagactcagtctcaaataaataaataacaaatgctagagaggtcatggagaaaagggaacacctatttactgttggtcggaatgtaaatttgttcagccattgtggaaaacggtgtggcagttcctcaaagagctga

SEQ ID NO: 270472 - DNA, 565 bp, Homo sapiens
ataggtacttttcaaaagaagacatacacacggccgacaagcatatgaaaaaaagctcagtaccgttgatcattagagaaacgtaaatccaatccacaaggagataccatctcacactagttagaatgactattactaaaaagcgaaaaaataacatgaggccaggcatagtggctcacgcctataatcccagcactttgggaggctgaggcaggtggatcacttgaggtcaggagttcaagaccagcctggccaacagggtgaaaccctgtttctactaaaaatgcaaaaatcagcagggtgtggtggcatgtgcatgtaatcccagctacctgggaggctaagccaggagaattgcttgaacatgggaggtggaggttgcagtgagccgagatcacaccactgcagtccatcctgggtgacacagygagactcagtctcaaataaataaataacaaatgctagagaggtcatggagaaaagggaacacctatttactgttggtcggaatgtaaatttgttcagccattgtggaaaacggtgtggcagttcctcaaagagctga

SEQ ID NO: 270473 - DNA, 565 bp, Homo sapiens
ataggtacttttcaaaagaagacatacacacggccgacaagcatatgaaaaaaagctcagtaccgttgatcattagagaaacgtaaatccaatccacaaggagataccatctcacactagttagaatgactattactaaaaagcgaaaaaataacatgaggccaggcatagtggctcacgcctataatcccagcactttgggaggctgaggcaggtggatcacttgaggtcaggagttcaagaccagcctggccaacagggtgaaaccctgtttctactaaaaatgcaaaaatcagcagggtgtggtggcatgtgcatgtaatcccagctacctgggaggctaagccaggagaattgcttgaacatgggaggtggaggttgcagtgagccgagatcacaccactgcagtccatcctgggtgacacagtgagactcagtctcaaataaataaataacaaatgctagagaggtcatggagaaaagggaacacctatttactgttggtcggaatgtaaatttgttcagccattgtggaaaacgstgtggcagttcctcaaagagctga

SEQ ID NO: 270474 - DNA, 590 bp, Homo sapiens
acccctccttggtgatgtttttggtctagttgcctttatgacataaagtaamctatttaatgaactatgtatttcaatctatagtaggcagagctttttactgactttataaaccccttattaataaagcacccacacactcacacacacacatgcacacacacacacacacacacagaaaacttctgatatattaagggaaaatttactgggagagcaggtcctcaaatcaacagtttcacttgagattcaggggctcaaacatgatggaacaggtaattaccagtgcttgaaatgggtacttaagcaaaattgcatagaaggaagtattttctctgttacataatataaatgagacctatttatttaccacttcatcaaactttgtagccagatgtaccttaccttggaataactatgttttcaactgttgcatgacttccttgcattagcacacacgttttgagtttaggccatgttgtaatatttattgatttcttagtttgtgcaaagaacccgtcttcattctttatacgtattaactcatagaaatctaataacattatgtgtgtgtctttgcatattcgtcc

SEQ ID NO: 270475 - DNA, 590 bp, Homo sapiens
acccctccttggtgatgtttttggtctagttgcctttatgacataaagtaacctatttaatgaactatgtatttcaatctatagtaggcagagctttttactgactttataaaccccttattaataaagcacccacacactcacacacacacatgcacacacacacacacacacacagaaaacttctgatatattaagggaaaatttactgggagagcaggtcctcaaatcaacagtttcacttgagattcaggggctcaaacatgatggaacaggtaattaccagtgcttgaaatgggtacttaagcaaaattgcatagaaggaagtattttctctgttacataatayaaatgagacctatttatttaccacttcatcaaactttgtagccagatgtaccttaccttggaataactatgttttcaactgttgcatgacttccttgcattagcacacacgttttgagtttaggccatgttgtaatatttattgatttcttagtttgtgcaaagaacccgtcttcattctttatacgtattaactcatagaaatctaataacattatgtgtgtgtctttgcatattcgtcc

SEQ ID NO: 270476 - DNA, 526 bp, Homo sapiens
acttggaggaaccatatgggacatacggtattgttggaaaaggcttgagtttttaaaaagtaattttaaagccattgtcatagataaactattggtattacttcttgttaacaaacacatttcatctctacagctagttacacattctgagcatctgctaaagctcaaattctgctctagcttcctgtagtagagttaaggattacttgcttttatatggttcatttacatctgtgttatgtgataaaggtggtgatttcttgacrcagcaatatagatgagtttccccattaaaagctctatgggcggaaagagggacctttataaatcactgtgtggtcttctacattgtgctgttttgtgagatattttcctccccagtttggatcggaataacaagcacataagaaattgccaagagcattcagaaagaaagcaaaatcaaccaaaacaaacacagtaaagtctaatattattttaagaaaaaagttctgaaaaatgcttgacccaaatgaaatattttgaa

SEQ ID NO: 270477 - DNA, 593 bp, Homo sapiens
agataataatttttatttgccaggtgtttctaaagattaaatgagattaaatatatttgacacatagtacaggctcaataaatgcttgttttttgcttagtcttcctcatggaaatctccattcacaagattttcactaaacacacactagacattctgaaaatgattaataaataaattttgagaaataatttatataagcctattttcctttattgaaatacattgcacrgggaaaattcactataactttacatccaaaaaggttaaatgcttaatgaactctttaaatgatggtgcccaatgcttgtaaagatgcacatgtgtgtgtgtttctgtatgttgaggagtgatcattctcacacaatgctaacataaacatacattaatttggcacagattatctgaagtattatttggacctctgtattattatttttattccagaaattcgatttctaagaattctgactaaaaacaattaaagaatattcatttacaaagatgctcattgcaataccatctttaagtttatattagtctgttttcatgctgctgatagagacatacctgagactggacaatttacaaaa

SEQ ID NO: 270478 - DNA, 594 bp, Homo sapiens
tttggacctctgtattattatttttattccagaaattcgatttctaagaattctgactaaaaacaattaaagaatattcatttacaaagatgctcattgcaataccatytttaagtttatattagtctgttttcatgctgctgatagagacatacctgagactggacaatttacaaaagaaagaggttcaatggacttacagttccacatggctggggaggcctcacaattatggtggaaggcaaggaggagcaagtcacatcttacatggatggcagcaggcaaagagagagcacttatacagggaaactcccccttataaaaccatctgatctcgtgagccttattcactatcacaagaacagcatgggaaagccctgcccccatgattcaattacttcccactggatccctcccacaacacatgggaattcaagaagagatttgggtggggacacagccaaaccatatcaaagttttattttctttttaatttacaaataataattatgtatattttgaggacaatgtgatgtttggctatttatcataaaaaattgggttagaaatctagatgctcaacagtagatgatt

SEQ ID NO: 270479 - DNA, 554 bp, Homo sapiens
gttccttctggtttttgcttcacgggtggtgcattcccaggcaaatggttcagaaaagaactaagcatagtgcatggcgtgttacataatcccagctttgttttttaatagatgtacttgagtgaccttaaaagcctaaaaatgcaatagttaagagggagttgtgtagggagggtgacttgtgatgttatcagcagtatttagattctatctttattcaatttcaagacatgctgctattggacaagactgtctattctatttatttgttaaaatacaaatcagttctcaaacaagtcacttagaacaagttttgaaccagtttgccttcacttttgattacctggtagtgttagaggcaacttgatgcaaatctgtaactttatttttttagtcattagagtagtgttatctatacatgtcttcctacrtgtctagacgtacacactaagtagcaagtagtacattttctacttgcaaatagtatcacatattttgttcagcaatctaaacaacccgctaatgcgctgagatgtaatgcaaaccctaagtat

SEQ ID NO: 270480 - DNA, 555 bp, Homo sapiens
tgctcccaataatctaatgtagagatggcagagcaaaataattagcacatatgaatgtcttcctgtcatttggaaataataataaccagtttaataatgattataacagtaatagccaacaaaagtatcctaaggaatgagatagtcaaccaactaaccaagctgtcatattgaatgaaaattaaacatcagtggaataaattataataaagattatcagttaacttagctttccacatgaggcttctttgtggtcgctgaggtgaaaattgaacctaaacactccaaattagtgccattagcagaaatgtacaataatagataaagctttgccaatcccaacttttcttttctgaagggaagttacaagcacacgtgtcagctctaccactagcctgaaaccaggcagctgaattttttatatctcatagtctttgtcaactcaaattattaatatttggataaggctctttaccagaaacgagkagttagtttcactttttgaagtttaaaccactcactatgcctcccaagaagtttctgatttgggaaatt

SEQ ID NO: 270481 - DNA, 659 bp, Homo sapiens
ctagggccccaaaagtttaagtaactgacagaaaatcacatagcaagtgtcacagcccaaattcaaacctagaagagtcaaacttcaaagtcaatgcttgtgacgccatcttaagacaacctgagcatcgtcccgcaactttctatttcttgtgatgctcagtgcattagaagggctgacaggtataactctgtatccttttgtcctctccctcaactcctactctcttactcaatatcccattcagtaacttttggcttcattttatatttaaggagtaaacttgtccaagagctccgcaactccatggagcttttaaaacactttaaccaggtgaaaaattttcagtcaataaaacaaatgaaaagtagattatggccaggcacagtggctcacgcttgtaatcctagtactttgggagacccaggcgggcagattacttgaggtcaggagtttgagaacagcctggccaacatggtgaaaccctgtgtctactaagtcagccggaaatcccttgaacctgggaggcggaggttgcagtgagccaagatcgtgycactgcactccagcctgggcaagtgagtgagactccttatcaaacaacaacaacaacaacaacaacaacaacaacaaaacaagtagattagaattcaactcat

SEQ ID NO: 270482 - DNA, 591 bp, Homo sapiens
atacacatatagtatttgaaatggtttctggcatatggtcaagggttaaaaactacaaaagtgatcctatgaatatgacttgcctctatgcatcatggtttttccaactacaaaataagagcttgaataagacaaattttgaatgtaattttcagtcttcaaatcttgactatttttgtttacactcgctgaaaatacttgaaatcagtagaaaaaaagtgtattcattcatttattcattcattcaatacacatttatcttgtccctactatattctaggtggtgtactagatgctgataatactatgatcaaagcctatccctgacttctaggagcggatctagaaaaatagcataaggtaattgtcaagagctcagcctctagaatcacgctctctgaattttagggttttatgacgttggacaatttccttaattctcagtgccccaacttcctctcctttgaaatgggaatgatagttacaatcccgtaaatttatygtaaggatcaactgagtgaatacaagtgaagctcatacatggaacttggagtaccataagtattcgataaattctactattgtcaggag

SEQ ID NO: 270483 - DNA, 610 bp, Homo sapiens
aatcccatccagaataccacactacatttacttattatgtctctttaggctcctcttgcttttttgatgacctaaacattttagaggaatactttataggtattttgyagaaataatgtccctaaattgagagttttctaatatttttctcatgattagattaaagttatgggttttgaaaaagagaacacagaataaaagtgccattctgtagtattgtcataacattggcaagcagacatactatcaacatgacttatctctgttgacattgactttgattacttggcttgaggtcatgtttgtcaagtttctccagtgcaaagttactctttttctgtcttccattacagtgctctttagaagaaccactatgagccatccacacttaatgagtgaggagttatgctcacctccttggcgatagagaagctacataaactattttaaattcttctgcataggaggttttttcactgtatttgaagaagggaatcttaaagcaatcatctgactatcaacaaaccttataggctaagaaaggtacttaacgtttgttgggtaccgttcttaagaaaaatatttaaaaataagaaatggctataatttg

SEQ ID NO: 270484 - DNA, 600 bp, Homo sapiens
gcataccattaatgccataccacacacatgcggcaagggcacagcatcagagttttaatatgggattcaggtagaaggcaaagacagataatttctgtgcactttaccataktttcagacatagtaagcataagatttacccatttaataacatatataagaacatatgttgtatgtacgtatatacaaacatacacacaaatacatttgcacaattatgctcttgtacacacatatatttccctattcccaacctacatgtgtccagttctacattcatgctttgtagttatgttcatttcattgcagtttattttcttaaagatccatttaaaatagccaacgcatcactcacctttgaatgaggtgtatttgatgtaaaatttaatcacttcagaaaatgcccattaatctgtcatggacagctccagtattctgcctaacaacacagaaatctttttcccaaattctaaaattatacttagatgacagaagaatggaagaattaaaaagcaacttggtatgcattgtttttataacaataaaagggatctttttttaactaaacaagatactgtttcaaacaaaattgcaaacatg

SEQ ID NO: 270485 - DNA, 558 bp, Homo sapiens
ctcagtaacagctttcagaaacatctggattcaaacttacagcctaaacatgacaggttaagtagcatagagttataaaataacttcatgactagattctcaaaaatccaaattcccagagatttttaygatttttaatgatcagaaaaatttcaaacaatgtaagcattaagaatcacataaactatatagcacttcaatttgatattgtggaattcagagtgtggatggtctatgaagcttttaaaaatactattctgtagatataaaaatactaacaacaattttactcaaaggagcacaaaaatatatgcagtcttccagttatatttattaaatcttactaaacttatgtgaaactgaaatagttaactttttgagaatagacagaggcaataaaaaaatttgcctaaaaacaaaccttatgacatttttatccatgtcataagtcttactggaatgcaatcttctggaaggcagacctcaggtctaatacattgtttttcaatgcctgttatagtgataggcactgcatgtatgcctaagtaaatggtgact

SEQ ID NO: 270486 - DNA, 558 bp, Homo sapiens
ctcagtaacagctttcagaaacatctggattcaaacttacagcctaaacatgacaggttaagtagcatagagttataaaataacttcatgactagattctcaaaaatccaaattcccagagatttttatgatttttaatgatcagaaaaatttcaaacaatgtaagcattaagaatcacataaactatatagcacttcaatttgatattgtggaattcagagtgtggatggtctatgaagcttttaaaaatactattctgtagatataaaaatactaacaacaattttactcaaaggagcacaaaaatatatgcagtcttccagttatatttattaaatcttactaaacttatgtgaaactgaaatagttaactttttgagaatagacagaggcaataaaaaaatttgcctaaaaacmaaccttatgacatttttatccatgtcataagtcttactggaatgcaatcttctggaaggcagacctcaggtctaatacattgtttttcaatgcctgttatagtgataggcactgcatgtatgcctaagtaaatggtgact

SEQ ID NO: 270487 - DNA, 506 bp, Homo sapiens
gagtgctggcccataaatttaactactgcgtaatcctgggcaagttacttccactctctgtacctgcctcagtttcctcatttgccacgtgaggcaattataacactatctacctcacattggcttttgaggtattcaatgaattaacacatgtaaagtttttccaatggtctcaacagttttgaaaaagtgctcaatatttaactaacactgtacccasaacttcccctagtaataagtagtatttacgtaacacctactaggtgacaggacttatgcaaagtaatttatgtgtattatgcttgcacttaataactctatggcatagatactattatcacctcaatttcacccataatgaaattgcagcacagagcagtgaagaagcttgcccaaggttacacagcaagtcagtggtgctatcagcattcaaatccaagcagtttgactctaggcatgacacacttcatcactgggctgtactaccgttaaacttgccataggaa

SEQ ID NO: 270488 - DNA, 571 bp, Homo sapiens
cgttgctgcagctaatctcatatttggttaagagcataggtcatagagccagactgcctgggattgagtgctggcccataaatttaactactgcgtaatcctgggcaagttacttccactctctgtacctgcctcagtttcctcatttgccacgtgaggcaattataacactatctacctcacattggcttttgaggtattcaatgaattaacacatgtaaagtttttccaatggtctcaacagttttgaaaaagtgctcaatatttaactaacactgtacccagaacttcccctagtaataagtagtatttacgtaacacctactaggtgacaggacttatgcaaagtaatttatgtgtattatgcttgcacttaataaytctatggcatagatactattatcacctcaatttcacccataatgaaattgcagcacagagcagtgaagaagcttgcccaaggttacacagcaagtcagtggtgctatcagcattcaaatccaagcagtttgactctaggcatgacacacttcatcactgggctgtactaccgttaaacttgccataggaa

SEQ ID NO: 270489 - DNA, 542 bp, Homo sapiens
gaggtagggagagatcataagaaagtgacaaagacacagaggccagctgtatttatcattacttatctaagagctggtcactctcaggtatttactatgacttgctaataattccaaaaagagctgtattacagaagagatcaaaccagaaacacacccaggtgtttcacaaaataaaactatgatgttaggcatattattcacaccacccttcctggtctgagatgtcacaataatgctatcaacctacctcattttaatcgacaagtgattatggaaagttgatttctttgaattaaatccatcacatcaagaaagcagtgccataacagttccagtatttatggtgacccacaaatcatttgcccccttgcatgccttgcttctcatcctgttcagttgcaagaccagaaaagttgaggaaggaggtttcccttcatggaaggtgatggattaacataattatcatatagcttcatttagmgttgataacacatctattctgcctcaaaacctttcctgatagcgatgccatgagctgc

SEQ ID NO: 270490 - DNA, 609 bp, Homo sapiens
ttgcctctgatacactgaaaatgaactggaacactctattattaatcttacatgaaatatgcagtttggtgtgaactgtgcataaggaaaagatcttattttatctatatattttttccaaacaaaatttcactccccttcaggctataattcagattagaaatttggcaattaaattagaaaataaattctggtggtacataaaacacttaaaaaatatgattgcttaaaccaggttcttagttcataaactgacccataaagactagtcctttaatgataaccataaacaaagaacctatttggtctctgaaaagtttatactttcttttccattgattactcgtctttgttctttcctcttgatctttctcttctaaatagcacaaatctttaaagggaggattgtggcaattaaagaaaggctagaatagaagaatagaagacaaccatgactcaaacacgggaaaggattgtcatagccacgttgttactcatagttaaatattccttycacttgtgatatgtataaatggatcacttttagctccagaaacactgaacaggctgaatattttgcaaaatgtttcccaaatttctgttacgttt

SEQ ID NO: 270491 - DNA, 476 bp, Homo sapiens
tgtttggagaagtggaagaagagaggaagatacaagggaagaaactacacttgatgtagagttaatccatttaagcttcagagcctaccttgtgatgtaagcgttgtctcacctatttccagaaaaggaggttaaagccaatgttacatcacaagtaagcagtgtagataaaatttgaacctgaaaatccctggctcaaagtccaaagctttcaattacacaatcttgtcaagaacgtaaaaacagatgagtgcaytgaatagaagaaaagatggcccaaagattaatatttgtaaatctcctctaatatcttggttaaatttaccacccaaaataaacttcaatattgtcatgaaaaaaaaatcatatcagttgtcaaaattgactccattgcactggcatacactgcagcttaagatatccaaatgacttagcagcagagccaagcgaatagttgaaaaatcacccactgtact

SEQ ID NO: 270492 - DNA, 603 bp, Homo sapiens
atataatcaatcaactagttatttgtcatcgaatgtttattgagcgtttatcatgtgcaggatgtttgtgtgtgtgtgtgtgtgtcctgcacaaaaacacatctgactatatatacgtatatatatgtatatatagtgacaaaatacatatactatgcatacacattagaagctagatgccattttgactgtttggatttttttttccctgaccttacactttaaaaaaaatttatttcttaaagcaattggttagtttttataggtgatatagccagtgtgagttcaccatctatgaactgtagttttctttattaagaatattattgtttcaaccaatagcatgccaatactttctcattttatcaaaactggaaatgtgtctccaaaaaatggrcctattgctttctgaggggaaaatcttttctactgcatatcatccccacttatccatgtatctttgctactcaagtagggcagagccacagagaacaaaagacaacgtcttactttagtgatggctgtgtaggacagagaaccttaaaggaccccaccactctcttacctgtgtttgtttataggggttttgtttgcctgtgtgtg

SEQ ID NO: 270493 - DNA, 605 bp, Homo sapiens
cttactttagtgatggctgtgtaggacagagaaccttaaaggacyccaccactctcttacctgtgtttgtttataggggttttgtttgcctgtgtgtgcttgcttaatgctttgcatttgcaaagtaaaagcaaggtcatctctgttgagaagcttgttgggtactccagatggattttgctaattcttgggaaggcctgaagtttagataagtggagactgtagaaaagttcaattcttcctgttactgatttctttagtgttttaactccatctcctagtgggcagctctttgttttatgttgctgggtggatggccattggctctctttctggttttattggaagtttcttcaaatggctgtggtaaatttcaatgaacttttttatcatgctcatttcacttaatttggtagttgtggagttccaagtcaaacagaaatttcaggcaaaatgctcaaaggggaaaaacttgaatccaaatcagcaggacttaaaagcaacactgtgtgtgccgggaacttgcccagagattaaccctattgaatagtgacaggcagctatgacattacctgtcaatgtttgcttctccagagggtcccaag

SEQ ID NO: 270494 - DNA, 414 bp, Homo sapiens
tgggaggaaggatgatgtccaaaacaaaaacctttaaaggaatattaaaatataggcaatgatatatgaaatgagctgcaaagcctgagagctagctgtaatcattctccatgctcctttgcaagctcaaaaataggtactgaaagtacaacccatatagcagtatttactcytcttgctttgggtaatatttagtcctttatggtgccatcttagagaacagtatagtgctaaaataaatggtgccatagggaccatggagaatcattaagtgacttactgcaaggggtcctattaggtacctgggaaaataaagctgaacatatgcattgtttgaaaaatacaaggaaacctgcacctccctgtcagtgcatttaattcctccaccactgtgtggtgactacattttattac

SEQ ID NO: 270495 - DNA, 449 bp, Homo sapiens
atgctatctttatttctccttattgtacttacctcctcacatctgtccatgycatctggaaacttacaggatcaagtctacactgttcagaaaccaattactgctcagcagaactgagctccagatccctttctgtctgaccacagtgcaccaccaagattttctaatgtggcttccttcagatcagtatgaagcagcttgtatttttagtgaccacagagaaatggctcctttggacttcatctcaatcaatggttgtgtgggtctcagccaaaaagaaagtgactcaaagcagagctccaagaaagggctggatgtacacttgaaactgaaattgctggggagaacctcaatgccaaagccatagccaaagcaaaagtccagccttacaaactgagcaaacatagctgtgtcagagaacagctgtaactgagcttactcacaacagg

SEQ ID NO: 270496 - DNA, 449 bp, Homo sapiens
atgctatctttatttctccttattgtacttacctcctcacatctgtccatgccatctggaaacttacaggatcaagtctacactgtwcagaaaccaattactgctcagcagaactgagctccagatccctttctgtctgaccacagtgcaccaccaagattttctaatgtggcttccttcagatcagtatgaagcagcttgtatttttagtgaccacagagaaatggctcctttggacttcatctcaatcaatggttgtgtgggtctcagccaaaaagaaagtgactcaaagcagagctccaagaaagggctggatgtacacttgaaactgaaattgctggggagaacctcaatgccaaagccatagccaaagcaaaagtccagccttacaaactgagcaaacatagctgtgtcagagaacagctgtaactgagcttactcacaacagg

SEQ ID NO: 270497 - DNA, 449 bp, Homo sapiens
atgctatctttatttctccttattgtacttacctcctcacatctgtccatgccatctggaaacttacaggatcaagtctacactgttcagaaaccaattactgctcagcagaactgagctccagatccctttctgtctgaccacagtgcaccaccaagattttctaatgtggcttccttcagatcagtatgaagcagcttgtatttttagtgaccacagagaaatggctcctttggacttcatctcaatcaatggttgtgtgggtctcagccaaaaagaaagtgaytcaaagcagagctccaagaaagggctggatgtacacttgaaactgaaattgctggggagaacctcaatgccaaagccatagccaaagcaaaagtccagccttacaaactgagcaaacatagctgtgtcagagaacagctgtaactgagcttactcacaacagg

SEQ ID NO: 270498 - DNA, 449 bp, Homo sapiens
atgctatctttatttctccttattgtacttacctcctcacatctgtccatgccatctggaaacttacaggatcaagtctacactgttcagaaaccaattactgctcagcagaactgagctccagatccctttctgtctgaccacagtgcaccaccaagattttctaatgtggcttccttcagatcagtatgaagcagcttgtatttttagtgaccacagagaaatggctcctttggacttcatctcaatcaatggttgtgtgggtctcagccaaaaagaaagtgactcaaagcagagctccaagaaagggctggatgtacacytgaaactgaaattgctggggagaacctcaatgccaaagccatagccaaagcaaaagtccagccttacaaactgagcaaacatagctgtgtcagagaacagctgtaactgagcttactcacaacagg

SEQ ID NO: 270499 - DNA, 591 bp, Homo sapiens
cctcacctttctgtaatctaatgaaattttcagaaggagacacattaggcacctgtagctgatattattcatctaaacttactcttaaaaataagcaatcttccattgcacatgtggtaacataattaagggtgtcaataatcccttaaaaagacacccaaaagggtttgtatttgaagaggtggacatggtcatccaaaacctgtggagtctaaggtccaggatttaaggttcagcttgcaagtcttgaatgattcgtttgactcagtggttctcacttacctctcattagagttgtctggggagtgcttaaaaaatgccaaggttggcatggttttgttgatttgttaagatactcaggtgactctaaatatacatacaggattaagaacctctaagtcacttttctgattctcaataatattctattttaaaaargaaaaataacatctaactttcaggaacctacacagacattgcatataaaagttcttcataatcaggaaggatattacatgtatatgtattatctgtgttaattacaaaaaaaaatagactttgctatatgagaagttctatgtttttacttat

SEQ ID NO: 270500 - DNA, 620 bp, Homo sapiens
caaaactcatagcttaatgaatttgctttattctggctactgtcagttgaataaactgtgtagttaaagttatcaagataatgattgagtgattttctaaataaacaactgaaacctgaaagcattgccatggttggtttctgctagatttatttcctttcctttggttttatccaagtacataaaaggtgatttggaaagagtatctcttttctctagttaagagtgtccacattagacattttaagttaagcatatgacatggcaggatcaactttaaaaaacagaaatatcatatatcttcaaattgaagtttagaaaatattctatattacctactggttattctgacttacttctgctaaagtgaggaaatatttctaaaggtgaatatagttaaacaccatcagcctgttgtttttaaaaggacatgttaatgcttgtagaagacctttggttttccaattatggtattatacattgctttaagtcaatcatttaaagtatgcatattttaatttagcacaagtgcgaatctaaattatagtcacaaaagaattgrcaatttgtaaacaaaaatgcatgctagcataggactttgaatcatcccacatttgctc

SEQ ID NO: 270501 - DNA, 612 bp, Homo sapiens
taacatcatcccttgcttatttctatttatcaagaacaaatctgtcccatgctaacaaaaatggttttcaatcaaactcttattattattaatacattctaaattcattcttggycaatataagataattccccttcattcatttttcccccaaattagacataggagggaaaaaaattcaacctataaaagtttattataaaacaaatacaaaatatattataataaatctctgaaaattatcaaaatgtaaggcctgtaggccaaatcttgactttattccaattgaactaacatatttaaacaacaagaggcaggtagagaaaaagagggtaggacagagtaataaaaatttgtcattttggattccacatcctatgttccctttttcctaatagcattctttaactttcttttgggaagttatcgttttgcccttcggaacaaatgcttcaggtagagttgtcccagcctagcatcacaaatgagtacaggttctaacttgtcaagccagaatgttctgctcctgcttcataggtgtgaattgttcaagaatggaaagacatcacaagcaaggccattagcctcagttctcaaattttatcaaactca

SEQ ID NO: 270502 - DNA, 503 bp, Homo sapiens
cggaagtttgttaaaatggtaaaattatgggcctagcaccagacctactgaattagaatctgcatttactatcctctgttaattcttgtacacattacattttgagaarcatttgtctagaaaacacctgtccgtagtaacgtctctataagctgttattagataaatgactgcaagatttactgtctcatttagcagatttaaagtccttcacacatgcacactaataatgttctttaacagcttttggggggtatgatttacctaccataaaattcactcattttaaatgtacagtccgatgacttttagttaatttacagacaagtgcagtttgcaccacaatcaaatttctgaacatttctgtcactctaaaggatcccttgtgctcatttacagtcctttctccttcccagctccaactactatgaaaatattattttaatatccacccccatcatgagggaaacggtgtatattaaaataatattattatggtgatt

SEQ ID NO: 270503 - DNA, 503 bp, Homo sapiens
cggaagtttgttaaaatggtaaaattatgggcctagcaccagacctactgaattagaatctgcatttactatcctctgttaattcttgtacacattacattttgagaagcatttgtctagaaaacacctgtccrtagtaacgtctctataagctgttattagataaatgactgcaagatttactgtctcatttagcagatttaaagtccttcacacatgcacactaataatgttctttaacagcttttggggggtatgatttacctaccataaaattcactcattttaaatgtacagtccgatgacttttagttaatttacagacaagtgcagtttgcaccacaatcaaatttctgaacatttctgtcactctaaaggatcccttgtgctcatttacagtcctttctccttcccagctccaactactatgaaaatattattttaatatccacccccatcatgagggaaacggtgtatattaaaataatattattatggtgatt

SEQ ID NO: 270504 - DNA, 598 bp, Homo sapiens
tcattcacacttcactaaataaaagtgatttttgaatgaatttgactgcagtttaaatagtcattaactatttctaaatggatttgctcaacagctaagagtttaaacatgattcagtggggacatttaccactttcagggaaaaaccatttcaaataattattttctaaacttattgggtatacatttacaagcaaacattatcagtatatcaaaaatagaagccatgagmcagtcttttcctttaatccactaattacaaatcattgccatgtaatcagggttagagctaggccagcctatatactttaacttagttaatttgctattgaagtttagtatttttttctttttttttaaagtttgtcttagctgagactgcctttcttagggcaaagtctctttaatcgttcatctcctctactgaattcaggtccttgagcttattcccctggactttctgaataggtcaatacacgatttcgttgaccccatcactctggcattatccccgacagttctgcctcccaaccccaagcgaagtatttcaaatcccccacttaaaaaccttccatgatttcaagttgtccacgcaatg

SEQ ID NO: 270505 - DNA, 595 bp, Homo sapiens
tttcactctaccaatataaaataaaatattgtcatacatttctacaaaaactgatgagatagaaatgccagaatttatggatatatgtttttaaattccaaatagaagaattattctggtagaataaagaattaaaccagtggagaataatttttgcataaatwtcaatttatgtattaattaacaaatataaatgttagcaggagtattagtgaataaatataattttcatatgaaatcatttcttttgatgattagcagggtagggaattcatatatatctatatgtttttatatagacaggcatacttttagagctaaaaaaacaggatgatacaaactattatttttaatcttacaaagttcttatgtgttttatgaaattagaggacacttctaaactcaatatcttgtgattcatcctccatggaccatatatgaatgctgacctaaataacagattgataacaaaagttttggccaattctcattttctccagggttgataaggagagtattatatatatgagaggatatgagacctgaggctgttcttctccgtctgattgggaagatgtacaactttaacgacttg

SEQ ID NO: 270506 - DNA, 619 bp, Homo sapiens
gtagggaattcatatatatctatatgtttttatatagacaggcatacttttagagctaaaaaaacaggatgatacaaactattatttttaatcttacaaagttcttatgtgttttatgaaattagaggacacttctaaactcaatatcttgtgattcatcctccatggaccatatatgaatgctgacctaaataacagattgataacaaaagttttggccaattctcattttctccagggttgataaggagagtattatatatatgagaggatatgagacctgaggctgttcttctccgtctgattgggaagatgtacaactttaamgacttgttctatcaaatttatgatggaaaagtaaagtaaatagaggagagacaactaacaattaacctataatgtttgccttcgatacacacaatcatagtattaaattctactgatttctttcaggaataaagcaaacagcaatttttttgttgtttttttcctaagaactgataggctttgtcacgtatggtacacgactaccttggccaaggattagaaacactttttacattgaactgggggaggcttgaagcacaggttcactcctttagctgtttatcagaggcat

SEQ ID NO: 270507 - DNA, 614 bp, Homo sapiens
ctctctaaacctaagattcctctttatctgtaaaatgggcacatattaactaatgagatgtttgmggagattaaattaagtcacgaatgtaaagcatttagcgtagtggttgacatcaaatagcagtgcaatatgagatctatttataatagcaatttaaaagcattaaaaccctacgaaattagtcaaacctagatatctgatcattttaactcacaagacaagctttgagataacccaaagctttggctgggttgaagtttgtcctgttgggtcgatttgcatgttaactccctgtctctctctccttgtctctgtaggggaggaaaattttcctcaactctcccggggtccctggctggatctgaaaataaaactgacaaagacagattaacggagaaaagcatacaaatttacttaataagctttatttaataagtgacatggggactttcagaaatgaagacccaaagaaacaagtaagcacatatttttatgcttaggttgatgaagagtggaaagtcatggaaaaatgtgattggaggacaaaagggtatgatctaatggtaacaaactggggggacctagcaaaacctgtttatgcagattcatcc

SEQ ID NO: 270508 - DNA, 478 bp, Homo sapiens
aaataggagtttcactgagtcctgaaccccatcatctccctgtctctgaatcctccccactgtctttcttcatctgtgtgcatgacaggctgaagggggatcatgaccgattttagacctagaaaatatactattgatacatgtacacatatcagtttgttcttggctttaggatactggtttaactttctgtatcagaagagaagtaaaagatatgtatttgcgttttgcacaaataactaaatacrtcaaataattccagaggctgggattttttcccctgattttgagagagtacttatcctagacagttttgcaactttgaatagaaacaaatctctattagttctgggaagttgaaggaagagctggagcccaccatggctggccccaactgggattccattatatgagcaaaatggaagcttctatgttggatccaaagtttttatttttcatgagccagatttttatcacc

SEQ ID NO: 270509 - DNA, 632 bp, Homo sapiens
ggtgtttagagagtctgtctatgaaaaggtaaaagtagagcagtaagaaaattagggacttttgatggggagaaaacttctcaaggaagggataactgagagcccagactgctgttcaagctgaactgatttgagcagagatgaacagactagaacagagccactgagcctgggtcctggggactgtgggacctggagcgaggctgtccagaaccaactggcctgagtcccaytggtgaacctgacagaatgttgcgctctgggaatccaagctcaacagacaagctgcagtaagaaagtctgattgtgaaaaatgctaagaactctgtgcaagagtgatattttcttgatggaaatgtgacactattatattaatcagagatgacagaattgactttggggccactggtttagtaacagttagaaggaaaacctggggctattttaaataaacaattcctttgcatcagataagaatatttcttgccacatctgaagccatttgatttttcatctatcagttgcctttggattaatcagagaggagttgcatgcataataatagaaataagcttgtctatgatcatttttactttagctttccaaatttgaggaggatctactgatagtag

SEQ ID NO: 270510 - DNA, 632 bp, Homo sapiens
ggtgtttagagagtctgtctatgaaaaggtaaaagtagagcagtaagaaaattagggacttttgatggggagaaaacttctcaaggaagggataactgagagcccagactgctgttcaagctgaactgatttgagcagagatgaacagactagaacagagccactgagcctgggtcctggggactgtgggacctggagcgaggctgtccagaaccaactggcctgagtcccattggtgaacctgacagaatgttgcgctctgggaatccaagctcaacagacaagctgcrgtaagaaagtctgattgtgaaaaatgctaagaactctgtgcaagagtgatattttcttgatggaaatgtgacactattatattaatcagagatgacagaattgactttggggccactggtttagtaacagttagaaggaaaacctggggctattttaaataaacaattcctttgcatcagataagaatatttcttgccacatctgaagccatttgatttttcatctatcagttgcctttggattaatcagagaggagttgcatgcataataatagaaataagcttgtctatgatcatttttactttagctttccaaatttgaggaggatctactgatagtag

SEQ ID NO: 270511 - DNA, 632 bp, Homo sapiens
ggtgtttagagagtctgtctatgaaaaggtaaaagtagagcagtaagaaaattagggacttttgatggggagaaaacttctcaaggaagggataactgagagcccagactgctgttcaagctgaactgatttgagcagagatgaacagactagaacagagccactgagcctgggtcctggggactgtgggacctggagcgaggctgtccagaaccaactggcctgagtcccattggtgaacctgacagaatgttgcgctctgggaatccaagctcaacagacaagctgcagtaagaaagtctgattgtgaaaaatgctaagaactctgtgcaagagtgatattttcttgatggaaatgtgacactattatattaatcagagatgacagaattgactttggggccactggtttagtaacagttagaaggaaarcctggggctattttaaataaacaattcctttgcatcagataagaatatttcttgccacatctgaagccatttgatttttcatctatcagttgcctttggattaatcagagaggagttgcatgcataataatagaaataagcttgtctatgatcatttttactttagctttccaaatttgaggaggatctactgatagtag

SEQ ID NO: 270512 - DNA, 486 bp, Homo sapiens
taaacacaaaatccatttatgttttatatacaccttataaacagagcctgaagggtaattttataaaacattttaaataatgttcttccttaaacaatgttttgatcacattttggctgtgatttgtcacatgaggtcagatgtggaatttttcatttgtggcatcatatcagcactcaaaaattttcagattttgaagcatttcagatttgggatttttaggttagggatgttcaacttgtaatataaaaacataatatagtacatttatttgcaatataccattaaggagaaaaagaatattaaaaatatagagtacgatctcaatttataaacaaatacctcctatatagctctacatataataaagctacatcacatattaaaaatccacattatatgcatacatatataattgcatataatagaatragaaaaaactgtaatatcaattatttaaatgtggtataattgtaggtgattttt

SEQ ID NO: 270513 - DNA, 523 bp, Homo sapiens
atatatattttttatagatgaatatgtctgatataacatggaatcatcaacccatggtgttctcaagaaataatagcccaatataaatgcaaggtactgctattagcataaatgtttacttgagtaaatttatgaaagaagttcaatgtcactactattcacagaaatatgaattaaaacaatcacaatgatttccctccacgtttgctgaagttctgtgctgctgaagatagaaagaacagtcctcttcaaacactgctgcctggagtgtgtaattggtacagtctttttggaaagcagtgtgtcattatctaccaaaattttaaatgaacacaccttgaaaattagcaatttcacagctaggacagattctacaaacacatctacccaagtgaataaaattgatgtacaaaatgttcattgcagtatcttttatawtagcaaagtactggggacaatctaaatgtccatcaaaagaagaatgtttaaacagatttagcagctgctaaaaaatagttgagag

SEQ ID NO: 270514 - DNA, 525 bp, Homo sapiens
aaatacctacatgttaagaaaaagtcccactctccttttgatggtrtgcatgtggctctattgtgtttctagttaagatggggtctagagggagagaaacctagcgctctaatttatactttcatgctgaactctcctgtaatgcgggccagttgtgtcgcaacatctcaactaccctgatgttttctaagccctttctacccaacaagtgtggcacctggctccttcagttcagtgagattggcatctcaaggcaattgtggtgtttgcgggtgtgactgaccactgtgttgactcttccgagtcacatcactgtgccatgtgaattatcaggattcatgttcttataatggagtggaaagggtttgaggctgaaaccctggggcattcctgggagagggttggaatcaggagccgggctcagccactatcctatgacaggcccatacccttcctttgtgcaaaggatcttgaaaggcctttactgtttcttctctgtgagaccgtgaatcacctatattttaa

SEQ ID NO: 270515 - DNA, 573 bp, Homo sapiens
cttatcaccccctgtgtcagttcagtttagtcttagcatatatgtggtaagtgtgtgctgtgtactaagcctggtgccaaatgctacaggtacaaagagttgagtctagcaggaaatagaaacatgtgaatgagtcatttcaatagaattggtgaatggggtctgcctctgactatgtttctttctgtaaatattctttctgcttgatagggagatgctytcagatactgatactaataatgtgagtggatgtttgttactcagcctccaaaggaatagtagcaacatcccactgaggcatatatagaagctatcaagggcaacccagaaaatcccataggaacaaattctcctgccattgctttttttggtaatgattcttgtgggaccacattcttgtggctgctgaaagttgccaaagtcatttacattgcccctagagttgggccaggacccaggaaagtcattctctctttgcataagcgaatgtctcctgtgccaaaacacattttactaacctggcacctctcttctacacctaccttctcacactagtaaaatgtcagagtcatg

SEQ ID NO: 270516 - DNA, 573 bp, Homo sapiens
cttatcaccccctgtgtcagttcagtttagtcttagcatatatgtggtaagtgtgtgctgtgtactaagcctggtgccaaatgctacaggtacaaagagttgagtctagcaggaaatagaaacatgtgaatgagtcatttcaatagaattggtgaatggggtctgcctctgactatgtttctttctgtaaatattctttctgcttgatagggagatgctctcagatactgatactaataatgtgagtggatgtttgttactcagcctccaaaggaatagtagcaacatcccactgaggcatatatagaagctaycaagggcaacccagaaaatcccataggaacaaattctcctgccattgctttttttggtaatgattcttgtgggaccacattcttgtggctgctgaaagttgccaaagtcatttacattgcccctagagttgggccaggacccaggaaagtcattctctctttgcataagcgaatgtctcctgtgccaaaacacattttactaacctggcacctctcttctacacctaccttctcacactagtaaaatgtcagagtcatg

SEQ ID NO: 270517 - DNA, 374 bp, Homo sapiens
attttttttccactatgaacaccttggtttctttttaggtgtatagacaaatgtaaaattaatgaagagacaattattrtctatactgacatgagatgcaaatctgtttttattccttgttgtgtagaaattataaattgatagatgaaaataaagtaagttcacaacacctttgaatatatttctcctgataaaattaaaaccatttatagcaaatgttatcttagaatctggtatttaaatggattatttatgcaaatataaaacagagacaagaggaaaatttcaggaaaataatgcactttattatgtcatagcatcaaaataagatttatattcctgattgcgattaaagaaatattgtattcaccaca

SEQ ID NO: 270518 - DNA, 374 bp, Homo sapiens
attttttttccactatgaacaccttggtttctttttaggtgtatagacaaatgtaaaattaatgaagagacaattattatctatactgacatgagatgcaaatctgtttttattccttgttgtgtagaaattataaattgatagatgaaaataaagtaagytcacaacacctttgaatatatttctcctgataaaattaaaaccatttatagcaaatgttatcttagaatctggtatttaaatggattatttatgcaaatataaaacagagacaagaggaaaatttcaggaaaataatgcactttattatgtcatagcatcaaaataagatttatattcctgattgcgattaaagaaatattgtattcaccaca

SEQ ID NO: 270519 - DNA, 593 bp, Homo sapiens
aaaaaggtatgaaatgtagtcatcacaaaaaatttgcaatgtggattctacttttattattaaacatatgattacttaaagaggaaaatattcaaatgacctcaatgtctcacagctggtaaatggtgaatcctgaattctaactctagtctgcctactttcaatgtgcatgcattttaccttgtatgtcactactttcagtcttagatctagcaagaagtatgatgttaaattgggttaggagaccagtgggtcacagccttaaaggccaactaagggagattataaaatataaaacagcatgtcaggtggatattgtgcttggaaaagatgtcctcatcatctatttatgggatacgtggaatatatagaagcaggtagagacaaaataaccaaggatatatacgcacctatggctctattctaatsagttaagaataagccaatggggccacggacagtgactcacacctatattcccagcacttcaggaggcagaagtgggagatcagattgtgtgagtccagaagttcaagaccaatgtgagccacatagtaagacctcatctctattaaatagaataaaatttaaaa

SEQ ID NO: 270520 - DNA, 593 bp, Homo sapiens
aaaaaggtatgaaatgtagtcatcacaaaaaatttgcaatgtggattctacttttattattaaacatatgattacttaaagaggaaaatattcaaatgacctcaatgtctcacagctggtaaatggtgaatcctgaattctaactctagtctgcctactttcaatgtgcatgcattttaccttgtatgtcactactttcagtcttagatctagcaagaagtatgatgttaaattgggttaggagaccagtgggtcacagccttaaaggccaactaagggagattataaaatataaaacagcatgtcaggtggatattgtgcttggaaaagatgtcctcatcatctatttatgggatacgtggaatatatagaagcaggtagagacaaaataaccaaggatatatacgcacctatggctctattctaatcagttaagaataagccaatggggccacggacagtgactcacacctatattcccagcacttcaggaggcagaagtgggagatcagattgtgtgagtccagaagttcaagaccaatgtgagcmacatagtaagacctcatctctattaaatagaataaaatttaaaa

SEQ ID NO: 270521 - DNA, 553 bp, Homo sapiens
ttaggggtggggcagttttataggatttgagtaggtagtagaaaattacagtcaaagggggttgttttctggcgggcaagggtgagggtcacaaggtgctcagtgggggagcttctgagccaggagaaggaatttcacarggtaacgtcataaattaaggcaggaaccagccattttcacttcttttgtgatccttcacttgcttcaggccatctggatgtattcctgcaggtcacaggggatatgatggctcagcttggcctcagaggcctgacactctagttttcaaggtttttttgttattattagtttattctaccatatggaatttattcaaagtgcaatacacttgaaagtgagaggaatataaatatatataccttggctttcatttttaatcagaacagttgtattttttaagttaaaacattgtttttttaatttaaatatttatttaaatgaatatttcttcaatagaaagagtgccagaatgtaaacaaagtaacttagccccaataattgtaaatataaccaatagttttaagcacttaat

SEQ ID NO: 270522 - DNA, 567 bp, Homo sapiens
tacgattaccattgtctgagaagcaaaagatagaagctcaccattggtaactcagggtgaaattaaagcccaacacagaactgatggggaatgaaagtagtttgtacagaaaacttaaaaggttaactctccagacaacagtccctttgctttggctytctcgtagattcagaatagaaaagtaaatagcaaaagagaaatctcctaggtgtatgtcatgtcatctcatagagatgtgtaaaaggtgcaaatgccgctatctttcagaatgacatttcaactatttgcttctctgagaaattaactgtatccagcttcttgctcattttccacttccccagtccccttcccctcagttccccagttgtctttgcttctaaacagtgcatgtcttttgacttgtaaacattgatttagatcctgcttaatttcataatcttttcaggccactactgttcacttagacgatatccccttagcttggatttagccatgaaccattgatcatttacttggtttctcttggagttcaatgtagtcattctggtttagttcaaaaggacatta

SEQ ID NO: 270523 - DNA, 573 bp, Homo sapiens
gaccttgtcttaggggcctgtgggcttccaccaaacttgaaagtaaaggaaaattttgagttctttcaagggaaattgctgycaactagctatccgtgaaaagtaaataagcaacttgataaacaagaatgtaatagtggcctaaaacaatagtgaaggaagctagaattgtgagatgtttggttccctatagaaactaaagataacattttaccattcctctctgagttgtttttcagaacctggacccccaccaaaaagcagtccaccagcatgtagacctcaggaaagaggtaactgaagaccaaactctgatcaccagtgttctaaatttcctcctccagggcctggagaaagtcatggccatgagccaaaacatgtctgctgaccttaaattttcaaacaaagcttatcttccttaaccaattgccagtgaggaaatctttgaatctacctatggtgtgtaagctcctgcttcaagatatcccagtcttttaggacaaaaacaatagcctctatgtgttgatctataatttttcctgcaactctgctttcctgaaatttacccctgcc

SEQ ID NO: 270524 - DNA, 597 bp, Homo sapiens
tttcattagacttacaaaggtaatttcggtcccagaccaaggaataggctagttttgggaagaacatgttatcacctttgttttatatttaacaagggcagttagcttgtgaagttagaagaaagatggagtcacttatgtcasatttctctcactgttataatttttgcaaaagtggtttcacgatgtgaatacgtaaattttacttcatgtcggaaaatgatttcttatgattagttcttaagttactgttcttgatttgttcttctcttttttagaaacacctgtctctgttactagtagttctgagttcttgcccctccgcatgtatcaactttctttttgttgttgtagtttctctgtttttatattctgtggagagtcttgggtttgtcctgtacatctagatttgattttggagagagcaacttttattttatttactgtctgcaatatacttcacaacttggcaattgtgttttactttctggaaaatgcttgcttatttcacgagtctcacttcttatttcattttggcctatttttatctcctggcttctgttcatcttcacctctctcattctctaatcatgccct

SEQ ID NO: 270525 - DNA, 597 bp, Homo sapiens
tttcattagacttacaaaggtaatttcggtcccagaccaaggaataggctagttttgggaagaacatgttatcacctttgttttatatttaacaagggcagttagcttgtgaagttagaagaaagatggagtcacttatgtcacatttctctcactgttataatttttgcaaaagtggtttcacratgtgaatacgtaaattttacttcatgtcggaaaatgatttcttatgattagttcttaagttactgttcttgatttgttcttctcttttttagaaacacctgtctctgttactagtagttctgagttcttgcccctccgcatgtatcaactttctttttgttgttgtagtttctctgtttttatattctgtggagagtcttgggtttgtcctgtacatctagatttgattttggagagagcaacttttattttatttactgtctgcaatatacttcacaacttggcaattgtgttttactttctggaaaatgcttgcttatttcacgagtctcacttcttatttcattttggcctatttttatctcctggcttctgttcatcttcacctctctcattctctaatcatgccct

SEQ ID NO: 270526 - DNA, 494 bp, Homo sapiens
ctttgttttgtaggatacaggacctacctttgatcaaaataagcataccatgaaagtaaaatagtacctatgagacttgtggaaatgaactgttaaaatgaactgttaaacgtctgtgtaaatgtgaaggagttttccccagaataattctaagaagttttgaaagataacattattgtagcatttatctttaatttcagtgtgttgcagtaaaaggttttggaatactgcccttataaactttgtcctaaatgaattaagaaatttatgaycaaaagatatggttaactttttggctattatcatcttctctattaaatagtaatagatagaagaaatcaatttaaaatactccttacagcatagaatgtaataaattatatgcataccatttagaaaataaatagaaggatcaaaaatccacattaagcatatccaaacagatttattaggacagataagtgactttttaaaagactagtagcaatgacaac

SEQ ID NO: 270527 - DNA, 494 bp, Homo sapiens
ctttgttttgtaggatacaggacctacctttgatcaaaataagcataccatgaaagtaaaatagtacctatgagacttgtggaaatgaactgttaaaatgaactgttaaacgtctgtgtaaatgtgaaggagttttccccagaataattctaagaagttttgaaagataacattattgtagcatttatctttaatttcagtgtgttgcagtaaaaggttttggaatactgcccttataaactttgtcctaaatgaattaagaaatttatgaccaaaagatatggttaactttttggctattatcatcttctctattaaatastaatagatagaagaaatcaatttaaaatactccttacagcatagaatgtaataaattatatgcataccatttagaaaataaatagaaggatcaaaaatccacattaagcatatccaaacagatttattaggacagataagtgactttttaaaagactagtagcaatgacaac

SEQ ID NO: 270528 - DNA, 603 bp, Homo sapiens
ggttttcaacgaatatttaaaaatcattagtgccattgaaatattgtatattacaaaatagctagaagagaggcttttgagtgttttcaatacaaagtaatgataaatgcacgagatgatagatatgttaaaatacccctgatttgataaacagcatatatacatattaaaacattaaattttacaccataaatatgtacaattataatgtgtcaattaaaaaaataaaggctgggcgttgtggctcacacctgtaatcctagcactttgggaggctgagatgggcagattacttgaggccaggagttcaataatagcctggccaacatggtgaaaccccatctctactaaaaatacaaaaattagctgagcttggtgacccatgcctgtaatcccagctacttgggaggctggggcatgagaatatcttgaacctgggaggtggaggttgcagtgagccgagactgggccactgcactccagcctgcatgacagagtgagtctctgtccctaaataaataaatmaaataaaattattggtggaaattatgtttctgacagataaattataatattaaagcacattatgtaaaacagacaaaa

SEQ ID NO: 270529 - DNA, 501 bp, Homo sapiens
tctactttgtaaccaaagttgtcattctcaatattgaaattgctcatacattactatgttaggctgaatacaactcttcaccacacaccccccaatgcccattcagatatgattatgttaaggatcttgaggtggggagatcattctagattattcagtgggctcaatgtattcacaggtgtcattataagagagagtcagaggaagacttcactacaataaataaataaataagatgtgatgctggaaccaaaggttgatatgacatgctttgaaggtagtggaagaacacctgggccaagaaatgcaggtggtcttttgaggctggaaagacaaggaaatagattcttccctgaactctccagaaggaatgcaaacctaccaacgtcataatttttgacttacaaaccccggaaatgaaaaagaatcaatttatgttgtttgragtaagctagtaagtttggggtattttgttacggtggcaataggaacctagtacaa

SEQ ID NO: 270530 - DNA, 501 bp, Homo sapiens
tctactttgtaaccaaagttgtcattctcaatattgaaattgctcatacattactatgttaggctgaatacaactcttcaccacacaccccccaatgcccattcagatatgattatgttaaggatcttgaggtggggagatcattctagattattcagtgggctcaatgtattcacaggtgtcattataagagagagtcagaggaagacttcactacaataaataaataaataagatgtgatgctggaaccaaaggttgatatgacatgctttgaaggtagtggaagaacacctgggccaagaaatgcaggtggtcttttgaggctggaaagacaaggaaatagattcttccctgaactctccagaaggaatgcaaacctaccaacgtcataatttttgacttacaaaccccggaaatgaaaaagaatcaatttatgttgtttggartaagctagtaagtttggggtattttgttacggtggcaataggaacctagtacaa

SEQ ID NO: 270531 - DNA, 566 bp, Homo sapiens
tggtgcagaagcagatccctcaggaagaagctctgctagggcacagcagaagkgaaatgtggggttggagcccccacacagagtccccactggggcactgtctaggtgaactatgagaagagtgcctccatcttccaaaccccagaaaggtagatccactgacagcttgtgccacaagcctggaaaagctggaggcactcaatgccatcccatgaaagagccacaggggctataccctgcagagccaaaggggcagagatgcccaaggctctgggagcccatctcttgcattagcttgccctcaatgtgaggcacggaatcaaaggagattttggagctctaagatttaatgactgcccagctgtgttttggacttacatggggcctgtggcccttttttttggccaatctctctaatttggaatgggaacgtttacccaacgcctgtaaccccattctatcttggaagtaactagcttattttttattttacaggctcaaaggcagaagggtttgctttgtctcagatgagactctggactgggacttttgagttaatgctggaa

SEQ ID NO: 270532 - DNA, 566 bp, Homo sapiens
tggtgcagaagcagatccctcaggaagaagctctgctagggcacagcagaagggaaatgtggggttggagcccccacacagagtycccactggggcactgtctaggtgaactatgagaagagtgcctccatcttccaaaccccagaaaggtagatccactgacagcttgtgccacaagcctggaaaagctggaggcactcaatgccatcccatgaaagagccacaggggctataccctgcagagccaaaggggcagagatgcccaaggctctgggagcccatctcttgcattagcttgccctcaatgtgaggcacggaatcaaaggagattttggagctctaagatttaatgactgcccagctgtgttttggacttacatggggcctgtggcccttttttttggccaatctctctaatttggaatgggaacgtttacccaacgcctgtaaccccattctatcttggaagtaactagcttattttttattttacaggctcaaaggcagaagggtttgctttgtctcagatgagactctggactgggacttttgagttaatgctggaa

SEQ ID NO: 270533 - DNA, 376 bp, Homo sapiens
gtccatggcctgttagaaactgggccgcacagcaggaggtgagcagtaagcaagagagcattactgcctccactccccctcctgtcagatcagcagcagcattagatttttataggartgtgacactgattgtgaagagcgcagatgagggatctaggttgtgcattccttatgagactctagctaatgcctgatgatctgaggctgaaaactttcatcccaaaacctccccactcaccaagtctggaaaaattgtcttccatgaagctggtccctgcagaattttctacaagcattcgagaataatatgtattattctgtctttggcttgaatattctgtatatgtgtgttagatctagttggtcatctagttag

SEQ ID NO: 270534 - DNA, 566 bp, Homo sapiens
tggtgcagaagcagatccctcaggaagaagctctgctagggcacagcagaagggaaatgtggggttggagcccccacacagagtccccactggggcactgtctaggtgaactatgagaagagtgcctccatcttccaaaccccagaaaggtagatccactgacagcttgtgccacaagcctggaaaagctggaggcactcaatgccatcccatgaaagagccacaggggctataccctgcagagccaaaggggcagagatgcccaaggctctgggagcccatctcttgcattagcttgccctcaatgtgaggcayggaatcaaaggagattttggagctctaagatttaatgactgcccagctgtgttttggacttacatggggcctgtggcccttttttttggccaatctctctaatttggaatgggaacgtttacccaacgcctgtaaccccattctatcttggaagtaactagcttattttttattttacaggctcaaaggcagaagggtttgctttgtctcagatgagactctggactgggacttttgagttaatgctggaa

SEQ ID NO: 270535 - DNA, 560 bp, Homo sapiens
ttaacaaggaaaattggattcattttaggatgaacagctggagcgcatcagttccataaagcaaaagctgacagtatttccattttagtcaccatgtagaagcttctatgatgctcagttggattatgcttaccctgaaccagctcactttcttccagcatgtccatgtacatcaatatcatattccctggcacccaaaccttaactatgcctccttttctcattcatttcccaaaatttagcccaaggatagatgccagccttacagatagcatcagtagctaatcagagttacctagaaatgtagcaatagtccagagaggatgacaacagcgcaagctaagagtcacttgactttcaccatttccctgctccctgcctcaaaggcctgtgaaaaacagatgggggaaatagagtaaattagaagaccatrctctttgctacaagtcactggctatatttgataggtctgagagggagaggaaaacaaaaggagattagaattttagacttacatgggctgggctccattacaactaaaaaggtccaaaaagaactgg

SEQ ID NO: 270536 - DNA, 493 bp, Homo sapiens
ttcctcagtaaatgtttgttggatgaaaatcagtgtattcagtgagccagtgagctaagtcttttataatgaataaactccagattatttaagtatacatggagccaacagggatttagcacagagtattaggaaacagaaatctctccttttatggaactacgtggacctacagatgctcgttcagaaaaaaatcattgaaattttaaaatggacttatatggaaatatgtraacacaaagtttacattgtgtcactttttggacaccttctctaagggagtattggaatatagcacccagtcatccagtcagtgagaactgtatactgtgcctgtgtgggacatcaagaaatacaggggattgctaatcctcctcaagatgtgtgtcaggatgtgcttttcaaaacactgtctcaaaatcactgaaatcactccatcagtcacagacacctgaacaaaaacatgtccttttatgtctttatacaactgttc

SEQ ID NO: 270537 - DNA, 623 bp, Homo sapiens
gccctttagactgagtgacctaagagtggggtgggaaccaggtccttttctatctctccaaacactggatacaaggcctataataaagtagttcctcagtaaatgtttgttggatgaaaatcagtgtattcagtgagccagtgagctaagtcttttataatgaataaactccagattatttaagtatacatggagccaacagggatttagcacagagtattaggaaacagaaatctctccttttatggaactacgtggacctacagatgctcgttcagaaaaaaatcattgaaattttaaaatggacttatatggaaatatgtaaacacaaagtttacattgtgtcactttttggacaccttctctaagggagtattggaatatagcacccagtcatccagtcagtgagmactgtatactgtgcctgtgtgggacatcaagaaatacaggggattgctaatcctcctcaagatgtgtgtcaggatgtgcttttcaaaacactgtctcaaaatcactgaaatcactccatcagtcacagacacctgaacaaaaacatgtccttttatgtctttatacaactgttctgatattggggttttaaatatcaacataaaccttgccaa

SEQ ID NO: 270538 - DNA, 530 bp, Homo sapiens
attgtgtcactttttggacaccttctctaagggagtattggaatatagcacccagtcatccagtcagtgagaactgtatactgkgcctgtgtgggacatcaagaaatacaggggattgctaatcctcctcaagatgtgtgtcaggatgtgcttttcaaaacactgtctcaaaatcactgaaatcactccatcagtcacagacacctgaacaaaaacatgtccttttatgtctttatacaactgttctgatattggggttttaaatatcaacataaaccttgccaaattcttgaggcttatgtgaaggcttcagttcagccatttgttgttcgagtatcttcgtcctgtctggcaccttggttttagaaatagacacggcagcctcagaaaatggaatatccataaatcacttatgatgatggagtgtgactttattttcgtgatcatttttgcccaggtgcctgttactgtgttactaaaacagaagtagacactattccactgtttggcatagaatcttgacaaagaac

SEQ ID NO: 270539 - DNA, 396 bp, Homo sapiens
aaatacaggggattgctaatcctcctcaagatgtgtgtcaggatgtgcttttcaaaacactgtctcaaaatcactgaaatcactccatcagtcacagacacctgaacaaaaacatgtccttttatgtctttatacaactgttctgatattggggttttaaatatcaacataaaccttgccaaattcttgaggcttatgtgaaggcttcagttcagccatttgttgttcgagtatcttcgtcctgtctggcaccttggttttagaaatagacacggcagcctcagaaaatggaatatccataaatcacttatgatgatggagtgtgactttattttcgtgatcatttttgcccaggtgcctgttactgtgttrctaaaacagaagtagacactattc

SEQ ID NO: 270540 - DNA, 559 bp, Homo sapiens
agtcttgctctgttgcccaggctggagtgcagtggcatgatcttggctcactgcaacctcctgcaacctctgcctcccgagttcaagcgattctcctgcctcagcctcccgggtagctgggactacagttgcgtgccaccatccccagctaattttttgtatttttagtagagacgggattttaccatgttagccaggatggtctcgagctctggacctcgtgattcatctgcctgagcctcccaaagtgttgggattacaggcgtgagccaccacgcctggcccctcgaccttttatcaaaatgacattcagccaaattaaaaaacctttgtcttcctcagaatacccttttttwaaaaaaaaaaaaaaaattgctctgcagtgaaggccaatcttcccttaaactccatatttcatggggccaggaagggggcttgtcattctcccaactttccaaaatatttccaagtcattaatcattctccgtcattgaaaacacattctactccgaggatcaggcctcccagttgtagcctcaacccttctccttccctgttg

SEQ ID NO: 270541 - DNA, 521 bp, Homo sapiens
attcatttatcaatttcaattaaattttttttctctagatggctatccagtaatcccaacatcatttattgaataatccatctttccccccatggatcagaaatatcaccccaccattttaattattaagattccagaggcatagaaggagtttctagtggcagaagggtcaatgagaaaggctgagtatccactgacaatgccactagtggtcgtacccatagtaactagtcctgtgcagaattatagctatgcttcatcctttgttttcttcccaatctagctcctcaaactttaacactgattgagtcacttaaaatctttctgatatgttgtagtgggtgttttttgttttttgtttaaaatcaagctagtcttggctattttcagccaagaactctaacttrcacaacattatttttcttctacaattcaatagtgggcattcccaaaatctcagcccttggctctttgctgtacattctgtggctggagctcatgtccctgattataatcaccaa

SEQ ID NO: 270542 - DNA, 580 bp, Homo sapiens
ccattcaacatggcaaggtaaaaggtgatagagtagaatcaagagttcagagtcaggagataagcagtagagggcattaggagtttcggaagtcrcactaagaagtttggactttatcttaaagctattgaaggcctttcagcagggttgtaagaagataaaatttgtgatttttggaaacataatctggctctagaatggagtagggatttgaacaagataaggcatgtggccaggagccctgtaggaagatgttgcaagaatctgatgaagacatattggtgacctgagcttgagtgtggcagtaagaacgaggagaaatggatgaactggggagaatttcacgaaagagaattggtaagcattggtgataaatataatcaaagggtgagggagagggacttgctagaaatgattcccagataagtggtttaggcaactggatgatggaagacagtgtttagttcaattttagagaagtttgaggcagctgtcagaaatccaaatagaaatacacataagacatttaaatagttgtatctggaacacagaagaaaggtttgagttagagatacagatt

SEQ ID NO: 270543 - DNA, 613 bp, Homo sapiens
aaggtaaactgcatttgtttggaaacctctgaacatttatcacaaattacatacctccattatgctaatatcccaatgaatttcctatgttgatagctrtatcccacatacataagtacacaatgattagttacagagtggctaagagcacctactagtcagacagacatgggttggaattctagctatgctacatggagttgtttgaccttgagtaaatgttaacaatcctgtaagcctgtttcctcatagggtaaatgagtatgaaatgaggttatgcagccacataaaacatctaatacatctggcatgtagtagacaataaatgttatatgatttaacaatgcactaatataaaatgcaattattaattcactctatccttggtctaattaatgcataacttttctaactcactccagaacatcagtgcctctagtaatctttaatgaattttttttcttttgaaaccccccccacttttctgacattcattagtgtccagatatattcaagtatttttgagtaaatccatacatactgaaaaaggtaataatgtcctaatttttatgtgatgatattttagtataaataatctctaaattacctcatg

SEQ ID NO: 270544 - DNA, 594 bp, Homo sapiens
tgggtcatgagggttcctgcattttcttgcttgatgatacaccaagaatgtaagactctgacctcattttacctaggccatatctcagtattatggttgcagtgagcaaccctgaaggatgaggtgatatcttttcccaaagagcagaagatttacttctccctactataaaagtaggaaattggctgggcgcggtggctcacacctgtaatcccagcactttgggagaccaagrtgggcagatcacgaggtcaggagttcaagaccagcctggccaacatggtgaaaccccgtctctactaaaaatacaaaaattagcatggggtggtggcgcgcgcctgtgatcccagctactcggcagtctgaggcagaggaatcgcttgaccccaggagacggaggttgcagtgagccaagatcacaccactgcactccagtctgggtgacagagcaagactccatcttaaaaaacaaaccaacaaacaaacaaaaaacaaaaaaaggaaattcctcaagctcagtgttccttttttcaatgcagcccactgcttaaaggcatccatttaggcccatttgaattacccctgtgggtctta

SEQ ID NO: 270545 - DNA, 613 bp, Homo sapiens
gctctggttcaactgtttggcccttcctctcttaaacagattaagagtttactatgaaatttgcatatttcttctctaattgtattctgataaagttattcttgtttgggataaagttatactttttccagtataggaaatgaaataattatctctaaaactakaaatgaaactggctgaaaacaggaaataacagacaaatttaaaatggatatgttgttacttatttgactcaagatatattaagtcttactattaattagtacctgttgagttttcagcatatattgaccacagtggcaactatgttcaaaatgaaataaatatgctggaagctctcaggaatagtcactcaaggctaaaatataatgatagtcatctatcattaagacttacattgtagtgataaaaactgacaacttttcattgggttttttataacaaagtttggcaaaatagtgatatggttgctgacaattccataaattttcagtaaaacatacagtgactgaagttactgcaaatctaatgactaaaatgtaatcagaataaagttatcacctatgaacaaaagcatacacaattagagaaaaccttatcaaatgttgcatta

SEQ ID NO: 270546 - DNA, 581 bp, Homo sapiens
ttggcgaatgtcagttgctttcccttctgcaccctaataggttaaaatcttctcaggggcaaggactcagccttcttctccctcgtgtccattctcagtgcctggcacaatgtaatagaaaccataggggttccccaaccatgcatatgctccttcacattcttcagctttcctggcacttagggttagggtcatgtattggaatctgctcaatatgctatgtataaaagtgatattagccaaatccatcctgttaacactctgggttttttttccccatgccatggtaaccttggggtccccatatcccagactgaatagcacaagatgagggacagtgtcctgacctgcataggactcacatgactgaaaagtaaacctttactgtcttarcaactatgctttagggggttacttatgaccatggcagagcctaacctatcttgactaatatacaaaacaatgtgaacacatgggaggtgcggagaagtgcttgttggttgactaattaaatcatcataacaaataggatatcagagagtcctgactgaataaagactatttgagaaatacaggcctca

SEQ ID NO: 270547 - DNA, 547 bp, Homo sapiens
tcctgaaatgttatttcgttgttgctggctgctctctacaaaaaagactgagaagagagtatagagcgatagtatatgaaagagggtagggaggaatgatttaagtcttaaacattccacagtatgtaaggcttttacattataaaatgtaaacaggaccttgatgttagatgtatgataatctaatgtgaaatgtacaaaatctcccactaagaggctttataagaaatagcttagcatttatyttcaatgactttaaaaatgtcctgacgggatctaagtaacacaatatttggattgttttttaaggtaatgttgagcccacagttttttacaggtagtgtgctagtatgtcctatctcattttgtaactattatttttcacattttatagatgagaaaattgagctgtagtgaagttaactatcttgctaaagatcacatggggagtgtgggaaccaggattttaacgcacattggactccagggccctagttcttaatgcttaaacttgattatgtcactgaaaatattcctatgggatata

SEQ ID NO: 270548 - DNA, 561 bp, Homo sapiens
ggaaaatgataaaaacagagatttctgtggtacccaacatgagatataaaggtacaggaggacacagtgagataaaaaccttccagaaagaacttttaatattttaattcctttgcttcctgcaaaactcagtttgtcctcctcttcatctatgtccccttgatattccatagtgaaaaccctgtctcctgccatctccatagttgttaaagaacattgattaaactaatgctatgtggctggagttgtgccaagtggtatgatacaactataactcgtgtttcctgaaastagtcagcctgaagaccaggtataaacaggaggctgttattttatctaccatgatacgtactgcagcctatgaaaaactgctttaattatttctgggagttcccaggaaattcccacatgagctccacattcaccagagtctaaaatgccaaagccttcttccattttgcatagaagtgtatagaatgcctctctttcattcttttattttcacgctttattattcaatggaaaagtcatccaacggagtccttcagttctcaccaccag

SEQ ID NO: 270549 - DNA, 465 bp, Homo sapiens
ccctgcttttcctatttcttccttgttagtacgagtcactccattgaccaacaaaattaccayacagtgaccacctctggtgcatgttgaatacttgatttagggctattacgcttgtcccaaagagctcaaagcagatttaaatttccataaatctatttgctagacatgtaggtaaaaaacttatttgagcaacacaggtagtttttatttaagttggcctttagtgttcttttttaataattttcattacaagagccataaaaccagcaaatttagaacaatcccactcagtaaaaagaaagtcaaatttgatattccaatgttaatgcctaaataacaacaattttaaaatttcccaaatcatgagtgattgggtgcattcacttatgagatccaattaaccttctgaggcttaggggcaaatgaccttgctagaatatatcaggaaagggaattgcaaaa

SEQ ID NO: 270550 - DNA, 541 bp, Homo sapiens
ttcataagaattccttgctctcagccctaatgatttacaccttccctttaaagtgcataagtatcataaaattaagttgtgattatcagatattttgtataaaaatttatgaattaaacatgtgtgactttttcccctttgttctctctcattttkgcagcacctagatgcagaattcatgaagccctagggatggtgaggccatgagatagaaagaccttggtccctgacacttggtccctgacatattaaagatatctgatcatctttaatatgagcaagaaataaacttgtattgtgttaagctattgaaattgtgaagactagttgttacagtagctagcattaacttaatacaactctgtatttacttttaattcactctgatgatctgttcctttaattaatctatataaaccacatagtgactaatgatatagttgaattaatatctaccatgttttaattattctaattattgcatttgttctttgtttctttttattctcctccttttctgccttctctggttcagttgact

SEQ ID NO: 270551 - DNA, 603 bp, Homo sapiens
tagggtgaaaatttgccttgcaatgtctattctctgatggattcaagaaaaatcattggttcacaatttgattagcttttccttgtgaagacagacataacaacttccaagctctttagacgctaaagctaaaactggaagtcttatttttagttttttattcaattgataattcttcctatggcaaggactaactcctcttattyattacctatgtgtcggtctcacatgtttttaatatgtcatgaaataagaatatatacgagtccttctctcttgatgtgggataaacttgcctacggaagttaaacatttggggattttcttaaaaacaaaaaaatctggcacagtggctcatacctataatctgagcactttggaaggccaaggcagggagatcacttgaggataggagttcaagaccagcctgggcaacatggcaaaaccttgtttctagaaaaaaatggaaaaaaaaaaccccaaaaaaacaaaaaaaacaattagctgggaatggtggcacgtgcctgtaatcccagctactcagaaggctaacgtgggaggatcactgagatcacatcactgcactccagcctgggcaacaga

SEQ ID NO: 270552 - DNA, 520 bp, Homo sapiens
aaggaactgagagaaaaggggtcaagctcaaaagccggctttttattcaaatgayttatacccaactacactattgattctgacctcagaattcctactcttgaaattttgacttaaattatcatctccagattcaaagactcagcaacctggttcataaacaatgtgacaccctggtaatcactggcttttttcctgtaacttctgctacttctacatagatttaacatactacctcttggcacaatcaggttgttccagcagtttttactttctagttaaacccaggtttttcacatggtggctgtgggtcagtcattgaccataatgacttttcagcagtctaagctaagaggcacattatccacagtttagccaggatggagctttacaactaatgaattattttggcagttaatattatcccactgataccctaaaatgaaacaaaaacacatagataacattaaaacaactaatttagaacatgggaaactatgtaaagaaggaaaaaaaaacc

SEQ ID NO: 270553 - DNA, 645 bp, Homo sapiens
gttgctgggctattcttctccacaggttccaggtgtggcatgtggacacattcatactttagtaaattagtatgtttgcaataggagcacatagaagctgagcaacagtctgcaatattaaacatttaaaatttttaagagctaaacaacacagaatagccaaatatgctcaaaaatacacgtagtaatcttggatactttgccaacttttagaaaaataaacaccatagccttacacatttttaaaattttgaaattgtatagctatcaragttttcagctaaacttgtatcttttaaatatttatacaaatagtatgtagatttcattcatacttcaatcctaggcctcgcaaccttgcaagtgttaagagtaagtctattaacttactcttaataaggcactttgtggattcaagacaactttgaaacatagggaacagttgaaagttaggactggcaatacttaaggagggaccactaaagaagagaaagacacaaagctggaatgcccaggctatactagaatgtggggtccatgagaccatgaaatgtgtctggtttttgttttgcttgttttaatggatctttggaggccagaatagtgtctggcacatagcagacactcaaaaacactcactgattg

SEQ ID NO: 270554 - DNA, 506 bp, Homo sapiens
ttagctatttggggaaagaatctttgcagatgtaactaagttaaagatcttgagatttaaagatcatccttgattgtctgggtggacctacatgccatgacagatgtcataagagtaaggcaggaggatatttgacagacagggaggagaaaacacagaagaggaggagacactgtgcagatggatgcagaaactggaattttgcctccacaagttaagtaatactaatagctctcggaagctgaaaaaggcaaaaaaaaaaaaaaaaaaaaaaattcttccttaragcccacggagggagtatggtattaccaagaacttgatttcttgattttggacttctgtcctccagaactgtgaaagaataagtttccatttttccatcgtattaagaaaccaagtttgtgacagtttgttacggcagtcctgaaaatctagcacagagtgtctggagtttcacactgaatcctggcttgccctggtgggcaatggttttattttgtttt

SEQ ID NO: 270555 - DNA, 576 bp, Homo sapiens
gatactagattccatagataaccrgaaaggagaattgtgatttttctcgtcttgagaatatagtaatgacaaaattagccctcaaaacagacttagtaagaagatgaaattccgtggaaatatgatacaaacagaagactttgttggcagttgatgaaaaaatatgttcattgatttttttgttaaataaaacagtttggtgcttttaaaaggagctattaaatataatagcaacttctattttagtggctacacagatgaaaactttatgccaacttacctaattaaactttaattttaacattggaatttatccagtactatacatacaatgtgacagacataagaaacttgtttccaggatgatacttcttacccacaaattcaatgaaagtacttacatttagttcccccagtacctggttcatgactagtatagcatttatggtattgtattacaatttttctcactgcctcctgcaatagaatggtagctcttcaaatacagaaactatgtcgttctcatcacaaaatttaaaacatagtgcctgacccaccctagattctcaattaata

SEQ ID NO: 270556 - DNA, 647 bp, Homo sapiens
aaaaatagaacagcaaacattggctcctttactggtcatggatccgggtgtaatggatgttaagaaagggtgttacaatggatcaactcgggataagaaatactaagagtaaagcatgttttgaattcaagatgaaaagtagagaagaaaacttcactatagaatcatagaatgttacagttttaaataactttaaagataatcttggcagggtgaggtggctcacacctgtaatcccagcactttgggaggctgaggcaggcagatctcttgaggtcaggagtttgagaccagcctggccaacatggtgaaaccctgtctctactaaaaatacaaaagttagccaggcgtggtggcaggtgcctataatcccagctactagggaggctgaggcaggagaatcacttgaaccctgaggcggaggttgcagtgtgccgagatcatgccmctgcactccagcctgggtgacagagacagactgtgtctcaaaaaaaaaatattaattcctcattctaaagatgagaaaactcaggcacagagaaaagaaatgacttgcccaaagtcatataatggcagatcatagatgaaaagccaggtcttttgacttgtatccagatttcctcttgataatttcacacttggtgcac

SEQ ID NO: 270557 - DNA, 550 bp, Homo sapiens
ctgattttcaaccactcatttcctaggtttaaagaaaaagtccttataatagctaaggtttccaataaagccactctttagaggactggttagataattactccaagctccattaagaaatgccccattcccaacacatatctagcagcacacctgtgttgtctgcacagcctggcctcctgtcatctccatgtgagtgtttccaaacccatgtgtcttttgggtctcctccattcatagagggacataagtggaaacgttttgatgtatgttaattgatgtttgtccaaacattatgaagtaataatccacaaaagccacagaagcttttacaaagcaaagtgaagggaacaatcaaagttttgggtggattacaagtccacacccgggcaaagcagacttayagcatttcgtccttccacaatgatactataaatgaagcaaagaaatgtttgttctcttataatcccctctattatgtggtcttgtatgtcgtctcacgcaattggtgctgttttacactgcaagcttgccatggggcagggcatgg

SEQ ID NO: 270558 - DNA, 430 bp, Homo sapiens
aaaaatctttaaaatagagaataaataaacaagttttaaaatcaacaaaagttgacttgtttgaggaaaaaatgaaaaacctttagcttataaaataagtcttaacaaatttaagaagactcaaatcatactgattatcttctctaacataaacctttatattagacttataaaattaatattagaaataaaaacagaatcattgcaactgatttcatagaaataagattataaaggagtactgtgagcarttatatgccaacaaactggtaacaagaaatgggtaaattcctagaaacatacaacttaccaagactaaatcatgcagaaatagaaaatctgaaaagatctgtgactagtaagcagattgaattagtcattaaaatcctcccatcaaaaaaaaaaaaaaaaagcccaagaccagatgaca

SEQ ID NO: 270559 - DNA, 477 bp, Homo sapiens
agagccaagtgaactcctgcatcttgtctcccttcttgctaattatttaaagagatgactccaacgccatgtttgaaaatgtaagaaccttttattactaagggtcaatattcagagcatggcaacacagtttatttcatgatacttcttaaaattcttttcccactgacaaatttggccctttcacagaggcaggatcaktgagtttctggaaggaaaacgccttgggtttgccaagagtttcccctactgggctgatgacacctcctaaaactacggagaggaaaatgctctgcaggtcaggcagcaggagttgaggtcccaactgtgtctcaatttgaaagactgagtcaggcacgcagctgccaggtgcctgaggaatctgaattgttttgcaacattaaagtcattgtgaatgaggggaactggtcatgctgaaatgatgctactgtttctgtggaattttagtgatgccca

SEQ ID NO: 270560 - DNA, 551 bp, Homo sapiens
ttatccgtggcagaaactgtaatagttgtcactaattattttttcattttctatagtaayagaatccctgaactttagttgggtatttgaaatactcttatttcctagccattttgcacctagttgtgactatttgtctaaattctggatgcacattgaagtaatacatgcaacctatgccaaataaccttaaagggagagagtaggctcatcatctttcttcttcctgccacctggaaagtgatgtgatggctagagctgaagcagccttcttggaccttgacgttatcttaaaaatagaggccttatgtagtaaaactccaagcaatgaggcacctagatccttgaggctttgctccacaaagccttgatcacttacattgtatttctttcctccaggcataaaataagagagaaataagtgatctcattttaaattttagtgttacttgcaaccagctcttctcctaatatatcatccaacacattttttacattgcctttgcttgaaatgtttccagatgtggtttgtttttctttttgtttttcca

SEQ ID NO: 270561 - DNA, 551 bp, Homo sapiens
ttatccgtggcagaaactgtaatagttgtcactaattattttttcattttctatagtaacagaatccctgaactttagttgggtatttgaaatactcttatttcctagccattttgcacctagttgtgactatttgtctaaattctggatgcacattgaagtaatacatgcaacctatgccaaataaccttaaagggagagagtaggctcatcatctttcttcttcctgccacctggaaagtgatgtgatggctagagctgaagcagccttcttggaccttgacgttatcttaaaaatagaggccttatgtagtaaaactccaagcaatgaggcacctagatccttgaggctttgctccacaaagccttgatcacttacattgtatttctttcctccaggcataaaataagagagaaataagtgatctcattttaaattttagtgttacttgcaaccagctcttctcctaatakatcatccaacacattttttacattgcctttgcttgaaatgtttccagatgtggtttgtttttctttttgtttttcca

SEQ ID NO: 270562 - DNA, 510 bp, Homo sapiens
tgaagacacacactggggagttgattatagaagaacgacttatgaaaaaaaggagttataataagccacccatgtactttgatgattatgtttcaggactggaattgcagttggaaattaattcatttcaccaatgtttgttgtgcaccacctctccttcagacactgccaggccctgggtctacaatggtgaatggaatctggaatggtgcattacacaggtaaattcaggcctgcactcagtagaaaaatggcataagaaacatttaaaattaagtgcggtagagctaaagtcaagaaagagaaaatatttggttagcaagaatcaaccttttgtggaggagggagcactaaaattgggatttgaaagatggctacgatttcaacagacgatyaaagagaggagggctttctccagaaaaagttacctgcagaggcaaaagggaagaactcaagaggcatgcaagacgttgcatgggaaagtttctagttgtgatattgtatgagtat

SEQ ID NO: 270563 - DNA, 649 bp, Homo sapiens
acaggtgtgagccaccgtgcccggccttaacttgttttattaacaccataaagcagaaaataattactcttgtcccctcaaagcaactcagtcacttccagtttgacaacagatatatgttgagtctgtgctcagttaatttaggatttatattcggtcagttcaatgatccatactcaaatccattgctgctaagattgcctgtccctccctcctcatcctcaggatgatgtttggattcatggggcatttatataacagcctggggaggatgaagctgggagcttgtcctactcagtttccagcctggttttgacctggtccattcactgccaggattcctggrctggtctcagcttctgccctgcctgaccccagaagatcaacctgatagatcagattgaagggttggcttgggcaaggattcggtcctttagcctctgagtttctaaggccatccctggagaatgggctgtgggatccttggtgggattcatgaccaggctgtgggcttgtttcaggtattatttttaagtatttagatacatggtaagtgagttttcacttgtacttcataaatggtgagagcaggcatgagaagaaaaaaataaaatgtgttcttttttatcagtatcttggctattttcag

SEQ ID NO: 270564 - DNA, 595 bp, Homo sapiens
tgttatcaaacataatttccaggaaatttaacttctttcttttccaactgacaaagcccaaaataaaaaattgagcattaaattgagcattacttagtaatttgaaaaaaaatccattttctccaaaaacaattaattttcagaaatttctattaccattattaagccattaataggcacttcctaataattggataaatacagaatagatatttctcacttaatctttttattcttttcattaattgcttttaaagttgcatcaatctattagactggtattttaaactttttagatagtgtctttttttttttcttctttaaattttacctatacctttccacaagacagttgggaactttcagttcaataacacactttatgttatggattttatattcaagaaaggtatataaatatgtagcaaatatggaaaactacatatataaatatgtagcaaatcttggaaaccttttaggtgtgatggctgctcaggcaaaccatggrgcaagattggaaataataatggtctgcatacatcctcccataggcagtgaacaaggttggccacattgactctattatgactgagac

SEQ ID NO: 270565 - DNA, 595 bp, Homo sapiens
tgttatcaaacataatttccaggaaatttaacttctttcttttccaactgacaaagcccaaaataaaaaattgagcattaaattgagcattacttagtaatttgaaaaaaaatccattttctccaaaaacaattaattttcagaaatttctattaccattattaagccattaataggcacttcctaataattggataaatacagaatagatatttctcacttaatctttttattcttttcattaattgcttttaaagttgcatcaatctattagactggtattttaaactttttagatagtgtctttttttttttcttctttaaattttacctatacctttccacaagacagttgggaactttcagttcaataacacactttatgttatggattttatattcaagaaaggtatataaatatgtagcaaatatggaaaactacatatataaatatgtagcaaatcttggaaaccttttaggtgtgatggctgctcaggcaaaccatggagcaagattggaaataataatggtctkcatacatcctcccataggcagtgaacaaggttggccacattgactctattatgactgagac

SEQ ID NO: 270566 - DNA, 545 bp, Homo sapiens
catataaagaaacaggattggctggatcctaacgttgttggataggcagtaagtacaacttgcaagatctttagctctaaattcttgtttgatacttgacttcaggctattaacatttaaccagagactcataaacaaaatgacctatggttaaactcatcacgttaatgtgtctactcatgagaaataagaacgcacataaaaatagtacaccatagattttgtctggaagggtaagatgagagcaagaggacaagggaagatgatttgcttgaggctgatggttctgggcacagtggctcccagactcctccttattccactgctttcattgcccttacagcacatsactgggatgaccaaggaagttcctcctacaaagaaatacatttcagtgtctgagtttccaagcacatattggcatccattccttggctattgaactgactcttctttcttcctaattacatccctaatgtaaatacatccagcaataatccttaattacatcctcttaattacacaccgactgcaaatgcatgcca

SEQ ID NO: 270567 - DNA, 385 bp, Homo sapiens
tctttcttttaattgttataatttacataccaaaagtacacagatcttacgtatatagcttgatgaatgtttccataggtatatacctgtgttccatgccttcttaaacagaatgtgcatttaaacattatagttttcctgatagcctcagaaactattatgttaaaaatataatattgacttcaaggtctaatgatatgactggaaccccttacccctatatttaaagtcaattgggctttattttactttgkttattttgttttcctatagatgtctgccttctttattgttttagttttctttacatccctgggcttaacatggggtcaaataaaatgttcgacaaatgtttacagtaacaaattggatatcagatgtccat

SEQ ID NO: 270568 - DNA, 551 bp, Homo sapiens
gaattgcttcctatttatctatataaaatgcttttatatatattttattacattttttaaccgcaatgtattaccctggaaagaacactacctgataggacagaatacaaaatgttctgggaagacaaaggtgggacaaaaacaaaaggatggatcttatagtatcttttatttccatgattctaggataattattattagttatctatttgtaaagttgcctgggtttctaaacctttttcccaaatgttcttatagagttctttaaagtagcaactttttagacatctagtaayactttttaattccgtgaagaacaatgataaccaaaatattttctatgatatatggaagtatataattaaatcagaaaccttatcaaaggctggctatttctgttcaccatcagacttgaaaactaggaatttatttttggttgactttgtattttttttcttatgtgtcataagtgtgattatcaaggtagtaaaagaacatcttttcatcacaccagaactgtaaaatatgagacgtatttatctggctagcca

SEQ ID NO: 270569 - DNA, 551 bp, Homo sapiens
gaattgcttcctatttatctatataaaatgcttttatatatattttattacattttttaaccgcaatgtattaccctggaaagaacactacctgataggacagaatacaaaatgttctgggaagacaaaggtgggacaaaaacaaaaggatggatcttatagtatcttttatttccatgattctaggataattattattagttatctatttgtaaagttgcctgggtttctaaacctttttcccaaatgttcttatagagttctttaaagtagcaactttttagacatctagtaacrctttttaattccgtgaagaacaatgataaccaaaatattttctatgatatatggaagtatataattaaatcagaaaccttatcaaaggctggctatttctgttcaccatcagacttgaaaactaggaatttatttttggttgactttgtattttttttcttatgtgtcataagtgtgattatcaaggtagtaaaagaacatcttttcatcacaccagaactgtaaaatatgagacgtatttatctggctagcca

SEQ ID NO: 270570 - DNA, 559 bp, Homo sapiens
ataggacaagtgcaagagacagcagggtttagaagttctatgacttgatttgtctgtctttccactctccagctaagactccagagcctcccgtgattcctacctcccccaatcctctcaaagtaaagtgagaggaaaaagccatggggactgctggcagtcatcctcacyattcccaaggtaagagccatatttgcagccccttattttgaattctacagaaatcagcttgacctacagtgaccctaaataaggttaagctttctgactatttttcaaatgaaagggctagctgtaaattctagattttagaattataaatgtgaggcctattattaaggtactcatactccaaaaaaaaaaagctgtatctaatctctaacttaataatgatgtctctacatatgtgcactgtatttggtgatgagtgtcatttatcagaagtggggatgtgtctgtgtgcatgccgcatcattaattttccatgggtcaatgtattccttcctatttcccatatcatctcttaatgaaaagtgcttaaatgacatttgaatatcag

SEQ ID NO: 270571 - DNA, 533 bp, Homo sapiens
gccaatctagtccttccacgttcctctgcttgctttcatcctagccacgctggcagctgattagatggtgcccatacagattgagggtgggtctccctcttgcagcccactgactcaaatgttaatctcctttggcaacaggctcacagacacacccaagaacaatactttgcatccctcaatccaatcaagctgacattcaatattaaccatcacagcttcctactcctgacaaactcatatataaaaaacgtggttaattgcaaatgaagacattaataattagtcatttatttttcctgcaataaaacaagcctatttytgaaagaataaaagattaaattgatcagaaaaaaaaaaacttaagacttattttaaaaagctggatcctgtattcattttaggcacccattatttgtctatctacattaattcaacaaacatttacttggtgcctgttataggaaaagcatcgcactaggtagcttaagccttgcttttggaaaataaaaactgaaactgctgattgtagc

SEQ ID NO: 270572 - DNA, 533 bp, Homo sapiens
gccaatctagtccttccacgttcctctgcttgctttcatcctagccacgctggcagctgattagatggtgcccatacagattgagggtgggtctccctcttgcagcccactgactcaaatgttaatctcctttggcaacaggctcacagacacacccaagaacaatactttgcatccctcaatccaatcaagctgacattcaatattaaccatcacagcttcctactcctgacaaactcatatataaaaaacgtggttaattgcaaatgaagacattaataattagtcatttatttttcctgcaataaaacaagcctatttctgaaagaataaaagattaaattgatcagaaaaaaaaaaacttaagacttattttaaaaagctggatcctgtattcattttaggcacccattatttgyctatctacattaattcaacaaacatttacttggtgcctgttataggaaaagcatcgcactaggtagcttaagccttgcttttggaaaataaaaactgaaactgctgattgtagc

SEQ ID NO: 270573 - DNA, 724 bp, Homo sapiens
caaccattgacttggggcttgaatatgtgacttgctttggccaatggtatattagcacatatgactgaaaaggttggtaatgtgctcgtgcatatgggcttgccatcttctatctctgccattgccatgagaagaacatgccacaartagcctattgctttcagaataatgaaagatacatcttgtagacatgaaccaaacgtgcaatctggagctaagcccagctgagtccagcctaaattgttcaaatgccagtcaacctgtagaatgtagcttaatgcagaggcacagatatgtgaatgagaaataaatgcttagggttgtgagtcattgatgtttagagtggtttgttatgcagcataattaggtatatagtggactaatacaaatatttacaagctaaattcaagattataggaataatagaattgatatctcacaaaattattcatttgcattccaaaatgtgcacccagtagtctcagaataataataccaatactgctgctaataatatgattattgaaatcagcctaagcttttattttttgcaatttttaatctttaggatgtttccctttattgatgtacagtgaaaattttctgttatgaagtcatttggaatggtttttatgtgtggttatgccacaactggatatgcattaaatactatttgtttgattttattttggggaatttccccttaaaattcaattttacttaa

SEQ ID NO: 270574 - DNA, 724 bp, Homo sapiens
caaccattgacttggggcttgaatatgtgacttgctttggccaatggtatattagcacatatgactgaaaaggttggtaatgtgctcgtgcatatgggcttgccatcttctatctctgccattgccatgagaagaacatgccacaaatagcctattgctttcagaataatgaaagatacatcttgtagacatgaaccaaacgtgcaatctggagctaagcccagctgagtccagcctaaattgttcaaatgccagtcaacctgtagaatgtagcttaakgcagaggcacagatatgtgaatgagaaataaatgcttagggttgtgagtcattgatgtttagagtggtttgttatgcagcataattaggtatatagtggactaatacaaatatttacaagctaaattcaagattataggaataatagaattgatatctcacaaaattattcatttgcattccaaaatgtgcacccagtagtctcagaataataataccaatactgctgctaataatatgattattgaaatcagcctaagcttttattttttgcaatttttaatctttaggatgtttccctttattgatgtacagtgaaaattttctgttatgaagtcatttggaatggtttttatgtgtggttatgccacaactggatatgcattaaatactatttgtttgattttattttggggaatttccccttaaaattcaattttacttaa

SEQ ID NO: 270575 - DNA, 724 bp, Homo sapiens
caaccattgacttggggcttgaatatgtgacttgctttggccaatggtatattagcacatatgactgaaaaggttggtaatgtgctcgtgcatatgggcttgccatcttctatctctgccattgccatgagaagaacatgccacaaatagcctattgctttcagaataatgaaagatacatcttgtagacatgaaccaaacgtgcaatctggagctaagcccagctgagtccagcctaaattgttcaaatgccagtcaacctgtagaatgtagcttaatgcagaggcacagatatgtgaatgagaaataaatgcttagggttgtgagtcattgatgtttagagtggtttgttatgcagcataattaggtatatagtggactaatacaaatatttacaagctaaattcaagattataggaataatagaattgatatctcacaaaattattcatttgcattccaaaatgtgcacccagtagtctcagaataataataccaatactgctgctaataatatgattattgaaatcagcctaagcttttattttttgcaatttttaatctttaggatgtttccctttattgatgtacagtgaaaattttctgttaygaagtcatttggaatggtttttatgtgtggttatgccacaactggatatgcattaaatactatttgtttgattttattttggggaatttccccttaaaattcaattttacttaa

SEQ ID NO: 270576 - DNA, 435 bp, Homo sapiens
acatttggggaaaaaatgcaccgtttggagtagaaaggagctccgtggcgggagaaaagatgaaattgtcaagaggaagtttaaaggccaaggacacacgaagtctttgaaacaataagggtgaagaagtcaagaagcagactcgccaaagccatattgaaacaatttattttataggatccctatatttccataattagtaaacagagycacactggaaacacgggctgtgggctctcgagctcacacgggcctctcgaagaggagaaagtcaagttgtcacgggtctctttcgcctgggtatttcacaggaaaatacaaggaggcgggaggcccgagaaagctgactccagcgaagtttgcaataaggattaactggagaaaggaagtccacagcaattaaaacccctaccctggctcattagtattcatgac

SEQ ID NO: 270577 - DNA, 598 bp, Homo sapiens
caggattggaaaaccaaacatcgtatgttctcactcataagtgggagctaagctatgaggatgcaaaggcaaaagaataatacaataaactttgaagactcggggaaagttggtggggggatgagggataaaagactacaaattgggttctgtagatactgctcgagtgatgggtgcaccaaaatctcacaaatcaccactaaagaacctactcatgtacccaaacaccacctgctccccaaaaacctatagaaacaaaaaattttttaaaaaaataaagcattgattaaaagcaaaaataaataaataaattagcccacctaaaaaagaaagacatgctcacagttatttattgcaggatgtttgtatcagaaaagtayggaaatacacagaaacaatacaaatgtcctttagtaaggaactggttgtataattataaagccacatgttggcgtactgtgccactgtaagcagaaattaagccagggatggtggtatgggcctgtagacccagccaggaattggagactgtgctgtgccatgatcgtgcctgtgaaaagacaatgtactccatcctggacaacacagccagaccaac

SEQ ID NO: 270578 - DNA, 535 bp, Homo sapiens
gcgcgctgagctccccacccgccgcttgcgtcctgctccgtttacagcagtaaacactgggcagcggcccctgcgtggaagggggttgttcggaagtcgtttaaagacagtgtcaccctcagggtaaatgcccagaagccgggccgcgcatcctygggctgagaagtgtgggaacgcccgagaccaagcgagactcaggccggagtttggctgcgggtcaggctcagggtctcgggagaagaagccgtcagacacggcagggcttaaaccttctagaaagcatatatatccatccactccttctccaggagcagggagtaccacccgggcggtggcccagcggcgaggccgctcccggcgccgcgcctggctgaccgctgcggacgtttcctgtcccgccgcccaaatctcgcgctcccgaggtaactagagagggaacggagggcccagaggctgcggaggtgtgaagggacagcctgaggccagcgcctcgggcgtgttctcctggctggcctggagaactgcttttatttat

SEQ ID NO: 270579 - DNA, 545 bp, Homo sapiens
agctgaaaggatgttcaacatcattagccattagagaactgcaaatcaaaactctagtaagatagccctgtacacccactaggatgactataataaaaaagatagacaataataagtgtttgcagagttgtgtagaaactggaagactcatacattgctgatagaaatgcaaactggtgcagccactttggaaacagcttggcagttccttaaaaactaaactggcttgctgtatgagcctgcaattccactgctaggtatatatccacaataaatgaaaacatatgtctatgtaaaaacttgtacacaaatgttcacagcagcatattcagaatagccagaaagtgatacaaatccaattgtctttcatacagtgaaatattcagccataaaaaggaatgtggtacagctacaggattcaagagagatgaattctgaaaacagcatgctaagtgaaagatgccagtcatggtagaccacatggtagaccactatatttatatgccatgtcaaagataagaaaatcamtggagcacagtggctca

SEQ ID NO: 270580 - DNA, 582 bp, Homo sapiens
catccccagactgtaaatggcttgagattagaaaaaaaaatttttttttactttatactctaatatcaccattctgtggctggcacacagtattcaataaaggtatgtataagggactgtataacttccaattaacgtttctgatcarcatgagacaactgtggtaataaacttagttgatatcattcaattagaaagcaaataaatttgacattttcattagcttgtacggccctagagtgggtaaactttttgcccaaaatatttttgaaagacagaaaatacctcagattagtttatattattattcttagaagaactgagacctttatatcggaaccctttgctaaagaggggtccctagtcagataaatttaggaaactctatgttaaacaaaattaaatatttaacctaagtcctcattgtgcttttatatgctcacattcattctatctccaaaagacatttccaaatttgctgaatctcagcatctttttttactaaacactatcaatacggtaggacttcagcattctgaagacaactgtctggaaacatctactaaattcggtagtatttga

SEQ ID NO: 270581 - DNA, 582 bp, Homo sapiens
catccccagactgtaaatggcttgagattagaaaaaaaaatttttttttactttatactctaatatcaccattctgtggctggcacacagtattcaataaaggtatgtataagggactgtataacttccaattaacgtttctgatcagcatgagacaactgtggtaataaacttagttgatatcattcaattagaaagcaaataaatttgacattttcattagcttgtacggccctagagtgggtaaactttttgcccaaaatatttttgaaagacagaaaatacctcagattagtttatattattattcttagaagaactgagacctttatatcggaaccctttgctaaagaggggtccctagtcagataaatttaggaaactctatgttaaacaaaattaaatatttaacctaagtcctcattgtgcttttatatgctsacattcattctatctccaaaagacatttccaaatttgctgaatctcagcatctttttttactaaacactatcaatacggtaggacttcagcattctgaagacaactgtctggaaacatctactaaattcggtagtatttga

SEQ ID NO: 270582 - DNA, 521 bp, Homo sapiens
tgtatgattccttcaatatgaaacgtccagaataggcaaatctgtgaaggcagaaagtagatttgtggttgcctaaggctggggttgggggatggagagtgactgctaatgagtatgggatttcactgggagaggggtgatgaaactgttataaaattagatagggatgatggtggtataactckgtgaatatactaaaacccactgacgtgtacattccaaatgcgtgaattttatgataggtaaattatatcccagtaaagctactacaaataagagtccatttttttctgtgggtacttattattttagctgtgttgatctcactctgctgtttcccaactcagatctttacacatggtgtgctgggaatgctcctcccaattttgtctacctggcaaattctcacttattcaacactcagcttccacattaaccctcctgtgaagcttttgtgctcccaggagagcagcacttttctgcattgcctctttatttggtacctgtgtaaaaacagttgc

SEQ ID NO: 270583 - DNA, 301 bp, Homo sapiens
gagccaccgtggtcagcccactagccacatttcaagtgttcagtagccacatgtggctagtggctagcacaatggatggcacagccattattatagaaacttctattggacaatgctgccataaagtgtacatgtaactgtggaaatgctgagttgcagggtatgcatatcctcaagtttaatggatatcrccaaattgcttttcacatcatcaaaattcttaattataagcaagagaacaccattatggatcattcaaacaagaaaaattcttttttaaaggatgttggatagcttacag

SEQ ID NO: 270584 - DNA, 301 bp, Homo sapiens
gagccaccgtggtcagcccactagccacatttcaagtgttcagtagccacatgtggctagtggctagcacaatggatggcacagccattattatagaaacttctattggacaatgctgccataaagtgtacatgtaactgtggaaatgctgagttgcagggtatgcatatcctcaagtttaatggatatcgccaaattgcttttcacatcatcaaaattcttaattataagcaagagaacaccattatggatcaytcaaacaagaaaaattcttttttaaaggatgttggatagcttacag

SEQ ID NO: 270585 - DNA, 549 bp, Homo sapiens
gcatttgatacaatcaacggacctacactgacacatcattatcactcaaagtccatagtttacatgaaggttcacactgttggtgggatatactctataggtttggacaaatgtataatgacatgtatccacttttacagcatcatacagaatagtttcactgtcctaaaaatcctctgtgctctgccttttcatccctcctatccctcttacccctggcaaccactgatctttttactgtctccatggttttgcattttccagaatgtcacatggttggaatcacatggtatgtagcctttcagattggtttttttcacttagkaatatgcatttaatattactgcctgttttttcatggcttgatagttcatttctttttagcattgactaatattccattgtctgggcatatcacagtttattatctatacacctacagaaggatgtcttggttgcttccacgttttggcaattatgaataaatctgctgtaaacatccatgtacaggttttcatgtggatacaagttttcacttcatttgggtaa

SEQ ID NO: 270586 - DNA, 643 bp, Homo sapiens
ttagtattacctatattttagaaacttgtttggaaacttgagtacgtgcttaaaaggttaagagtttgcaatgtttatagttctataaccaactaaatagaagatcaaattcatattttagaatccggatatttctaacgttagtcaccagaaatgtgtttgctccctcccatttttgtagactgatttaacagcactattttatatgaagtgaattgctttcctcatttgtttttgatagggatgtaggaaaataaaatattttatcgtgtgaatcacttcagtgatagaattaaaaatgacatgggaatattgatactacagcctaaagcatcttccttttcctcaacagacttaacctacatgtcatattttaaaaagggaacaaggagctaayagaataaatgattatatgatatcaccctttgagtcttctgatttgtaaattattctactgtagtataattttatttgctcttaaccttgcagtgcagaatgtagtttttctattctttgatatatatcatagcatgaaaattataaacaaaaaacaagcagagttcttagagaataaatatatcttgtagtgtttttttcatgactactgctacaaactacatcgatgctaattatataatggtta

SEQ ID NO: 270587 - DNA, 425 bp, Homo sapiens
tcttatatttgggtctttgatccttttttagttaagttttgggtataatgtgaggtatggatccaaattcattattttgcaagtgaatattcagttgtcctagcaccatttgttgaaattaatacccatctcccgttgaattgtcttgtcactcttgcaaaaacaaaaattaccagaaatgtaaggatttgtttctagactctcaattctatttcattgwtctctatgtctatcctgatgttggtactacaatgtcttgattaccgtagcttggaaatcaggaaatgtgaaaaatccaactttattcctttttcttaaaattactatggctattctatgtcccttcaattttcatatgaattttaggatcagattgtcaatttctgcaaaaagccagctgggatttttataggaattgtgttgca

SEQ ID NO: 270588 - DNA, 459 bp, Homo sapiens
ggagggaaaaaaaacatccaaactatatcactaaatttagaatttattttaaaaaataaattctaaaaagtgagtttttaaaatttaacttcaaaacttgccttcaataaagtacttatgtacagaagttggagagatggtcaatggagatacctatggaaattctgaaggagacttctagactttcaagggctttataggataataaagaatcccaatgattctctatcatttctaaatccactttaagtattccttttctcatccagccaagtgaggaaaattaataaaaatgatttcttttctatagtcacaatttatgttcagttttgctttaggttttaacagccagggctcatttcctggaatttggggtacataatgcttcagacctccattgcccytttgaatgccacttataccaatataaaataaagccatagttaaggaagaaggctg

SEQ ID NO: 270589 - DNA, 511 bp, Homo sapiens
atatggttaaatatgcttatgtacacatatgcttatatatacttatatataagtaaaataaatggacagcamtgatacaggggagatgaattaggatgattttgttattgtaaggtacctatgctacctgtgaaatggtagaatgtgacttgaaagtggacttggattacttgtaaacgtatatcgctaactctatggcaaccactttaaaaattaaaaagaaaagtacaactgatatgctaagaaattgaattatatgtagtgcttacttaaaactacaaaaggcacataaagagtagaaagcaaaaataggaacaaagaacaagagcaacaaataaaaaatagttttaaaagtcatctatatgtatatgatttatacatatagatgacttttaaaattattttgtatatatagtaaaagtatatataacatatgcaaaagtatatattatatataatatatatatatatataaatccagaacactgaaaatatcaaatcgtggtgacaa

SEQ ID NO: 270590 - DNA, 557 bp, Homo sapiens
agtcattcagccattctaacagatgaacagaacagggtaccggcgaagtccaaggaagttgtgaggcatgcttctgcagttgcctgactacacatgataaatagcctacactttccaggctatttgtgataactccagctccccaaaaactctggacagtggctttgtcacttacaggcttgctgcataaataaatcttagctattcaatatctatattattcattcaaaaaggactctgagcaatttcataaagatcaaaagtagaataatggtaagcaggtactgtaaggagtgaagacttactgtctaatggatacagaatttcagtttgggatgatgaaaaagttatggagatggatggtggtgatggtggcacaacaatgtgattatacttratgccactgaactgtatacttaaaaatggtaaaaatggaaaattttatgtcatacatattttaccacaattgtttaaaaggacttcgaaaacaggaaacaggaatattattctctcatattctcctactctagttagttacttttgttggtaagggacag

SEQ ID NO: 270591 - DNA, 534 bp, Homo sapiens
aagttatgctgccattaaaatatggagtagaaaaagaatggagtttagtgtcagacaaaacttgactttgaacactggctcagcaccttactagctgtgtggccttgggaaattcattttactttcctaatctatagttgtctcatttctaaaataaattcaggagtattggaaaggaaatttacctcrtagggttatttactggataaggcaataacgtaatatgatcagtgtgcagcacattgtaagtgctcaataaatataatttattattgtttgtaaaaaatatttattgagatatactgatatattaaaattctaggaggtcctcaataccttttcaataaatccctttcctacttaaatcagccacaggcaatttctattatttacaactaataactgggaaatatatatgatcatagccaggaaaaagtatgcagttgacctgtattcttcaaaaatgtcaatgtggctgggcccacattagaggggaaaaattctataaagaaccttactggaacaattgatgaa

SEQ ID NO: 270592 - DNA, 623 bp, Homo sapiens
tgacattcatccttgtgctttggcaattttagaagttcagttgataaaattgactttaagaagcacaataaatgtgaagctaaagaagaaaaaacaattttttaattgaagtgaaataaggcaggtaaattcctaagtacatgagcctctgaagagtgtgattagggatgatataaaaggaaattaatttatcagaggaactctggccttgatcactgccaagaagcaatcwcataaatgtcatcataaaattagataaaatcatgcaattgtgtaacctttttgtatcttatagtaccccataggaatagtccccctttggatacaacgcttataataggtttgtgcaagagatagctggccagactcatttaaagctgggcatcagcagattgactgatgaactgaaagccgccatcactcgggttcaagaatttttgcataggaaactttgaataagattctttttttttttttttgagatggagtcttgctccatcacccagggtggagtgcagtggcacgatctccactcactgcaacctccgcgtcccgggttcaagagattctcctgcctcagcctccctagtagctgggattacaggcacacaacaccatgccca

SEQ ID NO: 270593 - DNA, 580 bp, Homo sapiens
gtccagctggggggggcatatgcttggggcagtgcagaaacaccagtcccctgccaccttggtcccctccagactttgggtgcccacagcccggtgcaagggaagccaaaaggggactgagggcagctcagtgctggcctccaggtaccccttggtgtgatcagcctgggcaccatggatagtggcaagaggcagatcagctcctgggtggaaggcagcagattccagctaaggccccaccttcaggccaggaagggcctgaaagctggggrtcaggctgccagtcccacagaccaatgtcggaatttgtggtgtcttttccagcctgcccatggctgcacatggaccaatcagcacacacttcctccttccaaggcccataaaagccctgggctcagccagagcagagcagacattgggatgactagctgcagagaacaggtacccactccagagcctcctctctgctgacagctgggaagacgatgggacaacctgcctgcagagaagggcaacccattcaagggcctcctctcttctgagagctgcagagacatcaggatgacctgcctgtagagag

SEQ ID NO: 270594 - DNA, 615 bp, Homo sapiens
ctcatggtggaccatcttttgctccatgttttagccaactacctgaacaaactgttgaactctttctgacttcctgggttgcaacattaaatgcagaatctctgtctagtgagcccatgtcattaaattcagcctgattcaactttaaagtctttccaaacttacttagtttactaattcaaatgctaatctcttccagaaacaccctgtcaaacacaaacggaactaatgttttgccagctatcttaaacatcctttagccagtgaagttgacacaaaagtaaccatcacaatgaaataacaacttctttcccttattgttacttctttaccaattacagccataactcagcctcatttttctcatccactagaataaaactaaaattccagattacagaattattctcattatctaatagcacctaacccagaaaaaggacaccgtgtcatcttgagtyatctctaaaatcacctaaaagaggcccagttttttaaataaaagagcagtgaggtccctgtcatgaaaatctctctctgtgcccccatattccaataagatataaaaatctttgttgcagaaaacaataaagccaactgtgtttggctaaatat

SEQ ID NO: 270595 - DNA, 615 bp, Homo sapiens
ctcatggtggaccatcttttgctccatgttttagccaactacctgaacaaactgttgaactctttctgacttcctgggttgcaacattaaatgcagaatctctgtctagtgagcccatgtcattaaattcagcctgattcaactttaaagtctttccaaacttacttagtttactaattcaaatgctaatctcttccagaaacaccctgtcaaacacaaacggaactaatgttttgccagctatcttaaacatcctttagccagtgaagttgacacaaaagtaaccatcacaatgaaataacaacttctttcccttattgttacttctttaccaattacagccataactcagcctcatttttctcatccactagaataaaactaaaattccagattacagaattattctcattatctaatagcacctaacccagaaaaaggacaccgtgtcatcttgagtcatctctaaaatcacctaaaagaggcccagtttttwaaataaaagagcagtgaggtccctgtcatgaaaatctctctctgtgcccccatattccaataagatataaaaatctttgttgcagaaaacaataaagccaactgtgtttggctaaatat

SEQ ID NO: 270596 - DNA, 615 bp, Homo sapiens
ctcatggtggaccatcttttgctccatgttttagccaactacctgaacaaactgttgaactctttctgacttcctgggttgcaacattaaatgcagaatctctgtctagtgagcccatgtcattaaattcagcctgattcaactttaaagtctttccaaacttacttagtttactaattcaaatgctaatctcttccagaaacaccctgtcaaacacaaacggaactaatgttttgccagctatcttaaacatcctttagccagtgaagttgacacaaaagtaaccatcacaatgaaataacaacttctttcccttattgttacttctttaccaattacagccataactcagcctcatttttctcatccactagaataaaactaaaattccagattacagaattattctcattatctaatagcacctaacccagaaaaaggacaccgtgtcatcttgagtcatctctaaaatcacctaaaagaggcccagttttttaaataaaagagcagtgaggtccctgtcatgaaaatytctctctgtgcccccatattccaataagatataaaaatctttgttgcagaaaacaataaagccaactgtgtttggctaaatat

SEQ ID NO: 270597 - DNA, 565 bp, Homo sapiens
cagttcatttttttaaaagagagtaaaaatagctaataaatataggaaaagaaagccaagcccaacaacaacaaagcaaaaaacactctcacatgggcaggtattggccaattggatattaatctcaatttgaagaaatactttgagagtgacacctcctttacaatattgcatcagaggggctaccttaagcaagctgcagaggwtaacttgattacatagctaaacagttttgccaattatataccatcttaaggaatttaaacacttgtgtttgtgtacgtgttagaaatctcacaatgtttaacatacttcaaaggatataacaagtattcaccacttccttccaatgctataatatttgtcctcactaacctaattttacctaaactgtaccctcagtcacagcaaaccaatctcctcctggaacttgaggtctctgatatcagtaatattttaaatttccctgttaacaaaacatttactgctgattttttcagatagtgtcatgtagccattaagactcaaggagagttttaaacatgctagttaatacaaattgtaa

SEQ ID NO: 270598 - DNA, 560 bp, Homo sapiens
tcaagaccagcctggccaacatggtgaaacccgatctctagaaaaaatacaaaaattagcagggtgtggtgacgcgcatctgtaacctcagctactcaggaggttgaggtgggagaatcacttgaatccaggaggcggagatcacagtggtctgagattgcaccactgcattgaagcctggacagcaggcttcagttggaatacagtgagaccctgttccaaaaaataaataaataaataaacaagtaaacaaataaataaatacatactgggttgcattttctcacatctgaatgttttagactagagaaaagaattaccacaatggaatgagagtatgtcacatgtcattttcttttattaccctcagaataaccagcattattattattatcataagcagatgaataaagtagagctccacaatgagtcataatagaagatcatttagagaaaacattaacattgtcattttytttgaaaagctcgagtgtgaataaaaacaaagaagggcaataaatattttaaatgaatagcttatttagttacctgaacaaaaa

SEQ ID NO: 270599 - DNA, 465 bp, Homo sapiens
taaaagacatccaaattggaaaggaagaagttaaattgttcctgttggaagacaacattgttttgtgtatagaaaaccctaagacaccatcaaaaaactattagaactaataaatgaattcagtaaagttgcaggatagaaaatcaatatacaaaaatcagtagcattcctatacactaataatgaactatctgcaaaagttaagaaaacaatcccattcataatatattccaaaataaataaataaaacacttaaaaataaacttagttgagaaagacctgtacaatgaaaagtatatagcattgataaaaaaaattgaataagacacaaataagtgtaaagatagctcatgcttatgaactggaacacatartattgttaaaatgtccatactatccaaaacaatatgcagattcaatgcagtccatataaaaataccaatggcattctttatggaaatagaa

SEQ ID NO: 270600 - DNA, 515 bp, Homo sapiens
tgatggaaataggaggtagagtctttgggaaataatcaggtcaaaaagtgttgycctcgtaaatgggattagtgcccttataaaagagaccccagagatctctcaccttttccaccatgtcaggacacagctaaaaaaatggccatctatgaaccaggaagtgggccctcaccagacactaaatttgtaagtgcctggatcttggacttctcagcctccagaactttgagaaataatctatttttcacaagccacttagtttatgatagtttcgttaaaacaactttaacatgttaagaaccccatttctaactctaacctgacccctaactttcactgtcccactagtaattaacatacctccacaaaataactaaatttttggagaaaattttataagtagaaaaaacacttgtctgaaattttaccttaaatattgggaatttcaagtgaaaaaacacagacttttttcagggattgtcaagaaggcaaaacaccctcaaagacctcaaaac

SEQ ID NO: 270601 - DNA, 515 bp, Homo sapiens
tgatggaaataggaggtagagtctttgggaaataatcaggtcaaaaagtgttgtcctcgtaaatgggattagtgcccttataaaagagaccccagagatctctcaccttttccaccatgtcaggacacagctaaaaaaatggccatctatgaaccaggaagtgggccctcaccagacactaaatttgtaagtgcctggatcttggacttctcagcctccagaactttgagaaataatctatttttcacaagccacttagtttatgatagtttcgttaaaacaactttaacatgttaagaaccccatttctaactctaacctgacccctaactttcactgtcccactagyaattaacatacctccacaaaataactaaatttttggagaaaattttataagtagaaaaaacacttgtctgaaattttaccttaaatattgggaatttcaagtgaaaaaacacagacttttttcagggattgtcaagaaggcaaaacaccctcaaagacctcaaaac

SEQ ID NO: 270602 - DNA, 558 bp, Homo sapiens
tgtagcattattcataatcaccaagatatgtaattgacttaaatattcatcaatgcaagcatgaataaagaaaatgtggtatatatatatatatatatatactcttggaacatgattggaaggaaatcctatcatatgcaacaacatcaatgattctggaacacattatattatgttaaaccaaggacataaagacaaagactacatgctctcacttacatgtggaatctgcaaaagttggactcatttaaatagagaacagaatggggattaccagtcactgggcttggggatttggaaagattcaacaaagatacaacatttcatttagacaatggggttaagtttaagagatctactgtgcaacatggtgaccatagttagtaacaatgtattgtatttaaaaaatcactaagagtagattttaggtgttcctatcataaaaaaaaatgatgatatgaagtaatgcatcttaattatctctatttgaccattccacaatgtctacrtatttcaaaacatcatgttgaacattatcaatatataacatttttcttt

SEQ ID NO: 270603 - DNA, 546 bp, Homo sapiens
aagaggatataagaattttaaatatatatgcatccaatatcaaagcaccaaaagatataaagcaaatattaacagaactgaagggataaagagatagctacagaattatagtaggagactttgatattctacttctaacaatgaatagattattcaggcagaaaatcaacaaagaaacatcagagacaaacctcactctagaccaaatggacctaacagacatttacagaacattctatccaacagtcacagaatactcactcttttcaacagtacatggaacattctccaggatagaacatgtatcaggccacaaaacaagtattaggaaatttaagaggattgagatcatatctagtatcatttcagataatgatggcaaaaatctagagatcattaatgggagaaacattggaaactccacagatatgtggaaattaaacaactcctgaacaagcaacagatcaagcaagaaacacaatggaaatcaaatagtatcttgagacaaacaaaaatggaatcacarcataccaaactcatgagact

SEQ ID NO: 270604 - DNA, 549 bp, Homo sapiens
actatgatcaattatgtgacagtgaattgagtttcctagaagcaatagagaaattccaagaaacattcaacctaccatgactgaatcatgaaaaaatagaaaacctaaacagaacaataatgactacaaaaatcgaatcaataataaaaaatgtctcaacaaagaattagkatctaacggcttcactggtgaattctacaaagcgttttaagtattaacaccaatccttcaaataactcttccaaaacattgaagagaaaggaacccttttaaatttgttttatgagctcagtattgccctgatattaaggccacacaagaaaactacaagaaaaaaattataggctaatgtctctgataaaaatagatgcaaaaatgtcagcgaactactggaaaaccacatttaacagtccactaaaagcatcgcacactataatagagtgagatttgtccctgagatgcaatgttgtattatcatatgcaaattgataaatgtaattgctatggtttgaatgtgtccccccaaaattcatgggatacgaactcaat

SEQ ID NO: 270605 - DNA, 549 bp, Homo sapiens
actatgatcaattatgtgacagtgaattgagtttcctagaagcaatagagaaattccaagaaacattcaacctaccatgactgaatcatgaaaaaatagaaaacctaaacagaacaataatgactacaaaaatcgaatcaataataaaaaatgtctcaacaaagaattagtatctaacggcttcactggtgaattctacmaagcgttttaagtattaacaccaatccttcaaataactcttccaaaacattgaagagaaaggaacccttttaaatttgttttatgagctcagtattgccctgatattaaggccacacaagaaaactacaagaaaaaaattataggctaatgtctctgataaaaatagatgcaaaaatgtcagcgaactactggaaaaccacatttaacagtccactaaaagcatcgcacactataatagagtgagatttgtccctgagatgcaatgttgtattatcatatgcaaattgataaatgtaattgctatggtttgaatgtgtccccccaaaattcatgggatacgaactcaat

SEQ ID NO: 270606 - DNA, 549 bp, Homo sapiens
actatgatcaattatgtgacagtgaattgagtttcctagaagcaatagagaaattccaagaaacattcaacctaccatgactgaatcatgaaaaaatagaaaacctaaacagaacaataatgactacaaaaatcgaatcaataataaaaaatgtctcaacaaagaattagtatctaacggcttcactggtgaattctacaaagcgtttkaagtattaacaccaatccttcaaataactcttccaaaacattgaagagaaaggaacccttttaaatttgttttatgagctcagtattgccctgatattaaggccacacaagaaaactacaagaaaaaaattataggctaatgtctctgataaaaatagatgcaaaaatgtcagcgaactactggaaaaccacatttaacagtccactaaaagcatcgcacactataatagagtgagatttgtccctgagatgcaatgttgtattatcatatgcaaattgataaatgtaattgctatggtttgaatgtgtccccccaaaattcatgggatacgaactcaat

SEQ ID NO: 270607 - DNA, 594 bp, Homo sapiens
tcaaatattctggataacccagattgatactttgcattaaattgatacaagatagaatctagtaaatgtttatttattcagatatagtctgataaatatatatttaacacttttaatgttacatataatatatatttcatacwtctgaattaagattaaataaattgcataaaaggcagattacttttcttgggcaaatatacacttactatgttcaaaggaaataaaaaatccaaaacctaactcatttggaatttattacatataaaataaattttaaaaataaaaatgaaaaaatcaaggaattgagataaattagaatgtcacacataaactgattttattaaattatatttcttacaattaagagtaaccatttctcagcaaattaataactcctattgagttttcactgttgttaaatttgcagatgattattaggtagggaggtaggtatataaacagctaatttatgaaactcttcacataaaccttacaaatactgttgttaaagatgactttgaaataaaaaccactgtacatatctatgtatagaaaatgttaactctcccttaatttgttacttttgcattc

SEQ ID NO: 270608 - DNA, 484 bp, Homo sapiens
aactggttctttatatttttttatttcgcttaaaacttcaaagcaatttgaactacagtgagaaagtcatgtcaatttgtaaactaaaagcccttacccagctgccttctgagtgatattttaacatctccagcaatagagagtacttgataacataaacttgtggctctctgcagacataaagtcagagagctgtttaatgatcacatttgcccaacaaatgtgagagaattcattggtttaatgacaatcatttgatgttayttttaaaaatagtgaggaaattatatacaataaaagaaaaataaatattatgtgtccgtttatgcatttctgactacatggatgccatgtttgtccagaatcaagtttggggaaggtcattaataaagaggaattacccaattctctgcaatttcacaagagagaaggtaggcccacaaaactgaatctctcactatgctattctggtgaagagaacaat

SEQ ID NO: 270609 - DNA, 600 bp, Homo sapiens
tgggttacaaatgcagatatggacaagagtatgaatagccagaggaatctgagtccttgactgaagctgagattgtaatgcactagtatggagagggcagggcagcttcctccatgaggtctgccagagaaagccttcrtaatcacttatgattcggcctgaaaatcacacataggtttttatccagaagccagacaccccaatgctttggtactatgttgtccaaactcctacaagtcctaaatcttaataattccctgaatttgccaatccactactcctgacacattttagactcacacatattgactgaagtttggtacatggtatacggtgttgttaaatttcaatgtctaatacctcctttttattgaactcatttttttctattctatacccaagcaacttgaatttattcttaaacatgtaaattgataaattatgttagtattatcttgacacatagaaacagaagaacaatatttcacaaataactttaaaatacaaaccagttcttattttaggccatttgatataattaactgggtttaaaatatgtttttaatctgtattattaatagtatctttgttagcaataaa

SEQ ID NO: 270610 - DNA, 600 bp, Homo sapiens
tgggttacaaatgcagatatggacaagagtatgaatagccagaggaatctgagtccttgactgaagctgagattgtaatgcactagtatggagagggcagggcagcttcctccatgaggtctgccagagaaagccttcataatcacttatgattcggcctgaaaatcacacataggtttttatccagaagccagacaccccaatgctttgrtactatgttgtccaaactcctacaagtcctaaatcttaataattccctgaatttgccaatccactactcctgacacattttagactcacacatattgactgaagtttggtacatggtatacggtgttgttaaatttcaatgtctaatacctcctttttattgaactcatttttttctattctatacccaagcaacttgaatttattcttaaacatgtaaattgataaattatgttagtattatcttgacacatagaaacagaagaacaatatttcacaaataactttaaaatacaaaccagttcttattttaggccatttgatataattaactgggtttaaaatatgtttttaatctgtattattaatagtatctttgttagcaataaa

SEQ ID NO: 270611 - DNA, 519 bp, Homo sapiens
caatagtgaactacacttatcttctcaacaaaatattattagaaccaatccgaaggtaattatgaagaatttgaataacatgcaaaaaattttttgagtactgattttatttcctgctcttttctttctttatttttttawcttttattttagtttcgggggaacatgtgcaagtttgtcatataggtaaattgcaagtcatagagatttgttttacagattattttgtcacgctggtaataagcatagtacccaataggttgtttttcaaacttcaacctcctccctccctccacaataagttaaatatataaacttctgtgtataatatagaaaaggcaaaacttttgacataaacattagactagagaagacatagtcagttctttttaagttgtttggtttgagtgatgtttttactcttttctagtttcctgttattcacatatttctccaaaaatcagccatataggaagttagaagcttcactgatttatggacctttaggttaatgattgg

SEQ ID NO: 270612 - DNA, 519 bp, Homo sapiens
caatagtgaactacacttatcttctcaacaaaatattattagaaccaatccgaaggtaattatgaagaatttgaataacatgcaaaaaattttttgagtactgattttatttcctgctcttttctttctttatttttttatcttttattttagtttcgggggaacatgtgcaagtttgtcatataggtaaattgcaagtcatagagatttgttttacagattattttgtcacgctggtaataagcatagtacccaataggttgtttttcaaacttcaacctcctccctccctccacaataagttaaatatataaacttctgtgtataatatagaaaaggcaaaacttttgacataaacattagactagagaagacatagtcagttctttttaagttgtttggtttgagtgatgtttttactcttttctagtttcctgttattcacatatttctccaaaaatcagccatataggaagttagragcttcactgatttatggacctttaggttaatgattgg

SEQ ID NO: 270613 - DNA, 509 bp, Homo sapiens
ttaaagtcaaatattaaacagataaatatgtaacatggcctttagagacatgtactactctataaagaaatacaaarcaggatactaatgccaagtaatataggataaaagagagtattaatttctatggagtaatcaataaggtatctccgcaaaggtgatatttaagtagaaacccaaaggaaaaggaagcaaactgtgaggctatgagagttaaggggagagaattccatgtatagggaaccctgagtacaaaagccccagagcaggggaactgggactgcaagtggacctgatgtagtgaaatgcaatgagttccaggaagaggagcagtgagaaatgaccctggggtgagtataggaggagacaggcaaaaggagctcctgatgaactttttgtcctctttcatgacactgatttttttacttccagggaaatggagcattaccaaagagtttgggcagaagcaaaacatgatttgacataggaagcattctgactgcaatgga

SEQ ID NO: 270614 - DNA, 509 bp, Homo sapiens
ttaaagtcaaatattaaacagataaatatgtaacatggcctttagagacatgtactactctataaagaaatacaaagcaggatactaatgccaagtaatataggataaaagagagtattaatttctatggagtaatcaataaggtatctccgcaaaggtgatatttaagtagaaacccaaaggaaaaggaagcaaactgtgaggctatgagagttaaggggagagaattccatgtatagggaaccctgagtacaaaagccccagagcaggggaactgggactgcaagtggacctgatgtagtgaaatgcaatgagttccaggaagaggagcrgtgagaaatgaccctggggtgagtataggaggagacaggcaaaaggagctcctgatgaactttttgtcctctttcatgacactgatttttttacttccagggaaatggagcattaccaaagagtttgggcagaagcaaaacatgatttgacataggaagcattctgactgcaatgga

SEQ ID NO: 270615 - DNA, 522 bp, Homo sapiens
tgcctttgaccacagactaaaggctgcactattggcttccctatttttgaggtttggggacttggactggcttcgtgctcctcatcttgcagacagcttattgtgggacttcaacctgtgattgtgtgagtcaatactccttaataaactcccctttatgtatacatcctatgagttcagtccctctagataaccctgattaatataccatctatttttaaaaaaattatttttcattattctgggggttgactgggcacaggtggttcttgctcaaggtttctcatgtagtgagtcagacagtggctgggtccagagtcatcttgaagatttcttcatttacatgtctaggattgataccagctggagtcctacttgagctgttggcctgaatgcctacacatagaytttccatgtggcctggccttcctcatacttggacactagattccaagagacagcatccaaggtgataagcagtagatgtagcaatttcttaaggatgatgtctgggaactgtca

SEQ ID NO: 270616 - DNA, 581 bp, Homo sapiens
gggctatcagttgcctctgggtggccctccccagggaaactcagagccaataccagtggatgtgctcagtagtacatggggcagttcatgtgtgatcctgagccaggggccctgcttcatgaagggtcagaggtgaactcttaggtgagctcttttaaagaggacaagccttccctgatattagagattatcctgttttcctagaagaaataatcagctataagagagggctacccctctacaactatgaaaggcttctagtatctgagagtggcccatggacaaaaactagcaatgaaataacaacctcagtttctatccacccacaaggaactaaattctgcaatacctctgtgactctgcagctggaccctgagctccagaacagaaagcagtctgaccaaaacatttaatttcagtcttgcgatactttgaacagaaaacccagttatgccttgcctgaacttataacccatagaatttatgagataataaatttgttattttaaaycagtaagttttgggtactttgtaatgtagcaattgataattagtaaagccacattggttagtaaaatgtt

SEQ ID NO: 270617 - DNA, 526 bp, Homo sapiens
acgtctacctcagtctcactgcttccaatatcaacagccaagggttttttttttttttttttttttttttccatccaactctctttttactccccagctcacagcctcttagaaaaattggagtggtggtctgtggagagggtgccagtgaaatgtacaaactttcccctagattgagagtttttcaaagcttaacaggcaatgattgatcatgagttctccacatgtttgaatgataaccccacttggagccagggtggtctcatttctcaaccccaatgaraaaaacgtgttaggctaatatcatatgaagtctaaaggaggatttcagagaaatcaaaactatttctgcacatgtaaagaactaattgataactcataatagctacaatagtatttttaacaaaaaaacttgagtgtcattattcatcagctctatgcaaaaccctttatatgtgtaatctcatttaaaactcacaatatcaccatgaggtatgaattattatcttcattttactgataagga

SEQ ID NO: 270618 - DNA, 581 bp, Homo sapiens
aatacttctggattttccacatgagatttcttatcatatatagtttcatattttccttcagccaaatttgataatcaatctgttacttttagatccctttctacgttaaatgtcagctcttaaacaaaaatcctgtatcttgatcaagatacatttcagtggaacgttagttcattcatcctgtctcttggaatttgtcaatttgaattttaagaatgttaggctttttcctggctacttgtcactgtggaagacttaactgtttctctacagctctaatttactttgtcttcttttaactttgtttaggccttagtattatttggtaaatgatcagtgaaaatctgagtttaataataaaatagcagaggtgtcttggtataggtctgtgggaagcttcatatattacagcatgtcttactctagaaaccattttttttttcatccctggattcaccarcattaaaaacaactctctgaggttttactcggaaaaatctaataacataaaccaggaaaagaaataccaccactgatcatcagagaaatgcaaatcaaaaccacaatgagatgccatctta

SEQ ID NO: 270619 - DNA, 569 bp, Homo sapiens
atgttggtcaacactgtggaaacaatgaaaatgaagtgatttactcagccatcagttagagaaatatcctatcatctgtctcatgtagattgtacaacataagaargacattttgtttgtctttaaacatttatctattgtatccaaggaaaaaaggcttttttcatttagtaacaataataaacagtcatccatatttcttacattgaattacagctgcaaaaagatattagagctcgtcaaagaaactatttcaagcaataatgaataatagaaaatggatagagaaggacacaccttctatgtgtgtcatgcattttcaccttctctcatcttagtaaaatattcatttttacttacagagaaatgaaatatctaatctaattctttatgatttaaagtgatcttttcctgcctctcagaatattatgctgtattccaaattagagttaaaatccctcaatgctattgcagatgaagtgtggaaagaaaaaatatgtttcattaccagtgagatagaaaaaggacttcaaatacacaattctttgtatagaaaacactttagtatc

SEQ ID NO: 270620 - DNA, 569 bp, Homo sapiens
atgttggtcaacactgtggaaacaatgaaaatgaagtgatttactcagccatcagttagagaaatatcctatcatctgtctcatgtagattgtacaacataagaaggacattttgtttrtctttaaacatttatctattgtatccaaggaaaaaaggcttttttcatttagtaacaataataaacagtcatccatatttcttacattgaattacagctgcaaaaagatattagagctcgtcaaagaaactatttcaagcaataatgaataatagaaaatggatagagaaggacacaccttctatgtgtgtcatgcattttcaccttctctcatcttagtaaaatattcatttttacttacagagaaatgaaatatctaatctaattctttatgatttaaagtgatcttttcctgcctctcagaatattatgctgtattccaaattagagttaaaatccctcaatgctattgcagatgaagtgtggaaagaaaaaatatgtttcattaccagtgagatagaaaaaggacttcaaatacacaattctttgtatagaaaacactttagtatc

SEQ ID NO: 270621 - DNA, 569 bp, Homo sapiens
atgttggtcaacactgtggaaacaatgaaaatgaagtgatttactcagccatcagttagagaaatatcctatcatctgtctcatgtagattgtacaacataagaaggacattttgtttgtctttaaacatttatctattgtatccaaggaaaaaaggcttttttcatttagtaacaataataaacagtcatccatatttcttacattgaattacagctgcaaaaagatattagagctcgtcaaagaaactatttcaagcaataatgaataatagaaaatggatagagaaggacacaccttctatgtgtgycatgcattttcaccttctctcatcttagtaaaatattcatttttacttacagagaaatgaaatatctaatctaattctttatgatttaaagtgatcttttcctgcctctcagaatattatgctgtattccaaattagagttaaaatccctcaatgctattgcagatgaagtgtggaaagaaaaaatatgtttcattaccagtgagatagaaaaaggacttcaaatacacaattctttgtatagaaaacactttagtatc

SEQ ID NO: 270622 - DNA, 476 bp, Homo sapiens
ggtcagtctcttggtatcattcaatctgcatcccaattctttgaagagttaaaagcaactgttagggttttacaaattgagacttttacaaaaacaggaatrtacgtttagaggcaatttgaagcctacttatttttatcaaccccaaaacctcagctatccatctcaggatgcctgcagatactgtaaaatgtcagaatattggatcttaaattatcctgcacttgagataatgaaggaaatataattttaaaaagagctctgtggtcagaagtcagcttaattcaaaactgatattcaggctatatttttttgtttgtttgtttgttttgttttgtttggaactctgattctctctataggatcctgcttttccaatgtgaacatctcagtcaactgaatttctcttttctccaagccatgctaactatatactctgctctctatttatactttatttgctgcaatgatttttg

SEQ ID NO: 270623 - DNA, 518 bp, Homo sapiens
atgctacctaatatatagcaggcccttactatatacttattgagttacatttttaaaggtacagtaaatagaattcttcttccccactttaattctaaatatgtcacaaaaaaatctaagtctcataaactgttagaaggtaaaaagcaattatttttataatgtatataagctgcattattctttgtttacctcatggacagtgtgccccccaggacaccagtgaatgctatccctaaagccacctgctcaccatgcattgcatggacagttgtagtatgataacgacagtaccaagagaagctaggagaccaaaayagcagagttcattttagctcttggtgaaaagtaaaaacaaatcaatgccttttcctttgggaatcagtgaataaacttcttaatgtctgaaacatgtctccttgttcagttttcagaggagaaacagcatttttataagtcagtttaatttctctaagtttctgaactacctaccaatcctgtcttttactgaaaatcag

SEQ ID NO: 270624 - DNA, 518 bp, Homo sapiens
atgctacctaatatatagcaggcccttactatatacttattgagttacatttttaaaggtacagtaaatagaattcttcttccccactttaattctaaatatgtcacaaaaaaatctaagtctcataaactgttagaaggtaaaaagcaattatttttataatgtatataagctgcattattctttgtttacctcatggacagtgtgccccccaggacaccagtgaatgctatccctaaagccacctgctcaccatgcattgcatggacagttgtagtatgataacgacagtaccaagagaagctaggagaccaaaacrgcagagttcattttagctcttggtgaaaagtaaaaacaaatcaatgccttttcctttgggaatcagtgaataaacttcttaatgtctgaaacatgtctccttgttcagttttcagaggagaaacagcatttttataagtcagtttaatttctctaagtttctgaactacctaccaatcctgtcttttactgaaaatcag

SEQ ID NO: 270625 - DNA, 525 bp, Homo sapiens
ataggaatcaaaaaatgctgttaaaaccttactgatggagcaaagatgaggttaagtctaattggtgagcagcatatggtgccatgggttaaatcctacgtattaagagttacgatggcaatatcttaaccaagatgacagaaatagaagcagccaaaatatgagtggaagttaaggtctttataaaacaaggatagtcaaagccaggagaattatattcaaagggcatactcaatgacaagatttasattacatataaaaggaaatctaagaaacagaagctgcaatggaataaaaccagaccaaaggagcacaacaaggggaaccttatgcaatcacattaaacagctggcctgattggccatagattaatgcaagatttgatcaccaacattcactccagagaggccatgtccttgtgcagaatgaatcattctgagttctcactctaaaccccaggtgttttctatcagacagctgtgaagcagcctggcaaagagaacaaaagattagttgcagctagta

SEQ ID NO: 270626 - DNA, 525 bp, Homo sapiens
ataggaatcaaaaaatgctgttaaaaccttactgatggagcaaagatgaggttaagtctaattggtgagcagcatatggtgccatgggttaaatcctacgtattaagagttacgatggcaatatcttaaccaagatgacagaaatagaagcagccaaaatatgagtggaagttaaggtctttataaaacaaggatagtcaaagccaggagaattatattcaaagggcatactcaatgacaagatttagattacatataaaaggaaatctaagaaacagaagctgcaatggaataaaaccagaccaaaggagcacaacaaggggaaccttatgcaatcacattaaacagctggcctgattggccatagattaatgcaagatttgatcaccaacattcactccagagaggccatgtccttrtgcagaatgaatcattctgagttctcactctaaaccccaggtgttttctatcagacagctgtgaagcagcctggcaaagagaacaaaagattagttgcagctagta

SEQ ID NO: 270627 - DNA, 512 bp, Homo sapiens
aagaagtattgattaagtgctgtcacttagtttttgaggttttataaaacttgcagaagaatctacctttcggcaactaacaataaaaaataaaataaaataaaataaatacgtgtccagaattggcctgaccacaatgatagtcactctaggtaaagtgtccacgatgagaaatattgttattcatggcctatgtctaatccctaattaactaacactgttctgttacagacactcagaaatttcttgtagaataaatggtacctgctgtgcttgtctgaccagtagcagaagacagagacagaggagtgccatccaaacatatgtgtcagtatcagaattttatccctctctagccagtaattagggatggattaggaatcttggaatttgtgcacctccagcatgctgcagtgccctatggaaaagaggcaagactgccttcccctgccctcctgctcttcaccagtcatgagccccyagcttgggcctgcaatgcaaccacctttccc

SEQ ID NO: 270628 - DNA, 602 bp, Homo sapiens
ttcagcatccttaaagaaaagaaattccaacaaagaatttcatatccagccaaactagaccycataagcaaaggagaaataaaatccttttcagacaagcaaatactaagggaattcattaccaccagacctgcttttcaagaggttcatagggagtgctgaatatggaaatgaaagaccattactggctactacaaaaacacactaaagttcatacaccattgatgctataaagcaaaaacacaatcatgtctacgtaacgccaggtaacaacagaatgacaggatcaaatccacacatattaatattaaccttgaatggtagtgggctaaacactccacttaaaaggcataaagtggcaaattgattaaagaagaaagacccaagtgtatgctgtctttaagagaccaatctcacattcaaggacacctataggctcagagtaaagggatggagaaagatttatcaagcaaatagaaaacaaacaaaaaagagcaggggttgctattcttatttcagacaaaacagactttaaaccaaaaatgatcaaaaaggacaaagaaaggaagtgataaagggttcaactcaacaagaagacttaa

SEQ ID NO: 270629 - DNA, 471 bp, Homo sapiens
gatgcccagtctcaccactcatattcacatggtattgggagtcatagccagagcagtcaggcaagagaagaaataaaaggcattcaaatatgaagagaagaagtyaaacgatctgtcttcatagattatatgtttctatacctagaaaaccccatagtctcttcccaaaggctcctagctctgataaacaacttcagcaaagttttgggatacaaaatcaatgtacaaaattcagtagcatttctatacaccaacaacatccaagctgagagacaaatcaagaatgcaatctgattcacaggagccacaaaaagaataaaatacctaggaatatagttaacctggaagacaaaagagctctataatgagaagtacaaaacactgtcaaaagaaatcagaaatgacatgaaccaatggaaaaacattgcatgttcatggattggaagaatcaatattgttaaaaaaggccat

SEQ ID NO: 270630 - DNA, 471 bp, Homo sapiens
gatgcccagtctcaccactcatattcacatggtattgggagtcatagccagagcagtcaggcaagagaagaaataaaaggcattcaaatatgaagagaagaagttaaacgatctgtcttcatagattatatgwttctatacctagaaaaccccatagtctcttcccaaaggctcctagctctgataaacaacttcagcaaagttttgggatacaaaatcaatgtacaaaattcagtagcatttctatacaccaacaacatccaagctgagagacaaatcaagaatgcaatctgattcacaggagccacaaaaagaataaaatacctaggaatatagttaacctggaagacaaaagagctctataatgagaagtacaaaacactgtcaaaagaaatcagaaatgacatgaaccaatggaaaaacattgcatgttcatggattggaagaatcaatattgttaaaaaaggccat

SEQ ID NO: 270631 - DNA, 530 bp, Homo sapiens
gtctgtgatactttgttaatggcagcaccccacaaaagattatactttcctacagggttattgagacaattaaatgagattatgaagtactggggacataaaaatattaacattttctctcatttattctagtgactagaagggctacaaatattcacatttatgttccagattaattgtcaagcctgagacttctttccaatagctgggaaaatgtctaaacccttctattctatctctagattagagccatctaaatttctaagcaccataattctagtaccacctattaatataaatgagcttttagcaaggttgacatttgtctgagacttaaaatatagaaatgctttagtgcaaaatactacagaaatrtatcagcagttattcacaaataactgctatcctgggcccactccttccccagatgccctcctcatccccaccctgagaccctcagatttctccagaatccagcccctaaaaggttcacacctgacaacagtgaaagcatatgttttgataagtca

SEQ ID NO: 270632 - DNA, 585 bp, Homo sapiens
ctttatcaagttcgtatcttgaattcatttaaaataaaaatccttgtagagtgcttyaatctccatggagaaagaagacctatattaaatattagattaatgcatgttgttatatagatgcactgtcaacaactttgggaaaacagtgaacattcaaggatggctagaaatgaactgcatttactaagctaatattttcctttgaagaaacattttggtcaatatttgatgccctgtagatttgagcaagaaagataaaggcatttaggtttgtgattgctcttggcaagaaagctagtgtctgtaagaaattaattacaaccaaaaaaaaaaaaaagaaagaaaaaaccaaaaccttaatgggtggagctcataggtgaatgaggacctctgcaaattgacatggatttcaggtttaactttcttgtaatggaaataaaatacaactgaacatgctctcattttttaactctgtacaaaatacctactcaaggcatctttgtattttggttccaggttctcatcagagaattaccgaaagtcaactctgagcagttaccaatggatagttttaagcaaatcata

SEQ ID NO: 270633 - DNA, 552 bp, Homo sapiens
ggcatatacaaaaagcctacagctaacatcatacctaataatgaaagacttaatgttttccccttaagatctggaacataccaaagatgtctgttcttatcagttttattcaacattatagccagaggttttagatagtacaattcaacaatggataatacatagatacatttagattgaaaaggaagaaataaarcattttttattagaagactacataattatctacgtagaaaattccaaggattcactataaaactaaaaccactaaagagcggtttgtagcacaggatataaaatatattaaaataaattatatttttatatgttaacagtggtgatccaaaataaaattaagaaaataattccatcttcaatagcatcaaaaagtataaaatatgtagaaataaatttaacaatagaagtgcaagatttatacactaaactataaactattttggtgagaaattaaatatctaaagatacattacatgtttatagattagaaacctcaatattttaaatgataattctctccaagttgatcaataa

SEQ ID NO: 270634 - DNA, 552 bp, Homo sapiens
ggcatatacaaaaagcctacagctaacatcatacctaataatgaaagacttaatgttttccccttaagatctggaacataccaaagatgtctgttcttatcagttttattcaacattatagccagaggttttagatagtacaattcaacaatggataatacatagatacatttagattgaaaaggaagaaataaagcattttttattagaagactacataattatctacgtagaaaattccaaggattcactataaaactaaaaccactaaagagcggtttgtagcacakgatataaaatatattaaaataaattatatttttatatgttaacagtggtgatccaaaataaaattaagaaaataattccatcttcaatagcatcaaaaagtataaaatatgtagaaataaatttaacaatagaagtgcaagatttatacactaaactataaactattttggtgagaaattaaatatctaaagatacattacatgtttatagattagaaacctcaatattttaaatgataattctctccaagttgatcaataa

SEQ ID NO: 270635 - DNA, 567 bp, Homo sapiens
tgtaatcatctcaagcacaacatacagaagtttgcctagaaggagtctaatttcacaccataattgtaaactactacttctttttaatgggacagtcaccccgtagaggaatttgaagagcagaatcatctcttcttcatatggataacattttcgtgtagtagtggtttggtttctgataagtagaacctattttgtaagtaatatatatctaaaaggcaccttcaggaaaccaaaattcatctacgtataatatgatggcccctataatataaaaataaaactactatatatatatctgcaaagtgtatagcagcttctggaaaattagactcaaataatttgtatcctgcactaaatactcacccattcagtgacttgtgaggaagaaratgtcattcacggactgtgatttattaaacctattacatacatttcagaagtatgtggtcagcccatgagtcagttaagacttttaattccacttcaattcatgaagtagaatgctctctgcgtctcagttctggggactgttgtattgatttagcttctaaactcagtttaaaa

SEQ ID NO: 270636 - DNA, 552 bp, Homo sapiens
cttgcaaaattatatgtttaggaacttattctaaaaatgaagatattcattgaagtccatgtaattacaaaaatttgtcaaaacattaattattgaggaagaatattgttctgccacaaaatactaattagataacttttcatagatgtggaaatatattcatgacactttgttgcatgtatatatgcatatatatrcatatgcttatcatttatatatgtgaatgtacatgtatatatgtatatacatgtaaatgtgtatatatgtatatacatgtatatgtgtgtatatgtaaatacacatatacatacatacacatacagagcaagagagagtaagatacaaaatgttaatattgcttatcttctgaaatgaattatgggtagtttctgtcacatttttaaattttccatgaaaagatcttccagattaaacacatattgtttttacctcttaacaacaaaaacatttctcttgacctgatacattttgtttaatttaatgttttgagtgtatatttatacatatatttattaaacattttgtattcta

SEQ ID NO: 270637 - DNA, 513 bp, Homo sapiens
gattaatgtttattttgttctttaaatgccattccattaaaattctgacttgttaaatcttttatttctaaagaatgatgggttttatttcatactcttgttaacacttacagatatatttagtgggagcttgtttcatgttgtaaggaatgacaaataacagttacaacattcttacaataaccatggctctatgcagtgagtacactactcttacaatacaatcacgtactttgtccaaaaatttctctttgtagacttctcrttctgcacttccaagattagatcctggaacgtctgtaactgatattgatgttgaactagttagctgtgaatttctgagaactgttttaatggtgttttaatttataccaaatttccacaattggctgaacacagttgatcttcatggctgttttgttccactgattgcttgcttgctcttgagtgtgatttttggaggacgatttatagtatattgaggagaatcaagaaaagagaagaattataact

SEQ ID NO: 270638 - DNA, 643 bp, Homo sapiens
aataaattttatttacaaaatgccagctataagtttaattgatttttgtggaacaaaagctcatttaggctatttttatttttcgagttatgtaaactaattttcctaagccaaataagtaacaaacaatttatttgcgtagtggattaaaaagaaatgagactggtcctataagccactagaaaattgagtctcatttttttacattcaaacttcaaatatgaattgcagctaaagactaaatcaggaaacaccatcccccaaaagatgaattaacaaatttattaacagggtattctttatacttctggtttttttcagattaaagacttctttagttttatgtatttggcatcaaagatgttaaaataccaaatttgtgaaatattcatccatgcgattaaaggcaggcatattattaaaaataattcatatttctgttttaggtagaagttgacataaaattacagcccatagaattactagtcctgtttcctttctataaatataagcaaatatggattcagtctttgaatatatcacacacagttctcacatttgatattttctttaacattatgcagctagttttaatttccttgaaaagttacatttttrcaacgacttcaaaaactattattaa

SEQ ID NO: 270639 - DNA, 617 bp, Homo sapiens
attgatgatgattttatgtagaacctttttgggagattaaaaataagtaaggattctatataaaatgtaaattatgacaaattgtacatagatatagtattttaacattataaaacaaaaatagatccatgttggtgacatcagcaagatggccaactaaaagcttctagtgctcttcccacttcccacaaaaaactaaaaataatgaataagcaactacatcttgatcaaaataactaaaggaaagctctggagaacagcagcagaaatcctgtagaccactgaaacacaggatggccacataggaaacaggaggaaacaccttgcctctgccatcccatttccctagttgggatcaactcaaaaccagaagagacccctttctgcaggaaaaaggtaagcaagaggaccccaacaacctccrtcatctccacagatacatgcagtctttgcactagagacttctgcagtccttatagggtttgagcccagctgagggtgctccccagagtctacatactgagctatccctagagaaggagctgatgctgtggccctccctcctcttctcagcccctacctcttgtctcatggctcctgctgctactgccctgtac

SEQ ID NO: 270640 - DNA, 627 bp, Homo sapiens
aaacgaccacatatgtcattccttcatgagaataatggaccagatagaaaacactttaaatatggaggcatgaatttcacataaggaagctctttcttttataacttgtgagacactattcttctagattcgacagtggctgtttccatgaggcaaatccaggtatttctcaataagataaacagttattttcttaccaaattttccaccttcctgtttaaacttctaaaaaactaatgcaaagattacgcttatataacaaccaaaccaggaccrcagaaataaaaattgtgtgaaggatggtcccttattagcccagcttctagactgcttaatgttaagtggatttcattctgaatttagagaagcatatgtgaatatcatatttgtaccgttatgcaaaaacactcttttctcagtgataaagtatacagtttctcatacaaaaacatttgtctttagaaaacatgttctattgtttgctcgggggtaactcattcgaagacttttgagccccattaggagggagggaggaaataatagcacagacctttatctgacaatggtaaaataatgccagtaaattggtaaaacctacacctagatcatcaagaagcaagacagaga

SEQ ID NO: 270641 - DNA, 591 bp, Homo sapiens
ggctgaccaggaacacatgtgtgcaaatgtgggcaccagaccctgttgtgactgtgaccgcggcagacataagaacagctttggacccttttctccttttagttgaggctttcttcatgtctytcattgccctcaaccctcctgtgctacccactgcttctagtcacctacagagagctgcgttgctgtctgtctgaagctacgagggcaatgaagctttgctggaactctctctgtatagtgcactgtacactccccagcaatcttgccaacattgcccaagcttagctcttctctgcctgtttctacagaatgtggctgccactggattctgcttcggttatggtctgaccctgtaagttgctccacattgcaaattctctacaatacccctccgtaaagttatttgaaacttaacgagaagaagggctttagtcaagaacataaatcactagtcatgttacaataaacatgggggagctgctggaaagtgaggtgaatgagcgagtgacttcccccataaattaaccctcaccgtgattctcttactctcacacacaaaccaactcttttgtggttttgcccccaaat

SEQ ID NO: 270642 - DNA, 591 bp, Homo sapiens
ggctgaccaggaacacatgtgtgcaaatgtgggcaccagaccctgttgtgactgtgaccgcggcagacataagaacagctttggacccttttctccttttagttgaggctttcttcatgtctttcattgccctcaaccctcctgtgctacccactgcttctagtcacctacagagagctgcsttgctgtctgtctgaagctacgagggcaatgaagctttgctggaactctctctgtatagtgcactgtacactccccagcaatcttgccaacattgcccaagcttagctcttctctgcctgtttctacagaatgtggctgccactggattctgcttcggttatggtctgaccctgtaagttgctccacattgcaaattctctacaatacccctccgtaaagttatttgaaacttaacgagaagaagggctttagtcaagaacataaatcactagtcatgttacaataaacatgggggagctgctggaaagtgaggtgaatgagcgagtgacttcccccataaattaaccctcaccgtgattctcttactctcacacacaaaccaactcttttgtggttttgcccccaaat

SEQ ID NO: 270643 - DNA, 505 bp, Homo sapiens
tgtggacattacaggccattctggtgatgtctcagggaaatgaggaacagattaggagaaactgtagggaaggtgattcttgtcctaaagtgacaaagaacttggatgaattgtgttctactgtattgcagaaggtgtaacatataagtgatattattggaagcttggctgagatttctaagcaaaacattgaaggagcatcttggtttcaccctacagtttacagtcaaatatgagaagaaaaatacatatggggaaaaaattgccaagcaaaaaagaaccagaacttgaggacttgaaaaattattggtctattcgtattgcaaaacatgagaaacctgttctgaagagagcactgagggtgaacaactgtctgatgaagagtctgtaagagcaactaatggatttgatcagccagctctgcctagccagaaatagcagtggattgcactggtygaaacactgccagcttgaactaaaggtaacaaagacaaaataaaggctt

SEQ ID NO: 270644 - DNA, 524 bp, Homo sapiens
cctcactttttgaaaatgaggtgagatgggagaaaggatgtcaggtacgttatattgttacagaacagtgtgttcttacattgctctctcagtatctaggtgagtgggttagctttggctcttccttgtggacctctttgcgaatctgattagtgctaaggaatttcctcacagggaaatatgaactcactgtgtaggtgccactgtgttctgacaatttcctgcggggktcgggtggcataccctagcacctagaccttcctcagtgttgagatactcagtcctgcaacccagagatgtgagtccctggccttgaagagctgacttttttttttttccagaaattgcccttggctgaagggaacatctcaggggtcagcctgaatttcatgaccacctggggtaaaaagactcagccccttaactcacttgggacaaccctgaagttcatgacactgccagagccaccatgggatcacctgtggcctctcttggggcaattgagtctaactcttccctctgcc

SEQ ID NO: 270645 - DNA, 608 bp, Homo sapiens
gttgtgtggggctgttcagctcactgcaggtcccttagcatcatcgctgcctcccacaacgggagagcagttgtcccctgtcagttgtgacaagaaaaactgtctccaaagattgccagatgtccccgggggagtaggcaaattacctcatgttggggttcattgactggactatcaagtccatgcttaactaaattttatttctcagctaaaacagttgtatttcaaaaagtacaagctgatgaattcagcttcaagaaatgcttggaattaatacatactgtactttggttctatgaaaatttcaatcatggtgtctatttccttaatttcttatagtgactaaatttattatgtatgtgacatttgggttctggataaaacaactacttagtttagggacagagtaagaaactcattcttaakttaatagcggcttttgccagaaaaaagaagcaggctgggaaacactaatgaaaataaggtttttcaatgaaagtcccagcaaatatttttttatttaaatgagtttctgtatcttgtgaatgcctcgagttagagtggcatgttatgcctgctcatggctgtagatgatagcctacatttct

SEQ ID NO: 270646 - DNA, 571 bp, Homo sapiens
ggatattttaatgtgtcatcattgcacttaatcatataatcctttatttatttatttgacagatattgatcaaacatcatgcagtagccataaatataattagaacccagaatctgccttcaaaaagatcagagtgtgctcttttacttttgtgttttaaatctattttgaaggatcacaaaaaccctcaaaatttttgatagaaaactttagttaaggattarcaccttgaattttgaatagttatctatattaaccaatgggaatggctcagtgacaaacatcttatttaaaataacactttcattttagccaaagggatgtttatatctcaagcaaaggcaactcaaaatgactacatgaaatcaaggactggttggaaaaaaaagaaaaagattttattgtgagaaccctgaactgatatctgatgatgcttggaacagctcttgagatgtcaaagatgataatacagtaacaacatttgggaagtatttctagtcttacacttagccttttggcaggaatttattaagacagaataagcctgtgacttttcaattctgagtacaat

SEQ ID NO: 270647 - DNA, 518 bp, Homo sapiens
gatagaaaactttagttaaggattagcaccttgaattttgaatagttatctatattaaccaatgggaatggctcagtgacaaacatcttatttaaaataacactttcattttagccaaagggatgtttatatctcaagcaaaggcaactcaaaatgactacatgaaatcaaggactggttggaaaaaaaagaaaaagattttattgtgagaaccctgaactgatatctgatgatgcttggaacagctcttgagatgtcaaagatgataatacagtaacaacatttgggaagtatttctagtcttacacttagccttttggcaggaatttattaagacagaataagcctgtgacttttcaattctgagtacaatttgtttctctaatacatccgcaggagtaatgtgtgatggaatttttccctccccaacccctccagtgtggatgatgatatgctataataggttctcacaatatctcagcaatataaarcacaacacatgtacatctgtggcccag

SEQ ID NO: 270648 - DNA, 610 bp, Homo sapiens
catgagaccaattcactttcacaagaccagcacagaaaagacccaccccaataatttaatcacctcccaccttgttcctcccacagcacttggaaattatgggatttacaattcaagatgagatttgggtggggacactgccaaaccatataacctttgttatttcctctcctttcctcaagcagaaggagtctttctccacagccaccacagattggcatatgttgaatctcacccaaagccagcacatctctgagtctcacccaagacccacggtaagtactgcttcgctgtcactactgatcattcaggacccaaggactctttagtcagcaagtgatgaatccttccaggtctagttccttcctttcagggtagtaggttcccttccagccaaaggtgtgtctggaaatatcatccaggagctagggcctgaaatgagggcctcatgactctkcctgctgccctatcctactgtcaatgaactggtataaaagttgcaagacaaagtcctatttactctttcttcttctctcttcaagtggagagaaggagtttctcgcagagcttcaagctgtgcttcctagggttgtgggaggggtaacacaag

SEQ ID NO: 270649 - DNA, 457 bp, Homo sapiens
ttttatggtaaataaaaaagaaagtggaagatgcctacatttttgctaaagcataatataaaaagaacagaaaagaaccacaccctgcaaacccatgcttcagacaaccagatgctagagaggtggatgcttcagacaaccagatgctagaaaggtgtattgtagatgacttactttctgcagtttgaaarcttatacattgcatctgaggactaagtaatgttttgtattggataaaacaaatttcatttcaataaaattttcaatttcttttttaattttttcactgacctacttgtcattcaggagcttgttgcttaatttttgtgtatttttacattaatagtttccaaaatagctcttgttattaatttctagtttaaataaaacaaattttaaaacttcaaaaaataaaaatatttttagaacctgtttttatcactttgcttcaccctga

SEQ ID NO: 270650 - DNA, 603 bp, Homo sapiens
aaattacatctttatatattgtttttttaatatgttatcttatttaaagatcttgatgtcacttgcatgcaattgtgtgtacttcacacacacacacacacatatttgtttcacacaccatgctgaaaaatattaagttattagtttcatgggtttaccatgattatctacgtatgaagtacatraagtgacaaggtctgtgtatacatgtgagtgtacattaaaaaagcaactagcagctgggcatggtggctcaggcctataatcccagcactttgggaggccgagatgggcagatcacaaatctgccaaatcacattttggagtaaccaaaaatcactcttcatttttgtcagagacaatattcaaactgcagtgagagatgtactcaaacagaacatagtaatcttactgaataaagggggtagaggaaagagttcagggtgctaggtacaattggaatttttacagcagaataacaaagaggagagagatatggagaattcactacacataatccctttaagtctgttgctctatgtgagtaaggtaaaactaagtaaaggtaaacaaaaacctcctgagtttctataagtagaacta

SEQ ID NO: 270651 - DNA, 603 bp, Homo sapiens
aaattacatctttatatattgtttttttaatatgttatcttatttaaagatcttgatgtcacttgcatgcaattgtgtgtacttcacacacacacacacacatatttgtttcacacaccatgctgaaaaatattaagttattagtttcatgggtttaccatgattatctacgtatgaagtacatgaagtgacaaggtctgtgtatacatgtgagtgtacattaaaaaagcaactagcagctgggcayggtggctcaggcctataatcccagcactttgggaggccgagatgggcagatcacaaatctgccaaatcacattttggagtaaccaaaaatcactcttcatttttgtcagagacaatattcaaactgcagtgagagatgtactcaaacagaacatagtaatcttactgaataaagggggtagaggaaagagttcagggtgctaggtacaattggaatttttacagcagaataacaaagaggagagagatatggagaattcactacacataatccctttaagtctgttgctctatgtgagtaaggtaaaactaagtaaaggtaaacaaaaacctcctgagtttctataagtagaacta

SEQ ID NO: 270652 - DNA, 238 bp, Homo sapiens
aatactaacctctctgctttccaaattcttcttgaagctacagaaattaagacattatgatattgatgagatagacatatagttcaatggaatcaaattgaaaatatagaaatagacamacctgtgtacatccagttgatgacaacaaagttgtcaaagtaactcagcaagtaaaacatagtcttttcagcaaatggttcttgaatatctgatttatcaggaaaatgatgaacattga

SEQ ID NO: 270653 - DNA, 610 bp, Homo sapiens
tgctctttgtttaattatcgtcaaactttaccattggttgctataacgatgaacctatcaggtatctgaaagtcctttcaaaactggtttcaccatccgcctcctaacaggggcccccaagtcctcttttagagatgagttttattttcttatactcatattattcctaaaaaagcagaatgctagccctgaagactgttcaaaggaacatactgacatctatgtacctcctaactasaaacaaattgataaacttttgaaacactctttgaaaatggaggcaatgcagtcgacttgccagagctgcttttatgcctcatcctggtaccctagaaactgctgtcaagctccattttattccgtgtgtggcctgacagttctaaggggaaagtgtatcctaattcttccaaataaattagatttcagccatcttaaaatgaaaacacagcctttgctgaagttataaacagaccctattgaataaagtatcagcagaggctcctactgttatctccaccagaggttcagaactgcaagacagcaacgttcatcatatctttgtagtcctagtaatacaaattaatcaacaggtaaatagaatgtgaaagag

SEQ ID NO: 270654 - DNA, 610 bp, Homo sapiens
tgctctttgtttaattatcgtcaaactttaccattggttgctataacgatgaacctatcaggtatctgaaagtcctttcaaaactggtttcaccatccgcctcctaacaggggcccccaagtcctcttttagagatgagttttattttcttatactcatattattcctaaaaaagcagaatgctagccctgaagactgttcaaaggaacatactgacatctatgtacctcctaactagaaacaaattgataaacttytgaaacactctttgaaaatggaggcaatgcagtcgacttgccagagctgcttttatgcctcatcctggtaccctagaaactgctgtcaagctccattttattccgtgtgtggcctgacagttctaaggggaaagtgtatcctaattcttccaaataaattagatttcagccatcttaaaatgaaaacacagcctttgctgaagttataaacagaccctattgaataaagtatcagcagaggctcctactgttatctccaccagaggttcagaactgcaagacagcaacgttcatcatatctttgtagtcctagtaatacaaattaatcaacaggtaaatagaatgtgaaagag

SEQ ID NO: 270655 - DNA, 610 bp, Homo sapiens
tgctctttgtttaattatcgtcaaactttaccattggttgctataacgatgaacctatcaggtatctgaaagtcctttcaaaactggtttcaccatccgcctcctaacaggggcccccaagtcctcttttagagatgagttttattttcttatactcatattattcctaaaaaagcagaatgctagccctgaagactgttcaaaggaacatactgacatctatgtacctcctaactagaaacaaattgataaacttttgaaacactctttgaaaatggaggcaatgcagtcgacttgccagagctgcttttatgcctcatcctggtaccctagaaactgctgtcaagctccattttattccrtgtgtggcctgacagttctaaggggaaagtgtatcctaattcttccaaataaattagatttcagccatcttaaaatgaaaacacagcctttgctgaagttataaacagaccctattgaataaagtatcagcagaggctcctactgttatctccaccagaggttcagaactgcaagacagcaacgttcatcatatctttgtagtcctagtaatacaaattaatcaacaggtaaatagaatgtgaaagag

SEQ ID NO: 270656 - DNA, 610 bp, Homo sapiens
tgctctttgtttaattatcgtcaaactttaccattggttgctataacgatgaacctatcaggtatctgaaagtcctttcaaaactggtttcaccatccgcctcctaacaggggcccccaagtcctcttttagagatgagttttattttcttatactcatattattcctaaaaaagcagaatgctagccctgaagactgttcaaaggaacatactgacatctatgtacctcctaactagaaacaaattgataaacttttgaaacactctttgaaaatggaggcaatgcagtcgacttgccagagctgcttttatgcctcatcctggtaccctagaaactgctgtcaagctccattttattccgtgtgtggcctgacagttctaaggggaaagtgtatcctaattcttccaaataaattagatttcagccatcttaaaatgaaaacacagcctytgctgaagttataaacagaccctattgaataaagtatcagcagaggctcctactgttatctccaccagaggttcagaactgcaagacagcaacgttcatcatatctttgtagtcctagtaatacaaattaatcaacaggtaaatagaatgtgaaagag

SEQ ID NO: 270657 - DNA, 436 bp, Homo sapiens
aaaaaaacaaaaaaaaaaccaataacctcacactagtgagtgggggaagactagagctcttcaaaaatcgccaaatccagaaaattttcagaacttaacctgttttgcaaattcctgaaaaactctgttcgcaagatgtttatgtgtcacctggctctgagttccaagaaaaaagtyctatcccaaggcatttccagaaacaatcaactgccgttgtttttaacactgaagctgagactgcccaaccagtaagatcaaattgggtcatgtgattttaatagggtctttgaaaagttccaacatattttttgggccctagaagaccatatacatgtgcaaagctgtataaatgcccaaagctgtatgaaagacctgagacggcccagtcatcttcagttgacttttacaccctgtaacagcaataattcagggctaa

SEQ ID NO: 270658 - DNA, 483 bp, Homo sapiens
tgcaaacaaatggagcttgaaaccacatgataaaattggaagtcctgaaacaaaccatattcaaacctaatgctttccatgagctattgtaataaaagggaaatgcagttctttttttttttcattttccagtttcattagttttgtttttctaaccagcattctaaatatttttatgttgtcacttaggaatactcatagagtaacaaagtgcggttgtctgggtttatgaaaattgagttctgccagctctattattaacctgctgtggtgctgggaagttttttttaaactttctcggcatgtttcttttcttcctttctttttatttaytcctttcctcttctctctgttttaatctcttctataacctttttgatgcaatcacaatgatgtcacaactgagatttcaaatatgaaacaaaatattttttgatcttcatggatttacagaagagtagaagtgatattcaaatacacagt

SEQ ID NO: 270659 - DNA, 591 bp, Homo sapiens
gggggtgcagtttctagatgcttatttctaaatccctctctagttttggcatttgaaaatagggaagaataccaggtctagcatcaacctccctgaacactaatacatttctttttttctacaatatggaaaaatgtgggcatgacaccattcttcaaatctctcaccttgcttcaatcagttagaataaagcactgtactcttccctgttaatgcattgttatggttcatttttctctccttatatgtcaactttaagtagacacccatctgatcttacaaagtttatatcgattattatgaaaaaatggaattttaaaaatttgtgtgagttccagtaaagtgttttttgaatgtaatacgtctgcccacatgatcatattttgtccagaattggtgggttcttggtctcactgacttcaagaaygaagccaatattacaactctatgtagttaaaagcacgtaaataggagaacactgggtttcctgcttctatgatgtgtctcatagtgcacaaggttacagtctcaagaagtgctgaaccatagagaaacatttaatggaattttctcaatgaagtaataatagtg

SEQ ID NO: 270660 - DNA, 582 bp, Homo sapiens
tgcttaattgtgctgtcagacacactacttcagaacatatctggatagaagaacaatgagcattagattatgcttttagatgttacagagatgaaaatatatcttggctatttatcaaattaatcaccctataatctaaagacaaatgggattcctagggcagtattcagccagtaatttaatgcctaagtttttctgatcaataaaccattggcctgttagaatatttaagtcatgcttaaagtcaytcagaaaaaaaaatctattaacttaagttcttgaaagcatgtctttaatttaaaacgtcattttctatttaagcattgcattttacattattctaaaacaatcctgatcttttttatcttaattttaataaaaagagtgaaacaaatattttgaatcagaactatggcataatgtattgtcttttgttcaatgaatattttgttcaacaaatatacaaataaacaatgccatcgcattgtacaactccaggggacaccattcctgttttatccttgagaaacatccaggtctgcgtgagtccttgggacaccaagggataaaacagagctctgg

SEQ ID NO: 270661 - DNA, 582 bp, Homo sapiens
tgcttaattgtgctgtcagacacactacttcagaacatatctggatagaagaacaatgagcattagattatgcttttagatgttacagagatgaaaatatatcttggctatttatcaaattaatcaccctataatctaaagacaaatgggattcctagggcagtattcagccagtaatttaatgcctaagtttttctgatcaataaaccattggcctgttagaatatttaagtcatgcttaaagtcactcagaaaaaaaaatctattaacttaagttcttgaaagcatgtctttaatttaaaacgtcattttctatttaagcattgcattttacattattctaaaacaatcctgatcttttttatcttaattttaataaaaagagtgaaacaaatattttgaatcagaactatggcataatgtattgtcttttgttcaatkaatattttgttcaacaaatatacaaataaacaatgccatcgcattgtacaactccaggggacaccattcctgttttatccttgagaaacatccaggtctgcgtgagtccttgggacaccaagggataaaacagagctctgg

SEQ ID NO: 270662 - DNA, 582 bp, Homo sapiens
tgcttaattgtgctgtcagacacactacttcagaacatatctggatagaagaacaatgagcattagattatgcttttagatgttacagagatgaaaatatatcttggctatttatcaaattaatcaccctataatctaaagacaaatgggattcctagggcagtattcagccagtaatttaatgcctaagtttttctgatcaataaaccattggcctgttagaatatttaagtcatgcttaaagtcactcagaaaaaaaaatctattaacttaagttcttgaaagcatgtctttaatttaaaacgtcattttctatttaagcattgcattttacattattctaaaacaatcctgatcttttttatcttaattttaataaaaagagtgaaacaaatattttgaatcagaactatggcataatgtattgtcttttgttcaatgaatattttgttcaacaaatatacaaataaayaatgccatcgcattgtacaactccaggggacaccattcctgttttatccttgagaaacatccaggtctgcgtgagtccttgggacaccaagggataaaacagagctctgg

SEQ ID NO: 270663 - DNA, 589 bp, Homo sapiens
agattctggtcatttctgtgctctgtgctcccccaggcccctcagcataactcaaaggacttttcttatatattaaaaaaaaaaaagccgtaaaaatgcttatttgtacagtcagggtctgaggtagtttttatatctgtccccacccaaatctcacgttaatgtatacatatgtaactaacctgcacaatgtgcacatgtgccctaaaagttaaagtataattaaaaaaatatatttaaaaaaagaaaaaaaaatcataatccccaatgttggagatgaggcctggtgggaggtgactaaatcttagggacagatttatcatgaatggtttagccccttccccttggtgatgttttcatcatagtgagtaagttctcatgaaaccgggtcattcaaaactgtgtggcacctctgcccctactctttctctcttgctcctgttctcgctatgtgatgtatctatttcccttttgccttctkccatgattggaagcctcctgaggcctcctcagaagcagatgccactatgcttcctatacagggtgcagaaccataagctaatgaaacttcttttcttataaatgacca

SEQ ID NO: 270664 - DNA, 589 bp, Homo sapiens
agattctggtcatttctgtgctctgtgctcccccaggcccctcagcataactcaaaggacttttcttatatattaaaaaaaaaaaagccgtaaaaatgcttatttgtacagtcagggtctgaggtagtttttatatctgtccccacccaaatctcacgttaatgtatacatatgtaactaacctgcacaatgtgcacatgtgccctaaaagttaaagtataattaaaaaaatatatttaaaaaaagaaaaaaaaatcataatccccaatgttggagatgaggcctggtgggaggtgactaaatcttagggacagatttatcatgaatggtttagccccttccccttggtgatgttttcatcatagtgagtaagttctcatgaaaccgggtcattcaaaactgtgtggcacctctgcccctactctttctctcttgctcctgttctcgctatgtgatgtatctatttcccttttgccttcttccatgattggaagcctcctgaggcctcctcagaagcagatgccactatgcttcctatacaggstgcagaaccataagctaatgaaacttcttttcttataaatgacca

SEQ ID NO: 270665 - DNA, 554 bp, Homo sapiens
accttaaaactcctagaagaaaatatagggtaaagctccttgacatggatcttggcaatgatttttgggctatgacaccaaaagcacaggcaacaaaagcaagaataaacaagtggacctacacctaactaaaaagttttggcacagcatagtagcaatcagcaaaacgaaaaggcaacctatagatttggagaaaatatttgcaaaccatctgtctgataagggattaatattctaaatacataaggaactcatacaattcaataacaataataagaagaacccaatttaaaaatgagcaaagatgtaagtagacatttctccaaagaaaacatgcaaatggccccttctaatagacacaaaacacacacaggaagaacaccatgaagacagagcagggtgatgcttttaccagccaagtatcaccttgctctctgccrggatgatggatggccagcaaaccaccacaacctaggagagaggcgtgggacagaagtttccccagagccctcagaagaagccaactctgatgatacctggaccttggacttcca

SEQ ID NO: 270666 - DNA, 332 bp, Homo sapiens
gagtcagctattttcaatgttcccaaactccatctcctcatcaatgtgtgtatttcagaatgtcagattgtgcaaaacctaatgaggctggccatggccgattgtacaaggagagtcaatgtctattgaagagacaagtaattatcaaatactttttaaaaaatcttaaatgtatgaaaaaattgcaagtatagtgcaaagaactatttttaggaaccagagaaagtcgccaataagaatatttagtaagtattgtgtatttctacagacaagggtattctacataaataaaattcaaccayacactcaggaaattaacactgatataacac

SEQ ID NO: 270667 - DNA, 575 bp, Homo sapiens
cccaccacccccaaatctgtcaggcctgtgacttgctttgaacaacaggttgtggagggagtgacactgtgggagcttagagcaggcctcagagacmtcaaatcttccactcctgtcctcttcgagctgctgccactatgcaaaaaaggtcccacctggcactgtggacatgaaagaccacctcgagagagaggcatgcctgccatgttatgagtctatcttggacccaacagccccaggacagctaccagactagggccacctgaaagactccaggcaagaccagcagaatcactgcccagcagagcccagccaaagctgctgacacacaaaactgtccacaaataaaatggatgttgtttgaacgcactaagttttggggtggcttgtaatgcagcaacagatcactgatacaaatgggtttttaataaatgtagataattcagaaataagagtataaaaataatcctcgtaatcctacccctaattttaacagccattaatatgttggtattttccttccaaagtttttctttatgttttttacaaggatgaaaacattgatctgaaatgca

SEQ ID NO: 270668 - DNA, 575 bp, Homo sapiens
cccaccacccccaaatctgtcaggcctgtgacttgctttgaacaacaggttgtggagggagtgacactgtgggagcttagagcaggcctcagagacatcaaatcttccactcctgtcctcttcgagctgctgccactatgcaaaaaaggtcccacctggcactgtggacatgaaagaccacctcgagagagaggcatgcctgccatgttatgagtctatcttggacccaacagccccaggacagctaccagactagggccacctgaaagactccaggcaagaccagcagaatcactgcccagcagagcccagccaaagctgctgacacacaaaactgtccacaaataaaatggatgttgtttgaacgcactaagttttggggtggcttgtaatgcagcaacagatcactgatacaaatgggtttttaataaatgtagataattcagaaataagagtataaaaataatcctcgtaatcctacccckaattttaacagccattaatatgttggtattttccttccaaagtttttctttatgttttttacaaggatgaaaacattgatctgaaatgca

SEQ ID NO: 270669 - DNA, 536 bp, Homo sapiens
tccagttgtttaaaagtgtgtagtgtctccctcctctctctattttcctgtgcctgccatgtagacgtgcctacttcctctttgccttccatcacgattgtaagtttcctgaggcctccccagaagcagaagcctgtacagttcacagaactgtgagccaattaaacctcttttcttcataaattacccaatttcaggtatttctttacagcagtacaagaacaaattcactgggtgtggtggtgtgctcctgtagtcccagctactcagaggctcaggcaggtgagttgcttaagcccaggagttcggggccagcctgggcaacttactgagaccccatctggggaaaaaagcrttttatgttttgtattatcatgttttaatttaatttttaaaggttattaaacttacacagttgaaactttcaaagtttaaaaaagttacagagtaaaaagcctcccaccaatattctcactcctggaaacaatcaatgctatcagtttcttaccttagagacactttatacaggccagacc

SEQ ID NO: 270670 - DNA, 566 bp, Homo sapiens
acatttttagaaatgtaaacacacgattctacataaatatgggtcaaagaagaaattgtgctgacatttttgaaatattaaagagtgaatgacaaagttcaaaatatcaaaatctatgtttttgctaaactattacttagagggaaagtcacaacatatgtttgggaaaaaaaggttaaaattgataaaaactgtctgcacaagttagaaaaagaatagcagcataattrcaaagaaagctgaatgaagaaaagtataaaactagcaaggaataaacagaataaaagaatatacagaatccacagaaccaacatttgttttgtaaacttaaatagacaaacatctggcaagattgattgaagaagctctagaaggagaaaaagagaagtcacaataaaaactattaagcatataaaggggtaatataactatagtcacaattaagattttaaaaattagaagaaagcgttgatgtaaaacagtgttctttatgtcacagggtttgaaaatgtaagtgaaaatgaataattttatagaaatacacattacaaatggtaaatttagga

SEQ ID NO: 270671 - DNA, 503 bp, Homo sapiens
cctgtacctttgatatcatgtgggatgagaattgcgcttaatctctgtggttgctctgcctctccaagacccataaccccagtctaaccaygagaaaacgatcagacaaaccagaatcaagggacattcgatgaaatacctgaccattacctttcaaaactgtcaaggtcaacgaaagcaaggaaagtctgaacaactgtcatagcccagagaggtctaaggatgcctgatgactaaatgtggtattctggatggggtcctggagcagaaaagggacattagggaaaaactcataaaataggaatagtgtatagagtttaattaaatttttttttcagatagagttggcttcagggtacaattaaaatgatgttcatatcattgtgtctctccatttcccatgttcccgtgttggtctttctcaggcagaggtaccccacatagaacaatgtgactgctgtagctcaggtctgtgtgctccctttgagcttgagaacccaggg

SEQ ID NO: 270672 - DNA, 503 bp, Homo sapiens
cctgtacctttgatatcatgtgggatgagaattgcgcttaatctctgtggttgctctgcctctccaagacccataaccccagtctaaccacgagaaaaygatcagacaaaccagaatcaagggacattcgatgaaatacctgaccattacctttcaaaactgtcaaggtcaacgaaagcaaggaaagtctgaacaactgtcatagcccagagaggtctaaggatgcctgatgactaaatgtggtattctggatggggtcctggagcagaaaagggacattagggaaaaactcataaaataggaatagtgtatagagtttaattaaatttttttttcagatagagttggcttcagggtacaattaaaatgatgttcatatcattgtgtctctccatttcccatgttcccgtgttggtctttctcaggcagaggtaccccacatagaacaatgtgactgctgtagctcaggtctgtgtgctccctttgagcttgagaacccaggg

SEQ ID NO: 270673 - DNA, 503 bp, Homo sapiens
cctgtacctttgatatcatgtgggatgagaattgcgcttaatctctgtggttgctctgcctctccaagacccataaccccagtctaaccacgagaaaacgatcagacaaaccagaatcaagggacattcgatgaaatacctgaccattacctttcaaaactgtcaaggtcaacgaaagcaaggaaagtctgaacaactgtcayagcccagagaggtctaaggatgcctgatgactaaatgtggtattctggatggggtcctggagcagaaaagggacattagggaaaaactcataaaataggaatagtgtatagagtttaattaaatttttttttcagatagagttggcttcagggtacaattaaaatgatgttcatatcattgtgtctctccatttcccatgttcccgtgttggtctttctcaggcagaggtaccccacatagaacaatgtgactgctgtagctcaggtctgtgtgctccctttgagcttgagaacccaggg

SEQ ID NO: 270674 - DNA, 503 bp, Homo sapiens
cctgtacctttgatatcatgtgggatgagaattgcgcttaatctctgtggttgctctgcctctccaagacccataaccccagtctaaccacgagaaaacgatcagacaaaccagaatcaagggacattcgatgaaatacctgaccattacctttcaaaactgtcaaggtcaacgaaagcaaggaaagtctgaacaactgtcatagcccagagaggtctaaggatgcctgatgactaaatgtggtattctggatggggtcctggagcagaaaagggacattagggaaaaactcataaaataggaatagtgtatagagtttaattamatttttttttcagatagagttggcttcagggtacaattaaaatgatgttcatatcattgtgtctctccatttcccatgttcccgtgttggtctttctcaggcagaggtaccccacatagaacaatgtgactgctgtagctcaggtctgtgtgctccctttgagcttgagaacccaggg

SEQ ID NO: 270675 - DNA, 610 bp, Homo sapiens
tagtattttaaattaatgtatgtacctttttagagaaaatactattgcacatttaacaggctccagtatagtgtaaatataacttttatatgcacttggaaaccaagaaatttgtgtgactcactttattgctttattgtgatatttgttttattgcaggcatcgaaaaccgaatccacaatatctctgaggtatgcctataccaaatttattttaaataaattttagagaattctatgctataaaaatagagagagcagaataatgaacttcactgtacccatcactcagtatcaacatttcgtattataccagttatagagctgatttcttctttttgtgtgtgtgtttaaaaagaaatgtgacataaaatttgccatcttcaccatttttaagtgttacacttcggtaatattaagcatattcacatattgtaaaagagatcttcagaagtttttcatcttgcaaatctgaaactctatacccattaaacagtaattccttattccctcccccrcctgcccctagcaaacaccatttgacttcctgttatgaatttgactcctttagatacctcgtgcaagtagaatcttacatatttgtctttctg

SEQ ID NO: 270676 - DNA, 597 bp, Homo sapiens
catttcattcaattgcatcaacattaatgtgagcagctcgtcatagaatttctatgtaatgattcagttctgttagactgtttcctcatsttattggagacatgatagtcttgctcttggagctccagaatggtttctgaagagctggtatagaggctcacctagagctgtgggcagtcttcaaaggtgtacttgtcttttcttccctttttccttgtcaactaaatattgtttggtcctgcaaattttcacttcgtttagcgactatgaccgctaaatttgacattgtaaaggtaggattcttttttgattaatctgtgtatccccaaataatctgaccctgaactgtaaacataggaattcaagaaaggcttgatgaaatgaatagttgaagggaatatttttctttcctccttctactaactatactttttactcattcattcaaaaaatatgcactgaataactaatgcattccaatctctgaacactgttatatgctgggatgcagagccatacaaggcctccatgcttcctagaaattaagggatgttgcacacatcatcttttgttttgtactctgttaaatatttgaaa

SEQ ID NO: 270677 - DNA, 622 bp, Homo sapiens
gttttttagagccgtacccacctaatgaatctaacatgygatatatggggtctggtgcccaataaattaaatatattcatatgtatttttttcgtacaaggatggctactctgctttttttgtttgctaaagaccctgcagttttggtgaggtgcacacagcaaaggagaaactaagtaaatttctacctactttgaagttggcacagtactgctgacctaccaatttcactttcagtttcattctactggcgttggagttagtggaaatttccctagataccatttgaaacgggaagcctgtcttcaattctcagtaaacaatctcttcggcagtggctctttgaccttttgtctgcttatcttattaccagacaaatttgcgctgcccttttaaaaccatcttctaataacaaaactaagtactacaactagctcacaagggtaaaatcacaaatcagatttgtttagcagcagtgtccttgaaatgggtaaatttccactgtgaaagaaactctttgtccccatcaagatcctttttacattttgattaataccttacctaaatatccagaacaaaggcagaagtgaagacgtccgtgaatgcttgcgtaagtaccagg

SEQ ID NO: 270678 - DNA, 477 bp, Homo sapiens
tctattaattatttttcaccattctgccatttccaggactcgaagtcagcagaattgactgaaatagtcttctaagtccaatccaaatatgtctaataatgaaaggctttgtaaggatatggctaaggtgatgccaatctagggatggatttcatgaacatgagtccgagaactgatcaggaaatgaaagattaaccagaggttaaaatgtgcacatagaacgattatctgggatgtcaatccagatggctatcaagcaaaaagttccaaaaattgacagtaatagagttgcaaagagacaatttattagcatcaggaatctggggtttcaacacagggaggtggataaccagagtgcacaccagsaatcaagaaaccagagcatcagaggtagaggggcttcaacacaattctgactccaggctctttcagagagcaatttatctgggatcgaaattgatctagatgaaggggttg

SEQ ID NO: 270679 - DNA, 585 bp, Homo sapiens
tagaaaggactaaagagaaccagaaaggtcaratatgagagtaaatataaaataatcttaagtgcttagaccagcagtataaatgtcttggaggttgataagatatattgaagtaccatatatgaaaatagctcaaaggtaggggtacaggtaaaagaaattactgtttgaagtttcttgtatggaaagttgtaaaatcattaaggcaaattataaaaagaaaaaatgcatattgtaatctctaggcgaccaataaatgaatttttaaaacatagtgataaaatgctgataaaagaggtaagtcgtttttttctttatcttaatgaacccaaaagaaggaatggaaaagtaacaataggaccaaagaaaagattgtaaaattggaaacaaaaagaaaggtggcagaactaagctcaaatgcatctgtaattggaataaatgtaaatgaattacacacctcaattaaaaggtgtgtaaattttcaaaagagttctgaaaaaggcccaatctatgctgtttacactttagatataaggacacaggaagtccttacgtcggaagaaaaagtatgggaaaaggaatacc

SEQ ID NO: 270680 - DNA, 591 bp, Homo sapiens
tcttttcttcacctctgtctgtttggtagggagggagatttgttcctccatttttccatgcaaatctaagtacatagattttccttttcccaacctttgtgttttcattcccatgctatcataagtatacagctttgtctcttaagaacctgtggcaataaatactcttagcctcattcttgactgtaattcagctggccattcatcgcataaaaaaaaatagaagtataaatcatgtaacagtttttttaatgccctagaaaactgtgatctgtgttttgattcattttattcattatttcttttttctttttctggtgaatgactattcaaatagtgrtacccagtgagttaacagctgtaatcagacttgcatttactgctgcttttaaaaaattgatttaacggggttgaactcattttaccacatttgattatttaactgtagcttttcagtctataggtataaaaggtcaaatgctaaatttgagtacttaaagtgaggagtaattgaggttgttatatcaagaaaagatttaatggttggtgatgacacagtatttacatgactaatgttgatttttttacttt

SEQ ID NO: 270681 - DNA, 620 bp, Homo sapiens
atttggggttctttctgtgggcaactccctttttgctagagtttggactttttcttagtgaccagagaatagcaatgaaccatcattttataactgaaacaaaaaccataacccccaagtctacctatccatgatctgtagttctcttccttttttgattgctatttcttccccagtgactcttatactgtttgtaggcctagacgttttgtttgtgcatttttttgtcttttgctattttaatcccaggttatgagagccagctgggtgtggtggctcacacctataatcccagccctttggaaggctaagatgaggagattgcctgagaccagcagtttgagactggcctgggcaatatagrgagacctggtttctacaaaaataaaaagtaataattagtgggtatggtggcatgcatctgtagtcccaactacttcagaggctaaggtaggaggatcacttaagcccaggagtttgaggctacagtgagctatgattttgccacttaatttcaacctaggctacgaggtaagacctatctctaaaaaaagagagcttgtcaccttcctctctctcactttgggacacttacaagggtgaatataaggaaagggagg

SEQ ID NO: 270682 - DNA, 530 bp, Homo sapiens
aaactgatgtaaaaaataaagtctatttaaaaagttaaaggaaaaagttttacttccagacacaaaggtgtaactgaatcagaccagctattcccccatagtcaaaataactgattgtcatgttctccctccctctctgtccttctatattactttctgcacagggatagtgttagtgccttctgggatgggagaaaggtccttcgaaagctcagaagattcaaagaagtctgaggaatcaaaytggaggagggataaattcacccagataacactatccttggggtatggtgccaggttctccagctagggccctgactttgacatctcacaactacatctgtgcattgaactgtgttgaaagttcacctgctctgactcttagacaagggtttggtcttcagctctttctgctaatctactgcatgagataagggcttctttgtaagctgccaaagcactctggctctcatgcttagttttcaatgacttgctaattgagcatggcttgcattgtcaaaccactcctc

SEQ ID NO: 270683 - DNA, 530 bp, Homo sapiens
aaactgatgtaaaaaataaagtctatttaaaaagttaaaggaaaaagttttacttccagacacaaaggtgtaactgaatcagaccagctattcccccatagtcaaaataactgattgtcatgttctccctccctctctgtccttctatattactttctgcacagggatagtgttagtgccttctgggatgggagaaaggtccttcgaaagctcagaagattcaaagaagtctgaggaatcaaactggaggagggataaattcacccagataacactatccttggggtatggtgccaggttctccagctagggccctgactttgacatctcacaactacatckgtgcattgaactgtgttgaaagttcacctgctctgactcttagacaagggtttggtcttcagctctttctgctaatctactgcatgagataagggcttctttgtaagctgccaaagcactctggctctcatgcttagttttcaatgacttgctaattgagcatggcttgcattgtcaaaccactcctc

SEQ ID NO: 270684 - DNA, 583 bp, Homo sapiens
tgaagttggccaagcttgtggctggtgatgccccaggcttccttgtagctgaagaaaactgaagaaatgaggatactactttataagtagaagagaatacggttgcaaagaggcagaaaccaagtatacacacacacacacacacacacacacatacacacacacacacactacacacatgttgtttttaggtgccatttcagaggcattgtatctgtgtatgtgtgaatacttggtttgtgttactttgcaactttattgamataagatcacacatagcatatctgcttgcttcctgtattgcaaaacaatattttaaagtatgtcgatcttctgactgaggctcactaacatagataacattgagaaataaatggaaaaatgatccagtatttttataatttcataagcacaaaatgatgtagtggaaagtattctagatttaggaaagtattctatgatttacgatttagatttaggtgtctcactcctagctctggtgccattaggaagtcattcaaatgtttagtgtgtcactttgttcatttaaagaatacttctggattagataataagccctcaa

SEQ ID NO: 270685 - DNA, 470 bp, Homo sapiens
gctttaacagcatgtgatacggtcttgttctccattcccagggtagaaactggaaccactgtcttgaatcaaaagatggaagaagcttctcttgaagattaaagggacacaagacmgaagttgtctgtgtccctgagggcttagcagaggagacttgacctactttcttgggcttgttgtgacatctattttgtttaaggtaaacattgtttgttttaggattccctaaggagtccaaagcaacatttgaacaatcaccagccttagtacagtgtctggaaatgggatgccttaacagaacctaaaacttgatgcatagtctcagtggtcgggtggcaatagcaagggtgccgatattgcaggtttgccagcaggtgacacttgccatgtcataccagtatgtgtggcaaatccattatctgtgatatcttggaagtcagtttgtatgcctacagagcacatgttaagaa

SEQ ID NO: 270686 - DNA, 498 bp, Homo sapiens
ttatatatctcagaagactattcagtagtctactttgattctattacagcgatgttgtcttctgtttcctgttcataaacctgcttggaggagagtttccaatttatgccaasactgcaaattagcacaagctgctgctgctctccagcaaatcaacccgagggaaactcggggggagaaggaaaactcgatgcagactcataaaaatgtgagaaatccttaggaaaaaagacagctactttgaactggtatgtggcaaggcaggtagatggctgcagctgacagcaaagggcttttggctcagctgttaaagtagaaattagaaaagagcagttgaaatactgtcttggcttcccctttgccttcttttttgttgcaggatttggcaatggttgcccatacctttgaaggccaatacttccaatggcccatccttctgtagggataaaatcaagggaatgcaaaatccctgacagggtggagaattgaggaaaacta

SEQ ID NO: 270687 - DNA, 532 bp, Homo sapiens
gagagacattcagataggaggagtgcagcatagcaaagcttgttcacaaggtagagacagtatattagaaagatgctaagagggtaacttcaggggagcctacagtttatattagcagttgcttcgctgactatagaaccaaaaatagagcccactaaggatactgtgtagtctgggtcttaccattctctcccagtcatggaaaaggtggcttcttagtccactgaaaggatcctctagagtgagaatacagaataagggccacagggccgttttgtaaagccttgaasaagaaagcaagttcgggtttgcacaagggcaatagcagtggaattagcagagggaggcttgttagactttcacaggcgagtgtttggatatttacagactcttgcactttaaccaaaggtcctgctgtatgatctggggaaatgggccctaaatgaatgaacaatgaagaacgtatctgcatggtttcttgtgtggacatatctggaagcttactggaaaaattaaagtgattgactttaat

SEQ ID NO: 270688 - DNA, 451 bp, Homo sapiens
ttaggtagaatggaatttacccaacatgataagaaacagctacagaaaacctacagcaaacatcatacttactgataaaagactgaaccctcactctaaggcaaaagaaaaatgttcttaccacccacatttaacattatactggaggttctaggcagtgtaataagaaaaagaactaggcatacaaatagaaaaaaaaatatgtgsaattgtagttattcactttcaacatgattgtatttgaagaagatttcaaagaatgtacaaaacaaagttactgaagatacaagatcacaatttaaaaatttaatggtatttttaggtactgacaatgaacagtaagaaatgggaataccaccattgatggtggaaaaagatgagctacttaggtataaatgtaataaaatatttaaaagatgtgtatggtaaaggctacaaaacagtgaagaaa

SEQ ID NO: 270689 - DNA, 451 bp, Homo sapiens
ttaggtagaatggaatttacccaacatgataagaaacagctacagaaaacctacagcaaacatcatacttactgataaaagactgaaccctcactctaaggcaaaagaaaaatgttcttaccacccacatttaacattatactggaggttctaggcagtgtaataagaaaaagaactaggcatacaaatagaaaaaaaaatatgtgcaattgtagttattcactttcaacatgattgtatttgaagaakatttcaaagaatgtacaaaacaaagttactgaagatacaagatcacaatttaaaaatttaatggtatttttaggtactgacaatgaacagtaagaaatgggaataccaccattgatggtggaaaaagatgagctacttaggtataaatgtaataaaatatttaaaagatgtgtatggtaaaggctacaaaacagtgaagaaa

SEQ ID NO: 270690 - DNA, 409 bp, Homo sapiens
aaaacaaaatactattaaagtttctgtgtctctgtaatatccccagggagatttctctcagctgaaaagttagctttcacaaagctacttctaaagccattcagtggcttgcctcctgttaatagaactttagtggaaataaaacctaatgcataaggmaaaacaacaacaaaatttctattcaagactttcaaaaagctaaagtataaattagtggcaaaataaaagtgaagaatgcatcaacattaattaatatttgaggtaggatttcacatggaaaaaagaatacttccttcaggtgtggttacaatgtcatttctatggccagtgaaggaggtatttcatgtttatatgtgaacacagcactcttaagtggcaaacaatagaatgtggattagaaaaaaattcc

SEQ ID NO: 270691 - DNA, 569 bp, Homo sapiens
caacatccaggttgaagcagggcattaagctgttgtagtaatcatttattcttcatgtccacacacagaaaaaaagaaaaaagtcaatttcactcaagaatatcgatggtgatattcatcagtaagatattagtgttttattaagtctcaacacttaagcacacatctttttaatattcagtgtgataaaatgggaagcaggtataaagcattcctgctgcatctgatgttcaagtatgatgattgtctccagaaaaacactcagataacactaagttgcaaactgaaactgccacttttccatagaaaaatatttttacttgcaaaaaaccactsaccaatacaaactgtggttattcaaattgcatatctagcagacattttcttgaaaagaaagtaagcctgacactcatatcagtcacctgagtttgacagcttcccaatacttaaaagacccttctgatgagatggatagtgatttaaaagatgtggcttaaaaatgatacattatataataaaatgtgtcaacaattagaagatgcatagctccatggaccaatactttccaa

SEQ ID NO: 270692 - DNA, 603 bp, Homo sapiens
aagagatttttcacacatgcaaagcaatgtcactgttctcactattttttgttttggaaatacagttattttcattgaaagcatgttatttacagtaacatttaatagatttttcattaattttacttgaattaataaagtgctccgtttaaatttctgattacttattttttaaagtacttagattatgtttctgagtgtttactgatagatattacccacatgactgagagttctttgggatcctcgttcattttctttaagaatgtaaagattcctgagatttaaaacagaataatgttttggaacctcagtcctcactattcctatcccttacaacctcacctcctaatgcctttcttccccaattgtcaagacttggtgatccaagtattccaaatagatttccactgcaggacctttgcacttgctgttctgtctttatagagtctcctacttgcagatagtcctatatctgccyggctcatgactcctctcatgcaaagctctgcttaaatacctcctcatccaaaaggcttttactaactaccacttttaaaacagaacctcccactccatgactctctactccttacctagtat

SEQ ID NO: 270693 - DNA, 514 bp, Homo sapiens
tctttattttacctcactcagagttcaccaactggaaacagtctgttccccaagagcatttgctgaaaatgstcagtggcaattgtttaacattgccttacacagtgaaaaaagttgggacaaaaaacaaataaaccaaaaaaacaaaattgtaaaaaggaagatctggaaaatgagatgttcattggaggatttgaaaagttcttaaatattcttgaaaatccagaaggccacacgctatgtacggctgtgtaaacactcagaaaagacctgagaagaccctcagttcttgcctctgaacttgaagttctgcacaaggaggaagtgatgggaaagacataattataaattgcctggctgaatgttaacagcattctgtaacactcacagaaagcccttcaccaagattaggagaaaacgtttctagagatttaaggaaatctgtcttgtcactagctcacaagtaagctaattgagcagagacttaagaggtgatacatgacaaggaatatga

SEQ ID NO: 270694 - DNA, 514 bp, Homo sapiens
tctttattttacctcactcagagttcaccaactggaaacagtctgttccccaagagcatttgctgaaaatgctcagtggcaattgtttaacattgccttacacagtgaaaaaagttgggacaaaaaacaaataaaccaaaaaaacaaaattgtaaaaaggaagatctggaaaatgagatgttcaytggaggatttgaaaagttcttaaatattcttgaaaatccagaaggccacacgctatgtacggctgtgtaaacactcagaaaagacctgagaagaccctcagttcttgcctctgaacttgaagttctgcacaaggaggaagtgatgggaaagacataattataaattgcctggctgaatgttaacagcattctgtaacactcacagaaagcccttcaccaagattaggagaaaacgtttctagagatttaaggaaatctgtcttgtcactagctcacaagtaagctaattgagcagagacttaagaggtgatacatgacaaggaatatga

SEQ ID NO: 270695 - DNA, 460 bp, Homo sapiens
acagagccttacagacctgtgagataccatcaagctcacctaataagcgtaatgagagtcccagaagcagaagagagatagaaagaggcagaaagaatatttgaagaaataattgtagaaaaattctcatatttctgaaacacatgaatctstatatccaagaagctcaaaaaaccttaaagtgggagaataaactcaagaaatccacactgagataaattataatcaaactgttgaaagccaaagacaatgggagaattttgaaaacagtaaaagaaaagtgactcattatattccaaggtcctcagcaagattaacaattaattttttatcataaaccactgggacagaaggaagtgatatgctatattcaaaggtcaaccaattattctatatttagcagaagtatgtacatttcaagatttacatatactgagaaaatttgttaagagcagatttc

SEQ ID NO: 270696 - DNA, 600 bp, Homo sapiens
atagttggaaatttcaataccctaccttgaataatgggcagaacaactagagaggaaaacaacaaggaaatagaaaacttgagcaacaccataactagacccactagacgtaataggatctacataatacttcctccaataccagaatatacattatttgtaattgcacgtagaacagaatagatcatatgttagaccataaaatatgttattctcaataaattaaaaaggattaaaattatatamtgtacattctctaaacataactgaatgaaattttaaattcataaaacatggaaatttgagacattcacaaataaatggaaattaagcaacactgctaaataatcaataagccaaagaataaattaaaagataatttagaaaatattttgaaattaataaatgcaagatatcaaacttacagaattcatctaaaattgcgcatagaagaaaatttgtatgtaaatacctgtactaaaaaaaaaaggtgaaagatctcaaatcaataacttaacctttcaccttcggaaactagaagcatgaagaatagcttaagcccaaagcaggcataaaaaggagataataaagattagagtg

SEQ ID NO: 270697 - DNA, 523 bp, Homo sapiens
tgctctcttttcctggggttgtaatggcattcagaaatacagtttaaggaatgattattagagaataaaatcaatatctctacaccttaccaatcttcaaaagaaataaactaagaaataggaacagagatattagctttacactgcattgtttttcgataaacataaacaatagttatttaacaataaatgattgttactttasgaaaaaatgcatttgcttcagctgggttagtaactacagaaagacgcattcctttaactacactgttgtagttgattgtatgtctttgcaataaatgtattttaccttatgtttgtgttggggggtgtgtgtgtgtgtgtatgtgtttgaaaattgcttatgctaaatgttctgttaattgaatatagcctatagaaataatacattactccttaatctgaagatagttttctgcacttcatcttcaagttgcttttctgtactacctgtacagaataattagagttgtaaaagtaggagaatttacagttatgtgtg

SEQ ID NO: 270698 - DNA, 537 bp, Homo sapiens
cctttctcctctatctttgtttactccctaggtgatcatatcattctcacctatttaagtactatttgatgctgatgaataccaaacttataaccccagtccgtatttcttcctttatgtcagactcaagtatccaactatgtatttgatttggacatagattagacatctccwtattcacaaatctcagatggacctttatccctctctgcaatccacttgctttgtggtctctcctttaatttgttatttttcacatatcctgtcaaattacactgctaggcctctttccatctttataaaggcagtatcctttaatcctcctccctcaaattattcttctccatctgccttacagacttccagcccaaggtcaatccttttatctttttgtactatcttttaccaagtgagtggaacagtgatggagaacataacataggcatgcatttttttggtgccactttgtgccactacaagtaaatgatctccaactccaagggggcctccgtgcttttgaggaataagtttacttgt

SEQ ID NO: 270699 - DNA, 537 bp, Homo sapiens
cctttctcctctatctttgtttactccctaggtgatcatatcattctcacctatttaagtactatttgatgctgatgaataccaaacttataaccccagtccgtatttcttcctttatgtcagactcaagtatccaactatgtatttgatttggacatagattagacatctccttattcacaaatctcagatggacctttatccctctctgcaatccacttgctttgtggtctctcctttaatttgttatttttcacatatcctgtcaaattacactgctaggcytctttccatctttataaaggcagtatcctttaatcctcctccctcaaattattcttctccatctgccttacagacttccagcccaaggtcaatccttttatctttttgtactatcttttaccaagtgagtggaacagtgatggagaacataacataggcatgcatttttttggtgccactttgtgccactacaagtaaatgatctccaactccaagggggcctccgtgcttttgaggaataagtttacttgt

SEQ ID NO: 270700 - DNA, 589 bp, Homo sapiens
aaaaaaaaaaagaactaggaatagatagaccttttcaaggactacagctcaggtatgaatcattttaatctttggaattgaattgaagtgatcccagatagttagtgcatccaagtaccagacaaaagcagcctaattcctctctaaaggaaggtgatgtggtagctctcaaataattttctacaacaattttgcaaatataatgtcgagtacaaagaaaggaatcaggtacaaagaatacaagacatcctggatgacagtgaaaagcagacaaaagaaacagattyggaagtgccttagataataaagacagagttaaaataacagcttatctcctaaaagagaaaataagcaattgagaattttttgagaaaaacttaaaagaattgtaactgaaaactacaatattgttactgaaaatatcaaagaatttttttgcttttcttttttttttttttttgagatggggcctcgctctgtcacccaggctgtagtgcagtggtgtgatcatagctcactgcagcctccaccttctgggctcaagcaatcctcccacctcagccttcctggtaactgggactacaggtgc

SEQ ID NO: 270701 - DNA, 589 bp, Homo sapiens
aaaaaaaaaaagaactaggaatagatagaccttttcaaggactacagctcaggtatgaatcattttaatctttggaattgaattgaagtgatcccagatagttagtgcatccaagtaccagacaaaagcagcctaattcctctctaaaggaaggtgatgtggtagctctcaaataattttctacaacaattttgcaaatataatgtcgagtacaaagaaaggaatcaggtacaaagaatacaagacatcctggatgacagtgaaaagcagacaaaagaaacagatttggaagtgccttagataataaagacagagttaaaataacagcttatctcctaaaagagaaaataagcaattgagaattttttgagaaaaacttaaaagaattgwaactgaaaactacaatattgttactgaaaatatcaaagaatttttttgcttttcttttttttttttttttgagatggggcctcgctctgtcacccaggctgtagtgcagtggtgtgatcatagctcactgcagcctccaccttctgggctcaagcaatcctcccacctcagccttcctggtaactgggactacaggtgc

SEQ ID NO: 270702 - DNA, 589 bp, Homo sapiens
aaaaaaaaaaagaactaggaatagatagaccttttcaaggactacagctcaggtatgaatcattttaatctttggaattgaattgaagtgatcccagatagttagtgcatccaagtaccagacaaaagcagcctaattcctctctaaaggaaggtgatgtggtagctctcaaataattttctacaacaattttgcaaatataatgtcgagtacaaagaaaggaatcaggtacaaagaatacaagacatcctggatgacagtgaaaagcagacaaaagaaacagatttggaagtgccttagataataaagacagagttaaaataacagcttatctcctaaaagagaaaataagcaattgagaattttttgagaaaaacttaaaagaattgtaactgaaaactacaatattgttactgaaaatatcaaagaatttttttkcttttcttttttttttttttttgagatggggcctcgctctgtcacccaggctgtagtgcagtggtgtgatcatagctcactgcagcctccaccttctgggctcaagcaatcctcccacctcagccttcctggtaactgggactacaggtgc

SEQ ID NO: 270703 - DNA, 499 bp, Homo sapiens
tttgtttggcggtttcaaggcatttgttcatgaactaatttccagagttaaatgtgttagcttatttatttttattcatttttgtttaattttgtttaataatgaaatttattcaatgacttataatttgcctctggttgttggttttgtcatagtttatatgttttaatacaaaatgttgtaatagaaatattgtgtaattgcaaattaatttcttttttgaccatgaaattattttgcaatatgtttcatacttccacagggtaatraagaagtaatttttagtctgttgctattttccaggtcttttattgtagtcagacaacatatcaaattaaaaaaattcacttctttagatttattggcttgttgaatgtgtgattacttttaaaaatatatttcatgggcttttaaaagaggtgaattcttgtaagaaactgaaattggcaatataccattaagtcgaagaaatagtttaatattataattctcaatttct

SEQ ID NO: 270704 - DNA, 554 bp, Homo sapiens
tattatgagaaaataaagtatacttagtaatttattatgtttgtaatagtttatttcctcaatactatgatttttcatgagtaatattttgattaaaaattgactttttgttattataaaaaattgtttttgatctagtttattaataytggcctataactccttgtaacattctgctttttgtttggtgctcttattttcatatttctatttttaatttgttttatcaccttattttaggttatttacattaaccaaatcatcagtaatgaaatgcatctattttgcatttgaaaagaaaaataatttgcttaagtcaatatattaattaccctagaaccaaaaggagaagaaatagatacattgatttgaaactctcctgtctaaccaataaaacacagaaacttaaccaacaagcacatacaaaccctagattggatactgttttctgctgaatatcaataaataaagtgatagatggttgcatttcaaagctgattacatgaaacttataaagtctggatatctacaagtaacttttatctacaaattac

SEQ ID NO: 270705 - DNA, 584 bp, Homo sapiens
gaacaaaatacactctttgtgttgctgttggctggtacagaaagtattggcatgagttaatctaccattgttgtgggtagaaaaaaatactctttttctctgcttgaatcctaagactagttacaagttttcacaacaaataagatgatataagaatagtacttggctttttatacagtaaattacaccagtgacatgtaaaaggtgtagagaaaaaaatattctctgacactgaagaaatatttatagatttataggcacttgtattagtcagagttctaccagatatagacagagatgagacagagatagagataaagatagatagagatgatagagataaasagagatagatggaaagaaggaggaagacagaaagggagagggagggagagagaaaaaaagagagagatttcaaggaattggcttccacaactgtacgggtggcaagtgctaaatctttagggcaggttgacaaattggacagtctcccgcaggaggtgacactgtaatctacactcagagtttcttcttcctcagagaagccttggttttgctcttaaggccattcaactgattggatg

SEQ ID NO: 270706 - DNA, 585 bp, Homo sapiens
ctgaaaactagcaaacttgtgatgcacttttaccagttttgaagaattgttgctatataaagcacatgcgggatcgaaataaaagaaagaataagttcaagacagctcactagtaaatgctcagtgctcawtccacgatcagaaaaccttaacagaagatttcaagaccttctacctcagaaagttaggagcaacactgaaacaaccatactgttatttaaggctttcaccttccctgggtgcctacaggaaagcagttcagacaaaatatatcttatcatgtaaagtaagataagataaacgaataagaaaactgataaattagatataaaggatatgttagaaagtataaacaagtattttataaaactgtaagctaagtggctcacacctgtaattctagcactttgggagacagaggtgggaggattgctggagtccaggagtttgagaccagcctgggccacacggtgagacaccatctctacaaaattagaaaattagccaggagcggtggcatgcacgtgtattcccagctgctctggaggctgaggtgggaggatcacttgacccaaggagttcaga

SEQ ID NO: 270707 - DNA, 585 bp, Homo sapiens
ctgaaaactagcaaacttgtgatgcacttttaccagttttgaagaattgttgctatataaagcacatgcgggatcgaaataaaagaaagaataagttcaagacagctcactagtaaatgctcagtgctcattccacgatcagaaaaccttaacagaagatttcaagaccttctacctcagaaagttaggagcaacactgaaacaaccatactgttatttaaggctttcaccttccctgggtgcctacaggaaagcagttcagacaaaatatatcttatcatgtaaagtaagataagataaacgaataagaaaactgataaattagatataaaggatatgttagaaagtataaacaagtattttataaaactgtaagctaagtggctcacacctgtaattctagcactttgggagacagaggtgggaggattgctggagtmcaggagtttgagaccagcctgggccacacggtgagacaccatctctacaaaattagaaaattagccaggagcggtggcatgcacgtgtattcccagctgctctggaggctgaggtgggaggatcacttgacccaaggagttcaga

SEQ ID NO: 270708 - DNA, 489 bp, Homo sapiens
agcaaaaacatattactgaacaaatactatttttacacccattcacaactcctttgctcccagaaaagacaaaatgtcctattaaaagctgtaagatgtctctttgagtgcagtaattatctaatcgcaaagcatttctgaaggacaaactgtacatattgttcttagaaataactaagacatagccacttccagtagtcagtggcagatatagayttagtaaataagaggggcttacagtgattgcctggtttttgtgttgggcagcctatagagacttttcttgaatctacatcttggtgaccctttacagaagactgaaaatctatttgttttacatcaaagaatttgaagtcagtggtgtaagtcatggagatcatgtggggaactgaagactagcccaaactttacctcagggctcaccactctctagactgataatgatatcaaaaaatacatcttgaactctcagcacagacacagcaaagc

SEQ ID NO: 270709 - DNA, 623 bp, Homo sapiens
ttcttctttaaaggattgtgaagtttcctagttagagaataggtgtatgcttcctagtttaggatgttccttctttcctcactcaaaaaattgggttcrtcctcacaattcttatggttttgagtaattggtttagttaaataaactcctgaaaaaaagagacgggaataatagaagaaaagaaaaggcaagaatatgtttcctgggatacctcgactctggaattaattaaatcagatattaaattttcaccaagatgactgctacaaaccactcaaggatgaagattttgattttggtttttaacttttattttaagttcaggggtacatgtgtaggttcgttatatatgtaaacttgtgtcatgggcatttgttgtacagaatatttcatcgtcggagtattaagcctagtacccgttggttgttattactgatcctctccctcctcccaccctccatcctccaatgggccccagtgtctgtggtttccctctctgtgtccaagagttctcatcattaagctcttacttataagtgagggcatgtggtatttagttttttgttcctgtgttagtttgctaaggataacggcctccagctccatccatgttcctgcaaagg

SEQ ID NO: 270710 - DNA, 623 bp, Homo sapiens
ttcttctttaaaggattgtgaagtttcctagttagagaataggtgtatgcttcctagtttaggatgttccttctttcctcactcaaaaaattgggttcgtcctcacaattcttatggttttgagtaattggtttagttaaataaactcctgaaaaaaagagacgggaataatagaagaaaagaaaaggcaagaatatgtttcctgggatacctcgactctggaattaattaaatcagatattaaattttcaccaagatgactgctacaaaccactcaaggatgaagattttgattttggtttttaacttttattttaagttcaggggtacatgtgtaggttcgttatatatgtaaacttgtgtcatgggcatttgttgtacagaatatttcatygtcggagtattaagcctagtacccgttggttgttattactgatcctctccctcctcccaccctccatcctccaatgggccccagtgtctgtggtttccctctctgtgtccaagagttctcatcattaagctcttacttataagtgagggcatgtggtatttagttttttgttcctgtgttagtttgctaaggataacggcctccagctccatccatgttcctgcaaagg

SEQ ID NO: 270711 - DNA, 622 bp, Homo sapiens
aacaatagcaataagttctactattacattttaattttccatttcctagcctcttgataaagattgtccaatatttctttaacttttttttttttggtggggacaatagggtttgctagaatttttagaattttatttttttctattttttaactctattttaggtttatggatacatatgcagatttgttatataggtaaactcatgactcaggggattggtgtacagattattatgtcactcgggtactaagcttagttatttttactgatcctcttccttccccaagtatccaccctctaataggccccagtgtctgctgttcccctttttgtgtccatgtgttccaatcttttatctcccatttatcaggaagaaaatgtagtatttggttttccagatattagctccccaagaataatggcttccagctccatscttattgctgcaaaggacatgatctcattctttttcatggctgcatagtattccggtgtgtatatgtaccacattttctttatccagtctgatattcgtgagtatttaggttgattccatacgtttgctattgtgaatagtgttgctgtgaacatatgcatgcatttgtctttatgtagaacg

SEQ ID NO: 270712 - DNA, 588 bp, Homo sapiens
gtgcagggaacaccttgaaatttgggagctcaaaatggtatcttggctggagactttttatttggctggctatgcaacatatttctgctacataaccagttttatcagcagaatcctccagagtgtcactgaaaccaggtgcaaatcrtcaatctcattgttatcaataaacaatcccaactaactggaatgaatggtccagaaactcttcagacccatggttgcaaagcaatactattaatcagtatgttttgtgcctcgagtaagggtcattgtcataaacgaacgttagcaaagcagcccaagataatgacaaacctgctgtaattaaccttgaaaacacaaacatggccattctattgatgcatgccagttcaaaatggcatatgatgaagtctggccaacatcaactggccatgtcattctgtttgtttagtaatccagtgacacttccatggtggtgttttataatgggcatccacacttggtgctaatttccatatgccacccatccatgtgactctatccagagaaatttgtctctgatttgtctctccttttcttctaggcctctggccagatgagttg

SEQ ID NO: 270713 - DNA, 622 bp, Homo sapiens
cccctttttcattttttaaataaggcccttatgtttgcatgatcacctatatttgttgctctgagtttcagcccaacaggaccttacatggtttaatgaattctgtactaaaaaatagagtctgctatccagtgttgactaatatgaaatcttcatgaaattgtatctgctgaaaaagaacagataagacaggttgtctgaaattatacctggaacaggtacatgataggttttttaatgtgataaggagggcaatatcatttcagaccaatgacactaagtctgggaagctgtaaagcaatgaatccaatctcttgctatcaaaataagatctatgaaagaaaattmataagtaaatgtcttcctttcatcatgacggcatttgggagttttagcgctctgtagcccattagtcagtttagttaatgactctgcttatcctcttaatcatgtgtagcacattgactgagcttcatttagttcaaagtgcctttcagaagctctgaactgaatcctagttgtggaaaatcttacctttccagagtacaaaacatatttagttcacatctcttacattttaggatgtcttcagaaaaattgaagtgcttctaagtatagaaaa

SEQ ID NO: 270714 - DNA, 611 bp, Homo sapiens
cttacacattttgtggaagagatattgagggtgtgcctctccttggttttgatcttagtataagtcaaaaaaaaaaaaaaagaaattttaaagaaacacttttcagtattacagttttatgtcctggaaatttgaactagtctgagtagttagtcagcttttagtcttcagtctgtccctaggtagttttatgatttgaaagatttgaacttctttgatgatttgaacttttttgagcattgggctttttatttgcaaaatgtgagtttttcatcttatcttctgttcattgagtctaaatgtaagtatctaaatccttatagattaagtaggatgraaaagaagccatttgcaactgaagcaatgcaatttgtgctcccatgaaaagtgtcttctctgttaaattttaatcattttactaattcctgtattatgaaactatgtctttcctgttagattttaatcattttactaattcctgaattagttatatatctaaatgtaacagttttaaatacagaattcttgcacaccagtggttgtctcatatttatcattttatccttaggtcaaagcctattgctttacagtagaaggttttgaatatattt

SEQ ID NO: 270715 - DNA, 618 bp, Homo sapiens
tcaaggaatatttatctgtcctccggcacaggcttaagacatacaaagaagagcaaatccattagagttaagagaggtcatccccattgctatacagttgctctttttattgttcccaatgccatacctctgcagtctcctttgggggccacgttttaggaatgcagagtacacatcctgaaaattttaggagaagacttgattggaagatgtagtgttctgcctttatgctataaaattctcataggcaaatttaacaaaaagaatgaattttatattatttaacataccctgggtaagacttgcattattgatcatcatcaaagaagcacactcaaaaacttgtgagaaagttatcggaaacaaataatcactgcacagtggactgcactccgtgtcgttaaaagcatttaaaaatgccattacaggttgcattggttakttttaagacctgtattggtttaattcacacagatttcaaaaaaatggggatgtgatcaataatttattaattttgtcttctgggaaatatgaaattaaccaggattagtccatttatcaataaaagacagaatgaaatatttcctggatctaaacagaaagatatggggcccagac

SEQ ID NO: 270716 - DNA, 643 bp, Homo sapiens
aatgagcagcctaagtttgggaaaatttgccctaattctatgaccagctgcaaaattagctgggcccaatatgaaaatgcagtgttctgtgttaaattattattaaggatttcaggttggcaaaggagcagagcattaatccatatactgggcttttctgaaggcataggcctctgcaatttccctccaaaaggcaggaagctgactgtggatatcacaatcatatagaaatttctaactctctctctctctctctctctctatatatatatatatatatayacacacacacacacacacacacacacatatacatacatatattgctttttgctcttagaatatttcagttgttaaatttgaatcccaaaatctatctttacttaaatgtaatttgttaaaagaatatattgaaatataatatatatatatatggggagagagtgagagagagatagagtaagagagagaattttctcacccaaccagccacatgcttgaaaatgactaaaatggtgacttccggaagttgatttggccatgttcttacctgtagacattctatctaaatttcaaggttcatttaaaatgttgctaatgccaggatatcttcactgattgacagaattgtgcaaaagtttct

SEQ ID NO: 270717 - DNA, 550 bp, Homo sapiens
ttctctgctcctttcagaggcaagtctttttaaaaagttcttgacaattttacaattcaggaatgtctttctcaaggacctgagagtaatccctttgaaatgtaaccatcaaataggatagtgcctgatatggttttgctatgttcacacccaaatctcrtcttgaattgtcattcccataattcccatgcattgcggaagggacctggtgggaggtaattgaatcatgggagcaggtctttcccatgctgttctcatgatagtgaataagtctcatgagatctggtggttttataatggggatttcctctgcccaagctctcttgcctgccgccatgttagacgtcccttttttcttcctttgtcttctgccatgattgttaggcctccccagacatgtggaactgcaagtcctttaaacctcttttctttataaatcacccactctcgggtatgtctttattagtagcatgaaaactgactaatacagtacctctgtctcctaatttctatgggagggtagaagcctgatttcaggcacctttcttca

SEQ ID NO: 270718 - DNA, 577 bp, Homo sapiens
taacattacagttttgtggctgaatagtattcaattgtatgtatgaaccacagtttcatcatcctttcattcatccacaagcatttaagtggtttcaacctcttgactattgtgaataatggtgtgattgctgtgaatgcaatatatcctcaaaaccttgattttaattcttttgcatacttaraaatcaaatttttttaataatatgatatttctatttttttataaagaatatccataccatttcacattttcaccaacagtgcacagggttgcattttctccacgttcttgtcaatacttgttttttcttttgtttttgttttgtgttttttaatgttggccatcctaacaggtatgaagtgacattttattgcagttttaatttacatttacctgaagaatagtgatgttgagaggatctgttcatatccccattggccattcataacttttctttgaataaatgtctatggaagttctttgcccatttttaatcagtttttttgttataaaattataggatttctttatacattttgaatagtaactccttatcagatatattatttgcaaa

SEQ ID NO: 270719 - DNA, 622 bp, Homo sapiens
ataacatacagaaaaacaattcaacaaaatgaaaaaaatatatataattaattaaaaaacagaaatcccaaatataaaaaatgcaatgtgataaatgaaaaatgcaacagacagcatcaaaagcagaacttatcaagcagaaagactatataaaactgaagacacgttatttgaaaatatattgacagatgagaaaaaaagtgaaaagaycttgaagaaagaaagcttacaggatttatggaacagcattgagaaagcaaatattcaagtcattagagtagaaaaagtagaagggaaagataaagaaataaaagcttatttaaataaatagtagcatataattcttcaaacctccaaaaaggtgtaaatatccaggaacatgaatgtcaaagatctccaaatagaatcaatccaaataagactagcttaagacataggatattcagtcagacatcagacaaagaggatgctgaaggtatcaagagaaaataaggaaataatacacagaagaattacaatacaactaacagctgactcttcaacagaaaccttatagggcgggaaagactgggtgaggtattcaaagtgttgaaggaaagaaaaagaaagaaaaaaagaacct

SEQ ID NO: 270720 - DNA, 636 bp, Homo sapiens
acaaaacggtagtagtgagttgttacctatcaatgattaccttgaatctaaatggattaaattcttcaatcaaaagacaggctgtttgaaaggactaaaaactaagaccccattatatacgtcttacaaggtactcacttcacttgtaaggatacacayagactgaaagcaaaaggccagaaaaaaattgcacagaaataagaagcaaaagacagcagaaatagctatacttacataaactaaaatagattttaagttttaaaaactttaaaaagagacaaagaaggccattatataattataagtaactcaattcagcaagaggatataacaattgttaagtatatatgcagccaatattggagcacctaaatatatttaaatcaattattaatggatctaaaggtagagacaactgcaatacaataatagcagagactttcagcccactttcaacagtgggctgatcattcagacaaatcctataaagaaacatagtacttaaattacactccactttatccacagctgcaaaatatacatattttccaagtacacattaaacattctctgggatagatgaaatgtttggctgcaaaacaggacttaggaaatttaagaagtttgaaattatat

SEQ ID NO: 270721 - DNA, 611 bp, Homo sapiens
ttaaacattctctgggatagatgaaatgtttggctgcaaaacaggacttaggaaatttaagaagtttgaaattatatcaaatgtcctttctgaccacaatggaataaaagaagaaattattaacaggagaaatttcagaaaatttataatacatggaaattaaacaatatgcttttgaaaaaccaatggatcaattaataaattaaaatatttttcaaagaaaaatgaaaacacagcataccaaaagccgtgggatatagcaaaagcaatctgagaatctgtaggcaataactgcctacgttaaataattaaatatctcaaastgcttcattgtgcacttcgagaaactagaaaaacaagaaaataaaacccaaaggagggaaatactaaagatcaaggtagaaataaatgatgtagagactagaaaaatcatagaaaaataaataaaattgacgaatctctagtaagactaaggaaaaaaagcagactataataaatgaaatgaaaaagaagatattacaactgatatcacagtaatacaaaggttcagaagaagctattgtaagctattatgtgccaaaaattggatcatatagaggtgaataaattcc

SEQ ID NO: 270722 - DNA, 464 bp, Homo sapiens
agtcagtgtgcaagccaagactagatagaatgtggcatgtggggctcccagggctatatttaggccactgggaagagctgcttctcacagcagggtctggacataggcaggctataaacatagtcacatgtttaccccagctccaggattagcagaatgaacacagaatctggagcttcgtcactccaagcaatcccttcttgcatctccaaaatgctcaggagaaactccatcttcatactgcacaagaagaaactgaggtaatgggaaggaatgaaaaattctgaatttctggcgttagmctaacatttgtccttaggtccactgcaaacacaggcaaaacttcagcctgtctatgtgtcaggcgtggcccctgggatatcctcccacaccccaggaccttgcactagaggaaaggggctttggcgtaggtcagtcaatgatataaattggtgatcagactt

SEQ ID NO: 270723 - DNA, 454 bp, Homo sapiens
agctgggattacaggtgtgcaccaccacgctggctaatttttgtatttttactagagatggggttttgccatgttggccaggctggtctccaactgccagcctcaagtgatccacccacctcggcctcccaaagtgctgggattacagacatgaaccaccacacccagcctttattttcatttgattcaaaatatattctagtttctgttgtgatttcttctttsacccatatattatttagaaatttattgtttaatatgtaagtatttgggtgcttttccatatatctttttgttattgatttctaatttaattctattatgattagagagcatggtttgtatgatttgaatcttttagaatttattgagatttgtagtatggcccagaatgtggtctaatttggtaaatgttctctatgcacttgaaacaaatatatcgtttttcagtgga

SEQ ID NO: 270724 - DNA, 490 bp, Homo sapiens
tgacatagtttaatttatcaaaacaaaataatatgcctaccattatgtacaaaggaagtatgctagatagtctctagatagtcttacctaagatattgtttcagtatccatttctctctaacaaaccacagttgatccttaagcaacatggggttagggacacggacatcctctctgcatgtgcagttgaaaatccacrtataatttttgactcccccaaaacttaacaagttagtagcctactgttgactgggaagactcgtcgataacataaacagtcaattaacagatatgtatgttatatgtgttatacactgtattcttaaaataaagtaagctagagaaaagaaatgttattaagaaaagtaaaaggaagaaaaaatatatttactattcaccgagtggaagtgggtcatcagaaaggtcttcattcgcatggtcttcattttgggtaggctgaggaggaggaggaaaaggaggaagaggaagg

SEQ ID NO: 270725 - DNA, 526 bp, Homo sapiens
tctttgttgaatccttttccaagcataccttacacctgcctaaaacaggtaaaatgtaaatcatctctttgcagggattctttaggatacatcttgttttccgtgccttatagacatgatcatctccttgctgcttagccaagtcctttggtttactccagcatctgcagactggaagagaagacttctcttttaactcactcaccttcttgccccagggaaagtaggaaacagcacatttgttgaaagagacaagttctgcattaggctggttgtttacttgggtctgaaagacaataaacctggtcctcacttggagtaggagaaacttaggaaaaagcaagggtgccatggaaaaccactaatcctsgtttgtcccacaaacaatcatgttaaaatcttggtacagaagccccctctgaagctgaaatgaatgtcttgggttaagaatgttgtcacaatggcttaccctatgtgacatcacgaattcagacaaatgaggtgtgactgtcccactttgggggat

SEQ ID NO: 270726 - DNA, 568 bp, Homo sapiens
aacatgataattcattataaagtgaattttgttttcccttgaagttacatcacaaaaaatgcaaacaaaaaatacctgaaattgaatataaaattccattagaaaaatgtatttttggtgaggaagtrgtagggaagggaactagtccgtgcaatattttagccttgtatcacccttggaccctcatgtctattagaaattgaaattatggttaagctgaaaaaccttatctttgccatgttttctgtatcttacagcattttccctacttttgtcaccacctcccctttccaaaccatggaaatttcttttatatatgaggttctttcacaactgaagggttctttcatatctgagggctgtgcaataaactttctacaatgatagaaatcttctgtattttcactgttcaatacagtacccattagttacatatgatgactgaatgcttgaaaagtggctagtgcaaatgagaaacataatttaaaactttatagttaattttagttacttacaactaaaatataaatagccacatgtggttggtgactaccacattggacagcaa

SEQ ID NO: 270727 - DNA, 641 bp, Homo sapiens
tccctacttctgttggctaattccttactgtcttcagggtcttaacttaaatataacttcttcaaagaagtatttactgacgctgtccaccactgtgagacagatacccttcttgatgaacttccacagcatcctgtacttccctgtatcagcatttttttttttaaatgtacatggcaaaaaatccaagaatgcatgatggaaaataaagtctcccacatatctcagactccagacactgaattcttattcttagaggctaccactgttatatttcttgggtatccttctagagatattctctgcctacatggcacatacctatgtgttttcttttttgccctcacaaatgatagtatactgtatacatatttctgcacctagttttttccacttaactatgaactttggagtctattccatatgtaccttgtagagctgcctcatttttaaaaattgagacagaattaagacaataaatttcaccaattttaagagtacaacttgatgagttttagcaaatgtatgcagtcaggtaaacatcactacaatcatgttagaggatgtttccattactcacaaaaaawtttctcatgccccaagcaataattgatttgctttctgtcagtacagataaaatg

SEQ ID NO: 270728 - DNA, 592 bp, Homo sapiens
cttcctgctcacattggttaataattaacatttttcaatcaagtgatatgttaattattttacatgcattattacatttaatactcatagcaattctataaagtgccatcactatcttcattttacaggaaactaagatgcagaaagtaacttgcccaatatcacccagctggaaaatgcaaaagacggtttccttttttttttttttgacrtggagtctcgctctatcacccaggctgcagtgcagtggcgcgatcttggctcactgcaacctctgcctcccaagttcaagtgattctcctgcctcagcctccccagtagctgggactacaggcctgtggcacaccacacccagctaattttttgtatttttaatacagataggatttaaccatgttagccaggatggtctcgatctcctgacctcatgatccacctgccttggcctgcccaagtgctgggattacaggcgtgagccaccatgcccggccacaaaagatggtttctaaacccgggtccatccagagctcaagctcttagtcattacacagttttgggtcgactttttttttttttctgaaggaagggcagc

SEQ ID NO: 270729 - DNA, 609 bp, Homo sapiens
tatcatttacagaagttccatatctatgtgaggcagtttctgagctttctaatatattttattggtcaatttgtttttccttgtgccaaaaccacattgtctcaattactataagttcataataagtcctgatatttggtgaggcaaatcttctctccctacttttcttttttcagtattttaaatccttaccaggtaacataaaaaacgctgtaggtcaaatagggtagaattggagaattgtcatctttatgatattaaattatcctatctatgaaagtgttatctcccttaatttattaagtactcccttaatatctcttaatgaaattgcacatttttaaagtagaaggcatgtaacgtttgttagatttatttttaagtattttattttctctggtactattttaaatgcgtctgctctttaattatgtgttttagwttgctgttggtatatagaatgtaaattacttttacatattcatcttatatcaagctaactgactaaattctcctattactgctaatagtttatctatgtattgttttgagttttttatgcaaataatgacaaataatgccaaaatgaccatttaatttcctcccttc

SEQ ID NO: 270730 - DNA, 555 bp, Homo sapiens
cgttgtcattttctgtttctcagtgagccttgaaaagggggtgagcctccaytggggtaacagaggctatgtgacggaaaaagtccagattcttattttgtctgtgtcctcagaacccaaagagatcgtggctattgagcgtgtggtgccggtgttgatgatatcataaataagctattaaagtgtaattagcagggagaataacacatacagaatgtatgcaccagatggacttctgtggtctggggtatcagggagagcttctttggagtgaaatatttaaatgggagccttagagttaaataagggttggctgagcaaaggcaaggggagaaaagtatttaatgccagaggagatgcatctgcggaaaccctgaggacaggaaaggatggaggatcacagggccacaaggaggcaagtgacaaaagtgcaccatggaggtggccctagcaggggctacagaatggggtgggaggcggaccagatggccatattaggttttggtgttctaacaccaaagcgatctaacaccaaggcaatctaatgccattagg

SEQ ID NO: 270731 - DNA, 555 bp, Homo sapiens
cgttgtcattttctgtttctcagtgagccttgaaaagggggtgagcctccattggggtaacagaggctatgtgacggaaaaagtccagattcttattttgtctgtgtcctcagaacccaaagagatcgtggctattgagcgtgtggtgccggtgytgatgatatcataaataagctattaaagtgtaattagcagggagaataacacatacagaatgtatgcaccagatggacttctgtggtctggggtatcagggagagcttctttggagtgaaatatttaaatgggagccttagagttaaataagggttggctgagcaaaggcaaggggagaaaagtatttaatgccagaggagatgcatctgcggaaaccctgaggacaggaaaggatggaggatcacagggccacaaggaggcaagtgacaaaagtgcaccatggaggtggccctagcaggggctacagaatggggtgggaggcggaccagatggccatattaggttttggtgttctaacaccaaagcgatctaacaccaaggcaatctaatgccattagg

SEQ ID NO: 270732 - DNA, 558 bp, Homo sapiens
cagagtgctatggtttggttgtctgtttcctccaaacctcatgttgaaatttgattcacagtgttggaggtggggctaatgggaggtgttcrggtcatgggagcaaattcctcatgaattgattaatgccctttctcaagggtgagagaattctacctctaataggtccttaaagaactggttgttaaaaagagcccagcacctcctctatcctttgcttcccctctccccacaggatcttggctcccctctgccttctgccagaaatggaagcagcctgagtccctcatcagatacagatgcccagtcttgaactttccagacaccaataattccaaagtgtaattccaaagccaaataaacctcttttctttataaattacccaacatcaggtattcctttagagcaacacaaaatgggataagacacagagggggaaaagactcttacttatagaaaaacaaagataagcataatagcttctctctcatcggagatattgcaagccagagacaatggaataacacctctaaaatgctgaaagaaaatcctgtcaa

SEQ ID NO: 270733 - DNA, 456 bp, Homo sapiens
tattataagcaaagtagacttcaagacaaagaatattcataaagacaaagacagatattttatactgayaaagtatcaattaatcaagaagacataacaatcctaaatgaatcaacatataaacagttattcaaaatacattaggcaaatttaacaaaactactggaagaaatagacaaatttacaattataactgaagactttattcttgccccggtggttaagaaaacaaatagacaaaacaactgtaaggaaaaagaatatctgaatattatcaaacaatttaacctattgagctgtatatatccaagaaaacatacatatttgtttcaagtgcacatggaacattctccaagacagaccatctgttaagaaattaaagaagacacaataaatgttatgcattgaaattacatagtattttctctatgatgaaattaaatagagttaaaatag

SEQ ID NO: 270734 - DNA, 604 bp, Homo sapiens
aaaacatggtgaaggtcaaagaggaagtggaaatgtgtgaagggacaaagcctgagggcatcttggctgtataacaacccactctcacagtagctaatctatttccttgagaatgaatccagtctcagagaactcactcactaccatgagaayagcaccaagccattcatgagggatctgtccccaggatccaaacccctctcactaggacccaccttccaacacctctgcatttgggatcaaatttcaacttgagttatggtagggacaaataaaccatatccaaatcatagcagtggattacattgattaatttttgaatattgaattaatcttgcatatctgaaataaatctaacttggttgtgttgtctagttaattttttatgttggtgaattgatttgctaatattttgttgaggatttttgcaactaagttcatgagagctagagagtatagtttttcttattttgtaccatatttgtgcggtttaggggatcaaaatgggtttagaagtgcttcctccttttttgttttctgaaaaacactgtgtaaaattgttaattattctttaaaagtttagtagaaatttctagtgagacca

SEQ ID NO: 270735 - DNA, 657 bp, Homo sapiens
aatcttaaaatcagccagacagcaaaaaatacattatatacagagaaataaatagaatgatagcagttatgctcaaaaagcatgcaaaaataaaatacagaatataaccattaaatatatatgtcagaaaacagtacatctttaaagcactgaaagagaaagtctaacctacagttttatacccagtaaagctcttttggataaataaaggtgaaataaaggtctttcagacaaagacaagctgaaagaacttatcatcagaagactagtatcataagaaatgttaaagagaaaatccttcaggaaaaaaaaactgataccaaatagaaatcagaatctacacaaaggaattaagatgggaagagtatgtatgagggtgaaaattaaaaacttttcaaaagttttgcaaatcttttttagaagataatcrattgtttaaaacaaaataataacaatgtataatggagtttataacataagcaaaatgttatcagagtaaaatatattatgacaatagcaaagagacttggaaaggaagaaacagaagtgattgtgtaaggttccttgccataagaaaagtgttataatatcatgtaaggcagagcatgataagttacagatatagtctgtaaaccctaaagcagccacaaaaatagc

SEQ ID NO: 270736 - DNA, 657 bp, Homo sapiens
aatcttaaaatcagccagacagcaaaaaatacattatatacagagaaataaatagaatgatagcagttatgctcaaaaagcatgcaaaaataaaatacagaatataaccattaaatatatatgtcagaaaacagtacatctttaaagcactgaaagagaaagtctaacctacagttttatacccagtaaagctcttttggataaataaaggtgaaataaaggtctttcagacaaagacaagctgaaagaacttatcatcagaagactagtatcataagaaatgttaaagagaaaatccttcaggaaaaaaaaactgataccaaatagaaatcagaatctacacaaaggaattaagatgggaagagtatgtatgagggtgaaaattaaaaacttttcaaaagttttgcaaatcttttttagaagataatcaattgtttaaaacaaaataataacaatgtataatggagtttataacataagcaamatgttatcagagtaaaatatattatgacaatagcaaagagacttggaaaggaagaaacagaagtgattgtgtaaggttccttgccataagaaaagtgttataatatcatgtaaggcagagcatgataagttacagatatagtctgtaaaccctaaagcagccacaaaaatagc

SEQ ID NO: 270737 - DNA, 484 bp, Homo sapiens
atggtagatatattttttaatgttgaaatgatgttgccagactgcattcccaaaaggttattttcaccagcaacctgtgacaatatctcctttcttcaagcctgtcaatattagtcaatagtacatatttttatttttgaatataaaatatcattattcatctaagtgacatttctttgaccactgttgaattaccttaaatgtcaaaacagtaaaacatttcartatcaagaattatacagaaatattgacagtgactattggtagcatacatttttcttgaatgtcctaccatagcactgtctggtaaaaatttctgtgatgggccaggtgtggtggctcacacctgtaatcccagcattttgggaggccaaagcaggtggatcacctgaggtcgggggttcgagaccagcctggcaaatgtggcaaaaccctgtctctactcaaagtacaaaaattagccaggtgtggtggcgcacacctg

SEQ ID NO: 270738 - DNA, 522 bp, Homo sapiens
taaatggcacacttctcatatctagcaacataaggtactcaaatctattcagatggttctactaaaattgggagaattaggaaaaagaaaagatgcttactaactggaaaagttcatgcatttttaaagttttrttttacatatgcaggtttgttacatgggtatattgcccccaggtagtgagcatagtacccagtgggtagttttttaacccacaccccctcctccctctcccctctagtagtccccagcatctattgtccctatgtttatgtccatgtatgctcaatccttagctcccacttgtaagtgagaacacatggtattttttctgttcctgcattaattagcgtaggattctggcctccagctccatccaagttgctgtaaaggacatgattttgctttttaatggctgcatagtattccattgtgtacatgtaccacattttcttaatcgagtccaccattgatggccacctaggtggatttcatgtctttgctgttgtgaataatgtgggg

SEQ ID NO: 270739 - DNA, 522 bp, Homo sapiens
taaatggcacacttctcatatctagcaacataaggtactcaaatctattcagatggttctactaaaattgggagaattaggaaaaagaaaagatgcttactaactggaaaagttcatgcatttttaaagttttgttttacatatgcaggtttgttacatgggtatattgcccccaggtagtgagcatagtacccagtgggtagttttttaacccacaccccctcctccctctcccctctagtagtccccagcatctattgtccctatgtttatgtccatgtatgctcaatccttagctcccacttgtaagtgagaacacatggtattttttctgttcctgcattaaytagcgtaggattctggcctccagctccatccaagttgctgtaaaggacatgattttgctttttaatggctgcatagtattccattgtgtacatgtaccacattttcttaatcgagtccaccattgatggccacctaggtggatttcatgtctttgctgttgtgaataatgtgggg

SEQ ID NO: 270740 - DNA, 666 bp, Homo sapiens
gcttcagtgactcctggaatcacacaaagcctggacagacctgggactagaacccagagctctgatgctcaaaatgctgcctctagttcagtaactgcttttctagaatgcctagatgatgaatggcttcaacaactggaatattttatctctwattctgataagcaacaattatttcccagagggtggggcaaatagaatataaggcagaagataaggatgttttataaattggaagagaagcctccagcccctcattaatccactctgctttgctctaaactaaagaggattgcatttccttttttttttactttgaaataatagactgaaagaaaaggttccagaagaaaatccaaatgaacgcccaagccatgttctctcacaaaagaatactgagcaaacttttaatgcagatgatcctggaacaatttaatagctaagtgatccatgatttttcttaacatctatcctcattaaaagagagagagagagagaaagagagggagagaaaaaagaagctgagaaatatctttcaaacccgatgaattcaatgccacttctttttcttttacttaattttccaggtatctcagcatgatctgaataaattatgctgacaataacataatataaatgataaatcatcaacacaattttagtgat

SEQ ID NO: 270741 - DNA, 513 bp, Homo sapiens
agtgacattggagttggggctygggggaccagaaggagctggccatgcaaaggtctagggaaactgtgttccggacagaggggcagcatgtgcaaaggccctgaggctggaacagtctattaagtgtgagggagggaaaaaaaaggcagcaactggggaactggtttctcactgcagcatgatggtaccccaggggaccatttgaaaaaagaggagtttctttctgccacaccaggggtcgctgcacaagacttcacccccatagctcccacttcacatcatacctttcatcagtggggctgtgacttcagagcttccaggaatgcagctcccataaccggtcttctcccagctccttgtgctcgggatttgaatgtgtttcctcctccaacctgctggcttcctaagagtagagtcattctccttaaagattggccagcccatcactgatgtgatctagctcagagtgggtcctggaggccactgccggggactgggcctggagtgtggttt

SEQ ID NO: 270742 - DNA, 551 bp, Homo sapiens
cagtggggctgtgacttcagagcttccaggaatgcagctcccataaccggtcttctcccagctccttgtgctcgggatttgaatgtgtttcctcctccaacctgctggcttcctaagagtagagtcattctccttaaagattggccagcccatcactgatgtgatctagctcagagtgggtcctggaggccactgccggggactgggcctggagtgtggtttctgtgttcgtagccactgtactattccattcttgtgctgctaataaagacatacgcaagtctgggtaatttctgaagaaaaagaggtttaatggactcacagttccatggggctggggaggcctcacaatcatggtgtaaggtgaaaggcacgtcttacatggtggcaggcaagagacagtgtgtgcaagggaactctcctttattaaaccatcaaatctcgtgagacttattcactatcacaagaacagcacrggaaagacctgcccccatgattcaattacctcccaccgggtccctcccatgacatgtgggaactgtggaagctac

SEQ ID NO: 270743 - DNA, 580 bp, Homo sapiens
ctagaaagatgcccgtttcctgcccaacccacagaggacccgatcttatctgcatttggccagaatatgaccttcagggacgttttctccagtcatggctgaggctgccttcttgtcccacagagggcccctttccttgtctctctcgttcttctcttttctactcctccctgccaagggacccagcttcatcctgcctccgtctagctgggtcatgccattgtctcctgatgtttcaccagcatatgctgggtcgtcatgcccttgccattttaatctgggttacttgtcttccttaaccctgggtgctcaagayggaatctctactggatcaataaacttcattctggtccatgttcaacccttcttactgactactctcaatgcagtattatcctcaaagacctcttctccaaccaggaggagaatgaggcagccaagaggaagaggggagcctgagtcatggctaaacaaagaggcttacaaacaaacaaaaattccagagaactatgacctgctgcatctatccaagaccaggatttttgaagcacaggaagaggtacggtgtgcactgcactgt

SEQ ID NO: 270744 - DNA, 505 bp, Homo sapiens
cccactctggtgagccacccatcggcagctgaggcaatccctgaagggaatagtaactgcaggctgcctgcctgcctgcctgctgggaatgaggcgctatgtctccattgaaggtgaatctgggcagcacccaccacaacccatcctttgccaagatggtaactctttcccttgcctgcgggtyctttgcacaaggagttcaagtgttcaggtggcaattactgtttattctggctctgtctgttggcaaaggtgcttcctctttgggacccaggacctataaacctgcagaacacagagttgtgggtacaggaagcacaaactccccaagtgagttaatgggtgtgacagcaaggaagacaatcctgcttccatcccttggttcctaggtgtgtggatattttccaacttttgggtaaatataattttatatgtatatatatatatatgttagtaaagcatcaaataaatatcttaaagtgttttttgcatcctggagaatgat

SEQ ID NO: 270745 - DNA, 469 bp, Homo sapiens
ctctggtgagccacccatcggcagctgaggcaatccctgaagggaatagtaactgcaggctgcctgcctgcctgcctgctgggaatgaggcgctatgtctccattgaaggtgaatctgggcagcacccaccacaacccatcctttgccaagatggtaactctttcccttgcctgcgggtcctttgcacaaggagttcaagtgttcaggtggcaattactgtttattctggctctgtctgttggcaaaggtgcttcctctttgggacccaggacctataaacctgmagaacacagagttgtgggtacaggaagcacaaactccccaagtgagttaatgggtgtgacagcaaggaagacaatcctgcttccatcccttggttcctaggtgtgtggatattttccaacttttgggtaaatataattttatatgtatatatatatatatgttagtaaagcatcaaataaatat

SEQ ID NO: 270746 - DNA, 522 bp, Homo sapiens
cagtaaaatgtgggcaagggaaataaacaaacacttctcaaaagaagacatacatgcagccagcaaacatacaaaaaaaagctcaacatcactgatcattagagaaatgcaaatcaaaaccacaatgagataccayctcatgctagtcggagcggtgataattaaaaagtcaagaaacaacagatgctggtgaggtggtggagaaataggaacgcttttacactgctggtgagaatgtaaattagttgatttctaaatttttaagcaggatacgtaaaatgcaaccaataatgttcagcttctggtggaattctcagaaaattccattccttattctccaaagaaaaacatgtttgtagcccctctcaatccaccttagtagatccagaagtcctaacacccccaaactctaatactagttgaatgcaaattattaatttcacagtaaaaccaatatgaagatggtaataaaaagaagtcattatgttctctcagatacattctttccatgcttacaactaa

SEQ ID NO: 270747 - DNA, 548 bp, Homo sapiens
ctggggaaatgacttctgcacagttatttcttttattgctgtgtaaatgtgatggcattcctcaktttaataaatcctggtgtatctctccgtccatgtaggctgatataaatatctccagttatgtcacattaccacctttgtacaggccctgatgactggagtctgataaatgcaaaacctcatttggtttgtgagtgattgagcgctaacactgtttagatttcttaatatacttgtattagcatgaataagtaatgagcatgccaggcttttttgaatatttgattgtatctttgtaatggatttgtgtctctctctttgtgctaatgtcattgtaactttgttggtgtcataactccaagccaaggcaattgatctttatcaccctatcttgagtcaatcaccctctccttgcagaatggcagcatgctatgcctttctttcccacacaattctgcattttgtttttttggggagaggtgctggtaaccaccctattctcagggaatgtctttcctgtttacaaagtgatgatttgagatttc

SEQ ID NO: 270748 - DNA, 548 bp, Homo sapiens
ctggggaaatgacttctgcacagttatttcttttattgctgtgtaaatgtgatggcattcctcagtttaataaatcctggtgtatctctccgtccatgtaggctgatataaatatctccagttatktcacattaccacctttgtacaggccctgatgactggagtctgataaatgcaaaacctcatttggtttgtgagtgattgagcgctaacactgtttagatttcttaatatacttgtattagcatgaataagtaatgagcatgccaggcttttttgaatatttgattgtatctttgtaatggatttgtgtctctctctttgtgctaatgtcattgtaactttgttggtgtcataactccaagccaaggcaattgatctttatcaccctatcttgagtcaatcaccctctccttgcagaatggcagcatgctatgcctttctttcccacacaattctgcattttgtttttttggggagaggtgctggtaaccaccctattctcagggaatgtctttcctgtttacaaagtgatgatttgagatttc

SEQ ID NO: 270749 - DNA, 548 bp, Homo sapiens
ctggggaaatgacttctgcacagttatttcttttattgctgtgtaaatgtgatggcattcctcagtttaataaatcctggtgtatctctccgtccatgtaggctgatataaatatctccagttatgtcacattaccacctttgtacaggccctgatgactggagtctgataaatgcaaaacctcatttggtttgtgagtgattgagcgctaacactgtttagatttcttaatatacttgtattagcatgaataagtaakgagcatgccaggcttttttgaatatttgattgtatctttgtaatggatttgtgtctctctctttgtgctaatgtcattgtaactttgttggtgtcataactccaagccaaggcaattgatctttatcaccctatcttgagtcaatcaccctctccttgcagaatggcagcatgctatgcctttctttcccacacaattctgcattttgtttttttggggagaggtgctggtaaccaccctattctcagggaatgtctttcctgtttacaaagtgatgatttgagatttc

SEQ ID NO: 270750 - DNA, 472 bp, Homo sapiens
taaaatgtgcagttttctatagcatttcaggggtagaaaattgtattatacagtttccaatgatattcatattgctctgtagagaacgcctattaaaatcaatgtacagtaagtcaacacagggatattttataacattgaaaaagggcagagcacatataaaaaagatactactattttaaaaatattaccttaaattcttttgtcaggggttggstggcattcttaaagtaatgagaaaacatgagagcttttatttgcttttttgtttgtttgtttgtttgttttaaccatttaaaaactgatccagcttagtcattaccaaatctgattacctctgagagctgttaggccttgtgacatttactaaataaaacatgtcccttcccctcaccaccccccccccccacaacaaacacacaacaaaatacttcacatcaatgaagaagctgaggtatagccacagagcaca

SEQ ID NO: 270751 - DNA, 472 bp, Homo sapiens
taaaatgtgcagttttctatagcatttcaggggtagaaaattgtattatacagtttccaatgatattcatattgctctgtagagaacgcctattaaaatcaatgtacagtaagtcaacacagggatattttataacattgaaaaagggcagagcacatataaaaaagatactactattttaaaaatattaccttaaattcttttgtcaggggttggctggcattcttaaagtaatgagaaaacatgagagcttttatttgcttttttgtttgtttgtttgtttgttttaaccatttaaaaactgatccagcttagtcattaccaaatctgattacctctgagagctgttaggccttgtgacatttactaaataaaacatgtcccttcccytcaccaccccccccccccacaacaaacacacaacaaaatacttcacatcaatgaagaagctgaggtatagccacagagcaca

SEQ ID NO: 270752 - DNA, 568 bp, Homo sapiens
tgttgcaaaccaaataaaatcagctattgatttacagcatctcactttcgaatagttgttttcaaatgctatgaactaagccacatatatttttctgtagtattttctaaagtatatagatcttaaaccgcaagaaacataaattgtaaagcttaaggagtcttcaatatatttgaccatgctgattaagtacagctaggagacaaaaattaacttctattttttatagcagtcaatagtagaggtaaaaatttcttactaattgaaggagccctctaagttggaagaggggaaaaaaaaaaaaaagcacaccaactaccattcctggaacacaatagaaattcattacatgcgatccttcctctaattgtctagaagttggatgctcacaataccaataaaaagaacattattagttgcttccacaacttggagtattgtgtgaccgtaatgtcrataagcttcatttgcatcagttgtagactaaggagacattgtttaattttaagtttgagaaaaaataagaagttgagatttttgatgaaaatatagattcatgataggtgat

SEQ ID NO: 270753 - DNA, 535 bp, Homo sapiens
gtcacttatccaaatgaaatatttatccagaaactagaaatccactcttcattttaggatacaggattatttttgtcacagaattcctgtttatattcctgcctttcttttttctttgtattcttttatttccagaatatttctgttttgaaaattttaaaaggtgaaatgacaggaaatggagaatgcttttattcaaaaaacaggcaaatgttatactggtgttctttctacatggcatatgccttttgatattagttcaaggtcgactgggctttggcaaaataatggaagtcagaaaattccaagtttagtcatgtatagagcaacaggttaatatgtaactgttaygatgaagtgtagatatgaatagtatttatgtagaatatcttgcagccagaagctgaagaataggctatgtaattagaaagtagcatatctatttaaaaaaaaactcttcacaagagtagttctgcagagaagtgctcttgatgtaggttaggcaaatatgaaaaaagcctcaatctgcaataaa

SEQ ID NO: 270754 - DNA, 473 bp, Homo sapiens
aaagatttttcttaccctcatcttttcctctggcttctatgtttttcctatattcattatagattgcttttctgtgaattcgttgaattgaaagaaacattatgcattgtttttcatatgttattttatattagaaatcacaatgttttttcaattgctagggcaaagtaaaataaaaagagaaaattgttactagtcatagcacctagaaataacaatactgtgattcaattgttctggcaatgtttcattgggatgcactatacttmgatgatgtagcaggtgaaattgaaattctgatgggtgagaggaagatcctgaacccagaattcattattcatcctagagttcatgtaagaaccatgtattgctcagtattacaaggtagtaaggaaaaataaagtcagtatctccctaagtcacaaaaataaaattatatgaaggcaacactatcaccatctttataatatata

SEQ ID NO: 270755 - DNA, 442 bp, Homo sapiens
atctataggcactaaattcaacaacagcagggtatacgttgttctcaagttcaaatggaacattcacaggaaaaaccacaatctgggaaactcaacacacattacaaattttaaaagaagataaatcatataaagcatattcttagaccacaatgtaattaaactggaaattaataccagaaagcaagccagagaattcccaaattttggaggaagaaagtatacttctaataacacattrgtcaaagaagtctcgagaaaaattaaaacatattttaaacaaaaaataaaagtgctttttatcaaaacttgtggaatagcagaaataatgattagagaaaaatttatagcatggaatgcatgtattagaaaagtagaaggatctaaaaccatatttctcagcttctactttaacaatctcaagaaggaaaagcaatataac

SEQ ID NO: 270756 - DNA, 573 bp, Homo sapiens
gccttattttacccagcacttattcaagatggagttgctctggttcaaatgactctgacatttcctgcctcccttttacaagggaacccttaatcctaaggattgcagatgtatgaagatccatcttctgtaacttcttcatgctgaataggggcaattatattcctgcctaagtattagggtcttttgtaatcagggtagagaggagctcagccagaaagtgttagtatggtaagggccrttcacaactctgagttctgacaaaagatgatatctggaagattaataggtgttcagtttaagaaaacatttggtaagcttatcctgcattcctacacaaagaatacaatagcaatatattccaaacagcaaagcaaaattatcccagggaaactaaataagaaggttttccatgaactgggcaattgttggaaacaggctgatatggggttgctagctgattccaaaaagtgtgcagaattagaatattgattcaggtttttacattacccatctctcgtgtttcttctgagcagcagccagagatcactggttggttcacaggaataagaa

SEQ ID NO: 270757 - DNA, 536 bp, Homo sapiens
tataactctttataatttttgttaaacagatcaattgtctaagaaaaccttgttatttggccacatgggttcagattctggctccaaatcagtatgcttttattttaaggttttaacctacggggaaaacaaacctaaataatccccttcaaatcttagccaatttgcttatagccacagaaccttttttacaagatcaacccttcacaaatcmttttcaacttactttaaacactcagttttgtccccttcttttaggttaaggcaatctttaaagccctctgaactagacaaaattacattccctttaacaaaatctgtattcccatgcttttttataacctcccaccaaaacgtcattctattttccttccatactttgcaaacttgtatgtaaaactttttacccagtagtcccaattacatgttacaatgttaactcttagaaactattattcttggtgaaaaacctgataaataagcaatttttattatgtattaggtttggggcctaggacatcagacagaactgcaga

SEQ ID NO: 270758 - DNA, 627 bp, Homo sapiens
ccccttcaaatcttagccaatttgcttatagccacagaaccttttttacaagatcaacccttcacaaatccttttcaacttactttaaacactcagttttgtccccttcttttaggttaaggcaatctttaaagccctctgaactagacaaaattacattccctttaacaaaatctgtattcccatgcttttttataacctcccaccaaaacgtcattctattttccttccatactttgcaaacttgtatgtaaaactttttacccagtagtcccaatyacatgttacaatgttaactcttagaaactattattcttggtgaaaaacctgataaataagcaatttttattatgtattaggtttggggcctaggacatcagacagaactgcagatgaggtctgactttttccagcatagctagggggcacggctaactccacatatctccaggacctaattagaatctaatgctccaaagtaggtaaattgaacaattttcaaaagtcaaaaaagcagtttatgaccttaaagccttttgcaacctaatatctgagctgcataatttagaccaaatgtccaagtttttgaagatattttgacctatggggaaaaaaaaactaaataaa

SEQ ID NO: 270759 - DNA, 573 bp, Homo sapiens
tcttttaaagtttctcattgctccactttagccatgctaaactgccaatatttctggcttttggactttgctaaaggtaaccttccaggagctcagagaaaggaatattcaaggtggctcatggaggggaagagaatcaataaatggtaaaggtcacagatatgaaatgagaaaggactcattccttaagccaggaatgaacccaggctgccattgtaaaatggcagaggcttagctactaagctacagcactgggcagtcyctattgcccttcccagaaggagcctagagcagtcaattttgagcttgcaaaagcttttaactgctcaagataatttttagggctatgacatgaacccccaaactcctgtcctctggatggcagagaccaagagaaagtaccactatgtggttataaggttaaactcccaaggacatttttcaacatgtggtccctggcaagatggtcaccctgagtaacagaaaagataggaaagggaaaggagagaaagagagagagaaaagcattccctgcagcaggctggggaaggagaagagttcagggaggccaga

SEQ ID NO: 270760 - DNA, 593 bp, Homo sapiens
acttgttttattcatgcaaaattttgcatttattagtcaaatgcaattttgtattttgcattttctcatcgcctattcctaaataagtattttatttttggttaaattagtagtttttaagaagtttataatatcaatttaaatattctctaatatttgaacaattagtttccaagttttaactgttattagtactttaaaataaaaagtcttcagagagataaatacctcctagttttctattactgacttaaacacaatcccttgatacacaatcatgaatagtccttaaatgtagctagatgaagatgttaacaggggctcctaaaatttatatgatactctcccttggcttgaggggaatatttttttaaaycacactatgtatttcagtgatgtatgctacttcgtatttaaaggaaggcatcctttgtgttcctaagtatcattcatgttcttcacatttagtacagtacaacattgtaagattaagggaaaatattttcttgaatgtcaacttagtacagatacttcaacgtcactcacaggggtattgtggtggcgactctgcttagtgctgctaggaggccaca

SEQ ID NO: 270761 - DNA, 610 bp, Homo sapiens
tccattgcatgaatgtaacagttgttcgtttaatccactcatcaactgaaggacatttagattattgccatttgttggtgattatgaataaagccttaaaaacatgcagtgcacatacagcttttcgtgtgaatatgactttttatctttgtcatataatgaatagtgagattgttaaactctrtgctaaatgtaactttatctatatatataaaatttttataaagcttttaaataagagttaggagatatacctaatgctaaatgacgagttaatggatgcagcacaccagcatggcacatgtatacatatgtaactaacctgcacattgtgcacatgtaccctaaaactatataataataataaaataatttaaaaaaaagagtttgtaaaactttatacaaactactaaactcttttcctgagtggtcaaaccattctgcattttcaccagcaatgtatgagcccgtcatttcacattctcaccagcagctggtattgtcagtttttagaactccatcgtaattggtgtatagtggtatctcattgtagttttaagttgtatttccttaatgactaaccatgttgattttctttttatgtgtttat

SEQ ID NO: 270762 - DNA, 610 bp, Homo sapiens
tccattgcatgaatgtaacagttgttcgtttaatccactcatcaactgaaggacatttagattattgccatttgttggtgattatgaataaagccttaaaaacatgcagtgcacatacagcttttcgtgtgaatatgactttttatctttgtcatataatgaatagtgagattgttaaactctatgctaaatgtaactttatctatatatataaaatttttataaagcttttaaataagagttaggagatatacctaatgctaaatgacgagttaatggatgcagcacaccagcatggcacatgtatacatatgtaactaacctgcacattgtgcacatgtaccctaaaactatataataataataaaataattwaaaaaaaagagtttgtaaaactttatacaaactactaaactcttttcctgagtggtcaaaccattctgcattttcaccagcaatgtatgagcccgtcatttcacattctcaccagcagctggtattgtcagtttttagaactccatcgtaattggtgtatagtggtatctcattgtagttttaagttgtatttccttaatgactaaccatgttgattttctttttatgtgtttat

SEQ ID NO: 270763 - DNA, 283 bp, Homo sapiens
attctgtactcccctcttcaagtgactctcactgatcagtcccctcatgaaaactctaggccctcaacagaaggagatctccaggcttggttccctcctgggtcctagtgcgagggagcccagatgcttgcacctgtctaaacacagccactggggcagttgagatattctaacccattggacttggaaaygagtgttccattttcagttcacccttccaaccagcagtaagtggcaggaatatggggctgctggttgccttgctcagtgacctgttaagaaa

SEQ ID NO: 270764 - DNA, 594 bp, Homo sapiens
tttgcactcattctgtgttctgaattattgtgtagctccttaagaataattctattgtgtcattactgagaacagtaataaggtagagatacaactcataagtcgtgacattttaacagtataagaaaaatgatagaaaaagaaaactgaagtgtcatggctacgaatttagagaatactaaaagtctttgaaattgtcagcatatttttcaaaatggagactgtatttccactagcatcacttcttttattcaggaattgaatgtcttttttgggtataaatcggtgtcttatgttttatttttcctttcttaaaaaataatttatttgcatctcttttgaggttatcacccrtcttgaagggctgggggtaaaaatcctcactagcttctttaaaaccataaaatgatataatgaaatatttttaccttgagaagttaacactgggtggatgtttaggatcatgtgtttgtgactataaggaattcttccctggcttctaatttactacagactcagaaacccatgtgttgacctacatgtccaagctcaacagatgagtgtttaagagcacaggaagtgacacagagaaac

SEQ ID NO: 270765 - DNA, 594 bp, Homo sapiens
tttgcactcattctgtgttctgaattattgtgtagctccttaagaataattctattgtgtcattactgagaacagtaataaggtagagatacaactcataagtcgtgacattttaacagtataagaaaaatgatagaaaaagaaaactgaagtgtcatggctacgaatttagagaatactaaaagtctttgaaattgtcagcatatttttcaaaatggagactgtatttccactagcatcacttcttttattcaggaattgaatgtcttttttgggtataaatcggtgtcttatgttttatttttcctttcttaaaaaataatttatttgcatctcttttgaggttatcacccgtcttgaagggctgggggtaaaaatcctcactagcttctttaaaaccataaaatgatataatgaaatatttttaycttgagaagttaacactgggtggatgtttaggatcatgtgtttgtgactataaggaattcttccctggcttctaatttactacagactcagaaacccatgtgttgacctacatgtccaagctcaacagatgagtgtttaagagcacaggaagtgacacagagaaac

SEQ ID NO: 270766 - DNA, 596 bp, Homo sapiens
atgtgactacacgcattggaaatggcatattacataaaacaacaacccatttacaaatgctacttttgtccatcatttttatggaacagtttcattcaaactctacacatgtgtcctcaatggcattgtctttgtcatgctggatccacttttttactcacttaactcagtttttttccagagcacatcatcttcacttccaattcagctgtatgaggtatagcacttttaaaatttgccactgacagtttctttaaamgttaaacatagaattaattactctatgatctggcaattccactcctaggtatatacaaaaagaattaaaaacagggactcaaacaaaaacgtgaacaacaaatgttcatagcagcattattcacaatagccaaacagtggaagcaacccatgtgtccatcaatagatgaatggataaacaaaatgtggtctatccatgcaatggaatatcattcagccatacaaatgaatgacgttccaatagaagctacaatatggatgaggcttgaaaacattatgcttagtgagataagccagtaacaacaaaaaaatattgcatgattccccttatatgaggt

SEQ ID NO: 270767 - DNA, 596 bp, Homo sapiens
atgtgactacacgcattggaaatggcatattacataaaacaacaacccatttacaaatgctacttttgtccatcatttttatggaacagtttcattcaaactctacacatgtgtcctcaatggcattgtctttgtcatgctggatccacttttttactcacttaactcagtttttttccagagcacatcatcttcacttccaattcagctgtatgaggtatagcacttttaaaatttgccactgacagtttctttaaaagttaaacatagaattaattactctatgatctggcaattccactcctaggtawatacaaaaagaattaaaaacagggactcaaacaaaaacgtgaacaacaaatgttcatagcagcattattcacaatagccaaacagtggaagcaacccatgtgtccatcaatagatgaatggataaacaaaatgtggtctatccatgcaatggaatatcattcagccatacaaatgaatgacgttccaatagaagctacaatatggatgaggcttgaaaacattatgcttagtgagataagccagtaacaacaaaaaaatattgcatgattccccttatatgaggt

SEQ ID NO: 270768 - DNA, 605 bp, Homo sapiens
tgactttgccacagaagctggtaaagaggtgaggcttggttaagaggttaagcccttgttaaataatgtaaaggtgcacaactttaaggagtccctgggtcacatagctcatccctccatgaaaatacaagatgtctaatcagtacaataactagggaggccaaaaagggcagagagaaaaactgtgtagcttgctcaaaggacaaactccaaaagtctcctagtaaaaccctaatccctcagataatgtgttcccagagggccgtaacataaacaaggggaagaggtaattcagaagctggtaaacctgtccagacctaaggaaaagctctcaaacaaaaacagctcaacgtgtctgagtcgttgttttcaaaggaatagtggtcttctctccacaatattgtgacwtgtacctcgtgtttttatttttactcaattttctaatttcccttgttaatgtttctcttacctattggctattcaggaatgtgttgtttaatttccacatatctataaaatttcccaaattcctgtttgttattgatttctaatttcattccattgcagttagagaacatattttatatgatttcaattcttttaaa

SEQ ID NO: 270769 - DNA, 605 bp, Homo sapiens
tgactttgccacagaagctggtaaagaggtgaggcttggttaagaggttaagcccttgttaaataatgtaaaggtgcacaactttaaggagtccctgggtcacatagctcatccctccatgaaaatacaagatgtctaatcagtacaataactagggaggccaaaaagggcagagagaaaaactgtgtagcttgctcaaaggacaaactccaaaagtctcctagtaaaaccctaatccctcagataatgtgttcccagagggccgtaacataaacaaggggaagaggtaattcagaagctggtaaacctgtccagacctaaggaaaagctctcaaacaaaaacagctcaacgtgtctgagtcgttgttttcaaaggaatagtggtcttctctccacaatattgtgacttgtacctygtgtttttatttttactcaattttctaatttcccttgttaatgtttctcttacctattggctattcaggaatgtgttgtttaatttccacatatctataaaatttcccaaattcctgtttgttattgatttctaatttcattccattgcagttagagaacatattttatatgatttcaattcttttaaa

SEQ ID NO: 270770 - DNA, 542 bp, Homo sapiens
cgtggtgtgcacctgtagtcccagctatttgggaggctaaaacaggaggattgcttgatcccaggagttcgaggctgctgtcagttacaattgtgccactggactccagcctgggtgacagagagagaccttgtctctacacacacaaaaaaaataaaaaataaaaagaaagaaaaaagaagtttggtttgtctcaacaggcattaattgagcacctacagtgtaccaggcattgtggatgtgcatctttctgggtctatactctcagagggccctgggagactcaatcatttgagtaatttcctggctgagggagaagctgaaatgtacaggcttctcttaaatatgttttgctccctgaagttgttccaaaatcagaggccttgaatgctgtacacccgtactcaactctaggatggaatggyttgggatttggcacaaaaccagagatgtagtaatcttttgcttactctagcagtactggctgggattccctgaagacccagatgctctgacatgttgtaagtttgaaaactgctgac

SEQ ID NO: 270771 - DNA, 581 bp, Homo sapiens
gaattggtatgtattttcttgtgggtaattgagtgtagatattagacaaaatgcaatatataccattatttttagcagtatactttttaaggttagaggtctcaagtaggcatattttgtttagccttcacagtgttttttaaacatttaaattcattgccgatatttaaatattaggatatttattataaaaattcagactttagaccatttaaaattggaagaactaccaacattgagaccyggttcctgcaaggcaacaatcacagctgagaagtcaccacttgtttagattggtgatacactgtcatttcctctgcccatctacctttccactctgacacttatttacattattcttttggctcttgtaggcatttgagtttgtagcctctccttaaagtttagattaattctcatttgtgtattcttcatttttgggaattcagcatgttatctctaagacagctactgttagctacacattgaaaaggggttgggtgggtatcttagactttctcatgtgtttctctgactggagagaagatagctcttgttcttcaaatatttaactaaaggat

SEQ ID NO: 270772 - DNA, 581 bp, Homo sapiens
gaattggtatgtattttcttgtgggtaattgagtgtagatattagacaaaatgcaatatataccattatttttagcagtatactttttaaggttagaggtctcaagtaggcatattttgtttagccttcacagtgttttttaaacatttaaattcattgccgatatttaaatattaggatatttattataaaaattcagactttagaccatttaaaattggaagaactaccaacattgagacccggttcctgcaaggcaacaatcacagctgagaagtcaccacttgtttagattggtgatacactgtcatttcctctgcccatctacctttccactctgacacttatttacattattcttttggctcttgtaggcatttgagtttgtrgcctctccttaaagtttagattaattctcatttgtgtattcttcatttttgggaattcagcatgttatctctaagacagctactgttagctacacattgaaaaggggttgggtgggtatcttagactttctcatgtgtttctctgactggagagaagatagctcttgttcttcaaatatttaactaaaggat

SEQ ID NO: 270773 - DNA, 629 bp, Homo sapiens
actgatgtatacctgaggaaaaaatagaatgtgctcatggttagggaaaattatattatttttaattttttaatttgttttttaaccaagtaggaatttgggtgtatggataagaggccaatctgcttctgtaggctatagaagaaaaccagttgtattttatggtcataatttgtccccctattattctggagatttaaatttaagtaaagtagccatcagtattttaattgaaaaatactaaagccacataactgagtaggatgtcgtatgatactttcaacaaattccctaatgctgcctaagcatatggatgttttaattctttgctgttataaayagatatctaatacgccagaattactgatggtaaaattgaagttgtgtacttgtgaattttttttatcaatgttttaaatattatttaaatcttaaaatcatttaaagacttatgttgccactgggtggcagccatggcttctcccactaagcaacagaagtgaccaaatataattaagacaaattttcatctctattacatctgcttttaaaacattttagttcatattctattatttttctaactcagtactcctttgttgagggtaattattagtagttaagttttt

SEQ ID NO: 270774 - DNA, 512 bp, Homo sapiens
atgaggtgcaccttgtatctgaaagcatacatagtttgctgagatwtgtttaatgagtagaacctaggttaggcttggtggggttttgaacagaggaggagtttgagctatcagccaccttgttcacagagggaagtgttctaaattagtgtctttgagaatatttcctggcgggttaaaagtagatttctaaggtagttgctttaaataaatttctgtgctcagataatttatatctttagactgtggagaaatctttcagatagccttcatgaaattactgagacaaaaaggtgaattccagaatgagactgttaagtgttgtctattttaggctaaacacaggaatggttattaaattgatattttttgagtacttttgaaggaaacagtaatcattgagtaaggatggcttctctaggagaagtaatgtcaaacttgatgttttctagacttaataggcaagggggatgttacagagaacaaattcatcaaggcatatgatgatgtca

SEQ ID NO: 270775 - DNA, 512 bp, Homo sapiens
atgaggtgcaccttgtatctgaaagcatacatagtttgctgagatatgtttaatgagtagaacctaggttaggcttggtggggttttgaacagaggaggagtttgagctatcagccaccttgttcacagagggaagtgttctaaattagtgtctttgagaatatttcctggcgggttaaaagtagatttctaaggtagttgctttaaataaatttctgtgctcagataatttatatctttagactgtggagaaatctttcagatagccttcatgaaattactgagacaaaaaggtgaattccagaatgagactgttaagtgttgtctattttaggctaaacacaggaatggttattaaattgatattttttgagtacttttgaaggaaacagtaatcattgagtaaggatggcttctctaggagaagtaatrtcaaacttgatgttttctagacttaataggcaagggggatgttacagagaacaaattcatcaaggcatatgatgatgtca

SEQ ID NO: 270776 - DNA, 594 bp, Homo sapiens
tgcccgtggtaaccaccattctactctgcttgtttttctttttttttcttttgaagacagggtcttgttctgtctcccaggctggagttcagtggcacattaatagcccactacagcttcaatatgctgtgctcaagcgatcttcccaactcagcctcctgagtagctgagactagcttatttatttatttatttatttatttatttagagacagagttatgctcttgtcgcccagactgggatgcagtgacgtgatcccagctcaccgcaacctctgcctcccgggttcaagcgattctcctgcctcagcctcctgagtagctaggattacaggtgcacaccaccatgcccagctaacttttgtatttttagtagagacggggtttcaccatattggccaggctggtctcaaattcctgacctcaggtgatctgtccacctcggcctcccagagtgctgggattacaggtgtgagccactgtgcctggcctatttttatttttagtagaagtgagstcttgctatgttgcacagtctgatctggtttccctgatgattagtgacaatgagcatttttttcatatagctgttga

SEQ ID NO: 270777 - DNA, 551 bp, Homo sapiens
ttctctgtttcatttaatgttctctaatcttatgggraacattagaaatcttgtggaaaaatgagctcattttatctctctggtctaaaggccttcacttctttgaatctaccagccaccagtaaaggctgctaagtccaccagtacaaaaacaaaagatggtggtgcaaacttcttggatgggcagttgagctacacgtgccttgaaaataagaaacggattgcctagaacctaacacagtctgcttacaaacttgattcattcaacaaatatatattgagcacccccctatatgtcaggccttgatgggtttatatattcacagtggtgagtgaaatatgtatggtctttgttctcttgtagtttataggcacttaatgaatactagtactaatactgtgttctaatttagtgtctttttttacagtaccttcattttcctatatgttttattctcttatgggatcagcaacaagatattaatttcttcttcaggaatttatatttaatttgattgagtagaataccctgaaagtatttaagtagataa

SEQ ID NO: 270778 - DNA, 551 bp, Homo sapiens
ttctctgtttcatttaatgttctctaatcttatgggaaacattagaaatcttgtggaaaaatgagctcattttatctctctggtctaaaggccttcacttctttgaakctaccagccaccagtaaaggctgctaagtccaccagtacaaaaacaaaagatggtggtgcaaacttcttggatgggcagttgagctacacgtgccttgaaaataagaaacggattgcctagaacctaacacagtctgcttacaaacttgattcattcaacaaatatatattgagcacccccctatatgtcaggccttgatgggtttatatattcacagtggtgagtgaaatatgtatggtctttgttctcttgtagtttataggcacttaatgaatactagtactaatactgtgttctaatttagtgtctttttttacagtaccttcattttcctatatgttttattctcttatgggatcagcaacaagatattaatttcttcttcaggaatttatatttaatttgattgagtagaataccctgaaagtatttaagtagataa

SEQ ID NO: 270779 - DNA, 551 bp, Homo sapiens
ttctctgtttcatttaatgttctctaatcttatgggaaacattagaaatcttgtggaaaaatgagctcattttatctctctggtctaaaggccttcacttctttgaatctaccagccaccagtaaaggctgctaagtccaccagtacaaaaacaaaagatggtggtgcaaacttcttggatgggcagttgagctacacgtgccttgaaaataagaaacggattgcctagaacctaacacagtctgcttacaaacttgattcattcaacraatatatattgagcacccccctatatgtcaggccttgatgggtttatatattcacagtggtgagtgaaatatgtatggtctttgttctcttgtagtttataggcacttaatgaatactagtactaatactgtgttctaatttagtgtctttttttacagtaccttcattttcctatatgttttattctcttatgggatcagcaacaagatattaatttcttcttcaggaatttatatttaatttgattgagtagaataccctgaaagtatttaagtagataa

SEQ ID NO: 270780 - DNA, 551 bp, Homo sapiens
ttctctgtttcatttaatgttctctaatcttatgggaaacattagaaatcttgtggaaaaatgagctcattttatctctctggtctaaaggccttcacttctttgaatctaccagccaccagtaaaggctgctaagtccaccagtacaaaaacaaaagatggtggtgcaaacttcttggatgggcagttgagctacacgtgccttgaaaataagaaacggattgcctagaacctaacacagtctgcttacaaacttgattcattcaacaaatatatattgagcacccccctatatgtcaggccttgatgggtttatatattcacagtggtgagtgaaatatgtatggtctttgttctyttgtagtttataggcacttaatgaatactagtactaatactgtgttctaatttagtgtctttttttacagtaccttcattttcctatatgttttattctcttatgggatcagcaacaagatattaatttcttcttcaggaatttatatttaatttgattgagtagaataccctgaaagtatttaagtagataa

SEQ ID NO: 270781 - DNA, 611 bp, Homo sapiens
tataacatataaataatagggttattagaatttaggtattctgactctaatctagatctttctatatatcacaagaatcattmaagtattttggtatcagtcaagcctttagtatttctgaaggtaaactttaatgcctttatttctcaagcatatctgtatttcaaaacatctttcttatcaaaattaagatttagctagtacatacatattctttgatatgcactgagtatttttgtaagcacatgtaatgcattatttatttatgacagcaatactatgaggaagttaaatatagacatagcagagagttgagtaagtttggagctggggtttaatactagacagtgtgcctccagatttaatgtttttgcccatgatgcaatgctgctcctatcaaaccgatggtctccttacaagtttagcaaagagctttgtacaagttaatgcgaaaggagaatcaaacaagaagtgtttaaaaaacaatttgtaaaaaattaaatttagaaattcttaacttgattgttgatgtatttcttgcaagactattcattataaaatcatttcttactatttgaaaccattaatcaagtatatacttaaaacacatt

SEQ ID NO: 270782 - DNA, 564 bp, Homo sapiens
tgaggcagcaggatttcttgagctcaggagttcaaggctttatacaacacagccaagtgagatttatccaagtatgcaagatttgttcaaaattccacatttaattaataaaattcacaatatcaacaggctataaagaaagaaaaaatcatataatcgtgtcaatttaatcagaaaaggcatctgccaaaacccaacaccaattatgacaaaaactctcagaaactagaaatagaagaggaacttactagaaataaagaactcctacagaaacggtggaaaactgaaccctcacccctaaagatctaaaacaggtcagggaagccctctctttccgttgttctgggcatcttagctgctgcaatcagaagacggaagtcaataaaaagtacmcaaattgggaaggaagaaacaaaacagtcaagttttatcgcatgatatctaggtagatcatttcaaggaatatactgaaaacagaaacaaaaacaaaacttctggacctgaaagcatgtaaagtttttaaacaaaattcaattgctttctatataccagtcataaataatt

SEQ ID NO: 270783 - DNA, 615 bp, Homo sapiens
gtgatgagttttagatataataccaaaagcacaatttatgaaagaaaaaaatgataggctggatcttattaaaattaaaatgtattatctgtgacatacactggcaagcaaataaaaaatcaagccatagactgagagaaaatatttgcaaaacacatatatgataaaggacttgcacataaagatgggaataatagacactgagactccaaaaggagggaaggagagggaaaataagtgttgaaaaactatctattgggtaccatattcaccatctgggtgatgggtttcattggagcccaaacctcagcatctcacaatatatccatgtaacaaacctgcacatataccccctgaatctaaatttttttwaaaaaaagcaaaagagcatttaacaaactatacaaaaaaacttttaaaactcaccaataagaaaagcaacaactcagttgtttttaaatgggcaaatatatgaacaaacatttaatcaaagaagatatacagatggcacatagacatttaaaattgttcaacatcattatcatttagaaattgtacatcacaacaacaatgacatactactacacaactattagaatagctaaaatccaaaaa

SEQ ID NO: 270784 - DNA, 613 bp, Homo sapiens
taattataagagaaatgcaaatcaaaaccaaatgagattccatctcatgccagtcagagtgtttgttataaaaaaaattaaataataacagatgctggtgatgctgcagagaaaagggaatgcttatacattgttgggttggtggaaatgtaaatcatttcacccactgtgaaaactagtttggagatttctcaaagaacttaaaacagagctgcagttcaacccagcaaatcatattactgggtatgtacccaaaggaaataaattgttataccaaaaagacacatgcacttgtatgttcattttagtgatattcacaatagcaaagacatggaatcaacctaggtgctcatcaatgctgggttgaataaagaaaatgcagtacatacataacatggaatactatgaagctataaaaaatgttgaaattatgtcctttgcagcaacatagatgcagctggaggccataatcctaagtgaattaatwcagaaacagaaaacccaatactacatgttctcacttataagtgggaactcaacattgagtacacatgaacattaagatgatgataatagacaatgtggactactagagtggcaagggaggtggaaa

SEQ ID NO: 270785 - DNA, 419 bp, Homo sapiens
ccccattttaagcccataaaaaccccagactcagcctcgcagatgactacctgcttttgggtccctctcattgctgtgakcttgctttctgtcgttcaataaaattttactctgccttactcactctctggtgtctgcatgccttatttttcttggtagtgggacaagaacctggaactccaaattatgggagcataagagctatagtgttcctgctcagtgagctgtgggtggtgagagtaaaagagctgtagcactccctcccgctcaccaaaaaatgggagagaagctgctgggcatcactcccttccactcaccaaactacaggagtgcaaaagccataacatgtatatgtagattatttacccattttactatttggttgtgtgtattgttactgttaagcttttaagagttct

SEQ ID NO: 270786 - DNA, 524 bp, Homo sapiens
ccattttactatttggttgtgtgtattgttactgttaagcttttaagagttctttgtttattttgaattatattactttatcagatacaaattttgcaattattttctcacagcctgtggcttgtgttctcattctctttttgacatatttttcatttaaagatcaatttttttcctcatagattatgactttgctsttgtatctaaacagtcattgccaaaccaaaggtcagctagattttctcccaggttatctcccaggagttttatttggtttttgatccattttaagatcttcatgaacggtccaagacctatgtctagattcacgtctttgcatttggatatctacttgttctagcaccatttgtttaagagtttatccttttcccattggattctgtttactgatttgtcagagataattgactatgtttgtatctctccctttcatggctctttattctgatacattgctctttttgtcttttcttttgccagtacaaatctgtcttgattactgt

SEQ ID NO: 270787 - DNA, 589 bp, Homo sapiens
tatgtggttcaggtggcagaactgctttcacaacagcctgaacctgctgcaaaacactttcgtgctctagaccccagtcaaaacaagcagctttttgtttccccagtatatggggcaaatcggtatattcataggtgggaaacatgttggtaatataaccacaaaaatcatactagcatagggaataacatttgtctttctttgatacaaatatcctaccataccctcaccatagaaaccctaaaataaacttcaattatgggaaatgtttccgaatcttcatggkgtatcttgcaccccctgaattgtacttgtttaccaagtctccagtgtcctagcgccttcttactgccattatgttctgtctgatcagcatgataccactgatttgatgggccaacatgatgttctgtggtatgtctaggcaatgcacataccgttggactatattacacaggagtataggaaattagctctgaggtcaagctgtaaattaaaattgttgtctattctacatgaatgcaaactccttatcctctcttctaatcaaaatagaaaataaatcactttccatatcaatgactcaata

SEQ ID NO: 270788 - DNA, 584 bp, Homo sapiens
ttaaagtattttaaagtataggttgatttttaaaaacatttatgaakatgtattctaaaactcttatgaatttcattgatgtgaataagaatattttaatacagaaagtaagcaaccgcccccccccccaccccatccatctcaataggtacctttgaagtctacagccatgtagtacggtttccaaaattcactaattttgcaattttgagtgagaaatacagggattgccctacatatgggtttggtcgtttgcctgtgaatttgtagtgctacttgatacccagagataaagcagaatggttatagagtgaggccaataaaattcagcttgctttagttaaaaaaagaaaagaaaagaaaatttgaacaatttttttttctgtagtaacttcgcattccattgtaatcagagtgtgaagaatttgatatcaatgaacaattacaataggattcgttttgtgcatgtttactacatgccaagactttttgtacaataaccgtatttctcaatataatacactctaatgttgaaaaggtttaaatttacagacatacatttatctgcacagtatcacgtggcc

SEQ ID NO: 270789 - DNA, 584 bp, Homo sapiens
ttaaagtattttaaagtataggttgatttttaaaaacatttatgaagatgtattctaaaactcttatgaatttcattgatgtgaataagaatattttaatacagaaagtaagcaaccgcccccccccccaccccatccatctcaataggtacctttgaagtctacagccatgtagtacggtttccaaaattcactaattttgcaattttgagtgagraatacagggattgccctacatatgggtttggtcgtttgcctgtgaatttgtagtgctacttgatacccagagataaagcagaatggttatagagtgaggccaataaaattcagcttgctttagttaaaaaaagaaaagaaaagaaaatttgaacaatttttttttctgtagtaacttcgcattccattgtaatcagagtgtgaagaatttgatatcaatgaacaattacaataggattcgttttgtgcatgtttactacatgccaagactttttgtacaataaccgtatttctcaatataatacactctaatgttgaaaaggtttaaatttacagacatacatttatctgcacagtatcacgtggcc

SEQ ID NO: 270790 - DNA, 584 bp, Homo sapiens
ttaaagtattttaaagtataggttgatttttaaaaacatttatgaagatgtattctaaaactcttatgaatttcattgatgtgaataagaatattttaatacagaaagtaagcaaccgcccccccccccaccccatccatctcaataggtacctttgaagtctacagccatgtagtacggtttccaaaattcactaattttgcaattttgagtgagaaatacagggattgccctacatatgggtttggtcgtttgcctgtgaatttgtagtgctacttgrtacccagagataaagcagaatggttatagagtgaggccaataaaattcagcttgctttagttaaaaaaagaaaagaaaagaaaatttgaacaatttttttttctgtagtaacttcgcattccattgtaatcagagtgtgaagaatttgatatcaatgaacaattacaataggattcgttttgtgcatgtttactacatgccaagactttttgtacaataaccgtatttctcaatataatacactctaatgttgaaaaggtttaaatttacagacatacatttatctgcacagtatcacgtggcc

SEQ ID NO: 270791 - DNA, 584 bp, Homo sapiens
ttaaagtattttaaagtataggttgatttttaaaaacatttatgaagatgtattctaaaactcttatgaatttcattgatgtgaataagaatattttaatacagaaagtaagcaaccgcccccccccccaccccatccatctcaataggtacctttgaagtctacagccatgtagtacggtttccaaaattcactaattttgcaattttgagtgagaaatacagggattgccctacatatgggtttggtcgtttgcctgtgaatttgtagtgctacttgatacccagagataaagcagaatggttatagagtgaggccaataaaattcagcttgctttagttaaaaaaagaaaagaaaagaaaatttgaacaatttttttttctgtagtaacttcgcattccattgtaatcagagtgtgaagaatttgatatcaatgaacaattacaataggattcgttttgtgcatgtttactacatgccaagactttttgtacaataaccgtatttctcaatataatacactctaatgttgaaaagrtttaaatttacagacatacatttatctgcacagtatcacgtggcc

SEQ ID NO: 270792 - DNA, 593 bp, Homo sapiens
cttcatggaacaccacaatttaaatatatgatctcatatgtgttcaacatggtttgttcattggtttgctagttttttaaatcaatctattcttaaggcaatatcagctggtattaaatagctttctatatattttttaatctataagatatattcacatatttatccttccaaatgaacttcctaaacactattttttaaagtaacataggaagacaaaaaatttaattttgaatgaaatttatatattaacaagtatttycctttatatattaacatgtaatatataaaaatttaacaagtttatatattaacaagtaattctctttctttacctacctcaggcctttcttctcttcacaggatgagatgagattttgttcacttatgtgtccttccttaaatattttatgtatatgcaagcatatatatgtttgtaattatatgtatatgtatctttatgtacaaatattgatatagatatttttaacaattgtaattttttctaccttcttcccacttatttactagttcagcataaaatattaacattaatttcctttttgacttatacttttggtaaatatagctaa

SEQ ID NO: 270793 - DNA, 577 bp, Homo sapiens
agattaatgccatttgccttgctagggtttggacttgcttgggacatatcacccctatcttcctctcaatttctcccttttggaatgggaatgtttattctatgcccaactcaccattgtatttttgaagcatataacttatctgattttacaggttcacagctggataatttttgccacaggatgaattatgccttgagtctcacccattgtttgattaaaatatttatatgagactttaacaaaagaagatatacaaacaaccaacaaatatatgaaraaaatcttaaacatcattgattatcatggaaatggaaattaaaactacaatcagatatctctgtactcctgtaaaaatggccgtaattaaaaagtaaaaaataataggcgttggcatggatgtggtgaaaagggaacacttttacactgctggtgggaatgtaaactattataaccactatggaaaatgtatgtagattccttaaagaactaaaagtagaactatatttcattggattcagcaatcccactactgagtatctacccaaaggaaaataagtcattatatgaaaaaggc

SEQ ID NO: 270794 - DNA, 570 bp, Homo sapiens
actgagaagcatttagaaatcctcctaccttatctcagacaagttagatcaagtctctaaaattagggtttcaaggaagtaggagctttcaaaactccccaggtgattccactttgaggccaacattgagaacaactgctttaatacctgtgccaaaaaaaaaaaaaaaaaatcagtgtttgcctgttgatctactcgcgtattagtcattgctgaatttccccagacagattttttggctttgcagaatgaagatcttaaagagaatgaggacttcagaatgtggctacatctcagattcaaggagatttgtaaaagctgtcagtgatttcccattgccgtaagatagagtcctaaattctgacaaggcaaagctcatcggtctagtctctttctgcctgatgctcccacctccttgtctcactctcactatggctcactagggtccagataaaagrgccacttttcccttactttaacatgccaagctctttcctgcctcagggcttttctgctggttgtgtcctgttccacccttgacctggccattgaccattattgcatagacac

SEQ ID NO: 270795 - DNA, 654 bp, Homo sapiens
gccaacataattctctttctagtgtaattttcttttgaaagaaagaaatgacctattatttgaatgaagcatgaaccttgcccttcagcctatcttagaaactttatcagtaagctgattaagctctagtcttaactcattatgtgtagaaaataataaaaaataaattattgatcttctgtatcatgtaagtcaaaatagtttcaaaaagaattactcttgttttataaatatttctatgacctataaacatactgagatttaatctgtggcttattaaaattacacaagtgagtactgagggccagtctccaaacctccattctcagccttcttatttgaatctaaatttctctataagaaacctaaaggttgcaaatagaattattcagtggtttactcacrtaactgtaaacataagtaaccaaagtttgtcagtaaatgtagctgcttttagagctgacattaggaaagcagtaggacaaataacagcaacaatatagtcagttaagaggaacaactgcaattctactctgatatcaactgaagcaaaataattttgatattaattgaggcaaaccattcacagaaatgcacattgtaatgcctcagctaacattaagcattaataaaataatatatacatttaaaaca

SEQ ID NO: 270796 - DNA, 654 bp, Homo sapiens
gccaacataattctctttctagtgtaattttcttttgaaagaaagaaatgacctattatttgaatgaagcatgaaccttgcccttcagcctatcttagaaactttatcagtaagctgattaagctctagtcttaactcattatgtgtagaaaataataaaaaataaattattgatcttctgtatcatgtaagtcaaaatagtttcaaaaagaattactcttgttttataaatatttctatgacctataaacatactgagatttaatctgtggcttattaaaattacacaagtgagtactgagggccagtctccaaacctccattctcagccttcttatttgaatctaaatttctctataagaaacctaaaggttgcaaatagaattattcagtggtttactcacataactgtaaacataagtaaccaaagtttgtcagtaaatgtagctgcttttagagctgacattaggaaagcagtaggacaaataacagcaacaatatagtcagttaagaggaacaaytgcaattctactctgatatcaactgaagcaaaataattttgatattaattgaggcaaaccattcacagaaatgcacattgtaatgcctcagctaacattaagcattaataaaataatatatacatttaaaaca

SEQ ID NO: 270797 - DNA, 488 bp, Homo sapiens
ttttgttactatgaataatgccataatgaatatgggaacacacatatttctttaagatcttgattttttctttttctttcagatacatatttccacactgtttttcatagtgcttgtaccattttacattcccaccaacagtgtataagggttccattttcttgtgctttttattctgcacttgatcaacattttcattgtttatgccatcttgtgtttaatttaactcacacagttacacaaatgcaagatataaaaattgtattaatgaggcaatatgtgcctcagaggttcaattattattggatcttttgggtcacaaagcccaaggaaaggatagtgggcactacagcatacacctttcccacagagacctctcctgctaaaacccactcaaagtttattatgcattacttagcgaayaggtcagggcagcacactgacatgtggcctgtattattgccaaaatccaaagaggctcaacaggg

SEQ ID NO: 270798 - DNA, 568 bp, Homo sapiens
attggattcaaatgagtaccagtttcataaaatatagtagtttcatcataaactagaatctaaaaataatataaaaaatatgtccaaataaatattacatgtgatacatcatttacataaatacataaaaataatttaaatttttataaattatatcctaataaaacataaaaattttagaacatttctcaggtaagtaaatatacttctattaaatagatgtaagggtaactcatagtatccawgatgtagatataaaggtaagtcatggtatccattttgtaaactaaatgttgcaaaaagcacatttaatatatgtagaatgtaatctataaagaaaataagatttaaaaaattcaaataaacttttcaacaaacaatcatgaacattatgtaggaattgcccattctgttattttttttttttaccattttaacttttagtttgtgagttagcaggactctattttgagctgaccaaagatatctttgaattatatatagaataagcaggcatatgacttaaatgagatatttcttctctatagaataagctgtgccatttata

SEQ ID NO: 270799 - DNA, 630 bp, Homo sapiens
gtaagtcatggtatccattttgtaaactaaatgttgcaaaaagcacatttaatatatgtagaatgtaatctataaagaaaataagatttaaaaaattcaaataaacttttcaacaaacaatcatgaacattatgtaggaattgcccattctgttattttttttttttaccattttaacttttagtttgtgagttagcaggactctattttgagctgaccaaagatatctttgaattatatatagaataagcaggcatatgacttaaatgagatatttcttctctatagaataagctgtgccatttatagtacttcataagatcaacttcctttttatatttaacaaaattcttgaacaaatatacagatgaatctagaacacataatagcgtattaaaaaggacatatgaggacagaaataacaactggaacaaaatatgtttgtggtgtctttaaaaacattccttgaaaagtaaattttaccatgtaagtttgcaacatcaggttttccaattaatctattgaataataattagttttttaatatgaaatcaaagcataaaatraatttttatgagaaaactatattaaattgttaaaacttagaaagtaaaaatatataaatgtttg

SEQ ID NO: 270800 - DNA, 351 bp, Homo sapiens
catttgaaaaatattggcagaaatgcctacaaagacagtagagttggctgagtactgctaaattgtaytgatttcctgaagaaagggtctgttatacaaagggccctggtagagaaaacctgagaagttacatacggttcgagtacatctggatggagactacttacttggtcagattctggtctagcaaaagagggacccattcttctctggtaagagttagcacttcactgtgctgaaatatgttgcaggaacctctctcccataaagcatcaagtgtccttccacctcctctcctggccaccaagctgttgaccagtgttaaatcctagcataacccagtggaagatg

SEQ ID NO: 270801 - DNA, 579 bp, Homo sapiens
tctttaccattccaattaggaaaaagaataagaaatagttgacattcatacagaagggacaacaattttcatttatgtgtttgmctcagggctatgttaactcttctattctctgtcataatctagtctgaagagacctgtaccaccaggacattgcatagaacatctcactcctctcttataccaatggatatcatgttgattggataggatgagcatgagaaggctagtattctagaagctgtggggagacacatgtactccagagtatgagaaaccaatcctaggcagtttcagagacgtttcactcctgtgaaattatcaggggtctagtggtcaaaggcatgttgagtttctccacaaataaaaagacattgcatttcctaccaaaaagaatgaagccatagtgtctgtctggtagacctctttaagctgtggagccaacacattccacatttaggaattttgctctggctcacacaccaggtgaagctaagtcttccaacattgcatagggcctggagaaggaaaagatgctgtaggaggtgcatgtcttgatgcaatcagccttgcaacttg

SEQ ID NO: 270802 - DNA, 465 bp, Homo sapiens
agtcaccacttagttaagcttacagtaatccactgtcattctccaaagttcatccatcttctgcacaggccaaatgggagagctgaatagggatgtagtgggaatcaccattcctgtgcctttcaagttcttgatggtggcactaatctctggaatccctccagggatgtgatatctttttttatttactattttttgaggtagaggcagctctaatgtcttccatttggcctttcccaacataatagccatcaccctaccagtcagggagccagtgtkgtgattctgccagctgctaagcatatttatgccaattttgcattctggcactagggaaatgaccacaggatgggtctggggacccactggacccactgtaagttggacctgagctaaagctccattaattacctgacctcctgaattagtctgttttcacattgctgataaagacatagccaagac

SEQ ID NO: 270803 - DNA, 465 bp, Homo sapiens
agtcaccacttagttaagcttacagtaatccactgtcattctccaaagttcatccatcttctgcacaggccaaatgggagagctgaatagggatgtagtgggaatcaccattcctgtgcctttcaagttcttgatggtggcactaatctctggaatccctccagggatgtgatatctttttttatttactattttttgaggtagaggcagctctaatgtcttccatttggcctttcccaacataatagccatcaccctaccagtcagggagccagtgtggtgrttctgccagctgctaagcatatttatgccaattttgcattctggcactagggaaatgaccacaggatgggtctggggacccactggacccactgtaagttggacctgagctaaagctccattaattacctgacctcctgaattagtctgttttcacattgctgataaagacatagccaagac

SEQ ID NO: 270804 - DNA, 465 bp, Homo sapiens
agtcaccacttagttaagcttacagtaatccactgtcattctccaaagttcatccatcttctgcacaggccaaatgggagagctgaatagggatgtagtgggaatcaccattcctgtgcctttcaagttcttgatggtggcactaatctctggaatccctccagggatgtgatatctttttttatttactattttttgaggtagaggcagctctaatgtcttccatttggcctttcccaacataatagccatcaccctaccagtcagggagccagtgtggtgattctgccagctgctaagcatatttatgccaattttgcattctggcactagggaaatgaccacaggatgggtctggggacccactggacccactgtaagttggacctgagctaaagctccattaattacctgacctcctgaattastctgttttcacattgctgataaagacatagccaagac

SEQ ID NO: 270805 - DNA, 637 bp, Homo sapiens
agggctagtatccagtagtccccaaaatgtctgattatttccctttccccagtggacagttaccctagtaaaagggcacagctctctttggggaagggtgggacwaagattagcagcataaattgtaggtagtgtagtggggttcttcctcaaaggacacggcttcctctgtttttataattcaaattagtcttttgtccatttgacctggaaattttctgcttatatatattaagttgtaatgcagtaggcttcctatcaatttcaattctaggaacactgtgattaattagccaatgccagagctctacaccagtcagactatgctggtgccactttgcctctgctgtccattatggtagctatgtccaccttgcctttgacagtggagtgccgcaacttggcccctgacatctcaggatccaattattcccattgtacttaaattttgtagttgattgactgtggttcccactgttagatctgatatacagataagagctattacaaggctcttcaaagatgcaggtgctaccctctattttgcaaggcattggtcaaggttatatcttctggaccctcccagctgggataagtaagtctaaagtgactaatccacttcaccatcccaatctcc

SEQ ID NO: 270806 - DNA, 510 bp, Homo sapiens
acctcttttagggttgtaggctgctagagattccacttcctgaaatattgtggtttgccactacaggaagaaaagaacatgacaaattatgttttgttcctcaaagacttccgctcaaaggtgatacatgccatttctgctcacwctttgtttgccaaagaaagtgacacggccatgcctatcttcaaaaaagctgaaagatgcaattcttccttgtatccagaaaaaggagaaccagaaatactgataaatagcactagatgtcatcatagtagcctaatctaattttagaacaataagaaaatccccacaaatcatattaaatattaaatcacattaaaacttaatattaaaacttaataacattcatttaatattgcctaatttccttccatttatcatatatatctacctcttttaagatcttattgtcaaagagcagttactcatttttaaagtatttcaaagatcttgcagattagactttcctaacaacactgtggaccagct

SEQ ID NO: 270807 - DNA, 646 bp, Homo sapiens
taaacaggcaagaaaaccgcagacagtggaaaatatttttgtgttattagtatttactagtcccagtaggtgaagggcaaactaactaggagcagccttggaattacaagtgctgtcctagaagtcacagccagttttaggtcctagaatcattttcaaacatatttacaccagggtgaagagccactactagacggtgacaaactgcagcaagaacaagatggattgggaccttgcagacagacccctagaattcagtatcagtagctgaagactcagactgcatctcactagtttkgcaataaagtaaccccacatattaggttatttaattgttggaatctatttataacattacggtggagaaatttaccagagagttccttttttttttccattgtgaaacaatgcaaagaaggaaaagtactcttgttggtggcaaggaattgaggaattttctgctttgtgaatttcattttctctgtgaattaggaagacagttcatcttacaagaatggggaggcaaatacattaatagatactcaaatcattaagactttaaatcaatgcaaagtaaagcaaaagcattccattctcctccttaccactcccgaacagatactgtctttctcttctgctgttatga

SEQ ID NO: 270808 - DNA, 646 bp, Homo sapiens
taaacaggcaagaaaaccgcagacagtggaaaatatttttgtgttattagtatttactagtcccagtaggtgaagggcaaactaactaggagcagccttggaattacaagtgctgtcctagaagtcacagccagttttaggtcctagaatcattttcaaacatatttacaccagggtgaagagccactactagacggtgacaaactgcagcaagaacaagatggattgggaccttgcagacagacccctagaattcagtatcagtagctgaagactcagactgcatctcactagttttgcaataaagtaaccccacatattaggttatttaattgttggaatctatttataacattacggtggagaaatttaccagagagttccttttttttttccattgtgaaacaatgcaaagaaggaaaagtactcttgttggtggcaaggaattgaggaattttctgctttgtgaatttcattttctctgtgaattaggaagacagttcatcttacaagaatggggaggcaaatacattaatagatactcaaatcattaagwctttaaatcaatgcaaagtaaagcaaaagcattccattctcctccttaccactcccgaacagatactgtctttctcttctgctgttatga

SEQ ID NO: 270809 - DNA, 523 bp, Homo sapiens
aagaaagaaattcagagctcgaagacaagttttcaaaataacccacatcaacaaagacaaagaaaaaagaataaataaaaatgaacaaagcctccaagaagtttgggagtatgttaaatgactgaacataagaataattttttttttaatttttttttattttattttwtttttttttaatttttttttttaattgttcctaagaagagaaatctaaaagcttggaaaacatatttgggggaataattgaggaaaacttccccagcctttctagagatctagatatccaaatacaagaaggtcaaagaatacctgagaaattcattgtaaaaagataatcacccaggcacatagtcatcaggttatctaaagtcaagatgaaggaaagaaacttaagacccatgaggcaaaaacaccaggtaatgtatgaaggaaaacctataagattaacagcaggtatctcagcagaaatgccacaaactagaagggatatgaaccataccttcagcctccttaaaacaat

SEQ ID NO: 270810 - DNA, 583 bp, Homo sapiens
ctcatttttgcttaccttattagaaacatttatcttcacagtgtgtatcaactgaataaaatgacagatactctgcccagtgtttcctctcattatgctctacttgaccatacaaatggtaatagaggtaaaacagatacacaggcctccaaagctgcatcaaaagatgtaaaatttctttgawcttaacatcttaagtgaaggtccgataaggaacacattactctataatttccttaagagtaggatgagcatgaatgagcacctgtcttttttattgttttatcctgaccacctagttgggttaaacatagaagatgtacaataaaaatatgccacattatttataaatgtatgtagtggttcagagatgccaactccaaataagtgggaaatgattttttatggatttattttgagatttaaaaaagtcagattcacttctattcatgctaaagatttaatgaatggactataaaaagatgtttaagacaattctactttcgatttttagcaatttcaataacatgccttttgaaactgaaggcaaaatataccttcttgcagaaatacatgttattgg

SEQ ID NO: 270811 - DNA, 569 bp, Homo sapiens
ttttggaaaataaaattccttcctctgaggaaaaaaattcactgtgtttaaattcttaatattagtcatcctaagtamatcattaatgtatcctttataaggaatgtgctgcctagccactgacttctgttcctttcaaggcatgactaaatcctaatcactggaaaccatgtgattctaaatatattatgtaaatgttaacgtattatgttaatgtatttgggtgggaacacagccaaaccatatcagcatccaaccagcagaaacacttcacagcaaggagatatgggagtagtaccatgcccatgggattgactagtcataacacatccctcatcatccagaaataacaagcttcatagaacaatggaatgactgaagctctagcttggaggcaacacttgaagaagacgtgtgggggtagggcatccttcatgatgttgtatgtgcatgaaatcaggaaactctatatgataatgtgtcattaataggaagattgcgtgggtctgggaaccaaggggtagaaacatgactggcccatcttaccatgacccttaccatcactacca

SEQ ID NO: 270812 - DNA, 567 bp, Homo sapiens
taacattaagaataaataaacagttcagcttgaggccacrcagggttgaaaataatgtctatgaatcggccccagtctctcgaaatgctctttactaggatggacacttcagcaaaggtgaaaagatacaacaatatatttaatgagactaattcaaagaaaggaataatcacagtgtggagggatgtgtgggagacagatttacttccttaagtttctgttattagtgaatgggaaaatgatgactctgaaacagaaagcatagaaacatgctctgaagggtgcttggggccaattccacttccttcatagaagaggttctagataagaaaaaaacaaagaacacaaatgttcatattattacctgggtcaaggactcctttaagattcagacgaaaactactacatatccattgactgattaagtgtgtcaaaccttagctctcagcccaccctggctttagaaaaatgttgatgccgaggttttacagcaaggaaaaaaaaatctgaaatcctattttcttgctttgccaatctaaaaaataagagggagctggcaaatggcag

SEQ ID NO: 270813 - DNA, 472 bp, Homo sapiens
gcatgaggtgcacctcagactttcaactctaaggaccttaactggccaaagcctgctgcactctgaatctaccatattttcaccaagggtgtgcctcttattggcttctccaagccaatgactgagcacacgaggatcctgaaacaagattattcctgaagaacataggtctcttcttatacccagctttggctctaggactctctgatgatcatgctgaaccttcttacattgcagagcaaactgtttcctttcaacctcttttcasaaggggtcagattttcatcccccagttttatccagctccctccccatttctgtcacagaggcattttttttccaataaaagccttgcctgtaagcccgccttaatgtctacctcttgttggacctagacaaacataagaggtacataagttgagtgatccaaaaaaaccaggccattaaatgggtaaagagactgactcactcg

SEQ ID NO: 270814 - DNA, 472 bp, Homo sapiens
gcatgaggtgcacctcagactttcaactctaaggaccttaactggccaaagcctgctgcactctgaatctaccatattttcaccaagggtgtgcctcttattggcttctccaagccaatgactgagcacacgaggatcctgaaacaagattattcctgaagaacataggtctcttcttatacccagctttggctctaggactctctgatgatcatgctgaaccttcttacattgcagagcaaactgtttcctttcaacctcttttcacaaggggtcagattttcatcccccagttttatccagctccctccccatttctgtcacagaggcattttttttccaataaaagccttgcctgtaagccygccttaatgtctacctcttgttggacctagacaaacataagaggtacataagttgagtgatccaaaaaaaccaggccattaaatgggtaaagagactgactcactcg

SEQ ID NO: 270815 - DNA, 347 bp, Homo sapiens
ctgtggcttgatattttttatcagtatataaaatgttcccaaaaatattttcacaattatctcttcaaatgtgatatctacttccattctgtttcttttctcattctgatactctaaattcaagtattctagatgtattccatgtatgttttaatatctcttctgtactttacatctttttatcttwgtactttagtctaaatattttcttctacatttcagttaattcacttttcaaccatgtctaaaccgtttaaacccatccattgatatctaaatttcaattattatatttttattactacaattttatttttgtttttcttcatctgatgaaattttcatat

SEQ ID NO: 270816 - DNA, 531 bp, Homo sapiens
aggaggaaaattggaaaattctcaaatatgtggaaattaaacaacatattcctaaagaaacaaggggtcaaaaagaaatccaaagagaaattaagacatatcttgagccaactgaaaatgaaaacacaacatgctcaaacttatgggatacagcaaaagcagtaccaagaaggaagtttatggccataaatgcttacacttagaaagaagaaaaattttcaaataaacaactaaacattatacctcaaggaactagaaaaagaacaaagtaagtccaaagctaataaaaggaaggaaataaagactggagcagaaataaatgaaatagagactagaaaaacaatagaaaatatcaacaaaactgaaatgtggctttctgaaaagataaaatkggcaatttttttttaaaagaaaagaatcaaataaatgaaattggaaatgaaacaggagacactacaactgataccagaaaaatacaaagaatcataaaaaatattataaatttttatacatcaacaaattggataacct

SEQ ID NO: 270817 - DNA, 576 bp, Homo sapiens
tgcagcttcacctctttggtgaagctttccctgattgccagtaggtcagacctttttggwacacaccctcaatgcactctaacttcttcaaagcacttctccccgtgaaaatgaataatcacatttaggttggccattagactgtaagctctgtgaagggccaggtaccatatttgcctggttcatctgtatccacaaacctagcagaattcttagtacatagtgagagcccattaaggatttatttattttattattattattttcaatactgctccttctgtacattaagtatgtattgatagactcagtgagagtctgagaacccattgtgggcctccattttcccattcgtaaatgtcaggattgtgtaggtgtcaaattctatgattctaagagtcttcaatgtgaagcacctgggtaaagagggagctagtgtcagtgggtggaatttggttaaatcccagagggtgctgcattttatttgaagcttatgaaagaaaaggctagctggggccatctggtctggtaacaggtggactcaaaaacgaagaggagaagttcacttaaaaagca

SEQ ID NO: 270818 - DNA, 565 bp, Homo sapiens
gaggatcggccctgggaaaggttggctgtctgcagtgtgcggttggaggaagtggcccttgtttgcttycccgcaaccctaggagcttccttccctctgcgtctttgctttgctttcttgcggctgcctgctgtggagggctggccgcccggtggacctgggccctggggccccggatgcttccaaacctggagaaacacccagaacaacagctctgtcccaggcctctgctcccaggattgactcttggactcatcgcagttgaagctcaggacaaagccaccaaagccagcatgagctacacacccactgtgtcctggaccccgcttcagtgctccctgaatgctctcacgacaccacgagcccagacattctctccccatttgcaacccaggaaactgaggcagggaactggcaggcaatgtgcccaggttctgcaaactactcagagttagacttggtcttcagtagcctcgctccgaaaactcctgccctgtggggccgccctagagctttaacatagaatgagaggctcagaatcaccagatcagagcattgaaaaaca

SEQ ID NO: 270819 - DNA, 565 bp, Homo sapiens
gaggatcggccctgggaaaggttggctgtctgcagtgtgcggttggaggaagtggcccttgtttgcttccccgcaaccctaggagcttccttccctctgcgtctttgctttgctttcttgcggctgcctgctgtggagggctggccgcccggtggacctgggccctggggccccggatgcttccaaacctggagaaacasccagaacaacagctctgtcccaggcctctgctcccaggattgactcttggactcatcgcagttgaagctcaggacaaagccaccaaagccagcatgagctacacacccactgtgtcctggaccccgcttcagtgctccctgaatgctctcacgacaccacgagcccagacattctctccccatttgcaacccaggaaactgaggcagggaactggcaggcaatgtgcccaggttctgcaaactactcagagttagacttggtcttcagtagcctcgctccgaaaactcctgccctgtggggccgccctagagctttaacatagaatgagaggctcagaatcaccagatcagagcattgaaaaaca

SEQ ID NO: 270820 - DNA, 565 bp, Homo sapiens
gaggatcggccctgggaaaggttggctgtctgcagtgtgcggttggaggaagtggcccttgtttgcttccccgcaaccctaggagcttccttccctctgcgtctttgctttgctttcttgcggctgcctgctgtggagggctggccgcccggtggacctgggccctggggccccggatgcttccaaacctggagaaacacccagaacaacagctctgtcccaggcctctgctcccaggattgactcttggactcatcgcagttgaagctcaggacaaagccaccaaagccagcatgagctacacacccactgtgtcctggaccccgcttcagtgctccctgaatgctctcacgacaccacgagcccagacattctctccccatttgcaacccaggaaactgaggcagggaactggcagscaatgtgcccaggttctgcaaactactcagagttagacttggtcttcagtagcctcgctccgaaaactcctgccctgtggggccgccctagagctttaacatagaatgagaggctcagaatcaccagatcagagcattgaaaaaca

SEQ ID NO: 270821 - DNA, 565 bp, Homo sapiens
gaggatcggccctgggaaaggttggctgtctgcagtgtgcggttggaggaagtggcccttgtttgcttccccgcaaccctaggagcttccttccctctgcgtctttgctttgctttcttgcggctgcctgctgtggagggctggccgcccggtggacctgggccctggggccccggatgcttccaaacctggagaaacacccagaacaacagctctgtcccaggcctctgctcccaggattgactcttggactcatcgcagttgaagctcaggacaaagccaccaaagccagcatgagctacacacccactgtgtcctggaccccgcttcagtgctccctgaatgctctcacgacaccacgagcccagacattctctccccatttgcaacccaggaaactgaggcagggaactggcaggcaatgtgcccaggttctgcaaactactcagagttagacttggtcttcagtagcctcgctccgaaaactcctgccctgtggggccsccctagagctttaacatagaatgagaggctcagaatcaccagatcagagcattgaaaaaca

SEQ ID NO: 270822 - DNA, 551 bp, Homo sapiens
gcatgggacagagtgacctgaggctggaagcaacttggagcaagtcatctgcctcctcactygctgcttaagccgtctccatcctggcattctgaaacaccttctctggcccccctttgcctgctctgggttccagggcctcttcttccaggtgccttccctgaaacccacccaggctacatgagagtgaacttgcccagtgctcctcagggcttataccacacacagggcttcccataggttgctttggtcagtcttcaccctgtaaagcagacgtagcccttgaacccattttgcaggtgaggagactgaggcccaaagaggctaagaggcgaggtggcagcaccatatttaggccaactctgagtgactgcctgtcccacgctgtctcctgcaccccagctgctcaggaccctgccctaccactggagatactcacagtccagtgagggggccacagaagaagggaggggatggacatctgaaatagcaggtgacacacagaaagagtagtagtggccacgaaaacaagaggtagggtgcagtcaggt

SEQ ID NO: 270823 - DNA, 551 bp, Homo sapiens
gcatgggacagagtgacctgaggctggaagcaacttggagcaagtcatctgcctcctcacttgctgcttaagccgtctccatcctggcattctgaaacaccttctctggcccccctttgcctgctctgggttccagggcctcttcttccaggtgccttccctgaaacccacccaggctacatgagagtgaacttgcccagtgctcctcagggcttataccacrcacagggcttcccataggttgctttggtcagtcttcaccctgtaaagcagacgtagcccttgaacccattttgcaggtgaggagactgaggcccaaagaggctaagaggcgaggtggcagcaccatatttaggccaactctgagtgactgcctgtcccacgctgtctcctgcaccccagctgctcaggaccctgccctaccactggagatactcacagtccagtgagggggccacagaagaagggaggggatggacatctgaaatagcaggtgacacacagaaagagtagtagtggccacgaaaacaagaggtagggtgcagtcaggt

SEQ ID NO: 270824 - DNA, 515 bp, Homo sapiens
ttccttcacttattagttgtgcgatcttaggcaagtttccttccctctgcacttcagtttctccatggctaaattagggtattgataactagtccccacctcattggctgctgtgaaaatcaaatgtgctagaacatggaaagtgcttagaaggtgccaggcacatagtgagtgccccataaatgtggtggtggtgttgtaattatcattatcgttatcggatctgattgttgcaataggctagtgcggagtcacctgaactatccgagcaaaataagaataccgcagatgccccaccatcagccagaagcgggtagagccgtcacgtctggggaaatggaaaaaccttttagggacgttgagacttcacccctcatgtccactatacagatgagtagcccgaggcgcagggagcagcagggcctggcccgaagtcacctgcaactcccacctcyccgacctggacctctccctaccccagagggcagcttggggcggaaagccagcgccctgca

SEQ ID NO: 270825 - DNA, 553 bp, Homo sapiens
gagtgaacaaatgatatggcaagtgcttgctctgtcttggggggatttccaggagcagggctgcaaggtataatacaggactcccacttagagttgaatttgagataaacaaaagtacgtccaaactattgcacaagacatactaaaaaatgattmgccatgtatctcaaattcagatttaaccaagtttgtggttttgaattgagctgatattgagataattgtagattcacatggaattgtggaatatgaagagatcttgtgtaccctttgcccagtttcccccaatggtgacagcttgcaaaactataggacgagggtcacaactaggatgctgatgctaggacagtcaagatgcagagcacacaatggtccccaggttgcccttgtatagccacttctacttcccttccccttccgaatccccagcaagcactaatttgctctccacttgtatactttcattattttaacgatgttacataggtgggtcttacagtataacctttccagacgagcttcttttcattcagcacaattccctcaagcctcc

SEQ ID NO: 270826 - DNA, 553 bp, Homo sapiens
gagtgaacaaatgatatggcaagtgcttgctctgtcttggggggatttccaggagcagggctgcaaggtataatacaggactcccacttagagttgaatttgagataaacaaaagtacgtccaaactattgcacaagacatactaaaaaatgattcgccatgtatctcaaattcagatttaaccaagtttgtggttttgaattgagctgatattgagataattgtagattcacatggaattgtggaatatgaagagatcttgtgtaccctttgcccagtttcccccaatggtgacagcttgcaaaactataggacgagggtcacaactaggatgctgatgctaggacagtcaagatgcagagcacacaatggtccccaggttgcccttgtatagccacttctacttcccttccccttccgaatccccakcaagcactaatttgctctccacttgtatactttcattattttaacgatgttacataggtgggtcttacagtataacctttccagacgagcttcttttcattcagcacaattccctcaagcctcc

SEQ ID NO: 270827 - DNA, 612 bp, Homo sapiens
agattttgttaatttgggctcaaatccaatgcatttttccctctacctaatgaaatattactgaattatcatatggcttagagactccattgtagggttcacttatacccccacatttcaacacctctgaatcatgatgcatcttataatcaatgaaataccatagtctaggaggttttttaagtcttagtggtacacaaaataatggcatatctcacarttcattacaagtttgatttgataaaatatggtacatgaccctcataaataggtttcccttctaacttgttggtttaaaaaataaaagtaaggtactacgagagtagggactctgaatcataccctatcatattcctattcctttccagtgtatttgaatttttattctgctacctgaattaatttaaattatgcaaaaaattataaacactatactgaagaatcttaaagcttataagtttttctttttggtatctgataatatcaatttattagaatatgtttacatgaattccaaattttccaaattaatagaataattcagtatgtactcaggatgaatttagtgatttacaaagtttcttttccaggtgattttcccaaactggcttt

SEQ ID NO: 270828 - DNA, 597 bp, Homo sapiens
taatgttttctccagtgtaaattatttgctctctaaatgaggtctttatagctaaaggctctgtgacataatcatgaggtttctcttcaatgtgcattctctgtggttaatgaggtatctaaataatttaatacattgactatattaatgagatttaggagtattaggagtttttacattagtaaaagagaagttattttgaaaagtatttccacactaattacagtttatactgtattctctccagtatgaattctccaatactaatgaaggatgatttatagttaaagaactgcccacattgctagcattcaaaggacttcttactattgttgtacagaaactgagctacaggtacaaggtttctcacatttactacattcacggggtttgtagtgggttgaatagtgtccacctccccctcaaaattcacatccacccagaatcttggaatgtaactttatttggaatggggtctttkcagatgtaattattgaagataaagtcatactgaaattaggatatgccctaaatatgatgactggtttccttacaagaagagtagaagagacagagacacacacagagaagaaagcc

SEQ ID NO: 270829 - DNA, 547 bp, Homo sapiens
ttcagagccttctctggtcacactacctgaggttccccacggagctgttctgtgtcacagctctgaatttcattttcttctgagaactttcccacatgagagtatttctttccttcatcaattcattcaacaaaaatgatgctcccgctgggtgcagtggctcacgcctgtaatcccagcactttgggaggccgagatgggcggatcacaaggtcaggagatggagaccatcctggctaacatggtgaaagcccgyctctactaaaaatacaaaaaattagctgggcatggtggcgggcacctgtagtcccagctactcgggaggctgaggcaggagaatggcgtgaacccaggaggagcttgcagtgagccgagatcgagccactgcactccagcctgggcgacagagcgagactctctgtctcaaaagaaaagaaaaaaaaaatgctcccagtacagggctcccagcagctccaaacacttactgaaagctttggctatggtttatgctgctgaagttttcttctaagcatcaatgaagaaaacg

SEQ ID NO: 270830 - DNA, 547 bp, Homo sapiens
ttcagagccttctctggtcacactacctgaggttccccacggagctgttctgtgtcacagctctgaatttcattttcttctgagaactttcccacatgagagtatttctttccttcatcaattcattcaacaaaaatgatgctcccgctgggtgcagtggctcacgcctgtaatcccagcactttgggaggccgagatgggcggatcacaaggtcaggagatggagaccatcctggctaacatggtgaaagcccgtctctactaaaaatacaaaaaattagctgggcatggtggcgggcacctgtagtcccagctactcgggaggctgaggcaggagaatggcgtgaacccaggaggagcttgcagtgagccgagatcgagccactgcactccagcctgggcgacagagcgagactctctgtctcaaaagaaaagaaaaaaaaaatgctcccagtacagggctcccagcagctccaaacacttactgaaagctttggctatggtttatgctgctgaagttttcttctaagcatcaatgaasaaaacg

SEQ ID NO: 270831 - DNA, 611 bp, Homo sapiens
atttttgagcatcacttctgctacatcttattggtggaagccatcacaagcccacccagattcaygcaggcagagcacagagaacccacttcttcatgggaggagtgtcaaataattttgtggtcatgttctaagagcaccaccctaacccaaactaccaatgtctcacctggacccctactgtcatctcctctctggtctgcttgatggcgcactttactcacctgtccccattcccacagtgtgttcccttaggacagccacggggagcttttgaacacacaaatcagatcagtcacccccttcttcatccctccaatgtccccagctgaacacaccactgaaatccaagctccttgacgtgcccacacagctttgtggatctgtgtatccccatctcccttcaagctcaggccttctctctctctctattgcagcccaccatctcctccctggggctcatgcccacctctgagcttttgcacctgctggtccccttcctgcagtgctggacccctgatgctgtgtccttcaggcctcacctcaaatgccacctcctcagatctaaaattaaccctccaacacccagtattccctctcccatcaccctg

SEQ ID NO: 270832 - DNA, 499 bp, Homo sapiens
gcagcccaccatctcctccctggggctcatgcccacctctgagcttttgcacctgctggtccccttcctgcagtgctggacccctgatgctgtgtccttcaggcctcacctcaaatgccacctcctcagatctaaaattaaccctycaacacccagtattccctctcccatcaccctgcttaatggtctactatctgcaactctgttcttgttcacttatcatctgtctccttcctggccccaagaagaaagactgttgcctttcttcttccttgtgtccacggtgcccactatcgtggttggcacagaatatggaatatgaatgaatacctgaatggtggctttcgggtgtgtgtgtgtgtgtgtgtgtgtgtaatttagaaaggcaatcttgaaggatagtcaggactgggtgcaggaggttactacagttgggcatactttgtttcccatatggttgtgccactcgctagctggtgactctgggcaaacaccttca

SEQ ID NO: 270833 - DNA, 542 bp, Homo sapiens
cattttctatggcaagcccactaatgtactctaatgttctgtagtcattgtgctaaacgacttacatatggataggtgtaaagtaacaactctctccttctaacccctattctgcccaaaaacttatttagatgaaactagtttgaaatggaacttaaaatcatcaaattataacaggttcctttgtgtaaacgctgtattactctttgacccctttaccctttccttcctttatagctctcatcacaatttaacattctacatctaagcaacmaatttgcctcttttgctcatgacataagatacatgtccatacaggtgctagatagttacccaaagactaaactgagaacacaattacaggtttgattaaacttgaagatctgaatacactgatcattaatattttgatattgatgagtcattctctctaatcctttgtttcaaatttacaaccaagaagtgaataaaatattgtattttgacatcttcagacctttgaagtccaacagatactgcttctttagccccttctacaaaaa

SEQ ID NO: 270834 - DNA, 588 bp, Homo sapiens
catggctctgggtaatagcacatgtgtgtttcttgattaatgtcagaatgctctggcagaaggggtgctgtgagttgccaaaagccaggagggcattttcctctttgctgagtggctgatgctcagagacacatctctattctttgaagctggtctgctttgtttacaattatgccctagtcattagccaacggggactttgggagtagcttgttctgggaatacttcctgtcaggtttttcccagcctgtctttggaatgcctctccaatccacttcatgackccaggggtggtccaatgtgcccaaagggactctgcctttgtgctcaaaaggattcccagcactcaacttcaaaaatagcttggggcttactaaaacctaattgaaagagtctctgtttttgcttaaaaacacaagtctggcctggtctttacaagtgactcataaagaattattttgctacttgctttttaaattacatgtcactgtcgggtactaatctgtacgcttattttggaaaccctgagaaatggctactagggtttctctatctgtctgaggaatcttcaagcctccaagtagaagc

SEQ ID NO: 270835 - DNA, 542 bp, Homo sapiens
ggattacaggcataagccaccacgcccagcctatttctggaagaactttgatttagtataaactttaagtgtttgataagtgtacacacttaacggtcactggttacagataactggagcatctcctcctctcgtgtctttaatcaattgaacatctatatccaaaggctttaaaacagctgtccacaaactatgcccatgtggccaaatccagcccaccctattattgtaaataaaattttattggaacacagatgcactacatttatgtattgtctgctttcacactacatcagcagagttgagtacagtcatccctcagagtctatggtggactggttccaggaaacctccctaccaaaatcctgggatgttcaagtcccttatataaaatggcacagtaattacaactaacctatgcacatcctcctgcatactttaaatcacctcyagattacttataataatactatataccatataaacgttatgtaaatagttgtattatgctgggccagacaaagtggctcatgcctacaatc

SEQ ID NO: 270836 - DNA, 542 bp, Homo sapiens
ggattacaggcataagccaccacgcccagcctatttctggaagaactttgatttagtataaactttaagtgtttgataagtgtacacacttaacggtcactggttacagataactggagcatctcctcctctcgtgtctttaatcaattgaacatctatatccaaaggctttaaaacagctgtccacaaactatgcccatgtggccaaatccagcccaccctattattgtaaataaaattttattggaacacagatgcactacatttatgtattgtctgctttcacactacatcagcagagttgagtacagtcatccctcagagtctatggtggactggttccaggaaacctccctaccaaaatcctgggatgttcaagtcccttatataaaatggcacagtaattacaactaacctatgcacatcctcctgcatactttaaatcacctctagattacttataataatactatataccatrtaaacgttatgtaaatagttgtattatgctgggccagacaaagtggctcatgcctacaatc

SEQ ID NO: 270837 - DNA, 588 bp, Homo sapiens
gtcagagaaatgcaacaacctctggctcttcctggagaccaggcagctccccaaagacatgagcacagatcagcaaagctaggagagttctatccagggcacagaggattgggggcaggaggaggagtcctggaacacagtcttcatgacccccaactscaggctgaccctccccataccctagggtgccccaaccatatcctctgtccacatgtgtgaccaggcctgacaaaccactgcattcagctgctgccccaacctgggacctccccaggaggttggagcagaaagggttctccttggggtggtggttctcctccagggtatcaggacacattatctgcactgccagcagagagggtgtgtctggggaatgggggtggtaggggcttgtgtactctgtcattccctttctaacccctggacctccgacaagcccagggtgacagctggtgctaggggtgtgaggttaataaatggcttatctgccaggcacagtggtttacacctgtaatcccagaactttgggaggctgaggcaggtggagcacctgaggtcaagagtttgagaccagcctggccaacatgg

SEQ ID NO: 270838 - DNA, 631 bp, Homo sapiens
acatgcaaatatataataaagcccactaaaaatataggctccgtcctttaggtgtttttttgtttgtttgtttgttttgttttgtttttgagatggaatctcactctgttgcccaggctggagtgcagtggtgcgatcttggctcactacaacctctgcctcctggattggagcattctcctgcctcggcctctcgagtagttggtacaggtgtgtgycaccataccagctaatttttgtatttttagtagagatagggttttgccatgttggccaggctggtcttgaactcctgacctcaggtgatccacccacctcagcctcccagagtgctgggattacaggcgctcatgagccaccgcacccggcctgtcctttagtttcaacacatcaaaacaaacccagggatagatatgggcaaacttacttttctttccttgtttttaaatcaaatttaagtgaatatttatatttactaggcacagaattagcatgtctttctactttccactcatgggcctatggaagacatcactaatagtttgggacatcattccaaactgaatctcataagcctttatgtatgacactggacagcctaacacccggagctgcctagcgagatgaagct

SEQ ID NO: 270839 - DNA, 631 bp, Homo sapiens
acatgcaaatatataataaagcccactaaaaatataggctccgtcctttaggtgtttttttgtttgtttgtttgttttgttttgtttttgagatggaatctcactctgttgcccaggctggagtgcagtggtgcgatcttggctcactacaacctctgcctcctggattggagcattctcctgcctcggcctctcgagtagttggtacaggtgtgtgtcaccataccagctaatttttgtatttttagtagagatagggttttgccatgttggccaggctggtctwgaactcctgacctcaggtgatccacccacctcagcctcccagagtgctgggattacaggcgctcatgagccaccgcacccggcctgtcctttagtttcaacacatcaaaacaaacccagggatagatatgggcaaacttacttttctttccttgtttttaaatcaaatttaagtgaatatttatatttactaggcacagaattagcatgtctttctactttccactcatgggcctatggaagacatcactaatagtttgggacatcattccaaactgaatctcataagcctttatgtatgacactggacagcctaacacccggagctgcctagcgagatgaagct

SEQ ID NO: 270840 - DNA, 606 bp, Homo sapiens
tttgttttttaaccatcctgtaatcttcctatctcttaccacactcacaacactgtgacttcttggaaacagtgattttgtcttatttatctttgtgaatgccattacacccagcccwtagtgaagatcaataactgtttactgaataaataaataaatgttacaaacttttgatcctctgaatgctgggaaaaaggagacagccaaagtaacatgatgacacaggataatatatctaggctatctaaatatttttcaagcaacaaaagatcccaatttggtgctacacaatttttgcaattaaaaaaaatcatgaaagaaactgctaactctcagacagcaaattatgcccattgcttaaaattcaattagcctctgcctttcctcttactagcctctctgccccaaatgccccctctacaatttattccctgccacccatgttcaaggctcagctcctacatcagtcctccacaggactttccttgacccctttgcagatcccagtgtcctttatcataccctcctctgaggtctcacagcattttatctctacctctcttatttgcctctttactgcttgcattttacttattagatatttta

SEQ ID NO: 270841 - DNA, 548 bp, Homo sapiens
aatgggcatgtgaggacatcttaggtggtcacagtggctggggagtgcctggcagttagtgagcaggacctgtggtactgctgtgcaggacagtccaacacgagaattgttttgcccaaaatgccaggaagggaaactcacagaagataagattatgcccagatttcaggcttgaattttccagcagcagagaagcagcacggctagcggttaagagcctggactgagatccagcacttgcccctatgggctcaatggccatgaacaagtgacttcaccccttttctgttccttcctctgcaaaatgaagatgttaaagatcacacctatttcaccagctggtggaaagctttaaaggaaaaatagcatataaagtacacaatgagctctcagtaaatacaacacatcatattgtcactatcacatttttttgttttgcttgytgctcatttcaaacatggtaatgattggaaatggtcaaattattggtcatctcccatctaaacaagagaaaagctactttgtcaaagccagcctggctggagagg

SEQ ID NO: 270842 - DNA, 534 bp, Homo sapiens
tccgcctgacaaagcgggctcagaaagacaccgtggtgtttccctcaactgcccaaacatatagtcaagtggggctgggggacgcaccacgggacaaggacggtcgtgatgggcgcgggcgcgggcgcggtccgcgaggccccctgcctggcccggatctccccagcctcccctctctgcccagctctcctggccccagcttgtttctgttycttccattgccccagaaacttggtatgagttttgatttctccatacaggagccgaacctgtgaacaagcttcctactcctcccaactcactacccccgagacccactcctcgggagcgcgagtgccgggaccttaccttgtcttgcccgggagctgcccctttcaggcagagttggaggtgctgcggagaagccggtgcccgtgcggctgcgagtgcggctgtgggtgtgggtgcggtatttggtgcggatgcgggtgcgggtgagggtgtgggtgcgagtgaggatgagagtgtggatgtggatgtggatgcggatacggg

SEQ ID NO: 270843 - DNA, 560 bp, Homo sapiens
gggtgagggggctggtttatacttaaagcccttgtggtagaacctcaagtcctacctactgaaaatctagcctttcccagcagaacatgccgacatgtagcagagtagtatagagcagaaagggcagayattcagaatagtattgaacactggctctacgctaatgctaatccctggggactctaagtacacctgtgcttagaatgagagctcatgggggtcaggggaaaatgaagttttggtccaagttagtgtcacaataggcccagggagtccatgaactctcttcacgattgttcctacagatcctgaaagtatagcgtcttcatattttggaggaaacatatactgacatttgggattgcttctctgatcaatatactgagtaacccagaacctgccagctttcagtagcaatcagagcaggaaaacctgctcaaggctacagagcaggaagctgtctcaattcatctctatggctcagtggcttcaataacaaacaagagtctatgacagatcagcggatatatggagcccagagagagccctgatggtataaa

SEQ ID NO: 270844 - DNA, 555 bp, Homo sapiens
gtaatgaatctgtagatcaacctgaggaatactgccatcttaacaatattgggtcttcctatccaggaacaaaggatgtctttccatttatctaagtcttctgtaatttttctcagcagtgctttgtagtcttcaggttataggtcttgtacttttgttaaatttataaaatttattccaagacattttatttttatgttattataaaattacattmttttttcttttttttttttgagacaaggtctcactctgttgcccaggctggagtgcagtggcatgatcacagctcactgcagccttaatctcccaggatcaagtgatcctcccacttcagcctcccaagttgctgggactacaggcacgtgccatgacatctggcgttttgtttttttttaatttttgtagaggtggggtttcaccatgttgcctaggctggtcttaaactcccgggctaagcggtcctcctgctttggcctcccaaagtgctgggattacaggcgtgagacatcatgcccagccagaattgtgttcttaatttcattttaggattgt

SEQ ID NO: 270845 - DNA, 510 bp, Homo sapiens
tttttgtactcattggttagaaactacagcacattatttttcttcaagctgtattttatgtagaggaaaaacagttggtatatctgtgttgatgttgattcatatatattgggtattttatttatttttatagtaaaatgtattttgacaaatgtaaaatgaaaaggggaagatatctaaattcttgaatttgtttttataggagttccatctggaatatgacaaattagaagaacggcctcacctgccatccaccttcaactacaaccctgctcagcaagccttytaaaaaaaaaaaaaaaaaaaaaaaaagacttcccttttcttggggtatggctgtctcagcacaatactcaacataactgcagaactgatgtggctcaggcaccctggttttaattccttgaggatctggcaattggcttacgcaaaaggtcaccatttgaggtcctgccttactaattatgtgctgcccaacaactaaatttgtaatttgtttttctctagttt

SEQ ID NO: 270846 - DNA, 582 bp, Homo sapiens
cttagcaataaaagaccatctcttcagtaaaatactaggcatgaacatgcgtaggcagttcagtaaagaattacaaataaaaacatgaaaaatatgtggtatctcactaaaaatcaaagaaatacagtcgttcattgtttaaggtgattttgtcctgtgaacatcatagagtgtacttacacaaacctagatagtatagcctactacacacccaggctatatgatatagcctattgctcctaggctacaaacctgtactatgagtgtactgaatactataggcagttgtagcagaatggtaagtttttgtgtatttaaacatagaaaagrtacagtaaaaatacagtattataatctcatgagaccaccgtcataaatgcagttcatcattgactgaaatgtcattattcagcacaggactgtactaatcagatcataactatgtaaggtgatggacgtgctaattagattgtggcagttatttcacaacgtacacatatatcaaaacatcacgttatataccttaaatatgtgcaatttttatttgtcaagtatatttcagtaaagctaaggggaaaaaag

SEQ ID NO: 270847 - DNA, 344 bp, Homo sapiens
tgtggctctgggcttcttcagtgccgtcactgaaatctctcaggggtgatgtccatgttaagataaccttctgcctcccccatgcaggctggtttctccaaaaatccagcccactaatcctagcggaagcttagctttaaagcaaggtcttttatttcttcctgattggctccctgttatatctcatccactgatctatcctacatcccttaccctctcaaggtcccttgcctggcttcaccctttctcccytctcccttgcagctgatcactttgagtcatagtttaatgaggacatgaactgcatgatagaaacactgacacatccctttcctccattacaa

SEQ ID NO: 270848 - DNA, 489 bp, Homo sapiens
aaacaaaaatcaatggagacgtgaaatgatggtgccggtagatatggttgtgagctttggttctataccactactcaacctagagcatcatttaaattttccttacaaggagggaggttaaggagagaagaagggaggcactggatgtgaatttaacttctccasttgtctcaaatacatagtgattattgagtaacttgatctctttcttagtttaatggagaaatatatattatcatttctttttgtgcaaaagtacaaataaaatgccatctaaatggcattgcttttataaggatgaacaggtaatctcatgccagtttcagttcagactgattgttccatctctttaaaaaggaaatacacttaaagatgcatttagcttagagaagtttagcaataatggttgcctaataaaaacaatttcttagtgtcttcaacgggccctgataacgaaatgcatcacagctgcaaaataagtagcccaat

SEQ ID NO: 270849 - DNA, 490 bp, Homo sapiens
aagaagaaatattgcaagatttattttcaagtcagttacagatttataacttctatttaactaaattactttgtatcagaatcccaaagaaattctgatgtggttaaatccatgggaaatttcatggagtgagacagatttttctttctacctactacccttgcaagagcatggccatggtgccagaaagggcatgtgatactccaatttgaatcaaagaaaaagacatttctgttaatgtccagacatttccagacatttctgttaatttttaaataaatttcactaaatttctctggttgtggatccatttgagtatgacatacaggagttttaaatatttttattcttaataattkaaacattttccatataattaactcttaaatctgtttcttggtcagaatggatcaagacagagagccaccaaaccaaaaacaaatcttcttttatttgtataacaccatatgaaaaactacttaccccagga

SEQ ID NO: 270850 - DNA, 597 bp, Homo sapiens
tttatatttcatgagtgggagacataaatacatgagctataaattgcaaataaaacataatatatgctacacaagtgccatgtgagtgtaaaggaactatcaactctggtggaggaagtctaagaattcatgaaggggataaaatctgagcaggttttaaagcatcagtaaacattaggtggtccaaaatttaaaaaaaaaaattcaagmagacaatagagtttatacaaaaaatgaaggttcagtattatgtatttgatgtgcctggagtttagaagcaatggaagaacaaatgaagtggcaggaaatgaagctataagtatttttgtggcatcaagattaccatgttgagaatcattagtgtagatgtagcctaattgatttaagcatttcccttttgtttgagcatttagagtatttccaatttttcccaaatagtaagctgagatgaatgccctttggtatataactttgattatatctttagctagtttttaaagatgagattgtcagaaatgaaattagtgaagtaaatggtatattcactttaagtgtcttgctgcatttgccatatttatttctagaaacatgccaatt

SEQ ID NO: 270851 - DNA, 427 bp, Homo sapiens
aaccaaggacctgaatgtataatttcactgaatttaaatttaaatagccatatgtggctaatgactgtcttagtgggcagcacagatctagaacaatagggactcaagatagaaaacatccaggtaaaaagataagagcaaaatcagacttagtgaaaagattctgtgactacttgaatgtgcaaggagaaggagagggagaagcctgtctgatcaagatttagaatcagagggaactgaaagatggtcatgtcacttatagggactgcaacacaaaaaagctcagaaraggtaatgaggaagggacggaaagtttctctctctctctctttatctctttctgtgtctctgttctttcaatagacagctctgaaacttgtcagcaggccattggaaatgacaaaaagatttaaactgaccaggaacc

SEQ ID NO: 270852 - DNA, 596 bp, Homo sapiens
aaaacacaaaatgtcccctctctcattaaatgagtgactgctactacttcttgaccaattacactgttgtcctctctagtctgccttctctataaataagattcactgacactcattcatagaatttctttgctttctgacagagtaagttcccacttccttagatcctctccaaatttacccaaccataactcaaatcttggaagtcctaactcccccttactgaaatgacccatagtttctgtcaaagaaaagttgcaccagatggaattaaacaggcaaggaagattttattcaagactactgcaaaagagagagggactgaactcagtctgctgacacaaaaggcagaagagatgttaagcaccagggcgagctagtggaaaagcactggaggacatgggagggaggtgggtcactgtgactaggccatctctgtttgctagttggcacttattacatgtaagcttctgattcccacagagartaggaaataaggtattctctctttcttgatgattacatttcaaagggatgtcttccaagtccttgaaaaagacatttatgggttgtaaaactggcaagaggctgagaga

SEQ ID NO: 270853 - DNA, 514 bp, Homo sapiens
tcacagtatttaacctgtataatctggccctttacataaaaagtttgccaaacccaggtctaggttaacaagtagcaaaataattttccagaaagcctagttaagtctttttaaaaatatacaatcagcaaaattacgttttctgtctcacgttgcaacacacaaaatctcttaacttcccattttgtgccaatagtctacacattaatgcacacaaatgattattatctcatttaactccgctaagaccaagagagtgwcagtaccatctttagaacattacttttctggttgtattgagtaaggctaacagaaaatgaagaaacagcagcgtttacacactccacatcgcctgttctgtgcttttatcccatattttttcccagcctaccacctttatttttgtttattaaacaactaccatcaagttttgcaatcactcatggtttctctcagatttaccaaaaacaaagtgctaaaggcatctattttaaaatcttgatatggctttcag

SEQ ID NO: 270854 - DNA, 550 bp, Homo sapiens
ctgtgatatcatacggagggagtaatgttagccaacacctctctaaaatgtttattctctaatgagaacacaagaggaagaaaagtcctgatgggctaaycttccacatctgtaatgttagaatcagtagaagtaggtgtacctgaactagcactgttttgaaggctatttttctaagcaaaattttaggataggacgtttccctaaaattttcaggatgactatgggttctgccccctgacattcttcattcccaactcaagggaaaaactcagtgaaagccttttagcttatccctatgaaaagtgaaactctgtgacaccataggtagaaaggaaataaaacgtgttgctcagggcccctatgctggagaatggacccttggtgagagaagggtaagggacagttattttcttcctccctgttcttgctcttcatattactcatgtggtactatctcagatggcattgaaagtgaaggcctaaagagaaaggggtccaaaactatctgctctaggcattcagggagaagaacaaaaggtggaatcaa

SEQ ID NO: 270855 - DNA, 598 bp, Homo sapiens
ttttggtttatcactgccctcactaaagcagctaatcccaccactattttttattcagatagtgtagctattctgggaatgtgttgaaatgaaagtgatcaggattctattatccttcatattatctatctgcctaggttcaatctgtctattaactgccactcttcgaatacagctgtccaattaaagagaatatggagtcaaagaatgaagaacctawttgtgttatttcatttacacccctagaaatgtttaagctgctgaactaaaagaagaaggggaggtaatgctaccagaacatggaaactctttctggacccacaatggaatacagggttgcacaggtaaaatagggtgtctgataggaggaaaagaggtgaggtagtacctgccctcacaaacattttatttttactccaactatcactcagggaccctttatttgaacctgtcccactgcctataccagagacagatggatttgctaagatatctgcatatcacttttcttaaaaaaaaagtattttaaaatattttcaacttattccgaagagacatgggtttttacagatgtaagcattatagaaatgccacatag

SEQ ID NO: 270856 - DNA, 630 bp, Homo sapiens
tcaaaagtaaaataaaaaagaaattaatgaaagtaaatccagctttgaacaatccccaaataggcccgttgcactgaagggcaccttcattaaagaaagatttgcagacttcttaaaaagacatgtatttgcatctatttagtttatacatgaagaaataacatgtggggaaaatatttaaataaacaaaaccacagagataatgaaagcctttggtacaacattgatatgcaagaacatacttcaggttcactcaagaggaagtgagctttcatgcaaaggcatcagtaatggactttctatttccttattagaattaaccttgatctggaagaaaaaacttttttctttactgttgaatacatatttcactccatctaatgtattccactaaaaccttttttwaaaaaagtggcacttgtgctggaatttattattcctgcaacgggcattactagaaacaaaatagctgagagaactatttattttgaaggaaacaagttatttctacagatcataatggttttatagggaatgctagaatttccttcccagcaggtattttcaaataggatagattctccccactacagaagagtttaggcaaaatctgccaatggcagaaaaatg

SEQ ID NO: 270857 - DNA, 593 bp, Homo sapiens
caggaccactgtgacaattatgttaactgtacaaattgattgtaaaacgtgtgtttgaacaatatgaaatcagtgcaccttgaaaaagaacagaataacagcaattttcagggaacaagggaagacaaccaaaagatctgactgcctgcagggtcaggaaaatagagccatatttttcttcttgcagagagcctataaacagacatgcaagtagggaagatattgctaaattcttttcctagcaaggaatattaataattaataccctggggaaggaatgcattcctagggagaggtctataaacagccactctgggagtgtctgtcttatgtggttgagataaggactgaaatacaccctgttctcctgcagttccctcaggcttactaggattgggaaactccaccctggtaaatttgtggtcagaccgcttctctgttctcgaaccctgttttcttttgtttaagatgtttatcaagaaaatacgtgcacagctgaacacagacccttaacagtacttctgatyttgctcttgtcctgtttcctcaaaaacatgtgatctttgttctgccttttgccctttgaagcatgt

SEQ ID NO: 270858 - DNA, 577 bp, Homo sapiens
gcagttgcagcagtgcaggggaggccctggcaaagcaaggccctgcattgaggagcgatagtggggcagaggcactccacagtcctccatggaccggccctgactccarccatcattgtaaatgtgaagtgctccttggatccgattttgagggttttggttttaggatttcactgctattttcactctgaaaggtcattagagagtacgttagatggcgataactctgtctccagctcagtgtgctgcttctataagtgtgccctcctgaaaataaactacatctggcaaccactcgtgtgaattacctaaataaaagactcacactgttaatggagcacttttgtactagaaaaagaaaccattagacttgatgttaaaagaaactgctactgtcattcacttgattgattgcatcttttattaggtcttcactgaattattttacggtttttctctttttaatctgctcccctttattgggatattaagaatgtatattttgaaagtagtggtaaaaaatgttgagaagtataaaaatcagatcataaaagccttttcatgggtggcattatga

SEQ ID NO: 270859 - DNA, 380 bp, Homo sapiens
ggaagtgaaaaagaacattagttaaacactaagaaatctgaataaaatatgggctttaagtaatactaatgtattaatattggttcattaattttggcaaatgtaccatactaatctaagatgttaagaataaggaaaattaagtgtggggtatataggaaatctgtgcaatcttcacaacatttctatacacctaaaattattctaaaatcaaaagtttatttaaaagaaaaggcattattcatgaatcttagacataaaatatcctttgttcaaacttcacwatctgtcataatatgtcactattaaaccaaatgatgaactctttatatacatttgaaatgtttttgtcatgacacacctaacacatataccaggtt

SEQ ID NO: 270860 - DNA, 553 bp, Homo sapiens
acaaacataaaaattttgccatggtatactcatgtctttgtacatatttgtacacattggtatttggtttgtctaatgaatagaaaactaaaaggwcaatgtctgctcaagaaaacataatttactctaggtatatcaaacagagggaaaacattataggaaaactgttgccttttagaaaagttaaaaagaaaaaaaaaaacagaaaaggagaagtgaaatagagcctaccaaaacttctaggctggaacccactagcctgcacctgttaccccactttggagatgctattgcagcttattccagatccgtcaaatatgggccacctggacccagctaggaactgctgaaaaggtgcttttctgtcttggctactggagtccagaatcatttcacctcctctgctgctacagaaactcctatataattccacaacctgccaacaactgccacaacactgaagaccaaagtaggaagttttctcaatttgtacccttctgatttcctcacaatattccccattagtagaacatagccagctggcaaaggagcc

SEQ ID NO: 270861 - DNA, 491 bp, Homo sapiens
ttcacaaaacccctcaaatttaattaaatttccatggacataaccaacaatcattggccgatgatcaatggtttgtcttagctatttcaggctaaagaaatccttaatttgggtgcaccttccttaccttaaaatgacctgaactacatcacaagtttcagcattgatcattacagttctgcacactaattaccatccataatcagatgatcagagataactctattaggcaaaagttaagcttgattttagcaatttgttgataggaagtatatatccttgttctattttacctcacgaattatttcaattaatcaggcagtgtggtaggcactgtgctaagaactrgtgatgcagagataaagagaaccctgccttaaaagagttaataaattaagataaaatttattatttagtagtggagacagacaaggatcaacactaacaagctatgttttaaggatgatgtatagtattgaggacaccatcaa

SEQ ID NO: 270862 - DNA, 472 bp, Homo sapiens
tgtcaagagttcacagaactgtgttagtcatatgcttaatcacataggtagccactatgtaatatattcaaatatcatatatggtattcaaataatcacatattcaaagtttagaatcaaggaaaactctttttctttcccaaatatctttccccattaaacatgctattaaacatgttgttttgcccttactttgaatctgcttatcagttttttaccatagygcaaaatcccaatagaacaggacacccaaagctaggaatgtaggatggggaaatatcagccatatataaaaaccatttagagtggcgagctctagacaggaggcaggcctgagacacttcagaaacttgagataagaagggaaatgctctttggagtagaagtaacatggtctatgtcgagatttgtctaaggctggctccaacagggagagcacctatctaccgaaaaaaggatctctggaaacaga

SEQ ID NO: 270863 - DNA, 608 bp, Homo sapiens
gatgttactattgtaattgtttggggtgccagaaaccatgcccagggtgtgttctggctgctccactgactagctgtttccctatttctttctctcatttcaggctttgcttttccctaagacacaacaatattggaattaggccaatgaataaccctacaatggcatctaagtgctcaagtgaaaggaagagtcacatgtctttcagtttaaatcaaaaactagaaatgattaaccttggtgaggaaggcatgtcaaaagctgrtatgtccccaaaactaggcctcttgcaccgcttagccaagttatgaatgaaaaggaaaattcttaaaggaaattaagatacgactccagtgaagacaaaaattatgaaaaagtgaattagtcttcttgctgatatggaaaaaatgttagtggtctgggtagatcaagccagctacatttccttaaaccaaagcctcatccagagcaagacctcaactcatctcgattctatgaaggcagagagaagtgaggaagctgcagaagaatagttggaagctagcagaggttggttcctaaagttgaaggaaagaaggcatcttcataacattaaagtgcaaggtgaa

SEQ ID NO: 270864 - DNA, 518 bp, Homo sapiens
gtcaataatcacatatcaagtaccagaagctgtatttattgattcaataaaaataccacatctggtatagcagcagcaattgctaayacaatttggttaacattacagtagtttacccacatatgctatgatccatcagtttttttctttataaaccatataggtgatttgaacatgaatatattgaagccactactcttgaatcttttaagtttgaagaaaaggccaagctcttgaattccatctggggactatggacagtatggcttgcagactcatttggacttaatatcagtaagtctaattatttcttctaaggaaggagtgaaagacatgataggcttctggatctcttagtacctgtgtcagctgaagctttgtatcccaaatccatcaaaagaccaagcacacccgcttttcctggtaattggtgcaggtctcactggaaaaatactaggaaatatttatgtgtactcttgtaatgttttacaaaaccctcctcaagggaacttgatctt

SEQ ID NO: 270865 - DNA, 518 bp, Homo sapiens
gtcaataatcacatatcaagtaccagaagctgtatttattgattcaataaaaataccacatctggtatagcagcagcaattgctaacacaatttggttaacattacagtagtttacccacatatgctatgatccatcwgtttttttctttataaaccatataggtgatttgaacatgaatatattgaagccactactcttgaatcttttaagtttgaagaaaaggccaagctcttgaattccatctggggactatggacagtatggcttgcagactcatttggacttaatatcagtaagtctaattatttcttctaaggaaggagtgaaagacatgataggcttctggatctcttagtacctgtgtcagctgaagctttgtatcccaaatccatcaaaagaccaagcacacccgcttttcctggtaattggtgcaggtctcactggaaaaatactaggaaatatttatgtgtactcttgtaatgttttacaaaaccctcctcaagggaacttgatctt

SEQ ID NO: 270866 - DNA, 518 bp, Homo sapiens
gtcaataatcacatatcaagtaccagaagctgtatttattgattcaataaaaataccacatctggtatagcagcagcaattgctaacacaatttggttaacattacagtagtttacccacatatgctatgatccatcagtttttttctttataaaccatataggtgatttgaacatgaatatattgaagccactactcttgaatcttttaagtttgaagaaaaggccaagctcttgaattccatctggggactatggacagtatggcttgcagactcatttggacttaatatcagtaagtctaattatttcttctaaggaaggagtgaaagacatgataggcttctggatctcttagtacctgtgtcarctgaagctttgtatcccaaatccatcaaaagaccaagcacacccgcttttcctggtaattggtgcaggtctcactggaaaaatactaggaaatatttatgtgtactcttgtaatgttttacaaaaccctcctcaagggaacttgatctt

SEQ ID NO: 270867 - DNA, 646 bp, Homo sapiens
gtcctatttttgaatttataataaaatgctttattatacatttaattgtagaaataagtttatatctaaatcacatagtaatcctaattataccgaaaagcctcaaaatttaatatagatactaagttggcagggttgtattcacttctttaattttagagaaaacataggtcaaattatagacccaaacacaaattctatatctagcaccattatatgacaatgtgatattttagttatttgaaaaattgtaaaactatcaacataaaagtaatttgtgtccataaatatatacacacacacacacatatatatgcaaataacctgttttaaaaattattcaaagaaatcccaaatgttcttccccrtctaggcagactaactgacattgcttcaagtggctatcgtaatcccattcaatttttagatccacttctcactcagacgcacatgcacagtatattgaaaaaaccaatacttgcactactatatttccaaaattcaatatattaatgtattttacaaactgaaatatgggtaaaacaatataccaagtaaaaataaacaccagcttcttcaagtttttgaaaagaaaaaaagacaagcacaaacatcctcacatcccttatgtattaaaaggcatact

SEQ ID NO: 270868 - DNA, 606 bp, Homo sapiens
aaagggaggtgttatgggggctgataaaaacttaactttcawctagtatccagtatgtgcaacatagttcatgttctttcactgaatcctcacaaccatcttatgaggtatcattatttccattttactacttaaggaatagacgttgtggcatgcttatcttggctaaggcttaaaacctaggtgtcctcagactttatgtaaacctccttccagaaaactatgtttcttctctatttatgtgaactccttttgcttatttttattcatttattcactcatttaattcagcacatattaacatttaacattacccacaaaatgtgagacacaatcctaggcccagggaaaacagccttgaacaaaacgaagtgtctgcctaaagggaatttaattgcacttaaaaacaaaacaaaacaaaaaacttgcttagatattcatttccttctccctgagaactgagccattacccagccattcaccctgagagcaccagctggtacatggtgtcgagggctgttgggaaattactgtgtaactctttacaaattatttttgctatgctatgttgttttgaaaatgttatgatgttaaaacagcgagtaa

SEQ ID NO: 270869 - DNA, 506 bp, Homo sapiens
acaaacgaatatctgtgaagagagaggaagaacaggcagtaaaatatctgacaactatgggaataattaggaagaaaactaggaaaatgtggtgttgtgggaagatgatgtttcaagtagtagaaaatgttcaacagtggccaatgctatgaaaccatcaaagtaaaggatgaatgggcccactggatttggggacacaaaagtcttcaataaccattggtgggagcagtttgtgtggtcagaggcagatttctgccagttgagatgtgagtgaatagcaagtgccaataattccttgaaggtgtcaattctaagagttttgtgggaacagtgaaagttcactggctggtggattgggagatgggctagttattttttaagattagagataacagagcatatgtaaaktctgattgacaggaacctaagatagacagtaaagattcagaattctcagtaccacaaggcccttcacaagatgaagaatatagggcctagggagcaag

SEQ ID NO: 270870 - DNA, 602 bp, Homo sapiens
gacaaaactagcttaaaaattttgaagtgcaacataagtactggcttacatactgtagatattgttagtcaaattcagaaaacgatagttacaatggagagtattttttaatgaatcatcttctgtaaagaaacacgaagcatgaatctagaatgtgagctgcaaaaggtttctaactgagggtccaactcagtggaacccggagtgttttctgtagaactctggttccacaaggccttaaaaagtatgcacaatggagatgctgccrtcaaataaaagaaatatccaacttttcaactccaccccactcctttaccccctttatttagctgcacggcacgttgcactatctgacatactatttatttcacttatttatttgcttactgtctgtgttccccactggaatgtgacctccatatgggcaaagtttttacatttttttttcctccttgaagtattttcagaacttagaagaatgcttggcctataatagaagctcaatgacatatgcgtgattgaatgatataaatttgagagatattgggttgagcaaaactgaacaaagtatctactggaggaagtctcagggccattaatat

SEQ ID NO: 270871 - DNA, 396 bp, Homo sapiens
ctatatgtataagataaatgtttagttaattttggaaagatagttaagatggttattatcagtagtattagtaacgtttcttcatgaagtgcatggggcatcttgtttcccaacactggatggacacaaatttaaaaaagattttaaccaggcacagtggctcacacctgtaatcccaacgctttgggaggctgaggcagatggatcgcctaaagtcaggagttccagaccagcttgaccaatatggtgaaaccccatctctactaaacatacaaaaaaaattagccaggtgtggtggtgtacrcctatagtcccagccactcgggaggctgaggcaggagaattgcttgaacccaggaagctgaggttgcagtgagccgaggtcgtgtggactgc

SEQ ID NO: 270872 - DNA, 565 bp, Homo sapiens
agaatgcagtgagaaaagagaaaccaagaggttggagggtttcaaaatccagaagaccttctgggcaatcttataagataagaacgtgatgtrtgaatccttcagattcagcaatttggagatatttggctagaagccaaactggagggggtggagtgtggatgtgaagagaggagggttgtgcatgtataagatgtgacaggtgctgtgtggctgtgaagcagaacatggggaaggtttgacaattcagggaaggctgcacagcagagatggcagaactgctccatttaagtaaaatggtctactaatcagagaaatacaaattaaatcacaatgagatatcttacaccagtcagaatggctgtaactaaaaagacaaaaaaaaaaaaaccaataaacagatgttggagaggatgtggcgaaaagagaacccttatgtactgttggtgggaatgtaacttaacaaaacctctatggcaaacaggatggagattttctcaaagaactaaaaatggaacaatctttcaatccagcaatcccactactgggtatctacccaaaggaa

SEQ ID NO: 270873 - DNA, 571 bp, Homo sapiens
gaacagtcagaacaaaacttaaagcaaaatattttctaacatctgcagtcaagtgctctgctggaaaatgtgaaagatggattccctctggtagcaaatgagaaattcagtggatgtatttacaatgttctgtatatattcattggaacatatggctcaatgaattattctacatgataaatctccactgaggcagcctgctaaccattcaggtcccaaaccttctgaaagtggcaaaacctcctgccargtggtgtcattcagaagaacagagggtaagagaaaataaattgcatgcagcattggttatttgagagtgctcctgtgatctgtgtaaagcaaggggagatgatgtgcctgacttcatctgagggttctctgtgtgggtggaggggcattaaacttttatttttttcctaatcagtgattgctgggaaagcacatagtgtttagtaggcagactctggtttccagacatatctcaatctgtttccatctatctggatttgaagcaatctggacctcttccaacattctcttggctctgtggcccatttatcctgagctgtgt

SEQ ID NO: 270874 - DNA, 451 bp, Homo sapiens
gaaagtatactctccccacacccagccccgtctgccttctccagcgtgggctgctgtcttcaaactaaccatcctgaaactgctttaaagagcctgacaggtaatttattctgtggcagaggatagcaatttcattgtccagaggcaagagatccaactatatcagaaaatccgtactctcaaggaacacaggtttaatatgataacgattctaagggtgtgtgttcataattcttcctgttctttcctccccttccctaaagctgctagtgaatgcttttgcagttttttttaagggccctccaaagaactgacataaaataaatcaaatattttaccacgaaaggtgattatcaaacacttatttgtgaaaagagtcaaccagaaggggtcaaggcstagctgctgttatgggatttttgcccacaagtaaaatgtttttaaaaattgc

SEQ ID NO: 270875 - DNA, 552 bp, Homo sapiens
tggtctaagatgcccctactatatattaktgcaggaaccagtgccaccagagtctcacattttacaaactctgttatatttgtccattgatgctgtctcctagcataaaaatatgagctccttgaggacaaggattatatattgcccctcttttctccagttccaagctcagagcctgaaacacagtaggtgtataatagatgtttggaaacacgtgaatgaatgaatgaatgaatgctccatagcagagtatatgagatggcagtgggtatcatgtacagctgaagtacaaagtaaatcttggtgtttcaagtaaatctttgagccagtcaattcaaacagggaccaacctaaaaaactggttgtaccctgttctaaaccagggtttataaatacttaaaatactccattttgtccttttatttatttatttatttatttatttatttgtatttaaaggtaaagctcttttttaatttttattaggacatgagttcaaatgcatcagagaaactacgtctttcgtatatgatttacatggagaccaaccgg

SEQ ID NO: 270876 - DNA, 552 bp, Homo sapiens
tggtctaagatgcccctactatatattagtgcaggaaccagtgccaccagagtctcacattttacaaactctgttatatttgtccattgatgctgtctcctagcataaaaatatgagctccttgaggacaaggattatatattgcccctcttttctccagttccaagctcagagcctgaaacacagtaggtgtataatagatgtttggaaacacgtgaatgaatgaatgaatgaatgctccatagcagagtatatgagatggcagtgggtatcatgtacagctgaagtacaaagtaaatcttggtgyttcaagtaaatctttgagccagtcaattcaaacagggaccaacctaaaaaactggttgtaccctgttctaaaccagggtttataaatacttaaaatactccattttgtccttttatttatttatttatttatttatttatttgtatttaaaggtaaagctcttttttaatttttattaggacatgagttcaaatgcatcagagaaactacgtctttcgtatatgatttacatggagaccaaccgg

SEQ ID NO: 270877 - DNA, 590 bp, Homo sapiens
gtctactgaagttactatgttcaaactttaaaacaaatacacttgaaacccctgggccttcactgtgaggaaacagctcttggatggtttggctactaatttttggctttttagcagtggctttaaataatgaggtgcccatggaaatgcaggggtggaggaggagcaatacagtgacaacaaaagagagaaatctgggaaaatgggaaactttcatgggagataagaaatcttaccgcccttattaggttttctgttctatcagggaggtctcctggctttaataaaatctcattttccctttaaactctcccatgtggtagggccttgtatttaatagggatatataagagaggattccaacctgaggctcaggtggccgggggctccccacactccagtccagcagctgggattgattgcagagctgccagtccagcaacacacaagttgctgcacatcagagastaatcatgagccatttgatgctgacctgcacgaagtgaagatggcagcttggctcccgttcattcccatttggacagagaagctcatcctggtctttattaaaagtggaccaaaggagtaag

SEQ ID NO: 270878 - DNA, 590 bp, Homo sapiens
gtctactgaagttactatgttcaaactttaaaacaaatacacttgaaacccctgggccttcactgtgaggaaacagctcttggatggtttggctactaatttttggctttttagcagtggctttaaataatgaggtgcccatggaaatgcaggggtggaggaggagcaatacagtgacaacaaaagagagaaatctgggaaaatgggaaactttcatgggagataagaaatcttaccgcccttattaggttttctgttctatcagggaggtctcctggctttaataaaatctcattttccctttaaactctcccatgtggtagggccttgtatttaatagggatatataagagaggattccaacctgaggctcaggtggccgggggctccccacactccagtccagcagctgggattgattgcagagctgccagtccagcaacacacaagttgctgcacatcagagagtaatcatgagccatttgatgctgacctgcacsaagtgaagatggcagcttggctcccgttcattcccatttggacagagaagctcatcctggtctttattaaaagtggaccaaaggagtaag

SEQ ID NO: 270879 - DNA, 621 bp, Homo sapiens
gatttgtaagtcaatcattcatattagtcccagtcaccagatattccaccacgatgataattttgtacttattattgtattgtaatagtctaccctaactaacaattttggttcagaaaaaaaaaggtctccttattaatgtcttttctgtgtcctgaccatgtatttttagcaatccaactaaggggttccagctgttaaactctttgaaggataagtacgtatgaagagtttcacccaattacttctcccaggggtcctaagaggctttggggccttaagttgggactacattggcttcaagggtggataagacagaaactgtctcaacctttgggttgtagaattcagggtgggatgagctcaagcctggggctcatgccagccctcccttccaattctacaagattctaggaagcattagccttcattattctattcctcaaagcagggcttctttctggcaagtcccataacatgagaggagcctgaatcccacaagccatgactggcagctcagagcagaggcgtgtccttcacacagctcyggctggaagagacaacattctcaaaagaaaagggccccactgatgaccagtgatgatgagctttttttcatat

SEQ ID NO: 270880 - DNA, 555 bp, Homo sapiens
ctccactggaagcccaaacctcagacgtgagccccaggagataccagcctgtacagcaagccccagtcctcagtagcatcttttagaaaaagttctgrtgctttggccatcatcccgattacgtttgcccatgacatgatccggctgtcatggaataaagaaacatgagggtttcaatgcaaggaatgtttagaaatagagaacgaaaagaatgtgcttgatctcatgttttcactttaatgtattcagagctggcagagaaagggggacatttaacttctaattaatgagttgctccatgtgtccaaacaactctcccatctcttccctcactgcagatgaaagcccaagttctcttggagctgggtgattctctgtgcaggttacatttccccagactctgaacgggtatcttccaccaatcagattgggctctggcacctcgccacctgttcgggcttcaccctggaatccctcatcagcagccacttctgatgcgtaattgacaagaccatagctgatgaagggtatgttacgggcttggctctcaccatc

SEQ ID NO: 270881 - DNA, 566 bp, Homo sapiens
ctgcatcttcctttcttataatggcacagggctgtccaagaatgagacattgaacatttgtaaaatagcagcaattgaaaagataaatggcaaacctggagtttgggaagcagcccagtaggactstcttcctattcagtctcagtaaatacttcttgaataaaccaatggatgtttggctggatggaagagtggatggatgacacctaacagttcttcaaccactttatggactagtgccccattctcccacccccatactgttcatcacaaactcacagttgcttctctacaagctactaaaatggaaaacatctcagcatgtggaaaaattcaactgcatttcagattctagttaaaaaaaaaaagtgactatatcctgccatgcctatataagtcctgcaacggaatgttgctgaatgccttcttgtctgcactagaaattcacactctcttaagctaagtgtatgcccactctacagggactcccgcttccccctggcctcaaagatcattacctacctctttgcgtgaggccaatccatcctcttgacagctcacttacc

SEQ ID NO: 270882 - DNA, 559 bp, Homo sapiens
tccctgtgatcttggagagtctggttcttgggaaggggctctgacttaccctattctcctgcccgatgccttctctagaacccatcatgcactacgtgcttcatacatgcttgcagaatccaatgtgatccttcctttgcaaatgtttttgcaaaaggaaaatggaagtgaccatctcyccgcctcagggggttgttgggaatgttaaagagatggtgcggacatgcagggagaacgtgtgcataacaggcaaggtgggcatcccctccacatcccctctcctctccccttgctagaaaacccatatgcttctgcaaagcaggtgagacgaggcatgggggaggggaggacatcggcacagacagggaaaccaagggacactgcaggaaagcctccaggtgacatgggaggccccatgtaccccaagtgccctgcatgagctgccttctgcctgcccccaccagagaaccctgcagtgaagggacaaattcctaatagcggggacgtcccaggagggtccctttcctggggctctggcccaaagagccagcacctttga

SEQ ID NO: 270883 - DNA, 559 bp, Homo sapiens
tccctgtgatcttggagagtctggttcttgggaaggggctctgacttaccctattctcctgcccgatgccttctctagaacccatcatgcactacgtgcttcatacatgcttgcagaatccaatgtgatccttcctttgcaaatgtttttgcaaaaggaaaatggaagtgaccatctccccgcctcarggggttgttgggaatgttaaagagatggtgcggacatgcagggagaacgtgtgcataacaggcaaggtgggcatcccctccacatcccctctcctctccccttgctagaaaacccatatgcttctgcaaagcaggtgagacgaggcatgggggaggggaggacatcggcacagacagggaaaccaagggacactgcaggaaagcctccaggtgacatgggaggccccatgtaccccaagtgccctgcatgagctgccttctgcctgcccccaccagagaaccctgcagtgaagggacaaattcctaatagcggggacgtcccaggagggtccctttcctggggctctggcccaaagagccagcacctttga

SEQ ID NO: 270884 - DNA, 636 bp, Homo sapiens
ttgctaagtagttttccattacatgaatattttacagtttgtttatccattttcctctagatcgactgattgggcattatgaataatgctgctatgaaaagtcttgtacaaggttctgtagacgtattatgtctcttgaatactcagaagttgatttgctgccacactagtagatgtacatttaactgctaaagtaaactgctgtttttkgttttttgttttttgttttttgtttttgagacggagtctcgctctgtcgcccaagctggagtgcagtggtgcgatcttagctcactgcaagctccgcctcccgggttcgcgccattctccttcctcagcctccagagtagctgggactacaggcacctgccaccatgcccggctaattttttgtatttttagtagagacgggatttcaccgtgttagccggaatggtctggatctccgcccgcctcggcctcccaaagtgctgggattacaggcgtgagccaccgagcccggccagtaaactgctttttaaacaaactactgaacagttttccaaagtggtcatattaggttggtgcaaaactaactgcagtttttcccattaaaagtaatggcaaaaaccaatattatttgttttctttccccca

SEQ ID NO: 270885 - DNA, 529 bp, Homo sapiens
tttaaacccaaaagggtttgaatactacagtggtttgaacagtgtttccctaagaatttgtttccacctataacttcagaatgtgaccttatttggaaacaagctctttgcaggtacaattaagatgaaatcatagtggcttaagatgggccttaaacccagtgactgctgtccttataagaagaggagaggacacacagagaaggagagaaggccgtataaaatagaggtggagatcggagctatcctgacacaactcaaagaacaccaaggaccaccagaagctggaaaagacaagtaagaattcttccctggagcctccagaaggagtgtggycctgctaacaccgtggtttcagatttctggcctccagaactgtgagagaataaacggttgttctaaggcatgaagtttgtggtaatttgttacggcagcccaagaaaatcaatacaagtgaataataagtacccaataaaagtcagctcaacatcatgtgagttttaatctatattctgggtactaccttgca

SEQ ID NO: 270886 - DNA, 591 bp, Homo sapiens
gagcaccccccatgtgccaggcctgatgctgcaagcttgcacataatacaacaaaagaaaaccacacataacgtgtgtaaaactaggcaggatattgtcacagaagaggatagctggatgagaaataattaaggaatatgtgaatgatagatgttgccaagagattgtgctcaaagttttcctttgtttttaatcaatgcatatgtaatgacctgatagtttcattttgcctgctgcccagatagagccagtttatcaagacaggggattgcaatacagaaagatattaagtctcacagagccagctgaaccaaagactggaattttattataactcaaatcagcctccctgaaaattcagaggctagagtttttcaagtatagtgtggaaggctagggaatgggtgccgctgattggttgggratacaatcaaaggggtatgaaaatcggcctttgcatgctctgagtctgcttctggatagggtgataggaccaattagtgggtctgggtggagccattggtagtcagaaatgcaaaaacctgaaaagacatctcaaaaggcctatcttaaattctgcaatagtgatgt

SEQ ID NO: 270887 - DNA, 609 bp, Homo sapiens
tctattatagtacattttacaacatgataaatattcataaggtgtaagcaacartggtgtcatagatgatagatgagggtttgatcaatgctctttgggcttagattgtagaaagatcagggaaaattttatgaaggaattgaagcttgctcgaaggaattgaagctttctcaaaggaattgaagcttgttcaaaacttactatgttctgaagggagtacttctgccctctctgtacaatatcaacaatagcctcctgactgataagacatgtctttagtacttaccccaaacagcctcttccttaagacatttttcgtgactttttgtgtgtttaataaaaattgattgagtgtcttttgtttgcaggccataaggaatgcaatcatggatgagataaatgtgaagaccactggaatgcagtgaggtaagggcaatcagaggcaagtaaacagggctatgagcctttgagtcttccaatttatttctccttcttcttctcaattctgttttgcttaaagttgtatgtttctccaatatgcttatagctcccatttccagcaaagttaattattctaacatgggtgggttttgagtttgaaatgtagtt

SEQ ID NO: 270888 - DNA, 569 bp, Homo sapiens
ctgtactgaaggccacaaacagcctctattctctacctcttggatccattagcaacaagaagttgaagctggaaccactttgcttcactaacctgctgtgtggtgtgatggccacctttacaacacctggcaataataacggtgyaagcaaatactagagaggcaaggcaggtcatgtaagtgagagaagcatgctggctaaaatgtaataatgagtagtggggactggatgtggtgaagagaacttgcactcaatgacggcagagccaggagtgactgtcacagagggaatgtagatcaagggtagggaggaaacctcttttcctttttctttaaatagagggacacactagcctctctccatgctctcatccactcctacccagagataagtgaaggatcgggcctctcaagttaagaggaggacctggacttcatatcccagcctttttcttgctctttctctctggcatttacctgtctgctcctctatgcggtatgtgttacagaatcaggccacataagaaggcctgcagttgtttggtgttgcctgtgactggctgaagaag

SEQ ID NO: 270889 - DNA, 585 bp, Homo sapiens
ataccatttaaactatataagtccaggtgttctcgggaaattgaaagtggagaatgcctctagaagaggaaaagatgattcttgtgataatgtgggaatgttggctcttgagcaaaaattttaaaactgaaataggttggatcagttagttattattacaataaggctgtgcartgcatggcatttcaatagcattcagcaataagcattcttacaggttaatgtgctcactggagttcagctgatctaagctgagcacagctaggccactttgcttctcattgcagatctgcaggtgagctgaaaccgctttattctacatgcctcacgtccttcttggactatcaggctagccatggcatgttcctcaaatagtagtggtagaggcgccagaggggagattcaaatgcacaagtatattttaagaccctacttgtgttatgttttctaacctcctattagccgtgaagccctgtggctgagctcaaagggatggggcagaaaagtgtattccttccatagaggaacagaaaaacttgcatggcaaaagcataaaaactcaaagccaataactgaatctacaac

SEQ ID NO: 270890 - DNA, 585 bp, Homo sapiens
ataccatttaaactatataagtccaggtgttctcgggaaattgaaagtggagaatgcctctagaagaggaaaagatgattcttgtgataatgtgggaatgttggctcttgagcaaaaattttaaaactgaaataggttggatcagttagttattattacaataaggctgtgcagtgcatggcatttcaatagcattcagcaataagcattcttacaggttaatgtgctcactggagttcagctgayctaagctgagcacagctaggccactttgcttctcattgcagatctgcaggtgagctgaaaccgctttattctacatgcctcacgtccttcttggactatcaggctagccatggcatgttcctcaaatagtagtggtagaggcgccagaggggagattcaaatgcacaagtatattttaagaccctacttgtgttatgttttctaacctcctattagccgtgaagccctgtggctgagctcaaagggatggggcagaaaagtgtattccttccatagaggaacagaaaaacttgcatggcaaaagcataaaaactcaaagccaataactgaatctacaac

SEQ ID NO: 270891 - DNA, 584 bp, Homo sapiens
acatagagaaaatcagcctaacagttgtttgtggcagtttagcacagagcaaagccagtactttcaatgtcacagaaatatatatattaaaaatattacgggccgggcacagtggctcacgcctgtaatcccagcactttgggaggctgaggcaggcagatcacctgaagtcaggagattgagaccagcctggccaacgtgctgagaccccgtctctacttaaaatacaaaaattagcctggcacggtgacaggcacctgtagtcccaactactcaggaggctgagrcaggagaatcttttgaacccaggaggtaaaggttgcagtgagctgagatcacatcactgccctccagcctgggcaacagagtgagaccctgtctcaaaaaaaaatatatatatatatgtatatatatatatatgtgtgtgtgtgtgtatatatatataaccagcagcaatggagtttagacatacagtaaaaagatgcattgggttatagatatggggaattctcacagccccacagacaatgggaatagaaaaaatattatgtagaaatgggcactgcaatgaagagaattttaat

SEQ ID NO: 270892 - DNA, 584 bp, Homo sapiens
acatagagaaaatcagcctaacagttgtttgtggcagtttagcacagagcaaagccagtactttcaatgtcacagaaatatatatattaaaaatattacgggccgggcacagtggctcacgcctgtaatcccagcactttgggaggctgaggcaggcagatcacctgaagtcaggagattgagaccagcctggccaacgtgctgagaccccgtctctacttaaaatacaaaaattagcctggcacggtgacaggcacctgtagtcccaactactcaggaggctgaggcaggagaatcttttgaacccaggaggtaaaggttgcagtgagctgagatcacrtcactgccctccagcctgggcaacagagtgagaccctgtctcaaaaaaaaatatatatatatatgtatatatatatatatgtgtgtgtgtgtgtatatatatataaccagcagcaatggagtttagacatacagtaaaaagatgcattgggttatagatatggggaattctcacagccccacagacaatgggaatagaaaaaatattatgtagaaatgggcactgcaatgaagagaattttaat

SEQ ID NO: 270893 - DNA, 584 bp, Homo sapiens
acatagagaaaatcagcctaacagttgtttgtggcagtttagcacagagcaaagccagtactttcaatgtcacagaaatatatatattaaaaatattacgggccgggcacagtggctcacgcctgtaatcccagcactttgggaggctgaggcaggcagatcacctgaagtcaggagattgagaccagcctggccaacgtgctgagaccccgtctctacttaaaatacaaaaattagcctggcacggtgacaggcacctgtagtcccaactactcaggaggctgaggcaggagaatcttttgaacccaggaggtaaaggttgcagtgagctgagatcacatcactgccctycagcctgggcaacagagtgagaccctgtctcaaaaaaaaatatatatatatatgtatatatatatatatgtgtgtgtgtgtgtatatatatataaccagcagcaatggagtttagacatacagtaaaaagatgcattgggttatagatatggggaattctcacagccccacagacaatgggaatagaaaaaatattatgtagaaatgggcactgcaatgaagagaattttaat

SEQ ID NO: 270894 - DNA, 586 bp, Homo sapiens
ttatgtagaaatgggcactgcaatgaagagaattttaatattcagmgaatttaatgtatttagctttcaatacattaatataataaagcaaaattatttgggtcaatagaagaggtgaaaatgatattattagagcattagagcttgattcctttgaatatgttgactgtaacaatgagtgccatgatgaatcctatatttatctttagttaagtgaaagtctgtttaaaatgcttttatccttaatgtatgagcagatgtcattttatttccaataaatggttggtggtctacaggaaaataaataaataaataaaataaataaataaataaataaaaatataattttaaaatgtttcatatctatagtcagataaagaaacttaaacattagtttcacataaatgaataaatcatgaagaaaatcataataatattaataagctggatttaatgaagatatatatatatatgtatatatatatataattcaactaagcctagatctgtttttactcagacatagtcagaaaaaattcaaatgtgaattaggccacaaaaaggttttaacaatttcaaaaaggca

SEQ ID NO: 270895 - DNA, 586 bp, Homo sapiens
ttatgtagaaatgggcactgcaatgaagagaattttaatattcagagaatttaatgtatttagctttcaatacattaatataataaagcaaaattatttgggtcaatagaagaggtgaaaatgatattattagagcattagagcttgattcctttgaatatgttgactgtaacaatgagtgccatgatgaatcctatatttatctttagttaagtgaaagtctgtttaaaatgcttttatccttaatgtatgagcagatgtcattttatttccaataaatggttggtggtctacaggaaaataaataaataaataaaataaataaataaataaataaaaatataattttaaaatgtttcatatctatagtcagataaagaaacttaaacattagtttcacataaatgaataaatcatgaagaaaatcataataatattaataagctggatttaatgaagatatatatatatatgtatatatatatataattcaactaagcctagatctgtttttactcagacatagtcagaaaaaawtcaaatgtgaattaggccacaaaaaggttttaacaatttcaaaaaggca

SEQ ID NO: 270896 - DNA, 523 bp, Homo sapiens
aactttgtgtcaatcaagactatgagtgccattatttcaacagcatgtgctcacttcatgtctctatgtcacctttggataattcttgaaatatttcaaactttttcaatattatttcatctgttaaggtgatctgtgattagtgatctttgtkgttactgttataattgtcttgggatttcacaaactgcatccacataaaatggcaaacttagtaaatgttgtgtgtgttctgattagtccattagctggccattgtcctgcctctctcccactccttgagtcttcctatgccctgagacatagcaatattgaaattaggccaatgaataaccttgcaatgacctctaagtgttcaagtgaaaaagagtcacaagtctttcctttaaatcaaaagctagaaatgattaagcttagtaagaaaagcatgagaaaggccaagagaggatgaaaactaggcctcttttgctaaacacttagccaagttacaaatgcaaaggaaaagattttgaagggaattaaa

SEQ ID NO: 270897 - DNA, 566 bp, Homo sapiens
cacagacagtaattcctctgatggatctaggcaaaataaactgaaaaccttctggaaagaattcactagttcagatgttattaggaacatttgtaattcatgagagaaggtcaaaatagaaacattaacaggagtttagaagttgattccaaccctcattgactttcagtggaggaaataactgtaaatgtgacagataatagcaagagaaactagaattagaagtggagcctgaagaaatgactgaattgctgcaatcctataataaaacttgaattaatgaggagttgcttcttatgyatgtgcaaagaaaatgatttcttgagatggcatctccaccttctcctggtgaagatgctatgaacattgttgaaatgacaagaaaggatttagaacattatataaacttaattgttaatgtagcagcagagtttgggaggattgcctccaattttgaaaaactttcaactataggtaaaatgctaccaaacagtatcacatgttacagaaaaatctttcataaaagagtcaattgatgaagcagacttcttttttttgtaagaaat

SEQ ID NO: 270898 - DNA, 566 bp, Homo sapiens
cacagacagtaattcctctgatggatctaggcaaaataaactgaaaaccttctggaaagaattcactagttcagatgttattaggaacatttgtaattcatgagagaaggtcaaaatagaaacattaacaggagtttagaagttgattccaaccctcattgactttcagtggaggaaataactgtaaatgtgacagataatagcaagagaaactagaattagaagtggagcctgaagaaatgactgaattgctgcaatcctataataaaacttgaattaatgaggagttgcttcttatgcatgtgcaaagaaaatgatttcttgagatggcatctccaccttctcctggtgaagatgctatgaacattgttgaaatgacaagaaaggattyagaacattatataaacttaattgttaatgtagcagcagagtttgggaggattgcctccaattttgaaaaactttcaactataggtaaaatgctaccaaacagtatcacatgttacagaaaaatctttcataaaagagtcaattgatgaagcagacttcttttttttgtaagaaat

SEQ ID NO: 270899 - DNA, 578 bp, Homo sapiens
tggtttgaagccttgatacattttcaatttactacatagagttgaaagctataaaaatacaattcatttcttcactcagtcattcatgtattctcatgtattcatgtattctcaactaatacacactaaatatgtactttgtgtaagacaaggcaatcgctgctgaaaaattcaagcgtgaatacacccattggccctgtttttagaaaactcagattttaaagaaatgtaaacaaattattgtgatacagtatggaaaatgtatagttccttagagaataattgcattttrtgctgcttatggctatggtggtaataacaaggaagaaatgaaatgaaggaaagacaaagtgtaataggttaccctgatacatattacccatatgcctgtatccagatacaagtaccgttaatgataatttgctaagcatgtcagctgtttgtgacagtggatgagcccacccatacgcaggggttgtctatggatcttggaagtgagcataaggagcagaaacctctaaatgtctttcaagactctttgatgcaggatagaaataagactgagaaaagaagggcaa

SEQ ID NO: 270900 - DNA, 556 bp, Homo sapiens
gtcaatttataattggcaattgtagagatacaggcaactaaacagatttatgcacaggaattaaatctttattatatgaagccactgatatttaagaattgtttgttatacagcataatcttaaaaagctgactagtacagaaacaattgtccagggtaatgtactgcatgacaggaatgctaaatgggggaaatttrtttaaagcccccttaaacctctaaatgagaaagaaacttactggaaactgggaaaatgatggctcctatatgcaataataacttgctatctgtaaataacttgggaacattctgtttgacttagctgctattatttgcatttgaaaaagtactattaaacgtgtgtgtaaatagatagatagacagatagagaaatcagataagatagacagatggcccaattgaagggtgacaaaataatgcccatatctgtaacctctcaattaaggttatgcctattaaaatgtttcaggtggataaaagtgctcataaaaaagacttgaaagctgtgagtctcccatatacacataataagctc

SEQ ID NO: 270901 - DNA, 396 bp, Homo sapiens
aggatgagaaatctgttaagccactaaggaaggcacaataatgccttgcttagatgtggctaagaaagacaacagaaaaggaagaacattctaataaatggggtcagagccaagcagtaaaagggactaagaaactrcttttaaggatcaaaatctagatttttaaaaattgattttgcttttaaaaaatcaccttcttacaggaggtattctcattatctacccagtaagatttcaaaattgctacggatcagtgaattctgtatacttccaatttgctaccttcttaacttgatgttgccttgtttattttatatgtagcccacaatcctacaatagtaggttcgcacaaagatatttttgttcatgggtctcaaagaaagtttcatcagaata

SEQ ID NO: 270902 - DNA, 388 bp, Homo sapiens
gaattctgtatacttccaatttgctaccttcttaacttgatgttgccttgtttattttatatgtagcccacaatcctacaatagtaggttcgcacaaagatatttttgttcatgggtctcaaagaaagtttcatcagaatatgagatacagattattacaatactctctgtttargccagttgctttgattgaaaacaacttttgatggatattttttgtagacagtgatttttaagtaagatcagaaaatatatttttgaaattattaaggaagattgggatagtttgttattattgccatttgttcactgccctgtctgtaagaatatatttttctactaaaatgatataaagcttcaccatttcacttatttttcaccagtgaaa

SEQ ID NO: 270903 - DNA, 553 bp, Homo sapiens
tcctttccaaatcaatcagcttacaagtccttgacttctgtagtgctgaaatattaaaccacccttacattaaacagagaaactaaatgtccagaaccaagaacaagttggagaagccttcacagtgttataatgcaagccattgttctttatactaaaatcaaatgcaatggagaagaagcggtaaggtctcaggaacttctttttccataggaggaaaaagaagatattaatrgtgtatctcagtctgaaagaaattaatatcccttaagagcaatagactttttcatgaacttcatttgtaattcatctgcttggccaaatcaaaatgtaacacaggggaacattcaaataaaaagattataagcatttggagaataaaaagagatattgaaagagtgaggattaatataggaaaggatgaagaagatggtaatttaataaaacagctgttccatcttttttttcctattcttgaacatgagagtgcatacttctgcaaaacagaataattactgctttccctacagtaaaacagaatctttctatgctt

SEQ ID NO: 270904 - DNA, 536 bp, Homo sapiens
atggagagagcaagataaacagatacaacattcaaagggccagagcaaaatgcaaacttccaacgtaagtgttctaggctggcttctcaaacttcggcccctgaaccagtgatgcytggcacaatttgagtacataaaaggtcaagagagtgaagagagagagagtttgaatagagtagctaccagctctgaattatgtgggtgccaccgtttcacctttggccaaacctgagaacccttgctaggtctccctgtagagcttcagataagtctatgagtgtttggtagggatgggaggctgagatctgacccttgcctggaagcttggagggaaggatagcgggtgggcaagctgcattgccagctgagctttggtcaggtgcatttagcattatgaaatatacctaatgttaaatgacgagttaatgggtgcagcacaccaacatgacacatgtatacatatgtaacaaacctgcatgttgtgtgcacatgtaccctaaaacttaaagtacaataaaaaaaaaagaaagaaatta

SEQ ID NO: 270905 - DNA, 568 bp, Homo sapiens
tacataaaaggtcaagagagtgaagagagagagagtttgaatagagtagctaccagctctgaattatgtgggtgccaccgtttcacctttggccaaacctgagaacccttgctaggtctccctgtagagcttcagataagtctatgagtgtttggtagggatgggaggctgagatctgacccttgcctggaagcttggagggaaggatagcgggtgggcaagctgcattgccagctragctttggtcaggtgcatttagcattatgaaatatacctaatgttaaatgacgagttaatgggtgcagcacaccaacatgacacatgtatacatatgtaacaaacctgcatgttgtgtgcacatgtaccctaaaacttaaagtacaataaaaaaaaaagaaagaaattacacttccctctaaagaagtgctatacagatgatgcatgctttccagggatcagttttgtgggccttaagagagagaaagctgacctggagcctttttaaaaaaaaaaaaaaagttctgcacaggagagtctcctaggagtattgcatttgcaaaagtgaaag

SEQ ID NO: 270906 - DNA, 597 bp, Homo sapiens
ggtaatgattgggaaactaccttttgggtacagtgcttattacctgagtgatgaaagaatctacacgccaaacccctttgacatacaatttacccatataacaaayttgcacatgtactcaatgaacctaaaataaaagttggaaaaaaacccaggagggatgttattcatacatttaaaaatggcaattacatttatacttctgtaaagatggagtagatgtacattttcttattcttcccactaagtacaactaaaaactctggccattatacataacattattgaaaacatacataaggagactaaaagttgaagagaagaaggttgacaagctggagatctcaagacccaaggaacaacatcatgagagtcccttggttttctttttgccttgtatatcccagactggatactggagaaaccagtaatccagaaacgctgataaaacaggactcaacaacaaaaggaacaaactattgatacagtaaaaacttgtatggttgtcaagggcttcatgctaaatgaacaaaaaaaaaagccaaccctaaaaggtcacatactggatgattcaatttatataatattttctaataa

SEQ ID NO: 270907 - DNA, 600 bp, Homo sapiens
agtcagccctttactctctggagtggtagatacagaagttcaatcctatcctatatttttcttctcctagagagcctgtcagtaacaattatttgttctctccaatattagaaaaatattattcgctcattctctccaagaacagttaatgtagttattgaatccaataatcttcaaaccaaatggcttcttctatcatcacattctacaatactgatcctcttctcctttagtttttcatgagaagacactgacctcattcttaacctttgtctccccggttccctttttatttatttctttgtcctctcttcttgcctcttcactatggatattatccaagatctgattctcagaactgaaactcaattctactcttggcaggcttgactttccagtatagatcaaycaatggggaaggggaagaagcttgatggaatcttgagggttaaccatgaatcagacatctgatccttgtgagggaaaatggatagttcaaattggagtgtccagtatgcatgatgcatttttcctcaattccaatgagtatttatactcaaaaggttcataggtaggatgtcagcaagatggtaaaatagg

SEQ ID NO: 270908 - DNA, 600 bp, Homo sapiens
agtcagccctttactctctggagtggtagatacagaagttcaatcctatcctatatttttcttctcctagagagcctgtcagtaacaattatttgttctctccaatattagaaaaatattattcgctcattctctccaagaacagttaatgtagttattgaatccaataatcttcaaaccaaatggcttcttctatcatcacattctacaatactgatcctcttctcctttagtttttcatgagaagacactgacctcattcttaacctttgtctccccggttccctttttatttatttctttgtcctctcttcttgcctcttcactatggatattatccaagatctgattctcagaactgaaactcaattctactcttggcaggcttgactttccagtatagatcaaccaatggggaaggggargaagcttgatggaatcttgagggttaaccatgaatcagacatctgatccttgtgagggaaaatggatagttcaaattggagtgtccagtatgcatgatgcatttttcctcaattccaatgagtatttatactcaaaaggttcataggtaggatgtcagcaagatggtaaaatagg

SEQ ID NO: 270909 - DNA, 555 bp, Homo sapiens
attttggagctcaaaatacaatgaatgaagttttgaaaaygtaatagagagtttcaacagtaacctcaatgaaacaaaaggaagaatatgtgatctcgaaaacaggtcatttaaaattaccctgtcggtgcagaaaaaaagtaaaaataatttaaaaagtaaagaaagcctacaggatttatgggacaccatcaaatgaaccaattatggaagtcaacgaagaaaaagagagaaaagaaaaggaagctatttaaagaagtaatgactgaaaactccccaaatcttggaaggagtatggacattctggtttatgaatcttaaaaattcccaaagaggataaacctaaagaagattacactgagacccattaaaaagtcaaggagaatttagatagcaacaagggaaaagtgactcatcacatacaaagaaacttttataagactatcagccactttattagatgaaactttgcaggccaggagagagcgggataatatattcaaagtgctgaaagaaaaaaaatacaataaaaatactatacccagaaaagctgcc

SEQ ID NO: 270910 - DNA, 555 bp, Homo sapiens
attttggagctcaaaatacaatgaatgaagttttgaaaatgtaatagagagtttcaacagtaacctcaatgaaacaaaaggaagaatatgtgatctcgaaaacaggtcatttaaaattaccctgtcggtgcagaaaaaaagtaaaaataatttaaaaagtaaagaaagcctacaggatttatgggacaccatcaaatgaaccaattatggaagtcaacgaagaaaaagagagaaaagaaaaggaagctatttaaasaagtaatgactgaaaactccccaaatcttggaaggagtatggacattctggtttatgaatcttaaaaattcccaaagaggataaacctaaagaagattacactgagacccattaaaaagtcaaggagaatttagatagcaacaagggaaaagtgactcatcacatacaaagaaacttttataagactatcagccactttattagatgaaactttgcaggccaggagagagcgggataatatattcaaagtgctgaaagaaaaaaaatacaataaaaatactatacccagaaaagctgcc

SEQ ID NO: 270911 - DNA, 466 bp, Homo sapiens
tgttaattagtttgaatttggtaatcaatgtatagatatatataaaacatcatattgctcaccttaaatatattccatttcatttgttaaktatacctaaatcaagtgaaaaagaagtaaaatactcaatctagttgattgggctagaaaatcagagtccaggcagtagattatatttaatgccaggtggtatacctaccattaaagttaaaattttaatctgtcactcatttacagattgcctttcattgcttaatgaagggagcagggagcagaatcaagcctccagaaagagctacagtgtgtctgagaggcagtctagtggtctgtgatctataagtgtcctctcttccttggggagaatggaggtctgaaataaaagctggaagtaaagccctgccgtatgaaccacactaacttgcatggagataggaaagggctgttgctgggctgttaactaggttat

SEQ ID NO: 270912 - DNA, 520 bp, Homo sapiens
gagaattaggctaataaaaattcactgaaagtgttttgccctgaagaaagcaaggtgcctgccatttcttggagtttatgtgttgacagtgttaaaaaaaaaactggagtgtacaaagaaagttgtcttgcttcctactttatagcctccatctggtcaggaaaggagtaaattgaccacatctgctgcaaatctgtagctgtactattggacctttcagctttgtcactaactctgtcttatccccaaratctgggatactatatcctgtacaggagtatgccaattttcacaacttttgtactcttctctagcattcttcaaattcatattcccttgggcatcctataggataagagttggaaaaatttttatttaaagcaacagataataaatatgttaggctttttggaccaataggacaaattcatgataatatttaaggtatataatgagtgaaaataaatttccacaaaatttttattgataaaattcaaaatataataataataattaagta

SEQ ID NO: 270913 - DNA, 551 bp, Homo sapiens
ctgaggtgcagaacagagcatagcaacagcaatctcttcaagatgaaagaagataggccttggacggtgatagcaggagagctgaaaatcaagcagtgagggtaaaaacaaggttttaaaaaaagtcttagtttgcaagtttttcccaatatttatctgcagatatctatatagatataaaactatagatattttctcctttaaaaataacaaaatttttttctgaatcggtatatattttaaaactatattttatrtatatcaaatatatttatatttatttttatatgaacattttttagagatgaatattaaaatgataggttaaaaatgttatttcagattttatcttaaggattgtaaccacgcaacttatattgcataaaataatttgatattaatagagtatattcattttaatctcatatttcaagaagtggaaagaaagaaaaggaacaacgaaggaaggaagaaaggaagaagagaggttgaaagagagagagagaaaagaggaagggcgaaagaaagaccaagagtaagggagaaaggga

SEQ ID NO: 270914 - DNA, 551 bp, Homo sapiens
ctgaggtgcagaacagagcatagcaacagcaatctcttcaagatgaaagaagataggccttggacggtgatagcaggagagctgaaaatcaagcagtgagggtaaaaacaaggttttaaaaaaagtcttagtttgcaagtttttcccaatatttatctgcagatatctatatagatataaaactatagatattttctcctttaaaaataacaaaatttttttctgaatcggtatatattttaaaactatattttatgtatatcaaatatatttatatttatttttatatgaacattttttagagatgaatattaaaatgataggttaaaaatgttatttcagattttatcttaaggattgtaaccacrcaacttatattgcataaaataatttgatattaatagagtatattcattttaatctcatatttcaagaagtggaaagaaagaaaaggaacaacgaaggaaggaagaaaggaagaagagaggttgaaagagagagagagaaaagaggaagggcgaaagaaagaccaagagtaagggagaaaggga

SEQ ID NO: 270915 - DNA, 363 bp, Homo sapiens
actctcatttgtccatttttgctttggttgcctgtgyttgtggggtgttactcgagaactctttgcccactccaatgtcctggagagtttcctcaatgttttcttttggtaggttcacagtttgaggtcttagatttaattgtttaattcattttgatttgatttttatatatgatgagagacaggagtctagtttccctattttgcatatggatatccagtttccccagcaccatttattgaagagactatcttttccacagtgtgtgtccctggcacctttgtcacagatgaattcactgttggtatatggatttgtttctgggttgtctattcccttccattgtctatgggtctgttttt

SEQ ID NO: 270916 - DNA, 586 bp, Homo sapiens
attagccagtgaaacaaaaaacaagttagttactttctagatataatgggggtacaggcaatgggtaaatacaccaattccaaatgggagaaactggccaaaacaaaggggctacagaccccatacaagtctaaaatcctgcaaggcactcaaatcttaaagctccaaaataatctcctttgactccatgtctcacattcccatcatgttgatgcaagaggtgggttcccatggtcttgggcagctctttccctgtggcttttcagggtacagctgcctcctggctgctttcatgggctggcattgagcgtctgtggcttttccgggtkcacagtgcaaactattggtggatctaccattctggggtctgaagaatgatgtccttcttctcaacatcttcactaggctgtgccccagtcaggactccgtgtgggggctttcatcccatatttcccttccaaaccctagcaaagattctccataaggcctttgcccctgtagcaaactttggcctggacacccaggtgtttccatacattctctgaaagctaagcggaggttcccatacctcagttattgacttcca

SEQ ID NO: 270917 - DNA, 586 bp, Homo sapiens
attagccagtgaaacaaaaaacaagttagttactttctagatataatgggggtacaggcaatgggtaaatacaccaattccaaatgggagaaactggccaaaacaaaggggctacagaccccatacaagtctaaaatcctgcaaggcactcaaatcttaaagctccaaaataatctcctttgactccatgtctcacattcccatcatgttgatgcaagaggtgggttcccatggtcttgggcagctctttccctgtggcttttcagggtacagctgcctcctggctgctttcatgggctggcattgagcgtctgtggcttttccgggttcacagtgcaaactattggtggatctaccattctrgggtctgaagaatgatgtccttcttctcaacatcttcactaggctgtgccccagtcaggactccgtgtgggggctttcatcccatatttcccttccaaaccctagcaaagattctccataaggcctttgcccctgtagcaaactttggcctggacacccaggtgtttccatacattctctgaaagctaagcggaggttcccatacctcagttattgacttcca

SEQ ID NO: 270918 - DNA, 556 bp, Homo sapiens
tcatttgaaactctattggacacaatctgagaccttattcaaaagtaaacgacaaggtaaacaaagatacaatcctggctcagagcaggagttgtatgctcataatcattaattacttagacgtttcctgttgcatcaagatttgaaagaatcctccttgggagtataagagaagatagatctcccaagtgtagayttcctatttacagttccaggaaatcggcttccagctttatgaaagaaagggatgaaataccactgttgtagaaagtttaaataaaactcaatgacagtggtcattgtgcccccaaaattaaatgacttttccttgtaactggcattttaaaaaattcagaagaccaaataaatcaatatgtttcaagtacatattacaaaatatcctttaaacatctctacagtaatacctgtggaaaaccaaagtatcaacctaaatgacctagaagtaatgtagaaaaatgatatgtattcatgagcctaagtttgttaaaggaaatatgatatttaaatgatacaagcaattttcgaatgaaggacc

SEQ ID NO: 270919 - DNA, 538 bp, Homo sapiens
gcttccaccctctgaagcaatggcccaggcagtaccttgcccctttttagtcatggctagggcaactgggatgcagggcaccaagtccctaggctgcacacagcagggggaccctgggcctggcctacaaaaccatttttcctcctargtctctggccctgtgatgggaggtgctgctgcaaagttctccaacatgccctggagacattttcccattgttttggtgatcaacatttggctcctaattacttgtgcaaatttctgctgcatgcttgaatttctcccagaatttttttccctattgcattgtcagcctgcatattttccaaacttttatcctctgtttttctttaaaaactgaattcttttaacagcacccaagttacctccttagaatgctttgctgcttggaaacattttccaccagataccctaaatcatctcccttaagattaaagttccacagatctcgaggtcggggcaaaatgccaccagtctctttactaaaacatagccagagtcatttttattctaattc

SEQ ID NO: 270920 - DNA, 538 bp, Homo sapiens
gcttccaccctctgaagcaatggcccaggcagtaccttgcccctttttagtcatggctagggcaactgggatgcagggcaccaagtccctaggctgcacacagcagggggaccctgggcctggcctacaaaaccatttttcctcctaagtctctggccctgtgatgggaggtgctgctgcaaagttctccaacatgccctggagacattttcccattgttttggtgatcaacatttggctcctaattacttgtgcaaatttctgctgcatgcttgaatttctcccagaatttttttccctattgcattgtcagcctgcatattttccaaacttttatcctctgtttttctttaaaaactgaattcttttaacagcacccaagttacctccttagaatgctttgctgcttggaaacrttttccaccagataccctaaatcatctcccttaagattaaagttccacagatctcgaggtcggggcaaaatgccaccagtctctttactaaaacatagccagagtcatttttattctaattc

SEQ ID NO: 270921 - DNA, 552 bp, Homo sapiens
ataatctgtacagcaaacccccttgacaggcaatttgcctatgttacaaacytgtacatgtacccccgaacctaaaaaaaaaaaaaaacagttggaatgaagaaaagcagactataggggtgaaaatatgggagagtaaagatgactagaagaagctttatgttggcttgtaaagtatggttggtttcttcttcatagtcacgcggaggatgatgtgcactctggtcccctgcaatctggataccaggttcctttctctcttgaccttctgaggttggtagtggtggtggacagagacaagcaagctgaggctggactccttatgcagatggagtagagcacaaggagaaggaaggaagggaaacacatagcttagcactagggtgcttcatgattgttttctgtggtgtgactactgagttttaaatatacttctgaactgaaagaaggctaggaaaggattgcatatactcaaaacaacatattagttgagtggtaaagacagataccagactcaagggattatgggggcagcctgaagtgaagaaatga

SEQ ID NO: 270922 - DNA, 571 bp, Homo sapiens
ttttctttacaagtttggtagaattgaccattcaagccagctaggtctgggcttctcattgagaggttggtaaatacaaattcgatgtctttacttgttataggtcatattttaaaattttattcttgagacaattctgatagtttgtgtccatctataaatatttctatttaatctaggttatctgatttgttgcatataattgttcatataattacccaatagtttaccttacgtctttatttccctaaagtcaatagtaatccccttctttcatttctattattagtttacatcctctctccttttattttcttcactttagctaaaggtttcttaatgtcattgattctttcaaagaacaaacttcaggttttaaggattttctttattgtttctatgttgtctgctttatttatttttttctctaatttttattatttcctgcctcacattttattggggtttagttttctttttctagtcttaagttgaaatgttaggttattgatttgawttttttcttgtttttaacatacacatttatatgtatgaaattttctctaagctc

SEQ ID NO: 270923 - DNA, 450 bp, Homo sapiens
  misc_feature (1)...(450): n = A,T,C or G
tagctggatcctttatttgaacaattttcttctacttgaagactgtaaaaaatttcaaaacattttacccgtgtgccagtttcatggtttnagtgcaagtanatacatttcagttnnttatgtttgtggaaacaaagcacacatgcagaaaaatgcttagtataaatgtacaatgtaatgagttactacactatgaacacttatatatctgatagccaggaacgagagaaaactattactagwcctttaaaaggtccccaaatgccccttactggtgacaacaccctttctccctcccaagttaacctacatttatctttatacttttaacccttaatgatatatctctaaataatatggtttatttttgcctgttttgaactttatgtgaataaaatcacagagtatgtttccttttgtgtataaattattttgctgaaaactgttttt

SEQ ID NO: 270924 - DNA, 618 bp, Homo sapiens
gttactacactatgaacacttatatatctgatagccaggaacgagagaaaactattactagtcctttaaaaggtccccaaatgccccttactggtgacaacaccctttctccctcccaagttaacctacatttatctttatacttttaacccttaatgatatatctctaaataatatggtttatttttgcctgttttgaactttatgtgaataaaatcacagagtatgtttccttttgtgtataaattattttgctgaaaactgtttttaatacctatccatgttattgttgtgtatctatttttaactcattttcgtatctgtgttctgatttataaatatgtcttatttttaaaccattctcccgygatataaaacatttccagtatgggactactacagaaaaagattctataaacattcttctacatgcattctagtgaaactaaatactcatttctggaatgcataaaatgagaaaaactactagtcaaagggtaagactatcttcaacattggtaggtaacatcaaactggttcagagtaagtaacttatatttcaccagtatgtttaacagaatttctgttgttcagcacttgatattcttgctaacactt

SEQ ID NO: 270925 - DNA, 618 bp, Homo sapiens
gttactacactatgaacacttatatatctgatagccaggaacgagagaaaactattactagtcctttaaaaggtccccaaatgccccttactggtgacaacaccctttctccctcccaagttaacctacatttatctttatacttttaacccttaatgatatatctctaaataatatggtttatttttgcctgttttgaactttatgtgaataaaatcacagagtatgtttccttttgtgtataaattattttgctgaaaactgtttttaatacctatccatgttattgttgtgtatctatttttaactcattttcgtatctgtgttctgatttataaatatgtcttatttttaaaccattctcccgcgatataaaacatttccagtatgggactactacagaaaaagattctataaacattcttctacatgcattctagtgaaactaaatactcatttctggaatgcataaaatgagaaaaactactagtyaaagggtaagactatcttcaacattggtaggtaacatcaaactggttcagagtaagtaacttatatttcaccagtatgtttaacagaatttctgttgttcagcacttgatattcttgctaacactt

SEQ ID NO: 270926 - DNA, 618 bp, Homo sapiens
gttactacactatgaacacttatatatctgatagccaggaacgagagaaaactattactagtcctttaaaaggtccccaaatgccccttactggtgacaacaccctttctccctcccaagttaacctacatttatctttatacttttaacccttaatgatatatctctaaataatatggtttatttttgcctgttttgaactttatgtgaataaaatcacagagtatgtttccttttgtgtataaattattttgctgaaaactgtttttaatacctatccatgttattgttgtgtatctatttttaactcattttcgtatctgtgttctgatttataaatatgtcttatttttaaaccattctcccgcgatataaaacatttccagtatgggactactacagaaaaagattctataaacattcttctacatgcattctagtgaaactaaatactcatttctggaatgcataaaatgagaaaaactactagtcaaagggtaagactatcttcaacattggtaggtaacatcaaactggttcagagtaaktaacttatatttcaccagtatgtttaacagaatttctgttgttcagcacttgatattcttgctaacactt

SEQ ID NO: 270927 - DNA, 484 bp, Homo sapiens
cttcaataaatgttgctcgataattataaaaatgaactattgccattgagttaaaaaataatcttatgttcttcttcaccaaatttgcagtgaaatataaaaaagtcaggctaaaataaattttgatcatagaagtcgattatacacatatggacaatcaagcttcattttgtgattacaaaaaaaagttcactctagtttagactgaatcacctttgctcattttcagtgttctcaaaaccgcttcagattttgcttgtaagggctgactagatgactagtgtatgaacsagtttaatatttattagaaataagcaatagcaaaaagtttaaccttgaaatatttctacatacttactgataacctcaaatggaaaccttttctgggagaattcccacatcattcaatatgttttagggtttttagaagttttctgcttccaggaagtccatctgcattaatggcttttatctgataattgag

SEQ ID NO: 270928 - DNA, 501 bp, Homo sapiens
tttttgtcaccacttctttaacataacrtagggacttttaatcagttcattaaggcaaaataagtaatacaatgcataatattaaaggcatctggatcagaaaggaagaaacaaaatgcttttattcacagacatcaatttttgcgtaaaaaatgcaatacaatttactttaaaaaagctattactaataaaatctcagtatataataccaatatacaaaaatcaattgcatttttatagatagcaatgaacaattaaaaactaaaattttggctgggcacaatggctcgtgcctgtaatcccagcactttgagaggctgaggcgggtggatcatttgaagtgcagagtttgagaccagcctggccaaatggtgaaaccctgcctctactacaaactacaaaaattagctgggtgtggggacaggcacctgtaatcccagctactcaggaggctgggacaggagaattgcttgaatccaggaggtggaggttgcaatgagc

SEQ ID NO: 270929 - DNA, 501 bp, Homo sapiens
tttttgtcaccacttctttaacataacatagggacttttaatcagttcattaaggcaaaataagtaatacaatgcataatattaaaggcatctggatcagaaaggaagaaacaaaatgcttttattcacagacatcaatttttgcgtaaaaaatgcaatacaatttactttaaaaaagctattactaataaaatctcagtatataataccaatatacaaaaatcaattgcatttttatagatagcaatgaacaattaaaaactaaaattttggctgggcacaatggctcgtgcctgtaatcccagcactttgagaggctgaggcgggtggatcatttgaagtgcagagtttgagaccagcctggccaaatggtgaaamcctgcctctactacaaactacaaaaattagctgggtgtggggacaggcacctgtaatcccagctactcaggaggctgggacaggagaattgcttgaatccaggaggtggaggttgcaatgagc

SEQ ID NO: 270930 - DNA, 630 bp, Homo sapiens
atggtaattggtgatcctgacaagacaaaggaaaggctctttatagtgggattaagagagaagggaaaaacaggaagtagagacagtgtgtctaaagaattgtttggcagaattttactagaaaagctagatgattatgggagaagtagctgcagagtaagggcttttttgtctctctctctctctctctctctctctgtgtgtatgtgtgttttaagatggtggatgttacagcatgcttgtgtgatgatgtaatgaagctagtagaaaggtaagtcaggataatgtgagagagatggggtggggagatatgaagaggtaagagggtgaattgattaggtaaatagagtagaattcttgagcagcttgaaatttgtactcataaataaaatagygttagccagcaggcttgtattttattctgtagccatgcttagctatgtagaagcactagaggaaagtagtaggtggagaatatgtttgccaagcaagtgttacagaggggaaaaggaggagagaatgtaggcaagggatgactacaataatgaattatgaaatctaagcagggtaagaagaaggtaaaaacaaaaggagattaataaatggggaagatgtggcaggatgaatgga

SEQ ID NO: 270931 - DNA, 551 bp, Homo sapiens
tagtttaataaatttcacgtcaaagcctttggaatatatgtgtaatattcattgagctcttgcctagaacagtgttaaacaatctttatgcatcaatttatttaaagtttacaataaaggtttgagacattctcatttcctaaactatgagtttgagtgaagaaaggtcatggcattattgcttgggcaagaactgcctaacgtttcttctaaaataagaataaaattattttttctacgagtttatttttagattgaaataaaatgttacatgaaaacttcctaatacagtgttgacatgcagccasaagtttctacttccagctttttctcatctttgcctcggcttctttctggccattggctcttcctctgttcacttatatagcaggccaggagtgccagggaattaccacattcccaagagcaatcatcagcaaatgactgacgggaactagtgcaaaaatccccagctccttcaccccactgagccacatgttctgtgctgattccaagacttccctagtgggattaagtttcagttgtctgaa

SEQ ID NO: 270932 - DNA, 447 bp, Homo sapiens
ttattatatatgcccagtaaatatttctgaataaataaaattatamattaatgcatgaataaataaattgataggtaatctctgggaccatgtagaataattccaatactgaaaaatgactgttatactaagccttcagtctttcaagctgaacagttcctttcttcaagctgttagtcaaattcctcactcattgttcttctatgaatactttctaatctgttaatgcttctttaaagcatattcttctataactctgtgattgcatcttaaggctcagctgatttttgcttttattttactatttgtttaatatttgtttggttactgaccatattattgactcaacacgagtatggagtaggatagaaatcctagaatgttctcaaactgtacttgtgtaggtctttatatatcaatattctcattgctagattggatccattt

SEQ ID NO: 270933 - DNA, 447 bp, Homo sapiens
ttattatatatgcccagtaaatatttctgaataaataaaattataaattaatgcatgaataaataaattgataggtaatctctgggaccatgtagaataattccaatactgaaaaatgactgttatacyaagccttcagtctttcaagctgaacagttcctttcttcaagctgttagtcaaattcctcactcattgttcttctatgaatactttctaatctgttaatgcttctttaaagcatattcttctataactctgtgattgcatcttaaggctcagctgatttttgcttttattttactatttgtttaatatttgtttggttactgaccatattattgactcaacacgagtatggagtaggatagaaatcctagaatgttctcaaactgtacttgtgtaggtctttatatatcaatattctcattgctagattggatccattt

SEQ ID NO: 270934 - DNA, 447 bp, Homo sapiens
ttattatatatgcccagtaaatatttctgaataaataaaattataaattaatgcatgaataaataaattgataggtaatctctgggaccatgtagaataattccaatactgaaaaatgactgttatactaagccttcagtytttcaagctgaacagttcctttcttcaagctgttagtcaaattcctcactcattgttcttctatgaatactttctaatctgttaatgcttctttaaagcatattcttctataactctgtgattgcatcttaaggctcagctgatttttgcttttattttactatttgtttaatatttgtttggttactgaccatattattgactcaacacgagtatggagtaggatagaaatcctagaatgttctcaaactgtacttgtgtaggtctttatatatcaatattctcattgctagattggatccattt

SEQ ID NO: 270935 - DNA, 484 bp, Homo sapiens
gaaaggaaggaaggaaggaacgagaagaaaaaagaaaagaaagaaaagaaaattattttctcactactttgaaggatgctataggtaaaggcatccctagagaatatgacaggcatgatttttttaaaagatcattaagtgccctcaaaaatccactacattgtcttaaacatgtgcaaatcattgaaataacagatgttgtgataggagtagagacaccaagaaacatagaaagtacaaattaaaagcagtattaaaattaaatgtggtagataaaaatagatcaacgtacaataaggttatttaatataaactgaaaacaaccagaatgattttttaaaatacataacataatactgctggttaaaattccttaatggcttccaatgcatttagaatcaagttccaacaattggasttttagttgtttaaaatgactctgtgtgtctgtgtgtgtgtgtgaaaaactgtgtgtgtatgtatt

SEQ ID NO: 270936 - DNA, 566 bp, Homo sapiens
gatataaatggaaatattgttcactgtgtttaaaaaattgaaagaraagtaatgttttttccactttgggttgctaaagtgccattctaaacaactcaaatttgcttttttgtaacagagatctgtgaaaaacataaataaataaatagcgtatgttgctaatttctccctttgactcctgacccgaagaaaagcacggtgaattgtaaactgtccatgaacattatgcatcgcttaaacacctttacccaggtattctaggtaagttgagcaggttaaaaaactaatgctcactaccaaattctgctgggagctttccccacagctatggcttcagaaagtgctatgctggtaaaactaagcagggaggagccggacaatcagaaagcaagctgtggaaccactataagcagcaaggctaaatgtatatctagcatggccagttgttaatagtttccgggggggggggccctattctcctttgaaataaaataggggatagagccatacaaataaaggattgaggatctccttgacattcatttccatctcttctggaagagcta

SEQ ID NO: 270937 - DNA, 588 bp, Homo sapiens
aagtagctcattatatcttcacattataagtaaattggtggtaatactatttcaggcattactaacaatatttgatggtaaagaagaattaataatggacaccacctattagctttagttcatggccttgaaatgagctttgtttgacaaagacttccactagataatgcttctttacataaatagggtttactcaaaatatagatgcacacagatgctaattaacaattgacaggacataaaagaacgaacacaagttgcatgattatctcctgtgctctggcttactgtatccttttatgaagcagcccaaacttggagctaagtaaactaaaaccgtgaaatttgttaattggcaatagaagtagtgacaaaaataatagaagatccagagaaagccgaagttatgcatgagtagagactaagtttgcagagaaaacagcagtaaggagagacaataaagcagatgagtgacaactgrtagacaaaacagagaggtttcccatggttccagagaggggaggagagtaggttgtgtgtatggttgtctcgttttgtaataaattttctgttcaacttcagcctaca

SEQ ID NO: 270938 - DNA, 580 bp, Homo sapiens
ttgaattactcagttcaattacctattttgaaaaccaatagaatttgagagcataattataaacaattgtcattgccataaaaactgaattgaatattttgaaaagaaagaaagaaaaaaatgtttttaaagtactggggaattagatgtgggcaagttaattctaaaaggttgaggaacaaataatattccatccatatttgactttacatcaatatttggcaaacaaatatacacttttatatttaagttgaaatataatatgtaagttttaaatgtgttttttgccacaayttaaagtggattttagttagtctactattttcctgagccctcttgcattgtataatagcacttttactaacctcttattacttgaagttgaactaaagtgagtttattattagtccccctttcctcaccgaaaaatccaaaaacaaaccaaaaaacacacttttcttttttcccccaagacagggccttgccttgttgcccaggctagagttcaggagtggcctgatcactactctgcagccctgacttcctgggtcaagcaatcctcctacctcagtctcccaag

SEQ ID NO: 270939 - DNA, 513 bp, Homo sapiens
ggggttcaggacacagttccctgaaatattactgtaggagatcagaataygccacctcaaaatatgtaactttagcatattgcttactttgagctaaaagaaactgagatccaggcagcacaggaaacgttctttatagccccctcaattgcctaaaataaagtataaaactccccttctataaaggaaatttacatctataaagaaaattttcactggtaagagagctgctctaagacatcttttatcacctgagaggcttatctgatgaacaaggcaaactttattcaccatattcccttcctttcccctcctataatttgcctgcagcacccctagaacaccccaaatccctattcctttgtgtatctcaggatgatataagccttaattatctggcttcctatttgggcctgatatatttgtgggactcctgtgtgtacaaacataattaaaattgtatttcttctgttaatcagttctatgtcgatttagttcatagatcaaccaaag

SEQ ID NO: 270940 - DNA, 637 bp, Homo sapiens
tcttcctcttttgttattattaatacagcttaattgataagctgcctactcctatatatgttagcctcttaagactaatgtctgagttggactatttcactctggttttctttataccccaatgatactctccaatcattgaaatgccttcctcgatctcatgcattcaaatacgtcagcaggtcttgttccgcttaggttcttggtccaggttactggatcaacacatcttaatcctgataggcacccaaactcaaacttgttttatttttttttaatgccacataatggtgaattagtaaaaaaaaaattttgtaatgattcaacatctagttaacaagtgctctaaagtggtatacacatgtactatgatatgtaaaatttgtgaataatttgataaagcaagccattttttcctattatttagaatgtttataaaataaataaaaagcattaaatgcatctgtagatgatgtaagaagagatggtgtgtataattttaaaaaatgatactttgtctagaaaaaaattctaaaaaggccacttatccacatggaatgttagaacaccctgcattacatggaaagcctattatctgatacyaacagtcaaagtagataagaaccaaaaccttaat

SEQ ID NO: 270941 - DNA, 612 bp, Homo sapiens
tataattaccacagaaattttgctgcaatagttattattacaatcctcattttcatrtgagcatgctaaaactcaaaggaaaacctgaccaagttcacaaactgataaatgaaagagccaggaataaatccagactttttatattccaagttttcaagtctttccactccaaccataagcctttcatgaagtcaacttatccttgcgaaatgactttcttacaatgtattacacttgagttggtattttagcactttttagcactgttagtatcagtgaatatgtgctaagttgtatccacagtctgtaacacacacacacacacacacatacacacacacacacacacataattattaactacggaccctttaaatgcagttacaagtacaactacaaaaacacttgttttaagagtagcagtcttcattacagaaaagagagccctcaatcattaagatactaaatgtcatgttttactatgtaacactttcatatcaaaacattcctgatcataacccaataaaactcagggcatcttcctctgaattattcagtctttactgattttttggctctgaattaaaggataaagcataattcagcaactaa

SEQ ID NO: 270942 - DNA, 543 bp, Homo sapiens
atttacttgactaagataccaggtatctccaaactcttgggcttcagctaaagctgcattcttttcattaaaggccagggtttgatctaacaatagcatgacatctctccaagtgaggtctgaggtttgcctttgtccctgtaggacatctatatacctatcaggattatctgaaaacttccccaggtctaccttgatctgctttaaatcagagagggagaagggkacatgtaccaagcttgggccaaattcccctccccatacagcttgaaggggacataaccaatagtccaggggtttttgtggtcccttggagatttctttgcttgtttccttctgggtgggggagattagaggaggcttatcattattaggaaggggagctgtaaggaggctaagatatggaggtaagctgagaggtcctcttgaggaatgtaaattgcaagctttgcatagttttggattatccttcaatgaaaagaaagcttggacataatgtatttcactccatttaccttctctcttacagaaaaggtcaagctg

SEQ ID NO: 270943 - DNA, 551 bp, Homo sapiens
tagcagtgcattttttttctgtgaagacagcaaatacgtaagcatcactggtttctagttttccttttatgaaaataatagctcaatgctkcttcaaggttatattatttaaaagatatactgtgtgtgcaaacagagtacctgtgaagctttacaaaacatgtgtctaaaacagagctgtttagtttgacagagtttcaaatgccaagagattgtgttgaatgcaaaatcaagttctgaaagtgaagagctgaaaggtagttggatgggtttgaatcttgacaaggttcagcacttcttcatctcaagatgacaatcaacacatccaagattcctctcaaggttttctaaacggtgccttgggattgtccattaagaagctttttggtctaatgcttatatattatacaaggtataatatacaaggtaaatgcttgtatttttttaatcacaagtactatatcattgtgcaatgtattacatagatgaaataattcaacactcaaattctaagagatgaaaaatatgccaaagtgtttcatttcgctgaa

SEQ ID NO: 270944 - DNA, 583 bp, Homo sapiens
tgctttacaatgacatctcctwttgctacctgtctgtttctcagtgaaaaaggaaacgtgttctttaccatgcttttttttttccccttggtcagtgccaaagatcaaacatcctgatttctattgcaatttaatgccacttctcttgtttcccatacctatttggtctacttctattaaaggatgtaatttcccacatagttgcgtatgagtggttttgaggaacagtctctccataatcattacattaaaatattttttaaaaaattaagcatagaaaattatattttggataggtaaaatttttttagctaaatttgttgcagagtaactccactgtatattagcttttgtgaaagtttaaataaaatgagcagagaccagttgaaactcagacacaattgaacctgagacgtaagtactggagactagaactggcaacacaaagcatcaatcaaccccaggacagcctaacatttaataaactgctgacattgatgagcatacgagatttccaggttcataattaaacaaacaaaaactgagctgagattatgtcacactgggatccttaactataact

SEQ ID NO: 270945 - DNA, 583 bp, Homo sapiens
tgctttacaatgacatctccttttgctacctgtctgtttctcagtgaaaaaggaaacgtgttctttaccatgcttttttttttccccttggtcagtgccaaagatcaaacatcctgatttctattgcaatttaatgccacttctcttgtttcccatacctatttggtctacttctattaaaggatgtaatttcccacatagttgcgtatgagtggttttgaggaacagtctctccataatcattacattaaaatattttttaaaaaattaagcatagaaaattatattttggataggtaaaatttttttagctaaatttgttgcagagtaaytccactgtatattagcttttgtgaaagtttaaataaaatgagcagagaccagttgaaactcagacacaattgaacctgagacgtaagtactggagactagaactggcaacacaaagcatcaatcaaccccaggacagcctaacatttaataaactgctgacattgatgagcatacgagatttccaggttcataattaaacaaacaaaaactgagctgagattatgtcacactgggatccttaactataact

SEQ ID NO: 270946 - DNA, 560 bp, Homo sapiens
taaagctccacttcactgttctgcagaaaataatcttatttctttttgtgttctacatccttgttattgaaactgatttcaaaatcctgagtctttgtataataacaagctatgtggtggagttgaaatagaattatcaattgaattcattacatttactcaatgtaacctgtcaggcatcaacaaagagttaaatcttcctgtgtggccaattcttagtgttctacaattttcagctttttagctcttgcagctcttcaatcgatctggtaaacagstagcattttgcagttttagtgaaaattctaatatgttgtagagaaacctttcctactcccacttctctgctgttcttaaacaaatggagtttatttgccatgtgcagaacatcctatgcagctgtcttcctaaaaacaccgtgttctaggtcatgcatttcattattgtgtgcatgatcactgttatgctgcatttgtacttttctcagaatttcttaggactatctaaagctggttctttgtacatatattgtgaagccatattcttggggacccagctct

SEQ ID NO: 270947 - DNA, 580 bp, Homo sapiens
acctgggtggtgaaataatctatacaagaaacctccatgacacatgtaatttacctaggtaagattctagagttttgcatcctcacagattcttggctctatttgttgtagtagctttgtccagtcagctaatgtactgctaatctttattccctgagcagcattcatgtaaataccagtgtttatttgatcttgggcaaaaccagaattgtctacccataacctaccaccaatctctcaaatcacaaccaggttgcagcctcaaaggaggaaggtgttctgggataggaaacattaacyattgtgaccacaaatcacaaatttcttacctcatttcatgtgagatcaatagtgatgcccatttgtacatttttgtttgttgaactcatatgagaccttaaaggacagtcaatattcactcaaattttaaatagggaacagaaaagaatgacatcatttgttttggaatctttgaagacactatatgttcttgcccctattgtgacttgttatcttctgggaactttttaagtcatacacaacagtcacaattttattttcccacacccctatcaattgc

SEQ ID NO: 270948 - DNA, 580 bp, Homo sapiens
acctgggtggtgaaataatctatacaagaaacctccatgacacatgtaatttacctaggtaagattctagagttttgcatcctcacagattcttggctctatttgttgtagtagctttgtccagtcagctaatgtactgctaatctttattccctgagcagcattcatgtaaataccagtgtttatttgatcttgggcaaaaccagaattgtctacccataacctaccaccaatctctcaaatcacaaccaggttgcagcctcaaaggaggaaggtgttctgggataggaaacattaactattgtgaccacaaatcacaaatttcttacctcatttcatgtgagatcaatagtgatgcccatttgtacatttttgtttgttgaactcatatgagaccttaaaggacagtcaatattcactcaaattttaaatagggaacagaaaagaatgacatcatttgttttggaatctttgaagacactatatgttcttgcccctrttgtgacttgttatcttctgggaactttttaagtcatacacaacagtcacaattttattttcccacacccctatcaattgc

SEQ ID NO: 270949 - DNA, 609 bp, Homo sapiens
acagtaccctctccacaagtgccttgggggatgaactgcaatagaaaaggagaccagtgctgcccctgttgtggagcccccacaggagaagcctccaatgctacacaaaggcatggcccccattcctgaaaactcttgttactcagatgggtagagcctaggcaccccttgtgcatgggtggcagtagytgtacaatcgtagacagataccatctggtttgagatgggaatgcagcaatgcagtcaatgggcagaactctgagctgcatggctggtttgtacccaagagctgtgacctatagttctctgtacaggcactatggcagtatttaagatcttacaacatggcttgcacaaagggcccgagataactaacatgtatttaagaaacccttatggagagctgccatgtaaaaaaatcatttgggaaggctacaagaatatgctgtgagcctaattttgtatcatgttttagcacattggctagattcatcccctggtaacatggaggctgataccctagcaaaaattaggacattggctccctggcaatcctctgaactagcttattgggtacgtaagcatagtgggcatcacattgtttgcata

SEQ ID NO: 270950 - DNA, 585 bp, Homo sapiens
ctcttttttctaagcacatgtgtatgaattattttatattctcaataatgctggtagcaagtggaagatattgtgctcttacactgaggcaagaaactgctacttccaaagttgagtcttaacctaacctctccagcaatttttactttcatatagtgcattaataccacaggatagactagggcccctagttttccattctaaagagaagatccatattcaaggaagatgactaataaaaaagataaacagtcatgtaaaacataagcaaaaggtgaattgaaaaatatagtaaaatatatttatagttaagtgaaacatagtgcagtttacataggacaatcacatcataaatattgaaatcaagggtgatttagtaccagattgtctctaggcccacagayagagccaaagcatctaagaaaagaacataagatataattagtttaaggactctgacagagagttaattacagaataaactctgttatctgttgtagagaggaaatttgctgtccttgttaaacagattttttaattaataaggaattattacatacactatatggcaggattatcaatttt

SEQ ID NO: 270951 - DNA, 506 bp, Homo sapiens
ttcagccacaatttaccataaaaaaacccgaatatactttctttctcaacaagtcaggaccacctgcttattagtataatatgcaaataaatttgttaattagtttatcatttttgttaatataatacgtgcatatagtttatgtgccaaatagtactgaaatgctatataacataaggatgtaattcattatttaaaattctctgagaatatcagctgatacttttgagaaatttttctacttctgataatgtctgcatttgcccttctttttttctgtttagttcagtatttatttctgaatatgagacttaccaggtatctggtgattcttggctatttgtgaagattaagatactaataaataaatgaaagccttttaraaaaaaaactttgaaatactttcatcaagtaacttctaggtttgtttatgttccttcatcataacaggtttcttctatatttttatctcttttgctggcttctcttgttcacaaagtttaaat

SEQ ID NO: 270952 - DNA, 386 bp, Homo sapiens
cataatagaactagttaaaagaagttcctaagccagcacctatgaaaaacaaatcaagtagaaattggaggaataatatttgtgtattttctttcaataaatcaagcagcaaagcaccaaatgatctgatgtgttggctctagagatctgatgtgaacctaaaaaactcaatttgaaaattgattacaagatacttgaaatcacatcgaagatgaaaataagaggtggcaattatctggaatcttccagccayggatctaatttatggcaagcatccagttctgtgaaacaattaagagggatttaatatatttttttatttcatcttcatctgataaaaatgtggttgcttattttttcaataactaaaatcagagtgctacagt

SEQ ID NO: 270953 - DNA, 386 bp, Homo sapiens
cataatagaactagttaaaagaagttcctaagccagcacctatgaaaaacaaatcaagtagaaattggaggaataatatttgtgtattttctttcaataaatcaagcagcaaagcaccaaatgatctgatgtgttggctctagagatctgatgtgaacctaaaaaactcaatttgaaaattgattacaagatacttgaaatcacatcgaagatgaaaataagaggtggcaattatctggaatcttccagccatggatctaatttatggcaagcatccagytctgtgaaacaattaagagggatttaatatatttttttatttcatcttcatctgataaaaatgtggttgcttattttttcaataactaaaatcagagtgctacagt

SEQ ID NO: 270954 - DNA, 386 bp, Homo sapiens
cataatagaactagttaaaagaagttcctaagccagcacctatgaaaaacaaatcaagtagaaattggaggaataatatttgtgtattttctttcaataaatcaagcagcaaagcaccaaatgatctgatgtgttggctctagagatctgatgtgaacctaaaaaactcaatttgaaaattgattacaagatacttgaaatcacatcgaagatgaaaataagaggtggcaattatctggaatcttccagccatggatctaatttatggcaagcatccagttctgtgaaacaattaaragggatttaatatatttttttatttcatcttcatctgataaaaatgtggttgcttattttttcaataactaaaatcagagtgctacagt

SEQ ID NO: 270955 - DNA, 386 bp, Homo sapiens
cataatagaactagttaaaagaagttcctaagccagcacctatgaaaaacaaatcaagtagaaattggaggaataatatttgtgtattttctttcaataaatcaagcagcaaagcaccaaatgatctgatgtgttggctctagagatctgatgtgaacctaaaaaactcaatttgaaaattgattacaagatacttgaaatcacatcgaagatgaaaataagaggtggcaattatctggaatcttccagccatggatctaatttatggcaagcatccagttctgtgaaacaattaagagggatttaatatatttttttatttcatcttcatctkataaaaatgtggttgcttattttttcaataactaaaatcagagtgctacagt

SEQ ID NO: 270956 - DNA, 517 bp, Homo sapiens
gtggaagagaggtcaggtttcctatatataaatctacactcttatgaacattgtgctttctgttttgtgttgttagttgtttatagcaatttactttgaaatctttgaagatttaacagattttgtccttttaaagtttttttcacttctgattttgtcacatcaaacatgctagaaaatgttaataaaagaygaatatttcattttaagtcttctgtttcactgcaaaaacataatacatactttagagcaaagcatcaactaatacactattttgagtgtcctgacagagcatcaagactgaagattttattgtcggaaaaagaagcataataatctaccatcaagaaatcaaagttcttatcttgatgtatcatattgggcaagatgcttcccttctctgtgtttaatttctttttggtggtaaaagaatatcacttcctgcctggcctgatcacagtgttgtggtaaaatgtatatgaggtattaacaaatacacttaaaaagataaacacaa

SEQ ID NO: 270957 - DNA, 517 bp, Homo sapiens
gtggaagagaggtcaggtttcctatatataaatctacactcttatgaacattgtgctttctgttttgtgttgttagttgtttatagcaatttactttgaaatctttgaagatttaacagattttgtccttttaaagtttttttcacttctgattttgtcacatcaaacatgctagaaaatgttaataaaagacgaatatttcattttaagtcttctgtttcactgcaaaaacataatacatactttagagcaaagcatcaactaatacactattttgagtgtcctgacagagcatcaagactgaagattttattgtcggaaaaaraagcataataatctaccatcaagaaatcaaagttcttatcttgatgtatcatattgggcaagatgcttcccttctctgtgtttaatttctttttggtggtaaaagaatatcacttcctgcctggcctgatcacagtgttgtggtaaaatgtatatgaggtattaacaaatacacttaaaaagataaacacaa

SEQ ID NO: 270958 - DNA, 505 bp, Homo sapiens
aatctacacaccttaacactgaatgctgtgagagaagctgcagagaacaccacctctcagcaaaatatatagttagaattatacttcttgctgactctaagggacccatgttttgctgtggcatagcacaaagaactcagtactcaagctgtggtctaggcaaaacaaattcaccactgtgctttgcttctttatttcttatctgtgttcttgttggcacctctcttacctatgtaaagactctctatctataatagcaaactcttccttttgaacccacagaatatatgaataattgaccccagaattcattgcctttgagtccagtatcagaattcttcaaaacaagacacagcayatgactattgacaataaacagaaatttatgtgcaagacgaagagtatttgctactcttgagctacaacttcagtaatttctaatcttccagtcatatgtataccttttaagagtggcctcctggggtaatgcctttgctgcagaatt

SEQ ID NO: 270959 - DNA, 600 bp, Homo sapiens
aagagttctaatggaaaaagtagrcaatgtgcaagaacagactagtaatgtaagcacagaggcagcaaatcttcgaaaggctcaacaggaaatgctaaaaattttaaaaattgcaagagaaatgaagaatgcctcacactgacgtcagtagaacatgaagaaaaaaatcatgagtttgaggttatgttgaaatgcaaaaagaaaagaaagtttaaaaaaacagcagagcatccaaaaactggaacaatttcataaggtataatatacatataatcagagtttcaggggagaagacatagagaaaagagtagaagaaatatttgaagtaatcatggtggaaaactttccaaaaataatggcagacacgaagtcacagatccaagaaactcagagaataccaagtaagcaaatgccaacaaaactatacctagtcatagcattatcaatctacagacaaacaaagacaaagaaaaattcttgataaaaaaaggagaaaaaatatcttatctacagaggaaattatgcaggtaagaagaaagtaaagaagaatgtttagagtgcttaagaaacatccacacatacacacaatataacctataa

SEQ ID NO: 270960 - DNA, 600 bp, Homo sapiens
aagagttctaatggaaaaagtagacaatgtgcaagaacagactagtaatgtaagcacagaggcagcaaatcttcgaaaggctcaacaggaaatgctaaaaattttaaaaattgcaagagaaatgaagaatgcctcacactgacgtcagtagaacatgaagaaaaaaatcatgagtttgaggttatgttgaaatgcaaaaagaaaagaaagtttaaaaaaacagcagagcatccaaaaactggaacaatttcataaggtataatatacatataatcagagtttcaggggagaagacatagagaaaagagtagaagaaatatttgaagtaatcatggtggaaaactttccaaaaataatggcagacacgaagtcacagatccaagaaactcagagaataccaagtaagcraatgccaacaaaactatacctagtcatagcattatcaatctacagacaaacaaagacaaagaaaaattcttgataaaaaaaggagaaaaaatatcttatctacagaggaaattatgcaggtaagaagaaagtaaagaagaatgtttagagtgcttaagaaacatccacacatacacacaatataacctataa

SEQ ID NO: 270961 - DNA, 600 bp, Homo sapiens
aagagttctaatggaaaaagtagacaatgtgcaagaacagactagtaatgtaagcacagaggcagcaaatcttcgaaaggctcaacaggaaatgctaaaaattttaaaaattgcaagagaaatgaagaatgcctcacactgacgtcagtagaacatgaagaaaaaaatcatgagtttgaggttatgttgaaatgcaaaaagaaaagaaagtttaaaaaaacagcagagcatccaaaaactggaacaatttcataaggtataatatacatataatcagagtttcaggggagaagacatagagaaaagagtagaagaaatatttgaagtaatcatggtggaaaactttccaaaaataatggcagacacgaagtcacagatccaagaaactcagagaataccaagtaagcaaatgccaacaaaactatacctagtcatagcattatcaatctacagacaaacaaagacaaagaaaaattcttgataaaaaaaggagaaaaaatatcttatctacagaggaaattatgcaggtaagaagaaagtaaagaagaatgtttagagtgcttaagaaacatmcacacatacacacaatataacctataa

SEQ ID NO: 270962 - DNA, 458 bp, Homo sapiens
cttactggtcttattccctcagcactgttattttctgtgtggatttttttctttggcaaataggattacatcaatcttataactactcattccaagggaatagtggtacctatctttcagtggtttcaccaaaacaccacagaagcattcatccatactagktgttttggttttatttgctttctcttaaactactgcagccaggaatgtactgttctgactggccatggcttagtcatgtgcccagacttatggcattgggtctgaactactcggaacaaattcatcataaagaaagaaaatatctattaccaaaagaaggaaagaggagaaattcaaagtggccaaacagataattttagtcatcacaatggctattaaaataatgtcttcagagtcatttaactgagattagaaaattgggatagatttaaatgaatagatgagatattgtattg

SEQ ID NO: 270963 - DNA, 458 bp, Homo sapiens
cttactggtcttattccctcagcactgttattttctgtgtggatttttttctttggcaaataggattacatcaatcttataactactcattccaagggaatagtggtacctatctttcagtggtttcaccaaaacaccacagaagcattcatccatactagttgttttggttttatttgctttctcttaaactactgcagccaggaatgtactgttctgactggccatggcttagtcatgtgcccagacttatggcattgggtctgaactactcggaacaaattcatcataaagaaagaaaatatctattaycaaaagaaggaaagaggagaaattcaaagtggccaaacagataattttagtcatcacaatggctattaaaataatgtcttcagagtcatttaactgagattagaaaattgggatagatttaaatgaatagatgagatattgtattg

SEQ ID NO: 270964 - DNA, 497 bp, Homo sapiens
atttctaaaatgtgatgtattttggctctatttgaggactgtatcttragagaaaactaatgcactggcacataataaatgaggaaaagccacaatataaagaaaattcagaaccaatgcatagaaaaaatgaatgaaataagagagtctacttagatatttagcctggaaaagaaagaagactgaaatattctcatatctaggtagttttggaaagccgaactagttctacagggagaaagacatgcagtaacagaattgggatcagaatgaagaacaaatttttaataaagtcattctacattgcaataagctacttatgttaaattccctgtcattggagtggttaaacctaaaatgaacaacttattattcagagaattgtagaaagtctttctatatcagattagaaagctcaactccactaggtgacttcttcagtctattctgaaccaaaatctattctgctgtaaatagatggagaacaacaggataga

SEQ ID NO: 270965 - DNA, 589 bp, Homo sapiens
tatacatttcaagggaaatggaaattatgtcataaagccgtaatcatctcacaggcttttaaaaatttgctgagactttcatacacagatgctaatctgattaataatattgacttttcatttacctgaatggaaataagactgatggagtaaaggcaaaggatgaatagaacagggataaatctctgtggtctttgaaatagagggaaaatagacaaaataggaagaaagctgtgtttcaacagtattaackatttcacttcaatttcacagtcatgccatgcgacagcaagtggactagttacttggaatcgataataacagcaaaagaggcaaaacaggaaaacttaaatagcaaaggtgaaagcactgtcagcaatgtgaagtgtgacttcatcttggagaagagtcaaagcaaagcagatgaccaaatttgtgatcattttctataagagttatgaactgaattatatctcccctaaaatatatatattgaagtcctaaaccccaataactcagaatatgagcttattaggacatacgattgttgcaaacacaattcattaaatgaagatgagatcatactgtt

SEQ ID NO: 270966 - DNA, 423 bp, Homo sapiens
ctaccattgatgggcatctaggttgactccaggtctttgttattatgaatattgctgcgatgaacctacatgtgcatggatctttttgatagaatgatttatattcctttgattatatacccagcaatggaactgctgggccgaatggtggttccattttaattctttgrgaaacctccaaactgctttccacagtgactgaactaatttacattccttctaaaagtatataaacatttccctttctctgcaacctcactagcatctgtaactttttgactttttcatagtagccattctgactggtgtgaaatggtatctcatttggttttcatttgaatttatctaataattagtgacaataaccccttttcctatgcttgttggatgtgtgtatttcttcttttgataagtgtgtgctca

SEQ ID NO: 270967 - DNA, 595 bp, Homo sapiens
gctcctttagctcagcaaagtttattattatccaccttctgaagcctacttctgtcaatttagccatctcagcctcagccctgttctgtgcccttcctggagagatgctgcaataatttggaggatataaggcactctggctttttgggttttcagggtttttgtgttgattctttctcatctttgtggggttaactaccttccatctttgaggctgctgaccctggaaaggagtttttgtgggatctttttgctgatgttgtttttgttgttttctgtttgtctgttttacttttaacagtcaagctattcttctgtaggactgctgccrttttctaggggtccactatggaccctagttgccttggtttttcatgtaccttgaagtattatcaatcagtgaaggctgcaaaacagcaaagattgcagcctgcttcttccttgagaagctcagtcccagggaagtacggacatgttgccagcccaaattgtatctaaaggaggtagctggagacctctgttgagaagtctcatccaatctggaagaatggtatcagggacctgctccaagaagcagtctggttttttttggtag

SEQ ID NO: 270968 - DNA, 491 bp, Homo sapiens
actggctggctggaattccaagccagtgtgtcttaacttgtgaggtrttgtggaagtggggcctgcagaatgatgctgctcagctccctggatttagctcccctcttaggggatgtagggacagatctcttaccttgtcagaaatcctggggccacagtatgcaaaactcctgggtctctgtgtgtgccccagtggctgctctgcagggacttcacacagctctctgtatcagacccaaggccttggtggtatgggcttagaaggggatccctgatctgctggttgcaaagatctgtgggagaagcatgatttcccaggtggaatcacacaatcactcaccacttcccttggctgggggtggtggttcctttggctctatgccactcctaggtgggccatcaccccatcctgcttttcttcattctctgtgggtcgagatgtttgcctagtcaatcccaatgtgagaatctggatatttcagttgaaggtg

SEQ ID NO: 270969 - DNA, 517 bp, Homo sapiens
ctctctgtatcagacccaaggccttggtggtatgggcttagaaggggatccctgatctgctggttgcaaagatctgtgggagaagcatgatttcccaggtggaatcacacaatcactcaccacttcccttggctgggggtggtggttcctttggctctatgccactcctaggtgggccatcaccccatcctgcttttcttcattctctgtgggtcgagatgtttgcctagtcartcccaatgtgagaatctggatatttcagttgaaggtgctgaattcacttgccattttcttttctctccatgagtgttgcaaactgtagctgcttttaattggccatcttggcccagtcctagactttcttttataatgtcctcagtttatagatgagataataaaggccagagagataagtattttgttgagacttcctttgttgggaacatctttgcacctcttctcagcctagcaagcacccactcattcttcaaggcacagctcaaatgtccctttgtct

SEQ ID NO: 270970 - DNA, 517 bp, Homo sapiens
ctctctgtatcagacccaaggccttggtggtatgggcttagaaggggatccctgatctgctggttgcaaagatctgtgggagaagcatgatttcccaggtggaatcacacaatcactcaccacttcccttggctgggggtggtggttcctttggctctatgccactcctaggtgggccatcaccccatcctgcttttcttcattctctgtgggtcgagatgtttgcctagtcaatcccaatgtgagaatctggatatttcagttgaaggtgctgaattcacttgccattttcttttctctccatgagtgttgcaaactgtagctgcttttaattggccatcttggcccagtcctagactttcttttataatgtcctcagtttatagatgagawaataaaggccagagagataagtattttgttgagacttcctttgttgggaacatctttgcacctcttctcagcctagcaagcacccactcattcttcaaggcacagctcaaatgtccctttgtct

SEQ ID NO: 270971 - DNA, 517 bp, Homo sapiens
ctctctgtatcagacccaaggccttggtggtatgggcttagaaggggatccctgatctgctggttgcaaagatctgtgggagaagcatgatttcccaggtggaatcacacaatcactcaccacttcccttggctgggggtggtggttcctttggctctatgccactcctaggtgggccatcaccccatcctgcttttcttcattctctgtgggtcgagatgtttgcctagtcaatcccaatgtgagaatctggatatttcagttgaaggtgctgaattcacttgccattttcttttctctccatgagtgttgcaaactgtagctgcttttaattggccatcttggcccagtcctagactttcttttataatgtcctcagtttatagatgagataataaaggccmgagagataagtattttgttgagacttcctttgttgggaacatctttgcacctcttctcagcctagcaagcacccactcattcttcaaggcacagctcaaatgtccctttgtct

SEQ ID NO: 270972 - DNA, 517 bp, Homo sapiens
ctctctgtatcagacccaaggccttggtggtatgggcttagaaggggatccctgatctgctggttgcaaagatctgtgggagaagcatgatttcccaggtggaatcacacaatcactcaccacttcccttggctgggggtggtggttcctttggctctatgccactcctaggtgggccatcaccccatcctgcttttcttcattctctgtgggtcgagatgtttgcctagtcaatcccaatgtgagaatctggatatttcagttgaaggtgctgaattcacttgccattttcttttctctccatgagtgttgcaaactgtagctgcttttaattggccatcttggcccagtcctagactttcttttataatgtcctcagtttatagatgagataataaaggccagagagataagtattttgttgagacttcctttgttgggaacatctttgcayctcttctcagcctagcaagcacccactcattcttcaaggcacagctcaaatgtccctttgtct

SEQ ID NO: 270973 - DNA, 536 bp, Homo sapiens
tgacaaatcactttcattcactatctatggcaagaactgctgacatggtctcactcatatatgagagaagttcacaaaatttagtttatctgcacttaacaagaagagaaaaatgggtttggtgagcatttagccagactctgctacattttctaggctttgtctctgtttgatcttttcatctttagatagatgtattagtcaggattttccagagatggaatcaatatgatgggtggatagatagatgaacagatagataggtaggtgggtaggtaagtakgtaggcagacagatagatgacagataggagatttattaggggatttgctcttgtcattatgaaggttgaggagtcccatgataggctattttcaagctagagaaccagggcagctgtagcatagcttagtccaagtctaaatgcctcagaaccagagaaggtaatggtgtaattctcagtctgaggctgaaggcctgagaatccaggatggggagcaggggaatggcgcaagttgtgaagttcaaaggccaga

SEQ ID NO: 270974 - DNA, 586 bp, Homo sapiens
agcaatgaataatccaaattttcttctttatgacttccattatttctccttataaaggctgcagagattcagtttcagattcaacaaatatcattcggagtccactatcatggcaggttgttacaaggaattgccatatacattaggctatttaatatagaaacaagcattgtagagccagctttaagatgagaaatctgaggcccaggaattgactaagcatacacagaggtaatctgtagagtcagcattcccatttgctcctgtgatggattcacttacatatctaactgagctgattcttccaccagcaaacattttatatctttttgttgcccagttattttcttaattcctttmtcctttatattttccctcccaacttcttatatagttatctctcaactaaaacacctcatcctgtctgtgttcttattcatgtctattatgaacaagactaatgctagcaatatatttgtatcaagaaaaagtatgttgttttgtaaagaaatcagaaataccaatattgaactggtgatatcaattttaaagttcctaccaaagtccagagtacctgcaaattttc

SEQ ID NO: 270975 - DNA, 248 bp, Homo sapiens
ctaattctattcatgaggcagatcccttataaccttgtcrccacacaaaggccccaccttttaataccatcactttagggttagatttcaacaaataaattttgaggagaaacatttaaatcatagtactctgcccatggcctcccaaaatttatgtccttctcatatgcaaactatattaattccatcccaatagcatcaaaagtattcacttgttctagcatcaactcaaaatttaaagttcaaag

SEQ ID NO: 270976 - DNA, 581 bp, Homo sapiens
aaaactgtactgtcatacttggatgtagatgaaacctagaaatgctaggaatcttcaaacctgagagaagtatatttcttatgcccttttttgagtatgtttctattaagagctgtattttgtgacatgtggtgagacattaattgccatctactacgtgtttccttagcaccctgctctaaacagcattctacagtaagggatggcttgttaataaaggttaccagttgatattaatgctaaatattgcctcatttatactattcctactaacccaagtatgtggatatggggagaggggatgtgctttttaattaaatagtcaagaacagaaaacactgagctctatgagaaaggtaaaagaaaaaataggaatagctgctattctagcatctaatatgttactaagtcagtaaaatacatgatttctcctcttatttgcrtaacttaaataactgaggtaatttggtatctggaaacattgcagctccctctcttttcattctttggccagctgaattaactaattgatatggttaggctttgtgtccccaccaaaatctcatcttgaattgtaatcc

SEQ ID NO: 270977 - DNA, 604 bp, Homo sapiens
atctaatggttttataaggggctcttcccactttgcttggcacttccccttcctgctgccttgtgaagaaggggcctgcttccccttcaccttctgccatgattctaagttccctgaggcttccctagtcatgctgaactgtragtcaattaaacctctttcctttataaattatcctctcaggcagttctttgtagcaatacaaaaacgaactaatacactgatgaatatagttttccatttaccctggataagacctcagaatccatcttaacacagcatgtcagaaagccatgccaaatagatgattaccactctgtgagccctagttgccaactctgtcatagattattgatctgaggagagaaggagaaagaagtttcacagatacaacatttggcattcctgaaataggccttgctatttgcccaacatataactaagacgtgaaattctagtaggtctgaggaaatagtggcacctgttggtgccattccagaccaagacatagacttcattcaggcttggatgataaatggtctattgcagataaagatatgtatttcaaacaaagcgttttttatttactgaaattattaaattt

SEQ ID NO: 270978 - DNA, 604 bp, Homo sapiens
atctaatggttttataaggggctcttcccactttgcttggcacttccccttcctgctgccttgtgaagaaggggcctgcttccccttcaccttctgccatgattctaagttccctgaggcttccctagtcatgctgaactgtaagtcaattaaacctctttcctttataaattatcctctcaggcagttctttgtagcaatacaaaaackaactaatacactgatgaatatagttttccatttaccctggataagacctcagaatccatcttaacacagcatgtcagaaagccatgccaaatagatgattaccactctgtgagccctagttgccaactctgtcatagattattgatctgaggagagaaggagaaagaagtttcacagatacaacatttggcattcctgaaataggccttgctatttgcccaacatataactaagacgtgaaattctagtaggtctgaggaaatagtggcacctgttggtgccattccagaccaagacatagacttcattcaggcttggatgataaatggtctattgcagataaagatatgtatttcaaacaaagcgttttttatttactgaaattattaaattt

SEQ ID NO: 270979 - DNA, 601 bp, Homo sapiens
attaattctcagcttcagtttatcaagccccttttcaattgtggctttttcccccttcagactttggaatttagcaactaggatagcctttgaaaacagaaaaaagcacaatagatattgatggatcacttgatagactgtatcctctaggcctagagtctatgattttatgattgattgatgtgctaggtttctttttgttttttcctcatgggttcccaacatctgattattaaattacacagagagagccattaagcatgtttgtaaagcccacattcttaatatctctgctccttttttttaaaagagacttaatggaaaacctaatataaacacctgaactgtgcattctttcatgagaggaaracatatttcataactccttatatactaaaaacacaatatattggccaaacatgtggaagacacacacacacacacacacacacacacacacacacacacacacactttgcctatttttgtattttatatatttactttcttatactttacatgttctgtgtaaatgaactagatatgtaacacattgagctatgtatatatagtagattgaatgtctgtgatgtcttaggaa

SEQ ID NO: 270980 - DNA, 598 bp, Homo sapiens
aaatgttggttaaattctgtaccataatgactcccttaatgcttaatttagaatttgctttgttcactcatttattcatttattatttttttctagcaactcaatgcatattgggaatgagcacccttccttaaggacacggcaaggaacacagacgctagggcctaggctttgtgggacttactatctaatcccctttccactcaaacactgattgtttggggattgtgatcgcttactccttgatgataaagaccataagcctaaattayggaaaaaataggaaactacagagaaagaaaatggagaagaaagtcatgtcttatttttttcatctgaatttaaccaaggtaatgcctcctgctatattccttcatgcattctcttatagttccaaacgcttattcatagatagttttacaaatgtaaatagttttataccatatatactggcttttaaaaatcctatcagaatatattgaataactttctacttgtttcccttatattttgaaccattatagacatatataagtagtccgtggagtgacaacataagccaccccccacaaagttttagaaaaaaatgaaaatattt

SEQ ID NO: 270981 - DNA, 623 bp, Homo sapiens
ttttgctctccttactgcaaaagtaaaccataattcaattaacttttcaaatatcaagccatttggactagaattaataatgtggtatcataaggataaataagttctgacaagagttctgttctttaatccttcaaaacaagtaaataatcaaaaaggggagatgaagcttagcagaggctgacaggaatttttgaacatatcacaaacacaaggaaagtctatagtgtttcaagttactctctattgatttctcttttgtcctttccatcaaagaaggctcatgttcattacgatgtgctctagacttggaataggatgtccctgacagctgctagcagggatcctgggatgtgtcagaagatatccagtttcctttgaaactggacattctgaagagaagctgctgttgtttttgatrttaaaagcacaaatgcaaaaatggtccaaatttcttaaggtcttactagtgtggtaggatatatctgtgagatgagtctcaaaacatgcatggctttggccatacagcatgattttagccttcatcagattaatatgtgaaaagccaggccctcagttattttctctggattgccaaaaatcctatattatcttatatttgt

SEQ ID NO: 270982 - DNA, 603 bp, Homo sapiens
caaaacctctgtccttatagagcttgcattccacttgtagttaacaaaaaataattcactgatttagcaatacagcagaaataggaggatcagtaacacaagggattctggagcaggtttgagtatgaatagggttgtctgggtggacctaattaagagaggtaagctttgaacaaagatttagagggatagagacctcataagagacctcagcccaggaggatcacctctaaactggaatctcctgtagcaaggaccccaggaaatcaacctgaatagctgagcaaacgcagcaaacattcctggcaccgtttgttaagttctcctagtaccagtagcctgcagaaatggcatccataaaatattctaatagtatagccatctccaagatgaatctggtctatgcattttaaagataasaaaatgtttccatcaccatggtgctttgaaattatttttaaagatcaaggaaattggccaatttggatgtgtttaaaatggaacatatttacatcaccttatatattacccaccctttaacaatgcattctgtgcctataccaggggtacagttgtgtccccaccaccttgtggaataaacgg

SEQ ID NO: 270983 - DNA, 562 bp, Homo sapiens
actcactgagtaaattttccttttttttttttttttttgagaaacaaggctgtttatttcacctgggtgcaggcgggctgagtcggaaaagagagtcagcgaaggggagataggggtggggccgttttataagawttgggtaggtaaaggaaaaaggggggttgttctctggcaggcaggagtgggggtcacaaggtgttcagtgggagagttttttgagccaggaaaaggaatttcacaaggtaatgtcatcagttaaggcaaggactggccattttcacttcttttgtggtggaatgtcatcagttaaggcaggaacaggccatttaaatatcacgtcttttgtgattcttcagttacttcaggccatctggatgtataggtgcaggtgacaggggatatgatggcttagcttgggctcagaggcctgacattcctgtctttttatattaataagaaaaataaaacataatagtgttgaagtgttggggcggcaaaaattttgggggtggtatggagagataatgggagatgtttctcagggctgctatgagcgagatta

SEQ ID NO: 270984 - DNA, 638 bp, Homo sapiens
tctttatgtttccataaactctcttatcacagagccaccagtagagcatgggaaactgaaaaataagttccaattagagactgtgttggtccactcagggtgatatggctcccagtgtttttagagagggaaagagcataaaagaagaaggctgtgtgccccagcttgcccctgaaggagctgtgaccactatggtggcatggggwaatgtcactcattagctggcttgcctcctagcctagaatttgttcttaccttctctgtcttctcctaagccatccctttctctgagcaaatccaatgccttagagcaccaccaatgtattcacgtgtacaattaattttaatgtcacatgtataaccataactccgtgtggtgactcacagtgcccgcattatcctctttgccaagtaaatggtaaaacactgaacgaccctctaattgatctctggggtcacaacaagacctgacaacgggactcaccaggcacaagaacatgatggagaagtctgaaaacagaaaatggagaggaatcggggagaaaatccgctgagttcattttcactcccataatgaaaagaaatctggttcagcctggaggattacaaaataggacaagaccaaggtgaccccagct

SEQ ID NO: 270985 - DNA, 638 bp, Homo sapiens
tctttatgtttccataaactctcttatcacagagccaccagtagagcatgggaaactgaaaaataagttccaattagagactgtgttggtccactcagggtgatatggctcccagtgtttttagagagggaaagagcataaaagaagaaggctgtgtgccccagcttgcccctgaaggagctgtgaccactatggtggcatggggaaatgtcactcattagcyggcttgcctcctagcctagaatttgttcttaccttctctgtcttctcctaagccatccctttctctgagcaaatccaatgccttagagcaccaccaatgtattcacgtgtacaattaattttaatgtcacatgtataaccataactccgtgtggtgactcacagtgcccgcattatcctctttgccaagtaaatggtaaaacactgaacgaccctctaattgatctctggggtcacaacaagacctgacaacgggactcaccaggcacaagaacatgatggagaagtctgaaaacagaaaatggagaggaatcggggagaaaatccgctgagttcattttcactcccataatgaaaagaaatctggttcagcctggaggattacaaaataggacaagaccaaggtgaccccagct

SEQ ID NO: 270986 - DNA, 638 bp, Homo sapiens
tctttatgtttccataaactctcttatcacagagccaccagtagagcatgggaaactgaaaaataagttccaattagagactgtgttggtccactcagggtgatatggctcccagtgtttttagagagggaaagagcataaaagaagaaggctgtgtgccccagcttgcccctgaaggagctgtgaccactatggtggcatggggaaatgtcactcattagctggcttgcctcctagcctagaatttgttcttaccttctctgtcttctcctaagccatccctttctctgagcaaatccaatgccttagagcaccaccaatgtattcacgtgtacaattaattttaatgtcacatgtataaccataactccgtgtggtgactcacagtgcccgcattatcctctttgccaagtaaatggtaaaacactgaacgaccctctaattgatctctggggtcacaacaagacctgacaacgggactcaccaggcacaagaacatgatggagaagtctgaaaacagaaaatggagaggaatyggggagaaaatccgctgagttcattttcactcccataatgaaaagaaatctggttcagcctggaggattacaaaataggacaagaccaaggtgaccccagct

SEQ ID NO: 270987 - DNA, 571 bp, Homo sapiens
ttactcactaaccacgtttgagtctatatgggtcagatatcctattttgatacagatacaaaagcaaacaggaaatacaatgcctctgcctgcatgatagttgtattataatacagcttacaaaatatttccattatttttccaatagaaagacattctcagagaaatctcacaacttactgcattgaatattatgaggttgatcaataagcaaagggcacttagatttctcactttccagttaatattgaaacagaaggtattagaggaaatggagactttcctttttttttcttttggccatacatttatatatatatatatttttttcttccacttttattttaagttcagtgtatgtgcgcaggatgtgcaggtttgttacayaggtaaacatgtgccatggtggtttgctgcacagatcatcccatcacctagggattaagctcagcagccattagttattcttcctggggcttgccctcccctcacctacacccctcgagaggccccagtgtgtgttgttccccttgatgtgtccatgtgttctcaaagttcagctcccacttgt

SEQ ID NO: 270988 - DNA, 610 bp, Homo sapiens
cctccctgtttctcattgtggttgctatttattgtttttctctgggtaatggagtatgaggaaagaaataaacattttaaaarggtcgtgatgctccttttgtctgtgatctctttattatctttgggagtagaactggatgttccaagggaagtttttccaccatcttaattagggtgtctgaagttcaaaaccaacaataatcttattacttgttattttttagtaaccacaggagaaaaaattagaggatccttggctctaaactcacactgttaaggccgtcaacattttgatctttttatttttatttgtataataaagttattagaccagggtttctacgaatgtcatatgtacaacaaaaaggcaaactgaattcccctagggatacatttggatcctctgagaagctgagttactaactgcttcaataaatgacaactagaaatacaggctagttagtctgtttattactgtagtaaaggatagatcacagctaaaaatgacatggctaggaaaaattttaaattccctattgataaggaaaaaaatagacattgaaacagttaaagcttaatgaagaccttgacaaagagccgttgttaaa

SEQ ID NO: 270989 - DNA, 430 bp, Homo sapiens
agaatactgagttatttgtttgtacattctatgttgctgctaaacaaatcatccaaaacttagtgacttaaaaagaaatactttactatggcctctcatggctttgtgggttgactgggctcaactagatggtgtttgcttgggctttcttttgcatagctggggctgtagtcatcygaaagctctactgagcagaacatccaaaatggcatcattattctcacgtgtagcacctgaactaagatggtttaattagcaggagcctagctgggtatctctctttctctctctcttcctccttccatgtggcctgtccacatgaaacctgagattccttacagcatggcggtgggaggcttgtcagactctttatatggtggctgttatcctccagactgagctataaggtttcttatgtcctgccctcaga

SEQ ID NO: 270990 - DNA, 620 bp, Homo sapiens
gttgggagggttttttccccctgtgcatatatctatacgtggttcatataatttgtgccattgctcacctgtcaaacattaagcttcattcatttagtcatccattcattcaagcaatcactaatatctggtttaagccacacactatattaggtaatgagaaaggacacacataatccctgtatttaatgaactcakaatatgttgcataagaaaaaaaaagctagagagcagcgtgatgcgttgacatggcaactgtatcaaaccccccctgtttaggacatggatgaagtaagggatcaggagagcatggcctgaggattgacaaccacaaagacagaaacaaacagctaatctgggtagctcttttagacagaggacaaacaacacagaaaaaacataattttaaaattatgggtatttggcaggcttggagtatagggttcatatgagtaagttgcagatgaaatcaacctactactttgtactcaaaatttggtccatgaacctgcaccatcaatagcccctgggatttctttgggaatgcatagtctcaggcttccctgcagacctgctgaatctgaatcgcattttgaccatatcctaggtgatttgcatgt

SEQ ID NO: 270991 - DNA, 610 bp, Homo sapiens
tttaatgaactcagaatatgttgcataagaaaaaaaaagctagagagcagcgtgatgcgttgacatggcaactgtatcaaaccccccctgtttaggacatggatgaagtaagggatcaggagagcatggcctgaggattgacaaccacaaagacagaaacaaacagctaatctgggtagctcttttagacagaggacaaacaacacasaaaaaacataattttaaaattatgggtatttggcaggcttggagtatagggttcatatgagtaagttgcagatgaaatcaacctactactttgtactcaaaatttggtccatgaacctgcaccatcaatagcccctgggatttctttgggaatgcatagtctcaggcttccctgcagacctgctgaatctgaatcgcattttgaccatatcctaggtgatttgcatgtatgttagagtttgagaagcactggactagggcacccaaaatctgacatattagttggaaaatgatgaaaaaattttaaaaagcttccagtccctggcacacaaaaacctgccaggaggcaactgcagctgaagatcctgagaattctgagaattcttatttatctgtcctgtgc

SEQ ID NO: 270992 - DNA, 610 bp, Homo sapiens
tttaatgaactcagaatatgttgcataagaaaaaaaaagctagagagcagcgtgatgcgttgacatggcaactgtatcaaaccccccctgtttaggacatggatgaagtaagggatcaggagagcatggcctgaggattgacaaccacaaagacagaaacaaacagctaatctgggtagctcttttagacagaggacaaacaacacagaaaaaacataattttaaaattatgggtattwggcaggcttggagtatagggttcatatgagtaagttgcagatgaaatcaacctactactttgtactcaaaatttggtccatgaacctgcaccatcaatagcccctgggatttctttgggaatgcatagtctcaggcttccctgcagacctgctgaatctgaatcgcattttgaccatatcctaggtgatttgcatgtatgttagagtttgagaagcactggactagggcacccaaaatctgacatattagttggaaaatgatgaaaaaattttaaaaagcttccagtccctggcacacaaaaacctgccaggaggcaactgcagctgaagatcctgagaattctgagaattcttatttatctgtcctgtgc

SEQ ID NO: 270993 - DNA, 568 bp, Homo sapiens
acatgtttccctcattagttaaggtgtctagtaagatactattttgacagtaagtttttaatcttcgtaatttttttaacccatcgttcttctccattcaaaagagacaatgaaggatctactgcctcaggttagattatttaccacagagcccagaaaacaagtcagttctagtcttttgagtatcaagatggaatatgctttgggagttaaggaacataaacattaatcttcaaaattctgagccacaaagaattggaggcacaaaccttaggctattggtggtaggttggaatgaagagataaaaagtcaagcaaccttgtttctagattaggtaaaaagtcatgggtggtatggagaagagagtcaggacaccaaagggaggacttggatgattgtgagtcctggataagataccctatatcctggattctagactgaggcttagtactccatagatttgtgagagaagccctggtccttatctcctgggttgcttcaggtttccaggagctcttaataggaarggagagttcttggtgtccccaggtacacaagggcagtagg

SEQ ID NO: 270994 - DNA, 530 bp, Homo sapiens
agaagccctggtccttatctcctgggttgcttcaggtttccaggagctcttaataggaagggagagttcttggtgtccccaggtacacaagggcagtaggatgctctgaaattccaaaaagagaaaaatgataaaatggatgaggtattagtcagagttctctagagaaatagaaccaatagaatagctacctatctatctatctatccatccgtmttctctccctcatctatctatccatccatcttctctctctcatctatctatccatccatccatccatcttctctctctcatctatctatctatctatctatctatctatctatctatctatctatctatctatctatctttctctccctcttatatatatataagagagaattctcagtccaagtttacagacccaagaattaggagctttgatgtctgagggtaggaaaatttagatgtcccaattcaagcaaagagcaaatttgtccttccttggtcttttgttctattctgaccctcagaatggatgatgc

SEQ ID NO: 270995 - DNA, 530 bp, Homo sapiens
agaagccctggtccttatctcctgggttgcttcaggtttccaggagctcttaataggaagggagagttcttggtgtccccaggtacacaagggcagtaggatgctctgaaattccaaaaagagaaaaatgataaaatggatgaggtattagtcagagttctctagagaaatagaaccaatagaatagctacctatctatctatctatccatccgtattctctccctcatctatctatccatccatcttctctctctcatctatctatccatccatccatccatcttctctctctcatctatctatctatctatctatctatctatctatctatctatctatctatctatctatctttctctccctcttatatatatataagagagaattctcagtccaagtttacagacccaagaattaggagctttgatgtctgagggtaggaaaatttagatgtcccaattcaagcaaagagcaaatttgtccttccttggtcttttgttctattytgaccctcagaatggatgatgc
